United States Patent Application Publication US 2008/0066201 A1 - sequence listing, part 7

SEQ ID NO: 42093 - DNA, 341 bp, Glycine max
  Clone ID: LIB3139-041-P1-N1-C10
agcctatccagtgtgttggcagcgaaagggtgagacgggaggcttcacctgtaatcagacaattgtggtcaatgcgagagtcataccattacaatgcaagtaaatgaaggacacaacagaccttgctcagacccatttttacagtggagtaaatggcagttgcttgattctcttttacctactggtggatttgctcattcttttggcctcgaagcaacagttcagtcccacttagtgtctaattccaatgaccttaagacatttgttatccatatattggagaatacaggaagcttactccttccttttgtgtactcagcttccatgttacccaatttgga

SEQ ID NO: 42094 - DNA, 342 bp, Glycine max
  Clone ID: LIB3139-041-P1-N1-C11
actattcttttatctcgatggacacagaattccgcggtgttgttttccgaccacaccgggaccccacaaaaccctacaaccaccgcaacaacaatcgcaaccgccactccgaccactaccgcctcctcaagtccaacgtcgacgctctcaacctcatccaggtcggcctcactctcaccgacgccgccggcaaccttcccgatctcgccggaaaccgctccatctgggaattcaacttccgtgacttcgacgttgcgcgtgacgcctacgcgctggactccatcgatctcctccgccgtcaaggaatcgatttcgcgcgtaacgccaccgacggcgtagagt

SEQ ID NO: 42095 - DNA, 353 bp, Glycine max
  Clone ID: LIB3139-041-P1-N1-C2
atgctatggtgtatgatagttcagtgtctacaataccatacaaatatggacacccatcagccaacagagttgttgcaggacgcacctgagttgactgatgggtgtccatatttgtatgctatggtgcatgatagttcagtgtctacaataccaggtgattttgtcattggtgttaagttgacaaccataaacaatatgtgtgcatatgggcttaatcctggtatttcaggttctcgtcttttgggcaccattcctcagtccatttcacagtaaactgtttggaatcaaatggcaacagtgagaacaccattgaattttgattctagcaagcagagcttttgtcaattttttat

SEQ ID NO: 42096 - DNA, 352 bp, Glycine max
  Clone ID: LIB3139-041-P1-N1-C3
actctccattttaaaacaaaaaataaaaatgatatcttcctcgatggctctgtcttcccctgtttcactctttcaactttgcatgcttctcttttcattcttcttctccacttccttctccgccaaacttaaccctaccatcgattcactctcactctctttcccactcacctcactccctctctccacagcaaaacctctaaacagaaacccaaatctcagaaccctttcttcttcttcttcctacaacataaaatcttcgttcaaatactccatggccctggtggttactctaccaataggaacccctccacagcatcaacaaatggtgttggacacaggaagccaactc

SEQ ID NO: 42097 - DNA, 343 bp, Glycine max
  Clone ID: LIB3139-041-P1-N1-C4
cgaaaatttctagcggcgcctcaccgcaactgcaaatgaggttgaagtcctctttcatcggagatcgtctcttacgctgttcaacttcaaggcaccaacctcttcctcaactattccgttacaaccctggaaccaagcatgtttcgatgcagttatctagaacactttctggcttgaccaatctcttttttaatagaagaaatttggatgaattgcctaacagcaagcgtaaacgtctgagacctgggaaagtttctccgcggcgacaggtgccgaagaatataccgaggcctccgtatgtgaattctatgattcctccagggattgccagtggagctgaagt

SEQ ID NO: 42098 - DNA, 357 bp, Glycine max
  Clone ID: LIB3139-041-P1-N1-C5
ggaattcggcttgggacccgcgttttcaggttgccgcaccttaaaaccgggagcgaaagcaatcgttacttgatgtcaagaatttctcaatttcttcctacttctttgtgtacgatttcttaagggaaagaaaatcactctctgtgctggtcacagacttcgtgaatcattttcttttccactcctagtttatttgctgaacactctcctatttgatataggacttcgtgtcagatttaaactttttctgtttctttctcagttctctgtttaatttcaagttcaagctggtgaaattttggattagtgctcccactctcctatctggtataggacttcgtgggtagacttttctac

SEQ ID NO: 42099 - DNA, 346 bp, Glycine max
  Clone ID: LIB3139-041-P1-N1-C7
atttaatttcattggcacaattgggactccagcttttcatcgacaaattgctgcacacttggagaaaatgccattgtggcaaaaagcaattttgtgtggaatgggacattgtttgtctcggaaaagcaaagaaacatggtattctgggatgaaggaaaaatttgtacaaatgatgaagagcatctatgaaacagaagttacagattggccagtaccactgaaaatcatttctggaaccattcttgcaacaattttgggaacaaccttctggaaactcttttcctttcttagagatgctggtaatgggggagtttttgttggcaatgttgcttcagcattcacgact

SEQ ID NO: 42100 - DNA, 338 bp, Glycine max
  Clone ID: LIB3139-041-P1-N1-C9
cagcgacagcggctccaccagatcggtgtgacgcatgaagatctcgcgcacctgccgcgacaccgccttgtaacgcgtgacatataaaaatttgcattaatctctaaaactccgaacctataaaaaaaaaaaaaaaaaaaaaaaaaaaaaaaaaaaaaaaaaaaaaaaaaaaaaaaaaaaaaaaaaaaaaaaaaaaaaaaaaaaaaataaaaaaaaaaaaaaaaaataaaaaaaaaggggggggccccccctttgggagttcttctccccgggaataaatttgggcccggtccctgggggggtcccactttttcttattggggggtgtattaaagctt

SEQ ID NO: 42101 - DNA, 340 bp, Glycine max
  Clone ID: LIB3139-041-P1-N1-D10
caagaatacagttggaggaaccattctgcgtagggggctattgtcaaatttttggacagagggcaattttagagcaagtgttgatttgcagcgcactcatcgtattagaggaatgattaaaatggtggccacagttggtattcctgagaatacaggtatatcattggcctgtgctatgaatagttcttttagggggcgcgccagttctgatatttacaccatctgctctcaagactgtgaattgtggaatcctgcttgcacaaaagcaatgactatgtcatttaatccaaacccgtgttctgatgcatggagtttggaatttctgaagcgtactggattt

SEQ ID NO: 42102 - DNA, 341 bp, Glycine max
  Clone ID: LIB3139-041-P1-N1-D11
tttgattaccaagcaagttatgagcaagatggcagaaatgataaacagtctttgtggtggtgatgaaaaattgatgcgtgaaaggacacacctgctgttggcttgttgttcaaggatggcaatttgtaagaaagatgtttggagagttgaatgtggaatcccttctggatttccgctcacagttatttgtaatagcatttttaatgagatgctcattagatatagctatgaaaaattactgcgccaggctaaagctccaagtatgtttttacaatccttcaaaaattttgtttctttgtgtgtgtatggtgatgataacttaattagtgttcatgaatatg

SEQ ID NO: 42103 - DNA, 342 bp, Glycine max
  Clone ID: LIB3139-041-P1-N1-D12
gtacagtttctttcttcatagcatttggaaatttgggtgatgacaccatcaattttgaggcttttccccacaagctggtgcagtttggagagattcaggaaaaagttgtattgaaattttcacaagaggaatttcttacagcttggtcaactcaggtgcgtcctgcaacaactctgttggctgatgggtgtccatatttgtatgctatggtgcatgatagttcagtgtctacaataccaggtgattttgtcattggtgttaagttgacaaccataaacaatatgtgtgcatatgggcttaatcctggtatttcaggttctcgtcttttgggcaccattcctc

SEQ ID NO: 42104 - DNA, 353 bp, Glycine max
  Clone ID: LIB3139-041-P1-N1-D2
ccgatttcgtttctcctccgaaaaaccctaatttcccctgcgctcttccccatgaccacggcgtagctcatttcccccactccgaaaatgtcgctccagggcagcgccagcggaaacggcaccgtggcggcggcgtcgacggcgagcctgaggctgcggctgaaccctaacaaggagcacaagcccgatggctacgaggacatgcaattggatttcagccctaacattttcagctcgctggagaggtacctccctccgagcatgctcaacgtgacgcgtgacgagaaggccaagttcatgcgcgagattctcctcaagtatctgcccctcggggaacgcaacagagcacaaaa

SEQ ID NO: 42105 - DNA, 338 bp, Glycine max
  Clone ID: LIB3139-041-P1-N1-D3
gtctgtctagatctcattcatgatcggtgataattgttgaagagagagagacagagagagagagagaggatgggttgttgccaatcatcgatgttgctgagagtgggagagagggagactcaccctgaaaaggagaaggaaagggaaaaggaaaaagagcaagcgtacggaaaccaccagaggcagtctgagggaggagagggcgactgcgagaaagaggtggttgatttctcgttctcggagttctcgctggcggagctgaaggcggccaccaacaatttcagctcttagtatatcgtgtcagagagtggggagaaggcacccaatctggtgtacaa

SEQ ID NO: 42106 - DNA, 346 bp, Glycine max
  Clone ID: LIB3139-041-P1-N1-D4
ctgacttttccccagggcacttcccgaagtgttaagagaatgcctctttctatagggggaggagctggtgcaaagaatgctattctcatgaatatgccaaatgctgttctttcaatgtggagatattttgttggagatctcgtctttgaagtttctaagatgacttctccctacattaaatgtacagtctctttcttcatagcatttggaaatttggctgatgacaccatcaattttgaggcttttccccacaagctggtgcagtttggagagattcaggaaaaagttgtattgaaattttcacaagaggaatttcttacagcttggtcaactcaggtgcgtcctg

SEQ ID NO: 42107 - DNA, 288 bp, Glycine max
  Clone ID: LIB3139-041-P1-N1-D5
gttaagttgacaaccataaacaatatgtgtgcatatgggctcaatcctggtatttcaggtgtctcgtcttttgggcaccattcctcagtctatttcacagcaaactgtttggaatcaaatggcaacagtgagaacaccattgaattttgattctagcaagcagagcttttgtcaattttctattgaccttctcggtggaggaattttagtggacaaaactggagattggatcacacttatacaaaattctccaatttgtaacttgttgagaggtgctgcttggaagaa

SEQ ID NO: 42108 - DNA, 345 bp, Glycine max
  Clone ID: LIB3139-041-P1-N1-D7
gggaaattctctttctcttcttctctgattttataagtgaattaaaatggtctgagattcttgcccccctcttaaggaacctgaatcagataaaaaatgggaggaaaagggtccccctcgcaatgccaaatggtggtactcaacttttcacgctgtgacagccatgattggtgcaggtgttctcagccttccctatgccatggcatatctaggatgggtgccagggaccttgattttgttgatgtcttggtgcctgactttaaattcaatgtggcaaatgatccaactccatgagtgtgtcccgggaaccaggtttgatcgttacattgatcttggaagacatgc

SEQ ID NO: 42109 - DNA, 349 bp, Glycine max
  Clone ID: LIB3139-041-P1-N1-D8
tgcaaaattctcttccgtttcaggattagggtttcacgcgttacagtgaaacatggcggaaccaaagcgaatctctctgcgtatctttgcgctgctcctcttgatttccacctcttcgtttcagcttctccgcgcttccgatgacgccgatgatgatgcgatcttctatgattcgttcgacgaggattttgaagaccgttgggttgtgtctcagaaagatgagtacagtggtgtctggaaacatgccaagagtgagggacatgatgattatgggcttcttgtcagtgagaaagcaaggaaatatgctatagtaaaagaacttgatgaggccgtgagtctcaaggatgaa

SEQ ID NO: 42110 - DNA, 345 bp, Glycine max
  Clone ID: LIB3139-041-P1-N1-D9
cttgacatcatctgtgacagggtgaaacccctagtggtctctaaagatgaaaagataatcagagaaggtgatcctgtaccaaggatggtgttcatcgtccgagggcgcataaaacgcaaccaaagccttagcaaaggcatggtagcctcaagcatccttgagccaggagggtttttgggtgacgagctgctttcatggtgccttcgcaggccgtttatcgatagacttccggcctcctcggctacatttgtgtgtcttgaatcatcagaagcctttggccttgatgccaatcacttgaggtacatcactgatcacttccggtacaaatttgcgaacgagaggctg

SEQ ID NO: 42111 - DNA, 343 bp, Glycine max
  Clone ID: LIB3139-041-P1-N1-E10
gactacatctgatgagagattggtaggcacagaacatgagggatatgatccttttcttggtggaattcaaaaatatgccactcccatgatgcccctagatgaagaaattctttctaaggttgcacaagatatggttgaggaatggtttgattgtgttgatgaggaggattcctttgaggaagtttctttaagtgcagcacttaatggtgttgagggtttggactatatggaaagaattcctcttgccacatctgagggttttcctcatgtgctttcacgcaaaaatggcgaaaaaggcaaaaggagatttgtctctggggatggtgaagagatgacattgatt

SEQ ID NO: 42112 - DNA, 344 bp, Glycine max
  Clone ID: LIB3139-041-P1-N1-E11
caaaactggagattggatcacacttatacaaaattctccaattagtaacttgttgagagttgctgcttggaagaaaggctgtttaatggtcaagattgtgatgtctgggaatgcagcagtcaaaaggagtgattgggcctcattggtacaagtgtttttaacaaacagcaacagtacagagcattttgatgcatgtaagtggacaaaatcagaaccacattcctgggaattgatcttcccaatagaggtatgtggtcctaataatggttttgaaatgtggagttctgagtgggcaaatcaaacttcatggcatttgagtttccttattgacaatcccaaacagt

SEQ ID NO: 42113 - DNA, 344 bp, Glycine max
  Clone ID: LIB3139-041-P1-N1-E12
ccaaatttctggctcttagtggctctgctgctggctggatccttattgtcgcctcatccttgttctggtatattggtcgcacgcaaaagaccaaaagcctacgagcaatccaacttccctcagatgaaaacgccaaactcatggcggaccatgtcccagcttcgttgtacttctccgatgtctcctacacactagagggtcggcagattctttcagaaatcgttggtggagcacaaccgggacaagttctagcgatcatgggcgcatcgggcgcaggaaagtctacccttctggacttgttggcccggaaacagaaacgtggcgcggtcactggccaaatactg

SEQ ID NO: 42114 - DNA, 349 bp, Glycine max
  Clone ID: LIB3139-041-P1-N1-E2
gatttgcagctcactcatcgtattaaaggaatgattaaaatggtggccacagttggtattcctgagaatacaggtatagcattggcctgtgctatgaatagttcttttagggggcgcgccagttctgatatttacaccatctgctctcaagactgtgaattatggaatcctgcttgcacaaaagcaatgactatgtcatttaatccaaacccgtgttctgatgcatggagtttggaatttctgaagcgtaccggatttcattgtgatatcatttgtgtcactggatggactgccaccccaatgcaggatgttcaggttacaattgattggtttatttcctctcaggaat

SEQ ID NO: 42115 - DNA, 345 bp, Glycine max
  Clone ID: LIB3139-041-P1-N1-E3
tctggtcattttttgggatctccatacgccggatctgctagaatacgcttgatccatatgggcctcctcgaccacttgtgggacgacaccgtcgccggcccaaggccggaaaacggtctcggcaagctccgaaaacaccacaccttcactttccgacctagctccggcaaggaaacggagggcgggagcgtgagatcgtacggagacgaatcgtcggaggaagcgacgagagtgacgcgtagtatcatgatcgtgaaaccgcccgggtaccagagtggatcgcctccggtttctcccgccggttctactactccgatttctccgttttccggaggaaaagattcg

SEQ ID NO: 42116 - DNA, 322 bp, Glycine max
  Clone ID: LIB3139-041-P1-N1-E4
gaagatgcattgtctcaatgttcgagaacagcacctgtttgatgtaattatctgaatttcaacttgtttttacgtgttagatgtagtcttgtagagatacttttagatattttattaattgttcagaatacgtcataggaaccagaggtgttgagtgttgatgttgtgaatgtgattgtgtaagaaaatgttgggtggtctcgtaatattttcttttagtgtgatgtttgttcgacttgtgatagttgcggatcagtgttctctatgtattcaacattttctttatttgctctgaatgagaattcatgacttttcattgtgt

SEQ ID NO: 42117 - DNA, 348 bp, Glycine max
  Clone ID: LIB3139-041-P1-N1-E5
gaagaaacgattatagaatgtgcacagccctaaagacgaattaccagcttagcgaggagatcggtcgcggtcgtttcggcaccatcttccgctgcttccacccactctccaacgaaccctacgcctgcaaactcatcgacaaatccctcctccatgactccaccgaccgcgactgcctccagaacgaacccaaattcatgaccctcctttcacctcacccaaacatccttcaaatcttccatgttttcgaggacgaccaatatctctccatagtaatggatctctgccaaccccacacgcttttcgaccgcatggtcgatggtcccatccaggagtcccaagccgccg

SEQ ID NO: 42118 - DNA, 347 bp, Glycine max
  Clone ID: LIB3139-041-P1-N1-E6
gcggctcgtgatgatttgggtaaaggtgctattgacaaagaagtggtggagaaggtgtgggaccgaattgctcctggtttagcttcccaatttgactcaccttattcagttccaactatcgcaccacgtcctttgcttattgttaatggtgcggaagatcctcggtgtcccgttgcaggcttggaaattccaagggcacaagcaagccaggcatatggacagtttgactgtttagataatttcaagattattacagaacctggagttggacaccaattaacgagacttcaagtgaaagaatcatcttattggtttgacaggttcttgaacccttagcccgtgccctt

SEQ ID NO: 42119 - DNA, 347 bp, Glycine max
  Clone ID: LIB3139-041-P1-N1-E7
caatttttacgacatggagaagatctggcatcacactttctacaacgagcttcgtgtggctcctgaggaacaccctgtgcttctcaccgaggcacctcttaatcctaaggctaatcgtgagaaaatgactcagatcatgtttgagaccttcaacacccctgctatgtatgtcgctatccaggccgtgctttccctttatgctagtggccgtacaactggtattgttctggactctggagatggtgtcagtcacacggttcctatctacgaaggttatgccctcccacatgcaatcctgcgtttggaccttgcagggcgtgatctcactgatgccctcatgaaaatct

SEQ ID NO: 42120 - DNA, 350 bp, Glycine max
  Clone ID: LIB3139-041-P1-N1-E8
ccgttttgtagcgaagagtgcaggcaagagcagattgagatagacgaagccaaagagaagaataggaacctttcttcatcgatgaaagctttaaggaacaaggagcagagaaataataataataaatccacgtcgccaaacaaggcgcaacaagactactcgttccgtacgggggcagttgcggcggcgtagggtacaagtacaacgtaggattcctcgagagaggaaccaacaaatgaacgaacggaactgagggcagtgttcccggaaaaggaaagaaaacatttttagaaaagaagaaaaaaaaagtgtgactgaaaaggaaagtaaacaaagggaagttaagttgc

SEQ ID NO: 42121 - DNA, 345 bp, Glycine max
  Clone ID: LIB3139-041-P1-N1-E9
cggctcgtgggaatatttacctggtggtgacattatgacattgttaatgagggaagatattctttctgaagatgttgctcgcttctacattgctgaaagcattcttgctattcactcaatacatcaacacaactatgtacatagggatattaaaccagataacctgatactggataaaaatggccatttgaagctttcagactttggcttatgtaagcctcttgatgataagtattcattcaattttattggaaaatgaagatcttactggtcaagaatcaactagtgaaactgaagcatattctgtctctccttggttgatgccaaaggagcgattacagcagt

SEQ ID NO: 42122 - DNA, 101 bp, Glycine max
  Clone ID: LIB3139-041-P1-N1-F1
gcaaagcgagctcagaattagaggcatttctatgaaagccgtcagacaaatccgctgttgcaagttgattctacaagttataagttgcaaaaatatgaacc

SEQ ID NO: 42123 - DNA, 341 bp, Glycine max
  Clone ID: LIB3139-041-P1-N1-F12
ctcgagcctcttctctctcctctctcttcgtctttcgctttctctctctttcagattgctgtctctctcatctttctctctccggaagggcaaaccctaaagaccgtttgcacccaccaaggatcgtagtggcgttcagatcgtggggttttcgttttgcggcgattagatcgattgtcatggatgatgatgtgttgaacatgcccaattggggttattacgaacccttcagagggggacatcttggccttcagctcatgcctggtatgactgaacgggacacaaagccatttttgcctggtcgggatcctgctatgttaatgggtgctaatggaactttt

SEQ ID NO: 42124 - DNA, 329 bp, Glycine max
  Clone ID: LIB3139-041-P1-N1-F2
cttggatgcccatatacttcagctcagtaagatttatgatatttagttgtgattgtcaaattataaaaatatttagaaatcaacacttagaaccatgtataaatggttttccattataggtgtaccgtgtggatctcaggcatgcggcatggtttagtgcagttccatgggctgtgatggctgtcacgggttactttgctggcttgtggtcggatatgatgatacaaagtggtacaagtgtcactttgactcgtaagattatgcagtccattggttttattggtcctggactctgcctcattggcttagcaacagcaaaaaacccctca

SEQ ID NO: 42125 - DNA, 347 bp, Glycine max
  Clone ID: LIB3139-041-P1-N1-F4
ctctctattattctcgttttcaatatgcagatcttcgtcaaaaccctaaccggtaaaacgattacgctagatgtcgagtcctccgacacaatcgataacgtgaaagctaaaatccaagacaaggaaggcattccaccggatcagcagcgtttgatcttcgccggtaaacaactcgaagacggcagaactctcgccgattacaatatccagaaagaatcgacgctccacctcgtcctccgccttcgcggtggcatgcaaatcttcgtcaaaaccctaaccggtaaaacgattacgctagaggtcgagtcctctgacaccatcgataacgtgaaagctaagatccagga

SEQ ID NO: 42126 - DNA, 348 bp, Glycine max
  Clone ID: LIB3139-041-P1-N1-F5
ccacaattcttatcgcgttctcttcggtcaattcctcgaatgttctaccttgagccgtgtccaacctcgttcagattcgcgtcgccgccgacgcaggcgacggcttcgactctccggcgaagcagaaagccgccaaccgcagcgcctacagcattcgcccctttctctacctccgccgcgccaaacagttcctcggcgccgccaagttcaagctcttcttagttctatttgctctctccgtcatcgttttcgtctcctccagactcagttcgtggatgggatggaaccctcaccaatcctcttcggtttcttccacttcaaggggtggttatactgtgcttataaaca

SEQ ID NO: 42127 - DNA, 348 bp, Glycine max
  Clone ID: LIB3139-041-P1-N1-F6
ttcagttctaaacaaaacccatcaaagtctttctccgtcagtgatcatatattcattgaggtctatacaaaatcctcaaaaactcttcctctctgccatgaccatggaatacagaaccttagaactcaacatcatatccgcaaaggacatcaagaatgttaatctcttctccaagatggacgtatacgccgccgtttcgctctccggtgaccctctccaccctcagggcgccaccacccacgtccacaaagacgccggcagcaaccccacgtggaactaccccgtgaaattctctgtcaacgaatcgctggcgaaggaaaatcgtttatctcttgagatcaagctcat

SEQ ID NO: 42128 - DNA, 333 bp, Glycine max
  Clone ID: LIB3139-041-P1-N1-F7
aaattgtctcttgatgatgttgaaactcctaaaggttccatgttggatcttaaaatttctcaatctaaaattgcacttcccaaaaacacagttggaggaaccattctgcgtagtgacctattggcaaattttttgacagagggcaattttagagcaagtgttgatttgcagcgcactcatcgtatcaaaggaatgattaaaatggtggccacagttggtattcctgagaatacaggtatagcattggcctgtgctatgaatagttcttttagggggcgtgccagttctgatatttacaccatctgctctcaagactgtgaattatggaatcct

SEQ ID NO: 42129 - DNA, 338 bp, Glycine max
  Clone ID: LIB3139-041-P1-N1-F8
ctcgtgctgttcacgttctccttcgtctctcctgacgttttttcttcttctttctgctttcttttgggcgccgttcctgtctctcctcacatttttcttctctcttctctctcctcggcgccccaccgcgcgacccctcctttccccctcccccttcgcctccgccgcgacacccaccttccccttccggacctccgtgcgacccccccccctccgccgtgttttagttgcaaagttttagagttggattggaagattgtgaacttagaaagatggtgaagttgactatgattgctcgtgttactgatggtcttcctctagctgaaggtctggatgat

SEQ ID NO: 42130 - DNA, 344 bp, Glycine max
  Clone ID: LIB3139-041-P1-N1-G10
ctcttcttctcttccggctagggttttagcgcagcttcttctagatttaaggaagatgggtaaggaaaaggttcacatcagtattgtggttattggccatgttgactctgggaagtccactaccactggccacctgatctacaagcttggaggcattgacaagcgtgttattgagagatttgagaaggaagctgctgagatgaacaagaggtctttcaagtatgcctgggtgcttgataagcttaaggctgagcgtgaaagaggaatcacaattgatattgccttgtggaagtttgaaaccaccaagtactattgcacagtcattgatgcccctggacacaggg

SEQ ID NO: 42131 - DNA, 346 bp, Glycine max
  Clone ID: LIB3139-041-P1-N1-G11
gtctgcattcatctatcaggatggaaagattctaattgaggttgatcatctacaagatgtccctggcccatacattcagataaagggtgctaataaagatgcagtagcagcagcaggttcaatgcttaaattggatggttcatatactactaagggatgtagctctgcttcagattcctcatcaagtagggtagtctctccaattgaaggagttattgaggaaatgcaatcaaagattagaaggcttgaaaggtggctagcgataaacacggttctatggacatttctgatgtctgcccttgttggttattcgctgtatcaaaggaagcgccaataatgatctttg

SEQ ID NO: 42132 - DNA, 246 bp, Glycine max
  Clone ID: LIB3139-041-P1-N1-G12
gaaaatggcattgttccgtgtgaatgtcaggcgttggattttaacctatgctatcctttacgtttgtgtattcgggaaaaactttggaaatgctgatgaggatgagtcagaggcacagacaggtggtggtggattcggggttgtggggggtggttttggcggtgctggggccggtgttggcagtggtggtgggttcggtgccggtggtggttctggtggttttggagccggtggtggtgggtttgg

SEQ ID NO: 42133 - DNA, 350 bp, Glycine max
  Clone ID: LIB3139-041-P1-N1-G2
gtcccttttcaaaccaagttccacagacaccaacaacgctgtagctctctcttctctgcggcaccgtcaccggcgatctacatctgaacccgatccagccaatagatctcagaaatccaaatggagaacctaatctctttggtcaacaaaatccagagagcttgcaccgccttaggcgaccacggagaaaacagtgcactccccacactatgggactctcttcccgccatcgccgtcgtcggaggccagagctcaggaaagtcctccgtcttggagagcgttgtcggcaaagatttcttacctcgtggatcaggcattgttacgcgacgacctctcgtgttgcagcttca

SEQ ID NO: 42134 - DNA, 348 bp, Glycine max
  Clone ID: LIB3139-041-P1-N1-G3
cttctccctacattaaatgtacagtctctttcttcatagcatttggaaatttggctgatgataccatcaattttgaggcttttccccacaagctggtgcagtttggagagattcaggaaaaagttgtattgaaattttcacaagaggaatttcttacagcttggtcaactcaggtgcgtcctgcaacaactctgttggctgatgggtgtccatatttgtatgcaatggtgcatgatagttcagtgtctacaataccaggtgattttgtcattggtgtcaagttgacaaccataaacaatatgtgtgcatatgggctcaatcctggtatttcaggttctcgtcttttgg

SEQ ID NO: 42135 - DNA, 349 bp, Glycine max
  Clone ID: LIB3139-041-P1-N1-G5
aagacccttgcacatagcttcaaagaaattaattaagatgggtcaccattcttgctgcaaccaacagaaggttaagagaggcctttggtcccccgaggaagatgagaagctcatcagatacattaccactcacggctatggttgctggagtgaagttccagagaaagctgggcttcaaaggtgtggtaagagttgtcgcctgagatggattaattatttgaggcctgatattagaagaggcaggtttacacctgaagaggagaagttaattataagtcttcacggggtcgttggcaacagatgggctcacattgcaagccacttaccaggtagaactgacaacgaaata

SEQ ID NO: 42136 - DNA, 348 bp, Glycine max
  Clone ID: LIB3139-041-P1-N1-G6
tacattcttccatcttttctcactgctgaaattaaatataagcggaatctgagtaatattcatatttccggcttattttacgacggcagatacaaattctggactaaacacgagaaaaatcttgctttgacagaagaggaaaagatggaagtgattagaaatagaggtattcctgctgatgttcttgcaaagcgagctcatgaatttgaaaaacatgttgctcatgaaagcctcaaggatcaaattcctgctgttgacaagttgtattctactaaggttaataagtttgcaaaaattatgaaccttagacaaagtgttgttggtgatcttaaacttcttactgatggg

SEQ ID NO: 42137 - DNA, 342 bp, Glycine max
  Clone ID: LIB3139-041-P1-N1-G7
ggaaattctgtcttctagtgcaagtgatttcagaactgcaatggtgagtaaaaatagcaaacctcaagctactgcaatgcatgtgggagctatagaaattatcattgatagtttcgcaagtcctgactgcaacatagttggtgcaatgcttttggttgatacttatcataccaatcctgaaaatgcagttcgtagtatttttgttgcgcctttcagaggcggaaggcccattcgggtggttacatttccgaataccattgtgcagattgaaccagacatgaattcaaggtttcagcttttgagtaccactaccaatggtgattttgttcaagggaaagatct

SEQ ID NO: 42138 - DNA, 325 bp, Glycine max
  Clone ID: LIB3139-041-P1-N1-G9
cgcaacttctggatagcacaaagaaaacccaacactgcctcaccaagagcgtgcaaagggcagagggaaaaagacgaatttgtgtcactgtaggcacaggattgcctgccttatgcattatcaagagccttcttgtacatggatatgctgttaataccactataagatctgacccacgacgcaagagagatgttagctttcttacagacctacctggtgcatcagagaacgccaaaatattcaacgcttatctcagcgacccatagagtattggttcatcacctgaggggtgggtgggtatttttgacactgacaccccaattga

SEQ ID NO: 42139 - DNA, 346 bp, Glycine max
  unsure at all n locations
  Clone ID: LIB3139-041-P1-N1-H1
gtgattcactttaattgntcttcttggagaaatcctcatgtgatctcaaagggtgtcaagatggagttagtcatctccatccaatagagcatcttttttagcattccaattgagcatttggtttgttagcatctaccacttcaactcttaacacacaaaatttttaaaaacgactgcaatttcagccacaacgttaaggtttttagactctccccgaccacattgacttcaatatcaaccatcacggaaaaatcacgaccacaactacaatttaaaaccttgaacaaaacaatacaagatagagtcaccatgccatttggtttggtctcagcttggaacaagcgtc

SEQ ID NO: 42140 - DNA, 338 bp, Glycine max
  Clone ID: LIB3139-041-P1-N1-H10
ggagttgttgagtggtgagaaagaaggcctccttcaggtaccttctgacaagggacggttgtctgaccctgtgttccgccctcttgttgagaaatatgcatcggacgaagatgccttcttcgctgattacgctgaggctcaccaaaagctttctgagcttgggtttgctgaagcctaagcaacgttttggggattgttggagaggcacggtgcccataatatttctctcataaattctatggtcatggtttctaatgcgccactgtgggttcctcaaatttttagatagcttttgaatgtattttgctggacgtggtgatgatgattggagttgggtt

SEQ ID NO: 42141 - DNA, 348 bp, Glycine max
  Clone ID: LIB3139-041-P1-N1-H11
ggaaaacatatgtatagagtgaaagaatgggtgagaaaggcaagattttgatcataggaggcaccggctacatcggcaaacatatagtggaagcaagcgcaaaggctggaaatcccacttttgctttggtgagggaatccacactctctgacccctccaaggcacaactcatccacaattttgaggctttgggcgttaatttggtccgcggggatctgtacgatcatgagaagttggtgaaagctatcaagcaagtagatgtcgtcatatccacgctgggtcacctgcagcttgccgatcagctcaagatcatcgctgccattaaggaagccggtaatgttaagaggg

SEQ ID NO: 42142 - DNA, 345 bp, Glycine max
  Clone ID: LIB3139-041-P1-N1-H12
ctggactttacactgttgaagacatattttgttgcaggtgtggaaaccttcttggatggaaatatgttctggcacatgaaaagaatgaaatatacaaagaagggaagtttgtgcttgagaggtggacgatagttgacaatgaagaggaggaattgaattctgatgcacaagctggctctcaaactggctctcaagctggctcaagtgacacagaaaacgcctagcaagtggcttctttttcatgaatttgaagtattgtagctagcaattaatatattatagtattattattatacctttagtattgtaggttgcaaatatattatacctttagtattcctcaag

SEQ ID NO: 42143 - DNA, 315 bp, Glycine max
  Clone ID: LIB3139-041-P1-N1-H3
gtttggatgttttaatacattacattacccctcttatatataacatataacttgttacctaggttttcctaccttctttatctctcaaaagagagacacaacaaaaggaaccagagtggattaattagggacatgagaacaaggagaggagcgtgttactctggagtagtctcaaggatgtgttccgatgcgagggttttcaagaaaaaaaacaaggatctgcacatgcacatgcatatgcatatgcatgtccccgccggagactccattatttacagccggaaaaggcagaagaaaacgccggagaaaaccgcc

SEQ ID NO: 42144 - DNA, 350 bp, Glycine max
  Clone ID: LIB3139-041-P1-N1-H5
gtggcgaacccagtttgagcgctatttttgtttgtgttccgagcgaaagggcaaaacaaagtataagaccttgctttgatttgcttcccttttcttgttgtcgtgtcaaccatggcgtcgtttgggtctctgaaatccaccattttcgaaaaagaagagagaaaacagcagtatcagtcgcatattcgaggcctcaatgcatacgaccgtcacaaaaaattcatggacgattacgttaaattttatggaaaagaaagaccgtcaaacctaaagttgcctattaaaacagatcaagatacactaagagaaggatacagattcatccggtcagaggaagatgatatgaatcc

SEQ ID NO: 42145 - DNA, 342 bp, Glycine max
  Clone ID: LIB3139-041-P1-N1-H7
attcatcatttttttttcaatccgtttggatccatggaaagtaaaaaagaacgctccaacatttttttccaatttttttgtttactctctgattgaatgaacatctcgctttgtcatacatattattttttatcagtaggaatgaaagacttatcatacatatatacataaacataactgcttcggttcgctgcttttcttgctctttgcattctcttacgatggatttgatcttacaaatgttaaagaaactcgcaacatttattacaataattttcctacattttctcatcggagagaaatctaatggcatgtgtatgtgatgtttatgcgctcctctat

SEQ ID NO: 42146 - DNA, 343 bp, Glycine max
  unsure at all n locations
  Clone ID: LIB3139-041-P1-N1-H8
ttcttattcntctttctattaatctgaaacaaggtgggagtcatgaagatccagtgcgacgtgtgtaacaaacagcatgcatcgttgttctgcaccgccgactaagccgtcctatgcgacggctgcgactactttgttctctattctaactagcttgccttcaatctctcattgctttttcttcatccacccttttgctttacattttcctctctgctgatttttgctaggtttgttgagtctttgtttattgatagtttgttatttttgtttcttttcttttagtgtttcttttttttttttttttttttttttctttctttttttctctatcatttttttt

SEQ ID NO: 42147 - DNA, 367 bp, Glycine max
  Clone ID: LIB3139-042-P1-N1-A1
attttctcaagagaaactttaagcagatgtctaatgttttgtgggtggctcctgaggacaaggcgagtttatggtcacaacttcattatgtttcgtgtaataatctggaaatgcaagaagcttatcttgtcaatctcgtaaatgtgttacgagaattgtatttgcacagtccagaggaagctcgccaattgagaaggaaagctctctctcgtattgaatggctgcaaaaagctgatgtgcctaccatagcacagattgaagagttccattcgatgcagaggatgatgaatgctcctgattcaaatgataatattgatctactgttgagcattgatttgttgggtttacaaggagcaggtaaagcttt

SEQ ID NO: 42148 - DNA, 363 bp, Glycine max
  Clone ID: LIB3139-042-P1-N1-A10
atgacttgttgtggccgaaatgtcaagtaccaacttgttccattggaaactgagaaagaaaaagaagtgattcagaccctttttctgtgaatcgacatcatttcaataaagagatggagggaagtatccggtgctctgcgaattacgttcctctcactccgatcagcttcttggaacgcgctgccctagtttaccgccaccgactttctcttatctccggtgacgttacctacacctggactcagacccaccaacgctgcatcagactcgcttcttccatttctcaacttggtgtcggtctttctctccgtcatgtggttgctgtattggcccccaatgttccggctatgtatgagttacatt

SEQ ID NO: 42149 - DNA, 363 bp, Glycine max
  Clone ID: LIB3139-042-P1-N1-A12
gtggacctttcaacagataaaaaaggctatcaaagaaaccatggatgagctcatgaagatgaacacagaagaactgttaaaacatcgcatgcttaagttcagaaagattggtggattccaggaaggtattcctatagatcctaagagaaaagccaacatgaagaagagggatctatctattgctaagatttctgatgctgaactagaagttgaggttgagaaacttaagcaacaggttttggaagctaaggaatcttctcctgttcctccaaaactagatctggatgagatgctaaagcaactgacaagggaggttgatctagaatactctgaggcagttaaagccacgggcttgacagacag

SEQ ID NO: 42150 - DNA, 365 bp, Glycine max
  Clone ID: LIB3139-042-P1-N1-A3
aacattcaatgcattaactgttgactgaacaaagttatggaggtaatgaggttgcacgaatactttcgcctctcactacaaatacacatctcatctcatccgtctctcacttttaatttttctctgcaatctgaaccttccggatttcgtttttctttgttccggtagccagccagccagccatggtgctcttcaatgtttcacgcgttgagaccactcccttcgatggacagaagcctggaacctctggtctccgcaagaaggtgaaagtattcgtgcaacctcattacctccataactttgttcagtcaacattcaatgcattaactgttgaaaaagttagaggtgcaccgctagttgcatct

SEQ ID NO: 42151 - DNA, 367 bp, Glycine max
  Clone ID: LIB3139-042-P1-N1-A4
ggagttactacaagtgtacacacccaggatgtccagtgaggaagcatgtggaaagagcttcacatgacctaagggctgtgatcacaacctatgaggggaagcacaaccatgatgttcctgcagctcgtggcagtggcagccattctgttaacagaccaatgccaaacaatgcttcaaaccctaccaacactgcagccactgccataagtcccttgcaagtgatccaacacagtgacaattcccatcagaaccaaagatctcaagcaccaccagaggggcaatcacccttcaccctagagatgctacaaagtccaggaagttttggattctcagggtttgggaatccaatgcaatcttacatgaatca

SEQ ID NO: 42152 - DNA, 286 bp, Glycine max
  Clone ID: LIB3139-042-P1-N1-A5
aagaaaacttaatcaacagatcaagttcctatcttttatggtgctaagaaaatccaatcaacagatcaaactcctctttttttatatggtgctaagaaaacccaatccgaagatcaagttcctattttttggtacggtattaagaaaactcaatccgaagatcaacctcctctttggtacggtgttaagaaaacctatgttgcaaaaagaagtctttcacaagaagatgaaacgatccttgttgctaatggtcatcaacatgacatcccaaaagcagaccaagttt

SEQ ID NO: 42153 - DNA, 238 bp, Glycine max
  Clone ID: LIB3139-042-P1-N1-A6
aagtttgctaaaattatgaaccttagacaaagtgttgttggtgatcttaaacttcttactgatgggaagttgtatgagggtaagcatattcctgtatctaatattagtgcaggggaaaatcatgtagttcaaatacccttaatggcacaggaggaaattctgtcttctagtgcaagtgatttcagaactgcaatggtgagtaaaaaatagcaaacctcaagctactgcaatgcatgtg

SEQ ID NO: 42154 - DNA, 364 bp, Glycine max
  Clone ID: LIB3139-042-P1-N1-A7
aaatgctgttctttcaatgtggagatattttgttggagatctcgtctttgaagtttctaagatgacttctccctacattaaatgtacagtctctttcttcatagcatttggaaatttggctgatgacaccatcaattttgaggcttttccccacaagctggtgcagtttggagagattcaggaaaaagttgtgttgaaattttcacaagaggaatttcttacagcttggtcaactcaggtgcgtcccgcaacgactctgttggctgatgggtgcccatatttgtatgctatggtgcatgatagttcagtgtctacaataccaggtgattttgtcattggtgttaagttgacaaccataaacaat

SEQ ID NO: 42155 - DNA, 344 bp, Glycine max
  Clone ID: LIB3139-042-P1-N1-A8
aattaaacatattctttaaggtccaaatcactcgcttattgttttctttacatacacatgcagacaataaggtctaacaagttcaagactggcatgggcttgtttcaacgggctaaggccgtgctgctccagaggcacacatacaagtcactgctagacgaggacaacagggatctcgggactaccagaacaaaaggctcacttgaaagctcgccagggacgagggaatacagggaggtatgctgaaacataacatcgtctgcagagcgtgtacggtaagttcatctaactctgcaaccaccggtacatattggacatgaacgagcagcaggtcctgcagacgc

SEQ ID NO: 42156 - DNA, 367 bp, Glycine max
  Clone ID: LIB3139-042-P1-N1-A9
ctcgagcctttcgagccgtccattttgtttgaactcaatacagcaggggattgtgaagagagaaacacattttacctcacagcgccctgcaaatgaaatcatgtcaaaaattgaggaagctgcgaagcctctgggatttaatgttcacaagcgaaattataagatgaagctgcaaggtgataagagcggaaggaagggtcacctttcagttgctacagaggtttttgaagtggctccctccttgcacatggtggaactgcgaaagaccgggggtgacacactagagtttcacaagttctacaaaagcttttcatcatcatcagggttgcaagacatagtgtggcattctgaagcaaaacaatgaaga

SEQ ID NO: 42157 - DNA, 364 bp, Glycine max
  Clone ID: LIB3139-042-P1-N1-B1
caaacatagctctaaaagacaatacttcagtaggagacagcgagatataaatatgaatgccaattctacccttaaagcagtgccctctatgggtgttaagatgactgagaatgatgatgatgacgtgcctcccggatttgggccaccagtggcccaagtggaggatgacctgtcagagattagtttctgttcaaatccatcacacttgggtcaaaaaccaatggggtcatcaaatgtggtcccattacacccggttaacccagctcgacaccttacaataagcttacatactacagtatcagtttgcttcccaacagacaatgcacaactttcatcttagacctcacattttgaatcaatcatt

SEQ ID NO: 42158 - DNA, 358 bp, Glycine max
  Clone ID: LIB3139-042-P1-N1-B10
atttttattttggtttctgattgcaggcagatgttggtaacagtggcacaattgactatggagaattcatagctgcaacattgcatttaaacaaagttgacagagaagatcatttagttgcagctttttcattttttggtagaagtgggaggggctacatcactcaagatgagcttcaagaagcttgcgaagaatttggcattgagaatggctggttggagggaatgatcccaggagctgatccggataatgtgaggaccttttataggaacggaattttatactacccggtgaatggaatggtaatcaacattcttaacaagggtttatttggtatttgggttttttattctcataa

SEQ ID NO: 42159 - DNA, 363 bp, Glycine max
  Clone ID: LIB3139-042-P1-N1-B11
cctgatcttccttcactgcaaaactcttcaaaacccagcatcacaaaaggcctcaagtacctccctgactggggctatggccacgtctacaccgtggtggtagttaactgcacctttaacggcaccgctgtcaatggtgacaacaccggtggcaagttggtgctccatgcttccacctcaggagccggtgacactggcttcaacgtcaccgacagaatagaggtcctccatgaagcaccgggagctttaaacgcttcacttttcatgtcaaagcctaagtatgactacttctactgtggctcttctctctatgggaacttaaaccctcagagggtgagggagtggatcgcttaccacgtgagg

SEQ ID NO: 42160 - DNA, 361 bp, Glycine max
  Clone ID: LIB3139-042-P1-N1-B12
gcgcttcttctctggtctctggcttccttggtacgggaagaactcaatcttgtccatgtccctttggtttttctttcttcgatctcttcaccttcctttcgaccactctcttatcaccgctcgctttcttaactagagccctctccgttgagggtttctccaggtgtggtttgatttacagtttctgatgctgaagaaataaaaaagcttgaaggcttttgctcttctgtgtgaaaaatgttggaaagtggtgcgaaattcccaggaataatagatctcaacaaaaataataacaactactatgatttctctcaaggcttttaccataagcttggggagggtaccaatatgtcaattgaca

SEQ ID NO: 42161 - DNA, 368 bp, Glycine max
  Clone ID: LIB3139-042-P1-N1-B2
tgaaattttgattaaccgcgatcacaggttgccgcaccttaaaaccggaaacaaaagcaatcgttacttgatttcaagaatctctcaatttcttcctacttctttgtgtacgatttcttaagggaaagaaaatcactctctgtgctggccacagacttcgtgaatcattttcttttccactcttagtttatttgctgaacactctcctatttgatataggacttcgtgtcagatttaaacttcttctgtttctttctcagttctctgtttaatttcaagttcaagctggtgaaatcttggattagtgctcccactttcctatctggtataggacttcgtgggtagacttttctatttctctcctttct

SEQ ID NO: 42162 - DNA, 159 bp, Glycine max
  Clone ID: LIB3139-042-P1-N1-B3
ctcgagcctaactacgacgagaactgaagaaaaataggaatcgaaataaatccgataggaacatgatgtaggaatgggaacccaactgaacggatatggtgggtgggctgcgatccacaccgatgcggggcttcgatgctgtgcattactggcaccgat

SEQ ID NO: 42163 - DNA, 359 bp, Glycine max
  Clone ID: LIB3139-042-P1-N1-B4
gtgcattgtaacatggggaagcaagttggttttgaggatggtcttagatatttcgacgaagatggtgatggaaaggtttcaccttcagagctgaagcacgggctgcgaatgatgggtggggagcttttgatgaaggaagctgagatggcaattgcggcattggattctgatggagatgggttgctgagtttggaggatttgattgctcttatggaagctgggggagaggagcagaagttgaatgacttgaaggtggcttttgagatgcatgacacctaaagctgtggtgttatgctcaagcaactgccaagggaggttgctctagaatactctgaggcacgtaaagccacgggcttgac

SEQ ID NO: 42164 - DNA, 365 bp, Glycine max
  Clone ID: LIB3139-042-P1-N1-B6
ctagacactcatttcactcgcgccatcttagggtttctgcgtttgtttcgcaacatggttgccgctaagaaaactaagaagacccatgagagcatcaacaacaggctcgctcttgtcatgaagagtggcaaattcaccctcggttacaagaccgttctcaaatctcttaggaactccaaaggaaaattgattatcattgctaacaactgcccccctttgagaaagtcagagattgaatactatgctatgttggcaaaggttggagttcatcattacaatgggaacaatgtggatttgggcactgcatgtggaaaatattacagagtgtgctgccttagcattattgatcctggtgattctgatat

SEQ ID NO: 42165 - DNA, 364 bp, Glycine max
  Clone ID: LIB3139-042-P1-N1-B8
cttcatctgggtttcaggaaaaaagaaaaaggaaaacaatgggttccgataatcaccagaacttggagttcttgaaggagatcggtttgggctcttccaacattggctcttacattaatggccagtggaaagccactggttcttctgtcacttctgttaatccttctaacaatcagagtatagctcaagtgaccgaagcaactttgcaagattttgaggaggggttgcgagcttgcagtgaagcagctaagacatggatgactataccggcaccgaagagaggtgagattgtgagacagattggtgaagcattgagggccaaattggatcctttgggtaggctggtgtctcttgagatgggaaa

SEQ ID NO: 42166 - DNA, 368 bp, Glycine max
  Clone ID: LIB3139-042-P1-N1-C1
ctcgtaaatgtgttacgagaactgtatttgcacagtccagtttatggtcacaacttcattatgtttcgtgtaataatctggaaatgcaagaagcttatcttgtcaatctcgtaaatgtgttacgagaactgtatttgcacagtccagaggaagctcgccaattgagaaggaaagctctctctcgtattgaatggctgcaaaaagctgatgtgcctaccatagcacagattgaagagttccattcgatgcagaggatgatgaatgctcctgattcaaatgataatattgatctactgttgagcattgatttgttgggtttacaaggagcaggcaaagcttttccaaacaagattgtttttgatgataag

SEQ ID NO: 42167 - DNA, 363 bp, Glycine max
  Clone ID: LIB3139-042-P1-N1-C10
gcgcaattcatgcttgaaggcttggcagctatctggaattgttgaaaactataggatacttcaatcaaaatatgatgggtcttggcggaaaatgtggctgtcacgaccaaggttacggactgatggtctttatgtgagtagaaatacctacattcgagctggagttgctgagtggaaaatcactaatcctgtacatgtggtctgctatttccgatacttgagattttttccatctgggcgattcctttacaagaattcatctcagaaggtcaaggatgtggcaaagtgcatgaatttccgttcatctaaagcagactgtgtttttggtggccactacacattgtcagatgacaaggttgtctt

SEQ ID NO: 42168 - DNA, 362 bp, Glycine max
  Clone ID: LIB3139-042-P1-N1-C11
attcaaagttcatttggtctctgctcttgaattcttctatgatatggaagcaaaaggctttgagccaaatgtgatcacatacacaatattgataaatggtttctgcaagcaagggcgatttgaggaagctgctgaaattgtgaatagcatgtcagccaagggtctgagtctgaatacagtacggtacaattgtttgatttgcgcactgtgcaaggatgggaagattgaagaagctttacagatttttggtgaaatgtcaagcaaaggatgtaaacctgacctttatgcatttaattctttaataaatggactttgcaagaatgataagatggaagaggccttgagtttatatcatgacatgt

SEQ ID NO: 42169 - DNA, 361 bp, Glycine max
  Clone ID: LIB3139-042-P1-N1-C12
ccacaccctacattctcacaagtcacagccaaacaccatttcattaattcttgcagaatattgcttagttttgttttatctgaatttggaaacagcttttgaatggctttttcaagagttgcactgctaatatgcacggtcgggtattttgtgattgcctctgccggcaatttccaccaagattttgatatcacatggggagatggtcgggctaagatactcaacaatggagagcttctcactctgtcacttgacaaagcctctggctcgggtttccaatccaagaacgaatacctttttggcaaaattgacatgcaactcaaactagtccctggcaactctgctggcaccgtcactgcct

SEQ ID NO: 42170 - DNA, 362 bp, Glycine max
  Clone ID: LIB3139-042-P1-N1-C2
atagcattggcctgtgctatgaatagttcttttagggggcgtgccagttctgatatttacaccatctgctctcaagactgtgaattatggaatcctgcttgcacaaaagcaatgactatgtcatttaatccaaacccgtgttctgatgcatggagtttggaatttctgaagcgtaccggatttcattgtgatatcatttgtgtcactggatggactgccactccaatgcaggatgttcaggttacaattgattggtttatttcctctcaggaatgtgttcccaggacctattgtgttttaaatccacaaaatccttttgtgttaaataggtggatggggaaactgacttttccccagggcac

SEQ ID NO: 42171 - DNA, 370 bp, Glycine max
  Clone ID: LIB3139-042-P1-N1-C3
cttcgtgcggattctcgtcggaaacctcgccgtcaagggcgcggcatcatcaaagccctcttctttctccggcaaagtccacccttcgagttcccccttcttctgcaagatcctactccagggacttgattcgaattccacttctcctagagtgtccagtgtccctctgatatcagactccgacccacaccctcactccttcgccgcctcctttgatttctccaaagcccaaatcttgaaagcctcgaagaagcccctgatgaagatctccgtctacaagggccccaccactccctcctgcgtcttcacctccgccaaactattgggcaaagtttcaatacccctcgatctcaccttggccgagtcacgc

SEQ ID NO: 42172 - DNA, 367 bp, Glycine max
  Clone ID: LIB3139-042-P1-N1-C4
aacttgtttagagttgctgcttggaagaaaggttgtttaatggtcaagattgtgatgtctgggaatgcagcagtcaaaaggagtgattgggcctcattggtacaagtgtttttaacaaacagcaacagtacagagcattttgatgcatgtaagtggacaaaatcagaaccacattcctgggaattaatcttcccaatagaggtatgtggtcctaataatggttttgaaatgtggagttctgagtgggcaaatcaaacttcatggcatttgagtttccttattgacaatcccaaacagtctacagtttttgatattctcttgggaatctctcaagattttgaaattgctggtaatactcttatgccag

SEQ ID NO: 42173 - DNA, 312 bp, Glycine max
  Clone ID: LIB3139-042-P1-N1-C5
cacgcttgtgctgctgatgattggccattgcgtgtggccaagaccaacaaggatttggtatctcatgcacaggagttgatgcatgacgttggcctatacatacacaggggaaggggagcccatatcgcttcagaagtgttatttgcataattgagggctattgcggaatcactgaaagaccgattagtgttaagagttagtgtacgtgattcaagtattgaataaaagtgagcatgtcatgtgtatatcagaatgatctaaactgaataagagaatatgtgtggactacatgagacacgagtacagaaattg

SEQ ID NO: 42174 - DNA, 363 bp, Glycine max
  Clone ID: LIB3139-042-P1-N1-C6
taagttgtcatttataaacaatatgtgtgcatatgggctcaatcctggtatttcaggttctcgtcttttgggcaccattcctcagtccatttcacagcaaactgtttggaatcaaatggcaacagtgagaacaccattgaattttgattctagcaagcagagcttttgtcaattttctattgaccttctcggtggaggaattttagtggacaaaactggagattggatcacacttatacaaaattctccaattagtaacttgttgagagttgctgcttggaagaaaggttgtttaatggtcaagattgtgatgtctgggaatgcagcagtcaaaaggagtgattgggcctcattggtacaagt

SEQ ID NO: 42175 - DNA, 367 bp, Glycine max
  Clone ID: LIB3139-042-P1-N1-C7
gcctatacttgacttggtaactaatgaaaatgtaattctcaaccttatcaacaagctggacgaaccatttttactcacttggaacggtattaaacaaaggaagaattcatggcaagatggagttttgggaaccaactgccccattcctccaaactcaaattacacatacaagtttcaggccaaggatcagattggcacatatacatactttccatcaactcaactgcataaagcagctggagggtttggagcactcaatgtttatcacagatctgtcatcccaatcccttatccaaaccctgatggagattttactctactcgttggtgattggtacaagaccaaccacaagacactaaggcaaact

SEQ ID NO: 42176 - DNA, 365 bp, Glycine max
  Clone ID: LIB3139-042-P1-N1-C8
ctacaaaacagcgttgtgtcactgctcatcaaacttcgtcttcttcttcttctttctctttattcgctccctgtctctctgcgtgtgcgtgaaaaagaagcaaaaatgcattccggtcacttacttctcgaggaacccattcgcatggtttccatcctcgaaccatccaagcctaatttctttccggcaatgacgaagatcgttggtaccctgggtcctaaatctcgatcggtcgaggttatttctgcttgtctcaaagctggaatgtcagtggctcgtttcgacttctcttggggtgaccctgaatatcatcaggaaactttggagaatctgaagaatgctatcaagactactaagaaactctg

SEQ ID NO: 42177 - DNA, 367 bp, Glycine max
  Clone ID: LIB3139-042-P1-N1-C9
cggctcgttctcttcacaaacacaaacacacgtgttctcttgcaaaactaagaatgaaggaggagttggtggttgaagaagggtaccttttcaaagaagagactcacttcacagtgctcaaaacctctctcttcttcaacggtgatggcttcgctgtctacgattgcaaaggccaactcgttttccgcttcgactcctacggtccccgcgcgcgtgacaaggacgagctcgttctcatggatccccatggccgttctcttctcactctccgccgaaagaaaccgagtcttcatcaacgctgggaaggcttcaaaggggagagaacggagggtcataaacccattttcagcgtcaagagatcgtcgat

SEQ ID NO: 42178 - DNA, 352 bp, Glycine max
  Clone ID: LIB3139-042-P1-N1-D1
gttttgattccattttgtcaatcttgcatttttctcccatatatatatttttttggggtggaggggtttgaatttgtcggggttgttatttgcaaccttagtttttgttgatatatcagatgttagtatttattgtcttaagaaatatagtgtatctgttttttgaattaattaattttaacccaagtaaattttgcaacattttaatcaaaaaaaaaaaaaaaaaaataaaattaaaaaaaaaaaaaaatataaaaaaaaatataaattaaaaataataattttaaatatttatttaattctcttattatatttctattatttatcatttcatattttatataactttttt

SEQ ID NO: 42179 - DNA, 361 bp, Glycine max
  Clone ID: LIB3139-042-P1-N1-D10
gcagtttgtagaaattcaggaaaaggttgtattgaaattttcacaagaggaatttctgacagcttggtcaactcaggtgcgtcctgcaacaactctgttggctgatgggtgtccatatttgtatgctatggtgcatgatagttcagtgtctacaataccaggtgattttgtcattggtgttaagttgacaaccataaacaatatgtgtgcatatgggctcaatcctggtatttcaggttctcgtcttctgggcaccattcctcagtccatttcacagcaaactgtttggaatcaaatggcaacagtgagaacaccattgaattttgattctagcaagcagagcttttgtcaattttctatt

SEQ ID NO: 42180 - DNA, 361 bp, Glycine max
  Clone ID: LIB3139-042-P1-N1-D11
aatgatattctgtgttgcgattatgctagttttgatggtttgattaccaagcaagttatgagcaagatggcagaaatgataaacagtctttgtggtggtgatgaaaaattgatgcgtgaaaggacgcacctgctgttggcttgttgttcaaggatggcaatttgtaagaaagatgtttggagagttgaatgtggaatcccttctggatttccgctcacagttatttgcaatagcatttttaatgagatgctcattagatatagctatgaaaaattactgcgccaggctaaagctccaagtatgtttttacaatccttcaaaaattttgtttctttgtgtgtgtatggtgatgataacttaa

SEQ ID NO: 42181 - DNA, 233 bp, Glycine max
  unsure at all n locations
  Clone ID: LIB3139-042-P1-N1-D12
gccgtcgtgggcaaccccgccgacgtggcgatggtgcgaatgcaggccgacgggcgcctcccgccggcggagcgtcgcaactacaacggcgtgttcgacgcgatacggcgcatgagtaaccaagaaggcgttggtagcctgtggcgcggnntannncttacngngnaccnnncnatgatcgttactgctttgtagttggccttgtacgaccagtttaaggaaagcattttagg

SEQ ID NO: 42182 - DNA, 368 bp, Glycine max
  Clone ID: LIB3139-042-P1-N1-D2
tttcaattttaatttcctctcaaaccctaaccctaaccctaaccctccccgtcacaaaagaaaaccctctttgtccgatcatcgtcgtcaagatgttggaactccgtctcgtgcaaggctccctcctgaagaaggttttggaatccgtcaaggagctcgtgaacgacgcgaacttcgactgctcctccaccgggttctccctccaggccatggactccagccacgtcgccctcgtcgctctcctcctccgatccgagggcttcgagcactaccgctgcgaccgcaacatctccatgggcatgaacctcaacaacatggccaagatgcttaagtgtgctggtaatgacgacatcatcaccatcaaggcc

SEQ ID NO: 42183 - DNA, 366 bp, Glycine max
  Clone ID: LIB3139-042-P1-N1-D3
cagacttcgtgaatcattttcttttcaactttcagttgacttgctgaacactctcctataaatatataggacttcgtgtcagatttgaacttttcctgtctctttctcggttttctttcttattctcatcttctttaaattttaaggctcgtattttgtttctctaaactttctgttggactcatttgaaatacaacatgaagttttatccaggacaaaatgtctctgaaattgtttaccattttcagagtaatgagacagctaataggcttgatgcttattttgcctgtggctgcgaagaggatactgaagtcctcgctcgtttgaagcaatgtaaccctcggttactgcatttatcttatgctg

SEQ ID NO: 42184 - DNA, 340 bp, Glycine max
  Clone ID: LIB3139-042-P1-N1-D4
gctcctcatatatcaacaaaaggattcgcacagcacttgggaaaggtaagaaaattgtttgtcttactagagttgatccttttccagtagctttactggctgttctttttggtgttaagaatgaaattctgagttctaacgccactaatcctatgctgacgcgacttcttgaaaactgtaagagtctcaaatatctggttgatgagtgtccttttgcatttgtgaactagtatgtaatattttattcacttaaataaagcgcattactatgtgcaatgagtgtgtttaaattttaaaaaaaaagatacttaaaatactctctttttttaagcattgtaac

SEQ ID NO: 42185 - DNA, 325 bp, Glycine max
  Clone ID: LIB3139-042-P1-N1-D5
ctccgacttctctgcctcgcggcgcgtggtgactgcggacctgacatcggaggagcagaagcgcggtggcccggtggtggtggagatgttctcgccgcatgggtgcgcgactttaccggctgcggagctggtgctgtagcggctgtagagaggggatgtcgcgcttgatgcaccactggtggagcttgaatattacggttgctgcgggtactttttggtttgggaggtagcatttaatgctcttactcagttcaattatgcgcattgctatttgcgaggagtttgtttttgtctcaattttttactcttcatgtattaggttcaa

SEQ ID NO: 42186 - DNA, 366 bp, Glycine max
  Clone ID: LIB3139-042-P1-N1-D7
ctcctattttttatttttcgcgtcacataaacggaagggtaaactggggagaaggctgttgttgatcttgggactatgcttcctattggtctctccattctcacttgcgtgctctgagagatgccacccacaatacaagcaagcgttgttccaacttcacacggacctcggcaacccttatgacattatattctggaacgcaaaggaggattgctgcgatgtggttctgctgcgttaagtgtgacgagaaaacaaaccgcgtcattagcgttgccttatcatccccttttccagacaccaatctctcggcccaaatacctccctctgtgggtgacctcccttacctcgagtccctcgtcttccaca

SEQ ID NO: 42187 - DNA, 365 bp, Glycine max
  Clone ID: LIB3139-042-P1-N1-D8
caaagtctaaatttggagtctcctcccagatatggaaacgaaaatatgtatcaaccaccaattcagtatttccccttggggtccaggatttgtgctggctgctatactgagattggttttggacgatatctaaattgcttgaatgcattctggcatcctgaatgcttccgctgccgtgcttgcaacctaccaatctctgattacgagttctccacatctgggaattacccttaccataaatcatgctataaggaaagctaccatccaaaatgtgatgtctgcaagcacttcattccaacaaatcctgctggtcttattgaatatagggcacatccattctggatccagaaatattgccctactca

SEQ ID NO: 42188 - DNA, 211 bp, Glycine max
  Clone ID: LIB3139-042-P1-N1-D9
ggagacattagtaagctgcaaaagactttaaagctggcgatcacacaaagacccacgttcactcctaactgtgcatctacacacgtatacacccgtgaagctgacaactgtaggtggaacggctcccatgctgagggcaactacaccacaaagaccatgggggttcatattttcgacaaacgagttcctaacactgccattgaatacgact

SEQ ID NO: 42189 - DNA, 345 bp, Glycine max
  Clone ID: LIB3139-042-P1-N1-E1
cgcctcttcaacaacccttgttttgttctgtgcaagtgatcttgaaaggaacaacaatggtgaagtctataaactttctcctgcttctgtctctactagcctttgttccctcctgtcactgcaaaaagaaaataggaggttacctctaccctcaattttacgacggttcatgccccagagctcaagagattgtccaatccatcgttgccaaggctgtggcaaaagaaccccgcatggctgcttcgttgctcagactacatttccatgattgttttgtcaagggctgtgatgcatcggtgttgctagatagcagtggaactattatcagtgagaagaggtcaaatc

SEQ ID NO: 42190 - DNA, 326 bp, Glycine max
  unsure at all n locations
  Clone ID: LIB3139-042-P1-N1-E10
ctcgagcctctcgagccgnnttnngnntatngggntggnatttaaaaaaagtaaagtgggcaaaaaaaaaaaataatatttaatatatattttttttaaaatatttaattaaaaaaattattnttatatttaaaataatttatttttattatatatttttataattatttaaaattattaaaattttattattattttattaattattttttataatatatttatttttattatttataataaatattatttaatattttttttaaaattttttttaataattatttataaaatattatttttattttatataataatataattat

SEQ ID NO: 42191 - DNA, 346 bp, Glycine max
  Clone ID: LIB3139-042-P1-N1-E11
ggattatttatcatggatgattaacacttccttggatctcaacattaatccccacaggcttcatgaagaacttcccaaaaaggaggtggaaaacaactttttgtcattgaatttggaggtgaagaaatcttctgtaaaacaagagtctgctggtgccttggcggaggagctgaagcgggtgagtgcagaaaacaagaagttaaccgaaatgctcacagagatgtgtgagaattacaacactttgcgaggcaatttgatggaatacatgaggaagaatccggataaggagcacagctcatcaaagaaaaggaagtctgaaagcaacaacaatagtattccaatggga

SEQ ID NO: 42192 - DNA, 365 bp, Glycine max
  Clone ID: LIB3139-042-P1-N1-E12
gggttgattgaagaaaaaaagaaaaacacagaaatggagggtgggaacaacagcagcagtaacaacaaccctgatgagttggcggtggggtgcttgctttcgatcaggacaacgttgggcgacgaattcgaaggccaggtcgtcaccttcgatcgcccctccaacattctcgtactccaggagccttccaaacctagccctcgtcgaaatcttaggttgctcaaagccaattacatcaaagacttcacctttctcggccatgcccaagaccctcttgatcccaacacctgcttccttgacctcaccgctctccaacaaagggaagatgttgctgttagacaagcggaggctgatgctgagaggat

SEQ ID NO: 42193 - DNA, 368 bp, Glycine max
  Clone ID: LIB3139-042-P1-N1-E2
ctccatacgccggatctgctaaaatacgcttgatccatatgggcctcctcgaccacttgtgggacgacaccgtcgccggcccaaggccggaaaacggtctcggcaagctccggaaacaccacaccttcactttccgacctagctccggcaaggaagcggagggcgggagcgtgagatcgtacggtgacgaatcgtcggaggaagcgactagagtgacgcgtagtatcatgatcgtgaaaccgccagggtaccagagtggatcgcctccggtttctcctgccggttctactcctccgatttctccgttttccggaggaaaagattcgcttcggtttcgaagaaggtcgggatctgatgcgtacgagaag

SEQ ID NO: 42194 - DNA, 149 bp, Glycine max
  Clone ID: LIB3139-042-P1-N1-E3
tgttgccttgttttctgaaatagatgaaatattttccatatgaagtcagttcttgtaattaatgataactctgtctgccttccttttagaactgtgatttctggcttgtgtacgggatacactagtgaaatcaatatgtgcgtatgtgt

SEQ ID NO: 42195 - DNA, 367 bp, Glycine max
  Clone ID: LIB3139-042-P1-N1-E4
cttccacttatataaacaaaaggatgtgctcatcacttgggaaaggtaagaaaagcggctgtgtgactagactggatccgttctcagttactttactgactgtgggtttggaagcacagaatgaaaggcgcagtataaacgccgctaatgctattctgaccctacttcgtaaaaactggtagagcctcaaatatgtggaggacgagatgcactatggcatatgggaactaacatgtaatgtttgatatactcagacaaagcgcatgactatctgcaatgagtgtgtttaaatacttactagacattgctctcaccaacaagcttttcactgagggaactgatattcactggcatggaatcagacagg

SEQ ID NO: 42196 - DNA, 341 bp, Glycine max
  Clone ID: LIB3139-042-P1-N1-E5
ctcgagcttatttgagctagagagcgctagcggctcgaggagaaagaaaaagatttgaaaggtaaaggtgacgatggtgaatagaaaaaggagaaggatacgaaggtgaagaagaaaaaagaaaacaaagacaagggtgacaaaactgatgtagagaatgtcacggggaaagagaatgatgggggggattaagatatgtggatggtagaggggcattaggcatttgaggactaggatggcatatctgattcacttaaatcaagcgcattgctatgtgcgatgagggtgtttaattgtaaaatgtaacgtagtataagtttgataaattttgttgtaagtaa

SEQ ID NO: 42197 - DNA, 350 bp, Glycine max
  Clone ID: LIB3139-042-P1-N1-E6
ccacgatatagtcagcacagagcagttaaatagcacgagggaaacttaaatgcatgtgctagcaaatgattcaagatggcttaatatatgcatctactaaccagaaggatggaatggagagattctaggaggatcccgaacagcataaaacctgtgaaagagattgaacatatggattcattaagagaatgaataatggcactctcaagggaacttactgcgacagacgaacaaatttcatgcgatcagttgtattagtctaaggctggaagagagagacaaagatatgactttgatgactttgacgttccacaaaagttcaacatttaaggtgctaggaatgatggaag

SEQ ID NO: 42198 - DNA, 319 bp, Glycine max
  Clone ID: LIB3139-042-P1-N1-E7
cttctttttttattaataaaaggatttgcacaggagcgggccaaaggtaagaaaggcggttttcttactagagacgatccttttgcagtagctttactggctgacttttttggtgttaagaatggaattttgttttctaacgccactaatcctatgctgacgcgacttcttgaaaactgtaagagtctcaaatatgtggttgatgagtgtccttttgcatgtgtgaactagtatgtaatattttattcactcaaataaagcgcattactatgtgcaatgagtgtgttttactgtcaccaatatcttagtccaaattcct

SEQ ID NO: 42199 - DNA, 367 bp, Glycine max
  Clone ID: LIB3139-042-P1-N1-E9
ggaaagtttgccctagccaatatcctcttggtccttggcttgaacttgagcactttggtcaatgttcttgcttgtccctattgcccttacccttctcccaagcctccaaaaaagcctcccgttgtgaaaccaccggttcacaaaccaccaaaaccatgtccaccacccaagtcatctccaaaaccaccccatgtacaccctccctatgttccaaaacctcctcactaccctaaaccaccagttcatccacatccaccccatgtcccaaaacctcatccaaagcctccagtgcatccccatccaccttatgtcccaaaaccaccagttgtgccagttacaccaccatatgttccaaaaccaccaattg

SEQ ID NO: 42200 - DNA, 164 bp, Glycine max
  unsure at all n locations
  Clone ID: LIB3139-042-P1-N1-F1
aaaaaaannaaaaaaaaagnnaaggggnaaataaaaaaaaaaaaaaaagaggaggagaaaaaaaaaaataaataaaaaaaaaaaaaataatataattaataaaaaaaaaaaaaaaaaaaaaaaaaaaaaaaaaaaaaataaaaaatataaataaaattaataat

SEQ ID NO: 42201 - DNA, 366 bp, Glycine max
  Clone ID: LIB3139-042-P1-N1-F10
gatccatcaactttgccaaagtacccaccaattaaggagtttgatgccaaacttcgtgaagaggaagctagaagacgaagagcagcaaataaaggatatgaacatgaatcagttgggagaaattttagagagtccaaagctgtgccaatacctgatgctaatgctgagtttcaggcaactatgaggagacaaggacagtgtaattccaagtgcactattgagaagtacaatcctcaagaggatggcgattacggcttccaccatgaacctgaaaagtcaagagcactcaatgtattatctcattctggccagttaatgcatccaagtgtatatgtatcctcacgcaatatgaatttgaaagaggaa

SEQ ID NO: 42202 - DNA, 363 bp, Glycine max
  Clone ID: LIB3139-042-P1-N1-F11
ctcgagctttttggtttggccttaagaggccatgttgatgattacagactcaggtccactcctcctgctggcaccatgggatatcttgatccttgttatgtcactcctgataatttaagcaccaaaactgatgtttttagttttgggatattgctgttggagattataagtggaaggaaggccattgatatcacttattcacctccttctattgtggattgggctattcctcttattaagaaggggaagttgttggctgtttatgatcctagaatagcaccccccaaggatccgattgtgaggaagcagttagctgagattgctgccaagtgtgtgaggtcttgcatggagagaaggccttct

SEQ ID NO: 42203 - DNA, 362 bp, Glycine max
  Clone ID: LIB3139-042-P1-N1-F12
aaatcattagccattggctaagcactcatgcaattgttgagccatttgtcatagcaacaaacatgcaactgagtgtggttcaccctatttacaaacttctgtttcctcactaccgggacaccatgaatattaattcacttgcccggaaagccctggtcaatgcagatggtattatagagaaaacattcttgtggggtaggtactctatggaaatgtccgctgtcatttacaaggactgggttttcactgatcaagcattacctaatgatcttgtaaagagaggagttgctgttaaggacccatctgctccccatggagttcgtcttttgattgaggactatccttatgcttctgatgggcta

SEQ ID NO: 42204 - DNA, 366 bp, Glycine max
  Clone ID: LIB3139-042-P1-N1-F2
ctcgagcttgttgcagaaaaccctcatccatggtggggggttttattaggataggcgttggcaaacatacatccagaagaagatatagtattcaattgtgattcatgtgatggtattaagagaagtgcattatctgatttttatcattttttttttcaaccttttcgaaacaatacttttttaatatgaatttttattaattgcttttcttgatactccattaccttattgacattttcttaatttataaaaaattttatttaattttttttttatgtttttattttttttaatctttcttatctttttttatttattttttttctatttattcttttatattattagtcttttatcatttttttt

SEQ ID NO: 42205 - DNA, 367 bp, Glycine max
  Clone ID: LIB3139-042-P1-N1-F3
ctcccctttgccgctgttgttgttgctgcaccaccgaacaacttcccctgtaaatcgcgtttcgtttgtgcaaggttttaaaagatggctgatgctgaggacattcaacctcttgttgttgataatggaactggaatggtcaaggctggttttgcaggtgatgatgctcctagggccgtgttccccagcattattgggagaccacgccatactggtgtaatggttgggatgggtcagaaggatgcttacgtgggtgatgaagcccaatcaaaaaggggtatactcaccttgaagtatcctatagagcatggcatagtcagcaactgggacgatatggagaagatttggcatcacacattttacaatg

SEQ ID NO: 42206 - DNA, 251 bp, Glycine max
  Clone ID: LIB3139-042-P1-N1-F4
ctcgagccttcacagcttattgcaggaggaatagtggtgggtgtgatcctgcacgggggaacgcaccttgcgtgcgatttcccaagaattagtgagtcggataaatcaatatttcggcaaactattggcgcaggattcgggtaccaccggccaacgtacactcaaatttttgcgaccactgatgtggccagtatgataggcatcgtggttactatgggcattgcatttgcactggcagacaaatggtcacg

SEQ ID NO: 42207 - DNA, 368 bp, Glycine max
  Clone ID: LIB3139-042-P1-N1-F5
gtagcatgtaaaggaaagacgtgccacaaaactatacgggacctatagactctggagtctggactgaaatcgaagtcgaagcaagcaatgggcaacgctcagtcaccttccaacaatgatcctcgatatgtttcagcaaccagagcttttactcaaaaggaacttgaagacttgaggtctcggttcaacaatctggctaatcaatcccagagcaacgggaaatacatccctccctccgtttttcagtcatattttggatttcatggccctcttggggagaggatgtttgatttagttactcaggagcgcaaggatcagaagctaacctttgaagacctcgtggttgctaaagctacttatgagaaagg

SEQ ID NO: 42208 - DNA, 354 bp, Glycine max
  Clone ID: LIB3139-042-P1-N1-F7
cgtcttctcatatcaacaaaaggcaaggcacagcacgtggcaaatgttagcaacgcgggtctattactagaaatgagcctttcgcaggacctctactgcctggcctacctggcttcaagaatggaattctgtgttctaacgccactcattctatgctgacacgaatcctagacaactgtaagagagatcaaagctttgatacgcgagggcccttcttcattcgataactagtatgtaatctggtattcactcatataaagctcattactatgtgcaatgagggcgttttactttgcacccactctcatgcgtgcaatcgtagactgactgtaagaagtatgctcaagaggagga

SEQ ID NO: 42209 - DNA, 367 bp, Glycine max
  Clone ID: LIB3139-042-P1-N1-F8
cttttccgtttccgtcgcgaatttccgattcatggaagaagaagagaaaacctaaatcgcagatccgaacgcagtaaaaaaaccatggcggaagaacaccgatgcgaaactcccgaaggtcacctactctgcgccaacaactgcggcttcttcggtagcaccgccacgatgaacctctgctcgaaatgctacggcgcgatccgcttgaaggagcaagaagaagcgtcgacgaaatctacaatcgaaaccgcgctctcttcttcctcgttgaaaccgtcgttctccacgtcacctccaacgttggtggatgtcctcatcgaatcgccgccgccgtctttggcggaggttgcggtcacggtggcggtgg

SEQ ID NO: 42210 - DNA, 366 bp, Glycine max
  Clone ID: LIB3139-042-P1-N1-F9
atagttcactgccacctagaccttctattgaagaagtggaagctgccacgtccactgtggacaccctcaacaacgaggagcaaatcaaactcaacgaaatctcaatgcaacaacaacctcctcacgatgatgtccctcaagacctcttctctgtcctgcaacaactcaaaaagactatggttctgttccacactcatcaacagaggagagatgcgctttatcttcttgagcttgaaaatatgtttcaaaccttcggtgatctcattcagagggcttctgaattagtttctggagatacccagaagcaaaaacttcccactatacccgaggaacacgcggtgatcactgaggaaagtgaaactctgg

SEQ ID NO: 42211 - DNA, 368 bp, Glycine max
  Clone ID: LIB3139-042-P1-N1-G1
caattagtatacttgttgagagttgctgcttggaagaaaggttgtttaatggtcaagattgtgatgtctgggaatgcagcagtcaaaaggagtgattgggcctcattggtacaagtgtttttaacaaacagcaacagtacagagcattttgatgcatgtaagtggacaaaatcagaaccacattcctgggaattaatcttcccaatagaggtatgtggtcctaataatggttttgaaatgtggagttctgagtgggcaaatcaaacttcatggcatttgagtttccttattgacaatcccaaacagtctacagtttttgatattctcttgggaatctctcaagattttgaaattgctggtaatactct

SEQ ID NO: 42212 - DNA, 359 bp, Glycine max
  Clone ID: LIB3139-042-P1-N1-G11
attcaaggtttcagcttttgagtaccactaccaatggtgattttgttcaagggaaagatctcgcaatggttaaagttaatgtagcatgtgctgctgttggcttgacatcaagttacactccaactccattgttggaatctggtttgcaaaaagacagagggttaattgtggagtattttggaaggatgtcttacgttgctcataacgttaatcagccccaagagaaagatttgttggagggaaatttttcctttgatattaaatctcgctctagattggaaaaagtttcctctacaaaagcacaatttgttagtggaaaaaccttcaaatatgatataattggtgctggttcacattct

SEQ ID NO: 42213 - DNA, 360 bp, Glycine max
  Clone ID: LIB3139-042-P1-N1-G12
caccgttgtaccgaaaccaatcgccacaaactcgggatctcagattcgacgcgccaaaccatgtcgaaggcgcgtgtctacacagatgtcaatgtccttcgccctaaagagtattgggattacgagtctctcacccttcaatggggtgatcaagatgattatgaggttgtgcgaaaagtgggcagggggaaatatagtgaagtttttgaaggcataaatgtcaatagcaatgagcgctgtataatcaagattctgaaacctgtcaagaaaaagaagattaaaagagagataaaaatacttcagaatatttgtggaggcccaaatattgtcaagcttcttgatattgtcagagatcaacat

SEQ ID NO: 42214 - DNA, 355 bp, Glycine max
  Clone ID: LIB3139-042-P1-N1-G2
tggaagattagtctttgattgatttcgtagatcaaggaggaaagtggaatgggttgtttgtcgcacttcaatccgcgggaggacgagaagctcaatcccaatcctcagcaggaaaaccaccagcatgaacatgtacatgaacatgcacctaagccccctgttccttctcgtatatccagattgccgccctctgcctctgcctctgcctctgcctctgcagtaggagcagacaatttcctacaaacagcacaacatcaggttcggacagcacacatctcttctaaattgtggctcaaacattcagtatccgtgagctcgcaaccgtaacaaaaaactttaagccccaatttctttt

SEQ ID NO: 42215 - DNA, 368 bp, Glycine max
  Clone ID: LIB3139-042-P1-N1-G3
ccatcctttaaatctccaaactcgcgatcctcctcggtgtgttcgcttcagtctgcaacgtcgctatgtcggactccaccgccaaacccctcgaccagcacgccaccacgggctctgaccctactgcgccagcggttcacatcgtgtacaccgagagaccacagaacgaggagcctgaggcctaccacatcagaaccctcacttcagtccttggcagtgaggaggctgcaaaggaagctttgttgtatagttacaagtctgcagccagtgggttctcagctaagcttactccggagcagtttgaacagatttcaaagctaccaggtgttcttcaagttgttcctagcaggacatatcagctccatggg

SEQ ID NO: 42216 - DNA, 362 bp, Glycine max
  Clone ID: LIB3139-042-P1-N1-G4
ggtttggctaatagattactgagtaagggcaacgatattctgtgttgcgattatgctagttttgatggtttgattaccaagcaagttatgagcaagatggcagaaatgataaacagtctttgtggtggtgatggaaaattgatgcgtgaaaggacacacctgctgttggcttgttgttcaaggatggcaatttgtaagaaagatatttggagagttgaatgtggaatcccttctggatttccgctcacagttatttgcaatagcatttttaatgagatgctcattagatatagctatgaaaaattactgcgccaggctaaagctccaagtatgtttttacaatccttcaaaaattttgtttc

SEQ ID NO: 42217 - DNA, 366 bp, Glycine max
  Clone ID: LIB3139-042-P1-N1-G5
actgaaagcggaaacttggaagtgacatatactcacaacgaagaaaatggtatacttaccgtatgtgggatgcatgattcacaaggcaaacccattttgctgtgcgcttgcaatgataatactgtgcacctctatgatctgccatcatttgcagagagaggcaagatattgacaaaaaaagaggtacgagcaattcagatagggcctaacggcatattcttcactggtgacggtactggtgaagtaagagtgtggaattggatagcggaggcaactactaccacccaataaagtggcacttacaatgtgttccatttaattgttttactagtttttttttctggtcttcctttttgtaatttttta

SEQ ID NO: 42218 - DNA, 361 bp, Glycine max
  Clone ID: LIB3139-042-P1-N1-G6
gcaagcagtgcttttgtcaattttctattgaccttctcggtggaggaattttagtggacaaaactggagattggatcacacttatacaaaattctccaattagtaacttgttgagagttgctgcttggaagaaaggttgtttaatggtcaagattgtgatgtctgggaatgcagcagtcaaaaggagtgattgggcctcattggtacaagtgtttttaacaaacagcaacagtacagagcattttgatgcatgtaagtggacaaaatcagaaccacattcctgggaattaatcttcccaatagaggtatgtggtcctaataatggttttgaaatgtggagttctgagtgggcaaatcaaac

SEQ ID NO: 42219 - DNA, 366 bp, Glycine max
  Clone ID: LIB3139-042-P1-N1-G7
ctctctctctctctctctctcattcacacgaatgacactctccacagtgcgattcattcaccaatggatcgcaacggtgttctctctcttgcattcatctgcattgtagtcgccggcgtcggaggccagtctcccgccgcagcgccctcgaacactccggcaacccccgccgccgccactcccgcccaagcaccttccacaccgaattcaccagccccagttgcttctcccaaatcatctccaccagcttcgtctcctaagcccgcaaccgcaacccctgcttcgtcgccggcggcatctcctaccaccacccccgccgcgcctgctccagcgaccaagccacctgcagcctctcctcctccggcg

SEQ ID NO: 42220 - DNA, 366 bp, Glycine max
  Clone ID: LIB3139-042-P1-N1-G8
ttctcattatatatgccaaatgctgttctttcaatgtggagatattttgttggagatctcgtctttgaagtttctaagatgacttctccctacattaaatgtacagtctctttcttcatagcatttggaaatttggctgattacaccatcaattttgaggcttttccccacaagctggtgcaatttggagagattcaggaaaaagttgtattgaaattttcacaagaggaatttcttacagcttggtcaactcaggtgcgtcctacaacaactctgttggctgatgggtgtccatatttgtatgctatggtgcatgatagttcagtgtctacaataccaggtgattttgtcattggtgttaagttg

SEQ ID NO: 42221 - DNA, 364 bp, Glycine max
  Clone ID: LIB3139-042-P1-N1-G9
tttactacctccacaccccagtttctccacatacaccccctctgcctacttattggaaaaccaacaacccttaataggctttgagcaacaaccaagttcccttctcgggctcaaccacctaagcacgtctcagatttcccagatccaagcccaagcccaagcccagaactcgctctctcttaatttcttgggcccgaagcccgttcctatgaagcacgttggtgggccggcgaagcccacgaagctgtaccggggcgtgaggcagaggcattgggggaagtgggtggcggagataaggctaccgaagaaccgaaccaggctttggctcggaaccttcgacacagccgaggaagccgctttggct

SEQ ID NO: 42222 - DNA, 349 bp, Glycine max
  unsure at all n locations
  Clone ID: LIB3139-042-P1-N1-H1
atttcacagttagcacttagcagactctgctgcagtgaggtgaggggaggtttgtttggtggttcntttttcctttcctttccgccagaatccgttgagaatggcgttgccggtagtcgtcgatgcagagtacctcaaggaggtcgacaaggctcgccgcgatctccgcgcactcatcgctaacaggaactgcgctcctctcatgctccgattagcctggcacgatgcctgaacttacgatgcttataccaagaccggttgacctaacggttcgatcctgaacgaggaagagtattctcacggagccaataatggcttgaagaaagctattgatttctgccaggaagtg

SEQ ID NO: 42223 - DNA, 355 bp, Glycine max
  Clone ID: LIB3139-042-P1-N1-H10
ctttggtaaggtgagagaataggaaaaagggaaatatggcatttgcaggaacaactgagaagtgcatggcttgtgacaaaacagtttatctggttgataagttgacagcagataaccgagtgtaccataaggcttgcttcagatgccaccactgcaaaggaacactcaagcttagcaactataactcttttgagggggttctttactgcaggccacacttcgaccaactgttcaaaagaactggtagtcttgacaaaagcttcgaagggacaccaaaaattgctaaaccagaaaaaaccggggaagagaaacctgcagcaaccaaagtctcaagtatgtttggtggaactagaga

SEQ ID NO: 42224 - DNA, 357 bp, Glycine max
  Clone ID: LIB3139-042-P1-N1-H11
gttggctattcattcattcgtgttcctcaggagagagagggtgcgtgtgattcggattccaattcaaattaaggttttgcgcatcgtcatcgaatttttctcttatgcaaggaaggttttccttctccgatttgaatttgattgaacgagtagtgttaagattatgatattttttgagaagcttcgtttctctcctcacttgagccgcttcattgccggcatcctcctgttaatcttctgcaattcattccagttagtctctaatttccccattcctatacagccttagattcaacgtcgatcgctacactcttctctccgattcgtacgattccgtattcgatattcgtttgtttg

SEQ ID NO: 42225 - DNA, 361 bp, Glycine max
  Clone ID: LIB3139-042-P1-N1-H12
attagccattacttcgaatcaatacatttaaagaacaagaagcactggaactcatttaacacagctttctttcgtgactcggtagatgtaatagacgagatctctagtgatgggaaggcaaaattgaaagatgatgacaaactactgtctatggagttgaggtgccacagatgtagaagtgcacatccaaacataccgcgtttaaaatcacatattagcaactgccaatccccctttcctgctcacctgcttcaacacggacgtttgttgcgtgcaccaggagaacctcatagcaatgtccagtagtactagttttctgtctactttttttttgtgctcggcattttttgtctactctact

SEQ ID NO: 42226 - DNA, 357 bp, Glycine max
  Clone ID: LIB3139-042-P1-N1-H2
aaatacacatatcaaggttgatagtatatttgtccagacctgctttgacatgctttatgatagtaaccccatgcttatcagctctggacaaatacacaatcaaggttgatagtataactgagagaagaggaggtctgaatccaagttctcttcaccagttgcaattacatggtccacatgtcggacaagcagcaaaaattgggttgatttgttctgttattgccctcacagaagcaatagcggttggtcgatcttttgcttccatcaagggataccatcttgatggcaacaaagaaatgttgtcaatgggaatcatgaacattgcaggatctttgacttcatgctatgtggcaactg

SEQ ID NO: 42227 - DNA, 363 bp, Glycine max
  Clone ID: LIB3139-042-P1-N1-H3
taaagctctaagtatgtttttacaatccttcaaaaattttggttctttgtgtgtgtatggtgatgataacttaattagtgttcatgaatatgtcaagccttactttagtggttctaaattgaaaagctttctagctggtcataatatcaccattactgatggtatcgacaaaactagtgcaactttgcaatttagaaagttagcagattgtgattttctcaagagaaactttaagcagatgtctaatgttttatgggtggctcctgaggacacggcgagtttatggacacaacttcattatgtttcgtgcaataatctggaaatgcaagaagcttatcttgtcaatctcgtaaatgtgttacg

SEQ ID NO: 42228 - DNA, 130 bp, Glycine max
  Clone ID: LIB3139-042-P1-N1-H5
caaaccaacccttcttgcagataacaagtcatcatataaccgacacctccatcatgttctgttcacttgccaccactgcaaaggaacactcaagcttagcaactataactcttttgagggggttctttac

SEQ ID NO: 42229 - DNA, 363 bp, Glycine max
  Clone ID: LIB3139-042-P1-N1-H7
cttcaggagattttcctgaaaaggaagatcaagaaaaacccaaaaagattgatgccagattgagacaaagaatagatcctcaatacaatgaggttcaggctcagatggaaacaaatttgtttaaattgtctcttgatgatgttgaaactcctaaaggttctatgttggatcttaaaatttctcaatctaaaattgcacttcccaagaacacagttggaggaaccattctgcgtagtgatctattggcaaattttttgacagagggcaattttagagcaagtgttgatttgcagcgcactcatcgtattaaaggaatgattaaaatggtggccacagttggtattcctgagaatacaggtatag

SEQ ID NO: 42230 - DNA, 364 bp, Glycine max
  Clone ID: LIB3139-042-P1-N1-H8
taaagagcatgtacaccctccctactactaccagtcagcaccaccaccatgtgcggcggcaccacctccctattactataaatctcctccaccaccatgcccctctcctcctcccccctactactaccactccccaccaccaccatctccctctcctcctcctgcctactactaccattctccaccaccaccatctccatcaccaccacctccatactatgacaaatcccctccacctccatcttcatctccaccacctccttactactatcaaagtcctgctccaccatctcccactcctcatcctccctactactacaaatcccctgcaccaccaacgtcgcatcctgcaccttaccactat

SEQ ID NO: 42231 - DNA, 362 bp, Glycine max
  Clone ID: LIB3139-042-P1-N1-H9
tttacattttccgtcaaccaaaatgctacaaacgaagccagagattcgtaattgcacattctcttttgttgtctccagctcatagaatattataaactcagattcattcagaatttcagattcacctttttcttttcttctctaccttctttttcctctgacagctttttgcagaaagttgtgatttttccttgaaagatggcatctttgagcatgatccagatcagaactgggaattgtgcatctgggtttggtttgaattgtgctgggaaggttaaggttggtcccagcagagttgggtttaaggtgtttgcttcagagactcaagctacagagcctgatcttagtgtaactgttaatgg

SEQ ID NO: 42232 - DNA, 367 bp, Glycine max
  Clone ID: LIB3139-043-P1-N1-A1
aactaactctctcatcttctacagcattcttctgcaattcaaatcaaattttcaaaccatggcttcctccaccaacgctcttcctcccaccggcaacggcctcatcgtgagcttcggcgagatgctcatcgatttcgtccccaccgtctccggcgtgtcccttgcggaggctccgggcttcctcaaggcccccggcggcgcccccgccaacgtcgccatcgccgtcgcgaggctcggcggaaaggcggcgttcgtcggaaagctcggcgacgacgagttcgggcacatgctggctggaatcctgaaggagaacgacgtgcgatccgacgggatcaacttcgaccagggcgcgcgcaccgcgctggcg

SEQ ID NO: 42233 - DNA, 351 bp, Glycine max
  Clone ID: LIB3139-043-P1-N1-A11
caactcttcacttgttaatgcttcctcctgaaagttctaaactcaacgcaatggagcttagcaaagtcacgttagagatcttttcaaaattggagcagcaatggctctcgcactacgaagcatcaaccaaaacgcgcattctcagcattgacggcggaggaaccaccgccattgtcgccggcgcctccctcgtccacctcgaagaccagatccgcgcccaaacctccgatcctcacacgcaaatcgccgattacttcgacattatcgccggaaccggcattggcgcaatcctcgcctccatgatcaccgccgacgacggtttcggccggcctctgtactccgccagagacg

SEQ ID NO: 42234 - DNA, 345 bp, Glycine max
  Clone ID: LIB3139-043-P1-N1-A12
taccaatttaatcctctcccaactcacaaagccgtgtgtacaggtcccgttgtcgacgcttcccctgaggttgatgcatagcaacaacttccctccgtcgatgacgccactcagaagaagataccccaaccacaggaggacgatgctccccttgtcgaggacttgaaggatgatgacaaagacgacgacgatgaagacgacgacgacgacgacgaagatgacaaggaagacgatgctcaaggtggtgctgagggttcaaagcagagcagaagtgagaagaagagccgaaaagcaatgttgaagctgggactgaaacctgttactggtgttagtagggtcacaatc

SEQ ID NO: 42235 - DNA, 363 bp, Glycine max
  Clone ID: LIB3139-043-P1-N1-A2
tcttggctcatctagctctaagcagcaacttgatggtgctgtagctttaagcaagttagccaataaagccttgaccttgtctcctgtggatgctgctcctccttctccaacaccacaggtctatttaggagagcagtatgtaaacaatgctacattgtctgacgttacatttttggttgaaggcaaacgattttatgctcatcgaatttgtcttcttgcatcatcagatgcatttcgtgcaatgtttgatggtggttacacggagaaggaggcaagggacatagagattccaaatattagatgggaggtttttgagttgatgatgagatttgtatattggggatcagttgatgtcactctgga

SEQ ID NO: 42236 - DNA, 361 bp, Glycine max
  Clone ID: LIB3139-043-P1-N1-A3
gctgttggcttgacatcaagttacactccaactccattgttggaatctggtttgcaaaaagacagagggttaattgtagagtattttggaaggatgtcttacgttgctcataacgttaatcagccccaagagaaagatttgttggagggaaatttttcctttgatattaaatctcgctctagattggaaaacgtttcctctacaaaagctcaatttgttagtggaaaaaccttcaaatatgatataattggtgctggttcacattcttcagaagattttcctgaaaaggaagatcaagaaaaacccaaaaagattgatgccagattgagacaaagaatagatcctcaatacaatgaggttc

SEQ ID NO: 42237 - DNA, 349 bp, Glycine max
  Clone ID: LIB3139-043-P1-N1-A4
gggtggctcctgaggacaaggcgagtttatggtcacaacttcattatgtttcgtgtaataatctggaaatgcaagaagcttatcttgtcaacctcgtaaatgtgttacgagaattgtatttgcacagtccagaggaagctcgccaattgagaaggaaagctctctctcgtattgaatggctgcaaaaagctgatgtgcctaccatagcacagattgaagagttccattcgatgcagaggatgatgaatgctcctgattcaaatgataatattgatttactgttgagcattgatttgttgggtttacaaggagcaagtaaagcttttccaaacaaaattgtttttgatga

SEQ ID NO: 42238 - DNA, 350 bp, Glycine max
  Clone ID: LIB3139-043-P1-N1-A5
cctacttccactttgtccttgcctcagacaatgtgttggctgcatcagtggttgcagcatcgcttgttcgcaactttttgagacctcagaaggttgttctgcatataattacagacaagaagacttattatcccatgcaggcttggttctcattgcattctttgtcacctgctataattgaggtcaaggcattgcaccattttgattggtttacaaagggaaaggtacctgttttggaagctatggagaaagatcaaaaggtgaggtcacaatttagaggggggtcatcagctatagttgcaaataccactgagaagccaaaagtaattgcagcaaaactgcaagcactt

SEQ ID NO: 42239 - DNA, 343 bp, Glycine max
  Clone ID: LIB3139-043-P1-N1-A6
tttagattcgtttggagcaagagtttatagacaatctcttctctcggcgatgacaaagttgtgtttcaatggacaataataatattctgggtcttctcaagcttcgaattaaaagaggcattaatcttgccattcgcgatgctcgtgccagcgatccttatgtcgttgtcaacatgggcgatcagaagctgaagactcgtgtcataaaaaaaaactgcaatcctgactggaatgaagaattgaccctctctgtaaaggacattaaaaccccaatacatctgacggtttatgacaaagacactttctctgtggatgacaaaatgggtgaggcagagatagactt

SEQ ID NO: 42240 - DNA, 357 bp, Glycine max
  Clone ID: LIB3139-043-P1-N1-A7
cctgcacactcttcactcgatcaaacagaaaatggcaaagaatgtggggatccttgccattgacatctacttccctcccgcttgcgttcagcaggaagcattggagactcatgatggtgccagtaaagggaagtataccattggtcttggacaagattgcatgtcattctgtaccgaagtagaagatgtcatctcaatgagtttgacagtggttacttctcttcttgagaaatatgagattcatcctaagctagttggtcgtctggaagttggaagcgagactgtgatagacaaaagcaaatccatcaagacattcctgatgcagatcttcgagaaatatggaaatactgacattga

SEQ ID NO: 42241 - DNA, 362 bp, Glycine max
  Clone ID: LIB3139-043-P1-N1-A8
atgcttgttactgcagagcagttctctgtcgcagaggagaggccattgacatgtctcaagatcacaggcctatttatccatcagagaggaggcgagttgaagaattgggtggctacatagaagatggttatctcaatggggttttatcagttactcgagcactgggggactgggacatgaagttacctaagggtgctccctcacctttgattgcagagccggagttccggcaagtggctctaacagatgatgatgaattcctcatcataggatgcgacggcatctgggatgtgatgtcaagtcagcatgctgttagccttgttcgcaaaggcctgaggcggcatgatgacccagagaaatgt

SEQ ID NO: 42242 - DNA, 353 bp, Glycine max
  Clone ID: LIB3139-043-P1-N1-A9
atgctatgttgcatgatagttcagtgtctacaataccaggtgattttgtcattggttaagttgacaaccataaacaatatgtgtgcatatgggctcaatcctggtatttcaggttctcgtcttttgggcaccattcctcagtccatttcacagcaaactgtttggaatcaaatggcaacagtgagaacaccattgaattttgattctagcaagcagagcttttgtcaattttctattgaccttctcggtggaggaattttagtggacaaaactggagattggatcacacttatacaaaattctccaattagtaacttgttgagagttgctgcttggaagaaaggttgtttaat

SEQ ID NO: 42243 - DNA, 362 bp, Glycine max
  Clone ID: LIB3139-043-P1-N1-B1
gtacagtctctttcttcatagcatttggaaatttggctgatgataccatcaattttgaggcttttccccacaagctggtgcagtttggagagattcaggaaaaagttgtattgaaattttcacaagaggaatttcttacagcttggtcaactcaggtgcgtcctgcaacaactctgttggctgatgggtgtccatatttgtatgcaatggtgcatgatagttcagtgtctacaataccaggtgattttgtcattggtgtcaagttgacaaccataaacaatatgtgtgcatatgggctcaatcctggtatttcaggttctcgtcttttgggcaccattcctcagtccatttcacagcaaact

SEQ ID NO: 42244 - DNA, 346 bp, Glycine max
  Clone ID: LIB3139-043-P1-N1-B10
atcttgtgttccgtcagaagtttttaaattttgtgaggttcattatgaagaaaagggacaagcttagttgtcaagttggaatcaacccatactccatggaatggactggtttggccaataggttactgagtaagggcaacgatattctgtgttgcgattatgctagttttgatggtttgattaccaagcaagttatgagcaagatggcagaaatgataaacagtctttgtggtggtgatgaaaaattgatgcgtgaaaggacacacctgctgttggcttgttgttcaaggatggcaatttgtaagaaagatgtttggagagttgaatgtggaatcccttctggatt

SEQ ID NO: 42245 - DNA, 350 bp, Glycine max
  unsure at all n locations
  Clone ID: LIB3139-043-P1-N1-B11
gctaggccatcattcaagtagactgattgaatattttcagaatatacctggggtgccaaagatcaaggacaattataatcctgcaacctggatgttggaagctacctctgcatctgtagaagcagaacttaaaatagattttgcacaaatatataaagagtcccacctttgccgggatacccttgaattggtgagagagttgagtgaaccactgccaggttcaaaagatttgcacttttcaactcgcttcccacaaaatagtttgggacagttcatggcatgcctttggaagcaacacttgtcttattggagaagtnctgagtacaacttaacacgtttcattttcatga

SEQ ID NO: 42246 - DNA, 348 bp, Glycine max
  Clone ID: LIB3139-043-P1-N1-B12
ggcgtcgtttcgaggctagagagtgaaagtagtagtgtacccacaaaccccttcttgtattccattttgtttggaacactgcgtaaggctgcgccaccacctccgcctccgtcgtccacggccagttgcttgcgttcctttcactttttttataattggctaagaataataatggcgtaccggcgctgcctcttgataagagggagcctcgtggatcggaggtgccatctgtctttcagttatgttctccacagcaacgaggggaagcgcgaacgcaccaatgaaaaatcatcttcaggaggggttggtgattttactcaaacaaggtcctttggaagctctcttaat

SEQ ID NO: 42247 - DNA, 349 bp, Glycine max
  Clone ID: LIB3139-043-P1-N1-B2
gcagcatcaaaatgagtggtagcaacgatggtagcggcagctggagctctaggtttttgaaggtggctagtgcagctgccgctacagccgccgttgccggcggtttatatgccattctttcatcctcaacctctgctagctctgagatggaagtgccgtttggcagcgcacggcgtgagagcaaagaacgtgacgatggtggctccgggtctcatcctcgcgagggtgccaccacggtcagtcgttggaagaaacctgagattggttgggtgaagctgaacgtggatggttcacgcgacccatacaaaagttcctccgctggttgtggtggtgttctgagggacgcatc

SEQ ID NO: 42248 - DNA, 360 bp, Glycine max
  Clone ID: LIB3139-043-P1-N1-B3
cttgtgttctttaattccctccaacaacttcacagcacacaagggtcggtgaaagccttgcctttaccttctctttctgtttgtgaagtgtgtgtgaggaagagggggaatggtgctgctctgaaaaggtccatttttgagattggcaacacagacccattggcacagttaaggaatccctgaaaccaaaatcatattttgacaatggggtttagatgggcatgtgccaacgtgttcttatccaagaggattttgagttcataagagatctagtgtttaagttgattcagggtctgaaaagcggctgcagaaaaatctgtcaaggatttttgattgtgaacagtgtttaaatctctgcga

SEQ ID NO: 42249 - DNA, 343 bp, Glycine max
  Clone ID: LIB3139-043-P1-N1-B4
ataatagcatctcagttgccaggaaggactgacaatgatatcaagaactattggaacaccaagcttaagaaaaaaatgatgggagtgaaaatgaacccttcagcactgaagaaacctcaccaagttaacctttcatccatgcttcaaaactcaacaccatcatcacccttcacctcattatccttcaaaaacaaccacaacaactcttactactaccaaccccatttgccctttacaggctccgagtccatgacatattcaagtcttctcagtgacaattattccacttttgagagccttcagaattaccaagttaataatagtggctttatgttaggatgtg

SEQ ID NO: 42250 - DNA, 353 bp, Glycine max
  Clone ID: LIB3139-043-P1-N1-B6
gagttggttagatgtcgcaaatcccatatttaaatgctctgacaaggttagatccttgatctcctctcttacattcagtataatgaagatctcagtcaaggatatttctgctagcttaacaaaaggtgctagtcaaccatatgaagctatatttgtgtcatcaaaaactaagaaaagtgatgcacttgatccactaattgtagttcttcatgggggaccacacactgtctcattgtcaagcttttcaaagccattggcttatctttcttcccttggatatagcttgttaattgtgaactacaaaggctcattaggatttggtgaggaagccttgcaatctcttccagggaaag

SEQ ID NO: 42251 - DNA, 359 bp, Glycine max
  Clone ID: LIB3139-043-P1-N1-B7
ggtcttcttaaactccttgcattctttctttctttacaacaatgactttcgaagagaaaacaatttatcaaaccactttagcctcaattccccactacacccttctagagtgtgtctttgggatttgcttcacagtgatcaccatcctccttcagcttccttatgagtacatagacaacaatccagttcccaccatagtcttcaagggtcgcccgagaacattccatgccttcataatatgcataatcttcgccttctcgggtgccaccaatgcacttgtggcattcaataagtcaagattttctaggctttgtgggtattatgcaatggcttctatggcttcggctttggcaattctc

SEQ ID NO: 42252 - DNA, 360 bp, Glycine max
  Clone ID: LIB3139-043-P1-N1-B8
ctgtgtttttgtttttgttcttcgatggcggcaaccgcaacatcactggcttctcaactctacattggcctgcgccgcccctgcctcaagctcgattctttcaattctcaatctttctctctcttcgaccctaatcttcgcctatccctctctccacccaaaccctcacgcgccgtcatcgccatggccggcaccgggaagttctttgttggtggcaactggaagtgtaacggaacaaaagactcaatcagcaagcttgttgctgacttgaacaatgcaaaattggagcctgatgttgatgttgtcgttgcacctcccttcctctacatcgatcaagtgaaaaactcactcactgagcgg

SEQ ID NO: 42253 - DNA, 348 bp, Glycine max
  Clone ID: LIB3139-043-P1-N1-B9
gaaaatctttctagctggtcataatatcaccattactgatggtattgacaaaactagtgcaactttgcaatttagaaagttagcagattgtgattttctcaagagaaactttaagcagatgtctaatgttttatgggtggctcctgaggacaaggcgagtttatggtcacaacttcattatgtttcgtgcaataatctggaaatgcaagaagcttatcttgtcaatctcgtaaatgtgttacgagaattgtatttgcacagtccagaggaagctcgccaattgagaaggaaagctctctctcgtattgaatggctgcaaaaagctgatgtgcctaccatagcacagat

SEQ ID NO: 42254 - DNA, 268 bp, Glycine max
  Clone ID: LIB3139-043-P1-N1-C1
cgccaagctatgtatcaacgatagcactctaacgttgcggacactaagctacggcagcatgatcacaacgggataggggatgggacgtgtataggctgtgctatctatgaactaaaataatgcgctctgagactctatgttggacacaggaagatgcaacgaaaatgcattctgttgcttatgttgcgccacaagagcggctaaagcgagctgacaagagagaaacactgtctgggcagacacatgtggtgaactaagaccaatattc

SEQ ID NO: 42255 - DNA, 344 bp, Glycine max
  Clone ID: LIB3139-043-P1-N1-C10
tttcattgttttctccctcttcgctctctctcagtgaccagagacagatgatgatggagatggcgaagcgaaacgctgtcgttgcggcactcgcggcgttggtgctactcgcggcgagtgtggcggtggatgctcaggagaactcggacgtgaagacgctggtgaagtacaagcacgggaagaagtactgcgacaaaggatgggaatgtaagggctggtcaatttactgttgtaacctcaccattaccgattatttccagacctaccagttcgagaatctgttctccaagcggaactcgccggtggcgcacgcggtcggattttgggactaccactccttcatc

SEQ ID NO: 42256 - DNA, 349 bp, Glycine max
  Clone ID: LIB3139-043-P1-N1-C11
agaacacatttggaggaaccattctgcgtagtgatctattggcaaattttttgacagagggcaattttagagcaagtgttgatttgcagcgcactcatcgtattaaaggaatgattaaaatggtggccacagttggtattcctgagaatacaggtatagcattggcctgtgctatgaatagttcttttagggggcgcgccagttctgatatttacaccatctgctctcaagactgtgaattatggaattctgcttgcacaaaagcaatgactatgtcatttaatccaaacccgtgttctgatgcatggagtttggaatttctgaagcgtaccggatttcattgtgatat

SEQ ID NO: 42257 - DNA, 348 bp, Glycine max
  Clone ID: LIB3139-043-P1-N1-C12
cagagcctttgcttccgacacaaatcaatctttctgatcatatattattcttttgtttttttaatttattctccatacacatgcagacaataagttcgaacaagttcaggagcggcatggatttcttccaccgcgcgaaggcggtgcgcctccgcagccaccacgacaagtacctcctcgcggaggaggacgaggagtcggtgacgcaggaccgcaacggctcctccaaaagcgcacggtggacggtagaatacgtggccgaatacgacaacataattcgcctgaagagctgttacggcaagtacctcaccgcttccaaccacctcttcctcttgggcatgacgggcc

SEQ ID NO: 42258 - DNA, 360 bp, Glycine max
  Clone ID: LIB3139-043-P1-N1-C3
gacaggaactttatacaatgaagactgcaaagggcaagggagcagcgaggccctcaaaagaatcactgaagcctgttgatgaccgaaaggttggaaagcggaaggcttctggtaagcctgagaaaagcagagcaccaaagaaggagaagaaggccaagaaagaccccaacaagcctaaaagaccaccgagtgctttcttcgtgttccttgaggagttcaggaagacctttaaggctgagaatcctctcgtgaaggctgtatcagttgttggaaaagctggaggagagaaatggaaatccctgtccagtgctgagaaagctccatatgaagccaaggctgcaaaaaggaaagctgagtatg

SEQ ID NO: 42259 - DNA, 352 bp, Glycine max
  Clone ID: LIB3139-043-P1-N1-C6
catgggtgtgttttaccatgaagagccaccaaaccatcccaagagatgcaaataccttgtggcaacttttattaaggaagttttctccagttgccagagttttgcagcacggctttcaacttcaagttttgaggatgagtacccagtgagcgattttgacgaggaacaagaattgtttatctcagcagtgataagccgaaccatggagaaacagaagcacaagccaaatgtgttgagacacaacttttcttgggtatactctccagcaacgaaagaactttatttcactactcaggcagtggcaccacaagaaaaggtggagagtgatcaagaaagtgatgaaggagaagag

SEQ ID NO: 42260 - DNA, 359 bp, Glycine max
  Clone ID: LIB3139-043-P1-N1-C7
atcctaagtctttgggaatagtgctgcaatggcttcaagtcaggaggaggtgacccttttgggagctactggaagcccatttgtgtgcagggttcatattgccctcaagttgaagggagttcaatacaaatatgtcgaagaaaatttgaggaacaagagtgaactgcttctcaaatccaacccagttcacaagaaggttccagtgtttattcacaatgagaagcccatagcagagtctcttgtgattgttgaatacattgatgagacatggaagaacaaccccatcttgccttctgatccttaccaaagagccttggctcgtttctggtccaaattcattgatgataaggtttttggtg

SEQ ID NO: 42261 - DNA, 359 bp, Glycine max
  Clone ID: LIB3139-043-P1-N1-C8
ggctgatttaggtaccatgtctttaaactttgacaggaggaagaaggttggttcaaagccagaactccccgttcttgacagtgttccaccctcaaaaattggggctatttatctctctgatgcttcatcgcctttatcaaattattctgaaaagacaaaggaggagtcaaaaagcaatgagatcataccagtttctggagaaatacatgtccaagatgtcatgcctaccaatcacaaggtccaatcaaagcacaatggggacaaaaatgcttcaccaaaagttgttccaatcacctctgttgatgacacgggatgtcttactaaaccagatggtggatccatgaatttttgtttgtctg

SEQ ID NO: 42262 - DNA, 361 bp, Glycine max
  Clone ID: LIB3139-043-P1-N1-D1
catacctttttttcaacatgaaagacaccattgttctataccctaatcttggtaggggacacctagtttccatggtggagttgggaaaactcatactgacccaccacccttcactttccatcactattctcatcctcactcctgccaccaccccttccaccaccaccaccttagcctgcaactctaatgctcaatacatcgccaccgtcaccgccaccactccctccatcacgttccaccgcgttcccctcgccgcactccccttcaacacccccttcctcccccctcacctcctctccctcgaactcacccgccacagcacgcaaaacatcgccgttgcactccaaaccctcgccaaagc

SEQ ID NO: 42263 - DNA, 350 bp, Glycine max
  Clone ID: LIB3139-043-P1-N1-D10
caccttttactggacaggttgtttattcaatgggtctttttggccccggaccttgcgatagtggtgaaatgcccaatatttttccaggccatacagattgcccttatggtagaaatccagagttgtttgttcaaaatccttgtataaatcatctctaaattccttctccaaaccataactgtagaatctgaaaaggcactctataccataattataattagccgcagcatcttccttagctaatttcttaaattcattatacatagaaggcacaaacatgtctcgaagaaaataggaccagaatctgtataatgtattcatttcctcactgcaaccaattccaagttttt

SEQ ID NO: 42264 - DNA, 348 bp, Glycine max
  Clone ID: LIB3139-043-P1-N1-D11
atcaattttgaggcctttccccacaagctggtgcaggttggagagattcaggaaaaagttgtattgaaattttcacaagaggaatttcttacagcttggtcaactcaggtgcgtcctgcaacaactctgttggctgatgggtgtccatatttgtatgctatggtgcatgatagttcagtgtctacaataccaggtgattttgtcattggtgttaagttgacaaccataaacaatatgtgtgcatatgggctcaatcctggtatttcaggttctcgtcttttgggcaccattcctcagtccatttcacagcaaactgtttggaatcaaatggcaacagtgagaacacca

SEQ ID NO: 42265 - DNA, 350 bp, Glycine max
  Clone ID: LIB3139-043-P1-N1-D12
gtgccaactttgttgcccctggttacaccaagggtgatggtcttggtgctgagattgttggcactttcatccttgtttacaccgttttctccgccaccgatgccaaacgtagcgccagagactcccacgtccccattttggcacccttgccaattgggttcgctgtgttcttggttcacttggcaaccatccccatcaccggaactggtatcaaccctgctcgtagtcttggtgctgctatcatcttcaacaaggaccttggttgggatgaacactggatcttctggggggaccattcatcggtgcagctcttgcagcactctaccaccaggtcgtaatcagggccattc

SEQ ID NO: 42266 - DNA, 358 bp, Glycine max
  Clone ID: LIB3139-043-P1-N1-D3
catatgtgtaatggttatcctgtctctctcgttgtgcctagtcctcctaggtctccgaagtttccaaataggaatccatgggaaactgttcatcaatgtgtaccgattaatcacagtattcgttctcaggcaaactcaaattgtgtaatgggacaacaagtttacgtcataaatcatcctactctgccaatgacttcttttggttcagaagagaagagaaaagtacgaggaacaggcgcatacttcccgaatatgacttcccgtccttacagggacaataggccaataccaggaaggggaaggggtcaagcaccaggtactcatggacatctgcagagacacagccgtaacaatggct

SEQ ID NO: 42267 - DNA, 386 bp, Glycine max
  unsure at all n locations
  Clone ID: LIB3139-043-P1-N1-D5
aagagcangacggccacggccgccgccgaagctcgaattcgctcgagctcaagatcatgtactgcgtttcggaagcagacacagatggctcgtacgaagcaaaccgctcgtaagtccacaggaggaaaggctcctaggaagcagcttgcaaccaaggctgcacgtaagtctgcaccaactactggtggtgtgaagaagccccaccgttatcggcctggtaccgcagctcttcgtgagattaggaaataccagaagagtaccgagcttttgatcctgaagctcccctttcagaggctggttcgtgaaattgctcaagacttcaagactgatcttgcgttccagagccacgccgtgcttgcattgcaagaagctgctgaggcataccc

SEQ ID NO: 42268 - DNA, 261 bp, Glycine max
  Clone ID: LIB3139-043-P1-N1-D6
ttttgtgcgccggtgttttaagggaaagaaaatgaccttttgcgttggcaacagactacgcgaatcatttgctttcccactcttagttgattagttgaccactatcctatttgatataggacttcttgtcagatgtaaacttcttctgtctctttctcagttctctggtgaatttcaagttcaagctggtgaaatcttggattagtgctcccactctcctatctggtataggacttcgtgggtagacctttctatttctct

SEQ ID NO: 42269 - DNA, 355 bp, Glycine max
  Clone ID: LIB3139-043-P1-N1-D8
actcttcctcaccgattgctagaatggaatttcgatgctcagtcatctcttttaccattctcttctctcttgctcttgcaggagagagccatgtccatgcatcgctacctgaggaagattattgggaagctgtttggccaaacactcccattcccactgcactgcgagagcttctaaagcctctccctgcaggtgttgaaatcgatgaactccctaagcaaattgatgatacacagtacccaaaaacattcttctataaagaagaccttcatccaggcaaaacaatgaaagtacaattcaccaagcgtccctatgcacaaccttatggtgtatatacatggttaacggatattaa

SEQ ID NO: 42270 - DNA, 123 bp, Glycine max
  Clone ID: LIB3139-043-P1-N1-D9
ggcacgcgacagaagctcaaaatacaactttagccttttttttaaaaacaacaaaaacaaaacagaggcgcttttttaaactggtgcgccgccccaaaaaaaaaagaaagcaaattgatattc

SEQ ID NO: 42271 - DNA, 357 bp, Glycine max
  Clone ID: LIB3139-043-P1-N1-E1
cccatttgtcttaccaatggggaggatatggtcttcggttgaggacatcagacttgtggcgagtgtaaaaaggacctccaattctgtaccatttgccggagcacaatccatactagaataaggctttactagttagctttgatgcaaaagtcctgtcaatgaaaatatcgtcatttccagaataaggtgctgcaaaaggatgtgcagagttggtctggctcttttcacagatggttacttgttcataaaaactgcatttgcaattaacaggcgaaacttgtattctcagttacacttaagaagagctctttacagaaagaataggacttccccgttgtatatatgtagctcatgtgt

SEQ ID NO: 42272 - DNA, 349 bp, Glycine max
  Clone ID: LIB3139-043-P1-N1-E10
cactcactcgcaagcaaaaagaaagaatcccaggcgaggagaaagatggaggggaaggagcaggatgtgtcgttgggagcgaacaagttccccgagagacagccgattgggacggcggcgcagagccaagacgacggcaaggactaccaggagccggcgccggcgccgctggttgacccgacggagtttacgtcatggtcgttttacagagcagggatagcagagtttgtggccacttttctgtttctctacatcaccgtcttaaccgttatgggagtcgccggggctaagtctaagtgtagtaccgttgggattcaaggaatcgcttgggccttcggtggcatgatct

SEQ ID NO: 42273 - DNA, 261 bp, Glycine max
  Clone ID: LIB3139-043-P1-N1-E12
gcattctcttaacacttcgggaagtgccctgagggaatgcctctttctatagggggaggagctggtgcaaagaatgctattctcatgaatatgccaaatgctgttctttcaatgtggagatattttgttggagatctcgtctttgaagtttctaagatgacttctccctacattaaatgtacagtctctttcttcatagcatttggaaatttggctgatgacaccatcaattttgaggcttttccaaactgcaccagcttg

SEQ ID NO: 42274 - DNA, 321 bp, Glycine max
  Clone ID: LIB3139-043-P1-N1-E2
ctcaagcttattctgcttaagatctttggagatactattggtctatctaacaacagttggtggatgcatggctattatcgcgtgaagcgattgatgaatcataaaatgtacttggagaaagggggggagcacactcagtggatctcacatgagtgtgcaccaggcactatgtaccctgactgatgcgggtgtgggccatatataacatgcgtctataagctagttgtcgaagataatgaaatgctacctatgttttaaaggaagcacatatattatttactcattgaagtagctctaagtcatatcatctcctagttacag

SEQ ID NO: 42275 - DNA, 357 bp, Glycine max
  Clone ID: LIB3139-043-P1-N1-E3
cggctcgagatcctatcttgtttgcatgtcaaaatctcattcatcatcatcttcttcttaaaagttaaaaggttaagagagagagagaaagatgagtagcgtgttggagcatggtgttgtgggatgttgcaaatcagggccaggctatgctaccccactggaagccatgtctggtccaagagagtctcttatttatgtaactgctgtctacacagggacaggaatagagaagccggactatttggccacagtggacatagatccaaactctccaacttattccaaagtcatccataggcttcgtgttccttatttaggtgacgaattgcatcacactggttggaattcatgcagctc

SEQ ID NO: 42276 - DNA, 353 bp, Glycine max
  Clone ID: LIB3139-043-P1-N1-E5
tctttcttgccagtagattaataagatctagttagctgtacggatctctaccactccacgaaatcccttttttcagtaacttgctttttgttacccacaacaattaccaaaccctcaacaaatgtctgaacgaggtgaagacactgtccactctccttctgaacgtaaaaggtcacttccgtctgacgacgaggaagacgaccttagttctgacgaaagaggaggacgtttcaaacgtcccgctttaaatacttctggaggtgaggacgataactcttcagaattagactataccgatgaaccacctgctgaagaacgtccggtaactccgtcagaaactggtgacgttatgg

SEQ ID NO: 42277 - DNA, 352 bp, Glycine max
  Clone ID: LIB3139-043-P1-N1-E6
ctcgagccgattcggctcgagaacaaggtcttgatcttctctccactggggttccctccgtttcttgagcccctttttttcttttccgggcctttgccaattctcaatggaggttccagaaatggaaggcaagactgaaagtcatatgacatcagcagcagcctttgtggaagggggggttcaagaagcttgtgatgatgcttgcagcatatgccttgaggatttttgcaaaagtgatcctgccactgtcactaattgcaagcatgagttccacctgcagtgcattcttgaatggtgtcagagaagctcccagtgtcctatgtgttggcaacctatcagcttgagggatgct

SEQ ID NO: 42278 - DNA, 349 bp, Glycine max
  Clone ID: LIB3139-043-P1-N1-E7
agagagagaagttttcagtttcagaaagaaagcaaaagcaatagcaatgggttggatcggtgagactgttgattccatcaaatctcttcagatccgccaggtcctcacccaggctgtgagcctaggcatgattgttacgtctgcactgataatatggaaggcattgatgtgcgttactggcagtgaatctcccgttgttgttgttctttctggaagcatggaacccggattcaagcggggagacatcttgttcttgcacatgagtaaagatcctattcgggcaggggagattgttgtgtttaatgttgatggacgtgagattccaattgttcattcgtgttattaaggt

SEQ ID NO: 42279 - DNA, 148 bp, Glycine max
  unsure at all n locations
  Clone ID: LIB3139-043-P1-N1-E8
attacanatatggaatgtaacaaataaacaaaggggggggattaatgaaggaggggggcgcgccaaaaccacnaacaaataaagaatcatgagccaccactacaaagaaagtagaatcatcctttgaaacacacgttttttttttctt

SEQ ID NO: 42280 - DNA, 136 bp, Glycine max
  unsure at all n locations
  Clone ID: LIB3139-043-P1-N1-E9
tatattcntccaccccanaaaaagaaaatgtgggaaattgtatgggcacgggcgccacaaaatcacctcctcagtagcttccgctactctttacaatgcactagttacagatgctttttaacatcattccattttc

SEQ ID NO: 42281 - DNA, 359 bp, Glycine max
  Clone ID: LIB3139-043-P1-N1-F1
gttcgaacaaaattagggttttctcaaccctagggtttaccttctcttcccctgttcgaaattaggcaaatcagaacagaaacacgactacaaaaagaagaaaagaagaaaaagaatcaatcattcattgatcgctgaaacgatacgatgacagggaaggcgaagccgaagaagcacacggcgaaggagatcgcggcgaaggtggacgcggcgaccacgaaccgcggcggcgggaaggcgggtatgaaggaccgaaccgggttggagaagggcgggcacgcgaaatacgagtgccctcactgcaaggtgacggcgccggacgtgaaatcgatgcagatccaccacgacgcgcgtcaccc

SEQ ID NO: 42282 - DNA, 346 bp, Glycine max
  Clone ID: LIB3139-043-P1-N1-F10
atcatcatacatgtttgttttaggaaaataggctttattattattattattatttattttaagtaggttgtagaaataggggaagatcatattcattcatgtattcagcattgggtagaatctaattatttgagctttggattctaccttttagagtaactcaaccaaagattattgtgtcttgggtgatgggagcacccaatgacatagttctttgtttatagtatttcagtagatggggttcaaaagatcattttatatcttttgaacttttcattggccagtcaaataggaagacaaaattgagcttggattgctcaataggctagcatgtattttatttttt

SEQ ID NO: 42283 - DNA, 344 bp, Glycine max
  Clone ID: LIB3139-043-P1-N1-F11
gcgcacttttcgtattaaaggaatgattaaaatggtggccacagttggtattcctgagaatacaggtatagcattggcctgtgctatgaatagttcttttagggggcgcgccagttctgatatttacaccatctgctctcaagactgtgaattatggaatcctgcttgcacaaaagcaatgactatgtcatttaatccaaacccgtgttctgatgcatggagtttggaatttctgaagcgtaccggatttcattgtgatatcatttgtgtcactggatggactgccaccccaatgcaggatgttcaggttacaattgattggtttatttcctctcaagaatgtg

SEQ ID NO: 42284 - DNA, 350 bp, Glycine max
  Clone ID: LIB3139-043-P1-N1-F12
cttggactttcaacaagttcctcggacagcaaggagagttcagctactgcttgcactgctttgtcttcagccaaagagattgatgaggaatcgtccatgcctatggatattgaactggactttacacttcatcttggctgcgagaaggtaaagagcccaaaaaaacttgctagttcaaatttgaagatatttgagttgcagcctaaggttgatttggagttgagcctttccacacggccctctgaatcagatattactagtgtttgtctaagtccttctcacgccccatctttccgattgaacatggagacaccattagtattcagcaggacaccaaatgcagatgaggg

SEQ ID NO: 42285 - DNA, 271 bp, Glycine max
  Clone ID: LIB3139-043-P1-N1-F2
ttggagcttttttaactccacactccacaacaaagagcgggtgcaaaccgtttccattactttaacacccccctgaatatcatcacttaatttgaaggaaagattggaggcggcacctcattcgtctgtgactaaataatactactacttcttcactcaaaaacgagatagctggagacggaacaaaatggctataatagcacgacgatggtctctacttcaagcagatgacccacaggcacatcacaccacaggctcaaagaccaaatat

SEQ ID NO: 42286 - DNA, 247 bp, Glycine max
  Clone ID: LIB3139-043-P1-N1-F3
aatacactgggtatgacagcattaatgatcatgcacaaattgctttcgatgatggaagataattaattatggctaagcagcatacgctccagtttgcttcaaagttctgttacaaccttctgtattcatgatgaaaaatccattgagttgttttcatgagtgtgtatttgtgtgtatttatgtattgaactatgttatgtagtaaagttaaagacttaaaattatatatatgcaatgcgcttacttc

SEQ ID NO: 42287 - DNA, 353 bp, Glycine max
  Clone ID: LIB3139-043-P1-N1-F4
aaaattgttggtgtcatcagccaaatttgaggcctttccccacaagctggtgcagtttggagagattcaggaaaaagttgtattgaaattttcacaagaggaatttcttacagcttggtcaactcaggtgcgtcctgcaacaactctgttggctgatgggtgtccatatttgtatgctatggtgcatgatagttcagtgtctacaataccaggtgattttgtcattggtgttaagttgacaaccataaacaatatgtgtgcatatgggctcaatcctggtatttcaggttctcgtcttttgggcaccattcctcagtccatttcacagcaaactgtttggaatcaaatggcaa

SEQ ID NO: 42288 - DNA, 334 bp, Glycine max
  Clone ID: LIB3139-043-P1-N1-F5
cttaagcttgcttctgagttgccacactgcatacctgagggcttacaaattcgaaggtgatttgcaagatggctaatgaaaaggctcagatcaacattgtggtggttggtcatgtggaccctgaggaggcaaccaccattaacgagctgaagaagcctgttgtggagaaagaagctccagggcatgccatatgagggcatgcacgtacggcctcggagtggaaccagaaaattatgttaacaaaataatctggaaccctaatgtatcagtgtcatcatcagtgtgtagtttaagctagctttgctatggttacgttctttgagatgagagtctt

SEQ ID NO: 42289 - DNA, 353 bp, Glycine max
  Clone ID: LIB3139-043-P1-N1-F7
aattatttatatatcaatcgatcacaacccaacgaattagttgaaataaaattggagatagaaagcaaacaacatcatgccatcaacaaggtcatgggaaatggagcacgatgagtgcatcagttgtggcggttttattgggttcaagagaaaccaagtgatagattgcagcagcgagataggagattctgatacagaggagttgtttgagataaatctgaaggagaaggagcctttggctttggatgcaataagagaagactgcgagatcagcactgtgttctcgcttgatattgatattcacgacggcggtagcggcaacgatgatgatgttgtttatgtggcagtaggca

SEQ ID NO: 42290 - DNA, 354 bp, Glycine max
  Clone ID: LIB3139-043-P1-N1-F8
tgcaatgttctcacagtgccattttctctctcactcgccaattcccaatactacctggcgtctcagagccatggcgcctcacagcacgcctcttgaactcaatcgcttcgccgaggtcggtaacaaagtcgccgatgctgccggagaagttatccgcaaatacttcagaaaaaacttcgacgttattcacaaacatgatctcagtccagtaaccattgcagatcaatctgctgaggaggctatggtttcaatcatactagacaatttcccttctcatgccatttacggagagggaaaatgggtggaggtgtgaagaaaagaatgctgattatgtttggggattagatcccatag

SEQ ID NO: 42291 - DNA, 353 bp, Glycine max
  Clone ID: LIB3139-043-P1-N1-F9
gcgaggcatcaataaaagaaatagttgagatgctttttgtgaacccagagccagagaatgttaagattctagaggaaaccattagtatgtgtgaagtgcctgcaataactggagaagaaagatattgtgcaacttcattagagtccatggtagattttgtcacttctaagcttgggaagaatgctcgagttatttctacagaagcagaaaaggaaagtaagtcccaaaaattctcggtgaaagatggagtgaagttgttagcagaagataaggtcattgtttgtcatcctatggattacccatatgttgtgtttatgtgtcatgagatatcaaatactactgcgcattttatg

SEQ ID NO: 42292 - DNA, 355 bp, Glycine max
  Clone ID: LIB3139-043-P1-N1-G1
ttttagggggcgcgccagttctgatatttacaccatctgctctcaagactgtgaattgtggaatcctgcttgcacaaaagcaatgactatgtcatttaatccaaacccgtgttctgatgcatggagtttggaatttctgaagcgtactggatttcattgcgatatcatttgtgtcactggatggactgccaccccaatgcaggatgttcaggttacaattgattggtttatttcctctcaggaatgtgttcccaggacctattgtgttttaaatccacaaaatccttttgtgttaaataggtggatgggaaaattgactttcccccagggcacttcccgaagtgttaagagaatg

SEQ ID NO: 42293 - DNA, 351 bp, Glycine max
  Clone ID: LIB3139-043-P1-N1-G10
cctcatcttattttgctcctgctaagtcacgaatgcgttggacaccagaacttcatgaggcgtttgtggaggctgtcaaccaacttggggggagtgaaaaagctactccaaagggcgtgctgaagctcatgaaagttgaaggattaactatatatcatgttaaaagccatttgcagaaatacaggacagctagatatagaccggagtcatctgaaggagttatggagaaaaaaacaagttccgttgaagagatggcatctctagatttgagaactggtattgagatcaattgaagctctacgactacaaatggaggttcagaagcggttgcatgaacagcttgagattcaa

SEQ ID NO: 42294 - DNA, 348 bp, Glycine max
  Clone ID: LIB3139-043-P1-N1-G11
ggaatagttagtgatgttaaagatcaaggcagctgcggatcatgctggacattcagcacaactggggctttagaagcagcctatgcacaagcatttgggaagagtatctctctttctgagcagcagctagtggattgtgctggccgtttcaacaactttggctgtaatggtgggttgccatcacaagcctttgagtacatcaaatacaatggaggacttgagacagaggaagcatacccctacactggaaaagatggtgtatgcaaattctcagctgaaaatgttgccgttcaagtcattgactcggtcaatatcaccttgggtgctgagaatgaattaaaacatgca

SEQ ID NO: 42295 - DNA, 352 bp, Glycine max
  Clone ID: LIB3139-043-P1-N1-G12
taaaggtttcatgttggatcttaaaatttctcaatctaaaattgcacttgccaagaacacagttggaggaaccattctgcgtagtgatttattggcaaattttttgacagagggcaattttagagcaagtgttgatttgcagcgcactcatcgtattagaggaatgattaaaatggtggccacagttggtattcctgagaatacaggtatagcattggcctgtgctatgaatagttcttttagggggcgcgccagttctgatatttacaccatctgctctcaagactgtgaattgtggaatcctgcttgcacaaaagcaatgactatgtcatttaatccaaacccgtgttct

SEQ ID NO: 42296 - DNA, 360 bp, Glycine max
  unsure at all n locations
  Clone ID: LIB3139-043-P1-N1-G3
tttcagcttgatgatgcacatattttctgcagggagtgccggataaaggatgaagtgcggaatggctagaatnncatcaattatgtctataagatatttggtttcacgtatgagctgaagctttcaacgaggccagagaattttctatgagatattgtaactcgggacaaagcttaaagtgcttttaatgaagctttttatgattttggttatcctattctttttaattaattttcttcttttttttttttttttatactttttttatgtgggttgcgctatttataaaacattacatttttccattttttcatttatttttattttttctctaatatctttgtttttattctttttttt

SEQ ID NO: 42297 - DNA, 188 bp, Glycine max
  Clone ID: LIB3139-043-P1-N1-G4
cccaaaaaaaaaccttacaaccaacttttgtttagttaaaaaactactccaaatgtcgtgcttaagctcatcaaagtttaaagattaactatatatcatgttaaaagccatttgcagaaatacatgacagctagatatatactctaatcatcttaactagttattgaaaaaaaaacaatttcctttta

SEQ ID NO: 42298 - DNA, 350 bp, Glycine max
  Clone ID: LIB3139-043-P1-N1-G5
ccgggaaccagtgttgaagaggcttacaacaagctaatagttgaacttgagaaaagtgttcccacattggttggcattgaatgtcccaaggatgaaaaacttcctcgtcgcaaaatttttgacaaacctaagacgcgctgcttcactattctccctatggagtttaatcttgtggtccgtcagaagtttttaaattttgtgaggttcattatgaagaaaagggacaagcttagttgtcaagttggaatcaacccatactccatggaatggactggtttggccaataggttactgagtaagggcaacgatattctgtgttgcgattatgctagttttgatggtttgattac

SEQ ID NO: 42299 - DNA, 345 bp, Glycine max
  Clone ID: LIB3139-043-P1-N1-G7
aattttaataaaccgcgatcacaggttgccgcaccttaaaaccggaaacaaaagcaatcgttacttgatttcaagaatttctcaatttcttcctacttctttgtgtacgatttcttaagggaaagaaaatcactctctgtgctggtcacagacttcgtgaatcattttcttttccactcctagtttatttgctgaacactctcctatttgatataggacttcgtgtcagatttaaactttttctgtttctttctcagttctctgtttaatttcaagttcaagctggtgaaattttggattagtgctcccactctcctatctggtataggacttcgtgggtagact

SEQ ID NO: 42300 - DNA, 338 bp, Glycine max
  Clone ID: LIB3139-043-P1-N1-G8
cgcagagcttagcagagccaagaagaagaagaagaaaaccaacataatcaacaacaacaacaacaaaaagcttgcaaattagaagaatcttcagttaaaagggaggaagaacacacaagaagaaagagaagaagaaacgcgcgcgaatgaagggagaattagagttgccacctgggttcagatttcaccccactgatgaagaattggtgaatcactacttgtgtaggaagtgcgctggtcaaccaatcgcggttcccgtcatcaaagaggtcgatttgtacaagtttgatccatggcagcttccagaaattggtttttacggcgagaaagaatggtac

SEQ ID NO: 42301 - DNA, 342 bp, Glycine max
  Clone ID: LIB3139-043-P1-N1-G9
atgtattttagttcttctcaagggctggcaaggtgcgagatgttcgcttgattatggatcgcaattcaagacgttccaagggtgttgggtatattgagttttatgatgtcatgtctgtccccatggcaatagcactttcaggccaacctcttcttggtcaaccagtgatggtgaagccatcagaagccgaaaagaatttggttcagtccacaacatctgttgctaatggactcactggacttataggcccttattctgggggagcaagaaagctgtatgttggtaatctgcatatcagtattactgaagctgatattcgtagggtgtttgaagcatttggtc

SEQ ID NO: 42302 - DNA, 351 bp, Glycine max
  Clone ID: LIB3139-043-P1-N1-H1
gagcaccatcacattcactgccatcttcactagaaaacaatgtcaagtgtttcttttcttttggccttgttcatggtagtagctttgtctatctttccttccatagtgggtgcaataggtgagcaccggctaaggtgggtgcctgagacaacaacaccatgccaaagctccatagaagagtgcatggcagaaggtgagtttggaatggattcagagtcccaccggcgcattctagcgacctcacaatatataagctacaaggcacttcaacgtaacaccgtgccatgctctaggaggggtgcttcctactacaactgcaagccaggtgcagatgctaatccttacactcgt

SEQ ID NO: 42303 - DNA, 348 bp, Glycine max
  Clone ID: LIB3139-043-P1-N1-H10
caacgtttttggtggtgccggcggtgctggaaaccgggtcgtaacgacgtcgctgtgcgtcggagatctcgacccgaacgtcacggacgcgcagctctatgacttgttcaaccaattggggcaagtcgtgtccgttagggtttgcagggatttgaccagccggagatcgctcggttatggttatgtcaactttagcaacccgcaagacgctgctagagcattggatgtgctgaacttcactcctctcaataacaggcccatccgtattatgtattcgcatcgtgatcccagtatccgtaaaagtggacaaggaaatatatttattaagaatttggatagggcaattga

SEQ ID NO: 42304 - DNA, 345 bp, Glycine max
  Clone ID: LIB3139-043-P1-N1-H11
ctcaatacaatgaggttcaggctcagatggaaacaaatttgtttaaattgtctcttgatgatgttgaaactcctaaaggttctatgttggatcttaaaatttctcaatctaaaattgcacttcccaagaacacagttggaggaaccattctgcgtagtgatctattggcaaattttttgacagagggcaattttagagcaagtgttgatttgcagcgcactcatcgtattaaaggaatgattaaaatggtggccacagttggtattcctgagaatacaggtatagcattggcctgtgctatgaatagttcttttacggggcgcgccagttctgatatttacacca

SEQ ID NO: 42305 - DNA, 223 bp, Glycine max
  Clone ID: LIB3139-043-P1-N1-H12
caattttcttttcttccctgggcctttattgtggcaggctctctgcaatccacagataacttagattacttccacatgctcatctcatcattcccagcttttcatctgagtgggagatgagaagaactggccgagctttaaaaaaaaaaaaaactgctcttgttttttctctgaatttcggtgtgatggagttcccttcccctactatgcgagtttggaccct

SEQ ID NO: 42306 - DNA, 353 bp, Glycine max
  Clone ID: LIB3139-043-P1-N1-H2
ccacgctcttgcttgcttttgtgtgagagaacaatggcaatggtgaagtctcccaagaagcaagtgaacctcttctattcccttgactgtgaagaccttgcccagaacgttgctcttcaatcaccccacatcgttctccagaacatcaaatggaggtcatttgctgatggatttccaaatatatatataaataatgcagaagaacttcgaggtcaacatgttgctttcttggcatctttcagctcccctgcacatgtctttgaacaactttctgtcatatatgcactccctcgtttatttgttgcttccttcacattggtattgcctttctttccaactggatcctttgagcg

SEQ ID NO: 42307 - DNA, 349 bp, Glycine max
  Clone ID: LIB3139-043-P1-N1-H3
ccattattggcccttcttgaaacttggtcatcaattgcgatgaaggactcaacatcttgacaccaccccatttcctaattgatttggattagtcgtgttggacctggatgctgctgctaatacagttgatccacaaatgagattccgcattgcattgtttctctttttggcttctcttcaagccactttaagtcaagatattgaacatggttcacttctagtagatggagctcagactaaggctgaaacaggtgataactttatttgtgccactattgattggtggcctcatgataagtgtgactataaccattgcccttggggatattctttttgtgtaaatttggac

SEQ ID NO: 42308 - DNA, 378 bp, Glycine max
  unsure at all n locations
  Clone ID: LIB3139-043-P1-N1-H4
gtaaagctggaatttggcctcgcgcagacactttttaaaatttttggacacttgaaaggggacaaaataaaaaccacattcttgggaattaatcttcccaataaaggtttgtggtcctaataatggttttgaaatgtggagttctgagtgggcaaatcaaacttaatggcatttgagtttccttattgacaatcccaaacagtctacagtttttgatattctcttgggaatctctcaagattttgaaattgctggtaatactcttatgccagctttntctgttccacaggctactgccagatcttctgaaaatgcggaatcctctgcatgatctggaattcgtgttttctttcgcttgttcgtttgtttaattcaata

SEQ ID NO: 42309 - DNA, 306 bp, Glycine max
  unsure at all n locations
  Clone ID: LIB3139-043-P1-N1-H6
cttgctcctaaaacatctccagtgggttcttcttcttgtattacaacaacgtcgtccaagaccatgaccatggccatggccacgatcctgctcctgttcacggtcttcgcggtttcatcggccctagacatgtcgataatctcgtacgacaacgcccacgccgncacgtcgcgcagcgacgaggagctgatgtccatgtacgagcagtggctagtaaagcacggcaaggtgtacaacgcgctcggagagaaggagaagaggttccagatcttcaaggacaacctgcgattcatcgacgaccacaac

SEQ ID NO: 42310 - DNA, 351 bp, Glycine max
  Clone ID: LIB3139-043-P1-N1-H7
ggagaatgtaaggtggaattggtgttggtggcagtggtggcggcaagggtgcccgtggaatattcaacataggaaaagcaccagttactaaagtagacaaaaatgccaaaaacaagatctattttaaagatgttgctggctgtgatgaggcaaagcaagaaattatggagtttgtccacttcctcaagaacccaaagaaatatgaagaacttggtgcaaaaattccaaaaggtgctctcttggttggtcctccaggcacaggaaaaacccttttagcaaaagctacagcaggggagtctggtgtgccatttctttctatatctggttctgatttcatggaaatgtttgttg

SEQ ID NO: 42311 - DNA, 345 bp, Glycine max
  Clone ID: LIB3139-043-P1-N1-H8
gggggatctacatctctatgggatcatcactttcgttactctcatcagcctgggaagaaatcgttaggcattcactctttggtctgtctttgaacttcacttttggttccaaagatggggctgtgattttgagatcaggcagcttcaagaaaagagaatcagaaactacttcaaagggtacctctactaccaacagttcaagcaagttgaaagattgcaggcccgaacacatggtcctcgaaagaaacctttcgtgcattaaagatatggagatcatgggatcagacagaagtgaacaattacagcacaagcctgtgcctgttctttctctgcctaaaagaagtc

SEQ ID NO: 42312 - DNA, 372 bp, Glycine max
  Clone ID: LIB3139-044-P1-N1-A10
atttcaattgtagctagtcattatgtatagttagagagtattagtcttttaactctcgcctttcaaaaaaaaaaaaaaaagaggtgataattcgttatggtgtttgttgtcttgattatacaatatagatcgttgacattattatttctttatgactaattttcaggtgacaagtctatgatcaagacgagatatatgtacctaaacgaagagatcttgaaagagaatccaaacatgtgtgcttacatggcaccttctttggatgctaggcaagacatggtggtggtagaggtaccaaagctagggaaagaggctgcagtaaaggccataaaggagtggggccagccaaagtcaaagattacccacttgatc

SEQ ID NO: 42313 - DNA, 375 bp, Glycine max
  Clone ID: LIB3139-044-P1-N1-A11
atagattactgagtaagggcaacgatattctgtgttgcgattatgctagttttgatggtttgattaccaagcaagttatgagcaagatggcagaaatgataaacagtctttgtggtggtgatgaaaaattgatgcgtgaaaggacacatttgctgttggcttgttgttcaaggatggcaatttgtaagaaagatgtttggagagttgaatgtggaatcccttctggatttccgctcacagttatttgcaatagcatttttaatgagatgctcattagatatagctatgaaaaattactgcgccaggctagagctccaagtatgtttttacaatccttcaaaaattttgtttctttgtgtgtgtatggtgatgata

SEQ ID NO: 42314 - DNA, 355 bp, Glycine max
  Clone ID: LIB3139-044-P1-N1-A3
atccaatcacattaagcgcagaaaaatcggaaaccacgccgccggcgatctcgattgggccgccgccgtcccttggagatccgacgtggagcagcggatctactcccgccgcctcgtggaggctctccgccgcactccgtcatcggcgaccaaacctagagccgccggccaggtccgcgagaccgccgaccgcgtcctcgccgccaccgccagaggccgaacgaggtggagccgcgcgattctcaagcgctggaggaagctccgcatgcagcacaagaaggcgaaagcggcatcgtccaacaacggtttgaagagaacgaggattggaaacggagagaggaggaaccggttaccg

SEQ ID NO: 42315 - DNA, 367 bp, Glycine max
  Clone ID: LIB3139-044-P1-N1-B1
ctcgagccgaatcggctcgaggatgagtctattctatggactgaaagccgtgactgaggagatggccacagagctataaggatggtcaacaatgttcatcttaatgtggatgcttttcacggtgacaagaattctggaggtgttcgtgatggcactacaatagtcctctgggactggaacaaaggtgataaccagcagtggaagatcttaccttactgatttcaattgacgaaattatcaatggctttgaagatgcatcaagttaagaggatagttggcccttgtatttgagtgggttggtgttgcctagagtatggaatggtgtgtagtgcatttgcttgtaccaagcaatcggcttttttcaata

SEQ ID NO: 42316 - DNA, 381 bp, Glycine max
  Clone ID: LIB3139-044-P1-N1-B10
gagagaactgactactgtccaaagaaaaattgcagatgtgcaagttgaacttcaagggcgaaaggatgacaaaaatgttgcacatttgactcatgtgagtgaaatggaaaagaagattgagacattggcaaggattactactatactcaaagatgttattcagaacaaggatcgcattatagctcgcctacagcagccgtattcccttgattgcattcctgttgaagcagaatatcagaagcaattctctggactactgataaaagcggctagggattatagggctttgacaccatcacaggcgcatttttagaggggtgagaaaatttcaaggaacctccttcagtttggggggaaatgcttcggcccattcctgtagct

SEQ ID NO: 42317 - DNA, 378 bp, Glycine max
  Clone ID: LIB3139-044-P1-N1-B12
ctcgagccgcgttttgctctacgcctctccctctctctcaaaaatcgttctcttcgattttagggttttgttttgctgctgcctccgttccccccttctcataaacaacgcgttttctcttctgcttcgtatctattctttgcttttggttttggttgattcaaggccttcacagcattcgttgcggcattttaatcgatttatccaagcaggactgaatgaactaatggagtctaaaggtgggaaaaagaagtctagtagtagtagtagtaaatcattgttctacgaagctcccctcggatacagcattgaagacgttagaccaaacggtggaatcaagaaattcagatctgctgcttactccaactgcgctcgcaa

SEQ ID NO: 42318 - DNA, 380 bp, Glycine max
  Clone ID: LIB3139-044-P1-N1-B2
tctcctttttttttttttttgggttatcctttcacacacgctattacaagtgcagccacgtcgactcacactaacataaaaacatggaactaagcaccatgtttttcctgtgtgcttctcttctcttcattggtctcttcttcaggacactcatcaaaccttactatgtcttcaaacgccgtgacttgccactcccacctggctccatgggttggccttacataggagaaacctttcaaatgtattctcaagacccaaatgtcttctttgcctcaaaaataaaaaggtttggctctatgtttaagtcccacattctaagttgtccctgcgtgatgatttccagccccgaggctgccaagtttgtgctgaacaaagctcaa

SEQ ID NO: 42319 - DNA, 384 bp, Glycine max
  Clone ID: LIB3139-044-P1-N1-B4
ggcattgttgttggagtgagcgaagaatatgtattcgagagattcatggggtggaccggtggagataaacgcgacggactcggcgacggaggacgagcggagccggaacctgcaggacgttgacagggcagcgctgtcgcgtcccttggatgagacgcagcagagctggctccttggccccggcgagcagaagaagaagaagtacgtcgatctcggctgcatcatcgtcagccgcaagatcttcaagtggaccctcggcacaatcctcttcgccgccttcctcgccggcctcatcgccctcatcgtcaacaccgtgccccgccaccggcacaaacaccccccttccgacaactacaccctcggcctccacaaggccctcatgtt

SEQ ID NO: 42320 - DNA, 213 bp, Glycine max
  unsure at all n locations
  Clone ID: LIB3139-044-P1-N1-B5
attcggttcgagctcattaattgtaagaatggcacttcgttgcttggtgatggccctttctgttctctggacgcttggncttgcgagagaaagccatgccagagacgaagatttttggcatgctgtttggccaaacactcccattccaagttcattgcgagatcttctaaagcctggccctgcaagtgttgaaatcgatgatcaccctatgca

SEQ ID NO: 42321 - DNA, 331 bp, Glycine max
  Clone ID: LIB3139-044-P1-N1-B6
gtagtaactaatcgtcttttctttcttatacattttgctttagtttgtgaaattctggccaaagattttgagaatgtctagctgtgggtgtggaagcagctgcaactgtggcagcaactgcagttgcaacaagtactcttttgactacgttgagaagatcacaaatgagactctagttttgggtgttgggccggtgaaggcccaattcgagggtgctgaaatgggtgttgcagctgagaacggtggctgcaactgtggatcaaacgggggtggcgacccatgcagcttcaagtgagatcaacatgcataacctttaagcagagattgcttg

SEQ ID NO: 42322 - DNA, 373 bp, Glycine max
  Clone ID: LIB3139-044-P1-N1-B7
ctctagcttattcggctcgagggctaggagacgagggtgccatccaatatatgtgtggggaagcaccaaaagcagtcattgagctagagaattacggattaccattttcccgaacagaggatggaaaaatatatcaacgtgcatttggcggtcaaagcttaaactatggaaaaggtggtcaagcttaccgatgtgcatgtgctgctgatcgaactggacatgctttattgcacactctctatggccaagctatgagacataatacccagttttttgtggaatattttgcattggatcttgtaatgaatagtgattgcacttgccaaggagtgattgccttgaatatggaggatggaacactacatcgtttcaa

SEQ ID NO: 42323 - DNA, 359 bp, Glycine max
  Clone ID: LIB3139-044-P1-N1-B8
cgcgttgtttacacctcacatcctcctcctctacataagcgccctcgcatccgggtgtttgcagactcaacaagcattccactcacacctcatcgtttctctctctagatctctgtttcttctttttctccaaccttcgtttcaccaccacacttacattactttgtcgaaatggctccaccaattgagaccccaaacaaggtttccagctatcaacagtccccaaaccctcgtcttaacgagaggattctttcatccatttccaggagacacgttgctgcacacccgtggcacgatcttgagataggacccgaagctccaaagatcttcaactgtgtggtcgaaatagggaaaggaag

SEQ ID NO: 42324 - DNA, 347 bp, Glycine max
  Clone ID: LIB3139-044-P1-N1-B9
agagttgtatgtggaatcccttctggatttccgctggcagttatttgtaatagcggggttcttacaaattgccatccgtgaaaggacacacctgctgttggcttgttgttcaaggatggcaatttgtaagaaagatgtttggagagttgaatgtggaatcccttctggatttccgctcacagttatttgtaatagcatttttaatgagatgctcattagatatagctatgaaaaattactgcgccaggctaaagctccaagtatgttgttgcaatccttcaaaaattttgtttctttgtgtgtgtatggtgatgataacttaattagtgttcatgtatatgtcaagc

SEQ ID NO: 42325 - DNA, 133 bp, Glycine max
  Clone ID: LIB3139-044-P1-N1-C1
cattagaacctaaaagaagtgcacttgaagaagattttgaggaggaagaagagaaagaggataatgaccagcctgttgatgagattgaagatagggcctatgagaaggaccaatatcgtgggagaagccctac

SEQ ID NO: 42326 - DNA, 379 bp, Glycine max
  Clone ID: LIB3139-044-P1-N1-C11
cctcaagccaccgtaccgtgttgcctctctgcaatctacagccaaaatgcctttcaagaggtacgttgagatcgggagggttgcccaaatcaactacggcaaggaatatggcaggctcgtcgtcattgtcgacgtcattgatcagaacagagctcttgtcgatgcccctgatatggtgaggtcccaagtcaatttcaaaaggctttccctaaccgatattaagattgacattaagagggtccctaagaagaaagatcttgtcaaagccatggaggatgctgatgttaagaccaagtgggagaagagttcatggggcaggaaactcattgtcaggaagagaagggcatccctcaatgattttgataggttcaagataatg

SEQ ID NO: 42327 - DNA, 368 bp, Glycine max
  Clone ID: LIB3139-044-P1-N1-C12
ggtaaccgaaaaccttaaaagatataaaaggatgatctcagatttttattcgatgttgtaatcgataagacgatctcaattataatcgtgcttcatcctgcacacacctgctgctagcttgcagcaaaatttggccacaactggcactattgcaaacctgcatcgcaccaaagtattgcgtcatgtaagtggaattttataacaagaaggtttttgtgcaacatgtggagacaataagcagctctgaggtcacctttgatatcgtgcaatcctttgtggatcttggttccagtggtgcatctgattccaagtcaaaaattaaggaaagaaagaaattcttcaacagggacaataagcaagatcagcta

SEQ ID NO: 42328 - DNA, 381 bp, Glycine max
  Clone ID: LIB3139-044-P1-N1-C2
ggccaatattatcctgagtgggctccaattaattgtcgagttcatcgacaaccaattgacatcactgaaggaaattatgtcagaaagcaagatgtcagcattgaatatgatgcatgtacaattccaaatgattgtggttcattggttgttgccaaggttggaaatcacaaacaaattgttggtttccatgttgctggaagcaaaggaagactgggatatgcttcattgataccatatgttgagccagttgtgcaagctcaaagtgctgaagtttactttgacttcttccctgtggaggttgatagtcaagagggagttgctcacattggtgaattgaaatctggtgtctatgttccactgcctacaaaaactaatttgatg

SEQ ID NO: 42329 - DNA, 399 bp, Glycine max
  Clone ID: LIB3139-044-P1-N1-C3
agttcggaattcggtttgggattaaaatttttcactaattccataaatctctgtttactctcctcgattttaccggaacatggacacaagaaggaaatggcaacaccaacttctgtatgagtgttaacaacaacggctacattagcgctaatgacccgttgaactggggcgcggcggcggaagcgatggccgggagccacctcgacgaggtcaagcgcatggtggaggagtaccggaggccggtcgtgaagctcggcggcgagaccctgacgatctcgcaagtggcggcgatcgcggcgcacgaccagggggtgaaggtggagctggcggagttctccagggccggggttaaagccagcagcgactgggtgatggagagcatggacaagggcactgaca

SEQ ID NO: 42330 - DNA, 94 bp, Glycine max
  Clone ID: LIB3139-044-P1-N1-C4
tggggatttttttagatagcattaccaatacaagaggctatgtatccaaaaagaatgtggagcaccgatgaagtctatttttttttagttcatt

SEQ ID NO: 42331 - DNA, 359 bp, Glycine max
  Clone ID: LIB3139-044-P1-N1-C5
aggttggcaattggtgggaaagatatttggggagtggattgtggaatcccttctggatttccgttcacagttatttgcaatagcatttttaatgagatgctcattagatatagctatgaaaaattactgcgccaggctaaagctccaagtatgtttttacaatccttcaaaaattttgtttctttgtgtgtgtatggtgatgataacttaattagtgttcatgaatatgtcaagccttactttagtggttctaaattgaaaagctttctagctggtcataatatcaccattactgatggtattgacaaaactagtgcaactttgcaatttaaaaagttagcagattgtgattttctcaa

SEQ ID NO: 42332 - DNA, 328 bp, Glycine max
  Clone ID: LIB3139-044-P1-N1-C7
ctcgtgttgtgatgtatagcaatttcaaggagcgggcgcatagagtacgtgaagggggccgtgcaagaagacaatgcgggaaactacgcgaaagcgttccctctctacatgaacgccttggagtacttcaagacgcatctcaagtacgagaagaaccctaagatcaaggaagccatcacgcagaaattcaccgagtacctgcgccgggccgaggagattcgggccgtgctcgacgatggcggccccggcccagccttcaacggggacgcggcggtggctgcaaggcccaagaccaagccgaaggacggggaaagcggtggcggtggtg

SEQ ID NO: 42333 - DNA, 332 bp, Glycine max
  unsure at all n locations
  Clone ID: LIB3139-044-P1-N1-C8
ctactttttcctcattgcttctaactcaacaagtgagatctcacactgcaattgctgcttctcccanaatcggtcactaaatccgcaatcatgaagctcgataccaccggtctcgaatcgtttcccacactgcttgcgcctcaaaacgacgtcgttggagaactctccgccgctccatccttcgaccttccgaattccaacgatttcgatgggtttgtgaaagaagctattcagatggtgaagcccgcgaagggtactacgactcttgctttatatttaaggagggtgttatggtagctgctgattctcgagctagcatgggaggatatata

SEQ ID NO: 42334 - DNA, 374 bp, Glycine max
  Clone ID: LIB3139-044-P1-N1-D1
attaattgcatgaatggcacttcgttgcttggtgatgtcgctttctgttctcttcactcttggtcttgcgagagaaagccatgccagagacgaagatttttggcatgctgtttggccaaacactcccattccaagttcattgcgagatcttctaaagcctggccctgcaagtgttgaaatcgatgatcaccctatgcaaattgaagaaacacagtacccgaaaaccttcttctataaagaagaccttcatccaggcaaaacaatgaaagtacaattcagcaagcctccctttcaacaaccatggggtgttggtacatggttaaaggaaattaaagacactactaaagaaggatatagttttgaagagctatgca

SEQ ID NO: 42335 - DNA, 299 bp, Glycine max
  Clone ID: LIB3139-044-P1-N1-D10
atcacatttggcactcaaaaacacgatcaactcggcgcgcatctgctgaagttgcaggccttatctttctttcaaactgtagagacataagaaaaccaaaatgaataacgcgcgcgaccgatgagtttgtcaaaaatctctaatattttgtatgcatcattcatgcgacacacatatttattataacatacaaccgtacgcgattgtagagtgtcatgttaaatgccaacagatagcaaacatggtcttactacacgcgatgccaagcttcagaaagtcacaaaacatgaatctacaac

SEQ ID NO: 42336 - DNA, 159 bp, Glycine max
  Clone ID: LIB3139-044-P1-N1-D11
ctatgattgatcagtgatcaatgtccattttcatagcttatctgttttgagagtgtagcttaaaattgtataatctgtgttttgtgccaagcttcagatcataaggtccatttggtttgcaatagaagcaaaatatgcactcgaaaaaatacttcttac

SEQ ID NO: 42337 - DNA, 377 bp, Glycine max
  Clone ID: LIB3139-044-P1-N1-D12
ctgatgtgccctttggtgttttgctctctggaggtttggactcttcattggttgcagccgtcacggctcgctacctggcaggcacaaaagctgcgaagcaatggggaactaaattacactctttctgtgtaggccttgagggtgcacccgacctaaaggctgcaaaggaagtagcagagtacataggaactgtccatcatgaatttcactacactgttcaggatggcatagatgccatcgaagagatgatctatcacattgagacatatgatgtgacaacaattagagcaagcattcccatgtttcttatgtctcgtaagatcaagtcattgggagtcaaaatggttatctctggagaaggatctgatgaaatcttt

SEQ ID NO: 42338 - DNA, 97 bp, Glycine max
  Clone ID: LIB3139-044-P1-N1-D3
tcggttcgaggggtaattttataaaaaaacacacacttacacgtaattcggcaattaaaagaggtgtggaaataacatgtgaagtgtgtgttttttt

SEQ ID NO: 42339 - DNA, 375 bp, Glycine max
  Clone ID: LIB3139-044-P1-N1-D6
cttaatttttttaattaattatctttctctaagaacgctggcaatttttgctgtctggtggtctttagcttcatcgccatggcatcaccagcaagaaccttctttgccttcattctcgccgtcgtcgctctcttcttcgccgccgccaatgctcaagacctctccccggctccgagtcccgatgccggagcggcgggatccgtttcgagctccgtcgccatgatcggagcttcggttgtgctgtcattgatggctatcttgaagcattgaattcggtaatttcgttgggtttgtacaaaattgattcgttttatatacagagtggtgattatgagctttggtatctatacttataggtataccggagagagatta

SEQ ID NO: 42340 - DNA, 252 bp, Glycine max
  Clone ID: LIB3139-044-P1-N1-D7
ggtcggatacctggatcggtatccgcgtgcaagttcatggggcattgggatctcaactacaaccacttatgcggaaccatcccaattgggtctccgtttgaacaccttgatgcggcgtcgtttagtaacaatgattgtttgtgtggaaaccccttgaacgcttgctgatgggtgacccgaataagtacgtattgggttgatgacggtgaatattccaagatataatgatttggttatagggaaggagcccaa

SEQ ID NO: 42341 - DNA, 377 bp, Glycine max
  Clone ID: LIB3139-044-P1-N1-D8
ctcgtgctttgccaacgtcacgcctcagcagaccctgcacgagatatcagtctcagcgggggtacttgagaagaagtctccatgcaacttccttgtgttcggccttggccatgacagcctcatgtggacatcgctaaattatggcggccggacggttttcctggaggaggacaagtcctggatcgaccaaatccaggagaaggtaccctctttggagtcctaccatgtcatgtacgacacacaggtccaccaggctgaagagctcatgaaaactggaatgaaagaggattgccagaaggttacggacccgagattctccaggtgccctcttgcacacaaggggctcccgagtgaggtttatgacattgattgggacg

SEQ ID NO: 42342 - DNA, 374 bp, Glycine max
  Clone ID: LIB3139-044-P1-N1-D9
caatgagtttcaggctcagatggaaacaaatttgttgaaattgtctcttgatgatggtgaaactcctaaaggttctatgttggatcttaaaatttctcaatctaaaattgcacttcccaagaacacagttggaggaaccattctgcgtagtgatctattggcaaattttttgacagagggcaattttagagcaagtgttgatttgcagcgcactcatcgtattaaaggaatgattaaaatggtggccacagttggtattcctgagaatacaggtatagcattggcctgtgctatgaatagttcttttagggggcgcgccagttctgatatttacaccatctgctctcaagactgtgaattatggaatcctgctt

SEQ ID NO: 42343 - DNA, 324 bp, Glycine max
  Clone ID: LIB3139-044-P1-N1-E1
aaatcagcggttttacccttggacgcgtgggttaatttccaaaatgggccgatcaacttgccccggtggtggtgggagggtgggcatttttttcccgaattattaattggggaaaacacttcggatttggtcctttggcaaggtgaaaattgctgagcatgtaccgactggtcataaaggtgctattaagattcttaaccgccacaagatttaaaacattggaatgggagaaaaaggtgggaggggaatcaaaattttaagattgtttatgcatcatcacattataagactatatgaggttgtagaaaccccaacagacatata

SEQ ID NO: 42344 - DNA, 375 bp, Glycine max
  Clone ID: LIB3139-044-P1-N1-E10
cagtgaaagagaatccgaggcgaagagaagagaaagggtaagatggaggggaaggcggaggatgtgtcgctgggagcgaacaagttcccggagagacagccgattgggacggcggcgcagagccaagacgacggcaaggactaccaggagccggcgccggcgccactggttgacccgacggagtttacgtcatggtccttttacagagcagggatagcagagtttgtggccacttttctgtttctatacatcactgtcttaaccgtcatgggagtcgccggggctaagtctaagtgcagtaccgttgggattcaaggaatcgcttgggccttccggggcatgatcttcgccctcgtttactgcaccgcttgcatc

SEQ ID NO: 42345 - DNA, 355 bp, Glycine max
  Clone ID: LIB3139-044-P1-N1-E11
ctcgagccgctcgagccgctcgagcggctcgagctcaaatcagagagtacttcaacaccgccctcaccgtcactcgcatccacgattccggcgagattgttccggccagatccggcgccggccgtttgccctgcgtctgggagagcagcgtctccggtcgggtcgggaaatccgtccccggtttggttctcgcaatataaaatataaaataagtaattagggaaggacgaggtcacgtgttgccgttgctataataattaaataagggacttgtgcacgtggcggtgactggatcgatcggtttcagggaacattgatactttgtgttagtattggagggttaggggatgtgaga

SEQ ID NO: 42346 - DNA, 376 bp, Glycine max
  Clone ID: LIB3139-044-P1-N1-E12
gctaggaaaccatcagtcgctgccattgatggccttgccttgggtggaggattagaagttgcaatggcatgcaatgctcggttatcaactccaactgctcagctaggcttgcctgaacttcagcttggaataattcctggatttggaggaacacagcgacttcctcgtcttgttggtttgacaaagggacttgagatgatactggcttcaaaaccagttaaagggaaggaagcttttagtttggggcttgttgatggtttggtgtcacctaatgatttggtgaacactgcacgccaatgggcactggatatgttgggccaccgacgaccatggattgctagtctttataagaccgaaaaattagaaccccttgggg

SEQ ID NO: 42347 - DNA, 391 bp, Glycine max
  Clone ID: LIB3139-044-P1-N1-E3
tggaatttgggttgggccaaaaccttttttaaggccccaaccatggttggttaccttgccattgattgaccgaaggcgttgtttttcttggaaccattttcatttggggggaaaaaagctaaaccttaatcaaagaacagggatctgggggggtggccaacatgtgtggggggcgaatatcttcgacttcattccagcgggtcccgccggcggggcgcaacgcgtgaccgccgacatcctgtggccgaatttgaggaagcggttctcgaaatccctgctggacgatgatttcgaggcagggttcaaagaattcgaggatgactcggaaatcgaggatgtcgatgatgaggacgatgaaaaggaggaggagttgaagaagaagaagcccttt

SEQ ID NO: 42348 - DNA, 381 bp, Glycine max
  Clone ID: LIB3139-044-P1-N1-E4
tgaagaaagacacagccattgtttgtttactttccattgattgagcgaaagctttgttttgtctgcgatcattttccattgggtggaagaaagtctcaacctttagtcgaaagagcaaggatctgagtgagtgagcgatcatgtgtggtggtgcgattatctccgacttcattccagcgggtcccgccggcggggcgcagcgcgtgaccgccgacatcctgtggccgaatttgaggaagcggttctcgaagtcgctgctggacgatgatttcgaggcagggttcagagaattcgaggatgactcggaaatcgaggatgtcgatgatgaggacgatgaagaggaggaggagttgaagaagaagaagccctttgggttctctc

SEQ ID NO: 42349 - DNA, 395 bp, Glycine max
  Clone ID: LIB3139-044-P1-N1-E5
gaaattcggctttgagctttggtttttttaatatattacaaatggaaatccacatgtttgttaaagactctttcaccgtatgtatatgttcaagttcttgaagaagacaaggataagtggatggatgtctttgggtggaatattactgtgcataacaggctcagaagctatgtttgctgatcttggccatttctcatatatggccattcagattgcattcacctttctggtgtatcctgcgcttatattggcatatatgggtcaagctgcttatttgtcacatcatcatgagtccgaactccaaataagtttctatgtctcagttccagaaagtgtgaggtggccggtgcttatcttagctattctagcttctgttgtgggaagccaagcaatca

SEQ ID NO: 42350 - DNA, 382 bp, Glycine max
  Clone ID: LIB3139-044-P1-N1-E6
cttagtatttttcacctttatatttgttgggattcaggagcatttgaagacttcatgtatgcattagatccccagatcgaagtcagatcaaaggcaaattttgttactgaaactgctttcataagagatgaacttcttcatggcaaccaagtttatctgaattttaatctttcaagaacctttctttacatccacatacaaccacttcaatgagaacatccaaatttccatgtaggggattggattatcgtctattccttctgatttttgctgtatgtttggtgttgtatggaacagtttcaagattgaatgctccaaatgtttcttatgccacaatatctaagttacggcacttcaatcctaagcatgttatatcaaaagg

SEQ ID NO: 42351 - DNA, 376 bp, Glycine max
  unsure at all n locations
  Clone ID: LIB3139-044-P1-N1-E7
atttatacttgatccactttacttgattaaggatgcaggtgggaagtatcttcctgggtataagtgtttgacgcgcgaacaggagaaggacgtagataagttactgaccaggctggcttcgcgagaagaggctcatgttgtgttgatggagctgatgaagtggagatcagaggggcttgatccgctatatgcacaggctgttcagatgaaacaaagggatccagtaaccgggaagatgaaagttgcaaatccgntaagtagtagacttggctgggaaactngtttgactgagtttaaatcacttgngaagattgcagtgagactcatttttttgcatgcaacttcgtgtgggtttaaaaggaattggtcttttatg

SEQ ID NO: 42352 - DNA, 375 bp, Glycine max
  Clone ID: LIB3139-044-P1-N1-E8
gagaatgtaaacaaaaaatttcatgacccctttgagggttagtctttgcttcattctcctcttcctcactacaacaagtgcacaagccccagtttacagttacaattcttgcatgaactcaacttctattagccccacatacaaaactaacgttaagagcctcctctcatggatcaccaatgattcatccataagcaaagggtttaactacaccaccataagcagcaacaacggtggtgacaacgacggttatggcgatgctgtttatgggttgtacagctgcagatacgacatcacaagatacttctgccagttctgtctcaccactgctgtcaacgaaatctctcggctgtgtcctgacagtgttaccgctat

SEQ ID NO: 42353 - DNA, 377 bp, Glycine max
  Clone ID: LIB3139-044-P1-N1-E9
caaaatgtctcaagatctagagatgaaggatcgctcggcgccttccaactccggtgggtcgcctgctccatctactctgcagcgtaagcatatagtatctttctctaaccacttccactgtgccgatttcgcattttcacaaaactattccagcttttcgctctttattttttcttttctttgctatttggatttgcagatttgaaggagatagcgtctcttatcgagaccggttcgtactcgaaggaagttcgtagaattgctcgcgctgttcgccttacaattgcgttgaggcggaaattgacagcatccgctatctcttcttttctcgatcatgttctcactcctggctctgaagttcacgccaaattgtctgc

SEQ ID NO: 42354 - DNA, 398 bp, Glycine max
  Clone ID: LIB3139-044-P1-N1-F1
ggaatttcggcttcggggggatttttttaagaaaaactttaaccaaatttttaatgtgttgtgggtggctcctgaggccaaggcaagtttatggtcacaacttcattatgtttcgggtaataatctggaaatgcaagaagcttatcttgtcaatctcgtaaatgtgttacgagaattgtttttgcacagtccagaggaagctcgccaattgagaaggaaagctctctctcgtattgaatggctgcaaaaagctgatatgcctaccatagcacagattgaagagttccattcgatgcagaggatgatgaatgctcctgattcaaatgataatattgatttactgttgagcattgatttgttgggtttacaaggagcaggtaaagcttttccaaacaaaa

SEQ ID NO: 42355 - DNA, 379 bp, Glycine max
  Clone ID: LIB3139-044-P1-N1-F10
cggtggaggaattttagtggacaaaactggagattggatcacacttatacaaaattgtccaattagtaacttgttgagagttgctgcttggaagaaaggttgtttaatggtcaagattgtgatgtctgggaatgcagcagtcaaaaggagtgattgggcctcattggtacaagtgtttttaacaaacagcaacagtacagagcattttgatgcatgtaagtggacaaaatcagaaccacattcctgggaattaatcttcccaatagaggtatgtggtcctaataatggttttgaaatgtggagttctgagtgggcaaatcaaacttcatggcatttgagtttccttattgacaatcccaaacagtctaacagttttgat

SEQ ID NO: 42356 - DNA, 379 bp, Glycine max
  Clone ID: LIB3139-044-P1-N1-F11
agttgatgcacatttcatttttcatcttaactgcaaaactcaagggaaatcctcttgctcttcttctctgattttataagtgaattaaaatggtctcagattcttgcccccctcttaaggaacctgaatcagataaaaaatgggaggaaaagggtccccctcgcaatgccaaatggtggtactcaacttttcacgctgtgacagccatgattggtgcaggtgttctcagccttccctatgccatggcatatctaggatgggtgccagggaccttgattttgttgatgtcttggtgcctgactttaaattcaatgtggcaaatgatccaactccatgagtgtgtcccgggaaccaggtttgatcgttacattgatcttgg

SEQ ID NO: 42357 - DNA, 380 bp, Glycine max
  Clone ID: LIB3139-044-P1-N1-F12
cctaaacctccttaagaccaggaccaggaccagcccttcctttccgaacacgaatcccattcattcactaactcatcaatcaaattcaatcatccatcaacacatataaaaatcatttttccctttctccaatttctaatctattactattatttttcccggaaaattttcctattttccatgaatgttctggctctagggcgcttcctcacttcccccttatataagtcttcccctctcactccctccccaatccaattcacacccatttttcttcatcccccaaagtttcaatctttgtattcaattcaccctttctctctctccatggccacttgtgttgatgcctcaacccctctttctcggaaacctaacgggtc

SEQ ID NO: 42358 - DNA, 320 bp, Glycine max
  Clone ID: LIB3139-044-P1-N1-F2
catttctccatttccattttctctctcacttttcaagaatcgtaagctatgggaaagtctgacccaactgtgagtgctgattaccagaaggccgttgagaaggcgaagaagaagctcagaggcttcatcgctgagaagagatgcgctcctctaatgctccgtttggcatggcactctgctggaacctttgacaagggcacgaagaccggtggacccttcggaaccattaagcaccctggcgaactggcttacaaggcttacaaccggcttggcattggttgtagggttttggaggcaattaaaggcggagttccttattt

SEQ ID NO: 42359 - DNA, 382 bp, Glycine max
  Clone ID: LIB3139-044-P1-N1-F4
cttttctttttttctcctttctttcactctcttcttgtcggtgatccgcattgccggtgcggagtggtcttatttgaaaaacacttgggcgttggtgcaaatgtttgcttcattcattttctctggagacaacaggctcactgagaaaaccatttttacttgcagagatttggacatcttggttgtttattatacaatagcaactcaatttagaaaatttctaccgcattacattaggtggcatctgtataccttgttgatttacatgctcccatcttttctcactgctgaaattaaatataagcggaatctgagtaatattcatatttccggcttattttacgacggcagatacaaattctggactaaacacgagaaaaat

SEQ ID NO: 42360 - DNA, 383 bp, Glycine max
  Clone ID: LIB3139-044-P1-N1-F6
atttaccttctatacttgttccttttgaaggttagaagtgctacaatacaaacaatggcagctactcaggaagatgtgaagcttttgggtattgtgggaagcccatttgtgtgcagggtccagattgcccttaagttgaagggagttgaatacaaatttttggaagaaaatttgggcaacaagagtgatttgcttctcaaatacaaccctgttcacaagaaggttccagtgtttgttcacaatgagaagcccatagcagagtctcttgtgattgttgaatacattgatgagacatggaagaacaaccccatcttaccttctgatccttaccaaagagccttggctcgtttctggtccaaattcattgatgataagattgtggg

SEQ ID NO: 42361 - DNA, 348 bp, Glycine max
  Clone ID: LIB3139-044-P1-N1-F7
ccctgttgttagacatgtctaagcttgattggtcagggttgactgttgtgaagcaaagagatccactttctagtgagggtcttagtgtctgttcagcaacaattggtggagaaaagtatttgttagcatttggaggctataatgggagatatagcaatgaggtttttgttatgagacccaacgccaacgataccatgcgtcccaagattttttaatcacctgctgccgcggctgctgcggcttctgttacttctgcttatgcattgtaagtttgagaagttggatttcatgcaactggatgatataaattccaagttatctgtaaatggtcatgataaagatgatgtg

SEQ ID NO: 42362 - DNA, 376 bp, Glycine max
  unsure at all n locations
  Clone ID: LIB3139-044-P1-N1-F9
cagacacactctcttcttcttgctattccttcctcgtgcatggagtcgcgagtgctgtcacgcgccggaaccttgttctccctccctcacctccgcaagctgccgcgggaggtcggcgccggcccctccctcgtcgccgtgaaggccgngggctccgtggcggacggcgggaacctgatttgggggaggcaactgcgcccagagctctgctcgccggcgctgaagaaggaggccgtcctcctccggccatgcctcgccgccgcctactcgccggccgagggcagtgattccgccggagaagcaaaagttgctccggcggggtttttcgagaagtatccggctctggtgaccggattcttcttcttcacgtgggact

SEQ ID NO: 42363 - DNA, 382 bp, Glycine max
  Clone ID: LIB3139-044-P1-N1-G1
atcatgtccttattacatgagaactgggtcttgtaagtttggtgttgcatgcaagtttcatcatccacagcatgcttcccttggagcatacccattggctggatctcctactcctacctcaacaattattcctacatcaggtttaccatatgctggagggtttcctgcatggtcagcagtaccaagaatgtcgtatttatctggacaaggacttcaatcttatgtgcctccttttctgtcttcttcgcaaggtgttatacctgtgcagagctggaacaactacatgggaaatatgaaccctgcaatgccgaacggttttcttggatctaatcttgtttatgactacatgaatctgggcgagtcactctttggtgggcaggca

SEQ ID NO: 42364 - DNA, 379 bp, Glycine max
  Clone ID: LIB3139-044-P1-N1-G10
ggaaaaagttgtgttgaaattttcacaagaggaattgcttacagcttggtcaactcaggtgcgtcccgcaacgactctgttggctgatgggtgcccatatttgtatgctatggtgcatgatagttcagtgtctacaataccaggtgattttgtcattggtgttaagttgacaaccataaacaatatgtgtgcatatgggctcaatcctggtatttcaggttctcgtcttttgggcaccattcctcagtccatttcacagcaaactgtttggaatcaaatggcaacagtgagaacaccattgaattttgattctagcaagcagagcttttgtcaattttctattgaccttctcggtggaggaattttagtggacaaaact

SEQ ID NO: 42365 - DNA, 381 bp, Glycine max
  Clone ID: LIB3139-044-P1-N1-G2
ctggtgtttatgttccactgcctacaaaaactaatttgatggaaactcccaaggaatggcaactggatctaccttgtgacaaaattcctagtgtcttgactacaactgatgagagattggtaggcacagaacatgagggatatgatccttttcttggtggaattcaaaaatatgccactcccatgatgcccctagatgaagaaattctttctaaggttgcacaagatatggttgaggaatggtttgattgtgttgatgaggaggattcctttgaggaagtttctttaagtgcagcacttaatggtgttgagggtttggactatatggaaagaattcctcttgccacatctgaaggttttcctcatgtgctttcacgcaaaa

SEQ ID NO: 42366 - DNA, 380 bp, Glycine max
  Clone ID: LIB3139-044-P1-N1-G3
aggagtttgagaatggcaacgatcagcgcggttcaggtggagttcctggagtttccagcggtggttacttcaccagcctccggcaagacctatttcctcggcggcgcaggggagagaggattgacgattgaggggaagttcataaagttcacaggcataggagtatacttggaggataaggcggtgccatcactcgccgctaagtggaagggtaaaacttcagaggagttagttcacaccctccacttctacagggatatcatttcagggccgtttgaaaagctaattagagggtcgaagattctgccattggctggcgctgaatactcaaagaaggtgatggaaaactgcgtggcacacatgaagtctgttgggactta

SEQ ID NO: 42367 - DNA, 383 bp, Glycine max
  Clone ID: LIB3139-044-P1-N1-G4
tccacacctcacacctcaaatagcaacacccttctctactgttcacttttcgctctctttctctacatagtttctttttcactctcccattcttcttttttaagcaacaacaacctcattcctcggatcctaagaaaatgggaaccagagtgtggtgttgtttcatgatgttcttcctctctctcaatgctcttgcaatagcattggaagatcacaacctcaaaacgacgtccagggatgacatcaagtgcaccccatgtggccaagttccctccccgccgccaccctctccgccgccgccagcagctccaaccaccacctactgccctccgcctccgtcgcctccaagctccggcggtggtggtgcttactattactctccg

SEQ ID NO: 42368 - DNA, 316 bp, Glycine max
  Clone ID: LIB3139-044-P1-N1-G5
tggttcttcttttattacaacatcgcccgcaaccatgaccgtggctttgaacgtgctccggttcacggactttgccgattcctccgccctagacatgtcgataatctcgtacgacagcgcccacgcggacaaggccgccacgttgcgcaccgaggaggagctgatgtccatgtacgagcagtggctcgtgaagcacgggaaggtgtacaacgcgctcggcgagaaggagaagcgcttccagatcttcaaggacaacctgcgattcatcgacgaccacaacttcgaggaggaccgaacctacaagctcggtctgaac

SEQ ID NO: 42369 - DNA, 382 bp, Glycine max
  Clone ID: LIB3139-044-P1-N1-G6
gttgctggaagttaaggaagactgggatatgcttcattgatgccatatgttgagccagttgtgcaagctcaaagtgctgaagtttactttgacttcttccctgtggaggttgatagtcaagagggagttgctcacattggtgaattgaaatctggtgtctatgttccactgcctacaaaaactaatttgatggaaactcccaaggaatggcaactggatctaccttgtgacaaaattcctagtgtcttgactacaactgatgagagattggtaggcacagaacatgagggatatgatccttttcttggtggaattcaaaaatatgccactcccatgatgcccctagatgaagaaattctttctaaggttgcacaagatatgg

SEQ ID NO: 42370 - DNA, 363 bp, Glycine max
  Clone ID: LIB3139-044-P1-N1-G7
ctcgagcttatcttgatggccagcagcagcaccatctgaatgacttgagctgttacatacagcctcgccccggtgccagttctgtgagtagatctggtcggtccaagaccctaactccatcaaatctggaagagctcttttctgctgagatttctttgtctccccggtattctgatccagcagccggttctgtgttttcccctactcacaaatcagctgttctcaatcagtttcaacagctccaaagtatgttatcacctataaatactaatttgctgtctcctaagaatgttgagcatcctctttttcaagcttcttttggtgtctctccttctggaaagatgtcaccaagaagtgttgaac

SEQ ID NO: 42371 - DNA, 379 bp, Glycine max
  Clone ID: LIB3139-044-P1-N1-G8
gctagaggtggatctctggattgcattcgtgaattgggggcatggggtgcagatcgtgttcaacgcgatgcatctgggcgtataccatatatggttgcccttaaacacaaacatggagcctgtgcatcattgctaaatcctacatctgcagaacctcttgtctggccgtctccattgaagttcatcagtgagcttaatcctgaagccaaagctttattagagcaggccttgatggatgcaaacagagaaagagagaaaaacatattgaaagggagttcttactctctgccatctccatctcattctgatggggtagctgataatacgtctgaggttagtgaatccgaattatgttgcatctgctttgagcaggtgtgca

SEQ ID NO: 42372 - DNA, 378 bp, Glycine max
  unsure at all n locations
  Clone ID: LIB3139-044-P1-N1-G9
gtggaagccaggggcaatccgatagaaaagggttttatttctttttcccttcaattattttcttttcctgtctttgttgttcagttccgttgttgtgttgtgtgctgcaacacaatcggtggtctgagaaatcttgtttgtgttgggtttgttatggctcggagagcagaggaagagtacgattacctgttcaaggttgtactgatcggngattccggtgttggaaaatccaatcttctgtcccgattcactcgcaacgagttttgcctcgaatccaagtccaccattggagtcgaattcgccactcgcactcttcaggtggagggaagaactgtgaaagctcaaatatgggataccgccggacaggaacgatacaga

SEQ ID NO: 42373 - DNA, 319 bp, Glycine max
  Clone ID: LIB3139-044-P1-N1-H10
cttaaagccaaattactaaccctctcttcgccttcgccgcatctacccacttgctgttgtatccctagcttcctgccattcttcctcttctcaacaaggtttggggtgtttgtttggtttctttctgattgtttaatcagtagaaagaaaaagaaaaaaaaattgtcgacttttctgggtagtgttgtggcgaaagaaagttcagtttttttaggagaatggcgggttgttcttcaaattttgcttgggctcgttttgccaatgtgaggaaagaaagttgtttggggaatggaaagacaaatttgattaggttgagttt

SEQ ID NO: 42374 - DNA, 348 bp, Glycine max
  Clone ID: LIB3139-044-P1-N1-H11
atatatcctcaatacaatgaggttcaggctcagatggaaacaaatttgtttaaattgtctcttgatgatgttgaaactcctaaaggttccatgttggatcttaaaatttctcaatctaaaattgcacttcccaaaaacacagttggaggaaccattctgcgtagtgatctattggcaaattttttgacagagggcaattttagagcaagtgttgatttgcagcgcactcatcggatttatggaatgattaaaatggtggccacagttggtattcctgagaatacaagtatagcattggcctgtgctatgaatagttcttttaaggggccggccagttctgatatttac

SEQ ID NO: 42375 - DNA, 372 bp, Glycine max
  Clone ID: LIB3139-044-P1-N1-H4
tgatccatcattaaacccatgtccaacctttcctgattgtggattcagacaaccaaacagtggagtagtcctttcttgcttagactgcttccttcgaaatgggtctctttactgttttgagtatgaggtttcaccatctgttttcctcagcagaataaggggtggcacatgcactactgcatcagctgacccaccagagactgttattcatcgagctatgtatcttcttcaaaacggctttggaaattataatgtttttcagaacaattgtgaggattttgccttgtactgcaaaactggtcttttgatacaagacaagcaaggggttggaagaagtggccaagcttcttcttgtattggtgctccattggc

SEQ ID NO: 42376 - DNA, 375 bp, Glycine max
  Clone ID: LIB3139-044-P1-N1-H7
gcgacagttgatatacctcttgattcatcaatggatgtgaaaaagaaggagaaggagcttcaagccaaggaaactgaattgagaaaaagggaacaggaagtgagacggaaagaagaagctgcttcacgagctggaattgttcttgaggagaagaattggccgccttttttcccaataatccatcatgacattgctaatgaaattccaattcatcttcaaaaattgcaatatgttgcatttactacattgttaggattagtgttgtgccttttttggaatgttataactgttactgctgcttggattaaaggtgaaggtgtaaaaatatggtttcttgccattatctatttcatagcaagggttcctggagcatat

SEQ ID NO: 42377 - DNA, 373 bp, Glycine max
  Clone ID: LIB3139-044-P1-N1-H9
gtcccccgtatatatccgttcttttttcttccttccggccttccttccttcaacgctcagcactcaaatcctctgagagaaaaaaaaattagggttttgcatttcgggtcagacagactcagacatgggaggaggcaatgcccagaagtcaaagatggctcgcgagaagaacctcgagaagcagagggctgccgctaagggaagccagttggattcaaacaagaaagccatgtctattcaggtaaaatttccgctgttttgttctttgtgttatattataaccccgtgttcgtatcaaagattgtaaaatagagcaatatgatggcttggaaataaagctttgaaaattatgttaagttcatgcgaggacact

SEQ ID NO: 42378 - DNA, 348 bp, Glycine max
  unsure at all n locations
  Clone ID: LIB3139-045-P1-N1-A1
ggcaagcctaactcaaccaccacacctctcctcgttcacgctacccctttctgctcttcttctacctttcaagttttaaaagtataaagatggcagagacattcctatttacctcagagtcggtgaacgagggacaccctgacaagctctgcgaccaaatctccgatgctgtcctcgacgcttgcctcgagcaggacccagacagcaaagttgcctgcgaaacatgcaccaaaaccaacttggtcatggtcttcggagaaatcacgaccaaggccaacgttgactacgagaagatagtgcgtgacacctgcaggaacatcggcttngtctcaaatgatgtgggactgg

SEQ ID NO: 42379 - DNA, 347 bp, Glycine max
  Clone ID: LIB3139-045-P1-N1-A10
gcatgtcagaaattcacaagtgtctggttttctgaattttgaagtaaatcacctttgaaatttcacatacctcataagttttttgggaaaccattggtattgaactctgttcagcttcctgctattttctgcacatcaggctgcaccttggagtccaacacatctgctccctaagtttatagcatttagcatgctggcaaggttaatatttgtggtactcaccatagaacaaatcagagtttgtggcatataagatggccttaacctagatttagagcagttaggtagaaacttttcctctccttctaataaaactcggtagttgcttcaaacaagactagatgact

SEQ ID NO: 42380 - DNA, 351 bp, Glycine max
  Clone ID: LIB3139-045-P1-N1-A11
ccgcgttcacaggttgccgcaccttaaaaccggaaacaaaagcaatcgttacttgatttcaagaatttctcaatttcttcctacttctttgtgtacgatttcttaagggaaagaaaatcactctctgtgctggtcacagacttcgtgaatcattttcttttccactcctagtttatttgctgaacactctcctatttgatataggacttcgtgtcagatttaaactttttctgtttctttctcagttctctgtttaatttcaagttcaagctggtgaaattttggattagtgctcccactctcctatctggtataggacttcgtgggtagacttttctacttctctccttt

SEQ ID NO: 42381 - DNA, 352 bp, Glycine max
  Clone ID: LIB3139-045-P1-N1-A12
cttcgtctattcccaattccaaattcaagaaattttttaaacttgacatatctgctatcaccttttccgtttcttgcgattcgacgatggccgatcaaaagctttcagaaccggcgcttaaacgtgagcagcttgatgaattcgtgagtagtctatattttgaacaacgaattcttgaactccgacttcttcaagacctcgagaacaatgatgaatgtaggaaaaatgggagcctgaaaaggttaaatgaccagagtgatgtctgtggatttagaagttgcttcaaaaatcattatgattcgcttccgaatcagaggtgcttgaggaatcgagaagaagtgattcaggagac

SEQ ID NO: 42382 - DNA, 356 bp, Glycine max
  Clone ID: LIB3139-045-P1-N1-A2
tgtttctcttgttcttcaaacccaccacctctcttctctttctcttcttcttcctcattatttcagttacctcacttactgtgccgccgcgagggggggccccactcgatagtgatgatgatattgattccctcacctacctctggccccttcccgcagagtacactttcggcgtcgacgctctctccgttgaccccgccctcacgctctccgtcgccggcaacggcggcggctccgccattctcagagccgccttcgaccgatacagagggatcgtgttcaagcacaccggtgtcgggtttagtttcttcagaaagctgagggaacgattggtgtcttctgattcggcattcgat

SEQ ID NO: 42383 - DNA, 350 bp, Glycine max
  Clone ID: LIB3139-045-P1-N1-A3
gccttgcttttttcttcacttcaaacttgccaatctcgaagatggcaatagaattggcatctcccaattgggttccaaccgcagccgcatgtttggcagccttggccgccctcctcctcttcctcctccgcggtctccgccgccgtaaatacaatctccccccaggccccaagccctggcccatcataggcaacctaaacttaatcggctccctcccacaccagtcgattcacgcgctgagtaaaacatacgggcccatcatgcacgtgtggttcgggtcgaaccccgtcgtggtgggctcatccgtggacatggcgaaggccatcctcaaaacccacgatgccaccctc

SEQ ID NO: 42384 - DNA, 355 bp, Glycine max
  Clone ID: LIB3139-045-P1-N1-A6
caacaaaggatgcagcattcgttgacttgggctcttctcttctcttctcttctctctcaaaatcgtttctctgcattttcagctaaacctgagcacacccaactgagattttagcttcagattccgaggtaagaggagaaagaagagaactaagtgctacccagagttcgatttttgggttggtcaacaaggtcaagatgtttctgagcttgatgggtatcatgtagatcaagaggggtgcgtgtgtggattggggaagcaatttgtttatgaagttgaagaagcatggatagagtgacttcgtcttttatgggttccttttttgtttgggcaattttggtgcttgatttggtac

SEQ ID NO: 42385 - DNA, 353 bp, Glycine max
  Clone ID: LIB3139-045-P1-N1-A7
atcaattcatatttgtagtataatgatatgattattatggttcgttgcatagtagctaatagcaccacttttgtgtgctatagtggtgctgtggagcagctgactgccgctcctaagaggtgcattgcgctgcacctcactgttgtggccgtcacgccgctcttcatggccaaaatcgcggagttttgtgacagatgcagttgcaacagccaggtttaagtcatggggaagaagacgacactaaacatcgttatttgttgttttttcttaaaaaataattaggagcaaaatgttgcatttcatttaagggttcttttaaaaaaataaaataaaataaattaaaaacatgtctt

SEQ ID NO: 42386 - DNA, 353 bp, Glycine max
  unsure at all n locations
  Clone ID: LIB3139-045-P1-N1-A8
cgttagtgctttatttaggtgacaaaactactcacagagaaagacactcggagaccttgcaagacttcatcaatggctgtcaaagtttatattgtgtactactccatgtatgggcatgttgagaaactagcagaagaaataaagaaaggggcttcctctgtggaaggtgttgaggccaaattatggcaggtacctgagacgctgcaggatgaggtgctcggtaagatgagtgcaccacccaagagcgatgtaccagtcattaccccgaatgaactatccgaggctgatggctntgtattcggcttcccaacaaggtttggaatgatggctgctcagtttaaagcttttctaga

SEQ ID NO: 42387 - DNA, 355 bp, Glycine max
  Clone ID: LIB3139-045-P1-N1-A9
caattttctccaatgtaaaggaggacatgctaatagcacgggatgaaatatttggccctgtactagcgctgatgaagtttaagaccatggaggaagcaattaaaagtgctaacaataccaagtatggcctagcagcaggaattgtaaccaagaatttggatactgcaaacactatgtcaaggtccattcgtgcaggcattgtttggatcaactgctattttaccgtaaggagtgatgttccttttggagggtataagatgagcggatttggaagagatttgggattacaggcccttgacaagtacttacaagttaaatctgttgtgacacctatgcataattctccttggctttg

SEQ ID NO: 42388 - DNA, 354 bp, Glycine max
  Clone ID: LIB3139-045-P1-N1-B1
aaagcgtgtgcgtgggagggtccgaagttggagatagtgattctggttctgttctgttcttctttctactcacaacaacatcagaatcagaaacaacaatggccaacactaacttggaagatgttccctctctggatctcatgactgagctccttcgtcgtctcaagtgctcttccaaacctgacaagcgtcttattctcattggcccacctggatctggaaaaggcacccagtcaccaatcataaaagatgagtactgcttatgccacttagctactggtgatatgttaagagcagctgtagcagctaagacccctcttggtgtcaaggctaaagaagctatggataagggag

SEQ ID NO: 42389 - DNA, 324 bp, Glycine max
  Clone ID: LIB3139-045-P1-N1-B10
tatggctcgtcactccttgctcttagccctcctcctcttcgccgccgtggccaccgccgcgatggcggtggccgcgtccgacgccgacgacatcctgatccgtcaggtggtgccagatgttggcgaagccgaagaggaggacaacctgctgaacgccgagcaccacttcgcgagcttcaaggccaagttcgccaagacctacgccaccaaggaggagcacgatcatcgcttcggcgtcttcaagtccaacctccgcagagccaggctgcacgccaagctcgacccctccgccgtccacggcgtcaccaaattctccgatctaac

SEQ ID NO: 42390 - DNA, 354 bp, Glycine max
  Clone ID: LIB3139-045-P1-N1-B11
gctggggtcaaaggtgatgagagaaatggaaactacaatataatatcaggcacctcaatggcatgccctcatgttactgcagcagctgcctatatcaaatcatttcatcctgattggtctcctgcaacaatcaaatcagcattaatgactactgctaccccaatgagcattgcacttaatcctgaagctgaatttgcttatggtgctggacaaatcaaccccatcaaagcattgaatcctggcttagtatatgatgccaatgaaattgattatgtcaagtttttgtgtggacaaggttatgatactaaaaagctaaggagtattacagctgataatagcagttgtacacaagcc

SEQ ID NO: 42391 - DNA, 357 bp, Glycine max
  Clone ID: LIB3139-045-P1-N1-B2
gtcagaatccaggaccttgaacttatagccagaaattgcccgaacttaaactctgtgaaaattactgattgtgaagtattagatctggtgaacttctttcaatatgcatctgctctagaagaattttctggaggttcctacaacgaggaatcggagaagtactctgctatgtcattgccagcaaaattaagtcgtttgggtttgacatatattacaaagaatgaaatgcccatagtgttcccttatgcggccttactgaaaaaattagatcttctttatgcaatgctggatacagaggaccattgtacgttaatccaaaggtgccccaacttggaagtccttgagtcaaggaatgtg

SEQ ID NO: 42392 - DNA, 357 bp, Glycine max
  Clone ID: LIB3139-045-P1-N1-B3
atcacacataatataattccaaaatcactcctattgctatagcaatatgatgggtgacactgagatcaaaccatcagttgaagtagtcatatgtgcttccatgaacaataacaatagcgcaaacaaccacacccttccaaccgacatcaccaagtcatcacaatcacacttaccaatcttgaccaagctccatgctggttactttttcatatgcctttcctttggtgcacaagctttgctctggaagagtttgagtaaacacaacaaggactcacaaactctctggcatggattcaatttgatgccttccattgcgtttctactactttggtgtgtggcactgctcactgccactac

SEQ ID NO: 42393 - DNA, 350 bp, Glycine max
  Clone ID: LIB3139-045-P1-N1-B4
attgaaaagctttctagctggtcataatatcaccattactgatggtattgacaaaactagtgcaactttgcaatttagaaagttagcagattgtgattttctcaagagaaactttaagcagatgtctaatgttttatgggtggctcctgaggacaaggcgagtttatggtcacaacttcattatgtttcgtgcaataatctggaaatgcaagaagcttatcttgtcaatctcgtaaatgtgttacgagaattgtatttgcacagtccagaggaagctcgccaattgagaaggaaagctctctctcgtattgaatggctgcaaaaagctgatgtgcctaccatagcacaga

SEQ ID NO: 42394 - DNA, 356 bp, Glycine max
  Clone ID: LIB3139-045-P1-N1-B5
cttctggtaatcacgaagaagagcagacaacccatgttgcgtcgtcgtttaacgggaatttggcacccgacgcttcgcccaccgcgctcgccatgaagcacaaccccggcatagccctcgattggactctccaagagcaaactattctcgaagaaggactctctctgtttgcatctgaacctaacctcacacgctacgcaaagatagcacaaaatctaaataacaagacagtccgggatgtagcactgagagtcaggtggatgaataaaaaagaaaattgcaagagaaggaaggatgattttccaaggaaaagtaaagataaaaaggtattgctttcatttatttgatgtcatgta

SEQ ID NO: 42395 - DNA, 354 bp, Glycine max
  Clone ID: LIB3139-045-P1-N1-B8
tagaattaaaaagcgtgaaggacagtgataggtttggtttggaaggaagaagaaaatgaaggccatagtgataacgaggccaggaggtcccgaagtgctccaacttgaggaagtggaagatcccctagtcggagacgacgagcttctcatcggagtccacgccacttcccttaacagagccgatacctttcagaggaaaggctcctaccctccccctaagggcgccagcccttacctcggtctcgaatgttccggaactgtcctttccctgggtaaaaacgtttccagctggaaaatcggtgatcaggtgtgtgctcttctcgccggaggcggatatgccgagaaagttgcagt

SEQ ID NO: 42396 - DNA, 354 bp, Glycine max
  Clone ID: LIB3139-045-P1-N1-B9
cttcatttcttactctcactgaaaaaaaatagcttggtcacaccatcctattttttcaactcatatatacaaatatatataacatggcttctaccttctctcgaagcctagcacttgtaagcttttacattgtcgtttgtgctgccggtaacttgaaccaagactttcagcttacgtggggagatggtcgtgctaaaatactcaacaacgaaaatcttctcactctctcccttgacaaggcctctggctctggcttccaatccaaaaacgaatacttatatggcaagattgacatgcagctcaagctcgttcctggaaactctgctggcactgtcaccgcctattatctgtctt

SEQ ID NO: 42397 - DNA, 352 bp, Glycine max
  Clone ID: LIB3139-045-P1-N1-C1
ctctgctcgtgcctctagggttatcatatctccatttccatttcctctctctcagtttccaagaatcttaagctatgggaaagtcttacccaaccgtgagcgctgattaccagaaggccgttgagaaggcgaagaagaagctcagaggcttcatcgctgagaagagatgcgctcctctaatgctccgtttggcatggcactctgctggaacttacgacgtgagctcgaagaccggtggtcccttcggaaccataaagcacccctccgaactcgctcacggcgctaacaacggtcttgacatcgctgttaggcttttggagccactcaaagcggagtttcctattttgagcta

SEQ ID NO: 42398 - DNA, 342 bp, Glycine max
  Clone ID: LIB3139-045-P1-N1-C10
gtgctcttcacctttcactccacgaaatcaaaaacaagtgctaagaagctccgtgtctctattctcaaacatgtagcaccaaacccaagttggcatccaagttttataacactaatactgcatataatattattataatatacataacaacagttattgatattgttgtgattgtgtgtgattttggtgtcgtccctttttcttatgtttaaggttgtacggagtttatgtgttgattcaattcgtcgataagaaaccttagtttgatattttgattggttctgtggagagtttttttttctttggtgtggtttttggtttgtgctgtttttggttgggaat

SEQ ID NO: 42399 - DNA, 354 bp, Glycine max
  Clone ID: LIB3139-045-P1-N1-C11
gtgacggtgaggcaatacgtgaaggaaggtcgccggccaattttaccgtcgaacgacccttcgcacttcgacctccattattctcagttcagcctacaaagtttggatagggaggagaagctgatggatattggatcgagaaacttttttctgtgtccgaggaagtgtggtggtaatggggacgagggtagtggaacgacgccgtttggttcgtgttcaagagaggctgacaaaacgaacaagggtggcgcgtttggttggttaaggttcatggatttctctcggtaaaaattattattattattggaggctactagtgtttgcccatgccagccacatgttatttggagatat

SEQ ID NO: 42400 - DNA, 355 bp, Glycine max
  Clone ID: LIB3139-045-P1-N1-C12
gatcaagtcatggctagcatttgctgcacaaaaaattgttgaagttaacgcattggctaaggcattgtctggcaacaaggatgtggccttcttctctgctaatgctgcagctcaggcttcaaggaagtcctctccaagagtgaccaacgaggctgttcagaaggctgctgctgcattgaagggttcagatcatcgccgtgcaacaaatgtcagtgccagactggatgctcaacaaaagaagctcaaccttccaatccttccaaccaccactattggatccttccctcagactgtagaactgaggagggtacgccgtgagttcaaggctaacaagatctccgaggaagagtatgtt

SEQ ID NO: 42401 - DNA, 355 bp, Glycine max
  Clone ID: LIB3139-045-P1-N1-C2
ccttgcgtttgcgagtgaggctgaggttgggtttggaaggcaaaggctggtgttgtcccaatccaagagagaagtaaagtaaagcaaaggaatggcgaacatagacatcgaagggatcttgaagcagcagcctgatgatgggcgcgttccgaagacgaaaatagtgtgtactttgggccccgcttctcgatccgtggaaatgactgagaagcttcttagggctgggatgaacgttgctcgtttcaatttctctcatggcacccacgactatcatcaggaaaccctcaacaatctcaagactgctatgcacaacactggtatactctgtgccgtcatgcttgacactaagggacct

SEQ ID NO: 42402 - DNA, 352 bp, Glycine max
  Clone ID: LIB3139-045-P1-N1-C3
gttgactgttgcagatccgcggaagttgagactcattataggtgttgtttctggtgtggtgggagcacttggtatgggcattatcggctttctctgttatcgtagaaagaagaatcgttatgcaatctcatatatacaatctcgtagcctctcttctgatccatcttcaaaagacactgagaagggagttcaaagctttactcaaagctttgtaccaggagtgcccctcttcttgtatgatgaacttgaagaggccacaaattactttgactcatctaaagaactaggagaagggggatttggaactgtgtattttggcaaactgcgggacgggcgttctgttgcagtgaag

SEQ ID NO: 42403 - DNA, 355 bp, Glycine max
  Clone ID: LIB3139-045-P1-N1-C4
gggccacacaaaaaaagagacatcaatatgtcatacgttctagttcatgtatgcacctgaaataatgctccaggtggactagtgtgaatgcttaaaaagaaagaggaaaacatctattttttagttgttgatttgtatactttactatctgatccatattggtatgcttacatcacctgagtgttgttaatagcagccatagatccgccacggcagaaaggcatgttggatttttgccaaccgccataggaaatatatgaaaggaggcccaccatggcgtgtttatatggcagaatttcaaccttctgccattgctaaccctgcattaccttaagcacttgtctggaggatttta

SEQ ID NO: 42404 - DNA, 353 bp, Glycine max
  Clone ID: LIB3139-045-P1-N1-C7
ccaggggtagtttcatctttcccggtgctcagccctatccccatcgcaacttttctgaggaagttgctattcttgatggctactttggcaagcttagtgcaggaagcaatgcttatattttgggtggccaagacaaatcacagaactggcatgtctactctgcttctgcagattctgtaactccatgcgacaatgtttacactctagagatgtgcatgactggcctggatagagagaaagcacaggttttctacaaagaacaatctgcttcagctgccattatgactgttaattctggcattagaaaaattcttccagattctgagatttgtgactttgactttgagccatgt

SEQ ID NO: 42405 - DNA, 352 bp, Glycine max
  Clone ID: LIB3139-045-P1-N1-C8
acgagggtagggctcagctcagccatattctatctctacgccgctaactctctctcactctcgcgctctctctttcacaaccttcactttactctctctgacagctaaaatgcaaggaggatttcaatcatttttgtcacacgggaatgtcattagaaatgctgttctacaacgggtgcgcatggtgaaccccctgttacagccaattgtctcttcgcggtttgaatctgttacacctgctcgcattgaggagcatggttttgagagcaccacaatttcagacatcttgaatgataaaggcaagggtgctgatggctcctggctttggtgcaccacagatgataccgtttat

SEQ ID NO: 42406 - DNA, 351 bp, Glycine max
  Clone ID: LIB3139-045-P1-N1-C9
caagcttagccttgcaactacacttcttgaaaaggccaaggctaaaggggtttctttgttgcttccaactgatgttgtcatagcagacaagtttgctgctgatgctaacagcaagactgtgccggcatcaagcatcccagatgggtggatggggttggatattggtcctgattccatcaagacatttggtgaagcattggatacgactcagaccattatttggaatggaccaatgggtgtttttgagtttgataagtttgccacaggaacagaggctatagccaagaaactggcagagctgagtgggaagggagtgacaaccatcattggaggaggtgactccgttgccgc

SEQ ID NO: 42407 - DNA, 353 bp, Glycine max
  Clone ID: LIB3139-045-P1-N1-D1
atcaactgtcacagaatgcatctttttgatgttgttaatcaatatcgagcaatatttgcggatgacacatcaggaagtgaggaaaattatgacggtgggcttctttttagttgggcaatgcaccaaattacctcacacctacaaactctgaaagttatgcttccaaagataactgaaggtggatcactgtcaaatattttggatcagtgcatgtactgtgccatgggacttggttgggttggactggattttcgaggcttgctcccatcactttttgaagaagctgttctcaacttattctccaaaaatatgagtagtgcagtagaaaattttcagttggtcttggattcaca

SEQ ID NO: 42408 - DNA, 347 bp, Glycine max
  Clone ID: LIB3139-045-P1-N1-D10
atattatgtataatttgatgataatagattttgtattcttcctctgaagccataacctaaccttaaaaggctaaaaccttttgtgtttgcgccgctctaaagccaagcctgagactcgcgactcaccaccactgctcgccggcctctaattttgaaagcttctgcgcctcccacgccatttttgatactctctttgtgttcgcatagtgagatatggggaagaaggcgaagaaagctatgaagaagaatttgaaaagggcttcctttaataagaatccatctgaggatgctgatttcttgcccttggaaggtggccctgctcgtaagctcgccggccagcagaagcc

SEQ ID NO: 42409 - DNA, 339 bp, Glycine max
  Clone ID: LIB3139-045-P1-N1-D11
gcaagggttcgcactcgcagattcttgagcaagaataatggggaagaaaagaaaacacagtgagactactcaagctgtagcacaacccaaaaaggaagaggctgctccagagagaccggctaggacccttttggggtggaaggataagaatcaagttgaggatgattcaccaatatttaggaacaaagagaagctattggtcacttgctctaggcgcatcaattacaggtaccggcatttgatgttgaatttggtcacacttttgcctcattgtaagaaggataacaaagttgaatcaaaggaaactaaaggagccaccctcaacgagattgttgagct

SEQ ID NO: 42410 - DNA, 348 bp, Glycine max
  unsure at all n locations
  Clone ID: LIB3139-045-P1-N1-D2
caggaatgtgttcccagaacctattgtgttttaaatccacaaaatccttttgtgttaaataggtggatgggaaaactgactttcccccagggcacttcccgaagtgttaagagaatgcctctttctatagggggaggagctggtgcaaagaatgctattctcatgaatatgccaaatgctgttctttcaatgtggagatattttgttggagatctcgtctttgaagtttctaagatgacttctccctacattaaatgtacagtctctttcttcatagcatttggaaatttggctgatgacaccatcaattttgaggcttttccccacaagctggtgcangtttgagag

SEQ ID NO: 42411 - DNA, 358 bp, Glycine max
  Clone ID: LIB3139-045-P1-N1-D4
aatttctttctttttgctcagtttctgttgtattttctcaattacaacatcgtattctgcaaattcaaaccgggtcttggttttctgaaagatgggaggtggcaaggacaagcatcatgatgaatctgacaaaggaattttttcacaccttgctcatggggtagctggtgcagcacatggtggacatgggtacccacctggggcttacccaccaccacctggggcataccctccacaacaaggatatcctccagctgggtatcctccacaacaagggtatcctccagctgggtaccctccacatcaaggctatcctcctgctggttaccccccagctggttatcctggttcatcacat

SEQ ID NO: 42412 - DNA, 358 bp, Glycine max
  Clone ID: LIB3139-045-P1-N1-D6
gttcagtgtttacaataccaggtgattttgtcattggtgttaagttgacaaccataaacaatatgtgtgcatatgggctcaatcctggtatttcaggttctcgtcttttgggcaccattcctcagtccatttcacagcaaactgtttggaatcaaatggcaacagtgagaacaccattgaattttgattctagcaagcagagcttttgtcaattttctattgaccttctcggtggaggaattttagtggacaaaactggagattggatcacacttatacaaaattctccaattagtaacttgttgagagttgctgcttggaagaaaggttgtttaatggtcaagattgtgatgtctgg

SEQ ID NO: 42413 - DNA, 352 bp, Glycine max
  Clone ID: LIB3139-045-P1-N1-D7
ctagctccagttgatttctttgtgagtacagtggaccctttgaaggaacctcccattataacagccaacactgtcctttcaatcctctctgtggactatcctgttgacaaagtcagctgctatgtctcagatgatggtgcatctatgcttctgtttgattccttggcagaaactgctgaatttgcaagaagatgggttcccttttgcaagaagtataacattgagccaagggctcctgagttttacttttctcagaaaattgattacttgaaggataaggtgcagcctacatttgtgaaggaaagaagggccatgaagagagaatatgaagaatttaaggtgaaaattaatt

SEQ ID NO: 42414 - DNA, 353 bp, Glycine max
  unsure at all n locations
  Clone ID: LIB3139-045-P1-N1-D8
cggacactatcaccaagggtcagccactccctgatgatggcaacaccttgctttccaaggacggaacctttgagttgggtttcttcaaccccgggagttcaaataaccgctatgtcggaatttggtacaaaaacattgtggtcaaaacagtggtttggatcgccaaccgtgacaacccaatcagaaacaactcaagcaagttggtcataagccaagacggaaacctcgttcttcttagccagaacgagtctcttatttggacaacaaatgcatcatcatcagaagtttcgagttcgagtccaattgtgcagctcttggatactggaaactnggtaattaaagatggtaatgac

SEQ ID NO: 42415 - DNA, 347 bp, Glycine max
  Clone ID: LIB3139-045-P1-N1-D9
gtgctgttaggatgattgctgatgtatcaaaatcggacaagatcgtggttgagaaatcgaccgtgcctgtgaaaacagctgaggcaattgagaggattctgactcacaataggaaaggcatcaatttcacaattctgtcaaaccctgagtttcttgctgagggtacagcaattgcagacctgtttaagccggatcgagtcctcatcggaggcagggaaaccccagagggtcaaaaggctattcattctctgaagagtgtttatgcccattgggttcctgaggacagaatcctttgcaccaatttgtggtctgctgaactctcaaagcttgcagccaatgcttttctg

SEQ ID NO: 42416 - DNA, 284 bp, Glycine max
  Clone ID: LIB3139-045-P1-N1-E1
ggctcgaggtgtcggtggcatttttgttggttcgagtgagcgagggaagatgtactctagagattcatggggtggtccgttggagataaacgcgacggactcggcaacggaggacgagcggagccggaacctgcaggacgtggacagggcggcgctgtcgcgtcccttggacgagacgcagcagagctggctcctaggccccggcgagcagaagaagaagaagtacgtcgatctcggctgcatcatcgtcagccgcaagatcttcaagtggaccctcggcaccc

SEQ ID NO: 42417 - DNA, 354 bp, Glycine max
  Clone ID: LIB3139-045-P1-N1-E10
tagatattgctatgaaaaattactgcgccaggctaaagctccaagtatgtttttacaatctttcaaaaattttgtttctttgtgtgtgtatggtgatgataacttaattagtgttcatgaatatgtcaagccttactttagtggttctaaattgaaaagctttctagctggtcataatatcaccattactgatggtattgacaaaactagtgcaactttgcaatttagaaagttagcagattgtgattttctcaagagaaactttaggcagatgtctaatgttttgtgggtggctcctgaggacaaggcgagtttatggtcacaacttcattatgtttcatgtaataatctgga

SEQ ID NO: 42418 - DNA, 355 bp, Glycine max
  Clone ID: LIB3139-045-P1-N1-E11
taaagctttccatttcttagtttcaaaaaattttcgttttctctccacagacccctctcatggcatcttcttctggtagtttagacacctctgcaagtgcaaactccttcaccaacttcaccttctccacacaccctttcatgaccacttctttctctgacctccttgcttctcccttggacaacaacaagccaccacagggtggtttgtctgagagaactggctctggtgttcccaaattcaagtccacaccaccaccttctctgcctctctctccccctcccatttctccttcttcttactttgctattcctcctggtttgagccctgctgagcttcttgactcgccggttct

SEQ ID NO: 42419 - DNA, 353 bp, Glycine max
  unsure at all n locations
  Clone ID: LIB3139-045-P1-N1-E12
ctaatctcattctccttctgttcaaacactctctctcatggcatcagataagaagattaggatcggcatcaacgggtttggaaggattggccgtttggtggccagggttgcccttcaaaggaatgatgttgaacttgttgctgtcaacgatcctttcatcaccactgattacatgacatacatgttcaagtacgacaccgttcatggccagtggaagcattttgatgtgaaggtgaaggactctaagacccttctctttggtgagaagcccgtcaccgtttttggaatcaggaaccctgaggaaattccatggggtgaggttggtgctgattatgtngttgagtcaactggtg

SEQ ID NO: 42420 - DNA, 352 bp, Glycine max
  Clone ID: LIB3139-045-P1-N1-E2
attttctgtttccctcccccttctgaaaattttcccgcgtgcccagaaagggcagaagcggcaacttgggtctccccaacacctcttttcccgtactcctatttccgagttaaaactcacgtccgacccctacactcattccgttgttgattccatctcacaacgtctctttgtcccttgtcgttgttcttgtttctgaaatgctttgtttcccatagcggtcacatataccccctgcattgatggagttcacgttcctgtgctctttcttccatttttccctcgaattttcaagcattccctccctataggtaggagagggaagtggggaaaacatttgtagatggtttca

SEQ ID NO: 42421 - DNA, 288 bp, Glycine max
  Clone ID: LIB3139-045-P1-N1-E3
gagttccatttgatgcagaggatgatgaatgctcctgattcaaatgataatattgatttactgttgagcattgatttgttgggtttacaaggagcaggtaaagcttttccaaacaaaattgtttttgatgataagcttgtgttggctaacacacaagaattctttgatggaaattttccagtggattcttggttaccaatttttgtgaattgtctttatcctgtaagtcaattaccttcagaagctgtcgttgtaaatgttacatgtggtagtggacgtggtggttta

SEQ ID NO: 42422 - DNA, 358 bp, Glycine max
  Clone ID: LIB3139-045-P1-N1-E4
tgagcatgagtctgtaggcagtctcttagaagctgttaaggtaatcaagcctacagttttgattgggtcatcaggagtgggaaaaacatttacaaaggaagtaattgaggctgtgacttctataaatgaaaaacctcttgtcctggctctctccaatccaacttcacagtctgagtgtacagctgaagaggcttatcaatggagtgagggtcgtgcaatttttgctagtggaagtccatttgatcctgtagaatacaagggcaaagtgtactattctggccaggccaacaatgcttacattttcccgggctttggtctggggttggtaatctcaggagcaatcagagtgcatgatgat

SEQ ID NO: 42423 - DNA, 351 bp, Glycine max
  Clone ID: LIB3139-045-P1-N1-E5
ccaaaactatttgaagagcctcctcttctctctctggcggttcctcttcttagcctgctgcgccgtcgccaccgtccccgcccacaacatcacccgcatgctggccgcacaccccggcttctccaccttcaaccactacctctccgtcacccacctggccgaagagatcaaccgccgccagaccatcaccgtcctggccctcgacaatgccgccatgtcctccctcctcgacaagcacctctccctccccaccatcaaaaacgtcctctccctccacatcctcgtcgactacttcggcgccaaaaagctccaccagatcaacaacagcaccaccctcgtcttctccatgtt

SEQ ID NO: 42424 - DNA, 322 bp, Glycine max
  Clone ID: LIB3139-045-P1-N1-E6
caccattgaattttgattgtagcaagcagagctaaaggaagttacatatagacctattcaggggacgaataatagtggacataactggacataggatcacgctaatacaaaaattcttcaatgaagaacttgtgggcaaggaaaagattggaatgaatggcatatgcatgctgaagattgccatgcttatgaatgtatcacataataggagtgagggaaggtaatgggatcaagaattacaagcataccaatactgagcagcacatgacagtgcatgccagagatcaaactcggacatacagttcggggaaatgcgcttgct

SEQ ID NO: 42425 - DNA, 350 bp, Glycine max
  Clone ID: LIB3139-045-P1-N1-E8
tttgctttcatgtattctgaagtcagattttttaaatgaggatacaagaatctccattcaagttccctctaattttgagaatatgagtacatcaaagcaagtacaaatcacaatttctgctgaagagtttggggccaaagaaaaatctccctatctttcatatgcaggcggtgaagtaccgtcctcatcattatctcacattatcgggttgagggaaggaaatgtcatgtttaattacaggtattacaataataagttgcagaggacagaagtcaccaaagatttcacttgtccattctgtttggttaaatgcgcttgttttaagggtctaagatgtcatttgtcatcgt

SEQ ID NO: 42426 - DNA, 349 bp, Glycine max
  Clone ID: LIB3139-045-P1-N1-E9
gatgagtaagtgtctcctactttgcagtatataggtcttctaaagtttgctgacatttttgttcttgccctgtttgcatcatttataatttgggatttaataatatgtagtacgtagaatattcaatacataaaatatttacttagaatcataaccaacctataatttctaataatttgagggccttgctttttctctgaaatgtagtcatggggttcttgttacaatttgcttatatagtactatattcttttgtaaagttgattctttagatctctgaactggactgaataatcaaacattttgctaagaatttttaagttaaaaccataaaagattcatactattc

SEQ ID NO: 42427 - DNA, 348 bp, Glycine max
  unsure at all n locations
  Clone ID: LIB3139-045-P1-N1-F10
gtctgcttcatataaccaaactcttcactctgcttctgcttctttgcttcctctgttttttgggtacgaacagagtttctctgtttttgacgatggccataaaggcgattgaactgttgaaagggtgcggatcacaagaagaaataatggaagtgcttgctgcggtggcttcggatttgggggatgtgatcgatgatgtgaacaccttgcaggtgattccactgaatggtgcaatgaccaatgaggtttttcagataaactggccaaccaaaaatggtggtgagatcagaaaggttctggttcgtttatatggggaaggtgttgaaagtttttttgacagngaagaag

SEQ ID NO: 42428 - DNA, 356 bp, Glycine max
  Clone ID: LIB3139-045-P1-N1-F11
gaaaagcatagctaaaccctttctaaagtccaaagtcatttttagaaatttttttttatcatttggaataaactcctattttgattcctgaaaatgaaatacatggtcattattttctaaaactatttttttttcctgaaataacaagtctttaaaatgttcagttctttgatctaaatttagtaatttattatgattttgttttcttgatagtattacttaagaaactcatggaatgatggtagtttactcttgagtcttgagtctttctttaccatccatcccttctattatatatattataaatacaaatggtggaatgaagtcatatatacataataagtaatacagaaccg

SEQ ID NO: 42429 - DNA, 287 bp, Glycine max
  Clone ID: LIB3139-045-P1-N1-F12
tcatcaatcatggattggtggccttggtggagtcttatgaaatgaaaattttcgaggtgaaacttattgtaatgatgtcttgttttacagccctgataacatacgtggctgatacatctgacgtcattgagactgcaactctgcttgttagaaatgctaactttctgtacattgacgtggtgcagatcttgtgggatgttttaatggatgctgttcaaatgtctggttaagatatctatccgaatgccaatgcttgccttgtgctagtaaacacttgggcagaattg

SEQ ID NO: 42430 - DNA, 355 bp, Glycine max
  Clone ID: LIB3139-045-P1-N1-F2
gaaataattttaagggctacaagacatattttaagggtgaagatcagtttcacacacccaaaagtgccaagaagaagaacaccaccaacaacaccaacaacaagaagcatggggacaacactaataataatgatggcacaaagactggtgctgagaagaaattcaaaacacttccaccatcagagtctctgcctaagaatgaaaccattggaggctacatctttgtttgcaacaatgataccatggcagagaatctccaaagacagctctttggtctgcctccacgatacagagattcagtaagaacaataactccagggttgcccatttttctgtacaactactccactcacca

SEQ ID NO: 42431 - DNA, 283 bp, Glycine max
  Clone ID: LIB3139-045-P1-N1-F4
aagctcctgagggttctctcaggaaaaatgcagctgagaaacaagttttggaagcaatgtctcatagaatgcatgtagacaacagtgtaaaacttattgggaagcttttatttggtattgaaaagggtccagaagtactcaacgctgttagaccggcaggatcggcacttgttgatgattggcactgccttaaaaccatggtgaggacttttgagacacattgtggatccttgtctcagtatggcatgaaacatatgaggtcctttgcaaacatctgcaatgt

SEQ ID NO: 42432 - DNA, 351 bp, Glycine max
  Clone ID: LIB3139-045-P1-N1-F7
gcattcctatcgctcccaaaatcttttctaatttggtcataactcaataattctcatcatgggctccttgattgttccaggtgaacatgatcacaaactaaagcttgtttctcttccctttgtatcaaccagtcacctcattcccgtagtagacatagctaggctctttgccattcatggtgttgatgtcaccataatcaccaccacagccactgccgccattttccaaagctctatcgatcgcgaccgtgaccgcggccacgctattagaacccacgttgtcaagttcccatgtgaacaagttgggttgccagaaggagtagagagcttcaactccaacacttctcggga

SEQ ID NO: 42433 - DNA, 348 bp, Glycine max
  Clone ID: LIB3139-045-P1-N1-F8
gttcgttttagcatgcagaaagccacctgtttattgtgttatcacagaatatctatcagaaggttccttgaggtcatatttgcataagttggaaagaaaaactattcctctagagaagctaattgcttttgctctggacattgctcgtggaatggagtatatacactctcaaggtgtcattcatcgagaccttaaaccagagaacgtccttattaaagaagactttcaccttaaaattgctgactttggcattgcttgtgaggaagcgtactgtgacttatttgctgatgaccctggtacctaccgctggatggcacctgagatgatcaaacgaaaatcctatgggag

SEQ ID NO: 42434 - DNA, 354 bp, Glycine max
  Clone ID: LIB3139-045-P1-N1-F9
ctcattaattgcaagaatggcacttcgttgcttggtgatgtccctttctgttctcttcactcttggtcttgcgagagaaagccatgccagagacgaagatttttggcatgctgtttggccaaacactcccattccaagttcattgcgagatcttctaaagcctggccctgcaagtgttgaaatcgatgatcaccctatgcaaattgaagaaacacagtacccgaaaaccttcttctataaagaagaccttcatccaggcaaaacaatgaaagtacaattcagcaagcctccctttcaacaaccatggggtgttggtacatggttaaaggaaattaaagacactactaaagaagg

SEQ ID NO: 42435 - DNA, 359 bp, Glycine max
  Clone ID: LIB3139-045-P1-N1-G10
aacattttcaataccaaaaccttggtaattaattaactccaaaaaaatgcaagccaaacccattcacaacaccccaacatacattcctccacccataaggccatcaccaccggtgcaccaaacccctccctctataccatcaatcaaacctcgtgcaatatccatatccgcacctaatattcctattgccgtaccaattccaccaattgtagagcctgatgattccaatgctgcttattatgactaccaattcttgttcatgtcacaaagatccgaagcaacccgacccgtcactctaagcaccgtggaaggtgcgatccccgccgatttcccgtctggcacgtactatctaaccggac

SEQ ID NO: 42436 - DNA, 293 bp, Glycine max
  Clone ID: LIB3139-045-P1-N1-G11
caatttctatctctcttatactcactactctctttgctctttcttttctccactatggctgcacaagaaaacaacttccaagactacttgcctgtgatggccaacaagcttggtggggatggcctaattgatgaactgtgcaatgggttcgatcttttgaaggattctgataaaggggtcatcacttttgagagcctcaagaggaattcttacttgcttggtcttcagggtctcagtgatgaggatcttcgctccatggttttggaaggtgactttgatggtgacggtgcact

SEQ ID NO: 42437 - DNA, 359 bp, Glycine max
  Clone ID: LIB3139-045-P1-N1-G12
ctgagaatacaggtatagcattggcctgtgctatgaatagttcttttagggggcgcgccagttctgatatttacaccatctgctctcaagactgtgaattgtggaatcctgcttgcacaaaagcaatgactatgtcatttaatccaaacccgtgttctgatgcatggagtttggaatttttgaagcgtaccggatttcattgtgatatcatttgtgtcactgggtggactgccaccccaatgcaggatgttcaggttacaattgattggtctatttcctctcaggaatgtgttcccagaacctattgtgttttaaatccacaaaatccttttgtgttaaataggtggatgggaaaactg

SEQ ID NO: 42438 - DNA, 353 bp, Glycine max
  Clone ID: LIB3139-045-P1-N1-G2
tgacacattgtcatctggaaggcaacctaatctgctcagctctccttcatctgtgcaactctctccaagccaagaacatcaactatcattggtacctgcatcagtggaaagagatttggagccattggagaatgaggttcagcctggtgaagattgtacccagtcattggtattggttcagatggctggtgaagatttccagcagaatagtccgaaaaagaaaaggcgcaagttggaaccagctggggaaggggagtcttgcaagcgttgtaattgtaagaaatcaaaatgtttgaagctttattgtgagtgctttgctgctggagtctactgcatagaaccttgtgcatgcc

SEQ ID NO: 42439 - DNA, 363 bp, Glycine max
  Clone ID: LIB3139-045-P1-N1-G4
gaattctcagatttgcggggcgagatgatgcagcagccaggacccggcatggcacctcccaccatgggccagcagccgccgcaacagtaccagcagcctccgccgcagcagcagcaaccctacgtcatgatgccgccgcaggcccaggccccgcaggccatgtgggccccctccgcccagcctccgcctcagcagcagcccgccagcgccgacgaggtccgaaccctctggatcggggatctgcagtactggatggacgagaactatctctatacctgctttgctcacaccggcgaggttacatcggttaaagtaattcgaaacaagcaaactagtcaatctgaaggttatgggtttattgag

SEQ ID NO: 42440 - DNA, 356 bp, Glycine max
  Clone ID: LIB3139-045-P1-N1-G5
gcaaattggatactgttactggccaatattatcctgagtgggctccaattaattgtcgagttcatcgacaaccaattcacatcactgaaggaaattatgtcagaaagcaagatgtcagcattgaatatgatgcatgtacgattccaaatgattgtggttcattggttgttgccaaggttggaaatcacaaacaaattgttggtttccatgttgctggaagcaaaggaagactgggatatgcttcattgataccatatgttgagccagttgtgcaagctcaaagtgctgaagtttactttgacttcttccctgtggaggttgatagtcaagaaggagttgctcacattggtgagttg

SEQ ID NO: 42441 - DNA, 343 bp, Glycine max
  Clone ID: LIB3139-045-P1-N1-G6
gtgaggttcattatgaagaaaagggacaagcttagttgtcaagttggaatcaacccatactccatggaatggactggtttggccaataggttactgagtaagggcaacgatattctgtgttgcgattatgctagttttgatggtttgattaccaagcaagttatgagcaagatggcagaaatgataaacagtctttgtggtggtgatgaaaaattgatgcgtgaaaggacacacctgctgttggcttgttgttcaaggatggcaatttgtaagaaagatgtttggagagttgaatgtggaatcccttctggatttccgctcacagttatttgtaatagcattt

SEQ ID NO: 42442 - DNA, 351 bp, Glycine max
  Clone ID: LIB3139-045-P1-N1-G7
attcccatgttgtgatggcagcagcaccagcagctaccttcgctattggaaccaccggttccctcggccaaagaggaagctcgcttcctcaatcaaagtcctttgggttgaaattcaactctctgaatcatttgaagagcttctgtggcctcaaggccatgtcatccgtgagatgtgagtcggaatcctccttcttcggtaacaaaaccggtgctgctctacgggcgtcttttgcatccaaagctcaaaaggaaaacaaccacaactcgcagcctcaggcttcgtacaaagttgcggttcttggtgctgctggagggataggtcagccgctctcgcttctcatcaagatgt

SEQ ID NO: 42443 - DNA, 350 bp, Glycine max
  Clone ID: LIB3139-045-P1-N1-G8
gttcatttatgatgaagccacctctttttccttctgtgcgtccaaatgggtccttcgttccgaccccaaaacccaatcttccgtatcccctgatgctctcaatcctctgcgtgcttatctttccctgccccaagtcagctttggccctaaaaggtggcaactgcctgaagcagcaaacacggtttcagcctcaacagctaatgaatcgcgtcaagacaggtatgccagccatgttaacccggagaagttgaaagctgcaggggaagggcttgcacatgttggaaaggcgtttgctgttgcaactgcatttatatttggtggtgctgcattggtatttggtgtggtggctt

SEQ ID NO: 42444 - DNA, 352 bp, Glycine max
  Clone ID: LIB3139-045-P1-N1-G9
cccttctttaaaacgatgtcgttcgaggtggaggaggaggaggcgttcgagcacacgctcctggtggtgcgcgaggtgtcggtgtacaagatcccgccgcgaagcacctccggcggctacaagtgcggcgagtggctccagtccgacaagatctggtcggggcggatccgcgtcgtgtcccggcgcgaccgctgcgagattcgcctcgaggatccgagctccggtgagctcttcgccgcctgcttcgtctacgccggccagcgcgagaccgccgtcgagcccgtcctcgactcgtcgcgctacttcgtcctcaagatcgaggatggccaaggcaagcacgccttcattggcc

SEQ ID NO: 42445 - DNA, 360 bp, Glycine max
  Clone ID: LIB3139-045-P1-N1-H10
ctcgtgccgcgcgtccgaaagctcgcagacaactgcactggtctccagggcttcctcgtcttcaacgctgtcggcggtggcaccggttccggtctcggatctctcttgttagagcgtctctccgtcgattacggcaaaaagtccaaattagggttcaccatttacccttcccctcaggtttcaaccgcagtcgtggagccctacaacagcgtcctctccacccactcccttctggaacacaccgacgtggctgttctcttggacaacgaagccatctacgacatctgtaggagatctctcgacatcgagaggcccacctacaccaacctcaacaggctcatttcccagatcatttcgtcg

SEQ ID NO: 42446 - DNA, 232 bp, Glycine max
  Clone ID: LIB3139-045-P1-N1-H11
attttcttctctctctccctctcatcttctggggacctcaaaatatagtaggtaccacaacacaacaccatattatgggttccaaagtcaggaccctggttttgctctctttgttttgcttagctctatttgtgtccttgcaccaagcaagggcagcaaagtcacataataatgataataatcataatgtggctcgcttgaaggggagaaaggagttgaatagatgtaattt

SEQ ID NO: 42447 - DNA, 359 bp, Glycine max
  Clone ID: LIB3139-045-P1-N1-H12
ctggatttccgctcacagttatttgcaatagcatttttaatgagatgctcattagatatagctatgaaaaattactgcgccaggctagagctccaagtatgtttttacaatccttcaaaaattttgtttctttgtgtgtgtatggtgatgataacttaattagtgttcatgaatatgtcaagccttactttagtggttctaaattgaaaagctttctagctggtcataatatcaccattactgatggtattgacaaaactagtgcaactttgcaatttagaaagttagcagattgtgattttctcaagagaaactttaagcagatgtctaatgttttgtgggtggctcctgaggacaag

SEQ ID NO: 42448 - DNA, 356 bp, Glycine max
  Clone ID: LIB3139-045-P1-N1-H2
ctcacactttctctatcgttttcatctctgtttcagatctgagctctcgtatattccccagccatggccgaaaaggtcaccataatgaggctcaaggttgatcttcagtgccacaaatgctacaagaaggtcaagaagattctctgcaaattccctcaaatccgagaccaggtgtacgacgagaagaataacatcgtgaccatcgcggtggtttgctgtaaccctgagaagctcagggacaaaatttgctgcaaaggttgtggtacgatcaaaagcattgaaattgttgagccttccaagcccaaaccaccacctcaaccagaaaagcccaaggaaccagagaagccaaaagagcc

SEQ ID NO: 42449 - DNA, 364 bp, Glycine max
  Clone ID: LIB3139-045-P1-N1-H4
ggccacactgttaactatggatcccagggggattcaaccgaagctccacctgcccagcctccaagtcaaggttatggtacaagccaacaacctagcccaaatgctgccaactatccaccacaagctcagccaggttatggcgtgcccccaacctcccaaccagcagcttatggtagtcaacctccagcacaatctggttatggatctggctatggaccccctcagacccaaaagcctagtggcacgccgcctgtgtatggacaatcccaatcacctaacacagcaggaggctatggtcaatctggtcatttgcaatctggatatcccccttctcagcccccaccttctggaggatatgcccaac

SEQ ID NO: 42450 - DNA, 414 bp, Glycine max
  Clone ID: LIB3139-045-P1-N1-H5
gaagagcatatgacgtcgcatgcgtacctacggctgggatttcggttcgagaccaatgtttttaccgaggtcgcggaggatcggcagggagcaagttccgcatgtcactgggtctgccggtggcggcgacggtgaactgcgccgacaacaccggcgcgaagaatctctacatcatatcagtgaaggggatcaagggaaggctgaaccggttgccgtcagcttgcgtgggtgacatggttatggccaccgtcaagaagggaaagcctgatctccgtaaaaaggtgctccccgccgtcatcgtccgtcagcgcaagccgtggcgccgaaaggacggtgtttacatgtacttcgaagataatgctggggtcatagtgaatcccaagggtgaaatgaaaggttctgctatcactggtc

SEQ ID NO: 42451 - DNA, 325 bp, Glycine max
  Clone ID: LIB3139-045-P1-N1-H7
atggctgtaaaaagctgatgtgcctaccatagcacagattgaagagttccattcgatgcagaggatgatgaatgctcctgattcaaatgataatattgatctactgttgagcattgatttgttgggtttacaaggagcaggtaaagcttttccaaacaagattgtttttgatgataagcttgtgttggctaacacacaagaattctttgatggaaattttccagtggattcttggttaccaatttttgtgaattgtctttatcctgtaagtcaattaccttcagaagctgtcgttgtaaatgttacatgtggtagtggacgtggt

SEQ ID NO: 42452 - DNA, 349 bp, Glycine max
  Clone ID: LIB3139-045-P1-N1-H8
ggaggaacaaaaaaaaaggctttagatatagggaaactttttaattatttttggtatggtgagaagtgcaagaagaggaagaagttgagttgagttgaggttggagctgaaagaaaattgagtgagaattcaatgacacagaatctgaagcataccgtggatttggaatgcagtgataatagcaggccgtcaaagatatcaaaaatcgagtatccgagtgacagtgacattgacgaagaagaagaaggaatgagccaaaaccctaggaatgggattcagcgctatttggttgcaatcgagtatattgggactctcttctccggttctcagaagcagctcaatgtccgta

SEQ ID NO: 42453 - DNA, 350 bp, Glycine max
  Clone ID: LIB3139-045-P1-N1-H9
ctaatgagcatctcattaaatatagctatgaaaaattactgcgccaggctaaagctccaagtatgtttttacaatccttcaaaaattttgtttctttgtgtgtgtatggtgatgataacttaattagtgttcatgaatatgtcaagccttactttagtggttctaaattgaaaagctttctagctggtcataatatcaccattactgatggtattgacaaaactagtgcaactttgcaatttagaaagttagcagattgtgattttctcaagagaaactttaagcagatgtctaatgttttatgggtggctcctgatgacaaggcgagtttatggtcacaacttcattat

SEQ ID NO: 42454 - DNA, 361 bp, Glycine max
  Clone ID: LIB3139-046-P1-N1-A1
ctcgcgtattcgagtttcacagcgaagtcgtaggagatggagaacatgcacagcttctggcaattgggcgatgaactccgtggacactcaaaagcatcggaggatcacaaatggttaatggttgcttggaaattggcggcacagacaagattgaagggggagcgtgtgaacaaccttgatctttcaaagggccccattgaaacaaggtcaagggataaatttgggttccaggaagagaacaaatttgattctcttaacttaagcatgttgaacctggactctaaatttactgagaatgtgagcaaaagctcgcttcgaaatggtgtttatggtatgaatgcagtgtatcagaaaaacaatg

SEQ ID NO: 42455 - DNA, 350 bp, Glycine max
  Clone ID: LIB3139-046-P1-N1-A10
gattaattcatttacagtccgtgcattacgtgatacttttccacctgctagaggagcaggcattatggctttatgcgccaccagttcctactatgacatcactgaagttgcaacccggattcttcctaatgttgttgtgctcacaattgatcctgacagtgatgttagaactaaggcatttcaagctgttgatcagtttttgcagatagcaaagcaacattatgaaaagacaaatgcagcagataccactggtgttgcaggtgtgggaagctcatctgttccaggaaatgctagtttgcttgggtgggctatgagttctttgaccttgaagggtaaaccttctgatcatg

SEQ ID NO: 42456 - DNA, 348 bp, Glycine max
  Clone ID: LIB3139-046-P1-N1-A11
gaataagttgttgggttgagttggattggatgtctaatctaatctatacctttcttttttcctatgcttttaaggcacaaacccttctttcttccctcttctttcttcttcttattgttattccttgcctttaccctttagggaaggaagaaggaacaactatactactattatccttattattgttattattgtaattaatctttttattatagttattgttgttgttattattcctcaaatatggattcgttgtgcctctccaacgactcagttgtttctggattcaaagacaaggagtcaatggttgacccctttttggtcgaggctctccagaaccctcgtcac

SEQ ID NO: 42457 - DNA, 358 bp, Glycine max
  Clone ID: LIB3139-046-P1-N1-A2
cgcgatcacaggttgccgcaccttaaaaccggaaacaaaagcaatcgttacttgatttcaagaatttctcaatttcttcctacttctttgtgtacgatttcttaagggaaagaaaatcactctctgtgctggtcacagacttcgtgaatcattttcttttccactcctagtttatttgctgaacactctcctatttgatataggacttcgtgtcagatttaaactttttctgtttctttctcagttctctgtttaatttcaagttcaagctggtgaaattttggattagtgctcccactctcctatctggtataggacttcgtgggtagacttttctacttctctcctttctttcact

SEQ ID NO: 42458 - DNA, 344 bp, Glycine max
  Clone ID: LIB3139-046-P1-N1-A5
gaaaaattcattaccattgtccagaaaacaacgcatacatcttcgatccttagtccttattctctctcatgaaccggtggtccggcggtcggggtcgtaagcctcggcggcgagcatggtgctgctcgttcgcaatccctccgtcgagccccgaagtcaacacaatccctcactccaaatcgcgccacaaaaacaaaacagaatctttttcaaaacccagcgtcgtttcggtcccaaactcaccgcagagcgccaaatccgggtttcccatcgtgggccggatcgacccgcgccggatcttgtcgccgggaagagtctctcccatcgactccgatcccgccccc

SEQ ID NO: 42459 - DNA, 353 bp, Glycine max
  Clone ID: LIB3139-046-P1-N1-A6
gttcagtgtctacaataccaggtgattttgtcattggtgtcaagttgacaaccataaacaatatgtgtgcatatgggctcaatcctggtatttcaggttctcgtcttttgggcaccattcctcagtccatttcacagcaaactgtttggaatcaaatggcaacagtgagaacaccattgaattttgattctagcaagcagagcttttgtcagttttctattgaccttctcgttggaggaatcttagtggacaaaactggagattggatcacacttatacaaaattctccaattagtaacttgttgagagttgctgcttggaagaaaggctgtttaatggtcaagattgtgatg

SEQ ID NO: 42460 - DNA, 354 bp, Glycine max
  Clone ID: LIB3139-046-P1-N1-A7
cgtgctcgagcaagctagctattagttcgattttgtagtaagtgaggtgccaatatggtgaagatagctcttggtactttggatgactcttttagcgctgcctctcttaaggcttatttcgcagagttccacgcaactctgattttcgtgttcgctggtgttggatcagccatcgcttacaacgagcttacaaaagatgcagccttggatccaacggggctggtggcagtagctgtggcacatgcatttgcactgtttgtaggtgtctccgtcgccgccaacatctcaggtggccatttgaacccagctgtcacttttggattggccattggaggcaacatcactctcatcact

SEQ ID NO: 42461 - DNA, 342 bp, Glycine max
  Clone ID: LIB3139-046-P1-N1-A8
aatgttttgtgggtggctcctgaggacaaggcgagtttatggtcacaacttcattatgtttcgtgtaataatctggaaatgcaagaagcttatcttgtcaacctcgtaaatgtgttacgagaattgtatttgcacagtccagaggaagctcgccaattgagaaggaaagctctctctcgtattgaatggctgcaaaaagctgatgtgcctaccatagcacagattgaagagttccattcgatgcagaggatgatgaatgctcctgattcaaatgataatattgatttactggtgagcattgacttgttgggtttacaaggagcaggtaaagcttttccaaac

SEQ ID NO: 42462 - DNA, 354 bp, Glycine max
  Clone ID: LIB3139-046-P1-N1-A9
tgtcactttctctctctctctctctcattcacacgaatcacactctccacagtgcgattcattcaccaatggatcgcaacggtgttctctctcttgcattcatctgcattgtagtcgccggcgtcggaggccagtctcccgccgcagcgccctcgaacactccggcaacccccgccgccgccactcccgcccaagcaccttccacaccgaattcaccagccccagttgcttctcccaaatcatctccaccagcttcgtctcctaagcccgcaaccgcaacccctgcttcgtcgccggcggcatctcctaccaccacccccgccgcgcctgctccagcgaccaagccacctgcag

SEQ ID NO: 42463 - DNA, 355 bp, Glycine max
  Clone ID: LIB3139-046-P1-N1-B1
ctctatgcttgtcagagggttttgatacatttccaactttgctttgtgctgatggatgttgcatggttgatcgaagaatgggtatttatggttatccaatagagattcaagcacttttcttcatggcattgagatgtgctttgtcaatgctgaaacaggatgacgccgaagggaaggaatgtgttgagcgtattgtgaagcgtttgcatgcactaagttatcatatgcggagttacttttggctcgacttccaacaactaaatgacatttatcgatataagactgaggagtactcacatactgctgtaaataagtttaatgttattcctgattcaatcccagattgggtatttga

SEQ ID NO: 42464 - DNA, 350 bp, Glycine max
  Clone ID: LIB3139-046-P1-N1-B11
ggaaaattaggattggagggtcgccacgtttagcagcaaccaaaccctgtctactctttcttcttctcttcgctagggttttagcttcttcctcttcacttcgttcttctggcctctacaatgagcaacgacaaggacaccttcaacgtcgctgatctcacttccgctctcaacgaggacaatagagcagaccttgtcaatgctctcaagagcaagatacagagtttggctggacagcattctgatattctagagtctctgtcgcccaatgtcaggaagcgtgtggaggttcttagagagatccagggtcaacatgatgaattagaggcaaaattttttgaggagagagc

SEQ ID NO: 42465 - DNA, 329 bp, Glycine max
  Clone ID: LIB3139-046-P1-N1-B12
ttttctttcgtttccgcttcaaagcatgaaggggggtccaactcagacctcttgcgtttttttcagtattcatttccatttacactttctttttctcttcttcttcttcttctggctacctcattcttaataagcacaactaccaaaagtgggggcagttttctgaatcacaagtgaacctctctagagagagtcttgtgcaagatgattgagttgtttgagtatcaagagaggtcaagtgatggttgatcaagctgatttagttatcatttgtgtctctgttggggtggcccttggagttttgatagcttatctcatatatgttggca

SEQ ID NO: 42466 - DNA, 349 bp, Glycine max
  Clone ID: LIB3139-046-P1-N1-B2
ggaacggttagttctaccgtgtcatctgtgacacaaggggtgcctttgtgcagcctgcagtttatgaggcctttgggttgactgtggttgaggccatgacttgtgggttgccaacgtttgccacatgcaatggtggtcctgctgagatcattgtgcatggaaaatctggttaccacattgatccttaccatggtgaccatgctgctgagatccttgttgagttctttgagaagagcaaggctgatccatctcactgggacaaaatctcccagggtggactcaagcgtattcatgagaagtacacatggcaaatttactcggacaggctcttgacactcactggtgtgta

SEQ ID NO: 42467 - DNA, 357 bp, Glycine max
  Clone ID: LIB3139-046-P1-N1-B3
atagtcttcctttgcactctccttctcttcttttcggcggcaattcgtgcctccgacgatgacctggcgctgcacgcgaagaagctcatcagagacctcaacttgttccccgacgctgacgtcaacatcgttcccgttgctaattgcaccctccaaccccgcaggatcgtcgagaagcgcctgaggttcccgaagctgctagcttcggattccgagccttcggttgaggatttgggtcaccacgctggctattaccccattcagcattcacatgccgcaaggatgttctactttttcttcgaatcacgcaataggaaggaggatcctgtcgtaatttggttgactgggggacctggg

SEQ ID NO: 42468 - DNA, 357 bp, Glycine max
  Clone ID: LIB3139-046-P1-N1-B7
aactaattaagcaacacacacttcaatttatcagcatggcctccgttcagtgccacaaaacctgcaaagtgagctgccaacaggaaaaccagcacgcctcgtttgggcagaaagtttctgacttgttcaaagggcatcaacataatgaccacagctccaattatgccacccaaaccaaagtgctttcccagtcagggtcagggttaggccccttcaccaccaaaactcaaacacaatgcggttgcccccaaacacatctcagtaccactcatggctccaacacaaaaggccatggccatggccaagggagaattaagagggagcacaagagagggatgctgcagaacatcaaggatc

SEQ ID NO: 42469 - DNA, 356 bp, Glycine max
  Clone ID: LIB3139-046-P1-N1-B8
cattcattcatcatgcttggcagatcgttgcacagattcctccatcctagtttagtgctagaaagagtaaagtatgtcctgcaaggatggtagcagaaacggaatcggaatggataacgggaagtatgtccgttacacgcctgagcaggttgaagccctagaaaggctctatcacgattgccccaaacctagttccattcgccgccagcagctcattcgcgagtgccccattctctccaacatcgaacccaagcaaatcaaggtttggttccagaacagaagatgtagagagaagcagagaaaggagtcgtcgcggctccaagctgtcaataggaagctgactgctatgaacaagc

SEQ ID NO: 42470 - DNA, 354 bp, Glycine max
  Clone ID: LIB3139-046-P1-N1-B9
gcgcgattcaccagctaaaccaatttcaatttgcttgcccagacacacattctttttctttttccatgtctcaaatgatcagaaaatcaatggaatgaagaaaatgactatccatctatctatgtagtcttgctttcaataatatctacctagatattatattatcatctcttttcccagcacaagcaccggttatagaggctagcttctaacatgctgctttttggttttatatatatttgttttggcagtacctgcttcctcaaaactactattggttttggaatttgccccaggtagctagtttaggacacacgatttttttttctcttcaaaaatgatgtctgaagaaac

SEQ ID NO: 42471 - DNA, 349 bp, Glycine max
  Clone ID: LIB3139-046-P1-N1-C11
cttgctgcgagcgaatccctctctctctttctctttctctctcatccagatcttgcaaaaaaaaaaaaacacaatggcagcgagcgctcccactccacgcgaagagttcgtgtacatggcgaagctggcggagcaggccgagcgctacgaggagatggtggagttcatggagaaggtctccgcctccgccgagagcgaggagctgaccgtggaggagcgcaacctcctctccgtcgcctacaagaacgtaatcggcgctcgccgcgcctcctggcgcatcatctcctccattgagcagaaggaggagagccgcggcaacgaggaccacgtcgccgtcatccgtgactac

SEQ ID NO: 42472 - DNA, 347 bp, Glycine max
  Clone ID: LIB3139-046-P1-N1-C12
agttattctctttcttcttttttagctatccgtctgttgaaaaatctagatctcgttcttccttgatctacgttacgcttttagtgaccggatctgtatggatctgaaccagatctacacgccgatggtggttttggcctggtctttcatagatctgatgcatgaggctcagatctactgtacagaggtgtgcgattcatgttcgtctctcttttggaatctgtttcgtagaaagtcgtttggtcttccatgtcgcatggctcttgaggtatttttttttgcagatactgtagataatcgatgagaagaacgcagatccagccgcttgcgcttgttcgatcgctaca

SEQ ID NO: 42473 - DNA, 348 bp, Glycine max
  Clone ID: LIB3139-046-P1-N1-C2
ctcgagctgctcgagccgattcggctcgagatgagatagaatctgcgcgagaaagcgacaccaatccttgcaatagagatggtggttaccagaaatattgtgttgttactgctttctattacttttgttgctccaattgtgctctacactgatcgttttggcaccttcaagtacccctttgctgagcaagagtttattgatgctgtaactgcttttgtgagtgcagctgactctggccatttgaatttcctgccgcaagaaacttctacggtctttaaggaaccaattgggcttgtatatacggaggacgctgcaaacacaaagaatttgcttcatggcttgcacttt

SEQ ID NO: 42474 - DNA, 352 bp, Glycine max
  Clone ID: LIB3139-046-P1-N1-C3
ctcccacaccgtgccaatgccaatgtcaaagttggaggctatgacattcccaaagggtccaatgtgcatgtgaatgtgtgggcggtggcccgcgacccggccgtgtggaaggatccattggagttccgacccgaaaggttccttgaggaggatgtagacatgaagggccatgactttaggctacttccattcgggtcgggtcgacgagtatgcccgggtgcccaacttggtatcaacttggcagcatccatgttgggccacctcttgcaccatttctgttggaccccacctgaaggaatgaagcctgaggaaattgacatgggagagaatccagggctagtcacatacatga

SEQ ID NO: 42475 - DNA, 354 bp, Glycine max
  Clone ID: LIB3139-046-P1-N1-C4
gaagggtttcttccggatcaacaacgtttgatctgcgccggaaaacaactcgaagacggcagaaccctcgccgattacaatatccagaaagaatcgactctgcatttggtgcttcgtctccgcggagggatgcagatcttcgtgaaaaccctaaccggcaaaacgattacgctagaggtagagtcctctgacacaatcgataacgtgaaagcgaagatccaggataaggaaggtattccaccggatcagcaacgtcttatcttcgccggaaagcagttggaagacggcagaaccctcgccgattacaatattcaaaaggaatcgacgcttcatctggtgcttcgtctccgcggg

SEQ ID NO: 42476 - DNA, 352 bp, Glycine max
  Clone ID: LIB3139-046-P1-N1-C6
gaatctttgttgctgcaagttttggagggacaaatattgatccatcagcttgggaggataagaagtgccctggtgaatctcgtttccccgctcaggtacgagtgataactaggaaaacttgtgaaccactggaggaagattccttcaggccaatccttcaccactatgatggtcccaagttccgtcttgagctgaatgtgcccgaggcgttgtctcttctggatatttttgcagaacaagacaccttcaatgacactttcgaggctttgccggcataaaaggagattaatagcaaataatgcaacaagaatatcactcacagagacaatagataattagaggtttcggttgg

SEQ ID NO: 42477 - DNA, 354 bp, Glycine max
  Clone ID: LIB3139-046-P1-N1-C7
gtccagttagggaaaggagatagcagaaggatcatcaacaacaacaacagcaacaagatcctctcatggaggtgacgatcatcatcatcaccacaatcagcagcagcagcaacaacaacaacagttaccactgagtcgctatgagtctcagaagagaagggattggaacacttttggacagtacctgaggaaccaaaggcctccagtggcactttctcagtgcagctccaaccatgttcttgagttccttcgctacttggaccagtttgggaagaccaaagtgcactcacaagggtgcttgttctttgggcaaactgagccgccaggaccctgcacttgccctctcagacaagc

SEQ ID NO: 42478 - DNA, 347 bp, Glycine max
  Clone ID: LIB3139-046-P1-N1-C8
aaacaactcattaacctttctcattccccatgtccgcaccttattcagccactgctaatttctagggttccgaaatggacgctggcggaaagatcaagaagggcgccggaggaagaaagggcggcggccctaagaagaagccggtttcaaggtccgtcaaggccggtctccaattccccgtcggaagaattggccgttatttgaagaaaggaaggtacgcccagcgtgtcggtaccggtgctcccgtttacttggccgcagttctcgagtacctagctgctgaggtgcttgagttggctgggaatgctgcacgtgacaacaagaagaacaggattattccgagacat

SEQ ID NO: 42479 - DNA, 347 bp, Glycine max
  Clone ID: LIB3139-046-P1-N1-C9
cactctttctcgcagttacagaaaccatgacgacggtggtgcccacctgcgaagaagacgctgctctctctgttgtccgattcgcctctgaactcgcctgggccgatgccggtcccgaggttgctgagcctcaagttagtagactctgcatggaggctgaagagtttatcgttatgggaaaatggttggaactagcatcattgatgattacctctgctgaattggttttctcaaaggtttctgaaacagatatagagtccatcttcactatcatctgcaatcttgtgacaaagactgagaatccagatgaagtgatggagattgtaaaagttataactgcaaaaata

SEQ ID NO: 42480 - DNA, 349 bp, Glycine max
  Clone ID: LIB3139-046-P1-N1-D1
tgaaatttaataaaccgcgatcacaggttgccgcaccttaaaaccgggaacaaaagcaatcgttacttgatttcaagaatttctcaatttcttcctacttctttgtgtacgatttcttaagggaaagaaaatcactctctgtgctggtcacagacttcgtgaatcattttcttttccactcctagtttatttgctgaacactctcctatttgatataggacttcgtgtcagatttaaactttttctggttctttctcagttctctgtttaatttcaagttcaagctggtgaaattttggattagtgctcccactctcctatctggtataggacttcgtgggtagacttt

SEQ ID NO: 42481 - DNA, 262 bp, Glycine max
  Clone ID: LIB3139-046-P1-N1-D10
tcatgattatcttcagatatcaaacaaaaaagaaagagaccaagaacctgtccttatgtgtttgtgagctcaagttgatgtttttagttccaagatttttactatccacagtccacactgttgtgttgtgcttcttctgggaaggttctggggtgcaactcttctactgaactcctgcccctctaaacccgtcaacctatcttgtaaaacatgttacagtccacatgtcccatcacgatcggaccactcgttagatacgtga

SEQ ID NO: 42482 - DNA, 348 bp, Glycine max
  Clone ID: LIB3139-046-P1-N1-D11
taacacttaccagtatggctatccaacaatctctgttagacaggcctagaaaatctgtttccaaaactatctgcttaatcttttctatagctgctgtcatgatctcatcagcctttgttggttcttatctcatcaaatccacctccttcttcaaccaatcctctcctcaacatctctgtgatcatgcacttgatagggcaacatgtttaacccatgtctcagaagtggtacaaggtccgatcttgacccccacaaaagaccacaaattcaatttgttacagtcattcctaatgaaatacacctcacacattaagagagttatgaacacagccagttctatcaaactta

SEQ ID NO: 42483 - DNA, 348 bp, Glycine max
  Clone ID: LIB3139-046-P1-N1-D12
tttttattgtggagttctgagtgggcaaatcaaacttcatggcatttgagtttccttattgacaatcccaaacagtctacagtttttgatattctcttgggaatctctcaagattttgaaattgctggtaatactcttatgccagctttttctgttccacaggctactgccagatcttctgaaaatgcggaatcctctgcatgatctggaattcgtgttttctttcgcttgttcgtttgtttaattcaataaaggaaattaggcatgaccctcttgttgagtatgctctgcctatctgaaaatttccacacctcttttaattgtcgtaatgatgtgtgaagtgtgtgt

SEQ ID NO: 42484 - DNA, 355 bp, Glycine max
  Clone ID: LIB3139-046-P1-N1-D2
gtagagggtattaaagaaaaaaaagttgaaaatgagttcagacagccgcagcaggagcagaagcaggagcccaatggaccgtaagatccgctctgatcgattttcctatcgtgatgcaccttacaggagagattcacgttggggtttcagccgtgacaatctgtgcaagaactgcaagagacctggtcattatgcaagagaatgccctaatgtcgcaatttgccacaactgtggcctacctgggcatattgcttctgaatgtacgacaaagtcactgtgctggaactgtaaagaacctggccacatggccagcagttgtccaaatgagggtatgtgccacacctgtggtaaagct

SEQ ID NO: 42485 - DNA, 355 bp, Glycine max
  Clone ID: LIB3139-046-P1-N1-D3
tccaacgtctttgtttgagtatgtagaaaatgtccaatcatctgagttgaacactggaggttcacatttgcttagtcatgtgtctccaccaaagtcatcaagcttctttgcagactttggaatggatagtggctttccaaagaaatctgggccaagctcctccaaagtgcaaattcaggaaactgatgaagcaagaaggaagttctcaaatgctaaatctatttcttcatcccaatattttggagatcagaacaaggctgcagatgtggattctcaagctacattgtctaagttatcgggttcaagtgccatctccagtgctgatctttttggtgactcaagagacaacaacatt

SEQ ID NO: 42486 - DNA, 350 bp, Glycine max
  Clone ID: LIB3139-046-P1-N1-D4
cggctctaggcaccacactatggcttgcactgatggaacggccaccgtcaccgacgaagctagcggcggcggagccactacaatcttcgccgtgcaccccgacataatccaaacccacatcctcacgtgcctggacggtcgcgcactcgcctccgtcgccagcacgtgctctcaactccacgcgctctcagaccacgagcctctctgggagaacatttgccactccacgtggccctccacgaactcgccacgcgtccgccacgtcatatccacgttcccatgcgcgtctcgctcctttttctccgactcgtttccttccttcgccgcgcgcgaaggttcgaacatcgatc

SEQ ID NO: 42487 - DNA, 345 bp, Glycine max
  unsure at all n locations
  Clone ID: LIB3139-046-P1-N1-D5
ctgttgaggttgtcattgggagcactgaacctaaactattcaagttgtgaaagcacatcacaagaaaattcgcaagcgatggatccgaagctaaaagaggtttctcagctcttcgatcgctttaaggcttcgtttatcaggaacgactttgatacctgttccaatctcctttctcagctaaaggtgttacttacaggtttcagaagccttccaccgttgtttgcagatacacctaatgcagttcatgaattaacaatagcaagggatatatacgagcatgctgttgtccttagtgtgaaaaatgaggatcaagatgctnttgaaagggatttcttccagttgaag

SEQ ID NO: 42488 - DNA, 353 bp, Glycine max
  Clone ID: LIB3139-046-P1-N1-D6
aaacaactcttatttcattgcacagtgttattttgagtgtgagcatcatgggtccaattgcagcgggagatgtcattccagacggcattttggcttacttggatgaagaaaacaaaccccaaactgtctctattcactctctcgccgccggcaagaaagtcatcatctttggggttcccggtgccttcactcctacatgcagcttgaagcacgtgcctggcttcattgagagagcagaagagctgaaaggaaagggtgtggacgaaataatctgtatcagcgtgaatgatccctttgtgatgaactcatgggccaaaacgttcccagagaacaagcatgttaagttccttgct

SEQ ID NO: 42489 - DNA, 349 bp, Glycine max
  Clone ID: LIB3139-046-P1-N1-D7
ctctctgttctcttctacctctcaagtttttgaagtatagagatggcagagacattcctatttacctcagagtcagtgaacgagggacaccctgacaagctctgtgaccaaatctctgatgctgtcctcgacgcttgcctcgaacaggacccagacagcaaggttgcctgcgaaacatgcaccaaaaccaacttggtcatggtcttcggagaaatcacgaccaaggccaatgttgacttacgagaagatagtgcgtgacacctgcaggaacatcggctttgtctcaaacgatgtgggactggatgccgacaactgcaaggtccttgtcaacattgagcagcagagccct

SEQ ID NO: 42490 - DNA, 275 bp, Glycine max
  Clone ID: LIB3139-046-P1-N1-D8
gtaagtgtacaaaatcagaaccacattcctgggaattaatcttcccaatagaggtatgtggtcctaataatggttttgaaatgtggagttctgagtgggcaaatcaaacttcatggcatttgagtttccttattgacaatcccaaacagtctacagtttttgagattcccaagagaatatcaaaaactgtagactgtttgggatattctcttgggaatctctcaagactttgagattgctgggaatactctgatgccagcttttttttgcccaca

SEQ ID NO: 42491 - DNA, 351 bp, Glycine max
  Clone ID: LIB3139-046-P1-N1-D9
ttcagtttcacccctcttttctcatctctaacatcgtagtcctcagaggctagtcttcctattatcacaaacaatgtctgacagtcaagaatctgacaagaacattgagatatggaagatcaagaaattgatcaaggctctggaagctgctcgaggtaatggtaccagcatgatttctctgataatgcctccacgcgatcaaatttcccgggtcactaagatgttgggagatgaatttggaactgcttcaaacatcaaaagtagggtgaaccgacagtctgtgttgggagccattacttctgctcagcagaggttgaaactatataacaaggtccctccaaatggtttggt

SEQ ID NO: 42492 - DNA, 353 bp, Glycine max
  Clone ID: LIB3139-046-P1-N1-E1
tccaccctaagtaaagtaacatggcttcaccaaggtgtccacccagagaaaatactaagccacaagaatttaaactccacacccaagaaagagctgtcaagcgtgcaatgtgtggaagtgaggttgaactagaaaaccttgtaattcaaccaggggaagcactagttgtgaacttcccttttgttttgcaccacatgccagatgagagtgtgagcacagagaaccacagagacaggctattgagattggtcaaaagcttgtcacccaaggttgtgacacttgttgagcaagaatccaacaccaacacttctccctttttccaaaggtttgctgagaccttgagttactacact

SEQ ID NO: 42493 - DNA, 346 bp, Glycine max
  Clone ID: LIB3139-046-P1-N1-E11
agttatttccattgcctctgcctcttgcaacaccaaactgatacacacttaataatattatagtaaaaattagccaccaaagtacactaaccccttttttcatacaactcaatagctggattggagcaaggtgaaagtaaaatcatttgcaaccaatgccgttgaacatatttcaggacaaagatggattgccacggattatattgactgagccaaagggttcatcagctgaggattttgagaaagtttttcatattctggacttcattaataatctatggccatctgaagcagtgagtgctaacatcttattagatcttctgagtacagaatctatgcttaggca

SEQ ID NO: 42494 - DNA, 348 bp, Glycine max
  Clone ID: LIB3139-046-P1-N1-E12
ggaattcaagcagaataagtatttgcctgttgaaaagcagattgtaactgctgatccggacataacttcagttgagctttgtgatgatgacgagtttcttgtaatagcttgtgatggaatatgggattgtatgtctagccaacagcttgtggacttcatacatcaacagttaaagactgagaataaactttctgcggtttgtgagaaagtatttgataggtgcttggcaccagcagctggtggtgagggatgtgataacatgaccatgatcttgattcagttcaaaaaaccttccaacagcccagatgcatcatctgtcacgaaccagcctcaatcgtctgctcaacc

SEQ ID NO: 42495 - DNA, 352 bp, Glycine max
  Clone ID: LIB3139-046-P1-N1-E2
acaatttgtttgtggaaaaaccttcaaatatgatataattggtgctggttcacattcttcaggagattttcctgaaaaggaagatcaagaaaaacccaaaaagattgataccagattgagacaaagaatagatcctcaatacaatgaggttcaggctcagatggaaacaaatttgtttaaattgtctcttgatgatgttgaaactcctaaaggttctatgttggatcttaaaatttctcaatctaaaattgcacttcccaagaacacagttggaggaaccattctgcgtagtgatctattggcaaattttttgacagagggcaattttagagcaagtgttgatttgcagcgc

SEQ ID NO: 42496 - DNA, 349 bp, Glycine max
  Clone ID: LIB3139-046-P1-N1-E3
cagaacttgacttgagcgaatgtcccataacaaaactcccaccttcatttcgaaatcttactcggcttcaagagttggagttggatcatggacccgaaagtgctgatcagttaatggactttgatgctgccaccctcatttcgaacatctgcatgatgccagaactatatgatattagtgctcgccgtttgcaatggaggctattgccagacgatgctttgaaattgacctcagtcgtgtgttcaagcgttcattctctcactttggaactgtcagatgagcttcttccgctatttctctcatggtttgtaaatgtggagaatttacggctagaagggagtaaatgcac

SEQ ID NO: 42497 - DNA, 229 bp, Glycine max
  Clone ID: LIB3139-046-P1-N1-E5
tacatttttttttgcgcaccacaccatgccaaccggaagccatttcctgacattcacattcttccttctcctctcttgccattgccacctcctcaatggccaagaggacacctcatttggccgtgccatagacagaaaattgttaggcctaaagagaaaagaaaagctcagccacttcaaattttattggcatgacatagtgagtggccgcaaccccacttcggtggcg

SEQ ID NO: 42498 - DNA, 351 bp, Glycine max
  Clone ID: LIB3139-046-P1-N1-E6
ggttcattatttgagactcagattactccaacccatggatctgatgaagaggcaaaccgtttcgccatgcaactagccagtgcctcagtactccctatggttctcaaatcagctcttgagcttgatctgttggaaatcatagccaaggctggccctggtgttcacctttccccctccgacattgcttctcggctcccaacacacaaccctgatgcacccgttatgttggaccgtatattgcgcctcttggcttgctacaatatcctctctttttctcttcgcactctccctcatggcaaggttgagaggctctatggtctcgcccctgttgctaagtacttggtcaggaac

SEQ ID NO: 42499 - DNA, 353 bp, Glycine max
  Clone ID: LIB3139-046-P1-N1-E7
ctttttaacaaaaagaagagcctcctgttgtgtctgtttctatccgtagacgtaggctcctccgacgtggccaccggacccgcccacaacattacccgtatgctggccgcacaccccggctggtacaccttcaaccactacctctgcgccacccacctggccgaagtgatcaacctccgtcagaccatcaccggcctgaccctctacaatgccatcatgtacttcctgctcgacaagcacctctccctccccaccatcaaaaacgttctctaccttcacatcctcgtcgactacttcggcgccaaaaagctccaccagatcaacaacagcaccaccctcgtctccttcatgtt

SEQ ID NO: 42500 - DNA, 349 bp, Glycine max
  Clone ID: LIB3139-046-P1-N1-E8
ctgaatcttatgcgggagataaaaatatcataaaatttgatggtgatcacaactcctctcgaccacagttcttttataattcaatttccattttcttctacaatgtcctccaccctcctcacactcctagagtttgtaagcttgagaaatattttgattttggggatttgaagactggttctgctgtgaatgagagtctattatatgggatactctctagtctacagtcagcaactactgatgctgcgagttcatcttctgctcctccaaacacttcaaattcaatcacagcatcagttagtgaacttatttcaaaagttgctccagtaatcgccgctgagtccatgat

SEQ ID NO: 42501 - DNA, 349 bp, Glycine max
  unsure at all n locations
  Clone ID: LIB3139-046-P1-N1-E9
tctcttttttgtgcagaggggtattaatcttgtcagtgaccctgcttataggcctggatactacagngacataattcaacatgataccggtgatgtctataatggacactactaccataaccattatgatactgaaagtaaccaaatacaaaatgatgagatcattgcacgggctcttcaagaagaattttcccggctagatattgctgagtgttcaggatattcacagacagatgaagaacagttccatgcttctgagcctacatatgattggaataatacatcgatgatgaactattgttcaagtcatgattatgcttacaacggagttggtgacatagaaccttct

SEQ ID NO: 42502 - DNA, 354 bp, Glycine max
  Clone ID: LIB3139-046-P1-N1-F1
cacgatgtcatcgttaaggacgagaagacccttctgttcggtgacaagccagtcactatttttggacacagaaaccctgaagagatcccatgggggtcaactggagctgacatcattgttgagtccaccggagttttcaccgataaggacaaggccgccgcacatttgaagggtggtgcaaagaaggttattatttctgcccccagtaaggatgcccccatgtttgttgttggtgtcaacgagcacgagtacaagccagagcttgatattatttccaatgctagctgcacaaccaactgccttgccccacttgccaaggttatcaatgacaggtttggcattgttgagggtttg

SEQ ID NO: 42503 - DNA, 81 bp, Glycine max
  Clone ID: LIB3139-046-P1-N1-F10
gccatctcaattggcactgttggtttggaaaggggtgttggttgattaccaccccattcactaactgatcccgctgtcatg

SEQ ID NO: 42504 - DNA, 265 bp, Glycine max
  Clone ID: LIB3139-046-P1-N1-F11
aaataattaaaaaaaaaaaaaaaaaaaaaaaagggggaaaaaaaaaaaaaaaaaaggggaaaaaaaaaaaaaaaaaaaaaaaaaaaaaaaaaaaaaaaaaaaaaaaaaaaaaaaaaaaaaaaaaaaaaaaaaaaaaaaaaaaaaaaaaaaaaaaaggggggcgcccacccaaaaagcgtcccacccccggagaaaattttacatccttgtcctacataaaaaccatattacccaataggtggaaaaaaaaaacataccacaaaaa

SEQ ID NO: 42505 - DNA, 198 bp, Glycine max
  Clone ID: LIB3139-046-P1-N1-F12
ctctggtttcaagaacgagtgcaatgcgaagtgatagatattggtggaggttactccatcatctcattttaccatacatgccccccttatgactacccgctctgacagaatgccagaatcaactcgaccagaaggactaccaattctctgctcctgccctattggtgcccccttgggtactctatttcctttacatag

SEQ ID NO: 42506 - DNA, 351 bp, Glycine max
  Clone ID: LIB3139-046-P1-N1-F3
ctcgagttgattcggctcgagcgcgctgcttcactattctccctatggagtttaatcttgtggtccgtcaaaagtttttaaattttgtgaggttcattatgaagaaaagggacaagcttagttgtcaagttggaatcaacccatactccatggaatggactggtttggccaatagattactgagtaagggcaatgatattctgtgttgcgattatgctagttttgatggtttgattaccaagcaagttatgagcaagatggcagaaatgataaacagtctttgtggtggtgatgaaaaattgatgcgtgaaaggacgcacctgctgttggcttgttgttcaaggatggcaa

SEQ ID NO: 42507 - DNA, 360 bp, Glycine max
  Clone ID: LIB3139-046-P1-N1-F5
gttggggctgtttttctttctctccaccctaccaggaccgagggagccgatcctaaccccgggaggctccgccgcgcaaccacctccctaatttccggcgcctcccgccgccgcctttccaccgacgtgccggcgacgccggcggcggattccgtcttcgcggaggcgtggaagaaagtgagccccaacatcgacccgccgaagacgccgctggcgtacatgaagccccgaccacccactccttcgactctcccctccaaactcaccgtcaacttcgtcttgccctacgcttctcaattggccgcaaaagagggtgatatggtcattgtaccagcaacaactgggcagatgggtgttctc

SEQ ID NO: 42508 - DNA, 352 bp, Glycine max
  Clone ID: LIB3139-046-P1-N1-F6
agagggtttttttagctataacttatagtgctgagaggagagtagaacgaagttcgcatctttggctactgacttgttgaatgttgggcagactaacatagcatgtaaatgaatagatgacaaaagaatgcagtttcttgtaaggatattatgctatcacactatcttacgcttaggacaatattctgcagatgaaactctaaatattcttatcttcagatgatattgtgctatgacttgttggatttcttgtgaagacgatactggaaatctttttcagatggattcaatagcaaattttggcgggttgcatatgaagctcatgaacgctgttagaaaatcatcttctact

SEQ ID NO: 42509 - DNA, 340 bp, Glycine max
  Clone ID: LIB3139-046-P1-N1-F7
ctttagtctaatcggctcgagtctctctgtgggtgggcctacctgtgcgttgaagatgcagatcttcgccaagaccctcaccggcaagaccatcacccttgaggtggaaagctctgacaccatcgacaacgtcaaggccaagatccaggacaaggaaggaatccccccggaccagcaacgtctcattttcgccggaaagcaacttgaggacggccgtacccttgctgactacaacattcagaaggagagtactcttcacctcgtcctccgtcttcgtggtggcatgcagaactttgttaagacactcaccggcaagaccataaccctagaggttggaagc

SEQ ID NO: 42510 - DNA, 241 bp, Glycine max
  Clone ID: LIB3139-046-P1-N1-F8
atggcaacagtgagaacaccattgaattttgtatgggtgtgttccaatctgcaggtttctccactaaaattcctccaccgagaaggtcaatagaaaattgacaaaagctctgcttgctagaatcaaaattcaatggtgttctcactgttgccatctgaggtccgacagtgagctctggtttgcgctcatgcatttgtccttacaatattattacttcataattatttttttttccccattt

SEQ ID NO: 42511 - DNA, 309 bp, Glycine max
  Clone ID: LIB3139-046-P1-N1-F9
ggaacattcaacaacaatggctgtgtgctgttttctcatcaggaacagagagggattccgggtgctgaatttcgcagaggatgttcaaacttaactcactcaatcagaccttgtctaattctcaactctgctctgcttttctccaacaaaaaggcaaagataccagatattgagaaggcttagatgtgtgctacattgcaagcaaagagggtactgggagaagtggggatatgctggatattctatagtcttacacagcatgacacaacaaccaaccttttccattgcgaaggccttactgtgatttga

SEQ ID NO: 42512 - DNA, 354 bp, Glycine max
  Clone ID: LIB3139-046-P1-N1-G1
attgcaataggctccttatttagtgtccgaaaatctctcccttagtcataccaacaaagcaacaagcactacaaattcgctgtctcagtcccttcgttgccaactattttgcgtaggattttccttcttcacaacctcgtaataaattcgttaagttcctccttgtttggtcccaaaaatctgagaaccctctttcaatttctcttcctcaactccatcattcatcactgtccattattattgttattattaacaatggatcctatggagcttaagcgtgttttccaaatgttcgaccgaaacggtgacgggagaatctcattgaaggagttgagtgattcattggagaatctg

SEQ ID NO: 42513 - DNA, 145 bp, Glycine max
  Clone ID: LIB3139-046-P1-N1-G10
cggggggacgaagctcgaattctctttattgaagtttaatttccaacaaaacaacaaaccacgcgcggggtcctttggactgtagccggcccacctcatttcaacactcttttctaccacaggatactttacaacatacaaaaac

SEQ ID NO: 42514 - DNA, 187 bp, Glycine max
  Clone ID: LIB3139-046-P1-N1-G11
aaaatagttgaaagaaccctgctcttgttgtcacggcttctcaaattcgtacaaaattggtacacgagttcacccgtccccctcatgtttctcacacgagtaaattctcagtttagttcgtgatattgcaagtgtttgtcactttagttattaaattaataaaatctttactttagtctctaccttt

SEQ ID NO: 42515 - DNA, 351 bp, Glycine max
  Clone ID: LIB3139-046-P1-N1-G12
cacacaccacctcgcactcgcagggacagagagtggggaaggaaaaacacagactaaatggcgccaaatgctctctttctcttctctttcctcgccatgctcctccttctgctccgctcaaccgccgccggccacaactaccgcgacgccctccgcaaaagcattctcttcttcgaaggccagcgctccggcaaactccccgccgaccagcgcctccgctggcgccacgactctgcattgcacgacggcgccaccgccggagtggacttgagtggagggtactacgacgccggggataacataaagttcggggttccgatggcgttcacgacgacgatgctgtcgtggagc

SEQ ID NO: 42516 - DNA, 352 bp, Glycine max
  Clone ID: LIB3139-046-P1-N1-G2
ttgagtttcaaggtgtcaaaaagaaattcactatgcttcagacttggcctgtacgtacacccaggcctgttgcatcaaaacttgcagctgatactcctcttcttactggtcagcgtgttcttgatgcccttttcccctcagttcttggcgggacttgtgccattcctggtgcttttggttgtggtaaaacagtcattagtcaggctctttctaagtattccaattctgatgctgttgtatatgtcggctgtggggaacgtggaaacgaaatggcagaggttctaatggactttccccaacttacaatgacattacctgatggtcgtgaagaatctgtcatgaagcgcacaac

SEQ ID NO: 42517 - DNA, 337 bp, Glycine max
  Clone ID: LIB3139-046-P1-N1-G4
gtgttgtttgttatgcctatgaagcaacaaaggatgcacatggcctttgcattctaaccgagtgggatgagttcaagactctcgactaccagaggatatttgacaacatgcaaaaaccagcatttgtttttgatggcagaaacattgtggatgctgataagttgcgtgagattggcttcatagtttactcaattggtaagccactggatccatggctcaaagacatgcctgctttggcgtaaaatagatcattgatcaagtacactgcaataccagtcaaatgttgaggcagtcagcctaattctttattattttttgtaagagtttgtcttttcct

SEQ ID NO: 42518 - DNA, 351 bp, Glycine max
  Clone ID: LIB3139-046-P1-N1-G5
tgaaattttgataaaccgcgatcacaggttgccgcaccttaaaaccggaaacaaaagcaatcgttacttgatttcaagaatctctcaatttcttcctacttctttgtgtacgatttcttaagggaaagaaaatcactctctgtgctggccacagacttcgtgaatcattttcttttccactcttagtttatttgctgaacactctcctatttgatataggacttcgtgtcagatttaaacttcttctgtctctttctcagttctctgttcaatttcaagttcaagctggtgaaatcttggattagtgctcccactctcctatctggtataggacttcgtgggtagactttt

SEQ ID NO: 42519 - DNA, 351 bp, Glycine max
  Clone ID: LIB3139-046-P1-N1-G6
tgagaactccattgaattttgattctagcaagcagagcttttgtcaattttctattgaccttctcggtggaggaattttagtggacaaaactggagattggatcacacttatacaaaattctccaattagtaacttgttgagagttgctgcttggaagaaaggttgtttaatggtcaagattgtgatgtctgggaatgcagcagtcaaaaggagtgattgggcctcattggtacaagtgtttttaacaaacagcaacagtacagagcattttgatgcatgtaagtggacaaaatcagaaccacattcctgggaattaatcttcccaatagaggtatgtggtcctaataatg

SEQ ID NO: 42520 - DNA, 341 bp, Glycine max
  Clone ID: LIB3139-046-P1-N1-G7
attgaattttgattctagcaagcagagcttttgtcaattttctatcgaccttctcggtggaggaattttagtggacaaaactggagattggatcacacttatacaaaattctccaattagtaacttgttgagagttgctgcttggaagaaaggctgtttaatggtcaagattgtgatgtctgggaatgcagcagtcaaaaggagtgattgggcctcattggtacaagtgtttttaacaaacagcaacagtacagagcattttgatgcatgtaagtggacaaaatcagaaccacattcctgggaattgatctttccaatagaggtatgtggtcctaataatg

SEQ ID NO: 42521 - DNA, 346 bp, Glycine max
  Clone ID: LIB3139-046-P1-N1-G8
caagtattttggcttttatactcttgccattgctcggtatctcaccctgtctcactagctcgcatcctctcatagtctctttgcgccctctctcgctcgtgtcgccgacgaaggtgtccaacgccgctgttgaaggtgatcactgccgccgtcgaaggtgtccagggcagccgttgaagcttccttccggagaagaaggttattggttacatatgggtgacgattctcgcaccattgagaacacgagggaacacgacgagaccgtttgcaagcccgacgatgatgaggaaccaggctataacgcttcaggttttgctgccgcctctacaccaggagaagcgaagct

SEQ ID NO: 42522 - DNA, 353 bp, Glycine max
  Clone ID: LIB3139-046-P1-N1-H1
gttggaatcaacccatactccatggaatggactggtttggccaatagattactgagtaagggcaatgatattctgtgttgcgattatgctagttttgatggtttgattaccaagcaagttatgagcaagatggcagaaatgataaacagtctttgtggtggtgatgaaaaattgatgcgtgaaaggacgcacctgctgttggcttgttgttcaaggatggcaatttgtaagaaagatgtttggagagttgaatgtggaatcccttctggatttccgctcacagttatttgcaatagcatttttaatgagatgctcattagatatagctatgaaaaattactgcgccaggctaa

SEQ ID NO: 42523 - DNA, 350 bp, Glycine max
  Clone ID: LIB3139-046-P1-N1-H10
cttcttctcttgcggctagggttttagcgcagcttgttctagatttaaggaagatgggtaaggaaaaggttcacatcagtattgtggtcattggccatgtcgactctgggaaatccactaccactggtcacctgatttacaagcttggaggcattgacaagcgtgttattgagaggtttgagaaggaagctgctgagatgaacaagaggtctttcaagtatgcctgggtgctggacaaacttaaggctgagcgtgaaagaggaatcaccattgatattgctttgtggaagtttgaaacaacaaagtattattgcacagttattgatgcgcctggacatagggatttcatt

SEQ ID NO: 42524 - DNA, 349 bp, Glycine max
  Clone ID: LIB3139-046-P1-N1-H11
atttactggtttggccaatagattactgagtaagggcaacgatattctgtgttgcgattatgctagttttgatggtttgattaccaagcaagttatgagcaagatggcagaaatgataaacagtctttgtggtggtgatggaaaattgatgcgtgaaaggacacacctgctgttggcttgttgttcaaggatggcaatttgtaagaaagatatttggagagttgaatgtggaatcccttctggatttccgctcacagttatttgcaatagcatttttaatgagatgctcattagatatagctatgaaaaattactgcgccaggctaaagctccaagtatgtttttacaa

SEQ ID NO: 42525 - DNA, 342 bp, Glycine max
  Clone ID: LIB3139-046-P1-N1-H12
ttgttcttttagggggcgcgccagttctgatattggcaccatctgctctcaagactgtgaattatggaatcctgcttgcacaaaagcaatgactatgtcatttaatccaaacccgtgttctgatgcatggagtttggaatttctgaagcgtaccggatttcattgtgatatcatttgtgtcactggatggactgccaccccaatgcaggatgttcaggttacaattgattggtttatttcctctcaggaatgtgttcccaggacctattgtgttttaaatccacaaaatccttttgtgttaaataggtggatgggaaaactgactttccctcagggcacttt

SEQ ID NO: 42526 - DNA, 352 bp, Glycine max
  Clone ID: LIB3139-046-P1-N1-H2
tgagaaactgatgcgtgagagaacgcatcttctgttagcttgttgctccaggatggcaatctgcaaaaaagatgtttggagggttgagtgtggtatcccttctggatttccactcactgttatctgcaatagcattttcaatgagatgcttatcagatatagttatgaaaagttgttgcgtcaagctaaggctcctagtatgtttctccagtcttttaaaaattttatttctttgtgtgtttatggagatgataatttaattagtgttcatgagtatgttaagccatattttagtggttctaaattgaaaagtttcctagctagtcataacatcaccattactgatggaatt

SEQ ID NO: 42527 - DNA, 241 bp, Glycine max
  Clone ID: LIB3139-046-P1-N1-H3
ctcccattatgcccctagatgaagaaattctttctaaggttgcacaagatatggttgaggaatggtttgattgtgttgatgaggaggattcctttgaggaagtttctttaagcgcagcactcaatggtgttgagggtttggactatatgtaatgaattcctcttgccacatgtgagggctttcctcatgtgcttttacgtagaaattgcgatataggcaagaggttgatttgtttctgtgt

SEQ ID NO: 42528 - DNA, 331 bp, Glycine max
  Clone ID: LIB3139-046-P1-N1-H4
ctcggcgttcatggcgcgcctaagcatatatgatccacaggtcactgaggaccaaattcagagggatttatggatgaacaagtttgattgggaccaccctattcacttgcagccaactagtcctacaactgagaagaaagtttgtgtggtttgggatgcttatgaggcaacaaaagatgcagatgggggttgcattctaacctggggggacgagttctagaagtttgctcttactatggagtgtgacaacatgtgaaaaccagcatttgcttgtgttggaaggaacattgcggatgggataacataaagttcgggtttccgatggcgttca

SEQ ID NO: 42529 - DNA, 354 bp, Glycine max
  unsure at all n locations
  Clone ID: LIB3139-046-P1-N1-H5
caaaatggcactttcttcttcatcttcaacatccatatttgctttagctttgttcactactcttttgcttataggaagttcttcagctcaactctctgagaacttctatgatagtaaatgtcccaaggttttctatgccgtaaaatccgttcttcaatctgctttggctaaagaacctcgccagggagcatctatcgttcgcctcttctttcatgactgctttgtcaatggttgtgatggatcagtgttacttgatggcccttcctcggagaagattgcacttcccaacaagaactctntgagaggttatgaagtcattgatgccatcaagtctaaggtggaggcactatgccc

SEQ ID NO: 42530 - DNA, 348 bp, Glycine max
  Clone ID: LIB3139-046-P1-N1-H8
aaacactttaccttcttcttaagacaacaagctaaaagcgcttctaacttaagtgatggctaacgctgctgaagtttcagcgttgaaacgcatcaagttgcatcttttgggtgaactctctccactggccactccccaaaacaaatttgaccaaacaaaccctagcccctctgaatcttccaattccgaatcttcttctatttctcttaaccactacttcactgacctcctcgaacccgaaattgaatttcctctcttcgaattcgattccaaaccccaagtaatcgacctcgaaaccccgaaaaccctaatttcagctgagaagaagcctcaatttaatcggaaacc

SEQ ID NO: 42531 - DNA, 377 bp, Glycine max
  Clone ID: LIB3139-047-P1-N1-A1
gaaaatacttgccgtagaagagggctcgctctttcgtgtttttgttcgcgaaggaaactctatccttagctatcgcgatggatcggtaccagaaggtggagaagccaagagctgaaactccaatcgatgaaaacgagatccggattactagtcagggaaggatgcgcaactacattacttatgccatgagcttgcttcaggagaaaggttctaatgaaattgttttcaaagcaatggggagagctatcaacaaaaccgtgacaattgtggagttgatcaagaggagaattgtgggcctccaccagaatacagcaattggatccactgatatcactgatacttgggagcccctagaggaaggcctccttcctttggag

SEQ ID NO: 42532 - DNA, 375 bp, Glycine max
  Clone ID: LIB3139-047-P1-N1-A11
gtccatactactgtggtgttggcgctgacaaggcttttggccgtgacattgttgacgcacactacaaagcctgtatttatgctggcatcaacatcagtggaattaatggagaagtgatgcccggtcagtgggaattccaagttggaccttcagttggaatctcagctggtgatgagatttgggcagctcgttacatcttggagaggatcactgagattgctggtgtggtggtttcctttgaccccaagccaattaagggtgattggaatggtgctggtgctcacacaaactacagcaccaagtccatgagagaagatggtggctatgaagtgatcaaagcagcaattgacaagttggggaagaagcacaaggagc

SEQ ID NO: 42533 - DNA, 376 bp, Glycine max
  Clone ID: LIB3139-047-P1-N1-A12
aagaagattattagaaggtggtaccgccttcaattctctctctccatttctcatcctcatcatcttattatacctcttccatctccataacatccacttgtgaaaaaaacccattaatatatatcacacacacatgtatctctgagctccaatccaatccaagaccacaccttgtcgcgtcggacgaaccttggtgtctgtctttttttttttttttgtttcattagtttctccgaagagatgcggaagggcagaagaagaggagcctcggcggcggcggcggcggcggtgaacggatccgttttaaaggagcctcggtaccggggcgtgcggaagagaccgtgggggagattcgcggcggagatcagagacccgt

SEQ ID NO: 42534 - DNA, 375 bp, Glycine max
  Clone ID: LIB3139-047-P1-N1-A2
atgggttctctctctgctctctaccaacctatccaatatcccactgctcgcagagacgactccgtccttgacgacttccacggcgtcaagattgctgatccttaccgatggctggagaatccggaggcagaggaagtgaaagagttcgtgcagaaacaggttgcgctgacggattcggtgctgcagaggtgcgactgtaggcccaaactggccgagaagataaccaagttgtttgataatcctcgttacaacgctcctttcagacgaggcgataataagtatttttacttccacaacacggggcttcaggcgcagagcgtgctctatgtgcaggacactctggaggctgaggctgaggttttgctcgacccaaat

SEQ ID NO: 42535 - DNA, 370 bp, Glycine max
  Clone ID: LIB3139-047-P1-N1-A3
gcatgttccaaacaaagctttaacatttcagaattttgatgggttgcttgcttttgtttcagagtttcagcggagattgttgattcagtaggaatcggaaatgttgggggatttcatcattcgatgtcttatactgattctggggtatgcgtatcctggatttgaatgctacaaaagtgtggagcaaaacaggggtgacaatggggaacttcgattctggtgtcaatactgggtcattgtagcacttttcacagtactggagaattttaccgatgcagttattggatggtggtttcccttatacggagagttgaagcttgcactctttatctacttgtggtatcccaaaactaaggggacgggatatgta

SEQ ID NO: 42536 - DNA, 337 bp, Glycine max
  Clone ID: LIB3139-047-P1-N1-A4
gccaaatcgagatttagctacttccttgcacagagtcaccggttcagatggtaaattacagaccctggattggatcacgagattgaaaattgcaataggagctgctgaaggcatagcttacctacatgagttcagccctccccttgtccacagagatatccaagctagcagtatactacttgatgataaatttgaagtgcgacttggaagtttgagtgaggttactgcccaaggagatcttcaacaaggagtcatctcaagggttttcagcaagccaccatcttccaatcaagcagattctggtaaatcattagggacatgtgcctatgatatctac

SEQ ID NO: 42537 - DNA, 377 bp, Glycine max
  Clone ID: LIB3139-047-P1-N1-A6
cttccttaccgattgctagaatggaatttcgatgctcagtcatctcttttaccattctcttctctcttgctcttgcaggagagagccatgtccatgcatcgctacctgaggaagattattgggaagctgtttggccaaacactcccattcccactgcactgcgagagcttctaaagcctctccctgcaggtgttgaaatcgatgaactccctaagcaaattgatgatacacagtacccaaaaacattcttctataaagaagaccttcatccaggcaaaacaatgaaagtacaattcaccaagcgtccctatgcacaaccttatggtgtatatacatggttaacggatattaaagacacctctaaagaaggatatagt

SEQ ID NO: 42538 - DNA, 348 bp, Glycine max
  Clone ID: LIB3139-047-P1-N1-A9
aagagaatctctctcacgggtcaaaaccagaaggctgggactggcttctaactactgacactgacatcgatgcatcgcgggtgaaaggaactcgtgctgaacccacacatggaatcatgcactcaggctgtagtcttgctccaggagcaggtcgcgcttctttacatgccacccaagagcactggaaactactgactcaaaaacatctagcatgactgtgctgatcaccaaagtgaagctagactgttgtttgacttcactagaaggagctagcttgattacgaaacagatggaacctatgacttgacataccataggtacatcctgaccatcaaagaatctaaaaga

SEQ ID NO: 42539 - DNA, 377 bp, Glycine max
  Clone ID: LIB3139-047-P1-N1-B1
aaaacccaaaaagattgataccagattgagacaaagaatagatcctcaatacaatgaggttcaggctcagatggaaacaaatttgtttaaattgtctcttgatgatgttgaaactcctaaaggttctatgttggatcttaaaatttctcaatctaaaattgcacttcccaagaacacagttggaggaaccattctgcgtagtgatctattggcaaattttttgacagagggcaattttagagcaagtgttgatttgcagcgcactcatcgtattaaaggaatgattaaaatggtggccacagttggtattcctgagaatacaggtatagcattggcctgtgctatgaatagttcttttagggggcgcgccagttctg

SEQ ID NO: 42540 - DNA, 377 bp, Glycine max
  Clone ID: LIB3139-047-P1-N1-B10
catggtcatagtgtacacctagttaggcaaacacaccaaacaccaaacaccaaactagttggctcaattctctttgaatggctttggaggctttgaattcaccaacagcagccaccactccgttccgtggctaccaagaagaggaggaggacgaggaggctgaccttcacttacgtgagccttgggctaaaaggaaacgctccaaacgaccgcgttttgagacggaggaagagtacctcgctctttgcctcatcatgctcgcacaaagcggtaacaccagaaacatccacaacaacaacacccaattaccgtcttcttcactgtcagacaaagaagcgtcgccgccggtgaaactaacacacaggtgcaccgtttgc

SEQ ID NO: 42541 - DNA, 377 bp, Glycine max
  Clone ID: LIB3139-047-P1-N1-B11
gtcaacaatgtaattccccagcagaaggcacgtgatacttgccagaaggaaggacgatctctcgtgtccattcacgatcaggagaaggaattgttcgtgaatggagttgtctcaatcttcggaaataagaagaagtattggatcggatatcagaacgatggaactcgatggaattgggatgacaagtcgactaatcctttcactgattgggataatgccaatggccagccgaataccaatggaggcaagaatatgtgcgcctatgcactacagggcactggattcaatgtgaagtggacggcagccaattgtgcagcaagaggaataatctacgtgtgcgagtctgcgccatgctcgatcgggaacaagaactgctg

SEQ ID NO: 42542 - DNA, 334 bp, Glycine max
  Clone ID: LIB3139-047-P1-N1-B12
gatgtttatagctttggtgttttgctattggaaggaattactggtagagatccagttgactatggtcgaccagcaaatgaagtgaaccttgttgattggctgaaaatgatggttggaaacaggagatcagaagaagtggtggaccccaacattgaggtgaagccatccaccagagctttaaaacgggctctcttaactgctttaagatgtgtagatccagattctgagaaaaggcccaagatgggccaagttgtacgaatgttggagtcagaggaataccctttaccaagagaggaccgaagacaccgaagaagaaatcgagagggtagtggag

SEQ ID NO: 42543 - DNA, 377 bp, Glycine max
  Clone ID: LIB3139-047-P1-N1-B2
tcaaattttgttcgttcaggtcaaagaaagtgtcactgttgttaccatggccgaggaagttccaaagacaagcacaactccagaggaggtggtggtctctgacgtggcacctgctgacgagaaaccagacaccaccaccgacgttgttgttcccgtagagaaagacgcacaacaagaacaagaaacctcgccagagaaggagaaagagaacgttcccgaaacagctgaaaccgagtccgaggttgtttcaaaaccaagcggtgacgacaacgttcctgaatccggttctttcaaggaggaaagcaccattgtttccgacctacctgaaaccgagaaaaaggctctgcaagaactcaaacaactcattcaagaagcgc

SEQ ID NO: 42544 - DNA, 346 bp, Glycine max
  Clone ID: LIB3139-047-P1-N1-B3
aacaacctcgttgtggttttccaatgctgcgaagtcgaagatctagctagaggcagagaacgttctccctaatcttctgccgatggcgatcttctacgctttggtggccagaggcaccgtcctcctggcggagttcagcgccgtcaccggcaacaccggcgccgtcttccgccgcattctcgagaagcttccggcggagtccgactccaggctctgcttctctcaggatcgctacatcttccacatactccgatcggatggcatcacctacgtctgtatggccaacgacaccttcggaaggagaattcctttctcgtacttggaagatatccaaatgaggtttatg

SEQ ID NO: 42545 - DNA, 373 bp, Glycine max
  Clone ID: LIB3139-047-P1-N1-B4
tctctctctgcaaactccgcgtataccccaagtttctctctctacccttttctttctagtttccacctccgtcgccgcactcactttgatgccaattttctgaacacgcttttgaagagggtaagttcgagcaccggtactgtgctgtgctgcattacttgcatttcctctataatgggttgtttccactctaagtcagcgaggcagtttcctgcacaggagaatactgttaatcttgcggcagagacagcttttactgtcagtgaggttgaagcactgtttgagctttttaggagcatcagcagttctgttgtcgatgacggactgataagcaaggaagaatttcaattggcaatcttcaaaaacaagaaaa

SEQ ID NO: 42546 - DNA, 376 bp, Glycine max
  Clone ID: LIB3139-047-P1-N1-B5
gcaacagtgagaacaccattgaattttgattctagcaagcagagcttttgtcagttttctattgaccttctcggtggaggaatcttagtggacaaaactggagattggatcacacttatacaaaattctccaattagtaacttgttgagagttgctgcttggaagaaaggctgtttaatggtcaagattgtgatgtctgggaatgcagcagtcaaaaggagtgattgggcctcattggtacaagtgtttttaacaaacagcaacagtgcagagcattttgatgcatgtaagtggacaaaatcagaaccacattcctgggaattgatcttcccaatagaggtatgtggtcctaataatggttttgaaatgtggagtt

SEQ ID NO: 42547 - DNA, 273 bp, Glycine max
  Clone ID: LIB3139-047-P1-N1-B6
aaaatttttactgatctggcgctttttccgtttctggtcactggtatgtttcttgctcgttaagcatatggcataaatgtccaagtacatatttgaagaaagtcgttactttgaatcatatgctgtagataaacggaattgaggctccagagaatatgccaaaatgtattaataattgtcacaacttggaaggcttttggaaaaactggcatgcttccttcaacaagtggcttgggaggtatatatacatttctcttgggggatctaagaaaa

SEQ ID NO: 42548 - DNA, 318 bp, Glycine max
  unsure at all n locations
  Clone ID: LIB3139-047-P1-N1-B7
gcacagccccgtgccgtcaactgtcaaccaccctccgtgcaccgcacgcgcaccttgccaccaacatccagcaactcgcaccagaacagcacctcccatcgttgacgcacaaagtagcaggccgtcgcactcgcgccctcccgtccacagtcgcagtcggaccagccaccagtgatgggaaagatgtgcaagaataagaaacaagctggtgggcatggacctncaagagagcaaactgatacacaggaacatgaaatggacataaggggagatatgaaagatgttgaaaattttagctactcacatatgtcatggaaa

SEQ ID NO: 42549 - DNA, 379 bp, Glycine max
  Clone ID: LIB3139-047-P1-N1-B8
cacaaccctcgttgttccgtgttcaggtgaaacgacaccgttttacccttcctcttctcggcacagcatctagcaggttgtagaaaatatggccaagcatcatcctgatttgattatgtgccggaagcagccagggattgccattggacgactgtgcgagaaatgtgacggcaagtgtgtgatctgtgactcttatgtgcgtccttgtacgcttgtccgagtttgtgatgaatgcaactatggatcatttcagggtcgatgtgtcatatgcggaggagttggaatatctgatgcctactactgcaaggaatgcacacagcaagagaaagatagagatggttgccccaaaattgttaatttaaggagtgccaaaactgat

SEQ ID NO: 42550 - DNA, 378 bp, Glycine max
  Clone ID: LIB3139-047-P1-N1-B9
gttagcatattgtgattttctcaagagaaactttaagcagatgtctaatgttttgtgggtggctcctgaggataaggcgagtttatggtcacaacttcattatgtttcgtgtaataatctggaaatgcaagaagcttatcttgtcaatctcgtaaatgtgttacgagaattgtatttgcacagtccagaggaagctcgccaattgagaaggaaagctctctctcgtattgaatggctgcaaaaagctgatgtgcctaccatagcacagattgaagagttccattcgatgcagaggatgatgaatgctcctgattcaaatgataatattgatctactgttgagcattgatttgttgggtttacaaggagcaagtaaagc

SEQ ID NO: 42551 - DNA, 368 bp, Glycine max
  Clone ID: LIB3139-047-P1-N1-C10
gctggtgataatatcaccattactggtgggattgacaaaacttgtgcaactttgcactatagaaagttagcagattgtgattttattaagagaaactttaagcagatgtctaatgtttaatgggtggctactgaggacaaggcgagtttatggtcacaacttcattatgtttcgtgcaataatctggaaatgcaagaagcttatcttgtcaatctcgtaaatgtgttacgagaatctgttttgcacagttcagaagaagctcgccaattgagaaagaaagctctctctcgtattgaatggctgcaaaaagctgatgtgcctaccatagcacagattgaagagttgcattcgatgcagaggatgatgaa

SEQ ID NO: 42552 - DNA, 378 bp, Glycine max
  Clone ID: LIB3139-047-P1-N1-C11
ggtgattttgttcaagggaaagatctcgcaatggttaaagttaatgtagcatgtgctgctgttggcttgacatcaagttacactccaactccattgttggaatctggtttgcaaaaagacagagggttaattgtggagtattttggaaggatgtcttacgttgctcataacgttaatcagccccaagagaaagatttgttagagggaaatttttcctttgatattaaatctcgctctagattggaaaaagtttcctctacaaaagcacaatttgttagtggaaaaaccttcaaatatgatataattggtgctggttcacattcttcaggagattttcctgaaaaggaagatcaagaaaaacccaaaaagattgatacc

SEQ ID NO: 42553 - DNA, 377 bp, Glycine max
  Clone ID: LIB3139-047-P1-N1-C3
gaacaacatcaaaaaaagaaaggagagactttctttctcttttgtagatcgagatcgtagaaattaagaaaggcatgaatagaggtgttttgcaaagctcaccggtgaaacaaatgatggccgggaaccctaacaattggtggaacatcaacaccatgcgccctcctcctcctcctccacaagcttctcctcctttcttctccactccttccaactttctaactccttattatacccccacttcttctcttcctcttccttcttggcatgacaacaatcaagagctacctgagtcatggagccaactactcatgagtgggatggtgtctgaagaagagaaagggggtatgtgccaggttcagtctaagaagttggag

SEQ ID NO: 42554 - DNA, 375 bp, Glycine max
  Clone ID: LIB3139-047-P1-N1-C4
gagcgagactcggtagtaatagtatagtctacaaggtttcgtattctactacttgaaacctaactcttccttcttcttctacattactcctatggctcccgatgcttccgacgcacttgcagtaaggcagaaagttcaattatttctgaacgcggctcgtactggttcaattgatctcttgaagaaattggcgttgcagctggacgagggcaaggatttggcgaaatcggtggaagcaataaaggacgccaacaagagaggagcactgcattttgcccgcgcgagaaggccaaacctctgtttgcgagtccctcttaaccgatttgaagctctctgtcgattctcaagatgatgatggcgagactgcactcattc

SEQ ID NO: 42555 - DNA, 362 bp, Glycine max
  Clone ID: LIB3139-047-P1-N1-C5
ccgtttctttcacttcacaaaaatgaaaaacatgaaattgtgttcggtgatgctatgcttatcactagcgttccttcttggggccacagcagaacaatgtggcacacaagctggtggagcgttatgcccaaatagattatgttgcagcaaatttgggtggtgtggtgacacagattcctactgtggagaaggttgccagagccaatgcaaatctgcaacaccctcaacaccaactccaacaacacctagtagtggtggagatattagcagactcattagctcttctctctttgatcaaatgcttaaataccgaaacgatggccgctgttctggccatggattctacagatatgatgctttca

SEQ ID NO: 42556 - DNA, 342 bp, Glycine max
  Clone ID: LIB3139-047-P1-N1-C7
ccttatgatccaaggctgctgtttacagcttcggatgatggaaacgtccacatgtatgatgctgagggaaaagctttaattgggaccatgtcaggtcatgctagttgggtactgtgtgtggacgtgagcccagatggggcagccattgctacaggttcaagtgatagatctgtaaggctatgggatcttaacatgagggcatctgtgcagacaatgagcaatcattcagaccaggtatggggagtcgcatttagaccacctggagggagtgatgtgcgaggtggtcgacttgccagtgtatcagatgacaagagcatatcactgtatgattattcctgattt

SEQ ID NO: 42557 - DNA, 378 bp, Glycine max
  Clone ID: LIB3139-047-P1-N1-C8
ccatctgctctcaagactgtgaattatggaatcctgcttgcacaaaagcaatgactatgtcatttaatccaaacccgtgttctgatgcatggagtttggaatttctgaagcgtaccggatttcattgtgatatcatttgtgtcactggatggactgccaccccaatgcaggatgttcaggttacaattgattggtttatttcctctcaggaatgtgttcccaggacctattgtgttttaaatccacaaaatccttttgtgttaaataggtggatgggaaaactgactttccctcagggcacttcccgaagtgttaagagaatgcctctttctatagggggaggagctggtgcaaagaatgctattctcatgaatatgc

SEQ ID NO: 42558 - DNA, 368 bp, Glycine max
  Clone ID: LIB3139-047-P1-N1-C9
cagggatacacttccttttggcctttgcattttttagaacaaattctggctactagctttagtagctcgggtagaattgaagaggttaaatttttatgacaatgacaatgtgcaatatatctattatttggtcataatttttaggctatggctcactggtttgggataatattaggcaattcgtgattggctttcatagaatataagactaggtcataccatttttgagcataggtaccatcacaggtgagcttcctcggtttcaagctggagttacaatggaaatatcctgtttggatgcttggtattctgacaaagatggcaccttagagtgccgagcaacatacatcgtgaaaggactttgtcgt

SEQ ID NO: 42559 - DNA, 377 bp, Glycine max
  Clone ID: LIB3139-047-P1-N1-D1
ctttttcttcactcacacacacgtgctccctttctctcccatcaacccaaatcccttttctcgttcttcccaattccaatttccaattctccggccatgtcaaccgcggcagcggcggggggcgacatggaggcgggtttcgcgaagctccagggcgaggactttgagtattacatgcagacctactccatcgtcctcggccgcaactccaagaagtccaccgtggacgtcgacctatccagcctcggtggtggcatgaacatctcccgccaccacgctcgcatcttctatgactttgcccgacgccgcttcgccctcgaggtcctcggcaagaatggctgcctcgtcgagggcgtacttcaccttcccggcaaccc

SEQ ID NO: 42560 - DNA, 365 bp, Glycine max
  Clone ID: LIB3139-047-P1-N1-D10
actctattgaggttgaacgtgttaaatgtttactggaactgttcaggaaatgttacttgaatcctttcccttttcttgtccatcttggtggcatgctaggagttgttaatgctgttggagcaggtgcaggaattttggtcaacatgaattttccaaattactctaggcaatctggctatcagaaggagtcttcttctgtcatgggccctctcctctcaagttctgattttgaaccatacttgacatcattggtgcaagagatgtttcttgtggcacagaattcggataatcatcagctacaacagtttgcttcctgggtacttgccttccttcgacatcatttatggtccaaggaacttttgggg

SEQ ID NO: 42561 - DNA, 376 bp, Glycine max
  Clone ID: LIB3139-047-P1-N1-D11
gagaaaagtaagatgccaagcaaaggtgattggaactattgtaacagttgctggggccatgttgatgacattgtataaagggcaagtaatcagtttcttggggtctaagtacatgcatcaccccagaaactatgtacctgaaaacaccactgattctggtgaaaaggattggtttaagggctctattcttctaatactagccaccctttcatgggcttctttcttcatccttcaggcagtgacattaaggaaataccctgctcagctctccctcacagcacttgtgtgtgccttgggtacactgcagtcaattgcagttacctttgtcatggagcacaaaccctctgtttggaccattggctgggacatgaacctt

SEQ ID NO: 42562 - DNA, 369 bp, Glycine max
  Clone ID: LIB3139-047-P1-N1-D2
cttttgctttgcttagattctgttctgcagagagagagagagagagtttcagaatttagagagagaattttattttgttttttcggttatctttattggtttctcttacatcgtttttgtaggcgctgaggaagaagctttggcagcataactttgttggggagcataaaattcaggcaagcccttgaagttggagagtattagatgggaatcttagaattttctctttagaccaaagaaatggaggtatatggaaattctatggttgcagctccttcaaatgttatttatctgtccagtattttgggccaaggcggtccaattcccggtcacagatgcaactggaaatgtgaaaatgaacatgtttgt

SEQ ID NO: 42563 - DNA, 373 bp, Glycine max
  Clone ID: LIB3139-047-P1-N1-D3
ggagctggtgcaaagaatgctattctcatgaatatgccaaatgctgttctttcaatgtggagatattttgttggagatctcgtctttgaagtttctaagatgacttctccctacattaaatgtacagtctctttcttcatagcatttggaaatttggctgatgacaccatcaattttgaggcttttccccacaagctggtgcagtttggagagattcaggaaaaagttgtgttgaaattttcacaagaggaatttcttacagcttggtcaactcaggtgcgtcccgcaacgactctgttggctgatgggtgcccatatttgtatgctatggtgcatgatagttcagtgtctacaataccaggtgattttgtca

SEQ ID NO: 42564 - DNA, 372 bp, Glycine max
  unsure at all n locations
  Clone ID: LIB3139-047-P1-N1-D4
ctttctttaaatcccaatattttctgcgcgaattttgctagaaaccgttagtgggtatcctcaaaatactagattttcgattcgtttggtgaacggatttttaggtgtgattattacgttttttttttgttcaacaagctatggaggtttcggtgattggaagctcacaagcgaagctgggcgcgtctgaattggcttctagggaagttggattttgtaatctgaagaacaatttaagggttttgaatgatagagttagttttggtaggaataatatacggtgggagaaggctgggattagtttcactttgagggctcttcagactgaacctgttagagaggagaagaagccttttgngattggaacaagat

SEQ ID NO: 42565 - DNA, 367 bp, Glycine max
  Clone ID: LIB3139-047-P1-N1-D5
atctgaccacatgaacgaggcagtgaattacataaagcacatgcagaaacatatcaaagagcttggtgccaagagagatgaactgaagaaactctccaatcattccaataatatggaaaataaccatgagggcttgcatacatcttgcaacttcactgtccacgagaaaaatggtattatgggaatagaaatcaccagtgtcttcagagaggaaaagcctaaaatttcaaagttactacagtttttgactgaagaaggacttgaagttgttagtttcttttcaacagaagtcaatggcagattgctccacagtgtgcagtgtgaggtgaaccattccaacagtgtagatccatctgagctgagaaag

SEQ ID NO: 42566 - DNA, 363 bp, Glycine max
  Clone ID: LIB3139-047-P1-N1-D6
tgaatactaggcgagtttatggtcacaacttcattatgtttcgtgtaataatctggaaatgcaagaagcttatcttgtcaatctcgtaaatgtgttacgagaactgtatttgcacagtccagaggaagctcgccaattgagaaggaaagctctctctcgtattgaatggctgcaaaaagctgatgtgcctaccatagcacagattgaagagttccattcgatgcagaggatgatgaatgctcctgattcaaatgataatattgatctactgttgagcattgatttgttgggtttacaaggagcatgcaaagcttttccaaacaagattgttattgatgataagcttgtgttggctaacacaca

SEQ ID NO: 42567 - DNA, 380 bp, Glycine max
  Clone ID: LIB3139-047-P1-N1-D7
gtttgttatagagagagaaagcgcgctgctgcttcttctgctgctgcttcgacagtgagaagagagagagaagcgctcttctccgtaccgtttctagagagagaaactgatggccggagttaatccgaacggcgtcgccgattttccggcgactccaacgcacggcggacagttcattcagtacaacatattcggaaacctcttcgaggttacggcgaagtaccgtcctccgatcatgcctgtcggacgcggcgcgtatggaatcgtttgctcgctgttaataccgagacgaatgagctggtggcggttaagaagatagcgaacgctttcgacaatcacatggacgctaagcgtacgcttcgtgagattaagcttcttag

SEQ ID NO: 42568 - DNA, 379 bp, Glycine max
  Clone ID: LIB3139-047-P1-N1-D8
atttgacacctaccccacaccatcatggcctgcatcgacaaattttgggttttcgccctcgctcttctcctcctcgcttcccctctcctccaagttgctaggtgccagtcagactctgatgatgtagtggaggctgctgaagaatcaggtgatattggcattgttggtgatgatgtccaagactttggtgatgggactttcccttctgctccaggaattgaaacaataagtgtatttccgaaaaatagtgcaagattgataacagctggagaagagtcagagctgcttgttggtgttaaaaatgatggggattcaagcttgaatgttattgcgatcaaggctagtgttcaccttccttttgatcaccgtatgctggttc

SEQ ID NO: 42569 - DNA, 376 bp, Glycine max
  Clone ID: LIB3139-047-P1-N1-E1
cactcactcgcaagcaaaaagaaagaatcccaggcgaggagaaagatggaggggaaggagcaggatgtgtcgttgggagcgaacaagttccccgagagacagccgattgggacggcggcgcagagccaagacgacggcaaggactaccaggagccggcgccggcgccgctggttgacccgacggagtttacgtcatggtcgttttacagagcagggatagcagagtttgtggccacttttctgtttctctacatcaccgtcttaaccgttatgggagtcgccggggctaagtctaagtgtagtaccgttgggattcaaggaatcgcttgggccttcggtggcatgatcttcgccctcgtttactgcaccgctggca

SEQ ID NO: 42570 - DNA, 375 bp, Glycine max
  Clone ID: LIB3139-047-P1-N1-E10
gcttgtctgttaaggaaacagatagaagctttgggttgagaaatttcaggtacattgagaccatcaaagaagctttggaaagggaatgcccaggagttgtttcctgtgctgatatcctcgttctctctgccagagatggcattgtttcgctaggaggtccccatatccctcttaaaacaggaagaagggatggtagaaggagcagagccgatgtggtagagcagttcctcccagaccacaatgaatccatttctgcagttcttgacaagttcggtgccatgggaattgacacccccggcgtagttgcattgcttggagcacacagtgttggtcgaacccattgtgtgaagttggtgcaccgtttgtacccagaga

SEQ ID NO: 42571 - DNA, 374 bp, Glycine max
  unsure at all n locations
  Clone ID: LIB3139-047-P1-N1-E11
cggagagagagagagaggttttgacgcaacacactttcactgagaaaggatctctatctaccaaggagcagaataaaacccttctctctggtaagtgaataagagaatggcttcagatcggaaacttcacactttcgaggaggtggcaaagcacgaccagaccaaggattgctggctcatcatttctggcaaggtgtatgatgtcacccctttcatggaggatcatcccggaggtgatgaggttttgttatctgcaacagggaaagatgcaaccaatgantttgaagatgttggacacagtgattctgctagagatatgatggaaaaatactacattggtgagattgattcatcaactgtaccactaaaacgta

SEQ ID NO: 42572 - DNA, 367 bp, Glycine max
  unsure at all n locations
  Clone ID: LIB3139-047-P1-N1-E12
atccatctttgccttctgcatgttggttctctgtaaacagatactgcaaaagaagaataatattgaatatttggttgggttgaatccctgggttgaagcgttgcagacatcacggctattctaagagtgtctcgctctctcattcatgtcccaactgtacgacggaggacaggttgcgtaactgccaccaacccttcgccgcacggtgggcgtggtgctttgccttctgaaggtggtagcccttcagacttgctcttcttagctggtggtggttctgctgtcttctagcttcttcttaactctnttttctttttactacttttaagctaccttgttttcaaaataacaaaaacaaacactttcttac

SEQ ID NO: 42573 - DNA, 377 bp, Glycine max
  Clone ID: LIB3139-047-P1-N1-E2
ctgtaagtctataatactcgtccatagtaattctatctggctcgagcaggattacctcctgtgataaatacctgtgccggttaagtcagagttgtggtgatcagtgatcgagccacagcaagagccatgtacaagggaagattaggaggcaaggctcagcttggatatgttgaaactgaccctttgggtcgatatggacgtttcagggacattctaagcaaaggagcagtgaaggtagtgtatagggcctttgatgaggtcctaggaatagaggtggcttggaaccaagtcaagcttggtgatgtgtttcattcaccagatctacttccgaggctttattcagagggtcatcttcttaagaacttggaacatgactt

SEQ ID NO: 42574 - DNA, 363 bp, Glycine max
  Clone ID: LIB3139-047-P1-N1-E3
gtggctctggttcggtccaaaatatcatgttctcgaacgttcaagtttctggggttcaaactccaatttccattgaccaatactattgtgacggtggaaggtgcaggaatgaatcatcagctgtggcagtttcaggcatacattatgtgaatgtaaagggaacatacactaaggagcctatctattttgcatgtagtgacaacttaccttgcagtggcataacccttgataccatacaactggaatcagcccaagaaactaaaaattccaatgttccattttgttgggaagcatatggggagttgaagaccacaacggtcccttctgttgaatgtcttcagagaggaaacccatcaaaagaag

SEQ ID NO: 42575 - DNA, 374 bp, Glycine max
  Clone ID: LIB3139-047-P1-N1-E4
ttaaatctcgctctagattggaaaaagtttcctctacaaaagcacaatttgttagtggaaaaaccttcaaatatgatataattggtgctggttcacattcttcaggagattttcctgaaaaggaagatcaagaaaaacccaaaaagattgataccagattgagacaaagaatagatcctcaatacaatgaggttcaggctcagatggaaacaaatttgtttaaattgtctcttgatgatgttgaaactcctaaaggttctatgttggatcttaaaatttctcaatctaaaattgcacttcccaagaacacagttggaggaaccattctgcgtagtgatctattggcaaattttttgacagagggcaattttaga

SEQ ID NO: 42576 - DNA, 373 bp, Glycine max
  Clone ID: LIB3139-047-P1-N1-E5
aaagctttgaagatgtgcgtagtctctatgagggtggaattaaattgccaacagatatactgagccaaattagccccttaccagccctcaaggaaatcttccgcactgatggtgaaaatgttcttcaatttccaccacctcatgtagccaaagttagtaagtctgggtggatgactgatgaggaatttgctagagaggtgattgccggtgtaaacccaaatgtgatccgtcgccttcaagaattcccaccaaagagcacacttgatcccacactctatggtgatcaaaccagtaccataacaaaagaacaattggagattaacatgggaggggtcacagtagaagaggcacttagtactcagagattattcat

SEQ ID NO: 42577 - DNA, 290 bp, Glycine max
  Clone ID: LIB3139-047-P1-N1-E6
ctggaagctccagggatgaaggatgggcagcattcaggaacgttttggcagagatcaatgaagcctcaaggcttttcattctgcccaatcagcaaaattctgaatcctcagagcgtcttgttggactttcggatgatgttggtgctggcttcatatctggtcatagtactcaacctgccacttcttctgagttgaatgtggacaggtctgttgatttgccgcctcaggatgaaattgggaacttgggggtctcaaaagtaatcagggctgatcagaaaagattcttcttt

SEQ ID NO: 42578 - DNA, 376 bp, Glycine max
  unsure at all n locations
  Clone ID: LIB3139-047-P1-N1-F1
gaaattttaataaaccgcgatcacaggttgccgcaccttaaaaccggaaacaaaagcaatcgttacttgatttcaagaatttctcaatttcttcctacttctttgtgtacgatttcttaagggaaagaaaatcactctctgtgctggtcacagacttcgtgaatcattttcttttccactcctagtttatttgctgaacactctcctatttgatataggacttcgtgtcagatttaaactttttctgtttctttctcagttctctgtttaatttcaagttcaagctggtgaaattttggattagtgctcccactctcctatctggtataggacttcgtgggtagactnttctacttctctcctttctttcactctc

SEQ ID NO: 42579 - DNA, 63 bp, Glycine max
  Clone ID: LIB3139-047-P1-N1-F10
aaatagtttcttaagtcttgtaactgctactagttggtgaaatgaaatgtactgttccttttc

SEQ ID NO: 42580 - DNA, 374 bp, Glycine max
  Clone ID: LIB3139-047-P1-N1-F11
tacaataccaggtgattttgtcattggtgttaagttgacaaccataaacaatatgtgtgcatatgggctcaatcctggtatttcaggttctcgtcttttgggcaccattcctcagtccatttcacagcaaactgtttggaatcaaatggcaacagtgagaacaccattgaattttgattctagcaagcagagcttttgtcaattttctattgaccttctcggtggaggaattttagtggacaaaactggagattggatcacacttatacaaaattctccaattagtaacttgttgagagttgctgcttggaagaaaggttgtttaatggtcaagattgtgatgtctgggaatgcagcagtcaaaaggagtgatt

SEQ ID NO: 42581 - DNA, 377 bp, Glycine max
  Clone ID: LIB3139-047-P1-N1-F3
cccactcaaccaccacacctctcctcgttcacgctacccctttctgctcttcttctacctttcaagttttaaaagtataaagatggcagagacattcctatttacctcagagtcggtgaacgagggacaccctgacaagctctgcgaccaaatctccgatgctgtcctcgacgcttgcctcgagcaggacccagacagcaaagttgcctgcgaaacatgcaccaaaaccaacttggtcatggtcttcggagaaatcacgaccaaggccaacgttgactacgagaagatagtgcgtgacacctgcaggaacatcggcttcgtctcaaatgatgtgggactggatgccgacaactgcaaggtcctcgtcaacattgagc

SEQ ID NO: 42582 - DNA, 364 bp, Glycine max
  Clone ID: LIB3139-047-P1-N1-F4
ccacatacctctattgggaagattaattcccaggaatgtggttctaataatggttttgaaatgtggagttctgagtgggcaaatcaaacttcatggcatttgagtttccttattgacaatcccaaacagtctacagtttttgatattctcttgggaatctctcaagattttgaaattgctggtaatactcttatgccagctttttctgttccacaggctactgccagatcttctgaaaatgcggaatcctctgcatgatctggaattcgtgttttctttcgcttgttcggttggttaattcaataaaggaaattaggcatgaccctcttgttgagtatgctctgcctatctgaaaatttccaca

SEQ ID NO: 42583 - DNA, 373 bp, Glycine max
  Clone ID: LIB3139-047-P1-N1-F5
gaatattacagatgtcatataagtactttactcgctgttattaatattatgcttgcttatttttggggtgttgcgcattattctttcaacatttcctgcaaatttaatccgtagaaaatctgcatgtgatgctgaaatttgtagctgtgtcgcttgtctattttgagaggagtatcataagaaaaaaccaattagaagggaagataaaaaaaaccttgtaaccattggcagagaagaaaagagaaaatcattctcatagttttacagaatagtcacggcaaaatcacatttgtgacttaatttgttaaccattagaatcagatgatttttgtcatcaagttcaggacgtgtgattcttcaatttaaatagtta

SEQ ID NO: 42584 - DNA, 373 bp, Glycine max
  Clone ID: LIB3139-047-P1-N1-F6
tgatgaataagttcattttgcaaatgagcttttagacattcacttcaagtcagctttggatgatcttttgaaaatatgccagactaaaatccatgccgaccaaggagacgagaaagagcacttgaaggtgactcttttgcgtattgaatcatcgttgcaaggacttttttcttgtttgcccgattttgtcccagactctaggaatggaatggttgaagattcaaaccatatgtttttaattgccggggccacaggttgtactgttggtagtactgctctgagagaaaaagctactgaggttgtacatgcagcctgcaaatatgtcctggagaaaaaatcagatgacagcatcctgttgatactgattattcgc

SEQ ID NO: 42585 - DNA, 374 bp, Glycine max
  Clone ID: LIB3139-047-P1-N1-F7
aatcaatcacatttcaaaggcatgttttttcaacagagttcattctacccacgagtcgattcaacaaacccagacgctaattctgccttctctatccccgcaccatctacttcttcttcttccatttatccctcagcggaaacaacagagaatctcatttgggaagagccaaacacgactacagaagaagccatggaaaacgttctggtcacggtcccgggtgcgattctgcatctgatagaaaaggattccagcgtgcaccttgcttcgggcgacctcaccatatagaccctcggagaaggcgacaaagtggtggcggatctggcatgcgtttgcgatcaggttcagtggccgttggcgaaagacgtgtcggc

SEQ ID NO: 42586 - DNA, 109 bp, Glycine max
  Clone ID: LIB3139-047-P1-N1-F9
catacataatgattaagaccccacgcaaggggtaggcggagtgattttcgttcaagaaaaaccacattcaaagggatgacactacatttgacgcatatgtgggtggaaa

SEQ ID NO: 42587 - DNA, 342 bp, Glycine max
  Clone ID: LIB3139-047-P1-N1-G10
aaaaaaattatttaaaaaaaaaaaaaaaaaaaaaaagggggcaaataaaaaaaaaataaaaaaaaaaaaaaaaaaaaacaaaaaaaaaaaaaaagaaaaaaaaaaaaaaaaaaaaaaaaaaaaaaaaaaaggggccccccccccttaatgaacccggcaccccggaaataaattccggcccggctctcaggggtgtccaacatttccttaaagggggactttttaaacttggggaaaaaaagaacattacctgtatttgttgaaaaaattttttcttttaaaaattccaaaaaaattacaggccggaataaaaaagttaaaaccctggggtcccaaaggggg

SEQ ID NO: 42588 - DNA, 364 bp, Glycine max
  Clone ID: LIB3139-047-P1-N1-G12
gtgatttggtttcacacacacagaagaaaaaaaagagagagaagagaaacacacaaacacaaacagaagcatggaggtggaagtgatggttccaccggtggacttcaacttcgacagcaactgctcctcccccttcatcaccgccccttccagcccccaattcttcgcttccaacaaaccaaacttcttcttcagcgcccccaccagccccacacgtggcaccttctccttcttccacgactccccctcctcttcctctgttcttccccatgaagaacaacaagatttcgagttcaatttcagcggccacctcgaccgcccttctctctccgccgccgagctcttcgacggcggaaaaatccgt

SEQ ID NO: 42589 - DNA, 294 bp, Glycine max
  Clone ID: LIB3139-047-P1-N1-G2
gcaaaatctgaatcaaacacagttaaagacgcacaagaaaacatctcgctcaacaccaccaacacttcggatctacgtttccactctccgaacatcaaaaaaggaaagaaaaaccgatttacagcgacaacaacgaacgaacgatttctcgaagcgctctcaaaatggcgcgtgcaccctttacttcattccccttcgtcctcattacccttctctcaattctccacctttcgcactgcaagaccctcaagcgtgacgttaaggctttgaacgagatcaaggcttcgcttgggt

SEQ ID NO: 42590 - DNA, 300 bp, Glycine max
  Clone ID: LIB3139-047-P1-N1-G3
aaaagctgatgtgcctaccatagcacagattgaagagttccattcgatgcagaggatgatgaatgctcctgattcaaatgataatatcgatctactgttgagcattgatttgttgggtttacaaggagcaggtaaagcttttccaaacaagattgtttttgatgataagcttgtgttggctaacacacaagaattctttgatggaaattttccagtggattcttggttaccaatttttgtgaattgtctttatcctgtaagtcaattaccttcagaagctgtcgttgtaaatgttacatg

SEQ ID NO: 42591 - DNA, 372 bp, Glycine max
  Clone ID: LIB3139-047-P1-N1-G4
ctcccctctaccctgagttttgggccttgccatagattatcactgattttcgttcttcatagtatcttcagaatgctttctgtgagggatttttggaggcggcataggaggaaggttttcgtcactgttggtgttttaggaagtgggtatcttttgtataagctctacggtgctcacaggcatggggttcaggaacttgaaagagaactcgcagttcagagggaaactgaggagcttatgaaggctcagatgcaagctcactttgagaatattcagaggatgtctgatgtaacattgccgcatgctatgcacgagttaagttgtcggatcacagaagagttggatctttctcaccttcttgaaaggttaata

SEQ ID NO: 42592 - DNA, 366 bp, Glycine max
  Clone ID: LIB3139-047-P1-N1-G5
ctacttcctgcaaatgctagcacaaattgggaggggccactatgattctgctcatgatttagattcaattgactttagaatgcaaaggctattcagtacagcttcatcagttatggttgctgatataacaatcaaaagtttagaaggtcttgattcacttgagttattcccaactcatatacaagatatatcatttgaaagtccgttgatcctatcaggaagatacagtggaacttttcctgaattagttaaagtcactggtactttggcaaataagactaacttcgtagtaggccttaaagtgaaaagagaaaaggatatgcagctcagtaatgtcctttcaaagagacatatagaccaggtcac

SEQ ID NO: 42593 - DNA, 373 bp, Glycine max
  Clone ID: LIB3139-047-P1-N1-G6
cacacgtgtttatttatttgtttgttcagaaaaatgatgaggggtgcggaatacgagcgtgtgctaaggtacttcgatgaagacggtgatggaaagatttcaccctcagagctaaggaacagaatagcaatgatgggtggtgaggttatgttgaaggaggctgagatggcgatcgaggcgttggattcggacggcgacgggttgttgtgtttggacgatttgatgaatctgatggaggctgctggagaagaagagaagttgaaggatttgagagaagcctttgatatgtatgatacggagaggtgtgggtttattactccaaaagccttgaagaggatgctgaagaagttaggggaatctaagtcaatggtag

SEQ ID NO: 42594 - DNA, 378 bp, Glycine max
  unsure at all n locations
  Clone ID: LIB3139-047-P1-N1-G7
ccttctcagatctactccttttcctcttaccaaaatcattctccgattgcgcctagggttcacacttcgaatcgccgttttctgtcatgaatcgggctccgtttgcacacctcgccgactctcgctgacggaggagattcgaaattcggccggcaaatggtttcaatcttgttgtacatcgacggtttcatttgcacgtgcggagccattgcgttgtccttgcttcacatttataagcacctactaaattacaccgagcctacttatcagcgcttcatacgtcggatcgttcttatggccccggtttatgcgttgatgtcattcttatcacttttnctaccacagagttcaatctattttaattcaatccgggaaatc

SEQ ID NO: 42595 - DNA, 313 bp, Glycine max
  Clone ID: LIB3139-047-P1-N1-G8
atctgcttcagatgtatttcgtgtcagtgtttccagtgccccaagtacatctagtcatggatctgcacctgatgactgtgatgctttgggggatgtatacatatggggagaggttacctgtgaaaatgttaaagttggtgctgataaaaatgtaaattatgtcagccccagggcagatgtacttctcccaagaccactggaatccagcgtagttttagatgtccatcatatagcatgtggtgttagacatgcttctctagtcactaggcaaggtgaagtttttacatggggcgaagaatcaggaggatgcctt

SEQ ID NO: 42596 - DNA, 193 bp, Glycine max
  Clone ID: LIB3139-047-P1-N1-G9
gtgagaattccattgaattttgattctagcaagcagagcttttgtcaattttctattgaccttctcggtggaggaattttagtggacaaaactggagattggatcacacttatacaaaattctccaattagtaacttgttgagagtggctgttggaaaaaaaggttgttaaatggtcaaaatggtaatgtttg

SEQ ID NO: 42597 - DNA, 373 bp, Glycine max
  Clone ID: LIB3139-047-P1-N1-H1
tgctgaactcatgaccaagattgacaggcgatccggcaaagagcttgagaaggagcccaagtttttgaagaacggtgatgctggttttgttaagatgattccaaccaaacccatggttgttgaaactttctccgagtatcctccacttggtaggtttgctgttagggacatgcgtcaaactgttgctgtgggagtcatcaagaacgttgagaagaaggatcctaccggagccaaggtcaccaaggctgcccagaagaagaagtgaatcgtgcgggctggttcatcaggggatgttggttacaataaatgttggtttcttttctgtactcttgtgtcttcttttctaggtagcttgtttttcggacaaagtttg

SEQ ID NO: 42598 - DNA, 374 bp, Glycine max
  Clone ID: LIB3139-047-P1-N1-H10
cgccaattgagaaggaaagctctctctcgtattgaatggctgcaaaaagctgatgtgcctaccatagcacagattgaagagtttcattcgatgcagaggatgatgaatgctcctgattcaaatgataatattgatctactgttgagcattgatttgttgggtttacaaggagcaggtaaagcttttccaaacaagattgtttttgatgataagcttgtgttggctaacacacaagaattctttgatggaaattttccagtggattcttggttaccaatttttgtgaattgtctttatcctgtaagtcaattacctccagaagctgtcgttgtaaatgttacatgtggtagtggacgttgtggtttacccaccac

SEQ ID NO: 42599 - DNA, 329 bp, Glycine max
  Clone ID: LIB3139-047-P1-N1-H2
cgtctttttaattacgatggcgcccagggacaagactagtgccgttaagcctagcggtaacgccggggtgaaggacctgcattttcgtggagtcaggaagagaccgtgggggaggttcgccgccgagatcagagatcccgccaagaagacccgcgtctggctcggaaccttcgacaccgcggaggaggcggcccgtgcctacgacgccgccgcgcgggagtttcgcggccctaaggcgaagacaaacttccctctcccttcggaaaattttaagaacgcgagccctagccaaagcagcacggtggagtcctccagccgcgaccgcgacg

SEQ ID NO: 42600 - DNA, 372 bp, Glycine max
  Clone ID: LIB3139-047-P1-N1-H3
tgtggagatattttgttggagatctcgtctttgaagtttctaagatgacttctccctacattaaatgtacagtctctttcttcatagcatttggaaatttggctgatgacaccatcaattttgaggcttttccccacaagctggtgcagtttggagagattcaggaaaaagttgtgttgaaattttcacaagaggaatttcttacagcttggtcaactcaggtgcgtcccgcaacgactctgttggctgatgggtgcccatatttgtatgctatggtgcatgatagttcagtgtctacaataccaggtgattttgtcattggtgttaagttgacaaccataaacaatatgtgtgcatatgggctcaatcctg

SEQ ID NO: 42601 - DNA, 370 bp, Glycine max
  Clone ID: LIB3139-047-P1-N1-H4
cctgtacattctgcattggggtggcagtccatccagtgacacaattgattggtttatttcctctcaggaatgtgttcccaggacctattgtgttttaaatccacaaaatccttttgtgttaaataggtggatgggaaaactgactttccctcagggcacttcccgaagtgttaagagaatgcctctttctatagggggaggagctggtgcaaagaatgctattctcatgaatatgccaaatgctgttctttcaatgtggagatattttgttggagatctcgtctttgaagtttctaagatgacttctccctacattaaatgtacagtctctttcttcatagcatttggaaatttggctgatgacaccatc

SEQ ID NO: 42602 - DNA, 364 bp, Glycine max
  Clone ID: LIB3139-047-P1-N1-H5
ctctgccgcttggaagctttctctctctaaaagcaagcaaggtcctccaccaccacctccagtctccctctttcacacagagaaatactgtgtgtgagaccagttttcggttcatggattccttttctcttctacaattccaaacatctattcttggttcgaacaagttttgggcttttggtggtaatgtggtgggttgagtgattcctcttgttgcatagctatggctacagattcgtcttttgagggccttgcacttgatccttctaagtgcagtaaattgagtatggaggaaaaaagagaacttgtatatgaagtatctaactggtcgcatggtgcatctgagatgctgcagtcatggagt

SEQ ID NO: 42603 - DNA, 372 bp, Glycine max
  Clone ID: LIB3139-047-P1-N1-H6
cccaacaacactctccaaactcacctcaaaaaaatttcaacttctcaccatggctgatggtagtagtagcaacaccaagagaaattccctcatcctccatcaccccacaaacttaaagggtggttggaatgctgccatcttcatcatatttgtggaatttgctgagagatttgcttatcaagggttggcaagtaatctcatccaatatctcactaatgttttgaatgaaccaatcacacaagcagccaaagatgtgaacacatgggttggtgcctcctctctcttccctttgcttggtggcttcatagctgattcctatctgggtcgcttcaacaccatactcttgtcctcagtcatttattttgcgggcat

SEQ ID NO: 42604 - DNA, 374 bp, Glycine max
  Clone ID: LIB3139-047-P1-N1-H7
gtcagcattgtatatgatgcatgtacaattccaaatgattgtggttcattggttgttgccaaggttggaaatcacaaacaaattgttggtttccatgttgctggaagcaaaggaagactgggatatgcttcattgataccatatgttgagccagttgtgcaagctcaaagtgctgaagtttactttgacttcttccctgtggaggttgatagtcaagagggagttgctcacattggtgaattgaaatctggtgtctatgttccactgcctacaaaaactaatttgatggaaactcccaaggaatggcaactggatctaccttgtgacaaaattcctagtgtcttgactacaactgatgagagattggtaggcac

SEQ ID NO: 42605 - DNA, 371 bp, Glycine max
  Clone ID: LIB3139-047-P1-N1-H8
gtggatatgcctcatcactatgttgaagttcatcctgagattcgtaaacaattctgggattctcagcattggccaaagcatatacttgtccgatatacatggaaggaacattcagagatagatgtaacttcaggattttttgttctgtttggttcaggtctcatgttgtctttcatcctttcaatctacgtattgcaatcatcacgtgacaaattggaaagatttgtaagggaaacggttgtagaaagcagcgtgcctggtgaggtggtagcaaaggttgaatgatgcatccctggtgtcaatgatgcaatgtataacattgtaatattgtattcgtgaattgacaagatcaattttggaggagggggaga

SEQ ID NO: 42606 - DNA, 372 bp, Glycine max
  Clone ID: LIB3139-047-P1-N1-H9
caagcacatataagagaagagaaagatgacgtcatcgcgtgcccctccgtcgaaatccgtggatctggacctaacaatcgtgtcggcgaagcacctgaagaacgtgaactggaagaacggcaatctgaaaccctacgtggttttctgggtggacccggagcggcgcctcgccacgaaatccgacgactccggcaacacctcccccgtctggaacgagcgtttcgccctccctctccctctccccctccacgactccttcctcaccctcgagatctttcactccaaaccctccgacacccccaaaccccttgtcgccaccctccgacttcccctcaaagaccttcacgacctccacgactccacgcgccttcg

SEQ ID NO: 42607 - DNA, 466 bp, Glycine max
  Clone ID: LIB3139-048-P1-N1-A12
gctgctggggcatacccattacttgctgtgaaaatcatggctcgcatgggcattgaagcagaatcatcccttgactatggtgccatcttcaaagagatgataaggtctaccccattgcctatgagtccattggagaagcctgcatcatctgctgtccgcacagcaaacaaggccaaagcaaaactcattgttgtgctgacacgtggcgggtctacagccaagttagttgccaagtataggccagcggttccaatattgtcggtggtggttccagtgttgagcacggactcatttgattggacctgcagtgatgagacgccagcaaggcacagcctgatatacaggggcttgattcctatactgggcgagggatctgcaaaggctaccgatgcagaatccacagaggtcattctcgaagctgctcttaagtccgcaacagaaagggccctttgtaagcctggtgatg

SEQ ID NO: 42608 - DNA, 395 bp, Glycine max
  Clone ID: LIB3139-048-P1-N1-A2
tgaagattttcagtcagtcttgacaactttcacacgctatagccgattgagagtcattgcagaactaagacatggggatatatttcattcagcaaatatagtgtcaagcatagagtttgactgcgatgatgatttggttgctactgctggagtttcccggcgcatcaaagtttttgacttttctgctgttgtgaatgaacctacagatgctcactgtcctgttgtggagatgtctacacgttcaaaacttagttgcttgagttggaataaatatgctaagaatcaaatagctagtagtgattatgaaggaattgtgactgtttgggatgtaaccactcgaaagagtttaatggaatatgaagaggcatgaaagcgtgcatggagtgttgattttt

SEQ ID NO: 42609 - DNA, 423 bp, Glycine max
  unsure at all n locations
  Clone ID: LIB3139-048-P1-N1-A5
gcaacagagagtagaaaagttggcgcggttgatcacagtggtgtggtgcgcggtggcggtgctactgtgcgccgcggcgggcgcgtcgtgggtggaggaggcggcgaacccgatacgaatggtggcggnggtggaggcggaggtggttcggtgatagggcagtgccggcgcgcgctgaagtttgctaggttcatgagcaggttcgggaagagttaccgaagcgaggaagagatgagggagaggtacgagatattctcgcaaaaccttaggttcattcgctcccacaacaagaaccgcttgccctacactctctctgttaatcattttgctgattggacttgggaggagttcaaaagacacagactaggcgctgcccaaaattgctctgccactcttaacggcaaccacaagctcactgatgct

SEQ ID NO: 42610 - DNA, 323 bp, Glycine max
  Clone ID: LIB3139-048-P1-N1-A6
aaaaagaaaaaaagatggcccggtgcagcacactgatctggcgggcggaataagatctactgggaactcgcacccgctcgtttgaatagaacgtagagacgtactcgatactaatggcatctggaagttataactgtactacacatgtagctggcaattgcttgctccgcgctgaagtttgcttggttcatgagcaggttcgggaagagttaccgaagcgaggaagagatgagggagaggcacgagatattctagcaaaacgcgggggcttcattctttggcacatcaagaaccggtagtaatacactgtctctgctcatcat

SEQ ID NO: 42611 - DNA, 378 bp, Glycine max
  unsure at all n locations
  Clone ID: LIB3139-048-P1-N1-A7
cacatagtaactattatactctgtagagtaattgcggaatctgctggaattttctaataatggcgaaagacgttgagcaggtcacagagcaaggtgaatactccgcgaaggactaccatgaccctactnccgcaaccgtgatcgacccagatgagctcacaaagtggttcttgtacagagccgccatagctgaattcatagcaacactcctttttctttacatcaccgcgttgaccattattggcgacaagagacagagtgacaccaaaatccccggtaacaccgaatgtgacggcgttggcattttgggcatcgcttgggccttcagtggcatgatcttcatccttcgttactgcactgccggaatctttgggggac

SEQ ID NO: 42612 - DNA, 341 bp, Glycine max
  Clone ID: LIB3139-048-P1-N1-A8
cacatagtaactattattctctgtacagtaattgccgaatctgcgggggttttctaataatggccaaagacgttgagcaggtcacagagcaaggtgaatactccgcgaaggactaccatgaccctcctgcggcacacgtgatcgacccagatgagctcacaaagtgatccttgtacagagccgccatagctgagttcatagcaacactcctttttctctacatcaccgcggtgaccattattggctacaagagacagagggacaccaaaatccccttttacaccgaatgggacaacaaggaatacccggcatcccttgggccttcagaggcatgatcttca

SEQ ID NO: 42613 - DNA, 336 bp, Glycine max
  Clone ID: LIB3139-048-P1-N1-B10
cttttgcatttgtgaactattatgtagtattttattcacttaaataaggcgcattactatgtgcaatgagtgtgtttaaatataaaaaaaaaaaaaaaaaaaaaaaaaaaaaaaaaaaataataaaattgatggatatgaagtcaacccaaacagtataaaataatgaatacaaagaatgaaaaaaaaaaaaaaaaacaggggacgaccaccaataaagatactaagaatccgaaaaaaaatagtaaacgggaacaagaaggtaacacatttaactatataggattcacataaaatgttggctaaaaaaaaagaaatattaaatcgggtataaaat

SEQ ID NO: 42614 - DNA, 453 bp, Glycine max
  unsure at all n locations
  Clone ID: LIB3139-048-P1-N1-B2
ccatcgttggcagtggaccatctggcttggcagctgctgatcagctaaataaaatgggtcatacagtaaccgtgtatgaaagagctgataggataggagggcttatgatgtatggggttcccaacatgaanaaccgacaaaagtggatatagttcaacggcgagtaaatcttatggctgaggagggaatagattttgtggtgagtgctaatgttggacatgatcctttgtactctcttgatcggcttcgagaggaaaacgatgccattgtcttggctgtaggagctacaaaacctagggatcttcctgtacctggtcgggagctttcaggagttcattttgcaatggagtttctccatgcaaacactaaaagcttgcttgatagcaatctcgaggatggtaactacatttctgncaagggcaagaaagttgtggtcattgggtggggtgacac

SEQ ID NO: 42615 - DNA, 452 bp, Glycine max
  Clone ID: LIB3139-048-P1-N1-B7
gaaaatgtggaggaaccgtttgcaaagagaaagcgcgtggaggagggggagattactaagcaaaaacaaagttctgattcatcatctgcgcccaagaacattgttgtcagtaatggggtggtgctgagaaggattgagactggttatttcagtcaaatcccacctgagcttttcaatcatatccttaaatttttgtcctccgaggaccttgtttcttgttccttagtttgtaggtttttgaattatgctgcatcggatgaggcattatggcgtcgcttgtactgtatgcgatggggcattcttccccctacaaggaagttaagggaatgcccatggaaaaagttatacattcagcgtgatggagaggacatggttggacttgttagaagctgccaaaatgagtttaaggagtactacattcaaatgcaagcagctaagcgaagtcaagcacc

SEQ ID NO: 42616 - DNA, 469 bp, Glycine max
  unsure at all n locations
  Clone ID: LIB3139-048-P1-N1-B8
ctccccaaaggggactttatatcacgaagaagaatacaaaaaggggggtgtgccctttccttctctctctctctctctctctctctcagttttcctcttcgtaatggcgagttcttcaagaacgaaatctagtggaccaaggcttcgtccttcttcttctgcttcttctctctcacattctaacagcttctgttcgtactcaacatcaaacgcaccgtttcactcaccttcgtcgagtttcttcagaaaacctcactcgcacgtgcctccccgctccacttccccgacacgtgtgaacctattcagcgccgcgccgcttccctcgcactcggtccggttcgctctcgaccggtccatctncccgaaccggaccgtctcgagccacgtcatcgcgaagcaccgccacgtcacggctcagaagaaatcgtgcatgtgttcccctacgaccgcatccggttcgttccgatgc

SEQ ID NO: 42617 - DNA, 470 bp, Glycine max
  Clone ID: LIB3139-048-P1-N1-C10
gtggtggagtcttgggatgtgtgtaaatcaaaaggtgggaggaagaagaagaagaaaggggatgcagaagaagtggaagaaggggctgaggctgaggctgggtgttgggttaggttgaggtttattgggagctgcatttcttcaagatccaaggttgatacctcagtcagtgccagtggcatcagtactcattatgctgaaagtaaatcaactaatgatactagtagagaccaaccaacagctccagcagtctcttctacaaccactagtaatgcagaaagcaattcgtccacttccaagcttgaagaagagcttaaaattgcttccaggctgcgaaagttctctttcaatgatctcaagtcagcaacaagaaattttcggcctgagagttttcttggtgaacgtgggtttggttgtgttttcaaggcgtggatcgaagaaaatggaactgctccagtgaaacctggcac

SEQ ID NO: 42618 - DNA, 121 bp, Glycine max
  Clone ID: LIB3139-048-P1-N1-C11
cgtttgtttaattcaataatggaaattaggcatgaccctcttgttgagtatgctctgcctatctgaaaatttccacacctcttttaattgtcgtaatgatgtgtgaagtgtgtgttatttt

SEQ ID NO: 42619 - DNA, 433 bp, Glycine max
  unsure at all n locations
  Clone ID: LIB3139-048-P1-N1-C12
cgttgatgggtttggtaggtttaatttcaatgttggaatagctataatgatgtttctacaaagtctgagttatggtgttatcttcctgcactcattgcttcaatttgttggcaggtatatatccatggcaagagattacattggtgaagaaagttaaatacgacgatgccctggttgaggcagcatggcccctaggcagcgccattgaagctgtgtcatctgcgtaaaattactgggactatcgcttagatttgtctgaaatctaggggcacatgagtttcatcaccgggattttgtggtgaaatactgtcattcatgatgatcagagattaactttcaggctgaactgagattggatatgggtctgtgattcagaaataatgggagattatagcttcattatntttcatatgtaaataattcacaaacatct

SEQ ID NO: 42620 - DNA, 413 bp, Glycine max
  Clone ID: LIB3139-048-P1-N1-C2
gtgcatagcagagtcagagacagagacgcagccatggggcggagacctgcgaggtgttataggcaaattaagaacaagccataccccaagtcacgtttctgccgtggtgttcctgatcccaagatcaagatttatgatgttggtatgaagaagaagggtgttgatgagtttcctttctgtgtccatctggttagttgggagaaggaaaatgtttcaagtgaggccctggaagctgctcgcattgcttgcaacaagtacatggccaaatttgctggaaaggatgctttccacttgagagtcagggtgcacccattccatgttcttaggatcaacaagatgctttcgtgtgctggtgctgataggctccaaactggaatgagaggtgcttttggaaagccacagggtacttgtgc

SEQ ID NO: 42621 - DNA, 339 bp, Glycine max
  Clone ID: LIB3139-048-P1-N1-C5
attccgtgggcgatgacatcaattcgatgacatacagtatgaaggggaaccaaatgggtggtcaacacagtaaaaggcaaaatgcaaaaggcattgccagagttactaaaggagtacgatctaccaataggaatctttcctcgtgatgcaacaaactatgagttcaatgaagagacaggaaagctcgttgttttcattactcaagtatgcgaagtatgctacaaggattcatcagtcttgcggttgttcactcaccgcgaccggttatatggagaacggaaagttagcacacatatgatgaatgaaaaccaaaccgttgatctgggtgaatgtgacgac

SEQ ID NO: 42622 - DNA, 393 bp, Glycine max
  unsure at all n locations
  Clone ID: LIB3139-048-P1-N1-C6
ggtgatggttgttcggtggtttgcacggatggggaccacgttctgctgcttctgtggttgcgttgctcaatccagcgtcggcgtggtcgagcagtggggtcgcttccaccgcctcgcccaaccgggcttccactttttcaaccctctcgcccgcgaatgcctctccggtatcctctccaccaggatctcctccctcgacgtccgcatcgaaaccaaaaccaaggacaatgtttttgtgcagttgctgtgttcgattcaataccgagtgattaaggaaaacgctgatgatgctttctatgagttgcaaaaccctcaggagcagatccaggcttatgtttntgatgtgactcgtgctattgttcctagaatggaactggatgaactctttgagca

SEQ ID NO: 42623 - DNA, 383 bp, Glycine max
  Clone ID: LIB3139-048-P1-N1-C7
ggggattgttgatgcgctgtctgcacggatgctgaacacattgtgcgggttgtgtgggagcatggctcacaacctcatgcacatgaccaaggctgatctgctgtatcaactgcatgaccaaaacgccgagcactgtttgaaccctttcgctaacgaacgcgtgtgcgctattatcatgattaggatgatctacgtggagcggcggatcagagccaaaaccaaggccaaggtttttgagcagttgctggcttcgattcagtacccagtcatgaaggaaaacgcctttgatgctgtttatgagtcgcagaacactcaggagcagatccaggcgtatgcttatgatgtgactcgtgctattgctgctagaatgaacttggatgaac

SEQ ID NO: 42624 - DNA, 164 bp, Glycine max
  Clone ID: LIB3139-048-P1-N1-C9
gaaaggattgtcacatgcttttccctgtactaacgtttcaacacgggatcagctggaagatgttaaaagggtgttaacatagtgtatatatcgatagaaaaaagaagaagaaggaagccttatagaaaggtaaaggtacggaggcgggaaataaataaagaaag

SEQ ID NO: 42625 - DNA, 451 bp, Glycine max
  Clone ID: LIB3139-048-P1-N1-D1
tatggtggtcaacttaccaccaagggcaaaatgtgtgcatatgggctcaatcctggtatttcaggttctcgtcttttgggcaccattcctcagtccatttcacagcaaactgtttggaatcaaatggcaacagtgagaacaccattgaattttgattctagcaagcagagcttttgtcaattttctattgaccttctcggtggaggaattttagtggacaaaactggagattggatcacacttatacaaaattctccaattagtaacttgttgagagttgctgcttggaagaaaggttgtttaatggtcaagattgtgatgtctgggaatgcagcagtcaaaaggagtgattgggcctcattggtacaagtgtttttaacaaacagcaacagtacagagcattttgatgcttgaagtggacaaaatcagaaccacattcctgggaataatc

SEQ ID NO: 42626 - DNA, 386 bp, Glycine max
  Clone ID: LIB3139-048-P1-N1-D10
tgttgagccagttgtgcatgctcaaagtgctgaagtttactttgacttcttccctgtggaggttgatagtcaagagggagttgctcacattggtgaattgaaatctggtgtctatgttccactgcctacaaaaactaatttgatggaaactcccaaggaatggcaactggatctaccttgtgacaaaattcctagtgtcttgactacaactgatgagagattggtaggcacagaacatgagggatatgatccttttcttggtggaattcaaaaatatgccactcccatgatgcccctagatgaagaaattctttctaaggttgcacaagatatggttgaggaatggtttgattgtgttgatgaggaggattcctttgaggaagttt

SEQ ID NO: 42627 - DNA, 400 bp, Glycine max
  Clone ID: LIB3139-048-P1-N1-D11
tgttgagccagttgtgcaatctcaaagtgctgaagtttactttggcgccttccctgtggaggttgatagtcaagagggagttgctcacattggtgaattgaaatctggtgtctatgttccactgcctacaaaaactaatttgatggaaactcccaaggaatggcaactggatctaccttgtgacaaaattcctagtgtcttgactacaactgatgagagattggtaggcacagaacatgagggatatgatccttttcttggtggaattcaaaaatatgccactcccatgatgcccctagatgaagaaattctatctaaggttgcacaagatatggttgaggaatggtttgattgtgttgatgaggaggattactttgaggaagtttccatatagtccaaa

SEQ ID NO: 42628 - DNA, 345 bp, Glycine max
  unsure at all n locations
  Clone ID: LIB3139-048-P1-N1-D12
ggcgatgggtaatgcgaatctgccacgacattgtgtgggcatagcggggaatgcgttcaagcttccatttcgccatacaactgcaactgctcacaatcacaaacaagtttgcaccttcaattgtgtttctttctttgccaaatcgttccgnccctcaccacgtagtcttaagcttgatcctttcaacaagctctacttcccttatgagccgggcaagcacaggtaggagtgccatcaggattaaaaacaccagcggattcaacgtagctctaaaagtttaaacatatgcacccaagacgtgttctatgccgccctttgtgggcattctggcaccgggcgagagta

SEQ ID NO: 42629 - DNA, 490 bp, Glycine max
  Clone ID: LIB3139-048-P1-N1-D2
gacgcgatgcaccgacctaggctcggatttcggttcgagcattccaatcggcacatggttaatttatatagttcacgttctctttgggcgttgccatttttgagaagccattttcttgctgggatgactacaactggtcagtcaaagtcaattaatgcttttattcaacgatttctgagtgcacagacacgccttgcgcactttgttgaacaggttgctgttgctgtggattttaaagatcaaactggagaacaacaaaccatgcagcagaatctccaaaatgtttgcctcaaaacaggggcccccatggaatcacacgccgccacaatcctcactccttttgccttctcaaagcttcaagaacaacttgtgttggctgcacattatgcgtctttttcaattgaagatggttttcttgtgaggcaccacacaaaagctgagggaggccggaaagtttattgggcccctcaagaagaattatagttgtagc

SEQ ID NO: 42630 - DNA, 181 bp, Glycine max
  Clone ID: LIB3139-048-P1-N1-D3
agcttgacgccatgccgcgtcgtagctcggattcggttagcctcacccgtttaacagggtaatggtgaaacgaaccttgtgaatatgtaacattgtagactttcagtgtaattctgttctgcttctgatgtatcatggttatagtatagtaatgaaattttagaagtatctgttaataatc

SEQ ID NO: 42631 - DNA, 324 bp, Glycine max
  Clone ID: LIB3139-048-P1-N1-D5
cgagaatagttctgtttggaatttttctgaactggcacaacccatctttgagagccatgtgccaatgctctttcttccttcttatgtcaatctcaatcactactattatgactctttcacgcttttgcttgtcgatttttaaaccctaaatctatctatctgtctaatggataggatcgggcaaaaacaaatcatagcaaaatataaccctagccatagtaagacctggttgagcagctgctgcagagagagcgaggcttatggaaggagttccggacccaatacccagaactgtcgaagaggttgtcaccgattttaagggca

SEQ ID NO: 42632 - DNA, 514 bp, Glycine max
  unsure at all n locations
  Clone ID: LIB3139-048-P1-N1-D7
gaagtttttaaattttgtgatgttcattatgaagaaaagggacaggcggagttgtcaagttggaatcaacccatactccatggaatggactggtttggccaatagattactgagtaagggcaacgatattctgtgttgcgattatgctagttttgatggttcgattaccaagcaagttatgagcaagatggcagaaatgataaacagtctttgtggtggtgatgaaaaattgatgcgtgaaaggacacacctgctgttggcttgttgttcaaggatggcaatttgtaagaaagatgtttggagagttgaatgtggaatcccttctggatttccgctcacagttatttgcaatagcatttttaatgagatgctcattagatatagctatgaaaaattactgcgccaggctaaagctccaagtatgtttttacaatccttcaaaaatatngattctttgagtgtgtatggcgatgataacttaactagtgttcatgaatatgtcaagccttacttt

SEQ ID NO: 42633 - DNA, 317 bp, Glycine max
  Clone ID: LIB3139-048-P1-N1-D8
cggctcgagtggagatattttgttggagatctcgtctttgaagtttctaagatgacttctccctacattaaatgtacagtctctttcttcatagcatttggaaatttggctgatgacaccattaattttgggcttttcccacaactgtgcagttgagagatcaggaaaagtgattgaattttcacagagaatttacactgtcaactaggcgtctgcacacttgtgctgatggggtcatttgatgcttgtcatgatgttaggttacatccaggatttgtcattggtagtggcacctaacatattggcatatgctaatc

SEQ ID NO: 42634 - DNA, 543 bp, Glycine max
  unsure at all n locations
  Clone ID: LIB3139-048-P1-N1-D9
cggctcgagtggagatatttcgttggagatctcgtctttgaagtccgtaggatgacttctccctacattaaatgtacagtctctttcttcatagcatttggaaatttggctgatgacaccattaattttgaggctttttccccacaaactggtgcagtttggagagattcaggaaaaagttgtattgaaattttcacaagaggaatttcttacagcttggtcaactcaggtgcgtcctgcaacaactctgttggctgatgggtgtccatatttgtatgctatggtgcatgatagttcagtgtctacaataccaggtgattttgtcattggtgttaagttggcaaccataaacaatatgtgtgcatatgggctcaatcctggtatttcaggttctcgtcttttgggcaccattcctcagtccatttcacagcanactgtttggaatcaaatggcaacagtgagaacaccatntgaatttgatcctagcaagcagagcttttgtcaattttctattgaccttctcggtggagggaatttagtgga

SEQ ID NO: 42635 - DNA, 477 bp, Glycine max
  Clone ID: LIB3139-048-P1-N1-E1
tgttcttatctatatctcccgccaatagcccaaaacctggtggtcttttggtggttcatttctctcttccagatgccacttgccgttcttcaccctcacgattttctcaggaaaaacccatctaaccagtaccagaccataatccctcactctcccaacatgaatcctaataagtctcatcggacttcccgaaaccgtaagaagcggcccgatccaagcccacaaggcgttgtcagcccagcccggctcacattatccccgaaaccccaagtcaaaaacaagccgcagcagcaactcgtcatgggtcaggtcaaaatactcaaacgcggccaacttttgacccaaacgacgccggatccaccgccgcagacggaaatcgtcgatcagaagttaactccgcagacggaaaccgtcgaaaaaaaggacttaacttcaatcgtagatggtttatatgcaggctatttcgatgtggtgatg

SEQ ID NO: 42636 - DNA, 425 bp, Glycine max
  unsure at all n locations
  Clone ID: LIB3139-048-P1-N1-E10
cagaaaactacaacaacaacaactatcttcccttcaacgccaagagagagtccatcatgcgccgcggcctcgacaaccaagcctattatgtcttgggccataagactcccaacattcgtgatctatacactcttggccgtaaattgggacagggccaatttggtaccacttatttatgcaccgagaatgctacctccattgaatatgcctgcaaatccatctccaaaaggaagttgatttccaaggaggacgttgaggacgttaggagggaaattcagataatgcatcatttagctggtcacaagaacattgtcaccatcaagggtgcttatgaggatccactctatgttcatattgtcatggagctntgttccggnggtgagttgtttgatcgcatcatccagaggggccactataccgagagg

SEQ ID NO: 42637 - DNA, 475 bp, Glycine max
  unsure at all n locations
  Clone ID: LIB3139-048-P1-N1-E11
cagagccatccactgaatggtgacctgcgtagaagtgtgagttgagggagaggcaatcatttattcaacttcgcatttatctcgcatccactgaaccaagattcctattccaaaatgaccgctcctacttcttccagcctgtggctggctacaaaccctagcaaaagatggggcgaactcttcttacttctctacaccccctattggctcaccctttgtctcggcattgatattcccttcaatctttacgagaaattcacagagctggagtatttgctcatcggattggtctcggctgttcctgctctcgtcgatccattgctgctcgttggaaaggttgacagaagcatatcttggaaggatcgttattgggtcaaggccagtctctggataataatcttcaggtatgttgggaattatgtgtggacacattactttgatacagttcttggtgcatcttatacctgntcatcat

SEQ ID NO: 42638 - DNA, 432 bp, Glycine max
  unsure at all n locations
  Clone ID: LIB3139-048-P1-N1-E2
gtattctagagattcatggggtggaccgttggagataaacgcgacggactcggcgacggaggacgagcggagccggaacctgcaggacgttgacagggcagcgctgtcgcgtcccttggatgagacgcagcagagctggcttcttggccccggcgagcagaagaagaagaagtacgtcgatctcggctgcatcatcgtcagccgcaagatcttcaagtggaccctcggcacaatcctgttcgccgacttcctcgccggcctcatcgccctcatcgtcaacaccgtccgccgccaccgccacaaacacccgcctaccgacaactacaccctcgccctccacaaggccctcatgttcttcaatgcccaacgatcggngaagttgcccaagcataacaatgtttcgtggaggggaaactcgggaatgcaagatgg

SEQ ID NO: 42639 - DNA, 453 bp, Glycine max
  Clone ID: LIB3139-048-P1-N1-E3
cgaatcgaaaaaagaaagatcatggcgatggcaaacttggctcgacggaagggttacgccgtcgttttgtcgtcgaggtcgtcgctttgtctgacaaggtggagggggttcgcgtccggatctgacgaaaacgacgtcgtggtcatcggcggcggtcccggcggctacgtggcggccattaaagcggcgcagctgggtctgaaaaccacttgcatcgaaaaacgtggcactctcggcggtacctgcctcaacgtcggatgcatcccttccaaggcacttttgcattcttcccacatgtatcatgaggctaaacatgcatttgccaaccatggggtcaagttttcatctgtcgaggttgatttgccagccatgatggcccaaaaagataaagcagtttctaatcttaccaagggtattgaaggtctattcaagaaaaacaaggtaaactatgtc

SEQ ID NO: 42640 - DNA, 461 bp, Glycine max
  Clone ID: LIB3139-048-P1-N1-E4
cggaagagcagttccgggtgtaaccagcgaattgtcaaagaagaagacaaaggcttctcaaatttctcctttcaaacccaacaaggacctcctgcttcatccacagcaacatatcagtcttcaaatgtcacagttcaaacacaacagccatggagttatcaggagaccacaaagcaggataatttttcttcaggaaagagcatgatgaaaactgaaaaatcttcatccatgcaaagtttttcccctgagattgctagtgtccaaaataatcatagcaatgggtttcaatcggattatggcaattaccccccacaatctcagaccttaagcagaaggtcagatgatgggtacaattggaggaaatatggccaaaaacaagtgaagggaagtgaaaatccaagaagttattacaaatgcacataccccaactgccctacaaagaagaaggctgagaggtcttt

SEQ ID NO: 42641 - DNA, 400 bp, Glycine max
  Clone ID: LIB3139-048-P1-N1-E5
cacagttggaaaaaaaaaattagttgttcgagatggcacgtacgaaggaaactgttcgtaagtccacaggaggaaaggcacctaggaagcagctcgcaaccaaggctgcacgtaagtctgcaccaactactggtggtgtgaagaagccacatcgttatcgacctggtaccgttgctcttcgtgagattaggaaataccagaagagtaccgagcttttgatcaggaagctccccttccagaggctggttcgtgaaattgctcaggacttcaagactgatctgcgtttacagagccatgctgtgcttgcattgcaagaagctgctgaggcataccttgttggactctttgaggatactaatctgtgtgccattcacgctaagcgtggaactattatgcccaa

SEQ ID NO: 42642 - DNA, 413 bp, Glycine max
  unsure at all n locations
  Clone ID: LIB3139-048-P1-N1-E7
cttccattctgattgatgctgcccgaatggtgacacagctgcgggaggaagccctgaagttgaaagactcaaatacgagtcttcaagagaagattaaagagttaaaggctgagacgaatgaacttcgtgatgagaaacagangctttaaggcagagaaagagaagttggaggtgcaggtaaaatcaatgaatgctcaacctgctttcttgccacccgctcctgcaatccctgctgcatttgctccacaaggccaagcccctggcaacaagttggtgcctttcatcagctattcgggagttgccatgtggcaatttatgcctccggtcgccgtggatacctcacaggatcatgtacttcgtccaccggttgcctaagttggcattgtacaattatatgggcttccattttggct

SEQ ID NO: 42643 - DNA, 315 bp, Glycine max
  unsure at all n locations
  Clone ID: LIB3139-048-P1-N1-E8
ctcaaaaagtaataagaaatctccatttcataggaaatcttttcccagtgcttccttttccaggaatgggaatggtattaagttaggttttagagatgatgacgaaaactttttaaggtgcaaaaagttttgcacgaacccaggctttaggtctcacgaccatgcacaccgaaacagattgatgtcttcaaacgaagacgtcaagtgaggcttgnactttgactgattgcgactggagtcctctatatagagagactgtacgttgaagatctacacagccatgtaaaaagaattcgtgccggtttagagtacttt

SEQ ID NO: 42644 - DNA, 398 bp, Glycine max
  Clone ID: LIB3139-048-P1-N1-E9
ctcaaaaagtaataagaaatctccatttcataggaaatcttttcccagtgcttccttttccaggaatgggaatggtattaagttaggttttagagatgatgacgaaaactttttaaggtgcaaaaagttttgcacaaccaaagctttaggtttcacacgcatgacccgaaacagaattgatgcttcaatctgaagacactcaatgaagacttacttctagactaattgcaactagaacctcgtatcaagagagactgtcggtttgaagactcaccaagccattgtaaaaagaaattcgtgccggtttcagagtactttgatgagatcagtaggagaggtgtcaattaccacaaagggtggatgagacagcctactcatctgcaaaatgcatgacctaa

SEQ ID NO: 42645 - DNA, 421 bp, Glycine max
  Clone ID: LIB3139-048-P1-N1-F10
cagagattagcacatacttttgtcacgtggcgaaagcggagatgccggagagcttttagcaccacgcgctgtgttactagtcatcgctcaagaccgtgtctgactcggcggtgattatgtacacctacgacatcgcgatccacggctacgcgacgaggctaaccgctgaggaagcgcgtttgctcgagacccaagcggcgattctggctgtcctaccggagacgaggtacgagcttcacactacgaggacgcccatgttcctcggactcgacaagagcgccgacatgttccccgagtcgagttccgggagtgacgtcatcatcggagtcctcgacaccggcgtctggccggagagcaagagcttcgacgacacgggacttgggcctgttccgagcacctggaaaggcgcgtgcgagacggg

SEQ ID NO: 42646 - DNA, 405 bp, Glycine max
  Clone ID: LIB3139-048-P1-N1-F11
gttctttgtcatgtttcttttccagctgctggatgagagaaagagaacaaatgtcttacggtttcttgaagcaattaatcagaggcttgacatttcagatggattgaaaagattaaaatgtcgtacacttatttttgttggggacagttctcctttccattcagaggctctatacatgacttcaaaactggatagaagatatagtgccttggttgaggtatgtgtaatgtgtaagggtgtagatgtgtagcatgcatgtatatatgacaagaaagcatagcaaatagggatatggataaacgttcaggtgaacatttgcaaaattgatttaattcaatacaaaagttacataaaattgctttttaattcaattaaatttagattcagaatcaatttttcaacgtg

SEQ ID NO: 42647 - DNA, 495 bp, Glycine max
  unsure at all n locations
  Clone ID: LIB3139-048-P1-N1-F12
tcggaggctaatctattaggcgctgttctctcgtcttctacaaaatgttctgttcgatctcaaccaaggttgttccttccaccgccatgagtttcatcttcggaaagcgaaaaacacccgcagagcttctgcgggaaaataagaggatgctggacaaatcaatcagagaaattgagcgcgagcggcaaggcttgcaaacgcaagagaagaaattgattgcggagataaagaaaagtgccaaacagggccagatgggagctgttagagttatggcaaaagatcttgttagaacaaggcatcaggttgagaaattttataagctaaaatctcagctccaaggtgtatcactcagaattcagactttgaaatcaacacaagcaatgggtgaggctatgaaaggcgtgacaaaggccatggngcaaatgaataggcagatgaactngccatcnatgcagaaaatcatgcaagaatttgagagacagaatgagaagatgg

SEQ ID NO: 42648 - DNA, 237 bp, Glycine max
  Clone ID: LIB3139-048-P1-N1-F3
ccacatttggagccaagaattttggaaccatccagttgtcaaagaaagtctgccccctagagatcctgttttctcctttttcaagggtctctatgaaagcctttttggttcaaaatagatttgatgatgtggtgtgagacttagtatttctaagaattatgtgtttgttaaaggcttctatgaaagcctcactgcttcaaaatagattcatgtatgtgagactcagaatctctggtg

SEQ ID NO: 42649 - DNA, 497 bp, Glycine max
  unsure at all n locations
  Clone ID: LIB3139-048-P1-N1-F4
ctcgagccgtgagaaggcactcccttgtgactgcatcaccaaaacacgtgtccctcttctttgttggccacaaaagcaacccaacaacaattcatcctcacactcacacccttctgactccatcacccaaacatgacccacaaaaccataatcagtggtggggccaccccaaaaccatcaaacccagtttcaatcacagtaggatcaggttcaacaccttgcacactggttccaccgaagaacaagttgaaacgggtgaggttgaagtcgatgtgtggacgaagatgcaggaagaagctaaactcgatgtcaccgaggaacccattttgtctaattactacaacacttccattctctctcacaagacacttgaaaccgcgttggccaatcaccttgcaatcaacctcagcagcacaagccttccaagcagcacactttctgatcttnttgtgacggnnttggagaccgaccaagccatcatggatgctgtgaagtgt

SEQ ID NO: 42650 - DNA, 452 bp, Glycine max
  Clone ID: LIB3139-048-P1-N1-F6
taactaccaagcaaacacacagttagctttcgctccctggctgatggatggcggtgatcctaccaaactactcaaagtccatctagtcacctgcaccgactcggccgagttcgcgctcctgagctcggcgctgactcggacctcggtggtgggcctggacgcggagtggaagcccgtccgaagattgttcccgagggtggcggtgctccaaatcgcgtgcggcgactcggcggtgttcttgctcgacttgctgtcccttcccctctcttacctgtgggcccccttgcgcgaattgctgctctcccctgacatcctcaaactcggattcggattcaagcaggatttggtctacttgtcatccactttcgcctaccatggcgggttcgataaggttgagccatatttggatatcaagagtgtctacaatcatctacagcataataagaaacatg

SEQ ID NO: 42651 - DNA, 477 bp, Glycine max
  unsure at all n locations
  Clone ID: LIB3139-048-P1-N1-F7
gaaaaattagagagtgagattaggaagaagaacattctagagggagaaacattacacaactgaacccacaattctattactgtttgcttcaaaggatataattgaaggttttgagaactaaggctgcaatactgtatacattctactcaaggaatggtcaatatctggaaatttgctatgtggaaaggttaaatgaagccattcttgtcgaatcatactgattctatgtacaattgttcccaagttggttgtagtcatccaatggctcatacttcttatccttgtggtgatccttattttggtagttcaatagttgcttatggaccacaggctattaatcaacaaatggtgccccagatgctgggattagcatccaccagaattgcattaccagttgatcttgcannanatgggcccatttatgtcaatgccaaacaataccatggtatactgagaaggcgacaagcacgagcaaag

SEQ ID NO: 42652 - DNA, 275 bp, Glycine max
  Clone ID: LIB3139-048-P1-N1-F8
ctcgattcggctcgggtaatacatccttcaaatagttgtcttcggcgtgatggggagtactaactgctcatgaatatgtcaagcctactcagcgttctaaatgaaagctgctcacggcaaatatcaccacactgacggatgacaaactagtgcactagcacttagaaagtgagcagattgagattttctcatgagaaacttcaagcagatgtctcatgtgttgtgggtggcttctgaggacaaggcgagcttatactcacaactccattatggat

SEQ ID NO: 42653 - DNA, 392 bp, Glycine max
  Clone ID: LIB3139-048-P1-N1-F9
gaggcttcatcatgctgctcttcaagtacttgagaggtttgctttacttctctgcattgctgtcatctgggcatttgctgctatccttactgtggctggtgcatacaatactgctaaatcacagacccaagtgagctgtcgcacagatcgctcgtaccttatgtcttctgctccttggattaaagttccgtatccgttccagtggggtacccccatattcagagctagtcacgtctttgggatgatgggggcagcacttgtctcttctgctgagtcaactggtgctttctttgctgcagccaggctttctggtgcaacaccaccggctgcacatgtgctcagccgaagcatcgggatgcagggcattggtatgctgcttgaaggcatatttg

SEQ ID NO: 42654 - DNA, 378 bp, Glycine max
  unsure at all n locations
  Clone ID: LIB3139-048-P1-N1-G1
gcagggttgaccgagtttgaggttggaaggaatcaagaaggtccaagtgaggctgtgaatgcatactattcagcagcattggtgggtcttgcatatggtgactcaggtcttgttgacactgggtcaacgctagtggcattggaaattctagccgcacaaacttggtggcatgtgaaagtggaagacaacttgtatgaagaggaatttgctaaagataacaagatagtgcggcgttttgtgggctaacaagagggatagtaagctatggtgggccagtgctgagtgtacggagtgtaagcttggcatccaagtgctacccttattgcctattactgagacatngttctctgatgctgattatgtgaaggagctagtgga

SEQ ID NO: 42655 - DNA, 502 bp, Glycine max
  Clone ID: LIB3139-048-P1-N1-G10
cagatctcggatgttgtataattagtgtatgatgtgaagctatgggctggaaaatgtggatgtaggagatttcgggacgaaaggcctcaaaacgcttcgtcgtttgtggttactgagtcctgagtgatcttgtcatccgacctttgccatgacaggtgcgcttgcttggcaggtcaaaatatgttaataaaaaaagttttattggtttagggagagatcgcacgggagttgcccggggtctctctctcgtgtggtgtgtggtgtttgctgtgctctccttttcgttatgccttttattattacctatctgtcgctccactccgtattacgactctggatcagagggatacatcagaggattcgctccaactcctatcgaataggtattatctgtcaatttacattggaaagggttaggatattcaattttacataattaaagataaaatcaacgatagctatagttttaaaattaaccatcgattagttgcaactggaacac

SEQ ID NO: 42656 - DNA, 376 bp, Glycine max
  Clone ID: LIB3139-048-P1-N1-G11
tgattgttgaatacattgatgagacatggaagaacaaccccatctggccttctgatccttaccaaagagccttggctcgtttctggtccaaattcattgatgataaggtttttggtgctgcatggaaatccgttttcacagctgatgagaaagagcgtgagaagaatgttgaggaagcaattgaggctctgcagtttcttgagaatgagataaaggacaagaagttctttggaggagaggagattgggttggtagatattgctgctgtctacatagcattttgggtccctatggttcaagaaattgcagggttggagttattcacaagtgagaaattttctaagctccacaattggagccaagaatttttgaacca

SEQ ID NO: 42657 - DNA, 450 bp, Glycine max
  Clone ID: LIB3139-048-P1-N1-G2
ttcggggaaggatcaccataaacttgttccttaagaggggtggtcataggttcgggaagacagctgcttatggacactttggaagggatgatgcacacttcacctgagaagttgtgaagccactcaagtcagaaaaagcctaaagctaaagagtcgtgttaagtcaatcactcccttcacaggatgtctagctgggtgtggatgaataatttgcgtgtatcatgactactactactactactccattcaatgtctaatgccatctcatcaatacctaaactgatcgtttttttttttctccctatactcacaatgtattgtttggctatgcaatgttactgtgttgatgcaatggaaattttatcagaatattgtcccaattgattgcatattgaaagggcgaaaaagacctactcaatgtatgtgtatctaaatgcaagtatattcttt

SEQ ID NO: 42658 - DNA, 421 bp, Glycine max
  unsure at all n locations
  Clone ID: LIB3139-048-P1-N1-G6
ctttctctctgcttagggttttgatcgcatcggatcttcactctctgctccgatctcaaaatgcccgccgtttatggagctcgcttgaccaccttcgaagactccgagaaggagagtgaatacggttacgttcgcaaggtatcaggaccagtcgtcgttgcagatggcatggctggggctgctatgtatgaactcgtgcgtgttggtcatgataatctcattggtgaaattattcgtctcgaagggaattctgctaccatccaagtttatgaggaaactgctggcttgatggttaatgatccggtgttacggactcacaagcctttatccgtggagttgggacctggaatactggngaatattttcgatggaattcagaggcctttgaaaactattgctaaacgatctggtgatgtctata

SEQ ID NO: 42659 - DNA, 443 bp, Glycine max
  unsure at all n locations
  Clone ID: LIB3139-048-P1-N1-G7
ccggatttcattgtgatattatttgtgtcactggatggactgccacggcaatgcaggatgttcaggttacaattgattggtttatttcctctcaggaatgtgttcccaggacctattgtgttttaaatccacaaaatcctnttgtgtaaaataggtggatgggaaaactgactttccctcagggcacttcccgaagtgttaagagaatgcctctttctatagggggaggagctggtgcaaagaatgctattctcatgaatatgccaaatgctgttctttcaatgtggagatattttgttggagatctcgtctttgaagtttctaagatgacttctccctacattaaatgtacagtctctntcttcatagcatttggaaatttggctgatgacaccatcatatttgaggcttttccccacaagctggtgcaggttggagagatt

SEQ ID NO: 42660 - DNA, 272 bp, Glycine max
  unsure at all n locations
  Clone ID: LIB3139-048-P1-N1-G8
ttaccttcagaagctgtctttttaaatgttacatgtggtagtggacggcgtggtttgaagttgacgttacaatttatagctttattnactatcacgaatgtattctcaaaacctatcgtgttctaaatccacaaaatccgtttgtgttaaataggtggatgggaaaactgactttcccttagggctcttccactcgtgttaagagaatgcctcaatctatttggggaggagctggtgcatagaatgctattttcatgcatataccaaaagct

SEQ ID NO: 42661 - DNA, 428 bp, Glycine max
  unsure at all n locations
  Clone ID: LIB3139-048-P1-N1-G9
gggggacggaatatcaaagttactgaggagaacaaacatcaatatggggatttggttgccgagcatcggctgacaactgccattcgacctcaaataaattctttcttggaagggttcaatgaaatgattcccagggagttgatatcgatattcaatgacaaagagctggaattgttgatcagtggacttcctgatattgacttggatgacttgagagcaaatacagaatattctggatatagtgctgcatcgccagttatccaatggttttgggaggttgttcaaggtttgagcaaagaagacaaagctcgactgttgcaatttgtgacaggcacatccaaggtgcctttggaaggctntagcgctcttcaaggaatttcaggctcccagaagtttcagatacacaaagcatatggaagtcctgatca

SEQ ID NO: 42662 - DNA, 396 bp, Glycine max
  Clone ID: LIB3139-048-P1-N1-H1
ggggaaaatttttctttggatataaaatctcgttctagaggggaaaaagtttcctttacaaaagctcaatttgttagtggaaaaaccttcaaatatgatataattggtgctggttcacattcttcagaagattttccttgaaacggaagatcaggaaaaacccaaaacgattgatgccagattgagacaaagaatagatcctcaatacaatgaggttcaggctcagatggaaacaaatttgtttaaattgtctcttgatgatgttgaaactcctaaaggttccatgttgggatcttaaaatttctcaatctaaaattgcactttccaagaacacagttggaggaaccattctgcgtagtgatttattggcaattttttgacagagggcaattttag

SEQ ID NO: 42663 - DNA, 374 bp, Glycine max
  unsure at all n locations
  Clone ID: LIB3139-048-P1-N1-H10
gaaaaaacagagagagagtgagacagtgatgactgaatgaaaaaaaaaaaatgaatctcgtataagtaagtcatagatatctttctcagaacttcagctctctctctctctttctctctctggaacttcttctctcctcaacgctggttccagagaaacccaaaacaaaactgcgtcctctttaaaacgcaccatcaatacaaagaaagaaagttttcaaaacgcaaaagccaagaaccaaaacaagaagaacaatgccattttttttctagcacccttttgtttccttccaccaagaaccggttttgccaccgacccatttctccaaatgcttcccctccgcctaagcgccgtcgnttcctcactcattctct

SEQ ID NO: 42664 - DNA, 465 bp, Glycine max
  Clone ID: LIB3139-048-P1-N1-H11
cgctccattcctcgcttgtgtctcccctccgacgccttcttccggggcccaaccttcctgtctagggacaagaactttctaaaagctaatgcttatgatttgaatgcagttggttctgcttcactgcaatctggtgacaatcctgatagcgttcctatgccaatagttctaatagatcaagaatcagattctgaagcaacaattgtgcagcttagctttggcgatcgacttggagctcttcttgacacgatgaaagcattaaaagatttgggattggatggttcaaagggaactgtatccacagagggattagtcaagcaaacaaaatttttcattacacaatcagacactgggcgcaaagatgaagattctgatatgttagagagaattcgacttaccattattaacaatctgttgaaatatcatgccgagtgcagtgaactactatctatacctgaagtgttt

SEQ ID NO: 42665 - DNA, 460 bp, Glycine max
  Clone ID: LIB3139-048-P1-N1-H12
ctcgagccgaatcggctttagctgccactccaatgcaggatgttcggcttacaattgattggtttatttcctctcaggaatgtgttcccaggacttattgtgttttaaatccacaaaatccttttgtgttgaataggtggatggggaaactgactttcccccagggcacttcccgaagtgttaagagaatgcctctttctatagggggaggagctggtgcaaagaatgctattctcatgaatatgccaaatgctggtctttcaatgtggagatattttgttggagatctcgtctttgaagtttctaagatgacttctccctacattaaatgtacagtctctttcttcatagcatttggaatattggctgatgacaccatcaattttgaggctttttctcacaagctggtgcattttggagagattcatgaaaaaggtgtattgaaattttcacaagagga

SEQ ID NO: 42666 - DNA, 447 bp, Glycine max
  unsure at all n locations
  Clone ID: LIB3139-048-P1-N1-H4
gatattttgttggagatctcgtctttgaagtttctaagatgacttcgccctacattaaatgtacagtctctttcttcatagcatttggaaatttggctgatgacaccatcaattttgaggcttttccccacaagctggtgcagtttggagagattcaggaaaaagttgtgttgaaattttcacaagaggaatttcttacagcttggtcaactcaggtgcgtcccgcaacgactctgttggctgatgggtgcccatatttgtatgctatggtgcatgatagttcagtgtctacaataccaggtgattttgtcattggtgttaagttgacaaccataaacaatatgtgtgcatatgggctcaatcctggtatttcaggttctcgtcttttgggcaccattcctcagtccatttcacagcanactgtttggaatcaaatggcaacagtga

SEQ ID NO: 42667 - DNA, 255 bp, Glycine max
  Clone ID: LIB3139-048-P1-N1-H6
aggacgggcgccgacgttggatgggctcacagctccatcataccacacgggaagacggctggtgacaatatcaaaggcgaggaggtgacgcacaagccggtgcagactcgaacagatacaagactcaatagcttttgaaacctcaccggaggaaaatcttacccatagggcgcctcaggtgcggcatccaacaactctattggatgctatgagactgtactggaatacactggaacacgaatggacatcgacttc

SEQ ID NO: 42668 - DNA, 491 bp, Glycine max
  unsure at all n locations
  Clone ID: LIB3139-048-P1-N1-H7
aatttagctagacttccttgatgcataagaagtagcattatcaattcaccattttagtgccattttgttccatctggtgtatgctacggaagagttggcaacaatctgccatcaccacaagaagtagtgtccctttctaaacagtacgatttccgaaggatgagaatctatgatcgaaaccaacaagtcctccaagctctaagaggttccagcattgagttgctgctagatctccctaacatcgacctccaaagagtagcatctagccaagacaacgcaaacagatgggtacaagacaacgtcaaaaagtttggcaatgttagatttaggtacttttcaatgagaaacgaagtgaagccttgggactcatttgcacggtttctagtacttgcaatgcaaaatatccaaagacctatntctagtgttggccttggaaaccaaatcaaagtttccactggcattgagactggcgcattggcagaatcataccc

SEQ ID NO: 42669 - DNA, 456 bp, Glycine max
  Clone ID: LIB3139-048-P1-N1-H9
atgatatgtaagtgtctatggttactgaatttgaaaaacgtcaatggggggttgtgtttatacatgcagatattgatcaaaatcgtaattggtaagagtgtaagacctaccattagattttatggtctcacttataggctttcaaaatattggggaattggaaatttaagtgctctttgatcatagaatgatccatgttaattgttatgtttcacatcatttaagacttgaccgcatcttttaatatactcgatttacataataaatcattatgatagaactagaaggatgccatgtaattcagtcaagggtttggtttatgatagcatcagcagcaggaagaaggaggaagactctttggatgcatgcatggctattagttagttgccgagaccgttagttagttacaagctgttagttagttgcaacggcatttgaactactgcaacaagttag

SEQ ID NO: 42670 - DNA, 355 bp, Glycine max
  unsure at all n locations
  Clone ID: LIB3139-049-P1-N1-A1
caagacttatcaatggctgtcaaagcttatattgtggactacttcatgtatgggcatgttgagaaactagcagaagaaataaagaaaggggcttcctctgtggaaggtgttgaggccaagttatggcaagtacctgagacactgctggatgaggtgcttggtaagatgagtgcaccacccaagagtgacgtaccagtcattacccccaatgaactatccgaggctgatggctttgaattcggcttcccaacaaggtttggaatgatggctgctcagnttaaagcctctctagatgctactggaggcttatggagagcacaacagcttgcatgcaagcctgctgggcctttataca

SEQ ID NO: 42671 - DNA, 345 bp, Glycine max
  Clone ID: LIB3139-049-P1-N1-A10
tgctaacccacagtccctccctcacccacgtctctccccgcttcagatcttaaacgtctttcgctgttccaagatgggtgtggctgagaacattcccgatatggaggagggtaccttggagattggaatggaatacagaactgtatctggagttgctggaccattggtcattcttgacaaagttaagggacccaaatttcaagagattgttaatattcgtttaggagatggaactactcggcgtggacaagttctagaggttgatggtgaaaaagctgttgttcaggtatttgaaggtacatctggaatcgacaataaatttacgactgtgcaatttactggaga

SEQ ID NO: 42672 - DNA, 360 bp, Glycine max
  Clone ID: LIB3139-049-P1-N1-A11
ctcgagccgaagctatactatattaataaggtagcgggaattccttcagctacaaatgcgttacggtactatgcaggtgctgctgataaaattcacggtgacgtattaaaaatgaacggggatttccatgcttatacacttttggaaccaattggtgttgtgggacacataattccatggaatgcccccagcctctcatttttcatcaaggttagcccttccttagctgcaggctgtactatggtcctcaaacctgctgaacaaacacccctctctgctttgttttatgctcatctagctaagttggctggaatcccagatggtgtgcttaatatagtacctggatttggcccaactgct

SEQ ID NO: 42673 - DNA, 360 bp, Glycine max
  Clone ID: LIB3139-049-P1-N1-A12
cttttgagtaccactaccaatggtgattttgttcaaggaaaagatctcgcaatggttaaagttaatgtagcatgtgctgctgttggcttgacatcaagttacactccaactccattgttggaatctggtttgcaaaaagacagagggttaattgtggagtattttggaaggatgtcttacgttgctcacaacgttaatcagccccaagagaaagatttgttggagggaaatttttcctttgatattaaatctcgctctagattggaaaaagtttcctctacaaaagcacaatttgttagtggaaaaaccttcaaatatgatataattggtgctggttcaaattcttcagaagattttcct

SEQ ID NO: 42674 - DNA, 367 bp, Glycine max
  unsure at all n locations
  Clone ID: LIB3139-049-P1-N1-A2
tgttgatgctgcagctacgaaaaccttgtcctcagatgggttttacattcctcttgcaaaggttcagcttcaaaaatcccacctaacgttgcaaggaaatgtcaaaaaggctgtcccagtcaattgggacccaccgtccttggcaagttttattgaaaattttgggactcatgtcattacatcaataactatgggtggtaaagatgttatttatgttaaacaacatcatacttctcctttgtcaaagttggagatgaaaaactatattcaggatattggaaatcagaggttctnnnacatcaatagccaaacaagttcagggcaaacaaaatccaaggataagggtgttgatgcattttcattcaat

SEQ ID NO: 42675 - DNA, 365 bp, Glycine max
  Clone ID: LIB3139-049-P1-N1-A3
ctggtccatcccttgctcatcctcatagctatcatggaagcctctaactcacattcgtttcgctctcgtgtgcacctttttgtgcttttcttgttatgttttgtggtcacaattgaagctaatttaaagaagaaggtcccagccttttatgtgtttggagactccacagtagactcaggaaacaacaacttcatagacacggctttcagaagcgattttcctccctatggtagagattttgttaaccaagctcccacgggaaggttcacaaatgggaagcttggcactgattttgtagcttcatatttaggcctaaaagagttggtgccaccatatttggatccaaatctcagtgacaaagaact

SEQ ID NO: 42676 - DNA, 363 bp, Glycine max
  Clone ID: LIB3139-049-P1-N1-A4
ctgctggggagagtggaacataataaacatgacaatgaagctgcttttggtagccgttgttgaagttgcatgcttagtttctgggatcttgtcctttggatctgagacactctctgagctttctttcttagaaaacgatgtcgtctcaacagcaagaccttcctcttcatttcaacctcttatggtcgacctcactctcattcaaggagctgattctaaaggagctgtctgtttggatggaacggtgcctggataccatttggatcgtggatttggatctggtgcagatagttggctaattcatttggagggaggaggatggtgtaataccatcagaaactgtgtctatagaaaaaatactcg

SEQ ID NO: 42677 - DNA, 365 bp, Glycine max
  Clone ID: LIB3139-049-P1-N1-A5
attaaattaatagaggatgaaattctagtttaaggaaggttggttggttgggtgggggtaggagatactctcattcacctcccatcatcattataatcattcattccaacctacccttattcttcttcttcaatttcacacccatcatggaccgttttccgatcctctttctcgtcgccaccctcatcaccctcgcctccggtgcccgccacgatattctccggttaccctccgaagcttccaggttcttcaaagcacctgctaatgccgatcaaaacgatgagggcaccaggtgggccgttttagttgccggttccaatggctactggaattacaggcaccagtctgatgtttgccatgcatat

SEQ ID NO: 42678 - DNA, 364 bp, Glycine max
  unsure at all n locations
  Clone ID: LIB3139-049-P1-N1-A6
agttgacattttgttggaaaatgaaaaaaatgaggtcattggtgctgacaactacttcactggatctaaagacaaccttaaaagatggattggccatccaagatttgagctaattcgtcatgatgtcacagagcaattgttgattgaggttgatcaaatctatcatcttgcatgccctgcttctccaatcttctacaaatacaaccctgtaaagacaataaagacaaatgtgattggaacactgaacatgcttgggcttgctaagcgtgtgggagcaaggattttgcttacatctacttcagaagtatatggggaccctcttgtgcatccacaaccagaaagctattgnggcaatgtaaacccc

SEQ ID NO: 42679 - DNA, 364 bp, Glycine max
  unsure at all n locations
  Clone ID: LIB3139-049-P1-N1-A8
gtttgccatttccttgcgagatcttctaaagcctgnccctgcaagtgttgaaatcgatgatcaccctttgcaaattgaagaaacacagtacccgaaaaccttcttctataaagaagaccttcatccaggcaaaacaatgaaagtacaattcagcaagcctccctttcaacaaccatggggtgttggtacatggttaaaggaaattaaagacactactaaagaaggatatagttttgaagagctatgcatcaagaannnnnccattgagggagaagagaagttttgtgcaaaatccttgggaacagtaattggttttgccatttcaaagctgggaaagaacattcaagtactttcaagttccttt

SEQ ID NO: 42680 - DNA, 356 bp, Glycine max
  unsure at all n locations
  Clone ID: LIB3139-049-P1-N1-A9
tgttatattttagaagcttatcttgtcaatctgggaggtgtgttacgagaattgtatttgcacagtccanaggaagctcgccaattgagaaggaaagctctctctcgtattgaatggctgcaaaaagctgatgtgcctaccatagcacagattgaagagttccattcgatgcagaggatgatgaatgctcctgattcaaatgataatatcgatctactgttgagcattgatttgttgggtttacaaggagcaggtaaagcttttccaaacaagattgtttttgatgataagcttttgttggctaacacacaagaattctttgatggaaattttccagtggattcttggttaccaat

SEQ ID NO: 42681 - DNA, 361 bp, Glycine max
  Clone ID: LIB3139-049-P1-N1-B10
caaaactagtgcaactttgcaatttagaaagttagcagattgtgattttctcaagagaaactttaagcagatgtctaatgttttgtgggtggctcctgaagacaaggcgagtttatggtcacaacttcattatgtttcgtgtaataatctggaaatgcaagaagcttatcttgtcaatctcgtaaatgtgttacgagaactgtatttgcacagtccagaggaagctcgccaattgagaaggaaagctctctctcgtattgaatggctgcaaaaagctgatgtgcctaccatagcacagattggaaaagttccattcgatgcagaggatgatgaatgctcctgattcaaatgataatattga

SEQ ID NO: 42682 - DNA, 361 bp, Glycine max
  Clone ID: LIB3139-049-P1-N1-B11
aaaactgcaaatcccatcaaaatcctaatctttagggtttccatgtccaatccaagggattcgtttatgaagatttagcgaaaagggttgaaattgatcatggatttgggaagcgaatccgtggaagagaacgaagtgaatcatgatgggaatggaaacggtggttcttatgatgacgagaagattgggttgggtttggagggaaattcggatgtcaacggttcggatcaaaagggaacggttggcgaagttgaagtgggtagtgcggaaggtgtgaattccaaagggacaccaacaaaggggtttgggttgaagaaatggaagagaattcggaggaatgttgttaaggatccaaattcga

SEQ ID NO: 42683 - DNA, 350 bp, Glycine max
  Clone ID: LIB3139-049-P1-N1-B2
ctcaggacttcaagaccgatctacgcttccagagcagggctgtctccgctcttcaggaagccgctgaggcctacctcgttgggctctttgaggataccaacctctgcgctattcatgctaagagggttaccattatgcccaaggacattcagctagctcgtaggattaggggcgagagagcttagggtttatgatttacaaagccgtagtgttttctaagggttattattttgcaatcgattccttcagcttagtattagggtgaaagtccttgttttattgtgactgtattggaaactcgtttctgtaacgtgagaaatattaatgttgagtcctctcattttaagctt

SEQ ID NO: 42684 - DNA, 366 bp, Glycine max
  Clone ID: LIB3139-049-P1-N1-B3
ccctattcgtgtgcgtacgttgttcggggaagccttacattgtaatgctcgagaagttcactgcacattgatcagtatataaagacaaatgagcagtggtggaagggctgtgaagcccaaagaggaggagcaagatggcatgtctgtccactctccttgcaaacctcctccttcctctgcttcctctctccccaaggagcagtcacaggttgaattggagctgagattgttggaagctcttgagatttaccctccaatgaaactacaaggagtacatcgtcactttgtcctttatggtctgatggaatttctaaggaggaagtttgacagacaattttcttctgaggaggtcctacaattgctgga

SEQ ID NO: 42685 - DNA, 115 bp, Glycine max
  Clone ID: LIB3139-049-P1-N1-B4
attccacttccaccgaccaaaacgcgcaacacgttgtagttaaaacgacaccgaaactaatgggcgtcttcagcgaaaacccgaatccggacccggttgtgatccgccaggtttg

SEQ ID NO: 42686 - DNA, 365 bp, Glycine max
  Clone ID: LIB3139-049-P1-N1-B5
gcacacattttcttatctccgctccccttgcggtgatggaggaatctgaatcctttgctccatgccacggtggcattagcaatattactctgtctagactcctaaatttttcatgcttatcttgtgcaacactctctttgctagtgcgcgcgcgctaaaactgtaacaagtttaggaagtgaatgtatctatttatctgagttatttgttcgctcactgcaactgcaaccaccgaatgcgaacaaaaaaagaattaaaataaagctgtgggtagagaagatctgggaatcttagagtaccaaattagatctctcgaatgtctcaaatcgagagcctcttttcctgtcgcaactacaattgctagg

SEQ ID NO: 42687 - DNA, 362 bp, Glycine max
  Clone ID: LIB3139-049-P1-N1-B7
cacgctcttctctctagagctgctgcgttgctaaaacgcaccggtttgttcctgttctcgttcaaaagaaaactgacacaagtgaggcttggtgcataaacagcaatggcagaaaaaccccaaccggttcgggttctctactgcggcgtgtgcagtttgccccccgaatactgcgaattcggatccgatttcgagaaatgcaaaccctggttgatccaaaacgtccctgacctataccctgatcttctcaaagaagagaaggaagctgataaagttgctgacaaactacaaagtacgggtatatctggagctggtgatggagctgctttctcagcaccgaagcaagaagaggtgaagcgtct

SEQ ID NO: 42688 - DNA, 360 bp, Glycine max
  Clone ID: LIB3139-049-P1-N1-B8
ggtgaatgaagagatggagagagtgatgaggcattttagtgtgccacgttcaatattaagtaggtccccttcgttgaggatagaagcagcatcaatggacaagaatcaaagtatgaactggtgttcagcaagaagctatcggtccctatattcacgggaagcagaatagtggacatagatgggaattccatccacgtgattctggttgacaaaagtggcggtgaagtagtagcggttcccactagtctgggccacccgataaagctagagatagtggtgcttgatggggattttccagctcccaacaacaacaaggaagaatattcatggacgagtgaggagttcaacaaccacatagtg

SEQ ID NO: 42689 - DNA, 363 bp, Glycine max
  Clone ID: LIB3139-049-P1-N1-B9
cttgttcttaagtctcaacctctccactccactgcctattattgttgtgtcccattcaccagtcaccaccaagatggaagccagcgctggactggtcgctggttctcacaatcgcaacgagctagttgtcattcatggccatgaagagcacaagcctttgaagaacttggatgggcaggtgtgtgagatatgtggcgatgatgtgggactcacggtggacggagacttgtttgtggcctgcaatgagtgtggttttccagcatgccggccatgctatgaatacgaaagaagagaagggagacaagtttgtccacagtgcaagaccagatacaagcgtctcaaagggagcccgcgggttgaggg

SEQ ID NO: 42690 - DNA, 370 bp, Glycine max
  Clone ID: LIB3139-049-P1-N1-C1
gctttctttcttcaccatgtcacttgctgggaaaatcaccactgaaatcggggttcatgcaaccgctacaaagtggttcaacctcttcgcaacacaactccatcatgttcaaaacctaactgatagagtgcatggaaccaagctgcatcaaggtgaagactggcatcacaacgagacagtcaagcactggacttataccatagatggtaaggttacaacatgtctggagagtattgaatccattgatgaacagagcaaaacaatcacctacaagctcttcagtggtgacattgatcataattataagaactttaagttcatctttcaagccattgatgataatgatcatggcggtactattatcaaatgg

SEQ ID NO: 42691 - DNA, 223 bp, Glycine max
  Clone ID: LIB3139-049-P1-N1-C10
gtgctagttgtatgtggttattcatttcttttgtgatgtttaactagtccaagtatcttttcaacgatgtggtagcacactagctggaaacagtttttttaaggtcttggtgcgtaatatctgcaatccttttcaccgggaataacaagcactggttatggcaaaggagagtaacctaatgtttaatcttttgaataaagaatttgttgagcagttttatatc

SEQ ID NO: 42692 - DNA, 361 bp, Glycine max
  Clone ID: LIB3139-049-P1-N1-C11
gcttgaggtatttctggcacagttttttccacttttattttaactttaagactgcacagagagaagcatataattcctgagtcaatatagaatttgtgaagtcagtccaaacttcagtttcaaagatgcctcgtggaacgcttgaagttgttctgatcagcgccaaaggaatcgatgacaatgattttctctccagcattgatccttatgtgattctcacatacagggcacaggagaaaaagagcactgtgcaagaagatgctggatccaagccacaatggaatgagagctttcttttcactgtctctgacagtgcatctgaacttaatctaaagataatggataaagacaactttagtca

SEQ ID NO: 42693 - DNA, 363 bp, Glycine max
  Clone ID: LIB3139-049-P1-N1-C2
aaaggacacacctgctgttggcttgttgtccaaggatggcaatttgtaagaaagatgtttggagagttgaatgtggaatcccttctggatttccgctcacagctatttgtaatagcatttgtaatgagatgctcattacatatagctatgaaaaattactgcgccaggctaaagctccaagtatgtttttacaatccttcaaaaattttgcttctttcgtgtgtgtatggtgatgataacttaattagtgttcatgaatatgtcaagccttactctagtggttctaaattgaaaagctttctagctggtcataatatcaccattactgatggtattgacaaaactagtgcaactttgcaattt

SEQ ID NO: 42694 - DNA, 364 bp, Glycine max
  Clone ID: LIB3139-049-P1-N1-C8
ctcgagccgattcggctcgaggaagaacgttgagtcccttttgttcaaggggaagaaggtggcggagaacaccaacatggacaagttggagttgtttgggggagagttaattaaggaacaagagagaagaaaaaccagcattttaccaacggtggtgttgaagaacaacaatgcctcaccttcccccagcagaacttcctctgccactaccttgtccactttgtcttcgactagttaaaacaagaagcaaacaagggagatccaaagttagatttttcattgtggggtttgaatttttatgcgagttttttttttttaagtttgtggtgttggggtagctgccgcttgggaccaaattgagact

SEQ ID NO: 42695 - DNA, 361 bp, Glycine max
  Clone ID: LIB3139-049-P1-N1-D11
gtcgtcctccgcaagaaggctcccactgccgccgccaagaaggatgagaaagccgtcaacgccgcccgccgctccggcgccgaaatcgaaaccctaaaaaaatataatgctgggacaaataaagcagcatctagcagcacttcattgaacactaagaggctggatgatgatactgagagtctagctcatgagaaggtaccaactgaacttaagaaggccataatgcaagctaggatggacaagaaacttactcagtctcagcttgctcaactgatcaatgagaagcctcaagtgatccaggagtacgagtcaggaaaggccattccaaaccagcagataattggcaagttggaaagagccc

SEQ ID NO: 42696 - DNA, 357 bp, Glycine max
  unsure at all n locations
  Clone ID: LIB3139-049-P1-N1-D12
atcatgctttgagttgctctgagatcattaaagattggattttggaggcccctgcgatgaattttttcccaaatgtgcgttctggtagctatgccgagattggaccgcgcgtttctatggatgatgaacacatttgtattgatgatctgggagctcatcttggatttgtgttcaagtgtccgataccgagtgcattttatgcagtttttgatggccatggggggcctgatgcagcagccttttgttaagaggaatgctatgaggttgttttttgaagatgcanacatgctgcagtcgtatgatgctgatgcgttttttctacagaaattggaggattcccatcggagagcttttcta

SEQ ID NO: 42697 - DNA, 359 bp, Glycine max
  Clone ID: LIB3139-049-P1-N1-D3
caaaaagtgttgtaaaatgattgagcttactcaaggctgtgacgacatgacatgttggcttactaaacagaaagtgctaagcaaagggacttgcagacaagtggatgaggactgtaagttgaatcacggttatatgataacattaatgttttccggaacccaaatttcatgaaagttttgcattttttttttaaattaacttagtcatcatcagttatcacaaatttcttttgttgcttcaatcttaactatccatgtgttttactgatgtgtttgttcattagttattaccacataaggttcatgaataactttatctttggaattcactgaacaagcagcttgagctcaatttttgg

SEQ ID NO: 42698 - DNA, 363 bp, Glycine max
  Clone ID: LIB3139-049-P1-N1-D4
ggtgagtgtggatgagaaatacatccgccgctgcctggaattcatacataacactgcattaaaagcagctcaattcaacatacctgagagcttaagagccacaaacatggagactttatcagaaagcttgaatacagtgaaattttttggtggaaatgcatgtggtttgggacattttgtctttgaatgtcctgtggccactgagaatgggagagtagttataagtgctaatgctggggaccagtggaccttaggttcaataatggggagcaagagcatgataaatatattgaatagtactcttcttcagcagtttggtgcttcacatagaactgacaatttgaacaggatgaacttttctga

SEQ ID NO: 42699 - DNA, 364 bp, Glycine max
  Clone ID: LIB3139-049-P1-N1-D7
caaccactgctacaacaccacaaacttttctcttctctcttttcttgttttcaaatctcagacggaagaaataacaaacaagaaatcataggaaaaatgccaccttttgccggctccgaaccagttgggttcccgaagccagattccaacatagtttccattgacgtgggaggccaactgttccaaaccacgaaacagacactaacctcggcgggtccgaaaaccttcttctccagaattgcggcggaatcttctggactccacacccccttcgtagacagagacccagaactcttctcgctccttctctctcttctcagaaccggtaaccttccctcaaaggccaaagctttcgatctccaag

SEQ ID NO: 42700 - DNA, 360 bp, Glycine max
  Clone ID: LIB3139-049-P1-N1-D9
tgccaccttaatgcaggatgttcaggttacaatggaggggtttatttcctctcaggaatgtgttcccaggacctattgtgttttaaatccacaaaatccttttgtgttaaataggtggatgggaaaactgactttcccccagggcacttcccgaagtgttaagagaatgcctctttctatagggggaggagctggtgcaaagaatgctattctcatgaatatgccaaatgctgttctttcaatgtggagatattttgttggagatctcgtctttgaagtttctaagatgacttctccctacattaaatgtacagcctctttcttcatagcatttggaaatttggctgatgacaccatcaa

SEQ ID NO: 42701 - DNA, 362 bp, Glycine max
  Clone ID: LIB3139-049-P1-N1-E10
gcccgaattccttcccctcactccttctcaatcgggctcgttcatcttcctcttttagttcctccatcgctcgtcaaccatggaagaagcttcccttcaccgcaagcgcttcttcgcaagtgtctccggcattcactccctccaacgacgaatcagataaggccaaactcgagcaggtggcgaagagattggagaagacggcgagatacttcaaacgtttgggtaacttagggttttggggtcagctagtgtgcaccgtcgtggctgccgtcatactctcattctccgtcgtggtcaccggaaaagtgacatcgccggccacattttatgccacggcgggtggaatagttgctgccttcatt

SEQ ID NO: 42702 - DNA, 361 bp, Glycine max
  Clone ID: LIB3139-049-P1-N1-E11
gtttctttaagtgcagcacttaatggtgttgagggtttggactatatggaaagaattcctcttgccacatctgaaggttttcctcatgtgctttcacgcaaaaatggtgaaaaaggcaaaaggagatttgtttctggggatggtgaagagatgacattgattccgggaactagtgttgaagaggcttacaacaagctaatagttgaacttgagaaaagtgttcctacattggttggcattgaatgtcccaaggatgagaaacttccccgtcgcaaaatttttgacaaacctaagacgcgctgcttcactattctccctatggagtttaatcttgtggtccgtcagaagtttttaaattttg

SEQ ID NO: 42703 - DNA, 361 bp, Glycine max
  Clone ID: LIB3139-049-P1-N1-E12
tgctatttttaatcctatcatttgcaatcatgggctgtgtcatctaaaccttcttttaacaaaacaaaaaccatgttgaagaagcaatctgtcttgtccttgtcactagtaatgctaatttcatttatgtattcgacaaccaccttagcccaattatcaccagcttcagcccctctcaaaccgccccaacctgctcctaccataccagctgcggctcctcaacaaccattggttccctcattgccacagtcaccaagtgattccactcctgaaagtactccagcacttgacattgttggaatcctgaggaaggcaaagtcattcaacattctaatccgtctcatgaaaaccacccaattga

SEQ ID NO: 42704 - DNA, 370 bp, Glycine max
  Clone ID: LIB3139-049-P1-N1-E2
ctcgtcttcaccaatggcgtcgtcgtcaccaccaccttctctgttcttcctcctcctcctcgctctcttcgccgccacggcatcctgcctcacctgcaccacccaaaagctcaccgactccaacaaaaagctcttctccaactgcctggaccttccctcactcgattccttcctccactggacccacgaccccgccaacgcctccctctcggtggccttcgtggcggctccgcccaatcccggcggctgggtgtcctgggggatcaaccccagcggcaccggcatggtgggggcgcaggtgctggccgcgtacaaggcggagggcaccggtgccgtcaccgtgaaaacgttggaccttaaatcttactct

SEQ ID NO: 42705 - DNA, 364 bp, Glycine max
  Clone ID: LIB3139-049-P1-N1-E3
ggaaaatcatatatttcttctgaattcaatcagagtcaattgcattcaagaactgactttgtttttcagacttccatgaagcctgggttcccaactggttctcagaattctgaatttctggatcaagcataccctccaatgcaggatcattcacgagctttcatgcttacagaacctttctctccaaagcatctccctcaggggaaaccagctagtcaattaccttcaggctctaatctcaatagagatgactttcataatcaacttcctatgcaggattcaaaattttcaagtaccccatcatttggcagcctgcagcctcaaccaaatcaattttcctggaaggtggatgtgaacagactac

SEQ ID NO: 42706 - DNA, 363 bp, Glycine max
  Clone ID: LIB3139-049-P1-N1-E7
atgaaaatgaaggtccttgttttcttcgttgctacaattttggtagcatggcaatgccatgcgtacgatatgttccctctccgaatgaacactggctatggtgcccgtactccggaggtgaaatgcgcaagttggaggcttgctgtggaagcacacaacatctttggctttgagaccattcctgaagagtgcgttgaagcaacaaaggaatacatccatggcgaacaatatagatcagactccaaaacagttaaccaacaagcttacttttatgccagagacctcgaagtccatcccaaggacacatttgtgttcagtatagatggcaccgtactctctaatattccatactacaaaaaacat

SEQ ID NO: 42707 - DNA, 362 bp, Glycine max
  Clone ID: LIB3139-049-P1-N1-E8
tcgttgttttgcatctgatagaagacacatgaaagatgctggtggaaactggattgaagaacaacgaagaaatagcggggcatgcacaactctgaataatctattataatcagaaaaaagctgaaaagacggacgaattgtttcagacacatatgatggtagagctcccacaaaacaaagtgcacgttgcacctgcaatttataattaacttgtgcaatggcaaagcctagagttgatgctgagtatctgaaggaaatcgagaaggctcgtcgtgaccttcgcgctcttatctccaacagaaactgcgcccctctcatgcttcgattagcgtggcatgatgctggtacttacgatgctaaaa

SEQ ID NO: 42708 - DNA, 361 bp, Glycine max
  Clone ID: LIB3139-049-P1-N1-E9
gtatgtggtaatgttggatcaggcaagtccagtttactttcttgtatagtaggggaagtaccaaagatatctgggaccctgaagatatgtggtacaaaggcttatgtttctcaatcaccatggatacagagtggcaagatagaagacaacatattatttggtaaagagatggatagggaaaagtatgataaggtgctagaagcatgttccttgacaaaagaccttgaggttctaccatttggtgatcagaccactatcggagagaagggaatcaatttgagtggtggacagaagcaaagagtgcaaatagcccgtgctctataccaagattctgatgtatatctgtttgatgatcccttca

SEQ ID NO: 42709 - DNA, 364 bp, Glycine max
  unsure at all n locations
  Clone ID: LIB3139-049-P1-N1-F1
tgagagacgaacccctaggtttaagtgagtggcgaaaatggcggtgattttttcaagtgcaataccaggaggggcagcaccagcagcaatcgagcaagtgcagtgcttcggccggaagaagacggcggtggaagtgacctactgcaagcccggccgaggcctcattaagatcaacggctgcccgatcgagctggtggagccggagatcctccgcttcaaggccttcgagccaatcctncttctcggtcgccaccgcttcgccggcgtggacatgcgcatccgcgtgaagggcggcggtcacacctcccagatatacgccatcaggcagagcatagccaaggctctcgtcgcttactaccagaag

SEQ ID NO: 42710 - DNA, 361 bp, Glycine max
  Clone ID: LIB3139-049-P1-N1-F10
caatcaatcttctgagagtgtttggttgaaagtagcaaagatgtttcctttcgggcaaaagggtcaaaagataaaggggactatggtggttatgcagaagaatgtgttggatatcaacagcatcaccagtgttggagggatcgttgaccaaggcttaggcttcataggcagtgcagtcgatgcacttacttttgcagccaccaaaatctccatccagttgattagtgctaccaaggctgatggtgggaaaggaaaaattggaaagagtacaaatttaagaggaaagataacattaccaaccttgggagctggcgaacaagcatacgatgttaattttgaatgggacagtgacttcggaatt

SEQ ID NO: 42711 - DNA, 360 bp, Glycine max
  Clone ID: LIB3139-049-P1-N1-F11
cattttatttttaaatactgaaagatttaaactgggggtgatagtttccaaattcacccaaccccaaagagaaaatgtctctaatcccaaatttcttcggtggcagaaggagcaacgttttctatcctttttccctcgacgtctgggaccccttcaaggattttcctttcccaaacactctttcttcagcttcctttcctgaattttctcgggaaaattctgcattcgtgagcactcgtgtggattggaaggagaccccagaagcacacgtattcaaggctgatattccagggctgaagaaggaggaagtgaaggttcacattgaagatgataaggttcttcagataagccgagagagga

SEQ ID NO: 42712 - DNA, 360 bp, Glycine max
  Clone ID: LIB3139-049-P1-N1-F4
gatattttgttggagatctcgtctttgaagtttctaagatgacttctccctacattaaatgtacagtctctttcttcatagcatttggaaatttggctgatgacaccatcaattttgaggcttttccccacaagctggtgcagtttggagagattcaggaaaaagttgtgttgaaattttcacaagaggaatttcttacagcttggtcaactcaggtgcgtcccgcaacgactctgttggctgatgggtgcccatatttgtatgctatggtgcatgatagttcagtgtctacaataccaggtgattttgtcattggtgttaagttgacaaccataaacaatatgtgtgcatatgggctca

SEQ ID NO: 42713 - DNA, 363 bp, Glycine max
  Clone ID: LIB3139-049-P1-N1-F5
taaaccgtgttcacaggttgccgcaccttaaaaccggaaacaaaagcaatcgttacttgatttcaagaatttctcaatttcttcctacttctttgtgtacgatttcttaagggaaagaaaatcactctctgtgctggtcacagacttcgtgaatcattttcttttccactcctagtttatttgctgaacactctcctatttgatataggacttcgtgtcagatttaaactttttctgtttctttctcagttctctgtttaatttcaagttcaagctggtgaaattttggattagtgctcccactctcctatctggtataggacttcgtgggtagacttttctacttctctcctttctttcact

SEQ ID NO: 42714 - DNA, 362 bp, Glycine max
  Clone ID: LIB3139-049-P1-N1-F6
gattgggtaactgttactgagtgagttgagtagcagaagagaagagaagatgggatctgtatgtatctgagactgtgcatcaccccattccctgttgcggttgattcttgaggacaggcagagataggattaacttaatatgacgacacgacaccattgcaatttaccattctacatttaggcaatgccagccacccaatagataatagcaataagtctttcttcacttcaactcgcactggtatttaaacaagtctgatgggttcaagattcccatctcatcagctcagcaatggcctgtatgtatcaggtcggcctgaacagccgaaagaaagaactccaacaatgagctcagttgccat

SEQ ID NO: 42715 - DNA, 358 bp, Glycine max
  Clone ID: LIB3139-049-P1-N1-F7
ggatgttcaggttacaattgattggtttatttcctctcaggaatgtgttcccaggacctattgtgttttaaatccacaaaatccttttgtgttaaataggtggatgggaaaactgactttccctcagggcacttcccgaagtgttaagagaatgcctctttctatagggggaggagctggtgcaaagaatgctattctcatgaatatgccaaatgctgttctttcaatgtggagatattttgttggagatctcgtctttgaagtttctaagatgacttctccctacattaaatgtacagtctctttcttcatagcatttggaaatttggctgatgacaccatcaattttgaggctttt

SEQ ID NO: 42716 - DNA, 358 bp, Glycine max
  Clone ID: LIB3139-049-P1-N1-F8
attattattaattactaaggaactctcccagaaaagaggcatcagttgcaatggctcgttacggtgagggcgacaagcggtggatcgtggaggaccgccccgacggcaccaatgtccacaactggcattggtccgagaccaactgcctcgactggtccaagaccttcttcaccagcctcctcactaacctccctatcctcgacggcgagggtaacctcttcctcaaaacgacgtcgcttcgctccctcgacggcgaggcctacatcaatgtccgaaaggggaagatcatccccggctacgagatcagcctcactctcaattggcagggagaggccaaagacaccctgggaacctcgct

SEQ ID NO: 42717 - DNA, 358 bp, Glycine max
  Clone ID: LIB3139-049-P1-N1-F9
cttcaccgtcgcactatcgtttccgagaaccatgactgtttctcgctgctcttcaaagcaatcgcaacgcgcgttttgcttctcttttcatcgcagatcctctgcgtcgccaccagattcactcacgtttcgtgattcgaacgcggcgtcgtttagactcaagcttgcgggagaagagaaaaccctaatcagacatggggaagaagaagccgacggcgagggacgaagagaacgcggtacagcaaggcggcggcggtaaatcgaagaagaaggcagtgttaatcgacgacgacgagtattccatcggaacggagctctccgaggagccggcgccggcttccgaggagaaacccgtcgt

SEQ ID NO: 42718 - DNA, 363 bp, Glycine max
  Clone ID: LIB3139-049-P1-N1-G10
cgcgaattgatgatggaggtcaccaaagacgaagctgcaacgccaggatcaggaggtgctcaacctcccaatccaatttctaacggtaaccctaatccaaatccaaaccctaacccgaacatgcctcacacccccagaggatccaaaggaaaatcgtgtaagggatgcacctactacacatcgcttcataaggccaagtccaaaaaccccacatgcgttggtttctccagagcactccagcaagtacccccttttgttgttggagaaactgagttggaagcttcaaaagagggccgcagccttgcaaatttcaagtatgcatgtattggatactctgtctacttagacaacaaagattcttct

SEQ ID NO: 42719 - DNA, 363 bp, Glycine max
  Clone ID: LIB3139-049-P1-N1-G3
tctggtcatcgttcctgacatggcagtcctcttctgggccggcaactctgccgccaaaagattgtccggcagtaaggcgcgtgttctgccggacaactgtggcggcaaagcatggcaacaacgggaagaagaagaagagagttcaaaagatgaaagtttaagtgtgattccaaggttgagtttggaaggagtggagtcagggtttcagtataggttaaattattgtaggtcaaggaagcctgttttggagactataaatgaggaacctgttaggctaaggtgatcatgtaatgaaactcattcgtttatgcatcagattttattttatttttagcttcaagagagatttaattagttgaatca

SEQ ID NO: 42720 - DNA, 363 bp, Glycine max
  Clone ID: LIB3139-049-P1-N1-G4
cgtcacacaagacttcttcaacagcataatcagtcaggctgatgatggttgtgcagggaagaacttctactcacgagatgctttccttaatgctcacaattcctacaatgagtttggtaggcttggtaatcaggatgactccaagcgtgaggttgcagctgctttcgcccatttcacccatgaaacaggacatttttgctacatagaagagattaacggtgcatcaggggactactgtgacgagagcaacaccgagtacccatgtgcccctaacaaagcgtactatgggcgtggaccaatccaactatcatggaacttcaactacggaccagcagggcagagcatcggatttgatggattgaa

SEQ ID NO: 42721 - DNA, 365 bp, Glycine max
  Clone ID: LIB3139-049-P1-N1-G5
ggaaaggaagagaagagaagagaaggagaaggagaagggtttggtagttggttacttagtttgtttgattaacgacggcgcactacacgatccccacaatccagaggcttgttattatctccatccatttaatttaattcccacaaccacgctcacctaagtttcaatttcaatcccttttctttttcttttttatttaaaattccaatttcgcgaaccccaaattccctccctccttttccctttctctctgttctgtaacgtagcatttacagcgatcagtttatagtgagtcacttagaggagttttaggtatcatcgatcatctatggcagggtacaagggcgatgacgagtacgattacc

SEQ ID NO: 42722 - DNA, 121 bp, Glycine max
  Clone ID: LIB3139-049-P1-N1-G7
tttctaccatattatataattttatatatacctgtttctgtgtttttgttggtatgattattttaatagttgttgttatcactgaagaaaaatatcaagctccttttttcaaattgggggt

SEQ ID NO: 42723 - DNA, 357 bp, Glycine max
  Clone ID: LIB3139-049-P1-N1-G8
gctgtgtgctaagaatgctattctcatgaatatgccaagtgctgttctttcaatgtggagatattttgttggagatctcgtctttgaagtttctaagatgacttctccctacattaaatgtacagtctctttcttcatagcatttggaaatttggctgatgacaccatcaattttgaggcttttccccacaagctggtgcagtttggagagattcaggaaaaagttgtgttgaaattttcacaagaggaatttcttacagcttggtcaactcaggtgcgtcccgcaacgactctgttggctgatgggtgcccatatttgtatgctatggtgcatgatagttcagtgtctacaatacc

SEQ ID NO: 42724 - DNA, 360 bp, Glycine max
  Clone ID: LIB3139-049-P1-N1-G9
taagatttgaaattttaataaaccgcgatcacaggttgccgcaccttaaaaccggaaacaaaagcaatcgttacttgatttcaagaatttctcaatttcttcctacttctttgtgtacgatttcttaagggaaagaaaatcactctctgtgctggtcacagacttcgtgaatcattttcttttccactcctagtttatttgctgaacactctcctatttgatataggacttcgtgtcagatttaaactttttctgtttctttctcagttctctgtttaatttcaagttcaagctggtgaaattttggattagtgctcccactctcctatctggtataggacttcgtgggtagacttttct

SEQ ID NO: 42725 - DNA, 361 bp, Glycine max
  Clone ID: LIB3139-049-P1-N1-H1
ccaaattcaagaaattttttaaacttgacatatctgctatcaccttttccgtttcttgcgattcgacgatggccgatcaaaagctttcagaaccggcgcttaaacgtgagcagcttgatgaattcgtgagtagtctatattttgaacaacgaattcttgaactccgacttcttcaagacctcgagaacaatgatgaatgtaggaaaaatgggagcctgaaaaggttaaatgaccagagtgatgtctgtggatttagaagttgcttcaaaaatcattatgattcgcttccgaatcagaggtgcttgaggaatcgagaagaagtgattcaggagacgatggaaatggagttggaaaatatgat

SEQ ID NO: 42726 - DNA, 362 bp, Glycine max
  Clone ID: LIB3139-049-P1-N1-H10
cggctcgtgctttcaccaactctctctctctctctctgtcattctctaatagtagtatatatcaattcaacctgcctccaactcttccaggaaccaccacaaaacattctcatcattcacccaacaaaatggctctgcttctgatagtacccatttcactggtaaccctctggctcggttacaccctataccagcggctacgcttcaagctccctcctggcccacggccctggccggtagtcggtaacctctacgacataaaacccgtccggttccggtgcttcgctgagtgggcgcagtcttacggccctatcatatcggtctggttcggttcgaccctaaacgtcatcgtttcaaactcg

SEQ ID NO: 42727 - DNA, 363 bp, Glycine max
  Clone ID: LIB3139-049-P1-N1-H11
gcgtgggtgcgtgcgtctgagtgggatagaaaagaaaagaatggcggaaagggcgaaaccgatcgacttcgaactcaccttaaagcctttctatcagagagcctcagaagcagaggagcgcttatcaagactagaagcagccttgaatagtaaaaaaggtactggaaacgaggaaaacttgaaagtgattaatgatcttcagtcaaagttagaagttgcaaacgtagagttaatttctgaaaaagagaaggctcaaatgcttgttgcagaaaatgcaaaacttcaataccgaattattcatcttctgagagcactcaaggaagctgatctgaagttagaaaaagctacagtgcatgagcagct

SEQ ID NO: 42728 - DNA, 84 bp, Glycine max
  Clone ID: LIB3139-049-P1-N1-H2
agggaagtttgttttttcaactcaatcaggtccgtgcggctccccatctgaatcaaataatcaatcatccattcattattcatc

SEQ ID NO: 42729 - DNA, 360 bp, Glycine max
  Clone ID: LIB3139-049-P1-N1-H4
agagaacactgtttttgtgaaagaggagcattacagttttgacaagtgagatgagtggaagtggcaaaaagcgctcttcaaagtgggatttgagagacaatcctgatttttctcctgatgatggtaagcaattgcggtctgggtggtcctctgcaggtgataaattaaagcatttttctggaggcagaggatcaaataaggataatattatgaataaagattatagagttttggattcaacaatggaatgggatgaggatgaaagttatgaccataaaatgtctcctgggttggatgcatggaaacataagagacataatagtcaatcccccaaaaatggttggagcaggtcggtcagca

SEQ ID NO: 42730 - DNA, 364 bp, Glycine max
  Clone ID: LIB3139-049-P1-N1-H5
gtggaggaattttagtggacaaaactggagattggatcacacttatacaaaattctccaattagtaacttgttgagagttgctgcttggaagaaaggctgtttaatggttaagattgtgatgtctggaaatgcagcagtcaaaaggagtgattgggcctcattggtacaagtctttttaacaaacagcaacagtacagagcattttgatgcttgtaagtggacaaaatcggaaccacattcctgggaattgatcttcccaatagaggtatgtggtcctaataatggttttgaaatgtggagttctgagtgggcaaatcaaacttcatggcatttgagtttccttattgacaatcccaaacagtc

SEQ ID NO: 42731 - DNA, 365 bp, Glycine max
  Clone ID: LIB3139-049-P1-N1-H6
cgagagtgcatcattcctcatttgatcctctcttcccccatgaccttccaaccagtccccactctccttctccttctcctcctcgcgtccgcaaattcccattttgccctcgccggaaagcgcaaggttcacatccccgacgagttggacgacgtgttcgacgacgaggaggacgacgcgtggcgagaatggggcaagaaacccgaaccccctttcccttcctccgatatctccaagctcgatccctcgcagatccagcaggagatgatgaagcgccacgccggacccgtcatcggattcgtcaagctccggccagggtctcgccgtactccggacatggtagctgaatttgcaatgaaatggac

SEQ ID NO: 42732 - DNA, 271 bp, Glycine max
  Clone ID: LIB3139-049-P1-N1-H7
taggttttttcttctttgttttcaattaggtttgtgcggctctccttcaaactccgtctttccgaatcctctctttgtgattgtgttctgctctgcttcctaccgcgatagtttctcttctgaagcatggccatggcggtttctgcaattggttttgaaggtttctagaagaggcttgaaatatcctttttccagccgggactttttgctgaccctgagggaataggtttaaaagcttttgccaagttccagatggatgagatacttacac

SEQ ID NO: 42733 - DNA, 362 bp, Glycine max
  Clone ID: LIB3139-049-P1-N1-H8
agaaaagttagggttcacaacttttccttttccttttgcttgcgaatctgaatcaaataatcaatcatccattcattattcatcatgtcgtcggcgaagaaaatcacgctgaagagttcggacggcgaggctttcgaggtggaggaggcggtggcgctggagtcgcagacgataaagcacatgatcgaggacgactgcgccgacagcggcatccctctgccgaacgtgacgagcaagatcctggcgaaggttatcgagtactgcaagaagcacgtcgaggccgcgaatcccgaagacaaaccctccgaggacgatctcaaggcctgggacgctgaattcgtcaaggtcgaccaggccacgct

SEQ ID NO: 42734 - DNA, 360 bp, Glycine max
  Clone ID: LIB3139-049-P1-N1-H9
ctcaaacctcttcgttccttcgattcattccatttcttccaaaatggccaaagacccagttcgcgttctcgtcactggagccgcagggcaaattggatatgctcttgtccctatgattgctaggggagtgatgctgggtcctgaccagcccgtgatcctccacatgcttgacattcctccagcagcagagtcgttgaatggggttaaaatggaattggtggatgctgcattccctcttcttaaaggtgttgttgctacaaccgatgtggttgaggcatgcactggggtcaatattgcagtgatggttggtggattccctagaaaagaaggtatggagaggaaggatgtgatgactaagaa

SEQ ID NO: 42735 - DNA, 369 bp, Glycine max
  Clone ID: LIB3139-050-P1-N1-A1
ctatctctcaccaacttccgctacttcctactccaaccactttcttgtttcgcgcagtcatgggcaaggtcaagatcggaatcaacggatttggaagaattggccgtttggtggccagggtggctctgcagagagacgatgttgaactcgttgccgttaacgatcctttcattaccaccgattacatgacatacatgtttaaatacgacagtgttcacgggcactggaagcatcacgatgtcaccgttaaggatgagaagacccttctcttcggtgacaagccagtcactgtttttggacacaggaaccctgaagagatcccatggaagtcgactggagctgacatcattgttgagtccaccggagttt

SEQ ID NO: 42736 - DNA, 430 bp, Glycine max
  Clone ID: LIB3139-050-P1-N1-A12
ttcaaaaccaaagcttctgttttgtgatggaactagagagctggtggtcctaaacctctgtttgctctctctccttttttggtgcagatcttgaacttgagctgcattgtcatagaaaatctgcaccaagaaatgaaacataccatgttacctgccattggatctgttgtccctcgtggtgcctttgcagcagtcttgctcctgttactgttttctttctccactttctcttctacagaagcctatgatccgcttgatccaaccggaaatataacaatcaaatgggatgtcattagctggaccccagatggctatgttgctgttgtgacaatgtacaactttcaacaatatcgccacattcaggcccccggatggtcattagggtggacatgggctaaaaaggaagtgatttggagcatgatgggagcgc

SEQ ID NO: 42737 - DNA, 376 bp, Glycine max
  Clone ID: LIB3139-050-P1-N1-A2
gtgttaagttgacaaccatttactttatgtgtgcatatgggcttaatcctggtatttcaggttctcgtcttttgggcaccattcctcagtccatttcacagcaaactgtttggaatcaaatggcaacagtgagaacaccattgaattttgattctagcaagcagagcttttgtcaattttctatcgaccttctcggtggaggaattttagtggacaaaactggagattggatcacacttatacaaaattctgcaattagtaacttgttgagagttgctgcttggaagaaaggctgtttaatggtcaagattgtgatgtctgggaatgcagcaagtaaaacgagtgattgggcctcattggtacaagtgtttttaac

SEQ ID NO: 42738 - DNA, 424 bp, Glycine max
  Clone ID: LIB3139-050-P1-N1-A3
ctggccaagttagccagtttatgttatgcaaattttccctctactcggcaatcttttccagagattcatactcaggcttaaagaagatgcactggatggcagcctatcttttccgtaccatacagaagttccaagaatcttactgtttggattcctcgggttcacttgtgctattctggcacccctaatgttgcccttcttgttggtctactttttcattgcttaccttgtttatcgaaaccagattatcaacgtatacattacaaaatacgatagtgggggacagttctggcccattgttcacaacacaacgggtttttcgttgctattttctcaacttatcgcactaggggtgtttggactcaaacgctcatcagttgcatctggattcaccattcctctgctgattggtacgcttctattt

SEQ ID NO: 42739 - DNA, 489 bp, Glycine max
  Clone ID: LIB3139-050-P1-N1-A4
tgtatgtagcgtgcaccgtgccacattctttctcgttctcgatctctctcgatttttccttcccttttctccataaacgaggtgcttcagatttgctcataataggagggaatcgaatcgaatcgaatcgaaaggaaagtgcagaatggatgacatgccgttgccggcgctctttgagcaagcccgcaagatccacgccgcagccaccgattccggcgccgaccaggaggttgtgaagaaggggtgcgaggctctgcatagatgcgaggacatggtcaataatctaggtttgttctctcccaacgagaccaaagaagatatcagcaccacgaatctcaaatacattctggtgccattttatcttgcggaagtgacagaaaaaatagcacaggatgacaggatacagattctaaagtctcccaggcaaaacttaatgagttatctcatttgtgaacaatggagctgtcccaagaggagtagaatctacat

SEQ ID NO: 42740 - DNA, 74 bp, Glycine max
  unsure at all n locations
  Clone ID: LIB3139-050-P1-N1-A6
aaagggaaataaaaaaaaanttaaaaaaaaaaaaaaaaaaaacttgttaatttaaaaagggngggggccccccc

SEQ ID NO: 42741 - DNA, 308 bp, Glycine max
  Clone ID: LIB3139-050-P1-N1-A8
aacactcattaattgcttgtatggcacttcgttgcttggtgatgtcgctttctgttctcttcactcttggtcttgcgagagaaagccatgccagagacgaagatttttggcatgctgtttggccaaacactcccattccaagttcattgcgagatcttctaaagcctggccctgcaagtgttgaaatcgatgatcaccctatgcaaattgaagaaacacagtacccgaaaaccttgttctataaagaagaccttcatccaagcaaaacaatgaaagtacaattcaacaagccttcctttcaacaacca

SEQ ID NO: 42742 - DNA, 297 bp, Glycine max
  Clone ID: LIB3139-050-P1-N1-A9
cacattcaataacaccattagaaccacttcggggagtggtgatgctgccttctttagctttcactccggctcatcatagagaaagccatgccccagacgaagatcattgacgtgctgtttgaccacacactccaatgatatgataattgagagagcttgtaaagcctgagcctcaaagagttgaaatcgatgatcacactatgcaaatataagaaacacagtacccgaaaacctgctgctataaagaagaccttcatacaagcaaaacaatgaaagtacaattcatcaagcctccct

SEQ ID NO: 42743 - DNA, 350 bp, Glycine max
  Clone ID: LIB3139-050-P1-N1-B1
attacatagcctcagtaatctgagagagaaacaaaaacaatgaaggtttgcattgccaagttccactcccttcccctatgttttttccttctcttggccttcaacacaaaacccctcctagcagcagaaccagagccagtggttgataagcaagggaaccctttggagccaggagtagggtactacgtgtggccactttgggctgatgaaggaggcctcacactaggccaaacaaggaacaagacatgccctctttatgttatccgtgacccttcattcattggcaccccagtttcattcttagcaccaggccttgaccatgttccaacactcactgatctaaccattga

SEQ ID NO: 42744 - DNA, 390 bp, Glycine max
  Clone ID: LIB3139-050-P1-N1-B11
tggggaaaatggtatcattttctggtgatccaatccagaggctctgtccttacttattggaggggcttagagcaaggttggaatcatcagggaatctcatctacaaatccttgaattgtgaacaaccaacaagcaaagaactaatgagttacatgcacattttgtaccagatttgcccgtactggaagtttgcatacatatctgcaaatgctgtcattgaagaagcaatggcaaatgagtccaggattcacataattgatttccaaattgcgcagggcacgcagtggcatttacttatccaggctcttgcacataggcctgggggacccccctcccttcgtgtgacaggtgttgatgattcgcagtcgattcatgcacgtggtggaggac

SEQ ID NO: 42745 - DNA, 356 bp, Glycine max
  Clone ID: LIB3139-050-P1-N1-B2
cccacacaccctctctaatttttgaggcatacataccattcgctcgcggtgtgtgcaatacagcttctatttcaccttgccccccgaaaaaaacccttggcttttgccctcaccaacattgtgcctttgtcgttattctagctgtcattaaacacacgcgtcgcgccaggtgtagaagaaacacactagccgacacaacagccaaatgtacgtggtttagcgctcaagaaccttcccagaaaaaaaaaaacttctattgccttatcaaagaagttactaattacactcaaacaaaaatagcctaaacaaaatggctatgcttcttctcattccactgtgcctatcatccattttac

SEQ ID NO: 42746 - DNA, 496 bp, Glycine max
  Clone ID: LIB3139-050-P1-N1-B3
ggtggccacagttggtatttttgagaatacaggtatagcattggccggtgctatgaatagttcttttagggggcgcgccagttctgatatttacaccatctgctctcaagactgtgaattatggaatcctgcttgcacaaaagcaatgactatgtcatttaatccaaacccgtgttctgatgcatggagtttggaatttctgaagcgtaccggatttcattgtgatatcatttgtgtcactggatggactgccaccccaatgcaggatgttcaggttacaattgattggtttatttcctctcaagaatgtgttcccaggacctattgtgttttaaatccacaaaatccttttgtgttaaataggtggatgggaaaactgactttccctcaaggcacttaccgaagtggtaagagaatgcctctttctataaggggaggagctggtgcaaagaatgctattctcatgaatatgccaaatgcttgtctttcaatgtgg

SEQ ID NO: 42747 - DNA, 442 bp, Glycine max
  unsure at all n locations
  Clone ID: LIB3139-050-P1-N1-B4
atccgcttcgggaaaccacattttcgcgatcttttgagcgatgataagcggtgccaggggtggctcgttgaattcgatgacattctgttggactattcaaggcaacaggccactcctgaaactatccagaagctatttgaattagcggaggctgcatcgctcaaagaaaagattatccgcatgtacagtggggaacatataaatagcacagaaaatagatcagtgcttcatgtcgctcttcgagcttcaagggatgctgtcatacagagtgatgggcagaatgttgtccctgaagtttggaaagttcttgacatgatccatgagttctctgagcagattcgcaatggttcttgggttggtgctacaggaaaggctntgaaggacgttgttgcaattggtattgggggaagcttcttaggtccactgtttgtacacactgcac

SEQ ID NO: 42748 - DNA, 239 bp, Glycine max
  Clone ID: LIB3139-050-P1-N1-B5
gtggctaccatggcgtatcctaaccacagcttcgcgttcaaaccgagccgaacctgcaccatctccgctcttcttaaagacatcaatccatactcgaatcgacctgaacctcctcttattcgcgctaatgctctcctcctatcgtcttacagcccgccgctctcgcgcaacgctcgctcgacgccgcgcgcgctactactgctcggtgtcgcgacttacactgcggcctcattatctcg

SEQ ID NO: 42749 - DNA, 466 bp, Glycine max
  Clone ID: LIB3139-050-P1-N1-B6
gcgggaattgggtctagcgcaaaaacctttaaacatttttttaaaaatgtgtccacagcgctggcggcggtctaaaagctggaaagtcaaagacaccaaataagaacacatgtttttacctatatagattgccggcacagacctgacccttgcaaacctctctctctctctctcatacaaagttccttccttcagctgcatcatgtaccctgctgcaactgcaagacattcaattcattaacaacactcgcattattcaaactccaaaccaacgcatgcatgatttcacaaatgaacatgcttgcccttttctacttactatctggctcttttctaatccttttcttcttgcgaaaaacctgtgcactttacatcctcaaccaatgagtgctctgcttcgaaaaccgtctacaccttcaccaatccttcaaaatccctcgctataatcttcactctcaggagaata

SEQ ID NO: 42750 - DNA, 265 bp, Glycine max
  Clone ID: LIB3139-050-P1-N1-B7
gaaaattaatctccctttttttttctctgcatctgtactctccggggggccgtccttagaggaggagctcttcccttcaaccccaggcaagttcaagatcgagcgggcccaccacatgaaccgccagctctaccgctgcttcgcctccaccagcaccatgttcctgtgggccctctttttaatcgccctcaccgcttcatatctcagcttccaaggcttcgttgattccggcagccgctacctctccgacttctggggcgggatc

SEQ ID NO: 42751 - DNA, 363 bp, Glycine max
  unsure at all n locations
  Clone ID: LIB3139-050-P1-N1-C1
tataccttgttgatctactttcttccatctttactcactgctgaaggttgtataatcggaatttgagtaatattcatatttccggcttattttacgacggcagatacaaattctggactaatcactagcatctttttctcttgtctgaaaacgaaatgatggaagtgattagaaatagaggcattcctgctgatgttctttgcaagcgagctcatgaatttgaaaaacatgttgctcatgaaagcctcaaggatcaaattcctgctgttgacaagttgtatactactaangtaaataagtttgcaaaaactatgaaccttagacaaagtgttgttggtgatcttaaaactcttactgatggga

SEQ ID NO: 42752 - DNA, 472 bp, Glycine max
  Clone ID: LIB3139-050-P1-N1-C10
ggggagaagaatgttctcatttttgatctcggtggtgggactttggatgtctctcttctcaccatcgaggagggtattttcgaggtgaaggccactgctggtgatactcacttgggaggtgaagattttgataacagaatggtgaaccattttgttcaggaattcaagaggaagaacaagaaggatattagtggaaatgccagagctctgaggaggttgagaacagcatgtgagcgggcaaagaggactctctcttccactgctcaaaccaccatagagattgattccttgtacgagggtattgacttctacacaaccattacccgtgcccgttttgaagagctaaacatggatttattcaggaagtgcatggagcccgtggagaagtgtttgcgggatgccaagatggataagagtaccgtccatgatgttgttcttggtggtggttctactaggattcccaaggttcaac

SEQ ID NO: 42753 - DNA, 498 bp, Glycine max
  unsure at all n locations
  Clone ID: LIB3139-050-P1-N1-C11
cttaattagtgttcatgaatatgtcaagccttactttagtgggtgtggattgaaaagctttctagctggtcataatatcaccattactgatggtattgacaaaactagtgcaactttgcaatttagaaagttagcagattgtgattttctcaagagaaactttaagcagatgtctaatgttttatgggtggctcctgaggacaaggcgagtttatggtcacaacttcattatgtttcgtgcaataatctggaaatgcaagaagcttatcttgtcaatctcgtaaatgtgttacgagaattgtatttgcacagtccagaggaagctcgccaattgagaaggaaagctctctctcgtattgaatggctgcaaaaagctgatgtgcctaccatagcacagattgaagagttccattcgatgcagaggatgatgaatgctcctgattcaaatgataatatngatctactgttgagcatttgatttgtgggtttacaaggagc

SEQ ID NO: 42754 - DNA, 415 bp, Glycine max
  Clone ID: LIB3139-050-P1-N1-C12
cactgttccaatacggaatttaaggcaaagcaaaccaaacatctggagtcatgggttcaacaggtgagactcagattaccccaacccacgtatctgatgaagaagcaaaccttttcgccatgcaactagccagtgcttctgtccttccaatgatcctcaaatcagcacttgagcttgatctgttggaaatcatagccaaggctggccctggtgttcatctttcccccactgacatttcttctcagctcccaacacagaaccctgatgcacccgttatgttggaccgtatattgcgcctattggcttgctacaatatcctctctttttctctccgcactctccctgatggcaaggttgagaggctctatggtctcgcccccgttgccaagtacttggttaagaacgaagatggtgt

SEQ ID NO: 42755 - DNA, 454 bp, Glycine max
  Clone ID: LIB3139-050-P1-N1-C2
caactcgctcctaccaagtttatccttaaaactttaagtatatatgtggtgacgaggttttaaaaatcaaatcgcgaatcatcactttaacgaagcaaattggatatttgttggattattcttcggctccaccttcacctttaataaggcctcatctccacgcgacagtgtattgcgcacacatagaaatttccttaaaaaaatgtctgagaaggctgctcttggatcatggtcgagtggcttgtgcggctgcttctctgactgcagcagctgttgcctcacgttctggtgcccttgtgctagtttccgaagaataggaaagatcgtggacaaaggaacaaactcttgttgtcttcatggatcaactttctgcctacttggtggtttctcttatttagccggtatctacgcctgtatgtaccgtacaaaaataagaggcaatacgggaatgagg

SEQ ID NO: 42756 - DNA, 318 bp, Glycine max
  unsure at all n locations
  Clone ID: LIB3139-050-P1-N1-C3
acgaagcaaatcggatattcgttggatgatacttcggctccaccttcacctttaataaggcctcatctatactctacagacgctggcgcacacatataaattgccttaaaaaaatgtctgagacggctgctcttgtatcatggtcgaatggcttgtgcggttgcttctctgactgcaacacctagtgcctcacgttctggtgcccttgtgctaggtttgggagaataggatagatcgtggcaaaggaacaacttctcgttgncttcatggatcaactttatgcctaacttggggttcctcttatttagcgggtatcta

SEQ ID NO: 42757 - DNA, 324 bp, Glycine max
  unsure at all n locations
  Clone ID: LIB3139-050-P1-N1-C4
tattgtctcaattgaaaggactgcaaaagaagaacacggagttggaggaagaaaacacanaaattagtttaaagcttcaaacgatggaaattgataatgagacaatgcacaagcaattaaatgatgtggaacaaaatacagtgccatctctaaggaaagctctgagggatgtcgcaatggagaaagatgctgcagnttgtgcacgggaggacctttcagcacagcttcgaccctgaaaaacgtctcaggagcagagatgacaattcggccgggagatgcacactgaagagatgactatcacacatatgctatcagtgcattata

SEQ ID NO: 42758 - DNA, 500 bp, Glycine max
  unsure at all n locations
  Clone ID: LIB3139-050-P1-N1-C6
ttcggccaaaccaaacccaattttttggaaagatggcggagcactgttgtttgttattcgggacggagaaggacagggtgaactgnccgttctacttcaagatcggcgcgtgcaggcacggcgaccggtgctcccggcttcacaccaagccgacaattagcccaacattggttctgtcgaacatgtaccagaggcccgacatgaacatgagcattatcaccaaccccgatcagccacaaccccaatcccttgaccccgacaaggtgcaggatcacttcgacgacttctacgaagatctcttcgaggatctcagcaagtacggccccattcagagctcgaatatttgtgacaacctcgccgatcacatggttgggaatgtgtatgttcagtttagggaggaagatcatgctgccaacgccctcatgaatctcactgggaggtttattcangtcgtcccatcattgttgacttctctcccgttacggattttcgagaagcta

SEQ ID NO: 42759 - DNA, 402 bp, Glycine max
  unsure at all n locations
  Clone ID: LIB3139-050-P1-N1-C7
atttactttgngtcgtttttattatgagtctnaagggattttgggcgtgtggtgtcgcttccatcgtcgcaggctgcaccactcacccactcgacctcatcaaagttcgaatgcaacttcaagaaacccacactctccgcccagcctttgcctttcacgctcccactccaatgcctcctccgccgccctccggccccatctccgtcggcctccgcatcgttcagtcggagggactcgccgctcttttctccggcgtctccgccaccgtcctccgccagacgctctactccaccacccgcatgggcctctacgacgtcctcaagcgccactggaccgaccccgaccgcggaaccatgcccctcacaagaaaaatcacggccgggctcgtcgcccgcgggatcg

SEQ ID NO: 42760 - DNA, 156 bp, Glycine max
  Clone ID: LIB3139-050-P1-N1-D1
gcatgatctggaatttgtgttttctttcgcttgttcgtttgtttaattcggtaaaggaaattaggcatgaccctcttgttgagtatgctctgcctatttgaaaatttccacacctcttttaattgtcgtaatgatgtgtgaagtgtgtgttatttt

SEQ ID NO: 42761 - DNA, 291 bp, Glycine max
  Clone ID: LIB3139-050-P1-N1-D10
attttggcatccccgtggcttcaagaagagaatctcaatggaggcccaggagctgaagcgcgtgttccagatgttcgaccgcaacggcgacgggagaataacgaagaaggagctgaacgactcgctggagaacctgggcatcttcatctctgacaaggacctgagccaaatgatccagaggatcgacgtcaacggcgacggttgcgtggacatggacgagtttggggagcttgataaaccataatggacgagcgcgacaataggaggacatggggaggccttaacgtcttc

SEQ ID NO: 42762 - DNA, 444 bp, Glycine max
  unsure at all n locations
  Clone ID: LIB3139-050-P1-N1-D11
gaaaaattgatgcgtgaaaggacacacctgctgttggcttgttgttcaaggatggcaatttgtaagaaagatgtttggagagttgaatgtggaatcccttctggatttccgctcacagttatttgtaatagcatttttaatgagatgctcattagatatagctatgaaaaattactgcgccaggctaaagctccaagtatgtttttacaatccttcaaaaattttgtttctttgtgtgtgtatggtgatgataacttaattagtgttcatgaatatgtcaagccttactttagtggttctaaattgaaaagctttctagctggtcataatatcaccattactgatggtattgacaaaactagtgcaactttgcaatttagaaaagtagcagattgtgattttctcaagagaaactntaagcagatgtctaatgttttgtgggtg

SEQ ID NO: 42763 - DNA, 427 bp, Glycine max
  Clone ID: LIB3139-050-P1-N1-D12
gaaaaattgatgcgtgttatgacacacctgctgctggctggttggtgagggattgcaattcgtaagaaagatgttcggagagttgaatgtggaatcccttctggatttccgctcacagttatttgtaatagcatttttaatgagatgctcattagatatagctatgaaaaattactgcgccaggctaaagctccaagtctgtttttacaatcctgcaaaaattttgtttctttgtgtgtgtatggtgatgataactcaattagtgttcatgaatatgtcaagccttactttagtggttctaaattgaaacgctttctaactcgtcataatatcaccattactgatggtatcgacaaaactagtgcaactatgcaatttagaaagttagcagattgtgattttctcatgagaaactataagcagatgt

SEQ ID NO: 42764 - DNA, 436 bp, Glycine max
  Clone ID: LIB3139-050-P1-N1-D2
cttcagagaagtcccattttccaacttatgcttataagatgatggaagaagggaagctgagagatatttttgactcggagttgaaaattgatgagaatgatgataggtttcaatgtgctataaaagttgcattgtggtgcatacaggaagacatgtcaatgaggccatctatgaccagagttgtccaaatgttggagggtatttgtattgttcctaacccaccaaccagttcttcgttgggttctcgcctttatgccactgtgttcaaatcctccagtgaaggggccacctcttctggtccctcagactgtaacagtgatgcttatctctccgcggttcgcctttcaaggcctagataacaatacctgtctcttttgtttattttctgtgtgttgtattggtgagtaaattagtttgtgtaatacagcagagctac

SEQ ID NO: 42765 - DNA, 476 bp, Glycine max
  unsure at all n locations
  Clone ID: LIB3139-050-P1-N1-D3
gacgacgangcacgcctaccgtagcctcgaaatccggttcgagaccactggttcctggaatttttgttgaagaggcttacaacaagctgggggttgaacttgagaaaagtgttcctacattggttggcattgaatgtcccaaggatgagaaacttcctcgtcgcaaaatttttgacaaacctaagacgcgctgcttcactattctccctatggagtttgatcttgtggtccgtcaaaagtttttaaattttgtgaggttcattatgaagaaaagggacaagcttagttgtcaagttggaatcaacccatactccatggaatggactggtttggccaatagattactgagtaagggcaatgatattctgtgttgcgattatgctagttttgatggtttgattaccaagcaagttatgagcaagatggcagaaatgataaacagtctttgtggtggtgatgaaaaatngatgcgtgaa

SEQ ID NO: 42766 - DNA, 266 bp, Glycine max
  unsure at all n locations
  Clone ID: LIB3139-050-P1-N1-D6
gctcggattcgctcgtgaaaattgtgcgtgaatgcacacctgctgtggctggggggggtggcantcgaggcaatagaaacaatgtgtccactgtgtcctccgtttgtaagcttggatgcagctctgtgatactatgcaggtactggccggcttaacatcgagatgtcagactacactagatcaatgggtgcatccacaaagtctagccagaagtccacggatggcaacaaatccaaagattccaaggctaatagcagtggttctga

SEQ ID NO: 42767 - DNA, 408 bp, Glycine max
  Clone ID: LIB3139-050-P1-N1-D8
ccttccttttccttctctttcgcgattatcgctgtttttcccgggcgaggagagcatggccgtagctgatcccaagcctcactccgaacctaaggtctggaacttcttcaagcttccgttccgccattccgccgccaccaatacgacgccgtcttccgctaaccttcaccatcttcatgatcaccataaccaccaccaccaccaccaccaccaccacaaccctaataatctccccctcgagggttccacttcccacacctccaattccgtttcctccgtcgcgagatctcttctcccaacacgacgtcgtctcaagctcgatccctccaacatgctctactttccttatgagccgggcaaacaggttaggagtgccatcaggattaaaaacaccagtaaatctagcgt

SEQ ID NO: 42768 - DNA, 376 bp, Glycine max
  Clone ID: LIB3139-050-P1-N1-D9
tcttgcacctcctcttcctttcacaactacgatcttcgatagtgctgtgtcagattcttccttcgtggtaaccggtcgaatcatggagcccatggacattgttggcaagtcaaaggaagacgcttcgcttcctaaagcaacaatgacaaaaattattaaagagatgttacccccagatgtacgtgttgcaagagatgcccaagatctattgattgagtgttgtgtagagtttataaaccttgtctcgtcagaatccaatgaagtttgtaacagagaggataaacggacaattgcacctgagcatgtattgaaggctctacaggttcttggatttggtgagtatgttgaagaagtttatgcagcatatgaacagcac

SEQ ID NO: 42769 - DNA, 481 bp, Glycine max
  unsure at all n locations
  Clone ID: LIB3139-050-P1-N1-E10
ctcaaagatctcatactgttcaacaaaccattggacaagctgggtggtgcctatttcttatgaatccgagcttaatgaatccagtttctcttgttgaaaaccatccttcttgtcgaaaaaatagagatggccagaaggtgcttcctaatggtcaaagttggagacctctcttgttgctcttatgcttctcaatgaagattctctctgatgctagtaactctacaaaaactcaagaatcatttgaccaccgcaggctgtttggttttcgtccccgctccccaccacttccatacttgttatcttcgttattgcagacacatacatacccaaaactccctgcagatcaaagtgggcctgacaatggtgattctgatgttgaaatggctganttatctgattctgatctagatgaagatgaggatgagtatgaccagctcccaccatttaagcctatgaagaaatttcaggttgctaagcttac

SEQ ID NO: 42770 - DNA, 429 bp, Glycine max
  Clone ID: LIB3139-050-P1-N1-E11
gcaaaacagtgtcgtgtatttgctattaagtattatgatacctatgtcccattcctgttggaggctcgtaatgatgagactcctgatgtcagacaggcagctgtgtatggtctcggtgtttgtgcagagtttggtggatctgtgttcaaacctctggttggagaggctcttttgaggttaaatgctgtgatccagcatcctaatgctcttcattcagataatgtaatggcatatgacaatgccgtttccgctctgggaaaaatttgccaatttcatcgtgacagtattgattctgcccaggtagttcctgcatggctaaactgtttgccaatcaaaggtgatttgattgaggccaaaattgtgcatgatcaaactttgtcaatggctgagagatctgacagtgagcttgtgggtccaaacaatcaatac

SEQ ID NO: 42771 - DNA, 367 bp, Glycine max
  Clone ID: LIB3139-050-P1-N1-E2
tctgtctctctctctttcactcactcaaactcactatataagattccgtgctcggcccattcttcttcttctgctacaccattcattcgagcattcggttttgaatcttttgagcgaaaatgcagtcgagtcctttgcttctggaggaacccataaggatggcctccatcctcgagccatccaagcctagtttctttccagcgatgacaaagattgttggcacacttggcccaaagtcacgatcggttgacgtgatttcccaatgtcttgaggcaagaatgtctgtggcaaggtttggattttcatggggtgatcctgaataccaccaagagacgttggaaaatttaagggctgctatcaaaagtac

SEQ ID NO: 42772 - DNA, 338 bp, Glycine max
  Clone ID: LIB3139-050-P1-N1-E3
gttgatttgcagcgcactcatcgtattagaggaatgattaaaatggtggccacagttggtattcctgagaatacaggtatagcattggcctgtgctatgaatagatcttttagggggcgcgctagttctgatatttacaccatctgctctcaagactgtgaattgtggaatcctgcttgcacaaaagcaatgactatgtcatttaatccaaacccgtgttctgatgcatggagtttggaatttttgaagcgtaccggatttcattgtgatatcatttgagtcactgggtggactgccaccccaatgcaggatgttcaggttacaattgattggtttat

SEQ ID NO: 42773 - DNA, 485 bp, Glycine max
  unsure at all n locations
  Clone ID: LIB3139-050-P1-N1-E5
caaaagttttaaaatttttttaggaccaaaatgaagaaacggggggggcttttttgtcaagttggaatcaacccatactcaatggaatggactggtttggccaatagattactgagtaagggcaatgatattctgtgttgcgattatgctagttttgatggtttgattaccaagcaagttatgagcaagatggcagaaatgataaacagtctttgtggtggtgatgaaaaattgatgcgtgaaaggacgcacctgctgttggcttgttgttcaaggatggcaatttgaaagaaagatgtttggagaagtgaatgtggaatcccttctggatttccgctcacagttattcgcaatagcatttgtaatgagatgctcattagatatagctatgaaaaattactgcgccaggctaaagcttcaatatgnttttacaatcctttcaaaaatttgttctttgagtgtgtatggngatgataacttaaata

SEQ ID NO: 42774 - DNA, 550 bp, Glycine max
  unsure at all n locations
  Clone ID: LIB3139-050-P1-N1-E6
gacgcacgcacgcgtacagcagcgaattcggccttcgccgacggtattgtatgacatcttttttgagcaaggggggaagcgcctggggccagtgggtctaggtgatgatgatcaatgcattgaggatgactttactgcatggaaagaagaactgtggccagcattggatgaattgcttagagatgaggacgatgcaactgtgtctacaccttatactgctgcagttttggagtaccgggttgttattcatgatccattggaagcatctgtcgacgaaaagaagtggcataatgtaaatggtcacgccattgtggatgctcaacatccagtcagggcaaatgtggctgtgagaaaggagcttcatactcctgcatctgatcgatcttgcactcatttggaatatgacatttcatgcactggagttacatatgaaactgangaccatgttggtgtatactgtgagaatttgtctgaaactgtggaagaggcaataaggttaatagggttgtcaccagatacctatntctcaatccatactgatgatgaagat

SEQ ID NO: 42775 - DNA, 439 bp, Glycine max
  Clone ID: LIB3139-050-P1-N1-E7
cgcacactgtcacaggtgttgcggcgaaactgaggtcgtagaaagggtggcgaaaacgacgtcgttgttgctctttacactgctcctcttcggaaccttagctctcatccaggcgaagaaatcgaaggaggatttgaaggaagtgacccacaaggtttactttgatgttgagattaatggaaaagaagcaggtcgtattgtgatgggtctttttggaaaggctgttccaaaaactgcagaaaactttcgagctctttgcactggggaaaagggaactggtaaaagtggcaagcctctccattacaaaggtagctcattccatagaattattcctagctttatgctccaaggaggtgattttacacatggcaatggtatgggtggagaatcaatttatggagagaagtttgctgatgagaacttcaagttaaagcatact

SEQ ID NO: 42776 - DNA, 402 bp, Glycine max
  Clone ID: LIB3139-050-P1-N1-E8
cacaacattttctaacttttctctctatatatatagctgcttggttgtgtacattcattccatatcatggctccatcatcggaaaccagtaacggcgaagccatgcaccttaaacaggttgaagaagagcaagatggtatacttgtcgccatgaacatgatgtgtaccatggtgtatccgattgtggttcggaccgcgattgagttagggatctttgacatcatagcgaaagcctgtgaaggtgcgaagctatcagcagatgagattatagagcaacttggcacaaagaaccctgaagcttccacgatgttggaccggcttatcatgatatcggcttgtcacttcatgctatgtgactctactgatactgaagatctgcaacatggacaaaactatgctaag

SEQ ID NO: 42777 - DNA, 369 bp, Glycine max
  unsure at all n locations
  Clone ID: LIB3139-050-P1-N1-E9
cgcacaatgtcacaatngttgtctctaaacagatagctaagcgttgttgtgtattcatacgatatgagggctccatacactgatactattaacaacctaacctttcatccaaaacaggtaatcgaagggcgagatggaggacgtgacgccatgaacatactgtgatccagggattaacggaaaagaatcaggacggattgtgatggatctatctggaaaagcagatccaaaagactgcagaaagcttaagagctctctgcactgtgaaaaagtggactgtttaaacaaacaagcctgtacatgtcacagggtgcgcattccatataataattcctagttttatgctccaaggaggtgattatacacatg

SEQ ID NO: 42778 - DNA, 463 bp, Glycine max
  Clone ID: LIB3139-050-P1-N1-F10
aaacaagcagagccgaagcggaacgcttgctagcgatcggcgagaagctgcttcagagccgcgatctgagcagctcgcgcgacttcgccatcctcgcccaggaagccgagccgctcctcgaaggctccgaccagatcctggccatcgtcgaagtcctcctcgccgccgagaagccaatcaccaacgaccacctcgattggtacgctattctccaggtcgatcgcacgtgccaggacctcgatctcatcaaaaaacagtaccgtagactcggtcttcttcttcaccccgacaagaaccctttctccctcgccgaccacgccttcaagctcgtctccgatgcctgggccgtgctttccgacccggtccagaaagcgatttatgacagggacgtggccggttcggtcgaaccggagagcttctggaccgcgtgtccgtactggtattttctctacgagtaccctgc

SEQ ID NO: 42779 - DNA, 349 bp, Glycine max
  Clone ID: LIB3139-050-P1-N1-F11
ctacagccgaatcggttcttgacagttgctgcgtcgcaaggggggtgcggctgacggagacactatcttctcaattttcgatcactgcattggttctgttgacaagggttttgttcttcctgacttgcatacttgatggcttcaaagttgcagaagttgcatgccacagcatctcaagcgtctcaatttgtatccagtcgtggaactaactactacaagcaattgctggaacagaacaagcaacacattcaggagccttctacagtagaaaaatgcaacctgttggcaaagcaattgttttacactcgccttgctagtattccgagtcgtaatgagtcctttttggaag

SEQ ID NO: 42780 - DNA, 412 bp, Glycine max
  unsure at all n locations
  Clone ID: LIB3139-050-P1-N1-F12
atctaaaattgcactttttattaacacagttggaggaaccattctgcgtagtgatctattggcaaattttttgacagagggcaattttagagcaagtgttgatttgcagcgcactcatcgtattaaaggaatgattaaaatggtggccacagttggtattcctgagaatacaggtatagcattggcctgtgctatgaatagttcttttagggggcgcgccagttctgatatttacaccatctgctctcaagactgtgaattatggaatcctgcttgcacaaaagcaatgactatgtcatttaatccaaacccgtgttctgatgcatggagtttggaatttctgaagcgtaccggatttcattgtgatatcatttgtgtcactggatggactgccaccccaatgcangatgtt

SEQ ID NO: 42781 - DNA, 485 bp, Glycine max
  unsure at all n locations
  Clone ID: LIB3139-050-P1-N1-F2
atatttgtggagatctttcttgaagtttctaagatgactctggctgcattaatgtacagtctctttcttcatagcatttggaaatttggctgatgacaccatcaattttgaggcttttccccacaagctggtgcagtttggagagattcangaaaaagttgtgttgaaattttcacaagaggaatttcttacagcttggtcaactcatgtgcgtcccgcaacgactctgttggctgatgggtgcccatatttgtatgctatggtgcatgatagttcagtgtctacaataccaggtgattttgtcattggtgttaagttgacaaccataaacaatatgtgtgcatatgggctcaatcctggtatttcaggttctcgtcttttgggcaccattcctcagtccatttcacagcaaacttgttggaatcaaatggcaacagtgagaacaccattgaattttgatctagcaagcagagcttntgtcaatt

SEQ ID NO: 42782 - DNA, 314 bp, Glycine max
  Clone ID: LIB3139-050-P1-N1-F3
gttgaaagaaggaaccaagatgttaccatggctgaacagagagcctgatgcatactggaaaggtaatccagttgttgctgaaaccagacaagatctcatgaaatgcaatgtttctgaaaatcaagattggaatgctcgtttatatgtacaggattggggacgagaatcacaagaggggtacaagaactcatacttggcaagttaatgcactcacagatataacgtgtacatctgaaggttctgattggtgcgcatgtaaaaatgctatggtgcatgatgactcactgactacactaccaaatgatattgctatt

SEQ ID NO: 42783 - DNA, 453 bp, Glycine max
  unsure at all n locations
  Clone ID: LIB3139-050-P1-N1-F4
ctccgaactttgaaaacgtgcaagcaaaccccacacccccacgcaacaacagtccccatttgttccccagcaaaacaaaaacaccgcgtcttccccgtgcgggaaaaaaaaaaagaatcctcaattttccgggaaaacccttcagaatggtttcccgggaaaataccaattggctcttcgattacggcttgatcgacgatattcccgttccggatgccacctttggcgtcaattcctccgccttcacatggccccctaacgccctcgacgctccttccaatgtcggtgttgacattgatggctcattgggggattctgacggtctcaaagagtctggctcaaagaaaagagttaggtctgaatcatgtgctgcttctagctccaaggcatgtcgagagaaagtgcgaagagataggcttaatgaccaagttgtgaantggggctcatttggag

SEQ ID NO: 42784 - DNA, 436 bp, Glycine max
  unsure at all n locations
  Clone ID: LIB3139-050-P1-N1-F6
ctaattaacactaataacagcaaactaaaggtgaagtttgccagaaacaggatgggaaggaaccattttcagcagcaacactgtgctgatgggagcatgtggatggagagtcagggtcagcaacagagctatgccttccaagaagagtcttggagccctgataacaactatggccacaaccacaagcaattcccaggcatgcacatgaacatgaacaacaacaacaacaaccaaaggcttggtgcttttgctgctgtggactctgacttctcaatgcaaaaacatcatcatgggcatggcaacggcgtatgagccatgcacatgaacatgaacaggcatggtggcaagttaggaggcatgtttcaagaaggcatgcacagtgaccaccatggtggcagaaagtcccntttggtggcatcatcatggtataataacg

SEQ ID NO: 42785 - DNA, 419 bp, Glycine max
  Clone ID: LIB3139-050-P1-N1-F7
ttggaagaaaggtagtttattggacaagatggggatgtctgggggtggagcattcaaaaggagtgattggacctcattggtacaagtgttggtaacatacagctacagtgcagagcattttgatgcatgtatgtggacaaaatcagaaccacattcctgggaatcaattttgccaatagaggtatgtggtcctaataatggttttgaaatgtggagttctgcgtgggcaaatcaaacttcatggcatttgattttgcttattgacaatcctaaacagtctacagttattgatattctgttgcgaatctctcaagattgtgaaattgctggtaatactcttatgccagctattgatgatgcacaagctactgccagatcttgtgaaaatgcggaatcctatgcatgatctggaattcgtg

SEQ ID NO: 42786 - DNA, 253 bp, Glycine max
  unsure at all n locations
  Clone ID: LIB3139-050-P1-N1-F8
ctaatataaaggaatngctacgagcaaaatggggatgtcggggggtgcggtttttaaaaggacctcttgctcctaatacgaacagactgatataacatgcagcatactatcacagcatctgaactcatgtatgcatacaaagtcgggatcacacgcctgggaatcaatcttcatcataaacgcatgcaatgctaatcatggttcctgaacgtgaagatctgcgtcagcaaaaaaaactttaacgcatttgaaa

SEQ ID NO: 42787 - DNA, 520 bp, Glycine max
  unsure at all n locations
  Clone ID: LIB3139-050-P1-N1-F9
tgattatgggcgtgtttattttaactacattgctcaagcaatgggtgctgaaccctagactgtccaagttccaggaactcaaactcgcagtttctgctatgtctctgacatggttgatggacttatacgtctaatggaaggggaaaacactggtccaatcaacattgggaacccaggtgaatttacaatgattgaacttgccgagaatgtgaaagagcttatcaatccaaaagtgcagataaatatggttgagaacactcctgacgatcctcgtcagagaaaaccagacattacaaaagcaaaggaattgctgagatgggaaccaaaggtcaagttgtatgatggccttcctctcatggaagaggatttccgtcagaggcttggagttcccaagagcaactaagctccttgtactccttcatttcttatcatataatcataatgaatatgttgatagtaacggtgatgtggatgaacctgttaagtgttaagagatgntttatatcgaaaattatggaga

SEQ ID NO: 42788 - DNA, 482 bp, Glycine max
  unsure at all n locations
  Clone ID: LIB3139-050-P1-N1-G10
taaagaaaatggcggtgcctctactctcgaagaagatcgtgaagaagggggtgaagaagttcaagaggcctcagagtgacaggaaaatttctgtcaagacaaactggcgcagaccaaagggtatcgattcccgtgttaggagaaagttcaagggatgcactttgatgccaaacattggttatggttcagacaagaagacccgccactatctccctaatggttttaagaaatttgttgttcacaatgtgaaggacttggaactgctcatgatgcacaacangacttactgtgctgagattgcccacaatatatccacangaaagaggaaagatatagttgagagagccgcgcanctttgatgtgttgtgacaaacaaaacagccagattacgcagccaggaggatgaatagtctaaatgactaaaaaagtcacttatctgtagtgattcaggtagtcaatatcaaattntgcagttaatttaa

SEQ ID NO: 42789 - DNA, 450 bp, Glycine max
  unsure at all n locations
  Clone ID: LIB3139-050-P1-N1-G11
gaaaaataaagcaaatcgcaaagccagagaagaataaaaagcctttctcccggggccagtccagttcattgtagagagcagacaccaacaccaaaccttaaaattattttgcccctctgcttctctctctgtctttctcagaagacaactcaaaaaaaccatggacgtgggtcagatgcagagacagtggatcgactacaccaaatccctcttccttgagggcttcctggatggtcagtttctgcaacttcagcagcttcaagatgagaacaaccctgactttgtggtcgaagttgtctctctcttctttgaagattctgaaaggcttctcaaagatctcacctntgccctagatcagaatggtgttgacttcaaaaaagttgatgctcatgtgcaccagttaaagggtagcagttcaagcataggcgcgcaaagggtgaaaaatgcctg

SEQ ID NO: 42790 - DNA, 467 bp, Glycine max
  Clone ID: LIB3139-050-P1-N1-G12
gctggccacaaagaacttgttcacaaaagtctacttcagagcggtgcgctctatcagtatatacttgaaaccagtgtgtacccaagagagcatgagagcttgaaggagctacgagagttgacggaaaaacacccttggaacctgatggctacaccacctgacgaaggacaacttctaggcatgctccttaagcttatcaatgccaagaacaccatggaaataggcgtcttcactggttactccttgctttacactgcccttgccctgccttctgacggaaagatcttagctatggatgttaaccgggaatattatgaattgcggttgcccgtgattgaaaaggctggagtggctcacaagattgacttcagagaaagacccgctcttcctcttcttgacgttctcattaaagacgaaaagaatagcggagctttcgattcaattattggatgctgataggacaatac

SEQ ID NO: 42791 - DNA, 432 bp, Glycine max
  Clone ID: LIB3139-050-P1-N1-G2
gttgaagagtagtaatgtttttttaacactcattaatgatgtactagatgtttctcgactagaagatggtagcctcgaattagaaatgggaaaattcaacctccatggagttttgggagagattgttgaactgatcaaaccaatagcatccgtgaaaaagttacctatcaccttaattctgtctcctgatctgcctactcatgccattggtgatgaaaagcggcttacacaaactcttttgaatgtcgtgggtaatgctgtcaaattcactaaggagggctatgtttctgtaagagtatcagttgcaaaaccagaatcttcacaagattggcgacctccagagttttatccagcatctagtgatggccatttctacattcgagtccaggttaaggactctggatgtgggattctcccacaagatattccgca

SEQ ID NO: 42792 - DNA, 259 bp, Glycine max
  Clone ID: LIB3139-050-P1-N1-G3
gttaagcatgtcgaccacgtcaccaacgatcgctacaatacttgtctggatcttcctcttgagttacaggttcatgtacacgctcccgatcccagtgctagtgttagtgtgtttggcgtctcagcagaatcaatgcagtgttcctatgattcaaaaggaaacagtgtccccactattctactgctaatgcaagagcgattatactcacaaggtggcctaaaggctgaaggtatatttcgcattaatccaaaaaacagtc

SEQ ID NO: 42793 - DNA, 148 bp, Glycine max
  Clone ID: LIB3139-050-P1-N1-G4
tctcctagcgctgctctatttctagcctgccattgtgtattctagagaatggacttgctttactgcccccacaagcttttccttttccagtataacattcacttgtgctatgcatagtgattataagctgcacaccgagcttattatt

SEQ ID NO: 42794 - DNA, 442 bp, Glycine max
  Clone ID: LIB3139-050-P1-N1-G7
gaaaaagtggccactttatcttagcaccaaaaatacaattctcaagaaatatgatggaagattcaaggacatatttcaagaagtttatgaggcaagctggaaatcaaagtttgaggctgctggtatatggtatgagcatcggctcattgatgatatggtggcgtatgcacttaagagtgaaggaggttatgtatgggcttgcaaaaactatgatggagatgtccagagtgatttcttagctcaaggttttggatcactaggtttgatgacatctgtattggtttgccctgatggaaagactattgaagcagaagcagctcacggcacagttacccgtcattttaaggttcatcagaagggaggtgaaaccagcacaaatagcatagcatccatctttgcctggacaagagggctagcccacagggcaaaactggacgacaat

SEQ ID NO: 42795 - DNA, 123 bp, Glycine max
  Clone ID: LIB3139-050-P1-N1-G8
ctaaatcaaaccattttatttaactaccgaagagacaagattggttgggtatacaaggagcatgaaggacatattccaaacaagataggatgcgatgataaaacatcaaattggctaacacac

SEQ ID NO: 42796 - DNA, 464 bp, Glycine max
  Clone ID: LIB3139-050-P1-N1-G9
gtgattttctcaagagaaactttaagcagatgtctaatgttttgtgggtggctcctgaggacaaggcgagtttatggtcacaacttcattatgtttcgtgtaataatctggaaatgcaagaagcttatcttgtcaatctcgtaaatgtgttacgagaattgtatttgcacagtccagaggaagctcgccaattgagaaggaaagctctctctcgtattgaatggctgcaaaaagctgatgtgcctaccatagcacagattgaagagttccattcgatgcagaggatgatgaatgctcctgattcaaatgataatatttgattactgttgagcattgattggttgggttacaaggagcaggtaaagcttttccaaacaaaaatgtttttgatgataagcttgtgttggctaacacacaagaattctttgatggaaatttccagtggattcttgttaccaattttt

SEQ ID NO: 42797 - DNA, 473 bp, Glycine max
  unsure at all n locations
  Clone ID: LIB3139-050-P1-N1-H1
atcttaacccttttccgccatgcgagcgacacaaccacacgccaataatcgcacaacacaaatcaattcagcctccaattaacgcctccttttgattcggctcggttgttagagtaattggaggagggggtacaaatacaagagcgtaattgtttgtgctttcatctatgtttgggggtgttaacgctcctgctaatagtccacacttacgcaagtctgggagtagacctgttgtttatgatcttgatgaacatgaggtggaaaatggcatcgaggagggtttattgcatcccgtagaggcagatgattcaaagggtggtacgcccgtgagtgctgctgcaatgatgccatcgcccatnttgttgtggagattcaaggtactattgntcttcatttggggcttcatcttgtgcaagggtggatgggattctgtcatgagaatgagtgcagacaagcgggatttgtcctttatg

SEQ ID NO: 42798 - DNA, 424 bp, Glycine max
  unsure at all n locations
  Clone ID: LIB3139-050-P1-N1-H10
ctgggaatgcagcagtcaataggagtgattgggcctcattggtgcaagtgtttttaacaaacagcaacagtacagagcatttcgatgcatgtaagtggacaaaatcggaaccacattcctgggaattgatcttcccaatagaggtatgtggtcctaataatggttttgaaatgtggagttctgagtgggcaaatcaaacttcatggcacttgagtttccttattgacaatcccaaacagtctacagtttttgatattctcttgggaatttctcaagattntgaaattgctggtaatactcttatgccagctntttctgttccacaggctactgccagatcttctgaaaatgcggaatcctctgcatgatctggaatttgngttttctttcgtttgttcgtttggttaattcaataaaaggaaat

SEQ ID NO: 42799 - DNA, 402 bp, Glycine max
  Clone ID: LIB3139-050-P1-N1-H11
cagttatttgcaatagcatttttaatgagatgctcattagatatagctatgaaaaattactgcgccaggctaaagctccaagtatgtttttacaatccttcaaaaattttgtttctttgtgtgtgtatggtgatgataacttaattagtgttcatgaatatgtcaagccttactttagtggttctaaattgaaaagctttctagctggtcataatatcaccattactgatggtattgacaaaactagtgcaactttgcaatttagaaagttagcagattgtgattttctcaagagaaactttaagcagatgtctaatgttttgtgggtggctcctgaggacaaggcgagtttatggtcacaacttcattatgtttcgtgtaataatctggaaatgcaagaag

SEQ ID NO: 42800 - DNA, 311 bp, Glycine max
  unsure at all n locations
  Clone ID: LIB3139-050-P1-N1-H12
acctcaatggcaccatgttctgcagtgccagatgaacaggttgttgttggagaggagatcgagcatgtaagagtggtcactttgaacaggccaaggcaattgaatgccatctcaccagaactggtttctcagctagcaacatatttggaaaagtgggagaaggatgagaaagcagaactagttattataaagggagctggtcgggctgtttgtgctggaggagatctgagagtcttctatgatggaagaaaaataaaggatgcctgccttgaagtgatctacagattntactggctttgctatcacattag

SEQ ID NO: 42801 - DNA, 528 bp, Glycine max
  unsure at all n locations
  Clone ID: LIB3139-050-P1-N1-H2
ctcgagccgctctgattcagtgactctgatctctctctctctctctgaaaggactaagatgggttcggtttctctgaaagtaggagatggaacagccagattccatagagcaacactgtgttcttcagctgttaacattctcatgatattctctgtcatcaccaccaacctatttgctctctatgctttcacggcttccccaaaacacccccatcactctctccttcaccacaatgcccacaaaaacatctctctcatctctgaacaagtctcactcattctcagagagatcgatttgtcccagaagaaactggcccagatggagaaagagcttctaggatatgaaagcattgatctttcgagacccaacattgcatccgagctcaaactcttactccagcgccaccagctccctctggngaaagactctagaactgggatcactgagatggtgccatctgttggccacacctgtgagaaaaattcagactngttgtctcagttcatgaattacaaggtttttggagc

SEQ ID NO: 42802 - DNA, 375 bp, Glycine max
  Clone ID: LIB3139-050-P1-N1-H4
gatcggtgttcacttgatctcatcataatcgtcagcgtcaattgaagaagatgccgatcagaaacatcgccgtcggaaggcctgaagaggcgactcaccccgacacgttgaaggcggctttggctgagttcatctcaaccttcatcttcgtgttcgccggctcaagctccggcatcgcctacaacaagctcaccgacaacggcgctgccacccctgccggcctcatctccgcctccatcgcccatgcattcgccctcttcgtcgccgtctccgtcggcgccaacatctcctgcggccacgtcaaccccgccgtcaccttcggcgccttcgtcggcggcaacatcaccttcctccgcggcatcgtctacgtcatcg

SEQ ID NO: 42803 - DNA, 221 bp, Glycine max
  Clone ID: LIB3139-050-P1-N1-H6
acttgcagaaggatgtacattattaatatggagccatccaatgtgactctgttttaacaacaatttaggtcaccttggtaattttctgttaattagcaaaatgatctcctttacaacaacctatatgcaaggttctgtctgacatgttcacaagtcttttatacaaggtcttcaagacctaatgtttgaagaacctgacatgacatagttttattggaaac

SEQ ID NO: 42804 - DNA, 468 bp, Glycine max
  unsure at all n locations
  Clone ID: LIB3139-050-P1-N1-H7
acggccccaagagacagcctagccaccgcgttcgccggaccagggcggggcccatcaccggaccacaaagagatccgctaccgaggcgtccggaaacgcccctggggccgctacgccgacgagatccgcgaccccggcaagaaaacgcgcgtctggctcggcaccttcgacacagccgaggaagccgctcgagcgtacgacaccgcagcgcgtgagtttcgcggtgccaaggccaagaccaattttccgacaccctcggaactcatccttaacaacaacattcgcagtcccagccagagcagcaccctcgactcttcctctcccccgtcaccgccaccgncgcttgaccttaccctaacccctctctccgtggccgtcaccgtattcccggtggctcgtccggttctattctttgacgcgttcgcgcgtgcggacgccatgatcgccgtctcccgccgcgagatgtgt

SEQ ID NO: 42805 - DNA, 532 bp, Glycine max
  unsure at all n locations
  Clone ID: LIB3139-050-P1-N1-H8
gagctatgcaggaaagtattttccagagctggctgaactcatccgtgatggaacaaggacccctccctctatattgatctcaagggtattctgttgggtaaccctgaaacatctgatgctgaggactggatgggtctggttgattatgcttggagccatgctgtgatatctgatgaaactcatcaaacaatcaaaacaagttgtgactttaacagtactgatccatggcacaatgaagattgtagccaagctgtggatgaagttctcaaacaatacaatgaaattgatatctacagtctctacacctctgtctgctttgccagtacagcaagttctaacgatcaatccatgcaaacttccacgaagcgttcatctaaaatgatgccaagaatgttgggtggctatgatccatgcctngatggctatgctaaagcattttataataaaccagatgttcagaatgctcttcatgccagcgatggtcacaatctaaagaaatggagcatttgcaacgacaagatattcaatgact

SEQ ID NO: 42806 - DNA, 540 bp, Glycine max
  unsure at all n locations
  Clone ID: LIB3139-050-P1-N1-H9
accgcctttatgggctgtttttgaaaagggaatatataacgccgggggggaaggtgaaattgattttgtaagtgaaccatggccatcgatatcagacagtgctaaagatctagtcaggaagatgctgacacaggatccaaagaagcggattacttctgctcaagttcttgaacacccatggatgagagaaggtggagacgcatctgataaaccaatcgatagtgcagttctatccagaatgaaacaattcacggcaatgaataagctcaagaagctagcattgaaggttatcgctgaaaatctatcagaagaggagattaaaggtctcaaagcaatgtttgccaatatggacactgacagtagtggcaccatcacctatgaagaactgaagactggctnggctcgaatcggatcaagactatccgaggctgaagtgaagcaactcatggatgctgctgatgttgatggaaatgggtcaatngactatctngaattcatttctgctacaatgcataggcacagactngaacgtgatgaaca

SEQ ID NO: 42807 - DNA, 392 bp, Glycine max
  Clone ID: LIB3139-051-P1-N1-A1
agcaaacgcagcattgtgagatagaaagagagagagaaagagagagagagaaagacccttacccttctctatcgctcgctttcctttgacgcttctgacccttgctttgtctgcgtcttccttctttctttctttctttctctgagagtcagaaaggctctcccagactcttcttcccgtcgcaactccctgatcccctccttcatctactcctcttcctccaaaacgctccctctccaccacatgctcaacaccgcctccgctgccgccgccgccgctccctccccgccgccggccaatctcgacgccggatcgcgtggcctcatgattccctctcccagcgagtcacgcaagatcgagttgtactcccccgccttctacgccgcctgcac

SEQ ID NO: 42808 - DNA, 288 bp, Glycine max
  unsure at all n locations
  Clone ID: LIB3139-051-P1-N1-A10
atcttcacgagtttcgtctccgccacgcattgaacagggggaaagaatctttttgactctttcttagcaccaaacagctgccacagtctaatgcagaactagtcactgatgcctatcaaaagaaagatgcancagaggcagaaaatcannccttaagcaccggtgaaaattcatttattatatncacagtcatctcngccnnaactagtttgttcagcaacagngncaatttccccaacatggctggatcatcgcaatgcagtgggggactcacctttggtgctggag

SEQ ID NO: 42809 - DNA, 393 bp, Glycine max
  Clone ID: LIB3139-051-P1-N1-A12
gataaacagtctttgttgtggtgatggaaaattgatgcgtgaaaggacacacctgctgttggcttgttgttcaaggatggcaatttgtaagaaagatatttggagagttgaatgtggaatcccttctggatttccgctcacagttatttgcaatagcatttttaatgagatgctcattagatatagctatgaaaaattactgcgccaggctaaagctccaagtatgtttttacaatccttcaaaaattttgtttctttgtgtgtgtatggtgatgataacttaattagtgttcatgaatatgtcaagccttactttagtggttctaaattgaaaagctttctagctggtcataatatcaccattactgatggtattgacaaaactagtgcaac

SEQ ID NO: 42810 - DNA, 382 bp, Glycine max
  unsure at all n locations
  Clone ID: LIB3139-051-P1-N1-A4
taaatgtccagctttttttttcatagcatttggaaatttggctgagaacaccttcaattttgaggcttttccccacaagctggtgcagtttggagagattcaggaaaaagttgtgttgaaattttcacaagaggaatttcttacagctaaggcaactcaagtgcgtcccgcaacgactctgttggctgatgggagcccatatttgtatgctatggtgcatgatagntcagagtctacaataccaggtgattttgtcattggtgttaagttgacaaccatatacaatatgtgtgcatatgggctcaatcctggtatttcaggttctcgtcttttgggcaccattcctcaatccatttcacagcaaactggttggaatcaaatg

SEQ ID NO: 42811 - DNA, 321 bp, Glycine max
  unsure at all n locations
  Clone ID: LIB3139-051-P1-N1-A6
caaggaattcaaattccagggagtgattgtactttgcacctcgttggaaaagaaaggccctcctgttgctgttcctgttttaggagagggaaccacaccaacttggaagatttgtgcccntgactttatttcatgcttttttttgattttttatctcacaacatatagaccgggaaaaatacacttttttttttttaaacctccaattatgcttttacaattcttcaaaaattttgtttctttgtgtgtgtatggtgatgataacttaattagtgttcatgaatatgtcaagcccccncttttttttttttttaatttaat

SEQ ID NO: 42812 - DNA, 399 bp, Glycine max
  Clone ID: LIB3139-051-P1-N1-A8
gtatattcttctgagtggtgtaccacctttttgggctgaaactgaaaagggaatatttaatgccatattggaaggtgaaattgattttgtaagtgaaccatggccatccatatcagacagtgctaaagacctagtcaggaagatgctgacacaggatccaaacaagcggattacttcttctcaagtccttgaacacccatggatgagagaaggtggagatgcatctgataaaccaatcgatagtgcagttctatccagaatgaaacaattcagggcaatgaataagctcaagaagctagcattgaaagttatcgctgaaaatctatcagaagaggagattaaaggtctcaaagcaatgtttgccaacatggacactgacaatagtggcactatcaccta

SEQ ID NO: 42813 - DNA, 406 bp, Glycine max
  Clone ID: LIB3139-051-P1-N1-B1
gccaaaacagaacaaattagagtcaagcggcgagcaatggcgacatcggtggtgcgatcgggttttcttcgtagcgccctacgaggaagagctcgtagctctcaggttcccaagcgaaactttgcttcctctggtcatcacgatgatgcatatgagacggccaaatgggagaagattacatatttaggcattgttggttgcaccggtttagccgtttataatctatcaaagggccacccgcacttcaaagaacctcctgcatacccatatttgcatatccgcaataaggaattcccctgggcaggtcccgatggactatttgaaacgaagcaccacgacgagcattaatggtttaatgaaggtatttgtgacaccggtgggctttggatttgtcaatgttcaagaa

SEQ ID NO: 42814 - DNA, 412 bp, Glycine max
  Clone ID: LIB3139-051-P1-N1-B11
gttctatatattattgtattgacaatgaggcctgctcttgcgttggcttcctcttctatttgctttcttgaagttagctgccactacggaatcaagaaaagatccaggggaatattggaaaatgatcatgaaagatcaggaaatgccagaaggacttcaaggtcttgtttcatttcaatctgaaaataaccctaagactcaagagcagcttggtaaaggttccaaaaaccattgtgaagagtctctagttcaaatacacaagttaacagtgacttcgaacccataccaagtgttaccaaatatgatgatttggaattcaagtcaagcattatcaagaacgatgattttgaatcgagaccaagtgttactaagtatgatgattttgaactcaagtcaaataccaagtacgatt

SEQ ID NO: 42815 - DNA, 397 bp, Glycine max
  Clone ID: LIB3139-051-P1-N1-B2
ctggagccgaaaagagctaggctgacccatctcactgggacaaaatctcccagggtggactcaagcgtattcatgagaaggacacatggcaaatttactctgacaggctctagacactcactggagtgtatggcttctggaagcatgtgaccaatcttgaacgccgcgagagcaaacagcacctcgagatgttatatgctctcaagtaccgcaaattggctgagtctgtgcccctcgctattgaagagtaaaatcatgtttgcagagaacatgaatggacaaaccggcttttggtcgtttggagtcctatggagctttcataaataaagccattgaatgttgattgtgatctggtttcggatctaaagagtctaaaaaaaaaagagtcgatgatttt

SEQ ID NO: 42816 - DNA, 355 bp, Glycine max
  Clone ID: LIB3139-051-P1-N1-B3
tctctttctttctaagaaaaatttcttctttttttattccccccccccttttttaatttttttttattctaaaaaaaaaaaaaaacacccacctcccactattgagcccaaaaccccccccttaattcccctcaaaacccccccccaaaccaaattttcttatttaaacccccccccaccctccccttttctttcaaaaaaccccacacccccaaaatttttcttttttttcccctccacacccccttttttcccttctcacccaataattatcccccccttctcttccccccctctaaaaaaaattaaaaaaaaaaaacttcccaaaaaccttcaaaaatctatttcttccccc

SEQ ID NO: 42817 - DNA, 398 bp, Glycine max
  Clone ID: LIB3139-051-P1-N1-B7
gcaccatagcattcatatatgggcacccatcagccaacagagtggacaataccaggtgattttgtcattggtgttaagttgacaaccataaacaatatgtgtgcatatgggctcaatcctggtatttcaggttctcgtcttttgggcaccattcctcagtccatttcacagcaaactgtttggaatcaaatggcaacagtgagaacaccattgaattttgattctagcaagcagagcttttgtcaattttctattgaccttctcggtggaggaattttagtggacaaaactggagattggatcacacttatacaaaattctccaattagtaacttgttgagagttgctgcttggaagaaaggttgtttaatggtcaagattgtgatgtctgggaatgc

SEQ ID NO: 42818 - DNA, 94 bp, Glycine max
  Clone ID: LIB3139-051-P1-N1-B8
taggcatgaccttcttgttgagtatcctctgcctatctgagaaggccacacctcttttaattgtcgtaatgatgtgtgaagtgtgtgttatttt

SEQ ID NO: 42819 - DNA, 396 bp, Glycine max
  Clone ID: LIB3139-051-P1-N1-B9
ctgcttggaagaaaggttgtttaatggtcaagattgtgatgtgggggaatgcagcagtcaaaaggagtgattgggcctcattggtacaagtgtttttaacaaacagcaacagtacagagcattttgatgcatgtaagtggacaaaatcagaaccacattcctgggaattaatcttcccaatagaggtatgtggtcctaataatggttttgaaatgtggagttctgagtgggcaaatcaaacttcatggcatttgagtttccttattgacaatcccaaacagtctacagtttttgatattctcttgggaatctctcaagattttgaaattgctggtaatactcttatgccagctttttctgttccacaagctactgccagatcttctgaaaatgcgg

SEQ ID NO: 42820 - DNA, 405 bp, Glycine max
  Clone ID: LIB3139-051-P1-N1-C1
gaaagagggaaactcaaagtcatcatccaccatggcaaattctgaggcattttccgacgagattccgaacatgagcatgagcacaagcttccctttctcccctgctttctctagcatctttgacatgatgccacctccaccaccttcctcatctcacgatcctaaagctcccaacaactttgctggcttcatggacttgctcgctgtccctgctgattattatgccccttctttattcgactggccccaaaacaccaccgccacgtcagcaccaccacctctcaccgcccaaatcaaccaccctcttccgtctccggccagctccaatgtccccgacggctccgaggttctcaacactccggcatctcccaactattcgtctatttcgtcgtcgtcgaacgaagc

SEQ ID NO: 42821 - DNA, 392 bp, Glycine max
  Clone ID: LIB3139-051-P1-N1-C12
aattaacatcctgcgtgttgttaattccctcacaattcatttgcaattcttgtgtggaaacaatgcttctagagctagagacttggacagctttggtttttttgtttttgcttgtgttgattctaaaggagtcgatcatgggaggtaagagttcaaaagggtctgaaagaaggcatgtttcatcatatggatctgctggttcttcatcttcatgggatgactacgaataccctcaatcaccaaatgcatacccacaacaaaatccttatcatacgcctcttcaccaccgtgcaccggctccattccacgactattcacagccaaaaaggaaattggataggagatattcaagaatagctgatgattaccattccctggatgaggttaccact

SEQ ID NO: 42822 - DNA, 400 bp, Glycine max
  Clone ID: LIB3139-051-P1-N1-C3
ttcaatttctttctctctagacgttactttctctattctcaaaggcagacacagcactttctctctcatcttaactctctcccatgtttcctcagtttcatcgatggagagtgaagccttaactctgcttattccgtgtcccagatctcgttgttgcttccgattctttgattcttcgcttctttcttcttctcacttcacattccgattcgtcgcagattcttttggtttctaaacatcatgatcgtcactgcctccatctgtaatcgctaattgaaggcatgggaggtggtccagagaaatcaaaatctccttcaacttcgtcttccctttaggtgtaaaagtcacagctaacgatatagaaatgaaatcgctaactgttaacactgaagattctttt

SEQ ID NO: 42823 - DNA, 466 bp, Glycine max
  unsure at all n locations
  Clone ID: LIB3139-051-P1-N1-C5
gagcttgacgncgcaagcaccgcgtgccttagcctggaattccgcttcaagtggccttttccttatttgtttttggtttaagaaaaggtgagggaggagagtggttcttttctttggctcgttaaatcgattgatttgaatccgacacggccccagtaaaaaagggtttagttgtgttcgaaattcgaatttccaatcgcaaagcataagaaaaattaagaaaaaatgacggtgaaaccaattccatcttcagatatgtggattggttagtcaacgatggagttggaaaccccgcacagtctcatccctctcctcattttccccaattccataccctaacccttattccaaactgcttcccaccaacaccgtcgctcgcagggttcgattcgcgccatttcacgcttcctcgtcgccgcttccttctgccggtattgttcgaaacatcaagttctgtcagtggtgt

SEQ ID NO: 42824 - DNA, 201 bp, Glycine max
  Clone ID: LIB3139-051-P1-N1-D10
gaaattttcacatgtttaatttcttacagcttggtcaactgaagtgcgtcctgcaacaactctgttggctgatgggtgtccatatttgtatgctatggtgcatgattagttcagtgtctacaataccaggtgattttgtcattggtgttaagttgacaaccataaacaatatgtgtgcatatgggcttaatcctggtattt

SEQ ID NO: 42825 - DNA, 409 bp, Glycine max
  Clone ID: LIB3139-051-P1-N1-D11
aatctctgcctgtgtgttcactatagatgaaaagaaagttggttagtcaactttagctcttgctttgactgaaatccccaagagactcatagtcattggggcaggctacattgggctggaaatgggctcagtatggggccgacttggctccgagataacagttgttgagtttgcatcggagattgttccaaccatggatgcggaggtccggaagcagtttcagcgttctcttgagaagcaaggcatgaaattcaagctgaagactaaggtggttggagttgatacttctggggatggtgtgaagctaactcttgaaccagcagctggtggtgatcagactacacttgaagcagatgttgtcctggtatctgctggtaggaccccattcactgccgaacttgggttggac

SEQ ID NO: 42826 - DNA, 398 bp, Glycine max
  Clone ID: LIB3139-051-P1-N1-D2
cgaatccggttcgagattaattatcttcctctaagaacgcgtccaattttttctctctcttcctctttagcttcatcgccatggcatcaccagcaagaaccttctttgccttcattctcgccgtcgtcgctttcttcttcgccgccgccaatgctcaagacctctccccggctccgagtcccgatgccggagcggcgggatccgtttcgagctccgtcgccatgatcggagcttcggttgtgctgtcattgatggctatcttgaagcattgaattcgttaatttcgttgggtttgtacaaaattgattcgttttatatacagagtggtgattatgagctttggtatctatacttataggtataccggagagagattatacagtatttaatatacttat

SEQ ID NO: 42827 - DNA, 297 bp, Glycine max
  Clone ID: LIB3139-051-P1-N1-D4
ccctgcactcaaaaaggcagccattgttatatcttgtgctgatccaactgatccacctcggagtgcatctgatattgttttaaaagaacctagtcttagtgttattttaagtgcagtgttgacaagccgagctatcttccagagaatgaaaaattatacaatttatgctgtctcgattacaattcgtatagtacttggtttcatgttactggctctcatatggaagttagattttccaccttttatggtgcttattatcgccattctaaatgacggtactatcatgactatttcaaa

SEQ ID NO: 42828 - DNA, 390 bp, Glycine max
  Clone ID: LIB3139-051-P1-N1-D5
cttaacctttaatattgttttacgctattctctccaaatccatggtcttcggtgccaccggagtgggaaagcctggccttctacttaaatcaacggacaagcgctttcagcccgtccatgactggaccatcggggtggaatttggtgccaggatgatcacatttgataacaagccaatcaagttgcaaatatgggatacggctggtcaagaatcattcagatctattacaaggtcttattacagaggggctgcaggtgcattgcttgtttatgatataaccaggatggagacatttaatcatttggctagctggttggaagatgcaagacagcatgcaaatgcaaatatgactattatgctgattggcaacaagtgtgatcttgctcata

SEQ ID NO: 42829 - DNA, 371 bp, Glycine max
  Clone ID: LIB3139-051-P1-N1-D6
gtttaacctttccggttggtttggccaaacctggggcaccttggcagtttagaaagttagcagatggtgattttctcaaaagaaactttaagcagatgtctaatgttttgtgggtggctcctgaggacaaggcgagtttatggcacaactcattatggttcgtgtataatctgggaatgcagaaagctatcttgtcatctcgtaatgtgtacgagattgtattgcacagtcagagaaagctcgcattgaaaaagaagctctctctcgtttgaatggctgcaaaagctgatgtgctccatacacagatgaagagtcattcatcagagatatgatgctctgttcaatgtatatgactctgtgacatgattgtg

SEQ ID NO: 42830 - DNA, 376 bp, Glycine max
  Clone ID: LIB3139-051-P1-N1-D7
cgttgccatcctatatattgtcaaaatgggacaagactgaatgtaattcctgtgctggcatctcgttcccaagctctcaagtattttgaatcatcattccaaaaattcaatcaagtcaaaagttagagtactgcatttctttctgacattttggcatgaaattatgaattaaggaactatttttcgtttctcttgcatgatttcctctactgtgacatgatgccctttaccttcagatacctgtatgttcgatggggttttgaactgtcaaagatggtggtgttcgtcggagaatgtggtgacacagattacgaaggacttcttggtggtctacacagaagtgtcatactgaaaggagtgggaagcagtgcaatca

SEQ ID NO: 42831 - DNA, 404 bp, Glycine max
  Clone ID: LIB3139-051-P1-N1-D8
ctgttgccaatgaggctccttggatttccacaattggtgcgaggacactagacaggaaattcccagctacagttcacatgggaaatggacaaatgctctatggagaatccatgtacccactgaatcatcacccaatgagcagtggaaaagaagttgagctggtttatgtgtctgaaggagacaccgagagtcaattttgcctcagagggtctcttccaaaggacaaagttagaggcaaaatggtggtatgcgatcgaggagtaaacggaagagcagaaaagggccaagtggtgaaggaggcgggtggtgttgctatgatccttgcgaacacggagataaacttgggagaggattcggttgatgtccatgtcttgcctgcaactttggtaggatttgatgaagca

SEQ ID NO: 42832 - DNA, 351 bp, Glycine max
  Clone ID: LIB3139-051-P1-N1-D9
tccaaaacaaaatgaagagcctcctcttctctctcttcctgtgactcttcttagcctcctccgccgtcgccaccgtccccgcccacaacatcacccgcatgctggccgcacaccccggcttctccaccttcaaccactacctctccgtcacccacctggccgaagagatcaaccgccgccagaccatcaccgtcctggccctcgacaatgccgccatgtcctccctcctcgacaagcacctctccctccccaccatcaaaaacgtcctctccctccacatcctcgtcgactacttcggcgccaaaaagctccaccagatcaacaacagcaccaccctcgtctcctccatgt

SEQ ID NO: 42833 - DNA, 411 bp, Glycine max
  Clone ID: LIB3139-051-P1-N1-E10
cagggcacttcccgatgtgttaagagaatgcctctttctatagggggaggagctggtgcaaagaatgctattctcatgaatatgccaaatgctgttctttcaatgtggagatattttgttggagatctcgtctttgaagtttctaagatgacttctccctacattaaatgtacagtctctttcttcatagcatttggaaatttggctgatgataccatcaattttgaggcttttccccacaagctggtgcagtttggagagattcaggaaaaagttgtattgaaattttcacaagaggaatttcttacagcttggtcaactcaagtgcgtcctgcaacaactctgttggctgatgggtgtccatatttgtatgcaatggtgcatgatagttcagtgtctacaataccaggt

SEQ ID NO: 42834 - DNA, 410 bp, Glycine max
  Clone ID: LIB3139-051-P1-N1-E11
tggtgatgataacttaattagtgttcatgaatatgtcaagcctgactttagtggttctaaattgaaaagctttctagctggtcataatatcaccattactgatggtatttacaaaactagtgcaactttgcaatttagaaagttagcagattgtgattttctcaagagaaactttaagcagatgtctaatgttttgtgggtggctcctgaagacaaggcgagtttatggtcacaacttcattatgtttcgtgtaataatctggaaatgcaagaagcttatcttgtcaatctcgtaaatgtgttacgagaactgtatttgcacagtccagaggaagctcgccaattgagaaggaaagctctctctcgtattgaatggctgcaaaaagctgatgtgcctaccatagcacaga

SEQ ID NO: 42835 - DNA, 396 bp, Glycine max
  Clone ID: LIB3139-051-P1-N1-E12
ctccaattcctcatctctagagactcatctcaaactagcgaaggcaaaacttcccagtctctcatcactcatcaacctttgccctaaccatggtgctctctctcacacacacccactctttcactaacaccaaaatgaaagtccatcaatggcatttgggcttttccagcataagaagcctcccgtaggggctcaaatgtttctccatgtttggagagtcatgcattccttttgtctcaaaaaaatatctgtttcatcttcaatggaagaagagaaccaaaccaacacaaaagctatcggatatagctgacttgttggaaaaaaattaagaacagcaaagcttggccctggaaaggccaagctcaaaagaaccatcttcttaacttgggcccaaga

SEQ ID NO: 42836 - DNA, 358 bp, Glycine max
  Clone ID: LIB3139-051-P1-N1-E2
ccaaatcagtggtctaaggagctttcacggaggaccactcctctttgccacactcaacctttccctacctccaaccactctcatcagtgcagtatgtgcatcacttatggacaccatgctaggaacagaccttttccaaatcatttcaaagaaagatggggtgcaacttctgccacgtggtgtcaaagcatgacataatgccaggttgctctttgcccctataacctctctctctactcagttaaattccctgctacagtttggcacttgtcgatgacttcaccagatatggggaagcttgcaaatcagatatctgaaaaagagaaagataagttgttcactgctgtagtaaattact

SEQ ID NO: 42837 - DNA, 446 bp, Glycine max
  Clone ID: LIB3139-051-P1-N1-E4
aagagcttgacggcgatgcacgcgtcgtaggttgggatttggcttgaggctcaagccgaatcggttctagattgactttgtcatttaatccaaacgggtgttctgttgcatggagttgggaatttttgaagcgtcccggttttcattgggatatcattggtgtcactgggtggactgccaccccaatgcaggatgttcaggttacaattgattggtttatttcctctcaggaatgtgttcccaggacctattgtgttttaaatccacaaaatccttttgtgttaaataggtggatgggaaaactgactttcccccagggcacttcccgaagtgttaagagaatgcctctttctatagggggaggagctggtgcaaagaatgctattctcatgaatatgccaaatgctagtctttcaatgtggagatattttgttggagatctcgtc

SEQ ID NO: 42838 - DNA, 384 bp, Glycine max
  unsure at all n locations
  Clone ID: LIB3139-051-P1-N1-E5
ttttaagaggaattgaaccagggattggattctgagtagtcccctcttgatagtgaaaagacaatccaacaggtagtccagtttttatagaaacaatcaatgatacctaccaaacttctcttttcttcctcaactaataatctnccattcctagttcataggatccaagaggtcctatatttgtagatgagtcctaagttttggcatggcatttatagctatttcatgggaaaggatgagagtcaattccctatctagagaaaatctagactttcacaaatggcaagcacaagaagcatgattcttctgcctagttttcataccctttggcagagaagagctgcctccataagtctgtctggaccaggtggcccatttagtttt

SEQ ID NO: 42839 - DNA, 126 bp, Glycine max
  Clone ID: LIB3139-051-P1-N1-E7
gtacgtaggtttaattcgctcgagctcagccgtcttattctcttaagagatgggttaaagaattgattagaacaagagatcttgaagaaaaatgagtacgatctgggccaatccctaaacgctctc

SEQ ID NO: 42840 - DNA, 336 bp, Glycine max
  Clone ID: LIB3139-051-P1-N1-E8
gatgggtgtccatatttttatgcaatggtgcatgatagttgagggtctacaataccaggtgattttgtcattggtgtcaagttgacaaccataaacaatatgtgtgcatatgggctcaatcctggtatttcaggttctcgtcttttgggcaccattcctcagtccatttcacagcaaactgtttggaatcaaatggcaacagtgagaacaccattgaattttgattctagcaagcagagcttttgtcagttttctattgaccttctcggtggaggaatcttagtggacaaaactggagattggatcacacttatacaaaattctccaattagtaac

SEQ ID NO: 42841 - DNA, 392 bp, Glycine max
  Clone ID: LIB3139-051-P1-N1-E9
atcacaatttcaactgcaaattttgaacaaaacttaattaagaggtccttctccggagccatggcagatctcaagtccacattcttgaacgtctattctgttctcaaatctgaactcctccacgaccctgcttttgagttctccgatgatgctcgtaattgggtcgaccggatgctggactacaatgtgccgggaggaaagttgaaccggggactgtcagtaattgatagctacagattgttaaaagaaggacaggcattaaatgatgacgaaatttttcatgccagtgctcttggttagtgtattgaatggcttcaggcatattttcttgttcttgatgacattatggataactctcacacacgccgtggtcagccatgctggtttagagt

SEQ ID NO: 42842 - DNA, 399 bp, Glycine max
  Clone ID: LIB3139-051-P1-N1-F1
ggaaccaccgccactttgggctttaaagcaagttccggttcaggcgggaaatccttcctcgaaaccgaaacaccgccaccggcttcgaattccggtggtttcagcaatgttcccgtcgatcaaagtacaggggattatgaaaattttgatgattaccaatatgccactgaccagtatgctagttattatggcaattttggttcgggtgccgagccagggagttcgggtactgaaccaaaggctggggttgctgcttatggaactgaacagtatgggaattatggtgatgcctatgcttcctatggggattatggacagtatgggaataattggggtgacgtgtcggcgccaccggtgctggaagcttctgggattgatgtcagtgtggtaaggattcct

SEQ ID NO: 42843 - DNA, 410 bp, Glycine max
  Clone ID: LIB3139-051-P1-N1-F10
ggtggccacagttggtattcctgagaatacaggtatagcataggcctgtgctatgaatagttcttttagggggcgcgccagttctgatatttacaccatctgctctcaagactgtgaattatggaatcctgcttgcacaaaagcaatgactatgtcatttaatccaaacccgtgttctgatgcatggagtttggaatttctgaagcgtaccggatttcattgtgatatcatttgtgtcactggatggactgccaccccaatgcaagatgttcaggttacaattgattggtttatttcctctcaggaatgtgttcccaggacctattgtgttttaaatccacaaaatccttttgtgttaaataggtggatgggaaaactgactttccctcagggcacttcccgaagtgtta

SEQ ID NO: 42844 - DNA, 415 bp, Glycine max
  Clone ID: LIB3139-051-P1-N1-F11
ttcttatcttcatcctacgccaatagcccaaaaccttggtctcgttgtggttcatttctctcttccagatgccacttgccgttcttcaccctcacgattttctcaggaaaaacccatctaaccagtaccagaccataatccctcactctcccaacatgaatcctaataagtctcatcggacttcccgaaaccgtaagaagcggcccgatccaagcccacaaggcgttgtcagcccagcccggctcacattatccccgaaaccccaagtcaaaaacaagccgcagcagcaactcgtcatgggtcaggtcaaaatactcaaacgcggccaacttttgacccaaacgacgccggatccaccgccgcagacggaaatcgtcgatcagaagttaactccgcagacggaaaccgtcgaaaa

SEQ ID NO: 42845 - DNA, 412 bp, Glycine max
  Clone ID: LIB3139-051-P1-N1-F12
aggttttgagtttgatcctgtcaatggcttcctcttcttgtctgctcttacttgagctcaaatttcttgcgccgcaaattacccccaaacgacgccgttctctctctagattttgctctcagaactccaggtacaatgttgctctccgtacgcgaatccgcgccttcaaggaagaaggtgccgtcattgacagagtgaacgacgtgaaatggagcggaaacggagttgccgcgagcgaatacggtgctaacggctccgttaacggttacgcgaacggcgtctcgggcgttagggagagtgagaatgcgaatggaagcttggtgaagtacgtgaacgacaatggcaatggcaatggtgtagcggcggaagtggttgaagattctgcagaagcgtcaaagcggatggaagatgg

SEQ ID NO: 42846 - DNA, 391 bp, Glycine max
  unsure at all n locations
  Clone ID: LIB3139-051-P1-N1-F2
aaccccaaccttccgcccttttttttttttttttttttttaagattttttttatttttttttattatattaaatatattttaaatttttttttttttttttttaataaatttttttttttttttatttttttttttttttttttttttattttttnnnnnnnnnaaaaaaaattnnngcaaaaaaaatggggaacaaacacccttaattttctcaaaacaaactcttaaaaaaaatctttccccatcgttaaaaaaaaaccccccaaaatttttataaaaaaacccccccaaaaaaaaaaaattcccccctataaaaaaaccaaacccctttttcctttttcaaaggggacccccccccccttaataccacaacccccccccccaattttt

SEQ ID NO: 42847 - DNA, 409 bp, Glycine max
  Clone ID: LIB3139-051-P1-N1-F3
cttgaagggggtattccatttaacaaagcatatggaatgacagcctgtgaataccatggaacggatccaaggttttaacaaggttttcaacaaggggatggctgatcactctaccattacaatgaagaaaattcttgagacctacacaggctttgagggacttaaatccctggttgatgttggtggaggaactggagctgtagtcaacatgattgtctcaaagtatcccactattaaaggcattaattttgatttgccccatgtcattgaagatgccccatcttatccaggagtggaacatgttggtggagatatgtttgtcagtgttccaaaagctgatgctatttttatgaagtggatttgccacgattggagtgatgagcactgcttgaaagttttgaagaactgc

SEQ ID NO: 42848 - DNA, 410 bp, Glycine max
  Clone ID: LIB3139-051-P1-N1-F5
ctccaagtctttctgttcactatgttattactaaagggttcatgacagtcgcttgaaaccttggtttgtatcaattgtagcactagtttgattttggtgccaagttcttgagctgcggtggtgctgaccctgaaaagttctccaagtccgacatgagataaggctgctgctgctgctgcttttcaaagatgttggagctggtttcaattagtagacaaatttggttgctgaatttcgtgttcatgtgtcttcaatagatggtatttttaaattgaaagcatagtgacaatttcttgaatgttgtttcttgacttttgaatttatctccaagacttcaaataagttggctctctcctacaatttcttaaatgcttatgttcaatattgagaatcaaacaagacttggtctc

SEQ ID NO: 42849 - DNA, 404 bp, Glycine max
  Clone ID: LIB3139-051-P1-N1-F7
gttctttcaatgtggttatattttgttggagatctcgtctttggagtttctaagatgacttctccctacattaaatgtacagtctctttcttcatagcatttggaaatttggctgatgacaccatcaattttgaggcttttccccacaagctggtgcagtttggagagattcaggaaaaagttgtattgaaattttcacaagaggaatttcttacagcttggtcaactcaggtgcgtcctgcaacaactctgttggctgatgggtgtccatatttgtatgctatggtgcatgatagttcagtgtctacaataccaggtgattttgtcattggtgttaagttgacaaccataaacaatatgtgtgcatatgggctcaatcctggtattttcaggtctcgtctttt

SEQ ID NO: 42850 - DNA, 404 bp, Glycine max
  unsure at all n locations
  Clone ID: LIB3139-051-P1-N1-F8
cgactcttcgcctttttttgctgcaaaacaacccttcgcctttggacgcccgccgctcaagatggttctcggtcctaccgcccgccgctggcttccctacatgaacttcaccgttgccgtgtccgcgcttgcgttccagaccggggtgctctacccgtggcacgaggagctggaccacgagttcaagaagctcaaggaggaacacaagcagcagctccacatctaccacgagatgaagctgaagcgtcttgaggacctggagaggaaggtcgccgctgagcgcgcctcacagaggttctccctctggctcccgtggcagagcgaagcctcgaccaactgatcgacctataacacacaccgtncaacatcgcgcaacccggggatgaccacattcgagccccaag

SEQ ID NO: 42851 - DNA, 408 bp, Glycine max
  Clone ID: LIB3139-051-P1-N1-F9
cggaacgttgctataatcgttgttgttttcagataaacacgtgagtcactatctatctatcaatcgatatctccgagttcagccgaaccaaactccgaagctatggcagagctccaaaccaaggttgaacctgttacggtcccggctccggtggatcccgagccaccgctagctgaggctccgccgctcgagaagaaagcggaggcggtgccaccacctgttccggctgcggcagaggaaaccaaagctcttgttattgtggagaaggagaaggagaatgagaagataccagaacctgtaaaaaagaacgcctcaggtggatcccttgatagagacattgctcttgcaggaatagagaaagagaaacgattgtctaatgtgaaagcttgggaagaaagtgaaaaatcc

SEQ ID NO: 42852 - DNA, 316 bp, Glycine max
  Clone ID: LIB3139-051-P1-N1-G1
ggaaagtaagagtttagagtttgaactctgtttatccaatgcacaaagcgtagatctctgtgttataaaggaatacaagaaaatcaaagacgaggatgaagttagggatgcgggcgttgaagacattggaaaatcatttttgctgtcagtcccagataacgatttgacttccgagggagaaaccaaaatgacagccaggagaagtaagggagccagtagtgtcactgatgatgttacagtgaagatctatgtatcaaaagtgaagtattaggacacgtactatgggaattaatgctatatctgagctgagattgaa

SEQ ID NO: 42853 - DNA, 413 bp, Glycine max
  Clone ID: LIB3139-051-P1-N1-G11
attccgctctccaactggactgcgcagggtgaagaatcgagagggcagccgccggtgaagaatcgcgcgattcgtctggaaatcgcgattccagcacgattcatgcccgatacagagatttaaccacgattcaggaacaaaaacgagacaacctccgattcgtattggtagcatctggaatcgtatcgaatcgtgcgatacgtatcctgaatcggttttggtttttctgtgagtatccctgttgatcaagaatgcaattctttggggtgtctgagattagtccttcacctcctgctccgacagcatcaggaaacaatggccatatgatgtatgtgttcaataggaatggtgtgtgcctgctctatagggagtggaatcgtcccttgcggacattggatgcccagcaagaccat

SEQ ID NO: 42854 - DNA, 409 bp, Glycine max
  Clone ID: LIB3139-051-P1-N1-G12
gagccagagaatgtttagattctagaggaaaccattagtatgtgggaagtgcctgcaataactggagaagaaagatattgtgcaacttcattagagtccatggtagattttgtcacttctaagcttgggaagaatgctcgagttatttctacagaagcagaaaaggaaagtaagtcccaaaaattctcggtgaaagatggagtgaagttgttagcagaagataaggtcattgtttgtcatcctatggattacccatatgttgtgtttatgtgtcatgagatatcaaatactactgcgcattttatgcctttggagggagaagatggaaccagagtttaagctgcagctgtatgccacaaagacacatcagaatgggatccaaaccatgtgtttttacaaatgcttaaaa

SEQ ID NO: 42855 - DNA, 401 bp, Glycine max
  Clone ID: LIB3139-051-P1-N1-G3
caaaatccaaacacactctctctccccatggcgttgaacaatggcagtggccgccaccggcaccggcctcatcgtcagcttcagtgagatgctcatcgacttcgtccccaccgtctctggcgtgtccctggccgaggcccctggcttcctcaaggcccccggcggcgcccccgctaacgtcgccatcgccgtgtcgcgcctcggcggcaaagccgccttcgtcggcaagctcggcgacgacgagttcggccacatgctcgccggaatcctcaaggaaaacggcgttcgcgccgacggcatcaactttgaccagggcgcacgcaccgccctggccttcgtgaccctacgcgccgacagggagcgtgagttcatgttctacagaaaccccatcgccgacatgc

SEQ ID NO: 42856 - DNA, 463 bp, Glycine max
  unsure at all n locations
  Clone ID: LIB3139-051-P1-N1-G4
gcttgtcgncgcaagcccgccggcggtaggctgggatttcgcctcaagtcatcatcggcctcgtcaagttcgccaatgttgacatccgcgtccgggggaccggtggtggtcacacctcgcanatgtccgctgtgcgccaggctatctccaaggcgatcattgcctactacgccaagtacgtcgacgagcactccaagaacctcctcaaggccagcctcgtcgcctacgaccgaaccctcctcgttgcggaccccagacggtgcgagcccaagaagtttggtggtaggggtgcccgtgcgaggttccagaagtcttaccgctaaactggatgctttggcgctttgcgtttgctacttactttggggctggcatggtcacggaatttagagatggccgtcaattgggtgtatggatcaaggatgcatctcggaatcaaaaacagccgcgatacccattcctgcga

SEQ ID NO: 42857 - DNA, 307 bp, Glycine max
  unsure at all n locations
  Clone ID: LIB3139-051-P1-N1-G5
aaagaaaaaaaaattgtcgctttctggtagtgttggcgaaagaagttcattttttaggagaatgcgggttgtcttcaaattttgctgggctcgttttgccaatgtgaggaagaattgttttggggaatgaagagcaaatttgattggttgagtttaggggtgtgttgatgaatctgcattntaagttctacggggagtagtgtggtgatcatgtgtgcctattcaagagaaagcatgtttcttataatgagttgtcgcaccatcgctgagaacgatcgcatctgctggacttccatggttatcagaa

SEQ ID NO: 42858 - DNA, 155 bp, Glycine max
  Clone ID: LIB3139-051-P1-N1-G6
caccaaattaactggtgaattaccattttcacttggtaatcttaaaaagcttcatttctggcaattgagtcaaaccaatctcaatgggacttttccagaatcacttgccagtctcccaagctagatcaatgttatgctagatttcaaatgatctc

SEQ ID NO: 42859 - DNA, 389 bp, Glycine max
  Clone ID: LIB3139-051-P1-N1-G8
ggggaatagtgatttgtctttgaggttgggtatatgtttaaagaggaacatagcaagttcagcatatggatcagaagatattgggttaagagtgtctgaagagggcaggaaatttggccattcgtctcgacagaaaaaagaagggtactgtttttaccctagaggaacaggttatggttccatttagtgcatgtttgggaaccagatgtttttgggaagtgatcgttttttaagttctcaataaaaataatacaaataaatgattatttcttcaaaataagctgaacctaacatgcaattattccatgatgttgaagatgatcaaaatgctggcaacttttcagaagtacagtgtgcttctaggtagctaggtggatgggcaattttga

SEQ ID NO: 42860 - DNA, 405 bp, Glycine max
  Clone ID: LIB3139-051-P1-N1-G9
cactgtttcacctacttgacacaatattcctcacccctagcaggaatggcttcctatctcagccgcgccgctccgcgcgccttctccagctccctccgcgctgctgccgctgcccgcccagggctccgcaccgctcagcgccccgcagcaccgctcttccgtcgcttcttgcagacgcccgctgagcagccccgcctgcgcctgggttcgaccggtaccgccctctcgtaatcaacattgggtgggcaattggatgaagctgacggtggtcgccccccacagctcctaacttcacggccaagacaacccatggcgatatcgaattccacaaatggatcggcgacagctgggccatcctcttctcgcacccagccgacttcacgcccgtgtgcaccacggagctgg

SEQ ID NO: 42861 - DNA, 306 bp, Glycine max
  Clone ID: LIB3139-051-P1-N1-H11
attatattctctcactctcttactctttcactctacttgtctcgcctattgcggctagggtttaggtttttctttcaccgtctccgttccttcaatcttcttattctctttcatctctgatggagacgttgcgggtttagttctaaggggtggttctggccttgggtttttggaacgtacggagtcgttttggggttgggaaaacaaattctgagagatggcaaccacgaacccttttgatttgttgggtgacgacgctgaggacccttctcagctcatcgccgccgagcaactcaaggcggcggc

SEQ ID NO: 42862 - DNA, 397 bp, Glycine max
  Clone ID: LIB3139-051-P1-N1-H12
aattcgagtttcacctgaatgctctggctggatgcgatttaggttgttgaaggaaacaacaagtgaaaacatgattcttctcaaagacattgtgcctgcagctcagaacaatatagacaccaaatttatcattttggacaaaggcaagaccacagtagaagggcaaaacaagatatgcctggctcttgtggcagatgcgactgcagctattcatttccagttctggggcgacgagtgcgatgcttttgattcaagctaccgtattctgttatcagtttggtataaaagaaatttagggggagagaatggtgtcatattacaaggcatgaaaagtctttgaactcaatgagcgctcgcagaggtacttgtatttatctcactactaggagatgaatgg

SEQ ID NO: 42863 - DNA, 369 bp, Glycine max
  unsure at all n locations
  Clone ID: LIB3139-051-P1-N1-H4
atcaattctaaatgattattttttggctagcaaagattccatcccagggggaagagtttggctttcagcatattgcctgggtttcaagtaacctgaacagctttaattttccgaaacactggtgtgaaaccagagatcttgaaaactgttggaaaagcaatcacaaccatccctgaaaattcacacctcatagagcagtgaagaggatttatgaacaacgggcccaatgattgaaactgggaagaattgactgngatttgcgaggcgctagttatgctacctgctattgaaagaaccatgtcgattaagggcaggatgtgaaagagaactttagtcaccgcatgctgagttacgatcagacacagggag

SEQ ID NO: 42864 - DNA, 252 bp, Glycine max
  Clone ID: LIB3139-051-P1-N1-H5
gtgatccacttgtatagttataggatgattatattaagcggaagtgatggagtcaagccagaagttgagggaatataaatttgaatattcagaataaaagaaaatatagttgttgattctagaaactgtgttgtcccttttaagctgtaaagcatgcacagtatttgggtgttagattgtcacacactccactccaacattgacacttccttaaaattcaattaaaaattaattttttatcgtcattgatat

SEQ ID NO: 42865 - DNA, 325 bp, Glycine max
  unsure at all n locations
  Clone ID: LIB3139-051-P1-N1-H7
ctctagccgaattcttctcgagcgctggtggataacgaagttggggagacataaaacaaggatcagaaccgttgaatcaagttgaggaagatggcactagtctctggaggaagatcaacactgaaccctaacgcccctctttacattcctgccgcgtttcgccaagtggaggatttctctccggaatggtggcagctggtgacgacgctgacatggtaccatgactactggcttaaccagcaacacgatgagggagccttctaccgcgaaggacgacaggtttgatggcaatgatgtcgntgatttgctttctgattcggttgat

SEQ ID NO: 42866 - DNA, 383 bp, Glycine max
  unsure at all n locations
  Clone ID: LIB3139-051-P1-N1-H8
cgacgatggggtccatccccgatccaggcgagttgagcgagttgactcagccgagcttcgacgagttccagcgccaaacctctctcatgaccagctgcaccctcctctggaaggagctctccgaccacttctcctccctcgagcaagacctcaaccacaaatccgaagccctcaagcgcaagattcacaccctcgacaactccacctcggactccctccgcctnctcgaccaccgcgaaacctctctcgacgccactctccagatcagcctccgcacgctcgacacgcgccgcaccgntgctctctccgccctcctccacgacgctgacgacatcctccccgacggcgaggtcgatgacaccgccggcctcgtcctcaagctc

SEQ ID NO: 42867 - DNA, 408 bp, Glycine max
  unsure at all n locations
  Clone ID: LIB3139-051-P1-N1-H9
tatggagatgataatttaattagtgttcatgagtatgttaagcgatattttagtggttctaaattgaaaagtttcctagctagtcataacatcaccattactgatggaattgacaaaactagtgcaactttacagnttagaaagttgtcagagagtgattttcttaaaagaaattttaagcaaatgtccaatgttttgtgggtagctcctgaagacaaagctagtttgaggtcacaattacactatgtttcatgtaacaatttggaaatgcaagaagcttatcttgttaacctggttaatgtgttgcgtgagttgtacctgcacagtccagaagaagctcgtcaattgagaagaaaggctctctctcgtattgagtggttgcaaaaagctgatgtgcccaccatagca

SEQ ID NO: 42868 - DNA, 247 bp, Glycine max
  Clone ID: LIB3139-052-P1-N1-A1
agggtactttcatggctaccaacttcctcattctttcgcctcacttcggtgtgcaaaaggtggaaatcagctgctgcttctgttagtttcaagcttgcctgctcacgagttcctttgcgggatccttggtttttgatggttgctcccaatctcaaccaatctattgtctttgacactgctgaaaacagttggaaaagactcaatcacccgcatcttccgctcaaagactctaacattagctgcatgc

SEQ ID NO: 42869 - DNA, 364 bp, Glycine max
  Clone ID: LIB3139-052-P1-N1-A10
gtttagtgtaactctcaagccatgtctccgggtcccgttcttgacgccggcgccgaccaacaaatccccttcgtcgacgacgcatccctcaagaagaaacctcaccccctggtccccccatttcctttcgattccgtttctattttccactctactctgtctctcattcgcttcctcgatctgttttttctcaggaagatgacgctcctattgtcgaagacgtcaaggacgatgacaaagacgaaaccgaagacgaggacgaggacgacgatgacaaggaagatgacgcccaaggtgctgctgagggtgggaagcagagcagaagtgagaagaagagccgaaaagcaatgctgaagttgggacc

SEQ ID NO: 42870 - DNA, 363 bp, Glycine max
  Clone ID: LIB3139-052-P1-N1-A11
aattttaataaaccgcgatcacaggttgccgcaccttaaaaccggaaacaaaagcaatcgttacttgatttcaagaatttctcaatttcttcctacttctttgtgtacgatttcttaagggaaagaaaatcactctctgtgctggtcacagacttcgtgaatcattttcttttccactcctagtttatttgctgaacactctcctatttgatataggacttcgtgtcagatttaaactttttctgtttctttctcagttctctgtttaatttcaagttcaagctggtgaaattttggattagtgctcccactctcctatctggtataggacttcgtgggtagacttttctacttctctccttt

SEQ ID NO: 42871 - DNA, 362 bp, Glycine max
  Clone ID: LIB3139-052-P1-N1-A12
cattgatttgttgggtttacaaggagcaggtaaagcttttccaaacaagattgtttttgatgataagcttgtgttggctaacacacaagaattctttgatggaaattttccagtggattcttggttaccaatttttgtgaattgtctctatcctgtaagtcaattaccttcagaagctgtcgttgtaaatgttacatgtggtagtggacgttgtggtttacccaccactgcttggattagttctgcagttaacaatcgctcctcagacatcaacaaaaggattcgcacagcacttgggaaaggtaagaaaattgtttttcttactagagttgatccttttccagtagctttattggctgttc

SEQ ID NO: 42872 - DNA, 207 bp, Glycine max
  Clone ID: LIB3139-052-P1-N1-A3
agctttgggggattatggcaatggtgccatggctgaaccctctaccatttactcaactgtaaggctcttctatgagtcaaaggctcagcaaggtagagctgtggtaaccttaaggtgaatgaaggggtagtcctacgcccccattcatggtagtcaatagcactctatagcaggataacggagcgcagcacccctgagttactattg

SEQ ID NO: 42873 - DNA, 365 bp, Glycine max
  Clone ID: LIB3139-052-P1-N1-A4
tgaaggaaaaaaaaatgataaagtttgttctatttttgttctgctttgcctctgcactgaccctttcagtatcggagtccaaatcagcttcagtgcaacctcatgctgctgaatctttctctgttggatatattcagatgaagactgcagcgaactgttcttacctggtagttatatctacgagttgttcatcgcctaagttcacaacggataagatcggtatcacgtttggggatgctaatggcaaccaggtatatgaaccaagactggatgatccaatttcaaggacatttgagcagtgttcttcagatacatttcagatagatggtgcttgtgcatctccaatttgctatgtgtacctatat

SEQ ID NO: 42874 - DNA, 368 bp, Glycine max
  Clone ID: LIB3139-052-P1-N1-A5
gaggacgatgaggatgatgaagatattgaagaggacgatgatgaagatgaagaggacgatgacgatgatgatgatgacgatgatgatgaggaagagagcaagaccaaaaagaagtcatcagcacctaagaagagtggaagagcacaacttggtgatggccagcagggtgagcgacctccagagtgcaagcagcagtagaagtatttatgcagaatgtcatttatgtagttgagttttgttggtgttcgagaatgtcctaatgtgaaagtgggtttcatgttgttttttaatgtttcttaaattgattttcctccctatatcttggcagtccgaatttgttgcgagtcccttctcttattttgcgcctg

SEQ ID NO: 42875 - DNA, 365 bp, Glycine max
  Clone ID: LIB3139-052-P1-N1-A6
tgaagctctttcctggtggaccttcaagacggagaaccagcaaacttctttgattggatttacattagacttgtatttgttgtcaccaaagtcttactcaactgttaggaaggatcatgaagctgttccccagtatgccactaaggtcaagaatcagaacatttcaatcccagatccacgagtaacatgtcgacaaaagtctactgagttgctttttgttcttgtaacctcctcaacacactggaggtcgtaatctgtaaattttgagtgaattatacaacaaattcttgaaaagaaatggctttctcttctgagctgctgctcattgatcggtgaatcaggctgcaattattttggaagatggc

SEQ ID NO: 42876 - DNA, 321 bp, Glycine max
  Clone ID: LIB3139-052-P1-N1-A7
actgaacaccccatgaatgtgcctgcgtcttcaggacatgaacctactggttggcatacaccatctggtaatgtgaataattctggaggtgtacctcctccatcctggattggatctagttcaaatgttcactctccccctaaccctagctggatttttaatcatgaagtcccagcagaaaatatgcagagtgtgtcagagttcagtccctggtccctttttccatcaattagctctgcatctggtgttcataatggccattcagccccatcttcttctggtcctccttcatttacccagggttctagcagcaaccaacca

SEQ ID NO: 42877 - DNA, 353 bp, Glycine max
  Clone ID: LIB3139-052-P1-N1-A8
attcgccgtaaacagaagagagagagagagagagagagagtcctgaaacttgggtgcgattccttcactcacaacaacaacacatcactatggctcttctgagtcgagcctcttcacgcttccctcagctggtttcccctcaaagggtagtttcactccacacaacgctcccatctctgaacgcatccccatccacagccacgcctacaccatatgccccgccaccgcctccgtccgcttcctctcccgccggcgtttcgaaggcggcggagttcgtgatctcgaaggtggacgatctgatgaactgggcccgccgcggctccatctggcccatgaccttcggcctcgcctgc

SEQ ID NO: 42878 - DNA, 361 bp, Glycine max
  Clone ID: LIB3139-052-P1-N1-B1
tgaagtttgaagatttggcagaaggatgcatggcaaaaatactgtcctacaccactcgtgcggatgtatgcaggctttctctggtttccaaagcctttcattccgcggctgaagccaacactgtgtgggattgctttctcccctctgatttgtcctctatcatctccccttcttcttccgttcctccctttcgctctattaaggatctctatctctatctctccgatcgtcccaccatcatcgatcaaggtataaagagttttcaattggagaagcggactgggaacaagtgttacatgctttccgctagagatctgagcattatatggggtgacactactcattattgggagtggacaac

SEQ ID NO: 42879 - DNA, 364 bp, Glycine max
  Clone ID: LIB3139-052-P1-N1-B10
aaattctctaaaattcgaaattctaatttcgttaggggaaagagattgtttgtgtgtgagtgagtatggctggaaaaggcgagggtcctgctatcggaatcgatttgggaacgacgtactcttgcgtcggcgtgtggcaacacgatcgtgttgaaatcatagccaacgatcagggtaacagaactaccccatcctacgtggctttcaccgacacagaacggttgatcggcgatgcggcgaagaaccaggtcgctatgaacccaaccaacaccgtttttgatgctaagcgtttgattggaaggcgtttttccgatgcatcagtacaaggtgacatgaaattgtggccgttcaaggtgattcctgg

SEQ ID NO: 42880 - DNA, 361 bp, Glycine max
  Clone ID: LIB3139-052-P1-N1-B11
tgttaaccttgttctgtttctctcttcccccttctctccgtctctctctcactcaatattttgaggtaatttgcaatggctgaaccttccaaggtcattcacgttcgaaatgtggggcatgagatatctgaaaatgatttgcttcaactatttcagccttttggagtaataacaaagcttgtgatgttgcgtgccaaaaatcaggctcttcttcaaatgcaagatattccttctgcagttaatgctttacaattttatgcaaatgtccagccaagcataagggggagaaatgtttatgtccagttttcctcacatcaagaactaactacaatggatcaaaatcaagcacgagaagatgagc

SEQ ID NO: 42881 - DNA, 364 bp, Glycine max
  Clone ID: LIB3139-052-P1-N1-B12
gttgatccctcccttgaccctactaatcataaacatcatcggagtcattgtcggtgtctcggatgctataaacaatggatatgattcatggggtcctttgtttgggaggctattttttgccctttgggtcattgtacacctttaccctttcctcaagggtgtcatgggaaaacaagaaggtgttcctaccatcattttggtctgggctattctcctgtcttcaatcttaaccctactttgggtgagaatcaacccattcttggccaaaagtgatgtggtgttggaaatttgtggattgaattgtgactaaaggtaacaaaaaatggaagggcatgccatggtttgacgttttacactgataaga

SEQ ID NO: 42882 - DNA, 357 bp, Glycine max
  Clone ID: LIB3139-052-P1-N1-B2
cattaatttacatccttaaacaaaccttcccctacttctctcaaattctcctctctcttcataaacccttctcattattttcagcttaatttcctcactagtcattaatggcaaaccaccaccttgcagcgatgctgctgctagtgtttctgtttctgacatcatcatctgctaggcccttgaatgatgaaaataactatttcagccttgcagccactgagccttctttgaacctcgcgcttcccagcgacagggtggtggtgccggaggagccagcaccccgacacgtgtcaggatgtggccacacgagggtcgccggaatgctggcgttgccgggaacgagactcgccggaggga

SEQ ID NO: 42883 - DNA, 363 bp, Glycine max
  Clone ID: LIB3139-052-P1-N1-B3
ctgacttttgctacaactactaccactacaagttgcaatggctcgattttcattggatgagatatcagacactggtgcctttgtgagatctgcttccacattcagaaattggatttcgagggacctgaattcgcaatttccaccagaatcagggaggtatcatctctatgtatcatatgcttgtccttgggcttccaggtgccttgcttacttgaatattaaaggacttaacaaagctatcagtttctcggccgtcaagcccatctttgaaagaacaaatgaatctgatgactataaggggtgggtttttcctgaatcagaaactgaggtgcctggagctgaacctgatatgttgaatggagc

SEQ ID NO: 42884 - DNA, 365 bp, Glycine max
  Clone ID: LIB3139-052-P1-N1-B5
aaaaaccaccaactttgtataaccctgcagagttttttctgttcctctccctgctgctgctgcttttgcagtctctgggggattttgctttgcgtttttttatgtgtcaattggtggcggctttcaagaggtggtggctattattgtgctgagtttacatttttccaagaatcatatataggatccacatttagacactgcttttgtggataagagagacaatgttgtctcagaagcaagcagaggaagccatagtcacaaacgagacagaacataaagttggcagcactagggaagaagagaaggagcaaggccactccattttcagcctcaagagcatcctttggcatggtggttctgtttgg

SEQ ID NO: 42885 - DNA, 369 bp, Glycine max
  Clone ID: LIB3139-052-P1-N1-B6
ctgcatcggaagaaaccctagccactctcccggcgtcacgatgcagatcttcgtgaaaaccctaacgggtaaaacgatcacgttggaggtggagtcttcggacaccatcgacaacgtgaaggccaagatccaggacaaggaaggcatccctccggaccagcagcgcctcatcttcgccgggaagcagctggaggacggccgcaccctcgccgactacaacatccagaaggagtccacgcttcacctcgtcctccgcctccgtggcggcgccaagaagcgcaagaagaagacctacaccaagcccaagaagatcaagcacaagcacaagaaggtcaagctcggcattcttcagttctacaaggtcgacga

SEQ ID NO: 42886 - DNA, 331 bp, Glycine max
  Clone ID: LIB3139-052-P1-N1-B7
attaattgcaagaatggcacttcgttgcttggtgatgtccctttctgttctcttcactcttggtcttgcgagagaaagccatgccagagacgaagatttttggcatgctgtttggccaaacactcccattccaagttcattgcgagatcttctaaagcctggccctgcaagtgttgaaatcgatgatcaccctatgcaaattgaagaaacacagtacccgaaaaccttcttctataaagaagaccttcatccaggcaaaacaatgaaagtacaattcagcaagcctccctttcaacaaccatggggtgttggtacatggttaaaggaaatt

SEQ ID NO: 42887 - DNA, 355 bp, Glycine max
  Clone ID: LIB3139-052-P1-N1-B8
ctcgagccgtttctgcttgcttcttcacttttttttcctttgtctcctcctcaatcttcatcgtcctgttcttcccctaggtgacacacacacgcagagatcatagcttgtgttagtgaggttagaagataaagaaagaatggcatttgcaggaacaacccagaagtgtatggcctgcgacaaaacggtttatctggttgataagttgaccgcggataaccgagtgttccacaaagcttgcttcagatgccatcactgcaaaggaaccctcaagctgagcaactacaactcttttgagggagttctttactgcaagccacattttgaccaactgttcaaaagaactgggagcctt

SEQ ID NO: 42888 - DNA, 155 bp, Glycine max
  Clone ID: LIB3139-052-P1-N1-C1
cacaagcacactctggtggttgtggccactgtggccacacgggcgctggcggctgtgctcgcaacaccacaagcagatctgtcctccgagcgagctgcattactctcccttcgttccttcgagggaggccgtaccctattctggtacgccaccat

SEQ ID NO: 42889 - DNA, 356 bp, Glycine max
  Clone ID: LIB3139-052-P1-N1-C10
ggcttcttactacttcctcttgcttgatctcgtcggtgcaactacagcttctggggctgaactatgtgcagacttttactcatgcacctgcccaaacttgttgcctatagtgaagaaaggagtggccaaagccattcagaaagaaccacgcatgggcgcttccttactccgattgcatttccatgactgctttgtaaacggctgtgatgcatctatactgttggatgatacaagcaacttcattggggagcaaacagcagcagctaacaaccaatcagctagagggttcaacgtgattaatgatattaaggccagtgtggagaaagaatgccccagagtagtgtcatgtgctgata

SEQ ID NO: 42890 - DNA, 365 bp, Glycine max
  Clone ID: LIB3139-052-P1-N1-C11
caaaatcagaaccacattcctgggaattaatcttcccaatagaggtatgtggtcctaataatggttttgaaatgtggagttctgagtgggcaaatcaaacttcatggcatttgagtttccttattgacaatcccaaacagtctacagtttttgatattctcttgggaatctctcaagattttgaaattgctggtaatactcttatgccagctttttctgttccacaggctactgccagatcttctgaaaatgcggaatcctctgcatgatctggaattcgtgttttctttcgcttgttcgtttgtttaattcaataaaggaaattaggcatgaccctcttgttgagtatgctctgcctatctgaa

SEQ ID NO: 42891 - DNA, 366 bp, Glycine max
  Clone ID: LIB3139-052-P1-N1-C12
ggttaaacactccttcttcatcgtcgtcgcaatgggacgtgtgatccgtgcgcagcgtaagggagcaggctcggtcttcaagtcccacacgcaccaccgcaagggccctgcccgcttccggagcctggatttcggagagcgcaacggctacctgaagggtgtcgtcactgacgtcatccacgatcctggccgtggcgcgcctctcgctaaggtcgccttccgccacccgttccgctacaagaagcagaacgagctcttcatcgccgccgagggtctctacaccggccagttcatctactgcggcaagaaggccaccctcgttgtcggcaatgtgttgcctcttcgatccattcctgaaggagctgt

SEQ ID NO: 42892 - DNA, 364 bp, Glycine max
  Clone ID: LIB3139-052-P1-N1-C2
gcccgaggtgggaggggagttatgctagtctctgtagaataactcgatcgatgcaggacctcatctcgatgacacctccggctggtatcgactgttctaggagaaaagcaccacggacgattttcgagacacaagagggtttggctgattcacgctcgacctaaaactggttctattggcatctaggctccccgaattccgacgacaatactccatgagaacaacgaacaactggtcccggaagagtcttcgagcctaactgaccaaactggccatgtttcattcgcagatgtgaaggccaaagtacgaatactttgttgcgcaatgtcccggagaacaaatcgacaagatcagagatgaaagg

SEQ ID NO: 42893 - DNA, 245 bp, Glycine max
  Clone ID: LIB3139-052-P1-N1-C3
tactctctatacaacgcggtccattccgcttaccttgtcgcttttgtacaaaacaaaaaaaattaaaaatttctccgaaaaccgtgtattatcggtctcggtcactgagttagggtttgctggtcttcctaggggtttattgtgtccaataaccagtgggggggggaggggaaccaaaccaaaaaaaaaaagggttaaaggcgacaatttgggatttttttttggaaaaaaaaaagaggaattta

SEQ ID NO: 42894 - DNA, 368 bp, Glycine max
  Clone ID: LIB3139-052-P1-N1-C6
tggagaaattcactcatataaaaatcatcacttcaaataaagctagacctagaaagatccagaggtagctacggagagaaacaaagctcatggctggtttgcaaagatctgaggtgtctttcaggagacagggttcatcagggcttgtttgggacgacaagttattatcaggggaattgaacaagaacgaagacccaaagggtgctcatggtggtgaccttaaccttaaccttaacgttagaacaacaccacccatccagagaagtcgctccaacggcggctaccgcaccggaaaagtctcgccggcgatcgagcctccctctcccaagctctctgcttgcggcttctgcagcgccttcggaaaaaca

SEQ ID NO: 42895 - DNA, 360 bp, Glycine max
  Clone ID: LIB3139-052-P1-N1-C7
aactactgtagccttcagagcccccaacaacttagccctcttaactttctccaatcttgtgcctctcatggaaggtcgtcgagtagccgtcttatgggactatgatacttgtcccattaccgccaacgttcctgcgtatcaggtagtcgacaacatcaacaacgtggctgcaagatatggaataccgaccactttcaacctttatctgtttgaccgatcgacagccaacaatgtcgtgttatccgagattgcatccaacggtgtctctctggttttcagtgtaccagccgtggacaaaaatcaagccgtcagggtgcgggctgatctaatgctcttcgcgggggactatggcgctgcctc

SEQ ID NO: 42896 - DNA, 301 bp, Glycine max
  Clone ID: LIB3139-052-P1-N1-C8
cactattgtatgctggagcgctagaaacaactaaggagtgttaactatgtccagattgcaacatatcatggaaggtgcttgagtaggctacttatgatactattattctagatgcattaccgacaacgttcgtgggtattatgaaatgcacaacatcaacaacgtgggtgacagatatggaatacataccacttataagcaccatcaggtagaccgagcgacagccaacagatgtccagttatccgagatagcattcaacagggaatgatgtttatcagtgtaacgatcatggacaaaaat

SEQ ID NO: 42897 - DNA, 362 bp, Glycine max
  Clone ID: LIB3139-052-P1-N1-C9
cacccaaccaaccaccttcttaattaataaccgtcgtcgtttcaatctcgttacacacctcaaaacgcagcggcacactcactagaatgcaagccgtttcgctctcacctttgtcgtttagggattcttccgacgagttcgctggaaagttcgaacacgatttcatggccaagctcaaaatcaacgaagagaaagtcgaaaacgaaaacgaagagaagcataacgaagatgagatagaagaagaagaagaagaagaagaagaagaagaagaggaagagtttagcttcgttctcacgaattccgatggatcgccgatctccgccgacgacgcgttcgacaacggccagattcgtccgattttt

SEQ ID NO: 42898 - DNA, 363 bp, Glycine max
  Clone ID: LIB3139-052-P1-N1-D1
gtcaattttctattgaccttctcggtggaggaattttagtggacaaaactggagattggatcacacttatacaaaattctccaattagtaacttgttgagagttgctgcttggaagaaaggttgtttaatggtcaagattgtgatgtctgggaatgcagcagtcaaaaggagtgattgggcctcattggtacaagtgtttttaacaaacagcaacagtacagagcattttgatgcatgtaagtggacaaaatcagaaccacattcctgggaattaatcttcccaatagaggtatgtggtcctaataatggttttgaaatgtggagttctgagtgggcaaatcaaacttcatggcatttgagtt

SEQ ID NO: 42899 - DNA, 366 bp, Glycine max
  Clone ID: LIB3139-052-P1-N1-D10
aggcttttctgtttgtaccacctaaggcacctggggagtgatacgagagctattattacacaaacaaatccaacctgaagttgtatgttagacgtgtgttcatttcacatgaatgataatgaactgtcagcctaagtacctaaactatttgctgggtcttgttgattctgacacattgccacttaatgtatcgcgagaaatgcttcagcaacataggagtctaaagacaatcaagaagtaacttattaggaaagcccttgatatgatccgtcagattgctgatgagtatcctgatgagtccactgtccaagatatgtatgaagatacgtcatctgacagttatgagaagaaaggtgaatattccaa

SEQ ID NO: 42900 - DNA, 368 bp, Glycine max
  Clone ID: LIB3139-052-P1-N1-D11
attttcaatctgctaacaagtctttggttgaaaagattcgtggtgctcttgattttgatgaagaaagatacagtatatttaaagacatatctgcccaatatcgccaaggcacaatagatacaggtacatatgtggactatgtgcagcagtttggcttgtctcatcttgtgcttgagttggcaagactatgcccggatactcagaaacaaaaagagcttattgaggctcacaacgctagtttgcaaagagatgctttcccagaaattaacttagttcgaggcactgctagcacccatcacaaagacggtaatttaaacaagaaaggtaaaggtaagtctgtagatagtagggggagtaactccacagag

SEQ ID NO: 42901 - DNA, 364 bp, Glycine max
  Clone ID: LIB3139-052-P1-N1-D12
ctcaagtctctcgaagcctctttctctctcttctagaagctatctgtgtttggtgttactaagtctccaacaagcaaagtacatggttgatttggaaatccaggtccccaccccattcgacccgtttgccgaggcgagagaatcggatgcccccggagcaaaggagtatgtgcatattcgaattcagcagaggaatgggaagaagagtctgaccacagtgcaagggctgaagaaggagttcagctacgagaagatcctcaaggacctcaagaaggagttctgctgcaacggaaccgtggtgcaggacaaggagcttggcaagatcatccaactccaaggcgaccagcgtaagaacgtctcccac

SEQ ID NO: 42902 - DNA, 357 bp, Glycine max
  Clone ID: LIB3139-052-P1-N1-D2
gtgatgattacttaattagtgttcatgaatatgtcaagccttactttagtggttctaaattgaaaagctttctagctggtcataatatcaccattactgatggtattgacaaaactagtgcaactttgcaatttagaaagttagcagattgtgattttctcaagagaaactttaagcagatgtctaatgttttatgggtggctcctgaggacaaggcgagtttatggtcacaacttcattatgtttcgtgcaataatctggaaatgcaagaagcttatcttgtcaatctcgtaaatgtgttacgagaattgtatttgcacagtccagaggaagctcgccaattgagaaggaaagctc

SEQ ID NO: 42903 - DNA, 356 bp, Glycine max
  Clone ID: LIB3139-052-P1-N1-D3
ctcgagccgatttcggctcgagataaaagaccatgtcggtgaaggagtgcgagcaccacatggggaagaagaggaagatcttccggcaagtgttctggtgcttagtggtgttccttttcatcgtgctggtcacaattcttttgatatgggcaatccttagacccaccaaacccaccttcacgctccaagacgtcaccgtctacgccttcaacgccaccgtggcgaacttcctcacttcgaattttcaggtcacgctcatctcgcgtaacccgaacgaccgcatcggtgtttactatgatcgcctcgaaaccttcgtgacctaccggagccagcaggtcacgtaccgaaccgacatc

SEQ ID NO: 42904 - DNA, 329 bp, Glycine max
  Clone ID: LIB3139-052-P1-N1-D4
ctcgagcctattcggctcgagtaagatttgaaatgtgggtgaaccgcgatcacaggttgccgcaccttaaaaccgggaacaaaagcaatcggtacttgatctcaagaatttctcaatttcttcctactgctacgtgtacgattttttaagggaaagaaaatcactctatgcgctggttacagacttaatgaatcatcgtcttctccactcctagcatagtggctgaactccttactatttattttaggactccctgatttatgtgtaacccgaactgccgcttccgtatttactatgatcgcctcaagaccttgttgacctaccggagc

SEQ ID NO: 42905 - DNA, 368 bp, Glycine max
  Clone ID: LIB3139-052-P1-N1-D6
gttgcaggacactagcattgttactcctgagaaccaccctatccatcttcatggctacgatttctacatcgttgctgaggggttcggaaacttcgacgccaagaaagatacggccaaattcaaccttgttgatccacctttgaggaacactgtggccgtgcctgtaaatggatgggctgttattcgatttgtcgctgataaccctggtgcctggcttttgcattgtcacttggacgttcacatcggatggggtttggctacggtgttgttggtggagaacggagttgggaagttgcaatccatagagcctcctccgctggatcttcctctttgttaggatatcatttcaaaataatcgttggtcccca

SEQ ID NO: 42906 - DNA, 336 bp, Glycine max
  Clone ID: LIB3139-052-P1-N1-D7
agctgatgcaatgactggtgatatgaccaccatgccagacactggcactggaatgaacccatctaggagtgtagaagctgctgttatatacaaccaaaatacgccatggtacgaccaatggaccttttgtgtaggaaccataattggggcagtcattgcagactccaaccaccaggtgatttttagagccagggcagcccaggccgtagagtcattcaagagtaacccccataaatgagaacactatgtatttatgacaactggtctagctgaaagacgatcatgagcaacattgagggctatatggcaagcataattatgtgcaatgcttcatga

SEQ ID NO: 42907 - DNA, 383 bp, Glycine max
  Clone ID: LIB3139-052-P1-N1-D8
gggagaccgctggatgcctgcacgccgactctagagatcctctggctgaaggccaatttcacattttcaagaaataacgacgcagaaactgttcatatatgaattggaatcattcgctttcttattaggcctatcctgaagccaaaggaaatgagatcggaattcctcgacgaattccaattccacattttcaagaaataaagcggcacaaacgttcatatatgaattgtaatcattcgctttattatttagcctatcctggacccaaaggaaatgatatccgaattcctcgccgaagtccaattccacattatgaagatataaggaggcaaaaatgctcatatatgaattgtaaatatctaggctcttattaaggctatcct

SEQ ID NO: 42908 - DNA, 359 bp, Glycine max
  Clone ID: LIB3139-052-P1-N1-D9
aggcagtcttgtttgtaccacctaaggcacctcaagatttatacgagagctattataacgcaaacaaatccaacctgaagttgtatgttagacgtgtgttcatttcagatgaatttaatgaactgttgcctaagtacctaaactttttgctgggtcttgttgattctgacacattgccacttaatgtatcgcgagaaatgcttcagcaacatagtagtctaaagacaatcaagaagaaacttattaggaaagcccttgatatgatccgtaggattgctgatgaggatcctgatgagtccactgacaaagaaaagaaagaagatacgtcatctgacaataatgagaagaaaggtcaatat

SEQ ID NO: 42909 - DNA, 364 bp, Glycine max
  Clone ID: LIB3139-052-P1-N1-E1
gcacaaatcccatcttttctgtctcaattacctctctttttgttttcctcccttagttctttttctgaacaaaatccatcttgctgcagctagctagagagcagctgcaacaagctgagtgaaacaaacaaacaaaacacttttgtaaaattgaataaagggaatattttcaatagattcttcccttttctttggctaccttcaatgtcaaacatcacaagttgtgatagtgggagcttctctacagagaataccagagaagatgcagtagttaagcagcaacctgagatacttggtcagttccatagtccacattctcatacttcaactacaacaacaacaaataatagcaatggttccaaca

SEQ ID NO: 42910 - DNA, 369 bp, Glycine max
  Clone ID: LIB3139-052-P1-N1-E10
gttcttgcaaagcgagctcatgaatttgaaaaacatgttgctcatgaaagcctcaaggatcagattcctgctgttgacaagttgtattctactaaggttaataaatttgcaaaaattatgaaccttagacaaagtgttgttggtgatcttaaacttcttactgatgggaagttgtatgagggtaagcatattcctgtatctaatattagtgcaggggaaaatcatgtagttcaaatacccttaatggcacaggaggaaattctgtcttctagtgcaagtgatttcagagctgcaatggtgagtaaaaatagcaagcctcaagctactgcaatgcatgtgggagctatagaaattatcattgatagtttc

SEQ ID NO: 42911 - DNA, 370 bp, Glycine max
  Clone ID: LIB3139-052-P1-N1-E11
cccaatcaacagatcaagttcctcctatcttttatggtgataagaaaacccaatcaacagatgaagttcctcctatcttttatggtgctaagaaaactcaatcaatagatggagttcctcctatcttttatggtgctaagaaaacccaatcaacagatgaagttcctccatacttttatggtgctaagaaaatccaatcaacagatgaagttcctcctatcttttatggtgctaagaaaacccaatcaacagatcaaattcctccttttttttcttatggtgctaagaaaacccaatcaacagatcaaattcctccttttttttcttatggtgctaagaaaacccaatcaacagatcaagttcctgcttt

SEQ ID NO: 42912 - DNA, 389 bp, Glycine max
  Clone ID: LIB3139-052-P1-N1-E3
cttccttaggctcggattccggttcgagctcattcttttttttttttggctattagcaaacactggggtgtttggttgctctagttctcactaccatgtcaacccacattgaaagcctgtgggtgttggccttagcctcaaaatgcattcaagagaacattgcatggtcactcttgatcatcatggtcactctctggctcaccatgaccttcttctactggtctcaccctggtggtcctgcttggggcaaatactactactttaattactggaaaaaaaccacctcaaccaacacaaacatcaaccttaaaatgattatccctggtcctagaggctaccctttcattgggagtatgagtctcatgacatccctcgcacaccaccgtatt

SEQ ID NO: 42913 - DNA, 291 bp, Glycine max
  Clone ID: LIB3139-052-P1-N1-E4
tcggctcgagtttccagatactaattcccaaaatttgttgtacaacagaggctattttcattttccaagccacaactattgcaaaacaaattctttttcctgttaatcattttccattaccctcaaaatttattcaacatatcattttcatcttattctttatcatcataatcactctttacctaaccattaccttcttatacttttctcaccctaattttcacttattacatcatatactactacttataattactttaaaaaaaccacctcaaccaacatattacttta

SEQ ID NO: 42914 - DNA, 371 bp, Glycine max
  Clone ID: LIB3139-052-P1-N1-E6
tgaaattttgataaaccgcgatcacaggttgccgcaccttaaaaccggaaacaaaagcaatcgttacttgatttcaagaatctctcaatttcttcctacttctttgtgtacgatttcttaagggaaagaaaatcactctctgtgctggccacagacttcgtgaattattttcttttccattcttagtttatttgctgaacactctcctatttgatataggatttcgtgtcagatttaaacttcttctgtctctttctcagttctctgtttaatttcaagttcaagctggtgaaatcctggattagtgctcccactctcctatctggtataggacttcgtgggtagacttttctatttctctcctttctttc

SEQ ID NO: 42915 - DNA, 358 bp, Glycine max
  Clone ID: LIB3139-052-P1-N1-E7
gcatgtttttacaatccttcaaaaattttgttggtgggtgtgtgtatggtgatgataacttaattagtgttcatgaatatgtcaagccttactttagtggttctaaattgaaaagctttctagctggtcataatatcaccattactgatggtattgacaaaactagtgcaactttgcaatttagaaagttagcagattgtgattttctcaagagaaactttaagcagatgtctaatgtttgtgggtggctcctgaggacaaggcgagtttatggtcacaacttcattatgtttcgtgtaataatctggaaatgcaagaagcttatcttgtcaatctcgtaaatgtgttacgagaattg

SEQ ID NO: 42916 - DNA, 359 bp, Glycine max
  Clone ID: LIB3139-052-P1-N1-E9
ggtacttttacttgaagggcatacccgcgaacgatgaccacccgtctcatgatgttgcacatgggcaaatgctggttaaggaggtttatgaggctctaagagcaagtcctcagtggaatgaaacacttttcatcattacatatgatgaacatggtggattttttgatcatgtgaagaccccttttgtcaacattcctaatccagatgggaacactggacctgctccctatttcttcaagtttgataggttaggggttcgggtgccaactattatggtctctccttggatcaagaaagggactgtgataagtggcgccaaaggacctgctgaaaactcagaatttgagcactcttcaatt

SEQ ID NO: 42917 - DNA, 371 bp, Glycine max
  Clone ID: LIB3139-052-P1-N1-F10
gttaaacttggaacccaaggctttgaggtttcaaaattgggattcggatgtatgggccttactggagcgtacaatgaccctctccaagaacaggatggcatatctgttatcaagtatgcgttcagtaagggaatcacattttttgatactgcggatgtttatggagccaatgctaatgaacttttggttggaaaggctttgaagcagctgcccagagaaaagattcagatagccacaaaatttggtattgcttcacgaggttttcctgatatgaagatcaagggttcgcctgaatatgtgcgatcatgctgtgaagctagcttgaagcgtcttgatgttgaatacattgatctctattatcagcacagagt

SEQ ID NO: 42918 - DNA, 371 bp, Glycine max
  Clone ID: LIB3139-052-P1-N1-F11
ctcaatttcaatatgatcggttttatgggggccatgatatcgaatttggcatttgtattccgtaatatcttttcgaaaaagggcatgaagggaaagtctgttagtggaatgaattactacgcatgtttatctattttatctcttgctattctcacacccttcgcaattgctgtggaaggaccgcaaatgtgggctgctggatggcaaacagccatgtctcaaattggaccccaattcatatggtggctagctgctcaaagtgtattctatcatctatacaatcaagtgtcatacatgtctctggatcagatctctcctttgacgtttagcattggaaacaccatgaaacgtatatctgtcattgtgtcttc

SEQ ID NO: 42919 - DNA, 137 bp, Glycine max
  Clone ID: LIB3139-052-P1-N1-F2
gaacaattttaattaacaccagccgttgttatttgccgcattaagtaaaaatgctttcaaaatccaaacagaaactgattattgctattggttcaaaaaaaaataaaaaacctaccctaattattattattaaatgg

SEQ ID NO: 42920 - DNA, 372 bp, Glycine max
  Clone ID: LIB3139-052-P1-N1-F5
ccgcgatcacaggttgccgcaccttaaaaccggaaacaaaagcaatcgttacttgatttcaagaatctctcaatttcttcctacttctttgtgtacggtttcttaagggaaagaaaatcactctctgtgctggccacagacttcgtgaatcattttcttttccactcttagtttatttgctgaacactctcctatttgatataggacttcgtgtcagatttaaacttcttctgtctctttctcagttctctgtttaatttcaagttcaagctggtgaaatcttggattagtgctcccactctcctatctggtataggacttcgtgggtagacttttctatttctctcctttctttcactctcttcttctcac

SEQ ID NO: 42921 - DNA, 374 bp, Glycine max
  Clone ID: LIB3139-052-P1-N1-F6
gctttctcaatataaataagtttaattcgagacgtcatcttactctcacctgaaaaccattcattcattgatcaaactcccaaaacaatggcttctttcaatctctcttattcttcctcaccagccctctcatgtcctcgggcgagcaaacaattcaaattattcaatgatgtgccttttgtccgaatgaattctaaatttccctcaagtgacaatgctattgggagaattaaagctaagttgatctctggagggggtgatctactttcctatccaaatggcaatggcattgtgataggtaaaaatctggttggtgatgaatctgttcgaattgaggtacagccgaatagaacactggcagcagacacagggct

SEQ ID NO: 42922 - DNA, 361 bp, Glycine max
  Clone ID: LIB3139-052-P1-N1-F7
ctattgtgttttaaatccacaaaatccttttgtgttaaataggtggatgggaaaactgactttccctcagggcacttcccgaagtgttaagagaatgcctctttctatagggggaggagctggtgcaaagaatgctattctcatgaatatgccaaatgctgttctttcaatgtggagatattttgttggagatctcgtctttgaagtttctaagatgacttctccctacattaaatgtacagtctctttcttcatagcatttggaaatttggctgatgacaccatcaattttgaggcttttccccacaagctggtgcagtttggagagattcaggaaaaagttgtgttgaaattttcacaa

SEQ ID NO: 42923 - DNA, 362 bp, Glycine max
  Clone ID: LIB3139-052-P1-N1-F8
caactatttgttgggcctaaaattggggaaggtgctcatgccaaagtatatgaaggaaaatataaaaatcagaacgttgctgttaagattgttaataagggtgaaaccccagaacagatttctaggagagaggctcggtttgccagagagattgccatgttatctagagttcaacacaaaaatctagttaagtttattggggcctgcaaagaacctgttatggttattgtaactgaacttctcttaggtggaacattgcgcaaacacctgtggagtatccggccgaagtgtttggatatgcgcatagcagttggatttgctctcgatattgcccgtgcaatggaatgcttacactctcatgg

SEQ ID NO: 42924 - DNA, 360 bp, Glycine max
  Clone ID: LIB3139-052-P1-N1-F9
caatcacctaccacagccactccatcgtttagtccctttgaagaaaccagtctcagttacttagagacaccgtggacgaaaggaaagcgttctaagcgtagccgcacggagcaacaactgcaacacccttcatgcaccgaggaagagtacctcgctctttgtctcatcatgctcgctcgcggcggcgccggcagtgtctccaccgccaaacccgctgtcttcgacaacaattctgcgccgctatccgccgccaaactgagctacaaatgttcggtttgcaacaaagccttctcctcttaccaagcactcggaggacacaaggccagccaccggaagctcgccggagaaaaccacccgacc

SEQ ID NO: 42925 - DNA, 262 bp, Glycine max
  unsure at all n locations
  Clone ID: LIB3139-052-P1-N1-G1
atcactgatgtatactctacacttgtgttgggttagttataatacctcgtcatgacacacctgtgcttatagttaacgttaaacattttgtgcgtgtcgtttaaaatttagctaataggaggaaaataaaattgttgatagcgcatttttttttcaaagaaattctttgtgaaatagggaagctggtcttgatcgtctgtctgagatatacttaaataacatagttatagtagttaattgttatggtaattatttattnatc

SEQ ID NO: 42926 - DNA, 372 bp, Glycine max
  Clone ID: LIB3139-052-P1-N1-G10
caaacacagagagagagagtgaacaaatccagcattgttcttttctctgcaacattttccactctcaaccatggcttcaaagcttttactcatcactgtcttcgtttttgatttgattgcttttggactggctgtggctgctgaacagagaagaagcactgctagcattgtgccggacaatgaaaagaattataattactgtgtctataactctgatatagcaactggctatggtgttggagcatttttgttcctcttggttagtcaagtcctgataatggtggcaagtcgatgcttctgttgtggaaagcctctaaaccctggaggatcaagggcctgtgcagttgtccttttcataatctgctgggtgtt

SEQ ID NO: 42927 - DNA, 375 bp, Glycine max
  Clone ID: LIB3139-052-P1-N1-G11
gttcagaaatgatgaagccacctctttttccttctctgcgtccaaatgggtccttcgttccgaccccaaaacccaatcttccgtatcccctgatgctctcaatcctctgcgtgcttatctttccctgccccaagtcagctttggccctaaaaggtggcaactgcctgaagcagcaaacacggtttcagcctcaacagctaatgaatcgcgtcaagacaggtatgccagccatgttaacccggagaagttgaaagctgcaggggaagggcttgcacatgttggaaaggcgtttgctgttgcaactgcatttatatttggtggtgctgcattggtatttggtgtggtggcttccaagttagagctgcataatatgag

SEQ ID NO: 42928 - DNA, 375 bp, Glycine max
  Clone ID: LIB3139-052-P1-N1-G12
aataatttatgattaagatatcaagagagagggagagggagagttgtttgtttcattgcgatccctcccaagaacggctctgatagctctttggtgcagcaagcggcgtaggaatatcaaagacaaagccattcgtgcctcatacctcatttcatcacacccattcatctccatcacaacacaacatacatacgaaccaggtgaagctcaggttcttcttcctcctcacttcccttttccattttcaattcctcttctgtattccctcttttcttcctttcatctatttttattttctttttcttttttaattgcatatatgtaaaaaaaaacatcttttttttctatcttcctaaaatcgttatcgcgaaactc

SEQ ID NO: 42929 - DNA, 362 bp, Glycine max
  Clone ID: LIB3139-052-P1-N1-G3
aaagcggagaggttatatgaatctcagggtggtccaataattatgtcccagattgaaaatgaatatggacctatggagtatgaaattggtgctgctggtaaagcttacactaagtgggcagcagaaatggctatgggacttggtactggggttccatgggtcatgtgcaagcaagatgacactcctgatcctcttattaacacttgcaatggcttctattgtgattatttctctgcaaataaggcttacaagccaaagatgtggacagaagcttggactggctggtttactgagtttggaggtcctgttcctcatcgaccggctgaagacttggcattttcagttgcaaggtttatacagaa

SEQ ID NO: 42930 - DNA, 376 bp, Glycine max
  Clone ID: LIB3139-052-P1-N1-G4
tgggaatgcagcagtcaaaaggagtgattgggcctcattggtacaagtgtttttaacaaacagcaacaggtcagagcattttgatgcatgtaagtggacaaaatcagaaccacattcctgggaattgatcttcccaatagaggtatgtggtcctaataatggttttgaaatgtggagttctgagtgggcaaatcaaacttcatggcatttgagtttccttattgacaatcccaaacagtctacagtttttgatattctcttgggaatctctcaagattttgaaattgctggtaatactcttatgccagctttttctgttccacatgctactgccagatcttctgaaaatgcggaatcctctgcatgatctggaatt

SEQ ID NO: 42931 - DNA, 376 bp, Glycine max
  Clone ID: LIB3139-052-P1-N1-G5
gagagagtgcatttcaatccacatcggccaggccgggattcaggttggaaacgcctgctgggagctttactgcctcgaacacggcattcagcctgatgggcagatgccaagtgacaagaccgttggtggaggtgatgatgctttcaacaccttcttcagtgaaactggggcaggaaagcacgtgccccgtgcgatttttgtagatcttgagcccactgtgattgatgaggttaggactgggacataccgccaactattccatcctgagcagctcattagtggaaaggaggatgcagcaaacaactttgcccgtggccactataccattggaaaggagattgttgagctttgcttggaccgcatcagaaagcttgct

SEQ ID NO: 42932 - DNA, 376 bp, Glycine max
  Clone ID: LIB3139-052-P1-N1-G6
taaaggttctatgttggatcttaaaatttctaaatctaaagttgcacttcccaagaacacagttggaggaaccattctgcgtagtgatctattggcaaattttttgacagagggcaattttagagcaagtgttgatttgcagcgcactcatcgtattaaaggaatgattaaaatggtggccacagttggtattcctgagaatacaggtatagcattggcctgtgctatgaatagttcttttagggggcgcgccagttctgatatttacaccatctgctctcaagactgtgaattatggaatcctgcttgcacaaaagcaatgactatgtcatttaatccaaacccgtgttctgatgcatggagtttggaatttctg

SEQ ID NO: 42933 - DNA, 360 bp, Glycine max
  Clone ID: LIB3139-052-P1-N1-G7
gagaatacatgtatagcattggcctgtgctatgaatggttcttttagggggcgcgccagttctgatatttacaccatctgctctcaagactgtgaattatggaatcctgcttgcacaaaagcaatgactatgtcatttaatccaaacccgtgttctgatgcatggagtttggaatttctgaagcgtaccggatttcattgtgatatcatttgtgtcactggatggactgccaccccaatgcaggatgttcaggttacaattgattggtttatttcctctcaggaatgtgttcccaggacctattgtgttttaaatccacaaaatccttttgtgttaaataggtggatgggaaaactgact

SEQ ID NO: 42934 - DNA, 358 bp, Glycine max
  Clone ID: LIB3139-052-P1-N1-G8
tgctcattagatatagctatgaaaaattactgcgccaggctaaagctccaagtatgtttttacaatccttcaaaaattttgtttctttgtgtgtgtatggtgatgataacttaattagtgttcatgaatatgtcaagccttactttagtggttctaaattgaaaagctttctagctggtcataatatcaccattactgatggtattgacaaaactagtgcaactttgcaatttagaaagttagcagattgtgattttctcaagagaaactttaagcagatgtctaatgttttatgggtggctcctgaggacaaggcgagtttatggtcacaacttcattatgtttcgtgcaataatct

SEQ ID NO: 42935 - DNA, 362 bp, Glycine max
  Clone ID: LIB3139-052-P1-N1-G9
ctggctgttttaagaaaggcagatataagcatcatgggcctaagatgtcgtgctgtgtatacattttgtatcatttatagtttatctttgccactaccttcacgccatttcaaccaccctcattcacccgttggatcttttggtgatcagctccttgcatgatgcaagatatctaaacattcctcatcctttatgaacacaaagtagctattaattattcagtgagggcaaactacaaaattgaacgttgaaaattctatttgccaaagtattaatgatacagtaggttgtggacatctttttcctacacataaaagaggaggtacctggagggaaagaaatcactcgtatgtttttctttt

SEQ ID NO: 42936 - DNA, 365 bp, Glycine max
  Clone ID: LIB3139-052-P1-N1-H1
caactgatgagagattggtaggcacagaacatgagggatatgatccttttcttggtggaattcaaaaatatgccactcccatgatgcccctagatgaagaaattctttctaaagttgcacaagatatggttgaggaatggtttgattgtgttgatgaggaggattcctttgaggaaggttctttaagtgcagcacttaatggtgttgagggtttggactatatggaaagaattcctcttgccacatctgagggttttcctcatgtgctttcacgcaaaaatggtgaaaaaggcaaaagaagatttgtttctggggttgaagagatgacattgattcgggaaccagtgttgaagaggcttacaaca

SEQ ID NO: 42937 - DNA, 375 bp, Glycine max
  Clone ID: LIB3139-052-P1-N1-H10
caaccagttcatctagttatcgaagatgagagcgaagtggagaaagaagcgcgtacgacgcctcaagcgtaagaggagaaaggtcagagcccgcagcaaataaacgactcgcctcctcgaacactgtcaccccgccacctaccatgacaacggctttgcgaattaacggcaatccttgatgcggttcgcaatcgactcccaactcagctctcggagtattacgtcatactctcggcaacggaggcacgaccgctctgagtgcggagcgtgggtcgactgcaatttatgtctcggactgtcgcattgtgggcatatggggaactggttgaacttcccttcgaggatatcaagcgtttactgcacaacactcaggcg

SEQ ID NO: 42938 - DNA, 377 bp, Glycine max
  Clone ID: LIB3139-052-P1-N1-H11
ccgcaaaggtggtcttgttttgtttcttttggagaaagagaagaactgagagagagcgaaccatggggaaatctacctcctgcttcaaactaatcacttgcggtggtgatgcggctgagaaggacgattaccaccaagtatctgagatcaaggaatctaatgataaacgtggatggagtttccgcaagaagtctgcaaggcatcgtgtgcttagcaatactgtgatagcagaggccccatcttctgcaaataaggaaagttcagaatgtaataattttaattttcaaccacttcctgaacctaatgttgttgagaagatttacacaacaaattgctctgatgagaagccccagttatcttcctttgaaagctcacaa

SEQ ID NO: 42939 - DNA, 370 bp, Glycine max
  Clone ID: LIB3139-052-P1-N1-H12
gcaccatagcatacaaatatgggctcaatcctggtatttcaggttctcgtcttttgggcaccattcctcagtccatttcacagcaaactgtttggaatcaaatggcaacagtgagaacaccattgaattttgattctagcaagcagagcttttgtcaattttctattgaccttctcggtggaggaattttagtggacaaaactggagattggatcacacttatacaaaattctccaattagtaacttgttgagagttgctgcttggaagaaaggttgtttaatggtcaagattgtgatgtctgggaatgcagcaatcaaaaggagtgattgggcctcattggtacaagtgtttttaacaaacagcaacag

SEQ ID NO: 42940 - DNA, 192 bp, Glycine max
  Clone ID: LIB3139-052-P1-N1-H3
ctagttttttttctgcttgcttccacacttttggggggtttgtctcctcctcaatcttcattgaccacggcttcccctaggtgacacacacacgcagagatcatggcttgcgttagtgaggttagaagattaagaaagaatggcatttgcaggaacaacccacacatctatgttctgtgacaaaactgttta

SEQ ID NO: 42941 - DNA, 378 bp, Glycine max
  Clone ID: LIB3139-052-P1-N1-H4
ttctgttctcacatttcctatatatattggccactctttgtgtgagcttctcaacagaaagacacaatgggcaaagcaggtagtacttgtgctcttctatcccttctcattctttcactctttgtggctgaaatctatggaaatagacaagttcaagctcttaacaaactgcacaagtccaccaagttcagaggaaattcacaaattgataggagtgagtttgaggtagaggagcttgtttatgatgacattgctcactctcaagagggtctcaaagagaaagatagaattgagagtcttccaggacaaccccctgtgagtttttctcagtatggagggtatgtcactgtggataaagtggctggtcgtgccttctat

SEQ ID NO: 42942 - DNA, 373 bp, Glycine max
  Clone ID: LIB3139-052-P1-N1-H5
caaaaccatccaacaagggaaacagaatattattccattttttcacttccacactttcttgcattcattccccattttcaactatggcctcttcagctcaattttccaccactttggtcgtactatgtctcttccaattcctagcaggttcatattcaacgacattcacaattgtgaacaagtgcagctacacagtttggcccggcattttaaccggcgccggaacctcaccgctctccaccaccggcttcgtcttacaacccggcgagtccaacgtgatcaccgtgccggccgcctggtccggccgcctctgggggcggaccgtctgcacccaagacgccaccggaaaattctcctgcgtcacaggcgactg

SEQ ID NO: 42943 - DNA, 379 bp, Glycine max
  Clone ID: LIB3139-052-P1-N1-H6
gtttgggagcactagagagatttgtggccagatctcctaacctgaagagtttaaagctgaatcgttcggtgcccgttgatgcactgcaaaggataatgatgcgagcacctcaactatcggatttgggtattggatcacttgtccatgatccagaatcggaggcctacataaagcttaagaatacaaaaagagagaatggggaacgaggaagaagaagaagaagtggtggctgaagttgaagcagtggaagccgtgtatggaaccgattgcgtccttctccgttcattccctccccatttccacatctctctcaaacccagaaccgctgatgtttcatcccaacagtttgtggaagctgttctggagatacaagcaagct

SEQ ID NO: 42944 - DNA, 353 bp, Glycine max
  Clone ID: LIB3139-052-P1-N1-H7
gtaataatctggaaatgcaagaagcttatcttgtcaatctcgtaaatgtgttacgagaattgtatttgcacagtccagaggaagctcgccaattgagaaggaaagctctctctcgtattgaatggctgcaaaaagctgatgtgcctaccatagcacagattgaagagttccattcgatgcagaggatgatgaatgctcctgattcaaatgataatattgatctactgttgagcattgatttgttgggtttacaaggagcaggtaaagcttttccaaacaagattgtttttgatgataagcttgtgttggctaacacacaagaattctttgatggaaattttccagtggattct

SEQ ID NO: 42945 - DNA, 349 bp, Glycine max
  Clone ID: LIB3139-052-P1-N1-H8
gctttctagctggtcataatatcaccattactgatggtattgacaaaactagtgcaactttgcaatttagaaagttagcagattgtgattttctcaagagaaactttaagcagatgtctaatgttttgtgggtggctcctgaggacaaggcgagtttatggtcacaacttcattatgtttcgtgtaataatctggaaatgcaggaagcttatcttgtcaatctcgtaaatgtgttacgagaattgtatttgcatagtccagaggaagctcgccaattgagaaggaaagctctctctcgtattgaatggctgcaaaaagctgatgtgcctaccatagcacagattgaaga

SEQ ID NO: 42946 - DNA, 365 bp, Glycine max
  Clone ID: LIB3139-052-P1-N1-H9
ctcgagccgtttctgcttgcttcttcacttttttttgctttgtctcctcctcaatcttcattgtcctgttcttcccctaggtgacacacacacgcagagatcatagcttgtgttagtgaggttagaagataaagaaagaatggcatttgcaggaacaacccagaagtgtatggcctgcgacaaaacggtttatctggttgataagttgaccgcggataaccgagtgttccacaaagcttgcttcagatgccatcactgcaaaggaaccctcaagctgagcaactacaactcttttgagggagttctttactgcaagccacattttgaccaactgttcaaaagaactgggagccttgacaaaagct

SEQ ID NO: 42947 - DNA, 383 bp, Glycine max
  unsure at all n locations
  Clone ID: LIB3139-053-P1-N1-A1
accacaccacacctggctttctctttatcattcgttccttcctttcttcgcattgacaaaccctaacatagcatcatcctaaggcacatgcttctccccctgaatactttgtcctccaggggaacacaacttataaagacgatctatatttaaggaagaggacagggatgcgtcggtggctttgttgcacatgtcaggtggaagagtcttacccatcaaatgaaaatgagcacctgaaaagcccaaggaattatggagatggaaatcaaaaaggctcaaaggtgtcagctcctgtcaagcctgaaacacaaaaagcacctncacctattgaagctncagccttatctttagatgagctgaaggagaagacagacaactttggt

SEQ ID NO: 42948 - DNA, 378 bp, Glycine max
  Clone ID: LIB3139-053-P1-N1-A10
atttgaagtatgataaaaatgtctccagcctatgggaggaactatgggaagaatacacaagtggggaacgaatcactctccacttgtacttgggagaaattgtttcacttatttgtgagggcatgtcatcatcatcatgggcaagtaaaagaaaatctgccgaggctatatgcaggcttagtgaagttttgggtgaatctctttcttctcaccatgaggttttgcttcagtctctcatgaaggaaattcctggtcgcctatgggagggtaaagagatgctattgctagcagtaggtgctctatgtacatcctgccataaagcaattttggctcaaggttcctcatcttccattgccattctgaatttggtatcatctg

SEQ ID NO: 42949 - DNA, 378 bp, Glycine max
  Clone ID: LIB3139-053-P1-N1-A11
tgttatttgtggcggagcatgaactcctccaccaacagctcgaattctcagtcaatggctgcagcagccagtgatgggtctgggaagaaggtaagaaaaccttacaccataaccaagtccagggagagttggactgaggaagagcacgacaagtttctcgaagctcttcaattatttgacagggactggaagaaaattgaagattttgtaggttcaaaaacagttattcagattcgaagccatgctcagaagtacttcttgaaagttcaaaagaatgggacagtggcacatgtgcctcctccccgtccaaagcgcaaagctgctcatccttacccacaaaaggcatcaaaaaatgttttggtgccactaccagcttct

SEQ ID NO: 42950 - DNA, 370 bp, Glycine max
  Clone ID: LIB3139-053-P1-N1-A12
gctattctcatgaatatgccaaatgctgttctttcaatgtggagatattttgttggagatctcgtctttgaagtttctaagatgacttctccctacattaaatgtacagtctctttcttcatagcatttggaaatttggctgatgacaccatcaattttgaggcttttccccacaagctggtgcagtttggagagattcaggaaaaagttgtattgaaattttcacaagaggaatttcttacagcttggtcaactcaggtgcgtcctgcaacaactctgttggctgatgggtgtccatatttgtatgctatggtgcatgatagttcagtgtctacaataccaggtgattttgtcattggtgttaagttga

SEQ ID NO: 42951 - DNA, 392 bp, Glycine max
  Clone ID: LIB3139-053-P1-N1-A3
cccaggcaagggaagtaatgactggaggtactgattggaagatacgtcgatgggatcattacagtcctgacagaagttactgtatttgtggaccaaacttaaaaggaataggaaatgatgatttttatgaaacaaaatctagttttggggtgcaagttgtacaggagaccaaaagacgtcctcttacaatcaagctgacagcaaaggcaattcttgcagctgctgccactgattctgctggttgccatagggattctattgtttctttggcttctatcaagttaaaccagagacttttactttcaagtggtagagatggggcaatcaagggttggaagtaaacttctatagttcatttttgggtatttttgtacataattagtgtcaaatct

SEQ ID NO: 42952 - DNA, 372 bp, Glycine max
  Clone ID: LIB3139-053-P1-N1-A4
gacccgatctctatcagcaggatcaaagttttgttggaaatgacctcttggactggtggcatgcaaaccgagcaggggtgttgtttagtatgatggatgtgacctgattgtcaactataagtttgttggtcactattaaattcatgccccatatgtactggatgaatgattattttgaggtcagtgtattgtctacaagtatttatttttcaacattctcccatcctcccttgtgtaatcttttcatgtgattttttggggacttctgtatggttggaaacttattttaaatgtacaagtgtctaaagaaagggcaaattgcccaaatttatgattatttttactggaagtgtgatgaaacattattgtgac

SEQ ID NO: 42953 - DNA, 377 bp, Glycine max
  Clone ID: LIB3139-053-P1-N1-A6
ggctgaagttcaaaagctagaagctgatagatttcaacttgcaactgagatagccactactggtgacagttctctgtttctacctgttaacctgaagagacttatctggaatgctcagaagacatttaaggttgacttccgaaggccttctgatatgcatccaatggagattgtggaagccattgataagctccaggagcgacttaaggttgttcctggtgaagatctcttgagtcaagaagctcagaagaatgctactcttctgttcaatattctgctccgcagcacttttgccagtaaaagggtcttggaggaatacaggctttctcgtgaggcatttgagtgggtagtgggagaaatagaatcaaggttcttgc

SEQ ID NO: 42954 - DNA, 376 bp, Glycine max
  Clone ID: LIB3139-053-P1-N1-A7
gggtcgcttggagacaacataggattgaaagaagagttcatcaccaatgtgtgtggtttggccttccaagctcacatgtcaccggagaatctctaccatttccatgagattgagattttttccgaaatttatcatgttttcagcttttcagggtcttggaacccccatgaatggcttgttaataacaaaccttttggggaaacaaagatagatcatgccctgtttccttcacttagaagtattggtaatgatgaagctgctttggtgaatgaaggcttcgcaaagagattcgaccacatattgaaaactagctccattaaatctgaggtgaataaagctatggttgatggaaagcaagtagtgtttacagggcact

SEQ ID NO: 42955 - DNA, 386 bp, Glycine max
  Clone ID: LIB3139-053-P1-N1-A8
ttcacatctgaatcagtgaacgaggggcaccctgacaagctctgtgaccagatctccgatgctgtgctcgatgcatgcttggagcaggaccctgacagcaaggttgcctgtgaaacctgcaccaagaccaacatggtgatggttttcggagagatcacaaccaaggccaacgtggactatgagaagattgtgcgtgacacatgcaggaacattggttttgtctctgatgatgttggtcttgatgctgacaactgcaaggtcctcgtcaacattgagcaacagagtcctgatattgctcaaggtgtgcacggccacctcacaaagaggcctgaggagattggtgctggtgaccaaggtcatatgttcggctatgccactgacgagac

SEQ ID NO: 42956 - DNA, 322 bp, Glycine max
  Clone ID: LIB3139-053-P1-N1-B1
gttcccactccctttctctctccccaacccaaaaatggcatgaaaattgaccctcattgcgttggttctcgcggtggccctgtgcgccgttgatctaacccatagcgcatcagcatcctcccctcacgcgccagcgccctccgtggactgcaccaacctcgtcctcaccatggccgactgcttgtccttcgtcaccaacggtagcaccgtcaccaagccagagggcacatgctgctccggtttgaaatctgttctcaaaactgctccggcgtgcctctgcgaggctttcaagagcagcgctcagttcggcgtcgttttgatg

SEQ ID NO: 42957 - DNA, 376 bp, Glycine max
  Clone ID: LIB3139-053-P1-N1-B10
ctttctctcttctctctctgtccgaagatggcttcacgcaggttcgtatcttctctgattcgatcctcccttcgtagatctcaatcgaaaccctcgatttccgcatccgcatcgaggctcacgtcatccaaccgtgcctctccgcacggttacttgctgaaccgcgtcgccgaatacgctaccgcggcggcggctgctaccgctcctccctctgctccgcctccgggcaagaaggaggttagcggcggcgggaagatcaccgatgagttcaccgggaagggctcgatcgggcaggtctgccaggtcatcggtgccgtcgtcgatgtcagattcgacgagggtttgcctccgatcatgaccgcgctggaggttctgg

SEQ ID NO: 42958 - DNA, 284 bp, Glycine max
  Clone ID: LIB3139-053-P1-N1-B11
ccttttattttccctcacttcccaaaggcatcggagagacattctattatttctggtaccacccaaccttcatatcctattttttctaccccggatactaaattttcattgtacccttctgtaccagaacctaaatatatatcactccacatatttttgaccacgatattcttttgtcagcatgacttcctttacaattcgtctaactcatatccccatctaagaattcattatacctgcgtgttcttcatccattattatcattcaaagctctgactgcacat

SEQ ID NO: 42959 - DNA, 359 bp, Glycine max
  Clone ID: LIB3139-053-P1-N1-B12
ttgcgttctccctcgttttcgcggccgtgtcggcctcttcggacggcggcaacgaggaaccgctgatcatgcaggtggtcgatggcggtgacgtccggctgggagcagagcaccactttttggagttcaagcgcaggttcgggaaggcgtacgattccgaggacgagcacgattacaggtacaaggtgttcaaggctaacatgcgccgcgcccgccgccaccagagtctggacccttcggcggctcacggcgttacgcgcttctccgatcttacgccgtcggagttccggaacaaggtgttgggtctgagaggtgtgaggttgcctttggacgcgaacaaggctcccattctccccact

SEQ ID NO: 42960 - DNA, 374 bp, Glycine max
  Clone ID: LIB3139-053-P1-N1-B2
attaggcctgataagaccagtgaagtgtttggagctttgcttcctttgatctttcgttttgccactggagttttcgtttctgggtattctttttcaattgtttctaaggatgaaattcctacagacgaatatgctttggaacttaatggcgttaccataaaagaaacagcaaaattaggccctcgcccagagaagcctattgaaatatatgaatttgagagctgtccattttgccgaaaggttagagaaattgttgccattttggatcttgatgttcttttctatccttgtccaagaaatggcccaaatttccgtcaaaaggttctagagatgggtggcaaactgcagttcccctacatggttgacccaaacac

SEQ ID NO: 42961 - DNA, 375 bp, Glycine max
  Clone ID: LIB3139-053-P1-N1-B3
aaagtacattgcttgggagcagaggaacttgggatttgctgaatatggttcttactggcgcaacatgcgcaagatgtgcacattggaattgcttagccaaaccaaaattaactccttcagaatcgtgagagaagaagaacttgacctatccatcaagcttctaagagaggcatccaatgatggagctgctgctgttgatatcagtgccaaggttgcaagaatcagtgcagacgtggcttgtagaatggtcttgggaaagaagtacatggaccaggacttggatgagaaggggtttaaggctgtggtgcaagaggtaatgcacttactagcaactcctaacataggtgattacattccttacattggtaaacttga

SEQ ID NO: 42962 - DNA, 379 bp, Glycine max
  Clone ID: LIB3139-053-P1-N1-B4
aaaaagttgtattgaaattttcacaagaggaatttcttacagcttggtcaactcaggtgcgtcctgcaacaactctgttagctgatgggtgtccatatttgtatgctatggtgcatgatagttcagtgtctacaataccaggtgattttgttattggtgttaagttgacaaccataaacaatatgtgtgcatatgggctcaatcctggtatttcaggttctcgtcttttgggcaccattcctcagtccatttcacagcaaactgtttggaatcaaatggcaacagtgagaacaccattgaattttgattctagcaagcagagcttttgtcaattttctattgaccttctcggtggaggaattttagtggacaaaactgg

SEQ ID NO: 42963 - DNA, 183 bp, Glycine max
  Clone ID: LIB3139-053-P1-N1-B5
gagaggacctatctaaatgcatagagggagacttgtgttgcagttcccgattctgcgtggaaacagaatgctgcgccggatatgcaaccatatatggacacaaccgctgggtttgacatagatgccaaaggaagagcgctagtttggaattacgagtctgcagaccgcgactttggttcatgc

SEQ ID NO: 42964 - DNA, 379 bp, Glycine max
  Clone ID: LIB3139-053-P1-N1-B6
gggagttaggttctgcacgctctgcttccagcgagtgttctttcttcgtttcaacaccttaatttgcacacgctgcttcttcagcttgagaaatggcacaagaaacctttctattcacatctgaatctgtaaacgagggtcaccccgacaagctgtgcgaccagatctctgatgcagtgctcgatgcgtgccttgaacaggaccctgacagcaaggttgcctgtgagacatgcaccaagaccaacatggtcatggtctttggagagatcacaaccaaggccaacgtagactatgagaagattgtccgtgacacatgccgcgaaattggattcatctctgatgatgttggtcttgatgctgacaaatgcaaggtgttggt

SEQ ID NO: 42965 - DNA, 383 bp, Glycine max
  Clone ID: LIB3139-053-P1-N1-B7
aagtttgttaaaattatgaaccttagacaaagtgttggtggtgatcttaaacttcttactgatgggaagttgtatgagggtaagcatattcctgtatctaatattagtgcaggggaaaatcatgtagttcaaatacccttaatggcacaggaggaaattctgtcttctagtgcaagtgatttcagaactgcaatggtgagtaaaaatagcaaacctcaagctactgcaatgcatgtgggagctatagaaattatcattgatagtttcgcaagtcctgactgcaacatagttggtgcaatgcttttggttgatacttatcataccaatcctgaaaatgcagttcgtagtatttttgttgcgcctttcagaggcgggaggcccat

SEQ ID NO: 42966 - DNA, 386 bp, Glycine max
  Clone ID: LIB3139-053-P1-N1-B8
acagaaccttttgattgtgtattcttcaatattccgtagaggggatgcacattcaattccttcatctattcaaggggcagcatctataacttcagcagcatcactcgataattctctatctgacatgtatcgctctcctccaaggccattaccatatgatgcagaacccagatatttccgctcgcaacgtgatggactagtttcaaggcgtgagaagggttcaagtcattcaaatgaggaaacagaacctctaagaagtaatgcagatgtggatccagaatccttaaattcaggagacaaatggaaggaaagtgcctgtgaagctggatcaaaggaataccgttctaagtcctcactaagacttcaatcaacaaaatattcaactg

SEQ ID NO: 42967 - DNA, 368 bp, Glycine max
  Clone ID: LIB3139-053-P1-N1-B9
aaaaagaactagctagcttgctagagtgtgagaactctagcatatactagtactactacattccttcatcttcctttttatttttcaccataaaaaaacaagagcacaaagatggtgagagctccttgttgtgaaaagatgggtttgaagaagggtccttgggctaccgaggaagatcaaattctcacatcttacatccaaaaacatggccatggcaattggcgtgccctcccaaagcaagcaagccttctaaggtgtgggaaaagctgcagactccgctggattaactatttgaggcctgatatcaagagagggaatttcacaattgaagaaagagaaactatcattaagctgcatgagatgttggg

SEQ ID NO: 42968 - DNA, 386 bp, Glycine max
  Clone ID: LIB3139-053-P1-N1-C1
ggcgccggaaaaatggccgagtccattgcccgaggcgccgtccgctccggcgtcctgccgccttctcgcattcggaccgccgtccacttcaacctcgcccgccgtggcgccttcgagtccttcggcgtcaccgttctcccttcaaacgacgacgtcgttcgcgaaagcgacgtcgtcgttttgtcggtcaaacctcaattagtgaaagacgtggtgtcgaaattgacgccgcttttgacgaagaacaagcttttggtttcggtcgctgctggtaccaaattgaaagatcttcaggaatgggctgggaacgacagatttataagagtgatgcctaataccccagcagctgttggccaggcagcatctgtaatgagcttggggggatc

SEQ ID NO: 42969 - DNA, 254 bp, Glycine max
  Clone ID: LIB3139-053-P1-N1-C10
gcctggtgtgttgattcaggtctatgaaggtgaacgtacgaggactcgtgataacaatttgcttggcaaatttgagttatctggaattcctcctgctccgagaggtgttcctcagatcaccgtttgctttgacattgacgccaacggtatattgaacgtgtctgcggaggacaaaaccactggacagaagaacaagattacaattaccaacgacaaaggaaggctttctaaggaggagattgagaagatggtgc

SEQ ID NO: 42970 - DNA, 308 bp, Glycine max
  Clone ID: LIB3139-053-P1-N1-C11
gcaacataatggtttgcagagggaagagattattaaattaataaagtatgccgaacaatcttctggcaagaatacagaatcagtagaggcagggacaggtgatatgttgcaggcaccacctgcaacaactagggagcgagagctgcattttcaggtgattcaactccaacagagcattggaagccttgttgaggaattgcaaagacaaaagatgaaaaatgttcagttggaaaaacagttgaacagtatggctaacagagtggaaaagtgaacaagaagatatgaactttatcatggtttgactgata

SEQ ID NO: 42971 - DNA, 375 bp, Glycine max
  Clone ID: LIB3139-053-P1-N1-C12
gaaactcccaaggaatggcaactggatctaccttgtgacaaaattcctagtgtcttgactacaactgatgaaagattggtaggcacagaacatgagggatatgatccttttcttggtggaattcaaaaatatgccactcccatgatgcccctagatgaagaaattctttctaaggttgcacaagatatggttgaggaatggtttgattgtgttgatgaggaggattcctttgaggaagtttctttgagtgcagcactcaatggtgttgagggtttggactatatggaaagaattcctcttgccacatctgagggttttccccatgtgctttcacgcaaaaatggtgaaaaaggcaaaaggagatttgtttctggg

SEQ ID NO: 42972 - DNA, 206 bp, Glycine max
  Clone ID: LIB3139-053-P1-N1-C2
agtggacaaaactggagattggatcacacttatacaaaattctccaattagtaacttgttgagagttgctgcttggaagaaaggctgtttaatggtcaagattgtgatgtctgggaatgcagcaatcaaaaggagtgattgggcctcattggttcaagtgtttttaacaaacagcaacagttcagagcattttgatgcatgttatg

SEQ ID NO: 42973 - DNA, 382 bp, Glycine max
  Clone ID: LIB3139-053-P1-N1-C3
cacaggcacgctgagcatggaacacagaaccctagaactcaacctggcttcagcaaaggatctcaaagacttgaatatattctcaaagatggatgtatatgctgtgctttcactctccggcgatcaaaagaccaagactcccgtccacagaaacggcggcaccaacccaacatggaattttccggtcaagttcacttttgatgaatcggtggcgcggcagaaccgtttggccctcgaaatcaagatccgctccgagcgcgccctcgccaccgataaggacatcggccaggtccacgttcctctcatggaactcctcaagcaacctggcgacggtaaatccttccagcacgttagttaccaggtcagaaaaccctccggcaaa

SEQ ID NO: 42974 - DNA, 93 bp, Glycine max
  Clone ID: LIB3139-053-P1-N1-C4
ctcagactttcttttcaagtaacacagaaccctacaaggcagccttttcttatcataggatctcaattacttaaatattttctcaaagatcga

SEQ ID NO: 42975 - DNA, 374 bp, Glycine max
  unsure at all n locations
  Clone ID: LIB3139-053-P1-N1-C5
tccaaacaagattgtttttgatgataagcttgtgttggctaacacacaagaattctttgatggaaattttccagtggattcttggttaccaatttttgtgaattgtctttatcctgtaagtcaattaccttcagaagctgtcgttgtaaatgtcacatgtggtagtggacgtggtggnttacccaccactgcttggattagttctgcagttaacaatcgctccttagatatcaacaaaaggattcgcacagcacttgggaaaggttagaaaattgtttttcttactagagttgattcctttccagtagctttactggctgttctttttggtgttaagaaatgaaatttttagttttaacgccccttattctatt

SEQ ID NO: 42976 - DNA, 371 bp, Glycine max
  Clone ID: LIB3139-053-P1-N1-C6
tcggattattagtgtaaggagataactggtagtggaagatgtgttgccaattgagatgatggtcctttatacaaaggttttttttacaccaattattgtgtattatatatattttttttaggcaattacttttataagctattatttttttattgcacaattattttttggtcaataatatttttttttaaaatatttattttttacaaaaaattttttatttattcataaatttatttttttatacaaaacatatttttttattatttttatattttttttaaaatacaattatttttttcactccaaatatatttatattattcttaaaaattttcttcttttattattttatattattaatttttttt

SEQ ID NO: 42977 - DNA, 369 bp, Glycine max
  Clone ID: LIB3139-053-P1-N1-C7
gccttattgctgcacttttggcaaattatgttgatgattggatggaccctgtcggtgctatcattctggctttgtacaccattcgcacatggtcaatgacagtgttggaaaatgttaattccctggttggaagatcagcagcaccagaatatcttcagaaacttacatacctatgctggaaccaccacaaggctgtgaggcacattgatacagttcgggcatacacatttggatctcactactttgttgaggttgatattgtcctgccatcggatatgcccttgcaagaggctcatgatattgaggaatcgttgcaagaaaagcttgagcttttgcccgagattgagcgtgcttttgtcatcttgatta

SEQ ID NO: 42978 - DNA, 380 bp, Glycine max
  Clone ID: LIB3139-053-P1-N1-C8
ggacttcgtgtcagatttaaacttcttctgtttccttctcagttctctgtttaatttcaagttcaagctggtgaaatcttggattagtgctcccactctcctatctggtataggacttcgtgggtagacttttctatttctctcctttctttcactctcttcttctcactgatccgcattgccgttcaaagtggtcttatttgaaaaacacttgggcgttggtgcaaatgtttgcttcattcattttctctggagacaacaggctcactgagaaaacaatttttacttgcagagatttggacatcttggttgtttattatacaatagcaactcaatttagaaaatttctaccgcattacattaggtggcatctgtatacc

SEQ ID NO: 42979 - DNA, 379 bp, Glycine max
  Clone ID: LIB3139-053-P1-N1-C9
catttgtgtcactggatggactgccaccccaatgcaggatgttcaggttacaattgattggtttatttcctctcaggaatgtgttcccaggacctattgtgttttaaatccacaaaatccttttgtgttaaataggtggatgggaaaactgactttccctcagggcacttcccgaagtgttaagagaatgcctctttctatagggggaggagctggtgcaaagaatgctattctcatgaatatgccaaatgctgttctttcaatgtggagatattttgttggagatctcgtctttgaagtttctaagatgacttctccctacattaaatgtacagtctctttcttcatagcatttggaaatttggctgatgacaccatc

SEQ ID NO: 42980 - DNA, 320 bp, Glycine max
  Clone ID: LIB3139-053-P1-N1-D1
gtgatgataacttaattagtgttcatgaatatgtcaagccttactttagtggttctaaattgaaaagctttctagctggtcataatatcaccattactgatggtattgacaaaactagtgcaactttgcaatttagaaagttagcagattgtgattttctcaagagaaactttaagcagatgtctaatgttttgtgggtggctcctgaagacaaggcgagtttatggtcacaacttcattatgtttcgtgtaataatctggaaatgcaagaagcttatcttgtcaatctcgtaaatgtgttacgagaactgtatttgcac

SEQ ID NO: 42981 - DNA, 374 bp, Glycine max
  Clone ID: LIB3139-053-P1-N1-D10
gtcaaggcacgcatctgatgagttctaccttgggcagagagatggtggtgactactggacttctgatgccggtccattagaggcatttaagaggtttggaaagaagcttgaagagattgaaaagaagcttatagagaagaacaaagatgagacattgagaaaccgctatgggccagctaaaatgccttacactctgctctatccttctagtgaggagggattgactttcagaggaattcccaacagtatctctatctaaggaccctatggttgcttaagtactgttcctggttttaaataaatgtgaaattgaaggaaccagattccttaatcagttgtgtatgcttaagtcatgtatttggagtggctgaatg

SEQ ID NO: 42982 - DNA, 370 bp, Glycine max
  Clone ID: LIB3139-053-P1-N1-D11
ctcgagcctcgttggtgcaaatgtttgcttcattaagtttctctggagacaacaggctcactgagaaaacaatctttacttgcagagatttggacatcttggttgtttattatacaatagcaactcaatttagaaaatttctaccgcattacattaggtggcatctgtataccttgttgatctacattctcccatcttttctcactgctgaaattaaatataagcggaatctgagtaatattcatatttccggcttattttacgacggcagatacaaattctggactaaacacgagaaaaatcttgctttgacagaagaggaaaagatggaagtgattagaaatagaggcattcctgctgatgttcttgc

SEQ ID NO: 42983 - DNA, 373 bp, Glycine max
  Clone ID: LIB3139-053-P1-N1-D12
ttgaagaccagttgcttggttttgctttggtaccctggtctgaagtactggtccagaatgggaaacttgagaaagagttctctctttcttcaactgatctattccattctccttcaggttttgttcagttgtcgctttcctacactggtgcttcacctgatgttatggcaatttctgcaatgccaaacaaggtggccacagatggtaccgtgcaggactcagatacgtccgagtcactggcccgggatttagacaaaatcgagttcccagatccaaagattgtgaatgaagaccacttgatggtttcagaatacttcggcattcggtgtgaggagactcagtgttctgatagcttggctacttctgatgctga

SEQ ID NO: 42984 - DNA, 377 bp, Glycine max
  Clone ID: LIB3139-053-P1-N1-D2
gattatgctagttttgatggtttgattaccaagcaagttatgagcaagatggcagaaatgataaacagtctttgtggtggtgatgaaaaattgatgcgtgaaaggacgcacctgctgttggcttgttgttcaaggatggcaatttgtaagaaagatgtttggagagttgaatgtggaatcccttctggatttccgctcacagttatttgcaatagcatttttaatgagatgctcattagatatagctatgaaaaattactgcgccaggctaaagctccaagtatgtttttacaatccttcaaaaattttggttctttgtgtgtgtatggtgatgataacttaattagtgttcatgaatatgtcaagccttactttag

SEQ ID NO: 42985 - DNA, 374 bp, Glycine max
  Clone ID: LIB3139-053-P1-N1-D4
aattcttacaatttattatctttctctaagaactcttccaattttttctctctcttcctctttagcttcatcgccatggcatcaccagcaagaaccttctttgccttcattctcgccgtcgtcgctctcttcttcgccgccgccaatgctcaagacctctccccggctccgagtcccgatgccggagcggcgggatccgtttcgagctccgtcgccatgatcggagcttcggttgtgctgtcattgatggctatcttgaagcattgaattcgttaatttcgttgggtttgtacaaaattgattcgttttatatacagagtggtgattatgagctttggtatctatacttataggtataccggagagagattata

SEQ ID NO: 42986 - DNA, 112 bp, Glycine max
  Clone ID: LIB3139-053-P1-N1-D5
gcatgacgtccgcctctagctgaatggtggagcatgctatgatcgaagagaggggcggtagtcttgtccaggagtgttgaggactatcatctgggctgagattggagctaag

SEQ ID NO: 42987 - DNA, 377 bp, Glycine max
  Clone ID: LIB3139-053-P1-N1-D6
tgcagtcactgtgccaaaaatgttgccggcgagcgactagatgatggtttcttatgttgtggaagctgtgggagggtgttggaagattacttttttgctgaggagccttcatttgttaagaatgcggcagggcagagtaaattatcaggcaattatgtaagaacagttcaaagtgagtactctgaatcacgtcaaaggactttagatagagcttatgatgaaattaaatatttaagttttggccttggagttaatgatgaacatatggctgaacaagctttgaccttttataaaatagcgcttgagcgaaatttcacccgtggacgtaaatcagaacaagtacatgctgcttgtctctacattgcattccggcacaa

SEQ ID NO: 42988 - DNA, 383 bp, Glycine max
  Clone ID: LIB3139-053-P1-N1-D7
aattaagcaacacacacttcaatttatcagcatggcctccgttcagtgccacaaaacctgcaaagtgagctgccaacaggaaaaccagcacgcctcgtttgggcagaaagtttctgacttgttcaaagggcatcaacataatgaccacagctccaattatgccacccaaaccaaagtgctttcccagtcagggtcagggttaggccccttcaccaccaaaactcaaacacaatgcggttgcccccaaacacatctcagtaccactcatggctccaacacaaaaggccatggccatggccaagggagaattaagagggagcacaagagagggatgctgcagaacatcaaggatcgcttatcaggtgacaccagcagcgacagca

SEQ ID NO: 42989 - DNA, 379 bp, Glycine max
  Clone ID: LIB3139-053-P1-N1-D9
gtcagcgaagctggtttgtatcataaacctcgcatcgctgattgatttgcaatcgcatagaaatccaatccaatagaagaaatacgaaagatgaagaggtctcttagaaagttgggagttctggcggtagagaagcatgagcgtgaccgcagaaacattatgcctttgtcccagctagaggagctcgctcaggctacccaggagatgcaagacatgagagactgccacgatagcttgctttccgcggcagcagtggccgccaacagtgcttatgaattctcagagtccttgggagaattgggctcttgccttcttgagaaaaccgccttgcatgacgacgaagaaagcggcaaagttctcataatgctcggtaaaatgc

SEQ ID NO: 42990 - DNA, 373 bp, Glycine max
  Clone ID: LIB3139-053-P1-N1-E1
ggcgttcacggcagcgttttctggaactttcggacccaagtgtttgtaatttttgattgtaacatttttttattaacaatgtttgactaataaaaacaattaacgaaaacccaattttttattttcacttcagctgtccgttatataatttggcctgtgacctgatctgatcctattactgttttgattcgatcaaaccataaaccctagctagctaagtagcgttcgagatggagatggagaataatggattcctgaatttacaggcagtggcaccggaaatgtccggcgagggatttccatatgcaccggaaaattggccggaagatggtgacatttggggatggagaactgggcggagaattgtcgcaaa

SEQ ID NO: 42991 - DNA, 373 bp, Glycine max
  Clone ID: LIB3139-053-P1-N1-E10
ctttcttcatagcatttggaaatttggctgatgataccatcaattttgaggcttttccccacaagctggtgcagtttggagagattcaggaaaaagttgtattgaaattttcacaagaggaatttcttacagcttggtcaactcaggtgcgtcctgcaacaactctgttggctgatgggtgtccatatttgtatgcaatggtgcatgatagttcagtgtctacaataccaggtgattttgtcattggtgtcaagttgacaaccataaacaatatgtgtgcatatgggctcaatcctggtatttcaggttctcgtcttttgggcaccattcctcagtccatttcacagcaaactgtttggaatcaaatggcaac

SEQ ID NO: 42992 - DNA, 371 bp, Glycine max
  Clone ID: LIB3139-053-P1-N1-E11
agcatcagaaccaaggggggttggtggatgagttcccacaccttgatataattaatgacctgcttgatgaaccaagggagcatggtattgggaaggcatccagggcaagttcagtgttctactccctcaatgatggaccacagttgctaaatcgtcagttcacttttcctggagacttgggtaccgatgatgatttgggatcttccaccagttcttgtaggtttgagagatcgcgaagttaccatgatgctgggtttcaacaagggtatagcacatctggtcggcattatgattcactacaggattatgttcctcaggcgagtacactatcgtatggaaatggcaaggtagatgggatgattccaaaccaa

SEQ ID NO: 42993 - DNA, 300 bp, Glycine max
  Clone ID: LIB3139-053-P1-N1-E12
ctaaagcctggccctgcaagtgttgaaatcgatgatcaccctatgcaaattgaagaaacacagtacccgaaaaccttcttctataaagaagaccttcatccaggcaaaacaatgaaagtacaattcagcaagcctcccttcctttaaccatgtaccaacaccccatggttgttgaaagggaggcttgctgaattgtactttcaacaaccatggggtgttggtacatggttaaaggaagggagggacgctgctaaagacggatatagttttgacgagctgtgcatcatgaaagaagccatt

SEQ ID NO: 42994 - DNA, 378 bp, Glycine max
  Clone ID: LIB3139-053-P1-N1-E2
cggctcgaggtttgatcaatggtttcttccctctcctcatggataatggaaaaccaaacccaaaacttaaattgaagttccagttatggttcaagccggcagaattagaaccaagttgggcgaagatgttgagcaatgactgggaatttcaagggctgagggaggctaccttcccactaaggtccaattgtcaggtcaaactttaccatgatgctcaccattcttctgcttttcaacctccatttgatctatgtggagctccaaaaaagctatgggaggatgtctataaagccattgagggtgcaaagtatttagtttatattgcagggtggtccttcaatcccatgatggttctggttagagatcctctcacagaaa

SEQ ID NO: 42995 - DNA, 382 bp, Glycine max
  unsure at all n locations
  Clone ID: LIB3139-053-P1-N1-E3
cggacacacactactcacagcacaaaccataacagaaagaaacaaacaatgagaacccaacgtcttaaccatctccttctctccctcttcctcttcgcagccgcattctccagccttcacccgacggccaccgccggagacgaaggcgcaccctccccaggcgacggcgacggcgacgccgatttcatacgcactagctgcaacaccacgctctacccggacgtgtgcttcacctccctctctcgctacgccagtgcggtgcaacagaaccccggccagctggcgcgcgttgccatctncgtgagcctctncaaggtccaccgcgccgnctnctacgtntncaacctcacgcgcgacgccgactacgacggcaccacgcgcg

SEQ ID NO: 42996 - DNA, 375 bp, Glycine max
  Clone ID: LIB3139-053-P1-N1-E4
gcggaagagagatatgataatgacaataggtactcgaaggatgcaatccccactaagggtgaatgcctctgggagggaatgcttcaaccaaatatctctagcactcattcagtcataagcatctttaagagtggtgagaaaactgctgctaaagactggcctgggtttctcgagatcaagggaagggttcgacttgatgcatttgagaaatttctgcaagaccttcgacagtccagaagtcgtgcaatcatggtttcgcatttcgtttccaaagagtcggatgatcaatcaactctacgtgaggtggctgactcgtacattttggacgagagagtaggatttgctgagcctgtccctggagttgaactttacttt

SEQ ID NO: 42997 - DNA, 375 bp, Glycine max
  Clone ID: LIB3139-053-P1-N1-E5
caacaaggacctgaaggctgatccaaaggacgagttcctgtctttactaagagcaactgtgaagtgcttgatccgtcccgagaagtacttcgagaaggttgttcgcttggcgatcaacaagcgaggaaccgatgaaggagcccttacaagagtggtggccacaagggctgaggttgatttgaaaaacatagcagatgagtatcaaaggaggagcagtgtccctcttgaacgtgctattgttaaggacaccaccggtgactatgagaaaatgcttgtggcgcttttaggacatgatgatgcttgacatactcctttgtgtttgtgtgtgtgtacttgtggcagagttactatatagtgtgcagtgtactgctttgt

SEQ ID NO: 42998 - DNA, 379 bp, Glycine max
  Clone ID: LIB3139-053-P1-N1-E7
gagaacaacacaacacatcaaacgagcctctcggttgccaatgtgaagagagccaacatggctacaatcgctgccaggattctcggttccaactcaaggccagcggtcgcgctccgccgcttgcggtggccggcgtactcctccgcctccgcggtggtggcggagccggagaccacggaggtgaaggactacgccgattaccgccgctccctgtacggacagatcacgcacaaggcgctcctcgtcgacgccgttggcacgctcgttctcccctcgcagcccatggctcagatatatagaaagattggagagaagtatggagtggagtattcggaagatgagatactgttcagatatagaagagcgtatggtcaggctt

SEQ ID NO: 42999 - DNA, 380 bp, Glycine max
  Clone ID: LIB3139-053-P1-N1-E8
gcaggggctccaattcctactcttagccgcagatctctcagggcttgcatcttctcagttgtgaagatgtacacatcaaggaagaaaatccacaaggataaggatgctgaaccaactgagtttgaagagtcagttggacaggcattgtttgatctggaaaataccaaccaggagcttaaaagtgatctgaaggatttatacataaactcagctgtgcaagttgatgtttctgggaaccgcaaggctgttgttattcatgtcccttacagattaaggaaaggtttccgtaagattcatgtcaggcttgtcagggagcttgagaaaaagtttagtggcaaggatgtaatcttggttgccacccgaaggattttgaggccacc

SEQ ID NO: 43000 - DNA, 384 bp, Glycine max
  Clone ID: LIB3139-053-P1-N1-F1
ctaaatccttgtgttgtgttctaagtcctcaatccaacttttcagctatctatcttgaaagaagaagaaatgggatccaacggaacatcttgggctgaccagtgggataacgggcctgacccagtgactgtctccaatgaatcaaagaaaaagaacaacaaggccttcggcaagaccaaggcagttgcttccaccggcgtgaagaagttgaaggagggtacctctgttggcctccattggatcaagaccaagtatcacaacaccacccagaagcattaaactacttcttacttatcttaatttgattccttctgtacatatttataataatctttgtcttcatatgtttttctttttttctttctgttgattatctatgtttgg

SEQ ID NO: 43001 - DNA, 374 bp, Glycine max
  Clone ID: LIB3139-053-P1-N1-F10
gactgggatatgcttcattgataccatatgttgagccagttgtgcaagctcaaagtgctgaagtttactttgacttcttccctgtggaggttgatagtcaagagggagttgctcacattggtgaattgaaatctggtgtctatgttccactgcctacaaaaactaatttgatggaaactcccaaggaatggcaactggatctaccttgtgacaaaattcctagtgtcttgactacaactgatgagagattggtaggcacagaacatgagggatatgatccttttcttggtggaattcaaaaatatgccactcccatgatgcccctagatgaagaaattctttctaaggttgcacaagatatggttgaggaatgg

SEQ ID NO: 43002 - DNA, 374 bp, Glycine max
  Clone ID: LIB3139-053-P1-N1-F11
catccatcccctgtgtctctcttttttatttgataaattgaacctccttttgtgagtgtagtgagtgtctctctcattcattctcaggtcccaaccgcattaagcgtctttgatccatcttcttctgtccccgaaaggacgtacccaaaccaaatcgccacatatcaaatgctaagctacgcgcccttttctcagtgaccgattcttcagttaactctctctgatccaattcaattgaatgggcctcaacctcttcgctctccctccatggcaatggcaaactatttctctgctgtgatcctccaccgccatcccatcaccgccctcgatcttctcctcatcttcctccacaccctcttatagctctcacccga

SEQ ID NO: 43003 - DNA, 374 bp, Glycine max
  Clone ID: LIB3139-053-P1-N1-F12
agaaaacctaatcaacagatcaagttcctcctttttgttatggtgctaagaaaacccaatcaacagatcaagttcctatcttttatggtgctaagaaaactcaatcaacagatcaagttcctatcttttatggtgctaagaaaatccaatcaacagatcaaactcctctttttttatatggtgctaagaaaacccaatccgaagatcaagttcctattttttggtacggtattaagaaaactcaatccgaagatcaacctcctctttggtacggtgttaagaaaacctatgttgcaaaaagaagtctttcacaagaagatgaaacgatccttgttgctaatggtcatcaacatgacatcccaaaagcagaccaa

SEQ ID NO: 43004 - DNA, 379 bp, Glycine max
  Clone ID: LIB3139-053-P1-N1-F2
tacagcttggtcaactcaggtgcgtcccgcaacgactctgttggctgatgggtgcccatatttgtatgctatggtgcatgatagttcagtgtctacaataccaggtgattttgtcattggtgttaagttgacaaccataaacaatatgtgtgcatatgggctcaatcctggtatttcaggttctcgtcttttgggcaccattcctcagtccatttcacagcaaactgtttggaatcaaatggcaacagtgagaacaccattgaattttgattctagcaagcagagcttttgtcaattttctattgaccttctcggtggaggaattttagtggacaaaactggagattggatcacacttatacaaaattctccaattagt

SEQ ID NO: 43005 - DNA, 361 bp, Glycine max
  Clone ID: LIB3139-053-P1-N1-F3
attctgattctaccgtcatcaactaggagaagaagcttcattttctgcaaaatggatccctctgcggcattgctatttaaccacctcaagggtgcagacccgttcttcctgctagcgggtcctaatgtgattgaatcggaggagcacattctgcggatggctaagaacatcaagagtgttgcatctgaagttggaataccattggttttcaagtcaagctttgacaaagctaaccgaacatcatcaaaatcatttcgtggcccggtgatggctgagggattgaagatactcgagaaggtataaatagcttatgacattcctatagtgtcagatgtgcatgagaccatccagtgtgaatcat

SEQ ID NO: 43006 - DNA, 374 bp, Glycine max
  Clone ID: LIB3139-053-P1-N1-F4
gccacaaacgttgttgttttcagataaacacgtgactatctatctatcaatctccatctctgagttcaaccgaaccaaactccgaagctatggcagagctccaaaccaaggttgaacctgttccagtcccggctctggctccggtggagcccgagccaccgctggctgaggcgccgccgctcgagcagaaagcggtggtggtgcctccacctgttccggcagcagcagaggaaaccaaagctcttgttgttgtggagaaggagaaggagaatgagaagataccagaacctgtaaaaaagaatgccacaggtggatcccttgatagagacattgctcttgcagaaatagagaaagagaaaaggttgtctaatgtg

SEQ ID NO: 43007 - DNA, 376 bp, Glycine max
  Clone ID: LIB3139-053-P1-N1-F5
tgaaattttaataaaccgcgatcacaggttgccgcaccttaaaaccggaaacaaaagcaatcgttacttgatttcaagaatttctcaatttcttcctacttctttgtgtacgatttcttaagggaaagaaaatcactctctgtgctggtcacagacttcgtgaatcattttcttttccactcctagtttatttgctgaacactctcctatttgatataggacttcgtgtcagatttaaactttttctgtttctttctcagttctctgtttaatttcaagttcaagctggtgaaattttggattagtgctcccactctcctatctggtataggacttcgtgggtagacttttctacttctctcctttctttcactct

SEQ ID NO: 43008 - DNA, 379 bp, Glycine max
  Clone ID: LIB3139-053-P1-N1-F6
agggttcacaacttttccttttccttttgcttgcgaatctgaatcaaataatcaatcatccattcattattcatcatgtcgtcggcgaagaaaatcacgctgaagagttcggacggcgaggctttcgaggtggaggaggcggtggcgctggagtcgcagacgataaagcacatgatcgaggacgactgcgccgacagcggcatccctctgccgaacgtgacgagcaagatcctggcgaaggttatcgagtactgcaagaagcacgtcgaggccgcgaatcccgaagacaaaccctccgaggacgatctcaaggcctgggacgctgaattcgtcaaggtcgaccaggccacgctcttcgatctcatcctggctgctaact

SEQ ID NO: 43009 - DNA, 377 bp, Glycine max
  Clone ID: LIB3139-053-P1-N1-F7
ctctcccatggcttcctcttccctctttctctcactgtgtctcaccctttgccttgtttcctctctctgctatgctcacaaatcttccttaaccctacctgtgacaaaagacgattcaacccaccaatacctaacaaccctctcttatggcacccctgttgagtctgcaaaattcgtgcttgatctcggaggctcaatcctctgggctgactgtgcatccagaaccaccccatcttccacccttgccccaatcttccaccgttcaattcgctgcctcacggcaaagggtcctgaaattgagacacatagatggctctcgagtctcgcaaatcccatagatcaagatcagccgtgtcaaattcctgcagagaacagca

SEQ ID NO: 43010 - DNA, 375 bp, Glycine max
  Clone ID: LIB3139-053-P1-N1-F9
accataatcaatatgtgtgcatatgggctcaatcctggtatttcaggttctcgtcttttgggcaccattcctcagtccatttcacagcaaactgtttggaatcaaatggcaacagtgagaacaccattgaattttgattctagcaagcagagcttttgtcaattttctattgaccttctcggtggaggaattttagtggacaaaactggagattggatcacacttatacaaaattctccaattagtaacttgttgagagttgctgcttggaagaaaggttgtttaatggtcaagattgtgatgtctgggaatgcagcagtcaaaaggagtgattgggcctcattggtacaagtgtttttaacaaacagcaacagt

SEQ ID NO: 43011 - DNA, 344 bp, Glycine max
  Clone ID: LIB3139-053-P1-N1-G1
gtatgctctgcctatctgaaaatttccacacctcttttaattgtcgtaatgatgtgtgaagtgtgtgttattttaaaaaaaaaaaaaaaaaaaaaaaaaaaaaaaaaaaaaaaaaaaaaaaaaaaaaaaaaaaaaaaaaaaaaaaaaaaaaaaaaaaaaaaaaaaaaaaaaaaaaaaaaaaaaaaaaaaaaaaaaggggcgccccccccctaataacctcttcaccccggaaataaattccgacccggaccctgaaggcgacccaattttcctaataagaaggcgattaaaaccttggcgaaaaaatggcaaaaactttttcctgggaaaaattgttatccctt

SEQ ID NO: 43012 - DNA, 376 bp, Glycine max
  Clone ID: LIB3139-053-P1-N1-G10
ggcactagaattagtcctgctgttctttccacatctgatgctcttcaaaggcagcttcagcagctcttccacctccatgactctggcttggatcaggctttcattgatgctcttcctgttttccagtacaaggagattgtggggttgaaggagccttttgactgtgctgtttgcttgtgtgagttttctgaaaaggataagctcaggttgttgcctatgtgcagccatgcctttcacataagttgtatagacacatggcttttgtcaaactccacatgccctctttgtagaggaacacttctcactcaagggttttccgttgagaatcctatatttgacttcgatgatcttagggaggatgagatgtgtccttggt

SEQ ID NO: 43013 - DNA, 376 bp, Glycine max
  Clone ID: LIB3139-053-P1-N1-G11
ctcgagccgattcggctcgaggttgggtttacaaggagcaggtaaagcttttccaaacaagattgtttttgatgataagcttgtgttggctaacacacaagaattctttgatggaaattttccagtggattcttggttaccaatttttgtgaattgtctttatcctgtaagtcaattacctccagaagctgtcgttgtaaatgttacatgtggtagtggacgtggtggtttacccaccactgcttggattagttctgcagttaacaatcgctcctcagatatcaacaaaaagattcgcacagcacttgggaaaggtaagaaaattgtttttcttactagagttgatccttttccagtagctttactggctgttctt

SEQ ID NO: 43014 - DNA, 87 bp, Glycine max
  Clone ID: LIB3139-053-P1-N1-G12
cgtcccttaaacccaccacacttcaaagtcatgggtattccatgggacgacgtcgttgtgatccagcaagggaaggatcacaatgag

SEQ ID NO: 43015 - DNA, 377 bp, Glycine max
  Clone ID: LIB3139-053-P1-N1-G2
ctcgagccggaaaagctttctagctggtcataatatcaccattactgatggtattgacaaaactagtgcaactttgcaatttagaaagttagcagattgtgattttctcaagagaaactttaagcagatgtctaatgttttgtgggtggctcctgaggacaaggcgagtttatggtcacaacttcattatgtttcgtgtaataatctggaaatgcaagaagcttatcttgtcaatctcgtaaatgtgttacgggaattgtatttgcacagtccagaggaagctcgccaattgagaaggaaagctctctctcgtattgaatggttgcaaaaagctgatgtgcctaccatagcacagattgaagagttccattcgatgc

SEQ ID NO: 43016 - DNA, 358 bp, Glycine max
  Clone ID: LIB3139-053-P1-N1-G3
ctcgagccgcgcaaatggcattcttcagaagcgtttctgcactttctcgacttcgctctcgcgtgggccaacaatctaatctggcgaattcagttagatggctccaaactccgagctccagtaacactgatctttattctgagttgaaggaactggttccagagtatcaggaacgtgttaagaagctgaagaaagatcatggaagtgttgaattaggaaaaatcactgttgatatggtacttggtggaatgagaggaatgacagcttcagtatggctaggctcagctgttgacccggatgagggaattcgctttaggggcatgtcaattcctgaatgccagaaaaagcttccaggtgc

SEQ ID NO: 43017 - DNA, 376 bp, Glycine max
  Clone ID: LIB3139-053-P1-N1-G4
ctttcttccttctctcaccgtcaaaaacaattcctcatctgccaaatccaatgtttttgcctcaaaactcataagttcacattttttaaaatttccatttactttgcctatcctcatcttcattcattttcctcttgttttaaggttttgcttctgattgattgattgattgcctttgagagaaacttgtgaactcagttctttctttctttcaccctcttgggtaagctcagaaacttccataaagaaacagagtttctccctaaaattctgttaggtgtttgatctaggattttcattgggtccaagaaggaggatatcattgctatgattttgaaggtttctctcattgtggttctcctagtgatatgctcct

SEQ ID NO: 43018 - DNA, 380 bp, Glycine max
  Clone ID: LIB3139-053-P1-N1-G5
cagttatgtcgtggcaagcgtatgtggatgatcacctactgtgtgaaatcgaaggtaaccacctcactcacgccgctatcatcggccaagacggaagcgtttgggctcagagcaccaacttccctcagggaagcttctagattcgccgatctatgctcacttgttatggatattcaacatgcacaatagttctcaacttgtggcttgtttctcaatcagcaatggaagttcactgcatcttcatcttctccgataattaacaattaactaattaacaacaaaagcagattattagttgtgatgattatgattatgtacttgccacttgccagcaacaatggtaacggatctgttttttgtttttcttgatctgttctaat

SEQ ID NO: 43019 - DNA, 374 bp, Glycine max
  Clone ID: LIB3139-053-P1-N1-G6
cttgcttccaagttggttctgctagagaagctctgggggggcgttgttgctggccctcaacctgagcgtggccttgtcaagctcagaaaactcaccaccctcaaaactattgatgaaggagacagtagcaagctgcagaagacgttgtcgatgccgtcgacaccgacaaccccgatgactcccacgactccaacgacaccgggatccgcgcgtaaagctgacaacgtttggaggagcgtcttccatcctgggagcaactccgccacaaagaccatcggtgctcagatgtttgacaaaccactttccaacactcccactgtctacgactggctgtacagtggggagaccagaagcaggcaccgctgaaaggataa

SEQ ID NO: 43020 - DNA, 374 bp, Glycine max
  Clone ID: LIB3139-053-P1-N1-G7
atggtttatatgttatgaagcttgtgagatcattttgtagaacctcccatgagagtaatgatgatgcttttgaacatgttggttcaatacttgttaacatctcaaaacagcggaaagggagggagcttctacttgaccctaaacggggtctcttaaagcagataatcagacagtttgattccaacagttcattgagaaagaaaggggtctctggaactattcgcaattgttgttttgaagctgagaatcagctacaaaatttgcttttggtatcagagtttctctggcctgcattacttcttcctgtagctagcaacaagatctacagggagcaagacagattgaaaatgccacttgaacttgggactgcactc

SEQ ID NO: 43021 - DNA, 376 bp, Glycine max
  unsure at all n locations
  Clone ID: LIB3139-053-P1-N1-G8
aacactttctcagattcatatcccatcttctcttctccctcttcttaaaaccagggagggagagggagagagagagagagaacgtgcttaacatagcaatggcaatggccaacaaggagagggagaagaagttcttctttgtagggtcactagtaaactacgcagctgaactaaagcttcttctcgcaactctcttccttctttgtggtgttgccactctccttcaattcctcccttcgcgtttcaccatttcctcctccgatctccgcttctgcatctcaagggtgtccctaacacccccaccaccctttacacccccaccaccctttacatcactttctacacccccaacaccactctcttncacccaaaaaca

SEQ ID NO: 43022 - DNA, 377 bp, Glycine max
  Clone ID: LIB3139-053-P1-N1-G9
aataactaccaccaatagtaacaatgagtcgcacacacgacgcagctgctgcagtaagaagaggcgttgacaacgtggagtctggcatccataaaggtgtcgataaagtagaacgcggatttgcacgtgtgcaagaagatgcttctacagctttgcaccgaggcgttcaacgtgtcgaaacgtacacgactgctttagacaactacatccttgcgcaagccacacgcctgcgaaatgatatccaacccctccttcctaccatctctactactggtctcatctttgctggttctttgcccttgagcttctatttcaactcattgagtattaagagagtggttggcgtgcaagactatggcttccctacaaacctcgta

SEQ ID NO: 43023 - DNA, 378 bp, Glycine max
  Clone ID: LIB3139-053-P1-N1-H1
tcgggtatcatggggcaggacacaaagaactacaacaacatcgcatcatctcctctgttggaacctctgccttcgtcgaattcgaaacgagcttcgaagcttcaaacgttgggaaacatcatcgtcaccgtggtcggaactggggttctgggattgcccttcgcttttcggatcgctggatgggtcgctggatcgctcggggttggcatcgtcggcatatccacctactattgcatgctactgcttgttatgtgcagagaaaaattggcatcagaagaaccattaggggaatcaaacacatatggagacttgggttataggtccttcggaacccctggtcggtatttgacagaagttataattgtggtagcacaatgt

SEQ ID NO: 43024 - DNA, 379 bp, Glycine max
  Clone ID: LIB3139-053-P1-N1-H12
agaaaacctaatcaacagatcaagttcctccttttttgtatggtgctaagaaaacccaatcaacagatcaagttcctatcttttatggtgctaagaaaactcaatcaacagatcaagttcctatcttttatggtgctaagaaaatccaatcaacagatcaaactcctctttttttatatggtgctaagaaaacccaatccgaagatcaagttcctattttttggtacggtattaagaaaactcaatccgaagatcaacctcctctttggtacggtgttaagaaaacctatgttgcaaaaagaagtctttcacatgaagatgaaacgatccttgttgctaatggtcatcaacatgacatcccaaaagcagaccaagtttt

SEQ ID NO: 43025 - DNA, 345 bp, Glycine max
  Clone ID: LIB3139-053-P1-N1-H2
cggagcctatatttgctccacacatcaatctttcagagcatgtattaaactcttggatctgtaacacatactcaatgcacaaggctacaagaggtgaagacaagctgaagagcggtgttactgattttcaacgggctgaggaagcacatctacagagcgatctcgacaggtacatgctggcacaggccgaagacgagggtgtggcacaaaggcgatggagataggtctgcagcgccctaaaacgggtcatggctaggacacgagggaacccattacaggtctggatgggtagaacatgaaggtccagacactattgaacaacgtgctcatgtatgccgtgaaaaa

SEQ ID NO: 43026 - DNA, 376 bp, Glycine max
  Clone ID: LIB3139-053-P1-N1-H3
caaaatccttttgtgttaaataggtggatgggaaaactgactttcccccagggcacttcccgaagtgttaagagaatgcctctttctatagggggaggagctggtgcaaagaatgctattctcatgaatatgccaaatgctgttctttcaatgtggagatattttgttggagatctcgtctttgaagtttctaagatgacttctccctacattaaatgtacagtctctttcttcatagcatttggaaatttggctgatgacaccatcaattttgaggctttttcccacaagctggtgcagtttggagagattcaggaaaagttgtattgaaattttcacaagaggaatttcttacagcttggtcaactcaggtgcg

SEQ ID NO: 43027 - DNA, 361 bp, Glycine max
  unsure at all n locations
  Clone ID: LIB3139-053-P1-N1-H4
attttcttggctgtaataacattgtgtggtttcttttgtatcattataagatgattatgttttattctggtcatgagttattctttgatgaaccttaccatggttatctgactgaatctcgtgactatcaatggagttattctttgatgaaccttaccgttaccactatcaagtggagcaaacctctgcattcctattcaaatagtactgtgtaatttgttccagcagccatgatggcatgtagtatgtcaaagctttgttgagattttaaaaaaaaaaaaaaaaaatataaatattaataaattttaatttanttaatttttttttttaattatttattttttttttttttttttttttt

SEQ ID NO: 43028 - DNA, 381 bp, Glycine max
  Clone ID: LIB3139-053-P1-N1-H5
cgtctttgaagtttctaagatgacttctccctacattaaatgtacagtctctttcttcatagcatttggaaatttggctgatgacaccatcaattttgaggcttttccccacaagctggtgcagtttggagagattcaggaaaaagttgtgttgaaattttcacaagaggaatttcttacagcttggtcaactcaggtgcgtcccgcaacgactctgttggctgatgggtgcccatatttgtatgctatggtgcatgatagttcagtgtctacaataccaggtgattttgtcattggtgttaagttgacaaccataaacaatatgtgtgcatatggtctcaatcctggtatttcaggttctcgtcttttgtgcaccattcc

SEQ ID NO: 43029 - DNA, 373 bp, Glycine max
  Clone ID: LIB3139-053-P1-N1-H6
cttctttattccttttgtaatttcattcattcttaatctttgtgaaaaataatgttcatcgagaattttaaggttgagtgtcctaatgtgaagtacaccgagactgagattcagtccgtgtacaactacgaaaccaccgaacttgttcacgagaacaggaatggcacctatcagtggattgtcaaacccaaatctgtcaaatacgaatttaaaaccaacatccatgttcctaaattaggggtaatgcttgtgggttggggtggaaacaacggctcaaccctcaccggtggtgttattgctaaccgagagggcatttcatgggctacaaaggacaagattcaacaagccaattactttggcttcctcacccaag

SEQ ID NO: 43030 - DNA, 377 bp, Glycine max
  unsure at all n locations
  Clone ID: LIB3139-053-P1-N1-H7
gagaaaagagctcgacttggtttggtggaatgcgtcaaccatgagctcttgcagccatatcctgttttgcatgaaaagcctggtgattttgttgcacatatcaaattcacagtcttgttgatgccaaatggatcggatcgaatcacaactcatccactccaagaattgcagcccacaaaaacaatagatgatcctgatattaaggcctggctagccttgggcacaaagacaaagaagaaaggtggtggaaagaagaaaaaaggtaagaaaggggagaaggcagatgagtcagctgaagctgagcctatggactcaacaaacgaggccactccttaagagtgacttaactcttctnccctcttcttttcctcaaacaa

SEQ ID NO: 43031 - DNA, 374 bp, Glycine max
  Clone ID: LIB3139-053-P1-N1-H8
tccttctctctttcaccaatcaacacaaactaagttcttccttctgttgaaagcgatagcaatggccacgaatccaatcgaagcggggaacggcgacgctgctcccaaccctaacgcgactaccaaatcctccgtgtacctgcaagactcggaggagctgaagcgagtcttcagccgcttcgacgccaacggcgacggcaagatctccgtctcggagttggacaacgtcctccgctccctcggatccggcgtcccgccggaggagctccagcgtgtcatggaagaccttgacaccgatcacgacggcttcattaacctctcggagttcgccgccttctgccgctccgacaccgcggacggcggcgacaccgagc

SEQ ID NO: 43032 - DNA, 372 bp, Glycine max
  Clone ID: LIB3139-053-P1-N1-H9
ggaattttagtggacaaaactggagattggatcacacttatacaaaattctccaattagtaacttgttgagagttgctgcttggaagaaaggttgtttaatggtcaagattgtgatgtctgggaatgcagcagtcaaaaggagtgattgggcctcattggtacaagtgtttttaacatacagcaacagtacagagcattttgatgcatgtaagtggacaaaatcagaaccacattcctgggaattaatcttcccaatagaggtatgtggtcctaataatggttttgaaatgtggagttctgagtgggcaaatcaaacttcatggcatttgagtttccttattgacaatcccaaacagtctacagtttttgat

SEQ ID NO: 43033 - DNA, 310 bp, Glycine max
  unsure at all n locations
  Clone ID: LIB3139-054-P1-N1-A1
aatcgtgctcgagaattaaattaaaagaccattttcgtgcgcaccaactctcagaacatcaatcacttgatcacgtcacgcgaaaaccgaatggaagaagaagaagaagaagacacgtcgccaccgttctggacggaaaggcggcggtcgccgncgtcttcgncgctcgtactcgctgttcctcagctccagtgcacctctaatatgccttctggtgattgcactcgcattcatgctggtcataattcccacgctgcacttcttcaccacccaaattttcaaacccaattcggtgaagaagagctgggac

SEQ ID NO: 43034 - DNA, 371 bp, Glycine max
  Clone ID: LIB3139-054-P1-N1-A10
agcatgtcatggaaaagcttaccaaggtagatccttactttgacaagttggcagatgccatggtcacttggattgaagcttgggatgagcttaacccagctggagcatcagtggccaatggcaaagcatgaatcagttttggttaactgcataacaacagccacagaacttgaagtggaactatttatatactgtattttttccccttagtatttattttcaacttaacttttattcttggcttgaattttgcagcattgttagctgtaattctatttagtaacttaatgatttgagcttagaaagaacaagtacacccgtagggcgttactttctttttattactgtttaatgggtagagttcacatggc

SEQ ID NO: 43035 - DNA, 370 bp, Glycine max
  Clone ID: LIB3139-054-P1-N1-A11
tttaaattttgtgaggttcattatgaagaaaagggacaggcttagttgtcaagttggaatcaacccatactccatggaatggactggtttggccaatagattactgagtaagggcaatgatattctgtgttgcgattatgctagttttgatggtttgattaccaagcaagttatgagcaagatggcagaaatgataaacagtctttgtggtggtgatgaaaaattgatgcgtgaaaggacgcacctgctgttggcttgttgttcaaggatggcaatttgtaagaaagatgtttggagagttgaatgtggaatcccttctggatttccgctcacagttatttgcaatagcatttttaatgagatgctcatt

SEQ ID NO: 43036 - DNA, 374 bp, Glycine max
  Clone ID: LIB3139-054-P1-N1-A12
agcatgcttagcttttgtcaattttctattgaccgtctcggtggaggaattttagtggacaaaactggagattggatcacacttatacaaaattctccaattagtaacttgttgagagttgctgcttggaagaaaggctgtttaatggtcaagattgtgatgtctgggaatgcagcagtcaaaaggagtgattgggcctcattggtacaagtgtttttaacaaacagcaacagtacagagcattttgatgcatgtaagtggacaaaatcagaaccacattcctgggaattgatcttcccaatagaggtatgtggtcctaataatggttttgaaatgtggagttctgagtgggcaaatcaaacttcatggcattt

SEQ ID NO: 43037 - DNA, 266 bp, Glycine max
  Clone ID: LIB3139-054-P1-N1-A2
cagggaatggtcttatctggttaaggaccgactcttgagtgaggaggaagtgacgatcgaaatctggtaagaggctttaatcaaccaacgaacaacgatgtcgtggtttgcaaggacaatcgcaaactcactcagactcgacgacgacgacgacgaccacaatggcagtgacctaaaatccccttcgaagaaacccgattccgtattcacccccagttctaccgcgcgcggcgtaaagaggatttcttcgagctcaccaaatcctt

SEQ ID NO: 43038 - DNA, 353 bp, Glycine max
  unsure at all n locations
  Clone ID: LIB3139-054-P1-N1-A3
aaaaaaaacctcttatttcaaagagagagagagagattgcacagaccaaattgcagaggacgacaaagttcacaacttcaaggaaaatcgaaatggcccaagtgagcagagtgcacaatcttgctcaaagcactcaaattttcggtcattcttccaatcccaacaaacccaaatcggcgaattcggtttcattgaggccacgcctttggggtccctcaaaatctcgcatcttggtgaacaaaactggaagccttatgggaaattttaatgcggngaagggaaattccggcatgtttaaggtttctgcctccgtcgccgccgccgcagagaagccttcgacggcgccggagatc

SEQ ID NO: 43039 - DNA, 375 bp, Glycine max
  unsure at all n locations
  Clone ID: LIB3139-054-P1-N1-A4
aatggatctcatttgctgctctttttgcaatacttttgctactcatctctcctgagcttgcaagtgctgcccaacctagtcttattcttcaactcggccgaaaacttttccaatgcggcagcgccgccgtccctgttcgtggaaataccccatccaatggccgctcctagaggatataccccaccaccaaaacacccactctatggctgaatatttgagatgttagcatccttctttaattttgtgataaaaaaaatacttttaaagatgtataattgtgtgtcattactataatatatgtcatgtatgcttaatntcactgaaccatgtgtactactgcttatcgggcacgtccatttagtggccacacctgta

SEQ ID NO: 43040 - DNA, 370 bp, Glycine max
  Clone ID: LIB3139-054-P1-N1-A6
aacgacggttatggcgatgctgtttatgggttgtacagctgcagatacgacatcacaggatacttctgccagttctgtctcaccactgctgtcaacgaaatctctcggctgtgtcctgacagtgttaccgctatcctatggtatgatgtttgcatcctccgttactccaatcagagtttccatggcaaagttagtttaagcccaacgtggaacgttaccggacccagaaaaatcaagaattcaacagaaactaagagaattgaggatgctatggagggtttgattacaaaagcaactatagagaccaagcagttttgggcaggggaggagttcgattggggtgacaatgagacattgtatggatgggtgc

SEQ ID NO: 43041 - DNA, 362 bp, Glycine max
  Clone ID: LIB3139-054-P1-N1-A8
cttttctctactcttcccccattttttcttctttaatccctcgcctatatcttcagaaaattagatctgcttcagatctagggtttcccttttccaaatcacgagtccgttgagtttgattttgtggatgaaagcatagggatagggcttttgcaaacctctccaatgtttctcgaaattatatgaccatgcgtcgaattcgtatgctgcactccttctccgtcgtgttcctctactggttctacgttttctcatgaactccctctcaaatccgtaattaattagatcgatctccttccgtagttaatccttgtctctttttcaataattaattagatctgcgtctcctatttccttttttt

SEQ ID NO: 43042 - DNA, 70 bp, Glycine max
  Clone ID: LIB3139-054-P1-N1-A9
atcttacttttctttccgttatctcaggagagaatgaaacaaacttagcctcctttaagggaggttggcc

SEQ ID NO: 43043 - DNA, 380 bp, Glycine max
  Clone ID: LIB3139-054-P1-N1-B1
gcaattcctttatctttataagcaacttacacacacacacacacacatgtcaaacctaaacccaaatccaaaccatttcagaatatagcaattgataattaattgatccgaattgttgcggaaatctcaaacctaaatccaaaccatctcagaatattgcaattgataattaacagatccaaatggtggttttagcgagaaagaaacgagtcactgatccgttcgacgacgaagccaaagcacgtctcgtcggcggcggcgaccaccggcaattgagctacgtcagcagcgggagcgaacattccggcaacggcgacggacactcgccgtgtctctccgagctcgtgcatgatttcctcgaggacaatggcgactcggag

SEQ ID NO: 43044 - DNA, 282 bp, Glycine max
  Clone ID: LIB3139-054-P1-N1-B10
ctcgatccgataatattgatctactgttgagcattgatttgttgggtttacaaggagcaggtaaagcttttccaaacaagattgtttttgatgataagcttgtgttggctaacacacaagaattctttgatggaaattttccagtggattcttggttaccaatttttgtgaattgtctctatcctgtaagtcaacgacagcttctgaaggtaattgacttacaggatagagacaattaccttcagaagctgtcgttgtaaatgttacatgtggtagtggacg

SEQ ID NO: 43045 - DNA, 372 bp, Glycine max
  Clone ID: LIB3139-054-P1-N1-B11
tgcaactcctctgttccttcaattgttcaaatcccgagattatcattaaccttgctgcaaattgcgcacacgattctttgctttccttcgaaactctcccaaatcccactctctctctctctctctctcataaattcgccaccttttattttgcgtaactgctctgcaccttagtcttctctctccattctccaactccatttcttcgatctggagctctccgctttcaaagctgtcaaatttccgattcgggatggacaaatacgagctcgtcaaggatataggatctgggaatttcggtgtggccaggctcatgcgtcacaaagacaccaaggagcttgttgccatgaaatacattgaacggggtcacaa

SEQ ID NO: 43046 - DNA, 362 bp, Glycine max
  Clone ID: LIB3139-054-P1-N1-B12
ggcaagcctcactcaaccaccacacctctcctcgtgcacgctacccctttctgctcttcttctacctttcaagttttaaaagtataaagatggcagagacattcctatttacctcagagtcggtgaacgagggacaccctgacaagctctgcgaccaaatctccgatgctgtcctcgacgcttgcctcgagcaggacccagacagcaaagttgcctgcgaaacatgcaccaaaaccaacttggtcatggtcttcggagaaatcacgaccaaggccaacgttgactacgagaagatagtgcgtgacacctgcaggaacatcggcttcgtctcaaatgatgtgggactggatgccgacaactgc

SEQ ID NO: 43047 - DNA, 383 bp, Glycine max
  Clone ID: LIB3139-054-P1-N1-B3
ggagttagggctttacagtgtttctcttccttcttcttcttcttcttcttcttcttcgttgaatcgcgattgttctgtgcgagagaaagaagagagagatcgaaaatggcgttggctttcgacgagttcggaaggccgttcataatcctgaaggagcaggagcagaagagcagactccgaggattggacgctcagaaagccaacatctccgccggcaaagccgtggctcgcatcctccgaacctccctcggccccaaaggcatggacaagatgctccagagccccgacggcgacgtcaccatcacgaacgatggagccacgatccttgaccagatggacgtggacaaccaaatcgcgaagctgatggtggagctctcgcggag

SEQ ID NO: 43048 - DNA, 376 bp, Glycine max
  Clone ID: LIB3139-054-P1-N1-B6
caaacttgttcctgatcaatgttcaaatttgcatttttttttgccttttttctttttttcactactaatactacctccggaagccacaacaacacatcatcctgtcctactaacagctgcaaaaatggacctaagatcagttacccattttggttttcccaaggttcccttcctgatcaatattgcggttaccaagaacttgggcttttttgtgatgacaatggcaacgctattttttctccacccccaggtaaatactattacgtaaaagacatagactatgcaaaccatatacttaagctcgttgattttgacactgcaaacataacttgtccaagggcacttcacagctttcccttgggcaacctaccactct

SEQ ID NO: 43049 - DNA, 376 bp, Glycine max
  Clone ID: LIB3139-054-P1-N1-B7
aggagagttgtctctcttctcattaatagaaatcagcgtggcatatctgatagatcaatcagctatgccaatgatgtgaaacataaccaaacttggctttccgaaatagaagaggaagccaaaaaggggatacctcttgatatgtacctcattctaggagttgaacattctggttcggcatctgaaatcaagaaggcctatcacaaagctgcacttagacatcatccacacaaggctggccaatctttggcaagaagtgacaatggagatgatcagatatcgagggatattgttgcagaaatcagcaaagatgccgctaggcttttcaaaataattggagaggcatatgcagttctgtcagacactggcaagcgtt

SEQ ID NO: 43050 - DNA, 373 bp, Glycine max
  Clone ID: LIB3139-054-P1-N1-B8
ctctattaatcaaatgtgctcctagtagtacaataaagatataaaataaaataaaaataacaaatatttatataagattgtgttcttgcaagttccaagttccaagttcatgcacaaccgatcttttcctctgagaagacgtgtcggtagctgaagcattttataagcctccactttcctgaactagttttaacatacaatctttcaagtacacctccccagcttccatttaagaatggagatcactagaataggccaatggttaagtcttctgatatgtgtactactattactgcagacagaaggggttcctgtgggaatcacttttgttgaaaatgcagtggcaaaaggggcttgttgtttggatgggagt

SEQ ID NO: 43051 - DNA, 380 bp, Glycine max
  Clone ID: LIB3139-054-P1-N1-B9
cagaactgttagtgagtgagagcagaagaaggaacgtagcaacaatgggtccagcggcaaagacgacgacgatgcgttcgatctctcaagaagcgttcgaagaactggtgaatgagaacatcgacgacctcggcatggaccccaccgaggccctccaagacgcaatccaaaccctcactctccaaggcgtcgatctctcaggcatcgtcacgtgcgtccccggagaaaccaaccccgtcatcgagtgcttggaccgcttaagacaccttgaaaccgaaccggaccaaaacctaatcgcgcaagcgtttaacaccctccacgagttgtgcgcaaatccaaattctgattcaaattcaaatgtggctattgcaaccaaaaac

SEQ ID NO: 43052 - DNA, 370 bp, Glycine max
  Clone ID: LIB3139-054-P1-N1-C1
attcctttcactgccccttcccaattcccttccctgattgtcaattggatcttcatgagttcaacaaccactggagcatacttcgtttcctgtgttgcgggaaacaagaacaacgacctcttctgctgggttttgctctgcttgctgccaaaatttttgggaactccatttgcctacatcaactttctcttgattcaggccattgacaggaatccatcggcggtggaggttttgggaaacttcggggtggttaacctatagtctttattagtttggtcgtcagcagcagcatatttagatcccttattgttgagtggtgtgagaaatggtgtcctctcagttttctgcttttactttggctggctacaaa

SEQ ID NO: 43053 - DNA, 309 bp, Glycine max
  Clone ID: LIB3139-054-P1-N1-C10
gggatggtgacggtttcagggaatgtggatcccaacggtctgatcaagaagcttgcaaaatctgggaaacatgcagaactctggggtgcacctaaacccaacaacaacaacaataatcataatcataataaccagaaccaccttgccgaccagcttaagaacatgcaaattaacaaccatcccaaaagtggtggtggtggtggaaaccacaacaacaaaggtcagaatcagaaccaacccaaaggtggtggtggtggtggaaatagccaagccaagggtggtggtggtggtggtcaacaacatggacca

SEQ ID NO: 43054 - DNA, 372 bp, Glycine max
  Clone ID: LIB3139-054-P1-N1-C11
gaatatgtcaagccttactttagtggttctaaattgaaaagctttctagctagtcataatatcaccattactgatggtattgacaaaactagtgcaactttgcaatttagaaagttagcagattgtgattttctcaagagaaactttaagcagatgtctaatgttttgtgggtggctcctgaggacaaggcgagtttatggtcacaacttcattatgtttcgtgtaataatctggaaatgcaagaagcttatcttgtcaatctcgtaaatgtgttacgagaattgtatttgcacagtccagaggaagctcgccaactgagaaggaaagctctctctcgtattgaatggctgcaaaaagctgatgtgcctacc

SEQ ID NO: 43055 - DNA, 372 bp, Glycine max
  unsure at all n locations
  Clone ID: LIB3139-054-P1-N1-C12
gataaaatgcttgactctgtaaaagttaaacgatcaatgcctccaaatgcttggttatggtcaatgattgcaaatggcaaacagcagcacgatattagacttctgttcgacattttgcagaacctccgcagatttaggttgtcgaatcttcgaattcatgacaattttaattgcaatctttgccgagaagttgctaaggcatgtgttcatgcaggagctcttgattttggaatgaaggctttgtggaagcataatgtctatggactgactccaaatattgcatctgttcaccatttactgacgtatgctaagaacnacantgatactaaactgttggtggaagtaatgaagcttctgaagaagaatgattta

SEQ ID NO: 43056 - DNA, 300 bp, Glycine max
  Clone ID: LIB3139-054-P1-N1-C2
accgtagtgcctcaatagatgaaaacaagctgtggatgttgcaagggggatggcttatgatcatgtgcctttgtattgatcgcacaggaggacttgcaaatctgataaatctttagatttttggtgacaagtcaattaaaattgctgactttggagatgctcgtattgaggtgcaaactgtaggaatgacacccgagactggaacataccgctggatggctccggagatgatccagcataagccttacacacaaaaagtggatgtatatagctttgggattgttctatgggaactcatta

SEQ ID NO: 43057 - DNA, 366 bp, Glycine max
  Clone ID: LIB3139-054-P1-N1-C4
atagggggaggtgctggtgcaaagaatgctattctcatgaatatgccaaatgctgttctttcaatgtggagatattttgttggagatctcgtctttgaagtttctaagatgacttctccctacattaaatgtacagtctctttcttcatagcatttggaaatttggctgatgataccatcaattttgaggcttttccccacaagctggtgcagtttggagagattcaggaaaaagttgtattgaaattttcacaagaggaatttcttacagcttggtcaactcaggtgcgtcctgcaacaactctgttggctgatgggtgtccatatttgtatgcaatggtgcatgatagttcagtgtctacaata

SEQ ID NO: 43058 - DNA, 375 bp, Glycine max
  Clone ID: LIB3139-054-P1-N1-C6
ctcttacgctttctttctttttttcttccaaattctgtctttcttctaacctaaccctacaattatgccccattaacacaaatcgcaattaccccaaattcctcaccctagcgtagatcgatctcttcttccttcgtgaattctggttcagggtggctgccatgtatggcacttagtattttccctttttgaagattaggggtgggtgggttgtgtctcgcttagggttccaaagtttgttgttttgaatggaacctcgcgttgggaataagtttcgcctgggtcggaagatcggaagtggctcctttggggagatctatttaggcactaatattcagacaaatgaagaggttgcaattaagcttgaaaatgtca

SEQ ID NO: 43059 - DNA, 377 bp, Glycine max
  unsure at all n locations
  Clone ID: LIB3139-054-P1-N1-C7
gcaaggtgcacaaacttcagagcccgcatctacaacgagagcaacatagacaccgcatttgcaaggacaaggcaacaaagctgcccaagaacatcagggtcaggggacaataatcttgcaacgcttgatcttcaaactccaaccgaattcgacaactactacttcaagaatcttgttcagaagaagggtctcctccactctgatcagcaactgttcaatggtgggtccaccgactccattgtgcgtggctacagcaccaacccgagctccttctnctctgacttcgccgccgccatgatcaagatgggagacattagtcctctcactggctccaacggagaaatcaggaagaattgtagaaggattaactaattact

SEQ ID NO: 43060 - DNA, 378 bp, Glycine max
  Clone ID: LIB3139-054-P1-N1-C9
gtttgatgcaatggatgatcctccttctgtgctggatgtggtagtttatgattttgatggaccttttgatgaagctgcatctctaggacatgctgaaattaattttctaaaagcaaatatagcagatcttgctgatatatgggttccccttgaaggaaagttggcattggcatgtcagtctaagctgcacctaagaattttcttggacaacactagaggtggtaatgttgcaaaggactatttaagtagaatggagaaagaagtcgggaagaagattaatttgcggtctcctcaagcaaattcagcatttcagaaactgtttgggctttcacctgaagaatttctcatcaacgatttcacctgtcatttgaaaagaaa

SEQ ID NO: 43061 - DNA, 379 bp, Glycine max
  Clone ID: LIB3139-054-P1-N1-D1
aaaatgcccactttttttcttccaacgctcctcctccttctgatagccttcgccacctctgtctccggccgccgtgacctcgtcggagactttctccggctgccctccgaaactgataacgacgacaacttcaagggcacccggtgggccgtcctcctcgccggttccaatggttactggaattacagacatcaggctgatgtttgtcacgcctatcaaatattgaggaaaggtggtctgaaagaagaaaatattattgtttttatgtatgatgacattgcattcaatggggaaaacccaaggcctggagtcatcattaacaaaccagatggaggtgatgtttataaaggagttccaaaggattacaccggcgaagatg

SEQ ID NO: 43062 - DNA, 361 bp, Glycine max
  Clone ID: LIB3139-054-P1-N1-D10
cttttctctactcttcccccattttttcttctttgaggcctcgcctatatcttcagaaaattagatctgcttcagatctagggtttcccttttccaaatcacgagtccgttgagtttgattttgtggatgaaagcatagggatagggcttttgcaaacctctccaatgtttctcgaaattatatgaccatgcgtcgaattcgtatgctgcactccttctccgtcgtgttcctctactggttctacgttttctcatgaactccctctcaaatccgtaattaattagatcgatctccttccgtagttaatccttgtctctttttcaataattaattagatctgcgtctcctatttcctttttt

SEQ ID NO: 43063 - DNA, 369 bp, Glycine max
  Clone ID: LIB3139-054-P1-N1-D11
cagcagtcaaaaggagtgattgggcctcattggtacaagtgtttttaacaaacagcaacagtacagagcattttgatgcatgtaagtggacaaaatcagaaccacattcctgggaattaatcttcccaatagaggtatgtggtcctaataatggttttgaaatgtggagttctgagtgggcaaatcaaacttcatggcatttgagtttccttattgacaatcccaaacagtctacagtttttgatattctcttgggaatctctcaagattttgaaattgctggtaatactcttatgccagctttttctgttccacaggctactgccagatcttctgaaaatgcggaatcctctgcatgatctggaattc

SEQ ID NO: 43064 - DNA, 373 bp, Glycine max
  Clone ID: LIB3139-054-P1-N1-D12
ctcgagcctattcggctcgaggcggcgcgtgacttggtcgaggctgaggaagatgggtttggggtgtactgcaagagaggcaggagggagtacatggaggatcgttacaccgctgggaataatcttcgcggagaacacaaactggctttttttggcatatttgatgggcacggtggtgcaaaagctgctgaatttgctgcaaataacttgcaaaagaatgtgttagatgaagttattgtgagagatgaagatgatgttgaggaggcagtgaagcgtgggtacctgaacaccgattcggattttctaaaggaggatctccatggtggctctggctgtgtgacagcattgattaggaatggtaacctcgttgtgt

SEQ ID NO: 43065 - DNA, 373 bp, Glycine max
  Clone ID: LIB3139-054-P1-N1-D3
agctcaatggcgcaacttgggataccagaatcaacaagaacaccaggcatttgcacaactattgcgagctccacatgatgatgcccaaatgataattagagaacgttttccggttcctagattggtagtgtgtgaccaacatggttcccaggctagattcttgttagcaaaactgaatccttcagcaacgtataacaatgcacatgagatggctgctggttcagatgtaatctttactgatgatgtgagccttcaagttttctttgagcatctgcaaaggttggctgtccaatcttgagggcagataatagtagagattgacattttatgggttctggactttggtttggggaattcaccaatgatatgtgta

SEQ ID NO: 43066 - DNA, 362 bp, Glycine max
  Clone ID: LIB3139-054-P1-N1-D4
ctctctcgtattgaatggctgcaaaaagctgatgtgcctaccatagcacagattgaagagtttcattcgatgcagaggatgatgaatgctcctgattcaaatgataatattgatctactgttgagcattgatttgttgggtttacaaggagcaggtaaagcttttccaaacaagattgtttttgatgataagcttgtgttggctaacacacaagaattctttgatggaaattttccagtggattcttggttaccaatttttgtgaattgtctttatcctgtaagtcaattacctccagaagctgtcgttgtaaatgttacatgtggtagtgggcggtgtggttttcccaccactgcttggat

SEQ ID NO: 43067 - DNA, 375 bp, Glycine max
  Clone ID: LIB3139-054-P1-N1-D7
cgtgaatctattactgtagaaatcgtcgattctgtcggaaaacgtattgggcactggccgccattttgaattctggttgagggattgaagtgcgattataggtggaggaggatggcttgtaggggatgctgggaatgccttttgaagcttttgaacttcatattgacccttgctggtctggccatggtcggctatgggatttatctgtttgttgaatacaataaaactccggataatactctcactgtcggtgatgatcaaactctagttcaacttggccgacccatgctagtggctgtgtctctgtccaacagttttttagatgatttgcccaaggcttggtttatttacttatttattggaattggtgcagtc

SEQ ID NO: 43068 - DNA, 366 bp, Glycine max
  Clone ID: LIB3139-054-P1-N1-D8
gttttctttctcaaaaatgggtcgtacctatgtgcttatgatggttgctgcattgttgttgagctccaccatggctcaatctccagcttcgtcgccggctttgtcccccacccacacgccggtggccactccacctaggagggcgttgtcgccgtctccgtcgtctgtgtcaccagcggcttcacccgccaccggaaattctcctccggcaccacctacttcttctccttcggaatcgccacttccatcagctgctactcccaacatctctccctcgaccatctcgactccgccatctgaaggaccagctgcaaacggtgcccgtttcaacagagtttccggatctgctctgcttctcattttcgc

SEQ ID NO: 43069 - DNA, 372 bp, Glycine max
  Clone ID: LIB3139-054-P1-N1-D9
ataagtgtgagaagtgattggaaattgttggaacccaccctatcaacaaggagaagctgttttcgttcgtcgccactaacactaatcgtttcttcaatgccttacgagaaggaactcgccgctgcaaagaaagcagtcactctcgctgctcgtctctgccagaaagttcagaaggctcttctgcaatccgatgtgcactcaaagtcagacaaaagtcctgtcacagtggctgattatggttcacaagcattggtcagctttatacttgagagagaacttccttctgaatcattttcattagtagctgaggaggattcaggtgatcttcgtaaggaaagtggccaggatactctgaatcgcattacagaactt

SEQ ID NO: 43070 - DNA, 373 bp, Glycine max
  Clone ID: LIB3139-054-P1-N1-E1
atcaactgttggtactccagcttatatagcaccagaggttgtttccaggagggagtatgatggcaagttggctgatgtatggtcatgtggagtgactctttatgtcatgctggttggagcttatccctttgaggatcaggatgaccctatgaattttaggaaaacaattcagcgtataatggctgttcaatacaaaatccctgattatgttcacatatctcaagactgcagacacctcctttctcgtatatttgtagcaaatccattaaggaggatctctcttaaggaaattaagagccacccatggtttttaaagaatctttcaagagagctgactgaatcagctcaagctgtctattaccagagaggcaat

SEQ ID NO: 43071 - DNA, 376 bp, Glycine max
  Clone ID: LIB3139-054-P1-N1-E10
gcaccatgtatctcttacagaggcacatcctggtgacaatgtgggattcaatgttaagaatgttgctgttaaggatttgaagcgtggttatgttgcctcaaactcaaaggatgaccctgcaaaggaggctgctaacttcacagcccaagtcatcatcatgaaccaccctggtcagattggaaatggctatgcccctgtcctcgactgccacacttctcacattgctgtcaagtttgctgaactcatgaccaagattgacaggcgatccggcaaagagcttgagaaggagcccaagtttttgaaaaacggtgatgctggttttgttaagatgattccaaccaaacccatggttgttgaaactttcttcgagtttcct

SEQ ID NO: 43072 - DNA, 371 bp, Glycine max
  Clone ID: LIB3139-054-P1-N1-E11
aaccgcgatcacaggttgccgcaccttaaaaccggaaacaaaagcaatcgttacttgatttcaagaatttctcaatttcttcctacttctttgtgtacgatttcttaagggaaagaaaatcactctctgtgctggtcacagacttcgtgaatcattttcttttccactcctagtttatttgctgaacactctcctatttgatataggacttcgtgtcagatttaaactttttctggttctttctcagttctctgtttaatttcaagttcaagctggtgaaattttggattagtgctcccactctcctatctggtataggacttcgtgggtagacttttctacttctctcctttctttcactctcttcttct

SEQ ID NO: 43073 - DNA, 70 bp, Glycine max
  Clone ID: LIB3139-054-P1-N1-E12
gtaatatttaaacacactcattgcacatagtaaggggggttatttaattgtatattgcgcttaactattt

SEQ ID NO: 43074 - DNA, 334 bp, Glycine max
  Clone ID: LIB3139-054-P1-N1-E2
caggagttccaaccaagatgctgacggtaaattgttcggcgagaatgacagtgcataaccctgcaaccttcttcggaattcatgtcagctctaaagcagtgaatcttatgtattctgagatgacagttgcaactggtgagctgaagaagcattatctatcgagaaagagtacccgtacagtgtctgtgaacctgcaaggaagcaaggtttctctatatggtgctgatgcaagcttaactggcttggtggacaatggaaaaataccaatgactcttgtctttgaagttggatcgctagggaatattgttgggagggtggggaggtccaaacatcg

SEQ ID NO: 43075 - DNA, 379 bp, Glycine max
  Clone ID: LIB3139-054-P1-N1-E3
aatcagatccacattcctgggaattaatcttcccaatagaggtatgtggtcctaataatggttttgaaatgtggagttctgagtgggcaaatcaaacttcatggcatttgagtttccttattgacaatcccaaacagtctacagtttttgatattctcttgggaatctctcaagattttgaaattgctggtaatactcttatgccagctttttctgttccacaggctactgccagatcttctgaaaatgcggaatcctctgcatgatctggaattcgtgttttctttcgcttgttcgtttgtttaattcaataaaggaaattaggcatgaccctcttgttgagtatgctctgcctatctgaaaatttccacacctcttt

SEQ ID NO: 43076 - DNA, 378 bp, Glycine max
  Clone ID: LIB3139-054-P1-N1-E4
ccgtttccaactctaccattttcccaccaaccctccactctcttcctcaaaacaatcgttaatctcttctacattgtgaagtctgatattctctaagtagacaacacaaacacacctcaatttatagcacccatctttcttttctcccacaaattcagctccattttgttacacgttcaaataataagccaagaagccaccatgatctcttcaatgaagtgcacagcctcatctctcacatgttccgctttctcaaacagaaagattcccattgcaaggccacaacttgtcacgttaccaaccattaacaacgttgaacaaaacacgggtctctctcagttgtgttcacagaaaccgctctacctttcatccactgag

SEQ ID NO: 43077 - DNA, 377 bp, Glycine max
  Clone ID: LIB3139-054-P1-N1-E6
catcgccctctcactaacaacattcacactctgcggagctcccaaagcactaatctaacaaacgcaatttaaaaaccgcaacaaactttctctcttgcgttcacacttattctctggcttcttcttccattttcgcttctcgtagcgttttcggaacagttatggcttccattgccggatccaactgcgtcgctctccgaaccgccaacttcggcgcctccggtaaccggaaaatcggccagatccgccaatggtctccgattctcacgaatctccgtcccgtttccggtcttcgtcaccgatcgaatactccgtttagctcctccggtgtgagagcacaggttgctactctggaggaagcaggaaccggagcaact

SEQ ID NO: 43078 - DNA, 376 bp, Glycine max
  Clone ID: LIB3139-054-P1-N1-E7
gttgaaactcctaaaggttccatgttggatcttaaaagttctcaatctaaaattgcacttcccaagaacacagttggaggaaccattctgcgtagtgatttattggcaaattttttgacagagggcaattttagagcaagtgttgatttgcagcgcactcatcgtattagaggaatgattaaaatggtggccacagttggtattcctgagaatacaggtatagcattggcctgtgctatgaatagttcttttagggggcgcgccagttctgatatttacaccatctgctctcaagactgtgaattgtggaatcctgcttgcacaaaagcaatgactatgtcatttaatccaaacccgtgttctgatgcatggagtt

SEQ ID NO: 43079 - DNA, 282 bp, Glycine max
  Clone ID: LIB3139-054-P1-N1-E9
gcattatatataccgataagcatcttgctatttataaggtggggaaagtgcttcttcctacggacttctttgcagttaccaaggcacctgcaaaatcaccctctttggctccagaaccttcaagtgacaccgcaaaggcacctaaagctgataaggacgagtcatcatcttcagattcgtcacaggttaatcccactgaacagaactctggcaccgagaagatcgctgtgtacggaatgtggatgtcacttggacttggagtacttctcatgagtgtgatga

SEQ ID NO: 43080 - DNA, 300 bp, Glycine max
  Clone ID: LIB3139-054-P1-N1-F1
agagcttgacgcctgcacctcgtagctcgatcgtggcgccacaccacacgctgatttgcgtcttatttgcggtctttttttacgctacctaacatttttaaaacatgttggagaggaagaaaccccaactaaatggacagtttgaggcaatgcttaatgactggagtcattgttctgaccagttgacagttaacagcatcatgccatgatagtttcagtttgaagcctgcagatggagctcaccgttaaaatcgagctgagcagtcagaattccagaatatggtggttgagtgggtctga

SEQ ID NO: 43081 - DNA, 377 bp, Glycine max
  Clone ID: LIB3139-054-P1-N1-F10
cttctctctttctctccctccctcttcaactaagatggcaattgaaaaccaagacaccgctgtcagagaaatcaagcccaagaacaggagaatcatgggtgctggagggcctgatgatgaggacaataggtggccaccgtggttgaagccactgctgaaagagagcttctttgttcaatgcaagttgcatgctgattctcacaagagcgaatgcaacatgtattgcttggactgtatgaatggccctctctgctctctctgcctcgcccaccacaaagatcaccgtgcaatccagattaggaggtcctcataccatgatgtgatcagggtctctgagattcaaaaggtgttggacatcactggtgtccaaacctaca

SEQ ID NO: 43082 - DNA, 376 bp, Glycine max
  Clone ID: LIB3139-054-P1-N1-F11
ttgccgttgaggtcaccggtggacctgaagttccctgtgcatcctggaagagaggacaaacctgagccaccaccagagggtcgcttgcccgatgccactaagggttctgaccatttgagagatgtgtttggcaaagctatggggcttagtgaccgagatatcgttgctctgtctgggggtcacactattggagctgcgcacaaggagcgttctggattcgagggtccctggacctctaatcctcttattttcgacaactcatacttcaaggagttgttgagtggtgagaaagaaggcctccttcagctaccttctgacaaggcacttttgtctgaccctgtgttccgccctcttgttgagaaatatgcatcggacg

SEQ ID NO: 43083 - DNA, 362 bp, Glycine max
  Clone ID: LIB3139-054-P1-N1-F12
atcggaactggttcggatcaaaatgacatcagggggggtgctggtgacctaatgcaggatggtatagcctccctagtcatctcccttgattcttgggaactttttgttgagcaatcataagcctacaaggagagtgttttccctgctgctgcttcagccagagttagctttgttgcatgatcaacatttggttgggagaaaattgttggagcaaatggaaaagcaattggcattgttcgttttgttgctagtgctccatctggatagattttacaaagaattttgtttcactaaagtagcttctaactgctcccagttatgagcttttttattactttttattttttttgccttctgttttt

SEQ ID NO: 43084 - DNA, 380 bp, Glycine max
  unsure at all n locations
  Clone ID: LIB3139-054-P1-N1-F2
aaagaatcaggagaaggaaataatcatcaaccatggcagggagattgacgaacgcagcatcgaggatcttaggcggaaacggcgtcgtttaccgatccgttgcttnctctcttcgcctccgctccggcatgggcctccccgtcggcaaacactatgttcccgacaaaccccttcccatgaatgaggaactcctgtgggacaacggcactgcatttcccgaaccgtgtatagatcgtattgctgacactgtcggaaagtatgaagcattggcctggctgtgtgggggattgagttttttcgcgtcgctgggattgttggctgtgtggaatgacaaagccttcaagacaccgtttgcacccaaagtatatccatatgacaat

SEQ ID NO: 43085 - DNA, 375 bp, Glycine max
  Clone ID: LIB3139-054-P1-N1-F3
cttatacataattctccaattagtaacttgttgagagttgctgcttggaagaaaggctgtttaatggtcaagattgtgatgtctgggaatgcagcagtcaaaaggagtgattgggcctcattggtacaagtgtttttaacaaacagcaacagtacagagcattttgatgcatgtaagtggacaaaatcagaaccacattcctgggaattgatcttcccaatagaggtatgtggtcctaataatggttttgaaatgtggagttctgagtgggcaaatcaaacttcatggcatttgagtttccttattgacaatcccaaacagtctacagtttttgatattctcttgggaatctctcaagatttttgaattgctggt

SEQ ID NO: 43086 - DNA, 314 bp, Glycine max
  Clone ID: LIB3139-054-P1-N1-F7
ctaatagggcacttaaccctggtttggtttatgattgggatcaacatgtccagcaccatgaataaacggatttgactccttcccacttccaagatccttaatgttcccaccagaattatccacattataagcagtggtcatcaatgcagacttaatcgccgcaagtgaccactctggataagcctccctaagcaatgcagcaatgccactcgcatgagggcacgacatataagtccccgaaattatgttaaactctacccttctaggatcaatgtcctaatccgtttgacccacactcccagttcacccttttt

SEQ ID NO: 43087 - DNA, 85 bp, Glycine max
  Clone ID: LIB3139-054-P1-N1-F8
ccatcatacacagagggggggtccttttctcatagcccttaatttcacccttcattttccatgtgccacaagaaagagccccact

SEQ ID NO: 43088 - DNA, 327 bp, Glycine max
  Clone ID: LIB3139-054-P1-N1-F9
cacaaagcgggttactgtctgttcaagctaccatctgtctctctctttcttagtgcctccttgccagaagttaaaatggcccaagaaactttcctattcacatctgaatcagtgaacgaggggcaccctgacaagctctgtgaccagatctccgatgctgtgctcgatgcatgcttggagcaggaccctgacagcaaggttgcctgtgaaacctgcaccaagaccaacatggtgatggttttcggagagatcacaaccaaggccaacgtggactatgagaagattgtgcgtgacacatgcaggaacattggttttggctctgatgat

SEQ ID NO: 43089 - DNA, 296 bp, Glycine max
  Clone ID: LIB3139-054-P1-N1-G1
gtgatgataacttaattagtgttcatgaatatgtcaagccttattttagtggttctaaattgaaaagctttctagctggtcataatatcaccattactgatggtattgacaaaactagtgcaactttgcaatttagaaagttagcagattgtgattttctcaagagaaactttaagcagatgtccaatgttttgtgggtggctcctgaggacaaggcgagtttatggtcacaacttcattatgtttcgtgtaataatctggaaatgcaagaagcttatcttgtcaatctcgtaaat

SEQ ID NO: 43090 - DNA, 284 bp, Glycine max
  Clone ID: LIB3139-054-P1-N1-G10
cttttgcatttgtgaactagtatgtagtatttgatgggcttaaataaagcgcattactatgtgcaatgagtgtgtttaaatataaaaaaaaaaaaaaaaaaaaaaaaaaaaaaaaaaaaaaaaaaaaaaaaaaaaaaaaaaaaaaaaaaaaaaaaaaaaaaaaataaaaaataaaaaaaaaaaaaaaaaaatatataaagggggggcccccctcttgagaaccttttcccccagaatttaatttcggaccggtcctttaaagggttaccattttttctttaatg

SEQ ID NO: 43091 - DNA, 371 bp, Glycine max
  Clone ID: LIB3139-054-P1-N1-G11
gaatctttttcgtcgcaaaatttttgacaaaccgaaggcgcgctgcttcactattctccctatggagtttaatcttgtggtccgtcaaaagtttttaaattttgtgaggttcattatgaagaaaagggacaagcttagttgtcaagttggaatcaacccatactccatggaatggactggtttggccaatagattactgagtaagggcaacgatattctgtgttgcgattatgctagttttgatggtttgattaccaagcaagttttgagcaagatggcagatatgataaacagtctttgtggtggtgatgaaaaattgatgcgtgaaaggacacacctgcttgttggtttgttgttcaagaatggcatat

SEQ ID NO: 43092 - DNA, 189 bp, Glycine max
  Clone ID: LIB3139-054-P1-N1-G12
ctctagaactccatgaaactgaacttggaggttataccttaacagtggatgaagccaaacctagagataatcagggttctggtggtagaggtgccggtggaaggagtggtggcggtcgatttggtggtaggagtggtggtggtggtggtggtcgatttggtggaagaggtggaggcggtcgttttgttg

SEQ ID NO: 43093 - DNA, 379 bp, Glycine max
  Clone ID: LIB3139-054-P1-N1-G3
gaagcttatcttgtcaatctcgtaaatgtgttacgagaattgtatttgcacagtccagaggaagctcgccaattgagaaggaaagctctctctcgtattgaatggctgcaaaaagctgatgtgcctaccatagcacagattgaagagttccattcgatgcagaggatgatgaatgctcctgattcaaatgataatattgatctactgttgagcattgatttgttgggtttacaaggagcaggtaaagcttttccaaacaagattgtttttgatgataagcttgtgttggctaacacacaagaattctttgatggaaattttccagtggattcttggttaccaatttttgtgaattgtctctatcctgtaagtcaattac

SEQ ID NO: 43094 - DNA, 313 bp, Glycine max
  Clone ID: LIB3139-054-P1-N1-G4
ttgtgttttaaatccacaaaatccttttgtgttaaataggtggatgggaaaactgactttccctcaaggcacttcccgaagtgttaagagaatgcctctttctatagggggaggagctggtgcaaagaatgctattctcatgaatatgccaaatgctgttctttcaatgtggagatattttgttggagatctcgtctttgaagtttctaagatgacttctccctacattaaatgtacagtctctttcttcatagcatttggaaatttggctgatgacaccatcaattttgaggcttttctctccaaactgcac

SEQ ID NO: 43095 - DNA, 378 bp, Glycine max
  Clone ID: LIB3139-054-P1-N1-G6
ttaacacttcgggaagtgttaagagaatgcctctttctatagggggaggagctggtgcaaagaatgctattctcatgaatatgccaaatgctgttctttcaatgtggagatattttgttggagatctcgtctttgaagtttctaagatgacttctccctacattaaatgtacagtctctttcttcatagcatttggaaatttggctgatgacaccatcaattttgaggcttttccccacaagctggtgcagtttggagagattcaggaaaaagttgtgttgaaattttcacaagaggaatttcttacagcttggtcaactcaagtgcgtcccgcaacgactctgttggctgatgggtgcccatatttgtatgctatgg

SEQ ID NO: 43096 - DNA, 211 bp, Glycine max
  Clone ID: LIB3139-054-P1-N1-G7
tcctgatctagcaagtggattgacgtagcaaatgcgcgatggttaaatcctcgcccccttcatttttgttacgttcactttagaatgccccctccatgcaatgcattttgtactcaattgtctattgaattatattgtactgtttattaatctagacataaacccgcacagtgcgggtagataagcaaaaatgctttagctgttacaattt

SEQ ID NO: 43097 - DNA, 373 bp, Glycine max
  Clone ID: LIB3139-054-P1-N1-G8
cgtctattcagagttgcaggagaaaaatgccaacgaaaacaacacgacccggattttggctgcgattttccgaccagaaatactaaaatcgccattaatcctaatctccctcatccgttcctttcggagccggccacccccacgaaggggctactggttctgggagtcggaccaaagatagggtccccgcttccgggtgtcgctcgtgagcacaaaagaccttccaggttggggtgtaaacaccgtgaacctgaagcaccaattcctccccttgtgggggtgcatgggatgagtgacatcgaagtccttctcatgatctttatttctgccctctgaacgggctcacatttcacctttgtattgcacatcgggg

SEQ ID NO: 43098 - DNA, 367 bp, Glycine max
  Clone ID: LIB3139-054-P1-N1-G9
gccataccactgaagaacgaagtttatctctctgttgtgacttgtgagcaattcaaattgcggataacagaacctacgcactgcattggaagatacaagaatatcatcagtttctcctattcattaactccagttactcactgaagataacattggaagcattgggcaataaaaatgagcaattcctctgctggaacctcatcaaaaccaagagcagctttctcacaccatcagaaactccgtctaagcgcaaaagaggagttttccaaaaagaattgcagcacatgatgtatggctttggagatgatcctaatccacttcctgaaagtgtggctcttatggaggacattgttgtggagtatgtcac

SEQ ID NO: 43099 - DNA, 377 bp, Glycine max
  Clone ID: LIB3139-054-P1-N1-H1
ctctttttctcaaccaaaaggggttcaattctagctagttctattacatcgtccgcgaccatgaacatggcgatcgtgcttctgttcatggttttcgcagtttcatcagctttagacatgtcaataatatcacatgacaacgctcatgcggatagggccacgaggcgcaccgacgacgaggtgatgtcaatgttcgaggagtggctggtgaaacacgacaaggtgtacaacgcgctcggtgagaaggagaagaggtttcaaatcttcaagaacaatctgcgctttatcgatgaacgaaactctctgaaccgaacctacaagttgggactcaacgtgttcgctgatcttaccaatgcggagtacagagccatgtacct

SEQ ID NO: 43100 - DNA, 326 bp, Glycine max
  Clone ID: LIB3139-054-P1-N1-H10
ggctgcataaagctgatgtgcctaccatagcacagattgaagagttccattcgatgcagaggatgatgaatgctcctgattcaaatgataatattgatttactgttgagcattgatttgttgggtttacaaggagcaggtaaagcttttccaaacaaaattgtttttgatgataagcttgtgttggctaacacacaagaattctttgatggaaattttccagtggattcttggttaccaatttttgtgaattgtctttatcctgtaagtcaattaccttcagaagctgtcgttgtaaatgttacatgtggtagtggacgtggtggt

SEQ ID NO: 43101 - DNA, 370 bp, Glycine max
  Clone ID: LIB3139-054-P1-N1-H11
cttttccataaacaatgaagctcattagcaccatcaaccccaaaaacctcaaactaagccccaaacgcttctttcgtaaaaaggaaccatctttagtctcacgctccgacccgccttctttcggatccggatcctcttccgttgactcttccaccgcaaatcacaaaccttccgccggtaaccaaactccgaccagcgttctcccggacgtctccggcgagtggtccgaggtcgccaccgccgccgttgacgtgcggtgggacctcgcgcaggccttacgcctcatcgatcgcgacaacgacggcgtcgtcacgcgccaggacctcgagtcgcttctcacgcgccttggcgcgtcgccgagcccctgcga

SEQ ID NO: 43102 - DNA, 352 bp, Glycine max
  Clone ID: LIB3139-054-P1-N1-H12
cttgaattgaaggacgatcctgcctttaatttctcatcaccacttcagtcaacaaaagatggtgatgatgaaatctctcccacttcttctaattgtactcttttcccactctaccaccaccttagcccagtccccggccgcggtaccgaccgccccggtcacgcccttcaccgcagtcgccccggccccagcaccctccgcacccccgacagacatcataagaatcctcaaaaaggcaggagggttcacaaccctaatccggctcctccaggccacacaaggtttcaaccaaatcaactgccaacttctcaccacaagcgtggggctaaccctatttgcaccaaacgacaat

SEQ ID NO: 43103 - DNA, 327 bp, Glycine max
  Clone ID: LIB3139-054-P1-N1-H2
ggccatattatttttttttatttgaaataatgtccgggatcatccacaagattgaggagaccctccatgtgggagggcacaagaaagaggagcacaaaggagaacaccatggtgagcacaaaggtgaacacaaaggaaaacaccatggtgagcacaaaggtgaacacaaaggagaacaacaccatggggagcacaaggagggacttgtggataagatcaaagacaagatccatggtgatggtcatgacaagggtgagaaaaagaagtagaaggacaagaagaagatgagcatggacatgaccattattgtcatagcagcagcagtga

SEQ ID NO: 43104 - DNA, 377 bp, Glycine max
  Clone ID: LIB3139-054-P1-N1-H3
ctcgagccgcattggttggaataactggagtgatatcggaaatccagaaagagaagaagggacgagatgtttacattctgggttcagctaatgttgggaaatctgctttcatcaatgctttactaaaaacaatggctataaatgatccagtggctgcatctgcacaaagatacaaaccaatacaatctgcagttcctggaactaccttagggccaattcaaattaatgctttcctaggaggagggaaattgtacgacactcctggagttcatctctaccataggcaaactgcagttgttcattctgaagatctacccatccttgctccacaaagccgactgaggggcctgtctttcccaagttctatattatcttca

SEQ ID NO: 43105 - DNA, 378 bp, Glycine max
  unsure at all n locations
  Clone ID: LIB3139-054-P1-N1-H4
aagcgacacgtcgttttgaagcaggaaccgaaccgtgcaccgctttgtagtttgaagcgatcaacacgcgcaaccacggcgatgatgatgcaaatcaacatcacctccaccacctcaatcgtcacggcgttctcttcggatcattccccgaatgttctaccttgagccatgtccaacctcgttcagattcgcgtcgccgccgacgctagcgatggcttcgactctccggcgaagcagaaagcagccaaccgcagctcctacagcaatcgcccctttctctccctccgccgcgccaaacagttcctcggcgccgccaagttcaagctcttcttagttctttttgctctctccatcgtcgnttttgtcttctccagactc

SEQ ID NO: 43106 - DNA, 378 bp, Glycine max
  Clone ID: LIB3139-054-P1-N1-H6
gaagagaatggctcccaagggtttaatctttttggctgtgttatgcttctcagcactgtcactgagtcgttgtcttgcggaggataatggacttgttatgaacttctacaaggaatcatgccctcaggctgaagacatcatcaaagaacaagtcaagcttctctacaagcgccacaagaacactgctttctcctggctcagaaacatcttccatgactgtgctgttcagagttgtgatgcttcactgttgctggactccacaagaaggagcttgtctgagaaggaaacagatagaagctttgggttgagaaatttcaggtacattgagaccatcaaagaagctttggaaagggaatgcccaagagttgttttctgtgc

SEQ ID NO: 43107 - DNA, 371 bp, Glycine max
  Clone ID: LIB3139-054-P1-N1-H7
gaaaacaccaatatacaattctagagtagtggtcctgtccctttgatgcttcttgtaccagtcttccatgaggctccttctttgcaatgatccctttcattctcttttgtctcgttgctcattgtgcttccatttctttactcccagtaaaaagggttgtcacaaaaaaacacacatgagcttgcacatatttgacaagctcaaactctcaagacctggccaaagccaattgctttgaaattttcctaattttttcttctctcactttgatcttctctctctctctctctctctctctctctctctttatatataaaattggtcctctaagatgggtaatgaaaaccattaccaccatcagttttactatc

SEQ ID NO: 43108 - DNA, 400 bp, Glycine max
  Clone ID: LIB3139-055-P1-N1-A10
gttttaaatccacaaaatccttttgtgttaaataggtggatgggaaaactgactttccctcagggcacttcccgaagtgttaagagaatgcctctttctatagggggaggagctggtgcaaagaatgctattctcatgaatatgccaaatgctgttctttcaatgtggagatattttgttggagatctcgtctttgaagtttctaagatgacttctccctacattaaatgtacagtctctttcttcatagcatttggaaatttggctgatgacaccatcaattttgaggcttttccccacaagctggtgcagtttggagagattcaggaaaaagtttgtgtgaaattttcacaagaggaattttttacagcttggtcaactcaggtgcgtcccgcaacga

SEQ ID NO: 43109 - DNA, 398 bp, Glycine max
  Clone ID: LIB3139-055-P1-N1-A11
ggcaacagtgagaacaccattgaattttgattctagcaagcagagcttttgtcaattttctattgaccttctcggtggaggaattttagtggacaaaactggagattggatcacacttatacaaaattctccaattagtaacttgttgagagttgctgcttggaagaaaggttgtttaatggtcaagattgtgatgtctgggaatgcagcagtcaaaaggagtgattgggcctcattggtacaagtgtttttaacaaacagcaacagtacagagcattttgatgcatgtaagtggacaaaatcagaaccacattcctgggaattaatcttcccaatagaggtatgtggtcctaataatgggtttgaaatgtggagttctgagtgggcaaatcaaactt

SEQ ID NO: 43110 - DNA, 374 bp, Glycine max
  Clone ID: LIB3139-055-P1-N1-A12
ctaagatccactcaatcaatggaacagtcaatatgttgtactaatatctggcaagtctattgaagggtgaatgatggcatgaacattgctattaactctaaaatcagggaacgagggacacacactcaagctaagagaccaaatttacaaggctactgtaaacacatagattgaacaagacccatacagcaaggttgccagaaaaacatgcaccaagactaactaggtgatgggcattcatagcgatcagcagcacagccaaactggactccccacagatatgacgtgacacgttccggaccatggggtatgggtgaaactatgtgggactaggtgctgacaactgcatggtcctagtgacacattgagcagga

SEQ ID NO: 43111 - DNA, 414 bp, Glycine max
  Clone ID: LIB3139-055-P1-N1-A3
gtgaatcttttcataagtctactgtaggcactgaaaggtctgaatctggaacaactcctgctggggcaggtgtttcatctccttcctcttatactccctccactgcccatcgtcattctactagaaccagatcatctgttaatataggagatacacctagaaaagaaacatctcaagacaaaggaacgagctcatcaaagagcaagggtaaagctgtattaaaacctgcgcaggaggaagcgcaaggaccccaaacaaggaatacagtgcgcagaagagcagctcttgataaagtcgctcaaatgaaacctgcaaatggcgactcaacttctgaggatgaagaattggatatatctcctgttgaaattgctgaggctttggtgattgaagatgatgatatttctgatgatgagg

SEQ ID NO: 43112 - DNA, 304 bp, Glycine max
  Clone ID: LIB3139-055-P1-N1-A5
gtccattttttttttcagaaaacaacagggaaagaagaggggtggcctctaaccgcgtgtcgttaaaatcctcaaacgcattagtagacatagaattatcaaaaagcggggaaagggtgattgaattcgatcctgggacgttaacgttgtttcaattcattagtggtcctgtctttgtcctattctttacttctttgttcttttttttatttgtgggcctatataattttttattttttttgtaatttatttttctttttttttttttttttattatttttgtgggtgttattttttttttttt

SEQ ID NO: 43113 - DNA, 396 bp, Glycine max
  Clone ID: LIB3139-055-P1-N1-A7
atttggtttatgccttgcgtttttttatttccctcacaacgtttttgtagtgtgcagaggttagatacattcctatttacctcagagtcagtgaacgagggacaccctgacaagctctgtgaccaaatctctgatgctgtcctcgacgcttgccttgaacaggacccagacagcaaggttgcctgcgaaacatgcaccaaaaccaacttggtcatggtcttcggagaaatcacgaccaaggccaatgttgactacgagaagatagtgcgtgacacctgcatgaacatcggctttgtcttaaacgatgtgggactggatgccgacaactgcaaggtccttgttaacattgagcagtagagcccttatattgctcagggtgtacactgccaccttacc

SEQ ID NO: 43114 - DNA, 406 bp, Glycine max
  Clone ID: LIB3139-055-P1-N1-A9
gcgatctttccgtctccatcatcgtcatcaacgctccgatttcctaaacctcagggccattgagtcttaaggatgtctcctgcatcccgatccaagtctaaagacagaaaggctaacaaggatgctcagaaggcttctgcaaagcctacaggatctagtaatgctgtagctggtgttccagccagtgcatataaccccttattaggaacattccatactctggacatgtcaccagctcctacctcaccaatacattctaatggtcgttttcggaacatagatgagacagatgaacatcctgtcaactcattggttgctggtgttgagtatgattctgtttctaacaatggtagttggtctggtgagtccgaagaacataaagacaaaagctctaatgttcctgttc

SEQ ID NO: 43115 - DNA, 398 bp, Glycine max
  Clone ID: LIB3139-055-P1-N1-B10
ctcgagccgattcggctcgagattaaatgtacagtctctttcttcatagcatttggaaatttggctgatgacaccatcaattttgaggcttttccccacaagctggtgcaatttggagagattcaggaaaaagttgtattgaaattttcacaagaggaatttcttacagcttggtcaactcaggtgcgtcctacaacaactctgttggctgatgggtgtccatatttgtatgctatggtgcatgatagttcagtgtctacaataccaggtgattttgtcattggtgttaagttgacaaccataaacaatatgtgtgcatatgggctcaatcctggtatttcaggttctcgtcttttgggtaccattcctcagtctatttcacagcaaactgtttggaa

SEQ ID NO: 43116 - DNA, 389 bp, Glycine max
  Clone ID: LIB3139-055-P1-N1-B11
ctcagtgaaagagaatccgaggcgaagagaagagaaaaattaagatggaggggaaggagcaggatgtgtcgctgggagcgaacaagttcccggagagacagccgattgggacggcggcgcagagccaagacgacggcaaggactaccaggagccggcgccggcgccactggttgacccgacggagtttacgtcatggtccttttacagagcagggatagcagagtttgtggccacttttctgtttctatacatcactgtcttaaccgtcatgggagtcgccggggctaagtctaagtgcagtaccgttgggattcaaggaatcgcttgggccttcggtggcatgatcttcgccctcgtttactgcaccgctggcatctcaaggggacac

SEQ ID NO: 43117 - DNA, 362 bp, Glycine max
  Clone ID: LIB3139-055-P1-N1-B12
cagctttctgatatcgaaggagtctcctgtgattgaggcggttaggcttcacaacggggcagaggagaacaaggaggctcttagaaaatccaagggtgaagaggacgaggactttcagatacttgagtaccaggcccagaaagggaatgctgctgccatgtacaaagttggtctcttttactactttggcctcaagggtttgaggcgtgaccattccaaggccctctggtggttccttaagggcgtggacaagggagagccttgatccatggagcttcttggagagatctattccagaggagcaagtgtggagaggaactacaccaaggccttcgagtggcttacccttgctttcaggcacc

SEQ ID NO: 43118 - DNA, 398 bp, Glycine max
  Clone ID: LIB3139-055-P1-N1-B4
gttcttccaccctcgtaccgtctctgcctctctgcaatccacagccgaaaatgcctttcaagaggtacgttgagatcgggagggttgctcaaatcaactacggcaaggaatatggcaggctcgtcgtcatcgtcgacgtcattgaccagaacagagcacttgtcgatgcccctgatatggtgaggtcccaagtcaatttcaaaaggctttcccttaccgacatcaagattgacatcaagagggtccctaagaagaaagatcttgtcaaagccatggaggatgctgatgttaagaacaagtgggagaagagttcatggggtagaaaactcattgttagaaagagaagggcatccctcaatgattttgataggttcaagataatgttagccaagatcaag

SEQ ID NO: 43119 - DNA, 405 bp, Glycine max
  Clone ID: LIB3139-055-P1-N1-B5
ctcgagcctttgtactttcagcagatgcaaaggggatagttgaatactggagccctgctacactgcaattcccagagaatgaggtcaattttaaattgaaaagtgacactaacctctttgaaattgcaaaatgcaagacttctgtttcagctattgaggttagtcctgatggtaagcaattttctatcacatcacctgaccgtagaatacgtgtgttttggtacagaacgggtaaactaaggcgggtttatgatgaatcccttgaggttgctcaagatctgcaaagaagtgatgctccattatacaggttggaagccattgattttggtcgaagaatggctgtcgagatggaaatagagaagacagaaagtgcaccacttgcaaatgcagtttttgacgaaagtg

SEQ ID NO: 43120 - DNA, 405 bp, Glycine max
  Clone ID: LIB3139-055-P1-N1-B6
acaaaaccgagcgagttgttgtgactgactcagtgagtgagcgagcgagcgagttactcatggcgaacgcggcgcttcggaacgtgaaggtgctcccgaactcggcgaatatggaggaagcgcgtcaccgagtcttcgaattcttcagaacggcctgcagatcgctaccttccgttatggaaatctacaacctctacgacgtcgtttccgtctccgaactccgctcctccgtcgcctcccagatccgcaacaacatccacgtcaccgatcccaaagtattttccattttttatttattttattttggtttggaacgttttcttaatctgatgaggtctaaggcagtgtttggggatttttattttacttattcattcgccgccgttttagtgttagaagatagtc

SEQ ID NO: 43121 - DNA, 408 bp, Glycine max
  Clone ID: LIB3139-055-P1-N1-B7
atttcaggttctcgtcttttgggcaccattcctcagggcatttcacagcaaactgtttggaatcaaatggcaacagtgagaacaccattgaattttgattctagcaagcagagcttttgtcaattttctattgaccttctcggtggaggaattttagtggacaaaactggagattggatcacacttatacaaaattctccaattagtaacttgttgagagttgctgcttggaagaaaggttgtttaatggtcaagattgtgatgtctgggaatgcagcagtcaaaaggagtgattgggcctcattggtacaagtgtttttaacaaacagcaacagtacagagcattttgatgcatgtaagtggacaaaatcagaaccacattcctgggaattaatcttcccaatagag

SEQ ID NO: 43122 - DNA, 406 bp, Glycine max
  Clone ID: LIB3139-055-P1-N1-B8
cagacagtgactctgtggtgagcatggtggagaatggggttaagcccaatcaccctgactatggtgtcgtggaacttataaggacgaagcggcgtcgttttgactgggaagtgaggtttgtttctgtctccaacaaggcgaatcgtgtggctgataggctcgccaacgatgctcggaaattggcttgtgatgatgtttgtgaggagtatcttcatcccccggctaactgtaaccagttgctcttggaggatgagataggctgtgagagcttttagtccttttttttttttttcttcttctttcaaaaataagaaaagaaaaattactatgacaaggtttttgaaggacaccatgggctacttaattaatttggcaatcatggaagattaagtgctttaatttgggt

SEQ ID NO: 43123 - DNA, 412 bp, Glycine max
  Clone ID: LIB3139-055-P1-N1-C1
cacaaagttacaatggaccccctctctctcttctgcacgcggagccctcctcgccggcggcctctactggttcgtgtgcgttctgggccccgccgagcagaagggcaaacgcgccaccgatctttccggcggctccatctccgccgagaaagtccaagacaactacaaacagtactggtccttcttccgccgcccaaaggagatcgagaccgccgacaaagtccccgacttcgtcgacaccttctacaatctagtcacagacatctacgagtgggggtggggccagtccttccacttctccccctccatccccggcaagtcccaccgtgacgccacgcgccttcacgaggagatggccgtcgatctcatcgaggccaagcccggcaacagaatcctggatgtgggctgtggc

SEQ ID NO: 43124 - DNA, 394 bp, Glycine max
  Clone ID: LIB3139-055-P1-N1-C10
ctcactgtttttgacggtctcagctgtcttttgagtggcccttttctcattttcccttttgcaattttcactaacagtccttctttctatcttagctctcagaaacttcaataacaatgaagaaagttgtgttgaaggtggaagtacatgaagacaaaatcaagcaaaaagctatgaaggttgtctctggcatttcaggggttgagtcagtttctgtggacatgaaagacaagaaattgaccgtaattggggacattgatccagtaaaagtagcagccaagctgaggaagctttgtcacgcagaaatagtttcagttggaccagcaaaagaggaaaagaaggaagagcctaaaaaagatgataaaatggaagatgacaagaaaaaaaattcacc

SEQ ID NO: 43125 - DNA, 400 bp, Glycine max
  Clone ID: LIB3139-055-P1-N1-C11
gctacctacccatgggaaagattgccctagccaatgtcctcttggtccttctcttgaacttgagcactttgctcaatgttcttgcttgtccctattgcccttacccatctcccaagcctcctccaaaaaagcctcccattgtgaaaccaccagttcacaaacaaccaaaaccatgtccaccacccaagtcatctccaaaaccaccccatgtacacccaccctatgtcccaaaacctcctcactaccctaaaccaccagttcatccacatccaccccatgtcccaaaacctcaccctaagccttcactgcattcacatccaccttatgttccaaaaccaccagttgttaaaccaccctatgtcccgaagccaccagttgtgaacccttcctatgttccaaa

SEQ ID NO: 43126 - DNA, 396 bp, Glycine max
  Clone ID: LIB3139-055-P1-N1-C12
ggtggttgttggcaagacaaatattttaacattactgggtgcaaggacactaaacgaggaagagtatatgaatgccaaatagttcaaaatgtgaaatttgttggagatggatatacccactgtgaagcttcaggatccttgagttgtcaattcaacaatggtggttgttggaagggagtacaaggtggcagggcttactcggcttgtcttgatgactatagaaaaggttgtacatgtccacctgggttcagaggagatggagttcagtcatgtgaagatattgatgagtgcaaagagaaaacagtctgtcaatgcccaggttgcaaatgcaaaaacacctggggaagttactagtgcaaatgcaaaagtggtttgttctactcgcgagaaaatgac

SEQ ID NO: 43127 - DNA, 413 bp, Glycine max
  Clone ID: LIB3139-055-P1-N1-C2
acacaacacagcctaagagaattagattctaagctctatagagagagattatctgagaaatcttagccagccaaggaggaagaaagaatcatgtggtgctggcaaggagagggaggctagaaagaaagaaaaaaagaaagagctagagagagagggtaccctcttcttaatttgcactgtttttgtgtctgttacagcacttttaggagttcttctattctagtaacctctgccaaccaacaaaacaagcctgaaaataaaatagagatgctgcctccttgctggcgatcgttcgggaagaaacagtaatgctactgacatgggaaagaaggggagttggttttctgcaatcaaaagagttttcacacaccactccaaagggaaggattcagataataacaaaggcacaaaag

SEQ ID NO: 43128 - DNA, 403 bp, Glycine max
  Clone ID: LIB3139-055-P1-N1-C3
caagatgtttgttttgaatatgatgcatgtacaattcgaaatgattgtggttcattggttgttgccaaggttggaaatcacaaacaaattgttggtttccatgttgctggaagcaaaggaagactgggatatgcttcattgataccatatgttgagccagttgtgcaagctcaaagtgctgaagtttactttgacttcttccctgtggaggttgatagtcaagagggagttgctcacattggtgaattgaaatctggtgtctatgttccactgcctacaaaaactaatttgatggaaactcccaaggaatggcaactggatctaccttgtgacaaaattcctagtgtcttgactacaactgatgagagattggttggcacagaacatgagggatatgatcctt

SEQ ID NO: 43129 - DNA, 406 bp, Glycine max
  unsure at all n locations
  Clone ID: LIB3139-055-P1-N1-C4
cttcggaagaacgctcgcccgcaccgtccagatcgtaatcaagagaagaggagcgagttttgtttttccttgcagcccaagccatggcgcctctgatcctgcatggtggaaaaaccaacaaaaattcttacaagacactcattgcggcggagtatgccggcgtccaagttgactntgccccaaattttgagatgggtgtctccaataaaacttctgaatttctcaagatcaatcctattggcaaggttcctgtgttggaaacacctgatggtccagtattcgagagcaatgccattgctcgctatgttacccagctgaaaggtgataacacctttgtatggatctttcttgattgaacatgcccacattgaacaatggattgatatttcatcattggagattgatg

SEQ ID NO: 43130 - DNA, 375 bp, Glycine max
  Clone ID: LIB3139-055-P1-N1-C7
accggatttcattgtgatatcatttgtgtcactggatggactgccaccccaatgcaggatgttcaggttacaattgattggtttatttcctctcaggaatgtgttcccaggacctattgtgttttaaatccacaaaatccttttgtgttaaataggtggatgggaaaactgactttccctcagggcacttcccgaagtgttaagagaatgcctctttctatagggggaggagctggtgcaaagaatgctattctcatgaatatgccaaatgctgttctttcaatgtggagatattttgttggagatctcgtctttgaagtttctaagatgacttctccctacattaaatgtacagtctttttcttcatagcattt

SEQ ID NO: 43131 - DNA, 387 bp, Glycine max
  Clone ID: LIB3139-055-P1-N1-C8
taacagtggtgatgggagaaatataaagagcggagatgtccacaactaggctggagaaggaagaggaattacctcaaggacagggcccaatcgatctttgttaatcatcttcgagctatgaagagagaatatgatgagtttaacgtttggatcaatgcacttgtggcaaaagctcaaaacgttcctcaaggaggatactattatgcaatatggtgacaccatggcctggaaataatactattgatcatcctggattgattcaagtctttcttggtcacagttgaaagtcatacatactgaacgaaacgtgcttccaagtcatcgtttatgtttcccgtgagaaaaggcctggattccaacaccacaagaaagctggtgctatgaatg

SEQ ID NO: 43132 - DNA, 403 bp, Glycine max
  Clone ID: LIB3139-055-P1-N1-C9
gtcttggtgctgctatcatcttcaacaaggaccttggttgggatgaacactggatcttctgggtgggaccattcatcggtgcagctcttgcagcactctaccaccaggtcgtaatcagggccattcccttcaagtccaagtgattcaatcaaacggttcatgcttaatcaagttgggaacaacaacaacaacaaaaatcaagccaatgtttgtgggttttggtttcatttcattaagatgatctgtttatctcttttcttctttttaaaatttaaagtctttgtattttgtatgtaaagatgtaaaattatgattattaggtggtgcatgtgtcgcgtcatgggccaatgttatcctctgcttttaagttggaagaggcccaactcatgtgtgatgtacggct

SEQ ID NO: 43133 - DNA, 219 bp, Glycine max
  Clone ID: LIB3139-055-P1-N1-D1
ctcgagcctaattgtctcgagggcatccccgtggcttgaagaagagaatctcaatggaggcccaggagctgaagcgcgtgttccagatgttcgaccgcaacggcgacgggagaataacgaaaaaggagctaaacgcctggttggagaactggggctttttaatttttgccagggccctgggccaaatgatccaaaggaccgccgtaaccggcaccggtg

SEQ ID NO: 43134 - DNA, 376 bp, Glycine max
  Clone ID: LIB3139-055-P1-N1-D11
tggttgtggggggttcaatacggtggcgtttagcgaagaggtatgcgatgatgtgagggcgttgttgaggaggtatagggaagggtgggcaatgacacagtgctccgacgccggaatattcctgacgtggaaggagcagccggtggtgtgggccagtgcatggagggccttgacgtagagtagaggagaatgacttgacgtgagtaaggtgttgagggacggattcccacgtgctctctgttccggaaacacgtgcccaacgctgagggttctttttttcttttttcttttaaggtaattaattaatggctttttttacttccctgtttgagtttgctacgtaaggcagtgggaataattggaaaggtttgagggt

SEQ ID NO: 43135 - DNA, 403 bp, Glycine max
  Clone ID: LIB3139-055-P1-N1-D12
cgttttcttataaaagccttaccaaagacagctctcacaatccctttgtgactccaaacacaccaattgcatttgcattaccattcacaatggcaatctcctccacttccaactccctcattcccaccaaatctctaatcccccaatcccaccccctcattcccaacaccaggcccgccctccggcccaagcccggcccatccccttccatcttcgccgttcacgccgccgagcccgccaaaaaccccgtcgtcaccgacaagcccaagccccaagcccaacaacctcccccggcctcggcccgggcaacgaaatgggccgtggacagctggaagtcaaagaaagccctgcagctgcccgaatacccgagccaggaggagctggagtccgtcctcaaaaccct

SEQ ID NO: 43136 - DNA, 407 bp, Glycine max
  Clone ID: LIB3139-055-P1-N1-D2
ggctgatttaaaccctgatccatcagacatactctctcctgtggatgctgatggccatggcactcacactgcatcaactgttgcaggcaatctggtcccaaatgcaaatctcttcgggttggccaacggaactgctcgtggcgccgtgccatcggctaggttggcaatttacaaagtttgctggtcatctagtggatgtgcagacatggacatacttgctgcatttgatgctgctatacatgatggtgtggatgtaatatctatttccataggtggagggaatcctagttatgttgaaggctctatatcaattggtgcattccatgccatgaggaaaggtataatcacagtggcctcagctggaaattctggtccaagcctgggaactgtaaccaatactgcaccat

SEQ ID NO: 43137 - DNA, 409 bp, Glycine max
  Clone ID: LIB3139-055-P1-N1-D3
taaagagtctttttaccctccctactactaccactcaggacgaccaccatctccatctccaccacctccctattactataaatctcctccaccaccatccccctctcctcctcccccctactactaccactccccaccaccaccatctccctctcctcctcctccctactactaccattctccaccaccaccatctccatcaccaccacctccatactattacaaatcccctccacctccatctccatctccaccaccttcttactactatcaaagtcctcctccaccatctcccactcctcatcctccctactactacaaatcccctccaccaccaacgtcgcatcctccaccttaccactatgtgagccctccaccaccttctccatctcctcctccaccataccat

SEQ ID NO: 43138 - DNA, 280 bp, Glycine max
  Clone ID: LIB3139-055-P1-N1-D4
gccccactttaccaccacaccactctctctgctcttgtggtacctttcaagtttttaaagtattaagatggcagagacattcctatttacctcagagtcagtgaacgagggacaccctgacaagctctgcgaccaaatctccgatgctgtcctcgacgcttgccttgaacaggacccagacagcaaggttgcctgcgaaacatgcaccaagaccaacttggtcatggtcttcggagagatcaccaccaaggccaacgttgactaccagaagatcgtgcac

SEQ ID NO: 43139 - DNA, 397 bp, Glycine max
  Clone ID: LIB3139-055-P1-N1-D5
acctccggtaatcgataagcaaccaaaccgacgtggccctgagcatctcaaagctcctgttgtcgaaagaagctcgggacaagaacctcgtgtattcgccgctgtcgttgcacgttgttctgagcatcatcgccgctggctccaagggccccacactcgatcagcttctctccttcctccgatccaaatccaccgatcatctcaactccttcgcctctcagctcttcgccgtcgtgctctccgacgcctctcccgccggcgggcctcgcctctccttcgccgacggcgtgtgggttgagcaatccctctcgcttctcccttccttcaaacaacttgtcagtgctgattacaaggcccacttggcttcagttgatttccagaccaaggctgttgaagt

SEQ ID NO: 43140 - DNA, 123 bp, Glycine max
  Clone ID: LIB3139-055-P1-N1-D6
cagtagcctaatttggttcagtgtctttggaaaaacggtaagagatgatttaaagggtgctgttccacactcttcagaagatgctcctgacaagggcgatcccgaaaaacccaaaaagattga

SEQ ID NO: 43141 - DNA, 405 bp, Glycine max
  Clone ID: LIB3139-055-P1-N1-D7
ctcttagctccgaatcatctgagaataatgcgttgatcaatgaataacaggccagacagaaagcattggatcaagcaaatgaagcaaaggtagaagggcctaagctatttgtcgaagggaagtatgaagaggcattattacaggatgcacttgctttacaagtagcatctgacatgcctccatctgtggaaatacggtcaatatgccattcaaaccgtggtgtgtgctttctgaaactggaaaaatatgacaacacaattaaagaatgcacaaaagcattagaactgaatcctgtgtacgttaaagctttggtaagaagaggagaagcttatgaaaagcttgagcattttgacaaggcttttgattgtgagttcaaagattataatagggtggagggaaattgta

SEQ ID NO: 43142 - DNA, 404 bp, Glycine max
  Clone ID: LIB3139-055-P1-N1-D8
aagagtttcagtaaggagtgtgttctaacaaaaaatctttagttgagccaattttaagctatgatcaagcagatattaaataggctccctcggaagccctccaaatcgggggaaagtcgtgaaggaggggcgatattgactccctcttcaactccttcgacaagtgcaaggagcagcgatgcagcaggctacagccatggaaatgcaactgcttcacctctttcaggcactgctgattctaatttggttcctggattaaatcatggtgacaggattgtccaagctatgaactcaaaactgaatctgaatgggagttttccagttacggcctatgaagccttgccaagttttcgtgatgttccaaactcagagaagcagaatttgtttataagaaagctgcaaat

SEQ ID NO: 43143 - DNA, 393 bp, Glycine max
  Clone ID: LIB3139-055-P1-N1-D9
tgttaattttggaatcctgcttgcacaaaagcgatgactatgtcatttaatccaaacccgtgttctgatgcatggagtttggaatttctgaagcgtactggatttcattgcgatatcatttgtgtcactggatggactgccaccccaatgcaggatgttcaggttacaattgattggtttatttcctctcaggaatgtgttcccaggacctattgtgttttaaatccacaaaatccttttgtgttaaataggtggatgggaaaattgactttcccccagggcacttcccgaagtgttaagagaatgcctttttctatagggggaggagctggtgcaaagaatgcttttctcatgaatatgccaaatgctgttcttcaatgtggagatattttg

SEQ ID NO: 43144 - DNA, 327 bp, Glycine max
  Clone ID: LIB3139-055-P1-N1-E1
atgatctatatatagaaccagattttcaaaggacagcagggatgttaattttaaccatttctagattcccatttaaacaacatttttgctaaaagaatattaaagaacaagtctttagccaagaactaaaataaattcacatctaatcttaacccacttatgttatctgtgggacgtaattcctagatatctctttgtacaccttcattagccaaatgttaattaattaattaattaattaatctttccaaccaactacatcgtctgcaacgactccgttcgtcacagaatatttgttctgggtttctagtttttttaagattttta

SEQ ID NO: 43145 - DNA, 398 bp, Glycine max
  Clone ID: LIB3139-055-P1-N1-E11
ctcgagcctcgagaggtacttactcacagatatattttgtttttttgtctccatcattttctcgagagctttcagtttgtgtggttcatctttcttcttctccttccctcccccctctgtaacaccccgcttctctgaatccctttctgttaatcatctgtctttcaagctaagattttcgggtttgtctattaattcaccaagaagcaaacttagaaggatttttcgaaagccaggtgttttcagaaacgagatccaggttttattgtcgaatttcgctagtcaaattaattttcataattatttttttctttgaaaccagccaagagggttatttttgatccctcaaagctaatttctctctctctttttttatttccgggactgaagaggttgtc

SEQ ID NO: 43146 - DNA, 401 bp, Glycine max
  Clone ID: LIB3139-055-P1-N1-E12
ctcgagccgaatcggctcgagctttgaggaagtttctttaagtgcagcacttaatggtgttgagggtttggactatatggaaagaattcctcttgccacatctgaaggttttcctcatgtgctttcacgcaaaaatggtgaaaaaggcaaaaggagatttgtttctggggatggtgaagagatgacattgattccgggaactagtgttgaagaggcttacaacaagctaatagttgaacttgagaaaagtgttcctacattggttggcattgaatgtcccaaggatgagaaacttccccgtcgcaaaatttttgacaaacctaagacgcgctgcttcactattctccctatggagtttaatcttgtggtccgtcagaagtttttaaattttgtgaggttca

SEQ ID NO: 43147 - DNA, 406 bp, Glycine max
  Clone ID: LIB3139-055-P1-N1-E2
gtctgatttttgttccatgcatcaagtgtttcctattgcctgtgcacattatgggattagtattttgtgatgctgatatgtattgtatccttcttattaaatatggtatgaaagctaacaattttgcttgatctgatgcttctgtcctctccacatgagtctttttggctacttttagatactgggatacaaggcagtcaaatccagtgcacacacagcaactcccagagcgctgctatgctatgacagtgagacatcctctgatggttgttggcactgctgatagaaatcttattgtttacaacttgcaaaaccctcaggttgaattcaagagaattgtttcacccttgaagtatcaaacaaggtgccttgctgcattccctgaccaacaaggtttcttggttgg

SEQ ID NO: 43148 - DNA, 406 bp, Glycine max
  Clone ID: LIB3139-055-P1-N1-E3
acctcaaacaatttttcaaaccacaacgattgcattggaggggcttaaacaacatgctgcaggataacaagccacatccaacaaaacaaattcataatgcgctcatgagggagacatgtctgatgtcccaaatagtgtcgagccctatgctaagaacaatgggcatgagccggcatgcaggccttctgactctaacatccgactacgtaacgcagcatctatagctgctactgtttacacttcaacaccaactgaacctcacaatgttccaagtcaagccttacatagtgatgctaaactacctgatgacatcaaagtcaagctagctgctaagaagacttgatttatgatgagcttatcatattccagagaggaagaatatcatgattgtatcatacataagact

SEQ ID NO: 43149 - DNA, 403 bp, Glycine max
  Clone ID: LIB3139-055-P1-N1-E4
ctggtggttacggtgaacaagttctcagccgtgatgtatacagacttggacagctttttgatttcttccggatgctgtctttctattttacaacagttggatactacttttgtaccatgctaacagtgttaactgtatatgcctttctttatgggaaagcgtatttggcactatctggtgttggtgaaaccattgaagaaagggctaggataactaagaacactgcactgagtgctgctttgaatacacaatttctctttcaaattggtatcttcactgctgtgccaatgatcttgggcttcattcttgagcaaggtttcttgagggccattgtcagttttgtcacaatgcagttccagctttgcactgtctttttcacattttccttgggtacaagaacaca

SEQ ID NO: 43150 - DNA, 404 bp, Glycine max
  Clone ID: LIB3139-055-P1-N1-E6
acgagtgattgcgttgcgattgacgacgacgaggaatcatgtcttccggcggcggcggtggtaagccgttcttctgccacgtgtgcagtcagaggattacgtgctccgatgagtcggaaccattctgcccgatgtgtatggaaagtttcgtagaagaatgcaaccctaacaatcccaaccctaatctcttccccgacagtgatgaatcttcggatcccgaactccccttccaccgcttctcacttctccctctcttgctctcatcagtctctaggtcccgatccgaacccgacgtgttcgacccgatggtcttcctccagaaccaccttcaggaccttcgcgccgacggtgccaacattcaagttgactttgaccatccttccaacgagaatcaaggctttcgc

SEQ ID NO: 43151 - DNA, 407 bp, Glycine max
  Clone ID: LIB3139-055-P1-N1-E7
cttctgaagcaggcaatgaagagtgggatgatagcttactgaccaaagaggaagtagaggcaagattgcagaggaaggtggaagcaatcatcaaaagagaaagagcaatggcatttgcatattcacatcagctatggaaagccactccgaaatcaactcacaccccgatgacagatacacgatccagtggattcccttggtggtggaactggttggaaagacaaacacctgcagcaactccacaagaaagacaaagcttgaagaattttcaaatcacacctccaagaccatactcagagcaaaagactagtccaagacctggctccagcactcaaaggcagccgcagtcgcagcagcagcagcctcatgtttcctttgataatatggacactcccacaccaaagtcc

SEQ ID NO: 43152 - DNA, 384 bp, Glycine max
  Clone ID: LIB3139-055-P1-N1-E8
gtaacttttttaagataacgtgatgtaatcttgatgggtatgctatcgagttttgctcctttaatgcctacatttaatttatacaccaggaaatgctcttttaaaaattttgggtgcattgatgtgccaagcattgatagttgttggacttgtagaaaaataaatcaattgcaagcaatactcattttcaacatggtcaacaggtaaacaatcgtaggtttttcattttgaaagttggtccttgaaataaaatgttgtatgcccctttaccgaagatatgaatttttaatttaaccagaggtggaatttttagttttggtagtggatttgtatttttaatttttgtattctttgtaaattttcttttttagtttttatatatat

SEQ ID NO: 43153 - DNA, 184 bp, Glycine max
  Clone ID: LIB3139-055-P1-N1-E9
gcaacggttgaattttgactgaagacaaagttagaaggaaaaaaacatgtcttgctccgtcgcggtttccaattcgccggtgttctctccttttctttccttttcttgttcgaggccctccttattttttttttggccggattccttttccttttttttgtggattttaaaactttgaaccttt

SEQ ID NO: 43154 - DNA, 384 bp, Glycine max
  Clone ID: LIB3139-055-P1-N1-F1
agttcttacattctcaagccatgagttgtagaattgtgatctacttcactttcttcttctgtttgttttttacctcggttcctcttgttcatatgtatccctcgtatccctatagtagaaattaccagcttggccctaatttctatgatagatcatgccccaatttgcataagattgttggatatggtgtttggttagccttaagaaatgacaacagaatggccgcgtccctccttcggttgcactttcacgattgcatagtaaatggctgtgatgcttctgtgcttcttgatgatacaccatatttcacgggcgaaaagaatgctctttctaatcacaattcacttagggggtttgaagtcattgatgacataaaagaacacc

SEQ ID NO: 43155 - DNA, 401 bp, Glycine max
  Clone ID: LIB3139-055-P1-N1-F10
tgtgtgttttccttgtttcccctattattatctcgctctcacaaaatcatggcattctctagtgctttgattctgtggtcgttgctagcaatcaacatggccctgccaaccctcgcaaccgtctacaccgtgggagatacttcaggttgggcaattggtactgattatagcacttggactggcgacaagatcttttcagtgggtgatagtctcgcgttcaactatggagctgggcacacagtggatgaagttaaagagagcgattacaagtcgtgcaccgcagggaattctattagcacagacagtagtggtgcgaccacaattgcccttaaaagtgcaggcactcattacttcatatgttctgttcctggacattgttctggcggtatgaaacttgccgt

SEQ ID NO: 43156 - DNA, 347 bp, Glycine max
  unsure at all n locations
  Clone ID: LIB3139-055-P1-N1-F12
ggagttccgcttggacgttgcttctctttctcatctggttcctctcctcaacaacaacaagcaccactgactacgcttgcaaattctcccagtcccaccccttctgcgacacttccctccccactctcacacgtgcgcgctccctcgtgtccctcctcactctccctgagaagatccttcttctctccaacaacgccttcttcatcccccgcctcggcattcccgcctaccagtggtggtccgagtcccttcacggcctcgccctcaacggccccggcgtcttcttcgccggcgccgttcccttcgccaccagcttnccccaggtcattcttttcgncgncttcttt

SEQ ID NO: 43157 - DNA, 408 bp, Glycine max
  Clone ID: LIB3139-055-P1-N1-F2
gtgcctgcctgaattgaattgaattgaagagagatgtggtttgaggtgggcgggcaaggcagtcgccccaccttcttcgagatggcggcggctcaacaactgccggcgagccttcgcgccgctttgacatactccatcggcgtcttggccttacggagacccttccttcacaaactcctcgacttcgaagacgaatccttcgccttactcatgctcgtcctcgaatcccacaccttacgaaccacagatgcttccttttcggaatctctctacggcctccgaagaaggcccgccaatatcgccctcaagaatgacgacgccactaccaccaccaccagcagcagcgcattacggaggcgccagagagttctttccgttgattttttggttgtgttgccgtatttgaat

SEQ ID NO: 43158 - DNA, 157 bp, Glycine max
  Clone ID: LIB3139-055-P1-N1-F4
ggctctacctatgatgacagatcaggggccaatgaggtaaggcttgctgaaaaaaagggcgaagcagatgtacatgcttgatggtacagctctcaacattattatgcgagacactgaccaataccgtaactagacaacctggacccatatcagactc

SEQ ID NO: 43159 - DNA, 402 bp, Glycine max
  Clone ID: LIB3139-055-P1-N1-F6
ctctctttttttttcctcttcaacattcttctctctcagaaagcaacaacacaaacaccgagcgaggggaattcaactttcagcaatggcggtttcttcttctgcaacaaaatgggtcctcttcttgcttctggcgctgctcattcgagaagaagccatggccatggctactaccccacagatctctgacctcaggaatgttgaagttgaaagacacaggttgccgagcttgacgaactcgtcaatggtggagagggcaaaagaggctgacaaattaaatgaacaagctgctgtggctaacccagaggaagtggtttcaatggttgagatgagcatccagaacagcacagagagaaggaaggtgggatatttctcttgtggaacaggcaacccaattgatga

SEQ ID NO: 43160 - DNA, 211 bp, Glycine max
  Clone ID: LIB3139-055-P1-N1-F7
acccttattgcgtgaagggtcgcgattactgtgacccgcgccacgctggttgtgagacctcaacaaccacctacattgccgatgctgagattatgtctcaatgcatgagcagggctagcaacgcggttgagtacaccaagaaggcgtacactgactcaactagagcatacacaatgcacgtggacgaggatcacgcagatcaaatatgcag

SEQ ID NO: 43161 - DNA, 400 bp, Glycine max
  Clone ID: LIB3139-055-P1-N1-F8
gaatggtcttgcggctctggccaaccacctatcagatttcccttcaaactcatcaagggaattaaagatgaatgtggttatccggggttttgtctatattgtactaaaaaaaatgagactatgcttgctctctcctccgtaaaactccaagtcagttacataaactacgaaaatcatgaaattgggttgaaagacccggaaaattgccttccgcacaagtttctgcaaatcaacgattctcttattcatccttacaaatttgacgatgaagctaaaacaagtaagttgagcttcttcaactgttcttcagttgagcatcaacacctgagaaactaccagcagtcactgtcagactcacaagacatgatctcctgtcctatttatgtttctgatcttgatg

SEQ ID NO: 43162 - DNA, 397 bp, Glycine max
  Clone ID: LIB3139-055-P1-N1-F9
ctaatttagcatgttctgtggcctgaccagtgtagtttcaagctgaacctggactgagacttggggtgctggatggctgcagttgatccatcaaaatatgtataccttttgattctctgttgctactgatggatcttatttcctcaggcaaaatagcctttgtttattgtaaacgtctacatgtcatatagtagttaagtatacttggcctgaaatggtcagaacttacattgcttctgtaaggggaaaaccaaagccttagctggaaggaggggagggtccacacagagttttgatgcggggttgttgggttcggattcctcttattaacgtaatgcgcctgatttgtaatgaagcagaccagttccttttcttgtgaaatgtaattgtgctatat

SEQ ID NO: 43163 - DNA, 409 bp, Glycine max
  Clone ID: LIB3139-055-P1-N1-G1
tcctcgcacaacacaaccacaatggccgcgaagaagaagaatggcggcggaaacggcaacaacaaggagaacgaagacagcaccatcaccgtcgtcttgaaggtcgaaatgcactgcgacggttgcgcttccaaaatcatcaaacacctccgctgtttccaaggtgtggaaacggtgaaggctgatagcgacgccggcaaggtgaccgtgaccggaaaagtggaccccacgaaagtgagggataacctggcggagaagataaggaagaaggtggaactggtgtctccgcagcccaagaaggagcaggagaacgagaaagagaacaaggatgctaaggcaaacaacaaatccgagaataacaaaacccaggacaaaaaaaccaaggacaaagaggtggtaaccaccgctg

SEQ ID NO: 43164 - DNA, 397 bp, Glycine max
  unsure at all n locations
  Clone ID: LIB3139-055-P1-N1-G10
ctcttctctctctttctccggcgacgatctcagattccggtcactcctctcgccggcgatcccttattcctccgtcctccgtcgagtcctttccgattcgaatcgttcccagccttgtgccaccatgaatcccgaatacgattatttgttcaagcttttgctgattggagattctggtgtaggcaagtcatgtcttctcctgaggtttgctgatgattcataccttgacagctatatcagtaccattggagtggactntaaaatccgcactgtggagcaggatgggaagactattaaacttcaaatttgggacactgcgggtcaggaacgttttccgacaatcactagcagctactatcgtggggctcatggcattattggttgttatgatgtcact

SEQ ID NO: 43165 - DNA, 399 bp, Glycine max
  Clone ID: LIB3139-055-P1-N1-G11
gtcttcttctagctcccgtgaaagaaagaagggtgttccatggactgaggaggaacatagaatgtttttgctcggattgcagaagctgggcaaaggtgattggcgtggaattgcaaggaactatgttatatcaaggacgcctactcaagtggccagccatgctcagaaatatttcatcaggcaaagcaatgtgtccaggcgaaaaagacggtccagcttgtttgatattgttgcagatgaagcagctgacactgcaatggtacagcaagacttcttgtctgctaatgagttaccaactgaaacagaaggcaataaccccttgcctgctcctcctcccctcgatgaagagtgtgaatcaatggattccacaaactcaaatgatggagagcctgccccatc

SEQ ID NO: 43166 - DNA, 403 bp, Glycine max
  Clone ID: LIB3139-055-P1-N1-G2
gtacaatcctccatggttctctgaggctattccctcagcaccttatgatcctcttgctttgaggcatgcctttgagaaggctgtggtaaaaaggttgatgactgatgttccctttggtgttttgctctctggaggtttggactcttcattggttgcagccgtcacggctcgctacctggcaggcacaaatgctgccaagcaatggggaaccaaattacactctttctgtgtaggccttgagggtgcacctgacctaaaggcagcaaaggaagtagcagactacataggtactgtacatcatgaatttcactacactgttcaggatggcatagatgccattgaggatgtgatctatcacattgaaacatatgatgtgacaacaattagagcaagcattcccatg

SEQ ID NO: 43167 - DNA, 311 bp, Glycine max
  Clone ID: LIB3139-055-P1-N1-G3
agagctctgacggcgcctggccgccttccgtaggctcggatttcggttcaggggattcaattgcattttcattggtgcaacgggagggccggcggccccaatgcaggatgttcaggttacaaaagattggttattttcttttaaggaatgtttacccagaacctattgtgtttaaaatcaaaaaaatccttttgtgtaaaataggtggttgggaaaattgactttccctcagggcactttccgaagtgtcaagagaatgcctatttctatagggtgaggagctggtgcaaaaaatgctattgtcatgaata

SEQ ID NO: 43168 - DNA, 396 bp, Glycine max
  Clone ID: LIB3139-055-P1-N1-G4
gcactggctatagtttgcagggtgcatgcaattgggagacactgatgcaatgatggggcagattgagaattccctgctgttttatacagcaggtcttgagattcaagggcaggtcttgggggaaacagacccgagattcggtgagacgtgtcgctatgtggccgaggcacatgttcaggcactgcagtttgatgaggctgagaagctgtgccagatggctcttgacattcacaggggaaatggagctcctgcttccatcgaggaagctgctgataggagactaatggggcttatctgtgactcaaagggtgattatgaagctgctctagagcattatgttttggcaagcatggtttttgctgaaaatgatcatgaaatatatgtggctttagttga

SEQ ID NO: 43169 - DNA, 401 bp, Glycine max
  Clone ID: LIB3139-055-P1-N1-G6
gaagaaaaatccttcacaaagatctagtcctagctagaatcagacaggggcgatctcaccttcaagaacacatcgccatggcaaggaacttgcttcttgtgctttttgcagtagccaccctcctccatggctcagcagcccaaaccagacacatggtcggtgatgccacgggctggatcatccctgctggcggcgctgccacctacaccgcctgggcttccaacaaaaccttcaccgtaaacgacactctcgtgttcaacttcgccaccggccaacacaacgtggccaaggtaacgaaatcggctttcgacgcgtgcaacggcgggagcgccgttttcaccctgacctccggtccagcgaccgtgaccctgaacgaaacaagggagcaatactacatttgc

SEQ ID NO: 43170 - DNA, 401 bp, Glycine max
  Clone ID: LIB3139-055-P1-N1-G8
cattgttatcaacaagccgacaatcgggttttggaggataggtacaagcaactaaacgactggctgtccaatgatccaaatacctgatggctggcgttgacgcctctcgagtccaagttatttaatcgttcctttgccctcatgaaggcgaaagcgcatgctccgccaggagtgccactcgaaacaagcgccgagttgtcgcaaaaagatattgacattattgctgatgtcttagcgcgctggccatccttgcagaggttccctgtcgttgatctcttgagacttcttattgcttattctcccaacacatttgaagcccctcagacattgcagaaactgattgatgctttgttcgaagcatcggaatggaaggaatcatggccatcacccctaccgaagca

SEQ ID NO: 43171 - DNA, 396 bp, Glycine max
  Clone ID: LIB3139-055-P1-N1-G9
gaatgattaaaatggtggccacagttggtattcctgagaatacaggtatagcattggcctgtgctatgaatagttcttttagggggcgcgccagttctgatatttacaccatctgctctcaagactgtgaattatggaatcctgcttgcacaaaagcaatgactatgtcatttaatccaaacccgtgttctgatgcatggagtttggaatttctgaagcgtacctgatttcattgtgatatcatttgtgtcactggatggactgccaccccaatgcaggatgttcaggttacaattgattggtttatttcctctcaggaatgtgttcccaggacctattgtgttttaaatccacaaaatccttttgtgttaaataggtggatgggaaaactgactt

SEQ ID NO: 43172 - DNA, 121 bp, Glycine max
  Clone ID: LIB3139-055-P1-N1-H12
gtccaactcagtagtcaacactaggcactctctattcccattcattgcagaagaagatggaggcttaccccttacttccaacccgattggaactaacccggctaccctcccggtttccttt

SEQ ID NO: 43173 - DNA, 387 bp, Glycine max
  Clone ID: LIB3139-055-P1-N1-H2
gcttcaagtctcttcagtaaagaagaaaactgcagtttccagaagttggattcttctggaccactattgcaaaggcaccggtcttgatgccgataaatatgctatcatgcgcccgggtcaaaattaaccccaagatcttcggattctcgaccctctcttattgtattcttccaccattttgggcagagagaaagtcattgttctcaatttagagcacattaaagctatcatcactgcagatgaggtgtgtttgatgttgatagagagctggaaaaatcaaaattcgtgaggaaaccatctatattgatttcttaaaaaatccgcgatgtagtgaaaatgatatcggttttcaaatttgccaggatttgttggttgtgattggtgatg

SEQ ID NO: 43174 - DNA, 61 bp, Glycine max
  Clone ID: LIB3139-055-P1-N1-H4
gcttttggagccgatccaaccaatcatcgctggcgccgaatacaaaatctcatccctttcc

SEQ ID NO: 43175 - DNA, 177 bp, Glycine max
  Clone ID: LIB3139-055-P1-N1-H5
acagggcagagtatgataacctgaaacttgaaatgccgtggtatgtgaccgaatacttctaccccttggcgggaataaagctcataagggaggacttgtactacaagaataaacccatcattcctgtgctcaaacctcaaagccgggtcgtgaactacaatgcaatgcacatgattt

SEQ ID NO: 43176 - DNA, 405 bp, Glycine max
  Clone ID: LIB3139-055-P1-N1-H7
cacttttggcatgaaattgtgaagagcacacagcacgcagcacactttcaagtttcacccttaaccgcgccctctcatcaaactccaattttcattcatttcgcgattccctcctttctttctctctctattctaattctaattccaatcacaaccagattctattcccttccttccaattctagggtttctctctccgctagggttcccaatttctctcccccttcccaccaaaaacatggccaccgaaaccctagaagacaccaagcctcccctccaggacgacgaccgtgcgaaatcggagattcccgagaaagacgcttcctcggacgacgccgcggcaaaatcccgggacgcgaatgccggcgacaaagacggagcatctgacaatcaggaagtagaaga

SEQ ID NO: 43177 - DNA, 157 bp, Glycine max
  Clone ID: LIB3139-055-P1-N1-H8
cttcaacatgtaccttggttgaagatgatagcgggacgaatactacgagcagggttgataccagtgccggtgatagggatggtgctgttatcatctttaacaaggaccttggttgggatgatcactggatcttatgggtgggaccttttattggtgc

SEQ ID NO: 43178 - DNA, 200 bp, Glycine max
  Clone ID: LIB3139-055-P1-N1-H9
caacaatggtgcaaaggatcccttgctgtcaggatcactggatgccgactcaaaggcctaaacaccagtttttaaacaggagaaggctcctccgttctagaagtgctcctcacgcagagcttgttcctacagagccaaattgcattgaatcaattcctcgtcctgcatccatatttcagaatttgcatccaagttttaaa

SEQ ID NO: 43179 - DNA, 343 bp, Glycine max
  Clone ID: LIB3139-056-P1-N1-A6
aagcaacacttgaacactctcttgaacattcatggatcgagtgagcgtgtggggtaacacgcccttggcgacggtggatcccgagatccatgacctcatcgagaaggagaagcaccgccaatgccgcggcatcgagctcatcgccttcgagaacttcacctccttcgcagtcatcgaggccctcggcagcgcccttaccaacaaatactccgagggcatgcccggcaaccgctactacggcggcaacgaattcatcgaccagatcgaaaacctttgccgctcacgcgccctccaggccttccacctcgacgcccaatcctggggcgtcaatgtgcagccctac

SEQ ID NO: 43180 - DNA, 314 bp, Glycine max
  Clone ID: LIB3139-056-P1-N1-A7
gtgatttctgtgagtgatcggtgttcacttgatctcggcataatcgtcagcgtcaattgaagaagatgccgatcagaaacatcgccgtcggaaggcctgaagaggcgactcaccccgacacgttgaaggcggctttggctgagttcatctcaaccttcatcttcgtgttcgccggctcaggctccggcatcgcctacaacaagctcaccgactacggcgctgtcacccctgccggcctcatctccgtcttcatcgcccatgcattcgccctcttcgtcgccgtctccgtcggcgccaacatcttctgctgccac

SEQ ID NO: 43181 - DNA, 378 bp, Glycine max
  Clone ID: LIB3139-056-P1-N1-A8
tgattcgtttttcctacaaaacgtgagagaagaatcggacagacacgggttaaaacgcctacaaagcatccttctttcacaaatacttaagaaggaaatcaacttagcaagtgagcaacaaggcacttcgatgataaaaaataagctcaagggaaagaaggttctcttagttctagatgatgttgatgagcacaagcaattacaggcaattgttggaaaatctgtttggtctgagtctgagtttggcaccagattggttctgatcatcaccactcgggacaaacaactcctaacatcttatggggtcaaaagaacacatgatgtgaaagaattgtttttgatagatgctttttaattgctttatctgaaaggttttta

SEQ ID NO: 43182 - DNA, 310 bp, Glycine max
  Clone ID: LIB3139-056-P1-N1-A9
aaggaactcttcaatctgtgctatggatgatgaagagtcctgattcaaatgataatattgatttactgttgagcattgatttgttgggtttacaaggagcaggtaaagcttttccaaacaaaattgtttttgatgataagcttgtgttggctaacacacaagaattctttgatggtaatttttcagtggattcttggtttccaatttttgtgtatttgtctttatactttatgacaatttccttttaaagttttttttttattattgttcgatttgtgtattgattcttttttcattttatttttttttt

SEQ ID NO: 43183 - DNA, 232 bp, Glycine max
  unsure at all n locations
  Clone ID: LIB3139-056-P1-N1-B1
cccgagccttttccccccacccncncccnnnncagcggttttcccgttactntgtgtgtctccattttnattctcttcttcttcttcactattttctcagttatcaccttatcccaacccttttctgttgcgatagtgcttctgggctgttgtcagatcaatccacaaccctcaattgttggtgttttggctcttcctgtatcattggatggttttcatgggggtgatttct

SEQ ID NO: 43184 - DNA, 381 bp, Glycine max
  Clone ID: LIB3139-056-P1-N1-B10
gacctctttaagagtcggcttctttctctgcaccgtgggttcctggcttcatgtcctccagcaactcgaggacggtgagattcggtgcgcccttcaatccgatctggtcaagtccgtctattccttcaattctctaaacggcaaggactctttcagcacgctctacaaagaggaaaccgacgccgatcagtacaacctcgtcttcgccaactgccactggcagcaactcaaggtgacaatggacgtttaatctgccatgtacaacctagaagggaatagcaacgtccgcgattacctctctgcgggcagaaccatccttcctagggtttatttgctcttctcgttggtgtatttcgctctggctgctctctggatcagcgt

SEQ ID NO: 43185 - DNA, 225 bp, Glycine max
  unsure at all n locations
  Clone ID: LIB3139-056-P1-N1-B11
caacaagtcatgttcaacttgtgtgaagggattaggacatgtttaatcttggtggtggtagtcctcnnaaagcaattgaggagcttcttagagggcgtgattctgcccaacatcttaagattgtcatcaaagggacttatgatgttatatcagccaccccatttgctctacaacttgtgatatattgtactcatgatctctacaaactctctttaatttctttct

SEQ ID NO: 43186 - DNA, 151 bp, Glycine max
  unsure at all n locations
  Clone ID: LIB3139-056-P1-N1-B12
ncctagaataaaatcaccattggttaaagttaataaagcatgtgctgctgttggcttgacatcaagttacactccaactccattgttggaatctggtttgcaaaaagacagagggttaatttgtggagtatttttggaagagatgtttttt

SEQ ID NO: 43187 - DNA, 275 bp, Glycine max
  Clone ID: LIB3139-056-P1-N1-B5
tcaattgggaaggaacaaacctgggttaggaatctgctgtgactggatcctttctgggacctctgtttctgactttctgctttctaaacactgttgcaattgcttacatagctactgctgccctcccatttgggacgattgtggttatagttctcatatggacacttagtacgtctcctttgcttgtattgggagggattgctgggaagaatagcaaggctgaattttaagcttctgttcggacaacttaatattcaagggagatttcacctctg

SEQ ID NO: 43188 - DNA, 315 bp, Glycine max
  Clone ID: LIB3139-056-P1-N1-B7
cacttgcggtgggaaaaatgtctctggtggcgaacgaggatttccagcacattctgcgtgtgctgtacaccaacgtggatgggaagcagaagattatgttcgcaatgacctccatcaagggtattggaaggagattcgccaacatcgcttgcaagaaggctgatgttgacatgaacaaaagggctggtgagttgactgctgctgagttggatagtgtgatgactgtggtggcgatccctaggcagttcaagatcccagtctggtttttgaacagtaagtagggtttcatggtttgcattttctctcttgttgtgt

SEQ ID NO: 43189 - DNA, 340 bp, Glycine max
  Clone ID: LIB3139-056-P1-N1-B8
ggagagctttataggctgaggcgacagatgagtatcatagagcattgggtttacttctcttgtaatctccctgaatgggaggcatttgatccaaacacccgtcgatggatgcgcttgcctagaatgccctctaatgaatgctttatatgttcagataaggagtccttggctgttggtacggagcttcttgtctttggaaaggaaataatgtctcctgtcatatacagatatagcattttaatgaatgcatggtcatctggtatggaaatgaacattcctagatgcttgttcggttctgccagccttggagaaattgccatattagctggtgggtgtgatc

SEQ ID NO: 43190 - DNA, 266 bp, Glycine max
  Clone ID: LIB3139-056-P1-N1-B9
gaacaatcatagtgttactccaaacaagcctgcgaagacggcgtctcaggatgatccgtttttgatatttgaaactgcttcaagctcggcatcttcagaatcattcctgaacgcgctggagcagattagtaggtcgaataattctaaggggacaaaaggagggtccccattcattgaagtctccacccaagccaatgagtaaagttaattggccgagtgtatcaacaattagatgagcttgtggactttgccatgggtggggctca

SEQ ID NO: 43191 - DNA, 294 bp, Glycine max
  unsure at all n locations
  Clone ID: LIB3139-056-P1-N1-C10
cagaaaatacaaacagtctttgtggtggtgataaagaaaggtttctaaaaatgacgagcgaccccccactncttgnnntttaagaatactatattttttatatagtaattttgaaattttatattactattacttcttatttatttattactattatatatttattatttaatatatttattaattattatcttttttattttattatattaatatatactataatttttttactctttaatttttatttatatatatttactataatctattctattatttttttttaatctt

SEQ ID NO: 43192 - DNA, 331 bp, Glycine max
  Clone ID: LIB3139-056-P1-N1-C12
atgctgctcctaagcaaccaaaaccaattaagaatagaatgtctgctttaaaagatggaaaacttagagagacaagttctccaataagaggcaatcgcataaaggttggtggtgtttagacccataatatatattcttagacagtgttcatattgcccaatcccattttttgagcttatgatttgattccttttttttatgtgctactttttttccttttaatttcatcttctgttttttcattaagaatttctttttttttcttcttggaggtgtgtattttccattttctttttttctatttctatttctttattttcgtatcttttat

SEQ ID NO: 43193 - DNA, 399 bp, Glycine max
  unsure at all n locations
  Clone ID: LIB3139-056-P1-N1-C5
aaaaaataatatttaaaaaaaaaaaaaaaaaaaacaaaagaaattttttttatttttgtggcccccccccccccccccttcttnttctcttcccctcctctttttctctttccctttctccctatttctctactctctttcctcttttggcccccccccccccccttttccctctcccccccaatattatttccccccctccccccttaattctccccattttcccctctaaaaagcctttttaaccctccccttactattccctcatccctctccccttaaaaaattttttcccctcccaatatccccccccctcccatcccgtttccttaaattttaaacccccgttcccctctttattccccccccccccccttttctctttccccccctcccccc

SEQ ID NO: 43194 - DNA, 381 bp, Glycine max
  Clone ID: LIB3139-056-P1-N1-C7
tccagaatgaatctactttgcacttggtgttgcgaggtcgtggtggcatgcaaatcttcgtgaagactttgacgggaaagaccataactttggaggttgaaagctctgacaccattgataatgtgaaggcaaagatacaggacaaggaaggtattccaccagaccagcagaggcttatttttgcagggaagcagctggaagatgggcgtaccctggctgattataatatccagaaggaatccactctgcatttggtgttgaggcttcgtggtggtatgcaaatatttgtgaagactctgacagggtagaccgtaaccttggaggtggtaagctcttgatccattgataatgtgaaagcaaagattcaggacaaggagggta

SEQ ID NO: 43195 - DNA, 381 bp, Glycine max
  Clone ID: LIB3139-056-P1-N1-C8
gcttttgtaagatgaggccgattctgatgaaaggtcaggagaggccattgacgttcctgaaatacaacagggacggcgatctcctcttctcctgcgccaaggaccacaaccctaccgtctggtttgccgacaacggcgaacgcttgggcacttatcgcggccacaacggcgccgtttggacctgcgacgtctcaagagattcggctcgactcatcacgggaagtgccgatcagaccgccaagctatgggacgtgcaaagcggcctgcaattatacaccttcaacttcgattccccggccaggtccgtcgatttttctgtcggcgataagctcgccgttatcaccactgaccccttcatggagttgccctccgcaattcatg

SEQ ID NO: 43196 - DNA, 280 bp, Glycine max
  Clone ID: LIB3139-056-P1-N1-C9
cacatgctggtgcagtttggagagattcaggaaaaagtggtgttgaaattttcacaagaggaatttcttacagcttggtcaactcaagtgcgtcccgcaacgactctgttggctgatgggtgcccatatttgtatgctatggtgcatgatagttcagtgtctacaataccaggtttttttgtcatttggtgttaagttgtcaactctttttctattttgtgcgcttctttgttctcttatttctgaggttttccagtgtttccttggtttttttcgtttc

SEQ ID NO: 43197 - DNA, 386 bp, Glycine max
  Clone ID: LIB3139-056-P1-N1-D1
cccaatccgttgatcaagttcctattttttggtacggtagtaagaaaactcaatccgaagatcaacctcctctttggtacggtgttaagaaaacctatgttgcaaaaagaagtctttcacaagaagatgaaacgatccttgttgctaatggtcatcaacatgacatcccaaaagcagaccaagttttctttgaagaaggattaaggcctggcacaaaattggatgctcacttcaagaaaagagaaaatgttaccccattgttgcctcgccaaattgcacaacatataccgttgtcatcagcaaagataaaagaaatagttgagatgctttttgtgaacccagagccagagaatgttaagattctagaggaaaccattagtatgtgt

SEQ ID NO: 43198 - DNA, 381 bp, Glycine max
  Clone ID: LIB3139-056-P1-N1-D10
ctcgttcctttcgaccaatcgtgctactgaccttggggcgttaggcggggaaattcggggcagtctgcttgatcgcgttcgcgatcgacttgacgatcttcaatgtcttgcgggagaccgacgtcgagcccctcctcgccaagaccgtctccacggtgatcgcgacgaccgtcgcgttcctgggcaaccgcttctggacctggcggcacggggcgcacgaccacatggcccggcagtacacgatgttcttcgtgttgaacgccatcggcctgggtatagccctgacctgcctggcgatcagccactacggtctcgggcagatctggccggtctagcatagcccgctcgccgacaacatctcgggccagttcatcggcaccg

SEQ ID NO: 43199 - DNA, 300 bp, Glycine max
  Clone ID: LIB3139-056-P1-N1-D12
tgaggtctgtgcggagctctgagaggaggggccggggtttgggaccctttgaaccctaatctccacccaaacccattttcccgggaagttccctctgaaacgaagacgaaaatgcagaatcacaggctgaagcagcagcaacaagctctgatgcagcaagctcttctccaacaacagtctctctaccaccctggtctccttgctccttctcagattgaaccaaatccaagtggaaatttgcctcctgggtttgatccatgttcttggcggagtgtgtatgttgggaacatccatacgcat

SEQ ID NO: 43200 - DNA, 428 bp, Glycine max
  Clone ID: LIB3139-056-P1-N1-D2
gtgcacacttttattgttaccacaagtgattgcgagaagacgggtgagatgtttcaggtgaccactttgctgagtgaggcggagagattggagaaagagttgttgcagaatccacctccgtcagaagcggatgtggaggcggcttgggttgttgttcaaagagaaaggggaggttgtgttttatattaaaagtttccaatggtagttaatctatttatttattgcttcctgttgattcattctttattaaatccattatatatatctttttcttattttgtagaggattgatgtattttttatatttttttttatttttatattttttattatatagttttattgtgttatcttttagttttaatctattaatttattcttctaatttttgttaatatatttattctagtattttttattatattttt

SEQ ID NO: 43201 - DNA, 383 bp, Glycine max
  Clone ID: LIB3139-056-P1-N1-D3
gaaaactgatagtgcagaagaggagggcatccctcaaagactttgataggttcaagataatgttggcaaagatcaagagggcagctgttgttaggcaagagctcgctaagctgaagaaaagtgcctaattttcaattttcaaatttagttttgaatttccttcagttagtacatttagagtgctatatgaatttttatgtatcaatgagagacatcctagaaatgcttattttgaaatcattcgtgttattgggtgatgctagttctctctgttgaattataattttttcttttttttttattttagtggctgtcttcttactataggaagtctttcattcccgattatatttatttccggacccgttatcctttcttttatt

SEQ ID NO: 43202 - DNA, 344 bp, Glycine max
  Clone ID: LIB3139-056-P1-N1-D6
cacatatatttttatatagcatgtttaccttgaatcggggttctgatttgtaccatgtgtcccctgagctctcatcttccttggacacattctcgccggcttcggagggctctcgtggcgtggcattttccgacgaggaggtgcggctggcggtgaggcacccgaagaagcgggcaggtcggaagaagttccgggagacgcgccacccggtgttccggggggtgtggaggatggtcttggttctttgggtttctttatttataattattgattgttgattctcttttattctctttttttttatttttttattccttttttcttaattttattctttttttttt

SEQ ID NO: 43203 - DNA, 378 bp, Glycine max
  unsure at all n locations
  Clone ID: LIB3139-056-P1-N1-D8
gctttagtgntccactaccaatggtgattttgatagtaagatttatctcgcaatggttaatgccaacgtagcatgtgctgctgttggcttgacatcaagttacactccaactccattgttggaatctggtttgctaaaagacagaaggtttattgtggatgtattctgtaaggatttcttttctttttttttacttttatttatcttttattcttcttcttcctcattgattctttatttccttattttttattttttttaccatttattgttaggtggtggattcgttcattcattttttttctattcttattttccttttactatctttctttattttttttaatttatttaactttatttcatattattttatta

SEQ ID NO: 43204 - DNA, 87 bp, Glycine max
  Clone ID: LIB3139-056-P1-N1-D9
ctctttttttattcagctcgagctgaactgcagaaagaagctttcaacttcagtggggcccacctcactctttattcggttctttaa

SEQ ID NO: 43205 - DNA, 192 bp, Glycine max
  Clone ID: LIB3139-056-P1-N1-E1
acatgttggtgctggaaagagggcctggggaaacaagggggttttcaaattgggccaaagacaattgagtgcccttggggggcattcacactgaaagaccacacccactttgatgaattccaaatctctgacttcttaaggccctttgggtggatagtgccagctttcaccatgcccccagatgctcaacat

SEQ ID NO: 43206 - DNA, 319 bp, Glycine max
  Clone ID: LIB3139-056-P1-N1-E11
caaagtgtttgatcgtggtctgtgatgacaaaaaggagaaatattcaactattctagcaacaacatcagttcttgattataagcctgctcccctggtgccaaacttctcatcaagagggccttcatcgctttcaagcaatattctcaagcctgatattgcagctccgggagttaacattctcgctgcatggattggaaatggcacagaagtggttcccaaaggaaaaaagccctcactatacaagattatctcagggacttccatggcttggccgcatgtttcaaggcttgcaagcagtgtcaaaacaccccaccccac

SEQ ID NO: 43207 - DNA, 381 bp, Glycine max
  Clone ID: LIB3139-056-P1-N1-E12
gacaaatctagtgcaactttgcaatttagaaagggagcagattgtgattttctcaagagaaactttaagcagatgtctaatgttttgtgggtggctcctgaagacaaggcgagtttatggtcacaacttcattatgtttcgtgtaataatctggaaatgcaagaagcttatcttgtcaatctcgtaaatctgttacgagaactgtatttgcacagtccagaggaagctcgccaattgagaaggaaagctctctctcgtattgaatggctgcaaaaagctgatgtgcctaccatagcacagattgaagagttccattcgttgcagaggatgatgaatgctcctgattcaaatgataatattgatctactgttgagcattgat

SEQ ID NO: 43208 - DNA, 211 bp, Glycine max
  Clone ID: LIB3139-056-P1-N1-E4
gaggtttatcttcgattcttggatctcagattaaagtgcgtaaagaagaggcttttctaaacaaaagaagaagcgtgcaatggtgggatgaagaagagagcgagagagggaacatggcgagagggaagtgggtttgtttctacaagaaaaccactctcttattttgctttttcaacattgtcgatgctctcttacgctcttttctttcttt

SEQ ID NO: 43209 - DNA, 384 bp, Glycine max
  Clone ID: LIB3139-056-P1-N1-E7
gacaactttctcactgagaaaacaatttttacttgcagagatttggacatcttggttgtctattatacaatagcaactcaatttagaaaatttctaccgcattacattaggtggcatctgtataccttgttgatctacattctcccatcttttctcactgctgaaattaaatataagcggaatttgagtaatattcatatttccggcttattttacgacggcagatacaaattctggactaaacacgagaaaaatcttgctttgacagaagaggaaaagatggaagtgattagaaatagaggcattcctgctgatgttcttgcaaagcgagctcatgaatttgaaaaacatgttgctcatgaaagcctcaaggatcaaattcct

SEQ ID NO: 43210 - DNA, 319 bp, Glycine max
  Clone ID: LIB3139-056-P1-N1-E8
gtcagagggcaattttagagcaagaggggatttgcagcgcactcatcgtattagaggaatgattaaaatggtggccacagttggtattcctgagaatacaggtatatcattggcctgtgctatgaatagttcttttagggggcgcgccagttctgatatttacaccatctgctctcaagactgtgaattgtggaatcctgcttgcacaaaagcaatgactatgtcatttaatccaaacctgtgttctgatgcatggagtttggaatttctgaagcgtactggatttcattgcgatttcatttgtgtcactggatggact

SEQ ID NO: 43211 - DNA, 117 bp, Glycine max
  unsure at all n locations
  Clone ID: LIB3139-056-P1-N1-E9
acttccctgtataaggaagancaagaaaaacccaaaagtatttttaccagattgagagcgtccaacccatccccaanacaattaggctcaggctcattattgatacatatctaattt

SEQ ID NO: 43212 - DNA, 285 bp, Glycine max
  Clone ID: LIB3139-056-P1-N1-F1
ctcgagccttatcggctcgagagaatgttctgacaaattgctggggaatggatttcacaacagacaagctgaggtcattggtacgaaaatggcaaactcttattgaagccccatgtggtgtgaagacacctggtaattacacattgaggatgtttgcattgattttaccaagagaagagctaaccaggtgtaagagaacctgttttgcacattcaagccagtttagacagaattcgtggaagatgagggagatcatgaccaaccaggcatcagcttgtgttttgt

SEQ ID NO: 43213 - DNA, 286 bp, Glycine max
  Clone ID: LIB3139-056-P1-N1-F11
cggctcgtggcaaaaagttgtcaaaggaaatcccaggccaaggagttactacaagtgcacgaatgcagggtgcacggtcaggaagcatgtggagagagcatcacatgaccttaaatctgtaatcacaacatacgagggaaaacataaccatgatgttcctgctgctcgtgccagcagtcacgtcaacgctaatgcttccaatgccgttcctggccaagcttttcttcagactcatgtttatagacccgaaccatctcaagttcacaatggcattggaaggcttgag

SEQ ID NO: 43214 - DNA, 80 bp, Glycine max
  unsure at all n locations
  Clone ID: LIB3139-056-P1-N1-F12
gactctcttgtatnggctgatgggtgcccataaaagagatgctttggagcatgatagggcatnntctacaattccaggtg

SEQ ID NO: 43215 - DNA, 156 bp, Glycine max
  Clone ID: LIB3139-056-P1-N1-F2
cgcgtcgaagctcgaattcgctcgagcagagctttactctcaggtctaggaaatgctaagagacggtagcagtagtaggtttctattctaatattcaaaaaccccagtgtcagtcactggaatgatgggttactcactcacagtctttgggagtta

SEQ ID NO: 43216 - DNA, 426 bp, Glycine max
  unsure at all n locations
  Clone ID: LIB3139-056-P1-N1-F4
tcggaatttcggcttcgatgcctagagtccagggttagttagggtctatgagaataagaaggtagcagtgttcactagatattgaggagttccattgacattntgaaaatgttagttcgagccacaggataatttcaatagctagcatactgcattgaggaatagggggatttaggagcaatcctacaagagcagagataagtaccaaggaaatcttggtgagcaataaaacgtctggcaagttggacgattccaaggtgttcaacaattccatgcagagattaagacccttggaaggcttcgtcatccaaatcttgtcactctgattggttatcatgccagcgagactgaaatgtttctcatatacaactatttgccaggtggcaatctggaaaagtttatccaagagagatccacaagggcagt

SEQ ID NO: 43217 - DNA, 106 bp, Glycine max
  Clone ID: LIB3139-056-P1-N1-F5
tggcctttttttttattcaaccctgtcagaaaaccgggaatttttgggtgggtcagaatttgatgggttccccacaagaaaaatcccccctccacaatttaaaggg

SEQ ID NO: 43218 - DNA, 221 bp, Glycine max
  unsure at all n locations
  Clone ID: LIB3139-056-P1-N1-F6
gcgtacntaagctttttattcttctctagcggtnctgtcaaaaagtcgncaaaggaaatcacagccctttttgttactacaagtgcaccaatccatggtgcacggtcaggaagcatgtggagagagcatcacatgacctttaatctgtaatcacaacatacgatggataacatatccatgatgttcctgctgcttgtgccagcattcacgttaactcttat

SEQ ID NO: 43219 - DNA, 254 bp, Glycine max
  unsure at all n locations
  Clone ID: LIB3139-056-P1-N1-F7
gttcantgacttgcccacagtgagaatgaagatgtggcgaacgacaatactgcaatgtggctgcgttgcaagttttgtttattctgttgggtgttggtgccgattacataccgccttcgagatttgatggcttcgtctacgggaaggggaacttgaatttgttggattcggttttgatagaagcgttttttgacccagtgtgcccagatagcatggattccaggccttcacttcaaacaagctttttattacta

SEQ ID NO: 43220 - DNA, 202 bp, Glycine max
  unsure at all n locations
  Clone ID: LIB3139-056-P1-N1-G1
gatgtggctgtcgaaggtttctgnatgagccgatgtgggacccactgctcttccgcttcttatttgaagaagaacagcaagagctacatgttcgcctacatctgggtgggaaactccgtaacccaatgcccggggcaatgcgcgtggccattccaccaacccatttatgggccccagtgcccacccttggttgctcccaaca

SEQ ID NO: 43221 - DNA, 313 bp, Glycine max
  unsure at all n locations
  Clone ID: LIB3139-056-P1-N1-G10
cccagatcnccacccaagagcaggagtttctcaaagaaagggtatgtcccatcagcagcacacataactttgggcttggacatgcccaagggcagcgcgttttgctagatgggtgaaggttggacatgtatcattactaaaactgaggggcctgatgcttgcttatgtttcgtttaatgtggagtaaattgctcatttacttttgtggtttttatctgtttcttttatattttatattttttaatttttcgtttttttttttcttttggcgtggggggtggtttctttttttcatttattttttttctttttt

SEQ ID NO: 43222 - DNA, 210 bp, Glycine max
  unsure at all n locations
  Clone ID: LIB3139-056-P1-N1-G12
gaatcnctcgatgaacataagcgctcgtgcataaagaaatgcctgtgttggtctttctccaaacacccccgaaattagttcacccaatttcagaatgatgtctctgcctaggcatggttccttgtttcatggaaatagattgtttttcggacctggatcatcttacattgagtgattagtcctaacttgtgacttttgattctttccctt

SEQ ID NO: 43223 - DNA, 384 bp, Glycine max
  Clone ID: LIB3139-056-P1-N1-G3
ctcaactattcgcaaaccaaaccaacacaaacaaaaggaggtctcagcaaatgaatattctcggacaatcactccaccaatcaaacaacggcagctactcttgttcgtcgccggagactgcaaactcctctaaccttccgaccactccgaaagccgttcactccgacgaggaagtgaacacattagcatcggctcatcctaagaaacgtgcggggcgtcgaatttttaaggagacaaggcatcccgtgtacagaggagtgcggcggaggaacaacaacaagtgggtctgcgaggttcgtgttcccaacgacaagtccacgaggatttggctcggaacgtatccaacgcctgagatggccgcacgtgcgcacgacgtcgccgcgc

SEQ ID NO: 43224 - DNA, 209 bp, Glycine max
  unsure at all n locations
  Clone ID: LIB3139-056-P1-N1-G4
gctctagcaacgcatctcnttcactgccccttcccaattccatagcaagtttttcaattggagcggcacgagcncaacaaccactggagcatacttctttcctgtgttgcgggaaacaagaacaacgacctcttctgctgggttttgctctacttgctgccaaaatttttatgaactccatttgcctacatcaactaatctcttgatta

SEQ ID NO: 43225 - DNA, 174 bp, Glycine max
  Clone ID: LIB3139-056-P1-N1-G5
agactccaacatgcgaaatcttcagcatggagatttattgcaactggagagaaagggatatttcaggtgtgatttacccttcattcgcccctcacaaccaatcgtgctatatgcaatccctgatggcaggcaacagacaagtttgaagaaatctttttggtcttgaaaccggtt

SEQ ID NO: 43226 - DNA, 289 bp, Glycine max
  Clone ID: LIB3139-056-P1-N1-G7
ctcgagctgtatcggctcgaggaaattaaatataagcggaatttgagtaatattcatatttccggcttattttacgacggcagatacaaattctggactaaacacgagaaaaatcttgctttgacagaagaggaaaagatggaagtgattagaaatagaggcattcctgctgatgttcttgcaaagcgagctcatgaatttgaaaaacatgttgctcatgaaagccttaaggatcaaatttctgctgttgacaagttgttttctacttaaggtaattagtttgcaaaaa

SEQ ID NO: 43227 - DNA, 355 bp, Glycine max
  Clone ID: LIB3139-056-P1-N1-G8
atcacatgttgccgcaccttaaaaccggaaacaaaagcaatcgttacttgatttcaagaatttctcaatttcttcctacttctttgagtacgatttcttaagggaaagaaaatcactctctgtgctggtcacagacttcgtgaatcattttcttttccactcctagtttatttgctgaacactctcctatttgatataggacttcgtgtcagatttaaactttttctgtttctttctcagttctctgtttaatttcaagttcaagctggtgaaattttggattagtgcttccactctcctatctggtataggacttcgtgggtagacttttcttacttctttctttctttcactc

SEQ ID NO: 43228 - DNA, 301 bp, Glycine max
  Clone ID: LIB3139-056-P1-N1-G9
caacattttgtgaatcggtggtaaggtaacaaaaaacaaaaggcgcggttgtgttgtgtgttcctttttaatttaacctcgaaaggatgaaacagctccacatgctaacgagtctgaatcaccggagggaggaagagatgctggtgtgcagcgagaccttaccatactcccccatatccatcatgcactccagatccctccccagatccatctactaccttctccgcgagcagtgccttttgttcattcttgtctgcatcctcatcggctccaccttgtttatcattcatcccactttttt

SEQ ID NO: 43229 - DNA, 293 bp, Glycine max
  Clone ID: LIB3139-056-P1-N1-H1
gaaaagagtatgagtatgggaggctcatggtcatggcagggcacatgtgccctcttgctactcttctccgccgtagtcaccgccactgaccacattgtgggtgcgaatcgtggctggaaccctggctttaactacactctttgggccaacaaccacactttctatgttggcgatcttatctcattcaggtaccaaaagaaccaattcaatgtgtttgaggtgaaccaaactgggtatgacaactgcactacagaaggggcagtggggaattggagcagtgggaaggttttcat

SEQ ID NO: 43230 - DNA, 326 bp, Glycine max
  Clone ID: LIB3139-056-P1-N1-H7
ttgaaaatctgcatgatgtagctgatgaaccaagcgggatggagccattttcatttgattttgagcaacaacaattggatgaagagcaaataaaagagatgatctacagggaagcattagcactcaatcctgagtatgcttaaagcagaaaaactcaaggacttgaagcaggcttagaaggaaaaataataattcgttttcaatttttttaatcactttaagttcagttcttacaatcacgaaaggatcaagttgaatgaaaattcaaccttgtagccgatcaaactccctaggttatttaatcaatctgtgagactaggtaggtg

SEQ ID NO: 43231 - DNA, 385 bp, Glycine max
  Clone ID: LIB3139-056-P1-N1-H8
tttgaattgaagaaatggggggccatatgagcaagaagacccctgaaacatcatctggtattaacatcaatgctgatatggcaactgaattgaggtcatatgaggctgcctgcaagcttgactctgatttgcagtcctttaataccaccattcaagctcgagcaaatcaagtcattaatactcttgctgttggagttgaggttcgatccctttcgtttagagtctctcaaacaaagtcacaaaatgccttctcgagatgaattatgaagttggcaaggtgatcttagactgtaagaaagatttttggaagtatcccagaactggttgagcttggtgaggaattctttgtttattgcctggagactttatatttttgttctgcttt

SEQ ID NO: 43232 - DNA, 116 bp, Glycine max
  unsure at all n locations
  Clone ID: LIB3139-056-P1-N1-H9
ctnctnatcatgcacacaaattaggtgtcactaaagaacctttgtaaacgcacttgacaagaccctgatgacaggaagcataacgaagacaaggttactgaaaaccctgtaccacc

SEQ ID NO: 43233 - DNA, 350 bp, Glycine max
  Clone ID: LIB3139-057-P1-N1-A1
ctcgagccgctcgagccgctcgagcggctcgagttgacttacagggtaaagacaattaccttcagaagctgtcgtcgtaaatgttacatgtggtagtggacgtggtggtttacccaccactgcttggattagttctgcagctaacaatcgttcctcagatatcaacaaaaagattcgcacagcacttgtgaaaggtaagaaaattgatatgcttactagagatgatccttttacagtagctctactggctgttctttttggcgttctgaatgaaattctgagttctaatgccactaacgctatgctgacgcgactatttgagaactgtaagagtctcaaatatctggttg

SEQ ID NO: 43234 - DNA, 374 bp, Glycine max
  Clone ID: LIB3139-057-P1-N1-A10
aagctattagtgatggaacagtcaatatggttgataaggtatatatggttatcttcatggatttgaggcttgatgttcaactttctatgtatttatgagactattgtgacagttttttgagatgcaacgccatgatgctctgaaagctcttgatatatacaggagggttgggcaccaggctgagagactgtcagagttttatgaaatatgccgtaatcttgacattggacggggagagaagtttattaaagttgagcaggttggttggatcttatatcatgcttgtttatgtcaaagacatttagcttgatttttcaatagttcttttgggaaacatatactaagtttattagttgatgatgtgaagccccctt

SEQ ID NO: 43235 - DNA, 369 bp, Glycine max
  Clone ID: LIB3139-057-P1-N1-A11
gtttgcaaaaattatgaaccttagacaaagtgttgttggtgatcttaaacttcttactgatgggaagttgtatgagggtaagcatattcctgtatctaatattagtgcacgggaaaatcatgtagttcaaatacccttaatggcacaggaggaaattctgtcttctagtgcaagcgatttcagaactgcaatggtgagtaaaaatagcaaacctcaagctactgcaatgcatgtgggagctatagaaattatcattgatagtttcgcaagtcctgattgcaacatagttggtgcaatgcttttggttgatacttatcataccaatcctgaaaatgcagttcgtagtatttttgttgcgcctttcagagg

SEQ ID NO: 43236 - DNA, 375 bp, Glycine max
  unsure at all n locations
  Clone ID: LIB3139-057-P1-N1-A12
attgagttcttgttcaagagagcttatgtcaaaacatgtatcagcaaaaacttgtgaggctgtgaaaccaaaagatggtgactgtaagctatttggcttctcacttatcagtggccctatcgnaccagagccttctttatcacaaagaaatgtgagtgagcctgctggtcagatgcatcttacagcacaccaacaaagaacatctgaaaatgatgagaagtcagatcactcaaagggatcaagacctgtagatgatctagttgttgatgaccatgacagaccattacagacttctcagtcgcatactaaagacgttcaagccaaacctctcagtggttctgctaggagttgcactaaagttcacaagaagggcat

SEQ ID NO: 43237 - DNA, 292 bp, Glycine max
  Clone ID: LIB3139-057-P1-N1-A8
ggagcaggtaaagcttttccaaacaagattgtttttgatgataagcttgtgttggctaacacacaagaattctttgatggaaattttccagtggattcttggttaccaatttttgtgaattgtctctatcctgtaagtcaattaccttcagaagctgtcgttgtaaatgttacatgtggtagtggacgtggtggtttacccaccactgcctggattagttttgcaactatcattgactcttgattcatgaaccaatagtttcttgcagcactttggaaagggtccgaaaatt

SEQ ID NO: 43238 - DNA, 375 bp, Glycine max
  Clone ID: LIB3139-057-P1-N1-A9
gtagagagtgaaagaggcagagagagggttctcttcttcttctcgtccttccttcttcgttgttgctcttgttctagagagagaaagagagagtgaatcttggagagataagcgcctgctccttcggcatttccgtcagacaaagttaacacttccaagaccgacgtagctgctactgctattattaatcaattcaattcaattcaattcgcctcttcaccattccctattgtagtagatgaactctcccaagattttgattagtagcggaatttgaaggtgagagagaatgggagaaaatgaagaagctacgacgactgacatgttgcagaggcttcactttctgaagcagccgttaaacatggagcaacttag

SEQ ID NO: 43239 - DNA, 259 bp, Glycine max
  Clone ID: LIB3139-057-P1-N1-B1
ttctttccaacttttggcccttcaaggattgggcaaactagggccctggtgctctttacaatgcttcttttttggaccctttcattttttcccgccgagggatccaaaggggtttttgaaggattgaacctccacggtttctttttttttttgaattattggaaagaaacaaggcctgttttgcaagggcttttttgaaaaggttgttcaaaaacctggggtaaacttttaggctttttgactttgggaaaagggacct

SEQ ID NO: 43240 - DNA, 374 bp, Glycine max
  Clone ID: LIB3139-057-P1-N1-B10
gaaagatttgttagagggaaatttgtccttgggtgtgaaatctcgctctagatgggaaaaagtttcctctacaaaagcacaatttgtcaggggaaaaacccgcaaatacgatataattggtgctggttcacattcttcaggagattttcctgcaaaggaagatcaagaaaaacccaaaaagattgataccggattgagacatagaatagatcctcaatacaatgaggttctcgctgcagatggtaacaaattattttaaatggactgctgatgatggtgaaactactaaaggttctatgctggatcttaaaatttcttaatctaagattgcactaaccaaggacacagtcggcggaaccattctgcgtaatgtt

SEQ ID NO: 43241 - DNA, 373 bp, Glycine max
  Clone ID: LIB3139-057-P1-N1-B11
cttgctttcaagatggttctgctagagaagctctgggatgacgttgttgctggccctcaacctgagcgtggccttggcaagctcagaaaactcaccaccctcaaaactattgatgaaggagacagtagcaagctgcagaagacgttgtcgatgccgtcgacaccgacaaccccgatgactcccacgactccaacgacaccgggatccgcgcgtaaagctgacaacgtttggaggagcgtcttccatcctgggagcaactccgccacaaagaccatcggtgctcagatgtttgacaaaccacttcccaacactcccactgtctacgactggctgtacagtggggagaccagaagcaggcaccgctgaaaggata

SEQ ID NO: 43242 - DNA, 376 bp, Glycine max
  Clone ID: LIB3139-057-P1-N1-B12
aagatgttagaaagatagaagaaagagagagagagcgtagggtagcagagaaagagaaaatgaagaagtcttcgggaagcgcagctgacaagaagagggtgcgacggtcctccgccctagatcccacctccgacgcccctccaaggaaacaagctgtcaagaaagatgtgttccgggtgtttgctgagaaggttagagaccataaagaattggtttcaagatgggctgttctacaggagacgcgtgttgagtattttagagggaaggatttcgtgagcttcttaaaaagccatccggagctcaaagatgttctagaattagataggattttggaaacagaagagattgccaacattctacttgcaaaaaatctttt

SEQ ID NO: 43243 - DNA, 93 bp, Glycine max
  Clone ID: LIB3139-057-P1-N1-B2
tatggctcgtcactccttgctcttagccctgctactatgcgccgacgtggccaccggctggattgcagacgcctcgtccgacgcaccactaca

SEQ ID NO: 43244 - DNA, 340 bp, Glycine max
  Clone ID: LIB3139-057-P1-N1-B3
tacagctcttctataccaagctcagagccctcctacgggggggcgacttggccacctgcgggactgcacactcctgatccaacgcaccacacatctcatccacgccaggtaaagccaaagagtgatctgaacgaagtagcccaaaaagcctactgtacaccgagcgaccaatggaagagcaagcaggtcgagttgggaaggacctactcgaccagggtggtgcacaaactgcggtaaagtttctagcagttcaacctggggaaaatcagactggtcaccaaggtaaccctctccactacacaggtaggtaccaaacattcaattctaactagcttcatgc

SEQ ID NO: 43245 - DNA, 356 bp, Glycine max
  Clone ID: LIB3139-057-P1-N1-B4
cacaggtcttgcctccaagctgagatccctgcaagtatggggcaacctaggtacctgctgctctgtacactgctcctctcgagaaccttagctctcatacacgcgaagaaatccaaagaggatctgaaggaagtgacccacaaggcctactttgatgttgacaccaatggaaaggaagcaggtcgtattgtgatggatctatttggacaggctggtgcaaaaacatcagtaaactgtctagctcttcgcactgcggaaaagggaactggtcaaagtggcaagcctctccattacacacgtagctcattacatataattataactagctttatgctccaaggaggtgatcttacaca

SEQ ID NO: 43246 - DNA, 206 bp, Glycine max
  Clone ID: LIB3139-057-P1-N1-B5
gaatatttttggtggtgctcagagagtgcagtgcgctgagcagtaatcagagcctgtgatgtcatttgatgatctcgattatgctattttttagccgcttgtgcgggactaaacataattagtgtttgatcaaaatgattttgacaagcaaacactgtagaatttattggccaagaaattatttcgcaaaagacatcttaagtacc

SEQ ID NO: 43247 - DNA, 341 bp, Glycine max
  Clone ID: LIB3139-057-P1-N1-B6
aatgcaggatgttcaggttccaattgattggtttatttcctctcaggaatgtgttcccaggacctattgtgttttaaatccacaaaatccttttgtgttaaataggtggatgggaaaactgactttccctcagggcacttcccgaagtgttaagagaatgcctctttctatagggggaggagctggtgcaaagaatgctattctcatgaatatgccaaatgctgttctttcaatgtggagatattttgttggagatctcgtctttgaagtttctaagatgacttctccctacattaaatgtacagtctttttcttcatagcatttggaaatttggctgatg

SEQ ID NO: 43248 - DNA, 347 bp, Glycine max
  Clone ID: LIB3139-057-P1-N1-B7
aattttggtttttcaggttacaattgattggtgtgtgggctcttaggaatgtgttcccagcacctattgtgttttaaatccacaaaattcttttgtgttaaataggtggatgggaaaactgactttccctcagggcacttcccgaagtgttaagagaatgcctctttctatagggggaggagctggttcaaagaatgctattctcatgaatatgccaaatgctgttctttcaatgtggagatattttgttggagatctagcctttgaaggttgtaagatgacttctccctacattaaatgtacagtcttttttttcatagcctttggaaatttggctgatgacaccc

SEQ ID NO: 43249 - DNA, 366 bp, Glycine max
  Clone ID: LIB3139-057-P1-N1-B8
cgccaacgttggagtttccggggctgattaaggttggtgtgcacgggggggagccgtgcgacccggataagaggccgtggggagcagcggtgatgatggaaaaactcaaagaatgggtggagtttacgttcaaggggatggttgaatccactgagcccgtcatcaaacagtcttgcatctactccatgacgccagatgaggatttcctcattgatttcttgggtggggactttgggaaggatgtggttcttggagccggcttttttggtcacggctttaagattgctcctgttattggcaggatatagactgatactttttgttatggataaacttaatcccattatatcagttactttaggattg

SEQ ID NO: 43250 - DNA, 374 bp, Glycine max
  Clone ID: LIB3139-057-P1-N1-B9
cgggtggttacatttccgaataccattgtgcagattgaaccagacatgaattcaaggtttcagcttttgagtaccactaccaatggtgattttgttcaagggaaagatcttgcaatggttaaagttaatgtagcatgtgctgctgttggcttgacatcaagttacactccaactccattgttggaatctggtttgcaaaaagacagagggttaattgtggagtattttggaaggatgtcttacgttgctcataacgttaatcagccccaagagaaagatttgttggagggaaatttttcctttgatattaaatctcgctctagattgcaaaaagtttcctctacaaaagcacaatttgttagtggaaaaacctt

SEQ ID NO: 43251 - DNA, 374 bp, Glycine max
  Clone ID: LIB3139-057-P1-N1-C10
cttccttttcctctcttcactatcactctctctctgggcatctctctcatccatcatgggagcagtgattctcccagatctcggcaccgagattttgattcccgtctgcgccatcattggaatagcgttcgccctcttccagtgggtcctcgtctctaaggtcaagctctccgctgccagagacgcttcctccaacgccggcggcggcaaaaatggctacaacgattacctcatcgaagaagaggaaggcctcaacgaccacaacgtcgtcctcaaatgcgccgaaatccaaaacgccatttccgaaggagcaacctctttccttttcactgagtataagtacgtgggaatcttcatggtggcttttgccattt

SEQ ID NO: 43252 - DNA, 371 bp, Glycine max
  Clone ID: LIB3139-057-P1-N1-C11
accaacatgggttccaatcccttgtctgcattgactggaacaaagcccacaccaatcccaacccaagaccacgacgaccaagactctccttcatcaaaatgtcttctttccttcagcaccgactcttgttcttcaaccccatcttcctcttcccacaaagccctcttcatcactctcatcctcatcacctctattgccttatcaacatccttcgccttcgcctttctctacttctcttcaaaaccatcaccttctactctcctcgtggctcgtcctctggccaaactcaaacgccccgtcgtcctcttagtctcctccgacggctttcgattcggttaccaattcaaaaccccaacaccccacatttgccg

SEQ ID NO: 43253 - DNA, 367 bp, Glycine max
  Clone ID: LIB3139-057-P1-N1-C12
ggcactttctagttttgaatatgttgaacctagtgggaaggatgtgggactcaatgtaaggaagaaggctgaaaacattgtgtcacttttgaatgataaagataagatacatgaagtcagaaataaagctgctgcaaaccgtgacaagtacattggagtttcttctagtggaatcacatacaagtctgggtcagcctcctcttatggtagtggcagcagctttcaaagcagtggtaaatatggaggctttggatctagagatggtgacaggtttaatgatagctatagagacaaaggatcctatgaagaagaaaaagattaccaaggaaaatcacaccatgccaccgctagtgacaatcaagagaac

SEQ ID NO: 43254 - DNA, 257 bp, Glycine max
  Clone ID: LIB3139-057-P1-N1-C2
aacacaactccatcatgttcaaaacctaactgatagagtgcatggaaccaaacctgcatcaaggtgaagactggcatcacaacgagacagtcaagcactggacttataccatagatggtaaggttacaacatgtctggagagtattgaatccattgatgaacagagcaaaacaatcacctacaagctcttcagtggtgacattgatcataattataagaactttaagttcatctttcaagccattgatgataatgat

SEQ ID NO: 43255 - DNA, 131 bp, Glycine max
  Clone ID: LIB3139-057-P1-N1-C5
aaaaaaaaataaaaaaaaaaaaaaaaaaaaaaaaaagggggaaaaaaaaaaaaaaaaacaagaacaaccaccaaaaacaaagaaaactttaaccaacaaaaaaaaaaatttttctgccctctttaaacaaa

SEQ ID NO: 43256 - DNA, 366 bp, Glycine max
  Clone ID: LIB3139-057-P1-N1-C7
caccttatttccattggccatcgaattaagtttgccacatcctaggggagatgagtttggtgccgttagtagagtcgtcttgcccgcagaccaaggtgctgaaagtacaatttggctaattgccaaggcatatgttgttgtcaatgactcctgctatcatcaactcatgagccactggttaaatactcatgctgtgattgaaccatttgtcatagcaacaaacaggcatcttagtgtgctccaccctatttataaacttttgttgcctcactatcgtgacaccatgaacatcaatggactcgcaagacaatcactcatcaatgcaggtggcattattgagcaatcatttctgcctgggccatttgc

SEQ ID NO: 43257 - DNA, 371 bp, Glycine max
  Clone ID: LIB3139-057-P1-N1-C8
tgagtgctctgcaaatcaacacttgctctaaaatggtggccacagttggtattcctgagaatacaggtatagcattggcctgtgctatgaatagttcttttagggggcgcgccagttctgatatttacaccatctgctctcaagactgtgaattatggaatcctgcttgcacaaaagcaatgactatgtcatttaatccaaacccgtgttctgatgcatggagtttggaatttctgaagcgtaccggatttcattgtgatatcatttgtgtcactggatggactgccaccccaatgcaggatgttcaggttacaattgattggtttatttcctctcaggaatgtgttcccaggacctattgtgttttaaat

SEQ ID NO: 43258 - DNA, 374 bp, Glycine max
  Clone ID: LIB3139-057-P1-N1-C9
gcctccgtcccgtcctggtccacggcggcggccccgagatcaactcctggctcggccgcctcaacatccccgccgtcttccgcgacggcctccgcgtcaccgacgccgacaccatggagatcgtctccatggtcctcgtcggaaaagtcaacaaaaccctagtttctctaattaacaaggccggcgccaccgccgtcggcctctctggcatggacggccgcctcctcaccgcccgccccgctcccaaggccgccgacctcggctacgtcggcgaggtcgcacgcgtcgatcccgccgtcctccgctccctaatcgacaccagccacatccccgtcgtcaccttcgtcgccgccgatgaatccggacagccctac

SEQ ID NO: 43259 - DNA, 374 bp, Glycine max
  Clone ID: LIB3139-057-P1-N1-D1
gaaggtttcttcttcgcgccttatcacgccgtccgaaagcgtcgttgctgcgaaaccctagacagaagcgacgccgtagatggaggtggagcccgtggagccacagtcgctaaagaagctaagcttcaagtctctgaagcgcgctctcgatctcttctctcccattcacggacacctcgctcctcccgatgccgaaagcaagaaaatccgcactagccacaaggtgagcgtggagtatggcggaatcaaaagcactgctaatcaaccttctcatcaagttagttctgccacacaggatccagggccctctaacactcttgctcttccaggtccaggagattccaaggattttcaaaaaggaggaccccaaaatg

SEQ ID NO: 43260 - DNA, 370 bp, Glycine max
  Clone ID: LIB3139-057-P1-N1-D11
gcaacagttagaacaccattgaattttgattctagcgagcagagcttttgtcaattttctattgaccttctcggtggaggaattttagtggacaaaactggagattggatcacacttatacaaaattctccaattagtaacttgttgagagttgctgcttggaagaaaggctgtttaatggtcaagattgtgatgtctgggaatgcagcagtcaaaaggagtgattgggcctcattggtacaagtgtttttaacaaacagcaacagtacagagcattttgatgcatgtaagtggacaaaatcagaaccacattcctgggaattgatcttcccaatagaaggttgtggttctaataatggttttgaaatgt

SEQ ID NO: 43261 - DNA, 372 bp, Glycine max
  Clone ID: LIB3139-057-P1-N1-D12
cctttcttcaacgccacttccatttatcgccaggtataaacatacatttctttttattcattctcttcataacactctgtgcttgcttcgttgttgcagtcctcttcgctctccgctcacgaaaaacacaaatctcgcgccgattggataaagcagctcaacgatcctctcgaggccatcgatcccgagatcgccgacataatcgaactcgaaaaggcgcgtcaatggaaggggttcgaacttataccttcggaaaatttcacgtcgctgtcggtgatgcaagcagttggatcggtgatgacgaataaatacagtgaaggatatcctggtgctagatactatggaggaaacgaatacattgacatggctgag

SEQ ID NO: 43262 - DNA, 365 bp, Glycine max
  Clone ID: LIB3139-057-P1-N1-D4
cgagcgagtagtttcaaagagaggatttgggattgggaaggcgagggattgcgctgcgtctcttcctcttctctttcgattcatccctcattcataatcttccaatccaacaacctcagcctcacactcacacatacacacatctgaacgcgtattcgtccctcccatggcttcaaagcgcatcctcaaggagctcaaggacttgcagaaagacccaccaacttcttgcagcgctggtccagtagctgaggacatgttccattggcaagcaacgattatgggtcctgctgatagtccttatgctggaggtgtattcctagtcactattcactttcctccggattatcctttcaaacctcccaagg

SEQ ID NO: 43263 - DNA, 360 bp, Glycine max
  Clone ID: LIB3139-057-P1-N1-D5
aaccaacatatccaatatatttgacacaggccctttatccattgcaggagccagtaactcatagcctatggatgacaagctagtcaaagaccaagtcttactcgtaccagtaacctgtggttgcactggaaaccgctcttttgccaatatctcctatgagatcaaccaaggtgatagcttctactttgttgcaaccacttcatacgagaatctcacgaattggcgtgcagtgatggatttaaaccccgttctaagtccaaataagttgccaataggaatccaagtagtatttcctttattctgcaagtgcccttcaaagaaccagttggacaaagagataaagtacctgattacatacgt

SEQ ID NO: 43264 - DNA, 203 bp, Glycine max
  unsure at all n locations
  Clone ID: LIB3139-057-P1-N1-D7
gngattcctattttccccagngncccatgcggttaggtaagggtatcaatctggatcacccatcctctagtctaggacttagtgtcttctcaggtggctgctactgcaatggagtttttggcaaatgcagagccagacctatgtaattactagtattcagtgtataacttttctcacctagtgaatatccgtttttttcttgc

SEQ ID NO: 43265 - DNA, 371 bp, Glycine max
  Clone ID: LIB3139-057-P1-N1-D8
cacggatctgcacggggttcagttcttcgtgaagtcggcggcgtttgatgtgaattatccgcccgggagtgatgctcgtgaggcagttgaggagagtgtgatgaaggattataggagtatgctgagaagatactgtcaggtggagatgcagagacggagctggaataggaatctgccagctcctcactgtgataagctgcataactttgcagtgatggcatgaaggtttgtgaattttcctttcctgtctggtaagagtactacttggattggtgattaaatgttggactccggtgacaccattttacggtaaaaaaaatggcaaaacaataatctaatgcatcttgcttactcatacagtttcaattacg

SEQ ID NO: 43266 - DNA, 371 bp, Glycine max
  Clone ID: LIB3139-057-P1-N1-D9
gaaaagttttgttctggcaactggttggagaaaaaatatggtagaaagtgaaaatctgggtgctatgcgcgttgattgttgttgaattcctttttgttaccacctcacttgttataaacaccaaccaatttctctccttctcatctacttttctcactgcttccgtgtttttttctctctcttcattacacaacaacaaagtagttgttaatagcctctgttttcttcttgccaccaaaatctcacaccttccattgcatcatcattcataaatggctcatcccacctcatcaggtcaatcccatgatctcaaaaaagaagattgcaaggaaacaagatcactggttgtttgctttggggaaatgttaata

SEQ ID NO: 43267 - DNA, 375 bp, Glycine max
  Clone ID: LIB3139-057-P1-N1-E1
aacctcattatttttcgggccataatcttgaaaatccaggagcttatcttgtcaatctcggtaatgtggtacgagaattgtatttgcacagtccagaagaagctcgccaattgagaaagaaagctctctctcgtattgaatggctgcaaaaagctgatgtgcctaccatagcacagattgaagagttccattcgatgcagaagatgatgaatgctcctgattcaaatgataatattgatctactgttgagcattgatttgttgggtttacaaggagcaggtaaagcttttccaaacaagattgtttttgatgataagcttgtgttggctaacacacaagaattctttgatggaaattttccagtggattcttggt

SEQ ID NO: 43268 - DNA, 425 bp, Glycine max
  Clone ID: LIB3139-057-P1-N1-E10
cgaggacggaccatgcacgcacgcgtacgctagctattaatttcgatcgagatcatttttacgaacttcgaaactgttgcttttggggaaactcaaaaacaggtttttctttcatagtatcacagaagagaaagtgattctagagtgttgttgcaatggctgaggagaaagacgctttctacgttgtaaggaaaggggatgttgttggcatctacaagtccttcagtgacatccaacctttacttgcatcttctgtgtctagtgaccctgtaagtatttacaaagggtactcgttacctcagaagactgaggagtaccttgtctcacatgggctcaagggagccccttattctattagtgcagctgatgtgaacgaggggctatttggaagacttgttgcttgtccttatcaggatccatattca

SEQ ID NO: 43269 - DNA, 182 bp, Glycine max
  Clone ID: LIB3139-057-P1-N1-E11
ttcagtcgtagtgttttttgttttccctagataagcagaccgtggaaaactgctagtaaaagctggagcttttgcttcgatcacatttgactatttcactgattagaacaggcaaagatgtctctcttgggttgatctttttatgtttcgatcaattgagtttcccattatgacgcttcctg

SEQ ID NO: 43270 - DNA, 374 bp, Glycine max
  Clone ID: LIB3139-057-P1-N1-E12
atagaggttcatctgtaccgaagaacaagatcaagtgtagctgtaaaggtggatggaaatggagggacacttctaagccaaacccaaatacaattgttggtgccatggttgccggtcctgacaagcatgatggcttccatgatgttcgtacaaactacaattacacagagccaacacttgctggaaatgccggtttagttgctgcactagtggcattgtcaggcgacaaaggcacatctattgacaaaaataccattttctctgctgttcccccaatgtttcctacaccgccaccacctccagcgccatggaaaccataagctcatcgtgccattggttatttctttctagcaagtaccccagatgatatgagt

SEQ ID NO: 43271 - DNA, 370 bp, Glycine max
  Clone ID: LIB3139-057-P1-N1-E2
ctcgagccgtttcatacacttttctttcgtagctagctactccttaattactaattagtttcattctttggtgcaagctagcttcattagttgattcataaaattataacaatggtgagtgttgaagcaatccgtaaggcacaacgtgcagaaggccctgccaccgtcatggccatcggcactgccactcctccaaactgcgtcgatcagagtacttatcctgactattatttccgcatcaccaacagtgagcacatgactgagctcaaagaaaagttcaagcgcatgtgtgataagtcgatgattaagaagctatacatgtacttaaacgaagagatcctgaaggagaatcccagtgtttgtgcatata

SEQ ID NO: 43272 - DNA, 321 bp, Glycine max
  Clone ID: LIB3139-057-P1-N1-E3
actaattagttgcattctttggtgcaagctagcttcattagttgattcataaaattataacaatggtgagtgttgaagcaatccgtaaggcacaacgtgcagaaggccctgccaccgtcatggccatcggcactgccactcctccaaactgcgtcgatcagagtacttatcctgactattatttccgcatcaccaacagtgagcacatgactgagctcaaagaaaagttcatgcgcattgttgataagtcgatgattaagaagctatacatgtacttaaacgaagagatcctgaaggagaatcccagtgtttgtgcatata

SEQ ID NO: 43273 - DNA, 376 bp, Glycine max
  Clone ID: LIB3139-057-P1-N1-E5
ctcgagcctttgagacaaagaatagatcctcaatacaatgaggttcaggctcagatggaaacaaatttgtttaaattgtctcttgatgatgttgaaactcctaaaggttccatgttggatcttaaaatttctcaatctaaaattgcacttcccaagaacacagttggaggaaccattctgcgtagtgatctattggcaaattttttgacagagggcaattttagagcaagtgttgatttgcagcgcactcatcgtattaaaggaatgattaaaatggtggccacagttggtattcctgagaatacaggtatagcattggcctgtgctatgaatagttcttttagggggcgcgccagttctgatatttacaccatct

SEQ ID NO: 43274 - DNA, 369 bp, Glycine max
  Clone ID: LIB3139-057-P1-N1-E6
cttgtctctgtttctccctttctctctgtctctctcgcgggtgttcttctcatccagcaccgagtcacagactcaccgatcttccgattccctttcgtcttggtttatgagctcgaaggagagacccactcttggtggcacgcggattaagacccgcaaacggaatattgctgcgccgctggaccctgcagcattctcggatgcagtggtccagatttatttggataatgctggtgatctggaacttattgctaagagcattgaatcttcagaccttaacttttcaagatacggcgataccttttttgaggttgttttcactgggggtcgtacacaacctggaactaccaagcctgatgagggggaccg

SEQ ID NO: 43275 - DNA, 371 bp, Glycine max
  Clone ID: LIB3139-057-P1-N1-E7
tcaaaaatggcttgatgctggtcacaaaacctgcccggaagacacagcagacacttgtgcatacagcccttacccctaactatgttttgaagagtttgattgctttgtggtgtgaaagcaatggcattgagctaccaaagaagcaagggagctgtagaacaaagaaatgtggtggcagcagtctttcagattgtgatcgaactgctattagtgctttattggataaactaatgagtaacgatatagaacagcaaagggcagctgctggtgagctcaggctgttggctaagaggaatgcagacaaccgagtatgcattgctgaggcaggagcaataccacctcttgtagatttgttgtcttcttcagaccct

SEQ ID NO: 43276 - DNA, 372 bp, Glycine max
  Clone ID: LIB3139-057-P1-N1-E8
ttttctctttaccctccaacgtgctctcttccctcctccacttcatccaaatctttctcattttctctcccaaatcacactctcaattacaataacacacactcaacttgagaattttccccaaaaatcccaagagctcgcgccatggtttccccggaaaacagcaattggctgttcgattacccgttgatcgacgacgacgttattcccgtcggcgactcctccttcgccgtctccgcttccaccttctcctggcccccacctcccgccaatgtcagtgtcgaaattgatgcttcgcttggggattctgatggcctaaaaaatcctgctttgaagaaaaggactaaatctgattcaagtactgcttctagc

SEQ ID NO: 43277 - DNA, 350 bp, Glycine max
  Clone ID: LIB3139-057-P1-N1-E9
tgattttttaggtcggactgtgtacgcccatttgcaccagagttggagcacatttgtgggaggccattaggactaagatttgataagaaaagtggagatctgtacattgctgatgcctacctaggcctaaaagtagtggggtctacagggggtttggccaccgaagtggtaacagaagttgaaggtcagcccttgcaattcaccaatgacatggacatcagtgaagatgcagacgtgatatacttcactgattcaaccacaatcttccagagaaggcaatttatgcttgtactccttggtggagacaagaccggccggtttatgaaataccacatgtcaacaaatgaagt

SEQ ID NO: 43278 - DNA, 339 bp, Glycine max
  Clone ID: LIB3139-057-P1-N1-F10
gggtattttcatttccctccataacccttgtaggggtggagaacgagacattccctcccaccgtgaagcctccctgccaccccaacaccttcttactaatctgccccatcctcaggggccaacaaatacatcacgctttcgataaattcactgccatctgcatttacctactataccacacccttaacttcctctccgttaagtggaaaaccaagtctgctcaccatttaacagaatccgaccaattcgtttcagatatcattacaggtccattcgagaaatttatgcaagtgacaatgatcaaacccttgacagagcagcaatactcagagaaagcgg

SEQ ID NO: 43279 - DNA, 374 bp, Glycine max
  Clone ID: LIB3139-057-P1-N1-F11
cggtcacctcacaaagaggcctgaggagatcggtgctggtgaccaaggtcatatgttcggctatgccactgaccagactcccgagctcatgcccttgagccatgtccttgccacgaagctcggtgccaagctcaccgaggttcggaagaacgggacatgcccttggctgagacctgatggcaagacccaagtcactgttgatgtactacaatgacaagggtgccatggttccaatacgcgtacacactgtgctcatctccacacagcatgatgagactgtcacaaatgatgagattgcagctgatcttaaagaacacgtgattaagcctgtgatacctgagaagtaccttgatgagaagaccattttccatttg

SEQ ID NO: 43280 - DNA, 369 bp, Glycine max
  Clone ID: LIB3139-057-P1-N1-F12
gggaaaactgactttcccccagggcacttcccgaagtgttaagagaatgcctctttctatagggggaggagctggtgcaaagaatgctattctcatgaatatgccaaatgctgttctttcaatgtggagatattttgttggagatctcgtctttgaagtttctaagatgacttctccctacattaaatgtacagtctctttcttcatagcatttggaaatttggctgatgacaccatcaattttgaggcttttccccacaagctggtgcagtttggagagattcaggaaaaagttgtattgaaattttcacaagaggaatttcttacagcttggtcaactcaagtgcgtcctgcaacaactctgttagc

SEQ ID NO: 43281 - DNA, 374 bp, Glycine max
  Clone ID: LIB3139-057-P1-N1-F2
ttgttaagggcttcactataccagaatgtctcagggaagaggcagtgcatctttgcctattgtggtcactgtggtttcactactgtgccttttggaacgtgctaacgcagcaacttactccgttggaggacctgggggatggaccttcaacactaatgcttggcccaatggaaaaagattcagagctggtgatatcctaatcttcaactatgactcaacgacccacaatgtggttgctgtggacagaagtggatacaacagctgcaagacaccagggggtgctaaagtgttcagttcagggaaggaccaaatcaaactagcaagagggcagaactacttcatatgtaactaccctggtcactgcgaatctggga

SEQ ID NO: 43282 - DNA, 355 bp, Glycine max
  unsure at all n locations
  Clone ID: LIB3139-057-P1-N1-F3
tcactattttctttacggagccaaatcgtgtgacgcgagaggcgtttcaaatttgcgtatggtggacactgaggaaacactactgggccatttggaacgtgctaacgcagcaacttactacgttggaggacctgggggatggaccttcaacactaatgcttggcccaatggaaaaagatncagagctggtgatatcctaatcttcaactatgactcaacgacccacaatgtggttgctgtggacagaagtggatacaacagcttcaagacaccagggggtgctaaagtgttcagttcagggaaggaccaaatcaaactagcaagagggcagaactactttatatgtaactaccct

SEQ ID NO: 43283 - DNA, 320 bp, Glycine max
  Clone ID: LIB3139-057-P1-N1-F4
cttgtgtacaactgtaactgcattatcaatagactgagtgaatgtattattatcccacagatgactctgtggtcgatggcaaagtctccccttatgtatggaggggatgttcggaagattgatcctagcacatatgatgttatcacaaatcctacccttttggagattaattctttcagctcaaataacatggaggcatgtgaaccatctatcttttttgggatggagggaataatgtttctcaaattaatgtcatatttcttttgctgcattggcagtttccttatatcacaagtgtgaatagtgaagatcgggatctt

SEQ ID NO: 43284 - DNA, 378 bp, Glycine max
  Clone ID: LIB3139-057-P1-N1-F5
ctcgagcttttctagccgcgctcttctggccgattgtgcagtctccgtcatcatggcatctccacagcagctccgcaccaccaccaccgatctgctcaagatcaaccaccccgtcctcctggccggcatgaacgtcgctgccggccccaagctggctgctgctgtcaccaacgccggcggtctcggtgtcattggcggcgtcggatacacgcccgacatgctgcgggagcagatcgccgagctcaagggctacctgaaggacaagaacgctcccttcggcgtcgatctgctgctgccgcaggtcggcggaagcgcccgcaagaccaactacgactacaccaagggcaagcttgacgagctcattaccatcatcatcgg

SEQ ID NO: 43285 - DNA, 364 bp, Glycine max
  Clone ID: LIB3139-057-P1-N1-F7
aggatgggtcattaggaccgattgagaacagaatgcagaaaataaattggacttaaatacgaaattgatcatatagacttggtgaaactgctctgttatatgggcaaaggaaatgaacgcctttatattacagggtgcgtgccaaatggatcctttagagaacattaggatggtatgcgtggtaaaaatgtagacttaaatcaacgcctagaaattgcaatagatgttgctgatggcttgacctatcttcatatgtatgcagaaaagcaaattatccatcgagatgtgaaatgatgcaacattctactgacagaaagcatgcgagctaaagttgctgatttgggatgttgcaggctaggaccag

SEQ ID NO: 43286 - DNA, 366 bp, Glycine max
  Clone ID: LIB3139-057-P1-N1-F8
caagaatggcacttcgttgcttggtgatgtcccggtctgttctcttcactcttggtcttgcgagagaaagccatgccagagacgaagatttttggcatgctgtttggccaaacactcccattccaagttcattgcgagatcttctaaagcctggccctgcaagtgttgaaatcgatgatcaccctatgcaaattgaagaaacacagtacccgaaaaccttcttctataaagaagaccttcatccaggcaaaacaatgaaagtacaattcagcaagccttcctttcaacaaccatggggtgttggtacatggttaaaggaaattaaagacactactaaagaaggatatagttttgaagagctatgca

SEQ ID NO: 43287 - DNA, 374 bp, Glycine max
  Clone ID: LIB3139-057-P1-N1-F9
ggcaaatttctgaatgcttagactcttctaattgcagtttggatggtaatactgaagcaatcaaacaacctagtccaagcttaagtctaccatttggtaattggtttcatcacctatggccgaaacagtgtcgtgaaaaagcaagctcatctagaaaaggtgtaaataaggaagaaatgaaaccaagacccattcttccaaaagttacaatggttggtctctctacagaagaagcaggccaaacgagcaaagctaatttaaagaagacaatggacgatttgacaagagagttggagaagacagaactagatattatgacagatggtggcagtaaagagtgcaaagtagaagatagggatccactatttgtggca

SEQ ID NO: 43288 - DNA, 375 bp, Glycine max
  Clone ID: LIB3139-057-P1-N1-G1
agaggtggttgtggaacagaaagaaaccccccatttgccctttgcttgcgctaatataattgattttatagccttctaaaccctccacagtgaacacaccatacaacgaatccatgaaaatccagatcatgttcacaaccaccgagaagtttcttcagccacctgtgtcaaaccaaacctctctggtcacctaaagcaagcaccatatgttatggatagattcagtagatgcaactccactgcggagtatagtggccggaaaattgcttggctcggcgaatgtcggcattccggtcactggagtgcgaggccggagagttgtgatgttttttcaggcaaatgggtgttggataatgtatcacattcactttacaa

SEQ ID NO: 43289 - DNA, 376 bp, Glycine max
  Clone ID: LIB3139-057-P1-N1-G10
gaattttattggacaaaactggagattggatcacacttatacaaaattctccaattagtaacttattgagagttgctgcttggaagaaaggctgtttaatggtcaagattgtgatgtctgggaatgcatcagtcaaaaggagtgattgggcctcattggtacaagtgtttttaacaaacagcaacagtacagagcattttgatgcatgtcagtggacaaaatcagaaccacatttctgggaattgatcttcccaatagaggtatgtgggcctaataatggttttgaaatgtggagttctgagtgggcaaatcaaacttcatggcatttgagtttgcttattgacaatcccaaacagtctacagattttgatattct

SEQ ID NO: 43290 - DNA, 373 bp, Glycine max
  Clone ID: LIB3139-057-P1-N1-G11
cggctcgagctcttcctcccttggagaaaaagaagagccaccgctgcgacgccgttcgtgcatttttgaggtgccgctgtcatgtttgggcgtggtggaccaaggaggagtgataactccaaatattatgatattctcgggatttccaaaaatgccagtgaagatgaaatcaagaaggcctatagaaaggcggctatgaagaaccatccagataagggaggagatcctgaaaagtttaaggagttaggtcaagcatatgaagttttaagtgatcctgagaagaaagaactgtatgaccagtatggtgaagatgcccttaaagaagggatggggggaggagggctcgttcataatccatttgatatatttgaat

SEQ ID NO: 43291 - DNA, 374 bp, Glycine max
  Clone ID: LIB3139-057-P1-N1-G12
attaattgcaagaatggcacttcgttgcttggtgatgtccctttctgttctcttcactcttggtcttgcgagagaaagccatgccagagacgaagatttttggcatgctgtttggccaaacactcccattccaagttcattgcgagatcttctaaagcctggccctgcaagtgttgaaatcgatgatcaccctatgcaaattgaagaaacacagtacccgaaaaccttcttctataaagaagaccttcatccaggcaaaacaatgaaagtacaattcagcaagcctccctttcaacaaccatggggtgttggtacatggttaaaggaaattaaagacactactaaagaaggatatagttttgaagagctatgca

SEQ ID NO: 43292 - DNA, 377 bp, Glycine max
  Clone ID: LIB3139-057-P1-N1-G2
gaaaaaatttcttaactagaagacctcaacccttcaagccatgtcaacaacctcttcacccaacttgtcacaatttgcaccaccccatgccaaatagatgttaccaaactaagccaacaagttagagaaaccatagccaagctaattaggctttgtgggaaagctgaagggcttcttgagaaccactactcaaccctaataggatcatatgagaaccctttaagccacatgaaactcttcccttactactccaactacttcaaacttagccacttggagttcaccatgttaaccactcacatcacacaagtccctacccaactagcctttgtggggtcaggtcctcttcctctcacctcaatcatgttggccacaca

SEQ ID NO: 43293 - DNA, 346 bp, Glycine max
  Clone ID: LIB3139-057-P1-N1-G4
tttctgtgtcctatttttagagtaaaaactggcggttgtggtaataattagcttgtttacacaaaagaaaataaaataacttacgattaaagtattgaagaaagagctattaatcaaactgctgttttctgtatgcaatgtaagtaaaaccaagcatttcaagggagactctcattgctttcttttttgtgttaactactatctgtttcttttggttagggaaggaatattcttgaaatagaccatcccgaaggtccattcagcacgaaggaagcacctgctgttgtcaaatcttactatgataaaaggatagtcggatgcccaggatgtgaaggtggtgagtacc

SEQ ID NO: 43294 - DNA, 374 bp, Glycine max
  Clone ID: LIB3139-057-P1-N1-G5
acaggacactatcaactcgaccgagtcagccaatgccatgaccgccatactctgcgtcatagtcatcatcatcatcatcatgcagagcgcagcgtcatcgtcgccgtcgccggaggccattctggaatggctgcacaaagaaatgggctaccgtccgctcggcacctacgcctccggcaagtcgcacctgccgtccgtcgactccatccgccggatttgccgcggcaacatgattccggtcttgaacttcctcgtcacgcgcgccaagtccgagaagaccgtgcggaacatccgccggaacatcaccgtgcacggcggctcaaacggcggctgagaggcgaaggaggagggaagggggaagggcgcgaggaaga

SEQ ID NO: 43295 - DNA, 379 bp, Glycine max
  Clone ID: LIB3139-057-P1-N1-G6
ctcgagctttcattaactatgaccctcagcgtgacaagcgtggctcgggcaccgtcaagcttccccgtgtcccgcgtcccaacatgagcatctgcattcttggtgaccagcacgatatcgaccgtgccaagcacggtggtgttgacgccatgagcgccgatgatctgaagaagctgaacaagaacaagaagctgatcaagaagctcgctcgcaagtacgatgctttcatcgcttccgacaccttgatcaagcagattccccgtctcctgggtcctggtctttccaaggccggcaagttccctacccccgtctctcacgctgagaacctgtcggacaagatcacggaggtcaagtccaccatcaagttccagctgaagaa

SEQ ID NO: 43296 - DNA, 368 bp, Glycine max
  Clone ID: LIB3139-057-P1-N1-G7
tcttagtgtttgttcaatgccctttcaggctgctcttgtcaaagatccgggtgtttctgtctaccgtgtgatttggagtcctgatggggctttatttggagttgcttactcaaggcacatcgttcagatatactcttaccatagtggggatgatgttcaacagcatctggagattgatgctcatgttggtggagtaaatgatctagcgttttctcacccaaataagcaactatgtgtcataacctgtggtgatgataagaccattaaggtttgggatgctgctacgggtgcgaaacagtatactttcgaaggtcatgaaacttcagtttattctgtctgtccgcattataaagaaaacattcagttca

SEQ ID NO: 43297 - DNA, 364 bp, Glycine max
  Clone ID: LIB3139-057-P1-N1-G8
ggagaggaaaagagtgctgtagattttggtgcagtaatggcaacaccaaaacagtcatatgagcagcaacaacaacaacaaccaaatgtgcagcgagtgaggaactcggggatgattaacagcaaccagagtccaatgagggatgacaaggaagaggagatgtcaagatcagctttggcaatgttccgagcaaaggaagaagaaattgaaaggagaaaaatggaggtgagggataaggttcacgcttatctcggtcgagtagaggaggaaacaaagcgcttggctgagattagagaagagcttgagggtctcacagatccattgaggaaggaagttgcaatagttcgaaagaagatagacagtg

SEQ ID NO: 43298 - DNA, 330 bp, Glycine max
  unsure at all n locations
  Clone ID: LIB3139-057-P1-N1-G9
gtgtttgatgggactataggtggctcttctgatgctgtggggaaattgacagaggcagacttgagatttttatttgttacctaagcaggctttgttatctcgaccagaaatttctcgatgcttctggtcattcatttctcgatttttttttttatatatatagaaaaaagcattagctgtaaattattggcccaccgtagnngcctcagccaaagaaacccagcactgtgctgttgaatagcgggattttgaagcttcaggttttctatttcaatcgtggaatgtcaactattaattttttgacaaaaaaaaaaaaataaaaatattaaa

SEQ ID NO: 43299 - DNA, 376 bp, Glycine max
  Clone ID: LIB3139-057-P1-N1-H10
gaagatgatggagatgtatcacatctggagcaggagaatagcgttgggagcgttcgcgtttgttctgcttttcctatcggcctcagcagacgacgtcgttgtgctctctgaagataacttcgagaaggaagttggtcaggacagaggagctctcgttgagttctatgctccttggtgtggacactgcaaaaagcttgctccagaatatgaaaagcttggtagcagcttcaagaaagccaaatctgttttaatcggcaaggttgactgtgatgagcacaagagtttgtgcagcaaatatggagtctctgggtacccaacaattcagtggtttccaaaaggatctcttgaacccaaaaagtatgaagggccacgcact

SEQ ID NO: 43300 - DNA, 372 bp, Glycine max
  Clone ID: LIB3139-057-P1-N1-H11
cgctttgtctgttataatcaacgcgctcctcacgagtgaatttctggttcggaaggatctgattgttagggtttggtatggggagaggtaagatcgtgataaggaggatcgacaattccacgagcaggcaagtgacgttctcgaagcgaaggaacggtttgctgaagaaggcgaaggagcttgcgatcttgtgcgatgctgaagtcggagttatgatcttctccagcaccggaaaactctacgatttcgccagctccagcatgaaatcagtaatggaccgatacagcaaatcaaaagaagaaccttgtcaacttgggagttcaacctctgaaattaaattttggcaaagggaggcagcaatgttaaagcaac

SEQ ID NO: 43301 - DNA, 270 bp, Glycine max
  Clone ID: LIB3139-057-P1-N1-H12
gcagagacttggaagaccagcctcgaggagcgcggtggcgtggaaaacgtgaagacccctgacgtccacactttcttgcagcacgtcgttaccttcgggattgtcaagaacgaggactccgatttgtaccggaagcttgttattgcttccgcttggaggaaacagatgccgaagctcgcgctttcgcttggtctcgctcagcaaatgcctgatatgattgaagagttgatcagcaaagggcagcagcttgatgcggttcactttacatat

SEQ ID NO: 43302 - DNA, 274 bp, Glycine max
  Clone ID: LIB3139-057-P1-N1-H4
gaagagacgtgacatgcactcctccctaacctcagctttgaattccggtcaggcatatatttttagcatgcttcaaatctacctcccgctgggctccttgtgcaccatactatctccttatcaccatccaacttcactcgaactacaaatatgtatagcctgctgaagcctcgaacactcacattctgatccattcacaagaccatctacatactgcccctttaagctttgaaaccgctcttcaccctttgctgaacgaaaaaacaaagcacct

SEQ ID NO: 43303 - DNA, 377 bp, Glycine max
  Clone ID: LIB3139-057-P1-N1-H5
tccgattcgtatcggtagcagttggaatcatatcgaatcgggcgatacatatcgtgaatcgttgtgtcctaaaaatggcactggttgtaatgtgtgggcaaccatgcagtggaaagtccaaagctgcagtctgtctcgccgaagctctcaaagaatcagaatcaaaacttcaagtgagaatcatagacgaagcttgttttcatcttaatcgtaaccaaagcttcgcgaatatgccttcggagaagaatttaagaggggtgcttaggtcagaagtagataggtccctgtctaaagatagcatcatcatagtagattctttgaataacatcaagggttaccgatacgagctatggtgcttggctcgagcagcagggatc

SEQ ID NO: 43304 - DNA, 379 bp, Glycine max
  Clone ID: LIB3139-057-P1-N1-H6
attaaacttcatatactcacaagaccaaatgcagctgatacagttccacattctccccactctctacaccatctcacagttccaaaccgcaagtaaccccttgcacacgcaagctggaaacagtgatgatggagagtatcctttaaatgtgaccacctcagggaaccaagtgaatgtaacaactggggtggttgatacaacagtgtccaatactatctacagtgatactcagctctcagtgtatcaggtggataaggtgcttcttcctatgaagcttttcggcgcgacggcaccggctgctgcaccggcggaggctcctgcgccatccaagccggagaaaaatgtccgggcaggggctgctgatgcttcatctgggtca

SEQ ID NO: 43305 - DNA, 369 bp, Glycine max
  Clone ID: LIB3139-057-P1-N1-H7
aatggacttagttctaaacaccacaacaattggagttggtgttgtttctctgatcctcttatacttgtttttgtgtcgtcgttcctcgaagagtggcgaagagggtcctcccacagttgcaggtgcgtggccaataattggtcacctcccattgttgcttggttcaaagacacctcataaaacattgtgtgacttggctgacaagtatggacccatattctccatcaagcttggtgcaaaaaatgctgtggtgattagcaactgggaaatggctaaagaatgctataccacaaacgacatcgccgtttcctccctccccaatcttatctctgctaacctcttgtgctacaaccgatccatgatactcgt

SEQ ID NO: 43306 - DNA, 374 bp, Glycine max
  Clone ID: LIB3139-057-P1-N1-H8
ggatctctatagacccaccaacgcacgaaagccgggatctttcagaaaatggattcctattcgaagggtgcataaccgcatggataagctcacactaacccgtcaatttgggatccaattcggttccttaggaggtatcgggaaggaattttggaatgtaataatatcgattcatacagatacagaagaaagggttctctattgattcaaacgctctacctacgagatagggatagagaaagaggaaaaaaccgaggatttcacatagtacttttggtcgaaaaatcgatctgatttttttcgtacttttcgctcaatgatgaaatgggtcagattctacaggaccaaaccttgtgggagttaaggaatgatgg

SEQ ID NO: 43307 - DNA, 126 bp, Glycine max
  Clone ID: LIB3139-057-P1-N1-H9
ccgcgacgaagctcggaatggctcggaagctttttttgatggacagcaaatggttggggggttttatggtatcttcacgattgaggcttgatgttcaacttcatgatttatgagactattgtgaca

SEQ ID NO: 43308 - DNA, 415 bp, Glycine max
  unsure at all n locations
  Clone ID: LIB3139-059-P1-N1-A1
cttcaccttcaccttcaactgccaactgcaaacatctaactactggcaggttcacttagccgagaatcagagactaatcactagagataccgagacctacttttcctcacatcaccaccaacatgcgttccagcaacggtacatcaagcagcagggcctccaacggtaacacagggcgccaccctgtttaccgtggagtgaggcgtangagtagtggtaaatgggtttctgaaatccgtgagcccaaaaaacctaacaggatttggttagggacatttgccacccctgaaatggctgctattgcctatgacgtggcagcgcttgctcttaagggtaaggatgctgagctcaacttccctaactcggcttcctccctccctatccctgcatcatctgcagctcacgacattcagat

SEQ ID NO: 43309 - DNA, 409 bp, Glycine max
  unsure at all n locations
  Clone ID: LIB3139-059-P1-N1-A10
agaaggaggagcaagagaaatcaggagcctttgacacgtggagctcaatcatgtccctcaagggcagagatgaaatctccaaatcaatgcctattacaccttatgttcaccctcttgtcaaaaggtcaaagagttgtttgagtgagaagagtctcgaaatctgcactgagagtctcggttctgagactggctctgatgccttgttgttctcttcttactcttcctcttctgagacaggggatgctgatgcagagcaacaacaacaacaagagaaagaacaagtaaaagaagaagaagaagaaggagaagaagagttatgcaattatgcttcagtggtggctacaaagaaggcttcggcttcggcttcaccaccacgcgctttcccttcaccacttncttcactctctca

SEQ ID NO: 43310 - DNA, 396 bp, Glycine max
  Clone ID: LIB3139-059-P1-N1-A11
gcgccgtttctgtgcttttactctgctaccttgtgacaatggtgagggttagtgtgttgaatgatgctcttaagagcatgtacaatgctgagaaacgggggaagcgccaggtcatgattaggccatcctcaaaagtgattataaaattccttttggtgatgcaaaagcatgggtacattggagagtttgagtacgttgatgatcacagagctggaaaaattgttgttgaattgaatggtagactgaacaaatgtggggttattagtccgcgttttgatgttggtgtcaaagagattgaaggttggactgctaggctgctcccctcaagacagtttgggtatattggggtggactacctcagctggcatcatggatcatgaagaagctaggagaaag

SEQ ID NO: 43311 - DNA, 405 bp, Glycine max
  Clone ID: LIB3139-059-P1-N1-A12
tgatgataacttaattagtgttcatgaatatgtcaagccttactttagtggttctaaattgaaaagctttctagctggtcataatatcaccattactgatggtattgacaaaactagtgcaactttgcaatttagaaagttagcagattgtgattttctcaagagaaactttaagcagatgtctaatgttttatgggtggctcctgaggacaaggcgagtttatggtcacaacttcattatgtttcgtgcaataatctggaaatgcaagaagcttatcttgtcaattctcgtaaatgtgttacgagaattgtatttgcacagtccagaggaagctcgccaattgagaaggaaagctctctctcgtattgaatggctgcaaaaagctgatgtgcctaccatagcac

SEQ ID NO: 43312 - DNA, 405 bp, Glycine max
  unsure at all n locations
  Clone ID: LIB3139-059-P1-N1-A4
gaataatcattttgtttgtgaatgcatgttaggatttccttttatttttgtccaattatataggtaaccctgaaattttcccttcagtttatgcatgtttggatttccttttattttttccaattatataggtaacccttaaattttcccttcagttttttgagtttatatatgtattccctgaatcgatctaacatgaatagctttctaagggtactcttctcgggatgaggcaaaccatttttgagtttatatttgattccctgaatcaaaggtacccatccttcagttttttgagtttatatatgtattcccttttgtgatcacaacaatttggtgctgtcaagtgngttggtgttctttttctcaggggattgcaacagccgtagacgtttcaacacatag

SEQ ID NO: 43313 - DNA, 404 bp, Glycine max
  Clone ID: LIB3139-059-P1-N1-A6
atgaatatgtcaagccttactttagtggttctaaattgaaaagcgttctagctggtcataatatcaccattactgatggtattgacaaaactagtgcaactttgcaatttagaaagttagcagattgtgattttctcaagagaaactttaggcagatgtctaatgttttgtgggtggctcctgaggacaaggcgagtttatggtcacaacttcattatgtttcatgtaataatctggaaatgcaagaagcttatcttgtcaatctcgtaaatgtgttacgagaattgtatttgcacagtccagaggaagctcgccaattgagaaagaaagctctctctcgtattgaatggcttcaaaaaagctgatgtgcctaccatagcacagattgaagagtccattcgatg

SEQ ID NO: 43314 - DNA, 259 bp, Glycine max
  unsure at all n locations
  Clone ID: LIB3139-059-P1-N1-A7
gttcatctccatggccataggatatctgattgatgccaggtttgtgatgaatgcatatggggagttggtgnctggaggttacacacaaactatattagaaagagggttcaccttagctcttgttggtaatagggtgcattgagtagcttgattctatatttaatggattatcggttcatatttattatattgagagtaattggtatcttcatttttttttatttttttaattattttatattctcatataatttatttt

SEQ ID NO: 43315 - DNA, 411 bp, Glycine max
  Clone ID: LIB3139-059-P1-N1-A8
cggctcgagcctgaattacagaatcaaatatggacaatatttaagaaatatgaaagctcaattgaagtcgaaatacagcaaagatctgttgaatattttgcattgagtagaaaagtctgcattgatcaaaaaggctgaagacactgaagtcgatacagcggaactaagtgctataaagttacgagctcagcagcaatcccaaacatcaaatgctttggttgtaacaggccaaagtcatgctaatggaactccacctgttggccaacttagccttgtaaaggtgcccagcatgagtagcaatgcggatgaggcagatcaaagattatcccaggaaaatgggactttgagtaaagtagattctcaacctccctctgcagatctccttggtgatctcttgggtccacttgctat

SEQ ID NO: 43316 - DNA, 406 bp, Glycine max
  unsure at all n locations
  Clone ID: LIB3139-059-P1-N1-A9
agcgaaacaacgctggacgctgtggtggcgcaggacggtagcggacagttcaggacgatcggtgaggcgctgaaattagtgaagaagaagagcgagaagaggttcgtggtgcacgtgaaggaagggcgttacttagagaacattgatttggataagaatacgtggaatgtgtttatcttcggtgacggcaaggacaaaaccgtcgtcgtcggtagccggaacttcatggacggcacgccgactttcgaaaccgccaccttcgctgtgaaaggcaagggattcattgccaaagacataggttttgtgaacaatgcaggtgcatctaagcaccangctgtggcatttagatctggttcggaccgttctgtgttctttagatgctcattcaatggcttccaggataccc

SEQ ID NO: 43317 - DNA, 392 bp, Glycine max
  Clone ID: LIB3139-059-P1-N1-B1
ctaccattatcatctctttctttctcctcaatctccaccaccaccacgccgagtcaactcggcccccttattgctgcgactcgtcctccaactcaccctactactcattctgcaacaccaagctccccatcaccaaaagagcccaagacctcgtctcgcgactcaccctcgacgagaaactcgcccaactcgtcaacacggcaccggcgattccccgactcggcatcccgagttaccagtggtggagcgaagccctgcacggcgtcgccgacgccggcttcggcatcaggttcaatggtaccatcaaatccgccaccagctttccccaagtcattctcaccgcaagcttcctttcgacccaaaacctctggtgaccccaaattagcaaggac

SEQ ID NO: 43318 - DNA, 407 bp, Glycine max
  Clone ID: LIB3139-059-P1-N1-B10
cgaaccggaatccagattgagcccggcccaaaccgtttcaaaagtgccgagaaagtcgagaactgaaaagcctagaaagcccaacactcgtgtctggtcctcttttacggtgtttgctggctccgttgggttcggcgagttggtgactaagaagcagaagaaaaaggttgaggcccaaagcggtggggcccagtctctgcgacgttgtagccactgccaggtgcagaaaacaccgcaatggaggatcggtccactagggcccaaaacactttgcaacgcttgcggggttcgattcaagtctggtcggctttttccagagtatagaccggcctgtagcccgaccttttgtggccacattcactctaacaaccatcgtagagtgttggagatgagatggaaaaaacaga

SEQ ID NO: 43319 - DNA, 384 bp, Glycine max
  Clone ID: LIB3139-059-P1-N1-B11
ctgatccatctcactgggacaaaatctcccagggtggactcaagcgtattcatgagaagtacacatggcaaatttactcggacaggctcttgacactcactggtgtgtatggcttctggaagcacgtgaccaatcttgaacgccgtgagagcaaacgttacctcgagatgttctatgctctcaagtaccgcaaattggctgagtctgtgccccttgctattgaagagtaaattcatgtttgaagagaacatcaatggagaaaccggcttttggtcgtttgaagtcttatggagctttcataaataacgccattgattttgattgtgatcagcttttggatttaaagagtctaaaaaaaagtggcggttggtttttatattttgc

SEQ ID NO: 43320 - DNA, 408 bp, Glycine max
  Clone ID: LIB3139-059-P1-N1-B12
gatgtcttacgttgctcacaacgttaatcagccccaagagaaagatttgttggagggaaatttttcctttgatattaaatctcgctctagattggaaaaagtttcctctacaaaagcacaatttgttagtggaaaaaccttcaaatatgatataattggtgctggttcacattcttcagaagattttcctgaaaaggaagatcaagaaaaacccaaaaagattgataccagattgagacaaagaatagatcctcaatacaatgaggttcaggctcagatggaaacaaatttggttaaaatggtctttggatgatgttgaaactcctaaaggttccatgttggatcttaaaatttctcaatctaaaattgcacttcccaaaaacacagttggaggaaccattctgcgta

SEQ ID NO: 43321 - DNA, 336 bp, Glycine max
  Clone ID: LIB3139-059-P1-N1-B2
gcggcacaaatcaatgcaaacggaaaacgcagaatcgcaactcacgagagtgacatctacgccatgaacaaatcgcagtcgaagaactccaagtcctcgactcagttcgactcgccgctcagcttctactccccgatgcacggggacggtaccgagtcgccggagtaccggtcgccggaaaactggccggagaagcgcgacaactccatggccatcgtgaccgccggcaagctcaagcagttcacgccggagaagcgcgcagagcaccggaagccgtcggaaaatccgccgtcgacggcggtgatggtgttcaacgcctcgtcggcggaggaggct

SEQ ID NO: 43322 - DNA, 414 bp, Glycine max
  unsure at all n locations
  Clone ID: LIB3139-059-P1-N1-B3
ttaaagcagataaataattggttcataaatcagaggaaaaggaactggcatactaataacccctcatcctctagtaactccaaaagcaagcgcaagagtagtgcaggagaaaccagtaaccagagcttcatgtgaacggtcgcatattttgagcaaaaattattggtattgttcttccttttaatgcatactcgtgggattcatagatcttacggtccaacgtgaacgtgatggattctggatgtaaagggaaattcatgataaaatcactgtattggttgaattacagaaaattaaccctggtattgttgtatatgaggctgctgcatgccgcttgatatctgatactgaatattgatgcangcacagtctattcgatttaatgggtagcatgctgatacgtacatataaatt

SEQ ID NO: 43323 - DNA, 414 bp, Glycine max
  Clone ID: LIB3139-059-P1-N1-B4
cttgaagcaaagctgtgtttgcattgattggaatttctttgccagatattatgagggacattgcgtataataatgtactaattgcagtggtaaactattgccatggaaagaataatcgattattgattcatactagaacccaaaagttctaaagatcaaaagaatcaattataattaaaaataatcaattaaatatgtttgaaattgttgcaactggttttcaaacttgacttttcctttcatttttcacttgcctataaaaggttaactttcatgtgatagtgagagagagtaatttcaaattttacaaaagaaaaacttcaaaaaaatggaaaaaaaaatattttatcaaaatacaaaaaataaaagagacaaaattaaattttacaaaagagagaaaagaatgaaaatttg

SEQ ID NO: 43324 - DNA, 407 bp, Glycine max
  Clone ID: LIB3139-059-P1-N1-B8
cactttgagaattctcataaagttgcatgcttttggattggaaggttgttgcaatggggaaggttgtgttgttgtttctttgcatggtattggtggtggtgcctttggcttgtactgattcaattcagaagcttgaggttcagaagcacttgaagaacttgaataggcctcctgttaggtccatcaagagtcctgatggagatgttattgattgcatccatgttacacaccagccagcttttgatcaccctgacctcaaaaatcacaagattcagatgaaaccaaatttccatccagaagggcatccttttggagaaagcaaagtctcttcaaattcaaagcctattactcagctgtggcaccaaaatgggaggtgccctgaaggaacaattccggtccgaaggacg

SEQ ID NO: 43325 - DNA, 404 bp, Glycine max
  Clone ID: LIB3139-059-P1-N1-C1
ctcgtaagagtagtaactaagaaaataaaggtttctaatttattgcgttcaattctccggcggcaccgcaaccgattccgccaccgcatatggcaaaaggtcgaaaactaacgaccagccggagcgagcgcttcttgggaacctatgcttacagccaaggctccgccgccgtgaacccgtcggagcttcgggaagaggatgtatggggcgccggagatgacgccggcgaacgcgagtgggatccacacttcgccgccatgagcaacggcggcggaagccggcgccggattccgcgtgacaacgatgtgcaccggcgcgtgggtgggctgtctctggcttttgaagctccggcgagtggcgcgtcgccgaggatcgtgcaccagtttcgcgcgcgtgaagagatg

SEQ ID NO: 43326 - DNA, 396 bp, Glycine max
  Clone ID: LIB3139-059-P1-N1-C10
gctaaattctcaaaggcaccaatttcattgctcagagttcccaaattctccccaagagataaaatgtctctaatcccaaacttcttcggtggccggagaaacaatgtgttcgatcctttctcactggacgtgtgggatcccttcaaggattttcctttcccaaatacgctttcttcagcttccttccctgaattttctcgggaaaattcagcatttgtgagcacccgtgtggactggaaggagaccccagaggcgcacgtgttcaaggcagatattccaggactgaagaaggaggaagtgaaggtgcagattgaagacgataaggttcttcagataagcggagagaggaacgttgagaaggaagataagaacgacacgtggcatcgagtggagcgt

SEQ ID NO: 43327 - DNA, 394 bp, Glycine max
  Clone ID: LIB3139-059-P1-N1-C11
cagtaccataccatgatatagattgggatcaggctcgcaatttgtgtgcaaaggaagatttgtactatcctcacccacttgtacaggatattctttgggcatctctacacaagttccttgagcctattctgatgcattggcctggaaaaagattgagggaaaaggctattatttctgcattggagcatatacattacgaagatgagaatactcgatatatttgcataggtcctgtaaataaggtgttaaatatgctttgctgttgggtggaagatccaaattctgaggccttcaagttgcatcttcccaggatttatgattatctatggattgcagaagatggcatgaaaatgcaaggctacaatggaagtcaactatgggacactgcttttgc

SEQ ID NO: 43328 - DNA, 404 bp, Glycine max
  Clone ID: LIB3139-059-P1-N1-C12
atggtgatgataacttaattagtgttcatgaatatgtcaagccttactttagtggttctaaattgaaaagctttctagctggtcataatatcaccattactgatggtattgacaaaactagtgcaactttgcaatttagaaagttagcagattgtgattttctcaagagaaactttaagcagatgtctaatgttttatgggtggctcctgaggacaaggcgagtttatggtcacaacttcattatgtttcgtgcaataatctggaaatgcaagaagcttatcttgtcaatctcgtaaatgtgttacgagaattgtatttgcacagtccagaggaagctcgccaattgagaaggaaagctctctctcgtattgaatggctgcaaaaagctgatgtgcctaccata

SEQ ID NO: 43329 - DNA, 405 bp, Glycine max
  Clone ID: LIB3139-059-P1-N1-C7
tgcatatttggcatcaacaatcaacaatcaacaatcaacaatcacaaatagaaactcactctttcgaaaaaaccagaatttgaatatgacgttagggtttgagggttatagttataccacaacacttggaaggaagagggtcgtgttattacacaatgaagcttcttctctcaactctaattcggcggtgaatccattgaagagaatgtgcagcggaaaattcacttttgactctgaaaggtctcgccttgaggcccttcctcttgatgttctgattagggtgttgtgtggtgtcgatcatgaagatttggagcaacttgttcgtgtctcaaaaactgttagagaagcggctgagattgctaggagaatgcattttgagtatagcactccaaagaagaaaacttt

SEQ ID NO: 43330 - DNA, 402 bp, Glycine max
  Clone ID: LIB3139-059-P1-N1-C8
tatttttcttcctcagtatgtgtcatttacgcttctcttctctgcagcaactatgcctaaccctaaggtcttcttcgacatgaccatcggcggtcaatctgctggccgcatcgtgatggagctctacgccgacgtcactccccgcaccgccgagaacttccgcgcgctttgcaccggcgagaagggcgtagggcggagcggcaagcccctccactacaagggctcgtccttccaccgcgtgatcccgagtttcatgtgtcagggtggcgacttcaccgccggaaacggaaccggcggcgagtcgatttatggcgccaagttcgccgacgagaacttcgtgaagaagcacaccggtcccggcatcctctccatggcgaacgccggtcccggaaccaacggatc

SEQ ID NO: 43331 - DNA, 407 bp, Glycine max
  Clone ID: LIB3139-059-P1-N1-C9
aacaaacatgtcgtggtgttactgcgctaagcctatgactttggagttgccgttgcaatcaagagcagcatcatcgttccattcccacgttggaggagtaacagtaacattctcaacactgtctcttcgaccctcttctcctcttgttctgacccacaacctccacttccaacccaaactcaaacgcgcttccacaaccattcgctgctcctctgcgttgactcctcaattgaagtctaccttggatcaagttattgcttcaaataaagtagttgtgtttatgaagggaactaaagactttccacagtgtggattctcaaacacagtggtgcaaatattgaagtctctaaatgtgccttttgaaaccataaatgtgcttgaaaatgacttgttgcgccaagggctga

SEQ ID NO: 43332 - DNA, 413 bp, Glycine max
  Clone ID: LIB3139-059-P1-N1-D1
tctgaaggtaattgacttacagtgtggtagtggacgtggtggtttacccacgactgcttggattagttctgcagttaacaatcgctcctcagacatcaacaaaaggattcgcacagcacttgggaaaggtaagaaaattgtttttcttactagagttgatccttttccagtagctttattggctgttctttttggcgttaagaatgaaattctgagttctaacgccactaaccctatgctgacgcgactacttgagaactgtaagagtctcaaatatctggttgatgagtgtccttttgcatttgtgaactactatgtaatattttattcacttaaataaagcgcattactatgtgcaatgagtgtgtttaaatattaaaaaaaaaatataattttaattatttttttttttt

SEQ ID NO: 43333 - DNA, 394 bp, Glycine max
  Clone ID: LIB3139-059-P1-N1-D12
cattaattgcaagaatggcacttcgttgcttggtgatgtccctttctgttctcttcactcttggtcttgcgagagaaagccatgccagagacgaagatttttggcatgctgtttggccaaacactcccattccaagttcattgcgagatcttctaaagcctggccctgcaagtgttgaaatcgatgatcaccctatgcaaattgaagaaacacagtacccgaaaaccttcttctataaagaagaccttcatccaggcaaaacaatgaaagtacaattcagcaagcctccctttcaacaaccatggggtgttggtacatggttaaaggaaattaaagacactactaaagaaggatatagttttgaagagctatgcatcaagaaagaagccattga

SEQ ID NO: 43334 - DNA, 421 bp, Glycine max
  unsure at all n locations
  Clone ID: LIB3139-059-P1-N1-D2
ctcatatctcatgatcttctgatttagcttctgaaattacctgattgggagttgcgaaagatttttggcttttaacttcatacacaaaatactaatgtggggtttgttttcgattttggcttatgtacatgaacttttcagtataatcaatggatagctttttctattggtaaaaaaaaaaaaaaaaaaaaaaaaaaaaaaaataaaaaaaaaaaaaaaaaaaaaaaataggaaaaaaatttggggaaaaaaaaaaaaaaaaaaaaaaaatataaaaaaaaataaattaaaaaaaatgaagggggggaaaatattaataattaaaaaaaataaatagaaataannggggggggccccccttttttgtggcttgtccccccggatattatttttggcccttgcttttgggggttacaatttt

SEQ ID NO: 43335 - DNA, 380 bp, Glycine max
  Clone ID: LIB3139-059-P1-N1-D4
agcaaacataactggctgtaatggcttcaatgaataaccaaaaagaaatggagctctttgagggccaatctcttctgtacatgcagctatatgggcacctaagacctatgtgtcttaagtgggctgttcaactaggtattccagacataatacagaaccatgccaaacccatttctctttctgacttggtctctactcttcaaattccaccagctaacgctgcttttgtgcagcggttcatgcgcttcttggcacacaatggaatctttgagatccatgagagccaagaagatcatgaactaacatatgctctaacccctgcatcaaagcttcttgtcaatagtagtgatcattgtctatctccaatggttctagcgttt

SEQ ID NO: 43336 - DNA, 404 bp, Glycine max
  Clone ID: LIB3139-059-P1-N1-D5
ctacgacggcacgcgcacgcaagcctcgaattccggttcagggggtttttctatggcttttttttacctaatgaaccaggacaaaatcctgttggaaggctggtcctatttgaaagatccaaaccttgaagggggttttcctttaaacaaagcatatggaatgacagcctttgaataccatggaacggatccaaggtttaacaaggttttcaacaaggggatggctgatcactctaccattacaatgaagaaaattcttgagacctacacaggctttgagggacttaaatccctggttgatgttggtggaggaactggagctgtatacaacatgattgcctcaaagtttcccacctgttaagggcattaattttgatttgtcacatgtaattgaagatgcccca

SEQ ID NO: 43337 - DNA, 404 bp, Glycine max
  Clone ID: LIB3139-059-P1-N1-D7
ggcctaagtacttccaatcggtgcttccaaataaaggttgttgcgcaggatgacgatgaagatgggccaataactaatccagcacaactggctttgatcttttcacacacagaaacatatcctgatgaacctccacttttaaatttgaaaagtttgcaaggaatatctgctgaagatctaaggattttgaaagaaaaacttcaacaagaggcatctgaaaatcttggtatggctatgatctacacacttgttacctcaactaaagagtggttggctgaccggttttctcaagatgatgttgggagtactgaagcagaagaagcagccaaagatgatgtagtgataccccacggggaaccagttaccgttgaaacatttttggcatggagagaaaggtttgaagc

SEQ ID NO: 43338 - DNA, 408 bp, Glycine max
  Clone ID: LIB3139-059-P1-N1-D8
ggttccacggtgatgtcatgtcaatggctgcaactctcactgctgtaagaattcccactttccaccaacgccatctcaaacaacacttcacggcaccctcttcctcttccttacgcctcctcaatctcgcaaagatggaaggaagtgagatcagtgagcaagtagtaggggaggatttgggagcaaagaagaaagtttttgtagctggagccactggtagcactggcaaaagaatcgttgagcagttactggcaaagggttttgctgttaaggctggggttagagacatcgacaaggccaagacaaccctttcctctgccaacccatctcttcaaattgtgaaagctgatgtcacagagggttctgataagctagctgaggccattggtgacgattcagaagcagtag

SEQ ID NO: 43339 - DNA, 408 bp, Glycine max
  Clone ID: LIB3139-059-P1-N1-D9
cagaggcggatggcccattcgggtggttacatttccgaataccattgtgcagattgaaccagacatgaattcaaggtttcagcttttgagtaccactaccaatggtgattttgttcaagggaaagatctcgcaatggttaaagttaatgtagcatgtgctgctgttggcttgacatcaagttacactccaactccattgttggaatctggtttgcaaaaagacagagggttaattgtggagtattttggaaggatgtcttacgttgctcataacgttaatcagccccaagagaaagatttgttagagggaaatttttcctttgatattaaatctcgctctagattggaaaaagtttcctctacaaaagcacaatttgttagtggaaaaaccttcaaatatgatataat

SEQ ID NO: 43340 - DNA, 128 bp, Glycine max
  unsure at all n locations
  Clone ID: LIB3139-059-P1-N1-E1
agaccacgggagnaattatatcttccacacgttttctcgacattacttgagtcactgttattgcgggcncaggggannganncnactctnncctcancanngnntgtngantcaatcacctgagaacg

SEQ ID NO: 43341 - DNA, 334 bp, Glycine max
  Clone ID: LIB3139-059-P1-N1-E10
gcaacataaacaagttcccctttctttgcttcttgtggtggggtttttctctttccttgatcccttgctttgttatccttttcttcactttttctctcaccaattttctctcttctcacaccttcttgttgttttgtaattttccattttattaaaaaaaaggcaaaattgaatttaatatttaaaaggttatttttttattctagaatttttgtttcacgcaaccacatgcatgttctcttcatgcttgtctgatctggattggatcactagaatctttgccatctgcgctttttgtttggtacatgaagggtagtagtgagtggtgtggggg

SEQ ID NO: 43342 - DNA, 396 bp, Glycine max
  Clone ID: LIB3139-059-P1-N1-E11
tggagagctcttccattgtgcacctaacattcctcattattcaagaaataaagcagttggtgtgatgaaggccggacagacctttacaattgaacctatgatcaatgccggtgtctggcgggatcgaatgtggcctgatggatggactgctgttacagcagatggtaaacgaagtgctcaatttgagcagactcttttggtgacagagactggtgttgaagttttaacagggaggttgcagacatcacccaatgtttttccttggttaaattcataattgggtgaatcatggagacagaagctggtagtgtctgaataccatacaattaatagacaacatttctttgatctacatctctggttttctcttttgggtatcatgtttgtaagttatac

SEQ ID NO: 43343 - DNA, 407 bp, Glycine max
  Clone ID: LIB3139-059-P1-N1-E4
cgggatgagatagcaatttacattccaactaatgaagacttggacgaccgtgaaaagctaaagaaatctgctgaaagtacttctgagatcaatcctgctgatgacaacccagatatttttaaaacatggtatccacccctggagaaaactctatcatgtctttcaaagttgtatcgttgtttagagtctgcagttttcacgggcttagcacaggaagtagtggaagtttgctcagcatctattcagaaagcaagcaaattaattgcaaagagatcatcacaaatggacggacagctcttccttataaagcatcttttaattttaagggagcagattgcacctttcaatattgaattttcagtcacacaaaaggagctcgatttctctcatttgctggagcatctacg

SEQ ID NO: 43344 - DNA, 84 bp, Glycine max
  Clone ID: LIB3139-059-P1-N1-E5
caattcacaaaaattgtttctattctgtaagtcaattaccttcagaagctgtcgttgtaaatgttacatgtggtagtggacgtg

SEQ ID NO: 43345 - DNA, 346 bp, Glycine max
  Clone ID: LIB3139-059-P1-N1-E7
aaccaacatagctatttcaatcttctgttaccatgagtggacaagtcaagacaattgcccgcattctgcaggcagcaggttccgctatacaagcaaatggcaatctcgtcctcctcaatgtggagaatggccaccttgtagagaggatctttgacggggaggaactcaaagaccagagactggtcgtggatggcgtgaagtctggcgcattcgcagccttcgtcgtttcagacaaccatgccttgatcctctacattactgatgggggtgaactcaaggctagggagtttgaccccgactcaaaagagtgggatgagtctgagctcaatggcttgggcgaaatcaa

SEQ ID NO: 43346 - DNA, 321 bp, Glycine max
  Clone ID: LIB3139-059-P1-N1-E8
cagagactcagcaacctttctaccttcttctcttctctgctcttgggttctcttctcttcttcactgccatttcatttccccactctatccttccctccatgagcaccatggattcctcttccatctatggtgtctcacacagacacttcctcaccctcttccttcttttccttctgccactccattctcactctgcattctctcataactcttcttcctcgtctcaaattaactctaattccatccttgtcgcgcttctcgattcccattacaccgaactcgctgagcttggtgagaaagcgcttcttctccaaaagcta

SEQ ID NO: 43347 - DNA, 408 bp, Glycine max
  Clone ID: LIB3139-059-P1-N1-E9
ctcgagagttgttttattcatgtcgtgaactctctccctgcatggggctcgagtttttttgttgctggcgggagctctgaacttgaccgacgtcgttttcacatcaaaacccttcaacaaaaaaatggcgttcttcttgaaccaaactagtatcgcttcccattttcgatctcactctcagaagactgaagatttggcttcttttcctcgccgtcgattccacgtcgaaccaggggctcgtgaaaaagctctcttggcagaagatgcaactctgaaaccgttcaaatcgtacaagaagagtgtaaaaaagcttagaaaaattgggaatgcccttacaattgttgttgttgcaggatgctgttacgaagtatatgtcagagcttttacaagagaggaagctcagaaact

SEQ ID NO: 43348 - DNA, 406 bp, Glycine max
  Clone ID: LIB3139-059-P1-N1-F1
ggtatatgaacaagtctcactatctttcttggtctgctgtcggtgtttgtgacctcgaaatttcgtgcaccagtgttttgggttgaattctgcttacccttcaagtatttttcagtttcccagaaaaaaatattggtgtggctagtcaaactagagacttggacaattttggttgctattgtgtgcatcttgctatttcttctgaaggagtttgttatgggagggaagagctcaaaagggagtggtaggaggtatgattttggtgcttcttcatcttcaagggataatagctatggtggataccctccgcaatcaccatacacttcttatcaaacacctcagcacccttgtgcatcagcatcagcatcagcttcattttatgactatgcacagccaaaaaggaagt

SEQ ID NO: 43349 - DNA, 407 bp, Glycine max
  Clone ID: LIB3139-059-P1-N1-F10
atacactcccccaatcctttctctcccgaaaccgtacggttacgtaaccgtaggcgatatcagaattcacggcacacacacagtccccactctctacgatgaccggtcaacgcatctcctacggcaaacgctcccactcgcactccgattccgacgccggctccaaaaacaagcgccgcaaccccgcagctgatgactcctcctcctccctcatcaccgccgacgacaccgtcttccgctacctctgccccgtccgcaagattggcagcgtcatcggccgcggcggcgacatcgtcaagcagctccgcgccgacaccaaggccaagatccgcatcggcgacgcgctccccggctgcgacgagcgtgttgtcaccatccacagctcctccgaggagaccaatcacttc

SEQ ID NO: 43350 - DNA, 324 bp, Glycine max
  Clone ID: LIB3139-059-P1-N1-F11
ggcacactgagaggaaccagaagacttcttatagtattactgttcaaggggtggtggatcatagaggggtgttcactgatgtgtgcattggttggcctggttcaatgcctgatgatcaggtgttggaaaaaagtgccctttttcaaagggctaatggggggcttctgaagggggattggattgtgggtagttcagggtaccctttgatggattgggttttggtgccttatagccagcagaatctgacttggactcagcatgctttcaatgagaagattggggaggttcataaggtggctattgatgcttttgctaggttgaaag

SEQ ID NO: 43351 - DNA, 402 bp, Glycine max
  Clone ID: LIB3139-059-P1-N1-F12
ggtcctttgaggctgaaattagtggaagcaagatgggggatcatcatgattcatcatccatagggtcagaaatattgatgagcaataatattatagaagagtgtgcatctcaatcatggaataataacatgggagagattgatggagtggagtgttgggctaattcatcatcaagtgaatttggggtggagtgggtagatatggattttgtgcaatcatccccatttgaagaaaggagctggagtgttgacccttgtggagatgagtatgctatcgcaaacaacttgaaagggtatgatgggtttgccttgggagaacatggatgcaattccttgtggcaagacatggcatgcaattgatcatgccttgctaatttatgatattgttcatgtaaaatcatgt

SEQ ID NO: 43352 - DNA, 412 bp, Glycine max
  Clone ID: LIB3139-059-P1-N1-F2
ggaatattcgacaggtagagtttcttcaatggctcctaaagttgataagaagaatgatccaaaggcccaggccttgaagactgctaaggcagttaagtcaggtgctacctttaagaagaaggtaaagaagatccgaacttctgtcactttccacaggccgaagaccttgaagaaggacaggaaccccaagtaccctcgcattagcgccccgccgaggaacaagcttgatcattatcagatcctgaaataccccctcaccactgagtctgccatgaagaagattgaggacaacaacactttggttttcattgtcgacctgcgtgccgacaagaagaagatcaaggatgcggtgaagaaaatgtatgacatccaggccaaaaaagtgaacaccctgatcaggcctgatggcacc

SEQ ID NO: 43353 - DNA, 381 bp, Glycine max
  Clone ID: LIB3139-059-P1-N1-F4
aagcagacatcatgcaaccaattggaacagttctaaaatctgcaggtctggaagaggtaatatctgtattgcaagttgtggtccagttggctttcacatctgatactgtggctgagaagatgttgaccaacgatattttaaaatcattgaaaaacttatgtgcccataaagatccagaggtacaaaggctagctctgttagctgttgggaatttggccttcagtctggaaaatcgtcgcatacttgtttcttctgaaagcttacgagaacttctcttacgtctagctgttgcaactgagccacgtgtgtataaagctgcagctcgtgctttggcaattcttggagaaaatgaaaacctgaggcgtgcaataaaaggaagac

SEQ ID NO: 43354 - DNA, 395 bp, Glycine max
  Clone ID: LIB3139-059-P1-N1-F5
tgatatgggaagaagtgtcactacagttcctgaaactgatatccaaaaaactttgcttgataatgttacaggaagcagagacagtgaaaacaatttgcttgacactgttacaggaggcagcgacagaaaatctcaagtacgatcaaataaaccccagagaaagaaagaggtcaaagtacctatgcggttatcaaagcgacttgctggccttgaacctgaggtagcgcctgctgaaagagctattgaatattcgactagaaaatcatgcaaagaagaaccaactgcgactgctactttaactaatggagtgtctgaccatcatgatgctggggaagaaactaagcttactccgcaagcttctgacagtttgaaaacagaagtactaggagaatcat

SEQ ID NO: 43355 - DNA, 99 bp, Glycine max
  Clone ID: LIB3139-059-P1-N1-F6
gtagttgcgtataatgtgacagtctcaaagggcactttccaccaacacagtgctatgaaccatggtgattggcgatctattgcactaaacaatgactga

SEQ ID NO: 43356 - DNA, 409 bp, Glycine max
  Clone ID: LIB3139-059-P1-N1-F7
gtcggagctgtctgtgcaaatttgcgttgttcttcgcggcacacctcactcactgaacggtaagtatggcggacaaggctgttacaatccgaacccgaaagttcatgaccaacaggcttctttccaggaagcagtttgtcgttgatgtccttcatccagggagggcaaatgtttccaaggcttaacttaaggagaagctggctaggatgtatgaagtgaaagaccctaatactgtatttgtcttcaaattccgaacacattttggaggtggcaaatccactggatttggtttgatttatgatacagtggagaatgccaagaagtatgagcccaaatacaggcttatcaggaacggccttgacaccaaggtagaaaagtcaaggaagcaaatgaaggagagaaagaatag

SEQ ID NO: 43357 - DNA, 409 bp, Glycine max
  Clone ID: LIB3139-059-P1-N1-F8
gaaacagtgtttcatcatttgggtttcgcagaagagagagaaacgcatttctagagagagaaactcgcagtcgcagacatgtcttccttcgatgccttcgccgacgacttgaacgtcaactcttcttccactcgccagcacgacgatgacgaggacaacttctctggctacggcggctactcctccttcaccggaggattctccgccgacggagatgtcgccgtcgatcactccgccgacgcgtcgccggagatctacggcttcactgattcgaatcccgcttactctcagtctcccttcgaatcggccaccgtagagaacgaaaacggaaacggatacggcgacagcgacggtgtttttgtctccgacagtacggtgcttcctccgccgacggagatggagccggagg

SEQ ID NO: 43358 - DNA, 407 bp, Glycine max
  Clone ID: LIB3139-059-P1-N1-F9
agctggtgcagtttggttagattcaggaaaaagttgtgttgaaattttcacatgaggaatttcttacagcttggtcaactcatgtgcgtcccgcaacgactctgttggctgatgggtgcccatatttgtatgctatggtgcatgatagttcagtgtctacaataccaggtgattttgtcattggtgttaagttgacaaccataaacaatatgtgtgcatatgggctcaatcctggtatttcaggttctcgtcttttgggcaccattcctcagtccatttcacagcaaactgtttggaatcaaatggcaacagtgagaacaccattgaattttgattctagcaagcagagcttttgtcaattttctattgaccttctcggtggaggaattttagtggacaaaactggg

SEQ ID NO: 43359 - DNA, 233 bp, Glycine max
  Clone ID: LIB3139-059-P1-N1-G1
ggtgattaaaaaaagcaaaatggtgaaaatttgctgcattgtagctggatatctggggggtcctactatggcagccattgcacttaagtgcccatccatggaaggggctggcgctgatatgtctaaatgccgcattgcagactggaacagtgaccagctgcctatctatgaacctggccttgatggtggttggaaacaatgccgcggcaagaacctgttatatagcactgatg

SEQ ID NO: 43360 - DNA, 405 bp, Glycine max
  Clone ID: LIB3139-059-P1-N1-G12
caccattatgccaaacatggcatatttcgaattccttccccacgatcctaagcctggctccaccagttcaaaactagtggagttggcggacgttgaagtggggaaggaatacgaactggtgatcacaacctatgcgggactctatcggtaccgtgtgggcgacatcctccgagtcaccggtttccacaactcggcaccacaattccacttcgtgcgcaggaagaacgtgttgctgagcattgactcagacaaaacagacgagtcagagttgcaaaaggggattgagaatgcctcaaagcttttatcagagttcaatacaagcgttgtggagtacacgagttatgcagacacaacaacgattccgggtcactacgtgatttattgggaattgttgaccaaggactc

SEQ ID NO: 43361 - DNA, 412 bp, Glycine max
  Clone ID: LIB3139-059-P1-N1-G2
cggctcgagctcgagccgaatcgtctcgagcggctcgagtttggaaaatggcagtgagagtaacatatggcatgcaactgaaagccatttgaatgaatattcttcacaaggtttgcgcactcttgtagttgcctccagggatctttctgatgctgaacttgaggagtggcaaagcaagtatgaagaggcaagcacttcattgactgacagagctactaaactacggcaaacagcagctcttatagaaagcaatttaaagttacttggagcaactggaattgaggacaagctacaagagggtgtaccagaagcaattgaggctctacggcaagctggaatcaaggtctgggttcttactggtgataagcaagagacggcaatttcaattggtctttcttgcaaacttcttagt

SEQ ID NO: 43362 - DNA, 238 bp, Glycine max
  Clone ID: LIB3139-059-P1-N1-G3
cccatacgttatcacttttgtgtcaaccttgctcaaccaaatttgtacgtttctaaagcacaagggggggagaaatcatattgatggacctactgctgaaggaaaaaacactatccaagctgatccctttgagcaacaaactctgaaccaaatcatctacagtttgtttagctcaaatgactccccatcctgaaagagaaaaaacagccctttcaaaatttcattgtcatccatcatc

SEQ ID NO: 43363 - DNA, 222 bp, Glycine max
  Clone ID: LIB3139-059-P1-N1-G6
acacgagagaagagctatgacgcacgctgccctaagactcgaaattcgggttcgaggaaagaagctgttgaatttcgtcgaataagcaggttctgaaatttgtgaagctttcatctcagacagggtgtaataagaaatgatagatataagtactctcaatgctgcacagattactgtgctgggatccgcgttttgtgttatgctttccatgcatttcacgac

SEQ ID NO: 43364 - DNA, 399 bp, Glycine max
  Clone ID: LIB3139-059-P1-N1-G7
cgaactcaaaccgtttaagcttctccgagttttgacctacaacactctcgaatcccctcttgtgtgttgtagccgccccgtgaccatcaatggcggaaactgctgtcgacaaatcccaatctctcgctgaggaatattatgtgaaggataagcaaacagctgtagttgaaaaacctgttgaggtcaaagaagttgaaaacccagaggaggctgcttctgaggaacccgttgctgagaaaactgtggaagaaacaactcctgttgcccctgcagttgctcaggaaagcagtgaagtcacccctcctcctgctgaagaaagcactgaagagcaaagtagtggaaatgttgaagaaaactctggcaatgaagatgcagctgaagagacccctgaaattaagc

SEQ ID NO: 43365 - DNA, 381 bp, Glycine max
  Clone ID: LIB3139-059-P1-N1-G8
cggctacgttggcaccatcatgtaaacctcgttgagccaaatttggcacgttacttaagctccatcggtggtgccaccatatttatctagctactgctaaaaaaaaatacatcaaacgaggctgatttctgcaagcaacaaactctgtaccaaatcatctacagctagattagctcaaataattctcaattcggaaacgaaaaaaacagtcctttccaaaattccattgtcatccatcatcaagaagatacaaatcatcacaggcaaagtgctgctattactagaattgcattacacaggcttaagggcagctatgaagatgtaccaaaaacaaaaagtggttcaattagagccttagacatgaagtagagacagtgtgat

SEQ ID NO: 43366 - DNA, 360 bp, Glycine max
  Clone ID: LIB3139-059-P1-N1-G9
cacaggccgaaggagaaatggggctgacattcacaaagcttttcagtcggcttttcgcgaagaaggaaatgcgaattctgatggttggtcttgatgctgctggtaagaccactatcctgtacaagctcaagctcggagagatcgttaccacaattcctaccatcgggttcaatggtcttgtattccacagtctcaacattgaacccgatggtaggaattgtggttaacgtctctcagtgcgtgagccaagaccggtaagtgaactgttttgcatcatcatgaccaaccctcggggggggcgtttattatttccacattgcctacagtaatgatttgatttttttagcttcattttttttt

SEQ ID NO: 43367 - DNA, 316 bp, Glycine max
  Clone ID: LIB3139-059-P1-N1-H10
atcaattcggatggtgatcttgaagtttatactttggctgttgagaaggttccaaaggaatggaagctcgatcctgattgggatggagagacaaaacatccacatgagttgagtcatttgagaaggtttcccagcaaatggagggcagccattgcccaccaggatccagttcgtacggtcaaaattgttgaccatttcgttattggacggacagataagaatgactgtgctactactgcacctaacggaccagttcaatgatttgttgatttggtttggtttatcctgtttgtaacattatttaggaagcaatttg

SEQ ID NO: 43368 - DNA, 389 bp, Glycine max
  Clone ID: LIB3139-059-P1-N1-H11
ctcgagccgttaggcttcagcaggtcttggctgactttttacttatttccatcaatttcactccaaatggaggtcaggttgttgtagcaggctctctaaccaaagaacagttaggcaaatctgtccatcttgttaagttagagctcagcataacacatggtgggagtggggtaccagaagtgttactgaatcagatgttcggaaacaatgggctagaatccgaggagggtattagcctactgataagcagaaagctgctgaagctgatgaatggagatgttcgctatctaaaggaagcaggcaaatcagcttttatcctctctgctgaacttgctgcagcccataatttgaaagcttaaaagttttggaaaaaagaataaaagatgatg

SEQ ID NO: 43369 - DNA, 410 bp, Glycine max
  Clone ID: LIB3139-059-P1-N1-H2
gtgttaaataggtggatgggaaaactgactttccctcagggcacttcccgaagtgttaagagaatgcctctttctatagggggaggagctggtgcaaagaatgctattctcatgaatatgccaaatgctgttctttcaatgtggagatattttgttggagatctcgtctttgaagtttctaagatgacttctccctacattaaatgtacagtctctttcttcatagcatttggaaatttggctgatgacaccatcaattttgaggcttttccccacaagctggtgcagtttggagagattcaggaaaaagttgtgttgaaattttcacaagaggaatttcttacagcttggtcaactcaagtgcgtcccgcaacgactctgttggctgatgggtgcccatatttgtatgc

SEQ ID NO: 43370 - DNA, 186 bp, Glycine max
  Clone ID: LIB3139-059-P1-N1-H4
ctctgaacgcgatcttgcatggcacgccaaggacgcaactaactagctaggtatgtatttttcatgcggcggagaccattcaaaatactatgctacatctgcgccagaacaacccgctatgacaaccctaatcacacatcaagttctacatcaaaggcacgcgaatacaaaaactcaacacggaca

SEQ ID NO: 43371 - DNA, 408 bp, Glycine max
  Clone ID: LIB3139-059-P1-N1-H8
attgaaatggtaaagggtctttgtccaaatgttgtggggattgcagagccagccaaagaaggatatcaacttactctgaagcttaaccttaatcagattccacaaaacaaagactatgataaggtcattaaggagatttcaacagtacattcagtaattctgagttcacagctgaaagaaatattgtggaacgtgaattttgatgatgcacttcaggggatgtacaaacccatcaaactagtctaccatccaaaagaccatttctttctcattaggcagccacaaagaatcatagcggtattcccaattcgttttagagaaaagtcagatgtgatcattgcaacggctttctttcaagagcttgtggattgtgggagttcagataaatgggccaaggtaccaccttgc

SEQ ID NO: 43372 - DNA, 326 bp, Glycine max
  Clone ID: LIB3139-059-P1-N1-H9
gacacgcgagcatgcatgcacgccgactctagcggatcctctcgggtgaagtgcaattgcacatgctctagaaatagcggatgcaaaaatggacatgtgtgaatcggaagaatgggttaacattactaagcctattcgcaatccaaaagaaatgaaatcggcaaaactaccagaatatcaattccacattgaaaagacataaggaggtaaacatgaacatatatgaactggaagaattacgcatacttattacatctatccggaaaccaaaggaaaggaagaacggaaatcctcgacgaataacaagttcacattatgaagaaata

SEQ ID NO: 43373 - DNA, 396 bp, Glycine max
  Clone ID: LIB3139-060-P1-N1-A1
gcaaagccaaagtgatcgtgtggcagagcagcgagagagaaagctcttcttgttctgatgtcggatcatcttccgcgagaagtggtaaccgacatcctctcccggttaccggcgaaatccctactccgattccggtcaacctcaaagtcatggaagtcactaatcgacagccagcacttcaactcggtccatctcagcagatccctgagcttaacctccaacaccaccctcatcctccgcctcgactctgatctataccagacaaatttcccaaccctagaccctcccctttttcttaaccaccctcttatgtgttacagcaacaacatcactcttctcggttcctgcaacggactcctctgtatattcaacgtcgccgacgacatcgccttttgg

SEQ ID NO: 43374 - DNA, 455 bp, Glycine max
  unsure at all n locations
  Clone ID: LIB3139-060-P1-N1-A10
agcaaacataacttgcagtaatggcttcaatgaataaccaaaaagaaattgagctctttgagggccaatctcttctgtacatgcagctatatgggcacctaagacctatgtgtcttaagtgggctgttcaactaggtattccagacataatacagaaccatgccaaacccatttctctttctgacttggtctctactcttcaaattccaccagctaacgctgcttttgtgcagcggttcatgcgcttcttggcacacaatggaatctttgagatccatgagagccaagaagatcatgaactaacatatgctctaacccctgcatcaaagcttcttgtcaatagtagtgatcattgtctatctccaatggttctagcgtttaccgatccacttcggaacgttaaataccatcacttgngggaatggattcgtggggaggacccctcagtatttgag

SEQ ID NO: 43375 - DNA, 455 bp, Glycine max
  Clone ID: LIB3139-060-P1-N1-A11
tcacaccttgagagagagagatagatggattgagaggcaccctttaacgcttgcttttactactgagcaacagaaggtggccctccatctatatttcttattttttgtacctttccttctttcattaccatttgctctttcttcctttcaaacataagtgaggtgattctgtgtttttttttttaataggatcattgaggccaaaccccatctcaatcaaccctttatttctctcttaatgccttgaattttctatagcctttctgtgcaaaatttgcatcccttaattcttgtagaattgatgtctggtttgtacaatcagatttcctcaccttcaacagcaagggccaattcaccaaacataaacatgagaagcaattttgaggctgaaagtcagtacttaacggagctgctagcagaacaccagaagcttgggcctttcatgcaagtgctac

SEQ ID NO: 43376 - DNA, 457 bp, Glycine max
  Clone ID: LIB3139-060-P1-N1-A12
gggcaacctcacggagctcaccgaattggaattctccgacaatttcctcaccggcgattttcccgcggagattgtgaaccttcggaagctatggcagctggtgttcttcaacaactccttcacaggaaagattccaattgggttgagaaacctcacgagacttgagtttttggatgggtcaatgaataagctggaaggtgatttgtctgaattgaagtacttgaccaatcttgtttctctgcaattctttgagaacaatttgtcgggggagattccggttgagataggcgagttcaaacgcctcgaggctctgtctttgtacaggaacagattgataggtcctattcctcagaaggttggttcctgggcagagtttgcttacatcgacgtgtcggagaatttcttgacggggacgattccgccggatatgtgtaaaaagggagccatgtgggcgctt

SEQ ID NO: 43377 - DNA, 384 bp, Glycine max
  Clone ID: LIB3139-060-P1-N1-A3
gaatttctggttttctttctgagtcattattaactagccacctcggatcactcacaatggatgaaagtgaagatggtaggaaagaaacttcatgaatgaaagtagtgcagacagtttcagagcgaactgcgacacctgtgcttaatggtgatatacctgatgatatctgccttaaggattctcttaatgctgcccgtaatgctacacacgctgctgatcgtatatatcaagtattcagaatgcagtcatttcagaggaagcagctagctctgtctgaagatgatgacattggattgtcagatcaacaagctctttctctcctagcttataaggcgtgcagatctggtcaaggagaggagtgagccaatgctgttgcaatacaaa

SEQ ID NO: 43378 - DNA, 445 bp, Glycine max
  Clone ID: LIB3139-060-P1-N1-A5
caaaaaatatcatgcctttttggcctctgaagcagtcatcaagcagattcctcgtcttttgggacctggtctcaacaaggcagggaagttccctacgcttgtgactcaccaagaatctctcgagtcaaaggttaatgagaccaaggccatggtgaagttccagcttaagaaggtgctttgcatgggagtagccgtggggaatgttagcatggaggaaaagcaaatcttccaaaatgtacaactgagtgttaacttccttgtctctttgttgaaaaagaattggcagaacgttcgctgcctgtatctgaagagtaccatggggaaatcgtaccgtgtcttttgaggggttgttcttaaattcagtgaatttctgatcgcacctaatatattgtctttcgataggtttgacagaatttttcatcggtctacagctttggtggatgag

SEQ ID NO: 43379 - DNA, 340 bp, Glycine max
  Clone ID: LIB3139-060-P1-N1-A8
ggccttatgatctactttgacttgcgtttaaaattatggttccgagcaaacacatcaccaacttcatcaccaacactaataacaggattagcgttatgggtctcttgctttctaggaattggcctagcaaactcatataccctgttctttacatcaataaggtttcaaaggatgatgatcccgcaccaatatggagaacatggtggttgtgggatatgctagactggcgggcgtttgcagcgctatgacaaatgctgtggacatgttgtgggatgcattccttccagatgcaagaacaatgaggcacaggtttaggtattagaggttcttgagatttgtg

SEQ ID NO: 43380 - DNA, 461 bp, Glycine max
  Clone ID: LIB3139-060-P1-N1-A9
atccgatcctctgtcctctcgaagctttcatcgttcaacatattctcaccatctcagtcatgggcctgctatcttgttttaggtctaccgtcctgagaaaatgttccaaaggaagctctggcatgtcaagattcctgtatacgaacaattttcaacgaaacttgatttcgtctggtggcaatgaatcgtattatgggtattttaacaggagatcatacacttcactttatatgggaactggaactgtgggtgggattacaagtgctagaatcagggtgccaaatgtaggatgtgaaggattcatgtgctcaagtcatctgtcaatcactcaaagaaattcaagattgatccattctactagcaagattgttccaaattctgaaattcagaatataactactgagatggtgaagacaccagaggtctcaagatggatggatcaagtcattcctaccatagcc

SEQ ID NO: 43381 - DNA, 461 bp, Glycine max
  Clone ID: LIB3139-060-P1-N1-B1
cgagaatatgccaagacatgcaatgacattcaacacttgcgtgcggagataagggactttgatgcatttgatctacggaggcggcttccagttgtagttagcaaattatacaaggcaataaattccaatggaggtgtaacatatatacattgcactgctggacttggaagagctccagctgttgcgttggcttatatgttttgggttttgggttataaacttaacgaggctcatacactacttcagagcaaaaggtcatgctttccaaaactggatgccattaaaagtgcaacagctgatattcttacaggcctcagtaagaagtctgtcactttgtcatgggaaggcagcaattgctctaccgtggaaatttcaggacttgatattggatgggggcaggaattcagaccaaatcggagaaaattaatatatctgtagaaattggcagtttggtcccgggc

SEQ ID NO: 43382 - DNA, 442 bp, Glycine max
  Clone ID: LIB3139-060-P1-N1-B10
ggagatcaatatgggcgaaggaagaattgaagagacacacaaaaatattatttgctcaagtgaatggagccactccttatgacaatattatttgtggttgtttcattataaccatttgatcagtccttggtgcgtcattacaagattagtgtggtcttaaaaaatactactaagctatgcttcacaaaatgattggggatggtgaatgcacaatgtgcagatcctactatctatgcaagagaggatgatacagttattgaaaaggtgactaaccacgtgaagaacaatattacaatccactggcatggaatcaaacaacttcaaactgggtggtctgatgggccaggatatgttacacaatgttcgaatgagccagggcagatctatgtctacaacttgaccatcaatggtcaaagaggcacacttatatggcatgcacaca

SEQ ID NO: 43383 - DNA, 129 bp, Glycine max
  Clone ID: LIB3139-060-P1-N1-B11
attgaattaaacaaacgaacaagcgaaagaaaattaggcatgaccctcttgttgagtatgctctgcctatctgaaaatttccacacctcttttaattgtcgtaatgatgtgtgaagtgtgtgttatttt

SEQ ID NO: 43384 - DNA, 420 bp, Glycine max
  Clone ID: LIB3139-060-P1-N1-B12
gtcaattgaaagggagattaactcaatcaatgacaaccctttgattgatgtgtcaaggaacaaggcacttcatggtggtaacttccaaggaactcctattggagtcttcatggataatacacgtttggctcttgcttcaattggtaaactcatgtttgcttaattctctgagcttggcaatgattattacaacaatgggttggcttcaaatcttactggcagcagaaaccccaacttggattattgattcaagggagctgaaattgccatggcatcttattgtgtctgaactttaatatttggcgaattcggtgacaagccacgtgccaaagcgcggagcaacacaaccaagatgtgaactctctggggctgatttcatcaaggaagactcatgaggctattgagatcctcaagctcatg

SEQ ID NO: 43385 - DNA, 465 bp, Glycine max
  Clone ID: LIB3139-060-P1-N1-B2
gagcaagatggcagaaatgataaacagtctttgtggtggtgatgaaaaattgatgcgtgaaaggacgcacctgctgttggcttgttgttcaaggatggcaatttgtaagaaagatgtttggagagttgaatgtggaatcccttctggatttccgctcacagttatttgcaatagcatttttaatgagatgctcattagatatagctatgaaaaattactgcgccaggctaaagctccaagtatgtttttacaatccttcaaaaattttgtttctttgtgtgtgtatggtgatgataacttaattagtgttcatgaatatgtcaagccttactttagtggttctaaattgaaaagctttctagctggtcataatatcaccattactgatggtattgacaaaactagtgcaactttgcaatttaaaaagttagcagattgtgattttctcaagagaaactttaagca

SEQ ID NO: 43386 - DNA, 416 bp, Glycine max
  Clone ID: LIB3139-060-P1-N1-B3
gaagatggccaccgttccagggcagctcgtgtgggagatcgtgaagaaaaacaactcctttttggtcaagcagttctgaagggggacccagagcgtcgaattcagcagagagagcaacaatctctacaacctcaattcgttcaagtactctggtttggcaaacaagaaaactgttacggtacagcctgagggtaaagatcaggctgtgttgttggctacaacaaagacaaagaagcaaaacaagcctgctgcattgcttgacaaatctgtgatgaagaaggagttcatgaggatggcaaaggctgttgaaaatcaagtggcagaaaattactacaggcccgatctcaagaaggccgcccttgcaagggtgagtgctgttcacagaaacctcaaagttcccaagtctggtgtcaaga

SEQ ID NO: 43387 - DNA, 467 bp, Glycine max
  Clone ID: LIB3139-060-P1-N1-B5
gcatgacgtccattcccccctacctaagttcgaatttcggttcgaggggttttgttgcatgaagtttgtaatttctgaagcgaaccggatttaattggaatatcatttgtgtcactggatggactgccaccccaatgcaggatgttcaggttacaatggattggtttatttcctctcaggaatgtgttcccaggacctattgtgttttaaatccacaaaatccttttgtgttaaataggtggatgggaaaactgactttccctcacggcacttcccgaagtgttaagagaatgcctatttctatagggggaggagctggtgcaaagaatgctattctcatgaatatgccaaatgctgctctttcaatgtggagatattttgtgggagatctcggctttgaagtttctaagatgacttctccctacattaaatgtacagactctttcttcatagcatttggaaatttg

SEQ ID NO: 43388 - DNA, 435 bp, Glycine max
  unsure at all n locations
  Clone ID: LIB3139-060-P1-N1-B6
tgaccacaaaattgaattcaaagaaggtcctgctctcccagttcttgatgaaatggttaaagatgagaagaaccatgggagctatgacttcatctttgtggacgcagacaaggacaactacctcaactaccacaagaggttgatagagcttgtcaaagttgggggagtgatcgggtacgacaacaccctatggaacggctctgtggtggcacccccagatgctcctctcaggaagtacgttagatactacagggacttcgtgctcgagctcaacaaggcactcgctgtggaccccaggatcgagatttgcatgctcccggttggtgatggaatcactatatgccgtcggatcaagtgattctgattttctgataatcacacaatcgtggnaccaagaccaccgtgcttcttctgcaccctagtgatgattggtca

SEQ ID NO: 43389 - DNA, 395 bp, Glycine max
  unsure at all n locations
  Clone ID: LIB3139-060-P1-N1-B7
ggcgagactcggaacgagtcgttattgactcgggcggttgcggcggtcttcgccttcgtgagacacgccgagtttgagatcctcttctttcttttctttttcatcgcttatcttctattcaaagacatcacatcaaggcctgactataatcaaatgttcgtaaagaagcccggtggaccagaattttggcctttttagaagagttggtgattggtcaggnttgatgtctttgtccataggggtattcttagcgcaccatgcaatgatttgaggatttccttttggatttgtatctaaatgtgtaactttatagccaaaacatgagaaactataaaatttgtacaatgttccgttccaattagttatagcaaaatcaagtataaaaggcttacagc

SEQ ID NO: 43390 - DNA, 462 bp, Glycine max
  unsure at all n locations
  Clone ID: LIB3139-060-P1-N1-B8
aaacacaacaacactctctcttctcgctcttggcttttcgctcttcactcactctcattcattcatttccaccgttcatggatccagtaagcgtgtggggtaacacgcccttggcgacggtggatcccgagatccatgacctcatcgagaaggagaagcgccgtcaatgccgcggaatcgagctcatcgcctccgagaacttcacctccttcgccgtcatcgaggccctcggcagcgctctcacgaacaaatactccgagggcatgccgggcaaccgctactacggcggcaatgaatacatcgaccagatcgaaaacctctgccgctcacgcgccctccaagccttccacctcgacgcccaatcctggggcgtcaacgtccagccctactccggctccccggccaacttcgccgnctacaccgncgtnctgaacctccacgaccgcatcatggggctagatc

SEQ ID NO: 43391 - DNA, 287 bp, Glycine max
  Clone ID: LIB3139-060-P1-N1-B9
ctccagtgttgggaaaggaagcaacaattgagcagcttcttcctattttcctttcccttttgaaggatgaatttcctgacgtacgcctaaacattatcagcaagcttgatcaagtgaatcaggttataggaatcgatctgttatctcagtctttgttaccagccattgttgagcttgctgaggataggcattggagggtccggcttgcaattatagaatatatacccttattggcaagtcaattggggggtaggttttttgatgacaaacttggtgctctttgcatg

SEQ ID NO: 43392 - DNA, 450 bp, Glycine max
  Clone ID: LIB3139-060-P1-N1-C1
tattagtgcaggggaaaatcatgtagttcaaatacccttaatggcacaggaggaaattctgtcttctagtgcaagtgatttcagaactgcaatggtgagtaaaaatagcaaacctcaagctactgcaatgcatgtgggagctatagaaattatcattgatagtttcgcaagtcctgattgcaacatagttggtgcaatgcttttggttgatacttatcataccaatcctgaaaatgcagttcgtagtatttttgttgcgcctttcagaggcggaaggcccattcgggtggttacatttccgaataccattgtgcagattgaaccagacatgaattcaaggtttcagcttttgagtaccactaccaatggtgattttgttcaagggaaagatctcgcaatggttaaagttaatgtagcatgtgctgctgttggcttgacatcaagttacac

SEQ ID NO: 43393 - DNA, 439 bp, Glycine max
  Clone ID: LIB3139-060-P1-N1-C10
atttgaggccaggcaagccccactcaaccaccacacctctcctcgttcacgctacccctttctgctcttcttctacctttcaagttttaaaagtataaagatggcagagacattcctatttacctcagagtcggtgaacgagggacaccctgacaagctctgcgaccaaatctccgatgctgtcctcgacgcttgcctcgagcaggacccagacagcaaagttgcctgcgaaacatgcaccaaaaccaacttggtcatggtcttcggagaaatcacgaccaaggccaacgttgactacgagaagatagtgcgtgacacctgcaggaacatcggcttcgtctcaaatgatgtgggactggatgccgacaactgcaaggtcctcgtcaacattgagcagcagagccctgatattgctcaaggtgtacacggccaccttacc

SEQ ID NO: 43394 - DNA, 440 bp, Glycine max
  Clone ID: LIB3139-060-P1-N1-C11
ctgatgctcaaattttgatggttccagggcgcagattcatagctgatggacattttttcaaaaatgtgactcagaaagtgcgagtccaaattgttacatctgaaaagagttactggcatgtgtatgatcctgacaagtttcagatgtttgacaacagtgaaataggtctttattctaatcccactttggaagatatcccacattcagcttgggaccttttttgctgggacagtgagaaaactttgccaaataatttttctgcagaattgctctcttgcaaattggatactgttactggccaatattatcctgagtgggctccaattaattgtcgagttcatcgacaaccaattcacatcactgaaggaaattatgtcagaaagcaagatgtcagcattgaatatgatgcatgtacaattccaaatgattgtggttcattg

SEQ ID NO: 43395 - DNA, 443 bp, Glycine max
  Clone ID: LIB3139-060-P1-N1-C12
cttgtgttggctaacacacaagaattctttgatggaaattttccagtggattcttggttaccaatttttgtgaattgtctttatcctgtaagtcaattacctccagaagctgtcgttgtaaatgttacatgtggtagtggacgtgtggtttacccaccactgcttggattagttctgcagtttacaatcgctcctcagatatcaacaaaaagattcgcacagtacttgggaaaggtaagaaaatcgattttcttactagagtagatccttttccagtaactttactggctgttctttctggcgttaacaatgaaattctgagttctaacgccactaatcctatgctgacacgacttcttgagaactgtatgattctcaaatatctggttgacgagtgtacttttgcatttgtcaactagcatgtaatgttgtatatacttaaa

SEQ ID NO: 43396 - DNA, 444 bp, Glycine max
  Clone ID: LIB3139-060-P1-N1-C2
attggtttaaatccacaaaatccttttgtgttaaataggtggatgggaaaactgactttccctcagggcacttcccgaagtgttaagagaatgcctctttctatagggggaggagctggtgcaaagaatgctattctcatgaatatgccaaatgctgttctttcaatgtggagatattttgttggagatctcgtctttgaagtttctaagatgacttctccctacattaaatgtacagtctctttcttcatagcatttggaaatttggctgatgacaccatcaattttgaggcttttccccacaagctggtgcagtttggagagattcacgaaaaagttgtgttgaaattttcacaagacgaatttcttacagcttggtcaactcaggtgcgtcccgcaacgactctgttggctgatgggtgcccatatttgtatgctatggtg

SEQ ID NO: 43397 - DNA, 462 bp, Glycine max
  Clone ID: LIB3139-060-P1-N1-C3
cggctcgagcggctcgagcggctcgagactagttctaggaggagctggtgcaaagaatgctattctcatgaatatgccaaatgctgttctttcaatgtggagatattttgttggagatctcgtctttgaagtttctaagatgacttctccctacattaaatgtacagtctctttcttcatagcatttggaaatttggctgatgacaccatcaattttgaggcttttccccacaagctggtgcagtttggagagattcaggaaaaagttgtgttgaaattttcacaagaggaatttcttacagcttggtcaactcaagtgcgtcccgcaacgactctgttggctgatgggtgcccatatttgtatgctatggtgcatgataggtcagtgtctacaataccaagtgattttgtcattggtggtagttgacaaccataaacaatatgtgtgcatatgggctcaat

SEQ ID NO: 43398 - DNA, 245 bp, Glycine max
  Clone ID: LIB3139-060-P1-N1-C5
ctttaaattgccgaaattacgtgtgaagagtgtgttatttgaaaaaaagggaaacaataaaatacgggggaggggaccaaaaaaacaaaataaaaatgcaaaaaaaatcaaatactacaactaaaaacataaaggggaacaaaccaaaaaaaacctaaaaggggcggaccccaccatacggggctgtcccaccccaaattaattttcgggacccctaattaaattcaaccccgttcccccaaggg

SEQ ID NO: 43399 - DNA, 458 bp, Glycine max
  Clone ID: LIB3139-060-P1-N1-C6
atcaaaagtccctttgtttactatctatcactaatcagttatcacaaagcaaattcattaagtcttttgccatggcctccaacagctgcttcatcttggcttttttcattgctatttccttctcatgcatggattttggcctagcagctcgccatcttatgcaaacaagtactgcaccaaatttgcctttgccaaaaccaacattgccacctttgccttcacttccaacactgcctcagggcaatgttccacctttgcctacaatcccatctcttccaaccattccaactgttccacaggtcactcttccaccacttgctgccactttacttccaaacttccccacagtcccaaccactattccttccttccccttcttctccccaccaccttcagccaccactccctaaatgaagctactctgcttattggatatataggaactcgtatccttggag

SEQ ID NO: 43400 - DNA, 406 bp, Glycine max
  Clone ID: LIB3139-060-P1-N1-C7
agcttatcttgtcaatctcgtaaatgtgttacgagaattgtatttgcacagtccagaggaagctcgccaattgagaaggaaagctctctctcgtattgaatggctgcaaaaagctgatgtgcctaccatagcacagattgaagagttccattcgatgcagaggatgatgaatgctcctgattcaaatgataatattgatctactgttgagcattgatttgttgggtttacaaggagcaggtaaagcttttccaaacaagattgtttttgatgataagcttgtgttggctaacacacaagaattctttgatggaaattttccagtggattcttggttaccaatttttgtgaattgtctttatccctgaagtcaattaccttcagaagctgtcgtggaaatgttacat

SEQ ID NO: 43401 - DNA, 411 bp, Glycine max
  Clone ID: LIB3139-060-P1-N1-C8
aaatcattacatggtcatagtctacacctaattagccaaacacaccacagcaccaaactagttggctcaattctctttgaatggctttggaggctttgaattcaccaacagcagccaccactcccttccgtggttaccaagaagaggaggaggaggttgaccttcacctacgcgagccttgggccaagagaaaacgctccaaacgacctcgttttgagtcggaggaagagtacttggctctttgcctcatcatgcttgcacaaagcggtaacaacaacaacacccaattaccgtcttcgtcacagtcacacaaagaagcgtcaccgccgctgaaactatcacacaggtgcaccgtttgcaacaaggcttttccttcttaccaagcactcggtggacacaaggccagccacc

SEQ ID NO: 43402 - DNA, 438 bp, Glycine max
  unsure at all n locations
  Clone ID: LIB3139-060-P1-N1-C9
tctattcagacccttccacacttgagattcaacaaggaaggaaatcttcttgctgttactactgcagacaagggattcaaaattcttgctaatgctaatggtcttagatccttgagaacagttgaaactccaggatttgaagcattgaggtcaccaattgaatctgctgcagtcaaggcatctggctcttctgctgttaatgttagtcctgtcaactgtaaagtagaaaagagctcacctgtcgggccttctccaattcttaatggagtcgataccacaggtcaaaatgcggagaaacctagaactgtagaagatggagtagatagagctaaaccatggcagctgtctgaaattgtggatgctgtccaatgtcggttagttaccatgcctgacagtacagattcttncagcaaaggttggtcgactttatatacaaac

SEQ ID NO: 43403 - DNA, 439 bp, Glycine max
  Clone ID: LIB3139-060-P1-N1-D10
caccatgctcacagttctggttctcctctcactccttcttaccatctccacttcccacaatatatcataccctcatttccaacaactcaatgtcaaacaaataatcctcacagaaaccaaactctacccaaacccaacccaaccctccaaacacccccacaataaaaaactcaacagtgccaccgaagcatcttcatcagcaaaatataaactgaagctagttcacagagataaagtccccacctttaacacctaccacgaccaccgaacccgattcaatgcacgaatgcagcgagacaccaaaagggccgcctccctcctccggcgcctcgctgccggaaaacccacctacgccgcggaggcattcgggtcggacgtggtttccggaatggagcaaggaagcggagaatacttcgtgagaatcggagttggaagccca

SEQ ID NO: 43404 - DNA, 435 bp, Glycine max
  unsure at all n locations
  Clone ID: LIB3139-060-P1-N1-D11
cagagaggggctgctgcagttctttactgggtgcaggtgtaatgttcgcaaaatcgatcttcgtttgcctctggacctcaacaacgaccatctcttggcggtggcaaagaatttcgatgggctcacgagcataaggcttcagagctgctgcctcgttaggggggggggccngaaagcnncaccgaancatattcatcagcataatataaactgaacctggttaacagagctaaagtgcccagctttaacacctaccacgaccaccgaacccgatttaatgcacgaatgcagagagacaccaaaagggccgactacctgcttcggcgcctggctgtcggaaaacccacctacgccgcggaggcattcgggtcggacgtggtttccggaatggagcaaggtagcggagaatacttcgggagaatcggagttggaagc

SEQ ID NO: 43405 - DNA, 431 bp, Glycine max
  Clone ID: LIB3139-060-P1-N1-D12
ccttgcgtttgcgagtgaggctgaggttgggtttggaaggcaaaggctggtgttgtcccaatccaagagagaagtaaagtaaagcaaaggaatggcgaacatagacatcgaagggatcttgaagcagcagcctgatgatgggcgcgttccgaagacgaaaatagtgtgtactttgggccccgcttctcgatccgtggaaatgactgagaagcttcttaaggctgggatgaacgttgctcgtttcaatttctctcatggcacccacgactatcatcaggaaaccctcaacaatctcaagactgctatgcacaacactggtatactctgtgccgtcatgcttgacactaaaggacctgagattcggactggttttcttgaagatggaaaacctattcaactttaaggaaggacaagaaatcaccataactact

SEQ ID NO: 43406 - DNA, 233 bp, Glycine max
  Clone ID: LIB3139-060-P1-N1-D2
cgcattttttgtggtaaccggcaccatcggattttatgcatgcttttggttcactaggctcatctactcctcagtcaaaattgattagatatagcagttagcggtttgggtcaatctactatactcttaaagggtgaagacagtttgtgtaaggattttgatattcaggtactagcatgttcaaatgtaacctattctatacaattttgaactgcgacgacagttattctttt

SEQ ID NO: 43407 - DNA, 425 bp, Glycine max
  Clone ID: LIB3139-060-P1-N1-D3
atcactctcacaaacggaaactaaactacgttttttattttttccagacaataatactttaatatttgagtgtgatcgatggcatacccaaacccttatccggctcagccctatccctccgcctccgcgccgatgccggcggttccctccgccgtgatcggcccccagttctgcgcgccgtacccggtggatctggcggtggtgaagaaggtgatgaccatctctgacaacttcgttgtcaccgacgtcaacggcaacatcgtattcaaagttaagggatcgctcgcgaccctccgtgaccgccgcgtcctactcgacgccgccggcaaccccctcgtcacccttcgccggaagataatgacggcacatgatcgatggcaagcttttaggggtgaaagcacagatgccaaagatctaatctttac

SEQ ID NO: 43408 - DNA, 358 bp, Glycine max
  Clone ID: LIB3139-060-P1-N1-D6
gtaaggtacctctatattggggaattactgctgatggctacgtagcatttgccgatgatgcagaattgcttaaaggtgcttgtggcaagtcacttgcttctttccctcaaggatgtttctactctacagctgttggaggattgatgtgctatgagaatcctaaaaataagattactgcagttcctgctaatgaggaggaaatctggggagcgactttcaaggtggaagggccagcagttgtcgtagccagacaatagattttcctttctgctggtgagatgccatatgatgattagtggaggagactgtaaaaggcattcatgagggccaatgtaattaaatggcatgtgcagtgatc

SEQ ID NO: 43409 - DNA, 460 bp, Glycine max
  Clone ID: LIB3139-060-P1-N1-D7
ctcgagccggtttggagtcggcttctactctgtttatctcgtggctgactatgtcgaagtcattagcaagaataatgatgataaacagtatgtatgggaatcaaaagctgatggagcatttgcaatttcagaagatacatggaatgaacctctagggcgtggaactgagattagattacacctcaaggaagaggctggggagtacttgcaggagtctaaactgaaagaattggtgaagagatactctgaatttattaacttccctatctatatttgggcaagcaaagaggttgatggtcgggttcccgctgatgaagatgattccagtgatgaagaggattcatctgaaagcagctccaaggaggaaagcgaagatgaagatgctgataaaagtgaagacgaagaaaaaaagcccaagacaaaaacggtgaaggaaacaacttatgaatgggaactttta

SEQ ID NO: 43410 - DNA, 442 bp, Glycine max
  Clone ID: LIB3139-060-P1-N1-D8
gtttgattgtgttgatgaagaggattactttgaggaagtttctttaagcgcagcacttaatggtgtcgagggtttggactatatacaaagaatatctgtatccacatctgatggatcatctgatgtgctataacacacatatggtgaacctgtcagacggggaactgatattggatatcacctaaaggaaacagctgtggcgtactcgcaggagtctaaacttaacgaattgctgaagagatactctgaatttattaactctactatctatatttgggcaagcaaagaggatgatgtgcaggttcccgctgatgaatatgactccagtgatgaacactatttatctgtaagcagtttcaaggaggaaagcgaagatcaagatgctgataaaaattgagacgaagaaattatgcccaagacaaacacggttgaagaaacaact

SEQ ID NO: 43411 - DNA, 257 bp, Glycine max
  Clone ID: LIB3139-060-P1-N1-D9
ggagtatgcaggaggatgagacgtgggttgaagggtgtaatgggaataataataacggttttggggttgggttggagttcgggaagaacaaggttttggagatgatttttacgaggagtggtgatgtttcggaggtacattttttgaacatttagggcttcgaactgacatttgtttacaccacaaggaagaggcttgggcgtacttgcaggaatttaaactgaaagaattgttgtagagttactctgaatttatta

SEQ ID NO: 43412 - DNA, 447 bp, Glycine max
  Clone ID: LIB3139-060-P1-N1-E1
ggaagtttgaaacaacaaagtattattgcacagttattgatgcgcctggacatagggatttcattaagaatatgattactgggacatcccaagctgactgtgctgttcttatcattgattcgaccactggtggttttgaagctggtatttccaaggatggacagactcgtgaacatgctctgctttcattcacccttggtgtgaaacagatgatttgctgctgtaacaaaatggatgctactacacccaagtattccaaggccaggtatgatgaaattgtgaaggaagtctcttcctacttgaagaaagtaggatacaaccctgacaagattccttttgttcctatctctggttttgagggagacaacatgattgagaggtccacaaaccttgactggtacaagggtccaactctgcttgatgcacttgaccagattagtgagccca

SEQ ID NO: 43413 - DNA, 418 bp, Glycine max
  Clone ID: LIB3139-060-P1-N1-E10
caaatggattccccccactttccttcatttgcatctctcagagttcttctgtttggtttctgcgttataactttgtttcctgagtttgtagtgagcataacaaggcactacacatttaatgtggagtacctgaacgtcactagattgtgccacacaaggaacattctgagtgtgaatgggaaattcccaggacctcgcttggtggcaagggaaggtgatagggttgtggttaaggtggttaaccatgtctcaaacaatgtatccattcattggcatggcatccgtcagataacaactgggtgggctgatggaccagcatatgtgacacagtgccccatacaaaccaaccagtcatacacatacaacttcaccatagttgggcagagagggactctgctttggcatgctcacatatcat

SEQ ID NO: 43414 - DNA, 430 bp, Glycine max
  Clone ID: LIB3139-060-P1-N1-E11
aagaaagtctccattttgtctctaggagaaacacttaagtatttttacttgcttttcgcggacagctctcttattcctttggataaatttgtttttaacacagaagcacatcctataccaatcaatttgaagaaatgagtatattcatcaaaggcattcaacacagttattaaaaatacagaccctgtcaccctggtctcacagagatgcttctttgaagtcagtctctcttacactgaccaagagtacttctggttgtaaaggaattgattagctgggttctcagtgataataaaaactgtgaaatattgttcgaatcatgcaacacatcagcaaacacatttaagagaccgtcaaatgattatgactcattttcttggatttacaatctcatttagaatagggcagttataaatccaagaaaatgaga

SEQ ID NO: 43415 - DNA, 440 bp, Glycine max
  Clone ID: LIB3139-060-P1-N1-E12
tttcattttcacactcaaccctttcttcatccttttatctcgtctctgccaaaacgatgccgtttgctctggagaataacggaggagttacgatcggacggtcctccttcgcttactgcgtcgcgatctgcgatcgtgattttccggaggatgattccgactccagctccgactcctccatcggaaggaacagcatctcgtcggaagattcctccgaccgggaagacgccgtcgaagttgaggttcagagttccttcaaaggccctttggataccatcaatgatctagaggaagatttacccgtcaagaaaggcatatctaagttctatagcggcaaatccaagtccttcacaagcttagcagatgctgcagctgcaagttctatggaagagatagtgaagccagaggatccttatgctaagaaacgcaagaacttaata

SEQ ID NO: 43416 - DNA, 400 bp, Glycine max
  Clone ID: LIB3139-060-P1-N1-E3
caataaatgcatttttttgatatgtttagaacactcaacaagacggtcatggttaaaattctcaaaggaatgggccaaaacctgaaaagaacaaagggttgattaaattctgtgtggttgttgctgcaggctgaaacacaagttgccaccccaagtgtgtgttaatcttaaatttcacaagcaagttgcttttttggagtattatattgtatgaccaaatatttttgcgtattaggactagatatttcgcttctggcggcaatttttctcttctccttctggttctcatcctttgtgttcttctatgtctctcatccttctcgggattttttcatcttaattcctggtggcaccaggaacctgacccaattaacaaacccctttttttctttcttacttt

SEQ ID NO: 43417 - DNA, 324 bp, Glycine max
  Clone ID: LIB3139-060-P1-N1-E6
ggaaaaccatggcggacgtggtgcagtaccgtttggagcgcatggtggacgagctcgacgacctcgagcagcgcggccttttcagccggcgcgagatcgcggagatcgtgaagcagcggcgaaagttcgagtaccggctgaagcgtccgagtcctctgaaggaggatttcttggcctacgtcgagtacgagactcagctcgacgctctccgcaggctccgcaagaagtccgtggcgcgcgaattgatgaagcaaggcaataagaagctcaagaagtctaagtccgatttcgctggattgcttaggattattgacatttacgagc

SEQ ID NO: 43418 - DNA, 446 bp, Glycine max
  Clone ID: LIB3139-060-P1-N1-E7
gccgaaaataaaccagatgttcaattttggtgacaatcttgagggctactacagccctatagatcaggtggaacagaaaccactggttaaccagtatgttaaccgtgccccgtttgctggaaatggagttcaagtctcacctgttactccatctgctgatgttactgcttacttcagctctgagcattcgagcagctcgtttgattattctgacctcggatggggtgaacaagtccccaagacacccgagatctcatccatgctttctgctgctcctttggacggtgaatctcagtttgtgcagggtgctgctgatcagaatcagaagaagaacaacctgctggatatggcatctgtgcaagatgattctgcaaaaactctttctgaggagcttgcagacattgaatcccaactgaagttctttgagaccccttcttttcttgatg

SEQ ID NO: 43419 - DNA, 324 bp, Glycine max
  Clone ID: LIB3139-060-P1-N1-E8
gtcagtgaatattaccataatagaggttgcttaaatgagctaatatctctgatggagagtggattagggttagaacggacacatatgggcatatttactgagttaggagttctgtgctctagataccgccctgggaagcttatggagcatatcaaactatgttcaacccgactcaatatttctaaactcatacaagcttgtgatgaacaacaacattggaaagaactgacctattcgtatatacaatatgatgtgattgataatgctggaactaccatcatgcaccattcacctgaagcatgggatcacatgcaattcaaagat

SEQ ID NO: 43420 - DNA, 170 bp, Glycine max
  Clone ID: LIB3139-060-P1-N1-E9
tctccaaactgcaccagcttggagagattcaggaaaaagttgtgttgaaattttcacaagaggaatttcttacagcttggtcaactcaggtgcgtcccgcaacgactctgttggctgatgggtgcccatatttgtatgctatggtgcatgatagttcagtgtctacaaaa

SEQ ID NO: 43421 - DNA, 339 bp, Glycine max
  Clone ID: LIB3139-060-P1-N1-F1
cttcttcttctttgtgttatccttcacacacctattacaagtcaagccactcaactcacactaacataaaaacatggaactaagcaccatgtttttcctgtgtgcttctcttctcttcattgttctcttcttcaggacactcatcaaaccttactatgtctccaaacgccgtgacttgccactcccacctggctccatgggttggccttacataggagaaacctttcaaatgtattctcaagacccaaatgtcttctttgcctcaaaaataaaaaggtttggctctatgtttaagtcccacattctaggttgtccctgcgtgatgatttccagccccga

SEQ ID NO: 43422 - DNA, 453 bp, Glycine max
  Clone ID: LIB3139-060-P1-N1-F10
caagatgtgggaatctgaagcagcagcaaaagctgctggctctgaaccaagggatgaagttgttgtagacaactctcacactgttgaaaatttggacactcaaaaagttgtcgtcctgggaaaggctccatgtgctactatttcagctaatgatcaaaaggtgcctgctcttcaggattccaagaatgaaccgcctacgcggaagaggccaaagcacatgatagaggaggggcagaaccaggatcactctcaaaatcataacaaagatactggcttgtcaagcattgaccaagacatttgctccacagctgattcttcatcatgtaagaagcagtgtgccagtacaagctcatattcattttcagttccacagcagtgttcctcatcttctaatctgaagtggccatggcaagagaagattgatatggagcagagttcaagcaaagatggagc

SEQ ID NO: 43423 - DNA, 362 bp, Glycine max
  Clone ID: LIB3139-060-P1-N1-F11
ctcgagccgattcggctcgagcggcagcacgcgcaaaaatggtgaagtttctgaaaccaaacaaagccgtcatcgtccttcagggacgctacgccggcaaaaaagccgtgatagtgcgaaccttcgatgaaggcacgcgcgagcgcccctacgggcactgcttggtggcagggataaagaagtaccctgcgaaggtgatcaagaaggattcggccaagaagacggccaagaagtcgcgtgtgaaggcgttcgtgaagctcgtgaactaccagcacctgatgcccacgcgctacacgctcgatgtcgatttgaaagacgcggttacccccgacgtgctccaagccaaggataagaaggttact

SEQ ID NO: 43424 - DNA, 423 bp, Glycine max
  Clone ID: LIB3139-060-P1-N1-F12
ttcctctcttcttcccttcactccctcttgagtcttgtctcattcctctctcaagtttctaactttttcccacattctcaatcaactctccaattcccaagtgggtcccaacccaattcggatttcgtttctggatttccccaattcgaagctctgcacttccccttttgaagtggatttttcgttcctgggaagttcaattccaaattcttggaatgggtctctaacacaagcttccaatttggagagaaagtcccaaacttttgggttcaatttttcagttttcgcaactgggtctgtgatcgtgattttggcctcaacttctaaagttttgggagttaccacaacttcaattgtggttgcatccgctgtaatatcaaaggatcgtgacgaaaccacaactgcaacaaccgcaatttaaaa

SEQ ID NO: 43425 - DNA, 364 bp, Glycine max
  Clone ID: LIB3139-060-P1-N1-F2
ttgagacaaagaatagatcctcaatacaatgaggttcaggctcagatggaaacaaatttgtttaaattgtctcttgatgatgttgaaactcctaaaggttctatgttggatcttaaaatttctcaatctaaaattgcacttcccaagaacacagttggaggaaccattctgcgtagtgatctattggcaaattttttgacagagggcaattttagagcaagtgttgatttgcagcgcactcatcgtattaaaggaatgattaaaatggtggccacagttggtatttctgagaatacaagtatagcattggcctgtgctatgaatagttcttttagggggcgcgccagttctgatatttacacca

SEQ ID NO: 43426 - DNA, 414 bp, Glycine max
  unsure at all n locations
  Clone ID: LIB3139-060-P1-N1-F3
agagaaacaaaaaatggaagaagggagaatggtggctttggaaggaaggaggtgtgagaagtaaacaaacaatgggatgaaggtgcagttccaccaaatgcaacattgcagattactcttgaattagtttcatggaaaactgtttcagaagtaactgatgacaagaaggtcataaagaagatcctcaaggaaggggaaggatatgagcgtccaaatgagggggccattgttaaagtgaaactaattggtaagctacaagatggtaccgcttttttgaaaaagggccatgatgaaaaagaagagctgtttgaattcaaaacagatgaggaacaagttgttgatggacttgatagagctgtattgactatgaaaaanggtgaggttgcgtngttgaccattgcacctgattatgct

SEQ ID NO: 43427 - DNA, 365 bp, Glycine max
  Clone ID: LIB3139-060-P1-N1-F4
ccgcaacgaagtggattcatgtagactcgtttgataagactgtgggagctggaggtgattgttctgatcatcatgtaagctgtgagagatgggcttcacttggagaatgcactaaaaatcctgagtatatgattggatcttcagacgttcctggctattgtaggaaaagctgcaagtcgtgttagaaattttactgaatgcttcccaagatactacatgttatctctgccacgggtttcaaatttcaactagttcttgattattttttcttggactgtaaagtaattctgcattattataatggttatgggtattttctatgtataaaacgatataacaaatacaaattaattttttattatctc

SEQ ID NO: 43428 - DNA, 437 bp, Glycine max
  Clone ID: LIB3139-060-P1-N1-F6
attggaaaaagtttcctttacaaaagcacaatttgttagtggaaaaaccttcaaatatgatataattggtgctggttcacattcttcaggagattttcctgaaaaggaagatcaagaaaaacccaaaaagattgataccagattgagacaaagaatagatcctcaatacaatgaggttcaggctcagatggaaacaaatttgtttaaattgtctcttgatgatgttgaaactcctaaaggttctatgttggatcttaaaatttctcaatctaaaattgcacttcccaagaacacagttggaggaaccattctgcgtagtgatctattggcaaattttttgacagaaggcaattttagagcaagtgttgatttgcagcgcactcatcgtattaaaggaatgattaaaatggtggccacagttggtattcctgagaata

SEQ ID NO: 43429 - DNA, 418 bp, Glycine max
  Clone ID: LIB3139-060-P1-N1-F8
agattgttcaagcattggagatgaagccatgtgtggcatagctagtggctgtaggaatctaaagaaacttcatattcgtcgctgttatgagattgggaacaaggggatcattgctgttggtgagaagtgtaagttgctaacagatcttagcattcgattttgtgatagggttggcgacagagctcttattgctatagctgagggttgttcccttcattatctgaatggtagtggttgccatctaattggagatgctggagtgatagccattgcaagggggtgccctcaactatgttatttggatgtgagtgtattgcaagggtgtgtactacttttttgtgtaataccccccgcaatgtaattttccttcagttcattatagccttcatacgtttcattttacttatgaaacatagtt

SEQ ID NO: 43430 - DNA, 431 bp, Glycine max
  Clone ID: LIB3139-060-P1-N1-G1
ctagtgcaactttgcaatttagaaagttagcagattgtgattttctcaagagaaactttaagcagatgtctaatgttttgtgggtggctcctgaagacaaggcgagtttatggtcacaacttcattatgtttcgtgtaataatctggaaatgcaagaagcttatcttgtcaatctcgtaaatgtgttacgagaactgtatttgcacagtccagaggaagctcgccaattgagaaggaaagctctctctcgtattgaatggctgcaaaaagctgatgtgcctaccatagcacagattgaagagttccattcgatgcagaggatgatgaatgctcctgattcaaatgataatattgatctactgttgagcattgatttggtgggtttacaaggagcaagcaaagcttttccaaacaagattgtttttgatgat

SEQ ID NO: 43431 - DNA, 455 bp, Glycine max
  unsure at all n locations
  Clone ID: LIB3139-060-P1-N1-G10
ggaaaaagttgtgttgtaattttcacaagaggaatttcttacagcttggtcaactcaggtgcgtcccgcaacgactctgttggctgatgggtgcccatatttgtatgctatggtgcatgatagttcagtgtctacaataccaggtgattttgtcattggtgttaagttgacaaccataaacaatatgtgtgcatatgggctcaatcctggtatttcaggttctcgtcttttgggcaccattcctcagtccatttcacagcaaactgtttggaatcaaatggcaacagtgagaacaccattgaattttgattctagcaagcagagcttttgtcaattttctattgaccttctcggtggaggaattttagtggacaaaactggagattggatcacacttatacaaaattctncaattagtaacttgttgagagttgctgcttggaaaaaaggtggtt

SEQ ID NO: 43432 - DNA, 438 bp, Glycine max
  Clone ID: LIB3139-060-P1-N1-G11
ggctttctatgatttctttcttggatgtgagctactgtattaaaattggtccctatgcgcttgagatgattggcaagaactgcaagcttctagaagggttgtgtcgaaacatgcacccattggatactgcggagaagccgcatcaagacgatgaagcatatgcaattgcctccacaatgcctaagctcaagcatcttgaaatggcttatcatcttatcagcacttcgggtgtccttcaaatacttgcaaactgccctaagcttgaatttttggatcaaagggggtggtggggtgtgacacttgaccacatgtttttaaagcagaaatttccaaaactgaaagttttggggcctttggttcttgacacttatgagagtgatggctgggatgatttctcaaatgtgtctgattcatcaaagtacttggcctgggactttg

SEQ ID NO: 43433 - DNA, 292 bp, Glycine max
  Clone ID: LIB3139-060-P1-N1-G12
gccagatcttctgaaaatgcggaatcctctgcatgatctggaatttgtgttttctttcgcttgttcgtttgtttaattcaataaaggaaattaggcatgaccctcttgttgagtatgctctgcctatttgaaaatttccacacctcttttaattgtcgtaatgatgtgtgaagtgtgtgttattttaaaaaaaaaaaaaaaaaaaaaataaaaataaaaaaaaaaaaggaagaacttaaaaaacttggcaagccgccctatacttgaatttttgactcaaacgtggagttgg

SEQ ID NO: 43434 - DNA, 367 bp, Glycine max
  Clone ID: LIB3139-060-P1-N1-G2
tctcttcgcttattgttgcaccttcctcgtaaaagataactcccggtcggcgtgcatagccgccgattgaggcaaaaaaaaaaaaaaacacaaaacacactgtagctcatcacagccaaacgcggcgtcaacgatgacgagcttctgaaattccaacttcgcccttcttctctgtgtatattcttttttatttatttattattatttctattattttttcggtgaggttagctccatgcctagtcccaagagcagccgcagcggccagatcgagagtcaccggaggggaaggtcgtcgtccttccacggccagtgcgcgatgtctgtcggtcagctccaccgtccgaagacggtttccgacctcccg

SEQ ID NO: 43435 - DNA, 447 bp, Glycine max
  Clone ID: LIB3139-060-P1-N1-G4
ccccgtcccaatcttcgtcaactggctccaagtcggcgacgacctcaaccaccgcaacctcaccgatttggccaaaaaattcggtgacatcttcctcctccgcatggggcagcgcaacctcgtcgtggtttcttaccctgagctcgccaaagaggttctccacacgcagggcgtggagttcggctcccgcacccgcaacgtcgtcttcgacatcttcaccggaaagggccaagacatggtcttcaccgtctacggcgagcactggcgcaaaatgcgccgcatcatgaccgtccccttcttcaccaacaaggttgtgcaacaataccgccatggatgggaatcggaagctgccgccgtcgtcgaggacgtcaagaaaaaccccgacgccgacgtctccggcaccgtcatccgccgccgccttcaactcatgatgtacaacaacatgta

SEQ ID NO: 43436 - DNA, 455 bp, Glycine max
  Clone ID: LIB3139-060-P1-N1-G7
gcatcacctagtgaccagaggcctctgcctcatagggtgaatgtcacagttgctggtgtgttaccaccttttcatgttcttaacaaggtgtcacaacttggatttgatgtgaacattggatatggcatgacagagactttaggtcctgtgattgtaagaccatggaaccccaattcggatggcgaacacacaaagctgaattatggtgtttcggagtttaggcaagatgttgatgtgaaggatcctgaaactggtgaaagtactcctcatgatgggaaaaccataggtgaaatcatgttcaaagggaatgctttgatgctggggtaccttaagaattcacaagcaaatgataaggcttttaaggggtggatggataggactggagaccctgctgttagagaaccaaatggttctataactatgaaagatagagccaaaggatgtcatatattcta

SEQ ID NO: 43437 - DNA, 403 bp, Glycine max
  Clone ID: LIB3139-060-P1-N1-G8
attctttagttgtaactgacaaagttttctgagaaaataaggattattattgagagaatggctggctcatcggaagagggacaagtcattagctgccacaccgttgaagaatggaacgatcaactccagaagggcaacgaatccaagaaactcattgttgtggattttactgcttcttggtgtggaccatgccgtttcattgcaccattcttggctgagctggctaagaagttcacaagtgtcatattcctaaaggtggatgtggacgaattaaagagtgtttctcaagattgggctattgaggctatgcccacttttgtgtttgtgaaagaaggaacgcttctggacaaagtggtgggagcaaagaagggtgtggctgcaacagaaaaatacagaaacatgt

SEQ ID NO: 43438 - DNA, 439 bp, Glycine max
  Clone ID: LIB3139-060-P1-N1-G9
ggaaactcccaaggaatggcaactggatctaccttgtgacaaaattcctagtgtcttgactacaactgatgagagattggtaggcacagaacatgagggatatgatccttttcttggtggaattcaaaaatatgccactcccatgatgcccctagatgaagaaattctttctaaggttgcacaagatatggttgaggaatggtttgattgtgttgatgaggaggattcctttgaggaagtttctttaagtgcagcactcaatggtgttgagggtttggactatatggaaagaattcctcttgctacatctgaaggttttcctcatgtgctttcacgcaaaaatggtgaaaaaggcaaaaggagatttgtttctggggatggggaaaagatgacattgattccgggaaccagtgttgaagaggcttacaacaagctaatt

SEQ ID NO: 43439 - DNA, 375 bp, Glycine max
  Clone ID: LIB3139-060-P1-N1-H1
cttagttgtcaagttggaatcaacccatactccatggaatggactggtttggccaatagattactgagtaagggcaacgatattctgtgttgcgattatgctagttttgatggtttgattaccaagcaagttatgagcaagatggcagaaatgataaacagtctttgtggtggtgatggaaaattgatgcgtgaaaggacacacctgctgttggcttgttgttcaaggatggcaatttgtaagaaagatatttggagagttgaatgtggaatccctttctggatttccgctcacagttatttgcaatagcatttttaaatgagatgctcattagatatagctatgaaaaattactgcgccaggcttaaagcttcc

SEQ ID NO: 43440 - DNA, 339 bp, Glycine max
  Clone ID: LIB3139-060-P1-N1-H11
caactcttcaaaagggtgaagaaaaggaaagaaaactctcaaaaaactattatagcaatggcagaacaaaaccaaaaccaaacaactgaagctggaaggcaccaagaggttggtcacaagagccttctccagagtgatgctctttaccagtatattctggagacaagtgtctacccaagagaacctgaatccatgaaagaactgagagagttgacagcaaaacacccatggaacatcatgacaacctctgcagacgaagggcagttcttgaacatgctccttaagctcatcaatgccaagaacaccatggaaattgggtctacactgggtattcacttc

SEQ ID NO: 43441 - DNA, 341 bp, Glycine max
  unsure at all n locations
  Clone ID: LIB3139-060-P1-N1-H3
cttagatccagtctatgaatggcaaagccaagatcttggactcagatatggtcttctattgtcggagtgtgtgttctgaattttgttctgaacttcaagatcgtggcagtagcagatgacactggaagcaacagtattgtatcagaaggtgactgcaagaacacaaattatcagattttcctccctccaccttatcagaatatatcctctaccatatgcaaacctgtttggcattcatacgaattgaggtacaccaagacgggtgacaccacaactatcatattatctgctccatacacntgtggggtgggttgggaattgttttcacgggatgggatgat

SEQ ID NO: 43442 - DNA, 443 bp, Glycine max
  Clone ID: LIB3139-060-P1-N1-H5
ggaccaaattgttacacaagatcactgtttttttagagagagattgagagaggatgtttggttcaaagaaaactcctctgagagatgctaaacctagttctgttggccatgcccataacccctttgattctgatgaagagacaaacgataaaaagtataattcctctaagaagactttgaccaacaccaacccctttgatgatgaagttgatgttgatgccactggccactcctcgtcgtcttcttatggcctttcgtcttcccatcgaaataggtataagagcgatttccgcgactctgggggattggagagtcaatctgtgcaggaattggagaactatgctgtttacaaggctgaagagacaacaaactcagtgaacagctgtttgaagatagcaaaatgaatgagagaggatgctaccaagactttggtgatgctgcac

SEQ ID NO: 43443 - DNA, 365 bp, Glycine max
  unsure at all n locations
  Clone ID: LIB3139-060-P1-N1-H7
gggggaaatggtgggagtggtggaaatgggacgttgatttctcaaattaatgacatggcagcctctgcaacaggagctgatgattctatgcagaagctgaaccaggtcagcaactccattcagaaaaccttgggccttatccatcagctttacctcacagtttctaccttcaatgctgcctttcaaatgcctctcctgcaacgcatcaatggccttgttgcggagcttgacaacatggttaaattggcagagaagtgcaacattcangttcctatggaggttgtcaatttaattgatgatggaaagaatccagacgaatttaccaaagatgttataaacagctgtattgcaaagaatcagatcac

SEQ ID NO: 43444 - DNA, 392 bp, Glycine max
  Clone ID: LIB3139-060-P1-N1-H8
caagataaagatttgtttgagggaaatttttcctttgatattaaatctcgctctagattggaaaaagtttcctctacaaaagcacaatttgttagtggaaaaaccttcaaatatgatataattggtgctggttcacattcttcaggagattttcctgaaaaggaagatcaagaaaaacccaaaaagattgataccagattgagacagagaatagatcctcaatacaatgaggttcaggctcagatggaaacaaatttgtttaaattgtctcttgatgatgttgaaactcctaaaggttctatgttggatcttaaaatttctcaatctaaaattgcacttcccaagaacacagttggaggaaccattctgcgtaggatctattggcaaatttt

SEQ ID NO: 43445 - DNA, 338 bp, Glycine max
  Clone ID: LIB3139-060-P1-N1-H9
gactgttgaatggaccatctttggctgcttctttacaaatggtcagatatgcagtgcaacatctcgccttattgtgcatgaaagtatagcaacagaatttgtgaatagacttgtgcaatgggccaaaaacatcaaaatttcagatccctttgaagaaggttgtaggctaggtcctattgttagtgaaggacagtataaaaaagtgttgaattgtatctcaactgctaagagtgagggtgcaacaattttgattggagggtctcgcccagagcatttgaaaaaggggtactttgttgaaccaaccatcataactgatgtgactacctcgatgcaaattt

SEQ ID NO: 43446 - DNA, 334 bp, Glycine max
  Clone ID: LIB3139-061-P1-N1-A1
caagaatggcacttcgttgcttggtgatgtccctttctgttctctgcactcttggtcttgcgagagaaagccatgccagagacgaagatttttggcatgctgtttggccaaacactcccattccaagttcattgcgagatcttctaaagcctggccctgcaagtgttgaaatcgatgatcaccctatgcaaattgaagaaacacagtacccgaaaaccttcttctataaagaagaccttcatccaggcaaaacaatgaaagtacaattcagcaagcctccctttcaacaaccatggggtgttggtacatggttaaaggaaattaaagacactac

SEQ ID NO: 43447 - DNA, 206 bp, Glycine max
  Clone ID: LIB3139-061-P1-N1-A10
cttaagcttgctactgagttttcacattggataccttacgtatttcgaattcgaagttaatttgcaagatgggttatgaaaaggctcagatcaacattggggtggttggtcatgtggactctgaggaggccaccaccattaacgagcggaacaacgcctgtgtggagaaagaagctaacaggcatgccatatgagggcatgcacgc

SEQ ID NO: 43448 - DNA, 370 bp, Glycine max
  Clone ID: LIB3139-061-P1-N1-A11
tagctatgaaaaattactgcgccaggctagagctccaagtatgtttttacaatccttcaaaaattttgtttctttgtgtgtgtatggtgatgataacttaattagtgttcatgaatatgtcaagccttactttagtggttctaaattgaaaagctttctagctggtcataatatcaccattactgatggtattgacaaaactagtgcaactttgcaatttagaaagttagcagattgtgattttctcaagagaaactttaagcagatgtctaatgttttgtgggtggctcctgaggacaaggcgagtttatggtcacaacttcattatgtttcgtgtaataatctggaaatgcaagaagcttatcttgtc

SEQ ID NO: 43449 - DNA, 344 bp, Glycine max
  unsure at all n locations
  Clone ID: LIB3139-061-P1-N1-A12
aaaaggaaactctcattcaccttcttctgtctccctcactccctctctttcttaatacaccaccttcccaaccctcttccattctccttctccaactccaacccctgcttcccttttttcattttctcactccccatcttctgagagtgatgggtgtttgctaccgctgttcccacacctnccacatcaccgccatcatcatcaccagcttcttccgccacaagccttagaattatactattcccaccctccctctttcttcaacaacaaccgttgacttcactacagtcacgtggtctttctctggggatccaaccatggcggctggaactgtcttctgcgct

SEQ ID NO: 43450 - DNA, 375 bp, Glycine max
  Clone ID: LIB3139-061-P1-N1-A4
ctcaagcaagcatgcaccgcaagctctcacctttgaagccccaaattttaaaagatataactggcctgacagaaactgagaggatgaaacgtaatagtgtttatccctctgcacttaactgtgatgacatcttgcatgagatcctacttcgaataccaccaccaactatctccaaattaattatcgtatcaaaaatatggttgcgtgtgatatgcagtccttcatttcgtcaatgctacttgaggcaatggggacaaagttttcgacttttgggtttttttgtttgcaactttttatatcttggaagacctcgtgatggctatcgtcgccctcgttgggagcctgcgctcccaatcttgtccacttgcaaagatg

SEQ ID NO: 43451 - DNA, 380 bp, Glycine max
  Clone ID: LIB3139-061-P1-N1-A5
cagctgcataagctgaatcatctaatgcagaagccagtggagccaggtcagagatgcacacaagttgaagcagcaaacagcatggacagtgaatcagaaaatggaggcaccatgaaatgtgaagctgagggaaagccaagcccatcaatggaaatatcagaacatttacttggtgttctgtctgatgatgacacaagcataaaggtggaagactttggcctagaagatgaacatggccttctgaattttgctaagcatgttgatggttccttgacttcaccagaagattggaatgcttttgaatccaatgatctattaggccaatcaaccactgatgattaccaatggtgggacttctggtcctgaatgaaacagagcaa

SEQ ID NO: 43452 - DNA, 380 bp, Glycine max
  Clone ID: LIB3139-061-P1-N1-A6
aacacaaattgtcgaaactgcaatccgacaaccttaaatggcagcaagactctttccaccaggtgctgaacttgatgggtctccacaaagaaggcatcgtcgctgaatctgaagtttcggccttcagaacccacttgctagacaccctcattgcttctcctccagaacaagaacaccccgttatattaagagataagcttctgtttctccaggaacttctctatgccaagtgcatttctgaagaagagtaccattcttctaagaagccattactccagagactggcagcacagggggctcagattgaagctagggatgtgatcgtggcaaggcctaaggactcaaaagagaattcagaggaagagtggtcagtgattgat

SEQ ID NO: 43453 - DNA, 301 bp, Glycine max
  Clone ID: LIB3139-061-P1-N1-A7
agctccccgacgttgcatgcacgcgcacgcaagcgtccgtataggtctgcgaggcaggatttggacacaacgttcccactccttgaacacggttttctgaggaacctgacttctgctcttcttctcttctctttcgctacgatcttcgatctctgaaaatgagacagtgcatttcaatccacatcggtcaggccggtcttcaggtcggaaacgcctgctgcgagctctactgtctcgaacacggcattcagcctgatgggcagatgccaagtgataagactggtggtggaggtgatgatgc

SEQ ID NO: 43454 - DNA, 354 bp, Glycine max
  Clone ID: LIB3139-061-P1-N1-A8
gtggcaattgggtacaccatagcagcttccataagcatgatggcaatcaaaaggtctaattgttatcatagtagcggggggaaaaatccatgcaaaatgaacagcaattggtacatgatttcatatggtgtttcggaaattatcttctcccaaattccagatttccatgagttgtggtggctctctattgtagctgctgtcatgtccttcacatactcattcattggacttggccttggtattggtaaagttataggaaacggaagaattaaaggaagcctaactggtgtaactattgggactgtgacagaatcccaaaaaaatttggagaactttccaagcgcttggaaacat

SEQ ID NO: 43455 - DNA, 304 bp, Glycine max
  Clone ID: LIB3139-061-P1-N1-B1
gactacgttacagatgctatctccgacgcttggtaaagtcacctgctcaggctgttctcggggccgcggtacactggctatggtgcccgtactacggaggtgaaatgcgcaagttggaggcttgctgtggaagcacacaacaatctttggctttgagaccattctctgaagagcgcgttgcagcaacaaaggaatacatgcatggcgaacaatttagatcagactccagaacagcttaccaacacgcttacttttatgcccgagaccttgaagtacattccaaggacacatttgtgttcagtat

SEQ ID NO: 43456 - DNA, 373 bp, Glycine max
  Clone ID: LIB3139-061-P1-N1-B10
tttggctgatgacaccatcaattttgaggcttttccccacaagttggtgcagtttggagagattcaggaaaaagttgtattgaaattttcacaagaggaatttcttacagcttggtcaactcaggtgcgtcctacaacaactctgttggctgatgggtgtccatatttgtatgctatggtgcatgatagttcagtgtctacaataccaggtgattttgtaattggtgttaagttgacaaccataaacaatatgtgtgcatatgggctcaatcctggtatttcaggttctcgtcttttgggcaccattcctcagtctatttcacagcaaactgtttggaatcaaatggcaacagtgagaacaccattgaatttt

SEQ ID NO: 43457 - DNA, 370 bp, Glycine max
  Clone ID: LIB3139-061-P1-N1-B11
ctaatctttaggagggatagtgttttaatttcccgcttagcataagtagtacatttcatcatcatcttgaggactacgtcaatggatgtggaactcaaaacacttgcatggaaccctgggagatattttggttcccttgggtacttcacttactcaccaaccatggttaggacataggtgaatctcatcactctctatctctcttctccctgctttctgtctgccaacttttacatcgagatggaccttgatactctattaattatatgtttaattaagcctatatggtttggattgtaattaggaatactaaagtaggaggatttcattctctgtccatgctggatgagaatggatttgctactcattc

SEQ ID NO: 43458 - DNA, 351 bp, Glycine max
  Clone ID: LIB3139-061-P1-N1-B2
tcccaagtgtaagcgaccaattgaaaaaaatcaagggtgcatgcacatgacatgcactccgccctgtaaatttgaattttgctggctatgtgttggtgcatggtcagaccatggtgaaaggactggtggtttttatgcttgcaatcgttatgaagcagctaaacaagaaggagtgtatgatgatactgaaagaagaagggaaatggcaaagaattcgctggagagatacacacattattatgagcggtgggccagcaatcaatctttaaagcaaaaagctcttgccgatctacagcagatgcaaactgttcatattgagaagcttagtgacatacagtgtcagcctgagtc

SEQ ID NO: 43459 - DNA, 346 bp, Glycine max
  Clone ID: LIB3139-061-P1-N1-B3
gagaagtttggtaatgggaaaccaagtttggagctggttatgtgtgtacatgttacagcagcaatatattgcagcttgggtcaatatgctgaggcaattccgattcttgagcgctcaattgagattcctgttattggggaaagccaacaacatgcccttgctaaatttgctggtcacatgcaactgggagacacctatgctatgctgggccaacttgagaattcaataatgtgctacaccactgggttagaagtccagaagcagattttgggagagacagacccaaaggttggtgaaacttgtcggtacgtggctgaagctaatgttcaagctttgcaatttgatg

SEQ ID NO: 43460 - DNA, 358 bp, Glycine max
  Clone ID: LIB3139-061-P1-N1-B4
caattccaatggaggtttcatgcaaaattttgagaagatcaatccacagttttcttcaaaactaccattattttacctcaactgcagcttttctagcccttcctttctccgcatcaatactcctatcagaagcttttgtgccagcctcttcatccctcttgcctcagatacacagtcacctaaggactctctttgatgccgcaggctttccttccacatcacaattgtttaccattctcaaccttaaggtttctcaaacaatcacttcctcaatcttcacccttccctttactctcacatttctcctcattgcaaaagcatccataattcaagctctaaatcaccacaaaccaacttt

SEQ ID NO: 43461 - DNA, 379 bp, Glycine max
  Clone ID: LIB3139-061-P1-N1-B5
gagaatatacgttactttcaaaaaaaagattgtgagaggagaagtattgaagtattgcataatggaaataatgaacagtgagaaaggcaaagaggtgaaaagaaatattatgcaatggaaggctttggctgcacgagctgttagtgaggaaggaagttctcataaaaacattgcagaattcgtgaatagcttgttcaatttaaaacagggaattgcaaattatcctgattaaaccaagcagtttgtttgtatactatatatggtgcatctttgtagaaaatgacacctttgtgggtcatgatgaagaagttataatttaaataaacaagtggaataaatttggatgttcacaaactgttatgaatgggaagctacgtgc

SEQ ID NO: 43462 - DNA, 373 bp, Glycine max
  Clone ID: LIB3139-061-P1-N1-B7
tgcagagatcacgtgaagctcttctacatagaagaagagctaaaactgggtctggctataaactctctctctcattgctttttcttttgtggcctctaatcttccgcgctcatggttaccccgcacccacaggtaaataaattgcaattatgggtcttgcttttgagaataatcaaaacaatattcttgttagtcactttattatctatggatgtagagtctaattggaagcaaaataagcaaggacagtgtaaaacctctaattttgctaataaatgtttgctcaaagaaactcatgattacattctccctgaccctgaagatgctgagtcagtcccaaatgatagtgatactcccactagagaggatgtgc

SEQ ID NO: 43463 - DNA, 291 bp, Glycine max
  Clone ID: LIB3139-061-P1-N1-B8
gtgcagaatggatgacaagacgttgccggctctctttgagtgagacacgatgatccacttcgcaaacaccgttaccggtgacaacaacaacgttgaggagaaggggtgcgacgctatgcataaatgcgaggacatgatccatgatatgggatggatctctcccaaccagaccaaactaaatttcagcagcaagaatctgaagaacattgtggcgtcattgtatactgcatagataacgggtacaatctcacactatgactggatatacattgtggagtcttgacacgcaag

SEQ ID NO: 43464 - DNA, 371 bp, Glycine max
  Clone ID: LIB3139-061-P1-N1-B9
tgtggaacagccgaaacctgtggtgtgtgctgtgcttgacttgagtattgaacatcgattgttaattggaagtgaaagaaagtagattgaattgaagaacaaaggcaatgccaggtcctggtcctcacctcatgtatgccatgggttctggtttgtgtctcacaagcatcagcaatggaaggttcggtccccaccacacactcttctacaccattaacgccttctttggccctgatgttggttccttcacggagtggcttggttcactctttggtggttctgctcatgctttgggatcttcccttgaagatctcattcaccatcccttcttctacatccttcttttaagacttcctctctcttttctctat

SEQ ID NO: 43465 - DNA, 356 bp, Glycine max
  Clone ID: LIB3139-061-P1-N1-C1
agagattgtctctttctatatggggaggagctggtgcaaagaatgctattctcatgaatatgccaaatgctgttctttcaatgtggagatattttgttggagatctcgtctttgaagtttctaagatgacttcttcctacattaaatgtacagtctctttcttcatagcatttggaaatttggctgatgacaccatcaattttgaggctttttcccacaagctggtgcagtttggagagattcatgcaaaagttgtgttggaattttcacaagaggaatttcttacagcttggtcaactcaggtgcgtcccgcaacgactctgttggccgatgggtgcccatatttgtatgctatg

SEQ ID NO: 43466 - DNA, 372 bp, Glycine max
  Clone ID: LIB3139-061-P1-N1-C10
ttgataccatatgttgagccagttgtgcaagctcaaagtgctgaagtttactttgacgtcttccctgtggaggttgatagtcaagagggagttgctcacattggtgaactgaaatctggtgtctatgttccactgcctacaaaaactaatttggtggaaactcctaaggaatggcaactggatctaccttgtgacaaaattcctagtgtcttgactacaactgatgagagattggtaggcacagaacatgagggatatgatccttttcttggtggaattcaaaaatatgccactcccatgatgcccctagatgaagaaattctttctaaggttgcacatgatatggttgaggaatggttcgattgtgttgat

SEQ ID NO: 43467 - DNA, 363 bp, Glycine max
  Clone ID: LIB3139-061-P1-N1-C12
taaccaccacgagtttctctatctgctttcttcacaaagagtaactcagtcttctaaaaactttctcaaaaccattattattctctaatctttcgtttcttcaattaattaattggtttcttgctatggctgtggactctgcgatttcgtccccattgggtcccccggcctgtgagaaggacgcaaaggcgttgcggttcatcgaagaaatgactcgcaacgccgacgccgtccaggagagagtcctggaggagattctcacacgcaacgcccagacagagtaccttaaacgcttcgaactcgacggcgccgccgaccgccaagccttcaagtccaagattcccgtcataacctacgaggacg

SEQ ID NO: 43468 - DNA, 378 bp, Glycine max
  Clone ID: LIB3139-061-P1-N1-C2
ctccatcgagaaggtttttagaattttagtggacaaaactggagattggatcacacttatacaaaattctccaattagtaacttgttgagagttgctgcttggaagaaaggctgtttaatggtcaagattgtgatgtctgggaatgcagcagtcaaaaggagtgattgggcctcattggtacaagtgtttttaacaaacagcaacagtacagagcattttgatgcatgtaagtggacaaaatcagaaccacattcctgggaattgatcttcccaatagaggtatgtggtcctaataatggttttgaaatgtggagttctgagtgggcaaatcaaacttcatggcatttgagtttccttattgacaatcccaaacagtc

SEQ ID NO: 43469 - DNA, 379 bp, Glycine max
  Clone ID: LIB3139-061-P1-N1-C3
attttggaaggatgtcttacgttgctcataacgttaatcagccccaagagaaagatttgttggagggaaatttttcctttgatattaaatctcgctctagattggaaaaagtttcctctacaaaagctcaatttgttagtggaaaaaccttcaaatatgatataattggtgctggttcacattcttcagaagattttcctgaaaaggaagatcaagaaaaacccaaaaagattgatgccagattgagacaaagaatagatcctcaatacaatgaggttcaggctcagatggaaacaaatttgtttaaattgtctcttgatgatgttgaaactcctaaaggttccatgttgggatcttaaaatttctcaatctaaaattg

SEQ ID NO: 43470 - DNA, 362 bp, Glycine max
  Clone ID: LIB3139-061-P1-N1-C4
caagaagcatcagcgcagtaacgacaccgtttcgatggggaactgtaacagcgaagcctcttcccaaactcagccacattccgatcaccatccccaaccacgctccaactccaacggcatcaccgtccttcctcccaattcgaagccctccgttggccgggtcttgggccggcccatggaggacgtccgctccacctacaccttcggccgcgaactgggccgcggccaattcggcgtgacataccttgtgacccacaaacacaccaaacaacaattcgcgtgcaaatccatcgccacgcccaaactcgttcaccgcgacgacttgggaggtgtccggcgagaggtgcagatcatgcaccacc

SEQ ID NO: 43471 - DNA, 366 bp, Glycine max
  Clone ID: LIB3139-061-P1-N1-C8
ctcgagccgcagcggaataacgaagcctcctcgttctgtcttcttccgccctttctctctctagaaccgtacggtcgtttctttctctctcctcaaccggagacagcgtcgccttcttttctgaatctcgcggtgttgttagttctgcggcggttgtagttccggcggcgatgggacagcaatcgttgatctacagcttcgtcgctcgcggcaccgtgatcctagcggagtacaccgagttcaccggaaacttcaccagcgtggcggcgcagtgcctccagaaactcccttcctccaacaacaagttcacttacaactgcgatggccacaccttcaactacctcgttgataacggattcacttact

SEQ ID NO: 43472 - DNA, 372 bp, Glycine max
  Clone ID: LIB3139-061-P1-N1-C9
cagctatggagtttcgttgccttccattggttttctgtctcaatctgatcctgatgacagctcatgctgccatacctccagaagtttactgggaaaggatgcttccaaataccccaatgcccaaagcaatcatagactttctaaaccttgatcaacttcctctttggtatggtgctaaggaaacccaatctacagatcaaatattcctgtatgatgctaagaaaacccaatcaacagatcaagttcctcctatcttttatggtgataagaaaacccaatcaacagatgaagttcctcctatcttttatggtgctaagaaaactcaatcaatagatggagttcctcctatcttttatggtgctaagaaaaccc

SEQ ID NO: 43473 - DNA, 371 bp, Glycine max
  Clone ID: LIB3139-061-P1-N1-D10
agaaaccaaaagcacaagaaacgtcacaacacacattctatattgggttgaagatagaaaaaaaaactgtgttttctttgtgtgatttctcttctggttctgggtattgtgttattcacctgaagcttacacctttctgttgtggatcacctaaaacttgggttttgattgagatggctgagaaggaagaagccatgcgtgttgttttgaaggaagctgtggatttggaaaacgtgccacttgaggaggtgtttcagactctgaggtgtgattcaaatggactcacaacagaatctgctgaggagaggttggccatctttggccacaacaaacttgaagagaagaaggagagcaaggttttgaaggtttta

SEQ ID NO: 43474 - DNA, 360 bp, Glycine max
  unsure at all n locations
  Clone ID: LIB3139-061-P1-N1-D11
cgcatcgtgccattgttcactttcacatcaactcaagagattcaaccaagtcatagaagctagctagggcgtattgttacatttgttagcaaaaaactcgaaaaaatggagagcagcttgggagacatgtcgattaaggttgcggtgttcattttagttcaagccttggcgtaccttatcctctccaattaatcaaacattttcaacaagaacatgaagaaatgcaacagattcaggctagcgcggtacagaagcattcgccggatgctggctatgatctctgattntgctccagaaagggaacgcattacttcaccaaagggttctaaaactgcatcacttgatcaaagtgatcaataa

SEQ ID NO: 43475 - DNA, 298 bp, Glycine max
  unsure at all n locations
  Clone ID: LIB3139-061-P1-N1-D2
aaaaattaaacaccatgcaacaagcaattccttataggtcatggcaacctntcatcacacccaccaacgccaacaccactcactttacaattagcccacacacattagtaaccttttccacagtgtctacaacagaattatctctaaaagacgatattggttcggaaccgaataacaacatccataatagtgataatcctttctttgtttcctccaaaatggtgcccaacatggtcttagagagcgcgatatagtcttcgctaggcgtggttgttgcttgagccatgttgtgaagcga

SEQ ID NO: 43476 - DNA, 100 bp, Glycine max
  Clone ID: LIB3139-061-P1-N1-D3
cggatcgagatcggagcaggattctttgctataggaggcgaaactatgctgggtccaaataacgaaaccgtggagttcagaatcacacgcgacgacctcg

SEQ ID NO: 43477 - DNA, 379 bp, Glycine max
  Clone ID: LIB3139-061-P1-N1-D4
gcaagatattcgcagaaggagatttccttagaagaaagatcgactctaatctggaggaaactgctatgacatctttgccaagagatattcatggtgcgcctcccgaaagccttgttgttaagctagctgaaatccttggaaactacaagactcttcgaaaaatggctcttttctggtgcagggttgttgctgaactaaggaaactttggttcgaggaacaatacttaccaggagtcccccaggatgagattcctgatctgaagtcatgtcttctatatcaacaatttcaagtaattaattgctgcatctctcggaaaaggttccgtattattgccactgaatctttagactctatgatgatgcaagctaattcagacat

SEQ ID NO: 43478 - DNA, 373 bp, Glycine max
  Clone ID: LIB3139-061-P1-N1-D8
ctagacacagttaatctccttactgacgggcagaagaactcacacacacacactttccattttttgtggtactgcttgtgactactataatcttcaaatacctttgatgctacacgatgatatgaatccctttatggcaagcatctgtatatcacctagggagtgcaaaaagagtcagacttagaatactgttatggaaggccaagcgattgaagaattgagagccagtttcttatgatccgtctgctaagaaattattacatatgctttcattcagacacatatggtagcaattgatccctaacagcttgtttctttcttgttggattaaagggggtgtgtatgctaaacctgttgcatacattttttaata

SEQ ID NO: 43479 - DNA, 365 bp, Glycine max
  Clone ID: LIB3139-061-P1-N1-D9
aatgctttgtcgttagtgatcggacctggtgctggatataacctgaaatctaatccattacctgaagaggatagtccaacccgtaatagtgtggagtcaaagaagcatagcatatttcaagaacaaatccgggctgaacgagaatctttcaaagctgtttttgataggagacggcacaggattggtgggcttgatgtggaggaggactgaaagaaaccgacccaatgcagaaggctttcacaaaacagagtatggggagggaagatctatcatgcattcagctctatccctccctgcattggagaagttgttaccaggatttgaatccgtcacaagacagatttagagactgattccgaaatttg

SEQ ID NO: 43480 - DNA, 323 bp, Glycine max
  Clone ID: LIB3139-061-P1-N1-E10
catcaactgcaaaatgttgatgtactaaagatacttcttccaccttcctcttttgtgtcagttttctcccaggcctttgagagttatcattcgaagtgtgtacattcacatttgataggccagagagtgattttctgttacgcctaactgcattttccatgctattggtctttctcttcttactgttggtatctggccaatcattaccctcaggtgttgccaatgattgttcttttgcattaacctgggaagtagcaagttcagtctaatgatgataatacgctactctatatctgcccaagagccactcaacttaatcaaag

SEQ ID NO: 43481 - DNA, 377 bp, Glycine max
  Clone ID: LIB3139-061-P1-N1-E11
cttgctttgacagaagaggaaaagatggaagtgattagaaatagaggcattcctgctgatgttcttgcaaagcgagctcatgaatttgaaaaacatgttgctcatgaaagcctcaaggatcaaattcctgctgttgacaagttgtattctactaaggttaataagtttgcaaaaattatgaaccttagacaaagtgttgttggtgatcttaaacttcttactgatgggaagttgtatgagggtaagcatattcctgtatctaatattagtgcaggggaaaatcatgtagttcaaatacccttaatggcacaagaggaaattctgtcttctagtgcaagtgatttcagaactgcaatggtgagtaaaaatagcaaacc

SEQ ID NO: 43482 - DNA, 378 bp, Glycine max
  Clone ID: LIB3139-061-P1-N1-E3
cccagaccttactccaaccacagagaatggactcgccggatagagtctctcatcatgcatcaaattgaaatcattgccatactttgtgaagaagaggaacaaaattccgacacacgtggcactgcaccaaccgctgatctcagcagcagcaatagcagcgtgagcagaagctacagcgaggcgagcctgcttcctcggcttgccacgtggtacaaatccagggacgtggcgcagaggatccttctctccgtggaatgccaaatgaggaggtgctcctacacgcttggtttgggcgagccgaacctagcggggaagccgagcctgctctacgacctcgtgtgcaagccgaatgagatccacgcgctgaagacgacgccg

SEQ ID NO: 43483 - DNA, 221 bp, Glycine max
  Clone ID: LIB3139-061-P1-N1-E4
gtcaagaggtgtattgagtatatgctaaataagaggtgctcaaaatgtagttatagattacaaattattgcaagggttgctcttagcttcttcatttcaagcttttgtttacactttgcagtgctatggcaaagataagagtatcatggatggaaaaagggggggaaaaaatgttgctttgtactccaaattatgaataatagaactttatattatttatc

SEQ ID NO: 43484 - DNA, 377 bp, Glycine max
  Clone ID: LIB3139-061-P1-N1-E5
cgaggctgttcagaaggctgctgctgcattgaaggggtcagatcatcgccgtgcaacaaatgtcagtgccagactggatgctcaacaaaagaagctcaaccttccaatccttccaaccaccactattggatccttccctcagactgtagaactgaggagggtacgccgtgagttcaaggctaacaagatctccgaggaagagtatgttaagtcaattaaggaggaaattcgcaaagttgttgaacttcaagaagagcttgatattgatgttcttgttcatggagaaccagagagaaatgatatggttgagtacttcggtgagcaattgtcaggctttgccttcactgttaatgggtgggtgcaatcctatggttccc

SEQ ID NO: 43485 - DNA, 329 bp, Glycine max
  Clone ID: LIB3139-061-P1-N1-E8
ctcgagcggttccagccgttgctgctagagcatactcgtgcatgtttaacgcgtatggggctaatgccaccactagatactgagctgacagggactgtatactgtgacaaatggggaatccggtgaaccactccacttatctatgacaagaactttggtggacaaaagcatggaacaaacctggatagtggtgacaactgactcgatgcaggctagtaatgctagcacaggcatgatcatatagaccgtaaggtacacacatgggaggagagacttgggaccatctaagggatgggcatacctatcgaacggatgctatctagtggagg

SEQ ID NO: 43486 - DNA, 369 bp, Glycine max
  Clone ID: LIB3139-061-P1-N1-F10
ctcaacttaactaccgatgaacttaaatattcagtggttctaactggcacgaaaagaaaacaaagcacacgttgctgagatgacagagcttcctagtgtgctgcccctccaaataatgttaatccttctccttatcaaaagtggcagcagcaacaatgagtgtggggaatggtcttgcggctctggccaaccacctatcagatttcccttcaaactcatcaagggaattaaagatgaatgtggttatccggggttttgtctatattgtactcaaaaacatgagactatgcttgctctctcctccgtaaaactccaagtcagttacataaactacgaaaatcatgaaattgggttgaatgacccggaaaa

SEQ ID NO: 43487 - DNA, 377 bp, Glycine max
  Clone ID: LIB3139-061-P1-N1-F11
atttatcctgagccccgaaattgagaggggatagaattggaaaagagggaaaacactctattgagtttttcactatataagttttagccactctcgaagctgaagcagattagggtttctgcagccgccacactccctttctgaacgagatcttagatctctcgttgatgctttaaaagaaccctaatctcatctcatggctattgcttggtgcaccagcattattgcttccaaaataaataaatgaatgaatgaatgagcataccactccctctctctctctctttctcaccactcactcgctttgcctggctgcttgttttgatctgtttcattctttcttttctttttatgtgacctttggaacttcactctct

SEQ ID NO: 43488 - DNA, 378 bp, Glycine max
  Clone ID: LIB3139-061-P1-N1-F12
ctatggtgcatgatagttcagtgtctacaataccaggtgattttgtcattggtgttaagttgacaaccataaacaatatgtgtgcatatgggctcaatcctggtatttcaggttctcgtcttttgggcaccattcctcagtccatttcacagcaaactgtttggaatcaaatggcaacagtgagaacaccattgaattttgattctagcaagcagagcttttgtcaattttctattgaccttctcggtggaggaattttagtggacaaaactggagattggatcacacttatacaaaattctccaattagtaacttgttgagagttgctgcttggaagaaaggttgtttaatggtcaagattgtgatgtctgggaatg

SEQ ID NO: 43489 - DNA, 378 bp, Glycine max
  Clone ID: LIB3139-061-P1-N1-F3
cgctttacaaggagctttgatagctttttcaaacacgagtgtttatgatgataagctggcgttggcttacacacatgaattatatgatggaaactatgcagaggattattggctaccaaaccaagtgaattgtgtttatcctgtcagtcgattacctcaagacgctgacagtgtggatgtctcatgtacatgcacgacgaccaacttggtcatggtcttcggagagatcaccaccaaggccaacgttgactacgagaagatcgtgcgtgacacctgcaggaacatcggcttcgtctcaaacgatgtgggacttgatgctgacaactgcaaggtccttgtaaacattgagcagcagagccctgatattgcccagggtgt

SEQ ID NO: 43490 - DNA, 370 bp, Glycine max
  Clone ID: LIB3139-061-P1-N1-F8
cagagcttttgtcaattttctattgaccttctcggtggaggaattttagtggacaaaactggagattggatcacacttatacaaaattctccaattagtaacttgttgagagttgctgcttggaagaaaggctgtttaatggttaagattgtgatgtctgggaatgcagcagtcaaaaggagtgattgggcctcattggtacaagtgtttttaacaaacagcaacagtacagagcattttgatgcatgcaagtggacaaaatcggaaccacattcctgggaattgattttcccaatagaggtatgtggtcctaacaatggttttgaaatgtggagttctgagtgggcaaatcaaacttcatggcatttga

SEQ ID NO: 43491 - DNA, 370 bp, Glycine max
  Clone ID: LIB3139-061-P1-N1-F9
gttctttcaatgtggagatattttgttggagatctcgtctttgaagtttctaagatgacttctccctacattaaatgtacagtctctttcttcatagcatttggaaatttggctgatgataccatcaattttgaggcttttccccacaagctggtgcagtttggagagattcaggaaaaagttgtattgaaattttcacaagaggaatttcttacagcttggtcaactcaggtgcgtcctgcaacaactctgttggctgatgggtgtccatatttgtatgcaatggtgcatgatagttcagtgtctacaataccaggtgattttgtcattggtgtcaagttgacaaccataaacaatatgtgtgcatatg

SEQ ID NO: 43492 - DNA, 83 bp, Glycine max
  unsure at all n locations
  Clone ID: LIB3139-061-P1-N1-G1
ttaaaaattttaaaaaaaaaaaaaaaaggggaaaatgggaaaataaaaaaaggaaatccgaaaaaaaaaaaaatantatatat

SEQ ID NO: 43493 - DNA, 381 bp, Glycine max
  Clone ID: LIB3139-061-P1-N1-G11
ggtggagaaagaggtcttgtgtgatctgagaatatgccttgcttgttattgttggtatttctgattcaatcatgggcagtgaaggcacaacaagtctacgataggaacatattcatattagcggggcagagcaacatggctggtcggggcggcgtgctgaacaacaccggcacggggatcgccacgtgggacggcgtggttccaccccagtcccgtcccaacccctcagtcttgaagctggacgcgcacttaacgtgggtggaggcccgtgagccactggacgcggacatcgattctaggaagacaaatggtgttgggccaggaatggcatttgcgaactcggtgttggagaagcacccagattttggtctgattggtttg

SEQ ID NO: 43494 - DNA, 383 bp, Glycine max
  Clone ID: LIB3139-061-P1-N1-G12
caagcttttcacatggaaatcggctcccccgcattccttaccctcgaagactattcttccttcttcttccctgacatggatcccattcccaattccaatgtcaacaagcgtcgtgcaaacaacgaccagttcgacttaaatgactccgcattcagccacctcctcaattccatcatggatcctaaccatttccaacaccaatccaaaccaatccaattcgactcctccccgaccaagagagctcgccgtgacctcctcgttctcgaagacagccacctcaaccccgcctcggccccgcaacagcagcgccgtctctgggtcaaggaccgctccaaggactggtggcagcggtgcaacagcccggacttccccgaagaggaatt

SEQ ID NO: 43495 - DNA, 375 bp, Glycine max
  Clone ID: LIB3139-061-P1-N1-G2
cgttgcacttcgctttttccaaaaccaatcacatcaggatcactgtcgtcgccgccgtcgtcgaccaccgcaagagccatcgcactccgccgtcatccgttagggcaaaaatgagtcgaggaagtggaggtggatacgatcgtcacatcactattttctcccctgaaggacgtctcttccaagtcgagtatgctttcaaggctgttaaggccgcaggaatcacctcaattggtgtccgaggaaaggattcgatttgtgttgttactcagaagaaggttccggataagcttttggacaacacaagtgttacacacctctttcccatcaccaagtaccttggtttattggctactggcatgacagctgatgctagga

SEQ ID NO: 43496 - DNA, 377 bp, Glycine max
  Clone ID: LIB3139-061-P1-N1-G3
attcttcagcttcttattactttgtatctctgcgtatatttgaaaatgaagaatatgaatatgaaactaaacaccattgcattgataattgccattgcattttctgtgtggtcttcaagctgcacagcagcacgtgtcagccactggaggaaactgaaagctgctgcatctgctacttcttttaatgtgttagactatggtgctaaaggtgatggacatgcagatgatacaaaggcctttgaagatgcatgggcagctgcttgtaaggtggagggttcaacaatggttgttccatctggttctgtatttttggtgaaaccaatctctttctcaggccctaattgtgagccaaacattgtttttcagttggatggcaa

SEQ ID NO: 43497 - DNA, 378 bp, Glycine max
  Clone ID: LIB3139-061-P1-N1-G4
aatcagaacccaggatttggtgaaacgatgaacagtgataggaaaattggggttgccttggacttttccaaaggaagcaaaatcgctctgaaatgggctattgacaatcttatcatcaacggtgacactctctacatcgtccacaccaagccttccggaggaagtgaatcaggaaatcttctctggtccaccactggttcacctctgattccattgtcggagtttcgtgaaaaggaggtgatgcgtcactatgaggtggatactgatgctgaggtgttggacttgcttgacaccgcttctaggcagaaacaggtgaatgtggtggcaaagctatactggggggatgcaagagagaaaattgtggaagcccgtggggat

SEQ ID NO: 43498 - DNA, 389 bp, Glycine max
  Clone ID: LIB3139-061-P1-N1-G5
agaaagttcatctcaggctgcactaccatcggcaatgccaaaagaatccaatctttccaaaagttcagttgaaagtgataagtctaaggcttctgactttgagttagatcagggctcacttcagccagcacccttgtctaaagatccaaatcagttttcagagcaacacaaatatttagcaaatgaggaatcccatggtaaaatgaatagccagtggaaatcacagcattctcgtaggatgccaagaaatacgcaggccaatagaccagcagagaaatcacatgggactgatgctgtgatgtgggcacctgttaaaccacagagcaagagtgagatcatggatgaattgagtgagaaaagtaaagttgaggcagttgatcctgtaaaga

SEQ ID NO: 43499 - DNA, 367 bp, Glycine max
  Clone ID: LIB3139-061-P1-N1-G7
cagactcataaaagagaagaaacaaaacaaaaaagagcggagagagagaggaaccatcaccaaccctaatttcttagctaaaccctattcgtttagcatttcctctcttttctcccactcgtaaatcctctcccaaacttttcagatccaaataaatcatggttttctgggtttttggctacggttcactggtgtggaaccctggattcgattacaatgagaagattataggtttcattaaggactacagacgcgtgtttgatttagcgtgcattgatcaccggggaacacctgaaaacccagcaagaacttgcacgttggaggagaaggaaggggctatttgctggggagctgcttattgtgttcg

SEQ ID NO: 43500 - DNA, 370 bp, Glycine max
  Clone ID: LIB3139-061-P1-N1-G9
cttaacaatctcgtatctcgtaatatataaatacgcggtccttccactccttcttctgaccattaaaaaaaccctgtgcaccaagaaaggtaacttgaaaccccagccctagaaccttcctctggaatcctccccaatgttataacccctacccatttctcttctcatcgctccaagaaaaacccagaaagcaaaatcgcaacttgatcattaattaatcagggacatggttgaaaagaagagatcatggctctctaagaggctcaagagagagtcactgaggtggaagtacctgggtgctgcattcaagtggaagaggctttcctctttgccagtttccttcttcaacaacgtcgctttcaagattctc

SEQ ID NO: 43501 - DNA, 383 bp, Glycine max
  unsure at all n locations
  Clone ID: LIB3139-061-P1-N1-H10
ctctgatatttctcttagctgcagtctgcagtgagaatcggaaaatctccgaacccgctacttcctatcctttcaaaagagtgtgactgtaatagtgagctaaacaacatcggcagctagatcgtcgaagaaaacgaaaaagaaaagctttgaaaatggctcaggagtcactctcagaaacccccgatatctcgcccccttcgtctactgcacaatcgcagccagatccatctctttcaaggaacgtttcttttagccggctcaacgcacaggcaccagaatttgtgcccactcgcgcctccccacgggccgattttcagcaacctaagctcgttgtaccacctncacctnctnctncagcttcaggtatactacacgtttac

SEQ ID NO: 43502 - DNA, 375 bp, Glycine max
  Clone ID: LIB3139-061-P1-N1-H12
gttgggtttacaaggagcaggtaaagcttttccaaacaagattgtttttgatgataagcttgtgttggctaacacacaagaattctttgatggaaattttccagtggattcttggttaccaatttttgtgaattgtctctatcctgtaagtcaattaccttcagaagctgtcgttgtaaatgttacatgtggtagtggacggtgtggtttacccaccactgcttggattagttctgcagttaacaatcgctcctcagacatcaacaaaaggattcgcacagcacttgggaaaggtaagaaaattgtttttcttactagagttgatccttttccagtagctttattggctgttctttttggcgttaagaatgaaat

SEQ ID NO: 43503 - DNA, 155 bp, Glycine max
  Clone ID: LIB3139-061-P1-N1-H2
gtgtgttcgggaaagatgagtggtgccgatagggctgcattggaatccaccactagtgtttgggcacttgtgcaaagaagccatgggcttcttccaaagaggggctttttcactggggcagaacaaccacctttggattcaacgccccggccttc

SEQ ID NO: 43504 - DNA, 308 bp, Glycine max
  Clone ID: LIB3139-061-P1-N1-H3
caaagtatagagtgaaagaatgggtgagaaaagcaagattttgatcataggaggcaccggctacatcggcaaacatatagtggaagcaagcgcaaaggctggaaatcccacttttgctttggtgagggaatccacactctctgacccctccaaggcacaactcattcacaattttgaggctttgggcgttaatttggtccgcggggatctgtacgatcatgagaagttggtgaaagctatcaagcaagtagatgtcgtcatatccacgctgggtcacctgcagcttgccgatcagctcaagatcatcg

SEQ ID NO: 43505 - DNA, 389 bp, Glycine max
  Clone ID: LIB3139-061-P1-N1-H4
gagcattgttggtcgtgactttttgccaagaggatcagggattgtgactaggcgtccattggtgttgcagcttcataaactcgaaagtgggtcacaagagtatgccgagtttcttcacctgcccaggagaaagttcactgactttgctttggtccgccaagaaattcaggatgaaactgatagagtaacagggaagacaaaacaaatatctcctattccaattcatcttagcatctattcgccaaacgttgtcaacctaactttgattgatttaccgggtctgactaaagtggctatagagggacaacctgagaatattgttcaggaaattgaaactatggttcgttcttatgttgaaaagcctaattgcatcatactagcaatatctc

SEQ ID NO: 43506 - DNA, 383 bp, Glycine max
  Clone ID: LIB3139-061-P1-N1-H5
gtgtattatcatttcaacattttccttttcttatcactttatttatttaattattttttattatatttaaagaaaaaataattaatatatctaaaacttataaaaagaaacctgcatgaatataaatttttttacataatcattctatcacaatctataactcataaccataatgtataataagtttgttaatttttaaaatagttattttaaaataattcaaacaatgatttattattaaataagagtataaaattattatttaatgcataaaccttaaactcaaataataattgtcatatttagaaataaatccttatattaaattcattcaaattttgtaggacgatacattaattggggacatgtcttctgttgacatg

SEQ ID NO: 43507 - DNA, 369 bp, Glycine max
  Clone ID: LIB3139-061-P1-N1-H9
ctcgagccgattcggctcgagctggcaatgaaaagagagagaaaaagattttgaattttaattgaacacttaagattgcaggcagtgacgtagtttccctgtaacgttgtgaactccgtttctcatgcttttttgtccctcatcggatctcgccttctttctcttcccttcaagcaagggtcagtccattcctgggtttactttttttattttgtgatatcttttgttgaggaggtggattgagtttaaggatttagttaagggagacagtttagaggacaaaattttgtagggtaggtaacaagaagggagaaaagttggattagttttgtttctatcatttgtgggtttgagatggatcttaagagt

SEQ ID NO: 43508 - DNA, 466 bp, Glycine max
  Clone ID: LIB3139-062-P1-N1-A2
ggacgtggtagttcccatatttctaaacatgagccgggtacaggccctgaagcgtctgaatcggcccatgaagttggacccggctgggctcatacaacaaatcaatttgctatgacaaagccgggcctggaccatatccgtttcatggggctatgcggttcaaattttccggggcatcttctcagcccgggaaatggagatgccagcaaggacattcctgaactggtacaagcgggcggattacacagcgtatccgttcaacacgcggccggtcagccgccatgtttgtcagaaaccgtttgtttattacttgtctagggcagtgtatgatgagggtgctaatgaaactgcaagtcaatatgtacgggttcagcaaaacccggaatgcaattggaaaatggaggatccaacccaaatcaaagtggtgcatgtttataagaaacccgacccgcatttgtgggacaag

SEQ ID NO: 43509 - DNA, 439 bp, Glycine max
  Clone ID: LIB3139-062-P1-N1-A8
gttgtgggaaaggacagacttgtggacgaagttgacactggaagcggttccttacattagagcaatcgggaaggagacattccgcatgcacccgccactcccagtggtcaaaagaaagtgcacagaagagtgtgagattaatggatatgtgatcccagagggagcattgattctcttcaatgtatggcaagtaggaagagaccccaaatactgggacagaccatcggagttccgtcctgagaggttcctagagacaggggctgaaggggaagcagggcctcttgatcttaggggacaacattttcaacttctcccatttgggtctgggaggagaatgtgccctggagtcaatctggctacttcgggaatggcaacacttcttgcatctcttattcagtgcttcgacttgcaagtgctgggtccacaaggacagatattg

SEQ ID NO: 43510 - DNA, 441 bp, Glycine max
  Clone ID: LIB3139-062-P1-N1-A9
gctcaagggcatgtcaatcctctgatgctcttgtcaaaaaaactggctgaacatggcttcaaagtcacttttgtcaacacagatttcaaccacaagagagtgttgagtgcaacaaatgaggagggatcagcagtgagattaatctcaatcccagatggtttaggccctgaggatgacagaaataacgtggtcaatttatgttcggaatccttaagcagtaccatgacttctgcccttgagaaggtcataaaggatattgatgcacttgatagtgctagtgagaaaatcacaggtatagtggctgatgtgaacatggcatgggccttggaactcacagataagctaggaatcaaaggtgctgtcttctgccctgcttcagcagctgttttagtcttgggtgagaacattccaaacctcattcaagatgggatcataaatacc

SEQ ID NO: 43511 - DNA, 456 bp, Glycine max
  Clone ID: LIB3139-062-P1-N1-B10
gagcatctcattaaaaatagctatgaaaaattactgcgccaggctaaagctccaagtatgtttttacaatccttcaaaaattttgtttctttgtgtgtgtatggtgatgataacttaattagtgttcatgaatatgtcaagccttactttagtggttctaaattgaaaagctttctagctggtcataatatcaccattactgatggtattgacaaaactagtgcaactttgcaatttagaaagttagcagattgtgattttctcaagagaaactttaagcagatgtctaatgttttatgggtggctcctgaggacaaggcgagtttatggtcacaacttcattatgtttcgtgcaataatctggaaatgcaagaagcttatcttgtcaatctcgtaaatgtgttacgagaattgtatttgcacagtccagaggaagctcgccaattgagaaggaaa

SEQ ID NO: 43512 - DNA, 401 bp, Glycine max
  Clone ID: LIB3139-062-P1-N1-B11
ctctgaactaacttacaatctccttcatacacttcagcttgaacaaatagaatgcagagttaatagtgctgagagagaagcgaagttgctaaccgaacaactgaaacatcttatatgaggatcagcatgatgagcctgcaaaactaacattgctgattacatgctagctgccgttgaaaattaagagacacatatcagacctctgttttccaaggagtttcttttcttcaaatatggatgagaacatgaaacagttccaaaagaaattaacagaactggaagtggaagctgagcatcttcttttagcccgacatcagctggttgagaacgatagattgagaaatgggaatagagaagcacttactgcattaaggaaaagggctcgaacaacaaagagcagt

SEQ ID NO: 43513 - DNA, 321 bp, Glycine max
  Clone ID: LIB3139-062-P1-N1-B12
ttgaaaccaataaagacacggatttccgtggagatatagtagtagtagtaggtgaataaagattgccgctctttttgttttgattgttgaacaagtttatatatagctctttgttttggcaaaaatctgacaagggagggatgctataacctttgagatagagggagacttcgtaagaaataaacagcacgtaaaaaacgctggagagtctaggagtttgcttctttcatatattgttgagaacatataacagcttctaaagaaattaacaaaacttgaagtgggagcttagcatcttcttttaaccctacattagttggt

SEQ ID NO: 43514 - DNA, 354 bp, Glycine max
  Clone ID: LIB3139-062-P1-N1-B2
tcaagatctgggatttggagagcaagagtatcgttgaggatttgaaggttgacctcaagactgaggctgatgccacctccggtggtggtaacgccaacaagaagaaggttatttattgcacaagtttgaactggagtgcggatggaagcactttgtttagtggctataccgatggtgtggtcagagtttgggctattggacgttattaggttaagctttttagtgttttcagatgcgaatctgtttttgagttttgggacaaagttagttactgctttactgtagaattgatttttatgttgaagaccgtggcactgaggccttttatttatttttaaaacgttcgttttggtt

SEQ ID NO: 43515 - DNA, 462 bp, Glycine max
  Clone ID: LIB3139-062-P1-N1-B3
ctcatttcaggttagtaatcaggaagcagtagatactgctcgttcttttctcgtaggcaacaacaaatcacaaccattgctgctggcttgtaaaaagcttgtagatttgtctgtttcacgaggctctttggatgacacaagtgttatgctaatcaaattggagcactatatttaaagttaccttagtacaacagaaggggaggtagtgcataaggttttagattattgcagttgagatcgcattgaggttaagattgcgttgcagtttgcgactttgaacagccttggtggtgcctgatggataagagtagctgattcttttctgtatatataaatctgactacattattggaatttttttgtacccgcataggggagagggggatattaacaataacatttagtaattatttttttcattgaataatttatgtaatgagcagcatacaattaattaattta

SEQ ID NO: 43516 - DNA, 469 bp, Glycine max
  Clone ID: LIB3139-062-P1-N1-B4
gtcaaaagtgaagaatcaaaggtttcaagaaaaagatccactggcactgagccaccacacaaaccgagtggtgtagaacaaaaacctgccagaaaaagtgcctctattcaccaacaaccttgtacaaatcgaaacaaccaacatcagaggcattcagatgttgctgcaagaagctcaacatcatcgtcctctagtacctcaatttcaactaaggttgttcaacaaaacaaggacaaaagtcatgagagaaaaccacaaggacagcccactggaaattctcttgtgcttgctaggataagtactagcaatgagaataatgagaacaacaagtctcaattgaaactcactgggaatttgcttgtgaataacaccccaagaaggaagagtgtggaatacatgcctaagagtgcagagttgaactctgtgcccagttcttacaccaatgcaagcaaaggcttgatggggaata

SEQ ID NO: 43517 - DNA, 424 bp, Glycine max
  Clone ID: LIB3139-062-P1-N1-B5
aaaacaggctccatttgactactaaacaggctacatttcgcacagagctagtggtgtactacttattatggccacaccagcatccatcactaatgtcactgtggagttccttcaattccccgcactggtgacacctcctggctctaccaaatcctattttcttgcggcgcaagggtgagagggttgaatattcaagaagaatttgtgaagttcacgggaataggtgtttatttggaagacaaggccgtgtcatcactcgctgccaaatggaaaggcaagagtgcagctgaattgctcgacttccttgacttctacagagatatcatcaaaggcccctttgagaagttaattcgagggtcaaagttaagaacattggatggtcgtgaatacgtaaggaaggtatcagagaactgtgtggcacata

SEQ ID NO: 43518 - DNA, 419 bp, Glycine max
  Clone ID: LIB3139-062-P1-N1-B7
caaattccggccaccgtcgccacctgcttttcccgaataacctgattgatacctttgaacatgtaatcaaatataccattgaagaaaagcagactttccattccaatttgaaatcatcacttcacttgcaatggcgagtaccacaccctctgctgactctgcttcagcagatgaagttaccgcaaaagccgttcacaagcgctaccaagggttgctcacggttcgaaccaaagctataaagggcaaaggagcttggtattggccgcacctggaacccatgttgctgcacaacaccgaaacgggcctccccaaagcggttaaactcaggtgctccctatgcgacgccgttttttccgcttccaatccttcacgcaccgcttctgagcatctcaagcgcggaacctgccccaattttaatt

SEQ ID NO: 43519 - DNA, 370 bp, Glycine max
  Clone ID: LIB3139-062-P1-N1-B8
gactgtagataatcatgttaagcttggaggatgtaccacttctgatgtgacacacaatgcatgagctgataatgggaacttttcttgtggtccaaacaattaccgacagaaaggtatctcgggttgccccggttgttcggcccataaactgccgtgtttaaccattagcatttgcagttgcgctctctggattgtctttgtgcgggcgttttgctatctcgccaaaagcatgtaatagccgtgttcgatgcaaaaatgttttccgttcatacagccccacgtattatattccagaaattttaggtgctagacctggggggcctttagggggggcttactcgaataaatttgttagggttcccttcctttt

SEQ ID NO: 43520 - DNA, 361 bp, Glycine max
  Clone ID: LIB3139-062-P1-N1-B9
cagagatggtagctattggctttggagcccctccttctccacttgcgtttcatcttcgcctggcttgctctccttctcctttggccttcccaataatccacaaattccaaaacgcaggcaagtcagtgataacaatctgttcaaagaaaaatgcaaaatcaagggtggtcactctctgcttttgacctgggccaggtggtatgccggagcaggggggtaggggtattaccttgggaggggggaggggttcggttgtcctattggctggagggcaaggcaagaggatgggagctagcatgccaaagcagtatctttctttttttggtcaacccattgctttgtataggttccacactttttt

SEQ ID NO: 43521 - DNA, 280 bp, Glycine max
  Clone ID: LIB3139-062-P1-N1-C10
ctcgagccgctcgccattaaaatctggtgctttggccctgagacccttggacccaacatggtggttgatatgtgtaagggagtccagtatttgaatgaaatcaaggattctgtggttgctggattccagtgggcatcaaaagaaggtgctttggccgaagaaaacatgagagccatttgctttgaagtatgtgatgttggtctgcacgctgatgctatctacagacgaggtggtcaaatcatgtatactgcaagtagagctttgtatgcttcccagatta

SEQ ID NO: 43522 - DNA, 337 bp, Glycine max
  Clone ID: LIB3139-062-P1-N1-C11
tgaaactcctacagttgtatcagaaacactccacgcctacgctattgccttataatctttggtccacgcttttccctctcctcttcgcacacagccttccttcctagggtttcatccaattatgaactgtgaagtgtgccagctcaaggaactggaactggagcattttgagatacgcgaggtcttgcgatgcatattgcacacgatcgtctttcaccgtgccttgggtctcgtgcgccctaaagacgttgacttggagctatttgacgtcacttatgtgcaatgtggagaggcagagcttgaaaagaaaatagatgagaagattgagcagtttgtt

SEQ ID NO: 43523 - DNA, 411 bp, Glycine max
  Clone ID: LIB3139-062-P1-N1-C12
atcaattctcccttcataataaacccactgatcgcttctctttcctcttctctctctcagtagaaagcctacaaccttcttttatctgcgtttcctctctctctctctcgatcagtgctagacaaggactggtaaccaaaaattccaagaagggtacattaattcatggcctttgaggagcactatgtttctcaggaattgaaaaccatccccagctccatgacagtgacagaaaatttggatgggtgttttgattgcaacatctgcttagattttgcacatgaaccagtggtcaccctttgtggccacctatactgctggccctgcatctacaagtggctccatgtccaaagtgcttctcttgcaccagatgagcacccacaatgccctgtttgcaaagatgacatatgc

SEQ ID NO: 43524 - DNA, 441 bp, Glycine max
  Clone ID: LIB3139-062-P1-N1-C3
gagcgaaagacgaaatttacgatagcttttgaaggtaccagtttttgtcatgactctctcagctgatcggtgcttatagatccagcgtcagcagattcaatttgacactggaagcaatttctcatttcaaagattaagtgaaaacatgggtgtccttgctgcatccattgtgagcaaatctggcaaagttctagtttctagacagtttgtggacatgtctcgtatcagaattgagggtcttctagcagcatttcccaagttaataggcactggaaagcaacacacatatgttgagacggagaatgtgcgctatgtttaccagccaatggaagcactatacctgcttcttgtgacaaacaaacatagcaacatactggaagatttgacaactttgagacttttcttcaaacttgttcctgaatattcttacttccttgatga

SEQ ID NO: 43525 - DNA, 422 bp, Glycine max
  Clone ID: LIB3139-062-P1-N1-C6
aaatatgtgaatggctttttcttattccattccaaccaaccaggtcgggtgttcataagtctaagtaaggatatggttgggttgttattgctatggctgggatatcttccaccagatcgagggctttggtcagctaaattagtcaagaaccggtcatagcacaaacaattcaaagagaagattttcatgaatcttggtgcatgtgtgccaacgtggaaagatagggtgtatgtgtgtacaagtggaatttttgtggaatttttgtgtggctaggtagccagaaatcacaaggaagatgttcaactcgacaaattgtgatactgatgatgccaactgtgcaagggcattgctatctatatccgaaatcacttttgggagcatcctttgagtcttgggaagtccagcgtttggaatagttcttc

SEQ ID NO: 43526 - DNA, 440 bp, Glycine max
  Clone ID: LIB3139-062-P1-N1-C7
gtacttatgaggcccattcactccttttgactgctgcattcccagacatcacaatcttgaccattaaacagcaacagtacagagcattttgatgcatgtaagtggacaaaatcagaaccacattcctgggaattgatcttcccaatagaggtatgtggtcctaataatggttttgaaatgtggagttctgagtgggcaaatcaaacttcatggcatttgagtttccttattgacaatcccaaacagtctacagtttttgatattctcttgggaatctctcaagattttgaaattgctggtaatactcttatgccagctttttctgttccacaggctactgccagatcttctgaaaatgcggaatcctctgcatgatctggaatttatgttttctttcgcttgttcgttcgtttaattcaataaaggaaattgggcatgac

SEQ ID NO: 43527 - DNA, 158 bp, Glycine max
  Clone ID: LIB3139-062-P1-N1-C8
tttgaaatgtggagttctgagtgggcaaatcaaaaccattattaggaccacatacctctattgggaagattaattcccacgaatgtggttctgattttgaccacttacatgcatgaaaaagctctgtgctgttcctgcttgccaaaaacacttgtacc

SEQ ID NO: 43528 - DNA, 462 bp, Glycine max
  unsure at all n locations
  Clone ID: LIB3139-062-P1-N1-C9
ttccaatatattccattctctctgtgtatttccctacctctccctgcaagatgcagatcttcgtcaagaccctcaccggcaagaccatcacccttgaggtggaaagctctgacaccatcgacaacgtcaaggccaagatccaggacaaggaaggaatccccccggaccagcaacgtctcattttcgccggaaagcaacttgaggacggccgtacccttgctgactacaacattcagaaggagagtactcttcacctcgtcctccgtctccgtggtggcatgcagatcttcgttaagacactcaccggcaagaccataaccctagaggttgaaagctccgacaccatcgataacgtcaaggccaagatccaggacaaggagggtatccccccggaccagcaacgtctcatcttcgccggaaagcagctcgaggacgggcgcaccctngccgactacaacattc

SEQ ID NO: 43529 - DNA, 422 bp, Glycine max
  Clone ID: LIB3139-062-P1-N1-D10
ccaccactattcgtttgaccccaattacactttccggtaggtggtgctattagtgtagaagatgagttcgctggatgcaacaagggctgaacttggtcttcttgatgtatatttgggcaagggtgaagcaagggacaaaatatgcagggcaatacaatatggttgcaaatttttgagtaatggggaacctggtactgctcagaatgtagacaaaacaaccagcttggcacgaaaagtctttcgtctctttaagtttgtcaatgacctacatgctttgataagttcaacaccacaggggacacccctgcccctagctctgttgggaaagtccaagaatgctctactctccactttcttgtttcttgaacaatttgtgtggcttggcagaacaggcatctaccagaataaagagcgcaccgaac

SEQ ID NO: 43530 - DNA, 440 bp, Glycine max
  unsure at all n locations
  Clone ID: LIB3139-062-P1-N1-D11
atcacaataggttttgcctcttgctttcttagcatctaataattattcatctcatgtaaattttgcttcaattaaaatgtcaactccatcctgggatttggacacatctctaattgtgctaagtttgtgtgacatcttatttaaccagaggtgcaagtcctggaagaagtcctaccagggattctggggagctaaaccaaggacgtgctttgttgttggctagtcctggcaaaaaaagtcctggccaaaaagcatctgaacctcctgcccccaaacatggtcagggattttcaaaaagcccttcaccaaatagcatgcctaagcgtattaaaaaagggcgtggctttactgagcgttatgcctttgcacgaagatatcgcactccatctncagagcggactcctcctcattcatatcgntatggtgatagaaatataaga

SEQ ID NO: 43531 - DNA, 414 bp, Glycine max
  Clone ID: LIB3139-062-P1-N1-D12
gtcagtgtggctctgtttcatttgcatgaggatgctcggtttatgattcacacactccaatgttctgcatcatcttacaggctatttccttggtcgacaatctgattgcatagtctgatcattctgttgcatgtctgatgcacagtctaatcagacttatagcatagactgatatccttttttgttatgtcttataccttgtttcatatgctattttctaacagtaccacatgaatatatttctggatttggccaatagagatgaattaattgttacaaacaggaagcctgtacacccccattgtcgtgcaattgacaatgatgattctgtaacaaattaagaagagagaaggtacaagtgtccaaggcaggtacacactaacttttagttttaggtttgattcgttccatatg

SEQ ID NO: 43532 - DNA, 461 bp, Glycine max
  Clone ID: LIB3139-062-P1-N1-D2
caactttgaagatactcttgcaaattacgagaccgaaaacagtgatgttggggaagataccaggaacagacatatatagaaatcttgatcaatacaaggaagctgtgagaatacctggatttcttattttaagcattgaggctcccatcaattttgccaacatcacatatctcaacgagagaacgttaagatggattgaagaagaagaagacaacataaaggaacaattaagccttcgattcttagtattggaaatgtcagctgtgagtgctgttgacacaagtggaatctcacttttcaaggagttgaaagcaacactggaaaagaaaggtgttgagcttgtgttggtcaatcctcttgctgaggtcatagaaaagcttaaaaaagcagatgaagctaatgatttcataagagcagataaccttttcttgacagttggagaggctgtagcttcactttct

SEQ ID NO: 43533 - DNA, 412 bp, Glycine max
  Clone ID: LIB3139-062-P1-N1-D3
ccgcatgatctccgccgtccgttcaagcgaccagcgatctccgatcaagagcggcgcagggaacagtctctgctccgccaggcacagagtcgccaagacgcccagcgccacgcgcgcttcttggcctccgccgcactctctctcccacccaaaacccccgaaccagaatccgaacccaaacccgaactcgcggaaaccgaagccagttcggattccggctacgagagcctcgacatcgttggagcgtcgacgctttcagctgcggaagctcgcaagtggttcgcgaagcagctcatgcacccggagtggatgatcgacatccccaacaacctcgcccaagactggttcgtcttcgctcgcccttccgggaaacggtgcttcgtcgtttcgtgcaacggaacgacgataagtc

SEQ ID NO: 43534 - DNA, 425 bp, Glycine max
  Clone ID: LIB3139-062-P1-N1-D4
aacaccattaagtgctgcacttaaaggtgttgagggtttggactatatggaaagaattcctcttgccacatctgagggttttcctcatgtgctttcacgcaaaaatggcgaaaaaggcaaaaggagatttgtctctggggatggtgaagagatgacattgattccaggaaccagtgttgaagaggcttacaacaagctaatagttgaacttgagaaaagtgttcctacattggttggcattgaatgtcccaaggatgagaaacttcctcgtcgcaaaatttttgacaaacctaagacgcgctgcttcactattctccctatggagtttaatcttgtggtccgtcaaaagtttttaaattttgtgaggttcattatgaagaaaaaggacaagcttagttgtcaagttggaatcaacccatactcca

SEQ ID NO: 43535 - DNA, 299 bp, Glycine max
  Clone ID: LIB3139-062-P1-N1-D5
acaaatacaaacagttgtggtgttatgtatggagagagacacatatcggtgaggatgtttctgcatttaatacagcctagggagtctacctttgcgcatgaggaacgatgaactcgttgttggtgacattaaacgactacaggatgaagacattcaggacaatggggtcaccataattggtgcagatattctgggcatatgcatgactgggccaacagagccactgacatcgattggtattaagctaacattcatgggcatgcttgccacgactataatgacgcttttcacatgggaga

SEQ ID NO: 43536 - DNA, 473 bp, Glycine max
  Clone ID: LIB3139-062-P1-N1-D6
agactgtgaattgtggaatcctgcttgcacaaaagcaatgactatgtcatttaatccaaacccgtgttctgatgcatggagtttggaatttttgaagcgtaccggatttcattgtgatatcatttgtgtcactgggtggactgccaccccaatgcaggatgttcaggttacaattgattggtttatttcctctcaggaatgtgttcccaggacctattgtgttttaaatccacaaaatccttttgtgttaaataggtggatgggaaaactgactttcccccagggcacttcccgaagtgttaagagaatgcctctttctatagggggaggagctggtgcaaagaatgctattctcatgaatatgccaaatgctgttctttcaatgtggagatattttgttggagatctcgtctttgaagtttctaagatgacttcttcctacattaaatgtacagtctctgtcttcatagcat

SEQ ID NO: 43537 - DNA, 77 bp, Glycine max
  Clone ID: LIB3139-062-P1-N1-D7
cacaaacaggagcagcttgtagagagtcaggaaaaagatgtattgaaatcgtcacatgaggaatgaacacacctagt

SEQ ID NO: 43538 - DNA, 451 bp, Glycine max
  Clone ID: LIB3139-062-P1-N1-D8
ctcgagctctgagaaaaacagatagtgtgggagagagaagagcggaagagaaaatgacgaccaggttcaagaagaacaggaagaagagaggtcacgtcagcgccggacacggccgtatcggaaagcaccgcaagcatcccggaggtcgcggtaacgccggtggcatgcatcaccaccgtatcctcttcgacaagtaccatcctggtttcttcgggaaggtaggcatgcgctacttccacaaacttcgcaacaaattctacaatccgatcatcaacatcgacaagctgtggtccctcctcccccaggaggccaaagacaaggccaccgccgacaaggcacccttgctcgatgtcacccaattcggttactttaagggtttgggtaaaggggtttgcctcagaaccagcctcttgtcgtcaaggccaagcttatttccaagatcgctgagaag

SEQ ID NO: 43539 - DNA, 458 bp, Glycine max
  Clone ID: LIB3139-062-P1-N1-D9
ctcgagccgctcgagccgattcggctcgaggagataactagaaacagtgtgatgaaaatgaaggtccttgttttcttcgttgctacaattttggtagcatggcaatgccatgcgtacgatatgttccctctccgaatgaacactggctatggtgcccgtactccggaggtgaaatgcgcaagttggaggcttgctgtggaagcacacaacatctttggctttgagaccattcctgaagagtgcgttgaagcaacaaaggaatacatccatggcgaacaatatagatcagactccaaaacagttaaccaacaagcttacttttatgccagagacctcgaagtccatcccaaggacacatttgtgttcagtatagatggcaccgtactctctaatattccatactacaaaaaacatggatatggggtggaaaatttaactcgaccttgtatgatgaatgg

SEQ ID NO: 43540 - DNA, 467 bp, Glycine max
  Clone ID: LIB3139-062-P1-N1-E10
catatataaaattgaggttaagcaacaagcacagtaactgtaacgggttaagtaagtttgtgctgcgagagagaggggttccgttctgggatatggtgtaaactaaaattctgaatgtgtacacttgtaaggtgtgccagcttgcaaaacttggcatctgcctttttgagtgtagctagccccatcttcacgtgatctgctcttaaccccttttgttttcttctcctcggttctattcttattcctatatatgcaccccatcctcagtctccattctcacacttactagtagtaagcatggagtcctcaaagatctatgcttacctcttcctctgcatgatctttctctcttccgccactcccattctcggttgtggctactgtggcaaaccccccaaaaagcacaagcctggtaaaacaccaaagacacccaaaacacccgttgttagccaccagtcaccattcct

SEQ ID NO: 43541 - DNA, 467 bp, Glycine max
  Clone ID: LIB3139-062-P1-N1-E11
gattctagcaagcagagcttttgtcaattttctattgaccttctcggtggaggaattttagtggacaaaactggagattggatcacacttatacaaaattctccaattagtaacttgttgagagttgctgcttggaagaaaggttgtttaatggtcaagattgtgatgtctgggaatgcagcagtcaaaaggagtgattgggcctcattggtacaagtgtttttaacaaacagcaacagtacagagcattttgatgcatgtaagtggacaaaatcagaaccacattcctgggaattaatcttcccaatagaggtatgtggtcctaataatggttttgaaatgtggagttctgagtgggcaaatcaaacttcatggcatttgagtttccttattgacaatcccaaacagtctacagtttttgatattctcttgggaatctctcaagattttgaaattgctggtaatac

SEQ ID NO: 43542 - DNA, 452 bp, Glycine max
  Clone ID: LIB3139-062-P1-N1-E12
ggggaggataatattgtttctaacagattccctgtttgtgatgatcgtcattcaaagttgattccctgcttagatagacaccttatctatcaaatgaggatgaagctggacctgtctgtgatggagcactatgaaagacattgtcctcctgcggaaaggcgggacaattgcttgattgctcctccatcaggatacaagggtcctattaagtggccacaaagcataaatgaggtgtgcaaagcaaatatcccacatactcaccttgcacacgagaagtctgaccagaattggatgactgtaaaagctgtaaaaatagtgtttcctggaggcgggactcattttcattatggagctgacaagtacataacatcaattgcaaatatgcttaacttttcaaacaataatctaaacaatgaatgaaggttgcggacagtgcttgatgttggatgtgg

SEQ ID NO: 43543 - DNA, 468 bp, Glycine max
  Clone ID: LIB3139-062-P1-N1-E2
agcaagcacactgtctgactgttttacatcgctcacaacggtctaggcatcgctgttaggatatcggagccactcaaggcgcagatacatattttgagctacgccgatttctaccacgtggctggcggtgatgacggtgaggtcacgggtggacctgaagtctcattgcaccctggaagagaggacatgcatgagacatcatcagcagctctcttagtccgatatacagtaacggtgctgaccataaacgagatgtgtttggcacagatatcggtcttaatgaccaagatatagctgctctaattggggattacacgtcttgactctgctcatatggtagtaggactggagtggggggaccttggtacttctatcctttgatttactatatcctattcactaagccgcattggcgttcaaagaggtcttatttgaaaaacactcgggcgttggtgcaaatggttgctt

SEQ ID NO: 43544 - DNA, 426 bp, Glycine max
  Clone ID: LIB3139-062-P1-N1-E3
gttgcaatgaatggatacactttaacagaaattcatgcagcgtgctatagatcaaatggcaacgatgaaactgtggcttccccatcagattattttgcacttcttggccatatcacaatcaagacttctgactataagtcagattttcctgtgtcttcttcctggctagttgatggcagctacataaaatggacatcagaccctctgggttcaaagacccttgatcttaaaatttcttggaaactaaaaaatggacagaattttctatttctgaagtacaacgtgtacttggtgaaattatcaaaacaagcagatggtaatccaggtacaacattagaggatgtgaaggagtaccttggagtagcacaagtaaactggttttatgtttctgaccctcgagttccttctgacacttctagtctcaaa

SEQ ID NO: 43545 - DNA, 326 bp, Glycine max
  Clone ID: LIB3139-062-P1-N1-E5
attagtcctttttagaataaaatgtgaaaaataaagatgaaaacgataaaaatgaataattttttacagtgttagactagtaagaaattcttacagtatcatataccgaggtttactgccaagtgcaaaatctaggtatgtgccatttgatgatttggtttgtacatgtaattatatattatgatctaatctcaaattatcatttgaattacgttaagatagttatttaaaaaatcaatcacgctttcatacataataagttatgattggatgtttgagtaaaaaatcacactttatcacggcatgtctatgttgaatgcaattta

SEQ ID NO: 43546 - DNA, 272 bp, Glycine max
  Clone ID: LIB3139-062-P1-N1-E6
atctcggattgaaaggaatcagcgttggcggagaagctcttccgattccggaatcgatttttgaggttgacgccatcggcggcggagggattattatcgatttcggcacggcggtgacgcggcttaagagtgaggtttacgacacgctccgcgacgcgtttgtcaagggggcgaaggggatgccgtaggcgaacggcgtgttttggattgctacacgctacgacttgaaataaacggtgagcgtgccagacatgacacgggtctgattggat

SEQ ID NO: 43547 - DNA, 390 bp, Glycine max
  Clone ID: LIB3139-062-P1-N1-E7
cggtctaatatccacacatttccacattaaataaatacacacacattttagttttttcatgtacccattcgcgtgcgatagaattttctagagcgagagatttcggcgtaatgggtccaaacgcggcggcggcgaaacaagcggagaaactccgaattgacggcaacacttacttcaaaaaagaccgtttcggtgccgccatcgacgcttacaccgaggcgattacgctgtgccctaatgttccggtttattggacgaatcgcgcgctgtgccatctcaagcgcaatgattgggagagagtagaggagattctcggaaggcaattagttggacagcaattcagttaaggcccactatatgttggggcttgcattgctacagagacaagaa

SEQ ID NO: 43548 - DNA, 102 bp, Glycine max
  Clone ID: LIB3139-062-P1-N1-E8
aggaaattaggcatgactctcttgttgagtatgctctgcctatctgaaaatttccacacctcttttaattgtcgtaatgatgtgtgaagtgtgtgttatttt

SEQ ID NO: 43549 - DNA, 434 bp, Glycine max
  Clone ID: LIB3139-062-P1-N1-E9
attgaaacaaaaacaagtggcattgagaagaacagaaacatcatcaacacaaacacaacaaaaaacagccaaagaggaatacctcaacggaacttcctcgtttggctttcagtgtctgtctcactccttaccacaaaaccctacgcctttaccccttgcttttatttatccttcaacaacgcccgttccttgttgcttctcgccagaagaggatttggatcggagcgagtgtttttcactatcgatctggtttccttggatttggatttggattgaactctaataatgtggtgtgcggtgagagattccggtggccattactgccctaagaagaccgatgatttatgcggcgacgtttgtggccaggtaattattatcattccatacaagaaaaaaagttccatcttttttatgtgtgcgtgatttttgtgaga

SEQ ID NO: 43550 - DNA, 369 bp, Glycine max
  Clone ID: LIB3139-062-P1-N1-F1
gtgggaggaaattgaaggtcctggtttttttcgtggttccaattttggtagcatggcaatgccatgcgtccaatatgttccttttccgaatgaacactggctatggggcccgtcctccggaggtgaaatgcgcaagttggaggcttgctgtggaagcacacaacatctttggctttgagaccattcttgaagagtgcgttgaagcaccaaaggaatacatccatggcgaacaatatagatcagactccaaaacagttaaccaacaggcttacttttatgccagagaccttgaagtccatcccaaggacacatttgtgttcagtatagatggcaccgtactctctaatattccatactacaaaaaacatg

SEQ ID NO: 43551 - DNA, 448 bp, Glycine max
  Clone ID: LIB3139-062-P1-N1-F11
cgcgctgcttcactattctccctatggagtttaatcttgtggtccgtcaaaagtttttaaattttgtgaggttcattatgaagaaaagggacaaacttagttgtcaagttggaatcaacccatactccatggaatggactggtttggccaatagattactgagtaagggcaatgatattctgtgttgcgattatgctagttttgatggtttgattaccaagcaagttatgagcaagatggcagaaatgataaacagtctttgtggtggtgatgaaaaattgatgcgtgaaaggacgcacctgctgttggcttgttgttcaaggatggcaatttgtaagaaagatgtttggagagttgaatgtggaatcccttctggatttccgctcacagttatttgcaatagcatttttaatgagatgctcattagatatagctatgaaaaattact

SEQ ID NO: 43552 - DNA, 445 bp, Glycine max
  Clone ID: LIB3139-062-P1-N1-F12
gccttactttaattgttataaatctgaaagctttctagctggtcataacatcaccattactgatggtattgacaaaactagtgcaactttgcaatttagaaagttagcagattgtgattttctcaagagaaactttaagcagatgtctaatgttttgtgggtggctcctgaggacaaggcgagtttatggtcacaacttcattatgtgtcgggtaataatctggaaatgcaagaagcttatcttgtcaatctccagaatgtgttacgagaattgtatttgcacagtccagaggacgctcgtcaattgagaaggaaagctctctctcgtattgaatggctgcaaaaagctgatgtgcctaccatagcacagattgaagagttccattcgatgcataggatgatgaatgctcctgattcaaatgataatatagatttactgttgagc

SEQ ID NO: 43553 - DNA, 426 bp, Glycine max
  unsure at all n locations
  Clone ID: LIB3139-062-P1-N1-F2
gaaaagtaaaggcgaaagacnttacgtttggaattgggaattagggttcaattctggtcgcatatcaatgccgtgcgtacgatatgttccctctccgaatgaacactggctatggtgcccgtactccggaggtgaaatgcgcaagttggaggcttgctgtggaagcacacaacatctttggctttgagaccattcctgaagagtgcgttgaagcaacaaaggaatacatccatggcgaacaatatagatcagactccaaaacagttaaccaacaagcttacttttatgccatagacctttaagttcattccaaggacacatttgtgttcagtatagatggcaccgtactctctaatattccatactacaaaaaacatggatttggggtggagaaatttaacttcaccttgtatgatgaatgggttt

SEQ ID NO: 43554 - DNA, 464 bp, Glycine max
  Clone ID: LIB3139-062-P1-N1-F3
ctttgctctctgtgaggcttcaatttccaattagggtttcgcttagagtaaccaattaccatgggagtcttcacctttgtcgttcgcaaatccggcgccgaatggagcgccaagcaacattccggcgacatcgaggcctccgccgactccacctacgatctccaaaggaagctcgtgcaagccgctctcgccgttgattcctccggtggagtccagtcctccttctctcccgtgtctcctacctccgctgtgttccaggtgatagtgggtggtgctgtattcgttggaggtggcggtggtgctgttgcagctgcacctgcaggtggtgctgctgcagctgatgctgccccggctgctgagaaaaaggaagaaaaggtggaggaagagtccgatgatgatatgggattgggactgtttgattagagattttctgctttttattgagttttgatgggaaagtgttt

SEQ ID NO: 43555 - DNA, 455 bp, Glycine max
  Clone ID: LIB3139-062-P1-N1-F4
catatctccatttccatttcctctctctcagtttccaagaatcttaagctatgggaaagtcttacccaaccgtgagcgctgattaccagaaggccgttgagaaggcgaagaagaagctcagaggcttcatcgctgagaagagatgcgctcctctaatgctccgtttggcatggcactctgctggaacttacgacgtgagctcgaagaccggtggtcccttcggaaccataaagcacccctccgaactcgctcacggcgctaacaacggtcttgacatcgctgttaggcttttggagccactcaaagcggagtttcctattttgagctacgccgatttctaccagttggctggcgttgttgccgttgaggtcaccggtggacctgaagttcccttccatcctggaagagaggacaaacctgagccaccaccagagggtcgcttgcccgatgccact

SEQ ID NO: 43556 - DNA, 163 bp, Glycine max
  Clone ID: LIB3139-062-P1-N1-F5
tgttggtcgagataactagaatcagtgtgatgaaaatgaaggtcgctggtttcttcgttgctacaatttggggagcatggcattgccatgcgtacgatatggtgcctttgtcgatggacactggctatggtgcccgtactccggaggtgaagtgctgctgttg

SEQ ID NO: 43557 - DNA, 372 bp, Glycine max
  Clone ID: LIB3139-062-P1-N1-F6
ggctgggggtatttcgaggaaactgagtaactactcaacggtgggtgcgaccccaagtgcggcacgtgtgggaaacgacggtgacaatggagggacgatgattcctcgtttcaacgcttaccgactaaacaacctgaacgtgtgatcaaaagcataatctccaaaatctcaaactcatattataacgggatcggaggctgatctattacgcgctgttctctcagcttgtacaagattttctgttcgaactcaaccaaggatgtacctttcacctgcgccatgagtttcatctttgggaagcgaaagacccccgcagagcttctcgcggataatgagatgatgctggacaaatcaatcagtggaattgagcgt

SEQ ID NO: 43558 - DNA, 467 bp, Glycine max
  Clone ID: LIB3139-062-P1-N1-F8
gttaatcagccccaagagtaaagatttgttagagggaaatttttcctttgatattaaatctcgctctagattggaaaaagtttcctctacaaaagcacaatttgttagtggaaaaaccttcaaatatgatataattggtgctggttcacattcttcaggagattttcctgaaaaggaagatcaagaaaaacccaaaaagattgataccagattgagacaaagaatagatcctcaatacaatgaggttcaggctcagatggaaacaaatttgtttaaattgtctcttgatgatgttgaaactcctaaaggttctatgttggatcttaaaatttctcaatctaaaattgcacttcccaagaacacagttggaggaaccattctgcgtagtgatctattggcaaattttttgacagaaggcaattttagagcaagtgttgatttgcagcgcactcatcgtattaaaggat

SEQ ID NO: 43559 - DNA, 429 bp, Glycine max
  Clone ID: LIB3139-062-P1-N1-F9
taattccaatatcactttatgtgtccatagaacttgtgaaagttctgcagagtattttcatcaaccatgaccaggaaatgtattatgaagaaacagataggccagctcgtgcacgtacatctaatttgaatgaagaacttggtcaggttgatacaatattgagtgataaaactggtactttgacatgtaactcgatggagtttgtcaaatgttcaatagggggcattccgtatggccgtggtatgacagaagtggagaaggcacttgctaggagaggaaaagatgtggaatctgaagttgatgggggatcatctgatttgttgggtcagagtaatgactttgtggactctcggcatccaattaagggctttaactttagagatgagcggataatgaacgggcaatgggttaatgaaccatatacagact

SEQ ID NO: 43560 - DNA, 433 bp, Glycine max
  Clone ID: LIB3139-062-P1-N1-G12
gaaattttgataaaccgcgatcacaggttgccgcaccttaaaaccggaaacaaaagcaatcgttacttgttctcaagaatcttcaaactttcttctgttttctctgcactcggttctttaggaaaagaaaatcactctctgtattgattacagacttcgtgaatcattttcttttcaactttcagttcacttgctgaacactctcctataaatatataggacttcgtgtcagatttgaacttttcctgtctctttctcggttttctttcttattctcatcttctttaaattttaaggctcgtattttgtttctctaaactttctgttggactcatttgaaatacaacatgaagttttatccaggacaaaatgtctctgaaattgtttaccattttcagagtaatgagacagctaataggcttgatgcttattt

SEQ ID NO: 43561 - DNA, 463 bp, Glycine max
  Clone ID: LIB3139-062-P1-N1-G3
ctcgagccgcgtctttgaagtttctaagatgacttctccctacattaaatgtacagtctctttcttcatagcatttggaaatttggctgatgacaccatcaattttgaggcttttccccacaagctggtgcagtttggagagattcaggaaaaagttgtgttgaaattttcacaagaggaatttcttacagcttggtcaactcaggtgcgtcccgcaacgactctgttggctgatgggtgcccatatttgtatgctatggtgcatgatagttcagtgtctacaataccaggtgattttgtcattggtgttaagttgacaaccataaacaatatgtgtgcatatgggctcaatcctggtatttcaggttctcgtcttttgggcaccattcctcagtccatttcacagcaaactgtttggaatcaaatggcaacagtgagaacaccattgaattttgattctagc

SEQ ID NO: 43562 - DNA, 389 bp, Glycine max
  Clone ID: LIB3139-062-P1-N1-G4
gcaaccagttctttaacttcttgctgccggacataacccttgacgccaagagacaacttacacccactatcggactcgatatgcttgacaggaatagggtaactactatgaaaacacctgccacaatgtataaccgagcaccactgcaccatgaatatgggtaacaccgagaaccattcagcacagtgtctcaatggacaccatactcatacaaagcccacacagtggatgagagtcagatctaaagagatgctggtcaaacaagctgtgcagaccaagcaaatgctttccaaacaggccgttaagattgccaaacaagctgaggaacacgaaaggttcattaacaaggtgacccatcttgcgggagttctcggttttggtggattttg

SEQ ID NO: 43563 - DNA, 442 bp, Glycine max
  Clone ID: LIB3139-062-P1-N1-G5
cagggcgctttcctggaaaagattagatcggagaatcctgggataccatgctttctctttggtcactccactgggggagctgtggtcttgaaagcggcttcccatcctcatattgaagtaatggtggaaggaattatattaacctcaccagctttacgtgtgaagccagctcatcctattgttggtgtaagttttgcatttgttagttgtgcataatgtttgaaattaatgtgtttctgatttgttactacagtcctagccatgctcggtacacttgtacttatatcttaagcttgccgtaaaaacaacctccgtttccaattgttatgtcaattctctgtaatatacaaagttatcattggttcatttgatgttggtgaattggaagcagaataaacacaactacagatgttattttactttgaaatatatatactagatt

SEQ ID NO: 43564 - DNA, 456 bp, Glycine max
  Clone ID: LIB3139-062-P1-N1-G7
aagaaacctaacagcgccatagcgttctctaagctatcgtgcgaggtccctcgacctccgcacaaccccagcaccaaggggctgtgcctgtcgtcgtcttccacgcccatgtcggaacccgacacccaggcgccgccgccgcctccgttcctgctccagcgcccgccgcttctgcagtcggcgtcgccgctcttcaagcagcggtcgtggtcgccggacgccttccgcgacgaggcgtggctccgccgcaaggggaactggaagaaccgccgcagtaagagcgtcaccgatgaggacgtggacgagctcaaggcctgcatcgagttaggctttggattcgattcctcccccgaggtcgagctcgatcaacgcctctccgatactctacccgctctcggcctctactacgccgtcaacaaacgctacaacgactcccttgcaccaaaaccacgccgt

SEQ ID NO: 43565 - DNA, 460 bp, Glycine max
  Clone ID: LIB3139-062-P1-N1-G8
ctcgctcacattctctggttggcccttcaacttgtgttagtcaatcacttaagcttggcaaactcaccatacatgagactgaggattcattggaactagtggagcatgtcaatggagaggccattaaagacatcaaagaatcttcctttgttgaggaatcattgaaagatgaagatgggaatctcatgaagatccacagagttagcattgacgatttcgagattttgaaggttgttgggcagggtgcatttgcaaaagtttatcaggtgaggaaaaagggtacttctgaaatatatgctatgaaggttatgcggaaggacaagattatggagaagaaccatgctgaatacatgaaagctgagagggatatttggacaaagatagaacacccatttgttgttcaactcaaatactcttttcagacaaaatacagactgtatcttgtgctggattttgaaat

SEQ ID NO: 43566 - DNA, 348 bp, Glycine max
  Clone ID: LIB3139-062-P1-N1-G9
gtggaaacaataggccatgcaaaggtggtagcatcgatgttaaagtggtagattcctgttcaaggtcaccatgtcccaacaccctcctcatgtcaaatgatgcatttgcagctattgcacgcttccctcatgttaaaatcaatattgaatatacccagatatgacttgccagtgatacgtcacaaccagtgcatatgtacactactcataaacaacatcaaggaataagctgtgatttgttgaagagaagtgcaaagcagaatgtgatccaaaacaggatgtggaatttttatgtacttagattgaatattcaatatcatgacgttaataaactgttgatgttcgtgc

SEQ ID NO: 43567 - DNA, 395 bp, Glycine max
  Clone ID: LIB3139-062-P1-N1-H11
cgaataagctaccttgctagtttccatcatcgtatctgttagtatttccaaatatacacattttctattttattcatagaaatctttaacttgagaagcattacatggcgctgacgatgatggcggcgatcggcatcggcatgaagcaagagaagaagatgccggcgacgccggcgccggagaacgagctgaagaagcggaatgaggagctcgagaaggagctcagagagagcaaggagagggaggagcagatgaagcgcgaactccagagcgcgtgggagaggctgcgcgtggccgaggaggctgaggagaggctctgctcccagctcggagagctagaagcataggccgtttaccacgcgcgtgactaccacgcgcgcatcggctccctcatg

SEQ ID NO: 43568 - DNA, 277 bp, Glycine max
  Clone ID: LIB3139-062-P1-N1-H12
ctcgagccgattcggctcgagctttccttgtttccgaggagggccaaccacatatgctaaacaaggaaactaaattctaacctccttcagatctacaccacccttctcttttttttccagtttcataaattctacaccatgggcacggaggttctacggccacaagattgtttcacccaccgcatcgctgttccaccggcggggttttcccggagaaaaacctttgggacacacaacaacaattacttcaagggcacgcggaaaccggttacccgac

SEQ ID NO: 43569 - DNA, 214 bp, Glycine max
  unsure at all n locations
  Clone ID: LIB3139-062-P1-N1-H2
tgggtttacaaggagcaggtaaagcttttccaaacaaaattgtttttgatgataagcttgtgttggctaacacacaagaattctttgatggaaattttccagtggattcttggttaccaatttttgtgaattgtctttatcctgtaagtcaattaccttcagaagctgtcgttgtaaatgttacatgtggtagtggacgtgtggnttatccacc

SEQ ID NO: 43570 - DNA, 464 bp, Glycine max
  Clone ID: LIB3139-062-P1-N1-H5
gaaagctctctctcgtattgaatggctgcaaaaagctgatgtgcctaccatagcacagattgaagagttccattcgatgcagaggatgatgaatgctcctgattcaaatgataatattgatctactgttgagcattgatttgttgggtttacaaggagcaggcaaagcttttccaaacaagattgtttttgatgataagcttgtgttggctaacacacaagaattctttgatggaaattttccagtggattcttggttaccaatttttgtgaattgtctttatcctgtaagtcaattaccttcagaagctgtcgttgtaaatgtcacatgtggtagtggacgcttgtgtacccaccactgcttggattagttctgcagttaacaatcgctcctcagatatcaacaaaaggattcgcacagcacttgggaaaggtaagaaaatgtttttcttacttagagtgatc

SEQ ID NO: 43571 - DNA, 291 bp, Glycine max
  Clone ID: LIB3139-062-P1-N1-H6
gccacagttggtattcctgagaatacaggtatagcattggcctgtgctatgaatagatcttttagggggcgtgccagttctgatatttacaccatctgctctcaagactgtgaattatggaatcctgcttgcacaaaagcaatgactatgtcatttaatccaaacccgtgttctgatgcatggagtttggaatttctgaagcgtgccggatttcattgtgatatcatttgtgtcactggatggactgccactccaatgcaagatgttcagggtacaaatgattgggttatt

SEQ ID NO: 43572 - DNA, 384 bp, Glycine max
  Clone ID: LIB3139-062-P1-N1-H7
catttgtatatgccttgtcattgctttagtaagtgtgtcgcttgtgcaagcagaagatgcgtataagtatttcacatggacggtgacttatgggactctttatcccttggctagtccccagcaggttattcttatcaatggtcagtttcctgggcctagacttgacttggtgactaatgaaaatgtaattctcaaccttatcaacaagctggacgaaccatttttactcacttggaacggtattaaacaaaagaagaattcatggcaagatggagttttgggaaccaactgccccatttctccaaactcaaattacacatacaagttttaggcccaggatcagattggcacatatacatacttttcatcaactcaactgcataa

SEQ ID NO: 43573 - DNA, 422 bp, Glycine max
  Clone ID: LIB3139-062-P1-N1-H8
tggcaatggatggtggttagcatgcacctggaagactagtaattgaagaaataactgaagatgtgccttctggaagctcttctttggaacaaacagtggttcaaccaaaaaaatctggtgactcctctaagagttacagtacagctaacaatggaaatccaaaaacaaatgcagacagtttagatgcattgaaaaaagatcctgaagctgtcagatcattccaaaactttatttcaaataccgatcctgacatgctggcttctttgaatgctggacaattcaaagacgtgtctccagatatgattaaaactacctctgatatggttagtaaaatgtcacctgaggaacttcaaagaatgcttgacatggcttcttcatttcaaggggacaacccattttttagaggaggtcccctgattctt

SEQ ID NO: 43574 - DNA, 411 bp, Glycine max
  Clone ID: LIB3139-062-P1-N1-H9
ccaagggtaccttccctgaggtctacgtccccaccgtcttcgagaactacgttgccgatgtcgaggtcgattgcaagcacgtcgagctagccctttgggatactgcaggccaggaagattacgaccgtcttcgcccgctttcctaccctgactcccacgttatcctcatttgcttcgccatcgattcccccgattcgcttgacaacgtccaggagaagtggatctccgaagtcttgcacttttgccagggcctgcccatcatccttgtgggctgcaagaaggacttgcgctacgaccagaagacgattgaggagcttcacaagactttccagaagcctgtagctcctgaacaggccgaggatgtccgcaagaagattggtgcccagaagtacctcgagtgctccgcaaaga

SEQ ID NO: 43575 - DNA, 354 bp, Glycine max
  Clone ID: LIB3139-063-P1-N1-A1
gaaagttggagttatccaccccttacggatactgctgatgctgctaaaaaggttcatgaagcacttgctgcccgagggtggaaactgaaggtatagaatgcaatttgaagttgacaatatactttttacaaaattatttgtttgtctaaatgggtaaccatttgtttgatcggaagacattgcaatacataatattttattcagaccacaaataggaaatatagatggtatgcatgcaatcattttcagcgtagcaattttgaatgtgtaatgtaaagtaaagcatattttttggcattttcaagaatgaggcaaataaaaaaaatatattgaaaattttccctctattatctt

SEQ ID NO: 43576 - DNA, 349 bp, Glycine max
  Clone ID: LIB3139-063-P1-N1-A10
acttaactagtaatatttattagaatgtgccagagaattagacgaataaacatgatgccccagatggcttcaaaaacttgttcctcccttgcccttttcctcacactcaacctcgctttcttctcacttgtctctgcatgcggctatacaccatgccctggtccaaacccaaagccaaggcccaaccccaaccctaaccctaaccccagcccaagtggctcgtgcccccgtgacgcactcaaactaggtgtatgcgccaatgtgctaaacttggtgaacgccactttgggtcaaccaccagctacccctcgatgctcccttctcgatggtctcgttgaccttgaggctg

SEQ ID NO: 43577 - DNA, 350 bp, Glycine max
  Clone ID: LIB3139-063-P1-N1-A11
atgagcattagtgcagggaagttggtgtgtgtcaccggtgctgccggatatatggcggcatggattgtcaagttcctacttgaacgtggttacactgtcagggccactgttcgaaacccaaatgatcacacgaaggtagaacatttgctaaaacttgaaggtgcaaaggagagactgcacctttttaaggcagatcttttgggtgaaaattcttttgactccattgttgagggctgtgatggcgtctttcatactgcttctccttttattatcaacgtcaaagacccacaggctgacctacttgacccagcagtgaagggaactcttaacgttcttaaatcatgtgtaaa

SEQ ID NO: 43578 - DNA, 353 bp, Glycine max
  Clone ID: LIB3139-063-P1-N1-A12
aaacctcttctccactgtgaaatccacagtgcaatctgccatatcaaaggagacccgcatgggtgcttctctcctccgcctgttcttccacgattgctttgtcaatggatgtgatggttcaattctattggatgacacatcaagcttcaccggagagaagaacgcaaaccccaacaggaactctgctcgtggatacgaggtcattgacaacattaaatcagccgtggagaaagcatgtccaggagttgtctcctgcgcagatatccttgccatagctgccagagactctgttcagatccttggaggccctagttggaatgttaaagttggaagaagagacgctagaactgcta

SEQ ID NO: 43579 - DNA, 341 bp, Glycine max
  Clone ID: LIB3139-063-P1-N1-A2
gaaattctttctaaagttgcacaagatatggttgaggaatggtttgattgtgttgatgaggaggattcctttgaggaagtttctttaagtgcagcacttaatggtgttgagggtttggactatatggaaagaattcctcttgccacatctgagggttttcctcatgtgctttcacgcaaaaatggtgaaaaaggcaaaagaagatttgtttctggggatggtgaagagatgacattgattccgggaaccagtgttgaagaggcttacaacaagctaatagttgaacttgagaaaagtgttcctacattggttggcattgaatgtcccaaggatgagaaact

SEQ ID NO: 43580 - DNA, 352 bp, Glycine max
  Clone ID: LIB3139-063-P1-N1-A4
ataatattgatctactgttgagcattgatttgttgggtttacaaggagcaggtaaagcttttccaaacaagattgtttttgatgataagcttgtgttggctaacacacaagaattctttgatggaaattttccagtggattcttggttaccaatttttgtgaattgtctttatcctgtaagtcaattacctttagaagctgtcgttgtaaatgttacatgtggtagtggacgtggtggtctacccaccactgcttggattaattctgcaggtaataatcgctcctcagatatcaacaaaaggattcgcacagcactcgtgaaaggtaagaaaattgtttttcttactagagt

SEQ ID NO: 43581 - DNA, 333 bp, Glycine max
  Clone ID: LIB3139-063-P1-N1-A5
agctgagaaacagccaaatctcacaattggaattgttgtggctgttgtggttgtcttcgtgtcaattttcttcagactcatatttggtggcaagaaacctgcaaaggtggagaagaaaccagaacgcacagaagcttccaataaccaaggtagtggagagaatgaagaaaacaaagagaaggagaaacagaaagaggaagcatctaatgctgcgcgtcggaggccaaggcgagaaacttgaaatggttgaatctttattttaaagtggcgccctgtttagtatcatcatcaccacagataaattttgggcttagtttcattttaggtgcactc

SEQ ID NO: 43582 - DNA, 342 bp, Glycine max
  Clone ID: LIB3139-063-P1-N1-A7
cttgccttctttctccctccaaatccctaattccctgccatcccaaaaattcagacgggactaacattattaactcttctcttcgtttttcccaattaggtttccgagtctcaaccaatttcaccatgtccactcaaattccgagttagttagttatctctttccgccatggaaggtaacaaggacgaagcattacgctgcgttcgcatcgccgaagaagcaatcgcgtcgggaaacaaagaccgcgccctcaaattcctcagaatcgcgcaacgcctcaaccgcgatttgcccctccagtccctgctcgaaaagtgcgaccgcttcgattcgcactccgcc

SEQ ID NO: 43583 - DNA, 353 bp, Glycine max
  Clone ID: LIB3139-063-P1-N1-A9
aaaggaaaagaaggataaagaggagggtgagaaagaggatagcaaggttgaagtttgtgttagggatattgatatagaagaaataaaaaaagaaggtgaaaaagaagataaaggaaaggatggtgggaaggaagtgaaagagaagaagaaaaaagaagacaaagacaagaaggagaagaagaaaaaagttactggaaaggacaagaccaaggatcttagcactctgaagcagaagcttgaaaaaattaacggaaaaatacaaccactccttgaaaagaaggctgatatagaaaggcagattaaagaagttgaagctgaaggtcatgtggtcaatgaggagaacaagaatgagg

SEQ ID NO: 43584 - DNA, 351 bp, Glycine max
  Clone ID: LIB3139-063-P1-N1-B1
gggttttggttttttttcattatcttcctcagtaagcaatggcttctcccgcggagttttatcactctcttccgccaataacgaaggcatatggcaccgtttgcctgttggctaccgcaacttaccatcttggattatatcatccagcttacattgcactattctacgataaagtgttctacggttttcaggtttggaggttgttcacaaacttatttttccttggaccattctctatcaattttgggatccgtctcctaatgatagtaaggtatggtgtccaacttgagaaaggaccatttgatcgacggactgctgatttcttgtggatgatgatatttggtgcctttg

SEQ ID NO: 43585 - DNA, 319 bp, Glycine max
  Clone ID: LIB3139-063-P1-N1-B10
ctgaagttctctctcaatcacagcactacatggctagggctttaactcccatgcgtgatgttaggtgattaatcaatcacatccaacctccataacttcaagtctctaactgcttaaacaagctcaaaagctttacacacaacactctatgctgagtaaacctgtctaattccttcttgaaagacagacttcatggacatactgcacggataagcgtgagggtgacttgcacacctgccactccatctcaagtcaaggccttggggtgggccttaattgcaccactcttcaagctcaacgcgcacacaacagccccatc

SEQ ID NO: 43586 - DNA, 318 bp, Glycine max
  Clone ID: LIB3139-063-P1-N1-B11
cttatcttctcacacaatctctgttcaacatcgctagagaataatatctcaagtgtcatgtgatgagatgaaccaagcacaacaactttaagaagcttgaagtttgaactgtctcaaacatgttctcaaagcttcagtcacaacaccagcaacagcatcaaccttttcaattctctcgtgaatgtcaaacgtccgaggacgatgacagccgaagcagcggtggccctaacaccgccgtcgctcaaaaatcaattttaggcggcggaggatgcagcgatggggccacaattgaagtggtgcggctgcacaacaaccccc

SEQ ID NO: 43587 - DNA, 349 bp, Glycine max
  Clone ID: LIB3139-063-P1-N1-B2
gtgtgtatggtgatgataacttaattagtgttcatgaatatgtcaagccttacacacacaaagaaacaaaatttttgaaggattgtaaaaacatacttggagctttagcctggcgcagtaatttttttacaatccttcaaaaattttgtttctttgtgtgtgtatggcgatgataacttaattagtgttcatgagtatgtcaagccttactctcgtggtgctgaattgagaggctttgtacgcgtgcatactatgaccattactgatggtagtgacaaaactagtgcaactttgcactttagaatgctagcagattgtgattttctcacgagaaactttaagcatatgt

SEQ ID NO: 43588 - DNA, 355 bp, Glycine max
  Clone ID: LIB3139-063-P1-N1-B3
ctcaactcaagtcctcttcctttcactttaatccaacagtgataattattcgcaaagagaaaaaaaaacacgttgaacagataccatcatcattcatcttcatccccacatcatcagaatttcaagactcagtttttgactcactaagtaagtagccaaacaatttctcgggttcctgttcaagttgattcctttgataagttaccaacttcactcgataaaaacccattaacaaaccaaacagagtgacaaagtttgcaattacaaaaggttcaattatcaaatctggtcagtggtgatacggaacaccaggaagagtctgccatggctgacgccagtcctagaactgatattt

SEQ ID NO: 43589 - DNA, 359 bp, Glycine max
  Clone ID: LIB3139-063-P1-N1-B4
gcccctctctcttttcttatagagaccacatttattcattgcattcaaagggcaatggcctcttggaagaagaccatcacaactccattcaaaaaggcttgcactttctttaaccagcaaccaacatctgcaagggatcaaaagaagtctcaaacagagcaagagaggcaagtaatggatctgcacggggaagtgatggcatgtgggtatgaagatgttcaagtgatgtggtctattctggataagtccaaatccacaaactgcaatataacctcttcaacctgacccaataaaaaaacacgaaagtggcacttcagcaattagcggatgtttttgtatgctaatgtttaaggtcataa

SEQ ID NO: 43590 - DNA, 347 bp, Glycine max
  Clone ID: LIB3139-063-P1-N1-B5
aacatgttgagtctggtcttcattggcattcgtcttgaacaacaatttgggtttgtgaggataggaattatttacttgttgtctggattcggcgggagtgtactatctttcttattcattagaaacaacatttctgttggtgcttctggtgctctttttggacttcttggagcaatgctttcagaacttatcacaaattggagtatttatactaataaggcagctgctttgttcacacttctgtttattattgacatcaatcttgccattggaatgttaccacatgttgataactttgctcatattgggggattcctcacaggatttctccttgggcttattttgct

SEQ ID NO: 43591 - DNA, 349 bp, Glycine max
  Clone ID: LIB3139-063-P1-N1-B7
cagaactactctagcattcccaactctacaaacacagcatcacctttgtgctttgtggttcttctcactaactcagacaactaccatggcctcaaaatccagacccaatctatctgaaaattccaacaaaggatcaattgcaactcctagagtcagtaaaactagcaaactagcatccaagccagaatctgagtcaccatcacctttgcaaaattcacggctttctgtggaacgatcaccacgatctgtgaattcaaagcccactgttgagcggaaatcaccaagaccctctgccaccccacctgataaacaaccccccagagctgcaaagggttccgagttacagaat

SEQ ID NO: 43592 - DNA, 170 bp, Glycine max
  Clone ID: LIB3139-063-P1-N1-B8
ctcaacttatctctcattccctacgctacatccccagcgttttacatgtggtgtcggaggttatgtgatcaatcaaccacaccacacttgctcaaatttgatcctctactgatttaaacatgtctacaatggttgactcgcaccgcacggacagactgaaacttgcaacc

SEQ ID NO: 43593 - DNA, 338 bp, Glycine max
  Clone ID: LIB3139-063-P1-N1-B9
gggaaattaactctcgttaattgcagggcatccataggatccttttgagggtgtccgagggaaagtgattgatcttcaaatggctacatggtcaacttcaaagatttttgggttagaacatgtattacatggtggacactcagcgcaccttgttgggaaaaccttattaattttttgtggacgagatgcagaacggacacttcttgagtgatcttaatatgcttgacttggaacccatcacatgagactaaatttatgctgttggggtgcgcactaatggaacgacagttgatgctgctcgtgaacacgacgagcgatacttactgatattcggtggg

SEQ ID NO: 43594 - DNA, 353 bp, Glycine max
  Clone ID: LIB3139-063-P1-N1-C1
gttggaaaaggaggcaaattgaatagagacagggtaaacaagttgaggtgtaattaaaaatatgtgcaatatactaatctaatattctccttctcatttgtaataataataaagtcatgtgctgatgtagtaaaactagtacaagcctagtgatagccatagtgccatggctgctaacagcagaccaagaaggactaccaggaggccaacatacctctgcgattacgcataagggacagatcaagaaaaggactaggatccaaaatatttccttaatctcgttaacaattctgttacaacaaattcacaaattctgttatttgtagttagtgcattcccaggtggccaaggat

SEQ ID NO: 43595 - DNA, 319 bp, Glycine max
  Clone ID: LIB3139-063-P1-N1-C10
gcacgaatatcttgttgtttggagcgatccgagaaaaactctgtaaacatgttggtgtaccaggacctccttacaggtgatgagcttctctctgactccttccgttacaaggaaattgagaatggaatgctgtgggaagttgaggggaagtgggttgttaaaggagcagttgatgtaaacattggtgcaaacccttctgctgagggtggaggagaagatgagggagttgatgattcatcagaaaagggtgttgacattggcgtcacatatcgcctttaggagcccccccactgctgtcagaaacagcttgttacatgca

SEQ ID NO: 43596 - DNA, 351 bp, Glycine max
  Clone ID: LIB3139-063-P1-N1-C11
gtcttttgtttggaaagatcaaagacggtgtaggtgttgcaaattcgcatccggtgattacatgtggggctactgcttccctggggcttctggtacttaagaggcctcgtcgggtcttgtactacaacactttgcgcctttttgttagtgaagagtccatgatttctagagcccatgctgaagtgaaagaattgcggcaatcaattgagcttttaaaggctgaaggtgaaaagttggagaagagtgcattacatgcagaagagcaattcttacatggaaggacaaaactcagacatgcaggaaagcagatccgtaacgtgattcaatcagcatataaaattgaaatacgag

SEQ ID NO: 43597 - DNA, 318 bp, Glycine max
  Clone ID: LIB3139-063-P1-N1-C12
ctcttttcacttcaacaccaactgtgcctcataatgttctttctcaggccttccagattgatgctaaactggttgatgacatcaaggccaagcttgctcctaagaagacttaatttatgttgagcttatgatattccagagaggaagattatgataatagtttcataattaagactactttccctatatttttcctataattcttgaagggttatgattcattgtatcacttaccgtgttgcattttgctcattgatattacgtcgagaataatgatgtaattgtatcgcggattatggtacatgttaagagtaatat

SEQ ID NO: 43598 - DNA, 354 bp, Glycine max
  Clone ID: LIB3139-063-P1-N1-C2
ttgatcagcaaatgggagagtttgttatcttcgtctaatgggtcttgtgagttagatgtgtggccttttgtccaaaacgtgtcaagcgacgttcttgctcgtgcaggctttggaagtagctatcaagaagggaaaaaaatattcgaacttcaaagggaaatgattcagcttacaatgacgctctttaagtttgctttcattccaggttacaggtttctgccaacgcataccaacaggaggatgaaagcaattgacaaagaaatacgagaatcacttatggtaatcatcaaccgaagattaaaagcaatcaaagcaggggagcctactaacaatgacttgttaggcatactcttg

SEQ ID NO: 43599 - DNA, 351 bp, Glycine max
  Clone ID: LIB3139-063-P1-N1-C3
ctagactcttctttttctctaagtctaaggggtgccctgagatcactttgagcaatggtgaaggctgtggcagttcttggcagcagcgagggtgtcactggaactattttcttcactcaggagggaaatggtccaaccaccgtaactggatctcttgctggtcttaagcctggtctccatggcttccatgtccatgccttgggggacactaccaatggttgcctgtcaactggagcgcatttcaatcctaataacaacgagcacggtgcccctgaggacgagaatcgtcatgctggtgatcttgggaatgttaatgtcggtgatgatggtaccgttagcttcagtattacc

SEQ ID NO: 43600 - DNA, 356 bp, Glycine max
  Clone ID: LIB3139-063-P1-N1-C4
ggctgctctaatgtacaaaagggaaatatagctggagctggtaattggaagcatgaggacattgaatccacatcatcagcatctgttggccctgaatactgcaaccagtcccccaatttgcaggctcaaaatggtactcacttagattcaggagaggcgggggatgcctcatctactttttctaatgaagaagacgatcaagtcactcatggtagtgtatcattaggttatgatggggaaggagatgaatctgagcctaagagacggaaactgggatcatatgcatagttgagctgagctactagagccattcgcgagcctagagttgttgtacagactaccagcgaagtccatat

SEQ ID NO: 43601 - DNA, 353 bp, Glycine max
  Clone ID: LIB3139-063-P1-N1-C5
gttgtgaattgcagtccatgggatgatgctctatataaggatgctgctgagagaactaacatgggttacatatctcttaatggattcctggcgcaggtggggttaacttatgctgttttttattcttcagaatgagttattgatatatctcttaaattgtatgatgcagtgggtccttatgacattacttgatccaccatgtagcctggctaatttgatttacattggatatagtggtaatccagctgctgctcttcgtgttacccgtagaagagcagtagatcgcaagaagcaagcaacagaaaagaatgtgttccaatgctatgtttttggttctaaaaatgctgggaagt

SEQ ID NO: 43602 - DNA, 356 bp, Glycine max
  Clone ID: LIB3139-063-P1-N1-C6
ctctctttctttttcttaccatatcaccccttgtctgtccttgtttacggtgaggggcaaccacaacatatgttaaacaaggaacaacctgcaaaacataacatcctacgccaaacaaaactttgacctccttcagatctatacccttctctctctctctcttctattttcaaattctacatcatgggcacggaggttctacggtcacaagattgtttcacccaacgcatcggtgttacaccggctggcttttcccggcgaagaacctatggtacccaccacaacaacaaaaacaataacgttgacaattatttcaggggtaaccggaagccgacaacccgacccgaacaaagaaa

SEQ ID NO: 43603 - DNA, 347 bp, Glycine max
  Clone ID: LIB3139-063-P1-N1-C7
tgataaaccgcgatcacaggttgccgcaccttaaaaccggaaacaaaagcaatcggggcttgatttcaagaatttctcaatttcttcctacttctttgtgtacgatttcttaagggaaagaaaatcactctctgtgctggccacagacttcgtgaatcattttcttttccactcttagtttatttgctgaacactctcctatttgatataggacttcgtgtcagatttaaacttcttctgtttccttctcagttctctgtttaatttcaagttcaagctggtgaaatcttggattagtgctcccactctcctatctggtataggacttcgtgggtagacttttctat

SEQ ID NO: 43604 - DNA, 349 bp, Glycine max
  Clone ID: LIB3139-063-P1-N1-C8
ctttaatctgattctgcaacaacatgaacctgagaatcggccacagggtgctgtgtggagtgacaaacagggtagatctagacaccgccagttataatcacacggtgatcgacaaccatgatgaatacgagaggctaatgctgctcacacagatgagctacctgaaaacattctttctgtacactgttattaccgacatctgaactaatctagaacggccggctcccagaatcaagtgcacggtctatgatcactaatgggggcatccatgttaccagatcggggaactcaacgaggactgcatcatgctatgcgttttgtggaaggtattgcagatggactcctcaat

SEQ ID NO: 43605 - DNA, 329 bp, Glycine max
  Clone ID: LIB3139-063-P1-N1-C9
ccaacttgacaactaagcttgccccttttcttcataatgaactggtttggccaatgggttactgagtaagggcaacgatattctgtgttgcgattatgctagttttgatggttcgattaccaagcaagttatgagcaagatggcagaaatgataaacagtctttgtggtggtgatgaaaaactgatgcgtgaaaggacacacctgctgatggcttggtgctcaaggatggcaattcgccagaaagatggctggagagttgaatgtgggatcactactggatgtccgctcacagatgtctgtaatagcatgtttaatgcgatgctcatta

SEQ ID NO: 43606 - DNA, 351 bp, Glycine max
  Clone ID: LIB3139-063-P1-N1-D1
gtgatatcatttgtgtcactggatggactgccaccccaatgcaggatgttcaggttacaattgattggtttatttcctctcaggaatgtgttcccaggacctattgtgttttaaatccacaaaatccttttgtgttaaataggtggatgggaaaactgactttcccccagggcacttcccgaagtgttaagagaatgcctctttctatagggggaggagctggtgcaaagaatgctattctcatgaatatgccaaatgctgttctttcaatgtggagatattttgttggagatctcgtctttgaagtttctaagatgacttctccctacattaaatgtacagtctctttct

SEQ ID NO: 43607 - DNA, 355 bp, Glycine max
  Clone ID: LIB3139-063-P1-N1-D10
tgtaattgcaatggcagttaagcaattaaatgaaaggtttaaatctaagcatgtagagaacatgcaagcaagcaagcatgttactcaagcagatcaagcaaggccagataccccggttaccgagattgaagttctgccaaaagacatcatgcttgatcaaatatctgaatgttcatcatatgggataagtaggaggagagaaattcttgaggctgatgatcagatgcttgagttgtgggagacagcagataaggatgccgcaattggcaagcaagctgaaaagacacagaagatggttgctgaagctgctggcaatcatcaaagaggagcaaccatggaactcagaaataaatat

SEQ ID NO: 43608 - DNA, 354 bp, Glycine max
  Clone ID: LIB3139-063-P1-N1-D11
gatccttcctggcagacctgtttcacccgagtgccatgctgaactgcacacagattatgatggtgctgcagtaagatggggtcttaccttccacaaagatagtgcggctgattgctgtcaggcttgtttggatcatgcgaaacatgccaaagaaggggaaaagaaatgcaatatatgggtttattgcccatctgagtttgggtgtcattctccagatatctaccagcacaaacatcaggaatgttggctgaaatatgctgagaaacctcgattaaattttaaggataagtatcctgaatcatatcgaaattcacatccttctgcaccagtgatcgttccgtgggtctctggagt

SEQ ID NO: 43609 - DNA, 350 bp, Glycine max
  Clone ID: LIB3139-063-P1-N1-D12
aatcgttacttgatttcaagaatttctcaatttcttcctacttctttgtgtacgatttcttaagggaaagaaaatcactctctgtgctggccacagacttcgtgaatcattttcttttccactcttagtttatttgctgaacactctcctatttgatataggacttcgtgtcagatttaaacttcttctgtttccttctcagttctctgtttaatttcaagttcaagctggtgaaatcttggattagtgctcccactctcctatctggtataggacttcgtgggtagacttttctatttctctcctttctttcactctcttcttctcactgatccgcattgccgttcaaa

SEQ ID NO: 43610 - DNA, 348 bp, Glycine max
  Clone ID: LIB3139-063-P1-N1-D2
ggtccttccattcctttcttccggatcacagggaaaataaaaaacaatggagttggacttgacaccaaagacagcagaagtgttgtttgagggagatggtggaggttactacacttggtggagttctaaagtgccactgctggccaagaccaatgttggtgctggtcggttagtgcttaagcctcagggctttgctattcctcattattcagatatattcaaagtaggttatgtgcttcaagggaacgattgcgtatctgggatggacctctgtaacagtactactagagaagaggtggttgtgaagcttaagaagggagatgttatactagtacctattggaagtgt

SEQ ID NO: 43611 - DNA, 352 bp, Glycine max
  Clone ID: LIB3139-063-P1-N1-D3
atttgaaattttaataaaccgcgatcacaggttgccgcaccttaaaaccggaaacaaaagcgatcgttacttgatttcaagaatttctcaatttcttcctacttctttgtgtacgatttcttaagggaaagaaaatcactctctgtgctggtcacagacttcgtgaatcattttcttttccactcctagtttatttgctgaacactctcctatttgatataggacttcgtgtcagatttaaactttttctgtttctttctcagttctctgtttaatttcaagttcaagctggtgaaattttggattagtgctcccactctcctatctggtataggacttcgtgggtagactt

SEQ ID NO: 43612 - DNA, 353 bp, Glycine max
  Clone ID: LIB3139-063-P1-N1-D4
ataaaacataacaagaatctcgtttcggggatacaatgattgggcgcagagacagagagggacccttgatgaggaacaacagcactaactctcttcgcaaatcacgggtcctaacctcagttgcaattggtgtccttattggatgcggcttcgctttcttgttccccaatggcttcttcgtttccgactctgttgcccctaatcgccatattcctctcgctggatccaagacccagaaaaattcagctggatgtgaatcctcggatcgggtcaacatgttgaaatcggagtttgtggcggtatcagagaaaaatgctgagctgaaaaaacaggtgagagaattgactgaaagg

SEQ ID NO: 43613 - DNA, 359 bp, Glycine max
  Clone ID: LIB3139-063-P1-N1-D5
attatcaactctttcaaaagggagaagaaaaggaaaggaaacaaaacgcacaaaggattattatagcaatggcagaacaaaaccaaaaccagacaactgaagctggaaggcaccaagaggttggccacaagagccttctccagagtgatgctctttaccagtatattctggagaccagtgtctacccaagagaacctgaatccatgaaagaactgagagagttgacagcaaaacacccatggaacatcatgacaacctctgcagacgaagggcaattcttgaacatgctccttaagctcatcaatgccaagaacaccatggaaattggtgtctacactggatattcacttcttgccacc

SEQ ID NO: 43614 - DNA, 357 bp, Glycine max
  Clone ID: LIB3139-063-P1-N1-D6
atcttccgtatccggcccaagatcgatcgagcgaagtatacaatcattttcttgaacgtgccaaagcaatggttacagctgatggaatcttgatcaacaccttcttagaaatggaaccaggcgctataagagcgttgcaagagtttgaaaatgggaagatcagattgtacccagttggacccattacacaaaaaggagcaagcaatgaggctgatgagtctgataagtgtttaagatggttggacaagcagccaccttgttcagtgttgtatgtttcttttggaagtggtggaacactctctcagaaccaaatcaatgagttagcttcgggtttggaattgagtggtcaaaggttct

SEQ ID NO: 43615 - DNA, 351 bp, Glycine max
  Clone ID: LIB3139-063-P1-N1-D7
gttctgttttttggctttagtaagcctctgctgccagctaccttccaatgcccaagggcctgcatctgtgccggcaaactcgccacctacaaccctagctgcaacatccccgtcttctggcacgccaccggcagtaacacaggcagcatcccctcccaccacaagtaatccaccaactatttcccagccacctgcaattgtagctcccaaacctgctccagtgacaccacctgctccaaaagttgcaccagcttcaagcccaaaagcaccaacaccccaaactccaccaccacaaccaccaaaagtatcacctgtcgcagctcccacattgccacccccactaccttcacc

SEQ ID NO: 43616 - DNA, 341 bp, Glycine max
  Clone ID: LIB3139-063-P1-N1-D8
caccatttctgatggtattgacaaaactagtgcaagggtgcaatttagaaaggtaggagattgtgattttctcaagagaaactttaagcagatgtctaatgttttatgggtggctcctgaggacaaggcgagtttatggtcacaacttcattatgtttcgtgcaataatctggaaatgcaagaagcttatcttgtcaatctcgtaaatgtgttactagaattgtatttgcacagtccagaggaagctcgccaattgagaaggaaagctctctctcctattgaatggctgcaaaaagctgatgtgcctaccatagcacagattgaagagttccattcgatgc

SEQ ID NO: 43617 - DNA, 349 bp, Glycine max
  Clone ID: LIB3139-063-P1-N1-D9
caagaagaagagagagagagagagtagtaactctcgcacactctcacaacaacgcatgctatagcgaatgcgcgagcgagcgagcgagtttggtaagagttgtttatggcgattcgatcgaaggagatagtgcattaaaagcctccgtttggaattttagtctactatatataacttccgctgagctttgagactcagacacagcttgacaagtatttactgcatcgtcttttcgattcatcgggccacgtcgtttggggtgtggctgcaatcagggttcttagctgttccctgtgctctgagcataggtttattctttcctcgctgggtttctcattcaagctagcaa

SEQ ID NO: 43618 - DNA, 347 bp, Glycine max
  Clone ID: LIB3139-063-P1-N1-E1
attttaagccaaagctggatatttcaagccttactttagtgggtctaaattgaaaagcttggtagctagtcataatatcaccattactgatggtattgacaaaactagtgcaactttgcaatttagaaagttagcagattgtgattttctcaagagaaactttaagcagatgtctaatgttttgtgggtggctcctgaggacaaggcgagtttatggtcacaacttcattatgtttcgtgtaataatctggaaatgcaagaagcttatcttgtcaatctcgtaaatgtgttacgagaattgtatttgcacagtccaaaggaagctcgccaactgagaaggaaagctc

SEQ ID NO: 43619 - DNA, 329 bp, Glycine max
  Clone ID: LIB3139-063-P1-N1-E10
gaaaaaatggcgtgcaggagcatgcttcgttcctcgattctggtggaacccttccaattgcaacctcttcattttagtaacagacccgttagggcttgtccgtttcgccgtggcaaaggagtgaccctccgttgctccagcaatgagacgccgtcgtttcaggacgatcaaggtccacctcaagaagccgtgttgaaggccatttccgaggtatctaaggcagaagggagggttggccaaactacgaacatggttattggaggcaccgtgtcggatgattctactaatgaatggctcactttggaccagaaggtgaactcatacccaac

SEQ ID NO: 43620 - DNA, 353 bp, Glycine max
  Clone ID: LIB3139-063-P1-N1-E12
gtgggtgtatgtatgagaagaaagaagcatggctcagcttggttacgcataccgaagcgctcaaatatccacctacaacacttgcaatgtgagaaacattgaaactggatcaaagccattcagctccctacgtacccaaattacactacggtaatggatactcaaacgggatcgataccaaaaaaaaaataattccagttgctagcatgccttattatgaggacgagagcgacaacaaccatgatgacgatgaagggaagcatccacatgaaacaagcccacgtaaatttgatgacttactcaccaaggtgcacaatgaagctaacctgtgaccaccaaggatctccggtcac

SEQ ID NO: 43621 - DNA, 353 bp, Glycine max
  Clone ID: LIB3139-063-P1-N1-E3
agcagttggagaagccttcttctgcgaattggggacgagagccccgaatatggaccggcctccgattacaaagatcacattgatacgtgctttggcgcccttcgccgcgagctcgaccactcccaatccgagattctcgagttccttctcatgtgtgctgagcaattgcctcacaagattcctctgtatggtaccctgattggcttaattaacttggaaaatgaagactttgtgaaacaactagtggagaaaactcaaagtaaatttcaggatgccttagattctggaaactgcaacggggttcgtattctaatgcggcttttgactgttatgatgagcagtaaggttcttca

SEQ ID NO: 43622 - DNA, 357 bp, Glycine max
  Clone ID: LIB3139-063-P1-N1-E6
gttcagtttttcttggaactttgttactctcacacatgtctcgctccgtgcctttggtttcaaccatttttgtcttgcttctgcttctggtggccactgagatgatggggccaacaatggtggcagaagcaagaacttgtgagtctcagagccaccgtttcaaggggccatgtttgagtgacaccaactgtggctctgtttgccgaaccgaacgtttcactggaggacactgccgtggcttccgtcgcagatgcttctgcaccaaacattgttaattttaaaaaattaattaagagtgctttgatagaagatgatagatctatcatctttctactcgtgttgttaattaaccacttt

SEQ ID NO: 43623 - DNA, 346 bp, Glycine max
  Clone ID: LIB3139-063-P1-N1-E7
atcagatctcatataaaacactaaactgtaaaacacgcgctctctctttcgcctgggagttttcttcttccttttcgttttctcagtctattgctcttccttcaccaccacgcattatttttagggtttccaacatttccatcattttcctctcttttttttctctatatttttttgttatttatttatttatttttataatttttgaatttggtgtttgaattgagaagcggttttcgacgattctgatgtcggcttccacggtgtccatcacggcagcaaacccgggggcgcgtcggagaccggtgatcgccatcgagaagaaaaccgccaccaacctcgaact

SEQ ID NO: 43624 - DNA, 348 bp, Glycine max
  Clone ID: LIB3139-063-P1-N1-E8
gaaccgtttaactgcgccgtgaaactcttctggtcattcacattcagttgcgcgaaggaccatcaggctctgcaaatgccaatggtggatttggagggcacagaaggttacataccttccacagagtatgtggaagacagcaacgaaacactcattaacttgactgactcaactgagcttttgtttcttaagttgccttcttccaatgattttttatctgacatacatgggcagaaattgtttctcactcttcataatgatggtaaactagccagcttcgaggattcatcaggtaaagtatatgattttgtaagctattctgctcaggagccagacgaaacagttttt

SEQ ID NO: 43625 - DNA, 324 bp, Glycine max
  Clone ID: LIB3139-063-P1-N1-E9
gggctagaagccaagtgtgtgctcaccgatgcatctgggctattgcttaagagccaggcgctgagtgtgacacctttcttgcatgccatgcttgatccagttttgacaaatccatggaatcaattttctacttggttcaaaaatggtgaccctacaccatttgaaacggcacatgggaagatgttttgggattatgctggcgctgatccgaaacttaatcacttgttcaatgatgccatggcaagtgatgctcgatttgtcactagtttggtgattgagaaatgtaagggagtgttcatgggattggagtcattggttgatgtt

SEQ ID NO: 43626 - DNA, 354 bp, Glycine max
  Clone ID: LIB3139-063-P1-N1-F1
atcgagataactagaaacagtgtgatgaaaatgaaggtccttgttttcttcgttgctacaattttggtagcatggcaatgccatgcgtacgatatgttccctctccgaatgaacactggctatggtgcccgtactccggaggtgaaatgcgcaagttggaggcttgctgtggaagcacacaacatctttggctttgagaccattcctgaagagtgcgttgaagcaacaaaggaatacatccatggcgaacaatatagatcagactccaaaacagttaaccaacaagcttacttttatgccagagacctcgaagtccatcccaaggacacatttgtgttcagtatagatggcacc

SEQ ID NO: 43627 - DNA, 352 bp, Glycine max
  Clone ID: LIB3139-063-P1-N1-F10
gataaatcatcatttgccaacaatagtgctctccctgaatcagattttgccattgcaaatgggataggccctccaaaaggagagagtaattatgaagctgcagagtttgatcctattgtgcatcacaatcaatgttgcccttgggttaatggcaatgttgctgctgctggctgtgctagttctgttccaagcacaagtagtgatgcaattgccctttgtggttggcagctgacgttagatgctttggatgctttgtcgctggggcacaatgcaattccaacagtaccatctgaatctgctgcatccctgtacaagcagaatgaccagcaagcacctggtcaaaaactctttc

SEQ ID NO: 43628 - DNA, 355 bp, Glycine max
  Clone ID: LIB3139-063-P1-N1-F12
ctctagccgctcgagccgattcggctcgagctcattcagctggtggtcgaatgattgggaaaaaggttgctgaaaagttacttaacaacaaggcattggagttctacaaatgggacggtgaccttccccagttgttgcagaatgtgagggacaagttgaataaggttgctgaaccttggactcgggaagaaaaggaccactgtctggaagaaacagaaaaatcattcaagctctctggagagattctccgtctgattttatcatgataatagatgccctgttgtctgtgtaattatgggtattaagtgcatggcagaagccaaaaacattaccgtatgtgaattattttattttc

SEQ ID NO: 43629 - DNA, 122 bp, Glycine max
  Clone ID: LIB3139-063-P1-N1-F2
tcgtttgtttaattcaataaaggaacaagcgcatgaccctcttgttgagtatgctctgcctatctgaaaatttccacacctcttttaattgtcgtaatgatgtgtgaagtgtgtgttatttt

SEQ ID NO: 43630 - DNA, 328 bp, Glycine max
  Clone ID: LIB3139-063-P1-N1-F3
agattactgagtaagggcaacgatattctgtgttgcgattatgctagttttgatggtttgagtaccaagcaagttatgagcaaaatggcagaaatgataaacagtctttgtggtggtgatgcaaaattgatgcgtgaaaggacacacctgctgttggcttgttgttcaaggatggcaattttgtagaaagatgtttggagagttgaatgtggaatacctttcggattttcgctcacagatatttgcaatagcatttttaatgagatgctcattagatatagctatgaaaaatttctgcgccaggctagagctccaagcatgtttttac

SEQ ID NO: 43631 - DNA, 360 bp, Glycine max
  Clone ID: LIB3139-063-P1-N1-F4
acgcgattttccttctctcccgtcattttcccgagaaaatcagaagaggggtggatgatgagaggttgagacgctgatcactcactcgaagacgatggtgagttcgatccgcgatggaaccaagccagattctatcattgcggaccaccacaactgatcctgatcatgtgaaggtcattcagtgggacgacttccagcacgatcttgcaaggttggccagtctctcttccgcgctccacgaagccaacgagaagaagcggaatcttcagtacaagctcgagcccctaattcaggtcaatgctgaatcattgggtcggttgaatgaacttgaggagatgcgtcaaaaattggaatcaaaga

SEQ ID NO: 43632 - DNA, 214 bp, Glycine max
  Clone ID: LIB3139-063-P1-N1-F5
ccttgattgtttttcaaggcctgactgcaacatagatggtgcgatgcttttgggtggtactgatcataccaatcctgtaaatgcagttcgtagtatttttggtgcgcctttcaaaggcggcaggcccattccggtggttacatttccgcataccattgtgcggattgtaccaggcatgtatttaagggttcagcttttgagtaccactaccaat

SEQ ID NO: 43633 - DNA, 358 bp, Glycine max
  Clone ID: LIB3139-063-P1-N1-F6
ggtgtcaagtgggctatcgcccgcagcgccactgctgttggtctccctaccatcaggggcaaggatggcaaggtcaccatcgatgctggtccgccaatggagttccccgcccctttcggccgtgagatgagcaaggaggaggctttcatcgccgagatggatgctaagaccggtgcttctcttaagctgactatcctcaacgcttctggccgtgtctggaccctcgtggccggcggtggtgcttccgtcgtctacgctgacgccattgcctcggccggcttcgccagcgagctcgccaactacggtgaatactctggtgctcctaccgagacccagaccttccagtacgcccgcactg

SEQ ID NO: 43634 - DNA, 145 bp, Glycine max
  Clone ID: LIB3139-063-P1-N1-F8
tgttctttcaatgtggagatattttgttggagatgtgatattataaaaaagtagggggacttgtccctacattaaacggacagattgttttttcatctcatttggaactattgactatgatgccatgaaatcataatgcattcta

SEQ ID NO: 43635 - DNA, 256 bp, Glycine max
  Clone ID: LIB3139-063-P1-N1-F9
gggaatctctcaagattttgaaattgctggtaatactcttatgccagctttttctgtgccacaggctactgccagatcttctgaaaatgcggaatcctctgcatgatctggaatttatgttttctttcgcttgttcgttcgtttaattcaataaaggaaattgggcatgaccctcttgttgagtatgctctgcctatttgaaaatttccacacctcttttaattgtcgtaatgacgtgtgaagtgtgtgttatttt

SEQ ID NO: 43636 - DNA, 354 bp, Glycine max
  Clone ID: LIB3139-063-P1-N1-G1
gatatttacaccatctgctctcaagactgtgaattatggaatcctgcttgcacaaaagcaatgactatgtcatttaatccaaacccgtgttctgatgcatggagtttggaatttttgaagcgtaccggatttcactgtgatatcatttgtgtcactggatggactgccaccccaatgcaggatgttcaggttacaattgattggtttatttcctctcaggaatgtgttcccaggacttattgtgttttaaatccacaaaatccttttgtgttaaataggtggatggggaaactgactttcccccagggcacttcccgaaatgttaagagaatgcctctttctatagggggagga

SEQ ID NO: 43637 - DNA, 349 bp, Glycine max
  Clone ID: LIB3139-063-P1-N1-G10
cattttccaacatctatctcacttcttagttgtttgtggctctttccatgatggcctctcctacatctccaagagttctcttcttgagtctctttgtaactctttccatgattttacatttgagttcagccaggaagttgtctgagtcagacccccaattgcagttccaataccacagaggccctctcctcacaggcaaaatctccgcaaacctaatttggtacggtaagttcaaaccttctcagaaagccattgttgctgatttcatcacctctctctccttttccaaacccctcaccgcccaaccattcgttgccacgtggtggaaagccaccgacaaatactacaa

SEQ ID NO: 43638 - DNA, 355 bp, Glycine max
  Clone ID: LIB3139-063-P1-N1-G11
atcagaatgcgttgtattcatccctatcgatgtcatactttgttttcagggggggagggagcactccctctacttcgatgcccatgtgcttgatgctcaaagactacggcattatctacgaggctgccattgtatatttctggcacgttatgctcatactcagtcaccgtaaattccgccgattccgaatatttgaactctgcaccaaaaccctttatcgattacagcatctacatgctttgaatgatgcagctcctatggatcagcataaaactgagatggatccagtatcccatgttaatgcaccaagggctactactactgaaccagcaacaaatgttaacgccgctagggc

SEQ ID NO: 43639 - DNA, 357 bp, Glycine max
  Clone ID: LIB3139-063-P1-N1-G12
atcgcgaaatgtcgaatttgccccaatcgctgtcgatgggcgcggccttcggcggaggcggcgctccgcctcagccatcgagtgtcggcggcggagcacagggttccggcgctggcaaggatcggaagatggcgtcggcggagcagctcgtgctggaactcagcaaccctgagctccgtgaaaacgcgcttctcgaactctccaagagggagctatttcaagatcttgctccattgctatggaattcttttggtacaattgctgcacttttgcaggaaatagtttcaatataccctgttctttcaccaccaaatcttactcctgcacaatcaaatcgagtgtgcaatgctcttgctc

SEQ ID NO: 43640 - DNA, 354 bp, Glycine max
  Clone ID: LIB3139-063-P1-N1-G2
ggctcgagatttcttgcaagcacaagaaaatcagatacttgtgggtgtggccgtggccgttgtagccattgggcttggtgcagtatatctctattcatccaagaagaccaaaggttgcttggacccagagaactttaaggcattcaaacttgttaagcgtgcacagctgagccataatgttgcaaagttcacatttgcactcccaacacctacatctgttttgggtcttccaattgggcaacacataagttgcaggggtaaagatgctcaaggtgaagaggttatcaaaccatatactcctactactttggattccgatgttggacattttgaactagttattaagatgtaccc

SEQ ID NO: 43641 - DNA, 364 bp, Glycine max
  Clone ID: LIB3139-063-P1-N1-G3
ccccttccttagcttcggatttgggttcgggccccagttaacacttccttggtttctaatggagttttggggttctcacttctttttttctttcacactctcaacgaagtgatttataacagtgtttaattgaaattccaaacatggattgggttcgaggagacgctgtcggacgaggaagctttgctaccgttagtttagctattccaacgacgaattacaatcagtttccgtctctaaccgcggttaagtccgctgacgctgaaacctcgtgctggctcagaaacgagaaacacgtgctggatcgcctatgttcgtgtacgaggataattcgctgcttcggagatgactgcagtttctagaa

SEQ ID NO: 43642 - DNA, 356 bp, Glycine max
  Clone ID: LIB3139-063-P1-N1-G5
ggtgaatttgcaaagcctgtttctagtaaaggaatatgtattgatgatatacatctgagttcagatgacttagaaatgtacattgatcttgctccatttttgaatccctcaccatatattgtaccagaagatatgtctttgacaaaggtgtgccctttaaaatcctctaaacaatttttttcatttctattctccatttttgttgtcagatgatcatgatgccttactgatcacaggtatacaatcttttccgtcaacttggtcttaggcatttatttgttgttcctcgcccatcatgtgtggttggtttgataacaagaaaagatttgttgattgaggacaaagaaaatgtgaat

SEQ ID NO: 43643 - DNA, 360 bp, Glycine max
  Clone ID: LIB3139-063-P1-N1-G6
aaaaaaaaaaaaaaaaaatccgcgattcgctcttctgttggaaaagtgaaaaccagaagtacgaacgaaagagaagagcgatttagaagtgagagaagatggggttgtcgttcacgaagctgttcagcaggttgtttgcgaagaaggaaatgaggattctgatggtaggtctcgatgctgctggtaagacaaccatcttgtacaagctcaagcttggagaaatcgtcaccactatccccaccatcggatttaatgttgagactgtggagtacaagaacatcagcttcactgtgtgggatgttggtggtcaggacaagatccgtccactgtggaggcattatttccagaacactcagggtc

SEQ ID NO: 43644 - DNA, 349 bp, Glycine max
  Clone ID: LIB3139-063-P1-N1-G7
ttatgagtctttcttcctttgtaatagaaagcacgcgtttctctctctccctctctcaacgaatatttgtgtacttcctcttttgtgggtagattcaatttaccatgtcgagttcatcggaatactctcaattttccggccagaaaccggcgaggtcgccggagaaatcgagcttctctcagacttgtagcctgttgagtcaatacatcaaggagaagggtagcttcggagatcttaccctcggaatgacatcatgtgggtcacctgagacatcttgtcaatctgctacaaccatgaacttgtttcctaccaaggaaaacaacgtgacaccaaaggacctgacagctat

SEQ ID NO: 43645 - DNA, 351 bp, Glycine max
  unsure at all n locations
  Clone ID: LIB3139-063-P1-N1-G9
cagaaaccgaaagcatggttttatttaagcaattagcgtcactttcaacactcctcaccctattctttcttcaccttctcttagtagattcccaaatccttgaaactccatcaccaccacccgatccaacctcactggtccccaacattttaaacttcatagaccagaggctcgcacaggtcttcccaatcatccaaaccttcaagaacacaataacctcagaccctcgtggagtaacatcaacatgggttggtccaaacatatgcaactacacaggcttctattgcgacaacccaccggacaacctcactggcacaaccatcgnctcgatcgacttcaacggctttcagc

SEQ ID NO: 43646 - DNA, 361 bp, Glycine max
  unsure at all n locations
  Clone ID: LIB3139-063-P1-N1-H1
cggctgagctcgagccgaatcggctcgaggcagatacgatttctgaaattgtttctatggatcaatgtgaagtatttttagatacgtnaaaaaaaaaaaaaaaaaaaaaaaaaaaaaaaaaaaaaaaaaaaaaaaaaaaaaaaaaaaaaaaaaaaaaaaaaaaaaaaaaaaaaaaaaaaaaannaaaaaaaaaaaaaaaaaaaaaaaaaaaaaaaaaaaaaaaaggggggggccccccatttgtgagtttttcaccccggaaataaattcggaaccggtccctggggggtaaaaaattttccttataagggggggtataaaaattgggggaaaaaaaggaaaaaggtttttcctggggaaa

SEQ ID NO: 43647 - DNA, 359 bp, Glycine max
  Clone ID: LIB3139-063-P1-N1-H10
ctcactttaaagttcaaagttccaagttccaagttccaagtttcaagttccattacacaacacacctattttagttgtagacaaagccacataaatagacccaagaggtttaacttaggcaacgacgagacgcctctcttatcctccacttccagtttcaaccatgtcctgccggaaaagacaaaagacttcgccggacaaaacctccgacgacttcttcgactctctccccgacgaccttgtcctctctatcctctgcaagctcagctccaccgcaacttccccctccgatttcattagtgtcttaataacgtgcaagagactaaactccttaggccttcactctcttgtgttatcaa

SEQ ID NO: 43648 - DNA, 360 bp, Glycine max
  Clone ID: LIB3139-063-P1-N1-H12
ctcttcctcaccgattgctagaatggaatttcgatgctcagtcatctcttttaccattctcttctctcttgctcttgcaggagagagccatgtccatgcatcgctacctgaggaagattattgggaagctgtttggccaaacactcccattcccactgcactgcgagagcttctaaagcctctccctgcaggtgttgaaatcgatgaactccctaagcaaattgatgatacacagtacccaaaaacattcttctataaagaagaccttcatccaggcaaaacaatgaaagtacaattcaccaagcgtccctatgcacaaccttatggtgtatatacatggttaacggatattaaagacac

SEQ ID NO: 43649 - DNA, 355 bp, Glycine max
  Clone ID: LIB3139-063-P1-N1-H2
gatagctaaatttttcattagtattccttgtaggccacctagctttcctctcttcttactatttttgtgttcatgtgaaggttaattgaaacataaagacacactcacacaccctgggttcataaatttcattttgcagtaacaacaaaaaataagcatgagttgcaacgggtgccgcgttcttcgaaagggatgcagcgagtcctgtatgttgcgcccttgtttgcagtggatcgaaaccgcccaagctcaaggccacgccactgtcttcgtcgccaaattcttcggccgtgccggcctcatgtccttcatttccaacgttccagaaaatcaaagacccgcgctgtttcagtcg

SEQ ID NO: 43650 - DNA, 243 bp, Glycine max
  Clone ID: LIB3139-063-P1-N1-H3
ccttaagttcgcaattcgtttcgagttaaaattctttttccagaccttccactctcacccattgggaacgataactatctctcgtgttgaacggcttcaaaaagctgatctgcctacacaatcttcagattaaaccgaatcgaaatcgcatgattgttggcactctccctggcttaaaccagattatgaacttacctggtgccatcactttgtaagtggatgccaatgagaaaaatgacatac

SEQ ID NO: 43651 - DNA, 359 bp, Glycine max
  Clone ID: LIB3139-063-P1-N1-H4
gaaatatgtgggtttgtgaccattctatcaggaacttttcgtcttcacaaaactaaggatgtggctgatggtttacaaccatctttatctgttagacttcctaagcattcagaagaggatggctttgatggtggtgaaggcattcctcttagacggcaagaagccatgagatcgccatgatatattctttgcatcacatcttgcttttctaaatgagcttgaggcgctggggagggattttgccaaggtcgtctgtaatttactgattatttccctccccatcatattttttacctgatacagttggagtcgaaggatgtgagtttcctatcactgttcttttggtctcccgatgatta

SEQ ID NO: 43652 - DNA, 363 bp, Glycine max
  Clone ID: LIB3139-063-P1-N1-H6
ggaagctcaagaagacacatgaagctacaagggtgtttgagcacctagtgagtttgggtctgaagtctaatgcaaaatcatattctctacttgttgatgcccacctcattaaccgggatgtcaaatctgctctggcagtgattgatgatatgagagctgctggatatgaaccatcaaaagagatgctaaaaaaggtcagacggcgatgcacacgagaaatggacaatgaaagtgatgccagagtgcaatcactggctaattccttgaattaccaattgggttcagaaaaccgacgggacattctgtttaatcttaattacagtatgggttatgcttgaatggaatacctctgtatattagtgg

SEQ ID NO: 43653 - DNA, 311 bp, Glycine max
  unsure at all n locations
  Clone ID: LIB3139-063-P1-N1-H7
caggctactgccagatcttctgaaaatgcggaatcctctgcatgatctggaatttatgttttctttcgcttgttcgttcctttaattcaataaaggaaaataggcagagcattctcaacaagagggntgaaccttacttccttaaaccaatcagaggagcggacaagcgaacgctaacatgagactctggacctgctgagtcaatacattaatgagaagggtagcttcggagatcttacccacggcaagacatcatttagttcacctgtgaccacttgtgtatctgatacaaccatgaacttgttttctac

SEQ ID NO: 43654 - DNA, 350 bp, Glycine max
  Clone ID: LIB3139-063-P1-N1-H9
tgtatttgcacagtccagaggaagctcgccaattgagaaggaaagctctctctcgtggtgaatggctgcaaaaagctgatgtgcctaccatagcacagattgaagagttccattcgatgcagaggatgatgaatgctcctgattcaaatgataatattgatctactgttgagcattgatttgttgggtttacaaggagcaggcaaagcttttccaaacaagattgtttttgatgataagcttgtgttggctaacacacaagaattctttgatggaaattttccagtggattcttggttaccaatttttgtgaattgtctttatcctgtaagtcaattaccttcagaagct

SEQ ID NO: 43655 - DNA, 386 bp, Glycine max
  Clone ID: LIB3139-064-P1-N1-A1
ctcttacacacacaagctctacaacattttcttgggtctctcattttctctatagctagatgggtgctggggctttacaacttcttctgatcttgggtcttctggctagctcatgcttagcacaagccccaggtgctgcacccacacaaccacccactacaaccccatcaccaccaccaccaagatcagcacctgcaccagcacccaccccgccagcaacaccaccaccagcaacaccaccaccagcagcagcaactcctccaccagcaacatcaccaccagcaacaacaccaacgccaacaccaacagctgcacctacacctgcttcttctgctgcaacctcaccagtcccttgcgctagttgttcaccagcaccaggcacaggc

SEQ ID NO: 43656 - DNA, 396 bp, Glycine max
  Clone ID: LIB3139-064-P1-N1-A6
gtcttacgttgctcataacgttaatcagccccaagagaaagatttgttggagggaaatttttcctttgatattaaatctcgctctagattggaaaaagtttcctctacaaaagcacaatttgttagtggaaaaaccttcaaatatgatataattggtgctggttcacattcttcagaagattttcctgaaaaggaagatcaagaaaaacccaaaaagattgatgccagattgagacaaagaatagatcctcaatacaatgaggttcaggctcagatggaaacaaatttgtttaaattgtctcttgatgatgttgaaactcctaaaggttccatgttggatctgaaaatttctcaatctaaaattgcacttcccaagaacacagttggaggaaccat

SEQ ID NO: 43657 - DNA, 341 bp, Glycine max
  Clone ID: LIB3139-064-P1-N1-A7
tctcaaggaaactgttctacactctccaaaaccattacatgagaataagccccagatttctgctccagctgcaaaggcgcaagttgtgggatggccaccaatccgttcattcaggaagaactcaatggcttctcagcctcagaagaatgatgctgctgctgatgcaaaagccaagtctggatgcctttatgttaaagtcagcatggaaagcgccccatatttgggggaaggggatcttgataggtttaccacttacaagggcctttttttggcacttggaaaggatgttaagtggtttacccttaatcaaagggggttaaattggggtttttggccggaaa

SEQ ID NO: 43658 - DNA, 362 bp, Glycine max
  Clone ID: LIB3139-064-P1-N1-A8
ggaaaagccaagaagattgcagaagatatcatccttgatttttccaaaaattctaagaagggcggtatggattttaaaatccttaaatgtgatgggatcaaacccaaagggcaaattgggtgaggttccaaaacctgaacttcgtgaacatggccgaatttctggtgcctgctttgatgcagctcgtggtattacaactggtttaaaggttaaaggaactgactacaaaacaccggatggaacatgcatacgaaactacatggatgtaactgatttggtggatgctcacgagaaggctcttgagaaggcacaacctgttaaagtggggatctacaatgttggaactggaaagggtagatcag

SEQ ID NO: 43659 - DNA, 307 bp, Glycine max
  unsure at all n locations
  Clone ID: LIB3139-064-P1-N1-B10
tcatctcaaccactctcgatctcttctgttcttctcaaatcccacaatctcatcagattgaattgtttgttgagaattggcgctcgattcaatctgattgattcacaatggcttccccaaacaaccacaacccttctncacccccattcccttcgacatgcactccttctttaacccccaaccaccaccaccaccttgctctaaccctaaccctaaccctaaccctaaccataaccctttcttcttctacccttccccctttcacttncccaaactttgaccttcccttttccttccccacacccca

SEQ ID NO: 43660 - DNA, 393 bp, Glycine max
  Clone ID: LIB3139-064-P1-N1-B11
ataccatcaattttgaggcttttccccacaagctggtgcagtttggagagattcaggaaaaagttgtattgaaattttcacaagaggaatttcttacagcttggtcaactcaggtgcgtcctgcaacaactctgttggctgatgggtgtccatatttgtatgcaatggtgcatgatagttcagtgtctacaataccaggtgattttgtcattggtgtcaagttgacaaccataaacaatatgtgtgcatatgggctcaatcctggtatttcaggttctcgtcttttgggcactattcctcagtccatttcacagcaaactgtttggaatcaaatggcaacagtgagaacaccattgaattttgattctagcaagcagagcttttgtcagtttt

SEQ ID NO: 43661 - DNA, 223 bp, Glycine max
  Clone ID: LIB3139-064-P1-N1-B12
aacctcctttactaccactggaaccgtttataaataatcctctactgtttattccttctggaatataccctctaaactcctcattaagagctcactcatgcctaacctatacaagtggatgaaaacattacatgactaacaattgatgtacaagtctgttctattcctgtcgcaaattcacaaggcccattgataatgtatatgtctgagactatgtcccacg

SEQ ID NO: 43662 - DNA, 393 bp, Glycine max
  Clone ID: LIB3139-064-P1-N1-B2
gtttttcgaaattatatgaccatgcgtcgaattcgtatgctgcactccttctccgtcgggttcctctactggttctacgttttctcatgaactccctctcaaatccgtaattaattagatcgatctccttccgtagttaatccttgtctctttttcaataattaattagatctgcgtctcctatttcctttttttgttttgttctgttatcaaaatcaaataaaaaatctccttctcggaaatggcgtcgtcaatccaacaacaacgctcgactgcaacaagttctggatctgaaggaggaggagatccgcaaatgatcgacgagaggaagcggaagaggatgctgtcgaaccgcgagtcggcgcggcgatcgcggatgaggaagcagaaaca

SEQ ID NO: 43663 - DNA, 396 bp, Glycine max
  Clone ID: LIB3139-064-P1-N1-B3
gcgaattgaagaattttcaaaaatcgtctcttcgtatgtgtaatacaaggcaggcttttgaaaactgttctatccaaatctcaaatgcaatgccatatcttgaggaaatgagcattgactattgcaatgatttgattacattacctgatggactgtgtgagattagcccattgaagaaacttagtatcactaactgccacaaactttctgcactgccacaaggtattggaaaactggagaatctggaagtgctaaggctatgttcctgctctgatttgctagagatgccaaattcttttgaagggcttaacaagctaagctgtcttgacatctcagactgtgtaagtcttaccaaattaccagatgatattggtgagttgaagaagcttaagaagc

SEQ ID NO: 43664 - DNA, 394 bp, Glycine max
  Clone ID: LIB3139-064-P1-N1-B6
ctcgagccggctcgagtgaaattttcacaagaggaatttcttacagcttggtcaactcaggtgcgtcctgcaacaactctgttggctgatgggtgtccatatttgtatgctatggtgcatgatagttcagtgtctacaataccaggtgattttgtcattggtgttaagttgacaaccataaacaatatgtgtgcatatgggcttaatcctggtatttcaggttctcgtcttttgggcaccattcctcagtccatttcacagcaaactgtttggaatcaaatggcaacagtgagaacaccattgaattttgattctagcaagcagagcttttgtcaattttctatcgaccttctcggtggaggaattttagtggacaaaactggagattggatca

SEQ ID NO: 43665 - DNA, 382 bp, Glycine max
  Clone ID: LIB3139-064-P1-N1-B8
caccgccctgggtgcctaggtccgctggtgctcctgcaacatcgtctccacccaggaccatgccggcgccgccattacccgcgacagcgcctacgtcttcgcctggaagggtgagacccttcaggaatactggtggtgcaccgagcgcaccctcgactggtgtcccggcaaaggtcccgatctcatcttcgaccacggctgcaacaccactcttataattcacgagggcgtcaaggacgcagcgaactcagcgaagacctggcagttcccggaaccacgttcctgcgccactgcggctacccagagatagctcagcacaactaggggagcattggataccgatcccaagaagtgccacaagatgcaggccactatcaggggc

SEQ ID NO: 43666 - DNA, 393 bp, Glycine max
  Clone ID: LIB3139-064-P1-N1-B9
accattttgggcacgctcggaatcaggaattttccgatctgtcgtaagagcaaatcctaacgttggtgattcaccttggccatcaatatcacccgaagctaaagactttgtgaagagacttctgaacaaggaccacaggaaaaggatgactgctgctcaagctttagctcacccatggttgagaaacgaaaaaaatgctattcctttagatattttgatatacaagttagtaaagtcatatgtgcgtgcctcacctttgagacgtgcagcattgaagtctctcgcaaaagcattgaatgaagacgagctaatataccttagagcgcagtttaacctcttggagcctaaagatggctgcatctcacttgagaattttagagttgctctcatgaa

SEQ ID NO: 43667 - DNA, 391 bp, Glycine max
  Clone ID: LIB3139-064-P1-N1-C10
gagatctcgtctttgttgtttctaagatgacttctccctgcattaaatgtacagtctctttcttcatagcatttggaaatttggctgatgacaccatcaattttgaggcttttccccacaagctggtgcagtttggagagattcaggaaaaagttgtgttgaaattttcacaagaggaatttcttacagcttggtcaactcaggtgcgtcccgcaacgactctgttggctgatgggtgcccatatttgtatgctatggtgcatgatagttcagtgtctacaataccaggtgattttgtcattggtgttaagttgacaaccataaacaatatgtgtgcatatgggctcaatcctggtatttcaggttctcgtcttttgggcaccattcctca

SEQ ID NO: 43668 - DNA, 356 bp, Glycine max
  Clone ID: LIB3139-064-P1-N1-C11
taaaaacacttcctattttcacaacctaatctaacccttatcaaggagtttaacacagtttgtttggcattgtatacgagttgttgtaattattcttgtacttgagtttaattccggcgaataaaaaaacctaatctaacccttcgctctgctctcgcttcaactattcacaccaagatggaagctgtttgtcttcactgtggcgacagaagctttccagaaacattggttttttgcagccagtgtaaggcttatgcgctgcataagtacctgtttaaagggccctggaattttactggatcttgtacaagggtttgggaggattgggcaacaaaacttttggttgcaacttgttt

SEQ ID NO: 43669 - DNA, 389 bp, Glycine max
  Clone ID: LIB3139-064-P1-N1-C12
tgcatgtcatccaggacatgcttgttcctttgtacaaggtgggagatgctttagaatgggttcaccgtgagatggaggtataccccatttggctctgcccacacaaattgttcaagctgcctgtcaaaactatgatttaccccgagccaggattcgaactacaccgcaggcaaggagacacccaaactgctcaaatgtacacagatgttggagtttattatgcaccaggtcctgttcttaggggtgaggtatttgatggggcagaagcagtgcgtaaaatggagaactggttgattgaaaatcatggttttcagccacagtatgctgtgtcagagctgtccgagaaaaacttctggaggatgtttgatgctggtttatatgagcatact

SEQ ID NO: 43670 - DNA, 393 bp, Glycine max
  unsure at all n locations
  Clone ID: LIB3139-064-P1-N1-C2
gctgattatgtgaaggagctagtggaatggacagtgccctttttaagtagtcaagggtggaagggaatgacctatgccttgcaaggaatttatgatagggaaacagcactgcagaatattagaaagttgacaggttttgatgatgggaattcgttcactaatctcttgtggtggattcacagcagatgaggagtgttgcacacaagcttctggacaagttttgtttattgcaatattattttaaatttcattcttgtcaacattttttattttctgtaatttatgaaattctacatcttgtatcagttattgttaatgtggtgggggtaaatntgagtaatgttttttttcaagaatttaacaaaatttgcagtatagcagatttttctaaaa

SEQ ID NO: 43671 - DNA, 332 bp, Glycine max
  Clone ID: LIB3139-064-P1-N1-C3
cctaattatttgaattatctatatcaatggacagtgccctttggaagtggctaaatttggaagggggtggcctacccctcgcaaggactttatgatacggaaacagcactgcctaatattagaaagctgacaggttttgatcatgggaattcgttcactaatctcttgtcgtggatccacatcaaatgaggaatcttgcacacaagcttctcaacaagtattgtttattgcaatattattttaaataacattcttggcaacattttttattttctgtaatttatgaaacactacatcttgtatcaattattgttaatgtggtgggggtaaat

SEQ ID NO: 43672 - DNA, 383 bp, Glycine max
  Clone ID: LIB3139-064-P1-N1-C4
tttttaaatccacaaattccttttgtgttaaataggtggatgggaaaactgactttccctcagggcacttcccgaagtgttatgagaatagcattctttgcaccagctcctccccctattgaaagaggcattctcttaacacttcgggatgcgcccactgggcttgcctggtgttttcacagcagatgcggagccttggacacctgcttttggacaagtttggtttattgcacttttattctaaatttcattcttgccaacattttttatcttctgtaatttatgaaattctacatcgtgcatcaactattgctattgtggcgtgggttaatcttctttttgttttcttccctagattctatttttcttttcttctgcctttt

SEQ ID NO: 43673 - DNA, 395 bp, Glycine max
  Clone ID: LIB3139-064-P1-N1-C5
atccgatctgcgaaattatctagaagtcaagacttccacaagaaccaacgtatcaaacttcacacagcaccgccaaaatgggcaaggacgataagactcacatcaacgtcgtcgttatcggccacgtcgattccggcaagtctaccaccactggtcacttgatctaccagtgcggtggtattgacaagcgtaccattgagaagttcgagaaggaagccgctgaactcggcaagggttccttcaagtacgcatgggtccttgacaagctcaaggccgagcgtgagcgtggtatcaccatcgatatcgctctctggaagttcgagactcccaagtaccaggtcaccgtcattgacgctcccggtcaccgtgatttcatcaagaacatgatcactggt

SEQ ID NO: 43674 - DNA, 195 bp, Glycine max
  Clone ID: LIB3139-064-P1-N1-C6
caggctactgccagatcttctgaaaatgcggaatcctctgcatgatctggaattcgtgttttctttcgcttgttcgtttgtttaattcaataaaggaaattaggcatgaccctcttgttgagtatgctctgcctatctgaaaatttccacacctcttttaattgtcgtaatgatgtgtgaagtgtgtgttatttt

SEQ ID NO: 43675 - DNA, 385 bp, Glycine max
  Clone ID: LIB3139-064-P1-N1-C7
catgagtaacatgacttccttaagctccttagtgctgctccttgcagctctaattctattccctcaagttcttgctgactatgagaagcccccggtgtacaagcctcccattgagaagccaccactttacaagcccccaattgagaaacctcctgtttataaacctccagttgagaaaccccccatttataagcccccagtagagaagccaccagtgtacaagcctcctgtagagaaacccccagtttacaagcccccagttgaaaaaccaccagtgtacaagccaccagttgagaaccctccaatttacaaacccccagttgaaaaaccaccagtatacaagcccccaattgagaaacctccagtttataagccaccagtagag

SEQ ID NO: 43676 - DNA, 392 bp, Glycine max
  Clone ID: LIB3139-064-P1-N1-C8
ctcaccgattgctagaatggaatttcgatgctcagtcatggtctggtaccattctcttctctgttggtcttgcaggagagagccatgtccatgcatcgctacctgaggaagattattgggaagctgtttggccaaacactcccattcccactgcactgcgagagcttctaaagcctctccctgcaggtgttgaaatcgatgaactccctaagcaaattgatgatacacagtacccaaaaacattcttctataaagaagaccttcatccaggcaaaacaatgaaagtacaattcaccaagcgtccctatgcacaaccttatggtgtatatacatggttaacggatattaaagacacctctaaagaaggatatagttttgaagagatatgcatc

SEQ ID NO: 43677 - DNA, 389 bp, Glycine max
  Clone ID: LIB3139-064-P1-N1-C9
gcttcgttttccattactatgttgagttggagtgtgattgagtgcagtgcaaagtatgaggctggtggggagcttgatcatgtgaaggagattatcaagtggggtactgattattttctcaagagttttaatagcactgctgataccatcaccacccttgctgctcaggttgggcttggagatacttctggtggtgacagtccgaatgatcactattgctggatgcgtccggaggacatggactatgaccgccctgtgactgaatgccacagttgttccgatctcgcggctgagatggctgctgccttggcttctgcttccattgttttcaaggacaacaaggcctattccaagaaactggtgcatggtgcgaccacgctgttcaagtt

SEQ ID NO: 43678 - DNA, 394 bp, Glycine max
  Clone ID: LIB3139-064-P1-N1-D1
ctcattagtcattatttaagtatgaggctgcacacttagagagataaggttgtcttgagagctgttgcgcgtctctgagttgctgtgtaagccaatgatcattataattgaatttgccaaacagctctccatacacacacacacacaaaacaaacatacctcgcctcattcctttctgcttcttcttttggcttcttcttcttcttcttcttcttctgggtataacaaggcaatgacgatgtttacagcagttggactagacatgagtgaagagcagtgtcctggcaaggtgactcagtatctgtgaaactccatgtggtcttttgcactgatgctgttgatgcagcctgtgtgcatgacacttcctctcctgtctgagaaaaggcgaatctga

SEQ ID NO: 43679 - DNA, 389 bp, Glycine max
  Clone ID: LIB3139-064-P1-N1-D10
gcatttttaatgagatgctcattagatatagctatgaaaaattgctgcgccaggctaaagctccaagtatgtttttacaatccttcaaaaattttgtttctttgtgtgtgtatggtgatgataacttaattagtgttcatgaatatgtcaagccttactttagtggttctaaattgaaaagctttctagctggtcataatatcaccattactgatggtattgacaaaactagtgcaactttgcaatttagaaagttagcagattgtgattttctcaagagaaactttaagcagatgtctaatgttttgtgggtggctcctgaagacaaggcgagtttatggtcacaacttcattatgtttcgtgtaataatctggaaatgcaagaagct

SEQ ID NO: 43680 - DNA, 392 bp, Glycine max
  Clone ID: LIB3139-064-P1-N1-D11
cctaattagcctaacacaccacagcaccaaactagttggctcaagtctctttgaatggctttggaggctttgaattcaccaacagcagccaccactcccttccgtggttaccaagaagaggaggaggaggttgaccttcacctacgcgagccttgggccaagagaaaacgctccaaacgacctcgttttgagtcggaggaagagtacttggctctttgcctcatcatgcttgcacaaagcggtaacaacaacaacacccaattaccgtcttcgtcacagtcacacaaagaagcgtcaccgccgctgaaactatcacacaggtgcaccgtttgcaacaaggcttttccttcttaccaagcactcggtggacacaaggccagccaccgcaaggc

SEQ ID NO: 43681 - DNA, 391 bp, Glycine max
  Clone ID: LIB3139-064-P1-N1-D12
catgggttcaacaggtgagactcagattactccaacccatgtatgtgatgaagaggcaaacctttgggccatgcaactagccagtgcctcagtactccctatggttctcaaatcagctcttgagcttgatctgttggaaatcatagccaaggctggccctggtgttcacctttccccctccgacattgcttctcggctcccaacacacaaccctgatgcacccgttatgttggaccgtatattgcgcctcttggcttgctacaatatcctctctttttctcttcgcactctccctcatggcaaggttgagaggctctatggtctcgcccctgttgctaagtacttggtcaggaacgaagatggtgtctccattgctgctctcaacctcatg

SEQ ID NO: 43682 - DNA, 393 bp, Glycine max
  Clone ID: LIB3139-064-P1-N1-D2
ctttcagaggcggaaggcccattcgggtggttacatttccgaataccggggtgcagattgaaccagacatgaattcaaggtttcagcttttgagtaccactaccaatggtgattttgttcaagggaaagatcttgcaatggttaaagataatgtagcatgtgctgctgttggcttgacatcaagttacactccaactccattgttggaatctggtttgcaaaaacacagagggttaattgtggagtattttggaaggatgtcttacgttgctcataacgttaatcagccccaagagaaagatttgttggagggaaatttttcctttgatattaaatctcgctctagattgcaaaaagtttcctctacaaaagcacaatttgttagtggaaaaa

SEQ ID NO: 43683 - DNA, 393 bp, Glycine max
  unsure at all n locations
  Clone ID: LIB3139-064-P1-N1-D3
ctcctcctaggtggaattggaattggggatctactatatgggggtaaggagaagcatgagatcgggggcgcagcgtgtggtgcangatcaagaagctgctgagtgtgtcggtgtcgtcgacggcgacagcatgcgacagagttgttgggccaacatgccccaagagcttcttcgagaggtcctcctacgaatcgaggcctccgaggacacgtggccgccgaggaagagcgtcgtctcctgcgccggcttctgccgcatctggtgacatatcaccaaagacattgtcaaaacgcccgaactcttctccaagatcaccttcctcatttctgttaaacagcctggtccaagggagaatctgctacggtgctttataaagcgcaaccggtccaccca

SEQ ID NO: 43684 - DNA, 394 bp, Glycine max
  Clone ID: LIB3139-064-P1-N1-D4
gtttgcttctcaagtttttcgaagcctctttctctctcttctagaagcgatctgtgtttggtgtggcgtaagtctccaacaagcaaagtacatggttgatttggaaatccaggtccccaccccattcgacccgtttgccgaggcgagagaatcggatgcccccggagcaaaggagtatgtgcatattcgaattcagcagaggaatgggaagaagagtctgaccacagtgcaagggctgaagaaggagttcagctacgagaagatcctcaaggacctcaagaaggagttctgctgcaacggaaccgtggtgcatgacaaggagcttggcaagatcatccaactccaaggcgaccagcgtaagaacgtcttccacttactcgttcaagctggcctt

SEQ ID NO: 43685 - DNA, 395 bp, Glycine max
  Clone ID: LIB3139-064-P1-N1-D5
gtgctttatcgctgtgtttatcatcttcttcttcctctttcttagatctcttctttctctacgccgcacgccgaaaccatggccggaaaaggagagggtcctgctatcggaatcgatctcggaaccacctactcttgcgtcggtgtgtggcaacatgaccgcgttgaaatcatcgccaacgaccaagggaacagaaccacgccgtcttacgtcggattcactgacaccgagcgtctcatcggtgatgcggccaagaatcaagtcgccatgaaccccatcaacaccgtcttcgatgccaagaggttgattggtcgtagattcagtgattcctctgttcagagtgatatcaaattgtggcctttcaaggtcattcctggtgctgctgacaagccaat

SEQ ID NO: 43686 - DNA, 394 bp, Glycine max
  Clone ID: LIB3139-064-P1-N1-D6
tgaccaacgaggctgttcagaaggctgctgctgcattgaagggttcagatcatcgccgtgcaacaaatgtgagtgccagactggatgctcaacaaaagaagctcaaccttccaatccttccaaccaccactattggatccttccctcagactgtagaactgaggagggtacgccgtgagttcaaggctaacaagatctccgaggaagagtatgttaagtcaattaaggaggaaattcgcaaagttgttgaacttcaagaagagcttgatattgatgttcttgttcatggagaaccagagagaaatgatatggttgagtacttcggtgagcaattgtcaggctttgccttcactgttaatgggtgggtgcaatcctatggttcccgttgtgtgaa

SEQ ID NO: 43687 - DNA, 300 bp, Glycine max
  Clone ID: LIB3139-064-P1-N1-D7
tgaccaacgattctgtttaaaacgctactgctccatcgaaggggtcagatcatctccgtgcagcagaggtcattaccacactggatgctcaacaaaagaagctcaaccttccaatccttccaaccaccactatcggatccttccctcagactgcaaaactgaggagggtacgccgtcagttcaaagctaacaagatctcctaggaagagtatgttaacccaattaaagacgaaactcgcaaagttcttgaacttcaagaaaacctttaattttatactcttattccacccaaaccaaaga

SEQ ID NO: 43688 - DNA, 391 bp, Glycine max
  Clone ID: LIB3139-064-P1-N1-D8
gggagccctttggaggagttctccctggagacactgcttcaagtgaccaacaatttctgtgaggggaagagaattgggcttggtagcttcggtgcagtgtaccattccaccctggaggacggcaaggaggttgctataaaaagagccgaagcctcatcctcaacctacacagttttgggtgggcaagggcaagtggacaaagacaatgcctttgtgaacgagctggaatcactctcaagactccaccacaagaacctggtccggttgttggggttctatgaagacagcaaagaacgcattttggtgtacgattacatggacaatgggagcctgagtgatcatctccacaagctccaaagttcagctctcatgtcatgggcagtgagaatca

SEQ ID NO: 43689 - DNA, 383 bp, Glycine max
  Clone ID: LIB3139-064-P1-N1-D9
gatcaagaaaaacccataaagattgataccagattgagacaaagagatagatcctcaatacaatgagggtcaggctcagatggaaacaaatttgtttaaattgtctcttgatgatgttgaaactcctaaaggttctatgttggatcttaaaatttctcaatctaaaattgcacttcccaagaacacagttggaggaaccattctgcgtagtgatctattggcaaattttttgacagagggcaattttagagcaagtgttgatttgcagcgcactcatcgtattaaaggaatgattaaaatggtggccacagttggtattcctgagaatacaaggatagcattggcctgtgctatgaatagttcttttagggggcgcgccagtt

SEQ ID NO: 43690 - DNA, 392 bp, Glycine max
  Clone ID: LIB3139-064-P1-N1-E10
attttagcaaatttgtactaccgaaacgtaaattaaaggaaaagaaaaaagaaaaaacaaaagcagagaagaacaaaaaaaaccagaagtttgttttactaaggtccaccatcccctcaaattcaagaaaccgaagctagagaactacgaggaagaggaggaagagcagcaacaactgtaagcacaaacagtcactttcaaacaccaacaactgtgtgtgtctaaactaagagtctgtaattggctggaagtttgatatgatgacaattttcaattcctatccttggaagcccttgataattcataaacatgatggaaaaccttagagtcagataacattgatctttccttgttttggtggatatatggctaatcattctttagttttagat

SEQ ID NO: 43691 - DNA, 388 bp, Glycine max
  Clone ID: LIB3139-064-P1-N1-E11
ctcatgtgctttcacgcaaaaatggtgaaaaaggcaaaaggagatttgtttctggggatggtgaagagatgacattgattccgggaaccagtgttgaagaggcttacaacaagctaatagttgaacttgagaaaagtgttcctacattggttggcattgaatgtcccaaggatgagaaacttcctcgtcgcaaaatttttgacaaacctaagacgcgctgcttcactattctccctatggagtttaatcttgtggtccgtcagaagtttttaaattttgtgaggttcattatgaagaaaagggacaagcttagttgtcaagttggaatcaacccatactccatggaatggactggtttggccaatagattactgagtaagggcaacga

SEQ ID NO: 43692 - DNA, 389 bp, Glycine max
  Clone ID: LIB3139-064-P1-N1-E12
gtcagggtcaaggatgggtcccagtatcttttcctcccatgctcattctcaccgtctcccctatgcagcaaatcttaaccctaattcctctcttctccgtcgacgcgcacaattcatcagcttcgcctccaattcttctccacctcagcctcggcctcagggagggttcaaagacgacgaggccaccgccaagaaatcgtttgcggtgtcgaccggcgagctgtttctagggctggcggcgcggctgattaagagccgaaacaggggaagcagcctcgcagaagaagattcgcgttcagtggccatgtttgaggagagaatcgaggcggcggcggtggtggtgaggacgagattgatcccgacgtggtttgtgagcaaagagtgaaaga

SEQ ID NO: 43693 - DNA, 389 bp, Glycine max
  Clone ID: LIB3139-064-P1-N1-E2
gttcaagctggtgaatttttgtattagtgctcccactctcctatctggtataggacttcgtgggtagactgttctacttctctcctttctttcactctcttcttctcactgatccgcattgccgttcaaagtggtcttatttgaaaaacacttgggcgttggtgcaaatgtttgcttcgttaattttctctggagacaacaggctcactgagaaaacaatttttacttgcagagatttggacatcttggttgtctattatacaatagcaactcaatttagaaaatttctaccgcattacattaggtggcatctgtataccttgttgatctacattctcccatcttttctcactgctgaaattaaatataagcggaatttgagtaatatt

SEQ ID NO: 43694 - DNA, 387 bp, Glycine max
  Clone ID: LIB3139-064-P1-N1-E3
aaagcctcgtataatattattgtgtcacaataataatgtctcactccattaattcagagttcaagtttgatcccaaggaaccctccatgcccatatcgtatccaataaagaccctcaaggagttggagtcacgctcctactttgagtcctttcattatccttttaacaaagcttcagttccaattgaaagtgggtattctgaacctttgccaaattgtagaagaatactagtgtgccatgatatggctggagggtacttagatgataaatgggtccagggagggactaatgctgaagcctatgccatatggcactggcatttgatagatgtgtttgtctacttctctcataatctcgtcactctccctcctccttcttggactaata

SEQ ID NO: 43695 - DNA, 390 bp, Glycine max
  Clone ID: LIB3139-064-P1-N1-E4
caattggagagggaggattagttttgatggatgggaagcttgacaaagctgatctacattatcttggcaaggccaatcgagctcgtgcctctgctgatagtttttctaaggttatgttccaacacagtgttcgacactctcccctcagaattgatggtctgctggaatctgtcagtttaccagttgatcaagaaagcaaagcttgtgatattgagatggatggttgacaaggaattcattatgggttgcatcagttttttatcctgagcgcaatgttaaggtttttcaccttaaatttttggttcactaggatgcttatttctgtgaaggcttccataatttatattggggattcagaagattaatagctaccacacatgctgaggcaga

SEQ ID NO: 43696 - DNA, 395 bp, Glycine max
  Clone ID: LIB3139-064-P1-N1-E5
ctcgagcccaaggaaacccaacttaagcgaaaagcaatagaattcaaagagagagtttcttgttctgtattttttgatttgatcatttcaatcttcaatttttttttatatatccaccaatccgcaaagtgcaaatttctaatttcacgtattgggttcttctcttttccctcttcgtctccgatcgatccaattctcttcccatggctacgatcggacacaacaatctcaatgccaaattggttcttctcggggacatgggtgctgggaaatccagcctcgttttgcgctttgtcaagggtcaatttctcgaatttcaggaatcaacaataggggcagcgttcttttcacagacgctggcagtaaatgatgcgacagtgaagtttgagatttgg

SEQ ID NO: 43697 - DNA, 144 bp, Glycine max
  Clone ID: LIB3139-064-P1-N1-E6
cggtaaccgagttgggttgagttgcgactcggctgactcgttgactcagattttccttgaaccgacgtattttccaagcttggatgccgccaagacttttcttggatacctgtgggataataacgataataacaaatggatatg

SEQ ID NO: 43698 - DNA, 388 bp, Glycine max
  Clone ID: LIB3139-064-P1-N1-E7
tcttcaagcagcagaagtatcctgatgctgtgaagcattacacagagtctatacgaagaaatccaaaagatcctagggcttatagtaacagagcagcatgctacactaaattgggggcaatgcctgaagggttaaaggatgcagagaagtgcattgaacttgatccaacctttgtaaagggttatacccggaaaggtgcagtccagtatttcatgaaggaatacgacaaggctttggagacatatagggaggggttgaaatatgactctaacaaccaggagttgcttgaaggcatcagaacatgcatacaacaaattaacaaggctagccgtggagacttaagtcctgacgaattgaaggagcgacaggccaaggcaatgcaggatcc

SEQ ID NO: 43699 - DNA, 391 bp, Glycine max
  Clone ID: LIB3139-064-P1-N1-E8
cggctcgagtggacaaagcagcagttcatccagatcggaggaacagcgatccgcgattgcaaatcaatcggagttcaatagaagagcttccaagatcggcttcgggattcaccaaacctctcagaaactcgccaagctcgccaagttggctaagaggacttcggttttcgatgaccctaccatggaaattcaagagcttacgggggttattaagcaagacatcactgctctaaactctgcggttgtggatcttcagttactcagcaactctcggaacgagagtgggaacgcttctaccgacacgactagccattcgaccacggtggttgatgacctgaagacacggttgatgagcgccaccaaagagtttaaagatgttctcaccatgcga

SEQ ID NO: 43700 - DNA, 387 bp, Glycine max
  Clone ID: LIB3139-064-P1-N1-E9
ctcgaccgaatcggctcgagggaacaaacaacactgaagtgcaagcaagcaatgtcgacggaagcagcagcaagagaatcattggattcagattccatgaagcccaactacatcctttcccaaaccctaagcgggcacaagcgcgccatctcggccgtgaaattctcctcaaacgggcggctcctggcctcctccgccgccgacaagaccctccgaacgtacggcttcacgaactcggactcggactccgacagcctgacgctgtccccgatgcaggagtacgaggggcacgagcagggcgtgtccgacctggccttctcgtcggactcccggttcctggtctccgcctccgacgacaagaccctccgtctctgggacgtgcccact

SEQ ID NO: 43701 - DNA, 392 bp, Glycine max
  Clone ID: LIB3139-064-P1-N1-F1
tcaagagaaactttaagcagatgtctaatgttttatgggtggctcctgaggacaaggcgagtttatggtcacaacttcattatgtttcgtgcaataatctggaaatgcaagaagcttatcttgtcaatctcgtaaatgtgttacgagaattgtatttgcacagtccagaggaagctcgccaattgagaaggaaagctctctctcgtattgaatggctgcaaaaagctgatgtgcctaccatagcacagattgaagagttccattcgatgcagaggatgatgaatgctcctgattcaaatgataatattgatctactgttgagcattgatttgttgggtttacaaggagcaggtaaagcttttccaaacaagattgtttttgatgataaagct

SEQ ID NO: 43702 - DNA, 392 bp, Glycine max
  Clone ID: LIB3139-064-P1-N1-F10
tggacatcttggttgtctattatacaatagcaactcaatttagaaaatttctaccgcattacattaggtggcatctgtataccttgttgatctacattctcccatcttttctcactgctgaaattaaatataagcggaatttgagtaatattcatatttccggcttattttacgacggcagatacaaattctggactaaacacgagaaaaatcttgctttgacagaagaggaaaagatggaagtgattagaaatagaggcattcctgctgatgttcttgcaaagcgagctcatgaatttgaaaaacatgttgctcatgaaagcctcaaggatcaaattcctgctgttgacaagttgtattctactaaggttaataagtttgcaaaaattatg

SEQ ID NO: 43703 - DNA, 383 bp, Glycine max
  Clone ID: LIB3139-064-P1-N1-F11
gtaagaaagatgtttggagagttgaatgtggaatcccttctggatttccgctcacagttatttgcaatagcatttttaatgagatgctcattagatatagctatgaaaaattactgcgccaggctaaagctccaagtatgtttttacaatccttcaaaaattttgtttctttgtgtgtgtatggtgatgataacttaattagtgttcatgaatatgtcaagccttacttttttggttctaaattgaaaagctttctagctggtcataatatcaccattactgatggtattgacaaaactagtgcaactttgcaatttagaaagttagcagattgtgattttctcaagagaaactttaagcagatgtctaatgttttatgggtg

SEQ ID NO: 43704 - DNA, 388 bp, Glycine max
  Clone ID: LIB3139-064-P1-N1-F12
aatttctcttctctctcttcttctcctcttatccgcagcctttcaaaccctagaaattctcgaagtccgagccctttatataataatcctatgaggctctaatttttttgaggattttgaggttgcgtgagttaggatttggagttggagttggttgaagagggaaagtttgtccgtggtcggtggaatttgagttccgtagtgtttttgttttcttttaaggttatattggtcgtgttcgaagatcagggtttggagatcgaaattaacggtgcggttttggatttgagtgtccgaaatgacttctctgagcagagaattggtgtttctcatactccagtttctggaggaagagaaattcaaagaatccgtacacaagcttgagaaa

SEQ ID NO: 43705 - DNA, 394 bp, Glycine max
  Clone ID: LIB3139-064-P1-N1-F2
caaagcacttagtgcttttcattaattacgaaaaaccaacagcgagtgttgtttttgtttggtccaggctggaccagggaatgaatagagatgagaggctttcggttgaagagaactgagttaagcggcgaagccaaacgcagaatcggcggcagaaattgccaccggaagcacgtcgaagacgggtgaaccaaacacaaaattccatccaccacttctcttttcaatccccaactcaaatctgtgaagaaaatctcaatttctaaattgtaattcttagcactactgctagtagtagtaaaaaaaaacaattagaaagtagtagagtgtttttttttctttttttcgtttgttttacttttaagatgggtgagaagagcaacgttggcggcga

SEQ ID NO: 43706 - DNA, 372 bp, Glycine max
  Clone ID: LIB3139-064-P1-N1-F3
atacattcaattccttttaattttgttctctctaatctctctcggtacaatggatactccatcatgggcagcaagaagaatcacatgatcccaaatcgccttcaacaacaacatcctcgtttcaagaaaaaagaacgagaatgctgaatgtgagaagagtgtgataaccaggtccttgctgttggacttctcggacaaatccgaggtttcagaatgctcttctgaggtgacatatcaagaagtgacacaaggaagtgttggtagccgtgggtccaccgaggatgattgtgcttccatttggtccattcaggtgaatgcgagcacgcatgactaatatgatgaccatgaggaaatggctgaagaggaagaaga

SEQ ID NO: 43707 - DNA, 390 bp, Glycine max
  Clone ID: LIB3139-064-P1-N1-F5
ctggatttggaggagaacaagattgttgatttcatcaaatttgatgttgggaatgtagtcatggtgacgggtggaaggaataggggtcgtgttggagtgatcaagaacagagagaagcataagggaagctttgagactatccatgttcaggatgctactgggcatgaatttgcaacttgtatgggcaacgagttcaccattggcaagggaacaaaaccgtggatatctttttccaagggtaaaggtattaagctatcaatcattgatgaagctaggaaaaggattgccgcccaacaagcaactgctgcttaaatttctaggatatgaatcgactttgagtgcttgtccgtttttattcaatgtttttggttttgaacttaattttgtctt

SEQ ID NO: 43708 - DNA, 393 bp, Glycine max
  Clone ID: LIB3139-064-P1-N1-F6
aacaggtggagttttatctcatagatgaccacagcaatggtgccctttattggtgttgttcataacggaacatggtttttgaaaggacttggatctaatcgaaatgtcatatgtgaatcctattcccaggaaactgatacctggaccccagtgagtaatggaatggtcaatggttggcgtaatcctagtatctcgctgaacggacaactctatgcacttgattgccaggatgggtgcaagctcaaagtatatgacagagcatcagattcatggaagaagttcattgatagcaaactccatttaggtagatcccgtgctcttgacgctgctgctcttgttccccttaatggaaagctttgcattatacgcaacaatatgagcatcagtctattt

SEQ ID NO: 43709 - DNA, 383 bp, Glycine max
  Clone ID: LIB3139-064-P1-N1-F7
gacctattgtgttttaaatccacaaaatccttttgtgttaaataggtggatgggaaaactgactgtccctcagggcacttcccgaagtgttaagagaatgcctctttctatagggggaggagctggtgcaaagaatgctattctcatgaatatgccaaatgctgttctttcaatgtggagatattttgttggagatctcgtctttgaagtttctaagatgacttctccctacattaaatgtacagtctctttcttcatagcatttggaaatttggctgatgacaccatcaattttgaggcttttccccacaagctggtgcagtttggagagattcaagaaaaagttgtgttgaaattttcacaagaagaatttcttacagctt

SEQ ID NO: 43710 - DNA, 386 bp, Glycine max
  Clone ID: LIB3139-064-P1-N1-F8
attagggtttgtagtgtagcaggaagaagcagcaatggcgccgaagataacacgtaaggttagcagaaaccctgaattgataaggggaatcggaaagtactcgaggtcgcagatgtaccacaagaggggcatttgggctatcaaggccaaaaacggtggcgttttacctcgccacgaccctaaacccaagcctgaagctcctgctgaaaaaccacccaaattttaccctgctgatgatatcaagaagccccttgtcaacaagcacaaaccgaaaccagctaagctcagggctagcattactcccgggacagtgttgattcttcttgccggtagatttaagggaaagagggtagtctttttgaagcagcttccttctgggttgcttc

SEQ ID NO: 43711 - DNA, 381 bp, Glycine max
  Clone ID: LIB3139-064-P1-N1-F9
catctctattgccactcccagcaataaagatgctatccaatattcaaagttcagttccaatagttttcctagttacagatggaacagttgaagatgagagacaaatttgtgctatggtaaagaatcgaatgatcaatggagagtcaatatgccctcgaatttacacttttggcattggttcattctgcaatcattatttcttgcgaatgcttgcaatgattggtaggggccaatatgatgctgcattggatgtagatttgattgaacctcgaatgctgacattgtttgacaaagcttcatctctcattcttgcaaatatcaaaatggacacattggatgatcttgatgaccttgaggtataccctccttatattcccgatc

SEQ ID NO: 43712 - DNA, 386 bp, Glycine max
  Clone ID: LIB3139-064-P1-N1-G10
gaaacagctatggaaggagaaaatggaaagaagctgaaaatactgtgcctccacggattcagaacaagtgggagttttcttaaaaagcaaatcagcaaatgggatccttctctattcattcaatttgatatggttttcccagatggtaaataccctgctggagggaagtctgacatagaaggcatcttccctccaccttactatgagtggtttcaattcgaaaaggacttcacagtgtactttaacttggaagaatgcatctcatacttatgcgattatattacagccaatggtccctttgatggcttccttggcttctcacagggtgcaactctttcagcacttttgataggttaccaggcacagggaaaggtgctaaaggagca

SEQ ID NO: 43713 - DNA, 320 bp, Glycine max
  Clone ID: LIB3139-064-P1-N1-G12
tttttaacgacttgcttataagatataactatgaaaaagtgctgttccatgctagagctaggaggatgcttatacaatccttaaaaaatttagcttctttgtgtgtactatggaaatgataacttaaataccgttcatgaatatgtcaagccttactttattaatcctaaacaaaaaagctttctatctggtgataatatcacccttactgatgagctagacaaaacgtgtgcaactttgcaaatccagaaaagctagacaattgtcatttttttatatataaactttaaaaaaatctcttatgttttgagggtgcttcc

SEQ ID NO: 43714 - DNA, 390 bp, Glycine max
  Clone ID: LIB3139-064-P1-N1-G3
cttgtaacaacaactatggctagcgatggcagcgaagagttcaggctagtgtcaccggcgttcaagaacggggggaagttaccgaggcactacaccgacgatggtcagggtacgaagaagaacatatcccctccattggagtggtataacctcccggaggggacgaagactcttgccctcgtggtggaggatattgatgcgaccgattctggtgggcccatggtgccatggactcactgggtcgtcgcaaacatcttggccacggtgaagggcttgccggagggattttccggcaagtcggccgagatggggggcgactacgcggcgatcaaggaggggaacaatgacctgaaggtgcctgggtggaatgggcccaggctgcccacgcct

SEQ ID NO: 43715 - DNA, 291 bp, Glycine max
  unsure at all n locations
  Clone ID: LIB3139-064-P1-N1-G4
cttctaaacgccgcactctcttttcttcctcagaaacacatcctggtggcagancgcggaggtggcgatcgtggcggcaaccgtggcggtttcggacgtggattcggcgggcgaggacgcggaggtgacaggggccgaggccggcgccgaggcccccgccgcgaggaagaggagaagtgggtcccagtgaccaaactgggccgcctggtgaaggagggaagaatccgaagccttgaacagatctacctccactcgctcccgatcaaggagcaccagatcatcgacacgctc

SEQ ID NO: 43716 - DNA, 396 bp, Glycine max
  unsure at all n locations
  Clone ID: LIB3139-064-P1-N1-G5
ctcaaagtgttgaacttgaagttgcagagagaaaatggattgagaattctctctcttttctctttctcttcccaactttccttccttgggatcattctgcttctttgctatggaagactcagattcagttgctacgctgatagattccacaacttctaagatacagcagctgcaaaaggcatttgctgaacttgaaagttaccgagctgttactctgaacttgaaatggaaagaactcgaggaacattttcatggtctggagaaatccttgaagaggcgctttcatgaattggaagaccaggaaaaagagtttgagaacaaaacanggaaggctcaggagatactggagaagcggcaagcagctgtttatgccaaggagcaagccacgttgcagag

SEQ ID NO: 43717 - DNA, 386 bp, Glycine max
  Clone ID: LIB3139-064-P1-N1-G7
cccatcttctctctcgtaccaatcaaatcacacttttgtgttgtgttgggaaaccctaaaccccgttttcggtgagatcgagatcgatcgaacatggatgaggagtacgatgtgatcgtgttgggcacgggtctcaaggagtgcattctcagcggtcttctctccgtcgatggcctcaaggttctgcatatggataggaacgactattacggaggagaatccacttcgctcaatcttattcagctttggaagagattcaggggagatgacaagcctcctccacatttgggcgttagcagggactacaacatcgatatgaaccccaagtttattatggctaatggcaatttggtgcgggttctcatacataccgatgttacaaagta

SEQ ID NO: 43718 - DNA, 314 bp, Glycine max
  Clone ID: LIB3139-064-P1-N1-G8
gaagaaaaaagaagacatagacaagaaggagaagaagaaagttactggaaaggacaagaccaaggagcttagtgcgctgaagcagaagcttgaaaaaattaacggaaaaatacaaccactccttgaaaacaaaactgatgtagagaaggtcaaggggaaagaagacaaagagaagaagaaaaaggaaaagaaagtcaaggatgacaaaactgatgctgagaaggtcaaggggaaagaagatgatggggaggacaatgaagagaaggaggaaaagaaaaaaaagaaaaagaaggaaaaggatgacaaaattgatg

SEQ ID NO: 43719 - DNA, 386 bp, Glycine max
  Clone ID: LIB3139-064-P1-N1-H10
gaaaaatttgatcctgagaaacacatagatgaatatctgccagtgcgggttaatgagcaaggaatgaccaacttattgcagtctctcctggttgctgtatcaatcttagccatgtcagttatcaaaaggataccaacctcagttctatggggatattttgcttacatggcaattgatagtctcccagggaatcagttctgggaaaggatattgcttctcttcgtcacctcaagccggcgttacaaaattttggaaggttctcatgcctcttttgtggagacagtaccattcaagaccatagctgcatttacagccttacagttagtatattttgcgttatgtttcggggtgacttggatacctataggtggaatattgttccccgt

SEQ ID NO: 43720 - DNA, 388 bp, Glycine max
  Clone ID: LIB3139-064-P1-N1-H11
attaagaaagcccaaataaagaagaagatggcgtccgagtgcagaggtaagagctcatgggcggaggtggttggagtggaaggaacggtggcggtggctacaattgagagggagaatcctttggtggatgctaacactgtgcttaaaggatccatcgtcaccgctgattttcgatgtgatagggttcgggtttgggtcaccaaacatggaattgtttatcaggctccaagaattggataagaagtgtttacactaaagcacttcatatatatgttatgagtcatgaatataatagtatttaaataaggagttattcttccaattatgttatttgattgaaaataaaaacatgactataagaaatttggtttttcttatttttaaatat

SEQ ID NO: 43721 - DNA, 318 bp, Glycine max
  Clone ID: LIB3139-064-P1-N1-H12
ctggaatttgggctcgagtttttaaggagacgcttattagatatagctatgaaaaattactgggccaggctagagctccaagtgtgtttttacaatccttcaaaaatttggtttctttgtgtgtgtatggggatgataacttaattagtgttcatgaatatgtcaggccttactttagtggttctaaattgaaaagctttctagctggtcataatatcaccattactgatggtattgacaaaactagtgcagctttgcaatttagaaagttagcagattgtgattttttcaagagaaactttaggcagatgtctaatg

SEQ ID NO: 43722 - DNA, 368 bp, Glycine max
  Clone ID: LIB3139-064-P1-N1-H2
cagaagtttttaaattttgtgaggttcattatgaagaaaagggacaagcgtagttgtcaagttggaatcaagccatactccatggaatggactggtttggccaatagattactgagtaagggcaacgatattctgtgttgcgattatgctagttttgatggtttgattaccaagcaagttatgagcaaaatggcagaaatgataaacagtctttgtggtggtgatgcaaaattgatgcgtgaaaggacacacctgctgttggcttgttgttcaaagatggcaatttgtaagaaagatgtttggagagttgaatgtggaatcccttctggatttccgctcacagatatttgcaatagcattttttatga

SEQ ID NO: 43723 - DNA, 348 bp, Glycine max
  unsure at all n locations
  Clone ID: LIB3139-064-P1-N1-H3
caaaagttattaaattttgtgattaccattatcaaaaaaaactgcgtgcggggttatcaagttggggtcaggccatactccatgcaatgcaacagatgggccaacagatgactgattaagttcaaccatattctgtgttagcattattctaatttttattgtttttttacctagcaagntatgagcaaaanggcaaaaatgataaacactctttgtggtggtgatacaaaatttatgcgtgaaaggacacacccgctgttttcttgttgatcaaggattgtaatttctaagaaagatgttagacgagttgaatttttaatcccttcaaaatttcctttcacagatatt

SEQ ID NO: 43724 - DNA, 201 bp, Glycine max
  Clone ID: LIB3139-064-P1-N1-H4
tttttaaccattttctttttacatataactatcaaagagtgctgttccaatcttgagctggaggtgtcctaatacaatccttcacaaatttacttctttatatttctttggaaatgataccttaattaccgtccatcaatatgtcaagccttactttatagaccctaaataaaaaacctttttatctggtcataatatcac

SEQ ID NO: 43725 - DNA, 347 bp, Glycine max
  Clone ID: LIB3139-064-P1-N1-H6
ggaaaaaaaaaaaaaatacatggtggtgaaggtgtatggtccaacgtatggatcccccaagagggtggtggtgtgtctgattgagaaggaaattgagtttgaaacagtgcatgttgatctcttcaagggagagaataaggaacctgagttccttaagctgcagccatttggatcccttcctgttattcaagacggtgattatactctctatgaatctcgtgcaataatcagatacttagctgagaagtataaagaccaagggactgacttattgtgaaagacaatagaagaaaagggtctagtggaacaatggcttgaagtggaagctcataactttcacccaccac

SEQ ID NO: 43726 - DNA, 389 bp, Glycine max
  unsure at all n locations
  Clone ID: LIB3139-064-P1-N1-H7
ctcgagccgttccccaagaaccaggcaatgaggatatactcaagcgtgtggaatgcagatgattgggccacaaagggaagtctttttaaaacaaattggacacaggctcctttcacagcttcttacagaaacttcaatgccaatgcctgcactatgtcctccggaacttcatcttgcggntcaaacaacccttcctcttctaacaataatgtttggctctcagaagagttggattcaactgatcaggagaggctcaagtgggtgcagaagaattacatgatctacaattactgctctgacactcaaagatttccacagggccttccttcagagtgcaacacagcctaaagatatttagtttccctgtggattgatccaaactccaattt

SEQ ID NO: 43727 - DNA, 389 bp, Glycine max
  unsure at all n locations
  Clone ID: LIB3139-064-P1-N1-H9
caagcttagccttgcaactacacttcttgaaaaggccaaggctaaaggggtttctttgttgcttccaactgatgttgtcatagcagacaagtttgctgctgatgctaacagcaagactgtgccggcatcaagcatcccagatgggtggatggggttggatattggnccngattccatcaagacatttggtgaagcattggatacgactcagaccattatttggaatggaccaatgggtgtttttgagtttgataagtttgccacaggaacagaggctatagccaagaaactggcagagctgagtgggaagggagtgacaaccatcattggaggaggtgactccgttgtcgctgtggagaaagttggacttgcagacaagatgagtcaca

SEQ ID NO: 43728 - DNA, 396 bp, Glycine max
  Clone ID: LIB3139-065-P1-N1-A1
gtgagaacaccattgaattttgattctagcaagcagagcttttggcaattttctattgaccttctcggtggaggaattttagtggacaaaactggagattggatcacacttatacaaaattctccaattagtaacttgttgagagttgctgcttggaagaaaggttgtttaatggtcaagattgtgatgtctgggaatgcagcagtcaaaaggagtgattgggcctcattggtacaagtgtttttaacaaacagcaacagtacagagcattttgatgcatggtagtggacaaaatcagaaccacattcctgggaattaatcttcccaatagaagtatgtggtcctaataatgcgtttgaaatgtggagttctgagtgggcaaatcaaactttatgg

SEQ ID NO: 43729 - DNA, 294 bp, Glycine max
  Clone ID: LIB3139-065-P1-N1-A10
ggaatgagtacaatctatgttccactgcctacaaaaactaatttgatggaaactcccaaggaatggcaactggatctaccttgtgacaaaattcctagtgtcttgactacaactgatgagagattggtaggcacagaacatgagggatatgatccttttcttggtggaattcaaaaatatgccactcccatgatgcccctagatgaagaaattctttctaaggttgcacaagatatggttgaggaatggtttgattgtgttgatgaggaggattcctttgtggaagtttcttta

SEQ ID NO: 43730 - DNA, 183 bp, Glycine max
  unsure at all n locations
  Clone ID: LIB3139-065-P1-N1-A11
gtcatacagtgtctctgtggtgagcatggtggagaatggggttgagcccaatcaccctgactatggggtcatggaacttataaggacgaagcggcgtcgttttgactgggaagtgaggtttgtttctgtctncaacaaggcgaatcgtgtggctgataggctcgccaacgatgctcggaaatt

SEQ ID NO: 43731 - DNA, 225 bp, Glycine max
  Clone ID: LIB3139-065-P1-N1-A2
aaaaatttcaaaaattttctaaaattttgtggacgatttcttaagggaaagaaaataactctctgtgctggtgacagacttcgtgaatcattttcttttccactcctagtttatttgctgaacactctcctatttgatataggacttcgtgtcagatttaaactttttctggttctttctcagttctctgtttaatttcaagttcaagctggtgaaattttggat

SEQ ID NO: 43732 - DNA, 58 bp, Glycine max
  Clone ID: LIB3139-065-P1-N1-A3
caaatactacattaagcgcaccttaagcgcccaccgttgggatatgatcttttacatt

SEQ ID NO: 43733 - DNA, 364 bp, Glycine max
  unsure at all n locations
  Clone ID: LIB3139-065-P1-N1-A6
ccaaactgcaccagnctngnggggaaagcgctatttcaatttggggaggggccaaaaaaaatttttattaaaatctttacaaaaggaatttgttacactttcgacaactaccttgcgcacatcaacaacaaatataatctcatggatgcccataacaagatgctattacatactgatcttgcacgccatcataacaactaaatttgtacttaagttaatgcacggcactttccaatccagttgttccatctaagtttaatccatcaattttacatgccaaaagtttagatcaactttttttgttgaagaccaaaattacattgtaatttgccaatagattttaaaaattcttttaaagtttaat

SEQ ID NO: 43734 - DNA, 393 bp, Glycine max
  Clone ID: LIB3139-065-P1-N1-A7
taaagctgattgcgtttctagttccgagttcttgcactcgttagaccaagtcctcgtcttgacaacgtttccacgcacaccttcatctttcaatccttcaccacaaacatgaagacttggaccttgacccaaattttttgaaccgggaattccaattttttttgccttttccttcataatggggatgcttcgcacacgcaggatgtgggacccacccggaatcaaacgggttgtttactgcgcagaataagcggaaccaacaacagctacaagtgatctcaggggattgtgcaaccaagaagatgcagcccaaggatgcagtgagcgaattgcagaaaacccatgaagccattcaagctttagataaacaagtttcgatgcttcagatggaac

SEQ ID NO: 43735 - DNA, 274 bp, Glycine max
  Clone ID: LIB3139-065-P1-N1-B10
attgcaaacaagcttttgtggctatagagaagggtccccctcccggctagattacgtcatctcgtgggtcttctcggcaacatcatcagaagtcttctcggcaacatcccaatgttggaaggaatcaccctgtgaatccaggaagaactgttgcagtttctcaaaatttacaatccagcggtcctataggcatatcttcttttgataacacaaatttccagtttggtcctcactccaaaatggctggctttgttaaaaaagatggatcatcttc

SEQ ID NO: 43736 - DNA, 390 bp, Glycine max
  Clone ID: LIB3139-065-P1-N1-B11
gattctcatggtagtgatgatgttagttcaaatcctgctgatgagacgaatgatgaatgcagcgatgcttctcaggaactaaataaccaagttttggttgatgggattatctgttccaaatctcattctgaggaaatgatgtctgatccaatttcagataaatgtgattctccttctagaactagtaacagtgaactagaaatgaagaataaagtagcggctgctcctcctgttgatagattagattcttctaccaaatgtcaatccatttctccaattgacacttctggtagtagtcacccagtagatattttgaaagttcaagctttggttcaggaaactacttattctgatccatgttcagaagaagaaaaccttgacaagaagtgt

SEQ ID NO: 43737 - DNA, 395 bp, Glycine max
  Clone ID: LIB3139-065-P1-N1-B12
ctgatgttcttgcaaagcgagctcatgaatttgaaaaacatgttgctcatgaaagcctcaaggatcaaattcctgctgttgacaagttgtattctactaaggttaataagtttgcaaaaattatgaaccttagacaaagtgttgttggtgatcttaaacttcttactgatgggaagttgtatgagggtaagcatattcctgtatctaatattagtgcaggggaaaatcatgtagttcaaatacccttaatggcacaggaggaaattctgtcttctagtgcaagtgacttcagaactgcaatggtgagtaaaaatagcaagcctcaagctactgcaatgcatgtgggagctatagaaattatcattgatagtttcgcaagtcctgactgcaacata

SEQ ID NO: 43738 - DNA, 396 bp, Glycine max
  Clone ID: LIB3139-065-P1-N1-B3
gcagttttatcattatttatcatttggctggttgtgtggaggaatcattgagcatgcttctggcaagaaatttcaggagattcttgaagaagcaatagttcgccccctccatattgaaggggagttatatgtagggattccgccaggggtggaatcacgtcttgccgctctgactgtagatactgctgatttaagcaaagtctcagcactcgctaatcgtcctgaccttccctccaccttccaaccacagcaaattgctcaacttgcaaccagtttacctgttgctttcaatacactgaatgttcgccgtgccatcataccagcagctaatggacatgtatctgcccgggcacttgcacgttattatgcagccctagctgacggtggcaagatacc

SEQ ID NO: 43739 - DNA, 406 bp, Glycine max
  Clone ID: LIB3139-065-P1-N1-B4
agttaatgtagcatgtgctgctgttggcttgacatcaagctatactccgactccattgttggaatctggtgtgtgcaaaaagacagagggttaattgtggagtattttggaaggatgtcttacgttgctcataacgttaattagccccaagagaaagatttgttggtaggaaatttctcctttgatattaaattctcgctctagatttggaatatgtttatctctacaaatgcacaagtttttcgtctttttttctttttaccctaataatatttttttatctttttcaccactggttttgggtgtgggtgggggtgtattttttctcttctttttttttaaactctcttttttttcttctcttcctattctctccactccatttttttttttttctttcttccta

SEQ ID NO: 43740 - DNA, 139 bp, Glycine max
  unsure at all n locations
  Clone ID: LIB3139-065-P1-N1-B5
gtccgtgatctgatatttcctttgtatgtngcgctactccaaccggcccggtcttttcaacatatttcccggagttaattttatttcctatcataacttctttttcttcaacaataccggttttatcaattttcttgcc

SEQ ID NO: 43741 - DNA, 391 bp, Glycine max
  Clone ID: LIB3139-065-P1-N1-B7
agaaatgattgatgaggagctgattcggaccataattgcagaatgtggcacagagaattcagacttgctggagaaaaaattgaaggaaatgagaatactagaaaatgttgaattgcctgcagaatttgcagatatagtggttaagtccaaagaggccattgatattcctagtgaggagctgcaaagttctgaacaagcagaagtagaagaaagaaaagatgatgaagtggaagcagttgctaaaaagaatggaacagatgaaagttccattgaggatgagaaagaagagttgcctgagccagtaccagaaccaccaaaattggttcgtatggcaaatctgtgtgtcgtaggtggtcatgcagtgaatggggttgcagagatacatagtgaa

SEQ ID NO: 43742 - DNA, 276 bp, Glycine max
  Clone ID: LIB3139-065-P1-N1-B9
tggttgttgccaaggttggaaatcacaaacaaattgttgggttcgcatgttgctggaagcaaaggaagactgggatatgcttcattgataccatatgttgagccagttgtgcaagctcaaagtgctgaagtttactttgacttcttccctgtggaggttgatagtcaagagggagttgctcacattggtgaattgaaatctggtgtctatgttccactgcctacataaacttatttgttggtatctttcaatgaatttcattcttttctacctttt

SEQ ID NO: 43743 - DNA, 160 bp, Glycine max
  Clone ID: LIB3139-065-P1-N1-C10
aaagtggtcttgatgtctgaggcattggaagaggttgttccttcaatgaaaggagggtgtgaagaagaagggttgaacctggaggctactgagctgaggcttgggttgccagggtgtgagtcaccagagagggagggtgtgtttaagagtgtggtcggtg

SEQ ID NO: 43744 - DNA, 395 bp, Glycine max
  Clone ID: LIB3139-065-P1-N1-C11
cggctcgagcggctcgaggttcatgaatatgtcaagccttacttgagtggttctaaattgaaaagctttctagctagtcataacatcaccattactgatggtattgacaaaactagtgcaactttgcaatttagaaagttagcagattgtgattttctcaagagaaactttaagcagatgtctaatgttttgtgggtggctcctgaggacaaggcgagtttatggtcacaacttcattatgtttcgtgtaataatctggaaatgcaagaagcttatcttgtcaacctcgtaaatgtgttacgagaattgtatttgcacagtccagaggaagctcgccaattgagaaggaaagctctctctcgtattgaatggctgcaaaaagctgatgtgcctac

SEQ ID NO: 43745 - DNA, 396 bp, Glycine max
  Clone ID: LIB3139-065-P1-N1-C12
gattatcctaagtctttgggaatagtgctgcaatggcttcaagtcaggaggaggtgacccttttgggagctactggaagcccatttgtgtgcagggttcatattgccctcaagttgaagggagttcaatacaaatatgtcgaagaaaatttgaggaacaagagtgaactgcttctcaaatccaacccagttcacaagaaggttccagtgtttattcacaatgagaagcccatagcagagtctcttgtgattgttgaatacattgatgagacatggaagaacaaccccatcttgccttctgatccttaccaaagagccttggctcgtttctggtccaaattcattgatgataaggtttttggtgctgcatggaaatccgttttcacagctgatgaga

SEQ ID NO: 43746 - DNA, 396 bp, Glycine max
  Clone ID: LIB3139-065-P1-N1-C2
tcattttatgggggtcatgcatagggaccttaagcctgaaaatttcttgcttgctaataaggatcctaaggcacctctcaaagccaccgattttggattgtccgtcttcattgaagaaggtatagtgtatagagaaattgttggaagtgcatactatgtagctccggaggtgttaaagcgaaattatggaaaggagatagatgtgtggagcgcaggaatcattttatacatccttctaagtggggtgcctccattttggggcgaaaacgagagaagcatatttgaagctattttgggaggcaagcttgatctggagagcgcaccatggccttcaatttcagctgctgcaaaagatttgatcaggaaaatgttgaataatgaccctaagaaacgcat

SEQ ID NO: 43747 - DNA, 395 bp, Glycine max
  Clone ID: LIB3139-065-P1-N1-C3
aattttacttccaaagttcacatttggaggaaccattttgcgtagcgagttattgccaaattttttgacagagggcaattttagagcaagtgttgatttgcagcgcactcatcgtattagaggaatgattaaaatggtggccacagttggtattcctgagaatacaggtatagcattggcctgtgctatgaatagttcttttagggggcgcgccagttctgatatttacaccatctgctctcaagactgtgaattgtggaatcctgcttgcacaaaagcaatgactatgtcatttaatccaaacccgtgttctgatgcatggagtttggaatttttgaagcgtaccggatttcattgtgatatcatttgtgtcactgggtggactgccaccccat

SEQ ID NO: 43748 - DNA, 341 bp, Glycine max
  Clone ID: LIB3139-065-P1-N1-C5
cacttagcgatcaaagttttacttcagacttatacacttaagggtaccgggttcttcccctacctctgacggttttaaacttttacttcgggattcagtctccaccttctggtggatctaaccttgacctactatgagtactgctctatgtacacggtagaacaaacaaactattactcacttaaaatttcaaactcgtgtagattcgggtgaactcgttgctgagtcaaaggagtatatgcatattcgcgtccagcatattaatggtgagaaaagcctgtcaaccgtttaggggtggaagatagaatttacctataacaagcttcttaacgacgttaaga

SEQ ID NO: 43749 - DNA, 291 bp, Glycine max
  Clone ID: LIB3139-065-P1-N1-C8
gcttggagcagttccctgacagcaaggttgcctgtgaaacctgcgaccaagaccaacatggtgatggttttcggagagatcacaaccaaggccaacgtggactatgagaagattgtgcgtgacacatgcaggaacattggttttgtctctgatgatgttggtcttgatgctgacaactgcaaggttcttgtcaacattgagcaacagagtcctgatattgctcaaggtgtgcacggtcacctcacaaagaggtctgtggagattggtgctggtgaccaatgtcatttgttt

SEQ ID NO: 43750 - DNA, 389 bp, Glycine max
  Clone ID: LIB3139-065-P1-N1-C9
cgaagccctcaaacacaccaatgctggtggaaccatggacgtgcgcgcgttgaatgttcagatgctttattaagatgcataggtcggattatgctgagaggcagcttcggatcatgcagcagattgatgaagatcacactctcactcaactcgccaatgcctggctcaatttggctgtgggtgggtcaaagatccaggaggcgtatctgatcttccaggatttgtcggagaggtatcagtccaccagcttgcttttgaatggcaaggctgtttgctgcatgcacatgggcaacttcgacgaagccgagacccctttggttgaagctctaaacaaggatgccagggatccagaaactctagccaatctagttgtatgctgtcttcacctc

SEQ ID NO: 43751 - DNA, 396 bp, Glycine max
  Clone ID: LIB3139-065-P1-N1-D10
aaacaatatgtgtgcatatgggctcaatcctggtatttcaggtggtcgtcttttgggcaccattcctcagtccatttcacagcaaactgtttggaatcaaatggcaacagtgagaacaccattgaattttgattctagcaagcagagcttttgtcaattttctattgaccttctcggtggaggaattttagtggacaaaactggagattggatcacacttatacaaaattctccaattagtaacttgttgagagttgctgcttggaagaaaggctgtttaatggtcaagattgtgatgtctgggaatgcagcagtcaaaaggagtgattgggcctcattggtacaagtgtttttaacaaacagcaacagtacagagcattttgatgcatgtaagtg

SEQ ID NO: 43752 - DNA, 375 bp, Glycine max
  unsure at all n locations
  Clone ID: LIB3139-065-P1-N1-D11
cgactgccgcacctgctgttggcttgttgttcaaggatggcaatgtgtaagaaagatgtctggagagttgaatgtggaatcccttctggatttccgctcacagttatttgcaatagcatttttaatgagatgctcattagatatagctatgaaaaattactgcgccaagctaaagctccaagtatgtttttacaatccttcaaaaattttgtttctctgtgtgtgtatggtgatgataacttaattagtgttcatgaatatgtcaagccttactttattggttctaaatcgagaagctttctancttctcataatatcaccatttcctgtggtatttgtcaaaacttgtgcaactttgcaatttagaacgtttgc

SEQ ID NO: 43753 - DNA, 280 bp, Glycine max
  unsure at all n locations
  Clone ID: LIB3139-065-P1-N1-D12
gtccagcgcagtcacactcctgacgccgcgccacgtggcagtgatcggcgcgggcgccgccggcctagtggcggctcgggagctccggcgagaagggcatcgcgtggtggttttcgagaaaggggaggaagtgggtggcatgtgggtgtacagtccggaggtggattcggatccgctgggtttggaggcgaagcggngattagtccactcgagcctttacgattcgcttcgaacgaatctggcttgggagagcatgagttttccagattaccctttcagg

SEQ ID NO: 43754 - DNA, 396 bp, Glycine max
  Clone ID: LIB3139-065-P1-N1-D2
ggtggataggaacaaatgtgataccaacagtaccacctgaattggccacctacactgtgcttcctcaaattggctactttgaattcatccctttgagagagctagaggaaattaagggagatgctagtttcctttgtatggagcctaagcctgtggggctcactgaggtgaaagttggtgaggagtatgagattgtcatcactaatccagcaggcttgtaccggtaccgacttggtgatgtggttaaggttatggggttccataattcagctccagaaataaagttcgttcggcgtagcaatcttctgcttagcatcaacatagacaagaacacagagaaagatcttcaattggctgtggaatcagcatcacaattgttggcagaggagaaattgg

SEQ ID NO: 43755 - DNA, 396 bp, Glycine max
  Clone ID: LIB3139-065-P1-N1-D3
caactacaaagatgggtgcttttttatgaatgtcaggttcgggagcatgaacaagtttccttactctcacatcgtttaaatatcacactcgctcgaacattcccagcatgattttatctgatgggtgagcgaaatacgacactgtaactggaaatgcttctcgctctgcctcctgcggcataaaccctgccaatccctcacgctcccatgattctttcattcgagctgcctggacccgaagatctcgaggtgaagctgcaaagaaacctaacaggaaatcgtggaagcagaggacagacatgtacatgagaccgttcttattaaatgttttcttctccaaaagatttattcatgcaaaagtggtacaccgaggaacaagcaaagtgatatgtgttg

SEQ ID NO: 43756 - DNA, 402 bp, Glycine max
  Clone ID: LIB3139-065-P1-N1-D4
ggtagatcgggaagatttatgtcgcagcagcagcgttcgatgccggcgcggtttttgacgaaatcgtatctgttggtggatgatcccgccaccgacgacgtcgtttcgtggagcgaaggtggcaacacctttgtcgtttggaaacacgccgatttcgctaatgatttgctccccaagtacttcaagcacaacaacttctccagcttcgttcgccaactcaacacctatggattccgaaaaactgttcccgacaaatgggaattcgccaacgagtatttcaagcgaggacaaaaggatcttctcgccgagatcaagcggcggaagacggtgtcttcggtgtccggaaaatccggcagtggcggtaacatttcggcgtcccactccggcggcgatgacatgggg

SEQ ID NO: 43757 - DNA, 395 bp, Glycine max
  Clone ID: LIB3139-065-P1-N1-D7
ccccaccaccctttacatcactttctacacccccaacaccggctcgcttccacccaaaaacaccttcccaatggcaccatcaagcgtgtcttcaaccctcacggctccgcggcctacaacttcatcaccatgggagcatacagaggaggactcaacaccttcgccatcgttggcctttcttccaagccactccacgtttatggcaaacccacctacgtgtgtgaatggatccctgatctcccttcactgcaaaactcttcaaaacccatcatcacaaaaggcctcaagtacctccctgactggggctatggccacgtctacaccgtggtggtagttaactgcaccttcaacggcaccgctgtcaatggtgacaacaccggtggcaagttggtgct

SEQ ID NO: 43758 - DNA, 391 bp, Glycine max
  Clone ID: LIB3139-065-P1-N1-D8
gagaatacaggtatagtattggcctgtgctatgaatagtggttttagggggcgcgccagttctgatatttacaccatctgctctcaagactgtgaattgtggaatcctgcttgcacaaaagcaatgactatgtcatttaatccaaacccgtgttctgatgcatggagtttggaatttttgaagcgtaccggatttcattgtgatatcatttgtgtcactgggtggactgccaccccaatgcaggatgttcaggttacaattgattggtttatttcctctcaagaatgtgttcccagaacctattgtgttttaaatccacaaaatccttttgtgttaaataggtggatgggaaaactgacttttccccagggcactttccgaagtgttaaga

SEQ ID NO: 43759 - DNA, 388 bp, Glycine max
  Clone ID: LIB3139-065-P1-N1-D9
atttgtatgctatggtgcatgatagttcagtgtctacaatgccaggtgattttgtcattggtgttaagttgacaaccataaacaatatgtgtgcatatgggctcaatcctggtatttcaggttctcgtcttttgggcaccattcctcagtccatttcacagcaaactgtttggaatcaaatggcaacagtgagaacaccattgaattttgattctagcaagcagagcttttgtcaattttctattgaccttctcggtggaggaattttagtggacaaaactggagattggatcacacttatacaaaattctccaattagtaacttgttgagagttgctgcttggaagaaaggttgtttaatggtcaagattgtgatgtctgggaatgc

SEQ ID NO: 43760 - DNA, 394 bp, Glycine max
  Clone ID: LIB3139-065-P1-N1-E10
caatttgttagtggaataaccttcaaatatgatataattggtgcgtggttcacattcttcagaagattttcctgaaaaggaagatcaagaaaaacccaaaaagattgatgccagattgagacaaagaatagatcctcaatacaatgaggttcaggctcagatggaaacaaatttgtttaaattgtctcttgatgatgttgaaactcctaaaggttccatgttggatctgaaaatttctcaatctaaaattgcacttcccaagaacacagttggaggaaccattctgcgtagtgatctattggcaaattttttgacagagcgcaattttagagcaagtgttgatttgcagcgcactcatcgtattagaggaatgattaaaatggtggccacagtt

SEQ ID NO: 43761 - DNA, 341 bp, Glycine max
  unsure at all n locations
  Clone ID: LIB3139-065-P1-N1-E11
ctttgattctgtaatttgtcaatttaagctgattattgaattgagctgccattcctcttataagggacttgggcaagtaatactgtgtttccagtatagagtttcttatgtggtctatgttattgttactagttgcttagttttttaaatctgtgcattggtctactatcaataatgtattgttgncttactgaactccatgtagaggaatggcaggacaattcaatctcgagcttagtcctggtggttgcgtctttgctttcctatatttttttatctatttggtgggggggggggggggtctatttttattcttctttctattctgtttctttctatct

SEQ ID NO: 43762 - DNA, 319 bp, Glycine max
  Clone ID: LIB3139-065-P1-N1-E12
aacgaaactaatgaagccccacactccggcttcttctttcgtcactcgtctcccgcacgtgccttacttccgcggcgccactgccgcacgtgccgcgccatcggaccctcctcatgacgcccccggaggcctcgaattccgccgcgtctcgaccggcaaacgccgccgcgtcagcctttccgtctggcacgcgaggcgcgtcaccgccgccttgaattccggggggtccgacggcgaccgggatacttgagctcggagcaacccgcgcggcgtgcttattggcgccgtcttaggcgccggcgcattaattctggttttg

SEQ ID NO: 43763 - DNA, 363 bp, Glycine max
  Clone ID: LIB3139-065-P1-N1-E3
aaaaagtaggtaaagtgcataggagcactagctaaacagtacgtagtgatcataagcaagcatactgatgattaatatggcaaccatggaagacatgagcaacatgagtggtgaaattacacttccagggttccgattccacccaactgaagaagagcttctggatttctatctcaaaaacatggttgttggcaagaaacttcgttacgatgttattggtttcctcaacatctatcagcatgatccatgggatttgcctggtttggcaaaggttggggaaagagagtggtacttcttcgtgccaagggacaaaaaacatggaagcggtggaaggccaaaccgcaccactgaaaaagggttctg

SEQ ID NO: 43764 - DNA, 384 bp, Glycine max
  Clone ID: LIB3139-065-P1-N1-E4
acaataccaggtgattttgtcattggtgtcaagttgacaaccatggacaatatgtgtgcatatgggctcaatcctggtatttcaggttctcgtcttttgggcaccattcctcagtccatttcacagcaaactgtttggaatcaaatggcaacagtgagaacaccattgaattttgattctagcaagcagagcttttgtcagttttctattgaccttctcggtggaggaatcttagtggacaaaactggagattggatcacacttatacaaaattctccaattagtaacttgttgagagttgctgcttggaagaaaggctgtttaatggtcaagattgtgatgtctgggaatgcagcagtcaaaaggagtgattgggcctcattg

SEQ ID NO: 43765 - DNA, 340 bp, Glycine max
  Clone ID: LIB3139-065-P1-N1-E7
atgagtatgctcattatttatagctatgaaaaattactgcgccaggctaaagctccaagtatgtttttacaatccttcaaaaattttgtttctttgtgtgtgtatggtgatgataacttaattagtgttcatgaatatgtcaagccttactttagtggttctaaattgaaaagctttctagctggtcataatatcaccattactgatggtattgacaaaactagtgcaactttgcaatttagaaagttagcagattgtgattttctcaagagaaactttaagcagatgtctaatggtttgtgggtggcttctggagacaaggcgagtttatgggcacaac

SEQ ID NO: 43766 - DNA, 225 bp, Glycine max
  unsure at all n locations
  Clone ID: LIB3139-065-P1-N1-E8
gaaccagacatttanttaagttttcagcttttgagtaccagtacgaatggttattttgttcaggggaacaatctcgcaatggttaaagttaatgtagcatgtgctgttgttggcttgacatcaagttacactccaacttcattgttggttattgtctcgcaaaaagacagattattaattgacgattattttttattttactttttttctttctttctacctttt

SEQ ID NO: 43767 - DNA, 393 bp, Glycine max
  Clone ID: LIB3139-065-P1-N1-E9
tcacgcttctaccactacactacttcccttcactctctctgtctgtctctgcaaccaaatggcgccttctaccaccgtacctaacggtaccctcccctccggttccgtcaccggacgcttagcctctgtctacagtgaggtccaaaagacgcgcgtggaccacgcgctccctctcccctctgtcctcaagcatcccttcaccattctccacggtcctccaagctccgccgccggaaatccagacgagatccgcgagctgtttccgcatttgttcggacaaccttccgctgcattggcgcgtagcgatgcggcgcagaccccagaagaagctgaagaatggcgtggttttgtccggtggccaggctcccggaggccacaatgtcatttctggaa

SEQ ID NO: 43768 - DNA, 402 bp, Glycine max
  Clone ID: LIB3139-065-P1-N1-F10
gcttccttaagctccttagtgctgctccttgcagctctgggtcgatcccctcaagttcttgcaaacgatgagaatcccccagtgtacaagcctcccactgagaaaccaccagtttataagcccccagttgagaagcctcctgtttacaaacctccagttgaaaaccccccaatttataagcctccagtagagaagccaccagtgtacaagcccccagttgagaaacccccagtgtacaagcccccagttgaaaaaccaccagtgtacaagcccccagttgagaaaccaccagtgtacaagcccccagttgaaaaacccccagtttacaagcccccagttgaaaaacccccagtgtacaagcccccagttgaaaaaccaccagtgtacaagcccccagttgag

SEQ ID NO: 43769 - DNA, 402 bp, Glycine max
  Clone ID: LIB3139-065-P1-N1-F11
cggctcgagtcccacactctcttttctctacctacaaaaaaaagggcatctaagttctaacgatgaatcaccaacaacaatctcctgcagtgactgcatatccagcaggggctcagagcaacctagcagctccaccaccacctgtaggttatcccactaaggatgatcttccttcccaacaaaatgttcctgtcaaaaccactaccaggggtgatggcttctggaagggatgttgtgcgggcttgtgctgttgctgtgccctggattgttgtctctgattgaacatccctgcagtactttatggatttgagcttgttctctctgtcttttgttattttctttagcagattaattttgtatttgtctacgctaataaggatatttgtgtcctaagggacagca

SEQ ID NO: 43770 - DNA, 388 bp, Glycine max
  Clone ID: LIB3139-065-P1-N1-F12
cataattaagatgagaacaagcaaccacttgatcggtcttctgagacttcctaacgttcctgctggggattccgatcctaggtggcggaatatggctgagcagcagggccaacaacaccgactgcctcaagttcctgcagtggccgctcatcatcatcggagtcagcatcatggtcgtgtccctcgcggggttcgccggcgcgtgctaccgcaacaccttcctcatgcgcctctacctcgtcgtcatgttcctcgtcatcgccgtcctcatcgggttcatcatattcgcctacgtggtcactgacaaaggctccggtcggagggtcatgaaccgcgcgtacttggagtactacctcgaggactattcggggtggttgtaggagcttct

SEQ ID NO: 43771 - DNA, 362 bp, Glycine max
  unsure at all n locations
  Clone ID: LIB3139-065-P1-N1-F2
cattgcttcatttacccttgtccttccgtttttccctacgggcacttcagaacgtatggaggatgaaggagatattgccacagcttttactttggccagacttttgtcaaacatacccatttctaggggaggacctaccagtctggtgacatttgacattcatgccttgcaggagagattctactttggtgataacattttaccatgctttgagagtggcataccattgcttaaaagaaggctccaggatcttcctgattctgataacatatcagttgcttttcctgatgatggtgcttggaaacnatttcataagcaactgcagcattttccaacgatagtttgtgcaaaggttcgggaag

SEQ ID NO: 43772 - DNA, 394 bp, Glycine max
  Clone ID: LIB3139-065-P1-N1-F3
tagtagttcatcctcaaaaaaacctttcataacttcttttcttcgtccttcttcttcgggttgtgagtgtatacgcatcacgcatggcagctttccttcgacgctggattccacgatggaagattttatcttctccaccctgacgggatagcaaatctttcatgaaattgagaattgctgctgctaataaacaagcttccattgagatgggggagttcaccgggagtggtgagtatgtgactatcggcgaatttccttcctccaggacaaatcactcaaggaaagtttcagttcttcctcttgtgtttctcatcttctatgaggtttcaggggggccttttgggggtgaggatactgtgcacgcagcgggtccttttttagccctccttggatt

SEQ ID NO: 43773 - DNA, 286 bp, Glycine max
  Clone ID: LIB3139-065-P1-N1-F7
atggggaggaggtctgtataggtgttaccggcagataaaaagcaggccataccccaaatcacgtgtctgccgtggtgttcctgatcctaagatcagaatttatgatgttggtatgaagaagaaaggtgttgatgagtttcccttctgcgttcatctggttagctgggaaaaagaaaatgtttcaagtgaagcattggaagctgctagaattgcatgcaacaaatatatggcgaaatttgctggaaaggatgctttccacttgagagttagtgttcatccatttcat

SEQ ID NO: 43774 - DNA, 342 bp, Glycine max
  Clone ID: LIB3139-065-P1-N1-F8
attgaggagtttattcttatgccaaatgtagccaatcttcgaaaggttggtgaccaattgtgtgatgaagaactatatgaggctgccaaaatcatatttgcctttatatctaactgggccaagttagcagttacacttgtgaagttgaaacagttccaaggtgcagttgatgcagcaaggaaagctaacagtgcaaaaacatggaaggaagtttgctttgcatgtctttgactcatactactctctttttctttccatatatcatgtctcttttattttttctactttgcgtgggggggggggggggttgttatttttttttttctcttttattcttcctct

SEQ ID NO: 43775 - DNA, 397 bp, Glycine max
  Clone ID: LIB3139-065-P1-N1-G11
tttgaaaggttctcttttgaagagacaattgcaactcttgactggaagttggaaaacaagaatgattttgacctcggcctcaacgcgctcgattatgaggtctggcttggtgatgttagcattggtggtgcagaactcaccaagtctgctaaaattgaaaaaagtggaattagttatattgatattccaattaccttcaggcctaaggattttggctctgcactatgggacatgattagaggaagaggaactgcttacaccataaaaggacatattgatgttgacactccctttggagcaatgaagttgcccatcagcaaagaaggtggtactacccgtcttaagaaaaagaaggaagatcgtgattatgatgatgatgacgatgatgatgaggaat

SEQ ID NO: 43776 - DNA, 403 bp, Glycine max
  Clone ID: LIB3139-065-P1-N1-G12
ctggaaatgcaagaagcttatcttgtcaatctcgtaaatgtgttgcgagaattgtatttgcacaggccagaggaagctcgccaattgagaaggaaagctctctctcgtattgaatggctgcaaaaagctgatgtgcctaccatagcacagattgaagagttccattcgatgcagaggatgatgaatgctcctgattcaaatgataatattgatctactgttgagcattgatttgttgggtttacaaggagcaggtaaagcttttccaaacaagattgtttttgatgataagcttgtgttggctaacacacaagaattctttgatggaaattttccagtggattcttggttaccaatttttgtgaattgtctctatcctgtaagtcaattaccttcagaagctg

SEQ ID NO: 43777 - DNA, 399 bp, Glycine max
  Clone ID: LIB3139-065-P1-N1-G3
ctcgtctacttcgacatcacaaagctccaccagatccccaacggggccgcgctctccaccactctctaccaaaccaccggcaatgccaacggcaacgtcggctccgtcaacatcaccgacctcaaaggcggtaaggttggcttcggctccgctgctcccggctccaaactcgactcctcctacaccaaatccgtcaaacaaatcccctacaacatctccgtcatggaaatcagcgcgccgatcatttcgccggggatcctcgcggctccgcctccctcagccgacgttaacataacggcactcatcgaaaaagccggatgcaaaacgttcgcctcactcatctcctctaacggactcattaaaacgtttcagtcaacggcggataaaggtttgactatt

SEQ ID NO: 43778 - DNA, 408 bp, Glycine max
  Clone ID: LIB3139-065-P1-N1-G4
atctgaatcagagaatagatattaatggctacaccggaccacctgttcgggctccgcaacaacttgtatcgcggggcgtaccaagccgccatcaacagcggcgacgtcaccaacctctcccaagaagactccctcgagcgcgacaccctcgtccaccgctgctacatcgccctcggccagcttcagttcgtcatctccgagatccatgacgacgctcccacacctctccaagccgtcaaactcctcgctctctatttctcctcccccgacaccaaggattccgccatcgcgagtctcaaggagtggcttgccgatcccgccattgcaaacaacgccacgctgaggctcgtcgccggtctcgtcttcctccatgaaaatgatttcaacgaagccctcaaacacaccaat

SEQ ID NO: 43779 - DNA, 405 bp, Glycine max
  Clone ID: LIB3139-065-P1-N1-G5
tgggaggtggaactggtatgaatctcttccatcgccgtttcccaacaagatgctttgatgtggggatagcagaacagcatgctgttacatttgctgcaggtctggcttgtgaaggtcttaaacctttctgtgcaatttactcatcattcatgcagagggcttatgaccaggtggtgcatgatgtggatttgcagaagctgcctgtaagatttgcaatggacagggctggattagttggagcagatggtcccacacattgtggttcttttgatgtcacatttatggcatgcctgcctaacatggtggtgatggctccttctgatgaagccgaccttttccacatggttgccaccgcagcagccattaatgatcgacctagttgttttcgatacccaaggggaaatg

SEQ ID NO: 43780 - DNA, 362 bp, Glycine max
  Clone ID: LIB3139-065-P1-N1-G6
cgcgaaaccggcgaaacacgccgccggcaaggtccgcatcctctgcgatggacggcgccggcgccactgacggcatcctcgccgcgaagtccctcgcgcacctagaggcctgtcttcgccggaagtcaggcgacgcgaacgcgcgcgtcgacgattgcttcgacgccggcgtcggctccggggtcggcggaggaaagaatactaaccacaaatctctggtcggcagaactatctaagcttgcagctaatgccttcttggcccaaaggatttcatctgtcaatgccatgtgagcgcgtgggggaggctaccggggcaaatgttcaacaggtgtcctattctgttggaacagactcaaggattg

SEQ ID NO: 43781 - DNA, 388 bp, Glycine max
  Clone ID: LIB3139-065-P1-N1-G8
gcatctcccccatacaggttaagatccaagcgaacagcaggggtcaagtcagtggagaaacaactggagtatgcatttgacaaagagaagaatgacgacaagaggagtaatgtgatgactgaagatcgtctgcatgaaacaaaattggttgtgacatagtgcataaattgggacttgcatttgaaggtagctgattgtttctctaaattgtttgataatgtttaccaattttatgaataaaattcagtgcacgggtcacaatgacttggctcttgtctacacttgatagttggctgtcatttccatcacacctgaacagaattcacaaaagtagataaattccatttacttgtggatacatactagttgtatttatcagatttgtaca

SEQ ID NO: 43782 - DNA, 391 bp, Glycine max
  Clone ID: LIB3139-065-P1-N1-G9
gtcaaatcttgatgttttcagccacatttcctgttactgtaaaggatttcaaagataggtatcttcaaaagccttatgtcatcaatcttatggatgagctaactctgaagggtattacacaattttatgcattcgtggaagagagacagaaagtccactgcctaaatactctattttctaagctgcaaataaaccagtctatcatcttctgcaattcagtgaatcgggttgaactccttgccaagaaaatcacagaacttgggtattcatgtttctacattcatgcaaagatgttgcaagaccatcgtaacagagtgtttcatgatttccgcaatggtgcatgtcgaaatcttgtttgtactgatctttttactagaggaatagacattca

SEQ ID NO: 43783 - DNA, 389 bp, Glycine max
  Clone ID: LIB3139-065-P1-N1-H10
gatttgttgggtttacaaggagcaggtaaagcttttccaaacaagattgtttttgatgataagcttgtgttggctaacacacaagaattctttgatggaaattttccagtggattcttggttaccaatttttgtgaattgtctctatcctgtaagtcaattaccttcagaagctgtcgttgtaaatgttacatgtggtagtggacgtgtggtttacccaccactgcttggatcagttatgcaggtaacaattgcttcttagacatcaacaaaaggattaggacagtacggggggagggtaagaaaatagtttttcttactagagttgatcctttccagtagctttattggctgttttttttggcgttaagaatgtaattctgagttcta

SEQ ID NO: 43784 - DNA, 390 bp, Glycine max
  Clone ID: LIB3139-065-P1-N1-H11
cattttccggtgacatggagtccaagtggggtggcgcccgcgccagcatcatggcggcgaatttcgacgacttcaagtggatcgcctccatgttcgatcccggaaacgacgacgtcaagcccttctccgacgcagctttccaaaaccaggatgcagtaactgcattttcaacttgtggtggagtaacagatgatacccttgttcgttcccaaaacctcactcccattcaatccaccatttctgcaactattgattctcagtcttccttttgtggtaccgttgggagcccagtgtctgctaacaaaccaaacgtgagagataatcaagtaaaaggggtcgccaccactacaagtggttcctcacgtgagccatctgatgaggatgatgaag

SEQ ID NO: 43785 - DNA, 290 bp, Glycine max
  unsure at all n locations
  Clone ID: LIB3139-065-P1-N1-H12
tcggcncgagggagtctgtttttgatattctcttgggaatctctcaagattttgaaattgctggtaatactcttatgccagctttttctgttccacaggctactgccagatcttctgaaaatgcggaatcctctgcatgatctggaattcgtgttttctttcgcttgttcgtttgtttaattcaataaaggaaattaggcatgaccctcttgttgagtatgctctgcctatctgaaaatttccacacctcttttaattgtcgtaatgatgtgtgaagtgtgtgttatttt

SEQ ID NO: 43786 - DNA, 406 bp, Glycine max
  unsure at all n locations
  Clone ID: LIB3139-065-P1-N1-H4
gtcaccaccattccttgcaagtaaggaaccgccaggtgctgtaaaaaatgagacttttaactctgatgaagctaaatctgcgagcacaaatcaaactacaaatgctactgcaactgcaactgcaaccaatgtttcagtgagtttccctgttcagaatgttccaaatctgaacacgagttctaattcttcggtgaaggtggatttggtgaagggtactgttgtgtctaatgataattacaccgcttctctggcgaggaaacagaacaatgggaaggatcacgctaaggggaacgatgaatcgatggagtctctgatgaagtgtgatttttttgatggagagtgggttanagatgatgcatatcctctctataagccagattcttgctctttgattgatgaacagttc

SEQ ID NO: 43787 - DNA, 295 bp, Glycine max
  Clone ID: LIB3139-065-P1-N1-H5
gttgtgcatgtttggagtttcatgtaacaggccatgtgtgcaaagagcgtcggtgctttaaggaatgtggtcgagtcgatcatggctctattgtgaatatgggcaatgttgcaactgaaccaatcctaggattaggttgtgtgaatttagtttttactttcggaaaaagtttgtatttggataatgtcttatttgtacctggtattcgtaagaacttattgtctggtatggttttaaataattgtggttttaagcaagtacttgaaagtgacaagttcatctttttaagacatgg

SEQ ID NO: 43788 - DNA, 403 bp, Glycine max
  Clone ID: LIB3139-065-P1-N1-H6
gtaaacatgggtttgatattggtcaggaaatctatgacggggaatgcagcagtcaaaaggagtgattgcccctcattggtacaagtgtttttaacaaacagcaacagtacagagcattttgatgcatgtaagtggacaaaatcagaaccacattcctgggaattaatcttcccaatagaggtatgtggtcctaataatggttttgaaatgtggagttctgagtgggcaaatcaaacttcatggcatttgagtttccttattgacaatcccaaacagtctacagtttttgatattctcttgggaatctctcaagattttgaaattgctggtaatactcttatgccagctttttctgttccacaggctactgccagatcttctgaaaatgcggaatcctctgcat

SEQ ID NO: 43789 - DNA, 343 bp, Glycine max
  Clone ID: LIB3139-065-P1-N1-H7
cttagttgtcatgttcgaatcaacccatactctatggaatggactggtttggtcaatagatgactgagttagggcatcaatattatgtgttgcagattatgctagttttgatggttcgattactaatcaagttatgagcaggatggtaacaatgataaacacaatttgaagtggtgataaaaaattgatgcctagaaaggacacacctgctgatgctttgtcgttgaagaatggatataagtaagaaagatgttatgagagttgaatgtagactatgttctgagttttcgatcacagctatttgttataacactatttatgagatgcgtattatatatagcta

SEQ ID NO: 43790 - DNA, 393 bp, Glycine max
  Clone ID: LIB3139-065-P1-N1-H8
aaggcgtcttcataaacgcctttcttctccgtttccgtttgctcgttcgaattcgccttttgatctgcgaaaatgagagagtgcatctcgatccacattggtcaggctggtatccaggtcggaaatgcttgctgggagctctactgcctcgagcacggcatcgggcccgatgggcaaatgccaagtgacaagacagttggcggtggtgatgatgctttcaatactttcttcagcgagactggtgctggaaagcacgtgccacgtgcagtgtttgtagatcttgagcccactgttattgatgaggtgagaaccggaacttaccgccagcttttccacccagagcagctcatcagcggcaaagaagatgccgccaacaactttgcccgtggccat

SEQ ID NO: 43791 - DNA, 393 bp, Glycine max
  Clone ID: LIB3139-065-P1-N1-H9
ccatactccatggaatggactggtttggccaatagattactgagtaagggcaatgatattctgtgttgcgattatgctagttttgatggtttgattaccaagcaagttatgagcaagatggcagaaatgataaacagtctttgtggtggtgatgaaaaattgatgcgtgaaaggacgcacctgctgttggcttgttgttcaaggatggcaatttgtaagaaagatgtttggagagttgaatgtggaatcccttctggatttccgctcacagttatttgcaatagcatttttaatgagatgctcattagatatagctatgaaaaattactgcgccaggctaaagctccaagtatgtttttacaatccttcaaaaattttgtttctttgtgtgtg

SEQ ID NO: 43792 - DNA, 299 bp, Glycine max
  Clone ID: LIB3139-066-P1-N1-A10
gatggaagtgattagaaatagaggcattcctgctgatgttcttgcaaagcgagctcatgaatttgaaaaacatgttgctcatgaaagcctcaaggatcaaattcctgctgttgacaagttgtattctactaaggttaataagtttgcaaaaattatgaaccttagacaaagtgttgttggtgatcttaaacttcttactgatgggaagttgtatgagggtaagcatattcctgtatctaatattagggcacgggaaaaatatgtagttcaaatacccttaatggcacacgaagaaattc

SEQ ID NO: 43793 - DNA, 228 bp, Glycine max
  unsure at all n locations
  Clone ID: LIB3139-066-P1-N1-A11
tcaagcttttcgtcaacctccacaacccggagggtcacaccagtcagttgcttgtgagaaacaactgcgttttgttcatttcgccgaaccttcccattggagaagatcagtcggtcaatcccgcctccggatctgtgatcgaggcggcaatgcacgccgaggctacgcaagctgcacctncgacctacgctgtgcaccacctcgatcagatgtacagagacatcgacc

SEQ ID NO: 43794 - DNA, 52 bp, Glycine max
  Clone ID: LIB3139-066-P1-N1-A6
cacattctgttcttccttccactgcacaatcacctagttggttcttatcctt

SEQ ID NO: 43795 - DNA, 202 bp, Glycine max
  Clone ID: LIB3139-066-P1-N1-A8
gatggtattgacaaaactagtaactttgcaatttagaaagttagcagattgtgatggtctcaagagaaactttaagcagatgtctaatgttttgtgggtggctcctgaggacaaggcgagtttatggtcacaacttcattatgtttcgtgtaataatctggaaatgcaagaagcttatcttgtcaatctcgtaaatgtgtta

SEQ ID NO: 43796 - DNA, 384 bp, Glycine max
  unsure at all n locations
  Clone ID: LIB3139-066-P1-N1-A9
tcatccttcaccacgctctcctctcccttccttcgactggaattaccctccagaacagagaaacgatcttcatcaattattcctgttccctccatccgagcctctgtctccgagaaaccaccgctaccggctgtgtcggttacctnccctgagccaagcaagctccccatccgcaaaatccccggcgactgcgggttcccggtgatcggtcccttgaaggaccggcaagactatttctacaagcagggccgcgacgagttctttaaggtccgcattcaaaaagtccagtcaacttggtttcgtaccaacatggcaccttggccctttcttggccccaaaccaaaagtggggggttttcttggcccaaaaacctttcccatcctt

SEQ ID NO: 43797 - DNA, 190 bp, Glycine max
  Clone ID: LIB3139-066-P1-N1-B1
ttttctcatatttcacaggaacagacacacttccatgtagaacattctttctatatgtggcaaaaacaacgtagacacacttgagcgacacatgcaagggcgaaagtgatctaccaagaaattgagattgaaggggagcgaacgaaagagagcttaatctcgtggatacagtgacgaaattggggatgcc

SEQ ID NO: 43798 - DNA, 262 bp, Glycine max
  Clone ID: LIB3139-066-P1-N1-B10
caactctacgtctctctctcctcctttttgttcacctgccacatttacaacaacccgcgtcttcttctttatcaacttttcctcagaactctcttagatttagctgctcccaatcgtttggaccaaaagccattaaccccttttgcagaaaagcacgattttgctctctacaagggtcaacgagtgtgaaaagcagaaaaagcttggtgctttgtgccatcaacatgactatagcaacggatagtttgttgcaagtggtgga

SEQ ID NO: 43799 - DNA, 152 bp, Glycine max
  Clone ID: LIB3139-066-P1-N1-B11
cgtgtatttacaccaagaacacaagacaaatgtctggttgttttaagcgatccgagggacactatgaaaacatgttggtttaccaggacctccttacaggtgatgagcttctctatgactccttccgttacacagaaattgctaatgaaatg

SEQ ID NO: 43800 - DNA, 330 bp, Glycine max
  Clone ID: LIB3139-066-P1-N1-B3
atttaagaggtttggaaagaagcttgaagagattgaaaagaagcttatagagaagaacaaagatgagacattgagaaaccgctatgggccagctaaaatgccttacactctgctctatccttctagtgaggagggattgactttcagaggaattcccaacagtatctctatctaaggaccctatggttgcttaagtactgttcctggttttaaataaatgtgaaattgaaggaaccagattccttaatcaggtgtgtatgcttaagtcatgtatttggaggggctgaatgtatttgtatttggcattaataaagagaggtgtggtaggat

SEQ ID NO: 43801 - DNA, 130 bp, Glycine max
  Clone ID: LIB3139-066-P1-N1-B5
ttgacccatatgagatgaagaccaaaattatgtgtgctaatgtaaagagcatatatatgtagatatgtaatgtgctaactataatactttgtgtataatattagattagattaggtagggggagaaaaag

SEQ ID NO: 43802 - DNA, 123 bp, Glycine max
  unsure at all n locations
  Clone ID: LIB3139-066-P1-N1-B6
gatcctcaatacaatgaggttcangctcagatggaaacaaatttgtttaaattgtctcttgatgatgttgaaactcctaaaggttctatgttggatcttaaaatttctcaatctaaaattgca

SEQ ID NO: 43803 - DNA, 242 bp, Glycine max
  Clone ID: LIB3139-066-P1-N1-B7
ataaccatacactcttcttcatattcttcttcttcttcttgttcttgttctatctgtgacgagcatcatggcctcgagagcagtgctattgttggctatgtgtgtgcttccggccatggttgtggccattcgcccagcaaagaaccctttttgcgtgaagggtcgcgtctactgtgacccttgccgtgctggttttgagaccctaacaaccacctacattgccggtgcttaagataatgttg

SEQ ID NO: 43804 - DNA, 263 bp, Glycine max
  Clone ID: LIB3139-066-P1-N1-B8
ttcagagtgatgcactctatcagtatatacttgaaaccagtgtctatccaagagagcacgagtgcttgaaagagatacgcaagatgactgcaaaacacccactgaacatcatggcaacaccagcagacgaaggacaacttctgagcatgcttgttaagctcacgaattcaaagaacgccttggaaattggtgtattcactggttactctctgctctccactgccctggctctttcccctgatggaaagatcttggctttggat

SEQ ID NO: 43805 - DNA, 237 bp, Glycine max
  unsure at all n locations
  Clone ID: LIB3139-066-P1-N1-B9
cgtttcttgcgactcaaactcaaaccaatcgcgactggttattaaacaaaatggcggtccanatattaaaaaacctttatcctccaattcaaattcctaacactaagctatatccttctaaaaacgtgggaacgactttctaattaaccttcaacactatctctatctaacgaccctctagtttattaaatactatctctacttataaataaaatccattacttaacccaaccctat

SEQ ID NO: 43806 - DNA, 301 bp, Glycine max
  Clone ID: LIB3139-066-P1-N1-C1
ctcttcttcttttttttttttttttttttccttttttttttttttctttttttttcccctctctctttttttttcttttttttttctttttttcctttcttctttttattcttttttttcttttccccttttttcttcttttctcttcttctcctttttttcttctttttttttttttttttccttctttttttttttcttcccttttcttttctattttcttttcctctttttctcttttctttttcttttctttttttcttcttttttcttttttcttttctttttcttcctctttttt

SEQ ID NO: 43807 - DNA, 313 bp, Glycine max
  Clone ID: LIB3139-066-P1-N1-C10
catttgtgtcactggatggactgccaccccaatgcaggatgttcaggttacaattgattggtttatttcctctcaggaatgtgttcccaggacctattgtgttttaaatccacaaaatccttttgtgttaaataggtggatgggaaaactgactttccctcaaggcacttcccgaagtgttaagagaatgcctctttctatagggggaggagctggtgcaaagaatgctattctcatgaatatgccaaatgcttgtctttcaatgtggagatattttgttggagatctcgtctttgaagtttctaaaatgact

SEQ ID NO: 43808 - DNA, 386 bp, Glycine max
  Clone ID: LIB3139-066-P1-N1-C11
gcctacgcagagagaaattgagtttctgagataaccacttttctctttgattcatcaatggcaaccgcgaggaccgtgaaggatgtttcgcctcacgatttcgtgaaggcttacgcctcccatctcaagcgttccggcaagatggagcttcctgagtggactgatattgtaaaaacagcaaaatttaaggaattggctccatatgatcctgactggtattatgttagggctgcctcaatggcaagaaagatttatttgagaggcggtcttggtgttggggctttccagaggatctatggtggaagcaagagaaatgggagcccgcccccacatttctgcaagagcagtggggctattgcaagacacattctggaacaattgcaaaa

SEQ ID NO: 43809 - DNA, 308 bp, Glycine max
  Clone ID: LIB3139-066-P1-N1-C12
cttgacctgtatgagacagcagaagccgtcgaagaaggtatcaacaaagacctcgacgctacccgcataggcaagttcgccgacatcaagacttccacacgggaaaccatcttactggcgatgatcgggctcgtcgaccacaagaagctgaagcccggtgacctcatcggtgtcaacaaggattcggatcttgttctagacacgctccccgtcgagtacgatagcagagtgaaggcaatggaagtcgacgagaagcccaccgagaagtacacggacgtccgaagactggataagcagatcgaggagat

SEQ ID NO: 43810 - DNA, 63 bp, Glycine max
  Clone ID: LIB3139-066-P1-N1-C2
aaaaaaaaaaatttaacattttttaaaaaccaaaaaaaaaaaaaaaaaggggcggttcatatt

SEQ ID NO: 43811 - DNA, 289 bp, Glycine max
  Clone ID: LIB3139-066-P1-N1-C3
gcgttgatctgtaagtttgattttgcacccttcatggttgtgattattgccatactcaatgatggtaccattatgactatatccaaggatagagtgaaaccatcaccacttcctgatagctggaaactgagggagatatttgctactggcgttgtgctaggaagttacatggcactaatgacagtagtatttttctgggcaatgaaagataccaacttcttctcgaacaagtttggtgtgaggccattgagagatagccccgatgaaatgatggcagccttataccttc

SEQ ID NO: 43812 - DNA, 344 bp, Glycine max
  Clone ID: LIB3139-066-P1-N1-C4
cttttctacttctctcctttctttcactctcttcttctcactgatccgcattgccgttcaaagtggtcttatttgaaaaacacttgggcgttggtgcaaatgtttgcttcgttaattttctctggagacaacaggctcactgagaaaacaatttttacttgcagagatttggacatcttggttgtctattatacaatagcaactcaatttagaaaatttctaccgcattacattaggtggcatctgtataccttgttgatctacattctcccatcttttctcactgcttgaattaaatataagcggaatttgagtaatattcatattttccgcttattttacga

SEQ ID NO: 43813 - DNA, 384 bp, Glycine max
  Clone ID: LIB3139-066-P1-N1-C6
ctcgagccgaatcggctcgaggttggaggaaccattctgcgtagtgatctattggcaaattttttgacagagggcaattttagagcaagtgttgatttgcagcgcactcatcgtattaaaggaatgattaaaatggtggccacagttggtattcctgagaatacaggtatagcattggcctgtgctatgaatagttcttttagggggcgcgccagttctgatatttacaccatctgctctcaagactgtgaattatggaatcctgcttgcacaaaagcaatgactatgtcatttaatccaaacccgtgttctgatgcatggagtttggaatttctgaagcgtaccggatttcattgtgatatcatttgtgtcactggatggact

SEQ ID NO: 43814 - DNA, 323 bp, Glycine max
  unsure at all n locations
  Clone ID: LIB3139-066-P1-N1-C8
ttcatattttatagtgacttctgcatgctctctgatgcatgcaggcagatgttataatggctttggctgggtcaaatggaggatcttggtccactgcattctctcctaaatctgttgtaaagatggttagtgatggtaacttgcatggtggagaaaatgaaacaggtctagttagtaatgtggcattcccacaggagcttcatgggaaattgtctattactggcagttctagccatgccatcgggcttggtgatcgagtaactactncagcaggtaatccttaaactcaaacataatacctggtttgatttggctacattcta

SEQ ID NO: 43815 - DNA, 203 bp, Glycine max
  Clone ID: LIB3139-066-P1-N1-C9
ctcatagttgccactcactttatagcacaaacgtattgtttttctctctatccgcgggctagatctgaacatgagggaaaccgtaactgctctcaccaacgacatcaccaattttgtcgaacaactacctatttcgacagacctagtcatcggaggaattgcacccgggggatcacagattgacgctcgccaatatgatacca

SEQ ID NO: 43816 - DNA, 333 bp, Glycine max
  Clone ID: LIB3139-066-P1-N1-D1
ccaataggttactgagtaagggcaacgatattctgtgttgcgattatgctagttttgatggtttgattaccaagcaagttatgagcaagatggcagaaatgataaacagtctttgtggtggtgatgaaaaattgatgcgtgaaaggacacacctgctgttggcttgttgttcaaggatggcaatttgtaagaaagatgtttggagagttgaatgtggaatcccttctggatttccgctcacagttatttgtaatagcatttttaatgagatgctcattagatatagctatgaaaaattactgcgccaggctaaagctccaaatatgtttttac

SEQ ID NO: 43817 - DNA, 358 bp, Glycine max
  Clone ID: LIB3139-066-P1-N1-D10
caacaagtgcaggcaggccgagttctacctcccatggaagtgccaggaccagcgtcactcctacgaaaagtgccagtacgagctcgttatggagagaatgctccagatgcaaaagatccgcgagcaccaacaaaaccccaacgccaaacaaccccttatcgcgcttcccaaacccgccaatgcctgattcatattcactgaacctttgcttgggacagatgttatttcatgttttgctattgtatggatcaaagtgactttggaatgtttgtccaaagactacttcagactttttatattttatttctggctatttctgctgtcatggacccatgtttcttcttggaagaaataaaat

SEQ ID NO: 43818 - DNA, 95 bp, Glycine max
  unsure at all n locations
  Clone ID: LIB3139-066-P1-N1-D11
gacgcacctgagttgttgcaggacgcacctgagttgttgcaggacgcacctgagttgaccaagctgtaagaaattcctcttgtgcgtnctgcaac

SEQ ID NO: 43819 - DNA, 372 bp, Glycine max
  Clone ID: LIB3139-066-P1-N1-D12
atttcatgatccgcatttactctttgatacagctaaaagggcacatacaacatcaaattggctgttagatttgaatctcccagcagaagagaatgaacagaaacaaacaaatgatggaaactctgatcatgttgtctcgactgagaatcaaaagctttggttgcaagatttgtgtgatctggttgatgaaacagttgtttttaaaccttatgattttgatgctcttgcagatagagtgttgaaagtgatcagaagtaacttcaacaaaattctcggatccaagtgtgcattgcagatccagacagaagtcatggaccaatttcttgcagctcaatatgtctcaaaccgggatacggaggtggagaactgggt

SEQ ID NO: 43820 - DNA, 342 bp, Glycine max
  Clone ID: LIB3139-066-P1-N1-D3
ctccacctaaccaaccaccttcttaattaataaccggcggcgtttcaatctcgttacacacgctcaaaacgcagcggcacactcactagaatgcaagccgtttcgctctcacctttgtcgtttagggattcttccgacgagttcgctggaaagttcgaacacgatttcatggccaagctcaaaatcaacgaagagaaagtcgaaaacgaaaacgaagagaagcataacgaagatgagatagaagaagaagaagaagaagaagaagaagaagaagaggaagagtttagcttcgttctcacgaattccgatggatcgccgatcttcggcggcgacgcgtttgac

SEQ ID NO: 43821 - DNA, 284 bp, Glycine max
  unsure at all n locations
  Clone ID: LIB3139-066-P1-N1-D4
cttcaacttcacccattcatacgtggtgttgttactgctgctcttttctcttttcttttggctttagntctctcttcccctttctttttctttttcttcttcttctgagcttgtttaagcttttcttccattaacatattatcacaatgtgtggtattcttgctgttcttggttgttctgatgactctcgagccaaaagggtccgcgtgcttgagctctctcgcagattgaagcaccgtggccctgactggagtgggctccatcaacatggtgactgctttttg

SEQ ID NO: 43822 - DNA, 376 bp, Glycine max
  Clone ID: LIB3139-066-P1-N1-D6
cttttgttttgtctacaacctccccgacaaaaaatgcacaggcacttatttctgcatggaaaaccggtgagacgatgccattcatatttgacacggtaacttattatttatcatgcagatttaccatatggagccacttaatgctccaactgatttgtttgaattgtaattatgagttatgatagtttaaacttacgattagtttggttcagaaatggtgtattattccttgatctggcaggtctgggacttgattaaattggcagattatctaacacacagagaggatgtagacccttttaggataggaatcactggaatatcacttggaggaatgcatgcatgtgttgctgcagttggtgatacttgctatgct

SEQ ID NO: 43823 - DNA, 348 bp, Glycine max
  unsure at all n locations
  Clone ID: LIB3139-066-P1-N1-D7
tacattttaaacggcactgtagcgtgtcatctccatggtggattagcgaagcctggctccctaccatggtctacacgaatgaaaattgccgtagagactgctagtgcattggcttatctccacgcctctgacatcattcaccgtgacgtgaaaacaaacaatattcttctcgacaacaacttttgtgttaaggtagcagattttggactttcaagagacgtccccaacgatgtcacacatgtctncacagctccacaaggctccccaggttaccttgaccctgaatattacaattgctatcagcttactagtaagagtgatgggtatagttttggggttgggcttatt

SEQ ID NO: 43824 - DNA, 311 bp, Glycine max
  Clone ID: LIB3139-066-P1-N1-D8
gtttagctcagagagagagagagagagagagagagacatcgctttataaaggcaaagagagtcaacagtgacagtttggcattgaaattctaagctttttcagatagggtcatactcgccaacagtaacacccacctacttgtcagcaacactcactcgtttactaaattccccaaatctaccttacccatccagatcataacccgaatagtccctatccccttccttaatttcccacattcctcattcaattgattcctttcaccaccacaccaacaccaaaacactaacctttattttatttttccccc

SEQ ID NO: 43825 - DNA, 267 bp, Glycine max
  Clone ID: LIB3139-066-P1-N1-D9
ggaagagtgcgagcatcgaaacgcgaacccctccaacgacgcttccgacggcttcggaaccgccagcgacaccgatctcgccagtgacggcgacgacggtggagccggcagcccggaagaacagaatcacatcgaacagagtcataccgaacagaatcacaccgaacagagtcacaccgagaaacaccagcagcagcagcagacggagcaagagccggaacacgatgatcctcagagcaccgaatcatctgagaataatgcgttgat

SEQ ID NO: 43826 - DNA, 380 bp, Glycine max
  Clone ID: LIB3139-066-P1-N1-E10
ggtgaattttatcatggatactctgggagcgctggccctggcaactgaaccaccaactgatcacctcatggatcgaactccagtgggtcgaagagaacctctcataacaaatattatgtggaggaatttgctgatacaggcaatgtaccaagtgtctgtcttgcttgtactcaatttccgaggcataagcatactgggtctgagccatgacagaaaagaccatgcaatcaaagtgaagaatactttgatattcaatgcatttgttctctgtcaaatctttaatgaatttaatgctcgaaagccagatgaattcaacatattcaaaggagtcacaagaaactacctctttatgggtatcattggattaactggtgggcttt

SEQ ID NO: 43827 - DNA, 352 bp, Glycine max
  Clone ID: LIB3139-066-P1-N1-E11
gggcacttcccgaagtgttaagagaatgcctctttctatagggggaggagctggtgcaaagaatgctattctcatgaatatgccaaatgctgttctttcaatgtggagatattttgttggagatctcgtctttgaagtttctaagatgacttctccctacattaaatgtacagtctctttcttcatagcatttggaaatttggctgatgataccatcaattttgaggcttttccccacaagctggtgcagtttggagagattcaggaaaaagttgtattgaaattttcacaagaggaatttcttacagcttggtcaactcaagtgcgtcctgcaacaactctgttggctgat

SEQ ID NO: 43828 - DNA, 376 bp, Glycine max
  Clone ID: LIB3139-066-P1-N1-E12
gccattcatgtgatcagctgtggatatgaagataaaactgaatggggacttgagcttggttggatctatggatctatcacagaagacattctaacaggttttaagatgcattgccgcgggtggaggtccatttattgtatgccaaagagagctgcattcaagggtactgctcctatcaacttgtcagatcgtctcaaccaggttcttcgttgggcacttggttccattgagattttcttcagtcaccattgccctctgtggtatggcttcaaggaaaagaagctaaagtggcttgagagatttgcctatgcaaacacgactgtttatccattcacctccattcctctagttgcctattggattctttcaacagttt

SEQ ID NO: 43829 - DNA, 291 bp, Glycine max
  unsure at all n locations
  Clone ID: LIB3139-066-P1-N1-E4
aagcaacacatgaacactctttttgaacattcatggatccagtgagcgtgtggngtaacacgcccttggcgacngtggatcccgagatccatgacctcatcgagaaggagaagcaccgccaatgccgcggcatcgagctcatcgccttcgagaacttcaccttcttcgcagtcatcgaggcccttgggagcgccctcaccaacaaatacttcgagggcatgcccggcaaccgctactacggcggcaacgaattcattgaccagatcgaaaacctgtgccggtcacgcgccc

SEQ ID NO: 43830 - DNA, 337 bp, Glycine max
  Clone ID: LIB3139-066-P1-N1-E5
ctattactcttgaagtcgaaagctccgacaccatcgacaacgtcaaggctaagattcaggacacggagggaatccccccagaccagcagaggctgatcttcgccgggaagcagctcgaggacggacgcacccttgctgactacaacatccagaaggagtcaactctccacttggtgttgcgtcttcgtggtggtatgcagattttcgtgaagactcttacgggtaagactattaccctcgaggtggagagctctgacaccattgacaatgtgaaggccaagattcaagacaaggaaggcatcccaccggaccagcataggctgatttttgctggcaa

SEQ ID NO: 43831 - DNA, 366 bp, Glycine max
  Clone ID: LIB3139-066-P1-N1-E6
gccgtgagaaacgaaaagcgaacaaaaaaaaaacagagtggggtgggaggcacacgcacaaacgcagagtcagaatctccaatcttcaatcggagacaaagctagctcgaacgaacgaagtagagtagtgtgctacgaaaaatgtggcggtgcatcgcacgtggtctccgtggacctgcttccaccagatccacctccaatcactcacttggatctcaactttctagattcttctctagtggggcgaactcctcgtacaccgtggtggatcatacttatgatgctgttgtcgtaggagctggtggcgcgggattgagagctgctattggactttcagaacacgggttcaatactgcttgtattacc

SEQ ID NO: 43832 - DNA, 219 bp, Glycine max
  Clone ID: LIB3139-066-P1-N1-E9
tacaataccaggtgattttgtcattggtgttaagttgacaaccataaacaatatgtgtgcatatgggctcaatcctggtatttcaggttctcgtattttgggcaccattccttagttcatttcacagcaaactgtttggaatcaaatggcaacagtgagaacaccattctattttgattctagcaagcagagctttttgtcaatttttcttttgaccct

SEQ ID NO: 43833 - DNA, 165 bp, Glycine max
  unsure at all n locations
  Clone ID: LIB3139-066-P1-N1-F1
cagagcctctgtttccgacacaaatcaatctttctgatcatatattattcttttgtttttgtaatgtattctccatacaaatgcagacaataagttcgaacaagttcaggagcggcatggattttttcaccgcgcgaagcngtgcgcctccgcagncaccacgac

SEQ ID NO: 43834 - DNA, 343 bp, Glycine max
  Clone ID: LIB3139-066-P1-N1-F12
ccctgaagaaagacacagccattgtttgtttactttccattgattgagcgaaagctttgttttttctgcgatcattttccattgggtggaagaaagtctcaacctttagtcgaaagagcaaggatctgagtgagtgagcgatcatgtgtggtggtgcgattatctccgacttcattccagcgggtcccgccggcggggcgcagcgcgtgaccgacgacatcctgtggccgaatttgaggaagcggatctcgaagtcgctgctggacgatgatttcgaggcagggttcagagaattcggggatgactcggaaatcgaagattgtcatgattaggacgatgaaaa

SEQ ID NO: 43835 - DNA, 297 bp, Glycine max
  unsure at all n locations
  Clone ID: LIB3139-066-P1-N1-F2
gagatttacaactatgaagagctcatgaaacagctgtctaatcacaagttacgtactggatgtgattgtgatgttattgcacacctgtacgaggaacatggagaagactttgtggacatgctggatggtatcttctcatttgttctactggacacccgtgacaacagttttatagtggctcgggatgctattggggtcacttncttgtacattggatggggattagatggctctgtttggatttcatcagaaatgaaaggcctgaatgatgattgtgaacactttgagtggttttca

SEQ ID NO: 43836 - DNA, 110 bp, Glycine max
  Clone ID: LIB3139-066-P1-N1-F4
gttctaattttattaatcctatgctgacgcgacttgttgagaactgtaagagtcttcaaatatctggttgatgagtgtccttttgcatttgtgaactagtatgtagtatt

SEQ ID NO: 43837 - DNA, 389 bp, Glycine max
  Clone ID: LIB3139-066-P1-N1-F5
aaaagaatcagattagagaaggtttcaattcccttcttgagcaacactggagtgcaactgaagaatctacacaagttctactttttcatgtgcaatgtgaatgaagcattcaaaaatatgcaccattcaagtttcaaaagtgttcccaaatttggaggagatgaacattgactactgtgatatggtggaattgccaattgggctctctgatattgattccctaaagaagctaagtatcacaaactgtcacaaactttctgcacttcctgaaggaattgggaagttgggcaatctggaatcactaaggcttacttcatgtactaaattagaagagttaccagaatcaatcacaagtcttagtgaactgaactttcttgacatctttgact

SEQ ID NO: 43838 - DNA, 204 bp, Glycine max
  Clone ID: LIB3139-066-P1-N1-F9
ttcaaaaatatgccactcccatgatgcccctagatgaagaaattctttctaaggttgcacaagatatggttgaggaatggtttgattgtgttgatgaggaggatttaatttaggaaaatttttttttttgtaagacttaatggtgaaaaaactgctggtgacaagataaattctactatagtttataagtttgctataattatg

SEQ ID NO: 43839 - DNA, 356 bp, Glycine max
  unsure at all n locations
  Clone ID: LIB3139-066-P1-N1-G1
gaaagctggaaattcggttggtgcaaattttggtttaaccacaagaaaaatcttgttttgccagaaaaggaaaagatggaagtgattagaaatagaggcattcctgctgatgttcttgcaaagcgagctcatgaatttgaaaaacatgttgctcatgaaagcctcaaggatcaaattcctgctgttgacaagntgtattctactaaggttaatacgtttgcaaaaattatgaaccttagacaaagtgttgttggtgatcttaaacttcttactgatgggaagttgtatgagggtaagcatattcctgtatctaatattagtgcaggggaaaatcatgtaggtcaaatacccttaat

SEQ ID NO: 43840 - DNA, 323 bp, Glycine max
  unsure at all n locations
  Clone ID: LIB3139-066-P1-N1-G10
ctgatggacagcctcttctagcttcgggaggttcatctggtgttataagcatatggaatctggaaaagaaaaggctccaatcagttgtaagagaggctcatgatagtgtgatcacatccctacatttttttgctaatgaaccagtgctaatgagttcatcagcagacaactcgattaaaatgtggatttttgatacaagtgatggtgatcctcgccttttgcgcttccgaagtgggcatagtgctcctcccctttgcataaagntttatgccaatggaagacatattctttctgcaagtcaagatcgtgcctttcgccttttc

SEQ ID NO: 43841 - DNA, 292 bp, Glycine max
  Clone ID: LIB3139-066-P1-N1-G2
ggaatttgggttggtggttttatgtttcaccagagaggccaaagttgcaaggaaacctaagcattttaaatggaaccgaagttggtttaatacaagctagagctgcaattagtgaagcaggaaacggaaatcaaacacaggccaaagactatgtgccagttggacctatgtacaacaatgctaatgcatttacaggaggtacttagaaatggagaacagttcaaagatttgttacgaagatggaacctcagtttcacatggcctgcaaacattactcatgggggaattatca

SEQ ID NO: 43842 - DNA, 290 bp, Glycine max
  Clone ID: LIB3139-066-P1-N1-G5
atgagatgctcattagatatagctatgaaaaattactgcgccaggcaaaagctccaagtatgtttttacaatccttcaaaaattttgtttctttgtgtgtgtatggcgatgataacttaattagtgttcatgaatatgtcaagccttactttagtggttctaaattgaaaagctttctagctggtcataatatcaccattactgatggtattgacaaaactagtgcaactttgcaatttagaaagttagcagattgtgattttctcaagagaaactttaagcagatgtct

SEQ ID NO: 43843 - DNA, 290 bp, Glycine max
  Clone ID: LIB3139-066-P1-N1-G9
attttccttcactttctcgctccccaaacgcccctggctctcctccaatggccgacgagctcaccgacgaccagatcgccgagttcaaggaggccttcagcctcttcgacaaggacggcgatggttgcattactaccaaggaacttgggactgttatgaggtcacttggtcaaaacccaactgaggcagaactgcaggatatgataaacgagggtgatgctgatggcaacggaaccatcgatttcccagagttcctcaacctgattgctcgcaagatgaaagacaccgac

SEQ ID NO: 43844 - DNA, 360 bp, Glycine max
  Clone ID: LIB3139-066-P1-N1-H10
ctgggcttgtggcatgggccttaggttgggacttcaggctctatggccctctgtacgacgggaatagttacctctggaattacatattatgcccaaggattgatattgcaaaccagaggcccagtatttttaactgccttcaatcccctttgcatggtcataacttctgctttaggctccttcctttttgcagagcagcttcatctgggaagtatcattggagctgtcattatcgcattgggtctgtactctgtggtatggggcaaaggcaaagactattcaaacccaacgccgtcatcacctacaacaaagcacacagagacaccacagcttgcaattacctcatctgatatctaacac

SEQ ID NO: 43845 - DNA, 292 bp, Glycine max
  unsure at all n locations
  Clone ID: LIB3139-066-P1-N1-H4
gactactcttacattcctttctacaccacacattcaattgtgaacctctgggcgtggctcgcttcaacctttaacattaacatggccattccctacccccatttcatcgccaccgagaaagccgccatggacgccgggctactccacccctnctccccctgcgtcatcctcacccaagacgatttgaagaaaatcgccgcctacaaggccgtcgagtacgtggagtccggcatggtcctcggcctaggcaccggctccaccgncaagcatgccgtcgaccgcatcggcgagc

SEQ ID NO: 43846 - DNA, 386 bp, Glycine max
  Clone ID: LIB3139-066-P1-N1-H5
gaatttgaaaaacatgttgctcatgaaagcctcaaggatcagattcctgctgttgacaagttgtattctactaaggttaataaatttgcaaaaattatgaaccttagacaaagtgttgttggtgatcttaaacttcttactgatgggaagttgtatgagggtaagcatattcctgtatctaatattagtgcaggggaaaatcatgtagttcaaatacccttaatggcacaggaggaaattctgtcttctagtgcaagtgatttcagagctgcaatggtgagtaaaaatagcaagcctcaagctactgcaatgcatgtgggagctatagaaattatcattgatagtttcgcaagtcctgattgcaacatagttggtgcaatgctttt

SEQ ID NO: 43847 - DNA, 400 bp, Glycine max
  Clone ID: LIB3139-067-P1-N1-A1
aaaacgtgttatctgaccaaactttggaacatcacgcttctcactcctcttaggtttcagttgtgacaacctctaagtgacaagagtggaacattcattcttttagtggcaatttggctatatatattaagttctgggctgtgagtatattagaacaaatgtccttccgcagcatagttcgtgatgtaagggatggctttggaagcctatcaaggagaagttttgaggtaaggcttcctggccataacaggggcaagtcacgcagttcggtccacgagttgcaggatcagccaccggttatacagaacagccggtgggctagccttcctccggagcttcttcgtgatgttattaatagattggaagcaagcgagagtacatggcctggtcgtaagcatgt

SEQ ID NO: 43848 - DNA, 410 bp, Glycine max
  Clone ID: LIB3139-067-P1-N1-A10
gttggatcagattttacgccaaagatggcaatagatgaccccttaaccagagcaacttttcagcctgctcttgggaatgggcatgctcgtaacccgctttccaaattggatgaatgcattgaggaggaagaggaggaagctgagggagaatctccaaagggatttgttacttcttccactgaagaaaaaatcccatctgtttcagaactttccgtgtcactgaaaaataccatgttagatgggaaaaaccagaatcagcagaaatatggaggaaaggtggataatggccattttgcaaatacatcatctggtcataagagtgccaatgagcagcttcctccaagcataagctttgtggatgtgacagaaatgaccgaggatgaatggtcaaaattttctggagaagtttc

SEQ ID NO: 43849 - DNA, 323 bp, Glycine max
  Clone ID: LIB3139-067-P1-N1-A11
ccgaagtgttaagagaatgcctctttctatagggggaggagctggtgcaaagaatgctattctcatgaatatgccaaatgctgttctttcaatgtggagatattttgttggagatctcgtctttgaagtttctaagatgacttctccctacattaaatgtacagtctctttcttcatagcatttggaaatttggctgatgacaccatcaattttgaggcttttccccacaagctggtgcagtttggagagattcaggaaaaagttgtattgaaattttcacaagaggaatttcttacagcttggtcaactcaggtgcgtcctg

SEQ ID NO: 43850 - DNA, 402 bp, Glycine max
  unsure at all n locations
  Clone ID: LIB3139-067-P1-N1-A12
gtgagctataagctagtttatcgtgaggagaatatgaagttgtttgttttctttgttgctgcagtagttttggtagcatggccatgccatggcgcaggctaccaaaggttccctctccgaatgaaaactggctatggtgagcgttcttcggaggtaaaatgcgcaagttttaggcttgctgtggaagcacacaacatccgagcctttaaaaccattcctgaagagtgcgttgaaccaacaaaggactacattaatggcgaacaatttagatcagactctaaaacagttaaccaacaagctttcttttatgctagtgaacgcgaagtccatcacaacgacatatntatattcggcatagataacaccgtactctctaatatcccatactatgaaaaacatgga

SEQ ID NO: 43851 - DNA, 414 bp, Glycine max
  Clone ID: LIB3139-067-P1-N1-A3
gaagtttttaaattttgtgaggttcattatgaagaaaagggacaagcttagttgtcaagttggaatcaacccatactccatggaatggactggtttggccaatagattactgagtaagggcaacgatattctgtgttgcgattatactagttttgatggtttgattaccaagcaagttatgagcaagatggcagaaatgataaacagtctttgtggtggtgatgaaaaattgatgcgtgaaaggacacacctgctgttggcttgttgttcaaggatggcaatttgtaagaaagatgtttggagagttgaatgtggaatcccttctggatttccgctcacagttatttgcaatagcatttttaatgagatgctcattagatatagctatgaaaaattactgcgccaggctaaagc

SEQ ID NO: 43852 - DNA, 415 bp, Glycine max
  Clone ID: LIB3139-067-P1-N1-A4
gtgctatgaatagttcttttagggggcgcgccagttctgatatttacaccatctgctctcaagactgtgaattgtggaatcctgcttgcacaaaagcaatgactatgtcatttaatccaaacccgtgttctgatgcatggagtttggaatttttgaagcgtaccggatttcattgtgatatcatttgtgtcactgggtggactgccaccccaatgcaggatgttcaggttacaattgattggtttatttcctctcaggaatgtgttcccagaacctattgtgttttaaatccacaaaatccttttgtgttaaataggtgatgggaaaactgactttcccccagggcacttcccgaagtgttaagagaatgcctctttctatagggggaggagctggtgcaaagaatgctattctc

SEQ ID NO: 43853 - DNA, 415 bp, Glycine max
  Clone ID: LIB3139-067-P1-N1-A6
cttattaagggttcaatagatatgcttccctaccagtaaaaatcagatgactctcaaaggcttggtatcacttgtcatcaatttaattggcctagctgagggaacaaggaacaatgatgccccccctttaccttgttacatgctatctagccatatacaaaataacaagcaacaatcatctgaatcagcatcagcatccaattttaatgaggatagttggtgttgtgtgtgcttgtcaaggttaaaggccaaagatgaaatccgtgtccttccttgctcgcacaaattccataagatttgtgtaaataaatggcttaaggggtcgccacaagacgtgtccactttgccgtttctcaatggggagccgaggagaagtctcatcgtgccgaaatgttcactgaagagatgttaatat

SEQ ID NO: 43854 - DNA, 138 bp, Glycine max
  Clone ID: LIB3139-067-P1-N1-A7
gcaagtagtagctcttgacccttctttccaccttttctggtccctccctccagaaatggcttctaattccattcttcttctttgtatctttcttggggttgccactaaagttttttcctatgatgaagatctcaagac

SEQ ID NO: 43855 - DNA, 147 bp, Glycine max
  Clone ID: LIB3139-067-P1-N1-A8
gattggtcccattgattccgaagagaaaagaaaagatgtttgagccacaacagctatacactcgcgcgaagaccgaggaattcgacctcgaatcaggagaaaccctttacccaaggctgagcgtcggcgagaaccagctccgatggg

SEQ ID NO: 43856 - DNA, 407 bp, Glycine max
  Clone ID: LIB3139-067-P1-N1-A9
cttaattctgattttggttaggactcgtcgggaacgacgctcatggatctgataacggcggaccctactccggcgccgtcgtcttcgtcgactgcggctgcatcttcggcgccgacggcaccggcatctctgccctcggcgttaggtaagcctccggcggagaagaaatcgaagagagccgcgctgatgcagatccagaacgataccatttctgctgccaaagctgctttgcatccagttaggaccaatatcatgccgcaaaggcaaaagaaaaaaccagtttcctattcacaactcgctagaagtattcacgagctagctgccacttctgatcagaaaagttctcaacggcaattagtgcatcatgtgtttccaaagcttgcagtgtataattctgtggacccttc

SEQ ID NO: 43857 - DNA, 419 bp, Glycine max
  unsure at all n locations
  Clone ID: LIB3139-067-P1-N1-B1
taacccttcacagggtttaaagcacagatttttctctccaaagccaaaaaacctttctgggtcttctctttcctccaatgggttcccaaaactctcaccaagacccaacaatgtctttgcccaaagggaccaaaacanaaacttgttcttgtgcagggctgaggctgctgcagcctcctttggggaaccagaaagtgagaaacaaaagtttttgggtattgaagttgccaccttgaagaagattgtgcctctggggatgatgttcttttgcatcctcttcaactatacaatcttaagggacacaaaagatgtgttggttgtgacggccagaggaagcagtgctgagattataccgtttctcaaaacctgggtgaaccttcccatggccattgggttcatgttattgtacacaaagttgg

SEQ ID NO: 43858 - DNA, 413 bp, Glycine max
  Clone ID: LIB3139-067-P1-N1-B10
ctaaattgaaaagctttctagctagtcataacatcaccattactgatggtattgacaaaactagtgcaactttgcaatttagaaagttagcagattgtgattttctcaagagaaactttaagcagatgtctaatgttttgtgggtggctcgtgaggacaaggcgagtttatggtcacaacttcattatgtttcgtgtaataatctggaaatgcaagaagcttatcttgtcaatctcgtaaatgtgttacgagaattggattttgcacagtccagaggaagctcgccaattgagaaggaaagctctctctcgtattgaatggctgcaaaaagctgatgtgcctaccatagcacagattgaagagttccattcgatgcagaggatgatgaatgctcctgattcaaatgataatat

SEQ ID NO: 43859 - DNA, 411 bp, Glycine max
  Clone ID: LIB3139-067-P1-N1-B11
agctaacacacttaaaacgaccaataatggcgtttgctcacgacttggagttggaatcctcttcttcccctctggtgttctcagtacggaggagtgaaccggagctggtggctccggccaagcccactccccgcgaaattaagatcctatctgagatagattctcaggcgggtcttcgtacccaaattccaatcatacagttctaccgtaacgacccatcattggcaggcaaggacccagttcaagccattcgaaacgctcttgcggaagcacttgttttctactacccgtttgcgggtagaattaaggaagaaggttcggatggaaaactcgtggtggattgtaacgaagagggtgtcatgttcatcggggctgatgctgatgtcacacttgatcagttcggtgatgctc

SEQ ID NO: 43860 - DNA, 402 bp, Glycine max
  Clone ID: LIB3139-067-P1-N1-B12
acgagaactactccctaggaaaatcactcaccaacgacaacattgttagtttagcatccaagggtgcctcgaaagacgccatcaacgttgttctcacatcctcggacgtaaccgttgaaggattctgttccagtaggtgcgggacccatggctcctcggtgggtcctcgcaagttcgcttacgtgtgggtggggaactcggagacgcagtgcccgggccaatgcgcgtggcccttccagcagcccatttacggcccacagaacccgcccttggtcgcgcccaacaacgacgtgggcctcgacggaatggtcatcaacgtggctaccctattggctgggaccgttaccaaccctttcgggaatggctacttccaaggacccaaagaggctccgctcgaagccg

SEQ ID NO: 43861 - DNA, 417 bp, Glycine max
  Clone ID: LIB3139-067-P1-N1-B2
ccaattgaaattttaaaaatgactgggataaacttaagaattcaattattgaaattgaataagtaaacaatttaattggattggtcgaatggtatcaaaaaaatggagtactaactcccatttcttatttattattgaattaaccgatcaacttgctttgttatcgaacatttctttttgatttcaaaaattttccggaaaaaatttgaatctatttttatatgcgaatcaatcctactacttctggtcctgaggtttctgcgcttgaaaaaaaaaatctgggacgtatcgcccaaataattggtccggtactagatgtagcttttcccccaggtaagatgcctaatatttacaacgctctgatagttaagggtcgagatactgttggtcaacaaattaatgtgacttgtgaagtac

SEQ ID NO: 43862 - DNA, 379 bp, Glycine max
  Clone ID: LIB3139-067-P1-N1-B3
cttatcactccaaatgcactttcatacaaatcagcaatgagagagaatctgttgaggcagggatacagaattgttggaatcattggagaccaatggagcgatctgcttggagaccacagaggcgaaagcaggacctttaagcttcctaatcccatgtactacattgagtagtaccttcacctctctcaacaatctagctagagtttgctcctatctatatgtaataaggtatgctgatatgcactattcaaataggagcattagctatgtttgttaatgtcactttatgttatgtgggtaagtcacctaagacactccacgtacctacttgttgtctcttacgcggctttaataaatcttctgcccttgttccatattt

SEQ ID NO: 43863 - DNA, 375 bp, Glycine max
  Clone ID: LIB3139-067-P1-N1-B4
ctcaagcctaatcggctactttcttacccaacatcactcaaagagcgggtgcaattccaagtttccagtttaacaccctatttcgagcacatcccaatcctccttcccagctaccaaccctgattaactcattcccatagcctcagaagagcccactgccacattggaacccgatttcacacctcccaacagtctagctacacactgctgagatctatatgccataacctgtagccaacgctcagaaaaccaaagtacccattccttataagggttactgaccactcaaccctcccacttatactgactacaaagagttgattaacgacccaattacctttttccacggagaaaaccagttcgagccaacacgcg

SEQ ID NO: 43864 - DNA, 414 bp, Glycine max
  Clone ID: LIB3139-067-P1-N1-B5
cggctcgagttcctgttttgaagaaaaagggacctgggaggatgcagtatgcagctgctactttgatgcggggttcatatgatagtgctggaattggcagtaatggttctggtgtcacatcagaacaggtgaacaatctagtctctaatttaaatatgttggaacaagttggaagctctgaaatgaatcgcatattcactcggagccagaagttgaacagtgaggccataatagattttgttaaggctctatgcaagggcttccatggaggaattgaggtctccatctgatccacgtgttttcagccttacaaagattgttgagattgcgcactataatatgaaccgcatcaggcttgtgtggtcaagcatctggcatgttctctctgatttttttgtaactattggctgttcg

SEQ ID NO: 43865 - DNA, 414 bp, Glycine max
  Clone ID: LIB3139-067-P1-N1-B6
tttttaatgagatgctcattagatatagctatgaaaaattactgcgccaggctaaagctccaagtatgtttttacaatccttcaaaaattttgtttctttgtgtgtgtatggtgatgataacttaattagtgttcatgaatatgtcaagccttactttagtggttctaaattgaaaagctttctagctggtcataatatcaccattactgatggtattgacaaaactagtgcaactttgcaatttagaaagttagcagattgtgattttctcaagagaaactttaagcagatgtctaatgttttgtgggtggctcctgaagacaaggcgagtttatggtcacaacttcattatgtttcgtgtaataatctggaaatgcaagaagcttatcttgtcaatctcgtaaatgtgttac

SEQ ID NO: 43866 - DNA, 391 bp, Glycine max
  Clone ID: LIB3139-067-P1-N1-B7
accaattgctaaagatatttcactcactggtcacactactaatacagctttctggagatggcttcaactgtctcttacatgcttctacttccccttctagtgatggttgcctttgctggggacttaaacaaagactttgacatcacatggggagatggccgctccaagatactaaaccatggagagttactcactctttcattggacaaagcatctggctcaggttttcaatcaaagaatgagtatctctttgggaagattgacatgcagctcaagcttgtccctggaaactctgctggcaccgtcactgcctattatttatcttcaaaaggatcaacttgggatgaaatagactatgaatttcttggaaatctgagtggtgatccataca

SEQ ID NO: 43867 - DNA, 414 bp, Glycine max
  Clone ID: LIB3139-067-P1-N1-B8
gacctcaaagagcatgtgatcaagcctgtgatcccagagaagtaccttgatgagaagaccattttccacttgaacccttcaggccgttttgtcattggtggccctcatggcgatgctggtctcaccggccgcaagatcattatcgatacttatggaggatggggtgctcatggtggtggtgctttctccgggaaggaccctaccaaggttgataggagtggtgcttacattgtgagacaggctgctaagagcattgtggcaagtggacttgccagaaggtgcattgtgcaagtgtcttatgccattggtgtgcctgagcctttgtctgtgtttgttgacacctatggcactgggaagatccatgataaggagattctcaacattgtgaaggaaaactttgatttcaggcctggt

SEQ ID NO: 43868 - DNA, 387 bp, Glycine max
  Clone ID: LIB3139-067-P1-N1-C10
ttatcaccatataaattaggaggagcagctggtggaagtgattttgatccaaaaggaaaaagtgacaatgagattatgcgattttgccaaagtttcatgagtgaaatgtatcgctacctggggcctgacaaggaccttccgtcagaggaaatgggtgttggtactcgggaaatgggatatctttttggacagtataggcgtctcgcaggtcattttcagggaagttttacagggccaaggatattttggtctggctccagtcttcgacctgaagccactggctatgggctggttttctttgcccagctcatgcttgctgacatgaataaagaacttaaaggattaagatgtgttgtgagtggttctgggaagatcgcaatgcatgtc

SEQ ID NO: 43869 - DNA, 401 bp, Glycine max
  Clone ID: LIB3139-067-P1-N1-C11
caggaacgtcaaaggttcctttggagggttttaaggccttgcaaggcatctctggtccacaaaggtttcagattcacaaggcatatggagctcctgatcgacttccatcagctcatacttgcttcaatcaacttgaccttcctgagtatacctctaaggaacagcttcaagaacgtttgttacttgccatccatgaggctagtgaagggtttggttttggttgacctgtattttggtgcgatattttttttgcactgctgttccaccattggtgtctccaacttgtcatttggagaaggagtttgtgctgctattctgttgtgggcactattggtaagcatcccaatgagtcgatgaggcattctgatgttggtgatcaatttattctgatgttctcccag

SEQ ID NO: 43870 - DNA, 405 bp, Glycine max
  Clone ID: LIB3139-067-P1-N1-C12
gaaaaattgatgcgtgaaaggacgcacctgctgttggcttgttgttcaaggatggcaatttgtaagaaagatgtttggagagttgaatgtggaatcccttctggatttccgctcacagttatttgcaatagcatttttaatgagatgctcattagatatagctatgaaaaattactgcgccaggctaaagctccaagtatgtttttacaatccttcaaaaattttgtttctttgtgtgtgtatggtgatgataacttaattagtgttcatgaatatgtcaagccttactttagtggttctaaattgaaaagctttctagctagtcataacatcaccattactgatggtattgacaaaactagtgcaactttgcaatttagaaagttagcagattgtgattttctc

SEQ ID NO: 43871 - DNA, 368 bp, Glycine max
  unsure at all n locations
  Clone ID: LIB3139-067-P1-N1-C2
ggggctacccgctgagtttaagcagggttccccacccactattccaggtggtgctacactcatatttgacgctgagcttgtgggagtgaacgacaaaagtttaggcgaaggaaaaggaaacaacgaactgtagacaaatcaaaacaaatggatagtcgagcttttgctatcttagcttatttttgttcctcaataatatgcttttatgacccaaggtttaactgttttactatgaggctaatttagaaagatttatctggtgtaaaaaaaagaaaaaaataaaataaatgntgaggaagaaaagaaatagaaaaaaaaaaaaaaaaataattttaaaaaaaaaaaaaaaaaaaaaaaagggggcggcc

SEQ ID NO: 43872 - DNA, 137 bp, Glycine max
  Clone ID: LIB3139-067-P1-N1-C3
aatatatatcatttaaattctaccttgagtatcatgcttatacatcatcttcctagctgttgagtagtgtgcagtaggtttagaatggccagtcaatgctcctaaatgtttgcaggcaaaagtagtcgttttagcat

SEQ ID NO: 43873 - DNA, 168 bp, Glycine max
  Clone ID: LIB3139-067-P1-N1-C4
gcggaatcctctgcatgatctggaatttgtgttttctttcgcttgttcgtttgtttaattcaataaaggagattaggcatgaccctcttgttgagtatgctctgcctatttgaaaatttccacacctcttttaattgtcgtaatgatgtgtgaagtgtgtgttatttt

SEQ ID NO: 43874 - DNA, 409 bp, Glycine max
  Clone ID: LIB3139-067-P1-N1-C7
gcacgaagaatgagagaataaaaaggattgagcatcttccttgtcacttaactatcttatggcaaatctggcaaatgctaatgatttcaggcttgtggactggctactttttgtatatgtacttagaattcaatgtgttgtttatatgcttatatttgatgtactagacttcatatggctgagctagatagtgacaagctacatactattgactttatttctctgatgatgtgaacagactaatataatgtctaggtgtttttgccgcagttttggttttattgttaagattttgttcttacgcagtcattttagttggaccacaggaagtactatagccattttgttcttatgcattgaatgcttataactcaatgtattgtttttctttaactttttttggggggca

SEQ ID NO: 43875 - DNA, 412 bp, Glycine max
  Clone ID: LIB3139-067-P1-N1-C8
cacaggttgccgcaccttaaaaccggaaacaaaagcaatcgttacttgatttcaagaatttctcaatttcttcctacttctttgtgtacgatttcttaagggaaagaaaatcactctctgtgctggtcacagacttcgtgaatcattttcttttccactcctagtttatttgctgaacactctcctatttgatataggacttcgtgtcagatttaaactttttctgtttctttctcagttctctgtttaatttcaagttcaagctggtgaaattttggatttagtgctcccactctcctatctggtataggacttcgtgggtagacttttctacttctctcctttctttcactctctttttctcactgatccgcattgccgttcaaagtggtcttatttgaaaaacacttgg

SEQ ID NO: 43876 - DNA, 410 bp, Glycine max
  Clone ID: LIB3139-067-P1-N1-C9
ctcgagccgcgcgatcacaggttgccgcaccttaaaaccggaaacaaaagcaatcgttacttgatttcaagaatttctcaatttcttcctacttctttgtgtacgatttcttaagggaaagaaaatcactctctgtgctggtcacagacttcgtgaatcattttcttttccactcctagtttatttgctgaacactctcctatttgatataggacttcgtgtcagatttaaactttttctgtttctttctcagttctctgtttaatttcaagttcaagctggtgaaattttggattagtgctcccactctcctatctggtataggacttcgtgggtagacttttctacttctctcctttctttcactctcttcttctcactgatccgcattgccgttcaaagtggtctta

SEQ ID NO: 43877 - DNA, 410 bp, Glycine max
  Clone ID: LIB3139-067-P1-N1-D1
ctcagatggaaacaaatttgtttaaattgtctcttgatgatgttgaaactcctaaaggttccatgttggatcttaaaatttctcaatctaaaattgcacttcccaaaaacacagttggaggaactattctgcgtagtgatctattggcaaattttttgacagagggcaattttagagcaagtgttgatttgcagcgcactcatcgtattaaaggaatgattaaaatggtggccacagttggtattcctgagaatacaggcatagcattggcctgtgctatgaatagttcttttagggggcgtgccagttctgatatttacaccatctgctctcaagactgtgaattatggaatcctgcttgcacaaaagcaatgaccatgtcatttaatccaaacccgtgttctgatgca

SEQ ID NO: 43878 - DNA, 398 bp, Glycine max
  Clone ID: LIB3139-067-P1-N1-D11
cagaaagctctaagtggaaaaactaatgccgttgatggtgccagaagggttagagtacgcgagcgaggtttggccattccaggccctgaagccaatgtagagatccaaaataacgtagataggtggagagttgtgacccatgcaaatgcaaaaagtaagagtgagaaatttccacctcctgatcaggatggagctgttggatatccgctggatgattcaaacaaaagagctggttcatttggagccactgaaacttgctctgcctctaccatatttgattcaaaatcttggggatcggttacaagtcatgatgctgcaagagacaaagggaggaaaactagtaaagcagattcccagatggcatcatcttggaaatttatgcgttcattcaagctatc

SEQ ID NO: 43879 - DNA, 413 bp, Glycine max
  Clone ID: LIB3139-067-P1-N1-D12
gatgtcttacgttgctcataacgttaatcagccccaagagaaagatttgttagagggaaatttttcctttgatattaaatctcgctctagattggaaaaagtttcctctacaaaagcacaatttgttagtggaaaaaccttcaaatatgatataattggtgctggttcacattcttcaggagattttcctgaaaaggaagatcaagaaaaacccaaaaagattgataccagattgagacaaagaatagatcctcaatacaatgaggttcaggctcagatggaaacaaatttgtttaaattgtctcttgatgatgttgaaactcctaaaggttctatgttggatcttaaaatttctcaatctaaaattgcacttcccaagaacacagttggaggaaccattctgcgtagtgatc

SEQ ID NO: 43880 - DNA, 417 bp, Glycine max
  Clone ID: LIB3139-067-P1-N1-D2
aaacatgtgtgcttacatggcaccttctttggatgctaggcaagacatggtggtggtagaggtaccaaagctagggaaagaggctgcagtaaaggccataaaggagtggggccagccaaagtcaaagattacccacttgatcttctgcaccactagcggtgtggacatgcctggtgctgattaccaactcaccaaacaattgggccttcgcccttatgtgaagaggtacatgatgtaccaacaaggttgctttgcaggtggcacggttcttcgtttggccaaggatttggctgagaacaacaagggtgcacgtgtgcttgttgtctgctctgagatcactgcagtcacattccgtgggccaagtgacactcaccttgatagtcttgtgggccaagcattgtttggagatggagctgc

SEQ ID NO: 43881 - DNA, 416 bp, Glycine max
  Clone ID: LIB3139-067-P1-N1-D3
caaaacgccacttgtcgattgtcgtttagatcccatggatcacacgcctgctgcgcaacgtcgtctcaaagccattcacgcccacctcaccgctaccgccaccgccgatgactctccctcccacctcgaatccaacaccaccgccggcgagttcttctccgaacaagggtatagtgttgtactcccagagaaattacaaacaggaaagtggaacgtttacagatctgtacgatctcctctgcagctggtgaccaagtttcctaatcatcctgaaattggtaccatgcatgataattttgtgcgttcagttgacacctttcgagactacaaatatctgggaacacgtgtccgtgttgatggaactgttggggagtacaaatggatgacatatggagaagcaggtacggcccggtcag

SEQ ID NO: 43882 - DNA, 417 bp, Glycine max
  Clone ID: LIB3139-067-P1-N1-D4
aggaaacagacagtggggagagaaataggttgatagtgttgatcattatcatcgcagttggaggttgcttattggcactatgttgctgcttctacattttcagcttactaagatggcgcagaaggatcaaagcggcagtgtcaggggagaagaaaaagagtccaagaacgagttccggaacaagccagagccgtagcagcaccgacacaaacggtccaaaactcgtcatgttcaacaccaagatcactctcgcggaaacaatcgaagcaacgaggcaatttgacgaagaaaacgtgctgagcagaacaagacacgggttggtattcaaagcctgctacaacgacggaatggtcttttccattcgcaagctccaagatgggtcattagacgaaaacatgttcagaaaagaagcagagt

SEQ ID NO: 43883 - DNA, 415 bp, Glycine max
  unsure at all n locations
  Clone ID: LIB3139-067-P1-N1-D5
ggaatcaaaggcgtaacccgtaacccaacccttccccttccctggaactccatcaccgcataaccacaccagtcccctgcaccctcaaacaccagatccttccccccaatcccaacgatgaacgatttcgacggcctcttcacctccgatttcggcctcaaaccccagggcaaatccgcgccaatggctcctcaacccaagggatcttccaactccgcatctctcaacttcgatttcggatcgcgatctgcccgcgcctcctccaacttcgacgatctnctcgccggcgccggatccgacaatcgccgctccgattcccccttcgatttggattccatgtacggcggcccccctgctaggtccgccaactcgccgncgacgacggtctacgacaagccggtgtacgacgacgaca

SEQ ID NO: 43884 - DNA, 416 bp, Glycine max
  Clone ID: LIB3139-067-P1-N1-D6
agaatccctccctttctggctttctctctctaaaactatcatgtcctccaccgcggctcccgtccttcccatatccaacccccaaaccaccgccgcaggcggcggcgccatcgaggctccggcgaacaacccggccttccgcgccttcatcaacaacctctccgcgtccctccgacacggcctcgaccagcgccgcccgtggtcggagctcggggaccgctccgcgttctcgaagcccgagtccttctccgaagccaccctccgcgtccgcaagaacttctcctacttccgcgtcaactactacgccgtcgtttcactcattctcgcagtctctctcctcaccaatcctttctctctcatcctcctcgtcggcctcctcgcctcctggaccttcctctacctcttccgtccgtcag

SEQ ID NO: 43885 - DNA, 412 bp, Glycine max
  Clone ID: LIB3139-067-P1-N1-D7
ctcgagccctggccaattgaatgctaagagtgatgtatacagctttggtgttgtccttctagaacttttgactggaaggaagcctgttgatcatacactaccacgtgggcagcagagcctggttacttgggctacaccaagactcagtgaggataaagtcagacagtgtgtagatgcaagactaggaggagagtacctgcccaaatctgttgctaagatggccgctgttgctgccctgtgcgtgcaatacgaagctgatttcagaccaaacatgagcatcgtagttaaagctcttcaacctttgttgaacgcaagacacgggcctgctggtgaaactccaaactaatctctgtctatatgtatcaacgagtatgtgcataagtctaagtctgcacccgagatataagaaagt

SEQ ID NO: 43886 - DNA, 336 bp, Glycine max
  Clone ID: LIB3139-067-P1-N1-D8
ctatagccctgcacaattgctctcttgcagataggattccggttctggccaatatcatcctgagcgggctacaattaattgtcctgttcatcatccactaattcacatgactgaaagaaattatgctagaacgccagatgtactcattgaatatgatgcatgtacaattgcaaatgattgactatcattggatgtcgccaacgatggaaatcacaaacaaatcgttggttttcatgttgctggacgcaacggaagactgtgatatgcttaattgataccatatgttgaacctgttgaacctgctcaaaacgctagacactactctgactttttaac

SEQ ID NO: 43887 - DNA, 378 bp, Glycine max
  Clone ID: LIB3139-067-P1-N1-D9
ggagtttcgttgccttccattggttttctctctcaatctgatcctgatgacagctcatgctgccatacctccagaagtttactgggaaaggatgcttccaaataccccaatgcccaaagcaatcatagactttctaaaccttgatcaacttcctctttggtatggtgctaaggaaacccaatctacagatcaaatattcctgtatgatgctaagaaaacccaatcaacagatcaagttcctcctatcttttatggtgataagaaaacccaatcaacagatgaagttcctcctatcttttatggtgctaagaaaactcaatcaatagatggagttcctcctatcttttatggtgctaagaaaacccaatcaacagatga

SEQ ID NO: 43888 - DNA, 417 bp, Glycine max
  Clone ID: LIB3139-067-P1-N1-E1
aaaaacgccgcagtctcttctctctcagaaaccctaatggcagagcgcggaggtggcgaacgtggcggcgaccgtggcggtttcggacgcggcttcggcgggcgagggcgcggaggcgacaggggccgcggccggcgtagaggtccccgccgcgaggaggaggagaagtgggtcccggtgactaagctgggacgcctggtgaaggaaggaagaatccgaagcctggagcagatctacctccactcgctgcccatcaaagagcaccagatcatcgacacgctggtgggccccaccctgaaggacgaggtgatgaagatcacgccggttcagaagcagacccgggccgggcagagaacccgtttcaaggccttcgtggtcgtcggcgacaacaacggccacgtgggtctaggcgtgaag

SEQ ID NO: 43889 - DNA, 401 bp, Glycine max
  Clone ID: LIB3139-067-P1-N1-E10
aaacgatccaaactctttttttcatttgcagcatcaaaatgagtggtagcaacgatggtagcggcagctggagctctaggtttttgaaggtggctagtgcagctgccgctacagccgccgttgccggcggtttatatgccattctttcatcctcaacctctgctagctctgagatggaagtgccgtttggcagcgcacggcgtgagagcaaagaacgtgacgatggtggctccgggtctcatcctcgcgagggtgccaccacggtcagtcgttggaagaaacctgagattggttgggtgaagctgaacgtggatggttcacgcgacccatacaaaagttcctccgctggttgtggtggtgttctgagggacgcatcagcaaagtggctccgtggctttgct

SEQ ID NO: 43890 - DNA, 408 bp, Glycine max
  Clone ID: LIB3139-067-P1-N1-E11
gtttggaatttctgaagcgtaccggatttcattgtgatatcatttgtgtcactggatggactgccaccccaatgcaggatgttcaggttacaattgattggtttatttcctctcaggaatgtgttcccaggacctattgtgttttaaatccacaaaatccttttgtgttaaataggtggatgggaaaactgactttccctcagggcacttcccgaagtgttaagagaatgcctctttctatagggggaggagctggtgcaaagaatgctattctcatgaatatgccaaatgctgttctttcaatgtggagatattttgttggagatctcgtctttgaagtttctaagatgacttctccctacattaaatgtacagtctctttcttcatagcatttggaaatttggctg

SEQ ID NO: 43891 - DNA, 403 bp, Glycine max
  Clone ID: LIB3139-067-P1-N1-E12
gtttgaaatttcttattcttaccggatttcattgtgatatgatgggtgtcactggatggactgccgagcccaatgcatgatgttcaggttacaattgattggtttatttcctctcaggaatgtgttcccaggacctattgtgttttaaatccacaaaatccttttgtgttaaataggtggatgggaaaactgactttccctcagggcacttcccgaagtgttaagagaatgcctctttctatacggggaggagctggtgcaaagaatgctattctcatgaatatgccaaatgctgttctttcaatgtggatatattttgttggagatctcgtctttgaagtttctaagatgacttctccctacattaaatgtacagtctctttcttcatagcatttggaaatt

SEQ ID NO: 43892 - DNA, 108 bp, Glycine max
  Clone ID: LIB3139-067-P1-N1-E2
agcgaaagaaaattaggcatgaccctcttgttgagtatgctctgcctatctgaaaatttccacacctcttttaattgtcgtaatgatgtgtgaagtgtgtgttatttt

SEQ ID NO: 43893 - DNA, 408 bp, Glycine max
  Clone ID: LIB3139-067-P1-N1-E3
gcttaatcgaactattcagattctaaaaaatgagttggtggtgggctggagcaatcggtgctgccaagaagaaattcgaggaagaggaaccgccgcgaagcttccagagcgtgggcctggtgatcggcgtgacgggcatcgtgggcaacagcctcgccgagatcctccctctcgccgacacccccgccggtccatggaaggtctacggcgtcgcacgccgcccccgtccgccgtggaacgccgaccatcctgtcgagtacatccagtgcgacgtctccgatcccgccgacgccgaagccaaactctccgccctaaccgacgtcactcacgtcttcttcgtgtcgtggaccaaccgctccaccgaagcagaaaactgcgaagttaacggcgctatgttacagaacgtgc

SEQ ID NO: 43894 - DNA, 409 bp, Glycine max
  Clone ID: LIB3139-067-P1-N1-E7
caatgatattctgtgttgcgattatgctagttttgatggtttgattaccaagcaagttatgagcaagatggcagaaatgataaacagtctttgtggtggtgatgaaaaattgatgcgtgaaaggacgcacctgctgttggcttgttgttcaaggatggcaatttgtaagaaagatgtttggagagttgaatgtggaatcccttctggatttccgctcacagttatttgcaatagcatttttaatgagatgctcattagatatagctatgaaaaattactgcgccaggctaaagctccaagtatgtttttacaatccttcaaaaattttgtttctttgtgtgtgtatggtgatgataacttaattagtgttcatgaatatgtcaagccttactttagtggttctaaattg

SEQ ID NO: 43895 - DNA, 410 bp, Glycine max
  Clone ID: LIB3139-067-P1-N1-E8
caataccaggtgattttgtcattggtgttaagttgacaaccataaacaatatgtgtgcatatgggctcaatcctggtatttcaggttctcgtcttttgggcaccattcctcagtctatttcacagcaaactgtttggaatcaaatggcaacagtgagaacaccattgaattttgattctagcaagcagagcttttgtcaattttctattgaccttctcggtggaggaattttagtggacaaaactggagattggatcacacttatacaaaattctccaattagtaacttgttgagagttgctgcttggaagaaaggctgtttaatggttaaaattgtgatgtctgggaatgcagcagtcaaaaggagtgattgggcctcattggtacaagtgtttttaacaaacagcaac

SEQ ID NO: 43896 - DNA, 412 bp, Glycine max
  Clone ID: LIB3139-067-P1-N1-E9
ggacaagcttgaggatgcagatgagaggctaggagctgacattgtgcaaaaggcactgatagctcctgcagcattgattgctcaaaatgctggaatagaaggtgaagttgttgtggagaaaataaagagtggtgaatgggaggtcggttacaatgccatggcagacaggtatgagaatttagtggaggctggagttatcgaccctgccaaggtaactaggtgtgctttgcagaatgctgcttcagttgctggaatggtgttgaccacgcaagccattgtggtggagaaacctaagcccaaggcacctgtagctggtgccccacaaggccttaccgtttgatttttaggctgtagggctacggcgaagaacagttttgtgcagaaaattgaaagtgcgtatgtgttcgaattc

SEQ ID NO: 43897 - DNA, 413 bp, Glycine max
  Clone ID: LIB3139-067-P1-N1-F1
gtggttgaaagttaagaagtagcaaagatgtttccattcgggcacaagggtcaaaagataaaggggactatggtggttatgcagaagaatgtgttggatatcaacagcatcaccagtgttgacgggatcgtcggcaccggcttagacttcttaggcagtgcactcgatacagttacttttttagcctcctccatctccatccaacttattagtgctaccaaggctgatggtgggaaaggaaaagttggaaaggctacaaatttgagaggaaagataacattaccaaccataggagctaaggaagaagcatacgatgctcaatttgattgggacagtgacttcggaattcccggtgcattttatattaagaacttcatgcaaaacgagttctacctcaagtctttaattctcga

SEQ ID NO: 43898 - DNA, 413 bp, Glycine max
  Clone ID: LIB3139-067-P1-N1-F10
aatccacaaaccattgggaaagaagatacatcaaactaattatctaccatgctttctgctattaattattcccttcttgcaaccattttcttagtgctaaccttaatttttccttcagaaggccaattgagttcaaccttctattctagcacatgctccaatgtgtcttctatagtgaggagtgctgttcagcaggctcttcaatctgattcacgaattggtgcaagcctctctcgcctccactttcatgattgctttgtcaatgggtgtgatgcgtccattttgttagaccaaggtggtaacatcacacaaagtgagaaaaatgctgctcccaacgtcaattccattcgaggctttgatgttgttgataacatcaagagctccctcgaaagttcatgccctggagttgtatc

SEQ ID NO: 43899 - DNA, 412 bp, Glycine max
  Clone ID: LIB3139-067-P1-N1-F11
ctcgagccgaatcggctcgagcgttgttgttctaaagcactcatccacacattctccgtcgccacgacaacaatggctccaaagaaaggtgcgaaaggtggagttgtagcagcaaagaagaaggttcaggagaaggtaacgaaccctttgttcgagaagcgtccgaagcagttcgggatcggaggcgcgctgccgccgaagcgggacctgacgcgcttcgtgaagtggccgaagaacgtccaaatccaacgcaagaagcgcatcctcaagcagaggctcaaggtccctccggctctcaaccagttcaccaaaaccctcgacaaaaatctcgcaacaaatctttttaaaatgctgctgaagtacaggccggaggacaaggcggagaagaaggagaggctgttgaagagggctc

SEQ ID NO: 43900 - DNA, 413 bp, Glycine max; identical to SEQ ID NO: 32060
  Clone ID: LIB3139-067-P1-N1-F12

SEQ ID NO: 43901 - DNA, 414 bp, Glycine max
  Clone ID: LIB3139-067-P1-N1-F2
tcctcttcctgctgcatcagcatcagagcacccgctagggtttcttctgcacacccaaccaaatggctgatcctgagttggaagcaatcagacagagaaggttgcaggagcttatggctggccatggtggcgtgggaaatcaacagaactctgaacaggagaaagctcaggatgatgcaaagagggaggctgaggaacggagacagatgatgcttagtcagatattgtctgctgaagcgcgagaaaggcttgctcgaatagctttggtgaaacctgagaaagcaaggggtgttgaagattttatattgagagctgctcagatgggtcagataactgaaaaggtttctgaggaaaggctcatatcactgctggaacagataaacaaccaaacaacaaggcagacaaaagttacaa

SEQ ID NO: 43902 - DNA, 406 bp, Glycine max
  Clone ID: LIB3139-067-P1-N1-F3
taaaatggtggccacagttggtattcctgagaatacaggtatagcattggcctgtgctatgaatagttcttttagggggcgcgccagttctgatatttacaccatctgctctcaagactgtgaattatggaatcctgcttgcacaaaagcaatgactatgtcatttaatccaaacccgtgttctgatgcatggagttcggaatttctgaagcgtaccggatttcattgtgatatcattcgtgtcactggatggactgccaccccaatgcaagatgttcaggctacaattgattggtttatttcctctcaagaatgtgttcccaggacctattgtgttttaaatccacaaaatccttttgtgttaaattggtggatgggaaaactgactttccctcagggcactttc

SEQ ID NO: 43903 - DNA, 317 bp, Glycine max
  Clone ID: LIB3139-067-P1-N1-F4
catgaataaaatctggtgttgtatgtgagaggcatgcacagacagcaaggcctgtctttcttaccactagagatatatttcaaaaacagaaataatgttgaataatacgattgtgccgttgtgacaaataaaaaaaaaaaaaaaaaaaaaaaaaaacaaaaaaaaaaaaaaaataactcaaaaattttaaaatgaaaaacaggaaaataattatgcttaattaattttatggctgaataaacaaaaagaaacgctagctacaaatagctccaacgaaactcttataaagcaacaaatagtaggggggggggggcttc

SEQ ID NO: 43904 - DNA, 416 bp, Glycine max
  Clone ID: LIB3139-067-P1-N1-F5
cgccactggatctggaattagtccaattcgatcgcttattgagtcaggatttgatgccgggaagaggtctgatgtgagactatattatggggccaggaaccttcagagaatggcttatcaggataggtttaaagactgggaatcttccggtgtgaagattgtgcctgtattgtctcaaccagatgagaattggacaggggaaagtggctatgttcaggccgcattttcaagagagaagcaaatatctgacccactgacaactggtgctgtactttgtgggcagaaacagatgaccgaggaagtgacatcaattcttgttgctgatggagtatccgctgataagatattgaagaacttctgaccaaaatggatttttgagcactgttgtatcattttttgatactccataattattt

SEQ ID NO: 43905 - DNA, 56 bp, Glycine max
  Clone ID: LIB3139-067-P1-N1-F6
tggagtttaatcttgtggtccgtcaaaagtttttaaattttgtgaggttcattatg

SEQ ID NO: 43906 - DNA, 410 bp, Glycine max
  Clone ID: LIB3139-067-P1-N1-F7
gtttgggagagagagtacacaattcaacaaatttagtggatgcatctgcgaacttggccagaggattaggttctcaggtctctccagatttggatagtaaactagatgagttccaacctgaatctgtgctgtctaatccagttaacattaattttgaacagaatcagggctctgttgctgttcagcagaccagaggtacacaagatggcggcgaaataactacttcaggactaagagatgggtcctcggatgatatgcacagggatggcggtctggttaaagtcaatggcatcagtgacacaaatgggcctggtcatcagctagattctgttgaagaaactagagaagcaataaattctagattacaagatagtaaccacttagtaatcaaagagaaggttagagcagaa

SEQ ID NO: 43907 - DNA, 413 bp, Glycine max
  Clone ID: LIB3139-067-P1-N1-F8
attcctttgaggaagtttctttaagtgcagcactcaatggtgttgagggtttggactatatggaaagaattcctcttgccacatctgagggttttcctcatgtgctttcacgtaaaaatggtgaaaaaggcaagaggagatttgtttctggggatggtgaagagatgacattgattccgggaaccagtgttgaagaggcttacaacaagctaatagttgaacttgagaaaagtgttcccacattggttggcattgaatgtcccaaggatgaaaaacttcctcgtcgcaaaatttttgacaaacctaagacgcgctgcttcactattctccctatggagtttaatcttgtggtccgtcagaagtttttaaattttgtgaggttcattatgaagaaaagggacaagcttagttgt

SEQ ID NO: 43908 - DNA, 410 bp, Glycine max
  Clone ID: LIB3139-067-P1-N1-F9
ctctcctatttgatataggacttcgtgtcagatttaaactttttctgtttctttctcagttctctgtttaatttcaagttcaagctggtgaaattttggattagtgctcccactctcctatctggtataggacttcgtgggtagacttttctacttctctcctttctttcactctcttcttctcactgatccgcattgccgttcaaagtggtcttatttgaaaaacacttgggcgttggtgcaaatgtttgcttcgttaattttctctggagacaacaggctcactgagaaaacaatttttacttgcagagatttggacatcttggttgtctattatacaatagcaactcaatttagaaaatttctaccgcattacattaggtggcatctgtataccttgttgatctaca

SEQ ID NO: 43909 - DNA, 417 bp, Glycine max
  Clone ID: LIB3139-067-P1-N1-G1
agaatatgcagttaatgttgttaaacacatttttgatcggcatgttgtgtttcaatacaactgcacaaacacgataccagagcaattattggaagatgttattgtaattgtggatgcatcggaagcagaagagttctctgaagtgttctcaaagcctctcagatctcttccttatgattcgcctgggcaaacatttgtgggttttgagaagcctgagggattgtcaattgctggaaaattttctaacgttctgaaatttattgttaaagaggttgacccaaccactggtgagacagaagatgatggcgttgaagatgaataccaactagaggaatttagaggttgtcaccgcagactacatgttgaaaagtgggagtgtctaatttcaggagtgcatgggagaaagcattggccctg

SEQ ID NO: 43910 - DNA, 416 bp, Glycine max
  Clone ID: LIB3139-067-P1-N1-G10
tttcagacttaaatcctctcctgcaccaacttgttcacacctgcaaagatctgttaacagggaaagctgattttgaaaattttatcgaggaagtggcatttgctttggactggagcattaataacagtgtcacctccacaaatgctgccattgcaagggataagatcaagaagcaattcagcagtcatttatcacaaaatcaaagtaaaacagatgttgaagataaacagtcttctcgcttgccctcatttgcatatcctgacgaacagtgtgaactcttcaacacacagaatgatcagtgtgatctccttgaagagattagaaaactaaaatatgatttgaggagcacaaaaactgcgaagaaagacttggaagaaaagctgctgtcagtaactgatgagaggcagaacttagca

SEQ ID NO: 43911 - DNA, 405 bp, Glycine max
  Clone ID: LIB3139-067-P1-N1-G11
ttctttttcatcaatcatcaccagtggttcttttccttctgagaagatcgaattgtgttttgcaaaaatgggagttccagagaaagaccctctttcccaattgagtttgcctcctggttttcggttttaccccaccgacgaggagcttctcgttcagtatctgtgccgcaaggtcgctggccaccatttctctcttccaatcattgccgaaattgacttgtacaagttcgacccatgggttcttccaagtaaagcgattttcggtgaaaaagagtggtactttttcagccccagagacaggaaatacccgaacgggtctcgacccaacagagtagctgggtcgggttattggaaagccaccggaaccgacaagatcatcaccaccgaaggtagaaaagttggcat

SEQ ID NO: 43912 - DNA, 417 bp, Glycine max
  Clone ID: LIB3139-067-P1-N1-G12
gttactggccaatattatcctgagtgggctccaattaattgtcgagttcatcgacaaccaattcacatcactgaaggaaattatgtcagaaagcaagatgtcagcattgaatatgatgcatgtacaattccaaatgattgtggttcattggttgttgccaaggttggaaatcacaaacaaattgttggttttcatgttgctggaagcaaaggaagactgggatatgcttcattgataccatatgttgagccagttgtgcaagctcaaagtgctgaagtttactttgacttcttccctgtggaggttgatagtcaagaaggagttgctcacattggtgaattgaaatctggtgtctatgttccactgcctacaaaaactaatttggtggaaactcccaaggaatggcaactggatcta

SEQ ID NO: 43913 - DNA, 415 bp, Glycine max
  Clone ID: LIB3139-067-P1-N1-G2
gtgcaagcttgacccaacccactgggaaacaatctcaaaggctggtctccagcgtattgaagagaagtacacatggcaaatttactcacagaggcttctcactctcactggtgtctatggcttctggaagcatgtgtctaaccttgaccgccgtgagagccgccgctatctcgagatgttctatgctctcaagtaccgcaaattggccgagtctgtgccccttgctgttgagtaaactgaggatgaagagttggataaagaaatggaggaaccggctttttgtttctcatttggagtttgtcttacttgagttctataaataatatgtccctgatgattttaattttgtgattaagctttcgataagagacagagagagaaaaaaaaggaaaaaaaaaaaagccttttacttttt

SEQ ID NO: 43914 - DNA, 416 bp, Glycine max
  Clone ID: LIB3139-067-P1-N1-G3
gtgatgatggaattggaagtcgacgagaacgacttgaaagccgccggtgctgagctcttcgtcgacggtggtcggcgcggcattcgcatcaatggctgggtgatcgagactcggaggcactccatactcaactcttccacactccaagagtgggaacagaatctcgatacgtctcatttaccagaaatggtttttggggaaaacactttgattctaaaacacttgagcagtggcaccaacattcattttaatgcatttgatgctctacgtggctggaaacaggaagcattgccgccagttgaagttcctgcggcggctaaatggaaatttagaagcaagcccttttaagcaggtatacttgattacgactatacatttacaacaccttattgtggaagtggcactatggagattga

SEQ ID NO: 43915 - DNA, 419 bp, Glycine max
  Clone ID: LIB3139-067-P1-N1-G4
gtggcacctaataagacaggcagaggagcttcatggctgcaaaaacaatcctggacacaaatggttggtcagaataacaattcatttagcatttcaaatattttgcctggcattactttcccagagccaatggccaaggaggccattatggaacctgccatttccaatgattgcaagcacaatggcgtagctaaggatactgttaatgttgtctgtgatgggtttaactcaagggagactataccaggaaagagtcagcataccagtgccaatgacattgcttctgcttcagtaggtgaggaaaaaggtgaaacaagtccgagggaaaaatccactgaaaatgttgaaataggcgaaacttgctcatttatgagaagtgctgcatctttgaaggaatgggcaaaagctaaggctgctat

SEQ ID NO: 43916 - DNA, 422 bp, Glycine max
  Clone ID: LIB3139-067-P1-N1-G6
cggctcgagcaagaggctgcttctttcaaactcaggcatgggaaggaagaggatgctgctcaactctatgagcagctcgtcaaaagccagggaagcatagaagcactagttggtctggtaacaacagttgctcgcatggatgttgttaaggcagagctttatgaaaagcagctgaaggctctacctggtttaaagggaattgatgtggacagcttggagcgtacttctggagtgaaacaagttgatgctcctcgtgttggtgtccctgaaacatacgaggaaggaaagaataagacaaaatctaagaaaaagagaaagagaaagccaaggtatcctaaagggtttgaccctgcaaatccaggtcctgccccagatccagaaaggtggcttcccaagagggagagatcaacatataggcccaa

SEQ ID NO: 43917 - DNA, 406 bp, Glycine max
  Clone ID: LIB3139-067-P1-N1-G7
tgaattttgattctagcaagcagagcttttgtcaattttctattgaccttctcggtggaggaattttagtggacaaaactggagattggatcacacttatacaaaattctccaattagtaacttgttgagagttgctgcttggaagaaaggctgtttaatggttaagattgtgatgtctgggaatgcagcagtcaaaaggagtgattgggcctcattggtacaagtgtttttaacaaacagcaacagtacagagcattttgatgcatgtaagtggacaaaatcggaaccacattcctgggaattgatcttcccaatagaggtatgtggtcctaataatggttttgaaatgtggagttctgagtgggcaaatcaaacttcatggcatttgagtttccttattgacaa

SEQ ID NO: 43918 - DNA, 413 bp, Glycine max
  Clone ID: LIB3139-067-P1-N1-G8
ctgcaacaactctgttggctgatgggtgtccatatttgtatgcaatggtgcatgatagttcagtgtctacaataccaggtgattttgtcattggtgtcaagttgacaaccataaacaatatgtgtgcatatgggctcaatcctggtatttcaggttctcgtcttttgggcaccattcctcagtccatttcacagcaaactgtttggaatcaaatggcaacagtgagaacaccattgaattttgattctagcaagcagagcttttgtcagttttctattgaccttctcggtggaggaatcttagtggacaaaactggagattggatcacacttatacaaaattctccaattagtaacttgttgagagttgctgcttggaagaaaggctgtttaatggtcaagattgtgatgtct

SEQ ID NO: 43919 - DNA, 406 bp, Glycine max
  Clone ID: LIB3139-067-P1-N1-G9
aagcagagcttttgtcaattttctattgaccttctcggtggaggaattttagtggacaaaactggagattggatcacacttatacaaaattctccaattagtaacttgttgagagttgctgcttggaagaaaggttgtttaatggtcaagattgtgatgtctgggaatgcagcagtcaaaaggagtgattgggcctcattggtacaagtgtttttaacaaacagcaacagtacagagcattttgatgcatgtaagtggacaaaatcagaaccacattcctgggaattaatcttcccaatagaggtatgtggtcctaataatggttttgaaatgtggagttctgagtgggcaaatcaaacttcatggcatttgagtttccttattgacaatcccaaacagtctacag

SEQ ID NO: 43920 - DNA, 412 bp, Glycine max
  Clone ID: LIB3139-067-P1-N1-H1
ggcggggctacccgttgggtttaagcttttcaaaatgcatggaaaaaacaaacaagttagcagcgagaataatgatcatcattcaatccctcttaaagactatggtaaacctggctcaggccaccatgacgttactgcagcagatgataacaatgatcatcattacatccctcgcaaggattttggttaacatggctcttgccaatttcatgtcactgatgatcataataggtaccattgcgtccatatataggaattttagggagatcgtacttgttatggccaacctggcggagggattaaaggtaattccgggcccgggcattgataatttactcacaaggattatgcccaggattctggcgaccgattggatatatatatatatatatatatatatatatatatttgg

SEQ ID NO: 43921 - DNA, 418 bp, Glycine max
  Clone ID: LIB3139-067-P1-N1-H10
ctcgagccgaatcggctcgagagagaagctctgggatgatgttgtggctggccctcaacctgagcgtggccttggcaagctcagaaaactcaccaccctcaaaactattgatgaaggagaaagtagcaagctgcagaagacgttgtcgatgccgtcgacaccaacaaccccgatgactccgacgactccaacgacaccgggatcggcccgtaaagctgacaacgtttggaggagcgtcttccatcctgggagcaactccgccacaaagaccatcggtgctcagatgtttgacaaaccacttcccaacactcccactgtctatgactggctgtacagtggggagaccagaagcaggcaccgctgaagctgaagtctttagctaagatgaccgtgggttgcatgtaaatattgtcgtttt

SEQ ID NO: 43922 - DNA, 417 bp, Glycine max
  Clone ID: LIB3139-067-P1-N1-H11
gttgtgttgtgtacagagagagagagagagagagagagagagagagagagaggctgctatggggaacagagctatgttaaccttgctactactcctcttcttctcgaccaatttggttccttccgcccttgctatctggctgacgttacccaccactggcactaagtgcgtctccgatgaaatccaacacaacgtcgtcgttttggccgactacgtcgttatccccagtgatcacgcccacaacctcaccatcgccgtcaaggtgacatcaccgtatggaaacaatcttcatcacaaggagaacacaacacatggtagtattgcatttacaactcaagaggctgggaactaccttgcatgcttctgggtggatagccctagtcaaggagttggtgaggttaatgtaaaccttgattg

SEQ ID NO: 43923 - DNA, 417 bp, Glycine max
  Clone ID: LIB3139-067-P1-N1-H3
cttgggaatctctcaagagaatatcaaaaactgtagacggcctgtggtggatgcttaagcgtcttaacacacctgaagatcataatgtccgcgctccactcgtgcgcataaataaaaattctgagtgaaatggtcctacatcaacaatagctgttccaataccacaaaggccctgtcatatgtggcgaaaactccgtctatcttatatgatacggaaacttcaagcctttccagctagccatcatgtttcgattacatcaccgaaactttcatatgacaaattcacagcctatccattcgctgtctcgagatggaaaggcacccaataatactaccaactgataaaggcagcgccaaaactttccctaactctcggtacccaaatgctctgcgagaactactccctaggaaaatcac

SEQ ID NO: 43924 - DNA, 422 bp, Glycine max
  Clone ID: LIB3139-067-P1-N1-H4
caatggctgcctcactacaagctgcagctaccttcatgcaacccaccaaggttggcatagcctctcgcaacctcaaatctacacaatgcatttctaaggcttttggcttggaacctgctgcagctaaactcacttgctcccttcagcctgatctcaaagaatttgctcaaaaatgtgtcgacgctaccaaaattgcaggattcgcccttgccacctctgctctcgttgtttctggagcaagtgcagaaggtgttccaaaaaggctaaccttcgacgaaatccagagcaagacatacttggaagtgaagggaactggaactgctaaccagtgcccaaccattgaaggtggagtggactcattcgccttcaagccagggaaatacaacgcccagaagttgtgcctggaaccaacttccttcacg

SEQ ID NO: 43925 - DNA, 419 bp, Glycine max
  Clone ID: LIB3139-067-P1-N1-H5
gtgccaatggttgggcttgtccttttcttcggggatcacatttcagaaacaattacttccttcagagaatcacggctcagcccagaatggctaaaaaatgctgcagaagaaatggctaaaaaagccagaaattatattaatcaagtttgcaacatatttacttatatgacagcaattcttgatcctcgaataaagggagacctgatccctgatagtttaaactcagaaaactttctggatgaagcaagaacccattttataagaaattattcagccagccatttctcatccatgagttctggatacaatgctcaagaaattgaagatggaggaagtgtttcctttgctgaggaaatagcacgcaagaagcgaaggacaagcatgagctctgccactgatgagcttacgcagtacctatc

SEQ ID NO: 43926 - DNA, 414 bp, Glycine max
  Clone ID: LIB3139-067-P1-N1-H7
atcctgagtgggctccaattaattgtcgagttcatcgacaaccaattcacatcactgaaggaaattatgtcagaaagcaagatgtcagcattgaatatgatgcatgtacaattccaaatgattgtggttcattggttgttgccaaggttggaaatcacaaacaaattgttggtttccatgttgctggaagcaaaggaagactgggatatgcttcattgataccatatgttgagccagttgtgcaagctcaaagtgctgaagtttactttgacttcttccctgtggaggttgatagtcaagagggagttgctcacattggtgaattgaaatctggtgtctatgttccactgcctacaaaaactaatttgatggaaactcccaaagaatggcaactggatctaccttgtgacaaaa

SEQ ID NO: 43927 - DNA, 412 bp, Glycine max
  Clone ID: LIB3139-067-P1-N1-H8
ctcgagccgcgttttgctctacgcctctccctctctctcaaaaatcgttctcttcgattttagggttttgttttgctgctgcctccgttccccccttctcataaacaacgcgttttctcttctgcttcgtatctattctttgcttttggttttggttgattcaaggccttcacagcattcgttgcggcattttaatcgatttatccaagcaggactgaatgaactaatggagtctaaaggtgggaaaaagaagtctagtagtagtagtagtaaatcattgttctacgaagctcccctcggatacagcattgaagacgttagaccaaacggtggaatcaagaaattcagatctgcttgttacttccaactgcgctcgcaaaccttcctgatatccatccagattgatagttca

SEQ ID NO: 43928 - DNA, 401 bp, Glycine max
  Clone ID: LIB3139-067-P1-N1-H9
gcaaacgatccaaactcttttttcatttgcagcatcaaaatgagtggtagcaacgatggtagcggcagctggagctctaggtttttgaaggtggctagtgcagctgccgctacagccgccgttgccggcggtttatatgccattctttcatcctcaacctctgctagctctgagatggaagtgccgtttggcagcgcacggcgtgagagcaaagaacgtgacgatggtggctccgggtctcatcctcgcgagggtgccaccacggtcagtcgttggaagaaacctgagattggttgggtgaagctgaacgtggatggttcacgcgacccatacaaaagttcctccgctggttgtggtgtgttctgagggacgcatcagcaaagtggctccgtggctttgct

SEQ ID NO: 43929 - DNA, 384 bp, Glycine max
  Clone ID: LIB3139-068-P1-N1-A1
ttgttacttaccaaaaccacttccaaaaagcctaagattaccacatagtcacattcacattgaagttaaacttgcattgaaaatggagggaagagatgaggatgtaagagtaggagccaataggtatggagagaggcaaccaataggaacagctgcacagacacaagatgccaaagactacagagaggcaccaccagctccattgtttgagcctagagagttaacatcatggtctttctacagagcaggcatagcagaatttgtggccactttcttggttctttatgtcactgttttgactgtgatgggtgttgcaaaatctcccaacaagtgctccactggtggggtccaaggcattgcttggtcatttggtggaatgatctt

SEQ ID NO: 43930 - DNA, 372 bp, Glycine max
  Clone ID: LIB3139-068-P1-N1-A11
cttcaacgctctttagtacagcggaagaacgaagcctcctcgttcttcttcttctgcgctttctctctccctctctagaaccgtaaccgtcggttctttctttctctctcctcaaccagagataaagagtcaccttcttatttttctgaatctcgcggcgttgttctttctgctgctgcggctgtggttccggcggcgatgggacagcaatcgttgatctacagcttcgtcgctcgaggcaccgttatcctcgcggagtacaccgagttcaccggaaacttcaccggcgtggcggcgcagtgcctccagaaactcccttcctccaacaacaagttcacctacaactgcgatggccacacctgtaactacctc

SEQ ID NO: 43931 - DNA, 384 bp, Glycine max
  Clone ID: LIB3139-068-P1-N1-A12
tcttttcttatcacacaacacaaatacctctcttgctctctcttcttcgcattcttgggacatacaaaaactcacactctctctctctctcttcaaatcaaaacccctcacaaaattcacaacatcatacacacaaatcccaaatcctggcttctcatataaaagaacccttctttggaatccttgccgctctctctctctcttatactttatccctatccgaatcaattcgcgcgcagaggcaaaccctagttcccctctccgagctctgtgatttttgggttgataaaaaaaattagggtttgatggctgaccaaggattggaagggagccaaccagtggatctacagaagcatccttctgggatcgagcctacccttcaaa

SEQ ID NO: 43932 - DNA, 380 bp, Glycine max
  Clone ID: LIB3139-068-P1-N1-A3
aattgttggtttccatgttgctggaagcaaaggaagactgggatatgcttcattgataccatatgttgagccagttgtgcaagctcaaagtgctgaagtttactttgacttcttccctgtggaggttgatagtcaagagggagttgctcacattggtgaattgaaatctggtgtctatgttccactgcctacaaaaactaatttgatggaaactcccaaggaatggcaactggatctaccttgtgacaaaattcctagtgtcttgactacaactgatgagagattggtaggcacagaacatgagggatatgatccttttcttggtggaattcaaaaatatgccactcccatgatgcccctagatgaagaaattctttcta

SEQ ID NO: 43933 - DNA, 381 bp, Glycine max
  Clone ID: LIB3139-068-P1-N1-A4
ctcgagccgcgaaaccacaactgcaacaaccgcaatttaaaacctttgtgtgagaataatgcgtactacagcagaatttcaaggttctgttctgaatcttcgtggggttcaggttcactccatggagggttcaagcatggagcaagagcttgatttgtttcagaagcatgtgacagagcgattcctggagctatctttggctgaaagtggtgaattgctctctctttcatgggttaggaagctgctagattcgttcctgtgttgccaagaggagttcagggtgattctccacaaccacagggctcaagtgatgaagcaccctcccttggatcgcatggtgggcgagtttttcgagcgtaatgtgaaggcgcttgatgtgtg

SEQ ID NO: 43934 - DNA, 366 bp, Glycine max
  unsure at all n locations
  Clone ID: LIB3139-068-P1-N1-A5
tggatcccattcccaattccaatgtcaacaagcgtcgtgcaaacaacgaccagttcgacttaaatgactccgcattcagccacctcctcaattccatcatggatcctaaccatttccaacaccaatccaaaccaatccaattcgactcctccccgaccaagagagctcgccgtgacctcctcgttctcgaagacagccacctcaaccccgcctcggccccgcaacagcagcgccgtctctgggtcaaggaccgctccaaggactggtggcagcggtgcaacagcccggacttccccgaagaggaattccggcgccacttncgcatgagcaaggccaccttcgacatgatctgccagcacctggact

SEQ ID NO: 43935 - DNA, 359 bp, Glycine max
  Clone ID: LIB3139-068-P1-N1-A6
ataaccctccacaaccaccttattcaatctttaaatagcttattgattaatgtcttatagtcttctatgaataagatcttcagattttgttacagtttttcaaattattctgtggcaaggagagaagaaaagatcatagaaagtggtgattcttcgaatattgaagagagaaatatggggttgagattgaaggagacattctacttgtcccatggagcaccaactcttgccgtagatgattcaatccctgcgtggaacttcttcaattcgtggaaggagcagtttccgacgagaccctcttccattcttattatctccgcccactgggacacccatgtttccaccgtcaacgtcggtca

SEQ ID NO: 43936 - DNA, 246 bp, Glycine max
  Clone ID: LIB3139-068-P1-N1-A7
aaaaaacgcaagcgcaaaagccgatgggatcaaccagccgatacaaactcgcattctgatgctgttatgagctctatcggtgaaagccagaacattcccgaggatggtccaccagggttttcatgtccagtaggttcattaaatgcttccctaaactctggtaatcttgccttgcaaaatgcaagccgttctggatgcccctctgatatagttattggtcatccaaaagagaaatttaactctcac

SEQ ID NO: 43937 - DNA, 375 bp, Glycine max
  Clone ID: LIB3139-068-P1-N1-A8
aaagtaagctcaatgagggagatattgcacgtgcaaggtgggcaatgcgggaaccaaatcggttccaagttctgggaagtgatatgcgacgagcatggcatcgaccccaccggaaagtacaccggcgacgaggcctccgatctccaactggagaggatcaacgtctactacaatgaagcctccggcggaaggtacgttccccgggccgtcctcatggatctcgagcccggcaccatggacagcatcagatccggcccatacggcaagatcttccgccccgacaacttcgtcttcggccagtccggcgccggcaacaattgggccaagggccactacaccgaaggcgccgagttgatcgactctgtcctcgacgtc

SEQ ID NO: 43938 - DNA, 377 bp, Glycine max
  Clone ID: LIB3139-068-P1-N1-A9
gttgggatttaacagatcattaagtatatcaaatgtggtgacagtggcaatatttgtctttgttttcatatctacatttatgtaattttccttttctatttccccttatcggtaagtgcaggttatgaatttgattatgtatttgattggactattttaaagtaccagcaggcacaaaagaatagagtccagtctcgtatatctgtgagtatatttgctctacatgaagaggtttgagtcttcccatgcttataatactaatttttgtcatattgcagacagtccctggaacaagcagtagtcctgcaatgccaatggatgtagacaaccaatgaggttggtgcatctgaaattatttacataattttttgtgattc

SEQ ID NO: 43939 - DNA, 371 bp, Glycine max
  Clone ID: LIB3139-068-P1-N1-B1
gttttgttttttgatcctggttcggtgctggctgctttctattcttacctcaggagaaataagagaatgggtgcagagaaatgcgctatgataatagtcaaatggaagaaatcgaagaaagataaatccaaagacgaaaagatcactgatgaaaattcaaacgaatactctaacggggagcatagtactcgtgaagagtgacggggcattcccaatgaaggtgtaatgatggacaggacagttccttcaaagtagatggatgatattgcagctactccgattcaaaatgcatttcgttcatttatggcacgaagaacattacaccatctaatgggtgcacagcaattagaagctttgattcaagaccacct

SEQ ID NO: 43940 - DNA, 383 bp, Glycine max
  Clone ID: LIB3139-068-P1-N1-B10
cacttctcttcttctttacacaaactcaacaacactcattcattgtgaaagtttcaaactaacacacacacttaaacaaattaaagaaagaaccattattacttcatcagttttttcttgctcagccaaaatgccgagaaaaggaatgagaagcattttcttcacatcaacgcccacggcatcactaccacctccttcccgtcaacgcactttctcagactcgttaatggacgaaaacatagaaaccgcagagaagctcataacgaaatgggacgattccaaagtcacaacaacaacgcaacttttcagcggcacgcgccaggaagccaaacagtacctaaacgccgtgaagggactacaatccgctatgcaagacctcgtcg

SEQ ID NO: 43941 - DNA, 378 bp, Glycine max
  Clone ID: LIB3139-068-P1-N1-B11
tgcaagccttatttttcagtttttacccaatgtgatcatatttgttagcatgtatatagtgatcccttcagctctttcgtatctctcgaagtttgaacggcatttgacggtgtctggggagcaaagagccgtgcttatgaagatggtttgcttcttccttgtgaatctcattctcttgaggggtttggtggaatcgtcattagagagtacgatcttgaagatggggcggtgctatttggatggagaagattgcaagaggattgagcagtatatgagtgcttcgctcctgtccaagtcatgcctctcctcacttgcatttctgatcacaagcactttcttggggatttcttatgatctcttggcacccattccttggat

SEQ ID NO: 43942 - DNA, 380 bp, Glycine max
  Clone ID: LIB3139-068-P1-N1-B12
cttttgttatctccgtcgcgctgttggcggcggtagctggcggatcgccggcgactctgactttggaaagagcgtttccgacgaatcacggggtggagctgagtcagctgagagctcgcgacgagttgaggcatcgcagaatgttgcagtcttcaagcggcgtcgtggatttctccgttcaaggcacctttgatcccttccaagtcgggctctactatacaaaagtgcagttgggtactcctccagtggaatttaatgtgcagattgacactggtagtgatgttctctgggttagttgcaactcctgcaatggttgtcctcaaacaagtgggcttcagattcagctcaatttttttgaccctggaagttcatcaacatct

SEQ ID NO: 43943 - DNA, 385 bp, Glycine max
  Clone ID: LIB3139-068-P1-N1-B4
ctctgattcattcacccaatttttttctgtcctcttttcctctcagaggagcctctgagtctgctcaggtgttccttgtcaagagatccttttgtttttgaggtgtgaagggaaagagaaaaaagatgaatcagtgtggttatcagcagaagaaggccttgacaagctgtgaggagatgaggatggaatctgtggtgtgccctaaacctcgaagattgggcctgttgaaccactcaacctttgataaccacatcagacccttgaggccaccctttatcaactaccaatcagaaattgaagattcaggagttggggctgagcttatggacattattctccccaagagatctggggggcaagtggcttcatcaccgccatttttctg

SEQ ID NO: 43944 - DNA, 376 bp, Glycine max
  Clone ID: LIB3139-068-P1-N1-B5
ctgggaatgcagcagtcaaaaggagtgattgggcctcattggtacaagtgtttttaacaaacagcaacagtacagagcattttgatgcatgtaagtggacaaaatcagaaccacattcctgggaattaatcttcccaatagaggtatgtggtcctaataatggttttgaaatgtggagttctgagtgggcaaatcaaacttcatggcatttgagtttccttattgacaatcccaaacagtctacagtttttgatattctcttgggaatctctcaagattttgaaattgctggtaatacttttatgccagctttttctgtttcacaggctactgccagatcttttgaaaatgcggaatcctttgcatgatctggaat

SEQ ID NO: 43945 - DNA, 350 bp, Glycine max
  Clone ID: LIB3139-068-P1-N1-B6
ttcttcgctccccccccgctcgttgacctccgattctcccctcatcggagctcaaatctccgatccctcccttcatatcgcttcacggcaaccttctcttcacccatcgcaagatctagttgaatctcgaccggttcgaagctctactcactcaaatcctcttcagatctggggggtttgattgcaattctcactctgctgctcggatttgttcgtttgaaatgtcgattttaccgaaaggcgattcggttcaaatcagggaggtttggaacgataaccctcgaggaggagttcgcgttgatccgcgaaatcgtcgacgagtataactacgtggcgatggataccgagtt

SEQ ID NO: 43946 - DNA, 377 bp, Glycine max
  Clone ID: LIB3139-068-P1-N1-B7
tgtgtgtgtatggtgatgataacttaattagtgttcatgaatatgtcaagccttactttagtggttctaaattgaaaagctttctagctggtcataatatcaccattactgatggtattgacaaaactagtgcaactttgcaatttagaaagttagcagattgtgattttctcaagagaaactttaagcagatgtctaatgttttatgggtggctcctgaggacaaggcgagtttatggtcacaacttcattatgtttcgtgcaataatctggaaatgcaagaagcttatcttgtcaatctcgtaaatgtgttacgagaattgtatttgcacagtccagaagaagctcgccaattgagaaggaaagctctctctcgt

SEQ ID NO: 43947 - DNA, 377 bp, Glycine max
  Clone ID: LIB3139-068-P1-N1-B8
gcaaagagtgagagagacatagttggatcattggttcatcactctttgtgaggaaggaagaataattaatggggatgatgaatgtgagcattgcggggttggattcccagatggctgcagagagagctgtggatgtgattggtcaagggtatgacctttgcagcgatataaggttctcggcttgtaaaaacaggttgatcgagattgagaaaacacaaagtagagaccttgtttttcccggtggggttgttgtcaagaatgttcccaactccatcaagtgtgacaagggtgaacgaaccaggtttcactctgatgtgctcccttttaatcagatgtctgagcatttcaacaaacagatatccttgtccggaaagatt

SEQ ID NO: 43948 - DNA, 381 bp, Glycine max
  Clone ID: LIB3139-068-P1-N1-B9
cttccagttggggtttttcgctttcagcgaagagcggtgtatatagaaaccctattccccctatgcaccaggggaattgaatatagaaataagaaaaaggcaaaaaaaaaagaggttgaaaaagttgtatgttaaataggtaattctgttgtttttcgtgtttctggactcaggagctgagctgtttccagggaaaagcatgtacagtatgaactctaaatgcagtgctggggattgccaaatattctggatgttatggtcttcaccattgccaccacagtttctttgaaactgctcaaggtctaggcttctatttaacttctgcacctgagcttttatatttaagagtgcttatagatattgggctagttgatagaaatg

SEQ ID NO: 43949 - DNA, 383 bp, Glycine max
  Clone ID: LIB3139-068-P1-N1-C1
cgcgtcgcgtaccaaggcgttcccggcgcgtactccgaggcagccgccggcaaggcctatccgaactgcgaggccattccctgcgaccagttcgaggttgcgttccaggcggtggagctctggatcgccgatcgagcggttatgccggtcgaaaactccctcggcggctcgatccaccggaactacgaccttcttctccgccaccgccttcacatcgtcggcgaggtccagctcccggtccaccactgcctcctcgcgctccccggcgtccgaaaggagttcctcacgcgagtgatttcgcatccgcaggcactcgcgcagtgcgagcacactctcaccaaactcggcctgaacgtggcgcgcgaggccgtggacgacaccgc

SEQ ID NO: 43950 - DNA, 383 bp, Glycine max
  Clone ID: LIB3139-068-P1-N1-C10
ctcgagccgttgataacagaatggtgaaccattttgttcaggaattcaagaggaagaacaagaaggatattagtggaaatgccagagctctgaggaggttgagaacagcatgtgagcgggcaaagaggactctctcttccactgctcaaaccaccatagagattgattccttgtacgagggtattgacttctacacaaccattacccgtgcccgttttgaagagctaaacatggatttattcaggaagtgcatggagcccgtggagaagtgtttgcgggatgccaagatggataagagtaccgtccatgatgttgttcttgttggtggttctactaggattcccaaggttcaacagttgttgcaggacttcttcaacggaaag

SEQ ID NO: 43951 - DNA, 278 bp, Glycine max
  Clone ID: LIB3139-068-P1-N1-C11
tgactccactacctaaattatgatgatctggtcctgtgtcacccaaaacacgagcagggctgcaggtcaagtgtgactacaggtccctctatattggctttaatggttacccgagggttggggggaaaagccacataccgagggctcttgaatctgtagatagaaatgcttttatgtgaagggtgtatgtgtatgcctccagaacctaaaatcttttgtctaacacgtatttatcatcatgtgtatacttatatatgatgaggatgatcattatgcag

SEQ ID NO: 43952 - DNA, 378 bp, Glycine max
  Clone ID: LIB3139-068-P1-N1-C12
cccaattatcaccagcttctgcccctttcaaaccaccccaacctacccctatagcaccagctgcagccccaaaaccattggttccctcattgccacagtcaccaagtgattccacccctgacagtactccagctgttgacattgttggaatcctgaggaaggcaaagtcattcaacatcctaatccgcctcatgaaaaccacccaattgatcaaccaactcaatgctcagcttctcacaactaaatcaggcggcataaccattcttgcacctgatgacagtgccttctcagaactcaaagcaggcttcctcaactctctttctgatggacaaaagcttgaacttcttcaattccatgttctttcggactatgtgtcta

SEQ ID NO: 43953 - DNA, 377 bp, Glycine max
  Clone ID: LIB3139-068-P1-N1-C2
ttcattatgaagaaaagggacaagcttagttgtcaagttggaatcaacccatactccatggaatggactggtttggccaatagattactgagtaagggcaatgatattctgtgttgcgattatgctagttttgatggtttgattaccaagcaagttatgagcaagatggcagaaatgataaacagtctttgtggtggtgatgaaaaattgatgcgtgaaaggacgcacctgctgttggcttgttgttcaaggatggcaatttgtaagaaagatgtttggagagttgaatgtggaatcccttctggatttccgctcacagttatttgcaatagcatttttaatgagatgctcattagatatagctatgaaaaattact

SEQ ID NO: 43954 - DNA, 381 bp, Glycine max
  Clone ID: LIB3139-068-P1-N1-C3
gttggtgctggtcggttagtgcttcagcctcagggctttgctattcctcattattcagatatatccaaagtaggttatgtgcttcaagggaacgatggcgtagctgggatggccctccgcaacagtactactagagaagaggtggttgtgaagcttaagaagggagatgttataccagtacctattggaagtgtctcgtggtggttcaacgatggggactcagatcttgtcattgtttttcttggagaaacttcaaaggctcttattcctggcgaaattagttatttctttctaaccgggcttcaaggagttataggaggcttctctaatgagctcacaagcaaaatatatggtttggacaaagatggggtggaaaagctc

SEQ ID NO: 43955 - DNA, 384 bp, Glycine max
  Clone ID: LIB3139-068-P1-N1-C5
aactaattaagcaacacacacttcaatttatcagcatggcctccgttcagtgccacaaaacctgcaaagtgagctgccaacaggaaaaccagcacgcctcgtttgggcagaaagtttctgacttgttcaaagggcatcaacataatgaccacagctccaattatgccacccaaaccaaagtgctttcccagtcagggtcagggttaggccccttcaccaccaaaactcaaacacaatgcggttgcccccaaacacatctcagtaccactcatggctccaacacaaaaggccatggccatggccaagggagaattaagagggagcacaagagagggatgctgcagaacatcaaagatcgcttatcaggtgacaccagcagcgaca

SEQ ID NO: 43956 - DNA, 382 bp, Glycine max
  Clone ID: LIB3139-068-P1-N1-C6
tgcatttctatttctaactaattattgtgcttattattattgttgagaaagaaaagaatggcaaagttaataaaattctttgagttgaacacaggggccaagattccttctgttgggttaggcacttggcaagctgagcctggtgttgtagccaaagctgtcaccacagccattctggttggatacaggcatattgatcgtgctcaagcgtataacaatcaagcagagattggttctgctcttaagaaactttttgatgatggggtggtgaagcgtgaggacttatggatcacctccaaactctggtgttcagatcatgcttcagaagatgtgccccaagcattggataaaaccttgcaggatttgcaacttgattaccttg

SEQ ID NO: 43957 - DNA, 378 bp, Glycine max
  Clone ID: LIB3139-068-P1-N1-C9
aaaagaggaacatgaaaagggtctctgaatctaatctatttcttcttctcctttccggtttgtaatcgactttcatgctcagaagcgtttcgtttgtcctctaaaacccacataccatcaaccaaactcctaaagtgatatccagaagagtgagagaatggttactgggtggagaagagcgttctgcacatccatccccaaagacagagaacccaaagtgttaacagagaaacaacaacaacaaccacaacaacagcattgcgagaacaccaccaccaccaccaacaacaacaacaataatcacagttccaagtttggatttttctccaacccatcaagaccccggtgcgagtctcagccttcatcaacccctagcct

SEQ ID NO: 43958 - DNA, 380 bp, Glycine max
  Clone ID: LIB3139-068-P1-N1-D1
attccctggtccaacattggaagtcaacaatggtgacactttggtcgtcaaagtcactaacaaagctcgttacaatgtgactattcactggcatggaattcggcaaatgagaacaggatgggctgatggaccagaatttgtgactcagtgccctattcgtcctggagaaagttacacctatcgttttaccattcaaggacaagaaggaacactttggtggcatgctcatagctcatggctaagagccactgtttatggtgctttaatcattcaccccagggagggagaggcgtatcctttcactaagccaaagcgcgagactccaattcttcttggggagtggtgggacgcaaacccgatcgatgttgtgagacaagctt

SEQ ID NO: 43959 - DNA, 334 bp, Glycine max
  Clone ID: LIB3139-068-P1-N1-D10
tctgcactgaagaaatacatgattgagaacaaattagccagtgaacaagagttgaagaccatagagaagaagatagaggagattgttgaggatgctgttgagtttgcggatgagagccctcatccaccccgcagccagcttctagagaatgtctttgctgatccaaaaggttttggaattggacccgatggcaagtacagatgtgaggacccaaaattcacccaaggcacgtcgcatgtctaatgtttttcatgtctgacatctggcatctatctgtttggagttttcagttttagattcatgttctttttcttatacttactagaggatcaaa

SEQ ID NO: 43960 - DNA, 383 bp, Glycine max
  unsure at all n locations
  Clone ID: LIB3139-068-P1-N1-D11
gcagcgcattatagcacaccacacaaaaaagcaaaacagagagaacaactgttactcacacacgccatgggtaaatgaatggtttttgagcaacagcagttaaaagagaaaagggattcagcgaagatgacatcggttggtgtggcaccaacttcgggtttgagagaagccagtgggcatggagcagcagctgcggatagattgccagaggagatgaacgatatgaaaattagggatgatagagaaatggaagccacagttgttgatggcaacggaacggagacaggacatatcattgtgactaccattgggggtagaaatggtcagcccaagcagactataagctacatggcagagcgtgttgtanggcatggatcatttgg

SEQ ID NO: 43961 - DNA, 367 bp, Glycine max
  Clone ID: LIB3139-068-P1-N1-D12
gttgaaactcctaaaggttccatgttggatctgaaaatttctcaatctaaaattgcacttcccaagaacacagttggaggaaccattctgcgtagtgatctattggcaaattttttgacagagggcaattttagagcaagtgttgatttgcagcgcactcatcgtattagaggaatgattaaaatggtggccacagttggtattcctgagaatacaggtatatcattggcctgtgctatgaatagttcttttagggggcgcgccagttctgatatttacaccatctgctctcaagactgtgaattgtggaatcctgcttgcacaaaagcaatgactatgtcatttaatccaaacccgtgttctgatg

SEQ ID NO: 43962 - DNA, 372 bp, Glycine max
  Clone ID: LIB3139-068-P1-N1-D3
gtaactaaacacaaaccccaaaaaccaaaatcacaactcccaaagcaaaaacccaaatcccaaatgatagtagtaacatgagatgacagacgaccgcgtgcatccaatcccaaacctagctatgtctccggccaccgcccactggacctctgacgccatccacggcggacccctccgtcgtgtcgacctcgactccggcaccaacggctgggcctcccctcccggtgacctcttcctcctccgctcccccaattatttcaccaaacgccagaaatcacccgccggcgactacctcctctccccctccggtatggactggctcaaatcccaatccaaactcgacaacgtcctcttccggcccgacaaccgcat

SEQ ID NO: 43963 - DNA, 364 bp, Glycine max
  Clone ID: LIB3139-068-P1-N1-D4
ggagttcgcgtgccagtacgcatacacggtagtgaatagattcctgtgagaaatgtgacttttaaagatatgtcagttggtctaacctacaagaagaagcatatctttcagtgtgcatttgttcaaggccgtgtaataggtaccatctatcctgctccctgtgagaaccttgatcggtacaatgagcaaggacagttggtaaagcattctgcgtcccagaatgtaacagatatagattatgatttttgaggtttcatgttcactaattcctggccttgttccttttactagggcctcaatttatgtctgtattagatcattttttggtggggttggagaagtcaagtcacgcttttcttttttt

SEQ ID NO: 43964 - DNA, 373 bp, Glycine max
  Clone ID: LIB3139-068-P1-N1-D5
cagcaattgacaagttggggaagaagcacaaggagcacattgctgcttatggagaaggcaacgaacgtcgtttgacaggacgccacgaaaccgctgacatcaacaccttcttatggggagttgcaaaccgtggagcttctgttagggttgggagagacacagagaaagcagggaagggatattttgaggacagaaggccagcttccaacatggacccatacgtggttacttccatgattgcagacacaaccattctgtggaagccatgagcaaaacctgcatgttttctccctttggatggaaaggaacagttatgcttttcttagtaggatttggtctctctctctttttaccttttgattggtactatggg

SEQ ID NO: 43965 - DNA, 383 bp, Glycine max
  unsure at all n locations
  Clone ID: LIB3139-068-P1-N1-D6
tcggctcgagggtgnngagttctgagnttgggcaaatcaaaccttcatnggcatcttgagttgtccttatgtgacaaggtccgaaacacgtctacatgtcttttgatatatctcttcgcgaatctcttcaagattattgaaatgtgctaggtaatactccttatgcgcagcttgtttctgttccacagagctcactgacagatcttctgaaaatgtctgaatcctacgcatgatctggaattcgcgttttcttacgcttgttcgcttgtttaattcaataaacgaaattactcatgaccctttagcagagcatgctctgcctatctgaaaatatacacacctattttaattgttgtattgatgtgtgaagggtgtgttttttt

SEQ ID NO: 43966 - DNA, 359 bp, Glycine max
  Clone ID: LIB3139-068-P1-N1-D7
cagattcgagcaattgaattgactggggttaagcaggagcatgtggctgtgtgtacgaaaccaaaatccaacccgagtcggaaaagtcaagcgcaagaggccaataaaggaaacggacggagggcacgggcgacacaagttccacatcaaggtggagcggggatgcgggccctatttctggatgggtccggatctagaggtgggaccggcgtcttcttgcctcggggtggtggagctactaccccatccgaatcaaccaacaagcaaggtaaaggttgctgcactgttcttatacctgccagagtagtccaggctttgcaactgcatttagaccaaatggctgtcacgtgtgggcccaa

SEQ ID NO: 43967 - DNA, 357 bp, Glycine max
  Clone ID: LIB3139-068-P1-N1-D8
acaaaagtataactagatactaatagcagttatccttttgtagactgcaaaatggttgtcagtaagtatccttttattttcctggtgacatttgtaaatacattgtgaacaaaaggtctcacttagtgttttgctttgttcgttgagaagatttaggtaagcaaagtaaggaggtacaggagtccaactgttgttgtgacaatgctatctaactactgtagtttgtatcttagttattatttggttcaagtagtactgtttcttattttctttccccttcagaaaatgctgtaagaggcttaagctcacaattgcgtttgaagtagcttactctgagaaaataatttttttttggtt

SEQ ID NO: 43968 - DNA, 370 bp, Glycine max
  Clone ID: LIB3139-068-P1-N1-D9
gtgattttctcaagagaaactttaagcagatgtctaatgttttatgggtggctcctgaggacaaggcgagtttatggtcacaacttcattatgtttcgtgcaataatctggaaatgcaagaagcttatcttgtcaatctcgtaaatgtgttacgagaattgtatttgcacagtccagaggaagctcgccaattgagaaggaaagctctctctcgtattgaatggctgcaaaaagctgatgtgcctaccatagcacagattgaagagttccattcgatgcagaggatgatgaatgctcctgattcaaatgataatattgatctactgttgagcattgatttgttgggtttacaaggagcaagtaaagcttt

SEQ ID NO: 43969 - DNA, 373 bp, Glycine max
  Clone ID: LIB3139-068-P1-N1-E1
caactctccccaaccatttcttttcatctgcacattcctattctattttctcactcaacaggatctaacatgtttagatccactagtactcgaggagggccttccaagtatgagagattagaaaaagaacttgctgacaatggaacttcaaatgaggagtttaagaggagcacaagtttgccttctcgggctatgggttcaacctttcgagacatcaatctacagagaaaccccacaaaaaatgccaatagtaaacctaaggagaagaagagtcacccactcttcagcttctttgatcttcccggaagaagaaaacaacagctaggcctgaatttgcgaggtatcttgagtatgtgaaggaaggaggcatgtg

SEQ ID NO: 43970 - DNA, 379 bp, Glycine max
  Clone ID: LIB3139-068-P1-N1-E10
ttttagggggcgcgccagttctgatatttacaccatctgctctcaagactgtgaattatggaatcctgcttgcacaaaagcaatgactatgttatttaatccaaacccgagttctgatgcatggaggttggaatttgtgaagcgtaccggatttcattgagatatcatttgtgtcactggatggactgccaccccaatgcaggatgttcaggttacaattgattggcttatttcctctgatgaatgtgttcccaggacctatagtgttgtaaatccacaaaatgcttttgtgttaaataggcggatgggaaaactgactttcccccatggcacttaccgaagtgttaagagaatgcctctttctatagggggaggagct

SEQ ID NO: 43971 - DNA, 376 bp, Glycine max
  Clone ID: LIB3139-068-P1-N1-E11
tgaaattttaataaaccgcgatcacaggttgccgcaccttaaaaccaaaacaaaagcaatcgttacttgatttcaagaatttctcaatttcttcctacttctttgtgtacgatttcttaagggaaagaaaatcactctctgtgctggtcacagacttcgtgaatcattttcttttccactcctagtttatttgctgaacactctcctatttgatataggacttcgtgtcagatttaaactttttctgtttctttctcagttctctgtttaatttcaagttcaagctggtgaaattttggattagtgctcccactctcctatctggtataggacttcgtgggtagacttttctacttctctcctttctttcactctc

SEQ ID NO: 43972 - DNA, 380 bp, Glycine max
  Clone ID: LIB3139-068-P1-N1-E12
gtgattgttgtgactcgttcttcttcgtcgttatcttcttcttttgttgtttgtgtgtttgttttttctctcacctgaaaatgtcttgctgcggtggtaactgtggttgcggaagcgcctgcaagtgcggcaacggctgcggaggctgcaagatgtacccagacttgagctacaccgagtcaaccaccaccgagaccttggtcatgggagtggcaccagttaaggctcaattcgagagtgctgaaatgggtgttcccgctgagaacgatggctgcaaatgtggagctaactgcacctgcaacccctgcacttgcaagtgaggtgttggagagctaaagcttcaagcagaaatggcccttagaaataatgataaaaactat

SEQ ID NO: 43973 - DNA, 369 bp, Glycine max
  Clone ID: LIB3139-068-P1-N1-E2
cttccatccaactatatatcaaaacactctatggcgaggtgtgaatccgtttccacgacaatgcccctgaatgcaaaaatattaatagcacttatattccttgcattcgcaatcacggctaccacttcaactcgaatccttgatgaaatagaaacaccagaagaacccaacagtgctgccgaatcccctgttgtctctccacttccacttgttgcagaatccccagttgcggaagtcaaaggagttgaccaacaacatcacacgctctcatttttcatgcacgacattctgggaggctccaaccccacggccagagctgtaacaggcgtggtgacgaatccagctctgaacgctcaagtggcattcgcg

SEQ ID NO: 43974 - DNA, 384 bp, Glycine max
  Clone ID: LIB3139-068-P1-N1-E4
ggctgctgattatgttagtcaggtggatgcttcaacagctgatgttccagctaatagttatgacactaaggttggtgatgatagttctgggctccttttggaagctcaaagaaaggaggtaactatttgtcacactgaggaagccttggtgattaaaaatcatgaagatcatcatttacaaactgattcagaagaggttgtatcttgtatgaagagacagagtgtcttcaaaagttgtttggaattaaatgagtttactcaccaccaggctggaaatgctgattcacaagatgtaagtttcttcattggaggttcaaaattcagcagaggaatctaatgcgaattgttcaattacggattaaaatgaacaggaaaacatcaaac

SEQ ID NO: 43975 - DNA, 369 bp, Glycine max
  Clone ID: LIB3139-068-P1-N1-E6
ttgcaaagcgagctcatgaatttgaaaaacatgttgctcatgaaagcctcaaggatcaaattcctgctgttgacaagttgtattctactaaggttaataagtttgcaaaaattatgaaccttagacaaagtgttgttggtgatcttaaacttcttactgatgggaagttgtatgagggtaagcatattcctgtatctaatattagtgcaggggaaaatcatgtagttcaaatacccttaatggcacaggaggaaattctgtcttctagtgcaagtgatttcagaactgcaatggtgagtaaaaatagcaaacctcaagctactgcaatgcatgtgggagctatagaaattatcattgatagtttcgcaa

SEQ ID NO: 43976 - DNA, 377 bp, Glycine max
  Clone ID: LIB3139-068-P1-N1-E7
cgccaaatcaaataaaatggatactgaaatcgttgagagcattgatgtcacagatgatgcaaggagttttagctgggcagtggacagcgccataaggagtgagactgggtccatttttggagaatctcgtgtccgtagctttgcttcgttagtggacagtgccataaggagtagtagtgctactgaagcagatttggaatcatcccctgtccaggcagaagacagggcgatgaggagtagtagtagtggaactgatttgggaacatccccttttcatgtttttgctaccgcagcgggtatgaagactgttgctgccacccagagttaccgagaattatttaacctgttagagcttatactgataatacttttattga

SEQ ID NO: 43977 - DNA, 380 bp, Glycine max
  Clone ID: LIB3139-068-P1-N1-E8
ggttggtagttgtctcaaaaatctcttgccctttggccataatcaaaaaccaagacactgttcatcaagctgctcaattatcaagccaactttgcttggttccactgcagaatttcagtttattcttatctccgtagattggattgaagtagattccttataagtgggcataagttcaagtgtagagaatgagtcagcctaagattaagcgccgagttggtaagtatgaggtggggaggaccattggtgaaggtacatttgcaaaggtgaaatttgcaaggaactctgagacgggagaccctgtggctcttaaaattcttgataaggagaaagtgctaaagcacaagatggctgagcagatcaggagagaagtagcaaca

SEQ ID NO: 43978 - DNA, 376 bp, Glycine max
  Clone ID: LIB3139-068-P1-N1-E9
aattggaactgtgcctgtgggacgggttgagactggtgtcttgaagcctggaatggtggtgacttttgcaccaactggactgacaaccgaagttaagtctgtggaaatgcaccatgaagctctcacagaggctcttcccggtgataatgttggattcaatgttaagaatgttgctgttaaggatctcaagcgtggttatgttgcctcgaactcaaaggatgatcctgccaaggaggctgctaacttcactgcccaggttatcatcatgaaccatcctggtcagattggaaatggctatgcccctgttcttgactgccacactttccacattgctgtcaagtttgctgaactcatgaccaagattgacaggcgatct

SEQ ID NO: 43979 - DNA, 381 bp, Glycine max
  Clone ID: LIB3139-068-P1-N1-F10
ggtacatatcagtatcaccgacgccggatttgatctaaccggaaagcaatggattaagctggtgcgcagattcctgactgaatggacaggagggccgaatgttgacaccatgagtgcttttgatgtatctggtgtttcgcgtccaagagcagatgtgaacctcttgcaaagtgagactgaaggcattgatgatgagaagattggattttatggaagatgcacgcttcatattattgaacctagatgtctgcccatatatgatcctcttgatgaaattggaagtcaagaagaaaaggaattcacctgtgccagggcagagggttacaagggccgtaggtgggatggttttcagaataatcagtgccaaggtggatgccttgt

SEQ ID NO: 43980 - DNA, 383 bp, Glycine max
  Clone ID: LIB3139-068-P1-N1-F11
ctcgtggtattgatgtcggaaaagggccggccacttgcaaaatttggtgaatgggatgtcaatgatccaacctcagatgaggggttcacagggatttttaataaggccagggatgagaaaaagacaggtggtaacccagattcaccaggaaagactgccactgatcctcatagcaaacctgctgtagagcctggcaaaactcaaactaaaaaatggttttgctgcatgcaaaacccttctgccgaatcatagcatagcaatgggtgctcctgtgaaaagcctgaacagaagaacaatgtttgtgtaactagtgtcacaggattttctctaagataagagctgtcgagtcataagcgaattctacggaatttctattatgtgct

SEQ ID NO: 43981 - DNA, 378 bp, Glycine max
  Clone ID: LIB3139-068-P1-N1-F12
ttcaaacctaacgcagcatcgctattctcttcattccatggctttgcccaaccagcaaaccgtggattaccctagtttcaaactcgttatcgtcggcgatggtggcacaggaaagacaacctttgtgaaaaggcatctcaccggagaattcgagaagaaatatgagccaaccatcggtgtggaggttcacccattggattttttcacaaactgtggaaagattcgattttactgctgggatactgctggacaggagaaatttggtggcctcagagatggatactatatccatggacaatgtgctattatcatgtttgatgttactgcccggctaacatacaaaaatgttcccacctggcaccgtgatctttgcagggt

SEQ ID NO: 43982 - DNA, 381 bp, Glycine max
  Clone ID: LIB3139-068-P1-N1-F2
tgccaatttctcatattctaaatccatcgcggagataagaacagcttgtcatagctttggaccttctgggttgaagtcgcccccgaaacaaggggttactctagggtacacttgccggcttcaaagccccgaacggcacaaatccattgtgcggccggatttgcttgacatcagtctgctgaatgtggtgcaccattttcagctgagggtggggtttaggtaccacaacatgcctgaaggtactgctatagtaaaccactacaagtaccaggtatgggagaccttcaaagccaagttcttcagaagggttgctacctatgtggtggactggcaggaggaccagaacaaagggtcgaaggatagagcaccgggattaggaac

SEQ ID NO: 43983 - DNA, 384 bp, Glycine max
  unsure at all n locations
  Clone ID: LIB3139-068-P1-N1-F4
cggctcgagctcgagccgtagagaatgatgatgaagtctgctatgtgtgcagtggtggttgtagcacttcttcttctggcggaggtggggcccatggctgaggctgtgacatgcaccccaacagagttgagtccgtgtcttccagcaatcacttccggtgctaaaccttccaatgcttgttgcacgaagctgaagcagcaaaaaccatgcttatgtggctacctcaaaaacgctagcttgaagcagtatgttaactctcctaatgcccgaaaaaccgttgcttcttgtgggattccctttccaacttgttaattaattaagccttcttataattaaagtgtgggatatatatatatatatagataaacagnttaatttatacac

SEQ ID NO: 43984 - DNA, 350 bp, Glycine max
  Clone ID: LIB3139-068-P1-N1-F5
gggacctttcattggtgctgcacttgcagcactctaccaccaggtcgtaatcagggccattcccttcaagtccaagtgattcaatcaaaccgttcatgcttaatcaagttgggaacaacaaaaaaaatcaaaacaatgtttctgggtttcggtttcatttcatcaagatgatctgtttatctttttttttttaattttaatttaaagtctttgtattttgtatgtaaagatgtaaaattatgattattaggtggtgcatgtgttgcgtcatgggccaatgttatcctctgcttttaagttggaagaggcccagctcacgtgtgatgtacggctgtgattgtgtaatttgc

SEQ ID NO: 43985 - DNA, 382 bp, Glycine max
  Clone ID: LIB3139-068-P1-N1-F6
aaacccgtgttctgatgcatggagtttggaatttctgaagcgtactggatttcattgcgatatcatttgtgtcactggatggactgccaccccaatgcaggatgttcaggttacaattgattggtttatttcctctcaggaatgtgttcccaggacctattgtgttttaaatccacaaaatccttttgtgttaaataggtggatgggaaaattgactttcccccagggcacttcccgaagtgttaagagaatgcctctttctatagggggaggagctggtgcaaagaatgctattctcatgaatatgccaaatgctgttctttcaatgtggagatattttgttggagatctcgtctttgaagtttctaaaatgacttctccc

SEQ ID NO: 43986 - DNA, 368 bp, Glycine max
  Clone ID: LIB3139-068-P1-N1-F8
attaaatgtacagtctctttcttcatagcatttggaaatttggctgatgacaccatcaattttgaggcttttccccacaagctggtgcaatttggagagattcaggaaaaagttgtattgaaattttcacaagaggaatttcttacagcttggtcaactcaggtgcgtcctacaacaactctgttggctgatgggtgtccatatttgtatgctatggtgcatgatagttcagtgtctacaataccaggtgattttgtcattggtgttaagttgacaaccataaacaatatgtgtgcatatgggctcaatcctggtatttcaggttctcgtcttttgggtaccattcctcagtctatttcacagcaaac

SEQ ID NO: 43987 - DNA, 370 bp, Glycine max
  Clone ID: LIB3139-068-P1-N1-G1
gtgagaaactcctcattctccttcttcttctgctacccatggctttgtcttcttctgagcctcctccaccttcagttcctgctcccgttcaatctaaccctcctccacacttgatgtacaaaaatcgtttacaagagtttacttcaaagtcaggcattaactttcctgtgtatcagaccattaatgagggacaggatcatagtccaaaatttaggtcgactgtgtgggtcgctgatatgggttacacttcccaatccacattttcccataaaaaagctgctgagcaggaggcagctagacttgctttggaaagtatccttaagaggaccagagatgaaggactctctcttgcaatcagatttctccattt

SEQ ID NO: 43988 - DNA, 385 bp, Glycine max
  Clone ID: LIB3139-068-P1-N1-G10
ggccaggcaagccccactcaaccaccacacctctcctcgttcacgctacccctttctgctcttcttctacctttcaagttttaaaagtataaagatggcagagacattcctatttacctcagagtcggtgaacgagggacaccctgacaagctctgcgaccaaatctccgatgctgtcctcgacgcttgcctcgagcaggacccagacagcaaagttgcctgcgaaacatgcaccaaaaccaacttggtcatggtcttcggagaaatcacgaccaaggccaacgttgactacgagaagatagtgcgtgacacctgcaggaacatcggcttcgtctcaaatgatgtgggactggatgccgacaactgcaaggtcctcgtcaacatt

SEQ ID NO: 43989 - DNA, 358 bp, Glycine max
  Clone ID: LIB3139-068-P1-N1-G11
ctcctcagcagtcgtcagaaagactccataacccaaaaatgccttttaagaggtacggtgagattggaagggttgctcagatcaactatggcaaagagtacgggcggctcgagatcattgacgatgtcattgaccagaatagggctattggtgatgctcccgacatggtgaggtcccaagtgaacttcaagaggctctcgctcactgacatcaagattgatattaagaggattcccaagaagaaggatctcattcaagccatggaggctgctgatgttaaaaacagatgggagaagagttcttggggcacaaaactgattgtgcagaataggagggcatccctcaatgactttgatag

SEQ ID NO: 43990 - DNA, 71 bp, Glycine max
  Clone ID: LIB3139-068-P1-N1-G12
attaatcgaccagaactatgtaagtactttttgttaatccgatcactttacaatcgcttttcctttatacc

SEQ ID NO: 43991 - DNA, 384 bp, Glycine max
  Clone ID: LIB3139-068-P1-N1-G3
caaagagaaaggtatggttgttccttcatgggcaccccaaattcaagtccttagccacagttcagttggtggattcttgactcactgtggttggaattcaatcctcgagagtgtgctaaagggtgttccattcatcacatggccactgtttgctgagcagagaatgaatacggttttgctatgtgagggtctcaaagttggagtgaggccaagagttggtgaaaatggtttggtggaaagggttgaaattgtgaaggtgataaagtgtctaatggaagaggaagaaagtgagaaaatgcgtgaaagaatgaatgagttaaaagaagctgcttttaatgctatcaaagaagatgggtcttctacaaggaccctttctcagttagc

SEQ ID NO: 43992 - DNA, 191 bp, Glycine max
  Clone ID: LIB3139-068-P1-N1-G4
gaacgagacacatgtgttggaagagtcacaggagaatggggcaacaacgctgggcagtatcttgctgcggataacattgagagcgctataaagactaatgaaagcctcaatggacaccacaagaatgtcaagtgcatgtgtgctgaagtcacttgtacaaactagtatattgagcaagggtcggttgatct

SEQ ID NO: 43993 - DNA, 382 bp, Glycine max
  unsure at all n locations
  Clone ID: LIB3139-068-P1-N1-G5
ggtagttcttaagtgaagcaaataaatgatggccattggtctaatgaacatagctggctcttgttcttcatgttatgttacaacgggatccttttctcgatcggctgttaactataatgctggagcacagacaacagtttcaaatataatcatggctgcagctgttctagtgacacttctgtttctcatgcctcttttctactatacaccaaatgttgtcttagcggccattatcatcactgctgtgattggtctaatagattatcaatctgcatataaattgtggaaggttgacaaacttgatttcttggcctgtttgtgctccttttttggggttctgttcatttcagtgcctttaggtcttggtatagcggntatcata

SEQ ID NO: 43994 - DNA, 388 bp, Glycine max
  Clone ID: LIB3139-068-P1-N1-G6
caaagccccattccataaccctaaccctaaatccgaatcttctcatgaaacctcccacgcaacactccaccgtttcagaatcaggttcgattccctaaccctccacaaatcccctttcttttctttgcagtttctccatggagggctctgcagaggatctcggagcccccgagtcatgggaggtcgctgatttggacgagtccatgaaccgcttgaacctcatggtcttttccaacaacgattctaagcaacctcaccagcgtctcgccgattataatgacgatgatgctccgctgccgccgcctccttcgtccagttgcgacgaggtttccgatgacgccatcaatcaggttgatcagttccttcgcgaagccattcagaaccctcg

SEQ ID NO: 43995 - DNA, 121 bp, Glycine max
  Clone ID: LIB3139-068-P1-N1-G7
gctcaactcgatagaggtatgtggacctaataatggatttgaaaagtgaacatctgagcggacaaagcaaactaaacgggattcgagcttgctcattgacaaacccaaacactctacagct

SEQ ID NO: 43996 - DNA, 288 bp, Glycine max
  Clone ID: LIB3139-068-P1-N1-G9
cggctcgagcaggctactgccagatcttctgaaaatgcggaatcctctgcatgatctggaatttgtgttttcttttgcttgttcgtttgtttaattcaataaaggaaattaggcatgaccctcttgttgagtatgctctgcctatttgaaaatttccacacctcttttaattatcgtaatgatgtgtgaagtgtgtgttattttaaaaaaaaaaataaaaaaaaatcatatactaaaaataacatataaattaccaaaaaatatcttctcctcttctaattaaacttt

SEQ ID NO: 43997 - DNA, 355 bp, Glycine max
  Clone ID: LIB3139-068-P1-N1-H1
ctctgatttaagctattttatgtggtcttctattgatgtaagtgtttaagcttatgtgaaccagcaagtacatcaggtgtgcaattagctttggattattctgaatgtgatgtgcatctaattgattgaaggaataatttggtcaatcaacttcgatattttttgtttttaaacccttttttgaatttttaagtcaaatataaatctattatatgtacaagaaaaacttatcatgtgaacactaaagatatttgttaaaagtttatatttgatttcaacttggtcttgttaactgttaatgccctgaaaattgtgtgaaaaaaccaaaatgcttcaatttcattttcttatatgc

SEQ ID NO: 43998 - DNA, 385 bp, Glycine max
  Clone ID: LIB3139-068-P1-N1-H10
gatagaaattaaattaatggccttcgtcggtgcttccaaaatgatgtcttcatttggtgctcttttggcaatacttttactactcatgtcctctattatgctggcaactgcagccaaaccactcgggcgaaaattactacaacaaggttatggcgggccagttcccgactatggccatcgagatccagttcccgtccgcccaacaggtcgttatcgccggccagatccatttcccgcctatggccatcgagatccagttcccgtccgcccaatacattatggaccaccatgaaaccaataccatcgatccaacggggtgataatggtgtgatttcataagtgtggtaaaaactactagtacttaataaaaatgcatgcatgtcac

SEQ ID NO: 43999 - DNA, 351 bp, Glycine max
  Clone ID: LIB3139-068-P1-N1-H11
gtatagcattggcctgtgctatgaatagttcttttagggggcgcgccagttctgatatttacaccatctgctctcaagactgtgaattatggaatcctgcttgcacaaaagcaatgactatgtcatttaatccaaacccgtgttctgatgcatggagtttggaatttctgaagcgtaccggatttcattgtgatatcatttgtgtcactggatggactgccaccccaatgcaggatgttcaggttacaattgattggtttatttcctctcaggaatgtgttcccaggacctattgtgttttaaatccacaaaatccttttgtgttaaataggtggatgggaaaactgactt

SEQ ID NO: 44000 - DNA, 370 bp, Glycine max
  Clone ID: LIB3139-068-P1-N1-H12
catctctcttcccagttctcacctcaccgctgcatcttcacgtcgtctctaacgagggaaaatgagtcgaggaggtgcagcagcagcgaagggaaagaagaagggtgctacattcaccattgactgtgcaaagccagtagaagacaagatcatggacattgcttctctcgagaagtttcttcaagagaggatcaaggttggtggcaaagctggtgctcttggtgactctgttaccgttacacgtgagaagactaagattattctcacctctgactgtaacttttccaaacggtatttgaagtacttgacgaagaagtacttgaagaaacacaatgtgcgagactggctcagagtgattgcttcaaacaag

SEQ ID NO: 44001 - DNA, 386 bp, Glycine max
  Clone ID: LIB3139-068-P1-N1-H2
cacaactacaagaaagaacttccttataaccaaaaccaacaacaactatggcaagttatcagaagcactacgatgatcagggtcgcaaggtcgacgagtatggcaatgttgagaggcaaactgacgaatatggcaacccggttcatgccactagtgtcacttatgtagccaccaaaagtgttggtggctacaatgatgacgctaataagcaacatgatattactggtgtctatcccgagaaagacaccggtagacatcattttggtcgtggttacgacggtgacactaacaagcaacatgatgctactggtgtttatcccggaatagacattggtagagatcatgggacttccggtgtttatggcctaaacaccgacagacatcat

SEQ ID NO: 44002 - DNA, 371 bp, Glycine max
  Clone ID: LIB3139-068-P1-N1-H3
tttccctttcacacttcacaaaaaagaaatactaaatgatttgtcagtagcagcaaacatgtccagcaagggaaaggagatagcagaaggatcatcaacaacaacaacagcaacaagatcctctcatggaggtgacgatcatcatcatcaccacaatcagcagcagcagcaacaacaacaacagttaccactgagtcgctatgagtctcagaagagaagggattggaacacttttggacagtacctgaggaaccaaaggcctccagtggcactttctcagtgcagctccaaccatgttcttgagttccttcgctacttggaccagtttgggaagaccaaagtgcactcacaagggtgcttgttctttgggc

SEQ ID NO: 44003 - DNA, 220 bp, Glycine max
  Clone ID: LIB3139-068-P1-N1-H4
cattgattccgtaaccagtgttgaagaggcttacaataagctaatagttgaacttgagaaaagtgttcctacattggttggcattgaatgtcccaaggatgagaaacttcctcgtcgcaaaatttttgacaaacctaagacgcgctgcttcactattctccctatggagtttaatcttgtggttcgtcagaagtttttaaattttgtgaggttcattatg

SEQ ID NO: 44004 - DNA, 300 bp, Glycine max
  Clone ID: LIB3139-068-P1-N1-H5
agaggccattcgagttggatccgaagggtgatatagtgaagcaaatattggcgaaggcgatacatctggcggaccaagtgaccaaagacgacgactgagccagctgcttcaagcatgaatgcagtgagctgaaggctaacacggagaatctggcggggctgctgcttcaggcggctcgtgcgagttacgatctatacgagcgtaccacgcgctcgatgatcgacgaaacaaaacacgtcctcgacaaggcgctcggcttggccctcaagtgacgcggcaacggcctcatgaagcgcgttt

SEQ ID NO: 44005 - DNA, 358 bp, Glycine max
  Clone ID: LIB3139-068-P1-N1-H6
ggatggcggtatatttaagaagataattactgagggggagaaatgggagaaccctaaggatcctgatgaagtattggttaagtatgaagttcatctagaaaatggaaagcttttagcaaagtctgatggggaggagttcacagtcagagagggtcattattgtcctgcattgtcaaaggctgttaaaaccatgaagaagggagagaaagtgcttttgacagttaagccacaatatggatttggtgagaaggggaagccagaacaaggggatgaaggtgcagttccaccaaatgcaacattgcagattactcttgaattagtttcatggaaaactgtttcagaagtaactgttgacaag

SEQ ID NO: 44006 - DNA, 376 bp, Glycine max
  Clone ID: LIB3139-068-P1-N1-H7
aaggggaagatccgtgaagtgctaaggaattggcctgagaagaacattcaagtcatagttgtaactgatggagaacggatcctgggtcttggggatcttggttgtcaggggatgggaataccagtgggaaaactttctttatatacagcacttggaggagtgcgcccttcagcttgtttgcctattaccattgatgtgggtacaaacaatgagaagctgctgaatgatgaattatacattgggctaaagcaaagacgagcaactgggcaggaatatgctgaacttatgcacgaatttatgacagcagtcaagcaaacttatggggaaaaagttctaattcagttttgagacttttgcaaccacaatgcttttgatc

SEQ ID NO: 44007 - DNA, 375 bp, Glycine max
  Clone ID: LIB3139-068-P1-N1-H8
ccattctgcgtagtgatctattggcaaattttttgacagagggcaattttagagcaagtgttgatttgcagcgcactcatcgtattaaaggaatgattaaaatggtggccacagttggtattcctgagaatacaggtatagcattggcctgtgctatgaatagttcttttagggggcgcgccagttctgatatttacaccatctgctctcaagactgtgaattatggaatcctgcttgcacaaaagcaatgactatgtcatttaatccaaacccgtgttctgatgcatggagtttggaatttctgaagcgtaccggatttcattgtgatatcatttgtgtcactggatggactgccaccccaatgcaggatgttc

SEQ ID NO: 44008 - DNA, 361 bp, Glycine max
  Clone ID: LIB3139-068-P1-N1-H9
cgggatccgtgattttgattcatctgtacttgtagagcctttttctactgcaaagggatggatgacaagtgctaactaagcactttcttcttcttcttcttcatcccttcatcgccaaacacaatgaaggaattgggcgtggttgcaatcctcttttcaatagagttcttggacgttatcgtctacactgtaagcaaagcagccatgaagaagggcatgaatgactttgtctttgtcatgtactccaatgccttcgcaacttgcctcctccttcccataaccttcttcttttacaggaaaagacctcttcctccactcacatatttcatagttgcccaattgtttattaatggctttttaa

SEQ ID NO: 44009 - DNA, 323 bp, Glycine max
  Clone ID: LIB3139-069-P1-N1-A1
ctaaagtgagaaagaaaaagggtgggaaaagaggcagacgtgttcttgggagctaacaaattctcatagaggcaacacgatcggaactgcgggtcatagccaagacagatggaaatggtctacacatatacacacccgcgctccactattggagccgtaccaacttactttttggtccttgtaccgagacataatagtctagtttgtagccacttttgtctatgtttacataaccatcttaaaactgatgggtgttaattagttcagattgaagcgtgctactgtttgcattcaaggcattgcttgggccttgggtggcatga

SEQ ID NO: 44010 - DNA, 102 bp, Glycine max
  unsure at all n locations
  Clone ID: LIB3139-069-P1-N1-A10
ctttttcttttttttgaaaaaaaaaaaaaaaaaaaaaaaaaattataaaaaaaagggggggncttttattaaaaaaaataaaaaaaccaaaaattaatattt

SEQ ID NO: 44011 - DNA, 369 bp, Glycine max
  Clone ID: LIB3139-069-P1-N1-A11
ctgaaatggccgctagaagagtaactaaaagtgcagttaactggactgcattaagcgaaagggttcctgaacaccagcgtgcccaatttctagcgttcaaagctaaatctgatggctatctgaggcgtgtattggccaaccccgaacaaccaccagcgatagattgggcatactataaatccaaagtaccagttgctggaatggttgaagattttcagaaacagtatggagctttatcaattccttaccctccagacactcttaaatcccaacttgatagcttggagaaggaaatcaagaatgatatagaaaagtttaaaactgaatccaatgctcgtatttctgagtacaagaagcaattggctcaca

SEQ ID NO: 44012 - DNA, 338 bp, Glycine max
  Clone ID: LIB3139-069-P1-N1-A12
ctctctctctcattcacacgaatcacactctccacagtgcgattcattcaccaatggatcgcaacggtgttctctctcttgcattcatctgcattgtagtcgccggcgtcggaggccagtctcccgccgcagcgccctcgaacactccggcaacccccgccgccgccactcccgcccaagcaccttccacaccgaattcaccagccccagttgcttctcccaaatcatctccaccagcttcgtctcctaagcccgcaaccgcaacccctgcttcgtcgccggcggcatcttctaccaccacccccgccgcgcctgctccagcgaccaagccacctgca

SEQ ID NO: 44013 - DNA, 352 bp, Glycine max
  Clone ID: LIB3139-069-P1-N1-A3
gggatttgcttttactgatctcagtcttccacctcactgtcctagattgtggggtttctcttttcagttctcatcgtaactaccatagttgctgctccgaaaagggttttcctaacaccgcccatgcaatcaatttccgggttgtacaattcgtgaataggttgttgcttgttctgaaaagtagtggatagtaaaaaatattgaactttttttgagagaaaaatgcagagtaaagaagctgttgtggaagatggggaaataaagagtgtgactgctgtagggtctgaaattgatgggtggaccaattttggggacgatgacataatgcagcagcagtatacaattcagtctg

SEQ ID NO: 44014 - DNA, 353 bp, Glycine max
  unsure at all n locations
  Clone ID: LIB3139-069-P1-N1-A4
attcaggaaaaagttgtgttgaatctctccaaactgcaccagcttgttgngaaatttctgtattcagatgtcatcttaactaccatagttgctgctccaaaaagggttttactaacaccgcccatgcaatcaatttccgggttgtacaattctttaataggttgttgcttgttctgaaaagtagtggatagtaaaaaatattgaactttttttgagagaaaaatgcacagttaagaagctgttgtgtaatatggggaaataaagagtgtgactgttgtaggttttgacatcgatggttttgaccaattttggtgacgatgacataatgcatttgcagtatacaaattcattct

SEQ ID NO: 44015 - DNA, 159 bp, Glycine max
  Clone ID: LIB3139-069-P1-N1-A6
gccgtgccgtggcctgctcccgtacgtcagcattgagttcgggaccagctggatttgcctttccaatcacaacgggaagtgccggtcccttcaacgcactcattgtcacccaaactgttaatcccccagcccacccccgcattgtcaacgccaaggccg

SEQ ID NO: 44016 - DNA, 374 bp, Glycine max
  Clone ID: LIB3139-069-P1-N1-A7
cggctcgagctcggctcgagggatccaccaatctccaaccttcttctccactgttccgtttctctctccaacggagagtcttttgttttttgtggcgagtttgttgcacgtttaagaagcaatggcacgcaagaagatcagagagtatgactccaagaggttgttgaaggagcactttaagagaatctctggccaggagttgcccatcaagtctgcacaggttacagaatccaccaatttcagtgagctagcagagaaggaaccctggcttttatcttcaaaattggttgtgaaaccagacatgttatttggaaagcgtggcaaaagtggtttggttgccttgaatctagatttggcagaagttgattcttttg

SEQ ID NO: 44017 - DNA, 371 bp, Glycine max
  Clone ID: LIB3139-069-P1-N1-A8
cagaaatggactctctccaccactctcatcgtcactgcacttggagcaattttgcacgtaatatccacttcactgcttggtataacggcaattaccatggcaaacaccattgctggtgaagaaactgtgcataaggttgcttcacttttgcttgtatttttgggtggtagttatataattctgtttctgatgggaaagggtggccatagtcattcacacaaccaacccatggagaaaatggctgtagctggacttattctcgttcctgcattgtctccttgtgctacaacactcccggtctttcttgctgttggaaattcctcttccatgatggtgcttgccatcatagtactactattcagcacaataac

SEQ ID NO: 44018 - DNA, 373 bp, Glycine max
  Clone ID: LIB3139-069-P1-N1-A9
cgtagataagttactgaccaggctggcttcgcgagaagaggctcatgttgtgttgatggagctgatgaagtggagatcagaggggcttgatccgctatatgcacaggctgttcagatgaaacaaagggatccagtaaccgggaagatgaaagttgcaaatccgttaagtagtagacttgtctgggaaacttgtttgactgagtttaaatcacttgggaagattgcagtgagactcattttttttgcatgcaacttcgtgtgggtttaagagtaattggtcttttatgaggaaaatttcagctaataagcactcaagagttgccttggagagggctcagaaaatgatatatattgcagctcatgccaaacttga

SEQ ID NO: 44019 - DNA, 354 bp, Glycine max
  Clone ID: LIB3139-069-P1-N1-B1
ggaatggctgcatctttatggttgcaactattttcttagctgaataaatatccctatgaatcggcttcaccacgaaatctgtctatttcttgtcatgtaaaaagaacatacctttgcgtgcatatattcaatgagttaataaactgaagacagttcatggtacgattgcagctgatctagaatatatcacacttagttgaatgtctgggtgattgaatgcttactccttatacgtataattaacggagtatcattatctgtgttggcagtctccattcattaacaggtattacggataaggctcatgaggctctgtgattggctccaagacaatgatgacaatttttctggttt

SEQ ID NO: 44020 - DNA, 366 bp, Glycine max
  Clone ID: LIB3139-069-P1-N1-B10
aggtttttagggtttacaccgagcagccacacctcccgcagcagccatggttctcaaaactgaactatgccgattcagtggtgccaagatctacccaggaaagggcatcagatttgttcgtggtgattctcaggttttcctgtttgcaaactcaaaatgtaagaggtatttccacaatcgcctgaagccttcaaagctcacctggactgcaatgtacagaaagcaacacaaaaaggacattgctcaagaagctgtgaggaagaggagacgtgctgccaaaaagccttactctaggtccattgttggtgcgaccttggaagtaatccagaaaaagagagctgagaagccagaagttcgagatgcagc

SEQ ID NO: 44021 - DNA, 368 bp, Glycine max
  Clone ID: LIB3139-069-P1-N1-B11
gggttttggtgtttgttgttgaatcgtgaaaatgttcagaaaccagtacgacacggacgtgaccacatggagccctgcggggaggctgttccaggtggagtacgctatggaggcggtgaagcagggctcggcggcgatagggctccgatcgaagacccacgtggtcctcgcatgcgtcaacaaggccaactccgaactctcctcgcaccagaagaagatcttcaaggtcgacaatcacatcggcgtcgccatcgctggcctcaccgccgatggccgcgtcctctcccgctacatgagatccgaatgcatcaactataattacacctacgagtcgccgctccccgtcggcagactagtcgttcagctcg

SEQ ID NO: 44022 - DNA, 379 bp, Glycine max
  Clone ID: LIB3139-069-P1-N1-B2
tctgaatcaaaatcagaaacgataatggctacaccggaccacctcttcaacctccgcaacaacttctacctcggcgcttaccaagccgccatcaacagcagcgacgttgccaacctctcccaagaagataccctcgagcgcgacaccctcgtccaccgctgctacatcgccctcggccagctccagttcgtcatctccgagatccacgacgatgctcccacaccactccaagccgtcaaactcctcgccctctatttctcctctcccgacaccaaggattccgccatcgcgagtctcaaggagtggctcgccgatcccgctattggaaacaacgccacgctgaggctcgtcgccggtctcgtcttcctccacgagaatg

SEQ ID NO: 44023 - DNA, 369 bp, Glycine max
  Clone ID: LIB3139-069-P1-N1-B3
ggtggaggtaccattctgcgtagtgatctattggcaaattttttgacagatggcaattttagagcaactgttgacaccattttaatcattcctttaatacgatgagtgcgctgcaaatcaacacttgctctaaaatggtggccacagttggtattcctggaaatacaggtatagcattggcctgtgctatgaatagctcttttagggggcgcgccagttctgatatttacaccatctgctgtcaagactgtgaattatggaatcctgcttgcacaaaagcaatgactatgtcatgtaatccaaacccgtgttctgattcatggagtttggaatttctgaagcgtaccggatttcattgtgatatcattt

SEQ ID NO: 44024 - DNA, 363 bp, Glycine max
  Clone ID: LIB3139-069-P1-N1-B5
gttgttcaagaatggcaatttgtaagaaagatgtttggagagttgaatgtggaatcccttctggatttccgctcacagttatttgtaatagcatttttaatgagatgctcattagatatagctatgaaaaattactgcgccaggctaaagctccaagtatgtttttacaatccttcaaaaattttgtttctttgtgtgtgtatggtgatgataacttaattagtgttcatgaatatgtcaagccttactttagtggttctaaattgaaaagctttctagctggtcataatatcaccattactgatggtattgacaaaactagtgcaactttgcaatttagaaagttagcagattgtgattttc

SEQ ID NO: 44025 - DNA, 335 bp, Glycine max
  Clone ID: LIB3139-069-P1-N1-B8
cgtagtttctcaccactttcacagtacgaatatgtggctgtcttgtgcgattcgagacaaactttcataacatgtcggttttccaggtccttcttacaggtgatgagcttctctatcactacctacgttacacggaaagtgcaaatgatatgctataagaagataagggaagagaggcttggtctcatatcgcgatgggtctacatactaacgtgcaaggttaaatatgttgtgctgaaggctttgggtcacacttgaacctttaatgagttgcaggcttcaatttttgaacttcagcacctgcattgcttgatggaattcgtgaatgacacttg

SEQ ID NO: 44026 - DNA, 365 bp, Glycine max
  Clone ID: LIB3139-069-P1-N1-B9
aaaaggcaacgctggaattggtaggagaactatgcgcaacagtctgaatttaagcatgagagatgcaccaagtgctcaatagcttatgattgtgctcattatgtacaggtacttttggctttgggtaaaatagaaattttatcccctgtatgaaatactatttgcccactttataatttatattcttatgaatttttaagatgttagaggtcaaaaggcatcacaaatggtatatcttgtaatcaccaacatacttctaatattatgtggtaggccatctctagtggttggaaaagacatttagccaacagatgttagtctctcactcttggatgttaaagttccgagtcattggtacatataca

SEQ ID NO: 44027 - DNA, 364 bp, Glycine max
  Clone ID: LIB3139-069-P1-N1-C1
gctcctctgattcattcacccaatttttttctgtcctcttttcctctcagaggagcctctgagtctgctcaggtgttccttgtcaagagatccttttgtttttgaggtgtgaagggaaagagaaaaaagatgaatcagtgtggttatcagcagaagaaggccttgacaagctgtgaggagatgaggatggaatctgtggtgtgccctaaacctcgaagattgggcctgttgaaccactcaacctttgataaccacatcagacccttgaggccaccctttatcaactaccaatcagaaattgaagattcaggagttggggctgagcttatggacattattctccccaagagatctggggggcaag

SEQ ID NO: 44028 - DNA, 365 bp, Glycine max
  Clone ID: LIB3139-069-P1-N1-C10
aatcttcccaatagaggtatgtggtcctaataatggttttgaaatgtggagttctgagtgggcaaatcaaacttcatggcatttgagtttccttattgacaatcccaaacagtctacagtttttgatattctcttgggaatctctcaagattttgaaattgctggtaatactcttatgccagctttttctgttccacaggctactgccagatcttctgaaaatgcggaatcctctgcatgatctggaattcgtgttttctttcgcttgttcgtttgtttaattcaataaaggaaattaggcatgaccctcttgttgagtatgctctgcctatctgaaaatttccacacctcttttaattgtcgta

SEQ ID NO: 44029 - DNA, 367 bp, Glycine max
  Clone ID: LIB3139-069-P1-N1-C11
cggctcgagaatggtggccacagttggtattcctgagaatacaggtatagcattggggtgtgctatgaatagttcttttagggggcgcgccagttctgatatttacaccatctgctctcaagactgtgaattatggaatcctgcttgcacaaaagcaatgactatgtcatttaatccaaacccgtgttctgatgcatggagtttggaatttctgaagcgtaccggatttcattgtgatatcatttgtgtcactggatggactgccaccccaatgcaggatgttcaggttacaattgattggtttatttcctctcaggaatgtgttcccaggacctattgtgttttaaatccacaaaatccttttgtg

SEQ ID NO: 44030 - DNA, 371 bp, Glycine max
  Clone ID: LIB3139-069-P1-N1-C2
cctgagcccgatctctctctagatgcaaccgtaggagagagaacctctgactgcgatagagtaagaccctaccgcaaacgctctgctatcattatcaccacagagtgtcacttgaccgacatcgcagaacgtatccacgatcctggctcgctgcttctgatacacttggactagcttgtggcaacaattacaatggcgacttcagagcgtcaagggcctcctccaactcctgcagctgatattgctggcaatgctcttgtggatcagttctgccacctcttgcacgaaagccctaggcttgctcatatgatttaccaagatgtcactaagccaggccaccctgagcagaacggcattatgggtcttacaac

SEQ ID NO: 44031 - DNA, 171 bp, Glycine max
  Clone ID: LIB3139-069-P1-N1-C3
gtccatatttgtatgcaatggtgcatgatagttcagtgtctacaaatatggacaccgagccgcctaccgtgctgttgcccgacgcacctgatttgtccaagctgtgagaactttgttggctgatgggtgttcatatttggttgccctggactatgattgttcaacgtgtac

SEQ ID NO: 44032 - DNA, 303 bp, Glycine max
  Clone ID: LIB3139-069-P1-N1-C4
ccacaataaacccctttctctcaattttcattcaacaccatggcaagaaaaaccaagtccattttcttcaccttcttattatgctcttgggtggtggtagtagtagcccaagaggtagcaattgcaaaatccgaaagtgaagcattaggggaaccggaattagaaaaaagagaaacacttgaaatcatcattggtggtggtggtggtggtggttaccctgctccttctccttctccatcttcccctgcatattgcccaccttctccaccaaaaccactgagccatttagaaaaagcgcgtcta

SEQ ID NO: 44033 - DNA, 370 bp, Glycine max
  Clone ID: LIB3139-069-P1-N1-C5
ggctcgagcatgaacctccatacttcaagggcatgaccatggatcctcctggagctcatggtgtgaaagatgcctattgtctgctgaattttggtgacagtataacgaccgatcacatttctcctgctggtaacattaacaaggatagtcctgctgcaaaataccttctggagcgaggtgtggaacaaaaggacttcaactcttatggaagtcgtcgtggcaatgatgaagtgatggcaaggggaacttttgccaacattcgtcttgttaacaagctcttgaatggagaagttggccccaagacagttcacattccgactggggagaagctttatgtgtttgatgcagcccagagatacaaggctgaagg

SEQ ID NO: 44034 - DNA, 125 bp, Glycine max
  Clone ID: LIB3139-069-P1-N1-C6
gtactcacttactcactcactcgcaagcaaaaaaaaaggattccacccccggagaaagatgggggggaaggggccagatttttcctttggagcgaacaaatttccccagagacaacccatttgga

SEQ ID NO: 44035 - DNA, 370 bp, Glycine max
  Clone ID: LIB3139-069-P1-N1-C7
gacaagaacaaaacactggaccaggttacttgtggaaggatcaggattgaaatttgaagttaattttctatataccttgcttctttctcttcctggttgcatatccatgattatcatttatccatcatccactccttcattacattttaggacactttgatggttccttagttacttacttctcactcactggttgcagatattttcaccacacaacctgtgaaccttgcctactactactcctatattcatttcctttttaacttcttttctgaaaccttctgctgaactaaggctccgtgtatttcaaggccttgcagcattttttttcttttacttgactattttacactatttttgcttttggttt

SEQ ID NO: 44036 - DNA, 371 bp, Glycine max
  Clone ID: LIB3139-069-P1-N1-C8
gagaacaccattgaattttgattctagcaagcagagcttttgtcagttttctattgaccttctcggtggaggaatcttagtggacaaaactggagattggatcacacttatacaaaattctccaattagtaacttgttgagagttgctgcttggaagaaaggctgtttaatggtcaagattgtgatgtctgggaatgcagcagtcaaaaggagtgattgggcctcattggtacaagtgtttttaacaaacagcaacagtacagagcattttgatgcatgtaagtggacaaaatcagaaccacattcctgggaattgatcttcccaatagaggtatgtggtcctaataatggttttgaaatgtggagttctg

SEQ ID NO: 44037 - DNA, 368 bp, Glycine max
  Clone ID: LIB3139-069-P1-N1-C9
caaggtttcagcttttgagtaccactaccaatggtgattttgttcaagggaaagatctcgcaatggttaaagttaatgtagcatgtgctgctgttggcttgacatcaagttacactccaactccattgttggaatctggtttgcaaaaagacagagggttaattgtggagtattttggaaggatgtcttacgttgctcataacgttaatcagccccaagagaaagatttgttagagggaaatttttcctttgatattaaatctcgctctagattggaaaaagtttcctctacaaaagcacaatttgttagtggaaaaaccttcaaatatgatataattggtgctggttcacattcttcaggagatttt

SEQ ID NO: 44038 - DNA, 375 bp, Glycine max
  Clone ID: LIB3139-069-P1-N1-D1
ctctcactcttcttcttcttcttcttcatcctttctgatctgtgctgttttttcagggtacaacaaaattgggtgctttcggttaaactgtgatgtctccgccagtgctgagcataggggaggaggagggtaaaagcaatgtcactttgttggtttcctcatcaaccaccatggaaagtgtgtgtctcaagagcttagaatttaaagagcgcaactacatgggattatctgattgttcttctgtggacagctcggttccgtccttctctgaagagactaaaagtaatctgaacctgaaagccactgaactcaggctcgggcttccaggatcacagtctcctgatagagattctgatctttgcttaagaagctcaa

SEQ ID NO: 44039 - DNA, 358 bp, Glycine max
  Clone ID: LIB3139-069-P1-N1-D10
gtctcttctccttcttctctgatttgaaggatttgtgtggctggagatggtggtttcggggccgatcacgccggggcaggtgtctttcttgctgggggttattccagtttttgtttcatggatatattcagagtacttggagtacaagaaaccctcatcttctcccaaagttcattcagatgtttgtcttgaagagttggggaaggatgcaattaaggaagatgatcgggccattttgctggaatcagggcttacaagatcagcattagcaaaattccatccatcatctgtcaaattgaatttgattcggtttttgaccatggatgattctttcttgttagaaaatcgagcaactttg

SEQ ID NO: 44040 - DNA, 366 bp, Glycine max
  Clone ID: LIB3139-069-P1-N1-D11
ctcgagccgttttgtgttgaataggtggatggggaaactgactttcccccagggcacttcccgaagtgttaagagaatgcctctttctatagggggaggagctggtgcaaagaatgctattctcatgaatatgccaaatgctgttctttcaatgtggagatattttgttggagatctcgtctttgaagtttctaagatgacttctccctacattaaatgtacagtctctttcttcatagcatttggaaatttggctgatgacaccatcaattttgaggcttttccccacaagctggtgcagtttggagagattcaggaaaaagttgtattgaaattttcacaagaagaatttcttacagcttggtc

SEQ ID NO: 44041 - DNA, 368 bp, Glycine max
  Clone ID: LIB3139-069-P1-N1-D12
ggctcgagaagacaaggtacagatatacacataacaataatctgataaagcctcctccttccttctgttttgtcatcgtgaatgttcacgttttttcacatacacaaaaacaccatcaaaagctgtatctataataagaaccgagagtaagaaccatcactaactgcatatgcacagagagtgtgtatgagaacataaagcaaagtcattttgtgaaggtgaattgctgaagagatagcagatttttgaaggaagatgaataactctgtttcagaaaacagtttcatcattgagagtgatgaagaagatgaggagaaggatttgaataaaggtggagttgatggaaacgattctgattcttccaatta

SEQ ID NO: 44042 - DNA, 369 bp, Glycine max
  Clone ID: LIB3139-069-P1-N1-D3
aagaaaagaaggaacatgctgctgacgtggcagaagagacagaaaaagaagctgcagaagttacggtaaccgaaactgaggttgttgaagagaaagtggcggtttctgcttctgctgacgaggatggagcgaaaaccgttgaagccatcgaagaaagcgttgtgtctgtgacagtgactgtctccgaggaaccaaaggtggaagctgtttcactttctgcttctcccgaagaggtttgcatttggggtgtgccgcttctcgctgatgacagaagcgacgtgattctgttgaagtttcttcgtgctcgggacttcaaggtgaaggaggcattggcgatgataaagagcacgattcggtggaggaaggagt

SEQ ID NO: 44043 - DNA, 371 bp, Glycine max
  Clone ID: LIB3139-069-P1-N1-D4
cggcttcttttcttccaagattaagtttcagtagtaatgggtaaggaaaaggttcacattaacatcgtggtcattggccatgtcgactctgggaagtcaaccaccaccggtcaccttatctacaagctcggaggtattgacaagcgtgtcatcgagagattcgagaaggaagctgctgagatgaataagaggtctttcaagtatgcctgggtgcttgacaagctcaaggctgagcgtgaaagaggaatcaccattgatattgctctgtggaagtttgagaccacaaagtactactgcacagtcattgatgcccctggacatagggatttcatcaagaacatgattactggaacatcccaagctgactgtgc

SEQ ID NO: 44044 - DNA, 369 bp, Glycine max
  Clone ID: LIB3139-069-P1-N1-D6
ctttccgcttcaggttcagcttcaacttcaaattctcagtgaaaccaattcagctgagtccaaatcccaaatccgaatcaaaatccgaagtgagatttgcgatggagaggcttcagcgaatgtttgcaggtgcaggtggagcgctagggcacccttccccagattccccaactctcgattccttcgagcaggtctacatcttctcactcgctcttctcaagatgcttaagcacggaagggctggggttcccatggaggtgatgggtttgatgcttggagaattcgtggacgagtacaccggtcgtgtggttgatgtcttcgcaatgccgcagagtggcactggtgttagtgttgaggctgttgatcacg

SEQ ID NO: 44045 - DNA, 367 bp, Glycine max
  Clone ID: LIB3139-069-P1-N1-D7
atcagaaccacattcctgggaattgatcttcccaatagaggtatgtggtcctaataatggttttgaaatgtggagttctgagtgggcaaatcaaacttcatggcatttgagtttccttattgacaatcccaaacagtctacagtttttgatattctcttgggaatctctcaagattttgaaattgctggtaatactcttatgccagctttttctgttccacaggctactgccagatcttctgaaaatgcggaatcctctgcatgatctggaatttatgttttctttcgcttgttcgttcgtttaattcaataaaggaaattgggcatgaccctcttgttgagtatgctctgcctatttgaaaatttc

SEQ ID NO: 44046 - DNA, 345 bp, Glycine max
  Clone ID: LIB3139-069-P1-N1-D8
cagacaccgacacagatctgtcttccgaagcaggaactaaatatggctgacttgttggaatggtcaaagcaagataagaaacgaatgcttcatgtcgtctaccgtgttggtgaccttgatcgcaccatcaaattttacacagaatgtttaggaatgaagcttttgaggcaaagagatatcccagaggagaaatatgctaatgcttttcttggatttggccctgaagaatcccattttgttgttgaattaacatataattatggggttacctcgtatgacattggcgatggctttggacattttgcaattgcaactcaggacatttataaattggttgagcacatc

SEQ ID NO: 44047 - DNA, 294 bp, Glycine max
  Clone ID: LIB3139-069-P1-N1-D9
catgtggcagctctacaaattattattgatcgaaccccaagtcctgactgcaacataattaatgcaatgctataggaggatacttaccataccagtccttaaaatgcaggtgaaaaggtttttgttgcgcctttcacaggccgaaggcccatacgactggctacatatcacaataccatcttgcagatggaaccatacatgaatacaagagttcagctcttgagtaccactaccaatggtgattttgatcaaggaaaaaatctcacaatgtgtaacagcaatgtaccatgtgct

SEQ ID NO: 44048 - DNA, 369 bp, Glycine max
  Clone ID: LIB3139-069-P1-N1-E1
atcaattttgaggcttttccccacaagctggtgcagtttggagaaattcaggaaaaggttgtattgaaattttcacaagaggaatttcttacagcttggtcaactcaggtgcgtcctgcaacaactctgttggctgatgggtgtccatatttgtatgctatggtgcatgatagttcagtgtctacaataccaggtgattttgtcattggtgttaagttgacaaccataaacaatatgtgtgcatatgggctcaatcctggtatttcaggttctcgtcttctgggcaccattcctcagtccatttcacagcaaactgtttggaatcaaatggcaacagtgagaacaccattgaattttgattctagcaag

SEQ ID NO: 44049 - DNA, 369 bp, Glycine max
  Clone ID: LIB3139-069-P1-N1-E10
gagtaatagaaacctctcagcccctctccgatcaaatggccaccgtaatcgacggcaaagccgttgcgcaaaccatccgatctgaaatcgccgacgaggtgcgccagctctctcaaaaatacggcaaggttccgggattagcggtggtgatagtagggaacagaaaagattcacagagctatgttggaatgaagagaaaggcatgcgctgaattgggaatcaaatccttcgatgtggaccttcccgaacaagtctcccaagctgaactaatcaaacaagttcaccagttgaatgctaaccctgacgtacatggtatattggttcagctcccgttgcctaagcacataaatgaagaggaagttctgactg

SEQ ID NO: 44050 - DNA, 357 bp, Glycine max
  Clone ID: LIB3139-069-P1-N1-E11
cacttctcaccatgtccttgatgcccaattctagggttcctcttctcctcttcatctcttccatattcttcacctcttttcccgggttgacgtttggtgcaattgtgtcgctgagatcaattgagatttttaaaacgcacgagtggctgaaagccactacaacggtgtatttcctatgcaaaggggagaacgagacggtgcttccagatgtcaagaaaccccacgccatttatgctttcaatggtcaagaatcttggcagcctttaagcagcttttcaagtaaaaaatgcaagcggtgtggattctatgaggaggacagcattacttcggatgatgcatttgacgaatggggagttt

SEQ ID NO: 44051 - DNA, 364 bp, Glycine max
  Clone ID: LIB3139-069-P1-N1-E12
gaggagaagggtgtcaatggcagagtgtttgggtgtttcagtttcaactcttggctcattctctcttagtaggcccacaatcttttatcgatctcccattaatatctctctctttgcctctcaatctcatttccctgctgctgcatttggttatttgacaccttccaacccacacctgtacgccgctgtctcctccgactccaaggccgctacttcgctagacctaactcaacccgatctcgataatagcggcggcggtgctaacggaaacgctaacggcggcggcggtggtggaggaggcggaggaggtgatgatagcaagggcgaggaaggatcggacggtgacaagaggaaaatggctctg

SEQ ID NO: 44052 - DNA, 277 bp, Glycine max
  Clone ID: LIB3139-069-P1-N1-E2
ctcaactaatcatgtgtggctcaagtggctgcaaaagaatcacatgatctacaatgactgttctgacactaaaagatttccacagggcctttctcgagaaagcaacacagcctaaaaatatctgaatatggctgtgtggagtgatgcaaactccaaggctaagctctctctcagagtgtccctttcctgaacttttgcaacatccataatgattaatgctctgatctgctggaaaccaataccttcaagctctgcttatgggctggcgtcctctggt

SEQ ID NO: 44053 - DNA, 371 bp, Glycine max
  Clone ID: LIB3139-069-P1-N1-E3
agagaaagcagcatcaaaagcaactggatctgcagcagaaggtgcacctgattcacagccaaaggatgccacctctaatggcctcacagaagaaccccagaaagaagctcctgccactgaggagcagcctgctgcatgattgtgtctatgatactttggttccccctcaatctttcttctgccacccctttctccaccctgcagtctttaatgaatctttttgccctgctattagtttctaatgcttatcggctgcattctattattattaactttaaggttttgtatgaattaaatccattattaacaattatgacgtggagattcaatgatcatgggtttaaatagtacatacttctagacagagtata

SEQ ID NO: 44054 - DNA, 369 bp, Glycine max
  Clone ID: LIB3139-069-P1-N1-E4
ggagatttgtctctggggatggtgaagagatgacactgattccgggaaccagtgttgaagaggcttacaacaagctaatagttgaacttgagaaaagtgttcctacattggttggcattgaatgtcccaaggatgagaaacttcctcgtcgcaaaatttttgacaaacctaagacgcgctgcttcactattctccctatggagtttaatcttgtggtccgtcaaaagtttttaaattttgtgaggttcattatgaagaaaagggacaaacttagttgtcaagttggaatcaacccatactccatggaatggactggtttggccaatagattactgagtaagggcaatgatattctgtgttgcgattatg

SEQ ID NO: 44055 - DNA, 366 bp, Glycine max
  unsure at all n locations
  Clone ID: LIB3139-069-P1-N1-E5
tggcctccaagcggattctgaaggagcttaaggacctccagaaagaccctncaacctcttgcagcgccggtcctgtagcggaagatatgtttcattggcaagcgactataatgggtccccctgatagcccttatgctgggggtgtttttctagttactattcattttcctccggattatccattcaagccacccaaggttgcatttaggactaaagttttccacccaaatatcaacagcaatggtagtatttgtcttgatatcttaaaggagcagtggagccccgccttgacaatatctaaggttttgctctccatttgctccctattgacggatccaaacccagatgatcccttggtgcctgaaa

SEQ ID NO: 44056 - DNA, 369 bp, Glycine max
  Clone ID: LIB3139-069-P1-N1-E6
caagattctgtcagattgttggctgtggagggctgtgctgctcttggcaagctgttggagccacaagattgtgttgcacatatactcccggttattgttaacttctcccaggataagtcttggcgtgtgcgttacatggttgcaaatcaattgtatgagctttgcgaagctgtaggccctgaacctaccagaacggaattggtacctgcttatgtgcggttgcttcgtgataatgaggctgaagtacgcatagcagctgctggaaaagtgaccaagttttgccggattttaaatccagatcttgcaattcagcatattcttccttgtgtgaaggaattgtcatcagattcttcacagcatgtccggtct

SEQ ID NO: 44057 - DNA, 366 bp, Glycine max
  Clone ID: LIB3139-069-P1-N1-E7
gaaaaacatatcacacaatatggcattcaagggctatttccttctcggcctcgttactcttgttcttgttaaatcttccaaagttacatgcgaagaagaatcagttaatacagtttcacccattattgacatttcactcaatcggaagagtttcccagaagggttcatatttggggcgggatcttcctcgtaccagttcgaaggggcagcaaaggaaggtggtagaggaccaagtgtatgggataccttcacccataattatccaggaaagatcatggatagaagcaacggagacatggcaattgactcatatcacaactacaagaaagatgttgggatgatgaaggatatgaatttagattcata

SEQ ID NO: 44058 - DNA, 355 bp, Glycine max
  Clone ID: LIB3139-069-P1-N1-E8
ggagttttctgaggctcgtgaggaccttgctgctcttgagaaggactatgaggaggttggagctgaaggagcggaagatgatgaggaaggagaggactattgataatcgaaggcttttttttgttatcaatgtaattgtttccgagttaaaagggtatatgcttcgttacattaccctgaaccattattgttcgttcttttttgtttttgctcctgctgtgtgatatagttctccattattcaaactgtgaagtgatcaacattatgcttctatttggtggtttaggacctgttgtttgcgatcctcagtcatgtattcagaattgtccatgtcaaaagttgatttcttatgttt

SEQ ID NO: 44059 - DNA, 102 bp, Glycine max
  Clone ID: LIB3139-069-P1-N1-E9
aaataattaacaaaagcaactggatctgcaacagaaggggcacctgattcacaggcgaaggaagccacctataaaggccttacaaaaaccccgaagaagctt

SEQ ID NO: 44060 - DNA, 368 bp, Glycine max
  Clone ID: LIB3139-069-P1-N1-F1
gttgagggtttggactatatggaaagaattcctcttgccacatctgagggttttcctcatgtgctttcacgcaaaaatggcgaaaaaggcaaaaggagatttgtctctggggatggtgaagagatgacattgattccaggaaccagtgttgaagaggcttacaacaagctaatagttgaacttgagaaaagtgttcctacattggttggcattgaatgtcccaaggatgagaaacttcctcgtcgcaaaatttttgacaaacctaagacgcgctgcttcactattctccctatggagtttaatcttgtggtccgtcaaaagtttttaaattttgtgaggttcattatgaagaaaagggacaagcttag

SEQ ID NO: 44061 - DNA, 368 bp, Glycine max
  Clone ID: LIB3139-069-P1-N1-F10
gaaaaacccaaaaagattgataccagattgagacaaagaatagatcctcaatacaatgaggttcaggctcagatggaaacaaatttgtttaaattgtctcttgatgatgttgaaactcctaaaggttctatgttggatcttaaaatttctcaatctaaaattgcacttcccaagaacacagttggaggaaccattctgcgtagtgatctattggcaaattttttgacagagggcaattttagagcaagtgttgatttgcagcgcactcatcgtattaaaggaatgattaaaatggtggccacagttggtattcctgagaatacaggtatagcattggcctgtgctatgaatagttcttttagggggcg

SEQ ID NO: 44062 - DNA, 364 bp, Glycine max
  Clone ID: LIB3139-069-P1-N1-F11
aagagtgttgagtattggcagcaagacaagtggaatggttgctttcctcttaagtggcacattgttaaggatgttcctaacaatttgttgaggcacattaccttggacaacaatgagaacaaacctgtcactaacagtagggatacacaagaggttatgttggagcctgggctgaaattaattaaaattttcaaggaatataccagcaagacatgcattttggatgattttggcttctatgaggctcgtcagaaaactattttggagaagaaagcaaagcaacaattcccaaagcaggtatgggaagggaaacctgctgatgagaagattgagataaatggggaagttaatactcaaaaatctg

SEQ ID NO: 44063 - DNA, 511 bp, Glycine max
  unsure at all n locations
  Clone ID: LIB3139-069-P1-N1-F12
atagaagtagctanntgacgtcgcatggcaccgtcgtaancgtaagcntnncggaannttcggctttcgagggcaagtgatcatatattcctgggcttgttgaccaagnnttgtattctgacttaaggtnntaataagttgtgcgagaaaattatgannaccttagacaaaagtnngttgtttggtganntcttaaacnnttcttacttgatgggaaagttgtattgaagggtaaagcatttattcctgtattnnttaatattagtgcaagggnngaaaatcatgnntagttcaaataccccttaattggcaccaggagggaaattcttgtcttcttagtgcaaagtnngatttcagaacctgcaattggtgaaggtaaaaataagnncaaacctcnaagctttacttgcaattgcattgtgggaagctatttagaaattattcattgataggtttcgcaaggtcctgattgcaacaatagttggtgccaatgctttttggttgatactta

SEQ ID NO: 44064 - DNA, 319 bp, Glycine max
  unsure at all n locations
  Clone ID: LIB3139-069-P1-N1-F2
agcttttccaaacaagattgtttttgatgataagcttgtgttggctaacacacaagaattctttgatggaaattttccagtggattcttggttaccaatttttgtgaattgtctctatcctgtaagtcaattaccttcagaagctgtcgttgtaaatgttacatgtggtagtggacgtggtggtnaacccacctcttgcagtgtttggtctggaatgaacaaaggatgagaaaccttcttctaacagaatttttcacaaacttgagacgcgctgattaactgttctctctatggagttgaatcctttttgtccgtcaaa

SEQ ID NO: 44065 - DNA, 369 bp, Glycine max
  Clone ID: LIB3139-069-P1-N1-F3
gttttaatataattgaaggagttgctcgtggcttactctatcttcatagagattctagattaaaaatcatacatagagatttgaaggcaagcaatatcttgctagatgcagagatgaatccaaaaatatcagactttggtttggctagaatatataaaggcgaggatgaagttaataccaaaagagttgttggcacatatggctacatgtccccggaatatgcaatggaaggactgttttctgagaaatcagatatctatagctttggtgttttgttattggagattattagtggaaaaagaaacactagttttcgtaatgatgaccagtctctcagccttataggatatgcgtggaatctatggaacg

SEQ ID NO: 44066 - DNA, 370 bp, Glycine max
  Clone ID: LIB3139-069-P1-N1-F5
ggggcattacattattgcttctgattggaagaaaaatgagcacatgactgaggacatgttctgtgatgaattccatcttgttgatctcagggtcatgaataactgcctcaaggttacagagggggttgatcatgttttcaatcttgccgcagacatgggtgggatgggttttattcagtctaaccactctgtcattatgtacaacaacacaatgattagcttcaacatgattgaggctgccaggattaacggcattaagaggtttttttatgcctctagtgcttgtatctaccctgaattcaaacagttggaaactaatgttagcttgaaggagtctgatgcatggccagctgagccacaagatgcatat

SEQ ID NO: 44067 - DNA, 369 bp, Glycine max
  unsure at all n locations
  Clone ID: LIB3139-069-P1-N1-F6
ctcgagccgttttagggggcgcgccagttctgatatttacaccatctgctctcaagactgtgaattgtggaatcctgcttgcacaaaagcaatgactatgtcatttaatccaaacccgtgttctgatgcatggagtttggaatttctgaagcgtactggatttcattgcgatatcatttgtgtcactggatggactgccaccccaatgcaggatgttcaggttacaattgattggtttatttcctctcaggaatgtgttcccaggacctattgtgttttaaatccacaaaatccttttgtgttaaataggtggatgggaaaattgactntcccccagggcacttcccgaagtgttaagagaatgcctct

SEQ ID NO: 44068 - DNA, 369 bp, Glycine max
  Clone ID: LIB3139-069-P1-N1-F7
gttccaattggaccctttgtttacactgttccagctgaacaacacaatgaagtggcaaaagagagtgaaacacctaaggagaggaagagggaaaatgatcatcatcatcataatcggcatcatcatcatcatcgccacaatggccataggcatcatccacttaaatctcccaagacaccaatgtcatcagatcagtcacagaatgatgaacaccgaaatggtagaagaagtgggtctaattcacctgacacatccaatgcatcagaagcgcaatgaagcatgcatgggttagtagacacacatagatcttactgtaaataggtatttactggtcaattattagagttccatactgtgccacgtactagt

SEQ ID NO: 44069 - DNA, 219 bp, Glycine max
  Clone ID: LIB3139-069-P1-N1-F8
tgagcattgatttgttgggtttacaaggagcaggtaaagcttttccaaacaagatcgtttttgatgataaacttgtgttggctaacacacaggaattctttgatggaaattttccagtggattcttggttaccaatttttgtgaattgtctttatcctgtaagtcaattacctccagaagctgttgttgtaaatgttacatgtggtggtggacgtggtg

SEQ ID NO: 44070 - DNA, 371 bp, Glycine max
  Clone ID: LIB3139-069-P1-N1-F9
cggggcaatgatgacagtggctgacaccaataaggacgggttcgtggagtacgaggagttcgagcgcgtggtctcggcggagagaaagcccgtggggtactgtggggccatggaggacgtgttcagggtcatggacaaggacggcgacggcaagctcagccaccatgatctgaagacttacatggcctgcgctggttttccggccaccgacaacgacatcaacgccatgatccgattcggcggcggcgaccaaaacggcggcgttacgttcgatggtttgcttcgtatattggcgcttgattgttcccccgctaattaattaaacctctcgggtattggctgcgcgcgtttcgttacattaattaaacaag

SEQ ID NO: 44071 - DNA, 373 bp, Glycine max
  Clone ID: LIB3139-069-P1-N1-G1
caagttccaacatctatctcacttcttagttctttgtggctctttccatgatggcctctcctacatctccaagagatctcttcttgagtctctttgcaactctttccatgattttacatttgagttcagccaggacgttgtctgagtcagacccccaattgcagttccaataccacagaggccctgtcctaacaggcaaaatctccgtaaacctaatttggtacggggagttcaaaccttctcagaaagccattgttgctgatttcatcacctctctctcctcttacaaacccctgaccggccaaccatacggtgccacgtggtggaaagccaccgacaaatactacaaaaactcgttccccaaacttgcact

SEQ ID NO: 44072 - DNA, 336 bp, Glycine max
  unsure at all n locations
  Clone ID: LIB3139-069-P1-N1-G10
gtgagaacacccatgtattgtgattctatcacgcagtgcaccatgcaacttgctatggaccttaccactggaagaattgtagaggccaccactgcaaattggatcacacttatacaaacacatccacatcatgactaaaacctagctgatggtgggcatagaaccaagctgaatgacagggaagactggcatgacaacgcgacagtcaagcactgtctnataccataaatggtacgggtgcaacatgcatacagagtcttgactgcacagatggacacatctaagcagtcacctacaagccctccagtggggacattgatcatacttataagagct

SEQ ID NO: 44073 - DNA, 368 bp, Glycine max
  Clone ID: LIB3139-069-P1-N1-G11
gagaagattgttaattgaagcagaggaagacctaacatgtccgttacggagctgaaggagcgtcacttggcggcgacggaaaccgtcaacagtctcagggagcgcttgaaggagaggcgtctttcattgctcgatacagatattgctggctacgccaggtctcaaggtagatcccctgtcacctttggtcccaccgatctcgtttgttgtagaactctccagggtcatgcgggaaaggtgtactcattggattggacttcagaaaagaatcgaattgttagtgcatcccaagatgggagattgatagtgtggaatgctctaacaagccagaaaacacatgccataaagcttccctgtgcgtgggtcat

SEQ ID NO: 44074 - DNA, 369 bp, Glycine max
  Clone ID: LIB3139-069-P1-N1-G12
gacaaaactagtgcaactttgcaatttagaaagttagcagattgtgattttctcaagagaaactttaagcagatgtctaatgttttatgggtggctcctgaggacaaggcgagtttatggtcacaacttcattatgtttcgtgcaataatctggaaatgcaagaagcttatcttgtcaatctcgtaaatgtgttacgagaattgtatttgcacagtccagaggaagctcgccaattgagaaggaaagctctctctcgtattgaatggctgcaaaaagctgatgtgcctaccatagcacagattgaagagttccattcgatgcagaggatgatgaatgctcctgattcaaatgataatattgatctactg

SEQ ID NO: 44075 - DNA, 374 bp, Glycine max
  Clone ID: LIB3139-069-P1-N1-G2
agaaaatattaatgagagtgatagtaattaccgtattcctatttataggtgcagcaactgcagaagatgcagcagctgaggcgtatgagtctcctaaattaaaaaagttgataacagattgcactgggcatgttggtgaaacatgcagtactactactagtagtagtggaagtgaagcattaatgcagaagcaggatgggttggctctttgccttttggattctatggagagatgcttgctagaccatcaaacaaatgttggaactcttggagacctaattacacttccaccctttccaccaagacctccagtagatcctaacataattccatttccaagacctccaaacatagttccatttataaaacgtcgt

SEQ ID NO: 44076 - DNA, 373 bp, Glycine max
  Clone ID: LIB3139-069-P1-N1-G4
ctccaaactgcaccagcttgtggggaaaagcctcaaaattgatggtgtcatcagccaaatttccaaatgctatgaagaaagagactgtacatttaatgtagggagaagtcatcttagaaacttcaaagacgagatctccaacaaaatatctccacattgaaagaacagcatttggcatattcatgagaatagcattctttgcaccagctcctccccctatagaaagaggcattctcttaacacttcgggaagtgccctgagggaaagtcagttttcccatccacctatttaacacaaaaggattttgtggatttaaaacacaataggtcctgggaacacattcctgagaggaaataaaccaatcaattgtaac

SEQ ID NO: 44077 - DNA, 349 bp, Glycine max
  Clone ID: LIB3139-069-P1-N1-G5
agatgatcaaaggttgctagtgtatgaattcatgcctcggggtagcctggaaaaccacttatttaggagatccatgcctcttccatggtccattagaatgaaaattgcactaggagctgctaagggtcttgcttttcttcatgaagaagctgaacgaccagtaatatatagggattttaaaacttcaaacatattactagatgcagactacaatgccaagctctcagactttggtcttgccaaagatggtccagaaggtgataaaacccatgtgtctactcgggtgatgggaacctatggttacgcagcaccagaatatgtcatgacaggtcatcttacatcaaaaagt

SEQ ID NO: 44078 - DNA, 339 bp, Glycine max
  Clone ID: LIB3139-069-P1-N1-G6
ctagagccgaaattgcaataatccgggataacaggttggcgtaccttataaccgggaacaaaagcaaacgatgcttgctttcaagaatttctgaatttcttgctactactcagtgtacgatctctcaagggaaagaaaatcactctctgtgctggtcacagacttcacgaatcatgtacgtttccactcctagattatttgctgaacactcttccattggatgtaggacttcatgtcagatgtaaacgttagctgtttcttgctcagatgtctgattaatttcgaggtgcagctggtgaaattttggattagtgctcccactgtcctatctggtatagg

SEQ ID NO: 44079 - DNA, 365 bp, Glycine max
  Clone ID: LIB3139-069-P1-N1-G7
cgaagttgagagtcatgcaaatggcaaagtgactggttctcaaggggctagttcccgctgttctgaagagaggagggaaggagtgaagaggagttctaatggagacgttgcacctggttcccgacaccggagaagtttctcattggacagctccataggaaatttccatattggagatgaatcgcctaagcttcctccttcacaaaaccgatttggtcaacactctcccagcagttcaatagatggtaagacatctgaaacaagcatggagtttggaaatggtgaattcagctcagaggagctaaagaaaataaaggagaacgataaacttgctgaaattgccatggccgatcctaagcgtgcta

SEQ ID NO: 44080 - DNA, 370 bp, Glycine max
  Clone ID: LIB3139-069-P1-N1-G9
cggctcgagcaagaatatattatttctgtctcaaaacttgccatgatttcatgataatgaattttagaagactgataaatgatataggaacctcttttcccttttggtgtattaaggcttgttggcacagtgcaattgtcataaaatgaagtttgctgataaattaatgtatctatctgcagctgagcaactacaactcttttgagggagttctttattgtaagccacactttgaccaactgttcaaaagaacagggagccttgacaaaagctttgaaggaacaccaaaaattgccaagccagagaaaaatttggaagagaaacctgcagcagccaaagtctcaagtatgtttggaggaacaagggacaa

SEQ ID NO: 44081 - DNA, 375 bp, Glycine max
  Clone ID: LIB3139-069-P1-N1-H1
tgtgactccaaacaaagcccacacaccaacttcatttccattcacaatgtcaatttcctccacttccaactccctcattccccccaaatctttaatcccccaatcccaccccctcattcccaacatcaggcccgggctccggcccaagcctggcccatccccttccatcctcgccgtccacgccgccgagcccgccaaaaaccccgtcgtcaccgacaagcccaagccccaagcccaacaatctgcatccccggccgcggcccgtgcaaccaaatgggccgtggacagctggaagtccaagaaggccctgcagctgcccgaataccccaaccaggaagatctcgaggccgttctccgcaccctcgacgcctttcc

SEQ ID NO: 44082 - DNA, 366 bp, Glycine max
  Clone ID: LIB3139-069-P1-N1-H10
attttgatggatctgacgaagaaaaacctccatcgtatgtctcaactaatactcgaatggtggttccgacatccaagaatgttaactcctcacagaaacctgctctcaagttcttgctctatggcagaacaggttggattgggggtttgctggggaagttgtgtgaaaaacaagaaattccctacgaatatggaaaaggacgactagaggaccgatcatcacttgtggctgatattcagaatgtgaagccaacacacatttttaatgcagcaggagtaactggcagacccaatgttgattggtgtgaatctcacaagacagaaaccattcgcaccaacgttgctgggactttaacattggctgatg

SEQ ID NO: 44083 - DNA, 369 bp, Glycine max
  Clone ID: LIB3139-069-P1-N1-H11
ctcgagccgaatcggctcgaggtctcttgatcctggtttcctcaccctagggttagggtttggtccctcttcaattaacttcaatatctgcgagagagcgtgagagtgacgcgcctcccgagagacgccatgggaggtgacagtgccattgaggaatccgaaggggtcaacgtcaacatcaacgttcgctgctccaacggtttcaagttttccgttcagattgccgtcgattccaccgttagttccttcaaggacgttgtcgctcgcaactgcgacatccctgccgaacaacagcgcctcatttacaagggtcgcatcttgaaggatgatcaaaccctacgaagctacggtttggaggcagatcacact

SEQ ID NO: 44084 - DNA, 368 bp, Glycine max
  Clone ID: LIB3139-069-P1-N1-H2
gaaactttaagcagatgtctaatgttttgtgggtggctcctgaggataaggcgagtttatggtcacaacttcattatgtttcgtgtaataatctggaaatgcaagaagcttatcttgtcaatctcgtaaatgtgttacgagaattgtatttgcacagtccagaggaagctcgccaattgagaaggaaagctctctctcgtattgaatggctgcaaaaagctgatgtgcctaccatagcacagattgaagagttccattcgatgcagaggatgatgaatgctcctgattcaaatgataatattgatctactgttgagcattgatttgttgggtttacaaggagcaggtaaagcttttccaaacaagatt

SEQ ID NO: 44085 - DNA, 369 bp, Glycine max
  Clone ID: LIB3139-069-P1-N1-H3
ttttgtcattggtgtcaagttgacaaccataaacaatatgtgtgcatatgggctcaatcctggtatttcaggttctcgtcttttgggcaccattcctcagtccatttcacagcaaactgtttggaatcaaatggcaacagtgagaacaccattgaattttgattctagcaagcagagcttttgtcagttttctattgaccttctcggtggaggaatcttagtggacaaaactggagattggatcacacttatacaaaattctccaattagtaacttgttgagagttgctgcttggaagaaaggctgtttaatggtcaagattgtgatgtctgggaatgcagcagtcaaaaggagtgattgggcctcatt

SEQ ID NO: 44086 - DNA, 369 bp, Glycine max
  Clone ID: LIB3139-069-P1-N1-H4
aaaatgcactgttgatcatggttcagctatgctgaaattatggagttctgcttgaatcggtgattgtgagatttggatttgacagtgctggggtcaagcttttgtgtgtgaagcttttttttcttttcttgttattatcaaacttttccattacgtttaatcattcaactttctttttcccctattggaagaaagggggggattcactgaataagggtggctaggtgtctcaattgccttttttttctttaatgggaagagtggactgcaattttcagcttttttctgtggaacctgttctggttatggtctgtacatgaagaaagaaggcattgatacctttccctccaaagaaatcttatattgctt

SEQ ID NO: 44087 - DNA, 280 bp, Glycine max
  Clone ID: LIB3139-069-P1-N1-H7
ctcgtgtgtcaggacgcgcacgctatccttgcagcgagtgttctactctctcgttacaacacccacacttagcacacgctggtcgtccacctcgacaaacgacacacgaaacccctttattcacatatctatttgaaaacccgggcaactccgacatgctgtgcgactcagactctgatgctgagctcgatacctaccttgtacatgaccctgacaggacagctggacgcgtgacatgcgccttgaacaacttcttcattgcctctggtgagatcacttc

SEQ ID NO: 44088 - DNA, 371 bp, Glycine max
  Clone ID: LIB3139-069-P1-N1-H8
tgctcttccacttctcggcgcctcttccccttaacctctcaaatccactcttccttcactcgttcccctctctctcctcccgttttcaccaatgactccacatcttcttcttcttcttcttcttccagttccaacccctggtggagatccatggccaccttcaccagaacgaaacctcacgttaatgtcggaactattggacacgtggatcacgggaagaccacgcttactgcagcaatcaccagggtgcttgcggatgaagggaaagctaaagctgttgccttcgatgaaatcgataaggctcctgaagagaagaagagaggaatcacgattgcaacggcacatgtggagtatgagactgcgaaaagaca

SEQ ID NO: 44089 - DNA, 313 bp, Glycine max
  Clone ID: LIB3139-069-P1-N1-H9
accaactgaagagaccaatacggccaccattaccaagcctccttttaatatatgtttactggtcatggtgcttttagtacacttgcattagggccaaatccaagttgactagagtcactactctaaaagctgtccagaagctgaagagacagtcaaggctctagtcacacacctcttcagcaagcgtggaaactccggcgccgagcgggtcataaataaggtccacgacagcgtgggtatgtgatgcgatgcatgactactgaacgggaacgttagcagtgtagtctgcgatcacgacgcggacacacagtgg

SEQ ID NO: 44090 - DNA, 345 bp, Glycine max
  Clone ID: LIB3139-070-P1-N1-A1
ggtaatactcttatgccagcaatttcaaaatcttgagagattcccaagagaatatcaaaaactgtagactgtttgggattgtcaataaggaaactctcaagattttgaaattgctggtaatactcttatgccagctttttctgttccacaggctactgccagatcttctgaaaatgcggaatcctctgcatgatctggaattcgtgttttctttcgcttgttcgtttgtttaattcaataaaggaaattaggcatgaccctcttgttgagtatgctctgcctatctgaaaatttccacacctcttttaattgtcgtaatgatgtgtgaagtgtgtgttattttta

SEQ ID NO: 44091 - DNA, 371 bp, Glycine max
  Clone ID: LIB3139-070-P1-N1-A10
gcaaccccctcttttagcgttcgaacaaaattagggttttctcaaccctagggtttaccttctcttcccctgttcgaaattaggcaaatcaaaacagaaacacgactacaaaaagaagaaaagaagaaaaagaatcaatcattcattgatcgctgaaacgatacgatgacagggaaggcgaagccgaagaagcacacggcgaaggagatcgcggcgaaggtggacgcggcgaccacgaaccgcggcggcgggaaggcgggtatgaaggaccgaaccgggttggagaagggcgggcacgcgaaatacgagtgccctcactgcaaggtgacggcgccggacgtgaaatcgatgcagatccaccacgacgcgcg

SEQ ID NO: 44092 - DNA, 366 bp, Glycine max
  Clone ID: LIB3139-070-P1-N1-A11
ctcaaaaccaaaatcctaacgtcacgcaacactttttcttcaacttttctattctgcttctgcgtctttaatctaagcaaaacgacaacgtgtcattacttgcaacgcgaatccccaaatgcaaacataattcatttacatctttctttcttctttctgcaaatacttccatttcctgatttcctcaaaacaacaacacgtttaattttcatctccttccttttctatcctattcctctccctattattattattgttacatctttttcttcttcctctgatacaaagacaccatgagaggacaggaagatcagcaatctagggttttctgtgagctctcggctctggtcttcaaccttctccggt

SEQ ID NO: 44093 - DNA, 368 bp, Glycine max
  Clone ID: LIB3139-070-P1-N1-A12
tttctgtagttggtctcagtgaggagcaggcaatagagcaaaccaatggggatctgttggtttttacatcaaccttcaatcctatgaaaaataccatctctgggcgacaagaaaaaactgttatgaagcttgttgttgatgctgagacagataaggttctcggagcctcaatgtgtggacctgatgcacctgaaattatgcagggtattgctgttgcgttgaagtgtggagctaccaaggcacagtttgatagcacggtgggaatacacccatcggctgcagaagaatttgtaaccatgcggtcagtgacaaggcgcgtagctggaactggaagtgtcaaacccaagaccaatttgtaaaatgtttaa

SEQ ID NO: 44094 - DNA, 254 bp, Glycine max
  Clone ID: LIB3139-070-P1-N1-A3
actcggctcatgtccctaatgcaccccaatagcaagatttggtttacgggaaatcttcctttgagattaaatctcgccctagaacgggaaaagatttctctacacaaacacaacttggtagtgggaaaaccttcaaatatgatgtaattggtgctccgtcacaatcttcaagggattttcctggaacaggggatcacgaaataccctaaaagatttattccagattgtgtcaaagaataggtcctccattccat

SEQ ID NO: 44095 - DNA, 380 bp, Glycine max
  Clone ID: LIB3139-070-P1-N1-A4
aactctcccggatcgctgttcacgcacgcatctcggaacgcttcgaaggcttctcttgtctctctggagtcgaccagcagctaccgtaacccatggaacgacagcggcattaacctgcctgatgatgaacattcgcacaatggttggcccgtagcacccgcgcccggcttcggcatccactcgaactcttccaaactttcttttcacggcacccccactacgtcggcggcgcccggggatatgacaccgcggtacgacccccgtgcgtcggtcgacagtggacgcccgagcacttcccattctgcttctggatacccggccccgattgggcctcctcgttgaaccacaaaaaagaatttagccgtgcagcccacaaaagc

SEQ ID NO: 44096 - DNA, 378 bp, Glycine max
  Clone ID: LIB3139-070-P1-N1-A5
ctctctctcttcgttcttttggagtgtgtgtgcacccattgatgacaagcaaccccattgcatggaagcctaagaggaggagaagacgaagaggacaagggtaactgaatcgccgcttctgcagcttcgttctttcgtttttgtttcatctttttagcttcagagggtaaataaaaaatggaggttttggtgggtcccgctttcaccatcgacgttccctcgtctccgccgcagcatgccggttccgatgatcggatctttcttaacgtgtcacccgaagaaggtgatgggtcgaactttcgtatttcgggcccacccaagttcttcgccggcggcgagtcggagagttcgtcgtcgatcggaacccctgatgacagc

SEQ ID NO: 44097 - DNA, 381 bp, Glycine max
  Clone ID: LIB3139-070-P1-N1-A6
acgcatgaatattgatgatgggcgtgttgttagcaacttcattgctcaagcacttcggggggaaccattgacagtccaatgtccaggaacacaaactcgaagtttctgctatgtctctgacctggttgatggccttatccgtctcatgggaggatcaaacaccggaccaatcaaccttggaaacccaggtgaatttacaatgactgaacttgctgagaccgtgaaagagcttattaatccaggtgtggagatcaagatggtggagaacactcctgatgatccgcgacatagaaaaccagacatcacacaagcaaaggaattgttgggctgggagccaaaggtcaagttgcgtgatggtcttcctcgtatggaagaggattt

SEQ ID NO: 44098 - DNA, 273 bp, Glycine max
  unsure at all n locations
  Clone ID: LIB3139-070-P1-N1-A7
aaggaagaagaaaaangagaaaggaggaaagcagaagaacganganagngangaaaggccaaacccaaagggannnncaaggaagaagaaaaangagaaaggaggaaagaagaagaaaganganganagngangaaaggccaaanccaaaggncnnnncaagaaaaaaaaaggagaaaggaggaaagcagaagaggccaacaccaacaaagncngcccccaaagagagaaccgcagaaaaggccaccaaaggaaaaggaaagaagaaagagaa

SEQ ID NO: 44099 - DNA, 366 bp, Glycine max
  Clone ID: LIB3139-070-P1-N1-A8
tctctctctctctctctctctcttcgttcttttggagtgtgtgtgcacccattgatgacaagcaaccccattgcatggaagcctaagaggaggagaagacgaagaggacaagggtaactgaatcgccgcttctgcagcttcgttctttcgtttttgtttcatctttttagcttcagagggtaaataaaaaatggaggttttggtgggtcccgctttcaccatcgacgttccctcgtctccgccgcagcatgccggttccgatgatcggatctttcttaacgtgtcacccgaagaaggtgatgggtcgaactttcgtatttcgggcccacccaagttcttcgccggcggcgagtcggagagttcgtc

SEQ ID NO: 44100 - DNA, 360 bp, Glycine max
  Clone ID: LIB3139-070-P1-N1-A9
atcatgatctatcatttgcccatgtcatttatttactataataaaagttacttttggcttgctttgtctcgtgtttttcttgaagtgtcttttttctattattcatcaataatttcacctgttaattgttaggcggtgattcatgattcatggacactgttatttgccttatatatcctttttcaacattgattatattcttctctgtttatcacatttatacttttgtcactttctctccctagacgtaaatattgaatggtccatcgtccatgcaacatttttcttaatagtttttttttttaattttagaaaatggttgctaaatatatttttttacttaaaatatttcttgagcac

SEQ ID NO: 44101 - DNA, 315 bp, Glycine max
  Clone ID: LIB3139-070-P1-N1-B10
atcatatcttctgagttctgagtgttccattccaattccaagttacaacttggctgtgtctatggatcgcgctcagcttctgttgctgggtgtacccctcttcctcttctgctctgacctcttctcccttttcactcatgatgcaccaccaccaccaccaccaccaccattcttacccgtcggaccaccaccaccacccacacgaccaccattaccacccaccccaccaccaccattattacccgccccaccaccattaccaggcggggacaatagattttcctcccgagaaacccaccaacaatattgcaactt

SEQ ID NO: 44102 - DNA, 368 bp, Glycine max
  Clone ID: LIB3139-070-P1-N1-B11
cacattctccattccacaacatcaaggttctgatcatgtcggggaagaggccccggccaatgatcggaaagttgtcggagttgttggtctcgagaggccgcacggtggcacttttggacaccactggaagcccaagaggcccattagacatgaagatgatgcaatcaccaagaggcttaaaaaattatgatcttggtggcgttggtcttggaattgtggtggctcttgataaatccaataacgaggttgctgcacgtgaagttttgcccaaacacaccgtttgcacctccaatttgaaccggtccggcccaattccggttcactacaccaaaaacccagatgaatttgatgtcgaggaatacacctat

SEQ ID NO: 44103 - DNA, 383 bp, Glycine max
  Clone ID: LIB3139-070-P1-N1-B2
gcttgttgtgtccacctcctcctcccttcttcacactgctgttgatctagttaacgagaccaagttggatgatgagatcaagtcatggctagcttttgctgcccaaaaaattgttgaagttaacgcattggctaaagcattgtctggccacaaggatgaggccttcttctctggtaatgctgctgctctggcttcaaggaagtcttctccaagagtgaccaacgaggctgttcagaaggctgctgctgcattgaagggttcagatcatcgccgtgcaacaaatgtcagtgccagactggattctcaacaaaagaagctcaaccttccaatcctgccaaccaccactattggatccttccctcagactgtagaactgaggaggg

SEQ ID NO: 44104 - DNA, 238 bp, Glycine max
  Clone ID: LIB3139-070-P1-N1-B3
gagctaactaagcactttccacttcttgttattcaccctttcataggcgagcacaatgagagaattgggcgtggcagcaatactgtgttgaattgagagcttggacgatatggtctacactgaaggcgatgcatccatgaatactggcatgaatgactaagactttgcactgtacttcaatgccttaatatcttgactgctactttccataaccttattcttttacaggaacagacct

SEQ ID NO: 44105 - DNA, 332 bp, Glycine max
  Clone ID: LIB3139-070-P1-N1-B4
aaaagattccttgacatctcttttaattcaaatgggaatgagttgccaaatcgctcatattcttaaacataaaattttacagaatatgaatactagtgagaatggtggttgtttgctcccgggtgatcgttatccagattggtggactttccacagtgaagattcttctgtgatttttgaaatccctcaagtgaacaaacgtaacttgaagacaatgatgtgccatgtccattattcttccccagtcaatatagcaacagatggcttgaaaaatttgttggtgataaatcacacaaagaccaccattcagctttacaagagtgatgcattag

SEQ ID NO: 44106 - DNA, 380 bp, Glycine max
  Clone ID: LIB3139-070-P1-N1-B5
gtctctttcttcatagcatttggaaatttggctgatgataccatcaattttgaggcttttccccacaagctggtgcagtttggagagattcaggaaaaagttgtattgaaattttcacaagaggaatttcttacagcttggtcaactcaggtgcgtcctgcaacaactctgttggctgatgggtgtccatatttgtatgcaatggtgcatgatagttcagtgtctacaataccaggtgattttgtcattggtgtcaagttgacaaccataaacaatatgtgtgcatatgggctcaatcctggtatttcaggttctcgtcttttgggcaccattcctcagtccatttcacagcaaactgtttggaatcaaatggcaacagt

SEQ ID NO: 44107 - DNA, 321 bp, Glycine max
  unsure at all n locations
  Clone ID: LIB3139-070-P1-N1-B6
aaagcactttgaagagaatgaaagaaaccaaataggagaaagaaagtagttgaggaagatacaaacaatttttgcagattgttgagaatgcctttcaagaagcctcatcacacctcagacaagaactacataacaggggacgacggaggcaagttcgagatacaacctagaggactcaacattgtgtggggaaatgattctcgatactggaaaattccagaacaaggtcctgcggagctgatccaagtttcatggttggaggtatccggcgtggtaaacttaccaggtgtcaagaaatatnagggtgaattcgaagtgaga

SEQ ID NO: 44108 - DNA, 365 bp, Glycine max
  Clone ID: LIB3139-070-P1-N1-B7
cctaacgcagcatcgctattctcttcattccatggctttgcccaaccagcaaaccgtggattaccctagtttcaaactcgttatcgtcggcgatggtggcacaggaaagacaacctttgtgaaaaggcatctcaccggagaattcgagaagaaatatgagccaaccatcggtgtggaggttcacccattggattttttcacaaactgtggaaagattcgattttactgctgggatactgctggacaggagaaatttggtggcctcagagatggatactatatccatggacaatgtgctattatcatgtttgatgttactgcccggctaacatacaaaaatgttcccacctggcaccgtgatcttt

SEQ ID NO: 44109 - DNA, 367 bp, Glycine max
  Clone ID: LIB3139-070-P1-N1-B8
cattcttcaacaaatccccttttcagtttcagtttttctcgaggatcccgtgaaacgacatggcgatggtggaccagcctctgtatccgattgccgttttgatcgacgagttgaagaatgaggacattcagctgcgcctcaactcgatccgaaggctctccacgatcgcgcgcgcgctcggcgaggaccgcacgcggaaggagctgattccgttcctcagcgagaacaacgacgatgacgacgaagtgctcctcgcaatggccgaggaattaggtgtcttcattccctacgtcggaggcgttgagcacgccaacgtgcttcttcctcccttggagacgctctgcaccgttgaggaaaccagcgtcag

SEQ ID NO: 44110 - DNA, 368 bp, Glycine max
  Clone ID: LIB3139-070-P1-N1-B9
cagcactggagctgccaaggctgttgggaaagtccttcctgctttgaatggaaaattgactggtatggcattccgtgttcccaccgtggatgtctctgttgttgacctcacggtgaggctggagaaggaagcctcatatgatgaaattaaaaatgctatcaaggaggaatcagagggcaagttgaagggaattcttggttacactgaagatgatgtggtctccaccgactttgttggtgataacagatcaagtatttttgatgcaaaggctggaattgcattgaataagaattttgtgaagcttgtctcttggtatgacaacgagtggggatacagttcacgtgtcaattgacctgcttgtaatcgtt

SEQ ID NO: 44111 - DNA, 381 bp, Glycine max
  Clone ID: LIB3139-070-P1-N1-C1
tgaaattttaataaaccgcgatcacaggttgccgcaccttaaaaccggaaacaaaagcaatcgttacttgatttcaagaatttctcaatttcttcctacttctttgtgtacgatttcttaagggaaagaaaatcactctctgtgctggtcacagacttcgtgaatcattttcttttccactcctagtttatttgctgaacactctcctatttgatataggacttcgtgtcagatttaaactttttctgtttctttctcagttctctgtttaatttcaagttcaagctggtgaaattttggattagtgctcccactctcctatctggtataggacttcgtgggtagacttttctacttctctcctttctttcactctcttct

SEQ ID NO: 44112 - DNA, 363 bp, Glycine max
  Clone ID: LIB3139-070-P1-N1-C12
gtttcagttgacagagtgttctcgcaccttgcatggatccaaacagatagaaagtcaggtggccttggtgacttgaattatactttgatttctgatgtgaccaaatacatatcgaaatcttatggtggtctcattcctgatcagggaattgcattgagagggttgttcattattgacaaggaagggggtattcagcattctaccattaacaacttggcaattggtagaagtgttgacgagacaaaaagaactcttcaagccttacagtatgtgcaggagaacccagatgaagtttgtcctgcttggtggaagcctggggagaagtgcatgaaaccagacccttaacttagcaaagactacttt

SEQ ID NO: 44113 - DNA, 365 bp, Glycine max
  Clone ID: LIB3139-070-P1-N1-C2
cggacttgctgtgaggatctgacacatgcttcagtgaaacccttgataatagggcttacagaaggtgacaccaatccacgattagattaaaaggatgccagtgaattgagaaaatggagtaccagagaagacatatgttgacccaagcaaggcgtataagtttgtgagcacgacacagaccatggagctaagaagtcagagaaggtgaccaagcttggaccctgtggtaccaacaaagacaaatgctgaagaccgtgtgaaggataccatggtgctcttacagcaaaagagtgtgaagccttacgactatgactctgaagatgaagcacctgcacacttaatagtaaacgatgaatcatgtatga

SEQ ID NO: 44114 - DNA, 381 bp, Glycine max
  Clone ID: LIB3139-070-P1-N1-C3
gcatttaactggtggttgggccaatctcactgggttgatccccagtccgaaactgacaactatgagcagcactctttaaaaccatatttcaagtatataaagtttttgaatgaagtaagctaaaagaagtactatggagaccaagcgctgcaacttctggctttctaacaaaaacagattttgtgcaaactgccctctcaatggctccttattctgtggcaatcacaactcaaggtctcaaggccagtggatcccctgccccatagatccatcccactcggtgctcaagcaaaatctcaaagggcatgttaagcggtgtccattgctgaaacacggtcaatctttgtgtgaccaaccgctctatgataaaggcgtcaatgc

SEQ ID NO: 44115 - DNA, 375 bp, Glycine max
  Clone ID: LIB3139-070-P1-N1-C4
attttgtgaggttcattatgaagaaaagggacaagcttagttgtcaagttggaatcaacccatactccatggaatggactggtttggccaatagattactgagtaagggcaacgatattctgtgttgcgattatgctagttttgatggtttgattaccaagcaagttatgagcaagatggcagaaatgataaacagtctttgtggtggtgatgaaaaattgatgcgtgaaaggacacatttgctgttggcttgttgttcaaggatggcaatttgtaagaaagatgtttggagagttgaatgtggaatcccttctggatttccgctcacagctatttgcaatagcatttttaatgagatgctcattagatatagct

SEQ ID NO: 44116 - DNA, 376 bp, Glycine max
  Clone ID: LIB3139-070-P1-N1-C5
aatccaccttccctcaattgaacttcaaggtctattactttgatcccgagatcgtccgcaacctgatctccacctgtgtcagacaagccctcgaacaacccctcaactacgccagaaattatctcgctgacctcctcgaaccctgtgtcgaaagagttatatacctagattccgatctggttgtagtcgacgacattgccaagctctggagcaccagcttaggttctagaaccatcggcgcccctgaatactgccacgccaacttcaccaagtacttcaccgcagcgttctggtcggacacgcgcttcgcgagggcgttcgccgggcggaggccatgctacttcaacacgggcgtgatggtgatagatctggtgcg

SEQ ID NO: 44117 - DNA, 267 bp, Glycine max
  Clone ID: LIB3139-070-P1-N1-C6
atagggttaattggcctttctctatctctatcggccatgggtgcttttgcttttgatgaggaaaactcctccaccgtggctccggcaacactctacaaagctctgacaaaagatgctgacactatcatcccaaagattattggggccatccaaactattgaaatcgttgaaggaaatggaggacccggaaccgtcaagaagataacagctagtgaaggtgaccaaaccagtttcgtgctgcaaaaagtggatgcaattgacgaggct

SEQ ID NO: 44118 - DNA, 370 bp, Glycine max
  Clone ID: LIB3139-070-P1-N1-C8
cctttctctctctacgatggagccttcctcgatctctccaccgccagctccgcctgccaccgtcgtccccttccccgccgaacccaacgaccaccttccaccacccattcccgaaccaccttctaaccacccaccctacgccgagatgatatacacggcaatcgaggcgctgaaggagaaagacggttctagcaagagggcaatagcgaagtatattgagcaagtgtatacgcagcttccaccgaatcactcagacttgttgactcagcacttgaatcacttgaagagtaggggattgctccaaatggtaaaaaaatcttacgcccttcctagatctgtgcccgtgtctgttcctggacctgcacccaca

SEQ ID NO: 44119 - DNA, 248 bp, Glycine max
  Clone ID: LIB3139-070-P1-N1-C9
atgctagttccctttatgctgtccaaaaacatgtcattttccccccccttgggctgacagaagatttttcggtgaatgagattctagcatgggaagaagggattagaaaagcctcaagtggagggtacttgcatcttgttcttgggaaaattcaggtgaatatggggacccccagagggatagctcttctcagattcacaaccctcttgttttggagctcaacgaatgctttgctttcttctaaaggg

SEQ ID NO: 44120 - DNA, 367 bp, Glycine max
  Clone ID: LIB3139-070-P1-N1-D11
ctgttttcctgttgaagtctttccctagccaatggccaccgatcgtttgacccgggttcacagtctccgtgagaggcttgatgaaaccctcactgccaacaggaatgaaattttggcccttctgtcaaggatcgaagccaagggcaagggcatcctgcaacaccaccaggtcattgctgagtttgaggaaatccctgaggagaacagacagaagctcactgatggtgcctttggagaagtcttgagatctacacaggaagccatagttttgccaccatgggttgctctggctgttcgtccaagacctggtgtgtgggagtacctgagagtgaatgtgcacgctcttgttgttgaggagttgcaacct

SEQ ID NO: 44121 - DNA, 362 bp, Glycine max
  Clone ID: LIB3139-070-P1-N1-D12
ctctgtagagatctatgaaaaagttgggagggagtgtgcacacattgattacatgcaacctcattgcattgaagcctaacatgaagagatgacgaagagtacagggtgtacataatcgactgttatggagcttgattctttagtgtctacaatatcattttagcttgagagggtaaataaaaaatggacgatatacagtgtgcgggtataaccattgaattttggtattttacgtcgtagcatgccgggtaccatgatcgaatctatcttaacgcgtaatcgcgagaatgagatgggtacaactttaacattattgaatcacgcatactattagccgagctttagtcaaatagttattgacc

SEQ ID NO: 44122 - DNA, 205 bp, Glycine max
  Clone ID: LIB3139-070-P1-N1-D2
cgagcatgcctgcacgctctactctagacgatacctcccgctaatctcaaccccatatttttacccatgaggcaaaattgttcagggtgaatgaggcaatttatgggactattaaacctatcctgacaccacaagtaatgatatcggaattactcaatgaattcaaatacttcattttcaaaaaatattactgcaaaaaagtcca

SEQ ID NO: 44123 - DNA, 380 bp, Glycine max
  Clone ID: LIB3139-070-P1-N1-D3
gcagaggattccgcatgatctggaattcgtgttttctttcgcttgttcgtttgtttaattcaataaaggaaattaggcatgaccctcttgttgagtatgctctgcctatctgaaaatttccacacctcttttaattgtcgtgatgatgtgggaaaatcattctggagtgacttggagtactgtaaaaacaccaagaattggtattgctacgggaagacggtggctgaacaagcagcatgggatgtagcaaaagagagaggggtggacttggttgtggtgaacccagttttggtgattggaccattgttgcaaccaaccattaatgctagttcacttcacatcctaaagtaccttactggctctgtcaaaacttatgtaaa

SEQ ID NO: 44124 - DNA, 299 bp, Glycine max
  unsure at all n locations
  Clone ID: LIB3139-070-P1-N1-D4
aaaagcccnacaaggacccancacccccaccnccaggnnacaaaaacaaaacaccaccaccaccggggnacaaggacaagggcccaccaccaccaccaccnaagaaggccgacaaanacccancnccnccaccaccggggnacaaggacaagggaccnccgccgcccgacaagaacccnncnccaccaccaccaccanacaaggacccaacnccnccaccacccccagcggatgactacaaaacaccgccaccaccacccaagaaaccacacaaggatccancnncaccgccaccacac

SEQ ID NO: 44125 - DNA, 350 bp, Glycine max
  Clone ID: LIB3139-070-P1-N1-D5
gctgcgtcctcctactatacttggagtcagagaacatgtgttcactggcagggtctcatctacagcgtcatttatgtgcaaccaagaaactaggtttgtgactttggggcagcgagtcttagcacatccattgaaggtccgcatgcactatggccataccggtgtttgcgctagactattgcacataacccgtggtggtatcaggatggctttccgtgtgatcaacattagtgaggatatgtatccaggattcaacatcaaccttacgtcacggaaatatcacacgatatggatatcttcaggttggaaagggatgagatgctgcgctcaatcagatggcactatttgaa

SEQ ID NO: 44126 - DNA, 241 bp, Glycine max
  Clone ID: LIB3139-070-P1-N1-D7
ggagagaccgctagatgcctgcacgccgacttagggatcctccgggggagccaatccacatttcaagacacagtgggcaaaaagcccagatatgaatgggcattattcgacacctattaaagctatactgcatccacaggaaattatattggcatgcctcggcggattccaactccacattttctagaaatgaagccgcaaatctgttcatatatacagtgggagtttttcttggctaatc

SEQ ID NO: 44127 - DNA, 369 bp, Glycine max
  Clone ID: LIB3139-070-P1-N1-D8
cagtggagaagataagtttgtgatgtcaaagaggttgaaaagctatttaaacttctcccaccctttaatatcccaaaattttgatcccaatgaatgtgcttgggcttatggtatgaacatttttgaccttgatgcttggaggaagaccaatataagctctacataccattactgggtagagcagaatataaaatcagacctcagtttgtggcagctaggaacattaccccccggattaatagcattccatggtcatgtccacactattgatcctttctggcacatgttgggattgggatatcaggaaaatacaagttttgctgatgctgagactgctggtgtaatccatttcaatggcagggcaaaacc

SEQ ID NO: 44128 - DNA, 368 bp, Glycine max
  Clone ID: LIB3139-070-P1-N1-D9
aaagcctctccctgcaggtgttgaaatcgatgaactccctaagcaaattgatgatacacagtacccaaaaacattcttctataaagaagaccttcatccaggcaaaacaatgaaagtacaattcaccaagcgtccctatgcacaaccttatggtgtatatacatggttaacggatattaaagacacctctaaagaaggatatagttttgaagagatatgcatcaagaaagaagcgtttgagggagaagagaagttttgtgcaaaatccttgggaacagtaattggttttgccatttcaaagctgggaaagaacattcaagtactttcaagttcctttgtcaataagcaagagcaatacactgtggaag

SEQ ID NO: 44129 - DNA, 368 bp, Glycine max
  Clone ID: LIB3139-070-P1-N1-E10
gatgttgttgtgtgcagtgccgtctctgcctaatatgttttggaagaaagaagaaagagtcagtgcgttgcgcgtgtaatggaagctgagcggaagcgcttgaagccacgccttgagcgtcggaacgctatgaagaacatcgactaccaattgaaggacgaggacgcagacgcagacgcagacgcagcttatttgaatcaacggagtttccgagtcaaaggaatcgacggcgaattcgaccgcatccttcgcagcctgggcctctctgggcccgaggactttgccatccctgctgcagcctgggaagaagcccgggcccataaagcccgcagcagcgtccaaccgagagaggggggaataaagggtgt

SEQ ID NO: 44130 - DNA, 369 bp, Glycine max
  Clone ID: LIB3139-070-P1-N1-E11
caattttgaggcttttccccacaagctggtgcagtttggagagattcaggaaaaagttgtgttgaaattttcacaagaggaatttcttacagcttggtcaactcaggtgcgtcccgcaacgactctgttggctgatgggtgcccatatttgtatgctatggtgcatgatagttcagtgtctacaataccaggtgattttgtcattggtgttaagttgacaaccataaacaatatgtgtgcatatgggctcaatcctggtatttcaggttctcgtcttttgggcaccattcctcagtccatttcacagcaaactgtttggaatcaaatggcaacagtgagaacaccattgaattttgattctagcaagct

SEQ ID NO: 44131 - DNA, 380 bp, Glycine max
  Clone ID: LIB3139-070-P1-N1-E2
gtgatgataacttaattagtgttcatgaatatgtcaagccttactttagtggttctaaattgaaaagctttctagctggtcataatatcaccattactgatggtattgacaaaactagtgcaactttgcaatttagaaagttagcagattgtgattttctcaagagaaactttaagcagatgtctaatgttttgtgggtggctcctgaagacaaggcgagtttatggtcacaacttcattatgtttcgtgtaataatctggaaatgcaagaagcttatcttgtcaatctcgtaaatgtgttacgagaactgtatttgcacagtccagaggaagctcgccaattgagaaggaaagctctctctcgtattgaatggctgcaa

SEQ ID NO: 44132 - DNA, 381 bp, Glycine max
  Clone ID: LIB3139-070-P1-N1-E4
ctttaagcagatgtctaatgttttgtgggtggctcctgaggacaaggcgagtttatggtcacaacttcattatgtttcgtgtaataatctggaaatgcaagaagcttatcttgtcaatctcgtaaatgtgttacgagaattgtatttgcacagtccagaggaagctcgccaattgagaaggaaagctctctctcgtattgaatggctgcaaaaagctgatgtgcctaccatagcacagattgaagagttccattcgatgcagaggatgatgaatgctcctgattcaaatgataatattgatctactgttgagcattgatttgttgggtttacaaggagcaggtaaagcttttccaaacaagattgtttttgatgataagct

SEQ ID NO: 44133 - DNA, 380 bp, Glycine max
  Clone ID: LIB3139-070-P1-N1-E5
tggatggactgccaccccaatgcaggatgttcaggttacaattgattggtttatttcctctcaggaatgtgttcccaggacctattgtgttttaaatccacaaaatccttttgtgttaaataggtggatgggaaaattgactttcccccagggcacttcccgaagtgttaagagaatgcctctttctatagggggaggagctggtgcaaagaatgctattctcatgaatatgccaaatgctgttctttcaatgtggagatattttgttggagatctcgtctttgaagtttctaagatgacttctccctacattaaatgtacagtctctttcttcatagcatttggaaatttggctgatgataccatcaattttgaggctt

SEQ ID NO: 44134 - DNA, 336 bp, Glycine max
  Clone ID: LIB3139-070-P1-N1-E6
aaaaaggagggtttgttgggttggttaatggccaaaagggggggaggtgaaacaccttaccctttgtgaaatacttgagagtgcgcgtggaaactctttcccgcaacacttcctttaccctcggtttcaacttgttgattctccgcttctcccaagagggtaggggttgtgttctcgacaagttctaggtgacagagcgcgtcattttctgtgtctaaaactttcagaaagccgatcctttttagggtaaccccaatgctcactttcagaatgacccttgattgggtagtgtagattcagtagagatcgcgatggctcttgaggaagagattgggg

SEQ ID NO: 44135 - DNA, 368 bp, Glycine max
  Clone ID: LIB3139-070-P1-N1-E8
tcggatctagagtcttcagtttctcctcgttgttcttcgctttcctgttttcaatttcgattctttcgttaatttaataagatgtttgggagggcaccgaagaagagcgataatacgaggtactacgaaatcctcggcgtctccaagaacgcttcgcaggatgatctgaagaaggcttacaagaaagccgccattaagaatcaccccgacaagggcggtgatcccgagaagtttaaagagctggcgcaagcttatgaggttctgagtgaccctgagaagcgtgagatatatgatcagtatggtgaagatgcgcttaaggaaggaatgggtggtgcggtggccatgatccatttgatatcttttcatct

SEQ ID NO: 44136 - DNA, 137 bp, Glycine max
  Clone ID: LIB3139-070-P1-N1-E9
tgacattgcaaatacaaggagtctttcttttttcagatagcaaaacataaattgtataattctgaaatctccatctgtcatgtgatccacatgccatatggagggttcagaattatacaatttatgttatgccatct

SEQ ID NO: 44137 - DNA, 285 bp, Glycine max
  Clone ID: LIB3139-070-P1-N1-F1
gtaaaggggaaaaaattggtctgcttgaaataaccagtctaggggttcaaatccatcaaatgaagctagttatagttaaggggggcgatttggggtaaaggaaaaaaagggatatgggttggtggtaatgggaggttttggttgtaatgtaaaagtggaaagggttggagggctgaagggctgtatggcctggggtaaaaggaatagacgtgccccgttggggtggagggcgacttcccgcttaatggggttgatattttgaatcatagaccattgaagatgaac

SEQ ID NO: 44138 - DNA, 367 bp, Glycine max
  Clone ID: LIB3139-070-P1-N1-F10
gggaagtgccctgagggaatgcctctttctatagggggaggagctggtgcaaagaatgctattctcatgaatatgccaaatgctgttctttcaatgtggagatattttgttggagatctcgtctttgaagtttctaagatgacttctccctacattaaatgtacagtctctttcttcatagcatttggaaatttggctgatgacaccatcaattttgaggcttttccccacaagctggtgcagtttggagagattcaggaaaaagttgtgttgaaattttcacaagaggaatttcttacagcttggtcaactcaggtgcgttccgcaacgactctgttggctgatgggtgcccatatttgtatgcta

SEQ ID NO: 44139 - DNA, 357 bp, Glycine max
  Clone ID: LIB3139-070-P1-N1-F11
gaagaagatggagatgtatcagatctggagcaggagaatagcgttgggagcgttcgcgtttgttctgcttttcctatcggcctcaacaaaccacgtcgttgtgctctcttaagataacttccagaaggaagttggtcaagacagaggagctctcgttgaggtctatgctccttggtgtggacactgcaaaaagcttgctccaaaatattaaaagcttggtagcagcttcaagaaagccaaatctgttttaatcggcaaggttgactgtgatgagcacaagaatttgggcagcaaatattgagtctcttggtacccaacaattcaatggtttccaaaaagatcttttggacccaaaaa

SEQ ID NO: 44140 - DNA, 363 bp, Glycine max
  Clone ID: LIB3139-070-P1-N1-F12
ggaaaatcatgtagttcaaatacccttaatggcacaggaggaaattctgtcttctagtgcaagtgacttcagaactgcaatggtgagtaaaaatagcaagcctcaagctactgcaatgcatgtgggagctatagaaattatcattgatagtttcgcaagtcctgactgcaacataattggtgcaatgcttttggttgatacttatcataccaatcctgaaaatgcagttcgtagtatttttgttgcgcctttcaaaggcggaaggcccattcgggtggttacatttccgaataccattgtgcagattggaccagacatgaattcaaggtttcagcttttgagtaccactaccaatggtgattt

SEQ ID NO: 44141 - DNA, 384 bp, Glycine max
  Clone ID: LIB3139-070-P1-N1-F2
tcaagaccaagtggaccgactccgtcaccggcaccatgccactcggaaaaaagatcgaggccgggctcatcgccggcggcatcggcgccgccgtgggaaaccccgccgacgtggcgatggtccgaatgcaggccgacggccgcctccctccggcgcagcggcgcaactacaagtccgttgtggacgccatcacgcgaatggcgaagcaagagggcgtcactagcctgtggagaggctcatcgcttacggtgaaccgcgccatgctcgtgacggcgtcgcagctggcttcctacgaccagttcaaagaaatgattctcgagaacggcgtgatgcgcgacggcctcgggacccacgtcacggcgagcttcgcggcggggttcgtgg

SEQ ID NO: 44142 - DNA, 380 bp, Glycine max
  unsure at all n locations
  Clone ID: LIB3139-070-P1-N1-F3
attaaaatggtggccacagttggtattcctgagaatacaggtatagcattggcctgtgctatgaatagttcttttagggggcgcgccagttctgatatttacaccatctgctctcaagactgtgaattatggaatcctgcttgcacaaaagcaatgactatgtcatttaatccaaacccgtgttctgatgcatggagtttggaatttctgaagcgtaccggatttcattgtgatatcatttgtgtcactggatggactgccaccccaatgcaggatgttcaggttacaattgattggtttatttcctctcaggaatgtgttcccaggacctattgtgttttaaatccacanaatccttttgtgttaaataggtggatggg

SEQ ID NO: 44143 - DNA, 268 bp, Glycine max
  unsure at all n locations
  Clone ID: LIB3139-070-P1-N1-F5
gaagattctggtgaatgcgtagaataggaaactgaagaaattagcgtgacaaatgtcgggtgtgtccagcatctccatagggtcagtcgncggaggagctcgttgacgtcagcagacgtacacacgtcgacgacgattaccgatgatgttctctctatgctgcatcaggagaagaacccgtacatggtgtcggcagacgcaggagagcattttcagacaccttgtattgagaacaacttagatggcaagcttgtctactgcctttata

SEQ ID NO: 44144 - DNA, 321 bp, Glycine max
  Clone ID: LIB3139-070-P1-N1-F6
attacagcagcaaaggaaggttgtggtaagtaaatagtagtaacctaacccttgcgtttgcgagtgaggctgatgttgggtttggaaggcaaaggctggtgttgtcccaatccaaggtttgtttgtgtttgtgtttgcgccctgtcttgtctcaatttcgccggtgttttttgcttacttagatatctcatcgacatatctgagctgtgtagagagaagtaatgttaagcaaacggaatggcgaacatatacattgaatggatcttgaagcaacagcctgattattggcgcgttccttgagactaaaatattgtgtacttt

SEQ ID NO: 44145 - DNA, 371 bp, Glycine max
  Clone ID: LIB3139-070-P1-N1-F7
gaggggacacaatgtgcggaagcaagcgcagatgacgatgcggtgcatgcaagcactggtgagggtgcaggcacgagtacgggctcgccgattccaattgagtcacgcggatcaggaaagagagaagaaagaagagcccaagcccatacccgtgcccgtgcccatgagccccctgagaagaatagacgacattaatgactgggacaataggcgtcaaagtagctacaaaattaaggaaaacgatttgcggaaacatgaagctgtaatgaagagagagagagctcttgcatacgctttcaactatcaacagcaacaacaaaagcaatttttgcagccagactggaatggtaatgatgatgtaggaacaaact

SEQ ID NO: 44146 - DNA, 360 bp, Glycine max
  Clone ID: LIB3139-070-P1-N1-F8
cgcacgaatatcttgttgtttggagcgatccgagaaaaactctgtaaacatgttggtttaccaggacctccttacaggtgatgagcttctctctgactccttccgttacaaggaaattgagaatggaatgctgtgggaagttgaggggaagtgggttgttaaaggagcagttgatgtagacattggtgcaaacccttctgctgagggtggaggagaagatgagggagttgatgatgcagctgttaaggttgctgacattgttgacacattcagacttcaggagcatcccccattcgataagaagcagtttgctacctttatgaagaggtttatcaagaatttgactcccaagctcgatgc

SEQ ID NO: 44147 - DNA, 242 bp, Glycine max
  Clone ID: LIB3139-070-P1-N1-F9
ccgctctctctctccttctcgctctttcagctttgacttttgttggaaactaaggcctaatcaaaatggtgaagttcacagctgaagagctacgtcgtattatggactataagcataatatccgcaatatgtctgtcattgctcatgttgatcacggaaaatcaaccctcactgattctcttgtggctgctgctggtattattgctcaaaaaattgccggtgatgtccgtatgactgatacc

SEQ ID NO: 44148 - DNA, 294 bp, Glycine max
  unsure at all n locations
  Clone ID: LIB3139-070-P1-N1-G1
gcctagttctagacattatcaccaccaaatgcaaatggtggtatcgtcatttgagcaggcagcaggttatggggcggcaaaatcttacactgcccttgccctaaagactatctcaaagcaattcaggtgccttaaagatgcaatctctgcacaaatcaaagccacgagcaagacattgggtgaagatgattgtttaggagttaaagtagaagggtcgaggcttaggtttgttgaccaccatctcangcaacaaagggcacttcagcagctaggaatgattcaacccaatgcatg

SEQ ID NO: 44149 - DNA, 367 bp, Glycine max
  Clone ID: LIB3139-070-P1-N1-G10
ctgttgtagcacatttcgaatatcacaagcacccaatcacatccattgagtggagtccacatgaagcctcttcattggcagtttcttcatctgataatcagcttacaatatgggacctttctttagaaaaggacgaggaagaggaggctgaatttaaagctaaaactaaagaacaagttaatgctcctgaagatctgcctccccaactattatttattcatcagggacagaaagacctgaaggaactacattggcacacacagattcctggaatgattgtatctaccgctgaagatggattcaacgtccttatgccttcaaatattcagagcacactgccatcgaatggtgctttgtagacgccccc

SEQ ID NO: 44150 - DNA, 352 bp, Glycine max
  Clone ID: LIB3139-070-P1-N1-G11
gttctgatgcatggagtttggaatttttgaagcgtaccggatttcactgtgatatcatttgtgtcactggatggactgccaccccaatgcaggatgttcaggttacaattgattggtttatttcctctcaggaatgtgttcccaggacttattgtgttttaaatccacaaaatccttttgtgttaaataggtggatggggaaactgactttcccccagggcacttcccgaaatgttaagagaatgcccttttctatagggggaggagctggtgcaaagaatgctattctcatgaatattccaaatgctgttctttcaatgtggagatattttgttggagatcttgtgtttta

SEQ ID NO: 44151 - DNA, 369 bp, Glycine max
  Clone ID: LIB3139-070-P1-N1-G12
actttctgtaatggaaaaataaacttgttatcaaaaaaaatatggtaccatttaatcttactccatcagaaattgcatctaatctgtgtctagatctcaagggaagaaagtcccagccataagaagggaagcgggttaaagaacactaaaacttgaagatagcagcaccacttgatggcttggaagcaaatacataaaggccaagatcgttcttcttaataacgcccttgtctattctagactggtagaaacattccttcaaattaaggataaattgtggaactatgctctctttcaccaaagcaacagcacaaccaccccatccagctccagtaagccttgccccaagagcaccattgttacgacaaa

SEQ ID NO: 44152 - DNA, 384 bp, Glycine max
  Clone ID: LIB3139-070-P1-N1-G2
ctccaccacagttgcagaacagcacaaacacaagacagtgccaaggaaaaatactcagattcagcgttagtgtgtgattgtgaggctgttgagtgttgagtagggaagaaaagtgaagacctcaaaacaacgagctaaatcaggctcttgaggacaaccaagagaagaagaagagtgaagaagatgactggaatgacgaagaatcaaccgtcacagtggtggtggcttgatagccacaccacttctaatcgatccccttggcttcaatccactctctctgagcttaatgagaagacaagggcaatgttaaagttaattgaagaggatgcagattcctttgccaaacgtgcagagatgtattacaagaagcgaccagagcttgtg

SEQ ID NO: 44153 - DNA, 380 bp, Glycine max
  Clone ID: LIB3139-070-P1-N1-G3
gctggtgctgctggagaatatgctggactgatggttattcgtgcatatcatttggcaagaggagaccaccatcgcaatgtctgcattatacccgtctcagcacatggtacaaatcctgccagtgctgctatgtgtgcaatgaaaattgtatctgttggaactgatgccaagggaaacatcaatattgaagagttgaggaaggctgctgaaacacataaggacaacctagctgctcttatggtaacatatccttcaacccatggtgtttatgaagaaggtattgatgagatatgcaaggttattcatgataacggaggtcaagtatatatggatggtgctaacatgaatgcacaggtgggacttacaagcccaggttggat

SEQ ID NO: 44154 - DNA, 373 bp, Glycine max
  Clone ID: LIB3139-070-P1-N1-G4
accctttttgcgtgaagggtcgcgtctactgtgacccttgccgtgctggttttgagacctcagcaaccacctacattgccggtgctgagattatgttgcaatgcaagagcagggttagcaacgaggttgtgtacaccaagaaggggtacactgactcaactggagcatacacaatgtacgtggacgaggatcacgcagatcaaatatgcagtgccaagcttgtaagcagccctcaccctcaatgcaaggaagtcaccccgggccgcgacgaagccgtcgttattctcacccgctacaacggcattgcatccgatgataggttcgccaatgccatgggcttcatgtctcaggaggttgcttctggctgtgctga

SEQ ID NO: 44155 - DNA, 364 bp, Glycine max
  Clone ID: LIB3139-070-P1-N1-G6
gctggctataaaatcctcttaaccagttgttgctgctgcgttgcacttcagtttacagctcccgaaaatggctcctccaagaggtcgtggtggttttggtggtggcggtgggttcaggggtggtggtaggggtgacagaggcagaggaaggggcggtggaggaagaggaggagacaggggcactcccttcaaagctagaggaggtggcaaaggtggtggtggccgttgcggaggcaggggtggtggccgtggtggtggcatacgtggaatgaagggagttagcaaggctgtggttaatccccttagacattatggtattttcattgcctcgggttgagataacgcttttgttactaagaatttt

SEQ ID NO: 44156 - DNA, 370 bp, Glycine max
  Clone ID: LIB3139-070-P1-N1-G7
taccacgtgctacagtatacggtgtttgatcagcttaaacaacgagcactgaagaataaacaagacaatgctgataaaggaacatctccagcgtccctttctgcatttatggcctttcttttaggtgcaatttcaaagagcattgctacctgtctaacatatccagctatcaggtgcaaagttatcattcaagctgcagactcagctgaagaaacctccaaaacaaagataaaatcacagaaaacagtgcttagtgttctctatggaatatggaaaagggagggcatactgggatattttaaaggattgcatgctcagatcttaaaaactgttttgagctcagcactgctcttaatgatcaaggaaaaga

SEQ ID NO: 44157 - DNA, 368 bp, Glycine max
  Clone ID: LIB3139-070-P1-N1-G8
aaagcaatgactatgtcatttaatccaaacccgtgttctgatgcatggagtttggaatttctgaagcgtaccggatttcattgtgatatcatttgtgtcactggatggactgccaccccaatgcaggatgttcaggttacaattgattggtttatttcctctcaggaatgtgttcccaggacctattgtgttttaaatccacaaaatccttttgtgttaaataggtggatgggaaaactgactttccctcagggcacttcccgaagtgttaagagaatgcctctttctatagggggaggagctggtgcaaagaatgctattctcatgaatatgccaaatgctgttctttcaatgtggagatattttgg

SEQ ID NO: 44158 - DNA, 367 bp, Glycine max
  Clone ID: LIB3139-070-P1-N1-G9
gtagtgccttactgcttggtcaactcaggtgcgtcctgcaacaactctgttggctgatgggtgtccatatttgtatgcaatggtgcatgatagttcagtgtctacaataccaggtgattttgtcattggtgtcaagttgacaaccataaacaatatgtgtgcatatgggctcaatcctggtatttcaggttcttgtattttgggcaccattcctcagtccatttcacagcaaactgtttggaatcaaatggcaacagtgagaacaccattgaattttgattctagcaagcagagcttttgtcagttttctattgaccttctcggtggaggaatcttagtggacaaaactggagattggatcacactt

SEQ ID NO: 44159 - DNA, 361 bp, Glycine max
  unsure at all n locations
  Clone ID: LIB3139-070-P1-N1-H1
ctatatcttctatccatccctctcaaacctcctcctatatactacgtagaatccaacacaacactcacgaaaattaagaaaacactgctatattaatatcttcacaacgtaacctttgatctccacaacatggagaaatcgagagaagaaaagcttagccaagtttgggattgtggcagcaccctttatgattcctacgagctcaactccttcaaacgccaattaaacacggcaatagcgaattccccgagcaatagaagaaccctttccatgtctcatttacccgaacgttgtctctcatcactacaatcacagncacagccacccatgtncaacaacaacaagtctttcaagatctctc

SEQ ID NO: 44160 - DNA, 368 bp, Glycine max
  Clone ID: LIB3139-070-P1-N1-H10
ctcgagccgctttttggttgtgtattttccttccagttctcgggggaaactgttggcattattgggctaggaaggattggccaagcaattgctaagagagccgaaggattcaactgtcccatatgctactactctagaactgaaaaaagagactcaaaatacaagtactatccaagtgttgtagaactagcatctaagtgcgagatactggtagttgcttgcccactaacggaggaaactcatcacatcatcaacagggaggtgatcaatgcactgggtcccaagggttatcttattaacattggacgaggcaagcatgttgatgaggcagagttagtgccagcactgctagaaggtcttttgggtgg

SEQ ID NO: 44161 - DNA, 369 bp, Glycine max
  Clone ID: LIB3139-070-P1-N1-H11
ctcgagccgcaatttgttagaaagatgtttggagagttgaatgtggaatcccttctggatttccgctcacagttatttgcaatagcatttttaatgagatgctcattagatatagctatgaaaaattactgcgccaggctaaagctccaagtatgtttttacaatcccttcaaaaattttgttctttgtgtgtgtatggtgatgataacttaattagggttcatggatatgtcaagccttactttagtggttctaaattgaaaagctttctagctagtcataacatcaccattactgatggtattgacaaaactagtgcaactttgcaatttaaaaagttagcagattgtgattttctcaagagaaact

SEQ ID NO: 44162 - DNA, 68 bp, Glycine max
  Clone ID: LIB3139-070-P1-N1-H12
gtgtgaagtgtgtgttattttaaaaaataaaaaaaaaaaaaaaagaaaaaaaaataaatgataaggtg

SEQ ID NO: 44163 - DNA, 383 bp, Glycine max
  Clone ID: LIB3139-070-P1-N1-H2
gacttaacaacagcacaaagcgggttactgtctgttcaagctaccatctctctctctctttcttagtgcctccttgccagaagttaaaatggcccaagaaactttcctattcacatctgaatcagtgaacgaggggcaccctgacaagctctgtgaccagatctccgatgctgtgctcgatgcatgcttggagcaggaccctgacagcaaggttgcctgtgaaacctgcaccaagaccaacatggtgatggttttcggagagatcacaaccaaggccaacgtggactatgagaagattgtgcgtgacacatgcaggaacattggttttgtctctgatgatgttggtcttgatgctgacaactgcaaggtcctcgtcaacattg

SEQ ID NO: 44164 - DNA, 363 bp, Glycine max
  Clone ID: LIB3139-070-P1-N1-H4
cttctatttcttcttcttattattcgtattcttcactgtgctgtttctccccaactaccgctttacgttgaagttaatgagcttgaaaagaagaagcgaacactgactctgatattgttctgaatttcctcaccctatacaactagttttaacgaacatggaaactgaaaagtctaatgtttcaaaggctgaagaatgtaaactccttgccaatgaagcattcaatgctcgaaaattctcccaagccattgatctatatacacaagcaattgagctgaacagtcaaaatgcagtttacttttctaatcgtgcctttgcccatcttcggcctgaggaatattggagcgcaatacaagaagccac

SEQ ID NO: 44165 - DNA, 424 bp, Glycine max
  Clone ID: LIB3139-070-P1-N1-H6
taaagcagccatgacgtaagcatgcgcagcgtacgttagcgtgggaattagcatcgaggtgtgtactgggaattatacgtcatagagggtgagaatcccgtacttgacatggctgcccagtgctttgtgatacaacctcaacgagtcgagttgtttgttaaaaacacttgtaccaatgaggcccaatcactccttttgactgctgcattcccagacatcacaatcttgaccattaaacaacctttcttccaagcagcaactctcaacaagttactaattggagaattttgtataagtgtgatccaatctccagttttgtccactaaaatttcttcaccgagaaggtcaatagaaaattgacaaaagctctgcttgctagaatcctcccaactactttgttgcattacacgcaccatccagagag

SEQ ID NO: 44166 - DNA, 364 bp, Glycine max
  unsure at all n locations
  Clone ID: LIB3139-070-P1-N1-H7
gttgggtttacaaggagcaggtaaagcttttccaaacaagattgtttttgatgataagcttgtgttggctaacacacaagaattctttgatggaaattttccagtggattcttggttaccaatttttgtgaattgtctctatcctgtaagtcaattaccttcagaagctgtcgttgtaaatgttacatgtggtagtggacgtgtggttacccaccactgnttggattagttctgcagttaacaatcgctcctcagacatcaacaaaaggattcgcacagcacttgggaaaggtaagaaaattgttttttcttactagagttgatccttttccagtagctttattggctgttctttttggcgtta

SEQ ID NO: 44167 - DNA, 333 bp, Glycine max
  Clone ID: LIB3139-070-P1-N1-H8
gagcaagccggcaagcatatgagttgaccatcacattcatagaatctggaagtggcaatctgaaccaaacaaaccactctcaagggtaatcaaatcttggttcttttcatttcaccagcttctacttttcttgttctgaagcaggggaaaatgacaatggttttttggtagtggtaatttgtgaaacattgatttggtaaagatggcgtggagaaaaaggtgtgaggaagtggcttattcgaagcctctgttcctcacgatctacactggtgtcatcattggaatcgtggtttcctccttcttcggcttctctgctatatactcaaccaaccc

SEQ ID NO: 44168 - DNA, 368 bp, Glycine max
  Clone ID: LIB3139-070-P1-N1-H9
ctcgagccgtttccccaaaccaacttacactcaaagaaagcttgttctccttctgcctagtaagaagcaacttgttttagaaagaaaagaaaaacagtgtcattgctctttggcacaataagataatagaaaatggaaagcgacaggaattgggagcagaacgcactcatcagtgagctaattcaggggttggaggtagcaagaaagttgaaggaagacttgagttcagcctcttcggttgacgctagggactcacactcactactgcagaggatattgtcttcttatgacaaggctttgctttttctaagatggaatgaatcagtgtccatgcaacaaccaactaaaacttcttcaccacagtcacc

SEQ ID NO: 44169 - DNA, 377 bp, Glycine max
  Clone ID: LIB3139-071-P1-N1-A10
tttcaatccctactcgtttgttctattggcaacgcgaagaagatggggttgtgattcgtaattggagaactgtggagtggaggagggaggacactttccacgaccacaatgcgttggtttccgttgagtacaacttcaaactcggagagagaacggaatagagagaacactactcgtgcttcggtgtatctcaatgtatatgatcttactcccataaacaattacctttacatgcttggccttggaatttttcattcgggtatacaagtgcatgatattgaatatggctttggggcacatgaatatccaagtagtggtgtgtttgaggtggaacctaaaaactgccctggcttcatctttagacgatcagtgttgtt

SEQ ID NO: 44170 - DNA, 376 bp, Glycine max
  Clone ID: LIB3139-071-P1-N1-A11
tctgtgtctaacgttccatctcttcacgactctctcgctcgtcccttccaacgttaaccctttctttttctctttcttcattcttcacaccctttgtgccatcttctttgcctcctcattgtcgtaattcatctgaattctcctaaacttttatcttattccttttgtttggatgatcgatcaagggagagtataaaaaaagggagagcatttgaattgacactgggggtgatgaaatacgtgtctgaacattgagaccacttctctgaagtcattttgatcttaattgcgttttttggtggcttcttgaggagattaaaggactcaggtgaaagagtaacgtatctattgtgttggtgggggtgttttttcaagg

SEQ ID NO: 44171 - DNA, 387 bp, Glycine max
  Clone ID: LIB3139-071-P1-N1-A12
gtcggtgaaggagtgcgagcaccacaaggggaagaagaggaagatcttccggcaagtgttctggtgcttagtggtgttccttttcatcgtgctggtcacaattcttttgatatgggcaatccttagacccaccaaacccaccttcacgctccaagacgtcaccgtctacgccttcaacgccaccgtggcgaacttcctcacttcgaattttcaggtcacgctcatctcgcgtaacccgaacgaccgcatcggtgtttactatgatcgcctcgaaaccttcgtgacctaccggagccagcaggtcacgtaccgaaccgccatccctccgacatatcaaggccataaagagatcaatgtttggtctccgtttgtttatggcaccaacat

SEQ ID NO: 44172 - DNA, 394 bp, Glycine max
  Clone ID: LIB3139-071-P1-N1-A4
gtaaatgtgttacgagaattgtatttgcacagtccagaggaagctcgccaattgagaaggaaagctctctctcgtattgaatggctgcaaaaagctgatgtgcctaccatagcacagattgaagagttccattcgatgcagaggatgatgaatgctcctgattcaaatgataatattgatttactgttgagcattgatttgttgggtttacaaggagcaggtaaagcttttccaaacaaaattgtttttgatgataagcttgtgttggctaacacacaagaattctttgatggaaattttccagtggattcttggttaccaatttttgtgaattgtctttatcctgtaagtcaattaccttcagaagctgtcgttgtaaatgttacatgtggta

SEQ ID NO: 44173 - DNA, 398 bp, Glycine max
  Clone ID: LIB3139-071-P1-N1-A5
ggctcgagggatttttattttctcttccttcaacgcaaaaacacacaactcttagtaatcatcatgtcctctcctctcttcttcccctcattattagaccctcgctttcatcatccccaccgcatcttttacctcccaccaaccgcaccaaagccatcatcctcctctgcctctaacatcaccaccacaagaagaagaagaagaagaagaagaagaagaaagagaagcaaggagaaagagaagggttagaaggcgaagaagcatggcttcactcaagaagaagaaaccctattacccgcttccgttaattcctatctattactacttcttattcaaagggtgatatgatcttcttcttccaagagtctcatgcatgctactttcttctctcttctcgg

SEQ ID NO: 44174 - DNA, 386 bp, Glycine max
  Clone ID: LIB3139-071-P1-N1-A6
cgacgagactgtcaccaatgacgaaattgctgctgacctcaaagagcatgtgatcaagcctgtgatcccagagaagtaccttgatgagaagaccattttccacttgaacccttcaggccgttttgtcattggtggccctcatggcgatgctggtctcaccggccgcaagatcattatcgatacttatggaggatggggtgctcatggtggtggtgctttctccgggaaggaccctaccaaggttgataggagtggtgcttacattgtgagacaggctgctaagagcattgtggcaagtggacttgccagaaggtgcattgtgcaagtgtcttatgccattggtgtgcctgagcctttgtctgtgtttgttgacacctatggcactg

SEQ ID NO: 44175 - DNA, 367 bp, Glycine max
  Clone ID: LIB3139-071-P1-N1-A8
ggaggaactgtttgaagaaggatcagcaatgcttgctgaaagattaggaaatgatgacaacttgaactcggggcaatcaacatctggcatttttgtctgtgctgtatgtcaagttgatcttgctccaagtgagggcatctctgtccacgcaggttctattttctccaccagctccaaaccctgggaaggtccttttctatgttttgattgccgcgataagaaggatgctatggaaggaaaacgcccaagaggagttaaggtgtcataagctcaaaattggtgtgctattctagtattctatatgctatctttggccatttttgtattcacgatttttataggcaaaaattaattgattgaatctcac

SEQ ID NO: 44176 - DNA, 300 bp, Glycine max
  Clone ID: LIB3139-071-P1-N1-A9
ctagagcagattcggttggcgctagtgaacacaaggagcgacatgacagggggaacaaagcagaccaagattgtaacataggcaaggatgggtgaaacagacggctgaaaaaatgagacgagctccttagagtgcatgattgcgctaaacactttacgagtggaagaaatgggagctgattatggggcatatgctggattctaaatgatgaacaacaacggactatagtgtgaccctaggaaagacgaattatgaagctttctcagaggactaagcaagatatgtaccaccagatcgtaa

SEQ ID NO: 44177 - DNA, 397 bp, Glycine max
  Clone ID: LIB3139-071-P1-N1-B1
cacttcccaagaacacagttggaggaaccattctgcgtagtgatttattggcaaattttttgacagagggcaattttagagcaagtgttgatttgcagcgcactcatcgtattagaggaatgattaaaatggtggccacagttggtattcctgagaatacaggtatagcattggcctgtgctatgaatagttcttttagggggcgcgccagttctgatatttacaccatctgctctcaagactgtgaattgtggaatcctgcttgcacaaaagcaatgactatgtcatttaatccaaacccgtgttctgatgcatggagtttggaatttttgaagcgtaccggatttcattgtgatatcatttgtgtcactgggtggactgccaccccaatgcaaga

SEQ ID NO: 44178 - DNA, 286 bp, Glycine max
  Clone ID: LIB3139-071-P1-N1-B10
agcacaacgaaccaaagttaactactctagagagagagagagagagagagagagagagagagagagatggagagtgaaagaagaagataatgatgagtgagagaaacaacatctatgacgaggaatgtggaggttgctgagataagatacaaaggaataatgttgatgaagtgggacatgtcagtcattaaaaatatagaacccaataagcgttcaaggatgtttgttcgtgttctattctaccgctgtcgattccttaagtgtctactaaactaactttttttat

SEQ ID NO: 44179 - DNA, 334 bp, Glycine max
  unsure at all n locations
  Clone ID: LIB3139-071-P1-N1-B11
caaagacaaatttatntttatacaactccctacgtcctccgggcgcagtgtttctttccaaatccgaccacactaacaacaaacttcctatcttcctctactttcacggcggctccttttgcgtcgaatcctgtcttcttctttttcgtccaccgttctctcaacatcttggtctcataagccaatataatagtcatctccgtcgaacttagactccttctacaccatcctatcccttgttgcttacgaagacagttggaccactctcaaatggattgcttatccacgccaacaacaccaacaccaccaaccttgagccatggctacttatcca

SEQ ID NO: 44180 - DNA, 389 bp, Glycine max
  Clone ID: LIB3139-071-P1-N1-B12
tgacgatcaagttaccacaccgaatacattggccgagagacacaggtcctggaacaatgagaaccatgtgtcacaacataatactcaagctcagccatcatatgctaccggcaataggcagtcaagtgaagttgtgcatgtagagaaacggcaaaagttgatggaagaagaagcaacactggaagctttcccaccaaacaatttgaagcaattgctgattgcatgtgccaaagccctgtctgaaaacaacatgaatgattttgatcaattggtaggaagggctaaagatgctgtgtccatcaatggggagccaatccagcggcttggtgcttacatggtagaagggcttgttgcaaggacgcaagcatcggggaatagcatctatcatg

SEQ ID NO: 44181 - DNA, 399 bp, Glycine max
  Clone ID: LIB3139-071-P1-N1-B2
ggcacaaggtctttcagtgggttcattccttgtagaagaagataagttggatcttgctacatcactacttgcaaaagccaaggaaaagggggtgtctctcttgttaccaagtgatgtggtgattgcagacaaatttgcccccgatgcaaacagcaaggtcgtgccagcatctgccatccctgatggctggatgggattggatattggtccagattctgttaaatcattcagtgaagcattggatactacccaaaccatcatattgaatggaccaatgggatgtgttttagttttgccaagttttcctgtttggtctaatggtctttttctaaatatctaattttttttctaatttttttgtttttttccccctttttttcgtgttatgatttttttttt

SEQ ID NO: 44182 - DNA, 377 bp, Glycine max
  Clone ID: LIB3139-071-P1-N1-B3
aaagtggactaccttccgcgtcgttcaggcgattatgctgaggtgtacagtgacccatcaaagatcaaacgtgaattgaattgggttgctaagcacactgatcttcaacagagtttgaaggttgcatggagatggcagaaatctcatcgtgatggttacggggtttcaaatgcattattttgaattacatagaattctaacataacagcagaagactagaagaaaccccggcagcatccatttcagctgcacttctatgatatcttagaataggggttgatattatttttttctttcttttactccattggggaatttgttcttagggagcatgttgttcatattattcaattattgtccgcaatatttgatttaat

SEQ ID NO: 44183 - DNA, 189 bp, Glycine max
  Clone ID: LIB3139-071-P1-N1-B4
caacaacaagcagatcaatctctctctctctctcaaccataatagtcatgggtttgaaggaggattgtgagcaggatgctcataaagcaaagactttgccaccgactcaatcaaacgaagacttgcttatcctttatggattgttcaaacaggtcaccgttggacctgtcatacaccagtcgtactggt

SEQ ID NO: 44184 - DNA, 394 bp, Glycine max
  Clone ID: LIB3139-071-P1-N1-B5
gcagaacagaaccaagcgagttgttgtgactgactcagtgagcgagcgagcaaccgagttactcatggcgaacgcggcgcttcggaacgtgaaggtgctcccgaactcggcaaatatggaggaagctcgtcaccgagtcttccaattcttcagaacggcttgcagatcgttaccctccgtcatggaaatctacaacctctacgacgtcgtttccgtctccgaactccgctcctctgtctcctcccagatccgtaagaacatccacgtcaccgatcccaaagtgatcgatatgctgcttttcaaggggatggaagagctgaagaacgtcgtggaccattcaaagcagaggcatcatatcattggtcagtatgtagttggtcaacaagtacaggat

SEQ ID NO: 44185 - DNA, 196 bp, Glycine max
  Clone ID: LIB3139-071-P1-N1-B6
caaggagcaggtaaagcttttccaaacaagattgtttttgatgataagcttgtgttggctaacacacaagaattctttgatggaaattttccagtggattcttggttaccaatttttgtgaattgtctctatcctgtaagtcaattaccttcagaagctgtcgttgtaaatgttacatgtggtagtggacgtggtg

SEQ ID NO: 44186 - DNA, 327 bp, Glycine max
  Clone ID: LIB3139-071-P1-N1-B7
ttatcccacaacaccactccttcctagttcctagtacactatgttgtcactttccaacggacacctgtgcactgccgttctgctcaaacccattttccttcatggcttgtccggtttcctccaccttctgttgctcgtggcggttgtgctgacatgggtttggaggaaaatcacagcaggccccggggatgagtctaagaagaaacccaacaacttcctctccaaaacgaccgatttttcttgtattgctctttccgctttcaatttcctcctctgtttcattaactacttctactggtatacaagtggctggacagaagaaaagct

SEQ ID NO: 44187 - DNA, 241 bp, Glycine max
  Clone ID: LIB3139-071-P1-N1-B9
ttcgtttgtttaattcaataaaggaacaagcgcatgaccgcttgtgtgagaatgctatgcctatctggaaattttcacacctattttaatttgcgtaatgatcagtgaagactgcgtttttttaattcttaaaaaaattaaaatgggggtccgttgactcttgagcttgttgatcctggaaatttatatcggtccgtctcctgctggctttccttcttttcctttaatgaggattcatttc

SEQ ID NO: 44188 - DNA, 297 bp, Glycine max
  unsure at all n locations
  Clone ID: LIB3139-071-P1-N1-C1
agaaaaggaaaaaggaaattgaggagaagttgcaagggttgaatgataataaacataacctggtgttggtgttgaagcagattctgaatgcggaggaggagttgaagagacgaaatagtatgcaagtagttgcaatgcatggtccttcggtcccacttcaaggggatggaacaaatgatactggtttgatgattaggcatatgcccccgaggttgggatcccagggaaatcttgttgctgctgatgtggatggtggtgaaggggtatgtttttgttttcttttctnttgcttttttt

SEQ ID NO: 44189 - DNA, 390 bp, Glycine max
  Clone ID: LIB3139-071-P1-N1-C10
ctcacaacttcatcaaaccaaaaaacacaacaaaagaaagaaagaaagaaacaaagagttccttgctttgtagtaagatatatcatcaaaaatggttttgtcttggactagaagaaacgttttccgccgtgcaaagaaggagaaggaacaaagtcaactattagaagttgaggttgtgattcccaaccactttcgctgtccggtgagtttggagctgatgacagatccggtgactttatcaaccggcattacctacgaccgtgtgagcatcgagaagtggatcgagggagaaaacagaacctgccccgtcaccaaccaggtgctgacaaccttcgacctcatccccaaccatgccattcgcatgatgattcaagattggtgcgttcaaaa

SEQ ID NO: 44190 - DNA, 382 bp, Glycine max
  Clone ID: LIB3139-071-P1-N1-C11
ataataattttcatctaaaaaaaaaccaccgttgaatttgacagtcccggcgaggcatgttcttgctccgagtccactcagtggaagaggagcaccctctggatccccgaaccatcttccaatcccaaaccaacaaccctaaattcagccaacgcagaggcgcgctccacttgttccgaacctcttcccactcctctccctcttctcttctcttcatcctcgccgtccccaactacctctccttccacgacttcattcccttctgtgggccccacctcgaccgtcttcaccaccttctctttatcaggaacgacggaacagaagatcgctatagcgtcttgatcgagttcgccgatcactttgccgccgacgcattttatac

SEQ ID NO: 44191 - DNA, 387 bp, Glycine max
  Clone ID: LIB3139-071-P1-N1-C12
ctcgagccgctcgagccgcgctcacagttatttgcaatagcatttttaatgagatgctcattagatatagctatgaaaaattactgcgccaggctaaagctccaagtatgtttttacaatccttcaaaaattttgtttctttgtgtgtgtatggtgatgataacttaattagtgttcatgaatatgtcaagccttactttagtggttctaaattgaaaagctttctagctggtcataatatcaccattactgatggtattgacaaaactagtgcaactttgcaatttagaaagttagcagattgtgattttctcaagagaaactttaagcagatgtctaatgttttgtgggtggctcctgaggacaaggcgagtttatggtcacaac

SEQ ID NO: 44192 - DNA, 321 bp, Glycine max
  Clone ID: LIB3139-071-P1-N1-C2
ctcaggatggcaccagggttagggccattgataagccaaacattgcacagcctccagctggatgggagcgactgctaaggatcagagctgaaggaagctccagatttgcagatatatactatatagcaccatcaggcacgagattgcgctcaatggtagaggtgcagaagctcttgatggagcatcactgagtatacaagagatggggtaactctctcacaggtctcatttcaaattccaaggccattacaagaaaactatgtgaggaagcgcttcgttagacttacctcttgatatgaaagtagcgagcctgctgaacat

SEQ ID NO: 44193 - DNA, 243 bp, Glycine max
  Clone ID: LIB3139-071-P1-N1-C3
aaatgataatattgatttactgttgagcattgatttgttgggtttacaaggagcaggtaaagcttttccaaacaaaattgtttttgatgataagcttgtgttggctaacacacaagaattctttgatggaaattttccagtggattcttggttaccaatttttgtgaattgtctttatcctgtaagtcaattaccttcagaagctgtcgttgtaaatgttacatgtggtagtggacgtggtgg

SEQ ID NO: 44194 - DNA, 387 bp, Glycine max
  Clone ID: LIB3139-071-P1-N1-C4
ctcgagccgtgccaccccaatgcaggatgttcaggttacaattgattggtttatttcctctcaggaatgtgttcccaggacctattgtgttttaaatccacaaaatccttttgtgttaaataggtggatgggaaaattgactttcccccagggcacttcccgaagtgttaagagaatgcctctttctatagggggaggagctggtgcaaagaatgctattctcatgaatatgccaaatgctgttctttcaatgtggagatattttgttggagatctcgtctttgaagcttctaagaagacttcttcctacattaaatgtacagtctttttctttattgcattttgaaattttgctgcagataccatcaattttgaggttttttccca

SEQ ID NO: 44195 - DNA, 293 bp, Glycine max
  Clone ID: LIB3139-071-P1-N1-C5
aaagaattctgcgaatttaagagggttggaaggtgtggctggtgggagattgatttcctctcaggaatgtggtgccaggacctattgtgtttttaaatccacaaaatccttttgtgttaaataggtggatgggaaaattgactttcccccagggcacttcccgaagtgttaagagaatgcctctttctatagggggaggagctggtgcaaagaatgctattttcatgaatatgccaaaagctgctctttcaatgtggagatatttaggtggagttttcgtctttgtaggtttt

SEQ ID NO: 44196 - DNA, 382 bp, Glycine max
  Clone ID: LIB3139-071-P1-N1-C6
tgtgacttctataaatgaaaaacctcttgtcctggctctctccaatccaacttcacagtctgagtgtacagctgaagaggcttatcaatggagtgagggtcgtgcaatttttgctagtggaagtccatttgatcctgtagaatacaagggcaaagtgtactattctggccaggccaacaatgcttacattttcccgggctttggtctggggttggtaatctcaggagcaatcagagtgcatgatgatatgcttctagcagctttggaagccttggttaaactagtgtccaacgagaactacgaaaagggcttgatttatccaccatactctaacatcagagaaatttcagctaacatagtagcaagtgtagctggcaaggca

SEQ ID NO: 44197 - DNA, 383 bp, Glycine max
  Clone ID: LIB3139-071-P1-N1-C7
caagccctcacttgaattgaaggaccatcctgcctttaatttctcatcaccacttcagtcaacaaaagatggtgatgatgaaatctctcccacttcttctaatagtactcttttcccactctaccaccaccttagcccagtccccggccgcggcaccgaccgccccggccacgccctccaccgtagtcgccccggccccagcacccttcgcacccccgacagacattataagaatcctcaaaaaggcaggagggttcacaaccctaatacgccttctccaggccacacaagtttccaaccaaatcaacttccaacttcttaccacaagcggcggtctaaccctatttgcaccaaacgacaatgtcttttcagccttaaaccgg

SEQ ID NO: 44198 - DNA, 272 bp, Glycine max
  Clone ID: LIB3139-071-P1-N1-C8
gttaaataggtggatggtaaaactgactttccctcagggcacttcccgaagtgttaagagaatgcctctttctatagggggaggagctggtgcaaagaatgctattctcatgaatatgccaaatgctgttctttcaatgtggagatattttgttggagatctcgtctttgaagtttctaagatgacttttccctacactaaatgtacaggctctttcttcatagcatttggaaaatttggctgatgacacccattaattttaggttttttcc

SEQ ID NO: 44199 - DNA, 224 bp, Glycine max
  Clone ID: LIB3139-071-P1-N1-C9
aacacaacgaaccaaagttaactactttagagagagagagagagagagagagagagagagagagagatggagagtgaaggaagaagagaaggaggagagagagaaacaacagcagcgacgaggaaggtggagggtgctgagagaagatacaaaggaataaggatgaggaagtggtgcaagtgggttgatgaaattagagaacctaataagttgtcaaggatttg

SEQ ID NO: 44200 - DNA, 389 bp, Glycine max
  Clone ID: LIB3139-071-P1-N1-D1
gtttctctgtcttcattttagtttttacggctagaagaatgtccagctcatcggaatatttggtattttccggccaccacccggcgaactctccggcggaaaagtccactttctctcagacttgtagtctattgagccaatacatcaaggaaaagggtaccttcggagaccttaccctcgggatgacttgcactgccgaaacaaacggttcccctgagacatcgtgtcactctgcaacaaccatggagttgtttcccacgatcatcacgcaacggaacccaactactgtggatttcctatcttcccagactgcttatccttaccactcagaggtttcaatcatggttaaatcaagtgcttttaagtctatggagaaggagcctaaagct

SEQ ID NO: 44201 - DNA, 389 bp, Glycine max
  Clone ID: LIB3139-071-P1-N1-D10
cgagaataagaccaagtcccctgcttccggcgtgtggtccaccatcaagcctttcgtcaatggcggagcctccggcatgctcgccacctgcgtcattcaacccatcgatatgatcaaggtgaggattcaacttgggcaaggatcagctgcgcaggtcacttccaccatgcttaagaatgagggtgttgctgccttctataagggtctatctgctggattactcaggcaggctacatacaccactgcccgtcttggatcatttaaaatcttgacggccaaagctattgaggctaatgatgggaagcccctgccactgtatcagaaagctctgtgtgggctgactgctggtgctatcggagcaagtgttggtagtccagcagactttggca

SEQ ID NO: 44202 - DNA, 364 bp, Glycine max
  Clone ID: LIB3139-071-P1-N1-D11
ttctccttctgttcaaacactctctctcatggcatcagataagaagattaggatcggcatcaacgggtttggaaggattggccgtttggtggccagggttgcccttcaaaggaatgatgttgaacttgttgctgtcaacgatcctttcatcaccactgattacatgacatacatgttcaagtacgacaccgttcatggccagtggaagcattttgatgtgaaggtgaaggactctaagacccttctctttggtgagaagcccgtcaccgtttttggaatcaggaaccctgaggaaattccatggggtgaggttggtgctgattatgttgttgagtcaactggtgtattcactgacaaggacaag

SEQ ID NO: 44203 - DNA, 386 bp, Glycine max
  Clone ID: LIB3139-071-P1-N1-D12
ctttccagaagttaaaactctcttcacttgaagcgtaagtatatccttggcatgctgctttttattttagttgtacctgagtgattatatgttttcctataaatataataagaaaatggttatacacactaacatttagaagaccaaaaagtcggattgaatacatgttatccgctttaggggaattgtctatatagtagtttattaacatggtcttataccccattgagtgtgtggtctgcattttatttactgattttcttgtttactttcatgctttgtagtactgggcaaaagcataaaggttcaagtggctcacaaagtaaaagggcaaaaaaaatcaaacctgtgaaacgtgcatcaaaaaataagttgcatcaagagga

SEQ ID NO: 44204 - DNA, 290 bp, Glycine max
  Clone ID: LIB3139-071-P1-N1-D2
caagaaaaacccaaaaagattgataccagattgagacaaagaatagatcctcaatacaatgaggttcaggctcagatggaaacaaatttgtttaaattgtctcttgatgatgttgaaactcctaaaggttctatgttggatcttaaaatttctcaatctaaaattgcacttcccaagaacacagttggaggaaccattctgcgtagtgatctattggcaaattttttgacagagggcaattttagagcaagtgttgatttgcagcgcactcatcgtattaaagggaatga

SEQ ID NO: 44205 - DNA, 329 bp, Glycine max
  Clone ID: LIB3139-071-P1-N1-D3
ctattaccagagagacagcccaaactttcaccttcaaagtgtggatgagataatgaaaattgtaggagaggcaagaaatccacctccagtatctaggcctgtcaaaggttttggctgggaaggtgaagaagatttggatgaagaagtggaggaagaagaggatgaagatgagtatgataagagggtcaaagaggttcatgcaagtggcgaatttcaaattagttaaagccctcaaattcttgtgtactttgttgaaatattgtactttttagaagtcacccttttttgtgtacacgaagtcacctattttatgtgccattataaattat

SEQ ID NO: 44206 - DNA, 308 bp, Glycine max
  Clone ID: LIB3139-071-P1-N1-D4
gacaaaactagtgcaactttgcattttagaaagttagcagattgtgattttctcaagagaaactttaagcagatgtctaatgttttatgggtggctcctgaggacaaggcgagtttatggtcacaacttcattatgtttcgtgcaataatctggaaatgcaagaagcttatcttgtcaatctcgtaaatgtgttacgagaattgtatttgcacagtccagaggaagctcgccaattgagaaggaaagctctctctcgtattgaatggctgcaaaaagctgatgtgcctaccatagcacagattgaaga

SEQ ID NO: 44207 - DNA, 60 bp, Glycine max
  unsure at all n locations
  Clone ID: LIB3139-071-P1-N1-D6
aggggccaagaaacaaagnggagancggagagagagagagagagagagaggagggaaagg

SEQ ID NO: 44208 - DNA, 331 bp, Glycine max
  Clone ID: LIB3139-071-P1-N1-D7
tgtgggtggctcctgagtacaaggcgagtttatggtcacaacttcattatgtttcgtgtaataatctggaaatgcaagaagcttatcttgttaatctcgtaaatgtgttacgagaattgtatttgcacagtccagaggaagctcgccaattgagaaggaaagctctctctcgtattgaatggctgcaaaaagctgatgtgcctaccatagcacagattgaagagtttcattcgatgcaaaggatgatgaatgctcctgattcaaatgataatattgatctacttgtgagcattgattttgttgggtttacaaggagcatgtaaagcttttt

SEQ ID NO: 44209 - DNA, 383 bp, Glycine max
  Clone ID: LIB3139-071-P1-N1-D8
cccttcttttgcatcatttatatctcttgagaaatggcacaagaaacctttctattcacatctgaatctgtaaacgagggtcaccccgacaagctgtgcgaccagatctctgatgcagtacttgatgcgtgccttgaacaggaccctgacagcaaggttgcctgtgagacatgcaccaagaccaacatggtcatggtcttcggagagatcacaaccaaggccaacgtagactatgaaaagattgtccgcgacacatgccgcgaaattggattcatctctgatgatgttggtcttgatgctgacaaatgcaaggtgttggtcaacattgagcaacagagcccggatatcgcccagggtgtgcacggccacttcaccaagcgccc

SEQ ID NO: 44210 - DNA, 321 bp, Glycine max
  unsure at all n locations
  Clone ID: LIB3139-071-P1-N1-D9
cgcaaacacaatgaattattgtgactaaccccagatttgttctgtgctgacctcattttgcactctaaaccatggcttcaaagctcacannttttgctgtctttatggctgatatgctggatctaacacttagcctaactgtttgacaaagaagaaacaccactagtggcgtgtcttgcaagagaccagaatgttattatctgggtgtataactctgatataacagctggctattgcgtgggcgcatatttgtttctgtctgtaagacaagacctgataatgattgaatgtagatgctgaaggtgccgtcagccttttaac

SEQ ID NO: 44211 - DNA, 394 bp, Glycine max
  Clone ID: LIB3139-071-P1-N1-E1
aaccattctgcgtagtgatctattggcaaattttttgacagagggcaattttagagcaagtgttgatttgcagcgcactcatcgtattaaaggaatgattaaaatggtggccacagttggtattcctgagaatacaggtatagcattggcctgtgctatgaatagttcttttagggggcgcgccagttctgatatttacaccatctgctctcaagactgtgaattatggaatcctgcttgcacaaaagcaatgactatgtcatttaatccaaacccgtgttctgatgcatggagtttggaatttctgaagcgtaccggatttcattgtgatatcatttgtgtcactggatggactgccaccccaatgcaagatgttcaggttacaattgattgg

SEQ ID NO: 44212 - DNA, 332 bp, Glycine max
  Clone ID: LIB3139-071-P1-N1-E10
ctcgagccgcaaactgtttggaatcaaagggcaccagtgagaccaccattgaattttgattctagcaggcagagcttttgtcaattttatatggaccttctcggtggaggaattttagtggacaaaactggagattggatcacacttatacaaaattctccaattagtaacttgttgagagttgctgcttggaagaaaggctgtttaatggttaagattgtgatgtctgggaatgcagcagtcaaaaggagtgattgggcctcattggtacaagtgtttttaacaaacagcaacagtacagagcattttgatgcatgtaagtggacaaaatc

SEQ ID NO: 44213 - DNA, 387 bp, Glycine max
  Clone ID: LIB3139-071-P1-N1-E12
gtgcggtctctcaccgtacgcactagcactgtctcactctctcacgcacgcatcatctcaaacttggtcgcactttttcacggatctgatctaactaagttctcgccatgaatcgccaccacgatcccaatcctttcgaggaagaagaagtcaatcctttttcgaatggtggtgctgctcctgcatccaaatcacgtattccaccattagcatctcagccactgggctttggtcaaaggcatgatgctacagttgatattcctttggatactacaaatgactccaagaaaagaggtcaagagctagctgcttgggaagcggatttaaaacggaaagagaaggaaataaaaagaagagaagaggctgtttctagagctggtgttcctg

SEQ ID NO: 44214 - DNA, 394 bp, Glycine max
  Clone ID: LIB3139-071-P1-N1-E2
caattctcaagccaaccatgtcttccttcaagagcaagtaccaagatgaactcattgccaatgctgcttacattggcaccccagggaagggtatccttgctgctgatgagtcaactggtacaattggcaagcgattggccagcattaatgtcgagaatgttgaagcaaataggcgtgctcttcgtgaactcctattcaccacacctggtgcttttgagtgcctcagtggtgtgatcttgtttgaggaaaccctataccaaaagacagcttcaggaaaacccttcgtagagttgatgaaggaaggaggagttctccctggtatcaaggttgacaagggcacagtagagcttgcaggaactaatggggagactactactcaaggtttggatggcct

SEQ ID NO: 44215 - DNA, 387 bp, Glycine max
  Clone ID: LIB3139-071-P1-N1-E3
aaattattttccttttctatccttctatctatcattcttttacgctaaaaatcttctcgcttcttagcttagctgttctgttccagaaacgataaaatcaatcaatcaaaggaagcaaaaaagtcagaatggatctgtgtgctgttcatgcgaagaaccttttccacacaaattcgttttgccacagacccatttcctcccatttgggaaggaccagagtgtttgagatcactgtttcgaggagaaagccttactctaaagttgggtatcgcccatttgttgtcagcgccacggggaagaagaatcatggcaactcctcttcttctggcaatgaagaacggtccattcccgaaggagatggtactagagggaacaattcttctgatg

SEQ ID NO: 44216 - DNA, 225 bp, Glycine max
  Clone ID: LIB3139-071-P1-N1-E5
cctaaccattgttcatattcaaaagcctctgatgtaatttgcgtttttacactaaacattgctgacaacgactactagaattaggaatgaggaagaggatgacagagtcattttgttctttagttcggtcgcttacatatttttttaatgaactttctctgtacagcagcaaaatcagcaaaaaaatgaaaccctctattttgaggggtcttcaaatttttgttt

SEQ ID NO: 44217 - DNA, 384 bp, Glycine max
  Clone ID: LIB3139-071-P1-N1-E6
gccatgaatatcatcagaatgggactacttgtgtgctcaagcttgccccttttgagctgctttatggaactttttgttgctgccactgcttctcaaccacacttcaacaccgcgtcgtccgaggaaaataagatgcacaagaagaaagatgtatcaatcactgctaatgtggcagcccaaaagcactttcgacaaattcaacaaatatgttaaggggatcttgaattcaagttttggaggtagtatagtaatgttttgtgataatatttaggagtcatatctaattttctcaattaatgttgttagacttcttaaaattctgggcagaaatttccattaggcataagtttgaccactatatgtaaaccttaattgattggtgtg

SEQ ID NO: 44218 - DNA, 353 bp, Glycine max
  Clone ID: LIB3139-071-P1-N1-E7
aactaaagcaaagtgactcaccaattcacacacataataaactcactgctcttctctctacccctgcgaaacccgacccgaaaatgcgatccaaatcggatcccccggtgccccctccctccttcttcggcggaagcgacttcttctacggcgcatacatcgatccgatctttcacctccttcgcgttctcccctttagcttcctacggccccctcgccttcggcttaagctttccttctttaccctacccttcccgaacgccgactttgccctcctccttcctacctactttatgggcgggttcgggattgtttacgacatcattggcgagccccccggcattggcttcact

SEQ ID NO: 44219 - DNA, 130 bp, Glycine max
  Clone ID: LIB3139-071-P1-N1-E8
attggaccaagggatgttcccaagattcgctccaagatcttgtcagaagagtttggttgggacaaggatctctccaagaaaatctggtgctttggccctgagacccttggacccaacatggtggttgata

SEQ ID NO: 44220 - DNA, 385 bp, Glycine max
  Clone ID: LIB3139-071-P1-N1-F1
tgagaatacaggtatatcattggcctgtgctatgaatagttcttttagggggcgcgccagttctgatatttacaccatctgctctcaagactgtgaattgtggaatcctgcttgcacaaaagcaatgactatgtcatttaatccaaacccgtgttctgatgcatggagtttggaatttctgaagcgtactggatttcattgcgatatcatttgtgtcactggatggactgccaccccaatgcaggatgttcaggttacaattgattggtttatttcctctcaggaatgtgttcccaggacctattgtgttttaaatccacaaaatccttttgtgttaaataggtggatgggaaaattgacttttccccagggcactttccgaagt

SEQ ID NO: 44221 - DNA, 374 bp, Glycine max
  Clone ID: LIB3139-071-P1-N1-F10
gtcctgtggctgcacatatccaaccttaacttcggccgtcgaatctttctggtcattggttgtttttaattctttcaaaaattcaaacacaacccaaaatctcttgggaattgctagattcactgcttctcctagcagcagattttgggttcttctgacccaattattcattttccccaacttggtcttgttgaatttttattggggttgtaaattccttgttgttgagtttgaaagttatttcctttttccccttctggattcaagtcccaagtatttgcttaaattggggtattttttttatatcagaattgttgctttgaggttttccaaggcttgaaatctgaaaatgacgattggtagtctagcaccta

SEQ ID NO: 44222 - DNA, 378 bp, Glycine max
  Clone ID: LIB3139-071-P1-N1-F11
gaggagaagagggagcaactctggagttcactccgacgtgggttgtggccgccttttgcacagtcatcgtcgccatttccctcgccgctgagcgcctccttcattatggcggaaagtttctcaaagccaaggaccagaagccgctctacgaagctctccagaagatcaaagaagagctgatgcttttggggttcatttccctgcttttgacggttacacaaaacggcattaccaaaatctgcgttcgaccctctttgacgctccacatgctcccgtgtaatctccacgacgctccagcaaaccacgaatctcatttccagacatttttccctggaacagccaggcgccttctctctggggaacactccacccccgagt

SEQ ID NO: 44223 - DNA, 385 bp, Glycine max
  Clone ID: LIB3139-071-P1-N1-F12
acaggatctctctccgtcaaactttctttaccccgtcctcataacatatttcagatccgaaaaccagatcccgcgaactctgaagatctctattctctttccctcacctttccactcaaattcccctttccactttcccgagaaaattaactttttccgtcaattttccctccacctcttccttcttcctcacaatggctctgagcttcaacaatcgaagaatccctctcgctcttcgcattttccttctgttctccttattcttcagcctctcaccgaccttcgctcaggattctctcgttcagaacgcgaaggaagattccggcggatctgtggatctcggtcgccgcgccaaaattgcattgaatgacatagagaatgattc

SEQ ID NO: 44224 - DNA, 362 bp, Glycine max
  Clone ID: LIB3139-071-P1-N1-F2
catcaacagccatgaaaaccacactcttctcactctctcccttattcctgttcctactcttctccctagtcgaaggactcacccccaaatgtgacacccaagaccatggctcaacccttgaagttttccatgtgttcagcccctgttccccatttaggccaccaaagccactttcatgggcagagagtgtccttcagctgcaggccaaggaccaagccaggctgcagttccttgccagcatggtggctgggaggtcagttgtgcccattgcctcaggcaggcaaattattcaaagcccaacttacattgtgagggccaaaattggctcttcaccccaaaccttgctcttggctatggacact

SEQ ID NO: 44225 - DNA, 395 bp, Glycine max
  Clone ID: LIB3139-071-P1-N1-F3
attcttcagaagatttttctgaaaaggaagatcaagaaaaacccaaaaagattgatgccagattgagacaaagaatagatcctcaatacaatgaggttcaggctcagatggaaacaaatttgtttaaattgtctcttgatgatgttgaaactcctaaaggttccatgttggatctgaaaatttctcaatctaaaattgcacttcccaagaacacagttggaggaaccattctgcgtagtgatctattggcaaattttttgacagagggcaattttagagcaagtgttgatttgcagcgcactcatcgtattagaggaatgattaaaatggtggccacagttggtatttctgagaatacaagtatatcattggcctgtgctatgaataggtctttt

SEQ ID NO: 44226 - DNA, 393 bp, Glycine max
  Clone ID: LIB3139-071-P1-N1-F4
ggaactcctggagctgtttcctggaaagagatctcaggtactggctcttttaggaattggtcaaatagctatgagagggaacttcccccaaaacctaatcaggtcaagaaagggaaaacacgccggtggagcctacaatctcccacacaacaaaaccagatggagtattctcataataagttacccatgtatgctgctgcattcatgcttcctgccatggagggatatgataaaaaaaggcaaggtgttgacttgcttggaagagattttattgtcttggggaaactcatttatatgcttggggtctgtatgaaatctgtagccatgcatccagaagcttctatgctggctccttccctcctaaatatgttaagatccagggaggtatgccat

SEQ ID NO: 44227 - DNA, 379 bp, Glycine max
  Clone ID: LIB3139-071-P1-N1-F6
aaaagtggagagaaaaaagatgcagaagaagttattacatgacattggaggtaatgcaatgcttgcaatggtgtacggcaaaaccataaaaagtaataacaagggaaagactaacaatgaagttgaactatttgcttttgataccatcgttgttgccacaaacaatttctcagctgcaaataagttaggagagggtggttttggtcctgtttataagggaaatctaagtgatcagcaagaagtagcaataaagcgactttctaaaagttcgggacaggtgctaatagtgtttacgaatgaagtcaatctaatacgcaaacgaagattcactaatctggtaaagcttttagggttcttgattcagagagatgaaagaata

SEQ ID NO: 44228 - DNA, 156 bp, Glycine max
  unsure at all n locations
  Clone ID: LIB3139-071-P1-N1-F7
gatcgttcttcttctttccactcactctcactctctgtgttggtgagatgggtatgtcatggctgggcgtctntnaatggctcancctcacaatggcttcaccaacaacacttcaaaccagctattggtacttcatgactttctgggtatgattgc

SEQ ID NO: 44229 - DNA, 196 bp, Glycine max
  Clone ID: LIB3139-071-P1-N1-F8
tctcaagcgaattatcagtgatcgtcgccggaaaaattctccgtggaagccatatagcaccggaatatgccctcaatattctccaacccgagattctgattattcgggaaattttggagattctgatgaaacaaattcagaaatttcacatacggatgaggtaatcacaacattagagagaaacggtataagtttt

SEQ ID NO: 44230 - DNA, 241 bp, Glycine max
  Clone ID: LIB3139-071-P1-N1-F9
ctcgagccgctcgaggttaagccgtccctttaccaatgccttctcgtttttgtgttagtctttaactcatctgtcatgtcaattccattgtttttgaaaccttttcctcccccaccttgaaacaaagtatattttgtctcatgtagttttaagacaacttgattaggctgagtctgttgcgaaaatttttcttgtatgatgacgatgatgtttaccatctctttcgcgtggtcaatttttt

SEQ ID NO: 44231 - DNA, 128 bp, Glycine max
  Clone ID: LIB3139-071-P1-N1-G1
ttcttaatccattatgcctttttatttcaccagtttgcatatctgaacattttccatttctttccctcgtgtaaagtttgttgtacacttatgtaggcaatttcacatattgtcctgtttgtttgggg

SEQ ID NO: 44232 - DNA, 366 bp, Glycine max
  Clone ID: LIB3139-071-P1-N1-G10
atttgtgaaagacgaacctgaaagagagagaatcagagcaagaagaagaagatgatctatcggaagtggagtctccttaccggcccggtcaccatcctcggcggcgtagtcgtcgccatcgccgccgccaacgttatcttcgccaagaatgatccattcctcaaaccagaggagaggaactatgaaaatcagcctgctaccaagtaggagaaaagagacaacagaagtttgcgttttgatgtcatttaaaccctgatttatgagctctgtatactgttttgcaagatacgctctcgctagttaataagattgagtttctgaatgaagtctggactctggagcatgggccctcaatttagaactaac

SEQ ID NO: 44233 - DNA, 380 bp, Glycine max
  Clone ID: LIB3139-071-P1-N1-G11
gaagtctttcacaagaagatgaaacgatccttgttgctaatggtcatcaacatgacatcccaaaagcagaccaagttttctttgaagaaggattaaggcctggcacaaaattggatgctcacttcaagaaaagagaaaatgtaaccccattgttgcctcgccaaattgcacaacatataccgttgtcatcagcaaagataaaagaaatagttgagatgctttttgtgaacccagagccagagaatgttaagattctagaggaaaccattagtatgtgtgaagtgcctgcaataactggagaagaaagatattgtgcaacttcattagagtccatggtagattttgtcacttctaagcttgggaagaatgctcgagttatt

SEQ ID NO: 44234 - DNA, 390 bp, Glycine max
  Clone ID: LIB3139-071-P1-N1-G12
gcagcacttaatggtgttgagggtttggactatatggaaagaattcctcttgccacatctgaggggtgtcctcatgtgctttcacgcaaaaatggcgaaaaaggcaaaaggagatttgtctctggggatggtgaagagatgacattgattccaggaaccagtgttgaagaggcttacaacaagctaatagttgaacttgagaaaagtgttcctacattggttggcattgaatgtcccaaggatgagaaacttcctcgtcgcaaaatttttgacaaacctaagacgcgctgcttcactattctccctatggagtttaatcttgtggtccgtcaaaagtttttaaattttgtgaggttcattatgaagaaaagggacaagcttaattgtcaa

SEQ ID NO: 44235 - DNA, 369 bp, Glycine max
  Clone ID: LIB3139-071-P1-N1-G2
gtctcctcagggtcttaacaaagatgttaaagctattcttattaacttgacaccaaaatcaccaagggaaaggggtcccaagtccctgtctgggcttgcaaagcacctcgagaagccagcacagcatgtgaatgcgaagtgtgtctctctccgaattcaccaacctcgttgaggaaaacatttgaagctcatagtgatagcttgctagagctgcaagttgctgactagagcatgagatctgttgaaagaatttttgtatatagagggtgcaatgttcttgtatttttcttgtttatggtcttgtatattttgatggagccctcggaactgtaggtaggtaagactctaattctgaccagccaaaatttg

SEQ ID NO: 44236 - DNA, 391 bp, Glycine max
  Clone ID: LIB3139-071-P1-N1-G3
tgggaaccccgttttggtgccaccaccaggcattggggccaaggactttcgtgacccaacaacagcgtggctcacctcagaagggaagtggcgaatcaccataggttccaagctcaacaaaaccggcattgcgttggtttatgacactgaggacttcaagaactatgagctcaaggaggggctgcttcgtgctgtcgctggcaccggcatgtgggagtgtgtggacttcttccctgtgtccaaggagaatgagaatggattggatacttctattaatggggctgaggtgaagcatgtgatgaaagtgagcctggatgatgatagacatgattactattcaattgggacttatgatgagaagaatgttctgttcacaccagatgatgctaag

SEQ ID NO: 44237 - DNA, 364 bp, Glycine max
  Clone ID: LIB3139-071-P1-N1-G4
gatcctcaatacaatgaggttcaggctcagatggaaacaaatttgtttaaatggtctcttgatgatgttgaaactcctaaaggttctatgttggatcttaaaatttctaaatctaaaattgcacttcccaggaacacagttggaggaaccattctgcgtagtgatctattggcaaattttttgacagagggcaattttagagcaagtgttgatttgcagcgcactcattcgattaaaggaatgattaaaatggtggtcacagttgggatttctgagaatacaggtatagcattggcctgtgctattgaatagttcttttaggtggcgcgccagttctgatatttacaccatttgttttaagact

SEQ ID NO: 44238 - DNA, 261 bp, Glycine max
  Clone ID: LIB3139-071-P1-N1-G5
gttacctagttaagagttaaagagcaaatgttgcaaagatgttagttgagtggttggccggattcaggtatatatatatatggctctccttccaaaaccctagattcgtaactgtaccttttcctcgcccaattcaagtgaaaccttgatggctgaagtggatcagtaccccggcggtgagcatgaggttgaggaaacgattgaggttgaggcggaggaagaaatgcacggtggtgaagaggcggttgttgttgcggacaa

SEQ ID NO: 44239 - DNA, 226 bp, Glycine max
  Clone ID: LIB3139-071-P1-N1-G6
gagaaggagaaagagagaattcttaaaccctaatttcggaaagatcggcgatgactgcctccaaggatcgcgagaacttcgtctacatcgccaaactcgccgagcaggccgagcgttacgaagagatggtggaatcaatgaagaacgttgcgaatctcgacgttgaactgacggtggaggagcggaatttgctttctgttggggacaagaatgtgattgatgcttc

SEQ ID NO: 44240 - DNA, 210 bp, Glycine max
  Clone ID: LIB3139-071-P1-N1-G7
aacgattacggaacccacttcgacgcagacggcaacaaggcgttgccctcatccttccaatctttgacagcatcttctatctatatcggagacttgtttggtgcccttatcgcggcgtcaatcaacgatcgatggggtcgcaaaatggtcttctggattgcgtctatctgcatcctgctcggcggttgtgcgcatgttggcctttccacc

SEQ ID NO: 44241 - DNA, 381 bp, Glycine max
  Clone ID: LIB3139-071-P1-N1-G8
gagagagagagagagagagagagagagaaatggcttgcaggcaattgtgggcttcaagagctgcctcttacctgaggatctctgtgtttcacagaggcttttctaatgttgttaaagatttgaagtatgctgattctcatgagtgggtgaaagttgatgaaaattctgcaaccgtcggcataactgatcatgcccaagatcatttaggggatgttgtatatgttgaattgccagaagtgggagcagctgtaacacaaggaggtagttttggtgcagatgaaagtgtgaaggcaactagggacatttacctttctgttttaagaaaagttgttgaagtttatgtagcgcttaacaggttttctgctttgatcaaaataagcc

SEQ ID NO: 44242 - DNA, 315 bp, Glycine max
  Clone ID: LIB3139-071-P1-N1-G9
gttggaggaaccattctgcgtagtgatctattggcaaattttttgacagagggcaattttagagcaagtgttgatttgcagcgcactcatcgtattaaaggaatgattaaaatggtggccacagttggtattcctgagaatacaggtatagcattggcctgtgctatgaatagttcttttagggggcgcgccagttctgatatttacaccatctgctctcaagactgtgaattatggaatcctgcttgcacaaaagcaatgactatttcatttaaaccaaacccctgttctggtgcatggagtttggaatttttg

SEQ ID NO: 44243 - DNA, 387 bp, Glycine max
  Clone ID: LIB3139-071-P1-N1-H10
tgcaagttgaaatctttgctttctctttcgaaatgcaactctgcgttggtctcctcttcaatacgcgctttctcttcggcacaggttccccctaatcacttgcggaatgttggattcattgggcttggaaatatgggatcacgaatggcaaataatctgatcaaagctggattcagactcacagttcatgacctaaactctgatgttctcgagatgttctcttaaatgggagttcccacaaagaaaacaccttatgaagtttcagaagcaagtgatgttgtaatcacaatgttgccaacttttgcccatgtgattgatgtttacactggaccaaatggtttgcttcatggtggaaaacttctaaggccatgggtggtgttagattca

SEQ ID NO: 44244 - DNA, 389 bp, Glycine max
  Clone ID: LIB3139-071-P1-N1-H11
gacaactctccttcactccaccactcctcactcttctcattcagagctacccaacacacacacaccggaaaataaaataaaaatgcaactccaacccactctctccactctctacctctcccttttgttaacaataacgttaacatctccaaccttggcagcacaaagcaagccgcaggatctggtccggtcctcgtgcgtgcacgcgcggtacccgcgtctgtgcctgcgcaccctctcgaactacccgggtcccgccaacacgccgttagacgtggccagggcagctttgagggtaagcctggcccacacgcgccgggcctccaaattcctccatgcactttctcatggaggcgctgccgccatgagcaagcgccagcgctccgcgc

SEQ ID NO: 44245 - DNA, 388 bp, Glycine max
  Clone ID: LIB3139-071-P1-N1-H2
cattctccctttcctctccgaaccctcgatcactctcacgcgctcgtatattggctcctccaccggcgctctctcgaacaaccacaacaccatcttcatcacatggcaaacgcagcatctggtatggcagtccatgatgactgcaagttgaggtttttggagctgaaggcaaaaaggacacaccgtttcatagtttttaagattgaggagcagcagaagcaggtcattgtggagaagcttggtgagcctgcccagggctatgaagatttcactgccagccttcctgctgacgagtgccgttatgctgtttatgattttgagtatctgactgaagggaatgtccctaaaagcagaatttttttcattgcgtggtcccctgacacatcaa

SEQ ID NO: 44246 - DNA, 392 bp, Glycine max
  Clone ID: LIB3139-071-P1-N1-H3
agacaacgttgtgccacctgcaaaggcacaagtagtgggatggccaccggttcgatcatataggaagaatagtctacaacaaaagaaagaagaacaggctgaaggggctgggatgtacgtgaaagttagcatggaaggtgcaccttacttgaggaagatagatctaaaggtttacaagagctacccagaactcctcaaggccttggaaaacatgttcaagtgcacatttggtcaatattcggaaagggaagggtataatggatctgaatatgctccaacttatgaagacaaggatggggattggatgctggttggagatgttccatggaacatgtttgtgtcatcctgcaagaggctgagaattatgaaaggatcagaagcaaaggggttgg

SEQ ID NO: 44247 - DNA, 398 bp, Glycine max
  unsure at all n locations
  Clone ID: LIB3139-071-P1-N1-H5
ccgngaccaaaaaaaaaaaaaaaataaaaaatccgcgattcgctcttctctgggaaaagtgaaaaccagaagtgcgaacgaaagagaagagcgatttanaagtgagagaagatggggttgtcgttcacgaagctgttcagcaggttgtttgcgaagaaggaaatgaggattctgatggtaggtctcgatgctgctggtaagacaaccatcttgtacaagctcaagcttggagaaatcgtcaccactatccccaccatcggatttaatgttgagactgtggagtacaagaacatcagcttcactgtgtgggatgttggtggtcaggacaagatccgtccactgtggaggcattattttcagaacactcagggtctcatttttgtggttgatagcaatga

SEQ ID NO: 44248 - DNA, 400 bp, Glycine max
  Clone ID: LIB3139-071-P1-N1-H6
cgacgtaagtcggtcggtttccgaataccattgtgcagatttaaccagacatgaattcaaggtttcagcgttttgagtaccactaccaatggtgattttgttcaagggaaagatctcgcaatggttaaagttaatgtagcatgtgctgctgttggcttgacatcaagttacactccaactccattgttggaatctggtttgcaaaaagacagagggttaattgtggagtattttggaaggatgtcttacgttgctcataacgttaatcagccccaagagaaagacacgttagagggaaatttctgctttgatattaaatctcgctctagattggaaaaagttttctctacaaaagcacaatttgttagtggaaaaaccttcaaatatgatataattggtg

SEQ ID NO: 44249 - DNA, 388 bp, Glycine max
  Clone ID: LIB3139-071-P1-N1-H7
ggtgatgataacttaattagtgttcatgaatatgtcaagccttactttagtggttctaaattgaaaagctttctagctggtcataatatcaccattactgatggtattgacaaaactagtgcaactttgcaatttagaaagttagcagattgtgattttctcaagagaaactttaagcagatgtctaatgttttgtgggtggctcctgaggacaaggcgagtttatggtcacaacttcattatgtttcgtgtaataatctggaaatgcaagaagcttatcttgtcaatctcgtaaatgtgttacgagaattgtatttgcacagtccagaggaagctcgccaattgagaaggaaagctctctctcgtattgaatggctgcaaaaagctg

SEQ ID NO: 44250 - DNA, 367 bp, Glycine max
  Clone ID: LIB3139-071-P1-N1-H8
tttacatgtactagggcatgaaaaccttcgagcttctttgttccgaggcggccatttccattgctccaacattgctgatcggagaattgaccgatgaatcagaatcaattggacttaagagctcatcattctggatcaacacaatcagaggagtcggctctggaccttgaaaggagctactatggtcatcctaacccctccagtccttcacccttgcaacctcttgcaggaggtgctcagcattctgagagcaacgctgcctatttttcttggcctacattgagccgctggaacgatgcagcagaagatagagccaactattttgggaaccttcaaaagggtgtgctccctgaaactttgggtcgat

SEQ ID NO: 44251 - DNA, 369 bp, Glycine max
  Clone ID: LIB3139-071-P1-N1-H9
cacaatcatagaatcatattaacctttcttcttagttctcatggctaggcaatcatcctcatcttcctttagttacagattcaccaacgatgtgttcctcagcttccgagggaaagatactcgtcacagttttaccggcaatctctataaagcactctctgaaagaggaattaacaccttcatcgatgacaagaagctccctagaggggacgaaatcacgtcagcacttgagaaggcaattgaagagtccagaatattcatcatcgtgctctctgaaaactatgcatggtcctccttctgcttaaacgaacttgattacatccttaagtttattaaggggaagggcctattggttttgccagtttttta

SEQ ID NO: 44252 - DNA, 376 bp, Glycine max
  Clone ID: LIB3139-072-P1-N1-A10
gtgagaacaccattgaattttgattctagcaagcagagcttttgtcaattttctattgaccttctcggtggaggaattttagtggacaaaactggagattggatcacacttatacaaaattctccaattagtaacttgttgagagttgctgcttggaagaaaggctgtttaatggttaagattgtgatgtctgggaatgcagcagtcaaaaggagtgattgggcctcattggtacaagtgtttttaacaaacagcaacagtacagagcattttgatgcatgtaaatggacaaaatcggaaccacattcctgggaattgatcttcccaatagaggtatgtggtcctaataatggttttgaaatgtggagttctgagt

SEQ ID NO: 44253 - DNA, 352 bp, Glycine max
  Clone ID: LIB3139-072-P1-N1-A11
gttttaacaccattgatttttgattctagcaagcaaagctactggcaattttttattgaccttctgggtgtagtaatttaaatggacaaaactcgccatcgaatcacactcatacaaaattctccaattagtaactacgagtgacctgttgcttgtaagaaaggctgtctaatggttaaaattgtgttgtttgcttatgctccttttatcacgagtagaggttttttactgatcccataaggttttagacacatcatcttttcatagtagattttttcatcataatggtctctgtctttacttcattacttttttttgttctgcgtaatagagtgtatttggatcttataat

SEQ ID NO: 44254 - DNA, 377 bp, Glycine max
  Clone ID: LIB3139-072-P1-N1-A12
ctacactttgctctctaccctctttctttctctttctttttcccttccctcaagtactatcatacacaaacacaaggtacttcacatacccacatacacacacataagcaaaaactcttacttccctttttcaagttcttaaactcatcactacttaactcaggagtgtgcatattttcgttgtatggatggatccttctagtggacaacaccagcaaatgtctagccagtcattggagaacatgttggcatgttcaaaagcccaccaagagagaaaaccaacgcctcagccagaacaagctctaaagtgccccagatgtgactccaccaacaccaaattctgctactacaacaattacagcctttcccagccaagg

SEQ ID NO: 44255 - DNA, 345 bp, Glycine max
  Clone ID: LIB3139-072-P1-N1-A3
ggggcaggcgtatgtggatgatcacctactgtgtgaaatcgaaggtaaccacctcactcacgccgctatcatcggccaagacggaagcgtttgggctcagagcaccaacttccctcagttcaaacctgaggaaataactgccatcaataatgactttaatgagcctggatcacttgctccaactggattgtatatcggtggcaccaaatacatggtcatccagggtgagcctggtgctgtcattcgagggaagaagggtcctggtggtgttactgtgaagaagaccggtgcggccttgatcattggcatttatgatgaaccaatgactccaggtcaatgcaacat

SEQ ID NO: 44256 - DNA, 393 bp, Glycine max
  Clone ID: LIB3139-072-P1-N1-A5
aatctggtttgcaaaaagacagagggttaattgtggagtattttggaaggatgtcttacgttgctcataacgttaatcagccccaagagaaagatttgttagagggaaatttttcctttgatattaaatctcgctctagattggaaaaagtttcctctacaaaagcacaatttgttagtggaaaaaccttcaaatatgatataattggtgctggttcacattcttcaggagattttcctgaaaaggaagatcaagaaaaacccaaaaagattgataccagattgagacaaagaatagatcctcaatacaatgaggttcaggctcagatggaaacaaatttgtttaaattgtctcttgacgatgttgaaactcctaaaggttctatgttggatc

SEQ ID NO: 44257 - DNA, 389 bp, Glycine max
  Clone ID: LIB3139-072-P1-N1-A6
gccactgtcactcttctcttctcctttctgcttcgccgattctctatttttgcgcgcaatcgattgtatgctttgggccagtcgttaatgataacttgaggtctggatgatgctttctgattggttgtttacatattgtaattcagaatgtggaactttgcatcgaattgcattgctggaactgtgggactgaaaaatgattcaaagcctactcattctgcttcggaatgttctgatgatgaaaactctgttataggcagagaggaagggctggaatgcccaatatgctgggaatctttcaatattgttgaaaatgtgccctatgttttatggtgtggccacaccctttgtaaaaattgtatcctcggactgcagtgggctgttgtgaa

SEQ ID NO: 44258 - DNA, 370 bp, Glycine max
  unsure at all n locations
  Clone ID: LIB3139-072-P1-N1-A7
tttttcttttgtcttttattattatgcntgctgtgttcgttcatgtgaacatggtggatgctgatagaagcagataatatagggtttatatacagattttttattagtacgtgccacacactgcccatgcagcagggataatcattctttggtgccaatttttttttttcataaaatcctatctgattctctctctctcttaattagcttctcttaggaatcccagatctttatagacattgtttcctctagcttcatatgattggttctagatggcaaaaccaagttcagctaatggttggactagaagccatgggcagatctttatagtagttggtatgagctggttcttctatatattgggggcatg

SEQ ID NO: 44259 - DNA, 379 bp, Glycine max
  Clone ID: LIB3139-072-P1-N1-A9
gttaaattaatgcccctttcattttctctgcatctgtagtatctatcaccaatcaattccactcttcttcccatcaaacaacaaaaaatcaatctgggaaacaaaaacaaaatgccgtcattagaggaggaactcttcccatcaaccccaggaaagttcaagatcgagcggtcccaccacatgaaccgccaactctatcgctgtttcgcctccaccagcaccatgttcctgtgggccctcttcttaatcgccctcaccgcttcctatctcagcttccaaggcttcgtcgattccggcagccgctacctcaccgcctcctggggcgggatccagtgggagaagcaggtcccgacctccgcccagatccaccgtcaaggcg

SEQ ID NO: 44260 - DNA, 120 bp, Glycine max
  Clone ID: LIB3139-072-P1-N1-B1
tgggttggggattaagggaaatagggcttgcccttttggtggggatggctttgcttatttgaaaatttcaacacctctttaaatggtcggaaaggatggggggaaggggtgtgtattttt

SEQ ID NO: 44261 - DNA, 378 bp, Glycine max
  Clone ID: LIB3139-072-P1-N1-B10
cgagataactagaaacagtgtgatgaaaatgaaggtccttgttttcttcgttgctacaattttggtagcatggcaatgccatgcgtacgatatgttccctctccgaatgaacactggctatggtgcccgtactccggaggtgaaatgcgcaagttggaggcttgctgtggaagcacacaacatctttggctttgagaccattcctgaagagtgcgttggagcaacaaaagaatacatccatggcgaacaatatagatcagactccaaaacaggtaaccaacaagcttacttttatgccagagaacctcgagtccatcccaaggacacatttgtgttcagtatagatggcaccgtactctctaatattccatactacaa

SEQ ID NO: 44262 - DNA, 371 bp, Glycine max
  Clone ID: LIB3139-072-P1-N1-B11
gtgtaatggctagaagttttttgttcttgatgctacctcttgttcgttctagcggtacaaccataagggcataacccatgtatgattgcgataatatgatttatgaatataaaacttattatggctctcatgctaaatgatcaaggggtatcaagtggctgctcaagtcatgagcatatcataatgatggttgttggacgatctacagagagtgatatttgccagcattatgaaccattcgtggctagtctggtagctatacattgaaatcagtagactaaaatgcttacttatatgccaactaccaaaaagttgtagatgcgacacacttgtgctcaacttagatggtacaactcttctataatatgtca

SEQ ID NO: 44263 - DNA, 372 bp, Glycine max
  Clone ID: LIB3139-072-P1-N1-B12
ctttctctcaaccctttttatcatttaaatgtatttcttcgctcggtgctctgcctcacgtatatgggcattgccatagacagagacctatgctttccatgctgagatcaaccatctcttcagtctcatcattaacaccttgtactccaacaaggagattttccttcgggaactcaacagcatcgcctgctatgctttggacaagattcgatttgagagtttgacatattagagcaagctcgatgctcatccagagttggtcattcatattatttcagacaagactaacaattctctgaccattgttgacagtggtattggcttgaccaatgctgattatgtgaacaacttgggtacatttgcttgatctgg

SEQ ID NO: 44264 - DNA, 390 bp, Glycine max
  Clone ID: LIB3139-072-P1-N1-B2
ggccaggcaagccccactcaaccaccacacctctcctcgttcacgctacccctttctgctcttcttctacctttcaagttttaaaagtataaagatggcagagacattcctatttacctcagagtcggtgaacgagggacaccctgacaagctctgcgaccaaatctccgatgctgtcctcgacgcttgcctcgagcaggacccagacagcaaagttgcctgcgaaacatgcaccaaaaccaacttggtcatggtcttcggagaaatcacgaccaaggccaacgttgactacgagaagatagtgcgtgacacctgcaggaacatcggcttcgtctcaaatgatgtgggactggatgccgacaactgcaaggtcctcgtcaacattgagca

SEQ ID NO: 44265 - DNA, 386 bp, Glycine max
  unsure at all n locations
  Clone ID: LIB3139-072-P1-N1-B3
cggctcgagcatgaacttattggtgttgccggtcagatcattccttggaacttccctcttctcatgtttgcctggaaggttggaccggcattggcctgtggcaacaccattgttctcaaaacagctgagcagacaccgttatctgctttatatgcagcaaaactatttcatgaggctggacttcctgctggtgttttaaatgtagtatctggctttggtccaactgctggtgctgctcttgctagccacatggaagttgacaagcttgcttttactggttccactgatactgggaaagttgtccttgaactggcagctaaaagcaatcttaagccctgtactttggaactnggtgggaaatccccctctattgtgtgtgaagatgc

SEQ ID NO: 44266 - DNA, 390 bp, Glycine max
  Clone ID: LIB3139-072-P1-N1-B5
tagctattatactctctagagtaattgcggaatctgctagaattttctaataatggcgaaagacgttgagcaggtcacagagcaaggtgaatactccgcgaaggactaccatgaccctcctccggcaccgttgatcgacccagatgagctcacaaagtggtccttgtacagagccgccatagctgagttcatagcaacactcctttttctttacatcaccgtgttgaccattattggctacaagagacagagtgacaccaaaatccccggtaacaccgaatgtgacggcgttggcattttgggcatcgcttgggccttcggtggcatgatcttcatccttgtttactgcactgccggaatctctgggggacacatcaaccctgcggtgac

SEQ ID NO: 44267 - DNA, 390 bp, Glycine max
  Clone ID: LIB3139-072-P1-N1-B6
ttggttctgggggttgacacgtcccgtttatcttccacactcagttcccacctttccacctttccttctcagtcacacacactcacaccgagttgtgtcgagttgtgtcaagtgtgaactcaaaacatctctctcaatctctctccctgtttaggttttgttttggagtggtgttgctatctctatagctccatgaactttttctgacacaacccaacccaagaggaggagggggatgaggaagaagatcgaagaagaacaagatatgttgcttggaaaacgtcctcgggcaccgattatgaaaagaactacaagcatgagtggtggtttggccgtggaaaccaaaacaaccaacgaggaagtagtagtcatgtctgattcgcaacatga

SEQ ID NO: 44268 - DNA, 345 bp, Glycine max
  Clone ID: LIB3139-072-P1-N1-B7
gtttgtactaatgttgtgcataggaggacgaatttgtgggtgttggtgggttcaactgttggaggaattggtgtcttgtttttagttagaacttattaagtactttgtaacatttgccaggagatttatcttaaactaaggacaattcaaagttgttgttgaacatttatgagttatgatggagtgtagaaattatatttgattctggaaaactggttattatggtcttttttagctgaatttagttttatttttaaaggtattatttttaaataattttgttagatttttgatatttatgtttgtattttgttgtgatatttttatgaatttttttttttgtta

SEQ ID NO: 44269 - DNA, 376 bp, Glycine max
  Clone ID: LIB3139-072-P1-N1-B8
agaagatggtcacagaaacatggggcttacacatcacagcacaaaatttcttaccttacataccggttgcgtgaaagacgcgccactcatccttttccgattgggcgagaggcatcagatcagagcagggtcccctgatatctacatattctcattattctgtccagaaactaactacactgacgtttttgttctcgtgtcaatttctaaatccaccaccacaccctctcttctcttctcttctctccactcaacacaacgtaaccttcttcttctctcgaatcttccaccgcaatgaccaccgccaccgagaagctctccgctctcaaatccgccgtcgccggattgaacgaaatcagtgagagtgagaagaacg

SEQ ID NO: 44270 - DNA, 201 bp, Glycine max
  Clone ID: LIB3139-072-P1-N1-B9
ttatgatcatagcagtttcaaggtactaagccacgaccttatttagttcctttctacacaaactgggggatggcaaaacaacctactcttccatctttgattcacaaaaacacagtagctatctgagcaggacttttacctcaaaaccacgaaatggaggttcccaaggtaactccacataaacttggatctgtatccata

SEQ ID NO: 44271 - DNA, 373 bp, Glycine max
  Clone ID: LIB3139-072-P1-N1-C10
ggctcgagtcttttaactccaactcctaatcctctttctccacccctccgcatctcgccgacaacgtaacggtttcgcggtggccgtttctgccgccgtcgccgtcgccgtcgccgctctttctcaacctccaccgccagatttacctcaactcctctactcttctcctttcggattcgcattttactttccttctctctctttctccaccgcaactcactcaccttcagggatacaaaatgataggatcctttcttacctgggcgcttgtgatggtttttggctatgcttatccagcttatgaatgctataaagcagttgaaaaaaataagccggaaattgaacaactccgcttttggtgccagtattggat

SEQ ID NO: 44272 - DNA, 364 bp, Glycine max
  Clone ID: LIB3139-072-P1-N1-C11
cggctcgagctcgagcctcaaagttgttgatcctggagagggagcattggaggatagaaatgctcgaagtgcatcactggaggcatcgcttcgtgaggttttatttcagataattaaatttgttaatgagaagaaggatcatgttccacctataccaaatcttgagggtgctggatcattttcctatgaaattacaatccctagttcaacagattctgcatttgggatggacatgatcaagagaatgctacagacaggacatccaacaatgctaagttgattgttaaagttctcaaagcggtctataatgttaaaatggattcttgtttatatgaataggctggcaatatgatgctggataaaa

SEQ ID NO: 44273 - DNA, 179 bp, Glycine max
  Clone ID: LIB3139-072-P1-N1-C3
catgaaaccaagttttgagtaataccgctggtttttgggaagagatgacattgattccgggaaccagtgttgaagaggcttacaataagctaatagttgaacttgagaaaagtgttcctacattggttggcattgaatgtcccaaggatgagaaactttcttgtcgcaaaatttttgac

SEQ ID NO: 44274 - DNA, 386 bp, Glycine max
  Clone ID: LIB3139-072-P1-N1-C6
tcacagcaggaaagagttttagccttgaggtcatttaaaagtggcaacacccccatattggttgccaccgatgttgctgcacgtggtcttgatattccccatgttgctcatgtggtcaactttgacctgccaaatgacattgatgattatgtacaccgaattggaagaacagggcgagctggaaagaaaggtcttgcaactgcattctttaatgataacaattcatcgctagctagagctttatcagaactgatgcaagaagcaaatcaagaagtacctgcttggctctcacggtatgctgctcgatcttcttttggtggaggcaggaaccggcgatcaggcggtcgatttggtagtcgtgactttcgaagagagggctctttcag

SEQ ID NO: 44275 - DNA, 238 bp, Glycine max
  Clone ID: LIB3139-072-P1-N1-C7
ctcgtcgcaaaatgtttgacaaacctaagacgcgctgcttcactattctccctatggaggtgaatcttgtggtccgtcaaaagtttttaaattctgcgaggctcattctgaagaaaagggacaagcttagttgtcaagatggaatcaacccatactccatggaatggactgggtaggccaatagattactgcgtaagggcaatgacattttgtgaagggaacctgctcggtttgatgg

SEQ ID NO: 44276 - DNA, 376 bp, Glycine max
  Clone ID: LIB3139-072-P1-N1-C8
attttggcatccccgtggcttcaagaagagaatctcaatggaggcccaggagctgaagcgcgtgtgccagatgttcgaccgcaacggcgacgggagaataacgaagaaggagctgaacgactcgctggagaacctgggcatcttcatctctgacaaggacctgagccaaatgatccagaggatcgacgtcaacggcgacggttgcgtggacatggacgagtttggggagctgtatcagaccataatggacgagcgcgacaatgaggaggacatgagggaggccttcaacgtcttcgaccagaacgccgacggcttcatcaccgtcgacgagttgaggaccgtcttgtccttcctcggcttgaagcaaggaagaacc

SEQ ID NO: 44277 - DNA, 372 bp, Glycine max
  Clone ID: LIB3139-072-P1-N1-C9
cgcgaagaacgccagatttcgacatcaacaccacagcggtggggaaaaaaaaaaaaaaaaaaaacaggaaacacaagaaaacgaactcacagcaacgctggctctcaaacgcgccatgacacacttcaagatcgacatcatctccgacaccgtctgcccctggtgctacgtcggccacaagcgcctcacccgcgccatcacccagcaccaacgaacccaccccaacgacacctttaccacgacctggcaccccttctaccttgaccccaccgtgcccacccctggcgaagacaagcaggcgcgctacgagcggcgcttcggcgcctcgcgcatggccatgatgaaccagcggctcgcgcagctcgggcgcca

SEQ ID NO: 44278 - DNA, 389 bp, Glycine max
  unsure at all n locations
  Clone ID: LIB3139-072-P1-N1-D1
gagaatcacaaattccagaaagatggcaaataaggtcaacgggtagaggacccagctttgggccttggtcatattaccaatcaaatcaaactagtgcataatataaagcatgtatatgtgtggcatgcaataacaggatattggggtggtgttagacccggngttccgggcatggagcactacgagtcaaagatggtcttccctgtctcatctcctggagttgagtctaatcaaccagatgaagctttgacaacaattgccatcaatgggcttggccttgtgaatcctgagaaaagttttcacttttatgatgaactccactcatatttggcatcttttggtattgatggtgtcaaagttgatgttcaaaatatccttgaaactcttgg

SEQ ID NO: 44279 - DNA, 375 bp, Glycine max
  Clone ID: LIB3139-072-P1-N1-D10
cttcaactcaactaagctcaaaccaaaccaacacaaacaaaaacatctctcagcaaatgaatattctcggacaatcactccaccaatcaaacaacggcagctactcttgttcgtcgccggagactgcaaactcctctaaccttccgaccactccgaaagccgttcactccgacgaggaagtgaacacattagcatcggctcatcctaagaaacgtgcggggcgtcgaatttttaaggagacaaggcatcccgtgtacagaggagtgcggcggaggaacaacaacaagtgggtctgcgaggttcgtgttcccaacgacaagtccacgaggatttggctcggaacgtatccaacgcctgagatggccgcacgtgcgc

SEQ ID NO: 44280 - DNA, 377 bp, Glycine max
  Clone ID: LIB3139-072-P1-N1-D11
gaggaagttgcccttaagaggaagtacaatgaggaagccagaagcgtgtaataataatactaaaaacaatagcaacaagaagcttagaaaggggttgtggtcacctgaagaagatgacaagctcatgaactacatgctaaaccatggacaagggtgttggagcgatgtggcaagaaatgctggcctccaaaggtgtggcaaaagttgtcgccttcgatggatcaattacttgaggcctgatcttaagagaggtgcattctcaccccaagaagaggaactcatcatccacttccattcccttcttggaaacagatggtctcaaatagcggcgcgtttgcctgggcgaaccgacaatgaaataaaaaacttttggaatt

SEQ ID NO: 44281 - DNA, 373 bp, Glycine max
  Clone ID: LIB3139-072-P1-N1-D12
cttgagccgaatcggctctaggcaaggttcctttttaggcgagtttgccagacaagctatcatatattacgctgtattgccaggtgtggctacaaagatgttcgcaaagaaaatcaccaaacttttgagcaactgctgatggcgagcttagagaagtgtatacgtcaagaggctcaggaaaggtcgctcgagagtgaaggggatgatgatactgattctgaggatgaggactctggttctagggttcttatagctaccaatgggagtgcatattcacttggagctccactcctggctgatcttcatgatacaaccatacccatacccaattctgaagcaggcacatatgaggaagcaaaccctgtatctccta

SEQ ID NO: 44282 - DNA, 361 bp, Glycine max
  Clone ID: LIB3139-072-P1-N1-D2
atatagctaaaagagcctaaaactttgtcagtgaaattcagtattttttgtccataattgaaagtttaaagtataaacacaactttttgttagaaaaaattctgaactctgatttcacaaagttaaaaaaaaaaatatattttttaactattcgggtagccctattgctagaggtagagggaaaccgagaaaaactataggtgaaaccattaggaaggaccttagaataaataaaaaaccagtaagaaggatttagagatcactggtttatctaaggacatgatagaagactcaagcatcatttgatccatgtagctgatcccatctagtaagcaaagtttgttgtattgagggtataata

SEQ ID NO: 44283 - DNA, 388 bp, Glycine max
  Clone ID: LIB3139-072-P1-N1-D3
atgtagtactataaagtgattcggttgacagtgttgtttcttatcttatatgttgacagaagaagtcttctactccttacgttcctcaaaactcaaccccatgtgcaactttatttgtagctaatctggggtcgtcttgtaatgaacaagagctaatccaagtgttttctagataccctgggtttttgaaactgaagatgcagagcacgtacggggctccagttgcatttgttgatttccaggatgttggtagctcaactgacgctctaaacagtctgcaaggcacaattcttcactcctcacaatctggcgagggaatgcgtgtagaatatgctaaatcgcgtatgggcatgcggaagaagcccaatagataataacgagaatcact

SEQ ID NO: 44284 - DNA, 385 bp, Glycine max
  Clone ID: LIB3139-072-P1-N1-D4
caagaagcttatcttgttaatctcgtaaatgtgttacgagaactgtatttgcacagtccagaggaagctcgccaattgagaaggaaagctctctctcgtattgaatggctgcaaaaagctgatgtgcctaccatagcacagattgaagagttccattcgatgcagaggatgatgaatgctcctgattcaaatgataatattgatctactgttgagcattgatttgttgggtttacaaggagcaggcaaagcttttccaaacaagattgtttttgatgataagcttgtgttggctaacacacaagaattctttgatggaaattttccagtggattcttggttaccaatttttgtgaattgtctttatccctgaagtcaattacctt

SEQ ID NO: 44285 - DNA, 388 bp, Glycine max
  Clone ID: LIB3139-072-P1-N1-D5
tgaatggggagtggttgttaatcggggcacgcaaagggaaaggaaaattaatcccctcattattatatgacatacacttacacgagttattattattatttatttttattttgattcttaaaataccaaatcagaactataacctaatctatctatctagttttgtttcacatatctgaaaaagaaaagaaaaccttaggggaggggaagtaacgcaaaaccgaaacgctcaacattcacattgtaaaactcttcatcatagcaattcccttccttttctccctccctctctctcttggcaatccctttcttcttcgctgtcaggtgcaccttctataataacagtaagtcagtggtggagagttatcagaaatagatgaaacagcag

SEQ ID NO: 44286 - DNA, 386 bp, Glycine max
  Clone ID: LIB3139-072-P1-N1-D6
atgaaaatggctctgaggcagctggtacaactactgatgataatcactgggcaggttttcagtctgctgcagaggtgtcaacagctgagaagactagtccgccgaaagcagctgatagtactcccgtgtctgcatctggaattgaggatcttttcaaagatttatctcctgtgactccaagcttgactccagaaaaaccacaaaaagatgtgaaaaatgatatcatgcgcctctttgagaagggcaatatagtgtctccattttctatgcatcaacagcagcttggcatgctagcacaccaacagtctcttctaatggctgctgcagctaaatctactggtggggatcccaggtatcctgctagcatacaacaacctaggccacca

SEQ ID NO: 44287 - DNA, 295 bp, Glycine max
  Clone ID: LIB3139-072-P1-N1-D7
attatactaacgataataccgctgcaacaactacggaccatactcacagtgcaggtggtgattttgctgtacagactgaaacaaattagaatgctggtaagcttattgctgactatagtattagtgaacgtggaaaacatatagaagatatacccaaagatgttacaggacgagacttctatcttgtatgcaagagacttcagaactgcatggggacggaatatagcgagcctaacgctactgcacagcatgtgggagcaatataaattattattgatagtttagtatgatatga

SEQ ID NO: 44288 - DNA, 61 bp, Glycine max
  Clone ID: LIB3139-072-P1-N1-D8
attttactaacgttaattatcttgcaaaagtgatgaaccttagggatagtgttgcttgtta

SEQ ID NO: 44289 - DNA, 392 bp, Glycine max
  Clone ID: LIB3139-072-P1-N1-E1
gttcgggggggaagataagccccatttaaccatgtcctttttccttccagaaccaaaaaatgggctgttagctttggctgaaaagttggcttctgaatctgggttcttggaacgcaggcttcctaataacaaattggaagtaggagacttcaggatcccaagattcaaaatttcttttgggtttgaagcctctaatgtgctgaaggagctgggagtggttttgcctttctccgttggaggtttgacagaaatggtggactctgctgtgggtcaaaacttgtttgtttccgatatatttcataagtcttttatagaagtaaatgaagaaggcactgaagctgcagcggccaccgctgcaactatacaatttgggtgtgcgatgtttccaactg

SEQ ID NO: 44290 - DNA, 372 bp, Glycine max
  Clone ID: LIB3139-072-P1-N1-E10
tgataaacagtctttgtggtggtgatgaaaaattgatgcgtgaaaggacgcacctgctgttggcttgttgttcaaggatggcaatttgtaagaaagatgtttggagagttgaatgtggaatcccttctggatttccgctcacagttatttgcaatagcatttttaatgagatgctcattagatatagctatgaaaaattactgcgccaggctaaagctccaagtatgtttttacaatccttcaaaaattttgtttctttgtgtgtgtatggtgatgataacttaattagtgttcatgaatatgtcaagccttactttagtggttctaaattgaaaagctttctagctggtcataatatcaccattactgatg

SEQ ID NO: 44291 - DNA, 375 bp, Glycine max
  Clone ID: LIB3139-072-P1-N1-E12
gtgaagatggggtcagaggtgtctaaacagatggagcgaagaaagacaatccagacagagaagaagagtctgtccgatctgaaaagcagcggagaagactaccctggctccgactaccgtccccaagacagaaaaaactggatgtcccatctcgaccctcagaaactccgcatcaaccaaatcgtctggcccggcacccacgactccgcaaccaacaaaattggcatccctctcctcactcgccccttcgcccagtgccaatccctctccatctaccgccagctctccctcggcacccgcgtcctcgacatccgcgtccaagaacaccgccgcgtctgccacggtatcctcctcacctacggcgttgacctcgtc

SEQ ID NO: 44292 - DNA, 104 bp, Glycine max
  Clone ID: LIB3139-072-P1-N1-E2
ggtaagcgtgatgagtttacaactgacatcagtgattttctttttcctactctcaacccctagtttgttgtatagctaatgagaattcttattcgtttattatt

SEQ ID NO: 44293 - DNA, 369 bp, Glycine max
  unsure at all n locations
  Clone ID: LIB3139-072-P1-N1-E3
ggtgttttctattaaggtgtagtaatcatttggttagtggcagatcaacaagggtatgttcttgcagcagctactgggttcagaagatacacttactctgaactgaaacaagccacaaagggtttcagcgaagagattggaaggggtgctggagggacagtgtacaagggcgtgttatcagataaacgcattgcagcaattaaaaaattgcacgaatttgcagaccaaagagagagtgagtttcttactgaagtgagcatcattggaaggctcaaccacatgaacttaattggcatgtgggggtattgtgtagaaggaaagcatangatgttggtttatgagttcatggaaaatggctctttggcacat

SEQ ID NO: 44294 - DNA, 385 bp, Glycine max
  Clone ID: LIB3139-072-P1-N1-E5
caccaagcgaagcgaaatgcgctttctaacttaagtgatggcgaacgcagctgaagtttcagccttgaaccgcatcaaactgcatcttttgggtgaactctctccactggccactcccctaaactattttgatgaatcaaaccctagcccctctgaatcttccaattcccaatcttcttctgtttctcttaaccactacttcactgacctcttcgaattcgactccaaaccccaaataatcgacctccaaactcccaaaacactaacttcagctcagaagaaacctcaattgaatcggaaaccgtcgctgctaatcgctgttccaaagaagaccgagtggatccagttcgggagcccggatccgaacccggtgatggctgcgccg

SEQ ID NO: 44295 - DNA, 380 bp, Glycine max
  unsure at all n locations
  Clone ID: LIB3139-072-P1-N1-E6
cttagncaaagggatncatcgttcttcttcccaggttatttagaaaagcaaaatggtgaagatttgctgcattggtgctggatatgtggggggtcctactatggcagtcattgcacttaagtgcccatccattgaagtcgctgttgttgatatctctaaatcccgcattgcagcctggaacagcgaccagcttcctatctatgaacctggccttgatggtgttgagaagcaatgccgtggcaagaacctcttcttcagcactgatgttgaaaagcatgtctttgaggctgacatagtgtttgactctgtcaacaccccaaccaaaactcagggtcttggagctggcaaagcagcagatttgacatattgggagagtgcag

SEQ ID NO: 44296 - DNA, 360 bp, Glycine max
  Clone ID: LIB3139-072-P1-N1-E7
gtttggcacatggttatacagttggatatgctagctaatacaggggatcatggcggtctcatactgctggccaggaactggctgtgtgctacaaacgagcccgtctctatttggcatacacctccgtggaatacttgtcggattcatgcaagccgacaacaggcaggtgatttagtccctctctgccctccttggggattacatgtacaacgtcggagagctactaggccatactataatgaagagccttctggggacaaaggtggaatggctatactatattctgaaggctatcaattctggtgatctgaaacgaactcaacaattatgtaggttgcataatgctgttctaagagccca

SEQ ID NO: 44297 - DNA, 367 bp, Glycine max
  Clone ID: LIB3139-072-P1-N1-E8
cttaaggttttcctcatgtgctttcacgcaaaaatggtgaaaaaggcaaaaggagatttgtttctggggatggtgaagagatgacattgattccgggaactagtgttgaagaggcttacaacaagctaatagttgaacttgagaaaagtgttcctacattggttggcattgaatgtcccaaggatgagaaacttccccgtcgcaaaatttttgacaaacctaagacgcgctgcttcactattctccctatggagtttaatcttgtggttcgtcagaagtttttaaattttgtgaggttcattatgaagaaaagggacaagcctaagttggtaatgttggtataaacccatactccatggaatggact

SEQ ID NO: 44298 - DNA, 374 bp, Glycine max
  Clone ID: LIB3139-072-P1-N1-E9
ggtgattctccacaaccacagggctcaggtgatgaagcaccctcccttggatcgcatggtgggcgagtttttcgagcgtaatgtgaaggcgcttgatgtgtgcaacgcaatccgtgatggggttgaacagattaggcagtggcagaagctgttggagattgttctctgcgctttggatcaaaagaggagcattggtgagggccaatttcgccgcgccaagaaggcgctggtcgatttggccattgggatgcttgatgacaaggacaccagcttcagtggctctatagcacataggaacaggtcatttggtagaaacaatgcttcaaaggatcatcaccacaataattcctttggtcattttaggtcactttctt

SEQ ID NO: 44299 - DNA, 390 bp, Glycine max
  unsure at all n locations
  Clone ID: LIB3139-072-P1-N1-F1
cccccgaccgtaggttgggaattcggttcgagtttagagtaattgcggaatcagctagaattttttaataatggccaaagacgttgagcaggttacagagcagggtgaatactccgcgaaggattaccatgacccacctccggcgccgttgatcgacccagatgagctcactaagtggtccttgtacagagccgccatagctgagttcatagcaacactccttttcctttacatcaccgtgttgaccattattggctacaagagacagagtgacaccaaaatccccggtaacaccgagtgcgacggcgttggcattttgggcatcgcttgggccttcggtggcatgatcttcatccttgttactgcaccgncggcatctctggggacaca

SEQ ID NO: 44300 - DNA, 343 bp, Glycine max
  Clone ID: LIB3139-072-P1-N1-F10
aaggaaagggagaagaatccgataattgagggtgcggtgtgtggtgtgtagtgtgacagagatggacgccgtagcaacaggttcggagctgaacaagtccggaagcggaggttcggaacgaagcgaggacagcggaggagctggaggaggagggatatttgagtactctgggtgggtttatcatttgggagtgaattccattggccatgagtacttgcatctacgaatcctcttcattaggggaaagtttgtgtgcatgtacaagcatgatcctaacgataactcctgtccttaaacccatcaagcagggaattgtatgacccacgctttatgtggaggagct

SEQ ID NO: 44301 - DNA, 373 bp, Glycine max
  Clone ID: LIB3139-072-P1-N1-F11
attttgataaaccgcgatcacaggttgccgcaccttaaaaccggaaacaaaagcaatcgttacttgatttcaagaatttctcaatttctttctacttctttgtgtacgatttcttaagggaaagaaaatcactctctgtgctggccacagacttcgtgaatcattttcttttccacttttagtttatttgctgaacactctcctatttgatataggacttcgtgtcagatttaaacttcttctgtttctttctcagttctctgttcaatttcaagttcaagctggtgaaatcttggattagtgcttccactctcctatctggtataggacttcgtgggtagacttttctatttctctccttctttcactctct

SEQ ID NO: 44302 - DNA, 374 bp, Glycine max
  Clone ID: LIB3139-072-P1-N1-F12
ctcgagccgctcgagccgctcgagccgctcgagttccgttaacgctctccaatacaaaataaccactcactgaatattcggtcgaagatgtccgccgccgaagaagctaaagttcccgccgtcgaaaagccggtggaggaggtgaaggcgccgaagcttgccaaggagaagaaacctaaggctccgaaggaaaagaagccgaaacaggccaaaactgcttctcatcctccatatctccagatgattaaggacgctttgattgctctgaacgagaaaggaggatcgagtccatatgcgatagcgaagtacatggaggagaagcacaaggcggtgcttcctgcgaatttcaagaagatactaggtctgcaactgaa

SEQ ID NO: 44303 - DNA, 184 bp, Glycine max
  Clone ID: LIB3139-072-P1-N1-F2
catagagaaagcgcggtttcagctaaaattttctaataaacggatgggacttacaggaggatacatagcaaggattatggtaagttaataattaccgatacccacaatagaaaccttattcagacggatatcagctcgctaggtgctcctgatgcaaaggcgagatagtggtgacaacatcatc

SEQ ID NO: 44304 - DNA, 389 bp, Glycine max
  Clone ID: LIB3139-072-P1-N1-F3
aaattgaaaagctttctagctggtcataatatcaccattactgatggtattgacaaaactagtgcaactttgcaatttagaaagttagcagattgtgattttctcaagagaaactttaagcagatgtctaatgttttgtgggtggctcctgaggataaggcgagtttatggtcacaacttcattatgtttcgtgtaataatctggaaatgcaagaagcttatcttgtcaatctcgtaaatgtgttacgagaattgtatttgcacagtccagaggaagctcgccaattgagaaggaaagctctctctcgtattgaatggctgcaaaaagctgatgtgcctaccatagcacagattgaagagttccattcgatgcagaggatgatgaatgc

SEQ ID NO: 44305 - DNA, 229 bp, Glycine max
  Clone ID: LIB3139-072-P1-N1-F4
caggatttttcttactacaaatcaggagtttacaaacacatcactggttatgaactaggtggtcatgcagtaaagctaattgggtggggaacaactgatgatggggaggactattggcttctcgcaaatcagatgaacagagaatgtggagatgatggttacttcaagagtcgaagagggacaaactaatttgggattgattaggttgttttcgtctttttttttttga

SEQ ID NO: 44306 - DNA, 389 bp, Glycine max
  Clone ID: LIB3139-072-P1-N1-F5
cttgagctctgcgagatcttgagtcgccgatttgaaaagatgagtaagcttcagagtgatgctttgcgtgaagccatctcaggaatcatggccgattccaaggagaagaatcgcaaatttgtggagaccatcgaactccaaatcggtttgaagaactacgatccacagaaggacaagcgtttcagtggctccgtcaagttgccccacatccctcgccccaagatgaaaatttgcatgcttggtgatgctcagcatgttgaagaggcagagaagataggactggactggatggatgtagaagccttgaaaaagctaaacaaaaataagaagttggtgaagaagctagctaaaaaataccatgcttttttagcatctgaagcagtcattaa

SEQ ID NO: 44307 - DNA, 382 bp, Glycine max
  Clone ID: LIB3139-072-P1-N1-F6
tggagctacatgtcaatttcagggagaagcttctcacatcccttcgtcaacacctctccgactcttctcgttctctccatggcttcgtcctccttcaaggtggcgaggagcaaacgcgttacgacaccgatcacttggagctcttcaggcaagagagttacttcgcttacttgtttggagtcatagagcctggattctatgcagctattgacgttgcaactgggaattctatcctatttgctcctaggttaccttctgagtatgctgtttggttgggggagattaagccactctcctactttaaggaacactacatggttaccacgtgttgcttctcagatgaaattgaaagtgtattgcaacaacattaccagtgttccgg

SEQ ID NO: 44308 - DNA, 353 bp, Glycine max
  Clone ID: LIB3139-072-P1-N1-F7
gtgggaatcatgtagttttttggtggcaagttattaaatacagccgatcatatgactatgacactgtgggtatggttcatctcagacggctccatctatgactgttctacttaaaacaaaacccgaattcaaagtgatgactctgcatgtgagacatatgctgctgtaaaaagctacgctcctggaatcgttgtgcttaaggagttgtggacgtgtggactgtgaaattaaaaactatgcgttgataattaccaactaagtatgctgattaaagctcttagatcaaacctctacactgctatgagggacatagcatttgcacaaccccaacatttgtatgatgaatttaatgg

SEQ ID NO: 44309 - DNA, 280 bp, Glycine max
  Clone ID: LIB3139-072-P1-N1-F8
gatggcagaaatgataaacagtctttgtggtggtgatgaaaaattgatgcgtgaaaggacgcacctgctgttggcttgttgttcaaggatggcaatttgtaagaaagatgtttggagagttgaatgtggaatcccttctggatttccgctcacagttatttgcaatagcatttttaatgagatgctcattagatatagctatgaaaaattactgcgccaggctaaagctccaagtatgtttttacaattcttttaaaaattatgtttctttgagtgtgtt

SEQ ID NO: 44310 - DNA, 377 bp, Glycine max
  Clone ID: LIB3139-072-P1-N1-F9
tatagctatgaaaaattactgcgccaggctaaagctccaagtatgtttttacaatccttcaaaaattttgtttctttgtgtgtgtatggtgatgataacttaattagtgttcatgaatatgtcaagccttactttagtggttctaaattgaaaagctttctagctggtcataatatcaccattactgatggtattgacaaaactagtgcaactttgcaatttagaaagttagcagattgtgattttctcaagagaaactttaagcagatgtctaatgttttgtgggtggctcctgaagacaaggcgagtttatggtcacaacttcattatgtttcgtgtaataatctggaaatgcaagaagcttatcttgtcaatct

SEQ ID NO: 44311 - DNA, 365 bp, Glycine max
  Clone ID: LIB3139-072-P1-N1-G10
ctcgagccgaaatgactcaagcccagattcaaccagttaaacttggaacccaaggctttgaggtttcaaaattgggattcggatgtatgggccttactggagcgtacaatgaccctctccaagaacaggatggcatatctgttatcaagtatgcgttcagtaagggaatcacattttttgatactgcggatgtttatggagccaatgctaatgaacttttggttggaaaggctttgaagcagctgcccagagaaaagattcagatagccacaaaatttggtattgcttcacgaggttttcctgatatgaagatcaagggttcgcctgaatatgtgcgatcatgctgtgaagctagcttgaagcgt

SEQ ID NO: 44312 - DNA, 374 bp, Glycine max
  Clone ID: LIB3139-072-P1-N1-G12
tctttctccaatcccaattccaaaccctaaccaatttccatggcttcctcggagatcgaggtggtttcatcatcatcggtctccaaacccaacaacgaccagcctccaatcctcgacatcttcaccgcctctgctcacggcgacttcaacaaattgagaaccttcgtcgaacaagacggcgcctccgtctctcttcccgattctaacggctattacgctcttcaatgggcctcgcttaacaacttccacgacattgcgcactatctcattcagcatggggcggatgtcaatgctaaagacaacatgcaacaaacggcattgcactgggcggcggttcgtggttcaactctagctgctgatgtgctcgtggagaa

SEQ ID NO: 44313 - DNA, 389 bp, Glycine max
  Clone ID: LIB3139-072-P1-N1-G3
agccgatccagtgtgttggcagcgaaagggtgagacaagaggcttcacctgtaatcagacaattgtggtcaatgcgagagtcataccattacaatgcaagtaaatgaaggacacaacagaccttgctcagacccatttttacagtggagtaaatggcagttgcttgattctcttttacctactggtggatttgctcattcttttggcctcgaagcaacagttcagtcccacttagtgtctaattccaatgaccttaagacatttgttatccatatattggagaatacaggaagcttactccttccttttgtgtactcagcttccatgttacccaatttggaaacttggcataagcttgacaaaatattggatgctaccctaactaatga

SEQ ID NO: 44314 - DNA, 386 bp, Glycine max
  Clone ID: LIB3139-072-P1-N1-G4
cttcattatgtttcgtgttataatctggaaatgcaagaagcttatcttgtcaatctcgtaaatgtgttacgagaactgtatttgcacagtccagaggaagctcgccaattgagaaggaaagctctctctcgtattgaatggctgcaaaaagctgatgtgcctaccatagcacagattgaagagttccattcgatgcagaggatgatgaatgctcctgattcaaatgataatattgatctactgttgagcattgatttgttgggtttacaaggagcaggcaaagcttttccaaacaagattgtttttgatgataagcttgtgttggctaacacacaagaattctttgatggaaattttccagtggattcttggttaccaatttttgt

SEQ ID NO: 44315 - DNA, 383 bp, Glycine max
  Clone ID: LIB3139-072-P1-N1-G5
ggcttattgcttggttttcccacaagatttggactgatggctgctcaattcaaagctttcatggatgcaactggaggcctgtggcgcacacaggcactagctggaaagcctgcaggaatcttttacagcactggttctcaaggaggtggacaagagactactccgttgacatctattactcagcttgttcaccatgggatgatttttgtgcccattggttacacatttggtgctgggatgtttgagatggagaatgtgaagggtggatccccttatggtgcaggtacctatgccggggatggttccagacaaccaactgagttagaattggctcaagcttttcatcaagggaagtactttgctggcattgctaagaagcttaa

SEQ ID NO: 44316 - DNA, 387 bp, Glycine max
  Clone ID: LIB3139-072-P1-N1-G6
ctctctctcgctctgcattagtttcttatcttttggactgcgagagttgaattaagagatggggttgtctttcaccaagctttttagccggctctttgccaagaaagagatgcgtattctcatggcaggtcttgatgctgctggtaagactaccatcttgtacaagctcaagctgtgagaaattgtcacaaccattcccacaattggatttaatgtggagactgtggaatataagaatattagctttactgcatgggatgtgggtggccaagataagattcgtcctttatggagacacgtcaatgctaaagacaacatgctacaaacttgattgcactgggcggatgttcgccgttctactctagcttgtgatgtgctcgtggagaa

SEQ ID NO: 44317 - DNA, 375 bp, Glycine max
  Clone ID: LIB3139-072-P1-N1-G7
gttttctacaaccaaattacccccaagtgtggcgcatatagactacatcatgagctatcagctcgagcaaggtcacaacccaggtactcaggaccagcagcccccgggactacagtctgagctcaagggccccaagccccaggacgagaatcttcccactgaggatggcggataccagatctacaaggcggccggcaagcttgagggcaagaaggcacttattactggcggtgacagtggcattggtcgcgcggtcgcaatcctgttcgccatggagggcgcagacagctttattgcctacttgccccaggaagagtacgacgcccaagagacgaagaagaaggttgaggagaagggacggaaatgccacctgtt

SEQ ID NO: 44318 - DNA, 375 bp, Glycine max
  Clone ID: LIB3139-072-P1-N1-G9
aaaattgatgcgtgaaaggacgcacctgctgttggcttgttgttcaaggatggcaatttgtaagaaagatgtttggagagttgaatgtggaatcccttctggatttccgctcacagttatttgcaatagcatttttaatgagatgctcattagatatagctatgaaaaattactgcgccaggctaaagctccaagtatgtttttacaatccttcaaaaattttgtttctttgtgtgtgtatggtgatgataacttaattagtgttcatgaatatgtcaagccttactttagtggttctaaattgaaaagctttttagctggtcataatattaccatttctgatggtatttacaaaaactagtgcaactttgcaat

SEQ ID NO: 44319 - DNA, 406 bp, Glycine max
  unsure at all n locations
  Clone ID: LIB3139-072-P1-N1-H1
ccaagccccccgaccgaaggccgggaatccggttgggggaaaggcaccagagggtgccacaggtcatctagctcgtcgattaaggaaaattctggtggacctcaatgaatatgatcatgctaggaccatggctagaaccttccatctcaaggaggcattgtgagctcactgggaagtgggaattcatgtttcattatacttattctcttggtttgtcgttgaatctgggcctaaggttgccccttctcgcgtgcaattttttgtaaatgaacacanactattcatgtgattaattatgaggcttgaaagntgaaacatagttgttggttattcatgtgaatgaagtaggcatgccctttttggatcctatgaaaagggggaatttaaaaagatgattttttttttt

SEQ ID NO: 44320 - DNA, 372 bp, Glycine max
  Clone ID: LIB3139-072-P1-N1-H10
gtgaataaatccagcattgttctgttctctgcaacattctccactctcaaccatggcttcaaagcttttactcatcactgtcttcgtttttgatttgattgcttttggacttgccgtggctgctgagcagagaagaagcaccgctagtgttgtgacggacaatgaaaagaattataattactgtgtctataactctgatatagcaactggctatggtgttggagcatttttgtttctcttggttagtcaagtcctgataatggtggcaagtcgatgcttctgttgcgggaagcctcttaaccctggaggctcaagggcctgtgcagttgttcttttcataatctgctgggtgtttttcatcatagctgaggt

SEQ ID NO: 44321 - DNA, 373 bp, Glycine max
  Clone ID: LIB3139-072-P1-N1-H11
aaagggacaagcttagttgtcaagttggaatcaacccatactccatggaatggactggtttggccaatagattactgagtaagggcaatgatattctgtgttgcgattatgctagttttgatggtttgattaccaagcaagttatgagcaagatggcagaaatgataaacagtctttgtggtggtgatgaaaaattgatgcgtgaaaggacgcacctgctgttggcttgttgttcaaggatggcaatttgtaagaaagatgtttggagagttgaatgtggaatcccttctggatttccgctcacagttatttgcaatagcatttttaatgagatgctcattagatatagctatgaaaaattactgcgccaggc

SEQ ID NO: 44322 - DNA, 361 bp, Glycine max
  Clone ID: LIB3139-072-P1-N1-H12
acaatcaaaagcaaagatgtgaagagagagagaaagagatcattctagagacagagagaaaaattagcttcagtagatattagtggtgggttagggtaagaagagaggagacatgcctaacttgaacccaacacttcaggatcttgcatgttcataccctgaccggagcccaacaggatacatgaagccataagtttgtaaaggagtatacaacaccgggctccaatgatcacaagtagaatgtagtcactgagtggctcatgcttatgatccctaccgcgagccaacaattggttatggaccacacgctcttagagacacccaaatgatacccccgatgctgggactagcatccaccaga

SEQ ID NO: 44323 - DNA, 388 bp, Glycine max
  Clone ID: LIB3139-072-P1-N1-H4
aaactcggagagaaaggtgtactagtacgtacctgcaggctgcagcaacctcgaagctagttcaaactagtgggaggttgtgtgcatagaagcacaaacaaattacagaaaaagtcatcatcatactcagaattaatacaaattaagcattgatcttgaattaatggctcgcggaaaggttcagctgaagcgaattgagaaccctgtgcacaggcaagttaccttctgcaagcgccgagctgggcttcttaagaaggctaaggagctctctgtgctgtgcgatgctgaaattggccttttcattttctccgcccatggaaagctctatgaactagccaccaaaggaaccatgcaagggctcattgagaggtacatgaagttcacacga

SEQ ID NO: 44324 - DNA, 353 bp, Glycine max
  Clone ID: LIB3139-072-P1-N1-H7
ggagaaccagagagaaatgatatggttgagtacttcggtgagcaattgtcaggctttgccttcactgttaatgggtgggtgcaatcctatggttcccgttgtgtgaagccaccaatcatctatggtgatgtgagccgcccaaagccaatgactgtcttctggtcatctctggctcagagctttaccaagcgcccaatgaaaggaatgcttaccggtcctggtaccattctcaactggtcctttggtagaaaagacccaactaaaacttaaaacaactaacaaaatggtttggcttttaaaggccaaatggaagaaccttgaaaaggctggcatcactgttatccaaattgatg

SEQ ID NO: 44325 - DNA, 370 bp, Glycine max
  Clone ID: LIB3139-073-P1-N1-A10
ctgactcttttgttgcatggactatttttcttgggactagttcctttcttcttcttcttctctctctctctctgagcactgtttgtgtttcagccaccccccatttttcattcttccaaacacaacaacagaggcagagagaatcagagaaaggagtattaagtaagtgcctccttttagctcttcacttacatcactcttttttttctctttctttctgtgtcagatctctttggattaggatctttgtccttcttgcacttctctgattctttcatttttcattcctttctgccacagatctgatttctgcatgtgggttctctgcctcttcttggtttttgttctttggcttcagtttgctgttttt

SEQ ID NO: 44326 - DNA, 168 bp, Glycine max
  Clone ID: LIB3139-073-P1-N1-A11
gcggaatcctctgcatgatctggaattcgtgtggtcggtcgcttgttcgtttgtttaattcaataaaggaaattaggcatgaccctcttgttgagtatgctctgcctatctgaaaatttccacacctcttttaattgtcgtaatgatgtgtgaagtgtgtgttatttt

SEQ ID NO: 44327 - DNA, 373 bp, Glycine max
  Clone ID: LIB3139-073-P1-N1-A2
gttcaaatacccttaatggcacaggaggaaattctgtcttcgagtgcaagtgatttcagaactgcaatggtgagtaaaaatagcaaacctcaagctactgcaatgcatgtgggagctatagaaattatcattgatagtttcgcaagtcctgattgcaacatagttggtgcaatgcttttggttgatacttatcataccaatcctgaaaatgcagttcgtagtatttttgttgcgcctttcagaggcggaaggcccattcgggtggttacatttccgaataccattgtgcagattgaaccagacatgaattcaaggtttcagcttttgagtaccactaccaatggtgattttgttcaagggaaagatctcgcaa

SEQ ID NO: 44328 - DNA, 372 bp, Glycine max
  Clone ID: LIB3139-073-P1-N1-A3
cggctcgagatttacttgacgcaacaaaacaaaaaaagattgattaaattgaaatatattaattcaacaaaataattaaaaaaacttctacaacaaataatttataaagtaaaaaaaataatcactatgaaacaataatttctataatcttattttatttattcctattattattattattattattattattacacatcatagtgaagatgcatacttgaaatacactaagacaaaaataaacactgtatcaaaccattttgtatactttcaaatgtttcttaatgctctaatatatatgttaaactgctataggaaatctcaaacagcaaaaacagtgccacaaggaatcacgtacagggcactttcaac

SEQ ID NO: 44329 - DNA, 374 bp, Glycine max
  Clone ID: LIB3139-073-P1-N1-A4
cttccatttatttaatcaaaccctgggcagattgcaggagcgtatctatgatgtctaagaggcaacttctacagcttttgacatcatcttagagcacaagatgataaaaccgggaactcgtgcttcacttataaagtttcttcagcttttagcagctcatcatccttctaggagatgccggaagggtactgctgaatttcttgtgagctttgatgacttgtacccaacagattttgggtcaactaataagcaggaagatgataagagttcagttaggaacctaaagatttgtggaaaagatgtgcctcgtggatactggatgttctgccgtggcagtaagaatgaaaccagaggctttagttgcggtttatggg

SEQ ID NO: 44330 - DNA, 372 bp, Glycine max
  Clone ID: LIB3139-073-P1-N1-A5
cttcattttattttttacggctagaagaatgtccagcggaggggaatatttggtattttccggccaccacccggcgaactctccggcggaaaagtccactttctctcagacttgtagtctattgagccaatacatcaaggaaaagggtaccttcggagaccttaccctcgggatgacttgcactgccgaaacaaacggttcccctgagacatcgtgtcactctgcaacaaccatggagttgtttcccacgatcatcacgcaacggaacccaactactgtggatttcctatctccccagactgcttatcctcaccactcagaggttccaatcatggttaaatcaagtgcttttaagtctatggagaaggagcc

SEQ ID NO: 44331 - DNA, 369 bp, Glycine max
  Clone ID: LIB3139-073-P1-N1-A6
ggagattttactgctgccataccacattggatgcattttatgcagatactggaaatgtgaaaagaataaaagacatcccgctgaaggacttttataatgagtatgatgcaaagaaaccggttatgctcactggattggctgatacatggcctgccaggcataaatggacaactgatcagctgttgctaaactatggagatgtagcatttaaaatttctcaaaggagttcccggaagatctccatgaagttaaaggattatgtctcttatatgaaagttcagcatgatgaagatcccttgtatatttttgatgaaaagtttggtgaagctgtacctagcttattgaaggattattgtgtgcctcatcttt

SEQ ID NO: 44332 - DNA, 371 bp, Glycine max
  Clone ID: LIB3139-073-P1-N1-A7
tgattcgttcgttcactttcactttaccaactcgtaggagatttctctctgtttccttcttcaccgcatcaatggagttggacggcgttctcctcggcatgtgcaaccctctcctcgacatctctgccgtcgtcgacgacgctttcttgcaaaaatacggtatcaagttgaacgatgcgattctcgctgaggataagcacaaacctatgtatgaagaattggctaacaatcctaatgtggagtacattgctggaggtgctactcagaattcaatcagggttgctcagtggatgcttcaagcaccaggtgccacaagttacataggttgcataggaaaggacaaatttggagaggagatgaagaagaaatgt

SEQ ID NO: 44333 - DNA, 338 bp, Glycine max
  Clone ID: LIB3139-073-P1-N1-A9
gttgagatgctttttgtgaacccagagccagagaatggtaagattctagaggaaaccattagtatgtgtgaagtgcctgcaataactggagaagaaagatattgtgcaacttcattagagtccatggtagattttgtcacttctaagcttgggaagaatgctcgagttatttctacagaagcagaaaaggaaagtaagtcccaaaaattctcggtgaaagatggagtgaagttgttagcagaagataaggtcattgtttgtcatcctatggattacccatatgttgtgtttatgtgtcatgagatatcaaatactactgcgcattttatgcctttgga

SEQ ID NO: 44334 - DNA, 345 bp, Glycine max
  Clone ID: LIB3139-073-P1-N1-B10
gggtgggttgtgagcgtgctcctgctaggggctctcacctcctttttagtccctgcaactgcaacaaaagaaagaagataatggtttggtagtgccatcaccgggagccaactacacactcacatggaatgaattatagaacccagacccacaccattcacagatctcaaggatctcacaataccctttttttcccctcaataataaagttgtgctctctttggacttatgagtgctcactcctcttgcttggattcaaagtctccattttccaacttggttttgtggtggcaaagaaagaagcaattgtggccctgggctctggttggtttgttgtttcattga

SEQ ID NO: 44335 - DNA, 373 bp, Glycine max
  unsure at all n locations
  Clone ID: LIB3139-073-P1-N1-B11
cacacctttacattcacccttagtcctcactcaacagacaaattagccatgagcaccaaggagtgctgccaccacgacgaggagcggcgtcagctcccccgccgcgtattcgccgcgatcctcggcttcatcctcctcatcctcctggtgatcttcctcatctggatcatcctccgccccaccaaaccccgcttcatcctccaagacgccaccgtctacgccttcaacctctcctccaccggcgacaccccttcccccattaccccaacccccaacaccctcaccctcaccatgcaggtcaccctcgccgccttcaaccccaaccaccgcatcggagtttactacaccaaactcgacgcctacgccgnctacc

SEQ ID NO: 44336 - DNA, 372 bp, Glycine max
  Clone ID: LIB3139-073-P1-N1-B12
gagaaaccagctttgagacagttatggctcacggtgcgtacagcaagcggcgcgtgaacgcaacgcgtagatccaactccaagcctctcggcatcgccaagaagtccaaaccctccgtttccctcaaaaaccagattcgatcccttgagcgcatgctccgcaagaacctgcctcccgaggtgcgcgaggcgcaggagcaaaagttggaggcactgaagaagcagcaggagattcacacgcgcctcgccgccgaacgcaagatattcttgcgcgaccggaagatcaagttcttcgagaggaggaaaatcgaaagacgaatcagacgcctcgagaaactgcaccgtgcttcttcttcctcttcttcctctgccc

SEQ ID NO: 44337 - DNA, 78 bp, Glycine max
  Clone ID: LIB3139-073-P1-N1-B2
atttgctgctttctaagttcataataatttctgtacaagtaacaaggcacaataaatctctacagattattcaagtcc

SEQ ID NO: 44338 - DNA, 369 bp, Glycine max
  Clone ID: LIB3139-073-P1-N1-B3
ctttttccaaacatggaaagcaaagccatctgtttctgcatcagagtgcgcaaaagcaagagcaaggaaagcaaagtgaaagatttagagaaactctcccatgtcaagcctaatcacaagggaaaaaccaaagggtgtacttcaacaactcctgttggtgatggtggtggcatcaatgttcatggagccaacacagttgctaacaatgatgtaggagtagctgctgctgagatgactgcagctcatacctctttgatgagtgccaatggagttcaagatggaagtggtcatggtcatgggggtgaatctggggcagatggtgatgttggctgaaatttcatactaaaatatttttgtgaagcagaaaac

SEQ ID NO: 44339 - DNA, 363 bp, Glycine max
  Clone ID: LIB3139-073-P1-N1-B5
cggctcgagaggagatttgtctctggggatggtgaagagatgacattgattccaggaaccagtgttgaagaggcttacaacaagctaatagttgaacttgagaaaagtgttcctacattggttggcattgaatgtcccaaggatgagaaacttcctcgtcgcaaaatttttgacaaacctaagacgcgctgcttcactattctccctatggagtttaatcttgtggtccgtcaaaagtttttaaattttgtgaggttcattatgaagaaaagggacaagcttagttgtcaagttggaatcaacccatactccatggaatggactggtttggccaatagattactgagtaagggcaatgatatt

SEQ ID NO: 44340 - DNA, 368 bp, Glycine max
  unsure at all n locations
  Clone ID: LIB3139-073-P1-N1-B6
gataaaccgcgttcacaggttgccgcaccttaaaaccggaggcaaaagcaatcgttacttgatttcaagaatttctcaatttctttctacttctttgtgtacgatttcttaagggaaagaaaatcactctctgtgctggccacagacttcgtgaatcattttcttttccactcttagtttatttgctgaacactctcctatttgatataggacttcgtgtcagatttaaacttcttctgtttccttctcagttctctgtttaatttcaagttcaagctggtgaaatcttggattagtgctcccactctcctatctggtataggactttgnggagagactctcctatttctcttctttctttcactctc

SEQ ID NO: 44341 - DNA, 253 bp, Glycine max
  Clone ID: LIB3139-073-P1-N1-B7
tctctcccttagtcaaagggattcatcgttcttgttcccaggttatttagaaaagcaaaatggtgaagatttgctgcattggtgctggatatgtggggggtcctactatggcagtcattgcacttaagtgcccatccattgaagtcgctgttgttgatatctctaaatccctcattgcagactggaacagcaaccagcttcctatttatgaacctggccttgatggtgttgtgaagcaatgccttggcaagaa

SEQ ID NO: 44342 - DNA, 353 bp, Glycine max
  Clone ID: LIB3139-073-P1-N1-B8
gtgccttttcagggaaggaccctaccaaggttgacagaagtggtgcctatatcgtgaggcaggctgcaaagagtgttgtggcaaatggccttgccagaaggtgcattgtccaagtttcctatgccattggtgtccctgagcccttgtcagtgtttgtggacacttatggaactgggaagattcctgacaaggagattcttcaaattgtgaaggagaatttcgacttcagacctggaatgatcaccattaacttggaccttaagaggggtggccataggttcctcaagacagctgcttatggacactttggaagggatgaccctgacttcacctgggaagttgtgaagccactc

SEQ ID NO: 44343 - DNA, 243 bp, Glycine max
  Clone ID: LIB3139-073-P1-N1-B9
gatttgtacatgttgattgactatcatacagtggcaactgaatttagaaaatttctaccgtattacattaggtggcatcagtatacctcgaagatctacattctaccatctacactcactgctgaaactaaatataagcggaattggcgtaatattcatataaccggcttattttacgacggctgatacaaattctggactaaacaccagacaaatctcgctttgacagaagacgaaaagatg

SEQ ID NO: 44344 - DNA, 368 bp, Glycine max
  Clone ID: LIB3139-073-P1-N1-C1
gtttgctggtatctttaatggtttgaaaagtgaggttcatgtatttatacggcaaaagaaggttttgcggggatttgatgaagagattagagattttgttgaagaacaaatgtctgtaagaggtattgaattccataccgaggagtctcctcaagctatcacgaagtcagcggatggctcattctctttaaagaccaacaaaggtacagtggacggtttctcacatattatgtttgctacaggacgcagacctaatactcagaacttaggcctggagtctgttggtgtgaaactagctaaagatggagctatagaggttgatgaatactctcaaacatcagtttcttcaatttgggcagttggagatg

SEQ ID NO: 44345 - DNA, 278 bp, Glycine max
  Clone ID: LIB3139-073-P1-N1-C10
gacagagggcaattttagagcaagtgtggatttgcagcgcactcatcggattaaaggaatgattaaaatggtggccacagttggtattcctgagaatacaggtatattattggcctgtgctatgaatagttcttttagggggcgcgccagttctgatatttacaccatctgctcttcaagactgtgaattgtggaatcctgcttgcacaaaagcaatgactatgtcatttaatccaaaccttgtgtttgatgcatggaggttgggatttcttaaacct

SEQ ID NO: 44346 - DNA, 373 bp, Glycine max
  Clone ID: LIB3139-073-P1-N1-C11
tgcagaactttgtttcccaacctccattgcctccgcttctacctcgctaccatgatcattcctgagaagaaccgcaaggagatctgcaaatacctcttccaagagggagtttgctttgcgaagaaggacttcaatttggcgaagcaccctgagattgacgtgccgaatctgcaggtgattaagctgatgcagagtttcaagtctcgcgagtatgtgagggagacttttgcttggatgcactattactggttcctcaccaacgatggaatcgagtttctcagaacttaccttaaccttccttccgaaattgtccctgctactttgaagaaacaggccaagccacctggcaggccctttggcggcccatccggtg

SEQ ID NO: 44347 - DNA, 370 bp, Glycine max
  Clone ID: LIB3139-073-P1-N1-C12
gccagaaagagatattttctctccgtgatacaacacaagaggaccctcgagaggtgactgctgcaaaggcagatttaaattatattgggttagatggagaaattggctgcatggtgaatggagcagggttagcaatggccacaatggatataattaaattgcatgggggtactcctgccaattttctggatgtaggtggcaatgcctctgaaaaccaggttgttgaggcatttaaaatattgactgctgatgacaaagtgaaggcaattttggttaacatttttggtggtataatgaagtgtgatgttatagcaagtggaatagtgaatgctgcaaaagaggttgcactgaaagtaccagttgtagttcg

SEQ ID NO: 44348 - DNA, 372 bp, Glycine max
  Clone ID: LIB3139-073-P1-N1-C2
caacatacaatgccaaaacgaagctttcccaacaaatcatgcaaagcttcctctttctttgttaaaatccaataatcttgacgtgaacccttctcatcccaaaataaaacccccaaaaccctaaccctatttaccataacttcacacattcactactatctaatggcacctctcacttatctcttcttcccacttttcctcctctttgccttaacacactcccgaagcacaccacactcctccaaaacgacactcctcgacgtcgtttcctccctccaaaacgcacacaatgccgttgccttcaccccccatcaccttaaccaacaccaacgacaacaagaagccttgcttctatcgtcgtcgtttggtatt

SEQ ID NO: 44349 - DNA, 385 bp, Glycine max
  unsure at all n locations
  Clone ID: LIB3139-073-P1-N1-C4
aagctggaaattggtctcgaggcaccaatcactgatagggtttctatgcatatgaggggctgattttccgcgttgggacaactgcatactcctatccgccccacgctgccattgcctccaccacctcgtcagccacaactccacctccaccatcataaccaacagtttcagggccaggcagctgcagctccagcgtcaatggctgctatgccacaaccacctgggatccgccctcgtgtgagagcaagaagagggcaagctacagatcctcacagtattgctgagcggttgcgtcgtgaaagaatcgctgaaagaatgaaggcattgcangaattagttcccagcatcaataagacggacagagcggcgatgcttgatgaaattg

SEQ ID NO: 44350 - DNA, 348 bp, Glycine max
  Clone ID: LIB3139-073-P1-N1-C7
ttttcgtagtgttaagagaatgcctctttctatagggggaggagctggtgcaaagaatgctattctcatgaatatgccaaatgctgttctttcaatgtggagatattttgttggagatctcgtctttgaagtttctaagatgacttctccctacattaaatgtacaggctctttcttcatagcatttggaaatttgtctggattcaccatcaatttttgaggcttttccccacaagctgttgcaaattttagagttttatgaataaggtgtgttgtattttttacattattgatattcttttccttctttttcaattttattgttctttcctaatacttcttttttat

SEQ ID NO: 44351 - DNA, 322 bp, Glycine max
  Clone ID: LIB3139-073-P1-N1-C8
tgagggtttggactatatggaaagaattcctcttgcggcatctgagggttttcctcatgtgctttcacgcaaaaatggcgaaaaaggcaaaaggagatttgtctctggggatggtgaagagatcacattgattccaggaaccagtgttgaagaggcttacaacaagctaatagttgaacttgagaaaagtgttcctacatcggttggcattgaatgtcccaaggatgagaaactttctcgtcgcaaaatttttgacaaacctaagacgcgcggtttgactattctccctatggagtttaatcttgtgggccgtcaaaaggtt

SEQ ID NO: 44352 - DNA, 267 bp, Glycine max
  Clone ID: LIB3139-073-P1-N1-C9
cttttcttttctccctatggagtttaatcctggggggcgtcacaagtttttaagatctgtgctgttcattatcaagaaaagggacaagcttagttccctagttagaatcaacccatactccatggaatgtactggtttggccaatagattactgcgtcaggccaactatattctgtgttgcgattatgctagatttgatggtttgtttaccaagcaaggtttgatgcaaaatggcatcaatgataaacagtctttgcggtcctgatg

SEQ ID NO: 44353 - DNA, 368 bp, Glycine max
  Clone ID: LIB3139-073-P1-N1-D1
gttgatttccagaaacacaaccattcccaccaagaaggagcaggtgttctcaacctactctgacaaccagcccggtgtgttgattcaggtctatgaaggtgaacgaacgaggactcgtgacaacaatttgcttggcaaatttgagttatctggaattcctcctgctcccagaggtgttcctcagatcactgtttgcttcgacattgatgccaacggtatattgaacgtgtctgcggaggacaaaaccactggacagaagaacaagattacaattaccaacgacaagggcaggctttctaaggaggagattgagaagatggtgcatgaagctgagaaatacaagtctgaggacgaggagcataagaaga

SEQ ID NO: 44354 - DNA, 370 bp, Glycine max
  Clone ID: LIB3139-073-P1-N1-D10
gaatttttacgctattcttacctacaataacacaaacgacttgataaagaaggatgtggcttgtgagactgaccaacttactcatgtttacacatttatcctccgtccggatgcaacctacagcatcctgattgataatgtggagaagcaaactggtagtctctactctgattgggatcttctccctccaaagacaatcaaggatcctgaggctaaaaaaccagaagattgggatgacaaagaatatattcctgatcctgaggataagaaaccagaggggtatgatgacatcccaaaagagctcccagaccccgaagccaagaagcctgaagattgtgatgatgaggaagatggtgagtggacaccccct

SEQ ID NO: 44355 - DNA, 369 bp, Glycine max
  Clone ID: LIB3139-073-P1-N1-D11
gaaagcttcaaggatcaagcttttatttgtcccggttctcatcgctcaatcatctggcctgtagacgatacaagttcgagaagcaagcaaagttggtagccactgctaggttggttcaattgacaaaagctagaagttgcagtatgggttcctacccacctgttgtaaattgagccctagggtacaaaatcaaggtcatggatgtccgtgtcatggaatgtcagtgctggctatttttctcattattttttacatattttttttactcattgtccctaggttattgtttttttttcaatttatatttttaaatcaagaggacaagggttttttttttcctgtgatggtgagatatataaatcacaaatt

SEQ ID NO: 44356 - DNA, 369 bp, Glycine max
  Clone ID: LIB3139-073-P1-N1-D12
aagaaagatgtcgatcttcgagtacaacgggagtgccctagtggctatggtggggaagaactgcttcgccatcgcgagcgatcggagactcggggttcagctccagaccattgccaccgatttccagaggatttcaaaaatccacgacaagctcttcatcggtctctccggcctcgccaccgacgcccagaccctctaccagcgcctccttttccgccacaaattgtatcagctccgcgaagagagggacatgaagccccaaacctttgccagcctagtctccgctattctctacgagaaaaggtttggtccatacttttgccagcctgtaattgctggactaggagatgatgacaaaccattcatttg

SEQ ID NO: 44357 - DNA, 367 bp, Glycine max
  Clone ID: LIB3139-073-P1-N1-D2
gtgcatgatagttcagtgtctacaataccaggtgattgtgtcattggtgttaagttgacaaccataaacaatatgtgtgcatatgggctcaatcctggtatttcaggttctcgtcttttgggtaccattcctcagtctatttcacagcaaactgtttggaatcaaatggcaacagtgagaacaccattgaattttgattctagcaagcagagcttttgtcaattttctattgaccttctcggtggaggaattttagtggacaaaactggagattggatcacacttatacaaaattctccaattagtaacttgttgagagttgctgcttggaagaaaggctgtttaatggttaagattgtgatgtctg

SEQ ID NO: 44358 - DNA, 371 bp, Glycine max
  Clone ID: LIB3139-073-P1-N1-D3
atacaacaaaaatttctcaagttccaccataattggtctatacagtttgcagagaatgttctaagttatacaagtcctttcccaacccttgctgaatgaggtgaagttgcaagttgaatttgacatctttctggtcagtctctagttgatgatccatctaactatttgttagtttgcttaatgtttacagaattttattcttagcaatcaaagaagttaagctgttttaatttcctacaaaatgattgcttgaccatttttgtagtggtctgccattgtaggtgaacatatctagatgggaacttaatttttgaaggtgagtttcagtgatatcttgtacaaaaaagaaaaaaataaccaccgaaattcgg

SEQ ID NO: 44359 - DNA, 328 bp, Glycine max
  Clone ID: LIB3139-073-P1-N1-D4
caaatttgtgttttcccgaccccgattgcaagcaatggacgccttcaattccttctgggattcaagaaaccgatggaattacgatactctcaaaaacttccgtcagatttctccggtcgtgcagaatcacctgaagcaggtttattttactctgtgttttgccgtggttgctgcggctgtcggggcttaccttcatgtcctcttgaacattgggggtttttctactacagtggcatgcatgggaggcaggctttggttactctccacacctccttttgagagaggaagagggtgactttgatgatggccgtatcactggttcagggtt

SEQ ID NO: 44360 - DNA, 363 bp, Glycine max
  Clone ID: LIB3139-073-P1-N1-D5
catttttatatattcatctccatctcaaagggccaaaacaaaaactgtcttatataaagagaggtatttcattgtattattgttgtgattagtgataatgcaaaacgggattaaccggcaactatccctgaaggagaaactgaaatcttcgctatgctgtttctccggatccgttcacagcgacccattagagcgcggagaaggagggttctacagcaagctacgcataccaaaaacaccgatttctccacaggggtccacgtcatcaccgtcgtggttcaagataaggtcaccgacgtgcaccgagtacggcggtgacccgcatccacgtgttatggggcggagcctgaagttcaggatggg

SEQ ID NO: 44361 - DNA, 65 bp, Glycine max
  Clone ID: LIB3139-073-P1-N1-D6
aaaaaaattttataaaaaaacataaaaaaaaaaaaaagagggaaactaaaaaaatataaggaggg

SEQ ID NO: 44362 - DNA, 352 bp, Glycine max
  unsure at all n locations
  Clone ID: LIB3139-073-P1-N1-D7
gaagaatcagagctcagcgataagcanaaagtggaaagcgcgaaatggttcctcctcaattctcctcccggagaaatccaatacgttgccaaagatgtgaaatccattctcaacaacgacgatttgtacaaggaagccgcttccgaggcttttctcttttacaacaaatcgcacttgatttcccttccaatgtccaaccgaagcggagacgtactggttacttcttttggtgagcttgagggtaatgcatttcttgaacctaggactgcgcaagtagcaattgttgatcatgttaaacaagtttgtacagaggtgagacctgccacagacgaagaacttccatcttcatata

SEQ ID NO: 44363 - DNA, 339 bp, Glycine max
  Clone ID: LIB3139-073-P1-N1-D8
cggctcgtgcggctcgagcacattccgtgccagggtgttaggcaacaccccttttaccacttcactttctttcaaccagacacagagccagagaaccctgaagaagccagagtcagagagaaacagagtaatagatagtggaatatttgttagaccatgaagcataaagatggaaaaccgattaatcagccaaataagaaccggactgtgacattggcagtcacgtttattgctctctgtggtttttctttctatctgggaggaatctttggcggtggaaaggatagtgattgtggtcaatatcattcaaattgtgctatgttttttttaagaaaactt

SEQ ID NO: 44364 - DNA, 238 bp, Glycine max
  Clone ID: LIB3139-073-P1-N1-D9
ctttctctacgtcaaagattctttatattttgtgtgtctctctctttgcttgtttttgttttctctataaacttataatatttgtatctatcatttaatcatttgttcaaaaccagccagtttgaatgttgtcctttataaatgtatgatgaatgtcaaaagaaatatttttgattctttcttacattaaataaactattattattactacctttttcatttttattattttttattc

SEQ ID NO: 44365 - DNA, 354 bp, Glycine max
  Clone ID: LIB3139-073-P1-N1-E1
ttgggattagggtatttgggtatgcttaaatcgcaccctcccacgtgtttcattacttgttttctataatgttattgatcgaggttgtgaaagtttgattcttttgtagatagttggggttgggttttttctagatatgattaaacagatattcggttaaatacctcgcaaaccctcaaaatcatctcacaataattcaaacggggaaggaggtttcaatgatggtttctcactgaactcatcttctaataccctcttgaaatccaattcagtttcttcaaaatcttcaagttctggttcagttgggtctttgtctgggaatgagactattgctctacactattcaaaccaatc

SEQ ID NO: 44366 - DNA, 339 bp, Glycine max
  Clone ID: LIB3139-073-P1-N1-E10
gcccctagatgaagaaattctttctaaggttgcacaagatatggttgaggaatggtttgattgtgttgatgaggaggattcctttgaggaagtttctttaagtgcagcacttaatggtgttgagggtttggactatatggaaagaattcctcttgccacatctgagggttttcctcatgtgctttcacgcaaaaatggcgaaaaaggcaaaaggagatttgtctctggggatggtgaagagatgacattgattccaggaaccagtgtggaagaggcttacaacaagctaatagttgaacttgagaaaagtgttcctacattggttggcatttgaatgtc

SEQ ID NO: 44367 - DNA, 369 bp, Glycine max
  Clone ID: LIB3139-073-P1-N1-E11
gtttagcgaagatccgaatcccaacccgaacccgatcgtgatccgagaggtttgggcctccaatctcgaatccgaattcgaactcatccgcgaactcatcgatcgctacccttttatctcaatggacacagaatttcccggtgttattttccgaccacatgtggaccccaccaaacccttcaaccaccgcaaccgtccctccgaccactaccgcctcctcaagtccaacgttgacgctctcaacctcatccaggtcggcctcaccctcaccgacgccgccggcaacctccccgacctcgccggaaaccgctccatctgggaattcaacttccgtgacttcgacgtggcgcgtgacgcctacgctcccga

SEQ ID NO: 44368 - DNA, 364 bp, Glycine max
  Clone ID: LIB3139-073-P1-N1-E2
gagagctttcagtttctggggttcatctttcttcttcttaatctttccccccctctctgtaacatcccgcttctctgaatccctttctgctaatcatctgtctttcaagctaagattttctggtttgtcttttaattcaccaaaaagcaaacttagaaggatttttcgaaagccaggtgttttcagaaacgagatccaggttttattgtcgaatttcgctagtcatattaatatttcatcatttttttttcctttgaaaccagccaagagggttatttttgatccctcaaagctaatttctcattttcttttccgggactgaagaggttgtctatttgaaatctccttcatcctttcctttctt

SEQ ID NO: 44369 - DNA, 372 bp, Glycine max
  Clone ID: LIB3139-073-P1-N1-E3
aatcaagccaagagatgtttgcattgttggtgttgcacgtacaccaatgggtggatttcttggtaccctgtcatctctatctgccaccaagctaggctctatagctattgaagctgctcttaaaagggccaatgttgatccatcccttgtggaagaagtatttttcgggaatgttcttagtgctaatttggggcaagctcctgcaagacaagctgctcttggagcaggaatatccaattcagtaatctgtactactgttaacaaagtttgtgcatcaggaatgaaagctgcaatgcttgctgcacagagtattcaattaagcataaatgatgttgttgtggctggtggtatggaaagcatgtctaatgtacc

SEQ ID NO: 44370 - DNA, 342 bp, Glycine max
  Clone ID: LIB3139-073-P1-N1-E4
gccaccggattggccattgatgcatatggtccaatcagtgacaatgctggaggtattgctgaaatggctggtatgagtcacagaattagagagagaactgatgcccttgatgctgccggaaacacgactgccgctattgggaagggatttgccattggttctgctgcccttgtatcactggccctttttggtgcctttgtgagccgcgctgatattacaactgttgatgtgagagactccaaaggttttcatagctttgattgtgggtgcaatgctttcttactgggaaaatgctatgactatgcatagtgcaggctgtgcttgtttgactatgagatgatg

SEQ ID NO: 44371 - DNA, 359 bp, Glycine max
  Clone ID: LIB3139-073-P1-N1-E6
ctcgagcctattttggctcgaggaacaaaaaaaaaaacggggttcgctcttctcttcgaataaaccacaaaaccaacaaacgagaagaggagtgagagaagatggggttgtcgttcaccaagctgttcagcaggttgtttgcgaacaaggaaatgaggattctgatggtaggtcttgatgctgctggtaagacaaccattttgttcaagctcaagcttggagaaatcgtcaccaccatccccaccatcggatttaatgttgagactgtggagggcaagaacatcatcttcactgtttgggatgttggtggtcatgacatgatccgtccttttaggtagcttttttttttgtattcttag

SEQ ID NO: 44372 - DNA, 370 bp, Glycine max
  Clone ID: LIB3139-073-P1-N1-E7
cggctcgagcggctcgagcggctcgaggccaaaggagagtaggcagtcacaattataccctttggctcccaaaggagagtaggcagtcacaattataccctttgggagccaaagggagcaaatgggatatcaatcaaattttggacaatgaattgaccaagcagattgcacaggctcatggcaaaactgcagctcaggtatgtcttagatggttatttgagcaaggtgtgactttcataccaaagagctacaataaagagagattaaaggaaaatttagagatatttgattggtcactcaccaaagatgaccatgaaaagattaatcaagtcaaacaggagcgtatgttcaagtacggaacagcagcatt

SEQ ID NO: 44373 - DNA, 369 bp, Glycine max
  Clone ID: LIB3139-073-P1-N1-E8
ctcgagccgaatcggctcgagatttcaggcactggagttacatatgaaactggggaccatgttggtgtttactgtgagaatttgtctgaaactgtggaagaggcaataaggttaataggtttgtcaccagatacctatttctcaatccatactgatgatgaagatggcaaaccacgtagcggaagctccttgccacctacattcccaccctgtactctaagaacagcacttacacgatatgcagatgttttgagttcacccaaaaagtctgccttgcttgccttagctgctcatgcatctgatccatctgaagctgatcgactaagacatcttgcctcacctgctggaaaggatgaatattcagagtgg

SEQ ID NO: 44374 - DNA, 298 bp, Glycine max
  Clone ID: LIB3139-073-P1-N1-E9
ctcaggcacacaggagttgtggtttatggtaatgagtgttactttggtggtggcatacaacattctcctgctggattaacaccatatggaactccacttagagtggtagacttaggtgtgacacatgttcccaaggatgttttcgaaatgtatttacaggaaatcagatcgcgataccttgcctgaaacatatagtctgcttactcacaattgcaacatcttcagcaatgaggtttgctaatttttggttgttgcttccattcctgagaggtggggtgtagcttcccaatgatgttta

SEQ ID NO: 44375 - DNA, 369 bp, Glycine max; identical to SEQ ID NO: 37234
  Clone ID: LIB3139-073-P1-N1-F10

SEQ ID NO: 44376 - DNA, 369 bp, Glycine max
  Clone ID: LIB3139-073-P1-N1-F11
agaattcctcttgccacatctgagggttttcctcatgtgctttcacgcaaaaatggcgaaaaaggcaaaaggagatttgtctctggggatggtgaagagatgacattgattccaggaaccagtgttgaagaggcttacaacaagctaatagttgaacttgagaaaagtgttcctacattggttggcattgaatgtcccaaggatgagaaacttcctcgtcgcaaaatttttgacaaacctaagacgcgctgcttcactattctccctatggagtttaatcttgtggtccgtcaaaagtttttaaattttgtgaggttcattatgaagaaaagggacaagcttagttgtcaagttggaatcaacccatac

SEQ ID NO: 44377 - DNA, 363 bp, Glycine max
  Clone ID: LIB3139-073-P1-N1-F12
ctagttctatgcattgacaaacagaatccgattgatgtgtatgagaacactctaattatatttattgtataactcgtcatttgttcaaaaaaaaaaaaaaaaaaaaaaaaaaaaaaaaaaaaaaaaaaaaaaaaaaaaaaaaaaaaaaaaaaaaaaaaaaaaaaaaaaaaaaaaaaaaaaaaaaaaaaaaataaaaaaaaaaaagaataaaaaaaaaaaatagaaaaaaaatataaaaaaaaaactaaaacaacaattaataactctttttcttggggtggggggagtcttccttttattaaaatttcctccaattttattatatatattatccactaaaaaagacaaacatatttttataaa

SEQ ID NO: 44378 - DNA, 365 bp, Glycine max
  Clone ID: LIB3139-073-P1-N1-F2
gaaaaaagaccctttccattctcctccttttcttcctcctccactggctgcacctcgctgccgtgtctctgcctagcgtgaaattggcctcatttcccatctgggtcctgtgaattgcgattggaaccgcgttttccccgcttctgggcttggctcagaagtagtcagaatgatgtctgtcacaggcaaaagcattgattttgctggcaaaaacttggtctcttgtggctgctcttccaatgcttcttcgtttgataggtacactgtgaggaactatgccaagctgaatagtaataattctaaagggtgtggcagagatcatggggctcgtaaattggtttgttgtaagaagaggagcactcatt

SEQ ID NO: 44379 - DNA, 373 bp, Glycine max
  Clone ID: LIB3139-073-P1-N1-F4
aaatataagcggaatttgagtaatattcatatttccggcttattttacgacggcagatacaaattctggactaaacacgagaaaaatcttgctttgacagaagaggaaaagatggaagtgattagaaatagaggcattcctgctgatgttcttgcaaagcgagctcatgaatttgaaaaacatgttgctcatgaaagcctcaaggatcaaattcctgctgttgacaagttgtattctactaaggttaataagtttgcaaaaattatgaaccttagacaaagtgttgttggtgatcttaaacttcttactgatgggaagttgtatgagggtaagcatattcctgtatctaatattagtgcaggggaaaatcatg

SEQ ID NO: 44380 - DNA, 365 bp, Glycine max
  Clone ID: LIB3139-073-P1-N1-F5
cggaataaaaaaacaagtttaattactattatggcgccgagggatcataagacaagcaacgctaaggctaacggtaacggtaacagcggggtgaaggaggtgcattttcgtggagtgagaaagaggccgtgggggagatacgccgcggagatcagagatcccggcaagaagagccgcgtatggctcggaacctttgacacggtggaggaggcagcgcgtgcctacgacgccgatgcacgagaggttagtgggcctaaagacaagataaactttgggctaagtttggaaaatgttacgaactcttgctacagctagagcagtatcgttgggttcttcagtctctgcctctaattttactgcaattg

SEQ ID NO: 44381 - DNA, 356 bp, Glycine max
  Clone ID: LIB3139-073-P1-N1-F6
ctgctgttggcttgttgttcaaggatggcaatttgtaagaaagatgtttggagagttgaatgtggaatcccttctggatttccgctcacagttatttgtaatagcatttttaatgagatgctcattagatatagctatgaaaaattactgcgccaggctaaagctccaagtatgtttttacaatccttcaaaaattttgtttctttgtgtgtgtatggtgatgataacttaattagtgttcatgaatatgtcaagccttactttagtggttctaaattgaaaagctttctagctggtcataatatcaccattactgatggtattgacaaaactagtgcaacctttcaatttagaaa

SEQ ID NO: 44382 - DNA, 363 bp, Glycine max
  Clone ID: LIB3139-073-P1-N1-F7
tattgcctacattttctatatacttttgaattggctggtcccttttcaccccctctcccctcaaaaaatctaaagacacaaaacaccctcctatactctataatggtttcttctaagatcttcttcctttttctcctctttctagcacaccttcatcaacatgcatctgtggaaggagattccagtttgataaagagaacttgcaagaacaccaagtactacaatctatgcttctcttccctcaaatctgatccaagcagtccaaacgcagatcctaagggcctagctgtgatcatgattggaataggaatgaccaatgccacttccacatcctcctacttgtcttcaaagttgcctaccccc

SEQ ID NO: 44383 - DNA, 350 bp, Glycine max
  Clone ID: LIB3139-073-P1-N1-F8
ataatagtctccaaactgatggatatgagggtgactttgaataagaggtccaaatacaaaaatgtaaaaacacaaaattaaacaacattctttataatggctagtgttaatatataaactcctaaaggtctcatgttaggatatcaaatattaacatgcttatccggaagttgattctatctcaattatatgaacttgtatgagctcctatttctttaagatatgtttctctttcatttaatcttttccaatcatttccaatcttcgttgtcgattttttctattttttcgatatatatgttgataatatagtatcacacctctttatcattttttctatattaattatt

SEQ ID NO: 44384 - DNA, 369 bp, Glycine max
  Clone ID: LIB3139-073-P1-N1-F9
ggaagatcaagaaaaacccaaaaagattgatgccagattgagacaaagaatagatcctcaatacaatgaggttcaagctcagatggaaacaaatttgtttaaattgtctcttgatgatgttgaaactcctaaaggttccatgttggatcttaaaatttctcaatctaaaattgcacttcccaagaacacagttggaggaaccattctgcgtagtgatttattggcaaatttttttgacagagggcaattttagagcaagtgttgatttgcagcgcactcatcgtattagaggaatgattaaaatggtggccacagttggtattcctgagaatacaggtatagcattggcctgtgctatgaatagttctt

SEQ ID NO: 44385 - DNA, 370 bp, Glycine max
  Clone ID: LIB3139-073-P1-N1-G1
gtggtttcagtgagtgatcggtgttcacttgatccttcataagtcgtcatcatcatcatcatcatcaccgttgattgaagaagatgccgatcagaaacatcgccatcggaaggcctgaagaggctactcaccccgacacgttgaaggcggggttggctgagttcatctccaccttgatcttcgtgttcgccggttcaggttccggcatcgcctacaacaagctcaccgacaacggcgccgccactcccgccggcctcatctccgcttccatcgcccatgctttcgccctcttcgtcgccgtctccgtcggcgccaacatctccggcggccacgtcaaccccgccgtcaccttcggcgccttcgtgggcgg

SEQ ID NO: 44386 - DNA, 369 bp, Glycine max
  Clone ID: LIB3139-073-P1-N1-G10
acggtacaaaagttgaaaaagacgaggttggttcggggtggtgaaaacagagaggaaaaaacagagcccattgagaacacacgtgcttcattcactacttcagtgtcgcttcccatctctatctctttcacaacgttcttcaattcaaaaccacttgtttcttcagttccactctgcttcttcccctttctcttctcatactcacccagctttcctttttattaaaaaataaaaaaaaatgttgaagctttcgtgcaatggcttggaccgggctcactcgctggcccaatgcggctttgcgggccggcccgcctgcgtcgtccctcgccggaggataagcggcgtctccggattctggtcgccgggcgg

SEQ ID NO: 44387 - DNA, 373 bp, Glycine max
  Clone ID: LIB3139-073-P1-N1-G11
gtttggccaaacactcccattcccactgcactgcgagagcttctaaagcctctccctgcaggtgttgaaatcgatgaactccctaagcaaattgatgatacacagtacccaaaaacattcttctataaagaagaccttcatccaggcaaaacaatgaaagtacaattcaccaagcgtccctatgcacaaccttatggtgtatatacatggttaacggatattaaagacacctctaaagaaggatatagttttgaagagatatgcatcaagaaagaagcgtttgagggagaagagaagttttgtgcaaaatccttgggaacagtaattggttttgccatttcaaagctgggaaagaacattcaagtactttcat

SEQ ID NO: 44388 - DNA, 344 bp, Glycine max
  Clone ID: LIB3139-073-P1-N1-G12
gtagtcaatactaacaagtctaattgatagtttgcaactctagcacatggtcaaggtatacatctcatttcgtgtggaaatggaaatggccatgttgatgatcaggctgaggatttcatcagaaggttctatgaacagctgagaatgcaaagccgcatgcagttgctggagtatcaagagatgtgattgtaaagaaaaaaatgacttttgtgcttgtgctcctcaacttgatgatgatcaacaagtttagctagccattcctgggattaatatttaatttgcttttgttgatctttcaagtttcaacttcattgttttttcccagggaaatttggctgtcctgt

SEQ ID NO: 44389 - DNA, 370 bp, Glycine max
  Clone ID: LIB3139-073-P1-N1-G3
ttccaatccaagtagatagagtgataagattctgtttggatgatctctcttccatttttggtcactggattgattactttgattacctttgtcagtgggtattacgggctgaaagctgtgtagcaccccaaggagatcttgtgagacgggtttttgacaaggagattgacaatcattatgaagagaagctgttgatcagccaaatttgttgctccaacatggaaaagttacctattttgaagtcctgggcggacaaagatgaattcagaagctatttagatggacggagagctagattttcccatcaattggtgtcatatgctgaagaccatattgggaagcaggaaggaaatgattggataggaagcgt

SEQ ID NO: 44390 - DNA, 370 bp, Glycine max
  Clone ID: LIB3139-073-P1-N1-G4
ggagataactattaatcatgacagattgtgtcatctgcaattaacaaaatgccgtgtgatgcgaatagcagtcaggtgcccacaacttgaaactatgtcgttgaagcgcagtaacatggcacaggttgtgcttaattgtccacttttgcatgagcttgatattggctcttgccacaaacttcctgatgccgcgatacgagctgctgcaacttcatgccctcaactggtctcactggacatgtcaaattgttcatgtgtcagtgatgaaactctgcgtgaaatagcattgagttgtgctaaccttagttttcttgatgcatcatactgctcaaacatatctttggagtctgttagactgccaatgttaaca

SEQ ID NO: 44391 - DNA, 369 bp, Glycine max
  Clone ID: LIB3139-073-P1-N1-G5
atcgatacgtattggtgaagtatccaatagtattggtgtcgggtacgtgaaaaaaattgaagtattcgctcttcatgaacagaccttaagtttgcgttttttttttaaaaaaaaatggcagtaagatatattgttcagtaaactagaattattggttctttccttgtagatcccaactaattcatctggcctcattgagtatagagctcatcctttctggctacaaaaatactgcccatcacatgagcttgatggcacttctcgttgttgtagttgcgaaagaatggagccaagggatacaaaatatcttttgcttgatgatggtcgaaagctatggttagagtggctagactcattaattatggatac

SEQ ID NO: 44392 - DNA, 52 bp, Glycine max
  Clone ID: LIB3139-073-P1-N1-G6
ctcgatctagattgccagcgaaccaaatactattcggggggggttcttccaa

SEQ ID NO: 44393 - DNA, 292 bp, Glycine max
  Clone ID: LIB3139-073-P1-N1-G9
cgtttatttcgcattatgctgactgttgtctgcgtgggtgtttctgatgatagttattgttgacacttctgatttgcatgttcttcatcacacgagtttttcgttgaatttatgcaatcgcagctgaaaataaaaacttgctgattgtgaggatattcaaccactcaattgcaattatgggacacgaatggtgaaagcccgatttgctggggatcgatgctcccagggctgttttacccagcattgttcgtcatccccgtcacacgggagtgatggttgtcatgggccaaaa

SEQ ID NO: 44394 - DNA, 372 bp, Glycine max
  Clone ID: LIB3139-073-P1-N1-H1
gctctcaagactgtgaattatggaatcctgcttgcacaaaagcaatgactatgtcatttaatccaaacccgtgttctgatgcatggagtttggaatttctgaagcgtaccggatttcattgtgatatcatttgtgtcactggatggactgccaccccaatgcaggatgttcaggttacaattgattggtttatttcctctcaggaatgtgttcccaggacctattgtgttttaaatccacaaaatccttttgtgttaaataggtggatgggaaaactgactttccctcagggcacttcccgaagtgttaagagaatgcctctttctatagggggaggagctggtgcaaagaatgctattctcatgaatatgc

SEQ ID NO: 44395 - DNA, 359 bp, Glycine max
  Clone ID: LIB3139-073-P1-N1-H10
atttgaacattgtggataccacgttcctgagtttatgagtgatgaagatgcaattaaacggttggaaattttgctgcggaaaattgagggaagtccacttttgttggtcttggatgatgtttggcctggatcagaagccctcattgagaaatttcaattccagatgtctgattataaaattgtggtgacttctagggttgcatttcctaaatatggcaccccatatgttttaaaaccacttgctcatgaagatgcaatgaccctattccgacatcatgctctcttggaaaaaagcagttcacatattcctgacaaagaaattgtccaaaaggttgtgagatattgcaagggtttaccgc

SEQ ID NO: 44396 - DNA, 368 bp, Glycine max
  unsure at all n locations
  Clone ID: LIB3139-073-P1-N1-H12
gtttttcactccggcgtcgttttgatcagcttcttggggggtggtaagaatctgccctctttgtctctctctctctttttgagctttttgtcattggttcagatttagacccatttgtgatttgttccgcttttagaaatcttaggcttctgagatgaggaaatggagattgaatctttttcttaaaaagatcgtagcttcttgttaaagtttgttgttattggagacctgggcaagagtgtgtaatctaatcattaccctaggtagcctaattgtacaaaaatggcagtgtttttgtgacatttgtaggttcttaggggtttgattctttgtttcaagcttaattntgtttgcattcattctcttgt

SEQ ID NO: 44397 - DNA, 373 bp, Glycine max
  Clone ID: LIB3139-073-P1-N1-H2
cggctcgagattaggataggagattttcgtaaatcccataagatgggcccatatgcgtgattgctcagattacggcactaagggggtaatgtaaatgtttcgttttcactctcacgttcttaatttttgtttgtgtctctctcgcaggaattaggatccgatatggggttctcggtaacaacgctagttttcgcagtgattggaattgtggcgtccctttctaccagtatttgtttcaacagaggaccttccgccaatctatttcacctaactttggttcttactgcaacaacatgctgctggatgatgtgggcgattgtatatctggcacagatgaaaccgctcatagtacctatcttgagtgagggtgaat

SEQ ID NO: 44398 - DNA, 376 bp, Glycine max
  Clone ID: LIB3139-073-P1-N1-H4
tctcacttacacacaaatcagaattcacacccacatacgcagcgagcaatctctctgaattgaaacccaccatgttgattaaagggcatcaaattaaggcaccaattttggtcctcaatttgttccttgtcctaatttgttccacagcttcttccgtcaacgttgttgaatcaaggaaacttgatgagaccactccagtgcctgccacaaacggtactgaagaaaagtgtggatcatgtggtggtaccacttatccgtcgccaccgccaccgttactaccaccaccgtctccaccaccgtctttaccaaagaaaacaccaccctctcagtattgtccgccaccaccaccgtcatcgttcatatacatcacggggcc

SEQ ID NO: 44399 - DNA, 370 bp, Glycine max
  Clone ID: LIB3139-073-P1-N1-H7
tgtgctctgtgcctccgccaaatcaaataaaatggatgctgaaatggttgagagcattgatgtcacagatgatgcaaggagttttagctgggcagtggacagcgccataaggagtgagactgggtccatttttggagaatctcgtgtccgtagctttgcttcgttagtggacagtgccataaggagtagtagtgccagtgaagcagatttgggatcatccccttccccagtgcatgcttttgcctccgctgtggatatcaggactgttgctgcacgattattcaccgtctctgagcttaacgtagccaccaacaatttctcatttgacaacaagattgatgctggaggccttgatgttgttgagtacaga

SEQ ID NO: 44400 - DNA, 359 bp, Glycine max
  Clone ID: LIB3139-073-P1-N1-H8
gcattattttggaaacgccaaacagtctttgtggtggggattaatgattgatgggtgaaatgacacacatgatgttggcttgttgttcaaggatggcaatttgtaagaaagaagtttgtagagttgaatgtggaaacaattttggatttccgcttacagttatttggaataccatttttaatgagatgctcattagatatagctatgaaaaattactgcaccaggctaaatcttcaattatgtttatacaatccttcaaaaaacttgtttgttagtgtgtgtatggtgatgataacttaattagtgctcatgaatatgataagccgtactttagttggtctctattgaaatgctttcta

SEQ ID NO: 44401 - DNA, 371 bp, Glycine max
  Clone ID: LIB3139-073-P1-N1-H9
gcatgatggcagaaatgataaacagtctttgtggtggtgatgaaaaattgatgcgtgaaaggacacacctgctgttggcttgttgttcaaggatggcaatttgtaagaaagatgtttggagagttgaatgtggaatcccttctggatttccgctcacagttatttgtaatagcatttttaatgagatgctcattagatatagctatgaaaaattactgcgccaggctaaagctccaagtatgtttttacaatccttcaaaaattttgtttctttgtgtgtgtatggtgatgataacttaattagtgttcatgaatatgtcaagccttactttagtggttctaaattgaaaagctttctagctggtcataat

SEQ ID NO: 44402 - DNA, 377 bp, Glycine max
  Clone ID: LIB3139-074-P1-N1-A1
gaaaaaagtagagtggtttgtgggttgctgcggcaacaaaaccgggcatcaaattccaattccacagacacactacttctcttccgcttcttctgatggcaaaccaagcttcactctccttttcttcttccgtgtctcctgttcacgcgcctctcaagcgcgtgggcacgcacaacggaagctttcattgcgacgaggccctcggctgcttcatgattcgcctcacgaacaaattcaacagcgccgaaatcgttcgctcccgagaccctcaggtgttggaggttctcgatgctgttctcgatgttgggggagtgtatgaccctgcccgagatcggtatgatcatcatcaaaagggattttgagaagtttttgggcat

SEQ ID NO: 44403 - DNA, 367 bp, Glycine max
  Clone ID: LIB3139-074-P1-N1-A10
cctcacccttgtgctactgtttgtgtccttcgtctctgtctctgttttcatcattttctacaggcatcgttctccgttcagcgtccccaacttgccgccggggaaggcggggtttccggtgatcggcgagagcctggagtttctgtcggcgggacggaaggggcttccggagaagttcttctccgatcgcatgacagagtactcttccaaagtgttcaagacctccatcttaggggagcctacagtgattttctgtggagccgcatgtaacaagttcttgttttctaacgagaacaaacacgtcatttcgtggtggcctgaaaatgtcaagaagttgttcccaacgaatattcaaacaaactctaag

SEQ ID NO: 44404 - DNA, 367 bp, Glycine max
  Clone ID: LIB3139-074-P1-N1-A11
gtggaatcctgcttgcacaaaagcaatgactatgtcatttaatgcaaacccgtgttctgatgcatggagtttggaatttctgaagcgtactggatttcattgcgatatcatttgtgtcactggatggactgccaccccaatgcaggatgttcaggttacaattgattggtttatttcctctcaggaatgtgttcccaggacctattgtgttttaaatccacaaaatccttttgtgttaaataggtggatgggaaaattgactttcccccagggcacttcccgaagtgttaagagaatgcctctttctatagggggaggagctggtgcaaagaatgctattctcatgaatatgccaaatgctgttctt

SEQ ID NO: 44405 - DNA, 368 bp, Glycine max
  Clone ID: LIB3139-074-P1-N1-A12
tggtttcgaacccttgttgtggttaggtcttcacatttcgaatgtgggaattcatgggtcaggggactccgggcggcatgaaccggcagggcgaccggaagccggacggcggcgacaagaaggagaagaagttcgagccggcggcgccgccagcacgcgtggggcggaaacagcggaagcagaagggcccggaggcggcggcgcggctgccgacggtgactccggtgacgaagtgcaagctgcggctgctgaagctggagcggatcaaggactacctactgatggaggaagagttcgtggcgaatcaggagcgactcaagccgcaggaggagaaggccgaggaagacagatccaaggtcgacgatctc

SEQ ID NO: 44406 - DNA, 295 bp, Glycine max
  Clone ID: LIB3139-074-P1-N1-A2
acacatagaagagcttgacgtcccactgctcacgttacggttagctattcggctcgagtgagcatatgaacagctttaaagagttgctgttgttgatgttatgcaggacttggatctaggatcatcatgtagtgacatacttttgttttcttgcctttttggcaatggacatccattttagaaacgatgaaattaaataagtgcttatttctgatttttttttttttatttgcgagcttgttgaaaccgtaattactggttactataataatggttattgtgcttgccatcagtt

SEQ ID NO: 44407 - DNA, 370 bp, Glycine max
  Clone ID: LIB3139-074-P1-N1-A5
ctcaacaagaagtctgaagagtgtgccactgcagaatacgctggtgttaacttttctgccactaacactgttttggccaagcaaggatagtagcccgcccgcacctttaggaaacaaactatttcggagaaaaatattgttgtaaccttaaaaatgttgtaagcagatgcttttattttcgttgatcacaacttatgctgacattctcaggttcagcacatagataggccattaccataattatttttgtggtgtagggcttttaccttgttatttgaaaggttggttgaattttagcttcctacacggtaacattgaaccaccatgtaatgtaactcgtgatgatttgtttaaatttgtggagtaaaag

SEQ ID NO: 44408 - DNA, 365 bp, Glycine max
  Clone ID: LIB3139-074-P1-N1-A6
caaaaattacaacaccattcttacccatttcaaaaaaaggccgtgaggggtactattcgtaaaatggccactcttgttctttaccaattctttctcaaactcttgctcctaatttcagtctttcagctttcctttgctgctaggagactcaaccagctggttcaggaccagtcacagttactccattaccacaacggtcctcttctatacggcaaaatcgccgtgaacctaatctggtatggtcacttcaaaccatcccaaaaggccatcatcaccgatttcgttacctcactgtcatccccatcgtctcagagcagccagccatctgttgccacatggtcgaaaaccactgaccaattctacca

SEQ ID NO: 44409 - DNA, 356 bp, Glycine max
  Clone ID: LIB3139-074-P1-N1-A7
cgagaggtacttgctcacagatatatttttttttttgtctgcatcattttctcgagagctttcagtttctgtggttcatctttcttcttcttaatctttccccccctctctgtaacatcccgcttctctgaatccctttctgctaatcatctgtctttcaagctaagattttctggtttgtcttttaattcaccaaaaagcaaacttagaaggatttttcgaaagccaggtgttttcagaaacgagatccaggttttattgtcgaatttcgctagtcatattaatatttcatcatttttttttccttttgaaccagccaagagggttatttttgatccctcaaaactaatttctca

SEQ ID NO: 44410 - DNA, 228 bp, Glycine max
  Clone ID: LIB3139-074-P1-N1-A8
tggaaatctccaagttggctttgccgaagcagtctaattacgctgtctggaggattttctttgtgaatttgttaagcgtgttgtaaataagctgttataattgtagctctggttactttttgaaaccacgaatgtatttatccatttaagacgtagaagtatcccacttgcaagtgttgtgtgctttttatatgaaaaaaccatcctcatttcattccgtgtttgacc

SEQ ID NO: 44411 - DNA, 372 bp, Glycine max
  Clone ID: LIB3139-074-P1-N1-A9
attgtgtttcacaactattgcggatgtatccttttgcttttgaggtttctgcggctttcctggtggacttcgtagactgcatgctttcttgtcgttttggaaacttcttatgtaacagtgagaaggagaggcagcaattcaatgttttcgaggcatgtggatgtctgtgggtatacttggctgatttgcggacatcagaaggaggttcccatgtgcatcacaatcctttttatgatccaccaaagcataatggtcctcttctgcccccagcagcagcattagcccctactttgtggccccaattccaccttcgttgggcatgtccagaagaagcacaagctggggagattgaagcacgatgcacgaagataa

SEQ ID NO: 44412 - DNA, 375 bp, Glycine max
  Clone ID: LIB3139-074-P1-N1-B1
ctcgagccgaatcggctcgagtttaaatccacaaaatccttttgtgttgaataggtggatggggaaactgactttcccccagggcacttcccgaagtgttaagagaatgcctctttctatagggggaggagctggtgcaaagaatgctattctcatgaatatgccaaatgctgttctttcaatgtggagatattttgttggagatctcgtctttgaagtttctaagatgacttctccctacattaaatgtacagtctctttcttcatagcatttggaaatttggctgatgacaccatcaattttgaggcttttccccacaagctggtgcagtttggagagattcaggaaaaagttgtattgaaattttcacaaga

SEQ ID NO: 44413 - DNA, 369 bp, Glycine max
  Clone ID: LIB3139-074-P1-N1-B10
tgacttttcgagaaagaaaaacaaaaatgagtttccgtcattccatcatgaacgctcttcccattctcctcttcttcctcttcgtttctgcattagtttctgcgaagaaaactggtgatgtgacggagctgcaaattggcgtgaagcataaaccagtatcatgtgaagttcaggcacacaaaggtgacagagtcaaagtacactataggggaaaactcactgatggaactgttttcgattctagctttgaaagaaataatccaattgaatttgagcttggtactggtcaagtgatcaaaggttgggaccagggattattgggaatgtgtcttggtgagaagcgtaagctgaaaataccatcaaaacttg

SEQ ID NO: 44414 - DNA, 364 bp, Glycine max
  Clone ID: LIB3139-074-P1-N1-B11
caagaattctgctgtcaagcacatcaatcaggatttttcggcgtctaccccttcacttttccaagcaattagatccatgtcatctgcaaagcttttcgtcggaggtatttcttacagcactgatgatatgagtttgcgagagtcttttgctcgctatggagaagtaattgatgtcaaggttattatggatcgtgaaactggcaggtcaagaggttttggctttgtaacttttgcaacaagtgaggatgcatcttctgccattcagggcatggatggccaggatcttcatggtcggaggatacgggtgaattatgctacagaaaggtcacgtccagggtttggtggtgatggtggatttggcagt

SEQ ID NO: 44415 - DNA, 373 bp, Glycine max
  Clone ID: LIB3139-074-P1-N1-B2
gtctaagaggagatatactactagatgatttcctagtggctgaaaattcgccattgcagcctgacattaattcttctgagagagcttcacctgttacaagctccaaacaaaatcaatctaacttgacttataatgtaacagcaccaaatttggatggtggaccagatactccttcatttggtcactcaggcatggacaaaaattccttggagaaactgagggaagcatcagctgctgaagctgaggcagcgagtgctgtctggcaagctgtgcagtctatatcaagtaatccagctgaagaaacatctctgtcagatgaaaactcacaagctgcagaaacagtttcagatggaagtgacactgagggagatgt

SEQ ID NO: 44416 - DNA, 372 bp, Glycine max
  Clone ID: LIB3139-074-P1-N1-B3
cgtggtcctatctccctgtgggtagaggatcaacattttctgttcatgatcaggttcctgaacatgatgatgcagccaactaatatacaattaatactaacttcattgccgagttatggtagaggaggagaataaaagttatatgtgccattatgtggctaacatgttacatatctcttacttgatcattacaattttccggcatcttgagtatgtgcataatttctctaacgtgccattcactggaactctagctagtacattagtggaagggttcagtcttgagttaatgaaataataatacaccatgatttcctatggattctgggtgcaaagtaattgcttcacctgatacatttcgcagatcacatg

SEQ ID NO: 44417 - DNA, 368 bp, Glycine max
  Clone ID: LIB3139-074-P1-N1-B5
agccatggcagtctgtatgtcagtgcattgggtgataaatttctttgttggactactgttcttgcgtttgctggagaaacttggtccacagctgctttactccatgtttgctaccttttgcatcatggcagtaacttttgtaaaaagaaatgtggtggaaaccaaagggaagtcacttcatgaaattgagatcgcacttcttcctcaagactagatctctattcatttgattgctctaattttgcatagtttttcggctgagcagattgtgtttcgtctattttggttgaccttaacattacaaggggaagctcaggaactatgcattgttttgctgcaacattagtacgaagaggcttaggtattat

SEQ ID NO: 44418 - DNA, 372 bp, Glycine max
  Clone ID: LIB3139-074-P1-N1-B6
cttgcccagtgctcatcgaggcttaaaccctttcggcggcagcgaaaaaagtctccccgcccccaaacccaaacaatgaggaagaaaaaacaagggttcagaagacccgttgtcataaaaaagccgaagcaaccgcaagagcaacccagcgttgatcctattacgggaaagaaaatccccaaaagtttcgtgttttcgcgaggcaagttgccggctcctctcaaacagcttcagatggacctcagaaagttgatgcttccatacactgctctcagccttagggaaaagaaacggaataatctgagggactttctgaatgttgctggacctatgggtgtcacgcatttcttcatattgtcaaaaactgctact

SEQ ID NO: 44419 - DNA, 373 bp, Glycine max
  Clone ID: LIB3139-074-P1-N1-B7
cacagcctaagagaattggattctaagctctagagagagagagagagagagagagagagagagaagaaagaatcatgtggtgctggaaaggagacggaggctagaagaagaagaaaaaaagaagagctagagagagggtaccctcttgttaatttgcactgtttttgtgtctgttgctgcacttttaggagttcttctattctaacaacctctgccaaccaacacaagcctgaaaataaaataaagatgctgcctccttgctggagatcgttcgggaagaaacagtaatgctactgacatgggaaagaaggggagttggttttctgcaatcaagagagttttcacacaccactccaaggggaagcaggattca

SEQ ID NO: 44420 - DNA, 358 bp, Glycine max
  Clone ID: LIB3139-074-P1-N1-B8
ctctcactctcttactctttcactctacttctctctcctattgcggctagggtttaggtttttctttcaccgtctccgttccttcaatcttcttattctctttcatctctgatggagacgttgcgggtttagttctaaggggtggttctggccttgggtttttggaacgtacggtgtcgttttggggttgggaaaacaaattctgagagatggcaaccacgaacccttttgatttgttgggtgacgactctcgtgaccctttttagcttagcgccgccgagccactttaggaggctgctgctgcctcggctgccaccgctgctcccaagaaggctccttgctcatctaaacatgcctg

SEQ ID NO: 44421 - DNA, 370 bp, Glycine max
  Clone ID: LIB3139-074-P1-N1-C1
ctcgagccggtaatattcatatttccggcttattttacgacggcagatacaaattctggactaaacacgagaaaaatcttgctttgacagaagaggaaaagatggaagtgattagaaatagaggcattcctgctgatgttcttgcaaagcgagctcatgaatttgaaaaacatgttgctcatgaaagcctcaaggatcaaattcctgcttgtgacaagttgtattctactaaagttaataagtttgcaaaaattatgaaccttagacaaagtgttgttgggatcttaaacttcttactgatggggagttgtatgagggtagcatattcctgtatctaatattagtgcaggggaaaatcatgtagttcaaa

SEQ ID NO: 44422 - DNA, 370 bp, Glycine max
  Clone ID: LIB3139-074-P1-N1-C10
cgggttcgcaaaaagacagagggataatggtggcgtatttgggagggatgactaacgaagctcataacctatatcagccccaaaagaaagaataggtagagggaaattgttcctttgctattaaatctagctctatattgtaaaaagtctcctctacaaaagcacaatggggtagggtaaaaacctcctactatgaaacacttggcgctggatcacattcttcaggagattttgctgtaaaggaagatcatcgaaaaacccataaggacagataccagattgagacatagacacgaccctcaatgcaacgcggtgcactcccacatggaaacagagttggttaacttggctcttgacgacatgacatctc

SEQ ID NO: 44423 - DNA, 367 bp, Glycine max
  Clone ID: LIB3139-074-P1-N1-C12
ccagaacctattgtgttttaaatccacaaaatccttttgtgttaaataggtggatgggaaaactgactttcccccagggcacttcccgaagtgttaagagaatgcctctttctatagggggaggagctggtgcaaagaatgctattctcatgaatatgccaaatgctgttctttcaatgtggagatattttgttggagatctcgtctttgaagtttctaagatgacttctccctacattaaatgtacagtctctttcttcatagcatttggaaatttggctgatgacaccatcaattttgaggcttttccccacaagctggtgcagtttggagagattcaggaaaaagtttgtattgaaattttcac

SEQ ID NO: 44424 - DNA, 372 bp, Glycine max
  Clone ID: LIB3139-074-P1-N1-C2
cgtatatatttgtactaagtgtagcagcagctacaaacgctttaccatataacgtaagtaacgtctctgctgggtgtaccatttctcaattttctgaagttaacaacgttgtgaaaaattgcaagagtatcgtggtaaaaagcctttcagtacccgcaggaaaaacattagagctggctctacacatccggaacaaccttaacgtttcaaggtacaactaccttccaatatcagcagtgggatggtccgttaatacacattcatggcagcaacttacgggtatatggatcaggagcaactctagatggtcttggtggaaaatactgggatggacaaggtgataaaggtattaagaaacccaagttctttaga

SEQ ID NO: 44425 - DNA, 325 bp, Glycine max
  Clone ID: LIB3139-074-P1-N1-C3
caacgatattccgtgttgcgattatgctagttttgatggtttgattaccaagcaagttatgagcaagatggcataaatgataaacagtctttgtggtggtgatggaaaattgatgcgtgaaaggacacacctgctgttggcttgttgttcaaggatggcaatttgtaagaaagatatttggagagctgaatgtaaaatcccttctgtatattcgctcacagttatttgcaatagcatctttaatgagaagctcattagatataaatatgaaaaattactgcaccaggctaaagctgcataaatgtcttttacaatacttcaaaaa

SEQ ID NO: 44426 - DNA, 369 bp, Glycine max
  Clone ID: LIB3139-074-P1-N1-C5
ggaaaaggcgtcttcataaacgccgcccaaaacttctcatacccttttattcattccattcgtttctagggttttcttttctttgccgagaaaatgagagagtgcatttcgatccacattggccaggccggtatccaggttggaaacgcctgctgggaactctattgccttgaacacggcattcagcccgatggacagatgccgagtgacaagaccgttggcggaggagacgacgccttcaacacatttttcagcgagaccggcgccggaaagcacgtgccccgcgccgtcttcgtggatcttgaacccaccgtgatcgacgaagtccgaaccggtgcgtaccggcagctcttccacccggagcagctg

SEQ ID NO: 44427 - DNA, 369 bp, Glycine max
  Clone ID: LIB3139-074-P1-N1-C6
tggatccgtgccccttcgtgcggatcctcgtcggaaacctcgccggggagtccccggcatcatcaaaggcctcttctttctccggcaaagtccacccttcgagttcccccttcttctgcaagatcctactccagggacttgattcgaattccacttctcctagagtgtccagtgtccctctgatatcagactccgacccacaccctcactccttcgccgcctcctttgatttctccaaagcccaaatcttgaaagcctctaagaagcccctgatgaagatcttcgtctacaagggccccaccactcccttctgcgtcttcacctccgccaaactattgtgcaaagtttcaataccccttgatctcacct

SEQ ID NO: 44428 - DNA, 353 bp, Glycine max
  Clone ID: LIB3139-074-P1-N1-C8
gttcgcgacacatgttatccgaaaaaaataaaccacttggttggcctcgacggtgctaaggagaggctgcacctctacaaggcgaatcttcttgaagaaggttcctttaactctgtcgttcaaggttgccatgctgtgtttcacactgcttctcccttttatcacaatgtcaaggacccccaggctgaattgttagacccagctttgaaggggactctcaatgttctgaaatcgtgtgtaaacttgccgacgctggaacgcgttgttttaacctcttctgttgctgcagttgcgtacaactgaaagcctagaactcccgttgtagtagttgattgagactttggttttttgac

SEQ ID NO: 44429 - DNA, 366 bp, Glycine max
  Clone ID: LIB3139-074-P1-N1-D10
gccttatcgctgtggttttcatcgtcttccttctcttatatttcttttttttttttgtcttcgccgcacgccgaaacaatggccggaaaaggagagggtcctgctatcggaatcgatctcggaaccacctactcttgtgtcggtgtgtggcaacatgaccgagttgaaatcatcgccaacgaccaagggaacagaacgacgccgtcttacgtcggcttcactgataccgagcgtctcatcggtgatgcggctaagaaccaagtcgccatgaaccccatcaacaccgtcttcgatgccaagaggttgattggtcgtagattcagtgactcctctgttcagagtgatatcaaattgtggccttttaag

SEQ ID NO: 44430 - DNA, 365 bp, Glycine max
  Clone ID: LIB3139-074-P1-N1-D11
gtttgaaaaataagtcacttcgcccaaataaacaagggagtggcgtggatctggttttaagttgtgtggataattatgaagcaagaatggctgttaaccaggcttgtaatgaattgagccaaacatggatggaatcaggtgtttctgaggatgctgtttctggccatattcaattacttattcctggagaaactgcctgttttgcgtgtgcacctcctcttgttgttgcatctggggtagatgaacgtacgctcaagcgggaaggggtttgtgctgcatctttacccaccactatgggggttgttgctggccttctagtccaaaacactctaaaattattgctaggctttggacaagtctccccg

SEQ ID NO: 44431 - DNA, 369 bp, Glycine max
  Clone ID: LIB3139-074-P1-N1-D12
ctgtgttagtgttgtgtttgttgtgtgttgagaagcagagatgcaaggaagcgcggccgacggagaagccttggatttcgagcctgaggacgatgacttgatggacgaggacggcgcccccgacgccgacgccgacgcttctccacctcaacctaagctcaaatccgccatcacccccgccgccacttcctctctctccgccccgaagaagaccaagggccgcggattccgccaggacactgacgccaaccgcaacactcgcctctccggcaccgacttcgactctctcaccgccgagggcggccctggccctcagagatccattgagggatggatcattctggtcaccggcgtgcacgaggaagcgca

SEQ ID NO: 44432 - DNA, 370 bp, Glycine max
  Clone ID: LIB3139-074-P1-N1-D2
tctcaccctcctcttcacacattttctgtgcgctctaacaaacattctcgttcacactttcagattgtgtgaagatgggggcgggtggccgaactgatgttcctcctgccaacaggaagtcagaggttgaccctttgaagcgggtgccatttgaaaaacctccatttagtctcagccaaatcaagaaggtcattccacctcactgtttccagcgttctgttttccgctcattctcctatgttgtttacgacctcaccatagccttctgcctctattatgttgccacccattacttccacctccttcccagccctctctctttcttggcatggccaatctactgtgctgtccaaggttgcatccttactgg

SEQ ID NO: 44433 - DNA, 373 bp, Glycine max
  Clone ID: LIB3139-074-P1-N1-D5
ctctctcggctccgatgaatggaccttgtatgagcaggttgcagttgctgctatggattgccaatgtctcgacgttgccaaggactgtacaaaggttcttcagaagagattcccagagagtaaaagagttggtaggctggaggcaatgttgcttgaagcaaaaggatcctgggaattggcagaaaaggcttacacaagccttttagaggacaatcctcttgatcaagccatccataagaggagggtggcaatggcaaaggcacaaggcaaaatttctgtggctattgattggcttaataaatatctggaaacattcatggcagatcatgatgcatggagagaattggctgaaatatacatctccctgcaaatg

SEQ ID NO: 44434 - DNA, 180 bp, Glycine max
  Clone ID: LIB3139-074-P1-N1-D7
gttttggcttcataaccaccgacgacagcggcgaggaatggttggtccaccagtcctccatgcggtccgacggcttccgcagcctcgccctcggcgagtccgtcgagttccttattgactccgatcccgaaggccgcaccaaggcctgtcgacgtaccggcccttactaatcgtcagttc

SEQ ID NO: 44435 - DNA, 368 bp, Glycine max
  Clone ID: LIB3139-074-P1-N1-D8
gtcactctctctctctctctctctcattcacacgaatcacactctccacagtgcgattcattcaccaatggatcgcaacggtgttctctctcttgcattcatctgcattgtagtcgccggcgtcggaggccagtctcccgccgcagcgccctcgaacactccggcaacccccgccgtcgccactcccgcccaagcaccttccacaccgaattcaccagccccagttgcttctcccaaatcatctccaccagcttcgtctcctaagcccgcaaccgcaacccctgcttcgtcgccggcggcatctcctaccaccacccccgccgcgcctgctccagcgaccaagccacctgcagcctctcctcctccgg

SEQ ID NO: 44436 - DNA, 352 bp, Glycine max
  Clone ID: LIB3139-074-P1-N1-D9
ctcgtctttgaagtttctaagatgacttctccctacattaaatgtacagtctctttcttcatagcatttggaaatttggctgatgacaccatcaattttgaggcttttccccacaagctggtgcagtttggagagattcaggaaaaagttgtgttgaaattttcacaagaggaatttcttacagcttggtcaactcaggtgcgtcccgcaacgactctgttggctgatgggtgcccatatttgtatgctatggtgcatgatagttcagtgtctacaataccaggtgattttgtcatttgtgttatgttgacaaccatatacattttgtgtgcattatggcttaatcctggta

SEQ ID NO: 44437 - DNA, 369 bp, Glycine max
  Clone ID: LIB3139-074-P1-N1-E1
ttaagccttactttagtggttctaaattgaaaagctttctagctggtcataatatcaccattactgatggtattgacaaaactagtgcaactttgcaatttagaaagttagcagattgtgattttctcaagagaaactttaagcagatgtctaatgttttgtgggtggctcctgaggacaaggcgagtttatggtcacaacttcattatgtttcgtgtaataatctggaaatgcaggaagcttatcttgtcaatctcgtaaatgtgttacgagaattgtatttgcatagtccagaggaagctcgccaattgagaaggaaagctctctctcgtattgaatggctgcaaaaagctgatgtgcctaccatag

SEQ ID NO: 44438 - DNA, 366 bp, Glycine max
  Clone ID: LIB3139-074-P1-N1-E10
gcatcgtattaaaggaatgattaaaatggtggccacagttggtattcctgagaatacaggtatagcattggcctgtgctatgaatagttcttttagggggcgtgccagttctgatatttacaccatctgctctcaagactgtgaattatggaatcctgcttgcacaaaagcaatgactatgtcatttaatccaaacccgtgttctgatgcatggagtttggaatttctgaagcgtaccggatttcattgtgatatcatttgtgtcactggatggactgccactccaatgcaggatgttcaggttacaattgattggtttatttcctcttaggaatgtgttcccaggacctattgtgttttaatcca

SEQ ID NO: 44439 - DNA, 369 bp, Glycine max
  Clone ID: LIB3139-074-P1-N1-E11
aaaatgagatacatccttggagaacacaacattctgttcctcaaaagcttcgccttcacgatattattccttagttgcatagccattcggcttaacttgtgtctttccagcatcccttcttcactgaaatcaattccccttgaagggcatttaaaatttgatcaagttagcctaagccatgcagcaagggactttggcaacaggtaccaatataatccaatggcagtgctgcaaccagaatcagtttctgatattgtagccaccataaggcatatctggctgatgggtcctggctcccacctcaccattgcagcgaggggccacggccactcgctgcagggtcaggctcaagcccatggaggacttgtg

SEQ ID NO: 44440 - DNA, 367 bp, Glycine max
  Clone ID: LIB3139-074-P1-N1-E12
cttctggatttccgctcacagttatttgcaatagcatttttaatgagatgctcattagatatagctatgaaaaattactgcgccaggctaaagctccaagtatgtttttacaatccttcaaaaattttgtttctttgtgtgtgtatggtgatgataacttaattagtgttcatgaatatgtcaagccttactttagtggttctaaattgaaaagctttctagctggtcataatatcaccattactgatggtattgacaaaactagtgcaactttgcaatttagaaagttagcagattgtgattttctcaagagaaactttaagcagatgtctaatgttttatgggtggctcctgaggacaaggcgag

SEQ ID NO: 44441 - DNA, 370 bp, Glycine max
  Clone ID: LIB3139-074-P1-N1-E2
gagattggtaggcacagaacatgagggatatgatccttttcttggtggaattcaaaaatatgccactcccatgatgcccctagatgaagaaattctttctaaggttgcacaagatatggttgaggaatggtttgattgtgttgatgaggaggattcctttgaggaagtttctttaagtgcagcacttaatggtgttgagggtttggactatatggaaagaattcctcttgccacatctgagggttttcctcatgtgctttcacgcaaaaatggcgaaaaaggcaaaaggagatttgtctctggggatggtgaagagatgacattgattccaggaaccagtgttgaagaggcttacaacaagctaatagtt

SEQ ID NO: 44442 - DNA, 358 bp, Glycine max
  Clone ID: LIB3139-074-P1-N1-E5
ggaaagaattcctcttgccacatctgagggttttcctcatgtgctttcacgcaaaaatggcgaaaaaggcaaaaggagatttgtctctggggatggtgaagagatgacattgattccaggaaccagtgttgaagaggcttacaacaagctaatagttgaacttgagaaaagtgttcctacattggttggcattgaatgtcccaaggatgagaaacttcctcgtcgcaaaatttttgacaaacctaagacgcgctgcttcactattctccctatggagtttaatcttgtggtccgtcaaaagtttttaaattttgtgagggtcatcatgaacaataggtacatgcttaggcttcatgcc

SEQ ID NO: 44443 - DNA, 333 bp, Glycine max
  Clone ID: LIB3139-074-P1-N1-E7
tgtcaaaacacttcatctttaggctccatctcaaaaaaatgggtggtttagctagcaatcttgctctaattgttatggtgggtctgcaaattcattatgcagcacttgctatattcacaagagccgctttgttagatggattgagtacgacggtctttgtagtgtacaggcaaggcatagccactttggctttggcgcctatgtttttctctcctaagcggagacaatcagtgaaagattctttgggattcatgagcttctttttgatgtttgtgaccgctctttgtggagtcacatcaaatcagaatgcatactttaaaggtttattttatt

SEQ ID NO: 44444 - DNA, 363 bp, Glycine max
  Clone ID: LIB3139-074-P1-N1-E8
atgtagtactataaagtgattcggttgacagtgttgtttcttatcttatatgttgacagaagaagtcttctactccttacgttcctcaaaactcaaccccatgtgcaactttatttgtagctaatctggggtcgtcttgtaatgaacaagagctaatccaagtgttttctagataccctgggtttttgaaactgaagatgcagagcacgtacggggctccagttgcatttgttgatttccaggatgttggtagctcaactgacgctctaaacagtctgcaaggcacaattcttcactcctcacaatctggcgagggaatgcgtgtagaatatgctaaatcgcgtttgggcatgcggaagaagc

SEQ ID NO: 44445 - DNA, 343 bp, Glycine max
  Clone ID: LIB3139-074-P1-N1-E9
gtgatgggggacgcctgcggaccccaagcccagctcaatggtggggtgtcctatctgccccaatggctgtcaataatcgcggacttatactgtggctgtactacctcgcatacatatattgtcgcaagcagagcacatgattccggggctgccacggatcaatagatagcctgtgatgaacagctcttgctcgaactcatcttccctgagcttcgtgataacgcacattctgaactcttcaagaagagggagctatttcaagatctgttccattgctatggaattctttttgttcaatagctttacttttgtaggaaattatttcattttacccttctttttt

SEQ ID NO: 44446 - DNA, 372 bp, Glycine max
  unsure at all n locations
  Clone ID: LIB3139-074-P1-N1-F1
gcctcgatgccgacagcctctccaccaccggcgacctcgtcacgcttgacaacgcgtgcggcatgggcattctgaccgttaacctgtacgacgcgctgccgagccacgccaaagaccgcatccagcacacgtgcggtgacatctcgccgagcatgatcgacgcggtgcgaagccgcatcgacgagaacgggtggaagggcgcgagcgcgaaagtcatcgatgcgcagaacatggacgtcccctccaacaccttcacgcacgtnctcaccaacttcggcttcgtcggcatcgcggatccacggcgcgtcctgagcgaatggcgccgcgtgctccgccccgccggtgtctgcggcttcaccatctgggagtcgg

SEQ ID NO: 44447 - DNA, 369 bp, Glycine max
  Clone ID: LIB3139-074-P1-N1-F11
actggagattggatcacacttatacaaaattctccaattagtaacttgttgagagttgctgcttggaagaaaggctgtttaatggtcaagattgtgatgtctgggaatgcagcagtcaaaaggagtgattgggcctcattggtacaagtgtttttaacaaacagcaacagtacagagcattttgatgcatgtaagtggacaaaatcagaaccacattcctgggaattgatcttcccaatagaggtatgtggtcctaataatggttttgaaatgtggagttctgagtgggcaaatcaaacttcatggcatttgagtttccttattgacaatcccaaacagtctacagtttttgatattctcttgggaatc

SEQ ID NO: 44448 - DNA, 265 bp, Glycine max
  Clone ID: LIB3139-074-P1-N1-F12
ggactttgaaaagagagtcaaagagtgcttgtttgataagactgttgtgtgatgtgtctttaggcagatatgaatttgtgtgacgggtattgcatggagttttaccagcatgtatggtacaatttaaaattggagaattaattgtttatttttcaatagttctctcagcaagctgacaaaaaataagtgattatttctccataataaactgaaccagtcacgtaacctttatgtcatggcagtttctaattctatagtgtgtaat

SEQ ID NO: 44449 - DNA, 370 bp, Glycine max
  unsure at all n locations
  Clone ID: LIB3139-074-P1-N1-F2
aaaagtgttagatccagagcttgtcacttcactgaaacagatcaatgaaagggtggtacagattagtctgaccaattgcaattactggaatgctcatacctttgccctcactgaatcagggaagctgtatgcatttggtgctggagacaaaggacagctaggaattgaacttgttgctaaccagactgaaaggggaaatccagaaagggttgaaattgatcttggttaattgtttgtgcctttaacctaccccncccccccccccccaccccagtcctccacaattctttacaccatgctgtcctctaatttatggtcatcatgcatagcattttagtatttaaattccttgtctattttgtaaatataa

SEQ ID NO: 44450 - DNA, 370 bp, Glycine max
  Clone ID: LIB3139-074-P1-N1-F3
gtactttcttgcgaaacagaagggcgaaggggcaaacacaacttttttgtttttttgtagagcgagagagaaaaaaatgttggggatcttcagcagttccgtggtgtcgccgccggaggagctggtggctgccggcagcagaacgccgtcgccgaagacgacggcggggaagctgctgaaccggttcgtggagaacaaggcgtcggcggtgtcgctgcaggtgggagaacacgtgcagttggcttacacgcaccacaacgagtcaccgtggcatcccagatcatttgctgttaaggatgagatattctgcttgtttgagggggctctagacaatttgggcagcctgagattacagtttggactggccaag

SEQ ID NO: 44451 - DNA, 369 bp, Glycine max
  Clone ID: LIB3139-074-P1-N1-F4
acttaaaggtgtcatcaacatacaagagaatgcaatgaaggctggtgaagtcttgaacaatgacttggtgggcatgcttttctaatcaaaccttatggtactacaagatcatggaaagaataacattattgcaatgactagcctagaggtaattgaggaatgcaatgcattctacatagcaggacaagaaaccacatcggttgtactagtttggacaatggtgttattgagtagatatcctcattggcaagaacgtgcaagggaggaagtattgcatgtttttggtaaccaaaagccagactataatgggctaagtcaccttaaaattgtgaccatgattttatacgaggttcttaggttatacccacc

SEQ ID NO: 44452 - DNA, 209 bp, Glycine max
  Clone ID: LIB3139-074-P1-N1-F5
aatcattcttctgatttgtaccatgtttcccctgagctctcatcttccttggacacatcctcgccggcttcggagggctctcgtggcgtggcattttccgacgaggaggtgcggctggcggtgaggcacccgaagaagcgggcaggtcggaagaagttccgggagacgcgccacccggtgtaccggggggtgaggaggaggaactcgga

SEQ ID NO: 44453 - DNA, 375 bp, Glycine max
  Clone ID: LIB3139-074-P1-N1-F6
tgcaggttcttcaatcttctagagagagaaagttaaagattgaaatttggatcggagagagagagagagatggcgttgaatcctcaattgttttctaatggaatgccccctcctttcgtgaaccagatgtttgtgttggccagagacggcgattaattcataggtcgattagattcctgcctctggaaatcatggttggtcatctataatcaaacggaatcgtgtatttgtcaaatattcggatggtcttcgttgctaaaagttcagttggacacttcactgcttttgatatgcctttgctttacatccatggtgaaaaatttaaccagcctatatttcactgcaacaatctttctggacatgttgagcctgtat

SEQ ID NO: 44454 - DNA, 97 bp, Glycine max
  Clone ID: LIB3139-074-P1-N1-F8
atttaagaaaggagaatacccatttgttaaatctcccaccaatggtcccatatgttaaccgcgggggaacatatttgaactgcctgctattgccatt

SEQ ID NO: 44455 - DNA, 367 bp, Glycine max
  Clone ID: LIB3139-074-P1-N1-F9
ctttcagaggcggaaggcccattcgggtggttacatttccgaataccattgtgcagattgaaccagatatgaattcaaggtttcagcttttgagtaccactaccaatggtgattttgttcaaggaaaagatctcgcaatggttaaagttaatgtagcatgtgctgctgttggcttgacatcaagctatactccgactccattgttggaatctggtttgcaaaaagacagagggttaattgtggagtattttggaaggatgtcttacgttgctcataacgttaatcagccccaagagaaagatttgttggaaggaaatttttcctttgatattaaatctcgctctagattggaaaaagtttcctctac

SEQ ID NO: 44456 - DNA, 368 bp, Glycine max
  Clone ID: LIB3139-074-P1-N1-G1
ttttatgtcagacttattattattattatgcttatgctactactactgcacacactctctctctgttgtcattgtatggccgccaattcgagtagccgagggatcaccgccttggggaagcgagtcgccaaccagatctggacttccaaccccccctcagctcctctcacttccaggaggggagcaatagcagctgcatacagtagcagcggcgggtcagtgtatgacaagaaccctgatgatcagatccactctggggcggtcccagacgatgtgatccaggcaacacaatccggcaaatactgggccccacacccacagactggggtatttgggccccccggaggagcaggagacgaagctgcatc

SEQ ID NO: 44457 - DNA, 360 bp, Glycine max
  Clone ID: LIB3139-074-P1-N1-G10
atcgttaagctagtggcgatcggatccagctacagcatagagatcaaggaaggaaggaaggaagatgttgggtgttataaggcacaagagtattcgccctgccttctccgcaatcagacacttgtcttctgcagctaaagagattactgtcagggaggctctgaactccgcactcgatgaggaaatgtcagctgatcctaaagtgttcttgatgggtgaagaggttggggaatatcagggtgcatacaagatatccaaggggctgctcgacaagtatggccccgagagggttctcgatactccaatcactgaggctgggtttactgggattggagttggcgctgcttactatggtcttag

SEQ ID NO: 44458 - DNA, 371 bp, Glycine max
  Clone ID: LIB3139-074-P1-N1-G11
gtgagtactctccgtactatcttcaagaagcactaacggctctgcagcgttttctgccgtctaacgaaacggacgctgactcggacacggaggctcaacccgacgcggcggtggacgcgtactcgtgcgaccatttccgcatgtacgagttcaaggtccgtcgatgcgcacgtggcaggtcacacgactggacggagtgtccgtacgcgcatcccggcgagaaggctcgacgccgggacccgagaaagttccactactccggcgcggcgtgcccggagtttcgcaagggaaactgcaagaaaggcgacacgtgcgagttcgcgcacggcgttttcgagtgctggctccacccggcgcgctatcggactcag

SEQ ID NO: 44459 - DNA, 369 bp, Glycine max
  Clone ID: LIB3139-074-P1-N1-G2
ggagttacagccaaaatggctatgcaaatggacgaatggcaccgggtcgttgttctgcatggatgaatttgaattgtactggtggcgattcttcaacggagccttatttggttacacaccatcaacttcttgctcatgcaaccgctgttcgtgtgtataagaccaagtatcaggcatctcaaaaaggtttgattggtataaccttagtagctaattggtttttgccgttgagagataccaaatctgatcaaaaggctaccgaaagagcaattgacttcatgtatggatggtttatggatccgttaatatctggagactatccaaaaagcatgcgatctttagtcagaacaagattgccaaagtttacta

SEQ ID NO: 44460 - DNA, 366 bp, Glycine max
  Clone ID: LIB3139-074-P1-N1-G3
aaattattgaatcctttcattcattcccaattccatggcaccttttctcattaatcacctctttggtttccttttttgtcttcgagccataaacacactttccaccactgtttccatctctgaaacttccaattccaaccaaacacttatctgtgtcctgcaacatccaaaccaacaaggacaatcaaatctcaactgtaccagcttccctcaggctcatgctattacacttgatgtcaatcccaatgtttcttactctcagattgtgggcggcaacgggttcgtgtgtgctttaggaccgttgtcttcttccatctccgtcatgggctgttggagattctctgccaatgctacatacaatgttcc

SEQ ID NO: 44461 - DNA, 256 bp, Glycine max
  Clone ID: LIB3139-074-P1-N1-G4
ggactttgaaaagagagtcaaagagtgcttgtttgataagactgttgtgtgatgtgtctttaggcagatatgaatttgtgtgacgggtattgcatggagttttaccagcatgtatggtacaatttaaaattggagaattaattgtttatttttcaatagttctctcagcaagctgacaaaaaataagtgattatttctccataataaactgaaccagtcacgtaacctttatgtcatggcagtttctaattctata

SEQ ID NO: 44462 - DNA, 371 bp, Glycine max
  unsure at all n locations
  Clone ID: LIB3139-074-P1-N1-G5
ggaaaaaccttcaaatatgatataattggagctggttcacattcttcagaagattttcctgaaaaggaagatcaagaaaaacccaaaaagattgatgccagattgagacaaagaatagatcctcaatacaatgaggttcaggctcagatggaaacaaatgtgcttaaattgtctcttgatgatgttgaaactcctaaaggttccatgttggatcttaaaatttctcaatctaaaattgcacttcccaagaacacagttggtggaaccattctgcgtagtgatttattggcaaattttttgacagagggcaattttagagcaagtgttgattngcagcgcactcatcgtattagaggaatgattaaaatggt

SEQ ID NO: 44463 - DNA, 374 bp, Glycine max
  Clone ID: LIB3139-074-P1-N1-G6
gaaattttgataaaccgcgatcacaggttgccgcaccttaaaaccggaaacaaaagcaatcgttacttgttctcaagaatcttcaaactttcttctgttttctctgcactcggttctttaggaaaagaaaatcactctctgtattgattacagacttcgtgaatcattttcttttcaactttcagttcacttgctgaacactctcctataaatatataggacttcgtgtcagatttgaacttttcctgtctctttctcggttttctttcttattctcatcttctttaaattttaaggctcgtattttgtttctctaaactttctgttggactcatttgaaatacaacatgaagttttatccaggacaaaatgtc

SEQ ID NO: 44464 - DNA, 358 bp, Glycine max
  Clone ID: LIB3139-074-P1-N1-G7
gacagagggcaattttagagcaagtgttgatttgcagcgcactcatcgtattaaaggaatgattaaaatggtggccacagttggtattcctgagaatacaggtatagcattggcctgtgctatgaatagttcttttagggggcgcgccagttctgatatttacaccatctgctctcaagactgtgaattatggaatcctgcttgcacaaaagcaatgactatgtcatttaatccaaacccgtgttctgatgcatggagtttggaatttctgaagcgtaccggatttcattgtgatatcatttgtgtcactggatggactgccaccccaatgcaggatgttcaggttacaattgattgg

SEQ ID NO: 44465 - DNA, 281 bp, Glycine max
  Clone ID: LIB3139-074-P1-N1-G8
ggaaatttggctgatgataccatcaattttgaggcttttccgcacaagctggtgcagtttggagagattcaggaaaaagttgtattgaaattttcacaagaggaatttcttacagcttggtcaactcaggtgcgtcctgcaacaactctgttggctgatgggtgtccatatttgtatgctatggtgcatgatagttcagtgtctacaataccaggtgattttgtcattgttgtcaagttgacaaccataaacaatatgtgtgcatatggtctcaatcctgg

SEQ ID NO: 44466 - DNA, 353 bp, Glycine max
  Clone ID: LIB3139-074-P1-N1-G9
gagaatgcctctttctatagggggaggagctggtgcaaagaatgctattctcatgaatatgccaaatgctgttctttcaatgtggagatattttgttggagatctcgtctttgaagtttctaagatgacttctccctacattaaatgtacagtctctttcttcatagcatttggaaatttggctgatgacaccatcaattttgaggcttttccccacaagctggtgcagtttggagagattcaggaaaaagttgtattgaaattttcacaagaggaatttcttacagcttggtcaactcatgtgcgtcctgcatcaactctgttggctgatgggtgtccatatttgtatgcta

SEQ ID NO: 44467 - DNA, 371 bp, Glycine max
  Clone ID: LIB3139-074-P1-N1-H1
cacattccgaaccaagtttgtgttgtaagttcttgcattatcaagtgaagttgcagttccaccagaagaaggccatccactctcagacacaactatgttcagtgaccatcctccagatttctccaacgcagcataaacagcatcaaccatagcatcaaaaaggcctggtagaccccttgaaacttatgtgtttgccatgtttgaagaaaatcagaagcagccagagtatgagaagttttgggggctcttccttccaaataaacagctcaaatactctattaatttgaattagttattagaagtatatatagtttataagaaataagggctatgatttcaagtgaagcttccataattgacctagaagaggc

SEQ ID NO: 44468 - DNA, 364 bp, Glycine max
  Clone ID: LIB3139-074-P1-N1-H11
ggaagttgctggcggcgcacgtgattcagattttggttattgttgggtgggtgagtgcgaccatgggacccttgttttgggggttgaataaattgaaattgttgaggatttcttccgaggatgagcttgcggggatggatcttacccgtcatggaggatttgcttatgcttatgaggatgatgagtcgcacaagcatgggattcagctgaggaaggttgggcccaacgcgtcgtccacacccaccactgatgaatgattacgatcacgattaattcggccccgacagtattatcttcaattgaaattacgtgtgacttagaagaagaaaaaaagatgatgatgattttgtttgtaatttatttt

SEQ ID NO: 44469 - DNA, 335 bp, Glycine max
  Clone ID: LIB3139-074-P1-N1-H12
ggagactttagcctggcgcagtaattttttacaatccttcaaaaattttgtttctttgtgtgtgtatggtgatgataacttaattagtgttcatgaatatgtcaagccttactttagaggatctaaattgaaaagctttctagctggtcataatatcaccattactgatggtattgacaaaactagtgcaactttgcaatttagaaagttagcagattgtgattttctcaagagaaactttaagcagatgtctaatgttttgtgggtggctcctgaagacaaggcgagtttatggtcacaacttcattatgtttcgtgttataatcttgaaatgc

SEQ ID NO: 44470 - DNA, 369 bp, Glycine max
  Clone ID: LIB3139-074-P1-N1-H2
gcaacatagttggtgcaatgcttttggttgatacttatcataccaatcctgaaaatgcagttcgtagtatttttgttgcgcctttcagaggcggaaggcccattcgggtggttacatttccgaataccattgtgcagattgaaccagacatgaattcaaggtttcagcttttgagtaccactaccaatggtgattttgttcaagggaaagatctcgcaatggttaaagttaatgtagcatgtgctgctgttggcttgacatcaagttacactccaactccattgttggaatctggtttgcaaaaagacagagggttaattgtggagtattttggaaagatgtcttacgttgctcataacgttaatcagc

SEQ ID NO: 44471 - DNA, 366 bp, Glycine max
  unsure at all n locations
  Clone ID: LIB3139-074-P1-N1-H3
gttctagaagcatttgacgtggatgaggaagagccttccatggatcctgcctggccttacttgcaaattgtgtatgaactgcttctaaggttcgtcatgtcaaccgagactgatgcgaagttggcaaaaaggtatattgatcattcatttgttctgagactgttagacctttttgattcagaggatcccagggaacgggattacttgaagacagttcttcatcgtgtttatgggaaatttatggtgcaccgaccattcatcagaaaagcaatcaacaatatattctaccgcttcatttttgaaactgagaaacacaatgggattgcagaactcttggaaantttgggaagtataatcaatggattt

SEQ ID NO: 44472 - DNA, 403 bp, Glycine max
  Clone ID: LIB3139-074-P1-N1-H6
actataccatagcagagccgtgacatgcactgctcccttacctaagctcgcagttcggagtagtggaaaaaatggcgtccacagttggtattcacgagaatacaggtatagcattggcctgtgctatgaatagttcttttagggggcgcgccagttctgatatttacaccatctgctctcaagactgtgaattatggaatcctgcttgcacaaaagcaatgactatgtcatttaatccaaacccgtgttctgatgcatggagtttggaatttctgaagcgtacctgatttcattgtgatatcatttgtgtcactggatggactgccaccccaatgcaggatgttcaggttacaattgattggtttatttcctctcaagaatgtgttcccaggacctattgtgt

SEQ ID NO: 44473 - DNA, 143 bp, Glycine max
  Clone ID: LIB3139-074-P1-N1-H7
aacacacaagaattctttgatggaaattttccagtggattcttggttaccaatttttgtgaattggctttatcctgtaagtcaattaccttcagaagctgtcgttgtaaatgttacatgtggtagtggacgtggtgtttctcc

SEQ ID NO: 44474 - DNA, 197 bp, Glycine max
  Clone ID: LIB3139-074-P1-N1-H8
cggctcgagcatgtacctattggtgttgccggtcagatcattccttggaacttccctcttgtgatgtttgcctggaaggttggaccggcattggcctgtggcaacaccattgttctcaaaacagctgatcagacaccgttatctgctttatatgcagcaaatctatttcatgaggctggacttcctgctggtgtttt

SEQ ID NO: 44475 - DNA, 365 bp, Glycine max
  Clone ID: LIB3139-074-P1-N1-H9
ttctaaaacagcgtttgcttttgtgtttggtcttagacgcagcacgcccccaccactgtttcaaccctcaaattgtgtcttcttcgctttctggttttgattaggttttgttccatttgaaacaatattcatcgatccatcgccaaacatgccttctagtcacttgcttcttgaggaacctattaggatggtctccatccttgaaccatccaagcctagttttttctctgcaatgacaaagattgttggtaccctggggcctaaatctagatccgtcgaaactatttctggttgtctcaaggctggcatgtctgtggctcgttttgacttttcatggcatgaccctgagtaccaccaggagactt

SEQ ID NO: 44476 - DNA, 367 bp, Glycine max
  unsure at all n locations
  Clone ID: LIB3139-075-P1-N1-A1
ggagcacttatcctaaccattcaagttgtgaaaccacgtcgcaagaaaattcacaagggatggatcccaacctnaaagaggtttctcagctcttcgatcgcttcaaggcttcgtttctccggaacgacttcgataactgttccaatctcctttctcagctaaaggtgttacttacaggtttcagaagcctgccaccgttgtttgcagatacacctaatgcagttcatgaattaacaattgcaagggatatatatgagcatgctgttgtccttagtgtgaaaattgaggatcaagatgctttctaaagggatttcttccagttgaagccttattttacatatgcctgcattcgttttccaccattttc

SEQ ID NO: 44477 - DNA, 285 bp, Glycine max
  unsure at all n locations
  Clone ID: LIB3139-075-P1-N1-A4
tgtgaatttagaaccgttctgctatggctgctctgcgatacttagaatcgctgcggagttcgcagcctnatctctccgattggtacaattcgctggcggatctgtaccagaagaagctctggcaccagctcactctcaagctcgagcagtttgtggctctcgccatcttccatgctggtgatgctttaatacaattatatcacaatttcatcacagactttgagacgaaaatcaaccttctcaagcttgcacattttgctgttatagatgctcggcaggattctt

SEQ ID NO: 44478 - DNA, 277 bp, Glycine max
  unsure at all n locations
  Clone ID: LIB3139-075-P1-N1-A6
agagcangaccgcgcaagcacgccttccttaacctcggattccgcttcaagccctaatttcccctgcttaacttttctccctttggagtttattcttgaggtccgccgaaagtttttaaattttgtgaggttcattttgaagaaaagggccaagcttagttgccaagttggaatcaacccatactccatggaatggactggtttggccaataagttactgagtaagggcaacgatattctgtgttgcgattatgcttgttttgatggttttgattac

SEQ ID NO: 44479 - DNA, 234 bp, Glycine max
  unsure at all n locations
  Clone ID: LIB3139-075-P1-N1-B11
agtaggagtggtatggcaagaatgcgcgcctgggcgaggaggtaaacctcgtggtggaggccnnagacaggaggaaggagtccaaggacttggaagagaaggccgagatgaagaagatgtatggcctcatcgagacctacaagttgaacggccaattcagatggatctcctcttagatgaaccgtgtgaggaactgatagctctaccttgtcatctgtgacacaaggtagtgcc

SEQ ID NO: 44480 - DNA, 349 bp, Glycine max
  unsure at all n locations
  Clone ID: LIB3139-075-P1-N1-B2
ggtgcgtttcgcaacgtctctgnaggctgatgggtagccatattggtatgctatggagcatgatagttcanngtctacaataccaggtgattttgtcattggtgttaagttgacaaccataaacaatatgtgtgcatatgggctcaatcctggtatttcaggttctcgtcttttgggcaccattcctcagtccatttcacagcaaactgtttggaatcaaatggcaacagtgagaacaccattgaattttgattctagcaagcatagcttttgtcaattttctattgaccttctcagtggaggaattttagtggacaaaactggagattggttcacacttattcaaaat

SEQ ID NO: 44481 - DNA, 345 bp, Glycine max
  Clone ID: LIB3139-075-P1-N1-B4
ctcgagcttaatcggctcgagcggctcgaggtagcaggagctgagctagtttccggggccgcttcacccaccgtagcaaccatgatcattcccgagaagaaccgtaaagagatctgcaaatacctcttccaagagggagtttgctttgcgaagaaggacttcaatctggcaaagcacccagagattgatgtgccgaatctgcaggtgataaagctgatgcagagcttcaaatccagagagtatgtgagggagacatttgcgtggatgcactattactggttccccaccaacgattgaattgagttcctcaagacataccttaacccttctttccaaattgtccct

SEQ ID NO: 44482 - DNA, 375 bp, Glycine max
  Clone ID: LIB3139-075-P1-N1-B5
caaaacttttgcaactttgcaatttagaaagttagcggattgtgaggttctcaagagaaactttaagcagatgtctaatgttttatgggtggctcctgaggacaaggcgagtttatggtcacaacttcattatgtttcgtgcaataatctggaaatgcaagaagcttatcttgtcaatctcgtaaatgtgttacgagaattgtatttgcacagtccagaggaagctcgccaattgagaaggaaagctctctctcgtattgaatggctgcaaaaagctgatgtgccttccatagcacagattgaagagttccattcgatgcagtggatgatgaatgctcctgattcaaatgataatattgttctactgttgtgcat

SEQ ID NO: 44483 - DNA, 400 bp, Glycine max
  unsure at all n locations
  Clone ID: LIB3139-075-P1-N1-B6
cgccgtaacctcgattccgcctcaagatttttgttgcccctttaaaaggcggaaggcccattggggtggtgacatttccaaagaccatggggcanattgaaccagacatgaattcaaggtttcagcttttgagtaccactaccaatggtgattttgttcaagggaaagatctcgcaatggttaaagttaatgtagcatgtgctgctgttggcttgacatcaagttacactccaactccattgttggaatctggtttgcaaaaagacagagggttaattgtggagtattttggaaggatgtcttacagtgctcataacgtttatcagccccaagagaaagatttgttggagggaaatttttcctttgatatttaatctcgctctagattggaaaaagtttc

SEQ ID NO: 44484 - DNA, 353 bp, Glycine max
  Clone ID: LIB3139-075-P1-N1-B7
cgtacccttcctcgggcaccgccccctggccggccagcatcgcctacgggtacccgagcatccccgtcccggccggcgtcgcgaccatcaccttcaacaacgacgacatcgccgcgcagcaaagcaccggcagccggggccagggcaagttctacacgctgtacggcagcgggcacagcgcgggcgcgatgacggcgtgggcgtggggcgtgtcgcgcatcatcgacgcgctcgagagcaccgccgcggcgcgcatcgacgccacgcgcgtcggcgtaacggggtgctcgcgcaacggcaagggcgccttcgtggcgggcgcgctggacggtcgcgtcgcgctgacgatcccg

SEQ ID NO: 44485 - DNA, 287 bp, Glycine max
  unsure at all n locations
  Clone ID: LIB3139-075-P1-N1-C1
tgctgattctctcatttaggctttcgaaggatggagagctgatagtaacactgtcatggtaatttggggtcatanaactgtgtatcagaggcagcaaatcagaagagtttatgaggaaatttaccaggaggatcttgtgaagcgcctagagtctgagatcaaaggagactttgagaaaaccgtgtaccgatagatactggaacctgcatatcgtgatgctgttttggccaatgttgccatcaatagtggcaaaaactacaatgtcattgtggaaattgccactatcc

SEQ ID NO: 44486 - DNA, 361 bp, Glycine max
  Clone ID: LIB3139-075-P1-N1-C12
gtgagattcacttctggtcatcattttaccaacatagaggttttgagttgttggtagttgaatataaatggacgccaaacggttcatccagctggttgaggagaagaagaagaagattatggagagaaaggaagctcctctgaaatgggagcagaagctggaagctgctgctgaaactaaagagaggaagctgaaggctacaaagcataaaaaaagatctggctctgatagtgacagtgattatgacagtgattatgagagttgaaagacaagtaaaagatctcacaagaagcacagaaagcattctcactttgactctggtgaccatgagaaaaggaaagaaaaaagttccaaacggaaa

SEQ ID NO: 44487 - DNA, 379 bp, Glycine max
  unsure at all n locations
  Clone ID: LIB3139-075-P1-N1-C3
atccgcctcaagatttcctattcctagtccaanccaccacctccatccgaatggagtaaaaatacaatcgattctgacaccacattgccttattttaaatcccaccaccaacaacaaagtcataagctgcgacagctaattccagcagcaacatcaacaacagaaaaagaagaggtagaactaggaattcctcttgttgttgttgttgttgtccttgtccctctcttcatctttgatgggttccaaggtctcgaaacaagttgagagacgaaaggcaatccattcagaggaaaaaactctgtctgatctcataaactctatggaagactgccccggctcaaattattatcccctatacagaaaaaattggatgtttgaa

SEQ ID NO: 44488 - DNA, 373 bp, Glycine max
  Clone ID: LIB3139-075-P1-N1-C4
ctcgagcctttttgtttattttctatcgaccttctcggtggaggaattttagtggacaaaactggagattggatcacacttatacaaaattctccaattagtaacttgttgagagttgctgcttggaagaaaggctgtttaatggtcaagattgtgatgtctgggaatgcagcagtcaaaaggagtgattgggcctcattggtacaagtgtttttaacaaacagcaacagtacagagcattttgatgcatgtaagtggacaaaatcagaaccacattcctgggaattgatcttcccaatagaggtatgtggtcctaataatggttttgaaatgtggagttctgagtgggcaaatcaaacttcatggcatttga

SEQ ID NO: 44489 - DNA, 314 bp, Glycine max
  Clone ID: LIB3139-075-P1-N1-C6
atcccttctggatttccgttcacaggttttggcaatagcattttgaatgagatgctcattagatatagctatgaaaaattactgcgccaggctaaagctccaagtatgtttttacaatcccttcaaaaattttgtttctttgtgtgtgtatggtgatgataacttaattagtgttcatgaatatgtcaagccttactttagtggttctaaattgaaaagctttctagctagtcataacatcaccattactgatggtattgacaaaactagtgcaactttgcaatttagaaagttagcagattgtgattttctca

SEQ ID NO: 44490 - DNA, 364 bp, Glycine max
  Clone ID: LIB3139-075-P1-N1-C7
aactactttatgggtgccgacgaatactgggactaggtgttctagctgggcctcatcggagactcccgcgtcggcaagtccaacctcttgtcccgattcacccgaaacgagttcagcttggagaccaaatccaccatcggcgtcgaattcgccactcgaagtgtccccgttgatagcaagctcgtcaaggcacaaatctgggacactgcaggccaagaaaggttacattttttttttccatcaatcgttatctttcgagatatgcatgtgtgattgagtgatctttttgttggatgtgacgttcttgctttgatcttgatgatcatgaagtcactgatcaagatacagatgatccatttattta

SEQ ID NO: 44491 - DNA, 334 bp, Glycine max
  unsure at all n locations
  Clone ID: LIB3139-075-P1-N1-C8
caacttctttctttgttccgttctactggcccttccgaacaacaacaagaagatgcgttctgcanaagcttcctccgaaaccatttgtgtcaccggcgctggtggcttcatcgcctcttggatggtcaaactcctcttggaaaaaggctacactgtccgaggaaccctcagaaatccagatgatcccaagaacgggcacttgaaggagtttgaaggagcctccgagaggttaactctgcataaggttgacctccttcatcttgactccgttagatcagttattaacggttgccatggtgtctttcacactgcttcttccgtcaccgataacccc

SEQ ID NO: 44492 - DNA, 373 bp, Glycine max
  Clone ID: LIB3139-075-P1-N1-D11
tcttccgcttgaatatctcaaagtttagatctaagaacgaacactattactactcagaggcacacgcagagcccagaaaagaagctctttctctctaacaacaatgcctcccactgacggagacttggatcttaggccaccttctcaatcttccttcacagccggcgactacacgttcgccgatgcggacaatttggagcattgcgctaagtatctcaaccaatcgctcgtcacgtttggtttcccggcttcgctcgatctcttcgcaaatgaccccgtttcaattgcgaggacttgcaattgcatttacgtcttgctgcagcagagacagcgcgacgtggagtttagagagtctgctaatgatcaaagacaa

SEQ ID NO: 44493 - DNA, 355 bp, Glycine max
  unsure at all n locations
  Clone ID: LIB3139-075-P1-N1-D2
gcaaatttttattttttcaagagaaactttaagcaggggtctagtgttttgtgggtggctcctgaggacaaggcgagtttatggtcacaacttcattatgtttcgtgtaataatctggaaatgcaagaagcttatcttgtcaatctcgtaaatgtgttacgagaattgtatttgcacagtccagaggaagctcgccaattgagaaggaaagctctctctcgtattgaatggctgcaaaaagctgatgtgcctaccatagcacanattgaagagtttcattcgatgcanaagatgatgaatgctcctgattcaaatgataatattgatctactgttgagcattgatttgttgggtt

SEQ ID NO: 44494 - DNA, 290 bp, Glycine max
  unsure at all n locations
  Clone ID: LIB3139-075-P1-N1-D3
agcccgnaatccggctcaagctctccttttttgttttgacctactcattgaacagagcgttttgtgcctcttttatgacaccagattccanggttccttctttcttgaatcctaacgtgttgaacagcaccgggccttaaaacatgattgcgtatatgcctgtgaatagctgagtgaataaaatgagaactatgtcattggttatatctacagagtcggcttatacatcatattgtaatgccaagctttacacactaaatggaactgttgttacaccatattttgttctc

SEQ ID NO: 44495 - DNA, 300 bp, Glycine max
  unsure at all n locations
  Clone ID: LIB3139-075-P1-N1-D4
gaaattcttcacccattttcttcgnagccaaacactgtgaaatagtcagttatgtcgtggcaagagtatcanaatcatcacctactgtgtgaaatcgaaagtaaccacctcactcacacccctatcatctgccaagacggaagcctttgcgctcagaacaccaacttccctcaaatcaaacctgaagaaataactgccatcaataatgactttaatgagcctagatcacttgctccaactggattgtctatcggaggcaccaaatacatagtcatccaaggtgaacctattactgtcatt

SEQ ID NO: 44496 - DNA, 327 bp, Glycine max
  Clone ID: LIB3139-075-P1-N1-D5
gatttttccgtttgctccccaaggaaagaagcagagggtgtcttttgaaatcagctagagaagatgccagggtgagccattggccttcatgactgctctacagctggtgctgagaaaatctctggcctatggtggtcttgcacaaggccttcatgaaggtgctaaggtgatcgagaagcatgctgcacagctctgcgttctagcagaagtttgtgaccaacctgatattgtgaaactggtgaaggctctttgtgcagagcacattgttagcctttgacagttcaagtgcaaagacccttggagaatgggctggtttgtgtaagattg

SEQ ID NO: 44497 - DNA, 342 bp, Glycine max
  Clone ID: LIB3139-075-P1-N1-D8
cttcatttatgtcatggagactactaagcttataagaaactcagaaaagaaattagactacagaaggtgggggcataaatccaaagaccaagttgctaatttactcctctgaatctgtccagtactataaataaatttgctcttttcgtacacggaattaagtctttgttgtagtgcaagttgcgtcagctaaataatgtgccactcaaatattttttcttttggaaatgttgcccgttgattattatttgtattgtgcaattgaaaagatagagagaaagtggcccggagttgaaaacttgatatcattacaatgtgtaccaaaaatgtgaaagttggact

SEQ ID NO: 44498 - DNA, 373 bp, Glycine max
  Clone ID: LIB3139-075-P1-N1-E10
cttggttttttattatacaatagcaactcaatttaagaaatttctaccggattacatgaggtggcatctgtataccttgttgatctacattctcccatcttttctcactgctgaaattaaatataagcggaatctgagtaatattcatatttccggcttattttacgacggcagatacaaattctagactaaacacgagaaaaatcttgctttgacagaagaggaaaagatggaagtgattagaaatagaggcattcctgctgatgttcttgcaaagcgagctcatgaatttgaaaaacatgttgctcatgaaagcctcaaggatcagattcctgccgttgacaagttgtattctactaaggttaataaattt

SEQ ID NO: 44499 - DNA, 357 bp, Glycine max
  Clone ID: LIB3139-075-P1-N1-E11
tctgagattccagaacctgtaaaaaagaacgcctcaggtggatcccttgatagaggtgggtgttattatatagtatttacacttttaatatagcttttagtttcataagtaactacttcaatttgtcaatttgagaagcactatctagtctatggactcctttcaaatgtacatggatggatttctagttgacacttctttatatcttgctatgtaacatgaatatgtttacaaaccactttctaaatatgctttctagagatgatggtgctgcaactaatttgtttttggatggcatatattttcctttacacatatgactgatgcaattctatggtgtacagacattgctcttgc

SEQ ID NO: 44500 - DNA, 319 bp, Glycine max
  Clone ID: LIB3139-075-P1-N1-E5
gaaatagcctgcactaggtcctctgaacaattgttggctgcgaggaaggcttaccatgttctttataagaagtctctggaggaggatgttgctcatcacacaacaggagacttccgtaagctcatactacctctggttagttcttatcgatatgaaggagatgaggtcaacttgaccctggcaaaaactgaggcaaaattgctgcatgagaagatttcaaacaaggcttataatgatgacgacttcatcaggattttggccacaaggagcagagcacagattaatgctactttgaatcactacatagatgcatttggac

SEQ ID NO: 44501 - DNA, 360 bp, Glycine max
  unsure at all n locations
  Clone ID: LIB3139-075-P1-N1-E7
attttagagcaagtgttgatttgcagcggactcatgggattaaaggaatgattaaaggggtngccacagttggtattcctgagaatacaggcatagcattggcctgtgctatgaatagttcttttagggggcgtgccagttctgatatttacaccatctgctctcaagactgtgaattatggaatcctgcttgcacaaaagcaatgaccatgtcatttaatccaaacccgtgttctgatgcatggagtttggaatttctgaagcgtaccggatttcattgtgatatcatttgtgtcactggatggactgctaccccaatgcaagatgttcaggttacaattgattggtttatttcctctc

SEQ ID NO: 44502 - DNA, 362 bp, Glycine max
  Clone ID: LIB3139-075-P1-N1-E8
tctagcatataagcaatgactatgtcatggaatccggacccgtgttctgatgcatggagtttggaatttctgaagcgtaccggatttcattgtgatatcatttgtgtcactggatggactgccaccccaatgcaggatgttcaggttacaattgattggtttatttcctctcaggaatgtgttcccaggacctattgtgttttaaatccacaaaatccttttgtgttaaataggtggatgggaaaactgactttcccccagggcacttcccgaagtgttaagagaatgcctctttctatagggggaggagctggtgcaaagaatgctattctcatgaatatgccaaatgctgttctttcaat

SEQ ID NO: 44503 - DNA, 359 bp, Glycine max
  Clone ID: LIB3139-075-P1-N1-E9
ctttttcttctctctcaacaacttcaccgtcttcctgctcgatcatgtgtcacttcaagggcaagtaccatgatgagcttatcgccaatgctgcgtacattggcactcctggaaagggtattcttgctgctgatgagtcaacagggacaattggcaagcgtttggccagcatcagtgtagagaacattgaatccaacaggcgagctcttagggagctgcttttcactgctcctggtgttcttcaatatctcaagggtgtcatcctctttgaggaaaccctctaccagagcacagctgcaggcaagccctttgtgaatgtcttgaaggaagctggtgtgcttcctggcatcaaggttgac

SEQ ID NO: 44504 - DNA, 352 bp, Glycine max
  Clone ID: LIB3139-075-P1-N1-F12
ctccgccttagaacgctcgccgctacgaccaatacggtcgccgtaaacaccgccggagccgatgctgctgctgcttctgctggctcatcggaatcctcttcattctcgtcgtgctcctcgccatcgccgccggcgtcctctacctcgttttccgtcccgaggcgccgaaatactccatcgaaaacatcaccgtcagaggaattaacctcacctcgccgtcgtccgtggcggcgatctcgccggagttcaacgtcaccgtcaaggccgataaccctaacgacaagatcgggatccgttacttgaaggatagcttcgccgaggtgttttataaggacgcgaggctgtgtaacgg

SEQ ID NO: 44505 - DNA, 341 bp, Glycine max
  Clone ID: LIB3139-075-P1-N1-F2
ccttaaacccggaaccgaaaccatgggttccttgatttcaagaattcctcaattccttcctacttctttgtgtacgatttcttaagggaaagaaaatcactctctgtgctggtcacagacttcgtgaatcattttcttttccactcctagtttatttgctgaacactctcctatttgatataggacttcgtgtcagatttaaactttttctgtttctttctcagttctctgtttaatttcaagttcaagctggtgaaattttggattagtgctcccactctcctatctggtataggacttcgtgggtagacttttctacttctctcctttctttcactctc

SEQ ID NO: 44506 - DNA, 379 bp, Glycine max
  Clone ID: LIB3139-075-P1-N1-F4
aagcattgtattcaaatacttaagttcattcctagaggttagctgtcttcctcaaaaccaaacatgtctaacacatgcggcaactgcgactgcgctgacaagactagctgcaccaagggaaacagctatggtgttattgtagagactgagaagagttacatcgagactgttgtcatggatgttccagcagctgagcatgatgggaagtgcaagtgtggcactaactgcacttgcacggactgcacctgtggccattaaggaatatgtatgaaaatgtaattgccatgtgtttggcaatacaaatatccaaataatgtaatcttcgtatgaataaatgtgtgtgctgttatcctacttcaagtctgtgtagtcatgcagt

SEQ ID NO: 44507 - DNA, 363 bp, Glycine max
  unsure at all n locations
  Clone ID: LIB3139-075-P1-N1-F6
cggaatcttctgcattatctggaattcgagttttctgtcgctagttcgtttgtttaattcaatagaggaaattaggcatgaccctcttgttgagtatgctctgcctatctgaaaatttccacacctcttttaattgtcgtaatgatgtgtgaagtgtgtgttatttttaaaaaaaaaaaaaaaaaaaaaaaaaaaataataaaataaataaaaaataataaaaaaaaaaaaaaatattaataaaaattaaaatatattttaaaatatataataaatgatattatntttttttattttttattattaatttatatttttttatttttttttttgggggggcccctcttttggtgtcttttcccc

SEQ ID NO: 44508 - DNA, 364 bp, Glycine max
  Clone ID: LIB3139-075-P1-N1-F7
attgtatttgcacagtccagaggaagctcgccaatggagaaggaaagcgctctctcgtattgaatggctgcaaaaagctgatgtgcctaccatagcacagattgaagagttccattcgatgcagaggatgatgaatgctcctgattcaaatgataatattgatttactgttgagcattgatttgttgggtttacaaggagcaggtaaagcttttccaaacaaaattgtttttgatgataagcttgtgttggctaacacacaagaattctttgatggaaattttccagtggattcttggttaccaatttttgtgaattgtctttatcctgtaagtcaattaccttcagaagctgtcgttgtaaat

SEQ ID NO: 44509 - DNA, 350 bp, Glycine max
  Clone ID: LIB3139-075-P1-N1-F9
gatctattttcaaattttttgacagaggggaattttagagcaagtgttgatttgcagcgcactcatcgtattagaggaatgattaaaatggtggccacagttggtattcctgagaatacaggtatatcattggcctgtgctatgaatagttcttttagggggcgcgccagttctgatatttacaccatctgctctcaagactgtgaattgtggaatcctgcttgcacaaaagcaatgactatgtcatttaatccaaacccgtgttctgatgcatggagtttggaatttctgaagcgtactggatttcattgcgatatcatttgtgtcactggatggactgccaccccaat

SEQ ID NO: 44510 - DNA, 280 bp, Glycine max
  unsure at all n locations
  Clone ID: LIB3139-075-P1-N1-G3
ggctccctttaacactttagaaacactccttccaaagagaattgtatcccttcaaggacttgcaaactttccnaatcccccatagtacaagccccccactcattaaccaccattttataatcccccactagagaagcctactgtctacaaaccttcatgtaacaacccaccaatttatattccttcatgtaaataatccaccactatacaagcccccacctagaaaacccccaagtacacacccccaattgaaaaacctccactaatcatacccccaatt

SEQ ID NO: 44511 - DNA, 374 bp, Glycine max
  Clone ID: LIB3139-075-P1-N1-G4
atgactcttccttcattgtcctctgtattcttcttcttcttctctgactctctctgtaacaacacggccatcaacaaccctttcaagccggcctaaaccccattacccaaaatctgttttttttttttattttttttcctgcaacactctttattggatcatcttgtatttcattcctcctttacaatttcctttcaaaaaaaattttaaaaaatattaaaaagtgctcctttttgtgaattttgacccatttggccaccgacagatttcgatcttcttcgtgccaaagttgtaatcttttcgacttttggcgaagtgggtcgatccgatttcgctcgatgattgtgggttgatctgaaaaaggaaaaggaaaa

SEQ ID NO: 44512 - DNA, 360 bp, Glycine max
  unsure at all n locations
  Clone ID: LIB3139-075-P1-N1-G5
ctctattattctgcatgctctgcaaactgagcatgggtgctctggcattttccttgggcttcatgcttatcacattcttttcttcatcatctgaagcgggatccgttggaataaactatggaagggttgcgaacgacctacctacaccagcgaaagtggtggagcttctgaaggcacaaggtctgaaccgtgtgaagctctacgacaccgacgccaccgtcttaaccgcgtttgcaaactcgggaatcaaggtcgtagttgccatgccaaacgagcttcttgccaacgccgccgcggaccagtccttcaccgatgcgtgggttcaagccaacatttncacctactaccccggcacgcaaa

SEQ ID NO: 44513 - DNA, 268 bp, Glycine max
  Clone ID: LIB3139-075-P1-N1-G7
atttggaaaaggagcaaggtgaaatatgaactgtacaaaaaatcgggtcttatcaaaatcgaccgtgttctttactcatcatttgtgttttctcacaattataggtttatcccacatactatttatgaggactgagatcccctatatgtctttattattattctttatcctattcctttcttaatgattatagcaaggccaaaatcaatttgttcttaattactcatttattttatcaatttgtatgataagtttatttattattatt

SEQ ID NO: 44514 - DNA, 337 bp, Glycine max
  Clone ID: LIB3139-075-P1-N1-G9
ttttgatctttgcagaatcatgttcctatgagcattagagcatatgatcaactttcataccaaatcttcacgggaaatttttggccacggaaaattacttttacacatcaaaggttctcttttgtatgcttaatatatgctcatcttactgtaatctagtataattgctcatttttgttattgtcttaaagagatgcattggagaatggaactaatagtaatgagctgtcattctattatttcttagatagctgacatgcagcatattcagttctatttctcctattttgattatcgatatatcattatcacaccgattcttgattctgttattttt

SEQ ID NO: 44515 - DNA, 151 bp, Glycine max
  unsure at all n locations
  Clone ID: LIB3139-075-P1-N1-H12
acctncnaacccaattgtgcgcttgtaaaattgttactttgaggaagcagcttttgaacgtttaatacatatttatattttattttttaaaatattattctattatttattatttattattgtttatttatttatattttttattttttat

SEQ ID NO: 44516 - DNA, 386 bp, Glycine max
  unsure at all n locations
  Clone ID: LIB3139-075-P1-N1-H4
ctctagcttttcagcattacttaagcagcttaaggagatgtgaagatgcagaaagagccaatgatgaantaaaagggaagacgaaagactaaagcaccagctggatgcacttcccccttcttcacataatgctgcacgtaacataaagatctttaccattttattatgatacaaaatagataatgttctgtatcaaatttcagtcagacattggctctgtacatagggttatattatcgatgcactgtatttgtattcaaattccaaatggcgaacatatttgattgctgttagttttcaaggttctgtagattatgtgacaatgcaacagcaatatttggatttgtcccatattcacatgctattttaatttgcttacaatgtgg

SEQ ID NO: 44517 - DNA, 381 bp, Glycine max
  unsure at all n locations
  Clone ID: LIB3139-075-P1-N1-H5
gatctattgtcaaacttttcgacaganggcaatttagaagcaaagagtgatttgcagcgcactcagcatcttanaggaatgattaaaatggtggccacagctggtattcctgagaatacaggtatatcattggcctgtgctatgaatagttcttttagggggcgcgccagttctgatatttacaccatctgctctcaagactgtgaattgtggaatcctgcttgcacaaaagcaatgactatgtcatttaatccaaacccatcttctgatgcatggagtttggaatttcttaaacgtactggatctcattgcgatatcactttgggcactggatggactgccaccccaatgcaagatgtccaagtttcaattgtttggttt

SEQ ID NO: 44518 - DNA, 379 bp, Glycine max
  unsure at all n locations
  Clone ID: LIB3139-075-P1-N1-H6
ctaggcattttttttcttgttagtggccaaaatcagaaccgcatcccagggaattattcttgccaatgggggtttntggncctaataatggttttgaaatgtggagttctgagtgggcaaatcaaacttcatggcatttgagtttccttattgacaatcccaaacagtctacagtttttgatattctcttgggaatctctcaagattttgaaattgctggtaatactcttatgccagctttttctgttccacaggctactgccagatcttctgaaaatgcggaattctctgcatgatctggaattcgtgttttctttcgcttgttccgttgtttaattcaataaaggaaattaggcatgaccctttttgttgagtattc

SEQ ID NO: 44519 - DNA, 367 bp, Glycine max
  Clone ID: LIB3139-075-P1-N1-H7
caagaaattttaaataaagcactgactgggctgctagaatcattagactgtgccactgtggtatccataaatttgtgaaaaaaggttgatttgctagtttagagcaataaggaaacgcaaaggggaagtctaactcaagtttctttggctctaaagtttgactctttcctatgaataataataaaaaaaaaagaagcaataaggatacaattagatctgttgctttgttagtagtttttttatcgatttgatgttgtaaccatgttttcaactatgtttttttcttgctatcctccaattctaattctttcttaagtttattaaattttccttttcctttaattaataatttttattatttttattt

SEQ ID NO: 44520 - DNA, 367 bp, Glycine max
  Clone ID: LIB3139-075-P1-N1-H8
ctcgagttttacagcactacttaagcagagtaaggagatgtgttcgtgcagaaggagccaatgatgaagtaaaagggaagacgaaggactaaagcaccagctggatgcacttcccccttcttcacataatgctgcacgtaacataaagatctttaccattttattatgatacaaaatagataatgttctgtatcaaatttcagtcagacattggctctgtacatagggttatattatcgatgcactgtatttgtattcaaattccaaatggcgaacatatttgattgctgttagttttcaaggttctgtagattatgtgacaatgcagcagcaatatttggatttgttccatatttcacatgctatt

SEQ ID NO: 44521 - DNA, 374 bp, Glycine max
  unsure at all n locations
  Clone ID: LIB3139-076-P1-N1-A1
gcattttgatgcttgtaagtggacaaaatcggaaccacattcctgggaattgatcttcccaatagaggtatgtggtcctaataatggttttgaaatgtggagttctgagtgggcaaatcaaacttcatggcatttgagtttccttattgacaatcccaaacagtctacagtttttgatattctcttgggaatttctcaagattttgaaattgctggtaatactcttatgccagctttttctgttccacaggctactgccagatcttctgaaaatgcggaatcctctgcatgatctggaattntgtgtttctttcgcttgttcgtttgtttaattcaataaaagaaattaggcatgaccctcttgttgagtatgc

SEQ ID NO: 44522 - DNA, 382 bp, Glycine max
  Clone ID: LIB3139-076-P1-N1-A5
ctcgagcttcctaatatgcagcaggacttgccggtcaaaatcaaatggcatttgggatgggttcaccctttccacagagtcagccacctatgtttgctgcacagcagggttttccatccaccgaattgcattcccaaagaaacctgaattttcattctaatactatatctggcgcccgatctcaatttcatccgcgttcaaatgctaatcgtgggagaaaaacatttcatggtgcaggtaggaaagggtggcgaccacccaagtgaaggttattatttattgtgtgctctactgcacactgaactaaatttgttgtgttgggccattttgctaggaatgtactacacatgtaaatttcctgtaagcctcgaattttgaaatg

SEQ ID NO: 44523 - DNA, 374 bp, Glycine max
  unsure at all n locations
  Clone ID: LIB3139-076-P1-N1-A6
ctactcttttgtgcctttctcttctttttttcttctgggagtattcaccatctcttgcaaaaaggaagttccaagattatgagcctccctctagcccaaaacacatgatccccaaaagtgaccttactagcaatcttggtcatactaaatattgccgtaacccctttatggtaccctntgttgagttactcttcacacttgaacatcaataagaatattccatcatcatcttcatcatatgatcaaaggcaagaagaaaacttgccctcaacatatgtggagaagtgtgacattttcagtggggagtgggtgccaaatccaaaggcaccatactacacaaacaagacatgttgggcaattcatgagcaccaaaa

SEQ ID NO: 44524 - DNA, 383 bp, Glycine max
  Clone ID: LIB3139-076-P1-N1-A7
ccaaaaactaattaaactggaagagctgcctctattggaatttgaaatgctagcaactgctacaaataactttcacttggccaatatgcttggcaagggaggttttggtccagtatacaaggggcaattggataacggacaagaaattgctgtaaaaagactttcaaaagcatctggacaaggattggaagaatttatgaatgaagtagtagtgatttctaaacttcaacatcgcaatcttgtaagacttcttggttgttgtatagaacgagacgaacagatgttggtatatgagtttatgccaaataaaagtttggattcgtttctctttgatccactccaaaggaaaatactagattggaaaaaacgcttcaacataattg

SEQ ID NO: 44525 - DNA, 384 bp, Glycine max
  Clone ID: LIB3139-076-P1-N1-A8
cttttcttattccatacctcaacaaaacaaggggcagggacttttccgattcctggaggaagagaagagaaaacctaaatcacagatccatggcggaagaacaccgatgtgaacctcccgaaggtcaccgactctgcgtcaacaactgcggcttcttcggtagcaccgccacgatgaacctctgctccaaatgctacagcgcgatccgtttgaaggagcaagaagaagcgtcgacgaaatccacaatcgaaaccgcgctctcttctgcctgctcggcgaaaccgtcgtcgtccacgtcacctccgccgtcggggggcgatgtgctcatggaatctccaccgccgtctgcggcggaggttgaggttgctgtcacggtcacggtcg

SEQ ID NO: 44526 - DNA, 271 bp, Glycine max
  Clone ID: LIB3139-076-P1-N1-A9
ttttattttctcttgggaatctctcaagattggggaagttgctggtaatactcggatgccagctttttctgttccacaggctactgccagatcttctgaaaatgcggaatcctctgcatgatctggaattcgtgttttctttcgcttgttcgtttgtttaattcaataaaggaaattaggcatgaccctcttgttgagtatgctctgcctatctgaaaatttccacacctcttttaattgtcgtaatgatgtgtgaagtgtgtgttatttt

SEQ ID NO: 44527 - DNA, 386 bp, Glycine max
  Clone ID: LIB3139-076-P1-N1-B1
ctttgtagaggaagttggaaagagaacatgttcttaatggaggcgtgccacctgatgaaattgatgagggccaagaagaagttgaggagcaagttgaatctattgctgaaatgaagacatacgagaatgatgatctgaaagtcactgttgtaacaagtgagatcaaccctgaagacgaaagttatcctagtgagaggaaggaggcagcagtgatccctcaatctgttgtgtctgataaaaggcaaggggtacccataagtaacaagaaatctttcaagaaggttgcaaaacagaggtcttggccaaggccatcaagtaagagagataaaaagaaaggaaagaagcgaggcaagaagtaatggcagctaagcatcttgcgtctttag

SEQ ID NO: 44528 - DNA, 254 bp, Glycine max
  unsure at all n locations
  Clone ID: LIB3139-076-P1-N1-B10
cccatctttgtctacctttgcttgatctcaaaggtggctctcacaaaaacgtggaaaaatttcattcccgtgagattctcctccaccgatgcagattgaatttcaggaattcttgttgtttactatacgnaatcaccctttttcatgtttgtattcattcgatctgtgatgatcataatgtcactcatcgaaaacttgttgtatcatttgattttgttcttcctttccctgaattcccctgttttttactttta

SEQ ID NO: 44529 - DNA, 339 bp, Glycine max
  Clone ID: LIB3139-076-P1-N1-B12
gacacagttgactcaagtctcattggatatgcctggcacctttggagtgagcagagagtaatggagcttgttgatccttcccttggtgattcaattcctaagactaaagcgttgaggttcatacaaatagggatgttatgcgtgcaagattcagcatctcgtagaccaaacatgtcatctgtgttgttgatgctgggaagtgaatcaacagctctacctttgcctaagcaacctttgctcactacttccatgaggatacttgatgatggagaatcttatagcgaaagccttgatgtgtcaaatgatttgacagtttcaaaggtgacaacagggagatag

SEQ ID NO: 44530 - DNA, 122 bp, Glycine max
  Clone ID: LIB3139-076-P1-N1-B2
ctcgagccgaatcggctcgagggaaattaggcatgaccctcttgttgagtatgctctgcctatctgaaaatttccacacctcttttaattgtcgtaatgatgtgtgaagtgtgtgttatttt

SEQ ID NO: 44531 - DNA, 385 bp, Glycine max
  unsure at all n locations
  Clone ID: LIB3139-076-P1-N1-B3
gggatgttcactgagaggtatacaagcttggcatctctacctcttcatggttcacctttcaggtctcttggccttgaagctcattctgcaatgcaccgaagacacgtgccgtcctccgcggcagcactgagggctcctgatatgagagctgctgcaaaatttgagagaaaccaatttggatcactggttttcgtggaagatgatgatgttggattcttttggcctggcagtttcagacaggtagaccaacaaggagctggtgttaatgtaggacatgctcaaagttcaaatgctagtttaattccaatggtgcctnctccaccacaagcttctacatcttctgatctcacattgaagctttaagtttaaggcttaagaatgatga

SEQ ID NO: 44532 - DNA, 376 bp, Glycine max
  unsure at all n locations
  Clone ID: LIB3139-076-P1-N1-B5
gcaggatccccctcacaagttaccgaagatgataagcaccaggcaatgatccctgcacactctgaggaagcaatatccaatgttgtaaccccggttgtttgccgtagtgacagatatgatgcttgtcatgcaccaaatcaaattgtattaccaactgcggaggagtttcaaccattgaactattatgacccaagaaacgagctattggatgataaattattctcccctgtacttgcacatattcaaccagaatttcattatcaagcaaacatcgaatcagatgattggtatgggcttcaatatggtacaaatgagacanacatgtcagactttttgaattcagttgtgaattgggatcaagtatcctttgaggatc

SEQ ID NO: 44533 - DNA, 379 bp, Glycine max
  Clone ID: LIB3139-076-P1-N1-B6
taagcaattaacggactgggacagttttttagtgagcccgtgcttcagttggtctcatgtcacttgtagaaacgggcatgtcatatccctggccttggcttcagttggattttctggaacactttctccctcaattaccaaattgaagtatttgtctagcttggaattacagaacaacaatctttcaggacccttgcctgattacattttcaacttgacagagcttcaatatctaaatcttgctgacaatagttttaatggttctataccagctaattggggtgaactaccgaatctaaagcatcttgatctttcatctaatggtcttactggaagtatcccaatgcaactctttttcagtccattgtttaacttttta

SEQ ID NO: 44534 - DNA, 374 bp, Glycine max
  Clone ID: LIB3139-076-P1-N1-B8
gacaccttaaaaggttcgttcagagacaaaaccccaacgatccaaacggtcattgagcatttcatggtgcgagtcactgagttgaatcggataggaatctgagtttgtgatcgtttgacgcggtcatgggtgctgcgggctccaagctcgagaaggctctcggagaccaattccccgaatgagaacgttactttggcctcgagaatttcggcaacacttgttactgcaacagcgtcttgcaggcactatacttctgtgttccgtttcgcgaacaattactagagtattatggaaataacaaaagcatattgtacggggaagaaaattttttaacttgcttagcggacttattttcacagataagttcccagaag

SEQ ID NO: 44535 - DNA, 355 bp, Glycine max
  Clone ID: LIB3139-076-P1-N1-C1
agcaagcattgaattggattttacttgaggagtagtagtattatggagaacgtgtgtgatgttaatcacttggatgctgatgttcttttgcctcctcggaagcgtcttcttgctggattgaaaaaacagagttcagacggtgatgctgctgcatccccacctatggttgttgcttcttgtgttacaacagtttctgaggttgcttcctcttcctattccagtgagtttgaagccaggcttaagaatttgttgggttctcattctgataaccctaaccttacccctgaggaggttgtggaggcttcaaaagctgcagcagtggctgcatctaaagctgcaaaggctgcaagagctg

SEQ ID NO: 44536 - DNA, 369 bp, Glycine max
  Clone ID: LIB3139-076-P1-N1-C11
ctcttgggaatctctcaagattttgatattctgtggggaatctctcaagatttggaaattcctgttaatactctaatcccacctttttctgttccacaggctactgccaaatcttctgaaaatgcggaatcctctgcatgatctggaattcgcgttttctttcgcttgttcgtttgtttaattcaataaaggaaattaggcttgaccctttggtgaggatgctccggccttcttaaaatttcccacccccttttaaatggctgaaaggtggtggaaatttgggttattttcaaaaataaaaaattaatactttatttcttaaattaattatatttctttctttacttacttgtttttttttttcttttt

SEQ ID NO: 44537 - DNA, 374 bp, Glycine max
  Clone ID: LIB3139-076-P1-N1-C12
cgctttctgattaatttcttcccttgtcttgtgtgtgtcctatctatgcttctctctttctcagtactactactgctctctctgcaactccatgccaatttttcagggctcatgatggtggcctgaactagtgggcaaataaagaccacagtgaaaagagataaccccactagtcataaaagggagagaagagaaaagaaagaaaaaaaaagagaggggctttatgagttatgaattatcatcatcacccgacttgcttttaacttttttttctttgtttgaattttccttcttttttttttttaacgttttgttggtgaaattggatattagggaccagttgtttgggttttagcatagagggtgtttgggct

SEQ ID NO: 44538 - DNA, 382 bp, Glycine max
  Clone ID: LIB3139-076-P1-N1-C2
cttttcagtttaaagcttcagatcacaaccgatccaccattcaccactttctcttcacaagctcaagttactgacaggcaaatctaacaagaaaagtagtctctgaagtcgatccagtgccttgtgaatttggaattggtggtgaatttagatctaaaagccatagcaatgtcttttatcggtacccagcaaaagtgcaaggcttgtgagaaaacggtttatcccgttgatcagctttctgctgatggtactgcttatcacaaagcttgcttcagatgctctcactgcaaaggaacattaaagctgagtaactattcctcaatggaaggtgttctttactgtaagcctcactatgagcagctcttcaggagagtggcttctt

SEQ ID NO: 44539 - DNA, 373 bp, Glycine max
  Clone ID: LIB3139-076-P1-N1-C3
ctctcattcaccttcttctctctccctcactccctgtctttcttaatacaccaccttcccaaccctcttccattctccttctccaactccaacccctgcttcccttttttcattttctcactccccatcttctgagagtgatgggtgtttgctaccgctgttcccacacctcccacatcaccgccatcatcatcaccagcttcttccgccacaagccttagaattatactattcccaccctccctctttcttcaacaacaaccgttgacttcactacagtcacgtggtctttctctgaggatccaaccatggcggctggaactgtcttctgcgctgctgctactgctgcttctaatttgacaacaaccacttt

SEQ ID NO: 44540 - DNA, 351 bp, Glycine max
  Clone ID: LIB3139-076-P1-N1-C5
gtagtgacatggacaaaactccgaaagagaaggagtgtaagacacctccagctacatcacaggagcagtcatcaacaactgccatgccaacaactaatcctgactggtctaactttcagacatattctcctatacctccacacgggttcttggcatcaagtccccaagcccacccatatatgtggggcgtccagcattatatgcctccctatggcactccaccacatccctatgttgcaatgtatccccatggtggcatatatgctcatccatctattcctccgggatcttatcctttcagtccttttgccatggcttctccaaatggtattgcagatgcttcgggaaatg

SEQ ID NO: 44541 - DNA, 306 bp, Glycine max
  Clone ID: LIB3139-076-P1-N1-C6
cggatatccacttcctcttttcctctgcccatgtgcgttcgaatctcctaatttctcttcagcatctgggttctccattttccttcgacttctgcatctgcattccgtagattcagttcttgtcggaaaatggacgttcgccgaagacccattcctacctccggcgatcgccgacatacccaggagctgaagaacaccgtcaccaccgattcgcagactcttctgcctctctacctcaccaacgccctcttcttcgcggtgttcttatgcgtggcctacttcctactccaccgctggcgcgagaag

SEQ ID NO: 44542 - DNA, 377 bp, Glycine max
  Clone ID: LIB3139-076-P1-N1-C7
ctcttttggagatgtttcgacgcttccagtgggtattttttagagttgaaaatgagtggaataagatcacgcggtctggtgttcaactcacagaaattccaagagaggaggagaaattgctaggttccaacattcacgatgtatagagaatctcaagccaaccaaattttgccaatatcttcgtatcagcaacaggtctaattcaatttttaagctaatattagttctaatcccaaaagcatttttcttcacgtgttcctggccaaccaacatgagggagttttcttgcacatgcatggatggatgtctgagacttatagatagttgattcccgtgctgaagctgcctcggctcagtcattccttttttaagttgta

SEQ ID NO: 44543 - DNA, 380 bp, Glycine max
  Clone ID: LIB3139-076-P1-N1-C8
ctctagcctaatcggctcgagtctaaattgaaaagcgttctagctagtcataacatcaccattactgatggtattgacaaaactagtgcaactttgcaatttagaaagttagcagattgtgattttctcaagagaaactttaagcagatgtctaatgttttgtgggtggctcctgaggacaaggcgagtttatggtcacaacttcattatgtttcgtgtaataatctggaaatgcaagaagcttatcttgtcaacctcgtaaatgtgttacgagaattgtatttgcacagtccataggaagctcgccaattgagaaggaaagctttctctcgtattgaatggctgcaaaaagctgatgtgcctaccatagcacagattga

SEQ ID NO: 44544 - DNA, 335 bp, Glycine max
  Clone ID: LIB3139-076-P1-N1-C9
ctctagcctattcggctcgagcttcgttatccggggggttttctccttgaactggaatattcactatggcagatgaggtggttctgctagatttctggccaagtccatttgggatgagggtcaggattgcacttgctgaaaagggtatcaaatatgagtccaaagaagaggacttgcagaacaagagccctttgctcctcaaaatgaacccggttcacaagaaaatcccggttctcatccacaatggcaaacccatttgtgaatctctcgtggctgttcagtacattgaggaggtctggaatgacagaaatcccttgttgccttctgacccttac

SEQ ID NO: 44545 - DNA, 369 bp, Glycine max
  Clone ID: LIB3139-076-P1-N1-D1
gataaacattctttgtggtggtgatgaaaaattgatgcgtgaaaggacgcacctgctgttggcttgttgttcaaggatggcaatttgtaagaaagatgtttggagagttgaatgtggaatcccttctggatttccgctcacagttatttgcaatagcatttttaatgagatgctcattagatatagctatgaaaaattactgcgccaggctaaagctccaagtatgtttttacaatccttcaaaaattttgtttctttgtgtgtgtatggtgatgataacttaattagtgttcatgaatatgtcaagccttactttagtggttctaaaatgaaaagctttctagctagtcataacatcaccattactga

SEQ ID NO: 44546 - DNA, 264 bp, Glycine max
  Clone ID: LIB3139-076-P1-N1-D11
atcttattgctcgtttgcaagggttggattcgggggtgtatagcttagaatcactttggttctatttattttttattttttgacgaaagaggaggtgcagttgtggaagtgtttcaaggttcagtagtgagtggcttgtgatgattttgattatgatttagaagtaaccctaggtatctgtgtatgtttagatatttggtgattgatttgggagtgtgattttgattccctagagttttttgctttgttgtttttgggggggag

SEQ ID NO: 44547 - DNA, 331 bp, Glycine max
  Clone ID: LIB3139-076-P1-N1-D12
ttcaattctgttcatcctttgcttcccaaagaaagagaaaataaaaagcaatgggtagccttgaagcggaaagaacaacagtaggattggcagcaagagacccttcagggattctctccccatacacctacaatctaagaaacacaggccctgatgatgtttacataaaagttcactactgtggaatttgccattctgatctccaccagattaaaaatgatcttggcatgtccaactatcccatggtcccaggacatgaaatggttggtgagggactggaggtgggtcagacgttagcaggttcaaagtgggagaagttgtgggagttgga

SEQ ID NO: 44548 - DNA, 180 bp, Glycine max
  Clone ID: LIB3139-076-P1-N1-D4
ttgagctgttggttacatacatgggggagaaaactgttggggagggtctgacatgcgtcaaaaggacatacacaatggtgtaactgagcgatgcgacctaaattttgaaactcaagatacatacatgtcgacataacttaagttctatggaggctggggaagaccaggtgtattgaggca

SEQ ID NO: 44549 - DNA, 279 bp, Glycine max
  Clone ID: LIB3139-076-P1-N1-D6
cggctctagcttcttctcttgcggctagggttttagcgcagcttcttctagatttaaggaagatggctaaggaaaaggttcacatcagtattgtggtcattggccatgtcgactctgggaaatccactaccactggtcacctgatttacaagcttggaggcattgacaagcgtgttattgagaggtttgagaaggaagctgctgagatgaacaagaggtctttcaagtatgcctgggtgctggacaaacttaaggcttatcgtgaaagaggaatcacca

SEQ ID NO: 44550 - DNA, 376 bp, Glycine max
  Clone ID: LIB3139-076-P1-N1-D7
agataatttttcttcactgtggggctagggacgagtgcttgccccaaaaacacaacatgccaagggccaagtaataacaccaagttcgcagcctcggttaacaacatttcttttgcacttccatcatctgtttccatcatgcaggcctactattcaggccaggccaatggggttttcaagactgattttcctgccacccctttgaaccctttcaattacaccggaacgcctccgaacaacacaatggtcaccaatgacacaaagctggtggtgctcaaattcaacaccagtgtggaggtggtgctgcaggatactagtattcttggtgctgagagtcaccctttgcatcttcatggctacgacttctttattgttg

SEQ ID NO: 44551 - DNA, 380 bp, Glycine max
  Clone ID: LIB3139-076-P1-N1-E1
aacttgccaaggtgatgaactggtgatggctggcagccaatttttcataatgctagttttcttgtagcactggtgggaatcttgccagaggacatgttttttcataatattctgcctcccatccccctcaaattttggtgaatcatataataatctgttaggttcctcttcttaagaattccaattttcatgcatcttattaaatcagaatcaataactaatttgtttcaccggatgcattcatttatttgaagaattgtgcaatattgaagttttgttcttctgttggcccaaatgtgaagtggcattgctttgcatttctcattgagactagtggcttttgtttatcagggcgttctcgatctcgctcaattaccaga

SEQ ID NO: 44552 - DNA, 374 bp, Glycine max
  Clone ID: LIB3139-076-P1-N1-E10
atcgaatccaaataataccaaaaaacaccatgatgcttggggagacccaccgcccaaatccaaccgtacacgtgccaccgtgggcgccggagatcttctcaccatacaccggcaatgccgattactctccgtactccatgcaagaagcacttagtgcacttcagcactacgaatccaccgatgctgagtcagactcggaggttccgtctcgggaaccggaagtcccggtggacgcttactcctgcgaccatttccgcatgttcgagttcaaggttcggagatgcgcacgttgcaggtcgcatgactggaccgactgtccgtacgcccaccccggcgagaaggcacgccgtcgtgatccccggaagtaccattac

SEQ ID NO: 44553 - DNA, 374 bp, Glycine max
  Clone ID: LIB3139-076-P1-N1-E11
aaagaaagagccacataattcacaattcatagatagagaggctatggctggtcttcaaagatctgcagtgtccttcaggaggcagggttcatcaggcttcgtttgggacgataggttcttacaagaggaattgaacaaagtcaaggaagatcacaacaacaacaacaaccacgaccacgacaacgatgacggcggtgaaattaaagagcttcaagttcaaacaacgccgcccctccagagaatccgctccaacggcggagcacgcggctaccgcactggaaaagtttcgccggcgattgagccaccgtctcccaggctctctgcatgtggcttctgcgccgcctttggaaaagcaggggacaacatgcatcgac

SEQ ID NO: 44554 - DNA, 376 bp, Glycine max
  Clone ID: LIB3139-076-P1-N1-E12
tctgaacatagaacaactcttcacacaacacaactttttctagcattgtagcatcatgactggcaaagacatcctccatataatgaaggtgaaagcagggtttgcaccaccagacacagggaaaggaaaaggcaaaatatcaaaacacatcacacatggctttcacttgatgaagggcaaatcggcacatcctatggaagattatttagtttcggaatttaagcaagaaaaggatagagaattaggcttgtttgcaatatttgatggccacttaagccatgatgttgccagctatttgcagaaccaccttttccaaaacatcttgaaagagcatgacttttggactgagacagaaagcgcgttgaagagagcttac

SEQ ID NO: 44555 - DNA, 371 bp, Glycine max
  Clone ID: LIB3139-076-P1-N1-E2
cgggggaagagtatccagcagcaatggtgtacgtcaaggctcagaaatcaaaagcctacttcaagagatatcaagtcaagttcaagagaagaagagagggaaaaaccgattaccgtgccaggattcggttgattaatcaggacatgaacaaatataacactccgaaataccgatttgtggttcgctttagcaacacggacatttgatgcacaaataatatttgctagcattgccggcgatttagtttttgctacagcatattcacatgtgctgccacgatatggttttgaagtttcgacttacaaaattttgcaatagctttattgcacttgttttccgttggcccgaatgtgtcttaaaacactttaaat

SEQ ID NO: 44556 - DNA, 378 bp, Glycine max
  Clone ID: LIB3139-076-P1-N1-E3
caaaaccctgaataaagacacagccattgtttgtttactttccattgattgagcgaaagctttgttttttctgcgatcattttccattgggtggaagaaagtctcaacctttagtcgaaagagcaaggatctgagtgagtgagcgatcatgtgtggtggtgcgattatctccgacttcattccagcgggtcccgccggcggggcgcagcgcgtgaccgccgacatcctgtggccgaatttgaggaagcggttctcgaagtcgctgctggacgatgatttcgaggcagggttcagagaattcgaggatgactcggaaatcgaggatgtcgatgatgaggacgatgaaaaggaggaggagtttgagaagaagaagccctt

SEQ ID NO: 44557 - DNA, 378 bp, Glycine max
  Clone ID: LIB3139-076-P1-N1-E4
aaacacaacaacactctctcttctcgctcttggcttttcgctcttcactcactctcattcattcatttccaccgttcatggatccagtaagcgtgtggggtaacacgcccttggcgacggtggatcccgagatccatgacctcatcgagaaggagaagcgccgtcaatgccgcggaatcgagctcatcgcctccgagaacttcacctccttcgccgtcatcgaggccctcggcagcgctctcacgaacaaatactccgagggcatgccgggcaaccgctactacggcggcaatgaatacatcgaccagatcgaaaacctctgccgctcacgcgcccttcaagccttccacctcgacgcccaatcctggggcgtcaacg

SEQ ID NO: 44558 - DNA, 361 bp, Glycine max
  Clone ID: LIB3139-076-P1-N1-E5
aactgactttccctcagggcacttcccgaagtgttaagagaatgcctctttctatagggggaggagctggtgcaaagaatgctattctcatgaatatgccaaatgctgttctttcaatgtggagatattttgttggagatctcgtctttgaagtttctaagatgacttctccctacattaaatgtacagtctctttcttcatagcatttggaaatttggctgatgacaccatcaattttgaggcttttccccacaagctggtgcagtttggagagattcaggaaaaagttgtgttgaaattttcacaagaggaatttcttacagctcggtcaacttatgtgccttccgttacgactctaat

SEQ ID NO: 44559 - DNA, 374 bp, Glycine max
  Clone ID: LIB3139-076-P1-N1-E6
ctgatttgaggttggagcgtagttagcttctcttttctgccgaaagctgcagaattgtgttgttttctctcctttgggggtcaaacaagcggttctcttcatgatgccaagtgttaaccctgacaaagattccgagccatttgttgagaccgatccaaccggtcgctatggtagatacagtgagttgctcggatgtggtgctgtgaagaaagtgtaccgtgcatttgatcaagaagaaggaatagaggtggcatggaaccaggttaagctgaggaacttctgtgatgaccctgccatgttggataggctttactctgaagtgaggttgctcagaagcttgaccaacaagaacatcattgcactttacaatgtgt

SEQ ID NO: 44560 - DNA, 320 bp, Glycine max
  Clone ID: LIB3139-076-P1-N1-E7
agattctttaatcaatgaagcactcaaatcaggattggcaccaaatgtctcagatgctcatactattaatggccttccagggacagttaccaattgttctacacaggatgtttacaacctgcccgtggagagtggaaagacctaccttttgagaattgtcaatgctgcactcaatgaggagctattcttcaaaattgctggccacaagctcactgtggtagaagttgatgccacatatgttaagccattcaagattgaaacaattgtgatagcccctggccaaaccaccaaatgagcttttaaatgcaaaccaaaaatct

SEQ ID NO: 44561 - DNA, 360 bp, Glycine max
  Clone ID: LIB3139-076-P1-N1-E8
ttatttttttaactatttgagtaaagggtatttaaatataattattaagctgtgtaaatttatctttaatagtatagtatatatttgaggagttatactactattattgacttatagatgagatatttgatattttaaattattttgtatcatatttattatatttgttactgattcaatccaatctgctttagattgaattgaatttaaattttaaaccaatctaattgaatgataaattaagaaaactaaagtaattggactagatgatatttctcttcaaaactgatccaattcagtatgtgagcatccctattatattgctgtttgtttgaaagatgcctttcattttgttatttt

SEQ ID NO: 44562 - DNA, 380 bp, Glycine max
  Clone ID: LIB3139-076-P1-N1-E9
gtgattttctcaagagaaactttaagcagatgtctaatgttttatgggtggctcctgaggacaaggcgagtttatggtcacaacttcattatgtttcgtgcaataatctggaaatgcaagaagcttatcttgtcaatctcgtaaatgtgttacgagaattgtatttgcacagtccagaggaagctcgccaattgagaaggaaagctctctctcgtattgaatggctgcaaaaagctgatgtgcctaccatagcacagattgaagagttccattcgatgcagaggatgatgaatgctcctgattcaaatgataatattgatctactgttgagcattgattttgtgggtttacaaggagcaagtaaagcttttccaaacaag

SEQ ID NO: 44563 - DNA, 277 bp, Glycine max
  Clone ID: LIB3139-076-P1-N1-F11
cgagaattgtatttgcacagtccagaggaagctcgccaattgagaaggaaagctctctctcgtattgaatggctgcaaaaagctgatgtgcctaccatagcacagattgaagagttccattcgatgcagaggatgatgaatgctcctgattcaaatgataatattgatttactgttgagcattgatttgttgggtttacaaggagcaggtaaagcttttccaaacaaaattgtttttgatgataagcttgtgttggctaacacacaaagaattcttt

SEQ ID NO: 44564 - DNA, 366 bp, Glycine max
  Clone ID: LIB3139-076-P1-N1-F12
gacagagggcaattttagagcaagtgttgatttgcagcgcactcatcgtattaaaggaatgattaaaatggtggccacagttggtattcctgagaatacaggtatagcattggcctgtgctatgaatagttcttttagggggcgtgccagttcttgatatttacaccatctgctctcaagactgggaattatggaatcctgcttgcacaaaagcaatgactatgtcatttaatccaaacccgtgttctgatgcatggagtttggaatttctgaagcgtaccagatttcattgtgatatcatttgtgtcactggatggactgccactccaatgcaggatgttcaggttccaattgattggtttattt

SEQ ID NO: 44565 - DNA, 188 bp, Glycine max
  Clone ID: LIB3139-076-P1-N1-F2
aacgggcattgtttccttgcatgctctggaaccaattgtcaccaaaatctcagctgggacacctttcagttcatgggatttgaaattaaatagtggtggaaggaatcgtccattttgcatagcgagaattttgtatcactgtatttttgttaatgtattggattgctttataggcttttttaatttac

SEQ ID NO: 44566 - DNA, 338 bp, Glycine max
  Clone ID: LIB3139-076-P1-N1-F4
gctgaaattaaatataagcggaatttgagtaatattcatattttcggcttattttacgacggcagatacaaattctggactaaacacgagaaaaatcttgctttgacagaagaggaaaagatggaagtgattagaaatagaggcattcctgctgatgttcttgcaaagcgagctcatgaatttgaaaaacatgttgctcatgaaagtcctatggattcaaattcctgctgttgacatgttgtaatctactaaggtttattagttttgcaatagattatgaacctttatacaataggtgtttggttggtgattcttttaatccttatttacttagattt

SEQ ID NO: 44567 - DNA, 144 bp, Glycine max
  Clone ID: LIB3139-076-P1-N1-F6
atggaagttattttaaatagaggcattcctgctgatggtcttgcaaagcgagctcatgaatttgaaaaacatgttgctcatgaaagcctcaaggatcatatttctgctgttgacaagttgtattctactaaagtttataaattt

SEQ ID NO: 44568 - DNA, 157 bp, Glycine max
  Clone ID: LIB3139-076-P1-N1-F9
gttttgttctattggccaattcgaccactctcgggtgagaaagcctccagcctgggcttcaaaaaaccctgcggttacgtcgtttattcttcgaacctaagtcttaatttttcaatttttaattttcacctatctcatttctaatttccaatttttt

SEQ ID NO: 44569 - DNA, 375 bp, Glycine max
  Clone ID: LIB3139-076-P1-N1-G1
aaagcaatgactatgtcatttaatccaaacccgtgttctgatgcatggagtttggaatttctgaagcgtaccggatttcattgtgatatcatttgtgtcactggatggactgccactccaatgcaggatgttcaggttacaattgattggtttatttcctctcaggaatgtgttcccaggacctattgtgtttaaatccacaaaatccttttgtgttaaataggtggatggggaaactgacttttccccagggcactttccgaagtgttaaaagaatgcctctttctatagggggaggagctggtgcaaagaatgctattctcatgaatatgccaaatgctgttctttcaatgtggagatattttgttggagatc

SEQ ID NO: 44570 - DNA, 346 bp, Glycine max
  Clone ID: LIB3139-076-P1-N1-G10
attttctcaagagaaactttaagcagatgtctaatgttttgtgggtggctcctgaagacaaggctagtttatggtcacaacttcattatgtttcgtgttataatctggaaatgcaagaagcttatcttgtcaatctcgtaaatgtgttacgagaactgtatttgcacagtccagacgaagctcgccaattgagaaggaaagctctctctcgtattgaatggctgcaaaaagctgatgtgcctaccatagcacagattgaagagttccattcgatgcagaagatgattaatgctcctgattcaaattgatatattgatctactggtgaacattgatttgttgggttt

SEQ ID NO: 44571 - DNA, 152 bp, Glycine max
  Clone ID: LIB3139-076-P1-N1-G11
cttacccaataaatattcaccccttttcttcataaactctagctattattacaaatgaattccaaaaatggtgctgatatttctcccctatttgcatcaatattatttccctcaaaaaagttattccttacaagataaaaaggtgacatcca

SEQ ID NO: 44572 - DNA, 362 bp, Glycine max
  Clone ID: LIB3139-076-P1-N1-G2
gtaaatgtgttacgagaattgtatttgcacagtccagaggaagctcgccaattgagaaggaaagctctctctcgtattgaatggctgcaaaaagctgatgtgcctaccatagcacagattgaagagttccattcgatgcagaggatgatgaatgctcctgattcaaatgataatattgatttactgttgagcattgatttgttgggtttacaaggagcaggtaaagcttttccaaacaaaattgtttttgatgataagcttgtgttggctaacacacaagaattctttgatggaaattttccagtggattcttggttaccaatttttgtgaattgtctttatcctgtaagtcaattaccttc

SEQ ID NO: 44573 - DNA, 330 bp, Glycine max
  Clone ID: LIB3139-076-P1-N1-G4
ggagcttttgtgcagccggctatatacgaggcttttggtttgacagtggttgaggccatgacttgtgggttgccaacattcgccacatgcaatggtggtcctgctgagatcattgtgcatggcaagtctggcttccacattgacccttaccatggtgaccgtgctgctgatctccttgttgacttctttgagaagtgcaagcttgacccaacccactgggaaacaatctcaaaggctggtctccagcgtattgaagagaagtacacatggcaaatttactcacagaggcttctcactctcactggtgtctatggcttctggaagcatgtg

SEQ ID NO: 44574 - DNA, 270 bp, Glycine max
  Clone ID: LIB3139-076-P1-N1-G5
ttagaattcggcgtcgagttaaattttttttttgtgagtatgtttatgaattacagggggtgggccccttgttgtgcaacggtaccctttcgatacaaaaatttgagattaagtccttgagtgatcattgcattacaataatgtgtgacataaaaggtgtaattcaaggactcttaattttttcaaaaagattggtgccttttgaggaaagagcctcaaatgccctttttgccaaaaagaggttggaaagtttctatggattgaagtttg

SEQ ID NO: 44575 - DNA, 319 bp, Glycine max
  Clone ID: LIB3139-076-P1-N1-G6
cttggctttagcggtgaataattcacaaaacatccttgtgttgttaacaaagttcgatcttgagtaaatacctcatttttattctctgttttacatgtgaaattctaatgtctataaataaagattttcaatattggtaatgtcattccttatttattcttatgtttctgaatttgatcttctaatttattcctaaataggactattggagacatttacataaatattaggagattgtttaatacaaattatcttttcctctctgcacacacagttttgggttgcattcttaaataccctatctttaatctctggttta

SEQ ID NO: 44576 - DNA, 321 bp, Glycine max
  Clone ID: LIB3139-076-P1-N1-G7
caaggttttctgtgaaacctgcaccaagaccaacatggggatggttttcggagagaggacaaccaaggccaacgtggactatgagaagattgtgcgtgacacatgcaggaacattggttttgtctctgatgatgttggtcttgatgctgacaactgcaaggtcctcgtcaacattgagcaacagagtcctgatattgctcaaggtgtgcacggccacctcacaaagaggcctgaagagattggtgctggtgaccaatgttatatgttcgggtttgccactgacgagacttccgagctcatgcccttgagccatgttcttgc

SEQ ID NO: 44577 - DNA, 354 bp, Glycine max
  Clone ID: LIB3139-076-P1-N1-G9
tggattttttgcaagcacaagaaaatcagatacttgtgggtgtggccgtggccgttgtagccattgggcttggtgcagtatatctctattcatccaagaagaccaaaggttgcttggacccagagaactttaaggcattcaaacttgttaagcgtgcacagctgagccataatgttgcaaagttcacatttgcactcccaacacctacatctgttttgggtctttcaattgggcaacacataagtttgcaggggtaaagatgctcaaggtgaagaggttatcaaaccatatactcctactactttggattcccgatgtgggacattttgaactaggtattaaaatgtacccaca

SEQ ID NO: 44578 - DNA, 385 bp, Glycine max
  Clone ID: LIB3139-076-P1-N1-H12
caaatcttctcaggtgtttgatggtcatggaggacctgaagctgcagcttatataaggaaaaacgtgacaaagttcttctttgaggatgtcaatttcccacggacatcagaagttgataacgtatttttggaagaggtagaggattccctcagaaagacatttcttttggctgattcagctttggccgatgattgcagtgtgaatagttcatcaggcaccacggcccttactgctttgatatttggaaagtatgtccatattcatacttcacattcttggttttcctttatttgcacacttttagcagcttactagcttacatttatctactttacgcttgatgtaatatgtgcagtttcatttaatcaaatccagtttctcgtg

SEQ ID NO: 44579 - DNA, 382 bp, Glycine max
  Clone ID: LIB3139-076-P1-N1-H3
tcttctcactgttccgcattgccgttcaaagtggtcttatttgaaaaacacttgggcgttggtgcaaatgtttgcttcattcattttctctggagacaacaagctcactgagaaaacaatttttacttgcagagatttggacatcttggttgtttattatacaatagcaactcaatttagaaaatttctaccgcattacattaggtggcatctgtataccttgttgatttacattctcccatctttttctcactgctgaaattaaatataagcggaatctgagtaatattcatatttccggcttattttacgacggcagatacaaattctggactaaacacgagaaaaatcttgctttgacagaagaggaaaagatggaagt

SEQ ID NO: 44580 - DNA, 208 bp, Glycine max
  Clone ID: LIB3139-076-P1-N1-H4
ggaaaaagttgtgtttaaattttcacaagaagaatttgttacagcttggtcaactcaggtgcgtcccgcaacgactctgttggctgatgggtgcccatatttgtatgctatggtgcatgatagttcagtgtctacaataccaggtgattttgtcattggtgttaagttgacaaccataaacaatatgtgtgcatatgggctcaatcct

SEQ ID NO: 44581 - DNA, 299 bp, Glycine max
  Clone ID: LIB3139-076-P1-N1-H7
ttgttttttaaaatttctcaatctaaaattgcggttggcaagaacacagttggagggaccattctgcgtagtgatctattggcaaattttttgacagagggcaattttagagcaagtgttgatttgcagcgcactcatcgtattaaaggaatgattaaaatggtggccacagctggtattcctgagaatacaggtatagcattggcctgtgctatgaatagttcttttagggggcgcgccagttctgatatttacaccatctgctctcaagactgggaattattgaatcctgcttgcac

SEQ ID NO: 44582 - DNA, 213 bp, Glycine max
  Clone ID: LIB3139-076-P1-N1-H8
taaaaataaaacacaccctctacgtgtccacactctctgatcacaacacacccgcttgattaaatctctatatataaaccccttcaagcccctcactatggccggccaaggaatttttcaatagaatgaaggaaaaggtttggggtccttttgtccccattcaggttaaggaaagagcaagatgaagaagcacataacttatggctttcactt

SEQ ID NO: 44583 - DNA, 374 bp, Glycine max
  Clone ID: LIB3139-076-P1-N1-H9
gatcttaaaatttctcaatctaaaattgcacttgccaagaacacagttggaggaaccattctgcgtagtgatctattggcaaattttttgacagagggcaattttagagcaagtgttgatttgcagcgcactcatcgtattaaaggaatgattaaaatggtggccacagttggtattcctgagaatacaggtatagcattggcctgtgctatgaatagttcttttagggggcgcgccagttctgatatttacaccatctgctctcaagactgtgaattatggaatcctgcttgcacaaaagcaatgactatgtcatttaatccaaacccgtgttctgatgcatggagtttggaatttctgaagcgtaccggatt

SEQ ID NO: 44584 - DNA, 313 bp, Glycine max
  Clone ID: LIB3139-077-P1-N1-A1
cttaattagtgttcatgaatatgtcaagccttactttagtggttctaaattgaaaagctttctagctagtcataacatcaccattactgatggtattgacaaaactagtgcaactttgcaatttagaaagttagcagattgtgattttctcaagagaaactttaagcagatgtctaatgttttgtgggtggctcctgaggacaaggcgagtttatggtcacaacttcattatgtttcgtgtaataatctggaaatgcaagaagcttatcttgtcaacctcgtaaatgtgttacgagaattgtatttgcacagt

SEQ ID NO: 44585 - DNA, 395 bp, Glycine max
  Clone ID: LIB3139-077-P1-N1-A12
ctctctctaatcttcattattttgctaaccatggatttggggtggaaccacacaatacgacggcgtttaagaactgggttcttgatggcgaggcattcgcactgccagagactcttaaaatgtacaacaaactgttggctctcggcatcaagattgtattcttatcagaaagaccactgagtctaggggatgtaacagccaagaacttaaaggaggttggattcaacacatgggagaagttaattctcagggatccatctgagtactctggtaagttatcatttgaatacaaatcagctgagagagagaagctggagaaggagggatacagaatcattggaaacgttggagaccaatggagtgacctcctgggaagcaacaaagggactaggact

SEQ ID NO: 44586 - DNA, 348 bp, Glycine max
  Clone ID: LIB3139-077-P1-N1-A2
cttagactctataattgaacattacttggcttggcagattcaccgtttatgtgttctgttgtgtgtgtatgtagctcacacatacaattgtagttcagtccaattcttcaccatcaaattatgttgtcacctgaaccctgtgatccgaactttctgctgtgtctacccgatgatgtgtttggcatggtgtcacggttcctcttgcccagagatgtttgcaatctcagcctctgctgcaagagtgtctatgctctttcatcctctgaaaaagtgtggttccctcaatgttacatggtgggagtggtgtcccaaaaagaccttgtttgagtggagagagggtgtctcatc

SEQ ID NO: 44587 - DNA, 411 bp, Glycine max
  Clone ID: LIB3139-077-P1-N1-A3
agaagatggtggttgcattgatgcttatatttcttctaatttctacgcaaatggagagcgttgagcccgatgctgcagattgcttggatggttgcactactgcctgtgttcaaagcgactcgaggcttcaagcacggtgtgatcgcaagtgcagcattagatgcggtccagattccacaatcaaggaggacatgggttgagtatgtaaagtcacagcgcaagcaagcagtgtctgcttgaccaacaccgtgtcttttttagtccttgcttatatatgatataacattttaaagtcttcccgatgctgtagtagcatccaaataaacatggatgatagacagctttttaagatcaaatttgttagggtagatgctttgtaacttgaaggaatgtgatatgaatgaatgtttc

SEQ ID NO: 44588 - DNA, 393 bp, Glycine max
  Clone ID: LIB3139-077-P1-N1-A5
gcttggtcaactcaggtgcgtcctacaacaactctgttggctgatgggtgtccatatttgtatgctatggtgcatgatagttcagtgtctacaataccaggtgattttgtaattggtgttaagttgacaaccataaacaatatgtgtgcatatgggctcaatcctggtatttcaggttctcgtcttttgggcaccattcctcagtctatttcacagcaaactgtttggaatcaaatggcaacagtgagaacaccattgaattttgattctagcaagcagagcttttgtcaattttctattgaccttctcggtggaggaattttagtggacaaaactggagattggatcacacttatacaaaattctccaattagtaacttgttgagagttgct

SEQ ID NO: 44589 - DNA, 400 bp, Glycine max
  Clone ID: LIB3139-077-P1-N1-A6
tgaaaaattgatgcgtttattgccacacctgctgttggcttggggggcaagaatggcaatttgtgagaaagatgtttggagagttgaatgtggaatcccttctggatttccgctcacagttatttgtaatagcatttctaatgagatgctcattagatatagctctgaaaaattactgcgccaggctaaagctccaagtatgtttttacaatccttcaaaaattttgtttctttgtgtgtgtatggtgatgataacttaattagtgttcatgaatatgtcaagccttactttagtggttctaaattgaaaagctttctagctggtcataatatcaccattactgatggtattgacaaaactagtgcaactttgcaatttagaaagttagcagattgtgat

SEQ ID NO: 44590 - DNA, 399 bp, Glycine max
  Clone ID: LIB3139-077-P1-N1-A7
tgtgtgtgtatggtgatgataacttaattagtattcacgagtgatgtaaaaggttgtttgggtgtggtaataacacatacaattgtggtttagaccaaatttgtgccattaaattatgttgaaagctagacccttggaaccttactttcagaaactttatacccgatgatttatgtgtcgtgggtggcatccttccgacaaggccaaagatatggtcacaacttcatctttgttcgtgtagtaatatgcaaatgcatgatgcttatattggtaacctcctaaatgtgtcacgagaattgtatttgttcagaacagaggaagctcgtcaattgagaaggaaagctctttctcgtattgaatggctgcaaaaagctgatgtgcctaccatatcacagattt

SEQ ID NO: 44591 - DNA, 405 bp, Glycine max
  Clone ID: LIB3139-077-P1-N1-A8
tattaccaaacatatcttatttgaaagatgggttcgaagatggctatagtgatcgtagccttgttcgccatgctccttttcatctcccctgaggtggcatgcaggaatttcaaagaggagctaggtgaggttgtcaaagagactaatgaggagagtgatgccagattagccggtagtagtggtggtgaccttgataagtcttattgtcctgtccacttgcccttgatggagtatagaaagtggataggaaattgccgttgtggctgttgtcagtggaccacagagccggaagtttgcctatattgctgtccagaaagtcacgttcctgatcttccgagccgaccgcgagcttattaacaattgagacaatgtatacagttctacgtactaaataatatatttcat

SEQ ID NO: 44592 - DNA, 297 bp, Glycine max
  Clone ID: LIB3139-077-P1-N1-A9
atggaatttcttttcttagtcatctcttttaccattctggggggggttgctattgcaggagggagccctatccatccattgctacctgacgcaaattattgggaagctatttggccaaacactcccattcccactgcactgctagagcttttaaaacctctccctgcatgtgttgaaatcgatgaactccctaagcaaattgatgatacacagtacccaaaaacattcttctataaagaagacctttatccttgctaaacattgaatgtacaatttaccaaccgttcctatgcacaa

SEQ ID NO: 44593 - DNA, 402 bp, Glycine max
  Clone ID: LIB3139-077-P1-N1-B1
gttctatctctgccacatggcatgccaagttggtggtggaattgcaggtttatatgaagtcacctttctttacaggcttacccctggtgcttggcccaagagctatagtgttaatgttgctcaaatgagttgtgagtgcgtctaggttttcgttggccacaagggtatgattttgtctttggcaatgtctcctggtggtttctatatggtatctagcgatgaagatggcatcatcatgatgtgggatctctctagtagccgttgtctcacacctttgattgggcacacatcatgtgtctggtccctcgctttcagttatgaaggttctattatagcatttggatctgctgattgcactgtaaaattgtgggatgtaaatacgagcaccaaggtttctagggc

SEQ ID NO: 44594 - DNA, 396 bp, Glycine max
  Clone ID: LIB3139-077-P1-N1-B10
atcacacttatacaaatttctccaattagtaacttgttgagagtggctgcttggaagaaaggttgtttaatggtcaagattgtgatgtctgggaatgcagcagtcaaaaggagtgattgggcctcattggtacaagtgtttttaacaaacagcaacagtacagagcattttgatgcatgtaagtggacaaaatcagaaccacattcctgggaattaatcttcccaatagaggtatgtggtcctaataatggttttgaaatgtggagttctgagtgggcaaatcaaacttcatggcatttgagtttccttattgacaatcccaaacagtctacagtttttgatattctcttgggaatctctcaagattttgaaattgctggtaatactcttatgcca

SEQ ID NO: 44595 - DNA, 390 bp, Glycine max
  Clone ID: LIB3139-077-P1-N1-B11
agcagattgtgattttttcaagagaaactttaagcagatgtctgggtgttttgtgggtggctcctgaggacaaggcgagtttatggtcacaacttcattatgtttcgtgtaataatctggaaatgcaagaagcttatcttgtcaatctcgtaaatgtgttacgagaattgtatttgcacagtccagaggaagctcgccaattgagaaggaaagctctctctcgtattgaatggctgcaaaaagctgatgtgcctaccatagcacagattgaagagtttcattcgatgcagaggatgatgaatgctcctgattcaaatgataatattgatctactgttgagcattgatttgttgggtttacaaggagcaggtaaagcttttccaaacaaga

SEQ ID NO: 44596 - DNA, 394 bp, Glycine max
  Clone ID: LIB3139-077-P1-N1-B12
ccaaaagcaatgttttttacaccttcaaattcttcaattgggcggtccctttttatattgggcgagcgccctctccctcgcttagtcccaatctttcatctgacttaactacacgccaggtcgccgacaaccttccttcgcctgaggacactgtctgccttctcaaatccaccaccatctgaaatgtccgtctctactgcgccgttcccgccatcattaaggccctttccaactccagcatcttaattttcatttgtcccttcaactgtgacattgttatgttcgccggctgattctaacgctgtcacttagttgttttacacgaacgttttgttcttctaccccttcagcaacatcacttctgatcacccttgtaaacctatatttttcacct

SEQ ID NO: 44597 - DNA, 407 bp, Glycine max
  Clone ID: LIB3139-077-P1-N1-B2
gcctctgaccgtttatggagatgggaagcagacaagaagtttccaatatgtctctgatttggtggagggtctaatccgccttatggaaggagaacacgtgggacctttcaatcttggaaatccgggagaatttacaatgctagaacttgccaaggtggttcaagaaacaatcgaccctgatgctaggatagagtacaggccgaacacagaggatgatccgcacaagagaaagcctgatataagtagggctaaggatcaacttggctgggaacccaaggttgatctgcgcaagggcctcccactaatggtttctgactttcggcaacgcatttttggtgaccagaaggaaaaggcaaccgtagcctaattcttgcgtgtcatgtatcttagagtgagaaagggatata

SEQ ID NO: 44598 - DNA, 342 bp, Glycine max
  Clone ID: LIB3139-077-P1-N1-B4
agattgcaggaatatgtggttcacttcgaaaagaaagttataataaaggattaattcttcgtgctcaaaaattatgtgctgaacatgttaaaggagctaccataaacattatcgattggagtaaattgcccgtttataatcaggatgatgaagttgatcctccacaatcggtacttgattttagaaaagaactcgctgaccatgacgcgatattaatcgctacttcaggaatataattggagtattccaggtccattaaaaaatgcgttagattgggccgaaggagcaggaataacctttaatgttactactggcgaaaaagaacctagaccaattggtgat

SEQ ID NO: 44599 - DNA, 374 bp, Glycine max
  Clone ID: LIB3139-077-P1-N1-B7
atgaacttgagccattccaaaacggtggttttgatctggctcatctccgctttctgcttcttcaccttgttccaaatggccctctacaactcatcacaaactccttcatcaacttctttagattctccaaattcaaacacggggcaaagatcaaagttgtatgacaagatggggagagatctggatgagcatggagctgctttcctgaaacatggtgaaacctctcagtcattgtctctttcggatatattcacactgaaagatggatctgtaactcctgttctgaagccggcaaatcctccggtgcgggctaatgtattgtatttgagcactgaaatctctgtacctatcgcggaggctgtcaaaaatgtttt

SEQ ID NO: 44600 - DNA, 397 bp, Glycine max
  Clone ID: LIB3139-077-P1-N1-B9
ctggcttctccttcgtttgtgctcgccggaaaattttaccacggattggatcaacaatgagtgcggcatcgcgagaagaggattcgaatgaggaggagagggacgaggaagcgaaccggcttctagaagaagaagaagaagcagaatcatcatcagaagagggggagaagatcctggtggcggatttggagttcgacagggtggacgatgggagcgttccttctcctttctcgtggaagaagctctggctgttcacggggcctgggttcttgatgagcatagcgtttttggatccagtgaatctagagggggatctccaggctggggccatcgcgggctactcgcttctatggctcctcatgtgggccacctttattggcctcttgatccagctttt

SEQ ID NO: 44601 - DNA, 401 bp, Glycine max
  Clone ID: LIB3139-077-P1-N1-C1
aaacgaatccaaactcttttttaatttgcagcatcaaaatgagtggtagcaacgatggtagcggcagctggagctctaggtttttgaaggtggctagtgcagctgccgctacagccgccgttgccggcggtttatatgccattctttcatcctcaacctctgctagctctgagatggaagtgccgtttggcagcgcacggcgtgagagcaaagaacgtgacgatggtggctccgggtctcatcctcgcgagggtgccaccacggtcagtcgttggaagaaacctgagattggttgggtgaagctgaacgtggatggttcacgcgacccatacaaaagttccttcgctggttgtggtggtgttctgagggacgcatcagcaaagtggctccgtggctttgct

SEQ ID NO: 44602 - DNA, 279 bp, Glycine max
  Clone ID: LIB3139-077-P1-N1-C10
atcagatcctgcgcaatatcagtcaatagttgatgcagaatggaatattatttatgacaagttggataaatgtgtcagcagtggtgccaaagttgttctttcacgactggctattggtgatctagctacacagtattttgcagatcgagatattttctgtgctggtcgtgtagctgaagaagatctgaaaagggttgctgctgcgactggtggaaccgtacaaacatctgtgaataacattattgatgaggtccttggaacttgtgaaatttttgggga

SEQ ID NO: 44603 - DNA, 392 bp, Glycine max
  Clone ID: LIB3139-077-P1-N1-C11
ggagagaggaattttacttggtgctgttcatggagttgtggaatccttgtttaggagatacactgataatggaatgaacgaagatctggcctataagaatactgttgagtctataacagggattatatctaaaaccatctcaactaagggcatgctagctgtatacaatgctttatctgaagatgagaaaagggaatttgagaaggcttatagtgcttcttattatccttgcatggaaattctgtatgagtgctatgaggatgtagccagtggtagtgagattcgcagtgttgttctggctgggcgtcgcttttatgagaaagagggtctacctgcttttcccatgggtaacattgatcaaaccccgcatgtggaaggttggtgagcgtgtc

SEQ ID NO: 44604 - DNA, 396 bp, Glycine max
  Clone ID: LIB3139-077-P1-N1-C12
caacaacaacaacaacaaaaaaagacaaaaactacttccttctctcctttgctgtgttttctttctcaaaaatgggtcgtacctatgttcttatgatggttgctgcattgttgttgagctccaccatggctcaatctccagcttcgtcgccggctttgtcccccacccacacgccggtggccactccacctaggagggcgttgtcgccgtctccgtcgtctgtgtcaccagcggcttcacccgccaccggaaattctcctccggcaccacctacttcttctccttcggaatcgccacttccatcagctgctactcccaacatctctccctcgaccatctcgactccgccatctgaaggaccagctgcaaacggtgccgttttcaacagagtttccg

SEQ ID NO: 44605 - DNA, 409 bp, Glycine max
  Clone ID: LIB3139-077-P1-N1-C2
caccgaccaaaacgcgcaacacgttgtaattaaaacgacaccgaaactaatgggcgtcttcagcgaaaacccgaatccggacccggttgtgatccgccaggtttgggcttcaaatctcgaatccgaattccaactcatccgcgaactcatcgaccactatccttttatctcgatggacacagaattccccggtgttgttttccgaccacacctggaccccacaaaaccctacaaccaccgcaacaacaatcgcaaccgccactccgaccactaccgcctcctcaagtccaacgtcgacgctctcaacctcatccaggtcggcctcactctcaccgacgccgccggcaaccttcccgatctcgccggaaaccgctccatctgggaattcaacttccgtgacttcgacgtt

SEQ ID NO: 44606 - DNA, 347 bp, Glycine max
  Clone ID: LIB3139-077-P1-N1-C3
cgtgctcggaaaatccaaagccaaatttgaaattacctaacgtgtgttggcgttctgggttgacccaccctcctttcgttttcagcataatttctaggttttctatcttcgctcattcgccaatttacaattgaaatcgcaattacacaatctctctctctgctcgtgagctttctacggtttcgattcgatcattcccctcttgttttatggaggtataggtagatgatgggaaaacgtgtctcaagagagcactttcaacccatgccgtgttctgggaagacagagaatttaaaaaacaccgtgtttattgatgtagatgatcaagttgatgatgtggatgtggt

SEQ ID NO: 44607 - DNA, 370 bp, Glycine max
  Clone ID: LIB3139-077-P1-N1-C4
gttacaattgattggtttatttcctctcaggaatgtgttcccaggacctattgtgttttaaatccacaaaatccttttgtgttaaataggtggatgggaaaactgactttccctcagggcacttcccgaagtgttaagagaatgcctctttctatagggggaggagctggtgcaaagaatgctattctcatgaatatgccaaatgctgttctttcaatgtggagatattttgttggagatctcgactttgaagtttctaagatgacttctccctacattaaatgtacagtctttttcttcataacatttggaaatttggctgttgacaccatttatttttgggctttttcccacatactggtgcagtttg

SEQ ID NO: 44608 - DNA, 392 bp, Glycine max
  Clone ID: LIB3139-077-P1-N1-C5
acaggattggcctgagccaatagtcagagttcagtccttgtccgaaaggtgcacagattcaatccctgagaggtatatcaaacccctcagtgaccgtccatctgatgatgccgttgctgttgatgatgccaacatcccaatcattgaccttgcagggctttatggtggtgacccagatgctcgagcctccacactgaagaaaatatctgaggcttgtaatgagtggggtttcttccagatcgtgaaccatggtgttagccctcagctgatggacatggctagggaaacttggcgccagttctttcacatgcctttggaggtgaagcagcagtatgcaaactcgccaaaaacctatgaaaggtatggtagcaggcttgggattgagaaaggtg

SEQ ID NO: 44609 - DNA, 376 bp, Glycine max
  Clone ID: LIB3139-077-P1-N1-C6
tttagaggaagagctcaaaaacaaagcaacaaacaacaagaagaagaacaacgttggtggggaatcagaccagcccccttacaatgatggtgccaactctgatgttgctgaagaaactgagccagaggaagatgatgactccaagttggaatctaacaaagatttggatcttggccctcaattcactctcaaggaacagcttgagaaagacaaagatgatgaaagtttgagaaaatggaaggagcaacttctgggaagtgttgacatgtctgtcgttggaagtgaatgcaaagaccctgaagtgaagatattgagcctcattattacaagcccagataagcctgacctcaccctgccaattccatttactactgat

SEQ ID NO: 44610 - DNA, 400 bp, Glycine max
  Clone ID: LIB3139-077-P1-N1-C7
gttggatgcatttctatttctaactaattattgtgcttattattattgttgagaaagaaaagaatggcaaagttaataaaattctttgagttgaacacaggggccaagattccttctgttgggttaggcacttggcaagctgagcctggtgttgtagccaaagctgtcaccacagccattctggttggatacaggcatattgattgtgctcaagcgtataacaatcaagcagagattggttctgctcttaagaagctttttgatgatggtgtggtgaagcgtgaggacttatggatcactctcaaactctggtgttcagatcatgctttagaagatgtgcccaaagcattggataaaacattgcatgatttgcaacttgattaccttgacctcttttttg

SEQ ID NO: 44611 - DNA, 359 bp, Glycine max
  Clone ID: LIB3139-077-P1-N1-C8
actaaataaggatagtgaggttacaactgaacgcaagagcttcgagcaaagctatgatttaacgaaaagctaaatgtatatcaacacatatatattaaattcatacggtatctacatacatcacatgttcctgacactaaacaaaataaaagcaccgccaccctatgcttacgcgtagacatacatagtgaacggctcagccttaatgtcattgctttctacaggatgggctaaggtacatggggtgggcgacgatttagatctagatgaacgacatcctcacggaaaggctagtaactatgtccaagcgtataatgaggcttttaacgaaagatgacgggctgatggtgatgagggat

SEQ ID NO: 44612 - DNA, 397 bp, Glycine max
  Clone ID: LIB3139-077-P1-N1-D10
gaagaccaggatttggctggggactttccccacgccggagatggcggctcgggcgcacgacgtggcggcaatggccctgaggggccggtatgcctgtctaaactttgctgactcggcctggcggttacctgttcccgccacggccgaggcaaaggatatacagaaggcagcagcagaagctgcccaggctttcagaccagatcaaaccttaaaaaatgctaatacaaggcaggagtgtgtggaggcggtggcggtggcggtggcggagacaacaacggcgacggcacaaggggtgttttatatggaggaagaagagcaggtgttggatatgcctgagttgcttaggaatatggtgctcatgtccccaacacattgcttaggggatgagtatgaagat

SEQ ID NO: 44613 - DNA, 372 bp, Glycine max
  Clone ID: LIB3139-077-P1-N1-D11
gaacccttgttgtggttaggtcttcacatttcgaatttgggaattcatgggtcagggaactccgggcggcatgaaccggcagggcgaccggaagccggacggcggcgacaagaaggagaagaagttcgagccggcggcgccgccagcacgcgtggggcggaaacagcggaagcagaagggcccggaggcggcggcgcggctgccgacggtgactccggtgacgaagtgcaagctgcggctgctgaagctggagcggatcaaggactacctactgatggaggaagagttcgtggcgaatcatgagcgactcaagccgcaggaggagaatgccgaggaagacagattcaaggtctgcgaatcttcgtgctcttc

SEQ ID NO: 44614 - DNA, 384 bp, Glycine max
  Clone ID: LIB3139-077-P1-N1-D12
ctcgagccgattcggctcgaggtagatacttgcagcagctggtcatggaatctctaggcaaggagtttgacttggatggtaatcgggttaatcaaggaattagtgtctatggaaacaaaggaagcacagatcaacatgcctatattcaacaattgagggaaggtgtacacaatttctttgtgacattcattgaggtgctacgtgatagaccccccggtcatgattgggaacttgaacctggtgtcacatgtggtgactacttgtttggtatgctacagggaacaaggtcggctttgtatgccaataaccgagagtccatcacagttactgtacaagaagtgacaccaagaacagttggtgctcttattgggctctatgaacgag

SEQ ID NO: 44615 - DNA, 395 bp, Glycine max
  Clone ID: LIB3139-077-P1-N1-D2
tgcaaaaatacggtatcaagttgaacgatgcgattctcgctgaggataagcacaaacctatgtatgaagaattggctaacaatcctaatgtggagtacattgctggaggtgctactcagaattcaatcagggttgctcagtggatgcttcaagcaccaggtgccacaagttacataggttgcataggaaaggacaaatttggagaggagatgaagaagaaatgtacacttgatggtgtaaaggttaactattatgaaatcgacaatacacctactggaacttgtgctgtttgtgtggttggcggtgaaaggtcccttgttgccaacttatcagctgcaaattgctataagtctgagcatttgacgagaccggaaaattgggcattagttgaaaag

SEQ ID NO: 44616 - DNA, 403 bp, Glycine max
  Clone ID: LIB3139-077-P1-N1-D3
tgtattcatcattattttctttcagactgaaacgtccatggcaggctggcacctcatctttgcatgatgggagagatgaagctactaatgggctaatgtggatgagaggtggacctgtagaccaaggtctcaattccctaaattttcaaggagctggtatgttgccctggatgcatcagagactggatccaactttactaggaaatgatcagaatcaacagtaccaagccatgttggcagctggtttacagaacttaggtagtggatatctcatgaagcaacaaatgatgaattttcagcagccttaccactatctttaacaatctggaaacagtaattctcctttgcaacttcagcagcagcaaccaattcaacaatctgtgtcttctaacatgctgcagcc

SEQ ID NO: 44617 - DNA, 395 bp, Glycine max
  Clone ID: LIB3139-077-P1-N1-D4
caatattactgttgttgttaagcgagaggattgtataaaggctttacgagctgtccattccagattttatctctcaagaaccaccatagcaatgggcattattggacctggattaattgggagcacactacttgaccagctaagggatcaggcctcaaccctgaaagaagaattcaacattgatttgcgtgtaatgggcatacttggttcaaagtcaatgcttcttagtgatgtgggcattgacttagctagatggagagaacttcgagaggaaagaggagaagtggctaatgtggaaaaatttgttcaacatgtacatggaaatcattttataccaaacacagcattagtggactgcacagctgactctgccattgctggctattactatgact

SEQ ID NO: 44618 - DNA, 391 bp, Glycine max
  Clone ID: LIB3139-077-P1-N1-D5
gaaggaaactgctatttaatcacaatttaatggcactgaaaggagtgagggaggtcgcatatgagcctctaccgggaggcccaaacacaagcaatcataatgagcctaaaaaatccaaggaaacgacggtgagactgagacatcacaaaggatcagttcttgaaaatgttcgttggaaagcacttggagttcttatcactgtctgggtccttatacttgcctgcgagattgcaaaaagtcacacaacaacttgttcagtggaatactggatacttaatctactacaggtccctgtggcattaggagcgacttcatatcaagctgtgcttttgtacacaggcaagagagtgatagcatccaaaggagatcaaagaacacaatggctagcgca

SEQ ID NO: 44619 - DNA, 391 bp, Glycine max
  Clone ID: LIB3139-077-P1-N1-D6
atcctggggcgtcaacgtccagccctactccggctccccggccaacttcgccgcctacaccgccgtcctcaacccccacgaccgcatcatggggctagatctcccctccggcggccacctcacccacggctactacacctccggcggaaagaagatctccgccacctccatttacttcgagagtctcccttacaaggtaaactccaccaccggctacatcgactacgaccgcttggaagaaaaagccctagacttcaggccaaaactcataatctgcggtggcagcgcgtaccctcgcgattgggactacaaacgtttcagggaagtcgctgataagtgcggagcattgcttctctgcgacatggcgcacactagcggccttgtggccgcg

SEQ ID NO: 44620 - DNA, 266 bp, Glycine max
  Clone ID: LIB3139-077-P1-N1-D7
cgatcctgacattttttattgcaatgcctaacatcatgtggggggatttactgaaagacccggtggagtatgtgcatgatattgttgctcctggaaagatgctatctggaagaggcactgcactagttcatctgaatgacatgatctttcgtgttatgaaagatggaacttctgtgactaatgtcaaggtaaacatgcatgcaccgaagctttactatgttcatcccacatactttgaggctggtaaacctattgtgtttgttgct

SEQ ID NO: 44621 - DNA, 387 bp, Glycine max
  Clone ID: LIB3139-077-P1-N1-D9
gtttgattacctttcttgttatgagcaagatggcagaaatgatgagacagtctttgtggtggtgatggaaaattgatgcgtgaaaggacacacctgctgttggcttgttgttcaaggatggcaatttgtaagaaagatatttggagagttgaatgtggaatcccttctggatttccgctcacagttatttgcaatagcatttttaatgagatgctcattagatatagctatgaaaaattactgctcctggctaaagctccaagtatgtttttacaatccttcaaaaattttgtttctttgtgtgtgtatggtgatgttaacttaattagtgttcatgaatatgttaatgccttcttttgtggttctaaattgaaagttttctagctt

SEQ ID NO: 44622 - DNA, 416 bp, Glycine max
  unsure at all n locations
  Clone ID: LIB3139-077-P1-N1-E1
gatttcggttggggcggtgtctaatatgttataccttgccacccctttaaggctggctgatgacttaaacattcccggagtcttcagtgtgaattaactccaaaactttccctcaaacggtccaggatccataggcacctcagtgttgcaaacttctcttcatgattttattgagggttatttccagaacaacgaanacaccatgcaatcttggcatcttgatggttatgatttttgggtcattggtcatggtttcggccagtggacagatgctagcagaaaaacatataatctagtggatgccctgactagacacactgcacaggtgtatccaaaatcctggactactatattggtgtctttggataaccaaggcatgtggaaactgaggtctgcaatatgggaaaggcaatatc

SEQ ID NO: 44623 - DNA, 395 bp, Glycine max
  Clone ID: LIB3139-077-P1-N1-E10
atcgacgaacactaattcaggaaaaagaaatcgaggaagtatgggatggagcaggggctatacgcggagctgagcgaggcgatggagtgtttggagcacatatgctatgatgggtgtacccacgttggaccgtacgatgctgcggaggtgaagagggagaggacaccgtgtgggagattcgccacgtgccaggctcttcaggttctgatccgccactttgccacctgcgagaagaaggtgcgcggcggctgcgtgcggtgcaagcgaatgtggcagctctttcgactacattcctatgtttgtcaccacaccgattcctcctgcaaggttcctttttgcaggcaatttcaattgagaatgcagcaagagaaacggaaagatgattctaagtggaa

SEQ ID NO: 44624 - DNA, 283 bp, Glycine max
  Clone ID: LIB3139-077-P1-N1-E11
aaactcctgtttttatttggactgcacaattcaaatctgggaggccattgcatatgatatctgcgggctgcatgaacacccagttctaccgaaagccgtacattttcaacacaattgagaccatgttaacaccccacttctctctgcaacactcttggttctcaaacaacaacactacaaggtccctcaggctttttctctcatccctacatttactccaatcacgacattcactccacttcttatgtacctttaacaaatcaaggacttcctactaatggat

SEQ ID NO: 44625 - DNA, 396 bp, Glycine max
  Clone ID: LIB3139-077-P1-N1-E12
cgtgttttctctttattttctgctcttaaacgccgtcggggggagaactctttttttcccctggggttctctgtctttgtaaccgaaaggggggaaaatataattaacaccgatttcgcgaccaattcttcttctgcgttgaattgggacaacgagaaattggatctcacattttggcaggaaataaaaattgcatttgagtgtaaaataacagagtatagtgtagggccttgttcttgatactgagctaaatttgtcggatggcggagaaatcatgcatcaagcgccttcagaaggaatatagagccctttgtaaagagccagtttctcatgttgtggctcgtccttctccaagtgatattcttgagtggcattattgtgttggacggaagtgaa

SEQ ID NO: 44626 - DNA, 403 bp, Glycine max
  Clone ID: LIB3139-077-P1-N1-E2
accacttctcttgccattttacagctgatctatttgccatgaaccacacagatttcattatcaccagtgccttccaggagattgctggaagcaaggacactgttggacagtacgaatctcacacagccttcacccttcctggactctaccgcgttgtgcatggtattgatgtctttgatccaaaattcaacattgtctcccctggagctgatcaaaccatttacttcccccacactgaaaccagccgtaggttgacatccttccaccctgaaatcgaagaactcctttacagctcagtggagaatgaagaacacatatgtgtgctgaaggaccgcagcaagccaattatcttcaccatggcaaggttggatcgagtgaagaacatcacaggacttgtggagtg

SEQ ID NO: 44627 - DNA, 401 bp, Glycine max
  Clone ID: LIB3139-077-P1-N1-E3
gcacttaactagtaatatttattagaatttgccagagaattagaagaataaacataataccccagatggcttcaaaaacttgttcctcccttgcccttttcctcacactcaacctcgttttcttctcacttgtctctgcatgcggttatacaccatgccctggtccaaacccaaagccaaggcccaaccccaaccctaaccctaaccccagcccaagtggctcgtgcccccgtgacgcactcaaactaggtgtatgcgccaatgtgctaaacttggtgaacgccactttgggtcaaccaccagttaccccttgttgctcccttctcgatggtctcgttgaccttgaggctgcagtgtgcctttgcactgctctcaaagcaaacattttgggcatcaacctc

SEQ ID NO: 44628 - DNA, 377 bp, Glycine max
  Clone ID: LIB3139-077-P1-N1-E5
gtgcttattggtgccttatttacaatccatcaccacttaggagtgagcggctggtctatactatgactggtcagcccatatgctctgggttggggaacgaaccatgcagattgatggggcccatgtggagtatttaagaagagtagctaatcccttgtgaataaaggtaagtgacaagatggatccaaatgagctcggtagactcattgagattttgcatccccaaaacaaaccagggagaatcactgtgattacgaggatggtagctgcaaatattacggcgaagctttcacatctcatgaggccacttctcttagcatggcgcattgttacacaggctcagagatgctatgcatggacacaccattaaagctcca

SEQ ID NO: 44629 - DNA, 392 bp, Glycine max
  Clone ID: LIB3139-077-P1-N1-E6
gctgtttcaaatgtttttcttcttgcagaccaggtaaaaagatgtaagcctcaacttgttgctgttagaaatgagtccctaattgctgaacttgaagaggccttgcatgatgttgaagaaaaacctgagatcatccctggagagcagggaatcattgaggttgctcgtcacccagatgcagttagtgtagtcacaggaatagtaggctgtgcaggactgaagccaacagttgcagcgatagaagcagggaaagacatagctttggccaacaaagagacattgattgctggaggtccttttgttcttcctcttgctcagaagcataatgtaaaaatacttccagctgattcagaacattctgccatctttcagtgtatccaggggttgccaga

SEQ ID NO: 44630 - DNA, 401 bp, Glycine max
  Clone ID: LIB3139-077-P1-N1-E7
ctcattctcaaattaatattaatttaagcaagccaaacactatatcaaggggaaaatggcagaggctaatgtagtgctgttggatttctggccaagctcttatggaatgagagtgaaaatcgctttggcagagaagggaatctcatatgagtgcaagcaagaagacttggaagctagaagctctctgcttttagagatgaacccggttcacaaaatgataccagttttgattcataatggaaaacccatctgcgaatcactcaacattgttcagtacattgatgagacatggaaccacaaaccttcttctctccttccatctgatccttacaaacgatcccaagccaggttttggggcgattacattgacaaaaatgtatacaatgctgtgaagagggttt

SEQ ID NO: 44631 - DNA, 286 bp, Glycine max
  Clone ID: LIB3139-077-P1-N1-E8
aggtaccttgttttctttttgccgagggcattctgaagctggcaccactgaccatgaaccgtggtgttttggggaagagtgtgaagaaatttgccgattggcattgaagaggcactaccgtatgatcccacttatttacactcttttttattgtgctcatacaaggggcactccagtttcaacccctactttctttgctgatccaaaagatcccagactgtggaaacttgaaaattctttttcgcttggtccagtcttagtgtatgcaagcactttacttagacag

SEQ ID NO: 44632 - DNA, 396 bp, Glycine max
  Clone ID: LIB3139-077-P1-N1-E9
aaacacaacaacactctctcttctcgctcttggcttttcgctcgggactcactctcattcattcatttccaccgttcatggatccagtaagcgtgtggggtaacacgcccttggcgacggtggatcccgagatccatgacctcatcgagaaggagaagcgccgtcaatgccgcggaatcgagctcatcgcctccgagaacttcacctccttcgccgtcatcgaggccctcggcagcgctctcacgaacaaatactccgagggcatgccgggcaaccgctactacggcggcaatgaatacatcgaccagatcgaaaacctctgccgctcacgcgccctccaagccttccacctcgacgcccaatcctggggcgtcaacgtccagccctacttcggct

SEQ ID NO: 44633 - DNA, 399 bp, Glycine max
  Clone ID: LIB3139-077-P1-N1-F10
gtggaaaatgggaagaagcagctccctagagtctcaagtagtccatcactcaaagtgcttggatctcaaatgggtactcaggagaacaagaattctccattgcaagacctaatggaagtggccaattctcaagaggagtccgcaatctctgaacaaacaccaaatggagacactggggagaaaccttccccttatgtgaattctaggaaaagaaaaggtccatccaaaggaaaagccaaagaaacttcaacctctaccaacccccctatggctgctgaagctagcgatgactcgaatgcaaagcgcagcaagcctaacgaaggtgaggggaatgaaaatggccaagtgaaggcagaggaagagtccaaaggaggtaataatagtaatgcaaatgatgag

SEQ ID NO: 44634 - DNA, 370 bp, Glycine max
  Clone ID: LIB3139-077-P1-N1-F11
aatccttagattttgtcttaccctcctcggtttcttcggcggctaagtttccagtgtctccgtgtgaagagttgttcttcctctccttccctgaattccattaaaatgctacctccaaaccctgaatctttgctcctcaaaaaaggggtggataaaaaggcttcctcatcatcctcacccgtgaaatttgcaagtttcgtcagttcacccaaatcctgcgaggaaacttctgaggctgtgacaatggcggatttacatcatctatggcagcttgtggaggagaaagatggtggtctcccttggattcagatgatggatcgttctacccccaccatgagttacaaagcatggcgttgagaaccaaaggatg

SEQ ID NO: 44635 - DNA, 332 bp, Glycine max
  Clone ID: LIB3139-077-P1-N1-F12
ctcacctttgatttgactaaatcccgcgagttctaaaagtggatccacagggtacagttgatgagccacctgctatgtacagagcattcatagcttgggtgcatttttatttcttgtttggaggtggccaaacttatgtgtggatctcttcttttgtcccctgttcaatttcatgtttgttaataccagtctggttcttttttaaaattattgtgcatgggatgacctcacattctatgtatgtagaatacaggatgctagatgtccaaacttacgttcttgaattatattgtattcatcgatcttttttcacgctcacagttatttgtaat

SEQ ID NO: 44636 - DNA, 405 bp, Glycine max
  Clone ID: LIB3139-077-P1-N1-F2
ctcgagccgaatcggctcgaggacatgtaggagttactacaagtgtacacacccaggatgtccagtgaggaagcatgtggaaagagcttcacatgacctaagggctgtgatcacaacctatgaggggaagcacaaccatgatgttcctgcagctcgtggcagtggcagccattctgttaacagaccaatgccaaacaatgcttcaaaccctaccaacactgcagccactgccataagtcccttgcaagtgatccaacacagtgacaattcccatcagaaccaaagatctcaagcaccaccagaggggcaatcacccttcaccctagagatgctacaaagtccaggaagttttggattctcagggtttgggaatccaatgcaatcttacatgaatcagcagcaaca

SEQ ID NO: 44637 - DNA, 407 bp, Glycine max
  Clone ID: LIB3139-077-P1-N1-F3
aatggattaaggaatttaatgtcatcctcaacggcaaaaagcttggtgcaacttaagtccatgaagataaggcaatgtgatgaattagaggaaatagtaagcaatgagggaaatgaagaagaagagcaaatagtgtttggcaaattgattactgtagaacttgaggggctaagaaagctgaaaagtttttgcaggtacaagaactgtgaattcaaattcccgtcattgaaagtattaacagtgaaagaatgccgaatgatggaaacattcacggagggtggcgcaagagcaccaaagttacaaaacatagttactgatgacaatgaagaaggaaaagaggaagccaaatggcagggggaaggagacttgaatgccaccatacaaaacaagattttggagtctgcacg

SEQ ID NO: 44638 - DNA, 395 bp, Glycine max
  Clone ID: LIB3139-077-P1-N1-F4
cttgcacaaaagcaatgactatgtcatttaatccaaacccgtgttctgatgcatggagtttggaatttctgaagcgtactggatttcattgcgatatcatttgtgtcactggatggactgccaccccaatgcaggatgttcaggttacaattgattggtttatttcctctcaggaatgtgttcccaggacctattgtgttttaaatccacaaaatccttttgtgttaaataggtggatgggaaaattgactttcccccagggcacttcccgaagtgttaagagaatgcctctttctatagggggaggagctggtgcaaagaatgctattctcatgaatatgccaaatgctgttctttcaatgtggagatattttgttggagatctcgtctttgaa

SEQ ID NO: 44639 - DNA, 396 bp, Glycine max
  Clone ID: LIB3139-077-P1-N1-F5
gttccaacatctatctcacttcttagttctttgtggctctttccatgatggcctctcctacatctgcaagagttctcttcttgagtctctttgtaactctttccatgattttacatttgagttcagccaggaagttgtctgagtcagacccccaattgcagttccaataccacagaggccctctcctcacaggcaaaatctccgtaaacctaatttggtacggtaagttcaaaccttctcagaaagccattgttgctgatttcatcacctctctctcctctttcaaacccctcaccgcccaaccatccgttgccacgtggtggaaagccaccgacaaatactacaaaaactcgttccccaaacttgcactctccctagggtcccaaatcgttgatg

SEQ ID NO: 44640 - DNA, 325 bp, Glycine max
  Clone ID: LIB3139-077-P1-N1-F6
ctaagacagaaggttttatttttagtatcatgcaaggatctatggcagggctcataacgcaaatggggccgaagagctatatttgttagaggcaaatttttcttttgatattaaatctagctctagatcggaaaaagttatctctactaaatcccaacatgttggcggaaaaaccttaaactttgatgtatttgaggctggcccacattacaaaggagattctcttgaaattgataatcaagaacccccctatgagattgttaccatagtgcaacacataattgagacttggtaccactaggtttattctctccttgcatctaat

SEQ ID NO: 44641 - DNA, 398 bp, Glycine max
  Clone ID: LIB3139-077-P1-N1-F7
tcacatatcgaatccttgttactccatggcaccaccgaacctgcgtgccacttcagagccaagttccttcgccgtacagaaagtgaaaagtaaccttgtcttgcgttcaacctggcccgaactcaacggcgccatgggtgacctaggcacatacatacccattgtcttgtccctaacactagccagggacctcaacctcggcaccacattgatttttactggcatgtacaacatcatcaccggcgccatctacggcgtgcccatgcccgtccagcccatgaagtacatcgccgtcgtcgacctcgccgaccccaccttctccataccggagatcatggcctccggtattctcactggagcaacccttgttggcctaggtgtcactgggctcatgcagc

SEQ ID NO: 44642 - DNA, 395 bp, Glycine max
  Clone ID: LIB3139-077-P1-N1-F8
aaactacatatatatttttaaccaaacctttcttcctactactcgcattcccacattttgacaacgtggaccaggacttcgacatgccgacggcggaggcaatgggcgaggacttctacttcgccggcgccaccggcggcgacctctactgcagcagcagcaaccccatcttgaaggtcggcgaggagaatgagattggaaaagagggtttgaagaagaaactacttaaagaaggtgaaggatgggacactcctgaagttggtgacgaagttcaagttcactatactgggacgttgcttgatggcactaactttgattccagcagagataggggaactcctttcagtttcacgcttggacaaagtcaagttattaaaggatgggatcaaggtatt

SEQ ID NO: 44643 - DNA, 283 bp, Glycine max
  Clone ID: LIB3139-077-P1-N1-F9
ctccgcactccgtctttatcaatcagcatcaccaccgctccaacacaggggaaaatgagggagatccttcacgttcagggagggcaatgcgggaaccagatcggttcgaagttctgggaagtggtgtgcgacaagcacggcatatatccgacggggaagtacgttggaaactcagatctacaactcgtgcgcgtgaacgtgttctacaactaagctttctgcgggcggtttgttccacgcgcagtgcatgatggacctggagccctgtaccatggacagcttt

SEQ ID NO: 44644 - DNA, 456 bp, Glycine max
  Clone ID: LIB3139-077-P1-N1-G1
aagagcttgacggcgatgccccccgtccgtaggctcggatttcggttcgggggaaaaaggccccacttattcctgaagcactaataggaagaggtccagcatatgcattccaaagggaacttgatgctgctatagctgattttacaaaggctatacaatttaatccattggctggtgaggcatggaaacggagaggtcaggccagggcagccttgggagagtttgttgaggctattgaagacttgaccaaggcattagagtttgaacctgacacagcagatattttacatgagagaggaattgtcaatttcaaatttaaagagtttgatgcagctgttgaagacctttcagcttgcgtgaagctagataaggataatacatctgcctacacatatttgggtttagcattatcttcaattggtgaatataagaaagctgaggaagctcatctcaaat

SEQ ID NO: 44645 - DNA, 163 bp, Glycine max
  Clone ID: LIB3139-077-P1-N1-G10
aaaaaaaaaaatttattttataaaaacaaaaaaaataaaagaggagaattaacaaaaaaattagggactaaaaaaaaaaacacaaaaaaacaaacaaaaatacataaataaacctaaattcaaacatatcaatactataaaatcaaacctaaaattttcttcc

SEQ ID NO: 44646 - DNA, 344 bp, Glycine max
  Clone ID: LIB3139-077-P1-N1-G11
gggaaacagcagatattgatgccacgattggcaagcaagcggcaaagacacagaagatggctgctggcaatcatcaaagaggaacaaccaaggaacccaaaaataggtatgcttcaacagattccttggtggaaaaagagttgagtgtggacaagttagaggtgctcaagaagattgacactaccacgcgaagaaggggaaccaaagcaagattttagaaagacttgattctgatgcacagaagttgacaaaccttcaaatcaccatacaagatatgatgaagaaagtagagattaatgagaagagcacaaaaggaaaaaagtgtgagttttgtgaggtgaaag

SEQ ID NO: 44647 - DNA, 268 bp, Glycine max
  Clone ID: LIB3139-077-P1-N1-G12
cgtgtatgattttttttttgagctttagcctaaagggagagacgcataaatagtttctactggctatacatagatagatggctggcccaattatgagacctcagattgcgctatttggcttctccataattacaaatgagcttcgacaatggtggttggggtgctattctagctaacttgtacgctaggaatgcggtcatcatctcaagaggatactctggttgtaatttatggctggctttggaggttttggatgaaaattttctcc

SEQ ID NO: 44648 - DNA, 401 bp, Glycine max
  Clone ID: LIB3139-077-P1-N1-G2
ccgccacttctgaatctattgaatcaacaatcatgtcggccgagggggaccatttcgagtccaaggccgacgccggagcctccaaaacctaccctcagcaagccggtaccatccgcaagaacggctacatcgtcatcaaaggccgcccctgcaaggttgtggaagtttcgacttccaaaactggaaagcacggtcacgctaagtgtcactttgttggaattgatattttcactgccaagaaacttgaggatattgtgccctcttctcacaactgtgatgttcctcatgtgaatcgtactgattaccagctcattgatattgctgaggatggatttttgagtctgcttactgaaaatggtaacactaaggatgaccttaagctttccactgatgagagtctg

SEQ ID NO: 44649 - DNA, 397 bp, Glycine max
  Clone ID: LIB3139-077-P1-N1-G3
cccataataggaaaggcattaatttcacaattctgtcaaaccctgagggtcttgctgagggtacagcaattgcagacctgtttaagccagatcgagtcctcattgggggcagggaaaccccagagggtcaaaaggctattcattctctgaagaatgtttatgcccattgggttcctgaggacagaatcctttgcaccaatttgtggtctgctgaactctcaaagcttgcagccaatgctttcctggcccagaggatctcctcggtgaatgccatgtcggcactttgtgaggcaactggtgctgatgtctcccaggtgtcacattcaatcggcacagactcaagaattggaccaaagttcctgaatgccagtgttggttttggaggatcatgctttca

SEQ ID NO: 44650 - DNA, 322 bp, Glycine max
  Clone ID: LIB3139-077-P1-N1-G6
gctgaacactctcctattttatataggacttcgtgtcagattgaaactttttctgtttctttctcagttctctgtttaatttcaagttcaagctggtgaaattttggattagtgctcccactctcctatctggtataggacttcgtgggtagactcttctacttctgtcctttctttcactctcttcttctcactgatccgcattgccgttcaaagtggtcttatttgaaaaacacttgggcgttggtgcaaatgtttgcttcgttcattttctttggagacaacaggctcactgagaaaacaatatttacttgcagagatt

SEQ ID NO: 44651 - DNA, 336 bp, Glycine max
  Clone ID: LIB3139-077-P1-N1-G7
ctgtgtgatgattcatttctaaaccctaattctccttgtttgcagtgctgcttcattgttttttaagcaattccgagcattgatcaaatgggttttggttcacttccaattttctgaaacagcgtactctcaaaaaaaatatctgatcacattttctacttctgcaaattctgcatttttttccctctctttctttctggggtgtctgcagaacaagggaatctcacagattccttgtgtttctctttggtttccggtctcaaaatatcagcttttggatttttagtgttgcaaattgttgagggtttttgtggggtggcggcttttgttcgactt

SEQ ID NO: 44652 - DNA, 288 bp, Glycine max
  Clone ID: LIB3139-077-P1-N1-G8
cttctcactccttttttattaatcaccatcaccacctctgcgacgcgatttaaaataattttgatccttcacatccacttaggaacaattctttaaccaaatccattctatgttctgcccaatttttttctaccatcacttcatatattctacatttaattactctccaaactcacatctataacattatctcttttacttatactacatccaatcttcattcttacacatttacccactctcatttcttatgttcctatatccttttaccatttacaattttcatac

SEQ ID NO: 44653 - DNA, 158 bp, Glycine max
  Clone ID: LIB3139-077-P1-N1-G9
aatctaaaaatgttttttgcttatcctgtcaacccaattagggcgttactcaaactgctttggctccaaccagatacaagctgagcacatgataaataaatctcaataccttatttaagtggtctaaatagactaggagctcactatttctcaacata

SEQ ID NO: 44654 - DNA, 392 bp, Glycine max
  Clone ID: LIB3139-077-P1-N1-H10
gtagacactgaactatcatgcaccatagcaggtgattttgtcattggtgttaagttgacaaccataaacaatatgtgtgcatatgggctcaatcctggtatttcaggttctcgtcttttgggcaccattcctcagtccatttcacagcaaactgtttggaatcaaatggcaacagtgagaacaccattgaattttgattctagcaagcagagcttttgtcaattttctattgaccttctcggtggaggaattttagtggacaaaactggagattggatcacacttatacaaaattctccaattagtaacttgttgagagttgctgcttggaagaaaggttgtttaatggtcaagattgtgatgtctgggaatgcagcagtcaaaaggagtga

SEQ ID NO: 44655 - DNA, 76 bp, Glycine max
  Clone ID: LIB3139-077-P1-N1-H11
cgttcagaccagagctgaacggctctcagtttggatgcgggagcgatctttatggccttggggatcttctagatat

SEQ ID NO: 44656 - DNA, 381 bp, Glycine max
  Clone ID: LIB3139-077-P1-N1-H3
ggcacaaccaattactgatcccatgctgtgaaagaacatttacgttctgttatgaacctttgttaattatctagatcaatacactgtggatggagtgcataatcttgccgacaaatccccgatgtgtaatctgctaaatttcagaactgcagtgtcatactgacatgaagtccgtgaaacagcatcttacatggatacattggaagagcatggcgatcgaaccaatactcatgcacgttgcatatatggcactcaaatacttactgaatgaatcatcaaatgctctattaacttattggtgttgatcctggaactaaccctgttagacatttacttggtagccagggcctatgatcgattctcaagttatatgttgacact

SEQ ID NO: 44657 - DNA, 382 bp, Glycine max
  Clone ID: LIB3139-077-P1-N1-H4
cttgagctatcacaaataattgtttcggagaatggaaaagaaaaaggtggcagttcccctcgtgtgccacggtcattctcgccctgtggttgatctcttctacagtcccgttacgcctgatgggtttttcctcatcagtgccagcaaggattcgagtcctatgctcagaaatggagagactggagattggattggaacatttgaagggcacaaaggtgctgtgtggagttgctgcttggataccagtgccttacgtgccgcaactgcttctgctgatttctcaacgaaagtttgggatgctttaacaggagatgaattgcactcttttgagcataagcacattgttcgagcatgtgctttttctgaggatactcaccttttg

SEQ ID NO: 44658 - DNA, 330 bp, Glycine max
  Clone ID: LIB3139-077-P1-N1-H5
cgcgagcgttcacagtttattttctcacctacaggagattaacaggggggaatttccttaagggggcgatggaagatcttgcatacttggcaaaatcatatacagtgaactgactcctagtctttaaaatatacaaaaatgcatcaaggattcaagaaatttcatcaaaaaaccacaaacttggggaaaaaattgtaacattttattgtcactgaaggtcagtacacattttctaatcacaacatattggaagagactcggaaacgtatattgttaataatggaacggaagattgccgataattaatcaggcttctattttcagctttat

SEQ ID NO: 44659 - DNA, 347 bp, Glycine max
  Clone ID: LIB3139-077-P1-N1-H6
agcaagtgttgttggtgttgtagcaaacctgcaagagatttccatcagttaatttccttaaggtggagattgaagaccatccatacttggcaaaatcagaaggtgtgaactgcatcccagcctttaaaatatacaagaatggatcaaggattaaagaaattccaggaaacaaccacgatttgttggaaaaattagttaaattatatagcagctgaaggtaatcacacttcttcgaatcacaacatataggatgagactaggaaggttagttttttaagaatggaaaggaagattgtccaaaattatatcaagctttttatatttagcttaataaatatgtacacctt

SEQ ID NO: 44660 - DNA, 399 bp, Glycine max
  Clone ID: LIB3139-077-P1-N1-H7
cggctcgagtctattgtcaaattttttgacagagggcaattttagagcaagtgttgatttgcagcgcactcatcgtattaaaggaatgattaaaatggtggccacagttggtattcctgagaatacaggtatagcattggcctgtgctatgaatagttcttttagggggcgcgccagttctgatatttacaccatctgctctcaagactgtgaattatggaatcctgcttgcacaaaagcaatgactatgtcatttaatccaaacccgtgttctgatgcatggagtttggaatttctgaagcgtaccggatttcattgtgatatcatttgtgtcactggatggactgccaccccaatgcatgatgttcaggttacaattgattggtttatttcctctca

SEQ ID NO: 44661 - DNA, 331 bp, Glycine max
  Clone ID: LIB3139-077-P1-N1-H9
aaggacacaccttttttttgctcgttgttcaaggatggcggggggggagaaagatgttcggcgagttgcatgttgaatcccttctggatttccgctcacagttatttgcaatagcatttttaatgagatgctcattacatatagctattaaaaattactgctccaggctaaagctccatgtctgtttttacaatccttcataaattttgtttctttgtgtgtgttatggagatgactatcttaattagtgttcatgaatatgtcaagctttatatttgttgtcctttattgaaaagcttcctaactgttcactatattcaccattactttt

SEQ ID NO: 44662 - DNA, 375 bp, Glycine max
  Clone ID: LIB3139-078-P1-N1-A1
gaattgtatttgcacagtccagaggaagctcgccaattgagaaggaaagctctctctcgtattgaatggctgcaaaaagctgatgtgcctaccatagcacagattgaagagttccattcgatgcagaggatgatgaatgctcctgattcaaatgataatattgatctactgttgagcattgatttgttgggtttacaaggagcaggtaaagcttttccaaacaagattgtttttgatgataagcttgtgttggctaacacacaagaattctttgatggaaattttccagtggattcttggttaccaatttttgtgaattgtctttatcctgtaagtcaattaccttcaaaagcttgtcgtgtaaatgttacatgt

SEQ ID NO: 44663 - DNA, 365 bp, Glycine max
  Clone ID: LIB3139-078-P1-N1-A10
ataaactaatgtctcctgacaaaaagaagaaaacaacttcagacttaaaaagggaagcagaagaaaagcatgctcgtgctatgagaatcagaagtgagttagagaatgagagagtccaaaagcttcaacgtacatcacaaaagttaaatcgtgttaacgaatggcatgctgatcgtcatatgaagttacgagagggcatgtatgcccgccatcaacgcagtgaatctcgtcatgaagcttttctagctcaagtggcgaagagagctggtgatgaaagtagcaaggtaaatgaggttcggtttattacttccttaaatgaagaaaataagaaattgatgttgcgtcagaaacttcacgaatcaaag

SEQ ID NO: 44664 - DNA, 369 bp, Glycine max
  Clone ID: LIB3139-078-P1-N1-A11
ctcgagcctattcggctcgagtcggtgacagcttcatcgaaggcctcaacgacgagaaagaaaaataaaaacataaaaaaatgataatgtaaaaaatggagtatctcaataaaataaacttacatataaaaacataaaagacatatttaaagtaaataaaaaaaaattagttcatagagtcaaaaaaagaattttaattaataatataaggtaaaaaaacaaacaaaaaagaatttaacatcccatcttagaataaaaaaagacaaacaatcaattttattgaataaaatatagtaaaaaaacataataaataaaaaacaaaaaaaaacaaaattaaaataaaaaactagtaaattttaagtagattaa

SEQ ID NO: 44665 - DNA, 367 bp, Glycine max
  Clone ID: LIB3139-078-P1-N1-A12
ctcgagccgttttctctctcttttcatcagcttcgcgaattcgccaaatcagaaaaggtctctctctctctctctctctctcacccttcccagtgatcaattcaacgatgttagagcagttgctgatattcacgcgcggagggctcatcctctggacctgcaaccacctcagcaacgccctgaggggatctccgatcgacacgttgatccgatcctgcctcctggaggagcgatccggtgcggcctccttcaactacgacgcacctggagccgcatactctctcaaatggaccttccacaacgacctaggcctcgtctttgtcgccgtctatcaacgcgtcctccacctcttgtacgtcgacgattt

SEQ ID NO: 44666 - DNA, 369 bp, Glycine max
  Clone ID: LIB3139-078-P1-N1-A3
gagaaaagtgttcctacattggttggcattgaatgtgccaaggatgagaaacttcctcgtcgcagaatttttgacaaacctaagacgcgctgcttcactattctccctatggagtttaatcttgtggtccgtcaaaagtttttaaattttgtgaggttcattatgaagaaaagggacaagcttagttgtcaagttggaatcaacccatactccatggaatggactggtttggccaatagattactgagtaagggcaatgatattctgtgttgcgattatgctagttttgatggtttgattaccaagcaagttatgagcaagatggcagaaatgataaacagtctttgtggtggtgatgaaaaattgatg

SEQ ID NO: 44667 - DNA, 364 bp, Glycine max
  Clone ID: LIB3139-078-P1-N1-A4
cattctgtgtgcactggctgaaggtgggggcgctgagcctaaactatccaagttgtgaaagcacatcacaagaaaattcgcaagcgatggatcctaagctaaaagagggttgtcagctcttctatcgctgtaaggcttcgtttatcaggaacgactctgatacctgatccaatcttctttctcagctgaaggtgttacttacagtgctgagaagccttccaccggtgtttgcggatacacctaatgcagttcatgaattcacaatagcacgggatatatacgagcatgctgttgtccttagcgtgaaaaatgaaggtcaagatgcttttgaaagggattattttcaagtgaagccttattatac

SEQ ID NO: 44668 - DNA, 319 bp, Glycine max
  unsure at all n locations
  Clone ID: LIB3139-078-P1-N1-A5
caagaattctttgatggaaattttccagtggattcttggttacgtanttttgtgaattgtctttatcctgtaagtcaattaccttcagaagctgtcgttgtaaatgttacatgtggtagtggacgtggtggtttacccaccactgcttggattagttctgcaggtaacaatcgctcctcagatatcaacaaaaggattcgcacagcacttgggaaaggtaagaaaattgtttttcttactagagttgagccttttccagtagctttactggctgtggtgtttggcgttaagaatgaaattcttagttgtaacgccacta

SEQ ID NO: 44669 - DNA, 377 bp, Glycine max
  unsure at all n locations
  Clone ID: LIB3139-078-P1-N1-A6
atatcaacaaaaagattcgcacagcacttgggaaagggaagaaaattgtttttcttactagagttgatccttttccagtagctttactggctgttctttttggcgttaagaatgaaattctgagttctaacgccactaaccctatgctgacgcgacttcttgagaactgtaagagtctcaaatatctggttgatgagtgtccttttgcatttgtgaactagtatgtaatattttattcacttaaataaagcgcattactatgtgcaatgagtgtgtttaaatttttnnaaaaaaaaaataaattttaaaattatatatttttttttttgtttttttttttattttttatatttntantttttttttatttatttttt

SEQ ID NO: 44670 - DNA, 106 bp, Glycine max
  Clone ID: LIB3139-078-P1-N1-A7
ctgaggacttggcgagtttatggtcacaacttcattgtgtttcgtgtaataatctgggaatgcaagaagcttatcttgtcaatctcgtaaatgtgttaccgagaat

SEQ ID NO: 44671 - DNA, 340 bp, Glycine max
  unsure at all n locations
  Clone ID: LIB3139-078-P1-N1-A8
atggcgactcagatcctctctcgcatcttgcccaaagccctaaccctagcccccttcctcttccgctccctcaccaccgccccctctcgtccttccctccccgcgctctccttcctccgccgtatctccgttgcagccaacccctccctccgccgcgttcttctnccaaacgccccctncctccgngccctctncacacgcgccaccacctncttccttaacgaccccaaccctaactggtccaaccgtcccccgaaagaaaccatcttgctcgacggctgcgacttcgaacactggctcgtcgtcatggagaagcccgagggcgaccctacccgcgatg

SEQ ID NO: 44672 - DNA, 64 bp, Glycine max
  Clone ID: LIB3139-078-P1-N1-B1
ctcctctcacttttatttctacatcccctgctctgtttccgtcgatgacctatggcgtttaggg

SEQ ID NO: 44673 - DNA, 346 bp, Glycine max
  Clone ID: LIB3139-078-P1-N1-B10
cttgttgagagttgctgcttggaagaaaggctgtttgatggttaaaattgtgatgtctgggaatgcagcagtcaaaaggagtgattgggcctcattggtacaagtgtttttaacaaacagcaacagtacagagcatttcgatgcatgtaagtggacaaaatcggaaccacattcctgggaattgatcttcccaatagaggtatgtggtcctaataatggttttgaaatgtggagttctgagtgggcaaatcaaacttcatggcacttgagtttccttattgacaatcccaaacagtctacagtttttgatattctcttgggaatttctcaagattttgaaattgct

SEQ ID NO: 44674 - DNA, 366 bp, Glycine max
  Clone ID: LIB3139-078-P1-N1-B11
ctttctcctctatagtagtagctaaaaatggaggcgaagaaatcgggtttgaatctcccagctgggatgtccggaacctcactccggctggacactgcagcagcatcttccatctcgaccctcaattctccttcttctctccgttccatctctaatctcacctcgccttcgaaatccaactcggcttgcagcgacaggttcattccgtgccggtcctcctcgaggttgcacacgttcgggctcctggacaggccctcgccggtgaaggaagggagtaacgaggcttattccaggttgttgaaatcagaactctttggatctgactttgcttctccttctctttctctttcttcccctgcaggtgct

SEQ ID NO: 44675 - DNA, 381 bp, Glycine max
  Clone ID: LIB3139-078-P1-N1-B3
agaatactattgctgcgtaatttcactgtgctgctctacgtattcaataccacacatctatgatcaggtgcaaccgcactctccatgagaggcctcccacgggcatgcttaattatacaaaatgcccggactacgatctctactacaagcacatcatgacggctgatgatgtgtctcgcaggtctttggtggcatgtacagaggtccagcttccaattaaagacgtgcctgacgctataaacccatttaccttttggactgcggatatcatcattcgagtagacttaactgatgaatgtgcagattgcaactatcgtcatggagggcagtgcaaacttgacagcacagagaaattatgttgtgccaatggtataaaacaac

SEQ ID NO: 44676 - DNA, 349 bp, Glycine max
  Clone ID: LIB3139-078-P1-N1-B4
ccacacactccctctcacgcgtcgtcgtcgaaatcgggtacgaaatccaagcctggagcgaccgcgaaactctccaccgcctctctgcctcgctacgaaatcctaacattaataacaatgatttggtcgcgctgctgactcagtttcatgaccgagtctcgcagggcttcaatcgtgagttgcaggacctggttctcaaattaaagctcttctccttgctggaatcagttctttttgactcaaaatgtccgaaccgggttcgcgaataggctggtctggtagtggcggcgttaatccgattcaataaagaagtgttcgtgagagaaagccttttgcgagctgcgtggca

SEQ ID NO: 44677 - DNA, 370 bp, Glycine max
  Clone ID: LIB3139-078-P1-N1-B5
tgtggaattctgcttgcacaaaagcaatgactatgtcatttaagccaaacccgtgttctgatgcatggagtttggaatttctgaagcgtactggatttcattgcgatatcatttgtgtcactggatggactgccaccccaatgcaggatgttcaggttacaattgattggtttatttcctctcaggaatgtgttcccaggacctattgtgttttaaatccacaaaatccttttgtgttaaataggtggatgggaaaattgacttttccccagggcactttccgaagtgttaagagaatgcctctttctatagggggaggagctggtgcaaagaatgcttttcttatgaatatgccaaatgctgtttttta

SEQ ID NO: 44678 - DNA, 146 bp, Glycine max
  Clone ID: LIB3139-078-P1-N1-B6
gcgtatttggtcagcctaagtcctattgaatgaggcatcatggagggtgataatcccgtccggttgatcatttgcgttttacgatacgctttctaagagtcaagttgtttgggattgcagcttaaaatgggaggtaaatttctcct

SEQ ID NO: 44679 - DNA, 242 bp, Glycine max
  Clone ID: LIB3139-078-P1-N1-B7
aaaggacacacctgctgttggcttgctgttcaaggatggcaatttgtcagaaagatgtctggagagttgaatgtggaatcccttctggatttccgctcacagttatttgcaatagcatttttaatgagatgctcattagatatagctatgaaaaattactgcaccaagctaaagctccaagtatgtttttacaatccttcaaaaattttgagtctctgcgcgcgtatggcgatgataactta

SEQ ID NO: 44680 - DNA, 366 bp, Glycine max
  Clone ID: LIB3139-078-P1-N1-B8
ctcgagcctatcgagccgttctaaaccctatggccgacgaagccaaagccaaaggcggcgcatgcttctccttcggggactatgctgccgccatccaccacttcttcgatgccatcgccctggctccctccaaccatgtcctctattccaaccgatccgccgcatacgcctacctcaaaaactacgcagatgcattagcggatgccaaaaagacagttgaactcaagcccgactggtccaagggttacagtcgtctgggtgccgcgcatcttggcctttcccaatacgatgatgctattttggcttacaaaaggggtctcgaaatcgacccttacaacgagccccttaagtctggtttggcagatg

SEQ ID NO: 44681 - DNA, 362 bp, Glycine max
  Clone ID: LIB3139-078-P1-N1-C10
attaaaatggtggccacagttggtattcctgagaatacaggtatatcattggcctgtgctatgaatagttcttttagggggcgcgccagttctgatatttacaccatctgctctcaagactgtgaattgtggaatcctgcttgcacaaaagcaatgactatgtcatttaatccaaacccgtgttctgatgcatggagtttggaatttctgaagcgtactggatttcattgcgatatcatttgtgtcactggatggactgccaccccaatgcaggatgttcaggttacaattgattggtttatttcctctcaagaatgtgttcccaggacctattgtgttttaaatccacaaaatccttttgt

SEQ ID NO: 44682 - DNA, 368 bp, Glycine max
  Clone ID: LIB3139-078-P1-N1-C11
gaaattcatatgataaaccaaatgacttcccaacagtggatacagacgatagtgttccaggagttttgtatgatttgctgcagaaagaggtcttagccttgaggaaagttggtcatgagaaagatcaaagcctaaaagataaagatgatgccattgaaatgctggcaaagaaagtagatacattgaccaaagccatggaagttgaggcaaagaagatgagaagagaagtagcttccatggagaaagaggtagctgcaatgcgtgttgaaaaagaacaagacacaagagcaaagcgtttcagtaatgtaaagggccctgtgaacagtgctcagcatcagcttgtttctggaagaaatgtggcacgggga

SEQ ID NO: 44683 - DNA, 366 bp, Glycine max
  Clone ID: LIB3139-078-P1-N1-C12
gcaaataagctcaatcgcattcttcagctcactggattcagtgatcctgtttatgctgaagcatatgtcacagtgcatcactatgacattgtccttgatgttactgtcatcaaccgaaccaaggaaactcttcagaatttatgtttggagttagcaaccatgggtgatctcaaacttgttgagcgtccacaaaactatacgcttgctccagaatcaagcaaacaaattaaagccaacattaaggtttcatcaactgaaacaggagttatatttggtaacatagtctatgagacatcttctaatgttcttgagagaacagttattgttctaaatgatatccatattgacatcatggactacatttct

SEQ ID NO: 44684 - DNA, 376 bp, Glycine max
  Clone ID: LIB3139-078-P1-N1-C3
gttgggattcaaggaaatcgcttgggccttcggtggcatgatctgcgccctcgtttactgcaccgctggcatctcagggggacacataaacccggcggtgacatttgggctgtttttggcgaggaagttgtcgttgcccagggcgattttctacatcgtgatgcaatgcttgggtgctatttgtggcgctggcgtggtgaagggtttcgaggggaaaacaaaatacggtgcgttgaatggtggtgccaactttgttgcccctggttacaccaagggtgatggtcttggtgctgagattgttggcactttcatccttgtttacaccgttttctccgccaccgatgccaaacgtagcgccagagacttccacgttccc

SEQ ID NO: 44685 - DNA, 369 bp, Glycine max
  Clone ID: LIB3139-078-P1-N1-C4
tattcttcaatggggtgtacccaacaagattgaagaatatcttccttatccttctcagtaagtgtggggagatcaacaacaacaccaggaaggttaaggaagatattcttcaatggggtgtacccaacaagattgacatgattgctctttcatttgttcgcaaaggctcagatcttgttaatgtccgcaaggttctggggccacatgcaaagactattcagttgatgtctaaggttgagaatcaggaaggagtcctgaattttgacgaaatcctgcgcgagactgatgcattcatggtggcacgaggtgatcttggaatggagatcccagttgaaaagatattcctggcgcagaagatgatgatataca

SEQ ID NO: 44686 - DNA, 346 bp, Glycine max
  Clone ID: LIB3139-078-P1-N1-C7
cagcgatggaagaagacttcgacatccccggcggcgaggaaatggatctcggcgaagacaaggtcggcgaggagcgggagatcggctcccgcggcctcaagaagaagctcctcaaagaaggtcaaggctgggaaacccccgaagtcggcgacgaagtccaagttcattacacggggactttgctcgacggaactaagtttgattcgagccgcgacagggattctcccttcagcttcacgctcggacaagggcaagtaattaaaggatgggatgaaggtattaaaaccatgaagaaaggtgaaaatgctattttcaccatccctcccgagctagcttatggtgaatc

SEQ ID NO: 44687 - DNA, 323 bp, Glycine max
  Clone ID: LIB3139-078-P1-N1-C8
ttattgttagtggtgtcattaagcttggtgataagcggagtgaaagcaaatgtgctggtgtgtatggtcaaatgaatgagccccctggtgctcgtgcccgtgttggtcttactgggcttactgtggctgaacacttccgtgatgctgaagggcaagatgtgcttctttttgtagacaacattttccgttttacccaagctaactcagaggtgtctgctttgcttggtcgtatcccatctgctgctggttaccaaccaaccttgtctactggttttggagcttttcaagagcgtattacaacaaccaagtatggcttaatttcc

SEQ ID NO: 44688 - DNA, 344 bp, Glycine max
  Clone ID: LIB3139-078-P1-N1-C9
gttgaccttgactctttggaagctttggcagatgagaacactgtggccattgttttcatcagtcctagtagtccatgtggaaatgtgttcacgtacgaacatttgaaaagggtatatataattataagctcaaacttgaaaacatatgtatttgagttgagaaaaaaacaaaaggttgtgattttttcatgactcttattttaggttgctgagattgcgagcaaacttggaatctttgtgatttctgatgaagtttatgcccatgttacttttggaagcaaaccgtttgtacccatgagggagttttcgtcaatagtgccagttattaccattggttctttctc

SEQ ID NO: 44689 - DNA, 370 bp, Glycine max
  Clone ID: LIB3139-078-P1-N1-D1
ctcgagcctaattcttttcgagctcgttagtcgtttgtaacgcgtttgtttgcgtttgttgcacagaagaattaacacgtatatagcaagcatggcagtcacactctacgaccttagctctgcctctgggttgaagaagcttgatgagtaccttctcccacgcagctacatcaccgggtaccaagctacaaaggatgatcttactgtttatgcagctttgccaactgctccatcagatgaatatggaaatgtttccaggtggtacaagcacattgatgctttgttgagaatctctggtgtttctggcgagggatctggtgttattgttgagggatccctggttgcggagcctgttgcaactcccccagct

SEQ ID NO: 44690 - DNA, 365 bp, Glycine max
  Clone ID: LIB3139-078-P1-N1-D10
attagaatttgccagagaattagaagaataaacataataccccagatggcttcaaaaacttgttcctcccttgcccttttcctcacactcaacctcgttttcttctcacttgtctctgcatgcggttatacaccatgccctggtccaaacccaaagccaaggcccaaccccaaccctaaccctaaccccagcccaagtggctcgtgcccccgtgacgcactcaaactaggtgtatgcgccaatgtgctaaacttggtgaacgccactttgggtcaaccaccagttaccccttgttgctcccttctcgatggtctcgttgaccttgaggctgcagtgtgcctttgcactgctctcaaagcaaacat

SEQ ID NO: 44691 - DNA, 364 bp, Glycine max
  Clone ID: LIB3139-078-P1-N1-D11
cggccaccggagttctctctcggttttccgaccggccagccaatctgcaattccgattttgcttagatctctcacgaatcccctttctgcaccttcctagggtttactagacaccatgactctttcggacgacgaggacgagaatctggctcaatttctggaatcagaagtcctctcggaggtatctgacaaggaagaggaaaatgtggaggaaccgaaagcaaagagagcgcgcttagaagaggatgagattactaagcaaaaacaaagttctgattcattatctgcgccgaagaacattgttgtcaacaacggggtggtgcccagaaggattgagactggttatttcagtcaaattccaccg

SEQ ID NO: 44692 - DNA, 364 bp, Glycine max
  Clone ID: LIB3139-078-P1-N1-D12
atttcatatatacaaataacatatatggcttcttccttctctccaagcctatcatcacttgtgcctctgcttgtgagccttttcattgtggtttgtgctgccggtaacttcaaccaagactttcagattacgtggggagatggtcgtgcaaaaatactcaacaacgccaatcttctcactctctcccttgacaaggcctctggctctggcttccaatccaagaacgaatacttatttggcaagattgacatgcagctcaagctcgttcctggaaactctgctggcactgtcaccgcttattatctatcttcaaagggatcaacatgggatgagattgacttcgagttcttggggaatctcagtg

SEQ ID NO: 44693 - DNA, 371 bp, Glycine max
  Clone ID: LIB3139-078-P1-N1-D5
attcttgtttgctttctcaagtctctcgaagcatctttctttcggttcctgcagctatccgtgtgacttgttcccaagtctccaacaagcaaagtacatggttgatttggaaatccaggtccccagcgcattcgacccgtttgccgaggcgagagaatcagatgcccccggggcaaaggagtatgtgcacatacgaattcagcagaggaatggaaagaagagtctgacaacagtgcaagggctgaagaaggagttcagctacgagaagatcctcaaggacctcaagaaggacttttgctgcaacgggactgtggtgcaagacaaggagcttggcaagattatccaactccaaggcgaccagcgcaagaacg

SEQ ID NO: 44694 - DNA, 300 bp, Glycine max
  Clone ID: LIB3139-078-P1-N1-D6
acgcgacgaagctcgaattcgcttagcttggtatcatttttcgggagggaactgaaatccgggggagggaagttaaatgggggagacggcaaatggccctggtgagccaagaacctgtgctgtttaatgacaccatccgagccaattttgcatatggaaagggcggcgatgcaccagaggcagaaattatagctgcagcagaactcgcatatgctcacaactttacttgtagtttgcaggaaggttatgacacaatagtaggggaaagagggattcaactatctggagggcagaagcagc

SEQ ID NO: 44695 - DNA, 371 bp, Glycine max
  Clone ID: LIB3139-078-P1-N1-D7
gtggagtataaaacctgccatgacagtaataacaatgcctcctttcttatcttactctcttctttccctcgcgttcttcttcactctcaagtaccttttccaaagaagcagaaaagtacgaaacctgccacctggtccgactcctcttcctataatcggcaaccttaacctcgttgaacaacctatacaccgtttcttccaccgcatgtcccaaaaatatggaaacatcatatccctttggtttgggtcacgtcttgttgtggttgtttcatcacccacagcgtaccaagaatgtttcactaaacatgatgttaccttggccaacagggtacgctccctctcgggaaaatacatattctacgacaacacca

SEQ ID NO: 44696 - DNA, 369 bp, Glycine max
  Clone ID: LIB3139-078-P1-N1-D8
accaaactctggaagcacagcttgtgtggctgtcatccgaggaaacaaacttgttgttgctaatgctggagattctagatgtgtcttatcaaggaaaggccaggcacacaatttgtccaaggaccacaagcctgaacttgaggctgagaaagacaggattctgaaagctggtggtttcatccaagttggacgggtcaatggaagtttaaacttggctagagcaattggagatatggaattcaagcagaataagtatttgcctgttgaaaagcagattgtaactgctgatccggacataacttcagttgagctttgtgatgatgacgagtttcttgtaatagcttgtgatggaatatgggattgtatgtc

SEQ ID NO: 44697 - DNA, 369 bp, Glycine max
  Clone ID: LIB3139-078-P1-N1-D9
attgaatgtcccaaggatgaaaaacttcctcgtcgcaaaatttttgacaaacctaagacgcgctgcttcactattctccctatggagtttaatcttgtggtccgtcagaagtttttaaattttgtgaggttcattatgaagaaaagggacaagcttagttgtcaagttggaatcaacccatactccatggaatggactggtttggccaataggttactgagtaagggcaacgatattctgtgttgcgattatgctagttttgatggtttgattaccaagcaagttatgagcaagatggcagaaatgataaacagtctttgtggtggtgatgaaaaattgatgcgtgaaaggacacacctgctgttggct

SEQ ID NO: 44698 - DNA, 369 bp, Glycine max
  Clone ID: LIB3139-078-P1-N1-E1
taatttatatagcaagctagctaggttgaaaatagtttggttttgtagtaagtgaggtgaggtgccaaaatggtgaagataactcttggtactttcgatgactcttttggtgttgcctctcttaaggcttatttggcagagttccatgcaactctgattttcgtgttcgctggtgttggttcagccatcgcttacaacgagcttacaaaagatgcagccttggatccaacggggctggtggcagtagctgtggcccatgcatttgcactgtttgtaggtgtcttcgtcgcagccaacatcttgggtggccatttgaacccagctgttacttttggattggccattggaggcaacatcaccctcattact

SEQ ID NO: 44699 - DNA, 365 bp, Glycine max
  Clone ID: LIB3139-078-P1-N1-E11
aggtattgcaactggaattccatggcgacgagtgggtcagagacaaagcaagtgatggtgattggaatcgacgacagtgatttcagcacgtacgctctccaatggactctggatcacttgctatcccctgcaaatgttcctaagttcaagatttttcttgtttatgccaagccttctgttgcctctgctgtcggttttgttggccctggagccgctgaggtgttacctgttgttgaggccgatttgagaaaaacagctgccaaaatcactgaacgtgctacagaactatgcaagaagaaatccgtaaatgacgtagcagtggaagtgctagaaggtgatcctagaaatgttctttgcgaggcagt

SEQ ID NO: 44700 - DNA, 360 bp, Glycine max
  Clone ID: LIB3139-078-P1-N1-E12
tgtttttacaatccttcaaaaattttgtttctttgtgtgtgtatggtgatgataacttaattagtgttcatgaatatgtcaagccttactttagtggttctaaattgaaaagctttctagctggtcataatatcaccattactgatggtattgacaaaactagtgcaactttgcaatttagaaagttagcagattgtgattttctcaagagaaactttaagcagatgtctaatgttttatgggtggctcctgaggacaaggcgagtttatggtcacaacttcattatgtttcgtgcaataatctggaaatgcaagaagcttatcttgtcaatctcgtaaatgtgttacgagaattgtatt

SEQ ID NO: 44701 - DNA, 375 bp, Glycine max
  Clone ID: LIB3139-078-P1-N1-E3
ctgttattgattttaaagtggtttaaaactagttttagaagcaaaccagatttaaaatcagttttgaaccagaaactggatccaaaaaatcatttttttttgcaagatatggatctggatttaaatggatccggattggattttccatgtccgcccttaaaaataacctgtaattggaggtttttaagcggaaaaagttaaaataacagataaaaaaatatcttacattaccgagtgattgacgtcaaccgcaaaccatcttcacttcttatctccggtctccgacgaactctccttggaatttgtactgcagaggtgctgccttttacaccaccagattttgcagattttagtttttaaggttatgctttttgg

SEQ ID NO: 44702 - DNA, 370 bp, Glycine max
  Clone ID: LIB3139-078-P1-N1-E4
gtggtgtgtcattaatttgtgtcaagtattttggttttgctttcccccttgttagccattggtgttgcacaattggcattaaggttctattatcacatatgccaaacttgacctttgaaagatatcctaattcctaagtgctaatgctactctacttaatcacttgcatctccttccttctgtttttaaagcctctcctctctctcaaaccactcccatcatgggcaagtgaattgaggttgatctcccctttgttttacaaagacttgtctgtgaagtccatctctaagttgtttaggaaccgcctttggcttggttttctttgtcaaattcccacaagaatgtctctaatgaagaagtcttcaaaggt

SEQ ID NO: 44703 - DNA, 368 bp, Glycine max
  Clone ID: LIB3139-078-P1-N1-E6
attctcctttctgaattcctcttattcaggaatttggagagtattgatatatcaagggaggataaaccagtagccaaggaagatatggagttttctatgattttcattgttagcaacattatgctgcttttcagttcagcatttgccaaaactgctagtcctccctctctgagcccaactccagcaccagccccggcaccagacttcgtgaacctcactgagttactcagtgttgctggtccgtttcacaccttccttggataccttgagtccactaaagtgattgacactttccaaaaccaagccaacaacactgaagaaggaattaccatctttgttcctaaggacagtgccttcaatgctataaa

SEQ ID NO: 44704 - DNA, 367 bp, Glycine max
  Clone ID: LIB3139-078-P1-N1-E7
tttctctcttacacccttccattttctccttctcttcctcccatggtgtaattgctccaactatggccgtggacctcatgacgacgggttgcagccgaaacgacaacatcaatagtttcacaaccaaagccgaggaaaatgccgtccaagaagctgcttccggcttagagagcatcgagaagctcatcagactcctctcgcaaacccaaacccaaacccgccatcaaatcaacaacaatagctctaatgaaatcgccatcgccatggactgcaaggtcgtcgctgacgtggcagtctccaagttcaagaaggtcatatccctcctcggccgaacccgtaccggccacgccaggttccgacgcgcccc

SEQ ID NO: 44705 - DNA, 367 bp, Glycine max
  Clone ID: LIB3139-078-P1-N1-E9
gactcctatagtttcctctgctaattccatatccccgttttccttcactcttgaaccccgattcatttccaccagcacaagaagcatggctgcaatatcaataccttctcacatgaaagcttggacatactctgagtatggaaaatccaaggaagttctcaagtttaatcagagtgtggctttgcctgaggtgaaggaagaccaggtcctcatcaaggtcgctgctgcttcccttaaccccattgatcataagagaatggaaggctatttcaagaacagcgactcccctttacctactgctccgggttatgatgttgctggagtggtggttaaagtgggaagtgaagtgaagaaatttaaggttggg

SEQ ID NO: 44706 - DNA, 368 bp, Glycine max
  Clone ID: LIB3139-078-P1-N1-F1
gaactgggttccaccgagttaattttccagaactcggatctgatgaacaaggtgaaggttctcttcaattttagcaacaacaacttcgacatgggttcttcttggcccgccaccagcgccgatcaaggcgaaaacgacccttcctcgctctggctcagcgatcccgaagttagggattccgttaacactgctgctgctaccccttcggtcatggttcctgcacagactcaggggatttcgatttcaaagacgatgcagttagagagttctattcaaacccctggttcgagtactttaaccgaaacccctagttctattcacgcgattccgcagaaccagagcgtgttctccagagaattgaacttctc

SEQ ID NO: 44707 - DNA, 367 bp, Glycine max
  Clone ID: LIB3139-078-P1-N1-F10
tcttgcaaaccttacaccattctctgatagcaatcaaagtcctcgtaatatgtaccaatgtcagatggcaaaacaaacaatgggtacaccatcaacatctttaagacatcgaacagataacaaattatatcgattacaaacaggccaatcaccaatcgttcgatctaaactttacgatacccttggttttgatgggttcgttagtggcacaaatgcaatcgtggctgtaatttcatatacaggatatgatatggaggatgctatgattataaataaatcagcacatgaacgagggtttgcatacggtactatttacaaatcagaagtaattgatcttaatgatgaacgtgtgcgtggagaacctatt

SEQ ID NO: 44708 - DNA, 243 bp, Glycine max
  Clone ID: LIB3139-078-P1-N1-F12
tgcatttggttgtgtgctgatgaaggatttccttaaggcacttgcaaagcgcctcaagcacaacaatactgcatatgaaaattaccacaggatatttgtccctgaaggacatactttgaaggctacacccagagagcctttgagggttaatgttcttttccaacatatacaaaaaatgctgtctggtgaaactgctgtaattgttgagacaggggattcctggtttaactgccaaaagctgaa

SEQ ID NO: 44709 - DNA, 366 bp, Glycine max
  Clone ID: LIB3139-078-P1-N1-F2
aaaatgatcccggaaacttcaacaagattgttgagctcatgcagaaaatgcaagaatgtgggcagccaccaaatgatatcgtccaggagcttgctcccgatttcgatttagccagtcttggccagctatctccagagatgcttgaaactcagccaaattgttccataatgtgaagctatttcttcccttttactatgttgcagctgttggtttacaggtttttaggaatatttaattttcactcgtcagaataaaatagttttatgcgctacaatgttttttcctactttttataaggttatgaggaacccacaagtaaagcctttttttaaggttgtatatgatgagggcttgtctatcaatatt

SEQ ID NO: 44710 - DNA, 374 bp, Glycine max
  Clone ID: LIB3139-078-P1-N1-F3
cttttccatcaccaaaaccacacaagaattcggtgaaactccacttgaaacacagatgagggagcaaaggtgctgagcctaaaaactctgtgattgattccacagtaagagatttgaccagaattcagaaccttcacagaagggttatagaaaataggaaccaaaacaccatttcaaggctgcagaggttacagaaggagcaaccaaagcagtccttcaagccagtgtttgctccggccgcttcatcgacaagtccagtttccgggcagcttgtggcaaccttggaatccggggtgagtcttggctctggtgagtatttcatggatgtgtttgtggggacaccccctaagcatttttctttgatacttgacact

SEQ ID NO: 44711 - DNA, 371 bp, Glycine max
  Clone ID: LIB3139-078-P1-N1-F4
gagaaaagtgttcctacattggttggcattgaatgtcccaaggatgagaaacttcctcgtcgcaaaatttttgacaaacctaagacgcgctgcttcactattctccctatggagtttaatcttgtggtccgtcaaaagtttttaaattttgtgaggttcattatgaagaaaagggacaagcttagttgtcaagttggaatcaacccatactccatggaatggactggtttggccaatagattactgagtaagggcaatgatattctgtgttgcgattatgctagttttgatggtttgattaccaagcaagttatgagcaagatggcagaaatgataaacagtctttgtggtggtgatgaaaaattgatgcg

SEQ ID NO: 44712 - DNA, 368 bp, Glycine max
  Clone ID: LIB3139-078-P1-N1-F5
tcaatacaatgaggttcaggctcagatggaaacaaatttgtttaaattgtctcttgatgatgttgaaactcctaaaggttccatgttggatcttaaaatttctcaatctaaaattgcacttcccaaaaacacagttggaggaaccattctgcgtagtgacctattggcaaattttttgacagagggcaattttagagcaagtgttgatttgcagcgcactcatcgtatcaaaggaatgattaaaatggtggccacagttggtattcctgagaatacaggtatagcattggcctgtgctatgaatagttcttttagggggcgtgccagttctgatatttacaccatctgctctcaagactgtgaattat

SEQ ID NO: 44713 - DNA, 367 bp, Glycine max
  Clone ID: LIB3139-078-P1-N1-F8
ctcgagccgatgggttctctctttattggaattccagccaaggaaatagttggctggtggcggatttgtttctgggtatctgtcattcctgctacaatgcttgccctttttatggagatctgtgcagagagtcctcattggcttttcaagagaggaagaaccattgaagctgaagctgcatttgagaagctcttggggggagtacatgtgaaacctgcaatgactgaactgtcaaagtctgacagaggtgatggatctgattcagtaaaactttcagaattaatctacggccgctatttcagagtgatgttcattggatctacactttttgcgctgcagcagctatctggcataaatgctgttttct

SEQ ID NO: 44714 - DNA, 373 bp, Glycine max
  Clone ID: LIB3139-078-P1-N1-F9
attaaaatgtagagaaagaaaaaaaaagaagcctacacacctttctccctattgcttcgagcttctggcgccatttgcaccttcaaaactccatcttttttctttctctccttccatttctggaaacaccctcatggaaccaacaacaacattgaacaacatcatcaacaacaacaacactgttcctgcagggtcaccaccaccaccaccaccacccttagtgcctcagccaatgaacatgaatgtcaacatgaacatgaacgtgggaaacacagaaggaacaacaccagcagttccaacaccaacacccgcgccaacaccagcaccaacaacaatggtttctgcagtgccagctccaaccacaacaacaccg

SEQ ID NO: 44715 - DNA, 364 bp, Glycine max
  Clone ID: LIB3139-078-P1-N1-G11
aaaacccaattaatcaaaaattgagatacaccacttgcaactatcatcatgacttctgcatcacttcaccttctgcctcttacctattccgatcatgcaccccaaaagcctcgtagtgtgttacccatctttggtttcatcaacatgacaatcagcagcgtggtcacaatctaccgcgcgcacaacaacaacgacactcccaccgtagtgttcgtgggttttgtctactttggttccttcttgttggattattgctttcgcttgtaccactccctacctaaatcttcatcatccaattcccataatattaaacgcaacgttaaaatcatcatttgggtcttgattagcaccatcatgttgggat

SEQ ID NO: 44716 - DNA, 367 bp, Glycine max
  Clone ID: LIB3139-078-P1-N1-G12
gaggcttacaacaagctaatagttgaacttgagaaaagtgttcctacattggttggcattgaatgtcccaaggatgagaaacttcctcgtcgcaaaatttttgacaaacctaagacgcgctgcttcactattctccctatggagtttaatcttgtggtccgtcaaaagtttttaaattttgtgaggttcattatgaagaaaagggacaagcttagttgtcaagttggaatcaacccatactccatggaatggactggtttggccaatagattactgagtaagggcaatgatattctgtgttgcgattatgctagttttgatggtttgattaccaagcaagttatgagcaagatggcagaaatgataa

SEQ ID NO: 44717 - DNA, 374 bp, Glycine max
  Clone ID: LIB3139-078-P1-N1-G3
gtccaaacactcttctctgcagcttttgcctacaactgccttcaccatggctgaacaaaccgagaaagcttttctgaagcaaccaaaagtgtttctcagcacaaagaagactgggaagggaaagagacctggaaaaggtgggaaccgcttttggaagtccattgggcttggatttaagactcccagggaagccatcgaaggaacctatattgacaagaagtgccccttcactggcaatgtttccatccgtggccgtatcttggctggaacatgtcacagtgctaagatgaacaggactattattgttagaaggaattatctccattttatcaagaagtaccagaggtacgagaagaggcactcaaatattcctg

SEQ ID NO: 44718 - DNA, 156 bp, Glycine max
  Clone ID: LIB3139-078-P1-N1-G4
tgaccatctcggtggtggaatgatagtggacaaaactggagattggatcacacttatacaaaaggctccaattagtaactctgtgagagttgctgcttggaagaaaggctgtgcaatggttcagaatgtgacatctgggaatacaccagttaaaag

SEQ ID NO: 44719 - DNA, 105 bp, Glycine max
  Clone ID: LIB3139-078-P1-N1-G5
attgaataatttgttgggtgtagttccctttttggcagctaaacaccaatggagctgatcatgggtaagtttaattaatcatgcgactgaagcaggaatttgcat

SEQ ID NO: 44720 - DNA, 366 bp, Glycine max
  Clone ID: LIB3139-078-P1-N1-G7
cattctgcgtagtgatttattggcaaattttttgacagagggcaattttagagcaagtgttgatttgcagcgcactcatcgtattaaaggaatgattaaaatggtggccacagttggtattcctgagaatacaggtatagcattggcctgtgctatgaatagttcttttagggggcgtgccagttctgatatttacaccatctgctctcaagactgtgaattatggaatcctgcttgcacaaaagcgatgactatgtcatttaatccaaacccgtgttctgatgcatggagtttggaatttctgaagcgtactggatttcattgtgatatcatttgtgtcactggatggactgccaccccaatgca

SEQ ID NO: 44721 - DNA, 366 bp, Glycine max
  Clone ID: LIB3139-078-P1-N1-G8
cttaattagtgttcatgaatatgtcaagccttactttagtggttctaaattgaaaagctttctagctggtcataatatcaccattactgatggtattgacaaaactagtgcaactttgcaatttagaaagttagcagattgtgattttctcaagagaaactttaagcagatgtctaatgttttatgggtggctcctgaggacaaggcgagtttatggtcacaacttcattatgtttcgtgcaataatctggaaatgcaagaagcttatcttgtcaatctcgtaaatgtgttacgagaattgtatttgcacagtccagaggaagctcgccaattgagaaggaaagctctctctcgtattgaatggct

SEQ ID NO: 44722 - DNA, 348 bp, Glycine max
  Clone ID: LIB3139-078-P1-N1-G9
aatccttcaaaatttttgtttctttgtgtgtgtatggtgatgataacttaattagtgttcatgaatatgtcaagccttactttagtggttctaaattgaaaagctttctagctggtcataatatcaccattactgatggtattgacaaaactagtgcaactttgcaatttagaaagttagcagattgtgattttctcaagagaaactttaagcagatgtctaatgttttgtgggtggctcctgaggattaggcgagtttatggtcacaacttcattatgtttcgtgttataatctggaaatgcaagaagcttatcttgtcaatttgtaaatgtgttcgagaattgttt

SEQ ID NO: 44723 - DNA, 368 bp, Glycine max
  Clone ID: LIB3139-078-P1-N1-H1
ctcgagccgtttgttagtggaaaaaccttcaaatatgatataattggtgctggttcacattcttcagaagattttcctgaaaaggaagatcaagaaaaacccaaaaagattgatgccagattgagacaaagaatagatcctcaatacaatgaggttcaggctcagatggaaacaaatttgtttaaattgtctcttgatgatgttgaaactcctaaaggttccatgttggatcttaaaatttctcaatctaaaattgcacttcccaagaacacagttggaggaaccattctgcgtagtgatctattggcaaattttttgacagagggcaattttagagcaagtgttgatttgcagcgcactcatcgtat

SEQ ID NO: 44724 - DNA, 368 bp, Glycine max
  Clone ID: LIB3139-078-P1-N1-H10
cggctcgagcggctcgagcggctcgaggtgcagcacttaatggtgttgagggtttggactatatggaaagaattcctcttgccacatctgagggttttcctcatgtgctttcacgcaaaaatggcgaaaaaggcaaaaggagatttgtctctggggatggtgaagagatgacattgattccaggaaccagtgttgaagaggcttacaacaagctaatagttgaacttgagaaaagtgttcctacattggttggcattgaatgtcccaaggatgagaaacttcctcgtcgcaaaatttttgacaaacctaagacgcgctgcttcactattctccctatggagtttaatcttgtggtccgtcaaaagttt

SEQ ID NO: 44725 - DNA, 139 bp, Glycine max
  Clone ID: LIB3139-078-P1-N1-H11
caaatatttggttgatgagtgtccttttgcatttgtgaactagtatgtagtattttagtcacttaaataaagcgcattactatgtgcaatgagtgtgtttaaatcttaaaaagagagagaggtaaggaggagtgtttac

SEQ ID NO: 44726 - DNA, 366 bp, Glycine max
  Clone ID: LIB3139-078-P1-N1-H12
ctcgagcccaatcggctcgagatttggctgatgacaccatcaattttgaggcttttccccacaagctggtgcagtttggagagattcaggaaaaagttgtattgaaattttcacaagaggaatttcttacagcttggtcaactcaggtgcgtcctgcaacaactctgttagctgatgggtgtccatatttgtatgctatggtgcatgatagttcagtgtctacaataccaggtgattttgttattggtgttaagttgacaaccataaacaatatgtgtgcatatgggctcaatcctggtatttcaggttctcgtcttttgggcaccattcctcagtccatttcacagcaaactgtttggaatcaaa

SEQ ID NO: 44727 - DNA, 345 bp, Glycine max
  Clone ID: LIB3139-078-P1-N1-H2
ggtcataatatcaccattactgatggtattgacaaaactagtgcaactttgcaatttagaaagttagcagattgtgattttctcaagagaaactttaagcagatgtctaatgttttatgggtggctcctgaggacaaggcgagtttatggtcacaacttcattatgtttcgtgcaataatctggaaatgcaagaagcttattttgtcaatctcgtaaatgtgttacgagaattgtatttgcacagtccagatgtagcttgccaatttagaaggaaagctctttctcttattgaatggctgcaaaaagctgattgtccttccatagcacagattgaagagtttcat

SEQ ID NO: 44728 - DNA, 365 bp, Glycine max
  Clone ID: LIB3139-078-P1-N1-H3
ataaatcttataagattggcttccatggttgctggaagtaaggctgagcattataagcgaaatgcagaacatctattggcagtttttgagaaaaggttgaaagatatggctatggcagtgcctctaatgtgttgtgcagcagatatgttgcgtgtactttctcggaagcaagtggtcgtggttggtgaaaggacgtctgaggactttgaaagcatgcttgctgcagctcatgcagtatatgatcccaacagaacagttattcatatagatcccaacaacaaagacgagatggaattttgggaagtaaataacagtaatgttgctctcatggcaaaaaataactttgcagtcaacaaggttgtagc

SEQ ID NO: 44729 - DNA, 341 bp, Glycine max
  unsure at all n locations
  Clone ID: LIB3139-078-P1-N1-H4
aaaaaaattttnntttttaaaaaaaaaaaaaaaaaaaagaaaagagagaaatttaaaagagaaaatgggaaaaaaaaaaaaaaaaaaaaaaaaaaaaaaaaaaaaaaaaaaaaaaaaaaaaaaggggggggccccccactagggggctttcccccccggaaaaaaattccggcccggacccttaaggggacccaattttccctattgggggctgtataaaagctgggggaaaaaagggaaaaagaggttcccggggaaaaaattgtatcccttcaaaattccaaaaaaaaaaacagccgaaaaaaaaaaatgtaaaacccggggggcctaatgggggggcc

SEQ ID NO: 44730 - DNA, 359 bp, Glycine max
  Clone ID: LIB3139-078-P1-N1-H5
caaacagcagcagcctcaaccatgttcttccaaccatgtccaccaggaggcatcttctctttacgcgttggctatgtttataaacgagtacgaatcatacatttttccttcaaggaaatgcctgttgtagctcacttctctgacaaaaggggaatcagaaagttgcttctcatagaactccttatttgggaataagctgatggatgggtgcattctatactgaacattaagcagatgcttcttgtgttccaacgataccagcctctcaaacaaactttttccatattcagcttcttgagaaacctaaattttgatcattataatcatattagaaacttacccttaattatgcacacaat

SEQ ID NO: 44731 - DNA, 311 bp, Glycine max
  Clone ID: LIB3139-078-P1-N1-H7
ctcaagggtgatggtcttgccggtgaggtggaaagctctgacaccatcgacaacgtcaaggccaagatccaggacaaggaaggaatccccccggaccagcaacgtctcattttcgcctgaaagcaacttgaggacggccgtacccttgctgactacaacattcagaaggagagtactcttcaccttgttctccgtcttcgtggtggcatgcagatcttcgttaagacactcaccggcaagaccataaccctagaggttgaaagcttcgacaccatcgataacgtcaaggccaagatccaggacaaggaggg

SEQ ID NO: 44732 - DNA, 360 bp, Glycine max
  Clone ID: LIB3139-078-P1-N1-H8
ctccaaacatgataactcttatgggatttatgttcttactactgtctgcattgcttggttatatatactccccacaattggacacagctcctccaagatgggttcattttgctcatggactacttctgtttttataccagacatttgatgctgttgatgggaagcaagctagacgaacaaattcctcaagcccattgggggagctctttgatcatgggtgtgatgcacttgcttgcacatttgaagcattggcttttgggagcacagccatgtgtggaagaactactttctggtggtgggtaatatctgcaattacattttatggtgcaacctgggagcattatttcaccaatacactta

SEQ ID NO: 44733 - DNA, 226 bp, Glycine max
  Clone ID: LIB3139-079-P1-N1-A1
catctgaactggacttccacttattccgccatggcgggaaaggaagctcaagattgatcttggtttggttcttgtaaaaacttcgtcggcattcggaccgcctaagcacgttgggaatttgtaccggcgtcacaaaggataccgatcaaaatgagaatcgtggtcccacatttttcgatcaacgcttgcattggcaacaacagcaaggtccttgagatcagaaatt

SEQ ID NO: 44734 - DNA, 344 bp, Glycine max
  Clone ID: LIB3139-079-P1-N1-A2
caattgcatagcatagatttagtgcagagagagcacagcgtaacgactcagtcaaacactctgtaactctttattttattttctttctttctttctccgatcgcatagctcgctcgcaaccaccatgccttcccgaagaagaactctcttgaaggtcatcattctcggtgacagtggggtggggaagacatctttgatgaaccaatatgtgaataagaagtttagtaatcagtacaaggcaaccattggagcggatttttttaaccaaagaagtgcaattcgaagataggcttttcaccttacagatttgggatacagctggccaagaaagattccaaagcctt

SEQ ID NO: 44735 - DNA, 324 bp, Glycine max
  Clone ID: LIB3139-079-P1-N1-A4
ctcgagccttatcggctttagttttgaaaaaaaaaaaccaatgacaggcgtttaatcaatttgagcaggggcattctttgttttcttccattttgggtcccctcaaaagtagtttcaaaagggtatctctttcttcacagatatcatggcaaatcatacccttcgttcaggaaccgtttctgttgaatctatcttcacaagaaagatttaaacttttaaactttcttctattcgtgagacttatttttgtgaagctttgtttccactacttaatcttctattgctatttacttttaactcatacctattcttggttttacttta

SEQ ID NO: 44736 - DNA, 380 bp, Glycine max
  Clone ID: LIB3139-079-P1-N1-A6
cgattgctagaatggattttttatgctcagtcatctcttttaccaggctcttctctcttgctcttgcgggagagagccatgttcatgcatcgctacctgaggaagattattgggaagctgtttggccaaacactcccattcccactgcactgcgagagcttctaaagcctctccctgcaggtgttgaaatcgatgaacttcctaagcaaattgatgatacacagtacccaaaaacattcttctataaagaagaccttcattcaggcaaaacaatgaaagttcaattcaccaagcgttcttatgcacaaccttatggtgtatatacatgtgtaacggatattaaagacacctctaaagaaggatatagttttgaagagatt

SEQ ID NO: 44737 - DNA, 401 bp, Glycine max
  Clone ID: LIB3139-079-P1-N1-B4
ccctaagcaaattgatgatacacagtacccaaaaacattcttctataaagaagaccttcatccaggcgaaacaatgaaagtacaattcaccaagcgtccctatgcacaaccttatggtgtatatacatggttaacggatattaaagacacctctaaagaaggatatagttttgaagagatatgcatcaagaaagaagcgtttgagggagaagagaagttttgtgcaaaatccttgggaacagtaattggttttgccatttcaaagctgggaaagaacattcaagtactttcaagttcctttgtcaataagcaagagcaatacactgtggaaggagtgcagaatcttggagacaaagcagtgatgtgtcatgggctaaatttcagaactgcagtattttact

SEQ ID NO: 44738 - DNA, 170 bp, Glycine max
  Clone ID: LIB3139-079-P1-N1-B5
ctagtcgtagtattatgtcttttattctctaccttcatctttcttggggcgacaccagatgatggaggcgactgctaatcgaaacgctgtcattgcgccaatcgcggcgttgttgttggtgtgtgcatctttcagcggagtgttaagtacacctcttaatgatggatttt

SEQ ID NO: 44739 - DNA, 335 bp, Glycine max
  Clone ID: LIB3139-079-P1-N1-B7
ggaattgattctcctttttgaagttatagaaaagtgcacagtgtgtgcatgacggggaagtagagggtgtgctacatgcaatgcataccaagaacctggattttataaggaaaatcagatgactcagtgtgcaacttgttatggaaggggtttatatttttataaagatggttctgacactgtattgttgaaatgtaatgtcttgggaaagtattcttttgtaacatgttgatcttttcttttttttttatgtttcttttgtttattatagtttgttttttttttttttcgtaatattggttctttatttttattgttttgtttctttatttatt

SEQ ID NO: 44740 - DNA, 237 bp, Glycine max
  unsure at all n locations
  Clone ID: LIB3139-079-P1-N1-B8
aaattttgnattatagtttttgtatggagatgataacttagggagtgttcatgaatatgtcaggccgtactttagtggttctaaattgaaaagctttctagctagtcataacatcaccattactgatggtatttacaaatcttgtgcaacttttctatttaaaaagttagcagattgtgattttttttaatagaaactttaatctttattctaatgttatttttcgtggctttcttt

SEQ ID NO: 44741 - DNA, 133 bp, Glycine max
  Clone ID: LIB3139-079-P1-N1-C11
ctctgttgcaaccatatttgctacaaccatgaccacataggtgtgatcatttaagtttttaggggaccttcttactaaaaagaacattgactcatgttgtgacaccccaatgcatgtacaatccttcagtggc

SEQ ID NO: 44742 - DNA, 401 bp, Glycine max
  Clone ID: LIB3139-079-P1-N1-C2
cgcgcattcacaaatattgttgtagaggtcactgccggaagaagggagcaacaccatctttcattgtgcggcgatctcttgtttcttccatcatcaccgttttccggcgatccctaatcctcgcaaacagaaatgacgacatcaaggcgccttgcggacaggaaggtggagaagtttgagaagaacatcacaaaaagaggatttgtgccagacactaccactaagaagggaaaagactaccctgttggcccagtgctgctcgtgttcttcgtctttgttgtcattggatcatctctcttccagaatatcaggacagcaacgagtggaggcattgcttaaatggagctttgttttggattttgtgtcatctttcttttcttagcctcctcgtagaaaatgct

SEQ ID NO: 44743 - DNA, 351 bp, Glycine max
  Clone ID: LIB3139-079-P1-N1-C3
acttattcagctatcttcatatgttgcataagtttcacataatgcagctatcgccataggttgcatggaaaattatgtgaaacttattcacttttcttgaacggttctgctctggcggtgcttctgttctacaactggatctcaaattctcattatctagtctctcatgtcttaactcctttttcttgttcatcgtaccgtgtctggtctctcacaaaatttgctgattaagatgtacatgtaattacaatactctttcgaggtcaagtaaacgatgaaaagaagcctagtcaagaataaaagccggtgaaacacgataagaacacctttaggtcctttactttataacca

SEQ ID NO: 44744 - DNA, 345 bp, Glycine max
  unsure at all n locations
  Clone ID: LIB3139-079-P1-N1-C8
ctcgtcgcgatgttacttttagctgaatccgagcgaactgggtacccatacgtgactggatcgtgtgntatctctatcaaatacaaagatgggattctaatggccgctgacatgggaggttcgtatggatctacccttcggttcaagagtgttgagcgtatcaagcctaatgtaaagcattcttttcttggtgcttgcgtgtgtgattaagtactttcatgagattttgttttacctttgaagaggttattactatatgacaacatgttgtatcatttgtaatatcttatatttgtcgtaaggggtgttcataatataattttatctctatctatcttattttta

SEQ ID NO: 44745 - DNA, 303 bp, Glycine max
  unsure at all n locations
  Clone ID: LIB3139-079-P1-N1-D10
aaataatgttactttatttctgacagcccatatcanattgggtgattaataaggctgaaaagggggctggaccaatccaacctgggaattactggtatgattctcgagctggattttggggtgtcatgggtggtccatgtcttggaataattctgccattcatagaatagttccggcatccaatgccagataaatgtgctgttggaaatactgactgtttatgtaatggtttatatctttaccaaaaagatttatttatgcttttttgtagaggactctcccgagattgctatagaaatttta

SEQ ID NO: 44746 - DNA, 390 bp, Glycine max
  Clone ID: LIB3139-079-P1-N1-D11
ccggcagccgctttctttccgcctcctggggcgggatccagtgggagaagcaggtccgcacctgcgtccagatccaccgtcaaggcggcatgtccgtactcgacaccggcgctgccggcttcgtcggctcccacgtctacctctagttaaaacgacgcggagactgcgtcgtctgactcgacaactgcaacgactactacgatccgtctctgaaaaaagcccgcaagttcctcctcgccaagcatgacgtctttatcgtcgatggcgacctcaacgacgccaagctcttggcaaagctcttcgatgtggtcgcttttacccacgtgatgcaccttgcggcgcaggccggtgttcgctacgccaaggagaattcccactcctacgtccaca

SEQ ID NO: 44747 - DNA, 391 bp, Glycine max
  Clone ID: LIB3139-079-P1-N1-D12
ccttcttcttcttttttttgtgatccatcacacacctattgcaggtcaagccactcaacttaggctaacataaaaacatggaactaagcaccatgtttttcctgtgtgcttctcttctcttcattgttctctttttcaggacactcatcaaaccttactatgtcttcaaacgccgtgacttgccactcccacctggctccatgggttggccttacataggagaaacctttcaaatgtattcttaagacccaaatgtcttttttgcctcaaaaataaaaaggttcaactcactcttcatgccaacaactctttcactttctttaacggacagacatacagaaatttcatattttttttttgttatctaggtttggctctatgtttaagttcc

SEQ ID NO: 44748 - DNA, 397 bp, Glycine max
  Clone ID: LIB3139-079-P1-N1-D2
agaaagtagtgatgttagaagcaaaaagaagaagaagcagagaagcgaagatgaagaggcgacgaagcagttgcgtttctttgagtcggcgatgggtattgagctttcttcgctggagttggaatccctcaaagataataagtgcattttggaggtatcagaagccgctgattcagacgtgacagtattgggcaaaactattagggcagcgtttggcgcgtcttggaaagaggctctctgcgaagggaagcctgtagagggaaaagtcattgctggaagccccgcagttcttatcataacttcttctgctttaagatgcatagatctcttaagaggctttcgctctatgactgaacaatgccatgctgcaaagttattctcaaagcatatgaagctt

SEQ ID NO: 44749 - DNA, 397 bp, Glycine max
  Clone ID: LIB3139-079-P1-N1-D3
ggacaccataaaatttttttctgcagagcacaagaccatgagaaaggccacaacattgagcatcgcgggtaccacagtgttctatttactctgtggatgcatgggttatgcagccttcggagataatgcacctggaaatctcttgactggttttgggttctataacccttattggcttctggacattgccaaccttgcaattgttatccacctagttggggcatatcaggtattatattacatatgatccttcaatgctagttatctgttgtgaagtctacatattgacgcaagaattatgatgggctcaagagcttctgagcaggcagcagtagacaagaaatgaaaaataagagagaattgatcgaatattaacttataatgatcttgccttaat

SEQ ID NO: 44750 - DNA, 372 bp, Glycine max
  Clone ID: LIB3139-079-P1-N1-D4
ggaaaaccttgactatctttctctctgcaagcaagcgaccatggcggatggaagcaacggcggagtggtgatgcttcaagccccaccgtattacggttggcctaccctatctaacacggcaataatcgactcattgctcttacattgttgacgactacccagaccccagagtcaaacttgagggtgaccggctcgtggaggatgagatgcgttgcagcaccaataagcccaccgcttatctcaaagattatcctcctgtttccaacttcaattttcagcaaaactacccaatgattgctagagagtccgaaccttttatgagccgttagacctttccgtgctcgtgattgattgcgctacgaattggaaatg

SEQ ID NO: 44751 - DNA, 353 bp, Glycine max
  unsure at all n locations
  Clone ID: LIB3139-079-P1-N1-D5
agggagcntnnttttttgtgacaacgacttcatcttaacannttcaaanntttttcttgctttttttctttttaaatcgtcaactttattnntttttggtcctctttttggttttactattatttctatagttttggatttcaaatgaagtattggtgtattgttttaaggcttaagttctcatcttatttgatgcattttacatcactatatnatgtatgtctcaaaggtgatcattgaagtattgaaaattagaggccacaaacacaagctcaacttgtcacttgattttcatgtttatgtgcaggttttgaagaagttaatcacatattattgaacttagatggataaat

SEQ ID NO: 44752 - DNA, 153 bp, Glycine max
  Clone ID: LIB3139-079-P1-N1-D6
aaaaagaaagaaagatactattatcgttcattgctttgtagtaagagcagatcatcaaaaatggttgtgtcttggtcaagaaggaacgttttccgccgtgccaagaaggagaagtcacaaactcaattggaagtggaggttgagattcccata

SEQ ID NO: 44753 - DNA, 176 bp, Glycine max
  Clone ID: LIB3139-079-P1-N1-D7
ctcaaacgacatttactttgtaatgtaagtgataagggtggccatgtgatgggatctgaatgggatgagataagtaccaattagcgattctgcttgtgtgctataatcctcttagatacgataatctgtttcttccttattattggaactgatttattgttatgttgaaagtaagg

SEQ ID NO: 44754 - DNA, 346 bp, Glycine max
  Clone ID: LIB3139-079-P1-N1-D8
cacaaagaaacattttttttgtgtgtgtatggtgatgataacttaattagtgttcatgaataggtgaagccttactttagtggttctaaattgaaaagctttctagctggtcataatatcaccattactgatggtattgacaaaactagtgcaactttgcaatttagaaagtttgcagattgtgattttctcaagagaaactttaagcagatgtctaatgttttatgggtggctcctgaggacaaggcgagtttatggtcacaacttcattatgtttcgtgcaataatctggaaatgcaagaagcttatcttgtctatcttcttaatgtgttacgagaattgtatt

SEQ ID NO: 44755 - DNA, 390 bp, Glycine max
  Clone ID: LIB3139-079-P1-N1-D9
agttttagtgcattttttttaaccgcaaagattcatttagggaagcttttggtggccacaggggtggccacaataagcccaagttcgaagctgaagaactcaatgaagaagccaagaagactaatcccataatgcacgagtgtccaatttgtggcatgtaatactttctgggccatgcactggggggtcacatgagaaaacacagaggtgccattagtgagaacgacaataataatgaagctgtgtcttctattaagcaagcaattgcaaaagctccggtttagaaacgatcgaatagcatgatgggttatgtgcttggagattgacctgaattttgtcgcctttgtagaatgacttgatagtgtttttttgaatcattgcttcttgagt

SEQ ID NO: 44756 - DNA, 329 bp, Glycine max
  Clone ID: LIB3139-079-P1-N1-E10
tgacaacgtggtattgtatagctgccactgaatttggttgcctggtcgtcaatgctcccactgccaacactattgctgctgccgagcatgggatcgctctccttgctgccatggcccgcaacgttgcccaggctgacgcctccaccaaagctggaaaatggcagagaagcaagtatgtgggagtttccatggttggaaagacattggcggtgatgggttttggaaaagttggatctgaattggctcaggctcgcaaaagggttgtgcatgcacgtgattgctcatgacccttatgctcctgctgacatggctcgtgctattggtgtgga

SEQ ID NO: 44757 - DNA, 181 bp, Glycine max
  Clone ID: LIB3139-079-P1-N1-E11
catagcttcttttctcccgatggtaccaagttgagggtgtttgttggctgtgctgagggctggaatactattgagtgatactttctatctttgatcagacaatggatgaaacccttcttgtagtagagataccatattgcatcttacttataccattaatatctggaatatcacacttatc

SEQ ID NO: 44758 - DNA, 308 bp, Glycine max
  Clone ID: LIB3139-079-P1-N1-E12
tttttaatgagattttttttagatatagctatgaaaaatggctgcgccagtttaaagctccagggatgtctttacaatccttcaaaaattatgattctttgtgtgtgtatggtgacgataacttaattagtgttcatgaatttgtcaagccttactttagtggttctaaattgaaaagctttctatctggtcataatatcaccatttctgatggtattgacaaaacttgttgcatcttttcaactttgaaatgttgcagattgtgatttttttaagaaatactttaatctgatgtttaatgttttatt

SEQ ID NO: 44759 - DNA, 390 bp, Glycine max
  Clone ID: LIB3139-079-P1-N1-E2
gtgccttgggaattagaatggctctccttggatcaaacataacaagcgaggttggactccgtttgctcctttgtcctcttggttccaacgttgtaattagaacagcatgctgtactgtgggagttgctttgcctgtgtactctacgttcaaggcaatagaaagtaaagatcaagatgctcagcataagtgtcttctctactgggcagcctatggttcattcagtctcgctgaagtgttcacggacaagcttatttcttggtgtcctatctactatcacctgaagtttgcatttcttgtttggcttcaacttccatctaccagtggtgcaaaacaaatatatgcaaaccacttgcgccccttcttgttgaggcatcaagcacgagttgatc

SEQ ID NO: 44760 - DNA, 398 bp, Glycine max
  Clone ID: LIB3139-079-P1-N1-E3
gaaatcttccgcactgatggtgaaaatgttcttcaatttccaccacctcatgtagccaaagttagtaagtctgggtggatgactgatgaggaatttgctagagaggtgattgccggtgtaaacccaaatgtgatccgtcgtcttcaagaattcccaccaaagagcacacttgatcccacactctatggtgatcaaaccagtaccataacaaaagaacaattggagattaacatgggaggggtcacagtagaagaggcacttagtactcagagattattcatattagattaccaagatgcattcatcccatatttgacgaggataaacagcctacctactgcaaaagcttatgccacatggacaatcctgttcttgaaagatgatggtactttgaagcc

SEQ ID NO: 44761 - DNA, 187 bp, Glycine max
  Clone ID: LIB3139-079-P1-N1-E8
aaagaatcgatccttatttcaatgaggttcaggctcagatgggaacaaatttgtttaaattgtgtcttgatgatgtttaaactcctaaaggttccatgtttgatcttaaaatttctcaatcttaaattgcactttccaaaaactcatttgtaggaaccatcctgctttatgatctattttcacattt

SEQ ID NO: 44762 - DNA, 243 bp, Glycine max
  Clone ID: LIB3139-079-P1-N1-E9
ctggttatacttttatttcagcttattctgttccacaggctactgccattatcttctgaaaatgcgggatcctctgcatgatctggaattcgtgttttctttcgcttgttcgtttgtttaattcaataatggaaattaggcatgaccctcttgttgagtatgctctgcctatctgaaaatttccacacctcttttaattgtcgtaatgatgtgtgaagtgcgctttattttaaaaaataaaat

SEQ ID NO: 44763 - DNA, 348 bp, Glycine max
  Clone ID: LIB3139-079-P1-N1-F11
ctttaatcccttttctatatcttcagaaaattagatctgcttcagatctagggtttccctttggcaaatcacgagtccgttgagtttgattttgtggatgaaagcatagggatagggcttttgcaaacctctccaatgtttctcgaaattatatgaccatgcgtcgaattcgtatgctgcactccttctccgtcgtgttcctctactggttctacgttttctcatgaactccctctcaaatccgtaattaattagatcgatctccttccgtagttaatccttgtctctttttcaataattaattagatctgcgtctcctatttcctttttttggtttgttctgttatc

SEQ ID NO: 44764 - DNA, 377 bp, Glycine max
  Clone ID: LIB3139-079-P1-N1-F12
ctagttctagatttttatctgctcgagcggctcgaggtttgttgttgtaactcgttcttcttgttttgttgttctgtgtttgtgtatgttttttctctcacctgaaaatgtcttgctgcggtggtaactgtggttgctgaagcttctgcaagtgcggcaacggctgcggaggctgcaagatgtacccagacttgagctacactgagttaaccaccacctagacctttttcatgggagtggcacctgttaaggctcaatttgaggttgctgatatgtgtgtgcccgctgagaactatggctgcaaatgttgtccaaaactttttcctgctattccctgtcacttgcattgtgaggttgtttttgttgatgctattttt

SEQ ID NO: 44765 - DNA, 404 bp, Glycine max
  Clone ID: LIB3139-079-P1-N1-F3
atacgctctcatcattctttcattcgctgtccgctaatttccctttgtcctgccttgtcgttttgatcgcctcccccaaactaaacgacccctctcctcttccggaaccttcgccaccattcttcgcccaattttcccgcgctttctcgaaccttcgacgccactccggccaccgcagagtgaacaaggtcgtggaagatgagcaacgtgttcgagggttacgaacgccaatactgctagctctcggcgaatctagcgaaaaagtgcactgccgctggtgctcttaatggagagcaaaagaaacagaaagtttctgaagtaaaggctggaattgatgaaacagaagccttgattagaaaaatggaccttgaggcaagaagttacagccaaacatcaagggtgtg

SEQ ID NO: 44766 - DNA, 379 bp, Glycine max
  Clone ID: LIB3139-079-P1-N1-F4
gatcactacaacacactttaacagagccttattcttgagaaacaagtttcttcttcaaaacaacatgtctggaaccgtgattgtttttgactttgacaagaccattgtcgatgtcgacagtgacaactgggtcatcgacgaattgggtttcaccgatttgttcaaccagcttcttcccaccatgccttggaactctctcatggacaggatgatgatggagcttcattcaaaaggtaagaccatagaggacattgaagaggttctgcataggattcctttgcacccaagagtaatacccgctattcaagcagctcatgctttcgggtgtgatttgaggattgtgagtgatgcaaacatgttttttattgagaccattctg

SEQ ID NO: 44767 - DNA, 376 bp, Glycine max
  Clone ID: LIB3139-079-P1-N1-F5
agggaatgcttaccggttcttgttaccattctcaactggtcctttggtagaaatgaccaacctagaggtgagaccacctaccagattgctttgtctatcaaggacgaagtggtagaccttgaaaaggctggcatcactgctaatcaaattgatgaagctgctttgagagagggtcttccactgaggaaatcagagcaagctcactacttggactggtcttgtcatgccttcataatcaccaatgttggtgttcaggataccacccagatccacactcacctgtgctacttgaacttcatcgacatttatccactccatcatcgacttggaccgcctagttattaccattttgaactctcgctccttcgagaagctt

SEQ ID NO: 44768 - DNA, 78 bp, Glycine max
  Clone ID: LIB3139-079-P1-N1-F7
ctcactagcaactatatgctgggcggcttctttatgagccctagctcggggacccatctacacatctgtataagccat

SEQ ID NO: 44769 - DNA, 242 bp, Glycine max
  Clone ID: LIB3139-079-P1-N1-F9
aatgaggaacacatatttttattgaaggaccgcaacaaaccaataatcttcaccatggcaaggcttgaccgtgtgaagaacatcacggggcttgtcgagtggtacgggaagaacgcacgccttcgcgagttggtgaacctggtggtggtggctggagacaggaggaaggagtcgaaggacttggaagagaaagctcttatgaagaagatgattggtcttatctagacctacaagttgaacgg

SEQ ID NO: 44770 - DNA, 128 bp, Glycine max
  Clone ID: LIB3139-079-P1-N1-G11
gtaaaattctgattcttttattttcagccacattttaaacggaaagatctgcacgttgaccgggggcaggatcagcttttggtgttgatcatccatattagaccttgaatagtccaagttataatatt

SEQ ID NO: 44771 - DNA, 311 bp, Glycine max
  Clone ID: LIB3139-079-P1-N1-G12
taatagtgttgtgttctttcccaaaattccagatgctttgaagtctcccacaggagatgaagcatacaatgaaaatggtttagtgcctcgaacaatacgtttgctcaaggataagtacccagaccttgttatctatacagatgttgcattagatccttattcatcagatgggcatgatggcttatgtttgagtagatggagttttttttaatgatgagacagttcttcagctatgtaaacaagctgtatcccatgcccaagctggagcatatgttgttagtcctagtgatatgatggatggtctgttttga

SEQ ID NO: 44772 - DNA, 360 bp, Glycine max
  Clone ID: LIB3139-079-P1-N1-G4
catatacctgtgtttatctactaaaaggggttcaattctagctagttacattacatctgacgcgaccatgaacatggcgatcgagcttatgttactggatttcgcagttctatcatgtttagacaagtctattatattacatgacaacgctcatgcggatagggccacaaggcgcaccgacaacgaggagatgtcaatgctcgcggagtgtctagtgaaacacgacaaggtgtacaacgcgctccgggagatggagaagaggtcaaaaatctataagaacaatctgcactttatcgttgaacaaaactctatgaaccgatcttacaagttgcgacacatcgtgtaaaatgatctcaccaa

SEQ ID NO: 44773 - DNA, 238 bp, Glycine max
  Clone ID: LIB3139-079-P1-N1-G5
ctcctttcaatatgagtttacttcactcacaagtcccctgaggttgaaaatgattgtgattttaaagtgcatctgttcttttcatcattcgagttgcttgaaaagcttcatgaaaaatggagtacagtggagaaacctccatacccagctatgtattctagtatttatggaggtatcatacttgatccagcattgttggtattccccattgatgatcacatggtttacagatggcatg

SEQ ID NO: 44774 - DNA, 386 bp, Glycine max
  Clone ID: LIB3139-079-P1-N1-H1
attttagggaacggcttgttgtatgtagtggattgcttccatggtaagcaactttgggaaaattgtaaacaaaagtacgagcccttatggattaaaggaggaaatcactgtgatttggaagcttacccttaatatataaagcacctcaagaaattcatcacggtcattgagaagtcaccacatcaaaaaactggatctgatcgtattcctgatcaacttgacaaacctaggaacagcatagattttcgagagaaatccagacccaacatggatcaaagggagaattttgagagtattgatcagaaagaaaagccttgtgcaagcacagaccatatagagaagtcaagagccagcgtagacaggagagataaatcaaggaagagtat

SEQ ID NO: 44775 - DNA, 371 bp, Glycine max
  Clone ID: LIB3139-079-P1-N1-H11
atatgatgaacacttattctttttgaaggaccgcaacaaaccaatggtctttaccatggcaaggcttgagccgtttaataacatcacggggcttgtcgagtggtacgggaagaacgcacgccttcgcgagttggtgaacctggtggtggtggctggagacaggaggaaggagtcgaaggacttgtaagagaaggccgagatgaagaagatgtatggcctcatcgagacctacaagttgaacggtcaattcagatggatatcctctcagatgaaccgtgtgaggaacggagagctctaccgtgtcatctgtgacacaaggggtgcctttgtgcagtctgcagtttatgaggcctttgggttgactgtggttg

SEQ ID NO: 44776 - DNA, 387 bp, Glycine max
  Clone ID: LIB3139-079-P1-N1-H6
cttttggggaagaggtttttgttttacagcagcaatggtgtacgtcaaggctcagaaatcaaaagcctacttcaagagatatcaagtcaagttcaagagaagaagagagggaaaaaccgattaccgtgccaggattcggttgattaatcaggacaagaacaaatataacactccgaaataccgatttgttgttcgctttagcaacaaggacattgttgcacaaataatatctgctagcattgctggcgatattgttcttgctgcagcatatgcacatgagctgccacaatatggtcttgaagtagggcttacaaattatgctgcagcttattgcactggtctcctgttggcccgaagagtcctcaatacacttgaaatggatgagga

SEQ ID NO: 44777 - DNA, 352 bp, Glycine max
  Clone ID: LIB3139-080-P1-N1-A1
accgtttccaactttacattttcccaccaaccctcctctccattcctcaaaacaatcgttaatctcttctccattgtgaactctgatattctccaagtacacaacacaaacacacatcaatttatagcacccgatttctcttttccccctcaaattcagctccattttgttacagattcaaataataagccaagcagccacaccatgatctcgtcaatgaaatgcacagcctcatctctcacatgttctgctttctcaaacagaaagcttcccattgcaaggcctcaactcgtgacattaccaaccatcaacaacgttgaacaaaacatgggtccctctcagttgtgttcac

SEQ ID NO: 44778 - DNA, 406 bp, Glycine max
  Clone ID: LIB3139-080-P1-N1-A10
gtgaaagaagaagagaatgaaattgaagggtcaaacacaggctacaaagttggttaatctatacagattttgcgtttcgtcttcttcttcttcaatctctcgcttcaaccacttcactctcactaccaccgattacaataaattcaaattcgcttgcgcgaaagcgaagaacctccaactctcactctcccaacgcgccttcgtttttctttcccctcttaacgttgccgctaattacctccgtagttatcgcgtttctggcagttacatatgcagcggaagcattttaggtgtgtcaattgcatctgcaccaattatagctcatgccatggatggtgagctgcatatctgattggtattatgtactttagtttttctgtttattttcttagtaactgtcctcagt

SEQ ID NO: 44779 - DNA, 354 bp, Glycine max
  Clone ID: LIB3139-080-P1-N1-A2
ctcaaaggcccacggttcctcactcctcttccatagcctgcggccttcactctcatctcctggtctccagtgagatgaaccctagctccaattggtccctttaatcaattacctcttaattagtaattacttaatctcaattagcctttcactctcccacacaacaacatcatgggcgtcaaaggttttgtcgaaggaggcatcgcttccatcattgcaggatgttccacacacccacttgatctcatcaaggtccgcatgcagcttcagggcgaaaacaatttgcccaaaccggttcaaaatcttcgacccgcactcgccttccaaaccggttcgaccgtccacgtggcagcg

SEQ ID NO: 44780 - DNA, 398 bp, Glycine max
  Clone ID: LIB3139-080-P1-N1-A5
gttctaaattgaaaagctttctagctggtcataatatcaccattgctgatggtattgacaaaactagggcaactttgcaatttagaaagttagcagattgtgattttctcaagagaaactttaagcagatgtctaatgttttatgggtggctcctgaggacaaggcgagtttatggtcacaacttcattatgtttcgtgcaataatctggaaatgcaagaagcttatcttgtcaatctcgtaaatgtgttacgagaattgtatttgcacagtccagaggaagctcgccaattgagaaggaaagctctctctcgtattgaatggctgcaaaaagctgatgtgcctaccatagcacagattgaagagttccattctattgcaaggatgataaatgcttcc

SEQ ID NO: 44781 - DNA, 205 bp, Glycine max
  Clone ID: LIB3139-080-P1-N1-A7
accgacagaccgtccacaacctgaaggtatgaagttcttcgtttcccccgtcgtgcagagctccgtcgaggtcaagaatgcccaggatctgcccaagctggtcgagggtctcaagcgtctgtccaagtccgacccttgcgttctgaccatgatcaacgagttcggtgagcacgtcgttgccggtgctggtgagctccaccttgag

SEQ ID NO: 44782 - DNA, 260 bp, Glycine max
  Clone ID: LIB3139-080-P1-N1-A8
ttgcacaccagaagagccgctacatatttgatctataccatcggaggaaggaaatttctaaagaactgtatgaattctgtttagatcaaggatatgctgaccgcaatctaattgcaaaatggaagaagcctggttatgaacgtctttgctgcctgaggtgcatgcagccacgtgatcacaattttgccaccacttgtgtttgcagagtacccaagcaacttagggaggagaaggtcatagagtgtgttcactgtggatgc

SEQ ID NO: 44783 - DNA, 399 bp, Glycine max
  unsure at all n locations
  Clone ID: LIB3139-080-P1-N1-B1
ccaattttcaataattcacgactccttccgagatctctctctctcgcccacaatccaaccatggcgaatacggggaatttagacgcggcgatagagcaattgctgaacgtggagaagcagatgaggctcgccggtgacgtggcgggtaccagaaaagcagccaccgatattttgcagctctgcttcgatgcacgagcctggaaaacactcaatgaccagattgtcgttttgtcaaaacgacgtggccagctcaagcaggctgtaacagctatggtgcaacaggctatgcaatatattgacgagacaccagatatcgaaactcgcatagaactcatcaaaacgttgaacagtgtgtctgcagggaagatatacgtgganaatgagagagctcgattgatc

SEQ ID NO: 44784 - DNA, 401 bp, Glycine max
  Clone ID: LIB3139-080-P1-N1-B10
cggctcgagaaaacactctcaacaaatgaatattctcggacaatcattcaacgaatcaaacaacggaagctactcttgttcgtcgccggagactggtagctcctctaacattccaaacacttttcactccgacgaggaagtgcacacactagcttcggcgcgtcctaagaaacgtgcggggcgtcgaatttttaaggagacaagacacccggtgtaccgaggagtacgaaggaggaacaacaacaagtgggtctgcgaggttcgtgttcccaacgacaagtccaccaggatttggcttggaacgtatccagtgcctgagatggccgcacgtgcgcacgacgtcgccgcgctcgcgcttcggggcaagtcggcttgcctcaacttcgccgactcggcgtggc

SEQ ID NO: 44785 - DNA, 345 bp, Glycine max
  Clone ID: LIB3139-080-P1-N1-B11
catctctatcaccccattttttcaaacacctacacaaaatgtgcttcctcaacacaaagtccctggctcacttcatgttgctaacaacaattgtagttggcattgcaatgggagattcatcaaaggacaaagaggaatgcactgagcaattggcaggcctagcaacatgtctgccctatgttgggggtcaagcacaagctccaaccccagattgttgtagtggtctcaagcaagtgctcaagaacaacaaaaagtgtttgtgtgttattatcaaagatcgcaatgatcctgatctgggtggtttacagattaatgttcctttggcttttgacctgcccacagctt

SEQ ID NO: 44786 - DNA, 411 bp, Glycine max
  Clone ID: LIB3139-080-P1-N1-B2
cagatcccaccactcgtatcactatacctgagattttggatgatgaatggtttaagaaagaatataagcctcccatttttgaggagaatggggaaatcaacctcgatgatgttgaagctgtctttaaagactctgaagagcaccatgtgacagagaaaaaagaagagcagcctacagccatgaatgcatttgagttaatctccatgtccaaaggactgaaccttgaaaacttgtttgatactgagcagggatttaaaagggaaacaagattcacctcaaaatcccctgcggatgagataatcaacaagattgaggaagccgcaaaacctcttggctttgatgtgcagaagaaaaattacaagatgaggcttgcaaatgtgaaagctggaaggaagggaaaccttaatgttg

SEQ ID NO: 44787 - DNA, 390 bp, Glycine max
  Clone ID: LIB3139-080-P1-N1-B3
ggcttttccccacaagctggtgcagtttggagagattcaggaaaaagttgtgttgaaattttcacaagaggaatttcttacagcttggtcaactcaggtgcgtcccgcaacgactatgttgggttgatgggtgcccatatttgtatgctatggtgcatgatagttcagtgtctacaataccaggtgattttgtcattggtgttaagttgacaaccataaacaatatgtgtgcatatgggctcaatcctggatttcaggttcttgtctttgggcaccattccttagtccatttcacagaaaactgtttggaatcaaatggcaacagtgagaacaccattggattttgattcttgcaagcagagcttttgtcaaatttctattgaccttctc

SEQ ID NO: 44788 - DNA, 344 bp, Glycine max
  Clone ID: LIB3139-080-P1-N1-B4
caccttcctcttttttttgtcaaccggggcagggctatgggcaggatggctatggtggatgggatgcgccacctcaatcagggtatggtcagccaccatcatatgatcagcagcaaggttatagctcagctgctagctatggtagcaacccagtcccagagggccacactgccaattacggatcccaaggggattctaacccaagctccacctgcccagcctccaagtcaaggttatgggactggccaacaacctagcccaaatgctgccaactatgcaccacaagctcaaccaggttatggggtgcccccaaccttccagccggctatttatggcagtcaacc

SEQ ID NO: 44789 - DNA, 371 bp, Glycine max
  Clone ID: LIB3139-080-P1-N1-B5
tcgagacacagtatcattgtgatcattttttaatttctcagatttatccgacgtcgctgcagatccaccaaccgttatggctgccttcagcggtgatgaaacggcaccgtttttcggcttccttggcgccgcagctgccctcgtcttctcctgtatgggagctgcctatggcacagcgaagagtggcgtgggcgtggcttccatgggtgtaatgagacctgagctggtgatgaagtcgattgttcctgttgtcatggctggagttttgggcatttatggccttattattgctggtattatcagtaccggtattaatccaaaggccaaatcctattacctctttgatggttatgcacatctctcttctggtc

SEQ ID NO: 44790 - DNA, 402 bp, Glycine max
  Clone ID: LIB3139-080-P1-N1-B7
ggcgcagcagcacccatctcgtgaagagagactccatggccgagtgcaccgtccccaagtgggcccaaaaaaccgtcagcttgccccctctccggcgcggctgtcatcttgtcacttccaagatagtgaaggaaattgagcaagacctctccggcttcaagtgtggcctagctcatctcttcttgcagcacaccagtgcttctcttaccatcaatgagaattatgactcagatgttcgcgaggataccgaaaccttcctcaatcggatagttcccgaggggtcatctgcgccatggaagcatactctagaggggccagatgacatgccagctcatattaaatcatcgatgtttggttgtacactcacgataccgattacaaatggcaagcttaacatgggga

SEQ ID NO: 44791 - DNA, 419 bp, Glycine max
  Clone ID: LIB3139-080-P1-N1-B8
cacgactcctgttaccttatcgacgccgtaacagctccctccggggtaattaccaaattgccctcgggggatacctcaattattttctccgaggacgacgaggagattgtgaactccgtcttcgagggcgtcacgcccttctacgcgcttgagttccgcctttgctactggtgccgggccgctgggaatttgtgcggggcgcttcaactgctatccgggcggtcgttttgggggctttccctggaggggtttgataattaccttcatttttgggtatttctttcatatttcccgggggtgtgtttgttataatatttaggttagtatttttgataaatttccttatatttttttttttttatttttattattttcacttgttttatttattttttaatatatctattttttccttaatt

SEQ ID NO: 44792 - DNA, 385 bp, Glycine max
  Clone ID: LIB3139-080-P1-N1-B9
agaaaccattggagggtttccatatagttgttgatgcaggcaatggagcaggaggcttttttgcagcaaaggttctggaacctctgggggcaataacttcggagtcaatttttggagcctgatggcttgtttccaaatcatatcccaaatcctgaggacaaaacagcaatgaaagctataacccaagcagtccttgataacaaagctgatcttggaattatctttgatactgatgtggacagatctgctgctgtggatttcactggccgtgaattcaacaggaatcgtttaattgccttaatggcagctattgttcttgaggaacattctggaacaactattgtcacaaacagtgtgacttttgatgggcttaccatgtttattt

SEQ ID NO: 44793 - DNA, 352 bp, Glycine max
  Clone ID: LIB3139-080-P1-N1-C1
ctgaaacaaagattgagggcaatgaatatgaggctgacctcaatctacgtggcatttcaaactatttttctagtaatggtggcaaatgggcttatagcagcactggagtatttctaggaaatgataaagctgattatgtagcaacaaatcagttttacttgaatattagtggtcctgattacttcaaaacagcccgcatggcccctctgtatcttaattactatggcctttgtatgctgaacggcaattataaagtgaaacttcattttgctgagatagcattctctgatgaccaatcatatagcagccttggaaagcgtgtattcgatgtttcaattcaaggttttaaata

SEQ ID NO: 44794 - DNA, 406 bp, Glycine max
  Clone ID: LIB3139-080-P1-N1-C10
ctaagttgcgtggatcgaaccaaaagacatagcattagaattaagatgcagcagagttcaagatcacgaaaagcggcattgagagtcagagttccttcgcggaagctcatgattctctctctcgccattttcgccattctccctcccattttcttccacttccgcctccgacgcctccaacagctgcaactcacaaagtgccgttggctcaacgatcctcctctagtctgcgcccacggtggcgattcctccaaggcttctccaaacactatggcgtcgtatttccacgctcttcaagctcgcgtcgactgcattgagatcgacgtttctcgttcttctgacggagttctctttgctcttccatgacagggatttgcagcgcttaaatggaaacactagttctaaa

SEQ ID NO: 44795 - DNA, 407 bp, Glycine max
  Clone ID: LIB3139-080-P1-N1-C11
cagtttcaaaatgcaatttgggagtgaaatcctttttcaatggggtaggcagatgctgcatacactgacagatgcttcgatcttattgttgttgattgagtgagaacaaaagccccacttaattggtcctcaagccatagccccagtttctagcttcgtagtcttctgctgtcatcttgctccttttagagtttcagggtcttacatagtgtcccacgtctccattaaataactttttccttaacatttagtgcgccaacgactatactagtagtaattaattaagtctacgaatttatatatatatatatagtatgatagcctctaaaaaggaaatggcaggaagggtaacatatgcatgcatggaatacttgttttttaaaacaaatgttgctttaaaaagttag

SEQ ID NO: 44796 - DNA, 412 bp, Glycine max
  Clone ID: LIB3139-080-P1-N1-C12
caccttcctctggttattgccaaccggggcagggctatgctcaggatggctatggtggatatcatgcgccacctcaatcagggtatggtcagccaccatcatatgatcagcagcaaggttatagctcagctgctagctatggtagcaacccagccccagagggccacactgccaattacggatcccaaggggattcaacccaagctccacctgcccagcctccaagtcaaggttatgggactggccaacaacctagcccaaatgctgccaactatgcaccacaagctcaaccaggttatggggtgcccccaacctcccagccggctacttatggcagtcaacctccagcacagtctggttatggatctggctatggaccccctcagacccaaaagcctagtggcacacctct

SEQ ID NO: 44797 - DNA, 286 bp, Glycine max
  Clone ID: LIB3139-080-P1-N1-C2
gtttaatgcatagtagtcaatagtgaatagcagggcagagtggccgcccccaaaaatgctacaatagatagcgttcatcatgctattttaaaccctgaatctgaaaaggaacagagaagaaaaagatgggtcttcataaacgctggagattggctggaaaactcaccaagaaaaagatgggtcgctgcttgaaaatcgcggaccaaggtggggatggcggagtttggccagaaaagatctcttgcagtactgggcttcggtaggcagtgcttattggagcttcaac

SEQ ID NO: 44798 - DNA, 241 bp, Glycine max
  Clone ID: LIB3139-080-P1-N1-C3
tctattctttgaaaccataagttcaaactctgtcttccctgggttctatttcgaaatcaacgacgatgagttccacagaggcagcagccacagagaagaaaggtggaagagggaaaccgaagacttcaaagtccgtttcccgttcctccaaagctggccttcagtttcccgtcggccgtgtcgctcgctacctcaaggccggtcgctacgcccagcgcgttggctccggttcccctgttta

SEQ ID NO: 44799 - DNA, 403 bp, Glycine max
  Clone ID: LIB3139-080-P1-N1-C4
gaatcttcttattatatatatctcccaaaacataaaactgggaaccaaaaagattatcctgggggtgtatgacaagaagattcttccatttttctcctttgccatggaagtccggaacaagccctccattgatgattatgtcaatctttggaatgattgggagagttcagtggaacaattgtcatatgacaagtgctataagttctggatgtttatgttgaaacatttcagcacagaaactaagaaactttccaattgcttggtgaagctaccggtaacatcaggcaacattgaaataattttgttagataaaaacgatgttttcattcctgataaccttcatcttgagaagctttttcagcaggagaaagtctttgtctggtttccttagaaccctgcacca

SEQ ID NO: 44800 - DNA, 336 bp, Glycine max
  Clone ID: LIB3139-080-P1-N1-C5
caagaatatcaatttggtctcttgtcttcctcctcatctgtacactactccacatagagcccagcctctcaagcccaagcccaagcccaagcccaagcccgttcataaaatcctcctgcagcagcacccagtacccagccctctgcgtctcatccctctccgtctacgcctccagcatccaacaggaccctcaccaactggttcagacagcactctccctctccctgaaccgcacccaagccaccaaaaccttcgtggctaactgcaacaaattcagaggcctgaaacccagagagcacgctgcactcaaggactgcgccgaggaaatcagagaca

SEQ ID NO: 44801 - DNA, 406 bp, Glycine max
  Clone ID: LIB3139-080-P1-N1-C6
ggcattcctgctgatgttcttgcaaagcgagctcatgaatttgaaaaacatgttgctcatgaaagcctcaaggatcaaattcctgctgttgacaagttgtattctactaaggttaataagtttgcaaaaattatgaaccttagacaaagtgttgttggtgatcttaaacttcttactgatgggaagttgtatgagggtaagcatattcctgtatctaatattagtgcaggggaaaatcatgtagttcaaatacccctaatggcacaggaggaaattctgtcttctagtgcaagtgatttcagaactgcaatggtgagtaaaaatagcaagcctcaagctactgcaatgcatgtgggagctatagaaattatcattgatagtttcgcaagtcctgacttgcaacata

SEQ ID NO: 44802 - DNA, 177 bp, Glycine max
  Clone ID: LIB3139-080-P1-N1-C8
tctattctttgaaacctatagttcaaactctgtcttccctgggttgtatttcgaaatcaacgacgatgagttccacagaggcagcagccacagagaagaaaggtggaagagggaaaccgaagacttcaaagtccgttttccgttccttcaaagctggccttcagtttcccgtcgggc

SEQ ID NO: 44803 - DNA, 396 bp, Glycine max
  Clone ID: LIB3139-080-P1-N1-D1
gtgcatttgccttcttttctcaagtctctttaatttctcaaaggaaaaagaagaagaaacaaaattttattttgagaaaaaaatggaggcattgaagatgaatcttttcttttttgtcatggccatgctgatcatggcagcatcagctgcagattcaccagctccaagtcccacatcggatgctaccaccttattcgtgccaacagcggttgcttcactcgttgctcttgcttttgggattctcttctgagtttctcaacaatgaagcaaacaactaattgtattgtatgggattcattgcgttttcatcattattttgatccatattgttttatgacacatttatttcccatttgttcttttttactttgttttgtttattttgtgttttatttt

SEQ ID NO: 44804 - DNA, 409 bp, Glycine max
  Clone ID: LIB3139-080-P1-N1-D10
attgtcaccaaacttcttgtgccaatggcccaacaggacgcagtgaaggagctgatcctgcagctcagtccgccgcagagtatctaactaagcttgccatccacaggggaagccaagataacatctctgtaattgtgatagacttaaaggctcaaagaaaaattaagagaaagccataaagtgaagtgatttacatctgccatattttcattttaaagctattgattttattgtattttagagtcattggtactttttagcccgtcagtttttcaccagggctaagctataagttatatatgctaatattcgtactgtacaaggatacctttagcttggatgtgttatcactctgtctctgagagctttccaagcataacaaactttttttttttttaattaagagcca

SEQ ID NO: 44805 - DNA, 408 bp, Glycine max
  Clone ID: LIB3139-080-P1-N1-D11
caattagtaacttgttgttagttgctgcttggaagaaaggttgtttaatggtcaagattgtgatgtctgggaatgcagcagtcaaaaggagtgattgggcctcattggtacaagtgtttttaacaaacagcaacagtacagagcattttgatgcatgtaagtggacaaaatcagaaccacattcctgggaattaatcttcccaatagaggtatgtggtcctaataatggttttgaaatgtggagttctgagtgggccaaatcaaacttcatggcatttgagtttccttattgacaatcccaaacagtctacagtttttgatattctcttgggaatctctcaagattttgaaattgctggtaatactcttatgccagctttttctgttccacaggctactgccagatct

SEQ ID NO: 44806 - DNA, 340 bp, Glycine max
  Clone ID: LIB3139-080-P1-N1-D12
ttcctctcaagtggagcattcaggttgttagagcgtccattgagctttcaatctgtggctggattttgatctctctgagtttaaaatggatccaaaaggaagcttatgtgctacaaggtcctcttccttaacctctcctgggaatggactacaaacaaatttgtcgtcagatcctccctctttctatggggtcaggattgaatcacctttcgaagaattcatccaaccctctcctccaacccaatctgtacttccaggtgaatctaacacagatattgatatccctgaccaggaaaattgtccactgagtgactcctcacataccagtaaactccaagat

SEQ ID NO: 44807 - DNA, 402 bp, Glycine max
  Clone ID: LIB3139-080-P1-N1-D2
gacaccatcaattttgttgcttttccccacaagctggtgcagtttggagagattcaggaaaaagttgtgttgaaattttcacaagaggaatttcttacagcttggtcaactcaggtgcgtcccgcaacgactctgttggctgatgggtgcccatatttgtatgctatggtgcatgatagttcagtgtctacaataccaggtgattttgtcattggtgttaagttgacaaccataaacaatatgtgtgcatatgggctcaatcctggtatttcaggttctcgtcttttgggcaccattcctcagtccatttcacagcaaactgtttggaatcaaatggcaacagtgagaacaccattgaattttgattttagcaagcagagcttttgtaaatttctattgacc

SEQ ID NO: 44808 - DNA, 247 bp, Glycine max
  Clone ID: LIB3139-080-P1-N1-D3
gagaaaaattggatgtcactaaggtgttgattctggacttttaatttttgaagcattaatattcatagaggggggcaggaatgggaggctctctcaatgacataactattctggtttgcgaagagaaagtagtctaaatgtggtaatggaatgcagacctatgctgggcgatcttcacaagaaaagttggagcacctagtgctaccatcaacgctgacctgtatgctgggtacaggggcctcatttc

SEQ ID NO: 44809 - DNA, 393 bp, Glycine max
  Clone ID: LIB3139-080-P1-N1-D6
tctaaattgaaatgctttctagctggtcataatatcaccattactgatggtattgacaaaactagtgcaactttgcaatttagaaagttagcagattgtgattttctcaagagaaactttaagcagatgtctaatgttttatgggtggctcctgaggacaaggcgagtttatggtcacaacttcattatgtttcgtgcaataatctggaaatgccaagaagcttatcttgtcaatctcgtaaatgtgttacgagaattgtatttgcacagtccagaggaagctcgccaattgagaaggaaagctctctctcgtattgaatggctgcaaaaagctgatgtgcctaccatagcacagattgaagagttccattcgatgcagaggatgatgaatgc

SEQ ID NO: 44810 - DNA, 404 bp, Glycine max
  Clone ID: LIB3139-080-P1-N1-D7
cccactcctttctctgtctccatcgtttcgcattgcacaagcactctctctttcccttaccctttttcaggtttcaacgctccaactatccatggcaaaccgctggctcagacccgaggtgtatccactgttcgctgcggttggtgctgctgttgggatctgtggattccaactggttcgtaatatctgcatcaaccctgaagtcagggtgaacaaggagggaaggaaggcaggagttttggagaactttgctgagggagagaagtatgccgagcacttcctgaggaagtatgtgcgcaacagaactccggagattatgccctccatcaacagcttcttcgctgacacaagtcgcaactaagttgctttgaataaacaaaggttaatgtgagatattaattcta

SEQ ID NO: 44811 - DNA, 408 bp, Glycine max
  Clone ID: LIB3139-080-P1-N1-D8
agttgagagatctgaatctgctgtgaagcatcaaaatgatgtgcagaagtataatcacttgtctcaagcaatgcctcttggtcttgatgaattcaagagcagggcaattggttctaaaattaagtcaggtactaatccttctggaagtgtgatacatagattagagcctggtggtgctgaatacaattatgcttcagcatcaaagggagccaaagttttagcttctaacaaagaagccagaggtgcctctgacattctaagcagaaacaaagacaaatatcttcgaaatccgtgttcttcagaagagaaatttgttgtcatagaactttcagaagaaaccttggtaaaaacaatagagatagctaattttgagcaccactcttccaatttcaaagagtttgaattata

SEQ ID NO: 44812 - DNA, 407 bp, Glycine max
  Clone ID: LIB3139-080-P1-N1-D9
acctttgttcactctttttcttttgcggctagggttttagcgcagcttcttctagatttaaggaagatgggtaaggaaaaggttcacatcagtattgtggtcattggccatgtcgactctgggaaatccactaccactggtcacctgatttacaagcttggaggcattgacaagcgtgttattgagaggtttgagaaggaagctgctgagatgaacaagaggtctttcaagtatgcctgggtgctggacaaacttaaggctgagcgtgaaagaggaatcaccattgatattgctttgtggaagtttgaaacaacaaagtattattgcacagttattgatgcgcctggacatagggatttcattaagaatatgattactgggacatcccaagctgactgtgctgttct

SEQ ID NO: 44813 - DNA, 395 bp, Glycine max
  Clone ID: LIB3139-080-P1-N1-E1
agagatgctatttactttggccttgctcgtttatcactctcatggtgtagcaagaacatgaataacttggtcctatctcttgttcctaaattcgcaaaactgcaaactctaatcctccgtcaagacaagcctcaactagaggataatgctgttgagactattgcaaaatgctgtcatgaactgcagatcctggacctcagcaaaagtttcaagctaactgatcgttcactctatgagctcgcccttggttgtcgcgatcttacaaaactcaacatcagcgggtgttcagcatttagtgacaatgctctggcttaccttgccagcttctgcagaaaactgaaagttctaaatttttgtggatgtgttagagctgcatccgatactgcattacaggc

SEQ ID NO: 44814 - DNA, 370 bp, Glycine max
  Clone ID: LIB3139-080-P1-N1-E12
ggctgagtttcactgaatcaaacatagtgtcatcactgacagaaaataatattattggcagtggcggatatggtgcagtataccgtgttgcagttgatggtttaggctatattgctgtgaagaagatttgggaaaacaagaagttagataaaaatcttgagagctcatttcacactgaagttaagatattgagcaacattcgccacagaaacattgtgaaattgatgtgctgtatctctaatgaggactctatgctccttgtctatgagtatgtggaaaaccgtagccttgacaggtggctgcaccggaagaataagtcatcagctgtgtcaggttcagtccatcaatgttggtcttgattggccaaaga

SEQ ID NO: 44815 - DNA, 399 bp, Glycine max
  Clone ID: LIB3139-080-P1-N1-E2
ggcgcagaagttctgtttgcccaccgtgatctggtctgggaaacccgaaaagtacacaaagatcccatcttttcacgatttggagcagaacaacaattctgggtatcttcatatctgtgccaatgagaccatccatggggtggagttcaaggactaccctgttcccaagagtggtgttttggttgctgatatgtcctcaaatttctgctccaagcctgtggatgtgtcaaggtttggggttatctatgctggggcccagaagaatgtggggccctctggtgtcaccattgtgatcatcagaaaggacctcattgggaatgcacagggtgtcacacctgtgatgttttgttacaagatccttgttgagaacgatttattttacttatctctccttgtttt

SEQ ID NO: 44816 - DNA, 377 bp, Glycine max
  Clone ID: LIB3139-080-P1-N1-E3
tgatggtgcatatgattttggcatgattcaagaagcagatattggtgttggaattagtggggttgaaggtatgcaggcagtgatggctagtgactttgcgattgcccaatttcgatttttggagaggctcctggtagtccatggacattggtgttacaagagaattgcacaaatgatatgttatttcttctacaagaacattacatttggtctcaccatcttctattttgaggccttcactggcttctctggtcaatcggtttatgatgactggtacatgatattgttcaatgttgttctgacatcgttacccgtcatttcactcggtgtttttgaacaagatgttccgtcagaagtttgtttacagttttctgcac

SEQ ID NO: 44817 - DNA, 66 bp, Glycine max
  Clone ID: LIB3139-080-P1-N1-E4
atatttttttttccctttctttccaatggaaaaaaaaaaaaaagcaaaagctctcaaacaacaatt

SEQ ID NO: 44818 - DNA, 396 bp, Glycine max
  Clone ID: LIB3139-080-P1-N1-E5
aggaatgattaaaatggtggccacagttggtattcctgagaatacaggtatagcattggcctgtgctatgaatagttcttttagggggcgcgccagttctgatatttacaccatctgctctcaagactgtgaattatggaatcctgcttgcacaaaagcaatgactatgtcatttaatccaaacccgtgttctgatgcatggagtttggaatttctgaagcgtaccggatttcattgtgatatcatttgtgtcactggatggactgccaccccaatgcaggatgttcaggttacaattgattggtttatttcctctcaggaatgtgttcccaggacctattgtgttttaaatccacaaaatccttttgtgttaaataggtggatgggaaaactgac

SEQ ID NO: 44819 - DNA, 374 bp, Glycine max
  Clone ID: LIB3139-080-P1-N1-E6
agtggctgcaaatagctgatgtgcctaccattgcacagatggaagagttccattcgatgcagaggatgatgaatgctcctgattcaaatgataatatagatttactgttgagcattgataagatgggtttacaaggagcaggttaagcttttccaaacaaaatcgtttttgatgataagcttgtgttggctaacacacaacaattctttgatggaaattttccagtgaattctaggttaccaatttttgtgaattgtgtttatcctgtaaggcaattaccttcagaagcatgtcgttgtcaatgttacatgtggtagttgacgtggtgggattctcatatgcatgtagtgagggtttcctcgttcacagcatga

SEQ ID NO: 44820 - DNA, 398 bp, Glycine max
  Clone ID: LIB3139-080-P1-N1-E7
atcacatccatgcagtattggactgcaacctaacgtttgagttgactcagaacaaggaagcaataaataacctcccaattttattattattattatttcccagaaatcactctcttcttctgcacttggacaaaccctaaaagcccattcagctgtggttactgttttctctagaaagagaagctgctggaaatgtacaagaaccagcttcaagagctggcccagcggagctgcttcaacctgccttcctacacgtgtattcgggaaggtcccgatcacgcgccaaggttcaaggccaccgtcaactttaacggcgagatcttcgagacccctcactactgctccactcttcgtcaggccgaacactccgccgccgaagccgctctcaattccctctc

SEQ ID NO: 44821 - DNA, 408 bp, Glycine max
  unsure at all n locations
  Clone ID: LIB3139-080-P1-N1-E8
tgagtttcgagttgcgtcattttcacctgtcctctctctctctctctctctctgtcaccgngttgcaagtatgaaggactgttggttttttgacaacaatttcaatggtctgtcggatgagagtcttgatgatgtgatggacatggagcttttggatttgccccttgactttgaggatgtggaaactgatgctgtggaagaacaagattgggatgctcagctcaaactccttaagacccaccaccaccacttggagttttcccactacaacaatcctctgcattctgtggacaaactcggaatgagaatgcgaaactcggcagcaagagtttctctgcttctctagcgaagactgtcagacctgcatatggcaaaactattcctgtccagaaagtctctttaaaaggt

SEQ ID NO: 44822 - DNA, 372 bp, Glycine max
  unsure at all n locations
  Clone ID: LIB3139-080-P1-N1-F10
ctaagataaacgatgagtgcatttatgatataatctgatggttatttttctcttgattctgctacaggtttgtaaaattaattgtattgaagaaggggacaattatgatcagtagtatgtgtggtcaagtgtatgtatgatatatatactatgatggttggtttacttccactttgatacatgtttgtaacataagttgtatggaagaagtgagtgaaccatcttcagtataatgtgtgatcagtaataaaggaaatgaagggactgccttgnttaaaaaaaaaaaaaaaaattaatttttttattttaaattattaaaattaattattttattattattttatttttatatatatatattaaataaaaagg

SEQ ID NO: 44823 - DNA, 403 bp, Glycine max
  Clone ID: LIB3139-080-P1-N1-F11
gaacaatacaaaggatttgaatccccaaagctgaaaaagatgcttacaatgaatggaactacagcaagttcaggctatggcagctgacagattatgacaagataatattcattgatgcagatttgctcatactaagaaacatcgatttcctatttggaatgccagaaatcactgccactggaaacaatgccactctctttaactcgggtgtcatggtggttgagccatcaaattgcacattccagctcctgatggatcatatcaatgagattgagtcctacaatggaggagaccagggatatttgaacgaaatatttacgtggtggcacaggataccaagacacatgaacttcttgaagcatttttggattggcgatgaggaagagaagaaacaaatgaaaac

SEQ ID NO: 44824 - DNA, 392 bp, Glycine max
  Clone ID: LIB3139-080-P1-N1-F2
gggagtcagagaaaccttatgtaagaagaaaagatgccggctggtcatggtttgagatcccgcaccagagattccttctctcgtcctttcaggaagaagggaaccatcgccctcaccacatacctgagaacctaccacgtcggcgactatgttgacgtcaaggttaacggtgccgttcacaagggaatgccccacaaattctaccatggccgcaccggacgcgtctggaatgtcaccaaacgtgctgttggcgtcgaagtcaacaagcaggttggcaacagaattataaggaagaggattcatgtgcgggtagagcatgttatgccttcaaggtgcactgaggagttccgcctcaggaagattaagaatgatcagctaaaggccgaagccaa

SEQ ID NO: 44825 - DNA, 373 bp, Glycine max
  Clone ID: LIB3139-080-P1-N1-F3
ggattattacatactgtttgcattcctttgctaccccttcaaactccaactctacttccttgtcattgattttttggagtttatctgcctagacatgttgcaggaggttgctactacaaaagaatttgctgagctctcaagtctggttgattgaagataaacaagcatctttatggtggacagagggtgataaataaaatccagtcatcttggagcttgtatgtatcttctggaattggtggtataactatggtttgttcacttctctagtggaaatgtcataatggtgcgccatgcgccatgcgccttgaagaatttgttaccgtcttctagctgctggtgatacatgatgctagccccttttttttactcc

SEQ ID NO: 44826 - DNA, 401 bp, Glycine max
  Clone ID: LIB3139-080-P1-N1-F5
gaatataacactccctcttcctctctattcgcctccctttaactccacggtgcagatccgaggagttaccccttagctttttctctttccttattctatttcaaacttccaccagtgatggcaggtttggctccagaaggaacacaatttgatggtcgccaatatgatgctaagatgagtgaattgctttccactgatgggcaagaattcttcacctcatatgacgaagtctatgacagctttgatgccatgggattgcaagagaatcttctgcgaggcatatatgcttatggttttgagaggccttctgcaatccagcaaaggggaattgttcctttctgcaaaggtctggatgtgattcaacaggctcagtctggaacaggaaagacagcaacattttg

SEQ ID NO: 44827 - DNA, 381 bp, Glycine max
  Clone ID: LIB3139-080-P1-N1-F6
cgctttcttcatagcctgcacttgttccacccttcaacataccactcctcctcttccccaattctcttatccgtaatctggcactcttcagagaagactttgtaagataaaaagagaaatggccttagaccagtattttgatgaggctgtgccccagttggattccttggaagataaatcgtctctcgaaacatggaaatgtggcagtgacgatattgcagattcggatagaaatgcctctggtggctttgattgcaacatatgcctggagtgtgtgcaagatccagtggtcactctttgtggccatctctactgctggccctgtatttacaaatggcttaatttacaaaactgcctcttctgaaaatgaagaagagaagc

SEQ ID NO: 44828 - DNA, 408 bp, Glycine max
  Clone ID: LIB3139-080-P1-N1-F7
cggctcgagggaaaacaaagtttagagtgaaagaatgggtgagaaaagcaagattttgatcataggaggcaccggctacatcggcaaacatatagtggaagcaagcgcaaaggctggaaatcccacttttgctttggtgagggaatccacactctctgacccctccaaggcacaactcatccacaattttgaggctttgggcgttaatttggtccgcggggatctgtacgatcatgagaagttggtgaaagctatcaagcaagtagatgtcgtcatatccacgctgggtcacctgcagcttgccgatcagctcaagatcatcgctgccattaaggaagccggtaatgttaagaggtttttcccttcggaattcggtaacgacgtggatcgtgtccatgccgtggaacc

SEQ ID NO: 44829 - DNA, 378 bp, Glycine max
  unsure at all n locations
  Clone ID: LIB3139-080-P1-N1-G1
atttgtttaaattgtctcttgatgatgttgaaactcctaaaggttctatgttggatcttaaaatttctcaatctaaaattgcacttcccaagaacacagttggaggaaccattctgcgtagtgatctattggcaaattttttgacagagggcaattttagagcaagtgttgatttgcagcgcactcatcgtattaaaggaatgattaaaatggtggccacagttggtattcctgagaatacaggtatagcattggcctgtgctatgaatagttctnttagggggcgcgccagttctgatatttacaccatctgctcttaagactgttaattattgaattctgctttgcacaaaagcattgacttatttcatttaattc

SEQ ID NO: 44830 - DNA, 191 bp, Glycine max
  Clone ID: LIB3139-080-P1-N1-G11
tttttttatgaatttcccccttttttttgtgtacttgtatgtgtgctttcagaacatatatattttgtatgatgaaacaaaaaaaaatgttctctcaagatttatgctagaaaattgtatactctctataatttgagattattacatatttctagcataaatcttgagagagtatacaattttactatgtg

SEQ ID NO: 44831 - DNA, 404 bp, Glycine max
  Clone ID: LIB3139-080-P1-N1-G12
ggggaggagctggtgcaaagaatgctattctcatgaatatgccaaatgctgttctttcaatgtggagatattttgttggagatttcgtctttgaagtttctaagatgacttctccctacattaaatgcacagtctctttcttcatagcatttggaaatttggctgatgacaccatcaattttgaggcttttccccacaagctggtgcagtttggagagattcaggaaaaagttgtgttgaaattttcacaagaggaatttcttacagcttggtcaactcaggtgcgtcctgcaacaactctgttggctgatgggtgtccatatttgtatgctatggtgcatgatagttcagtgtctacaataccaggtgattttgtcattggtgttaagttggcaactataaac

SEQ ID NO: 44832 - DNA, 355 bp, Glycine max
  Clone ID: LIB3139-080-P1-N1-G2
ctatcatgtcattatatatgccactggaccagcaaaataaggtagttcatgctgaagctcgggcggacgacaacaaggcgccgtgtaagacatacataatgagctaaaaatagtcaaaggaacccgttgctctgcataatccacttgatagaaggattataaatagaactggctttattggttttgaaatccatcttgccaacccaaagaaaaataattatttttacctgtttggaataattattatgtaacaatttgttaatccctttaacaaataaatatttttttctcctggcgataaaatttctttattttttcttcaacaattttttaaaaaaataaaatttttctttct

SEQ ID NO: 44833 - DNA, 317 bp, Glycine max
  Clone ID: LIB3139-080-P1-N1-G3
cctcagtccatttcacatcaaactgtttggaatcaaatggcaacagtgagaacaccattgggggttgattctagcaagcagagcttttgtcaattttctatcgaccttctcggtggaggaattttagtggacaaaactggagattggatcacacttatacaaaattctccaattagtaacttgttgagagttgctgcttggaagaaaggctgtttaatggtcaagattgtgatgtctgggaatgcagcagtcaaaaggagtgattgggccttattggtacaagtgtttttaacatacattaacctgtcatatcattt

SEQ ID NO: 44834 - DNA, 406 bp, Glycine max
  Clone ID: LIB3139-080-P1-N1-G4
ggtgattttgtcattggtgttaagttgacaaccataaacgatatgtgtgcatatgggctcggtcctggtatttcaggttctcgtcttttgggcaccattcctcagtccatttcacagcaaactgtttggaatcaaatggcaacagtgagaacaccattgaattttgattctagcaagcagagcttttgtcaattttctattgaccttctcggtggaggaattttagtggacaaaactggagattggatcacacttatacaaaattctccaattagtaacttgttgagagttgctgcttggaagaaaggttgtttaatggtcaagattgtgatgtctgggaatgcagcagtcaaaaggagtgattgggcctcattggtacaagtgtttttaacaaacagcaacagta

SEQ ID NO: 44835 - DNA, 256 bp, Glycine max
  Clone ID: LIB3139-080-P1-N1-G5
caaagctcttttatccttcatgagcaacgctttgattgcggaacctctaaaaatgtattgagggtaggaaacaaccaccacatctccaacaaaccgtccaacccattaaatccattcttcatcccatactttgtctatgtctaatatcatcatttttcctaaactccattcaagtctaattcctttaccaataacatataaatttaccaaattaaccactaaaacatcaaacccaaaattaaatttttcctaacac

SEQ ID NO: 44836 - DNA, 407 bp, Glycine max
  Clone ID: LIB3139-080-P1-N1-G6
atttaaatgaagggctcaatgcagatgatgagaaatgcggtgagttcaacagcagtgcacctgctggtcgtttggtcagtcctgtgccatttcctgcttcatctatgtcttgtggtattcctgctcctgtcactgtggctgctgctgcaaaggggtgctttgtgcctcctgaagatttattgagaagtaaaggggaaattggttggaagggatccgctgccactagtgcatttaggccagccgagctcaggaaagttatggaaatgccttttggggcgctaacttcctctatacctgatgctccagctggaaagcagagtcgagcaccattggatattgacttgaatgtggctgatgaaagaatacttgatgatatttcttctcaaccctgtgctcgtcacacggat

SEQ ID NO: 44837 - DNA, 342 bp, Glycine max
  Clone ID: LIB3139-080-P1-N1-H1
gtcactgggtgttctgttcaccccaatgcaggatgttcaggttacaattgattggtttatttggtctcaggaatgtgttcccagaacctattgtgttttaaatccacaaaatccttttgtgttaaataggtggatgggaaaactgactttcccccagggcacttcccgaagtgttaagagaatgcctctttctatagggggaggagctggtgcaaagaatgctattctcatgaatatgccaaatgctgttctttcaatgtggagatattttgttggagatcttgtttttttaggttttaattattatctcttctcttcatttaaatgttctaggtttttttt

SEQ ID NO: 44838 - DNA, 399 bp, Glycine max
  Clone ID: LIB3139-080-P1-N1-H10
tccccctccattactcccactgcatcttcttcaaattcctgtcctgaagatgacagcaaagtggtatctcattgtgtgtgttgtagcgatctgggccgttgatctgggttcatcatcacaccatgcccgtgccccagcaccagcaccgtcagtggagtgttcaaacctggtattgaccttatcggattgcctcaccttcgttagcaacggcagcaccgtcaccaagccacagggaacatgctgctcttccttgaaaactgtgctcaacacagcccctaagtgcctttgcgaggctttcaacagcagcgctcagttaggtttagccatcaatgtcaccaaggctgtcacgcttcccgctgcttgcaaactctctactccttctgccgctaattgtggact

SEQ ID NO: 44839 - DNA, 403 bp, Glycine max
  Clone ID: LIB3139-080-P1-N1-H11
ctgtgatgcctacactcctgctggagaacctattcccactaacaagaggcacgctgctgccaaggttttcagccatcctgatgttgttgctgaagtgccatggtacggtattgaacaagaatacaccttgttgcagaaagatatccaatggcctcttgggtggcctgttggtggtttccctggacctcagggtccatactactgtggtgttggcgctgacaaggcttttggccgtgacattgttgacgcacactacaaagcctgtatttatgctggcatcaacatcagtggaattaatgggagaagtgatgcccggtcagtgggaattccaagttggaccttcagttggaatctcagctggtgatgagatttgggcagctcggtacatcttggagaggatcac

SEQ ID NO: 44840 - DNA, 364 bp, Glycine max
  Clone ID: LIB3139-080-P1-N1-H12
ctgcaagacaacgtcgtggtcatggcacgccaatatgtccgcagtgtgatttcctccgtgcagagggttgccatggctatatctccatctggtataaacccatcaattggagctaaactttctcctggttctccagaggctgttacactagctcactggatctgccaaagttatagttactatttagggtccgacttactgagatcagattctcttgttggtgacatgatgctgaaacaacctgtggcatcaccaggatgccattctatgctgttcactgaagtcattgccagtgttcatatttgcaaatcaagctggccttgacatgttggaaacaaccctagttgccttacaagatatcaca

SEQ ID NO: 44841 - DNA, 400 bp, Glycine max
  Clone ID: LIB3139-080-P1-N1-H4
cacctctccactcactcttctgtcgtccgttccatcgccgtcaccatgtccaccgctcctccccccactgccaccggctccagcaaggtcgacgccgccaaggccaagcttgctgccatgcccgcgcctgacgcgcccactggtctcggtctctactcgcgcttcgctttcgctggtgccgtctgctgctccgtcacccacggtgctctgacccccgtcgatgtcgtcaagacccgcatccagcttgaccccgtcacctacaacagcggtctcatcggtggcttccgcaaggtcatcgccaacgagggtgctggcgccgactggactggtttcggccccaccgccggtgggtactttcttcaaggtgccttcaagttcggtggattcgagttcttcaagc

SEQ ID NO: 44842 - DNA, 227 bp, Glycine max
  Clone ID: LIB3139-080-P1-N1-H5
ctaaatttggagtggaccacaactttacatattatcctggatatgtttttgtatagcatgtaggattttagttattcacagcagaatatagacaaaaaaattgcaaatgtttacttatttacctcttttagattagtgactggcactacagccatagtgacagaaaattgctgctatacctgtctgccaagttcttgtccaaattgaaacttcaactttatcatagg

SEQ ID NO: 44843 - DNA, 379 bp, Glycine max
  Clone ID: LIB3139-080-P1-N1-H6
ctctctcactcttcattttcagtaagagagagcgacttcacctgggatcccatttcaaaaccgctcgttctccttctccttatttataagactcctctctttctctctcttctttgcctattggttttctctaataccatgtaaagaaaaaaaaaaaatacaatctttcaatcagcaaaatctacagtttcaatctttcggatcttgttggggttgcgtgtggatccctgggatcggaaccctctctcaatcctcattctgggtcggttttctttctggggggctttagatctctttgtcctggcaactcaagtcactcttgcttgcattggtggggtttcagtgttctactttttatggcatttttacctcccttttt

SEQ ID NO: 44844 - DNA, 407 bp, Glycine max
  unsure at all n locations
  Clone ID: LIB3139-080-P1-N1-H7
gaaattttaataaaccgtgatcacaggttgccgcaccttaaaaccggaaacaaaagcaatcgttacttgatttcaagaatttctcaatttcttcctacttctttgtgtacgatttcttaagggaaagaaaatcactctctgtgctggtcacagacttcgtgaatcattttcttttccactcctagtttatttgctgaacactctcctatttgatataggacttcgtgtcagatttaaactttttctgtttctttctcagttctctgtttaatttcaagttcaagctggtgaaattttggattagtgctcccactctcctatctggtataggacttcgngggtagactnttctacttctctcctttctttcactcttttcttctcactgatccgcattgccgttcaaa

SEQ ID NO: 44845 - DNA, 305 bp, Glycine max
  Clone ID: LIB3139-080-P1-N1-H8
caaataagttgtgtgtaatcaagcttaatcaattttttcatattcctatgtttatttcctacatatattggtagaaaaattatttcaaaaaaaaaaaaaaaaaaaaaaaaaaaaaaaaaaaaaaaaaaaaaaaaaaaaaaaaaaaaaaaaaaaaaaaaaaaaaaaaaataaaaaaaaaaaaaaaaaaaaaaaaaaaaaagggggggcccccaataagatgagcttttcaccccggaaataaaatcgggaccggtcccggtaggggaacaaattttccttataaagggtcttttaaaatcttgcct

SEQ ID NO: 44846 - DNA, 374 bp, Glycine max
  Clone ID: LIB3139-080-P1-N1-H9
cttcttacaccacacacacaaacccttctcttaatttctcactctcgggaacattttttttttttaaagaaaaggggaaaaatagaaagaaaagaaaaagggagaaggagtgagaataacatgaacaaacaactcaggctgctctgtctctttatcctcttctccttatttctctgtgtgggtttcgccggcgccggagacacggcggagaaaaacccgttcaccccaaaagccttcgcgattcggtattgggacaaagagatccgcagcgggttaccgaagccaccgtttcttgtatcaaaggcgtcgccgctgagcgcggcggaggcggcggcgttcttaaagctcgtctccgggaactcgctctccacgcg

SEQ ID NO: 44847 - DNA, 357 bp, Glycine max
  Clone ID: LIB3139-081-P1-N1-A1
ctcgagccgagaaaatctgtaatatattatgcaaaaaataattaaggtcttttcctttaaatgggctggttcaatgaaccgagaccactgcaggttcatggggatgggaggattaagaggctatgttttttaatcttccgatgttactgttgttttttttttaatttcaataaggatattatatatgtagtactatgcaagtagcttagagttgggtagaagggcatgttcatggtgttaattatgttatgtatgcgtgtgagtgctgttatgatggcaaaaaaaaaaaaaaaaaaaaaaaaataataaattaattattataattataatatttaaataattttttttttttttttt

SEQ ID NO: 44848 - DNA, 164 bp, Glycine max
  Clone ID: LIB3139-081-P1-N1-A10
gctgttctttcaatgtggagatattttgttggagatctcgtctttgaagtttctaagatgacttctccctacattaaatgtacagtctctttcttcatagcatttggaaatttggctgatgacaccatcaattttgaggcttttctctccaaactgcaccagct

SEQ ID NO: 44849 - DNA, 344 bp, Glycine max
  Clone ID: LIB3139-081-P1-N1-A11
gttcagaaagccgcttccatgagcgcgagcaacaaatggagagcaatggcggaccaccagcatcagcctctgtgcacgcgcacgcaccagatcggcgccctcctcctcgtggcgaccaccttcttcttcacgagaatgcttttcacctccacgctctccaccagcgtcgtccacgtgtcgcaaccccggttccagtgggggcagtcccagctatccctcaagatctacgtctaccaagaagacgaaatcgacggtttgaaggagctcttgcgcggaagggacgctaagatcacagactaagcttgccttaaaggccatttgggcagttcaggtgaaaattcaca

SEQ ID NO: 44850 - DNA, 186 bp, Glycine max
  Clone ID: LIB3139-081-P1-N1-A12
cgatctcctgaaaatcagtaggctctgcatgatctgtaatggggggtctctttccttgtcgtttgttaatttaataatgaaatagtcatgacccttttgttagcatgctcttcctatctgaaaatttctacacctatttcaatagtcttaatgatttgtgaagtgtgttatattttaataaaatta

SEQ ID NO: 44851 - DNA, 349 bp, Glycine max
  Clone ID: LIB3139-081-P1-N1-A2
aaaaaaatttttttaacaaaaaaaatctttaaaaaaaaaaaaaaaaaaaaaaaaaaaggaaggggaaaaaaaaaaaaaaaaaaaaaaaaaaaaaaaaaaaaataaaaaaaaaaaaaggggggggcccccccttagtaagcttttcaacccggaaattaattctggaccggtccctggaggggtaccaattttccttatagggggccgttttaaagcttggcgaaataatggcaatagttttttccttggtaaaatttttttcccttaaaaattccaaaaaaattacaacccggaaacataaagtttaaaacctggggggcctaatgggggggttaactcaaattaattt

SEQ ID NO: 44852 - DNA, 365 bp, Glycine max
  Clone ID: LIB3139-081-P1-N1-A3
tgtttgttgatccatctcttgtttcttgctttctttcttcaccatgtcacttgctgggaaaatcaccactgaaatcggggttcatgcaaccgctacaaagtggttcaacctcttcgcaacacaactccatcatgttcaaaacctaactgatagagtgcatggaaccaagctgcatcaaggtgaagactggcatcacaacgagacagtcaagcactggacttataccatagatggtaaggttacaacatgtctggagagtattgaatccattgatgaacagagcaaaacaatcacctacaagctcttcagtggtgacattgatcataattataagaactttaagttcatctttcaagccattgatg

SEQ ID NO: 44853 - DNA, 371 bp, Glycine max
  Clone ID: LIB3139-081-P1-N1-A4
gcaagaatcttatcttgtcaatctcgtaaatgtgttacgagggttgtatttgcacagtccagaggaagctcgccaattgagaaggaaagctctctctcgtattgaatggctgcaaaaagctgatgtgcctaccatagcacagattgaagagttccattcgatgcagaggatgatgaatgctcctgattcaaatgataatattgatctactgttgagcattgatttgttgggtttacaaggagcaggtaaagcttttccaaacaagattgtttttgatgataagcttgtgttggctaacacacaagaattctttgatggaaattttccagtggattcttggttaccaatttttgtgaattgtctctatcctg

SEQ ID NO: 44854 - DNA, 367 bp, Glycine max
  Clone ID: LIB3139-081-P1-N1-A5
atacagattccatctaatgtaatgcgagctcatgaatttgaaaaacatgttgctcatgaaagcctcaaggatcaaattcctgctgttgacaagttgtattctactaaggttaataagtttgcaaaaattatgaaccttagacaaagtgttgttggtgatcttaaacttcttactgatgggaagttgtatgagggtaagcatattcctgtatctaatattagtgcaggggaaaatcatgtagttcaaatacccttaatggcacaggaggaaattctgtcttctagtgcaagtgatttcagaactgcaatggtgagtaaaaatagcaaacctcaagctactgcaatgcatgtgggagctatagaaatta

SEQ ID NO: 44855 - DNA, 296 bp, Glycine max
  Clone ID: LIB3139-081-P1-N1-A6
gttggaagtagattatactaagcgcatgatattaatgatggaatctgttgaagtgaggaggagatggaccctttagtgagctactgagcgtatatacgagcgcaggcaaggatatcatacattaagataccatggcgtatacactcatgagatgtccatagacagtttacatgtacatggagtgaacgtgatcctaaagactcaacccactatacactggacgctccagggatgattcgcaatgagtacactatagactaacatcttgcagatgcagaatacattgatgagacagt

SEQ ID NO: 44856 - DNA, 331 bp, Glycine max
  Clone ID: LIB3139-081-P1-N1-A7
attttatttaacaggatgatctcaggttgtatcaggcaacccaacactccctgatcgagcaacatcagctacagctcccaagtgccacagaatgtggtgacatgcacatacctaactcaactatgcaactcccccactaatctcactttcagctggtccagaacccttttttcccactccctaaccattttagccacagatatattttccatcacaatttctttgaacttctcaacctttctttttagaacacgccattgcttaaaaataaacaacaaccgcaaaaacaaactccacttgaacttttacccgctccttgtttattcaaaac

SEQ ID NO: 44857 - DNA, 202 bp, Glycine max
  Clone ID: LIB3139-081-P1-N1-A8
gttgttttttcaaaggggagatattttgatggcgatctactacatgaagcaggtgagatgacttctccctacattaaatgtacaagctttttgttcataacatttagaaatttggctgacgaccccatccactttgatggcttttctctccaaactgcaccagcttcatataggtctcaataatgttttccaaagttaccta

SEQ ID NO: 44858 - DNA, 328 bp, Glycine max
  Clone ID: LIB3139-081-P1-N1-A9
cggtctttccctcaccgacgccgccggcaacctccccgacctcgccggaaaccgctggatctgggaattcaacttccgtgacttcgacgtggcgcgtgacgcctacgctcccgactccatcgatcttctccgtcgtcagggcatcgatttcgcgcgtaacaccgccgacggcgtggattccacgtgcttcgcggagctgatgatgtcttcggggctcgtgtgcaacgacgccgtgagttgggtcacgttccacagcgcgtacgatttcggttacttggtgaagatcttgacgcgccgtaacctaccgacgagggtggaggaatttttg

SEQ ID NO: 44859 - DNA, 369 bp, Glycine max
  Clone ID: LIB3139-081-P1-N1-B1
ccagtttcgttattcgcccgacacattttttctccgatccggctattcctctccattctccggtgtgtcgatttttgttactcaaaagggaaattgatttgatagatagacagatagatcgtttctatgggttaaagtgaaatccgaatccgaatctgaatctgaatctgatccaatcattttcatgttagggcgtgcgatctccaatcaagcgcggttgtgtttaggtttcattttgttgggcgtgtgagtcgtagggggtttcgaagagcatagaataatgccttcggtgcccgttgatctccgtctagttccttctttgaccgttttccatggtggatcctcttttcatcgtctgaaaaatcttga

SEQ ID NO: 44860 - DNA, 128 bp, Glycine max
  Clone ID: LIB3139-081-P1-N1-B10
gaatctgttgtgtcaccattccttgttacttacatctgcaattctttatttgtggtgttgattccaattgttgagattgggaggtatttggaggattcttatgggagtttatggttttggaggagcgt

SEQ ID NO: 44861 - DNA, 364 bp, Glycine max
  Clone ID: LIB3139-081-P1-N1-B11
ctttcttttctttcgtttttctctgcctttggatttgccagcgacgaagcatggggaacctcggaagagtaaaacgagtcaaacgtaatcggcagtagcatgtcgcccaacaacgtggaatctgggacaacggatgatacagaggtagtaggacaacaacaacgtcatagtccaatacatgatattgccttgcagatacagacacaggctccggtggaaacccatgggctataccaaacaaatgatgttcatacgcgtccgatgggcatggccgtgatagacgcgatccttccaccacaaaatccttctagcttaatgagcttcatggaagctgtagtgtcaaatgcaaggagaatttccctta

SEQ ID NO: 44862 - DNA, 367 bp, Glycine max
  Clone ID: LIB3139-081-P1-N1-B12
ctttttattctttctttttctccttctaattctttgttacccttcacctattgcaagccactcacactaacacaaaaacatggaactaagcaccatgttttgcttgtgtgcttcgtttctcttcattgttctcttcagggcactcatcaaaccttattatgtctccaaacgccgtgacttgccactcccacctggctccatgggttggccttacataggagaaacctttcaaatgtattctcaagatccaaatgtcttctttgcctcaaaaataaaaaggtttggctctatgttcaagtcccacattctaggttgtccctgcgtgatgatttccagccccgaggctgcaaagtttgtgctcaacaaa

SEQ ID NO: 44863 - DNA, 364 bp, Glycine max
  Clone ID: LIB3139-081-P1-N1-B2
agtgaagcgagaagcgagaagcgacatggatccagacgcgttggcaaaggcattcgtggagcactactactccaccttcgacaccaaccgcaacaatctcgccaatctctaccaggaaggttccatgctctctttcgagggtcagaagatccagggctcccacaacatcgtcgccaaactcacctcccttcccttccaacagtgccagcactccatcaccaccgtcgattctcagccctcaggcgtcaacgccgccatgctcgtcttcgtcagcggcaacctccagctcgccggcgaacaacacgccctcaagttcagccaaatgttccatttgataccaacaccacagggaagctattatgtg

SEQ ID NO: 44864 - DNA, 370 bp, Glycine max
  Clone ID: LIB3139-081-P1-N1-B3
ggcccttaagctcaacacatgaaaggccacctgggagctcttctagtacaagttttcctcataatacttggagaaatgattctacaatttcatctgtgaaccattcatcagatgttttgtatcctcctacttcagttgctactcactgtcccaggaagaccattcgttacccaacatcaactgctcatcctcatcctcattctcgttctccatacgcttcagtttcccccattatcaaaccaccctctgccatagatagtggttgtagaaacttatttaaagtcactgacagagtgaaatttgatgatatgagtgccagagtgcatcatccatgcaccaattccaggaaaagaccctcaactagttttgt

SEQ ID NO: 44865 - DNA, 372 bp, Glycine max
  Clone ID: LIB3139-081-P1-N1-B4
cggctcgagctcatttcttctcatcttctttttcttccctttaaaattattattccgtgcaaacacaacaacaacttcatcaccaacacgaagaacaagattagcgttatgggtctcttcctttctaggaatttggcttgcaaattcatatacccttttcttttttccaataaggtttcaaaggatttgttccccaagcagttggagaacatgatgtctctggtctctcctcgtactggcaggcatttgcagcgctatgacaaaggctgtcgccaagttgtgggatgcattccttacagatacaagaacaatggaacacaggataaggaattagaggttcttgtgattagtgctcagaagggtcatggaatg

SEQ ID NO: 44866 - DNA, 371 bp, Glycine max
  Clone ID: LIB3139-081-P1-N1-B6
gccttctttctttttttcaatttccaaatcacgaaactcaagaagatggagaaagcgatcaacagacagaagattttgcttcatcatctcaacccttcatcatccacccaccccaacgaatcatcctccctccatgcttcagcatgtgtggcgggggatagcgctgcttatcaaaggacatcgacattcggggacgatgttgtgatcgtggctgcttatcggactgctcattgcaaagctaaacgaggtggtttcaaagacactcttcctgatgatctactggctcctgttttgaaggctgtaattgagaaaaccaatgtgaacccaagtgaagttggggatattgttgtaggtagtgtattggctcctgg

SEQ ID NO: 44867 - DNA, 360 bp, Glycine max
  Clone ID: LIB3139-081-P1-N1-B7
aagtttttaaattttgtgaggttcattatgaagaaagcggacaaacttagttgtcgggttggaatcaacccatactccatggaatggactggtttggccaatagattactgagtaagggcaatgatattctgtgttgcgattatgctagttttgatggtttgattaccaagcaagttatgagcaagatggcataaatgataaacagtctttgtggtggtgatgaaaaattgatgcgtgaaaggacgcacctgctgttggcttgttgttcaaggatggcaatttgtaagaaagatgtttggagagttgtatgtggaatcccttctggatttccgctcacagttatttgcaatagcattttt

SEQ ID NO: 44868 - DNA, 367 bp, Glycine max
  Clone ID: LIB3139-081-P1-N1-B8
cataagtttagtcctcatcagggagttctcatgatggatcagtgacatggttggatgatatccttggtggctattatgaggactttcttgttgatgaaacacacaaagaagcaaattcagaagaaagaacctactttgaagaacaacctagtggcactagttcttctgtccttgaagacacaaatggaagcactgaaactcaagaaaacctgacgaatacacaagataatggtggagaagatgaaaaacataaggatgatgatgaggccagttgcaacacaaagccacttgatgaagagacaattgacaacactcaatgtcagaagatgagtggaacttgcaaaattgaagagacaaatgaaaatgg

SEQ ID NO: 44869 - DNA, 364 bp, Glycine max
  Clone ID: LIB3139-081-P1-N1-B9
ctttagcttctcgagccgggaatgattaaaatggtggccacagttggtattcctgagaatacaggtatagcattggcctgtgctatgaatagttcttttagggggcgtgccagttctgatatttacaccatctgctctcaagactgtgaattatggaatcctgcttgcacaaaagcaatgactatgtcatttaatccaaacccgtgttctgatgcatggagtttggaatttctgaagcgtaccggatttcattgtgatatcatttgtgtcactggatggactgccactccaatgcaggatgttcaggttacaattgattggtttatttcctctcaggaatgtgttcccaggacttattgtgttt

SEQ ID NO: 44870 - DNA, 367 bp, Glycine max
  Clone ID: LIB3139-081-P1-N1-C1
gacgcattcgctaatttcaccaatttatattttcttttgacaattttctctgcagtctcttcacctttttgctaatgatattgtgtgtttggagtgaaagagaacaagcatagttgagcttgattgtgttgttcaacattagaacaagaagaagacaaaatggaaggaggaggagtagaagttgatgtctctgctttcagagaatgcttgtctctgtcatggaaaaatccttacgttcttcgccttgctttttctgctggaattggtggccttctctttggctatgacactggagtgatatctggggctcttttatatatcagagatgatttcaaagaagtggatagcaagacttggcttcaggaag

SEQ ID NO: 44871 - DNA, 350 bp, Glycine max
  Clone ID: LIB3139-081-P1-N1-C10
gtgtaagctttatttttgtggatctaagttctgaagaaatgaaaggatgcgatgtgaaattcagagggaagactgcccttgattttattgtaggggagtgttgcaagaaacccctgtctgtggttttccttgaaaatgtagaaaaggcagatattctagctcaaaatagtttgtctctagccatcaagacaggaaaaatttcagactcacatggacgagaagttagtgtaaacaatacaatgtttgttttttctttctcagattaccaaaatagtttgatgccaagaggggaaccttccaacttttctgaggaaagaatactgagggcaaaagggggaggttttaagata

SEQ ID NO: 44872 - DNA, 362 bp, Glycine max
  Clone ID: LIB3139-081-P1-N1-C11
cgattatgctagttttgatggtttgattaccaagcaagttatgagcaagatggccgaaatgataaacagtctttgtggtggtgatgaaaaattgatgcgtgaaaggacacacctgctgttggcttgttgttcaaggatggcaatttgtaagaaagatgtttggagagttgaatgtggaatcccttctggatttccgctcacagttatttgcaatagcatttttaatgagatgctcattagatatagctatgaaaaattactgcgccaggctaaagcttcaagtatgtttttacaatcctttaaaaatttcgtttctttgtgtgtgtatggtgatgataacttaattagtgttcatgaatatg

SEQ ID NO: 44873 - DNA, 367 bp, Glycine max
  Clone ID: LIB3139-081-P1-N1-C12
ctctttcacactcacctatggctccaatctcaaaactcattcctttcctattgttaacaacccttttagtttccctccaagttaatgccagagacagccaattcttcagcaaagtcacccctctcaacaacaacatcaaagagactgagactcccaaaaatgaaggccaagtaaacaagccagaacaacaaccaacattcattcctgaaactgaaaacagttatggcctatatggtcatgagactggtctgcaccctcccaccactacaacaactaatgctgcaccctacaccaccacttacaagccatacaaaactaccacagctgaagaggacactgccaagtactccaacaacaacaacttcta

SEQ ID NO: 44874 - DNA, 369 bp, Glycine max
  Clone ID: LIB3139-081-P1-N1-C2
aatagatcctcaatacaatgaggttcaggctcagatggaaacaaacttgtttaaattgtctcttgatgatgttgaaactcctaaaggttccatgttagatcttaaaatttctcaatctaaaattgcacttcccaaaaacacagttggaggaaccattctgcgtagtgatctattggcaaattttttgacagagggcaattttagagcaagtgttgatttgcagcgcacgcatcgtattaaaggaatgattaaaatggtggccacagttggtattcctgagaatacaggtatagcattggcctgtgctatgaatagttcttttagggggcgtgccagttctgatatttacaccatctgctctcaagactg

SEQ ID NO: 44875 - DNA, 371 bp, Glycine max
  Clone ID: LIB3139-081-P1-N1-C4
cttcggcccattacatgcccaatctcatggaaactgcttcttccgctcccgatccagccacgtcacttagtttgtctctccctgggttcactgtacctcaaccagtgtctccgccgccgccgccactgccactgccggcggagacggtggaggagcgagggaagcaaatgttcaacgcggagttcttgagagtgatgcaagagatgataaaaaaggaagtgaggagttacatgtcagggatggaagaacagaagaatgggttcagaatgcaaaccgaagcgattgggaacgcggtggtgaagcgcatgggaattagcaacatcgagtgaagaaaaagaaaacggtgtcgtttcgagattcgaatcaagcca

SEQ ID NO: 44876 - DNA, 368 bp, Glycine max
  Clone ID: LIB3139-081-P1-N1-C5
agcgagcagtttcagacacagagagaggggtttgggattggagggattgacgctgcgtctcttcctcttctctttcgatccatccctcattcctaatcctccaatccaaccacctcagcctcacactcacatatacacatatctgaacgcgtatcgtccctcctatggcttcaaagcgcatcctcaaggagctcaaggacttgcagaaagacccaccaacttcttgcagcgctggtccagtagctgaggacatgttccattggcaagcaacaataatgggtcctgctgatagtccttatgctggaggtgtattcctagtcactattcacttccctccggattatcctttcaagcctcctaaggttgcc

SEQ ID NO: 44877 - DNA, 364 bp, Glycine max
  Clone ID: LIB3139-081-P1-N1-C6
gtgaaagagaatccgaggcgaagagaagagaaaaattaagatggaggggaaggagcaggatgtgtcgctgggagcgaacaagttcccggagagacagccgattgggacggcggcgcagagccaagacgacggcaaggactaccaggagccggcgccggcgccactggttgacccgacggagtttacgtcatggtccttttacagagcagggatagcagagtttgtggccacttttctgtttctatacatcactgtcttaaccgtcatgggagtcgccggggctaagtctaagtgcagtaccgttgggattcaaggaatcgcttgggccttcggtggcatgatcttcgccctcgtttactgcacc

SEQ ID NO: 44878 - DNA, 286 bp, Glycine max
  Clone ID: LIB3139-081-P1-N1-C7
gtctaattatgaaaacagcttaatggaaaaaaaaaggtaaataaaaaaaaaaaaacgggaaataaaaattaaaacaaacaaaaaaacctatgagacatactatttttacttaatttcacaatctataactacatatctttctacctctttgctatcaccatctcctcatttttttacctctatcttttttcttctctctcctttttctttttcatctctgttttattttttgcccctttttctttttccttacattactttttttatttttcattttattttttct

SEQ ID NO: 44879 - DNA, 145 bp, Glycine max
  Clone ID: LIB3139-081-P1-N1-C9
gctttaatctctgcatgatctggaattcttgtgaaggtgttcttgctcagtgggtgaggcaataaatgaaatcatgcataaccctcttgttgagtatgctcttcctattctaaaatttccacacctcttttaattttcttaatta

SEQ ID NO: 44880 - DNA, 359 bp, Glycine max
  Clone ID: LIB3139-081-P1-N1-D1
ttccaatatattccattctctctgtgtatttccctacctctcccttcaagatgcagatcttcgtcaagaccctcaccggcaagaccatcacccttgaggtggaaagctctgacaccatcgacaacgtcaaggccaagatccaggacaaggaaggaatccccccggaccagcaacgtctcattttcgccggaaagcaacttgaggacggccgtacccttgctgactacaacattcagaaggagagtactcttcacctcgtcctccgtctccgtggtggcatgcagatcttcgttaagacactcaccggcaagaccataaccctagaggttgaaagctccgacaccatcgataacgtcaag

SEQ ID NO: 44881 - DNA, 366 bp, Glycine max
  Clone ID: LIB3139-081-P1-N1-D10
tgacaattatataatacctagaagtaataatgcaagtgctctcatggactactacaatccttctttcataaattatgaccaattaggtggtcgtagtaatagggaaagttcagctcaacttattccaaatttggccatgcaaggtgatagctcttctttcattcgattagcaatggatgcaaccaaagccatgctggacagaaaatagctccaattgatgaaagaactttcttggtagaattctatagtagtgacaatgaccatatattgatgttgatgttttttatattaatttcaatatacgtaatagcatgtatttattctatatatgggatgataaggtgaaagaaataataagacatgact

SEQ ID NO: 44882 - DNA, 370 bp, Glycine max
  Clone ID: LIB3139-081-P1-N1-D11
attcaactctgctaagccggtatgaaagttgaatttccctttaagaatgttgaatacgtggaggacttcattggccctataagagatgtcgagtctctctcatttcttagcattacttttcactattttcgaaaatacaactatattggcataagagaaaacacaattgatagtccaaaaaaaaaaaaaaaaaaaaaaaaaaaaaaaaaaaaaaaaaaaaaaaaaaaaaaaaaaaaaaaaaaaaaaaaaaaaaaaaaaaaaaaaataaaaaaaaaaaaaaaaaaaaaaaagggggggcccccccctttgtggccctttccccccggtatttaattcgggcccggtccctggggggtacccaattttcctt

SEQ ID NO: 44883 - DNA, 258 bp, Glycine max
  Clone ID: LIB3139-081-P1-N1-D12
atggctcgtctcgcgatcgcttacgacgacgagctccacgtggccctatacgacttcaccgcgactgctcgttcctgcaggacctttataatcatcttctactagttccgcaaccctaactacaacacctttgccaccatcaccgagatccgattcttcacccctatctacatcaccaacaaacccaccggaaaacccttcttctactacgaatcttattttctccacgcgactcatctactttagcccgagctgcgt

SEQ ID NO: 44884 - DNA, 368 bp, Glycine max
  Clone ID: LIB3139-081-P1-N1-D2
gcagcgtggacggaatcggagtgcagccatatcagcagcagcagaagtccttgaagtgctgctctagtttgaggcacaatgagattggagaaatgctggttttgctcttcaaccatataccctggacatggaatccagtttgttcgtaatgatgcaaagatttttcggttttgtagatctaaatgccacaagaactttaaaatgaagagaaatcctcgtaaggtaaaatggaccaaggcatatcgtcgagtgcatggaaaggatatgacacaggactcaacttttgagtttgagagaaagagaaacaggcctgaaagatatgacaggaatcttgcggagaatgtcctcaaggccattcctaagattga

SEQ ID NO: 44885 - DNA, 367 bp, Glycine max
  Clone ID: LIB3139-081-P1-N1-D5
ggcatttacacctcccctgactgcttatttgcttcaaggacttcattctaaatcatgtgcaaataaaaaatggtgtttcacctgtgagtttgaaagtttgattttgaagtcaaaagacacaaactctcccatctcacctgtaggcatactttctcaactacagaatattgggagtcaacttggtaatggaagagaagaagatgcacatgaatttctaaggcttgctgttgagacaatgcaatctgtttgccttatggaatctggggataacatgtcagattcattgaaagaggaaactaatttaatgggcctaacatttggaggttacctccaatcaaagataaaatgcatgaaatgtggagggaaa

SEQ ID NO: 44886 - DNA, 377 bp, Glycine max
  Clone ID: LIB3139-081-P1-N1-D6
ggttgggggcagcagtcaataggagtgattgggcctaattggtacaagtgtttttaacaaacagcaacagtacagagcattttgatgcatgtaagtggacaaaatcagaaccacattcctgggaattaatcttcccaatagaggtatgtggtcctaataatggttttgaaatgtggagttctgagtgggcaaatcaaacttcatggcatttgagtttccttattgacaatcccaaacagtctacagtttttgatattctcttgggaatctctcaagattttgaaattgctggtaatactcttatgccagctttttctgttccacaggctactgccagatcttctgaaaatgcggaatcctctgcatgatctggaatt

SEQ ID NO: 44887 - DNA, 367 bp, Glycine max
  Clone ID: LIB3139-081-P1-N1-D7
ccacagttggtattcctgagaatacaggtatagcattggcctgtgctatgaatagttcttttagggggcgcgccagttctgatatttacaccatctgctctcaagactgtgaattatggaatcctgcttgcacaaaagcaatgactatgtcatttaatccaaacccgtgttctgatgcatggagtttggaatttctgaagcgtaccggatttcattgtgatatcatttgtgtcactggatggactgccaccccaatgcaggatgttcaggttacaattgattggtttatttcctctcaggaatgtgttcccaggacctattgtgttttaaattcacaaaatccttttgtgttaaataggtggatggg

SEQ ID NO: 44888 - DNA, 363 bp, Glycine max
  Clone ID: LIB3139-081-P1-N1-D8
ggcaatgatattctgtgttgcgattatgctagttttgatggtttgattaccaagcaagttatgagcaagatggcagaaatgataaacagtctttgtggtggtgatgaaaaattgatgcgtgaaaggacgcacctgctgttggcttgttgttcaaggatggcaatttgtaagaaagatgtttggagagttgaatgtggaatcccttctggatttccgctcacagttatttgcaatagcatttttaatgagatgctcattagatatagctatgaaaaattactgcgccaggctaaagctccaagtatgtttttacaatccttcaaaaattttgtttctttgtgtgtgtatggtgatgataactta

SEQ ID NO: 44889 - DNA, 135 bp, Glycine max
  Clone ID: LIB3139-081-P1-N1-D9
gtctattttatttggtgttgcaaatatgctagtcaggatggtttgataaccaagcaggttataatcaaaataccataaattataaacagtctatgtggtggttattaataatattatgcgtataaatgactcacc

SEQ ID NO: 44890 - DNA, 363 bp, Glycine max
  Clone ID: LIB3139-081-P1-N1-E1
gctttctagctagtcataatatcaccattactgatggtattgacaaaactagtgcaactttgcaatttagaaagttagcagattgtgattttctcaagagaaactttaagcagatgtctaatgttttgtgggtggctcctgaggacaaggcgagtttatggtcacaacttcattatgtttcgtgtaataatctggaaatgcaagaagcttatcttgtcaatctcgtaaatgtgttacgagaattgtatttgcacagtccagaggaagctcgccaactgagaaggaaagctctctctcgtattgaatggctgcaaaaagctgatgtgcctaccatagcacagattgaagagttccattcgatgc

SEQ ID NO: 44891 - DNA, 368 bp, Glycine max
  Clone ID: LIB3139-081-P1-N1-E10
ggcttgtgggatgaagaaaatagaatacgcgaagtgatgaaaagcaagggattgaggaaaaaccctgggtatagttggattgaagttggacacaaagtacacatgcttcttgctggtgaccaatcacatccacaaatgaaagatattttggagaagttggataaattgaatatgcagatgaagaagtctggttacctccctaagactaactttgtgttgcaagatgtggaggaacaggataaggagcagatattgtgtgggcacagtgagaagttggcagtagtattaggactactcaacacaagtccaggacaacctcttcaagtgattaagaacctgagaatctgtgatgactgccatgctgtgat

SEQ ID NO: 44892 - DNA, 343 bp, Glycine max
  Clone ID: LIB3139-081-P1-N1-E11
gtgtattttgtttatgtgacgaggttgctggttgcgcgatcaaaacgaggtgtgtggcggacattgtctcgatattggagaactcgaaggagttcgatcggatgaggaaagaacaagacgatattctgtcggagatcaacaaacttcacaagaagcttcatgcaactcctgaagtagttgagaagcctggtgataactcattggctaggctgaaatttttggacactcaagcacaagatctttcacaaagtgaagcatgtattcccaacttactgataaaccaaattgatgccctactgcctacgggtccacaagggcatacacgaagatgaatacgaaaaga

SEQ ID NO: 44893 - DNA, 365 bp, Glycine max
  Clone ID: LIB3139-081-P1-N1-E12
gagagggttccttccggtcgctgtaatcggtttggctgagaagggaatcgaaaatcaattgaggaagaaggatgtcggtgacagcgggtgttagtgatactgtgatagcagttagggataagctcagaggtaaaattggccaaactaaagttaagcgttattggcctggtaaagttcctgaatgggctgatgatgagaacgaagatgctgcccccgccgatattagaccctccagggaagctgccctggagaaagcctttcctcgtcaccaagaagatactgctattgtcagaaaagatgatcgtaggctccgccgtttggctcagagccggatagataaccgtgaggaggtccgagctgatcat

SEQ ID NO: 44894 - DNA, 341 bp, Glycine max
  Clone ID: LIB3139-081-P1-N1-E2
cgacgagttcgctggaaagttcgaacacgatttcgtggctaagctcaaaatcaacgaaaacgaaaacgaagagaagcataacgaagatgaggtagaagaagaggaagagtttagcttcgttctcacgaattccgatggatcgccgatctccgccgaagacgcgttcgacaacggccatattcgtgcgatttttccgattttcaaccaggatcttctgttcttcgacgattacaacggcggcgacggtctccggctgccgataaaggtcttcgtcgaacacgcggatgtttctccgtcgccgtcggaggcgacgacgccggcggtaggaacatactgcgagt

SEQ ID NO: 44895 - DNA, 369 bp, Glycine max
  Clone ID: LIB3139-081-P1-N1-E3
aagaatgctattctcataaatatgccaaatgctgttctttcaatgtggagatattttgttggagacctcgtctttgaagtttctaagatgacttctccctacattaaatgtacagtctctttcttcatagcatttggaaatttggctgatgacaccattaattttgaggcttttccccacaagctggtgcagtttggagagattcaggaaaaagttgtattgaaattttcacaagaggaatttcttacagcttggtcaactcaggtgcgtcctgcaacaactctgttggctgatgggtgtccatatctgtatgctatggtgcatgatagttcagtgtctacaataccaggtgattttgtcattggtgtt

SEQ ID NO: 44896 - DNA, 369 bp, Glycine max
  Clone ID: LIB3139-081-P1-N1-E4
aagattactgaaagtttcatcacatcaagattcaactctgtgcaggctggattacctgatgatctttctgagaaccccttggacaatgctgaacttcttcaggatcaattagattgcttcccatacctatgtagatttcagtatgaaagcagtagtttattcataataaacataatggagccagtcctgcaaatatacacggaaagagctagattacatgttcctgataacagtgacctcattgtgattgaagataaacttgcttggattgttcatatcattgctgcaattcttaagataaaacaatgtactggttgtagtgtggaatcccaggaagtgcttgatgctgaactttcagctcgagtttta

SEQ ID NO: 44897 - DNA, 370 bp, Glycine max
  Clone ID: LIB3139-081-P1-N1-E5
ctgaggctttctttaaatgaagaaaacacaatacgccaatttgcatcaatctagcaaaagtggacagaatgctaatctccaacttgttgaaacaaacaatgatgcaaagaggcacaatcttaagacatagagatctttgaagtatgctgccaagaaatgtgtagctgttttttcattgattatctatggcaaaagaataccagcctcatatgttgctggcaatgatgacaggaagaatacatccaaaattagaggggtggtatcatcatcaactgatttatcatttgagagtaccaccaagaattcatcaaaatggaagttttcttactcctatgcatcatccagcactgtaagtggacaacttggaatt

SEQ ID NO: 44898 - DNA, 370 bp, Glycine max
  Clone ID: LIB3139-081-P1-N1-E6
cgacgagttcgctggaaagttcgaacacgatttcgtggctaagctcaaaatcaacgaaaacgaaaacgaagagaagcataacgaagatgaggtagaagaagaggaagagtttagcttcgttctcacgaattccgatggatcgccgatctccgccgaagacgcgttcgacaacggccatattcgtccgatttttccgattttcaaccaggatcttctgttctccgacgattacaacggcggcgacggtctccggctgccgataaaggtcttcgtcgaacacgcggatgtttctccgtcgccgtcggaggcgacgacgccggcggaaggaacatactgcgagtggaatccgaaagcggcggtgaagagcaac

SEQ ID NO: 44899 - DNA, 250 bp, Glycine max
  Clone ID: LIB3139-081-P1-N1-E7
tgttggagtgcttctcagtggtgagggatggttgttattgttgctgaaagtcagacgtaaacaaaaactaatagaagcataactaatattatgtataagaagaggaagagtttatcttcttacttactaattccgattgatcgcctttcttcatctaatacgcgttctacaactgccttattcttacgatttatcctattatcaaccaacatcttcttaaacctttactattacatctgcgtcttcattt

SEQ ID NO: 44900 - DNA, 367 bp, Glycine max
  Clone ID: LIB3139-081-P1-N1-E8
ctgtcgctatcttaatcagaagaagcgcagcttcaagcgagtgacagccaccagccgtgggtcgtatgcacagccgcggtaagggtatatcctcttctgctttgccctacaaaaggacacctcctagctggctcaagatctcttcgcaagatgtcgaagaaaatatctgcaagtttgcgaagaaaggtttgaccccgtctcagattggtgtcattctcagagattctcacggtattgctcaggtcaatagcgtcactggcagcaaaatccttcgcattctcaaagctcacggacttgcgcctgaaattccagaggacctgtaccatttgattaagaaggcagtttcaattaggaagcatcttgagag

SEQ ID NO: 44901 - DNA, 346 bp, Glycine max
  Clone ID: LIB3139-081-P1-N1-E9
ggcacgatctgttggagtagccgtggacttttctcctaccagcaaattagcccttcgttgggccgttgataatctcatcaacaaaggtgatcaaatcatcttgatcactgttcagcctccccaagctcatcacacccgaaaggagctttttgaggacactggttcacctttggttcctctggaggaattgagggagttgaattttactaagcaatatgggattgctagggatcctgaggtcataggtatccttgacactgccttcaagactaaaggggcaaaggcagtggcaaaggtgtactggggagatccaagggagaagttgtgtaatgctgtggaagatctt

SEQ ID NO: 44902 - DNA, 363 bp, Glycine max
  Clone ID: LIB3139-081-P1-N1-F10
ataatgaagtgcgatgttgatatcaggaaggacctttatggtaacattgttctttcaggaggaacaaccatgttccctggtattgctgacagaatgagcaaggaaatttctgcattggcacccagcagcatgaagatcaaggttgtagcaccacctgagagaaaatacagtgtctggatcggtggttctatcttggcatctcttagcaccttccagcagatgtggattgcaaaggcagaatatgacgaatctggtccatcaattgtgcacagaaagtgcttctaaactgtttcgatagatagggttattgaagggaaagactactatcatcacgatttgtctggaagcaatgcattgcagatt

SEQ ID NO: 44903 - DNA, 365 bp, Glycine max
  Clone ID: LIB3139-081-P1-N1-F11
gaaaaaagtagagtggtatgtgggttgctgcggcaacaaaaccattcatcaaattccaattccacagacacactacttctcttccgcttcttctgatggcaaaccaagcttcactctccttttcttcttccgtgtctcctgttcacgcgcctctcaagcgcgtgggcacgcacaacggaagctttcattgcgacgaggccctcggctgcttcatgattcgcctcacgaacaaattcaacagcgccgaaatcgttcgctcccgagaccctcaggtgttggaggtactcgatgctgttctcgatgttgggggagtgtatgaccctgcccgagttcggttttgacattatcaaatgggatttttagaa

SEQ ID NO: 44904 - DNA, 153 bp, Glycine max
  Clone ID: LIB3139-081-P1-N1-F12
gcgaggcaaacggaatgaagggcccgcattttctcatagccggggcgggcaatacatcaatactatcatgtttttcgcttcatgagcaaccaccccaatcattattgtagaacgctttatccgggataacaaggtagtctcgtttcttgcatg

SEQ ID NO: 44905 - DNA, 360 bp, Glycine max
  Clone ID: LIB3139-081-P1-N1-F2
ccaggaactctctcttactttcttgggtttgacccttctgccatttattggctttttggttgggctgttacgcctgggagtgaacttgaagaattttccttcttcagcagtacctgctgcatatgccatcttattccagcttggcattgccactgttctattgctttatgtacttttctggttgaagctggacttgttcactacactcaaaactgtaggatttttgggagcttttctgttgtttgtgggacacagaattctttcccatctcgcgtcaacatcatccaagttgaagtctgcataagtaaaaggaagattgtctatttataaagacatgacatgataatgtgtttttccttg

SEQ ID NO: 44906 - DNA, 367 bp, Glycine max
  Clone ID: LIB3139-081-P1-N1-F3
acctttcaaagagacgaagccttcgaatctctctgaaacttttctcttctctttgattcttctctatcagttaaacattagaatgagccgttcacaggatccacacccttcccgatctttcttcccttttggaaatccttttcggatgatatcacctaaaggctctcgcatgtctccacaacttcttgcagtgttgcaagcttttgaggcaacattggcagagaggctgaaaaatcttatgcctaaaagcaaggatgaaatcctcaccttgtcttggatgactttagctatgaagtcactttgtgaaagtcacaatgacatacggacccttatgactgcccttgagcttcctgtgagtgattgggag

SEQ ID NO: 44907 - DNA, 370 bp, Glycine max
  Clone ID: LIB3139-081-P1-N1-F4
ggtggctcctgaggacaaggcgagtttatggtcacaacttcattatgtttcgtgtaataatctggaaatgcaagaagcttatcttgttaatctcgtaaatgtgttacgagaattgtatttgcacagtccagaggaagctcgccaattgagaaggaaagctctctctcgtattgaatggctgcaaaaagctgatgtgcctaccatagcacagattgaagagttccattcgatgcagaggatgatgaatgctcctgattcaaatgataatattgatctactgttgagcattgatttgttgggtttacaaggagcaggtaaagcttttccaaacaagattgtttttgatgataagcttgtgttggctaacaca

SEQ ID NO: 44908 - DNA, 373 bp, Glycine max
  Clone ID: LIB3139-081-P1-N1-F5
cagaccatatcagattcaaggaacatgatttagaaaactgccaagcccacccatattcattctctcaaaacttccaaccatgaactgaagcaccacacatacccacttcctccaaagacatcatttttattaccaatcttccaatttcagagaaaattctttgtgggcatctcttaattaaaaaaatgtcaagcttccccaacacggtggcggaaggccgcaggtccagcaaggcaccggaaaaatccactttttctcagacttgcagcctcttgagccagttcttgaaggagaaacgtgcttctgctgattccacctttcgaattggtgggaaaatggaacccatagcgagtaccaagggtttgttaggaag

SEQ ID NO: 44909 - DNA, 330 bp, Glycine max
  Clone ID: LIB3139-081-P1-N1-F6
aattattattactacaacaacaacaacaaccatgtcgccactttcaggtcgtgccggaagcctgttagccgacccgaccaaaggaaacgggctgctcccggttctgcccagccggtggtggcggaggccgcggcggcggtgttgaagagaccgagccgtgatgattcaagggtggccaggagccaaagtttggagatgactacgattctacgtaggggccagtcgcttgattcggctgtgaagagcgaggtgtacgccggatctgcgttcgcggtgtctccgacgcctgaagcgctttctctgccgtcttttttgacgaagaagcaggac

SEQ ID NO: 44910 - DNA, 351 bp, Glycine max
  Clone ID: LIB3139-081-P1-N1-F7
gctgttatctgagatgttctgatgaaaatgcatctgaatctgaaccaagttacaagagctacccaaaacttctcagaaacattacaaataggagaaggaggttttggaactgtctacaaggccaagttggaagatggcctggttgtggctgtaaaacgtgcaaagaaggaacattttgatagtttgagaacagaattcagcagtgaaattgaacttttggccaaaattgatcatcgaaacctggtgaagctactaggttatattgacaaaggaaatgaacgccttcttattacagagttttgtgccaaatggtacccttagagaacatttggatggtttgcgtggaaaaat

SEQ ID NO: 44911 - DNA, 261 bp, Glycine max
  Clone ID: LIB3139-081-P1-N1-F8
atctcgttcttaaccattcaaaagttctggcatttgttagattgtggactggactgattatacatatcatcccgatatccaggtacaccatgttggtagtgtagtgtgtagtgggttgtatatgctacgcaaaggagtaatcatagatgagatgaggcattatgttgtggatttaagtatggtggcatggatggacttcctcaccttccttggtgtgtgggaactatttgtgtttttttctactgaatttgtactttgttt

SEQ ID NO: 44912 - DNA, 366 bp, Glycine max
  Clone ID: LIB3139-081-P1-N1-F9
ctcatcctcacgaatcacactctccacagtgcgattcattcaccaatggatcgcagcggcgttctctctctcgcattcatctgcattgtagtcgccggcgtcggaggacagtctcccgccgcagcgccgtcaaacactccggcaactcccgccgccgccactcccgcccaagcaccttccacagtaccgaaatcaccagctcccgttgcttctcccaaatcatctccaccagctgcaacccctgcatctactccggcggcatctcccaccaccacccccgtcgcgcctgctccggtgaccaagccacctgcagcctctccttcttcggcgactcctccaccggcaactcctcctccggcgccggtt

SEQ ID NO: 44913 - DNA, 370 bp, Glycine max
  Clone ID: LIB3139-081-P1-N1-G1
gagaaacaaagaaaagaagaaaatggctgtggccaacaatgtgctttgcattttcttcattatctccttaacatgtatggttcaagctcgaatcccaggggtttactctgctggtgcatggcaaagtgcccacgccaccttctacggaggctccgatgcttccggcaccatggggggagcgtgtgggtatggaaacctgtacagccagggttatggtgtgaacacggcggcattgagcacggcgctcttcaacagcgggcttagctgcggtgcgtgttttgagataaagtgcgcaaacgacaggcagtggtgccactccggcagtccttccatcttcatcaccgccaccaacttttgccctcccaacttc

SEQ ID NO: 44914 - DNA, 192 bp, Glycine max
  Clone ID: LIB3139-081-P1-N1-G10
actttattagctagatccccgctcataatatgaccatttcttatgctattggcacggctacttcaactccacaatttaaagagtttacttattgtaattctttctagagaagctcttactatatgtttaacgttttgtgtggaggcttctgcttacactgtgactttatcctcacaaccctattattaaccg

SEQ ID NO: 44915 - DNA, 366 bp, Glycine max
  Clone ID: LIB3139-081-P1-N1-G11
attttgtttaaccgcgatcacaggttgccggggcttgaaaccggaaacaaaggcaagcgttacttgatttcaagaatctctcaatttcttcctacttctttgtgtacgatttcttaagggaaagaaaatcactctctgtgctggccacagacttcgtgaatcattttcttttccactcttagtttatttgctgaacactctcctatttgatataggacttcgtgtcagatttaaacttcttctgtttctttctcagttctctgtttaatttcaagttcaagctggtgaaatcttggattagtgctcccactttcctatctggtataggacttcgtgggtagacttttctatttctcttctttcttt

SEQ ID NO: 44916 - DNA, 381 bp, Glycine max
  unsure at all n locations
  Clone ID: LIB3139-081-P1-N1-G12
tacataaactccaattcacttcaaccttactatctcgctcactctcctncaagtgcgggataaaaaacatttttctcgccactatcctcttataacttcttactatattttattttacaataacttttaaatcaaatttctcatacctttctccacatcatatcttcttcatttatttatactataatactataacaaaattcacttcttatttttccaaactttttttcccctattcttcttcttacaaattaactccttatctctctcttttatcaactatttctctttatatctacatttataacatcatttttatcttacattttttactcataattattctatttactttcttaaaccctacttaatatttttcct

SEQ ID NO: 44917 - DNA, 370 bp, Glycine max
  Clone ID: LIB3139-081-P1-N1-G2
cagatctgctccttccgttccccctcagaaatcagttgaagagcatgggtcgtggagttagcagtggtggtggtcaaagttcattgggttatctttttggcagtggagaggcccctgccccaaaaccagcaacaaataatgccccagcccaacctgaagtgcaggctgtaaataatgtgcctcctccaaaagcatctcctcctactaaaacaatagaccctaacaaggctgctggtatcaacagtcattctactgatggccagaacaccggcaacttcatcacggaccgaccctcaaccaaggtccatgctgcccctggtggtggttcttccctaggttatctctttggtgaacctggggaggggaaatg

SEQ ID NO: 44918 - DNA, 366 bp, Glycine max
  Clone ID: LIB3139-081-P1-N1-G4
gtgctttgtttaggtgaactaattcggagaccttgcaagacttcatcaatggctgtcaaagtttatattgtgtactactccatgtatgggcatgttgagaaactagcagaagaaataaagaaaggggcttcctctgtggaaggtgttgaggccaagttatggcaggtacctgagacactgctggatgaggtgcttggtaagatgagtgcaccacccaagagtgacgtaccagtcattacccccaatgaactatccgaggctgatggctttgtattcggcttcccaacaaggtttggaatgatggctgctcagtttaaagcctttctagatgctactggaggcttatggagagcacaacagcttgca

SEQ ID NO: 44919 - DNA, 362 bp, Glycine max
  Clone ID: LIB3139-081-P1-N1-G7
cttttcctctgtattgagacatggccgaagaagaggaggaatcagagctcagcgatgagcagaaagtggagatcgcgaaatggttcctcctcaactctcctcccggagaaatccaatacgttgccaaagatgtgaaatcgattctcaacaacgacgatttgtacaaggaagccgcttccgaggcttttccctattacaacaaatcgcacttgatttccattccaatgcccaaccgaagcggagacgtactggttacttcgttcggtgagcttgagggtaatgcatttcttgaacctaggactgcgcaagttgcaattgttgaccatgctaaacaagtttgtacagaggtgagacctgccaca

SEQ ID NO: 44920 - DNA, 366 bp, Glycine max
  Clone ID: LIB3139-081-P1-N1-G9
aatttaaatgctttctagctggtcataatatcgccggtactgatggtattgacgaaactagtgcaactttgcaatttagaaagttagcagattgtgattttctcaagagaaactttaagcagatgtctaatgttttgtgggtggctcctgaagacaaggcgagtttatggtcacaacttcattatgtttcgtgtaataatctggaaatgcaagaagcttatcttgtcaatctcgtaaatgtgttacgagaactgtatttgcacagtccagaggaagctcgccaattgagaaggaaagctctctctcgtattgaatggctgcaaaaagctgatgtgcctaccatagcacagattgaagagttccatt

SEQ ID NO: 44921 - DNA, 365 bp, Glycine max
  Clone ID: LIB3139-081-P1-N1-H1
tgaagactttcatgacagggactatgatgttgcaggtgcagcaaataatttgagccaggcttttagatacaaaatttatggaaatgacgataatgaagaggaacatggtggtcttgatcgagatgatgaggatgtctactttgacgatgattctgctgaagtagtcatatcttccctgagacttggtgatgatcaagggagtaatctgtttacaaactccaactggtttgcattacaagacaacataatttgtgatgcacctgggggtacatcatcctctgagatgatggatgagataaaattgaatgcaactgcatatggtggtagcaacagtagtgatgatgaggtacaggtctgagaagatg

SEQ ID NO: 44922 - DNA, 367 bp, Glycine max
  unsure at all n locations
  Clone ID: LIB3139-081-P1-N1-H11
attccaatatattccattctctctgtgtattgcctgcctgtcccttaagaggcagatcttcntcaagaccctcaccggcaagaccatcacccttgaggtggaaagctctgacaccatcgacaacgtcaaggccaagatccaggacaaggaaggaatccccccggaccagcaacgtctcattttcgccggaaagcaacttgaggacggccgtacccttgctgactacaacattcagaaggagagtactcttcacctcgtcctccgtctccgtggtggcatgcagatcttcgttaagacactcaccggcaagaccataaccctagaggttgaaagctccgacaccatcgataacgtcaaggccaagatc

SEQ ID NO: 44923 - DNA, 365 bp, Glycine max
  unsure at all n locations
  Clone ID: LIB3139-081-P1-N1-H12
attcagttcaaaaatagaaagaaagagaaatggcnagaccttggcgcatcatgttctttattccctcacttggatcgttaattccgcgaacgagcttctgcccttcaaattaaccatggagaatattggtgaggagtacggctactggccggagaacgacatgcttttccaaaacgaagaccttggcagctgggcgataatggatgaggcagcgttatcagggtcagggtactatgattcaagctccccggacggtactggtgcttcttcatcggtggcatctaagaacattgtctccgagaggaatagaaggaagaagctcaacgataggctttttgctctaagagcagtggtccccaacatta

SEQ ID NO: 44924 - DNA, 371 bp, Glycine max
  Clone ID: LIB3139-081-P1-N1-H2
tggcaggtgacagcaagagcaagattctgttcatcggaggggctggttacatcggaaaattcatcgtggaagccagcgccaaagctggccacccaactttccttttggtgagggagtccactctctccaaccccgcaaaatcacccctcatcgacaatttcaaaggcctcggtgtcaatcttgttttaggagatctatacgatcaccaaagtttggtgagtgctataaagcaggtcgatgtggtaatttctactgtaggacacctgcagctagctgatcaagataagatcatttctgcaattaaagaagcaggaaatgttaagaagttctatccatctgagtttggaaatgatgtggaccggactcatgca

SEQ ID NO: 44925 - DNA, 371 bp, Glycine max
  Clone ID: LIB3139-081-P1-N1-H3
ggattgggtatattttagtgcagagaagaccaaacggcaggaggtgtgatgttccactactagtactggtactagtatatgaaaccgtgttggtgttggtcttcttccatctactcttggcatgacatgactctcagcgtttcaatcctgacctcatcatcttcgcgtgtgcgcagggaatggaggagcagacttttgtttccaaagcgagaaccgcctttcattccgcggcggcgaaagcggagcgtgttctcttggatttcaaatccgatcgagatcacgataagcaatcgtcgccaaacaccttcaccggccaacaaccagaagctgaatctcctcacaccaacgaaaacgattccaagcttcgtagt

SEQ ID NO: 44926 - DNA, 367 bp, Glycine max
  unsure at all n locations
  Clone ID: LIB3139-081-P1-N1-H8
tggtatgtgacagcaagagcaagattctgttgtcgganggactggttacatcggagaattcatcgtggaagccagcgccaaagctggccacccaactttccttttggtgagggagtccactctctccaaccccgcaaaatcacccctcatcgacaatttcaaaggcctcggtgtcaatcttgttttaggagatctatacgatcaccaaagtttggtgagtgctataaagcaggtcgatgtggtaatttctactgtaggacacctgcagctagctgatcaagataagatcatttctgcaattaaagaagcaggaaatgttaagaagttctatccatctgagtttggaaatgatgtggaccggactcat

SEQ ID NO: 44927 - DNA, 367 bp, Glycine max
  unsure at all n locations
  Clone ID: LIB3139-081-P1-N1-H9
caatctataagttatcttctttgaatagtaacgcttgttgggagccgacacaaaagcgtaanctnaagctgaagaaggttgctgttaaggttaagaagattgtggcctcggttttgatgttcatgcgagttggttcttttaggtcatgcagttctaggtctcagatttctgccacctcaccaaataggaagaactcttgaggatgttgttctgacgtgggtttaggatggtttataattctctctataatctttggttctttcacactcaggagttttagtgtgtgtttgtgaaagcgaacgcaggcgtttttgtattggaacgcggaatttttccgttttcaaacacatccttattagtatattta

SEQ ID NO: 44928 - DNA, 393 bp, Glycine max
  Clone ID: LIB3139-082-P1-N1-A10
ggcattcaagaaatccagtcgcagattggtgaagtaaatgagattttcaaagatcttgctgtgcttgtccatgagcaaggagcaatgattgatgatatcgggtccaatattgagcattcccatgaagcaactgcgcaagcaaaatctcaacttgccaaagcttcaaagacgcaaagatcaaattcatctttgacatgcttgcttctggtgatattcgggatcgtgcttctaatcgtcatcattgttcttgctgcttagtcatagactctggattctattacaaatcaaatgctcttacatactgagttgcagatacgatctcccttgctgatgactacactgaatggtgatttaccagatctcacgaatgaccggaatttgtctcatcaggtt

SEQ ID NO: 44929 - DNA, 392 bp, Glycine max
  Clone ID: LIB3139-082-P1-N1-A11
atttgaaattttaataaaccgcgatcacaggttgccgcaccttaaaaccggaaacaaaagcaatcggtacttgatttcaagaatttctcaatttcttcctacttctttgtgtacgatttcttaagggaaagaaaatcactctctgtgctggtcacagacttcgtgaatcattttcttttccactcctagtttatttgctgaacactctcctatttgatataggacttcgtgtcagatttaaactttttctgtttctttctcagttctctgtttaatttcaagttcaagctggtgaaattttggattagtgctcccactctcctatctggtataggacttcgtgggtagacttttctacttctctcctttctttcactctcttcttctcactg

SEQ ID NO: 44930 - DNA, 391 bp, Glycine max
  Clone ID: LIB3139-082-P1-N1-A12
gaacaaagttaatagtgtcagcggcaacacctcacatttacgatggatctatgggacaaaccctgaccacttccacctatagaggttttactggctcatgtctgtgctgagtgcgttgtatttcttgcatttctaggcttgggctatctgatactcggattgagggtcaggatctacaaacacctgaaaaggatgatatatgccctataggctagctcccaaaaaggaatataaataacgccttgatgacaatgactaatgccactaatcacaacatatattcatgtgccttaacatcatgcttggtaggttggtttgatctcaaaacaatgtgaattctttttgggcgggctgcctactatactctattcgacccgagaattaattgctg

SEQ ID NO: 44931 - DNA, 348 bp, Glycine max
  Clone ID: LIB3139-082-P1-N1-A2
gcgaaatccttttcagttcatctctttggtcacgttttcacaggaacataacatattctgtggaaatatggcaaaacttggagactgtgcagctgatttttttattgcagcaatggttctgagcacgttttacgtgaccaaaactgtggcacaatcagaaattgcacccacatcgcaaatggagactggtgcaagggttgctttgtctgattgtggggtgaccttatgttcttctgggttggtttctattgaggcatttatgacgcagtgaattgcaaggcatattggctcctattcatggttgattggtcttatcatagttcgtgttagaactctattttatgacga

SEQ ID NO: 44932 - DNA, 395 bp, Glycine max
  Clone ID: LIB3139-082-P1-N1-A3
ccaactcttacaagcttttaccaatctttcacaactcttgttcaaggcgaaacagcttataggatgaagagcaaaatcttgaaggcactaccaaaagcagttgcagcagtcaccgtgacatttcaaaaccatccattcagcccaggcagggatcacaaatcaaagcctatcgtatctatgattccccatgaagctagaagaaaaacccacgatagaggcaataacggcattgatgaaatttattcccaagaacccacttcaccaaaaatctcctgcatgggacagatcaagcacaagaagaaacaaatcaaaaaatcaaagtcaaagagcaagtccatgactaaagaagcgaggaacgttgctagcaaaaaaacatcctcagcttccagagacat

SEQ ID NO: 44933 - DNA, 397 bp, Glycine max
  Clone ID: LIB3139-082-P1-N1-A4
ggcaaaaccaattactgttcccaagctgggaaagaacattcaagtactttcaagttcctttgtcaataagcaagaccaatacactgtggaaggagtgcagaatcttggagacaaagcagtgatgtgtcataggctaaatttcagaactgcagtattttactgccatgaagtccgtgaaacaacagctttcatggttccattggtggctggtgatggaaccaaaactcaagcacttgctatttgccactcaaatacttctggaatgaatcatcaaatgcttcatcaacttatgggagttgatcctggaactaaccctgtttgccatttccttggaagcaaggccattttatgggtacccaatttatctgtggacactgcctatcaaaccaacattgtt

SEQ ID NO: 44934 - DNA, 396 bp, Glycine max
  Clone ID: LIB3139-082-P1-N1-A5
ctcgagccgattcggctcgagaaattgcacttcccaaaaacacagttggaggaaccattctgcgtagtgatctattggcaaattttttgacagagggcaattttagagcaagtgttgatttgcagcgcactcatcgtattaaaggaatgattaaaatggtggccacagttggtattcctgagaatacaggtatagcattggcctgtgctatgaatagttcttttagggggcgtgccagttctgatatttacaccatctgctctcaagactgtgaattatggaatcctgcttgcacaaaagcaatgactatgtcatttaatccaaacccgtgttctgatgcatggagtttggaatttctgaagcgtaccggatttcattgtgatatcatttgtgtca

SEQ ID NO: 44935 - DNA, 395 bp, Glycine max
  Clone ID: LIB3139-082-P1-N1-A6
cctgcttttgtgctctcttcttctgtccaaactccaaacttaactcgtcgctttcttcatacttcttaccttctagtgataatgggaacgaatctcagcactcccaaaactgagaagtcttctgatgatggtgaaaatgagcatcttagatatggtttatcatctatgcaaggctggcgtgcaacaatggaagatgcacatgctgcacatcttgatctggatgcatccacttccttttttggtgtttatgatggtcatggaggtaaagtggttgcaaagttttgtgccaagtatcttcaccagcaggtgctcaagaatgaagcatacatagctggagatataggaacctctcttaaggaatcatttttcagaatggacgacatgatgcgtggtca

SEQ ID NO: 44936 - DNA, 364 bp, Glycine max
  Clone ID: LIB3139-082-P1-N1-A7
tcactatagcagagccgtgacgtgcactcctcccttacctcagcttggggttcgagtagagtgactcaccatttaaccgcttactgaagcaatcatttcgtgatttcaagaatgtctcaatggcgccctacttctgtgtagccaactgctggagggaaagaaaatgactctatgtgctgaacacagagttcgcatatcatgtggtgttgcactcctagtttattcgctgaacactgtcctctttcttataggactttgtgtcagattgcaacattggctgtttctttatcagctctccgtgtaccttcaaggtcaagccgaggagatttagaattcatgctcccactctcctacatgagcttgg

SEQ ID NO: 44937 - DNA, 385 bp, Glycine max
  Clone ID: LIB3139-082-P1-N1-A9
gagaaattggttcctctttatggaaggggcaaaacacagactgatcccaggaccaagtcatatcctggaatggagatcccccaccgtccttccgggcagaggccgcaaaccgcgccacccccgccacctcctgaggctaaccctttcgggagttatgggtttggactaatgggagggttcattcctatggcaactgctcgatttggaaacttcacgctttccactgcctttggcgggtttatcccgtccctactcaacattcatttccatgggtttcaggatgccactgtctatgggacaacgtctggttatccctttgggtttaatggctttcatggagggaacacgcggggttttacgcaagcaactggtcatgtgcagcggc

SEQ ID NO: 44938 - DNA, 390 bp, Glycine max
  Clone ID: LIB3139-082-P1-N1-B1
attaaatgtacagtctctttcttcatagcatttggaaatttggctgatgacaccatcaattttgaggcttttgcccacaagctggtgcagtttggagagattcaagaaaaagttgtgttgaaattttcacaagaggaatttcttacagcttggtcaactcaagtgcgtcccgcaacgactctgttggctgatgggtgcccatatttgtatgctatggtgcatgatagttcagtgtctacaataccaggtgattttgtcattggtgttaagttgacaaccataaacaatatgtgtgcatatgggctcaatcctggtatttcaagttctcgtcttttgggcaccattcctcaatccatttcacagcaaactgtttggaatcaaatggcaaca

SEQ ID NO: 44939 - DNA, 393 bp, Glycine max
  Clone ID: LIB3139-082-P1-N1-B10
gattatcctaagtctttgggaatagtgctgcaatggcttcaagtcaggaggaggtgacccttttgggagctactggaagcccatttgtgtgcagggttcatattgccctcaagttgaagggagttcaatacaaatatgtcgaagaaaatttgaggaacaagagtgaactgcttctcaaatccaacccagttcacaagaaggttccagtgtttattcacaatgagaagcccatagcagagtctcttgtgattgttgaatacattgatgagacatggaagaacaaccccatcttgccttctgatccttaccaaagagccttggctcgtttctggtccaaattcattgatgataaggtttttggcgctgcatggaaatccgttttcacagctgatg

SEQ ID NO: 44940 - DNA, 392 bp, Glycine max
  Clone ID: LIB3139-082-P1-N1-B11
gggttttagggcacacaccgcagggagacggtttctttcactctctgcaattcgcgatggctgacgaggactatgaagatattgacatggggtacgaagatgaaccgccagagcccgagattgaggaaggtgcagaggaagatgtggagaacaaaaacgatgaaataactggagagcctattgacaccgaggataaggaagaggaacaaccagtgaagcggcctcgaaagacatcgaaatatatgactaagtatgagcgtgctagaattttgggcacccgtgctcttcaaatcagtatgaatgcacctgtcatggtcgagttggagggggaaactgacccactcgagattgctatgaaggagcttcgagagcggaaaataccctttacaatt

SEQ ID NO: 44941 - DNA, 100 bp, Glycine max
  Clone ID: LIB3139-082-P1-N1-B12
ttgtggttttagatatgacatatatcactggaaaccattatggcaatgggattccctgctggcgacatgagctctgggtttttcgctatgtggaaggatt

SEQ ID NO: 44942 - DNA, 394 bp, Glycine max
  Clone ID: LIB3139-082-P1-N1-B2
gggaaggttctggggtgcaactgtcctacggatcccctgccccccaagacaagtccaacaagtttctaaaattagatagagtccacagatatcattgggattggataagtttctagaaatggaaagttccaagaacaatagagtggagaagagagggtatgagctagttgaggagggtgatgatgtacagcaccatcttacacagacaaagaaaccaaaactacccgtttttgccagtgtgattgtggaagctttaaaggtggatagtatgcagagactttgctcatctttggaaccccttctcagaaaaattgtaagctacttttgctttccttgtattaaatcctgcataatagtagactgtagaccctctgggcaattcttcacaaaagaa

SEQ ID NO: 44943 - DNA, 394 bp, Glycine max
  Clone ID: LIB3139-082-P1-N1-B3
atttgcaatagcatttttaatgagatgctcattagatatagctatgaaaaattactgcgccaggctaaagctccaagtatgtttttacaatccttcaaaaattttgtttctttgtgtgtgtatggagatgataacttaattagtgttcatgaatatgtcaagccttactttagtggttctaaattgaaaagctttctagctagtcataacatcaccattactgatggtattgacaaaactagtgcaactttgcaatttagaaagttagcagattgtgattttctcaagagaaactttaagcagatgtctaatgttttgtgggtggctcctgaggacaaggcgagtttatggtcacaacttcattatgtttcgtgtaataatctggaaatgcaag

SEQ ID NO: 44944 - DNA, 391 bp, Glycine max
  Clone ID: LIB3139-082-P1-N1-B4
tcaacccatactccatggaatggactggtttggccaatagattactgagtaagggcaacgatattctgtgttgcgattatgctagttttgatggtttgattaccaagcaagttatgagcaagatggcagaaatgataaacagtctttgtggtggtgatgaaaaattgatgcgtgaaaggacacacctgctgttggcttgttgttcaagaatggcaatttgtaagaaagatgtttggagagttgaatgtggaatcccttctggatttccgctcacagttatttgtaatagcatttttaatgagatgctcattagatatagctatgaaaaattactgcgccaggctaaagctccaagtatgtttttacaatccttcaaaaattttgtttcttt

SEQ ID NO: 44945 - DNA, 398 bp, Glycine max
  Clone ID: LIB3139-082-P1-N1-B5
cattttctctggagacaacaggctcactgagaaaacaatttttacttgcagagatttggacatcttggttgtttattatacaatagcaactcaatttagaaaatttctaccgcattacattaggtggcatctgtataccttgttgatttacattctcccatcttttctcactgctgaaattaaatataagcggaatctgagtaatattcatatttccggcttattttacgacggcagatacaaattctggactaaacacgagaaaaatcttgctttgacagaagaggaaaagatggaagtgattagaaatagaggtattcctgctgatgttcttgcaaagcgagctcatgaatttgaaaaacatgttgctcatgaaagcctcaaggatcaaattcctg

SEQ ID NO: 44946 - DNA, 245 bp, Glycine max
  Clone ID: LIB3139-082-P1-N1-B7
ggttcgctggcgctcctgcatcatgttttccacccaggaccacgccgccgtcgctattgtgcgggtctgtgccggcgtcttcgcctggaggggtgagaccctacaagtgtactgtgggtgcaccgagcgcggcatcgactgcagcccggtcgactgacgtgcgctcctcaacgacgtcggtgagcgctgtgcgcccatctttcactagcggcggctcgggctaggtgcatctatgagaagaccgg

SEQ ID NO: 44947 - DNA, 231 bp, Glycine max
  Clone ID: LIB3139-082-P1-N1-B8
tccttagctttggattcgggtcgagggatttcttacttcaggacctgctgggttaatttttttgggaaaatttacagggcaaaactgaagctccgaaaaggtttaccctccgcatggatgattcctcaaagatttcaccctttcaaccaaaaggtcttattggctggggaggaaaaaaccgaattttttccgtggaggtgggccaccgacctaaagagattatcaggtaaa

SEQ ID NO: 44948 - DNA, 392 bp, Glycine max
  Clone ID: LIB3139-082-P1-N1-B9
tgattttttacttcgggacttcttggataaattatatggagaaaataagaaggaaaaaatggagcttctgaaagggttaaccatcggaagggatgatacttcaagaatttcacctcttcaacaagaggttctcatcgtctggggagaagaagaccgaatatttccggtgaagttggcccacgaactaaaagagataatcagtaaaaaggcaagattggaattgataaaagaggcatcccatgtgcctcaaatggaaaagccaggagaattcaacaacattctcctaaatttcttacaggagcattcttgagtattatataaattaggggcacaatttgtctacatgcgaacgagaatggctacaacaagcgaatacgaaaaccaaaattcgc

SEQ ID NO: 44949 - DNA, 394 bp, Glycine max
  Clone ID: LIB3139-082-P1-N1-C1
tcaagattggtgtgtggagaataggcaacatggggtggagaggattccaacaccaatgataccaattagcccaaatgaggttgctgagcttctgatgcaagtgaaggcctcagcaaggggtttggaccaatatggttgccttaaattggtgcagaaattgaagaggtggggtggtgagagtgagaggaacaagaggtgcatagtggacaatggagcacctgtggcattggcttcatcatttgatgcatttgccaatgattctgttgagagaaatgtggtggttcttgaggagattttgtcagcactcaattggatgtttccacttcaattggaggcacacaagtctttggggtctttggcttctctaagatgcatgagttggttcttgaagcac

SEQ ID NO: 44950 - DNA, 92 bp, Glycine max
  Clone ID: LIB3139-082-P1-N1-C10
gcatgaccctcttgttgagtatgctctgcctatttgaaaatttccacacctcttttaattatcgtaatgatgtgtgaagtgtgtgttatttt

SEQ ID NO: 44951 - DNA, 392 bp, Glycine max
  Clone ID: LIB3139-082-P1-N1-C11
gagagaacaccattgtattttgattctagcaagcagagcttttggcaattttctattgaccttctgggcggaggaattttagtggacaaaactggagattggatcacacttatacaaaattctccaattagtaacttgttgagagttgctgcttggaagaaaggttgcttaatggtcaagattgtgatgtctgggaatgcagcagtcaaaaggatgtgattgggcctcattggtacaagtgtttttaacaaacagcaacagtacagagcattttgatgcatgtaagtggacaaaatcagaaccacattcctgggaattaatcttcccaatagagagatgtggtcctaataatggttttgaaaagtggagttctgagtgggcaaatcaaactt

SEQ ID NO: 44952 - DNA, 391 bp, Glycine max
  Clone ID: LIB3139-082-P1-N1-C12
gttggaggaaccattctgcgtagtgatctattggcaaattttttgacagagggcaattttagagcaagtgttgatttgcagcgcactcatcgtattagaggaatgattaaaatggtggccacagttggtattcctgagaatacaggtatatcattggcctgtgctatgaatagttcttttagggggcgcgccagttctgatatttacaccatctgctctcaagactgtgaattgtggaatcctgcctgcacaaaagcaatgactatgtcatttaatccaaacccgtgttctgatgcatggagtttggaatttctgaagcgtactggatttcattgcgatatcatttgtgtcactggatggactgccaccccaatgcaggatgttcaggtta

SEQ ID NO: 44953 - DNA, 396 bp, Glycine max
  Clone ID: LIB3139-082-P1-N1-C2
ctcgagccgctttatttttgggttatactgatcctgcaaagcctgatctccctcgaatgcatgagtggcatttcagatctgggcttgatcgctacatctggataattggaatgatttatgcctattttcatccaaatgttgagaaatggatggaaaaattggaagagagtgataccaagaggagagttaccatcaaaactggcatcgtttctgttgcattatttgttgggtacttgtggtatgaatacatatacaagctggacaaggtctcatacaacaagctccacccctacacctcttggattccaattactgtatacatttgcttgagaaatttcagtcagcggcttcggaatttctctttaaccctctttgcgtggcttggcaagattactt

SEQ ID NO: 44954 - DNA, 394 bp, Glycine max
  Clone ID: LIB3139-082-P1-N1-C3
cggctcgagcaactcttttcctttttgcagctccctttaacccaaccaatttgccatgtcaagtttggaggaaccacttggtcttgacaagttaccaagcatgaataccattgacaggattcagaggttctcgtcaggttcttgccgtcctagagtagataacttgggcatgggaaactgctggattgaaggacgaagttgcagaacatctaacagctgcaagtgagtcaagtattgcaacttaagttaaggacttgatacattttactgatctatcattcaacatccttttcccctcttttatgttctaatccctgctgttgtatagtcttaaatctgctacctgcctactatgtccagaatatctttctatctctgcgcagcgaagatgatg

SEQ ID NO: 44955 - DNA, 388 bp, Glycine max
  Clone ID: LIB3139-082-P1-N1-C4
gagggagttctggacaccctcactttataactagacactgatatatacaacacggtcatatagacgagctatgctaatagaacatttgaagggttagatgactgctgcgtgattgtacctcctcacagaagtatgtttgataaacccatcattagccttgtataatgttaaaaaactaaattttgaaacctcagctttgtgatagagtggaatcctgtctgatttctaaatattgcattgagataggttcaacttagagtttcttgaaagaatcaatctcttcctacctttatcgaaagttttttagctttaatttcattagatttggaagactatgaacatctgcttgatctcactttatgcttaactacaaaactttcggtctaaa

SEQ ID NO: 44956 - DNA, 397 bp, Glycine max
  Clone ID: LIB3139-082-P1-N1-C5
aatggctgcaaaaagcttatgttcctaccatagcacagattgaagagttgcattcgatgcagagagatgaggaatgctcctgattcaaatgataatattgatttactagtgagcattgatttgttgggtttacaaggagcaggtaaagcttttccaaacaaaatttgttttgatgataagcttgtgttggcttacacacaagaattctttgatggaaattttccagtggattcttggttaccatattttgagaattggttttatcctgcaagttaattaccttcagaaatctgtcgtagtatatgttacatttgtttgtggtcgtttttactcttcttttctcaatttttattttttttttttcttattttctaacttttacactttttttttttca

SEQ ID NO: 44957 - DNA, 396 bp, Glycine max
  Clone ID: LIB3139-082-P1-N1-C6
ggtttttcatcaccttctggtaaccagttggaacctgaaactgatttagatctgttctcaaaatctcaaattggtgaacaggatgcagaattcccactcagagaggagaaaaactttgcctctgaaaaacctcaatttcagcagatgcagaaatatcaattggagcaagaaagcactaatgctacttctgactgcgtatcagaaatccatgcagatgagccatcatcattttattccttgccacagtcatctagccaggagaataatgctgcaaaacgtgtcatggatccattgaagcctcttcttcctaacctctttcccaaggcaactgaaaataaacttgatgagatgccacccatgcctcctctaccgcctatgcaatggagaatgggcaag

SEQ ID NO: 44958 - DNA, 393 bp, Glycine max
  Clone ID: LIB3139-082-P1-N1-C7
gggtggtttacttgagtgctcggtggatacatgatccggcgtaagtcagaaggaaaatatggagcttctccaagggttgaccatcatgcgggacgataccttaagaatctgacgtcctgaacaagaggctctcatcgtcacgggagaagaagaccgaatatttcccatgtacaccgccctcttactattagagataatcagttacaaggctcgactgcactagcttaacgaggcatgccatgtgcactaaatggaaacgccagtacaattccacaacacatgcctaaatcctttacaggagcattttcgagtattacatcaattacgggcacaacttgtacacatgcgatacgagtatggcttcatacaagcgaataccataaccatacttcg

SEQ ID NO: 44959 - DNA, 390 bp, Glycine max
  Clone ID: LIB3139-082-P1-N1-C8
tgctgttctttcaatgtggagatattttgttggagatctcgtctttgaagtttctaagatgacttctccctacattaaatgtacagtctctttcttcatagcatttggaaatttggctgatgacaccatcaattttgaggcttttccccacaagctggtgcagtttggagagattcaggaaaaagttgtattgaaattttcacatgaggaatttcttacagcttggtcaactcaagtgcgtcctgcaacaactctgttagctgatgggtgtccatatttgtatgctatggtgcatgatagttcagtgtctacaataccaggtgattttgttattggtgttaagttgacaaccataaacaatatgtgtgcatatgggctcaatcctggtat

SEQ ID NO: 44960 - DNA, 392 bp, Glycine max
  Clone ID: LIB3139-082-P1-N1-C9
gtggtgatattatacataatgtgactattccaccaaaaagttttctattagttcaaaacaatcaatatgtaaaatcagaacaagtaattgccgagattcgcgcaggaacatacacttttaatttaaaagaaaaagttcgaaaacatgtctattctgacttagaaggagaaatgcattggagtaccgatgtgtaccatgcatcagaatttagatatagtaatgtccatatcttaccaaaaacaagtcatttatggattttatcaggaaaatcatacaggtccggttcagtctctttttcaatccgaaaagatcaagatcaaatgaacattcattatctttctactggagaaagagatttttgtaaccttttagcaagtaaaaaaaaagtaaga

SEQ ID NO: 44961 - DNA, 396 bp, Glycine max
  Clone ID: LIB3139-082-P1-N1-D1
catataaataacatagtcctccttcctttgttttttccacatcacgacatcacatcgcagagaagaacagagagagatccatccatcaattccaatggccgatcagctcaccgacgaacagatctccgagttcaaggaagccttcagcctcttcgacaaggacggggatggttgtattaccaccaaggaacttgggaccgtgatgcggtcacttggccagaacccaactgaggcagagctgcaggacatgataaatgaggttgatgctgatgggaatggtaccattgatttcccagaattcctgaatctcatggctcgcaagatgaaagacactgattcagaggaggagctgaaggaggctttccgcgtgtttgacaaggatcagaatggcttcat

SEQ ID NO: 44962 - DNA, 392 bp, Glycine max
  Clone ID: LIB3139-082-P1-N1-D10
cggctcgagctttttctctctccttctttctttgtttctgtgtgttcgagattgaagaagatgatgcaggctggacccggcggcatggcccaacaagcgaaccaacaatacgcacagcaacagcaacaaccctacatgatgatgccgccgcagcctcagccccctcagatgtgggccacatcggcccagcctccgtcccagtcggtggctcctccgcaacccaccagcgccgatgaggtccgtaccctctggatcggtgatttgcagtactggatggacgaaaattatctctacacctgtttggcacacaccggcgaggtggcttcagttaaagtcattcggaacaaacaaactagtcaatcggagggatatgggtttattgagtttactag

SEQ ID NO: 44963 - DNA, 391 bp, Glycine max
  Clone ID: LIB3139-082-P1-N1-D11
gccgtggcccgctgtccttgctctcccaatccgggtcaaattactcgggcatcttctcttactgtctccccagcttcaagtcctactacttctctgggtcgctcaagctcgggcccgtgggccagcccaagagcattcgcaccaccccgcttcttcgcagccctcaccgtccttctctttactacgtgaacttcaccggaatcagcgtgggacgtgtcctggtaccctttcccagcgagtatcttgggtttaacccgaatacaggatccggaaccataattgattcgggcacggttataacccggttcgtggagcccgtttacaacgcggtgagggaggagttcaggaagcaggtgggccactacattcacgagcattggagccttcgata

SEQ ID NO: 44964 - DNA, 390 bp, Glycine max
  Clone ID: LIB3139-082-P1-N1-D2
atttcttcatttcttctcattacatacacaaaacccattttactccttctttcacaaaagaacaatatctcttgctatttgccaaactacgaacatcatttagaaccatgtctttctctaccaaattgcctttggtccttttattttcatccctttttatccatgcatctttagctgagatggtgtgtgaggacctgccaaaggaagtgtgtgctttctcattagcttcatcagggaagaggtgtttgttggagaccgagaaggtggccgacggttgcgtcgagtaccaatgccggacgtcggaagtggtggtggagagaatggcagagtacatagagacagaccaatgtgtggaggcatgtggggttgttaggaactctgttggaattt

SEQ ID NO: 44965 - DNA, 393 bp, Glycine max
  Clone ID: LIB3139-082-P1-N1-D3
gaggcttttccccacatgctggtgcagtttggagagattcaagaaaaagttgtgttgaaattttcacaagaggaatttcttacagcttggtcaactcaagtgcgtcccgcaacgactctgttggctgatgggtgcccatatttgtatgctatggtgcatgatagttcagtgtctacaataccaggtgattttgtcattggtgttaagttgacaaccataaacaatatgtgtgcatatgggctcaatcctggtatttcaggttctcgtcttttgggcaccattcctcagtccattttacagcaaactgtttggaatcaaatggcaacagtgagaacaccattgaattttgattctagcaagcagagcttttgtcaattttctattgaccttctc

SEQ ID NO: 44966 - DNA, 388 bp, Glycine max
  Clone ID: LIB3139-082-P1-N1-D4
ctcgagccgttttttctttctcttctctttatctgaacgaaggagagtgaaagatccttttttgcgttaggggatcgaaaatggatcagatattcaataaggtcggatcctattggttcaaccagaaagcctccagccagctcaattccgttggtgatgacatcaattcgatgacaaacagtattgaagggggaaccaaatggttggtcaacaaaataaaaggcaaaatgcaaaaggcattgccagagttactaaaggagtacgatctaccaataggaatctttactcgtgatgcaacacactatgagttcaatgtagagacaggaaagctcgttgtttgcattcctcaagtatgtgaaggaggctacaaggattcatcagtcttgcg

SEQ ID NO: 44967 - DNA, 393 bp, Glycine max
  Clone ID: LIB3139-082-P1-N1-D5
caccctctccctccggttccgattcaacggttctagaagatgcctcggcgggtccagatcgaagatccgagaatacgacgacgttcctgacgccgacgaaccggaggaaacgatccgtttcaaatcctccaacagcaacgtctccgacgaccaagaacccttcatgggcatcaaggttcgccgaaaagcctctctccacagagaccacaaaggagactacctcaacgtcccttcccaccctttcctaatcaaaattctacagaaacaaggggacaatgaggttctgtttgcggacagggttctgaagtttacgggctccgggaagatgaaacgctgcgttctgatgatcacggattctgcgatttacatcgttgaccctgaggtggacgcgct

SEQ ID NO: 44968 - DNA, 394 bp, Glycine max
  Clone ID: LIB3139-082-P1-N1-D6
ctatcactacggggatcgcgttcagacggggcattttgcgtttgcggcagtggaggctggagattacatgacttgcttttgggctgtggatcacaaccctgtggaaacgttgactgtggattttgattggaaaacgggtgttgcagccaaggattggtctaatgttgctaaaaaaggccaagttgatgtaatggagctagagctaaagaagttgcaggatactgtttcctccattcatgaggagatgttttatcttcgtgaaagagaagaagaaatgcaggaactcaacagaacatccaacagcagaatgttctggttgagtttgctttcgctctttgtcttgttatccgtagcagggatgcaactatggcacttgaagaccttcttcgagaaa

SEQ ID NO: 44969 - DNA, 391 bp, Glycine max
  Clone ID: LIB3139-082-P1-N1-D8
ctcgagccgctcgagccgctcgagccgattcggctcgagctcacccgcctcgttctgtacctgcaacccccaagacttgccgcatctgccgctacgcctccttttcttccccagccgaccgtcttcttactccgccgccttgctcctcgtcgctccctacgcatctccttgtgcacgccagctccttaacgcgaccgtcggccgccagcagccgcagtcatgcctcagcagcgctacgagcgggtgtccgcacacgatgaagacgaccatgtctcgtccgccgacaatcacgctgccccgggcccgcaatacccgattccctcctcgccacccccatccttcagatcgcgcgcttcttcgcccacgcagcaacgtctgctcaacgaacatg

SEQ ID NO: 44970 - DNA, 361 bp, Glycine max
  Clone ID: LIB3139-082-P1-N1-D9
aaaaatactactatactaatgcgagtgtttcgacgtcgtttcatcaaaatccaatactcgagctttcctagggcaggtattgggaagtgtcaccgtccttctttctttttttctgtagtgatttctagcgttttgtatatatagaaagtccaatagaactggaaaaggctgaagaggtagaaataagacacctatgaaatagttgatggtgcagtgatcaaaagaatggcatgttgcaaaataagcaaggctcttttcaaccttagttaaggtgatgatgtttgataaggacttatagggtttggtttctaaggtaaaattatacctaagttttgggggttgaggatttgtaaatagtggc

SEQ ID NO: 44971 - DNA, 397 bp, Glycine max
  Clone ID: LIB3139-082-P1-N1-E1
cacaatttcaacgccactccaaaaattccactgcaccaccaccctccccatttgtacttttcttctcattctctttccactcccctgcattctgcacacaatctagctttacgtgcttctgggcaaccgcataaggttaaactgttaagcatatcattgaaatccttttgggattggaacttgatatgatcatttgtattggggagtaagaccttgttacttttgcaaatgctaaattttaataggatcagaagtcagcccaggacaaccagatctatgtctttgggaggcatggattacgtggatccaaaaaggaaaggcaattttgttggaaaagtttttcttgctgcagcattaacggcattatgcattatcatgatcaagagatctccatctt

SEQ ID NO: 44972 - DNA, 389 bp, Glycine max
  Clone ID: LIB3139-082-P1-N1-E11
gttgcttctaccctggaaatggggaatgaaatatttctgggacacacttctggatgcagaccttgaaagtgatatcttgggttggcaatatatctcaagaggcttaccagatggccatgagcttgagcgcttggacaatcctgagattcaaggggctaaatttgatccagaaggtgaatatgtgaggcaatggctacctgagttggcaagaatgccaactgagtggatccatcatccttgggatgcaccacttactgtgcttcgagcagcaagagttgagctgggccagaattacccaaagccaatcattgatatagatttggccagagaaagactcactgaagctatattcaagatgtgggaatctgaagcagcagcaaaagctgctg

SEQ ID NO: 44973 - DNA, 393 bp, Glycine max
  Clone ID: LIB3139-082-P1-N1-E12
aagaaagagaagctaggagaaagagaagggttagaaggcgaagaagcatggcttcactcaagaagaagaaaccctattacccgcttccgttaattcctatctattactacttcttattcaaagggtgatatgatcttcttcttccaagagtctcatgcatgctactttcttctctcttctcggggaattgaagcgttgtggtccgattgtttgctagatcaagcaaattaacctgtatactggtttatatatcttcaccttgcacctttctctctctctctctatctctctctctctatatatatatatgggtttaatctcttactttctttatcttttcactttttttcagtttaggtttgatttaattacgtgattaaaatctacatatat

SEQ ID NO: 44974 - DNA, 398 bp, Glycine max
  Clone ID: LIB3139-082-P1-N1-E2
actcataacaacaactccttctgttcacaaactcatcttcaattccttttctgatctacgcaaggttaaggttaattttatctatctacttggacatgaacgaaatcgatgttccttcgttctttctctgccccatttcgctagatatcatgaaggatccagtgacggtctcaacgggcatcacctacgaccgtgaaagcatcgaaacctggctgttctcgaagaaaaacacgacatgccccattaccaaactgcccttgatagattacaccgatctcacaccaaaccacacccttcgtagactcatccaagcgtggtgttccatgaacgcttctcacggcatcgaaaggatcccaacccctaaaccccccgttaacaagaaccaaatttcgaagctt

SEQ ID NO: 44975 - DNA, 395 bp, Glycine max
  Clone ID: LIB3139-082-P1-N1-E3
gtgatgataacttaattagtgttcatgaatatgtcaagccttactttagtggttctaaattgaaaagctttctagctagtcataacatcaccattactgatggtattgacaaaactagtgcaactttgcaatttagaaagttagcagattgtgattttctcaagagaaactttaagcagatgtctaatgttttgtgggtggctcctgaggacaaggcgagtttatggtcacaacttcattatgtttcgtgtaataatctggaaatgcaagaagcttatcttgtcaacctcgtaaatgtgttacgagaattgtatttgcacagtccagaggaagctcgccaattgagaaggaaagctctctctcgtattgaatggctgcaaaaagctgatgtgcct

SEQ ID NO: 44976 - DNA, 396 bp, Glycine max
  Clone ID: LIB3139-082-P1-N1-E4
tctccctttcctctccgaaccctcgatcactctcacgcgctcctatattcgctcctccaccgtcgctctctcgaacaaccacaacaccatcttcatcacatggcaaacgcagcatctggtatggcagtccatgatgactgcaagttgaggtttttggagctgaaggcaaaaaggacacaccgtttcatagtttttaagattgaggagcagcagaagcaggtcattgtggagaagcttggtgagcctgcccagggctatgaagatttcactgccagccttcctgctgacgagtgccgttatgctgtttatgattttgagtatctgactgaagggaatgtccctaaaagcagaatttttttcattgcgtggtcccctgacacatcaagggtgaggagc

SEQ ID NO: 44977 - DNA, 186 bp, Glycine max
  Clone ID: LIB3139-082-P1-N1-E5
aagattacaagcaacttgtttttttctcaaaaactgttagagaagcgggtgagattgctaggagaatgcggggtgagtatagcactccaaagaagaaaacttttgctcttcctaaaccgtttgatatagagggtgctggtgggtgtgaggtaattgattctccatatgccccatggtggaaaccta

SEQ ID NO: 44978 - DNA, 332 bp, Glycine max
  Clone ID: LIB3139-082-P1-N1-E6
taattgcaagaatggctcttcgttgctaggagatgtccctttctgttctcttcactcttggtcttgcgagagaaagccatgccagagacgaagatttttggcatgctgtttggccaaacactcccattccaagttcattgcgagatcttctaaagcctggccctgcaagtgttgaaatcgatgatcaccctatgcaaattgaagaaacacagtacccgaaaaccttcttctataaagaagaccttcatccaggcaaaacaatgtaagtacaattcagcaagcctccctttcaacaaccatggggtgttggtacatggttaaaggatattaaa

SEQ ID NO: 44979 - DNA, 253 bp, Glycine max
  Clone ID: LIB3139-082-P1-N1-E7
atgaatacagaccttttttttttcaactattttaaaataaaaaaggtctgtattcattcattgggggaggggggtgttttttccactatcagtattcagtctttttctattttttttttgttttaatattaatttattggtctttcttctcttttttattttttctttctttttattattacttttccattttctataattttttctttttattccttttttttattttattttttattattgcattatattt

SEQ ID NO: 44980 - DNA, 372 bp, Glycine max
  Clone ID: LIB3139-082-P1-N1-E8
ggaatgtgttcccaggacctattgagttttaaatccacaaaatccttttgtgttaaataggtggatgggaaaactgactttccctcagggcacttcccgaagtgttaagagaatgcctctttctatagggggaggagctggtgcaaagaatgctattctcatgaatatgccaaatgctgttctttcaatgtggagatattttgttggagatctcgtctttgaagtttctaagatgacttcttcctacattaaatgtacagactctttcttcatagcatttggaaatttggctgttgacaccatcaattttgaggcttctccccacaatctggtgctttttggagagattcaggaaaatgtttagttaaaatt

SEQ ID NO: 44981 - DNA, 391 bp, Glycine max
  Clone ID: LIB3139-082-P1-N1-E9
caaacaccatcatctacaacgcctcgaatccacacagttctactctacgctctaaaccctctctctctctctctctcgatctatcatggctttgcccaatcagcaaaccgtggattaccctagtttcaaactcgtcatcgtcggtgacggcggtacaggaaagacaacgttcgtgaaaaggcatcttaccggtgaattcgagaaaaaatacgaaccgaccattggagtggaggttcacccattggatttcttcacaaactgcggaaagattcgcttctactgttgggatactgctggacaagagaagtttggtggcctcagagatggatattatatccatgggcaatgtgcgattataatgtttgatgttactgcccgtctaacatacaaa

SEQ ID NO: 44982 - DNA, 396 bp, Glycine max
  Clone ID: LIB3139-082-P1-N1-F1
gcgagtttatggtcacaacttcattatgtttcgtgcaataatctggaaatgcaagaagcttatcttgtcaatctcgtaaatgtgttacgagaattgtatttgcacagtccagaggaagctcgccaattgagaaggaaagctctctctcgtattgaatggctgcaaaaagctgatgtgcctaccatagcacagattgaagagttccattcgatgcagaggatgatgaatgctcctgattcaaatgataatattgatctactgttgagcattgatttgttgggtttacaaggagcaggtaaagcttttccaaacaagattgtttttgatgataagcttgtgttggctaacacacaagaattctttgatggaaattttccagtggattcttggttacca

SEQ ID NO: 44983 - DNA, 388 bp, Glycine max
  unsure at all n locations
  Clone ID: LIB3139-082-P1-N1-F10
ctactcgcaagcaaatcagaagaagagaatggcagcagcagaggggctaaacagagagcagtacgtgtacttggcgaagctgtcggagcaggcggagcggtacgaggagatggtggagttcatgcagaaggtggtggtggggtcgacgccggcgtcggagctcacggtggaggagcgcaacctcctctcggtggcctacaagaacgtcatcggctcgctgcgtgccgcgtggcgcatcgtctcctccatcgagcagaaagaggagggccgcaagaacgacgaccacgtntccctcgtcaagcactacagatccaaggtcgagaacgagctcactcaggtctgcgccagcatcctcagcctcctcgactccaacctcgtacccttcgtc

SEQ ID NO: 44984 - DNA, 390 bp, Glycine max
  Clone ID: LIB3139-082-P1-N1-F11
ctagctcattcttgtactcaacgctgacatgacccacctctgccatccttgtcttttaagcaaaaactaataccaaatgcaaatactatccccactgaccaaatcttctttctcatcattcatgaattttgcttcttcattcagtttttcacccaggaagttctcgcctcagtagtctctaagttcgatctatactgaagggtacgctcaaatcaaatgggttcattccagacacccattggaatgagaagttcaacattgctagagacttcatgtggattcctgttgcaggaactgcagataatatgggatgaagttggagaagataagttcgaaagggagaaagttctgttagatttggagcaagagtgccttgaggtttacagaaga

SEQ ID NO: 44985 - DNA, 393 bp, Glycine max
  Clone ID: LIB3139-082-P1-N1-F12
caacctattcacatcactgaaggaaatcatgtcagaaagcgagatgtcagcattgaatatgaggcatgtacaattccaaatgattgtggttcattggttgttgccaaggttggaaatcacaaacaaattggtggtttccatgttgctggaagcaaaggaagattgggatatgcttcattgataccatatgttgagccagttgtgcaagctcaaagagctgaagtttactttgacttcttccctgtggaggttgatagtcaagaaggagctgctcacataggtgaattgaaatctcgtgtctatgttccactgcctacaaaaactaatttggtggaaactcccaaagaatggctactggatctaccttgtgacataattgctagcgtcttgact

SEQ ID NO: 44986 - DNA, 391 bp, Glycine max
  Clone ID: LIB3139-082-P1-N1-F2
caacaacacccaattaccgtcttcgtcacagtcacacaaagaagcgtcaccgccgctgaaactatcacacaggtgcaccgtttgcaacaaggcttttccttcttaccaagcactcggtggacacaaggccagccaccgcaaggcctcgtcggaatccaacaccaccgcctccgccgtcgccgtctctgccacagccaacgacagcgtttccgcttcgaccgtcggcggcggaaggatgcacgagtgttccatctgtcacaagagtttccctaccggtcaggccctgggtggccacaagcgctgtcactacgacggcggaaacaaccacagttacagcaacgccaacggcaacaacagcagcggcgtcactacctccgacggcggcgctgcc

SEQ ID NO: 44987 - DNA, 379 bp, Glycine max
  Clone ID: LIB3139-082-P1-N1-F3
ccgagcgagggaactttgcattattttgactagagctaggagcaagcggcagaagttttttattcggatggagcataaccggtcatcttgtcacttgcaggtgatgtatgtactgatgtggagagcgacccatactctaatgccccaggtgttttgcgtaagcgttatggtccttaggcctacgtcatgagaggtggcgtcctcctttacatgttccggagcgtgagtaccccattttgggcgtgcaagatcttatgtattgatgcagacacagtcatcacgaactttttcaatctaaatatgtggaccctgttgagtgagtatgacactttccgcggacactttgtgcagttcatatggttgacgcggtatccaacta

SEQ ID NO: 44988 - DNA, 391 bp, Glycine max
  Clone ID: LIB3139-082-P1-N1-F4
catcaccatagtttaattacgctcgttcgaattttcttgtccgcgccagacatggctgatacccaaccgcgaccaaacgacgccgttccttcgaaggagcgcctcggcacacgatgctgtcactgcctctgccaaactttctggatccttttggttctcataatcaccatcgtcatgcttgcgattcttgtcttgtacatcatcatcacaccacgctccttcaggttcaccctgattgacgcgaacctcacacaatttgattacaccgccaacaacagcactctctactacgacctcgttctcaacatcaccgcgcacaaccccaacaagaggctcaagatctactacgacgtcgttcgggcccacgcgctttaccggcgcgtggagttct

SEQ ID NO: 44989 - DNA, 397 bp, Glycine max
  Clone ID: LIB3139-082-P1-N1-F5
tgtgttgagttgtacgtgtgttttccattgccgccaccgattacccacggactgatatacataacctctggacctttccctccttccctaatttatcactaaaaaaacaaacaaataaaaaaaaagtccactaagttggggcacgtcacccatctcgcccttcccctcgctcatctcaaatccatgcttcggaattagggttccattcggatttcgtaagtctggtgcccaatttcgtgactccgagcgacgtaaaaggggaagggaaagggatgaggatttggggatcggagatcgtgttcgccatattgctctgtgggaccctttcatgcaccgctcaagctcatcacatcactgccagcacctgcccggctcgctccatcctcgatttcgtgtt

SEQ ID NO: 44990 - DNA, 389 bp, Glycine max
  Clone ID: LIB3139-082-P1-N1-F6
cgagttttcatccttggagattttcttcgggtttcctttgttaattgtacttagtgttctgctcccctttaaagatcagcacagggtacgtgatgctacattcttctgatacaggtgctgcatcttaagtgcacttgtacaatgcattgctgacccaacattcagttaaaactattgggctgaagcatatagatttgtgactgaatattggattctgcctgcatctttgagtgaagcatttgcactgaatcagtgtggactgtagttattgaaatttttctccgagttgctctcaatgggtattgttgctgacaatacatcagttactggaggtttctgaaataaatcctacatagattagatgaagtagatcttactatagttctgaa

SEQ ID NO: 44991 - DNA, 392 bp, Glycine max
  Clone ID: LIB3139-082-P1-N1-F7
aaacaatgttactgtgttacatttgtactctggaaaatatcatgtgcaggcaatcaactacaataatttcactatccgagtggttgatccaggagtcgatcaacaaacaaattgctcctcccttcctcgctatttcttgtctcgctccaatttcactgatacttacagtgatatttacaacatggatccataccaagctggtcaatattcaggtcatcggaatttatttatttgttatcggtaaagattagttgttagttttcatttatgatgaaatccacgactttttcattctcaattctttcaatacttaagtcgtagttattgggacaggcttgctttccagcatatagtgtatatgaattgtagcaatccagtgactcagaatggga

SEQ ID NO: 44992 - DNA, 393 bp, Glycine max
  Clone ID: LIB3139-082-P1-N1-F8
cgtttcctctacaaaagtctcaatttgttagtggaaaaaccttcaaatatgatataattggtgctggttcacattcttcagatattttcctgaaaaggaagatcaagaaaaacccaaaaagattgatgccagattgagacaaagaatagatcctcaatacaatgaggttcaagctcagatggaaacaaatttgtttaaattgtctcttgatgatgttgaaactcctaaaggttccatgttggatcttaaaatttctcaatctaaaattgcacttcccaagaacacagttggaggaaccattctgcgtagtgatttattggcaaattttttgacagagggcaattttagagcaagtgttgatttgcagcgcactcatcgtattagaggaatgat

SEQ ID NO: 44993 - DNA, 381 bp, Glycine max
  Clone ID: LIB3139-082-P1-N1-F9
cggctcgagctctgcttcttcttctgcttcgtctacctctccgagcggcaccgttttgaagaggaagcgacccgctaggttggacatacccgtttcctctctcacctttgcggttccgcccacgccctccgcggcggcgcgtgacttggtcgaggctgaggaagatgggtttggggtgtactgcaagagaggcaggagggagtacatggaggatcgttacaccgctgggaataatcttcgcggtgaacacatactggctttttttggcatatttgatgggcacggtggtgcaaaagctgctgaatttgctgcaaataacttgcaaaagaatgtgttagatgaatttatcgtgagagatgtagatgatgtcttggaggcttt

SEQ ID NO: 44994 - DNA, 393 bp, Glycine max
  Clone ID: LIB3139-082-P1-N1-G1
ctcgagccgattcggctcgagctgctgggacagcgagaaaaccttgccgaataatctttctgctgaatgaggtttctgcaaattggacactgttacgggacattattatccagaatgggctccaataaattgtcgagttcatcggcaaccaattcacataactgaagggaactatgtcaggaaacaagatgtaagcatcgaatatgatgcctgcacaattcctaatgattgtggatctctggtggttgctcacgtcggaaatcacaaacaaattgttggtttccatgttgctggcagcaaaggaagattgggctatgcttcactaataccatatgttgagcctgtggtacaagcccatagtgctgaagtctatttagacttctttcctgtgga

SEQ ID NO: 44995 - DNA, 390 bp, Glycine max
  Clone ID: LIB3139-082-P1-N1-G10
ttgttagtggaaaaaccttcaaatatgatataattggtgctggttcacattcttcaggagattttgctgaaaaggaagatcaagaaaaacccaaaaagattgataccagattgagacaaagaatagatcctcaatacaatgaggttcaggctcagatggaaacaaatttgtttaaattgtctcttgatgatgttgaaactcctaaaggttctatgttggatcttaaaatttctcaatctaaaattgcacttcccaagaacacagttggaggaaccattctgcgtagtgatctattggcaaattttttgacagagggcaattttagagcaagtgttgatttgcagcgcactcatcgtattaaaggaatgattaaaatggtggccacagttg

SEQ ID NO: 44996 - DNA, 375 bp, Glycine max
  Clone ID: LIB3139-082-P1-N1-G11
ttgttagaggtttaaccttcaaatatgatataattggtgctggtcctcattcttcaagaggagttggtgcaaaggaagatcaacaaaaacccaaaatgattgataccagattgagacaaataattaatcctcaatacaatgaggttcaagctcagatggaaacaaatttgtctaaattgcctcttgatgatgttcaatcttctaaaggttctatgtaggatcttaaaatttctcaatctataatagcactccccaagaacacattttgaggaaccattcatcgtagtgatttattagcaaattttttttacagaatgcaatcttatagctagtgttgtttagcatcgcactcattgtattaaaggtattattaaa

SEQ ID NO: 44997 - DNA, 392 bp, Glycine max
  Clone ID: LIB3139-082-P1-N1-G12
gaaattttaataaaccgcgatcacaggttgccgcaccttaaaaccggaaacaaaagcaatcggtacttgatttcaagaatttctcaatttcttcctacttctttgtgtacgatttcttaagggaaagaaaatcactctctgtgctggtcacagacttcgtgaatcattttcttttccactcctagtttatttgctgaacactctcctatttgatataggacttcgtgtcagatttaaactttttctgtttctttctcagttctctgtttaatttcaagttcaagctggtgaaattttggattagtgctcccactctcctatctggtataggacttcgtgggtagacttttctacttctctcctttctttcactctcttcttctcactgatcc

SEQ ID NO: 44998 - DNA, 397 bp, Glycine max
  Clone ID: LIB3139-082-P1-N1-G2
ggatagcaccattgaaattgttagggaaccaagagcacattcgagtgcatggacaaggcaccgtcgttcagctgaacgtcggcgctatctgtggggtgagagtttactgggtcttcatgataatgacattgaggatgatctacgtatatttagggatgcaggtgaagatgcatctcctgtgccaaggaggcgtcggcgtttgacccggacaaggtccaatgaagatcaaccttgatgactgccataatattaccaggtaaaatttatagttcagtttttgcaggaacttgtattacttgaattgttttggatttgtcatcagttaacccacttggtttcttcactagaattgtctgaacagcatgcagaacttgttcaaagttttgtactggaaaca

SEQ ID NO: 44999 - DNA, 395 bp, Glycine max
  unsure at all n locations
  Clone ID: LIB3139-082-P1-N1-G4
ggtggctcctgaggacatggcgagtttatggtcacaacttcattatgtttcgtgtaataatctggggatgcaagaagcttatcttgtcaatctcgtaaatgtgttacgggaattgtatttgcacagtccagaggaagctcgccaattgagaaggaaagctctctctcgtattgaatggttgcaaaaagctgatgtgcctaccatagcacagattgaagagttccattcgatgcaaaggatgatgaatgctcctgattcaaatgataatattgatctactgttgagcattgatttgttgggtttacaaggagcaggtaaagcttttccaaacaagattgtttttgatgataagcttgagttggctaacacacaagaantctttgatggaaattttc

SEQ ID NO: 45000 - DNA, 379 bp, Glycine max
  Clone ID: LIB3139-082-P1-N1-G5
ctatagagttttaaatccacataatccttttgtgttaaataggtggatgggaaaactgactttcccggagggcacttcccgaagtgttaagagaatgcctctttctatagggggaggagctggtgcaaagaatgctattctcatgaatatgccaaatgctgttctttcaatgtggagatattttgtaggagatctcgtctttgaagttcctaagatgacttctccctacattaaatgtacagtctctttcttcatagcatttggaaatttggctgatgacaccatcaattttgaggcttttccccacaagctggtgcagtttggagagattcaggaaaaagttgtgttgaaattttcacaagaggaatttcttacagct

SEQ ID NO: 45001 - DNA, 400 bp, Glycine max
  Clone ID: LIB3139-082-P1-N1-G6
ctttctagaaccttagctcgctctgctcctcgccgatcccccgggtcctcatccgccgccacccgggccttcggctccgccgtcccgcgatggagccacggcgtcgactggcgctctccgctcggcctccgccctcagatcagagccgccgctcccctcatcgaacgcttccaccgcaggatcgccactagcgctactgataatcctttcaagggaaacctgacgagtctccctaagcctggtggtggcgagtttggaaagttctacagccttccgtcgctcaacgatccgagaatcgataggttaccatactctatcagaattctccttgaatctgccattcgtaattgtgacaatttccaagtaaaaaaggaagatgttgagaagattattgactggg

SEQ ID NO: 45002 - DNA, 393 bp, Glycine max
  Clone ID: LIB3139-082-P1-N1-G7
aaaattactgcgccaggctaaagctccaagtatgtttttacaatgcttcaaaaattttgtttctttgagtgtgtatggtgatgataacttaattagtgttcatgaatatgtcaagccttactttagtggttctaaattgaaaagctttctagctagtcataacatcaccattactgatggtattgacaaaactagtgcaactttgcaatttagaaagttagcagattgtgattttctcaagagaaactttaagcagatgtctaatgttttgtgggtggctcctgaggacaaggcgagtttatggtcacaacttcattatgtttcgtgtaataatctggaaatgcaagaagcttatcttgtcaatctcgtaaatgtgttacgagaattgtattt

SEQ ID NO: 45003 - DNA, 393 bp, Glycine max
  Clone ID: LIB3139-082-P1-N1-G8
caaacattgcattacagtaactctcaactttttattctctttctgttactcctttcccatttgtcgggttcaacattctccacgcccattttactgtcactcacacacatacacacacatacaaaagctataacaacagatcaccccaattcgctctctcgcctccttcgcaagcaaccaactgggttcgttcttttctttacttttcttcttcttctcttctgattctcgctcgccgccggaggcacgtgcgcgcgtcacgttgcgcggagtgagcgatcattggtttcgagtcacgagggtcatcatcgtacattcctcggatcgaattgtgaagatgggcgcgtgtggcggtttttcgagtcggcggtgaattcgggcggaaaatgcggt

SEQ ID NO: 45004 - DNA, 391 bp, Glycine max
  Clone ID: LIB3139-082-P1-N1-G9
ggagctatggttatgactttgtacaaaggcccggctcttcagttgataaagggacaagcagcaacggaccatgaaagtggcaacagcacacaaccctctgaacaaaactgggtgcttggcacagtagagctcattgcaagttgtggtggttgggctagcttctttatcttgcaatctttcactttgaagatgtacccggcagagctctcggtcacagcttggatttgctttttgggcatttttgagggtgcaattgcgacccttatatttgaacgtgacatgagcgtgtggtcaataggcatggactcaaggctccttgcttgagtttattctggtgtggtatgctctggaatggcatactatgtacaaggagttgtgacaagggaacgtg

SEQ ID NO: 45005 - DNA, 399 bp, Glycine max
  Clone ID: LIB3139-082-P1-N1-H1
tggaagcccatagcatgtttaagagctacgtgtgaggctttcactaattgttggacactcatcatcgttgggtcgttatcattatcatatcatcaacttcaccatttcacctcactcactcttttctctattaaccctcttttcgaagaagctaacgccaaaacgatgtcgtatgtgcctccgcacctcagaaacccgagttccaccaccgtcgccaccgccagaaccccctccgtaaccctagacaaccaccaccaccaccaccacaagctcgcattcgcctccaacaccaccaccaattgctctccatctctctcctccttccacaacaatgcctctcgccggagctccgccgcgcctccctcgccgaggattctcgccaaccccgacaccatcttt

SEQ ID NO: 45006 - DNA, 390 bp, Glycine max
  Clone ID: LIB3139-082-P1-N1-H10
cgtttccgttccgttcaaacagttccttttttctcacacacttcctttgttcgtcaccgcagtttcaatctcagatccaacattgttcaatccaaattcaacgcattccatggcgaatcctgcatccgcaagattctccgctcttcttcttctcgtttctttgctagtcaacatcgccgccgaatcgccggctccggctccgactccgaagccggatttgcctccgtcgtcttctcctacttctgctcctgcttcgaacccttccccggccaattcgccgccatctccaactccggcgccttctcatcactcgccgccggctccttcgcccggtaccaatccttctccgtctccggctcctgctccggcggatgacgcacatgacggagt

SEQ ID NO: 45007 - DNA, 394 bp, Glycine max
  Clone ID: LIB3139-082-P1-N1-H11
acgggatcggaggctaatctattaggcgctgttctctcgtcttctacaaaattttctgttcgatctcaaccaaggttgttccttccaccgccatgagtttcatcttcggaaagcgaaaaacacccgcagagcttctgcgggaaaataagaggatgctggacaaatcaatcagagaaattgagcgcgagcggctaggcttgcaaacgcaagagaagaaattgattgcggagataaagaaaagtgccaaacagggccagatggtacagtgactgtgtgttaattgtgtattatttgccttttgtttttaatggtatgtatggtgaacatgtcttactgcgaatatgttagtttagctgtttttcgatgcaagtttaaaacacccaacctctgctgt

SEQ ID NO: 45008 - DNA, 395 bp, Glycine max
  Clone ID: LIB3139-082-P1-N1-H12
aacaaatttgtttaaattgtctcttgatgatgttgaaactcctaaaggttctatgttggatcttaaaatttctcaatctaaaattgcacttcccaagaacacagttggaggaaccattctgcgtagtgatctattggcaaattttttgacagagggcaattttagagcaagtgttgatttgcagcgcactcatcgtattaaaggaatgattaaaatggtggccacagttggtattcctgagaatacaggtatagcattggcctgtgctatgaatagttcttttagggggcgcgccagttctgatatttacaccatctgctctcaagactgtgaattatggaatcctgcttgcacaaaagcaatgactatgtcatttaatccaaacccgtgttctg

SEQ ID NO: 45009 - DNA, 395 bp, Glycine max
  Clone ID: LIB3139-082-P1-N1-H2
aaacagcaacagtacagagcattttgatgcatgtaagtggacaaaatcagaaccacattcctgggaattgatcttcccaatagaggtatgtggtcctaataatggttttgaaatgtggagttctgagtgggcaaatcaaacttcatggcatttgagtttccttattgacaatcccaaacagtctacagtttttgatattctcttgggaatctctcaagattttgaaattgctggtaatactcttatgccagctttttctgttccacaggctactgccagatcttctgaaaatgcggaatcctctgcatgatctggaatttgtgttttctttcgcttgttcgtgtgtttaattcaataaaggaaattaggcatgaccctcttgttgagtatgctct

SEQ ID NO: 45010 - DNA, 397 bp, Glycine max
  Clone ID: LIB3139-082-P1-N1-H3
caaaaagttcaactgtcaaccctgagctttgggcatccagacttgggtctgattttattcggaactccaaaatatcaaatattgatttcgcctctgttcacatctatcctgaccattggtttcatgagcaagtattcgaagatcaactgaaatttgtctccaagtggatgctttcgcacattgaagatggtgacaaagtattgaagaagcctgtcttgttctctgaatttggactatcagaaacgaatcagaacttttccatgtccgaccgggaaaaaatgcatagagctgttctggacataatttataaatctgctaagagaaatagatctggagctggtgctctggtttggcaattcctagttgggggaatgaaggaattttctgatgaatatgg

SEQ ID NO: 45011 - DNA, 373 bp, Glycine max
  Clone ID: LIB3139-082-P1-N1-H4
gatgataagcttgtgttggctatacacacaagaattctttgatggaaattttccagtggattcttggttaccaatttttgtgaattgtctctatcctgtaagtcaattaccttcagaagctgtcgttgtaaatgttacatgtggtagtggacgtggtggtttacccaccactgcttgtattatttctgcagttaacaattcgtccttatacatcaacaaaatgtttctctcagcacttgtgaaaggtttgaaaattgttttttcttactagagttgacccttttccagtagctttattggctgtactttttggggtttataatgaaattctgagttctaaccccacttacccttttctttctcatctttttga

SEQ ID NO: 45012 - DNA, 398 bp, Glycine max
  Clone ID: LIB3139-082-P1-N1-H5
gctaaacggttcatgacatgcccttgaaaaaccttggttggtattaattgtagcactagctttgattttggtgccaagttcttgagctgtggtggtgctgaccctgaaaagttctccaagtccaacatgagataaggctgaaatattggagctggtttcaattagtagacaaatttggttgctgactttcgtattcgtgtgtcttcaatagatggtatttttaaatagaaagcatagttgacaatttcttgaatgttgttgtttcttgccttttgaattatctccaagacttcaaataagttggctctctcctacaattttttaaatgctattatgttcagtattgagaatcaaacaagacttggtctcaggcacaacaagtttttcaattttggact

SEQ ID NO: 45013 - DNA, 397 bp, Glycine max
  Clone ID: LIB3139-082-P1-N1-H6
aaagaatcaaacagctacaacttgaactgttcataacccacaccaaaagttccaaaccccaacccgaaaaatcacacacaccccctttggaattgggatccatcgccatatctctgattaggttagataagattccctatgggcacttccattctcgacgccctgaacgtccgcgtggaaggttccggcgataagtaccttttcctggcccacggcttcggcacagaccaatccgcgtggcagcgcgtgctcccttacttcacccgcaactacagcgtcattctctacgacctcgtctgcgccggcagcgtcaaccccgaccacttcgactaccgccgctacaccaccctcgacgcctacgtcgacgacctcctcaacatcctcgacgccctccgcg

SEQ ID NO: 45014 - DNA, 391 bp, Glycine max
  Clone ID: LIB3139-082-P1-N1-H7
ctttctcctaaaacatctcaatgggctcttcttctatcacaacatggcccgcaaccatgaccatggctgcgatcgtgctcctgttcacggtctttgccgtttcctccgccctagacatgtcgataatctcgtacgacagcgcccacgcggtcaaggccgccacgttgcgcaccgaggaggagctgatgtccatgtacgagcagtggctcgtgaagcacgggaaggtgtacaacgcgctcggcgagaaggagaagcgcttccagatcttcaaggacaacctgcgattcatcgacgaccacatcttctcggaggaccgaacctacaagctcggactgaaccggttcgctgatctcaccaacgaggaattcagggccaagttcttgggtaccaa

SEQ ID NO: 45015 - DNA, 394 bp, Glycine max
  Clone ID: LIB3139-082-P1-N1-H8
ctcgagccgaatcggctcgagtgcagctctagctagggtttcgcaagtgcgatcgaagaagaacaacgacgatggcgatggctgcagctctgcgtcgcgaaggaaggcgtttgacccaaccaatcaacgccctccactcttctctcaattcctccctcatctctcaagaccaagcccctcatggcgcgcgctccatttccactcaagttgtgaggaaccgaatgaagagtgtgaggaatatccagaagatcaccaaggccatgaagatggttgccgcgtccaagctgcgggccgttcagaccagaactgaaaattcccgcggcctctggcaaccgttcaccgctcttctcggtgacgatcccagtgttgacgttaagaaaaacgttgtcgttac

SEQ ID NO: 45016 - DNA, 396 bp, Glycine max
  unsure at all n locations
  Clone ID: LIB3139-083-P1-N1-A1
ttaagctttgccatacccattaagcaagacccttcagattactggtccatcttggggtaccataatactccccttgacaacagtggcatcaggaacactactagtactgttactacaactacttttncatcctccaacaatggcactgctagtagtttgacacccttcaacatggagttctcaagtgccccctcaagtaccggcagcgataacaatgccgcgtttttcagtggaggaggcatctttgttcaacaacaaactagtcatggtcatggaaatgcaagcagtggttcctcctcttcttctttaagctgttcaatcccattcgccacgcccatattttctctaaatagcaatactagttatgagagcagtgctggttatggaaactggatt

SEQ ID NO: 45017 - DNA, 378 bp, Glycine max
  Clone ID: LIB3139-083-P1-N1-A10
taagatttgaaattttaataaaccgcgatcacaggttgccgcaccttaaaaccggaaacaaaagcaatcgttacttgatttcaagaatttctcaatttcttcctacttctttgtgtacgatttcttaagggaaagaaaatcactctctgtgctggtcacagacttcgtgaatcattttcttttccactcctagtttatttgctgaacactctcctatttgatataggacttcgtgtcagatttaaactttttctggttctttctcaggtctctggttaatttcaaggtcaagctggtgaaattttggattagtgcttccactcttctatctggtataggacttcgggggtagacctttctacttctctcccttctttc

SEQ ID NO: 45018 - DNA, 401 bp, Glycine max
  Clone ID: LIB3139-083-P1-N1-A12
ccgtggcgcgcctctcgctaaggtcgccttccgccacccgttccgctacaagaagcagaacgagctcttcatcgccgccgagggtctctacaccggccagttcatctactgcggcaagaaggccaccctcgttgtcggcaatgtgttgcctcttcgatccattcctgaaggagctgtcatctgcaacgtcgagcaccatgtcggcgaccgcggcgtcttcgctagggcgtctggagactacgccattgttatcagtcacaaccctgataatgacacctctaggattaagctcccatctggttcaaagaagattgttccaagtgactgtagggccatgattggtcaagttgcaggtggagggagaactgagaagcctcttctcaaggctggaaatgcttacc

SEQ ID NO: 45019 - DNA, 401 bp, Glycine max
  Clone ID: LIB3139-083-P1-N1-A2
caatctcatagcaccaaaaacatagtactatacagccccactttctctttctctttctcttcactctaaagtctaagcatccatggccatggcgtctgcaaagctcaacaccttgtcttcccagtggatcgcccacaattccttctctcctcgccgtggatcctcttctcgccgagtctctcttccgatccgcgcttcttcttaccaacacgaactcgtccaaaccgccaaatctattgcatctcccggtcgtggaattcttgcaattgatgaatcaaatgccacatgtgggaagcgtttagcatccattggattggacaatactgaggtgaatcgccaggcctataggcaacttctgctcaccacacctggccttggtgaatacatctctggtgcaattc

SEQ ID NO: 45020 - DNA, 395 bp, Glycine max
  Clone ID: LIB3139-083-P1-N1-A3
gaagattctggtgaatgcgtataaaaggaaaataaagaaattagcgtgaaaaatgttgggtgtgttcagcagctccatagtgtcgccgccggaggagctcgttgccgccggcagccgtacaccgtcgccgaagatgacggcggcggcgctgcggaagtggttcgaggagaagaacccctccgcagtgtcggtggaggtcggagagcatgtccagctcgcttatacccaccagaacgagtcgccgtttcagcccagatcctttgctgtgaaggatgaggtattctgcttgtttgagggagcccttgacaatttgggcaacttgagacaacaatatggattggccaagtcaaccaatgaagtattgttggtcattgaggcttacaaagcattgcgtg

SEQ ID NO: 45021 - DNA, 392 bp, Glycine max
  Clone ID: LIB3139-083-P1-N1-A7
agtagttgctctgcttcatcatcttctctctatctttgttgcaaacttacaaacacagtactgagtttaagtgttcaccaaaaaaaacaatggatgatgatattgtaggactcggttttcgtccaacagaacaagagcttgtcaacttttacctcaaacacaagttgctcggcgatgatccccgtgtccacgtcatccctgtcattgatctttgcgatgtggaaccttggaatgtaccaggtaactaactcaacacccctttggcctttttcttcctcttctctttacttcactgttgtttgtttgattctttccttgttttcaaaattagtgatattagcatcgtcatcagctatacgatttggtgacccagattggtttttcttcagccc

SEQ ID NO: 45022 - DNA, 379 bp, Glycine max
  Clone ID: LIB3139-083-P1-N1-A8
ctcagtactgagattggaaagttgtttgaggaaccacagatttatcgtattgatcactacttgggaaaggaactagtgcagaacttgttggtacttcgctttgcaaatcggtttttcttgccactttggaaccgcgacaactttgacaacgtacagatagttttcagagaggattttggaactgatggccgtggtggatattttgaccagtatggaattattcgagatattattcaaaaccatctgctgcaggttctttgcttggttgctatggaaaaaccagtttctctcaggcctgagcacattcgggatgagaaagtgaaggttcttgaatcagtgctccctattaatgatgatgaggttggtcctggacaatatg

SEQ ID NO: 45023 - DNA, 402 bp, Glycine max
  Clone ID: LIB3139-083-P1-N1-B12
ctcaacgtccccaacactgtgttcctgttcttcttcttcgatggcggcaacctcaacatcactggcttctcaactctacattggcctgcgccgcccatgcctcaagcttgattctttcaattctcaatctttctctgtcttcgaccccaatcttcgcctatccctctctcctcccagaccctcacgcgccatcgtcgccatggcaggcaccggcaagttctttgttggcggcaactggaagtgtaacggaacaaaagactccatcagtaagcttgttgctgacttgaacagtgcaaaattggagcctgatgttgatgttgttgtcgcacctccctttctgtacattgatcaagtgaaaaactcactcactgagaggattgaaatatctgcccagaattcttg

SEQ ID NO: 45024 - DNA, 278 bp, Glycine max
  Clone ID: LIB3139-083-P1-N1-B2
gttggtgttagtcttggtgtagtgtagctagggagggatatatatctgagtaagatggcatcagagcttgaattgcccccaggcttcagattccatccaacggacgaggagctggtgttgcactatctctgccgcaaatgcgcgtcgcagccaatcgccgttcccatcatcgccgaaatcgacctctacaaatacgacccctgggacttacccggattggctacttatggagagaaagagtggtacttcttttcaccacgggaccggaaatacccaaa

SEQ ID NO: 45025 - DNA, 359 bp, Glycine max
  Clone ID: LIB3139-083-P1-N1-B3
gtttctctctcttagttcaaatttcgaattcggaagcagcaaaactaaagcccaaaaacccataccaagatgctcctccgaagccactgttgctacctcggcataatcgccgggctagcagtgttcctcgcaacgacgtcgttcgccgacgcgcaatcctgcaacggcatcctcgtctcatacgcctacaccggcggcctgcggttgccgcccaacgtctccgactcggctaagcagccgtaccggttcgagtcgacggtgacggttctcaacaacggcctcgacgagctcaagtcgtggaaggtcttcgttgggttcgaccacgaccagttgttggtctccgccttcaatgctgtgct

SEQ ID NO: 45026 - DNA, 398 bp, Glycine max
  Clone ID: LIB3139-083-P1-N1-B4
ctcgagccgaaaagaacttttcattcattttcatgtcttttctttctttcatgctgtagtcttttaagcatttgatttgatttttaaataaattgctgagcttttccacagctttataaccgctaccctaatcttcatgtttactcatatgggccactcccatgtctggatttagttgtggcaaatgcatgttcagaatttgttacaagcattatatttggaaatgaattttcatcgcgcctttcaactgtgcggctaagggcagctgcaatcacatcactatcacaagatcctaaagcagatagtgccatgattttcaaacttgcccataggtttctagatgtaagcaaatatcagagaaataagtccaaggcagaggatgaacctgagtatcattc

SEQ ID NO: 45027 - DNA, 404 bp, Glycine max
  Clone ID: LIB3139-083-P1-N1-B5
aggaaatagcgttagagagggataatgtcagcaatgatcccaagtccatcatgcctgcggcatttgtttcgtttaaaacacgatggggtgctgcagtttgtgcacaaacccaacaaaccagaaacccaacaatgtggttgacagagtgggcgccagagccacgtgacatctattggtcgaatttggcaattccatatgtttccctcaccgtgagaaggttgatcatggctgttgcattcttttttctcaccttcttttttatgatcccaattgcaattgtacaaggtcttgcaagtattgagggaatccgcaaaagagcaccatggttaaatcctcttattgatattcctttcattaagtcgttcattcaaggttttctacccggtattgcattgaagcttttt

SEQ ID NO: 45028 - DNA, 403 bp, Glycine max
  Clone ID: LIB3139-083-P1-N1-B6
gggagaagtaatcgagcttcagcaatggtgtacgtcaaggctcagaaatcaaaagcctacttcaagagatatcaagtcaagttcaagagaagaagagagggaaaaaccgattaccgtgccaggattcggttgattaatcaggacaagaacaaatataacactccgaaataccgatttgtggttcgctttagcaacaaggacattgttgcacaaataatatctgctagcattgccggcgatttagttcttgctacagcatattcacatgagctgccacgatatggtcttgaagtaggacttacaaattatgcagcagcttattgcactggtctcctgttggcccgaagagtcctcaaaacacttgaaatggatgaggagtatgaaggaaatgttgaggctactg

SEQ ID NO: 45029 - DNA, 215 bp, Glycine max
  Clone ID: LIB3139-083-P1-N1-B7
atcattacatggtcatagtctacacctaattagccaaacacaccacagcaccaaactagttggctcaattctctttgaatggctttggaggctttgaattcaccaacagcagccaccactcccttccgtggttaccaagaagaggaggaggaggttgaccttcacctacgcgagcttgggcccaagagaaaactctcaaaaccacctcttttgga

SEQ ID NO: 45030 - DNA, 400 bp, Glycine max
  Clone ID: LIB3139-083-P1-N1-B8
gcgatatcatttgtgtcactggatggactgccaccccaatgcaggatgttcaggttacaattggttggtttatttcctttcaggaatgtgttcccaggacctattgtgttttaaatccacaaaatccttttgtgttaaataggtggatgggaaaattgactttcccccagggcacttcccgaagtgttaagagaatgcctctttctatagggggaggagctggtgcaaagaatgctattctcatgaatatgccaaatgctgttctttcaatgtggagatattttgttggagatctcgtctttgaagtttctaagatgacttctccctacattaaatgtacagtctctttctttatagcatttggaaatttggctgatgataccattaattttgaggcttt

SEQ ID NO: 45031 - DNA, 404 bp, Glycine max
  Clone ID: LIB3139-083-P1-N1-B9
atgaaaacgaatgtctttgtgtactgagtggctacaaaatggggggcatggcaatgccatgcgtacgatatattccctctccgaatgaacactggctatggtacccgtactcacaaggtgaaatgcgcaagttggaggcttgctgtggaagcacacaacatctttggctttgagaccattccagaagagtgcgatgaagcaacaaaggaatacatccatggcgaacaatatagatcagactccaaaacagttaaccaacaagcttacttttatgccagagacctcgaagtccatcccaaggacacatttgtgttcagtatagatggcaccgtactctctaatattccatactacaaaaaacatggatatggggcggagaaaattaactcgaccttgtatgatga

SEQ ID NO: 45032 - DNA, 403 bp, Glycine max
  unsure at all n locations
  Clone ID: LIB3139-083-P1-N1-C1
gaaattcaatttgacacatgcaccgctgagaaacactgcagtaatatttccatatggttggactgctttgaggtttaaggctgataacccaggagtttgggctttccattgccacattgaaccccatttgcacatgggaatgggtgtgatttttgctgaggctgttcaaaaagttgggaaaatcccaagagatgcactaacttgcgggcttacaggaaagatgctaggaaatagacactattgaaactagccacaatacacacatcaaaagaatgttgaatagtgtttatttgattaaaatttgaatgttgaattgatattatgttttaaaaaaaaaaaaaaaaaannaaaaaaaaaaaaaaaaaaaaaaaaaaaaaaaaaaaaaaaaagggggcggccgccg

SEQ ID NO: 45033 - DNA, 401 bp, Glycine max
  Clone ID: LIB3139-083-P1-N1-C10
gttgctgctaatgccgtggcgagtgtaaatcatgaagcgggaggggctatgccttccagaactagcgagctcactctttctttcgagggcgaggtttatgtctttcccgctatcactcctcagaaggtgcaagctgtcttgctgcttttgggaggacgtgatgtgcaggcaagggtgcctgctgttgaacaaccatttgaccaaagtaacaggggcatgggtgatactccaaagcgttcaaacctttcacgaagaatagcatccttagtcaggttccgtgagaaacgcaaggaaagatgttttgacaagaaaattaggtattccgtcagaaaagaggtggcacagaggatgcatcggaagaatgggcagtttgcttccttgaaggaaagcccaggttcatc

SEQ ID NO: 45034 - DNA, 396 bp, Glycine max
  Clone ID: LIB3139-083-P1-N1-C11
aggcgaaagactttatgtgtggaattgataattagggttgatagtgtcacctaaataatcgatgacatgttcaacgatctatagatgaataaggtgctcataaattgcaacgaccatgacaccatcaccaacctgaagaagctggcggcgggtcatactggcacaagagccgacacgattctcatgcataattgatactccatatacaaggatcacatgactatcaaggattacgagatccaccactgaatgtgtctcgaactctactacaactaaacacatggagtgtaagatgcatgatatattactatgatctgggaatgagatgaggctgcaaatgtaattttcactcgcgaaagagcctatgatttgaataatgtacatcctgcaatgata

SEQ ID NO: 45035 - DNA, 402 bp, Glycine max
  Clone ID: LIB3139-083-P1-N1-C12
cgttggtgaatccgtttctgtctccccctcgaactcccctctctctgcgagtttcagctccgccaaaccaagcactactacgttggactctctgctcccaatattcattcaaaccatcatcactaagatcgaagcacgccatgtgtggcgccactgccgacatcaaggctgcacctttagctgatggagaagcagatcacgcggttcttgtgggccccgccagcgaggacgagagaaaaggagactatgactggacacaggaatggtaccctttgtatctcactctgaatgtgcccgaagatgcacctttgggtcttagagtgtttgataaacagctcgtcttgttcaaagatggcaatggccagtttcgctgttacgaagatcgctgcccccacaggttag

SEQ ID NO: 45036 - DNA, 401 bp, Glycine max
  Clone ID: LIB3139-083-P1-N1-C2
aacttttcatacatgaccatgctgcctcggtcatttactatgattgcaacaataataatcattgttcttgctcaaacacttgtgggggtgatttcacttcctgaagctgataaaataagcaatttgccgggccagccacaggtcgaatttcagcaatattctggttatgtcaccgtggatgatcaacatcagagagctttgttttactactttgttgaagctgaagaagaccctgcttccaagccattagtcctctggttgaatggagggcccggttgttcgtcgattggagttggagcttttgctgagcatggtcctttcagaccaagtgacaacaatgttcttcagcaaaatgattatagttggaacaaagtggcaaatgtgctatacttggagtcacc

SEQ ID NO: 45037 - DNA, 358 bp, Glycine max
  Clone ID: LIB3139-083-P1-N1-C3
aacttttcatacatgaccatgctgcctcggtcatttactatgattgcgggcaataataatcattgttcttgctcaaacacttgtgggggtgatttcacttcctgaagctgataaaataagcaatttgccgggccagccacaggtcgaatttcagcaatattctggttatgtcaccgtggatgatcaacatcagagagctttgttttactactttgttgaagctgaagaagaccctgcttccaagccattagtcctctggttgaatggagggcccggttgttcgtcgattggagttggagcttttgctgagcatggtcctttcagaccaagtgacaacaatgttctttagcaaaatgat

SEQ ID NO: 45038 - DNA, 290 bp, Glycine max
  Clone ID: LIB3139-083-P1-N1-C4
cttgttttttgctagaagcaggaagagaagcgaaacaaacaaacagcgaaataatcaattgagccacttaccatcagatttagatctcccaacagagagtttctcaaaattgccaagtacccttttcaggatcaaggaagagaatcaagaaccaccaaaaggtgttgttctttgttgtagttgtttgtaactgtagcaacatgaagatggctagaaagttggttgtggtgaggctttgttgtccatatctgtgttgtagctgtcttcttcttaagcttgttgctgacttt

SEQ ID NO: 45039 - DNA, 404 bp, Glycine max
  Clone ID: LIB3139-083-P1-N1-C5
gggaaacgcgttcagtctaacatgggagccaaaaatcatgcgattgtcatggcagatgcaaatgttgatgctactcttaatgctttagttgctgctggttttggtgctgctggacaaaggtgtatggctctcagtacagttgtttttgttggaggctcaaaaccatgggaggataaacttttagagcatgccaaagctcttaaagtaaatgccggaactgaacctgatacagatcttggtccggtgatcagcaagcaggcaaaggagagaatacacagattagttcaatctggggttgaaagtggtgccagactactgcttgatggaagaaatatagtggtcccaggatatgaatctggcaattttattggtccaaccatcttatcagatatcaatgccaacat

SEQ ID NO: 45040 - DNA, 338 bp, Glycine max
  Clone ID: LIB3139-083-P1-N1-C6
gctcctgttttgaaggctgtaattgagaaaaccaatgtgaacccaagtgaagttggggatattgttgtaggtagtgtataggctcctggagctcaaagagctagtgaatgccgactgactgcattttatgctagttcacccgaaactgtgcctggctggaccgcatataggcattgaccatctgagcttcacactgctcttaatgtaaatgccgctactaagcctgatacacatctcgatccgctgatcagtcaagcatgcaaaggatactctacacagatttgttcaatcttgggtcgaaagatgctccagactactgcttgatggaagaaatatac

SEQ ID NO: 45041 - DNA, 399 bp, Glycine max
  Clone ID: LIB3139-083-P1-N1-C7
tttcaatgtggagatattttgttggagatctcgtctttgaagggggtaagatgacttctccctacattaaatgtacagtctctttcttcatagcatttggaaatttggctgatgacaccatcaattttgaggcttttccccacaagctggtacagtttggagagattcaggaaaaagttgtattgaaatttcacaagaggaatttcttacagcttggtcaacccaggtgcgtcctgcaacaactctgttggctgatgggtgtccatatttgtatgctatggtgcatgatagttcagtgtctacaataccaggtgattttgtcattggtgttaagttgacaaccataaacaatatgtgtgcatatgggctcaatcctggtatttcaggttctcgtctttt

SEQ ID NO: 45042 - DNA, 400 bp, Glycine max
  unsure at all n locations
  Clone ID: LIB3139-083-P1-N1-C9
cttagaatggagctcttgtggaaagatcacatgagggtacaagggattagattggtttgtgctgtccttttggtgacactgctgagctcagaggtagctgagagcagaaaagtcaaaactgttggtacttcctttaagtacgaagctataaattgcaggactcatagtgcttcattgactgattttggtggtgttggagatggaaagacatcaaacacaaaggcatttcagtctgcaatcagtcatctgagtcagtatgcttcaaaaggaggggctcaactttatgttcctgctgggaagtggcttacagggagttttagtctaatcagccacttcactttatatctaaacaaagatgctgttcttcttgcatntcaggatattagtgagtggcctgcga

SEQ ID NO: 45043 - DNA, 405 bp, Glycine max
  Clone ID: LIB3139-083-P1-N1-D1
cttattctcatcctcgtataaatttatatcactcctgtgattaatcaaagttctgaatgataaacattctaataatgtctagaaatagctaagtactacctttctcttgggcaaatgaataaattcattgcttggaaatgtgcagatactgggcactggtatgtctgcaaagatgtgggaagtaactgtggagcatgctcgaacttgtgtacttgatacaacgaggcacgtgtacttcccttctaattctcaagaacctggggtggtcttcaatgctgtgggacaagtgacaggactgctttctgaatgcgagtatgtcacagtagaaaagctgactgaaactgaaaaggctgatgctcaaaactcagttactgctgcattaagacaaggggagaaatacacaac

SEQ ID NO: 45044 - DNA, 402 bp, Glycine max
  Clone ID: LIB3139-083-P1-N1-D10
gaaaatctcaaagtcacaaaggcagtgtacagagatgagttaatagaccaaaaagaaaccttcaacagtgccaagcaaggcattagtgaagaaaagtgtccgttttgcggactcagaaccttccatttttggagaagataccaatgagaagaagttggtgaaaggaaggtgtagtagtgatggtgatgaatcaggagggattagagtgaagctaaagatgacaaaggaagaagcggcacgtttgctatcaaaatgcaaagaaggaggagttctcgagttcaaggatgttgctcgtgagcttgtggccctcccactgaaccgagttagtgttgtgtctgctttacacgaacgataatgatgcattgctcaaggtcgttttatataaactcctatctcaatatg

SEQ ID NO: 45045 - DNA, 329 bp, Glycine max
  Clone ID: LIB3139-083-P1-N1-D11
acaaaagatcatcaatccgataggcatctgactgatcatgagttagatttccttgttgctattctgggcctgcttgtaaacctggtcgagaaggatggtcataacagatcacgacttgcagcagccagtgttctgctaccttcctcagtaagcttgcaccaggaggttcggaaggatgttattcaattattatgctccattttcttggctaacctgggtgaaagtgaaagagctggggaagataaacatttgcaactgaatgatgaggcagctgttctacaaggtgaaaaagaagctgagaaaatgattgtggaagcttattctgcgct

SEQ ID NO: 45046 - DNA, 401 bp, Glycine max
  Clone ID: LIB3139-083-P1-N1-D12
aagaaatttgtttctctctaaagagtctccgctgaactttttggtttcttgaagatgtcgttactctccgatcttatcaaccttaacctctccgacatcaccgataaggtgatcgccgagtacatatgggttggtggatctggcatggatatgaggagcaaagcaaggactctctcgggactggttaatgacccttccaagcttcccaagtggaactatgatggttccagcactggtcaagctcctggacaagatagtgaagtgatcttatatccacaagcaatttttcgggatccattcaggaggggtaacaatatcctggttatgtgtgatgcttacactcctgctggggaacccattcctaccaacaagagaaataaagctgcaaagatattcagtaa

SEQ ID NO: 45047 - DNA, 401 bp, Glycine max
  Clone ID: LIB3139-083-P1-N1-D2
ctcgagccgctcgagccgctcaggtgcgtcctgcaacaactctgttagctgatgggtgtccatatttgtatgctatggtgcatgatagttcagtgtctacaataccaggtgattttgttattggtgttaagttgacaaccataaacaatatgtgtgcatatgggctcaatcctggtatttcaggttctcgtcttttgggcaccattcctcagtccatttcacagcaaactgtttggaatcaaatggcaacagtgagaacaccattgaattttgattctagcaagcagagcttttgtcaattttctattgaccttctcggtggaggaattttagtggacaaaactggagattggatcacacttatacaaaattctccaattagtaacttgttgagagttgct

SEQ ID NO: 45048 - DNA, 218 bp, Glycine max
  Clone ID: LIB3139-083-P1-N1-D3
tgcagagttagctgtggacaagggtgtggacagttgatcatacaagtaaaaggatggaaaagcattaaagtaggattgaaaatatatcactgaagaaataaaacaaaaagagtttatttaaattgagtgttccatttatttatttttcatatttttacgtgtatcctaacgtttcttggaggcttttgatttggggtgaaaaaattgctttgcttact

SEQ ID NO: 45049 - DNA, 285 bp, Glycine max
  Clone ID: LIB3139-083-P1-N1-D5
gagaacagaacctcatttctcttccattcgtgtacgcgcaaaagaatgatgacgagttcctctgctgccgctcgcaagaatctgagtaagattgcctgcaataggctccagaaagagctcgtggagtggcaggtcaatccccccactggtttcaagcacaaagtcacagacaatctccagaggtgggtggttgaagtcactggagctcctgggacactttacgctaatgagacctaccagcttcaggttgattttcctgagaattacccaatggaggcttcttac

SEQ ID NO: 45050 - DNA, 451 bp, Glycine max
  Clone ID: LIB3139-083-P1-N1-D6
tgagctatgacggacgatgcacgcacgcgtacgctcgctattagtctcgaggcggaagaaatgtccagaggttctgttccaaccatccatgattggaatggaagcttcaggcattcacgagacaacatacaactccataatgaagtgcgatgttgatatcaggaaggacctctatggtaacattgttctttcaggaggaacaaccatgttccctggtattgctgacagaatgagcaaggaaatttcggcattggcacccagcagcatgaagatcaaggttgtagcaccaccggagagaaaatacagtgtctggatcggtggttctatcttggcatctcttagcaccttccagcagatgtggattgcaaaggcagaatatgacgagtctggtccatcaattgtgcacagaaagtgcttctaaaactgtttgagagatagggttattgaagcg

SEQ ID NO: 45051 - DNA, 399 bp, Glycine max
  Clone ID: LIB3139-083-P1-N1-D7
ggcggggtcataacatccttaaggcttgtgatgcatatatgaaaggttacttgattggctcgctgactagagatgcctctgtaagtgaaaagagcagtcagaattcaacctctgtgggtttcaagttgatgttagccaagatagtgccaaagcttttcttgtcactaagtgaggttggagctgattgcgaggaatttaagcatctgaaagatttgtagcgaagttatatggtgatacatcacttcatttctcaaattaaagccaactttggtctgctgtctctgccctaaggtaccaacaagtgtaagggttcccatatattgtcaatgttttgatttctactatttgtaccctttcatttctcttgtttaaaagatcaattcacttctaggagcttga

SEQ ID NO: 45052 - DNA, 401 bp, Glycine max
  Clone ID: LIB3139-083-P1-N1-D8
ggaatttgagtaatattcatatttccggcttattttacgacgggggatacaaattctggactaaacacgagaaaaatcttgctttgacagaagaggaaaagatggaagtgattagaaatagaggcattcctgctgatgttcttgcaaagcgagctcatgaatttgaaaaacatgttgctcatgaaagcctcaaggatcaaattcctgctgttgacaagttgtattctactaaggttaataagtttgcaaaaattatgaaccttagacaaagtgttgttggtgatcttaaacttcttactgatgggaagttgtatgagggtaagcatattcctgtatctaatattagtgcaggggaaaatcatgtagttcaaatacccttaatggcacaggaggaaattctg

SEQ ID NO: 45053 - DNA, 223 bp, Glycine max
  Clone ID: LIB3139-083-P1-N1-D9
ggtgggtgtatgtttgagaagtaagaagcatggctcagtatggttacgcataccgagcgctcaatatccacctaccacactagcaatggggggaaccatggaacctggggcaaagccatttgctccctacgtccccaaatttagtaacggtaatggttactcagacgggatcgttaccaagaaaaaaataattccagttgctagcaggccttattatgaggac

SEQ ID NO: 45054 - DNA, 408 bp, Glycine max
  Clone ID: LIB3139-083-P1-N1-E1
ctttcttctaaaccctatggccgacgaagccaaagccaaaggcaacgcagccttctcctccggggactatcctgccgccatccaccacttctccgatgccatcgccctggctccctccaaccatgtcctctattccaaccgatccgccgcatacgcctccctcaaaaactacgcagatgcattagcggatgccaaaaagacagttgaactcaagcccgactggtccaagggttacagccgtctcggtgccgcgcatcttggcctttcccaatacgatgatgctattttggcttacaaaaggggtctcgaaatcgaccctcacaacgagccccttaagtctggtttggcagatgcgcagaaggccttggccgcggcctccaggcctcgcccctcggcctctaacccctt

SEQ ID NO: 45055 - DNA, 403 bp, Glycine max
  Clone ID: LIB3139-083-P1-N1-E11
gcgcgtcgcagccaatcgccgttcccatcatcgccgaaatcgacctctacaaatacgacccctgggacttacccggattggctacttatggagagaaagagtggtacttcttttcaccacgggaccggaaatacccaaacggttcgaggccgaaccgggcggctggcaccggttactggaaggcaaccggggcggataagcccattggtcagcccaaaccggttgggattaaaaaagctttggtgttttacgcagggaaagctcctaaaggggacaaaagcaattggatcatgcacgagtatcgtctcgcagacgtagatcgctccgttcgcaaaaagaacaccctaaggttggatgattgggtgctttgccgtatttacaacaagaagggcacgatcgagaa

SEQ ID NO: 45056 - DNA, 387 bp, Glycine max
  Clone ID: LIB3139-083-P1-N1-E12
gctccaacacagcaattcattcacatatcatagccagcactgagctgtatatgttccaccgcggtgacgtacgggtattgtgtacttatggagagaatgagcgttacttcttttcaccacgggaccggaaatacccaaacggttcgaggccgaacccctcaggtggcaccgcatactggaaggcagccgtcgcggattaatccattgcacaaaccagacctgctgtgatgaaaaaagctgtctggcacgacgccgggactgactatgctgggaacaaaaccgatggactcatgcacgagtatcgtatcgcagacgtatatcgctacggtcgcaataagaacacgataaaggctaatgattggttgcttggacggattgacaacaagt

SEQ ID NO: 45057 - DNA, 392 bp, Glycine max
  Clone ID: LIB3139-083-P1-N1-E2
attttgtgaaacttatggaggcagctggggaagacgagaagttgaaggatttggaagaagcttttgagatgtacaatgacactgaaatgtttgggtttattactcccaaaagcttgcaaaggatgctgggtaggttaggagaatcaaaatccatggagcaatgcacaactatgattggccactttgatttgaatggagacggcctgctttgctttgatgaatttagagtcatgatgcagtgatgagtctttgtctttatttgatttaatgggggatggggtagcatgagattgaatcacacttatacagaattctacaattaggagctggacgagagttgctgattgatagaaaggctgatttatgtttaagattgtgatgtctgggggtgc

SEQ ID NO: 45058 - DNA, 272 bp, Glycine max
  Clone ID: LIB3139-083-P1-N1-E4
gtgttggcaagaaagaagtttgatgcagaaaccatgcttttgtcgacgcacttcttgtactatgtgaagcgcaacgatggcggatggattgcacttgcagcatccatcagttgttgagaagatatcgcgcacagacttattcgatgggtagggttgggactactcgcttaagaaactattacgcagctgcttgttacttggatggaagctagcaatgttcaggtttgttgtcagtcatagcacatacgccggatgagaaaggagtgggagga

SEQ ID NO: 45059 - DNA, 400 bp, Glycine max
  unsure at all n locations
  Clone ID: LIB3139-083-P1-N1-E6
ggagtggcacattgtttgtctcggaaaagcaaagaaacatggtattctgggatgaaggaaaaatttgtacaaatgatgaagagcatctatgaaacagaagttacagattggccagtaccactgaaaatcatttctggaaccattcttgcaacaattttgggaacaaccttctggaaactcttttcctttcttagagatgctggtaatgggggagtttttgttgtnnntgtttnttntttttttacatctttntgtgttnttaagctcctaaaggggacaaaagcaattggatcatgcacgagtatcgtctcgcagacgtagatcgctccgttcgcaaaaagaacaccctaaggttggatgattgggtgctttgccgtatttacaacaagaagggcacgat

SEQ ID NO: 45060 - DNA, 328 bp, Glycine max
  unsure at all n locations
  Clone ID: LIB3139-083-P1-N1-E7
gggtatgtaaaaatttaggtgaattagattttggaagtacagactgttgactaactatgttctcacattgacattgagatttaaattcatgtcctcatgagatatgagtttgatcttcctggttggaccaacctttgttagcctcccgagagacttgatggttaagagcattgatctctctcttgcattattgatactagaaatgatgtggggtattgctaatttgttgccgtggcatatactatgaagataatgtggggtattgttaatttgttcttattcatttgaagttttgtttgaatttnttattttgattttgatatggtgg

SEQ ID NO: 45061 - DNA, 400 bp, Glycine max
  Clone ID: LIB3139-083-P1-N1-E8
accacacaaagtacacttctttctcctgaatcttctgcttgggcggctgcttcgccttccattaccggatctatagttacatcaatttatatccatttacccttaaactttccaagtttcggatttgaatttgaatctctctacatgcgatgacgtcaacgtcttcttcagcgcctcattacaggtctctcccctcgccctcatcatctaactccactgcctcctatttcgtcacacgccccgcgacaaccactcgctcttctttcgccacgcgccgaccatgggaagaggtgttcgcgctcttctcattcacgcgcccttactcgatcggcgaagcgacgatgcgcgtgaggcgcaacctcgttcactttcgcgtgaactactttatgatcgtgctgtt

SEQ ID NO: 45062 - DNA, 386 bp, Glycine max
  Clone ID: LIB3139-083-P1-N1-E9
gttgaggtgacacaattggatggcactaaattgtcctacacaggagaagcacatattgattgcaactggcagcagggctcaacgtccaaatattccaggacaggagttgggtataacatcagacgaggcactaagtttagaggatcttccaaaacatgctgtggttcttggaggaggttatattgcagttgagtttgcatctatatggcgtggcatgggttccacagttgatctagttttcagaaaggaacttccactgagaggttttgatgatgaaatgagagctgcagtggcaagaaatcttgaaggcaggggaattaatttgcattcaaagaccaatttgacacagttgatcaaaacaaaggatggcattaaagttattacag

SEQ ID NO: 45063 - DNA, 398 bp, Glycine max
  Clone ID: LIB3139-083-P1-N1-F10
ttcagtaagtcgtctttttcagcgagacacgatccagaaagggaggaaggcattcataatgttaaactctactcctacaaacaactaagaaatgccactgaaaagtttagtccagccaataaaattggagagggtggttttggttctgtctacaagggacggcttaaagatggaaaagttgctgcaataaaagttctttcagctgaatcaagacaaggggtgaaggaattcttgacagagattaatgtgatctccgagatagagcatgaaaatttggtcaagttatatggttgctgtgtggaaaaaaataacagaatattagtctacaattaccttgagaacaacagcctatcacaaactcttctaggtggaggtcacaatagtctctactttgattg

SEQ ID NO: 45064 - DNA, 388 bp, Glycine max
  Clone ID: LIB3139-083-P1-N1-F12
gtttttgtgtgtcaccttggtgcatacaacacaagatggaggaccaaaatggtagtggtaagttgagccaagggcttcgcaaggtgaagccttaccttgctatattgtcccttcagtttggctactcagggatgtatatcatcactatggtttctttcaagcatggcatgagtcattggatactctcagtgtaccgtcatgtagttgctgctattataatagtcccttttgcacttgtccttgaaagaaaaataagaccaaagatgactcttcccatcttcctgaggatagtggcacttggtttccttgagccagtgctagatcagaacttgtacaacatggggatgaagatgacctcaacaacgtttgcatctgccactgttaatgt

SEQ ID NO: 45065 - DNA, 386 bp, Glycine max
  Clone ID: LIB3139-083-P1-N1-F2
ctcgagccgaatcggctcgagcaaaagttatgaagcaacttagtcgcctttttccaaacaaagtgaccatacagttgcctcaggacgaggctttactctctgactggaagcagcagttagattgtgacattgaaactatgaaagctcagtccaatgttgtcagcattcgcttagatcttggcagaattggattggattggcctgaccttgagactctctgcatcaaagaccacaccctaacgactgagagtgtggagaagatcattggatgggctataaggtaccaatttatgcattcatctgaagcttcaatcagagattctaagcttgtaatatctgcagaaagcattaagtatggacataatattctacagggcattcaaaat

SEQ ID NO: 45066 - DNA, 381 bp, Glycine max
  Clone ID: LIB3139-083-P1-N1-F3
cggctcgaggtctcttttcttcactgtctccttattcttcattagatcctcagtgggatcgaccctcatttctgtgaactgagatggctggaggggtaattcgccagtatttaaggaggaacttccatcttattcttctaaatcttcttttaagtcatccattatcacaaagaaagatggtgctgactctactggcagcaactccttaagagtgcttgcttttgttggagctggtgtgtcagggtttttaggttttgcaacaacagcatttgctgatgaagctgagcatggcctggcatgtccaagctatccatggcctcacaagggcatccttagttcatatgatcatgcttcgattcgtcgtggtcatcaagtttatca

SEQ ID NO: 45067 - DNA, 404 bp, Glycine max
  Clone ID: LIB3139-083-P1-N1-F4
gaccatccaggccctgatgcgctgcgccatcctctactcctacgccaaggagcgcgcgggtcctctgaagcccggcgtcaacaccgtcgaggaggccgtgaagaccgtcgtggctccggtctacgacaggttccacctcgtccccggcgaggtcctcaaatacgccgatcgcaaggtcgccgaattggaccgccacgttccctccaacgtgaagaaggtctcctcccaggcccgctccgtcgtctccgaagtccgccgtgatggtgtctccgcctacgccaaaatcgtttactcgaagtatgagcccacggcggagcagtgtgccgtctccgcatggaggaagctcaaccagcttccgctcttccctcaggttgccaatgtcgtgttgcccaaggctgcctact

SEQ ID NO: 45068 - DNA, 404 bp, Glycine max
  Clone ID: LIB3139-083-P1-N1-F5
agaaagtcgtactgattcctcttcatctttcgttaaagcgagtacttttcgttcttgatctgttggttacgatgtcgtattcaaggagatctaggtattctccttctccttctccttctccatacaagcgatacggtaggtctgtgtccaggtctctctcaatatcaagatccagaagccgttcaaggagtttatcaagagatgcagaaaatccaggaaacaatttgtatgtgacaggattgtctcctaggattaccaagagagaactggagaaacattttgctgctgaaggaaaagtgatagatgtccatctggtagttgatccttggacaagggaatcccgtgggtttggctttgtgacaatggagactcttgaggaggctgaacgatgtgtaaagtatctg

SEQ ID NO: 45069 - DNA, 185 bp, Glycine max
  Clone ID: LIB3139-083-P1-N1-F7
ctcaaacctaactcttttttccacaacattaccatattccggggggtttttttccaaaccttcaccattacactcctattccaaactacaatatgacttcctctcccaaacttatcacttactctcacaaccaattacctaaaatcgcattcacctatctttatcactatcaatattcaatattc

SEQ ID NO: 45070 - DNA, 400 bp, Glycine max
  Clone ID: LIB3139-083-P1-N1-F8
gtcaaccttggttctggaccacacatcgtaacatcatcgagtgtctgatctcgttcgcaccctgcttcttagtcctctctctcaccatttaacaattacactggaagaaaaatgggaggttgtctatcatcgaagcctaaggcagtagataatggctcagcttccggcaataccaactgtttcatgctgtatgcaagagcactctcaatcacatggggagaaactccagaatattggatatgggttcagcagaaagaagcaagtggcacaataatagagttggctaaactaaaaaaagtttgctggctagaagtgcgtgggaaatttgacattagaaagcttttaccaggaattctatatcaagtgtcatttctaataatgttggaagattcatctgaag

SEQ ID NO: 45071 - DNA, 404 bp, Glycine max
  Clone ID: LIB3139-083-P1-N1-F9
gacaggttcaaaccggagcaaaaaaacttgttacgatggtttcttccgacaaggatccacgagaggaagtccttcaagcatggtacatggatgatagtgatgaagatcaaagactcccccaccacaaagaacccaaggagtttgtctcgttggaccaacttgctgaacttggagtccttagctggaaattagatgctgataaccatgaaaatgatccagagctgaaaaagattcgtgaagagcgtggctacacctacatggatgtttgtgaggtctgcccagaaaagttgccaaattatgagcagaaaatcaaaagcttctttgaagaacatcttcacactgatgaggagatccgcttttgtgctgctggaagtgggtattttgatgttagggattgcaatgat

SEQ ID NO: 45072 - DNA, 405 bp, Glycine max
  Clone ID: LIB3139-083-P1-N1-G1
gccttactttagtggttctaaattgaaaagctttctagctcgtcataatatcaccattactgatggtattgacaaaactagtgcaactttgcaatttagaaagttagcagattgtgattttctcaagagaaactttaagcagatgtctaatgttttatgggtggctcctgaggacaaggcgagtttatggtcacaacttcattatgtttcgtgcaataatctggaaatgcaagaagcttatcttgtcaatctcgtaaatgtgttacgagaattgtatttgcacagtccagaggaagctcgccaattgagaaggaaagctctctctcgtattgaatggctgcaaaaagctgatgtgcctaccatagcacagattgaagagttccattcgatgcagaggatgatgaa

SEQ ID NO: 45073 - DNA, 400 bp, Glycine max
  Clone ID: LIB3139-083-P1-N1-G10
gcgacgttgacgctatggacatgtcggataacgactcgactcctagcgcatctcgccgtaactcgctcgaccgtgatggtctccgcaaggacgtccacaagctcgccatccagtcgcctccaccgcttgatccttcgcttcgctctcctggcgagcagtctgaagccgcttccgagcaccagtcagagctgggtgtttcggagcaggacaacgaggcctgggttcagaacatgcgcatgatcgaggagctgcgcgcgttcatcaaggtcaagctcgagcgcggtgactttgaggacggcgcagactcaacagaagtcaaggaggagagctcagaagagcgccgtggttctgcaggccctagcatgtcggaagaggagcgcagtttatatcccgttctacg

SEQ ID NO: 45074 - DNA, 314 bp, Glycine max
  Clone ID: LIB3139-083-P1-N1-G11
agttcaaacactctcatcacattatgcttcaccttacaatcggggactcaatcggtctaaactagataaaatgaccttaaattacaacatctacctcgacgtgtctgaggtgctaacgctgatactattattcttactgaccgtcacagagctcgtggaggatcagccattacaatcttaagtcaacagctgaccactcttgaaggggcgaatcaacgtcaatttaaattgtaacggtacctgtacccctatccaacggtacattaaagtggacttcatagactcgataagcagcgcgtcaagctcgcattttc

SEQ ID NO: 45075 - DNA, 399 bp, Glycine max
  Clone ID: LIB3139-083-P1-N1-G12
caccttcctcttcgaccagccctctcgctcacttttcctctccctccacgcccgtcccttggataggcatttctcagctcggcatctctcggctcgccaccactccaggatccagctgctgacgctgcccgctgtcaccatgccttcgcaccagcctgccgccggcgaggcggctgttaagcccgagttcctctcgagccagccctccgctatggcgaagccctcggagcccaaccgcaaccccaagtacgacccgaccaagaagcacatcaccgaatatcccatgacccgccagaactggtacaagcacgtcaactggctcaacgtcttcttcatcggcggcatcccgctgatgggctgcatcgccgctttctggactcctctgacattcaagacgct

SEQ ID NO: 45076 - DNA, 403 bp, Glycine max
  Clone ID: LIB3139-083-P1-N1-G2
ccatatttgtatgcaatggtgcatgatagttcagtgtctacaataccaggtgattttgtcattggtgtcaagttgacaaccataaacaatatgtgtgcatatgggctcaatcctggtatttcaggttctcgtcttttgggcaccattcctcagtccatttcacagcaaactgtttggaatcaaatggcaacagtgagaacaccattgaattttgattctagcaagcagagcttttgtcagttttctattgaccttctcggtggaggaatcttagtggacaaaactggagattggatcacacttatacaaaattctccaattagtaacttgttgagagttgctgcttggaagaaaggctgtttaatggtcaagattgtgatgtctgggaatgcagcagtcaaaa

SEQ ID NO: 45077 - DNA, 389 bp, Glycine max
  Clone ID: LIB3139-083-P1-N1-G3
atttcaagcatttgatttgcaaattgcaaatccctccaccttttcaaaatcttttgtgatcttttccaatggccaccttcatcttaaggtctaacaaagcagtgcatgcctttggttggctttgtctgctactgatggttcataagggtgcttcctatgattttgttgttggtggccaaaagggttggagtgttccaaatgaccccagtttcaatcccttcaatcaatgggcagaaaaaagccgttttcaaattggagactcccttgtgttcaactaccaatctggccaagactcagtgctctatgtaaagagtgaagactatgccagctgcaacattgattcaccttatgcaaaatactctgatggccacacagtctacaagctaaac

SEQ ID NO: 45078 - DNA, 402 bp, Glycine max
  Clone ID: LIB3139-083-P1-N1-G5
cttctttcatcttcttccactgtctgtctacactacggacagagcttttttcacaccacagctaaaattgctgcaatagagcccttcttctcccttcttcttctctacccacacccaaacccaaaccaagttctttctttctaattcccttgataatgtaaaatcacagaaaaacaaaaaaagctactcaaaacttggctccaattagcctttctttttttgttttgaggaaaaacagaaaagttccacacaatgtcttcttttagagctctcttcttcttctttctcatcaacgtctccttgctcctcacactctcttctgcggcggatccattcgtttcatacgaatttgaagtctcttacatcactgcatcccctcttggagttcctcagcaggtcatt

SEQ ID NO: 45079 - DNA, 405 bp, Glycine max
  Clone ID: LIB3139-083-P1-N1-G6
tcttctacaagattttctgttcgatctcaaccaaggttgttccttccacctccgccatgagtttcatctttggaaagcgaaaaacccccgcagagcttctgcgggaaaataagaggatgctggacaaatcaatcagagaaattgagcgtgagcggcaaggattgcaaacacaagaaaagaaattgattgcggagataaagaaaagtgccaaacagggccagatgggagctgttagagttatggcaaaagatcttgttagaacaaggcatcaggttgagaagttttataagctaaaatctcagctccaaggtgtatcactcagaattcagactttgaaatctacacaagcaatgggtgaggctatgaaaggcgtgacaaaggccatggggcaaatgaataggcaaa

SEQ ID NO: 45080 - DNA, 398 bp, Glycine max
  Clone ID: LIB3139-083-P1-N1-G7
gttcataatttagctaatatcactgagctggatgcaggtgaactggctatgctattgttagagaaatttaagcccggtgaagagtttgtgttcggtccacagtcaatgcttgatcagaatcaaataatttttcattcccaggagtcactgtcatttgatggggattttccctcaaattcagcaggtgaagatgacacaatcagtgaagcatctgtctctgacctttctcgatttattccaaagatgcctctatccccttcggcacctcatgttatcagcattggacaacttatggaatcggcattagaggtagctggtcaagtggcaggaacagctatctccacttcgccccttccgtacaacaccatggctagccagtgtgaatcactcggtacatg

SEQ ID NO: 45081 - DNA, 93 bp, Glycine max
  Clone ID: LIB3139-083-P1-N1-G8
gtgaggatcttgcttctcttggaaaaggactattaagaggttggggctgaaagagcggaagatgatgaggaaagagaggactattcataaatg

SEQ ID NO: 45082 - DNA, 398 bp, Glycine max
  Clone ID: LIB3139-083-P1-N1-H1
cacactcattcagtgccagaatggcactacggcgcttggtgatgaccctttatgccatcttcactcttgcacttgcgagagaaagccatgccacatacaaagacttttggcctgctgtttgggcaaccactcccattacaagttcattgagagatcttctaatgcctgtccctgcaagtgttgaaatcgccgatcaccctatgcaaattgaagaaacacaagacctggaaaccttcttatataaagaagaccttgatgcatgctaaacagatgaaagtacaattcagcaagtcttcctttgaacaaccatggggtgatggtccatgggttaagggaattaaagacactactgaagaaggatatagctttgaagagctatgcatcaagaaagaaaccat

SEQ ID NO: 45083 - DNA, 269 bp, Glycine max
  Clone ID: LIB3139-083-P1-N1-H10
gattatgggtgccaccttgtggcatacaacacaagatggaggaccaaaatggtagtggtaagtcgagccaaaggctcttcagggtgaatccttaccttgctatattgttccttcagattggctactcaaggatggatatcatcactatggcttctttcaagcatggtatgagtgattggatactctcaatgtaccgccatgtacatgctgctattataatacaacatttcgcacttgtgcttgtaagcaataatagaccctatatgact

SEQ ID NO: 45084 - DNA, 393 bp, Glycine max
  Clone ID: LIB3139-083-P1-N1-H11
cacaatcccaatttgtttacaacactaaaaaggcatgggagtgggggtttcagtgcctccttctccaccttcttcttccatggactttaactctgatagcaactgttcctctccttacatcactgcaccttctatcccccaacgctttggcatcttcttcttcagtgctcccactatccccactctcagacactcctctgcttccacttccaacaccaccgaatacgagtttgaattcgacttcaatggtcaactccagagaccttccctttcccctaagaactgttccttggcggcaagattacacctctcaaaccccatttcacttcgtcgaataaaagaagatagaaatgggttatcgaacaatcatcatcacctattatcatcaccacc

SEQ ID NO: 45085 - DNA, 400 bp, Glycine max
  unsure at all n locations
  Clone ID: LIB3139-083-P1-N1-H3
aactcactcatcaatctcgtttgttctaactaactataacttcatcatgtcgtcgagcacagttggtcaagtcatcaaatgcaaagctgcggtttcatgggaggcagggaagccacttgtgattgaagaagtagaggtggcaccaccacaagctggtgaagtgcgtttgaagatcctctacacctctctttgccacactgatgtttacttctgggaagccaagggccaaactccattgtttcctcgtatatttggtcatgaagctggagggattgtggagagcgtangtgagggtgtgactcatctcaaaccaggggaccatgccctcccagtgtttaccggggagtgtggagaatgccctcattgcaagtcagaggagagcaacatgtgtgatcttctc

SEQ ID NO: 45086 - DNA, 399 bp, Glycine max
  Clone ID: LIB3139-083-P1-N1-H4
cacttatacaaaattctccaattagtaacttgttgagagttgctgcttggaagaaaggttgtttaatggtcaagattgtgatgtctgggaatgcagcaggcaaaaggagtgattgggcctcattggtacaagtgtttttaacaaacagcaacagtacagagcattttgatgcatgtaagtggacaaaatcagaaccacattcctgggaattaatcttcccaatagaggtatgtggtcctaataatggttttgaaatgtggagttctgagtgggcaaatcaaacttcatggcatttgagtttccttattgacaatcccaaacagtctacagtttttgatattctcttgggaatctctcaagattttgaaattgctggtaatactcttatgccagcttttt

SEQ ID NO: 45087 - DNA, 403 bp, Glycine max
  Clone ID: LIB3139-083-P1-N1-H5
caacatctctatcgagtaaattaactatgaagcctaccctactattatccctttccttcctgcctctctttgctttcctggctctttcagaagatgttgaacaagttgtggacataagtggcaaccccattttcccaggtggcacatattacattatgccatcaacttggggcgctgccggtggtggattgaaactaggccggacaggaaactcaaactgcccagttactgttttgcaagattactcagaaatcttccgtggcacaccagtcaaattcagcatacctgggataagccctggaatcatctttacaggtactccacttgaaatcgagttcgcagagaaaccttattgtgctgaatcctccaaatgggtggcgtttgtggacaatgaaatccaaaa

SEQ ID NO: 45088 - DNA, 397 bp, Glycine max
  unsure at all n locations
  Clone ID: LIB3139-083-P1-N1-H6
ctgcaattcactctgtacaattcttcgttcgttctctgcagctatatcctttttgagcttcaatggcggacgctgaaaccttcgctttccaggctgagatcaaccagcttctaagtctcatcatcaacacattctacagcaatgcttctgatgctttggataagattcgattcgagagcttaaccgacaagagcaagctcgatgctcagccagagctcttcattcgtcttgtgcctgacaaggataacaagactctntccattattgacagcggcattggaatgaccaaagcagatttggtgaacaacttgggtaccattgcgaggtccgggaccaaggagttcatggaggcgttgcaggccggtgctgatgtcagcatgatagggcagttcggtgt

SEQ ID NO: 45089 - DNA, 399 bp, Glycine max
  Clone ID: LIB3139-083-P1-N1-H7
gcctaattaatgcggtgaaatcaatttcgcgtaaagcattaagtgctgcggtcatggatattggttcagttgtcagcatgaatgatagaatagcaggatcagctccaggtaatggatccagagcagctgttggtgaggatttggtttccatgactaattgtcgtctacaggctagaaatttcattgcacaagatggttccaatggaattaagaggatgaaacgttacaccagtgctattcccttgaatgttgtgtcatctcctggtagcatgaatgatagtatcaagcagttaactgcttcagagacttctgatctggagtcaactgcaacatccagtgtcaagaaaccaaagattgaggttaatcatgcccttttggaagaaataagggagattaatc

SEQ ID NO: 45090 - DNA, 394 bp, Glycine max
  Clone ID: LIB3139-083-P1-N1-H8
aaacaattgtcttctcaaaagaaaaatccagattctctgcattccacataacttgttagttcctttgcttccaagaccagtttcggattattgttcactcatctcattctcttgttaatttctctacacatattctctctctcaagtctaaaccatgcctgttgtgacagaacacatgaaatggagaagaccaagaaaccaatttaggaaccccatttcagaaaccgatgatccaatcactcaaatcccttccataatccaatcctctcacagcaaatccaccatctcctctctcttgtcttctttctccacctccggtgaaaccacacatgccagagaccaaaacagaaccaacaacaacaacaaaagcaacagaaaattctctgcagcaacc

SEQ ID NO: 45091 - DNA, 398 bp, Glycine max
  Clone ID: LIB3139-083-P1-N1-H9
aaacaattgtcttctcttattaaaaatccagattctctgcattggacatattttgatagttcctttgcttccaagaccagcttcggattattgttcactcatctcattctcttgttaatttctctacacatattctctctctcaagtctaaaccatgcctgttgtgacagaacacatgaaatggagaagaccaagaaaccaatttaggaaccccatttcagaaaccgatgatccaatcactcaaatcccttccataatccaatcctctcacagcaaatccaccatctcctctctcttgtcttctttctccacctccggtgaaaccacacatgccagagaccaaaacagaaccaacaacaacaacaaaagcaacagaaaattctctgcagcaaccttca

SEQ ID NO: 45092 - DNA, 386 bp, Glycine max
  Clone ID: LIB3139-084-P1-N1-A1
ctcgagccgaatcggctcgagcgaaggagttgcatgatcagagtgctatccttcgtgataacctcaccctttggacctctgacatgcaggatgatggagcagatgaaattaaagaagcagcaccgaaacaggatgaccagtaaaaatattttactgctaattagaattgaacttctcctccatatctttttgaagggagaaggtgtttgttgctaatatctctttggtactgagattttaggcattcatgtttgttatgattgtggatgtactgggcccgttttagtttgtccttccattttcaaagtgtttccaaaattgcctatttaataaaggacgctgaagttttaataatatggaatgggaatttaaggattcttctcttc

SEQ ID NO: 45093 - DNA, 133 bp, Glycine max
  Clone ID: LIB3139-084-P1-N1-A10
ctttcattttataccattcttcttatttctttttaccaatcactacttattcaatccaaggatggcttccgccggcgatcttttcaggcatggtttgccggaagttggtggtgccgggaagttacacgtgctt

SEQ ID NO: 45094 - DNA, 289 bp, Glycine max
  Clone ID: LIB3139-084-P1-N1-A11
gactgatgagattttcttcgtcagagttaaactcgaggacgtgggaaaccatggaaccattgaatttgtttgcaactcatgggtttacaacttcaggagttacaaaaagaatcgcattttctttgtcaatgatacatatcttccaagtgccacaccagctccactacttaagtacagaaaagaagaattggaggttttaagaggagatggaacagggaagagaaaggactttgacagaatctatgattatgatgtctataatgacttgggcaatccagatggtggtgat

SEQ ID NO: 45095 - DNA, 351 bp, Glycine max
  Clone ID: LIB3139-084-P1-N1-A2
ataaaaaaaaaaaaaaatatttaaaaagaaataaaaaaaaaaaagagatggaaaaaataataacaaaaaaaatataaacaataaaaaatacaaaaaaataaaataatataaaataaaaataaaaaaaaaaccaaaagggggcgccccccattatagtcttctgctccccggaattaaattccgacccggatctttatgggaacccagttttcctttaatggggatatttaaaagctgcggaaaataaaggcataaatttttcctttgataaaattttttcccgttaaaaattcaaaaaaaaattccacccggaagcataaagtaaaaaccctgggttcccaaagaggcggc

SEQ ID NO: 45096 - DNA, 405 bp, Glycine max
  Clone ID: LIB3139-084-P1-N1-A3
aagatttcctcagtataagcatagagatttctacattgctggagaaagttatgcaggtcactatgttcctcagttgtctcaacttgtttaccggagaaataaaggaatcgagaatccagttataaatttcaagggttttatggttggaaatgcagtcattgatgatttccatgattatattggaacatttgagtactggtgggtcaatggtttgatttcagattccacatataagaagctgggaattgcctgtgacttttattcttctgagcatccaccagagaattgtgtggaagctctcgaacttgcaactttggagcagggaaacattgatccatatagcatttatacaccagtatgcaatgatatagcagcaatcaaacgccgtttggggggtcgctatcc

SEQ ID NO: 45097 - DNA, 404 bp, Glycine max
  Clone ID: LIB3139-084-P1-N1-A4
cttgagccagacatgtacaggaacgctgcttcacgtcttagggtcatgagtgcccgttcgtgcagcagcagcaggatacctgccagtgccagatttgcaagttccgttgccacacaacaatcctcttctggtttgggtggtttatttggatggctcactggagaccgatccagttctttaccatctctggatttcccgcttccgggcgttacacttcccccttcattgcctgattttgttgcgcccggaaaaactattattactacactcccaaatggactcaaagtggcctctgaaacatcaccgactcccactgcgtcggttggcttatatgtagaatgtggttcaatatacgagactccgataagttttggggctacacatctgctagaacgaatggcttt

SEQ ID NO: 45098 - DNA, 391 bp, Glycine max
  Clone ID: LIB3139-084-P1-N1-A6
gcttaagcaaaagcaaagttacttagtcaaacgaggtcagagttcttgtgccaagtgtgcgaatgcagaaattcgctacaacagaagagttccaggttcacatggtttgcttcaccgcccctttatttattcaatgctagctgttgcagctgtttgtgtatgtgtttgtgtgttcttccgtggtcgccctttcgtaggctcagttgctcccttcagttgggaaaatctggattatggcacaatgtaatgctgctggtgggatacccaattgttcgtttttttcccctcatatggaaaaactgcttctgtgggaaaatggggaattttgtgtcaagagcccaatgtaaacatatcatgtggggatgtaaagttgtggggagatgttaggcag

SEQ ID NO: 45099 - DNA, 199 bp, Glycine max
  Clone ID: LIB3139-084-P1-N1-A8
ctcaaggcggcggctgcggcctcggcggccaccgcggctcccaagaaggcgccggctcagcagaacaagccggctcagctccctaccaagccgcctcctccggctcaggctgtgagggatgccagaaacgagccagttcgtggaggccgtggaggtggacgaggtgggggacgtggatttggacgtggttgtgggttta

SEQ ID NO: 45100 - DNA, 180 bp, Glycine max
  Clone ID: LIB3139-084-P1-N1-A9
ctcaaggcggttgttgttgcctcggcggccaccgcggcgggcggtaaggcgccggctcagcagaacaagccgactcaactccctaccaagccgtcttctccggctcaggctgtgagggatgccagaaacgagccagttcgtggaggccatggaggtggacgccctgtcatacttttgttt

SEQ ID NO: 45101 - DNA, 407 bp, Glycine max
  Clone ID: LIB3139-084-P1-N1-B1
tgttcacgggctaacactgaaaggcaaaatggatgaaaattggttccagctgttggccccatttatcagtcagtggaataatcgagctgagtttagggtcgacgtttatgctcgacaagagggcctattgagttttaactcggattacatggtgtggtataggcgcaaaacaaaaatgtttatcaacccaaacaatgcaaacacggttacattgggtgaagttaccgagacattgcagtatatggtgtcaccacaagggcaaaacacatggacagttgatgatctcgtgtcatacgtggaaaagttagcgattttatcccaagagcaagagaggatcactgagcctgtggcacatggtccagcatcagagcgtcgatttcccccacaacagtttcacatgcttcagt

SEQ ID NO: 45102 - DNA, 401 bp, Glycine max
  Clone ID: LIB3139-084-P1-N1-B12
gcggcagtgacaggagtaatgggaaggtcgagaagaaagtacaggcaatcgagaaccaaggtccgtgtgggactccctaagaagaaccctaggcttttcaaaccctctttctccgttccacccaagctcttgcaatccctcgaccaagagcctcaatgggacgaccaaggcaccgttaacaccaactactcctcctttggcgttctctctgaccctaactccctcaccgaactctcttccgatcctcaaaccatcgattccggcagcgatctcgaagaagacgacttgaaatctgccctaggaaagaagcgaagggatgggaggagcgcgccgcctcagcctctgactgcaatgcaacggattcatatcagtcgtctcgtcgctaaatacggagaatgatt

SEQ ID NO: 45103 - DNA, 403 bp, Glycine max
  Clone ID: LIB3139-084-P1-N1-B2
gaaccacattcctgggaattaatcttcccaatagaggtatgtggtcctaataatggttttgaaatgtggagttctgagtgggcaaatcaaacttcatggcatttgagtttccttattgacaatcccaaacagtctacagtttttgatattctcttgggaatctctcaagattttgaaattgctggtaatactcttatgccagctttttctgttccacaggctactgccagatcttctgaaaatgcggaatcctctgcatgatctggaattcgtgttttctttcgcttgttcgcttgtttaattcaataaaggaaattaggcatgaccctcttgttgagtatgctctgcctatctgaaaatttccacacctcttttaattgtcgtaatgatgtgtgaagtgtgt

SEQ ID NO: 45104 - DNA, 402 bp, Glycine max
  Clone ID: LIB3139-084-P1-N1-B3
gaaagatcttgcaatggttaaagttaatgtagcatgtgctgctgttggcttgacatcaagttacactccaactccattgttggaatctggtttgcaaaaagacagagggttaattgtggagtattttggaaggatgtcttacgttgctcataacgttaatcagccccaagagaaagatttgttggagggaaatttttcctttgatattaaatctcgctctagattgcaaaaagtttcctctacaaaagcacaatttgttagtggaaaaaccttcaaatatgatataattggtgctggttcacattcttcacaagattttcctgaaaaggaagatcaagaaaaacccaaaaagattgatgccagattgagacaaagaatagatcctcaatacaatgaggttca

SEQ ID NO: 45105 - DNA, 399 bp, Glycine max
  Clone ID: LIB3139-084-P1-N1-B4
cgtcaatcctcacgacagctctgctctgctctgcttcttttgttgtcgtatttttcttctgaaaccctaaattttgtctgctctaaactttgggatctttcacacttgaaaaaaactgcttcttgtgcccgacccagcacaattctcatactatagatctttgaatcaaatataatttctgatcattttttttgtttctctttttcccccatttgatcccttctcaggttctggattctcagtgtttgcggagcgcagcatcatcttttagggaagaatggatcatcaagggcatagccagaacccatctattggggttgttggtagtggagctcaattagcatatggttctaacccatatcagccaggccaaataactgggccactcgtgtctgttgt

SEQ ID NO: 45106 - DNA, 404 bp, Glycine max
  Clone ID: LIB3139-084-P1-N1-B5
caaatacaccatgaagtcattgacctacctaccctttttcggccaggagcacgcgtgagtgcttttaatgtataccactcatttgatggtacacagccttcaacatcaattaaaagacctgttccgatgcaaggagctgttttacaatcatcaaaaccagacatggaattttgtagaatgcttgaaggaatttgtggtgatcagtcagtgcctcaccagtgtggccatggttgctgtgctgctccagatggtagaaagtccgaaagctctttgttgggacccgaatttgttgaattttcggaacccccatctttcccaaattttgagttggctgcaatagctacagacattagtaaccttgcttggcttaaaagtggattggagagtagtagtgccaaaatgat

SEQ ID NO: 45107 - DNA, 344 bp, Glycine max
  Clone ID: LIB3139-084-P1-N1-B7
cttatctatgactcatgttcctatttttgcaagactttgttctggggaccttaacagcagcaatgatgtcaaaatgagtgtttgggagatccatgtaaatggctggaggggatctcccacagtataagacattttttcttcattgtaattgaatatgcagaagtgtaatcatccatgtttcattgactgttgtctgatgagaaccttatataaatataagatactgcatttcatatacagggatttgctataccaaaagaggcacaaggaaaagttgcaaaatttgatttccatgggcagccagcagagctcaagcatggcagtgttgtgattgctgcaatcac

SEQ ID NO: 45108 - DNA, 266 bp, Glycine max
  Clone ID: LIB3139-084-P1-N1-B8
ctgatactgtcagacttaggcgtatgacacgagagaaactgatcctttagctgacctacagaatatgtataacagcactcacaaaggtacgaccttaggggcattgatgatgggagtgcctggagcagtagctggccttaatgcagacgggatgaagcatgggcgaatggcatgggaaaccgtactgcaaccagctatagcacctgctggagagggttgtggtgctaatggtactgtgctggaggacatggctcatgctgccaaaa

SEQ ID NO: 45109 - DNA, 305 bp, Glycine max
  Clone ID: LIB3139-084-P1-N1-B9
aactttcctctctctttttctctctctctctctctccttgacgtgcttgtatcaatggctaaagcctttttgacatcagtgccgcttttcctgctcctagcagtgagtagtagtgtggttgctgaagagcttgaaactcttccaccttcttaccctcaccctcactcttccacacaagctccttttcacccaccagtaagtgcttcttaccctcaccaccaccaccaccaccacccttcatcacaagctcctgcacctgtacatacacctatttcttctacctatcataattaccctttttaccc

SEQ ID NO: 45110 - DNA, 406 bp, Glycine max
  Clone ID: LIB3139-084-P1-N1-C1
cttaggagttaggtaaatatggcatactctcaacttcaaaagctggaagctaacgtgagtatcaaggcttcagctgaacagttctatgatgttttatgccacaagacacaccaaattcccaaaattttccctgaaaaagcactgtctgttgaaattctgaaaggtgcatggggcaccgagggatctatcatctcctggaattatttatacgagggaaaagtttgtgtggctaaggaggtgattgaaggcatagacaagaaaaacaaaaaaatgagcttcaaggttatagaaggagacgtgctgggacattataagagcttcaagtttataatgcaagttactccaaaggaaaaaggcagcgtagtgcaatgtgtcgtggaatatgagaaacagaaagatcacattc

SEQ ID NO: 45111 - DNA, 398 bp, Glycine max
  Clone ID: LIB3139-084-P1-N1-C10
cggctcgagggatcggtttatccatcagtaactgcatttgagagcagctccttgaggttgacattcaatttctcaaaacaaccaggaaacccacaaacaacagttatccaggctacttttatgaatttgtcctccaattcatatacagattttgtttttcaagcagcagttcctaagtttcttcaattgcacttagatccagctagcagcaatactcttcccgcaaatgggtccataacccaaagtttgaaaattactaatagccaacatgggaagaaatctcttgtcatgcgtataaggatagcatacaagataaatggcaaggatacactggaggaaggacaagtcaataacttttcctcatggtttatgaagcccaaatgatcaggggtcattaa

SEQ ID NO: 45112 - DNA, 404 bp, Glycine max
  Clone ID: LIB3139-084-P1-N1-C11
ccgccgtatgcgctagcttgggttgctccaatggaggatacccaagaaattgaggagcaagcacacaaagaagtgatttcagacaaaacatctgagaagcagcaggaaactcttgatgaaattctttcacgacacaggaaagagatattgcaactgcagaaaaaagaagttgagatgaaaaaagctgcagctagaggtagcaaggctgagcagaaagctaagaagaagcaagtggaagaagaggtttgtcaactttctgctaagcttaaggagaatcatgccaaagaactgactgcattaggctatatcagtggtaatggaaatgaaaagagcaatttggacagtctggtgaaggccatagctggagtatctgttactagtcaacctgaacatacaaaggtcag

SEQ ID NO: 45113 - DNA, 389 bp, Glycine max
  Clone ID: LIB3139-084-P1-N1-C12
atccgaaatatttatttcccatttgacatagagatggacacagcaataagtgtggcaactgaaatggttgcagagctggacatgactgatcaggatgttaccagaatagcagatatgatagatggggaaattgttccttggtacctggatggagaccaggaccaggaattggtgggacttcccggtttggtaatcaagggttatggcacaaatggggggctaatcatacctctaaggggttttttttggaatttttttaaaccatccaaataacaagaacttggaacttctcgattggtggaaggccatgatgtgcttcaatgcatggaccggttggggagattacctttcaatctgaagagtatgacaattaatgctagaggggatct

SEQ ID NO: 45114 - DNA, 388 bp, Glycine max
  Clone ID: LIB3139-084-P1-N1-C2
cagagaactacacactggaatcgttcaccgtcgaaggcagcgacggagtgaagctccgtacaagggtgttcaagccagatgctggaacagaagcggatgggaagttggggatcgttctggtgcacccgtattctattttgggtggctgccagggtctcctcaaaggaatcgcttctggcttggctctcaatggttacaccgctgtcacctttgacatgagaggcgttggcaagtccaccggcagggcttctctcaccggcttctccgaagttaaggatgtcgttgctgtctgcaactggctttccaacactttctctcttcccaggattttgttgcttggttcttccgctggtgcacctatagcagggtctgccgttgatcagattga

SEQ ID NO: 45115 - DNA, 403 bp, Glycine max
  Clone ID: LIB3139-084-P1-N1-C3
atcatgtgcactctctcactgccatgcctctcttattctcttcacactcacacttaccagtctggacgcttctctcccccttgttcttttatcttcacacctcatagacgctctcacagtcacttcctgactccatgctcctccctcagacagagagaaagagagagcaaaaagcaactaggcaagatcaacactgccccgtctgagtctggcttgaagcgcttgtttagtcccaataacaacaagaccgaagtcgaaggtgacgccgacgccgacgccgacgctgacctcgacttccaggatggaaccgccttgaaaggcaccctcttggccggtctcttgctcctcggtgttgttggcgggttttgcctccgttggctatatctacaaggaccaagtcaat

SEQ ID NO: 45116 - DNA, 251 bp, Glycine max
  Clone ID: LIB3139-084-P1-N1-C4
ctgaaaggctgtctgcgtctgcccttgcttccttgttaaagcagcggttatgttcgtatgccgtgaatgcagtgaccgacatccaggagggggctagttttaacataagttactgcgctacagccaaagctccattgatggatggaaagagcttggacgatgatggttataatcctctcgcttagaagagggaagatgtcatacgaattcttgctaccactgtacaggtgagagttcaggatatctctggc

SEQ ID NO: 45117 - DNA, 379 bp, Glycine max
  Clone ID: LIB3139-084-P1-N1-C5
acgcgccactcccatttctctgtcggattcttcttcagatgccaaacctaacctaacctcccaaacaaactcaaccttatcatcatcatcgtcgtcgtttaaataaattctgatctccacgcacacgctctgagtcagatcatgctgcgtttgtgctacggccctctggattgctgcttccgacgccgccgtgccgacggactcctctggcacaccgacttgaagccccacgcctccggcgacttctccatcgccgtcgcccaggccaattactgtctcgaggatcagagccaagtcttcaccttcccctacgccacctacgtcggcgtctacgacggccacggcggccccgaagcttctcgattcgtcaacaagcgcc

SEQ ID NO: 45118 - DNA, 402 bp, Glycine max
  Clone ID: LIB3139-084-P1-N1-C6
attcattcattcattcactcacagttgtcgtcacgccgtaaacggaaaaaatggcaacggcgagacgcagtttcccgccgatcaccgaatgcaacggaacgacgccgtgcgattccgtcgccgccgacctcgacggcacgctcctcatctcccgcagctcattcccgtacttcatgctcgtcgccgtcgaagccggcagcctcctccgcggcctcctcctcctcctctccgttccgttcattatcttctcctacctcttcatctccgaatccctcggcatccagatcctcatcttcatctccttctccggcctcaagatccgcgacatcgaactcgtctcacgcgccgttctccctcggttttatgctgcggacgtgaggaaggagagcttcgaggtgttcg

SEQ ID NO: 45119 - DNA, 330 bp, Glycine max
  Clone ID: LIB3139-084-P1-N1-C7
ctctctcgtattgaatggctgcaaaaagctgatgtgcctaccatagcacagattgaagagttccattcgatgcagaggatgatgaatgctcctgattcaaatgataatattgatctactgttgagcattgatttgttgggtttacaaggagcaggtaaagcttttccaaacaagattgtttttgatgataagcttgtgttggctaacacacaagaattctttgatggaaattttccagtggattcttggttaccaatttttgtgaattgtctttatcctgtaagtcaattaccttcagaagctgtcgttgtaaatgttacatgtggtagt

SEQ ID NO: 45120 - DNA, 397 bp, Glycine max
  Clone ID: LIB3139-084-P1-N1-C8
tggaagaaaggctgtttaatggtcaagattgtgatgtctgggggtgcagtattcaaaaggagtgattgggcctcattggtacaagtgtttttaacaaacagcaacagtacagagcattttgatgcatgtaagtggacaaaatcagaaccacattcctgggaattgatctcccaatagaggtatgtggtcctaataatggttttgaaatgtggagttctgagtgggcaaatcaaacttcatggcatttgagtttccttattgacaatcccaaacagtctacagtttttgatattctcttgggaatctcttaagattttgaaattgctggtaatactcttatgccagttttttctgttccacaggcttcttgcctaatttttgaatatgcggaattctt

SEQ ID NO: 45121 - DNA, 392 bp, Glycine max
  Clone ID: LIB3139-084-P1-N1-D1
ccatggcaaggttggaccgtgtgaagaacatcacaggactcgtggagtggtacggtaagaacgcgaagctgagggagctggtgaaccttgtggttgttgccggagacaggaggaaggagtcgaaggacttggaagagaaggccgagatgaagaagatgtacggcctgatcgagacctacaagttgaacgggcaattcagatggatttcatctcagatgaaccgtgtgaggaacggagagctgtaccgtgtgatctgcgacaccaagggagctttcgtgcagccggctatatacgaggcttttggtttgacagtggttgaggccatgacttgtgggttgccaacattcgccacatgcaatggtggtcctgctgagatcattgtgcatggcaag

SEQ ID NO: 45122 - DNA, 375 bp, Glycine max
  Clone ID: LIB3139-084-P1-N1-D10
cttgataccaatttctttgatggatcatgccccaatttggcgcgggattgttagatatggtgtttggtcagccattaaaaatgacaacagaatggctgcgtccctccttcggttgcactttcacgattgcataggttgtgatgcttctgtgcttcttgatgataccccatatttcacggtcgaaaagaatgcttctcctaatcgcaattcacttcggtggatggaagtgattgataatataaaagaacaagttgaaaggcaatgtccatcaacagtttcttgcgctgatatcttatccttagcagttagggaagctattgatctggttggaggaccttcttgtcctgttgcattatgccgaagagatgcatcata

SEQ ID NO: 45123 - DNA, 390 bp, Glycine max
  Clone ID: LIB3139-084-P1-N1-D11
atcaatcttgatatatatttatcttttcttggaagaaggaatccaaagaatggcaatgcacaagagcagttcaggttcagcattgggtccgggaggcttggacttaactcaagccttcttcaagtcgatcatgaacgctgcagcttcttctcccaccaaacgccacaacaaaatctctgttgttggggcaggcaacgtgggaatggccatagcccaaaccatcctcactcaggatctcaccgacgagcttgtgctcgtggatgcaattcctgacaaactccgcggcgagatgcttgacctccagcacgccgctgccttcctcccccgcaccagaattcaggcctccaccgattactcggtcacgctgggctctgacctctgcattgtcac

SEQ ID NO: 45124 - DNA, 314 bp, Glycine max
  Clone ID: LIB3139-084-P1-N1-D12
ggctctcttgagaagattgctaggtacttcgaagttggatgatgcattatctccgaaagggaatactcatgctaccgaatggacccaaagttggagagggctaacatcgaccagaacacaatgggcgagtttgtcatccgtggtatcacatacactggacactacgagcctgttgagggaatgtgtgatattctcgacgccttctagaaggagaccggcgacgatattgccatccacgtagatgcagcatgtacgtggctttatagccctcttcacccactcggaagctggcaagaagtggcactctgagctac

SEQ ID NO: 45125 - DNA, 385 bp, Glycine max
  unsure at all n locations
  Clone ID: LIB3139-084-P1-N1-D2
gaaatccaggaagaagaagcctgaaaagaagaatggaaagaagggtcaaaagggaaattcatctcgagggggcagcaacaaagataagcaggttcgcaagctaggtgggacttctggtttgtgctacaagtcaatggattcttgtgataaagtgcttggagcttctactgaattagatgctcttgaagttcgaagccaggattcatactgtggaactagcttcctgaaaaaatcagttactgaagtgcactactcggttgcagaagcactatgagtgaaatactctgaatgtcttttcctatttccttgaatgtacataaataagcgatattttgctgttggcttatttggtggaaaaataaaaagaaaaagacattnggttgta

SEQ ID NO: 45126 - DNA, 388 bp, Glycine max
  Clone ID: LIB3139-084-P1-N1-D3
gggtaatggggagaagcaattctcttatgaactcacccttctcgaaaatgtatggggaaatgggggcatcaataatgccaataaccctgtgagcccaagtcctttcttaggatctggaagtggtgcttttggtgtttcaattggaaatagtggcacaggttggggtccatccatttcagctcagggtggaggggctgcttctggctatgcttctgggaataatgtttatgaaggtgcagatagcagctttggattaagtggggggaaggtgtatggaaacagcagtactggtgtggctccatcctcttcatttaatgtgtcaactggtgggtatgaaagatcctatggggacttgtaccgcagtggcagtggctccgtttacaatgac

SEQ ID NO: 45127 - DNA, 401 bp, Glycine max
  Clone ID: LIB3139-084-P1-N1-D5
ggaaacctgaagagattacgaaagaagaatatgctgctttctacaagagtcttaccaatgattgggaagagcatttggctgttaagcacttttctgttgagggtcagctggagtttaaggctgtcctctttatccccaagagggcaccttttgatctctttgacaccaggaagaagcctaacaacatcaaactgtatgtccgccgtgtcttcatcatggacaactgtgaggagttgatgcctgaatatcttagctttgttaagggtattgtggattctgaggatcttcctctcaacatttctagagaaatgctgcagcagaacaagatcctgaaagtcatcaggaagaacttggtcaagaagtgcattgagatgttctttgaaattgctgaaaacaaggaa

SEQ ID NO: 45128 - DNA, 406 bp, Glycine max
  Clone ID: LIB3139-084-P1-N1-D6
ctttgtagaggaagttggaaagagaacatgttcttaatggaggcgtgccacctgatgaaattgatgagggccaagaagaagttgaggagcaagttgaatctattgctgaaatgaagacatacgagaatgatgatctgaaagtcactgttgtaacaagtgagatcaaccctgaagacgaaagttatcctagtgagaggaaggaggcagcagtgatccctcaatctgttgtgtctgataaaaggcaaggggtacccataagtaacaagaaatctttcaagaaggttgcaaaacagaggtctcggccaaggccatcaagtaagagagataaaaagaaaggaaagaagcgaggcaagaagtaatggcagctaagcatcttgcgtcttcagaacattccaagtctacaatg

SEQ ID NO: 45129 - DNA, 386 bp, Glycine max
  Clone ID: LIB3139-084-P1-N1-D7
caaaaataagacattgtttggtttggttacttgctcgaatgggctcgaatcgcttaatttgtatttgattagttaaaccgcaacgcggaatctcttttctcgaactggctaactctcaggcaagtggttcggacgctgattccagcaacaagcggctggtgctcgcactgtatgacgccctaaactccggcgactccgacgccgtcgtcaagatcgtcgccgccgacctcgagtggtggttccatggtccgccctcacaccagtttttgatgcgcatgctcaccggcgactccgctgccgacaactccttccgcttccttccgcagtccatcgccgccttcggctccaccgtcatcgtcgagggctgcgacaccgcccgcaacatt

SEQ ID NO: 45130 - DNA, 400 bp, Glycine max
  Clone ID: LIB3139-084-P1-N1-D8
aaaaaagatgagcgacggaggaaaacgacaaggtggaagagcgttgccgccgccgccaagaggccctccgcctcctcccccctctcgccctcgcctcgaacccgtcgatcgcgaaaagacatgtccgttactgctgcgagtgttcactaagattgggagtcaccattccatggaagactttgccgtcagaggcaaagagcccaaagacgaggttcagatttacacctggaaggacgctactctccgagaactcaccgatcttgtcaaagaagttgctccggctgcaaggagaagaaacgccaaactctccttcgcctttgtattccccgacaaaaacggcccgttcaaagttcaagaggtgggcaagacattatcttaatggaaatggaagatagatgat

SEQ ID NO: 45131 - DNA, 319 bp, Glycine max
  Clone ID: LIB3139-084-P1-N1-D9
aaaaaagatgatcttttttttaaaacgacaaggtgcaagagcggggccttcacctacaataggccctccttctcctcccccctcttgccctagcctcgaacccgtcaatcgccaaaagacatttccgatactgttgctagagttcactaaaaatgggagtcaccattccatgtaatacttttccttcagaggcaaagaacccaaataccatgcttaaatttacaccttcaaagaccctacctctcctataacccacccatcttttttaaaaaacagcttccgcctcaaagagaataaacgccaaactctcctttcccct

SEQ ID NO: 45132 - DNA, 385 bp, Glycine max
  Clone ID: LIB3139-084-P1-N1-E1
acttcttctgtttctttctcagttctctgttcaatttcaagttcaagctggtgaaatcttggattagtgcttccactctcctatctggtataggacttcgtgggtagacttttctatttctctccttctttcactctcttcttctcactgatccgcattgccgttcaaagtggtcttatttgaaaaacacttgggcgttggtgcaaatgtttgcttcattaattttctctggagacaacaggctcactgagaaaacaatctttacttgcagagatttggacatcttggttgtttattatacaatagcaactcaatttagaaaatttctaccgcattacattaggaggcatctgtataccttgttgatctacattctcccatcttt

SEQ ID NO: 45133 - DNA, 397 bp, Glycine max
  Clone ID: LIB3139-084-P1-N1-E10
ggatcttctttctggctccagtcaagcaggaagtgggaattcacttaggagaagaagaaatgtccatggagtgctgaatgcactgagctgggggattttgatgcccgttggtgccataatagcaaggtatttgaaggtgttcaaatctgcagaccctgcttggttttaccttcatgttacatgccaaacctctgcctacatagttggtgttgctgggtggggaactggtctcaaactcggaagtgactcggttggtattaagtataacacccatagagcactcgggatcaccctcttctgccttggaacccttcaggtttttgctctgcttttgaggcccaacaaagaccacaaaatcagaatctactggaacatttaccactacgccgttggatac

SEQ ID NO: 45134 - DNA, 402 bp, Glycine max
  Clone ID: LIB3139-084-P1-N1-E11
cgccgagaaaaccctaattcgctcgcagtcacccaagaggcgaatccttaccattgctcgagatgggtgaagaagtgaaggccgtggttccagagtctgttttgaagaagcagaagagagaggaggaatgggcgttggccaagaagcaagacctcgaggctgcgaagaagaagagagccgagagccgcaaactcatctacaacagagctaagcagtacgctaaggagtacgatcaccaggagaaggaattgattcggttgaaacgcgaggccaagctgaaaggtggattctatgtcgatccagaggctaagctcttgtttattgttcgcattcgtggtattaatgccatggatcccaaatcaaggaagatcctgcagctgttgcgattgagacagattttca

SEQ ID NO: 45135 - DNA, 399 bp, Glycine max
  Clone ID: LIB3139-084-P1-N1-E12
cttcaatcttcttcatctacatctgtactagctataccgttccttctgccacaaattaactggaaaggatggtgctgcccaagttctctccgttctcacggcttctcctttcttcccttgtgattctcttaataagctatccagttaaatgtgacgatgatgaggaagacaatctttatcagggtatcaacaagtatcgagcatcgttaaacttgaaagctctaacaaggaatgacaatgcagattgccttgctgaaaaaatagctgaccaattcaagaaacaaccctgcacaaataccacaggtgctaacactgtacctggcacagagcctcagttttctaactatccagaccttttatctaagtgtgacttggctatttccaacacaagggatggaa

SEQ ID NO: 45136 - DNA, 399 bp, Glycine max
  Clone ID: LIB3139-084-P1-N1-E2
gtttctaagatgacttctccctacattaaatgtacagtctctttcttcatagcatttggaaatttggctgatgacaccatcaattttgaggcttttccccacaagctggtgcagtttggagagattcaggaaaaagttgtgttgaaattttcacaagaggaatttcttacagcttggtcaactcaggtgcgtcccgcaacgactctgttggctgatgggtgcccatatttgtatgctatggtgcatgatagttcagtgtctacaataccaggtgattttgtcattggtgttaagttgacaaccataaacaatatgtgtgcatatgggctcaatcctggtatttcaggttctcgtcttttgggcaccattcctcagtccatttcacagcaaactgtttgg

SEQ ID NO: 45137 - DNA, 396 bp, Glycine max
  Clone ID: LIB3139-084-P1-N1-E3
ctttcttcatagcatttggaaatttggctgatgacaccatcaattttgaggcctttccccacaagctggtgcagtttggagagattcaggaaaaagttgtattgaaattttcacaagaggaatttcttacagcttggtcaactcaggtgcgtcctgcaacaactctgttggctgatgggtgtccatatttgtatgctatggtgcatgatagttcagtgtctacaataccaggtgattttgtcattggtgttaagttgacaaccataaacaatatgtgtgcatatgggctcaatcctggtatttcaggttctcgtcttttgggcaccattcctcagtccatttcacagcaaactgtttggaatcaaatggcaacagtgagaacaccattgaattttg

SEQ ID NO: 45138 - DNA, 251 bp, Glycine max
  Clone ID: LIB3139-084-P1-N1-E4
catgcctaatttcctttattgaattaaacatgaccctcttgttgagtatgctctgcctaatttcctttattgaattaaacaaacgaacaagcgaaagaaaattaggcagagcatactcaacaagaggggcatgcctaattatcttaagggaatcaaacactcgtgcgctcggggccggcgtacattcgcgtgctcgttacctcggggcttaatacctgaccgtatcctgtgtgcgttccaagtttgcctat

SEQ ID NO: 45139 - DNA, 402 bp, Glycine max
  Clone ID: LIB3139-084-P1-N1-E5
gttctgctttgccttttacttactcaacaacaactcaattataaaagccctgcatatccctcacactttcttccctttccccctctctcttcaacccccaaaaccaaccctcatcttctgcttccttcttatcggagattagatagcaagtaatgatggatgcgctgataaaggtgttgtagttcaacgccgcaaaaccataaaaatcgtttcttttcgtcttatggcatgtctgaggaggaagaagcactgcgtccaaggccaacaacgcgtttcattttcaaattttgatcatcctcgccagtcaaatatgtacttgattcttcgcttcttctgccccttctctatactcttcttcactccaatagcttctgtgcaagcgttcaccggaacatatggtat

SEQ ID NO: 45140 - DNA, 402 bp, Glycine max
  Clone ID: LIB3139-084-P1-N1-E6
ttaaaatttctcaatctaaaattgcacttcccaagaacacagttggaggaaccattctgcgtagtgatctattggcaaattttttgacagagggcaattttagagcaagtgttgatttgcagcgcactcatcgtattaaaggaatgattaaaatggtggccacagttggtattcctgagaatacaggtatagcattggcctgtgctatgaatagttcttttagggggcgcgccagttctgatatttacaccatctgctctcaagactgtgaattatggaatcctgcttgcacaaaagcaatgactatgtcatttaatccaaacccgtgttctgatgcatggagtttggaatttctgaagcgtaccggatttcattgtgatatcatttgtgtcactggatgga

SEQ ID NO: 45141 - DNA, 360 bp, Glycine max
  Clone ID: LIB3139-084-P1-N1-E8
aacgatattctgttttttgattatgctagttttgatggggggggtaccaagcaagttatgagcaagatgtcataaatgataaacagtctttgtggtggtgatgaaaaattgatgcgtgaaaggacacatttgctgttggcttgttgttcaaggatggcaatttgtaagaaagatgtttggagagttgaatgtggaatcccttctggatttccgctcacagttattctcactaacatttttaatgagaagcttattagatatagctattgaaaaattactgtgccaggctagagcttcaagtatgtttttacaatccttcaaaaattttgtttctttgtgtgtgtatggtgatgataactt

SEQ ID NO: 45142 - DNA, 365 bp, Glycine max
  Clone ID: LIB3139-084-P1-N1-E9
ctaagaaaacctagtgagagtaagcacacattgatcagcaacaatggcagcctactcaagccatgctttgaaaaccatccctttttcttcctttgtgaagcctgtcagtaccaaaccaacatcattcttcacaccttcacctaccaaacctttcttacccttcaccttaccaaaccactctctcaccaaaaatctcaagctgaactccactttgccacacttttgcttgtcttcagttcccaagaaatctttcacttgtagaagccaggctgagcctgttgactcagaaaaagtccaagaactgagtgtgtatgagatcaacgagcgtgaccgtggaagccccgtttatcttcgattgagctata

SEQ ID NO: 45143 - DNA, 398 bp, Glycine max
  unsure at all n locations
  Clone ID: LIB3139-084-P1-N1-F1
ctttacatctactccgtattcgtttcccgcaacgctgcgttgtgtagcccagatcagattcggaaaatggaggaatcaatccaaatccgctgggaatttaaacctgtggagttaattaagtgggtgaaggctttagaagcggagttttcgagtgaaactgaggcagttaagttgccctggcatttgaaacagaacataattgatgagatcttgcagagactaaggagcttgaattccagtagaacagatattgctatggaacgagaagtagttgagagttggcgcaaagaaaaactggaagaggtcaagtcagctcttgtgaaagngactttcaattcaaccatcccccatgaagaagctgtatgctagtaagagctttgaatctgattggctgtgct

SEQ ID NO: 45144 - DNA, 399 bp, Glycine max
  Clone ID: LIB3139-084-P1-N1-F10
ttgacaaccataaacaatatgtgtgcatatgggctcaatcctggtatttcaggttctcgtcttttgggcaccattcctcagtccatttcacagcaaactgtttggaatcaaatggcaacagtgagaacaccattgaattttgattctagcaagcagagcttttgtcaattttctattgaccttctcggtggaggaattttagtggacaaaactggagattggatcacacttatacaaaattctccaattagtaacttgttgagagttgctgcttggaagaaaggctgtttaatggtcaagattgtgatgtctgggaatgcagcagtcaaaaggagtgattgggcctcattggtacaagtgtttttaacaaacagcaacagtacagagcattttgatgca

SEQ ID NO: 45145 - DNA, 332 bp, Glycine max
  Clone ID: LIB3139-084-P1-N1-F11
ctttcgtttcgttcactgccgtttccctctctctcacactcacactcacactcctcccaaaaacccaaaaccctaactctctttcgcacactttctcacgctcgctgcagccatgaattgctccatctccggcgaagttccggaagagcccgtcgtgtctcggaactccggtctcctcttcgagaagcgtttgattgagcgacacatttcggattatgggaagtgtccaattactggagaaccacttactatggacgacattgtaccaatcaagacaggcaagatagtgaaacccagacctggtcaggcagctagcatccctggcatgcttg

SEQ ID NO: 45146 - DNA, 399 bp, Glycine max
  Clone ID: LIB3139-084-P1-N1-F12
acaatttgttagtggaaaaaccttcaaatatgatataattggtgctggttcacattcttcaggagattttcctgaaaaggaagatcaagaaaaacccaaaaagattgataccagattgagacaaagaatagatcctcaatacaatgaggttcaggctcagatggaaacaaatttgtttaaattgtctcttgatgatgttgaaactcctaaaggttctatgttggatcttaaaatttctcaatctaaaattgcacttcccaagaacacagttggaggaaccattctgcgtagtgatctattggcaaattttttgacagagggcaattttagagcaagtgttgatttgcagcgcactcatcgtattaaaggaatgattaaaatggtggccacagttggtat

SEQ ID NO: 45147 - DNA, 407 bp, Glycine max
  Clone ID: LIB3139-084-P1-N1-F2
aaactggtgcaaatcaaaaaagaaggcctttaccaaatattcaaaaaaatatgaaaccgaggagggaaagaaagatattgaatctcagctcgagaaattgaagaagtatgcaactgtcattcgtgttctggctcatactcagataaggaagttgaagggtctgaaacagaagaaagcacatttgatggagatccaagttaatggtgggacagtagaccagaaggtggactatgcatacagcttcttcgagaagcaaatcccagtggatgctgttttccaaaaagatgagatgatagatatcattggtgtgactaagggtaaaggttatgaaagtgttgtaactcgttggggtgtcactcgccttcctcgcaagactcacagaggtctaaagaagggtgcttgcattg

SEQ ID NO: 45148 - DNA, 402 bp, Glycine max
  Clone ID: LIB3139-084-P1-N1-F3
caagctttcagctgtttgcaatcaatggctggtgaatctgatgtaccggaaaacaccctctcttgtgctaattgtggcaaacctgcgaagcttcagtgtccaaaatgtatggaattgaagcttcctcgagaaggtgctgccttctgctctcaggattgtttcaagtcttcatggaactctcacaaatcagtgcatctgaaggcaaaactatcctcacctggcacacaaaattcagactcacttggtgatggttggttatattggttgaagagagggcaggctcgaacaccaaagcttcctcactttgattggactggaccactgcaaccatatcccatttctagtaaacggatagtcccagatcaaattgataaacctgattgggctgatgatggaaccccc

SEQ ID NO: 45149 - DNA, 405 bp, Glycine max
  Clone ID: LIB3139-084-P1-N1-F4
gacaccctgacaagctctgcgaccaaatctccgatgctgtcctcgacgcttgcctcgagcaggacccagacagcaaagttgcctgcgaaacatgcaccaaaaccaacttggtcatggtcttcggagaaatcacgaccaaggccaacgttgactacgagaagatagtgcgtgacacctgcaggaacatcggcttcgtctcaaatgatgtgggactggatgccgacaactgcaaggtcctcgtcaacattgagcagcagagccctgatattgctcagggtgtacacggccaccttaccaaaaaacctgaagaaattggtgctggtgaccagggtcacatgtttggctatgccactgatgaaacccctgaattgatgccattgagccatgttcttgcaacaaaactcg

SEQ ID NO: 45150 - DNA, 399 bp, Glycine max
  Clone ID: LIB3139-084-P1-N1-F5
cgcaccacaagattatattttatagggagaatagtgaagcagcgcgggttaggtttgtcaaaagtctttaaattttgtgaggctcattatcatgaaaagggacaagcttagttgtcaagttggaatcaacccatactccatgcaatggactgtattggccaatagattactgagtatgggcaatgatattctgtgttgcgattatgctagacttgatggcttgattaccaagcaagttatgagcattatggcagaaatgataaacagtctttgtggtggtcacgaacaattgatgcgtgaaacgacacacctgctgctggcttgctgttcaaggatggcaatttgtaagaaagatgttcggagagttgaatgcggaatcccttctggattgccgctcac

SEQ ID NO: 45151 - DNA, 402 bp, Glycine max
  Clone ID: LIB3139-084-P1-N1-F6
acacaattcaacttaagagatcaatatggccaccattaccaagcctgcttctaatatatgtttcctccttctgttgcttctagcacacttccatttgggccaaagccaagttgagttgaattactactctaaaagctgcccaaaagctgaagagataatcaaggaacaagtcacacaactatacaacaagcatggaaacactgccgtttcgtgggtcagaaatctcttccacgattgcgtggttaagtcatgcgatgcatcactactgttagcgacggtgagcgatgtagtgtcggagcaggcgtcggatagaagttttgggatgagaaacttcaagtacgtaaacaccatcaaagcagcggttgagaaagaatgccccttgacggtttcatgcgctgacat

SEQ ID NO: 45152 - DNA, 383 bp, Glycine max
  Clone ID: LIB3139-084-P1-N1-F7
tgagtttggaaatgatttggaccggactcatgcagttgaaccagccaagtctgcatttgcaacaaaggccaaagttcgccgagctattgaggctgaaggaattcccttcacttatgtgtcaagcaacttctttgctggttacttcctgcccaacttgtcacatcctggagccacagctgcccccagagacagagttattatcctaggagatggaaaccccaaagctgtttttaacaaggaagaggatattggaacttatacaatcaattctgtggatgatccaagaaccttgaacaaaattctctacattagaccaccagctaataccttgtcgtttaatgagcttgttactctctgggagggaaagattggtaaaactcttg

SEQ ID NO: 45153 - DNA, 366 bp, Glycine max
  Clone ID: LIB3139-084-P1-N1-G1
cgcagggttccggcaacggtggatcgggtgtatacaaggccatgcactcgccctaacctgattccggcccttacgagagggacataacatcgtctcatgcgcatgcagttacaaacaatggtgtgaaaatggaggaaactccagcttttgatctgaagagaaagaaagaaagttgcgatggaagtgctaccaagcacagaaggttctcttcctcggtggagaataataataataacaccgagaaacagtctcagtctggtttgaatggaattgacgatgaagatgagaaaaggaaggcgaggttgatgaggaacaaggaaagtgcacagctttctaggcagaggaagaagcattacgtggaggagc

SEQ ID NO: 45154 - DNA, 396 bp, Glycine max
  Clone ID: LIB3139-084-P1-N1-G10
caagtttcgtttccaggtttcggcgcaatcggcttctgcttcaaggaaggagagcttgttattctctatcaacaagtaaaatgtcaggtgaagagggtgtcattgcagttgagccagctgctgctgctgctgccatcccaggcgagccaatggatatcatgactgccttacaacttgtgctcagaaaatctctggcttatggtggtttgtcgcgtggccttcatgaaggtgcaaaagtgattgagaagcatgctgcacaactctgtgttcttgcagaagactgtgaccagcctgactatgttaaactggttaaggccctttgtgcagagcacaatgttagcctgctgacagttccgagtgcaaagacccttggagaatgggctggtttgtgcaaga

SEQ ID NO: 45155 - DNA, 395 bp, Glycine max
  Clone ID: LIB3139-084-P1-N1-G11
atttgctgtgttttttatattgacaggtactattactttagctcagcttttcgtctacattgctgaactaaacactgaaatcagacaaaaggaacttgtcaagtgggtacttacaaggaaagtgaccaatttagatttggaggctgcagatcttgatgaggatgggactgttgggtttgttgagcattctttcaaagtcatatatattgttatactaccaatgataaacatggctttattcatttttatctcttttcttttgtttctcatagggctgcggaattcgttatttataagctcaaagagatggggaagattagtcaagaagatatatcacttgtgatgcacgagtttgaacagcttgatgttgatgattctggcacactatcaacttc

SEQ ID NO: 45156 - DNA, 396 bp, Glycine max
  Clone ID: LIB3139-084-P1-N1-G12
ctttcttttcattacttacgcaaaacccattttactccctctggcacaaaagaacaatatctctattttccaaactacacacatcatttagaaccatgtctttctctaccaaattgcctttggtcctattattttcatcccttttcatccatgcatctttggctgagatggtgtgtgaggacctgccaaaggaagtgtgtgctttctcagtagcttcatcagggaagaggtgtttgttggagactgagaaggcagccgacggtggcgtcgagtaccaatgccggacatcggaagtggtggtggagaggatggcagactacatagagacagaccaatgtgtggaggcatgtggggttgataggaactctgttgggatttcatctgatgccttctttg

SEQ ID NO: 45157 - DNA, 396 bp, Glycine max
  Clone ID: LIB3139-084-P1-N1-G2
gcttccaactttgcgggattcgtatttgttgtttcagtgctgtgatggggaaggtcgcggtgggagctgcggttgtctgcgccgccgccgtctgcgctacggcggcactggtggtgcgccaccgcatgattagttcccggaagtggagtcgcgccatggcgatactgaaggagtttgaggacaagtgtgggaccccaattgtgaagcttagacaagtggctgatgccatggatgttgagatgcacgcaggtctcgcatctgaaggtggtagcaagctcaatatgttgatcagttttgtcgataatctcccaactggggatgaggaaggactctattatgcactggatcttggaggcacaaacttccgtgtccttcgtgtacatttaggcgggaaag

SEQ ID NO: 45158 - DNA, 353 bp, Glycine max
  Clone ID: LIB3139-084-P1-N1-G4
ttgattaccaagcaagttttgagcaagatggcagaaatgatagacgggctttgtggtggtgatgaaaaattgatgcgtgaaaggacgcacctgctgttggcttgttgttcaaggatggcaatttgtaagaaagatgtttggagagttgaatgtggaatcccttctggatttccgctcacagttatttgcaatagcatttttaatgagatgctcattagatatagctatgaaaaattactgcgccaggctaaagctccaagtatgtttttacaatccttcaaaaattttgtttctttgtgtgtgtatggtgatgataacttaaatagtgttcatgaatatgtcaagccttactt

SEQ ID NO: 45159 - DNA, 402 bp, Glycine max
  Clone ID: LIB3139-084-P1-N1-G5
ctcgagccggttacactccaactccattgttggaatctggtttgcaaaaagacagagggttaattgtggagtattttggaaggatgtcttacgttgctcataacgctaatcagccccaagagaaagatttattggagggaaatttttcctttgatattaaatctcgctctagattggaaaaggtttcctctacaaaagcacaatttgttagtggaaaaaccttcaaatatgatataattggtgctggttcacattcttcagaagattttcctgaaaaggaagatcaggaaaaacccaaaaagattgatgccagattgagacaaagaatagatcctcaatacaatgaggttcaggctcagatggaaacaaatttgtttaaattgtctcttgatgatgttgaaa

SEQ ID NO: 45160 - DNA, 129 bp, Glycine max
  Clone ID: LIB3139-084-P1-N1-G6
cgcttgttcgtttgtttaattcaataaaggaaattaggcatgaccctcttgttgagtatgctctgcctatttgaaaatttccacacctcttttaattgtcgtaatgatgtgtgaagtgtgtgttatttt

SEQ ID NO: 45161 - DNA, 283 bp, Glycine max
  Clone ID: LIB3139-084-P1-N1-G7
agaacatagcttttaagatacctaaggggaacaacaacattaatgtcagcatcatcatcagctgccactagagcttatgattgggtttccaattggggtgaggacaagttcccctacatggcaaatgcatctgtggctttgtccttggttgcttttgtggcctttgccttagcctctcttgtctctgggtctattggtggaagggtcacataatttatacaagtactatgtgtgaggtgtgcaaactctttatctgagatactgggttaagctttatcctttc

SEQ ID NO: 45162 - DNA, 398 bp, Glycine max
  Clone ID: LIB3139-084-P1-N1-G8
catacatagcgcttattattcctaagatactcatcataccgagcctgatttttcagatcattttacacttgatcgcaccatcagaggcgcaaggcccattcgactggttacatttcctaataccatcgtgcagattgaaccacacatgaattcaaggtttcagcttttgagtaccactaccaatggtgattatgttcaaggaaaagatctcgcattgtttaaagtctatgtatcatgtgctcctgctgtcttgacatcaacttacactacaactacattgttgtaatctggtttgcaaaaagacatatggataattgtacaaaatttctgtaaggatgacttacgttgctcattacgttaatcacccccaaaaaaaagatttgttctagggaaatttt

SEQ ID NO: 45163 - DNA, 287 bp, Glycine max
  Clone ID: LIB3139-084-P1-N1-G9
catatagattgattcttgattgagacaattaatatatcttacatacaatcaggacaaagctcagacggggacaaattcaacttaaatcgactgttgatgatttctgaaactactaaagggtctatgttgtatcttaaaacgcttcaaattaaaaaagaactcatgaacatcacatactaccggaaccatttttcactctgagatattggcaaatgaaatacccaaggtgactagcttagcaagctttgatatgcaggacactgctcatgttgctggcatgattaatg

SEQ ID NO: 45164 - DNA, 389 bp, Glycine max
  Clone ID: LIB3139-084-P1-N1-H1
taaaactagagaaaaatttcatttggctgtttcaaacttgacagcaaaggaaccgtcagtggctgctgcataggccacaatttttggtaatcaagtcatttcatcaggtctttcagaacatgtgtttgaaactatttggtctttcagagcatgcgctgctttctttctgcccttcaacagttagatgcatgtggcaagtgcggtgattcaatttaatcctattttttgtattcttttgtcactctgttgttttagttgttgcttctatatcatttagcacgagtgattttggcttttttcccttttgtgaaaaggaaattataggtgtgatgctactgcatttcttctgtcaaagttcaaaaaaaatgtgcgtgtataacttgacatat

SEQ ID NO: 45165 - DNA, 394 bp, Glycine max
  Clone ID: LIB3139-084-P1-N1-H10
gtgagaacaccattgaattttgattctagcaagcagagcttttgtcaattttctattgaccttctcggtggaggaattttagtggacaaaactggagattggatcacacttatacaaaattctccaattagtaacttgttgagagttgctgcttggaagaaaggttgtttaatggtcaagattgtgatgtctgggaatgcagcagtcaaaaggagtgattgggcctcattggtacaagtgtttttaacaaacagcaacagtacagagcattttgatgcatgtaagtggacaaaatcagaaccacattcctgggaattaatcttcccaatagaggtatgtggtcctaataatggttttgaaatgtggagttctgagtgggcaaatcaaacttcat

SEQ ID NO: 45166 - DNA, 308 bp, Glycine max
  Clone ID: LIB3139-084-P1-N1-H11
ctccaacgatgccgtttcaacagacttcgagcagcgttcctgtggtcttcggccccaccgaaaccgcctccatccgcgccctcctcccccgtgacctcgaccaacgcgccacaacgttcgaggtgctgacgtcatacgtctggcgctgccgcacgaaagcgcttcaaatccctccaaatgaagatgtgagaatgatgtgcatcgtcgacgcgcgtggaaagttcgatcctcccttcccggcggggttctacggcagctgcttcgcgttttcggcggcggtgacgggcgccggagatctttgcgagaaa

SEQ ID NO: 45167 - DNA, 401 bp, Glycine max
  unsure at all n locations
  Clone ID: LIB3139-084-P1-N1-H2
gctattctggccgttcgaattcgcttcttctttctgttatttttttccccttctcctcatctcctcaccatatataaagcaaaaccttggacttgtcatatactatcgtgtacgcttcctattcctttcgttgtgaaatatcgtttctctctcaaaggtaacaatgtcggaagctaagacccaaattgaatccataaggaagtgggtcgtcgagcacaagctccgtactgttgggtgtctatggctcagtggtattacgggttcgatcgcttacaattggtctcgacccaacatgaaaactagtgttaagatcattcacgctaggttgcatgcacaggctcttacactgngagcattagccggagctgcactagtagaatattatgatcgtaagacaggag

SEQ ID NO: 45168 - DNA, 386 bp, Glycine max
  Clone ID: LIB3139-084-P1-N1-H3
cagattttgttacagtttttcaaattattctgtggcaaggagagaagaaaagatcatagaaagtggtgattcttcgaatattgaagagagaaatatggggttgagattgaaggagacattctacttgtcccatggagcaccaactcttgccgtagatgattcaatccctgcgtggaacttcttcaattcgtggaaggagcagtttccgacgagaccctcttccattcttattatctccgcccactgggacacccatgttcccaccgtcaacgtcgttcaccagaatgataccatctacgacttctatggcttccccaaatccatgtacaagctgaagtatccagcaccaggggctccacacttagcaaagagggtgaaggagctac

SEQ ID NO: 45169 - DNA, 395 bp, Glycine max
  unsure at all n locations
  Clone ID: LIB3139-084-P1-N1-H4
aaattaacaagtagcaaagttgtttggaatcatcggaggaaacaagggtcacatgataaaggggaacttggtgattatgcgaaagaatgtgttggatatcaacagcattaccagtgttaagggtgtcatcggaaccggcattaacatcattggaggagtcgtcgacaccgttactgctttggcgtcccacatctccatccagctcattagtgccaccaaggctgatggacatgggaaaggaaaagttggaaaggctacaaatttaagaggacaagtgtcgttaccaaccttgggagctggcgaagatgcatacgatgttcattttgaatgggacagtgacttcggaattcccggtgcattttacattaagaacttcatgcangttgagttctatc

SEQ ID NO: 45170 - DNA, 392 bp, Glycine max
  Clone ID: LIB3139-084-P1-N1-H5
cttgatttgatttgcagggcgcatcaggttgtagaagacggatatgaattctttgctaacagacaacttgtaactatcttctcggcacctaattactgtggagagtttgacaatgctggtgctatgatgactgttgatgagacacttgtgtgctcttttcaaatattgaagccagtagaaaataaaaagcctagtaagtttggctttgggagcacaactacagttaagcagagtacaacaaaagccaagttccagcaatcattttttggtgctaaagcatgacctgatgagcgcgagtacaattagtaaatgtttggtgcatagccaaagttgacttggaagaagtgttatcagtgttcgcttcaatgtgaaggaacaatacaattatcgat

SEQ ID NO: 45171 - DNA, 390 bp, Glycine max
  Clone ID: LIB3139-084-P1-N1-H6
ttccatagtttcttagctaacaaaaatttacacaaactagtgtccctgcgacagcactttcttccttaataactccaaaaactttggtacctttcaatcaaccaccgaaaagttagggactttaatttttttaatttttttttttatatgaagatgtgtgattgatcgattccctagtgaaggggtaaggggggtcatgtctttcggtgggttaagtattgctttgagtcttgtctttgggtgtcttctgctggctctgtgtgctcagctttactatttcttatggtggaagaagagaaggacacagatggatattgagatggatgcaaagggtgcggtttattgggggtgctggaagaccccttgtgccatgcatgttgcaaacaacac

SEQ ID NO: 45172 - DNA, 401 bp, Glycine max
  Clone ID: LIB3139-084-P1-N1-H7
cgtcgtgccccggaaaaccgtctccctgcagcgattgatgacggcttctttgcactcctctggctagattccgtagccagaagaaatgcagaggagccgtggctcaaaaaacatggcaattttggccgtgtttttcttataggagatagctcaggtggaaatattgtgcatgaagttgctgtccgtgccggggaggctaagttggacctgctccatctcgccggaggaatcccgatacatccggggttcatgcggtcgaaacggagtaggtcagagttggagaaaccacaatctccattcttgacgttggacatggtggacaagttcatgagcttggcattgccattgggttctaacaaggaccaccccattgcatgccccaatggaggcggcgctccgcc

SEQ ID NO: 45173 - DNA, 242 bp, Glycine max
  Clone ID: LIB3139-084-P1-N1-H9
cgacgacatcaccagaatcctgaaaaaggcaaaaatgttctcagtcctaatccgcctcctcaaaaccacagaaatcatgaacaacatcaactcacagctcataacagccaagagtggcggcataaccatccttgcaccagatgattctgccttttccaacctcaaagcaggcttcctcaactccctaaacgaaggccagaaaatcgaattagtgcagttccacatattggccagagttgagc

SEQ ID NO: 45174 - DNA, 279 bp, Glycine max
  Clone ID: LIB3139-085-P1-N1-A1
gaaagattttatccaattgaaattttaaaaatgactgggataaacttaagaattcaattattgaaattgaataagtaaacaatttaattggattggtcgaatggtatcaaaaaaatggagtactaactcccatttcttatttattattgaattaaccgatcaacttgctttgttatcgaacatttctttttgatttcaaaaattttccggaaaaaatttgaatctatttttatatgcgaatcaaacctactacttctggtccctgaggttctgcgcttg

SEQ ID NO: 45175 - DNA, 394 bp, Glycine max
  Clone ID: LIB3139-085-P1-N1-A10
aaaaagttgtttccgatcacaacctcaatcgtattaagctgttgttgttcctcgtcgtcaatttcgaatattgaaaggttttagttgttgatttggatcaagtctctagtcaacctttgaaattcttattccagttttcaaatatatagagccatgagttttgtttttcgaggaacaagagcagatattgaaaatgggtttccagggtttatacctgagaggcgagcattgcgcgttcatgcaacacgtcctagtaattccaattcactcacttttctcgtgacagttcttctgttattcatgatactgaactctcaccagatgtccccaaactttctgctctggctggtgcttggtgttttcttgatggcaacaatgttgaggatgtatgcaa

SEQ ID NO: 45176 - DNA, 362 bp, Glycine max
  Clone ID: LIB3139-085-P1-N1-A11
ccggctctttcagttaatggcagatcgagtcacgaacatggtcgaagttcacctcgagaggcttcagattagcgacgttggattgcaagcgatcgcgaatttttcgagtttggagattttgcatctcgttaagactcctgaatgttctgatattggacttgttgctattgcagacaggtgcaagcttttgcggaagcttcacattgatggatggaaggcaaatcgaattggcgacgaagggttgatagctgttgcaaaaggttgccctaatttgcttgaattagtgctaattggggtaaaccctactaaagcgagtttggaaatgttggcatctaattgccggaatcttgagcggttggctt

SEQ ID NO: 45177 - DNA, 395 bp, Glycine max
  Clone ID: LIB3139-085-P1-N1-A12
taaatttgtactctttccaatttaagaggaaagataacattaccaaccttgggagctggcgaacaagcatacgatgttaattttgaatgggacagtgacttcggaattcccggtgcattttatattaagaacttcatgcaaaatgagttctacctcaagtctctaattctcgaagacattccaaaccacggaaccattcacttcgtatgcaactcctgggtttacaattcaaaaaactacaagactgatcgcattttctttgccaacaatacatatcttccaagcgagacaccagctccacttttgaagtacagagaagaagaattgaagaatgtaagaggggatggaactggagagcgcaaggaatgggataggatctatgattatgatgtcta

SEQ ID NO: 45178 - DNA, 411 bp, Glycine max
  Clone ID: LIB3139-085-P1-N1-A2
ggaatactacactatacttgtcaaccctttgagagttagaatggctgctgctattgaaatccccacaatagtgtttccaaactcctctgcccaacagaggatgccagtggttggaatgggatctgcccctgacttcacatgcaagaaagacacaaaggaggctatcattgaggccgtgaaacagggttacagacacttcgacactgctgctgcttatggctctgaacaggctctcggtgaagctctcaaggaagctatccatcttggcctcgtctcccgccaagacctctttgtcacttccaagctttgggtcaccgaaaatcatcctcatcttgtccttcctgctttgcgcaaatcacttaaaactcttcaactagagtacttggacctgtatctcatccactggcccct

SEQ ID NO: 45179 - DNA, 314 bp, Glycine max
  Clone ID: LIB3139-085-P1-N1-A4
ctcttgggaatctctcaagattttgaaattgctggtaatactctgatgccagctttttctgttccacaggctactgccagatcttctgaaaatgcggaatcctctgcatgatctggaatttatgttttctttcgcttgttcgttcgtttaattcaataaaggaaattgggcatgaccctcttgttgagtatgctctgcctatttgaaaatttccacacctcttttaattgtcgtaatgatgtgtgaagtgtgcgttattttaaagaaaaaagaagatatcaagaagatggttcaagaggctgaaaagttcaaat

SEQ ID NO: 45180 - DNA, 370 bp, Glycine max
  Clone ID: LIB3139-085-P1-N1-A5
accaaatatctcaacaaaatagcgaaggttgatgtggaagcaaggacaatgactgtggagagtggtgtgacaatgaagcagcttataaatgaggctgcaaaggtagggttggccttgccatatgcaccatattggtggggtttgaccattggagggcttatgggaactggtgctcatggaagcactttgtgggggaagggtagttatgatcatgattatgatgcggagcttaagattgatagggctagtctggcttgccaaatgtgtgctctaactgacattaattgatgtacagcataatgaccgttttgctgtcaaaaaaccagttgtgccagttggattaattaaacaggcaactctcgggctgagg

SEQ ID NO: 45181 - DNA, 395 bp, Glycine max
  Clone ID: LIB3139-085-P1-N1-A6
cgagtctgcagggaacatcgcttctagccggccacaaactccaccaaatccttctacattggttcaacagcctgctacttacaaccctattagaaatgctcccatgcctaaaactgaaatgaatgcttacagagctgcaactgcaggcaaccctcaactagttcaagttcctacaagccaacatcagcagcaatatgtcacctactcacagattcaccatccttctcagtccatggctcccaattctgctgcccctgcgaattatgcttttgattatgcggatcctgctcatgctcaaatatactactctcaacctatggcacccacaattccttcacagtaccagactatgactgctgctgctgtgatgatgcaggaaggttcagctcagcatc

SEQ ID NO: 45182 - DNA, 410 bp, Glycine max
  Clone ID: LIB3139-085-P1-N1-A7
ctcgagccgattcggctcgagcacacttcaatttatcagcatggcctccgttcagtgccacaaaacctgcaaagtgagctgccaacaggaaaaccagcacgcctcgtttgggcagaaagtttctgacttgttcaaagggcatcaacataatgaccacagctccaattatgccacccaaaccaaagtgctttcccagtcagggtcagggttaggccccttcaccaccaaaactcaaacacaatgcggttgcccccaaacacatctcagtaccactcatggctccaacacaaaaggccatggccatggccaagggagaattaagagggagcacaagagagggatgctgcagaacatcaaggatcgcttatcaggtgacaccagcagcgacagcagcgacagcgagagcgaca

SEQ ID NO: 45183 - DNA, 406 bp, Glycine max
  Clone ID: LIB3139-085-P1-N1-A8
atccagacgggagttcacacttacgctcattgcaagacgatcacgtcattatgctggcactaggtatttgaggcgtggtgttaatgagaaaggaagagtagcaaatgatgttgagacagaacaaatagtctttgaggatgttgctgaaggtcttcccatccaaataagctctatcatccagaaccgtggttcaatccctcttttctggtcacaggaaacttcaaaactaaatattaaaccagatattatattgtcaaaaaaggatcagaattatcaagccactagacttcactttgaaaaccttgtcaaaagatatgggaatcccataattattttgaatttaataaagacccatgagaagaagcctcgcgagtccatacttcgtcaagagtttgctaatgccata

SEQ ID NO: 45184 - DNA, 366 bp, Glycine max
  Clone ID: LIB3139-085-P1-N1-B10
ttgctgctttacgtatccaataccacacaactctgttcaggtgcaaccgcagcctccatgtcagccctcccacgggcatgcttaattatacaaaatgccccgactacgatctctactacaagcacatcatcacggctgatgatgtgtctcggagttctttggtggcatgtacagaggtccagcttccaattaaagacgtgcctgacgctataaacccatttacctttgtaactgcagatatcatcattcgagtagacttaactgatgaatgtgcagattgcaactatcgccatggagggcagtgcaaacttgacagcacagagaaattttgttgtgccaatgcagttataaagaaaggggtggggt

SEQ ID NO: 45185 - DNA, 368 bp, Glycine max
  Clone ID: LIB3139-085-P1-N1-B11
tgaaaatttctcaatctaaaattgcacttcccaagaacacagttggaggaaccattctgcgtagtgatctattggcaaattttttgacagagggcaattttagagcaagtgttgatttgcagcgcactcatcgtattagaggaatgattaaaatggtggccacagttggtattcctgagaatacaggtatatcattggcctgtgctatgaatagttcttttagggggcgcgccagttctgatatttacaccatctgctctcaagactgtgaactgtggaatcctgcttgcacaaaagcaatgactatgtcatttaatccaaacccgtgttctgatgcatggagtttggaatttctgaagcgtactgga

SEQ ID NO: 45186 - DNA, 394 bp, Glycine max
  unsure at all n locations
  Clone ID: LIB3139-085-P1-N1-B12
cgctccgaccagtttcaccgcacgaatatcttgttgtttgngagcgatccgagaaaaactctgtaaacatgttggtttaccaggacctccttacaggtgatgagcttctctctgactccttccgttacaaggaaattgagaatggaatgctgtgggaagttgaggggaagtgggttgttaaaggagcagttgatgtagacattggtgcaaacccttctgctgagggtggaggagaagatgagggagttgatgatgcagctgttaaggttgttgacattgttgacacattcagacttcaggagcaacccgcattcgataagaagcagtttgttaccttcatgaagaggtttatcaagaatttgactcccaagctcgatgcagagcaacaggagtt

SEQ ID NO: 45187 - DNA, 406 bp, Glycine max
  Clone ID: LIB3139-085-P1-N1-B3
ctttttctctctttctctctgcttgcggtgcttcacaagccaaatctaacttgtctctgttttctccgatctagtactactatcaatggccggaaaaggagatggtcctgctatcggaatcgatctcggcaccacctactcctgcgtcggagtgtggcagcacgaccgtgtcgaaatcatcgccaatgaccagggtaacagaaccacgccgtcttacgtcgctttcactgattccgagcgtttgatcggtgacgccgccaagaaccaggtcgccatgaaccccgtcaacaccgtcttcgatgctaagcgtttgattggaaggagattttctgatgcctccgttcagagtgacatgaagctatggccatttaaggtcatccctggtcctgctgacaaacctatgatt

SEQ ID NO: 45188 - DNA, 233 bp, Glycine max
  unsure at all n locations
  Clone ID: LIB3139-085-P1-N1-B4
ctttttctctctttctttctttttgcggngcttcacaagccagggctagacttgtctcttttttctacaatctaccactactatcaatggccgtacaaggagacgggcctactatcggtattaatctccataccacctactcctgcattggattgtagcaccacgaccgcatctacataatctccaattaccattgaagccgtaccacaccctattaacccattttcacttat

SEQ ID NO: 45189 - DNA, 320 bp, Glycine max
  Clone ID: LIB3139-085-P1-N1-B6
gctcgccaactgagaaggaaagctctctctcgtattgaatggctgcaaaaagctgatgtgcctaccatagcacagattgaagagttccattcgatgcagaggatgatgaatgctcctgattcaaatgataatattgatctactgttgagcattgatttgttgggtttacaaggagcaggtaaagcttttccaaacaagattgcttttgatgacaagcttgtgttggctaacacacaagaattctttgatggaaattttccagtggattcttggttaccaatttttgtgaattgtctttatcctgtaagtcaattaccttc

SEQ ID NO: 45190 - DNA, 405 bp, Glycine max
  Clone ID: LIB3139-085-P1-N1-B7
caccagccgaaagccaagaaaaagctttcgatccctgtaactgcgttcgactatttagggttttttcggagacaatggcggatgaatcggagcacacggcggcgccggctgccggcgaatcgctgctcgacaagatcgccgagaagattcacggccacgacgactcttcctcttcctccgattccgattcggataaaaaggaatcttcgtcgattaagggagaggttttccgcctctttggaagggagaagccagttcactccgtcctcggcggcggaaaacctgctgatgttctcttgtggaggaacaagaagatatctgctggtgtacttggtgtagccacggcctattggatcttttttgagttgcttgaatatcacctgcttactctagtctgtcacattt

SEQ ID NO: 45191 - DNA, 389 bp, Glycine max
  unsure at all n locations
  Clone ID: LIB3139-085-P1-N1-B8
tataattggtgctggttcacattcttcaggagattttcctgaaaaggaagatcaagaaaaacccaaaaagattgataccagattgagacaaagaatagatcctcaatacaatgaggttcaggctcagatggaaacaaatttgtttaaattgtctcttgatgatgttgaaactcctaaaggttctatgttggatcttaaaatttctcaatctaaaattgcacttcccaagaacacagttggaggaaccattctgcgtagtgatctattggcaaattttttgacagagggcaattttagagcaagtgttgatttgcagcgcactcatcgtattaaaggaatgattaaaatggtggccacagttggtattcctgagaatacangtatagcat

SEQ ID NO: 45192 - DNA, 388 bp, Glycine max
  Clone ID: LIB3139-085-P1-N1-B9
gttgtagtatagttagagatatcactactacaccaccctgcatagtttgttcagctataatactacttgagcttctttacctacttttcaaacctacattgcacacaaaatggcaacatcttggtcatgttatctacttgcattgcttctttttatgtcaactattgtatcagagagtagagtggcaaggaaggacttgggcctggaccttggtgggttaggggttggacttggactgggtttgggcctggggataggaggtggcagtggctctggagctggtgccggagcagggtctggttctggttctggatctggttctagttccagaactgccttaagttcagcttcctaatcttccagttctggctatggcggctccggagct

SEQ ID NO: 45193 - DNA, 358 bp, Glycine max
  Clone ID: LIB3139-085-P1-N1-C1
aaggaattggaaagcatctgcaatcctatcattgccaagatgtaccaaggtggtgctggtcctgacatgggtggtgctggtgctggggcagccgaggatgattatgctgctccttctggtggaagtggtgctggccccaagattgaggaagtggactaaatgtgtagttgctttcatccatttatctgtttaaaacttatttgatgcttttttattgaattttaacttttatgatttttgttggatgggatactaattgttttgcccgtgtgatatgaacgttgctttacgcattatgtcatttgctttatttcattagatgagaatactcattgttttacactttgttcgtaggaat

SEQ ID NO: 45194 - DNA, 395 bp, Glycine max
  Clone ID: LIB3139-085-P1-N1-C10
aaaaagagcaatcctctattcgaggcacccgtccaaggccagagaatgattttactaccacatttaggtatcggcttcggcaacttaactgcaactgctgaaaatactcctccaggatttgaatcgaaattgcctgaagtgcccgaaatcttcaaggcagccacaaattgttttgaaaccttgtgcagttactgctgttgcatgtgctgcatccagtgctgtacccggataaacagccaatgtgcaaccgcattggcacaactctgcattggtctaggatgcttcggctgcatctcatgttgttcagatatatgctgttctggaaacgaaggctgaaatatcaattttgttgtatgattgttgtattttactgcatatagaaatcactgcatgta

SEQ ID NO: 45195 - DNA, 373 bp, Glycine max
  Clone ID: LIB3139-085-P1-N1-C11
taaaggttctatgttggatctttaggagtttcaacatcatcaagagacaatttaaacaaatttgtttccatctgagcctgaacctcattgtattgaggatctattctttgtctcaatctggtatcaatctttttaaattgcctcttgatgatgaggcaaccacaaatggttctgtatcctttctcaaatactgctgttgcatgagctgaattcagcgctgtacccgggtaaacagcctatgtgcaaccgcattgacacaactattcattgcactaggatgctttagatgcatcttatgttgttcagatatatgctgttctagaaacgatggctgaaatatcaattttgttgtttgatcgtggcattttactgc

SEQ ID NO: 45196 - DNA, 159 bp, Glycine max; identical to SEQ ID NO: 39045
  Clone ID: LIB3139-085-P1-N1-C12

SEQ ID NO: 45197 - DNA, 404 bp, Glycine max
  Clone ID: LIB3139-085-P1-N1-C2
tttgtatataagagaagtggaagagggagagtgagggaaggtaacaataagggaaatgaagaggagcagagatatggagaagagatcagagattaaatctgcaattgaagagttgtctatgctggttatagtcaaacctgaaggaaatcatgtcatgattgctcacatccccaccaagcctttcctgtctctatgtcacttggttctacaagttcttgataagataggaccaacgatggccgttttgagacaagacgtttcccagaatattaagaggttggaagtgatgcatgaattgaatccctcaatgaattcaaatttggttgaaatattgaaatcagaagctagcaaaggcaaatcaaggaagaggtctagttgtagtaaagcctttctttggctcacta

SEQ ID NO: 45198 - DNA, 395 bp, Glycine max
  Clone ID: LIB3139-085-P1-N1-C3
gctgtgactacctcttccagttccaccagcggcttcttcagtctccggtcaccaaattcggtcgattccagcagggtctcctccacccacggctcttcctccgcttgcggaaagttcgatggggtggccatgtggttcatcaacggcgtcacaaccgctttcttcgcctccttgaaccgttgctcttgcattcgcatcgccaccgaagaagacggcgacgatgccaacgacttgccgttgatgctcaacgacggaaacctccgccaggatggcgtcgtcgttgcgtgcaccaccagcaggagaaggacgggtaaagggaagaagagtggagctgttctcgtcgacgacgactgaaaaaaagtggtaacaaatacgtactacgtaccctttgatga

SEQ ID NO: 45199 - DNA, 382 bp, Glycine max
  unsure at all n locations
  Clone ID: LIB3139-085-P1-N1-C4
accgcgatcacaggttgccgcaccttataaccggaaacaaaagcaatcgttacttgatttcaagaatttctcaatttcttcctacttctttgtgtacgatttcttaagggaaagaaaatcactctctgtgctggtcacagacttcgtgaatcattttcttttccactcctagtttatttgctgaacactctcctatttgatataggacttcgtgtcagatttaaactttttctgtttctttctcagntctctgtttaatttcaagttcaagctggtgaaattttggattagtgctcccactctcctatctggtataggacttcgtgggtagacttttctacttctctcctttctttcactctcttcttctcactgatccgca

SEQ ID NO: 45200 - DNA, 303 bp, Glycine max
  Clone ID: LIB3139-085-P1-N1-C5
atcaaaacaacaaaattttctttctcaaaaaaccttatacaaaatgcggctcggttctttatcacaaaaatcttcaaaattaactaccactcatttaaaccaccatctccttaaattgaacaaaaaataatttacttggtcggcccccacttttttaatcaccccccctgcaattatttttccaaccccaccctgactgtccccccattttccttattaggggccatttaaaaccttgcctaaacacagtgctaacgcctcccctcacaaaaaagttcaacccttcacaattccacaaaaatt

SEQ ID NO: 45201 - DNA, 401 bp, Glycine max
  unsure at all n locations
  Clone ID: LIB3139-085-P1-N1-C6
gagaatcccccagtgtacaagcctcccactgagaaaccaccagtttatgagcccccagttgagaagcctcctgtttacaaacctccagttgaaaaccccccaatttataagcctccagtagagaagccaccagtgtacaagcccccagttgagaaacccccagtgtacaagcccccagttgaaaaaccaccagtgtacaagcccccagttgagaaaccaccagtgtacaagcccccagttgaaaaacccccagtttacaagcccccagtngaaaaacccccagtgtacaagccctcagttgaaaaaccaccagtgtacaagcccccagttgagaagcctccagtttacaagccctcagttgagaagccaccagtttacaagcccncagttgagaagccacc

SEQ ID NO: 45202 - DNA, 403 bp, Glycine max
  Clone ID: LIB3139-085-P1-N1-C7
cacatttgtgttcagtatagatggcaccgtactctctaatattccatactacaaaaaacatggatatggggtggagaaatttaactcgaccttgtatgatgaatgggttaacaagggcaatgcaccggcactgcccgagactcttaagaattacaacaagctggtgtctcttggcttcaagattatattcttgtcaggaagaacactggacaaacaggccgtaacagaagcaaacttaaagaaggctggctaccacacatgggaaaaattaattctcaaggatccacaagatccttccactccaaatgcagtttcatacaaaacagcagcgagagagaaactgataaggcagggatacaacattgttgggatcattggagaccaatggagcgatctcctcgga

SEQ ID NO: 45203 - DNA, 389 bp, Glycine max
  Clone ID: LIB3139-085-P1-N1-C8
aaaaaaaaaataaaaaataaaaaaaaaaaaaaaaaaaaaaaaaaggaaaaaaaaaaaaaaaaaaaaaaaaaaaaaaaaaaaaaaaaaaaaaaaaaaaaaaaaaaaaaaaaaaaaaaaaaaaaaaaaaaaaaaaaaaataaaaaaaaaaaataaaaaaaaggggggcccccccttttttttggtttcaaccccctatttttttttacgaacaactctctacagacaccccttttcccatttaatggggtatttaaaaatttgcgaaaaataaggaaaatatttttttcctggataaaaaattttcccccactaaaattccaaaaaaatacaatccgtaagctatagagttactcctcgggggcccctataaggtggccaccatcattttt

SEQ ID NO: 45204 - DNA, 402 bp, Glycine max
  Clone ID: LIB3139-085-P1-N1-C9
gaatttcttacagcttggtcaactcaggtgcgtcccgcaacgactctgttggctgatgggtgcccatatttgtatgctatggtgcatgatagttcagtgtctacaataccaggtgattttgtcattggtgttaagttgacaaccataaacaatatgtgtgcatatgggctcaatcctggtatttcaggttctcgtcttttgggcaccattcctcagtccatttcacagcaaactgtttggaatcaaatggcaacagtgagaacaccattgaattttgattctagcaagcagagcttttgtcaattttctattgaccttctcggtggaggaattttagtggacaaaactggagattggatcacacttatacaaaattctccaattagtaacttgttgagagtt

SEQ ID NO: 45205 - DNA, 120 bp, Glycine max
  unsure at all n locations
  Clone ID: LIB3139-085-P1-N1-D1
ctcacacctcatcgnttctctctctagatctctggttcttctttttctccaaccttcgtttcaccaccacacttacattactttgtcgaaatggctccaccaattgagaccccaaacaag

SEQ ID NO: 45206 - DNA, 396 bp, Glycine max
  Clone ID: LIB3139-085-P1-N1-D10
ctcacctatggcaaatccaattctctcctttctcttgttggccctcctctgcatcctcgccttggctcacgccgattcccatttcgaaggctttgaagccgaagacgatgacgacctcgaagactcttccatcgatcccgcctctctccgatcaccgcccctctccgaccctactcccctcaccaccgatcccaccccccaacctcctgcttcagatctccccaaatcccctcccgccaccaccttcgatttctgggacgacgaagaattcgaaggcgtccccgtcgaacaccccgcccccgagcctccctccgatcccaaatcccccgaaaactccaccaccactcaaacccctccaaccctcacccctccgcgctccttcaccgtagagatcgt

SEQ ID NO: 45207 - DNA, 394 bp, Glycine max
  Clone ID: LIB3139-085-P1-N1-D11
tgaaattgaattagctggggcatgtgggtatggctctttggcactagacataagtggtggacaccttgcagctggtgtggattctctcttcaaaaatggagcaggttgtggtgcctgctttcaggtgggtgtgtgtacaattatcaggaccacgtccaaccaatttttatttcattaattattattgtcatgagagtagtctaatgaacattttttttaatgtaattaatggatgatatgctgcagataagatgcaagaacccaactctatgtagcaaagaaggtaccaaagtggtattgactgatcttaatcacaacaatcaaactgattttgtgctaagcagcagagcctttgcgggcatggctcaaaagggtatgggccaacaaatactga

SEQ ID NO: 45208 - DNA, 246 bp, Glycine max
  Clone ID: LIB3139-085-P1-N1-D2
ttgagtttccttattgacaatcccaaacagtctacagtttttgatattctcttgggaatctctcaagattttgaaattgcggaatcctctgcatgatctggaattcgtgttttctttcgcttgttcgtttgtttaattcaataaaggaaattaggcatgaccctcttgttgagtatgctctgcctatctgaaaatttccacacctcttttaattgtcgtaatgatgtgtgaagtgtgtgttatttt

SEQ ID NO: 45209 - DNA, 406 bp, Glycine max
  unsure at all n locations
  Clone ID: LIB3139-085-P1-N1-D3
ctcttcttcttcccccacaccggaggagagaaaaccaaaatcactcttcactgttagggttagggtttcgattttccccttatccaatctcgcagcagcgagatgggcgccaattcgttgccatcggcggaatcaaacttcgatctcgacgagcagatctcgcagctcatgcaatgcaagccactttccgagcaccaggttagagttttatgtgagaaggctaaggagattttgatggaagaaagtaatgtccagcctgtgaaaagccctgtgacaatttgtggtgatattcatgggcagtttcatgaccttgctgaactatttcgaattggaaggaagtgtccagatactaattacttgtttatgggtgnttatgtggaaccgggttatttttcagttgaaactg

SEQ ID NO: 45210 - DNA, 396 bp, Glycine max
  Clone ID: LIB3139-085-P1-N1-D5
ggctcgagaaacctagctccatctccctccactcaccataacatggcatcagaagcaaatgctgccaacaccaacttctgtgtaaatgttagcaacaatggctacattagtgctaatgaccccttgaactggggtgcggcggcggaggctatggctgggagccacctcgacgaggtcaagcgcatgctagaggagtaccggaggcccgtcgtcaagctcggtggagagaccctgaccatctcgcaggtcgcggcgatcgcggcccacgaccagggggtgaaggtggagctggcggagtcctccagggccggtgttaaggccagcagtgactgggtgatggagagcatgaacaagggcactgacagctacggcgtcaccaccgggttcggtgctacc

SEQ ID NO: 45211 - DNA, 398 bp, Glycine max
  unsure at all n locations
  Clone ID: LIB3139-085-P1-N1-D6
agaaaccatactactatcactccccaccaccttctcacccttacggtggcgctcaccctcacccttaccctcaccctcaccctcacccccatcctcaccctcacccacattcacaccctcaccctccctacgtttacccctccccaccaccttctcctaagaagccatacaagtacccatctccgccacctactgtgcatcactaccctgaccctcaccctgccttcgtgcattactctcctccaccatctcctaagaagccatacaagtacccatcaccttcaccaccagtacacccttcttacactccccacccagtttatcactcttcttcaccaccttctaccaacaagccttacatctatgcgtcacctncccctccttaccactattagcta

SEQ ID NO: 45212 - DNA, 365 bp, Glycine max
  Clone ID: LIB3139-085-P1-N1-D7
ctcgagccgaatcggttcgagcggctcgagattgaatgtcccaaggatgagaaacttcctcgtcgcaaaatttttgacaaacctaagacgcgctgcttcactattctccctatggagtttaatcttgtggtccgtcaaaagtttttaaattttgtgaggttcattatgaagaaaagggacaagcttagttgtcaagttggaatcaacccatactccatggaatggactggtttggccaatagattactgagtaagggcaatgatattctgtgttgcgattatgctagttttgatggtttgattaccaagcaggttatgagcaagatggcagaatggttaaccggctttggggtggggatgaaaaa

SEQ ID NO: 45213 - DNA, 402 bp, Glycine max
  Clone ID: LIB3139-085-P1-N1-D8
actcgatcaactcaacacaaaccaaaactcaagctaaaattctcactctctctctcatctcgagatcatagtatcatattcaatatcatttcataccaaacacatggctttggaagctctcaactcaccaacaacaaccgctccatcttttccctttgacgacccaactattccatgggcgaaacgaaaacgttcaaagcgttctcgcgaccatccttctgaagaagagtacctcgccctctgcctcatcatgctcgctcgcggcggcaccaccaccgtcaacaaccgccacgtcagccctccaccgccacagccacagccacagccgacaccagatccttccaccaagctcagttacaaatgctccgtttgcgacaagagcttcccctcttaccaagcgct

SEQ ID NO: 45214 - DNA, 399 bp, Glycine max
  Clone ID: LIB3139-085-P1-N1-D9
cccctgcatattcctcacactttcttcccttttccccctgtctgcatcttttgcttccttcgtatagggataagagagcagcaagtaatgatggatgcgctgataaaggtgcagttcaacgcaccaaaaccataaaaagcgcttctttcgtcttatggcatgtctgaggaggaagaagcactgcgtcaaaggccaacatcgttgatttctttcccaccccatgacaattcttcgcttcttctgccccttctttatactcttcttcactccaatagcttctgtgcaagcgttcaccggaacctatggtataaattatggtaggattgcaaataatattccttcacccgatgaagttgttactcttctcagagcagcaaaaataaggaatgttagaatcta

SEQ ID NO: 45215 - DNA, 301 bp, Glycine max
  Clone ID: LIB3139-085-P1-N1-E1
agattgtgaactccgtcgtcgagggcgtcacgccctcctacgcgcttgagtcccgcctcggcgactgtggccgtgccgcggcgattcggcgcggggcgctgcagcggctgacggggcggtcgcttgaggggctgccgctggaggggtttgattatgactccattttggggcagtgctgcgaaatgccggtggggtatgttcagattccggtgggggtggcggagccgcttgtgtttgatgggtttgaatacactgggccgatggccacgacagaagggtgccttgtggctagtaccaatag

SEQ ID NO: 45216 - DNA, 395 bp, Glycine max
  Clone ID: LIB3139-085-P1-N1-E10
gctctttctcctttctcctttcaacaaacaacaaccaccaccaccctctgtcgccacatatttaacaacaattactacaacttgactaaacaaaactgtttttctttttttcttttttttttaccatggaactggctttgagtttgggagacacgtccaagtcttttacctttctcgacaaggccgcggtgaatttacccaccaacaaggacccacctgggttgttcagcttggcgccgagtttcgccgccaccgccgccgccgccgataaaagaagcgatgctgctgagaggaggggtttttcttcagatccaccggttcagctcgaccttcttcctttctctccggttctcagaccccaacaacaacctccctctcaacttcggatcccttgg

SEQ ID NO: 45217 - DNA, 395 bp, Glycine max
  Clone ID: LIB3139-085-P1-N1-E11
ctcgagccgaatcggctcgagcggctcgaggattggaaaaagtttcctctacaaaagcacaatttgttagtggaaaaaccttcaaatatgatataattggtgctggttcacattcttcaggagattttcctgaaaaggaagatcaagaaaaacccaaaaagattgataccagattgagacaaagaatagatcctcaatacaatgaggttcaggctcagatggaaacaaatttgtttaaattgtctcttgatgatgttgaaactcctaaaggttctatgttggatcttaaaatttctcaatctaaaattgcacttcccaagaacacagttggaggaaccattctgcgtagtgatctattggcaaattttttgacagagggcaattttagagcaagt

SEQ ID NO: 45218 - DNA, 405 bp, Glycine max
  Clone ID: LIB3139-085-P1-N1-E2
gggaatgattccctaactggacacatcatatctacaactattggaggcaaaaatggggaacccaaacagactattagttacatggcagaacgggttgtaggaactggatcatttggaattgttttccaggcaaaatgcttggaaactggggaggcagtggcaattaaaaaggttttacaagacagaagatacaagaatcgtgaactacagttaatgcgtgtgatggatcatccaaatgtgatctctttgaagcattgtttcttttccactacaagtactgatgaactttttcttaatttggtgatggagtatgttccagagtccatgtatagagtcttaaagcactacagcaatgctaatcaaagaatgcctatcatctacgttaaactttatatgtaccagatt

SEQ ID NO: 45219 - DNA, 404 bp, Glycine max
  Clone ID: LIB3139-085-P1-N1-E3
ctcgagccggagagagagagggagtcagagaaaccctaggtaagaagaaaagatgccggctggtcatggtttgagatcccgcaccagagattccttctctcgtcctttcaggaagaagggaaccatcgccctcaccacatacctgagaacctaccacgtcggcgactatgttgacgtcaaggttaacggtgccgttcacaagggaatgccccacaaattctaccatggccgcaccggacgcgtctggaatgtcaccaaacgtgctgttggcgtcgaagtcaacaagcaggttggcaacagaattataaggaagaggattcatgtgcgggtagagcatgttatgccttcaaggtgcactgaggagttccgcctcaggaagattaagaatgatcagctaaaggccg

SEQ ID NO: 45220 - DNA, 411 bp, Glycine max
  Clone ID: LIB3139-085-P1-N1-E4
agcctgggattccgcttcagcctggtttggccggaaaaggaaaggatggaggtgtttagaattggaggatttcctgctgttgtcttgcaagcgagctcatgaattgaaaacatgtgctcatgaagcctaaggatcaaattcctgctgttgacaaggtgtattctactaaagttaataagtttgcaaaaattatgaaccttagacaaagtgttgttggtgatcttaaacttcttactgatgggaagttgtatgagggtaagcatattcctgtatctaatattagtgcaggggaaaatcatgtagttcaaatacccttaatggcacaggaggaaattctgtcttctagtgcaagtgacttcagaactgcaatggtgagtaaaaatagcaagcctcaagctactgcaatgcatg

SEQ ID NO: 45221 - DNA, 359 bp, Glycine max
  Clone ID: LIB3139-085-P1-N1-E5
ctagatttgacagaagatggattagatggaagtgattagaaatagaggggttcctgctgatgttcttgcaaagcgagctcatgaaatttgaaaaacatgttgctgggcggccgcctcatagttcgctttcctacccgggacttaattccgtaccgctccctccaggctgaccgatttcccttttaggcagagactttatgctttgggcaatcaagggcaatctccttttgctgcgtaaaatgtttatccgcttataattccacacaaaatttcgtgcgggaggcataaatgtaaaagcctggggggcctaaggagtgggctaacttactttatttggttcgcgctaattgcccgctttc

SEQ ID NO: 45222 - DNA, 400 bp, Glycine max
  Clone ID: LIB3139-085-P1-N1-E6
ctcacccgcagggtttagagaaaatttaacaattagggttgcttctcctttgccgacccatggctcccaaagctgatagttcaaagaaggctgatccaaaggcacaggccttgaaaactgccaaggcagttaagtccggtgctaactttaagaagaagaccaagaagatccgaacatctgttaccttccatcgaccaaggactttgaaaaaggataggaaccccaaatatccacgcattagtgctccacccaggaacaagcttgatcactatcagatattgaagtttcctctcacgactgagtctgcaatgaagaagattgaagacaacaacactttggttttcattgttgacttgcgggccgacaagaagaagatcaaggatgcagtcaagaagatgta

SEQ ID NO: 45223 - DNA, 333 bp, Glycine max
  Clone ID: LIB3139-085-P1-N1-E8
aagacattgtttggtttggttacttgctcgaatttcctcggatcgcttaatttgcatttgattagttaaaccgccacgccgaatctcttttctcgaactggctaactctcaagcaagtggctcggacgctgattccaaccacaagcggctggggctcgcactaggtgacgccctaaactccggtgcctacgacgccgactacaagaaatgcgtgcgacgaaccaagcggatgtgatctggttccggcattcacccttttttgatacagcatgctcacccgctttttctttattcgcagattgtttctgtttcttactccatgtatagacgcct

SEQ ID NO: 45224 - DNA, 400 bp, Glycine max
  Clone ID: LIB3139-085-P1-N1-E9
gaaatgttcaaatccatggacacagataacagtggaacaatcacattcgaagagttgaaagctggtctcccaaaattgggtactaaactttccgaatctgaagttaggcagttgatggaagcggctgatgtagatggaaatggaaccattgattacattgaatttataactgctaccatgcacatgaatagaatggaaagagaggatcacctatataaagcctttgaatattttgacaatgataagagcgggtacatcacaatggaagagttggaatctgcccttaagaaatataatatgggtgatgagaaaacaataaaggagatcattgctgaagttgatacagacaatgatggaagaattaactatgatgagtttgtagccatgatgaggaaaggca

SEQ ID NO: 45225 - DNA, 185 bp, Glycine max
  Clone ID: LIB3139-085-P1-N1-F1
cttaattagtgttcatgaatatgtcaagccttactttaatggttctaaattgaaaagctttctaactggtcataatatcaccattactggtgggattggcaaaactagtgcaacttttcaatttaaaaaggtagcagattgggattttctcaagagaaactttaagcagatgtctaatgttttat

SEQ ID NO: 45226 - DNA, 396 bp, Glycine max
  Clone ID: LIB3139-085-P1-N1-F10
cacggtcccgctccctctccatcccatcacaaagaaaacagagattcgcattattagcagatcggactcaaccgatgaagttgaagccgcagtgaaacaaaccagaataattgacgcatcatcaattagatcgagctgctagaaatgaaggatgaggacgggcttccgacgaccgccgccacgaagaaggaaagcatggattcgagtctgtttgggaaagggaggtacaaattctgggcgttagcggccatcttgcttctggcgttctggtccatgttcaccggcaccgtctcgctccgctggtccggcactctcaattccctttccagcgacatcgacactcccatccacgacgaccccgatgttctcgaaatggaggagagggagaaggtggtg

SEQ ID NO: 45227 - DNA, 394 bp, Glycine max
  Clone ID: LIB3139-085-P1-N1-F11
ggttgctccatcacctaatcacttccccacttcccctgtaaatcacgtttagttcgcacaaggttttaaaaaatggctgatgctgaggacattcaacctcttgttgttgataatggaactggaatggtcaaggcgggttttgcaggtgatgacgctcctagggccgtgttccccagtattattgggcgaccacgccataccggtgtaatggttgggatgggtcagaaggatgcttacgtgggtgatgaagctcaatcaaaaaggggtatactcaccttgaagtatcctatagagcatggcatagtcagcaactgggatgatatggagaagatttggcatcacacattttacaatgagcttcgtgttgcccctgaagaacaccctgtacttctta

SEQ ID NO: 45228 - DNA, 390 bp, Glycine max
  Clone ID: LIB3139-085-P1-N1-F12
ctcgagccgaatcggctcgagtcacttttcttcatagcactcagaaaacaacaactcatctcatcattattccctttctcactcagcacattctaaacagtagcaccatcaccaataataatggcatcatcctcatcaaccgttgctttgagaaccatctcctctttctctctgaaacctgccaccacaacaagatcattactcaacactagtacttcatccaccataaccctcttaccctttacatcagcaaactcatttctctccaaaaccctcaaactcaacacctcttccccacactctcacctttcactacccctcaacaagtctttcacttgtagaagccaggctgaaccatcttctgactcagccaaagtccaagaactgagt

SEQ ID NO: 45229 - DNA, 399 bp, Glycine max
  Clone ID: LIB3139-085-P1-N1-F2
gcgcactcatcgtattaaaggaatgattaaaatggtggccacagttggtattcctgagaatacaggtatagcattggcctgtgctatgaatagttcttttagggggcgcgccagttctgatatttacaccatctgctctcaagactgtgaattatggaatcctgcttgcacaaaagcaatgactatgtcatttaatccaaacccgtgttctgatgcatggagtttggaatttctgaagcgtaccggatttcattgtgatatcatttgtgtcactggatggactgccaccccaatgcaggatgttcaggttacaattgattggtttatttcctctcaggaatgtgttcccaggacctattgtgttttaaatccacaaaatccttttgtgttaaataggtg

SEQ ID NO: 45230 - DNA, 402 bp, Glycine max
  Clone ID: LIB3139-085-P1-N1-F3
gccgaggtcaggaggagcactagctaagttcacaatttcaaaatggctaggggactaaagaagcatttgaaaaggctcaatgctcctaagcattggatgcttgacaaactgggtggtgcatttgcgcctaaaccctcatctggaccacacaaatcgagggagtgcctccccctcattcttattctgcgaaaccggctgaagtatgctctgacataccgtgaagtcattgctattctgatgcagcgccatgttcttgttgatggcaaagtcaggactgacaagacttaccctgctggtttcaatgatgttgtttcaatcccaaaaacaaatgagaacttccgcctgctctatgacactaaaggccgattccgtcttcattccatcagggatgatgaggcaaag

SEQ ID NO: 45231 - DNA, 194 bp, Glycine max
  Clone ID: LIB3139-085-P1-N1-F4
gtcgagctgaatgagcctcgagacctattgaagagatacctgtatctagaatcagttaatgccgcgaacaggaacttgattttagtcgagatgctgcaacatgacacatgctatgaacgattctggagcttcactatttgaaagcgtatatgagagggtgaaacacattatattcattccataacgtgaggagc

SEQ ID NO: 45232 - DNA, 399 bp, Glycine max
  Clone ID: LIB3139-085-P1-N1-F5
ggccaccgccgcgatggcggtggccgcgtccgacgccgacgacatcctgatccgtcaggtggtgccagatgttggcgaagccgaagaggaggacaacctgctgaacgccgagcaccacttcgcgagcttcaaggccaagttcgccaagacctacgccaccaaggaggagcacgatcatcgcttcggcgtcttcaagtccaacctccgcagagccaggctgcacgccaagctcgacccctccgccgtccacggcgtcaccaaattctccgatctaactccggccgagttccgccgccagttcctcggcctcaagccgctccgcttcccggcgcacgcccagaaggcgcccatcctccccaccaaggatctccccaaggatttcgattggcgagacaaagg

SEQ ID NO: 45233 - DNA, 397 bp, Glycine max
  Clone ID: LIB3139-085-P1-N1-F6
aaattgcagcaatcttcgtctctgatccatggcttacgttgagcgaggtgttgtcaaatcaaagcgatcaatatggcgacttaaaacaatcactgattttttctgggccattgttaacttcataggcgtgtttttcgcaactatgttctcgatggaaaagtcagatgcgtacagaaaacgttctgtgggtaagaaatgggatggcggtgctcctggaggaggtcctggcggcggtggtggcggtggtagcggtccacgaggccctcctcgtgggggtctcgacaatgttcgtgggctagatagtataaggggacgtgatcatagttcactgcctgcctgtggttcctgctgtggctgattgttagagatccaatgtgtgtatatgccttttatatgt

SEQ ID NO: 45234 - DNA, 397 bp, Glycine max
  Clone ID: LIB3139-085-P1-N1-F7
gcgctgcttcactattctccctatggagtttaatcttgtggtccgtcagaagtttttaaattttgtgaggttcattatgaagaaaagggacaagcttagttgtcaagttggaatcaacccatactccatggaatggactggtttggccaataggttactgagtaagggcaacgatattctgtgttgcgattatgctagttttgatggtttgattaccaagcaagttatgagcaagatggcagaaatgataaacagtctttgtggtggtgatgaaaaattgatgcgtgaaaggacacacctgctgttggcttgttgttcaaggatggcaatttgtaagaaagatgtttggagagttgaatgtggaatcccttctggatttccgctcacagttatttgt

SEQ ID NO: 45235 - DNA, 400 bp, Glycine max
  Clone ID: LIB3139-085-P1-N1-F8
gggaatccacactctctgacccctccaaggcacaactcatccacaattttgaggctttgggcgttaatttggtccgcggggatctgtacgatcatgagaagttggtgaaagctatcaagcaagtagatgtcgtcatatccacgctgggtcacctgcagcttgccgatcagctcaagatcatcgctgccattaaggaagccggtaatgttaagaggtttttcccttcggaattcggtaacgacgtggatcgtgtccatgccgtggaaccagcaaaatctgcattagctatcaaagcccaaattcgacgcagcattgaagccgaaggcatcccctatacgtacgtttccagcaactacttcgctggctattttcttcccacattagcacaaccaggtgcttt

SEQ ID NO: 45236 - DNA, 398 bp, Glycine max
  Clone ID: LIB3139-085-P1-N1-F9
cttgaatcttcgttatccttcttttttctccttgaactcgaatattcactatggcagatgaggtggttctgctagatttctggccaagtccatttgggatgagggtcaggattgcacttgctgaaaagggtatcaaatatgagtccaaagaagaggacttgcagaacaagagccctttgctcctcaaaatgaacccggttcacaagaaaatcccggttctcatccacaatggcaaacccatttgtgaatctctcgttgctgttcagtacattgaggaggtctggaatgacagaaatcccttgttgccttctgacccttaccagagagctcaggctagattctgggctgactttgttgacaataagatatttgatcttggaagaaagatttggacatca

SEQ ID NO: 45237 - DNA, 403 bp, Glycine max
  unsure at all n locations
  Clone ID: LIB3139-085-P1-N1-G1
atgggtgcaagacaatgtcagaaacttttggaatgtcagattcaggtacattactgtgggaaatgaagtgaagccttgggactcatttgcacagtttgtagtgcctgcaatgcaaaacatccaaagagcaatttctaatgctggccttggaaaccaaatcaaagtttccactgccattgagtctggtgcattggcagaatcataccctccatcaagaggctcatttaggtctgattatagaacatcatatcttgatggtgtcatcagatttttagtgaacaacaatgccccattattggttaatgtgtacccttacttagcttacattgaaaaccctagggacattagtcttgactatgcactctntaggtctccttcggtggtagtgcaagatggttcactt

SEQ ID NO: 45238 - DNA, 393 bp, Glycine max
  Clone ID: LIB3139-085-P1-N1-G10
ccatcagtgggcgagttggtgaagcaaagtcaactcactggaaactcggttgaactcggtgtgtgtagaaatggcgaaacttgaagccaagctagggatgatcttggactcggtgggtcagttcttctccggcaaggaccatcttccttattgtgactctgacgtcgtagctggatgtgaaagagaggtcttggaggcagaaaaacaatcatctcaagagtatatgcaagactgtctcctgcgtttatcatgggctcttgttcactccaaacacccacaagatgtgcaccgtgggatagccatgcttgaatcatctttgcctgctacagaggacccactgcagcaaagggagaagctttatcttctggctgttggatactatagaaatgctga

SEQ ID NO: 45239 - DNA, 390 bp, Glycine max
  Clone ID: LIB3139-085-P1-N1-G11
ccgcaccagtttcaccgcacgaatatcttgttgtttggagcgatccgagaaaaactctgtaaacatgttggtttaccaggacctccttacaggtgatgagcttctctctgactccttccgttacaaggaaattgagaatggaatgctgtgggaagttgaggggaagtgggttgttaaaggagcagttgatgtagacattggtgcaaacccttctgctgagggtggaggagaagatgagggagttgatgatgcagctgttaaggttgttgacattgctgacacattcagacttcaggagcaacccgcattcgataagaagcagtttgttaccttcatgaagaggcttatcaagaatttgactcccaagctcgatgcagagcatcaggagtt

SEQ ID NO: 45240 - DNA, 396 bp, Glycine max
  Clone ID: LIB3139-085-P1-N1-G12
gaaacatgaatttggaaacgcaaccaggaacggcgtcgtattggtgctacagctgcacccgtttcgtgcacctctctgtccaaagcaccatcgcctgcccccactgtcaaagcggtttcgtcgaagagatccgtgccggcgccggagccgaagcctcgccacgccatcgactaagtcctttccccgatgatcctcttttgctccggcgacagggcttccgccgccgtaggagagaagcttccggcaaccgctccccgttcaaccccgttatcgtcctccgcggccccggcgacgactccgccgccgccgaccacgacggcgtcagcacgttcgagctcttctacgacgacggcgacggcaccggcctccgccctcttcctcccaccatgtcggagt

SEQ ID NO: 45241 - DNA, 403 bp, Glycine max
  Clone ID: LIB3139-085-P1-N1-G2
aaaaaattgttgaagttaacgcattggctaaggcattgtctggcaacaaggatgtggccttcttctctgctaatgctgcagctcaggcttcaaggaagtcctctccaagagtgaccaacgaggctgttcagaaggctgctgctgcattgaagggttcagatcatcgccgtgcaacaaatgtcagtgccagactggatgctcaacaaaagaagctcaaccttccaatccttccaaccaccactattggatccttccctcagactgtagaactgaggagggtacgccgtgagttcaaggctaacaagatctccgaggaagagtatgttaagtcaattaaggaggaaattcgcaaagttgttgaacttcaagaagagcttgatattgatgttcttgttcatggaga

SEQ ID NO: 45242 - DNA, 234 bp, Glycine max
  Clone ID: LIB3139-085-P1-N1-G3
gcttgttgcgagctttaagctagttgatcgagaggcgaatacgaaggagctggttatgtttgtggctgcagactgtatggtagcatggccattccatgtagcctgctaccaaaggttgcttatacgaatgacaaccggctatggtgggcgcgcttcggaagtataatgcacgaggagcaggctcgctgaacacgcacacatcatgcgctcctttactaccattactgcagagtg

SEQ ID NO: 45243 - DNA, 396 bp, Glycine max
  Clone ID: LIB3139-085-P1-N1-G4
ccaaatgctgttctttcaatgtggagatattttgttggagatctcgtctttgaagtttctaagatgacttctccctacattaaatgtacagtctctttcttcatagcatttggaaatttggctgatgacaccatcaattttgaggcttttccccacaagctggtgcagtttggagagattcaggaaaaagttgtgttgaaattttcacaagaggaatttcttacagcttggtcaactcaggtgcgtcccgcaacgactctgttggctgatgggtgcccatatttgtatgctatggtgcatgatagttcagtgtctacaataccaggtgattttgtcattggtgttaagttgacaaccataaacaatatgtgtgcatatgggctcaatcctggtatt

SEQ ID NO: 45244 - DNA, 241 bp, Glycine max
  Clone ID: LIB3139-085-P1-N1-G5
aagatagcagagcagaggcgtttaggctctatcagaagactacttccctatggattccttggttcaagtcatctcctttaggactcaaatctaaggatgcttgattttctttttccccttgttcgttagttgattgtaccaccatcttcttaattttgcctagtttgttcgattatgtaagagagccatgtgtgtgctccatgatttttgtataatatagcactttcctatagactatctc

SEQ ID NO: 45245 - DNA, 397 bp, Glycine max
  Clone ID: LIB3139-085-P1-N1-G6
caaggctattcggcggcacggtcatcgtaaagggcaaaccaccccttcgtccctccggcgaaaactccggcgtcctctttgtctgcacccaccgcaccctaatggaccccgtcgtcctctgctccgtcctccgacgcaaaatccccgctgtcacgtactccgtctcacgcctctcggagatcctctcccccatccccaccgagaggctcacaagaacacgcgacatagacgctgaaaagatcaaacgtgagttatccaaaggtgacttagtagtgtgtcccgaaggaacaacatgtcgcgaaccctttcttttaagattcagtggtcttttcgccgaactaactgaccggatagtgcccgtggccatgaactatagggtagggttcttccatgcaac

SEQ ID NO: 45246 - DNA, 400 bp, Glycine max
  Clone ID: LIB3139-085-P1-N1-G7
tccttggtctttgcggaaacaaagtagatgctatcgatcatcacaacactgaaattgacaaactgtcaaaggaaatagcgttagagagggataatgtcagcaatgatcccaagtccatcatgcctgcggcatttgtttcgtttaaaacacgatggggtgctgcagtttgtgcacaaacccaacaaaccagaaacccaacaatgtggttgacagagtgggcgccagagccacgtgacatctattggtcgaatttggcaattccatatgtttccctcaccgtgagaaggttgatcatggctgttgcattcctttttctcaccttcttttttatgatcccaattgcaattgtacaaggtcttgcaagtattgagggaatccgcaaaagagcaccatggttaaa

SEQ ID NO: 45247 - DNA, 398 bp, Glycine max
  Clone ID: LIB3139-085-P1-N1-G9
gacgaacattccgctcccatcgcatctgtaacaatggaagcgcgccatgcaactcttggtcgacgaacgttggaggaaattcggcaaaagagggccgcggagagattgagtaaaacctcttcgggaccagatctcacgcaggttcccagcacctccgagattgcgggaatgagcaagtccgagagcgcaaataagctctctgagacagatcttagtgctctattgtctcaattgaaaggactgcaaaagaagaacacggagttggaggaagaaaacacaaaaattagtttaaagcttcaaacgatggaaattgataatgagacaatgcacaagcaattaaatgatgtggaacaaaatacagtgccatctctaaggaaagctctgagggatgtcgcaat

SEQ ID NO: 45248 - DNA, 398 bp, Glycine max
  Clone ID: LIB3139-085-P1-N1-H1
atcgttgttgttctaaagcactcatccacacattctccgtcgccacgacaacaatggctccaaagaaaggtgcgaaaggtggagttgtagcagcaaagaagaaggttcaggagaaggtaacgaaccctttgttcgagaagcgtccgaagcagttcgggatcggaggcgcgctgccgccgaagcgggacctgacgcgcttcgtgaagtggccgaagaacgtccaaatccaacgcaagaagcgcatcctcaagcagaggctcaaggtccctccggctctcaaccagttcaccaaaaccctcgacaaaaatctcgcaacaaatctttttaaaatgctgctgaagtacaggccggaggacatggcggagaataaagagaggctgttgaagaaggctcaggct

SEQ ID NO: 45249 - DNA, 395 bp, Glycine max
  Clone ID: LIB3139-085-P1-N1-H10
gtggcatttgcccaaatttctaacacgccattctcctccttttgaatcctctgttcatccgtcgatcggctcggctggaccatccttgccgccgtttgccgcggcatctccggccactctctctcatcgccattcagtgtattttggtttagttgcaaagttttagagttggattggaagattgtgaactaagaaagatggtgaagttgactatgattgcccgtgttactgatggtcttccgctagctgaaggactggatgatggtcgtgatcttaaagatgcagaattttacaaacaacaagtcaaggctttgtttaagaatctctcaagaggacattatgaagcatcaaggatgtcagttgaaactggcccttatgtttttcattatattata

SEQ ID NO: 45250 - DNA, 398 bp, Glycine max
  Clone ID: LIB3139-085-P1-N1-H11
gcacagccccgtgccgtcaactgtcaaccaccctccgtccaccgcacgcgcacctcgccaccaacatccagcaactcgcaccagaacagcacctcccatcgttgacgcacaaagtagcaggccgtcgcactcgcgccctcccgtccacagtcgcagtcggaccagccaccagtgatgggaaagatgtgcaagaataagaaacaagctggtgggcatggacctccaagagagcaaactgatacacaggaacaagaaatggacataaggaagattatgaaagatgttgaaaattttagctactcacatatgtcatggagagagcgcacaaagagtgaaaataggaatgttgtttctcttgttgggaagccccaaaagaatcagagattacctttaagtgt

SEQ ID NO: 45251 - DNA, 360 bp, Glycine max
  Clone ID: LIB3139-085-P1-N1-H12
tgttgaagaggcttacaacaagctaatagttgaacttgagaaaagtgttcctacattggttggcattgaatgtcccaaggatgagaaacttcctcgtcgcaaaatttttgacaaacctaagacgcgctgcttcactattctccctatggagtttaatcttgtggtccgtcaaaagtttttaaattttgtgaggttcattatgaagaaaagggacaaacttagttgtcaagttggaatcaacccatactccatggaatggactggtttggccaatagattactgagtaagggcaatgatattctgtgttgcgattatgctagttttgatggtttgattaccaagcaagttatgagcaagat

SEQ ID NO: 45252 - DNA, 369 bp, Glycine max
  Clone ID: LIB3139-085-P1-N1-H2
ggcccaaatgattaatacatcatgagcgggtctgattgtggccatatattcatctggaagaagaaggaagctaagctgctgagattaatggtaggtgatcaacatgttgtctatcaacttgaggcccatgcacatatacctattctcgctacttgtggtatagaaaaaaatgtgaaaatctgggctcctctagggaatgatataccttcacttactgcgaatgtgaaagagataatggtgacaaacagacagggcggagaagaccgatcacgggtaacccttactcctgatgttataatgcatgttcttcgcctgcagaggcggcagacattggcgtatattgaaagacgacataatacggcagatatt

SEQ ID NO: 45253 - DNA, 314 bp, Glycine max
  Clone ID: LIB3139-085-P1-N1-H3
ccaaaatatccacgtttcttttcccacacactatcttaaatcttaaaaacattttttttttcaaagcaattagaatttagaccacaaaaggaacaccgaagagatgtacggacagagtagtagtagcagtagttcttacgaatcggatttggggctgttggattcgattcggcaccacttgctgggcgagtccgaatccatattcggcgccccgaatttcgggtcgggtcggagctccagtttcagcagcttggactcgtgtttgagcgacaattggggcgagcttccgtttaaggaggacgatacagaagaca

SEQ ID NO: 45254 - DNA, 399 bp, Glycine max
  Clone ID: LIB3139-085-P1-N1-H4
aagcaagtgcttctaaaggactatgttaccggttttcccaaagaatccgacatgaatattgtcgaaagtaccataacattgaagcttccacaaggttccaatgatgtcttgctcaaaaatttgtacttgtcttgtgatccgtatatgaggaatctcatgaacaagcccgaaggccctcccaatagtcgtgcttacactcctggctctccattaataggatatggtgtgtctaaagtcctggaatctgggcacccagattataaggaaggtgatttagtgtggggctttaccaaatgggaagagtatagcttgttaccctcagctcaaatactcttcaaaattgagcacactgatgttccacttacctactacactggaattcttggtatgccaggagtg

SEQ ID NO: 45255 - DNA, 400 bp, Glycine max
  Clone ID: LIB3139-085-P1-N1-H5
ctcgagcccccctttatttttttcgttttttttttatggaaaaaaatattgtagcaatttcgtcgtagaaacaaaattcccctattttcggcacgccgttgttgaatttccaatctgtgattttttttcttcttctatttatacgtgataattccaaaaagcctaacgcgagagattcatcagcttttcaattattcctcgaattattttgaaggaatcatccaaactgcttgaaatattcatcatcaacaacctcacgctgttatagatattctctctctctctctccctctctctctctctcacacacacacacacacagatccagacatggccgaagaacaccgatgccaagctcccgaaggtcacagactctgctccaacaactgcggtttctttg

SEQ ID NO: 45256 - DNA, 386 bp, Glycine max
  Clone ID: LIB3139-085-P1-N1-H6
tgtcgaagaggcttacaacaagctaatagttgaacttgagaaaagtgttcctacattggttggcattgaatgtcccaaggatgagaaacttcctcgtcgcaaaacttttgacaaacctaagacgcgcttgttcactattatttctatggagattcaccatcgcgatccgtcatatttgtcagattccgacaacgagaaaaccaacgcttctgactccttgaagtgaaaagttttcaggcttttctgctgagaaaagcccattcaccatgttcttggtggcggaaaaccggccgacgtttttctctggagaaacaagaagatatctgcatcgacactcggagttgcgaccgctatatgggttctgtttgaattgcttgagtaccacc

SEQ ID NO: 45257 - DNA, 393 bp, Glycine max
  Clone ID: LIB3139-085-P1-N1-H7
cttatctctctctctctctatctctcccgaattattgttcgttcgacccttttacttagtattccctgtttccggtattcgctcccttttttctgcattctggttttacttagatctctgtcccgcaccagatctggtgcagggtgagagggttgggttcattaattttgtatcaatcttccttctgagcggtaggcgtggggataccagagtcttttcgggaagcaagagagggttctctccgttttcaatagatctctcactgtcttcttttgagggggaagccggggcctcggcctcggcggctttcaaagcccccaccttcacagccctatcaacaaaaaaccctaaccctatttttttcttcattttctaattcttttttgatcgtcg

SEQ ID NO: 45258 - DNA, 400 bp, Glycine max
  Clone ID: LIB3139-085-P1-N1-H8
gggcttgaaagcttggagagcatcgtgcggataaaagaggccgaagcgagaatgtaccaaaacaaggcagatgaggcaaggagagaggcagaagggttccagaagatgatcaagacaaaggctgcacagatggaagaagagtatgcagaaaggattggcaagatttgcttgaatgaggcagaggaaaggaggaagaacaaatttgatgaactcaatgtcttgcaaaattcccactacgattacttcaacatgaaaagcagaatgcaagatgagatccatggtttgttgaagagaatggaagcaacaaagcaccaacgggtttaatatacatattttcttcttcttcttgtttaatgttttactgtctagaacactagtaaaatgtgtgtactttattgat

SEQ ID NO: 45259 - DNA, 387 bp, Glycine max
  Clone ID: LIB3139-085-P1-N1-H9
ccgaggagttaccctttcttttcttttttcttttttctctttcctcattctacttaaaactcccaccagtgatggcaggtttggctccagagggaacacaattcgatggtcgccaatatgatgctaagatgagtgaattgctttccactgatgggcaagaattcttcacctcttatgatgaagtgtatgacagctttgatgcaatgggattgcaagagaatcttctgcgaggcatatatgcttatggttttgagaggccttctgctatacagcaaaggggaattgttcctttctgcaaaggactggatgtgattcaacaggctcagtctggaacaggaaagacagcaacattttgttctggaattttgcagcagcttgattatggat

SEQ ID NO: 45260 - DNA, 249 bp, Glycine max
  Clone ID: LIB3139-086-P1-N1-A1
tccccaaactggcttgaagatggctgcaacattcattggtaactctacctccattcaggaaatgttccgtagagtgagtgagcaattcactgctatgtttaggaggaaggctttcttgcattggtataccggggaaggcatggacgagatggagttcacagaggctgagagcaacatgaacgatcttgggtcggagtatcagcagtaccaggatgccactgctgatgaggatgagtatgaagaggaaga

SEQ ID NO: 45261 - DNA, 406 bp, Glycine max
  unsure at all n locations
  Clone ID: LIB3139-086-P1-N1-A10
gcagacttaacaacagcacaaagcgggttactgtctgttcaagctaccatctctctctctctttcttagtgcctccttgccagaagttaaaatggcccaagaaactttcctattcacatctgaatcagtgaacgaggggcaccctgacaagctctgtgaccagatctccgatgctgtgctcgatgcatgcttggagcaggaccctgacagcaaggttgcctgtgaaacctgcaccaagaccaacatggtgatggttttcggagagatcacaaccaaggccaacgtggactatgagaagattgtgcgtgacacatgcaggaacattnggtttgtctctgatgatgttggtcttgatgctgacaactgcaaggtcctcgtcaacattgagcaacagagtcctgatatt

SEQ ID NO: 45262 - DNA, 387 bp, Glycine max
  Clone ID: LIB3139-086-P1-N1-A11
aagcgggtaactgactgtggaagcgtccatctctctctctctttcttagtgcctccttgccagaagttaaaatggcccaagaaactttcctattcacatctgaatcagtgaacgaggggcaccctgacaagctctgtgaccagatctccgatgctgtgctcgatgcatgcttggagcaggaccctgacagcaaggttgcctgtgaaacctgcaccaagaccaacatggtgatggttttcggagagatcacaaccaaggccaacgtggactatgagaagattgtgcgtgacacatgcaggaacattggttttgtctctgatgatgttggtcttgatgctgacaactgcaaggtcctcgtcaacatttgagcaacagagtcctgatatt

SEQ ID NO: 45263 - DNA, 408 bp, Glycine max
  Clone ID: LIB3139-086-P1-N1-A12
ggcagaaatgataaacagtctttgtggtggtgatgaaaaattgatgcgtgaaaggacgcacctgctgttggcttgttgttcaaggatggcaatttgtaagaaagatgtttggagagttgaatgtggaatcccttctggatttccgctcacagttatttgcaatagcatttttaatgagatgctcattagatatagctatgaaaaattactgcgccaggctaaagctccaagtatgtttttacaatccttcaaaaattttgtttctttgtgtgtgtatggtgatgataacttaattagtgttcatgaatatgtcaagccttactttagtggttctaaattgaaaagctttctagctagtcataacatcaccattactgatggtattgacaaaactagtgcaactttgca

SEQ ID NO: 45264 - DNA, 399 bp, Glycine max
  Clone ID: LIB3139-086-P1-N1-A3
cgtctgcgtacgctgtcctaagctgtgtgtgcgcacacattcgtgttttggtgatattacggaattggtttgatttatattgttaaacatgggcagaagacagaataaatatcaacaatacacatccgaggatctacctgaaagaggacccgtggagagcctgatctactggcgcgattccaagaaatccggtccagtgttcggaggagtactcgtcgttctactcgctcttacatatttctctctaatcagtgttgtagcttacgtttcactcatcacccttggcataactttagcgtttagaatttacaaaagtattgtacaagcagttcaaaagactggcgatggacattcattcaaagaatatctggaactcgatgtgtctctaccccaagaaaa

SEQ ID NO: 45265 - DNA, 401 bp, Glycine max
  Clone ID: LIB3139-086-P1-N1-A4
atgatagcgaaaaccaaaaaacaagtgtcatcaccttcttcttcttctttccctgattctgttggttccatctcttcattcataccttgatccgtgatctcccaatttctcacttgtatgaagaaagaatagataagtaatggcaggagcagaagcaagggctctgtggcagagaactgctaatcgttgctttgtccaagaagatgcaaaaagagctcccaagttggcttgttgccaatcttcatgtgcaacatcaaaatcagttgatactggacctgccagtacagcagatgaatctgatcataatacagttaatgttacccattttaacaggaaatcgtcaatttctaatctatcatcagactgtaggggtggttgcattcacaacctaattatgggta

SEQ ID NO: 45266 - DNA, 329 bp, Glycine max
  Clone ID: LIB3139-086-P1-N1-A5
atccaacccgttcttgatttggaaggtgattccgggaaggaattgttagggggctgctgaggctgttcatacctatctttggggggtgaattgccactctgataagacgaagaagcaccggttgaggtgagttgtgtgttgttgagctgctctgctcttgtgtgggacatgtgcaggcagtctgacgggctgaggcgatttatgtcgcatgaaatagcagtctgtcctgcatacagaataattgtcaaatacgcaaggtaccatacaccagaatctaattctatctatcatagactgtggtgtgttgattccacctaatatggttaaag

SEQ ID NO: 45267 - DNA, 404 bp, Glycine max
  Clone ID: LIB3139-086-P1-N1-A7
gagaaggtttttcattttattcatgatcaagtttattatggggacggcttatcataaaagagttgaaccttggacttttatacaaaaccttggtgaggctgtttttatacctgccgggtgtccccatctagagcaaccttaatgcacgacctcgagccgcaccattctttcttctcctttcgaagcactgccaaataaaaatggagtggcctgcgtgtacggacgaatacgaaaagctcataattcggatgaacactcccagggttgtcattgacaattccgttttctcctcagctacgctagtcaaggttgacagcgccagaaggcatggtattctattggatgctgtagaagtgctagctgacctgaacctttcaattaagaaagcgtatatttctgctgat

SEQ ID NO: 45268 - DNA, 383 bp, Glycine max
  Clone ID: LIB3139-086-P1-N1-A8
ccacctctgaactctctctctcatctataagtcaacatggctcatcatgaagattcaagtgcatggaattcgagtaaacctcaccctaagctcaatgaaagaattctgtcttctctgtcacggagaactgttgctgctcacccctggcacgacttagagattgggccaggagctccagcagttttcaactgtgtggttgaaattggcaaaggaagtaaggttaagtatgagctggacaagacaagtggacttataaaggttgatcgtattctttactcatcagtagtctacccacacaactatggttttatcccaagaaccatttgtgaagacagtgatcctaatgacgtgctggttctaatgcaggaacccgtgcttcctgg

SEQ ID NO: 45269 - DNA, 316 bp, Glycine max
  Clone ID: LIB3139-086-P1-N1-A9
ccacctctcaattctatctttgatctataaaccaacacggctggtgatgatttattcaagtgcatggaattcgagtaaacctcaccctaagctcaatgaaagaattctgtcttctctgtcacggagaactgttgctgctcacccctggcacgacttatagattgggccaggagctccagcagttttcaactgtgtggttgaaattggcataggaagtaaggttaagtattagctgtacaagacaagtggactcataaaggttgattcgattctttactcatcacgaagtcaacccaccacaactattgtatttatc

SEQ ID NO: 45270 - DNA, 402 bp, Glycine max
  Clone ID: LIB3139-086-P1-N1-B12
gtccctttgaagaaaccaacctagttacttggagacaccgtggaccaaaggaaagcgttctaagcgtagccgcatggagcagcaactgcaacactcttcatgcaccgaggaagagtacctcgctctctgtctcatcatgctcgctcacggcggcgccggcggtgtccccgacgccaagcctgctgtctccgacaacaattccgtgccgatacccgccgacaaactgagctacaaatgttcggtctgcaacaaagccttctcctcttaccaagcactcggtggacacaaggccagccaccggaagctcggcggcgagcaccactcgacctgcttcgccgtgacaacgagttcggcgtcgaacggcggtgctaggacccacgagtgctccatctgccaaaagac

SEQ ID NO: 45271 - DNA, 266 bp, Glycine max
  Clone ID: LIB3139-086-P1-N1-B2
ccattctgcgtagtgatctattggcaaattttttgacagagggcaattttagagcaagtgttgatttgcagcgcactcatcgtattaaaggaatgattaaaatggtggccacagttggtattcctgagaatacaggtatagcattggcctgtgctatgaatagttcttttagggggcgcgccagttctgatatttacaccatctgctctcaagactgtgaattatggaatcctgcttgcacaaaagcaatgactatgtcatttaat

SEQ ID NO: 45272 - DNA, 413 bp, Glycine max
  unsure at all n locations
  Clone ID: LIB3139-086-P1-N1-B3
ctcgagccgctctgacaccatcgacaacgtcaaggccaagatccaggacaaggaaggaatccccccggaccagcaacgtctcattttcgccggaaagcaacttgaggacggccgtacccttgctgactacaacattcagaaggagagtactcttcacctcgtcctccgtctccgtggtggcatgcagatcttcgttaagacactcaccggcaagaccataaccctagaggttgaaagctccgacaccatcgataacgtcaaggccaagatccaggacaaggagggtatccccccggaccagcaacgtctcatcttcgccggaaagcagctcgaggacggncgcaccctcgccgactacaacattcagaaggaatcaacccttcacctcgtcctccgtctccgtggtggcatgc

SEQ ID NO: 45273 - DNA, 361 bp, Glycine max
  Clone ID: LIB3139-086-P1-N1-B5
gagaaacatggcttccttaagctccttagagctgctccttgcagctctaattctatcccctcaaggtcttgcaaactatgagaatcccccagtgtacaagcctcccactgagaaaccaccagattataagcccccaggtgagaagcctactgtttacaaacctccaggtgacaaccccccaaattataagccttcactggagaagccaccagcgtaccagcccccagcagagaaacccgcagagcacaagcccccaagtgaaaaaccaccagtggaccagcccccagttgagaaaccaccagtgtacaagcccccaggtgagaaacccccaggttacaagcccccaggtgcaaaaccccca

SEQ ID NO: 45274 - DNA, 390 bp, Glycine max
  Clone ID: LIB3139-086-P1-N1-B6
tgaaattttgataaaccgcgttcacaggttgccgcaccttaaaaccggaaacaaaagcaatcgttacttgatttcaagaatttctcaatttcttcctacttctttgtgtacgatttcttaagggaaagaaaatcactctctgtgctggccacagacttcgtgaatcattttcttttccactcttagtttatttgctgaacactctcctatttgatataggacttcgtgtcagatttaaacttcttctgtttccttctcagttctctgtttaatttcaagttcaagctggtgaaatcttggattagtgctcccactctcctatctggtataggacttcgtgggtagacttttctatttctctcctttctttcactctcttcttctcactga

SEQ ID NO: 45275 - DNA, 406 bp, Glycine max
  Clone ID: LIB3139-086-P1-N1-B7
attttccctaaagaaggaagagtccctttaagttatgagaaaacatatgaaatatctcttggcattgctcggggtattgcatatttgcatgaaggttgtgatgtgcaaattctacattttgatatcaagccacacaatattcttctagatgagagcttcatcccaaaggtttcagattttggacttgcaaagctacatcctgtgaaagataggtctcttgttttacctgaagcaattggaactttgggctacatagctccagaattatactacaaaaatattggtggagtatcatataaggccgacgtttatagttttggaaagcttttgatggaaatggcaagtagaaggaggaactcagatcctcttccagatcaactttcaagcaatgattactttccgtttt

SEQ ID NO: 45276 - DNA, 410 bp, Glycine max
  Clone ID: LIB3139-086-P1-N1-B8
aaaaatccctcatttctcttttcgttctcttcaaaaccccgaaaccctaatttcctcaatcctggttttggaattcgacaatggagcagaagaggagcagcaagatgtacaacctgttcgtgaagcacttggacgggaaaaccctaaccctcctattcccctctccgatcctctacgcgagttccatcaaggatcgcctcttccaactcactggaatccccgcccaccaccagcgcctcgtcaccggctgtcgccacctcaacgatgacaaatccgctatccagtgctccccgggggacggtgacatgtttcccttcgtgcgcctactcctgcgccttaagggcggcaagggaggctttggctcgcttctccgtggcgccgccaccaaggccggccagaagaagaccaac

SEQ ID NO: 45277 - DNA, 409 bp, Glycine max
  Clone ID: LIB3139-086-P1-N1-C10
atcctatcctctgtcttttcgaagctttcatcgttcaacgaggttgtcaccatctcagtcatgggcctgctatcttgttttaggtctaccgtcctgagaaaatgttccaaaggaagctctggcatgtcaagattcctgtatacgaacaattttcaacgaaacttgatttcgtctggtggcaatgaatcgtattatgggtattttaacaggagatcatacacttcactttatatgggaactggaactgtgggtgggattacaagcgctagaatcagggtgccaaatgtaggatgtgaaggattcatgtgtctaagtcattttgtctattacttaaagaaattcaagattgatccaattctactagcacgattgttccaaattctggaattcagaatttaactactgagat

SEQ ID NO: 45278 - DNA, 408 bp, Glycine max
  Clone ID: LIB3139-086-P1-N1-C11
ccgtaagttcagtttcacgccgatcttcacagggatcagtatcaccactgcagaaatctgccagtgttagtgattggatgttggattccaaacaaatgtccaccaaagattctatcaccaacggtatctctgcatcatttcttacaactcaccttcaaaatcttttacagcaaacatctattcaacaagatcttataatgaatctgttaaatagcttgcaatctgctgaagcaattgaagtttcacagaatgggaagttgccaccattacctcgcagttcagaaatcaatggaagtgttgatacagcagcttcagagagggaacgtcttctgctgctcaaaatttcagagcttcagactcagatgatcactttgactggtgagctgacaactgagaagtaaaacacat

SEQ ID NO: 45279 - DNA, 399 bp, Glycine max
  unsure at all n locations
  Clone ID: LIB3139-086-P1-N1-C12
aacgccttctgttggaatcgtaccgactatgtcaggattcaggctatcggattaggagatcaaggaaaagatgatgagaaggtactgaacgagagagtccttgaatcgttaccgtttgggggaaaacggttactgcaggagacaaacggtaacagaattgagagcttcgtgcaacgtcttgttgctactgggaagacaagtcttccacctagtccgtgcaagcttccgccgtaagcctctggctaacggcgtttctttatttttaatatttttgacgcagtantgacttgtattcaaggttagattaggccgttattaatttaagtagaaataaggtgctcaagtttttattttaatttttttatgatttatatattttttataaaaattctattattt

SEQ ID NO: 45280 - DNA, 412 bp, Glycine max
  Clone ID: LIB3139-086-P1-N1-C2
attattccgtgcaaacacaacaacaacttcatcaccaacacgaagaacaagattagcgttatgggtctcttcctttctaggaatttggcttgcaaattcatatacccttttcttttttccaataaggtttcaaaggatttgttccccaagcagttggagaacatgatgtctctggtctctcctcgtactggcaggcatttgcagcgctatgacaaaggctgtcgccaagttgtgggatgcattccttacagatacaagaacaatggaacacaggataaggaattagaggttcttgtgattagtgctcagaagggtcatggaatgcagttcccaaagggtggttgggaaactgatgaatccatggaacaagctgctttaagggaaaccatagaagaagctggggttgttggca

SEQ ID NO: 45281 - DNA, 371 bp, Glycine max
  Clone ID: LIB3139-086-P1-N1-C3
ctcgagccgctttcctcgaggacctactcccaacctagagtagccagatgggaaagtaaaattaaaccttgctcatatatggatttctcggatataaaatgagccacttcaaaagtttattattttggtccaaaatactattaatctccataggctacatgggtccctaagtttgccaatagattgataagtcaagcattcctgggccattcatctattttcattgtaaaaaaaagtggaccttatatattcataacttgtttcgcaacacaagataagcaattagaggttcttgcgattagtgctcatacaggaaatggaatgcagtctctaacagtggttgggaaactagataaatacagggggcgggc

SEQ ID NO: 45282 - DNA, 326 bp, Glycine max
  Clone ID: LIB3139-086-P1-N1-C4
atgcggatgaggcgccactcgatgtttccatttgcctgcatgcctttggtattgtggggtgtggttcgtttagtggtgtcaagtcttgctaacgtaaaggtgcatgagtggtaatcgggatgttattgttgcacagctccatacttgcccatgcaacgcgtgacatgcatcctttacattgacaccttagcctccgtggattaggtgctaacaactggttcctgcgtagtctacctaccacacgggaatcatgtggatagacagacccattacatccacgcctatttggtgggcacactaggagacttcaaagaaccacacacgaa

SEQ ID NO: 45283 - DNA, 412 bp, Glycine max
  Clone ID: LIB3139-086-P1-N1-C5
gtttttgcaaaaatatttcatccatcatcaatttcttgggtgggtgatatacctcaaggcctaccaaaattttctgttccaaaatcttttgagtatgcacagtccttaattccaactgctcttctcataactggtgtggctatactggaatcagtgggaattgccaaggcattagcagcgaaaaatggatacgagttggattcaaatcaagagttgttcggtcttggtgtttccaatgttcttggttcatttttttcagcataccccacaacaggatccttttcaaggtcagctgtaaatcatgaaagcggtgcaaaatctggtgtatctgggatagttttaggaattataatgacctgtgcacttttgtttctaacaccattatttgagtacatacctcagtgcacccttg

SEQ ID NO: 45284 - DNA, 410 bp, Glycine max
  unsure at all n locations
  Clone ID: LIB3139-086-P1-N1-C6
gctgctagcatcatagcaatagcacgccattttcatctgcttgatcggatctgccaccgaacgaaccctaaacactcttccctctctctctcttcatttctcgttcgattaacatggcatctcatttactcaatcactcctccaagatgagaaatgcttccaagttgctgcaccacgagcgcgctcttttggttcgttggttttccggcgatgctcattcatccctcaaccggaaccgcgatgtgtggaaaactcaattccacgagtcttcagcaagaagcagtgtctttgaaccagcctcctgctttaataaacattcatttggcatgcagaagagaaacatcttcatggctaccattaaaaggggttccattatcgggtctgangtcaatggagagatttcacgaagt

SEQ ID NO: 45285 - DNA, 405 bp, Glycine max
  Clone ID: LIB3139-086-P1-N1-C7
cagacactttgtgttaacttatagaaaagaaaaattacatagtgattcgatcgacttatgttggcggaagtgaccgatgatagcgtaatttgcaaatcatatagtgatttgttgtgctggtgtgggcactatatttagccatgttaagttgaaacacgactttgtttaagttaatactaatttgttagaaagtgtttgttatttattatttggtaaggtaattggaagctgcattgtttctgtttcttttgttgttgctggtgatgacgtgtcatctttatagtctttgccttttccccacaccacagagtatagacccactgcgattatgatgcctccaatgatgcttcccaagtagaggtgttctcctagaaggaaggagcccaaagctgtaacaatgatcat

SEQ ID NO: 45286 - DNA, 409 bp, Glycine max
  Clone ID: LIB3139-086-P1-N1-C8
gtctagtcccttcttcctctatctctttggctattagcaaacactctcatatttggttgttctagttctcactaccatgtcaacccacattgaaagcctgtgggtgttggccttagcctcaaaatgcattcaagagaacattgcatggtcactcttgatcatcatggtcactctctggctcaccatgaccttcttctactggtctcaccctggtggtcctgcttggggcaaatactactactttaattactggaaaaaaaccacctcaaccaacacaaacatcaaccttaaaatgattatccctggtcctagaggctaccctttcattgggagtatgagtctcatgacatccctcgcacaccaccgtattgctgcggcgggggaagcatgcaacgccaccaggctcatg

SEQ ID NO: 45287 - DNA, 408 bp, Glycine max
  Clone ID: LIB3139-086-P1-N1-C9
atccgatcctctgtcctctcgaagctttcatcgttcaacatattctcaccatctcagtcatgggcctgctatcttgttttaggtctaccgtcctgagaaaatgttccaaaggaagctctggcatgtcaagattcctgtatacgaacaattttcaacgaaacttgatttcgtctggtggcaatgaatcgtattatgggtattttaacaggagatcatacacttcactttatatgggaactggaactgtgggtgggattacaagtgctagaatcagggtgccaaatgtaggatgtgaaggattcatgtgctcaagtcatctgtcaatcactcaaagaaattcaagattgatccattctactagcaagattgttccaaattctgaaattcagaatataactactgagatgg

SEQ ID NO: 45288 - DNA, 237 bp, Glycine max
  Clone ID: LIB3139-086-P1-N1-D1
gctaaaggttgctcacccctacttttctttcaagctctattttaatcttcatcaaaattaactattgcttccggaaagggtttgggtggtgaaatcacttaccctaccaagatcactactaccaagcccctatctttgcttggccatggaatcaccgacatggagattcactttatccatgtgaaattctattcaatcggggtttatttggagccagaagtagtaggccacttggac

SEQ ID NO: 45289 - DNA, 342 bp, Glycine max
  unsure at all n locations
  Clone ID: LIB3139-086-P1-N1-D10
aattcacgatttttacttacactnaaancaggagaatcggtctgtgacttataccatcatcatggccatgttgaaaatgatgaatcatggcatccgctgccttaaaaattgttcagaagcttgtacactgtaacacgtatgttaagattcacagcaccttttccacttcttgcatatcccgtgtaccttgtaagttgttgtgctttgaccttaatttgaacatcaattactcttcatccttgttagaaaaaattacatggtgtttgtttgtcattttaatccaatcgttgttggattcttgtcaagatctgttctcactttgatcctagcagtgacttgttt

SEQ ID NO: 45290 - DNA, 406 bp, Glycine max
  Clone ID: LIB3139-086-P1-N1-D11
cagagcattttgatgcatgtactgttgcaaaatcagaaccacgggcctgggaattgatcttcccaatagaggtatgtggtcctaataatggttttgaaatgtggagttctgagtgggcaaatcaaacttcatggcatttgagtttccttattgacaatcccaaacagtctacagtttttgatattctcttgggaatctctcaagattttgaaattgctggtaatactcttatgccagctttttctgttccacaggctactgccagatcttctgaaaatgcggaatcctctgcatgatctggaatttatgttttctttcgcttgttcgttcgtttaattcaataaaggaaattgggcatgaccctcttgttgagtatgctctgcctatttgaaaattttcacacctc

SEQ ID NO: 45291 - DNA, 414 bp, Glycine max
  Clone ID: LIB3139-086-P1-N1-D5
tgaaattgaagctaattaacatttagaaggagatttggctcgtgcaaaggaagaaacatctaagctttctcaactgttgaaagatgcagactgcagagcaaatgtattgatcagtgaaaaagaagaaattttagcaaagctttctcaatctgagaaggtacaatcggaatggagaagtagagtaagcaagcttgaagaagacaattccagattgaggcgagctcttgagcagagtatgacacggttaaatagaatgtcagtggattctgattttcttgttgacaggcgcattgtgataaaattactgatcacttatttccagagaaaccacagcaaagaggttttggatctaatggttcgcatgctgggattctctaccgaggacaaacaaagaataggtgttgctcaacaagg

SEQ ID NO: 45292 - DNA, 413 bp, Glycine max
  Clone ID: LIB3139-086-P1-N1-D6
tattgatgggcatgttaaaccagtggttggaaggaaaatcaattggttgaaagctggacttatagaatcatggtttgtgataactgttagcccaaactatgctaaagaactggtgtcaggtccagacaagggagtggaattggacaacatccttcgcaaaattgatgatgatggtcgtttggttggaattgtgaatggcatggatgttcaggagtggaatccaaccactgacaaatatatagctgtcaaatacgatgtttcaacagtattggaagcaaaggctcttttgaaagaagccctccaagcagaagttggattgccggtcgacagaaatattcctcttattggtttcattggtaggcttgaagagcaaaaaggttctgatattcttgcagaagctattccccaattta

SEQ ID NO: 45293 - DNA, 408 bp, Glycine max
  Clone ID: LIB3139-086-P1-N1-D7
ccgggttctccgtaactcacagtcagttcgccgaatatgatgaggaaattaatgaggaggatgagagactaatggaagcatttgcattgaaggagcctggtcagcagaaaacacttgctgacctcattgtccaaagaataaaagaaaaggatgcgtctgttgcttcagaaaatcgacccgttccaaaattggataactccataattgacatatacaagggggttgggactcatctcagcagatatacaataggcaaaatacccaaggcattcaaacacattccctctatgcaactttgggaggaggtcttgtatataaccgaacctgagaattggtctccaaatgctctttatcaagccactaggatttttgcttctaattttggtgcaaaaaaggcagagcgcttct

SEQ ID NO: 45294 - DNA, 406 bp, Glycine max
  Clone ID: LIB3139-086-P1-N1-D8
ctgttggcttgttgtttacgggtggcaatttgtaagaaagatggtgggagagttgaatgtggaatcccttctggatttcccctcacagatattcgcaatagcatttttaacgagatgctcattagatatagctatgaaaaattactgcgccaggctaaagctccaagtatgtttctacaatccttcaaaaattatgtttctttgtgtgtgtatggtgatgataacttaactagtgttcatgaatatgtcaagccttactttagtggttctaaattgaaaagctttctagctggtcataatatcaccattactgatggtattgacacaactagtgcaactctgcaatttagaaagctagcagattgtcattttctcaagagaaactttaagcagctgtctaatgttt

SEQ ID NO: 45295 - DNA, 196 bp, Glycine max
  Clone ID: LIB3139-086-P1-N1-D9
tattttaatgcttttatttgtagatcggatcacactgatacggggtgcttctattagttactcgtctacagtttctgcttacttgaaacgttgtctaatggacaatattgacatgactgcccatgcagtagtcaaaaggagttattgacccttattggaacaagtttttttaacactcattaacactacaaagcat

SEQ ID NO: 45296 - DNA, 412 bp, Glycine max
  Clone ID: LIB3139-086-P1-N1-E1
gttgtattgaaattttcacaagaggaatttcttacagcttggtcaactcaggtgcgtcctgcaacaactctgttggctgatgggtgtccatatttgtatgcaatggtgcatgatagttcagtgtctacaataccaggtgattttgtcattggtgtcaagttgacaaccataaacaatatgtgtgcatatgggctcaatcctggtatttcaggttctcgtcttttgggcaccattcctcagtccatttcacagcaaactgtttggaatcaaatggcaacagtgagaacaccattgaattttgattctagcaagcagagcttttgtcagttttctattgaccttctcggtggaggaatcttagtggacaaaactggagattggatcacacttatacaaaattctccaattagta

SEQ ID NO: 45297 - DNA, 394 bp, Glycine max
  Clone ID: LIB3139-086-P1-N1-E10
caccttcgtaggacccttatctctctctctctctatctctcccgaattattgttcgttcgacccttttacttagtattccctgtttccggtattcgctcccttttttctgcattctggttttacttagatctctgtcccgcaccagatctggtgcagggtgagagggttgggttcattaattttgtatcaatcttccttctgagcggtaggcgtggggataccagagtcttttcgggaagcaagagagggttctctccgttttcaatagatctctcactgtcttcttttgagggggaagccggggcctcggcctcggcggctttcaaagcccccaccttcacagccctatcaacaaaaaaccctaacgctatttttttcttcattttctaattc

SEQ ID NO: 45298 - DNA, 413 bp, Glycine max
  Clone ID: LIB3139-086-P1-N1-E12
cggctcgaggtgaagatggggtcagaggtgtctaaacagatggagcgaagaaagacaatccagacagagaagaagagtctgtccgatctgaaaagcagcggagaagactaccctggctccgactaccgtccccaagacagaaaaaactggatgtcccatctcgaccctcagaaactccgcatcaaccaaatcgtctggcccggcacccacgactccgcaaccaacaaaattggcatccctctcctcactcgccccttcgcccagtgccaatccctctccatctaccgccagctctccctcggcacccgcgtcctcgacatccgcgtccaagaacaccgccgcgtctgccacggtatcctcctcacctacggcgttgacctcgtcctcaacgacgtcaagaagttcctttccga

SEQ ID NO: 45299 - DNA, 359 bp, Glycine max
  Clone ID: LIB3139-086-P1-N1-E2
aaaatagcacgcctaaagctactgcaatgcatgtgggagctatagaaattatcattgatagttacgaaagtcctgactgcaacatatttggcgcaatgctgttggttgatacttatcataccaatcctgaaaatgcagttcgtagtatttatgacgcgcctttcagaggcggaaggcccattccggtggttacattttcgaataccattgggcagattgaaccagacatgaattcaaggtctcagcttttgagcaccactaccaatggtgattttgttcaaggaaaagatctcgcaatggttaaagataatgaaccatgtgctgctgttggcttgacatcaagttacactccaactcca

SEQ ID NO: 45300 - DNA, 411 bp, Glycine max
  Clone ID: LIB3139-086-P1-N1-E4
aaacaaactgtccattattatcaccactatttagatgaccagtttgtgtctagtgtttgctggagaaagaaatctaacatgcttgttgctgccaactcagttggaattgtgaaactattgcagatggtctgacacaaaagagaaaatatttggttaacatttaagcctgaaaagctattcatttcctgactcgataatattttgatttagtatacctgtcagaagactagttctttattcaggcttcaatgattaatagggtataaagcttaaatgggttcaccatttggcattgcttctgaggcaagcatcaatgtacaattgtgaaccaaagtaagctgaacaagaaatgtacatagcatgtacaaatgtaggcttttgaactgaagcactgatgaagctggagcatgc

SEQ ID NO: 45301 - DNA, 399 bp, Glycine max
  Clone ID: LIB3139-086-P1-N1-E5
aaacatactgtccattattatcaccactatttagatgaccagtttggggctagtgtttgctggagaaagaaatctaacatgcttgttgctgacaactcagttggaattgcgcaactatagcagatcgtgtgacacaaaagagaaaatatttggataacatttaagcctgaaaagctattcatttcctgactcgataatattttgatttagtatacctgtcataagactagatctatattgatgcttgaatgattaatagggtataaagctgacatgggaacaccatctggcattgcttctgaggcaagcatcaatgtacaattgcgaaccaaaggacgctggacaagaaatgaacatagcatgctcacatgtaagcggatgaactgaagcactgatgat

SEQ ID NO: 45302 - DNA, 397 bp, Glycine max
  Clone ID: LIB3139-086-P1-N1-E7
tgaatatgaatcagggtatactaacattttggcaaatcattatacatctcatcctgaggtttctcgtcaggttgagatattcattcggaagatgaattcaattcctgctttcactgccaacatgacagtggagtctttcaatagacgaaccttgtcttaaattcaacaatcaacttgtgtctaagtactggtattttttgctggccactatcagctatgatgtatatatcttgcatcttcaatctcaggaatttggtcagctggtaaggctgttacgactggacacattttgtatccatacattggtaatggatggcttggatttgaaaaatgtcacattattttttttcaaataattgaatagtgaggtggaattttgggcgtgcaaaatataaaa

SEQ ID NO: 45303 - DNA, 412 bp, Glycine max
  Clone ID: LIB3139-086-P1-N1-E8
aactttccctttaacccctttccaattgggcagattttctaaaagcaaaggaatcaaacctctctctcacacactcactcccacacccttccctgcaactgcaacaccaaatcatcatttcagtcacacctaaaatcccaaaatactatcaccaaattttcgtaaccccatcaactcaaattcacaaacccccaatataatgttattagaactccgatgacacccttcaattaactctctcacattcaacagtgtgagagagggcataacctgaaccatcccatggagattcaacaaagcttgaagctcacaatccacaagaaatggccatcatcacccaaaaaaccacctaaagaaacagaaccaataaccaccaccccaactactccaaagctgaaatggaagaaaatct

SEQ ID NO: 45304 - DNA, 414 bp, Glycine max
  Clone ID: LIB3139-086-P1-N1-F1
cagagttataggtccagcaccaaccctcgttactcctgaaagacctgcattgttcaaaaggattggagtagcagattacctcaatggattccttaaacgtgagctaaaagggaaatcatacatggatgtcattaggatccaaaacgagattggtaaataatttatgttcataggactaagcctgaaattgaatgatagaacaagtacacagaacaataatgtcacagatggtagccaatgtgcaaccattgtagcaataaaagttaaatcactgttcatggtatcaagctgaacatatataccttggaagctaatgtgggttagtaaaaatatgtcatggaacatcaaatgcatgttcttgaactaattgtctgaattgagctataggcgtgtctcaaacaatttagtatctgt

SEQ ID NO: 45305 - DNA, 411 bp, Glycine max
  Clone ID: LIB3139-086-P1-N1-F10
agcttatcttgtcaatctcgtaaatgtgttacgagaattgtatttgcacagtccagaggaagctcgccaattgagaaggaaagctctctctcgtattgaatggctgcaaaaagctgatgtgcctaccatagcacagattgaagagttccattcgatgcagaggatgatgaatgctcctgattcaaatgataatattgatctactgttgagcattgatttgttgggtttacaaggagcaggtaaagcttttccaaacaagattgtttttgatgataagcttgtgttggctaacacacaagaattctttgatggaaattttccagtggattcttggttaccaatttttgtgaattgtctttatccctgaagtcaattaccttcagaagctgtcgttgtaaatgttacatgtgg

SEQ ID NO: 45306 - DNA, 409 bp, Glycine max
  Clone ID: LIB3139-086-P1-N1-F11
cgagtctggatgcccttgacaactcacgccatcacgactgttccttccggactttctgcccctcgtactcgtcacctccactcatcttacacacgacacttttcttaatcctccctggcgcctgcattttctcctaatgactcccatgcagtagacgtttctcatgagctggccttgacttctctcaacttcattctttgtttctttctcttctaccttgtccttcctttcttcttcgccactttctcttagacctgctgcagggcagctcggcgactaccaactaactttcactcaccaccacaccaactttaatacaactgtccatcactactaataccctttcgacttcgaccatgttattcaataccgccctgttgggcggccttctcctcgctggccatgcctc

SEQ ID NO: 45307 - DNA, 182 bp, Glycine max
  Clone ID: LIB3139-086-P1-N1-F12
catgatattactctaatcatgtctgcttcagagtcagcatgttttcacatgcttctgctaatgatcaaaatccagttatccatcttgtttgaaatgcagaaattcatgattaattttaactgttttatatttttgtttacaaaattaattggtttgggaattaaaatttggtggttggctga

SEQ ID NO: 45308 - DNA, 411 bp, Glycine max
  Clone ID: LIB3139-086-P1-N1-F4
ctcgagccgctacgtttcatgatttctaacccttccttagcttaatagtcatctatctaaaatatcataatatcttctactagctagttttatttttattatcacaataaaatctatctgcaatatattgttatttttattttctgagaaatttgtgtctagttataagtgtctgggtcctggtcctgcctattgtgtcaattaaattgagaagggttgtattgtattgaatcatatatcgtatcatataaacatggcttgttcaagtggaacatcttcagggtcattatctctgcttcagaactctggttctgaggaagatttgcaggcgatgatggaagatcagagaaagaggaagagaatgatatcaaaccgcgaatctgcacgccgatctcgcatgaggaagcagaa

SEQ ID NO: 45309 - DNA, 325 bp, Glycine max
  Clone ID: LIB3139-086-P1-N1-F5
ctcgagccgcatcgtgttacgtttactaacccatccttagctccgcaggcctgtatctagaacatcccaatatatgctactagctcgaataatggttattatcacagtagaacctagcggccaaatctagctatatggattttgagagaacttatgtgacatagcctaacagtccacagtcctggacctgcctatggggaccactcaagagagaggggttgctgggaatactctcatgcctgctattattgatacacaggctactgacaggtcacatgaaaatgctcattacttttggtgaacaactatgtgtgtgaggattcat

SEQ ID NO: 45310 - DNA, 411 bp, Glycine max
  Clone ID: LIB3139-086-P1-N1-F8
ggaagagagataccatttctcttgccaattcacagctgatggtatgggccatgaaccacacagatttcattatcaccagtaccttccaggagattgctggaagcaaggacactgttggacagtatgagtctcacacagcctttacccttcctggactctaccgtgttgtgcacggcattgatgtctttgatccaaaattcaacattgtctcccctggagctgatcaaaccatttacttcccccccaccgaaactagccgtaggttgacctccttccaccccgaaatcgaagaacttctttacagctctgtggagaatgaagaacacatatgcgtgctgaaggaccgcagcaagccgattatcttcaccatggcaaggttggaccgtgtgaagaacatcacaggactcgtgg

SEQ ID NO: 45311 - DNA, 413 bp, Glycine max
  Clone ID: LIB3139-086-P1-N1-G1
ctagaaaagtgtgttccaacattggttggcatagaatgtcccaaagatgaaaaacttccccgtcgcaaaatttttgataaacccaagacgcgctgcttcaccatacttcctatggaatttaatctagtggtgcgtcaaaaattcttgaattttgtgcgattcattatgaagaaaagggacaaattgagttgccaggttggaatcaatccatattctatggagtggactggtttggcaaatagactgttgagcaagggaaatgacattttgtgttgtgactatgctagttttgatggtctgataactaagcaagtcatgagcaagatggcagaaatgataaacagtctttgtggtggagatgagaaactgatgcgtgagagaacgcatcttctgttagcttgttgctccaggat

SEQ ID NO: 45312 - DNA, 98 bp, Glycine max
  Clone ID: LIB3139-086-P1-N1-G11
cagataccggatccagaacactcggaagctcaacattcagctcgtaagtcaccagctgtttcttaatccaaatttgaggttgggggagatgccaatta

SEQ ID NO: 45313 - DNA, 411 bp, Glycine max
  Clone ID: LIB3139-086-P1-N1-G12
tataacttctttcaccccaatgaacgaaagcccgagacaaaagacgcttgtgctgcatcaaaatgcttaccaatgcctttagcagcacaagggggagctacttaaattcatggaaggcagggcttaaccccttaagggaggaaggaaccattgggaggctgtagccgaacttgcaataattttgggggtggctttggtggggctttaagcattgggggtctaccatgtgagggtcattcgccgggccaccatgagtaaagccaaagccaatggtgctgttcaaccagatgctattgcttgatgtgccttgcctttaattctataatgattacttcaaaatctcaccctagatttagaacaaggcagtgtaatgtaatacccctgaactttaattcttctaatatcttacta

SEQ ID NO: 45314 - DNA, 415 bp, Glycine max
  Clone ID: LIB3139-086-P1-N1-G2
ctctacaaaagctcaatttgttagtggaaaaaccttcaaatatgatataattggtgctggttcacattcttcagaagattttcctgaaaaggaagatcaagaaaaacccaaaaagattgatgccagattgagacaaagaatagatcctcaatacaatgaggttcaggctcagatggaaacaaatttgtttaaattgtctcttgatgatgttgaaactcctaaaggttccatgttggatcttaaaatttctcaatctaaaattgcacttcccaagaacacagttggaggaaccattctgcgtagtgatttattggcaaattttttgacagagggcaattttagagcaagtgttgatttgcagcgcactcatcgtattagaggaatgattaaaatggtggccacagttggtattcct

SEQ ID NO: 45315 - DNA, 356 bp, Glycine max
  Clone ID: LIB3139-086-P1-N1-G3
tttcttcgacgaataaacaccacaaaaatgttacgattttccccgatttcgctgcccggggatcgttttactaggagtggcatgagctcccatttctcgcaaagacataaagagttctctacaacacccaagttgtgcacaagggagggatggggtgcttcactgtattgaagagcaaaaagaaagggtctgatccaattacatatgtaaaacgtgtaagccatagtgagaacgtacctacagtactgcctgaacctaaaactcatactcgttcactccagtctgctcctcctagttttaggaccagagtgaaacccattcaacccattaataaagtcagtaccaatagagcgcga

SEQ ID NO: 45316 - DNA, 392 bp, Glycine max
  Clone ID: LIB3139-086-P1-N1-G4
gaaaatgctggcttttttttttttttttggtttaaagaagcttgccatggtttttttcccgaccttttggttttgtttttgggggggttttgaaaaaaatttgaagagatttattagcactttccagcaataacacgattagcctctcttctcagtttcaattcgttttcaattcttgccgcatcgatttccaaccctaatattctaccatgactgagtactgggtcagccagggcaacaaatggtgcgacttttgcaaaatttatatatcaaacaaccctggaagcataaggaatcatgagcttggccaacgtcacaaagataatgtttccaagaggttgtctgctatgagaaaagagaatattgctaaggagaaagaacagaaagaaact

SEQ ID NO: 45317 - DNA, 297 bp, Glycine max
  Clone ID: LIB3139-086-P1-N1-G5
aaaattgctgcctctctctttctatctcgtctagagaagtctgggatggtttttttcccgaactctttgctctgctttttggcgggttttgaaaaaaattggaagagatttattagcactttccagcactaacacgattagcctctcttgtcagtttcaattcgttttcaattcttgccgcatcgatttccaaccctaatattctaccatgactgagtactgcgtcagccagggcaacaaatggtgcgacttttgcaaaatctatatatcaaacaaccctggaagcataaggaatca

SEQ ID NO: 45318 - DNA, 411 bp, Glycine max
  Clone ID: LIB3139-086-P1-N1-H1
gttttgtgggtggctcctgaagacaaggcgagtttatggtcacaacttcattatgtttcgtgtaataatctggaaatgcaagaagcttatcttgtcaatctcgtaaatgtgttacgagaattgtatttgcacagtccagaggaagctcgccaattgagaaggaaagctctctctcgtattgaatggctgcaaaaagctgatgtgcctaccatagcacagattgaagagttccattcgatgcagaggatgatgaatgctcctgattcaaatgataatattgatttactgttgagcattgatttgttgggtttacaaggagcaggtaaagcttttccaaacaaaattgtttttgatgataagcttgtgttggctaacacacaagaattctttgatggaaattttccagtggat

SEQ ID NO: 45319 - DNA, 193 bp, Glycine max
  Clone ID: LIB3139-086-P1-N1-H10
cttacacacactgttttttggcagcgcgactcgacttgggcgggaccctttggtgatctgtgagacggtcttgatagccccctctctctctgcttgctgcaaatcaaacgatttttcttcacattgaaaccttgtttgctttaaggacccccttttttctaaaagggaatttgaaatttttcggctttttttt

SEQ ID NO: 45320 - DNA, 409 bp, Glycine max
  unsure at all n locations
  Clone ID: LIB3139-086-P1-N1-H12
ccccgaccgtagcttnggattgggattcggccacggacatcatagagcttgtagaaaccaacccgcgatctccagcacctgggttgatgaagccaaggacatatggggatccagtggggcaatagactacaaggcctgcgagacccacttatttcgacagtggagccgagactacatagctcgacctgcagcctacataagaacggaagacaggaagtaaaagcacatgaatctagtgcaccaataatcatatcatcatacagtcccttgtgtggaactaaaaggtaacagtgagaacaccattgtatataccaactaacgagcagagggtttggcacaaatctatggaccttctcggtggaggaatcttagtggacaaaaccggggattggatcacacttatacaaaa

SEQ ID NO: 45321 - DNA, 390 bp, Glycine max
  unsure at all n locations
  Clone ID: LIB3139-086-P1-N1-H2
cactgtgttcctgtttttgttcttcgatggcggcaacctcaacatcactggcttctcaactctacattggcctgcgccgtccctgcctcaagctcgattctttcaattctcaatctttctctctcttcgaccctaatcttcgcctatgcctgtgtccacccaaaccctcacgcgccgtcatcgccatggccggcaccgggaagttctttgttggtggcaactggaagtgtaacggaacaaaagactcaatcagcaagctctgtgctgacttgaacaatgcaanaatggagcctgatggtgatgttgtcgttgcacctnccttactctacatcgatcaagtgaaaaactcactcactgagcggattgaaatatctgcccagaattcttggg

SEQ ID NO: 45322 - DNA, 413 bp, Glycine max
  Clone ID: LIB3139-086-P1-N1-H3
gttgggggttgttttaatttttttgcccgaaggagaatatttttttttttttaacggaaaaacgggcctacaagtttccatttttaagacccctttggagagattaatggctaatggttcaagatcaactattcattactgatatattgcatgggggttgtatctgtgagtccaaggtgaatatcagatacaaagagagaaccacattgagctgaatttcaagaatttcctaaatcatccatggagcctgttcttcttccaagtctagtaataatgcttggtcttggtctgtgctttgaatcacttcctagtgttagggctcagtctactactacttctcccgggtcatcttcaacaagggaggaagcaaaggctcttgatgcacttctcaacaatttgcttacaaggacttg

SEQ ID NO: 45323 - DNA, 416 bp, Glycine max
  Clone ID: LIB3139-086-P1-N1-H4
gctgcttttattctttttctcttaggagaatatttttctttttggtaggccatatcgtgcctacaagtttccatttctaacacccctttggagagatttattgcttattgttcactatcaactagtcattactgatttatggcgtaggagacgtttgtgtgcttccaacgtgcatagcattattcatagagagagcctcgttgagcttaatttcaagaatgccctaaatcattcatgtagcctgttttcctttctagtcctagtaataaaccattggtgctgttcaaccagatgctaacgcttgatgtgccttgcctttaattctatcatgatttcttgaaaatctcaccctaaatttagaacaaggcagtgtaatgtaatacccctgaacttttattcctctaatatcttactag

SEQ ID NO: 45324 - DNA, 340 bp, Glycine max
  Clone ID: LIB3139-086-P1-N1-H5
cctgctactaacctattttattaacgacaatatttctcttttgggtagagttattcttgcctacaattttccattcttaataccccttttgagagattcattgcttattgttcagtatcaactattcattactgatatattgcattggggtggcatctttgagaccaaggtgtatatcatatacaaagagagaaccacattgagctgaatttcaagaatttcctaaatcatccatggagcctgttcttttatccaagtctagttataatgcttgctctttgtttcttgctttgaattactttcttatttttaaggtctacatttatatttactacttttt

SEQ ID NO: 45325 - DNA, 224 bp, Glycine max
  Clone ID: LIB3139-086-P1-N1-H6
ctgatcatggtgtgtgctacgggaatcataggacactgattgacttagaggttatgtgcttatgaacaatctacggtggattactttggcttacttgactgcagccatatactggtgggacgaccagcgtgaggtgcccatgtggtttagaggtgtatcctggataagaaggcagagatcaaggctagtaacatggactgatctaaaaacagagatactggaca

SEQ ID NO: 45326 - DNA, 411 bp, Glycine max
  Clone ID: LIB3139-086-P1-N1-H7
ctgcactcgatcaaacacaaaatggaaaagaatgtggggattctcgccattgacatctacttccctcccgcttgcgttcagcaggaagcattggagactcatgatggtgccagtaaagggaagtataccattggacttggccaagactgcatgtcattctgtaccgaagtagaagatgtcatctcaatgagtttgacagtggttacttctcttcttgagaagtatgggattgatcctaaacaaatcggtcgtctggaagttggaagcgagaccgtgatagacaaaagcaaatccatcaagacattcctgatgcagatcttcgagaaatatggaaatactgacattgagggtgttgattcaactaatgcatgctatggaggaactgctgctctgtttaattgtgtcaattgg

SEQ ID NO: 45327 - DNA, 413 bp, Glycine max
  unsure at all n locations
  Clone ID: LIB3139-087-P1-N1-A11
attggagttggtgttgtttctctgatcctcttatacttgtttttgtgtcgtcgttcctcgaagagtggcgaagagggtcctcccacagttgcaggtgcgtggccaataattggtcacctcccattgttgcttggttcaaagacacctcataaaacattgggtgacttggctgacaagtatggacccatattctccatcaagcttggtgcaaaaaatgctgtggtgattagcaactgggaaatggctaaagaatgctataccacaaacgacatcgncgtttcctccctccccaatcttatctctgctaacctcttgtgctacaaccgatccatgatactcgtagcaccctacggtccctattggcgccaaatgcgaaagattttaatgtcggagttcctatcttctttccgagt

SEQ ID NO: 45328 - DNA, 381 bp, Glycine max
  Clone ID: LIB3139-087-P1-N1-A12
acgcactgaattctatcaatcaatccattttcaattgctttgtttcgatcggaggaaaatggccgatcagttatggaagggagaggaattcgagaaaaaggctgagaagaagctcatcggttggagctagtttggctccaagaatgaagatgccgccgatctgttctatacagccgccaattgcttcaagctcgccaaatcatgggacaaggctgcagcgacatacctgagagtggcaagttgccattcgaagttggaaagcaagcatgaagctgcacaagcccatgtctatgcttgcacattgctacaaacagactaatattaacgagtctgtatcttgcttagaccgcgctgtaaatctattctgtgacattggaagac

SEQ ID NO: 45329 - DNA, 268 bp, Glycine max
  Clone ID: LIB3139-087-P1-N1-A2
cccaagggcaagggatcagattacaggtcgacggccacttgccgcaaccacttcaacggccagtcccccttggaggtcctctcaaacctccacgacacggaggacaggctctttcattctggagacgtaaaaccgtagagggaaagcctactgtgacagctggagtagtcgcttcaaggatactactctcctgctgaagcatgttcacgagcctgtttctcgaggctcttattttaaggattcccataatgcttataattatctactg

SEQ ID NO: 45330 - DNA, 354 bp, Glycine max
  Clone ID: LIB3139-087-P1-N1-A3
tctctctctagcttggacgagtgaattagattcatcatcaagatgtcgtctctgatagcagaagatgtgaagagcagatcagaggtgtaccacggggacgaaatgtgccaagtgaagtccaaggagcttctcaaggaaatcgccctccccaacggccttcttcccctcaaggacatggaggagtgcggctacgacagacaaaccggcttcgtctggctcaaacaaaagaagagttacacccacaagttcaagatcggaaagcttgtctcctacgcgcccgaggtaactgctcatgtccaacaaggtaaaattaccaaactcaccggggttaaaaccaaggagcttttgttttgg

SEQ ID NO: 45331 - DNA, 394 bp, Glycine max
  Clone ID: LIB3139-087-P1-N1-A4
ctaaattggaagagttaactacaaggtttcaactcaatggatgattcaaatttagacgaatctatccatttgctgctggttgtttaatttttcttctgttttgctatattcatttcgttgaacaattttataatgatgaatatggtttagggtctcttgtgctaatagagcattaaaatcatttccaggaagtgttgaagcatatgaagctctagattcctcagcccctatcttgttattccttttggcaacagatgagatgtaatatatgagtcattgcgatttattgcagacagtttcattgatttttagggagtgcttgagttccagtgtatcaacttgatcttgtcgagtaatcattgtccaatggagtccatacaagaagcatcaagtg

SEQ ID NO: 45332 - DNA, 260 bp, Glycine max
  Clone ID: LIB3139-087-P1-N1-A5
cgagattgcctgcgtaacggccacggctgcgcagagtccactcccttacatctactcccgttgtttacgcgactggtgctcgaataaactttgtactgaaatacgttcacatctcgtaccattttcgagacttgatgaatatcgatgcgcgcctacacgtctcgtcgagcattgaagtattttcctacacggaaaaggtagcgtgtggctacgacacacgtaatcgagagatttacattctaatctgccactgaatcaat

SEQ ID NO: 45333 - DNA, 398 bp, Glycine max
  Clone ID: LIB3139-087-P1-N1-A6
ataacatgcacaattacagtgactccgcttggttcctcttcttcgatcttcggtttgattctgcgtttgttcacatcatggccaccgcttcagtggcatttaagtccagggaggaccaccgcaagcagattgagttggaggaggcgcgtaaagcggggcttgcgccagctgaactcgatgaagatggaaaggaaatcaatcctcacattccccagtatatgtcctctgctccttggtatcttaatgctgagagacctagtttgaaacatcaaaggaaatggaaatctgaccccaattacaccaaatcatggtacgatagaggtgctaaaatctttcaggcagacaagtatcggaaaggtgcttgtgagaactgtggagctatgacacatgattctaag

SEQ ID NO: 45334 - DNA, 286 bp, Glycine max
  Clone ID: LIB3139-087-P1-N1-A7
cgatttctcatctcacgggccacaatattccctaagggcaagggagcagataacaccttggtggccaagttctacaaccatctcatctacgagataatagcacatcgctcaaagccatctgtcacacttctacatttacacctcccacaggctcattgacgatgaatatctggagacttctcacacctcaagaagtccaggacttccgtaactatgctgactatcgctttacgacatttgttgatctcgtgcagcactgcgtcaccctcaatgaaccatattgcta

SEQ ID NO: 45335 - DNA, 413 bp, Glycine max
  Clone ID: LIB3139-087-P1-N1-A8
ctcttgctcttcccactttctctctctaaagaatataatactcaaaattcatccatttttattttatttttcttaaaaaacaaagcgcgtatagtctcacgcgcccgacgatgggttttcccgtagggtacccggagctgctggttccgaaaatgttcctccacgcgctctccctcctcgcgtggctgcgctccctcgtcttcgccctcttccgcctcctgcgcatctccgacctcctcgacaccgattccgccgtctctgacctgcctgcgacgtctccgacacgcgagccgactctctccgccctgctcatccgcgagttcctccccgtggcggcgttccgcgacctggcagccgccgacggggatcctccgccgtcgggctgcgccgtgtgcctgagcgaattctcctcg

SEQ ID NO: 45336 - DNA, 188 bp, Glycine max
  Clone ID: LIB3139-087-P1-N1-A9
cttgcttccaagatggttctgctagagaagctctgggatgacgttgttgctggccctcaacctgagcgtggccttggcaagctcagaaaactcaccaccctcaaaactattgatgaaggagacagtagcaagctgcagaagacgttgtcgatgccgtcgacaccgacaaccccgatgactcccacgac

SEQ ID NO: 45337 - DNA, 280 bp, Glycine max
  Clone ID: LIB3139-087-P1-N1-B1
agcttgctgaagaaggagcagtttctgtagagacttataatgcaacaatgaatgctttaagagagggggctaaaagggtaggtattatgaaaaaaaatgttgcaaaagtcacacctccaaacactcagggtaatggaagctgcctgaaagaccatagcaagaatagcccttcatcaatttctgatgtcatcccatcattatggccttgggcaagattcaatgtctcatcacttcaatcttaatgacctggggctttctgttactgatttgaataccccta

SEQ ID NO: 45338 - DNA, 367 bp, Glycine max
  Clone ID: LIB3139-087-P1-N1-B10
gagagtgagagggagtgagagggagcagagggagcgaagagaagaaacaaagatggagactcctcctccccaacaaggcgtcgtgaagaagaaggagacaaggggccgaaaacccaaaccaaaggacgaacacgggaagggtttgaaggaaggtaggaaaacacaacaacaacaacaacatcatcatcagcagcagcaacagcaacaagatcaaccttcggtggacgagaaatacacgcagtggaagtcccttggtccttgtctctacgactggctcgccaaccacaacctcgtctggccctctctctcttgaggtggggccccagcttgacaagcactacaaaatcgcagaactctacttctgagc

SEQ ID NO: 45339 - DNA, 322 bp, Glycine max
  unsure at all n locations
  Clone ID: LIB3139-087-P1-N1-B11
aatacttttccatatgggtacttcgaaagttctcagcattgttttcttcgtgctattgggcgtaggcatatgctccgctgcaagaacactcctcaccattggtggaggtgtgcatggtgagataggtgttggtgttggtgaangaacgaattgaaacaggagatctgcaagttatatggcatgactttagagcccttgctcaatatctatctgcaagctggcctttctgctctcaagacaccggattcttttttttaaatgcttggattcattataattggaacaccccccttcaaccctttttcaattaaatttttataaa

SEQ ID NO: 45340 - DNA, 401 bp, Glycine max
  unsure at all n locations
  Clone ID: LIB3139-087-P1-N1-B2
agcttgcttattaggagcagnttctgcagagacttatagtgcaacaatgaatgctttaagagagggggctaaaagggtcggtattatgaaaaaaaatgttgcaaaagtcacacctccaaacactcagggtaatgtaagctgtctgaaagaccattttatgaatagccctttatcaatttctgaagtcatcccatcattatggccttggcaagattcagtgtcttatcacttcaatcttaatgacctggggctttctgttactgatttgaattcccctagtatggctcctgtttctattcaccgtgatggtggccctccaaataacacttattgatttgaatcacccttgtaattattagtttatttggttcagatttactggtcattgctttatttgacta

SEQ ID NO: 45341 - DNA, 410 bp, Glycine max
  Clone ID: LIB3139-087-P1-N1-B4
ggctcgagatcaaaatcgcaaaggaaacaaatgataatttggaggatgcaagcaacgagttgattctcacagatgaagaggtcattcggtttcaaataggagaggtttttgctcatgtgccaaaggatgaagttgagaacaggatagaacagataaaagaggtgacaagccagaaattagcaaaacttgaagaggagaaagaatctattcttgctcagatggctgaactcaagaaaattttgtatgcgaagttcaatgactcgatcaatcttgaggaggattagtaactttcttcttgttgatagatttttagttggtgttttcttgttaatatgacctaatggacatttggcatttttgagtcatattggctcttattcattgattttaggatgtatgttattttgctt

SEQ ID NO: 45342 - DNA, 367 bp, Glycine max
  Clone ID: LIB3139-087-P1-N1-B5
agcgagtgaactcaattcaactcaacactcttcaatcaaatcaggcatggcagcagaacccacccgccccgtaaaaatcatcgccgccgccgatgacttcggcactcctctcaaagacgccctcggcgctcacttgcgcactctcaacatccaagtcgaagatctcggaacctcttcctactactccgccggagccgaggtcggtcgccgagtctcccaatcctgctccttcgacatccgtggcctcgtcgcctgcggcaccggcgccggcgtctccatcttcgccaacaaatattccggcgtctacgccgacacgtgcctttcccccttcgacgccgtcaacgcccgctcattaacaacttcaacg

SEQ ID NO: 45343 - DNA, 376 bp, Glycine max
  Clone ID: LIB3139-087-P1-N1-B6
gccatctgtacatgactgtggactcaatgtcttttttattactatgaccttgattctcgcatttattttcgccatagtggcattgcatcctgcagtaaatggaagtgttttgcctgcttcagtaatatcattatactgcacttatctctgctatagtgcactggctagtgaaccaagagattatgagtgcaatggtcttcacaaacactcaaaagctgtttccactggcaccattactttgggtttagctacaactgttctatctgttggttattctgctgtgcgtgctggatcttctgctgcagtgcctttcccaccaagcttccctcgtgctggtaagcctttgcttccattggatgcaaaggaggatgaagag

SEQ ID NO: 45344 - DNA, 216 bp, Glycine max
  Clone ID: LIB3139-087-P1-N1-B7
gagacaatgggggagagcgagacaggagagcgatggaacggtgcgatgacagatctgacggtgatggacgccaatttctactttctgcagaggctactcttcacgaaagccgtttttgtggacgacgacactttatggacaggcttcgtagtcgactaccaagaccgtgtcatgaagctccttgaccaacgagtccaaaccctggagagagatggt

SEQ ID NO: 45345 - DNA, 396 bp, Glycine max
  Clone ID: LIB3139-087-P1-N1-B9
caaatatgatataattggtgctggttcacattcttcaggagattttcctgaaaaggaagatcaagaaaaacccaaaaagattgataccagattgagacaaagaatagatcctcaatacaatgaggttcaggctcagatggaaacaaatttgtttaaattgtctcttgatgatgttgaaactccttaagatccaacatagaacctttaggagtttcaacatcatcaagagacaatttaaactcctaaaggttctatgttggatcttaaaatttctcaatctaaaattgcacttgccaagaacacagttggaggaaccattctgcgtagtgatctattggcaaattttttgacagaaggcaattttagagcatgtgttgatttgcaccgcactcatcg

SEQ ID NO: 45346 - DNA, 410 bp, Glycine max
  unsure at all n locations
  Clone ID: LIB3139-087-P1-N1-C10
gcaaacctcaagctactgcaatgcatgtgggagctatagaaattatcattgatagtttcgcaagtcctgattgcaacatagttggtgcaatgcttttggttgatacttatcataccaatcctgaaaatgcagttcgtagtatttttgttgcgcctttcagaggcggaaggcccattcgggtggttacatttccgaataccattgtgcagattgaaccagacatgaattcaaggtttcagcttttgagtaccactaccaatggtgattntgttcaagggaaagatctcgcaatggttaaagttaatgtagcatgtgctgctgttggcttgacatcaagttacactccaactccattgttggaatctggtttgcaaaaagacagagggttaattgtggagtattttggaagg

SEQ ID NO: 45347 - DNA, 396 bp, Glycine max
  Clone ID: LIB3139-087-P1-N1-C11
ctccctctcgcacgcgacgagggagctccgcttcggaatctcactccctctttctgctaattgacaagatggttgctcagaaattcgttgttgatttgaacaagccccttgtgttccaggttgggcatcttggggaagcctatgatgagtgggttcacgatcctatcgtaagcaaggaaggccctcggtttttccaaaatggttttctcgagttgttcacgcgcaccgcgtggtgggtgattccaaccgtttgggtgccggttgcaagttggttcatttccaactccgtaaaatcaggcctcccttctcttgatgtagctttgctcgtctttcttggcatcttcgtttggactttggccgaatacacattgcaccgtttccttttcatgtcaaaac

SEQ ID NO: 45348 - DNA, 407 bp, Glycine max
  Clone ID: LIB3139-087-P1-N1-C12
agcagattgtgattttctcaagagaaactttaagcagatgtctaatgttttgtgggtggctcctgaggacaaggcgagtttatggtcacaacttcattatgtttcgtgtaataatctggaaatgcaagaagcttatcttgtcaacctcgtaaatgtgttacgagaattgtatttgcacagtccagaggaagctcgccaattgagaaggaaagctctctctcgtattgaatggctgcaaaaagctgatgtgcctaccatagcacagattgaagagttccattcgatgcagaggatgatgaatgctcctgattcaaatgataatattgatttactgttgagcattgacttgttgggtttacaaggagcaggtaaagcttttccaaacaaaattgtttttgatgataagc

SEQ ID NO: 45349 - DNA, 401 bp, Glycine max
  Clone ID: LIB3139-087-P1-N1-C3
gatccatcgtggatgagataaaacaggtgatcacagctagttcaagtagaaaacgagagagagcagagaggacccaagctgaagattttgatgctgaagagggggacctgattaaagaggaaaatgaacaagaggaagaagtttttgatcaagtgggtgagatattaggaactttaatcaaaaccttcaaagccaacttcttgcctttctttgatgaactatcatcatatctgacacctatgtggggaagggacaagactcctgaagagagaagaattgcaatttgtatttttgatgatgttgcagagcagtgtcgtgaagctgctattaagcattatgatacctatctcccattcctgttggaggcttgtaatgatgagactcctgatgtcagacaggca

SEQ ID NO: 45350 - DNA, 326 bp, Glycine max
  unsure at all n locations
  Clone ID: LIB3139-087-P1-N1-C4
aaaatggtacctgtgcttggctgaggccagatggcaagacacaagtaactgttgagtactacaatgacaatggtgccatggttccagttcgtgtccacactgtcctaatttccacccaacatgatgagactgtgagcaatgaccaaattgctgctgaccttaaagagcatgttatcaagcctgtcattcctgagaagtacctggatgagaagaccatctttcaccttaacccttctggccgntttgtcattggtggccctcatggtgatgctggtctcactgtgagaaagatcatcattgatacctatggtggggggggtgctcat

SEQ ID NO: 45351 - DNA, 392 bp, Glycine max
  unsure at all n locations
  Clone ID: LIB3139-087-P1-N1-C5
gacaacttgagaatcagcatcagatctggtgtggtggctgttactgtttagcagcgatggccaaagcgtcgattttcatttacatactcgtcgcagcggcgcttctcatattcctctcccattccccggataagcactccggccaccgccaccgtcgnctcaagctgcgctccaacttcaccctcgccccctcgcgccaccacgccgtcgccttcgacccgctcgtcgccgaactcgagcggcaccgcgaagacaaggagtgggagaagaagataatccaccaggcccttgccgaactggagtcggacccggccccggcccacgagtcccagcccgagtgggaggacttcatggacgccgaggattacctcaatgacgaggacaaggttaat

SEQ ID NO: 45352 - DNA, 194 bp, Glycine max
  Clone ID: LIB3139-087-P1-N1-C7
tggaagccctgaatattcagcctgtgatatggggtacctcaattcagttttgtcctcttcaagccaggttcatgctgcagaagattcacctgtcagtggagggggcctcagtcagaaatggaaaaattcagcttatggggtattgctaggcttcccctgggcaaggaggatctttctattgggaaggaattttt

SEQ ID NO: 45353 - DNA, 413 bp, Glycine max
  Clone ID: LIB3139-087-P1-N1-C8
ctcaaatttctattttcatacaaagttacaatttgttacttacactactacactttagttgttccaacacaagtgtttgtggcaacaactttgatttgaggttctactttttttttgtgtaatcaagaatatttaaggtttttatttgatattcgtcgagtcagtccattttttgttttttgagtaaagtgatatcctctgcttcttcattcttaactccaaactttagacgctccaccgtgtttttttgttacctatactacaccctttaagtgtttgtagcaaggacttttgtgtgaggtttgtcataatcaagagatatctaatccttctatttgatactcaattactcttctggtcagcctattttgaggtaaagtgatatttttaatcgcaattccgttcctaagctt

SEQ ID NO: 45354 - DNA, 414 bp, Glycine max
  Clone ID: LIB3139-087-P1-N1-C9
gtgtcacagtgaggcagttgcactgatatgctgatggctcttttcatcttttccctttctttgttccattttgaaaacgaggaagcagactgtctaaagctcatgctggcagatgttgatgtttcttgacttgggacgtatattcttctgggtattatttcagtaggctttgatagagaaatatagaaactattgaatttcgctattgttttgtgtttttaatgtaagggctttttccttgttaattatcaacttgggggcacacgtgccacgtttgctgtaaatgcagtaaggattgaaatagctgtcaatctacattaatattagccacatttttggtttggtattggctgttgaccttatcatgggttcggggcatattaaagtacttaaaattattgctttgagaataaa

SEQ ID NO: 45355 - DNA, 413 bp, Glycine max
  Clone ID: LIB3139-087-P1-N1-D1
ctgtaattaaaaaagctggtgttgaccacaaaattgaattcagagaaggtcctgctctaccagttcttgatgaaatgattaaagatgagaagaaccatggaagctatgacttcatctttgttgatgcggacaaggacaactacctcaactaccacaagaggttgatagagcttgtaaaagttgggggcgtgatcgggtacgacaacaccctatggaacggatctgtggtggcaccccctgatgctcctcttaggaagtatgttaggtactacagggacttcgtgctggagctcaacaaagccctcgctgtggaccccaggatcgagatttgcatgctcccggttggtgatggaatcactatctgccgtcggatcaagtgatttctgatcatcataatcgtggaccaccgttgc

SEQ ID NO: 45356 - DNA, 408 bp, Glycine max
  Clone ID: LIB3139-087-P1-N1-D10
ggctttctctaccaatggggggttattgactattctggcggctatgtcatccacctttcttctggaatcgctggtttaactgctgcttactgggttggaccaaggttgaagagtgacagggagaggtttccaccaaacaacgtgctacttatgcttgctggtgctgggttgttgtggatggggtggtcagggttcaacggtggagcaccatatgctgcaaacattgcatcttcaattgcggtgttgaacacaaacatttgtgcagtcactagcctccttgtgtggacaactttggatgtcattttctttgggaaaccttttgggattggagcttttcatggcattgatgactgtacttgtttgcattaccccaggagcagggcttgtgcaattctgggctgctttact

SEQ ID NO: 45357 - DNA, 327 bp, Glycine max
  Clone ID: LIB3139-087-P1-N1-D11
ctctcgtattgaatggctgcaaaaagctgatgtgcctaccatagcacagattgaagagttccattcgatgcagaggatgatgaatgctcctgattcaaatgataatattgatctactgttgagcattgatttgttgggtttacaaggagcaggtaaagcttttccaaacaagattgtttttgatgataagcttgtgttggctaacacacaagaattctttgatggaaattttccagtggattcttggttaccaatttttgtgaattgtctttatcctgtaagtcaattaccttcagaagctgtcgttgtaaatgttacatgtggtag

SEQ ID NO: 45358 - DNA, 236 bp, Glycine max
  Clone ID: LIB3139-087-P1-N1-D12
ggacgaataagaagatggtgtcaggttctggaatctgcgcaaagcgggtggtggtggacgcgcgccaccacatgctgggtcgtctagcctccatcgaggcgaaggagcttctgtacggccagaaagtggttgtcgttcgctgcgaagagatttgcatcttggtcggactggtgaggcataagatgaaatacttgatgttcctttgcaaacgcatgaacaccaaacctttccatggc

SEQ ID NO: 45359 - DNA, 415 bp, Glycine max
  Clone ID: LIB3139-087-P1-N1-D2
tgtgaccataatctcgccaattgagaaggaaagctctctctcgtattgaatggctgcaaaaagctgatgtgcctaccatagcacagattgaagagttccattcgatgcagaggatgatgaatgctcctgattcaaatgataatattgatctactgttgagcattgatttgttgggtttacaaggagcaggtaaagcttttccaaacaagattgtttttgatgataagcttgtgttggctaacacacaagaattctttgatggaaattttccagtggattcttggttaccaatttttgtgaattgtctctatcctgtaagtcaattaccttcagaagctgtcgttgtaaatgttacatgtggtagtgggaccttggtttacccaccactgcttggattagttctgcagttaacaat

SEQ ID NO: 45360 - DNA, 358 bp, Glycine max
  Clone ID: LIB3139-087-P1-N1-D3
cttctttgctagaatttttgcttgatattgcatcattgtctattttttaggaacttctattttagcactataatgtttggaattttcttttgcataatattttacaggttttatttgaagctaagcaatgggattatctagtggaccaattcaaacaggagttctgcaagttatatggcatgactttagagcccttgctcaatatctatctgcaagctggcctttctgctctcaagacaccgtatcctttttttaaaatgcttgcatacatataattgaaacaccccctccaccctttccaataaatcttaaaaccacttggactttccttatccttttgagggacttaatggaatac

SEQ ID NO: 45361 - DNA, 413 bp, Glycine max
  unsure at all n locations
  Clone ID: LIB3139-087-P1-N1-D4
ctggatggactgccaccccaatgcaggatgttcaggttacaattgattggtttatttcctctcaggaatgtgttcccaggacctattgtgttttaaatccacaaaatccttttgtgttaaataggtggatgggaaaactgactttccctcagggcacttcccgaagtgttaagagaatgcctctttctatagggggaggagctggtgcaaagaatgctattctcatgaatatgccaaatgctgntctttcaatgtggagatattttgttggagatctcgtctttgaagtttctaagatgacttctccctacattaaatgtacagtctctttcttcatagcatttggaaatttggctgatgacaccatcaattttgaggctttttcccacaagcttgtgcagtttggagagatt

SEQ ID NO: 45362 - DNA, 321 bp, Glycine max
  Clone ID: LIB3139-087-P1-N1-D5
ggcaaagaagaagggccggcactctggttatggtaagagaaagggtacaagggaggcgaggcttcccaccaagatactttggatgagaaggatgcgtgtgctcaggcggttgcttcgtaagtacagggaatcaaagaaaattgacaagcacatgtaccatgatatgtacatgaaggtgaaaggtaatgttttcaagaacaagagagtcttgatggagagcattcacaagtccaaggctgagaaggcaagagagaagactttgtctgatcagtttgaggctaagcgtgcaaagaacaaggctagcagggaaaggaaacttgc

SEQ ID NO: 45363 - DNA, 390 bp, Glycine max
  Clone ID: LIB3139-087-P1-N1-D6
agatacaagagtggtggatccgtttaccgcagcaaacactcttctgagttctgagctagcgaggttgcaatggcgattatctccgatttcaacgaagaggagcagaaacccactcactcttcaccaccgcaaccccaatcctcttcctcttcctcttcctcttcgttcagtgctgcttttgaccggtcaaaccctatcgcttttctggagagagtcttccagttcgtcttcgaacacagcgactttcttgcgaccgagagcgccgagaaggagatagcgttgctggtgcgcgccgccgggaagaagaagagggagtttctcaagtcggagagagaaaaggccgcagaagaaaaagagagaggacctcaaggcctctgaggagagggaaaa

SEQ ID NO: 45364 - DNA, 293 bp, Glycine max
  Clone ID: LIB3139-087-P1-N1-D7
ggccgccgtcgctgacgccaccttctaggccttttgggttgcaaaccccaaacacaaaggtttcaccagttgagttgccacctgctagttctcagaattttgaggagggttctgaagagacatctaagcctaagttgaagcctttgcattgggacaaagtgagggccagctctgatcgtgagatggtgtgggatcagttgaggtccagttctttcaagttgaatgaggagatgattgaaacttttgttgtagtgaacacgccgaatccggaacctaatgatactactccacgc

SEQ ID NO: 45365 - DNA, 413 bp, Glycine max
  Clone ID: LIB3139-087-P1-N1-D8
tgagaacatcattgaattttgattctagcaagcagagcttttgtcaattttctatcgaccttctcggtggaggaattttagtggacaaaactggagattggatcacacttatacaaaattctccaattagtaacttgttgagagttgctgcttggaagaaaggctgtttaatggtcaagattgtgatgtctgggaatgcagcagtcaaaaggagtgattgggcctcattggtacaagtgtttttaacaaacagcaacagtacagagcattttgatgcatgtaagtggacaaaatcagaaccacattcctgggaattgatcttcccaatagaggtatgtggtcctaataatggttttgaaatgtggagttctgagtgggcaaatcaaacttcatggcatttgagttttcttatt

SEQ ID NO: 45366 - DNA, 342 bp, Glycine max
  Clone ID: LIB3139-087-P1-N1-D9
gaaagagatagggtaacctaatggagctagttgatagaaggttaggttcagatttcaatgaaaatgaggtaatgatgatgatcaaagtggcgctcctatgcaccaataccacttcaaaccttaagcccaccatgtcatcggtgcttaatatgctagaaaggaaaactatgattcccgaatttggttcagatccctctgagataatggattgaatggaagttgaggccatgcgacaacctttcttttcaaaaggaaaattggaggaggtggacacaagagcaaaatcatagtttatcaattgaggggccttggacgggcttattcttatcggttgcagatcta

SEQ ID NO: 45367 - DNA, 304 bp, Glycine max
  Clone ID: LIB3139-087-P1-N1-E10
ttttgttggagatctcgtctttgaagtttctaagatgacttctccctacattaaatgtacagtctctttcttcatagcatttggaaatttggctgatgacaccatcaattttgaggcttttccccacaagctggtgcaatttggagagattcaggaaaaagttgtattgaaattttcacaagaggaatttcttacagcttggtcaactcaggtgcgtcctacaacaactctgttggctgatgggtgtccatatttgtatgctatggtgcatgatagttcagtgtctacaataccaagtgatttt

SEQ ID NO: 45368 - DNA, 342 bp, Glycine max
  Clone ID: LIB3139-087-P1-N1-E11
catgaatatgtcaagccttactttagtggttctaaattgaaaagctttctagctggtcataatatcaccattactgatggtattgacaaaactagtgcaactttgcaatttagaaagttagcagattgtgattttctcaagagaaactttaagcagatgtctaatgttttatgggtggctcctgaggacaaggcgagtttattgtcacaacttcattatgtttcgtgcaataatctggaaatgcaagaagcttatcttgtcaatctcgtaaatgtgttacgagaattgtatttgcacagtccagaggaaagctcgcaattgagaaggaaagctctctctcgt

SEQ ID NO: 45369 - DNA, 370 bp, Glycine max
  Clone ID: LIB3139-087-P1-N1-E12
ggattgtataggagtaattgatggtatgaacattccggctcatgttccagccaaagatcaatctcggttccgcaataagaaaggtatcctatctcaaaatgtgctggcagcatgcacatttgacctgcagtttatatttgtttatcctggttgggaaggttctgtcaccgactcacgagtgttaagggcagtccttgataacccagatcagaatttccctcaaatacctcaaggaaagtattaccttgttgacaagggatatttaaatacagaagggtttattgctccttaccaaggggttcggtaccagcattatgagtttagaggcgctaatcaaataccaagaaacgcaaaagagctgttcaatcac

SEQ ID NO: 45370 - DNA, 324 bp, Glycine max
  Clone ID: LIB3139-087-P1-N1-E2
ctcgagcccaatcggctcgagtgtagaccgcgagcgggcgacactgtttctgttgagttcttcaaagacattctggccatgatatcagaacgagaacacactgtaataatcaacacacaaaatgatgagactgtgtgcatagacctaattgctgccgtcccccgcgagcatgttatcaagcctgtcattcctgagaagtacctggatgagaagaccatcttccaccttaacccttgtggccgccttgtcattggtggccctcatggtgatgcttgtctgactggaagaaagagcatcaccagatacctatagtgggaggggtgc

SEQ ID NO: 45371 - DNA, 311 bp, Glycine max
  Clone ID: LIB3139-087-P1-N1-E3
gagaaggacatggatgatgttgtgactaagacagcaattggcgtgcttggagatttagctgatactttgggtagtaacgctggcccgttgattcagcaatctgtgtccagcaaagacttccttaaagagtgtttatcatctgatgatcatttgattaaggaatctgcggaatgggccaagttggcaatcagtcgagcaatttctttttgaggctgttgctatttcctggcttctagttctcttgcatacatttgcatttgttgcgtgtgggggtctcaaactgcatacatgagttgggtcatcaccatttt

SEQ ID NO: 45372 - DNA, 250 bp, Glycine max
  Clone ID: LIB3139-087-P1-N1-E4
acgcactgaattcgatcaatcaatccatcttcaattgctttgtttcgatcggaggaaaatggccgatcagttatcgaagggagaggaattcgagaaaaaggctgagaagaagctcagcggttggggcttgtttggctccaagtatgaagatgccgccgatctcttcgataaagccgccaattgcttcaagctcgccaaatcatgggacaaggctggagcgacatacctgaagttggcaagttgtcatttg

SEQ ID NO: 45373 - DNA, 272 bp, Glycine max
  Clone ID: LIB3139-087-P1-N1-E5
gagaattgtatcaacccagatggtataaaatgcgccatggagatcactccggttctcaacatgtcaaccccattggatgtaggcacagatcgtcgcctttttacaattgccaacaatgtcactcagtcaatgaaggtgccagcgtacttcattaacatgacttctttgtgggaattgggaaaagattcacacacttctgttttctccatgcgcccaggcaaattgctaacttcaggacaaccaggtgggtccactacctatgcccgttggat

SEQ ID NO: 45374 - DNA, 368 bp, Glycine max
  Clone ID: LIB3139-087-P1-N1-E6
attaatcactcctcgaaacaaatctacttttgctattccacttctctcatcacccctttcatctttgatatgaatttcttagctctatcaaacaaaggaagaaaaaaacagccacaactgagattactggagatggtgatcacagtttttctcctcgtgttagccattccttcacctcttaaaacagcagaatcactaaatttcaacataacaaacttcgcaaactccgagagtgcaaaaaacatgttatacgtgggtgacggcgctgtgaacaagaacgggtccatagagctcaacatagtggactatgatttccgcgttgggagagccttgtacggacaacctctgcgcctttgggactcatcttc

SEQ ID NO: 45375 - DNA, 252 bp, Glycine max
  Clone ID: LIB3139-087-P1-N1-E7
gaaacatggcttccttaagctccttagtgctgctccttgcagctctaattctatcccctcaagttcttgcaaactatgagaatcccccagtgcacaagccgcccactgcgaaaccacctgtttatacgcccccaggtgagaagcctcctgtttacaaacctacagatgaaaacacctcaaaatacaagcctacagctgagaagccacctgactacatgcccacacttgagaagcgcacagtgcacaagcccc

SEQ ID NO: 45376 - DNA, 393 bp, Glycine max
  Clone ID: LIB3139-087-P1-N1-E8
ctcgagccgaatcggctcgagattatttataaattgaaaagaaagtcacgctggcggtgaagaacgtttctgcggcggccgaggaggaggaacacatgacgctgatttccgatgttgagaaccttgcggatgccgaaatccccgacaccgcacatcaaattagcaccgattcatggtttcaagtggggttcgtgctgacgacgggaatcaacagcgcgtatgtgcttggatattctgggaccatcatggttcccctgggttgggcagggggtgtggttggtttgattcttgccactgcaatatcgttctacgcgaatgctcttattgctaggctccatgaaatatggggaacaaggcatattctatacagagatcttgctggatttatctatt

SEQ ID NO: 45377 - DNA, 280 bp, Glycine max
  Clone ID: LIB3139-087-P1-N1-F1
gcatgatagttcagtgtctacaataccaggtgattttgtcattggtgttaagttgacaaccataaacaatatgtgtgcatatgggcttaatcctggtatttcaggttctcgtcttttgggcaccattcctcagtccatttcacagcaaactgtttggaatcaaatggcaacagtgagaacaccattgaattttgattctagcaagcagagcttttgtcaattttctatcgaccttctcggtggaggaattttagtggacaaaactggagattggatcaca

SEQ ID NO: 45378 - DNA, 311 bp, Glycine max
  Clone ID: LIB3139-087-P1-N1-F10
gtttcgtttccttccattggttttctctctcaatctgatcctgatgacagctcatgctgccatacctccagaagtttactgggaaaggatgcttccaaataccccaatgcccaaagcaatcatagactttctaaaccttgatcaacttgctctttggtatggtgctaaagaaacccaatctacagatcaaatattcctgtatgatgcttagaaaacccaatcaacagatcaaggtcctcctatcttttatggtgataagaaaacccaatcaacagatgaaattccttctatcttttatggggctaagaaaa

SEQ ID NO: 45379 - DNA, 394 bp, Glycine max
  Clone ID: LIB3139-087-P1-N1-F11
gtgcttccgtctcttccccttcttctctgattggaaggattcgtgtggtcggagatggtggtttcggggccaatcacgccggggcaggtgtctttcttgctgggggttattccagtttttgtttcatggatatattcagagtacttagagtacaagaaactctcatctcctcccaaagttcattcagatgctagtcttgaaaagttggggaaggttgcatttaaggaagatgatcggcccattttgctggaatcagggcttacaagatcagcatcagcaaaattccatccaccatctgtcaaattgaatttgattcggtttttgaccatggatgattcttttttgttagaaaatcgagcaactttgagagcaatggccgaatttggcctgattc

SEQ ID NO: 45380 - DNA, 379 bp, Glycine max
  Clone ID: LIB3139-087-P1-N1-F12
taaagactcagtttgaggatccctctcatatgtaatcaccgttttcacgtggctttgcttcgatctataactatgatcataatgaatgtcattcactcaaaacttgtttatcatgttttattttccgcttcccctgactgattcctttttcttttcaatttttttgctttacccttttttttatcgtgggtatccaacaagtgaacttgttcattgggttacttgtgattccatgatctgggaaaagaaaaaaaaaaaaaaaaagggtttttggtttctgtatgggatagggcattttggaatttgattcattttgatggggatgatcaacctttggtggtggcgattacttcaactttgatcgggaaaatctttcctt

SEQ ID NO: 45381 - DNA, 393 bp, Glycine max
  Clone ID: LIB3139-087-P1-N1-F2
cttttgagtaccactaccaatggtgattttgttcaaggaaaagatctcgcaatggttaaagttaatgtagcatgtgctgctgttggcttgacatcaagttacactccaactccattgttggaatctggtttgcaaaaagacagagggttaattgtggagtattttggaaggatgtcttacgttgctcacaacgttaatcagccccaagagaaagatttgttggagggaaatttttcctttgatattaaatctcgctctagattggaaaaagtttcctctacaaaagcacaatttgttagtggaaaaaccttcaaatatgatataattggtgctggttcacattcttcagaagattttcctgaaaaggaagatcaagaaaaacccaaaaagatt

SEQ ID NO: 45382 - DNA, 402 bp, Glycine max
  Clone ID: LIB3139-087-P1-N1-F4
atctattcttacaagttacatccattgagaaacatgaaggtctcccccttagcattttcaatcctttttttgtccttcaccatagaactcttcattggcattgcttcagcagcacaagaaccagtgcttgacacctcaggccagaagctgagaacaggtgtcaagtactacattctaccagtcttcagaggcagaggtggaggcctaacagtttcaagcagtggcaacaacacatgccccctctttgtggtgcaagagaagcttgaagtctcaaagggcaccccagttaccttcacaccctacaatgccgaaagtggtgtcattctaacctcaaccgatctcaacatcaagtcctatgtgaaaagcaccacttgtgataaacctccagtgtggaagctcctc

SEQ ID NO: 45383 - DNA, 409 bp, Glycine max
  Clone ID: LIB3139-087-P1-N1-F5
ggacatgcctgctcctggccagggaagcagcatgattggtggtggatggcagctagcatggaaatggtctgaaacagaaggtgttttcaagagaatatatttacaccaagaaggtggtccaactggatctagtagacgtgggtctctcatttcacttccaggtggtgatggtgatggtgagattgtccaggttgccgctctagtgagtcagtcagccctttacaacaaggagcttatgcatcagcagccagttggaccagccatgattcatccatcccaaacatctgcaaaagggccaagttggagtgacctttttgagcctggagtgaagcatgcactgattgtgggggtggggattcaaattctttaacagttctctggtataaatggggtgctctactatacacct

SEQ ID NO: 45384 - DNA, 386 bp, Glycine max
  Clone ID: LIB3139-087-P1-N1-F6
gtttgtccgattgggcattccttacattgagctaaatgctcagggaagagccaggccaagtatagctaaactttacaattggagatacagagatttgggagaccttccttctgtaaaggaggaagtcgtattcaatagggcaaatgctggatttgcttatgattatcagttagtggatgttccagattaccttggtaagggggagacaactccatctccttggttttaccaaaatgagggagaagccgaatatgttgtcagtgtctatatatacatgcgtcttttaaggtatcctgcaaataagatatcaattttgactacatacaatggtcagaaacttctcattcgtgatgttgtaaataggagatgcgttccatacgatttca

SEQ ID NO: 45385 - DNA, 340 bp, Glycine max
  Clone ID: LIB3139-087-P1-N1-F7
caccactcttttccaatgacactttttcagcctcgtactgttcggctgaaccaccataatttgaagcttctaaaatattggacatggcagtttgttgttgtccgtccagtatgttctgttctgatgattgcattacagctagtcgggctgtatccaacttggttgagctgggcattcaccatcgttctcaacatatctgtgtcgttagccttgtattctctggtggtcttttaccatgtgtttgctaaagaactggcaccacacaaacctttagctaaattcttgtgcatcaaaggaattgttttcttctgtttttggcagggaatgttgctggagcttt

SEQ ID NO: 45386 - DNA, 412 bp, Glycine max
  Clone ID: LIB3139-087-P1-N1-F9
gttggatcttaaaatttctcaatctaaaattgcacttcccaagaacacagttggaggaaccattctgcgtagtgatctattggcaaattttttgacagagggcaattttagagcaagtgttgatttgcagcgcactcatcgtattaaaggaatgattaaaatggtggccacagttggtattcctgagaatacaggtatagcattggcctgtgctatgaatagttcttttagggggcgcgccagttctgatatttacaccatctgctctcaagactgtgaattatggaatcctgcttgcacaaaagcaatgactatgtcatttaatccaaacccgtgttctgatgcatggagtttggaatttctgaagcgtaccggatttcattgtgatatcatttgtgtcactggatggact

SEQ ID NO: 45387 - DNA, 405 bp, Glycine max
  Clone ID: LIB3139-087-P1-N1-G11
gttggtgcaatgcttttggttgatacttatcataccaatcctgaaaatgcagttcgtagtatttttgttgcgcctttcagaggcggaaggcccattcgggtggttacatttccgaataccattgtgcagattgaaccagacatgaattcaaggtttcagcttttgagtaccactaccaatggtgattttgttcaaggaaaagatctcgcaatggttaaagttaatgtagcatgtgctgctgttggcttgacatcaagctatactccgactccattgttggaatctggtttgcaaaaagacagagggttaattgtggagtattttggaaggatgtcttacgttgctcataacgttaatcagccccaagagaaagatttgttggaaggaaatttttcctttgatatt

SEQ ID NO: 45388 - DNA, 401 bp, Glycine max
  Clone ID: LIB3139-087-P1-N1-G12
gcgttgcgttgtcggaaaatcaccctcacctgatcactgtggaagtctctaggtgatggccggttcagaacctgttagggcagagggagagactatggctgtggatgctgccccaaggaagccccggattctacttgctgcgagtgggagtgttgctgctgtcaaatttgcaaatctttgtcactgtttctctgaatgggcagatgtaagagcagtttccacaagtgcatctttgcatttcattgatagagcagcaatgcccaaggatgtaattctatacacggatgacaatgaatggtctagttggaagaaattaggtgatagcgtgcttcacattgagcttcgcaaatgggctgatatcatggtcatcgctccattatcagcaaacacccttggcaaga

SEQ ID NO: 45389 - DNA, 364 bp, Glycine max
  Clone ID: LIB3139-087-P1-N1-G2
ctaataatggttttgaaatgtggagttctgagtgggcaaatcaaacttcatggcatttgagtttccttattgacaatcccaaacagtctacagtttttgatattctcttgggaatttctcaagattttgagattgctggtaatactcttatgccagctttttctgttccacaggctactgccagatcttctgaaaatgcggaatcctctgcatgatctggaatttgtgttttcttttgcttgttcgtttgcttaattcaataaaggaaattaggcatgaccctcttgttgagtatgctctgcctatttgaaaatttccacacctcttttaattatcgtaatgatgtgtgaagtgtgtgttattt

SEQ ID NO: 45390 - DNA, 248 bp, Glycine max
  Clone ID: LIB3139-087-P1-N1-G3
ctactgcttttttgaaggagagcaggttattctgtatcagcaaggataaagtcaggtggagaggctgtagttgcagctgaaccagctgctgacattccaggcgagcctatggatatcatgactgccttgcaacttgtgctcagaaaatctatggcttatggtggtcttgcacgaggccttcacgaatgggcaaaagtgattgagaagcatgctgcacaactctgtgttctaacataagactgtgacca

SEQ ID NO: 45391 - DNA, 394 bp, Glycine max
  Clone ID: LIB3139-087-P1-N1-G5
gtgcaaacgctttgatcttattgatccatatatggggaagccgccacctgctccacggattaggagtaagatggataccttgatttttacatcagattcagtcaaaggtaccaaagtggacgggcctgttacttcaaagaaagacatctcatctttgcaacaacctactaataaagacataaccaaaagtattactgaaaatgaaactgaagaggatgtggaagtcgaaaatattgaaaggccagttgacctatacaaggctattttctccgatgattcagatgatgaaggggaagaccctagcaataggagagtagagaatcaagaaaagaaagctgaagtagctaatacagcattgagccgtttgattgctggtgattttcttgaatcattg

SEQ ID NO: 45392 - DNA, 278 bp, Glycine max
  Clone ID: LIB3139-087-P1-N1-G7
ctggagcctattcggctcgagcggctcgagcaatatgagtcttaagggatttttcgagggtggtgtctcttgcatcgtctgaggctgcaccactcacccactcgacctcatcaaagttcgaatgcaacttcaagaaacccacactctccgtccagcctttgcctttcacgctcccactccaatgccttcttcgccgccctccggccccatcttcgtttgccttcgcatcgttcagtcggagggactcgtcggtcttttctccggcgtattcgccaccg

SEQ ID NO: 45393 - DNA, 393 bp, Glycine max
  Clone ID: LIB3139-087-P1-N1-G8
tcttgaaaccctttcttagagtgtttaaagaccttgaatgcacgcaattgtatcctgtaaagatgttaacagtgtgcagttttgtgctggtttaatatcttttactttatcaactatattgaagttttgaagagcataattgcaacagttgtcaggtgatataaatgaggaagtggatagtcataaccggatgctggatcgtatggtgcgtactgcttattgcatttattgaaaacatttgcattttctctgctatatcgcattatttttttataatctgttggtattttatatagggaaacgatatggattcttcgagaggagtcctctcaggcactatggataaattcaaaatggtatgtggactttaaatcctgaatgcactaatatata

SEQ ID NO: 45394 - DNA, 407 bp, Glycine max
  Clone ID: LIB3139-087-P1-N1-G9
gagaattttaacaacccagatggtataaaatgtgccaaggagatcactccggttctcaacatgtcaaccccattggatgtaggcacagatcgtcgcctttttacaattgccaacaatgtcactcagtcaatgaaggtgccagtgtacttcattaacatcacttctttgtcagaattgagaaaagatgcacacacttctgtttacaccatacgccaaggcaaaatgctaactccagaacaacaagctgatcctactacttatgccgattgcatccattggtgtttaccaggattacctgacacttggaacgagttcctctatacaaggatcatctctcaattttgacctacaacaaacaacctatagatattcttcacacatactttaattcttttttccttttttcc

SEQ ID NO: 45395 - DNA, 394 bp, Glycine max
  Clone ID: LIB3139-087-P1-N1-H1
ctaatgccttcttggcccaaaggatttcatctgtcaatgccatgtcagcactttgtgaggctaccggggcaaatgttcaacaggtgtcctattctgttggaacagactcaaggattggacccaagttcctcaacgccagtgttggttttggtggatcctgcttccagaaggatatcttgaaccttgtttacatctgcgagtgcaatggccttccagaggtggctgagtactggaaacaagttatcaagatcaatgattatcagaagagccgttttgtgaaccgtgtagttgcatcaatgttcaacacagtctcaaacaaaaagattgctattctgggatttgccttcaagaaagacactggtgacactagggagacccctgccattgatgtatg

SEQ ID NO: 45396 - DNA, 362 bp, Glycine max
  Clone ID: LIB3139-087-P1-N1-H10
agttcatttacatccaccccatgtcccaaaacctcatccaaagcctccagtgcatccccatccaccttatgtcccaaaaccaccagttgtgccagttacaccaccatatgttccaaaaccaccaattgtgaacccttcctatgtcccaaaaccgcctgttgtgccagttacaccaccttatatccctaaaccaccagttgtgacaccaccatatgtccctaaaccaccagtggtgccagttacaccaccatatgttcctaaaccaccagtggtgccagttacaccaccttatgtgccaaaaccacccattgtgaaaccaccaatttgtttatccaccaatttgtgccaaaaccaccaaattg

SEQ ID NO: 45397 - DNA, 331 bp, Glycine max
  Clone ID: LIB3139-087-P1-N1-H11
tgcaaaaagctgatgtgcctaccatagcacagattgaagagttccattcgatgcagaggatgatgaatgctcctgattcaaatgataatattgatctactgttgagcattgatttgttgggtttacaaggagcaggtaaagcttttccaaacaagattgtttttgatgataagcttgtgttggctaacacacaagaattctttgatggaaattttccagtggattcttggttaccaatttttgtgaattgtctctatcctgtaagtcaattaccttcagaagctgtcgttgtaaatgttacatgtggtagtggacgttgtggttttcccac

SEQ ID NO: 45398 - DNA, 402 bp, Glycine max
  Clone ID: LIB3139-087-P1-N1-H12
ctagaaagaaagaaggagactccaatcctcacacagacgaaaacaaatatctttcacttcttctgcatccgacgctagaagaggtgtcggaacaaacaagcttcgtttcgccggaacgatgaccggcggcggatcgacggggaggttgccaacatggaaggagagagaaaacaacaagaggagagagaggagacgaagagcgatcgccgctaagatctacaccggtcttcgagctcaggggaactacaagcttccgaagcactgtgacaacaacgaggtcctgaaagctctatgcgccgaagctggttggatccgggaagaggatggcaccacttattgaaagggatgcaagagacccagcgcgagtgagattggaggaacagtggcaaacataagcgcgtg

SEQ ID NO: 45399 - DNA, 379 bp, Glycine max
  unsure at all n locations
  Clone ID: LIB3139-087-P1-N1-H2
gatattggagattgatgtgatgacatcttcacctacctatctgcatgcagtgctgaattgatacctctggtttttatctcatgctattttagttgtgtaacatgtaacagtgcctgtttaatttgttacaccttgccgaataataagtaaatcaatatactcaaaagttaaagtttggtgatattaattagcattgattgagagcatttgtcagttacattatgggtggagttgaaaggaacattttggtagggtaaaaaagtatctttgtaaagttggatgcactttctagtttggtttgagaaaaggggatatgctaccaaacctgaagtattatagcattgatttcaccacttcagtatgtgatctatnttttttc

SEQ ID NO: 45400 - DNA, 285 bp, Glycine max
  Clone ID: LIB3139-087-P1-N1-H3
cgatctagttagggttccttacacgatggagcggttgaagtgggcgcaactgggtgagaggctgaagaccggtggggcccagatggggcgaatggtgagcggaaaagtgaaggagatgcttcaggcgccgacgccggagtccaagatggtggacgaggccacgctggagaccatggaagaacccaattggggcatgaatctcagaatctgtggcatgatcaacagcgaccagttcaacggctctgaggtcgttaaggccatcaagagaaagatcaatcacaagag

SEQ ID NO: 45401 - DNA, 411 bp, Glycine max
  Clone ID: LIB3139-087-P1-N1-H4
attagagagagagagagagagagaggatatgggttcgaagaggtatgcgctattgatgtgcggtgaggattcggagtacttggtgaagatgcacggaggcacctatggggtattcatgaagttgctccaagagcaagaggaaaagtgggacctctacaagctcgtccaaggagagttcccggagcagcatgacttgcctctctacgatggctttgtcatcagtggaagctgctatgatgcacatgccaatgacccatggatccttgacctcattgctctcgttatcaaattggactccatgcacaagaagatccttggcatttgctttggccaccagataattgggcgtgcattgggaggaaaagtgggtcgctctcccaatggttgggacattggtgttaaagctataaa

SEQ ID NO: 45402 - DNA, 129 bp, Glycine max
  Clone ID: LIB3139-087-P1-N1-H5
gtttcattccttggaatacagattgccatgaaccagacaagcaaatgttcaacaatatattgggtactgaacatgttgcagattccaatttcagttggggtatctggatatgaggcagcttccttgtat

SEQ ID NO: 45403 - DNA, 244 bp, Glycine max
  Clone ID: LIB3139-087-P1-N1-H6
gccgtagcattgttttttttagtaagcttgttaatataactatatatctgggcatatatttgcgtagtgctcacggagtttgatgaaaaaaaaaaaaaaaaaaaaaaaaaaaaaaaaaaaaaaaaaaaaaaaaaaaaaaaaaaaaatttaataaataaaaaaataaagataaaaaattatacttatggggtgctaacaaaaaaaaaaaattttttctgagaaaaaaaatggaagggggggcccc

SEQ ID NO: 45404 - DNA, 379 bp, Glycine max
  Clone ID: LIB3139-087-P1-N1-H7
gttaaccctgacacccctctcaagcttgctgattacttcaacattcccggagtcttcagtgtgaatttactccaaaactctccctcaaacggtccaggatacataggcacctcagtgttgcaaacttctctccatgattttattgaggttattttccagaacaacgaaaacaccatgcaatcttggcatcttgatggttatgatttttgggtcattggtcatggtttcggccagtggacagatgctagcagaaaaacatataatctagtggatgccctgactagacacactgcacaggtgtatccaaaatcctggactactatattggtgtctttggataaccaaggcatgtggaacttgaggtctgcaatatgggaaa

SEQ ID NO: 45405 - DNA, 409 bp, Glycine max
  Clone ID: LIB3139-088-P1-N1-A1
gtgatttgcttcgtgacctggagtctcggatatctatgcagttcaaccgatttgttgatgaagcttgccatcaaattgaaagaaatgaacgcaatgttcgccaaatgggtgtcctatcctacattcccagatttgcaacccttgcaactcggatggagcagtacatccagggtcagtctagggatttggttgaccaagcatatacaaaatttgttagcataatgtttgcaactttagaaaaaattgcacaaacagatccaaagtatgcagatatttttctttttgagaactatgctgcttttcagaatagtttgtatgacctcgccaacattgtgcccacattggccaagttttatcatcaggccagtgaagcctatgaacaagcttgtacacgccatattagcatgat

SEQ ID NO: 45406 - DNA, 356 bp, Glycine max
  Clone ID: LIB3139-088-P1-N1-A10
cagagccaagaagaagaagaagaaaaccaacataatcaacaacaacaacaacaaaaagcttgcaaattagaagaatcttcagttaaaagggaagaagaacacacaagaagaaagagaagaagaaacgcgcgcgaatgaagggagaattagagttgccacctgggttcagatttcaccccactgatgaagaattggtgaatcactacttgtgtaggaagtgcgctggtcaaccaatcgcggttcccgtcatcaaagaggtcgatttgtacaagtttgatccatggcagcttccagaaattggtttttacggcgagaaagaatggtacttcttttctcctcgggaccggaaatacccg

SEQ ID NO: 45407 - DNA, 217 bp, Glycine max
  Clone ID: LIB3139-088-P1-N1-A11
aaaaaaaaaaaaaaaaaaaaaaaggggaaaataaaaaagggaggacgccaactaaaataaaaaaataacccggtaattaattcctgacccacacctgcaggaaggaccagatttccctttcgcgagtgaaattagagcttgacttaatggggggcgtcacctgtttcctgggtgatatcgagttactgtttcactcccccactactgtgggccctga

SEQ ID NO: 45408 - DNA, 407 bp, Glycine max
  Clone ID: LIB3139-088-P1-N1-A12
aaagaaacaaagactatccctggttttcaatctggctccttcctctctgtccatgacgacgtcgtccggttccctaaagaacacgattcccccaggcctccaagaagtgcttctcaacagaaaacgcccccaacaagaacccaacaacaatgccggaccctcttcctccaccgaggacgctgccatcgccgacgattgctccagctccaactccaagctcatcgtgctggtcaccaacagtgacagcattgagtcaccgggccttacattcctcgtcgaagccctcgtgcgtcagggcctctacgacgtccatgtctgcgttcctcaatcggacaaatcggcttcgggccactctgtcactcgcggagaaaccgtcgaagcttgttcggtacaaattaatggcgcca

SEQ ID NO: 45409 - DNA, 419 bp, Glycine max
  unsure at all n locations
  Clone ID: LIB3139-088-P1-N1-A2
gaaaaaggcaaaaggagatttgtttctggggatggtgaagagatgacattgattccgggaaccagtgttgaagaggcttacaataagctaatagttgaacttgagaaaagtgttcctacattggttggcattgaatgtcccaaggatgagaaacttcctcgtcgcaaaatttttgacaaacctaagacgcgctgcttcactattctccctatggagtttaatcttgtggttcgtcagaagtttttaaattttgtgaggttcattatgaagaaaagggacaagcttagttgtcaagttggaatcaacccatactccatggaatggactggtttggccaatagattactgagtaagggcaacgatattctgtggtgcgattatgctagttntgatgggttgattaccaagcaagttatgag

SEQ ID NO: 45410 - DNA, 423 bp, Glycine max
  Clone ID: LIB3139-088-P1-N1-A3
atcggcagttagagacagagagagagagaaacaaaaccctaattggtgagtggcgaaaatggcgcagccggcggcggcagcagcagcaacaggagcagcagtaatcgagcaagtgcagtgcttcgggcggaagaagacagcggtggcagtgacctactgcaagcgtggtcgaggcctcatcaagatcaatggctgcccgatcgagctggtggagccggagatcctccgtttcaaggccttcgagccaatcctcctcctcggccgccaccgcttcgccggcgtggacatgcgcatcagagtcaagggcggcggtcacacctcccagatctacgccatcaagcagagcatagccaaagccctcgttgcttactaccagaagtacgtagacgagcagtccaagaaggagatcaaggacattctcgt

SEQ ID NO: 45411 - DNA, 338 bp, Glycine max
  Clone ID: LIB3139-088-P1-N1-A4
cgatccttgaccagatggacgtggacaaccaaatcgcgaagctgatggtggagctctcgcggagtcaggactacgaaatcggcgacggaaccaccggcgtcgtcgtcatggccggcgcgcttctcgagaaggccgagcgcctcctcgagcggggaattcaccccatcaggatcgccgagggttacgaaatggcgtccaggatcgccgtcgagcatctcgagcgcgtcgccaacaagttcgagttcgacgagtccaatttggagcccctcattcaaacttgcatgaccaccctctcctccaaaattgtgaatcggtgtaagcgtagcttggctgagatt

SEQ ID NO: 45412 - DNA, 360 bp, Glycine max
  Clone ID: LIB3139-088-P1-N1-A5
cagaaacttaaatggacagattggtgaaaatagatcctttcagaggaagttggggactgcgattccttgaacttgagttatctaatccaactgatgtcgtgtttgaaatcaatgtctctgtcaaactggagaactctagcaacgaggacaatcattttgctgatcagggtgctacagaatatgtctatcctaaaacaagaattgatagagattgctcagccagggttctagtgcctcttgagcattttaaattacctgttcttgatgactccttttttatgaaggactcacaagcagatgggaatggcggaggaagaaatgcatccttttctgaaaaagacaccaaagctgaactcaatg

SEQ ID NO: 45413 - DNA, 421 bp, Glycine max
  Clone ID: LIB3139-088-P1-N1-A6
gaagtttctaagatgacttctccctacattaaatgtacagtctctttcttcatagcatttggaaatttggctgatgacaccatcaattttgaggcttttccccacaagctggtgcagtttggggagattcaggaaaaagctgtattgaaattttcacaagaggaatttcttacagcttggtcaactcaagtgcgtcctgcaacaactctgttagctgatgggtgtccatatttgtatgctatggtgcatgatagttcagtgtctacaataccaggtgattttgttattggtgttaagttgacaaccataaacaatatgtgtgcatatgggctcaatcctggtatttcaagttctcgttttttgagcaccattcctcagtccatttcacagcaaactgtgtggaatcaaatggcaacagtga

SEQ ID NO: 45414 - DNA, 212 bp, Glycine max
  Clone ID: LIB3139-088-P1-N1-A8
gaagcaacccacgtaaagtaattaccagttcgaggcacgaaggatggtggaaaacacaggacaaggaggaggcatatggttccagttgttccaccccaaaacggcgccgttcgcgtctcacaagacgctctttgtgttcctgtgggtggccacgctggcctcggtgttggtgtggcagaggaccaccatcagcgggtttcttgtgctcggcg

SEQ ID NO: 45415 - DNA, 414 bp, Glycine max
  Clone ID: LIB3139-088-P1-N1-A9
aagaaattctttctaagagttgcacaagatatggttgaggaatggttcgattgtgttgatgaggaggattcctttgaggaagtttctttaagtgcagcacttaatggtgttgagggtttggactatatggaaagaattcctcttgccacatctgagggatttcctcatgtgctttcacgcaaaaatggtgaaaaaggcaaaaggagatttgtctctggggatggtgaagagatgacactgattccgggaaccagtgttgaagaggcttacaacaagctaatagttgaacttgagaaaagtgttcctacattggttggcattgaatgtcccaaggatgagaaacttcctcgtcgcaaaatttttgacaaacctaagacgcgctgcttcactattctccctatggaagttaatctt

SEQ ID NO: 45416 - DNA, 410 bp, Glycine max
  Clone ID: LIB3139-088-P1-N1-B1
agcaaatagctttgatctatggcgaaaggacggttttttctctgcggcggaagaggtgcaggaatcagctgatataatggaatctgcatacagggcatggttgagagagaagagagaaaggtcaactcctgaggaattaaatgaactatgcagagagctgcaaactgctttaggtaccgcaaaatggcagttggaagaatttgataaagccgtcaggctaagctaccgacatcacggtgatgacaatacatccactaggcataggcagtttatttctgccattgaaagccaaattacccaggttgaagcagcactgagggaatcttacattgaggaaggtaagcaaccacttcggtgggtaaaccttgatgaagaagagcgagatgatctggctgcctttctatctggaa

SEQ ID NO: 45417 - DNA, 407 bp, Glycine max
  Clone ID: LIB3139-088-P1-N1-B10
ctctcttcttcttagctattccttcctcgtcatggagtcgcgagtgctgtcacgcgccggaaccttgttctccctccctcacctccgcaagctgccgcgggaggtcggcgccggcccctccctcgtcgccgtgaaggccgtgggctccgtggcggacggcgggaacctgatttgggggaggcaactgcgcccagagctctgctcgccggcgctgaagaaagaggccgtcctcctccggccatgcctcgccgccgcctccttgccggccgagggcagtgattccgccggagaagcaaaggttgctccggcggggtttttcgagaagtatccggctctggtgaccggattcttctttttcacgtggtacctcttgaacgggatttcaacattcttaacaagaagatcta

SEQ ID NO: 45418 - DNA, 417 bp, Glycine max
  Clone ID: LIB3139-088-P1-N1-B11
cggctcgagcaaacattgtttgttgtaggaagaggaatcttgagaaatggcaggggacagcaagagcaagattctgttcatcggagggactggttacatcggaaaattcatcgtggaagccagcgccaaagctggccacccaactttccttttggtgagggagtccactctctccaaccccgcaaaatcacccctcatcgacaatttcaaaggcctcggtgtcaatcttgttttaggagatctatacgatcaccaaagtttggtgagtgctataaagcaagtcgatgtggtaatttctactgtaggacacctgcagctagctgatcaagataagatcatttctgcaattaaagaagcaggaaatgttaagaagttctatccatctgagtttggaaatgatgtggaccggactcatgc

SEQ ID NO: 45419 - DNA, 418 bp, Glycine max
  Clone ID: LIB3139-088-P1-N1-B12
ggaatcaatgtcatctcttcaccatccccagaaacaaatctcctcttgcctttttcaccatttttacgtgaaagcacatgaggaaaaccctcagatgtggcaagaggaattctttccatatagtccaaaccctcaacaccattgagtgctgcacttaaagaaacttcctcaaaggaatcctcctcatcaacacaatcaaaccattcctcaaccatatcttgtgcaaccttagaaagaatttcttcatctaggggcatcatgggagtagcatatttttgaattccaccaagaaaaggatcatatccctcatgttctgtgcctaccaatctctcatcagttgtagtcaagacactaggaattttgtcacaaggtagatccagttgccattccttgggagtttccaccaaattagtttttg

SEQ ID NO: 45420 - DNA, 417 bp, Glycine max
  Clone ID: LIB3139-088-P1-N1-B2
atgtggaatcccttctggatttccgctcacagttatttgcaatagcatttttaatgagatgctcattagatatagctatgaaaaattactgcgccaggctaaagctccaagtatgtttttacaatccttcaaaaattttgtttctttgtgtgtgtatggagatgataacttaattagtgttcatgaatatgtcaagccttactttagtggttctaaattgaaaagctttctagctggtcataatatcaccattactgatggtattgacaaaactagtgcaactttgcaatttagaaagttagcagattgtgattttctcaagagaaactttaagcagatgtctaatgttttatgggtggctcctgaggacaaggcgagtttatggtcacaacttcattatgtttcgtgcaataatct

SEQ ID NO: 45421 - DNA, 243 bp, Glycine max
  Clone ID: LIB3139-088-P1-N1-B3
atctatttggagttgacggcgatggataccaattgacataaagctatcatttattaacacatgatgtggctgaacttaaacgatcagatgttactgagagtgtccaccaaaccgaaaggtcgtgggcattacctatacgccagctgcatcttcaatgattgctgggtgagggtgcatcgctcgatgcacggggaactgctggaggaggtcttggacctatttggcctctcctagatgtggggc

SEQ ID NO: 45422 - DNA, 319 bp, Glycine max
  Clone ID: LIB3139-088-P1-N1-B4
gtcctcctaaaaaactctatccatgtctatgatgtctctcacaaccagggctgcattcaagtccctcacaatggcggaatcgtgccttctattccttcctttccttttctacgccaaaaacaataccctttctcttttaatttccaccaaggccctcaacctccatcttccatgctccaactcttcgctcttttccctcaccaccaaaacaacgcgccactcttctctcctcacattcgtggctcagacatcggattgggcccaagaagaagaggaagaagaaacctcgtgggagaaccaaggcgacaccgcgtgggga

SEQ ID NO: 45423 - DNA, 418 bp, Glycine max
  Clone ID: LIB3139-088-P1-N1-B5
caagtttagagagagaggaagagaaagagagagagaattggagaaacaaacgctcactcactcactcactcctttgtttgttcttttctcccttggcttcctcatccatcaacgctatcattagcaattaagaaaccaagacatggggtttctcttcttcttcttcttctcctccttctttttcttctctccaaccacttccaagatgcgatgctgatctggagtgttgctgtttttcccttgagatcgattctcttgtgttggtggtgatcaagaacaagaaagtgtggttaattttgctttctttgaaaaaatccaatggaagaagatcatcaagaagtgaaacacgtgtgcaagttctgctgcaagagcttcccttgtggaagatccttgagtggccacatgaagtcacatgtca

SEQ ID NO: 45424 - DNA, 418 bp, Glycine max
  Clone ID: LIB3139-088-P1-N1-B6
attgaattttgattctagcaagcagagcttttgtcagttttctattgaccttctcggtggaggaatcttagtggacaaaactggagattggatcacacttatacaaaattctccaattagtaacttattgagagttgctgcttggaagaaaggctgtttaatggtcaagattgtgatgtctgggaatgcagcagtcaaaaggagtgattgggcctcattggtacaagtgtttttaacaaacagcaacagtacagagcattttgatgcatgtaagtggacaaaatcagaaccacattcctgggaattgatcttcccaatagaggtatgtggtcctaataatggttttgaaatgtggagttctgagtgggcaaatcaaacttcatggcatttgagtttccttattgacatcccaaacagt

SEQ ID NO: 45425 - DNA, 242 bp, Glycine max
  Clone ID: LIB3139-088-P1-N1-B7
cttgggaatctctcaagattttgaaattgctggtaatactcttatgccagctttttctgttccacaggctactgccaggtcttctgaaaatgcggaatcctctgcatgatctggaatttgtgttttctttcattcaataaaggaaattgggcatgaccctcttgttgagtatgctctgcctatttgaaaatttccacacctcttttaattgtcgtaatgatgtgtgaagtgtgtgttatttt

SEQ ID NO: 45426 - DNA, 410 bp, Glycine max
  Clone ID: LIB3139-088-P1-N1-B9
attaattgcaagaatggcacttcgttgcttggtgatgtccctttctgttctcttcactcttggtcttgcgagagaaagccatgccagagacgaagatttttggcatgctgtttggccaaacactcccattccaagttcattgcgagatcttctaaagcctggccctgcaagtgttgaaatcgatgatcaccctatgcatattgaagaaacacagtacccgaaaaccttcttctataaagaagaccttcatccaggcaaaacaatgaaagtacaattcagcaagcctccctttcaacaaccatggggtgttggtacatggttaaaggaaattaaagacactactaaagaaggatatagttttgaagagctatgcatcaagaaagaagccattgacggagaagagaagtttt

SEQ ID NO: 45427 - DNA, 413 bp, Glycine max
  Clone ID: LIB3139-088-P1-N1-C1
atccctagctctgtcgttccgtcgttgacgatggcgtttcgggtgcgaagccctgacctccgctctctctttcttctctctctcttgtccatcgcttccgccaatgtcttcttcgaagagcgtttcgatgacgggtgggaaaatcgatgggttaaatcagattggaaaaaagatgagaacgtggctggggagtggaaccacacctctggtcaatggaatggagacgctaatgacaaaggtattcaaaccagtgaggattacagattctatgctatttcagctgagtaccctgaattcagcaacaagggtaagacactagtctttcaattttctgttaagcacgaacagaagcttgactgtggtggtggctacatgaagttgctcagtggggatgttgatcagaaagaaattgc

SEQ ID NO: 45428 - DNA, 418 bp, Glycine max
  Clone ID: LIB3139-088-P1-N1-C10
agaagatgtgcacaaaggttttagagcttgatagtagaaatgtaaaagcactctatcggagggcacaggcatatcttcatcttgtggacttagatctagctgagatggatattaagaaagcccttgagattgagccaaacaacagggatgtgaagatggagtacaaaattttgaagtagaaggtgagagaacacaacaagaaggacgcacagttttacggcagcatatttgcaaaaatgaataaactagaacaagcaagaacagcaacagcaaagcaggagccggtgccaatgactattgacagcaaagcttaaatttaaatttgagagatatctctgtctgtggtcgtctctgcatagtacgatattccaattgttgtgtcgtaagtcttggtaacataaatagctttgctctgtat

SEQ ID NO: 45429 - DNA, 417 bp, Glycine max
  Clone ID: LIB3139-088-P1-N1-C11
cttgtcaaggtgaaccttgtcggctgctggaatttgacggataacatagtttcagtattggccacactacacggaggaaccctcgaattgctaaatcttgatggatgcaggaagattaccgacgcaagcttggttgcaatcgcggataactgccttctgcttaatgatctagatgtgtcaaagtgtgcaatcactgatgccggtatagctgttctttctagtgccaaacagcttactttgcaagtgctttctttgtcaaactgttctggtgtaacaaacaagagtgcgccttccctaaaaaagttgggccagaccttggtggggttgaatcttcaaaactgcaattcaattggctgcaacacagttgagttcctagtggagaacttgtggagatgtgatattctggcttaatatctt

SEQ ID NO: 45430 - DNA, 411 bp, Glycine max
  Clone ID: LIB3139-088-P1-N1-C12
ctcaatttcattcagtgtcaagaagataatattgcagagtactatcagcagcaggttgaagtgcttgagggctttactgaaatggatgctttagcagagcgtggttttattcctggaatgtcaaaggaagagcgagacaagttagcaagaagtgagacatttgccatcagagtgtcaaatgcagcaaacatggttctttttgttgccaaagtttatgcatcaatcaggagtggttccctggccatcattgcatccacgttagactcacttcttgacctcctttctggattcatcctctggttcactgcattttccatgcaaacaccaaacccatatcagtaccctataggaaagaaacggatgcaaccattgggaattcttgttttgcctctgtatggcgacacttggact

SEQ ID NO: 45431 - DNA, 391 bp, Glycine max
  Clone ID: LIB3139-088-P1-N1-C2
cgagcttacaaaagatgcagccttggatccaacgtggctggtggcagtagctgtggcacatgcatttgcactgtttgtaggtgtctccgtcgccgccaacatctcaagtggccatttgaacccagctgtcacttttggattggccattggaggcaacatcactctcatcactggtttcttatactggattgcccaattgttgggttctatagtcgcatgcctcctcctcaatttgatcaccgctaagagcattccaagccactcgccggctaatggtgtgaacgatttgcaagctgtagtgtttgagattgttatcacatttgggttggtttacactgtgtatgcaactgcagtagacccaaagaagggtcattgggtatcattgcaccca

SEQ ID NO: 45432 - DNA, 418 bp, Glycine max
  Clone ID: LIB3139-088-P1-N1-C3
cttgaagttggaaaacaagaatgattttgacctcggcctcaacgcgctcgattatgaggtctggcttggtgatgttagcattggtggtgcagaactcaccaagtctgctaaaattgaaaaaagtggaattagttatattgatattccaattaccttcaggcctaaggattttggctctgcactatgggacatgattagaggaagaggaactgcttacaccataaaaggacatattgatgttgacactccctttggagcaatgaagttgcccatcagcaaagaaggtggtactacccgtcttaagaaaaagaaggaagatcgtgattatgatgatgatgacgatgatgatgaggaatgaagaaatgtagcaggttattactagctataaataaagcgggcattactttctgagttctga

SEQ ID NO: 45433 - DNA, 395 bp, Glycine max
  Clone ID: LIB3139-088-P1-N1-C4
aacagatcaaattcctccttttttttcttatggtgctaagaaaacccaatcaacagatcaagttcctccttttttttatggtgctaagaaaacccaatcaacagatcaagttcctatcttttatggtgctaagaaaactcaatcaacagatcaagttcctatcttttatggtgctaagaaaatccaatcaacagatcaaactcctctttttttatatggtgctaagaaaacccaatccgaagatcaagttcctattttttggtacggtattaagaaaactcaatccgaagatcaacctcctctttggtacggtgttaagaaaacctatgttgcaaaaagaagtctttcacaagaagatgaaacgatccttgttgctaatggtcatcaacatgaca

SEQ ID NO: 45434 - DNA, 414 bp, Glycine max
  Clone ID: LIB3139-088-P1-N1-C5
catgaagatagctacaactggagaaaatatggtcagaaagacatccttggagccaaatatcccagaagttactataggtgcaccttccgcaacactcagggctgttgggcaacaaagcaagtgcagagatcagatgaagatcccacagtatttgacataacttacagaggcaagcatacctgttctcagggaaacaatgccgttctgccacctaagtcaccagaaaaacaagaaaaaccaacacacagtcataacattgatattcaccgtgcacaggcatctcaagaaagccttacaaagttcagaaacatcttgtctgtcaacacagataatctgaacaatggagatatggcatatcctttcactttcccttcaacttcatttggatgcatgaaacaagacaaccacagcttg

SEQ ID NO: 45435 - DNA, 418 bp, Glycine max
  Clone ID: LIB3139-088-P1-N1-C6
tgacatagtggttcagaaggacctcactgggttatggaagattgatatggatggcaaggtgaatggagcagtagaaacatgttttgggtcattccatagatatgcacagtacatgaatttctctcaccccttgattaaagcaaagtttaatccaaaggcttgtgcatgggcttatggaatgaatttctttgatttggatgcttggagaagggaaaaatgcacagaagaatatcattactggcagaatctgaatgagaatcggacattatggaaattagggacattgccaccgggtttaatcacatactacgcaacaacaaagccactggataagtcatggcatgttctgggacttggctataacccaagcatcagcatggatgagattaacaatgcagcagtggtgcacttcaatggc

SEQ ID NO: 45436 - DNA, 409 bp, Glycine max
  Clone ID: LIB3139-088-P1-N1-C8
ttgatgccagattgagacaaagaatagatcctcaatacaatgaggttcaggctcagatggaaacaaatttgtttaaattgtctcttgatgatgttgaaactcctaaaggttccatgttggatcttaaaatttctcaatctaaaattgcacttcccaagaacacagttggaggaaccattctgcgtagtgatctattggcaaattttttgacagagggcaattttagagcaagtgttgatttgcagcgcactcatcgtattaaaggaatgattaaaatggtggccacagttggtattcctgagaatacaggtatagcattggcctgtgctatgaatagttcttttagggggcgcgccagctctgatatttacaccatctgctctcaagactgtgaattatggaatcctgc

SEQ ID NO: 45437 - DNA, 402 bp, Glycine max
  Clone ID: LIB3139-088-P1-N1-C9
gggcacttcccgaagtgttaagagaatgcctctttctatagggggaggagctggtgcaaagaatgctattctcatgaatatgccaaatgctgttctttcaatgtggagatattttgttggagatctcgtctttgaagtttctaagatgacttctccctacattaaatgtacagtctctttcttcatagcatttggaaatttggctgatgacaccatcaattttgaggcttttccccacaagctggtgcagtttggagagattcaggaaaaagttgtgttgaaattttcacaagaggaatttcttacagcttggtcaactcaggtgcgtcccgcaacgactctgttggctgatgggtgcccatatttgtatgctatggtgcatgatagttcagtgtctacaat

SEQ ID NO: 45438 - DNA, 401 bp, Glycine max
  Clone ID: LIB3139-088-P1-N1-D1
gttcatttcttataacaactctcatattaagccactgttgaatgaaaaccttgggaatatgagaaggccttgcaaacattctaagaagaaacatgatctctttgaatgtctccctgacgatctccttgtccttattctttctaagctcagctccaccgcttcttctccttctgatttcatcaacatcatcttaacatgcaagaggttaaaccggttaggcctgcaccgtcttgtgttatccaaagctgcctctaaactattcgccataaaaccgaaaaattggtcggaatatgctcactcttttctcaaacactgcgctaacgccggtaacgtggatgcctgttacactctcggaatgatccgattttactgtttgaaaaatcgagggagcggactctcgt

SEQ ID NO: 45439 - DNA, 397 bp, Glycine max
  Clone ID: LIB3139-088-P1-N1-D10
ggaagagcttgctggtgggaatttcttcaggagctgcagctgcagctgctttgaaggttggaaagaggcctgagaatgcaagaaagcttattggggttgtcttcccaagctttggtgaaagatatttgtcaactattcttttccagtcattacgggaagaatgcgagattatgcaacctgagccatgaattgactttgctcgttaatgtttcatactcattttccacaagtatctgtttggaatgacagtgtcagatgtccatgttatgcccgtatttctcatttttgacactttataaattagatacttgtttcaggtcattgtttcgacttacaacacatatttatgacccttgattgaagaaaatttatatgtaaatattttagtctttgatac

SEQ ID NO: 45440 - DNA, 288 bp, Glycine max
  Clone ID: LIB3139-088-P1-N1-D11
cctgaacgtggggaagtggatcagacgctcctgggtgaatctccactctcagttcaacattgtgattgcttccttcgatagatgcggcggtgggacgatcagcttggcggggatggagatgaagcctgctatgaaactggcggagtctgagcgttcggattctgccactacgtgagcactcaagtcttggagggcaatgatagactcgatgcttgagagactggtcctcgcgttgcaggtgatggaaggggagatgcggtgcgctttccaaccattcccgacataaga

SEQ ID NO: 45441 - DNA, 278 bp, Glycine max
  Clone ID: LIB3139-088-P1-N1-D12
catctttctctcttcttttctgtgcagttgaggaaaaaaaactatgctccaatccaacaacaagcaaagaagcttctcctcacttttcttctttatcttttctctctaagccttttgttctctctacttcattcatgatgagtttgtgttcctccaaaggaacctgttctggtgacaccaatgcacacgtttcctcttctactgttggaaattactcttctgacataaaaaggcacatcaacatattcataacctttttgagaaaaaccatgtgggag

SEQ ID NO: 45442 - DNA, 412 bp, Glycine max
  Clone ID: LIB3139-088-P1-N1-D2
ctcttggaagtgtgtgaagcaaaatgggtagatgtaacaaaatcgtgacgcaagttagccctcttgacaatcttgatcatattgctctgcaaactctgctgcactaactgcttcaccgctttcttttcctcactcatgatcccatcttcctccaccaagcaccctttcgacgaagaagaagaagatccacaaataggagcagagacacccaagttaaagtttccaccgtaacttccagaaacctgtttccctttgtctatcctcaaacactccaatattctggaggctctcttttgagccagcgtggttcccaccagcgttaactcaagcagcgacgacactatccctgcctctatcatcacccgcctgtcaccgtacgctttgtgcgccattatcatcaaaacgtacgacg

SEQ ID NO: 45443 - DNA, 420 bp, Glycine max
  Clone ID: LIB3139-088-P1-N1-D4
attctctttgcgcagttccctacctctcctttcaagatgcagatcttcgtcaagaccctcaccggaaagaccatcacccttgaggtggaaagctctgacaccatcgacaacgtcaaggccaagatccaggacaaggaaggaattccccccggatcagcaacgtctcatcttcgccggaaagcagctcgaggacggccgtaccctcgccgactacaacatccagaaggagtcaacccttcaccttgtccttcgtctccgtggtggcatgcagatcttcgtcaagactctcactggcaaaaccataaccctagaggtcgaaagctctgacaccattgacaacgtcaaggccaagatccaggacaaggagggaatccccccagaccagcaacgtcttatcttcgccggaaagcaacttgagga

SEQ ID NO: 45444 - DNA, 404 bp, Glycine max
  Clone ID: LIB3139-088-P1-N1-D5
cgacgaccttctcctcttcgacccctccgacttcgacatctccggcctcccgtcgccgctccctctgccatctccggtctccgccggcttggttccgatgtccgtcgactccgacgagtccggcaaacagccgaggccggccggggcgtccgccggcgggcacctgcggagtctgtcggtggattctgacttcttcgacgggctcgggttcggcggcgacgagagaggcgccgggaaaggaggcggcggcgagcggagggtggggcaccaccggcacagcaactcgatggacgggtcgtcgacgacgtcgtttgaggcggactcggcgatgataatggacggtgtgaagaaagctatggctcctgataaacttgctgaacttgctcttatggatcccaagagag

SEQ ID NO: 45445 - DNA, 413 bp, Glycine max
  Clone ID: LIB3139-088-P1-N1-D6
aaaaaaagctccaccaatggcgggttacagagccgacgacgactacgactacctcttcaaggtggtcctgatcggcgattccggcgtgggcaagtccaacctcctctctcgcttcaccaagaacgagttcaacttggagtccaagtccaccattggcgtcgagttcgccacccgcaccttgaacgtcgattccaaagtcatcaaggcccagatctgggacaccgcaagccaagaaaggtatcgtgccatcaccagtgcatactatcgtggggcagtcggtgcacttctcgtgtatgatgtcactcgccatgcaacatttgaaaatgttgacagatggctgaaagaattgcggaaccacacagatgccaacattgttgtgatgctcgtgggtaataaatcagaccttcgtcacc

SEQ ID NO: 45446 - DNA, 415 bp, Glycine max
  Clone ID: LIB3139-088-P1-N1-D7
gatgagactgtgaccaacgacgaaattgcagctgacctcaaggagcatgtgatcaagccggtgatcccggagaagtaccttgatgagaagaccattttccacttgaacccctctggccgttttgtcattggaggtcctcacggtgatgctggtctcaccggccgcaagatcatcatcgatacttacggaggatggggtgctcatggtggtggtgccttctccgggaaggatcccaccaaggttgataggagtggtgcttacattgtgagacaggctgctaagagcattgtggcaagtggactagccagaaggtgcattgtgcaagtgtcttatgccattggtgtgcccgagcctttgtctgtctttgttgacacctatggcaccgggaagatccatgataaggagattctcaaca

SEQ ID NO: 45447 - DNA, 394 bp, Glycine max
  Clone ID: LIB3139-088-P1-N1-D9
atttggcttatgacaccatcaattttgaggcttttgcccacaagctggtgcagtttggagagattcaagaaaaagttgtattgaaattttcacaagaggaatttcttacagcttggtcaactcaggtgcgtcctgcaacaactctgttagctgatgggtgtccatatttgtatgctatggtgcatgatagttcagtgtctacaataccaggtgattttgttattggtgttaagttgacaaccataaacaatatgtgtgcatatgggctcaatcctggtatttcaggttctcgtcttttgggcaccattccttagtccatttcacagcaaactgtttggaatcaaatggcaacagtgagaacaccattgtattttgattctagcagcagagcttt

SEQ ID NO: 45448 - DNA, 420 bp, Glycine max
  Clone ID: LIB3139-088-P1-N1-E1
gagtttccaacatcgctcctaatatcatttctgagaaccaaagaggattcatcaaagggagatcaattttcgattgcatcaacactacttcagaggtcatcaaacttctctcttttatggggagcgtgatgttggtgaaatttgttattcacactatgctagcttactcatttcatgtttacctgtggccatgtgacctcttaggcgtgtggactagtggattagaaactttctctggagtggtgatgtggatattaggaagcatgttattgtcgcttggagttcgatttgtaagccttttgaggaaggggggcttggtttgcgctcgatggctaccattaacaaagcaacaatgctaaagctgggttgggatatgctctcaactgatttgcagtgggctaaaattttaaaagctcatgt

SEQ ID NO: 45449 - DNA, 403 bp, Glycine max
  Clone ID: LIB3139-088-P1-N1-E10
caagagaaactttaagcagatgtctaatgttttgtgggtggctcctgaagacaaggcgagtttatggtcacaacttcattatgtttcgtgtaataatctggaaatgcaagaagcttatcttgtcaatctcgtaaatgtgttacgagaactgtatttgcacagtccagaggaagctcgccaattgagaaggaaagctctctctcgtattgaatggctgcaaaaagctgatgtgcctaccatagcacagattgaagagttccattcgatgcagaggatgatgaatgctcctgattcaaatgataatattgatctactgttgagcattgatttgttgggtttacaaggagcaggcaaagcttttccaaacaagattgttttgatgataagctgtgttgcttacaca

SEQ ID NO: 45450 - DNA, 408 bp, Glycine max
  Clone ID: LIB3139-088-P1-N1-E12
ctcgagccgaatcggctcgagccaaacttcagtttcaaagatgcctcgtggaacgcttgaagttgttctgatcagcgccaaaggaatcgatgacaatgattttctctccagcattgatccttatgtgattctcacatacagggcacaggagaaaaagagcactgtgcaagaagatgctggatccaagccacaatggaatgagagctttcttttcactgtctctgacagtgcatctgaacttaatctaaagataatggataaagacaactttagtcaagatgattgtcttggcgtggcaaccattcatctggatccagtgtttgaagcgggtagcattccagaaactgcttacaaggttgtgaaggacgaagaatattggggagagattaaggtggctctcacttttac

SEQ ID NO: 45451 - DNA, 412 bp, Glycine max
  unsure at all n locations
  Clone ID: LIB3139-088-P1-N1-E2
caaaaatcagtatattctcccttgttcaatcaattactcttcttccttcccttccttccttccttaaacccaatcgaagaaaaataaaatgttgttccacaatccaccacataccgactgaaaaaaaaaaactcagtttgagggtttattatactttgattgattaattaattattagttattagttagttggttaatcaatggaagagtgtcacacggtgttcggaaagtacgagatggggaggcttctcggcaaggggacgtttgccaaagtgtattacgggaagcaaataagcacgggcgagaacgtggcaatcaaagtgatcaacaaagagcaagtgagaaaagaaggaatgatggaacagatcaaacgtgaaatctccgtgatgcgnttggtgcgacacccaaacgt

SEQ ID NO: 45452 - DNA, 404 bp, Glycine max
  Clone ID: LIB3139-088-P1-N1-E3
ctcataatcaaataccatttcattcattcttacatattgcttaattttatctgaattttgaaacaccttctgaatggctttttcaagagttgcattgttaatatgcacggtaattgggtattttgtgattgcctctgcgggcaatttttaccaagattttgatatcacttggggagatgggcgtgctaagatactcaacaatggcgagcttctcactctgtctcttgacaaagcctctggctcgggtttccaatccaagaacgaatacctttttggtaaaattgatatgcaactcaaactagttccaggcaactctgctggcaccgtcacagcctactacgtataatcatattctaccctactactatatttgcatctagtcatacatattgttcataaacttc

SEQ ID NO: 45453 - DNA, 299 bp, Glycine max
  Clone ID: LIB3139-088-P1-N1-E4
agcatatatttatctttattctcatggagaagtctcatatgctgcatcacaaccagtgctcttatatgctgctgctgtaatggttttgatattcccctttgatatcttttatttttcatctagatatttcttcttaaggacactctggcgaatagtttttccattacaggcaatatcattcgcagattttttcttggctgatatcttaacttccatggcaaaagtcttttctgacttggagcgttcagtgtgtagaatggtccatcgacaggttgccacaattgcttggttggaagctg

SEQ ID NO: 45454 - DNA, 417 bp, Glycine max
  Clone ID: LIB3139-088-P1-N1-E5
acattgtcgacactcgacagacatataaagtaactgaagctcaaaacggtgatggaagaaccgaacaagacagagaacgaagatgacagggacgaatcagaacaacgagtgtggagttggggtgctggaaccgagggacagttaggaacaaagattcttcaggatgagcacttccctcaactccttcaccaattctctctctcctccatctcttcccttgcctgtggcggtgctcatgtcatagccttaacctctgctggaaaggcactatcatggggtaggggcaattctggccaactgggccatggggaggttgtgagtaacactttgtatccaaaggctgtaacatcattggatggctatttcataacccatgtctctgctgggtggagccactctggttttgtttcagatact

SEQ ID NO: 45455 - DNA, 417 bp, Glycine max
  Clone ID: LIB3139-088-P1-N1-E6
cacttcttcttgtgttgtcataacttcaacaacttctttcttctcgatctcacgatggctcatttggccctgtctcagatggctgtaactgttcctgttggcaacgatttgtctctcagaagatctgcagttaaggcccctaacttgaacttttgggataaatcatgggcaccagtatttactttggacttgaagccaaacaacccaagtttaagaagtcgtcatgtggtatgcatgtccgtgcaacaagcaagtgtatccaaagttaatgtctcacctttagaattggaagatgctaaagaacctccattgaacttatacaagcctaaagaaccctatacagcaacaattgtttctggtgataggctagtggggccaaaggctcctggggaaacttgtcatattgtgattgatcac

SEQ ID NO: 45456 - DNA, 418 bp, Glycine max
  Clone ID: LIB3139-088-P1-N1-E8
gtttgtggctttggtaacagcgcgattgaagcagtttcgggggcaacagaaatcaaacgcgttctcctcgccggcggcgatggggacacacgccgctactccgccgccacctccgccaccgccaaaggaaccctttattcggcgctacaaattcgtttggcctatgcttttggctgtgaatcttggtgtcgcagcttatttgtttacgaggacaaagaagaagggtactggtgaggaggagcaagatgtaactcgtgtctcaactaaggatgctacccctcatgttgttgagatgcctgtgccgccaccatctattacaaatcccatgatcaaacgagagccaattccagaaaacgaacaatgtgaactcttgaagtggatattggaagagaagaggaaggtcaaagcaaaagacgca

SEQ ID NO: 45457 - DNA, 356 bp, Glycine max
  Clone ID: LIB3139-088-P1-N1-E9
cagattgaagagttccattcgatgcagaggatgatgaatgctcctgattcaaatgataatattgatctactgttgagcattgatttgttgggtttacaaggagcaggcaaagcttttccaaacaagatcatttttgatgataagcttgtgttggctaacacacaagaattctttgatggaaattttccagtggattcttggttaccaatttttgtgaattgtctttatcctgtaagtcaattacctccagaagctgtcgttgtaaatgttacatgtggtagtggacgtggtggttttcccaccactgcttggattagttctgcagttaacaatcgctcctcagatatcaacaaaaa

SEQ ID NO: 45458 - DNA, 409 bp, Glycine max
  Clone ID: LIB3139-088-P1-N1-F1
gagattatcttgatgctgctgatacacctggatggtattgtggacctaatttcttttcaaccgacgtgctccgtagctttgccaagtcccagattgattacatccttggaaataacccaaggaaaatgagttatgtcgtaagttttggtaatcattacccaaaacacgtccaccatagaggagcatctgtaccgaagaacaagatcaagtatagctgtaaaggtggatggaaatggagggacacttctaagccaaacccaaatacaattgttggtgccatggttgccggtcctgacaagcatgatggcttccatgatgttcgtacaaactacaattacacagagccaacacttgctggaaatgccggtttagttgctgcactagtggcattgtcaggcgacaaagcaca

SEQ ID NO: 45459 - DNA, 279 bp, Glycine max
  Clone ID: LIB3139-088-P1-N1-F11
ggcttttccccacaagctggtacagtttggagagattcaggaaaaagttgtattgaaattttcacaagaggaatttcttacagcttggtcaacccaggtgcgtcctgcaacaactctgttggctgatgggtgtccatatttgtatgctatggtgcatgatagttcagtgtctacaataccaggtgattttgtcattggtgttaagttgacaaccataaacaatatgtgtgcatatgggctcaatcctgggatttcaaggtctcgtcttttgggcaccat

SEQ ID NO: 45460 - DNA, 175 bp, Glycine max
  Clone ID: LIB3139-088-P1-N1-F12
ggctcgagaactacgcgcgcttctacttggccaacctcttgcccatatgcgtgaggcgcgtggtgtactgggactcccatctcatactcagagactacattatcaagctggcagcaacaaccattgggcgaaaacaagagtgctggctgcccgcgaatactgcaacgccaatttc

SEQ ID NO: 45461 - DNA, 402 bp, Glycine max
  Clone ID: LIB3139-088-P1-N1-F2
gaaaagaaaacatacatcaacaccaacatctcatacacttgtgtgtcatagggtggtctcctttggtgagaattgagaagacactcaattcatcaccttttccctctctccttttccaaagaaaaagaaaaaaagaagatcaattccaatggaggtttcatgcaaaattttgagaagatcaatccacagttttcttcaaaactaccattattttacctcaactgcagcttttctagcccttcctttctccgcatcaatactcctatcagaagcttttgtgccagcctcttcatccctcttgcctcagatacacagtcacctaaagactctctttgatgccgcaggctttccttccacatcacaattgtttaccattctcaaccttaaggtttctcaaacaat

SEQ ID NO: 45462 - DNA, 400 bp, Glycine max
  Clone ID: LIB3139-088-P1-N1-F3
ctcgagccgctcgaactcaaaggatgatcctgccaaggaggctgctaacttcactgcccaggttatcatcatgaaccatcctggtcagattggaaatggctatgcccctgttcttgactgccacacttcccacattgctgtcaagtttgctgaactcatgaccaagattgacaggcgatctggcaaagagcttgagaaggaacccaagtttttgaagaatggtgatgctggttttgttaagatgattccgaccaaacccatggtggttgaaactttctctgagtaccccccacttggtcgctttgctgtcagggatatgcgtcaaactgttgctgtgggagtcatcaagaacgtggagaagaaggatcctactggagccaaggtcaccaaggctgcccag

SEQ ID NO: 45463 - DNA, 417 bp, Glycine max
  Clone ID: LIB3139-088-P1-N1-F4
ccgaggaccgcgccgacaccgagtacctcggtctcccccccatcgccgccaacgagcccatcctcggcctcatctgggagcaggtcgccatcctccacaccggctccctcgacgaccgctccgacgccgccgcctccctcgtgtcgctcgcacgtgacaacgaccgctacggcaaattaatcatcgaggaaggcggcgtcggtcccttactgaagcttatcaaagaaggcaaaaaagaagggcaagagaacgccgcaagagcaattgggcttctcggcccgtgaccctgagagcgtggaactcatgatccacgctggtgtttgctctgtcttcgccaaagtcctcaaagaaggtcccatgaaagtgcaagccgtggtggcttgggccgtgtcggaattagctgcgaaataccctaca

SEQ ID NO: 45464 - DNA, 275 bp, Glycine max
  Clone ID: LIB3139-088-P1-N1-F6
atggtttctctctctatagtttactctctctatgcaatgtaggtcgccggaggatggcaaactaccaccgcaacaacgtagaaaacgtcgtcctcggccaccaccaccgttccaagtccgcctccgtcgccggccacaccttccgcctatgtaccgccgactacttccgccggctcatctttgacgccgtcagctgcggcgccagctctcgctacgccgcgagatccaacacctcctccgacggcgagaaacagcataagcaaaaacctaagacg

SEQ ID NO: 45465 - DNA, 396 bp, Glycine max
  Clone ID: LIB3139-088-P1-N1-F7
cgtttattcatgtcctttttggttgttttctttttctttttcggtacattacatctattattgagtttatgcatcccgcgagtgtgacttggaccatattcttttaatcatgcttctgctttgcatagagactcatcatacttctgccaaattactatgtatatttcgttcataatagctatttatttattgttaaactaccctgtgacagattctacagcttgagagaagattacaagaccaatttcaggtcagatccacgttagaaaaggcacttggattcagatcttcatctctcgttaattcaaatgagatgatgatacccaagccagccacagaattaattagggaaattgcagtgttagagttggaagttgtgtatttggagcaacacct

SEQ ID NO: 45466 - DNA, 411 bp, Glycine max
  Clone ID: LIB3139-088-P1-N1-F8
cgaaaatgatgatgtaaatagagcagtgacccaaagattgcttcagaaactaggttgtgttgtaactcctgttgcttcaggatttgaatgccttactgtcattggacctgcaggatgttctattcaagtcattcttttagatcttcacatgcctgatttagatggctttgaggttgccacgaggattcggaagtttagaagtggtaatcaacctatgattgttgccttgactgcaagtgcagaagaagatttgtgggaaagatgcatgcaagttggtattaatggagttatccgcaagccagttttgttgcatggaattgctagtgaactcagaagaatcctcatgcagggaaataatgtcctttgagaatggaatggagggtgcaagttgtaacacttaagcatctcaag

SEQ ID NO: 45467 - DNA, 419 bp, Glycine max
  unsure at all n locations
  Clone ID: LIB3139-088-P1-N1-F9
gtttgttgatcgagataactagaaacagtgtgatgaaaatgaaggtccttgttttcttcgttgctacaattttggtagcatggcaatgccatgcgtacgatatgttccctctccgaatgaacactggctatggtgcccgtactccggaggtgaaatgcgcaagttggaggcttgctgtggaagcacacaacatctttggctttgagaccattcctgaagagtgcgttgaagcaacaaaggaatacatccatggcgaacaatatagatcagactccaaaacagttaaccaacaagcttacttttatgccagagacctcgaagtccatcccaaggacacatttgtgttcagtatagatggcaccgtactctctaatattccatactacaaaaaacatggatatggngtggagaaatttaac

SEQ ID NO: 45468 - DNA, 388 bp, Glycine max
  Clone ID: LIB3139-088-P1-N1-G1
gcgtcgcggaaggttctagagaggatcgcagacgcggtgctctccagaaccttcgagaaggcggctgaagactgctacgccgtggaaaggatctggaagcttctcgcggaggtggaggacctccacctgatgatggatccggacgatttcttgagactgaagaatcagctctcggtgaaatcctccggcggcgaaacggcttcgttctgcttcaggtcgaaggagttggttgaactgacgaagatgtgcagagatctgaggcacaaggtgccggagatattggaggtggaggtggatccgaagggaggacctgggattcaagaggcggcgatgaagctctacgtttcgaagagcgcgttcgagatggttcacttgttgctgctatgca

SEQ ID NO: 45469 - DNA, 393 bp, Glycine max
  Clone ID: LIB3139-088-P1-N1-G10
ataacagataacagatatgaggaaatcgtggtcgttttgctgagaaaataaggaaatgaaggaagaatccgcatttccgaaaggatatatctgatctagtagggttttgtgactgctcaacaacccaatcgccatggcgtcgcaggagagtatcgaaaagatgctgtcacggccagaattaccggaatttatggcacaccgatctcttgagatccattcaagccgatacaccttattgttgcctcgcgttgtggtgtgcgccatgtgtgtcttaccttcttcgcaaaagagccctttatgatgatatgtcaagatacacatgttgtgctggctacatgccttgcaatggtaggtgtggagaaaagtaatgtccagaattttgcctttgcactg

SEQ ID NO: 45470 - DNA, 400 bp, Glycine max
  Clone ID: LIB3139-088-P1-N1-G11
ccacccctccgcccaacgcctctctcaacccccaagccatggcctctcttaaacaagctcaggctctagctggaggccctttagttcaggcgcgaaactttgctgtgatgacgggagtgaacgctgggatttcctgtgtcttgaaaaggataaggggcaaggaagatgtccagtccagcatggcggcagcttttggttcaggggccatgttttcattagtaaggggcatgggtggaccaaatcaagcaacaaatgcagtcacttctggacttttctttgcacttgttcaaggtggacttttccagataggacaaaagttttctaacccacctgctgaagatactcactatgctaaaacaagacatatgctgaacaatcttggccttcagagttacgaaaa

SEQ ID NO: 45471 - DNA, 421 bp, Glycine max
  Clone ID: LIB3139-088-P1-N1-G2
ctcaaacccgtgtgattgatatcttagttatctaattacctcaattaatcccttaattgcaagcatcatggctgaggagaaacaccaccaccacttccaccaccacaagggcgatgatgtgcctggcgaggttgattataagaaggaggagaagcaccacaagcatcttgagcaccttggggaacttggtgctgcggctgccggtgcttatgccttgcatgagaagcatgaggccaagaaagacccagagcatgctcacaggcacaaggtagaagaggagattgcggcagcagctactgttggtgctggtggttttgtcttgcatgaacaccatgagaaaaaggaagttaagaaagaagatgaggaagctcatggaaagaagcaccaccatctgtttggcttgacatgataaatattcata

SEQ ID NO: 45472 - DNA, 349 bp, Glycine max
  Clone ID: LIB3139-088-P1-N1-G3
ccccccctctcatacactctctaatccaaagagaacaccaccctttttcctcattctcttcctcactaaaacatcacactttttttcatttcaccaaacaaaacagtaacaccacacagccatgacagacagggtgtacccatcggccaagcccgccgcggttaacggcgccgccgccaacccatctttcccggcgactaaggctcaactttacggcgccacacgccccacctaccgtcctcagccccaccaccggcgccggagcaagcgccggtgctgctgcaccttctttttctggctgatcctcaccgttctgatcctcctcctcctgatcggcgtcggcggcacg

SEQ ID NO: 45473 - DNA, 240 bp, Glycine max
  Clone ID: LIB3139-088-P1-N1-G4
cccgagtcgagttccgggagtgacgtcatcatcggagtcctcgacaccggcgtctggccggagagcaagagcttcgacgacacgggacttgggcctgttccgagcacctggaaaggcgcgtgcgagacgggaacgaatctcaccgcgtcgaattgtaacagtaagctgatcggagcgaggcttttttttgaagggtgttgaagccattcttggccctattaatgaaaccgatcactgata

SEQ ID NO: 45474 - DNA, 407 bp, Glycine max
  Clone ID: LIB3139-088-P1-N1-G5
cactgctgaaattaaatataagcggaatttgagtaatattcatatttccggcttattttacgacggcagatacaaattctggactaaacacgagaaaaatcttgctttgacagaagaggaaaagatggaagtgattagaaatagaggcattcctgctgatgttcttgcaaagcgagctcatgaatttgaaaaacatgttgctcatgaaagcctcaaggatcaaattcctgctgttgacaagttgtattctactaagggcaataagtttgcaaaaattatgaaccttagacaaagagttgttggtgatcttaaacttcttactgatgggaagtcgtatgaggagtaagcatactcctgtatccaatattagtgcaggggaaaatcatgtagttcaaatacccttaatg

SEQ ID NO: 45475 - DNA, 461 bp, Glycine max
  unsure at all n locations
  Clone ID: LIB3139-088-P1-N1-G6
agctcgagaattcaggcttcgagttagaagttttgatttctagcaaanncagagctttttggcgaattgttctatctgacgcttctcaggtgcgagagaattttacgtggacgaaaactcgagagattgcgatcacacgtgatacaaatattctccaattagtaacattgttagagagttagctgcttggaagaaaggttgtttaatggtcaagattgtgatgtctgggaatgcagcagtcaaaaggagtgattgggcctcattggtacaagtgtttttaacaaacagcaacagtacagagcattttgatgcatgtaagtggacaaaatcagaaccacattcctgggaatttattcttcccaatagaggtatgtggtcctaataatggttttgaaatgtggagttctgagtgggcaaatcaaacttcatggcatttgagtttccttattgacaatcccaaa

SEQ ID NO: 45476 - DNA, 408 bp, Glycine max
  Clone ID: LIB3139-088-P1-N1-G7
tcgacggcggtgggtgccaccgtgactaatgcatcgtactatggtctggcggcggggagcgcaacgggtgggtcctcagaatcaagattggcagtttacagagtgtgttctaactttgggtgtcgtgggtcggccattcttggggcgtttgacgatgccatttcggatggagtggatgtgttgtcgctgtcgctgggtgcatctcctgggttccaacccgatttgaccactgatccaattgccctcggagcattccacgctgtggagcgaggcatcctggtggtctgctctgccggcaattccggacccagctccttcacggttgtcaacgacgcaccttggattttaactgttgcagcttccactatcgatcgggattttcagtccgacgtcgtcttgagtgtcgac

SEQ ID NO: 45477 - DNA, 364 bp, Glycine max
  Clone ID: LIB3139-088-P1-N1-G8
cactacctctgcatttttctctcgctctctgccttccatcaccctcgccatttcccttcccaagatagtagaagatggcagacgctgaggatattcaacctcttgtttgtgacaatggaacaggaatggttaaggctggttttgctggagatgatgccccacgtgctgtgtttcccagcattgtaggtcgtcctcgtcacactggtgtgatggttggcatgggccaaaaagatgcatatgttggtgatgaggcacagtctaagaggggtattttgactctcaagtaccccattgaacacggaattgtgagcaattgggatgatatggaaaagatttggcatcataccttctataatgagcttcg

SEQ ID NO: 45478 - DNA, 395 bp, Glycine max
  Clone ID: LIB3139-088-P1-N1-G9
caccattgaattttgattctagcaagcagagcttttgtcaattttctattgaccttctcggtggaggaattttagtggacaaaactggagattggatcacacttatacaaaattctccaattagtaacttgttgagagttgctgcttggaagaaaggctgtttaatggttaagattgtgatgtctgggaatgcagcagtcaaaaggagtgattgggcctcattggtacaagtgtttttaacaaacagcaacagtacagagcattttgatgcatgcaagtggacaaaatcggaaccacattcctgggaattgatcttcccaatagaggtatgtggtcctaacaatggttttgaaatgtggagttctgagtgggcaaatcaaacttcatggcatttg

SEQ ID NO: 45479 - DNA, 397 bp, Glycine max
  Clone ID: LIB3139-088-P1-N1-H12
aagatttgaaattttaataaaccgcgatcacaggttgccgcaccttaaaaccggaaacaaaagcaatcgttacttgatttcaagaatttctcaatttcttcctacttctttgtgtacgatttcttaagggaaagaaaatcactctctgtgctggtcacagacttcgtgaatcattttcttttccactcctagtttatttgctgaacactctcctatttgatataggacttcgtgtcagatttaaactttttctgtttctttctcagttctctgtttaatttcaagttcaagctggtgaaattttggattagtgctcccactctcctatctggtataggacttcgtgggtagacttttctacttctctcctttctttcactctcttcttctcactgat

SEQ ID NO: 45480 - DNA, 380 bp, Glycine max
  Clone ID: LIB3139-088-P1-N1-H2
gaacaataacataaaccattcttcacctctcctctctcccaccatagtaatgggtcagagcctaagttgcagtggcaactatgaccacggcctcttcaccgccgtgcagcacggtgaccttgaaattgtcacaactctcttggactccgacccctctctcttgcaccaaaaccactctctacgatcgccactctcctcttcatattgccgctaccaatgaccagatcgagattctgtctaagctcttagatggatctctcaacccagatgttttaaatcgccacaaacagactccgcttatgctggcagcaatgcatgggaacatcgcgtgtgtggagaaagctcttcaagccggagctaatgtaaatgcctcaatttca

SEQ ID NO: 45481 - DNA, 418 bp, Glycine max
  Clone ID: LIB3139-088-P1-N1-H5
caaaagcaatgactatgtcatttaatccaaacccgtgttctgatgcatggagtttggaatttttgaagcgtaccggatttcattgtgatatcatttgtgtcactgggtggactgccaccccaatgcaggatgttcaggttacaattgattggtttatttcctctcaggaatgtgttcccagaacctattgtgttttaaatccacaaaatccttttgtgttaaataggtggatgggaaaactgactttcccccagggcacttcccgaagtgttaagagaatgcctctttctatagggggaggagctggtgcaaagaatgctattctcatgaatatgccaaatgctgttctttcaatgtggagatattttgttggagatctcgtctttgaagtttctaagatgacttctccctacattaa

SEQ ID NO: 45482 - DNA, 417 bp, Glycine max
  unsure at all n locations
  Clone ID: LIB3139-088-P1-N1-H7
tccccacaagctggtgcagtttggaaaagcctcaaaattgatggtgtcatcagccaaatttgaggcttttccccacaagctggtgcagtttggagagattcaggaaaaagttgtgttgaaattttcacaagaggaatttcttacagcttggtcaactcaagtgcgtcccgcaacgactctgttggctgatgggtgcccatatttgtatgctatggtgcatgatagttcagtgtctacaataccaggtgattttgtcattggtgttaagttgacaaccataaacaatatgtgtgcatatgggctcaatcctggtatttcaggttctcgtcttttgggcaccattcctcagtccatttcacagcaaactgtttggaatcaaatggcaacagtgagaacaccatnngaatttgattctag

SEQ ID NO: 45483 - DNA, 399 bp, Glycine max
  unsure at all n locations
  Clone ID: LIB3139-088-P1-N1-H8
ggctcgagaactacgcgcgctcctacttggccaacctcttgcccatctgcgtgaggcgcgtggtgtacttggactccgatctcatcctcgtcgacgacattgccaagctggcagcaacaccattgggcgaaaacaaggtcctggctgcccccgaatactgcaacgccaatttcacctcgtacttcaccccaacgttctggtccaacccttcgctgtctctcacgttcgcggataggaggccgtgctacttcaacacgggggtcatggtcatcgatttggagcggtggcgggagggggattacacgacaaaaattgaagagtggatggagctgcagaagaggatgaggatctatganctgggttccttgccgccgtttttgcttgtctttgctgggaaca

SEQ ID NO: 45484 - DNA, 417 bp, Glycine max
  Clone ID: LIB3139-089-P1-N1-A1
cacaaaatccttttgtgttaaataggtggatgggaaaactgactttccctcagggcacttcccgaagtgttaagagaatgcctctttctatagggggaggagctggtgcaaagaatgctattctcatgaatatgccaaatgctgttctttcaatgtggagatattttgttggagatctcgtctttgaagtttctaagatgacttctccctacattaaatgtacagtctctttcttcatagcatttggaaatttggctgatgacaccatcaattgtgaggcttttccccacaagctggtgcagtttggagagattcaggaaaaagttgtgttgaaattttcacaagaggaatttcttacagcttggtcaaactaagtgcgtccccgaacgactctgttggctgatgggtgcccatatt

SEQ ID NO: 45485 - DNA, 265 bp, Glycine max
  Clone ID: LIB3139-089-P1-N1-A10
cacgccgatggtggttttggcctggtctttcatagatctgatgcatggaggctcagatctactgtacagaggtgtgcgattcatgttcgtctctcttttggaatctgtttcgtagaaagtcgtttggtcttccatgtcgcatggctcttgaggtatttttttttgcagatactgtagataatcgatgagaagaacgcagatccagccgctttcgcttgttcgatcgctacagacgcttgtatcggattattcatgattgattcat

SEQ ID NO: 45486 - DNA, 401 bp, Glycine max
  Clone ID: LIB3139-089-P1-N1-A11
gctcattagatatagctatgaaaaattactgcgccaggctagagctccaagtatgtttttacaatccttcaaaaattttgtttctttgtgtgtgtatggtgatgataacttaattagtgttcatgaatatgtcaagccttactttagtggttctaaattgaaaagctttctagctggtcataatatcaccattactgatggtattgacaaaactagtgcaactttgcaatttagaaagttagcagattgtgattttctcaagagaaactttaagcagatgtctaatgttttgtgggtggctcctgaggacaaggcgagtttatggtcacaacttcattatgtttcgtgtaaatatctggaaatgcaagaagcttatcttgtcaatctcgtaaatgtgttac

SEQ ID NO: 45487 - DNA, 408 bp, Glycine max
  Clone ID: LIB3139-089-P1-N1-A12
ggaaaagagggtgctacgacgccgttctgtgtattatccttccccttccccggtcagcggtgttgttttgttcggaatctgaaatcggaaattggaagcagaagaatagtcttcagagaagggtaaaatcgatgagtaggaacgattccaagtacttctccaccaccaagaagggtgaaatccctgagctcaaagaagagctcaattctcagtacaaggacaaaagaaaagatgctgtcaaaaaggttattgctgccatgactgttgggaaggatgtctcatcattgttcactgacgtggtgaattgcatgcaaacagaaaatttggagctaaaaaagctagtctacttatatctgataaattatgcaaagagccaacctgacctagcaatacttgcagtgaatacat

SEQ ID NO: 45488 - DNA, 276 bp, Glycine max
  Clone ID: LIB3139-089-P1-N1-A3
aaatggtccacgaagcgcccctgagcagtgaccataaccacactctcttaagtgtctagagagaagctaccaaactccacaacacatacccaattagctaacccctgtcacacttacagaccatgccaaacgcaaacatgcttctcctttcctcttcttatggcgctgttctcagccatgacaacaccgtcaaccttcgcgatcgacacctttatcattgccggctgctccagcccaagatcacgccgggttccgctacgaaataccgtaactcgt

SEQ ID NO: 45489 - DNA, 399 bp, Glycine max
  Clone ID: LIB3139-089-P1-N1-A4
agggtttctctttctctttctctgtctgcttcttcactttctctcgtttcaatcgaaaaaaatcatgggcagaaaattcttcgtcggtggcaactggaaatgcaatgggaccactgaggaggtgaagaagattgttactactttaaatgaagctaaagtccctggagaagatgttgtagaagttgctgtgagccctccttttgtgttccttccttttgtaaaaagtttgctgcgccctgatttccatgtctcggcccaaaattgttgggttcgcaaaggtggtgcttatactggagaggttagtgctgaaatgcttgctaatttgggaattccttgggttattattggtcactcttgacggaggcagcttttgaatgaatcaaattagtttggggagat

SEQ ID NO: 45490 - DNA, 375 bp, Glycine max
  Clone ID: LIB3139-089-P1-N1-A5
ggtgcatgatagttcagtgtctacaataccaggtgattttgtcattggtgttaagttgacaaccataaacaatatgtgtgcatatgggcttaatcctggtatttcaggttctcgtcttttgggcaccattcctcagtccatttcacagcaaactgtttggaatcaaatggcaacagtgagaacaccattgaattttgattctagcaagcagagcttttgtcaattttctatcgaccttctcggtggaggaattttagtggacaaaactggagattggatcacacttatacaaaattcttcaattagtaacttgttgagagttgctgcttggaagaaaagctgtttaatggtcaagattgtgatgtctgggaatgc

SEQ ID NO: 45491 - DNA, 228 bp, Glycine max
  Clone ID: LIB3139-089-P1-N1-A6
aatatgatataattggtgctggttcacattcttcaggagattttcctgaaaaggaagatcaagaaaaacccaaaaagattgataccagattgagacaaagaatagatcctcaatacaatgaggttcaggctcagatggaaacaaatttgtttaaattgtctcttgatgatgttgaaactcctaaaggttctatgttggatcttaaaatttctcaatctaaaattgcac

SEQ ID NO: 45492 - DNA, 380 bp, Glycine max
  Clone ID: LIB3139-089-P1-N1-A9
ataatctggaaatgcaagaagcttatcttgtcaatctcgtaaatgtgttacgagaattgtatttgcacagtccagaggaagctcgccaattgagaaggaaagctctctctcgtattgaatggctgcaaaaagctgatgtgcctaccatagcacagattgaagagtttcattcgatgcagaggatgatgaatgctcctgattcaaatgataatattgatctactgttgagcattgatttgttgggtttacaaggagcaggtaaagcttttccaaacaagattgtctttgacgataagccttgcgtggctaacacacaagaattctttgatggaaattttccagcggattcttggttaccaacttttgtgaattggctttat

SEQ ID NO: 45493 - DNA, 421 bp, Glycine max
  Clone ID: LIB3139-089-P1-N1-B1
cgcgccaggtgtcaacatcctagcggggtggtctaaagccgtggggcccaccgggttgcccgttgataacaggcgcgtggatttcaacatcatctctggcacctccatgtcgtgccctcacgtgagcggcttagccgcgctgatcaaatcggctcaccctgattggagcccagccgcggtgagatcggctctgatgacaacggcttacacagtttacaaaactggtgagaagttgcaagacagcgcaacgggaaaaccatccacgccgttcgatcacggttcgggacacgtggacccagtcgctgccctcaatccaggactggtctacgatctaacgggggatgattactttaggtttctctgcgcgttaaactactcaactgcggaaatcagcactttagccaagagaaaatttcagtgc

SEQ ID NO: 45494 - DNA, 408 bp, Glycine max
  Clone ID: LIB3139-089-P1-N1-B10
ggtgaagagatgacattgattccgggaactagtgttgaagaggcttacaacaagctaatagttgaacttgagaaaagtgttcctacattggttggcattgaatgtcccaaggatgagaaacttccccgtcgcaaaatttttgacaaacctaagacgcgctgcttcactattctccctatggagtttaatcttgtggtccgtcagaagtttttaaattttgtgaggttcattatgaagaaaagggacaagcttagttgtcaagttggaatcaacccatactccatggaatggactggtttggccaatagattactgagtaagggcaacgatattctgtgttgcgattatgctagttttgatggtttgattaccaagcaagttatgagcaagatggcagaaatgataaac

SEQ ID NO: 45495 - DNA, 357 bp, Glycine max
  unsure at all n locations
  Clone ID: LIB3139-089-P1-N1-B11
gcagcattgggagatagaaagagagagagaaagagagagagagaaagacccttacccttctctatcgctcgctttcctttgacgcttctgacccttgctttgtctgcgtcttccttctttctttctttctttctctgtgtgtcgtaatggctctcccagactcttcttcccgtcgcaactccctgatcccctccttcatctactcctcttcctccaaaacgctccctctccaccacatgctcaacaccgnctncgctgccgccgncgncgttccctccccgccgccggccaatctcgacgccggatcgcgtggcctcatgattccctctcccagcgagtcacgcaagatcgagttgt

SEQ ID NO: 45496 - DNA, 340 bp, Glycine max
  Clone ID: LIB3139-089-P1-N1-B12
aattaacagctcttgctgaaaatgactatttggtttacaattccattcgggtaatcattgaaattgaaaacccgaatggaattgtgacacttttcaattttcttgtcacggcaacctgggacgaagtaatgacaagctacaaggaattaactgggacttcttggacctatttgtacttcattagcttctacttaattactgttttgctgcttttaaacttgattattgcttttgtcttggaggcattctttgccgaaatggaacttgagtcatcagaaacttgtgaaggaaatgacaaggaagttgaaggagataaatatcgaaagcggtctattggcac

SEQ ID NO: 45497 - DNA, 406 bp, Glycine max
  Clone ID: LIB3139-089-P1-N1-B3
acttgctgctttctttggccatgttggcagcaagacctcttgtggttatggggtggctacagggggacccttagcctggggcttatgctacagcaaggaattgagtcctgataaattctactgcgatgactactataaattaacctacccttgcactcctggcgcagcatactatggccgtggtgccatcccactttactggaactacaactatggaaaagccggggaagccttgaaggtggatctgttgaaccatccagaatacatagaacaaaacgccactctagccttccaggctgcactctggcagtggatgaccccaccagagaagcacctaccatcaccccatgatgtctttgttggcaacttggaaacccacaaaaaatgacacattgttcaaaagggt

SEQ ID NO: 45498 - DNA, 326 bp, Glycine max
  Clone ID: LIB3139-089-P1-N1-B4
agaatattggagaagagtccaagcattactgggagaccaacatgttcctccaaacccaagaacttggcagttggggattggatgaggctttatcatggtactacgattcgtgttccccggatggtgccgcttcatctgcagcatcaaagaacattgttttcgagaggaatcggtggaagaaactcaatgaaaggctctttgcgcttagatcggtggtacctaacattagcaagatggacaaggcttcgattattaaggatgctattgattacatacagcacttgcacgagcgagagcagattatccaagctgagataatggcactt

SEQ ID NO: 45499 - DNA, 373 bp, Glycine max
  Clone ID: LIB3139-089-P1-N1-B5
caggcttctctccagaaagcaattcatcgttgatgtccttcatccagggagggctaatgtttccaaggctgaactgaaggagaaattgggcagaatgtatgacgtgaaagacactaacactgtatttgtcttcaagtttcgaactcattttggtggtggcaagtccactgggtttggtttgatctatgattcagttgagaatgccaagaagtacgagcccaagtacaggcttatcaggaatggacttgatactaaagtagagaaatcaaggaagcaaatgaaggagagaaagaatagagctaagaagattcgtggagttaagaagacaaaggctttcgatgctgccaaggctggaaaaaagaaatgagttttc

SEQ ID NO: 45500 - DNA, 368 bp, Glycine max
  unsure at all n locations
  Clone ID: LIB3139-089-P1-N1-B6
atcatcaaagaggaacaaccaaggaacccaaaaataggtatccttcaacagattccttggtggaaaaagagttgagtgtggacaagttagaggtctcaagaagattgacactaccacgcgaagaagggaaccaaagcaagattttagaaagacttgattctgatgcacagaagttgacaaacctccaaatcaccatacaagatttgatgaagaaagtagagataaatgagaagagcacaaaaggaaaaagtgttgagtttggtgaggtgaaagggcagcttgaagcagctcaggagaacatcacanagttgtttgacgccaaccgcaagttgatgaagaatgtggaagaaggtaccgtgtcttctgtt

SEQ ID NO: 45501 - DNA, 273 bp, Glycine max
  Clone ID: LIB3139-089-P1-N1-B7
cgccaacgttggagtttccggggctgattaaggttggtgtgcacgggggggagccgtgcgacccggataagaggccgtggggagcaacgtttatgatggaaaaactcaaagaatgggtggagtttacgttcaaggggatggttgaatccactgagcccgtcatcaaacagtcttgcatgtactgcatgactccagatgaggatttcctcattgatttcttgggtggagactttggaaaggatgtggttattggagccaggttttatggtcacg

SEQ ID NO: 45502 - DNA, 403 bp, Glycine max
  Clone ID: LIB3139-089-P1-N1-B8
ggtttggactatatggaaagaattcctcttgccacatctgagggttttcctcatgtgctttcacgcaaaaatggtgaaaaaggcaaaaggagatttgtttctggggatggtgaagagatgacattgattccgggaaccagtgttgaagaggcttacaacaagctaatagttgaacttgagaaaagtgttcctacattggttggcattgaatgtcccaaggatgagaaacttcctcgtcgcaaaatttttgacaaacctaagacgcgctgcttcactattctccctatggagtttaatcttgtggtccgtcagaagtttttaaattttgtgaggttcattatgaagaaaagggacaagcttagttgtcaaagttggatcaacccatactccatggaatggactg

SEQ ID NO: 45503 - DNA, 371 bp, Glycine max
  Clone ID: LIB3139-089-P1-N1-B9
aaaaagactcagttgtgtatcgttgcagctctactagctagggtttcgcaagtgcgatcgaagaagaacgatggcgatggctgctgctctgcgtcgcgaaggaaggcgtttgacccaaccaatcaacgccctccgttcctctctcatctctcaagaccaatcccctcatggcgcgcgcttcatttccactcaagtggtgagaaaccgaatgaagagtgtgaggaatatccagaagatcaccaaggccatgaagatggttgccgcatccaagctgagagccgttcagaccagagctgaaaattcccgcggcctctggcagccgttcaccgctcttctcggcgacaatcccagtgctgatgttaagaaaaacg

SEQ ID NO: 45504 - DNA, 397 bp, Glycine max
  Clone ID: LIB3139-089-P1-N1-C1
gttgtgactcgttcttcttcgtcgttatcttcttcttttgttgtttgtgtgtttgttttttctctcacctgaaaatgtcttgctgcggtggtaactgtggttgcggaagcgcctgcaagtgcggcaacggctgcggaggctgcaagatgtacccagacttgagctacaccgagtcaaccaccaccgagaccttggtcatgggagtggcaccagttaaggctcaattcgagagtgctgaaatgggtgttcccgctgagaacgatggctgcaaatgtggagctaactgcacctgcaacccctgcacttgcaagtgaggtgttggagagctaaagcttcaagcagaaatggcccttagaaataatgataaaaactatatgtagtttcaaaacttcaaaaa

SEQ ID NO: 45505 - DNA, 196 bp, Glycine max
  Clone ID: LIB3139-089-P1-N1-C10
ctttcaatgtggagatattttgttggagatctcgtctttgaagtttctaagatgacttctccctacattaaatgtacagtctctttcttcatagcatttggaaatttggctgatgacaccatcaattttgaggcttttccccacaagctggtgcagtttggagagattcaggaaaaagttgtatttgaaatttcac

SEQ ID NO: 45506 - DNA, 387 bp, Glycine max
  unsure at all n locations
  Clone ID: LIB3139-089-P1-N1-C11
tcttttttgggcttgattttggagggatcagcctctcgtgatcaacatggcttgatctccacaagattatccctttgacacttcaagtactaccaacattgattaaatcagactagtgaaatgtcaaaagaaaaggactcagctgacaatcaagtggatacattttctgagccagtcatgttggagagatttcatacacttatggagattgacaatctgcatcttgaaccagattgggatccgattgctgaacttgatagcatcttatctgatagttataatatgtcttccatgtccactcactcagcaactgtttcagaaattgaagtccatggtccaaatgtggcagctatccttgaaaaatnggagacccttttggagaccctc

SEQ ID NO: 45507 - DNA, 413 bp, Glycine max
  Clone ID: LIB3139-089-P1-N1-C2
accaccacctggggcataccctccacaacaaggatatcctccagctgggtatcctccacaacaagggtatcctccagctgggtaccctccacatcaaggctatcctcctgctggttaccccccagctggttatcctggttcatcacatgcaccaggttctcatgggcacggcggtatgggagcaatgctcgctgggggtgctgctgcggctgctgctgcttatggtgctcaccatgtctctcatggctcccatggctcctatggccaatatgcacatggtgctcacatgccacatggaaaattcaagcagcacgggcacggtaagttcaagcatggaaagcatggcaagttcggcaagcatggaaagcatggcaagttcggcaagcatggtggattaaagaagtgaagtgatg

SEQ ID NO: 45508 - DNA, 373 bp, Glycine max
  Clone ID: LIB3139-089-P1-N1-C3
agaataataatttttccgggaaaattcaagttccaatcggaatcggaatcggaatctgaaatgagtagtagggtttggtttctactattccttctgctgatctcgaaatgccatcaagtgtggggctcctacgcgggttccgctagctccatcggcaacccttccaaggtcaaacagatttcctggaagccaagagctctcgtttatgaaggtttcctcactgatttggaatgcgaccacttgatctctttagccaaatcggagcttaagagatctgccgtagcggataatctctctggagagagccagttaagtgatgttcgaacaagctctggaatgttcatttccaagaacaaggatcctattatttctg

SEQ ID NO: 45509 - DNA, 375 bp, Glycine max
  Clone ID: LIB3139-089-P1-N1-C4
cggctcgagcggctcgaggcaattgtgcaagtttcctatgccattggtgtgcctgagcccttgtctgtgtttgttgacacttatggcactgggaagatccctgacaaggaaatcctcagcattgtgaaggagagttttgacttcaggcctggcatgatctccatcaaccttgatctcaagaggggtggaaatggcaggttcttgaagactgctgcatatggacactttggcagagatgaccctgacttcacatgggaagtggtgaagccactcaaggtggagaaggtacctgcttaactaaaagggggttcaacactcttggcaagggacttttgcactactactggcttcttattatctgattgctaaaaattt

SEQ ID NO: 45510 - DNA, 381 bp, Glycine max
  unsure at all n locations
  Clone ID: LIB3139-089-P1-N1-C5
agctgatgaagttgctcagaaagctttggatggtataaaatgtggcgattttattgtttcttgcaatttcgagggaattgcactatccctagcaactgcaggtttatcccctcagaggtctttcttaatggcgtttcttgaggttgttgctgctggaatcctacggattgttgcactaggtatgcagtggacttggtatagaagtatagagaaatatcacagccaaaggaagggtaagtgttgcacaaaattatatatctatgaagggatgaggaaatcatctcttattttgtcttaatttaattctcatttggccaataacttngttaagattaacaaaaaagtgttacttattctatctatctatggggttctatagtt

SEQ ID NO: 45511 - DNA, 262 bp, Glycine max
  Clone ID: LIB3139-089-P1-N1-C6
ctcgagccgtgaatatgtcaagccttactttagtggatctaaattgaaaagctttctaactgggcataatatcaccattactgatggcattgacaaaactagtgcaactatggaatttagaaagctagcagagcgtgattttctcaagagaaactataagcacgatgtctaatgttttgagggtggctcctgaggataaggcgagtttatggtcacaacttcattatgttgcgtgtaataatctgggaatgcaagaagctta

SEQ ID NO: 45512 - DNA, 389 bp, Glycine max
  Clone ID: LIB3139-089-P1-N1-C7
tttttatttttgattttgcaaattaaattacacaatcacagccgtacatcacacatgagttgggcctcttccaacttaaaagcagaggataacattggcccatgacgcgacacatgcaccacctaataatcataattttacatctttacatacaaaatacaaagactttaaattttaaaaagaagaaaagagataaacagatcatcttaatgaaatgaaaccaaaacccacaaacattggcttgatttttgttgttgttgttgttcccaacttgattaagcatgaaccgtttgattgaatcacttggacttgaagggaatggccctgattacgacctggtggtagagtgctgcaagagctgcaccgatgaatggtcccacccagaagat

SEQ ID NO: 45513 - DNA, 407 bp, Glycine max
  Clone ID: LIB3139-089-P1-N1-C8
caattcttatgagttttttgatgcacacctaacctctctcggctgggaacaggttaataatctgcgaaagcacgtgaaggcaagtggactttccaaaaatattgaacttgttgtcatttcccccttattaaggaccatgcaaacagcagttggagtctttggtggtgaagcatacactgatgggattggtgagccacctctgatgacggaaaatgtcggacacagtgatcatcctgcagtttctagtatgaactgccctccattcatagctgtggagctttgccgagagcaaataggagttcatccttgtgataagagaagaaccattagcgagtaccggaatatgtttccagcaaatgatttttcacttattgaaagtgacgaggacattttatgggaatctgatg

SEQ ID NO: 45514 - DNA, 416 bp, Glycine max
  Clone ID: LIB3139-089-P1-N1-C9
catgaatatgtcaagccttactttagtggttctaaattgaaaagctttctagctggtcataatatcaccattactgatggtattgacaaaactagtgcaactttgcaatttagaaagttagcagattgtgattttctcaagagaaactttaagcagatgtctaatgttttatgggtggctcctgaggacaaggcgagtttatggtcacaacttcattatgtttcgtgcaataatctggaaatgcaagaagcttatcttgtcaatctcgtaaatgtgttacgagaattgtatttgcacagtccagaggaagctcgccaattgagaaggaaagctctctctcgtattgaatggctgcaaaaagctgatgtgcctaccatagcacagattgaaagagtccattcgatgcagaggatgat

SEQ ID NO: 45515 - DNA, 319 bp, Glycine max
  Clone ID: LIB3139-089-P1-N1-D1
cgaatatcttgttgtttggagcgatccgagaaaaactctgtaaacatgttggtttaccaggacctccttacaggtgatgagcttctctctgactccttccgttacaaggaaattgagaatggaatgctgtgggaagttgaggggaagtgggttgttaaaggagcagttgatgtagacattggtgcaaacccttctgctgagggtggaggagaagatgagggagttgatgatgcagctgttaaggttgttgacattgttgacacatacagacttcaggagcaacccgcattcgataagaagcagtttgttaccttcatga

SEQ ID NO: 45516 - DNA, 299 bp, Glycine max
  Clone ID: LIB3139-089-P1-N1-D10
ctctttgctcaactcaagttgttcactaccgactcctaatgccaagcttcttaacacctttacaacattcacattacaaaaacactcaaaacgatggcgttttaccccaaccctaaccttaacacccgctggaccaccgagcccctcaaccatatggttcttgccatgcaccctttctgccccaaattctaaacccttaccctaattcccaattcaacccttattatacttgtcctaaccctttttttttccgtcgagctttttcttcgtattcttttcaagcttcccgatttttttta

SEQ ID NO: 45517 - DNA, 102 bp, Glycine max
  Clone ID: LIB3139-089-P1-N1-D11
ggaaattaggcatgaccctcttgttgagtatgctctgcctatttgaaaatttccacacctcttttaattgtcgtaatgatgtttgaagtgtgtgttattttt

SEQ ID NO: 45518 - DNA, 341 bp, Glycine max
  Clone ID: LIB3139-089-P1-N1-D12
tgatgcatgtaagtggacaaaatcagaaccacattcctgggaattaatcttcccaatagaggtatgtggtcctaataatggttttgaaatgtggagttctgagtgggcaaatcaaacttcatggcatttgagtttccttattgacaatcccaaacagtctacagtttttgatattctcttgggaatctctcaagattttgaaattgctggtaatactcttatgccagctttttctgttccacaggctactgccagatcttctgaaaatgcggaatcctctgcatgatctggaattcgtgttttctttcgcttgttcgtttgttaattcaataaggaaatta

SEQ ID NO: 45519 - DNA, 204 bp, Glycine max
  Clone ID: LIB3139-089-P1-N1-D3
aaaccctactcattctccatacctcaacgaagaggttaaagagacggcaacactttgctgtccgccttgaccgagcagagcttcgtcttggccctcgattttgccctaaagtactctcagtcacaacagacaccgtcgtcgtcgtcgtcgtcatcaatggcaccgaagcagaccaaggctgagaagaagatcgcttacgatgcg

SEQ ID NO: 45520 - DNA, 195 bp, Glycine max
  Clone ID: LIB3139-089-P1-N1-D4
gatatgtttaactcgactactccttagtgtgtacaagacagactttcgtcgattgacttgtacacagccatcaccatagttcgattttgcatgatgtattatgttattatattctgttacttaagcttgcgacactagttactttcactttagagagtgctagctaaggacacaacgacaggtcaatgtgtgatt

SEQ ID NO: 45521 - DNA, 298 bp, Glycine max
  Clone ID: LIB3139-089-P1-N1-D5
cgacattggaaatcatggaactaagattattatcatcaccacatgggacaatgatgatggccatggtggagctggactttaatatctgatcccgagggggaggctgttggttggatggatgttgctgcatacactccttgtttgccagcagttataaagccatgcttttgttactgagagggggcttcttatattatggatgcaggatatacatattgacggggatatcaagaagattgacacacattctgcctcaaagatagtcaatgagggacacattgctcaccgttatcattat

SEQ ID NO: 45522 - DNA, 301 bp, Glycine max
  Clone ID: LIB3139-089-P1-N1-D6
gaatggctgtggcgtcgtcatcatcccttatcacgttgaaggtgaaaccttgcattttcgggtctcctcggagatccgcggtggttcggaattgtgcgaagtcaacggcggggacaatatcgacgagttggagcctggacagctggagggcgaagaaggcgcttcagcttccggagtacccagatgcgaatgaattggacctagtcctccaaaccctctcttcttttcccccaatcgtcttcgccggcgaggcgaggaatcttgaggagaagctcgctcaggctgccattgggaacgcttt

SEQ ID NO: 45523 - DNA, 351 bp, Glycine max
  Clone ID: LIB3139-089-P1-N1-D7
atggaagtgattagaaatagaggcattcctgctgatgttcttgcaaagcgagctcatgaatttgaaaaacatgttgctcatgaaagcctcaaggatcaaattcctgctgttgacaagttgtattctactaaggttaataagtttgcaaaaattatgaaccttagacaaagtgttgttggtgatcttaaacttcttactgatgggaagttgtatgagggtaagcatattcctgtatctaatattagtgcaggggaaaatcatgtagttcaaatacccttaatggacaggaagaaattttgcttctagtgcaagtgatttcagaactgcaatggtgagtaaaaatagcaaacc

SEQ ID NO: 45524 - DNA, 410 bp, Glycine max
  Clone ID: LIB3139-089-P1-N1-D8
ttgagacaacgcttgatatagaaaacaattctgctcaaaaggtgtggcaaatggttgagttcgttttcgggtgggtatatgtaatagaaatggttttaaagatttatgcatatggatttgagaactattggcgggatggtcaaaaccgctttgattttattgtcacggtgacaattgccattggagaaactgtaacttttgctgtacctgatgatgatcttcctttcatctcaaatggagaatggattcgttaccttcttcttgcaagaatgttgagattaataaggatcctaatgtatgtcaagcgataccgagcctttgtggcaactttattgactctcataccaagtttgatgccatacctagggatcatattttgtaccttgtgtatttattgttcaattggagta

SEQ ID NO: 45525 - DNA, 404 bp, Glycine max
  Clone ID: LIB3139-089-P1-N1-D9
atattacgaagattctcgttcgacaacatatgcaaattctcgttcggtctcgacccgggctgtctcctaccgaatctcccagtctcaaacctcgccgacgcgtttgacttggcctcgaagctttccgcggaacgcgccatgaacgcgtcgccgtttatttggaaactaaaacgactcctcaacgtaggttccgaaagaaaactgagagaagcaatcaacgttgtaaacgacgtcgctaatgagatgatcaaacagagaatagaaatggggttcaacacgcggaacgaccttctctcgcggttcacgggatccataaacgacgacgtttatttaagagacattgtggtgagttttctcttagcgggccgtgacaccatcggcttcgggttaacgggcttttttat

SEQ ID NO: 45526 - DNA, 367 bp, Glycine max
  Clone ID: LIB3139-089-P1-N1-E10
caacttcatatcatcaccatgaatcactctagcaacaatcagcaagaaaccccttgtgagttcttcttcttaattacaaaccttatgcaaatgcttctatctccaaatgaagatgaattggctatgtttgcatgcccaataataaataatgttctgtgtttttttttctttttaaatatacgttcaaattggtttttgaaaaaatcagaaaataaaactatacactagttttacaatttcattttatcataaattattatttatgataaatttatcgacttatataaaattatttcaaaactcatacaaatcgtgatttacgattgaatgataatgttagcgcattatgttaaatttcttgattttt

SEQ ID NO: 45527 - DNA, 405 bp, Glycine max
  unsure at all n locations
  Clone ID: LIB3139-089-P1-N1-E11
ctcccttcgccggtgcatcccttccccgatctgtcgcgcattccgccaccgcttctgcaaaagtatgtacagtgcttcataatcctccctcgccaccggtgaatgtttgattggcaatcctgtacttattagtcaagtttttagaataaaaagaagcttcaatggccaagaaaccaggacaaagatccagtaaattgtctgtgtacctttacattcctaatataattggatacatgcgggttcttttaaactgttttgccttctcccaatgtttatcaaacaaaatcttattctctattctctattttttaagctntgtatgtgatgctgttgatggctggtgtgcccgcaaattcaatcaagtgtcaacctttggagctgtgctggacatggtaacagacagaa

SEQ ID NO: 45528 - DNA, 395 bp, Glycine max
  Clone ID: LIB3139-089-P1-N1-E12
gttcaaacatgaaatcaagcccctggtcgagggtcttgcctacgacgacaaatatcagctgaacactcaatctgggactcagtgggacggcttccgtcatatgtcctggatcgaaactgccactttctataacaataccaagggacctgatattatgacgtccgacggtgccaatgcaagccacaagtgcagcatacaccactgggccgagcatggaatcgccggacgcggcgttctcctcgactatagaggctacgcgaagaagaagggcatttcgtatgacccgtacgatcattaccccatcagcttcgaggagctctaccaatgcggcaaagatcagggcatcgacattcgccccgcagcacaaggcggcgacatcaagatcggcgacatgc

SEQ ID NO: 45529 - DNA, 369 bp, Glycine max
  Clone ID: LIB3139-089-P1-N1-E3
gctgtatttttgtttcttcttttttcctgtttccgtagtttgggtctgtttttgcgttgcagacatcccacacacaacacattcacaacacaacatttgatttctctcttttgtcatcctcaaaatccacaatctttcctccttaatatctccgaccccaacaaaaagaaacaagcaagccatggattcccagatccatggcttgtcctcgtaaagtcaacccctttaccagtcaaacttaaccccccttctctccccctctgaaaccgcaggaagaagatcaaatcgaagaaggctcaaaaaaaatgaagggttcgaacaaccggttctttacggtggcgcttgtggccgcgtggtactcctcaaaca

SEQ ID NO: 45530 - DNA, 201 bp, Glycine max
  Clone ID: LIB3139-089-P1-N1-E4
gtcttatttctacctatcccaatttccagccaccatgtccggcgaaatgcataccgattccgcctcctcgtcacgagccgccgcaacctccgatcagcgtcatcagcagccggcggcggcccctctgagccgatacgaatcccagaaacggcgagactggaacaccttcggccagtacttgaagaaccagacacccccagt

SEQ ID NO: 45531 - DNA, 223 bp, Glycine max
  Clone ID: LIB3139-089-P1-N1-E5
gaatgatggggaggttgattaggggtttggaggaaagaggggtttttgaggatgttagtgttattatggttggtgatcatggaatggttggtacttgtgataagaagttgattctttcttgatgattttgcttcttggattcaatatcctaaagattgtgtcgttactcatacttctttgcttgcaatatccccaccttttttttatgttcctttttatttta

SEQ ID NO: 45532 - DNA, 341 bp, Glycine max
  Clone ID: LIB3139-089-P1-N1-E6
cttttcttcctcagaaacacatcctaatggcagagcgcggaggtggcgatcgtggcggcgaccgtggcggtttcggacgtggattcggcgggcgaggacgcggaggtgacaggggccgaggccggcgccgaggcccccgccgcgaggaagaggacaagtgggtcccagtgaccaaactgggccgcctggtgaaggagggaagaatccgaagccttgaacagatctaccttcactcgctcccgatcaaggagcaccagatcatcgacacgctcgtgggttccaccctcaaggacgaggtgatgaagatcacgccggtccagaagcagacccgggccgggcag

SEQ ID NO: 45533 - DNA, 404 bp, Glycine max
  Clone ID: LIB3139-089-P1-N1-E7
atttacaccatctgctctcaagactgtgaattgtggaatcctgcttgcacaaaagcaatgactatgtcatttaatccaaacccgtgttctgatgcatggagtttggaatttctgaagcgtactggatttcattgcgatatcatttgtgtcactggatggactgccaccccaatgcaggatgttcaggttacaattgattggtttatttcctctcaggaatgtgttcccaggacctattgtgttttaaatccacaaaatccttttgtgttaaataggtggatgggaaaattgactttcccccagggcacttcccgaagtgttaagagaatgcctctttctatagggggaggagctggtgcaaagaatgctattctcatgaatatgccaaatgctgttctttcaat

SEQ ID NO: 45534 - DNA, 372 bp, Glycine max
  Clone ID: LIB3139-089-P1-N1-E8
cggctcgagctttctccgagaacaaaaaaaaaaaaaaaaaaaaatccgcgattcgctcttctcttggaaaagtgaaaaccagaagtacgaacgaaagagaagagcgatttagaagtgagagaagatggggttgtcgttcacgaagctgttcagcaggttgtttgcgaagaaggaaatgaggattctgatggtaggtctcgatgctgctggtaagacaaccatcttgtacaagctcaagcttggagaaatcgtcaccactatccccaccatcggatttaatgttgagactgtggagtacaagaacatcagcttcactgtgtgggatgttggtggtcaggacaagatccgtccactgtggaggcattatttcca

SEQ ID NO: 45535 - DNA, 381 bp, Glycine max
  Clone ID: LIB3139-089-P1-N1-E9
ctccgcatcagccacacttcttcgccgtttcagctgaagagccatccgcaggtaagcaatggttaagcataataatgttatccccaatgggcacttccggaaacactggcaaaactatgtgaagacttggtttaatcaaccagcccgaaagaccagaagacggttggctcggcagaagaaggctgtcaagattttccccaggcctactgctggatctctcaggcctattgttcatggccagactctgaaatacaacatgaaagtcagagccgggagaggattttcactggaagaattgaaggctgcaggaatttccaagaaacttgctccaactattgtgaatttctgttgatcaaccgaaaaagatacgttctttggaga

SEQ ID NO: 45536 - DNA, 380 bp, Glycine max
  Clone ID: LIB3139-089-P1-N1-F1
tgcaattacaaatcctatcatttgcaatcatttcctatgtcatctaaaccttcttttaacaaaacaaaaaccatgttgaagaagcaatctgtcttgtccttctcactagtaatgctaatttcatttatgtattcgacaaccaccttagcccaattatcaccagcttcagcccctctcaaaccgccccaacctgctcctaccataccagctgcggctcctcaacaaccattggttccctcattgccacagtcaccaagtgattccactcctgaaagtactccagcacttgacattgttggaatcctgaggaaggcaaagtcattcaacattctaatccgtctcatgaaaaccacccaattgatcaaccaactcaatgcaca

SEQ ID NO: 45537 - DNA, 341 bp, Glycine max
  unsure at all n locations
  Clone ID: LIB3139-089-P1-N1-F10
ctattgaagctccagccttgtctttagatgagctgaaggagaagactgacaactttggttcaaaggcattaataggtgaaggatcgtatggaagggtgtattatgcaaccttaaacaatgggaaagcagtggctgtgaaaaagcttgatgtttcatctgaacccgaatcaaataatgagtttttgacccaggtttccatggtctcaagattgaaggatgacaattttgttgagttgcatggttactgtgttgaaggaaatcttcgtgtacttgcatatgagtttgctactatgggctctcttcatgacatattgcacggtagaaagggangtcaaggtgct

SEQ ID NO: 45538 - DNA, 387 bp, Glycine max
  Clone ID: LIB3139-089-P1-N1-F11
cacttcgataattcacttcaagaaaagcttccaggaggatcggaagatgccaactttgagactgctacgtttgatgctactcatgtaagaaagaatatagggctttggaagggagatgtggatgacctaaaaccgtgttgggttaagccatcttctgatgatgtggagcagacccaaggatttgttacttttgcgttaaccaatggcccagagtaccatatttctcagatagcagacgcagtgattgttgctagaaatctgggggcaacgcttgtgatgcctgacatcagaggaagccaacctggtgacaagtggaattttgaggatatttatgatgttgatgtgttcatgaaaagcatggaggggtggtcagagtggtaaaggatc

SEQ ID NO: 45539 - DNA, 378 bp, Glycine max
  Clone ID: LIB3139-089-P1-N1-F12
atgaaaagaaaagaattcccaaagacgaggctattattgtctcatgttgtggctgcttccatggtcgtacactaggtgtcatatctttgagctgtgacaatgaagctacccgtggttttggtcctttattgcctggcaatcttaaagttgattttggtgatgcagaagcccttgaaagaatttttaaagaaaaaggagaacacatagctgcgtttattttagaacctatccaaggtgaagctggggtgatatttcctccagatggttatttaaaagctgttagagatatttgctccaaatataatgtcttgatgattgctgatgaaattcaaactgggttagcaagaacagggaagatgctggcttgtgagtgggaag

SEQ ID NO: 45540 - DNA, 270 bp, Glycine max
  Clone ID: LIB3139-089-P1-N1-F2
tttgatattctcttgggaatctctcaagattttgaaattgctggtaatactcttatgccagctttttctgttccacaggctactgccagatcttctgaaaatgcggaatcctctgcatgatctggaattcgtgttttctttcgcttgttcgtttgtttaattcaataaaggaaattaggcatgaccctcttgttgagtatgctctgcctatctgaaaatttccacacctcttttaattgtcgtaatgatgtgtgaagtgtgtgttatttt

SEQ ID NO: 45541 - DNA, 397 bp, Glycine max
  unsure at all n locations
  Clone ID: LIB3139-089-P1-N1-F3
gtgacacgtcttcttcggctctactctcttcttcaccgaagcgaaaaagaaaaggcttgacttgagagaaatagagcttcgaatcgaaactcacaattagaaaaaaacacaaatcacaatcacaatggcaaggtacgaccgagcaatcaccgttttctcccccgacggacacctgttacaggtcgagtatgccctcgaaagccgccgcaagggcaacgccggcgtcggcgtacgcggcaccgacaacgttgtcctcggcgtcgagaagaaatccaccgccaagctccaagactccaggtcggtgaggaagattgtgaatctggacaaccacattgcgctggcatgcgcggngctgaaggccgactcacgtgtgcttcataaacagggcacgtgtgga

SEQ ID NO: 45542 - DNA, 401 bp, Glycine max
  unsure at all n locations
  Clone ID: LIB3139-089-P1-N1-F4
caaggatgagaaacttcctcgtcgcaaaatttttgacaaacctaagacgcgctgcttcactattctccctatggagtttaatcttgtggttcgtcagaagtttttaaattttgtgaggttcattatgaagaaaagggacaagcttagttgtcaagttggaatcaacccatactccatggaatggactggtttggccaatagattactgagtaagggcaacgatattctgtgttgcgattatgctagttttgatggtttgattaccaagcaagttatgagcaaaatggcagaaatgataaacagtctttgtggtggtgatgcanaattgatgcgtgaaaggacacacctgctgttggcttgttgttcaagatggcaatttgtaagaaagatgtttggagagt

SEQ ID NO: 45543 - DNA, 355 bp, Glycine max
  Clone ID: LIB3139-089-P1-N1-F5
cgcgtgcaaagaacctctgctctcctcttgcttttgatagagaagaaagaagcgagaagatgtcagacgcgttctgcagcgactgcaagaggcagacggaggtggtgtttgaccactctgccggcgacacggtgtgctcggagtgcggcctcgtactggagtcccactctatcgacgagacctctgagtggcgtaccttcgccaacgagtccggtgacaacgatcccaatcgtgtcggcgggccctccaacccccttctcaccgacggcggcctctccaccgtcatcgccaagcccaacggcggcggaagtggcggcgagttcctctccttcttcctcggtcgcttgcagaaccg

SEQ ID NO: 45544 - DNA, 281 bp, Glycine max
  Clone ID: LIB3139-089-P1-N1-F6
ctcgggccgaaccaacatgaccgagaccatgtccaccgactggcacctacaccacgagctaccaaagctgcgaatcgacgccgtggtcaaaaccgacgacgacctacgctccgacgccgaagacgaccgaagcgccgccttctgcggcggcacacaagccggggccggaaacgacggggccatgaccgtcgatgtgggcgtcaaagacaacgacgagagttgccgtactccgacgtcggaggagagcaaagttccggcgacgatgacgtgtccggcggcgc

SEQ ID NO: 45545 - DNA, 378 bp, Glycine max
  unsure at all n locations
  Clone ID: LIB3139-089-P1-N1-F8
acaattattgtcgtaactattacttactcaaagggaactctctagtctctaatttgcgttttgattcattgattccttcatttccttgctgagagtgcgtgtgatttctctcgtctcctttagaattccgattggtatttctaacactgtgaaagaaagagagatatggcaggaggtggtggagctccagcacctaagatcgatgagccacagccacatccaccgaaggatcagctaccgaatgtttcttactgcattacgagtcctnctccatggcctgaggccatacttcntgggttttcaacattatctngtgatgctgggtacaactgtgctaattcccactgctcttggtccccagatgggaggtggcaatga

SEQ ID NO: 45546 - DNA, 377 bp, Glycine max
  unsure at all n locations
  Clone ID: LIB3139-089-P1-N1-F9
caatttcttttttaatgagatgctcattagaggtgggtatgaaaaattactgtgccaggctagagctccaagcatgtttttacaatccttcaaaaattttgtttctttgtgtgtgtatggtgatgataacttaattagtgttcatgaatatgtcaagccttactttagtggttctaaattgaaaagctttctagctggtcataatatcaccattactgatggtattgacaaaactagagcaacttttcaatttanaaagttagcagattgtgattttcttaagagaaactttaagcagatgttttatgttttgtgggtggtttctgaggacaaggtgagtttatggtcacaacttcattatgtttcgtgtaatatct

SEQ ID NO: 45547 - DNA, 386 bp, Glycine max
  unsure at all n locations
  Clone ID: LIB3139-089-P1-N1-G1
gggaattcgtgcatgttaaaattcatatatagttgcaatggctcgattttcattggatgagatatcagacactggtgcctttgtgagatctgcttccacattcagaaattggatttcgagggacctgaattcgcaatttccaccagaatcagggaggtatcatctctatgtatcatatgcttgtccttgggcttccaggtgccttgcttacttgaatattaaaggacttaacaaagctatcagtttctcggccgtcaagcccatctttgaaagaacaaatgaatctgatgactataaggggtgggtttttcctgaatcagaaactgaggtgcctggagctgaacctgatatgttgaatggagcaaagactattanggaactttatg

SEQ ID NO: 45548 - DNA, 404 bp, Glycine max
  Clone ID: LIB3139-089-P1-N1-G10
caaaacatagatggcacagataggcctgatcatgtggatctagctgctcttgaaatttatagagatagagagaggagtgtggctagatacaaccaattcaggagggcattactgttgatacctatctccaagtgggaagatttaacagatgacaaggaagcaattcaagtattggaagaggtatacggtgatgatgttgaagagcttgatgtactggtaggcctcatggcggaaaagaaaataaagggttttgcaatcagtgagacagcttttgttatattcctactcatggcaaccaggaggttagaagctgacaggttcttcacaagcaactttaatgaagagacatataccaagaaaggactggaatgggtgaatacaactgagagcctaaaggatgttat

SEQ ID NO: 45549 - DNA, 397 bp, Glycine max
  Clone ID: LIB3139-089-P1-N1-G12
caggttgccgcaccttaaaaccggaaacaaaagcaatcgttacttgatttcaagaatttctcaatttcttcctacttctttgtgtacgatttcttaagggaaagaaaatcactctctgtgctggtcacagacttcgtgaatcattttcttttccactcctagtttatttgctgaacactctcctatttgatataggacttcgtgtcagatttaaactttttctgtttctttctcagttctctgtttaatttcaagttcaagctggtgaaattttggattagtgctcccactctcctatctggtataggacttcgtgggtagacttttctacttctctcctttctttcactctcttcttctcactgatccgcattgccgttcaaagtggtcttatttg

SEQ ID NO: 45550 - DNA, 339 bp, Glycine max
  Clone ID: LIB3139-089-P1-N1-G2
tgtcttcaaggttcaaaatttttagggagatctaatgggcaaaagagatgtgtagtagtattaatacctgaaataagaggctaacggactatataggttaccacctaagctgttcttttagcactgtggacttggtaatgtgattgagcagtttgcctttttcttaatgtaaaattgtacagatacttcaacaacaacaacaacgccttatcccactaggtggggataaaaacaatgttttgactgagatcaccttgataagattatagggggaattataattgtagccccaaattctgatcgtaaagaaagtactaatgactgcttctgagctcaata

SEQ ID NO: 45551 - DNA, 372 bp, Glycine max
  Clone ID: LIB3139-089-P1-N1-G4
gaagatccagaagcacaacttttgctcaaagcttcagaaactatgctcatgaaagcttatgcttttttgaagtataacaatgcgaccaatttgattgtcaggactcatttggcagaattggtcaatgaagacttttatgatgaaaaatttaattttattggcacaattgggactccagcttttcatcgacaaattgctgcacacttggagaaaatgccattatggcaaaaagcaattttgtgtggaatgggacattgtttgtctcggaaaagcaaagaaacatggtattctgggatgaaggaaaaatttgtacaaatgatgaagagcatctatgaaacagaagttacagattggccagtaccactgaaaatc

SEQ ID NO: 45552 - DNA, 389 bp, Glycine max
  Clone ID: LIB3139-089-P1-N1-G5
caccaacgatggtattgagttccttaggacttacctcaaccttccatccgaaattgtccctgccactctcaagaagcaggccaagcccgccggaagaccattcggtggcccacccggtgatcgccccaggggcccacctcgctttgacggagagaggagattcggcggtgaccgtgatggataccgtggaggtccacgcggacctggcggtgatttcggtgacaagggtggagctcctgctgactacaggccttcttttgggggtggtcctggcggaaggcctggcttcggtcgtggttccggtggttatggggcaccgactagttcaaacattccttcttaaatataaattatatgtgctctagtttttgcagttttggctgtcattg

SEQ ID NO: 45553 - DNA, 397 bp, Glycine max
  Clone ID: LIB3139-089-P1-N1-G6
acctgctgtgtcttcctctaatatgtgcagttttctctgcagttgacacttgaaaccacaatcacaatgatctcaatcacttctactgaattgaactacttagtcttccgttacctccacgaatcaggttttactcattctgcatttgcattcgggtatgaagcagggattgataaaaacaaaaatgatgatagtgtggttccaccgggtgctcttgttactttcatacagaaaggaattcagtatcttgagctggaagcaaacttgagtggtgtctccagagtgatgctgacatggatgaggatttttcatttctacaacctctggatcttatcacaaagggcccgactgaactacacaatatagtaaaagccaaaaaggaaaatctacgtcagca

SEQ ID NO: 45554 - DNA, 409 bp, Glycine max
  Clone ID: LIB3139-089-P1-N1-G7
taataaaaaactgcggactccggggccacgtcttcgcttttccctccggcctgctcttgcctgtcactgccctccgctgtgactccatgtcgggtcccaatctcgtcccacgacacattgagatcctccctgacagcgctgtcgactgcctgggattcccaccatgagcggcacgcgacgcgatgccccgccgcatcacaagcacaaggacagcgtccccgacgcggggctgagaagtctcgatcattataaaagagcgctgccaaaatggagatataacttgcgacaacaggcgctcccgctcattcgctgggagacgccgtatctggctgctctccagagcaagttgcgcacgccggcgctcgacagctacttcgccatcacggccaacctgggcacgcacaccttc

SEQ ID NO: 45555 - DNA, 365 bp, Glycine max
  Clone ID: LIB3139-089-P1-N1-G8
cgctgcttcactattctccctatggagtttaatcttgtggtccgtcaaaagtttttaaattttgtgaggttcattatgaagaaaagggacaagcttagttgtcaagttggaatcaacccatactccatggaatggactggtttggccaatagattactgagtaagggcaatgatattctgtgttgcgattatgctagttttgatggtttgattaccaagcaagttatgagcaagatggcagaaatgataaacagtctttgtggtggtgatgaaaaattgatgcgtgaaaggacgcacctgctgttggcttgttgttcaaggatggcaatttgtaagaaagatgtttggagagttgaatgtggaat

SEQ ID NO: 45556 - DNA, 401 bp, Glycine max
  unsure at all n locations
  Clone ID: LIB3139-089-P1-N1-G9
ggaacaacaacacccgttgttgaatcttcaagctgaatcaaatcatatagagagagaaagagagagacccggataggaaaatagcgtttagagagagaaaggtgaagtgaggttgtttaaagtttgggtcttggtgggtgaaagggaaagatgacggatgtggtactgcatatatacgatgtgacgaatagtggatccgagaaaaccaacaacaccattgttcagatcaacaagatcttcaaggatgggattggtcttggtggcattttccacagcgccgtgcangtttttggagatgatgaatggtcatttgggttctgtgagcaaggtactggggtttttagttgcccttctggaaagaatcaatggatacatatcgtgaatccattgttttaaggaaa

SEQ ID NO: 45557 - DNA, 375 bp, Glycine max
  Clone ID: LIB3139-089-P1-N1-H1
cctaactccttgtaccaagaggttaggttcgcattcagagtacaccagtttgcaggtggctttgattcagagaccatacaagcattccaagaattgaagaagattgttagtgctagtaccaagctataggaaattgatcattactccaaaccaaacttgttaccaaaatggaccacaaatgtgtttcctatattgtcttcctcccataactgcgtgatgtttcacacttcgaaggtggaattgacaagcatgcatatgctcccatatttatgtactttttcaatgcattgcctatgtttgacatgtaggcttatgcttccctgattacgcaactatacctgaagagccaaacccacgatagaggtttttattttt

SEQ ID NO: 45558 - DNA, 396 bp, Glycine max
  Clone ID: LIB3139-089-P1-N1-H11
cgtctttgaagtttctaagatgacttctccctacattaaatgtacagtctctttcttcatagcatttggaaatttggctgatgacaccatcaattttgaggcttttccccacaagctggtgcagtttggagagattcaggaaaaagttgtgttgaaattttcacaagaggaatttcttacagcttggtcaactcaggtgcgtcccgcaacgactctgttggctgatgggtgcccatatttgtatgctatggtgcatgatagttcagtgtctacaataccaggtgattttgtcattggtgttaagttgacaaccataaacaatatgtgtgcatatgggctcaatcctggtatttcaggttctcgtcttttgggcaccattcctcagtccatttcaca

SEQ ID NO: 45559 - DNA, 395 bp, Glycine max
  Clone ID: LIB3139-089-P1-N1-H12
ccctggcagcccatcgggctccgatttgagcgatccgagcctgcccgctctctcaaacccctccccctcggcccattacaggcccaatctcatggaaaccgcttcttctgcttgcgatccagccacgtcactgagtttgtctctccccgggttcgggtccgggtctaacccagtttgcgcacctcgaccggtatcggtgtctccgccgtcaccgcctccggcggagccggtggagcagcgggggaagcaaatgttcaacgcggagttcttgagagtgatgcaagagatgataagaaaggaagtgaggagttacatgtcagggatggaacagaagaatggcttcagaataccaaccgaagcgattgggaacgcggtggtgaagcgcatgggaatag

SEQ ID NO: 45560 - DNA, 412 bp, Glycine max
  unsure at all n locations
  Clone ID: LIB3139-089-P1-N1-H2
aagaagcttatcttgtcaatctcgtaaatgtgttacgagaattgtatttgcacagtccagaggaagctcgccaattgagaaggaaagctctctctcgtattgaatggctgcaaaaagctgatgtgcctaccatagcacagattgaagagtttcattcgatgcagaggatgatgaatgctcctgattcaaatgataatattgatctactgttgagcattgatttgttgggtttacaaggagcaggtaaagcttttccaaacaagattgtttttgatgataagcttgtgttggctaacacacaagaattcnnttgatggaaatttccagtggattcttggttacccaatttttgtgaattgtctttatcctgtaagtcaaatacctncagaagcttgtcgtgtaaatgttacat

SEQ ID NO: 45561 - DNA, 326 bp, Glycine max
  Clone ID: LIB3139-089-P1-N1-H3
aatgaacacaatttaattttaacgcactgccgtaggccaatgatagggcttgccaatggaggatgaaaatgacttaccaatgaagggctaccaacaggaattgatccctggacctttgagtcaaggctgtttgatcctaccagtcgagccacattcattggcttctttaaaggactcattatttagatatttttcagatgctattctgcttagagtgccattttatagaaacttaattatggaatttgtacattatagattaaatttcctttggtttttgtttaaatgcaggtttgaaaaagcttgagtatcttaatattggatgc

SEQ ID NO: 45562 - DNA, 263 bp, Glycine max
  Clone ID: LIB3139-089-P1-N1-H4
ctataacctacctgactttgttcgatttcaacaacggcacctaatgcctacttggtcatgtattacttgaagggcaaggaccatgatctgcttatcgacaatgctgcaggcattggctctgctggaaggggtgttgtcgctgctgatgaggtcaacagggacacttgtcaagcgggtgctcagcatgattgtagagaacatcgaattcaacaggccagctcttacggagctgctactaactgctcctggtgctcttcaatatc

SEQ ID NO: 45563 - DNA, 390 bp, Glycine max
  Clone ID: LIB3139-089-P1-N1-H5
ggaggaaattctgtcttctagtgcaagtgatttcagaactgcaatggtgagtaaaaatagcaaacctcaagctactgcaatgcatgtgggagctatagaaattatcattgatagtttcgcaagtcctgactgcaacatagttggtgcaatgcttttggttgatacttatcataccaatcctgaaaatgcagttcgtagtatttttgttgcgcctttcagaggcggaaggcccattcgggtggttacatttccgaataccattgtgcagattgaaccagacatgaattcaaggtttcagcttttgagtaccactaccaatggtgattttgttcaagggaaagatctcgcaatggttaaagttaatgtatcatgtgctgctgttggcttgac

SEQ ID NO: 45564 - DNA, 398 bp, Glycine max
  Clone ID: LIB3139-089-P1-N1-H6
gtcatttaatccaaacccgtgttctgatgcatggagtttggaatttctgaagcgtactggatttcattgtgatatcatttgtgtcactggatggactgccaccccaatgcaggatgttcaggttacaattgattggtttatttcctctcaggaatgtgttcccaggacctattgtgttttaaatccacaaaatccttttgtgttaaataggtggatggggaaactgactttcccccagggcacttcccgaagtgttaaaagaatgcctctttctataggaggaggagctggtgcaaagaatgctattctcatgaatatgccaaatgctgttctttcaatgtggagatattttgttggagatctcgtctttgaagtttctaagatgacttctccctaca

SEQ ID NO: 45565 - DNA, 201 bp, Glycine max
  Clone ID: LIB3139-089-P1-N1-H7
atgtgctttcacgtaaaaatggtgaaaaaggcaagaggagatttgtttctggggatggtgaagagatgacattgattctgggaaccagtgttgaagaggcttacaacaagctaatagttgaacttggaaaaaggggtcccacattgggtggcattggatggcccaaggatgaaaaacttccttgtcgcaaaatttttgaca

SEQ ID NO: 45566 - DNA, 402 bp, Glycine max
  unsure at all n locations
  Clone ID: LIB3139-089-P1-N1-H8
ataacaagctagctattagttcgattttgtagtaagtgaggtgccaatatggtgaagatagctcttggtactttggatgactcttttagcgctgcctctcttaaggcttatttcgcagagttccacgcaactctgattttcgtgttcgctggtgttggatcagccatcgcttacaacgagcttacaaaagatgcagccttggatccaacggggctggtggcagtagctgtggcacatgcatttgcactgtttgtaggtgtctccgtcgccgccaacatctcaggtggccatttgaacccagctgtcacttttggattggccattggaggcaacatcactctcatcactggtttcttatactggatttgcccaattgttgngttctatagtcgcatgcctcct

SEQ ID NO: 45567 - DNA, 412 bp, Glycine max
  Clone ID: LIB3139-089-P1-N1-H9
atccctaaaatgaagatcaaacaacaatctctcttctcagcctcaattttactagttatagcacttattaccttcttccacaccacttcagcccaactcacaccaattcaagccccagtttcatcacccccatccccaccacaacaacaaccacaaccaccagcattcacaccaccctctccaccagccactgctccagccccaggattcaacacagtacccttagtccccgtgacaccaagtggcgcccccacacccaccatcccaaaagcaccatccattgacatagtccaaatcctaagaaaagcaaagagattctccgttctcattaggcttctcaaaaccactcaactcatcaaccaacttaactcacagcttctaacctcaggctcaggaggggtaaccctcttcg

SEQ ID NO: 45568 - DNA, 300 bp, Glycine max
  unsure at all n locations
  Clone ID: LIB3139-090-P1-N1-A1
gagatcacaggtgctactacattgctaccatactgggcgggactcaagagtggctacggcactgactatgcttaagaaacacctggtaaattataaagggcatgtctcagctgctttagttcgttggaatagaacaggagatttggcatgagcctcttgttgagtatgctctgcctatctgaaaatttccacacctcttttaattgtcgtaatgatgtgtgaagtgtgtgttattttaaaaaaaaaggcctaaaanncatcacacacaatctaaacattaaaaaaaaaaaaatgggcggg

SEQ ID NO: 45569 - DNA, 278 bp, Glycine max
  Clone ID: LIB3139-090-P1-N1-A2
cttgatatgactgaagtctttagagcaaccaacactaaagccactccacttgagattcttattaaaccacgcctatctcctagttgttatgaaagtatctaatatttaattatgtgttagttgtgtgaacctgctgtctgtattttttatttttaaactatatgtaatctgttttaaaataagcctggtttgccttgtaagctatttcaaaactatgtattttgttgcttaatctcatttgaataaacatgaagcaagagattgatggtgttttcttc

SEQ ID NO: 45570 - DNA, 235 bp, Glycine max
  Clone ID: LIB3139-090-P1-N1-A5
agaaattgagggaaatttttttttgtgctagttgggggagtaaatgagaaattttgagagatggggtgtgcgtttgggagagaggtctttagggaggagaggagagtggaagtgtgagaggcaaatgctgttgagggttgacgagaggttgttgagaatgagaacattgagaaggagggtggaagagaggagtggtgggcaaggtcaaggtgagagagaaggtgattttttatgc

SEQ ID NO: 45571 - DNA, 379 bp, Glycine max
  Clone ID: LIB3139-090-P1-N1-A6
ggtagcaacgatggtagcggcagctggagctctaggtttttgaaggtggctagtgcagctgccgctacagccgccgttgccggcggtttatatgccattctttcatcctcaacctctgctagctctgagatggaagtgccgtttggcagcgcacggcgtgagagcaaagaacgtgacgatggtggctccgggtctcatcctcgcgagggtgccaccacggtcagtcgttggaagaaacctgagattggttgggtgaagctgaacgtggatggttcacgcgacccatacaaaagttcctccgctggttgtgggggtgttctgagggacgcatcagcaaagtggcttcgtggctttgctaaaaaactgaaccctacttatg

SEQ ID NO: 45572 - DNA, 226 bp, Glycine max
  Clone ID: LIB3139-090-P1-N1-A7
aactacacttttaccgttatactctggatttaatagtcgcttggatcactgatctcatctcaattctcagatatgtggacaaatggtatgcctaaagtggtggaatgggggagcatggaacaaaaacacatggatgatgatcaagaggaggggaacggtggatatattgaaaaggcgtcagattttattcatgacatagctgagaatattgtgggagcttttgggt

SEQ ID NO: 45573 - DNA, 313 bp, Glycine max
  Clone ID: LIB3139-090-P1-N1-A9
ggggcaacaaaaataattgcatttctggatctggtgatgctaatcaaaacacgtcttggagaaagcaatagcagctggaacactgcaaatgcctcaagcgatgatggtaatgaaggttcaaatgaaaattctgatggagtaggtggtgggaactggagaggtggttaccggggtagaggtggctccgacagagggggttttagaggtagaggttttcggggtagaggagagcgtggcggtttcggtggacgaggggagcatggaggctttggtggccgaagggaacgaggaggctttggtggtagaggtagat

SEQ ID NO: 45574 - DNA, 411 bp, Glycine max
  Clone ID: LIB3139-090-P1-N1-B1
tttcaatctttgtattcaattcaccctttctctctctccatggccacttgtgttgatgccccaacccctctttctcggaagcctaacgggtcccaatccgatgatcattccttcaattacatgaaattctgccgacccactttctctgatcgcgttccctgcatacccatttgcaagaatcgtgacactgccttcacacgcgtggaggagtttgacacatgtgtggaggataatgatgatattgaggttgaggttgtggagggtgttgatctttggttgaagattcaagaggaggcaaggttagatgttgatcaagaaccaattttatccagctactatttcagttccattttgtctcacaaatctttggagagtgccttggccaaccacctctccacaaatttgagcagc

SEQ ID NO: 45575 - DNA, 389 bp, Glycine max
  Clone ID: LIB3139-090-P1-N1-B10
gcgtagtagtagttccttagcggtcaatcaaccgcttccgggggaacaagctatgcctcccgctctgcctgttatgcaggaagctgctaatcgggctctgccctacccctatcaaaataatgagattatagggggggacagtgttgaatccatccaacggaggcttttggggagattcccctctccttcagcccatgagattcaaatggcccggattgaagccgaaaacctattcgaggtcaaggtcgatatttgtcaggtcatggcgggccttcatccaagcggtgattggatgggacggggggctagagctctggataatctttgtaccgtcactggagaggagtccttaagtaagcttcctcgaatgctggaggacctacagactg

SEQ ID NO: 45576 - DNA, 458 bp, Glycine max
  Clone ID: LIB3139-090-P1-N1-B12
gtgaaaaaaagggtttgggaagagaagaggctcaagagagagaaaatggaggacgcagacgcatacgcagtagggatgaatccgtgggagcaacactcgggtgttatcaagctgcctcgctatgactacaactctccctcttctcttctcttctcttctcttctccgtaactcccattccgattttctcatcacttgtactatcagttcagtaaactcactgacttctcttcattctcattcttcttcttccaaccttccttttcattttttcaattcctctttccatagcgctacaaaagaagcaatctctatccttcataagtttgttgcttatgactcttcaaacaaccctaaagaagaaggcactagttctaagaaaaggaagttatgcacacaagatactgctgacgaatgtttcgaccacaaggatactgagtctgcttctgctaactctgc

SEQ ID NO: 45577 - DNA, 400 bp, Glycine max
  Clone ID: LIB3139-090-P1-N1-B2
ccagaatgtctaaggaagaggcagtgcatctttgcctattgtggtcactgtggtttcactactgtgccttttggaacgtgctaacgcagcaacttactccgttggaggacctgggggatggaccttcaacactaatgcttggcccaatggaaaaagattcagagctggtgatatcctaatcttcaactatgactcaacgacccacaatgtggttgctgtggacagaagtggatacaacagctgcaagacaccagggggtgctaaagtgttcagttcagggaaggaccaaatcaaactagcaagaaggcagaactacttcatatgtaactaccctggtcactgcgaatcttggatgaaagttgccattaatgcgctgtgatatactagtagtgctcaatac

SEQ ID NO: 45578 - DNA, 459 bp, Glycine max
  Clone ID: LIB3139-090-P1-N1-B4
atcagtatggaagttgaaatcagtgatgctttgcggtggccatggagctgctcagctctttgaggaaggaggacatactggagctcttctctcatggcttctgttcccactgcgaggatattctgcatactcgaattacaaaccttcgtaaaagaaagttggatgaaacttcatctccggatgaagaaggctttgaatcttctggggatcatgtagtagacaagccagtgaatattggtaatgtttcaaattcagaatctttgactaaaaaccatgaaaaacaatgggatagtcctaggaactcctcacaaaggcgtgattctactacaccaatgaaggatgatatcaaaaacattttttattcttcacctaagtgtttagtaggctgcaaacaatctgatttcaagttgttgttaaatgatggaatttgtggagattcttcatttgaaaatggtgggt

SEQ ID NO: 45579 - DNA, 459 bp, Glycine max
  unsure at all n locations
  Clone ID: LIB3139-090-P1-N1-B5
acaaaacaaacattactctatctccaatctcccttctccgccgcgccactcatcggaaaattcaaaccaccgccggaggttatggacgctccggcaatcgctgctgatcttgatttcccaagcaacaaccatcgcttgtttaagagcaccaatcttcttatctggtagaaaccaaagcctaagcaaaagcgattttacttagcagagtttacaagttattctatgcttatcgctgcataaataatctgaaaataaaataaaaaaagaccagaaaagcatttatttattactatatagtagtattatttatcggtcttgtatctttttcatttagctaaaattagcggtttctagtcaactactgcaaagtttcgcgtgcagcttctgcagagtttcagtttcagagattaaattcgcttagaaatactagtantttttcctgttctgactcgcaattta

SEQ ID NO: 45580 - DNA, 419 bp, Glycine max
  Clone ID: LIB3139-090-P1-N1-B6
caaaatcggaaccacattcctgggaattgatcttcccaatagaggtatgtggtcctaataatggttttgaaatgtggagttctgagtgggcaaatcaaacttcatggcatttgagtttccttattgacaatcccaaacagtctacagtttttgatattctcttgggaatttctcaagattttgagattgctggtaatactcttatgccagctttttctgttccacaggctactgccagatcttctgaaaatgcggaatcctctgcatgatctggaatttgtgttttcttttgcttgttcgtttgtttaattcaataaaggaaattaggcatgaccctcttgttgagtatgctctgcctatttgaaaatttccacacctcttttaattatcgtaatgatgtgtgaagtgtgtgttatttt

SEQ ID NO: 45581 - DNA, 406 bp, Glycine max
  Clone ID: LIB3139-090-P1-N1-B8
gaagaataacatatacgtgtagctcttcctcctcccactccatagtgttgctactccttcaattcccaaaagcaatgtcagagcgagacataacttgggatttccatctccgtaagctctctgctagcggcagagacttcaacaccggcaacgatcctgctttcgattcatattttttttcttcggtgaagaagctttatgaaatatgcaagaacgagtgctcctaggacttggtagctagggtttatccatccattaacaagatttttcagcgcgccgtcgctttcctcttttaatttcgaacctccaatggccgtcttttactcgaaaatctttagttttacccggactttgtggagggtgttctttatgatgcggatccttgtctcaggacaattttttgttt

SEQ ID NO: 45582 - DNA, 374 bp, Glycine max
  Clone ID: LIB3139-090-P1-N1-C1
cgctgagcatggaacacaaaaccctagaactcaacctggcttcagcaaaggatctcaaagacttggatatattctcaaagatgggtgtatatgctgggctttcactctccggcgatcaaaagaccaagactcccgtccacagaaacggggggaccaacccaacatggaattttccggtcaagttcacttttgatgaatcggtggcgcggcagaaccgtttggccctcgaaatcaagatccgctccgagcgcgccctcgccaccgataaggacatcggccaggtccacgttcctctcatggaactcctcaagcaacctggcgacggtaaatccttccagcacgttagttaccaagtcagaaaacccttcggcaaa

SEQ ID NO: 45583 - DNA, 432 bp, Glycine max
  Clone ID: LIB3139-090-P1-N1-C11
caaaaattgcgcaacagctgccaggcagaacagacaatgaaatcaagaactattggagaacaaggattcagaaacaagcaatatatgcgaaatttgaggatcacagaagagcaggatttgtagaatttgtcaagggtctacagatgacaagatgtcttcataaatcacaagaatcatctccttcggccatgtcaacccaagaccaagcaattcctttaccttttgatggtgttactgttcctcattattcatcatttgggattgggacaacaccaacaatacaaatcacttgccatggagatctcaatcatttgaatcagcatgagcagaactcagactctgaacaccacaatagttcatgcatttcctcttcagaatcagcaaatatcccaaatatgagtcagccttttggatacactactagtcaatttc

SEQ ID NO: 45584 - DNA, 202 bp, Glycine max
  Clone ID: LIB3139-090-P1-N1-C3
ggtgcattccatgcaaaggattatgaatgcttctggttcaaatggtaatattggtctactggtgggcattgatttggtgggtttacaaagggcaaggaaaggtttttcaaacccgaatggtttttgtgataaggctggggtggcttacacacaaaaaattctttgtgggaatttttcaatggattcttggttaccaattttt

SEQ ID NO: 45585 - DNA, 443 bp, Glycine max
  Clone ID: LIB3139-090-P1-N1-C4
gtgaatctcagtttgtgcagggtgctgctgatcagaatcagaagaagaacaacctgctggatatggcatctgtgcaagatgattctgcaaaaactctttctgaggagcttgcagacattgaatcccagctgaagttctttgagaccccttcttttcttgatgaagcctgggctgatgctgcattggcgtctttgctcagtgaagatgcatctcaggatgctgctggaaaccctatgaacctttggagcttcgacgacctgccttccatggcaggagtcttctgaacaccttcatatccctttttatgtaaataaagctacaagaattgtgatcgtgatgttggtgatggaatccacagcaagaaaaccaacctgcttaaagcatatgtggagtttatttatcttgtagctaatgcagtataggactatatataggtttttata

SEQ ID NO: 45586 - DNA, 359 bp, Glycine max
  Clone ID: LIB3139-090-P1-N1-C5
ccatgtttgctgcattggctgatgttttggacgttctcctgcaagttaccgcttacgtagctctgataggtcttgactctataccggcagaggataagagagatgattgggttacatgtctaaaagtgcctgcggaccctgatacaggaactggacgaagaaaacctggtttgttggctcgatacatgaaggaggttcatgctacgattctgagtatctggggagtaaaaatagccgtcatagctatttttgtgggatttgcattggctagcattgcattgagcactagaattgaacctggtttatagcaagaaattgatcttacacgagatacatatcgtcacggttatttcaataat

SEQ ID NO: 45587 - DNA, 461 bp, Glycine max
  Clone ID: LIB3139-090-P1-N1-C6
gagaatgagtacggtgggagaagggaaggtgagtagtaatggtcatggatgttgcaaatcagggccaggctatgcttccccactggaagccatttctggtcccagagagtctctcatttatgtaacctctgtctacacagggaccggaatagagaagccagactatttggcgacagtggatgtggatccaaactctccaacttattccaaagtcatccataggcttcctgttccttatttaggtgacgaattgcatcacacaggctggaattcatgcagctcttgccatggagacccctcagcagaccgacgatttctcatcgtacctgcactcgtatcaggtcgagtatatgtggttgatgtgaaaacaaattcaagggctccatctttgcacaaagttgtcgagcctgccgatatcatacaaaaaactggattagcttattcacacacattttaatggc

SEQ ID NO: 45588 - DNA, 418 bp, Glycine max
  unsure at all n locations
  Clone ID: LIB3139-090-P1-N1-D1
ggatgagagtgtttggagtgatgtggatatgcttaggagtgtaaagccttttggttggtcctatgcagtttcaaaggtgttgactgagaaagctgggcttgaatttggagaacataatgggttggaagttgcaactgttattgctccttttattggtggtccttttgtttgtcccaagcttcctgactctattgaaaaagctctgcttatggtgttgggcaaaaaagaagaaattggtgtcattcgttaccatatggtacatgtggatgatgtggctagagcacatatcttcctgcttgagcatcctaatccaaaagggggatataatngctcaccattcattgtacccattgaagagatgggtgaacttctttcagccaaatacccggaatttcaactaccaacagtagacgagctg

SEQ ID NO: 45589 - DNA, 424 bp, Glycine max
  Clone ID: LIB3139-090-P1-N1-D2
ggaaagatttgcaagaattggaggtttttccatctggtccctttggggatccaacagctgtcacagaaaaagggctggttgcaatatcaatgggctgccctaagcttcactcggtactctacttctgccaccaaatgacaaatgctgcactcataacaatggctaaaaactgcccaaattttattcgattcaagttgtgtatccttgatgcaacaaaacctgaccctgatacaatgcaaccactggacgaaggttttggcgcaattgtgcagtcttgcaggcgactcaagcgcctatctctttcgggaaattgactgaccaggttttcctttacataagaatgtatgctgagaaacttgaaatgctgtctattgcatttgcttgggatggtgacaagggaatgctgtatgtgttgaatggatgc

SEQ ID NO: 45590 - DNA, 415 bp, Glycine max
  unsure at all n locations
  Clone ID: LIB3139-090-P1-N1-D3
ggcgacttcacggttgcgttaaaccctcccaaaaccttccgctccgacaatctcctatccaccaccaaccgcattttcccagcggcgcgtggctntcaaacctcactcgcgttcaaaccgcgcgtttttcgaggaatccgcgcttcggtgatgccaagagagggccagccacaacaacaacaacaacaagcgtcgtctttcggagacgctctcgtcaacagtccgcgccgaaacgacgtcgtcgaggccatcggaagaaccgcatcgctcttcaactgcctctccgaaacgaacctncacgccaccgttcccggcctcgagtccaaaacccgcggcatagttcgagatatatacgacgctggggattacctcgttttggtgaccactgatcggcagagtgcgtttgatcggattc

SEQ ID NO: 45591 - DNA, 455 bp, Glycine max
  Clone ID: LIB3139-090-P1-N1-D4
atagagtgaaagaatgggtgagaaaagcaagattttgatcataggaggcaccggctacatcggcaaacatatagtggaagcaagcgcaaaggctggaaatcccacttttgctttggtgagggaatccacactctctgacccctccaaggcacaactcatccacaattttgaggctttgggcgttaatttggtccgcggggatctgtacgatcatgagaagttggtgaaagctatcaagcaagtagatgtcgtcatatccacgctgggtcacctgctgcttgccgatcagctcaagatcatcgctgccattaaggaagccggtaatgttaagaggtttttcccttcggaattcggtaacgacgtggatcgtgtccatgccgtggaaccagcaaaatctgcattagctatcaaagcccaaattcgacgcagcattgaagccgaaggcatcccctata

SEQ ID NO: 45592 - DNA, 451 bp, Glycine max
  Clone ID: LIB3139-090-P1-N1-D5
caatgatacgtcgtcgttttgccccccagaacctctgaagaagaagaaatggcgagtagcagcagcaacactccgaaggaaagcgttgttgtcgactgcggaaggcgtcgaacctcttgcggctattgcagatcctctcgtcacaatagcatctctcatggcatgtgggcacatagccttactgtggatgactaccaagatcttcttgatcgtggctggagaaggtctggatgttttctttataaaccagagatggaaaggacatgctgcccttcttatacaattcgcttgaaagcaagtgactttgttccttctaaggagcaacttcgtgtatctagacgaatgcaaaggtgggttccatttgacattgcaaggcctctgcttgacagaaaaccttatgttgtcttatcagattcttcaatttacaaaatggagagtaatcctacctaaa

SEQ ID NO: 45593 - DNA, 459 bp, Glycine max
  Clone ID: LIB3139-090-P1-N1-D6
gagcgatacaacagctacatcaggagactcaacagcaccaaacttctcaacgcctgctccaaactcctcttccgtgccactatcttagtcgcactcatcctcggcttcctcttcacctttaactaccctgccctcgccccagacttgaccttgcaccggcacctacactcccactcccactttctctcctcctcctcctccttcgcctcctgggagaagcaggtccgccactgcttcacccctcgccgccccaacggcctcaccgtcctcgtcaccggcgccgctggcttcgtcggcagccactgctcccttgccctcaaaaaacgcggcgacggcgttctcgggctcgacaacttcaacagctactacgatccctccctgaaacgctcccggcaggcaatgctctggaaacaccaggttttcatcgtggaaggtgaccttaacgacacccccttgctt

SEQ ID NO: 45594 - DNA, 261 bp, Glycine max
  Clone ID: LIB3139-090-P1-N1-D7
cacaacttcattatgttttgtgtaataatctggaaatgcaagaagcttatcttgtcaacctcgtaaatgtgttacgagaattgtatttgcacagtccagaggaagctcgccaattgagaaggaaagctttctctcgtattgaatggctgcaaaaagctgatgtgcctaccatagcacagattgaagagtttcattcgatgcataggatgttgaatgcttctgtatcatatgatattattgatttactgtcgagcatttgat

SEQ ID NO: 45595 - DNA, 223 bp, Glycine max
  Clone ID: LIB3139-090-P1-N1-D9
ctcgagccgcaatgtgtttatcactgagttccagaccaaccttgtgccctaccctaggatccactttatgctttcgtcctatgctccggttatctctgccgccaaggcctaccacgagcagttgtcggtgccggagatcaccaatgccgtgttcgagcccgccagcatgatggccaagtgtgatccaaggcacggcaagtacatggcttgctgcttgatgtac

SEQ ID NO: 45596 - DNA, 460 bp, Glycine max
  Clone ID: LIB3139-090-P1-N1-E11
tttcttcagttcggtggtagggagggagccgtagcagcggaagctctagcttgggtagcgaatcacaatggcgagaggattaaagaagcatctgaagaggcttaatgccccaaagcattggatgcttgacaaactgggtggtgcatttgctcctaagccctcatctggaccacacaaatcgagggaatgcctgccactcatactcattttgcgaaaccggctgaagtatgctctaacataccgtgaagtcattgctattctgatgcagcgacatgtccttgttgatggcaaagtcaggactgacaaaacataccctgctggttttatggatgttgtatcaatccctaaaacaaatgagaacttccgcctgctgtatgacaccaaaggtcgattccgtctccactcagtcagggatgacgaggctaagttcaagctttgcaaagttcgctcagtgcagttt

SEQ ID NO: 45597 - DNA, 426 bp, Glycine max
  Clone ID: LIB3139-090-P1-N1-E4
gcagagcttttgtcaattttctattgaccttctcggtggaggaattttagtggacaaaactggagattggatcacacttatacaaaattctccaattagtaacttgttgagagttgctgcttggaagaaaggttgtttaatggtcaagattgtgatgtctgggaatgcagcagtcaaaaggagtgattgggcctcattggtacaagtgtttttaacaaacagcaacagtacagagcattttgatgcatgtaagtggacaaaatcagaaccacattcctgggaattaatcttcccaatagaggtatgtggtcctaataatggttttgaaatgtggagttctgagtgggcaaatcaaacttcatggcatttgagtttgcttattgacaatcccaaacagtctacagtttttgatattctcttgggaat

SEQ ID NO: 45598 - DNA, 465 bp, Glycine max
  unsure at all n locations
  Clone ID: LIB3139-090-P1-N1-E5
gaaaggacacacctgctgttgtcttgtcgttcaaggatggcaatttgtaagaaagatgtctggagagttgaatgtggaatcccttctggatttccgctcacagttattngtaatagcatttttaatgagatgctcattagatatagctatgaaaaattactgcgccaggctaaagctccaagtatgtttttacaatccttcaaaaattttgtttctttgtgtgtgtatggcgatgataacttaattagtgttcatgaatatgtcaagccttactttagtggttctaaattgaaaagctttctagctggtcataatatcaccattactgatggtattgacaaaactagtgcatctttgcaatttagaaagttagcatattgtgattttctcaagagataccttaagcagatgtctaatgttttgtgggtggctcctgaagacaagctagtttattgtcacaacttc

SEQ ID NO: 45599 - DNA, 255 bp, Glycine max
  Clone ID: LIB3139-090-P1-N1-E6
gaacaaggggatatggttttagcaatcaacaaagaaccagtcacatgcttccgtgacattgaaaatgcttgccaagctttagacaaatccgacgccaatgatgggaagcttcacttgactattttccggcagggacaagaggttgaactttttgtgggaacagatgttagggatggaaatggcactgctcgtgcaattaattggtgtggttgtattgtccaagatccacatacagcagttcgtgctcttggattt

SEQ ID NO: 45600 - DNA, 416 bp, Glycine max
  Clone ID: LIB3139-090-P1-N1-E8
attggatcacacttattcaaatttctccaattagtaacttgttgagagttgctgcttggaagaaaggttgtttaatggtcaagattgtgatgtctgggaatgcagcagtcaaaaggagtgattgggcctcattggtacaagtgtttttaacaaacatcaacagtacagagcattttgatgcatgtaagtggacaaaatcagaaccacattcctgggaattaatctttccaatagaggtatgtggtcctaataatggttctgaaatgtggagttctgagtgggcaaatcaaacttcatggcatttgagtttccttattgacaatcccaaacagtctacagtttttgatattttcttgggaatctctcaagattctgtaatcgctggttatactcttaagccagctttttttgtttca

SEQ ID NO: 45601 - DNA, 427 bp, Glycine max
  unsure at all n locations
  Clone ID: LIB3139-090-P1-N1-E9
gcggcaataatcaaagttgggctttgaagaaggccagtgaagctcgggcatggaaattaaccgcgttccagcgcttggacttcactgttgatgatgtnttggattgcttgaaggaggacaacataatagggaaagggggtgctggcattgtatacaaaggggcaatgcctaacggggataatgttgctgtgaaaaggttaccagctatgagcagaggatcttcccatgatcatggtttcaatgctgagattcagacattggggaggattcgacacaaacacattgttagactgttggggttctgttcaaatcatgagacaaatctcttggtgtatgaatacatgccaaatggaagtttaaggtgggttcttcatgggaagaagggggccacttgcattgttccctatgttaaaattgttgtggggct

SEQ ID NO: 45602 - DNA, 444 bp, Glycine max
  unsure at all n locations
  Clone ID: LIB3139-090-P1-N1-F1
ctaaagctacaggtctnctttcttcgtccaccatcgcaccaagtcgcagcttcatagcagcaccgcaccgcaccgcaccaggtcttctttttttctttcatggcggaggaaattacttctcaattaaaaaaaaatttgctggatgaagaaaatggaacatcaagtcatgttgtagaaggggctgctgatgctgatgctgatgctgagctttctccaccatcacaaaaaggagatgacgctaaagaagtttcaaagaagaaaaagaagaaatctaaaagcaagaaaaagaaagaactcttacaacagactgatccaccatcaatttctgttattaaccttttcccatctggagattttcctgaaggtgaaattcagcagtacaaagacgattacctatggagaactacttcagaggagaagagagaactggagcgcctgcagaaa

SEQ ID NO: 45603 - DNA, 437 bp, Glycine max
  Clone ID: LIB3139-090-P1-N1-F10
aaaaaaaaaaaaaaaaaaaaaaaggaataaaaaaaaaaaaaagaaaaaaaaatataaaaaaaaaaaaaaataaaaaaaattagaaaaaaaatataaaaaaaaaaaaaaaaaaaaaaaaataaaaaaaaaaaaaaaaaaaaaaaaggaaaaaaaaaaaaaataaagaaaaaaaaagaaaaaaaagaagaagaaaaaagaaaaaaaaggaaaagaaaaggaagaaaaggagagaaaagagaagaagaaagagaaaaaaggggaaaaaaaaaaaaaaaaaaaaaaaaaaaaagaaaaaaaaaaaaaagagggaaaagaaagagaaaaggaaagaaaaaaaatgagaagaaaaaaaaaaaagggagaaaagagagaaatgaaaagaaagaaaaaagagaaaaagaaaaaaaaaaaaaagagaaaaaaggaaaaaggaaaaa

SEQ ID NO: 45604 - DNA, 105 bp, Glycine max
  Clone ID: LIB3139-090-P1-N1-F12
gcttgtgttggctaactcacaagaattctttgatggaaattttccagtggattcttggttaccaatattcgtgtattgtctatattctgtaagttattattcctt

SEQ ID NO: 45605 - DNA, 448 bp, Glycine max
  unsure at all n locations
  Clone ID: LIB3139-090-P1-N1-F4
agggacaagcttagttgtcaagttggaatcaacccatactccatggaatggactggtttggccaatagattactgagtaagggcaacgatattctgtgttgcgattatgctagttttgatggtttgattaccaagcaagttatgagcaagatggcagaaatgataaacagtctttgtggtggtgatgaaaaattgatgcgtgaaaggacacatttgctgttggcttgttgttcaaggatggcaatttgtaagaaagatgtttggagagttgaatgtggaatcccttctggatttccgctcacagttatttgcaatagcatttttaatgagatgctcattagatatagctatgaaaaattactgcgccaggctagagctccaagtatgtttttacaatccttcaaaanattttgttctttgtgtgtgtatggtgatgataacttaatta

SEQ ID NO: 45606 - DNA, 404 bp, Glycine max
  Clone ID: LIB3139-090-P1-N1-F5
agagttaagaagaaagttgctttggtgctcagacgctccactctccaagaggttagaagacaaagtagcactaatcaccgggggagcaagtggcatcggcgaagccactgcaaggcttttccttcgccacggcgccaaggtcgtcatcgtcgacatccaagacaacctcggacacttcctttgtcaaaacctcaacttcggcaacaacatttcctatgttcactgtgatgtcactaacgataacgacgttcaaatagccgtcaaagctgtcgtttcacgccacggcaagctcgacatcctcttcaggaacgccggaatcggtggcaattcggactcctccatcatcgcccttgatcctgctgactcgaaaagggtttttgaagtcaacgtttttctgggttttt

SEQ ID NO: 45607 - DNA, 419 bp, Glycine max
  Clone ID: LIB3139-090-P1-N1-G1
atgcatcacaaatggacaataatacattgatcctattccatggccacttgccaaaacaaaacattaaaaaaaaggttaagtttcaatgcagtgcatggcaccatttgttgaagctgaggactggccacgcatttgttgtggctgaaaagaaagataataatggtggtggggggttttgggttgtaagtgaccaactttggggtccacgtaaaaattgcatgacagggattggatgtcggttctgttggtgttgttgggtagggccccctagttgaggtgtctaataatggaaaaaagggtagttaggataatgttgggaataaaaaatgagtcctggctttggtggatgctaacttgttcttttcccaatttaatttgttcactcagctaagttcaccattgagaacaacacttatatt

SEQ ID NO: 45608 - DNA, 213 bp, Glycine max
  Clone ID: LIB3139-090-P1-N1-G2
ggacaagcttaggtgtgaagttggaatcaacccatactccatggaatggactggcttggccaatagattactgagtaagggcaatgatattctgtgctgcgattatgctagatttgatggtgcgattaccaagcaagatatgagcaagagggcagaaatgataaacagtctttgtggtggcgatgagaaattgatgcgagaaaagacgcacct

SEQ ID NO: 45609 - DNA, 191 bp, Glycine max
  Clone ID: LIB3139-090-P1-N1-G3
cgtatgctaacaaccaggctgttaaatggctggagcatcatacttttgcaatagtgaagtccagatatgagttgcacatatccatgtatcatttatctgttgataggtgaaagaatcaactgcacattgctggtttattcttcatgtgattggacgtattgaatccaacatagtgattggtctttttgatc

SEQ ID NO: 45610 - DNA, 354 bp, Glycine max
  Clone ID: LIB3139-090-P1-N1-G4
gaggaagtggacggttgctttcgctctccttcttctctctctcctctttctctttgcagatcaaggtcgaaagtttcaggcgaatgccgagggagatttcgacgagcttgtagatccacccaaggtggaggacaagatcggtgctgtgcctcatggcctttcaaccgattcagatgtcgtcaagagggaggcggagtcgatctcgtagagatctcttcggagcaacgcggagaagtttgagtttcaagcggaagtgtcgcggcttatggatatcatcatcaattctctctacagtaacaaggatatctttcttagagagtcgattttcaatgcttctgatgctttggacaagat

SEQ ID NO: 45611 - DNA, 469 bp, Glycine max
  Clone ID: LIB3139-090-P1-N1-G5
gagaaaactcgtcgagattgagaaacccggtcttctcatccttggcaaacaggccattgatgacgattgcaatcaaacaggccagatgatagcaggactcctcaactggcctcaaggcacttttgcttctaagtaggtggtccttgacaaagagaaacaggttgccacagttgacagagaggttgacgatggtattgaaaccgtgtgtctaaacttaccagcagtaataaccaccgatctgagactgaaccaaccaaagtatgctactcttcccaacataatgaaagcaaagtcgaaacccataaaaaaattcactccggaggagttgaatgtagaaatcaaatctgatttggagatagttcaagtcacagaaccttccaagagaaaagcaggggttattctttcttctgtggatgagctgattgacaaactaaaacatgaagctaatgtcatctaattattctcttct

SEQ ID NO: 45612 - DNA, 348 bp, Glycine max
  Clone ID: LIB3139-090-P1-N1-G6
caatgatacgtcgtcgttttgtcccccagaacctctgaagaagaagaaatggcgagtagcagcagcaacactccgaacgaaagcgttgttgtcgactgcggaaggcgtcgaacctcttgcggctattgcagatcctctcgtcacaatagcatctctcatggcatgtgggcacatagccttactgtggatgactaccaagatcttcttgatcgtggctggagaaggtctggatgttttctttataaaccagaaatggaaaggacatgctgtcctccttatacaatacgcttgaaagcaagtgactttgttccttctaaagagcaacttcgtgtatctagacgaatgcaa

SEQ ID NO: 45613 - DNA, 241 bp, Glycine max
  Clone ID: LIB3139-090-P1-N1-H1
gaaattataagaataataaaaatattgtcaataatggcaattgcttgtgcttttattgcaaccttttctttgatcctattatgtagattaaaggttcttttcaagacaagagccattggtaaataccctttagtattttcaagcactttcctttctttcagtgtgtgatattttcttttaagtaatttaatctcttgtactcaacgtggaaaaaaatatatataaatccatgcttttactt

SEQ ID NO: 45614 - DNA, 436 bp, Glycine max
  Clone ID: LIB3139-090-P1-N1-H2
caccttcccctttgtttctcaacatcattccccaatttccccttctgtattgtttttcttcattgctctttttcaatccccgatttcccccttcttcgttttgtgtcttcataattcagatcctctcttcaatctacggttcctggcttaacgaaatcaaatgtttaaggaagaatttctatgacgattcgcaaccccatgcgacgaatccgtctgctccactccttttccgtcgtcttactctactggttctacgtcttctcatgaactaaccccctgtcaatcccctaatttctccaacatttgcccctttttctaattaatcagatctgcgaaaccctaatttccctaaccctaacgaaacccccaaatccaatggctttccattcaacgcccggcgagttcgggatcgtcggacggaggagatccggtgatg

SEQ ID NO: 45615 - DNA, 458 bp, Glycine max
  Clone ID: LIB3139-090-P1-N1-H3
caattctcaaactcgttacagattaaaaccctttcttgaaacctttctccaaaatttctcacaacccacttctactctactcattccacacccaacttacaaaaacccattcttttgctcactcattttcttaacgtagattaatcattatgtgtggcggtgccatcatcgctgacttcataccccgccgtggaggccgccgcctcacggcctccgagctctggccaaactccttcgccaaagacgatgactttgacttggattactcccacatcgctacccaacaacccttcactctcaaaaggtcccaacctcccaaagttagcgagcaggttgagaataagccggtgaagaggcagaggaagaatctctacagagggattcggcagcgtccgtggtgcaaatgggccgcggagattcgcgatcctagaaaaggcgttcgtgtcttggtgggcacc

SEQ ID NO: 45616 - DNA, 465 bp, Glycine max
  Clone ID: LIB3139-090-P1-N1-H6
ggctgctggggagcttgtacatgttaaggagatcattaagtggggtactgattattttctcaagagtttcaatagtactgctgacaccatcaccacccttgctgctcaagttgggcttggagatacttccggtggtgacagtccgaatgaccactattgctggatgcgcccagaggacatggactatgaccgccctgtgactgaatgccatagttgttctgatcttgcagctgagatggctgctgccttggcatctgcttccattgttttcaaggacaacaaggcctattcgaagaaactagtttatggtgctaccacgctgttcaaggtttctagggagcagagaggcaggttcagtgcatggagttcggatgcttttatatttacaattctaccagttacttggatgagtattgttggggaggcgcatggatgtactttgcaactggaaattcatcgacctta

SEQ ID NO: 45617 - DNA, 313 bp, Glycine max
  Clone ID: LIB3139-091-P1-N1-A1
gaaattttgataaaccgcgatcacaggttgccgcaccttaaaaccggaaacaaaagcaatcgttacttgatttcaagaatctctcaatttcttcctacttctttgtgtacggtttcttaagggaaagaaaatcactctctgtgctggccacagacttcgggaatcattttcttttccactcttagtttatttgctgaacacttttctatttgatataagacttcgggtcagaattaaacttcttctggctctttctcaggtctctggttaatttcaagttcaagctggtgaaatcttggattagtgcttccac

SEQ ID NO: 45618 - DNA, 387 bp, Glycine max
  Clone ID: LIB3139-091-P1-N1-A10
ggttcatgggcaactgatgcagctaacacaaagtgtttgggtattgatggctactttatcaaactcttcaatgctcatattgatcggtaccctcttgttctgtctcaacaagtccttgaagccgttccttcttcctgggatcctcctgcacttgcaagattcatcgagaacttcgggacacacatccttgtggggcttagcattggtggcaaagacttagtgttggtcaagcaagacgtgtcttccaacttggagccatcagagctcaagaagcacttggatgagcttggaaatcaattattcaatgggacatgcaatttccttccaaaatccaaagaacaaaaatataaagcaccgcaagcttttgatgtcttcggtccacaaatt

SEQ ID NO: 45619 - DNA, 394 bp, Glycine max
  Clone ID: LIB3139-091-P1-N1-A11
ctcccctttgccgctgttgttgttgctgcaccaccgaacaacttcccctgtaaatcgcgtttcgtttgtgcaaggttttaaaagatggctgatgctgaggacattcaacctcttgttgttgataatggaactggaatggtcaaggctggttttgcaggtgatgatgctcctagggccgtgttccccagcattattgggagaccacgccatactggtgtaatggttgggatgggtcagaaggatgcttacgtgggtgatgaagcccaatcaaaaaggggtatactcaccttgaagtatcctatagagcatggcatagtcagcaactgggacgatatggagaagatttggcatcacacattttacaatgagctacgtgttgcccctgaagaacacc

SEQ ID NO: 45620 - DNA, 353 bp, Glycine max
  Clone ID: LIB3139-091-P1-N1-A12
agcaatgtgtccaaaaagctgctattcctttggatgataccaaaggagtggctgagccacctgatatccagaacagagaaagcaacaataaggtagaaagtattaatttctgttttggatcaaatccttcaactgaaaacgtagttcaaaacatcatggacatgaaaggtaatattgatgatcccatgaattatttctcatcgttgaacttcgaaggctgtaactttggggcgtttaatgaattctcccaacctccatttgaagattcagaagcttctttctctttccccatgtcgggatcctataattatgctcccaaatttgacagcgacaatttataataatgttactct

SEQ ID NO: 45621 - DNA, 301 bp, Glycine max
  Clone ID: LIB3139-091-P1-N1-A2
ttccccttcaccccttacttttttgcgttcattctgttttcataggcttcttttttctcttgttgcagtgacgaacttctgaagaaatggcaaattatcctttgacacactctcactctttccgcgagaggattgatgaaactctcactgctcacaggaacgaaattttggcccttctgtcaaggcttgaagccaagggcaagggaatcctgcaacatcaccaagtgggtgcagagtttgaagaaatccctcgggagagcacaaagaaactctcagacggcgtctttggagaagttttgag

SEQ ID NO: 45622 - DNA, 388 bp, Glycine max
  Clone ID: LIB3139-091-P1-N1-A3
ccggggcgtgagagctgtccccgtctagccattgattgggaaaagaccacgcttcaaagatgagtaagcttcagagtgatgctcttagagaagctatcttaagaatcatgactgatttcaaggcaaagaacatgaaatttgaggagaccattgaactacaaattgggctgaaaaactatgatccccataaggacacggcgcgtagtggctctgttaaatctgctgagattgctcgacccaagaagaagacatggctgcttggggaggcccaacacgtttgagaggctgagaagatatgattggactacatgggacttgcggcctttgagaagcttaacacaaacaagaaattggtgagagaactaggcaaaaaatatcatgccttttt

SEQ ID NO: 45623 - DNA, 401 bp, Glycine max
  Clone ID: LIB3139-091-P1-N1-A4
ggttgagaaggcacattaacaatttgaaagtttccccggttggagttggacttatgggctacatgggaaacaaggggtcagtttccattagtatgtctctctttcagtcacgtatgtgctttgtttgttcccatttgacttctggtcagaaggaaggggctgaacataggcgaaactctgatgttcatgaaattctaagacgcacttgcttctcatcatctgtcttcgatgcagatcaaccacaaacaatcccatctcatgaccagattttctggttcggggatttgaattatcgtatcaatatgttggatgctgaggttagaaaattggttgctctaaagaagtgggatgagttgaagaattatgatcagctaagcaaagaattgcgtatggggcatgta

SEQ ID NO: 45624 - DNA, 365 bp, Glycine max
  Clone ID: LIB3139-091-P1-N1-A5
tagatcctcaatacaatgaggttcaggctcagatggaaacaaatttgtttaaattgtctcttgatgatgttgaaactcctaaaggttccatgttggatcttaaaatttctcaatctaaaattgcacttcccaagaacacagttggaggaaccattctgcgtagtgatttattggcaaattttttgacagagggcaattttagagcaagtgttgatttgcagcgcactcatcgtattagaggaatgattaaaatggtggccacagttggtattcctgagaatacaggtatagcattggcctgtgctatgaatagttcttttagggggcgcgccagttctgatatttacaccatctgctctcaagac

SEQ ID NO: 45625 - DNA, 399 bp, Glycine max
  Clone ID: LIB3139-091-P1-N1-A6
catggatgccacgaacaatcttagtgatgacttcatgattggttcaggaggttcaggcaaaatctacaaagctgaattggccactggagagacggtggctgtcaagaagatttcatcgaaagatgaatttctgttgaacaaaagcttcttaagagaagtcaagaccctagggaggattaggcatagacatctggtgaagctaataggatattgtaccaatagaaacaaagaagcaggttggaatctgctgatatatgagtacatggagaatgggagtgtatgggattggcttcatgggaaaccagccaaggcaagcaaagtaaagaggagaattgattgggagacaaggttcaaaattgctgtgggattagctcaaggagtggaataccttcatcacga

SEQ ID NO: 45626 - DNA, 319 bp, Glycine max
  Clone ID: LIB3139-091-P1-N1-A7
attgaatgtcccaaggatgagaaacttcctcgtcgcaaaatttttgacaaacctaagacgcgctgcttcactattctccctatggagtttaatcttgtggtccgtcaaaagtttttaaattttgtgaggttcattatgaagaaaagggacaagcttagttgtcaagttggaatcaacccatactccatggaatggactggtttggccaatagattactgagtaagggcaatgattttctgggttgcgattatgctagttttgatggtttgattaccaagcaagttatgagcaagatggcagaaatgataaacagtcttt

SEQ ID NO: 45627 - DNA, 377 bp, Glycine max
  Clone ID: LIB3139-091-P1-N1-A8
atccgatcgaattgagatttcaatttgtcaacagaaaaacctaatgtctcatcgagactctgattccaagcgtcgccactccaagttcgatcgagaaccaagtcccaagagatatagaagggatggtaaacaagaaagagaaagggacaggaacagagtaacctcagatggaggggatcagagaaacccaccacatcattttaggcgtgaacccttcgatgctgcttccaagaaatcgaattcaaatgatcatcatgagcaggagcccaaacattcggcttaaccaccgagatcttcgttttatcaccagtatatgcaaactattttttctgggcttgatgtagccggatttcttgtttcaaatccaatgcccttga

SEQ ID NO: 45628 - DNA, 278 bp, Glycine max
  Clone ID: LIB3139-091-P1-N1-A9
ttgaaatcctggccagagcagctttattagatagcaatagcatattgcatatttcttggtttctcctgttgcagcggaccatgatttagtagtgtttatgcagaatcaatgatgatgagctccacagattttacacagcttctaataatgactcttcatgcttccttaccttaatcaaaaagacaataagttggcgggacagttacagatttctttcaagggaagagctggaaacctggtcaaatatggttttctggcatggatcttgattttcgcac

SEQ ID NO: 45629 - DNA, 375 bp, Glycine max
  Clone ID: LIB3139-091-P1-N1-B1
gcatcactggtttcacacttgcgactttcagtactcctattatcagtttcattgggaaattcagcttcactccaagaaaattttgtccaatgtctcaacttgaattcggacagaacattcccatttaacccactaatttacacaccaaaaagtccttcattcaccagtgtccttgactcctccggcaagaatcaaaggcttttggtgccttcaacaccaaaaccaaagttcatattcacaccaacccgtgattcccatgtgcaagcagcggtaatctgctccaagaaacttggcattcatcttagagtgttaagtggtggccatgactttgaaagagtctcgtacgtttcagaattcaaagccccttcatagttg

SEQ ID NO: 45630 - DNA, 374 bp, Glycine max
  Clone ID: LIB3139-091-P1-N1-B10
atttctttttcttcttcttcagacaatcatttgcttttggatggtaactcgtacccacttttccattccggaattgggcactggtagcttagctcgtgtaaatgtgtgtctggctttggaaatccatgaataaaattatctgagatttgagagctttgagctgcgaagatggtggctaattgactttgaggtcaacttgcaaggtcatgaggtggagttgcagtgagctacatgtaggagcaagatgattgagcaattcatcaattttcgtattaggcctcccagggcggagtataaccctgatcagtacctatgggaaaaggaattcacccttacaggttgaacataccaaaggcaggatttggagctcaaga

SEQ ID NO: 45631 - DNA, 390 bp, Glycine max
  Clone ID: LIB3139-091-P1-N1-B11
ctcgagccgcatttatattgtgtgctttgatcttgcaagacttcaattcatataaaccaaagatatactatcttcataagcaaaggactcaaagtaatagttttctttaaaaaaaattgaagtgtgggggggatctacatctctatgggatcatcactttcgttactctcatcagcctgggaagaaatcgttaggcattcactctttggtctgtctttgaacttcacttttggttccaaagatggggctgtgattttgagatcaggcagcttcaagaaaagagaatcagaaactacttcaaagggtacctctactaccaacagttcaagcaagttgaaagattgcaggcccgaacacatggtccttgtaagaaacccttcgtgcattaaa

SEQ ID NO: 45632 - DNA, 350 bp, Glycine max
  Clone ID: LIB3139-091-P1-N1-B12
ccgacgacggcttcggccggcctctgtacaccgtcagagacgccgtcaacttcctcgccgaaaacaaccgcgaactctacaagccgaaacgcgccggcgtgttccgccgacgccgtagattctccgcgaggagcatggaaaacacgctaaagcgcgttttcaagagaaaagagggagaagaacggttgttgactctgaaggacacgtgtaagccgctacttgtcccttgctttgacctcaagagctctgcgccgttcgtgttctcccgagccgacgcgtccgagtcaccgagtttcaacttcgagctttggaaggcgtgccgcgccacgtcagcgactcctggcgttttc

SEQ ID NO: 45633 - DNA, 355 bp, Glycine max
  Clone ID: LIB3139-091-P1-N1-B2
tgctccatcacctaatcacttccccacttcccctgtaaatcacgtttagttcgcacaaggttttaaaaaatggctgatgctgaggacattcaacctcttgttgttgataatggaactggaatggtcaaggcgggttttgcaggtgatgacgctcctatggccgtgttccccagtattattgggcgaccacgccataccggtgtaatggttgggatgggtcagaaggatgcttacgtgggtgatgaagctcaatcaaaaaggggtatactcaccttgaagtatcctatagagcatggcatagtcagcaactgggatgatatggagaagatttggcatcacacattttacaatgagc

SEQ ID NO: 45634 - DNA, 400 bp, Glycine max
  Clone ID: LIB3139-091-P1-N1-B4
tttagagcaagtgttgatttgcagcgcactcatcgtattaaaggaatgattaaaatggtggccacagttggtattcctgagaatacaggtatagcattggcctgtgctatgaatagttcttttagggggcgtgccagttctgatatttacaccatctgctctcaagactgtgaattatggaatcctgcttgcacaaaagcaatgactatgtcatttaatccaaacccgtgttctgatgcatggagtttggaatttctgaagcgtaccggatttcattgtgatatcatttgtgtcactggatggactgccactccaatgcaggatgttcaggttacaattgattggtttatttcctctcaggaatgtgttcccaggacttattgtgttttaaatccacaaa

SEQ ID NO: 45635 - DNA, 397 bp, Glycine max
  Clone ID: LIB3139-091-P1-N1-B6
cccagccccaaggtgtgtttgttttgcagatccaacacgcctcaaccacactctctctatttatatccaactgtcccatcctcactcgcaacccttttccccttttatcaattcaaaccacgccttcccctgttcacaacctagcttgcccacaccaccatcacaacacaaaccattcctctcttgcatttaaacaaaaataaatatagattctgggggcatttcttggattctggttctcgttggtcacatccatcaaacacccctttgattctttcttggcgtgcgtcaggttcaattcatttttatggcaaccctgtcagagtaataagacagttaccgtgttgtacgtgtccttcaaacgtcacccacttcaacacataaaccaacgtttctc

SEQ ID NO: 45636 - DNA, 116 bp, Glycine max
  Clone ID: LIB3139-091-P1-N1-B7
aaaagcgaagaatttattgatgcccaagtaaatgcacttctatgctctctagatattgacagcagtgtccgtggtaagggacctatgcctgaaagatttcgggagcttgaggatta

SEQ ID NO: 45637 - DNA, 342 bp, Glycine max
  Clone ID: LIB3139-091-P1-N1-B8
ctcgagccgctcgagccgtgcggatttcatagccaagcagaaagggcttcgcataagcgaggaaagagtggttgttgattcatctcctgagatgcctgttgattcaatccaggtacagatatccagtgtggactccaaatttgcgagtgctgtatcacagagtggtcagatcagcattgacggaagagtgaagtttggagaaccccacctgacatgtgtggggtctttcgatgtggatgtgagcttataagggaatctaatcctgtgccggcaggtggatcagccccgtctgattggccgggttggaaacatactgggtgaacaaaacttgaatgtgtgctt

SEQ ID NO: 45638 - DNA, 316 bp, Glycine max
  Clone ID: LIB3139-091-P1-N1-C1
tatgtttgttcttctgtttaaaggatgaatatcaataacattattttctggctttggcttctactcccatacttgatgttagcttcttcttcctctttctgcaaccaccatgacacctctgccttactacttttcaaaaactcatttactctcaacacttcgcttcattatgattatttttggctctcttattcttcaaagacagagtcatggaaaaacggaacagattgttgtgagtgggatggggtcacgtgcgacaccatctcaggccacgtgattggtcttgaccttagctgcagttatctttaaggtcaac

SEQ ID NO: 45639 - DNA, 403 bp, Glycine max
  Clone ID: LIB3139-091-P1-N1-C10
aaaggggtcaaaaaggcaatttatgaaaaatgaagctagaagagacttggcgaaactctggtattgactcgcagtggagagagagtgttagcaccaaaaatgtcgaagttaatcttcgtgttccttgcactaattcctcttctctgcacctccttctcgccagagaaaccctcagatcggcgcatcctcgttttgctcgatgacttcgccatcaaatcctctcactctctcttcttcaactccctcaaatctcgcggcttcgatctccaattccacctcgccgacgaccccaaaattgcgctccagagatacggccagtacctctacgacgccctaattctcttttcccccaccattgaacgttttggaggatccattgacgcggctgcaattttggattttg

SEQ ID NO: 45640 - DNA, 402 bp, Glycine max
  Clone ID: LIB3139-091-P1-N1-C11
cgagcttaggttgcttgaagttttctatcacaagatatacaaggtcttccctcccaatgaaaagattgaaagtataaatgatcaatactggacattacgtgcagaggagattccagaagaagagaaaaatctgggtcctcatgatcgtctaatccatgtgtatcatttcactaaagacacagctcagaaccaaatgcaaattcagaactttggggaaccctttttcttggtcatacatgaaggggagactttggctgaaattaaagtaagaatacagaagaaacttcaagtccctgatgatgagtttgtcaagtggaaatttgcctttttttcattagggcgttctggatacctttaggaatctgacattgtgtccagtccgtttcagaggagagatgttta

SEQ ID NO: 45641 - DNA, 378 bp, Glycine max
  Clone ID: LIB3139-091-P1-N1-C12
tatcaatattggtgttggcgacttttcttccctgacaaaatttgcgcaggaaaataacatcaatttggttataccaggtcctgaacaaccacttgttgaaggtatcgagttagcctttaaaaagattggaattccatgttttggaccttcacctaaggctgctatgatagaaggatcaaaggcatttgcaaaagattttatgaaaaaacatcaaattccaacagcagcttatgagaatttttcagattacggaaaggcaaaggcatatctggaatcagtatctcataaagttgtcataaaggcttcgggtcttgctggtggtaagggagtcctaatttccgccgacatacaagaagcattggttgcattgaaagaaat

SEQ ID NO: 45642 - DNA, 398 bp, Glycine max
  Clone ID: LIB3139-091-P1-N1-C2
ggctattgccgctgcacggatgaaaggtgaattcccagaaaggataggacagccagaatgccagtactatttgaagacaggaacttgcaaatttggagccacatgcaggtttcatcatcctagagacaaggctgggattgctggaagagttgccatgaatattttaggctatcctctccgcccaaatgagcctgaatgtgcttattatttaagaactggacaatgtaaatttgggaacacttgcaaatttcaccatcctcaaccaaacaatatggtgctttccatgagaagttctcctgtttatcctactgtccattctccaactacaccaggtcagcagtcatacgcgacaggaatcacagattggtctagttcatcgtatattcctagccccacgt

SEQ ID NO: 45643 - DNA, 398 bp, Glycine max
  Clone ID: LIB3139-091-P1-N1-C3
gcggaacagatgatgactctaagattaactacagagggtggaaggtcatgcccttcattataggaaatgagatttttgagaagctaggagccattggcactttatccaatctcttggtctatctcactacggtattcaacttggaaaacatcatggctacaaatattatcaacatctttaatggcagcaccaactttgctacattgctaggagcttttctctctgatgccttttttggtcgctacaagatactggcattctgcacaatggcttcctttgtgggtttgtttgcaatacaactgacagcagcagttgagaagctgcatccacctcactgtgaagagtccaccatatgccaagggccaacagaggggcagatgacatttctaaagacaggg

SEQ ID NO: 45644 - DNA, 404 bp, Glycine max
  Clone ID: LIB3139-091-P1-N1-C4
ctcgagccgctcggaaatcgaggatgtcgatgatgaggacgatgaagaggaggaggagttgaagaagaagaagccctttgggttctctcgctccaacaacaaggctgcttctaagcctctctctcgtggagcaacaactgtgaaatctgtggaatcaaaggggcaagctgagaagtgtgccaagagaaagaggaagaaccagtatcgcggaatccgccagcgtccatggggaaagtgggctgctgagattcgcgacccaagaaagggggttcgtgtttggcttggaactttcagcactgctgaagaagctgcaagagcttacgatgctgaagcaaggaggatccgtggcaagaaagccaaggtgaatttccctgatgagccttcaagcgctgcttcctcaaaac

SEQ ID NO: 45645 - DNA, 405 bp, Glycine max
  Clone ID: LIB3139-091-P1-N1-C5
aagaaattcaacagagttttgattaacttgaaattgttcaacaagaaatggagaattcattgggaaagtacggaaaagagcttaatctcgaggctacagagttgaggttggggttgcctggaagcgatgagcctgagaaacgttctgctgttagaagcaacaagagatcttcaccagaagcaagtgaagaagagtgcataagcaagggcaacatgaattcttctgatggttctgatatcacaagtgatgaccaagacaacgttgtgccacctgcaaaggcacaagtagtgggatggccaccggttcgatcatataggaagaatagtctacaacaaaagaaagaagaacaggctgaaggggctgggatgtacgtgaaagttagcatggaaggtgcaccttacttga

SEQ ID NO: 45646 - DNA, 396 bp, Glycine max
  Clone ID: LIB3139-091-P1-N1-C6
tagagagagagagagagagagaggatatgggttcgaagaggtatgcgctattgatgtgcggtgaggattcggagtacttggtgaagatgcacggaggcacctatggggtattcatgaagttgctccaagagcaagaggaaaagtgggacctctacaagctcgtccaaggagagttcccggagcagcatgacttgcctctctacgatggctttgtcatcagtggaagctgctatgatgcacatgccaatgacccatggatccttgacctcattgctctcgttatcaaattggactccatgcacaagaagatccttggcatttgctttggccaccagataattgggcgtgcattgggaggaaaagtgggtcgctctcccaatggttgggacattggtg

SEQ ID NO: 45647 - DNA, 377 bp, Glycine max
  Clone ID: LIB3139-091-P1-N1-C7
ttttcattctctttctctctctctctgattcgatcgatttcgattgttgaattcatcccatcgtggagccttcaaatttgtagttgaacaacgatggtgctgccgctatttgctgctttcattctcttttttgcttttattccgaatggattgttagcagttccttccaccgtccccgcattcctttggtcatcacattatgaactggcctctgaaaatggattgaaggaatctgtaaattaccaagtcatttctccaaaagatctagcaaaatctgttttttctgaagcaggctggtcaaattttctgtgcaaaggaaagaaacttcatgagcctctggatctggcactcttatttgttggtagagagttacaatc

SEQ ID NO: 45648 - DNA, 385 bp, Glycine max
  Clone ID: LIB3139-091-P1-N1-C8
caattctcaagccaaccatgtcttccttcaagagcaagtaccaagatgaactcattgccaatgctgcttacattggcaccccagggaagggtatccttgctgctgatgagtcaactggtacaattggcaagcgattggccagcattaatgtcgagaatgttgaagcaaataggcgtgctcttcgtgaactcctattcaccacacctggtgcttttgagtgcctcagtggtgtgatcttgtttgaggaaaccctataccaaaagacagcttcaggaaaacccttcgtagagttgatgaaggaaggaggagttctccctggtatcaaggttgacaagggcacagtagagcttgcaggaactaatggggagactactactcaaggttg

SEQ ID NO: 45649 - DNA, 296 bp, Glycine max
  Clone ID: LIB3139-091-P1-N1-C9
catggccatggcgtctgcaaagctcaacaccttgtcttcccagtggatcgcccacaattccttctctcctcgccgtggatcctcttctcgccgagtctctcttccgatccgcgcttcttcttaccaacacgaactcgtccaaaccgccaaatctattgcatctcccggtcgtggaattcttgcaattgatgaatcaaatgccacatgtgggaagcgtttagcatccattggattggacaatactgaggtgaatcgccaggcctataggcaacttctgctcaccacacctggccttg

SEQ ID NO: 45650 - DNA, 138 bp, Glycine max
  Clone ID: LIB3139-091-P1-N1-D10
ttcttatcattagtctcactctgtcaccggactgcgatattccataatctaatactacatttgtttctacctgactttaagtcttaagtatcaaaccacgacgtttatgggacgcactatgtagatattagcaatgat

SEQ ID NO: 45651 - DNA, 376 bp, Glycine max
  Clone ID: LIB3139-091-P1-N1-D11
ttccaaagttctttttcttagaatggagttcttgtggaaaactctcatgaggatacacgtgattagaacattttttgctctccttttggttgcacttttaagttcagagggagtagagagcagaaaagccaaagttgtgaccacttccttagagtacaatgctataaactgcagagctcacagtgcttcattgacagattttggtggtgttggagatggaaaagcatccaacacaaaggcatttcagtctgcaataagtcaccttagtcagtatgcttctgaaggtggctctcagctctatgttcctgcaggaaaatggctcactggtagcttcagcctcactagtcacttcacactttatcttgacaaagatgct

SEQ ID NO: 45652 - DNA, 292 bp, Glycine max
  Clone ID: LIB3139-091-P1-N1-D12
gatgaatgctcctgattcaaatgataatattgatttactgttgagcattgatttgttgggtttacaaggagcaggtaaagcttttccaaacaaaattgtttttgatgataagcttgtgttggctaacacacaagaattctttgatggaaattttccagtggattcttggttaccaatttttgtgaattgtctttatcctgtaagtcaattaccttcagaagctgtcgttgtaaatgttacatgtggtagtggacgtggtggtttacccaccactgcttggattagttctgca

SEQ ID NO: 45653 - DNA, 349 bp, Glycine max
  Clone ID: LIB3139-091-P1-N1-D2
tgtatttgcacagtccagaggaagctcgccaattgagaaggaaagctctctctcgtattgaatggctgcaaaaagctgatgtgcctaccatagcacagattgaagagttccattcgatgcagaggatgatgaatgctcctgattcaaatgataatattgatttactgttgagcattgatttgttgggtttacaaggagcaggtaaagcttttccaaacaaaattgtttttgatgaattcttgtgttggctaacacacaagaattctttgatggaaattttccagtggattcttggttaccaatttttgtgaaattgctttatcctgtaagtcaattaccttcagaagct

SEQ ID NO: 45654 - DNA, 397 bp, Glycine max
  Clone ID: LIB3139-091-P1-N1-D3
tgttgctttctcacgtaagaatccatgctcatgctttgaagaaatacacttatggaaaacacattgtggctcggttggaacatcaatttggagagaatcaaacacccagctcatgatagaataaagagacaaagccatgggtctccagcaatgctgccgtgtcatgcaaaccctgcagcatcaacatatgttctgttgatcacaggaaatagctgagacattgatagcttccagttgtttttactcctgacttcgttcctgcgccttgatagcttctacattgatggcttcaggagacattagtatatacgactatactttgaaactcaatgtaattatgtcatttaaataattgggtccgaatgttatttgaataattattttgaagggaaaccct

SEQ ID NO: 45655 - DNA, 393 bp, Glycine max
  Clone ID: LIB3139-091-P1-N1-D4
atgctaaaagcagtggctgcgtgtgcagtgttatgctcaaactcttccactagcgctataaggaagatgagtagtttctcgcctgcgtttcccaagttcatatccgtagaaggcgcagacatacattccagaactaaacctgacggcttcagattcagtcttgtttcgtataacattttggctcaggcttatgtgaagagctcactgttcccacactctccttccccaagtctcaaatggaagcttcgttcagacactattttggcagttctcaagaacttgggagctgattttttctgcctacaggaagttgatgaatttgacagcttttacaaagggaacatgcaggacctaggatattcttctatttatatgaagagaagtgggcaaaag

SEQ ID NO: 45656 - DNA, 403 bp, Glycine max
  Clone ID: LIB3139-091-P1-N1-D5
cgatcccaattccactagggattcaattccgatgcgattccgagcttgttagatccacgacaacgtttcgtttcccagattcttttgtaaaaaaaaataatcttcctttgcccaacaggtaagttggaaaaaaatggaccatgacaagactgggtgccaagctcctcctgaaggtcctatattgtgcatcaacaactgtggattttttggaagtgcagctaccatgaatatgtgttctaaatgccacaaagacatgttgctgaaacaggagcaggccaagcttgcagcatcatccattgggaatattatgaatgggtcttcaagcagcactgaaaaggaacctgttgttgccgctgctgctgctaatgttgatatcccagttatttcagtagagcctaaaact

SEQ ID NO: 45657 - DNA, 303 bp, Glycine max
  Clone ID: LIB3139-091-P1-N1-D7
gaattatggaatcctgcttgcacaaaagcaatgaccatgtcatttaatccaaacccgtgttctgatgcatggagtttggaatttctgaagcgtaccggatttcattgtgatatcatttgtgtcactggatggactgctaccccaatgcaggatgttcaggttacaattgattggtttatttcctctcaggaatgtgttcccaggacctattgtgttttaaatccacaaaatccttttgtgttaaataggtggatggggaaattgactttcccccaagggcacttccgaagtgttaaaagaatg

SEQ ID NO: 45658 - DNA, 107 bp, Glycine max
  Clone ID: LIB3139-091-P1-N1-D8
tggttaccaatttttgtgaattgtctctatcctgtaagtcaattaccttcagaagctgtcgttgtaaatgttacatgtggtagtggacgtggtggtttaccccccac

SEQ ID NO: 45659 - DNA, 327 bp, Glycine max
  Clone ID: LIB3139-091-P1-N1-D9
ttctcctcaaaagtctcactcttttttctcacttctatattccataattaatccttcttttgtttctttctctccttcaatctcaagtctcaaaccatggcgtttagaggaggcactatgttgatattaacaatgatggcattacttgagattcagatatgctcatcggagataaaccgtggaaactttccaaatggcttcgtatttggcactgcctcttcagcttttcagtatgaaggggcagtgaaagaagacggaaggggaccctctgtgtgggacactttttcacatacttttggcaaaataattgatttcagcaatgctgat

SEQ ID NO: 45660 - DNA, 385 bp, Glycine max
  Clone ID: LIB3139-091-P1-N1-E1
cttttatttgcagaaacggaccaacgcttagggtttggtgttttccgaattagggtttgtgattggatcttcatcttcaccaatcaatcaccataaccataacttgttcttctctctcgccatgacggacggctcctggaatcggcagcagcagccgtttctcccttcttccgccatgcttaaacgacctcgtactgaatacgatatttcaccttctggtctgacttcagggggcaatgagatgcataattatattggtcgaaatgatgaccatactggtcaccgaattctaaaggacactaaaacacttggatctgcttttgaccgctaccttcaaagcgctggggtaacatcttaacatgtcttatttacattatttgtgtga

SEQ ID NO: 45661 - DNA, 325 bp, Glycine max
  Clone ID: LIB3139-091-P1-N1-E10
attgcttgaatggaatttcgatgctcagtcatctcttttaccattctcttctctcttgctcttgcaggagagagccatgtccatgcatcgctacctgaggaagattattgggaagctgtttggccaaacactcccattcccactgcactgcgagagcttctaaagcctctccctgcaggtgttgaaatcgatgaactccctaagcaaattgatgatacacagtacccaaaaacattcttctataaagaagaccttcatccaggcaaaacaatgaaagtacaattcaccaagcgtccctatgcacaaccttatggtgtatatacat

SEQ ID NO: 45662 - DNA, 400 bp, Glycine max
  Clone ID: LIB3139-091-P1-N1-E11
ggaaaaagttgtgttgaaattttcacaagaggaatttcttacagcttggtcaactcaggtgcgtcccgcaacgactctgttggctgatgggtgcccatatttgtatgctatggtgcatgatagttcagtgtctacaataccaggtgattttgtcattggtgttaagttgacaaccataaacaatatgtgtgcatatgggctcaatcctggtatttcaggttctcgtcttttgggcaccattcctcagtccatttcacagcaaactgtttggaatcaaatggcaacagtgagaacaccattgaattttgattctagcaagcagagcttttgtcaattttctattgaccttctcggtggaggaattttagtggacaaaactggagattggatcacacttata

SEQ ID NO: 45663 - DNA, 343 bp, Glycine max
  Clone ID: LIB3139-091-P1-N1-E12
ctctgttgtttcgggtcaagcaagcacctcccagaattacagttactttgataggttcacttgctactcaaggaatgttgctgcgactaatggcagggttgttgcggacaattcaacttttgtctgtgaattgtgaaaattctttgtagtttcttttttttccgtacatctatttattatgtagtttcctgcatagttttttttttttctaggggaaggaatgtgtagtaatttatgtagtatgagagtatcttttgaatctgcataatgtatgtattggttccatacgtgccactgtgcctggatctagacagtagacactgaaggaagacacaagctactg

SEQ ID NO: 45664 - DNA, 398 bp, Glycine max
  Clone ID: LIB3139-091-P1-N1-E3
ctcagctggggagaagcccgtccgtgagcttatagctgatgatgcctggttgaatggggaattcattactactgttcaacaacgtggcgctgcaattatcaaagctagaaagctttcaagtgcactatcagctgctagtgctgcttgtgaccatattagagactgggttcttggaactcctcagggcacttgggtatcaatgggagtatattctgatggttcctacaatgttccagctggacttatatattcattccccgtcacttgtgccaatggggaatgggcaatagttcaaggactttccattgatgagttctcaaggaagaagttggacttgactgcagaagagctttctgaggagaaggcattggcttactcatgcctaaattagacaccat

SEQ ID NO: 45665 - DNA, 338 bp, Glycine max
  Clone ID: LIB3139-091-P1-N1-E4
cacaaacggggctttcatcaattacaccctttatacggttgattccacccttcacctgaaaaaaaaaaaaaacaatctatcaaacaaaaaggagtgcaaaccatgggcgatgcacttgattagtacggccacggaggagtcattaagaccattgtcagaaaaagcaaagcccgatgctgttggaacaacacaaaatttgccactagacgaggatcattatgaaggcacacttgctgatactggtgaagtttttgacactacacatgaagattacaccatattctctctcgcgattggaaagggcagtgttatgaatgcttgggaaattgctgtgaaaa

SEQ ID NO: 45666 - DNA, 300 bp, Glycine max
  Clone ID: LIB3139-091-P1-N1-E7
ctaaactggggagaaccccgtgcgcgagctaatagctgatgatgcctggctgaatggccgaatcataactactggtcaacaacgtggcgctgcaatgatcaaagctagaaggctgacaagtgcactaatagatggtagtgctgctagtgaccatattaaaaactgggttcttgtaactaccaatggcacctgattataaatgggaggatattctgatgggaactacaatgtaccagctggacttatatattcattccccgtgacttgatgccaaggggaatgggcaatacgtcaaggact

SEQ ID NO: 45667 - DNA, 387 bp, Glycine max
  Clone ID: LIB3139-091-P1-N1-E8
ggttgtcgcaaacccagacccaatctctcttgcgaaggaagacgatgggtccgatgctacaaaccattctcactgtgcttcttctccttatgcttcttctcatcgtcatttttcttttctttctcttcaaaccatggcgcttctttttctcttcgcgtttcctctcctccatcaagggcgagctagagcggcccctttttggggacgtaggtgatgcgtcgtcgtttaatcggagtaatgaattgcctcgagatcatgatctcgagggtgcgtgttatcccagtgaagctcatttccgctctcctcgaacccatggccaagtccttgttcacaagcaaaggctttaaacccttaacatgccccaaccacaggctgctgatactttgg

SEQ ID NO: 45668 - DNA, 248 bp, Glycine max
  Clone ID: LIB3139-091-P1-N1-E9
tcctgattcaaatgataatattgatctactgttgagcattgatttgttgggtttacaaggagcaggtaaagcttttccaaacaagattgtttttgatgataagcttgtgttggctaacacacaagaattctttgatggaaattttccagtggattcttggttaccaatttttgtgaattgtctctatcctgtaagtcaattaccttcagaagctgtcggtgtaaatgttacatgtggtagtggacgtg

SEQ ID NO: 45669 - DNA, 204 bp, Glycine max
  Clone ID: LIB3139-091-P1-N1-F1
cgctctcttatttcatggctaaactccattatgtaaaggctgaaacactctggcttagggcataacaatagctgataacgaacggcatgaaagttactgaaagcttggttatcatggtttattttcagtttcctctgacatgattcttttcattctataattatttttgctttaccttttttttattcgtgggtttccatcaag

SEQ ID NO: 45670 - DNA, 328 bp, Glycine max
  Clone ID: LIB3139-091-P1-N1-F10
ctttttctcttgcggctagggttttagcgcagcttcttctagatttaaggaagatgggtaaggaaaaggttcacatcagtattgtggtcattggccatgtcgactctgggaaatccactaccactggtcacctgatttacaagcttggaggcattgacaagcgtgttattgagaggtttgagaaggaagctgctgagatgaacaagaggtctttcaagtatgcctgggtgctggacaaacttaaggctgagcgtgaaagacgaatcaccattgatattgctttgtggaagtttgaaacaacaaagtattattgcacagttaattgatg

SEQ ID NO: 45671 - DNA, 351 bp, Glycine max
  Clone ID: LIB3139-091-P1-N1-F11
ctcgagccgctcaatacaatgaggttcaggctcagatggaaacaaatttgtttaaattgtctcttgatgatgttgaaactcctaaaggttccatgttggatctgaaaatttctcaatctaaaattgcacttcccaagaacacagttggaggaaccattctgcgtagtgatctattggtaaattttttgacagagggcaattttagagcaagtgttgatttgcagcgcactcatcgtattagaggaatgattaaaatggtggccacagttggtattcctgagaatacaggtatatcattggcctgtgctatgaatagttcttttagggggcgcgccagttctgatatttaca

SEQ ID NO: 45672 - DNA, 400 bp, Glycine max
  Clone ID: LIB3139-091-P1-N1-F2
ctctgttggctgatgggtgtccatatctgtatgctatggtgcatgatagttcagtgtctacaataccaggtgattttgtcattggtgttaagttgacaaccataaacaatatgtgtgcatatgggctcaatcctggtatttcaggttctcgtcttttgggcaccattcctcagtctatttcacagcaaactgtttggaatcaaatggcaacagtgagaacaccattgaattttgattctagcaagcagagcttttgtcaattttctattgaccttctcggtggaggaattttagtggacaaaactggagattggatcacacttatacaaaattctccaattagtaacttgttgagagttgctgcttggaagaaaggctgtttaatggttaaagatgtgat

SEQ ID NO: 45673 - DNA, 390 bp, Glycine max
  Clone ID: LIB3139-091-P1-N1-F3
ctctcgtagcatttcggcatccaaactaactctctcatcttctacagcattcttctgcaattcaaatcaaattttcaaaccatggcttcctccaccaacgctcttcctcccaccggcaacggcctcatcgtgagcttcggcgagatgctcatcgatttcgtccccaccgtctccggcgtgtcccttgcggaggctccgggcttcctcaaggcccccggcggcgcccccgccaacgtcgccatcgccgtcgcgaggctcggcggaaaggcggcgttcgtcggaaagctcggcgacgacgagttcgggcacatgctggctggaatcctgaaggagaacgacgtgcgatccgacgggatcaacttcgaccagggcgcgcgcaccgcgctggcg

SEQ ID NO: 45674 - DNA, 407 bp, Glycine max
  Clone ID: LIB3139-091-P1-N1-F4
gttccctttgtgaaccgaactgccaaggctgttgcttgggcaagtctgaaacatctccgggtgccaaacccattgccgtgtagcgataactgtggtgtgagcatcaattggcatttgtacacagactacactaaaggatggagtgcaagggtgacactttttaactggggtgacactaattttgcagactggtttgccgcagtacaaatggacaaagcagcttcgggttttgagaaaatgtattcattcaatgcaactcttctagatggtgtaaacaatacaataatcatgcaaggtttgccaggattgaactaccttgtagcagaagcagatggagctgaccctttgagagatcctagggtgcctggtaaacaacaatcagttatctcatttacaaaagaaactac

SEQ ID NO: 45675 - DNA, 394 bp, Glycine max
  Clone ID: LIB3139-091-P1-N1-F5
ccacagttggtattcctgagaatacaggtatagcattggcctgtgctatgaatagttcttttagggggcgcgccagttctgatatttacaccatctgctctcaagactgtgaattgtggaatcctgcttgcacaaaagcaatgactatgtcatttaatccaaacccgtgttctgatgcatggagtttggaatttttgaagcgtaccggatttcattgtgatatcatttgtgtcactgggtggactgccaccccaatgcaggatgttcaggttacaattgattggtttatttcctctcaggaatgtgttcccaggacctattgtgttttaaatccacaaaatccttttgtgttaaataggtggatgggaaaactgactttcccccagggcacttt

SEQ ID NO: 45676 - DNA, 404 bp, Glycine max
  Clone ID: LIB3139-091-P1-N1-F6
cgtaaaaggaattgcaagaggtattctttatctacatgaagattctcgtcttaagattatacaccgtgatatcaaaccaagcaatgttctattggacaatggcatcaatccaaaaatctctgattttggaatggcaaggatggtagctacagaccaaattcaaggatgcacgaatagagttgtgggcacatatggttatatgtctcctgaatatgcaatgcatggacaattttctgagaagtctgatgtattcagttttggagttatggttcttgagattattagtggcaagaagaactcttgttcttttgaatcatgtcgtgttgatgacctattgagttatgcatggaataactggagggatgaatcaccatatcaattgctggattcaactctgctagaat

SEQ ID NO: 45677 - DNA, 397 bp, Glycine max
  Clone ID: LIB3139-091-P1-N1-F7
agccatgtgccagttatcgtcatctccctccactttgtgtgatagcaatgagggccatccaaacatgcccacaaccaaaattcatgaggagccagctcacatgctcccccttttgatccccaaacccccaacaacattattcgaacaaggccaaaataaccatcaaactaaaacccatttttccctcgctctcaacgaagtcaaatgcatagccaacatagcattacccatggtgctaaccgggttattactctattctcgctccgtaatctccatgctcttcctcggtcgtgtgggtgagcttgccttagctggtggctctctcgccattggattcgccaacatcacgggctattctattctctcgggcctcgccatgggcatggagcccatttgc

SEQ ID NO: 45678 - DNA, 378 bp, Glycine max
  Clone ID: LIB3139-091-P1-N1-F8
gaggaatttgagattaaggattcctcacaagaatatctggctttacatcccatgggttctaagaagcaaacatccttgttaaaggaacattttgaacctgtcatgtcagatgatggtcaaagtctaagtgattctgatgcatcaacatcatcacaagatgaacctgcgaatggaatgaaagacaaatctcgggttccaagaatgtatgaaatcaagaatgagcagcatgcggaggcattctggagccaaaaatcacttgcaggggaggactcacttcctatgggagacagagtagcagctctaagagatgaccaacaatcttctcgtgttccaaaaggtattaagcagggtccaggaggatcacgagaaatcactttc

SEQ ID NO: 45679 - DNA, 380 bp, Glycine max
  Clone ID: LIB3139-091-P1-N1-F9
gtgttgggaaaccctaaaccccgttttcggtgagatcgagatcgatcgaacatggatgaggagtacgatgtgatcgtgttgggcacgggtctcaaggagtgcattctcagcggtcttctctccgtcgatggcctcaaggttctgcatatggataggaacgactattacggaggagaatccacttcgctcaatcttattcagctttggaagagattcaggggagatgacaagcctccttcacatttgggcgctagcagggactacaacatcgatatgaaccccaagtttattatggctaatggcaatttggtgcgggttctcatacataccgatgttacaaagtatctttatttcaaagctgtggatgggagctatgtgtt

SEQ ID NO: 45680 - DNA, 309 bp, Glycine max
  Clone ID: LIB3139-091-P1-N1-G1
gaaaattgttttctgcctatgacgctaaagtttgcattgttttttgagtgggtggattgagagaactgagcaagctttggaacttcttcaaagtctggttcttcaatggctactgaagaggttaataaacttacaatcacttactccttaccctgagatgatagtgaaagcacttgaagccctgaatgaggctgatggatcgagtaaatcagcgatatcaaagtacatataaaccacctacagtgagttgccagatgaaactgttttggggagtcacctgaacaagatgaaagagagtggatagcttgc

SEQ ID NO: 45681 - DNA, 403 bp, Glycine max
  Clone ID: LIB3139-091-P1-N1-G10
gacaagcttagttgtcaagttggaatcaacccatactccatggaatggactggtttggccaatagattactgagtaagggcaacgatattctgtgttgcgattatgctagttttgatggtttgattaccaagcaagttatgagcaagatggcagaaatgataaacagtctttgtggtggtgatgaaaaattgatgcgtgaaaggacacacctgctgttggcttgttgttcaaggatggcaatttgtaagaaagatgtctggagagttgaatgtggaatcccttctggatttccgctcacagttatttgcaatagcatttttaatgagatgctcattagatatagctatgaaaaattactgcgccaagcttaagcttcaagtatgtttttacaatccttcaaaa

SEQ ID NO: 45682 - DNA, 345 bp, Glycine max
  Clone ID: LIB3139-091-P1-N1-G11
gtgattgttgtgactcgttcttcttcgtcgttatcttcttcttttgttgtttgtgtgtttgttttttctctcacctgaaaatgtcttgctgcggtggtaactgtggttgcggaagcgcctgcaagtgcggcaacggctgcggaggctgcaagatgtacccagacttgagctacaccgagtcaaccaccaccgagaccttggtcatgggagtggcaccagttaaggctcaattcgagagtgctgaaatgggtgttcccgctgagaacgatggctgcaaatgtggagctaactgcacctgcaacccctgcacttgcaagtgaggtgttggagagctaaagcttcaag

SEQ ID NO: 45683 - DNA, 398 bp, Glycine max
  Clone ID: LIB3139-091-P1-N1-G12
ctcgagccgtgcattggcctgctggccaccggcggctacaggagacaccagcgcatgatacatcaacaaccccctccgcgcgaacttttcccctgggagcacttcccgagattaaacggctattacaatggcctgcgcaccctcgtctcctacaaggactatgttcctgagcagacatatgtgaaagctgacgccgaggcccctctcgacacgtacccctcgactacccagaaggccaaggctcacaagggccctgagccgtcgccctccgcccgcccgttcccattcaacccctaccctgccttcagctcggccgagtatctgaaggaatatcatcctgtggaagagtgctatctggacgagggtctgaaaaccccgaccccggacatctacgcgta

SEQ ID NO: 45684 - DNA, 401 bp, Glycine max
  unsure at all n locations
  Clone ID: LIB3139-091-P1-N1-G2
aaagaagatgagcagcaactcangaaaagtggtgtgtgtgactggtgcttctggtttcattgcttcatggatcatcaaactgcttctccaacgtggttacactgtcagggccactgttcgcgacccatctaaacccgaaaaggttgatcacttgctcaaacttgatggtgcaaaggagaggctacatctctttaaggcagatctgctggaagaaggttcctttgactctgcttttgagggttgtgatggtgtctttcatactgcttcacccgttcatttcattgttactgatccacagaatcagttaattgatccagcgattaaaggaacccttaacgttgttaaatcatgtgccaaatcgccatctgtgaaacaagttattttaacttcttctgttgctg

SEQ ID NO: 45685 - DNA, 346 bp, Glycine max
  Clone ID: LIB3139-091-P1-N1-G3
ggtttgtgttgggaagttctttggctcatttcttcaaccagtttcctgtggggatcttaggggtgttgctgttgtttgctggggttgaactagccatggcttctagggacataaatactaaggaagattcgtttgttatgcttctttgtactgcggattcgttggtggggtccagagctgctcttggattcttgtgtgggatgattgtttatgggcttcttaagctcatggattggaccaatggtaagccgattaatgctatttgaaagcatgatatgccctgatacagcaagttttgaagcaaaaatattggacttaattataataaggataatactatatatta

SEQ ID NO: 45686 - DNA, 390 bp, Glycine max
  Clone ID: LIB3139-091-P1-N1-G4
caaatagctaatcatttgaatcagcaagttttgttggataggcttgaggagttagtgagaaaccttagtgatttagttacaagattggaatcaaagctacctgaccctccaaaagaaaagggtaggtttactcaaaaaaaaattggtgatgatgatgaagatgcaagatcaagtagtaaaggagttgaagatggtgaatttgaggggaaaatccgagatggggagagagctaggggaacgtctgtgacaaagtacacacctttttggtcagagaggttccagtttgcatctgctttgaagttggattctgaggccacttgtataaatgttttgccttttagggaccacgaggggctgagtaagtatgtggccggtagtgattagagggga

SEQ ID NO: 45687 - DNA, 404 bp, Glycine max
  Clone ID: LIB3139-091-P1-N1-G5
tttctctgttcctcacaattcactaccccctacaaatatattcaaggtcccatttttctcatctgggtcatcaacttaatcatctctctcttgttctctatccaattaattgcttttccctctgagtttctctccaccttgttgttgttgcaacttgatttcatggttgcaaaatgaagtgtttcttctttaaggagaagagcaaatccgccccggaactgcacaagaagaaaacccccgccgtgaaccgcgccgcaaactccaccggctcagtgtcttcaccgaagagcgtgaaggacttgtacagagagaaagagcacagcttcagagttttcactttgcaagagctgagagatgccaccaacggtttcaataggatgctcaagcttggagaagggggtttc

SEQ ID NO: 45688 - DNA, 347 bp, Glycine max
  Clone ID: LIB3139-091-P1-N1-G6
cagaaaccttaacagtgttttttccagcgaccgtggcattaacgcttacacactctggcggtcaacgattcgcgcgtggagacaattggtacggacagtaacaagtaacaaagtagttcctatgtagctgattatggcggagatttcaagttcagggtacaaggaatatgcggctggcttgttcgctggtgttgccgctgtagccactggccacccctttgacaccgtcaaggtgatgctgcaaaagcacaatgcagaagcacataagatttagtattaaaatggatggcattgcactgcttggatattgaagactgaaggaatcaaagggctttattgaggagcaa

SEQ ID NO: 45689 - DNA, 360 bp, Glycine max
  Clone ID: LIB3139-091-P1-N1-G7
cggctcgagcatttgcttggggtctagaagcccgtgtaccatttttggacaaggcatttatcaatactgcaatgagtattgaccctgagtcgaaaatgataaaaagagatgaaggacgaattgagaagtggattctgaggagagcctttgatgatgaagagcatccttatctgccaaagcacattttatacaggcagaaagagcaattcagtgatggagttggctatagctggattgatggccttaaggcccatgctgcaaaacatgtgactgacaaaatgatgcttaatgctggtaacatctacccttacaacacctcaacaaccaaggaagcatattactacagaatgatctttgaga

SEQ ID NO: 45690 - DNA, 398 bp, Glycine max
  Clone ID: LIB3139-091-P1-N1-G8
ctcgagccgaatcggctcgagctaaaggttctatgttggatcttaaaatttctcaatctaaaattgcacttcccaagaacacagttggaggaaccattctgcgtagtgatctattggcaaattttttgacagagggcaattttagagcaagtgttgatttgcagcgcactcatcgtattaaaggaatgattaaaatggtggccacagttggtattcctgagaatacaggtatagcattggcctgtgctatgaatagttcttttagggggcgcgccagttctgatatttacaccatctgctctcaagactgtgaattatggaatcctgcttgcacaaaagcaatgactatgtcatttaatccaaacccgtgttctgatgcatggagtttggaatttttg

SEQ ID NO: 45691 - DNA, 367 bp, Glycine max
  unsure at all n locations
  Clone ID: LIB3139-091-P1-N1-G9
ctctcattctcttctccatcgcgcgtaagaaacacattttagttgctactaatgggaactgttgaagctgcaaacaaggatgcaaatggaagtctcctagagaaaaatccttcagttgtttttgtgttaggtggcccaggaagtggaaagggtacccaatgtgcaaatattgtccaaaattttgggtatactcatctcagcgctggtgatcttctgcgagcagaaatcaaatctggttctgaaaatggtacaatgattcagaatatgattaaagaaggaaaaattgttccctctgaggtaacaattaagctcttacaaaaagcaatgcaggaaaagtggcaatgacaaaatntctttttgatggttt

SEQ ID NO: 45692 - DNA, 384 bp, Glycine max
  Clone ID: LIB3139-091-P1-N1-H1
ttcctttgaggaagtttctttaagtgcagcacttaatggtgttgagggtttggactatatggaaagaattcctcttgccacatctgagggttttcctcatgtgctttcacgcaaaaatggtgaaaaaggcaaaagaagatttgtttctggggatggtgaagagatgacattgattccgggaaccagtgttgaagaggcttacaacaagctaatagttgaacttgagaaaagtgttcctacattggttggcattgaatgtcccaaggatgagaaacttcctcgtcgcaaaatttttgacaaacctaagacgcgctgcttcactattctccctatggagtttaatcttgtggtccgtcaaaagtttttaaattttgtgaggttcat

SEQ ID NO: 45693 - DNA, 328 bp, Glycine max
  Clone ID: LIB3139-091-P1-N1-H11
gtggacctctcaacagataaaaaaggctatcaaagaaaccatggatgagctcatgaagatgaacacagaagaactgttaaaacatcgcatgcttaagttcagaaagattggtggattccaggaaggtattcctatagatcctaagagaaaagccaacatgaagaagagggatctatctattgctaagatttctgatgctgaactagaagttgaggttgagaaacttaagcaacaggttttggaagctaaggaatcttctcctgttccttcaaaactagatctggatgagatgctaaagcaactgacaagggaggttgatctagaatac

SEQ ID NO: 45694 - DNA, 317 bp, Glycine max
  Clone ID: LIB3139-091-P1-N1-H12
cacaccaaacagaaatagttacactcagagtagtgaacaacaacagcaacaacaacaacaacgttgcagtgtgttgtattgtttcttagtgcacttttttttggcatcaaagaggttaaatccatggattctgattatggtattcccagggaactctcagatcttcaaaagattcggtcgttgtaccagccagagcttcctccttgtctccagggaaccactgtgagggttgaatttggtgatgcaaccaccactgctgaccccactgatgcactcaccattagcagggcgttttctaacacctatggacacccttt

SEQ ID NO: 45695 - DNA, 366 bp, Glycine max
  Clone ID: LIB3139-091-P1-N1-H2
tgaaaaacaaccttcattacaatgagtccaaaggcatctccatcagcaagccttatcaaaataggttcggatggctttgatctgatagagaggcactatggtcgattcagaagaaatcaagttcctccttttgaagtgcctatcattgtgaatagcaataaccctggtgcttcatttggtggggctaatattgacaacaaagaaaacccaaagccaccacgtcgtaattgggctggtagatcattggtctcactaagtagtatcaactagtgtaagttcaagtatacaaatacttaggtttttgttctgattttttccccttttagtgttacatacttgcaccaagtatgaaagtactgatttatc

SEQ ID NO: 45696 - DNA, 358 bp, Glycine max
  Clone ID: LIB3139-091-P1-N1-H3
catctctatcaccccattttctcaaacacctacacaaaatgtgcttcctcaacacaaagtccctggctcacttcatgttgctaacaacaattgtagttggcattgcaatgggagattcatcaaaggacaaagaggaatgcactgagcaattggcaggcctagcaacatgtctgccctatgttgggggtcaagcacaagctccaaccccagattgttgtagtggtctcaagcaagtgctcaagaacaacaaaaagtgtttgtgtgttattatcaaagatcgcaatgatcctgatctggggggtttacagattaatgttacgttgggcttgaacctgcccacagcttgcaatttcccctg

SEQ ID NO: 45697 - DNA, 342 bp, Glycine max
  Clone ID: LIB3139-091-P1-N1-H4
gatttgaggtgaaaaggttccacattggtcaggttccgatctcacaatggggaagtcaccaggaaaatggatcaaaactgtattgtttgggaaaaagtcatccaaatcaaatatttcaaaaggcagagaggtaaagcttgttaatcaagaagaaggagttgtagttacctccaaggtgctagaaactggtttggctttagaaccaacctccgatactattgccagacatgaggaagacctagagctggaaaatgaagaagcagaaaatgttatacctgggaatcaagaaatagacacagtgggatcaattaatgaagatgctgcactagatccagagaaaat

SEQ ID NO: 45698 - DNA, 197 bp, Glycine max
  Clone ID: LIB3139-091-P1-N1-H6
gtgtttctttgtaatagtaacaaggctatcaaagaaaccatggatgagctcatgaagatgaacacagaagaactgttaaaacatcgcatgcttaagttcagaaagattggtggattccaggaagggattcctatagattctaagagaaaagccaacatgaagaagagggatctatctattgctaagatttctgatgc

SEQ ID NO: 45699 - DNA, 291 bp, Glycine max
  Clone ID: LIB3139-091-P1-N1-H7
ctatttgcatctcataacagagagctgagaaaggaagaaaaaagcgtgtgtcagagatacttaacaatggttgtagaagatacccaaaagtcagtcattacggatgaccaataccttagcaggttcttctgtgacatcaacattttttacgatctactattttcttgaattgtttgattttttttttttttttctttttatttttttttatttttaatatttatattattttatttttttgttcttatattttatttattattttttttttttttcttttgttttttctta

SEQ ID NO: 45700 - DNA, 392 bp, Glycine max
  Clone ID: LIB3139-091-P1-N1-H8
agcgaactaaagcacgtgcaatgctctgtgatatatatcatcatgctctacttgatgagttctcaacagcccgtgatctgcttcttatgagccatttgcaagatagtgttcagcatatggacatttcaacgcagatactttttaacagggccatgtcacagttaggtttatgtgcttttcgggttggactgatttctgaagcacatggctgtttgtctgaactctactctggtggaagggtgaaggagttgctggcacaaggcgtgtcacaaagtcgttatcacgagaagactccagaacaggaaaggttggaaagaagacgacagatgccctatcatatgcacatcaatctagagctcctggaggcagtacatctttgtttctgctatgct

SEQ ID NO: 45701 - DNA, 396 bp, Glycine max
  Clone ID: LIB3139-091-P1-N1-H9
ggcaacagtgagaacaccattgaattttgattctagcaagcagagcttttgtcaattttctattgaccttctcggtggaggaattttagtggacaaaactggagattggatcacacttatacaaaattctccaattagtaacttgttgagagttgctgcttggaagaaaggttgtttaatggtcaagattgtgatgtctgggaatgcagcagtcaaaaggagtgattgggcctcattggtacaagtgtttttaacaaacagcaacagtacagagcattttgatgcatgtaagtggacaaaatcagaaccacattcctgggaaataatctttccaatagaggtatgtggtcctaataatggttttgaaatgtggagttctgagtgggcaaatcaaac

SEQ ID NO: 45702 - DNA, 82 bp, Glycine max
  Clone ID: LIB3139-092-P1-N1-A1
ccttttttgaaaaacaagttcgggttaaaatgctcgtctattggagatattggtctgtaatatatggtgtccgtattttctc

SEQ ID NO: 45703 - DNA, 340 bp, Glycine max
  Clone ID: LIB3139-092-P1-N1-A10
acgaaatattttattttatgatcaaggatcagaatcgttggatcgagttgaggtagatggcactagtctctggaggaagttcaacactgaaccctaacgcctctctatacattcctattgtgttccgtcatgtggatgattgttattctgaatggaggcagctggtgacttcacttacattgttctatgactactgtctaaaactgcattacgttgattgattccttttatggctaggatggttttgattgcattgatgtggtagatttgctttctgattcgttttgatttttatgctggttaatatcttttagaagagttaattattttttttgaatac

SEQ ID NO: 45704 - DNA, 541 bp, Glycine max
  Clone ID: LIB3139-092-P1-N1-A2
cgacactatagacagagcttgacgccgctcgccgcgtgccacgctcgaagttcggcttgaggacagatcaactccgatggacattcaccggtgcttttgaggctaggcaatctcttattgtgaggggtctttttcctatgctggcagatccacgacacccggctgagtctaaaagtggaacaaatgaatcaattttgaaggttgctttagatcatggcaaggcttttggcatcataaagccacatgaccgagttgttgtctgccagaaagtagctgactcgtcagttgtgaagattcttgagctcgaagattgattggttcaatacaacttatgtgtcatttgatgcatcataataaaacttcttctcaaccttttcattctagcgtttgtgtttcattgaagtacaataacaaacacataacattgagatacatattgtagagtgggaaagagacttttttgtttgattgtttttttaataagcaatcacagttttgagctataaataatggtattggtatggaaataaaaaaaaatgat

SEQ ID NO: 45705 - DNA, 523 bp, Glycine max
  Clone ID: LIB3139-092-P1-N1-A3
ggctatctatcaagtaagaaagctgttaagaggaggagaatggctgatgatggaagcaggagggaattgatattcaggtcgaagcttccggatatctacatccccaaacatatgcccctccactcttactgcttcgagaatttgagagagtgtggttcacgcccctgcctgatcaatgcccccacgggagacgtctacagctaccacgaggtggacagcaccgccagaaaggtggcgagggggctgaagaaagagggcgtggaacagggccaggtcatcatgatcctcctccccaattgccccgaattcgtcttctcgtttcttggcgcatcccaccgcggtgccatggccactgccgccaaccctttcttcacccccgccgagattgcaaagcaagcccatgcctccaatgccaagctcctcatcacccaggcctcttactacgacaaagtcaaggacctccgcgacatcaagctcgtattcgtcgactcttgtcccccccatacaaaggaagagcagcatc

SEQ ID NO: 45706 - DNA, 401 bp, Glycine max
  Clone ID: LIB3139-092-P1-N1-A4
gagtgatcggtgttcacttgatccttcataagtcgtcatcatcatcatcatcatcaccgttgattgaagaagatgccgatcagaaacatcgccatcggaaggcctgaagaggctactcaccccgacacgttgaaggcggggttggctgagttcatctccaccttgatcttcgtgttcgccggttcaggttccggcatcgcctacaacaagctcaccgacaacggcgccgccactcccgccggcctcatctccgcttccatcgcccatgctttcgccctcttcgtcgccgtctccgtcggcgccaacatctccggcggccacgttaactcccgccgtcaccttcggcgccttcgtgggcggcaacatcaccttactccgcggcatcgtttacgtcatcgccc

SEQ ID NO: 45707 - DNA, 425 bp, Glycine max
  Clone ID: LIB3139-092-P1-N1-A5
cagattacaggcatagatacaactgtatattatagccccacaatttttaagaatgctgggatcactggtaactctgagcttcttgcagcaacagttgctgttgggttcaccaaaactctgttcatcttgatagccatatttcttattgacaaattggggagaaagcctttgctttacgcgagcacaattgggatgacagtatgtttatttagcctgagcttgtctctagcttttctgagtcatgcaaaagttggaatcgcattagcaattcttgcagtgtgtggaaatgtagcttcattctcagtgggacttggccccatatgctgggttttgtcatctgagatatttcctttgagactaagagctcaagcatcagcccttggagcagtgggaagtagggtcagtagtggtgcaatctccatgtc

SEQ ID NO: 45708 - DNA, 413 bp, Glycine max
  Clone ID: LIB3139-092-P1-N1-A6
catttcgccttgtctaaacttgagcaaaatgcaggccatccagcgctccgcctttgctggggccaacaccagggtgtctgtgcgctccaggcagacaaccgtggtggtgcgggctgtgcaggacgtccagggcacagttgtctccacctccatgcagaacaccgtggtggtcaatgtggagcgtcttgcaccccatcctaagtacttcaagcgcatcaggcaaagcaagcgcttcttggcccatgtggaggacagctctgcatgtggtgtaggggactatgtgcgcctggagggctgcaggcctctcagcaagaacaagcgcttcaaggttgctgaggtgctcagggcagcagacaagaactaaagcagcccagcactagcctggatgctgcagcacctacacagtcatgaac

SEQ ID NO: 45709 - DNA, 446 bp, Glycine max
  unsure at all n locations
  Clone ID: LIB3139-092-P1-N1-A7
ctgtttctctgtcttcattttagtttttacggctagaagaatgtccagctcatcggaatatttggtattttccggccaccacccggcgaactctccggcggaaaagtccactttctctcagacttgtagtctattgagccaatacatcaaggaaaagggtaccttcggagaccttaccctcgggatgacttgcactgccgaaacaaacggttcccctgagacatcgtgtcactctgcaacaaccatggagttgtttcccacgatcatcacgcaacggaacccaactactgtggattttctatctccccagactgcttatcctcaccactcagagggtccaatcatggttaaatcaagtgcttttaagtctatggagaaggagcctaaagctgctcagttgacgatcttntatgctgggcaagttgttgtgtttgatgatcttcctg

SEQ ID NO: 45710 - DNA, 396 bp, Glycine max
  Clone ID: LIB3139-092-P1-N1-A8
acgaaatttctcagccaaagaacaaggatcagaatcgtttaatcaagttgaggaagatggcactagtctccggaggaagatcaacactgaaccctaacgcccctctttacattcccgccgcgttccgccaagtggaggatttttctccagaatggtggcagctggtgacgacactgacatggtaccatgactactggctaagccagcagcacgatgatggagccttctatggcgaggatgggtttgatggcaatgatgtggttgatttgcttcctgattcgtttgattttgatgctggtgaagatctttttgaagagtttattcgatcttctgaatcccaagaagaaactggacccaaaagaactgcatgagcttttagagatgaacccttttaaa

SEQ ID NO: 45711 - DNA, 190 bp, Glycine max
  Clone ID: LIB3139-092-P1-N1-B1
ttcttgttataaatatgctgttaccattctttttgggtcaccctttctgtaggtgctttgagcatcaatgttgtgtaccagtgactggatataataaccttgcttgggttattgctttctttgcttgttcctcatttttttaacaccaacaggtggtttgatattaatataatttttccattgtactttt

SEQ ID NO: 45712 - DNA, 447 bp, Glycine max
  Clone ID: LIB3139-092-P1-N1-B10
aaggaaatgaggattctgatggtaggtctcgatgctgctggtaagacaaccatcttgtacaagctcaagcttggagaaatcgtcaccactatccccaccatcggatttaatgttgagactgtggagtacaagaacatcagcttcactgtgtgggatgttggtggtcaggacaagatccgtccactgtggaggcattatttccagaacactcagggtctcatttttgtggttgatagcaatgatagagatcgagtggttgaggcaagggatgagctgcacagaatgttgaatgaggatgaacttagagatgctgttttgcttgtttttgccaacaagcaagatcttcctaatgcaatgaatgctgcagaaataactgacaagcttggacttcattcactccgtcaacgccactggtatatccagagcacttgtgcaacttctggagag

SEQ ID NO: 45713 - DNA, 405 bp, Glycine max
  Clone ID: LIB3139-092-P1-N1-B2
gccgcaccttaaaaccggaaacaaaagcaatcgttacttgttctcaagaatcttcaaactttcttctgttttctctgcactcggttctttaggaaaagaaaatcactctctgtattgattacagacttcgtgaatcattttcttttcaactttcagttcacttgctgaacactctcctataaatatataggacttcgtgtcagatttgaacttttcctgtctctttctcggttttctttcttattctcatcttctttaaattttaaggctcgtattttgtttctctaaactttctgttggactcatttgaaatacaacatgaagttttatccaggacaaaatgtctctgaaattgtttaccattttcagagtaatgagacagctaataggcttgatgcttatttt

SEQ ID NO: 45714 - DNA, 497 bp, Glycine max
  Clone ID: LIB3139-092-P1-N1-B3
aggcggtccaatacacctcagtggcatatattggtgttcttagaagtatatttatcagcaatttggtaccgcccggatttgatctgtcttgccttctcttgcagtctgaagatagtgtgattggttgcctagtgaagataaagatctgtatattgagattggctgggcggagttagttcatagaatgctagcaccaatcccttctcattgggttttgtttacagtggttagctcctaacagggtttactcctctagggttttggggttttttagggttttctgcctaagatgcttatatcttttggtttttgttcgggtttatccttctctaagcctttttttttctctctttttattttacttgtttggtcgtttcctgtcttgtaaattcagatctactttgttgcagagcagctttacttgttactttcaacaagggtagaagcaaggtgggaaatactgaaatatagttgggttttaagtttttggagtttcg

SEQ ID NO: 45715 - DNA, 407 bp, Glycine max
  Clone ID: LIB3139-092-P1-N1-B4
cagaatgctgacattcctatgtctgatgccgtttcggatgaatttgcatttggaagcaacgtgttggggcttgtcaagccttgggaaggagaaaggatccatgaggaatttggatcagatgatcttgaactcacacttggtaactcaaagaccagatgaagtcacaaatatgaattgaatgtgataatgtaaacattgacttttgttggttttgatcagtagatatgttagaaggtaagtgaggtggtgagtgcaagcagttgttttcttttatccttttatatatttttattttggtgactttcccttttcattctatagatctccagtaatatacatgcttatttagatgtggagtggatttgcaacccattcatttcatcgtggtacgtgttgttaaaccttaa

SEQ ID NO: 45716 - DNA, 461 bp, Glycine max
  unsure at all n locations
  Clone ID: LIB3139-092-P1-N1-B5
cagaatgctgacatttctatgttttatgccgtttcggatgaatgtgcatttggaagcaacgtgttggggcttgccaagccttgggaaggagaaaggatccatgaggaatttggatcagatgatcttgaactcacactttgtaacttaaagaccagatgatgtcacaaatatgttatgaatgtgataatgtaaacattgacttttgttggttttgatcagattatatgttagatgtgaagtgtggttgtgagatcaagcatntgtatgtcttttatcttgttataataatattatttgtggtgacttttttttattcattctatattatttcctttaatttataagtcttattttacattgtttagttagattttgtattcatttaatattattgcatttatgtgtatgataaatcattatttatttttatactatttatttactttttttgataatgtttt

SEQ ID NO: 45717 - DNA, 369 bp, Glycine max
  Clone ID: LIB3139-092-P1-N1-B6
tttctttttatgtgctattaacccgatccttttcttttatcttcttcttcctattctcttctttttcttcttcttattattcgtattcttcactgtgctgtttctccccaactacccctttaccttcaagtcaatcattgtgaagaaaagaagtgaacactgactctgttattgttctgaatttcctcaccctatacaactagttttaacgaacatggaaactgaaaagtctaatgtttcaaaggctgaagaatttaaactccttgccaatgaagcattcaatgctcgaaaattctcccaagccattgatctatatacacatgcaattgagctgaacagtcaaaatgcagtttacttttctaatcgtgc

SEQ ID NO: 45718 - DNA, 425 bp, Glycine max
  Clone ID: LIB3139-092-P1-N1-B7
gaagaagagtttgaagagtacattagagacgtggaaaagcggctcggaagagagattgaaagtggcagaggaaacgcaagatgcctgaggttgtcgcttgacaagattgaaatgtcgcaccgcagcctattctggtatctggtaagtataatcccgggctctacaaatgcgatatttatacaaggcctgcagtgtgtcttcgtggttgactcgatagcgtccgcccgtcttctgtattacaacttcgactatcaccgcactcctcgtcgtcactacttttcagtattcccgattcgcccgcacaatttgttcgctaatactcgttctccatccagtaagattacttactggcaccggccacatacagcgaaaacgaaacttcccatcctattcatccacggcattggcattgggctctatccata

SEQ ID NO: 45719 - DNA, 177 bp, Glycine max
  Clone ID: LIB3139-092-P1-N1-B8
ggacaacagctgaagaaggacaggaaggaccagaaaaagagggatgggagacagatcgagagggaaataagaaacacacgacgcccaaggtgcccgctagacaaaaaaaaatgtctaagcgggacataataggatgaggaaggattgacgggcgatgcagagacaattaaagaagga

SEQ ID NO: 45720 - DNA, 423 bp, Glycine max
  Clone ID: LIB3139-092-P1-N1-C1
atcattctcatattattgtcgccacttcgacctcaatcaccctcgcgccctcgctcttcccttcctggtggcgacaatgtcgactcctgctaggaagaggctgatgagagacttcaagaggctgcaacaagacccgcctgcagggatcagcggtgccccccaggataacaacataatgctgtggaatgctgtcatatttggtcctgatgatactccatgggatggaggcacgttcaagttgactctccagtttactgaggattatccaaataaaccaccaactgtgcgatttgtgtctcgcatgtttcatccaaatatttatgctgatggaagtatttgtttggatatactacaaaatcagtggagtcctatatatgatgtggctgctatactcacatctatccagtcattgctttgtgatcc

SEQ ID NO: 45721 - DNA, 455 bp, Glycine max
  Clone ID: LIB3139-092-P1-N1-C11
ggtggaggaattttagtggacaaaactggagattggatcacacttatacaaaattctccaattagtaacttgttgagagttgctgcttggaagaaaggttgtttaatggtcaagattgtgatgtctgggaatgcagcagtcaaaaggagtgattgggcctcattggtacaagtgtttttaacaaacagcaacagtacagagcattttgatgcatgtaagtggacaaaatcagaaccacattcctgggaattaatcttcccaatagaggtatgtggtcctaataatggttttgaaatgtggagttctgagtgggcaaatcaaacttcatggcatttgagtttccttattgacaatcccaaacagtctacagtttttgatattctcttgggaatctctcaagattttgaaattgctggtaatactcttatgccagctttttctgttccacaggctac

SEQ ID NO: 45722 - DNA, 420 bp, Glycine max
  Clone ID: LIB3139-092-P1-N1-C12
tgtgggtatgctataaatctatttaactgtacaactatggtttatcagcttatcactattctgagggaaaatttatctgttcttgtcaaaagaacatgatataataactataaaaaaaatgatataagaattcacaaaaatgtttgatctgttattttaatagttattgcaatatatttttattctcttacatccacataggatggaactataatacggggacaaaatgaaatttctcatccaaccagtggaacaatggagcttattaagaaggtatgccagtgtattttttttgtacattatgtctactccaatgataatttgtttaaatctccaaggatgtgaagggaacttgcctgagatgaaagcttgcatgttctttcaagtctcttaatgaaaggaaatgagcacttgttcttc

SEQ ID NO: 45723 - DNA, 441 bp, Glycine max
  Clone ID: LIB3139-092-P1-N1-C2
tgttgagaaggttctgcatgagcttgattcacttcctgctagggtcataagcagcactagtgtgacagtcactgctgaagaaaatggcaaggtagtggttgctaagaagagtgctatggagactcagagggaaatcactgccatttggaagaagtttgtgttggagaggaagaagaacaatgacaagatgaatggtgtttgttagagttagcttcaagagtgtgttgtgttgtgttgtgcctatccctgccttattctagttctttttttcatatatatatttgaggagtaagtacttttgattgagtcaagctatttatcttgatcggttgcttattgatgagaggcaaatatcaaactgtattttcatctgtataagtatgattcactgtatttttgactattttctgaatcatgaattatatttatcttccatatgat

SEQ ID NO: 45724 - DNA, 434 bp, Glycine max
  Clone ID: LIB3139-092-P1-N1-C5
attttctcaagagaaactttaagcagatgtctaatgttttgtgggtggctcctgaagacaaggcgagtttatggtcacaacttcattatgtttcgtgtaataatctggaaatgcaagaagcttatcttgtcaatctcgtaaatgtgttacgagaactgtatttgcacagtccagaggaagctcgccaattgagaaggaaagctctctctcgtattgaatggctgcaaaaagctgatgtgcctaccatagcacagattgaagagttccattcgatgcagaggatgatgaatgctcctgattcaaatgataatattgatctactgttgagcattgatttgttgggtttacaaggagcaggcaaagcttttccaaacaagaatgtttttgatgataagcttgtgttggctaacacacaagaattctttgatggaaat

SEQ ID NO: 45725 - DNA, 439 bp, Glycine max
  unsure at all n locations
  Clone ID: LIB3139-092-P1-N1-C6
aacacatgcagctgttagtgcgagttcaatgtcagattcagtctggaaggatccagatgttggaaaaccaggcacgatatcaagctgatttcaagaatgataaggatgcagccagtatcttgagcaaactcacttctgaagcatgaaatgaagagtgggatgatagcttactgaccaaagaggaagtagaggcaagattgcagaggaaggtggaagcaatcatcaaaagagaaagagcaatggcatttgcatattcacatcagctatggaaagccactccaaaatcaactcacaccccaatgacggatacacgatcaggtggattcccttggtggtggaactggttggaaagacaaacaccagcagcaactccacaagaaagacaaagcttgaagaattttcaaatcacacctncaagaccatactcagagcaaaagac

SEQ ID NO: 45726 - DNA, 454 bp, Glycine max
  Clone ID: LIB3139-092-P1-N1-C7
cgctgaaatagatttttttttttgggtataatattgattgtagtagtatttattttatcttctgatattatatttccaattttgctgtcaaaacattattagcgatcaatttgaaattgatacagagctgagagcatcaaggaatcgaagaatagaagattcatttttttttctttttgatatggaagctgatgtttctattatttttgttgcgttttcaaaaccctaaattggagaaatcccaatttctccttctgtctttctgctttggatgtttttcaaccaaaaaattgtgcttttcaaatcttttgctctgatgggtacttcaaatcttctcttgtttttctctctgatgagcctgtgtgctatggcggcttccaaggtggtgcttattgggaataatatcactctctcctttgatgatattgaagctaattttgccccaccgttaaag

SEQ ID NO: 45727 - DNA, 403 bp, Glycine max
  Clone ID: LIB3139-092-P1-N1-C8
gggtggccggcaagttgttgggtgcataccttatagatataaacaagacatagagggtaaaatgagcaacgaattggaagtactagtggttagttcacagaaaggtcaaggattgatgttccctaagggaggatgggaacttgatgaatccgtagaagaagcagcttatagggaatcccttgaagaagcaggagtaatgggaatgattgagcgtgaactggggcaatggaatttcattagcaaaagatatggcatatactatgaaggacacatgttccccatgtttgtcaaggaacaacttgatatatggcccgagaaaaatctacggagaagaatatggatgactgttgctgaaactagaaaagttgtcagcattggtggatgaggaagcattagatatact

SEQ ID NO: 45728 - DNA, 434 bp, Glycine max
  Clone ID: LIB3139-092-P1-N1-C9
cagaaatgataaacagtctttgtggtggtgatgaaaaattgatgcgtgaaaggacacacctgctgttggcttgttgttcaaggatggcaatttgtaagaaagatgtttggagagttgaatgtggaatcccttctggatttccgctcacagttatttgtaatagcatttttaatgagatgctcattagatatagctatgaaaaattactgcgccaggctaaagctccaagtatgtttttacaatccttcaaaaattttgtttctttgtgtgtgtatggtgatgataacttaattagtgttcatgaatatgtcaagccttactttagtggttctaaattgaaaagctttctagctggtcataatatcaccattactgatggtattgacaaaactagtgcaactttgcaatttagaaagttagcagattgtgatttt

SEQ ID NO: 45729 - DNA, 447 bp, Glycine max
  Clone ID: LIB3139-092-P1-N1-D10
cgttggtgcaaagcattcttcgcttcaatctctctctctctctttgcgctttctgcaaaccgaacatttcatcttcaaagggatcaacaggtcgaaggagaaatggggctgacattcacgaagcttttcagccggcttttcgcgaagaaggaaatgcgaattctgatggttggtcttgatgctggtaagaccactatcctctacaagctcaagctcggagagatcgttactacaattcctaccattgggttcaatggtgagactgtggaatacaaaaacattagcttcactgtttgggatgttggtggccaggacaagattcgtcccttgtggaggcactactttcagaacactcagggtcttatttttgttgtagacagcaatgatagggacagagttgttgaggccagagatgagtacataggatgttgaatgaggatgaactga

SEQ ID NO: 45730 - DNA, 465 bp, Glycine max
  Clone ID: LIB3139-092-P1-N1-D11
gaaactttgttcattctgttgtcagtctccatctgcccaactccccagccccacccctttatttgcatgtcctattaaatgaaaccgaaacaaaccaaaaacaaaaatgtgagctaattgatctatagtcaaacatttttattcttcaagtgttattctttgtaggctgtttacaatgttatttgttatgatgataatccacggttgagaactggcatggaacttttaaggaccacaaaagaaattgagtcgcaagtacacaaggtctcagcgccattattgattcttcatggagcagaagataaggtgactgatccattagtgagcaaatttctttatgagagagcatctagcaaagataagactttaaagctctatgaaggtggttaccactgcattttggaaggggaacctgatgacagaaatattgctgtacatgatgacattggcttgtggcttgattta

SEQ ID NO: 45731 - DNA, 477 bp, Glycine max
  Clone ID: LIB3139-092-P1-N1-D12
ggcaggacattcctttgttgagatagatcatgctacgggaacagaaattaaaactgttgcatagtttatgctagtgattgatacaatacaccaaatctaggtgacctattaatccgtataaaacgtgaatgtcaaaaatatacttgcatcagaacagagaaaaatcttagctggttgtcgcatagtatttagcagggtatttgctgctggtgaagcaaatactcaccttcatccattgtggcagacagctgcacaatttggtgctgtttgcaccaaccagattgatgtacaggttactcacgtagttgcaaattccccttggactgataaggcgaattgggctcttaacaaacggaggaattgttgttcatactggctcggtggaagcaataacatagctgtgtaggatggcgaatgagcaagatttgccattaaaccttaaaaaaactgacctaattctttttaaaaactaaaaca

SEQ ID NO: 45732 - DNA, 452 bp, Glycine max
  Clone ID: LIB3139-092-P1-N1-D2
gtgatacaatcattggatccatctaggtttgagaaccttacccagaagcttgagttcaattatcaagctcttgctaatggtgttgcccagcatgctgagcagagaagggcagaaattgaaaaagaaaaattagagaagtcgacggctgccacagcttcttaagcttctgaatgtacattattactgctgcattttttaattctcaagttccctgttacccattctttaggagaatcagagggttgcctatatttgaggcatttgtcggctttgtggtcgccagttgttggtctttgatcatgaagagtttgcagttttgaagtgctcggagctctgtgcaccgaagttgccattgtccagagagaggattgcattcgaggaactgtggagtcagcagtttctccaggtcttagttcacagcttattgtttggtgctttggggctatcctttt

SEQ ID NO: 45733 - DNA, 449 bp, Glycine max
  Clone ID: LIB3139-092-P1-N1-D3
aaagaagcaagtaatggaaatgatggttctcagaatggtaactcaatgcactgcaggaccttggttggtgaagtgaaagcaaatttgaagaaaggtgttggagcaaatgaattgctgtcgcaacttgcagcacatcctgtacctgctcaagaaaagatgagtgctctggttgaagctttgttcgagggaactgagaaaggttttgctaaagaagctgataaaaagaagaactacttttctgttgctgttgcggatgagggatcccagccgttgttgcttcatgctattgaagagttttcttgcaagtctacttcaaatgctttgaaggaggttgccctggttctaaaggcactctacgatgctgatgtgttagaggaagaacacatagtgcagtggtatcaaaagggactgaagggtgataacaagaactctaggatttggaagaatgc

SEQ ID NO: 45734 - DNA, 423 bp, Glycine max
  Clone ID: LIB3139-092-P1-N1-D4
ctccgtgtggccaccccgatcgaccagcttccactcatcgatgctcagttatctcagtctcaccatcttctacgctcttatgtctcacacaacactcattctctctcccctcatcaccgccaagaacttgacaacttcctggcacaatatttgatagttctgtgtactttcaaagaacagcttcagcaacatgtaagagtccacgccgtcgaggctgtcatggcctgccgtgatatcgaaaatgccttacaagctctaactggagtgagtttgggagaaggaactggtgcaacaatgtcagatgatgaagatgatttacaaatggatatttctttagatcaatctagcgcggaagggcatgacatgatgggatttggtccattacttcctacagaatctgaaaggtcattgatggaaagagtt

SEQ ID NO: 45735 - DNA, 270 bp, Glycine max
  Clone ID: LIB3139-092-P1-N1-D5
agataactttgtttctcaaggaagatcaacttgagtatcttgaggaacgccgtctgaaggatttgataaagaagcattctgaattcattagctatccaatttctctttggattgagaagaccactgaaaaggagatttctgatgatgaggacgaggaagagaagaaggatgaggagggtaaagttgaagatgtggatgaagataaggagaaggaggagaataaaaagaagaccattaaggaggtctctcatgagtggtcattggtgaaca

SEQ ID NO: 45736 - DNA, 459 bp, Glycine max
  Clone ID: LIB3139-092-P1-N1-D6
aagagattcaaaaggaactcagatggctcagagccaagtaccaaatggagttaagggatcataaggatggacagtttgggcaatgctcacatagtagtaacagtgagcacagaacagaaaatggctttttgtcaccttcactgacagaaacattaaaaggaggcaacaatgggactcggttgaaacccattactactaagtggaattgtgattccagtagccaccctcatgtccatgaaagcagccccaattcggacacccaaagggcccaaaattgtgaggcgattgaatcccctggagaaggtatggttactgcaaagagtttttatacaggcttattgctgccacactctttgcacaggacagtttctctcccagttgatgctgttgatatataaatttgtgagacaactaattgatatctttgtagaatatatatactccccatagaggctattt

SEQ ID NO: 45737 - DNA, 333 bp, Glycine max
  Clone ID: LIB3139-092-P1-N1-D7
ctcgagccgaatcggctcgagaaacaaatattattattcaatagaaaagaaagatgagtccaacatgggtttttgtgttaggtgttgcagcaatgttggtggttgtgagtggacaatcatcagtgaagcctttggtgaagacagtgtaggggaagaaggtgtgtgacaaagggtgggagtgtataggatgttctgtattttgcttcgttgtgactttttttgtcttctttcatatatatctttttgagatcttttttgttttggttaattctatggttattctttttgttggtttttggttctttcttttttttccccaggtggtttttcttt

SEQ ID NO: 45738 - DNA, 413 bp, Glycine max
  Clone ID: LIB3139-092-P1-N1-D8
ggatcatttcagggtctttgtgtcatatgcggaggagttggaatatctgatgcctactactgcaaggaatgcacacagcaggagaaagatagagatggttgccccaaaattgttaatttagggagtgccaaaactgatttattttatgaacgcaaaaagtatggttttaagaagagatgatgaaggtagattactgaggcatgcgtatttctctaaaactttttgtatgtgtattgttcggatataagaaccggatgtgaaaccttgagcttgtaaacttttttatggtacaattatgaatcatgatataataaatgcttgactagtttgctactggtaaaaaaaaataaataatttttttttatttaaatataaaaatttatattaattttatttattttaattataattta

SEQ ID NO: 45739 - DNA, 229 bp, Glycine max
  Clone ID: LIB3139-092-P1-N1-D9
ggatcattttatggttcttgtgtcatatgcggaggagggggaatatctgatgcctactactgcaaggaatgcacacagcatgagaaagatagagatggttgccccatatttgttaatttagggagtgccaaaactgatatattttatgaacgcaaaaagcatggttttaagaaaagatgatgaaggtatattactttatcatgtatatttatttaatatttattttatt

SEQ ID NO: 45740 - DNA, 239 bp, Glycine max
  unsure at all n locations
  Clone ID: LIB3139-092-P1-N1-E1
cagaatgtaacagatatagattatgaaatttgaggtggtgtcatgttgtccaaacttgatgtttgcacgcgcgtgtatgtgcgtgcgtgtgggtatatataagtggcatgtttaatgcaagcattataggaaataatcttggtgatagatcatcaagattgttacctttcttagggttatgagttgtatataggaaaaattttctgatgcttatataaattttccaggattacccanna

SEQ ID NO: 45741 - DNA, 449 bp, Glycine max
  Clone ID: LIB3139-092-P1-N1-E10
gtgtgtgtatggtgatgataacttaattagtgttcatgaatatgtcaagccttactttagtggttctaaattgaaaagctttctagctggtcataatatcaccattactgatggtattgacaaaactagtgcaactttgcaatttagaaagttagcagattgtgattttctcaagagaaactttaagcagatgtctaatgttttgtgggtggctcctgaggacaaggcgagtttatggtcacaacttcattatgtttcgtgtaataatctggaaatgcaagaagcttatcttgtcaatctcgtaaatgtgttacgagaattgtatttgcacagtccagaggaagctcgccaattgagaaggaaagctctctctcgtattgaatggctgcaaaaagctgatgtgcctaccatagcacagattgaagaagtccattcgatgcaaaggatga

SEQ ID NO: 45742 - DNA, 478 bp, Glycine max
  Clone ID: LIB3139-092-P1-N1-E11
gtcggctcatcgatgggatggttaaggatggtctgtattcggaacagcgggttgctaatgtactcaaggaagtgatgttggtcatcaagtattgtcatgacatgggagttgtgcacagagatatcaaacccgagaatattctcctcactgcatccggaaaaataaagcttgcagatttcggcttggccatgagagtttccgaaggtcagaacttgactggtttggcaggaagccctgcctatgttgccccagaagtattgttaggcagatactctgagaaggtggatatatggagtgctggagtgctcctgcatgctctgttggttggcagtcttccatttcaaggagattcattggaagcagtttttgaggctattaagactgtcaaattagatttccaaaatggaatgtggaaatcaatatctaaacctgcacaagaccttattgggagaatgctgacaagggatttttcaagcag

SEQ ID NO: 45743 - DNA, 443 bp, Glycine max
  Clone ID: LIB3139-092-P1-N1-E2
ctcgagccgatctggtgtctatgttccactgcctacaaaaactaatttgatggaaactcccaaggaatggcaactggatctaccttgtgacaaaattcctagtgtcttgactacaactgatgagagattggtaggcacagaacatgagggatatgatccttttcttggtggaattcaaaaatatgccactcccatgatgcccctagatgaagaaattctttctaaggttgcacaagatatggttgaggaatggtttgattgtgttgatgaggaggattcctttgaggaagtttctttaagtgcagcacttaaatgggttgagggtttggactatatggaaagaattcctcttgccacatctgagggttttcctcatgtgctttcacgcaaaaatggcgaaaaaggcaaaaggagatttgtctcttgggatggggaaaagatga

SEQ ID NO: 45744 - DNA, 448 bp, Glycine max
  Clone ID: LIB3139-092-P1-N1-E4
gaaaaaaaaggccaatttagatgtgttcgtattctgcactccaatagcaacatcaattccaattctgatttggttcggaaagaagtgaagtcataagtaatctgtcctctcttgtaaacatggcagccgaaacggaaccaaagaagatcataattgataccgaccctggcatcgatgatgctatggcaatattccttgctctacaatcacccgaggttgaagttattggactcacaaccatctttggaaatgtgtacaccactctggcaaccagaaatgccttgcatttgttggaggatgctgggagaacggatataccggtggcagaaggatctcatgtaacttcaactaatggaacaaaactccgtgtcgcagattttgtccatggtgtagatggacttggcaaccagaattttcctccaccaaaggggaagcccattgaagaatc

SEQ ID NO: 45745 - DNA, 434 bp, Glycine max
  Clone ID: LIB3139-092-P1-N1-E5
cgaaggtagatgaaagagattctttactagaacagataagaacaaagtccttcaacttgaagcctgctgtgactacacgaccgagcattcaaggtccaaaaacaaatttgaagcttgctgccatcttggagaaagcaaatgcaattcgccaggctttggctggaagtgatgaagatgatgatgcggattggagcgattcttgaatttactgtgagaggtgttctcagctggtcgatgttttgatactctggttctgtcttgagccaggtttatgtggtcatgctcccctgtaatgaataggaaatctccctgaaatgcaaaattctttatcctactgctcttagtcttctttgttcacatatatatgcatgaacatttatactagcatgcagattaggatcgatgcagatccattttcggaggtgaaattcact

SEQ ID NO: 45746 - DNA, 408 bp, Glycine max
  Clone ID: LIB3139-092-P1-N1-E6
ggatacattccgtgggagagtatgtgaatgcagtgttgttgacggtgtacaattcaaaggagatggttatacaacttgtgaagcaagtggacttgggcgttgcaagataaataatggaggctgttggcatgatgctcaaaatggacatgcattttctgcttgtttggataatggaggggtcaaatgccagtgtcccacagggtttagaggtgatggtgtaaaaaattgtcaagatatagatgaatgcaaagagaagaaggcttgtcagtgccctgactgtagctgcaagaatacttggggaagctattactgcagttgtagtggagatcttctgtatatgagggaccacgatacctgcataagtaaaactggcagtcagggaagaactacctgggctggtttttggtt

SEQ ID NO: 45747 - DNA, 443 bp, Glycine max
  Clone ID: LIB3139-092-P1-N1-E7
aagcagccaccaacaagaacccaaccggtgtcgctgctctctctctgttacttccctatcctcgtgtgtggttcgtactatgaagaggactatgccatggagtgacgacgatgagtcatcgtcttcacattcagattctgaacgtgatagtgaaactggaggggaaaactccaaaggtaaatctaggaagcagaaaactgagaaaagtggtgtaattgactttgaggctttgaagcgacacgggtatagaggtggaccttctgtcctaaaagtacccgcaccaaaagaagatgactcaaagcaagattggtcgtggtccactggaaaagaaaagcgtgtagacaaggaaattgaagaatcatatgaagaacgaatgaaaacaagagaggctatttccctaggagaggagctgccaactgctctgactaggaatgacacgaaga

SEQ ID NO: 45748 - DNA, 478 bp, Glycine max
  Clone ID: LIB3139-092-P1-N1-E8
ctaatttatatagcaagctagctaggttgaaaatagtttggttttgtagtaagtgaggtgaggtgccaaaatggtgaagataactcttggtactttcgatgactcttttggtgttgcctctcttaaggcttatttggcagagttccatgcaactctgattttcgtgttcgctggtgttggttcagccatcgcttacaacgagcttacaaaagatgcagccttggatccaacggggctggtggcagtagctgtggcccatgcatttgcactgtttgtaggtgtctccgtcgcagccaacatctcgggtggccatttgaacccagctgttacttttggattggccattggaggcaacatcaccctcattactggtttcttatactggattgcccagttgttgggttccattgtggcatgccttctcctcaatttcatcaccgtcaagagcatttcaagccacgcaccggcaactggtgtg

SEQ ID NO: 45749 - DNA, 291 bp, Glycine max
  unsure at all n locations
  Clone ID: LIB3139-092-P1-N1-E9
ttgatttgttgggtttacaaggagcaggtaaagcttttccaaacaagattgtttttgatgataagcttgtgttggctaacacacaagaattctttgatggaaattttccagtggattcttggttaccaatttttgtgaattgtctctatcctgtaagtcaattaccttcagaagctgtcgttgtaaatgttacatgtggtagtggacgtggtggtttnnntttttttttttttttttttttttttttttttttttttttttttttttttttnttttttttttttttttttt

SEQ ID NO: 45750 - DNA, 329 bp, Glycine max
  unsure at all n locations
  Clone ID: LIB3139-092-P1-N1-F11
agagtctaaaaaaaagtgtcgtttgtttttatattttgcttaggttttgggtaaaaaaagtaaaaaaagaaagtcttttttttttaaaattctttttgttgttgcaatattgtgtatgattggaaatctttaaattcgggttttccaccccatcaattcaatttaaagatatgccttcttccaaaaaaaaaaaatataattttttaanttttattatttaatttatttattatattaataaaatttttatatatataattaaaataattattattnattttaaaaaattaaatttataaaattattaaaaaaaaatgggggggcccccc

SEQ ID NO: 45751 - DNA, 439 bp, Glycine max
  Clone ID: LIB3139-092-P1-N1-F12
cctcagtctgtaaagatgaaaatttaatttatcaatttgaacagaagcctcaagcatatatagacataagcccttcatataccacctgtcaaggagtattatttaaattttcatctttacagactgaggctcccacagagaaaagcgaaaaaaaacggtttatataattgacaagcgtcacatatttgacctcttgagtggtttgtaaaggacaactgtcacatatttggactggaacctgtgagtgagtcccagggcaacaacagactttaaggccaaatttttctctatgaagacatgatttaacacaacatgttggggctttgaagaggaacctatgtctgtaaagatgaaaatttaaataatactccttgacaggtggtatttgtagggcctatgtctatatatgcttgaggcttctgttcaaatggtataatta

SEQ ID NO: 45752 - DNA, 348 bp, Glycine max
  Clone ID: LIB3139-092-P1-N1-F2
caaaattctcttccgtttcaggattagggtttcaccgttacagtgaaacatggcaaaaccaaagcgaatctctctgcgtatctttgcgctgctcctcttgatttccacctcttcgtttcagcttctccgcgcttccgatgacgccgatgatgatgcgatcttctatgattcgttcgacgaggattttgaagaccgttgggttgtgtctcagaaagatgagtacagtggtgtctggaaacatgccaagagtgagggacatgatgattatgggcttcttgtcagtgagaaagcaaggaaatatgctatagtaaaagaacttgatgaggccgtgagtctcaaggatgaaac

SEQ ID NO: 45753 - DNA, 338 bp, Glycine max
  Clone ID: LIB3139-092-P1-N1-F4
gtttaatggtcaagattgtgatgtctgggaatgcagcagtcaaaaggagtgattgggcctcattggtacaagtgtttttaacaaacagcaacagtacagagcattttgatgcatgtaagtggacaaaatcagaaccacattcctgggaattgatcttcccaatagaagtatgtggtcctaataatggttttgaaatgtggagttctgagtgggcaaatcaaacttcatggcatttgagtttccctattgacaatcccaaacagtctacaggttttgatattctcttgggaatctctcaagattttgaaattgctggtaatactcttatgccagctttt

SEQ ID NO: 45754 - DNA, 248 bp, Glycine max
  Clone ID: LIB3139-092-P1-N1-F6
gttcatgtatgtatgcaatggtgcatgatatttcattgtctacagtaccaggtgattacggcattggtgttaagtagacatctatatacactgtgatggcatatcgcctcaatcctggtatagcagagcaccgctcataggagcaccatctcattagcgcatgggtgactcaaactggacggaacagaagggccgcagaccgaacaccaatgattgatggttctagctagcaacgctttagttaggtc

SEQ ID NO: 45755 - DNA, 120 bp, Glycine max
  unsure at all n locations
  Clone ID: LIB3139-092-P1-N1-F7
ctcgagccgtttgagtttttgtngctgagnttgcattgggtacagtaccatttgatcacggcattgctctccatattacaactacttacaatattattgtatatcttgcttatccttatt

SEQ ID NO: 45756 - DNA, 406 bp, Glycine max
  Clone ID: LIB3139-092-P1-N1-F8
ggatgcggaggctgtcttgaacctctttgattcttgctggtttgaggttaacattttaaggagaaattctagtcctcacacatcaattacaagttatacagaaaatttagatcatgtgttaaaagaagaaaaagaaccaaagctacccttgatccgaaccagccacaccagatccatgagtgaccaattatccatgacaacaacaagcttcaaccaagattctctttcacctgactcagtgcttcttctccatccaaagctccaaaccattctctcaggaaaagaagccactgactcagaacctgatgagaacccaagaacgcaggttaggcctcatcctgaggtgttgtgtcctaagaagaacaaaaaaaatctcaagcagtagaactaggaagaggagggagag

SEQ ID NO: 45757 - DNA, 372 bp, Glycine max
  Clone ID: LIB3139-092-P1-N1-F9
atcctcaatacaatgaggttcaggctcagatggaaacaaatttgtttaaattgtctcttgatgatgttgaaactcctaaaggttctatgttggatcttaaaatttctcaatctaaaattgcacttcccaagaacacagttggaggaaccattctgcgtagtgatctattggcaaattttttgacagagggcaattttagagcaagtgttgatttgcagcgcactcatcgtattaaaggaatgattaaaatggtggccacagttggtattcctgagaatacaggtatagcattggcctgtgctatgtatagctcttttacggggcgcgccagctctgctatttacaccttctgctctcaagactgtgaatttt

SEQ ID NO: 45758 - DNA, 413 bp, Glycine max
  Clone ID: LIB3139-092-P1-N1-G1
atataaaaggatgttacaagttaataagcctacagccagttgacatgttcccacacacacctcatattgagtgcgtttgccttctggagcttcagtaatctgtgataaattaaaactttccatttcaaggggattacaagcttaatacaagatgcaagtcaagattgggtcttcaaggtgatagataggaaaactcatacttttatgctgcaaagtgtgcctgatgctttgcctacccaaaactactgcatcagtgtacaaattacaaaatcattatgaatggtggtagcattggcaagcatgcagggatcacattgttgcaaccttgcaaaagtttctcatacatttccattcatgcggagcccccaaaaagttttggattcatgcttagcaacctccaaatgtggattatt

SEQ ID NO: 45759 - DNA, 314 bp, Glycine max
  Clone ID: LIB3139-092-P1-N1-G10
cttattgagtactttgaggctattgcaggagttcctaagattaaagatggatgtaatccagccacatggatgctggagatctcttctcctgttgttgagtctcagcttaacgtagactttgcagaattatatactaagtcagacctttatcaaaagaaccaggaagttatgaaggtcctttgttcctggtactggtgtgcagagttccttaataacttcctggttcttttcgaagatagtctgggccaactcttctgcaccgtgcctttgcttgaataatgaattgtcaggggtaaatttatgtggtgatccct

SEQ ID NO: 45760 - DNA, 420 bp, Glycine max
  Clone ID: LIB3139-092-P1-N1-G11
cctgctcgccgtgcaggactacaacgtgccgttattcgattggctccccgccggtgtcggacaccatccttcgccgtctccggccagctccaacgtccccgactcctccgaggtgctcaacacgccggcgtcgcctaatttttcgtcgatttcctcgtcgtcgaatgaggctacggtcaataacaactccgaacaacagagtgggaaagaattacaagaagaagaaggtggtaatggaggcagaggagataaccaagatcaagacaagactaagaaacagcttaaagcgaagaagaagaagaagaagaaccaaaagaagcaaagagaaccaagattcgcgttcatgacaaagagcgaggttgatcacctagacgatggttataagtggcgcaagtacggcccaaatagctgtgaaaaaca

SEQ ID NO: 45761 - DNA, 464 bp, Glycine max
  Clone ID: LIB3139-092-P1-N1-G2
ctattcccttctctttctctgaaccttcttcttctctctttcacattctcataagatataagacccatacacacacacacacacatatctgcttcttgtagaacaagttaagtttgttttgttttgtcgtttgcttaaggattaatcaatcaattatctgatgatggaagagccggttgtggttaacaaaggagattatgatcatgatcatgatcagcctttggatttacctccaggtttcaggttccaccccacagatgaagagatcatcacttgttacctcacagagaaagtcctcaatagagccttcagtgcaactgctattggagaagctgatttcaacaagtgtgagccttgggatttgcccaagaaagcaaagatgggggagaaagattggtacttcttttgccaaagggataggaagtacccaacaggcatgcgaaccaatagagcaacccaatctg

SEQ ID NO: 45762 - DNA, 435 bp, Glycine max
  Clone ID: LIB3139-092-P1-N1-G3
acaatgatgttgtttctcgtcttccatttgatgcaggatttgaggctgtagggataattgcagcagttggggattctgtcactgacttgaaagttggtatgccttgtgcattcatgacttttggaggctacgctgaattcttaatgattccttcaaaacatgctcttccggtgcctagaccagatcctgaagttgttgccatgcttacatcgggattgactgcctcaattgctctagaaaaggcaggacagatggaatctggaaaagtggtccttgttactgctgcggcaggaggaacggggcaatttgctgttcagctagcaaaattagcaggaaatacagtggttgcaacttgtggaggtggggcaaaagccaagcttctgaaagattttggagttaacagagtcatagactatcataagggagatgtaaaaa

SEQ ID NO: 45763 - DNA, 426 bp, Glycine max
  Clone ID: LIB3139-092-P1-N1-G4
ccatcatctacgagagcccccaccctgacacccctttgctccgcttggcttggaacaaacaggacctgaggtacatggccaccattttaatggacagtaataaagttgtgattttggatattaggtctcccactacccctgttgcggagttagagaggcaccgtgggagtgtgaacgccattgcttgggctcctcatagctccacgcatatttgttctgctggtgatgatactcaggctcttatttgggaattgcccacgcttgcttctcccactgggattgatcccgtctgcatgtactctgctggctgtgaaattaaccagctgcagtggtccgccgcccagcccgattggattgccattgcttttgccaacaagatgcagcttttgaaggtttgaggtcagaacaaacaattacacattctag

SEQ ID NO: 45764 - DNA, 428 bp, Glycine max
  Clone ID: LIB3139-092-P1-N1-G5
ctcgagccgattcggctcgaggatgatgaagatgatagaagggattatggcagaagaggaagagatagagatgatgaagatgatagaagggattacggcagaagaggaagagataaatatgacagggatagagatagatatgagaggcgcaggagagatgaacatgaagaagagcatgggcgtggaagggagaatggggatagagatggtaataggaagggtttacagcacggttctggtgaacttgaattatatgcagtttataaagggagaatctccagagtaatggagactgggtgctttgtacagttggatgacttcagagggaaggaggggttggtccatgtctcacagatggccacccggaggattaccaatgccaaagatgttgtcaagcgtgatcaagaagtgtatgtaaaagtgatctc

SEQ ID NO: 45765 - DNA, 484 bp, Glycine max
  Clone ID: LIB3139-092-P1-N1-G6
gtgtgtgtatggtgatgttaacttaattagtgttcatgaatatgtcaagccttactttagtggttctaaattgaaaagctttctagctggtcataatatcaccattactgatggtattgacaaaactagtgcaactttgcaatttagaaagttagcagattgtgattttctcaagagaaactttaagcagatgtctaatgttttgtgggtggctcctgaggacaaggcgagtttatggtcacaacttcattatgtttcgtgtaataatctggaaatgcaagaagcttatcttgtcaatctcgtaaatgtgttacgagaatagtatttgcacagtccagaggaagctcgccaattgagaaggaaagctctctctcgtattgaatggctgcaaaaagctgatgtgcctaccatagcacagattgaagagttccattcgatgcagaagatgatgaatgctcctgattcaaacgataatattgatcta

SEQ ID NO: 45766 - DNA, 441 bp, Glycine max
  Clone ID: LIB3139-092-P1-N1-G7
aaaaagaactagctagcttgctagagtgtgagaactctagcatatactagtactactacattccttcatcttcctttttatttttcaccataaaaaaacaagagcacaaagatggtgagagctccttgttgtgaaaagatgggtttgaagaagggtccttgggctaccgaggaagatcaaattctcacatcttacatccaaaaacatggccatggcaattggcgtgccctcccaaagcaagcaggccttctaaggtgtgggaaaagctgcagactccgctggattaactatttgaggcctgatatcaagagagggaatttcacaattgaagaagaagaaactatcattaagctgcatgagatgttggggaacaggtggtcagcaattgcagccaaattgccaggaagaactgacaatgagataaaaaatgtttggcacacc

SEQ ID NO: 45767 - DNA, 490 bp, Glycine max
  Clone ID: LIB3139-092-P1-N1-G8
tgtgggtatgctataaatctatttaactgtacaactatggtttatcagcttatcactattctgagggaaaatttatctgttcttgtcaaaagaacatgatataataactataaaaaaaatgatataagaattcacaaaaatgtttgatctgttattttaatagttattgcaatatatttttattctcttacatccacataggatggaactataatacggggacaaaatgaaatttctcatccaaccagtggaacaatggagcttattaagaaggtatgccagtgtattttttttgtacattatgtctactccaatgataatttgtttaaatctccaaggatgtgaagggaacttgcctgagatgaaagcttgcatgttctttcaagtctcttaatgaaaggaaatgagcacttgttcttcaaggggatccaatagtcatcgtaatttagtaatgatatttttgggttattaatgacctggagtttaaagc

SEQ ID NO: 45768 - DNA, 495 bp, Glycine max
  Clone ID: LIB3139-092-P1-N1-G9
aatccctctttcttcctcttcctcagtagtgcgattttcgattctgttctctgcaactatgcctaaccctaaggtcttcttcgacatgaccatcggcggtcaacctgccggccgcatcgtgatggagctctacgccgacgtgactccgagcaccgccgagaacttccgcgcgctctgcaccggcgagaagggcgccgggcggagcggcaagcccctccactacaaaggctcgtccttccaccgcgtgatcccgaacttcatgtgccagggcggcgacttcaccgccggaaacggcaccggaggcgagtcgatctacggcgccaagttcgccgacgagaacttcgtgaagaagcacactggtcccggcatcctctccatggcgaacgccggtcccggaaccaacggatctcagttcttcatctgcacgacgaagacggagtggctcgacggaaagcacgtcgtgttcggacaggtcgtccagggggatggacgtcg

SEQ ID NO: 45769 - DNA, 465 bp, Glycine max
  Clone ID: LIB3139-092-P1-N1-H1
gtggacgtgacgctcttgctgaatttgattggaaggtgtcgccagatgaagaggaaattgattactattcggatgaatacagagtggatagtgatggcgaagaagaggaagagattattatccctttctctgcaccccttttggttggtggtggagttggtcatactcgtgggggtgtgcttaatttgaagccacgaaaagaaattaacctgtggaagagaagaaccatggctccacccaggcctcttcaattggacagagcaaactgattatttgttcattacaaaaatgaagattaatttgatttttcgattttttttaatggctatgttttggttctgaaacattttctgtgcagaactgctgatagatttaattaggtacagcaaaaaaatggtgttggcaacatgttgtgataggcaagtatcatattgtgaatgaatatatagcatcaaaattacgatc

SEQ ID NO: 45770 - DNA, 450 bp, Glycine max
  Clone ID: LIB3139-092-P1-N1-H10
cttctttttcttttttctttctatatatagtaacaaacaaaattggagtagggtttgatttcgatggagaattattctatgttgttccctatttccaattcctcgagctacccaatttcaacgagtggtgttggaagctctcaaatcggctataatggtcaaagctccaatgcgtttcttggtctaaggcctagtaatgaattattaggtagtgatgatcatgacaacggaggcgaaggtggtggtgatggagatggcaacatgttaatgtctcagataagtggtggtagtaatactaatgtgagtgatgagttaggtggttccggaaatagtaacaataaaaagaaaggagagaagaaggttaaaaagcctagatatgcttttcaaactaggagccaggttgatattcttgatgatggttatcgatggaggaagtatggccaaaaagct

SEQ ID NO: 45771 - DNA, 465 bp, Glycine max
  Clone ID: LIB3139-092-P1-N1-H11
cagttttggtgcgggttatggcaaattctacacacgttattccgatgtattttctttgcatgatttcccccccccccccagctgtgaaatttatttggtttgcaaatgtgtataattttacctcaattatgtcttaggattgactttttcaatttgttcacccctttttttctgggaggtggtagaccggagctgcatggtctttgtaccgttgtcttagattttcattttggtcgttgggagagttacataatttttgttttctggtcctgtatccagtcaacatacatctaggagagcatgttgtatctttcctattttattggcttattcatcatgtataaacattatgtgaaaatgttgctactggatgccaaaatgacatgtaattttggatgaattcagtaaaaaaaatggaggttaatattgctggtgaaaaaaaaaaaaaaataaaaacaaaagggc

SEQ ID NO: 45772 - DNA, 383 bp, Glycine max
  Clone ID: LIB3139-092-P1-N1-H2
tctgtctgccttagtcaaagggattcatcggtcttcttcccaggttatttagaaaagcaaaatggtgaagatctgctgcattggtgctggatatgtggggggtcctactatggcagtcattgcacttaagtgcccatgcattgaaggcgctgatggtgatatctctaaatcccgcattgcagcctggaacagcgaccagcttgctatctatgaacctggccttgatggtgttgtgaaacaatgccgaggtaagaacctttatttcagcactgatgatgaaaagcatgtctttgaggctgacatatagtttgtctctgtcaacaccccaaccaaaactgatggtgttggagctggcaaaacaacacatttgacatattgggaga

SEQ ID NO: 45773 - DNA, 377 bp, Glycine max
  unsure at all n locations
  Clone ID: LIB3139-092-P1-N1-H3
gcaagttggctggaagatgcccggcagcatgccaatcccaacatgaccatcatgctcatagggaacaagtgtgatctgtctcatcgacgggcagtgagcaaagaggagggagagcaatttgcaaaggaaaatggacttctgttcttagaggcttctgctaggaccgctcaaaatgtagaagaggctnntataaggactgctggaaagattcttcagaatattaaggaaggcgtctntgatgtgtccaatgagtcatttggtataaaagtcggctatggacgtccccaaggtcaatcangtgccagagatggaactgtttcagccagaggtgggtgttgcagctgattgagagggaaacacacttgaatctaatcctt

SEQ ID NO: 45774 - DNA, 267 bp, Glycine max
  Clone ID: LIB3139-092-P1-N1-H4
gcaagttggctggaatattcccttttgtatgccaatccccacaaggaccatgtgcttatagggaacaagtgtgatctgtctcatcgacgggcattgagcaaagaggagggagagcaatttgcaaaggaaaatggacttttttttttaaaggtttttgttaggaccgttaaaaatgttaaaaaggttttataatggcctgttgaaagaatttttaaaaaattaaagaaggggatttttatgtgtccaatgagttcatttggttttaaa

SEQ ID NO: 45775 - DNA, 417 bp, Glycine max
  Clone ID: LIB3139-092-P1-N1-H6
tgcagattgaaccagacatgaattcaaggtttcagcttttgagtaccactaccaatggtgattttgttcaaggaaaagatctcgcaatggttaaagttaatgtagcatgtgctgctgttggcttgacatcaagttacactccaactccattgttggaatctggtttgcaaaaagacagagggttaattgtggagtattttggaaggatgtcttacgttgctcataatgttaatcagccccaagagaaagatttgttggagggaaatttttcctttgatattaaatctcgctctagattggaaaaagtttcctctacaaaagcacaatttgttagtggaaaaaccttcaaatatgatataattggtgctggttcacattcttcagaagattttcctgaaaaggaagatcaaggaaaac

SEQ ID NO: 45776 - DNA, 443 bp, Glycine max
  unsure at all n locations
  Clone ID: LIB3139-092-P1-N1-H7
gcttaacttgctccctcagaagcgaagaagaagccacagagaactagtctcctactctacccgcagaaaaaaatggcatctcacatcgttggatacccccgatgggtcccaagagagaagctaagtntcgctctcgagtctttctgggatggcaagagcagcgccgaggatttgcagaaggtgtcttctgatctcagggcatccatctggaagcagatggctgatgctgggatcaagtacatccccagcaacactttctctcactatgaccaggttctcgacgccaccggcaccctcggtgccgttccaccaaggtacggctggaccggcggcgagattgggtttgatacctacttctccatggccagaggtaatgctaccgtgccagctatggagatgaccaagtggttcgacaccaactaccactttattgtccctggatt

SEQ ID NO: 45777 - DNA, 291 bp, Glycine max
  Clone ID: LIB3139-092-P1-N1-H8
agacgcgctgcttcactattctccctatggagtttaatcttgtggttcgtcagaagtttttaaattttgtgaggttcattatgaagaaaagggacaagcttagttgtcaagttggaatcaatccatacttcatggaatggactggtttggccaatagattactgagtaagggcaacgatattctgtgttgcgattatgctagttttgatggtttgattacccagcaagttatgagcacaatggcccaaatgataaacagtctttgtggtggtgatgaaaaaatgatgcgcg

SEQ ID NO: 45778 - DNA, 401 bp, Glycine max
  Clone ID: LIB3139-092-P1-N1-H9
cgccccgctttttatctttacgccctacagagttaaatcgcagcgcccgcaattactgaaaccctaacgctaccttcttgcagacatagctgagcaacgaaagctttgatcctctgacccaaaacccactacacgcattgggccgcatcggccggaccaagacccagttgggcccgccctacagctgcgacgacccaaccctaaacaaactctataagatcctaacacgatggtcatcgactaatcaaaacatggtagaagaagaagagtaagaagactaagaacctgaaaacgccaaaagcgcagatgaggaataggaagcttgtgaacaacaagaggtgcggtcaccataaaccctagaagagcatcaggatccagaaaccctgtcggctgcaaaccac

SEQ ID NO: 45779 - DNA, 415 bp, Glycine max
  Clone ID: LIB3139-093-P1-N1-A1
gagaagcactcatcattcttcgtttgtctaagatccgccttctctgaattgtaaaaatgtcgctcggagaaactgcttgttcatacgcagctctcatccttcatgaagatggaatcagtgtaactgccgacaagatcagcaccttgttggaaactgcaaaggttcaagtagatacctattggccaaccttatttgctaaacttgctgagaagaaaaatcttggcgatttgatagccaatgcagcaggcggtggtgcaccagttgctgttgcagctgcccctgttgctgcctcaagtggtggtggagctgctgctgccgccccagctgctgaggagaaaaagaaggaggaacctgaagaagagagtgatgatgatatgggatttggcttgttcgattagggacattctcaatatga

SEQ ID NO: 45780 - DNA, 371 bp, Glycine max
  Clone ID: LIB3139-093-P1-N1-A10
ctctgtctctctctctcggtctcgctcttcttctcatcaagcacagagttacagactcaccgatcttccgattctctttcgtcttggtttatgagctcgaaggagagacccactcttggtggcacgcggattaagacccgcaaacgaaatattgctgcgccgctggaccctgcagcattctcggatgcagaggtccagatttatttggataatgctggtgatctggaacttattgctaagagtattgaatcttcagaccttaacttttcaagatacggtgacaccttttttgaggttgctttcactgggggtcgtacacaacctggaactaccaagcctgttgagggggaccgccacccatactctattat

SEQ ID NO: 45781 - DNA, 421 bp, Glycine max
  unsure at all n locations
  Clone ID: LIB3139-093-P1-N1-A11
caaaaaatgacacattgtccaaaagggtgcctggatttggtgccacaataaacttgctctatggggaccaaacttgtggccagggatcagataatgaggccatgaacaacatcatttcacactatctttattaccttgatctcataggtgttggcagagaagaggcaggacctaatgaagtactctcatgtgctgaacaagctgcttttaagccccctggcttaccatcttctgccacaaattgagccttgccttgcttggctgaatatcttggtcgttccattcttgaattctgcataaaatttttaataaaggaggcaacaagttgacaagatacttcaattacttttggcctcaattgagagngaaacgagtttggagtggacactcattgttaaattgtgtatagattattttatct

SEQ ID NO: 45782 - DNA, 414 bp, Glycine max
  Clone ID: LIB3139-093-P1-N1-A12
atccttccctactttcccgagtatattgaattgaaaactcttcccgcaactcaaattgaaaaagaaaaaggaaaaaacataaccccattgctttgttttccattattggtgccaaagtttcaagctttttgtgcttcctctgcttccccagggtaagaatctgctttccctttcgagtttacagcgatttgattctggcccctttgtgattttatcctaatcagagaacttttctctactgggtggtttgattataggttttggtgggggaaatgatgggaagttagggcctggatctggaatttttcattatttctatcgaaaaattgttcctttattatgcatttttggataaatagtttcgtttgagcttgtttgtgcatctgagttagtgtctgattgttttctttcacc

SEQ ID NO: 45783 - DNA, 423 bp, Glycine max
  Clone ID: LIB3139-093-P1-N1-A2
gagaaacatggcttccttaagctccttagtgctgctccttgcagctctaattctatcccctcaagttcttgcaaactatgagaatcccccagtgtacaagcctcccactgagaaaccaccagtttataagcccccagttgagaagcctcctgtttacaaacctccagttgaaaaccccccaatttataagcctccagtagagaagccaccagtgtacaagcccccagttgagaaacccccagtgtacaagcccccagttgaaaaaccaccagtgtacatgcccccagttgagaaaccaccagtgtacaagcccccagttgaaaaacccccagtttacaagcccccagttgaaaaacccccagtgtacaagcccccagttgaaaaaccaccagtgtacaagcccccagttgagaagcccccagt

SEQ ID NO: 45784 - DNA, 381 bp, Glycine max
  Clone ID: LIB3139-093-P1-N1-A3
ctctccgtttctctatataaagttctcacgcgtcttcattcctctcattccctctgaattgttctcacccttcagatctctctctctcactccctctcccttccttccatcccaaccacaaggttgctgagaagacataaaaaatggtaaagatttgctgcattggagctggctatgttggtggcccaaccatggctgtgattgccttgaagtgtcctgagaacgaggtggtcgtggtggacattgctgctccacgaatcaacgcgtggaacagtgaccacctcccgatatacgagcccggccttgatgatgtggtgaagcagtgtatggggaagaatctcttcttcagcactgatgtggagaagcatgttgctgaggctg

SEQ ID NO: 45785 - DNA, 428 bp, Glycine max
  Clone ID: LIB3139-093-P1-N1-A5
gatttgaggtcaggcaagccccactcaaccaccacacctctcctcgttcacgctacccctttctgctcttcttctacctttcaagttttaaaagtataaagatggcagagacattcctatttacctcagagtcggtgaacgagggacaccctgacaagctctgcgaccaaatctccgatgctgtcctcgacgcttgcctcgagcaggacccagacagcaaagttgcctgcgaaacatgcaccaaaaccaacttggtcatggtcttcggagaaatcacgaccaaggccaacgttgactacgagaagatagtgcgtgacacctgcaggaacatcggcttcgtctcaaatgatgtgggactggatgccgacaactgcaaggtcctcgtcaacattgtgcagcagagccctgatattgctcagggtgtacac

SEQ ID NO: 45786 - DNA, 386 bp, Glycine max
  Clone ID: LIB3139-093-P1-N1-A6
gagaaatcatcagcattcacataggtcaggccgggatccaggttggcaactcctgctgggaactctactgcctggaacatggcatccagcccgatggcatgatgccaagtgactcctccttcggtgtagcccacgacgccttcaacaccttcttcagcgaaaccggatccggcaagcacgtccctcgcgccgtcttcgtcgatctcgagcccaccgtcatcgacgaagtccgttgtggcacttaccgtcaactcttccaccccgaacaactcatctccggcaaggaagatgccgccaacaactttgccagaggccactacaccgttggcaaagagatcgtagatctgtgcttggatcgcgtccgaaagctcgcagacaactgcact

SEQ ID NO: 45787 - DNA, 412 bp, Glycine max
  Clone ID: LIB3139-093-P1-N1-A7
agaaagttagcagattgtgattttctcaagagaaactttaagcagatgtctaatgttttgtgggtggctcctcaagacaaggcgagtttatggtcacaacttcattatgtttcgtgtaataatctggaaatgcaagaagcttatcttgtcaatctcgtaaatgtgttacgagaactgtatttgcacagtccagaggaagctcgccaattgagaaggaaagctctctctcgtattgaatggctgcaaaaagctgatgtgcctaccatagcacagattgaagagttccattcgatgcagaggatgatgaatgctcctgattcaaatgataatattgatctactgttgagcattgatttgttgggtttacaaggagcaggcatagctttttcaaacaagattgtttttgatgata

SEQ ID NO: 45788 - DNA, 410 bp, Glycine max
  Clone ID: LIB3139-093-P1-N1-A8
cttcatgttatctgacttttttccatctctctctctctcttccatgcttctttcccattacataactctttctctctctctgtgatcttatctccttttaattattcactcacccctttacactggttgatgcaaaaaaacatggtaccctctattgttggttgttgctgacactcttcatagtcgcaaagtaggtgactagcagtagcatgtgagtgaaggagcctgcagtttttttttatcgtactgtactatgtttgttatgtaatggtatcatggtaagctgaccaaagtgacggatttgttccatcactgccttcagggaaagatagtaactcatagcaggtccatacaaacatgatgactccaaacttgaacttggaacctgaaaatcattcagaaagcagcag

SEQ ID NO: 45789 - DNA, 381 bp, Glycine max
  Clone ID: LIB3139-093-P1-N1-B1
cgcgtcgctccgcaccagtttcaccgcacgaatatcttgttgtttggagcgatccgagaaaaactctgtaaacatgttgctttaccaggacctccttacaggtgatgagcttctctctgactccttccgttacaaggaaattgagaatggaatgctgtgggaagttgaggggaagtgggttgttaaaggagcagttgatgtagacattggtgcaaacccttctgctgagggtggaggagaagatgagggagttgttgatgcagctgttaaggttgttgacattgttgacacattcagacttcaggagcaacccgcattcgatatgaagcagtttgttaccttcatgaagaggtttatcaaggatttgactcccaagctcga

SEQ ID NO: 45790 - DNA, 420 bp, Glycine max
  Clone ID: LIB3139-093-P1-N1-B10
acatcattagctcgaagtttcatggacagggtgaagcttctagaccttgaaaaagttttggagcctttgttttattattggaagcaaaagcgtcaatctaaagaatcatttggtgacttcacaaacagaatgggatttgagaagcttaaagaatatattgagaaatgggagggtccagtggtagcaccatcacgccacaacctcaagctttttgctgataaggagacatatgaagcaatggatgaattagcaaagcttcaaaacaagaatgctcatcagttggccatggaagttatccgtaattatgttgctaccaaccaaaatggaaaggttgaataattccatttacttagcgaaagaagatgtatgtgatgctgctttatggttgacaggaagggtggataggctactgaacacaac

SEQ ID NO: 45791 - DNA, 404 bp, Glycine max
  Clone ID: LIB3139-093-P1-N1-B11
acaacatggatccgtgccccttcgtgcggatcctcgtcggaaacctcgccgtcaagtccccggcatcatcaaagccctcttctttctccggcaaagtccacccttcgagttcccccttcttctgcaagatcctactccagggacttgattcgaattccacttctcctagagtgtccagagtccctctgatatcagactccgacccacaccctcactccttcgccgccttctttgatttctccaaagcccaaatcttgaaagcctcgaagaagcccctgatgaagatctccgtctacaagggccccaccactccctcctgcgtcttcacctccgccaaactattgggcaaaggttcaatacccctcgatctcaccttgggcgagtcacgcccctgcacctttcac

SEQ ID NO: 45792 - DNA, 425 bp, Glycine max
  Clone ID: LIB3139-093-P1-N1-B12
gaggacgtcaagaacaaccccgacgccgccgtcttcggcaccgtcattcgccgccgccttcagctcatgatgtacaacaacatgtaccgcatcatgttcgaccggaggttcgagagcgaggaggatccgatctttcagaggcttatggccttgaacggagagaggagtcgcttggcgcagagctttgagtataactatggcgattttattcccatcttgagaccctttttgaagggttacttgaagatttgtaaggaggtgaaggagaccaggttgaagctcttcaaggattacttcgttgacgagaggaagaagcttggaagcataaagagcagcaataacaatgaacttaaatgcgctattgaccacattttggatgcccagagaaaaggcgagatcaacgaagacaacgttctttacattgg

SEQ ID NO: 45793 - DNA, 419 bp, Glycine max
  Clone ID: LIB3139-093-P1-N1-B2
cagcacaaagcgggttactgtctgttcaagctaccatctctctctctctttcttagagcctccttgccagaagttaaaatggcccaagaaactttcctattcacatctgaatcagtgaacgaggggcaccctgacaagctctgtgaccagatctccgatgctgtgctcgatgcatgcttggagcaggaccctgacagcaaggttgcctgtgaaacctgcaccaagaccaacatggtgatggttttcggagagatcacaaccaaggccaacgtggactatgagaagattgtgcgtgacacatgcaggaacattggttttgtctctgatgatgttggtcttgatgctgacaactgcaaggtcctcgtcaacattgagcaacagagtcctgatattgctcaaggagtgcacggccacctcac

SEQ ID NO: 45794 - DNA, 424 bp, Glycine max
  unsure at all n locations
  Clone ID: LIB3139-093-P1-N1-B3
actgaaaatagggtgcatttttgtaattaaaagtgcaaacacaaacattttttcaaacctaacagccccttaactttcaacctagtatcaattatcatattaataatacatgattttcataggttgactctgtacttggagatcaatatccaactattgaagacatgaagaaactcaaatatacaacccgagtgatcaatgagtcattgaggctntacccacaaccacctgtgttaattcgccgctctcttgaggatgatgttcttggagagtaccctataaagagaaatgaagatatctttatatctgtctggaacctacatcgcagtccaaaactgtgggatgatgctgataaattcgaacctgaaagatgggcattagatggaccaagtcctaatgagacatatcaaaacttcaaatatct

SEQ ID NO: 45795 - DNA, 418 bp, Glycine max
  Clone ID: LIB3139-093-P1-N1-B4
tgatttgaggccaggcaagccccactcaaccaccacacctcttctcgttcacgctacccctttctgctcttcttctacctttcaagttttaaaagtataaagatggcagagacattcctatttacctcagagtcggtgaacgagggacaccctgacaagctctgcgaccaaatctccgatgctgtcctcgacgcttgcctcgagcaggacccagacagcaaagttgcctgcgaaacatgcaccaaaaccaacttggtcatggtcttcggagaaatcacgaccaaggccaacgttgactacgagaagatagtgcgtgacacctgcaggaacatcggcttcgtctcaaatgatgtgggactggatgccgacaactgcaaggtcctcgtcaacattgagcagcagagccctgatattgctc

SEQ ID NO: 45796 - DNA, 416 bp, Glycine max
  unsure at all n locations
  Clone ID: LIB3139-093-P1-N1-B6
ctcgaaaacagtgttccaaaatccaaacacactctgtctccccatggcgttgaacaatggcgtgcccgccaccggcaccggcctcatcgtcagcttcggtgagatgctcatcgacttcgtccccaccgtctctggcgtgtccctggccgaggcccctggctttctcaaggcccccggcggcgcccccgctaacgtcgccatcgccgtgtcgcgcctcggcggcaaagccgccttcgtcggcaagctcggcgacgacgagttcggccacatgctcgccggaatcctcaaggaaaacggcgttcgcgccgacggcatcaactttgaccagggcgcacgcaccgccctggccttcgtgaccctacgcgccgacggggagcgtgagttcatgttctacaaaaaccncagcgccgacatgc

SEQ ID NO: 45797 - DNA, 419 bp, Glycine max
  Clone ID: LIB3139-093-P1-N1-B7
ttccacttccaccgaccaaaacgcgcaacacgttgttattaaaacgacaccgaaactaatgggcgtcttcagcgaaaacccgaatccggacccggttgtgatccgccaggtttgggcttcaaatctcgaatccgaattccaactcatccgcgaactcatcgaccactatccttttatctcgatggacacagaattccccggtgttgttttccgaccacacctggaccccacaaaaccctacaaccaccgcaacaacaatcgcaaccgccactccgaccactaccgcctcctcaagtccaacgtcgacgctctcaacctcatccaggtcggtctcactcttaccgacgccgccggcaaccttcccgatcttgccggaaaccgctccatctgggaattcaacttccgtgacttcgacgttg

SEQ ID NO: 45798 - DNA, 415 bp, Glycine max
  Clone ID: LIB3139-093-P1-N1-B8
gcctatcccttttattatcatatgacaccaccactgtatctgtatagttaaaattaataggttagatgttttgaagagaatcttatatagtggctgtgtcatctactaaattttagaatattattaggattattattcgcagagggtggtgtaacttttttgataaattcagacaagtttctagctacttgggtttttgatatatagtataatgtatacctttgtaatttcattggcttttccagcaacacacatcttgttagtatagtttgttggaagtaagagcatattaaggaatgtgaatgagtatgacacaagtttaatctacttctagctgccatcacgttttataatacttttttttcctgttaaatactacaataatataattatcgtagtcttaggaactagttta

SEQ ID NO: 45799 - DNA, 419 bp, Glycine max
  Clone ID: LIB3139-093-P1-N1-B9
ggatttccatggaagtctcaaaagaagaagctcgagtggcacccgcaccggccctagtggcgatgctgccatcccctggcatgggccacctaatcccaatgatcgagttcgcaaagcgagtggtgtgctaccataacctggcggtgagcttcgtgatccccactgacggcccaccttcaaaagcccaaaaggcagttctggaggcccttccggactcaatttcccacaccttcctccctccggtcaatctctccgacttcccgccggacaccaaaatcgaaaccctgatctcccacaccgtcctccgctccctttcttccctccgccaagcattccactccctctccgccacaaacaccctctccgccgtcgtcgtagacctcttcttcaccgacgccttcgacgtcgccgccgaattc

SEQ ID NO: 45800 - DNA, 412 bp, Glycine max
  Clone ID: LIB3139-093-P1-N1-C1
ttaaaagttctgtttgtctagatagttatttattcaagagttttcataagggaccatgctaaggccctaaaattatttgcttatgaaatcaagttcatttatacacacaacatacataatgttattattgcatgcaaaactcatgtctattaatccaatattatgcttgaattcatatagtatggcagaacgtttttagtttctgagattctgttgatatatattgtcattcatgtgttgattccataaatctaaatgtttaatgctatatttcaccatttttttttgaatttatatagtacaactgttagtggttgtcaacatagtcatacatgaaagaaattgtcaaatcttagctttatgttagcatttacatttcttggcctgatgattctcatctctttgatcactg

SEQ ID NO: 45801 - DNA, 391 bp, Glycine max
  Clone ID: LIB3139-093-P1-N1-C10
aggatatgcgaagcattactttaggggctctaaatctaaaagctggctagcttggcacaacatgaccataactgatggcattgacataactagtgcatctttgcaatctataaagctagccgattgcgactctctaatgagaaactcgatgcataaacttgaggcctcgcgggtgagggctgatgacaaggcgagttgatggacacaacttgatgctgaagagagtaataagctggaaaggcaagaggcttatgttggcaacctggtgaaaggggtacgagaattgcctttgctcagtgcagtggacgctcgtcatttcagctagtaagctctctctcaaggcgtatagcttcagctagctgaggtgcccaccatagcacatatcgaagag

SEQ ID NO: 45802 - DNA, 412 bp, Glycine max
  Clone ID: LIB3139-093-P1-N1-C11
ggctgggaaacccccgaagtcggcgacgaagtccaagttcattacacggggactttgctcgacggaactaagtttgattcgagccgcgacagggattctcccttcagcttcacgctcggacaagggcaagtaattaaaggatgggatgaaggtattaaaaccatgaagaaaggtgaaaatgctattttcaccatccctcccgagctagcttatggtgaatctggttcccctccaactattcctcctaatgctacactccaatttgatgttgagctgctgtcatggactagtgtaaaggacatatgcaaggatggcggtatatttaagaagattgttactgagggggacaaatgggagaaccctaaggatcctgatgaagtattggttaagtatgaaagtcatctagaaaatg

SEQ ID NO: 45803 - DNA, 422 bp, Glycine max
  Clone ID: LIB3139-093-P1-N1-C12
agtaactcgttcttcttcttttgttgttctgagtttgagtttgttttttctctcacctgaaaatgtcttgctgcggaggtaactgtggttgcggaagctcctgcaagtgcggcaacggctgcggaggctgcaagatgtacccagacttgagctacactgagtcaaccaccaccgagaccttggtcatgggagtggcacctgttaaggctcaatttgagggtgctgaaatgggtgtgcccgctgagaacgatggctgcaaatgtggaccaaactgctcctgcaacccctgcacttgcaagtgaggtgttgggagagcaagcttcaagcagagatagcccttaattaggaataatgataaactattaatgtgtagctaaaaacttatgttttatgtctgagatggttttcgtgcactctggtgt

SEQ ID NO: 45804 - DNA, 187 bp, Glycine max
  Clone ID: LIB3139-093-P1-N1-C2
gaggattccgcatgatctggaattcgtgttttctttcgcttgttcctttatcgaatcaaacaaacgaacaagcgaaagaaaattaggcatgaccctcttgttgagaatgctctgcctatatgaaaagacccacacctcttttaatagccgaaatgacgtgtgaagtgagggttattttaacataaaa

SEQ ID NO: 45805 - DNA, 415 bp, Glycine max
  Clone ID: LIB3139-093-P1-N1-C3
atagattcgatgctctaatctatctctttttcttcttatttaaaatttcatcttcaattcaattctctttctgtcaccgttcctcattcgcatggagaacgacactgccgccgccgttaacaataacaccaccgccaccgccaccgctaaagcaggttctggaggagtgaaatcgaacaaccataacctagaagaggagcattccaatttgaatggcgaggagcacatggcagaacaagtggaggcagaagaagaggaagatcgagaagccgatgatggtgaaggagaacaaactggatctcgtcaaccttccagaacccctttcactaatctcagccaggtcgatgctgacctcgctctcgctcgaacccttcatgaacaggaaagggcatatatgatgctgagaatgaataat

SEQ ID NO: 45806 - DNA, 201 bp, Glycine max
  Clone ID: LIB3139-093-P1-N1-C4
gggcgatgggattgagttcatgttgtttatacggaggagctccatatcaaggtcaagaacttaagctgaggagaggtgttgatattgtcattggcacaccaggccgtgtgaaggatcatattgagaagggaaatattgacctgagccaactaaagtttcgtgttcttgatgaagccgatgaaatgctgaggatgggttttg

SEQ ID NO: 45807 - DNA, 413 bp, Glycine max
  Clone ID: LIB3139-093-P1-N1-C5
tgtgattcgtggagatttgacggcacacgcattatcaaaatccttactgtgtttctttcgcgggcattgactcttttctgttcggggcttcaggatcttttgaattctgcaggtctgaaatatagatataccaatgatgatgcatcagaggataatggcagagtctatatctagcttatggagtgcagtcacgttaaccaaagagtgttgcgaaataaattatgcttattcgggttacattgctgaattgtttaatacaatatccaacatttcaacaatactcttggctctgattggtcttataaatgcattaagacaacggtctgagaaaagatttagagttcttcatgtttcaaatatgacacttgccattggaagcatgttgtaccatgccacgctgcaacatgtgcaac

SEQ ID NO: 45808 - DNA, 410 bp, Glycine max
  Clone ID: LIB3139-093-P1-N1-C7
caaacacaacacaacacagcataccgtgtttcattttctctcacacacaaacctccttcgttttcatttacttctcaagaggtataactactatttttcgctttttttttaaaaaaaaaattgattaaatcttttgccatgggaacccagattttgcgacctcaggactgcttggtagaacgaatcaaggctcctccggctgacttttcccggcggaggagttccggtaattactgtaattattattactacaacaacaacaacaaccatgtcgccacttccaggtcgtgccggaagcctgttagccgacccgaccaaaggaaacgggctgctcccggttctgcccagccggtggtggcggaagccgcggcggcggtgttgaagagaccgagccgtgatgattcaagggt

SEQ ID NO: 45809 - DNA, 245 bp, Glycine max
  Clone ID: LIB3139-093-P1-N1-C8
aaagaatgctattctcatgaatatgccaaatgctgttctttcaatgtggagatattttgttggagatctcgtctttgaagattctaagatgacttctccctacattaaatgtacagtctctttcttcatagcatttggaaatttggctgatgacaccatcaattttgaggcttttccccacaagctggtgcagtttggagagattcaggaaaaaagtgttttgataatttcccaagaggaatttt

SEQ ID NO: 45810 - DNA, 98 bp, Glycine max
  Clone ID: LIB3139-093-P1-N1-C9
aattaggcatgaccctcttgttgagtatgctctgcctatctgaaaatttccacacctcttttaattgtcgtaatgatgtgtgaagtgtgtgttatttt

SEQ ID NO: 45811 - DNA, 421 bp, Glycine max
  Clone ID: LIB3139-093-P1-N1-D1
ggcacttttggcattgttcatccagaggtattaaacaactttgacattcctgatccctgctcctttgttgaacttaacatcgaaagtttcctataaagattatctgtatcaattggtagggaatcaagatgctcaactgcttgagtgactatatgggaatcaaaacacttcgtggaatttagaactacactatagctggggagcggaatgttactgatgtgccctaaatttgggtgtttagtttgattatatacccgtaaaattttcctaagtttctccgttgttaaatgtttagaacatcagaagctacgaattggttagtagggataatctcgaccataaattatagttattttttaaaatagttgattttggccttaaaaccaagatagcaaggatatttattcgtttgaaaattttg

SEQ ID NO: 45812 - DNA, 414 bp, Glycine max
  Clone ID: LIB3139-093-P1-N1-D10
cgcctattgcagccttcaggaatagaaaactacaactccctagtaaccccttggatctctatgagcacaacctccaagattatgttaatagagggaaacgccaagtctatcacactcccactctgaggattttggacaaggctgcaattaaagaagacagtgctggctccacatgagtaccattgacagtgccccaagtagaaggagctaagcttatattcggcatggtccttgtatggctagtgacaccgatttcaagcaccatttgggcccaaatcaacactctttttgtgaaacaaggcaccacttttggacagatacattggccctcatttcaaaattccatcagcctcttttggaagttttgtgacactcttcatgcttcttttagtgccaaagtaagactggttattc

SEQ ID NO: 45813 - DNA, 415 bp, Glycine max
  Clone ID: LIB3139-093-P1-N1-D11
tgccaattgcagccttcaggaatagaaaactacaactccctagtaacccctcggatctctatgagcacaacctccaagattatgttaatagtgggaaacgccaagtctatcacactcccactctgaggtttttggacaaggctgcaattaaagaagacagtgctggctccacaagagtaccattgacagtgtcccaagtagaaggagcaaagcttatatttggcatggtccttgtatggctagtgacactgattccaagcaccatctgggcccaaatcaacactctttttgtgaaacaaggcaccactttggacagaaacattggccctcatttcaaaattccatcagcctctcttggaagttttgtgacactctccatgcttctctcagtgccaatgtatgactggtttttcgt

SEQ ID NO: 45814 - DNA, 427 bp, Glycine max
  Clone ID: LIB3139-093-P1-N1-D2
accactacagttgctgccctaacgactatcccatctgcaacacttatgctggaacttgtctcaagagcaagaacaacccattcggagtgaaggcattgaggcgtactccggctaaaccccattggacctttgggcgtaagaacaaggtcagcagtgcttaagcagataaaggaaatgtgaacgtgcaggaaggagccaatgatgaagtaaatgaaagacgaagaattaaaacaccagctgatacacttcccctttaccttcacataaatttctctgtgccattttattatgatacaaattgatactattctgtatcaaatttcagtcagatattggctgtgtacatagggttatattattgatgcactgtatttgtattcaaattccaattccaaatggcgaacatatttgattgctagtagtttcc

SEQ ID NO: 45815 - DNA, 197 bp, Glycine max
  Clone ID: LIB3139-093-P1-N1-D3
tgacaatcccaaacagtctacagtttttgatattctcttgggaatctctcaagattttgaaattgctggtaatactcttatgccagctttttctgttccacaggctactgccagatcttctgaaaatgcggaatcctctgcatgatctggaatttatgttttctttcgcttgttcgttcgtttaattcaaataagca

SEQ ID NO: 45816 - DNA, 419 bp, Glycine max
  Clone ID: LIB3139-093-P1-N1-D4
cacactgtgtttgtgaaactccctctcacacacaagtcacaaaaacaacttgtgttgttccaatggcatcagcaacaccccttttgaaagatgagctcgacatcgtgatccccacgatcaggaatctggatttcttggagatgtggaggccattctttgagccttaccatctcataattgtgcaagatggtgacccttcaaagaccatcaaggtccctgaaggctttgactatgagctctacaaccgcaatgacatcaacaggatccttggccccaaggccaattgcatctccttcaaggactctgcatgccgttgctttggctacatggtctccaaaaagaagtacatctacaccattgatgatgactgctttgttgccactgatccatctggacacaagattaatgcacttaaacag

SEQ ID NO: 45817 - DNA, 417 bp, Glycine max
  Clone ID: LIB3139-093-P1-N1-D5
cttccattgcagttgttcgtctttgaaggttgttgccggaaatgaattctatggcggtgagacttgtgaagcatctccaactctctgcaccgacctcatcttcattcggtggtgtgccgagaagtggagcgtcatggtattcgacctctctatctggaggtgaatatcagccttcacaagataatgttgcaccaaagaatgaagcattggatggtgaacttgatgattttcttggcgaaaaggccgagctacagttgcaaggtgtggatcccaagaagggttggggatttcgtggcgtgcacaaggcaattatttgtggaaaagttggccaagcccctgtacagaaaatactgaggaatggtagaaatttaaccatctttacagttgggacagggggcatgtttgaccagagaattc

SEQ ID NO: 45818 - DNA, 420 bp, Glycine max
  Clone ID: LIB3139-093-P1-N1-D6
ctttctagctggtcataatatcaccattactgatggtattgacaaaactagtgcaactttgcaatttagaaagttagcagattgtgattttctcaagagaaactttaagcagatgtctaatgttttgtgggtggctcctgaggacaaggcgagtttatggtcacaacttcattatgtttcgtgtaataatctggaaatgcaagaagcttatcttgtcaatctcgtaaatgtgttacgagaattgtatttgcacagtccagaggaagctcgccaattgagaaggaaagctctctctcgtattgaatggctgcaaaaagctgatgtgcctaccatagcacagattgaagagtttcattcgatgcagaggatgatgaatgctcctgattcaaatgataatattgatctactgctgagcattga

SEQ ID NO: 45819 - DNA, 418 bp, Glycine max
  Clone ID: LIB3139-093-P1-N1-E1
gtcatttaatccaaacccgtgttctgatgcatggagtttggaatttctgaagcgtactggatttcattgcgatatcatttgtgtcactggatggactgccaccccaatgcaggatgttcaggttacaattgattggtttatttcctctcaagaatgtgttcccaggacctattgtgttttaaatccacaaaatccttttgtgttaaataggtggatgggaaaattgactttcccccagggcacttcccgaagtgttaagagaatgcctctttctatagggggaggagctggtgcaaagaatgctattctcatgaatatgccaaatgctgttctttcaatgtggagatattttgttggagatctcggctttgaaagttctaagatgacttctccctacattaaatgtacagtctctttc

SEQ ID NO: 45820 - DNA, 375 bp, Glycine max
  Clone ID: LIB3139-093-P1-N1-E10
ggcaaatgggaaaagagaagagttcaggcaggattatcgaaatttgaggaaggctttatgtatgggctatgcgaatcagctggctgaaagaaagatgcatcacaatggttatcgaactttgggtttccaagctcaagtagtccaggtgcatccgtcatctgtgttgagtcttgatgacctggggaagttcccagactatgttgtgtaccatgaactaattgctacgccacggccgtacatgagaaatgtatgtgctgttgagatgagatgggttatacctattattaacaagctcaagagcctggatgtgtacaaattaaggtaggtaaactatcatggcattgatgtgtacagtttttttgctttttcattttt

SEQ ID NO: 45821 - DNA, 336 bp, Glycine max
  Clone ID: LIB3139-093-P1-N1-E11
ggacactgttctcaggaaggagacgcggttcatgtcaaagaagccggcctcaatcataatctcgaagttggaagaagtttgtaagcagcttcgtttgaaagtaaagaagaaagatggaggcttgctcaagttggaaggttccaaagaaggcaggaaagggactttgggtgttgatgctctgatttttgagattacccttcactttctaatatgttgtacttagttagatcaacgcctgacaccttggaattccagtatgtttttttattcaggacattactccacttttttaggactttgatagttcccggcatgtcgtactaccacatttttgat

SEQ ID NO: 45822 - DNA, 420 bp, Glycine max
  Clone ID: LIB3139-093-P1-N1-E2
tgttatttgaaaactgtggaggctcctcaggttcctccagagctgtatgattcttttatagcagctattgacaaaggaaacataagaaccatgccaaatagaagcatgcctgcctcaccttatcccacaccaggtgcacttctaatgggagacgccttcaatatgcgtcaccctttaactggaggaggaatgactgtggctttatctgacattgttgtgctaagggatttacttaaacctcttcatgatctgcatgatgcttctgctctttgcagataccttgaatcattctacaccctacgcaagccagtggcatctacaataaacacactagctggggcattgtacaaggtcttttgtgcatctcctgatccagctagaaaggaaatgcgccaagcatgtttcgattacttgagcctt

SEQ ID NO: 45823 - DNA, 425 bp, Glycine max
  Clone ID: LIB3139-093-P1-N1-E3
ctcgagccgattctgctcgagggatgggtgcagaagcaaatggcggcgagaagcaattgaaatttctgatctacggtcgcagcggttggattggtggtctactgggtaagctctgcgaagagcgcgggatccaatatgtgtacggcaccggcagattggagaaccgctcgtcgttggaggcggacatagcggctgtgaagcccagccacgtgttcaacgccgcgggtgtcacgggtagacccaatgtggactggtgcgaatctcacaaagttgaaaccatccgaaccaacgtcgtcggcactctcaccctcgccgacgtctgtcatcataaaggccttatcctcatcaactacgccaccggctgcatctttgagtacgattctttccacactctcggatccggcatcgccttcaaagaacacgac

SEQ ID NO: 45824 - DNA, 417 bp, Glycine max
  unsure at all n locations
  Clone ID: LIB3139-093-P1-N1-E4
tttgaatacactgtgccgatggccacgacggaagggtgccttgtggcgagtaccaatagagggtgcaaggccatctatgcttctggtggggccagcagtgtggttttgcgggattgcatgtcgagggcacctgttgttagattctccactgccaaaagagctgctcagttgaagttcttccttgaggatcctctcaattntgataccttgtcacttgttttcaacaggtcgagtagatttgcaaggctccaaggtattcagtgagctatggctgggaagaatgcttatttgagattcacttgtagcacgggtgatgccatggggattgaacatggtttccaaaagggtgcaaaacgtccttgattttttctagaatgatttttctgacatggatgttatttggatttttggtaatta

SEQ ID NO: 45825 - DNA, 421 bp, Glycine max
  Clone ID: LIB3139-093-P1-N1-E5
ctcgttttttgctagaagcaggaagagaagagaaacaaacaaaccacaaaataatcaattgagctacttactataagatttagatctcccaacagagagtttcacaaaattgccaagtacccttttcaggatcaaggaagagaatcaagaaccaacaaaaggtgttgttcattgttgtagttgtttgtaactgtagcaacaggaagatggttggaaagttggttgtggtgaggcttgtgttggccatatctgtgttgagctctctccttttgacaaccttggcacagacagcatgcatgggccaggccttcaccgaaaacaaggtttttaccacatgccgtgatctttcttacctattctcgtaccttcactggaccttttgccaggccacagggaagttggacatagtctttagacacac

SEQ ID NO: 45826 - DNA, 216 bp, Glycine max
  Clone ID: LIB3139-093-P1-N1-E6
aaaaaacttggacggtgaaattggaaggttttccgggatcccaaggccgaatcttggttcaatttacgaaaagagaagagagaggtacaacaacacccgttgttgaatctttaagctgaatcaaatcatatagagagagaaagagagagacccggataggaaaatagcgtttagagagagataggtgatagtgtggttgcttaaagtctgggtctt

SEQ ID NO: 45827 - DNA, 356 bp, Glycine max
  Clone ID: LIB3139-093-P1-N1-E7
cttagttgtcaagttggaatcaacccatactccatggaatggactggtttggccaatagattactgagtaagggcaatgatattctgtgttgcgattatgctagttttgatggtttgattaccaagcaagttatgagcaagatggcagaaatgataaacagtctttgtggtggtgatgaaaaattgatgcgtgaaaggacgcacctgctgttggcttgttgttcaaggatggcaatttgtaagaaagatgtttggagagttgaatgtggaatcccttctggatttccgctcacagttatttgcaatagcattttttatgagatgctcatttgatatagctatgaaaaattactgcg

SEQ ID NO: 45828 - DNA, 418 bp, Glycine max
  Clone ID: LIB3139-093-P1-N1-E9
gaaaactgtctttcccccagggcacttcccgaagtgttaagagaatgcctctttctatagggggaggagctggtgcaaagaatgctattctcatgaatatgccaaatgctgttctttcaatgtggagatattttgttggagatctcgtctttgaagtttctaagatgacttctccctacattaaatgtacagtctctttcttcatagcatttggaaatttggctgatgacaccatcaattttgaggcttttccccacaagctggtgcagtttggagagattcaagaaaaagttgtattgaaattttcacaagaggaatttcttacagcttggtcaactcaagtgcgtcctgcaacaactctgttagctgatgggtgtccatatttgtatgctatggtgcatgatagttcagtgtctac

SEQ ID NO: 45829 - DNA, 418 bp, Glycine max
  Clone ID: LIB3139-093-P1-N1-F10
ctttcttactttctctcactcaccaaatagttttctcacaaaggaggaagaatggcatctttcatttcactctctttgttgcttctctttctcaattaccccttcctttccctctcaaccaaccctgaagggaacgctctgcatgctttgagaagcaggatttctgatcccaacaatgtgttgcagagttgggacccaacactggttaatccctgtacttggttccatgttacttgtgactccaacaatcatgtgattcgcttagacttgggcaactctaacgtttctggaactctgggcccggaacttggccagctacagcatctgcagtacttggagctctacaggaatgagttaacagggaagattcctaaggaacttggtaacttgaaatcacttattagcatggatttgtatg

SEQ ID NO: 45830 - DNA, 218 bp, Glycine max
  Clone ID: LIB3139-093-P1-N1-F11
ttgatttgttgggtttacaaggagcaggtaaagcttttccaaacaagattgtttttgatgataagcttgtgttggctaacacacaagaattctttgatggaaattttccagaggattcttggttaccaatttttgagaattgtctctatcctgtaagtcaattaccttcagaagctgtcgttgtaaatgttacatgtggtagtggacgtggtggttta

SEQ ID NO: 45831 - DNA, 416 bp, Glycine max
  Clone ID: LIB3139-093-P1-N1-F12
ggattgatgtctctggttcatctgctagagatgttgccaagcagctgaaggaacaacaaatggtaatgcccggacaccgtgagtcaaacttgcagaaagagctgaatcgatacattcccactgccgcagcatttggaggcatctgtattggtgccctgacagtgttggcagatttcatgggggccatcggttcaggaacaggaatattgcttgcagtaaccatcatctatcagtactttgagacatttgagaaggagagagctagcgagcttggcttctttggtttctaagttctgccaatgagctctcccacaccccttgtttgagggatcgttatacttgtaggtcgtttaacatcgtaagggaggacatagtctaatttgagggatcgttatacttgtaggtcagttaacatc

SEQ ID NO: 45832 - DNA, 424 bp, Glycine max
  Clone ID: LIB3139-093-P1-N1-F2
cttactaatcctgaaaagtgaaaaaaacagtgagtgataattttgctttgcgtgtttagcgggagagcgaagctgaagagaatatttttgtttctcaagccttcgaaatccagcgatctctcattcttcaatggccaccctctccgcatgcgcttctcctccatggccaaaccctgattctcccaattcaaatccaaaccctaatttcctccccgaccaatctcaaaccctcgacttcgactccctcatgcctccgcaacccgaatccccaccgcccaaccatcaccactcccccgacgcctctccaccggaatcctccccgtcgccgtcgcctccgtcgatcctctacctctccttcaaccaggaccaggcctgcttcgccgccgccgccgacaacggcttccgcatctacaactgcgacccc

SEQ ID NO: 45833 - DNA, 424 bp, Glycine max
  Clone ID: LIB3139-093-P1-N1-F3
gtaaaatccaaaccaaaatggcggaaaataaagccattgaagaagctcagagcaagttccgttcagagttccttcaagttctgcgtagtaggcgacccgctcaagttccattaacagtcgaattcgcgaagccaggggtgaatcctttgcatcagaactctcctccatcgatcgaagagatcaagataatggagtcgtgtccgagaactgatatagagaaccttgaagacttgctcgaggaggagaatctctatttgaatatagaggaaggagagcaaggacggttgcctttgttgattttgaagttgaaggaaagcgataagcagagaaaaaggcctgcagttgtttttcttcacagtacgaacaaatacaaagaagtcctacgtccattgcttaaggcgtatgcttcgcgaggatatatagc

SEQ ID NO: 45834 - DNA, 383 bp, Glycine max
  Clone ID: LIB3139-093-P1-N1-F4
gtaaaatccaaaccaaaatggcggaaaataaagccattgaagaagctcagagcaagttccgttcagagttccttcaagttctgcgtagtaggcgacccgctcaagttccattaacagtcgaattcgcgaagccagtggtgaatcctttgcatcagaactctcctccatcgatcgaagagatcaagataatggagtcgtgtccgagaactgatatagagaaccttgaagacttgctcgaggaggagaatctctatttgaatatagaggaaggagagcaaggacggttgcctttgttgattttgaagttgaaggaaagcgataagcagagaaaaaggcctgcagttgtttttcttcacagtacgaacaaatacaaagaagtccta

SEQ ID NO: 45835 - DNA, 426 bp, Glycine max
  Clone ID: LIB3139-093-P1-N1-F5
tgaaaagctttctagctagtcataacatcaccattactgatggtattgacaaaactagtgcaactttgcaatttagaaagttagcagattgtgattttctcaagagaaactttaagcagatgtctaatgttttgtgggtggctcctgaggacaaggcgagtttatggtcacaacttcattatgtttcgtgtaataatctggaaatgcaagaagcttatcttgtcaacctcgtaaatgtgttacgagaattgtatttgcacagtccagaggaagctcgccaattgagaaggaaagctctctctcgtattgaatggctgcaaaaagctgatgtgcctaccatagcacagattgaagagttccattcgatgcagaggatgatgaatgctcctgattcaaatgataatattgatttacttgtgagcattg

SEQ ID NO: 45836 - DNA, 209 bp, Glycine max
  Clone ID: LIB3139-093-P1-N1-F6
gccatgtcggcactttgtgaggcaactggtgctgatgtctcccaggtgtcacattcaatcggcacagactcaagaattggaccaaagttcctgaatgccagtgttggttttggaggatcatgcttccagaaggacatattgaacttggtctatatctgtgagtgcaatggcctttctgaggtggtcaatttctggaaacatggtatcat

SEQ ID NO: 45837 - DNA, 418 bp, Glycine max
  Clone ID: LIB3139-093-P1-N1-F9
atggattgctccagaagtacttcttaattattgaaaactaaacaatttattaattttcctgttgggtggtccatattagtaatttatgatttcatttcttgtttggtggcagctttacagcactgttactctgagacaaggggagaagaagcattacaaccataaggtggatgcctatagctttgctatagtgttgtgggaactcatccataataagttaccttttgaaggcatgtctaatttacaggctgcatatgcagcggcatttaagaatacaaggccaagtgctgatgagcttcctgaagatttagctctgattgtgacctcttgttggaaagaggatccaaacgatcgacccaattttagtcaaataatagagatgctgcttcgatatctaactactatttcaccatctgag

SEQ ID NO: 45838 - DNA, 422 bp, Glycine max
  Clone ID: LIB3139-093-P1-N1-G1
ctctcattcacctcacaacttcatcaaaccaaaaaacacaacaaaagaaagaaagaaagaaacaaagagttccttgctttgtagtaagatatatcatcaaaaatggttttgtcttggactagaagaaacgttttccgccgtgcaaagaaggagaaggaacaaagtcaactattagaagttgaggttgtgattcccaaccactttcgctgtccggtgagtttggagctgatgacagatccggtgactttatcaaccggcattacctacgaccgtgtgagcatcgagaagtggatcgagggagaaaacagaacctgccccgtcaccaaccaggtgctgacaaccttcgacctcatccccaaccatgccattcgcatgatgattcaagattggtgcgttcaaaacagttcttatgggattgaaag

SEQ ID NO: 45839 - DNA, 401 bp, Glycine max
  unsure at all n locations
  Clone ID: LIB3139-093-P1-N1-G10
ctgatatcgatgagaatatcattaactgtccacggagggcaactggctatactgtatctctactgattttgaaatcacgggaaggctaanagagacattatgactcgctcacacactacgggctgataatatttgatttggcagtaacctcagcatgatactggtatgtatgcaactgtttgccttgttcttcgagaggaatgcaataaaggctatatggcgcgaccctgttggcaggggttcgatacctatcaagatcaatgccaccccactgtattcgtcgccaaagacctttgacgtgccggcctcttgtacttcatttccaacgttccaaaaaatggaagacccccgctggtgtagtcgctgatcttcgaagcgagcgcgagaacggtgctccccgt

SEQ ID NO: 45840 - DNA, 316 bp, Glycine max
  Clone ID: LIB3139-093-P1-N1-G12
cttgttcccaaccactactacttactcacagcagatgtcaattgcatcgatgcgcatggctaccatcggtagcatcaaggcccgccagatcttctacagaagtggcaatccaactgtcgtggaggatttgacttgctccgacggcacttttgacagagctgctgtgccaagtggcgcatacactgggattgatgaggccctcgaattgagagaaggaagatctgactacctcggcaagggtggatgataggctgctggcaacgcgaacaccgccatcggccccgacttgattggcggaggccccactgagcaaact

SEQ ID NO: 45841 - DNA, 407 bp, Glycine max
  Clone ID: LIB3139-093-P1-N1-G2
ctcctccattcctccctcgcttctcatatcccctaccccaaagcaatttccgtatgttccgctaatttaatattcctctcttttttaaaaaaaataaatcatcatccaggttttgaatgcgtttatgttatttgtaggatttgaaggatacaattgtgaagggatttgggttcacggcggaagatgatgttacgattacggggttcgatcctcgagacgccgaggtagggcattccgtggagtaccaattcgacctcgaaatcgatcacaaggttattcccttcaagctcctcgaagacgtcaaacactgggattacgtcgatcttcccattttccgggccgaggcccaatccggtttggtccctaaacgggcttcggctgacgggcttcccgttttggctcccttc

SEQ ID NO: 45842 - DNA, 396 bp, Glycine max
  Clone ID: LIB3139-093-P1-N1-G3
ctctctctttattaattaacactgtccgctacgtataaaaggggcgtccaattcagacacaactgcgtaaattacaaacggaaaacggtacggtgcgccgtcaccagcgccgacgcatctcctccgccgtcaacgtcgttggccaaggaacctcacaaatacttcgaccacgtcattatcaccgttcgcgccggtgacggcggccacggcgcggtgctgaatcagcagcagcagcagcagcagcagcagcagcaaggaaaaacgaagttgaagaaagggaaaggctcgttgaagagggacttcgacggatccctcattctccccatgggtggccacggaggtgacgtcgtgctctacgccgacgagttcaaagacacgctgctggagtttcacaac

SEQ ID NO: 45843 - DNA, 344 bp, Glycine max
  unsure at all n locations
  Clone ID: LIB3139-093-P1-N1-G4
aaaaacactaacttcccccaaaggtcaaaaaccttccctcaaaggtctgctgctgcaactcaattctagcttcacttggacagttggattcactctccgattccctctctcgtagtcaatgcggaggccggcgccgccggcgaacgccgggctgggtatagccgccatgtcctatatcaccgtcgactacctccgccacctttccccggcgtggcactcgcgtctgcaaccggcgctgtggtccctcctcgccctcaccgccgttttncgcgtccccccctaccggcactggtctgccgagttccggtcggcgattccgttcatcgcctccatgctcttcatgc

SEQ ID NO: 45844 - DNA, 421 bp, Glycine max
  Clone ID: LIB3139-093-P1-N1-G5
gaagaacatcacaggacttgtggagtggtacggtaagaacgcgaagctgagggagctggtgaaccttgtggttgttgctggagacaggaggaaggagtcaaaggacttggaagaaaaggccgagatgaagaagatgtacggcctgatcgagacctacaagttgaacggccaattcagatggatttcatcgcagatgaaccgtgtgaggaatggagagctctaccgcgtgatctgcgacaccaggggtgctttcgtgcagcctgctgtatacgaggcttttggtttgacagtggttgaggccatgacttgcggcttgccaacattcgccacatgcaatggtggtcctgctgagatcattgtgcacggcaagtttggctttcacattgacccttaccatggtgaccgtgctgctgatctcctt

SEQ ID NO: 45845 - DNA, 395 bp, Glycine max
  Clone ID: LIB3139-093-P1-N1-G6
cggctcgagctcgagccgctgctgtgtgcaagtcctggagagaaatgtgcaaagaaattgttaccagtcctgagttctgtgggaagattactttccctgtctccctgaagcagcctggttcaagggatggaaccatccagtgtttcatcaagagagacaaatctaatctgacataccacctattcctttgtcttagtcctgcattgctagttgaaaatggaaagtttcttctttctgcaaaacggaccagaagaactacatgcacagagtatattatatcaatggatgcagataacatatcaagatctaatagcacttacattggaaaactgaggtcaaattttcttggcaccaagtttataatttatgatacacagccttcctataacaatgct

SEQ ID NO: 45846 - DNA, 420 bp, Glycine max
  Clone ID: LIB3139-093-P1-N1-G7
tgccaagcaaaattgctctcttatatatgctttacatgataggatgctttacaagattcattgtctcccctagtttctgcacagcacactggtggtgagaatttaacccttcgtattttgggaggtgagagtatatgatgaagttcaaccatttcatcttaaaaataacaagtaattgctaaacttgaaggttctactgtcagtgagcaatgcgatttatagttattaaggttttagcttgatgattcaatctttgtattttattttgttggatttttcattttaaaaaaaggccacaagtgacaagtatttccaaacacatgcatgcaactcttgatgaaccttggtatgaactttctatggagcttgtatggctttgaaccaatatcgagttattcattttagtgtgagaatatttct

SEQ ID NO: 45847 - DNA, 182 bp, Glycine max
  Clone ID: LIB3139-093-P1-N1-G8
accattctgcgtagagatctataggcaaacttttcgacagagggcaattttagagcaagagtggatttgcagcgcactcatcgtattaaaggaatgattaaattggcggtcacagttgtgatatctgagaatacatgtatagcattggcccgtgctatgaataagtttcttagagggcgcgc

SEQ ID NO: 45848 - DNA, 74 bp, Glycine max
  Clone ID: LIB3139-093-P1-N1-G9
gggttgttcttgtctagcccctagatttctgtttaagggctagagtattctgtgaggcggtgataccagttttg

SEQ ID NO: 45849 - DNA, 394 bp, Glycine max
  Clone ID: LIB3139-093-P1-N1-H1
gaagcaaaaaggcttctagaagaagctgttgttcttcccttgtggatgcctgaatatttccagggaatcaggagaccgtggaaaggtgtcctcatgtttggacctccaggaactgggaagacacttcttgctaaagcagttgctactgaatgtgggaccactttctttaatgtatcttctgctactttagcttctaaatggcgtggggagagtgagcgcatggtgaggtgtttgtttgatcttgcaagagcatatgcaccaagcacaatattcattgatgaaattgattctctatgcaattctaggggggcttctggtgagcatgaatcgtccagaagggtgaagtctgaacttctagttcaggttgatggtgtaagcaatagtgccacaaatg

SEQ ID NO: 45850 - DNA, 337 bp, Glycine max
  unsure at all n locations
  Clone ID: LIB3139-093-P1-N1-H10
ggagagacaagcnagcaagccagcaggncgacnctagagganccccncggggaannccaannccacannnnncaagaaaaaggaggcaaaaaagggcanacaagaanaggaannannngnnnncnnannaggcccanccagaagccaaaggaaaagagaccggaannccccggggaannccaacnccacacnnncaagaaanaaggaggcaaaaacgggcaaanangaanaggaannannagnnnncnnannaggcccancccgaagccaaaggaaaagagaacggaannccncgggagaacccaannccacanncncaagagaaaaggaggcaaaa

SEQ ID NO: 45851 - DNA, 411 bp, Glycine max
  Clone ID: LIB3139-093-P1-N1-H11
attcccagaagaattacctctataaatgcgaccagttaaagtctattcgtcaagacctaactgttcaacgaatacgcaatcaattaacagtcaaggtgtatgaaacacatgcccgattggcactggaatttggggacctgtttgagtataatcagtgtcaatctcagttacaaactctttatgccgaaagcattgaggggtccgatatggaatttgctgcttacaacttgctttgtgtcataatgcattcaaataataacagagatcttgtatcatcaatggccaggttatctcacgaagcaaagaaggatgaaagctgtaaacatgcccttgccgttcgtgctgctgtaacttcaggaaattatattgcattctttagactgtacaaaacagctcctaacttaaacacct

SEQ ID NO: 45852 - DNA, 390 bp, Glycine max
  Clone ID: LIB3139-093-P1-N1-H12
gggaatgcagcagtcaaaaggagtgattgggcctcattggtacaagtgtttttaacaaacagcaacagtacagagcattttgatgcatgtaagtggacaaaatcagaaccacattcctgggaattaatcttcccaatagaggtatgtggtcctaataatggttttgaaatgtggagttctgagtgggcaaatcaaacttcatggcatttgagtttccttattgacaatcccaaacagtctacagtttttgatattctcttgggaatctctcaagattttgaaattgctggtaatactcttatgccagctttttctgttccacaggctactgccagatcttctgaaaatgcggaatcctctgcatgatctggaattcgagttttctttcgc

SEQ ID NO: 45853 - DNA, 415 bp, Glycine max
  Clone ID: LIB3139-093-P1-N1-H2
gaggatattggaacttatacaatcaattctgtggatgatccaagaaccttgaacaaaattctctacattagaccaccagctaataccttgtcgtttaatgagcttgttactctctgggagggaaagattggtaaaactcttgaaagaatctatgttccagaagaacaactcctgaagcaaattgaaggttagtaagtgatcattattcaggttatgtgctggatttaacagtgataacttatttccttcttttttcagagtccgcaccacccgtgaatgtgatcctgtcaattaaccactcttcttatgtaaagggggatcatactaactttgaaattgagtcttcttttggagtggaagcttcagctctatatcctgatgtgaaatacatcactgtggatgagtaccttaatca

SEQ ID NO: 45854 - DNA, 324 bp, Glycine max
  Clone ID: LIB3139-093-P1-N1-H3
ggattcgaccggttgctggagcaggtttcgcagatcgagatcaacggcctcgggagggctgagaatccaccggcgtctaaggcggctatagagtcaatgccgacggtggaaatcaccgagtctcacgtcgcgtcggagacgatctgcgccgtgtgcaaggaagccttcgagcttggcgcgttggcgcgtgagatgccgtgtaagcatctttaccactccgattgcattctcccgtggctttcgatgcgaaactcgtgtccggtgtgccgtcacgagttgccgtcggagcaaaccgcgccggaaacatgagtcgtcggccagatc

SEQ ID NO: 45855 - DNA, 252 bp, Glycine max
  Clone ID: LIB3139-093-P1-N1-H5
caaatatctatacgggttggctttgaacgagtggtgtaagttgaaaattgtgatgcagtcaaattagattgactcgttaatgtgcatgcttatcgacgattgatgacattgtatatactgggttttggcgacaatgcttatgtgcttgcgagatcaaatactgaattgttggtaagataaagaagcgtcggttccttttggttctcttggttctctatgtcacagtggagcaagagtaagctactccagggc

SEQ ID NO: 45856 - DNA, 172 bp, Glycine max
  Clone ID: LIB3139-093-P1-N1-H6
cacagaaagggttcgagaaaacacagagagaaacaaaacattgcttctttgaacttgatgtgcattgtagcaaatgtccttccgcagtattgttcgtgatgtaagggatgggtttggaagcttatcaaggaggagttttgatgttaggattattggtggtgtcttgttgtat

SEQ ID NO: 45857 - DNA, 422 bp, Glycine max
  Clone ID: LIB3139-093-P1-N1-H7
ggtgaagctgttgtagttgcccttgagcagactacagagacaccagaacttgtatggacgccagcgatggcgacttccttatctgcacaaatttccactatggcatcagagctataccgtgagcagatgaaagggcgtgttgttgattgggatgtgcctgagcaggcatctggacagcaggaaatgagagatgagccacaggttggtggcatctatgttaggctgtttctgaaagatcccaaattccctcttagaaaccctaaaaggttcttggaaggtctactagatcagtatttgtcgtccattgctgccacccattatgaggtgcaagttattgatccagagctttctttgctcctgtcggctgcactggtttccttactgcgtgtgcatcctgcactagcagatcatagtggatatct

SEQ ID NO: 45858 - DNA, 414 bp, Glycine max
  Clone ID: LIB3139-093-P1-N1-H8
gtttattactttctttaactgaccgaatagactgctgacaacagaggaagtatgtgatctttcatgtcactctctgtgctgctcttctatctgaattaccaggtggcttgcctgtcatccaaccctgaagggaacgctttgcatgcttggagaagcatgatttgtgatcccaacaatgtggtgcagagtttggacccaacactggtttattcctgcacttggtttcatgtttcttgtgactccaacaatcatgtgatccgcttagacttgggcaacggttacttttctggaactctgggcccggtacttggccagctacagcatctgcagttcttggtgctttacttgcatgagttatcagggatgaattcttaagaacttggtttcttgaaatcactcatttacatggttttg

SEQ ID NO: 45859 - DNA, 424 bp, Glycine max
  Clone ID: LIB3139-093-P1-N1-H9
gaagccctttgtgtacaagcctcccattgagaagccaccactttacaagcccccaattgagaaacctcctgtttataaacctccagttgagaaaccccccatttataagcccccagtagagaagccaccagtgtacaagcctcctgtagagaaacccccagtttacaagcccccagttgaaaaaccaccagtgtacaagccaccagttgagaaccctccaatttacaaacccccagttgaaaaaccaccagtatacaagcccccaattgagaaacctccagtttataagccaccagtagagaagccaccggttgagaagcctccagtctacaagccaccatatggaaagccaccatacccaaagtaccctccaattgatgacacccatttctgaaggatgtcaaggggtgtattaagtatatgc

SEQ ID NO: 45860 - DNA, 446 bp, Glycine max
  Clone ID: LIB3139-094-P1-N1-A1
ctcaaaggatttaaaatgacagaggccgacacagatgatgttggtacgaagtgtaacttctcgttcgcattcaacaacatcaatttctcagaccgaattctcaacattgaggttatacccgaccctcatttcatccgcgcccaataccattctctctctaccctcgctccaaatcgtaagagacgcagactctctcttattaaagccaatgatgtcctcttgcaacctgaggaaaaattaaattgttatttaccacatgcagaggaagttgtggcaatcactgaggcatcactttcaggttttgtgataactcataacatgtggatctatttcttctttttcaatagcctcggattgttattattattatcaaaatttaaggctaatgcttcatgaccccacttggtgtagttggttttttttgtgtcttaaatactgatattaat

SEQ ID NO: 45861 - DNA, 221 bp, Glycine max
  Clone ID: LIB3139-094-P1-N1-A10
ctcaggaccagtttttttttgttatcataaagaacttggttaagaacattccttgagctcttaatttgaatttgcctataacaaggaccattacaccttggtctgtgtggcttatttttagaacttaacactagtttttcataaggataatcttaacactgcaatgtttgcttgatctgtaattgtccactccaccactatttttgttttattgacaggtc

SEQ ID NO: 45862 - DNA, 355 bp, Glycine max
  Clone ID: LIB3139-094-P1-N1-A11
cattgttgttgttgtgagcgaagaatatgtattctagagattcatggggtggaccgttggagataaacgcgacggactcggcgacggaggacgagcggagccggaacctgcaggacgttgacagggcagcgctgtcgcgtcccttggatgagacgcagcagagctggctccttggccccggcgagcagaagaagaagaagtacgtcgatctcggctgcatcatcgtcagccgcaagatcttaaagtggacccttggcacaatccttttcgccgtctttctcgccggccttattgccctcatcgttaacaccgttctccgccactgtcacaaacaccctccttcccgacaactaca

SEQ ID NO: 45863 - DNA, 491 bp, Glycine max
  Clone ID: LIB3139-094-P1-N1-A2
acacgagctatagagctatgacgcacgctgcccgtcagactcgagagatcgggatcgagctcaagtacaccacgcttctaaattctgagaatgaattcgtaagatcgaagcaatagcctttttctctgccgccactggtttcgatcccacacccacaaacgcaaaccctccatcctttgaatgctcttgcgttttcctttcactacctcattcctaactcacacacacacaacgggtgatatcaatgtcgactcctgctaggaagaggctcatgagagatttcaagaggctgcaacaagacccgcctgcaggaatcagcggggcacctcaggataacaacataatgctgtggaacgctgtcatatttggtcctgatgatactccatgggatggaggcacggttaagttgactcttcaatttactgaggattatccaaacaagccaccaactgtacgatttgtctctcgaatgtttcatccaaacatttatg

SEQ ID NO: 45864 - DNA, 354 bp, Glycine max
  Clone ID: LIB3139-094-P1-N1-A3
atcaaatactactgcgcattttatgcctttggagggagaagatggaaccagagttaaagctgcagctgtatgccacaaagacacatcagaatgggatccaaaccatgtgtttttacaaatgcttaaaaccaagcctggagctgctccagtgtgtcacatcttccctgagggccaccttctctggtttgccaaataggttacttaagtctttatttgttagtgtgtccttaaataagtaggcatttccatattgcatctgatgtactatatcagcctacaatgtatttctctatgtttgaaattgtgatctaccttaatggcatcataatgtagtgattatgttgttgtgatgtt

SEQ ID NO: 45865 - DNA, 390 bp, Glycine max
  Clone ID: LIB3139-094-P1-N1-A4
aaaatccttgggaacagtaattggttttgccatttcaaagctgggaaagaacattcaagtactttcaagttcctttgtcaataagcaagaccaatacactgtggaaggagtgcagaatcttggagacaaagcagtgatgtgtcataggctaaatttcagaactgcagtattttactgccatgaagtccgtgaaacaacagctttcatggttccattggtggctggtgatggaaccaaaactcaggcacttgctatttgccactcaaatacttctggaatgaatcatcaaatgcttcatcaacttatgggagttgatcctggaactaaccctgtttgccatttccttggaagcaaggccattttatgggtacccaatttatctgtggacac

SEQ ID NO: 45866 - DNA, 166 bp, Glycine max
  Clone ID: LIB3139-094-P1-N1-A5
gcaacatggaccaacaaagctctttccattgctttgggctgtttttgggaatgcaggaaaagggctaagtgagctttgccgtcgactataactttgctgcgaggtctaggccgacagaggaatttcaagcaagttcaaaggcatctacaagttcactggcggaaag

SEQ ID NO: 45867 - DNA, 407 bp, Glycine max
  Clone ID: LIB3139-094-P1-N1-A7
catgggtactgcaagaggtcttgcatttcttcacgaagaacatgtgccacacattgtgcacagagacatcaaggcaagcaacatactacttgacagagacttcaatccaaaaataggagattttgggttggctaaattgtttccagatgacatcactcacattagcacaaggatagctggaacaactggttacttggcaccagagtatgcaatgggtggccagttaaccatgaaggctgatgtataccagtttggggttcttatacttgaaataatcagtggcaaaagcagtgcaaggacaaactggggagggtccaacaaatttctattggaatgggcttggcaactgtatgaagaggggaaactgttggagcttgtggatccagacatggttgaattccccgaga

SEQ ID NO: 45868 - DNA, 435 bp, Glycine max
  Clone ID: LIB3139-094-P1-N1-A8
cggctcgaggtttaacggctctccgttctacgcgaacagcgcccccgcttctactgtcggatttcgtcggaacaccacttcgcagcagccccctcgtccacccgtaccgctcttctccagtagcaccggaaacgtcagtcgccacaagcaccagaggaacttctcgaccggcaccatgatgcaagacaaggaaatcaacatcgctactttcgagggcgtcacgcccttcgacaccctcaacatggtcgacttcgactgggatacctacaattctgcatcgggcttcacctcgatcaacgactcgatggtcggttccatcggaactgcggccactgtgtcgcccaaggatatcttcaacgatccgctcgcgtcggctcctccctcgtctgctttcacaaacctgacgtccccctccatcaacgagtcaccttacat

SEQ ID NO: 45869 - DNA, 404 bp, Glycine max
  Clone ID: LIB3139-094-P1-N1-A9
aacagaacaagatcttgaaggtcatcagaaagaacttggttaagaagtgccttgagctcttctttgaaattgcagagaacaaggaggattacaacaagttctatgaggctttctccaagaacttgaagctaggtatccatgaggattcacagaacaagggaaagattgctgaattgctcaggtaccactccaccaagagtggtgatgaaatgacaagcctcaaggattatgtgaccaggatgaaggaaggtcagagtgacatctactacatcacaggtgaaagcaagaaggctgttgagaactctccattcttagagaagttgaagaagaagggatacgaggttctttatatggttgatgccattgatgaatatgctgttggtcagctcaaggaatatgagggc

SEQ ID NO: 45870 - DNA, 419 bp, Glycine max
  Clone ID: LIB3139-094-P1-N1-B1
tctctctctctctctctctctctctgcttcacttgcttgaagcaatggccaaagccttggcatcagtgctgctgtttctcctcgtagctgtgagtaatgtgtttgctgtagagcttgaacttgaaactctttcaccctcttaccctcaccctcaccctgttcactcccccacaccagcacctttttacccaccagcaaatgctccttacccacaccaccaccaccaccaccaccacccttcagcaccagcaccagcaccagcacctgttccttcaccttctcaccacaattacccttctacccctgcccctgctaagcctcctactcaccaccatcaccatcaccctcctgctcctgttaatccacctcctgttccggttcatcctccagttaaacctcctgttccggttcacccttca

SEQ ID NO: 45871 - DNA, 410 bp, Glycine max
  Clone ID: LIB3139-094-P1-N1-B10
cgtgcatctgcaaaacccaggccttgctcctcatcagcagaaaataataacaaaatttcaaatcctcctgtatctaatgaagctggagaaactgctgcccgtgaagtagaatagtgtgacagtggtaatgatgataatcatgatgtctccttgagaaggtcttccaataggaaaagaagggttgtctttgatttctcagatgaagatgaagatgaagatgatgttgtcagtttagcatcacctgatttcccaaataaacaatcatctctagattctacaccaaatgacaaaaaaacatcagagaaaaccactctgaattttgattcacaggaagaaaataaatcaacggttaaaggagagagagcaacagacccaaaagctcgcctaccactgagagaaaatgtattagc

SEQ ID NO: 45872 - DNA, 435 bp, Glycine max
  Clone ID: LIB3139-094-P1-N1-B11
gaaagatcttggccatggatattaacagggagaattatgaattgggtttgccagtaattaagaaagctggtgttgaccacaaaattgaattcagagaaggtcctgctctcccagttcttgatgaaatggttaaagatgagaagaaccatgggagctatgacttcatctttgtggacgcagacaaggacaactacctcaactaccacaagaggttgatagagcttgtcaaagttgggggagtgatcgggtacgacaacaccctatggaacggctctgtggtggcacccccagatgctcctctcaggaagtacgttagatactacagggacttcgtgctcgagctcaacaaggcactcgctgtggaccccaagatcgagatttgcatgcttccggttggtgatggaatcactatatgccgtcggatcaagtgattct

SEQ ID NO: 45873 - DNA, 399 bp, Glycine max
  Clone ID: LIB3139-094-P1-N1-B12
cgcgcagagattattttcttcatggctggagagctagacctagcttcatatcactgcactcaccatgacatgaggtcggaggcgaatgctgccaacaccaactcatgcgaaaatggcctcaacattggatacatgagtgctaacgaccgcttgaactggggtgcggtggtggaggctatggacgagagccacactaacgaggacaagcgcatgctaaaggagctccacaagtccgtggtctagctcgggggtgagacccggaccactttgcaagactgggtaatggccgtccaccaccagacagtgaaagccgagctaccggagcccttgcaaagccgctttaaggacagccttgactgggcgatagagagcccgaacgaaggcgctggcaggttccgg

SEQ ID NO: 45874 - DNA, 442 bp, Glycine max
  Clone ID: LIB3139-094-P1-N1-B2
cttcttcctgagctgttcgttcgttgcatcttcctttctcgcttttgctctaagctaacagtctaagaaattcaggtcaaaatggaagacgggcataagttccaggaagtttcaaagccaaaatatgattgccttttatttgatcttgatgacaccctttatccttatagttctggagtttcagtgcaaatagcaaaaaatattgatgagtatatgattcaaaagcttggggtggaggctgccaaagttgctgaattgaactattcattatataagacttatgggacaacgatggctggtctaagggcaattggctatgactttggctatgatgactttaacagttttgttcatgggagattgccatatgatgtgctgctgaaaccagaccctgttctcaggggcattttgcaaagcctgcctgttaggaaacttattttac

SEQ ID NO: 45875 - DNA, 329 bp, Glycine max
  Clone ID: LIB3139-094-P1-N1-B3
gttaaaaaccttcgggtgggtggcacacttcttccctacaggcagcgtcagctaagaattaagccaaaataattaattaattcttggcaaaatcacatggccgccgccgcagatgggctctttcggccgatctacgagggctgcatctccgcctacgacaacgacgtcgagcgccgtccctaccacaagaactgcggctgcgctctgcacagcaagtcgaggaggaacagcagagcgtgcacgcacaagttgccgaaatgcaacaacgtgttctaccccatgaggagggcttggagtgaagggagcttgtcaatggcttcggcaacaac

SEQ ID NO: 45876 - DNA, 283 bp, Glycine max
  Clone ID: LIB3139-094-P1-N1-B5
cgcacacagagacagatttatttttcactatgacacggataacgggtctgttttttaagcctactcagattaggcaaataattatttctaattaaaattgcctcatataagggtacttgagttaattataaaatatttttagaaagaaaatttgactatttattaaaaaaaaaaatgagaattttaaaaagtcatcctttttttaaaaagtgtaatatattatgtgattgactcaccttaaccctctaattttatgtatttttgaaatctttcgttctttatt

SEQ ID NO: 45877 - DNA, 427 bp, Glycine max
  Clone ID: LIB3139-094-P1-N1-B6
ggcgtgacttggcgcatgttgtattgtagagtttgtagtagaagttggcatttgtgtgagctcactctctattctaagtttccgcagccaccactcagagccagcgagtgatgatcgcttcgccgcagtaatcgccggaaacgaattcgccgtttccctgccgagatctctcaatctccgacgactcagatacctctattaattttcctccggttaggttgttagggtataaatagtacgtagtttttccttatttatggcttcggagaatgtgaagaccggggattccgccgtcaccaccatcgtcaatctcgccgaggaggccaagctcgccagagaaggcgtcgtcaaagcttccagctacgcccttgccagcatctgcaagtcgcttgtcgccggtggcgtctccggaggagtgtcacgtact

SEQ ID NO: 45878 - DNA, 427 bp, Glycine max
  Clone ID: LIB3139-094-P1-N1-B8
ggaccaaattgatatacaagatcattgttttagagagagagagagagagagagagagagagagagaggatgtttggttcaaagaaaactcctctgagagatgctaaacctacctctgttgaccatgcccataacccctttgattctgatgaagatacaaaagataacaagtataattcttctaagaagactttgaccaacaccaacccctttgatgatgatcatgttaatgccactggccactcttcatcatcttcttatggcctttcgtctacccatcgaaataggtataagaacgatttccgcgactcaagggggttggagagtcaatctgtgcaggaattggagaactatgctgtttacaaggctgaagagacgacaaattcagtgaacagttgtttaaagatagctgatgaaatgagagagga

SEQ ID NO: 45879 - DNA, 436 bp, Glycine max
  Clone ID: LIB3139-094-P1-N1-B9
gcaatggatgcattaaccttaagctcaagtgtgaacatttccaaaccatttcatttccttacactctcaaagaaacagcaaagagaaagacatcctcgtacgcagtttggtgtttcatgcagaggcagaaaagagcttggaggaggtgtggaggacaacttgtacaaggtactaagtttgagtcccaaaagtgcaaccacggatgacataaagaaagcatacagatcaatggcgcttcggtaccaccctgatgtgtgccaggattgttccaagaaggaggaatcaacgaggatgtttgtgcaactcaacgcagcttaccagaccttatcgaatcctaggcttcgagcagagtatgactgtgaattgggtttgagaagtgaaaagatcggtgttggtgatgagacttggagatatatatggcagaatcaaactgctg

SEQ ID NO: 45880 - DNA, 439 bp, Glycine max
  Clone ID: LIB3139-094-P1-N1-C1
caaggatcagattcctgctgttgacaagttgtattctactaaggttaataaatttgcaaaaattatgaaccttagacaaagtgttgttggtgatcttaaacttcttactgatgggaagttgtatgagggtaagcatattcctgtatctaatattagtgcaggggaaaatcatgtagttcaaatacccttaatggcacaggaggaaattctgtcttctagtgcaagtgatttcagagctgcaatggtgagtaaaaatagcaagcctcaagctactgcaatgcatgtgggagctatagaaattatcattgatagtttcgcaagtcctgattgcaacatagttggtgcaatgcttttggttgatacttatcataccaatcctgaaaatgcagttcgtagtatttttgttgcgcctttcagaggcggaaggcccattcgggtg

SEQ ID NO: 45881 - DNA, 409 bp, Glycine max
  Clone ID: LIB3139-094-P1-N1-C10
ttccaatatattccattctctctgtgtatttccctacctctcccttcaagatgcagatcttcgtcaagaccctcaccggcaagaccatcacccttgaggtggaaagctctgacaccatcgacaacgtcaaggccaagatccaggacaaggaaggaatccccccggaccagcaacgtctcattttcgccggaaagcaacttgaggacggccgtacccttgctgactacaacattcagaaggagagtactcttcacctcgtcctccgtctccgtggtggcatgcagatcttcgttaagacactcaccggcaagaccataaccctagaggttgaaagctccgacaccatcgataacgtcaaggccaagatccaggacaaggagggtatccccccggaccagcaacgtcttat

SEQ ID NO: 45882 - DNA, 428 bp, Glycine max
  Clone ID: LIB3139-094-P1-N1-C11
aacaatattgcgaatgttgtcaatacgttcatctatgcaactgcaaacataaatgtaacacaaggtagtcctggctcttacaatcagtctgggcctagaatgccgactttatgctacccttttgactctcaatttcaagagcgtcaatgtacagatcaagaagtttcttctgccaatgcttcaatggtttggaagaactatgaatgtgaggtatctgaatctggcatttgcaccacagttggcagggtgacccccgagatttacttgcagatagtagctgcggtgaatgaaatctatgcattagaacattacactccacctttacttagccttcagaattgcaattttgtcagggatgcgtttacaaaaatcacttcaagctactgtcctccattaaaccattacctcaagattatcaatgtaggact

SEQ ID NO: 45883 - DNA, 435 bp, Glycine max
  Clone ID: LIB3139-094-P1-N1-C12
ctcgagccgcttctggcttctgctgttaataacaaaaaaaaaaaggaagacataataacaaattatgcttatgatgattgatttaatgaaaaccctagttattatcagaaaaattagaagacacatattccctcacttccctcgcgatcacatccatcatcgctgcccatgcccggtacggtaacaggtgggccaccatagcccgattattaccgggccgaaccgataacgccgttaagaaccactggaacttcacgctcaagcgcagagccaagggtattaacgttaatgttaatgatgccgacaactaggatgacccgttgaccgtattgactcttgctcctaccggtattgctaatgccactttgaccgaagactccgtaccggaccacctgttcttgtctgaaagtgcggtttaagggtttttgtatattt

SEQ ID NO: 45884 - DNA, 413 bp, Glycine max
  Clone ID: LIB3139-094-P1-N1-C2
ttaacagcgaggtcttcctaaggggcaaagctagtcaaggaaattgggaaaagtccaaaaaaaagaaaaaagaagacagaggaaagaaaggagagctggaatcacatggacttgtctttctctttctgggtctccattaaatttttcttctctcccttctttctctctctctctctctctgaccattctcttcttcttctttttcttctcctctctctctctcccctccgccatggctgaggataaggagatgtctacctctgtcatcaatgggaatgattccctaactggtcacatcatatctacaactattggaggcaaaaatggggaacccaaacagactattagctacatggcagaacgggttgtaggaactggatcatttggaatcgttttccaagcaaaatgcttgg

SEQ ID NO: 45885 - DNA, 416 bp, Glycine max
  Clone ID: LIB3139-094-P1-N1-C3
ctcctgaggacaaggcgagtttatggtcacaacttcattatgtttcgtgtaataatctggaaatgcaagaagcttatcttgtcaatctcgtaaatgtgttacgagaattgtatttgcacagtccagaggaagctcgccaattgagaaggaaagctctctctcgtattgaatggctgcaaaaagctgatgtgcctaccatagcacagattgaagagtttcattcgatgcagaggatgatgaatgctcctgattcaaatgataatattgatctactgttgagcattgatttgttgggtttacaaggagcaggtaaagcttttccaaacaagattgtttttgatgataagcttgtgttggctaacacacaagaattctttgatggaaattttccagtggattcttggttaccaattttt

SEQ ID NO: 45886 - DNA, 411 bp, Glycine max
  Clone ID: LIB3139-094-P1-N1-C4
ctgatgaactatacaggtcactgcaaaaaaattgtaaaggagagtacataaatgtagacaccaaaaatgtattatgttctagaaatatcgagacattcaatgaggttacatcaggacttagtatggtcaatattttggacccgtcatgtgattggcttgatactgaaacatcttggaggagatctctacttaagaaatatccgagaaagaatttccttaatactcatctcaaattgccatccttaaactgtcggagttatgcatacttcctctgcggttattgggccaatgatgatagtgttcgcagtgcactgcatatccgtaagggaactataggaaaatggcgtcgctgtaccttcaatatacctaacaaggaggacatctcaagcagctatgagtatcatgtaaatc

SEQ ID NO: 45887 - DNA, 431 bp, Glycine max
  Clone ID: LIB3139-094-P1-N1-C7
tcttgatccttctttttctccttgaactcaaacatggcagatgaggtggttctgctagatttctggccaagtccatttgggatgagggtcaggattgcacttgctgaaaagggtatcaaatatgagtacaaagaagaggacttgaggaacaagagtcctcttctcctccaaatgaacccggttcacaagaagattccggttctcatccacaatggcaaacccatttgtgaatccctcattgctgttcagtacattgaggaggtttggaatgacagaaatcccttgttgccttctgacccttaccagagagctcaggctagattctgggctgattatgttgataagaagatatatgatcttggaaggaaagattggacatcaaaaggagaagaaaaagaagctgccaagaaggagttcatagaagcccctaa

SEQ ID NO: 45888 - DNA, 388 bp, Glycine max
  Clone ID: LIB3139-094-P1-N1-C8
taaacacgagaaaaatcttgctttgacagaagaggaaaagatggaagtgattagaaatagaggtattcctgctgatgttcttgcaaagcgagctcatgaatttgaaaaacatgttgctcatgaaagcctcaaggatcaaattcctgctgttgacaagttgtattctactaaggttaataagtttgcaaaaattatgaaccttagacaaagtgttgttggtgatcttaaacttcttactgatgggaagttgtatgagggtaagcatattcctgtatctaatattagtgcaggggaaaatcatgtagtttaaatacccttaatggcacaggaggaaattctgtcttctagtgcaagtgacttcagaactgcaatggtgagtaaaaatagc

SEQ ID NO: 45889 - DNA, 431 bp, Glycine max
  Clone ID: LIB3139-094-P1-N1-C9
agttgacaaccataaacaatatgtgtgcatatgggctcaatcctggtatttcaggttctcgtcttttgggcaccattcctcagtctatttcacagcaaactgtttggaatcaaatggcaacagtgagaacaccattgaattttgattctagcaagcagagcttttgtcaattttctattgaccttctcggtggaggaattttagtggacaaaactggagattggatcacacttatacaaaattctccaattagtaacttgttgagagttgctgcttggaagaaaggctgtttaatggttaaaattgtgatgtctgggaatgcagcagtcaaaaggagtgattgggcctcattggtacaagtgtttttaacaaacagcaacagtacagagcatttcgatgcatgtaaggggacaaaatcggtaccacatttc

SEQ ID NO: 45890 - DNA, 426 bp, Glycine max
  Clone ID: LIB3139-094-P1-N1-D10
ctcgagccgattcggctcgagctcctccctcctccggcgttgctttcacgtcgcttcgctggccgaaaatatggcaatcaggatgggaggcaacagggtccctgttcgcactccatttagagatgggggagctccaattctgagaatctgtgactgctcccttttgagcagcggctcccccatctcaagcaatcatctcagcagcctttagatggattttttgttttgcaatctcgttctttttgcatatcacttaccggcgttcatcaccactctacgcccttgatttaagtgcgcacccgagaatgatacctttcgtttttgttttaatccatctggaggtaaggggcaggaaccaagacggcgcatccacatgatggaatggccgtcgagttcttctaacgccccccttttttggttttcaca

SEQ ID NO: 45891 - DNA, 433 bp, Glycine max
  Clone ID: LIB3139-094-P1-N1-D11
aaaggcaagagaagatttgttactggagatggtgaagaaatgtcactaattcctggtaccagtgttgaagaagcatacaataaattgactgttgaactagaaaagtgtgttccaacattggttggcatagaatgtcccaaagatgaaaaacttccccgtcgcaaaatttttgataaacccaagacgcgctgcttcaccatacttcctatggaatttaatctagtggtgcgtcaaaaattcttgaattttgtgcgattcattatgaagaaaagggacaaattgagttgccaggttggaatcaatccatattctatggagtggactggtttggcaaatagactgttgagcaagggaaatgacattttgtgttgtgactatgctagttttgatggtctgataactaagcaagtcatgagcaagatggcagaaatga

SEQ ID NO: 45892 - DNA, 353 bp, Glycine max
  Clone ID: LIB3139-094-P1-N1-D12
ggcgcaatcgtcttctgcttcaaggaaggagagcttgttattctctatcaacaaggaaaatgtcaggtgaagaggttgttgttgcagctgagccagctgctgccatcccaggcgagcctatggatatcatgactgccttgcaacttgtgctcagaaaatctctggcttatggtggtcttgcacgaggccttcacgaaggggcaaaagtgattgagaagcatgctgcacaactctgtgttctagcagaagactgtgaccagcctgactatgttaaactggttaaggccctttgtgcagagcacaatgttagcctgctgacagttccgagtgcaaagacccttggagaatgggct

SEQ ID NO: 45893 - DNA, 433 bp, Glycine max
  Clone ID: LIB3139-094-P1-N1-D2
attgttgcagaattggtgtactaaacatattctcatgtcattagtccttatatttatttagtgttaatttatgtgttattgcttcttttcattttttattgcttgtgtttatggattgatcacccatatatacatgttttatagtttaaaatggcattgtgaaatactttttaattaattaagaagtggtttatcttgacttgttaaggaattaggaattaagttaatcaacttaagctctttcatgtgagaaatcatgattagatacaaagatcatgaccagatgggtcagccatgagtagactcagcaagtttctgattttggaagattggttgttatcatgaccaaaaatagttcacaatgggatttgaagtgagggttatcatattatcattgtgcaattatgttgcgagacaaggagacttattgagt

SEQ ID NO: 45894 - DNA, 354 bp, Glycine max
  Clone ID: LIB3139-094-P1-N1-D3
gaccttttcatgggtgtttttgccgatgataatgacatcataggtgctgtcaaagatgatttgatagctgttaaggagagggaccctgcttgcataagttatgtgcattgcttgttgaatttcaagggtttcttggcatgccaggctcataggattgctcacaaattgtggctccaagggaggaaggtcttggcactgatgattcagaatagggtttctgatgtttttgctgtggatattcaccctggtgcgaaaattggacgtgggattttgctggatcatgcaacaggacttgttgtgggggagactgcagttattgagaaatatgtgtcaattttgcataatgtgacattt

SEQ ID NO: 45895 - DNA, 441 bp, Glycine max
  Clone ID: LIB3139-094-P1-N1-D4
ctctcttcttccataaccatgggtatctccaccatcgcttctccttttgactccatcatcttcgatttggacgacaccttgtacccctccagcaccggaattgacaagtgcgtcaagaaaaacatccaactctttctcatccagaaatgcggattctcagaatccaaagccttgacccaacgagttgagctcttcaaaacctacggaagcacccttgccggcttaagagcacaaggcctcgatatcactgcagaggactaccacggtttcgtgcacggaaggctaccttacgactccatcgacactgatcatcagttacggaacctcctcttgagcatcaaacaaagaaaaattgtttttactaattctgacaggattcacgcgatgagggcgctggataggcttggggtcaaggactgtttcgagcaaatcatatgcttc

SEQ ID NO: 45896 - DNA, 421 bp, Glycine max
  Clone ID: LIB3139-094-P1-N1-D5
caaggttggtggatttcttcagaggatggacctggctcgcaagtatgcgtttggaaagatgctggtgattggatcacaggcaccatttaaggtgaaggggttgtggctcttccgcggccaagagattccacaatttgtgattgatgaatgctatgatatggagctctatgactggaccaaggttgatatctctgatgaaactcagaaagagcgcgtcaatcagatgatcgaggattatgaaccatttgagggagaacctcttttggatgctaagtgcttcaagtgagaaacaaatttttagtccctagtcaaaatgctgatttttgtcgtgtgtttttttcttatgtctttgggttctatcctatttctgttatagctggtttggttgggatcttcaacactttaacttaatgcctggttt

SEQ ID NO: 45897 - DNA, 388 bp, Glycine max
  Clone ID: LIB3139-094-P1-N1-D8
attcccaatagaggtatgtggtcctaataatggttttgaaatgtggagttctgagtgggcaaatcaaacttcatggcatttgagtttccttattgacaatcccaaacagtctacagtttttgatattctcttgggaatctctcaagattttgaaattgctggtaatactcttatgccagctttttctgttccacaggctactgccagatcttctgaaaatgcggaatcctctgcatgatctggaattcgtgttttctttcgcttgttcgcttgtttaattcaataaaggaaattaggcatgaccctcttgttgagtatgctctgcctatctgaaaatttccacacctcctttaattgtcgcaatgatgtgtgaagtgtgtgttatttt

SEQ ID NO: 45898 - DNA, 440 bp, Glycine max
  Clone ID: LIB3139-094-P1-N1-E1
gccccataagaaaattgaatatacagttttttttatgaacaaatactaattgactagaatattagattttgttaatataaatctctttatttaactcttatttatccgacccatcttatgttttcactattatatatatatatattgaggaaagctaaatattattcatttgtttctgacatgctaccgtgagattaaacaccaaaaagatccagattcttctggacttactatgaactatgaagggagcttgaagtgatgttcggataaaaagtttaggtagtggccaaccttaacaaatccaaagcagttcgcaattgatcaaaaaaactgacagatgcatcatcaacttgctctacctaccaccttattttcggacttgtgaggaacaaagggtctaaataaatagccttgtataacgactctaattaactcaccct

SEQ ID NO: 45899 - DNA, 404 bp, Glycine max
  Clone ID: LIB3139-094-P1-N1-E10
acaataccaggtgattttgtcattggtgttaagttgacaaccataaacaatatgtgtgcatatgggctcaatcctggtatctcaggttctcgtcttttgggcaccattcctcagtccatttcacagcaaactgtttggaatcaaatggcaacagtgagaacaccattgaattttgattctagcaagcagagcttttgtcaattttctattgaccttctcggtggaggaattttagtggacaaaactggagattggatcacacttatacaaaattctccaattagtaacttgttgagagttgctgcttggaagaaaggttgtttaatagtcaagattgtgatgtctgggaatgcagcagtcaaaaagagtgattgggccttaatggtacaagtgtttttaacaaa

SEQ ID NO: 45900 - DNA, 398 bp, Glycine max
  Clone ID: LIB3139-094-P1-N1-E11
cacaatttcataaaaaacctctttttaagtttcttgcttctttctctctgaaagaaaattgaagtcctaaccagttggctcttttgttttatcgttctccatggctcagaaaaccgagaaagaagaaaccgacttcaaagttccggaaacgattacgctttgcgtcaacaactgcggcgtcaccggaaaccctgccacgaataacatgtgccagaagtgcttcactgcctctaccgccaccacttccggcgccggaggtgccggaatagcttctccggcgaccagatccggcgtctccgcgcgtcctcagaagagatcttttcctgaagagccctcgccggtggcggatcctccttcttcggaccagacgacgccgtcggaggcgaaagcgcgtggtc

SEQ ID NO: 45901 - DNA, 437 bp, Glycine max
  Clone ID: LIB3139-094-P1-N1-E12
ggagacatgggcgagtcaagcgactctgtctccattgacattgatttgattcctttgggaggaaaggaatgcacggttaaaactagtaaaggttccgtgtctgtgcttgtttgtggggatcaagaaaaacccgctctaataacctacccagacctggctctcaattatgtgtcttgtttccagggtcttttattctgcccagaggcagcttctttgttgcttcataacttctgcatttatcacattgatgctccggggcatgagttgggagctgatgtcatttcttcagatgaaccattgctctgcgtggatgaccttgctgaccagattgcagaagtgcttgatttctttgggctaagggaggttctgtgcttgggtgtaacagctggtgcttatgtcctcactctatttgctatgaaatacaaagaacgagtgct

SEQ ID NO: 45902 - DNA, 480 bp, Glycine max
  Clone ID: LIB3139-094-P1-N1-E2
atttttgtgaattgtctttatcctgtaagtcaattaccttcagaagctgtcgttgtaaatgttacatgtggtagtggacgtggtggtttacccaccactgcttgtactaccgatgatcttaacaaacgcttcttatatattaacaaaaggtttcgcacaagacttgggaaaggtaagaaaaccggttttcttactatagtttatctctttgccagttatttttactgtcttgttcttttcgccttttatagaaaggatatttctcagttttttaccccctcttatatcctattttttcctcctacctcttatgatatacctgtaataaagtcctttaaattatcttgcatgtattgtgcaactctttttttccatttttgtcttcctatttttttccttattttttttttactttttattttaaggcgcttttacatttgttcttaataggtgttttttatatatttttcattaattttt

SEQ ID NO: 45903 - DNA, 424 bp, Glycine max
  Clone ID: LIB3139-094-P1-N1-E4
ctatttggttccgcttcaaaatcttgaaaaccactctctctctctccctctccggccacttaaccaatccctaacggacgcaaccttctctcttcagctcctctgccggaatccgccaatttggttctgatcatcttctcacagaaattctttggcaaacgatgtaaaaacgattactttagaaaccattctaaaagtgcaagtacctatcgagtccttgagtcattaagtggaatgaatggatcaacggagaagccaataaagtatgtcctttgcactgtgcttagctcttgtgcaaaaactctgaattggcatttgggtatacaaatccatgcatacatgattcgatctggatatgaagataatctgttccttagtagtgcacttggtgatttctatgcaaaatgttttgctattctggatg

SEQ ID NO: 45904 - DNA, 84 bp, Glycine max
  Clone ID: LIB3139-094-P1-N1-E5
cataaacatgctacttaatcttattctggttcttggtcatcacctgagggtctgctcattcttccttgcaccttcttctttgaa

SEQ ID NO: 45905 - DNA, 444 bp, Glycine max
  Clone ID: LIB3139-094-P1-N1-E6
ctcgagccgaacggctcgagatccaattaaccactcttatatttagaatccaaaaatctctcgtcgtccaagaaagaagcaccacaaattaattctcgtttcccattcccatccccatgccaactattttgcataggattttccttctttacaacctcgtacactcattcctcctctgtctggtccccaagaaggtgcgtcccttcctccccccttcttggttccaaaccaaaaccatcactgcaccttcttcttcttcttcttcttcttccagtgcccgcatcatcaagagaacaacaatggaccccaacgagctgaagcgcgtgttccagatgttcgaccgcaacggcgacggaagaataacgaagaaggagctgaacgactcgctggagaatcttggcatcttcattcctgacaaggagctcggccaaatgatcgagagga

SEQ ID NO: 45906 - DNA, 428 bp, Glycine max
  Clone ID: LIB3139-094-P1-N1-E8
actattattcactgtgcacacttatttccttcaacttcaacctcaacctcaacctcaacccccacttaccagttttcccaaattttcgttcttttctcctttccatgagttggtgcatctttttcaagctaattaagcttgaattagctggtggggctttttaaattcgtcgataaaaaaacagtgttctgctttttttctcttgtgttttttgggtgcagattcaggaactggtgtgtgagatttcttcaacttggggtgtcattgacataaatgcaaacaatcttgaatttgaaggcagtaagtgattacttaaatccctgaaagacatgcagtcagccttcgttctgctgaaatgaagaacttgcagacctcggaggaattacagtcatcgactcaagcttcttatgagcccaagagtgaacaac

SEQ ID NO: 45907 - DNA, 291 bp, Glycine max
  Clone ID: LIB3139-094-P1-N1-E9
ggagcagcttcttgggttgggttctctgagtttttttacctcttcttggtttgatccagaaaggcttatttttctttgttctgaggaaaaaaattctgcttttcaatttctgggttttcaagcttcgtgtagaaggaaatggcacaacgttctcatgtacccaaatttggcaattgggatagtggagagaatgttccttatacagcatattttgacaaggcacggaaaggtcgaactggcacaaggataattaattcaaatggccccgaggaaaatgctggtttaagtttt

SEQ ID NO: 45908 - DNA, 264 bp, Glycine max
  Clone ID: LIB3139-094-P1-N1-F1
tctgtctgcttcttcactttctctcgtttcaatcgaaaccaaaacaaaaacatgggcagaaaattcttcgtcggtggcaactggaaatgcaatgggaccactgaggaggtaaagaagattgttactactttgaatgaggctaaagtccctggagaagatgtcgtagaagttgttgtgagccctccttttgtgttccttcctgttgtaaaaagtttgctgcgccctgatttccatgtttcggcacaaaactgttgggttcgcaaa

SEQ ID NO: 45909 - DNA, 415 bp, Glycine max
  Clone ID: LIB3139-094-P1-N1-F10
aaaatataccgtgcactaacttatgcttctggccttccattggctcttgaagttataggttcaaacttgtttggaagagaaatagtagaatgggaatataccctagatctgtacgaaaaaatacatgataaagatatacaaaagatacttaagatatcctttgatgctttggatgaacatgagaaggatctttttcttgacattgcatgcttcttcaagggatgtaaattagcacaagttgaatcaatagttagtggtcgttacggtgacagcttgaaagctaccattgacgtgttgcttgaaaaaacacttataaagattgatgagcatggtcgtgtgaagatgcatgatttgatacaacaaatgggaagagaaattgttcgacaggattcaccaaaacaccccagtaattgca

SEQ ID NO: 45910 - DNA, 433 bp, Glycine max
  Clone ID: LIB3139-094-P1-N1-F11
ccaaaactctcaaaagctcaaactcaaacggtagtttaaaaaaaaaacaaccgaaacgaaatccactctcaccatgataccgtacctagaacacttcgtgcacggaaatgacacagaatcgatgccaaacgacgacgtttcggctctcgacggagctttccacttcggagccaccgccggagccggcaaggacttcggcgggatgaaatccgctaagcctctggcggttattcgccccgccgtcgccggtgacgtggcgagggcggtgaaggcggcgacgcgcaaggcgaacctcacggtggcggcgcgaggcaacggccactccatcaatggccaggccatggcggagaacggcctcgtcctagacatgcgcgccatggaggaccacttcaccctccttttcctcgacgacgggttcctatacgtggtcgtt

SEQ ID NO: 45911 - DNA, 439 bp, Glycine max
  Clone ID: LIB3139-094-P1-N1-F12
gcatgctggaagctctagatgttgtaggtggagataatgatagccctttggcttcagttggtaccatcacaaattttgatggaaacaatggttatattgctcctccttacaacgaagaatcatcttcagggaacaaaatcaagatgaagctaaaagaattccacaagactgctgcctcttttactgcattagataaaaactacctgaccccattctttacgagtcaaaatggagatgaagatgatgaagccgagccttttacttctacaagatcggaacttcatggtcagaaccactattcatcatgatacgttccagacaacaacatactgaatgcttttttgtacataatttccgtcagatagctcgtaggaattggcgcaatacaggaatcgaatttacctcctacattccaagttgtacgattgagaatatcatg

SEQ ID NO: 45912 - DNA, 406 bp, Glycine max
  Clone ID: LIB3139-094-P1-N1-F2
caaacaacaaaaactccttcttgttctgattctaacgcttctttttgccactgccacgcctgattctgaatacgttcgacctcttcctcgtaaaaccttaacaaccatcccatgggattcaatttccaaggcccactcctcttaccctcaacaggtacacatttctttggcaggagacaagcacatgagagttacatggataaccgatgataaacattcaccttcatatgtagaatacggaacattacctgggagatatgactcaatagctgaaggagagtgcacctcttataactatctgctatatagctcaggaaagatacatcacgctgtaattggacctttggaagacaatactgtgtacttttacaggtgtggtggaaaaggtgccgagttcgagctcaaa

SEQ ID NO: 45913 - DNA, 419 bp, Glycine max
  Clone ID: LIB3139-094-P1-N1-F3
cggggttttatatatgcaatagctcatatacgtggaggtggtgaaatgggaaggcagtggtatgaaaatgggaagctgttgaagaaaaagaacactttcactgatttcattgcatgtgctgagtatttgattgaaaaaaaattctgttctaaggaaaaactgtgcatcgaaggaagaagtgctggtggtttgctaattggtgcagttcttaatatgagaccagatttattcaaggctgctgttgctggagtaccttttgtggatgttgtaacaacaatgcttgatccaactattcctctcactaccttagaatgggaggaatggggtgatcctagaaaggaggaattctacttctacatgaaatcatattcccccgttgataacttgaaggcacataattattcacacattcttgtttc

SEQ ID NO: 45914 - DNA, 415 bp, Glycine max
  Clone ID: LIB3139-094-P1-N1-F5
caccattactgatggtattgacaaaactagtgcaactttgcaatttagaaagttagcagattgtgattttctcaagagaaactttaagcagatgtctaatgttttgtgggtggctcctgaggacaaggcgagtttatggtcacaacttcattatgtttcgtgtaataatctggaaatgcaagaagcttatcttgtcaatctcgtaaatgtgttacgagaattgtatttgcacagtccagaggaagctcgccaattgagaaggaaagctctctctcgtattgaatggctgcaaaaagctgatgtgcctaccatagcacagattgaagagtttcattcgatgcagaggatgatgaatgctcctgattcaaatgataatattgatctactgttgagcattgatttgttgggttacaag

SEQ ID NO: 45915 - DNA, 412 bp, Glycine max
  Clone ID: LIB3139-094-P1-N1-F7
gtaaccaaagttccaaaccctaaacgctacgattttaattttctggttttctctttttcaatcggtgcttcctccggcggcgcgtgggagtgtctttggcgcgtgattcctagttccccgcttacctatgcttcgctcgacccgcattgtagagttcacgccggagagacggcggaatctcaccggacgatcgtgatttcgcatcttcatggcttccgcctaccggaacgaacctaattggccacggcatagaagcggtggagctggattcatgggaaaagtacctttttctaacccttaaccctaaccctaattcttaccctaaattagcgaatggcaagaagacccaatctgtgttcgttgatgctttctttattaaccggagatcgaactgcgccccatctcactctca

SEQ ID NO: 45916 - DNA, 373 bp, Glycine max
  unsure at all n locations
  Clone ID: LIB3139-094-P1-N1-F8
catatttgtatgctatggtgcatgatagttcagtgtctacaaaatcacctggtattgtntnnttttgntttttttttttattttattatgttttatttttttttattattttattttttttttttttttttttttattaaattaatttatttatatatttttaatatttttgtatatatttatttttttttaattttttttttattaataatttttatattttttttttattattttgtatattttttatttttttatatttttattatatattataattttattttttaatttattttttttttttattttttttaatattaattgttgtattattttttattttttttttatttattaatttatttttttt

SEQ ID NO: 45917 - DNA, 403 bp, Glycine max
  Clone ID: LIB3139-094-P1-N1-F9
gagacattgtggttacccatagtctcatatagtgtcatacagcaaaaaaattcagcaacacaaaacaatgggttctcttatggcaggatggtattctacccacatggatcctcaatcagccacacttaaaaggaaccgctcactcactaaggatgaaattgatgcttactggaaatcaaagaagaagatagaggaagaacaccttagagctatttccaatgtgtcagagactattcaggctagcaaaaacacagagcctgaaaagaagttgcagaagtcaatgaccatgccagttacccgtgcacgggactacttaaatatggtggacattgacacaagtttggagcaacttattaagcgaaatggctggtggaccaagaagtagctggcgtttctgaatgag

SEQ ID NO: 45918 - DNA, 360 bp, Glycine max
  Clone ID: LIB3139-094-P1-N1-G1
cgtttcccttccaattatctctgtcaccgtggattctctctccacttgtgtcaaaactcaagcgtgggtttttgggaagtgggtagcttgtggggtggtggtttaaactttgatccgaggaactggcaagatctctagtctcttggaaattgggtttgtgcagatgaagtccactatggctcagaatcagagtaactgggaagctgataaaatgcttgatgttcatattcatgattatttgatgaaaagaaaattacatgccgctgcaaaagcttttgtcgcaaaaagaaaagttttcacggatccaagtgcaattgatgcgcctggaggatttctctatgagtggtggtctgtgttttt

SEQ ID NO: 45919 - DNA, 407 bp, Glycine max
  Clone ID: LIB3139-094-P1-N1-G10
aagtttttaaattttgtgaggttcattatgaagaaaagggacaagcttagttgtcaagttggaatcaacccatactccatggaatggactggtttggccaatagattactgagtaagggcaatgatattctgtgttgcgattatgctagttttgatggtttgattaccaagcaagttatgagcaagatggcagaaatgataaacagtctttgtggtggtgatgaaaaattgatgcgtgaaaggacgcacctgctgttggcttgttgttcaaggatggcaatttgtaagaaagatgtttggagagttgaatgtggaatcccttctggatttccgctcacagttatttgcaatagcatttttaatgagatgctcattagatatagctatgaaaaattactgcgccaggc

SEQ ID NO: 45920 - DNA, 438 bp, Glycine max
  Clone ID: LIB3139-094-P1-N1-G11
acaccatcgataacgtgaaagctaagatccaggacaaggaaggcattccaccagaccagcagcgcttgatcttcgccggaaaacagctcgaagacggcagaaccctcgccgattacaatattcagaaagaatcgacgcttcatctggtgcttcgactccgcggagggatgcagatcttcgtgaagacgctcaccgggaaaactattactctggaggtggagagttctgatacgatcgataacgtgaaggcgaagattcaggataaggaagggattccaccggatcagcagcgtcttatcttcgctgggaagcagctcgaagacggacgcactctcgccgattacaatatttagaaggaatccacgcttcaccttgttcttaggctccgtggtggcgatttctagtttcagttgaatcttgctattgagattttctctt

SEQ ID NO: 45921 - DNA, 175 bp, Glycine max
  Clone ID: LIB3139-094-P1-N1-G12
ctcgagccgattcggctcgaggaaatgcaataatggggaatcctgtggtgtcaactgctgccagtctttcttattccagctccagttcaggagtaaacccatcttctggctattcacatccacccattgtatcatcctcactatttatttcccggagctccttcatattggattc

SEQ ID NO: 45922 - DNA, 440 bp, Glycine max
  Clone ID: LIB3139-094-P1-N1-G2
cgaagcccctgccaatgggggaggccattgcgtttggaaagacggttacggaccacatgctccgcgtcacgtggacggcggagagcgggtgggacactccccgcataacgccgtacggccccattgttctggatcccgttgccagcgggctgcattacggcttcgagtgcttcgaggggatgaaggcataccgcgacgcggcgggacgtctccgacttttccggcctgagctcaatgccgcacggctgaataggtctgcggcgcgcatctctctgccgacattcgacgaggccgagttcgtgaagttggtgcgcatgttcgtgaagattgaagggcggtgggtcggaaacggcccccctcactcgctctacatccgacccgttctcgtgtccactacggcctcactcggcgtctccgcgcccacgtccgcactcctttac

SEQ ID NO: 45923 - DNA, 435 bp, Glycine max
  Clone ID: LIB3139-094-P1-N1-G3
gaaggttttcctcatgtgctttcacgcaaaaatggtgaaaaaggcaaaaggagatttgtttctggggatggtgaagagatgacattgattccgggaactagtgttgaagaggcttacaacaagctaatagttgaacttgagaaaagtgttcctacattggttggcattgaatgtcccaaggatgagaaacttccccgtcgcaaaatttttgacaaacctaagacgcgctgcttcactattctccctatggagtttaatcttgtggtccgtcagaagtttttaaattttgtgaggttcattatgaagaaaagggacaagcttagttgtcaagttggaatcaacccatactccatggaatggactggtttggccaatagattactgagtaagggcaacgattttctgtgttgcgaatattgctagtttgatggttga

SEQ ID NO: 45924 - DNA, 97 bp, Glycine max
  Clone ID: LIB3139-094-P1-N1-G4
aagacctggaacttcacctttctacgtacgtgtgctgttaggatgcagtgtgctttgatgatgctttgatgaatatgcagtgtgcttttttaagtct

SEQ ID NO: 45925 - DNA, 427 bp, Glycine max
  Clone ID: LIB3139-094-P1-N1-G7
cattaattgcaagaatggcacttcgttgcttggtgatgtccctttctgttctcttcactcttggtcttgcgagagaaagccatgccagagacgaagatttttggcatgctgtttggccaaacactcccattccaagttcattgcgagatcttctaaagcctggccctgcaagtgttgaaatcgatgatcaccctatgcaaattgaagaaacacagtacccgaaaaccttcttctataaagaagaccttcatccaggcaaaacaatgaaagtacaattcagcaagccttcctttcaacaaccatggggtgttggtacatggttaaagggaattaaagacactactaaagaaggatatagttttgaagagctatgcatcaagaaagaagccattgagggagaagagaagttttgtgcaaaatccttggg

SEQ ID NO: 45926 - DNA, 420 bp, Glycine max
  Clone ID: LIB3139-094-P1-N1-G8
gaaaatttgacgatggcgttcttcagttgaggcatgttattcgctgctcactcttccaactactactgttgttcttcttcgtcgtcttggccttcgcatcttcacaatcacatccaatagagacacgttgactttgctggaagaagaagaagaagagaatggaacaatcgcttttggatgacataatcaatcgcctcctcgaagttcctaccctaccggctaagcaggttcagctatccgagtccgagatccgtcaactctgcgtagtttccagagaaattttcttgcaacaacctaatttattggagctcgaagcacctattaagatttgtggtgatgtacatgggcaatattctgatcttttaaggctttttgagtacggtggattacctcctgaagccaactatttgtttttggggg

SEQ ID NO: 45927 - DNA, 405 bp, Glycine max
  Clone ID: LIB3139-094-P1-N1-G9
gttctgttagacaaaacaaaagtggagtgatagagtgagagatgcaaagaggatggtccttctacaaggattttctgccagttgtggtgattataggcaatgaattcaatgacatgggtacactcacactcttcaaagcagccacactgcaagggatgaacaaccatgtctttctggcctatgcttatgctcttgctaccattatactcattcctatcacttttttcagcagaagatcaagagtggttcctgttcctccacttagtttctccatagtatccaaaatagttcttcttggggtgattagaagttcatctcaagtactgggttatgcaggcattagctacagttctccagcacttggtttcatcaattggcaatctggtacctgctttcacctttatt

SEQ ID NO: 45928 - DNA, 421 bp, Glycine max
  unsure at all n locations
  Clone ID: LIB3139-094-P1-N1-H1
cacattctctgccctctctttttctttgtgatagaacaaacaacaccaatcagggagaggaaaaaaaaaaagaatagagctattcttctttttatgggttttcgcttacaaatattgttaaatcaatctgtttttgttcaattttgatcccttatatactagttcctctcttgattgcttgatcctttagactatcatcaccgtctcattcatcgaggcttcgtgcggtgtgataaagatgctaaattttagctgattctatcaaccctactttcaaaaacggttactttctcttgcaccctctgtctccatccatatagaaacaagagagtgttcgcttctgttcatttagccattcttgcatacccgntattcttccccattcttgtgtttctctgtttgngagggaaagatttttttt

SEQ ID NO: 45929 - DNA, 302 bp, Glycine max
  Clone ID: LIB3139-094-P1-N1-H10
gttaagagaatgcctctttctatagggggaggagctggtgcaaagaatgctattctcatgaatatgccaaatgctgttctttcaatgtggagatattttgttggagatctcgtctttgaagtttctaagatgacttctccctacattaaatgtacagtctctttcttcatagcatttggaaatttggctgatgacaccatcaattttgaggctttttcccacaagctggtacagtttggagagattcaggaaaaagttgtatttgaattttcacaagaagaatttcttacagcttggtcaac

SEQ ID NO: 45930 - DNA, 388 bp, Glycine max
  unsure at all n locations
  Clone ID: LIB3139-094-P1-N1-H11
gtcccaccataaaacatttagatggctacctagggacaggtgtaaatacaatgagaccaagaccaagatggctttaatttgtatgttaaactttgcattgctagagaaattaataaggtgcatgagtactttggcacctattatgctacatataccttagatacgttataggttgacaaagtcgtactggtaggttcaagaagcacagttgtctctcacattgtctgtcacccaacttgctatagtgtgtggagaaattcggatcatattgaagatgttctaatgagttccagtccttcattaagtgtttaacgattctgtctttctttatataatttntgtttgcttttannnaaaaaaaaaaaaaaaaataaaaaaataaaaatta

SEQ ID NO: 45931 - DNA, 290 bp, Glycine max
  Clone ID: LIB3139-094-P1-N1-H2
gcacttcaacaaggtctaaaagttattgcatgcattggggagactctcgaacagcgtgaagctggtacaacaacggctgttgtttctgagcaaacaaaagcaattgcagctaaaatatcaaattgggacaatgttgttttggcctacgagccagtttgggccattggaacaggaaaggttgctactcctgctcaggctcaagaggtccatgctgatttgaggaaatgggttcatgacaatgtgagtgccgaagttgctgtatctgtaagaattatctatggaggttctgt

SEQ ID NO: 45932 - DNA, 413 bp, Glycine max
  Clone ID: LIB3139-094-P1-N1-H3
atggaaacaaatttgtttaaattgtctcttgatgatgttgaaactcctaaaggttctatgttggatcttaaaatttctcaatctaaaattgcacttcccaagaacacagttggaggaaccattctgcgtagtgatctattggcaaattttttgacagagggcaattttagagcaagtgttgatttgcagcgcactcatcgtattaaaggaatgattaaaatggtggccacagttggtattcctgagaatacaggtatagcattggcctgtgctatgaatagttcttttagggggcgcgccagttctgatatttacaccatctgctctcaagacttggaattatggaatcctgcttgcacaaaagcaatgactatgtcattttaaccaaacccgtgttctgatgcatggagttt

SEQ ID NO: 45933 - DNA, 429 bp, Glycine max
  Clone ID: LIB3139-094-P1-N1-H4
taaggaaggttttgagtgtcaacttcgtccacaagtctgtcctttcattagagcaatcgtgaaggagacattccgcatgcacccgccactcccagtggtcaaaagaaagtgcacagaagagtgtgagattaatggatatgtgatcccagagggagcattgattctcttcaatgtatggcaagtaggaagagaccccaaatactgggacagaccatcggagttccgtcctgagaggttcctagagacaggggctgaaggggaagcagggcctcttgatcttaggggacaacattttcaacttctcccatttgggtctgggaggagaatgtgccctggagtcaatctggctacttcgggaatggcaacacttcttgcatctcttattcagtgcttcgacttgcaagtgctgggtccacaaggacagatatt

SEQ ID NO: 45934 - DNA, 445 bp, Glycine max
  Clone ID: LIB3139-094-P1-N1-H5
cgttgctcataacgttaatcagtctcaagagaaagatttgttagagggaaatttttcctttgatattaaatctcgctctagattggaaaaagtttcctctacaaaagcacaatttgttagtggaaaaaccttcaaatatgatataattggtgctggttcacattcttcaggagattttcctgaaaaggaagatcaagaaaaacccaaaaagattgataccagattgagacaaagaatagatcctcaatacaatgaggttcaggctcagatggaaacaaatttgtttaaattgtctcttgatgatgttgaaactcctaaaggttctatgttggatcttaaaatttctcaatctaaaattgcacttcccaagaacacagttggaggaaccattctgcgtagtgatctattggcaaattttttgacaagaggcaattttagagcaagt

SEQ ID NO: 45935 - DNA, 261 bp, Glycine max
  Clone ID: LIB3139-094-P1-N1-H6
acgctctcacgcacgcgcacgcaagagtctgaatattgctctagggcgcgggaagagatatatatattttttgagagcacaaacacaccgtattttttccagggagaccagtgtgcacaggccgctgtcaacaaggtgttgtgcacattcgtggggcagttgattatgttgacgcagactgtgagaggggttatgctacatataccttagatccgaaataagcaagacaaaggctgaacttgtagaataaaaagagcaaga

SEQ ID NO: 45936 - DNA, 434 bp, Glycine max
  Clone ID: LIB3139-094-P1-N1-H7
cttcttcttcttccccatcatcatcttcatcatcctctattaattggttatcttttttttttttttctagattaactagctcaatctttctcatcatgtcatcaaatcaagcatcccttaaccttaaccaagccaaatttgcccttccaaccaatgacgaccttgagcaacaacaacaacaagcaacaacaactctagagattgaatctgatgaggacacctttgactactcaaaaagatctcaatggctccgcgccgctgttctgggagccaatgatgggttggtctcaacagcatcaatcatgatgggtgttggagcagtgaagcatgacatcaaggccatgatcctatcagggtttgcagggttggtggcaggggcatgtagcatggccataggtgagtttgtgtctgtttactcacaactagacattgag

SEQ ID NO: 45937 - DNA, 355 bp, Glycine max
  Clone ID: LIB3139-094-P1-N1-H9
attaaagcgaactgggaaaagttgcagattaaggtggctaaattatctaaagccagatgtaaaacggggaaatttaaccccacaagagcaacttataatcctcgaactccactcaaagtggggaaacaggtgcttatcttgtgcatttgattcttgagctccacaggttttaaattgtggtccaggttgagcttacagtcggcgttttatcgcgatttctttgtattgcgagaaattgtagacaaatgcgaccaatgcagacttgaaacggtcacaaagactctcaaagccttgaggtcgcgggcaaaatcgtgatcacaaactgttttttaaaacctgtctttttaaaaatgct

SEQ ID NO: 45938 - DNA, 367 bp, Glycine max
  Clone ID: LIB3139-095-P1-N1-A1
gacaaaactagtgcaactttgcaatttagaaagttagcagattgtgattttctcaagagaaactttaagcagatgtctaatgttttatgggtggctcctgaggacaaggcgagtttatggtcacaacttcattatgtttcgtgcaataatctggaaatgcaagaagcttatcttgtcaatctcgtaaatgtgttacgagaattgtatttgcacagtccagaggaagctcgccaattgagaaggaaagctctctctcgtattgaatggctgcaaaaagctgatgtgcctaccatagcacagattgaagagttccattcgatgcagaagatgatgaatgctcctgattcaaatgataatattgatctac

SEQ ID NO: 45939 - DNA, 396 bp, Glycine max
  Clone ID: LIB3139-095-P1-N1-A10
ggctaaagctccaagtatgtttttacaatccttcaaaaattttgtttctttgtgtgtgtatggtgatgataacttaattagtgttcatgaatatgtcaagccttactttagtggttctaaattgaaaagctttctagctggtcataatatcaccattactgatggtattgacaaaactagtgcaactttgcaatttagaaagttagcagattgcgattttctcaagagaaactttaagcagatgtctaatgttttgtgggtggctcctgaggacaaggcgagtttatggtcacaacttcattatgtttcgtgtaataatctggaaatgcaagaagcttatcttgtcaatctcgtaaatgtgttacgagaattgtatttgcacagtccagaggaagc

SEQ ID NO: 45940 - DNA, 379 bp, Glycine max
  Clone ID: LIB3139-095-P1-N1-A11
ggtaaagcttttccaaacaagattgcttttgatgataagcttgtgttggctaacacacaagaattctttgatggaaattttccagtggattcttggttaccaatttttgtgaattgtctctatcctgtaagtcaattaccttcagaagctgtcgttgtaaatgttacatgtggtagtggacgtgtggtttacccaccactgcttgcattaggtctgcagctaacaatcgactctaagacattaactaatggattcggacaggactctgaaaacgtaagaagattgtggttattactagagtatatcctttttcagaagctttattggctggtctcttttgcggtcaaaatgaaatattgagtactagcgccgcttaccc

SEQ ID NO: 45941 - DNA, 365 bp, Glycine max
  unsure at all n locations
  Clone ID: LIB3139-095-P1-N1-A2
ccgcgatcacaggttgccgcaccttaaaaccggaaacaaaagcaatcgttacttgatttcaagaatttctcaatttcttcctacttctttgtgtacgatttcttaagggaaagaaaatcactctctgtgctggccacagacttcgtgaatcattttcttttccactcttagtttatttgctgaacactctcctatttgacataggacttcgtgtcagatttaaacttcttctgtttctttctcagntctctgtttaatttcaagttcaagctggtgaaatcttggattagtgctcccactctcctatctggtataggacttcgtgggtagacctttctatttctctcccttctttcactctcttc

SEQ ID NO: 45942 - DNA, 399 bp, Glycine max
  Clone ID: LIB3139-095-P1-N1-A4
gagcgtgtccgttctacaaggccagctggtgatctaggtccattgtacccatttactgctggggtctacgtggcattgatgatggcccagattgagatcctgaggaagaaggggcattcttactctgaaattattaacgagagtgtcattgagtctgttgattctttgaatcctttcatgcatgctcgtggtgtttcattcatggttgataactgttcaaccacggcaaggttgggttcaaggaaatgggctccccgatttgattacatcctaacccagcaggccttggtggctgtggacaatggagcacctatcaaccaggacctaatcagtaacttcctgtcagaccaagtgcatggagccattgaagtttgtgctcaactgagacctacagtagac

SEQ ID NO: 45943 - DNA, 390 bp, Glycine max
  unsure at all n locations
  Clone ID: LIB3139-095-P1-N1-A5
gagaaaaaccatggcaataacactcaacaatggcttcaagatgcctatcattggattgggcgtgtggcgcatggaaggaaacgaaatcagggacctaattctcaattccatcaaaattggttatcgccattttgattgtgctgctgactacaaaaacgaagcagaagttggagatgcgcttaaggaggcttttgatagtggccttgtgaagagagaggatctcttcattaccaccaagctttggaattctgatcaaggccacgttcttgaggcgtgtaaagacagtctcaagaagcttcagttaacgtatctagatttatatcttgttcactttcctgttgccgtaaggcatactgnggttggtaatacttctagtcctttgggtgatga

SEQ ID NO: 45944 - DNA, 398 bp, Glycine max
  Clone ID: LIB3139-095-P1-N1-A6
caggaaaaagttgtattgaaattttcacaagaggaatttcttacagcttggtcaactcaggtgcgtcctgcaacaactctgttggctgatgggtgtccatatttgtatgctatggtgcatgatagttcagtgtctacaataccaggtgattttgtcattggtgttaagttgacaaccataaacaatatgtgtgcatatgggcttaatcctggtatttcaggttctcgtcttttgggcaccattcctcagtccatttcacagcaaactgtttggaatcaaatggcaacagtgagaacaccattgaattttgattctagcaagcagagcttttgtcaattttctatcgaccttctcggtggaggaattttagtggacaaaactggagattggatcacact

SEQ ID NO: 45945 - DNA, 183 bp, Glycine max
  Clone ID: LIB3139-095-P1-N1-A7
ctagagcctgcttgaatcgagccctataccatggacctgatcgaaccatacattaatcttacgctctagatgaagcatcccactgccagtggtgcttgtgcgcaaggtgaagatcatgcataggcaaagatgatgtagcatgtgctgtgtgggacatcgacgatacaaggtacatctgcaacg

SEQ ID NO: 45946 - DNA, 214 bp, Glycine max
  Clone ID: LIB3139-095-P1-N1-A8
ctcgtgcatatatttatttctaacccaaaacaattaacctgttgagaccattcattaatctaacactttaaattaaacagcccacatccaaacatgcttttgctcaacaaaaagatcatgcataggcaaaaaaaatctagcatgagctgttattgcctattcttcaaaggacacaccaactgccccaaaagaatttttttttttgaaagaaaaa

SEQ ID NO: 45947 - DNA, 306 bp, Glycine max
  Clone ID: LIB3139-095-P1-N1-A9
agtttccttattgacaatcccaaacagtctacagtttttgatattctcttgggaatttctcaagattttgaaattgctggtaatactcttatgccagctttttctgtcccacaggctactgccagatcttctgaaaatgcggaatcctctgcatgatctggaatttgtgttttctctcgcttgttcgtttgtttaattcaataaaggaaattaggcatgaccctcttgttgagtatgctctgcctatttgaaaatttccacacctcttttaattatcgtaatgatgtgtgaagtgtgtgttatttt

SEQ ID NO: 45948 - DNA, 227 bp, Glycine max
  Clone ID: LIB3139-095-P1-N1-B1
gtaatactcttatgccagctttttctgttccacaggctactgccagatcgtctgaaaatgcggaatcctctgcatgatctggaatttgtgttttctttcgcttgttcgtttgtttaattcaataaaggaaactaggcatgaccctcttgttgagtatgctctgcctatttgaaaatttccacacctcttttaattgtcgtaatgatgtgtgaagtgtgtgttatttt

SEQ ID NO: 45949 - DNA, 371 bp, Glycine max
  Clone ID: LIB3139-095-P1-N1-B10
gtcacttgcaactccctcaattccgtcacggaaatcaacctctgcgaccaaactctctccggtgttctcccgttcgactcgctctgcaaacttccgtcgcttcaaaaactcgtgttcggttacaactacttaaacgggaaggtttcagaggacattagaaactgcgttaagttacagtacttggacttgggaaacaaccttttctctggtcccttccccgacatatctcctctcaaacaaatgcaatacctgtttttaaacaaaagtggattttcgggaacctttccggggcagtcgctgttgaacatgacgggtctgttacagttaagtgtcggagataaccctttcgacttaacgccctttcccaaaga

SEQ ID NO: 45950 - DNA, 400 bp, Glycine max
  Clone ID: LIB3139-095-P1-N1-B11
agaacctagacaactactaataaaaaaaagaaagcagaggaaaatcaacacggctacaaaaggagctgcaacgcctatcagttgaagattagaaatccatgctaaccccttcctttaaaatcttctaccctttatccattttctactaccccatctctctccctttcccatctacttctaaaccttcatcaaacataactctcttcctagagaaacataaatatttttatagcataggacttatttgattcttgttaattcacaccacaaggataattgacatgggatcaagcttctctagttgttatgagggtgaatctgtgtctccttctccaaagccaaccaaagtggtggctacgaaaggtggttcttcttccaacagggtctctataacggactt

SEQ ID NO: 45951 - DNA, 374 bp, Glycine max
  Clone ID: LIB3139-095-P1-N1-B12
cctaaaggattttatgctaataaagtgtttgtctggtattcagaaagggtcacaatctcttgtcagttttttgctttctttagttaggtatctttgctgtctctttttgtttactttcttgttccatgtttgatattcaaatttgggtcggcaggtagtgttttcattgcgctttacctttgtcgatcgcaagtgaagtagtttagttttgatttcttgatataccctctactattactactacaagtctataagtttgtatgaattgagtctcatgtgatattttactggatgtaacatgtagtatattctcaatctcaataaattgaatgaggatgaaacatattgagctgctgtggacctgatttaacact

SEQ ID NO: 45952 - DNA, 281 bp, Glycine max
  Clone ID: LIB3139-095-P1-N1-B2
tggagatctcgtctttgaagtttctaagatgacttctccctacattaaatgtacagtctctttcttcatagcatttggaaatttggctgatgacaccatcaattttgaggcttttccccacaagctggtgcagtttggagagattcaggaaaaagttgtattgaaattttcacaagaggaatttcttacagcttggtcaactcaggtgcgtcctgcaacaactctgttggctgatgggtgtccatatttgtatgctatggggcatgatagttcaatgtcta

SEQ ID NO: 45953 - DNA, 405 bp, Glycine max
  Clone ID: LIB3139-095-P1-N1-B4
gaaacacccaaaatggcatcctcagcctcgaccacgctgtcttctccggtcctgcgactagaattcccctcctcaaccaaacaacgctcttcaatctccatcagagcctcggtctccgagaaacccccgctaccggctgtgtcggtgacctccccggagcccagcaagcttccgatccgcaaaatccccggcgactgcgggttcccggtgatcggtcccttcaaggaccgccaagactatttctacaagcaagggcgcgacgagttcttcaagtcccgcatccaaaagtaccaggtcaacggtcttccgcaccaacatgccccctggccccttcctcgcccccgacccaaacgtcgtcgttctcctcgatgccaaaagtttccccgtcctcttcgacaactctaa

SEQ ID NO: 45954 - DNA, 386 bp, Glycine max
  unsure at all n locations
  Clone ID: LIB3139-095-P1-N1-B5
gctgacaactgcacaggtctccaaggttttctggttttcaatgctgtgggtgggggaactggctctggacttggttcccttttgctggaacgcctttcagtggactatggcaagaagtccaagcttggtttcactgtctatccttcaccccaagtttcgacctctgttgttgagccttacaacagtgtcctctccactcattctcttcttgagcacactgatgtggctgtcctgctcgacaatgaagccatttatgacatctgcaggcgttcactggacattgagaggccaacctacaccaaccttaatcngttagtttctcaggtgatatcatcactgactgcttccctgaggtttgatggagccttgaatgttgatgtcaatga

SEQ ID NO: 45955 - DNA, 398 bp, Glycine max
  Clone ID: LIB3139-095-P1-N1-B6
gtgatttcagaactgcattggtgagtaaaaatagcaaacctcaagctactgcaatgcatgtgggagctatagaaattatcattgatagtttcgcaagtcctgactgcaacatagttggtgcaatgcttttggttgatacttatcataccaatcctgaaaatgcagttcgtagtatttttgttgcgcctttcagaggcggaaggcccattcgggtggttacatttccgaataccattgtgcagattgaaccagacatgaattcaaggtttcagcttttgagtaccactaccaatggtgattttgttaagggaaagatctcgcaatggttaaagttaatgtaacatgtgctgctgttggcttgacatcaagttacactccaactccattgttggaatctg

SEQ ID NO: 45956 - DNA, 393 bp, Glycine max
  Clone ID: LIB3139-095-P1-N1-B7
gattaaaatggtggccacagttggtattcctgagaatacaggggtagcattggcctgtgctatgaatagttcttttagggggcgtgccagttctgatatttacaccatctgctctcaagactgtgaattatggaatcctgcttgcacaaaagcaatgactatgtcatttaatccaaacccgtgttctgatgcatggagtttggaatttctgaagcgtaccggatttcattgtgatatcatttgtgtcactggatggactgccactccaatgcaggatgttcaggttacaattgattggtttatttcctctcaggaatgtgttcccaggacctattgtgttttaaatccacaaaatccttttgtgttaaataggtggatggggaaactgacttt

SEQ ID NO: 45957 - DNA, 387 bp, Glycine max
  Clone ID: LIB3139-095-P1-N1-B9
gaagaaccaagcacaactcctgtccctgagagggtacaagtaggtaactctcctatatataagatagagaggaaattgggtaagggtggttttggtcaagtttatgttggccggaggttaagtggtggctctgatcgaacaggtcctgatgcggttgaggttgcacttaagtttgagcacagaaacagcaaaggttgcaactatgggcctccttatgagtggcaagtatacagcactctgaatggctgttatggcattccctgggttcattacaagggtcggcaaggagatttctacattttggtcatggacatgcttgggcccagtctttgggatgtatggaattctgttggtcaacaaatgtcaccaaatatggttgcgtgcatt

SEQ ID NO: 45958 - DNA, 399 bp, Glycine max
  Clone ID: LIB3139-095-P1-N1-C1
gaatgaaggacttatgctagttgtggctactttgtggcaagatgtgttgtggagtgtcttgacactgttgtgcatacatgtggccatgatgctttcggcaggctattttagagttcgaaatgctttgcctggacccgtgtggatgtatccaatgtcgtatatagcctttcatacttactctattcaggggctattggagaatgagtacctaggaacctcctttgcagtggggcaggtaaggaccatatctggctttcaggctctccaaaatgtgtacaatatctcccccgacagcaattcgaagtggaaaaatttgttggttttgtttctaatggcaattggttaatcgaattttgttttcattttattgtttttcttcatggggagaaaaatatccct

SEQ ID NO: 45959 - DNA, 281 bp, Glycine max
  Clone ID: LIB3139-095-P1-N1-C10
ctctactcctttttttttatcacaaatacactcatcaagggcaggttttctcaactttctcctacatcactatatctacctattattattattttattcctcacaatatccaccatacttcatttttctatacaattaatctttctttttcctttttcaactttctttctttctttacatatcattttcttatctattcaaatcttttagttaatcttttttcttatcttacatattattatactatacatttatctctcatatcaaataaactttttatt

SEQ ID NO: 45960 - DNA, 399 bp, Glycine max
  Clone ID: LIB3139-095-P1-N1-C11
ggaggaacctcttcatacaatctggattctctccattcacattgagcaacttcacagaagctcaagctgagtgtctagttcagagggcacctgtgaggggatttcatgtggagagaaagccttcatcacttgttctatgctggcaaaggaaagaactcatctcagtttctacttggagatgctgaggagcagcagcagaagctaattaccttatatttttaaaggtgcatggtaacttacattgcagtttatgtaattgtttgtgtaatttttaggcttattgatgagatctacacccaaatgttttcttaactacatgggttggaatctatcattctatagttctattactagtacgtcactttgaacatgggtagtaattatgcctttccccattcc

SEQ ID NO: 45961 - DNA, 188 bp, Glycine max
  Clone ID: LIB3139-095-P1-N1-C2
gattagtgagtcttttcatgttgtagcatgcacccatctgtgcggtctgttgcttttgtcttcactttgagatgataattttgtattcacacatatttttagctgtctagaattgtcttataagttacaatttccagggtttgacattttagatttttaattgattaattaattaatttactattttc

SEQ ID NO: 45962 - DNA, 402 bp, Glycine max
  Clone ID: LIB3139-095-P1-N1-C3
gtgtctacaataccaggtgattttgttattggtgttaagttgacaaccataaacaatatgtgtgcatatgggctcaatcctggtatttcaggttctcgtcttttgggcaccattcctcagtccatttcacagcaaactgtttggaatcaaatggcaacagtgagaacaccattgaattttgattctagcaagcagagcttttgtcaattttctattgaccttctcggtggaggaattttagtggacaaaactggagattggatcacacttatacaaaattctccaattagtaacttgttgagagttgctgcttggaagaaaggctgtttaatggtcaagattgtgatgtctgggaatgcagcagtcaaaaggagtgattgggcctcattggtacaagtgttt

SEQ ID NO: 45963 - DNA, 395 bp, Glycine max
  Clone ID: LIB3139-095-P1-N1-C4
ggtcgtttgatgaacttgggatgcgccacaggacaccctagttgtgtgatgtcctgctccttcaccaaccaggtcattgctcagcttgagttgtggaaggagaagagtaccggcaagtacgagaagaaagtttacgttttgcccaagcaccttgatgagaaggtggctgcacttcaccttggcaaacttggagctaagctcaccaagcttagcccggcccaggctgattacatcagtgtgcctgttgagggtccatacaagcctgctcattacaggtactaagtaattgagattatcaacggaaagtgagggaaagacaaaatcggttttatgaatcggattgattgtttaattttcctttttttgaatttttgttgttagacttttcagatttg

SEQ ID NO: 45964 - DNA, 401 bp, Glycine max
  Clone ID: LIB3139-095-P1-N1-C5
gccggctttatcaccgaccaacacgccggtggccactccaccgaggagggcgttgtctccgtctcctgttcctgctgcggtgccaccgtcgtcttctcctccggctccacctacttcttctccttcggagcccccaattgcagctgctactccgaacatccctccctcgaccatctcgactccaccatctgaagcaccaggaccagctgcaaacggtgccgttttcaacagagttggcggatctgctctcattctaatcatcgcttcggccatgctcgtatagaacaaattctgtgggattattcatgaatacttgagttttttgaactccagtacttttttttcctggtgtcgttgaagacgattcatttattttaattattttatttatttattcattc

SEQ ID NO: 45965 - DNA, 403 bp, Glycine max
  Clone ID: LIB3139-095-P1-N1-C6
gcgtgtgtttgtgaattgttgttgagatctgaatcaaaatcagaaacgataatggctacaccggaccacctcttcaacctccgcaacaacttctacctcggcgcttaccaagccgccatcaacagcagcgacgttgccaacctctcccaagaagataccctcgagcgcgacaccctcgtccaccgctgctacatcgccctcggccagctccagttcgtcatctccgagatccacgacgatgctcccacaccactccaagccgtcaaactcctcgccctctatttctcctctcccgacaccaaggattccgccatcgcgagtctcaaggagtggctcgccgatcccgctattggaaacaacgccacgctgaggctcgtcgccggtctcgtcttcctccacgaga

SEQ ID NO: 45966 - DNA, 342 bp, Glycine max
  Clone ID: LIB3139-095-P1-N1-C7
ctcgagccgcttttcttcttcaattcatatcatatcaattagatgtgttttcagagtttgctagtgagataccatggacaactacaacagcaatgacttttggaaattcagtgaccagttgaggcttgaatctggtttggccaatctgtctctgaatgattattccatttggagcaacagctacagctccaagaggcctgatcagaggaggaactttgatgtcaagggcagtgatttcaacaactcatcaaagccttttgatgatgatttcaatgatggctggaagatcaccaattccaatggaccccttttctctatgcctcacaacaacaacactcacac

SEQ ID NO: 45967 - DNA, 385 bp, Glycine max
  Clone ID: LIB3139-095-P1-N1-C8
ctctagccgcttttcttcttcaattcatatcatatcaatgagagtggttttcagagtttgctagtcaaataccatggacaactacaacagcaatgacttttggaaattcaatgaccagttgaggcttgaatctggtttggccaatctgtctctgaatgattattccatttggagcaacagctacatcttcaataggcctgatcagaggacgaactttgatgtcaaagacacacgatttcaacaactcatcaaagccttttgatgatgatttcaatgattgctggaagatcaccaattccaatggaccccttttctctattcctaacaacaacaacactcacactcttgtagtagcagcttcaacatgggaggaatctatttcaac

SEQ ID NO: 45968 - DNA, 394 bp, Glycine max
  Clone ID: LIB3139-095-P1-N1-C9
tgctcctagttgctgcatatttctaatacattcatcaagtgcatgttttctccgttgccccctacattaagatggctgttgaatattatgattttgggcctcacaagatccaccatagttcagtgttctatacaagtaatctttcttttgcctttgtcaacttgcgtcctgctgtgacaggtcatgtgcttgtctgttcaaagcgtgaagtgaagcgtgttgctgatctcacagatgatgagactatagatttatggcgcatagcaaagaaacttggtaggcagctagagagctaccataaggcatcatcacttagctttggtatccaaatgaatgaaaaagagaaagagttgaatcgagcgcttaaggtggatgtagaaaggaaagacaggag

SEQ ID NO: 45969 - DNA, 398 bp, Glycine max
  Clone ID: LIB3139-095-P1-N1-D1
gtcatttaatccaaacccgtgttctgatgcatggagtttggaatttctgaagcgtaccggatttcattgtgatatcatttgtgtcactggatggactgccaccccaatgcaggatgttcaggttacaattgattggtttatttcctctcaggaatgtgttcccaggacctattgtgttttaaatccacaaaatccttttgtgttaaataggtggatgggaaaactgactttccctcagggcacttcccgaagtgttaagagaatgcctctttctatagggggaggagctggtgcaaagaatgctattctcatgaatatgccaaatgctgttctttcaatgtggagatattttgttggagatctcgtctttgaagtttctaagatgacttcttcctaca

SEQ ID NO: 45970 - DNA, 366 bp, Glycine max
  Clone ID: LIB3139-095-P1-N1-D10
cggctcgaggctagcaagggtgttgtagtatagttagagatatcactactacaccaccctgcatagtttgttcagctataatactacttgagcttctttacctacttttcaaacctacattgcacacaaaatggcaacatcttggtcatgttatctacttgcattgcttctttttatgtcaactattgtatcagagagtagagtggcaaggaaggacttgggcctggaccttggtgggttgggggttggacttggactgggtttgggcctggggataggaggtggcagtggctctggagctggtgccggagcaaggtctggttctggttctggttctggttctagttccagttctgcctcaagttc

SEQ ID NO: 45971 - DNA, 399 bp, Glycine max
  Clone ID: LIB3139-095-P1-N1-D11
gcgtaatacgaaataaatttttaaaaaaaaacgttcgctggttaatggttttaattttattgttctcagattaacctttctctttgtgaatcctattcaaacgtcgattgtgaatctgagtgtttttttactttgattcgattcgatatgaagcgagcgaggaaatccaacagggtttcgtgggctactggagagaacctgtgtcaggtaaaattgttcttgtctgacgattacccctcaatagttggtcagaaatcacaagatcatcttcaagcaaagacatcatcaatgttacattctagtattaacgaacctaatgatttgccccccgggtttgaaagcagtcatttcctaaaccaacccaaggttgaattatccaacattcccctgataaaatgg

SEQ ID NO: 45972 - DNA, 344 bp, Glycine max
  Clone ID: LIB3139-095-P1-N1-D12
caatacaatgaggttcaggctcagatggaaacaaatttgtttaaattgtctcttgatgatgttgaaactcctaaaggttctatgttggatcttaaaatttctcaatctaaaattgcacttcccaagaacacagttggaggaaccattctgcgtagtgatctattggcaaattttttgacagagggcaattttagagcaagtgttgatttgcagcgcactcatcgtattaaaggaatgattaaaatggtggccacagttggtattcctgagaatacaggtatagcattggcctgtgctatgaatagttcttttagggggcgcgccagttctgatatttacaccat

SEQ ID NO: 45973 - DNA, 402 bp, Glycine max
  Clone ID: LIB3139-095-P1-N1-D2
atcaagataaaagtaaactatgtggttcaagaggctatcattgggatcaaagatatatttagaagataccccaacacatatgagtccataattgcaacactttgtgagaacttagacaccctggatgagcctgaagccaagagagaattgacaatgccgatgagcttcttgaaagtttcttggaaagtttccctgaagaacctgcacaagtccaactacaattgttgacagctactgtaaaacttttccttaagaagccaactgaaggcccacagcagatgattcaggttgttttgaacaatgccactgttgaaacagataatcctgatttgcggatcgtgcatacatatattggcgtctcctctcaactgaccccgaggcagctaaggatgttgtgttagc

SEQ ID NO: 45974 - DNA, 401 bp, Glycine max
  Clone ID: LIB3139-095-P1-N1-D3
cggctcgagggagagcttgtgtttttctgatcccttatcttaattaattgaatcaccaatggctcgttctatcgctaacgccaagactttctccgctctcgtgctagacggattctccaacactctcaccagacgtggctactctcaaagcgcaacaaggggaggagttgcctccatagcacccaaatcaggggaagacaaaggtgtctcatcatacaaggtttcctgggtgccagatcccgtcaccggttactacaaaccggaaaacatcaaggaggttgatgttgccgatttgcgtgctacccttctccgcaaaaaattcaacaactaatttcaacaattttaattttttaccaaaccttgggtgattgattcgttatggaattaattttgatactcat

SEQ ID NO: 45975 - DNA, 364 bp, Glycine max
  Clone ID: LIB3139-095-P1-N1-D6
tgaattggaagaccaggaaaaagagtttgagaacaaaacaaggaaggctcaggagatactggagaagcggcaagcagctgtttatgccaaggagcaagccacgttgcagaggcttcaggagaaaagggatgctgctgtatttgacattgtgaatgctcgagaaaagcagaggaaggtcacgataagtgatttggctattgtctccaatgggggtaaggggacatttcatgtggaggacaaaccagtggatgctgtgtcctttgcagctaatggtaatggtgaaggagtggtactttctcctgaaaatggaaatgtgggagtgtcttatccagacttggtaaaactttgtaaagagatggatgct

SEQ ID NO: 45976 - DNA, 182 bp, Glycine max
  Clone ID: LIB3139-095-P1-N1-D9
ggcatcgatagtgaatacgtgttatatcacaggggctatgcgcgggatacattgactcactgccgctactgtgtgtactacggttaagatagtgattgttggatgaacttctagggattcaacggatacttgattcaatacaaccgaggcatgcataatgtctatgctttgcacaatctaat

SEQ ID NO: 45977 - DNA, 399 bp, Glycine max
  Clone ID: LIB3139-095-P1-N1-E1
aatttttgggtattctatatcatgtcagacaaagggcttgctttcatattcagaaaacttggctttaacgtccagacaccaacaggttcattcactgctggtctagtaggggattcctcaccattttctgtactacctcagatcaaaccatctgtgaccttcataatggttcttcttgccttatctccttgccttttcaaggcttggaagaatccacagccacagatgattagtagatggatagcctatgcttatacatgtggctttctttttgggtggcatgtacatgagaaggcatcactccattttgtaataccacttgcaattgttgcggcacaaactctggaggatgcaagacattactttttgctgtcaatagtatcttgctattcaattttt

SEQ ID NO: 45978 - DNA, 397 bp, Glycine max
  Clone ID: LIB3139-095-P1-N1-E11
agagattcaggaaaaagttgtgttgaaattttcacaagaggaatttcttacagcttggtcaactcaggtgcgtcccgcaacgactctgttggctgatgggtgcccatatttgtatgctatggtgcatgatagttcagtgtctacaataccaggtgattttgtcattggtgttaagttgacaaccataaacaatatgtgtgcatatgggctcaatcctggtatttcaggttctcgtcttttgggcaccattcctcagtccatttcacagcaaactgtttggaatcaaatggcaacagtgagaacaccattgaattttgattctagcaagcagcagcttttgtcaattttctattgaccttctcggtggaggaattttagtggacaaaactggagattg

SEQ ID NO: 45979 - DNA, 398 bp, Glycine max
  Clone ID: LIB3139-095-P1-N1-E12
agaaattcaggtaaattttgtgtcgaaattttcacaagaggaaggtcttacagcttggtcaactcacgtgcgtaccgcaacgactctgttggctgatgggtgcccatatttgtatgctatggtgcatgatagttcagtgtctacaataccaggtgattttgtcattggtgttaagtttacaaccataaacaatatgtgtgcatatgggctcaatcctggtatttcaggttctcgtcttttgggcaccattcctcagtccatttcacatcaaactgtttggaatcaaatggcaacagtgagaacaccattgaattttgattctagcaagcagcagcttttgtcaattttctattgaccttctctgtggaggaattttagtggacaaaactggagattgg

SEQ ID NO: 45980 - DNA, 388 bp, Glycine max
  Clone ID: LIB3139-095-P1-N1-E2
cataaacaatatgtgtgcatatgggctcaatcctggtatttcaggttctcgtcttttgggcaccattcctcagtccatttcacagcaaactgtttggaatcaaatggcaacagtgagaacaccattgaattttgattctagcaagcagagcttttgtcaattttctattgaccttctcggtggaggaattttagtggacaaaactggagattggatcacacttatacaaaattctccaattagtaacttgttgagagttgctgcttggaagaaaggctgtttaatggtcaagattgtgatgtctgggaatgcagcagtcaaaaggagtgattgggcctcattggtacaagtgtttttaacaaacagcaacagtacagagcattttgat

SEQ ID NO: 45981 - DNA, 399 bp, Glycine max
  Clone ID: LIB3139-095-P1-N1-E5
ggcggaacctattcatacaatctggattctatccattcacattgagcagcttcacagaagctcaagctgagtgtctagttcagagggcacctgtgaggggatttcatgtggagagaaagccttcatcacttgttctatgctggcaaaggaaagaactcatctcagtttctacttggagatgctgaggagcagcagcagaagctaattaccttatatttttaaaggtgcatggtaacttacattgcagtttatgtaattgtttgtgtaatttttaggcttattgatgagatctacacccaaatgttttcttaactacatgggttggaatctatcattctatagttctattactagtacgtcactttgaacaatgggtagtaattatgcctttccccattc

SEQ ID NO: 45982 - DNA, 361 bp, Glycine max
  unsure at all n locations
  Clone ID: LIB3139-095-P1-N1-E6
cacttaaataaagcgcataactatgtgcaatgagtgtgtttaagggtgaaaaaaaaaaaaaaaaaaaanaaaaaaaaaaaaaaaaaaaaaaaaaaaaaaaaaaaaaaaaaaaaaaaaaaaaaaaaaaannanggggaaaaggggcggccgccgacaaaggaacctcgaaaacccggaaaaaaaaaccgaaccgagccctaaaagcaacccaactttccataaagtaaaacggataaaaacacgaacaaataaaggcaaaagctgggccacggggaaaatgggaatccgccaaaaaatccacacaccaaacaagccggaagcaaaaagggtaaagcctagggggccaaagaagtaagctaac

SEQ ID NO: 45983 - DNA, 398 bp, Glycine max
  Clone ID: LIB3139-095-P1-N1-E7
cgtgaatgtcctgctccttcccctttgtgcgcacacttcaaatggaccgccacttctgccgccctccataagctccatcgcgcctcttttcctctccgtctccgacctccgatcctccctcgccgagacatcctccgacggtggcagaatcgtaattttccgcggcaccgtcgacacacctcgaaaaccttgagacccggtgtcttggtttctcgcaagtccagcgataacagcgtcgttcttcaaagaactcaaacgtgtttgtccactgttttctgcttcctatttggcagagtttttatctgatctctggagaaatatggctgccaatttctggacatcatctcattacaagcatcttctggatcaggaagatggtgatgtggtgaatacactcg

SEQ ID NO: 45984 - DNA, 397 bp, Glycine max
  Clone ID: LIB3139-095-P1-N1-E8
cgtgaatgtcctgctccttcccctttgtgcgcacacttgagattgaccgccacttctgccgccctccataagctccatcgcgcctcttttcctctccgtctccgacctccgatcctccctcgccgagacatcctccgacggtggcagaatcgtaattttccgcggcaccgtcgacacacctcgaaaaccttgagacccggtgtcttggtttctcgcaagtccagcgataacagcgtcgttcttcaaagaactcaaacgtgtttgtccactgttttctgcttcctatttggcagagtttttatctgatctctggagaaatatggctgccaatttctggacatcatctcattacaagcatcttctggatcaggaagatgtggatgtggtgaatacactc

SEQ ID NO: 45985 - DNA, 364 bp, Glycine max
  Clone ID: LIB3139-095-P1-N1-E9
gcaaagatgacaggtgggatgtttggaaggaaggggcaaaagataaaggggacagtggtgttgatgccaaagaatgtgttggacttcaacgccataacctccgtcggaaaaggcagtgctaaggacaccgccaccgatttcttgggcaaaggcttggacgcattaggtcatgcagttgatgctctcactgccttcgctggccatagcatctccttgcagcttatcagtgctactcagactgatggtagtggaaaaggaaaagttggaaacgaagcctatttggaaaaacatcttccgaccttgccaacgttgggagcaaggcaggaagcattcgatattaactttgaatgggatgctaggtttg

SEQ ID NO: 45986 - DNA, 399 bp, Glycine max
  Clone ID: LIB3139-095-P1-N1-F1
agttgctgcttcttcagccactccgcacctcgcagcctctgtgccctcagcaaccatggctgaaatcgaaactaccgttccagatcccacccaaatcgacgtcaaactcttcaatcgctggagcttcgaggatgttgaggttaatgatatgtctctggctgattacattggagtgtccccatcaaagcatgctacatatgttcctcacactgctggtaggtactcagtgaagaggttcaggaaagcgcagtgccccattgttgagaggctcaccaactctctgatgatgcacgggaggaacaatggaaagaagctcatggctgtcaggattatcaagcatgccatggagatcatccacttgctcactgacctggaacccaattcaggtcattgttgatg

SEQ ID NO: 45987 - DNA, 396 bp, Glycine max
  Clone ID: LIB3139-095-P1-N1-F10
gtgggctccaattaattgtcgagttcatcgacaaccaattcacatcactgaaggaaattatgtcagaaagcaagatgtcagcattgaatatgatgcatgtacaattccaaatgattgtggttcattggttgttgccaaagttggaaatcacaaacaaattgttggtttccatgttgctggaagcaaaggaagactgggatatgcttcattgataccatacgttgagccagttgtgcaagctcaaagtgctgaagtttactttgacttcttccctgtggaggttgatagtcaagagggagttgctcacattggtgaattgaaatctggtgtctatgttccactgcctacaaaaactaatttggtggaaactcccaaggaatggcaactggatctacc

SEQ ID NO: 45988 - DNA, 398 bp, Glycine max
  Clone ID: LIB3139-095-P1-N1-F11
aaaaggagtgattgggcctcattggtacaagtgtttgtaacaaacagcaacagtacagagcattttgatgcatgtaagtggacaaaatcggaaccacattcctgggaattgatcttcccaatagaggtatgtggtcctaataatggttttgaaatgtggagttctgagtgggcaaatcaaacttcatggcatttgagtttccttattgacaatcccaaacagtctacagtttttgatattctcttgggaatttctcaagattttgaaattgctggtaatactcttatgccagctttttctgttccacaggctactgccagatcttctgaaaatgcggaatcctctgcatgatctggaatttgtgttttctttcgcttggtcgtttgtttaattcaata

SEQ ID NO: 45989 - DNA, 398 bp, Glycine max
  Clone ID: LIB3139-095-P1-N1-F2
ctcgagccgtgttttttattccttttcagttaaacttctaaattaaaagaatatctaagtaaggtgacaccttaccctctattagtgtttcagaaacatagaaaactcaatgaccaattttgtcttctcataaacagttataagctaggaaagctacactaggaacagatgtctccaattccaaaacagtttttagggtgatttcagaagcaagccactttcacttgatcttgaagtttgaggaggcatgcaacacttcttgcactgtcatctgtgtacttaagatgaaataaacatctcagtgcaagctcagaaatagatcttattctgaatactcagtggttaatttccatttctattttgtaaataatttctaacataagcatagctaaatcatg

SEQ ID NO: 45990 - DNA, 401 bp, Glycine max
  Clone ID: LIB3139-095-P1-N1-F3
aaaaaaatcgaagaattacagacgaatatgcaaaaaaaactgaattgtgtgaatcgaaaactaaacattgctattgtaaaagttgcaaatgcttataaacaccctaatattattgcagaatttatagctggacaattaaagaatagagtttcgtttcgtaaagcaatgaaaaaagctattgaattaactgaacaggcgggtacaaaaggagttcaagtacaaattgcaggacgtatcgacggaaaagaaattgcacgtgttgaatggatcagagaaggtagagttcctctacaaaccattcgagcgaaaatcgattattgttgctatacagttcgaactatttatggggttttagggatcaaaagttggatattttctaaataaagaaaaatatattattc

SEQ ID NO: 45991 - DNA, 195 bp, Glycine max
  Clone ID: LIB3139-095-P1-N1-F4
aagcaaagaccagcaggcgcggaatgtggcagtatggagatattcagtcagatgacgaggacactgctcctcctcctagaaaggctgctggtggccgtaaataagtgtaacaggaggtaaattataaaataggcatcttgagagaacatgactgaagttataggcttgaacaatttttatttttttgagctagag

SEQ ID NO: 45992 - DNA, 169 bp, Glycine max
  unsure at all n locations
  Clone ID: LIB3139-095-P1-N1-F6
atgtctatagtatcgcagacgcggccccctctttttttattttttttgtaaaaagaaaaaaaataaaaaaaanaaaaanaaaacaaaaaaaaacaaaataaaaataaacaaaaaataaaaataaaaaataaaagaaacaaaaataaaaacataaaaaataacataaaaa

SEQ ID NO: 45993 - DNA, 394 bp, Glycine max
  Clone ID: LIB3139-095-P1-N1-F7
atctggaaatgcaagaagcttatcttgtcaatctcgtaaatgtgttacgagaattgtatttgcacagtccagaggaagctcgccaattgagaaggaaagctctctctcgtattgaatggctgcaaaaagctgatgtgcctaccatagcacagattgaagagttccattcgatgcagaggatgatgaatgctcctgattcaaatgacaatatcgatctactgttgagcattgatttgttgggtttacaaggagcaggtaaagcttttccaaacaagatcgtttttgatgataaacttgtgttggctaacacacaggaattctttgatggaaattttccagtggattcttggttaccaatttttgtgaattgtctttatcctgtaagtcaattacc

SEQ ID NO: 45994 - DNA, 393 bp, Glycine max
  unsure at all n locations
  Clone ID: LIB3139-095-P1-N1-F8
atctggaaatgctcgatgcttatcttgtcaatctcgaagaggtggacgagaattgtatttgcacagtccanaggaagctcgccaattgagaaggaaagctctctctcgtattgaatggctgcaaaaagctgatgtgcctaccatagcacagattgaagagttccattcgatgcataggatgatgaatgctcctgattcaaatgacaatatcgatctactgttgagcattgatttgttgggtttacaaggagcaggtaaagcttttccaaacaagatcgtttttgattataaacttgtgttggctaacacacaggaattctttgatggaaattttccagtggattcttggttaccaatttttgtgaattgtctttatcctgtaagtcaattacc

SEQ ID NO: 45995 - DNA, 390 bp, Glycine max
  Clone ID: LIB3139-095-P1-N1-F9
ggaaagaggacgaggttccagtcggagtcacagccacagagcgtaattctactcacgaaaatcaaagaattcactcgagctttgctcgcagacctcaccaacggacgctcaccgctcattctcatcgatcgcttcagaagctactgcaccctttccaactccaactgcttttgtgcctccgatttgccgtgcggaaaggaacttctcacgcttcgcaggaaatcccacgcccacagactagctgtcatgttgagagtgatgctgatagttcagaaacttttgcaagagaacaagcatagttccaagagagacatttattacacctatccttctgtatttttggatcagtcggtggttgaccaagcaattaatgatatatgtattcttatg

SEQ ID NO: 45996 - DNA, 401 bp, Glycine max
  unsure at all n locations
  Clone ID: LIB3139-095-P1-N1-G1
gggaattgggttctcttcctaaccctggccatcagcctctgtgtgtccggcgcattccaaatccaaaccgaaaccttgcccctccacaccctccctgagccacacatcctctcagaaaccctctcagaaccccaagaaactctctcgctctcactttacctncacctncaccacatagacgccctctcctccaacaaaaccccagagcagctcttccacctcaggctccaacgcgacgccaagagagtcgaagccctcctcaaccaaatccatgcgcgcagatccgccggctccagtttcagcagctccatcatttcgggcctagcacaaggcagcggcgagtacttcacgcgcataggagttggcacacccgccagatacgtctacatggttttagacac

SEQ ID NO: 45997 - DNA, 397 bp, Glycine max
  Clone ID: LIB3139-095-P1-N1-G11
acctgaaacaatgggtgacagcagagcctgagaccaaagttctcagaattgaacctgaacatgacttgttaatcttagcttcagatggattatgggataaggctagtaatcaggaagcagcagatactgctcgttcttttcttgtaggcaacaacaaatcacaaccattgctgctggcttgaaaaaagcttgtagatttgtctgtttcacgaggctctttggatgacacaagtgttatgctaatcaaattggagcactatatttaaagttaccttattacaacggaaggggaggtatgtgcatattgttttagattattgcagtcgagatcgcattgaggccaagattgcgttgcagtttgggactttgaacaaccttggtggagcctgcttgatac

SEQ ID NO: 45998 - DNA, 377 bp, Glycine max
  Clone ID: LIB3139-095-P1-N1-G12
ctcgtcgcaaaatttttgacaaacctaagacgcgctgcttcactattctccctatggagtttaatcttgtggttcgtcagaagtttttaaattttgtgaggttcattatgaagaaaagggacaagcttagttgtcaagttggaatcaacccatactccatggaatggactggtttggccaatagattactgagtaagggcaacgatattctgtgttgcgattatgctagttttgatggtttgattaccaagcaagttatgagcaagatggcagaaatgataaacagtctttgtggtggtgatgaaaaattgatgcgtgaaaggacacatttgctgttggcttgttgttcaaggatggcaatttgtaagaaagatgtt

SEQ ID NO: 45999 - DNA, 397 bp, Glycine max
  Clone ID: LIB3139-095-P1-N1-G2
gtcataatatcaccattactgatggtattgacaaaactagtgcaactttgcaatttagaaagttagcagattgtgattttctcaagagaaactttaagcagatgtctaatgttttatgggtggctcctgaggacaaggcgagtttatggtcacaacttcattatgtttcgtgcaataatctggaaatgcaagaagcttatcttgtcaatctcgtaaatgtgttacgagaattgtatttgcacagtccagaggaagctcgccaattgagaaggaaagctctctctcgtattgaatggctgcaaaaagctgatgtgcctaccatagcacagattgaagagttccattcgatgcagaggatgatgaatgctcctgattcaaatgataatattgatctact

SEQ ID NO: 46000 - DNA, 406 bp, Glycine max
  unsure at all n locations
  Clone ID: LIB3139-095-P1-N1-G4
ttcgaaacgatcgtgagtgagatgaagaagtgcgaactgtgtaaagttccggcgaggatcttctgcgagtcggaccaggctagcttatgctgggactgcgacgctaaggttcacagcgccaacttcttggtcgcgaggcacgtgcgaaccctactctgccgcacgtgtcgttctcccacgccctggaaggcctccggcgcctcactcgcccacgccgcctccgtctgcgaccgctgcgccgccgcggaagagacggaagagagcgaagccggcaatgacgacgaaccagacaccgaggacgacgacgatgtcgacaaccaggtcgtgccgggtcctncacgccgccgccgccgccgccgtcgagctcctccggcagcgaatgctcggagtgcaaaaacaacgttgc

SEQ ID NO: 46001 - DNA, 403 bp, Glycine max
  Clone ID: LIB3139-095-P1-N1-G5
ccctctcttccccccttcggcttccgatttttctctctcaatcggggttcatcaaagtgctgcatctctctcactctcttacttaactcgacaacttcagccacattattccatggatgccaaggtattcaaattccagatcctccaaggctccatcgctaagcgcgtggtcattcgctcaatactactcgcgtgcgccgtctcaattgtctccatctaccgcgcgcaatccctcttcgatttcggaaccctcgctcccatcgccacgtacttcgactgcgtttccggcttcgagggcgtcacctttcgccctggttcccacttgctccgaacccgcttctgggcctccgccaattgcgagaaagacgccaacttgaccctctccgtggtcaccgacctaact

SEQ ID NO: 46002 - DNA, 390 bp, Glycine max
  Clone ID: LIB3139-095-P1-N1-G6
ggcaaatggagtttttgcctttctctctcccttgggaggagagagagagagagagagagagacggaggaaatgacagactggcaataaggaggacgaccctttggtatttggatcttcaagaaagagagacccttgggatttcgtcaccatgagtctcttcggtcttggaaacagaaccaaaaaaccattccttccaaaaagaacccttcatctggaagtaagggtgcttaacttcaaaaacacattaatgccacgttgggtagtgggaacctgagggaggcggttaacatgcccctggtgaagatattaatgagtggctagctgtaaacactgtggacttctttaatcaagtgaatatcctgtttggtactcttacagaattctgcacg

SEQ ID NO: 46003 - DNA, 306 bp, Glycine max
  Clone ID: LIB3139-095-P1-N1-G8
aaaaaaaaaaaattattttaaaaaaaaaaaaaaaaaaagggacgcagtattataaaaaaattaaaaaaaaacggcccccccccaactattaaactcttcaacccctaaattaattccttaccataacctttaatcctaccaactttccctatattaagtcttattatatctttactaaatcattttcataattttttccttttttaaatttttatacttcacaattccacacaatattactattctcaaccataaattttaaatccttgtgtccctaattagttatctaactcacattaaattctt

SEQ ID NO: 46004 - DNA, 395 bp, Glycine max
  Clone ID: LIB3139-095-P1-N1-G9
attaaaatggtggccacagttggtattcctgagaatacaggtatagcattggcctgtgctatgaatagttcttttagggggcgcgccagttctgatatttacaccatctgctctcaagactgtgaattatggaatcctgcttgcacaaaagcaatgactatgtcatttaatccaaacccgtgttctgatgcatggagtttggaatttctgaagcgtaccggatttcattgtgatatcatttgtgtcactggatggactgccaccccaatgcaagatgttcaagttacaattgattggtttatttcctctcaggaatgtgttcccaggacctattgtgttttaaattcacaaaaatcctttggggttaaataggtggatggaaaaactgcctttcc

SEQ ID NO: 46005 - DNA, 330 bp, Glycine max
  Clone ID: LIB3139-095-P1-N1-H10
agttgctccatgatagaagctgcttagatggaccagattcaacatttcagttgaaggtccctgctaccatgcctgtggtcaaggaactctgcggactggacattgtacaaacttacttgaaatggaaaatgggcaacaagtaaaggaactcaactcactttgaatatagatcaatgatttcatttttttcttgggtgaaaaataacttgtgtttagatttcacgtatataagagacacaaaggccaggccaagactgtccagctatattgattttgaatactggtaggacatagttatgtactgtgattaggaaaaattcatatatttta

SEQ ID NO: 46006 - DNA, 387 bp, Glycine max
  Clone ID: LIB3139-095-P1-N1-H11
agttgctccatgatagaagctgcttagatggaccagatggaacgtttcatttgaaggtccctgctaccatgcctgttagaaaggaactgctctgactggacattgtacaaacttacttgaaatggaaaatgggcaacaagtaaaggaactcaactcactttgaatatagatcaatgatttcatttttttcttgggtgaaaaataacttgtgtttagatttcacgtatataagagacacaaaggccaggccaagactgtccagctatattgattttgaatactgggtcgacgataggtattaccatggggggggaaaaattgatatatttaaatctcaactctcgggtataaatataagttaattttaactaatctttatttatttat

SEQ ID NO: 46007 - DNA, 404 bp, Glycine max
  Clone ID: LIB3139-095-P1-N1-H12
gagttaggggcggcgatgggaggttcatcggaggatttctcggtggtggtgctggcgtcggacctcggcgtcgatgcgcgacctttcctcgaacacgatcaacagcaagaagaagagaattggcacgactgttcccagtacctctcccccgacgaggacttctccgatctcgatcagttgcaattcctccgcctccaaggctccgacaagaactccaatcgcattctccgcatcgtcggcaagtactttcccgcaactgttgtgagtgcggagcggctcaagcggtatgtgttcaacaaaatttgcagtgagttgcctgaggggcccttctgtattgcttacatgcacagcaccgttcagaaggaggataattcccctggcatcaccatcttgaggtggatcta

SEQ ID NO: 46008 - DNA, 374 bp, Glycine max
  Clone ID: LIB3139-095-P1-N1-H3
gtcagaataaccagggatgctttcccctacatgtttgatggaagtcggacgcctctgccagttttagatcattccaatagaacaagtttaacttcattcgatggagattatgcaacaaagccaattcccgtaacttcacgtacagtaaggagcccaagagataacacaagaatgatcacatctttaccagtatctccctgttcaagtcctttgcgacagtatgggccagcacacaagagctgtttcctttctcctcctcacccaacttacactttgatggggcaaaataccctcccctcatatccagtgagatcaaatgccacattcactcttgacccttttcatgaaactgctttctacaaagcccacacacc

SEQ ID NO: 46009 - DNA, 62 bp, Glycine max
  Clone ID: LIB3139-095-P1-N1-H4
ttatgaactaaatgaaagaagaggccaagtttgttaagtaatttgcaaagaaacaattgttg

SEQ ID NO: 46010 - DNA, 403 bp, Glycine max
  Clone ID: LIB3139-095-P1-N1-H5
caaacatgggaaaacagagcacaccccaattctctgccctcaactgcatcgatctctccaaccccgacatcaaccaatccgtcaacttactcaaagaggcatgtttggattccggttttttctacgttgtcaatcatggaataagccaggaattcatggacgaggtttttgcgcagagcaagaagttcttctctcttcctcacaacgagaagatgaagactctcaggaatgaacaacacaggggatacacccctgttcttgatgagttgcttgatcctgaaaaccaagtacatgtaggagattacaaagaggggtattatattggagttgaaaaaggtgaagatgatccacaatcgaagaaacctttttatggaccgaataactggcccgcaccagatgttct

SEQ ID NO: 46011 - DNA, 416 bp, Glycine max
  unsure at all n locations
  Clone ID: LIB3139-096-P1-N1-A10
ctcgagccgctcgagccgctcgagcaatggccgaccgagttcaccccagccactcgccttccgtttccgccgactcacaaccggcgtcgcctcaagactcctccgtcgttccaaaaccgccgttgccaccctcgtcggagaagccagtgcctccgcctggaacctacgtcatcaagatccctaaggaccaagtctatcgcgtccctccgccggagaacgctcgccgctacgaccaatacactcgccgtaaacaccgccggagccgatgctgctgctgcttcagctggctcatcggaatcctcttcattctcgtcgntttcctcgccatcgccgccggcgtcctctacctcggtttccgtcccgaggagccgaaatactccatcgaaaacatcgccgtcagaggaattaacctcacc

SEQ ID NO: 46012 - DNA, 447 bp, Glycine max
  Clone ID: LIB3139-096-P1-N1-A11
cccaaacgtggctcctgatagcatgatagctgcatctatcatggatatgtattaaacgatgggggatgctcttgcccagcaatacgggggctatgctgctcacaagactgagtttccagagaggcacggaaagaggaaagcaacaacgcactcaagagaatttttacagtccatagaacgatactatagcaaggcttacacagagggtgaaaaacaagacgcattaaacttgtttttaggttacgttcaaccacaggcagggaaacctgcgctctgggagctggattcagattattatctccatgtatctgggattggggatgatctaatacctgagaagcgttgtgaaccaaatctcagctcttctggaagaggtggaatgatattcacgcctataccagcttgcagagaagactactctagcataaagacgacatcatttgacaa

SEQ ID NO: 46013 - DNA, 449 bp, Glycine max
  Clone ID: LIB3139-096-P1-N1-A12
gatgaatgctcctgattcaaatgataatattgatctactgttgagcattgatttgttgggtttacaaggagcaggtaaagcttttccaaacaagattgtttttgatgataagcttgtgttggctaacacacaagaattctttgatggaaattttccagtggattcttggttaccaatttttgtgaattgtctttatcctgtaagtcaattacctttagaagctgtcgttgtaaatgttacatgtggtagtgggcggttgggtctacccaccactgcttggattagttctgcagttaataatcgctcctcagatatcaacaaaaggattcgcacagcacttgggaaaggtaagaaaattgtttttcttactagagttgatccttttccagtagctttactggctgttctttttggcgttaagaatgaaattctgagttctaacgccacta

SEQ ID NO: 46014 - DNA, 385 bp, Glycine max
  unsure at all n locations
  Clone ID: LIB3139-096-P1-N1-A4
atgacgtggatggcccccgaccgaaagctcgaaattcggttggggaaaccttaggagggagaaaattccctccactcttgctttctttcggctcttcttcccaaaactctttcaaactcaaacatcacaacaaaaccatgaccaacccattacccacttaacctcaaacaacatgccatcccgacaattatccaccccatcagacacaccccatccgctgccggccacgtcatcaccaccaccaccatcaccactttctgactcctatcctcgccgccaccgtctcaacatgctcccttttcctcctccttctcctcttctgccaccgcaccctcacccgcaaacgcgctaccacctacccttcttttncggccaccacctnccc

SEQ ID NO: 46015 - DNA, 396 bp, Glycine max
  Clone ID: LIB3139-096-P1-N1-A5
ttcgagtgtttgcctcaaaggattgaccgtgagagcttcctccttgcacttcacatggcagtggaagctgataatccatattttcgattgggttacaacagtttgggtgcttttgcaaccattaaccatcttcacttccaggcttattatttggctctgcccttcccaattgagaaggcccccactaagaaaattgcaagtttaaatggtggggtgaagatatctgaacttgaagtatccagttagaggtctcgtctttgagggtggcgatacgctggaagatttatcaaatgttgcttcagatgcctgtatatgtcttcagaacaacaacatacctttcaatgttcttatctctgactgtggaaagcaagtctatcttgtaccacagtgttatgc

SEQ ID NO: 46016 - DNA, 369 bp, Glycine max
  Clone ID: LIB3139-096-P1-N1-A7
cttccattcctttcttccggatcacagggaaaataaaaaacaatggagttggacttgacaccaaagacagcagaagtgttgtttgagggagatggtggaggttactacacttggtggagttctaaagtgccactgctggccaagaccaatgttggtgctggtcggttagtgcttcagcctcaaggctttgctattcctcattattcaaatatatccaaagtaggttatgtgcttcaagggaacgatggcgtaactgggatgggcctccgcaacaatactactagagaagaggtggttgtgaagcttaagaagggagatgttataccagtacctattggaagtgtctcgtggtggttcaacgatggggac

SEQ ID NO: 46017 - DNA, 386 bp, Glycine max
  Clone ID: LIB3139-096-P1-N1-A8
gttttgttttgttgttctccatgtccatgttgtcgatgaagggcaaaaggtttgtatcagtgcctgtgttggcagtgattttgttaatggtttttgtgtattactgttcaatgttcgtcttcctccaagattggctcggtttgcagagttcccctggcactttgaatgcgttcctcttctctctctttgcctctctctccctcttctctttcttctcctgcgttctcactgaccctggccacgtcccttcttcctacgccccagatgttgaattctccaaagataatgcagaacagaagaaatgtgacaagtgctttgcatacaagcctcccaagactcatcattgtcgagtttgcagaaagtgtattctgaaaatggatcatcac

SEQ ID NO: 46018 - DNA, 380 bp, Glycine max
  Clone ID: LIB3139-096-P1-N1-A9
gtttaatcgcagccctgtggggaataaaaccgacaaatcgttgaacatcggagccagagattcagagcgggtaccaccgacgatggatactggcggaggcggagcatcacctacagccgccatgtcgcggtggaagttcgcggcgtggcggcagtaccagcacctgctggacaaatcgacgccgcacgtcggacgccggtggctggggttcgcggcggtggcgcttttgtacttgctgcgcgtgtactttgtggaaggcttctacgtcgtttcgtacggcttaagcatatacatcctcaaccttctgatagggttcctctcccctcaagtggaccccgagaccgcgattctcaacgccgacgaccctatactccccatcg

SEQ ID NO: 46019 - DNA, 482 bp, Glycine max
  Clone ID: LIB3139-096-P1-N1-B1
ctatgatcgcacgcctgcccgacgcacgtgaaattcggcatcgaggctcggggaaggttatctacccaaaacttctagttgccagccctcacaagcgaggaagtgttgatttgggaagcaagtgaggaacctgtgaaaatctatccaaagaagcatcccaattgtattgttaggagttctttggagcagaaagacctccctatttttgcccttcaagatgacaaggtggttgaagtagttggggatcccgctggagtgcataaagcattagagttaattgcctcccacctaaagaagtttttagttgatcgcggtgtaattccaatttttgaaatgaatatgcaaacagccaattcccaccatgcagagcacatgccaccccaccaatcttggggaccatctcaaggtctttctccaaatgttgggtgaggtactggttttggacctgcttcttaatacatgccacctgcacgacaacttga

SEQ ID NO: 46020 - DNA, 451 bp, Glycine max
  Clone ID: LIB3139-096-P1-N1-B10
acttggtgtcttgcaattcccaatggcctccattttcaagctctcaacgccatctccagctgcttccttatcagaagcgcttcgccccagagattctcgcttcctctccttcaatccttcttccaacgctattaattacaaaattaacctctccgcttccctccgatccattcactccctccctcttaaaacctccttgcggatcaaatgctcccaaacagatgggaatggaagtcctgcaaagaggacagtgcttcatgatctttatgagaaagaagggcagagtccatggtatgataatctctgcagacctgttacagaccttcttcctcttatagcaagtggtgtcagaggcgtcactagcaaccctgcgatttttcagaaagctatctcatcatcgaatgcttacaatgatcagttcaaggaacttgtgcaagcagggaaagacatt

SEQ ID NO: 46021 - DNA, 430 bp, Glycine max
  Clone ID: LIB3139-096-P1-N1-B11
aaggttcatggctgctccaccggcaagggctcgtgccgattacgattatctcataaagcttctcttgatcggtgacagcggtgttggaaaaagttgcctcctcctgcgtttctccgatgggtctttcaccactagtttcatcacaactataggcattgattttaagataagaaccattgagcttgatggaaaacggatcaagctccaaatttgggatactgcggggcaggagcggtttcggacaattacaactgcttactatcgcggtgctatgggcatattgctagtctatgatgttacagatgaagcatcatttaataatatcaggaattggattcgcaatattgagcaacatgcttcagacaatgttaacaaaatactggtggggaacaaagctgatatggatgaaagcaaaaaggctgtgcctacg

SEQ ID NO: 46022 - DNA, 382 bp, Glycine max
  Clone ID: LIB3139-096-P1-N1-B12
gttacttctcttcgccttttgctttgcaattgtcaccaaacaatggttgcttagctctcacaagcaagcattatcaacaatgaagaaaattgtgttaaaggtggacttacatgatgacaggatcaagcgaaaagctatgaaaacagcatctggcctttcgggggttcaatcaatttctggtgacattaatgacaagaaaatgaccttattgggggatggtgatccaatgagtgcagtggcaaagctacgaaaggggtgtcacactgaaatagtctcaagtggaccagcaaaagaggaaaaggagaaagagaaagtggagccagcaaaagaacctggtcctctcaagctctatgatgcctatcccttttattatcatatgaca

SEQ ID NO: 46023 - DNA, 266 bp, Glycine max
  Clone ID: LIB3139-096-P1-N1-B2
cggctcgagtggagattggatcacacttatacaaaattctccaattagtgacttgttgagagttgctgcttggaagaaaggctgtttaatggttaagattgtgatgtctgggaatgcaccagtcaaaaggggtgtttggccttaattggaccaagggtttttaccaaccaggaccggtccaaacctttttgttccttttaaggggccaaaaatggaacccacttcttgggaattggctttcccaaaaaggggtttggggcccaaaa

SEQ ID NO: 46024 - DNA, 389 bp, Glycine max
  Clone ID: LIB3139-096-P1-N1-B3
gcgttctatatattattgaattgacaatgaggcctgctcttgctttgcttgctcttctatttgctttcttgttagctgccactacagaatcaagaaaagatacaggggaatattggaaaatgatcatgaaagatcaggaaatgccagaaggacttcaaggtcttgtttcatttcaatctgaaaataaccctaagactcaagagcagcttggtaaaggttccaaaaaccattgtgaagagtctctagttacaaatacacaagttaatagtgacttcgaacccataccaagtgttaccaaatatgatgatttggaattcaagtcaagcattatcaagaacgatgattttgaatcgagaccaagtgttaccaagcatgatgattttgaactc

SEQ ID NO: 46025 - DNA, 437 bp, Glycine max
  Clone ID: LIB3139-096-P1-N1-B5
gcctaacttaagtggttctaaattgaaaagctttctagctagtcataacatcaccattactgatggtattgacaaaactagtgcaactttgcaatttagaaagttagcagattgtgattttctcaagagaaactttaagcagatgtctaatgttttgtgggtggctcctgaggacaaggcgagtttatggtcacaacttcattatgtttcgtgtaataatctggaaatgcaagaagcttatcttgtcaacctcgtaaatgtgttacgagaattgtatttgcacagtccagaggaagctcgccaattgagaaagaaagctctctctcgtattgaatggctgcaaaaagctgatgtgcctaccatagcacaaaattgagagttccattcgatgcaaaggatgatgaatgctcctgattcaaatgataataatgatttac

SEQ ID NO: 46026 - DNA, 441 bp, Glycine max
  unsure at all n locations
  Clone ID: LIB3139-096-P1-N1-B7
tatctctctctgtctctatatctggatttctgaattttgggaatagaaaaaccctaagcaaagcaaagcggtaaggatggggaacacggagaagctgatgaaccagatcatggaattgaaattcacttcgaaatcgctgcagcgtcaatcgcgtaagtgcgagaaggaggagaaatcggagaagctgaaggtgaagaaggcgatcgagaaaggcaacatggacggcgctcgaatctacgcggagaacgcgatccgtaagcgcacggagcagatgaactacctccgcctggcctcgcgcctcgacgccgtggtcgcccgcctcgacacgcaagcgaagatgacgacgatcagcaagtcgatgggcaacatcgtgaaatcgctggagtcatcgctggccacggggaacctncaaaagatgtcggagaccatggactcgttcga

SEQ ID NO: 46027 - DNA, 253 bp, Glycine max
  Clone ID: LIB3139-096-P1-N1-B8
agaaaaagttgtttaaaagagagcaggaagaggcgcttcctcaggaagaggaagaggaggaagaagaagaggaggaggaggaggaatctgaatccaaaactgactccaataagaatatactggaatggctattgtgaaacctgtgtttgttcccaaatcccaaagaaataccattgcggaacgtgaaccttttgaggcttaagaacttgcttttgaggataaaaggaaaagggaattggaggaaccgaggatt

SEQ ID NO: 46028 - DNA, 396 bp, Glycine max
  Clone ID: LIB3139-096-P1-N1-B9
tccaaaagtggatcctgatagtagtattgctgcagctctaatggatatgtatcaaagtatgggagatgctcttgcccagcaatacggtggctctgctgctcacaatactgtgtttccagagaggcagggaaagtggaaagcaacaacacaatcaagagaatttttaaaatccataaaacgatactatagcaatgcttacacagatggtgaaaaacaagatgcaataaacttgtttttaggttacttccaaccacaggaagggaaacctgcgctctgggagctggattcagattattatctccatgtatctgggattggggatgatctaattcctgagaagtgttctgaaccaaatctcagttcttctggaagaggtggaatgatattcacgcctat

SEQ ID NO: 46029 - DNA, 347 bp, Glycine max
  Clone ID: LIB3139-096-P1-N1-C1
ttcttccaaacttggagtttaagtattctgatccagatattcatgaagatttatatcagctcataaaatattccagtggagaaatttgcacaaccgaacacgtggataaagttatgaaggtttggacaacatttttagaacccatgctttgtgttccttgtcggccccagggtgcagaggatacagaagatgttgtcaaggctaagaataatcatgtcaaaaatggcactgcaactgttgctgaaagtgactgtagccctgttgtgggtgctatcataatgaatccaaagcatataaatgtttccagaaatggggatgattgtatgccattagatcaatcaacttct

SEQ ID NO: 46030 - DNA, 440 bp, Glycine max
  Clone ID: LIB3139-096-P1-N1-C10
gccagtttgatcagtcagtccaacaggtgactgactgaacagattagctgattgattaaaatccatcatgtgcagtcaaaaccaaaatgagcaacaaattaactggatgcagttttcaaaatccatcagtttaaaaaagtccaacagaaaatatttcaaaattcattcaaatacagcattgggacttgacttgtttgtgtgtttctgaccctctacctattcaacattcaaacgttattctgcttgtcaacaggttgagtcactctcttctgagaaggcaagtcttgtattcagaattgaggtatgctttctactgagaatatgatactaattcttgaaattgtgatatacttgattttcaattttcataatcaacttagcaggctgtctcaagattgctggatgagaacatgtcagcatcaagtgcagcaaatatgaat

SEQ ID NO: 46031 - DNA, 453 bp, Glycine max
  Clone ID: LIB3139-096-P1-N1-C11
ctgaactctgaacaccccttccctcacgtgctgctttaccccggtccctaaccctaaccctagcaccctcttccttgcaccgtcactccctcacctcactcgtgaaggcgcggagaaccagttgaaggcttgaagccaccccgacgccggcgaagagagtaagagcaacaatgtctgacagagaagacaacgcccccgaggaattcacaaccgaacagggtatacaacaagacgaagagattcggaggattcaaagagaaaataaggccagggttgttcgtgaaggaaaagagcgtaggaggagatgggcccaaaaaataactcctcgaccatccaaagctggtaaaaaatctgaagatgtagaagactctgaaccacagcaagaatcaaatacagcagcaggatttcttcctgacaacattgtccaaatgcttgcagctcgtgagaaacaag

SEQ ID NO: 46032 - DNA, 428 bp, Glycine max
  Clone ID: LIB3139-096-P1-N1-C12
ggcacccctgctgttccaagcagccacccagataacaaaaaagcagctttacaaagtggacaacctcaaccagttcaatactaccatgaccaacatcaacatccctacgtgcaacatagcccagttgacaaaccaagcaacagtcccatggagtcaatccttaacatgttcgattcatggagcaaaaaagctgaagccaccgcacacaacgtctggcacaaccttaaaactggtccatcagtgtcttcagctgcactggggaagatgaatctgactgtgaaagcaatatcagagggtggatttgagtccctttacaagcaaacattcacaacctatccaaacgagaagctcaagaagagctttgcttgttacctttcaacatcaacaggtcctgttgcaagaaccctttacctgtccaatattcatgt

SEQ ID NO: 46033 - DNA, 407 bp, Glycine max
  Clone ID: LIB3139-096-P1-N1-C2
gcttatcttgtcaatctcgtaaatgtgttacgagaattgtatttgcacagtccagaggaagctcgccaattgagaaggaaagctctctctcgtattgaatggctgcaaaaagctgatgtgcctaccatagcacagattgaagagttccattcgatgcagaggatgatgaatgctcctgattcaaatgataatattgatctactgttgagcattgatttgttgggtttacaaggagcaggtaaagcttttccaaacaagattgtttttgatgataagcttgtgttggctaacacacaagaattctttgatggaaattttccagtggattcttggttaccaatttttgtgaattgtctttatcctgtaagtcaattaccttcagaagctgtcgttgaaatgttacatgt

SEQ ID NO: 46034 - DNA, 430 bp, Glycine max
  unsure at all n locations
  Clone ID: LIB3139-096-P1-N1-C3
cggtctttcggtctacagagagtgtggaggctttttaaaacgaggactgcttttgctaacctgagcccagtgcataggatatcattaaaactaggttgatgactatcattatcatacgcgtgcacctgtgctgtgatgagaacagctgacatagtgaggcttgtacacagccgccatagctgagttcatagcaacactcctttttctttacatcaccgtgttgaccattattggctacaagagacagagtgacaccaaaatccccggtaacaccgaatgtgacggcgttggcattttgggcatcgcttgggccttcggtggcatgatcttcatgcttgnttactgcactgncggaatctctgggggacacatcaaccctgcggtgacattcgggttgttcttggacgcaggtgtctttgggagggcgttg

SEQ ID NO: 46035 - DNA, 429 bp, Glycine max
  Clone ID: LIB3139-096-P1-N1-C4
cgcgtcgctgctccgtaccagtttcactgcataaatttgagagaaaactctgcaaacatgttggtttatcaggacctccttacaggtgatgagcttctctcggactccttccgttacaatgaaattgagaatggaatgctgtgggaagttgaggggaagtggttgttaagggagcagttgatgttgacattggtgcaaacccttctgctgagggtggagaagatgagggagtcgatcacgcacctagttacgatggtggcgttgccgatacattcagacttcaggagcaacccgcttttgataagaaacagtttgttaccttcatgaatactaatattagaaattgggctatcctggtctatgcatagaaacaagagtttgttaagacgcacattgatggagcaactaaatacctgctctctaagatta

SEQ ID NO: 46036 - DNA, 422 bp, Glycine max
  Clone ID: LIB3139-096-P1-N1-C5
cttcaaaaaaagctggatccttctctcttcaagataggttgtgctcaggctgcgaagaacaaatgggtggagatggggaaacagttgatatctagaaaggtccaacatgtggatgataaggtcaaagatcttcttcttcaaatacaacaggggctgaacattggttcagacgaaatcaaagcactcaaagtgagaaagctcataattccacagacgtggaagggttactcattgaaaaggggtcctaattatgcacccaaaagaaagaaggttgtcactgatctgactcgtgataattttcagagtggtgagtggaaggaactagagttcaaggagtacaattatagtgctaaaggtgctccttttgagggtggcaatcttcattcgttgctgaaagtacgtgctcagcttaaacagatttt

SEQ ID NO: 46037 - DNA, 381 bp, Glycine max
  Clone ID: LIB3139-096-P1-N1-C6
aagaaatttaaccggaccacagaacaaggacggatagaagaacgggagagaacatggcgttgttcatggacgaaaaagagatttggaagtgtccgaagcatccatcatagagaagacgaagcggagtttgccctacttgtcttcgagaccgtatcggaactctatgccctgactgtgctaacgtgcgcccctgttacctgctacgcaaccagctgctcctgactgttgtcgtcttcctactccttatcgcgtgtgtctggcgccagcgatagcgtctgatgcgtcaggcgcgtacacaacctgatcgagcaagagcctgcgctacgacgatcgcgctgcatggcgataccgattctcaggtcacggtcgcggatctatggc

SEQ ID NO: 46038 - DNA, 322 bp, Glycine max
  Clone ID: LIB3139-096-P1-N1-C7
tatgaattcagtgaaaatcaaattaggaatcctcttttattttgtaatttattgttcagctcttcagctaggattttgatctggtaaatgttcatgttcagatttaacgatttaattatgattattgaattgtttatttttatgaattatggctattatattaagcaatttaatggttggttgcattactattgggaatttgggatgggatggagcaatgattcggtgggccttggtggggaagttaaaatttattatttttattcaaaggatatggtggtgcccatccatggtttggattttagatgatccggatattact

SEQ ID NO: 46039 - DNA, 369 bp, Glycine max
  Clone ID: LIB3139-096-P1-N1-C8
cttttggattgaaagcatggaaaaactcattttattttgatttcagcatgacttatgtcggagcacgaatgatttgttcccatcttgtaaatttatcattgcttcttggtgctgcgatttcatggggcattatgtggcccttaatcaggggactaaaaggggaatggttttctgcaagcataccataaagtaccatgaagagtcttaatggttataaggcttttatttctattgctttgattcttggtgatgggctttacaattttgtcaaagtcctctatttcactgtcacgaatattcatgccaccgtgaaaaggaagaaccccgaaacattgtcagataaccagaaaccactccctcttgatgatc

SEQ ID NO: 46040 - DNA, 206 bp, Glycine max
  Clone ID: LIB3139-096-P1-N1-C9
accgctattatgttaaattgatcactgactgcttgtgctcgaaaaaggaactatctttagcgttatgatctgactcaaatgcattaatacgcggatctacataagtcggctataacacaaagcacaaacatgtgcgccaaaggccaaactacggccagcaaccttaaaaaggtctcctgagactggttcgaccataggctccgcca

SEQ ID NO: 46041 - DNA, 183 bp, Glycine max
  Clone ID: LIB3139-096-P1-N1-D1
agatcttctgaaaatgcggaatcctctgcatgatctggaatttgtgttttctttcgcttgttcgtttgtttaattcaataaaggaaactaggcatgaccctcttgttgagtatgctctgcctatttgaaaatttccacacctcttttaattgtcgtaatgatgtgtgaagtgtgtgttatttt

SEQ ID NO: 46042 - DNA, 447 bp, Glycine max
  Clone ID: LIB3139-096-P1-N1-D10
cgatcacttgtgggatgataccctcgccggtcctcgcccggagaacggcctcggcaagctccgaaagcaccactccttcgctttccgatctgcctccgccaaggaatcagacagcggaagcgtgaaatcgtacggtgaggattcgcccaagaatgcggtgagagtgacgcgaagtataatgatcgtgaaaccacctggtaaccagagtcccagtggatccgctccggcttcccccgccggttctactcctccggtgtctccgttttcgggagctagagaatccttccgttttcggagaaggtcaacatcagatgcgtacgagaagacaggccagaacagatcaagctcttcttctcctttcgatgtgtgagaaatgagcctgaccactatatatcctccatggatcgatgactgaaataaaatatatatagtaagttggttttctct

SEQ ID NO: 46043 - DNA, 429 bp, Glycine max
  unsure at all n locations
  Clone ID: LIB3139-096-P1-N1-D12
attcttcaagattcaggtactgcgtttcggaagcagacacagatggctcgtacgaagcaaaccgctcgtaagtccacaggaggaaaggctcctaggaagcagcttgcaaccaaggctgcacgtaagtctgcaccaactactggtggtgtgaagaagccccaccgttatcgtcctggtaccgttgctcttcgtgagattaggaaataccagaagagtaccgagcttttgatccggaagctccccttccagaggctggttcgtgaaattgctcangacttcaagactgatctgcgtttccagagccacgccgtgcttgcattgcaagaagctgctgaggcataccttgttgggctctttgaggacactaacctgtgtgccattcacgccangcgtgtaaccattatgcccaaggatattcaactggcaaag

SEQ ID NO: 46044 - DNA, 386 bp, Glycine max
  unsure at all n locations
  Clone ID: LIB3139-096-P1-N1-D2
atcgatcgctacccttttatctcaatggacacagaatttcccggtgttattttccgaccacatgtggaccccaccaaacccttcaaccaccgcaaccgtccctccgaccactaccgcctcctcaagtccaacgttgacgctctcaacctcatccaggtcggcctcaccctcaccgacgccgccggcaacctccccgacctcgccggaaaccgctccatctgggaattcaacttccgtgacttcgacgtggcgcgtgacgcctacgctcccgactccatcgatcttctccgtcgtcagggcatcgatttcgcgcgtaacaccgncgacggcgtggattccacgtgcttcgcggagctgatgatgtcttcggggctcgtgtgcaacga

SEQ ID NO: 46045 - DNA, 423 bp, Glycine max
  Clone ID: LIB3139-096-P1-N1-D3
cggaccctcttccatggctactgtttcttctctttgcgctgttgttcccatactcacaccaaccttgtcgaaaccccgcttggctcccctctcttgccgaatcccaaaacgacgtcgtatcagtatcatcacctctgttgccgaggatcgagaaatagttccggtgtctgaaggcagaggaacccgtttgaacgaagttgaggggtttcaaccttcggagcctcacacagagtcggaggttgttgtttcgagcctcacaagcagtagctccgtcaatgccatcatcgttttggggtttgggactttcgctgtcaccaagttgctcaccattgaccatgactactggcatggttggaccctttatgagattgtaaggtatatacctgaacacaattggattgcctatgagcaagctctgaaagc

SEQ ID NO: 46046 - DNA, 441 bp, Glycine max
  Clone ID: LIB3139-096-P1-N1-D6
gtcggaatgggaagggtgattcgcgctcagcgtaagggtgctgggtcggtgttcaagtctcacactcaccaccgcaagggtccggcgaggttccgcagcctcgacttcggcgagcgcaacggctacctcaagggcgtcgtcaccgacatcatccacgaccccggtcgcggcgcccctctcgccaaggtggcattccgccaccccttccgctacaagaagcaaacggagctcttcgtcgccgccgagggcctctacaccgggcagttcgtctactgcggcaagaaggccacccttgtggtcggcaacgtgttgcccatccgatccatccccgaaggtgccgtcatctgcaacgtcgagcaccacgtcggcgacccgcgggttttcgccagagcctccggtgactatgctattgttataagccacaaccctgataacgacacc

SEQ ID NO: 46047 - DNA, 413 bp, Glycine max
  Clone ID: LIB3139-096-P1-N1-D7
ggcgtgacccttgacgctttcgccgccaaaaactttgatgtcaccgacgttgtcgccttatccggcgcacacacctttggtcgtgcccattgcggcacattcttcaacaggctctcccctctcgaccccaacatggacaaaaccctagccaagcaactacaatccacttgccccgacgcaaactccggcaacaccgccaacttggacatcagaaccccgactgtgttcgacaacaaatactaccttgacctaatgaaccgccaaggggtgttcacctctgaccaggacttgctcaatgataagaggactaaagggttggtcaatgcatttgcgttgaaccaaacgttgttctttgagaagtttgtggatgctactataaagttgagtcaattggatgtgctcactggaaatca

SEQ ID NO: 46048 - DNA, 440 bp, Glycine max
  Clone ID: LIB3139-096-P1-N1-D8
cgagaactgtatttgcacagtccagaggaagctcgccaattgagaaggaaagctctctctcgtattgaatggctgcaaaaagctgatgtgcctaccatagcacagattgaagagttccattcgatgcagaggatgatgaatgctcctgattcaaatgataatattgatctactgttgagcattgatttgttgggtttacaaggagcaggcaaagcttttccaaacaagattgtttttgatgataagcttgtgttggctaacacacaagaattctttgatggaaattttccagtggattcttggttaccaatttttgtgaattgtctttatcctgtaagtcaattaccttcagaagctgtcgttgtaaatgtcacatgtggtagtggacactgtggttacccacactgcttggattagttctgcagttaacaatcgctcct

SEQ ID NO: 46049 - DNA, 452 bp, Glycine max
  Clone ID: LIB3139-096-P1-N1-D9
cctctatttaactaattctacaatctgttattacttttgcttgcatctctctgtgttcaatcttcaaagacttgaattcttcttacttaggttctgaatggctggaatttgctgtggtgttgtcggagaaggtgacactccggctccactcgagccaactactcgcccctccaggcgccggagtttggacatcttacccttaaaatacatcgctgacatggcggtgccgccgtcggatggttcacggaaacgtcccaagctggatctcagggaccgcgataacgtagttcaaaattgcgacgaatccactggacacaaggtggtgaaaaaagaagccaaagtggaaatccacgacaatatttccgaaacgaaaaacgtaactgttgcggatgcttcggaagttgaagattctcctaagttcggcgtgacgtcagtttgcggcaggagaagaa

SEQ ID NO: 46050 - DNA, 433 bp, Glycine max
  Clone ID: LIB3139-096-P1-N1-E1
ggccttgcattatggccaggcttgtctccagtggcaccagcaggccaggcttatctgcagtcttctgctactaaggctcctgattggctggaagctgcaatccgtgcctcgaaaatggattcaatggaaacttcaacttgttcttctagggggagtatctttattcctaaaagatcatggaagaagtgtgcagctcatgttcacatcagtcatataatcaagagtctagaggtgccaaaaacacaggttttcaaagaaactgagttttttgaatgtcatcaaatgagagaacatgaaggaccaaagcgtggagttcttttaaaagtacacagctcaaacgaaatgaaaaatggaatcacttctactgtgaggaatccacatgaaagtaagaatattattcttcggcagcaatgccattatcgaaacatatcac

SEQ ID NO: 46051 - DNA, 432 bp, Glycine max
  Clone ID: LIB3139-096-P1-N1-E10
aaaaccctgaagaaaccacagccattgtttacttttcattgattgagccaaagctttgtattttctgcgataattttccattgggtggaagaaagtctcaacctttattcgaaagagcaaggatctgagttgagttgagtgatcatgtgtggtggtgcgattatctccgacttcataccggcaggtcccgccagcggggcgcggcgcgtgaccgccgacatcctgtggccgagtttgaggaagcgcttctcgaagccgctgctggacgatgatttcgaggctgggttcagagaattcaaggatgattcggaaatcgaggatgttgatgacgaggacgatgaagacgaggaggagttgaagaagaagccctttgggttctctcgctccagcaacaaggctgcttctaagcctctctctcgtggatcagcaact

SEQ ID NO: 46052 - DNA, 437 bp, Glycine max
  Clone ID: LIB3139-096-P1-N1-E11
agcaggtaaagcttttccaaacaagattgtttttgatgataagcttgtgttggctaacacacaagaattctttgatggaaattttccagtggattcttggttaccaatttttgtgaattgtctctatcctgtaagtcaattaccttcagaagctgtcgttgtaaatgttacatgtggtagtggaccgtgtggtttacccaccactgcttggattagttctgcagttaacaatcgctcctcagacatcaacaaaaggattcgcacagcacttgggaaaggtaagaaaattgtttttcttactagagttgatccttttccagtagctttattggctgttctttttggcgttaagaatgaaattctgagttctaacgccactaaccctatgctgacgcgacttcttgagaactggtagagtctcaaatatctggttgatg

SEQ ID NO: 46053 - DNA, 421 bp, Glycine max
  Clone ID: LIB3139-096-P1-N1-E12
ggcttctacccagagcctcatgctcttaccacctctgagatatctgaaatagtgcaccattatcgccaagcagctattaatgcaattcgagcaggttttgatggaatcgagattcatggagcacatgggtatctcattgatcaattcttgaaggatgcaatcaatgatagaacagatgaatatggtggatcactagaaaaccggtgcaggttcttaacgcaggtggttgaagctattgtctctgcaattggagcggaaagagttggtctcagaatttcaccagcaattgatttcaatgatggctttgactctgacccacttgggctaggcttagcagtgattgagagactcaacaatttgcagaaacaagtgagcacaaaactcgcttatcttcatgttactcagcctcggttcacactct

SEQ ID NO: 46054 - DNA, 398 bp, Glycine max
  unsure at all n locations
  Clone ID: LIB3139-096-P1-N1-E2
taagatttgaaattttaataaaccgcgatcacaggttgccgcaccttaaaaccggaaacaaaagcaatcgttacttgatttcaagaatttctcaatttcttcctacttctttgtgtacgatttcttaagggaaagaaaatcactctctgtgctggtcacagacttcgtgaatcattttcttttccactcctagtttatttgctgaacactctcctatttgatataggacttcgtgtcagatttaaactttttctgtttctttctcagntctctgtttaatttcaagttcaagctggtgaaattttggattagtgctcccactctcctatctggtataggacttcgtgggtagacttttctacttctctcctttctttcactctcttcttctcactgat

SEQ ID NO: 46055 - DNA, 432 bp, Glycine max
  Clone ID: LIB3139-096-P1-N1-E3
gcctcttcttcatcatttcttcagttcccatcatcaacccaacctgtgatgatgggaaaagatgcttcttgccctaaggtggtggtagagttgcagcagaatggtggtgatggcaaagtgttctctccctcttctgcaaatacagctgtgtcccagcctaacacctctcagaaaagaactgctcctgctccagtggtggggtggcccccaattcgttcattcaggaagaacctttcaagcagcagcagtgcttctaagccaccaccacctcctgagtctcaggctgagcagcagcacaacaaggttgctggtaaaaaacctgttgacaactatgctaataataaaggtttgtttgtcaagatcaacatggatggtgttccaatagggagaaaagtggacctcaatgcttacgacagctatgaaaacctctct

SEQ ID NO: 46056 - DNA, 397 bp, Glycine max
  Clone ID: LIB3139-096-P1-N1-E5
ctcgatcgcaacttcaacttcagttgtactctttctatatagagaaatgtgtcagcagcagtagtgttgcgttttgtcgttaatccgttagatagtgcatgttgatttaatattatcgattgctgatgaagaatgatgcaaaaaaaaaaaaaaaaaataaaaaaaaaaaaaaaaaaaaataataaaaaaaaaaaaaaaaaaaaataaaaaaaaaaaaaaaaaaaaccccggccgggccaaaatttgggttacctttcgccccaaaacccccatttaaactctccccttttttttttttttaaaaatttttgaaaaggggtttcaaaaaccccccccccccccgggggttttttttgggtccccaggggggcacgcccttttttggggaggccccttt

SEQ ID NO: 46057 - DNA, 417 bp, Glycine max
  Clone ID: LIB3139-096-P1-N1-E6
cagatcttcgagctaaatttgcagaaatggcaactcaaatatttggggaaatgcttttttaccctgggacagattgctcttgcttaacagaattcccttccccggaatcactaaaaaatcgagttattatatcaacgaaacctccgaaagaacgttttaagtccaaccgtatcaaggacaatcctatgctgaatgaaagtgattcatctgaagaagaaacatggggaaatgaatctccagactccaacaagaacgaagtggagactgaggacacgaatggaagcgatcgtgatgagggaaatgtaagtgcatgtgaatgtgaccataaaccatatcaggagtgttcacctgattacaaacacataattactatccataatacgaagctcaagggatgcatgaaggataaattgaaaa

SEQ ID NO: 46058 - DNA, 445 bp, Glycine max
  Clone ID: LIB3139-096-P1-N1-E7
aactcatttctctccaaaaccctcaaactcaacaccttttccccacactctcacctttcactacccctcaacaagtctttcacttgtagaagccaggctgaaccatcttctgactcagccaaagtccaagaactgagtgtgtatgagatcaatgagagagatcgtggaagccctgcttatcttagattgagccagaaaactgtcaattcccttggtgacctagtccccttcagcaacaagttgtactctggatgtttgcaaaagagggtagggataacagctggaatttgtgtgttgatccaaaacaaatcagagaagaagggagatatgtatgaggcaatctacagcttctactttggggactatggtcacatttcagtgcagggttcatacctgacctatgaagacacttatcttgctgtgactggtggatctggcatctttg

SEQ ID NO: 46059 - DNA, 423 bp, Glycine max
  Clone ID: LIB3139-096-P1-N1-E8
gccaaggttttcagccatcctgatgttgttgctgaagtgccatggtacggtattgaacaagaatacaccttgttgcagaaagatatccaatggcctcttgggtggcctgttggtggtttccctggacctcaaggtccatactactgtggtgttggcgctgacaaggcttttggccgtgacattgttgacgcacactacaaagcctgtatttatgctggcatcaacatcagtggaattaatggagaagtgatgcccggtcagtgggaattccaagttggaccttcagttggaatctcagctggtgatgagatttgggcagctcgttacatcttggagaggatcactgagattgctggtgtggtggttcctttgaccccaagccaattaagggtgattggaatggtgctggtgctcacacaaact

SEQ ID NO: 46060 - DNA, 443 bp, Glycine max
  Clone ID: LIB3139-096-P1-N1-F1
ggctttcacaacacctcagcgtcactgtaccagttggaaatggagacaataacagagaacggatcagatggtgtgagtttggcaagaaatacatccaacaacgcccgtcgagggttgccaatgatccaaacaaacatgaagccaacggattcggaattccaagtgtgccacgacgacagcaccccgccggtcagagcccaaaccattcacgagctccattctctgcagaagaaaaagtcaaccccttccactcccctctcagcaacgcaaggccccttcgccactgtttccgatgaggaacgccagaaacagcaactccaatcaatcagtgcgtcgttggcgtcgttgacgaaggagtcagggcctaaagtggtgaaaggagacccagccactaaggcagagaaggggacacatgttcatcaccatccgcaaccacattactt

SEQ ID NO: 46061 - DNA, 432 bp, Glycine max
  Clone ID: LIB3139-096-P1-N1-F10
cacataattcctcaggttttggagatgaacaacaatccacactatttgtatcggatgaccattcttcgtgctatctctctgcttgctcctgtgatgggccctgaaatcacttgttcaaacttgttaccggttgttcttgctgcatctaaagacagagtgcccaacataaagttcaatgtggcaaaggtattagagtccatcttccccatcgttgatcagtcggtcgtggagaagactattcgtccatgtctggttgagctcagtgaggatcctgatgttgacgtgcgatttttctccaaccaagcactacaagcaattgatcatgtcatgatgtcttgctaggcagaaatggttccacacgcatttaagttgaagacgtcagaagagatgctaatatttccaactaccataaataatactgcataagtatgt

SEQ ID NO: 46062 - DNA, 381 bp, Glycine max
  Clone ID: LIB3139-096-P1-N1-F11
caaaatattttcttctatctcatcctttcttttagttttatttttatttttttatcttgggtaaaaaaaatcatgggtgttttcacttctgaaagcgaacacgtttcccccgtctctgctgcaaaattatacaaagctattgtcctagatgccagcaatgtcttcccaaaagcattgccaaatttcattaagagcgtagaaaccattgaaggagatggagggccaggaaccattaagaagcttactcttgctgaaggtttaggttatgtgaagcaccacgtagatgcaattgacacagaaaactatgtgtacaactatagtgtgattgaaggcagtgcattgtcggagccattggagaagatatgttatgagtacaaactg

SEQ ID NO: 46063 - DNA, 342 bp, Glycine max
  Clone ID: LIB3139-096-P1-N1-F12
ggatggactgtcaccccaatgcaggatgttcaggctgcaattgattggtttatttgctctcaggaatgtgttcccaggacttattgtgttttaaatccacaaaatccttttgtgttaaatacgtggatggggaaactgactttcccccacggcacttgccgaaatgttaagagaatgcctctttctatagggggaggagctggtgcaaagaatgctattctgatgaatatgccaaatgctgctctttcaatgtggagatatttttgtggagatctcgtctttgaagattctaacatgactgcttcctacattaaatgtacaggctctttcttcatacgcatt

SEQ ID NO: 46064 - DNA, 286 bp, Glycine max
  Clone ID: LIB3139-096-P1-N1-F2
ctactgttgagcattgatttgttgggtttacaaggagcaggtaaagcttttccaaacaagattgtttttgatgataagcttgtattggctaacacacaagaattctttgatggaaattttccagtggattcttggttaccaatttttgtgaattgtctttatcctgtaagtcaattaccttcagaagctgtcgttgtaaatgttacatgtggtagtggacggtgtggttaacccaccactcgttggattacttcttcagttaacaatggctccttagatattaaca

SEQ ID NO: 46065 - DNA, 451 bp, Glycine max
  Clone ID: LIB3139-096-P1-N1-F3
ccctgatgatggaccaggtacgctcgaagtagtgcttgcaagaagacccttgttttttagggagatcaatccacagccgaggaagcataccttatggcaggcaacatcggactttactggtggacaagccggcataaacaggcgacattttctgcagtgtccacaaggattgctaggcaagcattttgagaagctcattcagtgtgatccccgtctcaactatctaagccagcaggcggatttggtgttggattctccgtattttgaacctggaacaacttcaattcacgaccacattgaatctagtgacggctttgatagaaaaagcgaagagcgatctggtatttttggattgcaggatgtggagtcaggatctgcagttcaatcatcttcctcaaaaagtgaacataaccttggtaaagcttgtgaaaatgtttcccaagaaattacc

SEQ ID NO: 46066 - DNA, 333 bp, Glycine max
  Clone ID: LIB3139-096-P1-N1-F4
gagaaagcaggcctggccaaattgttggaggaggcaaaggaatcagagttaaggagctatggggttgttgttaatagcttctacgaacttgagaaggtttatgcagatcattttaggaacgtacttggaagaaaagcgtggcatattggtcccttatctctatgcaataaagacgcagaagagaaagcacgtagaggaaaggaggcatctattgatgagcatgagtgcctgaagtggcttaacacaaacaaacccaattcaggtatttatatatgctttggaagtacacgaaagattcctgattctcaacttaaagaaattgctaaaggtctt

SEQ ID NO: 46067 - DNA, 262 bp, Glycine max
  Clone ID: LIB3139-096-P1-N1-F5
tactaatcgatcttggatgttgctacatggctgcgagtttcggtatggatggtgatagtaggacttggatactagatctatgaccaaactcacaggtcactggcgcatgcaatctatgacgcactagcatatgctgatgaaaatcatggatcttaagcaagatatattgcctactcttaacacagagcatgccaaagaaaccacacttctagtgaatatccatagggcacaaaatggctacacacaacaatacacgattcac

SEQ ID NO: 46068 - DNA, 447 bp, Glycine max
  unsure at all n locations
  Clone ID: LIB3139-096-P1-N1-F7
gggatgacgaataattgagatcaataatagatcgattggtatggtggatgattaggttttgcgaagattacgtttattaacaattgggcgtcactagcaggcattggttgtaagtttctgaaaaaagttgtctgattttgtgaattggtttgctatatcctttgtatttacaatttggagaacaaattatcctaaccataaaaaaagtaaataaacattgagaacagaatataacaatgatgattccattcatattatggtcatctataaagcagattggtgcttctgtaccaagattgtgtcggaagatgactaaattactgtgtcctccatgccgttaaaactcatgaaactcttgttcatgcagtgaaattgggggatacacgttatgtattatagattatttccaggtttcattcatatctttaggttntaaaaatatttatg

SEQ ID NO: 46069 - DNA, 450 bp, Glycine max
  unsure at all n locations
  Clone ID: LIB3139-096-P1-N1-F8
gttttcattggagttactattggtggaaccttgttcaaagcattgaagagaattagggagcacccgacgttggatgaaatttcatccttgctagctgaaagcctcccaggcaatgctacttttttcttgacctatgtggcccttaaatttttcattggctatggccttgaactgtcccgaatagttccccttattatataccatttgaagagaaaatatctttgcaagactgaggctgagttgaaagaagcttggcgtcctggagatcttggttacggaactagagttcctggtgacatgctgattgtcacaattgtcttctgttactctgttattgctcctgtgataatcccatttggtgctctatattttggcctangatggcttgttttgcgaaatcaggcactcaaagtctatgtaccaacatttgaaagttatggaagaatgtgg

SEQ ID NO: 46070 - DNA, 439 bp, Glycine max
  Clone ID: LIB3139-096-P1-N1-F9
ttcattacttctaccaagctactacatttttaacttcctctttctacatttcattcaaaacaatcatggcttctcttcattccattacattttcaacaaaaactgtcctttatgtatttgtattggcctcttccatcgcagcctctgctggcaacttctaccaggattttgacgtaacttggggagatggtcgtgccaagatactcaacaacggcgatcttctcactctttcccttgacaaagcctctggctcggggtttcagtccaaaaacgagtatctctttggcaagattgatatgcaactcaagcttgtacccggaaattctgcaagcactgtcaccgcctattatttgtcatcaaaaggatcaaattgggatgagattgactttgaattcttggggaatctgagcggtgacccatacattcttcacaccaatgt

SEQ ID NO: 46071 - DNA, 427 bp, Glycine max
  Clone ID: LIB3139-096-P1-N1-G1
gaagaatacacctggttgtcagccagatgtacagacttattcaatcctcctaaaatcttgcttacaggtttttgcctttgacaagattcagagtcttttatctgatatgaccaatcgtggaatcaaacctaacacagttacctacaatacccttattgatgcttatgggaaggcaagaaagttttcagaaatggaatctatacttgtggaaatgcttgctgaccggtattgccaacccgatgtatggactatgaattcaacactcagggcatttggcaacattggacaaattgaaacaatggagaagtgttatgagaagttccaaaatgctggaatccaacctaatgttcagactttcaacattctcttggattcctatggcaaggctcaggattacaagaaaatgagtgctgtgatggaatacatg

SEQ ID NO: 46072 - DNA, 412 bp, Glycine max
  unsure at all n locations
  Clone ID: LIB3139-096-P1-N1-G10
ctttttcttctctctcaacaacttcaccttcttcctcctcgatcatgtctcacttcaagggcaagtaccatgatgagcttatcgccaatgctgcgtacattggcactcctggaaagggtattcttgctgctgatgagtcaacagggacaattggcaagcgtttggccagcatcagtgtagagaacattgaatccaacaggcgagctcttagggagctgcttttcactgctcctggtgttcttcaatatctcagtggtgtcatcctctttgaggaaaccctctaccagagcacagctgcaggcaagccctttgtgaatgtcttgaaggaagctggtgtgcttcctggcatcaaagttgacaagggcacagtcgagcttgctggaactaatggaaaaaccaccactcanggtct

SEQ ID NO: 46073 - DNA, 86 bp, Glycine max
  Clone ID: LIB3139-096-P1-N1-G11
ccgtattcttttatttttacaacatggacgaggatttgtgcatgggggctgttgaacccatgggcgaggacttttacattttcggc

SEQ ID NO: 46074 - DNA, 318 bp, Glycine max
  Clone ID: LIB3139-096-P1-N1-G12
aatctcgtaaatgtgttacgagaattgtatttgcacagtccagaggaagctcgccaattgagaaggaaagctctctctcgtattgaatggctgcaaaaagctgatgtgcctaccatagcacagattgaagagttccattcgatgcagaggatgatgaatgctcctgattcaaatgataatattgatctactgttgagcattgatttgttgggtttacaaggagcaggtaaagcttttccaaacaagattgtttttgatgataagcttgtgttggctaacacacaagaattctttgatggaaattttccagtggattct

SEQ ID NO: 46075 - DNA, 413 bp, Glycine max
  Clone ID: LIB3139-096-P1-N1-G2
ctcgagccggctatgaaaaattactgcgccaggctaaagctccaagtatgtttttacaatccttcaaaaattttgtttctttgtgtgtgtatggtgatgataacttaattagtgttcatgaatatgtcaagccttactttagtggttctaaattgaaaagctttctagctagtcataacatcaccattactgatggtattgacaaaactagtgcaactttgcaatttagaaagttagcagattgtgattttctcaagagaaactttaagcagatgtctaatgttttgtgggtggctcctgaggacaaggcgagtttatggtcacaacttcattatgtttcgtgtaataatctggaaatgcaagaagcttatcttgtcaacctcgtaaatgtgttacgagaattgtatttgcac

SEQ ID NO: 46076 - DNA, 452 bp, Glycine max
  Clone ID: LIB3139-096-P1-N1-G3
tctgcttggacttcacacttcctggttatccagagtacatcttgaaacctggagatgaaattgttgacatcaataatctagaggagtacatatccatggtggttgaggcaactgttaagactggaatcatgcgtcaaatggaagcatttagagcagggttcaatcaggtttttgacatctcatctttacaaattttttctccccaagaactggattacttgctttgtggccggagagaattgtggaagactgagacactagccgatcatataaaatttgaccatggttatactgccaagagccctgccatagttaatttactcggaattatgggagaattcacaccagagcaacagcgtgccttctgtcaatttgttactggtgcacctaggttgcctcctggtggactggcagttctaaatccaaaattaacgattgtgaggaagctttca

SEQ ID NO: 46077 - DNA, 452 bp, Glycine max
  unsure at all n locations
  Clone ID: LIB3139-096-P1-N1-G4
cctgagctctttgatacttgtgttcttgagggtgagactattagggagtggcttttctttgataagcctagaagggcatttgagagtggaaacagaaagcagaggtcactgccggattacagcgggcgagggtggcacgagtctagaaagcaagtgatgaacgagtttggagggctgaagagatcctattacatggatcctcaacctttgaacctttttgagtggcacctttacgagtatgaaatcagcaagtgcgatgcgcgcgccttataccggttggaactaaagctcgtcgacgggaagaagagctccaaggcaaagatagtagtaacaagtgattcagttgctggtctgcagaagcacattggaagcctctctgctaaaggtagaaccaagcttggcatangaggtgggtttattcagcttctaacagagttgctctacaactaaat

SEQ ID NO: 46078 - DNA, 283 bp, Glycine max
  Clone ID: LIB3139-096-P1-N1-G5
gtcaagccttactttagtggttctaaattgaaaagctttctagctggtcataatatcaccattactgatggtattgacaaaactagtgcaactttgcaatttagaaagttagcagattgtgattttctcaagagaaactttaagcagatgtctaatgttttgtgggtggctcctgaggataaggcgagtttatgggcacaacttcattatgtttcgtgtaataatctggaaatgcaagaagcttatattgtgaatctcgcaaatgtgttacacgaattgtatt

SEQ ID NO: 46079 - DNA, 416 bp, Glycine max
  Clone ID: LIB3139-096-P1-N1-G6
ggtaagcgtaaatgggaattcgggtttacctaataatcgccgttggagccgaatcaaccagtacttagaatgaactatgcgtaaactaaaaagaaaccaactctttagaggacgacacatagctttaccattggtaatgggatctagaagaataatccgttgggttcttccggatcgtctaggatcacaactaccgacatcaaaacttaatagatttttacgccatcaacaagataggattatcaaagcgatagaccgtggggatctagtgctggccttcaagatgttcacatccctagcacagaattcatacgtcttccgtacaatgtgaatttgtagaatcatgaaaggttgatactggagcacgaatatcgaccagttaaataaaatcttagtgaaactggacaggatcatta

SEQ ID NO: 46080 - DNA, 424 bp, Glycine max
  Clone ID: LIB3139-096-P1-N1-G7
tttcgaccattgcagcatcaagcatgtaaagcagctttggcaaagcaagattcttttattcttatgcctactgggggcggtaaatctctttgctatcagcttccagctactcttcaaccaggtgttacagtagttgtatctccattactttcactcattcaggaccagattataacactaaacctcaagttcggaataccttctactttcttaaattctcaacaaactgcttcccaggtcacagctgtgctccaagagctaagaaaagacaaaccatcatgcaaacttttgtatgtgacacctgagagaattgctggcaaccaatcgtttcttgagattctaaaattcatgcatcagaagggacagctagcaagttttgttgttgatgaagcacattgtgttagccaatggggacatgattttc

SEQ ID NO: 46081 - DNA, 408 bp, Glycine max
  unsure at all n locations
  Clone ID: LIB3139-096-P1-N1-G8
atataaaaaagaattgtgctgcttaatcaatgacaaccactttggggtccacttgccagagaaaatacatccatcggtagagaaaagggggttataaatttatattatacaataaaaaaaattcagcatcctttgttcaacgtttctccaagtcttccctgatctagaagttggaactcccgtttgaatctctggattaacctgaactttgttctttgcaacatatgtcatcctatccctaataatattgtgtaatattggatagtagaagcatttcaaaaatgaaaacacctaaaaaaatagctgacaaccaatcgattattgagattctaaaaattaatgcatcaaaagggacagctaagaaggttttgatgatgatgaaagcacataaanattggggggggcccc

SEQ ID NO: 46082 - DNA, 453 bp, Glycine max
  Clone ID: LIB3139-096-P1-N1-G9
tccttattcattcaccaccctatccaacatggctgaggagactccaaaccagacaaccacaccaccccctcctcaagagtcagtggtgcaagtggaggaagtggtggtaaccgatgttccacagcccgacaaaacaacaactacagttccagttgaaagagattcgcaacctcaaccttatgagccagagaagaagaagcccgttgaggaaaccgtcactctcgagactcacctctccaaacccaacaatgctgaccacaccaacaacatccctgaattcattgaagaaagcaccaaactttctgacctcccagaaaacgaaaacaaggctctccaagagctcaagaagctcgttcaagacgctctcaacaatcaccacttctcttccaaacatgataacaagaagccaccacaaacaactgctgctgacaacaaggaagaacaacaaccaca

SEQ ID NO: 46083 - DNA, 453 bp, Glycine max
  Clone ID: LIB3139-096-P1-N1-H1
gagtaagggcaacgatattctgtgttgcgattatgctagttttgatggtttgattaccaagcaagttatgagcaagatggcagaaatgataaacagtctttgtggtggtgatgaaaaattgatgcgtgaaaggacacacctgctgttggcttgttgttcaaggatggcaatttgtaagaaagatgtttggagagttgaatgtggaatcccttctggatttccgctcacagttatttgcaatagcatttttaatgagatgctcattagatatagctatgaaaaattactgcgccaggctaaagctccaagtatgtttttacaatctttcaaaaattttgtttctttgtgtgtgtatggggatgataacttaattagtgttcatgaatatgtcaagccttactttagtggttctaaattgaaaagctttctaacttgtcataatatcaccattac

SEQ ID NO: 46084 - DNA, 289 bp, Glycine max
  Clone ID: LIB3139-096-P1-N1-H10
aattcacccgctaccttttcccgtgtacgaacgaatccaatccaccaaatcggcggcgacgcctccgctctgtctcgaaaccacagatctgcggcggaaccgccgtctccgactatctccgattgatcttccggtaaagtggaccggagatgccggttgccgcttccgccatttacttcctcaacctccgcggcgacgttctcatcaaccgcctctatcgcgacgatgtcgggggaaatatggtggatgcttttaggacgcatattatgcaaacgaaggagcttggtac

SEQ ID NO: 46085 - DNA, 397 bp, Glycine max
  Clone ID: LIB3139-096-P1-N1-H11
cggctcgagggaggtactctggctgaccacacattcttgtttcttggtgctggagaggcaggaactggaatagcagaactaatagctcttgagatgtcaaagcagacaaagacacctatagaggagactcgcaagaagatatggcttgtagactcaaagggtttgattgttggttcaagaaaggcttcacttcaacacttcaagcagccttgggctcatgagcatgagcctgtaagcagtctcttaaaagctgttaaggtaatcaagcctacagttttgattgggtcatcaagagtgggaaaaacatttacaaaggaagtaattgaggctgtgacttctataaatgaaaaacctcttgtcctggctctctccaatccaacttcacagtctgagtgta

SEQ ID NO: 46086 - DNA, 282 bp, Glycine max
  Clone ID: LIB3139-096-P1-N1-H12
gtaaactccgacaacgtgggatcgaaccagctccagaacattcgcatgggtctccgcggcgactctgttgtcctcatggggaagaacaccatgatgaagcgctctgtcaggatgcacgctgagaaaaccggaaacaatgcctatctcaaccttatccccctccttgtcggcaatgtgggattgattttcaccaagggtgacctgaaagaggtcagtgaggaagttgctaagtacaaagttggagctcctgctcgtgttggtttggttgctccaattgatgtc

SEQ ID NO: 46087 - DNA, 454 bp, Glycine max
  Clone ID: LIB3139-096-P1-N1-H2
ccattttctccattttttttttccttcatccaatctgcattctcttgcgctcgctcgacaacaacagaaagcggcacgacaaaccctagcgattcgatggtgtgcgatgcgactcactgagttgaactagataaagatctgagtcgcggtgattggttcgacgcgctcatgggtgctgcgggctccaagctcgagaaggctctcggcgaccaattccctgaaggagagcgttactttggccttgagaatttcggcaatacttgttactgcaacagcgttttgcaggcactatacttctgtgttccatttcgagaacaattgctagagtattatgcaaataacaaaagcatagcggatgcagaggaaaatcttttgacttgcttagccgacttattttcacagataagttctcagaagaagaaaacaggtgtcattgctcccaaacgatttctac

SEQ ID NO: 46088 - DNA, 453 bp, Glycine max
  unsure at all n locations
  Clone ID: LIB3139-096-P1-N1-H3
cacaaaccctagattgagagaaaccctaacacgccatgggaacacccgagacatctcgcgaaccctgccccgatcgcatcctcgacgacataggcggcgccttcggcatgggagcggtgggtggctccgccttccattttctcaagggtctctacaattcccccaagggcgatcgattcgtcggcgccacccaggccgtgcgccttaacgccccccgcgtcggcggcagcttcgccgtctggggcggcctcttctccgcctttgactgcaccatggtctacgctcgccagaaggaggacccctggaactccatcgtcgccggcgccgccactggcggcttcctctctatgcgccagggncctggcgcctccgcccgctccgcggcattcgggggcgtcctcctcgccctcatcgagggcgccgggatcatgctcaacaagttcctcagcgcgc

SEQ ID NO: 46089 - DNA, 376 bp, Glycine max
  Clone ID: LIB3139-096-P1-N1-H4
ctctctacaaacaatatcaagacaacttcatctaattaaccatgaatcaccaacaacaatctcctgtgactgcatatccagcagtgagtcagagcaacccagcagctccaccaccacctgtgggttatcccacaaaggatgatgttccttcccaacaaaatgttccaatcaaaacctctactaggggtgatggcttttggaagggatgttgtgctggattgtgctgttgctgtgccctggattgttgtctctgattgaagttatggatttgggcttatcctctctgtcctttgtcattttctttactaatttaattgtgtacttgtctaataagggtatttgtgtcctccgagacagcaaaattttatttatgtat

SEQ ID NO: 46090 - DNA, 110 bp, Glycine max
  Clone ID: LIB3139-096-P1-N1-H6
aacattcgcaaagggtctccgcggcgactctgttgtcctcatggggaagaacaccatgatgaagcgctctgtcacgatgcacgctgagaaaaccggaaacaatgcctatc

SEQ ID NO: 46091 - DNA, 418 bp, Glycine max
  Clone ID: LIB3139-096-P1-N1-H7
ctcgtggacctctggaacaaggatgaatgctccaagatgcttgtttggctcagcaagccttggtgagattgcaatattagctggtgggtgtgattcagagggacacatccttgactctgctgagttatataattccgagactcaaacgtgggaaacactcccaagaatgaaaaaacccaggaagatgtcctctggggtatttatggatggaaaggtttatgttatagtggggattggggggagtgactctaagctcctcacatgtggagaggagtacaatttacagactaggacatggactgagattcctaacatgtcccccggacgtagtagtaggggtcctgagatgcctgcaacagctgaggcaccacctctggttgcttgtgtaaatgatgaattgtatgctgctgattatgct

SEQ ID NO: 46092 - DNA, 394 bp, Glycine max
  Clone ID: LIB3139-096-P1-N1-H9
atgactacaatctaaaagctaaaactagcgaataaggtccaagtactatatatgtacaagaacaaattaatctcaaataactttaaaaaagaaagaagaaaaaaacactgaatattttttggatctatggatcatcagtattgagggatttcaatcttgggtatggtcaaattgagacgggatttcttggatggatgaggactggtaacctcgtcatcaacgaagaaccttgttgaaaagtccggaaaagccgggaggttcagatcgaaatcgcggtggcttcctgtgtgagtggaccccactccctcagaggcggttacggcgctgttaccgccttcgtagtgacaacgtttgtgtcctcccaaggcctgtcctgttgggaacgtcttttggc

SEQ ID NO: 46093 - DNA, 319 bp, Glycine max
  Clone ID: LIB3139-097-P1-N1-A1
agaagctgcttcttattttctccaaacccaatctttcaccacagggacgtattactttaaactatccaatatgcatctaatcctctagcttcatccattcattaaatctatattcgctcagaccatgatctgtgccttaaaccatggataattcagttagctgactctgaatttatgcatgactaacgggaatctaatgtggactgattttgtttgaaattttgctttttttattctcgcagttatggtttgttggatagcctttcatttattgagatgtcaaaactgaaacgtgttcacaaggaagaggcaattcaac

SEQ ID NO: 46094 - DNA, 381 bp, Glycine max
  unsure at all n locations
  Clone ID: LIB3139-097-P1-N1-A10
gtggccgcagaaacactagctttcgtcactcagatgactcaagcctcataggatatgcatggcatctttggaatgaacacagagcaatggagcttcttgatccttgcattcgtgattctagtcctagaaacaaggctttgagatgcatacacatagagatgttatgtgtgcaagattcagcagctcacaggccaaacatgtctgctgtggagttgatgctggaaagtgaagcaacaactcttcccatgcctacgcaacctttgattacttcaatgaggagaactgaggacagacaattttacatggatggccttgatgtttcaaatgatctgacagtcacaatggtggtagggagatagaaatngattccagtccctttct

SEQ ID NO: 46095 - DNA, 411 bp, Glycine max
  Clone ID: LIB3139-097-P1-N1-A11
ctcatcctcattcagcagctgataactaatcttaactcaatttttccccttaaacaattgggtaacatcaacatagattacttcttgggaattgaatttaaatatttctgtagtggctccatcctcttatgtcaaaggaaatatatttatgatctgcttgctgaatccaacaagtcaacagaaaagggaatttctacaccccatgattggaggttccaaactctcccatgtttggatcagactatgttcaggaccccagcatctacatattaattgttggagctcttcaatatgcaacaaatgttaggcaagaaataagccacagtttaggcatgccagttattatctcagcccctttacaatcattggaatatagtcaggcggattcttggatacttccaaagcatgatc

SEQ ID NO: 46096 - DNA, 414 bp, Glycine max
  Clone ID: LIB3139-097-P1-N1-A12
attataatataatcaacatctagttcctgtcgcctaattgatgtttatattgtgcgtgaactgtgcatgtgcatagattactgattgggaattgaatttaaacattacaggagtgcctacatcctcttatgtcaaaggaaatatatttatgatctgattgctgaatccatcatgtcaacagaacagggaatttctacaccccatgattggaggttccaaactctcccatgtctggatcagactatgttcatgaccccagcatgtacatattaattgttggagctcttcaatatgcaacatatgttaggcaagaaataagccacagtttaggcatgccagttattatctcagcccctttacaatcattggaatatagtcaggcggattcttggatacttccaaagcatgatcaac

SEQ ID NO: 46097 - DNA, 312 bp, Glycine max
  Clone ID: LIB3139-097-P1-N1-A5
cgaaactggtgctgaccttctccagacccaaacgtccagcacagggacgcttgactctagactatccactatgcatgtaatcctgcagcttgatacattcatgaaatgcatgttcgctcagaccatgacctgcgccttaaaccatggaaaattcagttagctgaatctgaatttatgcatgagtaacggggatctaatgttgattgattgtgttcgaagactggctcgttttattctcgcggttatggttagttggataggctctcatctattagtactgcatcaacagcaaagcgtccacgatgatgacgc

SEQ ID NO: 46098 - DNA, 287 bp, Glycine max
  Clone ID: LIB3139-097-P1-N1-A7
agacgctcgaatttacatagactgaactcgaaagcgcaccagagtgcctccctattgttatttttcaaatacctaatctaccgtcgaacctcctctttcaagaagaaggacgccgaccgaatcgatcagctctcgccgatcacaattcgagggaaagatgcacgaggtgtgggtccatagccgaccagaccgtgatgtaaggccgagtgatcacggtcgtggtcgtgccggagttccaccggctggaggagatcgacgcctgcgcggcccactgcgaggtcaacatt

SEQ ID NO: 46099 - DNA, 236 bp, Glycine max
  Clone ID: LIB3139-097-P1-N1-A8
agatgctgcttcttaacttctccaaactcaaacgtgcaccagaggtacgctttactttaatctattcaatacacatcttaacctctagcttcatccattcattaaatagatcttcgcccagaccatgagctgtgcctgaaaccatggaaaattcagttcgctgaatctggatttatgcatgactaacggggatctaatggtgattgattttggttgaaattttgctgtttttattc

SEQ ID NO: 46100 - DNA, 413 bp, Glycine max
  Clone ID: LIB3139-097-P1-N1-A9
gcgcagcttcttctagatttaaggaagatgggcatggaaaaggttcacatcagtattgaggttattggccatgttgactctgggaagtccactaccactggccacctgatctacaagcttggaggcattgacaagcgtgttattgagagatttgagaaggaagctgctgagatgaacaagaggtctttcaagtatgcctgggtgcttgataagcttaaggctgagcgtgaaagaggaatcacaattgatattgccttgtagaagtttgaaaccaccaagtactattgcacagtcattgatgcccctggacacagggatttcatcaagaacatgatcactgggacatcccaagctgactgtgctgttcttatcattgattccactactggtggttttgaagctggaatttcaaa

SEQ ID NO: 46101 - DNA, 73 bp, Glycine max
  Clone ID: LIB3139-097-P1-N1-B1
gttcaaggatggcaatttgtaagaaagaagttcggagagtcgaagggggaatcccttctgggtttccgctcac

SEQ ID NO: 46102 - DNA, 368 bp, Glycine max
  Clone ID: LIB3139-097-P1-N1-B10
agtatatagatcatcacttggcttcactaatacatcatagtggtggagccccactacacgcgtgaaaggttcttaggtgatgtcttggaccgcggtggttaggactatctaaggaagaaaacagtggtttataacacgcctcatgctcatgaggtggttatggccaccgattttcaaaatagtactggctcataccagacacgttgcatgcacattccactttcaaaggtacaaggatctgtccgcagctgtaagactggcagctgctttttctttattcgggctgcatgcataaacattatatgatatataacgagttcatcctgaaaggaagaactccatattaacttgagccccttttcaaatat

SEQ ID NO: 46103 - DNA, 237 bp, Glycine max
  Clone ID: LIB3139-097-P1-N1-B11
tttatatcgaccttctcggtggaggaattttactggacaaaactggagattggatcacacttatacagaattctacaattagtctcgggtcgagagttgctgctcggaagaaaggctgcctaacggtcatgattgtgatgtctggcaatgcagcaggtaaaaggagcgatcgtgcctcattggtacaagtgttcttaacaaactgcatcggggctgagcatcttgatgcatgtaagt

SEQ ID NO: 46104 - DNA, 365 bp, Glycine max
  Clone ID: LIB3139-097-P1-N1-B12
cttatactgatcaaatagctggtatcctatcacaacacagttgttcagcttaaacattagcgttacagcagcatagattacttcttgggacttgaatgtatacacctctgaagggcctacatcctcttatgtcagaggcaatatactcatgagccgctagctgtatccaacatgacaacatgaacggcaatttctacaccccatgtttggagattccaaactttaccgcgtgtgtatcagtctacattcataagcccagcaggtacttattcatcgttagagctctacactatacaacctatgccaggccagaaatcagcaccaatttaggcatgccatctattatctcagccccttgacaatca

SEQ ID NO: 46105 - DNA, 408 bp, Glycine max
  Clone ID: LIB3139-097-P1-N1-B2
cttctcatgacatacacaaaaccaattgtactcgttctgtcacagaagaacaatctctatagctatcagccaaactacgaacatcatgcagaaccaagtctttctctaccaaatcgcctttggcacgatcattgccatcccccattatccatgcatctttagcgacagatggtgtgtgaagacctgccaaaggaagtgtgtgctttctcattagctgcatcagggaagaggtgtttgttggagaccgagaaggtggccagcggttgcatctagtgccaatgccagacgtcagaagtggcggcggggagaatggcattgttcatcgagacaggccgattgaaggaggcatgtggagctgatcggaactctgtcaagaaattcatctgatgccgtctttgaaccgcaatt

SEQ ID NO: 46106 - DNA, 378 bp, Glycine max
  Clone ID: LIB3139-097-P1-N1-B5
cgaaactggttcttactttctccaaacccaaacgtccaccacaggtacgcttgcctctaaactatccactatgcatctaatcctctagctccatccattcattatatgcatgttcgctcagaccatggactgtgcctgaaaccatggataatccagttagctgactgtggatttatgcatgactaacggggatctaatgctgactgattttgtttgaagtttggctttttttatgctcagagttatggttcgtgggataggcttgcatctattgagatgcctaaactgaatagtgttcgcaaggacgaggcttttcatcttcgcgtcatgagctatcaattcggataaggaaggtggccgcctctgtcaaaaagaaag

SEQ ID NO: 46107 - DNA, 371 bp, Glycine max
  Clone ID: LIB3139-097-P1-N1-B7
ataaactcgttcttacttattccagacccaaactttctgcacaggttcattttaccttaaactttacaatatacatgtaatcctctagctcgatccattcattaaatggatctccgatcagaccatgatctgcgccttaaaccttgttaagatgagttagctgagtctgaatttatgcatgattaacgggaatctaatgttgattgattttgttggtaaccttgttttttttattctcgtggtcctggttagaaggaccggctgacacttacagagatgctaaaactgaatagtgttggcagtgtagaagcttgtcaactacatgtaatgaggtattaatttggatttgtaatctggatgcttctgttaaa

SEQ ID NO: 46108 - DNA, 413 bp, Glycine max
  Clone ID: LIB3139-097-P1-N1-B8
agaagatcgatcgtcactgcactttactgaaacatcatgggaaactagaccctgaacaaggttgagagctgtgagagttgagggccagagatcgaggtgtttatagacattgaccggtcggagacacgatgagctctacctgactccttcttaagaagagggcagccgtatgggaatggctacaaggacgacggtagaccaaggcaagatcatacacggtgtattaaaaaagcttcaccgagctgacagctgctatagctacacaagcttctttttctttattttctttgcatgcataaacattatatatatataacctgatcatcctgaaaggaataactttatattaacttgtcttttttttctaataactatgttataattgaaacataacttatttttatacgagattg

SEQ ID NO: 46109 - DNA, 410 bp, Glycine max
  Clone ID: LIB3139-097-P1-N1-B9
acttaatcgatcatcacttcacttcactaatacatcatggcagacgagacccagaacaagtatgagagctctgaggttgaggtccaggatcgtggtgtttttgactttctcggtaagaaaaaggatgaagaagacaagcctcatcctcaggaggaggtcatcgccaccgagtttcaaaaagtcactgtctcagaccaaggagagaacaagcacagcctcttagaaaagcttcaccgatctgacagcagctctagctctgtaagcttcttttcctttattttctttgcatgcataaacattatatatatataacttgttcatcctgaaaggaataactttatattaacttgtcttttttttttaatatttattttataatttaaacaaaacttaattttatacgagattgt

SEQ ID NO: 46110 - DNA, 384 bp, Glycine max
  Clone ID: LIB3139-097-P1-N1-C1
gtttaatgacttagggcctttggccggaggggctatccaaaaaagatgaaaatgtgtcaatgtgaatctgctgaggcgctatctcattctcatacaaaggctatccttatagttggttatatgagcaacccaatagggaagacttatacatttcagacagcggagacgagcagcctccgacactgaaagccattacactcacgagcgatgacaagtctgtcataatagagctggatccaaaagcacaagcgctggcaggcaagatgttgcaagatgctctcttatactggctactactcgcatgctgacaccagccgttcttgaaaagctccacgaactccgtctacatgcgcaggtcaacatccatctccctgcgcaccgtcg

SEQ ID NO: 46111 - DNA, 272 bp, Glycine max
  Clone ID: LIB3139-097-P1-N1-C10
cttgaaccgaacatgattgcggtatagttatacttaatgggaggggagacccactccatgtttgagagctctataggtgaggtccagcatcgaggtgtgttactccttctcacgacgataacgggtgataaatactagccttatactcacgcaggggtcatcaccaccgtgttgcacgaagtgactgccgcaaaccaaggagagatctagctcatcgtcttagataacctgcaacactctgactgccagctgtctgtgtcggagattctttc

SEQ ID NO: 46112 - DNA, 406 bp, Glycine max
  Clone ID: LIB3139-097-P1-N1-C11
gagaatcaccgcaacaacccacacttcccacacttcccacacttcccaccccacctatctcaaactcaatcctatttccagaccttcccctctacgcgccttcctccccctcacatcacgcgcccccactcgccgctgcccctccacccccgcatgcctcttcaccggcatcgtggaggaaatgggcaccgtcaagcagctgggcatctccccacacggcggcgtcgacctcaaaatcgcggcctccaccgtcctggacggcgtaaacctcggcgacagcatcgccgtgaacggcacgtgcctgaccgttacagaattcgacaccaaagtcgccgacttcacggtgggcctgtcgccggagacgctccgaaagacctccctctcggaattggagcccgggtccgcg

SEQ ID NO: 46113 - DNA, 389 bp, Glycine max
  Clone ID: LIB3139-097-P1-N1-C12
gcaacccttgcaactcggatggagcagtacatccagggtcagtctaaggatttggttgaccaagcatatacaaaatttgttagcataatgtttgcaactttagaaaaaattgcacaaacagatccaaagtatgcagatattttcctttttgagaactatgctgcttttcagaatagttagtatgacctcgccaacattgtgcctactttggccaagttttatcatcaggccagtgaagcctatgaacaagctcgtacacgccatattagcatgattatctactatcaatctgaacgccttttccagtttgctcgaatgattgaagactcgatgttcactgttgcacctgaagagattcctctctagcttggacttgcatatatggatct

SEQ ID NO: 46114 - DNA, 252 bp, Glycine max
  unsure at all n locations
  Clone ID: LIB3139-097-P1-N1-C4
cttatactaatctatttactaggnnactaacacatcacagaaagcgagacccaactattacttaacatcactttagattacctcctgcaacttgaatctttacaccaactaaagactttcatccttttataacacaagcattatactcatgaactcgcttagtactatccatcatgtacaaattaatcgctatttccacaccccatatcttgacattctaatccttaaccttataatatcagactacacctc

SEQ ID NO: 46115 - DNA, 412 bp, Glycine max
  Clone ID: LIB3139-097-P1-N1-C5
agattatgccgctagctggcgccatacgctatattttaccacaggtacgcatgacttaaagctcatgaatatacatctgacttctgtagcgacatccagtcattaaatgtatcaggagctaagaccatgccatgagccttaaaccatggattactcaggcagcggagtgggaatttatgcatgaggaacggggatctgaagctgattgattccgttgaaagcctgaggtgaagatcatagacgttacagctggtggcaatggggtcacttacttaaagatgggacaccgattactgtggatgaggctgcggctgttctcctgactgttatgagctttaattttgcagatcagaaatgcggcgtggcggttctccagtaccagcatgagtatactggtatcagctaccacatt

SEQ ID NO: 46116 - DNA, 414 bp, Glycine max
  Clone ID: LIB3139-097-P1-N1-C6
attccacaaaacccttttgtggttaaataggtggttgggaaaactgactttcccccagggcacttcccgaagtgctaagagaatgcctctttctatagggggaggagctggtgcaaagaatgctattctcatgaatatgccatatgctgttctttcaatgtggagatattttgttggagatctcgactttgaagtctctaagaagacttctccctacattaaatgtacagtctctttcttgatagcattgggaaattcggctgatgacaccatcaattttgaggcttttccccactagctgatgcagttaggagagactcaagaaaaagttgaattgtaattttcacaagaagaatttcttacagcttggtcaactcatgtgcgttctgcaacatctctgctagctgatgggtg

SEQ ID NO: 46117 - DNA, 413 bp, Glycine max
  Clone ID: LIB3139-097-P1-N1-C8
ctcgagccgaatcggctcgagggaagggtggattcattgagaaggtgaaggatttcattcatgacattggtgagaagattgaggaagctattgggtttgggaagccaactgctgacgttactgcgattcacattccatcgattaatcttcacaaggcagatcttgttgttgatgtgctcatcaagaacccgaatccggtgccaatccctctgattgacatagattacttggttgacagtgatgaaaggaagctagtttctggattgataccagatgcgggtaccatcggtgcacatggagagcagactgtcaaaattcctgtcactttgatttatgatgacatcaagcaaacatatgctgatattaaacctggaagcatcattccttatagggtgaagagtagtctcattttt

SEQ ID NO: 46118 - DNA, 338 bp, Glycine max
  Clone ID: LIB3139-097-P1-N1-C9
gcttaatcgatcatgatgtcactacacttatacatcatgggagacgagaccctttacatggttgagagctctggaggcgtggtccagcaccgcggtttttgtctctttctcgaaacgtaactggatgtaaaatacaagccttatgcgcaggaagaggtcatcgtcgcggagtttcaataagtgactagtctcagtccaaggagcgatcaagctcatcctcttagataaagcttcaccgatctgacagcaggtctagctctgcaagcttgttttcatttattttcttcgattgcataaacatgagagctatctgacttgatcaccctgaaagggataac

SEQ ID NO: 46119 - DNA, 412 bp, Glycine max
  Clone ID: LIB3139-097-P1-N1-D1
attttcagacatagggatcttggatggagttttgatccagaaaagcattcagagtatcaatttgaatatgtggaagttctatctgattttgataaaaatgttggcgttaaagttgcttatcttagcaaactaaaagggtttgttagtctctttcagcgaactgtgctaaacagaattagcttcttttgtattttgcctaatgagctatataagttctctcatcacattccttcatataagatgacaggtgctgaaaggcaagatgttccaagaggatcttttgaacttgatcctgctggtctgcctaatagtctttttgaagtcggtgatcctggtgttgtgaacatggatggtgtcaattgttcgcaccacgaatactcgaagtgtaaagttgaagaggcaatgcctaatg

SEQ ID NO: 46120 - DNA, 414 bp, Glycine max
  Clone ID: LIB3139-097-P1-N1-D10
ggaggactagcagtttgcttgaagtatgctcagtctccagaatgtaaaaattatcaaaatcaggtggttgctaactgtagagctcttgctaagcgattaattgagcatggatataaactggtttctggtggtagtgacaatcacctggttcttgtcgatctaaggccatctggtcttgatggtgctcgggtggagaaaattcttgacttggcttctataaccctcaacaaaaattcagtgcctggtgataagagtgccctagttccaggaggcattcgcattggggcaccagcaatgacaacaagaggacttggtgagaaagaattttcactcattgctgatttcattcatgagggtgtgcaaataagtcttgaagccaaaagtttggtctcaggaacgaagctccaagatttt

SEQ ID NO: 46121 - DNA, 324 bp, Glycine max
  Clone ID: LIB3139-097-P1-N1-D11
tccaagtatgtttttacaatccttaggagctttagcctggcgcagtaatttttcatagctatatctaatgagcatctcattaaaaatgctattgcaaataactgtgagcggaaatccagaagggattccacattcaactctccaaacatctttcttacaaattgccatccttgaacaacaagccaacagcaggtgcgtcctttcacgcatcaatttttcatcaccaccacaaagactgtttatcatttctgccatcttgctcatagttatttgcaatagcatttttaatgagatgctcattagatatagcgatgaaaaattact

SEQ ID NO: 46122 - DNA, 391 bp, Glycine max
  Clone ID: LIB3139-097-P1-N1-D12
gcacaacactagtggctaacacttcaaacatgccagtggctgctcgtgaagcttcaatttatacaggaatcacattagctgagtattttagagatatgggttataatgtcagtatgatggcagattctacatctagatgggcagaagcattgcgtgaaatctctggacggctggcagaaatgcctgcagatagtggatatcctgcataccttgctgcacgtttagcctctttctatgaacgtgctgggaaggtaaaatgtctaggaggccctgaacgtacaggtagtgtaacaattagtggtgctgtttcgccacctggaggagatttctcagaccctgtgacatctgcaaccctcagcatagttcaggttttctgggggttggacaaaaa

SEQ ID NO: 46123 - DNA, 415 bp, Glycine max
  Clone ID: LIB3139-097-P1-N1-D2
ttttgacaaacctaagacgcgctgcttcactattctccctatggagtttaatcttgtggtccgtcagaagtttttaaattttgtgaggttcattatgaagaaaagggacaagcttagttgtcaagttggaatcaacccatactccatggaatggactggtttggccaataggttactgagtaagggcaacgatattctgtgttgcgattatgctagttttgatggtttgattaccaagcaagttatgagcatgatggcagaaatgataaacagtctttgtggtggtgatgaaaaattgatgcgtgaaaggacacacctgctgttggcttgttgttcaaggatggcaatttgtaagaaagatgtttggagagttgaatgtggaatcccttctggatttccgctcacagttatttgt

SEQ ID NO: 46124 - DNA, 403 bp, Glycine max
  Clone ID: LIB3139-097-P1-N1-D5
ggaataacaggttcttgaagactgctgcatatggacacttcggcagagaggaccctgacttcacatgggaagtggtcaagcccctcaagtgggagaaggcctatagccatctcgagccgctcgagccggtaaatagtaaatataaataccaacgctggagtgatggtagtttaaggcggtgttactccttctctcgttgattcggatctagagtcttttttcactcttcagttctcgttgttgttcttcgctttcctgaaactagggttttcaatttcgattcattcgttaataattaaagatgtttgggagggcaccgaagaagagcgataatacgaggtactacgaaatcctcggcgtctcgaagaacgcttcgcaagatgatctgaagaaggcttacaag

SEQ ID NO: 46125 - DNA, 414 bp, Glycine max
  Clone ID: LIB3139-097-P1-N1-D6
gctgtcttggtcagcatagccggggttgtgatgacaactctggggaaaacatgggctgcagatgacgcgatatcaagtgcttccaatggacaacgctctcttgttggagatctttttggccttctctctgccatgtcatatggtctatttacagtgcttctcaaaaaaatttctggtgaagaaggagaacgagttgatgtgcaaaagttgtttggatatgtaggattgtttacacttgtagcactatggtggcttatttggccattgtcagccttaggaattgaaccgaagtttacaattccccattcagccagagtggacgaagtggttcttgccaacggatttggcactttgtgttgtatggacaactccccttgtggccactttgggcatgtcacttaccattcctcttgc

SEQ ID NO: 46126 - DNA, 414 bp, Glycine max
  Clone ID: LIB3139-097-P1-N1-D7
gcaaaatagatcagcttaaccagggatgagatgacaactggaggggaaaacatgggctgcaaaatgaagcgatatcaaatgcttaccaaaggacaacgctatcttagaaggagatctttttggccattatatatggggtggcctatggtctatttacagtgcttctcaaaaaaatttctggtgaagaacgagaacgagtccatgtgcacatgttgttgggatatgttggattgtggacacttgtagcactatggtggctcatgtggacattgtcagcctttggaattgtaccgaagtttacaatcccgcattcaaacaggagtggacgaaggggctcttgccaacggattcggcactttgtgttgtgtggacaactccccccgtggccaatttgggaatgtcacttaccattcc

SEQ ID NO: 46127 - DNA, 412 bp, Glycine max
  Clone ID: LIB3139-097-P1-N1-D8
ggcttatcgaggaagataacgatgatgacgagaatgaagaagaaaaagaagaggaggtgccggagccgcctcagcttgcggaggacgctaaacctcttggccaacccgttagggtttcgggaaaaggaagaggcaggaagaggcaccatgattccttcgagttcgatggcatccaatatactctcgaggatcccgttcttcttgtacccgaggagaaaggccaaaagccttatgttgcaattattaaggacattacacagtctatcaatggcaacgtgaaagtgacggagcagtggttttaccgaccagaagaagctgagaaaaaaggtggtggaaactggcaatcgtgtgataccagaaagctgttttatagtttccaccgggacgatgttcctgcagaggctgctatgca

SEQ ID NO: 46128 - DNA, 242 bp, Glycine max
  Clone ID: LIB3139-097-P1-N1-D9
cctcgaccccggctcatggcgccccatcttcgagccccccgccggagatccccaacccctccccgaatccgacgccgcctaccactccgccgtccacaagctcatgtccggcgaccccgacctgatccaggacggcgccgccgagatcggcgccttggccgagaccgggcaccccgcgtctcaatcggggctagggtttttgtggggaatggggctttggccgaaagcctgaagggggaagg

SEQ ID NO: 46129 - DNA, 348 bp, Glycine max
  Clone ID: LIB3139-097-P1-N1-E1
attttcagacatagggatcttggatggagttttgatccagaaaagcattcagagtatcaatttgaatatgtggaagctctatctgattttgctaaaaatgttggcgttaaagttgcttatcttagcaaactaaaagggtttgctagtctctttcagcgaactgtgctaaacagaactagcttcttttggattttgcctaatgagctatataagctctctcatcacattccttcatataagatgacaggtgctgaaaggcatgatgttccaagaggatcttttgaacttgatcctgctggtctgcctaatcgtctttttgaagtcggtgatcctggtgttagaaacatg

SEQ ID NO: 46130 - DNA, 413 bp, Glycine max
  Clone ID: LIB3139-097-P1-N1-E12
cctcaaccccggcttatggcgccccatctctgagcccgccggcggagatccccaacccgtccccgactccgtcgccgcctaccactccgtcgtacacaagctcatgtccggcgaccccgacctgatccaggacggtgccggcgagatcggcgccgtaggcgaaaccgggcaccccgcgtctcaatcggggctagggcttttgtggggaatggggcttgtgagggagcgaagcaaggggaaggcctttcgagcccaccacttggccgcggacggaggcagcttgcaatcgacgatgatatgggcgtacagttacacgaggcaggacatgttcgacacctgagtccatctgtgtggcgagttagccgaagtggccgtgaacagctttctgatatcgaaggagtctcctgtgattg

SEQ ID NO: 46131 - DNA, 373 bp, Glycine max
  Clone ID: LIB3139-097-P1-N1-E2
cacaacttcattatgtttcgtgtaataatctggaaatgcaagaagcttatcttgtcaacctcgtaaatgtgttacgagaattgtatttgcacagtccagaggaagctcgccaattgagaaggaaagctctctctcgtattgaatggctgcaaaaagctgatgtgcctaccatagcacagattgaagagttccattcgatgcagaggatgatgaatgctcctgattcaaatgataatattgatttactgttgagcattgatttgttgggtttacaaggagcaggtaaagcttttccaaacaaaattgtttttgatgataagcttgtgttggctaacacacaagaattctttgatggaaattttccagtggattc

SEQ ID NO: 46132 - DNA, 113 bp, Glycine max
  Clone ID: LIB3139-097-P1-N1-E3
gctataattctgcatcgaacatgaatccgtttttggtaccccatcttagagaataatggggtttgatcagctcatgaaccgaattcttcaatacgatccaattttcatagatt

SEQ ID NO: 46133 - DNA, 417 bp, Glycine max
  Clone ID: LIB3139-097-P1-N1-E5
caatgactcagttgaaagcatctcctgcgtctgcgtgttcgttccttgccattgctccttcctttcatcatgcatcaataacaacagggcaccttctgcgccatcaattctccaaggcaaagcctttgtcactcaaagagctggggctaaaaacaagcgttggtgccaataaacttcaagttattaaagcagctgcacgcattgatacagaggtagtttctgaaaccacgaagggtggtggcctacgtggaaaattgaataaggtggtgctggcttatagtggtggcttagacacatcagtcattgttccatggctgaaagagaattatgagtgtggaagtgtttgcttcactgctgatgttggccaaggcataaaagaattgggatggttagaagcaaaagccaaagccagtgggg

SEQ ID NO: 46134 - DNA, 381 bp, Glycine max
  Clone ID: LIB3139-097-P1-N1-E6
agtttttaaatttagtgaggttcattatgaagaaaagggacaagcttagttgtcaagttggaatcaacccatactccatggaatggactggtttggccaataggttactgagtaagggcaacgatattctgagttgcgattatgctagttttgatggtttgattaccaagcaagttatgagcaagatggcagaaatgataaacagtctttgtggtggtgatgaaaaattgatgcgtgctacaacaactctgttggctgatgggtgtccatatttgtatgctatggcgcatgatagttcagtgtctacaataccaggtgattttgtcattggtgttaagttgacaaccataaacaatatgtgggcatatgggctcaatcctg

SEQ ID NO: 46135 - DNA, 411 bp, Glycine max
  Clone ID: LIB3139-097-P1-N1-E7
agatgctgaactcaacgcttgcctctagcaggacccagacagcaaagttgcctgcgatacatgcaccaaaaccaacttggtcatggtcttgggagaaattacgaccatagccaacgtggactacgtgaagattgtgcgtgacacctgcatgaacatcggcttcgtctcaaatagatgtgggactggatgccgacaactgctaggtagtcgtcaacattgagcagcagagccctgatattgctcatggagtacacggccaccttaccaaaaaacctgaagaaattggtgctggtgaccagggtcacatgtttggctatgccactgatgaaacccctgaattgatgccattgagccatgttcttgcaacaaaactcggcgctcgtctcaacgaggttcgcaagaacggtacct

SEQ ID NO: 46136 - DNA, 307 bp, Glycine max
  Clone ID: LIB3139-097-P1-N1-E8
gcgtgaatgcgtgttagtgtgttacccagaatcgaataatcgtctttgatcagttcatgaaccgaattcttcagtaggatccaattttcatagattttgctgaaaagatcaaattttgaagcaattgtttttgtgggcgacgttcattctttccgatccctcgaaaaatcaattttcggtcttgggatcaatcactaatggagaaggtgaagaacattctgaaaccgaagccaaatccgtaacaactatcgagggattgtgcaccagcaagctctgacaagggtgtggcaacatcgagcgccacatt

SEQ ID NO: 46137 - DNA, 396 bp, Glycine max
  Clone ID: LIB3139-097-P1-N1-E9
cctcgaccccggctcatggcgccccatcttcgagccccccgccggagatccccaacccctccccgaatccgacgccgcctaccactccgccgtccacaagctcatgtccggcgaccccgacctgatccaggacggcgccgccgagatcggcgccttggccgagaccgggcaccccgcgtctcaatcggtgctagggtttttgtggggaatggggcttttgagggagcgaagcaaggggaaggcctttctgtaccaccactttgccgcggagggtggcaacatgcaatcgaagatggcattggcatacagctacacgaggcaggacatgttcgacaaaggtgtgaatctgtatggcgaattagccggagtggccggggacagctttctgatattcga

SEQ ID NO: 46138 - DNA, 413 bp, Glycine max
  Clone ID: LIB3139-097-P1-N1-F1
ggaggattcctttgaggaagtttctttaagtgcagcacttaatggtgttgagggtttggactatatggaaagaattcctcttgccacatctgagggttttcctcatgtgctttcacgcaaaaatggtgaaaaaggcaaaagaagatttgtttctggggatggtgaagagatgacattgattccgggaaccagtgttgaagaggcttacaacaagctaatagttgaacttgagaaaagtgttcctacattggttggcattgaatgtcccaaggatgagaaacttcctcgtcgcaaaatttttgacaaacctaagacgcgctgcttcactattctccctatggagtttaatcttgtggtccgtcaaaagtttttaaattttgtgaggttcattatgaagaaaagggacaagctta

SEQ ID NO: 46139 - DNA, 381 bp, Glycine max
  Clone ID: LIB3139-097-P1-N1-F10
ccctgatgccagtagtgcgttattgtgatgttgacgaaaatgggggtcgacacttggccctttgtcgtgtcataatggggtacatggagattcttaggcctggcactgatcagtttcatcccaagagttgtgaatatgataatggggcggatgccattgaatgtccacacctctatgtggtgcggtataggaacatgaacaccgacatctatacggatttcgacgattgctctaaagcatggtatgacactgcaagtcattattgtggtagtgaaggtaacaatgtggaggtggactacacagcttgtgactgttactatggagagcatactgaactttttaatgatgttctgaacgtactagctcttagtgtggaccatg

SEQ ID NO: 46140 - DNA, 132 bp, Glycine max
  Clone ID: LIB3139-097-P1-N1-F11
agctgaccccggtttatggcgccttatgtttgagccaaccggcggagatccctaggcaagacgggaagtcgacgcggcctaccactccgtcgaccacaacctgaagttcggtgaccccgtcgctgatccagg

SEQ ID NO: 46141 - DNA, 414 bp, Glycine max
  Clone ID: LIB3139-097-P1-N1-F12
aacataaccatccctcttcttcctacccatttatgcacccacatccacacactatacatgcacacaacaacaacaacaacaataacaatttccacagcaatacaccttgttttgtcgaggagggtcctagccgcctgcttgtggggggagcattgcaagaggatgcaaggcttgcgttgtttaggcttgatagtggcgaggttcttcagtatcaagtgtttgttaaagcagacagggtttctccctttgaccttgcagctagttggagggcttatcaggataaattccgtccttcatctgtgagatggattccggatgtgagcataaattcagcacctcagaccggtggggagaaatagtgttctgtgggtttggaacttgatcttgagcattatgttgtcccaactcccgcaa

SEQ ID NO: 46142 - DNA, 379 bp, Glycine max
  Clone ID: LIB3139-097-P1-N1-F2
actagaaacagtgtgatgaaaatgaaggtccttgttttcttcggtgctacaattttggtagcatggcaatgccatgcgtacgatatgttccctctccgaatgaacactggctatggtgcccgtactccagaggagaaatgcgcaagttggatgcttgctttggaaacacacaacatttttggcttttagaccattcctgaagagtgcgttgaagccacaaaggaatacatccatggcgaacaatatagatcagactccaaaacaggttaccaacaagcttacttttatgccagaagacctgaagtccattccaaggacacatttgtgttcagtatagatggcaccgtactctctaatattccatactacaaaaaacatg

SEQ ID NO: 46143 - DNA, 413 bp, Glycine max
  Clone ID: LIB3139-097-P1-N1-F5
gttcccaggacttattgagttttaaatccacaaaatccttttgtgttgaataggtggatggggaaactgactttcccccagggcacttcccgaagtgttaagagaatgcctctttctatagggggaggagctggtgcaaagaatgctattctcatgaatatgccaaatgctgttctttcaatgtggagatattttgttggagatctcgtctttgaagtttctaagatgacttctccctacattaaatgtacagtctctttcttcatagcatttggaaatttggctgatgacaccatcaattttgaggcttttccccacaagctggtgcagtttggagagattcaggaaaaagttgtattgaaattttcacaagaggaatttcttacagcttggtcaactcatgtgcgtcctgc

SEQ ID NO: 46144 - DNA, 393 bp, Glycine max
  Clone ID: LIB3139-097-P1-N1-F6
ccctctaactggattggtcgagcggctcgagcgatatttggttggaatctgttgaggtgaaccaacaagatacagagcaaatatacagcttggggggtaaaatgatctaaaggaccattgctgtggcttgtggtcaaggatggcaatttgtaagaaagatgttgggagagttgaatgtgagaatcccttctggatttccggttacagttatttgcaatagcatttttaatgagatgctcattagatatagctatgaaaaattactgcgccaggctagaactccaagtatgtttttacaatccttcaaaaattttgtttctttgtgtgtgtatggtgatgataacttaattagtgttcatgaatatgtcaagccttactttagtggttctaaat

SEQ ID NO: 46145 - DNA, 391 bp, Glycine max
  Clone ID: LIB3139-097-P1-N1-F7
cgaagggagagatactttctggtgggataattcttgacaaacctatgacgcgctgcttcactattctacctatggagtttaatctgagtgagccgtcagaggggtgtaaattctgagaggtgcattgtgaagaaaagggacaagcttagttgtcaagtaggattcaacccatactccatggaatggactgggttggccaatagattactgagtaagggcaacgatattctgtgttgcgattatgctagatttgaaggctcgattaccatgcatgtgatgagctactgggcagaactgatactcagtgtttgtggtggcgatgcataattgatgcgtgtaatgtcacacctgctggtgacttgatgttcaaggatggcaatgtgtaagaaag

SEQ ID NO: 46146 - DNA, 146 bp, Glycine max
  Clone ID: LIB3139-097-P1-N1-F8
ggtctagagcgcgagcgtgcgctcttattattcttgtcttgagaggtaaccgccctcattggtcataggcctgagggtgaagtcaaggaacaaagtgtgtttctatttctcaattgcagagcggaagttgacaacgagacttttgc

SEQ ID NO: 46147 - DNA, 350 bp, Glycine max
  Clone ID: LIB3139-097-P1-N1-F9
gtttagggttagaacgggcacatatgggcatctttactgagttaggagttctgtacgctagataccgccctgagaagcttatggagcatatcaaactattctcaacccgcctcaatattcctaaactcataagagcttgtgatgaacaacagcattggaaagaattgacctatttgtatatacaatatgatgagtttgataatgctgcaactaccatcatgaaccattcacctgaagcatgggatcacatgcaattcaaagatgttgttgttaaagttgccaatgggggagtgtactacatggctggtcacttctacttggaagagcatccaaatcttatcaatgatggt

SEQ ID NO: 46148 - DNA, 416 bp, Glycine max
  Clone ID: LIB3139-097-P1-N1-G10
ctcttcttcaattcatatcatatcaattagatttagagctaaacataaaattgttttcacataccatggacaacaacaatgacttttggaaattcagtgaccagttgaggcttgaatctggtttggccaatctgtctctgaatgattattccatttggagcaacagctacagctccaagaggcctgatcagaggaggaactttgatgtcaagggcagtgatttcaacaacatcaacaactcatcaaaggcttttgatgatgatttcaatgatgggtggaagatcaccaattccaatggaccccttttctctatgcctcacaacaacaacaacaacactcttgaagttggaggcttcaacaagggaggaggaatctattccaacaccaacaccaccatttcctactaccatcctaat

SEQ ID NO: 46149 - DNA, 414 bp, Glycine max
  Clone ID: LIB3139-097-P1-N1-G11
ctgcactgagtgctgctttgaatacacaatttctctttcaaattggtatcttcactgctgtgccaatgatcttgggcttcattcttgagcaaggtttcttgaaggccattgtcagttttgtcacaatgcaattccagctttgcactgtctttatcacattttccttgggtacaagaacacattattttggtcggacaattcttcatggtggtgcaaggtatcaagcaactggccgcgggtctgttgctcgccatatcaaattttcagagaactacagactctactctcgtagtcattttgttaaagggttagagggtgcgctcctggtgatagtatatcttgcttatggctataatgaagggggtgcactctcatatattctttcgagtgtaagcaagcggttcatggctctat

SEQ ID NO: 46150 - DNA, 416 bp, Glycine max
  Clone ID: LIB3139-097-P1-N1-G12
atctcctggaaggtactggtgattgctggaagcaaggacactgttggacagtacgaatctcacacagccttcacccttcctggactctaccgcgttgtgcatggtattgatgtctttgatccaaaattcaacattgtctcccctggagctgatcaaaccatttacttcccccacactgaaaccagccgtaggttgacatccttccaccctgaaatcgaagaactcctttacagctcagtggagaatgaagaacacatatgtgtgctgaaggaccgcagcaagccaattatcttcaccatggcaaggttggatcgagtgaagaacatcacaggacttgtggagtggtacggtaagaacgcgaagctgagggagctggtgaaccctgtggttgttgctggagacaggaggaaggagtc

SEQ ID NO: 46151 - DNA, 414 bp, Glycine max
  Clone ID: LIB3139-097-P1-N1-G2
cgtcaagaacctccagcgcctcgccgagatcgccgtcgcggccctcgaacaaacccccctcggtgacggccaggtccgccgcgccaagaaggcgctctccgccctcgtagccgccatgctgaacgacgacagcaacgccgccgccaagggaaccgaacgcacccgctccttcgggcgccgcgccggaaacaccaacaccactaaatacaagtcgctgtcgtggagcatggccaagaactggtccgcggcgaagcaaatccacgcgatgatgtcgaatctgacggcgccacgtggcgcggagtcctcgggattggcgcaacccatgtacatgatgagcaccgtgttggtgttcgagatgtggactctggttgcggcgttccttgccaggaaaggaatgggctagggacccatttt

SEQ ID NO: 46152 - DNA, 417 bp, Glycine max
  Clone ID: LIB3139-097-P1-N1-G5
ctcattctgtgactctgtgcttagttaacgttaacagtgacttaagatggcggattctgcagatgtcacccacgatgttgtgtccctcctctcttctcctcaaagggactttcttcttcgaaacaacggcgatcaggttaaaattgacagcttgaagggtaagaaacttggtttgtatttttcggcatcctggtgtggtccatgtcaaacatttacgccaactttggtggatgtgtacaatgaggttgcaaaaaaaggtgacttccagatcgttttcattacggctgatgaagatgatgagtcctttaacggttacttttccaagatgccatggcttgcaatcccattttctgattcagacacacgcagccgccttgatgaattgtttcatgtgagggggattccccatcttgcatt

SEQ ID NO: 46153 - DNA, 404 bp, Glycine max
  Clone ID: LIB3139-097-P1-N1-G6
cagtttcatttccaaatagcattccttcagcaggagagagaatctataagctttttgctcatagcctcacaagcacattgcttcatctttttcccactgttagttggtttgtattgatttctgggtcagtgtagctttttttttttttttccttttagcacgagtttggtcaagtttccagtgaatttgttaggtgtgtggggggtatagagattatcgagctgccatggatctggacagtgctgctgcttttgagggctacttggtcctcgtgaagatcaaagctgctgaagatatggagtgcgtgaaccatcactctgacagaatgccatacatgacactcccattgtctgattcacacacacgcaagcagctggttgaatctttgcatgtgagggggattc

SEQ ID NO: 46154 - DNA, 324 bp, Glycine max
  Clone ID: LIB3139-097-P1-N1-G7
acctgacagcctcaaagtgcaatggtttcagagaagaaactttcgatccccatgagggtgataaacgtgcagaagctcggcctcaatatctctgttggcgagagtggagatcgtctcaccagagccgccaaggtgctggaacaacttattggccataccccaaggttttccaaagcacggtacactgttcgtgcctttgggattagaagaaatgagaagattgcatgctatgtcactgtcagaggtgacaaggcaatgcaacttttggagagcggtttgaaggtgaaggaatatgaacttcttagaaggaacttcagtgatact

SEQ ID NO: 46155 - DNA, 398 bp, Glycine max
  Clone ID: LIB3139-097-P1-N1-G9
tctcacgctatcatccaatgaccaatcacaattctctgtgaactttctagaatctcgttcttcctttgccttctccttcttcttcaaccctttttctttctctttctttcgcactttcattctctaaaaaaatctaagtccctttggtcttcatcttctgttctgatccaggtatggcttctaaacgcatcttgaaggagctcaaggatttgcagaaggatcctcctacctcatgcagtgcaagccctgtggctgaggacatgtttcactggcaagccacaatcatgggacctgctgatagcccatatgcaggtggtgttttcctagtttcaattcattttcctcctgactatcccttcaagccaccaaaggttgcttttcggactaaggtgttccac

SEQ ID NO: 46156 - DNA, 213 bp, Glycine max
  Clone ID: LIB3139-097-P1-N1-H1
ggctccaggcaagcaagatgtgggaatgcacttacgcgaggtagaatggtccatggagatctgaatgcacagagctgggggttcctgcagcccgagggcgccatttttactagggatgaggaggtgccaacttatgcacaccctggtggttgctaccggaccgggacctgccaacacggcggctacctagattgcggtgcttggggaggaacg

SEQ ID NO: 46157 - DNA, 381 bp, Glycine max
  Clone ID: LIB3139-097-P1-N1-H10
gttgcatagaagtatttaatttataagcagagcttacaaaatatttgaagtgcaatcaagttaagtctaatgctatgaggagtttgtgaacatgttactgaacttcagttccatcatgtttaatctttttccattcagtttaagactaacatacaaattaattttagttaatcttctatttagcccgtttgcttatatataaacacaattgtctccacatcgttggagttttgatctattattgcatctactggatattcaattctgaccaaatctataacaatttctatcacttggagggtggggggcttggtggaggagaaagggtttccggaatggctgcacattccccaactttgggatattaaaacgtgggggggt

SEQ ID NO: 46158 - DNA, 417 bp, Glycine max
  Clone ID: LIB3139-097-P1-N1-H11
attttctcaattacaacatcgtattctgcaaattcaaaccgggtcttggttttctgaaagatgggaggtggcaaggacaagcatcatgatgaatctgacaaaggaattttttcacaccttgctcatggggtagctggtgcagcacatggtggacatgggtacccacctggggcttacccaccaccacctggggcataccctccacaacaaggatatcctccagctgggtatcctccacaacaagggtatcctccagctgggtaccctccacatcaaggctatcctcctgctggttaccccccagctggttatcctggttcatcacatgcaccaggttctcatgggcacggcggtatgggagcaatgctcgctgggggtgctgctgcggctgctgctgcttatggtgctcaccatgtc

SEQ ID NO: 46159 - DNA, 417 bp, Glycine max
  Clone ID: LIB3139-097-P1-N1-H12
ccattaagtgctgcacttaatggtgttgagggtttggactatatggaaagaattcctcttgccacatctgagggttttcctcatgtgctttcacgcaaaaatggcgaaaaaggcaaaaggagatttgtctctggggatggtgaagagatgacattgattccaggaaccagtgttgaagaggcttacaacaagctaatagttgaacttgagaaaagtgttcctacattggttggcattgaatgtcccaaggatgagaaacttcctcgtcgcaaaatttttgacaaacctaagacgcgctgcttcactattctccctatggagtttaatcttgaggtccgtcaaaagtttttaaattttgtgaggttcattatgaagaaaagggacaagcttagttgtcaagttggaatcaacccatac

SEQ ID NO: 46160 - DNA, 418 bp, Glycine max
  Clone ID: LIB3139-097-P1-N1-H7
gataaaatcagcagaatagaagtaaaaagaaactagatacagagtgaataagaaagaaaacaggcacaagaaataaaaagtagctgagaaaaaataagacgtagagacaatagaaagaaatgaaatgaggtgaagacactgggaattagacacaaatgagtgataaatatcttgaaaagagggtgtaaaggaaagtacggtaagtatcacataaagcaaacgagcaacaaaataaataattaaagataaaaatttttaaccggaattgaataaaagacattaaacaaatagaagaaaaaagacaagaagtgtttaaaactgacgtcaaacgaaaaagatgaacaaggaaaaggtaataaagaaaataaaagggagaagtaaaaatataaaaaagaaatttctaaaaaattaaggatta

SEQ ID NO: 46161 - DNA, 413 bp, Glycine max
  unsure at all n locations
  Clone ID: LIB3139-097-P1-N1-H8
aaacactccttcaaaatcatatcaccggagaagagtttctaatggttctttattataccttgtatttgtcttatgacccatatgattagtttttccagcgtggcgccgngacattgcattgagatgaggtgaagactctgggagttagacacatatgagtgataaatatctcgcaaagagggtgtaaaggaaagtacggtaagtatcacataaagcaaacgagcaacaaaataaataattaaagataaaaagttttaaccggaattgaataaaagacattaaacacatagaagaaacaagacaagacgtgcctaaaactgacgtcaaacgaaaaagatgaacatggaaacgtcaataaagaaaataaaaggaagaagtaaaaatttaaaaaagaattttctaaaaaattaaga

SEQ ID NO: 46162 - DNA, 413 bp, Glycine max
  Clone ID: LIB3139-097-P1-N1-H9
ctcgagccgcacttctgagctctaggacgagatccctctctctcccattccagatctcgccatcagattcaccctgtcattttaagcaaagtcataacttgaagaaggttcatggctgctccaccggcaagggctcgtgccgattacgattatctcataaagcttctcttgatcggtgacagcggtgttggaaaaagttgcctcctcctgcgtttctccgatgggtctttcaccactagtttcatcacaactataggcattgattttaagataagaaccattgagcttgatggaaaacggatcaagctccaaatttgggatactgcggggcaggagcggcttcggacaattacaactgcttactatcgcggtgctatgggcatattgctagtctatgatgttacagatgaagc

SEQ ID NO: 46163 - DNA, 116 bp, Glycine max
  Clone ID: LIB3139-098-P1-N1-A1
tctttgtgtctcttatagttgctgttttttgagggtgctgcgtactctcaaagggtggcgatttttaggctcccagaggttttgggtgtgaaaggtgtgttttaatgggccctatt

SEQ ID NO: 46164 - DNA, 380 bp, Glycine max
  Clone ID: LIB3139-098-P1-N1-A10
atttcaggttctcgtcttttgggcaccattcctcagtctatttcacagcaaactgtttggaatcaaatggcaacagtgagaacaccattgaattttgattctagcaagcagagcttttgtcaattttctattgaccttctcggtggaggaattttagtggacaaaactggagattggatcacacttatacaaaattctccaattagtaacttgttgagagttgctgcttggaagaaaggctgtttaatggttaagattgtgatgtctgggaatgcagcagtcaaaaggagtgattgggcctcattggtacaagtgtttttaacaaacagcaacagtacagagcattttgatgcatgtaagtggacaaaatcggaaccaca

SEQ ID NO: 46165 - DNA, 381 bp, Glycine max
  unsure at all n locations
  Clone ID: LIB3139-098-P1-N1-A11
caaagccgatacttccttttcaagtcttttctctctctctctctcgataataagattcttccctctcccttctctctctctctctagaacttcgtcctccctctgcttctttctttcttagttgcagcgcgattgctgcatcgtcctccaataagagctcgctgctagtgaaccctaacacggcggcaacgagaggtgttcggttgaagctcagatcagcgatggcagcagcaacccgcacttctctgcggttcctcctctcagtctgcgtaaccctaactctcgctcacctcgccgnctcaaattccgaaggcgacgctctctacacgctgaaacggagcctctcggaccctgacaacgttctccagagctgggatccca

SEQ ID NO: 46166 - DNA, 302 bp, Glycine max
  Clone ID: LIB3139-098-P1-N1-A12
gattatcctaagtctttgggaatagtgctgcaatggcttcaagtcaggaggaggtgacccttttgggagctactggaagcccatttgtgtgcagggttcatattgccctcaagttgaagggagttcaatacatatatgtctaataaaatttgaggaacaagagtgaactgcttctcaaatccaacccagttcacaagaaggttccagtgtctattcacaatgtgatgcccatatcagagtcttttgttattgttgaatacattgttttgacattgattaacttcctcttttctctttctttt

SEQ ID NO: 46167 - DNA, 390 bp, Glycine max
  Clone ID: LIB3139-098-P1-N1-A2
gtcgcccatcgtcgatgtcgacagcgccctcgataacatcgacaccattcgcatccccgaaccccacggtacatacttacaaacacgcggagctcgcgcagctcgtcgaatatacaaagctatgggtgtctggccatgggacatcgttcccgaagcacctcctaagatgtgggccatcaatctgctagaggatctcgcccttgtcgcagaccatgttggcagaaatccaggcgatacactgcaagaccttcaatcagagctttggaagtctcttgcgcgcgaccgcaaaccttcttatgctggaaaattgatggcgcaagatgtccacgctgcaaagaagcgattcgttcgaacaatgcctcaatcacccgatgctcaagacgacactgg

SEQ ID NO: 46168 - DNA, 388 bp, Glycine max
  Clone ID: LIB3139-098-P1-N1-A3
ggtatttttaggttattggctacaatgcccttaggtataaaaataccatagtatactaaagcaagtgtttcgacgtcgtttcatcaaagtccaatactcgagctttcctagggccggtatttggaagtgtcaccgtccgtctttttatttttcttcttgtagtggtttctagcgttttgtatatatagcaaagtccaacagaactggaaaaggctgaagaagtagaaataagacacctgtgaaatagttgatggtgcagtgatcaaaagaatggcgtgtagcaaaataagcaaggctctttttcaaccttagttaaggtgatgatatttggtaaggacttataggggttggtttctaaggtaaattattatacctaagttttggggta

SEQ ID NO: 46169 - DNA, 209 bp, Glycine max
  Clone ID: LIB3139-098-P1-N1-A4
ggtatttttaggttattggcttcaatgcccttaggtataaaaataccatgggatactaaagcaagtgtttcgacgctctttcattaaagtccaatactcgagctttcctagggccggattttggaagtgtcaccgtccgtctatttattgatctatcttgtagtggcatctagcgtgatgaacttaaagagaagctggctaggatgtat

SEQ ID NO: 46170 - DNA, 382 bp, Glycine max
  Clone ID: LIB3139-098-P1-N1-A5
cttcggtcagaaacatgaatttggaaacgcaaccaggaacggcgtcgtattggtgctacagctgcacccgtttcgtgcacctctctgtccaaagcaccatcgcctgcccccactgtcaaagcggtttcgtcgaagagatccgtgccggcgccggagccgaagcctcgccacgccatcgactaagtcctttccccgatgatcctcttttgctccggcgacagggcttccgccgccgtaggagagaagcttccggcaaccgctccccgttcaaccccgttatcgtcctccgcggccccggcgacgactccgccgccgtcgaccacgacggcgtcagcacgttcgagctcttctacgacgacggcgacggcaccggcctccgccc

SEQ ID NO: 46171 - DNA, 247 bp, Glycine max
  Clone ID: LIB3139-098-P1-N1-A6
ctcgagccgattcggctcgaggtattttggtgtcatgcacgtggaaggcaaagacaaagcgcaaaggtttatgaagaatattagggagttcatgaatttgatggggactttcacggtggcagatggggttccttgtttgaggtggttggatttggggggtcatgagaaggctatgaaggcaaacgcttaggaagttgataaattattgagtgagtggttggaggttcaccgtcagatgaagcttttt

SEQ ID NO: 46172 - DNA, 376 bp, Glycine max
  Clone ID: LIB3139-098-P1-N1-A7
ccattgttggaatctggtttgcaaaaagacagagggttaattgtggagtattttggaaggatgtcttacgttgctcataacgttaatcagccccaagagaaagatttgttagagggaaatttttcctttgatattaaatctcgctctagattggaaaaagtttcctctacaaaagcacaatttgttagtggaaaaaccttcaaatatgatataattggtgctggttcacattcttcaagagattttcctgaaaagggagatcaagaaaaaccccaaaagattgattccagattgagacaaagaattgatcctcaatacaatgaggttcaagctcaaatggaaacaaatttgtttaaattgtctcttgatgatggtg

SEQ ID NO: 46173 - DNA, 381 bp, Glycine max
  Clone ID: LIB3139-098-P1-N1-A8
ctcgagccgattcggctcgaggagcaatgtcactacatactttcacccaatgttactcagttcttattcttactaaatttccttatcaacactgaaaaagatgtgaacatactagttgataagaaaattatagtcaattggatgggtgatgctaatgctgtagttaaaatgtttaacagtctttgctcaaatgttatagtgtcatacatgagtgaagagtattgtactctctaccatgatttgattaaattccatgaaaaccctcgcaacaagtacaaggctatcttttatcatgagtacttcaacactccatggaaaaaagcatctacaactgctgcagttctactacttttgtttactttaattcaagctatatgttca

SEQ ID NO: 46174 - DNA, 373 bp, Glycine max
  Clone ID: LIB3139-098-P1-N1-A9
gattagtgtaagttccaaattacgacagcgagatagagtttcttacggacgacgacgtatccattgagatctcgacggtggctttcgatccgccaccgtccgatctcctcctccgtaactgacgacggtgtttcgatatcttacatctctctctagccacagttcttcctggtctaaaggagtagtggagagatatggaagtcaacaattggcataaggagcttacatatgatgagtgggtaccgatcactgtatctggtgcacgtccagctgctcgctacaagcatgctacagcagtagttgatgaaaaattatacattgctggtgggagtcgtaatggtcgatacttatctgatgttcaggtttttgattt

SEQ ID NO: 46175 - DNA, 183 bp, Glycine max
  Clone ID: LIB3139-098-P1-N1-B1
cataccaatcctgaaaatgcagttcgtagtatttttgttgcgcctttcagaggcggaaggcccattcgggtggttacatttccgaataccattgtgcagattgaaccagacatgaattcaagggttcagcttttgagtaccactaccaatggtgattttgttcaaaggaaagatctcgcaatg

SEQ ID NO: 46176 - DNA, 384 bp, Glycine max
  Clone ID: LIB3139-098-P1-N1-B10
agctactgcaatgcatgtgggagctatagaaattatcattgatagtttcgcaagtcctgactgcaacatagttggtgcaatgcttttggttgatacttatcataccaatcctgaaaatgcagttcgtagtatttttgttgcgcctttcagaggcggaagggcccattcgggtggttacatttccgaataccattgtgcagattgaaccagacatgaattcaaggtttcagcttttgagtaccactaccaatggtgattttgttcaagggaaagatctcgcaatggttaaagttaatgtagcatgtgctgctgttggcttgacatcaagttacactccaactccattgttggaatctggtttgcaaaaagacagagggttaattg

SEQ ID NO: 46177 - DNA, 376 bp, Glycine max
  Clone ID: LIB3139-098-P1-N1-B12
aatagatcctcaatacaatgaggttcaggctcagatggaaacaaatttgtttaaattgtctcttgatgatgttgaaactcctaaaggttctatgttggatcttaaaatttctcaatctaaaattgcacttcccaagaacacagttggaggaaccattctgcgtagtgatctattggcaaattttttgacagagggcaattttagagcaagtgttgatttgcagcgcactcatcgtattaaaggaatgattaaaatggtggccacagttggtattcctgagaatacaggtatagcattggcctgtgctatgaatagttcttttagggggcgcgccagttctgatatttacaccatctgctctcaagactgtgaatta

SEQ ID NO: 46178 - DNA, 349 bp, Glycine max
  Clone ID: LIB3139-098-P1-N1-B2
aacaaatattattattcaatagaaaagaaagatgagtccaacatgggtttttgtgttaggtgttgcagcaatgttggtggttgtgagtggacaatcatcagtgaagcctttggtgaagacagtgaaagggaagaaggtgtgtgacaaagggtgggagtgcaaaggttggtctgcatattgctgcaatgagactatctccgactacttccagacataccagtttgagaacctcttcgcgaagcgcaattcgtcggttgcacattctgttggtttctgggactaccggtctttcattaacgcttctttactgtaccaagcttacgggtttggcaccactgggggaaagacc

SEQ ID NO: 46179 - DNA, 387 bp, Glycine max
  Clone ID: LIB3139-098-P1-N1-B3
ggttagaacacaaggtttcattgcccattgggtcctgcaagttggccttgcctctctgggaacaagttgtcgacgaggtgtacgaattatccaagattgagaaaagcgttgaaagcagaaggagaataaaacgcgaagcgtacgcaacagtgctgcattcttcggaagcgtacgtttgcggcgcaataacactagcgcaaagcctgctccaaacaggtaccaaacgcgaccttatcctcctgatagacaagttcatctcggttcgtaaacgcgaggccctatccgaagcgggttggaagatccgaatcatcacccggatccgaaacccgaaggccgagaaaggaagctacaacgaatacaactacagcaagttcaggctatggcagc

SEQ ID NO: 46180 - DNA, 271 bp, Glycine max
  Clone ID: LIB3139-098-P1-N1-B4
cttcacatgaggctgactcaaacgacggatctggattcgagttgaaaacatgcgcatgcgatgaagcgttgagtttgcttcataatcttcatttatccgaacaagggttgatgactctcttaagcttcagaaacggtgagttcattgagtgttttacaagagtgatgcaaatggggttctttgaatcacgcgcttatgctgaggtcttggtaaaacttatttacgcaggggctagaccaattgcaaccattgcatctagagacaagaactt

SEQ ID NO: 46181 - DNA, 387 bp, Glycine max
  Clone ID: LIB3139-098-P1-N1-B5
ctcgcatcgttcgtcttctgtctgtggatttcaaactctgccatttcgattccttcgttcatcgttattttgcttgactattgtagaggctgcagcctggatgattggtgggctttaagcttgtgaaagaataattactggatggaacttgcaagacctgcctcaagtagaagaaaattgaaagatttattgcatcagagtggtaatcgtctttgtgctgattgtaatgctccagatcctaaatgggcgtctgccaacattgggagtttttatatgcttaaaatgttgcggtgtgcacagaagccttggtactcatatatcaaaggtgttgtctgtgacattggatgattggtcagaggatgaaatagatgcaatgatcgaagttgg

SEQ ID NO: 46182 - DNA, 387 bp, Glycine max
  Clone ID: LIB3139-098-P1-N1-B6
gtttgaagcctcttgtgccaaggctgtctcaacttctcggaattgaggttacgatggcaaatgactctattggggaggaagttgagaagttggttgcacaacttccagaaggtggtgttttgcttctagagaatgtgaggttctataaggaggaagagaagaatgaccctgagtttgcaaagaagttggcttctcttgctgatctctacgtgaatgatgctttcggcactgcccacagagctcatgcttctacagaaggagtggccaaatacttgaagccctctgttgcaggattccttatgcagaaggaacttgactatctagttggagctgtgtcaaaccccaagagaccatttgctgctatcgttggtgggtcaaaggtgtctt

SEQ ID NO: 46183 - DNA, 382 bp, Glycine max
  Clone ID: LIB3139-098-P1-N1-B8
gtccttttaattttgaggcagcaaagacaagggggggtcttcccacactgcacctcaatccatacagctggtcaaaggtttccagtgttatatatttggattctcctgctggtgtggggttttcatactcagagaataaaactgattacataactggagacataaagactgccactgattctcatgcctttctccttaagtggtttgaactataccccgagttcctttccaacccgttcttcattgctggagagtcatatgcaggagtttatgtgcctactctcgcttctgaagtagtgaaaggaattgatgccggggtggagcccaaactgaatttcaagggttacatggttggaaatggtgtcacagatgaacaaattga

SEQ ID NO: 46184 - DNA, 382 bp, Glycine max
  Clone ID: LIB3139-098-P1-N1-B9
tgggacccgaatacgaagtcgacgctgacacagatccctctgctggggacgaaggctggtccacgagacggggcggcatggacgcagaggctgaaggaagagtacaaggctctgatagcgtacacgcaaatgaacaagtccaacgacaacgattggttccgcatctccgccgccaatccggaaggcactcgctggaccggtaaatgctggtacgtctacaacctcctcaagtacgaattcgacctccaattcgatgtccccgtcacttacccttccaccgcccccgaactcgaactccctcaattggatggcaaaacccaaaagatgtataggggtgggaagatctgcttgactgggcacttcaagcctctctgggccaaaa

SEQ ID NO: 46185 - DNA, 385 bp, Glycine max
  Clone ID: LIB3139-098-P1-N1-C1
ttagcattcacaaagagagcaccatcatccaaagaacgtcaagattctccacattcaaaaccattagattcatgggttttctaactctcactaattacttgatttttttgctcatattttccagcttctatatgggtgtaatctctgtgaatgataccatcacatcaaccagattcatcagggaccctgagactataatctcaagcaacggtgacttcaagctaggattcttcagccctgaaaaatccacacatcgctatgtagctatctggtatctcgctgaaacctacatcatatggatagccaatagagaccaaccacttagtgatttatctgggcctggggtgttcaaaattcacaaggatgggaatcttgtggtattgaa

SEQ ID NO: 46186 - DNA, 386 bp, Glycine max
  Clone ID: LIB3139-098-P1-N1-C10
cccaaattcaccagcaaattctgaagctgctcggatgttcagtgaaaacaagcgtgaatacaacagaagagtacgtgagattgttgagcagagttggactgctgactaatcatcatagataagatagggcttctgtgacaatcaaaaggttgtcaaaaggatatatgattgaataaccagcagacttcaaaaagaaccattatgattttctagtccttgacactgtgcttgctcaaactctatgagttaatgttccaccttattttctccatgttgtgtggttcaaaaaaaaaaaaaaaaaaaattaaaataaaaaaagagaaaataaaaaaatataaaaaatattataaaaaattaacttaaaatttttaaaaaaaaatataaat

SEQ ID NO: 46187 - DNA, 362 bp, Glycine max
  Clone ID: LIB3139-098-P1-N1-C11
gctggaagcaaaggaagactgggatatgcttcattgataccatatgttgagcaagtgtgccagcttaaaaggcctgaagtttacttggactttttcctgtggaggttgatagtcaagaaggagttgctcacattggtgaattgaaatctggtgtctatgttccactgcctacaaaaactaatttgatggaaactcccaaggaatggcaactggatctaccttgtgacaaaattcctagtgtcttgactacaactgatgagagattggtaggcacagaacatgagggatatgatccttttcttggtggaattcaaaaatatgccactcccatgatgcccctagatgaagaaattctttctaag

SEQ ID NO: 46188 - DNA, 346 bp, Glycine max
  Clone ID: LIB3139-098-P1-N1-C12
atgaattctaacttcttttatgcagtagatcttggtgaagatcaacgtctgaaaaatcttttatggattgacgctaaaagtaggaatgactatatcaacttttgtgatgtagtgtcgtttgataccgcctatgttagaaacaaatataagatgccgcttgcactttttgttggagtgaaccagcactaccaatttacattacttggatgtgccctgatatcagatgaaagtgctgccactttttcttggctatttcggacgtggctgaaaagagtttgtggtcaagttccaaaagtgatcattactgaccatgacaagacattgaagtcagttatttcagatatct

SEQ ID NO: 46189 - DNA, 196 bp, Glycine max
  Clone ID: LIB3139-098-P1-N1-C2
ataccgcgaaacccaaccgctgaccgtcgctccggcaatgtggccggaactccaataatctccgtcgtcccacttctacccccgacaatgcctcacgccaaaacctcccaatcgcagcagaacataaagcagagggttctcacgtgcctaacgaagctctcaaaccgcgacacacaagccgcgggagccaccgagc

SEQ ID NO: 46190 - DNA, 386 bp, Glycine max
  Clone ID: LIB3139-098-P1-N1-C3
caaagccgatacttccttttcaagtcttttctctctctctctctctataataagattcttccctctcccttctctctctctctctagaacttcgtcctccctctgcttctttctttcttagttgcagcgcgattgctgcatcgtcctccaataagagctcgctgctagtgaaccctaacacggcggcaacgagaggtgttcggttgaagctcagatcagcgatggcagcagcaacccgcacttctctgcggttcctcctctcagtctccgtaaccctaactctcgctcacctcgccgcctcaaattccgaaggcgacgctctctacacgctgaaacggagcctctcggaccctgacaacgttctccagagctgggatcccactctc

SEQ ID NO: 46191 - DNA, 377 bp, Glycine max
  Clone ID: LIB3139-098-P1-N1-C4
gtcacaacttcattatgtttcgtgtaataatctggaaatgcaagaagcttatcttgtcaacctcgtaaatgtgttacgagaattgtatttgcacagtccagaggaagctcgccaattgagaaggaaagctctctctcgtattgaatggctgcaaaaagctgatgtgcctaccatagcacagattgaagagttccattcgatgccgaggatgatgaatgctcctgattcaaatgataatattgatttactgttgagcattgatttgttgggtttacaaggagcaggtaaagcttttccaaacaaaattgtttttgatgataaagcttgtgttggctaacacacaagaattctttgatggaaattttccagtggattct

SEQ ID NO: 46192 - DNA, 384 bp, Glycine max
  Clone ID: LIB3139-098-P1-N1-C5
ccttcctatttctcaatcgaacaacacagcacaatccttaaactctctctctctctctctctctcttcaatttcgttgatggcgtcacaagcaagcctcctccttcagaagcagctcaaagatctttgcaagaaccccgtcgatggcttttccgccggtttggtcgacgaaaccaacatttttgaatggagtgtgactataattggacctcccgatactctttatgaggggggatttttcaatgccattatgagctttccacccaactacccaaatagtccaccatcagtgaaatttacctcagagttatggcatcccaatgtgtatcctgatgggcgagtttgcatatcaattcttcatcctcctggtgacgacccaaatggt

SEQ ID NO: 46193 - DNA, 237 bp, Glycine max
  Clone ID: LIB3139-098-P1-N1-C6
aacacgagaaaaatcttgctttgacagaagaggaaaagatggaagtgattagaaattgaggccttcccgctggtggtcttgccaagcgagcttcatgatttggaaaaccatgtggctcatgaaggcctaagggatcaaattcctgctgttgacaggtggtattctactaaggttaataggtttgcaaaaattatgaaccttagacaaagtgttgttggtgatcttaaacttcttact

SEQ ID NO: 46194 - DNA, 338 bp, Glycine max
  Clone ID: LIB3139-098-P1-N1-C7
ctcgagccgaatcggctcgagcggctcgagcaaccttctttctttttctgtgagcctttctttcaggttcttaacttgatcagtgtgcagtgtccaaatcataagggtagttgcaaattgcaatggctaagcatgatgttgagggtggttccttctctgcaaaggactaccatgatcctcctccagcaccgttgattgatgctgaggaactcacacagtggtccttctacagggctttgattgctgagttcattgccacaatgctcttcctttacatcacagtgctcactgtgattggttacaagagccagagtgatgtaaaggcctgggggtgatgt

SEQ ID NO: 46195 - DNA, 348 bp, Glycine max
  Clone ID: LIB3139-098-P1-N1-C8
ctgaaaatggatcttgccaacatagggatggcgacctaataagggctttgaaatgtgcaggcctgagcgcgcaaatcaaactccatggcataccgaattaacttattgacaattccaatcagtctacagccccagatattctactgggaatctgtctacatcttgcaaatgctggtattactcctatgccagattgttgtggtacacacgctactgccagatctcatgaaaatgctggatcctctggaagatcccgaatgcgcggtctcttcacctagctcatgacgcgcaatccaatacaccaaagtacacgtgaccctgccgatgacgatgccctgcccattcgca

SEQ ID NO: 46196 - DNA, 383 bp, Glycine max
  Clone ID: LIB3139-098-P1-N1-C9
ctccaagaggtggcaatgttgggaagcctcttattggtttagacactcaaactaacaccaccatcaaagaggttggtgcagttcctcaatcagccaaaccggttcaggaaaacaatgatcagtttgctgcaacaaatgcccatgcaattgctcctgctgctaaggcacaagttgtgggatggccaccaattcgatctttccgaaagaacacgatggcctctaatttgacaaagaacaatgatgaagctgagggaaaatcaggatttggttgtctctatgtgaaagtcagtatggatggtgccccttatcttagaaaggttgatctcaaaacctataacaactatatggaactttcctcagctcttgagaagatgttcagctgc

SEQ ID NO: 46197 - DNA, 338 bp, Glycine max
  Clone ID: LIB3139-098-P1-N1-D1
ggctccttttatagtctccatgtatgtgccaacttattgtttcatggatacaactctgtaatattttgttacctgtcacatagacgggtatgtagggtcgccaattgctttattggtaatttttggtgagggatgatataaaaaattttgttttttttacatcctttttcaggcattatttttgggttgagagtatagtccatgagtattgatgaaggcatcagttttgggttatacaaagcttttttaagggtccctttcttcgcaggttgttaaacaattatgttcattcattttttataaattttgggggaagcaaaaaaaataataaaataagg

SEQ ID NO: 46198 - DNA, 382 bp, Glycine max
  Clone ID: LIB3139-098-P1-N1-D10
caattcacaaaaattggtaaccaagaatccactggaaaatttccatcaaagaattcttgtgtgttagccaacacaagcttatcatcaaaaacaattttgtttggaaaagctttacctgctccttgtaaacccaacaaatcaatgctcaacagtaaatcaatattatcatttgaatcaggagcattcatcatcctctgcatcgaatggaactcttcaatctgtgctatggtaggcacatcagctttttgcaggccattcaatacgagagagagctttccttctcaattggcgagcttcctctggactgtgcaaatacaattctcgtaacacatttacgaggttgacaagataagcttcttgcatttccagattattacacgaa

SEQ ID NO: 46199 - DNA, 308 bp, Glycine max
  Clone ID: LIB3139-098-P1-N1-D11
aaaaaaaaaaaattaatttaaaaaaaaaaaaaaaaaaaaaggggaaaaaaaaataaaaaaaataaaaaaaaaaaaaaattataaaaaaaaaaggacctccaaaaattttttggtttccctctccctgtttttttttccggcccggtttcttcatgcggaccatcttttcccttttgtggggtcgcctttcagtttgggtttcctcgctccattgtttctttctcttggatattttattccgctcatattttctctgttagctttctcccgttgcttttggtgtaatgcctgtccggttttcttttggg

SEQ ID NO: 46200 - DNA, 279 bp, Glycine max
  Clone ID: LIB3139-098-P1-N1-D12
agctagcaagggtgttgtagtatagttagagatatcactactacaccaccctgcatagtttgttcagctataatactacttgagcttctttacctacttttcaaacctacattgcacacaaaatggcaacatcttggtcatgttatctacttgcattgcttctttttatgtcaactattgtatcagagagtagagtggcaaggaaggacttgggcctggaccttggtgggtttggggttggacttggactgggtttgggcctggggattggaggtggca

SEQ ID NO: 46201 - DNA, 387 bp, Glycine max
  Clone ID: LIB3139-098-P1-N1-D2
gtttatcgtgaggagaatatgaagttgtttgttttctttgttgctgcagtagttttggtagcatggccatgccatggcgcaggctaccaaaggttccctctccgaatgaaaactggctatggtgagcgttcttcggaggtaaaatgcgcaagttttaggcttgctgtggaagcacacaacatccgagcctttaaaaccattcctgaagagtgcgttgaaccaacaaaggactacattaatggcgaacaatttagatcagactctaaaacagttaaccaacaagctttcttttatgctagtgaacgcgaagtccatcacaacgacatatttatattcggcatagataacaccgtactctctaatatcccatactatgaaaaacatgga

SEQ ID NO: 46202 - DNA, 380 bp, Glycine max
  Clone ID: LIB3139-098-P1-N1-D3
atttaattcactgtactttatccttttgtgtggggaattatggtaattgattttgagggtttgactactcatggattatgatggtatgagaaaaccttccaaaaacttatttcactctcgcttcttcctttttgggttctattgctgggattgggagttcttgaccgctctcctcctttttagttcttccccttaatcttctttcttcacaatttttatttccttccttattagacgtattagatcagattgaacaaaagggtttttctttctttctttcttggggaataatagaaataagaaaagattagtgaggttgaaatgtcgcaacgatcggtgccggcgccgttcttgacgaagacgtatcagttggtggagga

SEQ ID NO: 46203 - DNA, 351 bp, Glycine max
  Clone ID: LIB3139-098-P1-N1-D4
cttcacatgaggctgactcaaacgacggatctggattcgagttgaaaacaagtgcatgcgatgaagcgttgagtttgcttcataatcttcatttatccgaacaagggttgaagactctcttaagcttcagaaacggcgagtttattgagtctttaacaagagtcatgcaaaaggggttctttgaatcacgcgcttatgctgtgttcttgttgaaatctatttccgaagtggctgaaccagtgcaactattgcatctaagacaagaactttttgtcgaactggtacaagtgcctgaggagccaaatttcacagaagacatcaaaggcgaccctttaaaccctgatccaattc

SEQ ID NO: 46204 - DNA, 381 bp, Glycine max
  Clone ID: LIB3139-098-P1-N1-D5
cgccaccactcccttcttcaccgccgttttcgcttacgtcatgaccttcaagcgcgaggcctggctcacctatctcaccctcgtccccgtcgtcaccggcgtcgtcattgccagcgggggtgagccgagcttccatttatttgggttcatagtatgcattgcagctactgccgcacgtgccttaaaatccgtgttacaaggaattttgctttcttctgaaggagagaagttgaattctatgaaccttcttctttacatggctccaattgctgttgttttccttcttcctgctacacctaataatggaagaaaacgtggttggcattacattggctcttgccagagatgatgtgaagatcatttggtatctgctatttaatt

SEQ ID NO: 46205 - DNA, 378 bp, Glycine max
  Clone ID: LIB3139-098-P1-N1-D6
gtggtgatgaaaaattgatgcgtgaaaggacacatttgctgttggcttgttgttcaaggatggcaatttgtaagaaagatgtttggagagttgaatgtggaatcccttctggatttccgctcacagttatttgcaatagcatttttaatgagatgctcattagatatagctatgaaaaattactgcgccaggctagagctccaagtatgtttttacaatccttcaaaaattttgtttctttgtgtgtgtatggggatgataacttaattagtgttcatgaatatgtcaagccttacttttatggttctaaattgaaaagctttctagctggtcataatatcaccattactgatggtattgacaaaactagtgcaactt

SEQ ID NO: 46206 - DNA, 382 bp, Glycine max
  Clone ID: LIB3139-098-P1-N1-D7
ctagcaagcagagcttttgtcaattttctattgaccttctcggtggaggaattttagtggacaaaactggagattggatcacacttatacaaaattctccaattagtaacttgttgagagttgctgcttggaagaaaggctgtttaatggttaagattgtgatgtctggaaatgcagcagtcaaaaggagtgattgggcctcattggtacaagtctttttaacaaacagcaacagtacagagcattttgatgcttgtaagtggacaaaatcggaaccacattcctgggaattgatcttcccaatagaggtatgtggtcctaataatggttttgaaatgtggagttctgagtgggcaaatcaaacttcatggcatttgagttt

SEQ ID NO: 46207 - DNA, 375 bp, Glycine max
  Clone ID: LIB3139-098-P1-N1-D8
cgaagaagaagatggctttaggtgttcctgctcttccgttgacatacgtggctcacgttctggcagttgttgccagcgtcttggtcgtggtctgggtcgtcaatttcaggggtggcttggcttgggattctgataacaagtccctcatcttcaacattcatccagttcttattgttattggcttactagttcatgggggtgaagctattataagttacaaagcttttcccctaaagaaggaagtgaagaaattgatacaccttgttttccatgccatcgcattaatacttggaatagttggaatttatactgccttcaagtttcacaatgaaagtgggattgccaatctctacagcttgcattcatggcttggaa

SEQ ID NO: 46208 - DNA, 366 bp, Glycine max
  Clone ID: LIB3139-098-P1-N1-D9
gtgagtgggcagagagatggtttcaaagtaatgtccacatgggtgaatggtttgagcttatgacaaccatttcctgcgatttggtcgtggtctgggtcgcaaatttcaggggtggcttggcttgggatccttataacatgtccttcatcttcaacatttatttcagtcttattgttattggcttactagtttatgggggtgaagctttaataatgttcaaagcttttcctctaattaatgatgattctatatttattacactcttaattttcatgccattttctttattcttggtattattgatacttattctgcctttaagtttcacaatgaaagttttttttccaatttttacattttgtatac

SEQ ID NO: 46209 - DNA, 373 bp, Glycine max
  Clone ID: LIB3139-098-P1-N1-E10
gagatcaaaatcgggatttgattgcagttgcagttctctatctttagtgcttattactaactattattaaggtttctttcttttgttgaaatggtctatagtaattatagttctgccaatgaatctcattgtttaatcctgactatacctttcccgtaacgcaattagcgtcaaatggtgacggggcagaaggtttattttacaaagccccccccctttatcaccatcttcattttctacctaccgcagaaaggcgattttcctgtgaaattatgcctattcctcctgctgcagctacttttaacgatgatgatttacaaaacgtccgggttgatgagacttgtcatctcgtaaatgcagatcagccacaatg

SEQ ID NO: 46210 - DNA, 374 bp, Glycine max
  Clone ID: LIB3139-098-P1-N1-E11
ggatgttcctaaaggaagaaaggatggcaaagcttttctcaaagaggactgtcaggggaagacctggtagctctgtcaggggggcacactttgggtttctctcactgctcatctttcaagaacagaatccacaacttcaatgctacacatgatgttgacccttcattaaatccatcatttgcaacaaaactgatatcaatttgtccactaaaaaatcaggcaaaaaatgcaggcacctctatggacccttcaacaacaacttttgataatacatattacaggttgatcctccaacagaaaggcttgttttcttctgatcaagttttgcttgacaacccagacactaaaaatctggttgcgaagtttgccacctc

SEQ ID NO: 46211 - DNA, 304 bp, Glycine max
  Clone ID: LIB3139-098-P1-N1-E12
ggatgctcctacatgattaaaggttggctacacttttctgagggtggtcttttttacaaagaccttggtaactctgtcaggggggcacactatgtgtttctgtcactgttcatctttccagaacataatccacatctttaatgttactcatgatgtatacccttcattatattcatcatttgcatcaaatctgatattaatattgtccacttaataatcagtcataactatgcttgctcctctatggacccttcaacaacaacttttgagatgtacatattacatagttgatcctccatcataa

SEQ ID NO: 46212 - DNA, 386 bp, Glycine max
  Clone ID: LIB3139-098-P1-N1-E2
gccaagatactcaacaacggcgatcttctcactctttcccttgacaaagcctctggctcggggtttcagtccaaaaacgagtatctctttggcaagattgatatgcaactcaagcttgtacccggaaattctgcaggcactgtcaccgcctattatttgtcatcaaaaggatcaaattgggatgagattgactttgaattcttggggaatctgagcggtgacccatacattcttcacaccaatgtgttcagtcagggcaaaggcagcagagagcaacagttctatctgtggttcgacccaactgcagatttccatacctattccattctttggaatcctcagcgcataatcttctcagtggatgggaccccaataagagaattcaa

SEQ ID NO: 46213 - DNA, 371 bp, Glycine max
  Clone ID: LIB3139-098-P1-N1-E3
gagaatcgtaacagaaacggtcactggaagttgtctctaccaccctctcagccatggcaacaattccccctagccgatcatcatcacacgcgtttgttgccatggcaaccttcacgactctgttgttgtgcacggcggcggcgaaggagagcgtgtacgagatactccccaagtacgggctcccgagtggtctgttaccggataccgtcaccgactacaaactcgacgaggatggccaattcgtcgtcgttttgccgaagccctgctacatacagttcgattactttggtttactacgagagcaagatctccggcaagctcagctatggctccatcaccaatctcaagggcattcaggtccagcgcctctt

SEQ ID NO: 46214 - DNA, 383 bp, Glycine max
  Clone ID: LIB3139-098-P1-N1-E5
gtcagatggcacatcctcgtcagaagctcgtcggatacgaagaagaagcatcagcattacaccagagattggagatgatatcgtaagggctgtacgggcaatgaatgaaactctgaagcaaaaccgtctcttgagagaacgaggggatgataactcattccccaattctccaaacaatagtagtagtgatgcaaatcttcagaaaaatgtgtcaaatttccatcttgatggccatgatgaaagatctgccctatattcttttcagcgtgaccaaggaacttcacaaaaggcaatgtcattaccatcttcaccacatgattatagaggccaggcttctgagagaagtgggccatcaagatacggagtgaatgatgaaatggagt

SEQ ID NO: 46215 - DNA, 379 bp, Glycine max
  Clone ID: LIB3139-098-P1-N1-E6
caacatgattgtctcaaagtatcccactattaagggcattaattttgatttgccccatgtcattgaagatgccccatcttatccaggagtggaacatgttggtggagatatgtttgtcagtgttccaaaagctgatgctatttttatgaagtggatttgccacgattggagtgatgagcactgcttgaagtttttgaagaactgctatgaggcactaccagataatgggaaagtgattgtggcggaatgcattcttccggtggctccagactctagcttggccacatagggtgtggttcacatcgatgtgatcatgttggctcacaatccatgtgggaaagagagaacagagaatgagcttgaggctctggccaaaggc

SEQ ID NO: 46216 - DNA, 379 bp, Glycine max
  Clone ID: LIB3139-098-P1-N1-E7
ctgatatcttaacttccatggctaaggtcttttctgatttggagcgttcagtatgtagaatggtccatcgacaggttgccacaattgcttggttggaagctgattctgtttgtggcagccactctgttgcaatccctttggttcttgttttgccttatcttttccgcttaaaccaatgtctccggcagtacaaagatactggagagaaaactactcttctgaatgctttgaaatattcgaccgcaatgcctgtgatttttctttctgcccttaaatatcacgtcttcactgagaggtggacaaacttttataggcctctctggcttctggcaggtgttgtgaaactcatcatactccttctaactggatgtgaatcaag

SEQ ID NO: 46217 - DNA, 382 bp, Glycine max
  Clone ID: LIB3139-098-P1-N1-E8
cgagataactagaaacagtgtgatgaaaatgaaggtccttgttttcttcgttgctacaattttggtagcatggcaatgccatgcgtacgatatgttccctctccgaatgaacactggctatggtgcccgtactccggaggtgaaatgcgcaagttggaggcttgctgtggaagcacacaacatctttggctttgagaccattcctgaagagtgcgttgaagcaacaaaggaatacatccattggcgaacaatatagatcagactccaaaacagttaaccaacaagcttacttttatgccagagaccctgaagtccatcccaaggacacatttgtgttcagtatagatggcaccgtactctctaatattccatactacaaaaa

SEQ ID NO: 46218 - DNA, 379 bp, Glycine max
  Clone ID: LIB3139-098-P1-N1-E9
ctcatgcaagttttgacatttcaatcacccccaccttctcaagatatactgtgatgccggctctgagaattcatggatatgccttggctgtttcgttttgtcttatcaccttcatagcagcctcactaccaacagacccttcagaagttgatgccctgatagagatcaagaatagtttgattgatcctaagaacaatcttaagaactggaataaaggagatccatgtgcagcaaactggactggtgtttggtgttttgatcagaagggggatgatgggtacttccatgttcgtgagatctacttaatgacaatgaatctctcgggaagtctatcaccacagcttggacagctatcccatcttgagatactgaatttcat

SEQ ID NO: 46219 - DNA, 383 bp, Glycine max
  Clone ID: LIB3139-098-P1-N1-F1
aaagaaagaaaaaaaaaaacagcgccctagatttgctcttctttgcttcggaagaaagagaaaaacaaataacaatggcgttcgcttctttcctcggcagagttctcttcgcttccgtcttcatactctctgcttaccaagaatttaacgaatttggagttgatgggggacctgcagcaaaagcactcagacctaagtttgatgcctttacacatcgagtgcattctcaagttggctttcaacttcctgagattgatctgaaatttttaattgctggggctattgctctgaagggccttggaggggtcttttcatatttggcagctcttttggagctttgcttctgctcctgcaccagctgattgctaccccaatccattatg

SEQ ID NO: 46220 - DNA, 306 bp, Glycine max
  unsure at all n locations
  Clone ID: LIB3139-098-P1-N1-F11
tccgaacaccgaaaagttcatggaccaacaggacttcttgtccaggacagcacgtttggtcgttgtatgtcccttctatccagggtagggcataatgtgttccaagagctgaaccttaagtgagaagactggcgtaggatgtatgatagtgaacagaaccctatatatctgtnnatttgtcttcacatattccgaaccacccattttggagggtggcnnaaatccactggattctggttttgatttaatgatacccagtggagaatggccatagaagtattgatgcccataatacagtgctttatc

SEQ ID NO: 46221 - DNA, 340 bp, Glycine max
  Clone ID: LIB3139-098-P1-N1-F12
ctctgtctctctctctcggtctcgctcttcttctcatcaagcacagagttacagactcaccgatcttccgattctctttcgtcttggtttatgagctcgaaggagagacccactcttggtggcacgcggattaagacccgcaaacgaaatattgctgcgccgctggaccctgcagcattctcggatgcagtggtccagatttatttggataatgctggtgatctggaacttattgctaagagtattgaatctttaagaccttaacttttcaagatacggggacaccttttttgaggttgctttcactgggggccgtacacaacctggaactaccaagcct

SEQ ID NO: 46222 - DNA, 253 bp, Glycine max
  Clone ID: LIB3139-098-P1-N1-F2
aatctctcaagattttgaaattgctggtaatactcttatgccagctttttctgttccacaggctactgccagatcttctgaaaatgcggaatcctctgcatgatctggaattcgtgttttctttcgcttgttcgtttgtttaattcaataaaggaaattaggcatgaccctcttgttgagtatgctctgcctatctgaaaatttccacacctcttttaattgtcgtaatgatgtgtgaagtgtgtgttatttt

SEQ ID NO: 46223 - DNA, 350 bp, Glycine max
  Clone ID: LIB3139-098-P1-N1-F3
ctcgagccgattcggctcgaggacaaagtgttgttggtgatcttaaacttcttactgatgggaagttgtatgagggtaagcatattcctgtatctaatattagtgcaggggaaaatcatgtagttcaaatacccttaatggcacaggaggaaattctgtcttctagtgcaagtgacttcagaactgcaatggtgagtaaaaatagcaagcctcaagctactgcaatgcatgtgggagctatagaaattatcattgatagtttcgcaagtcctgactgcaacatagttggtgcaatgcttttggttgatacttatcataccaatcctgaaaatgcagttcgtagtattttt

SEQ ID NO: 46224 - DNA, 384 bp, Glycine max
  Clone ID: LIB3139-098-P1-N1-F6
ctcctctattcccttttcacttttatcttctcaaactgtggagtcattagcatcacctacagcgttttccacttcttcaatgaccaatcattgaatttgaacctcaaatccacaatcaccaagtccatctccacttccttcttgcccctcctcggcaccaccatcgtttctcatgttatcatctttttcgtttctcttttatatgcccttctcttggttcttatcatttgtggtgctatatttttcaatgtaacaacttcatactcttccctttactacttcatcgggttccttattgcacttcctttgctattttttcttatatatttgcaagttaactggaccttggtgcctgtgattgtgatcttggaatcatggttgggg

SEQ ID NO: 46225 - DNA, 376 bp, Glycine max
  Clone ID: LIB3139-098-P1-N1-F7
gaaatctggtgtctatgttccactgcctacaaaaactaatttgatggaaactcccaaggaatggcaactggatctaccttgtgacaaaattcctagtgtcttgactacaactgatgagagattggtaggcacagaacatgagggatatgatccttttcttggtggaattcaaaaatatgccactcccatgatgcccctagatgaagaaattctttctaaggttgcacaagatatggttgaggaatggtttgattgtgttgatggagaggattcctttggagaagtttctttaagtgcagcacttaatggtgttgagggtttggactatatggaaagaattcctcttgccacatctgaaggttttcctcatgtgctt

SEQ ID NO: 46226 - DNA, 379 bp, Glycine max
  Clone ID: LIB3139-098-P1-N1-G1
ggatgtggctgttcccgatgtttccagggacattggatgctaccaggaggctatggtgcgtcagagttctggggtccgcagttttaaagagatggtggaatactttaatgaaagggcaaatgtatcagggaagtttcctattgggagttttaattctgcatttagcttcactggttcaaaacatgttgatgaagcagctacaaaaaccttgtcttcagatgggttttacattcctcttgcaaaggttcagcttcaaaaatcccacttaaggttgcaaggaaatgtcaaaaaggctgtcccagtcaattgggacccactgtccttggcaagttttattgaaaattttgggactcatgtcattacatcaataactatgggt

SEQ ID NO: 46227 - DNA, 380 bp, Glycine max
  Clone ID: LIB3139-098-P1-N1-G10
gctaaagctccaagtatgtttttacaatctttcaaaattttgtttctttgtgtgtgtatggtgatgataacttaattagtgttcatgaatatgtcaagccttactttagtggttctaaattgaaaagctttctagctggtcataatatcaccattactgatggtattgacaaaactagtgcaactttgcaatttagaaagttagcagattgtgattttctcaagagaaactttaggcagatgtctaatgttttgtgggtggctcctgaggacaaggcgagtttatggtcacaacttcattatgtttcatgtaataatctggaaatgcaagaagcttatcttgtcaatctcgtaaatgtgttacgagaattgtatttgcac

SEQ ID NO: 46228 - DNA, 383 bp, Glycine max
  Clone ID: LIB3139-098-P1-N1-G11
ggatggagaaagtgaaggtgcttcggcgactcctcgagacaccaggggttcaccaggggccagcctgtttcgacgctctgggtgcgaagctcatagaatccgctggcttcccctactgcatcaccagtggcttctccatcgccgcttccaggttggctctgcccgacaccggcttcatctcctacggcgaaatgctggagcagggccaactcatcacccaagccgtttccattcccgtcattggcgacgccgacaacggctacggcaatgccatgaacctcaagcgaaccgtcaagggtttcattgccgccggtttcgcaggaatcattctggaagaccagattgcgccgaaagcgtgtgggcacacgcgcgggaagaaagtg

SEQ ID NO: 46229 - DNA, 314 bp, Glycine max
  Clone ID: LIB3139-098-P1-N1-G12
caacatgatcgtctcaaagtgtcccactattaagggcattaattttgatttgccccatgtcattgaagatgccccatcttatccaggagtggaacatgttggtggagatatgtttgtcagtgttccaaaagctgatgctatttttatgaagtggatttgccacgattggagtgatgagcactgcttgaagtttttgaagaactgctatgaggcactaccagataatgggaaagtgattgtggcggaatgcattctttcggtggctccagactctagcttggccacaaagggtgtggttcacatcgatgtgatca

SEQ ID NO: 46230 - DNA, 387 bp, Glycine max
  Clone ID: LIB3139-098-P1-N1-G2
ctagtttatcgtgaggagaatatgaagttgtttgttttctttgttgctgcagtagttttggtagcatggccatgccatggcgcaggctaccaaaggttccctctccgaatgaaaactggctatggtgagcgttcttcggaggtaaaatgcgcaagttttaggcttgctgtggaagcacacaacatccgagcctttaaaaccattcctgaagagtgcgttgaaccaacaaaggactacattaatggcgaacaatttagatcagactctaaaacagttaaccaacaagctttcttttatgctagtgaacgcgaagtccatcacaacgacatatttatattcggcatagataacaccgtactctctaatatcccatactatgaaaaacat

SEQ ID NO: 46231 - DNA, 380 bp, Glycine max
  Clone ID: LIB3139-098-P1-N1-G3
ctcgagccgaatcggctcgagcctctctctatctctcacacacactttgtctctctctctctctcacccagatcttgtagcaatggcgagcgctcccactccacgcgaagagttcgtgtacatggcgaagctggcggagcaggccgagcgctacgaggagatggtggagttcatggagaaggtctccgcctccgccgagagcgaggagctgaccgtggaggagcgtaacctcctctccgtcggctacaagaacgtgatcggggctcggcgcgcctgctggcgcataatcttctcaatcgagcagaacgaggagagccgcgggcaacgaggaccacgtcgccgtcatccgcgactaccgctccaagatcgaggccgagctc

SEQ ID NO: 46232 - DNA, 352 bp, Glycine max
  Clone ID: LIB3139-098-P1-N1-G4
cagaattaaatcatgctctcctgcttgtggggtatggtacagaaaactgagcacttgtaaatttggaaacgggggttactatcccattataaaagtcaccgatcaacaagccaccaaatatgtgtgacaatggcatcggctagctgtgcccattgagcctttggaagtaattaataacaaggccaaaatttcaaggagactatctttgagctattttatctttatataagtattgtaatttctgttccctaaatcatctggttgctgcacgtgttggccccagattgagtatcttgttagtctatctacagtatctatctaaataaaggtgcgatggctctattggcatcat

SEQ ID NO: 46233 - DNA, 385 bp, Glycine max
  Clone ID: LIB3139-098-P1-N1-G5
ctcgagccgatccttgttggatataactaatcaagcgtgtagtcttttccgccctcctgagattgaattgctggagtggacagatgatctggagatgtttattctgaagggttatggtaaatcactaaactatagaatgggactgccattacttgaagatgttgttcaatccatggaacaggctatcgtggttgaagaagaaagacatgctcctggcagttttgaaaaggcaagacttcggtttgcgcacgctgaaactgtagttccattctcatgtctgcttgggttatttcttgaaagatctgagttaaaaaaaattcagaaagagcaacctttgcagcaccctccaaagcctccacaagaaaaaaaatggcgggtagcactg

SEQ ID NO: 46234 - DNA, 272 bp, Glycine max
  Clone ID: LIB3139-098-P1-N1-G6
gtcaaattggaaacgggggttactatcctattctagaagtcaccgatctacaagccaccaaatatgtgagacaacggcatcggctagctgtgcccattgagcctttggaacgaattaataacaaggcccaaatttcaaggagactatatacgagctattttatctttacataagcattggaatttctgtgcgctaaatcatatggttgctgcacgtgttggccccagatcgagaataatggtaggcgatctacagtatctatctaaataaag

SEQ ID NO: 46235 - DNA, 364 bp, Glycine max
  Clone ID: LIB3139-098-P1-N1-G7
agagattcaggaaaaagttgtattgaaattttcacaagaggaatttcttacagcttggtcaactcaggtgcgtcctgcaacaactctgttggctgatgggtgtccatatttgtatgcaatggtgcatgatagttcagtgtctacaataccaggtgattttgtcattggtgtcaagttgacaaccataaacaatatgtgtgcatatgggctcaatcctggtatttcaggttctcgtcttttgggcaccattcctcagtccatttcacagcaaactgtttggaatcaaatggcaacagtgagaacaccattgaattttgattctagcaagcagagcttttgtcagttttctattgaccttctcggt

SEQ ID NO: 46236 - DNA, 237 bp, Glycine max
  Clone ID: LIB3139-098-P1-N1-G8
actttaaactattgaagagtgatcggttatctttgcaacacaatcaaagaatctaatggcgaggtactttaaagtgtttaggatgtgaatgaggaggtatcctccccgttctacttccaatttttcaaagtcttgttaattgaaatcaacaaatgattttgtatctcaattagagtgtatttggatagagaattttaactgaggagactaatttatcagagaatttaaatttttttt

SEQ ID NO: 46237 - DNA, 375 bp, Glycine max
  Clone ID: LIB3139-098-P1-N1-G9
aatcaaattagttcattctctttgcgcagttccctacctctcctttcaagatgcagatcttcgtcaagaccctcaccggaaagaccatcacccttgaggtggaaagctctgacaccatcgacaacgtcaaggccaagatccaggacaaggaaggaattcccccggatcagcaacgtctcatcttcgccggaaagcagctcgaggacggccgtaccctcgccgactacaacatccagaaggagtcaacccttcaaccttgtccttcgtctccgtggtggcatgcagatcttcgtcaagactctcactggcaaaaccataaccctagaggtcgaaagctctgacaccattgacaacgtcaaggccaagatccaggac

SEQ ID NO: 46238 - DNA, 385 bp, Glycine max
  Clone ID: LIB3139-098-P1-N1-H1
cgagacacagattcttaccaaataaacaaacaaaaaaacacacacacacacactttccattttctgtggttcttcttctcacttctctaatcttctcccccctctgttactccccgcttctctgaatccctttctgttaatcatctgtctttcacctcgtgattccaaaaagattcaaactttgaaaatttttctcgaaagccaggtgttttcagaatcgagatccagtttctttttatccttttgttaagaaattattattttctttcattcagccaagaaggttgtttttgatccctcaaagcttttttctttcttcttggattaaaggggttgtctattttaaacctcttccatccctttttttttataaaaaaaattatta

SEQ ID NO: 46239 - DNA, 364 bp, Glycine max
  Clone ID: LIB3139-098-P1-N1-H10
ttgatagtcaagagggagttgctcacattggtgaattgaaatctggtgtctatgttccactgcctacaaaaactaatttgatggaaactcccaaggaatggcaactggatctaccttgtgacaaaattcctagtgtcttgactacaactgatgagagattggtaggcacagaacatgagggatatgatccttttcttggtggaattcaaaaatatgccactcccatgatgcccctagatgaagaaattctttctaaggttgcacaagatatggttgaggaatggtttgattgtgttgatggaggagattcctttggagaagtttctttaaaggcagcacttaatggtgttgaggggttggacta

SEQ ID NO: 46240 - DNA, 202 bp, Glycine max
  Clone ID: LIB3139-098-P1-N1-H11
gaacactcttctatttgatatacgacttcgggtcagatgtaaacgttctctgtttctttctcacttctctgtttaatttcaagtacaagctggtgaaattttggattaaagctcccactctcctatctggtataggacttcttgggtagacttgtctacttctgttccttcttttactctttatttctcattgatccgcatt

SEQ ID NO: 46241 - DNA, 354 bp, Glycine max
  Clone ID: LIB3139-098-P1-N1-H12
atccacttcctcttcttctcttcccatttcccttccaatctcctaatttctcttcagcttctgggttctccattttccttcgtcttctgcatctgcattccgtagattcagttctcgtcggaaaatggacgttcgccgaagacccattcctccctccggcgatcgccgacaaacccagaagctgaagaacaccgccaccaccgattcgcagactcttttgcctctctacctcaccaacgccctcttctttgcggtgttcttctccgtggcctacttcctcctccaccgctggcgcgagaagatccggaccgtcactccccttcacgccgttacccccgccgagaccggcgccat

SEQ ID NO: 46242 - DNA, 384 bp, Glycine max
  Clone ID: LIB3139-098-P1-N1-H2
ggaaaagtactttttttttttaaaaaaattatcttatttgagtgtgatcgatggcatacccaaacccttatccggcgcaaccgtatccctccacctccgtgccgatgccggcggtgcccaccgccgtgatcggcccccagttctgtgcgccctacccgctggatctggcggtggtgaagaaggtgatgacgctctccgacggtaactttgtggtcaccgacgtcaacggcaacgtcgtcttcaaagttaagggatcgctcatgaccctccgtgaccgccgtattctggtggagacctacaggaaactgtgtagttccctacggcggcaggaaacgaccgcgcatgatcgttggcaagctttgtgccacgtgtgtttgcacatct

SEQ ID NO: 46243 - DNA, 326 bp, Glycine max
  Clone ID: LIB3139-098-P1-N1-H3
gagaaatggcaacaagcgaagaagtggttgcggcggcgccggaggcagccgcgccggatgcagggttgaagcacaaactggagagaaaatggacgttttggtgcgacaaccaatccaaacccaagcaaggcgctgcttggggaacctctcttcgcaaggtctacaccttcgacaccgttgaagagttctggtgtttgtatgatcaggtattcaagcccagcaagttgcaaatcaatgccgattttcacttgttcaagactgggattgaccctaaatgggaagatccagagtgcgccaatggaggaaagtggtctatcaccattgac

SEQ ID NO: 46244 - DNA, 378 bp, Glycine max
  Clone ID: LIB3139-098-P1-N1-H7
cataagttgactaagaaaactatgcaaaaagcacacatggttccatgaatcttcttccttcatcaaattcctgtgtgtttatgatctttgcccccaccaagccaagagtgagaaatggaagcaccatgggccacaacaagttcaagcatagtttttgtgatagtgatacttgctctaacatcatgggcatggaggatgttgaattggctatggataaggccaaagaggctagagaggctcctaagggaacaaggccttcaaggaaacccctacaggatattggttggggacttaaaggagattgtgaagttgcaaatggaagcaagatcccaaacccatgaatctctcccatgatattgtgccacgtgtgtttgcaca

SEQ ID NO: 46245 - DNA, 375 bp, Glycine max
  Clone ID: LIB3139-098-P1-N1-H8
ctgatatttacaccatctgctctcaagactgtgaattgtggaatcctgcttgcacaaaagcaatgactatgtcatttaatccaaacccgtgttctgatgcatggagtttggaatttctgaagcgtactggatttcattgcgatatcatttgtgtcactggatggactgccaccccaatgcaggatgttcaggttacaattgattggtttatttcctctcaggaatgtgttcccaggacctattgtgttttaaatccacaaaatccttttgtgttaaataggtggatgggaaaattgactttcccccagggcacttcccgaagtgttaagagaatgcctctttctatagggggaggagctggtgcaaagaatgcta

SEQ ID NO: 46246 - DNA, 383 bp, Glycine max
  Clone ID: LIB3139-098-P1-N1-H9
tgtctgtgcaaatttgcgttgttcttcgcggcacacctcactcactgaacggtaagtatggcggacaaggctgttacaatccgaacccgaaagttcatgaccaacaggcttctttccaggaagcagtttgtcgttgatgtccttcatccagggagggcaaatgtttccaaggctgaacttaaggagaagctggctaggatgtatgaagtgaaagaccctaatactgtatttgtcttcaaattccgaacacattttggaggtggcaaatccactggatttggtttgatttatgatacagtggagaatgccaagaagtatgagcccaaatacaaggctatcatgaacggccttgacaccaaggtagaaaagtcaaggaagcaaat

SEQ ID NO: 46247 - DNA, 385 bp, Glycine max
  Clone ID: LIB3139-099-P1-N1-A1
cttctctcctttctttcactctcttcttctcactgatccgcattgccgttcaaagtggtcttatttgaaaaacacttgggcgttggtgcaaatgtttgcttcgttaattttctctggagacaacaggctcactgagaaaacaatttttacttgcagagatttggacatcttggttgtctattatacaatagcaactcaatttagaaaatttctaccgcattacattaggtggcatctgtataccttgttgatctacattctcccatcttttctcactgctgaaattaaatataagcggaatttgagtaatattcatatttccggcttattttacgacggcagatacaaattctggactaaacacgagaaaaatcttgctttgaca

SEQ ID NO: 46248 - DNA, 348 bp, Glycine max
  Clone ID: LIB3139-099-P1-N1-A10
gcttgttgttcaaggatggcaatttgtaagaaagatgtttggagagttgaatgtggaatcccttctggatttccgctcacagttatttgcaatagcatttttaatgagatgctcattagatatagctatgaaaaattactgcgccaggctagagctccaagcatgtttttacaatccttcaaaaattttgtttctttgtgtgtgtatggtgatgataacttaattagtgttcatgaatatgtcaagccttactttagtggttctaaattgaaaagctttctagctggtcataatatcaccattactgatggtattgacaaaacctagtgcaactttgcaatttagaaa

SEQ ID NO: 46249 - DNA, 372 bp, Glycine max
  Clone ID: LIB3139-099-P1-N1-A11
aaactcttcttcaacaacccttcttttgatctgtgcaagtgatcttgaaaggagggaacaacaatggtgaagtctataaactttctcctacttctgtctctactagcctttgctcccttatgtcactgtaaaaagaaaataggaggttacctctaccctcaattctacgacggttcatgccccagagctcaagagattgtccaatccatcgttgccaaggcagtggcaaaagaaccccgcatggctgcttcgttgctcagactacatttccatgattgttttgtcaagggctgtgatgcatcggtgctgctagatagcagtggaacctattatcagtgagaagaggtcaaatcccaaccgtgattcagcccg

SEQ ID NO: 46250 - DNA, 382 bp, Glycine max
  unsure at all n locations
  Clone ID: LIB3139-099-P1-N1-A12
ctcgagccgggaaaaagttgtgttgaatctctccaaactgcaccaggttgtgtggtaacanctttggtgaagtctataaactttctcctacttctgtctctactagcctttgctcccttatgtcactgtaaaaagaaaataggaggttacctctaccctcaattctacgacggttcatgccccagagctcaagagattgtccaatccatcgttgccaaggcagtggcaaaagaaccccgcatggctgcttcgttgctcagactacatttccatgattgttttgtcaagggctgtgatgcatcggtgctgctagatagcagtggaactattatcagtgagaagaggtcaaattccaaccgtgattcagcccgaggatttgaag

SEQ ID NO: 46251 - DNA, 367 bp, Glycine max
  Clone ID: LIB3139-099-P1-N1-A4
gggaaagattacctacattgcaccacctggccaatattccttacaggatactgtattggaacttgagtttcaaggtgtcaaaaagaaattcactatgcttcagacttggcctgtacgtacacccaggcctgttgcatcaaaacttgcagctgatactcctcttcttactggtcagcgtgttcttgatgcccttttcccctcagttcttggcgggacttgtgccattcctggtgcttttggttgtggtaaaacagtcattagtcaggctctttctaagtattccaattctgatgctgttgtatatgtcggctgtggggaacgtggaaacgaaatggcagaggttctaatggactttccccaacttaca

SEQ ID NO: 46252 - DNA, 355 bp, Glycine max
  Clone ID: LIB3139-099-P1-N1-A5
ggattcttgtcctcactctaggccaggacttgcctgatggaaacctcggggccttgcggaagaagggtgatgtagctaaagacaagttttccaaggtgctatggtatgccataacaaattacaggacatggatttttgctctcctctatgggtactccatgggagttgaattaacaactgacaatgtcattgctgagtatttctatgacagatttaatctcaagctacacactgctggaatcattgctgcttcatttggaatggcaaacttagttgctcgaccttttggtggatatgcttcagatgttgcagccaggctgtttggcatgaggggaagactctggaccctttggat

SEQ ID NO: 46253 - DNA, 344 bp, Glycine max
  Clone ID: LIB3139-099-P1-N1-A6
caggagttccaaccaagatgctgacggtaaattgttcggcgagaatgacagtgcataaccctgcaaccttcttcggaattcatgtcagctctaaagcagtgaatcttatgtattctgagatgacagttgcaactggtgagctgaagaagcattatctatcgagaaagagtacccgtacagtgtctgtgaacctgcaaggaagcaaggtttctctatatggtgctgatgcaagcttaactggcttggtggacaatggaaaaataccaatgactcttgtctttgaagttggatcgctagggaatattgttgggagggtggtgaggtccaaacatcgaaggcgtgtc

SEQ ID NO: 46254 - DNA, 380 bp, Glycine max
  Clone ID: LIB3139-099-P1-N1-A8
cgacaaggttggttcaacttgtgtgaaggtattggaacatggaaaatcttgatggccctagtccactgaaagccattgaggagctctttatagggcgtgattctgcccaacaacttatgagtgccatcaactgtacttatgatgattgatcaaccaccccatttgctcaacaacttgtgaaagagagtgctcatgtgcttcacaaactccctcttgttcttgcacaacaaccccacttctgaatcacattatgtcttcaatgttcaagtattggactctaacaagtctgaggactctcatgagagcaattgcacaagctccaccattaaagaaccaagagggtgctacacgagaataagtactgaacaaacatgggagaa

SEQ ID NO: 46255 - DNA, 372 bp, Glycine max
  Clone ID: LIB3139-099-P1-N1-A9
cagacatggagctggatgattgtgaggagaccactttgcatgatgtcaactttaaggaggagatgagacgaaagcagcaacagcaatatcgcgaggcatatgatgaagatgatgatgagccatctggtcaacgagtgcaatgtgctcaacagtagtgcaatttatggtagtagaggttctataatttctgcatggtttttatcttttgtttgcataatgcagttataactgcgtgataaatttaccctttaggttttggctggtaacgttatttagtcttggcagatttctaaagtctgttttttgttgtaatatatgaaaattaaatgttttggtacaaggcgcgcaataacgattgcatatcccagtttc

SEQ ID NO: 46256 - DNA, 390 bp, Glycine max
  Clone ID: LIB3139-099-P1-N1-B1
ttttggtttctggccacaaaatcaatgggtggctttctccacagaatcatcctcatatagcagagtggatgagtgggtgaaagatctcgaaattcagcagccacctcttgaggatgatttcaatgatgacaatattggaagcattgccttcccaccttctcctgatgatggtagatcaatggcaagaagcacagcccagttgattcaacatccagatgccaatctttcaaaggagatattgaatgccaatagtgtggtccagtccctgaacccagcctcaactgcagctcatatatcaagcattggcataaaagccatcccctctctttcacactttttcagtctccgctgtgtcaatttgtcgaacaatctcatagttcatatcacgcc

SEQ ID NO: 46257 - DNA, 285 bp, Glycine max
  Clone ID: LIB3139-099-P1-N1-B10
tttagctagctccactaaaaaaaaaaaaaaaaaaaaaaaaaaaaggaaaaaaaaaaaaaaaaaaaaaaaaaaaaaaaaaaaaaaaaaaaaaaaaaaaaaaaaaaaaaaaaaaaaaaggggaaaaagaacaaggaataaaaataagaacagttaataaaaagggaacaaaaaaagtccaatacaaagtgtatataaaaatttaaggctaataataaaaatagtctggactctaggaaaaaccagtttcttgaggaaatttgtttgcaaatactaatgaggaagaaa

SEQ ID NO: 46258 - DNA, 383 bp, Glycine max
  Clone ID: LIB3139-099-P1-N1-B11
tgataacttaattagtgttcatgaatatgtcaagccttactttagtggttctaaattgaaaagctttctagctggtcataatatcaccattactgatggtattgacaaaactagtgcaactttgcaatttagaaagttagcagattgtgattttctcaagagaaactttaagcagatgtctaatgttttatgggtggctcctgaggacaaggcgagtttatggtcacaacttcattatgtttcgtgcaataatctggaaatgcaagaagcttatcttgtcaatctcgtaaatgtgttacgagaattgtatttgcacagtccagaggaagctcgccaattgagaaggaaagctctctctcgtattgaatggctgcaaaaagctg

SEQ ID NO: 46259 - DNA, 383 bp, Glycine max
  Clone ID: LIB3139-099-P1-N1-B2
aaaaaaacaatctccataaccaaacacaccacatggaaatcagccaaatcccgtttttcacccaagaggactactctcacttctacaacctctacgaagacacagactctaacaacagtctcaacaataacaacagcaacaacaagagaaagcgtaacaacagaaaagaagaaggtagtggtggaggtgcagaacaaaaagggcataatggtaataataataacgagaacagtgaaagtaacttgaaggacttacttgcttcgctgattatgttagacgaggaagaaattcaagaggaacggaacagaaaagttgagtacgaacagcatcgcaacatgtacaacgccaacttcgagaaccagacccgggccatgaacacctac

SEQ ID NO: 46260 - DNA, 393 bp, Glycine max
  Clone ID: LIB3139-099-P1-N1-B3
cttttgggtcaccgattgatacacccttcttcgttcctcactcaccagccacagattctctcttctctattcagtaaacggctgttttgtatacgagctgtcccggtctcagcctctacatcccaaaacatcaaaacaactggttgggctccttgtatggcttcttcctcagttggtagaagagctacatattcaacacaatctgtatcgacaaatgagccagttgtatctgtagattggctttatgataacctgaaggagccagatatcaaggtactagatgcttcgtggtacatgccggatgagcagaggaatccaattcaagaatatcaggttgctcacattcctggtgcccttttctttgatgtagatggaatagcagatcggactaca

SEQ ID NO: 46261 - DNA, 379 bp, Glycine max
  Clone ID: LIB3139-099-P1-N1-B4
ctcgagccgctcgagccgctcattaattgcaagaatggcacttcgttgcttggtgatgtccctttctgttctcttcactcttggtcttgcgagagaaagccatgccagagacgaagatttttggcatgctgtttggccaaacactcccattccaagttcattgcgagatcttctaaagcctggccctgcaagtgttgaaatcgatgatcaccctatgcaaattgaagaaacacagtacccgaaaaccttcttctataaagaagaccttcatccaggcaaaacaatgaaagtacaattcagcaagcctccctttcaacaaccatggggtgttggtacatggttaaaggaaattaaagacacttcctaaagaaggatttag

SEQ ID NO: 46262 - DNA, 380 bp, Glycine max
  Clone ID: LIB3139-099-P1-N1-B5
tctttatcctgtaagtcaattaccttcagaagctgtcgttgtaaatgtcacatgtggtagtggacgtggtggtttacccaccactgcttggattagttctgcagttaacaatcgctcctcagatatcaacaaaaggattcgcacagcacttgggaaaggtaagaaaattgtttttcttactagagttgatccttttccagtagctttactggctgttctttttggtgttaagaatgaaattctgagttctaacgccactaatcctatgctgacgcgacttcttgaaaactgtaagagtctcaaatatctggttgatgagtgtccttttgcatttgtgaactagtatgtaatattttattcacttaaataaagcgcattac

SEQ ID NO: 46263 - DNA, 389 bp, Glycine max
  Clone ID: LIB3139-099-P1-N1-B8
cgtttcatgcactttggcgcctcctttgatgaagaactccaaggccacgagggtcatcattcccaccggtgaagtgaagcaattcagagagatcgtgaaggctgcggagctcatgctcgaacaccccagctatttcctcgttaattctcgttctttgcatataggaagaagattctctgctctcggtgctgatgaagagttggagtctggcaacgtgtatattttcttcccaatgaggagagtgaactccgttgtcacccccaccgacatggcggtactctttttggccgccaactccgccgccaagagattgtctggtggaaaggcacgtgttctcccggacaactgcgacggcggagcatggcaacataaagaagagagttcaaaag

SEQ ID NO: 46264 - DNA, 362 bp, Glycine max
  Clone ID: LIB3139-099-P1-N1-B9
cttcaaatggaaaagctccatgcttctgtgctcgcccttgtattccttcttgtcatactatttcaggaaggattggtaacatgtatgaagaatgaagacggatcagaagaatggggatatgtgcaagttagaccaaaagcccacttgttctggtggctttacagaagtccatacagagtggagaatccctccaagccttggccaatcattctctggcttcagggaggaccaggctcttcaggagttgggtttggaaattttggagaggttggtcctttggatgctaatttgaagccacgaaatttcacatggttgagaaaagcagatctcttgtttgtggacaacccagttggaaccgggta

SEQ ID NO: 46265 - DNA, 392 bp, Glycine max
  Clone ID: LIB3139-099-P1-N1-C1
ctcatctttcctacccacactctcccattcgaacccaaacaaccaatgcactctccctccaacctctctcttcggcaccagaatcaccctcctacgcgccacctcatcgtcccgttccctccccaacacaagttgcagtgccacgtcagcaaccgtgtcgtttagcctccccaccccgaaacccctttcggatacgcccgataaaaccccaaagtggtcggagagggctataaaatcgtatgcaatgggggaattggaagcgaggaagctcaagtatccaaacacgggaaccgaggcgattctcatggggattttggttgaaggaacaagtaatgctgcaaaattcttaagagctaatggaattactcttttgaaagcacgtgaagaaacag

SEQ ID NO: 46266 - DNA, 384 bp, Glycine max
  Clone ID: LIB3139-099-P1-N1-C10
atttgtgtcactggatggactgccaccccaatgcaggatgttcaggttacaattgattggtttatttcctctcaggaatgtgttcccaggacctattgtgttttaaatccacaaaatccttttgtgttaaataggtggatgggaaaattgactttcccccagggcacttcccgaagtgttaagagaatgcctctttctatagggggaggagctggtgcaaagaatgctattctcatgaatatgccaaatgctgttctttcaatgtggagatattttgttggagatctcgtctttgaagtttctaagatgacttctccctacattaaatgtacagtctctttcttcatagcatttggaaatttggctgatgataccatcaatttt

SEQ ID NO: 46267 - DNA, 364 bp, Glycine max
  Clone ID: LIB3139-099-P1-N1-C11
atttctatctctcttatactctcactactctctttgctctttcttttctccactatggctgcacaagaaaacaacttccaagactacttgcctgtgatggccaacaagcttggtggggatggcctaattgatgaactgtgcaatgggttcgatcttttgaaggattctgataaaggggtcatcacttttgagagcctcaagaggaattcttacttgcttggtcttcagggtctcagtgatgaggatcttcgctccatggttttggaaggtgactttgatggtgacggtgcactcaaccagatggagttctgtgtcttgatgttcagactcagccctgaattgatggagggctcaaagatgtggc

SEQ ID NO: 46268 - DNA, 382 bp, Glycine max
  Clone ID: LIB3139-099-P1-N1-C12
gatcgagataactagaaacagtgtgatgaaaatgaaggtccttgttttcttcgttgctacaattttggtagcatggcaatgccatgcgtacgatatgttccctctccgaatgaacactggctatggtgcccgtactccggaggtgaaatgcgcaagttggaggcttgctgtggaagcacacaacatctttggctttgagaccattcctgaagagtgcgttgaagcaacaaaggaatacatccatggcgaacaatatagatcagactccaaaacagttaaccaacaagcttacttttatgccagagacctcgaagtccatcccaaggacacatttgtgttcagtatagatggcaccgtactctctaatattccatactacaaa

SEQ ID NO: 46269 - DNA, 390 bp, Glycine max
  Clone ID: LIB3139-099-P1-N1-C2
gaattatggaatcctgcttgcacaaaagcaatgactatgtcatttaatccaaacccgtgttctgatgcatggagtttggaatttctgaagcgtaccggatttcattgtgatatcatttgtgtcactggatggactgccaccccaatgcaggatgttcaggttacaattgattggtttatttcttctcaggaatgtgttcccaggacctattgtgttttaaatccacaaaatccttttgtgttaaataggtggatggggaaactgactttcccccagggcacttcccgaagtgttaaaagaatgcctctttctataggggggggagctggtgcaaagaatgctattctcataaatatgccaaatgctgttctttcaatgtggagatatttt

SEQ ID NO: 46270 - DNA, 388 bp, Glycine max
  Clone ID: LIB3139-099-P1-N1-C3
ctcaagactgtgaattgtggaatcctgcttgcacaaaagcaatgactatgtcatttaatccaaacccgtgttctgatgcatggagtttggaatttctgaagcgtactggatttcattgcgatatcatttgtgtcactggatggactgccaccccaatgcaggatgttcaggttacaattgattggtttatttcctctcaggaatgtgttcccaggacctattgtgttttaaatccacaaaatccttttgtgttaaataggtggatgggaaaattgactttcccccagggcacttcccgaagtgttaagagaatgcctctttctatagggggaggagctggtgcaaagaatgctattctcatgaatatgccaaatgctgttctttcaat

SEQ ID NO: 46271 - DNA, 329 bp, Glycine max
  Clone ID: LIB3139-099-P1-N1-C4
cgctgaagaagtggtcgctgttcctgcggagaacccaccatctgaagccgaagctgaaaacatcgaagcagagaaggcccagagtggtgtagaagacaagatttcccagtcggtttcgttcaaggaggagaccaacgtggttggcgacctccccgaggcgcagaagaaagcccttgatgagctcaagaagcttgttcaagaagcgctcaacaaccatgagctaactgctcccaagccagaaccggagaagaagaaaccagcagcagagaagaaggaggaagttgaagtgaccagaagggaagaaggaagctgaagtcatagaagagaag

SEQ ID NO: 46272 - DNA, 390 bp, Glycine max
  Clone ID: LIB3139-099-P1-N1-C5
gtgaacgaggggcaccctgacaagctctgtgaccagatctccgatgctgtgctcgatgcatgcttggagcaggaccctgacagcaaggttgcctgtgaaacctgcaccaagaccaacatggtgatggttttcggagagatcacaaccaaggccaacgtggactatgagaagattgtgcgtgacacatgcaggaacattggttttgtctctgatgatgttggtcttgatgctgacaactgcaaggtcctcgtcaacattgagcaacagagtcctgatattgctcaaggtgtgcacggccacctcacaaagaggcctgaggagattggtgctggtgaccaaggtcatatgttcggctatgccactgacgagactcccgagctcatgcccttg

SEQ ID NO: 46273 - DNA, 388 bp, Glycine max
  Clone ID: LIB3139-099-P1-N1-C6
ctgatggttggtgtgaaaacccagagggatccccgggatagtatgcaccatggaggttggatgatgaaaattatctgctggtgccttctggtaatctttatgtttttcgttccaaatgagatcatcagcttctatgaaacaatatcaaagtttggctcgggcatgtttcttcttgttcaagtcatgctcttgttggattttgttcatggatggaatgacaaatgggttggatatgatgaacaattctggtacattgctctatttgttgtttcccttgtttgttatgtggcaacatttgcattctcaggagttctctttcacttcttcacgccatctggacaagactgtggactcaatgtctttttcattactatgaccatgattcttg

SEQ ID NO: 46274 - DNA, 384 bp, Glycine max
  Clone ID: LIB3139-099-P1-N1-C7
gtttgtttggggtcctgtggctgcacatatccaaccttaacttcggccgtcgaatctttctggtcattggttgtttttaattctttcaaaaattcaaacacaacccaaaatctcttgggaattgctagattcactgcttctcctagcagcagattttgggttcttctgacccaattattcattttccccaacttggtcttgttgaatttttattggggttgtaaattccttgttgttgagtttgaaagttatttcctttttccccttctggattcaagtcccaagtatttgcttaaattggggtattttttttatatcagaattgttgctttgaggttttccaaggcttgaaatctgaaaatgacgattggtagtctagcacct

SEQ ID NO: 46275 - DNA, 388 bp, Glycine max
  Clone ID: LIB3139-099-P1-N1-C8
gaaggccatgactgaaaagatagaacgcatggaactagaagcagagtctaaggataagcaactagtggagcttcaagaactctacaactcccagcaacttttgactgatgaattgagtgttaaacttgaaaaaactgagaaaagtctagaagaaactgagcagtcattgtttgatcttgaggaaaggcacaaacaagcaaatgcaacaatcaaggaaaaggaatttttgatatcaaatctcctaaaatctgagaaagcacttgtggagcgtgcaattgaactgcgagcagaactcgagaatgctgcatcagatgtgtcaaacctcttttctaaaattgagcggaaggataaaattgaagaaggaaacagaatacttatccagaaattc

SEQ ID NO: 46276 - DNA, 389 bp, Glycine max
  Clone ID: LIB3139-099-P1-N1-C9
aacgtgagaaacatggcttccttaagctccttagtgctgctccttgcagctctaattctatcccctcaagttcttgcaaactatgagaatcccccagtgtacaagcctcccactgagaaaccaccagtttataagcccccagttgagaagcctcctgtttacaaacctccagttgaaaaccccccaatttataagcctccagtagagaagccaccagtgtacaagcccccagttgagaaacccccagtgtacaagcccccagttgaaaaaccaccagtgtacaagcccccagttgagaaaccaccagtgtacaagcccccagttgaaaaacccccagtttacaagcccccagttgaaaaacccccagtgtacaagcccccagttgaaaa

SEQ ID NO: 46277 - DNA, 394 bp, Glycine max
  Clone ID: LIB3139-099-P1-N1-D1
tccaaatcgacgacctccgtcaccttctagtccatctcagaattctcctcatggcaatcaacctacacaagtgtcttctccaaggttggatgatgagcagaaacaggaggcagatcggcgtgcaaaatttgtatatgagctaatgattgatcatgcaccgccagctattgtaggtcttgttggtcggaaggagtacgagcaatgtgcaagggatttatattttttccttcagtcatccgttatcttgaagcagctggcttttgacatcctggagctgctgctgacatcggcatttccggagcttgataatgtatttaagcagctgcatgaagaaaagcataaatttggtgagttcagaacacagtaaatattacaattttcagacgaggcacgg

SEQ ID NO: 46278 - DNA, 361 bp, Glycine max
  Clone ID: LIB3139-099-P1-N1-D10
cgactccttaacggcactgctgagatttttggcaccgagcttccacccgaaatctggctcaatttccctcccagactcaagtttgctgtgtttacttggtatggtgcaaccattgaaatggatggcgctactgaaactgattatactgcagatgagactccaatggtcagttatgtaaatgtacatgctgtgctggatggaagaagaagtcgtgctaaagcttcatcaccagatgattctgtttcttctcagggccctagggtcattgttgtaggacctactgattctggaaagagtaccttgtcaaggatgcttcttagttgggcagctaaacaaggttggaaacctacctttgttgacc

SEQ ID NO: 46279 - DNA, 382 bp, Glycine max
  Clone ID: LIB3139-099-P1-N1-D11
tagaaagttagcagattgtgattttctcaagagaaactttaagcagatgtctaatgttttgtgggtggctcctgaagacaaggcgagtttatggtcacaacttcattatgtttcgtgtaataatctggaaatgcaagaagcttatcttgtcaatctcgtaaatgtgttacgagaactgtatttgcacagtccagaggaagctcgccaattgagaaggaaagctctctctcgtattgaatggctgcaaaaagctgatgtgcctaccatagcacagattgaagagttccattcgatgcagaggatgatgaatgctcctgattcaaatgataatattgatctactgttgagcattgatttgttgggtttacaaggagcaggcaaa

SEQ ID NO: 46280 - DNA, 383 bp, Glycine max
  Clone ID: LIB3139-099-P1-N1-D12
aaatgactcaagtgatgagaggagaggtgattgagaaggcttatgctgggtcttggaaggctcacaagtccccagacaagccttaccttattgaaaagatcaacagaaacgaccctcaagaagttatcttttgttttccaggatcaggtgctgtcagggattggtactctcagaaaaactttggtgaaacaaaaatagatcttggtctgtttccctcactcagaagcattggtatcgatgaacaagcttttgtgaatgaggcctttcagaaaaaattccaagaaattttgtctgccaaaccatcacttgcggatgaggtggagaaagcaatgagtaaaaagaagcaaatagtgtttgcaggacactcctctggtggtgcggtg

SEQ ID NO: 46281 - DNA, 387 bp, Glycine max
  Clone ID: LIB3139-099-P1-N1-D2
tctctctgtgtatttccctacctctcccttcaagatgcagatcttcgtcaagaccctcaccggcaagaccatcacccttgaggtggaaagctctgacaccatcgacaacgtcaaggccaagatccaggacaaggaaggaatccccccggaccagcaacgtctcattttcgccggaaagcaacttgaggacggccgtacccttgctgactacaacattcagaaggagagtactcttcacctcgtcctccgtctccgtggtggcatgcagatcttcgttaagacactcaccggcaagaccataaccctagaggttgaaagctccgacaccatcgataacgtcaaggccaagatccaggacaaggagggtatccccccggaccagcaacg

SEQ ID NO: 46282 - DNA, 323 bp, Glycine max
  Clone ID: LIB3139-099-P1-N1-D3
gtgatgataacttaattagtgttcatgaatatgtcaagccttactttagtggttctaaattgaaaagctttctagctggtcataatatcaccattactgatggtattgacaaaactagtgcaactttgcaatttagaaagttagcagattgtgattttctcaagagaaactttaagcagatgtctaatgttttatgggtggctcctgaggacaaggcgagtttatggtcacaacttcattatgtttcgtgcaataatctggaaatgcaagaagcttatcttgtcaatctcgtaaatgtgttacgagaattgtatttgcacagt

SEQ ID NO: 46283 - DNA, 305 bp, Glycine max
  Clone ID: LIB3139-099-P1-N1-D4
acatgagggatgccctcgtaagctgattggtcgagctgggcctaaagtttaaatttggggtattatgaaaagggcagcttattgtagtgaataacatactcatggaatggactgttgccataatactggtaggcaagattttggtggatatgctagttgatggttgtaccaacaagtatgacagaggcaaagataaagctttggggggatgaaaatgagcggaagccactctgtggctgtgtcaagatgcattgtagaagagttggaagtgatgggatcctttgattcgtcaagtattgcataca

SEQ ID NO: 46284 - DNA, 345 bp, Glycine max
  Clone ID: LIB3139-099-P1-N1-D5
gagcccatgagactaggctcggaaagcccactcaagcgatttcacgcacgtgcagcaagacacgctttaagaccttgtgtgtcaaatcgcttttagactttccgggatctgaagaggcgtcagagaaggacctcgtccacatttccttcaacgtcacgctgcagcacttctccaaggctctgtactcctccgcggccatgtcctacaccgccatggatccccgcgttcgcgccgcctacgacgactgcctcgagctcctcgacgactccgtcgacgccctcgcccgctccctcaacacagtctccgtcggtgccgtcggctccgccaacgacgacgtgctgacgt

SEQ ID NO: 46285 - DNA, 387 bp, Glycine max
  Clone ID: LIB3139-099-P1-N1-D6
gcagaacctaaccctcacgaaagcccttttcgattccgataactctcgttgttccgaaaccctaaccctaaccgggttttttcgtttgtttggattgaattggcatcggagggaggcgatcgattggaaattggtagtagtagtttagcgttgaagaacgatgtctgctgctgtgtgcggaagcaagagatctttcttcgaagagcttcctccttctccgccactctccaagaggctccgttgttcctcttcgccgattcgattccctcctccttcttccatcgaccaacttcgccctctctttccccacatggacgacttggttcttgagagagctctccaagaatgtggcaatgatatagatgctgccatcaagaggttgaatga

SEQ ID NO: 46286 - DNA, 384 bp, Glycine max
  Clone ID: LIB3139-099-P1-N1-D7
cttttgtgttaaataggtggatgggaaaactgactttccctcagggcacttcccgaagtgttaagagaatgcctctttctatagggggaggagctggtgcaaagaatgctattctcatgaatatgccaaatgctgttctttcaatgtggagatattttgttggagatctcgtctttgaagtttctaagatgacttctccctacattaaatgtacagtctctttcttcatagcatttggaaatttggctgatgacaccatcaattttgaggcttttccccacaagctggtgcagtttggagagattcaggaaaaagttgtgttgaaattttcacaagaggaatttcttacagcttggtcaactcaggtgcgtcccgcaacgactc

SEQ ID NO: 46287 - DNA, 386 bp, Glycine max
  Clone ID: LIB3139-099-P1-N1-D8
agagaggaaaaatgccgctcaagttggcgggaggagccactgtcggttcccttctcctatgtgttgctatttctctctttcacatcgctggggccgaagatccctacaggttcttcaactggaatgttacttatggtgacatttaccctcttggtgttcgccaaacgggaatattgatcaacgggcaattcccaggtccagatattcattctgttaccaacgacaacctcatcatcaatgtcttcaacagcttggatgagccctttcttctctcttggaatgggatccagcagagaaggaactcattcgaagatggtgtttttggaacaacgtgccccatcccaccagggaagaattttacttacatccttcaagtcaaagatcaa

SEQ ID NO: 46288 - DNA, 388 bp, Glycine max
  Clone ID: LIB3139-099-P1-N1-D9
ccaaacacaccaattgcatttgcattaccattcacaatggcaatctcctccacttccaactccctcattcccaccaaatctctaatcccccaatcccaccccctcattcccaacaccaggcccgccctccggcccaagcccggcccatccccttccatcttcgccgttcacgccgccgagcccgccaaaaaccccgtcgtcaccgacaagcccaagccccaagcccaacaacctcccccggcctcggcccgggcaacgaaatgggccgtggacagctggaagtcaaagaaagccctgcagctgcccgaatacccgagccaggaggagctggagtccgtcctcaaaaccctcgaggcttttcctccaatcgtcttcgccggtgaggcca

SEQ ID NO: 46289 - DNA, 273 bp, Glycine max
  Clone ID: LIB3139-099-P1-N1-E1
gtttttgatattctcttgggaatctctcaagattttgaaattgctggtaatactcttatgccagctttttctgttccacaggctactgccagatcttctgaaaatgcggaatcctctgcatgatctggaatttgtgttttctttctcttgttcgtttgtttaattcaataaaggaaattaggcatgaccctcttgttgagtatgctctgcctatttgaaaatttccacacctcttttaattgtcgtaatgatgtgtgaagtgtgtgttatttt

SEQ ID NO: 46290 - DNA, 378 bp, Glycine max
  Clone ID: LIB3139-099-P1-N1-E10
atcaaatggcaacagtgagaacaccattgaattttgattctagcaagcagagcttttgtcaattttctattgaccttctcggtggaggaattttagtggacaaaactggagattggatcacacttatacaaaattctccaattagtaacttgttgagagttgctgcttggaagaaaggttgtttaatggtcaagattgtgatgtctgggaatgcagcagtcaaaaggagtgattgggcctcattggtacaagtgtttttaacaaacagcaacagtacagagcattttgatgcatgtaagtggacaaaatcagaaccacattcctgggaattaatcttcccaatagaggtatgtggtcctaataatggttttgaaatgt

SEQ ID NO: 46291 - DNA, 372 bp, Glycine max
  Clone ID: LIB3139-099-P1-N1-E11
gaggagctggtgcaaagaatgctattctcatgaatatgccaaatgctgttctttcaatgtggagatattttgttggagatctcgtctttgaagtttctaagatgacttctccctacattaaatgtacagtctctttcttcatagcatttggaaatttggctgatgacaccatcaattttgaggcttttccccacaagctggtgcagtttggagagattcaggaaaaagttgtgttgaaattttcacaagaggaatttcttacagcttggtcaactcaggtgcgtcccgcaacgactctgttggctgatgggtgcccatatttgtatgctatggtgcatgatagttcagtgtctacaataccaggtgattttg

SEQ ID NO: 46292 - DNA, 301 bp, Glycine max
  Clone ID: LIB3139-099-P1-N1-E12
ctcacgaggagccacttatttcttcacactgcacggtgccaagtgcagacccgaggggaaattgctgacgttctccacctaacaagacaaacgcaacaactaccggtcaccttaatacaggttcgactgggtcatctaaagcgatcaggaacgttatctatacttctactactacgaccactactacttcttctggaagtgtgagcatgtacataaataccaggttgtcatggtttagcggtcggcagacttatacatatggacatgatcttacctacctctaatttgaagagcttcactt

SEQ ID NO: 46293 - DNA, 364 bp, Glycine max
  Clone ID: LIB3139-099-P1-N1-E2
gtttgggattgtcaataaggaaactcaaacagtctacagtttttgatattctcttgagagattcccaagagaatatcaaaaactgtagactgtttgggatattctcttgggaatctctcaagattttgaaattgctggtaatactcttatgccagctttttctgttccacaggctactgccagatcttctgaaaatgcggaatcctctgcatgatctggaattcgtgttttctttcgcttgttcgtttgtttaattcaataaaggaaattaggcatgaccctctcgttgagtatgctctgcctatctgaaaatttccacacctcttttaattgtcgtaatgatgtgtgaagtgtgtgttatttt

SEQ ID NO: 46294 - DNA, 390 bp, Glycine max
  Clone ID: LIB3139-099-P1-N1-E3
gtcatttaatccaaacccgtgttctgatgcatggagtttggaatttctgaagcgtaccggatttcattgtgatatcatttgtgtcactggatggactgccaccccaatgcaggatgttcaggttacaattgattggtttatttcctctcaggaatgtgttcccaggacctattgtgttttaaatccacaaaatccttttgtgttaaataggtggatgggaaaactgactttccctcagggcacttcccgaagtgttaagagaatgcctctttctatagggggaggagctggtgcaaagaatgctattctcatgaatatgccaaatgctgttctttcaatgtggagatattttggttgagatctcgtctttgaagtttctaagatgacttc

SEQ ID NO: 46295 - DNA, 383 bp, Glycine max
  Clone ID: LIB3139-099-P1-N1-E4
cttctgagagtgtttggttgaaagtagcaaagatgtttcctttcgggcaaaagggtcaaaagataaaggggactatggtggttatgcagaagaatgtgttggatatcaacagcatcaccagtgttggagggatcgttgaccaaggcttaggcttcataggcagtgcagtcgatgcacttacttttgcagccaccaaaatctccatccagttgattagtgctaccaaggctgatggtgggaaaggaaaaattggaaagagtacaaatttaagaggaaagataacattaccaaccttgggagctggcgaacaagcatacgatgttaattttgaatgggacagtgacttcggaattcccggtgcattttatattaagaacttcatg

SEQ ID NO: 46296 - DNA, 385 bp, Glycine max
  Clone ID: LIB3139-099-P1-N1-E5
cccatctctcagggtcccaaaggatggggtcgcacttcctctgttcaagacacttctcagaattcaatcaagttcgtgaagcaagtagttctagaagatgaggctaaattaaagggaattccaccagaagattgctccaaaatcttgctatggcgtttcaattttcgtgcccgaaccatcacaaatcactaatttctagattctggcagtacaaaaactactttcctactactatatagaatgtattcatttttttctctcttttgcaaatttatcctatgtttatagttttattgattcttcctgttttcaaatttttgttagcttatgtaagtgagagggtcttctgctaagaagcaaaaacatttaaagcataaatgaactt

SEQ ID NO: 46297 - DNA, 344 bp, Glycine max
  Clone ID: LIB3139-099-P1-N1-E6
agttagtgagtgagtccacccaaatgctggtaattcttggactcattggtggaagtgtgtccatgaagaacgtagtagccagtaacaccgtaatgtctcatctctctcactcgtgacactttcttcatccctaacccattgtcatgagtgccctcaatttgaacgcatggccacgccccagatccagatccagatcccgatccccaacctttcacgccgtcaataagttacccttcttcaccgttaccaaacggagagcattctcgctctctgcggtgctcacggtcgagacggaagagaagccaccaatcttcgacttcaagaactacatgctttccaaagcg

SEQ ID NO: 46298 - DNA, 385 bp, Glycine max
  Clone ID: LIB3139-099-P1-N1-E8
tgcatgctctagctgtaagttttgccaaagttgacttatcaaagagattatttattgagtctgacctattacccactgagttgtgtgtggaggagttggcagtgagcagcaatgaagagcacaaggaactgaaaactaaagaggacagtgaactagccaataggatgtctaaagaattagatttagatgatctagctgcagatcagcttacatcatctaggtccagtagcatgtgccatgctgtttctacattccccttgtgcaacaatgtgtttcacattcctgtaaactatgtcaatgctgaagctcagcaaactagctgttctagtaaaaataaagcatttgttccatgttcagatgctagtctacattctactgaagatgc

SEQ ID NO: 46299 - DNA, 379 bp, Glycine max
  Clone ID: LIB3139-099-P1-N1-E9
ggaaaagacagaaagagcaacgtcagagagtttgccgtagggttctccttggtttgtggtttccggtattgttttgcactgcttcagatacagagagaagggaatccttcttctctctctctctctttctcttttcctgagtttgaacttggagtaactgagtctatatttttgttcatactagtgtggtcatcactggattttcttggtatatataaaaaaaaaacaaaatattgtctcttgggttggttccaaacaagtagaggaaactatcaattaagtttatagtattttgcttcacagatgtacagaactctctccacttttcattttttttattcccgcagattattttttctttgttggggtttcaaagagt

SEQ ID NO: 46300 - DNA, 247 bp, Glycine max
  Clone ID: LIB3139-099-P1-N1-F1
agagaactacacactggaatcgttcaccgtcgaaggcagcgacggagtgaagctccgtacaagggtgttcaagccagatgctggaacagaagcggatgggaagttggggatcgttctggtgcacccgtattctattttgggtggctgccagggtctcctcaaaggaatcgcttctggcttggctctcaatggttacaccgctgtcacctttgacatgagaggcgttggcaagtccaccggcagggct

SEQ ID NO: 46301 - DNA, 375 bp, Glycine max
  Clone ID: LIB3139-099-P1-N1-F12
ctcttctttctctctctaccattgccatggatccctacaagcaccggccatccagcgccttcaattctcccttctggactacaaattctggtgctcctatttggaacaacaactcctctttaaccgttggagctagaggtccaattctgctggaggattatcatcttgtggagaagcttgcaaattttgatagggaacgtatcccagaacgtgttgtccatgccaggggcgctagtgcaaagggtttctttgaggtcacccatgacatttctcacctgacatgtgcagatttccttcgagcccctggagttcagacgcctgtaattgttcgtttctcaactgtcattcatgagcgtggtagccctgaaaccttga

SEQ ID NO: 46302 - DNA, 391 bp, Glycine max
  Clone ID: LIB3139-099-P1-N1-F3
gttttggagattcattacattaccctcttatatataacttgttacttagatttgtcttcttctttttttatctctcaacggagagacagaaaaaaagaaagaacgaaagagtgattaattagagggacatgagaacaaggagaggtgcgtgttatcctggtgtagtctcaaggatgtgctccaatgtgagggttacgaagaaaaaaagcaaggatctgcacatgcatatgcatgttcctgccggagactccattatttatagccggaaaaagcagaagaaaacgccggaaaaactcgccgccggtcgttacgattttttcgagtccttgccggatgacctcgtaatctccatcttctgcaagcttagttccaccgccactaaaccttccga

SEQ ID NO: 46303 - DNA, 387 bp, Glycine max
  unsure at all n locations
  Clone ID: LIB3139-099-P1-N1-F4
ccagtcttcagaaacttgagatgaggggatgttcctttttcagtgagtatgcactagctattgctgcaactcaactgaattctctcaggtacctatgggtgcaagggtatggagcatctccatctggacgcgatcttctggcaatggctcgcccctattggaacattgagttgattccttctagacgcgttgttgttagcaatcagcaagaagagcccgtagttgttgagcacccggctcatattcttgcatattactctcttgctggcccaagaacagattttccagatactgttatacctttggatcctgcaacatatgttgacacctaaacttgtacatnaccatttttttttttcttcttcttctttccaagggttttttttt

SEQ ID NO: 46304 - DNA, 384 bp, Glycine max
  Clone ID: LIB3139-099-P1-N1-F5
gggaaaactgactttccctcagggcacttcccgaagtgttaagagaatgcctctttctatagggggaggagctggtgcaaagaatgctattctcatgaatatgccaaatgctgttctttcaatgtggagatattttgttggagatctcgtctttgaagtttctaagatgacttctccctacattaaatgtacagtctctttcttcatagcatttggaaatttggctgatgacaccatcaattttgaggcttttccccacaagctggtgcagtttggagagattcaggaaaaagttgtgttgaaattttcacaagaggaatttcttacagcttggtcaactcaggtgcgtcccgcaacgactctgttggctgatgggtgcccata

SEQ ID NO: 46305 - DNA, 385 bp, Glycine max
  Clone ID: LIB3139-099-P1-N1-F6
ggcttaactcaattcaactcagctattctctcttctctataagttcctctcctgcattgtttttccctcccattcttccatttctgttttctcccatccctctcgcgcgctctctctcccatggaatcctccgctgccattcgatcttttcactatcccataggcactatgtcccatgtgcgagcctcccttgagaagcaggctgtagttcccattcataatgccggatggaactctaaaagtaggcttttcatccagcatttggcatatggtcagaagcacattaattcccacacgaaggggaaaaacacactaatttcatgtggaaaaacagctgaagctatcaacgcatccaaatctgatgcttcttcagataacactccac

SEQ ID NO: 46306 - DNA, 388 bp, Glycine max
  Clone ID: LIB3139-099-P1-N1-F8
ctccatcatcgacatggacgccgatgttatcaccattgagaactctcgctccgacgagaagcttctgtcagtcttccgcgaaggtgtgaagtatggtgctggaattggccctggtgtctatgacatccactccccaagaataccaccaactgaagaaattgctgacagaatcaacaagatgctggcagtgctcgagaagaacatcttgtgggtgaaccctgactgtgggctcaagacccgtaagtacactgaggtgaagccagccctcacaaacatggttgccgcagcaaaactcatccgcaacgaacttgccaagtgaatggtataagaaagtagaatcttccaagtcatttggttctgctttatattataatacaccaaagaaaat

SEQ ID NO: 46307 - DNA, 371 bp, Glycine max
  Clone ID: LIB3139-099-P1-N1-F9
caacaaattaaattagtggttaaggttgttggaggagctctaacaagagatggagacacaaaattggttcgaaagagtgaagcctttagcagctgtggtatcaatgcagtttggatatgcagctatggatgttctatccaaggctgcaatgaacaaagggatgagcaactatgtgtttgtcgtttatcgtcatgctgttgcattctttgttatggcccctttggcatggttttttgacaagaaagtaaggccaaagatgacattatcaattttcatgaagatagcggtgctcagcttgctagagccagttattgaccagaatttgtattttttggggatgaagtacacaacagcaacctttgccgttgcca

SEQ ID NO: 46308 - DNA, 381 bp, Glycine max
  Clone ID: LIB3139-099-P1-N1-G10
cttgtgacaaaattcctagtgtcttgactacaactgatgagagattggtaggcacagaacatgagggatatgatccttttcttggtggaattcaaaaatatgccactcccatgatgcccctagatgaagaaattctttctaaggttgcacaagatatggttgaggaatggtttgattgtgttgatgaggaggattcctttgaggaagtttctttaagtgcagcacttaatggtgttgagggtttggactatatggaaagaattcctcttgccacatctgagggttttcctcatgtgctttcacgcaaaaatggcgaaaaaggcaaaaggagatttgtctctggggatggtgaagagatgacattgattccaggaaccagtg

SEQ ID NO: 46309 - DNA, 381 bp, Glycine max
  unsure at all n locations
  Clone ID: LIB3139-099-P1-N1-G11
gcttcgccacgtcnattcgggaaaaaacttaaccaaactagagcgtgtccaacacgggatcaagcgtggaaagagcaggcttcagaagcttaatgcaatggtgttggcagcatcatcaacacctgattctgaagatcagttagaagcccctattcacgcaggaaatggagagtacttaatagagttagccattggaacaccaccagtgtcttaccctgcggttttggacactggcagtgaccttatatggacacagtgcaagccttgcacacggtgttacaaacaaccaacacccatttttgatcccaagaagtcctcttctttttccaaggtttcatgcggtagtagcttgtgcagtgctttgccttcttcaacatgcag

SEQ ID NO: 46310 - DNA, 343 bp, Glycine max
  Clone ID: LIB3139-099-P1-N1-G12
ctcatgttgcgccacttgcttattctttgtgcaaggggcgaggcggggcttcgatgggaaattgctgctcaaattcaactaacacccttacccgaacaactaatggtcacctcagtacacaatcaacttcatcatcttacgcgatcatcaccattagctatacttctactactacgacatctactacttcttctgtactcacgagcatctccataaatagcacgatctcagagtcaagcggtggtaaatcttatccaaatgaacagatcttacctacctctaatttgatgatctccacttttgccgagtcgtaagctgccactagtaatttaagagctgatac

SEQ ID NO: 46311 - DNA, 386 bp, Glycine max
  Clone ID: LIB3139-099-P1-N1-G4
ttcctcaatcctggttttggaattcgacaatggagcagaagaggagcagcaagatgtacaacctgttcgtgaagcacttggacgggaaaaccctaaccctcctattcccctctccgatcctctacgcgagttccatcaaggatcgcctcttccaactcactggaatccccgcccaccaccagcgcctcgtcaccggctgtcgccacctcaacgatgacaaatccgctatccagtgctccccgggggacggcaacatgtttccctccgtgcgcctcctcctgcgcctcaagggcggcaagggaggctttggctcgcttctccgtggcgccgccaccaaggccggccagaagaagaccaacaatttcgacgcgtgccgcgacatgagt

SEQ ID NO: 46312 - DNA, 427 bp, Glycine max
  Clone ID: LIB3139-099-P1-N1-G6
agcttgacgcgtacgccgctcgcgtttggtctcgagacggctcgagcgccacttcgttgcttggtgatgtccctttctgttctcttcaggcttggtcttgcgagagaaagccatgccagagacgaagatttttggcatgctgtttggccaaacactcccattccaagttcattgcgagatcttctaaagcctggccctgcaagtgttgaaatcgatgatcaccctatgcaaattgaagaaacacagtacccgaaaaccttcttctataaagaagaccttcatccaggcaaaacaatgaaagtacaattcagcaagcctccctttcaacaaccatggggtgttggtacatggttaaaggaaattaaagacactactaaagaaggatatagttttgaagagctatgcatcaagaaagaagccattgagg

SEQ ID NO: 46313 - DNA, 220 bp, Glycine max
  Clone ID: LIB3139-099-P1-N1-G7
ggcgttgcgtgtaaagggaatgcctatgcaattattgtcatgttgcataatgtgagatgcgtcttttatgtttatgaaacatgacaataattgcataggcgttgcgtgtaaagggaatgggtcctccaaaactgaacgaaaattcatggagtatattcaccttcattttggtgtagttctagtcacggatgaatcggatcacatgctgctattctatctc

SEQ ID NO: 46314 - DNA, 384 bp, Glycine max
  Clone ID: LIB3139-099-P1-N1-G8
ctcgagccgttcttttttttataagaagaagaggagagggaagaggatgtttatgacaatggaggggatgattgacagggatgtgagtgattgacacaggagctgccctaagtgttccagtaggtggagcaactctaggacgaattttcaacgtgcttggagagcccattgataatttaggtcctgtagatactcgcacaacatctcccattcatagatctgcgcctgcctttatacaattagatacaaaattagccatttttgaaacaggaataaaagtagtagatcttttagctccttatcgtcgtggaggaaaaataggacttttcggtggagctggagtgggcaaaacggtactgattatggaattgatcaataacattg

SEQ ID NO: 46315 - DNA, 182 bp, Glycine max
  Clone ID: LIB3139-099-P1-N1-G9
ggtttacattatagatcctgtgaatgtacttgtgaaactatgcaccttgatgtattgtgtgcttgcatttgaagggaccattttcattaaatgtcattcagaacagtagattatatattatacccttatgttatatgccatgtcattgtggatagaaatggatgacctaaaatttctgcttt

SEQ ID NO: 46316 - DNA, 380 bp, Glycine max
  Clone ID: LIB3139-099-P1-N1-H1
attttctgcactaggttgtcaggcaattgcaagggcaggatggagatatagtgggagaagaagttcctacaacaccaaaaaaaatatttcagcttttaaatgaggtaattgaagctctttcttctgtgtcatctcctgaactggccctgaaactgtatctgcaatgtgctgaggctgctaatgactgtgaccttgagcctgttgcttatgaatttttcactcaggcatttgtattatatgaagaagaaattgcggactccaaagcccaggtaactgcaatacatttaattattgggtctcttcaaagaatgaacatctttggcgttgagaacagggatacattaacacacaaggccacagggtattcaacaaagcttttg

SEQ ID NO: 46317 - DNA, 367 bp, Glycine max
  Clone ID: LIB3139-099-P1-N1-H11
gggctcaatcctggtatttcaggttctcgtcttttgggtaccatgcctcagtctatttcacagcaaactgtttggaatcaaatggcaacagtgagaacaccattgaattttgattctagcaagcagagcttttgtcaattttctattgaccttctcggtggaggaattttagtggacaaaactggagattggatcacacttatacaaaattctccaattagtaacttgttgagagttgctgcttggaagaaaggctgtttaatggttaaaattgtgatgtctggaaatgcagcagtcaaaaagagtgattgggcctcattggtacaagtctttttaacaaacagcaacagtacagagcattttgatg

SEQ ID NO: 46318 - DNA, 232 bp, Glycine max
  unsure at all n locations
  Clone ID: LIB3139-099-P1-N1-H12
ctcaaacgacacaaactctgtaatgtaagtgataagggttcccaggtgatgggatctgaatctaatcagagaagtaccaattagcgattctgcttgtgtgctataatcctcttagttacgataatctgtttcttccttattattggaactgatttattgttatgttgaaagtaaggccaatnttaatatatttatatttattaaataaaattatatatttaataatatttat

SEQ ID NO: 46319 - DNA, 369 bp, Glycine max
  Clone ID: LIB3139-099-P1-N1-H2
cggctcgagcgaagataccttctttcagcctcccttcaacacccttttggccctttattcttcaaagtctcaaagcaaagctcgaagacctgagaagaacaaagggttgattaaattctgtgtggttgttgttggaggttgaaacacaagttgccaccccaagtgtgtgttaatcttaaatttcacaagcaagttgcttttttggagtattatattgtatgaccaaatatttttgtgttttaggactagatattttgcttctggtggcaatttttctcttcttcttctggttctcatcctttgtgttcttctttgtctctcatctgtctgaggatttttccatcttagttcctggaggcaccaggaacc

SEQ ID NO: 46320 - DNA, 369 bp, Glycine max
  Clone ID: LIB3139-099-P1-N1-H3
ctgagatgacagagcctcctagtgtgctgcccctccaaataatgttaatccttctccttatcaaaagtggcagcagcaacaatgagtgtggggaatggtcttgcggctctggccaaccacctatcagatttcccttcaaactcatcaagggaattaaagatgaatgtggttatccggggttttgtctatattgtactaaaaaaaatgagactatgcttgctctctcctccgtaaaactccaagtcagttacataaactacgaaaatcatgaaattgggttgaaagacccggaaaattgccttccgcacaagtttctgcaaatcaacgattctcttattcatccttacaaatttgacgatgaagctaaaa

SEQ ID NO: 46321 - DNA, 394 bp, Glycine max
  unsure at all n locations
  Clone ID: LIB3139-099-P1-N1-H6
ctatgacgcgtnctgcacgcgtgcgtttgctctcgagctagcacacacaacttgctatagcagtaagctataactcatttgaggctctgtgagaattgagaaatggctaaagatgttgaggttcaagagcaaggaggagagtactctgccaaagactaccatgaccctcctccagcacctttgttcgacccagaggagctcacacagtggtccttctatagagccctcatcgctgagttcatagcaacccttctcttcctttatgtcactgtgctcaccattattggctacaaaaggcagactgatacaacggtaggtggcaccgactgtgatggggttggcattttgggcatcgcttgggcctttggtggcatgatcttcatccctgtttact

SEQ ID NO: 46322 - DNA, 349 bp, Glycine max
  Clone ID: LIB3139-099-P1-N1-H7
gaagattctggtgaatgcgtagaaaaggaaaataaagaaattagcgtgaaaaatgttgggtgtgttcagcagctccatagtgtcgccgccggaggagctcgttgccgccggcagccgtacaccgtcgccgaagatgacggcggcggcgctgcggaagtggttcgaggagaagaacccctccgcagtgtcggtggaggtcggagagcatgtccagctcgcttatacccaccagaacgagtcgccgtttcagcccagatcctttgctgtgaaggatgaggtattctgcttgtttgagggagcccttgacaatttgggcaacttgagacaacaatatggattggccaagtca

SEQ ID NO: 46323 - DNA, 339 bp, Glycine max
  Clone ID: LIB3139-099-P1-N1-H8
ctctgtctttcttctcggtgaagtcaaggttgttctgttcttctacgcagacacacacacaaacacataacataacgcccctccttctcttcttctttcccttcaaattctatttcttcatccattttgtgctccaaacagcacaaacattacaatcacaccggtgttcttcgctttctactcttctaaaagtgacttaacagctcatattgaaacttacctacagaatagaggatcatgggttgctttggcttctgcaaaggagatgatagtgtcacagttgctgacagaggacctttcatgcaaagcactcctactgggaaccccagttatcatgga

SEQ ID NO: 46324 - DNA, 386 bp, Glycine max
  Clone ID: LIB3139-099-P1-N1-H9
accttctcggtggaggaattttagtggacaaaactggagattggatcacacttatacaaaattctccaattagtaacttgttgagagttgctgcttggaagaaaggttgtttaatggtcaagattgtgatgtctgggaatgcagcagtcaaaaggagtgattgggcctcattggtacaagtgtttttaacaaacagcaacagtacagagcattttgatgcatgtaagtggacaaaatcagaaccacattcctgggaattaatcttcccaatagaggtatgtggtcctaataatggttttgaaatgtggagttctgagtgggcaaatcaaacttcatggcatttgagtttccttattgacaatcccaaacagtctacagtttttgat

SEQ ID NO: 46325 - DNA, 92 bp, Glycine max
  Clone ID: LIB3139-100-P1-N1-A10
gcatgaccctcttgttgagtatgctctgcctatctgaaaatttccacacctcttttaattgtcgtaatgatgtgtgaagtgtgtgttatttt

SEQ ID NO: 46326 - DNA, 435 bp, Glycine max
  unsure at all n locations
  Clone ID: LIB3139-100-P1-N1-A12
gttcatttctctttttacctgtgttctcttgttcgtgatttgatgcagagaatgactaaacaatacatttaataacaggcaaatggacttgtttcttacactgagtttataaaaattgtagattataatgttgttacttttcaactactttccttctctttgaatctgttcctgttaatgctataaatgtagagcttgcatatagtatggttgtgagtgaaaggtgtgatgtgtacagctttggagtggtggcactcgaaactttggtgggatcgcatcctaaggaaatactctcatcacttcaatcagcatctactgagaatggcatcacattatgtgaaatattgaaccaacgcctnccacagccaacaatgtcagttttaatggaaaatagttagtgttgccatagttgcatttgcgtgcttaaatgccaat

SEQ ID NO: 46327 - DNA, 515 bp, Glycine max
  Clone ID: LIB3139-100-P1-N1-A2
aaaaggatgagaaaggtgtttccgattgtgatgatttgctcgctggattcggacacagtaggtcatcatctggtggaaggcacactcctgatatcggtttatcctcagaaccaactgccagtgcatctaaaacaatccccactgcagcagaagaccctttcaaagtatttgaatcagcttcagccccagtggattcatctgcaggccactttatgaacccgttggaagaaattagtaaatttagtagttctggtagcacaaaaaatgatagttgcttaacttcaaatggcaaagcgtatgaagatattgatccctttgatggtcttggaaaatctgtaccagctttctcatcagagagaaaataccgggagggtagcagtttcccaaagttgaatacaagcacaagttggactggagataaagaaccagctgataaaatatctgggaggagtcctgagaggcacacacaaaacaagattcctgttgaaaatgatccggcaattctacatgcccca

SEQ ID NO: 46328 - DNA, 544 bp, Glycine max
  Clone ID: LIB3139-100-P1-N1-A3
tcggttcaggctggacccgttcgagccgttaactttctcgctccccaaacgcccctctctctcctccaatggccgaccagctcaccgacgaccagatcgccgagttcaaggaggccttcagcctcttcgacaaggacggcgatggttgcattactaccaaggaacttgggactgttatgaggtcacttggtcaaaacccaactgaggcagaactgcaggatatgataaacgaggttgatgctgatggcaacggaaccatcgatttcccagagttcctcaacctgatggctcgcaagatgaaagacaccgactcagaggaggagcttaaggaggctttccgtgtgtttgacaaggatcagaatggtttcatctctgcagctgagctccgccatgtcatgacaaatcttggggagaagctgacggacgaggaggtggatgagatgatccgtgaggccgatgttgacggtgatggacagatcaactatgaggagtttgtcaaagtcatgatggccaagtgaggaccattccaaccataacctaaatt

SEQ ID NO: 46329 - DNA, 593 bp, Glycine max
  unsure at all n locations
  Clone ID: LIB3139-100-P1-N1-A4
gcttgacgtccatgccgcgacgtagctcggattcgctcgaggaatatgtcaagccttactttagtggttctnaaatgaaaagctttctagctagtcataatatcaccattactgatggtattgacaaaactagtgcaactttgcaatttagaaagttagcagattgtgattttctcaagagaaactttaagcagatgtctaatgttttgggggtggctcctgaggacaaggcgagtttatggtcacaacttcattatgtttcgtgtaataatctggaaatgcaagaagcttatcttgtcaatctcgtaaatgtgttacgagaattgtatttgcacagtccagaggaagctcgccaactgagaaggaaagctctctctcgtattgaatggctgcaaaaagctgatgtgcctaccatagcacagattgaagagttccattcgatgcagaggatgatgaatgctcctgattcaaatgataatattgatctactgttgagcattgatttgttgggtttacaaggagcaggtaaagcttttccaaacaagattgcttttgatgacaagcttgtgttggctaacacacaagaattcttt

SEQ ID NO: 46330 - DNA, 572 bp, Glycine max
  Clone ID: LIB3139-100-P1-N1-A5
agatgctctcataatcctcacaagtgctgttccaaagataaaacctgggtttgatcctaccaaaggacaaagaccagagttctattttgatgatggtgcatatcctgagcaggttgactggattgggcagaaaaatcaaatagatgccgctaaggctgctggagtgaagcacattgtgttagtagggtctatgggtggaacagatcttaaccatcctttgaacagcttgggtaatgggaatatactggtttggaaaaggaaggctgagcaatatctggctgattccggcatcccatatacaattataagggctggtggcttgcaagacaaagatggaggtcttcgggaactacttgtagggaaggatgatgagcttctccagactgaaaccagaaccataactagatctgatgttgcagaagtctgcattcaggcactaaattatgaggaggctaaattcaaggcatttgacttggcgtcaaaaccagagggagctggttcagcaacaaaggacttgaaggctttattttcccagatcaccactcgcttttgattttggatggtggtggcat

SEQ ID NO: 46331 - DNA, 509 bp, Glycine max
  unsure at all n locations
  Clone ID: LIB3139-100-P1-N1-A6
ggggacccaacaaaaactcattcgttttaagcacaggtcaagaagaagaacaacaaccacaacagggggatatctcagatatcatcatgggcgttggagcgcgccatctcaatctcttcccttctgaactcatcaccaaccggcaagtgatggattctggtgaggcgaatatgatgaacatgtacaacaacagcactccgagtgggggggactctacggttctgccgagatacggcgccgccacagagacagggctttcgtgctcgggatttaaacattctgtcgccaacgccgtcaaatacgaaagcggggttacctacaacaacaacaacaacaacaacaacggttntgtttcttccatgtcgagaaagcggtcccgcgataataacaacaattacggttgcaacaacaacaacaacgagtcattttcgtttctcggccaagacgtttctctccagatccagcagcagcaactcgacatcgagcatttaatcatgcaacgcatggag

SEQ ID NO: 46332 - DNA, 498 bp, Glycine max
  Clone ID: LIB3139-100-P1-N1-A7
cacaaaagcaatgactatgtcatttaatccaaacccgtgttctgatgcatggagtttggaatttctgaagcgtaccggatttcattgtgatatcatttgtgtcactggatggactgccaccccaatgcaggatgttcaggttacaattgattggtttatttcctctcaggaatgtgttcccaggacctattgtgttttaaatccacaaaatccttttgtgttaaataggtggatgggaaaactgactttccctcagggcacttcccgaagtgttaagagaatgcctctttctatagggggaggagctggtgcaaagaatgctattctcatgaatatgccaaatgctgttctttcaatgtggagatattttggtggagatctcgtctttgaagtttctaagatgacttctccctacattaaatgtacagtctctttcttcatagcatttggaaatttggctgatgacaccatcaattttgaggcttttccccacaagct

SEQ ID NO: 46333 - DNA, 428 bp, Glycine max
  unsure at all n locations
  Clone ID: LIB3139-100-P1-N1-A8
cggctcgagcttaaccctggaggctcaagggcctgtgcagttgttcttttcataatctgctgggtgtttttcatcatagctgaggtgtgcttgttggctggatcagtggaaaatgcctatcacaccaagtacaggaccatcttcggggagaatcctccgtcttgcgaaacagttaggaagggagtctttgctgccggtgctgcttttgttttcttcactgccataatctctgaattctactatatcaactactcaagggcaagggaaagcttncaaccttatgctggcggcgagactggtgtcggtatgggaacctacaaatgagcttctagttaagaattttacagcaaacatttaggtgtgactatatctggagtctggattctgcagcacatttccttgattttagggcatttattggatttact

SEQ ID NO: 46334 - DNA, 380 bp, Glycine max
  Clone ID: LIB3139-100-P1-N1-A9
gtccataatagtaattataaggaagatcgtacttgttatggccaacctggcggaggaattaaagttaatcccgggcccgggcattgataatttactcacaagaatcatgccaagcatcctggcgacgaattgaatatatatatatatatatatatatatatatatatttgtgattaatgtttgataattaaatcggtgatttgtatacatatatatgtacgtgtgcgtaggtaagttacgagaaattcttaactgtgttccttccaaggatgcaagaatttctcagtacccatataatcatagaactgagtgtatctcagtatctgtatgtgtcgcctttgatcagtgtatataccaataaaggagtgcttgtagtaatt

SEQ ID NO: 46335 - DNA, 472 bp, Glycine max
  Clone ID: LIB3139-100-P1-N1-B10
aatcccttctggatttccgctcacagttatttgcaatagcatttttaatgagatgctcattagatatagctatgaaaaattactgcgccaggctaaagctccaagtatgtttttacaatccttcaaaaattttgtttctttgtgtgtgtatggtgatgataacttaattagtgttcatgaatatgtcaagccttactttagtggttctaaattgaaaagctttctagctggtcataatatcaccattactgatggtattgacaaaactagtgcaactttgcaatttagaaagttagcagattgtgattttctcaagagaaactttaagcagatgtctaatgttttatgggtggctcctgaggacaaggcgagtttatggtcacaacttcattatgtttcgtgcaataatctggaaatgcaagaagcttatcttgtcaatctcgtaaatgtgttacgagaattgtatttgcac

SEQ ID NO: 46336 - DNA, 558 bp, Glycine max
  Clone ID: LIB3139-100-P1-N1-B11
cttctacgtgttctccattccctctctcactcctccatctacgtttcttaaatcatttccttctttctctctttctttatcttctcattttcctcattacactcttttttttctctcaacttttctcttattaaccatagttcacatattatatcatcacatatcatagtgatatattatatcatatcacaatgtgtggcatacttgctgtgcttggttgctctgattcatctcaagccaaaagggttcgcgtccttgagctttctcgcagattgaagcaccgtggtcctgactggagtgggctccaccaatatggtgataactatttggctcatcaaaggttagccatagttgatccagcttctggtgatcaacccctcttcaatgaagacaaaactgtcgtggttacggtgaatggagagatctacaatcatgaagaactcaggaaacagttgcctaatcacaccttccgtacaggaagtgactgtgatgttattgctcacctgtatgaggagcacggagaaaactttgtggacatgcttgatgggtatattttcg

SEQ ID NO: 46337 - DNA, 520 bp, Glycine max
  Clone ID: LIB3139-100-P1-N1-B12
gtgcccctcttctaattcttctctcaaaaggactgaacgaaaaaaccttagggttcctctgttcttcttcgccccccaaaaaattttctggctcagagaaattcaaccgttctcgccattgccgaagctccaactccttgcatttccaactcttcacccaaaaccctttttgttggaacagagtttcagagagagacccttcacaacatggcaaaaacgaggccaggcagaaaagacttggattcctacaccatcagaggcaccaacaagatcgtaagagctggggactgtgtgctgatgcgcccctctgatacgagcaagccaccgtacgtggcgcgcgtggagaagatcgaacaggatagtaggaacaacgtgaaggtgcgtgtgaggtggtattataggcctgaagagtctattggaggacgcaggcagtttcatggagcaaaggaacttgttttgtctgaccattatgatgttcagagtgctcacacaattgaagggaagtgtatcgtgcactctt

SEQ ID NO: 46338 - DNA, 349 bp, Glycine max
  Clone ID: LIB3139-100-P1-N1-B2
acacaaataactcggtgtcagtgtgagcagttgataagagagatgatgatcaacgtgaaggaatcgaccatggtgcggacggcggaggaggtggcgcggcggatggtgtggaactccaacgtggacctggaggtacacaattggcacacgcccagcgtatatttctataggcacaatggcgccacacacttttttgacagcaaggttatgaaagaggcactgaccaaggggctggagcccttgtaccaaatggctgggcggatcatgcatgatgacgacggacgagtggagatagactgggacgggcatggggtgcttgtcacggaggtcgtcactgggggcgtgatct

SEQ ID NO: 46339 - DNA, 512 bp, Glycine max
  Clone ID: LIB3139-100-P1-N1-B5
aaaagcatggactatgtaatttaatccaaacccgtgttctgatgcatggagtttggaatttctgaagcgtaccggatttcattgtgatatcatttgtgtcactggatggactgtcaccccaatgcaggatgttcaggttacaattgattgggttatttgctctcaggaatgtgttcccaggacctattgtgttttaaatccacaaaatccttttgtgttaaataggtggatgggaaaactgactttgctacagggcacttcccgaagtgtaaagagaatgcctctttctatagggggaggagctggtgcaaagaatgctattctcatgaatatgccaaatgctgctctgtaatgtggagtatatattggtggagatctcgtttttgaagtttctaagatgacttctccctacattaaatgtacagtctctttcttcatagcatttggaaatttggctgatgacaccatcaattttgaggcttttccccacaagctggtgcagtttggagaaa

SEQ ID NO: 46340 - DNA, 532 bp, Glycine max
  Clone ID: LIB3139-100-P1-N1-B6
gatgaaccttgggtggtcctgctaattaggaatcctttgacaagcagaaattggatgatgaaccatgggttgtcctgctaatggaaaaagtggcttgggtacgttgaatgacaatggtcggaatctagtacctttagtgggtcctccaacttctgcttgtaaaaggattcctaatttggctcagatttatctgcttggtttctacgaggaacgcgaatttgccttatatgtatcttctatctcaaatgagcttaaagtccctgttagatacttgaaggaagacaggccacatggttcagctggtggtctttatcattttagagatctgatcatggaagaggatccgtcacatatcttcttgctgaactgtgatgtatgctgcagttttccactgccagaaatgctggatgctcataaaagatatggtgggatgggaacaatactagttgtcaaggtttctgcagagtcagcaagtgagttcggggaattagtagctgatccaaccactaatgaactattgcattacacagag

SEQ ID NO: 46341 - DNA, 291 bp, Glycine max
  Clone ID: LIB3139-100-P1-N1-B7
ctcgagccgattcggctcgagtgaatatgggttcttcttcccctgcggacactagcaagagcataaagctagagcgatacaacagctacatccggagactcaacagcaccaagctcctcaacgcctcctccaaactcctcttccgcgccactctcttggtcgcactcatcctcgtcttcctcttcaccttcaactacccttccctgtccgccaccgactccacccaccggcaccttcacgcccactcccactacttcctctcctactcctccttcggcgcctgggagaagc

SEQ ID NO: 46342 - DNA, 523 bp, Glycine max
  Clone ID: LIB3139-100-P1-N1-B8
ctcaagccgattaaccttttgtgaatatgctaactactaaccctcggcccactagcaagagcataaagctccatcgatacaacagctacatgaaaagactcaacagcaccaagctcatcaacgcctcctccaaactcctcttccacgccactctctagctcgcactcatacaaggcttcctattcaccttcaactaccctcccctattcgccaccgactacacccaccggcacctgcacgcacactcccactcctttatatgatacaacaccgtctaaggctcaaagcaacacgtccgacactccgcctccccccgccgtcccaacggccttaccgtgcttgtcactggagctgccggcttaatgggcagccactgctccctggccctgaagaagcgcggcgacggcgtactggggcttgacaacttcaacaactactacgacccttaccttaaacgcgcccagcaggcaatgctctggaaacaccaagtgttcatcgtggaaaggtgaccctcaacgacacc

SEQ ID NO: 46343 - DNA, 437 bp, Glycine max
  Clone ID: LIB3139-100-P1-N1-B9
cgatcagtctcttaaggatgcattttctggctttggagatgtggttgatgcaaaagttataactgacagagactctggaagatcaaggggatttggatttgtcaacttctccaatgatgagtctgcaagttcggcactctctgcaatggatgggaaggatctagatgggcgaagcattagggtatcctatgcaaatgatagaccttctggacctcaatctggcggcggcggcggtggtggttatcgcaatgggggttttggcggcagctggagattttgcttctcgcaatggcggttggtgattcaatttttgcgtcttctgattagttatgagattattgtctttatggatatgctttgcactttggtaaagtagtaatgagagaatttttatgcttatcctgcttacatttcttggggatgccattctgagatgt

SEQ ID NO: 46344 - DNA, 546 bp, Glycine max
  unsure at all n locations
  Clone ID: LIB3139-100-P1-N1-C11
tagacccatctcctctaaaatcagggtcccctcaatcaaaaaacttcttcttgttctgttgtgtccatatgttatattttattttatgatatacatagaagcttgttcttctgatctaattttatgagatcaagtgttggttctttctccatctagtactattatttttcccctgtaatatatatatatatatattattctaattaaactaattcacaggctacttgatccgtttgttttgaagaagatcatcgcctgtttttggttaactgtttaatccaaatccagtttcattttacgtgatccgttaaatctgaatggaagctgttttgacgcctcacgcgacggcacaaaaacaaccgtttgctcctaacaagaacatcagaatgaaaaccccgaagaaaaacggacgaggtaatttcatttgtgctaataaccggtctgagaattttgacacgtatgcaggtctcttgaatcctccttcacgcgccatgtccttctnctactctcacccgctctcagcttcttcactcttcactcatcact

SEQ ID NO: 46345 - DNA, 484 bp, Glycine max
  Clone ID: LIB3139-100-P1-N1-C12
gaaatatcattggaaaacaaggttcctttgctttttgggttattgaattttacactgatgatatgattcaattaggcacgtgtagttatgttatgctttctaacaaattcactttgcattcttattgtgctggacatgtttgcttccagggcacttttacgaggtatttactacttattactcgaccaaaatattgtcaaatagtatcaattaagtcttgttatccatcacttcctcttcatcaggttcttaaagtagatcactctcatgaaggaagaggaaaagccacaatcaagaacttcgtgacattgaccagggaaacaaggtaacacaaagaatgggtaccgatgacggatgtgaaagggtctacgttcaggaaaagactttcatgtttatgtgcatggatagtgatggaactgttgtattgatggaccttgacacattgaatcaaattgaagtttccaaggactggttcaacaaggat

SEQ ID NO: 46346 - DNA, 387 bp, Glycine max
  unsure at all n locations
  Clone ID: LIB3139-100-P1-N1-C2
gaagtgcatcacgccagcgtgtctgtggtgaatgatttgatgatccaacaagccacggtgaacatgggaaacaagttttacacgcaggaacagcttctgtcggcactatcatccaaagttggcgatgaactacgatagttccttctgtactattattggtagcagtagctgtagctttctatgtaaattagtgttcttatttttggttagtcctttttggtagcttggactaaattaattttattgaggtaatttgatttgggaagctgaatgatcaaccaggggatagtaatatctctgatgaagtccaagtggattttttttgtgttaatattattatctgtttatattggatatatatatatatatatgnttatgaattatcat

SEQ ID NO: 46347 - DNA, 536 bp, Glycine max
  Clone ID: LIB3139-100-P1-N1-C3
gacagggtaaccatcctaagcgccgggaacaggaaaattggtcccgctgatgagaccgttattaccaacgctttcatcagaagaacaggaaaattggtcccgctgatgagaccgttattaccaacgctttcaaaattggtgaacctggcaagattgtactcaccatagataaccaaacatccaagaagaagaaactcctctacaggtccaagaccaagcccatcccagagtaacttgaagctcaagaataaggattttactggtactgttatatgttcatcattattacaaccacaagaacaagaacattgtgctgttcaacttaattctttcatacggggtggggttcttttcttcatttgctttataaaattattttgtttcaagtctggcgttggcctatttcatttaagcttacggtagtttgctatttgggttttggaattggataaaacctttgctatttcattatcgggacgggcttcatttgtacatgaaacaattaatgtctggttgcattgtcatatacttttatg

SEQ ID NO: 46348 - DNA, 620 bp, Glycine max
  Clone ID: LIB3139-100-P1-N1-C5
ggttgaaataaaatttgttttaaaaggggacttttatgccaaatacgggaaaataccaaatggaattccttaattggttaaataattattatttaaaaaaaaagggatttaagtattgtattcataaggaccaccctaatggattaattgtgttgtcactttttgttttattgttaatcacgtggatagtcgacactcggtagtggtgccggacagcaacattttctacattatagccttgctccgatttattccaccacccccaaagggaccacctacagaactgttggtggaacaaaaccatgagattattcacttatgctacaacagaggctttgatttcaagttatatctccctcactaccagtcacaggagaactggatgcgacactatggagataagtggaccagattcgtcgagagaaaggccaattctgatcccttggctattattgcacctggacagaaaattttttcccgaatccctcaaaccttgtctatcacataaatattatttagattaatatatcggtttttcttttttcttctcaacccactgagatcattttggcctggattcatttttttttcttctttctcttgactccccctttcttttg

SEQ ID NO: 46349 - DNA, 554 bp, Glycine max
  Clone ID: LIB3139-100-P1-N1-C6
tcttggattcaaggttgaaaaggctaacaccagcctaatagttgaacttgagaaaagtgttcctacattggttggcattgaatgtcccaaggatgagaaacttcctcgtcgcaaaatttttgacaaacctaagacgcgctgcttcactattctccctatggagtttaatcttgtggtccgtcaaaagtttttaaattttgtgaggttcattatgaagaaaagggacaagcttagttgtcaagttggaatcaacccatactccatggaatggactggtttggccaatagattactgagtaagggcaatgatattctgtgttgcgattatgctagttttgatggtttgattaccaagcaagttatgagcaagatggcagaaatgataaacagtctttgtggtggtgatgaaaaattgatgcgtgaaaggacgcacctgctgttggcttgttgttcaaggatggcaatttgtaagaaagatgtttggagagttgaatgtggaatcccttctggatttccgctcacagttatttgcaatagcatttttaatgagatgc

SEQ ID NO: 46350 - DNA, 171 bp, Glycine max
  Clone ID: LIB3139-100-P1-N1-C7
gacactacctacagcaatcattgctgaagacgctaacaacatggtggtagacgtactggagaacagcgcccctacattgcttgcacttgaaggatgcaaggaggctgacatgtctctgcccgtagtttatgacaaacctaagacgcgctgtgatactatgctgaatatggg

SEQ ID NO: 46351 - DNA, 533 bp, Glycine max
  Clone ID: LIB3139-100-P1-N1-C8
atcaggtgcaaagttatcattcaagctgcagactcggctgaaccaacctccaaaacaatgataaaatcacagaaaacagtgtctagtgttctctatggaatatggaaaagggagggcttactgggatatttcaaaggattgcatgctcagatcttaaaaactgttttgagctcagcactgctcttaatgatcaaggaaaagatctctgctactacctgggtgcttatccttgcacttaaaaggtacctattacttccaaggggtaggattaagaacttgtaatttataatagcagttactggaggaagaagcttcaattcgttgcggataatgaatgtggttggagtgcaaagtgtgcactttaacagatacatccatctcttcaaagttgagacgagattgttttggtggcttctcttctgtcctcttccctggcttattgatatagaacaattagtccaggaatttatgcaaaagactgatagagcaaggcaaagtagaaaatcttgacaataaatgggttttttattttt

SEQ ID NO: 46352 - DNA, 461 bp, Glycine max
  Clone ID: LIB3139-100-P1-N1-C9
gccagtgattcttcttcacttctacatcaacatcatcatcatcaacagcagcatcagcagcaccagcagcaacttcttcagtattggagtgacgcgttgaatctaagtccaagaggaatgttaacaagattgggaccagatggaaggccattgtttaggcttccaacacagcccataaacacaacaaaactctatagaggagtgaggcaacgccattgggggaaatgggtcgctgaaatccgtcttccacgaaacagaacgcgtctctggctaggcacatttgacacggccgaagacgccgccatggcctacgaccgagaagccttcaagctacgaggagagaatgctagactcaatttcccagaattgttcctcaacaaggacaaaaaagaagaacaacaacaacaagaacaagaagcttcttcgccagttctttcagctattgcaaagcagcatgaacc

SEQ ID NO: 46353 - DNA, 576 bp, Glycine max
  unsure at all n locations
  Clone ID: LIB3139-100-P1-N1-D1
atttcggttcgggttcccttgcttagtctagccaatagccaacccaacccacgtgctttctctcttttcttttctctcttccctcaggaaaaacacacaaccctccccaaaacggtgtcgttttctgggaccattttagagagaaaaagagagagagagagttgtgttgtgatgcggaaacgttgatcccaaatgcacccgtacaaccggctaccgagcagcgggcactcgacgccgtcaccgccgccgtctccgctccggtcgccgaggctccgccacgcagggcggtccaaggccgggcggttctctccgagccgggggagcggtcggaccgccgcgcagcggctcagnctggatgttcctctctgttctgcttcgacgacagggcgtttttctcttcgctcctctcatttacatctccggaatgctcctctacatgggaacggcgtcgttcgacgtcgttccggtaattaaacaccgtcccgcgcctggctccgtctaccggagccctcagctcttcgccaagctccgcctcgacatggattccgataattcctccgccgatgcgatatctac

SEQ ID NO: 46354 - DNA, 385 bp, Glycine max
  Clone ID: LIB3139-100-P1-N1-D10
agcaggcccattcagtggttgttcaatgaacccagctcgctcatgcggcccagctgtggtcagtggagacttcgctgctaactggatctattgggttggcccattgattggaggaggtttggctggcttgatttatggagacgtcttcattggttcatatgcggctgtcccagcctctgaaacctacccttgagcttcaacttgaaaaatatgacttcttgttctattcacttgtgtgtcctgtcccttcaagtttcatctttgttccccgtttgatgtctcgagcttcatggctttttgcatttttaactgtacctttatctattattcaccgcttgtaataattatgtaaattataattcgaacttgatgcatggattgttgg

SEQ ID NO: 46355 - DNA, 513 bp, Glycine max
  unsure at all n locations
  Clone ID: LIB3139-100-P1-N1-D11
ctctttcctcagcatttggcaacatctgcaaactctcttctccttctctctatctctcactctgcagcaaagggtaaagtaaaagacttcattcatttacaattgcattatttccagagaaaaaaattgaaccttcttcacatgtcgtcggacataagctagcttattagccactcttgcttcccttctttcaatcttcacaccccttttggaatcttacagggttattcacttatttgtcattcaatggctagttgctggttttgttgttgtgttgttaagtccagtgttgcagttttagcgttaagtgtggttgtgtttttgtgacgggaaaaaaaagttggaagctttggttggtggggggtgtcaattgtgatgggtgcggatcgtctgatactgccaacagttggaccgccattaaaacggcgagcggngttgcggaggaagcacgctggaagagggtcatacagagggagctaggtgtgagtgaacgagtgagtgtgtggtgttttt

SEQ ID NO: 46356 - DNA, 421 bp, Glycine max
  Clone ID: LIB3139-100-P1-N1-D12
ctccttccataccatatattgacatctgtacacacatttcgaccgggcggaataaatcactcaaaaggccaccgttaagctcatgatattgcatataaaaagaaactattgtttccgggatacaaagtgcaccaaggggagtgttttaagaaattggcttgcgttttaagcaagtttgttatacatgaattgaatggaaccaaacctttgggaaaggttcaaaattgggaactcctaagccttccactgataaggaaccaccaccaacctcagccttaaaagcctaggaggggcccaaaaggcgatactattaccaccaaatttggtacctacaacaacaacaacaagtttaaacctggacattactgcaaaattggcaggaggcatgggactaaaggtggaactctacccaatgttcctg

SEQ ID NO: 46357 - DNA, 421 bp, Glycine max
  Clone ID: LIB3139-100-P1-N1-D2
ttctttctttcgtctttcgttcaatgctacttttgaccggtcaaatcccatcgctttcctggagagagtcttcgaattcgtctccgaacagagcgactttctggcgacgcagagcgccgagaaggagatagtgtcgctggtgcacgccgccgggaagaagaagagagagcttctcaaggcggagagagaaaatgccgataagaagaagagagaggacctcaaggtcacggaggagagacaaaaggtggagaagagattgaatgaagagaaggaactcaaagccgaagacaccaacaaaaacgaaagcgcctccagagttccaaacaaaggtaatggcttggatctggagaaatactcttggactcagtcgcttcaagaggttaatgtgaatgttccggtgccaaatggaaccaaatcgaga

SEQ ID NO: 46358 - DNA, 526 bp, Glycine max
  unsure at all n locations
  Clone ID: LIB3139-100-P1-N1-D3
cttttcttgggggccttcgccgccccaaccggggatgtcctaagcggtgtctccggcgtctccggcctcacccaggccggcagcctgaccaagacctactcttccactgagaagacgaccaccatcatcaagaacgagaccgtctacagcgtcgtcagcactctgtacaccaacgtccagcagtacaccagctccatcaacaagaccgtcgaggccgtccccgcccagccgtctgaggaggacaagaagaaggccctgatcgagatcaaggccgacatcaagtcgatcgcctctctcatcgtcgacgcctccgtcaagattggcaagattgaggtctccgccgacgttgacgtctccgccattatctccctcgtcgtcaagctcgtcttcgagatcgtcgccaccctccagcacgtcgtcgccatcctcggtggcaccatcaccgtcctcctcggctccgtcctcaccctcctcgtcaacgccatctatgccctactcgtcgccctccaggacatnctcggtgacg

SEQ ID NO: 46359 - DNA, 361 bp, Glycine max
  Clone ID: LIB3139-100-P1-N1-D4
ctctacactgatcgttttggcaccttcaagtacccctttgctgagcaagagtttattgatgctgtaactgcttttgtgagtgcagctgactctggccatttgaatctcctgccgcaagaaacttctacggtctttaaggaaccaattgggcttgtatatacggaggacgctgcaaacacaaagaatttgcttcatggcttgcactttgccaaaccaggggagcatgtatctgccagggtattgtcagctacgaaggacgaaggtcaaaccaaaggggagaaccccatcaaactggtgacagatggaattaatcaaggaaatcaaaacagctatctggtgaaagctgatataactggtgata

SEQ ID NO: 46360 - DNA, 497 bp, Glycine max
  Clone ID: LIB3139-100-P1-N1-D5
gccatggcgatggtgcaggatgaacgatgcgttcagaaaagctactggattgaacatacgacggacttgtccgtagagtcaatgatgctcgattccaacgcctctgatctcgacaaggaggagagacccgaagttttgtccctactaccaccatatgaaggaaaatcagttgtagaacttggagcaggtattggaagattcacagttgaattggccaagaaagctggccagttacttgctgtggatttcattgagagtgctataaagaagaatgaaagcattaatggacaccacaagaatgtcaagttcatgtgtgctgatgtcacttatccaaacttgtatatttctgaaggatcggttgatctgatattctcaaattgggtactcatgtatctatcagataaagaggttgagaatttagctgcaaggatgatcaaatggttaaaagttggtggatatgtattcttcagagaatcatgtttccaccaatctggaga

SEQ ID NO: 46361 - DNA, 541 bp, Glycine max
  Clone ID: LIB3139-100-P1-N1-D8
ggtgattctcatttttatggctcttgccctgaagtcaagttgcttcttgcaattgaagaaacctgaggctggtttcaatgtttgtttttcatctaagaaagctataatctccgtgaaacgacacactcccgtggctgctatcaggaccatggaagcagtgggactctctgcaacattcaccaggttgaaaaaagaaggaaaagtagctttcatcccgtatgtcactgctggtgatcctgacctttcaaccacagcagaagcactgaaagtgcttgattcatgtgggtctgacataattgagctaggtgttccatactctgatcctttggcagatggtcctgttatccaggctgctgctacaagatctttagcaaaggggaccaatttgaatgcgattattgatatgttgaacggagtgttccgcaactgtcatgtccaattgcactgtttacatattacaatccaatactgaagcgtggtactgataaatttatgtccactataagagacaagggtgtacatgggcttgtagtcccagatg

SEQ ID NO: 46362 - DNA, 541 bp, Glycine max
  unsure at all n locations
  Clone ID: LIB3139-100-P1-N1-E10
agcacccctttgggccatatattggttacctcaactgcttttctgttcatctttccagaattattgtaaagttccctttttttgttctgtcttttcattcttttttcaaagtgaattcctgggattttttgttttcaattgagggcactaaaaaaaaagaactgactggaatttccatttgtcttgctgggtccctgagatttgaagtgtgttgttttccttttggtgggtggatcctaagttcatgaattccctcttttctccagccaatttgttttgttgctgattaaattagttctgtctggcaaaggtttgagtctctagtgctggaaaattaatctttgtggtgattcatggtgtttttttttttttttttttaactgaggaccttcaattttgttttttgaacatcgatggttttctcacaatcacaaatctagtctccaaagttggtgatttcataagggtgtgctgntaactttcctgtttctttcatattcaagctcaattctggttgtgggtttatctcttactggaagac

SEQ ID NO: 46363 - DNA, 529 bp, Glycine max
  Clone ID: LIB3139-100-P1-N1-E11
ctcgagccgtctcctctcactttcatttctacatccctggctctgttccgtcgatgacgatggcgtttagggtgcgaaaccctgacctccgctttctcattcttctctctctcttgtccatcacttccgccaaggtcttcttcgaggagcgtttcgatgacggatggggaaatcgttgggttaaatcagattggaaaaaagatgagaacctggctggggagtggaaccacacctctggccaatggaatggagacgctaacgacaaaggtattcaaaccagtgaggattacagattctacgctatttcagctcagtaccctgaattcagcaacaaggataagacactagtcttccaattttctgtcaagcatgaacagaagcttgactgcggtggtggctacatgaagttgctcagtggtgatgttgatcagaagaaatttggtggggatactccttacagtattatgtttggcccagatatctgtggttacagtacaaagaaagtacacgctattcttacctacaatga

SEQ ID NO: 46364 - DNA, 470 bp, Glycine max
  Clone ID: LIB3139-100-P1-N1-E12
ttcacgtaccacgttgaaacggttcaatcatggttggcactgagcagacttcacatactgatccacttagtggcagtgttgtcgctgtgttactaccgcataactcacttgttactggaacctccaacagcgccatggcttctgatgaccgtagcggagcttcttctctcggtgctctggttcttcaaccaagccttccggtggcggccggtgtcgcggagcgtcatgacggagaagctgccgagggatgagacgctgccggcgcttgacatcttcgtgtgcacgctggatcccgagaaggagcccaccgtggaggtcatggacaccatcatctgcgtggaggccatggattaccccttcgacaagcttgccgcgtatctctccgacgacggcggctgtgacgttactctctatgggatcagagaggctgctgaaatcgccaaggagtgcgttccgcactgtaacattta

SEQ ID NO: 46365 - DNA, 316 bp, Glycine max
  Clone ID: LIB3139-100-P1-N1-E2
atattgttcctataggtgactgttttgcagattttttcgccgagaagtgaacaccagccaaacaacactccatgagccacaccggtacaagaagggaacatacagatggaggttttaacatgtggcagcgactctttagctcacacggacagcaagaagcaccatctgataagctaaatttagcttacatccaagatatcaccgttttcccataaaaacaaatgtgtttattcctacaatttggcaagattggcaggaaactgtaaaataatgtgggaagatacaatgtgctgttcgctgaatgaaattatgatca

SEQ ID NO: 46366 - DNA, 519 bp, Glycine max
  Clone ID: LIB3139-100-P1-N1-E4
taccctttggtaatttcctttctttgggggtgctaaattcgggcaatttctgcgacacccagatggattttgcgccgaatccgtgccctttgcgttcttcttcgttcgtgaatctcgttgagaggattaaacagcttggtaccctcgccgtttctgcagtcattgggaacatcttctccgcgatcttgaccttctgcttcgcattagttggcactttgttgggggctttgactggagctttgataggacaagaaactgagagtggcttcattcgaggggctgctgttggtgccatatcaggagccgttttctccattgaagtgtttgaatcctctcttgttctctggcaatctgatgaatctgggattggttgcgtcttatacttgattgatgttattgtcagcttactgagtgggagacttgtgcgtgagaggattggtccggccatgtttagtgctgatcaaagtcagatgggtgctgttgaaaccagctttgatgaagttcaaaacatctttgaca

SEQ ID NO: 46367 - DNA, 467 bp, Glycine max
  Clone ID: LIB3139-100-P1-N1-E7
gcttcatcaaccttctatgcgaagaaactatttcttttctctcagtgttctcttcagatcctctgtttcattgcatcgtggcgttttgcaccttggttttcctctatttgccacaccttttcttgaaaataattctatctccagtgcccattctcactgcgattctccttctctctattctccgtctcggtgcaattcaaaggttacaacatgaaagaagggagaatcatgtgaaacacgaagaacaacccatcgtttacgaagaaaacaagggaagtaaatacaagggagagaaacagagtccatgtaccattgaacctgacgaaacaaagtccgtagaacaagtgcaccaatgggtccattcagaaacagaggtcatttccgacatgggttttgaatcaagttctcgttttgttgaatggaacgtgaaagcaccgttggaagtgatatatgaagagtatggtgaa

SEQ ID NO: 46368 - DNA, 511 bp, Glycine max
  Clone ID: LIB3139-100-P1-N1-E8
agttggtattcctgagaatacaggtatagcattggcctgtgctatgaatagttcttttagggggcgtgccagttctgatatttacaccatctgctctcaagactgtgaattatggaatcctgcttgcacaaaagcaatgactatgtcatttaatccaaacccgtgttctgatgcatggagtttggaatttctgaagcgtaccggatttcattgtgatatcatttgtgtcactggatggactgccactccaatgcaggatgttcaggttacaattgattggtttatttcctctcaggaatgtgttcccaggacttattgtgttttaaatccacaaaatccttttgtgttgaataggtggatggggaaactgactttcccccagggcacttcccgaagtgttaagagaatgcctctttctataaggggaggagctggtgcaaagaatgctattctcatgaatatgccaaatgctgatctttcaatgtggagatattttggtggagaatctcgc

SEQ ID NO: 46369 - DNA, 480 bp, Glycine max
  Clone ID: LIB3139-100-P1-N1-E9
cctaattctccaaattttctggctcctctgcgtgctcgttgaatccatcctaagtgacttgcttgctgaaggcgacacgaggtcggtagaaactaagaatgggggaagagaatgaagaaacaaaaacatttaaggatttgggcttatccgagtcattggtggaagcttgcgaaaaattgggttggaaaaatccattaaagatacagacagaagcaattcctcttgcattggaaggaaaagatgtgataggacttgcccaaactggttccggtaagactggagcttttgctcttcccatattgcatgccttattagaagcaccacgcccaaaagatttctttgcttgtgtgttgtctcccacaagagaacttgctattcaaattgcggaacagtttgaagctctaggttctgaaattggtgtcaagtgtgccgtgcttgttggaggaattgacatggtacaacaatccatcaagatagcaa

SEQ ID NO: 46370 - DNA, 533 bp, Glycine max
  Clone ID: LIB3139-100-P1-N1-F1
atccagttccagcttaaaaatcaaggaaggaaggaaggaagatgttgggtgttataaggcacaagagtattcgccctgccttctccgcaatcagacacttgtcttctgcagctaaagagattactgtcagggaggctctgaactccgcactcgatgaggaaatgtcagctgatcctaaagtgttcttgatgggtgaagaggttggggaatatcagggtgcatacaagatatccaaggggctgctcgacaagtatggccccgagagggttctcgatactccaatcactgaggctgggtttactgggattggagttggcgctgcttactatggtctaaggcctgttgtggagttcatgacttttaacttctccatgcaggcaatagatcatattattaactctgccgcaaaatcaaactacatgtctgctgggcaaatatctgtgcctattgtctttagaggacccaatggtgccgctgctggagttggtgctcagcattctcaatgttatgcatcttggtatggttcatgccct

SEQ ID NO: 46371 - DNA, 536 bp, Glycine max
  Clone ID: LIB3139-100-P1-N1-F10
gagagagagagagagaggatatgggttcgaagaggtatgcgctattgatgtgcggtgaggattcggagtacttggtgaagatgcacggaggcacctatggggtattcatgaagttgctccaagagcaagaggaaaagtgggacctctacaagctcgtccaaggagagttcccggagcagcatgacttgcctctctacgatggctttgtcatcagtggaagctgctatgatgcacatgccaatgacccatggatccttgacctcattgctctcgttatcaaattggactccatgcacaagaagatccttggcatttgctttggccaccagataattgggcgtgcattgggaggaaaagtgggtcgctctcccaatggttgggacattggtgttaaagctataaacgtgtcatcatctttacccttggctttctcatctcttaagctcccatcaaagctttccatttacaaatgtcaccgggatgagatcctagagctccctccaaaagcagaggtgattgcttggtcagaaatgact

SEQ ID NO: 46372 - DNA, 575 bp, Glycine max
  Clone ID: LIB3139-100-P1-N1-F11
cagacctaagaagaggctgcgccttaccaaagcagatgatgccaaagaagcagttgatttggttggccttaaaacagaaaatgtgaataacagtaagaataataccaaaatcaatactggaaacaattctgggaaactgattgggcacacaaacatgacagcaaccattaaagggacaaatgaacatgcttcacaccatttagttgtaggttccctagtcgaggtcctctctcaagacggtgggatgagaggatgctggttcagagcttctgtcattaagaagaataaagataaagtcaaggtgcaatatcaagatattcaggatgctgtcgatgaaaccaagaagcttgaggaatgggttttagcttccagaattgcagtgcctgacaacctgggtcttcgaatgcgtgggaggaccatggtccggccagctccaccatccaacaaacgagaactatcgtgggtcggcgatgttggttttgttgttgatgcttggtggcatgatggatggtgggaaggcattgttgttcaaaaggactcggaatctaattgtcatgtttatttcccaggggaaa

SEQ ID NO: 46373 - DNA, 336 bp, Glycine max
  Clone ID: LIB3139-100-P1-N1-F12
ataagctatgctgcgcacctgatgcttgtatttccagttgtcttctttccgttgcgtcttaacatagatggtctcctcttctcaaaatcaaggcctctggttctggataacgtcagatttgcatcactcactgttgcccttattggtgttatcttcctgggagcaaatttcatacctagcatttgggatgccttccagtttactggagccaccgccgcaggctgtattggaatcattttttccgcctgcctatcttttaaaggccggttccaccttggtacttaatcagaccagaatttggctgtcattatgataggccgtgccggcttcttaaac

SEQ ID NO: 46374 - DNA, 566 bp, Glycine max
  Clone ID: LIB3139-100-P1-N1-F2
atgagaaaaagcaaccacttgatcggtctcttaaacttcctaacattcctgctgtcgattccgatcctaggaggcgggatatggctgagcagcagggcgaacaacaccgactgcctcaagttcctgcagtggccgctcatcatcatcggcgtcagcatcatggtcgtgtccctggcggggttcgccggcgcgtgttaccgcaacaccttcctcatgcggctctacctcgtcgtcatgttcctggtcattgccgttctgatcgggttcatcatattcgcctacgttgtcaccgacaaggggtccggtcggagggtgatgaaccgcgcttacttggagtattatcttgaggactattcggggtggttggaggagcgcgtggcgagtgatagctactgggggaagattgtttcgtgtgttagggattctaaagcatgtgggaggatggggataaccattaatgggatgcccgagactcctgatatgttctacatcagacatctcacccctattcagtctggttgctgcaagcccccaacagattgtggctatgtctatcagaatgagac

SEQ ID NO: 46375 - DNA, 506 bp, Glycine max
  Clone ID: LIB3139-100-P1-N1-F3
atttccggatttaaccactctccttcttatctttttcttctcctccttcaactcgttaccatctctatataccttcttcttcttcttcttccttttctgtgtcttgctctctcatggagaatcaggagacccacaacaaccaaggccgcagcaaattcatggactttccgttcgtttcatctgcccagaagaatcttatggttgatctcgtctcaacgcttgagaatcgctttcacactcagcttcttccttgcacactcccctctgatgttcagtattatcaaagccaaactgccactgcccaagcttctcttcatattagagcagctcataatgactccccgatagattttgtgttgggaagctgggtgcattcagagctaccaacaggagggtccttagatataacaagtctttcagcctatcttaacagctcaactgatgcgccaaattttgcgtttgaaatgatccgcagtagtccaacaatgctacttctcattcttgat

SEQ ID NO: 46376 - DNA, 510 bp, Glycine max
  Clone ID: LIB3139-100-P1-N1-F4
ccgaaattccaaaaccaaaagccgttctaccatggacaacccgcgtttcaatttcctttctctctaccctaacggacttttcacgccgctctaacggcactgttaatcgccgtctcatgaacttcctcgatcgcaaaacccaagccaacgccaaacccgttaaaggcgtttccaccaaagacgtcaccgtcgacgccaaacggaacctctggttccgaatctacaaccccaccgccgccgatgccgacgacggcctccccgtcttcattttcttccacggcggcgccttcgcattcctctcgccggattctttcgcatacgacgccgtctgccgacgtttctgccggcgaatccccgccgtcgtcgtcttcgtcaactaccgcctcgcaccggagcaccggtacccttcccaatacgacgacggcgaggatatcctcaggttcctcgacgagaacccggcggtgctgccggacaatgctgacttgtcgaaatgctttctcgccggcgaca

SEQ ID NO: 46377 - DNA, 508 bp, Glycine max
  unsure at all n locations
  Clone ID: LIB3139-100-P1-N1-F5
acccaacagaggttgcctggaacatgcacagaccaactgtcatggtcttggaagacaccaccaagccaacttgactacgagagatcggcggcacctgcaggaacatcgcttctctaaacgatgggacttgatgctgacaactgcaaggtccttgtaaacattgagcacagagccctgatattgcccaggtgtgcacggcccttaccaaagacccgggaaatcgggctggagaccgggtcacatgtttggctatgccacggnacgagacccanaattgatgccattgagtcatgttcttgcaactaaactcggtgctcgtctcaccgaggttcgcaagaacggaacctgcccatggttgaggcctgatgggaagacccaagtgactgttgagtattacaatgacaacggtgccatggttccagttcgtgtccacactgtgcttatctccacccaacatgatgagactgtgaccaacgacgaaattgcagctgacctcaaggagcatgtg

SEQ ID NO: 46378 - DNA, 489 bp, Glycine max
  Clone ID: LIB3139-100-P1-N1-F7
ctcccctttgccgctgttgttgttgctgcaccaccgaacaacttcccctgtaaatcgcgtttcgtttgtgcaaggttttaaaagatggctgatgctgaggacattcaacctcttgttgttgataatggaactggaatggtcaaggctggttttgcaggtgatgatgctcctagggccgtgttccccagcattattgggagaccacgccatactggtgtaatggttgggatgggtcagaaggatgcttacgtgggtgatgaaccccaatcaaaaaggggtatactcaccttgaagtattctatatagcatggcatagtcagctactgggacgatatggagaagattttgcatgacacattttacaatgagctacgtgttgcccctgaagaacaccccgcacttcttaccgcggcaccactgagtcccaagggcaacagagcgaagatgacccacattatgtttgcgactttcaatgtgcctgccatgtat

SEQ ID NO: 46379 - DNA, 539 bp, Glycine max
  Clone ID: LIB3139-100-P1-N1-F8
gccctgcaaatgttttccgtgttaaagaagatgtccgtccaatcttttgggcaaatcgtccaaaaagctacatatcaaggacaataggatgggatcaatacccacacgggcgttggggtgattcctgtaatccatcatatggtgcattatctgattatcagttcatgcggccacgtgcacgggacaagaagcttgttgaagaatgggcagttcccttgaaaagcattgaagatatatatgagaggtttagactgtattgtcttggaaagttgagaagcaatccttggtcagaactagatggtcttcagccagagacaaagataataaatgagctgctggaaaagattaacacaaagggcttcctcaccatcaatagccagccagctgtcaatggggaaaagtcagattctcctactgttggctggggtggaccaggcgggtatgtttaccagaaggcatatgtagagttcttctgctctaaggaaaagctggatgcacttgttgataaatgcaaggatcgaacatctttaacttaatat

SEQ ID NO: 46380 - DNA, 441 bp, Glycine max
  Clone ID: LIB3139-100-P1-N1-F9
attcacttaaataaagcgcattactatgtgcaatgagtgtgtttaaaaaaaaaaaaaaaaaaaaaaaaaaaaaaaaaaaaaaaaaaaaaaaaaaaaaaaaaaaaaaaaaaaaaaaaaaaaaaaaaaaaaaaaaaaaaaaaaaaaaaaaaaaaaaaaaaaaaaaaaaaaaaaaaaaaaaaaaaaaaaagggggggcgccccttttagaaaaattgtaaacccgaaaaaaaattcatggcggatatttagggggaaaaaaattttctataaaaggggaaaattaaaaattggggaaaaaaaaggaaaaaattttttttagggaaaaaatttatatcttaaaaaatccaaaaaaaaaaattacccgaaaggaaaaagttaaaaccctggggggctaaaaaaggaggataaaaaaaaaaaattgggtagggttaattgccgtttt

SEQ ID NO: 46381 - DNA, 545 bp, Glycine max
  Clone ID: LIB3139-100-P1-N1-G1
cggttcgagggaacccaaaccgaaaccctaaccctaacggagagatggcggagcacttggcatcgatattcgggacggagaaggacagggtgaactgtccgttctacttcaagatcggcgcgtgcaggcacggcgaccggtgctcccggcttcacaccaagccgacaattagcccaacattggttctgtcgaacatgtaccagaggcccgacatgaacatgagcattatcaccaaccccgatcagccacaaccccaatcccttgaccccgacaaggtgcaggatcacttcgacgacttctacgaagatctcttcgaggagctcagcaagtacggccccattcagagcttgaatatttgtgacaacctcgccgatcacatggttgggaatgtgtatgttcagtttagggaggaagatcatgctgccaacgccctcatgaatctcactgggaggttttattcaggtcgtcccatcattgttgacttctctcccgttacggattttcgagaagctacttgtaggcagtatgaggaaaatgtatgcaat

SEQ ID NO: 46382 - DNA, 472 bp, Glycine max
  Clone ID: LIB3139-100-P1-N1-G10
gaaagaatccccactcctcgtattcccatctccagctacgaggtatccgacacttgtacgaggatcttgtcggcttgccagcgtggggacaatgagaggtgtcaggagttggttggaaagattaaggtttggggtagagagagtgagaggaacaagaggtgcatagttggtgctggtgctggtgctgttcttgcatatgcctttgattgtttctcaagtaactctattgataagcatgtggttgttttggaggaggttttggaggtgatgacatggatgatcccatttggggaagagggtgtatctaaattgagttcaagagcttctttgaattcattgggttggtgtctagaaaggaaagaccttgcatgaaggcaaagtgctgctttgttgcttaaagaagtgtgtgtgcaagaattggccaaggttggaaatgttgttgaggctttggttaagatgcttagggagccta

SEQ ID NO: 46383 - DNA, 566 bp, Glycine max
  Clone ID: LIB3139-100-P1-N1-G11
cataaagtatgttaaagggtcagagggaaaaatgaatgccttcaaagcttgtgttgttaaagtgggcagtgttgatacaaaggttggtttgtgtttgggtgttcctactaggtggaactccacatttgtgatgcttcaaagtgtacttgcataccgatgtgtttttaatactcttgctattgaagatgcaaattatgtgacttgtcctacagctgaagaatgagtaagagctgaaaagatatgtgaatttttgaagccattttttcatatcactgagttgatgtatggttcttcctatccaacatctaatttgttttttttcacaagtgtggcaaattgaatgttggttggaaaaacatactaggcatgaagattagaagattagggaaatggtagataaaatgaaagacaagtttgataaatattggaatgattatagtgatgtgcttgctcttgggaccattcttgatccttgttataagatgtcatttttgaagttctgttatacaaaacttggtcttagtgaagtatcttgccaagcaaaaatgaaagtcttgaagcacaag

SEQ ID NO: 46384 - DNA, 492 bp, Glycine max
  Clone ID: LIB3139-100-P1-N1-G12
cccattttctctcattcatctccatctcaaagggccaaaacaaaaactgtcttatataaagagaggtatttcattgtattattgttgtgattagtgataatgcaaaacgggattaaccggcaactatccctgaaggagaaactgaaatcttcgctatgctgtttctccggatccgttcacagcgacccattagagcgcggagaaggagggttctacagcaagctacgcataccaaaaacaccgatttctccacaggggtccacgtcatcaccgtcgtggttcaagataaggtcaccgacgtgcaccgagtacggcggtgacccgcatccacgtgtcagggggcggagcctgaagtcgaggatgggccgtaagctcctccaccaccgccaatcccagtccgctgacttcagctacgacccttcgagctacgcgctcaatttcgaggacgacagccccgaggagattccgttcaagaacttcagctcgcggttg

SEQ ID NO: 46385 - DNA, 492 bp, Glycine max
  Clone ID: LIB3139-100-P1-N1-G2
ccaaccaggaacccgccggaatttccttccggcagctgcggaacatcatcgccgccaggaaagaaagagctccagctccaaggtacacgcccgccgcctctcagagtcagcaaagactcccacaagatccgcaaaccgccgcttccccccaccgcgcaccaaccggcggcgctgccggagcaccggaagccggtgatcatctacgccgtgtctccgaaagtcctgcacgttcccgccggtgacttcatgaacgtcgtccagcgcctgaccggaccctgctccggcgacgtatcgccagcggcgagactcgcgtcgatcgagagaacgagcccgtcggagagggagaaagttcacagcgaagacaacgacgtgaagttgatgttagaaagagtggaagtggggcaatttccccgaatattgtcgccggcgacgttgcctccgatatcaccagggtttttctcggaaccgcaaacgacgtcattttggaatgac

SEQ ID NO: 46386 - DNA, 417 bp, Glycine max
  Clone ID: LIB3139-100-P1-N1-G3
aaaggatgatgaatgctcctgattcaaatgataatattgatctactgttgagcattgatttgttgggtttacaaggagcaggtaaagcttttccaaacaagattgtttttgatgataagcttgtgttggctaacacacaagaattctttgatggaaattttccagtggattcttggttaccaatttttgtgaattgtctttatcctgtaagtcaattaccttcagaagctgtcgttgtaaatgttacatgtggtagtgggcggtcgggttacccaccactgcttggattacatctgcagataacaatcgctccttagatatcaacaaaaggattcgcacagcacttgggaaagggaagaaaattgtttttcttactagagctgatactttttcacaccccttactggctgtgctttt

SEQ ID NO: 46387 - DNA, 514 bp, Glycine max
  Clone ID: LIB3139-100-P1-N1-G4
tttttgcccgaatttggctggaaaccgttagtgggtatcctcaaaatactagattttcgattcgtttggtgaacggatttttaggtgtgattattacgtttttttttttgttcaacaagctatggaggtttcggtgattggaagctcacaagcgaagctgggcgcgtctgaattggcttctagggaagttggattttgtaatctgaagaacaatttaagggttttgaatgatagagttagttttggtaggaataatatacggtgggagaaggctgggattagtttcactttgagggctcttcagactgaacctgttagagaggagaagaagccttctgggattggaacaagatccaaaacggtagatggtgtaagattatttgtggggcttcccctagatgcagtttcttatgactgcaagtcaataaaccatgctagagcaattgcagctggcctaaaagctttgaagctcttacgagttgaaggtgttgagctccctatttggtggggaatt

SEQ ID NO: 46388 - DNA, 461 bp, Glycine max
  Clone ID: LIB3139-100-P1-N1-G5
atgagatattgaacaaggtggggtcttactggttctccaagaaggccagcaaggaatttaactctgtcggcgatgatatcaacgtaaacaacacaatccttaacaccctttttttatctatttcttttttttttggtcgattcatttttatttttattttacttttatttggtaaagttcccttttttttttttgtcttttccgttttgctttttcatacgagtgactgaattttatagttcctggcttcctgctgtcatgtttgtccctgttgaaaaaaaatatctatggaactaagttcttgcttaaccatggagtcgtggttttggttgagggttagggttgaaattgaaacgtgattgtttattattcatgtgaatgaacacacacgaacatgcccttttgggattctatgaaaagggaaaatttttaatgggtattttctatttttaggttttttt

SEQ ID NO: 46389 - DNA, 494 bp, Glycine max
  Clone ID: LIB3139-100-P1-N1-G7
gtctgcatcatcaaaaggtactagtgttaaccttaaccaacttgaccaagagaaactgaagagcaaggttgatgtgtccgacgacatgaacaaggtggtctcaagggagcaacagcagttgctggttcttagagggaagaatggtgattacttggttcacaatttgaagagttgcaaggattctagaagggcgtttctggtatgggaaccctattgcattgtccccttctgaatcagtgacaaacattaacaacgacaacaacaactaatgcaaaatccattgctcagaacactatttattactccatcatcattttatctctacctgggtcaactctctcagggatctcgttagtgtagtcaaataaacgaagaagggactgggagaaacggatagggagagaagaaaatactttaacttgtatttgtcagatccaaaatatgacttgaacacgtttggatactattactacttaaaaaaaaaataagagggc

SEQ ID NO: 46390 - DNA, 555 bp, Glycine max
  unsure at all n locations
  Clone ID: LIB3139-100-P1-N1-G8
acaacaccaccctctttataataacacccattttctcttcctatcaccaagccccaccatgaacccgccggaatttccctccggcagctgcggaacatcatcgccgccaggaaagaaagagctccagctccaaggtacacgcccgccgcctctcagagtcagcaaagactcccacaagatccgcaaaccgccgcttccccccaccgcgcaccaaccggcggcgctgccggagcaccggaagccggtgatcatctacgccgtgtctccgaaagtcctccacgttcccgccggtgacttcatgaacgtcgtccagcgcctcaccggaccctcctccggcgacgtatcgccagcggcgagactcgcgtcgatcgagagaacgagcccgtcggagagggagaaagttcacagcgaagacaacgacgtgaagttgatgttagaaggagtggaagtgggtcaattccccggaatattgtcgccggcgacgttgcctccgatatcaccagggtttttctcggaaccgcaaacgacgtcattttggaatgactngagcccgtt

SEQ ID NO: 46391 - DNA, 553 bp, Glycine max
  Clone ID: LIB3139-100-P1-N1-G9
ctcgagccgaatcggctcgagagcatatccagctcaaggccacattaaccctatgcataatttctgcaagctcttgcaacaacaaggtgtgaaagtaacactagtcaccaccctttcctacagcaagaacttgcagaacatacctgcttctattgcacttgaaaccatttctgatggttttgacaatcgtggttttgctgagtcaggaaactggaaggcctacttggaacgtttttggcaagtagggccaaagactcttgctgagcttcttgagaaacttggtagatcaggtgaccctgttgattgtgttgtttataattcattcttcccttgggctcttgaggttgcaaagagatttgggatagttggggctgttttcctcactcaaaatatgtccgtcaatagtatataccaccatgtccagcaaggaaatttgtgtgttcccctcacaaaaagtgagatttcccttcctttgttgcccaaacttcaacatgaggacatgcccacattcttcttccccacatgtgtggataattcacttttgctcgatttg

SEQ ID NO: 46392 - DNA, 553 bp, Glycine max
  Clone ID: LIB3139-100-P1-N1-H1
agggggaggagctggtgcaaagaatgctattctcatgaatatgccaaatgctgttctttcaatgtggagatattttgttggagatctcgtctttgaagtttctaagatgacttctccctacattaaatgtacagtctctttcttcatagcatttggaaatttggctgatgacaccatcaattttgaggcttttccccacaagctggtgcagtttggagagattcaggaaaaagttgtgttgaaattttcacaagaggaatttcttacagcttggtcaactcaggtgcgtcccgcaacgactctgttggctgatgggtgcccatatttgtatgctatggtgcatgatagttcagtgtctacaataccaggtgattttgtcattggtgttaagttgacaaccataaacaatatgtgtgcatatgggctcaatcctggtatttcaggttctcgtcttttgggcaccattcctcagtccatttcacagcaaactgtttggaatcaaatggcaacagtgagaacaccattgaattttgattctagcaagcagagcttt

SEQ ID NO: 46393 - DNA, 495 bp, Glycine max
  Clone ID: LIB3139-100-P1-N1-H10
aagaaaatttgaagaaactgaaagaggtgaataggaatcttcgtaaggagattaggtatacagatctttcttcacttcgatcgatctccttgagaatgggagattgtatgaacgatctaggcatagaagatctcaagctccttgaggaagaaatggacaaggctgccaaggttgttcgtgagtgtaagggatatcaagtgtgctaatatactggttgatgtaagtgggcaagtcaagcttgcagattttgggttggcaaaggcaacgaaatttaatgatgttaaatcaagcaaaggctctccatactggatggcccttgaggtttttaacttaaagaaccaaggtggttatgggctagcagttgatatatggagcttagggtgtacagttttggagatgttgacaaggcagcctgcttattctgagttggaaggagagctacctcctatagcacacaaacacgtgattcaactcatactttctcacgcaagaaac

SEQ ID NO: 46394 - DNA, 589 bp, Glycine max
  Clone ID: LIB3139-100-P1-N1-H11
cggctcgagtctattggcaaattttttgacagagggcaattttagagcaagtgttgatttgcagcgcactcatcgtattaaaggaatgattaaaatggtggccacagttggtattcctgagaatacaggtatagcattggcctgtgctatgaatagttcttttagggggcgcgccagttctgatatttacaccatctgctctcaagactgtgaattatggaatcctgcttgcacaaaagcaatgactatgtcatttaatccaaacccgtgttctgatgcatggagtttggaatttctgaagcgtaccggatttcattgtgatatcatttgtgtcactggatggactgccaccccaatgcaggatgttcaggttacaattgattggtttatttcctctcaggaatgtgttcccaggacctattgtgttttaaatccacaaaatccttttgtgttaaataggtggatgggaaaactgactttccctcagggcacttcccgaagtgttaagagaatgcctctttctatagggggaggagctggtgcaaagaatgctattctcatgaatatgccaaatgctggtctttcaatg

SEQ ID NO: 46395 - DNA, 567 bp, Glycine max
  Clone ID: LIB3139-100-P1-N1-H12
ctctctctatagtttactctctctatgcaatgtaggtcgccggaggatggcaaactaccaccgcaacaacgtagaaaacgtcgtcctcggccaccaccaccgttccaagtccgccttcgtcgccggccacaccttccgcctatgtaccgccgcctccttccgccgcctcatctttgacgccgtcagctgcggcgccagctctcgctacgccgcgagatccaacacctcctccgacggcgagaaacagcaaaagcaaaaacctaagacgtcgtcgaggaagccgaacaatgcgaagtcggagaagctctcggatctgctgagcattgcggaggctgaagccgacgtggaaacgaagaagaaggaagaaaagctggaagaactgaagctcctcgtgaaggagcttcagcagcacgaagaagtagatgattcaacgaagaaaaaaagagaagctgcggcgaaagtgaggttgttggcgaaagaggatttggaagtaagaggaacgctcgctatgctaggagccattcctcctctcgtcgcaatgctcgatgaaaccgaactaaacgacgt

SEQ ID NO: 46396 - DNA, 549 bp, Glycine max
  Clone ID: LIB3139-100-P1-N1-H2
aaagagagtctcttgctctgtatctttgatttgatcattccaatcttcaatttttctatatatccatcaatccgctgagtgcaaagttctaatctttcgcctattgggttctactcctttctctcttcgtttccgatcgatccaattttcttcccatggctacgatcggacacaacaatctcaatgccaaattggttcttctcggggacatgggtgctgggaaatccagcctcgttttgcgctttgtcaagggtcaatttctcgaatttcaggaatcaacaataggggcagcgttcttttcacagacgctggcagtaaatgacgcgacggtaaagtttgagatatgggacacagcaggacaagagaggtaccatagcttggctcccatgtattacagaggtgctgctgctgctatcattgtctatgacatcactagctcggactcctttacccgagctaagaagtgggtccaagagcttcaaaagcaagggaatcctaatatggtcatggctcttgctggtaacaaagctgatttggaagataagagga

SEQ ID NO: 46397 - DNA, 451 bp, Glycine max
  Clone ID: LIB3139-100-P1-N1-H3
aaaaattggtccaaatgatgaagagcatctatgaaacagaagttacagattggccagtaccactgaaaatcatttctggaaccattcttgcaacaattttgggaacaaccttatggaaactctttttctttcttagagatgctggtaatgggggagtttttgatgataatgctgcttaagcattcacaactttaagtgttcttgaggcacataggtgcaagcccaacaagtatgaagttgcgctatacagatattgtaatggtgccaataaagggaatagcttgggtggaaggccattttttttcagaccagtgtgaaatagcaattagtggtaaatgcaaggccagtgtgagaatggaaaacacggatgctcaaattttttgggttccagggctcacaatgatacttcagggccattttttgaaaattctgtctcaaaaagggcgtgttt

SEQ ID NO: 46398 - DNA, 562 bp, Glycine max
  Clone ID: LIB3139-100-P1-N1-H6
ccaaaaagcaattcatcgttgatgtccttcatccagggagggctaatgtttccaaggctgaactgaaggagaaattgggcagaatgtatgacgtgaaagacactaacactgtatttgtcttcaagtttcgaactcattttggtggtggcaagtccactgggtttggtttgatctatgattcagttgagaatgccaagaagtacgagcccaagtacaggcttatcaggaatggacttgatactaaagtagagaaatcaaggaagcaaatgaaggagagaaagaatagagctaagaagattcgtggagttaagaagacaaaggcttccgatgctgccaaggctggaaaaaagaaatgagttttcaaacatcctgtcttgattttaaggttcttttgctattggtattttctaatggttattttactttctattagcttcctagaatgagatattttgctgtaagtgttacattaattgatgttcagtagttatataacttgagatctagtactggcacgatcaattttgagaattcagttgaatgctttgtttttaaataaaaa

SEQ ID NO: 46399 - DNA, 344 bp, Glycine max
  Clone ID: LIB3139-100-P1-N1-H8
ctcttttcttcctcagaaacacatcctaatggcagagcgcggaggtggcgatcgtggcggcgaccgtggcggtttcggacgtggattcggcgggcgaggacgcggaggtgacaggggccgaggccggcgccgaggcccccgccgcgaggaagaggagaagtgggtcccagtgaccaaactgggccgcctggtgaaggagggaagaatccgaagccttgaacagatctacctccactcgctcccgatcaaggagcaccagatcatcgacacgctcgtgggtcccaccctcaaggacgaggtgatgaagatcacgccggtccagaaacagacccgggccgggcaga

SEQ ID NO: 46400 - DNA, 380 bp, Glycine max
  unsure at all n locations
  Clone ID: LIB3139-100-P1-N1-H9
cggctcgagtgaaattttaataaaccgcgatcacaggttgccgcaccttaaaaccggaaacaaaagcaatcgttacttgatttcaagaatttctcaatttcttcctacttctttgtgtacgatttcttaagggaaagaaaatcactctctgtgctggtcacagacttcgtgaatcattttcttttccactcctagtttatttgctgaacactctcctatttgatataagacttcgtgtcagatttaaactttttctgtttctttctcagntctctgtttaatttcaagttcaagctggtgaaatttttggattagtgctcccactcttctatctggtataggacttcgtgggtagacttttctacttctctcctttcttt

SEQ ID NO: 46401 - DNA, 384 bp, Glycine max
  Clone ID: LIB3139-101-P1-N1-A10
ttcaaaatcgtcatcaatttcgcgtctttctttctcaattctcttagattctcaattgggtcttcaaaaatgcggatgagttgcaatggatgtcgagttctgagaaaaggttgcagtgaaaattgcagcatcagaccctgtttacaatggatcaaaagcccagaatcccaagccaatgctactgtgtttctcgctaagttttatggtcgtgctggtctcatgaacctcgttaacgcaggccccgaacatcttcgtccagcgatctttcgctcgttgttgtacgaggcatgcggtcggatagtgaacccgatttacgggtctgtcgggctattatggtccgggagctggcagctgtgtcaagccgccgtggaaaacgtcttgaaa

SEQ ID NO: 46402 - DNA, 384 bp, Glycine max
  Clone ID: LIB3139-101-P1-N1-A11
caattttgtggcttttttttacaagctggtgcagtttggagagattcaggataaagttgtattgaaattttcacaagaggaatttcttacagcttggtcaactcaggtgcgtcctgcaacaactctgttggctgatgggtgtccatatttgtatgctatggtgcatgatagttcagtgtctacaataccaggtgattttgtcattggtgttaagttgacaaccataaacaatatgtgtgcatatgggctcaatcctggtatttcaggttctcgtcttttgggcaccattcctcagtctatttcacagcaaactgtttggaatcaaatggcaacagtgagaacaccattgaattttgattctagcaagcagagcttttgtcaatt

SEQ ID NO: 46403 - DNA, 372 bp, Glycine max
  Clone ID: LIB3139-101-P1-N1-A12
gttcaaaaacacaaaccagttagaggaaagtatggattccacttatgacaggaaggctgaagtgaaagcctttgatgattcaaaagctggtgttaaaggtcttgtagagtctggattgacaaagatccctcgcatgttccattctggcaggttggatatcattgaaacctcagtcagtgactctaagttcggtatccccatcatagacctccaaaatatccactcctatcctgctctgcattcagaagtaattggcaaggttcgaagtgcatgccatgactggggatttttccaggtgattaatcatggaattcctatcagtgtgttggatgagatgattgatggaattcgtagatttcatgaacaagacac

SEQ ID NO: 46404 - DNA, 312 bp, Glycine max
  Clone ID: LIB3139-101-P1-N1-A2
ctctttttgcaatacttttactactcatctctcctgagcttgcaagtgctgcccaacctagtcttattcttcaactcggccgaaaacttttcaatgcggcagcgccgccgtccctgttcgtggaaataccccatccaatggccgctcctagaggatataccccaccaccaaaacacccactctatggctgaatatttgagatgttagcatccttctttaattttgtgataaaaaaaatactcttaaagatgtataattgtgtgtcattactataatatatgtcatgtatgcttaatttcactgaaccatgtg

SEQ ID NO: 46405 - DNA, 389 bp, Glycine max
  Clone ID: LIB3139-101-P1-N1-A3
tggagatgtatcagatctggagcaggagaatagcgttgggagcgttcgcgtttggtctgcttttcctatcggcctcagcagacgacgtcgttgtgctctctgaagataacttcgagaaggaagttggtcaggacagaggagctctcgttgagttctatgctccttggtgtggacactgcaaaaagcttgctccagaatatgaaaagcttggtagcagcttcaagaaagccaaatctgttttaatcggcaaggttgactgtgatgagcacaagagtttgtgcagcaaatatggagtctctgggtacccaacaattcagtggtttccaaaaggatctcttgaacccaaaaagtatgaagggccacgcactgctgattcacttgctgagttt

SEQ ID NO: 46406 - DNA, 341 bp, Glycine max
  Clone ID: LIB3139-101-P1-N1-A4
gcattgatttgttgggtttacaaggagcaggcaaagcttttccaaacaagattgtttttgatgataagcttgtgttggctaacacacaagaattctttgatggaaattttccagtggattcttggttaccaatttttgtgaattgtctttatcctgtaagtcaattaccttcagaagctgtcgttgtaaatgtcacatgtggtaatgggacacgtggttccccaccacctgcttggattagttctgcagttaacaatcgctcctcagatatcaacaaaaggattcgcacagcacttgggaaaggtaagaaaattgtttttcttactaaagttgatcctttt

SEQ ID NO: 46407 - DNA, 166 bp, Glycine max
  Clone ID: LIB3139-101-P1-N1-A7
tgaaattctgagttctaacgccactaaccctatgctgacgcgacttcttgagaactgtaagagtctcaaatatctggttgatgagtgtccttttgcatttgtgaactagtatgtaatattttattcacttaaataaagcgcattactatgtgcaatgagtgtgttt

SEQ ID NO: 46408 - DNA, 381 bp, Glycine max
  Clone ID: LIB3139-101-P1-N1-A8
cacgagtatcgtctcgccgacgtggatcgttcggttcgcaaaaagaacagcttaaggctggatgactgggtgctgtgtcgaatttacaacaagaaaggtgcaattgagaagcagcaaccagcaccgccaccaccgagtggtgtccacaaaattgaatgttacgaaatggaagacgtgaagccggagtatacggcggcggattgcctgtacttcgaggcttccgactcggtgccgcggctgcacacgacggagtcgagctgttcggagcaggtggtgtcggcggagtttgcgagcgaggtgcatagcgagcggaagaggcagggcaacagcgagttttcgtataattacatggatgccactctcgggaataatcagatgtcg

SEQ ID NO: 46409 - DNA, 371 bp, Glycine max
  Clone ID: LIB3139-101-P1-N1-A9
agcttatcttgtcaatctcataaatgtgttacgagaggtgtattggcacagtccagaggaagctccccaattgagaaggaaagctctctctcgtattgaatggctgcaaaaagctgatgtgcctaccatagcacagattgaagagttccattcgatgcagaggatgatgaatgctcctgattcaaatgataatattgatctactgttgagcattgatttgttgggtttacaaggagcaggtaaagcttttccaaacaagattgtttttgatgataagcttgtgttggctaacacacaagaattctttgatggaaattttccagtggattcttggttaccaatttttgggaattgtctttttcctgtaagtc

SEQ ID NO: 46410 - DNA, 380 bp, Glycine max
  Clone ID: LIB3139-101-P1-N1-B11
ttcaggttctcgtcttttgggcaccattcctcagtctatttcacagcaaactgtttggaatcaaatggcaacagtgagaacaccattgaattttgattctagcaagcagagcttttgtcaattttctattgaccttctcggtggaggaattttagtggacaaaactggagattggatcacacttatacaaaattctccaattagtaacttgttgagagttgctgcttggaagaaaggctgtttaatggttaaaattgtgatgtctgggaatgcagcagtcaaaaggagtgattgggcctcattggtacaagtgtttttaacaaacagcaacagtacagagcatttcgatgcatgtaagtggacaaaatcggaaccacatt

SEQ ID NO: 46411 - DNA, 298 bp, Glycine max
  Clone ID: LIB3139-101-P1-N1-B5
gattaatctgctcccgagtttgttcactcatcaaaccctaaccctaatcctcatcctcatcactcgatttaaaaccccattcccattgctatcgtgacatcttccgacaaattttctctctgtcttccgtttcgttcttccaatttcaggcatgaatcgtgcatcggtgttccggtagagcatatgacgagggaggttatcggaactgcgaatcgattgcatgggtttagagaatgccagagcttcgtagtggtgtgcgacgggggcgtggccgtggccagaaagcatcggaacctgc

SEQ ID NO: 46412 - DNA, 390 bp, Glycine max
  Clone ID: LIB3139-101-P1-N1-B6
ctcttggttaccaaccccaagagggttcagaaggcaattgatactaaagcatgcaatgctcttctcctcaaggtcaaccaaattggttctgtgactgagagtattgaagctgtcaggatgtccaaaaaagctggatggggtgtcatggccagtcacagaagtggagagactgaggataccttcattgctgacctttctgttggtttggctacgggtcaaattaagactggagctccatgcaggtctgagcgtcttgctaaatataaccagctcttgagaattgaggaggagcttggtgctgaagcagtgtacgccggagctaacttccgtacccccgttgaaccctactaaagttttcaagtggaaaaaaccctgagatccacacgagtt

SEQ ID NO: 46413 - DNA, 360 bp, Glycine max
  Clone ID: LIB3139-101-P1-N1-B7
gcaaactgtttggaatcaaatggcaacagtgagaacaccattgaattttgattctagcaagcagagcttttgtcaattttctattgaccttctcggtggaggaattttagtggacaaaactggagattggatcacacttatacaaaattctccaattagtaacttgttgagagttgccgcttggaagaaaggctgtttaatggttaagattgtgatgtctgggaatgcagcagtcaaaaggagtgattgggcctcattggtacaggtgtttttaacaaacagcaacagtacagagcattttgatgcatgtaagtggacaaaatcggaaccacattcctggggaattgatcttcccaatag

SEQ ID NO: 46414 - DNA, 384 bp, Glycine max
  Clone ID: LIB3139-101-P1-N1-B8
caatttttgtgaattgtctttatcctgtaagtcaattacctttagaagctgtcgttgtaaatgttacatgtggtagtggacgtggtggtctacccaccactgcttggattagttctgcagttaataatcgctcctcagatatcaacaaaaagattcgcacagcacttgggaaaggtaagaaaattgtttttcttaccagagttgatccttttccagtagctttactggctgttctttttggcgttaagaatgaaattctgagttctaacgccactaaccctatgctgacgcgacttcttgagaactgtaagagtctcaaatatctggttgatgagtgtccttttgcatttgtgaactagtatgtaatattttattcacttaaat

SEQ ID NO: 46415 - DNA, 384 bp, Glycine max
  Clone ID: LIB3139-101-P1-N1-C10
tgatttgcctcttatctagggtggaatggcccatagatgtatcatacaaaagagatgactactttatgcggtggaagtacccaagttacaacttcaccatggctgctttttggacaactcacttagtgaaatccaaagaagcagatgcaaagggtccaggcccaacaggcctttgcaacctttaccttgatgagccagatgagaaatggataacccaaattgaagattttgaccatgtcattctcaatggaggacattggtttacaaggtcaatggtgttctatgagaaacaaaaaaattgttggatgccactattgcctcttagaaaatgttcctgacttaaccatgtactatggctacagaaaggcttttaggactgcattt

SEQ ID NO: 46416 - DNA, 384 bp, Glycine max
  Clone ID: LIB3139-101-P1-N1-C12
accaacacctacctattgttctttcacaaactctgacattccaaaaaggagacacttgttagttcttacattacatggctcatttggtttatggtgaaactccgtcttttggagcctctcaccatggacaggctcagcaaattgttccatttcaaaccacttcgagctccttaaggatcctgctcttacatggcaacttagaaatatgggtcaacgaggccagaaaccttcccaacatggacatgttccacaagaaaacgggagaaatggtttccatgttgtcccgaaaacttggcggcaaaatcgaaggtcacatgtccaaagctggaaccagtgatccctatgttacggtatctgtgggccgggctgtgattgcccagactt

SEQ ID NO: 46417 - DNA, 386 bp, Glycine max
  unsure at all n locations
  Clone ID: LIB3139-101-P1-N1-C3
ctggatggactgccaccccaatgcaggatgttcaggttacaattgattggtttatttcctctcaggaatgtgttcccaggacctattgtgttttaaatccacaaaatccttttgtgttaaataggtggatgggaaaactgactttccctcagggcacttcccgaagtgttaagagaatgcctctttctatagggggaggagctggtgcaaagaatgctattctcatgaatatgccaaatgctgttctttcaatgtggagatattttgttggagatctcgtctttgaagtttctaagatgacttctccctacattaaatgtacagtctctttcttcatagcatttggaaatttggctgatgacaccatcaattntgaggcttttccc

SEQ ID NO: 46418 - DNA, 392 bp, Glycine max
  unsure at all n locations
  Clone ID: LIB3139-101-P1-N1-C4
gaattatggaatcctgcttgcacaaaagcaatgactatgtcatttaatccaaacccgtgttctgatgcatggagtttggaatttctgaagcgtaccggatttcattgtgatatcatttgtgtcactggatggactgccaccccaatgcaggatgttcaggttacaattgattggtttatttcttctcaggaatgtgttcccaggacctattgtgttttaaatccacaaaatccttttgtgttaaataggtggatggggaaactgactttcccccagggcacttnccgaagtgttaaaagaatgcctctttctataagggggggggctggtgcaaagaatgctattctcataaatatgccaaatgctgttctttcaatgtggagatattttgg

SEQ ID NO: 46419 - DNA, 308 bp, Glycine max
  Clone ID: LIB3139-101-P1-N1-C5
cgcacagcaatctgaagaaataagattatttcggaggatggcatttggtaatcaagattatagcacagacttctttagccgtgctagtttgaatccatgaaaggccactgtacatactggaagagcttattttggaccaaaatatcttgtgaagaagccaaggggaggccctgggtaagttttcttgggtgcttgcagatatggctaaagtgcactggtggttttgattctggaatttgactgcatcaagttcagatcctcattcttgtgcccgaatttcattattcttttcattagctggttttttg

SEQ ID NO: 46420 - DNA, 65 bp, Glycine max
  Clone ID: LIB3139-101-P1-N1-C7
ctcgagccgtttttttttttttttttttttttttgggttgtttggggtttttttgtttttttttt

SEQ ID NO: 46421 - DNA, 376 bp, Glycine max
  Clone ID: LIB3139-101-P1-N1-C9
gcggtctctcaccgcacgcactagcactgtctctcactgaaacttgttcgcacattttcacggatctaactaagttatcgccatgaatcgccaccacgatcccaatcccttcgaagaagaagaagtcaatcctttttcgaatggcactactgctcctgcatcaaagtcacgtattccaccattagcatctgagtcactgggctttggtcaaaggcatgatgctacagttgatattcctttggatactacaaatgactccaagaaaaaaggtcaagagctagcagcttgggaagcagatttaaaacggagagagaaggaaataaaaagaagagaagaggctgtttctagagctggtgttcctgttgatgataagaat

SEQ ID NO: 46422 - DNA, 158 bp, Glycine max
  Clone ID: LIB3139-101-P1-N1-D1
ttggtttaaagatttttattaccaccttcaaaaggccgtcccacctgtttccgaaggaggggaggtccgtttaaccctttttttcggccgggaccggtcttttattttcgccaggcatttttttgtggccgccgatgggtttaagtcccgggatccgg

SEQ ID NO: 46423 - DNA, 357 bp, Glycine max
  Clone ID: LIB3139-101-P1-N1-D10
gaatcattgtagacctttggatcgatctgcttggggacgacaggggcgaatgccgtacctttaagcttcctaatcccatgtactacattgagtagtaccttcacctatatcaacaatctagctagagttcgctcctatctatatgtaataaggcatactgatatgcactattcaaatatgaacactaactatgcatgttaatgacactttatgttatgtgggtaagtcacctaatacactacaccttcctacttgttgtatgttactccattttaataaatcttatgacattgttccatatgcttagattctttaatggtgtgaaataatatgactggctctagcatttaaacaaca

SEQ ID NO: 46424 - DNA, 383 bp, Glycine max
  Clone ID: LIB3139-101-P1-N1-D12
caaggagatggctctgggaagaggcagtgcagtggttctactactttgcttcttgctgcttcactctcagatggctcgtgctgccacctacacagttggagattctgggggttggacctttaacactgttgcctggcccaaaggaaagctctttcgggctggtgacacacttgctttcaattatagccctgggactcacaatgtggtggccgtgaacaaggctggatatgatagctgcaagactccaagaggagccaaagtgtataagtcagggacggatcagatcagacttgccaagggacagaactacttcatctgcaattatgttggtcactgcgagtctgggatgaaaattgccatcaacgctgcctgagtttaataat

SEQ ID NO: 46425 - DNA, 390 bp, Glycine max
  Clone ID: LIB3139-101-P1-N1-D2
tggtgatgttggcaagggttgtgctgctgcaatgaagcaggctggtgctcgtgtcatcgtgaccgagattgatcccatctgtgcccttcaggctctcatggaaggccttcaggttctgaccttggaggatgttgtttctgaggctgatatctttgtcaccaccaccggtaacaaggacatcatcatggttgaccacatgaggaaaatgaagaacaatgccattgtttgcaacattggtcactttgacaatgagatcgacatgcttgggctggagaactaccccggcgtgaagcgcatcaccatcaagccccaaactgacagatgggtcttccctgagaccaacaccggtatcattgtcttggctgagggtcgattgatgaacttgggatg

SEQ ID NO: 46426 - DNA, 389 bp, Glycine max
  unsure at all n locations
  Clone ID: LIB3139-101-P1-N1-D3
agactttaaagtttatgcacatgggttctctactggaacaattggtggaattggtgctggggcatgtgtgattgtcatattgatgctctttgctctttggaagatgggtttcctttgtcagaaagatcaaacagaccaagaacttctaggtctgaaaacaggttatttcagtttaagacaaattaaagctgctactaataactttgacccagcaaataagataggtgaaggaggctttggaccagtattcaagggtgtactatcagatggtgctgtgattgctgttaagcagctctcctccaaatcaaagcaagggaatcgtgaattcatcaatgaaataggcatgatatctgctttgcagcatccaaaccttgtgaaactntatggct

SEQ ID NO: 46427 - DNA, 249 bp, Glycine max
  Clone ID: LIB3139-101-P1-N1-D4
gtgattgggcctcattggtacaagtgtttttaacaaacagcaacagtacagagcattttgatgcatgtaagtggacaaaatcagaaccacattcctgggaattgatcttcccaatagaagtatgtggtcctaataatggttttgaaatgtggagttctgagtgggcaaatcaaacttcatggcatttgagtttccttattgacaatcccaaacagtctacaggttttgatattctcttgggaatctctc

SEQ ID NO: 46428 - DNA, 360 bp, Glycine max
  Clone ID: LIB3139-101-P1-N1-D5
ggaggagtcttccttgacaattttaatgtttccacgcggtatgcgcccctcggtggcgctgaattgcagcggtttgagcactcaccaaacttcactctgaactctgatgacgatggtgatgatcacacaccagaggatgacaatgttgggaacaagaaggtggttgttgtggagcatgctgttaatggtaatggcgtattgcctcacaccactgagtgaatcatgttatgttaagagaacaatagttcaaattgtataaaggggccggtttgtattgattgtttttgctgtttgctgtgtcttgtgtttggcatgataaaatagtacaatgtgccggaaattgctttggattgaattatg

SEQ ID NO: 46429 - DNA, 391 bp, Glycine max
  Clone ID: LIB3139-101-P1-N1-D6
gcaacagtgagaacaccattgaattttgattctagcaagcagagcttttgtcaattttctattgaccttctcggtggaggaattttagtggacaaaactggagattggatcacacttatacaaaattctccaattagtaacttgttgagagttgctgcttggaagaaaggctgtttaatggttaagattgtgatgtctggaaatgcagcagtcaaaaggagtgattgggcctcattggtacaagtctttttaacaaacagcaacagtacagagcattttgatgcttgtaagtggacaaaatcggaaccacattcctgggaattgatcttcccaatagaggtatgtggtcctaataatggttttgaaatgtggagttctgagtgggcaaatc

SEQ ID NO: 46430 - DNA, 380 bp, Glycine max
  Clone ID: LIB3139-101-P1-N1-D7
cccgaatctcccagagaaacaaagaaaagaagaaaatggctgtggccaacaatgtgctttgcattttcttcattatctccttaacatgtatggttcaagctcgaatcccaggggtttactctgctggtgcatggcaaagtgcccacgccaccttctacggaggctccgatgcttccggcaccatggggggagcgtgtgggtatggaaacctgtacagccagggttatggtgtgaacacggcggcattgagcacggcgctcttcaacagcgggcttagctgcggtgcgtgttttgagataaagtgcgcaaacgacaggcagtggtgccactccggcagtccttccatcttcatcaccgccaccaacttttgccctcccaac

SEQ ID NO: 46431 - DNA, 381 bp, Glycine max
  Clone ID: LIB3139-101-P1-N1-D8
atcttaaaccacatgttgccattttggatggaataacaatgggaggtggatctggaatttctctaccaggaatgttccgtgtggtaactgataaaactgttttttctcacccagaagctcaaataggtttccacccagatgcaggagcttcttatgttttgtctcgtctacctggctacttaggggaatacttggcccttacaggagataagcttaatggtgttgaaatgattgcctgccgccttgctactcattattcactaaatgcaaggctctctttgcttgaagaacgtcttggtaaactaatcacagacgaaccttctgttgtggagtcatccctcgcacagtatggtgatcttgtttatccagataggagcagtg

SEQ ID NO: 46432 - DNA, 382 bp, Glycine max
  Clone ID: LIB3139-101-P1-N1-D9
gttccttccattcctttcttccggatcacagggaagataaaaaagaatggagttggacttgacaccaaagacagcagaagtgttgtttgagggagatggtggaggttactacacttggtggagttctaaagtgccactgctggccaagaccaatgttggtgctggtcggttagtgcttcagcctcagggctttgctattcctcattattcagatatatccaaagtaggttatgtgcttcaagggaacgatggcgtagctgggatggccctccgcaacagtactactagagaagaggtggttgtgaagcttaagaagggagatgttataccagtacctattggaagcgtctcgtggtggttcaacgatggggactcagatctt

SEQ ID NO: 46433 - DNA, 155 bp, Glycine max
  Clone ID: LIB3139-101-P1-N1-E1
tagggccttggttaaggggacctattccgagacccttgcaggacttattaaagggctgccaaagttattttggggacctactccatgtttggccttgttgggaacctaccagaggaattaaagaagggggcttcctttggggaaggggtgggggc

SEQ ID NO: 46434 - DNA, 383 bp, Glycine max
  Clone ID: LIB3139-101-P1-N1-E10
cacttgtagaagccaggctgagcctgttgactcagaaaaagtccaagaactgagtgtgtatgagatcaacgagcgtgaccgtggaagccccgtttatcttcgattgagctataaaagtgtcaattcccttggtgatttagtcccctttagcaacaagttgtacactggagatttgcaaaagcgcattgggataacatctggtatctgtattttgatccaaaacaaagctgaaaagaaaggggacaggtatgaagcaatcttcagcttctactttggagactatggtcacatagcagtgcagggaccttacctgacctatgaggacacatatttggctgtgactggtgggtctggcatatttgagggtgttaaaggtcaagtga

SEQ ID NO: 46435 - DNA, 347 bp, Glycine max
  unsure at all n locations
  Clone ID: LIB3139-101-P1-N1-E11
ctcccttaaaagaaatttttttaaanncaacacagagagatgagaagggtttttactatatggaaagaactcccctttccacatatgacggttttcctcatgtgctttcacgcaaaaatggcaaaaaaggcaaaaggagattcgcctctgtggatggtgaacagatgacattgattccaggaaccagtgttgaacaggcttacaacaagctaatagttgaacttgagaaaaaagttcctacattggttggcatttaatgtcccaaggatgaaaaacttcctcgccgcataatttatgacaaacctaagacgcgctgctttactattctccctatggagtttaaatct

SEQ ID NO: 46436 - DNA, 372 bp, Glycine max
  Clone ID: LIB3139-101-P1-N1-E12
aaaggacgcacctgctgttggcttgttgttcaaggatggcaatttgtaagaaagatgtttggagagttgaatgtggaatcccttctggatttccgctcacagttatttgcaatagcatttttaatgagatgctcattagatatagctatgaaaaattactgcgccaggctaaagctccaagtatgtttttacaatccttcaaaaattttgtttctttgtgtgtgtatggtgatgataacttaattagtgttcatgaatatgtcaagccttactttagtggttctaaattgaaaagctttctagctagtcataacatcaccattactgatggtattgacaaaactagtgcaactttgcaatttaaaaagttag

SEQ ID NO: 46437 - DNA, 169 bp, Glycine max
  Clone ID: LIB3139-101-P1-N1-E2
ccacacctccttatacactcttcttctctatctaacaacaccccacaaaaattaaaaattaaaaaaattaggggtttcaatttggggaaataaaaatagggggaaacattctagagagagtgtgttgaaaatatgggtgtcgatgatattacgctgtgcatcatcatcg

SEQ ID NO: 46438 - DNA, 368 bp, Glycine max
  Clone ID: LIB3139-101-P1-N1-E3
ttaggctccaatggtcctcttaactactctcagtcaaattctcagcaagtcagtaacaacggcttgagtcctactgccagctttccctttcctggaaaacaagttcctcctgtgcctcttcaagtggagaaacagaatggttggcaagattatcaaacttatgatcttttaaaatcacatcatggtcagcagcttcagccacaacagctcacaactggaaaccagcagttttctcctctgcccgagcaatttcaaggacagtcaatgtggacaggtcgttactttgtgtgatgtcagtatgagagtatagatggcatattgcgaatgtgctgcatccttttgctactcaatcaaactccagcttagct

SEQ ID NO: 46439 - DNA, 388 bp, Glycine max
  Clone ID: LIB3139-101-P1-N1-E4
atcgagataactagaaacagtgtgatgaaaatgaaggtccttgttgtcttcggtgctacaattttggtagcatggcaatgccatgcgtacgatatgttccctctccgaatgaacactggctatggtgcccgtactccggaggtgaaatgcgcaagttggaggcttgctgtggaagcacacaacatctttggctttgagaccattcctgaagagtgcgttgaagcaacaaaggaatacatccatggcgaacaatatagatcagactccaaaacagttaaccaacaagcttacttttatgccagaaaccctcaagtccatcccaaggacacatttgtgttcagtatagatggcaccgtactctctaatattccatactacaaaaaacatg

SEQ ID NO: 46440 - DNA, 384 bp, Glycine max
  Clone ID: LIB3139-101-P1-N1-E5
gtctcgttattctccggttcctcgcaggtaccaccaattccatatatgtgcgtgtaaatactccaacttgtcccaattcacacatttacctcgcaattctccgatgcgttacacctttgtccaccgattcttctttaactttcttccctttttcacccaattcaactaaattttctgctatctatattcccagataagtaaagtcagatttttcttggtgaacggacatgcagaagtagtctgcactcaacttccaagctctccactagaacaaaagcaaagattatactgtcataaaacgtttgcagacttattttgatgggtgctcctaagcagaaatggactgcagaggaagaagcagcgttgaaagctggagtagtcaaa

SEQ ID NO: 46441 - DNA, 390 bp, Glycine max
  Clone ID: LIB3139-101-P1-N1-E6
ggaagcttttcaggtcatgaatgctcagaagatgctgaagacagcaatgaggaccctgtagagaaggaattcgaagattttctttattccagtggggtgaatcctaatgtgtatgtcctttcatctggaagatgggatgtaaatcaagaagctcaatcaagctcaagaccaccaacaattgatcaagagtttgaggagtacttttctatgcttatgctctaggacagtttaccgataaaggagcatgcatagttgtatatataatgctgaaaacggctgttgtatgtattgtacgaagatttagtagtattctgatgactttataacatcttcagtaggtgtaatatgatatttcttcttatggcctttgttctctttatctctcaccct

SEQ ID NO: 46442 - DNA, 359 bp, Glycine max
  Clone ID: LIB3139-101-P1-N1-E7
ggaaaactgagaatgctggaggggagtattcaacacccactgcacacggcttcataactaaaccgccatcgctatcttcgactttctgcgccccaaagatgagaaaacgcaccgtttacgcatggcttgtagcacttctttgcttcctagttctcatgatcgtcaccccatccatcccccagtcccaagaataccatgatttcgccgaccaccgcaccttcctcggtattcctaatgcacttaacgtcatatccaatttcccttttctggttattggcctcgttggacttgtgctctgttatcatggaaattactttaagctcagcttgcaaggtgaactatggggatggacatgcctc

SEQ ID NO: 46443 - DNA, 384 bp, Glycine max
  Clone ID: LIB3139-101-P1-N1-E8
cagaatctgaaaggtccctgatggaaagagttcgtcaggagcttaagattgagctcaagcagggttttaagtcaagaattgaagatgttagggaggaaatattaaggaagcggagagctgggaaattaccaggtgacacaacatcggttttaaaggcctggtggcagcaacatgctaagtggccctacccaactgaagatgacaaggcaaaacttgtggaggagacagggttgcagctgaagcaaatcaataattggttcatcaatcaaaggaaacgcaactggcacagcaactctcaatcggttaactctctgaagtccaagcgcaagagagagtatgcccactaaggattccagtctggtgcataagataacaggtgatgca

SEQ ID NO: 46444 - DNA, 386 bp, Glycine max
  Clone ID: LIB3139-101-P1-N1-E9
atttggtggaaacattgaagcaacatgcttacaaaaatacggataatttcaaatcaattcatgagacatcattgagctgctcaaaaccattgacatttctaggagtagggcaatctgatgctacagagcaaagtctgcaacggttcaatatctctacagaacaagaaggtcatcaaggaacatgggttggtaatggtcaaccatatgcctcaacttcatatacagatgaaagcgtacatagttaccaaatctatgctgatccagtgccagacataacagacatgccactgaacaatccttatggtagcaattcaatgaaggattttttctctggattgtgcattgaaggggataggtgggtcccttatggataatatttgcatctt

SEQ ID NO: 46445 - DNA, 359 bp, Glycine max
  Clone ID: LIB3139-101-P1-N1-F1
cttccgtaggctggtattcggttcgagaaacccaatgccctaatcccagcaggaggaagcagctgttaagaaaaagtatggagggatgttaccaaagaagcctccactaatatcgaaggatcatgaacgtgcttactttgactctgctgattgggctttggggaagcaaggagcacaaaagcctaaaggaccacttgaagcactccgcccaaagttgcagccaacacaacagcacgctcgttcaagacgctcagcttatgctccagcagatgataatgaagttgatggctgcaacagtgatgcatcagcagagcatcagagtgctactgaagaaagttggtggtgataaaagtgatact

SEQ ID NO: 46446 - DNA, 381 bp, Glycine max
  Clone ID: LIB3139-101-P1-N1-F10
gtaacttattgagagttgctgcttggaagaaaggctgtttaatgggcaagattgtgatgtactgggaatgcagcagtcaaaaggagtgattgggcctcattggtacaagtgtttttaacaaacagcaacagtacagagcattttgatgcatgtaagtggacaaaatcagaaccacattcctgggaattgatcttcccaatagaggtatgtggtcctaataatggttttgaaatgtggagttctgagtgggcaaatcaaacttcatggcatttgagtttccttattgacaatcccaaacagtctacagtttttgatattctcttgggaatctctcaagattttgaaattgctggtaatactcttatgccagctttttctgtt

SEQ ID NO: 46447 - DNA, 382 bp, Glycine max
  Clone ID: LIB3139-101-P1-N1-F11
gagaaactttaagcagatgtctaatgttttatgggtggctcctgaggacaaggcgagtttatggtcacaacttcattatgtttcgtgcaataatctggaaatgcaagaagcttatcttgtcaatctcgtaaatgtgttacgagaattgtatttgcacagtccagaggaagctcgccaattgagaaggaaagctctctctcgtattgaatggctgcaaaaagctgatgtgcctaccatagcacagattgaagagttccattcgatgcagaggatgatgaatgctcctgattcaaatgataatattgatctactgttgagcattgatttgttgggtttacaaggagcaggtaaagcttttccaaacaagattgtttttgatgat

SEQ ID NO: 46448 - DNA, 380 bp, Glycine max
  Clone ID: LIB3139-101-P1-N1-F12
gaatatgtcaagccttactttagtggttctaaattgaaaagctgtctagctagtcataacatcaccattactgatggtattgacaaaactagtgcaactttgcaatttagaaagttagcagattgtgattttctcaagagaaactttaagcagatgtctaatgttttgtgggtggctcctgaggacaaggcgagtttatggtcacaacttcattatgtttcgtgtaataatctggaaatgcaagaagcttatcttgtcaacctcgtaaatgtgttacgagaattgtatttgcacagtccagaggaagctcgccaattgagaaggaaagctctctctcgtattgaatggctgcaaaaagctgatgtgcctaccatagcaca

SEQ ID NO: 46449 - DNA, 143 bp, Glycine max
  Clone ID: LIB3139-101-P1-N1-F2
gggtggtccctctattgatggggaaaatattcttggaggaaggagcaacccatctggatctaagccaagaagggttccacccaacctaaggaaagggtcaaaattggctggcctcttgtattcccggggaaggagggggaaaa

SEQ ID NO: 46450 - DNA, 362 bp, Glycine max
  Clone ID: LIB3139-101-P1-N1-F3
gtgcaaagaatgctattctcatgaatatgccaaatgctgttctttcaatgtggagatattttgttggagatctcgtctttgaagtttctaagatgacttctccctacattaaatgtacagtctctttcttcatagcatttggaaatttggctgatgacaccatcaattttgaggcttttccccacaagctggtgcagtttggagagattcaggaaaaagctgtgttgaaattttcacaagaggaatttcttacagcttggtcaactcaggtgcgtcccgcaacgactctgttggctgatgggtgcccatatttgtatgctatggtgcatgatagttcagtgtctacaataccaggtgatttt

SEQ ID NO: 46451 - DNA, 391 bp, Glycine max
  Clone ID: LIB3139-101-P1-N1-F4
ggatgggaaaactgactttcccccagggcacttcccgaagtgttaagagaatgcctctttctatagggggaggagctggtgcaaagaatgctattctcatgaatatgccaaatgctgttctttcaatgtggagatattttgttggagatctcgtctttgaagtttctaagatgacttctccctacattaaatgtacagtctctttcttcatagcatttggaaatttggctgatgacaccatcaattttgaggcttttccccacaagctggtgcagtttggagagattcaggaaaaagttgtattgaaattttcacaagaggaatttcttacagcttggtcaactcaagtgcgtcctgcaacaactctgttggctgatggggtccatatttg

SEQ ID NO: 46452 - DNA, 369 bp, Glycine max
  Clone ID: LIB3139-101-P1-N1-F5
ggatgggaaaactgactttccaccaggtcacttcccaaagtgttaagagaatgcgtctctctatagggggaggagctggtgcaaagaatgctattctcatgaatatgccaaacgctggtctttcaacgtggagatatcttgttggagatctacacttcgaagtctctaagatgactcattcctacattaaatgcacagacactgtattcataacacccaggagattttgctgaagacaccataaaagctgaggcttctaagcacagacccgcgcaccctgtagagattcaggaagatgttgtatcgacaccctcacacgaggtgtttcatacacctagccaaactcaggctcttcttgtaccaaccctg

SEQ ID NO: 46453 - DNA, 390 bp, Glycine max
  Clone ID: LIB3139-101-P1-N1-F6
ctccagtgggttcttcttcttctattacaacaacgtcgtccaagaccatgaccatggccatggccacgatcctgctcctgttcacggtcttcgcggtttcatcggccctagacatgtcgataatctcgtacgacaacgcccacgccgccacgtcgcgcagcgacgaggagctgatgtccatgtacgagcagtggctagtaaagcacggcaaggtgtacaacgcgctcggagagaaggagaagaggttccagatcttcaaggacaacctgcgattcatcgacgaccacaactcccaagaggaccgaacctacaagctcggactgaaccgggttcgggatctcaccaacgaggagtacagggccaagtacttgggaacccaagatcgatccc

SEQ ID NO: 46454 - DNA, 380 bp, Glycine max
  Clone ID: LIB3139-101-P1-N1-F7
ctcgagccgctcgagccgctggagattggatcacacttatacaaaattctccaattagtaacttgttgagagttgctgcttggaagaaaggctgtttaatggttaagattgtgatgtctggaaatgcagcagtcaaaaggagtgattgggcctcattggtacaagtctttttaacaaacagcaacagtacagagcattttgatgcttgtaagtggacaaaatcggaaccacattcctgggaattgatcttcccaatagaggtatgtggtcctaataatggttttgaaatgtggagttctgagtgggcaaatcaaacttcatggcatttgagtttccttattgacaatcccaaacagtctacagtttttgatattctcttg

SEQ ID NO: 46455 - DNA, 383 bp, Glycine max
  Clone ID: LIB3139-101-P1-N1-F8
cactcccaccgaccaaaacgcgcaacacgttgtaattaaaacgacaccgaaactaatgggcgtcttcagcgaaaacccgaatccggacccggttgtgatccgccaggtttgggcttcaaatctcgaatccgaattccaactcatccgcgaactcatcgaccactatccttttatctcgatggacacagaattccccggtgttgttttccgaccacacctggaccccacaaaaccctacaaccaccgcaacaacaatcgcaaccgccactccgaccactaccgcctcctcaagtccaacgtcgacgctctcaacctcatccaggtcggcctcactctcaccgacgccgccggcaaccttcccgatctcgccggaaaccgctcca

SEQ ID NO: 46456 - DNA, 336 bp, Glycine max
  Clone ID: LIB3139-101-P1-N1-F9
atcgcgtctacgtgttcttttcctctgttttaattgttcgtcatgccttcttactctttatagatattataattctccatgtacttcattcatgttcgcaccactttcatgtaccaatgaataagaatttctttttgcataggatgtaaaaaatatttcttaataaaattgtccttgttacaattaaaaatacacgaagttgatttccgaccacacctgaacccaacaaaaaccatacaaccaccgaaacaacaatctcaaccagacactccaaccactaccgactacttaagtccaacgtcgacgggtctccccctcatttaggtcctcctcacc

SEQ ID NO: 46457 - DNA, 128 bp, Glycine max
  Clone ID: LIB3139-101-P1-N1-G1
cttccttagcctcgaattccgcttggggatggtcctaaaactaacttgcttggacccaattatttgagttgaggaagtgatggaagcagtttacaggttgaaacctcttttggatgtggttagagttg

SEQ ID NO: 46458 - DNA, 384 bp, Glycine max
  Clone ID: LIB3139-101-P1-N1-G10
caagcatgtttttacaatccttcaaaaattttgtttctttgtgtgtgtatggtgatgataacttaattagtgttcatgaatatgtcaagccttactttagtggttctaaattgaaaagctttctagctggtcataatatcaccattactgatggtattgacaaaactagtgcaactttgcaatttagaaagttagcagattgtgattttctcaagagaaactttaagcagatgtctaatgttttgtgggtggctcctgaggacaaggcgagtttatggtcacaacttcattatgtttcgtgtaataatctggaaatgcaagaagcttatcttgtcaatctcgtaaatgtgttacgagaattgtatttgcacagtccagaggaag

SEQ ID NO: 46459 - DNA, 376 bp, Glycine max
  Clone ID: LIB3139-101-P1-N1-G11
gcggtctctcaccgcacgcactagcactgtctctcactgaaacttgttcgcacattttcacggatctaactaagttatcgccatgaatcgccaccacgatcccaatcccttcgaagaagaagaagtcaatcctttttcgaatggcactactgctcctgcatcaaagtcacgtattccaccattagcatctgagtcactgggctttggtcaaaggcatgatgctacagttgatattcctttggatactacaaatgactccaagaaaaaaggtcaagagctagcagcttgggaagcagatttaaaacggagagagaaggaaataaaaagaagagatgaggctgtttctagagctggtgttcctgttgatgataagaat

SEQ ID NO: 46460 - DNA, 385 bp, Glycine max
  Clone ID: LIB3139-101-P1-N1-G12
cctaaaccttcgctccatcatatacctgtgccccgagccttatccggaagaaaatctcgagttcctccgctcgcagaatattcgcctctttcaatttggaattgaggggaaaacggacgtttctatgcctgttctcaaggattctatcatggatgcactgaaagttttaattgatgtgagaaatcaccccattttggttcattgcaagcgaggaaagcatagaacaggttgcctagttggttgcttgcgaaaattacagaactggtgttggtactcctcaaacacagaggacaaacgatttgctggtgctaaatccaggacaacggatttaacattcatagaaatgtttgatgttctaagtctgagtcagtgcctttacagcatc

SEQ ID NO: 46461 - DNA, 396 bp, Glycine max
  Clone ID: LIB3139-101-P1-N1-G3
tgatttttttacaataacccaatcatagtctcactcgggattgggtattcttatgctaagagataatccaaatccaaacccaaaagaacaacacaatgaaaggagaatacgtagagcaacagcaacaacatcctaagagtgaaacaccacctagtatgttctcaaagcttcagcctcagcaccatcctttcccgcaccaccctttccaactctccgccgaggatgccaccaccatcaccccgagcaccgctcagaaggccaactcctccggcggcgacggcgcgaccatcgaggttgttcggcgtcccaggggacgtccgcccgggtccaaaaacaagcccaagccaccggttatcataacccgtgacccggaacccgctatgagtccctacattt

SEQ ID NO: 46462 - DNA, 368 bp, Glycine max
  Clone ID: LIB3139-101-P1-N1-G4
agctagctaggttgaaaatagtttggttttgtagtaagtgaggtgaggtgccaaaatggtgaagataactcttggtactttcgatgactcttttggtgttgcctctcttaaggcttatttggcagagttccatgcaactctgattttcgtgttcgctggtgttggttcagccatcgcttacaacgagcttacaaaagatgcagccttggatccaacggggctggtggcagtagctgtggcccatgcatttgcactgtttgtaggtgtctccgtcgcagccaacatctcgggtggccatttgaacccagctgttacttttggattggccattggaggcaacatcaccctcattactggtttcttatact

SEQ ID NO: 46463 - DNA, 389 bp, Glycine max
  Clone ID: LIB3139-101-P1-N1-G5
ggatttcgaaacacaagatgatgctaccaaagctttagagtgtacaaatatgaggaagatcctggacagggtggtatctgtggagtatgctctgagggatgatggtgagaggggtgacaattatgacagtcctagaagaagagggggttatgagagatcacccagtccttatcacaggcgaccaagtgctgactatggtcgtacacgcagccctgtctatgataggtacaatggtggtggaccagacatgcggaggagtcctgattatggcaggcacaggagtcctgactatggcaggcgcaggagtcctgattatgggaagcccaggagtcctgaataccgtagatatcgcagctgttcacgttcgccggtgcgaaggtcgagaacat

SEQ ID NO: 46464 - DNA, 396 bp, Glycine max
  Clone ID: LIB3139-101-P1-N1-G6
ctcagagtcatttaagggaatattctatgcaaggtttacgaactcttgttgttgcgctccagggatctttcagatgctgaacttgaggagtggcaaagcatgtatgaagatgcgagcacttcattgacagatcgagcagcaaaactacgtcaaacagcggctcttatagaatgcaacctaaagcttcttggagcaactggaattgaagacaagctacaggagggtgtaccagaagccattgaatccctgcggcaagctggaatcaaggtctgggttcttaccggtgataagcaagagactgcaatttcaattggtctttcttgtaaacttctgagtgcagatatgcagcaaataattataaatggcacttcagaggttgagtgcagaaatctcttg

SEQ ID NO: 46465 - DNA, 382 bp, Glycine max
  Clone ID: LIB3139-101-P1-N1-G7
gacccattgagatgctgtcttgttctttaaggagatgaaggaagtgggagtgacgcctgatgttgttacgtacaatagtttgatggatgtttattgcaaggggagggaaattgagaaggcctataagatgcttgatgaaatgcgtgaccaggatttttcgccggatgtgatcacgtatacttgtatcatcggcggattggggttgattggacagcctgataaggctaggaatgttttgaaggagatgaaggagtatgggtgttaccctgatgctgcggcttacaatgctgccatcaggaacttttgcattgcaaagaggcttggtgatgctcatgggttggtggaggagatggtgaccaagggtttgagtccgaatgcaacg

SEQ ID NO: 46466 - DNA, 384 bp, Glycine max
  Clone ID: LIB3139-101-P1-N1-G8
tcaacatctaacaccacacacacgcaacacgcttgagccactatgcttcaaggaaaaacaaaatgaaagacacaatggaaactcctacgacactcaccaccttgctccgccacgtcgccgccaaattcccctcccgccgtgccatctccgtcgctgccaaattcgacctcacccactcccgcctccaccgtctggtcgaatccgccgccgctcagttagtctccgccggcgtcaaacccggcgacgtcgtcgccctcaccttccccaacaccatcgagtttgtagtcatgttcctagccgtcattcgggctcgagccacagccgcgccgttaaactcggcttacacagcggaagagttcgagttttacttatccgactcggagt

SEQ ID NO: 46467 - DNA, 168 bp, Glycine max
  Clone ID: LIB3139-101-P1-N1-G9
gctcgaagtaagagagaaagaaataaagaattggcgtgagtcgctcgcaagtttgtgatggcggcctcttcttcctctctctctgcctccgacgactcttcttctcaccgtcgcaggcgtcaccaccgccatcgccgataccgtgataaggactccctcaagattcga

SEQ ID NO: 46468 - DNA, 375 bp, Glycine max
  Clone ID: LIB3139-101-P1-N1-H10
ctcgagccgcaggtgcgtcctgcaacaactctgttagctgatgggtgtccatatttgtatgctatggtgcatgatagttcagtgtctacaataccaggtgattttgttattggtgttaagttgacaaccataaacaatatgtgtgcatatgggctcaatcctggtatttcaggttctcgtcttttgggcaccattcctcagtccatttcacagcaaactgtttggaatcaaatggcaacagtgagaacaccattgaattttgattctagcaagcagagcttttgtcaattttctattgaccttctcggtggaggaattttagtggacaaaactggagattggatcacacttatacaaaattctccaattagtaac

SEQ ID NO: 46469 - DNA, 372 bp, Glycine max
  Clone ID: LIB3139-101-P1-N1-H12
ctttcgttattctcttattcatccttctcttctgaataatccagatctctttctgcccttttctccgtcacgcttttcgtgaccggatctgtatggatttgatccagatctacacgccgatggtggttttggccgggtctttcatagatctggtgcgtagaggctcagatctacggtaccgaggtgtgtgattcatgttcgtcttgcttttggaatctgtttcgtagaaagtcgtttggtcttgcatatggcatggctcctgaggtatttttttgcaggtacaacagagaatcgatgacaagaacgcagatccgacggtagatccagccgattccgcttgttcgatcgctacagacccctgtatcggatcat

SEQ ID NO: 46470 - DNA, 384 bp, Glycine max
  Clone ID: LIB3139-101-P1-N1-H2
ccgtccaaaagtgacgttctcaacacaagaacggttttctgtgtctaagcgctcttagtggttccgattctttctccactttcaacttgtccgtttctcactctccctcaaatctcattctctctctctctctcttccttcacattctctcttttccgcccatttcagttgagccattctctcttctgcttctactttctagtcaattcaaccccccatcttcacctctgatccaaagctgagaacttgctttctgggttcaatagctacactcacatgctgttgtgggttgcctttaaaacatcacctttgaagacatctcgggtcgctaactaaccccttttgttgattttgcaacagaaaggtttaataataataataaaa

SEQ ID NO: 46471 - DNA, 383 bp, Glycine max
  Clone ID: LIB3139-101-P1-N1-H4
attctctctctctcccccctgcttcaatggagggttttacgtaggtttaaccccaaataaactcgaaacaaacgaaagctcttcaactcaccaccatgagaaaactctggaattcgctgtctctcctcgctcgtcggagatcaactttttccttctccaaatcgtattcttccgatgcacccttcaaccgctgcaccaaaacccacggtttactcatcagacccaacaacaaatttgcgaccaccccatttcgaaacatggaaaccctcgtccagaaatcctctccaatcccctcgaggcagcgaaaaatcatggaaaaatcgcagcttgacgaagctttcgagtccgcagaaaccaccgaggaaatgctcaaagtcttcagc

SEQ ID NO: 46472 - DNA, 357 bp, Glycine max
  Clone ID: LIB3139-101-P1-N1-H5
ctctaaaccctgcacttgtgtatcccactgcgtgttgttcttgttcaatggcacgcctatttcgttccctcagaaaaaccctaaccctaaccctaaccctaacacaccaatttcagcatcaaccatgcatttctcgaagaagttacatatccgacatgcgcaaatcagctttcgagggaaacatcttgagactcctccgcaacgagattcaatacgagcttcagtcctctcctcccaacaaccctgttaccaagtttaattcctttattgtggatggtcgagctggggagcgatggattacgttgaaaagacaatacgctgatgaagacattaaacttgaagtcaccatgtttgatg

SEQ ID NO: 46473 - DNA, 374 bp, Glycine max
  Clone ID: LIB3139-101-P1-N1-H7
tgaaaaaggagaaacatttgcaatctttgaaattgactgaggtgactgtaagtgaccagcttgaaggttttcgagcatcaaaagagcatttcaaaggattgagtttccccactatttcttcagttggctcaaatgcagctataattcactatcttccaaaggcagaaacatgtgctgaacttgatccagacaaaatttatctttttgattctggagcccagtatctagatggaacaacagatattacacgaacagttcattttggtaaaccttcgactcacgaaaaagcgtgttatacagcagtcctaaagggtcacattgctcttggaaatgctagatttcccaatgggacaaatgggcattctcttgatatt

SEQ ID NO: 46474 - DNA, 353 bp, Glycine max
  Clone ID: LIB3139-101-P1-N1-H8
aaactccgtctccgcaataacggaataaaaaaacaagtttaattactattatggcgccgagggatcataagacaagcaacgctaaggctaacggtaacggtaacagcggggtgaaggaggtgcattttcgtggagtgagaaagaggccgtgggggagatacgccgcggagatcagagatcccggcaagaagagccgcgtctggctcggaaccttcgacacggcggaggaggcagcgcgtgcctacgacgccgcagcacgagagtttcgcggccctaaggccaagacaaacttccctctccctttggaaaatgttaagaactcgagccccagccagagcagcaccgtcgagtcc

SEQ ID NO: 46475 - DNA, 356 bp, Glycine max
  Clone ID: LIB3139-101-P1-N1-H9
gcaatttgtaagaaagatatttggagagttgaatgtggaatcccttctggatttccgctcacagttatttgcaatagcatttttaatgagatgctcattagatatagctatgaaaaattactgcgccaggctaaagctccaagtatgtttttacaatccttcaaaaattttgtttctttgtgtgtgtatggtgatgataacttaattagtgttcatgaatatgtcaagccttactttagtggttctaaattgaaaagctttctagctggtcataatatcaccattactgatggtattgacaaaactagtgcaactttgcaatttagaaagttagcagattgtgattttctcaagag

SEQ ID NO: 46476 - DNA, 360 bp, Glycine max
  Clone ID: LIB3139-102-P1-N1-A1
ttgggattggagggattgacgctgcgtctcttcctcttctctttcgatccatccctgattcctaatcctccaatccaaccacctcagcctgacactcacatatacacatatctgaacgcgtatcgtccctcctatggcttcaaagcgcatgctcaaggagctcaaggacttgcagaaagacccaccaacttcttgcagcgctggtccagtagctgaggacatgttccattggcaagcaacaataatgggtcctgctgatagtccttatgctggaggtgtattcctagtcactattcacttccctccggattatcctttcaagcctcctaaggttgcctttaggactaaggtgttcacccg

SEQ ID NO: 46477 - DNA, 448 bp, Glycine max
  Clone ID: LIB3139-102-P1-N1-A10
atcaatttctatctctcttatactctcactactctctttgctctttcttttctccactatggctgcacaagaaaacaacttccaagactacttgcctgtgatggccaacaagcttggtggggatggcctaattgatgaactgtgcaatgggttcgatcttttgaaggattctgataaaggggtcatcacttttgagagcctcaagaggaattcttacttgcttggtcttcaaggtctcagtgatgaggatcttcgctccatgggttttggaaggtgactttgatggtgacggtgcactcaaccagatggaggtctggggtctgatgttcagactcagccctgaattgatggagggctcaaagatgtggcttgaacaagtccttcaacaagagcttaaagattatttctaattcttggaatttttttctctttctcccttactctttta

SEQ ID NO: 46478 - DNA, 365 bp, Glycine max
  Clone ID: LIB3139-102-P1-N1-A11
ctcaagccgtaaggttttaatttttgagtaccactaccaatggtgagtttgttcaagggaaagatctcgcaatggctaaagttaatgttacatgtgctgctgttggatcgacatcaagttacactccaactccattgatacgaatctggtttgcaaaaagacagagggtataattgtggagtatttaggaaggatgtattaccttgctcataatcgttactagctcccaagagaaagatctgatagaggaagatctttccttcgatattaaagtatcgctctagataggaaaacggttcacttacacaaacacaattcggtagcggaaaaaccttactatatcatataattgatgctggctcaca

SEQ ID NO: 46479 - DNA, 418 bp, Glycine max
  Clone ID: LIB3139-102-P1-N1-A12
ctcgagccgcaaggtttcagcttttgagtaccactaccaatggtgattttgttcaagggaaagatctcgcaatggttaaagttaatgtagcatgtgctgctgttggcttgacatcaagttacactccaactccattgttggaatctggtttgcaaaaagacagagggttaattgtggagtattttggaaggatgtcttacgttgctcataacgttaatcagccccaagagaaagatttgttagagggaaatttttcctttgatattaaatctcgctctagattggaaaaagtttcctctacaaaagcacaatttgttagtggaaaaaccttcaaatatgatataattggtgctggttcacattcttcaggagattttcctgaaaaggaagatcaagaaaaacccaaaaagattgatac

SEQ ID NO: 46480 - DNA, 331 bp, Glycine max
  Clone ID: LIB3139-102-P1-N1-A3
ctaatgctagcagtattaccaatgggacctgaccaagcggaagaaacacactgcaggtgatgcactggatttatcaaaaccatataaaggtgccctcaaggataaggttaaaggaaagaaaatcatagcttagatatttagtacattcttgtagagtcaaatgaagaaagaacctgtccctgctgcctcattttttggtgttggagtccaactgcttaaaaatatgtcatgctacatgcttgcttcttaaagttaactcctttcttatcaaggggtagaaccatttccccccattttaaaaccttcatttttgtttcataagtttgatcta

SEQ ID NO: 46481 - DNA, 261 bp, Glycine max
  Clone ID: LIB3139-102-P1-N1-A4
gcttcctctcttctctattctaattctatgggacactcttttttaaaacctattccttcaattcccaaacaatggcgaaccttttttaattcaccggccggtttttctttttctttttctttgggttcactcggaccgaattcacttgccttaattggtttcccttccgcgtgaactttcgagagcggttggccccttggcggcacgcccttgtgtttttgcgccttaacttcttcagaggccccgagacccgggggttcc

SEQ ID NO: 46482 - DNA, 314 bp, Glycine max
  Clone ID: LIB3139-102-P1-N1-A5
cccaacaattttgtctcactcccatgatttttaccgaggatctctggccactgctccagcaactcgttggaaaaactcctctcttctcatcttcatcatcagcttcgtcgtccttcttccagaaccttcgggaatcgatgacgaactcaagttgcggaggcgcggagttggagctatgccgagatgaatcagccgcattggttctcaagttcgtcgccatcgcttccattctcctctccggcatggccgggatcgccatcccgctcatcggaaaacaccgccgcttcctccgcaccgacggcaacctcttcgtc

SEQ ID NO: 46483 - DNA, 160 bp, Glycine max
  Clone ID: LIB3139-102-P1-N1-A6
accacccatcctgaaccaattgggatgtttggaccagacaagtacagcgtttgggaaatgacaatctgcctcgcgaatgtacgaattatagtggctagaccactagactggatttcactgatacgggagcctccatttagtcgctttgtggtagtcgttg

SEQ ID NO: 46484 - DNA, 382 bp, Glycine max
  Clone ID: LIB3139-102-P1-N1-A8
tttcgatccttgttatacgaggcatgcggtcgaattgttaacccaatttacgggtcagtgggtttgttatggtccgggagctggcagctctgtcaagccgctgtggaagccgttttgaaaggtgagccgatcacgccgataacatccgaagccgcggctaatgggcgggccccacctctcaaggcctacgacatacgccacgtgtcaaaagaccagaactcggcaaatgaaactccaaagaccaagacccggtcccggttcaagcgaaccagcggcacgcttattaaaccgaaagccagcaaaggaaccgggttcgttccggttgagccggagatggcgaaccggactgcgagtcatgagtcggggctgagccacttgtcgg

SEQ ID NO: 46485 - DNA, 345 bp, Glycine max
  unsure at all n locations
  Clone ID: LIB3139-102-P1-N1-A9
ctcttgggaatctctcaagattttgatattctcttgggaatctctcaagattttgaaattgctggtaatactcttatgccagctttttctgttccacaggctactgccagatcttctgaaaatgcggaatcctctgcatgatctggaattcgtgttttctttcgcttgttcgtttgtttaattcaataaaggaaattaggcatgaccctcttgttgagtatgctctgcctatctgaaaatttccacacctcttttaattgtcgtaatgatgtgtgaagtgtgtgttattttaaaaaaaaaaaaaaaaaaaaaaaaaaaaaaaaaaaaaaaaaaaaaaaaannaaa

SEQ ID NO: 46486 - DNA, 402 bp, Glycine max
  Clone ID: LIB3139-102-P1-N1-B1
gaaatgaaagctctctgtcaactttctccccatcttcccaaactcgcaaatatgcttgaaggaggaggcaaaacgcctatacttagtcctcaagaacttgaagacgttggttataaacttgctatttatccaatttccttgattggggtttgcatacgagcaatgcaggatgcactcactgctattaaaggaggcgctgttcctcctccgggaagcatgccatcttttgaagaaatcaaggacatcgtaggtttcaactcttattataaagaagaggagcgttatgctacaagcaccaatcaccatccttaaaaattataacagaggttggagagaccaatcttaaacaacagcccttgtactgtgtgatgatatcagtctacttttattctcagctacttt

SEQ ID NO: 46487 - DNA, 380 bp, Glycine max
  Clone ID: LIB3139-102-P1-N1-B10
gacaaaactagtgcaactttgcaatttagaaagttagcagattgtgattttctcaagagaaactttaagcagatgtctaatgttttatgggtggctcctgaggacaaggcgagtttatggtcacaacttcattatgtttcgtgcaataatctggaaatgcaagaagcttatcttgtcaatctcgtaaatgtgttacgagaattgtatttgcacagtccagaggaagctcgccaattgagaaggaaagctctctctcgtattgaatggctgcaaaaagctgatgtgcctaccatagcacagattgaagagttccattcgatgcagaggatgatgaatgctcctgattcaaatgataatattgatctactgttgagcattga

SEQ ID NO: 46488 - DNA, 337 bp, Glycine max
  Clone ID: LIB3139-102-P1-N1-B11
atggcaacagcgggaacaccattgaattttgattctagcacgcggggcttttgtcaattttctatcgaccttctcgctggaggaattttagtggacaaaactggagattggatcacacttatacaaaattctccaattagtaacttggtgagagttgctgcttggaagaaaggctgtttaatggtcaagattgtgatgtctgggaatgcaccagtcaaaaggagtgattggaccttattggtacaagtgtttttaacaaacagcagcagtacagaggattttgatgcatgtaagtggacaaaatcagaaccacattcttgggaattgatcttcccaa

SEQ ID NO: 46489 - DNA, 370 bp, Glycine max
  Clone ID: LIB3139-102-P1-N1-B12
cgaagatttagctctttcaaccaacaacttcgattcaaaacggataatcggcgacggcgggttcggctccgtctacctagcaaacctccgcgacgggcggctcgccgcggtgaagtacctccaccgccaccacgccgtttccgccgcgttctccaccaaatccttctgcaacgagattctcatcctctcttccatcaaccacccgaacctcgtgaagcttcacggatactgtagcgacccgagggggcttcttttagtctacgattacatccctaacggaaccctagcggaacacctgcataaccgtaagggctcgctgacgtggcaggtgaggctcgacatcgcgttgcaaacggcgttagcgatggag

SEQ ID NO: 46490 - DNA, 466 bp, Glycine max
  Clone ID: LIB3139-102-P1-N1-B3
tttctgtgcaaccttcaacacccacacaaagtgggcttcagatgcgcgcagaacatgaaccacctccgtgcgagttatccatccaacatcccttcctctcctgtgaggaagccctcagcttttgggttcgactcatcagctgctgtggcaactgcagtgatgaattctaggtctgctgccttcgcaaagcgaagccaaagtttcattgatcgtggagctgcaacccaccatcttgggctgtcttcagcttccaactcttcttgcagggtatcctctacccgttcagattgagttcccctaccgggaaactggattgggggtaaacggagacaagctgaacacgctgaggaaatctacttcctttggattcagaaacacgggggtaactgcatactccatagcacagcctgaatttggtgctgagcccgatgtctcatgggttcattcattggttaagatgttccct

SEQ ID NO: 46491 - DNA, 445 bp, Glycine max
  Clone ID: LIB3139-102-P1-N1-B4
gagacaaagaatagatcctcattacaatgaggttcaggctcaaatggaaacaaatttgtttaaatggtctcttgatgatgttgaaactcctaaaggttccatgttggatcttaaaatttctcaatctaaaattgcacttcccaagaacacagttggaggaaccattctgcgtagtgatttattggcaaattttttgacagagggcaattttagagcaagtgttgatttgcagcgcactcatcggtattagaggaatgattaaaatggtggccacagttggtattcctgagaatacaggtatagcattggcctgtgctatgaatagttcttttagggggcgcgccagttctgatatttacaccatctgctctcaagacttaattgtggaatcctgcttgcacaaaagcaatgactatgtcatttaatccaaacccgtgttctgatg

SEQ ID NO: 46492 - DNA, 403 bp, Glycine max
  Clone ID: LIB3139-102-P1-N1-B6
cgtcgcttcaaactcctctgcggtttccccttcttgttcttcttcacagaaatggaggtagcagtggccaaagcgttgaaaccgagtttaaggagagagttcatcgttcagcaaatgctctgcgaggatattttcagcctgaacgccaacaccgtcgccgccggcgaagatttctccgtcgacgacctatttgacttctctaacggctctcttcacaacgaacaacaacaagaatacgacgaagggaaacaaagtttatcggcttcagaggaccgcggagaagacgattgcaactccaattccaccggcgtttcctatgattcacttttctccaccgaattagccgttcccgccggtgatttggaggacctagaatgggtttcacactttgtggacgattcac

SEQ ID NO: 46493 - DNA, 332 bp, Glycine max
  Clone ID: LIB3139-102-P1-N1-B8
ttcaggaaaaagttgtattgaaattttcacaagaggaatttcttacagcttggtcaactcaggtgcgtcctacaacaactctgttggctgatgggtgtccatatttgtatgctatggtgcatgatagttcagtgtctacaataccaggtgattttgtcattggtgttaagttgacaaccataaacaatatgtgtgcatatgggctcaatcctggtatttcaggttctcgtcttttgggtaccattcctcagtctatttcacagcaaactgtttgtaatcaaatggcaacagtgagaacaccattgaattttgattctagcaagcagagcttt

SEQ ID NO: 46494 - DNA, 471 bp, Glycine max
  Clone ID: LIB3139-102-P1-N1-B9
atggcaacagtgagaacaccattgaattttgattctagcaagcagagcttttgtcaattttctatcgaccttctcggtggaggaattttagtggacaaaactggagattggatcacacttatacaaaattctccaattagtaacttgttgagagttgctgcttggaagaaaggctgtttaatggtcaagattgtgatgtctgggaatgcagcagtcaaaaggagtgattgggcctcattggtacaagtgtttttaacaaacagcaacagtacagagcattttgatgcatgtaagtggacaaaatcagaaccacattcctgggaattgatcttcccaatagaggtatgggtcctaataatggttttgaaatgtggagttctgagtgggcaaatcaaacttcatggcatttgagtttccttattgacaatcccaaacagtctacagtttttgatattctcttgggaatctctc

SEQ ID NO: 46495 - DNA, 478 bp, Glycine max
  Clone ID: LIB3139-102-P1-N1-C1
tgcaacaacgaaaaccaaagaagaaaaaagagtttcttctttccgaaatccaagcagtagggttagggttttttccgatctcaatggcggaggaaccggagagcaccgtcaccaccggcgcccccgacgaatcgctgctcgataagatcaccgagaagcttcacggccacgattcttcctcttcttcctcttcggattccgattccgaaaaaaccgttacttcgtccgttaaggatagggtttttcgcctcttcggaagggagagacccgttcactccgttttcggcgccggaaaacctgctgatgtgttattgtggaggaacaagaaaatatctgctggcgtgcttggcggagccactgctgtttgggtcctttttgagttgcttgagtatcaccttcttacttctgtgtgtcacattctgatactgttgcctcgcagtctggtcttgtggctaatgcccatacttttatccacaaa

SEQ ID NO: 46496 - DNA, 421 bp, Glycine max
  Clone ID: LIB3139-102-P1-N1-C10
gcaaaaggccatataatttttttttatttgaaataatgtccgggatcatccacaagattgaggagaccctccatgtgggagggcacaagaaagaggagcacaaaggagaacaccatggtgagcacaaaggtgaacacaaaggagaacaccatggtgagcacaaaggtgaacacaaaggagaacaacaccatggggagcacaaggagggacttgtggataagatcaaggacaagatccatggtgatggccatgacaagggtgagaaaaagaagaagaaggacaagaagaagaaggagcatggacatgaccatcatggtcatagcagcagcagtgacagtgattagatcttatatgttaagcaagtgtacggtacgatggtagtgaggagccagaatccctcttcctgctttatgatataata

SEQ ID NO: 46497 - DNA, 396 bp, Glycine max
  Clone ID: LIB3139-102-P1-N1-C11
gcttcccagattactgccaaacccaggcttcttgagcctgtctacctggttgaaatccaggctcctgagcaagctcttggtggaatctacagtgttcttaaccagaaacgtggacatgtgttcgaggaaatgcagaggcctggtaccccactttacaacatcaaaacatacctccctgtcattgagtcctttggtttctcgagcacattgagggctgcaacatcaggccaggctttcccacaatgtgtctttgatcactgggacatgatgtcttctgacccattggagactggatcacaagctgcacagcttgtcaccgacatccgcaagaggaagggcttgaaagaacagatgactcctctctccgagtttgaagacaaggtttaaaatggttgg

SEQ ID NO: 46498 - DNA, 412 bp, Glycine max
  Clone ID: LIB3139-102-P1-N1-C12
cagaaatgataaacagtctttgtggtggtgatgaaaaattgatgcgtgaaaggacacacctgctgttggcttgttgttcaaggatggcaatttgcaagaaagatgtttggagagttgaatgtggaatcccttctggatttccgctcacagttatttgcaatagcatttttaatgagatgctcattagatatagctatgaaaaattactgcgccaggctagagctccaagtatgtttttacaatccttcaaaaattttgtttctttgtgtgtgtatggtgatgataacttaattagtgttcatgaatatgtcaagccttactttagtggttctaaattgaaaagctttctagctggtcataatatcaccattactgatggtattgacaaaactagtgcaactttgcaatttaa

SEQ ID NO: 46499 - DNA, 469 bp, Glycine max
  Clone ID: LIB3139-102-P1-N1-C2
atttgcaatagcatttttaatgagatgctcattagatatagctatgaaaaattactgcgccaggctaaagctccaagtatgtttttacaatccttcaaaaattttgtttctttgtgtgtgtatggtgatgataacttaattagtgttcatgaatatgtcaagccttactttagtggttctaaattgaaaagctttctagctggtcataatatcaccattactgatggtattgacaaaactagtgcaactttgcaatttagaaagttagcagattgtgattttctcaagagaaactttaagcagatgtctaatgttttgtggtggctcctgaggacaaggcgagtttatggtcacaacttcattatgtttcgtgtaataatctggaaatgcaagaagcttatcttgtcaatctcgtaaatgtgttacgggaattgtatttgcacagtccagaggaagctcgccaattgag

SEQ ID NO: 46500 - DNA, 418 bp, Glycine max
  Clone ID: LIB3139-102-P1-N1-C3
cttatgctgacggtttcgcgttctacataagaagcacttttgttgtttgctctgtcaatagtgaaagtgaagcgcgtggagaagtcggttacaacaaaagtgcttcttatgctgacggtttcgcgttctacatagcccctcatggctaccagattcccccaaacgcagctggtggcacttttgcactcttcaacgtcacctccaatcccttcattccccgtaaccatgtgctcgcggttgagtttgacacatttaatggcacaattgaccctccctttcagcacgttggcatagacgataactctctcaaatccgtcgctaccgccaagtttgacatcgacaaaaacctcggaaagaaatgtaacgctttggtaaactataatgcttccaacaggaccctctttgtgtctggtctttt

SEQ ID NO: 46501 - DNA, 456 bp, Glycine max
  unsure at all n locations
  Clone ID: LIB3139-102-P1-N1-C5
gagaaaaataatggaggcttacactaaggttgtttgcattcttggactgttaatttttgtaagcatttcagatattcatagagtggagggtgcaggggaatgtgggaggtctactactccagataatgaagcaataaagcttattccttgtgtctctgccgcaaaagatgaaaatgttaaagttactaagaaattgctgtgctcagatcgagaaacttggcaagaaccctagttgtctgtgtgctgttatgctctccaacacagcaaaaatgtctggagccgatcctaaggttgccataaccatcccaaaacgctgcaaccttgctaatcgccctgttggttacaagtgtggaccttacactcttccttaagatagtactgaggacaaggagggatttgggcgtgaaggcacaaaagctngtggctacaactgtgactacaaaactatgttttatt

SEQ ID NO: 46502 - DNA, 448 bp, Glycine max
  Clone ID: LIB3139-102-P1-N1-C9
atcagggtcgaattgatgacaacataaatacaatcaagaaccggcttcaagtatttgagtcattaaatcttcccgtgattgactattatgctaagaaagggaaactttacaggatcaatgcagtgggaacagtagatgaaatttttgagcatgttcgaccagtttttgaggcatgtgagcacgaggctagatgatagctgtttgaattggatgagagcactgtaaagttggctaatgtttggatttagtggggacccatcatagttaccagttgattacaggatctgatccgaattcatagctgatttgctttggaatttggtagatctctaaaactcatccgctgaagtatttcaaaatgatattacacatgtccacctttcacaggagatggctcttgttgcctttttttttttttttcttttcctccttataatgcctaacgtgc

SEQ ID NO: 46503 - DNA, 237 bp, Glycine max
  Clone ID: LIB3139-102-P1-N1-D1
ctcgagccgttcgagccgttcgagccgattcggctcgagggaaagctctcttctcgtattggcgagcttcctctggactgtgcaaatacaattctcgtaacacatttacgagattgacaagataagcttcttgcatttccagattattgcacgaaacataatgaagttgtgaccataaactcgccttgtcctcaggagccacccataaaacattagacatctgcttaaagtttctct

SEQ ID NO: 46504 - DNA, 423 bp, Glycine max
  Clone ID: LIB3139-102-P1-N1-D10
gcaagtttctttggaagcacaaagtgtcagagtaagacaaaacagaactcaaattcttctgaacgaaaagctcctttaaaaacatcagcatcaaatgttggcaaacccatttccaatagcctcaagtccttcaccttcaatgatctaagagaggccactaagaacttcaggcaagaaaacttaattggagaaggagggtttgatttgtctacaagggatggatagatgagaacacatgcactccaacaaaaccagggactggaattgtagtggccatcaagaaacttaaaccagaaagctttcaaggccacagagaatggctggcagaagtcaattatctaggccagcttcaccacgaaaatatggtgaaacttattggttactgcacagatggtaaaaacaggcttctaagttatgagttat

SEQ ID NO: 46505 - DNA, 455 bp, Glycine max
  Clone ID: LIB3139-102-P1-N1-D12
gctggtgcagtttggagagattcaggaaaaagttgtattgaaatggtcacaagaggaatttcttacagcttggtcaactcaggtgcgtcctgcaacaactctgttggctgatgggtgtccatatttgtatgcaatggtgcatgatagttcagtgtctacaataccaggtgattttgtcattggtgtcaagttgacaaccataaacaatatgtgtgcatatgggctcaatcctggtatttcaggttctcgtcttttgggcaccattcctcagtccatttcacagcaaactgtttggaatcaaatggcaacagtgagaacaccattgaattttgattctagcaagcagagcttttgtcagttttctattgaccttctcggtggaggaatcttagtggacaaaactggaagatggatcacacttatacaaaattctccaattagtaacttattgagag

SEQ ID NO: 46506 - DNA, 442 bp, Glycine max
  Clone ID: LIB3139-102-P1-N1-D2
aacggccacgtgggtctaggcgtgaagtgcagcaaggaagtggccaccgcaattcgtggcgcgattattctcgcgaagctttcggttattcccgtgaggaggggttactgggggaacaagattgggaagccccacaccgttccgtgcaaggttaccgggaagtgtgggtccgttaccgttaggatggttcccgcgcctaggggttccgggattgtggcggctagggttcccaagatggtgctgcagtttgctggtattgatgatggttgcacctcctctaggggatccaccaagaccctagtcaacttcgttacggctactgttgattgctcgatgaaaacttatggatgtctgacaccagaatgctgaacggagactatatttgtcaaatgtgcattcctagagtacactgatctattgacacaacctacaagccagactc

SEQ ID NO: 46507 - DNA, 414 bp, Glycine max
  Clone ID: LIB3139-102-P1-N1-D3
ccaaaccatatatcttattctattttctccctctccaccactccccttgtttctcctcctcctcaaccttaatcatggagaatattggagaagagtacaagcattactgggagaccaacatgttcctccaaacccaagaacttgacagttgggggttggatgaggccttatctgggtactacgattcgagttccccggacggcgctgcttcgtctgcggcatctaagaacattgtttccgagaggaatcggaggaagaagctcaatgaaaggctttttgcgcttagatcggggtacctaacattagcaagatggacaaggcttcgattatcaaggatgctattgagtacatccagcacttgcacgagcaagagaagatatcccagctgagataatggaacttgaatctgggatg

SEQ ID NO: 46508 - DNA, 449 bp, Glycine max
  Clone ID: LIB3139-102-P1-N1-D4
ggctaagctaccgacctcacagtgatgacaatacatccactaggcataggcagtttatttctgccattgaaagccaaattacccaggttgaagcagcactgagggaatcttacattgaggaaggtaagcaaccacttcggtgggtaaatcttgatgaagaagagcgagatgatctggctgcctttctatctggaacttgtcagaccacacaaagcactaacgatgaatacatggaggtgaaacaagccaagaaagaagataagattgtagatatatacactttccgcaaccgggatatatctgctagtgaaaagtcttctaaggatgtcatttctgttaacaaggatacagattatctgatagaaataaaagcagatgctgtttctagaagtaatgatgatttagtttctcaaacagatagaacaactagtacaaggaagacatggagt

SEQ ID NO: 46509 - DNA, 460 bp, Glycine max
  Clone ID: LIB3139-102-P1-N1-D6
gcgaagtgcaatgatgcttgattgtacaattgcttctaggcttgacatggaaagaaggattggatcacagctagatgttgccactcttgatgacattttgataccatctttcaggcatgcaggtgataccttatttgatgttgacacagttcatagaattttggtaaacttctgtcagcaggatgatagtgaagaagaaccagaagatgcttctgtttttgaatccgacagccctatttcaccctctcaaactgcactagttaaagtgtcaaaactaatggacaactaccttgctgaaattgcccctgatgcaaatctaaaactttccaagtttatggtcattgcagaaaccctacccgcacatgcacgcacgattcatgatgggttatatcgagcaattgatatttacttaaaggctcatcaaggattgacagatttggacaagaagaaactatgcaaa

SEQ ID NO: 46510 - DNA, 357 bp, Glycine max
  Clone ID: LIB3139-102-P1-N1-D7
gcataacagcgcaatatggtaagggctgggttggtgtcgttcctgtgccgatgggttgtatggatttgtgattcctgcagattcgacggcacacgcattatcaaaatccttactgcgtttctttcgcggccattgccttttttctgcacgtaccttcaagattttttccattacccatctcttaaatctccatccatccaatatcaggaattagacgactatggctcccactataactcaccaatttgctccaattgcttaagcctcaccctgctctaaaggaaccaccgatccccttggtaacttcgctaaagctacttatgatagctcgatcaaaaccaaaggactcctgacacc

SEQ ID NO: 46511 - DNA, 463 bp, Glycine max
  Clone ID: LIB3139-102-P1-N1-D8
ctggctcggcaccttccccaccgccgaagaagccgcccaagcctgcgacgacgccgccatacgcatccgcggcgacaaggccaagctcaacttcccggccaccaccatttccgccgccgccgctccgccaccttccaaaaagcaacgctgcctcagccctgacatcatcactgaagaaagcagcagcagcagctcacattccaccactggatccaccggcgaaagcggcggaggaaacgacgaactcgacctgaaacaaattgaatggtttctaggtttggagaatgagctgcctgttagcaacaacattggtgctgagtgggacaacatggatgacctgtggatgctggacgacgtcgttgtgcccaaccgtcacttaatttactagaaggctaataattaataaatggcgttttcttaagttttagttttactttataaattgtagtataaaactatgttg

SEQ ID NO: 46512 - DNA, 385 bp, Glycine max
  Clone ID: LIB3139-102-P1-N1-D9
atcacaaatccaagaccaccattgaattttggtcctgacacgcggagcttttgacaatttcctatcggcctactcgatggaggaattatagtggccaaaactggagattggattgcacttatccaagattctcctattcgtaacttggcgagagtcgcagattggaagaccggctgattaacgttcgatcttgggatgcctcggaatgcaactgtcaaaaggcgtgactgggccataacgggacaagtgtttttaacatacaggggctgtacagatgattttgatacatgaaagtggtcgaaatcagaaccacatgcctgggaattgatcttctctatcgaggtttgatgacctaataacggttttgaaatttcgagttctcagt

SEQ ID NO: 46513 - DNA, 353 bp, Glycine max
  Clone ID: LIB3139-102-P1-N1-E1
ggagaagataaagatctaaatggaaggttgagagtatggtctgatgttcattgcacaactcgacttcttggaggtgttgcaaaaatcttattggttttgtatgtcaatagaaatggtagcagcaatgagtctccattatgtttggcaaactacaccattgaagagcacacaatcaccagatggaatccagaacagtgccgcgaaaagatggtaattcatgctaattctgataatggaactgcgtaaatacttcatcatatggacgcaacaacatatatcaaacatgaaaaaaaaagggttttttttattgactttgaccaaagatattagctattcacgcataacaatattct

SEQ ID NO: 46514 - DNA, 335 bp, Glycine max
  Clone ID: LIB3139-102-P1-N1-E10
gggatttcatcgaagacaacagtgatggattgctcttaggcgcgggctgttttggattctaagatgaaccacaaggatgcaggaatgtgcgacaacttaaagcttgatgttgctgcacttatccttggttatcatgacgattgctcctacgcagatcaacatcgttctcacatttgtgttcacgacattaatagggcgcgctttctttgcaagccaaaacctcgctaagtcacacaaagccagcctgtagttacagcagtttggaacagtgcacagaagctctgatcacgtaactatgctggagtgcatgaagcaatccgggcatttaattggac

SEQ ID NO: 46515 - DNA, 294 bp, Glycine max
  Clone ID: LIB3139-102-P1-N1-E11
acctgaggtaaccacacatcatcagcattatctaaatcctgcaagagaaagtctcccaatgttagcggcttagataatgctgatgatgtgtggtaccaaaaaatggaggtctgtaaaacctatctacctgaggtaaccagcaaaaatgaagttgccggatgagagttacagaagtttcctgctagactttttgcagtccctcctcgaatagcccagggagctattccaggggttacagatgaatcttatcaagaggacaccaaattatggaaaaggctttttacgccttccaaa

SEQ ID NO: 46516 - DNA, 238 bp, Glycine max
  Clone ID: LIB3139-102-P1-N1-E12
acttgagctaaattcatatcatgaatatttcttaaatgccgcgggggaatttatccaatcaacattcatctacaacatacagcacaatttttggtccaaaaaatgaaccggatccaccaaatcctaccttcagcaacgccgttaccatccagcaagacccactacagtgacataaaatgcctactctacaatattcaggaacttctcacttccacaactgaaatgtacgatcactctc

SEQ ID NO: 46517 - DNA, 466 bp, Glycine max
  Clone ID: LIB3139-102-P1-N1-E3
gtccagacgagactgcatatttccgtatgttgttaaacagggaaaatattagtaatgctgctgttatgattcagccgtcattgatatcatattcatttaatgcgctgcctgcaccagcattgttagatgtggcttccattgctgcagacaagattttgttgctagattcatattttagtgtggttatttttcatgggatgacaatagctcaatggcgcaacttgggataccagaatcaacaagaacaccaggcatttgcacaactattgcgagctccacatgatgatgcccaaatgataattagagaacgttttccggttcctagattggtagtgtgtgaccaacatggttcccaggctagattcttgttagcaaaactgaatccttcagcaacgtataacaatgcacatgagatggctgctgcttcagatgtaatctttactgatgatgtgagccctcaagtttt

SEQ ID NO: 46518 - DNA, 219 bp, Glycine max
  Clone ID: LIB3139-102-P1-N1-E5
ggcaagcatccagggctacttttgaatttttgtactgacacttacagggtttgacaactccctatcgtcctccccgatcgaggaaatataacgcatagaacagattgccatgcctcacatatccatgggtctgctttacgtcgctacgcgggagtcccagattggaggcacagctgtttgatgctggacattatgcagcccctcctggtatcgcttaca

SEQ ID NO: 46519 - DNA, 471 bp, Glycine max
  unsure at all n locations
  Clone ID: LIB3139-102-P1-N1-E6
gtcaagccttactttagtggttctaaattgaaaagctttctagctggtcataatatcaccattactgatggtattgacaaaactagtgcaactttgcaatttagaaagttagcagattgtgattttctcaagagaaactttaagcagatgtctaatgttttgtgggtggctcctgaggacaaggcgagtttatggtcacaacttcattatgtttcgcgtaataatctggaaatgcaagaagcttatcttgtcaatctcgtaaatgtgttacgagaattgtatttgcacagtccagaggaagctcgccaattgagaaggaaagctctctctcgtattgaatggctgcaaaaagctgatgtgcctaccatagcacagnatgaagagtttcattcgatgcagaggatgatgaatgctcctgattcaaatgataatattgatctactgttgagcattgatttgttgggtttacaa

SEQ ID NO: 46520 - DNA, 339 bp, Glycine max
  Clone ID: LIB3139-102-P1-N1-E7
cacaccacagtaataataatcttgaacttttagcatggcacgtggagtatattgcaaaatccaaggattctacgctgagggggttggattgtgcattgatccgcacgctggatcacatgtatgccatgtcatacgacgctgcacgggacaacaggacatgcttggatgcaacgctgttatacgttcgagacgccgaagcaatggctggcacacctgcggatgtgaaggaatatcctaactcctacgtattcgagatacgacatgccaggggtgaaatctgtggacatacatgatcaggttgaagaccacaacctccttctgatgaagggagagtaagag

SEQ ID NO: 46521 - DNA, 460 bp, Glycine max
  unsure at all n locations
  Clone ID: LIB3139-102-P1-N1-E8
gaaaagtgttcctacattggttggcattgaatgtcccaaggatgagaaacttcctcgtcgcaaaatttttgacaaacctaagacgcgctgcttcactattctccctatggagtttaatcttgtggtccgtcagaagtttttaaattttgtgaggttcattatgaagaaaagggacaagcttagttgtcaagttggaatcaacccatactccatggaatggactggtttgaccaatagattactgagtaagggcaacgatattctgtgttgcgattatgctagttttgatggtttgattaccaagcaagttatgagcaagatggcagaaatgataaacagtctttggggtgnggatgaaaaattgatgcgtgaaaggacacacctgctgttggcctgttgttcaaggatggcaatttgtaagaaagatgtctggagagttgaatgtggaatcccttctgga

SEQ ID NO: 46522 - DNA, 396 bp, Glycine max
  Clone ID: LIB3139-102-P1-N1-E9
gaagcctcccagaggaaagcttcctctgccaatcattatcaccacagtctgtgttcttctcttcatagcagtcttgtatgctgagagactaagtttccttaactccagctccattttcaagtccaaaacatgtcctagaaagcacaacaaatcaaagtctaatgataaaaaatctgaggaagtgtttgcaaatgcctcgtggatcgatgataggttcgattttgacccagaagagtgcaatgttgcaaatggaaaatgggtgtttaacagttcattgaagcctttgtactcagacacaagctgtccatacatagacaggcagttttcttgtgtcaagaatggaaggaatgattctgattacctccattgggagtggcaaccagaagattgcacctt

SEQ ID NO: 46523 - DNA, 447 bp, Glycine max
  Clone ID: LIB3139-102-P1-N1-F10
gcttccttaagctgcttagtgctgatccttgcagctgtaatgctatgctctcaagtacttgcaaactatgagaatcccccagggtacaagcctcccactgagaaaccaccagtttataagctcccaggtgagaagcctcctgtctacaaacctgcagttgaaaacccgccaagttataagcctgcagtagagaagccaccagtgtacaagcccccagttgagaaacccccagtgtacaagcccccagttgaaaaaccaccagtgtacaagcccccagttgagaaaccaccagtgtacaagcccccagttgaaaaacccccagtttacaagcccccagttgaaaaacccccagtgtacaagcccccagttgaaaaaccaccagtgtacaagcccccagttgagaagcccccagtttacaagcccccagttgagaagccaccagtttac

SEQ ID NO: 46524 - DNA, 401 bp, Glycine max
  Clone ID: LIB3139-102-P1-N1-F11
atcgcaaaaccaagaataccattgaattttggttttagcacggggagcttttgacaatttgctatcgacctcatcgctggaggaattatagtggccaaaactgtagattggattgcacttatacaaaattctcctattcgtaacttggtgagagacgctgattggaagaaaggctgtttaatgatggatcttgtgatgcctctgaatgcaaaagtaaaaaggggtgatggagcctcaatgggacaagtgtttttaacatacaggtgctgtacagagtattttgatgcatgtaagtggtcaaaatcagaaccacatgcctgagaattgatcttctcaagcgaggtatgagtgcctagtaacggttttgaaatgtggagttgtgagtgggcatatgaaacttc

SEQ ID NO: 46525 - DNA, 403 bp, Glycine max
  Clone ID: LIB3139-102-P1-N1-F12
atggcaacagcaagaacaccattgaattttgattctagcacgcagagcttttgacaattttctatcgaccttctcgatggaggaattttagtggacaaaactggagattggattacacttatacaaaattctccaattcgtaacttggtgagagtcgctgattggaagacaggctgtttaatggtcaatattgtgatgcctgggaatgcaacagtaaaaaggagtgattgagcctcattgggacaagtgtttttaacatacagcagctgtacagagcattttgatgcatgtaagtggtcaaaatcagaaccacattcctgggaattgatcttcccaatcgaggtatgatggcctaataacggttttgaaatgtggagttctgagtgggcatatcaaacttcat

SEQ ID NO: 46526 - DNA, 412 bp, Glycine max
  Clone ID: LIB3139-102-P1-N1-F2
aattgcattcctcacctcactctcattctcacacactgggctccctgtgttctcttctatttttatgtaatacacactctctcaaaccctaactctccaatcaatggccatcctgtcccaatccaccgccagcttctccttcgtctccactcggaccgattccactcacctaactcgcttcccctgccgcgtcaccttccgagcccgctctccccctctccgccccgacctcgtctcttcgcgcctcaactcctccaggtcccccgacgccggcggctccctctcgccggacaacggcggcggcgacgtcgcctaccagctccaccacgacttctctcccgagcgccgtcgccgcggctcgccggtcttcgtcacgctgccggtgaattccatcggtccggatggccgtgtc

SEQ ID NO: 46527 - DNA, 461 bp, Glycine max
  Clone ID: LIB3139-102-P1-N1-F3
gagagagaggatatgggttcgaagaggtatgcgctattgatgtgcggtgaggattcggagtacttggtgaagatgcacggaggcacctatggggtattcatgaagttgctccaagagcaagaggaaaagtgggacctctacaagctcgtccaaggagagttcccggagcagcatgacttgcctctctacgatggctttgtcatcagtggaagctgctatgatgcacatgccaatgacccatggatccttgacctcattgctctcgttatcaaattggactccatgcacaagaagatccttggcatttgctttggccaccaggttcaatttcttatgcttaacacttcgcatccctatcaatcatcctttggatcttcattagttaattgccaaccccttctatattttttagtttcgcctctctcattgctctgccatcgtctcaattattattctctttt

SEQ ID NO: 46528 - DNA, 421 bp, Glycine max
  Clone ID: LIB3139-102-P1-N1-F4
tgagtctcacacagcctttacccttcctggactctaccgtgttgtgcacggcattgatgtctttgatccaaaattcaacattgtctcccctggagctgatcaaaccatttacttgccccccaccgaaactagccgtaggttgacctccttccaccccgaaatcgaagaacttctttacagctctgtggagaatgaagaacacatatgcgtgctgaaggaccgcagcaagccgattatcttcaccatggcaaggttggaccgtgtgaagaacatcacaggactcgtggagtggtacggtaagaacgcgaagctgagggagttggtgaactctgtcgttgttgccggagacaggaggaaggagtcgaaggacttggaagaagaagccgagatgaagaagatgtacggcctgatcgagacctac

SEQ ID NO: 46529 - DNA, 91 bp, Glycine max
  Clone ID: LIB3139-102-P1-N1-F5
tatgttttaaaatgatgtattgaactcgtttcagcgaaagtatgttgtttattttaaatatcaatatcgtttcacagttagttagttgttt

SEQ ID NO: 46530 - DNA, 474 bp, Glycine max
  Clone ID: LIB3139-102-P1-N1-F6
ctccctttcattttctctgcatctgtactctccaaaatgccgtccttagaggaggagctcttcccttcaaccccaggcaagttcaagatcgagcgggcccaccacatgaaccgccagctctaccgctgcttcgcctccaccagcaccatgttcctgtgggccctctttttaatcgccctcaccgcttcatatctcagcttccaaggcttcgttgattccggcagccgctacctctccgcctcctggggcgggatccagtgggagaagcaggtccgcacctccgcccagatccaccgtcaaggcggcatgtccgtcctcgtcaccggcgctgccggcttcgtcggctcccacgtctccctctcgttaaaacgacgcggagacggcgtcgtcggactcgacaacttcaacgactactacgatccgtctctgaaaaaagcccgcaggtccctcctcgccaagcatgacgtcttcatc

SEQ ID NO: 46531 - DNA, 280 bp, Glycine max
  Clone ID: LIB3139-102-P1-N1-F7
atggtgaagataactttattagtgatcattaatattgcaaggctgagtttattggaactaactaggaaagttttctatctaggaataatatcgcctttaccgatgggttggactaaacttatgcaactttgtcctttacaaagctaggagagagtgattgtttgaaggcaagcttgaatcacatgtctaatggtgagggggcggcttctgaaaacaaggcggggttatggtgccatattcattctggtccgtgtaataatctggaaatgcacgaagctta

SEQ ID NO: 46532 - DNA, 275 bp, Glycine max
  Clone ID: LIB3139-102-P1-N1-F8
gaaaaaggcacaaggagatttgtgaatgttgatggtgaagagatgacgattgtttccaggaaccattgtacgaacacttgtatgaagttcaactgttagctcggtgtaagcctcatgacattatgcaatttcccttggaatctgctgatgaatggttgacatctaaaagatctagatggaaagatcgaagaaagcatcagaagatgtggactctccctgaaatgttgaagtgggccgaaggcatacatgaatatggagcagaccgatgcactgac

SEQ ID NO: 46533 - DNA, 422 bp, Glycine max
  Clone ID: LIB3139-102-P1-N1-F9
ctcacatatcctatatctatttgccactctttctgtgagctgctgaactgatggacacattggataaagctagtagtacttgggctcttatatcccttatcattctgtcactctttgcggatgaaatctatggaaatagacaagttcaagctcttaacaaactgcacaagtgcaccaagttcagaggaaattcacaaattgataggagtgagtttgaggtagaggagcttgtctatgatgacattgctcactctcaagagggtctcaaagagaaagatagaattgagagtcttccaggacaaccccctgtgagtttttctgagtatggagggtatgtcactagggataaagcggctggacgcgccttctattattactttgttgaagctcaacgttcaaaaccaaacactttcacttttttt

SEQ ID NO: 46534 - DNA, 433 bp, Glycine max
  unsure at all n locations
  Clone ID: LIB3139-102-P1-N1-G1
agacaaaattgaaaatcaagatgggttgaccaaaaagagactttgaggtggtttcgtgtcgtgtgggcgtttctgggaattaagtgcttttcttctgcaaccacagtctcattcatcaatcaatcggcatcctcatgtctgacgcttattggagatacgccgccgaatcccggcaggccccctcttccatcgccggcaagcgctctcgttccgactacgatgtttctggcgttcacgacttgcccggttactttccccatgacgatgatagaggagggctccgagtaattagagatactgaatcccttgatgcatcttatgagcgttacctccgtagtgcgcacgtttcatcatatggttcgggacagtctactagaaccattagtggnagaattcccaatcgtgctaatgatgattcacatgttgcaaatat

SEQ ID NO: 46535 - DNA, 152 bp, Glycine max
  Clone ID: LIB3139-102-P1-N1-G10
agcgggaaaccaagaacaccattgaattttggtcttgacacgcggagcttttgacaagttgctatcgtcctccccgatgcaggaataatagtggccaaaactgtagactggactgcacttatacatgattctcctattcgtaacttagtgac

SEQ ID NO: 46536 - DNA, 266 bp, Glycine max
  unsure at all n locations
  Clone ID: LIB3139-102-P1-N1-G12
tctacttcttcttccagaaaacaaagagatattcattcaaaaatgacctatctcatccctctcttgacccctccaacatgaagaacactaacagcaacacaaaactaatccttctccacccatatatccagaaacaaggaagctcaaaccgcttatggcttctagccttcatatccttcttcaccttagttttccttgccacactcatttacacaggagacacaacctcatgtaccactaccactacctnttccacccctttatct

SEQ ID NO: 46537 - DNA, 466 bp, Glycine max
  Clone ID: LIB3139-102-P1-N1-G4
gccattgatccagggtttctgtagaacttttggaatgagacttcccagtggggagaggcgagaatggttgaagcctatcatgttcagcgcaggcattggacagattgaccaccttcatatatcaaagggagagcctgacattgggatgctggttgttaagattggaggcccggcttatcgtattggtatgggaggcggggcagcctcaagcatggtcagtgggcagaatgatgcagagcttgatttcaatgctgtgcaacgtggggatgctgagatggctcaaaaactatatcgtcttgtgcgtgcttgtattgagatgggggataaaaacccaattatcagcattcatgatcagggagctggtgggaattgcaatgttggtaaggaaattatatatccaaagggtgctgagatagatgttcgagcaattgtggttcgcgatcatacaatgtctggtctagaaatt

SEQ ID NO: 46538 - DNA, 223 bp, Glycine max
  Clone ID: LIB3139-102-P1-N1-G5
ggcaaggatccagggccacctttgaatttttggactgagacttgggggggttgacaagttactatggtcctccccgatcgaggaattatatcgcctagaacagttggccggcctgcacttatccaagggacagcttgtcgttgctgcgcgggaaacccagattggaggcctggctgattgactttggatcttaggctgcccctgcctgcccatctccaaaggg

SEQ ID NO: 46539 - DNA, 353 bp, Glycine max
  Clone ID: LIB3139-102-P1-N1-G6
aaaacatgtcgatcatgaaagccgaaaggatcaaattcctgctggtgacaagttgtattctactaaggtttataagtttgcaaaaattatgaaccttagacaaagtgttgtgggtgatcttaaacttcttactgatgggaagtcgtatgagggtaagcatattgctggatctaatattagagcatgggaaaatcatgtagttcaaatacccttaatggcacaggaggaaattctgtattctagcgcaagtgacttcagaactgcaatggtgagtaaaaatagcatgcctcaagctactgcaatgcatgtgggagctatagaaaatatcattgatagtttcacaagttctgact

SEQ ID NO: 46540 - DNA, 286 bp, Glycine max
  Clone ID: LIB3139-102-P1-N1-G7
agcgggaaaccaagactaccattgaattttggtcttgacacggggggcttttgacaagttgctatggtcctcctcgatggaggaattatagtggctaaaactgtagactggactgcacttatccaagattctcctattcgtaacttggtgacagacgcagattggaggacaggctgtttaacgatggatcttgagatgactctgaatgcaaaagtacaaaggggtgacggagcctgaacgggacaactctttttaacatacaggtgctgtactgatgtttttaata

SEQ ID NO: 46541 - DNA, 291 bp, Glycine max
  Clone ID: LIB3139-102-P1-N1-G8
actgttgacccgtggttaacggagaactatgggtatgacacgggggggttgtgacaaatgtctatggccctctgggatggaggaaacagagagtccaaaacgcatggttagcgtgaacttattcaaagatcgccatgacaaatctctgcgccaggctaagattggaagaatggctgtacaatgcttcaaatagtgcggtccctggcggcagcatggcaaaggtgacattgtgcctgatcatgacaagtccttgacacactccagggctgcacagatgataaggatgcatag

SEQ ID NO: 46542 - DNA, 226 bp, Glycine max
  Clone ID: LIB3139-102-P1-N1-G9
accgcaaaaccaggactaccattgaattttggtcttgacacgcggggcttttgacaagttgctatcggcctcctcgctcgaggaattctagtggacaaaactgtagactggactacacttatacaaaattctcctattcgtaacttggcgacagacgcagattggaagacaggctgtttaacgatggatattgagatgactctgactgcaaaagtacaaaggagtg

SEQ ID NO: 46543 - DNA, 459 bp, Glycine max
  Clone ID: LIB3139-102-P1-N1-H10
accaattcaattcaattcaacctttttttttctctctcaaaacccattcgttcccgatgcctgaaatggatggctccttcgccaaaccccctcaaatctcggaaatgttccagaaattcgccctcgctttcaagaccaaaacctttgaattcttctgcgaggaagaaaacaacaacgcttcccccctcttcgacgacatcgacggtttctccctccttgactccaccgaagaaatcatccccgatcagaaagtcgtcgtcatcaaacccgaccccgatccctccaacaattcctgcccaccgccgctgctgccacaggcacaatcccctccgccaccgccgtcgacacagatcatacctccgcctacgaccccggaatcccgcgagcccgaaacgccaccgtcgtcgctaacctctgctcagatcagagaaatgacacacgccctggtctcctcggtct

SEQ ID NO: 46544 - DNA, 459 bp, Glycine max
  unsure at all n locations
  Clone ID: LIB3139-102-P1-N1-H4
cgtcagatcataattggaaccctcacaacaaaactcaagcttcttcttgtctatctctctgctacgttcatgttctgctgaatcatcaccccaccatcatggaacttgttccatactctgacccatcctccaccaccccagcatggcaggacatgttccgatccgcctctgcccgccacccctcctccacccctgcaccccacgcgcctccctcccaatcccacgcgccctccccctcaccccacgcgccgccgaatccgccatccgacgccgacccagatggaaaaaacacattttccggcgatccccaggtgcgcttggccctctacatcgccatggcccatgcgggtctcgccttcgccattntcatcctctacactttctcgaagcttctagaacagtatttgagaccccttcaatgggcagtggtgtgttctattcctcttaggggcattcagc

SEQ ID NO: 46545 - DNA, 433 bp, Glycine max
  unsure at all n locations
  Clone ID: LIB3139-102-P1-N1-H5
atcgctagagagagaaaccaagaaagagaaacacagagaaatcgctttcgctattatatcctccctcaaaaaaccgcgatggacggtgcagacgcgtggcgcgtggccgcgtgtgccaacaccaacgtcaacagaataatgctccgctttcgcccgatcgcgccgaaaccggtcgccggaagttccgccgtctccagagccaccggcgctggcgacggaagccagagtagccacgtgtcagttctagggaagagaccgaagaggaagtacgttaggattcggaggaacggtggatacgtgcgaaagaataacggaaacagtaaccgaaaaagtaattgtaactgtaacgatgagtctttccgacgtgcggttggtgacggtgcagtgatgccggagaaggacgcgccgnanggggacgtcactctcgcgggag

SEQ ID NO: 46546 - DNA, 277 bp, Glycine max
  Clone ID: LIB3139-102-P1-N1-H7
atgccatggctgctattaaatactaagaatcgctgtgcaacgcgcagcctgagctatccgattagtacaattcgctggcggatctataccagaacaagctctggcaccagcttaccctcaagcttgagcagttcgtggctctcgccgtcttccaggccggtgatgcattaatacaattatatcacaattacatcacagactttgagaccaaaatcaaccttgtcaagcttgcgcatttcgctgctataggtttttggcagtatgctgagaaagaagc

SEQ ID NO: 46547 - DNA, 420 bp, Glycine max
  Clone ID: LIB3139-102-P1-N1-H8
agcgcaaatgcgggattaccattgaattttgattctagcacggagagcttttgtcaattttctatcgaccttctcgatggaggaattatagtggacaaaactgtagattggatcacacttatacaaaattctccaattagtaacttggtgagagtcgctgattggaagaaaggctgtttaatggtcaagattgagatgtctgggaatgcatcagtcaaaaggagtgattgggcctcattgggacaagtgtttttaacatacagcagcagtacagagtattttgatgcatgtaagtggtcaaaatcagaaccacattcctgggaattgatcttcctaatcgaggcttgtgttcctaataatggtgttctaaatgtcgcgttttgattttctttatttaactttagtcatacttattctttt

SEQ ID NO: 46548 - DNA, 189 bp, Glycine max
  Clone ID: LIB3139-102-P1-N1-H9
accgcaaaaccaagaacaccattgaattatgattctaacacggggagcttttgtcaatattctatcgaccttctcggtggaggaattttagcggacaaaactgaagattggactacacttatacaaaattctccaattcgtaacttgcagagagatgctgcttggaagaaaggctgtttaacgctgaag

SEQ ID NO: 46549 - DNA, 310 bp, Glycine max
  Clone ID: LIB3139-103-P1-N1-A1
tgaatatgccaaatgctgttctttcaatgtggagatattttgttggagatctcgtctttgaagtttctaagatgacttctccctacattaaatgtacagtctctttcttcatagcatttggaaatttggctgatgacaccatcaattttgaggcttttccccacaagctggtgcagtttggagagattcaggaaaaagttgtattgaaattttcacaagaggaatttctcacagcttggtcaactcatgtgcgtcctgcaacaactctgttggctgatggacgtccatatttgtatgctatggtgcatga

SEQ ID NO: 46550 - DNA, 375 bp, Glycine max
  Clone ID: LIB3139-103-P1-N1-A10
ctcctgaaactcaaccttgtgcagaaagcacttctgctcaacaggggtggagacaggttgctgatgcattatgcaaggttgtatctgcatctcctacgaaagcagctatggcagttgttcttcaggccgagaaggaattgcagccatggattgccaaagatgacaatctaggtcagaagttgaggagaatcaatcagcggattgtaaaattgataactgaactattgaggaatcatgataatttggaatcattagtaaattgggcaagtgcatcagatttactactacgagccacagatggaatgctggtggatggagaagcttgcactttaccacagctgaagctattggaagcaacggcgaaagcggttcaac

SEQ ID NO: 46551 - DNA, 461 bp, Glycine max
  Clone ID: LIB3139-103-P1-N1-A11
aaggttttgaaggtttacaatcagatgaagaggcttggttgtcctgctgataccattagctataatttcatcattgagagtcattgtagggatgagaatctcgaagaggctgcgaagattctcaatttgatggtcaagaaaggggttgctcccaatgcgtccactttcaattttatttttggatgcatagctaagttacatgacgtgaatggtgcgcatcggatgtatgctagaatgaaggagctgaactgccagcccaatacgttgacttataatattttgatgaggatgtttgctgagtcaaggtctactgatatggttctgaaaatgaagaaggaaatggatgagagtcaggttgaacctaatgtgaatacttaccgaattttgatttccatgttttgtgatatgaagcactggaacaatgcgtacaagtttatgatggagatgggtgaagaaaaatg

SEQ ID NO: 46552 - DNA, 472 bp, Glycine max
  Clone ID: LIB3139-103-P1-N1-A12
gaagaaaagggacaagcttagttgtcaagttggaatcaacccatactccatggaatggactggtttggccaatagattactgagtaagggcaacgatattctgtgttgcgattatgctagttttgatggtttgattaccaagcaagttatgagcaagatggcagaaatgataaacagtctttgtggtggtgatgaaaaattgatgcgtgaaaggacacatttgctgttggcttgttgttcaaggatggcaatttgtaagaaagatgtttggagagttgaatgtggaatcccttctggatttccgctcacagttatttgcaatagcatttttaatgagatgctcattagatatagctatgaaaaattactgcgccaggctagagctccaagtatgtttttacaatccttcaaaaattttgtttctttgtgtgtgtatggggatgataacctaattagtgttcatgaatatgtc

SEQ ID NO: 46553 - DNA, 210 bp, Glycine max
  Clone ID: LIB3139-103-P1-N1-A2
cgcgtttcaacaccgataacccgcaaaaatacccatagatcttgcgcctcctttccatggcttcaacggcggcgggggaacacaacggggacttcggcggtaccggcttcggcttcggcttcgaggagtctcaaagatcaatatccacgccctttctcaccaaaacctatcaactcgtcgacgaccaatccatcgacgacgttattttct

SEQ ID NO: 46554 - DNA, 374 bp, Glycine max
  unsure at all n locations
  Clone ID: LIB3139-103-P1-N1-A3
cggaaaggacgcgtaccctccgccagggtaccctccacagggaggataccctccgcaggcgtatccagcacaggggtaccctccaccctacgcgcctcctcagtacgctcagcctccgccgcaacaacaccagaattcatctggcccgggttgcttagaaggatgtttggctgctctctgctgctgttgcctgttggatgcctgcttctgagaaagaaaagagaggttgctttgcacaaattggatttgaaactgtgttctgactttgaacatgaccattatcgctcttagttnttattattttctatgttgatttacatttcgtggatatgaaatattgttctgcttcattaacaggaggattcgtgggtttt

SEQ ID NO: 46555 - DNA, 428 bp, Glycine max
  Clone ID: LIB3139-103-P1-N1-A6
tgcaaagatcaaatctgcaagttcagttttgattgttgggggaggtccaactggtgttgagcttgcagcagagattgctgttgattttcctgataagaaggtcaccatagtgcataaaggaacaaggttgcttgaatacattgggacaaaagcttcaagtaaggctttaaagtggctcaaatcaaagaaagttgatgtgaaactagagcaatcagtagacttgagctcctcctcggaagcaagtaagacatatcaaacttcaaatggagagactatagaagcagatcttcattttctatgcatagggaaaccacttggctcaacatggattagggaaactcttctaaacaatgacttggatgctgatggaaggatcaaggtcgataaacacttgagagtgaagggcaagagcaatatttttgcaattg

SEQ ID NO: 46556 - DNA, 358 bp, Glycine max
  unsure at all n locations
  Clone ID: LIB3139-103-P1-N1-A9
gaaaaatctaagactatttgaagaaagaaacgcttctctctcgagcgtgatcgtgatccgttcccttccaattttaccaaaatattaaagaaaaaacaaaatatactatttcatttccgtcccctttcattctaatacattccaatgtttcccagtgccggcgttcccaagaagcggcaacgcaccaccgccgccaaccgttcctcctccacagttggcaccatctcctccctctccgacgtaaccctaatcgaaatctcccaaaaccctcgaccttcctctcccatgaccgacgaccagccctctcccgcggcggaagacgctctccattataacgacgcttncaccggcgacgtcg

SEQ ID NO: 46557 - DNA, 414 bp, Glycine max
  Clone ID: LIB3139-103-P1-N1-B1
ctcgagccggtcttaggaaccctagaacaagaaccctgagacaaaaacaactttggatctgtaaagccaaagggtttcaagtactttctttgctagcttgtctccatggattcaattcaagaatttatggagtcgtgtaacactgacatcaccaccaccaccgcaacaaccaccagcaacagcttagttggtagctccaattccccttctgcttcctccaccaccagcagccgctacgagaaccaaaagcgccgtgactggaacacctttggccagtacctcaagaatcaccgaccccctctctccctctccaggtgcagcggtgcacacgtccttgaatttctcaggtacttggaccaatttggcaagaccaaagtgcacactccgatctgtcccttttatgggcaccctaac

SEQ ID NO: 46558 - DNA, 422 bp, Glycine max
  unsure at all n locations
  Clone ID: LIB3139-103-P1-N1-B10
ggacaaaatcagaaccacattcctgggaattaatcttcccaatagaggtatgtggtcctaataatggttttgaaatgtggagttctgagtgggcaaatcaaacttcatggcatttgagtttccttattgacaatcccaaacagtctacagtttttgatattctcttgggaatctctcaagattttgaaattgctggtaatactcttatgccagctttttctgttccacaggctactgccagatcttctgaaaatgcggaatcctctgcatgatctggaattcgtgttttctttcgcttgttcgtttgtttaattcaataaaggaaattaggcatgaccctcttgttgagtatgctctgcctatctgaaaatntccacacctcttttaattgtncgaatgatgtgtgaagtgtgtgttatttt

SEQ ID NO: 46559 - DNA, 409 bp, Glycine max
  Clone ID: LIB3139-103-P1-N1-B12
gcctaattgatgaactgtgcaatgggttcaatctgttgaaggattctgataaaggggtcatcacctttgagagcctcaagaggaactctgccttgtttggccttcatggtcttagtgatgaagatcttcggtccatggttttggaaggtgactttgatggtgatggtgcactcaatcagttggagttctgtgttttgatgttcagactcagccctgaattgatggagggctcaaagatgtggcttgaacaagtccttcaacaagagcttaaggattatttctaactttccttaagctcttgtttggccttcaaggtcttagtgatgaagatcttcggtccatggttttggaaggtgactttgatggtgatggcgcactcaatcagttggagttctgtgttttgatgttc

SEQ ID NO: 46560 - DNA, 359 bp, Glycine max
  Clone ID: LIB3139-103-P1-N1-B2
ggtagtagttttggtagcccaaagaaatagccactaaaattcattaaaaaccactgtttcaatctgcagtcaagattgtgcgttatggaagatcacgaaagccagagaaaagtcagaatcctgtgcctccatggattcaggaccagtggtgaaatcctcaagcaattagtcttaagatggcctgaacctgtcttgcaaaagctggagcttgtgttcctcgatggcccgtttcctgcacagggaagatctgatgttgaaggcatttttgaccctccttattttgaatggttccaagccaatgaggagttcactgagtataccaactttgaagaatgtttagcatacattgaagattacat

SEQ ID NO: 46561 - DNA, 415 bp, Glycine max
  Clone ID: LIB3139-103-P1-N1-B3
gataaatttaatcccatcccatgataaggtcattttttgaatactaaggtgaaattaagtttaaatcccagtatctgatccgatctgatgattattgagtaaaaaggaagcagagtaaccgaatagggagagaacaaagtttaaggttgtgttgttgggatccaacacgaacacgacacaaacaaagaacaaaggatgaggatgaagagggttttcgttgtttacagagttttgttgctgctggtccagttttggcttggtgaggctgagacattctcggtggatggaaaggtttggttttggacgaatccaacttcgattccgccatagcctccttcgatcacatcttggttgactttacgctccctggtgtggcactgcaagcgctctctccgagtagatgcagcgccctgtc

SEQ ID NO: 46562 - DNA, 446 bp, Glycine max
  unsure at all n locations
  Clone ID: LIB3139-103-P1-N1-B4
cagaactcaagcaaccaatttcaaatccaatcatggggagctcaaccttctgtgccttcttcctcctgtgtgcaatcttggccgtccacgtggcacaatcctcatcctccaccctcgacctggacgccttcttcctccctctcaagtccggctgtcgcggatccgtcgccgagtgcagcctcctcgccggcgacgacgccgagtttctgatggagtcggagagcaaccggcgcattctagcaggaaggagctacataagctacggtgcgctgaggaggaacactgtcccttgctcccgacgtggtgcttcctattacaattgccgccccggcgctcaagccaacccctacagccgcggatgcagtgctatcacccgatgcagggcgtgaatctattcttcttctcttttttttttatttcattnttttaattatatttttggaatt

SEQ ID NO: 46563 - DNA, 506 bp, Glycine max
  Clone ID: LIB3139-103-P1-N1-B6
tttagagattttgtcaactgtgatagccatgctcctaccattcttcaatgacattgtagggcttattggagccattggattttggcccctcactgtgtatttaccagtggagatgtatataactcaaactaagataccaaagtggggcataaaatggataggcctacaaatgcttagtgttgcatgctttgtaattactatattagctgcagcaggttccattgctggggttattgatgatcttaaagtttacaagccatttgttaccagctactaattcaataggataattacttagtgatcatgatcaccattgtcagagatttcattagcaacaagaaaaaaaaaagaaggtaaattgttgcaaattgaaatcaacaagaaggtggtcttacttagttattgcttaataaccttagatcttctagatctttggtttttttgttagagtggggtggtctcttactttggaactagctcttgtttcctaatttgcaatgagaaat

SEQ ID NO: 46564 - DNA, 260 bp, Glycine max
  Clone ID: LIB3139-103-P1-N1-B7
ccctaaacgactctatctctcttcgtttagttcttccttgcgctcctcctcgttcgttcgttctccctcgcgtagatcggcaatggcggagaccgagacgtttgctttccaggctgagatcaaccagctcctcagtctcatcatcaacaccttctactccaacaaggaaatcttccttcgtgaactcatcagcaacgcctctgatgctttggacaagattagatttgagagtttgacggacaagagcaagctcgatgctc

SEQ ID NO: 46565 - DNA, 276 bp, Glycine max
  Clone ID: LIB3139-103-P1-N1-B8
gctttctgggccatgttggtgtcgatgaggaggatcatgttcagaggcatccacagtgagttgtagaatagaagcaaaaagagaagttcttggtggcgatttcttagatgggtcttctttgtggtgtgagtggtgtgagttgacgggtgaaaaagtttttttttttaagaagagtattgggttgagtggtttttatatggtgttttttttttttatttttttttttttttattttttttttttttttttttttttttttttttttttttttttttt

SEQ ID NO: 46566 - DNA, 417 bp, Glycine max
  Clone ID: LIB3139-103-P1-N1-B9
cacccatctcaccaaatcctttaatatcccttccgcctcccttcagtccattccttacattttgctcatctttttagttcctctctatgacaccttctttgtcccatttgccagaaaattcaccggccatgagtctggaatctcacctttgcgccgaataggctttggtctttttctggctaccttttctatggttgcagctgctctgttggagaaaaagagaagggacgcagctgtgaaccatcacaaagttttgtccatcttttggataaccccacaatacttgatatttggcttgtcagagatgttcacagccattggcctccttgagttcttttataaacaagccttgaaagggatgcaagcattctttacagccatcacatattgctcttactcatttggcttttacttgag

SEQ ID NO: 46567 - DNA, 394 bp, Glycine max
  Clone ID: LIB3139-103-P1-N1-C1
atctcttcctcagtcctctccccgagtctctgtctcttcctgaaccgaatctaattggagagaggcttcagtctgccaccaacagaaatagttatcgtcaagtccacactccacattgtaacagatccatggatcatcgtcattggcgcttcttcattatgcttttcattaccgcagcagcaataggacttgtttcgtcgttagggataaactacggccaaatagcgaacaatcttccttcacaagacgacgccgttgcgttggtgaaatccatcggagcgacgaaggtgaagctctacgacgcagatccacgcgttttgaaagcgttcgcgaacaccggagtggaattaatggtaggtctgggaaacgagtactgtctagaatgatagatccg

SEQ ID NO: 46568 - DNA, 487 bp, Glycine max
  Clone ID: LIB3139-103-P1-N1-C10
ctgtctttgttatgtagaaaaatcatttattttagaatgtagtttgtatgtattatcatgatggtggaaatttgtttggaagattttaagaatcaagatgttttattttggaagagataactttctacactctatagtgactctagttaaccaacaaatatttttatttgttggatttagaacactgggtgtgagttctttttatttaaactatagcagtgttgtgttttaaacttaataaatttaaaagcaattgaaaagtaaagtgaaaaaaaagtaaatgattgaaattgtaaattgaaagcaatagtaaatggcactaaatgtatatgaaagcaaatatgtgcccaaaataatgtatatgcatgaaagcaaataaagtgtgtaaaatgtaaattactgggaaagtaaatcataatttaaagaactgattcaataagatgaaagttctattttctttttaataaaattattagaagaaggaatg

SEQ ID NO: 46569 - DNA, 432 bp, Glycine max
  Clone ID: LIB3139-103-P1-N1-C11
cctcgccaactccggcatcggaatcgtcatcggcgcctccaacggcgacattgcgagtctcgccggcgatcccaacgcggccacccagtgggttaacgcgaacgtcttgccctactacccggcgagcaacatcactctgatcaccgtcggaaacgagattttgaccttagccgaccagggtcttaagtcgcagctcgtcccggcgatgcgaaatgtccaaaatgccctcggcgcggcctcgctcggcggcaagatcaaggtctccacagtgcactcgatggccgtgttgactcagtcggacccgccctcgtccgggttgttcaacccggcgctgcaagacacgctcaaacagctgctggcgctactcaaggacaacaaatcgccgttcacgatcaacccgtacccgtttttcgcttaccagagcgacccgag

SEQ ID NO: 46570 - DNA, 302 bp, Glycine max
  unsure at all n locations
  Clone ID: LIB3139-103-P1-N1-C12
tagcttatatactatagtatgcagcactactcattgacattaatataagaagttgaacgttttctgtcnaaaaaaaaaaaaaaaaaaaaaaaaaaaaaaaaaaaaaaaaaaaaaaaaaaaataaataaaaaaaaaaaatataaaaaaaaaataaaaaaaaaaatatataatttaaaaataaaaaataaaaaaaataaaaaatttaaaaaataatttgggggggggcataatatttatattttttatcccgtttattaattttgatcaaggacttcaaaaggtacaaaattttcctattataa

SEQ ID NO: 46571 - DNA, 347 bp, Glycine max
  Clone ID: LIB3139-103-P1-N1-C2
gacaaaactagtgcaactttgcaatttagaaagttagcagattgtgattttctcaagagaaactttaagcagatgtctaatgttttgagggtggctcctgaggacaaggcgagtttatggtcacaacttcattatgtttcgtgtaataatctggaaatgcaagaagcttatcttgtcaatctcgtaaatgtgttacgagaattgtatttgcacagtccagaggaagctcgccaattgagaaagaaagctctctctcgtattgaatggctgcaaaaagctgatgtgcctaccatagcacagattgaagagcttcattcgttgcagaggatgatgaatgctcctgattc

SEQ ID NO: 46572 - DNA, 321 bp, Glycine max
  Clone ID: LIB3139-103-P1-N1-C3
gagcaagaccgtgagaaacctcacagacatctttttcgctttcctcatatgggaatgtggactaaactcagaccaggaatctggaacttcttggagaaggctagtaagctctatgagttgcatctttacactatgggaaacaagctatatgcgacagaaatggcaaaggtgcttgatccaaaaggagttttgtttgctggaagagttatctctagaggtgatgatactgattcagttgatggggaggaaagggttcccaaaaacaaagatttggaaggcgttttgggtatggaatcatctgttggaattatagatgattct

SEQ ID NO: 46573 - DNA, 453 bp, Glycine max
  Clone ID: LIB3139-103-P1-N1-C5
ggctcgagaatggctgctgaccctaaagagcatgtcatcaagcccgtcatccctgagaagtccctggatgcgaagaccatcttccaccttaacccttctggccgcttcgtcataggtggccctcacggcgatgctgggctcactggaagaaagagcatcattgatacctatggtgggtggggtgctcatggcggaggtgccttttcagggaaggaccctaccaaggctgacagtagtggcgcctatatcgagaggcaggctgcaaagagtgttgtggcacatggccttgccagaaggtgcattgtccaagtttcctatgccataggtgtccctgagcccttgtcaatgtttgtggacacttatggaactgggaagattcctgacaaggagattcttcaaattgtgaaggagaatttcgacttcagacctggaatgatcaccattaacttggac

SEQ ID NO: 46574 - DNA, 69 bp, Glycine max
  Clone ID: LIB3139-103-P1-N1-C6
tcggaggaaaatggccgatcagttatcgaagggagaggaattcgagaaaaaggctgagaagaagctcac

SEQ ID NO: 46575 - DNA, 412 bp, Glycine max
  Clone ID: LIB3139-103-P1-N1-C7
tcaagctcccttcccggaccaggtcctcgagaacgtgctcgagaacgttctccacttcctctcgtcgcggcgcgaccgcaacgccgcctcattggtgtgccgctcctggtaccgcgccgaggccctcacccgatccgagctcttcatcggcaactgctacgcgctctcccccactcgcgccaccgcccgcttcacgcgcgccaggtccgtcaccgtcaagggcaagccccgcttcgccgacttcgatcttatgcccgccgactggggggcccacttctccccctgggcctccgccctctcccaggcctacccctggctcgagaagctccacctcaagcgcatgctgctcaccgacgccgacctcgccctaatcgccgactccttcgccgccttccgcgaactcgtcctcgtc

SEQ ID NO: 46576 - DNA, 97 bp, Glycine max
  Clone ID: LIB3139-103-P1-N1-C8
cttaaaacgaccaataatggcgtttgctcacgacttggagttggaatcctcttcttcccctctggtgttctcagtacggaggagtgataccggagct

SEQ ID NO: 46577 - DNA, 400 bp, Glycine max
  Clone ID: LIB3139-103-P1-N1-C9
cccaaaacagagcaaaacagaggatccactccaccactactcctaatggatcctccacccctctctgccgccactcaaaaaaaccatcccgaatcggtagagtccttttctccatgtttccgcgttgcggaaacgtggactgatgagactctaccggcggttcctggtgccaagctgcgcctcatgtgcagctacggtggccacattatgccacgccctcacgacaaatctctcagctacatcggtggcgacacgaggatcgtggtggtggaccgccactcgtcgttgaaagatctatgttcacggctttcccgaactatcctcaatggaagacccttcacactcaagtaccagcttcccaatgaagaccttgagagtcttatcactgtcaccactgatg

SEQ ID NO: 46578 - DNA, 133 bp, Glycine max
  unsure at all n locations
  Clone ID: LIB3139-103-P1-N1-D1
ttttacttcccctatggctcgtcactccttgctcttagccctcctcctcttcgccgccgtggccaccgncgcgatggcggtggccgcgtccgacgccgacgacatcctgatccgtcaggtggtgccagatgtt

SEQ ID NO: 46579 - DNA, 67 bp, Glycine max
  unsure at all n locations
  Clone ID: LIB3139-103-P1-N1-D10
ttttctggcagaaactaacaataaatatttaagaaccaaacctaaataacagggtnagtgataaaaa

SEQ ID NO: 46580 - DNA, 250 bp, Glycine max
  Clone ID: LIB3139-103-P1-N1-D12
atcaatttgaaattgatacagagctgagagcatcaaggaatcgaagaatagaagattcatttttttttctttttgatatggaagctgatgtttctattatttttggtgcgttttcaaaaccctaaattggagaaatcccaatttctccttctgtctttctgctttggatgtttttcaaccaaaaaattgggcttttcaaatcttttgctctgatgggtacctcaaatcttctcttggttttctctctgat

SEQ ID NO: 46581 - DNA, 484 bp, Glycine max
  Clone ID: LIB3139-103-P1-N1-D3
ctcagtctcagatcagaaccttagccatggcagcgttccagaagatcaaggtcgccaaccccatcgtcgagatggacggagatgaaatgactagggttatctggaagtcaatcaaggacaagctcattttgcccttcttggagttggacatcaagtattatgacttatgccttccttaccgtgatgagaccgatgataaagttacaattgaaagtgcggaagcaactctcaagtataatgtggcaattaagtgcgcaactattactccagatgaagctcgtgtgaaggagtttggtctgaagtcaatgtggaagagtccaaatgggacaattaggaacattttgaatggaactgtcttcagagaaccaattctttgcaaaaacattccccagcttagtcctggttggacaaaggcaatatgcattggaagacatgcgtttggtgatcaatatcgggcgactgacacagtattaaaagagctgga

SEQ ID NO: 46582 - DNA, 509 bp, Glycine max
  Clone ID: LIB3139-103-P1-N1-D4
gtgagaaagagagagagagagagagaaactgagagaaattcgcaaaccctaatttcggaaagatcggcgatggctgcctccaaggatcgcgagaacttcgtctacatcgccaagctcgccgaacaggccgagcgatacgaagagatggtggaatcaatgaagaacgttgcgaatctcgacgttgaactgactgtggaggagcggaatttactttctgttgggtacaagaatgtgattggtgctcggagagcatcgtggaggatcctgtcttccattgagcaaaaggaagaaacaaaagggtacgagttgtatgcgaagcggattaaggagtacaggcagaaggttgaattggagctttcaaacatctgtaatgatgttatgacaagggatgatgagcaccttatccttcggctgcagctggtgaatccactggggtttactataagatgtaaggagattattatcgttttcttggccgaattatagcaggcaatgagaagaaagaagct

SEQ ID NO: 46583 - DNA, 181 bp, Glycine max
  Clone ID: LIB3139-103-P1-N1-D5
ctactttctaccgacctaacacgagaggagaggtgagcaagagaggcaggtgtggggtctgcatctattgaatggtagcaaggcacagtgcatgagggtcgttcgcccgatcgagggctcttgccagagtttacgtgtagcatgctgccgctagctcaccaaatgctttctaatgcggcac

SEQ ID NO: 46584 - DNA, 392 bp, Glycine max
  Clone ID: LIB3139-103-P1-N1-D7
cgaggatgaaactgtggatgatacgcgccaccacatcggtgttactgtggacctgcgtcgttcagttaacggcgttgggggatatgtggggcccgcgtgtcctcaaagggtggccgtcgtgtttcacgcacggcgaatccgccgtgctcattgagttgccgtctgccaccacgcctagagtgctcccacccaagagggtttataagaataacggttacttgatggtgtcgtgcaatggaggactcaaccaaatgagggctgcgagatgtgacatggtggcgattgcaaggtatttaaacgtgacgcttatagtgccggaattggataaagcgtccttttgggctgaccccaatgagttccaagatatctttgatgtggaccattttattaca

SEQ ID NO: 46585 - DNA, 174 bp, Glycine max
  Clone ID: LIB3139-103-P1-N1-D8
cgaagtgttcgccccgcagactgatcccaatggtttgatccagtgtactgttggtcgtaagggctctaaggcaaagttgtgaatacgataactggggctgttcttttgcatatcacagcgagactggcgtttatggttccgaacgtagacatactttatttgataccatttttc

SEQ ID NO: 46586 - DNA, 396 bp, Glycine max
  Clone ID: LIB3139-103-P1-N1-D9
atgacagtcacttgggaacattcactatggaagaaccaacctctctaacggtctcactgcgttggaattaacaggaactgaccgagttggtcttttatcggaagtgtttgctgtactggctgatcttcaatgtgatgtggttgagtctaaggtttggacacacaatggccgtattgcctccttaatctatgtaaaagattctagttctgggtctgctattgaggactctcagaaaattaataagattgaattgcgcttaagaaatgttttgaagggagacaatgacattagaagtgcaaaaatttctttctctatggccgggatgcacactgaaagaaggcttcatcagttgatgtttgttgaccgtgattattaaagggctcctattcttaaatt

SEQ ID NO: 46587 - DNA, 349 bp, Glycine max
  Clone ID: LIB3139-103-P1-N1-E1
ccccagtactcaactctctccctcacacacttacctatccttacatcatagcaaaaatgggtgtcaccgacagaatcattcagattggaggccagatctctggcaacccgaccgctggcggtcgcgagaagatcctccagaagaaccctgacgatatcgttgtcaccgccgcctgccgaagcgcattcaccaagggaggccgcggcggtttcaaggacacccccgctgctgatctcatggctggtgttctcaaggccatcctcgaccgctcaaagatcaaccctgctctcgtcgaggacctatgtgtcggaaccgctctcgctttttccagaggcgcaactgagatgcg

SEQ ID NO: 46588 - DNA, 367 bp, Glycine max
  Clone ID: LIB3139-103-P1-N1-E11
acaatatgtgtgcatatgggctcaatcctggtatttcaggttctcgtcttttgggcaccattcctcagtccatttcacagcaaactgtttggaatcaaatggcaacagtgagaacaccattgaattttgattctagcaagcagagcttttgtcaattttctattgaccttctcggtggaggaattttagtggacaaaactggagattggatcacacttatacaaaattctccaattagtaacttgttgagagttgctgcttggaagaaaggttgtttaatggtcaagattgtgatgtctgggaatgcagcagtcaaaaggagtgattgggcctcattggtacaaagtgttttaacaaacagcaacag

SEQ ID NO: 46589 - DNA, 450 bp, Glycine max
  Clone ID: LIB3139-103-P1-N1-E12
agagaatcccccattgtcaagcctgcttttgagaaacgcaccagccataagcccaggagttgagtagcctactggcgacaggaccctcagttgtaaacccccgcaatggagaagcctccaaccgagaagccaccagtgtacaagcccccagttgagaaaccctcagtgtgcaagcccccagttgaaaaaccaccagtgtacaagcccccaggtgagaaaccaccagtgtacaagcccccagttgaaaaacccccagattacaagcccccagttgaaaaacccccagggtacaagcccccagtagaaaaaccaccagtgtacaagcccccagttgagaagcccccagtttacaagcccccagttgagaagccaccagtttacaagcccccagttgagaagccaccagtatacaagccaccagttgagaagcctccagtgttcaagccacca

SEQ ID NO: 46590 - DNA, 476 bp, Glycine max
  Clone ID: LIB3139-103-P1-N1-E3
gcaatttagaaagttagcagattgtgattttctcaagagaaactttaagcagatgtctaatgttttgtgggtggctcctgaggataaggcgagtttatggtcacaacttcattatgtttcgtgtaataatctggaaatgcaagaagcttatcttgtcaatctcgtaaatgtgttacgagaattgtatttgcacagtccagaggaagctcgccaattgagaaggaaagctctctctcgtattgaatggctgcaaaaagctgatgtgcctaccatagcacaaattgaagagttccattcgatgcaaaggatgatgaatgctcctgattcaaatgataatattgatctactgttgagcattgatttgttgggtttacaaggagcaagtaaagcttttccaaacaagattggtttttgatgataagcttggagtggcttacacacaagaattctttgatgggaattttccagtggattct

SEQ ID NO: 46591 - DNA, 532 bp, Glycine max
  unsure at all n locations
  Clone ID: LIB3139-103-P1-N1-E5
gatgaatagagtttcttctactttgtgagaaacttttagtttcaacttcagagaaagtgagaatggtctaagaagaagccttgcatggcgagccaaagaataggagaaacgggtttgtctgagtcaggaccttcaagtcaccatatcccttatggagttcttcatgggattaatacttcatcatcagccctaatcaatcaagggtcagcttttgattttggagagctggaagaggctattgttctgcaaggaattaagataagaaatgatgaagccaaagcatctttattcacaggcaggccttcagccacactggaaatgttcccttcatggccaatgagattccagcaaacctcaagaggaggttcaaagtcaggagaggaaagcagtgattcatgatcaggagtgaacactctttcaagcaaaaatgagctccaatttgaaacagaatctncaataagcataaaagcatctttttcagatcatcatcaggcgtttgatcagcaccttcaacaacagcagcagcagcagc

SEQ ID NO: 46592 - DNA, 456 bp, Glycine max
  unsure at all n locations
  Clone ID: LIB3139-103-P1-N1-E6
caattgctgaacgtggagaagcagatgaggctctgtttgtgacgtggcaggtaccagaaaggcggctaccgatattttgcagctctggttcgatgcacgagcctggaaaaccctcaatgaccagattgtcgttttgtcaaaacgacgtggccagctcaaacaggccgtaacagctatggtgcaacaagctatgcaatatattgatgagacaccagatatcgaaactcgcatagaactcatcaaaacgttgaacagtgtgtctgcagggaagatatacgtggaaattgagagagctagattgatcaagaaacttgcaaagatttaggaagaacaagggcttatagctgaagctgctgattngatgcatgaaaatgcggtggatacttttggtgccatggccaagactgagaaaattgcattcattcttgaacaaagtcgtttgtgtctagatcgcca

SEQ ID NO: 46593 - DNA, 369 bp, Glycine max
  Clone ID: LIB3139-103-P1-N1-E8
cggcaaccgctacatcgagaagcgcatcaacgtccgcatcgagcacgtccgccactcccgctcgcgtgaggagttccttgtccgcgtcaaggagaacgccgccaggaggaaggccgccaaggccgagggcaagagcgtccagctcaagaggcagcccgctctgcccagggaggccaggaccgtcagcatgaatgacaacatcccggagaccatcactcccatcccgtacgagaccacgatctaaagaggtgaaaaggttggagggagtggtcgaaagtgggtcggatacaagatgggcatggctctggcgccggttacttaaggacattatgctttaatcctggaaaaaataaagattctggattcccc

SEQ ID NO: 46594 - DNA, 240 bp, Glycine max
  Clone ID: LIB3139-103-P1-N1-F1
aatatgtcaagccttactttagtggttctaaattgaaaagctttctagctggtcataatatcaccattactgatggtattgacaaaactagtgcaactttgcaatttagaaagttagcagattgtgattttctcaagagaaactttaagcagatgtcttatgttttgtgggtggctcctgaggacaaggcgagtttatggtcacaacttcattatgtttcgggtaataatctggaaatgc

SEQ ID NO: 46595 - DNA, 313 bp, Glycine max
  Clone ID: LIB3139-103-P1-N1-F10
caagcatctataatagggggtgttatagtattcatcaaggagctacaccaagttcttcaagctttggagtcccagaaaagaagaaagagtttgagccctagccctggcccgagcccacgaacacttcagccaatgtttcatcaacttgatagcccctccatgattgggaccaattctttcaaggaactaggagcaagctgcatctctcctgttgcggatgttgaagtgaaaatctcgggttcatatgtgatcttgaaagtcatttgccacagaattccaggtcaagttgcaaagatcataactgttttggaga

SEQ ID NO: 46596 - DNA, 431 bp, Glycine max
  unsure at all n locations
  Clone ID: LIB3139-103-P1-N1-F11
gttgatccctcccttgaccctactaatcataaacatcatcggagtcattgtcggtgtctcggatgctataaacaatggatatgattcatggggtcctttgtttgggaggctattttttgccctttgggtcattgtacacctttaccctttcctcaagggtgtcatgggaaaacaagaaggtgttcctaccatcattttggtctgggctattctcctgtcttcaatcttaaccctactttgggtgagaatcaacccattcttggccaaaagtgatgtggtgttggaaatttgtggattgaattgtgactaaaggtaacaaaaaatggaagggcatgccatggtttgacgttttacactgataagatctgcaacatgcataagtttttggtcaaagacacatgacacantcctggatctggtggtgagaactg

SEQ ID NO: 46597 - DNA, 474 bp, Glycine max
  Clone ID: LIB3139-103-P1-N1-F12
attgatgtattaagatgcagaagaggtaaccgtgtttgttcattcactttcctaatcctagaaccaacgaacgaacgaagacactgcaatctagaaaaaagttttgaactttgatgcacggaaagccttcatgcccgaccatgacatgtaccattttgatcacatggacgaagacgatttttttgacgaaattgatgaccaaaaccatggtaggggtgttggggatgctgctcttgatgaatatgagatgcttactaaggtgactgatacaacagctgctcaagcaagaaagggaaaggacattcagggaattccatgggaaagtttgaacatatctagggagaggtatagattgacaaggcttgagcaatataagaattttgagaacattcttaaatctggggatgctgtggacaaggagtgcaagcaaatcgagaagggtgggaattactatgaattcttctattatacaag

SEQ ID NO: 46598 - DNA, 459 bp, Glycine max
  unsure at all n locations
  Clone ID: LIB3139-103-P1-N1-F2
gtagcctctacccaatttgaggcatttggatctctctggctccaaaaatctaataaaaatgccatatattggagatgccctatatcttgagtggctagatctcgaaggatgtatacaactcgaagagatcggtctgtccgttctttcacgaaagcttacttctctgaatntgagaaattgcaaaagtcttatcaagttgccacagtttggagaggacctaattcttaaaaagctatatctcgaaggatgtcaaagtctcagtcacattgatcaatccatcggttttctataaaacctcgatcatttgaatattgaaaactgcaaacaactcaaacgcattgatccatccatcggtttaccagaaaagctcagagaattgaatttgaaaaactgcaaaaatctagaaaggctacccaatagcatactaggtctcaattctcttaaatatctgaatctctc

SEQ ID NO: 46599 - DNA, 358 bp, Glycine max
  Clone ID: LIB3139-103-P1-N1-F3
ttgtcagcgagtgagtgagtcgtttctctgcagctacaaggtttagccactccaaacagacgagaaatgggtcgtggggtcagcgctggtggtggtcatagttccttacgttatctctttggcagtggggtgcctgtcagctgtgctaacagtcagcctgctaatggtgctcgcactcaaaatgctagtgctgcttcaccaccagtcgataagcaatgtccatcaccagcaccagcaccagcaccagcacctgcatcatcaccaattgattagcaaattgcagctggtattcctggaagtctctaaaacaattaccatcgcgctgttgggcaaaactgtggcaactttcttactgatc

SEQ ID NO: 46600 - DNA, 411 bp, Glycine max
  Clone ID: LIB3139-103-P1-N1-F4
cttcctcaccgatagctagaatggaatttcgatgctcagtcatctcttttaccattctcttctctcttgctcttgcaggagagagccatgtccatgcatcgctacctgaggaagattattgggaagctgtttggccaaacactcccattcccactgcactgcgagagcttctaaagcctctccctgcaggtgttgaaatcgatgaactccctaagcaaattgatgatacacagtacccaaaaacattcttctataaagaagaccttcatccaggcaaaacaatgaaagtacaattcaccaagcgtccctatgcacaaccttatggtgtatatacatggttaacggatattaaagacacctctaaagaaggatatagttttgaagagatatgcatcaagaaagaagcgtttg

SEQ ID NO: 46601 - DNA, 227 bp, Glycine max
  Clone ID: LIB3139-103-P1-N1-F5
aattcattatagcattttgttggtttttatacattgtaatttttctctagaatttgtttgaatgcaaaagggtgtgcagagtgtagtgtatatagaagatgaactaggccatgcattaggcagtgctgtaaaatttgattgttttgttctgttttattcttttggataatatgcattgagctttttgtttgttgttgataaacgagaaaggcaattttaacttgtgt

SEQ ID NO: 46602 - DNA, 463 bp, Glycine max
  Clone ID: LIB3139-103-P1-N1-F6
cagttccgaggggttcttttcaagtacggtcccaatcctattcaggttgcatttaagactggtgattataagcggcaagtcatttttattggtggattgaccgatggttttcttgctacttcatacttggaacctctggcaattgctctggaccatgagaattggtcattagttcaattccttatgtcatcttcatacagtggatatggcacctccagcttgcaacaagatgctaaggagctggatcagctgattaattatttaattaacaaagaagactctgaaggtgtggcattacttgggcatagtactggctgtcatgatattgtgcattacatgcgcacaaattttgcttgctcccgagctgttcgtgctgccatctttcatgctccagtcagtgattcggaatttcaagcttcacttccttacacaagctttaatgattgacttggctgcttagatt

SEQ ID NO: 46603 - DNA, 425 bp, Glycine max
  Clone ID: LIB3139-103-P1-N1-F7
attcgcagatcgattacgaagttattccactgaatcttatagaagatgtctctcacacggactgagtatgtccgaggtgtctacaccttttctcctgaaggccgtttatttcacgttgaatatgcaatcgaagccatcaagctgggatcaactgcaattgggttgaagacgaaagagggtgttgtcctcgcagttgaaaagcgcatcactttgccggttctggagccaagttgtgttgggaaaattatggcaatcgctgagcatatagggtgtgcactgagtggattgattgctgatgctcgaacacttgttgagcatgcaccggttgaaactcttgtgctgtcaaccttattgcagatattaaagagctgattagcttaagaccgatatgttttggtttattggggacaaaatcatatggtctc

SEQ ID NO: 46604 - DNA, 428 bp, Glycine max
  Clone ID: LIB3139-103-P1-N1-F8
aactagttacgatgcatgctttactcacgttcattcaaacaattaaacaaagcaagcaacatatgatgttgttcatactaagcataatttacaatcttgtcaatatatcatcatcaaaaccaactgaaacaaagtggacttcttcaaacttcaatatggtcatcatccagcacctctgttctaactttaaggtcaaatttctccttttgaaacacacaaattggtgaaagttgtctcccacaaagagataaatttctttcccacctttcctagcatatataattataaagtacataaaaatcaaaagatatgtaagttatggccaaaatacacgagcaatgtgtccattctgcagttcaagtgaggagagcgctgtccacctattttttcattgtagaaggatatccaatgtgtccattcttcaattc

SEQ ID NO: 46605 - DNA, 126 bp, Glycine max
  Clone ID: LIB3139-103-P1-N1-F9
aattaattagttttttctttgtagtcatgccaagtaattaaaaataaagaaaaggtgaagtcttttctttatttttaaacacagagacatgacacaatgaaatcactatttcttctcgagcacgaa

SEQ ID NO: 46606 - DNA, 309 bp, Glycine max
  Clone ID: LIB3139-103-P1-N1-G1
tttccgaataccattgtgcagattgaaccagacatgaattcaaggtttcagcttttgagtaccactaccaatggtgattttgttcaaggaaaagatctcgcaatggttaaagttaatgtagcatgtgctgctgttggcttgacatcaagttacactccaactccattgttggaatctggtttgcaaaaagacagagggttaattgtagagtattttggaaggatgtcttacgttgctcataacgttaatcagccccaagagaaagatttgttggagggaaatttttcctttgatattaaatctcgctct

SEQ ID NO: 46607 - DNA, 438 bp, Glycine max
  Clone ID: LIB3139-103-P1-N1-G10
gagcctctcctgtatctggaggggcacctactttatcagagagacgctggatacacggtcagattcaacaactactttcaagagataggatggcctctacacctggcagaaccaatggtatttctgctaccagttcaactagtaacttatatagctctcactttgatcaaagtaggggaaccaccactctgcatgcaaggacacaggatgtgggaacatcataccacacattttttgatgagagattatgcaacaattcctccccattaatgcagaatggggcattatggtctggacttatggggacacccccagtaccagattgtgaacaagttcatcagttcagtagatcaaacattgttcctgatgggggcttatcccctgcttgcagagaagagaggtactttcactttgcaaaggtagcagtgcagtcaatgg

SEQ ID NO: 46608 - DNA, 422 bp, Glycine max
  Clone ID: LIB3139-103-P1-N1-G11
tggaaaagctccatgcttctgtgctcgcccttgtattccttcttgtcatactatttcaggaaggattggtaacatgtatgaagaatgaagacggatcagaagaatggggatatgtgcaagttagaccaaaagcccacttgttctggtggctttacagaagtccatacagagtggagaatccctccaagccttggccaatcattctctggcttcagggaggaccaagctcttcaagagttgggtttggaaattttggagaggttggtcctttggatgctaatttgaagccacgaaatttcacatggttgagaaaagcagatctcttgtttgtggacaacccatgtggaaccgggtacagttacgttgaggattccaatctctatgccaaaacagacgaagaggcaaccacagacttgacaaca

SEQ ID NO: 46609 - DNA, 291 bp, Glycine max
  Clone ID: LIB3139-103-P1-N1-G2
caggaggaaatatcggaattctccaagatactgcatcaggatactatgagcatccccaatgaatatctctctgaggattattgcccaagaaatgtccgctttaatgagcttcttgaagttttgaaggaacctaagttccaacctgttgagtcagaatatcaactagcatcaaggttgtcgatggctgagaaggatattaaatatggtatggaacttttgaaagatacagtatcaacattaagaattctcaagctgggatcaagagaagaacaatctagttatcttaccata

SEQ ID NO: 46610 - DNA, 350 bp, Glycine max
  Clone ID: LIB3139-103-P1-N1-G3
ccaaaactgaacgctatagaaaatgttcaaaaaattttcaggtgaagatgtatctgcacagaaccaagtgaaggcatctgttcaacgaaaaatacggcaaagtattgctgaagagtatccgggtcttgaacctgtgttggatgatatacttcccaagaagtcccctctaatagttgctaaatgtcagaaccatctcaatctggttcttgtgaacaacgtgccactgtttttcagtgtccgtgatggaccatacatgcccaccttgcgtcttctccatctatatccaaatataatgaaaaagttacaaggtgaccgtggtgcaattagatttgtcttggcgggtgcaaaca

SEQ ID NO: 46611 - DNA, 504 bp, Glycine max
  Clone ID: LIB3139-103-P1-N1-G4
gaggcaccggattccgtaggataaaatagcttgtcaagagtagagttgccttgtgaaatctgtttctgtcttctgtcaagtgcatcaaatatagctggttaagattctccacgcaggtgcatggcaatggttatctcttctgttcatgccacactatttgccagggcctctttcttttgccaaagtagtggcctaagaagctttagatcgtgtttacctttctcatcttcagctgcttctgtctcctctcacaatctttcacggaagaaatggaggcagccagtgttgtcagtgttggatcttggcggagtcaagataagcagagaagatgtggtgagggatgatccggcaaacaatgtgccagacaatatattttcaaaacttggagtgcagcttcaccggagggatcaacaccctcttgggatactggagaatgcgatatacgagtattttgacactaattattcaaataagttcaacaaggttgatgatctttgtcctatt

SEQ ID NO: 46612 - DNA, 448 bp, Glycine max
  unsure at all n locations
  Clone ID: LIB3139-103-P1-N1-G5
cacgcaatttcatcaccaagatttctcgttataacaaagtggtcaacattccaaacagcatgaccattttggatgaacttctgcctatttcaattgagatggcaaagcgaaacttgaggggcatctggaacttcacaaatcctggggccgtgagccacaatgagattcttgagatgtacagggattacatcgatccaagcttcaagtgggctaacttcaatcttgaagagcaagccaaggtgataattgctgcacggagcaacaacgagatggatgcatccaaactgaagaacgagttccctgagcttctttccatcaaggaatcactgatcaagtatgtctttgagccaaacaagaaaactgcttaaatatattaaagcggtttcatgttttagacatcacagattatgcattttngtggcgggctacatagatcactcattatttc

SEQ ID NO: 46613 - DNA, 431 bp, Glycine max
  Clone ID: LIB3139-103-P1-N1-G6
tgtttttacaatccttcaaaaattttgtttctttgtgtgtgtatggagatgataacttaattagtgttcatgaatatgtcaagccttactttagtggttctaaattgaaaagctttctagctggtcataatatcaccattactgatggtattgacaaaactagtgcaactttgcaatttagaaagttagcagattgtgattttctcaagagaaactttaagcagatgtctaatgttttatgggtggctcctgaggacaaggcgagtttatggtcacaacttcattatgtttcgtgcaataatctggaaatgcaagaagcttatcttgtcaatctcgtaaatgtgttacgagaattgtatttgcacagtccagaggaagctcgccaattgagaaggaaagctctctctcgtattgaatggctgcaaaaagct

SEQ ID NO: 46614 - DNA, 273 bp, Glycine max
  Clone ID: LIB3139-103-P1-N1-G8
aaagcagtgcaatgctgccaacaagcaccatgaggagccttaattgcttcccgcttaatttgggccttgaattttgttccgcttctctatgtggaagaaatctgtaagatattatgcaaaaaataattaaggagtttttctttaaatgggttggttgattaggtcaatgaaccgatcaagaccacatctggttcatggtgtttcgtggattaagacgcctttttttttaatcttccgatatttctctctgttttgttgtttagtcttctttat

SEQ ID NO: 46615 - DNA, 191 bp, Glycine max
  Clone ID: LIB3139-103-P1-N1-G9
ggaatatcctacggtgacgggagaagtggttggcgtttaccagccgagccacgaaggatatcaacaaacacagaagcagatgcacaaccaaaaagcttgggcagaaatgtatctcttaagcttaactgatgtgttggttactagctcatggtctacttttggtatgtggctcaagggcttggaggtttaaa

SEQ ID NO: 46616 - DNA, 69 bp, Glycine max
  Clone ID: LIB3139-103-P1-N1-H1
ttgggcaagaatttatctcttaagcttaactgatttattggttactaactcatggtctacttttgtgta

SEQ ID NO: 46617 - DNA, 444 bp, Glycine max
  Clone ID: LIB3139-103-P1-N1-H10
cagaagccacgctgttctttcaaatcgtaaccgaagaatgaagatggtgcgctgctgtcggtgcttcgcctgagtctcattccgtttgcgcccactatcacaggttgtgctgaggcttaactggttcttgaagcatatttcagagttttatcagagaacaaatgggttatattgggactcacggtgttgcagctctgcacagatataaatatagtggagtagatcattcctatgtggccaaatatgtactacaacccttttggagtcgctttgttaattttttccccctatggatgcctccaaacatgataactcttatgggaattatgttcttactactgtctgcattgcttgggtatatatactccccacaattggacacaagttcttcaaaatgggttcaattcgctcatggactacctgtggttttattccagacatttg

SEQ ID NO: 46618 - DNA, 452 bp, Glycine max
  Clone ID: LIB3139-103-P1-N1-H11
ctcacctctgctcttttctgtgaatcacttatcacttaagaaaataaaagagcaaacgaaatgttgcggtcacttgcgagagccgtagcgaccaatcatcgatgtcacgccacgttctcatctctcagtcactcttctaggcccccaaagcccacaccacccttcaaacccgatcccaaaaaatccggccccaacgccgtcgtcgtcggcgtactcatcgacgagcaggaacgtcgccggcagctcgacgccgacgataaaaatccttctctcgatgtggggcccaacgagccgcctctcttcttcgtcggcccttccttctcccacctcttccgcaacgacgtcttgacctacttcaagctcacgtactctcctttactcactttagttggtttgtttttcagtgtggcattttgtagaacaccttgtgtgcgtcttttagtttgacgttt

SEQ ID NO: 46619 - DNA, 207 bp, Glycine max
  Clone ID: LIB3139-103-P1-N1-H2
ccaatgtgtcgctcatgttcaacacccagtttcagtggtcaacaccatcagcatggctatcaactaaaactaaaaccctcagcttagaattccagacctcagaagcaaaatagaagcatcagaatgcgatcaccctgtgtcttcaacccgaaccagaatgagtcttcttctaccggattatactctgccaagaaattcgacctcacc

SEQ ID NO: 46620 - DNA, 309 bp, Glycine max
  Clone ID: LIB3139-103-P1-N1-H3
gattatcctaagtctttgggaatagtgctgcaatggcttcaagtcaggaggaggtgacccttttgggagctactggaagcccatttgtgtgcagggttcatattgccctcaagttgaagggagttcaatacaaatatgtcgaagaaaatttgaggaacaagagtgaactgcttctcaaatccaacccagttcacaagaaggttccagtgtttattcacaatgagaagcccatagcagagtctcttgtgattgttgaatacattgatgagacatggaagaacaaccccatcttgccttctgatccttacc

SEQ ID NO: 46621 - DNA, 509 bp, Glycine max
  unsure at all n locations
  Clone ID: LIB3139-103-P1-N1-H4
cctcgaactgctgtttggtctcttcactcttatccatggcatcaacgtttctcaccctaccaactccctttctacacaaaactaatgccatcactttctctgacaagagaccctcatttttgcagaggagctctctgaagatcaatgcaattaccaaaaaatgggaacccactaaggttgtacctcaggctgatagagttcttgttcgtttggaggagctatcagataaaacagctggtggagttttgctgcccaagtcagctgttaaatttgagcgatatcttgtgggagaaatcctaactgctggtgctgaggctggagaactaaaggctggaacaaaggtactattcactgacatgaatgcttatgaggtggatttggggactgatgcaaaacactgcttctgtaaagcaagtgacttattggccgtggttgagtaaggtttgccactggntgagacaaaacgggagccatcctttttatgatatatctttgacaaatggttttta

SEQ ID NO: 46622 - DNA, 451 bp, Glycine max
  Clone ID: LIB3139-103-P1-N1-H5
cgaaacataatgaagttgtgaccataaactggaaatgcaagaagcttatcttgtcaatctcgtaaatgtgttacgagaattgtatttgcacagtccagaggaagctcgccaattgagaaggaaagctctctctcgtattgaatggctgcaaaaagctgatgtgcctaccatagcacagattgaagagttccattcgatgcagaggatgatgaatgctcctgattcaaatgataatattgatctactgttgagcattgatttgttgggtttacaaggagcaggtaaagcttttccaaacaagattgtttttgatgataagcttgtgttggctaacacacaagaattctttgatggaaattttccagtggattcttggttaccaatttttgagaattgtctctatcctgtaagtcaattaccttcagaagctgtcgttgtaaatgttacatgt

SEQ ID NO: 46623 - DNA, 168 bp, Glycine max
  Clone ID: LIB3139-103-P1-N1-H6
gagcttgtcccgctgccgcgtcgtagctcggattgagggtcgagaataagacagagggttaattgtggagtattttggaaggatgtcttacgttgctcataacgttaatcagccccaagagaaagatctgttcgacggatattcgtcctttgacatcgaatctagctc

SEQ ID NO: 46624 - DNA, 383 bp, Glycine max
  Clone ID: LIB3139-103-P1-N1-H8
tgaccatccagaccgctgtcctcatcgagaccctcaccgctctcggcgccgaggttcgctggtgctcctgcaacatcttgggcactcaggaccacgccgccgccgccatcgcccgtgacagcgccgccgtcttcgcctggaagggtgagaccctccaggagtactggtggtgcaccgagcgcgccctcgactggggccccggcggcggccccgacctcatcgtcgacgacggaggcgacgccacccttctcatccacgagggcgtcaaggccgaggagctctatgagaagaccggggaactccccgaccctaactccactgacaacgccgagttccagatcgtgcttaccatcatcagagatgggttgaagaccgatcccacc

SEQ ID NO: 46625 - DNA, 333 bp, Glycine max
  Clone ID: LIB3139-103-P1-N1-H9
tcttcatacattttacccgttactctctctctctccatcttcattctcttcttcttcttcactattttctcagttatcgagaccttatcccaacccttttctgttgcgaaggtgcttctgggctgttgtcagatcaatccacaaccctcaattgttggtgttttggctcttcctgtatcatggatggtattcatgggggtgattctcggatacacataactgatggacagcatcctatacacgtgccatatgtgcaagaacacgagcatcatggactccaccatataagcaatgggaatgggatagatgatgatcataatgatggtggtgata

SEQ ID NO: 46626 - DNA, 322 bp, Glycine max
  Clone ID: LIB3139-104-P1-N1-A1
gtttcgttcaactttcaacgccagttcacactctctgcttcgcgtgtaccaacaagtgcaagttcgaatcaatggccagcgctcagctcacagcaatagcgtcatcgatctctacggcgtcgtttgaagggcttcgaccttccgctgttcagtttgcttccacgggcagaattagaattggcaatctctcccaaaggtccttccggggcttggttgtcaaagccgccaccgttgttgcccccaaatacactgcgataaagcctctgggagatagagtgctaataaaaattaaggaagcagaggagaaaactgagggtgggat

SEQ ID NO: 46627 - DNA, 407 bp, Glycine max
  Clone ID: LIB3139-104-P1-N1-A10
gccgtcaacaacgattcctttcggttttctgtttctctggattcattttcatttttacggctaccagaatgtccagctcatcggaatattcggcattttccggcccccgcccggccaagtcgccggccgagaagtccactttctctcagacttgtagtctattgagccaatacatcaaggaaaaaggtgccttcggagaccttaccctcgggatgactcgcacccccgatacttacggttcccctgagacatcgtgtcactctgcaacaaccatggagttgtttcccaccatcatcaagcaacggaacccaactactgtggatttcctatctccccagagtgcttatcctcaccactcagaggttccaaccatggtcaaatcaagtgcatttaagtctatagagaag

SEQ ID NO: 46628 - DNA, 407 bp, Glycine max
  Clone ID: LIB3139-104-P1-N1-A11
ctcataatcaaataccatttcattcattcttacatattgcttaattttatctgaattttgaaacaccttctgaatggctttttcaagagttgcattgttaatatgcacggtaattgggtattttgtgattgcctctgcgggcaatttttaccaagattttgatatcacttggggagatgggcgtgctaagatactcaacaatggcgagcttctcactctgtctcttgacaaagcctctggctcgggtttccaatccaagaacgaatacctttttggtaaaattgatatgcaactcaaactagttccaggcaactctgctggcaccgtcacagcctactacgtataatcatattctaccctactactatatttgcatctagtcatacatattgttcataaacttcggt

SEQ ID NO: 46629 - DNA, 276 bp, Glycine max
  Clone ID: LIB3139-104-P1-N1-A12
tctggattttcgctcacagttatttgcaatagcatttttaatgagatgctcattagatatagctatgaaaaattactgcgccaggctagagctccaagcatgtttttacaatccttcaaaaattttgtttctttgtgtgtgtatggtgatgataacttaattagtgtccatgaatatgtcaagccttactttagtggttctaaatcgaaaagctttctagctgcccataatatcaccattactgatggtatcgacaaaactagtgcaactttgcaa

SEQ ID NO: 46630 - DNA, 418 bp, Glycine max
  Clone ID: LIB3139-104-P1-N1-A2
ctcaactttcttcccctttccttcatttgcttactcccattcgcaaaccctaacggccaacgcagcaagttgaattttcagaatcgattcgtccaagtttgattcgaagcaaaaagaagcgaaattggagttttagggaaagaagaaggaaaaaaaatggcgtacggtggtgcaggtcccgtaggtggttcgggttcggcatcgacaataaagcaagtcaaattggagagagaaagcgaactgagaatagaagttggtaacgacgcacctcttcgccttcgactccttaacggcactgcagagatttttggcaccgagcttccacccgaaatctggctcaattttcctcccaggctcaagtttgctgtgtttacttggtatggtgcaaccattgaaatggatggtgctactgaaactg

SEQ ID NO: 46631 - DNA, 404 bp, Glycine max
  unsure at all n locations
  Clone ID: LIB3139-104-P1-N1-A4
acaaaatctgagagaaaagagcactcagcaaatttactggtactcatggcagatcatcagagactgaggatccaccctatggagggggaagcaccaccgcccccaacaactccattggtccctccaggctcatcaagatcagaaaagggtgttcctttgcaccatcctccacctctaccacgtgctatgccagcagcataccctacaccacacataagaagctcaagctgttgctgcaagtgcatatgctggacaataatcttggttgttctcctcctcattatctntgcagcaagtgttggaatcctttatctagtcttccaaccaaagcttcctgattactcagttgacaccctcaggataagtgatctgaggcttaactttgacatgagcctctatgcaaa

SEQ ID NO: 46632 - DNA, 413 bp, Glycine max
  unsure at all n locations
  Clone ID: LIB3139-104-P1-N1-A5
tgaagagctcacacggcagttctgcactctcctgggtcagtcctatgagaacccactgagtgtagcagttgcagcaggagttgaggggttgcctacactgttaaagcttgcaaatgtaatggcagcaaagaagcaggagtggcaggaaatgaagcagttgccggtgccggttgaattgggtaaggagtttcagttccattcgatttttgtttgccctgtgagtagggatcaaggaagtgaagaaaatcctccaatgctgctgccatgcttacatgtcctttgcaaacaatcaattatgaagctatcaaaaaacagcacccgaacattcaagtgtccatactgtccagccgaagctactgttgcaaactgcaaacagctgtatttctgatgatgtttatgtatnttatctcttc

SEQ ID NO: 46633 - DNA, 415 bp, Glycine max
  Clone ID: LIB3139-104-P1-N1-A6
ctctttgcttctctctccaaacaaaacaacagaaccaaactcagaaccaaactcagaaccaaactcgccaaaactagggttttgcattgatggcactgtgcaaccgcgtcagatcgggaatctctctcttcaccaaatccacgttccttacttcccagcgatccagtctccaacgatccctcgttgcccctttcatttccctcgcctccagaaattacgccaacgtgccggggcaaaaggaaaccaaagttaaggtccctctggctttgtttggaggttcaggaaactatgcctctgctttgtatattgcatctgtgaaagccaatgcagtggaaaaggttgagactgagcttctgcaatttgttgaggcagtaaagaatagtcccatattttcacagtttataagggacttgtc

SEQ ID NO: 46634 - DNA, 319 bp, Glycine max
  Clone ID: LIB3139-104-P1-N1-A7
gctggcaattttgatactgcaatgagattactgaacaggcaactcgggataaggaactttgcccccttgaaatctatgtttctagatctacatactggcagtcattcctatctgcgtgccttttcatccgctccagttgtatcaattgctgttgaaagaggttggactgagtcatctagtccaaatgtgagaggcccaccagcacttcctttcagattgtctcaattagatgaaaaactcaaagttggatacaagtcaacaactgctgggaaatttactgatgctcttcgcacttttgtcaatattcttcatacaattc

SEQ ID NO: 46635 - DNA, 411 bp, Glycine max
  Clone ID: LIB3139-104-P1-N1-A8
cttgtcaaggtgaaccttgtcggctgctggaatttgacggataacatagtttcagtattggccacactacacggaggaaccctcgaattgctaaatcttgatggatgcaggaagattaccgacgcaagcttggttgcaatcgcggataactgccttctgcttaatgatctagatgtgtcaaagtgtgcaatcactgatgccggtatagctgttctttctagtgccaaacagcttactttgcaagtgctttctttgtcaaactgttctggtgtaacaaacaagagtgcgccttccctaaaaaagttgggccagaccttggtggggttgaatcttcaaaactgcaattcaattggctgcaacacagttgagttcctagtggagaacttgtggagatgtgatattctggcttaa

SEQ ID NO: 46636 - DNA, 409 bp, Glycine max
  Clone ID: LIB3139-104-P1-N1-A9
accatcaattttgaggcttttccccacaagctggtgcagtttggagagattcaggaaaaagttgtgttgaaattttcacaagaggaatttcttacagcttggtcaactcaggtgcgtcccgcaacgactctgttggctgatgggtgcccatatttgtatgctatggtgcatgatagttcagtgtctacaataccaggtgattttgtcattggtgttaagttgacaaccataaacaatatgtgtgcatatcggctcaatcctggtatttcacgttctcgtcttttgggcaccattcctcagtgcattttacaactaactgtgttggattaaatggcaacagtgagaacaccattgaattttgattctagccagcagagcttttggcaaatttctattgaccttctcgggg

SEQ ID NO: 46637 - DNA, 326 bp, Glycine max
  Clone ID: LIB3139-104-P1-N1-B1
aaaaagataacggagaggtgattgaccagggcgaacatctctatttctgggttcctttattggcagggttatctgagcttagctttgacccaagacctgagattaggaagagtgccttggaagtcctgtttgaaaccttacgtaaccatgggcatcttttttcactacctttatgggaaagagtatttgagtctatcctatttcctatattcgattatgttcggcattctattgatccttcagggagtagttcaccgatcaatgaagtagaggctgatggtgagcttgaccaagacgcttggctttacaaaacatgcacattggct

SEQ ID NO: 46638 - DNA, 396 bp, Glycine max
  Clone ID: LIB3139-104-P1-N1-B10
gaagacctttagtttgttgctaatcaatttaggcgcctgcacagtaagaagctgcagcgcgcttttcgattttattcccaccattggaggacttgggcagcctgctttatacaggctgcttggcgccgatataagaaaaggattactatgaaagatctcagtttgagggaatctattcctttagatgaaacagtagctagtgagagagaacatgaggactatgctgctggttcaaattcaactcgggctaaattaaaccttggggctacaattcttgcttcgagatttgctgctaacacaagaagaggagctctaaagattaaagatgacatgccccagttacagaagcctgaagaacctgacttttccactgaagctgatgatgattagttacac

SEQ ID NO: 46639 - DNA, 367 bp, Glycine max
  Clone ID: LIB3139-104-P1-N1-B11
gttcccaggacctattgtgttttaaatccacaaaatccttttgtgttaaataggtggatgggaaaattgactttcccccagggcacttcccgaagtgttaagagaatgcctctttctatagggggaggagctggtgcaaagaatgctattctcatgaatatgccaaatgctgttctttcaatgtggagatattttgttggagatctcgtctttgaagtttctaagatgacttctccctacattaaatgtacagtctctttcttcatagcatttggaaatttggctgatgataccatcaattttgaggcttttccccacaagctggtgcagtttggagagattcaggaaaaaagtgtattggaatttt

SEQ ID NO: 46640 - DNA, 395 bp, Glycine max
  Clone ID: LIB3139-104-P1-N1-B12
ttgggagttaggttctgcacgctctgcttccagcgagtgttctttcttcgtttcaacaccttaatttgcacacgctgcttcttcagcttgagaaatggcacaagaaacctttctattcacatctgaatctgtaaacgagggtcaccccgacaagctgtgcgaccagatctctgatgcagtgctcgatgcgtgccttgaacaggaccctgacagcaaggttgcctgtgagacatgcaccaagaccaacatggtcatggtctttggagagatcacaaccaaggccaacgtagactatgagaagattgtccgtgacacatgccgcgaaattggattcatctctgatgatgttggtcttgatgctgacaaatgcaaggtgttggtcaacattgagcagc

SEQ ID NO: 46641 - DNA, 389 bp, Glycine max
  Clone ID: LIB3139-104-P1-N1-B2
gctctgcaaactgagcatggctcctctcgcattttccttcttcttcatccttatcacattcttttcttcatcatctgaagcgggatccgttggaataaactatggaagggttgcgaacgacctacctacaccagcgaaagtggtggagcttctgaaggcacaaggtctgaaccgtgtgaagctctacgacaccgacgccaccgtcttaaccgcgtttgcaaactcgggaatcaaggtcgtagttgccatgccaaacgagcttcttgccaacgccgccgcggaccagtccttcaccgatgcgtgggtccaagccaacatctccacctactaccccgccacgcaaatcgaagccatagccgtcggaaacgaagtcttcgtcgaccccaaca

SEQ ID NO: 46642 - DNA, 406 bp, Glycine max
  unsure at all n locations
  Clone ID: LIB3139-104-P1-N1-B3
gagagttgctgcttggaagaaaggctgtttaatggtcaagattgtgatgtctgggaatgcagcagtcaaaaggagtgattgggcctcattggtacaagtgtttttaacaaacagcaacagtacagagcattttgatgcatgtaagtggacaaaatcagaaccacattcctgggaattgatcttcccaatagaggtatgtggtcctaataatggttttgaaatgtggagttctgattgggcaaatcaaacttcatggcatttgagtttccttattgacaatcccaaacagtctacagtttttgatattctcttgggaatctctcaagattttgaaattgctggtaatactcttatgccagctttttctgnnncacaggctactgccagatcttctgaaaatgctgaa

SEQ ID NO: 46643 - DNA, 402 bp, Glycine max
  Clone ID: LIB3139-104-P1-N1-B4
gagaaaaagtaaccacttgatcggtctcttaaacttcctaacattcctgctgtcgattccgatcctaggaggcgggatatggctgagcagcagggcgaacaacaccgactgcctcaagttcctgcagtggccgctcatcatcatcggcgtcagcatcatggtcgtgtccctggcggggttcgccggcgcgtgttaccgcaacaccttcctcatgcggctctacctcgtcgtcatgttcctggtcattgccgttctgatcgggttcatcatattcgcctacgttgtcaccgacaaggggtccggtcggagggtgatgaaccgcgcttacttggagtattatcttgaggactattcggggtggttggaggagcgcgtggcgagtgatagctactgggggaagat

SEQ ID NO: 46644 - DNA, 316 bp, Glycine max
  Clone ID: LIB3139-104-P1-N1-B7
gaagagtctagaaacaacacaacacaacgcgaatggctacggcgctggagaagaaagcgaaggaggcattcttcgacgacgaattcggtctggccgtcgatctctactctgaagccatacgattggatccgaacgacgccaatctcttcgcggacagagcccaagcccatatcaaactcaacgctttcactgaagccgtttccgatgccaacaaatccatccaattaaacccttccttgcccaaggcctatcttcgtaaagccaccgcttgtatcaaactccaagaatatcacaccgccaaggtagcgcttcaaaa

SEQ ID NO: 46645 - DNA, 387 bp, Glycine max
  Clone ID: LIB3139-104-P1-N1-B8
ctcgttggttcaatacattacacttgcacagttccactgttgtcacttttgcaatgaacacagggctcgttgcaggtgcagccttgcttgcactcttggctatcaccttctccttgttgaaccctcaaaccctgttttctccgcctcatgttccgggctcgaaggatcaccttcacgctgctcggttgctccatgtcaccggagccgtcgggccggagagtcttgtcttcgacgccgacggcggagggccctacaccggcgtcgccgatggccggattctcaagtgggaaggggaagagcgaggttggactgaatttgctgtcacaagttccaataggtcggactgtgtacgcccatttgcaccagagttggagcacatttgtggga

SEQ ID NO: 46646 - DNA, 414 bp, Glycine max
  Clone ID: LIB3139-104-P1-N1-C1
ggaatactacactatacttgtcaaccctttgagagttagaatggctgctgctattgaaatccccacaatagtgtttccaaactcctctgcccaacagaggatgccagtggttggaatgggatctgcccctgacttcacatgcaagaaagacacaaaggaggctatcattgaggccgtgaaacagggttacagacacttcgacactgctgctgcttatggctctgaacaggctctcggtgaagctctcaaggaagctatccatcttggcctcgtctcccgccaagacctctttgtcacttccaagctttgggtcaccgaaaatcatcctcatcttgtccttcctgctttgcgcaaatcacttaaaactcttcaactagagtacttggacctgtatctcatccactggcccctgag

SEQ ID NO: 46647 - DNA, 407 bp, Glycine max
  Clone ID: LIB3139-104-P1-N1-C10
aatttaattttgtatttgtttggctttgattgaaaatcttctctgacagagacttgatatttactctcaaattaggattgatatagataacccttataaacagaagttgaaaacaaacaaacggaggtttgctaaaacatttccactctcccttttgcgttttatctatgttgagccgttagatttaattttaaaattcgtacacaacaacttaaattgcaaaccaaacatgttaatttttaattagatgacattataaaatttcttttaactttcaattcatttactatttgcttatttttataatgaattggtttttgtttaagtattactacataaaaatatttttttgttaatataaagttaatattttggtcccatcaatgataaaatgtttattttataat

SEQ ID NO: 46648 - DNA, 402 bp, Glycine max
  Clone ID: LIB3139-104-P1-N1-C11
acctagtgtctaacactcttactgtcgcttttttcctctcttgtttccttttctcttgtttaaaaatatccccttacacgcgtggcctaatacgtccggtctgactctctggagaagaggtcgtgtaatactttcttaagccccccccctatctacccagctttttgtttattttatacaggaaaaggacggttttttgggggggctcacgcatgtttatacccttgcgccgctgagcgctgcagcgttttctttctatgttcttcgcttcgtccggaggttcttccaaagagcattcgaaaaaagtacccttgttaccactttacgactgctacggcaaaagtttgggaaaggggtcgacttgcgctcgtcttgttgtaaataacgcctgcgcattaatgc

SEQ ID NO: 46649 - DNA, 412 bp, Glycine max
  Clone ID: LIB3139-104-P1-N1-C12
ggctcgagggctcgagtgcaactaagaaaatggggagcataaccacaagcaccatcggagctcccccaacccgaagaacaacactcacccctttctcttcgcttctccccaaacccaaaccccattctctcgccctatccacttccaatccccacccattccatctctccaaacccctaaccatttcccctaatccaaacccccccattcccaaatccaccccctcctcctcctccgccgctacctctccatcctcccccctaaacctcaagtcccgcctccgcaacggcgagaccctctatggtctcttcctcctctccttctcccccaccctcgccgagatcgcgggccacgccggctatgacttcgtcgtcgtcgacatggagcacggccccggtggcatccgcgacgc

SEQ ID NO: 46650 - DNA, 411 bp, Glycine max
  unsure at all n locations
  Clone ID: LIB3139-104-P1-N1-C2
ggtgtattgtgtatatgctaaataagaggtgctcaaaatgtagttatagattacaaattattgcaagggttgctcttagcttcttcatttcaagcttttgtttacactttgcagtgctatggcaaagataagagtatcatggatggaaaaagggggggaaaaaatgttgctttgtactccaaattatgaataatagaactttatattatttatcaaaaaaaaaaaaaaaaaaaaaaaaaaaaaaaaaaaaaaaaaaaaaaaaaaaaaaaaaaaaaaaaaaaaaaaaaaaaaaaaaaaaaaaaaaaaaaaaaaaaaaaaaaaaaaaaaaaaaaannngggggggccccccccttgttgggctcccccccccctgaattaatttgggacgcgccccccggggtttcccttttt

SEQ ID NO: 46651 - DNA, 412 bp, Glycine max
  Clone ID: LIB3139-104-P1-N1-C3
atcaaatggcaacagtgagaacaccattgaattttgattctagcaagcagagcttttgtcaattttctattgaccttctcggtggaggaattttagtggacaaaactggagattggatcacacttatacaaaattctccaattagtaacttgttgagagttgctgcttggaagaaaggctgtttaatggtcaagattgtgatgtctgggaatgcagcagtcaaaaggagtgattgggcctcattggtacaagtgtttttaacaaacagcaacagtacagagcattttgatgcatgtaagtggacaaaatcagaaccattcctgggaattgatcttcccaatagaggtatgtggtcctaataatggttttgaaatgtggagttctgagtgggcaaatcaaacttcatggcatt

SEQ ID NO: 46652 - DNA, 396 bp, Glycine max
  Clone ID: LIB3139-104-P1-N1-C5
ctcgagccgaatcggctcgagaacgagctgaagcgcgtgttccagatgttcgaccgcaacggcgacggaagaataacgaagaaggagctgaacgactcgctggagaatcttggcatcttcattcctgacaaggagctcggccaaatgatcgagaggattgacgtcaacggcgatggctgcgtcgacatcgacgagttcggggagctctaccagaccatcatggacgagcgcgacgaggaggaggacatgagggaggccttcaacgtcttcgaccagaacgccgacggcttcatcaccgtcgacgagttgaggaccgtcctgtcctccctcggcttgaagcagggcagaaccgtccaagactgcaagaacatgatatccaaagttgattgtgatgga

SEQ ID NO: 46653 - DNA, 189 bp, Glycine max
  Clone ID: LIB3139-104-P1-N1-C6
ctctctcaaccgttgttttagacagagacacacacatagacccttatccttcgctgtcttaccgatctctgtgcttttggagctcgcagtagcatttctgcgaccattcgtcctaatggcaactgcccccgcgccgtcttcgccgacggcgaataacggcaccgcgcctgcatcgacgactccggccac

SEQ ID NO: 46654 - DNA, 411 bp, Glycine max
  Clone ID: LIB3139-104-P1-N1-C7
ctctcatcagattcgggtcgggttagcgttatcggataacttcgcccataaattctctgtttacggggcgaaaatgacagtattcttagccacgaggctcgtgttgcggagatccccgccgcttctctggcggcgcagcttttctcgggcggcggtagaggccgaaaaggacactgttgccgtgccgtcgcttccgttgttcgattactctccgcctccgtatgcggggcccaccgctgacgagattctggcaaagcgcagggagtatctgagtctttccatcttgcacttctacaagaatcccgtgaacatagtggagggtaagaagcagtacctgtttgacgagaaggggagaaggtacgtggatgcgtttggagggattgctacggtgtgctgcgggcactgtcaccc

SEQ ID NO: 46655 - DNA, 395 bp, Glycine max
  unsure at all n locations
  Clone ID: LIB3139-104-P1-N1-C8
ccggaatcataggctccccctaacttctggggccacaccccggaagaagaatactacacctcccaaggcgttcgcaacaccaagtcccacttcgaaacccccaacggcaaaatcttcacccagtccttcctccctctcaacctccaaccccaccaagtcaaagccaccgtctttatgacccacggctacggctccgacaccggctggctcttccagaaaatctgcatcaacttcgccacctggggctacgccgtcttcgccgccgacctcctcggccacggccgctccgacggtctccagtgctacctcggcgacatggacaaaatcgccgccacctccctcttcttcttcctccacgtccgcaatagccacccctacaaaaacctnccggcatt

SEQ ID NO: 46656 - DNA, 408 bp, Glycine max
  Clone ID: LIB3139-104-P1-N1-C9
tggaagtattgatcccagcatggctggacttgcagtaacatatggcctgaatttaaatgcacgtctatcacgatggatacttagcttttgcaaacttgaaaataaaatcatatccattgaaagaatttatcaatacagccaaattcctagtgaagcaccagcaattgttgaagattctcgtcctccatcctcatggcctgagaatgggacaatccaattaattgatctgaaggtacgttacaaggaaaatcttcccgtggtgcttcacggagtatcctgcacatttcctggtgggaagaagattggaatagttggtcgtactggcagtggcaaatctaccttgattcaagcattatttcgattggttgaaccggaggcagggagtatccttatagacaacattaatat

SEQ ID NO: 46657 - DNA, 411 bp, Glycine max
  Clone ID: LIB3139-104-P1-N1-D1
aacggacctctctcttcttcagtggtggaagctactagaacactagtttgttgagcactgcgatgaggaagtggacggttgcttccgctctccttcttctctctctcctctttctctttgcagatcaaggtcgaaagtttcaggcgaatgccgagggagattccgacgagcttgtagatccacccaaggtggaggacaagatcggtgctgtgcctcatggcctttcaaccgattcagatgtcgtcaagagggaggcggagtcgatctcgaagagatctctccggagcaacgcggagaagtttgagttccaagcggaagtgtcgcggcttatggatatcatcatcaattctctctacagtaacaaggatatcttcctcagagagttgatttccaatgcttctgatgctttgg

SEQ ID NO: 46658 - DNA, 376 bp, Glycine max
  Clone ID: LIB3139-104-P1-N1-D10
cttgaatcattcttctgatttgtaccatgtttcccctgagctctcatcttccttggacacatcctcgccggcttcggagggctctcgtggcgtggcattttccgacgaggaggtgcggctggcggtgaggcacccgaagaagcgggcaggtcggaagaagttccgggagacgcgccacccggtgtaccggggggtgaggaggaggaactcggataagtgggtgtgtgaggtgagggagcccaacaagaagaccaggatttggctggggactttccccacgccggagatggcggctcgggcgcacgacgtggcggcaatggccctgaggggccggtatgcctgtctaaaccttgctgactcggcctggcggttacct

SEQ ID NO: 46659 - DNA, 411 bp, Glycine max
  Clone ID: LIB3139-104-P1-N1-D12
ggcatctgtataccttgttgatctacattctcccatcttttctcactgctgaaattaaatataagcggaatcagagtaatattcagatttccggcttattttacgacggcagatacaaattctggactaaacacgagaaaaatcttgctttgacagaagaggaaaagatggaagtgattagaaatagaggcattcctgctgatgttcttgcaaagcgagctcatgaatttgaaaaacatgttgctcatgaaagcctcaaggatcaaattcctgctgttgacaagttgtattctactaaggttaataagtttgcaaaaattatgaaccttagacaaaagtgttgtggtgatcttaaacttcttactgatcggaagtgtatgagggtaagcatattcctgtatctaaatatag

SEQ ID NO: 46660 - DNA, 410 bp, Glycine max
  Clone ID: LIB3139-104-P1-N1-D2
ttccgatggtttgagtcatgggaaaattggcatcttcatatggaaaccggttgcgagaacgatttcttaggcaagtgtcacggcactgacgatgacgagttcttcagagacatccttcagcaaccaccacctgcggctttctcttccgaaagcgaaagcgatcactccttcctcgctgtccaaaacacttctagcatccccaacgacggtgccgttttgtctcctaggaattacctcgtcaaaagcagcagctccaactccttggtctctcaaaacgcttccaaacgacctcgtcgtttgtcctctcccaggacttacattctgtccttcgacaactcaaccatggttccggccacacccgaaacccgcccccgctcctccaataattcccctctgcctgccaaacgggc

SEQ ID NO: 46661 - DNA, 404 bp, Glycine max
  Clone ID: LIB3139-104-P1-N1-D4
gttttaaattcacaaaatccttttgtgttaaataggtggatggggaaactgactttcccccagggcacttcccgaagtgttaaaagaatgcctctttctataggaggaggagctggtgcaaagaatgctattctcatgaatatgccaaatgctgttctttcaatgtggagatattttgttggagatctcgtctttgaagtttctaagatgacttctccctacattaaatgtacagtctctttcttcatagcatttggaaatttggctgatgacaccatcaattttgaggcttttccccacaagttggtgcagtttggagagattcaggaaaaagttgtattgaaattttcacaagaggaatttcttacagcttggtcaactcacgtgcgtcctacaacaactct

SEQ ID NO: 46662 - DNA, 334 bp, Glycine max
  Clone ID: LIB3139-104-P1-N1-D5
cgaaagttcatgaccaacaggcttctttccaggaagcagtttgtcgttgatgttcttcatccagggagggcaaatgtttccaaggctgaacttaaggagaagctagctaggatgtatgatgtgaaagaccctaatactgtatttgtcttcaaattccgaacacattttggaggtggcaaatccactggatttggtttgatttatgacacagtggaaaatgctaaaaagtatgagcccaaatacaggcttatcaggaacggccttgacactaaggtagaaaagtcaaggaagcaaatgaaggagagaaagaatagagctaagaagattcgcggag

SEQ ID NO: 46663 - DNA, 407 bp, Glycine max
  Clone ID: LIB3139-104-P1-N1-D7
ctggatggactgccaccccaatgcaggatgttcaggttacaattgattggtttatttcctctcaggaatgtgttcccaggacctattgtgttttaaatccacaaaatccttttgtgttaaataggtggatgggaaaactgactttccctcagggcacttcccgaagtgttaagagaatgcctctttctatagggggaggagctggtgcaaagaatgctattctcatgaatatgccaaatgctgttctttcaatgtggagatattttgttggagatctcgtctttgaagtttctaagatgacttctccctacattaaatgtacagtctctttcttcatagcatttggaaatttggctgatgacaccatcaattttgaggcttttccccacaagctggtgcagtttgga

SEQ ID NO: 46664 - DNA, 272 bp, Glycine max
  Clone ID: LIB3139-104-P1-N1-D8
ttttacttatgatagctttctctttttactctttagaattcacaataagatgatagaagcgtgcctcgtctaaaccagaaaggctcctaggtgccatgagatgctactacccccagtcccttctggcgcctggcctccgtgccttggacgcacctattggttaccttgataactttgggtagaattaaattatgttattccatttggtttaaaatatcagtgtttaagcagtgaattatccattttttatttattgtacatataatccaacg

SEQ ID NO: 46665 - DNA, 409 bp, Glycine max
  Clone ID: LIB3139-104-P1-N1-D9
tactgatggtattgacaaaactagtgcaactttgcaatttagaaagttagcagattgtgattttctcaagagaaactttaagcagatgtctaatgttttatgggtggctcctgaggacaaggcgagtttatggtcacaacttcattatgtttcgtgcaataatctggaaatgcaagaagcttatcttgtcaatctcgtaaatgtgttacgagaattgtatttgcacagtccagaggaagctcgccaattgagaaggaaagctctctctcgtattgaatggctgcaaaaagctgatgtgcctaccatagcacagattgaagagttccattcgatgcagaggatgatgaatgctcctgattcaaatgataatattgatctactgttgagcattgatttgttgggtttacaa

SEQ ID NO: 46666 - DNA, 308 bp, Glycine max
  Clone ID: LIB3139-104-P1-N1-E11
tgagaagaaggatcctaccggagccaaggtcaccaaggctgcccagaagaagaagtgaatcgtgcgggctggttcatcaggggatgttggttacaataaatgttggtttcttttctgtactcttgtgtcttcttttctaggtagcttgtttttcggacaaagtttgaagtctccaccatcatctcgcaactgttgttcccagaactgggttcttgatcgacggtggcaaaattgcttttatttatctgtgttttaatgtgttgtgtttgtcggaacccctgattacatttttgttaagcgcagcgagt

SEQ ID NO: 46667 - DNA, 392 bp, Glycine max
  Clone ID: LIB3139-104-P1-N1-E12
aatcaacccatactccatggaatggactggtttggccaatagattactgagtaagggcaatgatattctgtgttgcgattatgctagttttgatggtttgattaccaagcaagttatgagcaagatggcagaaatgataaacagtctttgtggtggtgatgaaaaattgatgcgtgaaaggacgcacctgctgttggcttgttgttcaaggatggcaatttgtaagaaagatgtttggagagttgaatgtggaatcccttctggatttccgctcacagttatttgcaatagcatttttaatgagatgctcattagatatagctatgaaaaattactgcgccaggctaaagctccaagtatgtttttacaatccttcaaaaaattttgttctt

SEQ ID NO: 46668 - DNA, 409 bp, Glycine max
  Clone ID: LIB3139-104-P1-N1-E3
aaatcagaaccacattcctgggaattgatcttcccaatagaggtatgtggtcctaataatggttttgaaatgtggagttctgagtgggcaaatcaaacttcatggcatttgagtttccttattgacaatcccaaacagtctacagtttttgatattctcttgggaatctctcaagattttgaaattgctggtaatactcttatgccagctttttctgttccacaggctactgccagatcttctgaaaatgcggaatcctctgcatgatctggaatttatgttttctttcgcttgttcgttcgtttaattcaataaaggaaattgggcatgaccctcttgttgagtatgctctgcctatttgaaaatttccacacctcttttaattgtcgtaatgacgtgtgaagtgtgt

SEQ ID NO: 46669 - DNA, 362 bp, Glycine max
  Clone ID: LIB3139-104-P1-N1-E4
aactacatcaaccccaagacactctttctttggccccaagattgtgtcatcatcccctcaccaacactactacttccatgaacctcacagcccctcctcctcattcccttgtaattgttttaatgtctcttcgaggcgttggagtgccttcaagcttggttgcacctccatggaccctcaagtagaattctcatcatcacttcactctgcctctgagatcattaggaaaaagaaaattactgggcggcaaaagagagaggaacttgaaaaggaggtcgctatgcttcaaaagttgttggaccaagaagaaagtttcatgagattttggagatggtgcatagtagaccaaatgggtcatcgat

SEQ ID NO: 46670 - DNA, 417 bp, Glycine max
  unsure at all n locations
  Clone ID: LIB3139-104-P1-N1-E5
gtttcactggcaggcaacaatcatgggacctcctgatagcccatataccggtggtgtattcctagtttcaattcattttcctcctgattatccattcaaaccaccaaaggttgcatttaggactaaggtattccacccaaacatcaacagtaatggaagtatatgccttgacattctaaaagaacaatggagcccagcactaaccatttctaaggtccttttgtccatttgctcactgttgacggatcccaaccctgatgacccgcttgtgcctgaaattgcccacatgtacaagactgacagggctaagtatgaagccactgctcgtagctggacacagaagtatgccatgggatgatcatgctcctncttagctgcacaatcatgatttttatgaagaaacaaaattacttttat

SEQ ID NO: 46671 - DNA, 405 bp, Glycine max
  Clone ID: LIB3139-104-P1-N1-E6
aaccctcatacggtgaagacgaggctgaggcagtgggctcaggtagttgcttgtgcggtgcgtcaaagttcagatgtgtgattgggaagcaaatgaagaagcagggttgtcaaacgtaaaccataaaatagaagcaatgtgtgattggtattattataaatgacaacgattccccatcgaaccggaccaaaccgagagcggaccctagttaaccacccaattgtgacggaaccaaactagttagttaattagctatattacattacatgcggggctgtcggcagcgccttgttttgtactgtacttgtccaatgtgatgactaagccaaagtagatctgttctattatagtattatctgtcacatatatgatatatgctagactaacgtacaatttagttttatt

SEQ ID NO: 46672 - DNA, 402 bp, Glycine max
  Clone ID: LIB3139-104-P1-N1-E7
gttgaactggcaaagcgcactggaagatcagtatcttctttgcaggatatcctcactaatgttggcgaaaaggttcaatcagagtttgagcttctcagcatggatatcgctgaacttgtgacaatggaggctggcatcaatgttaagaggctacattcagctgaaggtgcagaaattttaccacgtcctgcagttgtaacagtgatgggccatgttgatcatggcaaaacttctcttcttgatgccttgcgtcaaacttcagtggcagccaaggaggctggtggcataactcaacatataggtgcttttgtggtggtcatgccgtcaggagcatcaatcacatttcttgatactcctggtcatgctgcatttagtgcaatgcgggcaagaggtgcagcagtt

SEQ ID NO: 46673 - DNA, 406 bp, Glycine max
  Clone ID: LIB3139-104-P1-N1-E8
gttgatttgcagcgcactcatcgtattaaaggaatgattaaaatggtggccacagttggtattcctgagaatacaggtatagcattggcctgtgctatgaatagttcttttagggggcgcgccagttctgatatttacaccatctgctctcaagactgtgaattatggaatcctgcttgcacaaaagcaatgactatgtcatttaatccaaacccgtgttctgatgcatggagtttggaatttctgaagcgtaccggatttcattgtgatatcatttgtgtcactggatggactgccaccccaatgcaggatgttcaggttacaattgattggtttatttcctctcaggaatgtgttcccaggacctattgtgttttaaatccacaaaatccttttgtgttaaata

SEQ ID NO: 46674 - DNA, 171 bp, Glycine max
  Clone ID: LIB3139-104-P1-N1-E9
acaagattgtttttgatgataagcttgtgttggctaacacacaagaattctttgatggaaattttccagtggattcttggttaccaatttttgtgaattgtctctatcctgtaagtcaattaccttcagaagctgtcgttgtaaatgttacatgtggtagtggacgtggtg

SEQ ID NO: 46675 - DNA, 357 bp, Glycine max
  Clone ID: LIB3139-104-P1-N1-F10
aggttcttgttttttgggcaccattcctcagtccatgttacagcaaactggttggaatcaaatggcaacagtgagaacaccattgaattttgattctagcaagcagagcttttgtcaattttctatcgaccttctcggtggaggaattttagtggacataactggagattggatcacacttatacaaaattctccaattagtaacttgttgagagttgctgcttggaagaaaggctgtttaatggtcaagattgcgatgtctgggaatgcagcagtcaaaaggagtgattgggcctcattggtacaagtgtttttaacaaacagcaacagttccgagcattttgatgcatgtaagtg

SEQ ID NO: 46676 - DNA, 417 bp, Glycine max
  Clone ID: LIB3139-104-P1-N1-F11
attgaattttgattctagcaagcagagcttttgtcaattttctattgaccttctcggtggaggaattttagtggacaaaactggagattggatcacacttatacaaaattctccaattagtaacttgttgagagttgctgcttggaagaaaggttgtttaatggtcaagattgtgatgtctgggaatgcagcagtcaaaaggagtgattgggcctcattggtacaagtgtttttaacaaacagcaacagtacagagcattttgatgcatgtaagtggacaaaatcagaaccacattcctgggaattaatcttcccaatagaggtatgtggtcctaataatggttttgaaatgtggagttctgagtgggcaaatcaaacttcatggcatttgagtttccttattgacaatcccaaaca

SEQ ID NO: 46677 - DNA, 416 bp, Glycine max
  Clone ID: LIB3139-104-P1-N1-F12
aatgaattccgtcgcttctcatgcatgatcgcaccttcaactctcttcttcttcaccatggctttacttcaaggttttggcgctgtggagttcgttttggtgaggattctgattaaagagttttcttttattctttcggagaagcgtctctgttgcggtggattcttaaaatttgctaaatctttttttctctattactatcctgcgtgtggcttgtgattggaatgcttagagttataattgctgttaccaaacagagacggatctctacctattgttcttgctttctgtttcttttgcagtagcatcaccttatcatcagcttctgcttgctttcaccacaacggcctcactatttggtgtgttccatgtcacaaaaaacgaaaggagatatcccttttacccactcctcgtca

SEQ ID NO: 46678 - DNA, 411 bp, Glycine max
  Clone ID: LIB3139-104-P1-N1-F2
cggctcgagccggagttaccgtacccgccgcaggttggccgactccgccgttgtcgccgaggagctatggtggcaagccatagactatgtaagactaaaccacagcaccatctcgttctttaatttgccggaaactgctgcgtcacgctggagtcgggttaaattgaacgctgccaaggtgggtaaaggtttgtccaaggacgccaaagcacaaaagttggctttccagcattggatagaagctattgatcccagacatcgctatgggcataacttgcaatactactacaaagaatggtgtaaaacagatgctggccagccgtttttttattggttggatttaggaaatgggaagaatcttgatcttgaacaatgctctcgatcaaagcttcaaaaacaatgcatcaagta

SEQ ID NO: 46679 - DNA, 415 bp, Glycine max
  Clone ID: LIB3139-104-P1-N1-F3
ttccttctctctttcaccaatcaacacaaactaagttcttccttctgttgaaagcgatagcaatggccacgaatccaatcgaagcggggaacggcgacgctgctcccaaccctaacgcgactaccaaatcctccgtgtacctgcaagactcggaggagctgaagcgagtcttcagccgcttcgacgccaacggcgacggcaagatctccgtctcggagttggacaacgtcctccgctccctcggatccggcgtcccgccggaggagctccagcgtgtcatggaagaccttgacaccgatcacgacggcttcattaacctctcggagttcgccgccttctgccgctccgacaccgcggacggcggcgacaccgagctccacgatgccttcaacctgtacgatcaggacaagaacgg

SEQ ID NO: 46680 - DNA, 419 bp, Glycine max
  Clone ID: LIB3139-104-P1-N1-F5
gttttaagactttggaattgaggtgctgcaatggcttcaagtcacgaagaggttacccttttgggagcaattgcaagcgcatttgcttgcagggtgaagattgccctcaagttgaagggagttaaatacaaatatgtggaagaaaatttgaggaacaagagtgaactgcttctcaaatccaacccagttcacaagaagattccagtgtttattcacaatgagaagcccatagcagaatcccttgtgattgttgagtacattgatgagacatggaagaacaaccccatcttgccttctgatcttaccaaagagccttggctcgtttctggtccaaattcattgatgacaagattgtggatgttgcacgggaatctgttttcacggttgatgagaaagagcgtgagaagaatgttacagaa

SEQ ID NO: 46681 - DNA, 256 bp, Glycine max
  Clone ID: LIB3139-104-P1-N1-F6
aggatatgtgatgcattactttaggggctctaaatcgaaaagctggctagctaggcacggcatgaacataactgagggcattgacataactagtgcaactctgcaatctataaagctagcatattgacgactctcttaagagaaactcgatgcataaacttgaggcctcgcgggtgagggctgatgacagggcgagttgatggacacaacttgatgctgtatagagtaataagctggaaaggcaagacgcttatgt

SEQ ID NO: 46682 - DNA, 408 bp, Glycine max
  Clone ID: LIB3139-104-P1-N1-F7
ggctacctcagaaaaaaagggacttgaagattacagacctgaagatatatcgctctctcttctacgaatgatttcatacaatattgcccagatagcctacttaaatgcattgcggtttgggttgaagcgtatcttttttggaggattttttataaggggtcatgcctataccatggatgctatttcttttgcaattcatttctggtctaatggggctgcacaagcaatgttcttgcgacatgaaggatttcttggagcattaggtgcatttatgagttatgaaaagcatggtttagatgacctaatggtgcatcagttagttgaaagattcccaatgggtgctccatatacaggaggcaagattcatggccccccacttagggatttgaatgagaagatttcatggat

SEQ ID NO: 46683 - DNA, 401 bp, Glycine max
  Clone ID: LIB3139-104-P1-N1-F8
agccattcgtattgtcgcagagaaagaaaaccctagctcaccgtttcaagatgcaaatcttcgttaagaccctcactggtaagaccatcactctcgaagtcgagagttcagataccatagacaatgtaaaggccaaaattcaagacaaggaagggatcccaccagatcagcaacggctcatttttgctggcaagcagcttgaggatggacgtacccttgctgattataacatccaaaaggagtccactctccacttggttcttcgtctccgtggtgggatgcaaatctttgttaagaccttgacgggaaagacaatcacccttgaggtcgagagctccgacaccattgacaacgttaaggctaagattcaggacaaagagggtatccctccagatcaacag

SEQ ID NO: 46684 - DNA, 410 bp, Glycine max
  Clone ID: LIB3139-104-P1-N1-F9
cacttaatggtgttgagggtttggactatatggaaagaattcctcttgccacatctgagggttttcctcatgtgctttcacgcaaaaatggcgaaaaaggcaaaaggagatttgtctctggggatggtgaagagatgacattgattccaggaaccagtgttgaagaggcttacaacaagctaatagttgaacttgagaaaaatgttcctacattggttggcattgaatgtcccaaggatgagaaacttcctcgtcgcaaaatttttgacaaacctaagacgcgctgcttcactattctccctatggagtttaatcttgtggtccgtcaaaagtttttaaattttgtgaggttcattatgaagaaaagggacaagcttaagtgtcaagttggaatcaacccatactccatg

SEQ ID NO: 46685 - DNA, 412 bp, Glycine max
  Clone ID: LIB3139-104-P1-N1-G1
ccaagacatagcaaacgatccaaactcttttttcatttgcagcatcaaaatgagtggtagcaacgatggtagcggcagctggagctctaggtttttgaaggtggctagtgcagctgccgctacagccgccgttgccggcggtttatatgccattctttcatcctcaacctctgctagctctgagatggaagtgccgtttggcagcgcacggcgtgagagcaaagaacgtgacgatggtggctccgggtctcatcctcgcgagggtgccaccacggtcagtcgttggaagaaacctgagattggttgggtgaagctgaacgtggatggttcacgcgacccatacaaaagttcctccgctggttgtggtggtgttctgagggacgcatcagcaaagtggctccgtggctttgct

SEQ ID NO: 46686 - DNA, 373 bp, Glycine max
  unsure at all n locations
  Clone ID: LIB3139-104-P1-N1-G10
aaaattcacagacaccaaccaaccatgttcactcaaattcttagatagttacttagttagctctttccgccatggaaggtaacaaggacgaagcattacgctgcgttcgcatcgccgaagaagccatcgcgtcgagaaacaaagaccgcgccctcaaattcctcaaaatcgcgcaacgtctcaaccgcgatttgcccctccaatccctgctcgacaagtgcaaccgcctcgattctcacaccgnctncaccgcaggcggcagcggcgcctctctggcgaacggccactctcctcgtcgcgagggcttaaacgtggaaagaaattacacggacgtgcacctaattaggggaatcaaaggaaagagcgattatta

SEQ ID NO: 46687 - DNA, 387 bp, Glycine max
  Clone ID: LIB3139-104-P1-N1-G11
gaaactgtaagcaccttgaagtttgctgaacgggtttctggcgtggagttaggcgctgctcgtagcaacaaagaggggagggatgtgagagaacttatggagcagttggcatctctcaaggatgcaattgcaaggaaggatgaagagattgaacggttacagtcactcaaggctaaccataatggtgcaaagcttggtatgatctcagtaagacatgggtcatcatctccaaggagacattccatagggactccccgaattagcacgagacttgcaggagcaaggagctttggagtcaatggaaaggcagcttctgacatggataactgctcagagtatagtgataagcattcagaaactggttctcatcaatcaatggatgatttc

SEQ ID NO: 46688 - DNA, 342 bp, Glycine max
  Clone ID: LIB3139-104-P1-N1-G12
gacatagcaaacgatccaaactcttttttcatttgcagcatcaaaatgagtggtagcaacgatggtagcggcagctggagctctaggtttttgaaggtggctagtgcagctgccgctacagccgccgttgccggcggtttatatgccattctttcatcctcaacctctgctagctctgagatggaagtgccgtttggcagcgcacggcgtgagagcaaagaacgtgacgatggtggctccgggtctcatcctcgcgagggtgccaccacggtcagtcgttggaagaaacctgagattggttgggtgaagctgaacgtggatggttcacgcgacccatacaaa

SEQ ID NO: 46689 - DNA, 411 bp, Glycine max
  Clone ID: LIB3139-104-P1-N1-G2
aaaaaaatgggctgttcccttgctggattaaatatcaagcgttgcaaaggaatcagcagccgctctgtcaacaagcttcaggaacatctctgcatgtgtgacatcctctactgaacaggaaatgcctcagcagcttttatagttagtgttgctcgttagtgtttttgggttcattcacgatggatcttggtcgtctagtagtcggttctctttttccagaggataacagttatatttaaacctcttttttgcaggtttccattaattggaaatctgttacaaattttttggcactccgttgatgagatgccacttttaaaatatggctgtttatctctgcgagcatagttaccgagttctggagttaggtatctttttttctagtgttggcacctgatgtttgtagctctg

SEQ ID NO: 46690 - DNA, 411 bp, Glycine max
  Clone ID: LIB3139-104-P1-N1-G3
ccagtgtccctctgatatcagactccgacccacaccctcactccttcgccgcctcctttgatttctccaaagcccaaatcttgaaagcctcgaagaagcccctgatgaagatctccgtctacaagggccccaccactccctcctgcgtcttcacctccgccaaactattgggcaaagtttcaatacccctcgatctcaccttggccgagtcacgcccctgcaccttccacaacggttggctctccctttccaagaacaccaacccatcccagttacttcacctaacagtccgagccgagcctgacccgcgctttgtattccggttcgacggcgaaccggagtgcagcccgcaggttttccaaataaaaggcgacgtcaagcaaccggttttcacttgcaagttcagcttca

SEQ ID NO: 46691 - DNA, 408 bp, Glycine max
  Clone ID: LIB3139-104-P1-N1-G4
aaaatcacaaaccaaccttagcctagagaaaattaacaagctagtttgcttgtttttcagtgaactcaaggaatacactttatctcttgagatacgtactaagattcatttaagaaattgatatattcccataattaatttgaaagaagatggaagtggtggtacaaagtcctagtagtccaaacatggatactttcgattttggtggcaacatgggttcgatctttcaaagtgttccttcttcaccaaaagggtttggtaattactacctaagcgcaccggcgagtccatctaggatgtctgaattatacaccgaatttgaatattattcttcggcttcaccctcttcattcgaagcaggcaacaaaattgatgatgacgatgaagacgaaaacaacaacgattaca

SEQ ID NO: 46692 - DNA, 409 bp, Glycine max
  Clone ID: LIB3139-104-P1-N1-G5
gcttgttttagataatccttcactccttgcttttttgagcttcaaattacaagctaccccttcttttcaaaaccctaattcctctttctcttccaatctcatttctcaagatcggcttcgctgcttcctcaggaattatgtcttttgtgcggaattatcaagcagaagattgtagtttacatagtggttactggtccacctttgatggaaacaactttggcaacagcaataggaaaagaagcaggaacaattattataacaggaactgtaacatttacaatgacaaccggacaaaatttggggaccatggttgcaactttaatttttacacagctgatcatgctaattatgttagatatgatgctgttccatcatctttgaaaaggagaaaatattcagtgcctgcttg

SEQ ID NO: 46693 - DNA, 425 bp, Glycine max
  Clone ID: LIB3139-104-P1-N1-G6
atctccaacctagaagattaaccatgtccctttgtaagtaccctgaggctgaaatagtaaccctttatatacctttctgatctattgacatattcaccctccaagcaaaacatttttattcttattttgctccatctctttagatcatcacaacttcagaggcttggttttaggattcaacttccaaaggcttactctaacatatctctgattgaaggggttctgtgagtttcttgttttagtttgagctttgtttggtaaacttgtcaagggggaattgcagtttctgatttgtgaaactacaaaaaattgaatttagaactgataaagggtctaatagaagagttaccaccatatcatgttataccaaactagcattagaatttatcatgatccttatggatatttgttagtaatgttcttag

SEQ ID NO: 46694 - DNA, 370 bp, Glycine max
  Clone ID: LIB3139-104-P1-N1-G7
gccagatgtgcccggttttgatgcattatcatccaacgtgtagcagtaatttggggggataataaaaggaataatgtgcctgttttattgagttcttgcttgttcaatttgcctttttatgatccataaaaaaaaaaaaaaaaaaaaaaaaaaaaaaaaaaaaaaaaaaaaaaaaaaaaaaaaaaaaaaaaaaaaaaaaaaaaaaaaaaaaaaaaaaaaaaaatggggcggcccccccttattgagctcgtcaccccggaatttaattccggcccggtccctgcaggcgtcccagttttccttatagggagtcgttttaaaccttggcgtaataatggccatagttgtttcctgtgtaaaattgttttcc

SEQ ID NO: 46695 - DNA, 192 bp, Glycine max
  Clone ID: LIB3139-104-P1-N1-H10
gttggttttgtttgaagatgtgagggcaatcatattttgtgtttccctgagtgactacgaccagatgtggcctactagtactgggcagattggtaacaaactgatggggagcaaagatctttttgagagtctggtgaagcatccttgtgtcaaagataccccctctgtgcttctcctaaataaatatgatgt

SEQ ID NO: 46696 - DNA, 389 bp, Glycine max
  unsure at all n locations
  Clone ID: LIB3139-104-P1-N1-H11
cacaccttaagaaaaaaaaaacaccaaaaaacacactgtgatagaattcctaaaaaatggtttcagaaaaacagggttagcaaaaagcaccttgcatcactacgcttccaagtattctaggagttatcaaaaaacaaaagggcttgaaggtagcctagttactagcaaaatagatcatgaattcctttcaagaatttgactcatcaaacacggacagtaacagtaccaaagccatcatcaacttcacatcaggtaacagcaccaatttcccaccagcgccaccaccatcatcatcttcaccgccatgttcctcttcttcttctggcaccaccaccctgagccgctacgagaaccaaaagcgccgcgactggaacacgttncggcagtac

SEQ ID NO: 46697 - DNA, 414 bp, Glycine max
  Clone ID: LIB3139-104-P1-N1-H2
gtgaggagttcatttcattactttatgcagacagctagattgagagtcatgttgattatcacattatcagagctaatgtctgatgtgcaagtgactcagatgagatctgatggaagcttagaagaaagtggtgaagcacggagacttaggaagtctttagatgaaatgaaggatgaaactaaaaatgcttacttgttgaaggagtgtggattacctgagaatgctcttgtgatcgtacccgaaaaaatgacagagaatagatggtcctggtctgaggtgaaatatctctctgacagccttcttttggccaatagtgcatgctccaagctgccgttctatgctagaaactgcatgatgacaattatgcatagaacagttttctaatagacttgctattagagcatcagtcgtttt

SEQ ID NO: 46698 - DNA, 414 bp, Glycine max
  Clone ID: LIB3139-104-P1-N1-H3
ctcgagccctccagctatgtggcttccaccagaggcacttcttgttccctttgtgaaccgaactgccaaggctgttgcttgggcaagtctgaaacatctccgggtgccaaacccattgccgtgtagcgataactgtggtgtgagcatcaattggcatttgtacacagactacactaaaggatggagtgcaagggtgacactttttaactggggtgacactaattttgcagactggtttgccgcagtacaaatggacaaagcagcttcgggttttgagaaaatgtattcattcaatgcaactcttctagatggtgtaaacaatacaataatcatgcaaggtttgccaggattgaactaccttgtagcagaagcagatggagctgaccctttgagagatcctagggtgcctggtaa

SEQ ID NO: 46699 - DNA, 333 bp, Glycine max
  Clone ID: LIB3139-104-P1-N1-H6
aacatttacaacgacagcttctgaaggtaattgacttacaggatagagacaattcacaaaaggattcgcacagcacttgggaaaggtaagaaaattgttttttttactagagtggatccttttccagtagctttattggctgttctttttggcgttatagaatgaaattctgagttctaacgccactaaccctatgctgacgcgacttcttgagaactgtaagagtctcaaatatctggttgatgagtgtccttttgcatttgcgaactagtatgtaatattttattcacttaaataaagcgcattactatgtgcaatgagtgtgtttaaata

SEQ ID NO: 46700 - DNA, 415 bp, Glycine max
  Clone ID: LIB3139-104-P1-N1-H7
tgttctatggccagccagaacctccagcaccttgcacatgcccccttagacaagcttgggggagccttgatgctctcatagggaggctcagggctgcttatgaggaaaatggtgggtccccagagactaacccttttgcaagtggctccatcagggtgtatctcaaagagattagggagtgccaagccaaggcaagaggtatcccttacaagaagaaaaagaaggcctcaaatccaagcaagggaaacgatgaatcatcctccaccatgcacttctcttgaacaacatcatcagtatcgatctctttggacctttcaagtcatggataatgtagcatacaatcaaattggagatcctttttacaaggcacagtctattggaggttcggtttctatttggattgataatttgttgg

SEQ ID NO: 46701 - DNA, 409 bp, Glycine max
  Clone ID: LIB3139-104-P1-N1-H8
ctcgagccgaatcggctcgagctttaagaaaaccaaagttgatagagtgctgatgtgctggtgggccttcacaggtctcacacacattattcttgagggttattttgttttctctcctgagtttttcaaggataaaactggcttctacctggctgaagtttggaaggaatatagcaaaggggattcaaggtatgcaggaagggatgcaggggtagttactgttgaaggaataacagcggttttggagggtccagctagccttctagcagtatacgctatagctactgggaagtcatatagctacatacttcagtttgccatttctttgggccagctatacggaactgctgtttattatataacagcaatcttggaaggtgataatttttctacaaactcgttttactat

SEQ ID NO: 46702 - DNA, 387 bp, Glycine max
  Clone ID: LIB3139-105-P1-N1-A10
gcgccatcgtaaccgtctctttcttcacttgcagaatggagtcaaatcaggcagcttcttccatggaagttgagactgtcccatctgaagccaaacttttgccaccaaagccaaagtttgagcctttgaagcctcatgagatgtctgatggtcaggtacagttccgcaaggtgaatgttccacctcatcgttatacccctctcaagaaagcttggatggatatctatagtcccatatatgaacagatgaaaattgatgtccgtatgaatttgaaggctcgtagagtggagctgaagacaaggcctgatacacctgatattagtaacctgcaaaaatgtgctgattttgtccatgctttcatgttgggttttgatgtcatagatgcca

SEQ ID NO: 46703 - DNA, 388 bp, Glycine max
  Clone ID: LIB3139-105-P1-N1-A11
gatcgagataactagaaacagtgtgatgaaaatgaaggtccttgttttcttcgttgctacaattttggtagcatggcaatgccatgcgtacgatatgttccctctccgaatgaacactggctatggtgcccgtactccggaggtgaaatgcgcaagttggaggcttgctgtggaagcacacaacatctttggctttgagaccattcctgaagagtgcgttgaagcaacaaaggaatacatccatggcgaacaatatagatcagactccaaaacagttaaccaacaagcttacttttatgccagagacctcgaagtccatcccaaggacacatttgtgttcagtatagatggcaccgtactctctaatattccatactacaaaaaacat

SEQ ID NO: 46704 - DNA, 358 bp, Glycine max
  Clone ID: LIB3139-105-P1-N1-A12
gttgaatgtggaatcccttctggatttccgctcacagttatttgcaatagcatttttaatgagatgctcattagatatagctatgaaaaattactgcgccaggctaaagctccaagtatgtttttacaatccttcaaaaattttgtttctttgtgtgtgtatggtgatgataacttaattagtgttcatgaatatgtcaagccttactttagtggttctaaattgaaaagctttctagctggtcataatatcaccattactgatggtattgacaaaactagtgcaactttgcaatttagaaagttagcagattgcgattttctcaagagaaactttaagcagatgtctaatggtttgg

SEQ ID NO: 46705 - DNA, 403 bp, Glycine max
  unsure at all n locations
  Clone ID: LIB3139-105-P1-N1-A2
ggaaaatgagaggaattagttggcaatcttcacagcacttgctttttcccagaagctgtctggtctcccaccagaaactgtgttccaaccacttcttaaagataaccttgtggccaaagggctagttctgtcatttatgactgacttctttaaggagtatctgattgacaacagtcttgatgatcttatttcaattctaaaacggggtaaagtagaggagaatcttttggacattttcccccctacaaaaagatctaatgaagccttctctgagcatttcaccaacgaaggactggtggccttggtggagtataatgaaaagaaaaattgtgcggtgaaacttaaggaaatgaagtcttctttaacagcacagntaacagacgaggctgatacatctgaagtc

SEQ ID NO: 46706 - DNA, 409 bp, Glycine max
  Clone ID: LIB3139-105-P1-N1-A4
ctgaacaagatgttctgcaaaactgtataaattgtggtgtttgtatgggcaagtacttctgtggaacatgcaagctttttgatgatgatatatctaagcagcagtaccattgcagtggctgtggaatttgcagaactggaggaagcgaaaatttcttccattgctacaagtgtggttgtagctacaaaattcttttgaataacagtcacttttgtgttgaaggagcatttgcatcattattgtcctgtattgattttatgttttttttaaattaagtatgtattttatttataattctatgattcttatgatttttatgtgtttatctttttttattttttatttaatcataatttatttttctattcttttatttattctatttttttaatttgtttttatttttttt

SEQ ID NO: 46707 - DNA, 278 bp, Glycine max
  Clone ID: LIB3139-105-P1-N1-A8
gatggttaggactctgtaggctgataaagacaacactcataccgttggaaagaaggatgctgctggccatgttgcttaatttagttcttgcttcctttgtcttcttgagttttatcagagacgggagtgcagggatcactagctctttcattcggtcagagtggccggcagttgacatcccccttgatcatgaagcatttgcagttccaaagggttataatgcacctcaacaagtgcacatcacgcaaggtgactatgatggaaaagcagtaatcatc

SEQ ID NO: 46708 - DNA, 397 bp, Glycine max
  Clone ID: LIB3139-105-P1-N1-A9
ctttctctctctaaaacacacggcaagcagcagcagtaacaacagcaacagtgcatttgtttcactgagattaaagacgatgctgcttctgcactgagaaaaccctagacacttaatagtggatgcgaattcagaaaccccaagtggaaagttcgagccttttcgttccttctcagttcgttgatcagttcccagattctgttactgttcaatttcgcaattttcaactctcggtgattgcttgaagaccgtgatatcgaaaaagatggtgcctccggggccacccactcccattggtggtgcccagtctgtttcgccttttcttttaagatcgaattcgggaatgctaggagctcaaggaggtcccatgccaccacagtcgtctttcccttcactc

SEQ ID NO: 46709 - DNA, 404 bp, Glycine max
  unsure at all n locations
  Clone ID: LIB3139-105-P1-N1-B1
ctcgagccggttcttttagggggcgcgccagttctgatatttacaccatctgctctcaagactgtgaattgtggaatcctgcttgcacaaaagcaatgactatgtcatttaatccaaacccgtgttctgatgcatggagtttggaatttctgaagcgtactggatttcattgcgatatcatttgtgtcactggatggactgccaccccaatgcaggatgttcaggttacaattgattggtttatttcctctcacgaatgtgttcccaggacctattgtgttttaaatccacaaaatccttttgtgttaaataggtggatgggaaaattgactttcccccagggcacttcccgaagtgttaagagaatgcctctntctatagggggaggagctggtgcaaagaat

SEQ ID NO: 46710 - DNA, 353 bp, Glycine max
  Clone ID: LIB3139-105-P1-N1-B10
gtcaagagggagttgctcacattggtgaattgaaatctggtgtctatgttccactgcctacaaaaactaatttgatggaaactcccaaggaatggcaactggatctaccttgtgacaaaattcctagtgtcttgactacaactgatgagagattggtaggcacagaacatgagggatatgatccttttcttggtggaattcaaaaatatgccactcccatgatgcccctagatgaagaaattctttctaaggttgcacaagatatggttgaggaatggtttgattgtgttgatgaggaggattcctttgaggaagtttctttaagtgcagcacttaatggtgttgagggtttg

SEQ ID NO: 46711 - DNA, 394 bp, Glycine max
  Clone ID: LIB3139-105-P1-N1-B11
ggcaccatttttaacgttaaccctatccaaagtttctttgttccttgcgttgctcttctttgtttcactttcttcttcctatgcaacttctcgcctcacccatgaccgtgtcaataacccaccaaaatcacgagcagaaaagctcataagaagccttaacctatctccaaaggacccagtaaacattgttaaaggtgatgaccttgctaatggttttgtcccagggaatatcgtggagaagaagttctcgtttcttggtgattctggaccttctattgaagaccttggtcatcatgcaagttactattcacttcctaattccaaagctgcaaggatgttctactttttctttgaatcacggagcaacaaggatgatcccagtggcatatggttg

SEQ ID NO: 46712 - DNA, 368 bp, Glycine max
  Clone ID: LIB3139-105-P1-N1-B12
ctccttcccctttgtttctcaacatcattccccaatttccccttctgtattgtttttcttcatttctctttttcaatccccgatttcccccttcttcgttttgtgtcttcataattcagatcctctcttcaatctagggttcctggcttaacgaaatcaaatgtttaaggaagaatttctatgacgattcgcaaccccatgcgacgaatccgtctcctccactccttttccgtcgtcttcctctactggttctacgtcttctcatgaactaaccccctctcaatcccctaatttctccaacatttccccctttttctaattaatcagatctgcaaaaccctaattttcctacccctaacgaaaccccc

SEQ ID NO: 46713 - DNA, 403 bp, Glycine max
  Clone ID: LIB3139-105-P1-N1-B2
ccccgatttcgatgagacctttaggcagctgaagatggaggccctggctcgcaccgaggatttgaagcggtcgaattcaaatcctgttgccgggaatgcgaagaagcaggtgcaggggaatgataaatctggatttgagggagggaataagaagaagaagagtggtggtggtgcggatggcgacgatggcaagcggaagttggagaatggacactccaatggaaattttcttgttgctaaagatactaacctgagtagggatgtgaatggtagacataatggaagtcccaatgttggggcttttgatgtacataagcttcagaagcttaggaccaaaggtgggaagaagactgatactgttgttgccaaggcctccaaggcagagccaaacaaaaaagtcacg

SEQ ID NO: 46714 - DNA, 193 bp, Glycine max
  Clone ID: LIB3139-105-P1-N1-B4
ggagcaggtaaagcttttccaaacaagattgtttttgatgataagcttgtgttggctaacacacaagaattctttgatggaaattttccagtggattcttggttaccaatttttgtgaattgtctttatcctgtaagtcaattacctccagaagctgtcgttgtaaatgttacatgtggtagtggacgtggtg

SEQ ID NO: 46715 - DNA, 395 bp, Glycine max
  Clone ID: LIB3139-105-P1-N1-B5
aaacgtcttgcaaagatatggagcaaaatgaaagggcttaaaatacctaagaagggtgaaatgagcgccttatcccgaaatatgaatgctcaacacatgagcaaagtcctccctcctcagatgctaaagcaaattggaggcatgggtgggttacaaagcttgatgaagcagatggggtctgctaaagatatgatgggaatgtttggcggtggtggtgattagtagattggctgtggcatatgagctgaggattgtttctgatctgtactacaaactctaatacttcacaagaactcatcgttgtgaaattatgctgttcacatggaattcggatgtattgttttgtcaatcaacctgcaacatctcaatggtggaaatagttcctttcaatttta

SEQ ID NO: 46716 - DNA, 333 bp, Glycine max
  Clone ID: LIB3139-105-P1-N1-B6
agagggagttgctcacatgggtgaatagaaatctggtgtctatgttccactgcctacaaaaactaatttggtggaaactcccaaggaatggcaactggatctacctggtgacaaaattcctagtgtcttgactacaactgatgagagattggtaggcacagaacatgagggatatgatccttttcttggtggaattcaaaaatatgccactcccatgatgcccctagatgaagaaattctttctaaagttgcacaagatatggttgaggaatggtttgattgtgttgatgaggaggattcctttgaggaagttctttaagtgcagcacttaat

SEQ ID NO: 46717 - DNA, 321 bp, Glycine max
  Clone ID: LIB3139-105-P1-N1-B8
ccgacagtgattgggcaggttcaacagatgacatgaagagtacctctggctatgctttctcactaggatcgggaatgttctcttgggcgtcgaagaagcaagctacagtagcacaatcaacagcagaagcagagtacgtggcagttgctgaagcaacgagtcaagctatatggcttcgtaggatacttgaagacatgggagaaaaacaagataagcctactaaaatcaactgcgacaacaaatcagcaattgcaatggcgaagaatccagtttatcacaacagaacaaaacacatagccatcaagtatcactttatcagag

SEQ ID NO: 46718 - DNA, 395 bp, Glycine max
  unsure at all n locations
  Clone ID: LIB3139-105-P1-N1-B9
aaaaaaaaataaaatccgcgattcgctcttctcttggaaaagtgaaaaccagaagtacgaacgaaagagaagagcgatttagaagtgagagaagatggggttgtcgttcacgaagctgttcagcaggttgtttgcgaagaaggaaatgaggattctgatggtaggtctcgatgctgctggtaagacaaccatcttgtacaagctcaagcttggagaaatcgtcaccactatccccaccatcggatttaatgttgagactgtggagtacaagaacatcagcttcactgtgtgggatgttggtggtcaggacaagatccgtccactgtggaggcattatttccagaacactcanggtctcaattttggggtgatagcaatgatagagatcgagtggt

SEQ ID NO: 46719 - DNA, 399 bp, Glycine max
  Clone ID: LIB3139-105-P1-N1-C1
ctcgtaaatgtgttacgagaattgtatttgcacagtccagaggaagctcgccaattgagaaggaaagctctctctcgtattgaatggctgcaaaaagctgatgtgcctaccatagcacagattgaagagttccattcgatgcagaggatgatgaatgctcctgattcaaatgataatattgatctactgttgagcattgatttgttgggtttacaaggagcaggtaaagcttttccaaacaagattgtttttgatgataagcttgtgttggctaacacacaagaattctttgatggaaattttccagtggattcttggttaccaatttttgtgaattgtctttatcctgtaagtcaattaccttcagaagctgtcgttgtaaatgttacatgtggtagt

SEQ ID NO: 46720 - DNA, 377 bp, Glycine max
  Clone ID: LIB3139-105-P1-N1-C10
tgtttcccaacctccattgcctccgcttctacctcgctaccatgatcattcctgagaagaaccgcaaggagatctgcaaatacctcttccaagagggagtttgctttgcgaagaaggacttcaatttggcgaagcaccctgagattgacgtgccgaatctgcaggtgattaagctgatgcagagtttcaagtctcgcgagtatgtgagggagacttttgcttggatgcactattactggttcctcaccaacgatggaatcgagtttctcagaacttaccttaaccttccttccgaaattgtccctgctactttgaagaaacaggccaagccacctggcaggccctttggcggcccatccggtgatcgccctaggggt

SEQ ID NO: 46721 - DNA, 390 bp, Glycine max
  Clone ID: LIB3139-105-P1-N1-C11
ctcgagccgaatcggctcgagcgctccgcaccagtttcaccgcacgaatatcttgttgtttggagcgatccgagaaaaactctgtaaacatgttggtttaccaggacctccttacaggtgatgagcttctctctgactccttccgttacaaggaaattgagaatggaatgctgtgggaagttgaggggaagtgggttgttaaaggagcagttgatgtagacattggtgcaaacccttctgctgagggtggaggagaagatgagggagttgatgatgcagctgttaaggttgttgacattgttgacacattcagactttaagagcaacccgcattcgataagaagcagtttgttaccttcatgaagaggtttatcaagaatttgactccca

SEQ ID NO: 46722 - DNA, 350 bp, Glycine max
  Clone ID: LIB3139-105-P1-N1-C12
ctcgagccgattcggctcgaggaaaactttgccaaataatttttctgcagaattgctctcttgcaaattggatactgttactggccaatattatcctgagtgggctccaattaattgtcgagttcatcgacaaccaattcacatcactgaaggaaattatgtcagaaagcaagatgtcagcattgaatatgatgcatgtacaattccaaatgattgtggttcattggttgttgccaaggttggaaatcacaaacaaattgttggtttccatgttgctggaagcaaaggaagactgggatatgcttcattgataccatatgttgagccagttgtgcaagctcaaagtgctg

SEQ ID NO: 46723 - DNA, 405 bp, Glycine max
  Clone ID: LIB3139-105-P1-N1-C2
aaaacatgttgctcatgaaagcctcaaggatcaaattcctgctgttgacaagttgtattctactaaggttaataagtttgcaaaaattatgaaccttagacaaagtgttgttggtgatcttaaacttcttactgatgggaagttgtatgagggtaagcatattcctgtatctaatattagtgcaggggaaaatcatgtagttcaaatacccttaatggcacaggaggaaattctgtcttctagtgcaagtgacttcagaactgcaatggtgagtaaaaatagcaagcctcaagctactgcaatgcatgtgggagctatagaaattatcattgatagtttcgcaagtcctgactgcaacataattggtgcaatgcttttggttgatacttatcataccaatcctga

SEQ ID NO: 46724 - DNA, 182 bp, Glycine max
  Clone ID: LIB3139-105-P1-N1-C3
ctcatcaaaatacttccatcctttgaggagatatgcttctatgtcaagctagtacaacagagaagcatatctcatcaaaatactaacatcctttgaggaaatatgctaatttggtgaactagctcgacatactggcgcaacttggcaagagacaggaaaaatttgtgtagcaatatccacaa

SEQ ID NO: 46725 - DNA, 323 bp, Glycine max
  Clone ID: LIB3139-105-P1-N1-C5
ccccttccttaacctcggatttgggttcggggttaagttggggaaaccttccttggggccaaccgaacaaagtcaaaacatgtggggtccaacctaaatgacaaaaatgaatggcctaactttaggaatggtatctttggctaccctaatattctaattccaccaatctaggggttaaccttaagtataaacttatattccttttattacgtttgtatccaaaagctgttcgagctactatcagagaaacaccaccatctacagcaagaagagggcgctccccatcacccatctttacaaccttaaaagatcttgaagctttt

SEQ ID NO: 46726 - DNA, 284 bp, Glycine max
  Clone ID: LIB3139-105-P1-N1-C6
ctcgagccttattggctcgagcgctacgtacccataagacttttctgcagaatcgctgtcttgcacaaagcatactgctacttgccgatattaaaccgcccccgcggcaactttaagggaaacatatcgacaaccaactcacatgactgaaagaaaagatgtcataaagcccgatgggaatgtcgaatctgatgcacgtacaatggctaatgattgtgacccatctactaatggcaacgctaggattgacagacagattaagagttgtcaagagcatgggatca

SEQ ID NO: 46727 - DNA, 400 bp, Glycine max
  unsure at all n locations
  Clone ID: LIB3139-105-P1-N1-C7
ctacaaaagcacaatttgttagtggaaaaaccttcaaatatgatataattggtgctggtgcacattcttcaggagattttcctgaaaaggaagatcaagaaaaacccaaaaagattgataccagattgagacaaagaatagatcctcaatacaatgaggttcaggctcagatggaaacaaatttgtttaaattgtctcttgatgatgttgaaactcctaaaggttctatgttggatcttaaaatttctcaatctaaaattgcacttcccaagaacacagttggaggaaccattctgcgtagtgatctattggcaaattttttgacagagggcaattttagagcatgtgttgattngcaacgcactcatcggattaaaggaatgattaaaatggtgccaca

SEQ ID NO: 46728 - DNA, 401 bp, Glycine max
  unsure at all n locations
  Clone ID: LIB3139-105-P1-N1-C8
tcaaagcaacacaagaacactctcttgaacattcatggatccagtgagcgtgtggggtaacacgcccttggcgacggtggatcccgagatccatgacctcatcgagaaggagaagcaccgccaatgccgcggcatcgagctcatcgcctccgagaacttcacctccttcgcagtcatcgaggccctcggcagcgccctcaccaacaaatactccgagggcatgcccggcaaccgctactacggcggcaacgaattcatcgaccagatcgaaaacctctgccgctcacgcgccctccaggccttccacctcgacgcccaatcctggggcgtcaatgtgcagccctactccggctcccctgccaacttcgccgcctacaccgncgtcctcaacccccacgacc

SEQ ID NO: 46729 - DNA, 406 bp, Glycine max
  Clone ID: LIB3139-105-P1-N1-D1
cgacggtgacgattggtgggtggcgccgtacgcctcatcccatccatcgccatcggcaccttccttaaacgacatcgcgtccatcaccccttttctcttcctcacagtcacagcagtggtagcttcccaaaaaagagtgccaatggcatcttcttcagactcatgggtgaaggaatataatgaagcactgaaacttgctgatgatatcagtggcatgatttctgagcagagttcatttcctgcatctggaccagaaacccagcatcattcatctgctataaggagaaagattacaatattggggaccaggcttgatagcttgcagtcccttttgtcaaagcttcccggcaagcagcccatatctgagaaggagatgaatcggcgcaaggacatgctttcaaatttg

SEQ ID NO: 46730 - DNA, 343 bp, Glycine max
  Clone ID: LIB3139-105-P1-N1-D10
cgaacacgcctccgctcggtcacgcaaaccatgcttctggttttctttccctcggagcctccaatcgctgccagcacagatggctgcttgcgaagaatcataaaccactcaaacgggcgtcaatgcgttaagagcagacttcttactacatattggatcaggagccagaccaagtgcacatattgtaccaagagtgtcacatgctaagtcgccctgaagaagatggtaccatgacaatggggactactactctggaaattaataaacagatactctatatggactacacaagctatagggtggacattctgagtgctgataccgcacacttcattcaaggatt

SEQ ID NO: 46731 - DNA, 396 bp, Glycine max
  Clone ID: LIB3139-105-P1-N1-D11
cttcgatctctgtattgtcttccaaatttgactgttcttgacttatcatacactttcttggtgaacatgcagcctgtctttgattcttgtttgcaactaaaggttttaaagctgcaagcatgcaaatatctcactgaaacatcacttgaacctctttacaaaggaggtgctttgccagcacttcaggagttggacttgtcttatggaactctctgtcaatcagccatagatgagcttcttgcttgctgcacaaacctaactcatgtgagtttgaatggctgtgtgaatatgcatgatttgaattggggaagcagtcgtgggcaaagtgacaatttccctgctgtaaacaccccatcctgggcaagttctaatgagattatctctgaaataagtgag

SEQ ID NO: 46732 - DNA, 359 bp, Glycine max
  Clone ID: LIB3139-105-P1-N1-D12
gtccagacttcagacacagacttgtatatatcatggctttctagtttctatacgaaaaattatactgtaatgttgaaaatagctacatgtatcatacttgcatggttagtgtgaaattttcttcagagtaatggagttcgattggttctttaattttgcctttgttttcacttgacatgataattgataacataggcatcatataactgttagcattatgcttctaagtttcttggaaaacatagaaagtaaggaggttaggtcttcattaagaactggctgaccgagataacagctagttcatcagcatattacttgatgccatgctagtgtattcagtaaaagactttggacttttc

SEQ ID NO: 46733 - DNA, 401 bp, Glycine max
  Clone ID: LIB3139-105-P1-N1-D2
attaggtggcatctgtataccttgatgatctacattctcccatcttttctcactgctgaaattaaatataagcggaatcagagtaatattcagatttccggcttattttacgacggcagatacaaattctggactaaacacgagaaaaatcttgctttgacagaagaggaaaagatggaagtgattagaaatagaggcattcctgctgatgttcttgcaaagcgagctcatgaatttgaaaaacatgttgctcatgaaagcctcaaggatcaaattcctgctgttgacaagttgtattctactaaggttaataagtttgcaaaaattatgaaccttagacaaagtgttggtggtgatcttaaacttcttactgatgggaagttgtatgagggtaagcatat

SEQ ID NO: 46734 - DNA, 407 bp, Glycine max
  Clone ID: LIB3139-105-P1-N1-D4
catgagcatgtattatcacatcaatgcgtatctgtcatctactactggtatgcaatatgcatgttatgttcaacttcaagtaccgctttccattattcctgattccatttccacccttgccaaactgcgggcacaagtcccaaggcaacccccatggtatatatagatttaacgccaggggtgaacatggaattggatcatgcagctgcttccagtttctctctctaaaactcgcaaaagcgaattactgaaaccctagcctctgtttctgtgtttatttacttcgattctacgcatcgaattcaattctctgtgatctgaacccgtgaaatcaatgtgcctctttcggaatcgcagagcgagcaacggtgacggccatcatcatcgatgaagcgatcgggtcggtg

SEQ ID NO: 46735 - DNA, 428 bp, Glycine max
  Clone ID: LIB3139-105-P1-N1-D6
acgcgtacgtcgcttgtattcgggggtgaacaaaactttaaccccggtgcggtatatacccagaggggactaattctatacgcaagaggatactgaagccgcagggaaccaaaccattattatggcgttaccggaataatcgacccatcatcaattagatcgaaatgaaggttgaggacgggcttccgacaacgaccgcggttacaaagaaggaaaacttggattcgagtctgtttggaaaaggcaggtacaaattctgggcgttagcggccatcttgctaatggcgtactggtccatgttcaccggtaccgtctagctccgctggtccggcactctcaattacctttgcaacgacatcgacactcccatccacgacgacctatatgttcttgaaatggatgagagggagaaggttgtgaggcacatg

SEQ ID NO: 46736 - DNA, 394 bp, Glycine max
  Clone ID: LIB3139-105-P1-N1-D8
cacatatgatgtgcacttttggtgggatatggaatggtggggggggtgatggacagaaaaacctttttgttgcctcatttttctttgaccgggcagctgatgctggttttgccaatccaaatttaccctttgtgaaagttcgtcccgtctattttgaggctgcaaactaatcaagcttgtaaaacaaaacttgaagatgccaaatccacttatcaacgtgttgatgaatggaaccttccatatttatgcatggatctcttataccaatatacatttcttgctgttggatttggcctaaatccattgcaacagattacattattgaccaaagttaaatatcacgatgcttttgttgaatctgaatggtccctaagcagctccatataagctttat

SEQ ID NO: 46737 - DNA, 397 bp, Glycine max
  Clone ID: LIB3139-105-P1-N1-D9
cagggagacaggtaccgtgaattagcccatagagtggatgaggctcttggcttcatgaatgttgctgggctcacagccgaccatcccatcatgagtacaacagacttttggacctcccatgagtgtttgcttctcccttatgagcaagcacttactagggaggattctactactgggcttcattatgattgctcagctcacatgctatgggttggggaacgtacccgccaacttgatggtgctcatgttgaattcttgagaggagttgctaatccacttggcatcaaagtgagtgataagatggttcccgatgaacttgttaagctgatagatattctgaaccctaaaaacaagcctggaagaattacagtcattggtagaatgggagctgagaata

SEQ ID NO: 46738 - DNA, 406 bp, Glycine max
  Clone ID: LIB3139-105-P1-N1-E1
cggctcgagcagcaacaacgtgatcggactcctgaacttcctgaccttcctcctctccatcccgatcctggtggccggagtgtggctgagcaagcagggcgccaccgagtgcgagcggtggctggagaagccggtgatcgcactcggcgtcttcctcatgctcgtctcactcgccggcctcgtcggcgcgtgctgtcgcgtgtcgtggctcctctggctctacctcctcgtcatgttcgtcctcatcgttcttctcttcgccttcaccatcttcgccttcgttgtcaccaacaagggcgctggcgaagttgtgtctaatagagggtataaggagtataggcttggggattactcgaactggttgtagaagagggttaacaacactaagacgtggaacaggatcagg

SEQ ID NO: 46739 - DNA, 251 bp, Glycine max
  Clone ID: LIB3139-105-P1-N1-E10
aaaagactggaaggaatgcaattgtgagcctgagtcctaccaagacacccaattagatacaattgcttgatggttttgatgaagaaattgtcttgggtgaattttctttagggagacctccatgaaagggttgcggggtggggagtggggttcagtagtggagagacgcaggcgctgtatcatatcttgtgtcaactgtagccataattcagaataatgtattatgaaataagatttaacttttgtacgcc

SEQ ID NO: 46740 - DNA, 309 bp, Glycine max
  Clone ID: LIB3139-105-P1-N1-E11
cgatgcagaggatgatgaatgctcctgattcaaatgataatattgatctactgttgagcattgatttgttgggtttacaaggagcaggcaaagcttttccaaacaagattgtttttgatgataagcttgtgttggctaacacacaagaattctttgatggaaattttccagtggattcttggttaccaatttttgtgaattgtctttatcctgtaagtcaattaccttcagaagctgtcgttgtaaatgtcacatgtggtagtggacgttgtggtttacccaccactgcttggattagttctgcagtta

SEQ ID NO: 46741 - DNA, 361 bp, Glycine max
  Clone ID: LIB3139-105-P1-N1-E12
gtgctgttgttttcttgacatcaagttacactccaactccattgttggaatctggtttgcaaaaagacagagggttaattgtggagtattttggaaggatgtcttacgttgctcataacgttaatcagccccaagagaaagatttgttagagggaaatttttcctttgatattaaatctcgctctagattggaaaaagtttcctctacaaaagcacaatttgttagtggaaaaaccttcaaatatgatataattggtgctggttcacattcttcaggagattttcctgaaaaggaagatcaagaaaaacccaaaaagattgataccagattgagacaataaatagatccttaattcaatga

SEQ ID NO: 46742 - DNA, 406 bp, Glycine max
  Clone ID: LIB3139-105-P1-N1-E2
tctattctttgaaaccaaagttcaaactctgtcttccctgggttctatttcgaaatcaacgacgatgagttccacagaggcagcagccacagagaagaaaggtggaagagggaaaccgaagacttcaaagtccgtttcccgttcctccaaagctggccttcagtttcccgtcggccgtgtcgctcgctacctcaaggccggtcgctacgcccagcgcgttggctccggttcccctgtttatctctccgcggttctcgaatacctcgctgccgaggttcgtcattttcttcctttaattttcgatttgtcttttttgtgtattgtgaccttaatgtgttttggggctttaggttttggagcttgcggggaacgctgcgagggacaacatgaagacgaggatcgttcc

SEQ ID NO: 46743 - DNA, 399 bp, Glycine max
  Clone ID: LIB3139-105-P1-N1-E3
ctccgccgcaacaccgccgccaccctgaaacccaaccgccactcttgcatttcactctgctcactcaaaccaaccctcaacgcttcaatttcctccttcccaaatttctcactaaaaaaaccaagcctagttgtcaatcaaaaaccctcctctctaaccgtcagagcctccgcagcctccatcactccggcgccggcgccttcatcggcgccggtacagccatggcaaggcgctttcataaagccgctaatagcctccatcgcgacgggagtaatcctctggttctcacccgttcccgccggcgtgaaccgcaacgcgtggcaactgctcgcgattttcttaggcacaatcgtcggcataataacacaacccttacctgttggagcggtagcaatatta

SEQ ID NO: 46744 - DNA, 400 bp, Glycine max
  Clone ID: LIB3139-105-P1-N1-E4
atgcgtctctgcaacaacatgttcaccaccacctccttgttcttcacatcatcctcatcatcttcttcaatcagttgactcttcgttcctccctctattctttcggatggagcccatggacatcgttgggaaggccaaggaagacgcttctcttcctaaagcgacaatgacgaaaattattaaagagatgttgcccccggacgtgcgtgtcgccagagatgcacaggatttattgatcgagtgttgtgtcgagtttataaaccttgtctcgtcagagtccaatgaagtctgtaacaaagaagaaagaaggacgattgcaccggagcacgtgttaaaggctttaggggttcttggatttggcgagtacattgaggaagtttatgcagcatatgaacaacac

SEQ ID NO: 46745 - DNA, 408 bp, Glycine max
  Clone ID: LIB3139-105-P1-N1-E5
gggttttgtagatggcaagtgggtttggggaatcaacagggagatcacccccaagcccttcctacttcaacaacaataataacaatgatgctgccaattttgaatgcaacatttgctttgaattagcgcaagacccgataattactttgtgtggtcatcttttctgctggccctgtctttacaaatggcttcactttcactcacaatcacgagaatgcccggtgtgcaaggccctcgtggaggaggagaagctggttcccttgtatgggagaggaaagtcgtcgactgatccaagatcaaaatctattccgggcgataacatcccgcatcgtccggctggtcagaggcctgaaactgctcctccacctgaaacaaatcattttcatcaacatgggtttggatttatgg

SEQ ID NO: 46746 - DNA, 410 bp, Glycine max
  Clone ID: LIB3139-105-P1-N1-E6
tcggttggggttaaaatttgttttaatgggggctggttaacattcttaaggagattttcctgaaagggaagatcaagaaaaacccaaaaagattgataccagattgagacaaagaatagatcctcaatacaatgaggttcaggctcagatggaaacaaatttgtttaaattgtctcttgatgatgttgaaactcctaaaggttctatgttggatcttaaaatttctcaatctaaaattgcacttcccaagaacacagttggaggaaccattctgcgtagtgatctattggcaaattttttgacagagggcaattttagagcaagtgttgatttgcagcgcactcatcgtattaaaggaatgattaaaatggtggccacagttggtattcctgagaatacaggtatagcat

SEQ ID NO: 46747 - DNA, 391 bp, Glycine max
  Clone ID: LIB3139-105-P1-N1-E7
cacccacccatccctcgtttcaaaaaaagggccgttattgttgttaccatccaaaaaatggccggtcttgttgtttcttcccaatgctttctcaaactcttgcttgtagtttcagtctttcatgtttcctttgctgctaggaggttgaatgagctggttcaggaccagtctcagttgctacattaccacaatggtcctcttctatacggcaaaatcgccgtcaacctcatctggtatggtaacttcaaaccatcccaaaaggctatcatcaccgatttcgttacctcactgtcatccccagcgtctcagagcagccaaccctctgttgccacgtggtggaaaaccacggagaagtactaccacctgagtcccaggaaggcttctctcttcc

SEQ ID NO: 46748 - DNA, 86 bp, Glycine max
  Clone ID: LIB3139-105-P1-N1-E8
gtttaactgggttgagggaaattgtgagtgtaaacattttgatacctatctatctggtttgaaattattataggacttgttgtttt

SEQ ID NO: 46749 - DNA, 403 bp, Glycine max
  Clone ID: LIB3139-105-P1-N1-E9
cgaatcacgaggcgacaacatcgacatggagggtctcatcaacggcttcatcaacgttgctctcggagctgatggtggcgatcgggaagaacaacaacacgggagagacgaccgtagtagaagctcctgggctgaagtcgtctcccaggatcaacaagatcaccctcttcctcatcaccaacacaaggaacaatatcgtcctcagtacgaggagccccaatctcaaagttcctacaaaccccagaaggtggatgaaggtgaagatggatggcagactgttggtagaaagccttcaaggcatccacataaggttcaaaaggacaactggaacagctataaacgacctgctgatgagcaagaatactctaatgaggttgaaagtggtgctgatgtggagccctca

SEQ ID NO: 46750 - DNA, 407 bp, Glycine max
  Clone ID: LIB3139-105-P1-N1-F1
gaatctttgaggctgcaagttttggagggacaaatattgatccatcagcttgggaggataagaagtgccctggtgaatctcgtttccccgctcaggtacgagtgataactaggaaaacttgtgaaccactggaggaagattccttcaggccaatccttcaccactatgatggtcccaagttccgtcttgagctgaatgtgcccgaggcgttgtctcttctggatatttttgcagaacaagacaccttcaatgacactttcgaggctttgccggcataaaaggagattaatagcaaataatgcaacaagaatatcactcacagagacaatagataattagaggtttcggttggtttgaaagttatattaagtatggacttaagaagagagtccgaaagacaaaacaaa

SEQ ID NO: 46751 - DNA, 398 bp, Glycine max
  Clone ID: LIB3139-105-P1-N1-F10
caattattgcaccttttggaggcttctttgcaagtggctttaaaagggcttttaaaataaaggactttggtgatagtattccgggacatggtggaattaccgacagaatggattgccagatggttatggccgtgtttgcatacatatatcatcagtcatttgttgtgccgcaaactctctcggttgaaatgattttggaccagatatcgatgaacctaacattcgatgagcaacaagctctatattggaggcttggggaaattttacaacaggggtttgctaggatgtcttagattcatggcgaggtgtatatgttctgtcaccttctattgtattccttcacatacaggggaaaaggaaaagatactatgtacatgggtttggtttctatcttttga

SEQ ID NO: 46752 - DNA, 347 bp, Glycine max
  Clone ID: LIB3139-105-P1-N1-F11
ctcaaagcaacacaagaacactctcttgaacattcatggatccagtgagcgtgtggggtaacacgcccttggcgacggtggatcccgagatccatgacctcatcgagaaggagaagcaccgccaatgccgcggcatcgagctcatcgcctccgagaacttcacctccttcgcagtcatcgaggccctcggcagcgccctcaccaacaaatactccgagggcatgcccggcaaccgctactacggcggcaacgaattcatcgaccagatcgaaaacctctgccgctcacgcgccctccaggccttccacctcgacgcccaatcctggggcgtcaatgtgcagccctac

SEQ ID NO: 46753 - DNA, 219 bp, Glycine max
  Clone ID: LIB3139-105-P1-N1-F12
tggttaccaatttttgtgaattgtctttatcctgtaagtcaattaccttcagaagctgtcgttgtaaatgttacatgtggtagtggacgtggtggtttacccaccactggttggattaggtctgcagttaacaattgctcctttgatattaacaaaaagattctcacacaactttggaaaggggagaaaaatgtgtttcttactcaagatgatcctttt

SEQ ID NO: 46754 - DNA, 408 bp, Glycine max
  Clone ID: LIB3139-105-P1-N1-F2
ttcccgtccccggcgactgagtcgcggtctcttcccaactcggaactcagtccattccgcatttctcttcaaaccaaatttcttctgaagaaggagatttgaattcagaattgagtgagaagaagagaatagaaatgggctccgaattgattttcagaggccacgaggctcagcccgtggacgactcgtactcgccgaagccccacaagccctggttcaccgtgactcgcccgattcactacatgctccgcgagcagcgactcgtcttcgtcctcgtcggcgtcatcatagcaaccctcttcttcacactcgtcccttcctcatcctcttcaagcgttccgtacgagtctctcccgatctcgtacttcgagcgcgagtcaaagattccggcgtaccaccaccgcgtcg

SEQ ID NO: 46755 - DNA, 142 bp, Glycine max
  Clone ID: LIB3139-105-P1-N1-F3
gcacaactctgcgtcgagtctgtcttggatatttcggcatccacgagttcatatccctttcattgtattttcgtatagctctcgatttctcctctttcctgtatgatcgaccggatccgatcaattgtattcattttattat

SEQ ID NO: 46756 - DNA, 396 bp, Glycine max
  Clone ID: LIB3139-105-P1-N1-F4
tttccgaataccattgtgcagattgaaccagacatgaattcaaggtttcagcttttgagtaccactaccaatggtgattttgttcaaggaaaagatctcgcaatggttaaagttaatgtagcatgtgctgctgttggcttgacatcaagttacactccaactccattgttggaatctggtttgcaaaaagacagagggttaattgtagagtattttggaaggatgtcttacgttgctcataacgttaatcagccccaagagaaagatttgttggagggaaatttttcctttgatattaaatctcgctctagattggaaaacgtttcctctacaaaagctcaatttgttagtggaaaaaccttcaaatatgatataattggtgctggttcacattct

SEQ ID NO: 46757 - DNA, 456 bp, Glycine max
  Clone ID: LIB3139-105-P1-N1-F6
cctaaagaattacgacgccttctccccccctccatcagctggtaatgcgtctggagtaaccttcttctttctacattccatccaaaacactcatgggttctcttcatcccatgacgtttcaaacaaaaactgccctttatgtattggaatcggcctcttccatcgcagcctctgctggcaacttctaccaggattttgacgtaacttggggagatggtcgtgccaagatactcaacaacggcgatcttctcactctttcccttgacaaagcctctggctcggggtttcagtccaaaaacgagtatctctttggcaagattgatatgcaactcaagcttgtacccggaaattctgcaggcactgtcaccgtctattatttgtcatcaaaaggatcaaattgggatgagattgactttgaattcttggggaatctgagcggtgacccatacattcttc

SEQ ID NO: 46758 - DNA, 400 bp, Glycine max
  Clone ID: LIB3139-105-P1-N1-F7
ggaagaggaaaaagaggattggagggtcgccacgtttagcaacaaccaaaccctctctactctttcttcttctcttcgctagggttttagcttcttcctcttcacttcgttcttctggcctctacaatgagcaacgacatgacaccttcaacgtcgctgatctcacttccgctctcaacgaggacaatagagcagaccttgtcaatgctctcaagagcaagatacagagtttggctggacagcattctgatattctagagtctctgtcgcccaatgtcaggaagcgtgtggaggttcttagagagatccagggtcaacatgatgaattagaggcaaaattttttgaggagagagcagctcttgaggccaaataccaaaaattgtatcaaccactttacac

SEQ ID NO: 46759 - DNA, 393 bp, Glycine max
  Clone ID: LIB3139-105-P1-N1-F8
gacccgtagagcatgggaaaaggatgttcaggtgatgaatgaaggacctggacacatccgaatgcacaagattcctgaaaacatgcagaaacagttagaatggtgtagtgaagcgcctttttacactcttggtcctttaacaactgatattgcccccggctatgatcacatcacctctgcaattggtgctgccaatattggggcacttggtactgctcttctctgttatgtgactccaaaggaacatcttgggttgccaaaccgggatgacgtgaaggctggagttatagcctacaagatagcggctcatgctgctgatttagccaaaggtcatccatatgctcaagcctgggatgatgcattaagcaaggcaagatttgagttccgatggat

SEQ ID NO: 46760 - DNA, 405 bp, Glycine max
  Clone ID: LIB3139-105-P1-N1-F9
cttggaactttcagcactgctgaagaagctgcaagagcttatgatgctgaagcaaggaggatccggggcaagaaagccaaggtgaatttcccggatgagccttcaggcgctgctgcttcctcaaaacgcctcaagctgaatccagaggctcagccaatgaaggaaaatctgaacaccgtgaagccgaaaatgaaccagatgttcaattttggtcacaatctggagggctactacagcccaatagatcaggtggaacagaaaccactggttaaccagtatgttaaccctgccccgttccctggaaacggagttcaagtctcacctgttactccatctgctgatgttactgcttacttcagctctgagcattcgagcaactcgtttgattattctgaccttggatgg

SEQ ID NO: 46761 - DNA, 322 bp, Glycine max
  Clone ID: LIB3139-105-P1-N1-G1
tcttcatacattttacccgttactctctctctctccatcttcattctcttcttcttcttcactattttctcagttatcgtgaccttatcccaacccttttctgttgcgaaggtgcttctgggctgttgtcagatcaatccacaaccctcaattgttggtgttttggctcttcctgtatcatggatggtattcatgggggtgattctcggatacacataactgatggacagcatcctatacacgtgccatatgtgcaagaacacgagcatcatggactccaccatataagcaatgggaatgggatagatgatgatcataatga

SEQ ID NO: 46762 - DNA, 384 bp, Glycine max
  Clone ID: LIB3139-105-P1-N1-G11
caaagtttcttcctttctctgctctttgccttctctgacacatttggtgccttgtagagcgtgttttggcaggaaggtggtatggcgaaggacgttgaggttgctgagcgtggctccttctctgggaaggactaccaggaccctccaccagcaccactcattgatgctgacgagctcacaaagtggtccttttacagggctctcattgctgaattcattgccactttgctcttcctctacattactgtgctcacagtcatagggtacaagcaccagactgacctcaaggaaaatggtgaaatctgtggtggggttggcattcttggcattgcatgggcctttggtggcatgatcttcatccttgtctactgcactgctgggatc

SEQ ID NO: 46763 - DNA, 405 bp, Glycine max
  Clone ID: LIB3139-105-P1-N1-G2
gtgtttcattccaactgcaaaacaacaactcaattaagaaattcttctccggagccatggcagatctcaagtctacattcttgaacgtctattccgttctcaaatctgaactcctccacgaccccgccttcgagttctccgatgatgctcgccattgggtcgaccggatgctagactacaatgtgcctggaggaaagttgaaccggggactgtcagtcattgacagctacagattgttgaaagaaggacaggcattaaatgatgacgaaattttccttgctagtgctcttggttggtgtattgaatggcttcaggcatattttcttgttcttgatgacattatggataactctcacacacgccgcggccagccatgctggtttagagtgcccaaggttggaatga

SEQ ID NO: 46764 - DNA, 373 bp, Glycine max
  Clone ID: LIB3139-105-P1-N1-G4
ggttgagccaacttttgctgaaaggatagtgatcaaccatagagagtacttcaaaaagggtgaccttgttgtatccagtgctgtcaacataactgaaaccgcagtggtgactgcagatggccagcagatagcctatgactatcttgttattgccactggacacacagaacctatccccaaaaccaggagagaaagacttgaccaatacaaaggagaaaatgcaaagatcaaatctgcaagttcagttttgattgttgggggaggtccaactggtgttgagcttgcagcagagattgctgttgattttcctgataagaaggtcaccatagtgcataaaggaacaaggttgcttgaatacattgggacaaaaagc

SEQ ID NO: 46765 - DNA, 372 bp, Glycine max
  unsure at all n locations
  Clone ID: LIB3139-105-P1-N1-G5
gtcttgttcttatctttcaaagtatggttggggttcccggaaaatcaaaagcgtgcatcaattgtcgcaagcgtcgatcgcagtgtgatatgaaacgaccctcgtgtggccaatgccaaagatctggtattacatgctccggctatcagaaagagttcatcttcctgaacagcactacgcaagaagcccangacggctccttgtcgctcgagaaggagagctactcagcgggaactagaacaaggaacccaacaactgcgggttccgccgcatcgagggcagccgctacccgtacaactncggtcgttctccacgcaactcttgagcgcagtgcctacgaaaataatgtcattgatgaatttgggcatcata

SEQ ID NO: 46766 - DNA, 404 bp, Glycine max
  Clone ID: LIB3139-105-P1-N1-G7
ggagagttgaatgtggaatcccttctggatttccgctcacagttatttgcaatagcattttcaatgagatgctcattagatatagctatgaaaaattactgcgccaggcaaaagctccaagtatgtttctacaatccttcaaaaattttgtttctttgtgtgtgtatggtgatgataacttaattagtgttcatgaatatgttaagccttactttagtggttctaaattgaaaagctttctagctggtcataatatcaccattactgatggtattgacaaaactagtgcaactttgcaatttagaaagttagcagattgtgattttctcaagagaaactttaagcagatgtctaatgttttgtgggtggctcctgaagacaaggcgagtttatggtcacaactt

SEQ ID NO: 46767 - DNA, 332 bp, Glycine max
  Clone ID: LIB3139-105-P1-N1-G9
ggcaaatcaatacttcatggcatttgagtttccttattgacaatcccaaacagtctacagtttttgatattctcttgggaatctctcaagattttgaaattgctggtaatactcttatgccagctttttctgttccacaggctactgccagatcttctgaaaatgcggaatcctctgcatgatctggaattcgtgttttctttcgcttgttcgtttgtttaattcaataaaggaaattaggcatgaccctcttgttgagtatgctctgcctatctgaaaatttccacacctcttttaattgtcgtaatgatgtgtgaagggtgtgttatttt

SEQ ID NO: 46768 - DNA, 360 bp, Glycine max
  unsure at all n locations
  Clone ID: LIB3139-105-P1-N1-H11
ttagatatatctatgaaaaattactgcgccaggctaaagctccaagtatgtttttacaatccttcaaaaattttgtttctttgtgtgtgtatggtgatgataacttaattagtgttcatgaatatgtcaagccttactttagtggttctaaattgaaaagctttctagctggtcataatatcaccattactgatggtattgacaaaactagtgcaactttgcaatttagaaagttagcagattgtgattttctcaagagaaactttaagcagatgtctaatgttttatgggtggctcctgaagacaaggcgagtttatggtcacaacttcattatgtntcgtgcaataatcttggaatgc

SEQ ID NO: 46769 - DNA, 407 bp, Glycine max
  Clone ID: LIB3139-105-P1-N1-H2
cgagagataaagttaaagaaattaaatagcaccaatttcgcccacgaaaccctctctcttgtctcgtcgcttcaaactcctctgcggtttccccttcttgttcttcttcacagaaatggaggtagcagtggccaaagcgttgaaaccgagtttaaggagagagttcatcgttcagcaaatgctctgcgaggatattttcagcctgaacgccaacaccgtcgccgccggcgaagatttctccgtcgacgacctatttgacttctctaacggctctcttcacaacgaacaacaacaagaatacgacgaagggaaacaaagtttatcggcttcagaggaccgcggagaagacgattgcaactccaattccaccggcgtttcctatgattcacttttctccaccgaattag

SEQ ID NO: 46770 - DNA, 398 bp, Glycine max
  Clone ID: LIB3139-105-P1-N1-H3
atttgtgtcactggatggactgccactccaatgcaggatgttcaggttacaattgattggtttatttcctctcaggaatgtgttcccaggacttattgtgttttaaatccacaaaatccttttgtgttgaataggtggatggggaaactgactttcccccagggcacttcccgaagtgttaagagaatgcctctttctatagggggaggagctggtgcaaagaatgctattctcatgaatatgccaaatgctgttctttcaatgtggagatattttgttggagatctcgtctttgaagtttctaagatgacttctccctacattaaatgtacagtctctttcttcatagcatttggaaatttggctgatgacaccatcaattttgaggcttttcccca

SEQ ID NO: 46771 - DNA, 319 bp, Glycine max
  Clone ID: LIB3139-105-P1-N1-H4
atttgcaatatcatttttaatgagatgctcattagatatagctatgaaaaattactgcgccaggctaaagctccaagtatgtttttacaatccttcaaaaattttgtttctttgtgtgtgtatggtgatgataacttaattagtgttcatgaatatgtcaagccttactttagtggttctaaattgaaaagctttctagctagtcataacatcaccattactgatggtattgacaaaactagtgcaactttgcaatttagaaagttagcagattgtgattttctcaagaagaaactttaagcaaatgtctaaaatgttt

SEQ ID NO: 46772 - DNA, 88 bp, Glycine max
  Clone ID: LIB3139-105-P1-N1-H7
cacaaaaaaaaaaaaaacacaaacggtcaaatataaaacagggggccggcccaaaaaaaaaacactccaccaacttttttcaaataaa

SEQ ID NO: 46773 - DNA, 407 bp, Glycine max
  Clone ID: LIB3139-105-P1-N1-H8
cacgtgcgagcggttgcagagtatcgtggccatcgcttcagaggcggcgaaactgagtctgaagaaaaggggcatgcacgttccgccgtggagaaaagtcgaatacgtcaccgcgaaatggctctccccttacacgtgctcgcgcggggtgaaagaggaaacagaagagaaagagcaccttgcgaaagagttggtggtgttatcaacttcgtgtggaagtttccgtgaagatgatgaaaagtcaaagtcaaaactcgtggttcagaatcagaagccaccggagatgaaacccaaaagttctcagtccggtttggcagctgtgttcctagaaaacccaaaattttgattttttttcggttgtttctttttttggctttttggtttttttttatataaaagttaaattt

SEQ ID NO: 46774 - DNA, 393 bp, Glycine max
  Clone ID: LIB3139-105-P1-N1-H9
atttgatgtcttctttgctatcttttgtgttgttttggcatgcttgattggaattgccctctgttgttgtttgccctgtattattgctattctctatgctgttgcaggacaggagggtgcatcagaatcggatctcagtatacttccaaaatacagatttcaaatgttaagcaatgaggaaacacctggtgagggagggggaggatcaatgattcctatggagaccagcaatggttactcggtgaatgaacgaacactttcacctgaggatgcagaatgctgtatatgcatctcttcctatgaggatggagctgaacttcacgttctcccttgtaaccatcatttccactctacgtgcatagtgaaatggttaaagatgaatgcaacttgtcc

SEQ ID NO: 46775 - DNA, 384 bp, Glycine max
  unsure at all n locations
  Clone ID: LIB3139-106-P1-N1-A1
gcgtnnagagtgtttatttatgtaagcagcattaacagaggagaaagatggtctctcaatggaatgactgctcttgtcaccggcggcactcgtgggatcgggcactccatagtgagtgacttggctgcgtttggcgctgcagtgcacacctgttccaggacccaaacagagctcaacaaatgcttacaagagtggcagagtcaggggtttcaggtaactgggtcgctctgtgacgtgtcctcaccaccccagagagagaagctcattcaggaagttgcatccaccttcaatggcaagcttaacatctacgtgaacaatgttggaataaacattagaaagccaaccattgagtacactgctggagaatattcacagattatgaca

SEQ ID NO: 46776 - DNA, 251 bp, Glycine max
  unsure at all n locations
  Clone ID: LIB3139-106-P1-N1-A10
gaagagtagacgcgcagcacgcgacgaagccggaancggccgagggcaagatgataaatggcgaaaaaggcaaaaggagggggggcgcaggggaaggggaagagacgaccaccaaaacaggaaccaggggtgaagaggcccacaacaagcaaataggcgaacgggagaaaagcgggccgacacaggaaggcaacgaaggaaccaaggatgagaaaccgccaggacgcaaaaaaaaggacaaacccaagacg

SEQ ID NO: 46777 - DNA, 277 bp, Glycine max
  unsure at all n locations
  Clone ID: LIB3139-106-P1-N1-A11
ccagacatgacattcaaggannncagcttttgagtaccactaccaatggtgattttgttcaagggaaagatctcgcaatggttaaagttaatgtagcatgtgctgctgttggcttgacatcaagttacacttcaacttcattgttggaatctggtttgcaaaatgacagagggttaattgtggagtattttggaaggatgtcttacgttgctcataacgatttatagccccaagagaaagatttgtttggagggaaattattctcttgatattaaaa

SEQ ID NO: 46778 - DNA, 414 bp, Glycine max
  Clone ID: LIB3139-106-P1-N1-A12
aaggaattgtttgtcatatagcaaaagatccatcattcaaccagatggctgagcagcttcagaaaacttttcaaggagctccacaggatgctatgcctagctttgataatcaacaatatttttcaaccatgcaacaggttatgcagaatcctaattttatgaccatggctgagcgcctgggtaatgcattgatgcaggatccatctatgtctgccatgcttgaaagtttttctaatccatcaaataaagaccagcttgaagaaagaatgacacgcatcaaggaggatccatctctgaaacatattttggaggagatagagactggtggtcctgctgctatgatgaggtactggaatgatgaggaggttttgcggagttgtgacaagccatgggtcttgcaaattctggagatgt

SEQ ID NO: 46779 - DNA, 321 bp, Glycine max
  unsure at all n locations
  Clone ID: LIB3139-106-P1-N1-A2
gcatctatggccaatcacagtangtatgagcaattngagttttggtgttgatgtttagttaactagttgcgctacgagaaaactggntcttagcatccggctgtgtggttttcaatctttatcatctctagagtggtctaagttcgaatcttttgtgctcgaggggctgaaagcaagatgagtttatagtggagggttttaaagatctcagtggaggagcaatggaacctccaacaggattttgggcatcaatatggaactatgtttgctttctgccgtatatccgggggctccggcttcttggcaacatcaaaggtgtca

SEQ ID NO: 46780 - DNA, 374 bp, Glycine max
  Clone ID: LIB3139-106-P1-N1-A3
ccgacctaaccctttatgagtgattagaggaagcttggggtttgaatcgaatcgaatcgaagcgattcatcgatcgatcgatggctcttgtaggagttgaactgaagcatgcggcggagggcgtaccggaggcgaattgctccgccaagcccaccaagcagggcgagggcctccgccactactattctctcaacatccacgagcatcagctccttcttcgccaaaagactcataacctcaaccgtctcgaggctcagagaaacgacctcaattctagggtgaggatgctgcgcgaagaattacagcttctgcaggaacccggctcttatgtcggtgaagttgtcaaaagaatgggcaagaacaaagtccttgtc

SEQ ID NO: 46781 - DNA, 300 bp, Glycine max
  Clone ID: LIB3139-106-P1-N1-A4
attcgatgcagaggagttgaatgctcctgattcaaatgataatattgatctactgttgagcattgatttgttgggtttacaaggagcaggtaaagcttttccaaacaagattgtttttgatgataagcttgtgttggctaacacacaagaattctttgatggaaattttccagtggattcttggttaccaatttttgtgaattgtctctatcctgtaagtcaattaccttcagaagctgtcgttgtaaatgttacatgtggtagtggacgtggtggttacctatcactgcttgtattatc

SEQ ID NO: 46782 - DNA, 349 bp, Glycine max
  Clone ID: LIB3139-106-P1-N1-A5
caacaacacacctgtaaatgattttatctgagacagaggaaagcaaggctatctgttaccacagtgttacgcacgagaaacaagcgctcggagaaggggatgctgagcttcatgacacccaagggaatcctgctgtgtgggaaatcagagggcacatgggtctaaagaggaagaaggattatgatgaggcatctgaaggcaaagctgggaggctccttgcagaggtgtccctctctcaagagaggtttcaagaagtcaatgagctcatgtacgaagccattggctgtggtgaattggaggatgtcaacgttgaaagtgtcaaagaagttgatgcagccaagacaagcga

SEQ ID NO: 46783 - DNA, 430 bp, Glycine max
  Clone ID: LIB3139-106-P1-N1-A6
gacgaaaagaactttgctttattgtgtgaacaagtgagtttggtgctcaacgagtacccaaaacttaagctaactcaagggagaaaagtgcttgagattcgaccagccataaaatgggacaagggcaaggctcttgaattcttgctagagtcactaggatatgctaattctgataatgtatttccaatctttattggtgatgatcgaactgacgaagatgcttttaaggttttgcggaggaggggccaagggattgggattcttgtttctaaaattacaaaagaaaccgatgcttcctacactttgcaagatccaacagaggttgggcagtttttgaggcatatgggagagtggaaagaacgagtcccaatccagaagtagatctagatgagttagggaaattgcccagccataattgtcaagggtggtc

SEQ ID NO: 46784 - DNA, 361 bp, Glycine max
  Clone ID: LIB3139-106-P1-N1-A7
cacccatcttaaaattcttctcaaagagagaaaccacgacacaacacaaaatctccttagacttggtgtattttgtttttctgtctgtgttgttccttcacaaccacagagccaaaaacaaaaacatctaaaacctctttctttctctgtgtttgtgtttttagtttttgtttttgtcctatgaaactcccaacaacgtttgcagacccggaatccttgtcttacctttacaccttgctccaatcttccttcgaccaaatgaatgatcccaccaacaacaacactttcaccactgggagaaaacgccgcataaaaaacgaggatgatgatgatgatgatgatgatggtgatgatgatggtt

SEQ ID NO: 46785 - DNA, 328 bp, Glycine max
  unsure at all n locations
  Clone ID: LIB3139-106-P1-N1-A8
cttgaattttatgtgattactccgacccacctgaaagttcttgtaattttggatttcctgaggaagatcatgtcctttggacctgggcttactactaagtttttttctttcatgtgtgtgtttgtatcatgtgtttagtatttagtatttgcactttttttttcaaggctttaaaaatgagcaataagtcagagcaatggctatagctatagctttagctntattaggaaagaaatggtgggctttttttgcctcaattttgttatttgtaatgaaactgttggttccgatgtaattaaataatgtcttcttgttgacaatgtaacta

SEQ ID NO: 46786 - DNA, 365 bp, Glycine max
  unsure at all n locations
  Clone ID: LIB3139-106-P1-N1-A9
aatagctttaataatantgctgtacatagtaatatatgtgaatttaattcgttttgcttaatttgatgattaaagttgaattgtaatacctatctatctaatttgagaaattacaattacaaaatattccctttaacaaatcaacttaaaatgaatagcaggtgataattataatcaacctaaccattaaaactcgcatggatatttactaaaaatatattctttctattctcccattgcagaccatgtttggactcacagtttggtgttattttatcaggtgatgattcctgaggcatttgccattgtcttggcaccaaatgatacctcaaggagctgtggattatttcgtctgaccaaacctg

SEQ ID NO: 46787 - DNA, 402 bp, Glycine max
  Clone ID: LIB3139-106-P1-N1-B1
attttacgacggcttatactaattctggactaaacacgagaaaaataagccggaaatatgaatattactcagattccgcttatatttaatttcagcagtgagaaaagatgggagaatgtaaatcaacaaggtatacagatgccacctaatgtaatgcggtagaaattttcatatttccggcttattttacgacggcagatacaaattctggactaaacacgagaaaaatcttgctttgacagaagaggaaaagatggaagtgattagaaatagaggtattcctgctgatgttcttgcaaagcgagctcatgaatttgaaaaacatgttgctcatgaaagcctcaaggatcaaattcctgctgttgacaagttgaattctactaagggtaataagtttgcaaa

SEQ ID NO: 46788 - DNA, 351 bp, Glycine max
  unsure at all n locations
  Clone ID: LIB3139-106-P1-N1-B10
gttnnnctnagatgantctactccgntngnggacaaatacttcatagaacctaaggaccatgtttatgattggagtggcatattgccccggaaacaatacatttccaacctactcaaggatgtggatttagctttacaacaatcaaatgcaaaatggaagattgtggtgggtcaccatacaattagaagtgccggcgtgcacggtaatacggatgagcttgtaaagcagcttctcccaattcttgaggcaaacaacattgatctttacataaatggacacgatcactgcctacaacacataagctgttttgaccgtgcaaatcaatttttggcttgcgggggaggggcaaa

SEQ ID NO: 46789 - DNA, 433 bp, Glycine max
  unsure at all n locations
  Clone ID: LIB3139-106-P1-N1-B11
tttctaatttggtcanttctcaataattctcatcatgggctccttgattgttccaggtgaacatgatcacaaactaaagcttgtttctcttccctttgtatcaaccagtcacctcattcccgtagtagacatagctaggctctttgccattcatggtgttgatgtcaccataatcaccaccacagccactgccgccattttccaaagctctatcgatcgcgaccgtgaccgcggccacgctattagaacccacgttgtcaagttcccatgtgaacaagttgggttgccagaaggagtagagagctttaactccaacacttctcgggatttggtccacaaaatctaccagggactcaccattcttcaagaccaataccaacaactctttcatgacttgcagcctgattttttgttcaccgacatgttctaccct

SEQ ID NO: 46790 - DNA, 445 bp, Glycine max
  unsure at all n locations
  Clone ID: LIB3139-106-P1-N1-B12
caagaacatttttgtagttaccattctgcgtagngatcttgggaagtgcatttttagattgagaaattttaagatccaacatagaacctttaggagtttcaacatcatcaagagacaatttaaaattgcacttcccaagaacacagttggaggaaccattctgcgtagtgatctattggcaaattttttgacagagggcaattttagagcaagtgttgatttgcagcgcactcatcgtattaaaggaatgattaaaatggtggccacagttggtattcctgagaatacaggtatagcattggcctgtgctatgaatagttcttttagggggcgcgccagttctgatatttacaccatctgctctcaagactgtgaattatggaatcctgcttgcacaaaaagcattgactatgtcatttaatccaaacccgtgttctgatgcatg

SEQ ID NO: 46791 - DNA, 198 bp, Glycine max
  Clone ID: LIB3139-106-P1-N1-B2
cctcaggccattttaaggtaactgtccggaagcaaagggcaacagtgagaacaccatggaatttacgactctaccacgcagagcttttggcaactctctatcgaccttctaggtggaggaattccagtggacaaaactgcacgattggatcacactaatacaaaattcttcaattagaaacttggagagagcagctgc

SEQ ID NO: 46792 - DNA, 419 bp, Glycine max
  Clone ID: LIB3139-106-P1-N1-B3
ggaaaattgacttttccctgtgcacttcccgaagtgttaagagaatgcctctttctatagggggaggagctggtgcaaagaatgctattctcatgaatatgccaaatgctgttctttcaatgtggagatattttgttggagatctcgtctttgaagtttctaagatgacttctccctacattaaatgtacagtctctttcttcatagcatttggaaatttggctgatgataccatcaattttgaggcttttccccacaagctggtgcagtttggagagattcaggaaaaagttgtattgaaattttcacaagaggaatttcttacagcttggtcaactcaggtgcgtcctgcaacaactctgttggctgatgggtgtccatatttgtatgcaatggggcatgatagttcagtgtctaca

SEQ ID NO: 46793 - DNA, 363 bp, Glycine max
  Clone ID: LIB3139-106-P1-N1-B4
cctgcaatcactcttacatttcttcgttcgttctctgcagttatatcctttttgagcttcaatggcggacgctgaaaccttcgctttccaggctgagatcaaccagcttctaagtctcatcatcaacacattctacagcaacaaggagattttcttgcgtgaactcatcagcaatgcttctgatgctttggataagattcgattcgagagcttaaccgacaagagcaagctcgatgctcagccagagctcttcattcgtcttgtgcctgacaaggataacaagactctttccattattgacagcggcattggaatgaccaaagcagatttggtgaacaacttgggtaccattgcgaggtccgg

SEQ ID NO: 46794 - DNA, 438 bp, Glycine max
  unsure at all n locations
  Clone ID: LIB3139-106-P1-N1-B5
cagaaatcaagtgangatagncctcatgacttgccggaaggatgcgtcgcacacatattgtcgtacatttgtactcctgaagacatagtcaggctctccctcgtttccaaggccttttattctgcagctgattacgacactgtgtgggatcgttttataccctctgatttctcctctaccatttctccactttcttcctctaactctaagaaggatctctatttcactctctccgaccgtcccaccatcatcgaccagggtagaaagagctttcaattggaaaagcgaactgcgaagaagtgctacatgctttccgctagggatatttctattacatggggtgagaattttatccaaaagttaaatactttttacatattctcatacaatttttattttgtataaaaagtttaatgttgtattgtagatcttttcaca

SEQ ID NO: 46795 - DNA, 314 bp, Glycine max
  unsure at all n locations
  Clone ID: LIB3139-106-P1-N1-B6
cagattcgggcgtcaactannngtaatgcagaattaggtcattaacattgtaaatcttctggcgatgattggaatatcaatgtgaagacgctatatgacttctgctatgacaatatcattgtggttgtcaaggtatttttgaagaaatatcgtggatttacaaagaatctggttaggcttctacaattctttaaggtgaagataacttcggctctttacacaagcatagaatgatatnttttcttggtatcaagttattcagtatgtatgtttgtttgttttnaaaaaaatataatttttattaaattaatatt

SEQ ID NO: 46796 - DNA, 371 bp, Glycine max
  unsure at all n locations
  Clone ID: LIB3139-106-P1-N1-B7
ttcctctttccggtangtacctgnnggacccggttcaggaccgcaaaaactaggcctacaagtggatcctacaccactgcaagcgatacaaagaagccgaggggataatcgggaacagcttcgaggagctcgaaccgggagcctggaacgagctgcagaaggaagaacaagggaggcctccggtttacgcggtgggaccgcttgtaagaatggaagcaggtcaggccgactcggagtgcttgaggtggctggacgagcagccacgtggaagtgttttgtttgttttcttcggaagcggtgggacactctcgagtgcacagatcaacgagctggctttcggggtggaaaaagggagcaacggtttttggggg

SEQ ID NO: 46797 - DNA, 413 bp, Glycine max
  Clone ID: LIB3139-106-P1-N1-B8
ggcaacagttatttttatcattgaattttgattctagcaagcagagcttttgtcaattttctattgaccttctcggtggaggaattttagtggacaaaactggagattggatcacacttatacaaaattctccaattagtaacttgttgagagttgctgcttggaagaaaggctgtttaatggttaagattgtgatgtctgggaatgcagcagtcaaaaggagtgattgggcctcattggtacaagtgtttttaacaaacagcaacagtacagagcattttgatgcatgtaagtggacaaaatcggaaccacattcctgggaattgatcttcccaatagaggtatgtggtcctaataatggttttgaaatgtggagttctgagtggcaaatcaaacttcatggcattgagttt

SEQ ID NO: 46798 - DNA, 396 bp, Glycine max
  unsure at all n locations
  Clone ID: LIB3139-106-P1-N1-C1
acagaacccattttttngtgttgaatcatcaagcgcctcaacttctgctcctccacatatgcatgatgaaatcactggtagttctggttctagtgcacttattgaatcaaatcgtactggacaaagtggcatttccattttacaaagcctaattgatcgtgctcgaaggactgtgcgtggatctgccgatgatataggatggcttcaacgtgatcctggaatgccgtcagttgaagatggaacagtgaggttcctggaaattctggacaacatcaagcatggtgttcacaggttaccaaattcggtggtttatttgttaattccaggtcttttcagtaatcatggtccactttactttgtcagtacaaaagtcagtttttcaaaaatgggtttggc

SEQ ID NO: 46799 - DNA, 136 bp, Glycine max
  unsure at all n locations
  Clone ID: LIB3139-106-P1-N1-C10
cgcgacgaagccggaaacggccggggagcgtattaaccggaacaaaagcaacgcgcgggtcaagagagggaggcgccccacacacgngtacgatnactaaagggaaagaaaaccacgcccagagcaaggacacaga

SEQ ID NO: 46800 - DNA, 423 bp, Glycine max
  unsure at all n locations
  Clone ID: LIB3139-106-P1-N1-C11
gaaatcatgnngttcngtctgtaacaaaacttttttactattaatttagttctaaagcattcgattcaaaatattgnagccttgaatattttcatcactggatcaaagaattcattccaattgttgtctccatagctgaaatggaaagaagggttgcaattatcggggcaggaacaagtggccttgttgcctgcaaataccttttagagtttggatttaatccaattgtctttgaagttgaggatggtgttggaggactatggagacatactatagagtccaccaagctccaaaataagaaacaaatgtaccaattcctggattttgcatggccttcttcagttaaagaagataatcctagtcacgagcaagtgctagattatcttaactcctatgctgaacatttttctttcattccttaca

SEQ ID NO: 46801 - DNA, 409 bp, Glycine max
  unsure at all n locations
  Clone ID: LIB3139-106-P1-N1-C2
ggcagctgagggttcattcatgggagagaagacgtttgtggtgagcttgacatgtagcaaaaggacagacacaatggtaaaactgtgtgcggtgttcgaatctttaaagctgaaagtcattacggccaatatcacttctttttcaggcacgcttctgaagacagtcttcatccaggttagtcttccattttgcccttcttaaattaataagtaaataaataaattgttaattgtttaatatttgtgtttaaagattaaattagtttttttaaaaataatactcatcggctagaattttgggggccacatactaggaaacctatggaccactttaataaaagtgggaaacccatttatgggataatgngcattttagggtcaatgatgagaattaaggaccttatggcag

SEQ ID NO: 46802 - DNA, 429 bp, Glycine max
  unsure at all n locations
  Clone ID: LIB3139-106-P1-N1-C3
aaaaaaacaaaatttacattactatccaaccaaagcncaggtnctctctattctaacgttgttgaatggcagcacatctggcaaatattaggatggaagagaatatggcgattcaagaagcagcttccgctgggttgaagagtatggagcatctgattcgcgtcctttcttctcaaatcccttctgcttcgtcttcttcttctaacgcacaccaccaccgtcttaatctcaaccaccttgactgcgcggaaatcaccgacttcactgtctccaagttcaaacaagtcatcaactggttgaatcgcaccggccacgctcagcttcgtcgcgcaccttctcatccttctcctacaatttctccctctcaacctcaacctcagccacaaccacaaccacagacgctgactcttggatttgcaaaacctgtat

SEQ ID NO: 46803 - DNA, 361 bp, Glycine max
  unsure at all n locations
  Clone ID: LIB3139-106-P1-N1-C4
gtgcctaccatagcacatangatgagttccattcgatgcagaggatgatgaatgctcctgattcaaatgataatattgatctactgttgagcattgatttgttgggtttacaaggagcaggtaaagcttttccaaacaagattgtttttgatgataagcttgtgttggctaacacacaagaattctttgatggaaattttccagtggattcttggttaccaatttttgtgaattgtctctatcctgtaagtcaattaccttcagaagctgtcgttgtaaatgttacatgtggtagtggacgtggtggtatattcattattttttttttattttattttattttaattgatttttttttatt

SEQ ID NO: 46804 - DNA, 373 bp, Glycine max
  unsure at all n locations
  Clone ID: LIB3139-106-P1-N1-C6
tgcacagnccagagtaagttcgtcaatngagaaggaaagctctctctcgtattgaatggctgcaaaaagctgatgtgcctaccatagcacagattgaagagttccattcgatgcagaggatgatgaatgctcctgattcaaatgataatattgatctactgttgagcattgatttgttgggtttacaaggagcaggtaaagcttttccaaacaagattgtttttgatgataagcttgtgttggctaacacacaagaattctttgatggaaattttccagtggattcttggttaccaattnttgtgaattgtctctatcctgtaagtcaattaccttcagaagctgtcgttgtaaatgttacatgtggtagtgg

SEQ ID NO: 46805 - DNA, 416 bp, Glycine max
  Clone ID: LIB3139-106-P1-N1-C7
gtgtaagcttagatgatctaaatccgccacttctttcacaggccatctaatttgtacacaaccggaacaaggaaaagaagaaaggttcacactgataaagaaggaagcgagacaaggtggcacaaaacaggaaaaacaagaccagttttcgtaggtggtgctgtgaagggtttcaagaaaatccttgtcctctacaccaactatggaagacaacagaagcccgagaagaccaattgggtgatgcatcaataccaccttggtactagcgaagaagagaaagatggagagttggtggtttcaaagattttctaccaaacacaacctcgacaatgtggtaataattccattataaagcatgatctttatgatgaagaaagattgatgctaaccaaatagtgtccatatgatgatgccat

SEQ ID NO: 46806 - DNA, 352 bp, Glycine max
  Clone ID: LIB3139-106-P1-N1-C8
gtttgattttcagtgccttttataaaaggaagaggctctgtgtgagtggttagtgttggagaagagaacgacctgaatcgtaggatctgttattctgttagcatgttccgttcatcgttccgccgcgcgttttcggcgagggcgtcgaagcactgcgagaaccacgagttcctctctcggaactcgttcctggggagctgggaggcgccacgggacccgaaggaggcggaggcgaagctggcgcggctgcgaagggaatacgcgaagcaagtgaaggaggttcggaaggaatacataagagagatggaagcgatgaagattgagaaggagcgcaaagacgaagcttacaggg

SEQ ID NO: 46807 - DNA, 410 bp, Glycine max
  unsure at all n locations
  Clone ID: LIB3139-106-P1-N1-D1
atgggttggtctctacagtancaatcatgatgggtgttggagcagtgaagcatgacatcaaggccatgatcctatcagggtttgcagggttggtggcaggggcatgtagcatggccataggtgagtttgtgtctgtttactcacaactagacattgaggttgctcaaaggaagagggagaaggaaaggggccaaagaagagtgagagatccagaggaagacaccaatgaagagaaagagagtttgccaaaccctttgcaagcagcagcagcctcagctttggccttttctgttggtgcaatggtgccattgcttgcagcgtcatttataagggaatataaggtgaggcttggagtgattgttgctgctgtgacttttgctttggtggtgtttgggttggtaggggctgtg

SEQ ID NO: 46808 - DNA, 385 bp, Glycine max
  Clone ID: LIB3139-106-P1-N1-D11
tgggattttttagttattgaattggatatatttatcctcatacatgatcttaggagacatttgtttttggtaaccactcgtcccaagcctaaataagttaaaacacagaagaaaatgcagaagcggagggcagggaggaagaagttccacgagacacgacacccggtgtacaagggagtgaggcagaggaacgggaagtgggtaagcgagctgcgacaacctaacaacaaaaacgcgcgggtgtggctcggaacattcgcgcaccccgacatggctgctatagcgtacgatgttgccgccttggctttcaagggcgacagtgcttccttaaactttccgaacgccgccacctcggttccccgccttaactcgcggacgtgttccg

SEQ ID NO: 46809 - DNA, 427 bp, Glycine max
  unsure at all n locations
  Clone ID: LIB3139-106-P1-N1-D12
ttttccattcanttggnattatacatacataacataacatgccaataagtcctaatttgtttatttaacatgccaataagagcttcatatgccttttcatcatacaataaccaaaggctaagtttagttctgtgttcttttttcacttaggacaccgatgcagaggaggagctcaaagaggctttcaaggtttttgacaaagatcaaaatggctacatatcagctagtgaggtatacattttatttttcttttcggtggctttagttttctttctttgatgtcaacgtcatttctaatattcattaacatacaaaaaaattgataaagtcagggtttctgctaacgtgaacaatgcaggtagggccaacaggccagtatatgttgcaaattagtttacagctatattttctttttctttgaagtgtc

SEQ ID NO: 46810 - DNA, 456 bp, Glycine max
  unsure at all n locations
  Clone ID: LIB3139-106-P1-N1-D2
aaacagagcaaaaacctaactcaccacactcttgcaatcaatcaatggcggaaccttcctcctcgaagcccgccgtccctctcctgaaggacgagctggacatcgtgatcccgacgatccgcaacctcgacttcctcgagatgtggcggcccttcttcgagccctatcacctcatcatcgtgcaggacggagaccccaacaggaccatcaaagttcccgatgggttcgattacgaactctacaaccgcaacgacatcaacaggatcttgggtcccaaggcctcctgcatctcgtttaaggattctgcttgtcgctgctttgggtacatggtgtctaagaagaagtacatctacaccatcgacgacgactgcttcgttgctaaagatccttctggaaaggacatcaatgcacttgagcagcacattaagaatctnctatgtccattcacaccatttt

SEQ ID NO: 46811 - DNA, 411 bp, Glycine max
  unsure at all n locations
  Clone ID: LIB3139-106-P1-N1-D3
ttcaataccattattcaatcncactcatcaattctcatctttcttctcactaactattaattcatcatgtcgagcacagctggccaagtcatcaaatgcaaagctgcggtttcatgggaggcagggaagccacttgtgattgaagaagtagaggttgcgccaccacaagctggtgaagtgcgtttgaagatcctctacacctctctttgccacactgatgtttacttctgggaagctaagggccaaactccattgtttcctcgtatatttggtcatgaagctggagggattgtggagagcgtangtgagggtgtgactcatctgaaaccaggggaccatgcccctcctgtgtttaccggggagtgtggggactgcccttattgcaagtcagaggagagcaacatgtgtgat

SEQ ID NO: 46812 - DNA, 440 bp, Glycine max
  unsure at all n locations
  Clone ID: LIB3139-106-P1-N1-D4
tgtttncgcgagcgtaagttttaggagaagaganggngggagcacggccacgggacatagatgacttgcccaagaacgccgccaactacacagcgcttacgccgttgtggtttctagagagagctgctacggtccaccccaccagaaactccctcatccacggatctcgtcgctacacgtggcagcagacttaccaccgttgccgtcgattcgcctccgctctttctaatcattccatcggtcttggaaacactgtagctgttattgcacccaacattccagctctttatgaagctcactttgggattccaatgtcaggggctgtgttgaaccctgttaatattaggctaaatgcatccacggtagcttttcttcttggtcattgcacagctgcagcagtaataggttgatcaagagtttttttctttggcagaagaagc

SEQ ID NO: 46813 - DNA, 445 bp, Glycine max
  unsure at all n locations
  Clone ID: LIB3139-106-P1-N1-D5
caacagngagaatatcattgatattttgattctagcaagcagagcttttgtcagttttctattgaccttctcggtggaggaattttagtggacaaaactggagattggatcacacttatacaaaattctccaattagtaacttgttgagagttgctgcttggaagaaaggctgtttaatggtcaagattgtgatgtctgggaatgcagcagtcaaaaggagtgattgggcctcattggtacaagtgtttttaacaaacagcaacagtacagagcattttgatgcatgtaagtggacaaaatcagaaccacattcctgggaattgatcttcccaatagaggtatgtggtcctaataatggttttgaaatgtggagttctgagtgggcaaatcaaaccttatggcatttgagtttccttattgacaatcccaaacagtctacagttt

SEQ ID NO: 46814 - DNA, 394 bp, Glycine max
  unsure at all n locations
  Clone ID: LIB3139-106-P1-N1-D7
gtgagttngangtgacgatgtataactagaaacagngtgatgaaaatgaaggtctttgttttcttcgttgctacaattttggnagcatggcaatgccatgcgtacgatatgttccctctccgaatgaacactggctatggtgcccgtactccggaggtgaaatgcgcaagttggaggcttgctgtggaagcacacaacatctttggctttgagaccattcctgaagagtgcgttgaagcaacaaaggaatacatccatggcgaacaatatagatcagactccaaaacagttaaccaacaagcttacttttatgccagagacctcgaagtccatcccaaggacacatttgtgttcagtatagatggcacccgtactctttaatatcccatcctac

SEQ ID NO: 46815 - DNA, 410 bp, Glycine max
  unsure at all n locations
  Clone ID: LIB3139-106-P1-N1-D8
gngaaatattggatgcttttaacacacggcancangaagggggcgttttgtattacccaacagctgccccacctcaacaagacactgaactacaagcatggtggaaggaagctgtggagaagggtcatggtgacttaaaagaaaagccttggtggcctaaaatgcagacaactgaagagctcattcaatcatgctctattatcgcttggacagcttcggctctccatgctgctgagaattatggacaattatccttatgggggcataatcctgaactcgtccaactctagccagaacgtttatcccagctgaaggaaccccagagtatgatgagatggtgaacaatcctcaaaaggcttatctggataccaatcacacccaattttgagacccttaattgaatctttcag

SEQ ID NO: 46816 - DNA, 438 bp, Glycine max
  unsure at all n locations
  Clone ID: LIB3139-106-P1-N1-E1
ctcgagccgcgcgctgnatctgtgcttttactctgctaccttgtgacaattgtgagggttagtgtgttgaatgatgctcttaagagcatgtacaatgctgagaaacgggggaagcgccaggtcatgattaggccatcctcaaaagtgattataaaattccttttggtgatgcaaaagcatgggtacattggagagtttgagtacgttgatgatcacagagctggaaaaattgttgttgaaattgaatggtagactgaacaaatgtggggttattagtccgcgttttgatgttggtgtcaaagagattgaaggttggactgctaggctgctcccctcaagacagtttgngtatattgtgttgactacctcagctggcatcatggatcatgaaagaactaggagaaagaattgtggtgggaaagtgctggtttcttttac

SEQ ID NO: 46817 - DNA, 338 bp, Glycine max
  Clone ID: LIB3139-106-P1-N1-E10
cacattcacaaataacagctcgccggtgacacatccattatttccgccatgttctccaattccgagcaaccttagattgtcgtcaacctctctcacctttttcccttatttcaacagaaaaagagagagagtgatttttttttattttttttatataaaaaaacgatacgatatgtacgttgtgcctccaccccagcgtctggatccgggttcgggatccggtgatttgcgggtctaccaagcgtggaaggggagcaataaattttttcttcagggcaggttcatatttggaccagatgcatgatcatttgccctgacaatctttctttatgcttgct

SEQ ID NO: 46818 - DNA, 416 bp, Glycine max
  Clone ID: LIB3139-106-P1-N1-E2
ccgtgacatgcgcttgtttgtcgctgtcggtgtcatcaagtccgtcgtcaagtccgataaggccggcgtaagttttcgagttcgctgttcaaaattgtgtcctgctaaccagttcgtctgcgcaaaaggctggaaaaattaccaaggctgctcagaaggtaaagttgctatcaattgtcccagaggtgagacaacatgttgacaaatattaggcctcaaagaaataagtggttccgcctatggttcctcttgtttctttccctcttcgactcgaaaaattcgtggaggatttggtggtgatggagcatttcttacttttctaacggtttacgaatcatgggaagggaggactgctagatttacttctatcctctcaacaaaaaatagaagtgatgatgttctgacagttaacgacc

SEQ ID NO: 46819 - DNA, 385 bp, Glycine max
  unsure at all n locations
  Clone ID: LIB3139-106-P1-N1-E3
cgggaatngnattttcacttctcataggaagctcgccaattgagaaggaaagctctctctcgtattgaatggttgcaaaaagctgatgtgcctaccatagcacagattgaagagttccattcgatgcagaggatgatgaatgctcctgattcaaatgataatattgatctactgttgagcattgatttgttgggtttacaaggagcaggtaaagcttttccaaacaagattgttttttgatgataagcttgtgttggctaacacacaagaattctttgatggaaattttccagtggattcttggttaccaatttttgtgaattgtctttaatcctgaagtcaattacctttagaagctgtcgntgtaaatgttacatgtggtagt

SEQ ID NO: 46820 - DNA, 369 bp, Glycine max
  unsure at all n locations
  Clone ID: LIB3139-106-P1-N1-E4
gatgtcatgggaaacttgggcatcagtagccaagggcggngctgaaacaaccaagttcaacatgggctcgatcttgttgcctgtctgcagaaacaccattacttggctcaggagcaggaccaaactaggagccatcattccctttgacgacaacatcaactttcacaaggtggtagcctttggcattgcaattggggttggattgcatgcgatttcacatctgacgtgtgacttcccaaggttgttacatgcgacggacgaagaatacgagcccatgaaacaattttttggagatgagaggcccaacaattattggtggttcgtgaaagggactgagggatggaccggggtggcgatggtggttcttat

SEQ ID NO: 46821 - DNA, 412 bp, Glycine max
  unsure at all n locations
  Clone ID: LIB3139-106-P1-N1-E5
gaaanccaggggtatgggtattttgcgacgagngaagcaacgaggcggagttttgatatcagtatcggtgatgaagcaacacgagttatctctgttactgcgtctcctatgggcactaacccttctctatggtgagatgttcgcttactgggttccacccctcttcacctgttcctggccccatcttctccgcagttcttcttcttcttcttcaacggttcaaacagacagtgggaattatcagggtgattatgttaaagtggctgttattgcagatccacagctcatggataaaacttctctccgtcttcctgcaagatcacttgcactggaacttgcagaattctacactgatttaaacatgcgtagatcattctttgcatctgtcctgcctttcaaacctgatgtcata

SEQ ID NO: 46822 - DNA, 437 bp, Glycine max
  unsure at all n locations
  Clone ID: LIB3139-106-P1-N1-E7
caaaaactatttatagtatggtggaganngggaaaggaagaataggtttaatgtgtacgaaggcctgtactgcatgtccactcgaaatttcaagaaggctgccaagttgtttttggattctatttcaacctttaccacctgtgaactttttccctatgacacctttatattttatacagttttgaccagcattatatcattggatagagtttccctaaagcaaaaggtagtggatgctccagagatcttgacagtgattggcaaaatcccatatctttcagagtttttgaactccttatatgattgtcaatacaagtctttttttctcagcatttgctggcctgacagagcaaattaagttggaccgctatctgcatccacactttcgatattacatgagggaggtcagaaccgttgttaattcccaattttggaat

SEQ ID NO: 46823 - DNA, 428 bp, Glycine max
  unsure at all n locations
  Clone ID: LIB3139-106-P1-N1-E8
gaaagatgnangtagagttgaatgtggaatcccttctggatttccgctcacagttatttgcaatagcatttttaatgagatgctcattagatatagctatgaaaaattactgcgccaggctaaagctccaagtatgtttttacaatccttcaaaaattttgtttctttgtgtgtgtatggtgatgataacttaattagtgttcatgaatatgtcaagccttactttagtggttctaaattgaaaagctttctagctagtcataacatcaccattactgatggtattgacaaaactagtgcaactttgcaatttagaaatttagcagattgtgattttctcaagagaaactttaagcagatgtctaatgttttgtgggtggctcctgaggaccaggcgagtttatggtcacaactctattatgtttcgt

SEQ ID NO: 46824 - DNA, 412 bp, Glycine max
  unsure at all n locations
  Clone ID: LIB3139-106-P1-N1-E9
cagagcttttggnattagttctatggaccttctcggnggaggaattttagtgttacaaaactggagattggatcacacttatacaaaattctccaattagtaacttgttgagagttgctgcttggaagaaaggctgtttaatggttaagattgtgatgtctgggaatgcagcagtcaaaaggagtgattgggcctcattggtacaagtgtttttaacaaacagcaacagtacagagcattttgatgcatgtaagtggacaaaatcggaaccacattccctggaatcgatcttcccaatagaggtatgtggtcctaataatggttttgaaatgtggtagtctgagtgggcaaattaaactttatggcatttgagttttcttattgacatttccaaacagtcttcagtttttga

SEQ ID NO: 46825 - DNA, 365 bp, Glycine max
  unsure at all n locations
  Clone ID: LIB3139-106-P1-N1-F1
ctcgcaatggnttttgnatanagtatcatgtgctgctgnnggcttgacatcaagttacactccaactccattgttggaatctggtttgcaaaaagacagagggttaattgtggagtattttggaaggatgtcttacgttgctcataacgttaatcagccccaagagaaagatttgttagagggaaatttttcctttgatattaaatctcgctctagattggaaaaagtttcctctacaaaagcacaatttgttagtggaaaaaccttcaaatatgatataattggtgctggttcacattctttaaggagattttcctgaaaaggaagatcaagaaaaacccaaaaagattgataccagattgaga

SEQ ID NO: 46826 - DNA, 401 bp, Glycine max
  unsure at all n locations
  Clone ID: LIB3139-106-P1-N1-F10
taagtancttaanatttcaagccttactttagtggttctaaattgaaaagctttctagctggtcataatatcaccattactgatggtattgacaaaactagtgcaactttgcaatttagaaagttagcagattgtgattttctcaagagaaactttaagcagatgtctaatgttttatgggtggctcctgaggacaaggcgagtttatggtcacaacttcattatgtttcgtgcaataatctggaaatgcaagaagcttatcttgtcaatctcgtaaatgtgttacgagaattgtatttgcacagtccagaggaagctcgccaattgagaaggaatgctctctctcgtattgaatggttggaaaaagctgatgtgcctaccatagcacatattgaagagtt

SEQ ID NO: 46827 - DNA, 429 bp, Glycine max
  unsure at all n locations
  Clone ID: LIB3139-106-P1-N1-F11
gatgaattgagttannntattaatcagatgagggtgactttgaatgggtgcatgatgatttagttgaacagctgaaattggaattgaaaaattcaaggcaaggaggacttgccacaattttagaagaagtggaagaggcgaacgaagaggaagaggtggtggcgtttgaagaggaagaaagagtgtccccaagagtggttgaagatccaaagccaatggaaattgaagagaagcttgaatacaaggatcaaattgatgaaattcatatagtttacaagagctatgcagagaagatgaagaaacttgatatcttgaattaccagaccatgcacgcattaggtcttcttcaactaaaagaccctctaaaattaanttcattaccaaaatccgcattccaaggtgcaaagcctgtaatttcttagaacttgt

SEQ ID NO: 46828 - DNA, 441 bp, Glycine max
  unsure at all n locations
  Clone ID: LIB3139-106-P1-N1-F12
ctcgcagtttcngttcntcatgactcagntttcgctctttggaaatacccacccactcaaaccccgcagccacgatgaaccccgagtaagttgtcctcgccgcaccctggatgctgaagctactggaggctccaggcagccacgcccgctggtcatgctaatcgcggaccgctcccagatacgactacctcttcaagctgctcctcatcggagactccggtgttggcaagtcttgcttgctacttcggttcgctgacgatacctacactgagagctacatctccaccatcggtgtcgacttcgtgcgttccccggtgttcggcgcgggtcagcctgaccgcagagctgacaaccatacagaagatcaggactattgagctggacggcaagaccgtgaagctccagattgtaagctttcccagccgacccggagaaggtggt

SEQ ID NO: 46829 - DNA, 420 bp, Glycine max
  Clone ID: LIB3139-106-P1-N1-F2
ggagttccaaccaatatgctgacggtaaattgttcggcgagaatgacagtgcataaccctgcaaccttcttcggaattcatgtcagctctaaagcagtgaatcttatgtattctgagatgacagttgcaactggtgagctgaagaagcattatctatcgagaaagagtacccgtacagtgtctgtgaacctgcaaggaagcaaggtttctctatatggtgctgatgcaagcttaactggcttggtggacaatggaaaaataccaatgaactcttgtctttgaagttggatcgctagggaatattgttgggaggttggtgaggtccaaacatcgaaggcgtgtctcttgctcagtggctattgattcccacaacatcgaacccatcaaacttaaagagaatgcatgcacatacaattgaga

SEQ ID NO: 46830 - DNA, 431 bp, Glycine max
  Clone ID: LIB3139-106-P1-N1-F3
attttctctctcgatacataattacatagaaatggcctcttctcttgcatcctcatcaactgttctctggatcctttttctaaccattgcaactcttcatttgagttcagccaggaagttgtccgggtcagacccgcagttgcagtttcaataccacagaggccctctcctcaaaggcaaaatctcagtaaacctcatttggtacggtaaattcaaaccttctcaaaaagccatcgttgctgatttcatcacctcgctctcctctcccaaacccgtcaccgcccaaccatccgttgccacgtggtggaaagccaccgataaatactacaaaaactcgtcccccaaactcgctctttccctcggcaccacccaaatcctggacgaagaatactccttaggcaaatcgcttacgaattaccaaatcttaaaac

SEQ ID NO: 46831 - DNA, 396 bp, Glycine max
  unsure at all n locations
  Clone ID: LIB3139-106-P1-N1-F4
gcgatcacgngtgatancctgtttaatatggagcgtgtgactcaggctgtaatggtgggttgatgaacaacgcatttgagtacatacttcagtctgggggagtacagaaagaaaaggactatccatacaccgggagagatggcacctgcaaatttgacaaaaccaaagttgcggctactgtatctaattacagtgtggtttcccttgatgaagaacaaattgctgcaaacctagtaaagaatggccctcttgcagttgctatcaatgcagtttttatgcagacatatgttggtggcgtctcatgcccatacatctgtgggaagcatttggatcatggggttcttctaggtggttatggtgaaggtgcatatgctcccattcgttttaagaacaaac

SEQ ID NO: 46832 - DNA, 390 bp, Glycine max
  unsure at all n locations
  Clone ID: LIB3139-106-P1-N1-F7
ctctctctttcnctcnctctcattcacacgaatcacactctccacagtgcgattcattcaccaatggatcgcaacggtgttctctctcttgcattcatctgcattgtagtcgccggcgtcggaggccagtctcccgccgcagcgccctcgaacactccggcaacccccgccgtcgccactcccgcccaagcaccttccacaccgaattcaccagccccagttgcttctcccaaatcatctccaccagcttcgtctcctaagcccgcaaccgcaacccctgcttcgtcgccggcggcatctcctaccaccacccccgccgcgcctgctccagcgaccaagccacctgcagcctctcctccttcggcgccggttcccgtgagctctcccccc

SEQ ID NO: 46833 - DNA, 418 bp, Glycine max
  unsure at all n locations
  Clone ID: LIB3139-106-P1-N1-F8
ctcgagctgtanttggctcgagaaaaccgntgtcttctcacttcgtcaaattcaaccaaacccctgcccaattctcaagccaaccatgtcttccttcaagagcaagtaccaagatgaactcattgccaatgctgcttacattggcaccccagggaagggtatccttgctgctgatgagtcaactggtacaattggcaagcgattggccagcattaatgtcgagaatgttgaagcaaataggcgtgctcttcgtgaactcctattcaccacacctggtgcttttgagtgcctcagtggtgtgatcttgtttgaggaaaccctataccaaaagacagctttaggaaaacccttcgtagagttgatgaaggaaggaggagttcttcctggtttaaggttgacaagggcacagtagagcttg

SEQ ID NO: 46834 - DNA, 399 bp, Glycine max
  unsure at all n locations
  Clone ID: LIB3139-106-P1-N1-F9
tggcagtgcnngtgnatagcatcaggatttcattgaggctacccacgaaggaagtcttacctttctgtcagcaaagttcgatggaatactgggacttggatttcaggagatctcagttgaaaatgctgtgcccgtatggttcaaaatggtggagcaaaaacttatcagtgagaaggtgttctctttttggcttaatggggatccgaatgcgaaaaaaggtggtgaattagtttttggtggtgttgacccaaagcacttcaaaggaaaccacacttatgttccaattactgaaaaaggttactggcagattgaaatgggagattttttcgttggaggtgtttcaacaggtgtttgtgagggtggctgtgctgctattgtggatcaggaacatctttgctt

SEQ ID NO: 46835 - DNA, 439 bp, Glycine max
  unsure at all n locations
  Clone ID: LIB3139-106-P1-N1-G10
ttggaatctttccatanctcatggaatggactggtttggccaatagattactgagtaagggcaatgatattctgtgttgcgattatgctagttttgatggtttgattaccaagcaagttatgagcaagatggcagaaatgataaacagtctttgtggtggtgatgaaaaattgatgcgtgaaaggacgcacctgctgttggcttgttgttcaaggatggcaatttgtaagaaagatgtttggagagttgaatgtggaatcccttctggatttccgctcacagttatttgcaatagcatttttaatgagatgctcattagatatagctatgaaaaattactgcgccaggctaaagctccaagtatgtttttacaatccttcaaaaattttggttctttgtgtgtgtatggtgatgataacttaattagtgttcatgaaat

SEQ ID NO: 46836 - DNA, 439 bp, Glycine max
  Clone ID: LIB3139-106-P1-N1-G2
gctggtcataatttttcctttactgatggtattgacaaaactagtgcaactttgcaatttagaaagttagcagattgtgattttctcaagagaaactttaagcagatgtctaatgttttatgggtggctcctgaggacaaggcgagtttatggtcacaacttcattatgtttcgtgcaataatctggaaatgcaagaagcttatcttgtcaatctcgtaaatgtgttacgagaattgtatttgcacagtccagaggaagctcgccaattgagaaggaaagctctctctcgtattgaatggctgcaaaaagctgatgtgcctaccatagcacagattgaagagttccattcgatgcagaggatgatgaatgctcctgattcaaatgataatattgatctactgttgagcattgatttgttgggtttacaaggagcaggta

SEQ ID NO: 46837 - DNA, 432 bp, Glycine max
  Clone ID: LIB3139-106-P1-N1-G3
ctggtgatgtgctttcggtttcaatcaagggttcaagaactggttggatgccaatgtcaagaaactggggtcagaactggcagagcaataactacctcgatggtcaaagcctctcctttaaggtcaccacaagtgatggcagaactattgtgtccaacaatgttgccccatctggctggtcctttggccaaacctacactggtgctcaattccgctagatcttggtgtccaaagttctaagtcacacattcaaatactactactatatagcataatagatatatggtattagtaggttctaagagtattattattatgagtttatgatgactggttagtatactagggtattagatagtatgctgctaggggaaggggtcagttttttggtaatttttgaaggccagggaattaagatttaagaaggggtat

SEQ ID NO: 46838 - DNA, 393 bp, Glycine max
  unsure at all n locations
  Clone ID: LIB3139-106-P1-N1-G5
gataaacagnctttttggtgntatgaaaaattgatgcgtgaaaggacacacctgctgttggcttgttgttcaagaatggcaatttgtaagaaagatgtttggagagttgaatgtggaatcccttctggatttccgctcacagttatttgtaatagcatttttaatgagatgctcattagatatagctatgaaaaattactgcgccaggctaaagctccaagtatgtttttacaatccttcaaaaattttgtttctttgtgtgtgtatggtgatgataacttaattagtgttcatgaatatgtcaagccttactttagtggttctaaattgaaaagctttctagctggtcataatatcaccattactgatggtattgacaaaactagtgcaact

SEQ ID NO: 46839 - DNA, 410 bp, Glycine max
  unsure at all n locations
  Clone ID: LIB3139-106-P1-N1-G6
caaggctgnggaatgncttttttgctttgaacggaaaattgactggtatggcattccgtgttcccaccgtggatgtctctgttgttgacctcacagtgaggctggagaaggaagcctcctacgatgaaattaaaaatgctatcaaggaggaatcagagggcaagttgaagggaattcttggttacactgaagatgatgtggtctccaccgactttgtgggcgatagcagatcaagtatttttgatgcaaaggctggaattgcattgaataagaactttgtgaagcttgtctcttggtatgacaacgagtggggatacagctcacgtgtcattgacctgcttgtattcgttgccaagaagtcttttaaggttgtactgaaaaaaaagtagcttgtctagacattatgtgct

SEQ ID NO: 46840 - DNA, 418 bp, Glycine max
  unsure at all n locations
  Clone ID: LIB3139-106-P1-N1-G8
ggaagntcctccttgcttatagagtgaaaaaaaccaatatcagtccactgtacaagccaggggaaacttttcagagtgcagatctgtagcactaacactgctacaaaaagcgaaagaatcatgttcctatcagcactgtgacataggatcaactttcataccaaagcttcaggggaaatttttggccacagaaaatttcttttacacatcaaagttttttggattgacgccaagggcctatctgtccaagttgatgaatgctgggaaagaattctgtggcaaggattggttaaggctgaagaaaaaatatgtctcccatgatgaggaagatttacttcggtattgcttctcttcagcatacattgttgctctgcttcacgacagtcttggaattgctttggatgatgagagggtcaag

SEQ ID NO: 46841 - DNA, 226 bp, Glycine max
  unsure at all n locations
  Clone ID: LIB3139-106-P1-N1-G9
gaggagagagagtaaaggttaagncagctnacatatctataaactgtactgttctgaggcttttgggtgccgccccattatagcagtaatctctctttctgtgttgtggcaagcatcaatgatggcaagtgattattggctggcatatgaaacatcagaagagcgtgctcagttgttcaatccttccatgttaatttccatctacgcgattatagcggtagtttca

SEQ ID NO: 46842 - DNA, 408 bp, Glycine max
  Clone ID: LIB3139-106-P1-N1-H1
gtgagactgaggtttggattggaaggcaagggcttgtgttgtcacaatccaagatagaagtaatggcgaacatagacatcgaagggatcttgaagcagcagcagccttatgatgggcgcgttccgaagacgaagatagtgtgtactttgggccctgcttctcgatccgtagaaatgaccgagaagcttctgagggcagggatgaaacgttgctcgtttcaatttctctcatggcacccacgactatcacccaggaaaccctcaacaatctcaagactgccatgcacaacactggcatactctgtgccgtcatgcttgacactaagggacctgagattcggactggttttctgaaagatggaaaacctattcaacttaaagaagggcaagaagtcaccataactactga

SEQ ID NO: 46843 - DNA, 399 bp, Glycine max
  unsure at all n locations
  Clone ID: LIB3139-106-P1-N1-H10
ctcgagccttttaatcgttacttgntaagggctgcactataccagaatgttttagggaagaggcagtgcatctttgcctattgtggtcactgtggtttcactactgtgccttttggaacgtgctaacgcagcaacttactccgttggaggacctgggggatggaccttcaacactaatgcttggcccaatggaaaaagattcagagctggtgatatcctaatcttcaactatgactcaacgacccacaatgtggttgctgtggacagaagtggatacaacagctgcaagacaccagggggtgctaaagtgttcagttcagggaaggaccaaatcaaactagcaagagggcagaactacttcatatgtaactaccctggtcactgcgaatctgggatgaa

SEQ ID NO: 46844 - DNA, 418 bp, Glycine max
  unsure at all n locations
  Clone ID: LIB3139-106-P1-N1-H12
ctcgagccttttcgtcncgagattgaattntgattctagcaagcagagcttttgtcaattttctattgaccttctcggtggaggaattttagtggacaaaactggagattggatcacacttatacaaaattctccaattagtaacttgttgagagttgctgcttggaagaaaggttgtttaatggtcaagattgtgatgtctgggaatgcagcagtcaaaaggagtgattgggcctcattggtacaagtgtttttaacaaacagcaacagtacagagcattttgatgcatgtaagtggacaaaatcagaaccacattcctgggaattaatcttcccaatagaggtatgtggtcctaataatgggtttgaaatgtggagttctgagtgggcaaaacaaacttaatggcatttgagtttc

SEQ ID NO: 46845 - DNA, 440 bp, Glycine max
  Clone ID: LIB3139-106-P1-N1-H2
gcaaatgctcttctttctagcaaagagaaattcaggagctaaggcatagtcttcactccacaaaagatggtatgcagttcatgcaaatgaaatttcacgaagacttctccaatcttggcacgcacattcatggcttagctaatgctgcttctggatatcatagagttcttgaagaaaatcgcaaactatacaatcaagtccaggatcttaagggaagtattagggtgtactgtcgagtaagacccttctttcctggacaatcaaaccatttgagtgcagtggaaaatatagaagatggaaccatcacagttaatattccttcaaagaatgggaagggacgaaggtccttcaactttaacaaaatttttggaccatctgctacccaagccgaggtctttctagatatgcagccactcgttaggtctgttcttgatggttta

SEQ ID NO: 46846 - DNA, 394 bp, Glycine max
  unsure at all n locations
  Clone ID: LIB3139-106-P1-N1-H5
gttnctnccttnctttggcatttttcttctctgacacatttggtgccttgtatagcgtgttttggcaggaaggtggtatggcgaaggacgttgaggttgctgagcgtggctccttctctgggaaggactaccaggaccctccaccagcaccactcattgatgctgaggagctcacaaagtggtccttttacagggctctcattgctgaattcattgccactttgctcttcctctacattactgtgctcacagtcatagggtacaagcaccagactgacctcaaggaaaatggtgaaatctgtggtggggttggcattcttggcaatgcatgggcctttggtggcatgatcttcatccttgtctactgcactgctgggatctaagggggtcacat

SEQ ID NO: 46847 - DNA, 449 bp, Glycine max
  Clone ID: LIB3139-106-P1-N1-H6
ggaaccaaaaatcattttctattctcgttggtaccaagaatggcacactacaacgtggttttgaagagtattgaggttgatacagatattctacagcttccctcagatatatttgattctgtaaatgggaagggtacagtaatagatagtggaacaaccttggcttatcttcctgccatagtttatgatgaactgattcaaaaggttttggcccggcagcctggactgaaattatatcttgttgagcaacaatttcgttgttttctgtataccggaaatgttgatcgtggatttccagttgtcaagcttcattttaaggattctctttctctgacagtttatcctcatgactacctgttccagtttaaagatggtatctggtgtattggctggcagagaagtgtagcacaaacaaagaatggaaaggacatgacccttcttggagattt

SEQ ID NO: 46848 - DNA, 393 bp, Glycine max
  unsure at all n locations
  Clone ID: LIB3139-106-P1-N1-H7
cgcanaaccaaaatanatactctctctctctctctctctgtgtgtctctctttgggtctgggtcgccccctctatgtgcgctgatgcgtttctacaaaaacacaacctttgaactgtcttttctacttctttgcttgctccttatttcttccttcgccgaatcctagaatgtcctcgtcggggttccctggcggcggtggtgcgtcggagtttttcgccggggtaggtggtttcggcggcagatccattccggcgaccagcatgaacaacctcaacgccgtcgtctccggcaccaacaacaacctccaccctctctaccgaacccaacaacaacaacagcagctacagcaacagaacctcctcgcaatgttttgagattcctcctcgcagatc

SEQ ID NO: 46849 - DNA, 431 bp, Glycine max
  unsure at all n locations
  Clone ID: LIB3139-106-P1-N1-H9
gttttngtgttcggtggtccaaacactcttctctgcagcttttgcctacaactcccttcaccatggctgaacaaaccgagaaagcttttctgaagcaaccaaaagtgtttctcagcacaaagaagactgggaagggaaagagacctggaaaaggtgggaaccgcttttggaagtccattgggcttggatttaagactcccagggaagccatcgaaggaacctatattgacaagaagtgccccttcactggcaatgtttccatccgtggccgtatcttggctggaacatgtcacagtgctaagatgaacaggactattattgttagaaggaattatctccattttatcaagaagtaccagaggtacgagaagaggcactcaaatattcctgctcatatatcacctgccttccgtgtgaaggaggggatcacg

SEQ ID NO: 46850 - DNA, 445 bp, Glycine max
  Clone ID: LIB3139-107-P1-N1-A1
gggggaagttatgcttctcatgatgtttcaaatggaacacatgttgctggcaatgttgattcttctgtcagaggtcatggggcttcggatgctggagctggactatctcctgagtcttatcgacatcggcatgaaatatctgtgactggagacaatgtacctccaccccttgcatcatttgggtcaactggctttccatctgagcttctgagagaggtacaaaatgctgggttctcagccccaactccaattcaggcacagtcatggcccattgctcttcaaggtagagatatagttgccattgctaaaacaggctcaaggaaaaccttggggtatttagttccggcatttattcacctcaagcgctctggcaataactccaaaatgggccccactgcattggtactttcaccaacaagggagttggcaacacagatacaagatg

SEQ ID NO: 46851 - DNA, 435 bp, Glycine max
  Clone ID: LIB3139-107-P1-N1-A10
ccttctcacaccaactgccatccattgccttcatcatgagcggcgccaccactcctctgccctccggcgtgagcaccccggacatccgcacccgcgagctcaagcagcccatggacgtggcggagtacctcttccgccgtctgcaccaagtcggcgtccgctctgtgcacggcctgcccggtgactacaatctggtcgccctcgactatctgcccaagtgcggcctcgactgggttggtaacgtcaacgagctcaatgccgggtacgccgctgacggctacgccaggatcaagggcatctctgccatcatcaccaccttcggtgttggtgagctgtctgccatcaatgccattgctggtgcctactcggaatatgttcccgtcgtccacatcgtcggctaccccaccactgccgctcagaagaacaacctcctgc

SEQ ID NO: 46852 - DNA, 434 bp, Glycine max
  Clone ID: LIB3139-107-P1-N1-A11
acgttacaataatggcccatttttctctctcccctctctcctgtgcaccttctcctctaccaccacgccgccgaatctttctctctcctcctcgagccgccgcatcttccgccaccgacgtcgtttccacttccacttccacttcatcttctgcttcgaatttcgcgcccaaagtcgttgtcaccagagagcgcggcaagaacgccaagcttatcgctgctctggctaaacatgaaatcaattgtttggagcttccactcattgagcacatgcaaggacctgatttagataggcttccttctgtattaggtgacaatgcatttgattgggttgtgataacgtctcctgaggcaggctcagtctttctagaggcatggagagcttctgggatgcctcatgtcaaaataggtgttgttggggctggcactgcaagc

SEQ ID NO: 46853 - DNA, 426 bp, Glycine max
  Clone ID: LIB3139-107-P1-N1-A12
gagttccattcgatgcagaggatgatgaatgctcctgattcaaatgataatattgatctactgttgagcattgatttgttgggtttacaaggagcaggtaaagcttttccaaacaagattgtttttgatgataagcttgtgttggctaacacacaagaattctttgatggaaattttccagtggattcttggttaccaatttttgtgaattgtctttatcctgtaagtcaattaccttcagaagctgtcgttgtaaatgttacatgtggtagtggacgtggtggtttacccaccactgcttggattagttttgcagttaacaattgctttttagatatcaacaaaaagatttgcacagtacttgggataggtatgaataatgtttttcttaccataagtgatacttttttcagtactttactggct

SEQ ID NO: 46854 - DNA, 443 bp, Glycine max
  Clone ID: LIB3139-107-P1-N1-A2
ggcacccatcagccaacagagtcgttgcgggacgcacctgagttgaccaagctgtaagaaattccaggtgattttgtcattggtgttaagttgacaaccataaacaatatgtgtgcatatgggctcaatcctggtatttcaggttctcgtcttttgggcaccattcctcagtccatttcacagcaaactgtttggaatcaaatggcaacagtgagaacaccattgaattttgattctagcaagcagagcttttgtcaattttctattgaccttctcggtggaggaattttagtggacaaaactggagattggatcacacttatacaaaattctccaattagtaacttgttgagagttgctgcttggaagaaaggttgtttaatggtcaagattgtgatgtctgggaatgcagcagtcaaaaggagtgattgggcctcattggt

SEQ ID NO: 46855 - DNA, 445 bp, Glycine max
  Clone ID: LIB3139-107-P1-N1-A3
caaagagacgaagccttcgaatctctctgaaacttttctcttctctttgattcttctctatcagttgaacattagaatgagccgttcacaggatccacacccttcccgatctttcttcccttttggaaatccttttcggatgatatcacctaaaggctctcgcatgtctccacaacttcttgcagtgttgcaagcttttgaggcaacattggcagagaggctgaaaaatcttatgcctaaaagcaaggatgaaatcctcaccttgtcttggatgactttagctatgaagtcactttgtgaaagtcacaatgacatacggacccttatgactgcccttgagcttcctgtgagtgattgggaggacaaatggattgatgtgtacttggacataagttcaaagttgctagacatttgcaatgcattcagctctgagctttcacgtctg

SEQ ID NO: 46856 - DNA, 438 bp, Glycine max
  Clone ID: LIB3139-107-P1-N1-A4
taagatttgaaattttgataaaccgcgatcacaggttgccgcaccttaaaaccggaaacaaaagcaatcgttacttgatttcaagaatttctcaatttcttcctacttctttgtgtacgatttcttaagggaaagaaaatcactctctgtgctggccacagacttcgtgaatcattttcttttccactcttagtttatttgctgaacactctcctatttgatataggacttcgtgtcagatttaaacttcttctgtttccttctcagttctctgtttaatttcaagttcaagctggtgaaatcttggattagtgctcccactctcctatctggtataggacttcgtgggtagacttttctatttctctcctttctttcactctcttcttctcactgatccgcattgccgttcaaagtggtcttatttgaaaaacactt

SEQ ID NO: 46857 - DNA, 435 bp, Glycine max
  Clone ID: LIB3139-107-P1-N1-A5
cactcttcgttcttcgactgtctacgatctgctttctctgaattgtgaaaatgtcgctcggagaaactgcttgttcatacgcagctctcatccttcatgaagatggaattagtgtaactgctgacaagatcagcaccttgttgaaaactgcaaaggttccagtagactcttattggccaaccttgtttgctaaacttgctgagaagaaaaatcttggcgatttgatagcaaatgcggcaggcggtggtgcaccagttgctgttgcagctgccccagttgctgctgctgctggtggtgctgctgccgcagctccagctgctgaggagaaaaagaaggaagaaccggaagaagagagtgatgatgatatgggattcggcttgtttgattagggacattctcaatgatttggttaaattttggggttctttacctttt

SEQ ID NO: 46858 - DNA, 380 bp, Glycine max
  Clone ID: LIB3139-107-P1-N1-A6
aaacatacttggagctttagcctggcgcagtatgtttttacaatccttcaaaaattttgtttctttgtgtgtgtatggtgatgataacttaattagtgttcatgaatatgtcaagccttaatttagaaccactaaagtaaggcttgacttcaacgggtacactatactcgtattggtcaaccttgtctcccaaagttgctgtgaacaaaaagcttggcgatttcatagcatactcggcaagcgcaggtgcaccagtttctgttgcagttgcctcacttgctgccgctgctagcggtgcagattgctcatctctagctgctccggagaaaatgaatgttagaacttcaagaagtgagttattatattttgggatttttttt

SEQ ID NO: 46859 - DNA, 429 bp, Glycine max
  Clone ID: LIB3139-107-P1-N1-A9
ccttctcacaccaactgccatccattgccttcatcatgagcggcgccaccactcctctgccgtccggcgtgagcaccccggacatccgcacccgcgagctcaagcagcccatggacgtggcggagtacctcttccgccgtctgcaccaagtcggcgtccgctctgtgcacggcctgcccggtgactacaatctggtcgccctcgactatctgcccaagtgcggcctcgactgggttggtaacgtcaacgagctcaatgccgggtacgccgctgacggctacgccaggatcaagggcatctctgccatcatcaccaccttcggtgttggtgagctgtctgccatcaatgccattgctggtgcctactcggaatatgttcccgtcgtccacatcgtcggctaccccaccactgccgctcagaagaacaacc

SEQ ID NO: 46860 - DNA, 441 bp, Glycine max
  Clone ID: LIB3139-107-P1-N1-B1
cggctcgagcaaagtcctagctagcattaacactataaatagacctccgttttgctctcaatcctcagaccaccttgtctatcaaacattataatttctattacatacattttgtagctaggatgagcaagttactactcattcgtgttgctgggttcgtggcaacctttgtcaccatggtgatgatgatggtgcccaaaaacgtgagtgcccaaaacataggtgatgacatcgtcacacaagacttcttcaacagcataatcagtcaggctgatgatggttgtgcagggaagaacttctactcacgagatgctttccttaatgctcacaattcctacaatgagtttggtaggcttggtaatcaggatgactccaagcgtgaggttgcagctgctttcgcccatttcacccatgaaacaggacatttttgctacatagaag

SEQ ID NO: 46861 - DNA, 436 bp, Glycine max
  Clone ID: LIB3139-107-P1-N1-B10
ctagaatcgaagttagcaccttgctatcccggagatgaagaaaccgcatacgatcgtgaagagtgcccgatttgctttctgtattatccaagtctaaaccgatcaagatgttgcacaaagagcatttgtacagagtgctttttgcagatgaaagttccaaattcaacccggcctacacaatgtcccttctgcaaaacggcaaattatgctgtggagtatcgtggtgtgaaatctaaagaagagaagggattggaacagattgtaagtggttacctaacatgattattgggtttaggaatgcattttcagaaatattttcacatcgaatcaggttcatgtgcatactcataattattcaggaagagcaacgtgttatagaggcaaaaattaggatgcggcagcaggaacttcaggatgaagaggaaagaatgcacaa

SEQ ID NO: 46862 - DNA, 411 bp, Glycine max
  Clone ID: LIB3139-107-P1-N1-B11
gattcatcattttccaaacgagcgtcttcgtagtttcttaggtcgagagaagaagtgaagtgctgcttcaatggcttcaagtcaggaagaggtgatccttttgggggttattggaagcccatttctgcacagggtgcagattgctctcaaattgaagggagttgaatacaaatatttggaagatgatttgaacaacaagagtgatttgctcctcaagtataacccagtttataaaatgattccagtgtttgttcacaatgaaaagcccatatccgagtcccttgtgattgttgagtacatcgatgacacatggaaaaacaaccccatcttgccttctgatccttaccatagagccttggctcgtttctgggccaagttcattgatgacaagtgcgtggctctagcagcgaa

SEQ ID NO: 46863 - DNA, 435 bp, Glycine max
  Clone ID: LIB3139-107-P1-N1-B12
gcaccaatcaccgatagggattctatgcatatgaggggctgattgtccgcgtttggacaactgcatactcctatccgccccacgctgccattgcctccaccacctcgtcagccacaactccacctccaccatcataaccaacagtttcagggccaggcagctgcagctccagcgtcaatggctgctatgccacaaccacctgggatccgccctcgtgtgagagcaagaagagggcaagctacagatcctcacagtattgctgagcggttgcgtcgtgaaagaatcgctgaaagaatgaaggcattgcaggaattagttcccagcatcaataagacggacagagcggcgatgcttgatgaaattgtggactatgtgaagttccttaggcttcaggttaaggtcctgagcatgagtagactgggtggagctggtgct

SEQ ID NO: 46864 - DNA, 442 bp, Glycine max
  Clone ID: LIB3139-107-P1-N1-B2
ccggcacgcaaatacaacatcgttgttctgttctgttctgtagctaatagatcccatctactggtacttttattattctgtctccttcttcactttttttctccaatggaacactcaaaagatttggacgctctctattacttttaaacttcattttctgcctcagatcctttcttttcacactacctcgaaagaaaaaaaagacatgtataagaatcggttgcaagaattggctcaaagaagctgttttaatttgccggcctattcatgcattcgcgaagggccagatcatgctcctcgttttaaagcaactgtcaactttaatggagagacctttgaaagccctacattctgctctactcttagacaggcagaacatgcagcagcttgagtggctcttaacactcttgcaaaaagaggtccctctagagctttggcagca

SEQ ID NO: 46865 - DNA, 444 bp, Glycine max
  Clone ID: LIB3139-107-P1-N1-B3
cacaattcagtttgtaaccaatgttatcattcatggcttgcacatgcatgattgcaaacctactggaaatgctatggtgagaagctccccaacacattttggttggaggacaatggctgatggagatgctatctccatatttggctcaagccacatttgggttgaccacaactccttgtcacactgtgcggatggccttgtggatgctgtcatgggctcaacagccattactatttccaacaaccacttcacccaccacaatgaggtgattctactaggccacagtgactcttacacaagagacaagctgatgcaagtgaccatcgcatacaaccatttcggagagggacttatccagagaatgccacgttgtagacatggatatttccacgtggtgaacaatgactacactcactgggagatgtatgctattggtggaagtgc

SEQ ID NO: 46866 - DNA, 439 bp, Glycine max
  Clone ID: LIB3139-107-P1-N1-B4
cggctcgagctactcacaactcacagcacaaaccgtaacagaaccaaacaatgagaacccaacggcttaaccatctccttctctccctcttcctcttcgcagccgcattctccagcctccacccgacggccaccgccggagacgaaggcgcaccgtctgcaggcgacggcgaccgcgacgccgatttcatccgcactagctgcaacaccacgctctacccggaagtgtgtttcacctccctctctcgctacgccaatgcggtgcagcagaaccccggccatctggcgcgtgtggccattgccgtaagtctctcgaaggttcaccgtgcggcgtcctacgtctccaacctcacgcgcgacgccgactacggcggaagcacgcgcgccgctcttgctctgcacgactgcttctcgaatctgggcgacgccgtggacgaaat

SEQ ID NO: 46867 - DNA, 438 bp, Glycine max
  Clone ID: LIB3139-107-P1-N1-B6
ctctgagcaggaaatgaaggctggatatgaaaaagctaagtctaatcctggctatgctcgactccaacagaatgctaaggttattggtacatgggatgatcacgattatggattaaatgatgcagggaaagaatttcatggaaaaataaccaaccaaaagttgcttcttgatttcttggatgaacctcaagatagcccacggcggaaacaggctggtgtatatgcctcatatacgtatggtcctgtaggtagagatatcaagattgtcctcttagataccagatatcacagagaccctgtaggaagtgatggaaccattttggggaattcacaatggttgtggttggagacagagctcaagggtccaccaacagctcttaccataattggatcttctattcaggttatatcaaatctttcagctaccattcatccatt

SEQ ID NO: 46868 - DNA, 367 bp, Glycine max
  Clone ID: LIB3139-107-P1-N1-B7
agattacgctgctttatttcatgatggaggaggtcaaactgcccgttcctaaagtcgacatcggggaggctcataattaataaactactttctgctgaacaagagcatgcttgacaccgtgctctacaccagggacaggtacctggatactggtgttatcattttccctgacaaggctaccatatttctaaacgttattgacgactgctagtccaaagaatagaacattcgcttacaggacaacatatggagctttgactacacgccgctcaagaagactgccatgaccacatcactttgttgacactgactatatgaaagccgcagttacagacccttctgtcgtgttcacaatcgacctttacac

SEQ ID NO: 46869 - DNA, 402 bp, Glycine max
  Clone ID: LIB3139-107-P1-N1-B8
tattagcactgagtaacacgcccgaatatggcaccctcaatctccgacgaaatgccaagcacgaccacctctctcctccgccgcaaccggtggctcccctccagcatcaaactgaaaacaacccttttctcagaactctccggcgcggtgggtgacctaggcacctacatccccatagttctagccttatccttagtgaacaacttggacctcaccaccacactggtcttcactgctctctacaacatcgccaccggtctcctcttcggcctccccatgccggtccagcccatgaagtccatcgccgccgtcgccatctccgcagcgccccccctcaccatcccccaaatctcggccgctggcctcttcgtcgccgccgggctcctactcctcggtgccacc

SEQ ID NO: 46870 - DNA, 438 bp, Glycine max
  Clone ID: LIB3139-107-P1-N1-B9
ctagaatcgaagttagcaccttgctatcccggagatgaagaaaccgcatacgatcgtgaagagtgcgcgatttgctttctgtattatccaagtctaaaccgatcaagatgttgcacaaagagcatttgtacagagtgctttttgcagatgaaagttccaaattcaacccggcctacacaatgtcccttctgcaaaacggcaaattatgctgtggagtatcgtggtgtgaaatctaaagaagagaagggattggaacagattgtaagtggttacctaacatgattattgggtttaggaatgcattttcagaaatattttcacatcgaatcaggttcatgtgcatactcataattattcaggaagagcaacgtgttatagaggcaaaaattaggatgcggcagcaggaacttcaggatgaagaggaaagaatgcacaaaa

SEQ ID NO: 46871 - DNA, 434 bp, Glycine max
  unsure at all n locations
  Clone ID: LIB3139-107-P1-N1-C10
cgttgcttggtgatgtctctttctgttctcttcactcttggtcgggcgagagaaagccatgcgggggacgaanatttttggcatgctgtttggccaaacactcccattccaagttcattgcgagatcttctaaagcctggccctgcaagtgttgaaatcgatgatcaccctatgcaaattgaagaaacacagtacccgaaaaccttcttctataaagaagaccttcatccaggcaaaacaatgaaagtacaattcagcaagcctccctttcaacaaccatggggtgttggtacatggttaaaggaaattaaagacactactaaagaaggatatagttttgaagagctatgcatcaagaaagaagccattgagggagaagagaagttttgtgcaaaatccttgggaacagtaattggttttgccatttcaaagct

SEQ ID NO: 46872 - DNA, 435 bp, Glycine max
  Clone ID: LIB3139-107-P1-N1-C11
ctcgagccgaatcggttttagcttcgttttaagaaaaagagcatggtggaggaaaagcgcgtgggaggtttgctagcgaaattgcgatttatttattaccaaagagaagaaaaaaagagaaaagaagaggcgaatggcagatcagagcgagcattcgaaaacggcgtcgcctccggaggaccaggaccgtcccgttcgagtgtacgcggatggcatctacgatctcttccactttggccacgctcgctccctcgagcaagccaagaaatcgtattcatcaatcatttcccaatcctttgctttgcctccgagatctgataatagatttcatttatatcaatccatttattaatagaaggcatttcttcaaggttccattcacatacactcttactttggtattttaggtttccgaatacatacttgcttgttggg

SEQ ID NO: 46873 - DNA, 432 bp, Glycine max
  Clone ID: LIB3139-107-P1-N1-C12
cggctcgagaaccgttgtcttctcacttcgtcaaaaccaggcagagcgccctccccaattgtgaggccggccatgtcttccttcaagagcaagtaccaagatgaactcattgccaatgctgcttacattggcaccccagggaagggtatccttgctgctgatgagtcaactggtacaattggcaagcgattggccagcattaatgtcgagaatgttgaagcaaataggcgtgctcttcgtgaactcctattcaccacacctggtgcttttgagtgcctcagtggtgtgatcttgtttgaggaaaccctataccaaaagacagcttcaggaaaacccttcgtagagttgatgaaggaaggaggagttctccctggtatcaaggttgacaagggcacagtagagcttgcaagaactaatggggagactactact

SEQ ID NO: 46874 - DNA, 444 bp, Glycine max
  Clone ID: LIB3139-107-P1-N1-C2
ctctctctctgtttcgctttcaccgaagaataacttgactttcgggaactccacctgagaaagaggggacggttaattcgcaggcgcgtcttgtgttggacaacaaccacaagatgattaacttcgaagaaaccgagttgcgactcggcctccctggcaacgactcagcactcaagggaagtgctgccaagagaggcttctctgaaactgcttctgttgatttgaagcttaatctttcttcttgcattaacgactctgcctcggattcaccctcatctatgtctacagagaagcccaaagagaacaagactaccactgctgaacctcctccagctaatgatccagcaaaaccacctgcaaaggcacaagtggtggtttggccaccagttaggtcatttagaaagaacatagttcaaaggaacagcaatgaagaagaggcagaga

SEQ ID NO: 46875 - DNA, 436 bp, Glycine max
  Clone ID: LIB3139-107-P1-N1-C3
gcctctcttccatctccccagccaaaacctctctcaggaaggccacatggcgcccttccgtcttcgcaacgccttaacactccttcttctccttcctcttcatcttccttcccctctctcattcaagacaggcctgtttttgctgcccctgcccccatcatcaccccaactgtgagagaggatatggcaaaggaatacgagaaagctattgaagaacttcagaaattgttgagggagaagagtgaactcaaagcgacagctgctgaaaaagtggagcagataacagcttctctagggacatcatcatctgatggcatcccatcatcagaagcctcagacaggatcaaagctggtttcattcacttcaagaaggagaaatacgacaagaattcagctttgtatggtgaacttgccaaagcccagagccccaagttca

SEQ ID NO: 46876 - DNA, 437 bp, Glycine max
  Clone ID: LIB3139-107-P1-N1-C4
ctctcagtctccgatccaatatgacggaggaacggaacgtgcggaagacacgtgtggtcgacgtgggcctcgactgcgtcatcccttacatcgacgaccccaaggaccgcgacgccgtttcccaggtgtgtcgacgctggtacgagctcgactcgctcacccgcaagcacgtcaccatcgcgctctgctacaccaccaccccggctcgcctccgccgccgcttcccgcacctcgagtcgctcaagctcaagggcaagccccgagccgcaatgttcaacttgatacccgaggattggggcggacacgtcactccctgggtcaaagagatttctcagtacttcgattgcctcaagagcctccacttccgccgcatgattgtcaaggattccgatcttcagaatctcgctcgtgaccgcggtcacgtgcttcacgctctc

SEQ ID NO: 46877 - DNA, 433 bp, Glycine max
  Clone ID: LIB3139-107-P1-N1-C5
ccatacatgaattcaaggttttagcttttgagtaccactaccaatggggattttgttcaaggaaaggatggggcaatggttaaagttaatgtagcatgtgctgctgttggcttgacatcaagttacactccaactccattgttggaatctggtttgcaaaaagacagagggttgattgtggagtattttggaaggatgtcttacgttgctcataacgttaatcagccccaagagaaagatttgttggagggaaatttttcctttgatattaaatctctctctagattggaaaaagttttctctacaaaatcacaatttgttagtggaaaaaccttcaaatatgatataattggtgctggttcacattcttcagatggtttttctgaaaaggaagatctagaaaaacccataaagattgatgccagattgagac

SEQ ID NO: 46878 - DNA, 432 bp, Glycine max
  Clone ID: LIB3139-107-P1-N1-C6
tctcaacatggccttgagccgctgtttactatccttatcccaaagggtgaaagcaccatcaacaatgagggttcaatatttgcttactcagtctgctatgactggagtaaaggggcagaaaattctaatcctgcaacagcaaagacctacattttcctgcacttgcctcaggaatctgaggtcaggggcaaaccacgcattggtgctactgggagaaagtagagatgatcctgctctgggaaactgttctattatgtatatagttggctagtacttgtataaaggtataagttgatatcaaaatatagaggttgaatgggctggtcgttcttgaaagatttttgttttttgtacgctgtacttgaaagaaattatcaactgattcttggtgaaaaattctatgtccaatgtatatatgtatataaagcatat

SEQ ID NO: 46879 - DNA, 442 bp, Glycine max
  Clone ID: LIB3139-107-P1-N1-C7
cccaaccatcttttttttctcgagcacatcttaccctaatgggaggattccccaatgtgatggaaggaatcaataaatcatatacacattttttgtttaatttttgatgccgataaaaaatgccgccgaagcagcagcaatcgaaagctgatttagcgaagaagcagaagattgtagaggacaaaaccttcggtctcaagaacaagaacaagagcaaaaatgttcagaagtatgtccagaacctcaagcaatccgtgcatcccaggcccgatgccgccaaagtcgatgccaagaaaaagaaggaggaagataaggccaaggagaaggagctgaatgagttgttcaaaatcgctgttactcagcccaaagtgccagttggtgttgatcccaagtccatattatgtgagttttttaaagtggggcagtgtgccaagggctttaa

SEQ ID NO: 46880 - DNA, 437 bp, Glycine max
  unsure at all n locations
  Clone ID: LIB3139-107-P1-N1-C8
gtagcctctacccaatttgaggcatttggatctctctggcgtccagaaatctaataaaaaggggatagattgnanatgccctatatcttgagtggcttgatctcgaaggatgtatacaactcgaagagatcggtctgtccgttctttcacgaaagcttacttctctgaatttgagaaattgcaaaagtcttatcaagttgccacagtttggagaggacctaattcttaaaaagctatatctcgaaggatgtcaaagtctcagtcacattgatcaatccatcggttttctaaaaaacctcgatcatttgaatatggaaaactgcaaacaactcaaacgcattgatccatccatcggtttaccagaaaagctcaaagaattgaatttgaaaaactgcaaaaatctagaaagcttacccaatagcatactaggtctcaat

SEQ ID NO: 46881 - DNA, 437 bp, Glycine max
  unsure at all n locations
  Clone ID: LIB3139-107-P1-N1-C9
cgttgcttggtgatgttcctttctgttctcttcactcttggtcttgcgagagaaagccatgccagggacgaanatttttggcatgctgtttggccaaacactcccattccaagttcattgcgagatcttctaaagcctggccctgcaagtgttgaaatcgatgatcaccctatgcaaattgaagaaacacagtacccgaaaaccttcttctataaagaagaccttcatccaggcaaaacaatgaaagtacaattcagcaagcctccctttcaacaaccatggggtgttggtacatggttaaaggaaattaaagacactactaaagaaggatatagttttgaagagctatgcatcaagaaagaagccattgagggagaagagaagttttgtgcaaaatccttgggaacagtaattggttttgccatttcaaagctggg

SEQ ID NO: 46882 - DNA, 443 bp, Glycine max
  Clone ID: LIB3139-107-P1-N1-D1
gggatcttgaaaaactaactgcaaaaattcagcaatattgctacttgttgaatactctatcccctgatttgctggggaacacgtgttcagattatgaggaattgcggaattatctccgtcttcgtggtcgtgaagcctacctgcagaaaagggatattgtggagcaacaagcagcaggcttaatgaaagaagcagagcggttcctaatcttaagcaatatcgatcgcctgtggaaagaacatttgcaggcactaaaatttgttcagcaagccgtggggttacggggatatgcgcagcgggatccacttattgagtataagcttgaaggctataaccttttcttggatatgatggcacaaataagaagaaatgtcatatattctgtatatcagttccaacctgtgctggtaaagcaagatcaggacaaaacagagaatcggaaa

SEQ ID NO: 46883 - DNA, 435 bp, Glycine max
  Clone ID: LIB3139-107-P1-N1-D10
gaggaatcagaatctctttagggagaagaagagaaaatcgggggggaaaatgagcggggcggggaagaaagtaaccgatgtagcattcaaggtgggaaggaacatcgattgggatggaatggcgaagcttctcgtctccgatgaggctcgcagggagttctccaatctccgtcgcgctttcgacgaggttaactcccaactcgaaaccaagttcagccaggaacctgaacccatagactgggattactatagaaaaggaattggcactcgcttggtggatatgtacaaggagcattatgagagcattgaggtccccaagtttgttgacacagtaactcctcaatacaagactaaatttgatgccctattgattgagcttaaagaagcagaggagaaatctctgaaggagtctgagcgtttggaaaaggaaattgt

SEQ ID NO: 46884 - DNA, 433 bp, Glycine max
  Clone ID: LIB3139-107-P1-N1-D11
cggcaacattgtcatgtctggtggtaccaccatgtaccccggtagctccgaccgtatgcagggggggatcactgctcttgccccatcctccatgaaggtcaagatcatcgcgcctcctgagcgcaagtactctgtctggatcggtggttccattcttgcctcgctctccaccttccagcagatgtggatctcgaagcaggagtacgacgagagcggtccttccattgtccaccgcaagtgcttctaagcgtatcctgcgtataactctcgagatcatgacaagcctgttagcggagatatcgatgcatctgcgctgtgttgccacggggatttcagtaacggttgttcacaaaagcgagctttcagttgggtgatcagttacggaggagctcaagccattatggagtgaagtaggatcataagaatgtagctt

SEQ ID NO: 46885 - DNA, 423 bp, Glycine max
  Clone ID: LIB3139-107-P1-N1-D12
cctcaccctaattgtttttcagaccctcccgctcccccaatccgagcgctacaggacacgtggagtgcggaacctgaaacaagatgatatgcactttcgccaaatccattattcataccctccttccagctaatctccacccggccacagtcatactagatccatacttactcgatactttcagaaactaaagccgaatatgctacagaaccttccactaaactaatcaagatacgtgcttataatgcctatcgcgtctcttaaaaattatacagtagaactacatctgcggcatgtccgaaacccttctatactatcttgacgtcatcagtaacctccatttatcaaactgtttcgcatcctgtatattccatggtgcagagcctcttgacaatataatgttttgcccttcatatatgacat

SEQ ID NO: 46886 - DNA, 436 bp, Glycine max
  Clone ID: LIB3139-107-P1-N1-D2
cttctctccacgcccttcttgggtaaccgtctgaagtgcagcaatggcagatggattgcattcgcagcatccatcggtagttcagaagttatctggacagtcttatcttgtgtccaggcttgctcctaatcactccagaaactgttctaccactggtagttacttcaatggaggtttgcagtcttcaggtttggttccagtcacggcacacgcgccggctgagaaaggggtgtctggatttttgttggatttcctgatgggcggagtgtcggcggctgtgtccaagacagctgcggctccaatcgaacgagttaagttgctcatccaaaaccaggatgaaatgatcaagagtggtcggttgtctgaaccatacaaaggaattggcgattgtttcactcgaaccatgaaggatgaaggggtgattgctctttggaga

SEQ ID NO: 46887 - DNA, 437 bp, Glycine max
  Clone ID: LIB3139-107-P1-N1-D4
ggaaaaagttgtgttgaaattttcacaagaggaatttcttacaggggggtcaactcaggtgcgtccggcagcgactctgttggctgatgggtgcccatatttgtatgctatggtgcatgatagttcagtgtctacaataccaggtgattttgtcattggtgttaagttgacaaccataaacaatatgtgttcatatgggctcaatcctggtatttcaggttctcgtcttttgggcaccattcctcagtccatttcacagcaaactgtttggaatcaaatggcaacagtgagaacaccattgaattttgattctagcaagcagagcttttgtcaattttctattgaccttctcggtggaggaattttagtggacaaaactggagattggatcacacttatacaaaattctccaattagtaacttgttgagagttgctg

SEQ ID NO: 46888 - DNA, 437 bp, Glycine max
  Clone ID: LIB3139-107-P1-N1-D5
cttgtttcttgctttctttcttcaccatgtcacttgctgggaaggggagcactgaaatcggggttggggcgaccgctacaaagtggttcaacctcttcgcaacacaactccatcatgttcaaaacctaactgatagagtgcatggaaccaagctgcatcaaggtgaagactggcatcacaacgagacagtcaagcactggacttataccatagatggtaaggttacaacatgtctggagagtattgaatccattgatgaacagagcaaaacaatcacctacaagctcttcagtggtgacattgatcataattataagaactttaagttcatctttcaagccattgatgataatgatcatggcggtactattatcaaatggaccgttgaatacgagaggcttcgtgaggaggttgatcctccatatggccacattgaa

SEQ ID NO: 46889 - DNA, 434 bp, Glycine max
  Clone ID: LIB3139-107-P1-N1-D6
gtcaagccttactttagtggttctaaattgaaaagctttctagctgggggtaatatcaccatgactgatgggattgacaaaactagtgcaactttgcaatttagaaagttagcagattgtgattttctcaagagaaactttaagcagatgtctaatgttttgtgggtggctcctgaggacaaggcgagtttatggtcacaacttcattatgtttcgtgtaataatctggaaatgcaagaagcttatcttgtcaatctcgtaaatgtgttacgagaattgtatttgcacagtccagaggaagctcgccaattgagaaggaaagctctctctcgtattgaatggctgcaaaaagctgatgtgcctaccatagcacagatggaagagtttcattcgatgcagaggatgatgaatgctcctgattcaaatgataatat

SEQ ID NO: 46890 - DNA, 438 bp, Glycine max
  Clone ID: LIB3139-107-P1-N1-D8
attgatggttctgcaaataataataacagtgcaccagctaccaaggctcatgttgtgggatgggctgctataagatcattccggaaaaattcattggctaccacttcaaagaacaatgaagaagttgatggaaaagtgggggttggtgcactgtttgtcaaggtcagtatggatggtgctccctatttaaggaaagtagacttgaagaattactctacatatccagaattatcttctgctctagaaaagatgttcagctgttttactatgagtaagaaagaattagttttatgtggaaaaacttgacctttcaattatttatgtatgaacagtctgcctggatccagttactgcttgttttggtatgatttcaggtaaatgtggatctcatggaattctgggcagggagatgctgaatgaaaccaagctgaatgacct

SEQ ID NO: 46891 - DNA, 439 bp, Glycine max
  Clone ID: LIB3139-107-P1-N1-D9
gaggaatcagaatcgcgttagggagaagaagagaaaatcgcaggtgaaaatgagcggaacggggaagaaagtaaccgatgtagcattcaaggtgggaaggaacatcgattgggatggaatggcgaagcttctcgtctccgatgaggctcgcagggagttctccaatctccgtcgcgctttcgacgaggttaactcccaactcgaaaccaagttcagccaggaacctgaacccatagactgggattactatagaaaaggaattggcactcgcttggtggatatgtacaaggagcattatgagagcattgaggtccccaagtttgttgacacagtaactcctcaatacaagactaaatttgatgccctattgattgagcttaaagaagcagaggagaaatctctgaaggagtctgagcgtttggaaaaggaaattgttgaa

SEQ ID NO: 46892 - DNA, 442 bp, Glycine max
  Clone ID: LIB3139-107-P1-N1-E1
ccgacttgccacaccagtccgtaccctgcagaaaatatacagtgatgctgacttggagaacataccgtttgcagattcgacatttggtcgtggtgctgggacagtacctaaccgtccattattagtgatcgaaccatcttataagatcaatggagatgataagaaaagtcgatcggcacggccagctgttgatcaagataacaagacagctacgcgaaccaaagttgacactgagggggataacaaagttgtgacacctaactctgatgcaaatggaaactctaagacagttgtgactcctaaatctgatgcaaatggaaacactaagacagttgtgacacccaaacctgatcctgaagtgggtgaaaacaagccactgaaatcagattcaagcagggagaacgtggaggtgccagaatctccttctaaatccaaagttact

SEQ ID NO: 46893 - DNA, 425 bp, Glycine max
  Clone ID: LIB3139-107-P1-N1-E10
gtaagggcaacgatattctgtgttgcgattatgctagttttgatggtttgattaccaagcaagttatgagcaagatggcagaaatgataaacagtctttgtggtggtgatgaaaaattgatgcgtgaaaggacacacctgctgttggcttgttgttcaaggatggcaatttgtaagaaagatgtttggagagttgaatgtggaatcccttctggatttccgctcacagttatttgtaatagcatttttaatgagatgctcattagatatagctatgaaaaattactgcgccaggctaaagctccaagtatgtttttacaatccttcaaaaattttgtttctttgtgtgtgtatggtgatgataacttaattagtgttcatgaatatgtcaagccttactttagtggttctaaattgaaaagcttt

SEQ ID NO: 46894 - DNA, 434 bp, Glycine max
  Clone ID: LIB3139-107-P1-N1-E11
acttcttgaccttgttctacatagcttttgttttgcttcacactgtgcctgtgctttatgagaaatatgaagatcatgtcgactcttttggtgagaaagcaattgccgagattaagaagcaatatgcagtgtttgatgcgaaggtattgagcaagatacccagaggacctctgaaagataaaaagaaagattgaagtgggcactagattctgacaaatatgttgtagtggggtttcaggaaccctatgatgtcatattttatttttttagggtccttttactagagacactgtggaagaaaagtatcttatatatttttcttctggctttatatgtacctctcaagaaatcctatatgctgcttatggatgacttgttattgtgttgtatttacatgatgaatacatactctgcatttgaatgctttcgtaaat

SEQ ID NO: 46895 - DNA, 382 bp, Glycine max
  Clone ID: LIB3139-107-P1-N1-E12
gtagatattgttaaaactactacatggaatgctaaaattgcgtcaaatgtaatattagtgggggggtgtttcttatcttctttttttctttttcttttatttatatttttttttttttttctctttcttttttgtttttttgttcttgttttttttcttttttttttttttctttttttttttttttttgttttttttttttttcccttctttttttaattctttcttcttttttcttcttttcttttgttttttttttattctttattttttttttactttttgtgtggttggtgttgtttttttctttttttttttctttatttctcttctaattcttatctttccttttttttttatttttttattttttatttttttt

SEQ ID NO: 46896 - DNA, 440 bp, Glycine max
  Clone ID: LIB3139-107-P1-N1-E3
ggtaatccagctgctgctcttcgtgttacccgtagaagagcagtagatcgcaagaagcaagcaacagaaaagaatgtgttccaatgctatgtttttggttctaaaaatgctgggaagtctgctctgttggattcattattgggaaggcctttctcaaacaattatactccaacaactgttgagaggtttgcagcaaattccattgaattaatagggggaaccagaaaaactcttgtgttgcgggagataccagagagtgaagtatcgaatgttttgtcaaataagggttatttggcagcatgtgatgtagctgtttttgtctatgacagctcagatgaacattcatggaagaaatccagagatttgcttgagaaggttggtagacaaggagatctaactggttatagagtttcttgtcttcttattgccgcaaaggatga

SEQ ID NO: 46897 - DNA, 433 bp, Glycine max
  Clone ID: LIB3139-107-P1-N1-E4
aatagatcctcaatacaatgaggttcaggctcagatggaaacaaatttgtttaaattgtctcttgatgatgttgaaactcctaaaggttctatgttggatcttaaaatttctcaatctaaaattgcacttcccaagaacacagttggaggaaccattctgcgtagtgatctattggcaaattttttgacagagggcaattttagagcaagtgttgatttgcagcgcactcatcgtattaaaggaatgattaaaatggtggccacagttggtattcctgagaatacaggtatagcattggcctgtgctatgaatagttcttttagggggcgcgccagttctgatatttacaccatctgctctcaagactgtgaattatggaatcctgcttgcacaaaagcaatgactatgtcatttaatccaaacccgtgttct

SEQ ID NO: 46898 - DNA, 436 bp, Glycine max
  Clone ID: LIB3139-107-P1-N1-E5
ggaatggactggtttggccaatagattactgagtaagggcaatgatattctgtgttgcgattatgctagttttgatggtttgattaccaagcaagttatgagcaagatggcagaaatgataaacagtctttgtggtggtgatgaaaaattgatgcgtgaaaggacgcacctgctgttggcttgttgttcaaggatggcaatttgtaagaaagatgtttggagagttgaatgtggaatcccttctggatttccgctcacagttatttgcaatagcatttttaatgagatgctcattagatatagctatgaaaaattactgcgccaggctaaagctccaagtatgtttttacaatccttcaaaaattttgtttctttgtgtgtgtatggtgatgataacttaattagtgttcatgaatatgtcaagccttactttagt

SEQ ID NO: 46899 - DNA, 437 bp, Glycine max
  Clone ID: LIB3139-107-P1-N1-E6
ctcctcttccttcgtgaattctggttcagggtggttgccatgtatggcacttagtattttttttccctttttaggattattaggggtgggtgggttgtgtctcgcttagggttccaaagtttgtcgctttgaatggaacctcgtgttgggaataagtttcgcctgggcaggaagatcggaagcggctcctttggggagatctatttaggcactaatattcagacaaacgaagaggttgcaataaagctcgcaaatgccaagacaaagcatccccatttgctgtatgagtccaagttgtacagaattctccagggaggaactggaattcctaattgcagatggtttgtactgtagggagatatacattgttttagtggtggatctgcttgtacccagtctttaagaactatttaacattctgtctgtcataactatta

SEQ ID NO: 46900 - DNA, 436 bp, Glycine max
  Clone ID: LIB3139-107-P1-N1-E7
gctgttctttcaatgtggagatattttgttggagatctcggcttggaagtttctaagatgactggctgcctacattaaatgtacagtctctttcttcatagcatttggaaatttggctgatgataccatcaattttgaggcttttccccacaagctggtgcagtttggagagattcaggaaaaagttgtattgaaattttcacaagaggaatttcttacagcttggtcaactcaggtgcgtcctgcaacaactctgttggctgatgggtgtccatatttgtatgcaatggtgcatgatagtgcagtgtctacaataccaggtgattttgtcattggtgtcaagttgacaaccataaacaatatgtgtgcatatgggctcaatcctggtatttcaagttcttgtcttttgggcaccattccttattccatttcacag

SEQ ID NO: 46901 - DNA, 438 bp, Glycine max
  Clone ID: LIB3139-107-P1-N1-E8
catagacaaggcagagagttcaactttgtcagcctctgagattgcgtctttgcttccaaatgcgacacgctcaattggctaataggcttgaacgcatattgccggtgttggcaagttactctcttctcaattgctccattcgcaccactgaagatggtgtgagagagagactctatgctctctcaccaattggtcaatactttgcctctgacgacgatggaggctctttgggtcctctctcaagcttatttcatcgtggatattttcacgtcttgaaagacgtaaaggatgcaattatggaccctaacaacaacgaccattttcaaaatgtccacggaatgcctccttatcaatatatgaagacagacgaagaacttaataaactatttaacaaaacattggcccaaactggccctcctgcaatgaaaatgctcctta

SEQ ID NO: 46902 - DNA, 430 bp, Glycine max
  Clone ID: LIB3139-107-P1-N1-E9
gtaagggcaacgatattctgtgttgcgattatgctagttttgatggtttgattaccaagcaagttatgagcaagatggcagaaatgataaacagtctttgtggtggtgatgaaaaattgatgcgtgaaaggacacacctgctgttggcttgttgttcaaggatggcaatttgtaagaaagatgtttggagagttgaatgtggaatcccttctggatttccgctcacagttatttgtaatagcatttttaatgagatgctcattagatatagctatgaaaaattactgcgccaggctaaagctccaagtatgtttttacaatccttcaaaaattttgtttctttgtgtgtgtatggtgatgataacttaattagtgttcatgaatatgtcaagccttactttagtggttctaaattgaaaagctttctagc

SEQ ID NO: 46903 - DNA, 439 bp, Glycine max
  Clone ID: LIB3139-107-P1-N1-F1
tttcagtgttagaactctacgccgatgatagccacgttcccaccactgccggtagtagtgacaagagagttaatgctgacattgacattgtaccaggaaaaagcgagaaacaaaatctagaaaatccagtgacttcttcatgtgaatacaagttacctcttgtgtggattgacttggaaatgactggtttaaatatcgaagtggacagaatattggagattgcttgtataattacagatggaaatttaaccaaaacagtggagggtcctgatttggtcatccatcaaactaaggagtgccttgacaggatgggagaatggtgtcaaagtcatcatgcagctagtgggttaacaaaaaaggtgctaaagagtacaataagtgaaggagaagctgaaaagcaggttattgaatttgttaagagatatgttaatgttggttt

SEQ ID NO: 46904 - DNA, 433 bp, Glycine max
  Clone ID: LIB3139-107-P1-N1-F10
aaaattgcactttccaaaaacacagttggaggaaccattctgcgtggtgatctattggcgaagggtttgacagagggcaattttagagcaagtgttgatttgcagcgcactcatcgtattaaaggaatgattaaaatggtggccacagttggtattcctgagaatacaggtatagcattggcctgtgctatgaatagttcttttagggggcgtgccagttctgatatttacaccatctgctctcaagactgtgaattatggaatcctgcttgcacaaaagcaatgactatgtcatttaatccaaacccgtgttctgatgcatggagtttggaatttctgaagcgtaccggatttcattgtgatatcatttgtgttcacttgatggactgccactccaatgcaggatgttcaggttacaattgattgggttatt

SEQ ID NO: 46905 - DNA, 211 bp, Glycine max
  unsure at all n locations
  Clone ID: LIB3139-107-P1-N1-F11
aaccagaaaaggaaagaggcgggggaacaaaagagagcgggaaggggggnncaagaaacacccnnnggcaaanccnggcaaaaaacacccacaggggggccaaaacaaaagccgcggaccccgaaccaanccaagacnncngcaaaccaaacccaagaagnggggccancaaaacagcacaaaacaagcacnacaggcgaccaagcaagaa

SEQ ID NO: 46906 - DNA, 436 bp, Glycine max
  Clone ID: LIB3139-107-P1-N1-F12
ctcccacacacccttcttcttcagctgagttgtttgtaatacagcaagatgaatccatgggacatgagaacttccaagttactctctcaacaagtttcttatcctccttatctctttgtagaagagattccaaacatgggaaattccagtgttgtgaccaaggatgctagaggttcacagctgacaatcttctatggtggccaagttcttgtcttcgatgatattcaagctaaaaaagccaaggacatcttgtcttttgccggcaagggaatgtctcaaaaccagaacgattatgctaacactttccctgctacaacttctgctaatcccactagaccattttcttttcttatgaatatcattccaaccagtgccaacaattcggttcaagaccaccctcaagcaccatccaaacctgttatttgtgatctaccat

SEQ ID NO: 46907 - DNA, 442 bp, Glycine max
  Clone ID: LIB3139-107-P1-N1-F2
tgttgctattatcatccgcagctgcttttattcgcaccgcaaacagtgagccatggccgtcggaaagaacaagcgcatctccaaggggaagaagggtggcaagaagaaggcagctgatccctttgccaagaaggattggtatgacattaaggctccttctgtttttcaagtgaaaaatgttggcaaaaccctcgtctctcgtactcagggtaccaagattgcttctgaaggactcaagcatagagtgtttgaggtctccttggctgatcttcaaggggatgaggatcatgcattcaagaagattaggttgagagctgaagatgtgcaagggaagaatgttctgacaaatttctggggaatggatttcacaacagacaagctgaggtcattggtacgaaaatggcaaactcttattgaagcccatgtggatgtgaagacaact

SEQ ID NO: 46908 - DNA, 436 bp, Glycine max
  Clone ID: LIB3139-107-P1-N1-F3
aacgactctatctctcttcgttttgttcttccttgcgctcctcctgggtcgttcgttctccctcgcgtagatcggcaatggcggagaccgagacgtttgctttccaggctgagatcaaccagctcctcagtctcatcatcaacaccttctactccaacaaggaaatcttccttcgtgaactcatcagcaacgcctctgatgctttggacaagattagatttgagagtttgacggacaagagcaagctcgatgctcagccagagttgttcattcatattattcccgacaagactaacaattcgctgaccattgttgacagtggcattggcatgaccaaagctgatttggtaaacaacttgggtacaattgctaggtctggtaccaaggaattcatggaagccttggctgctggtgctgatgttagtatgattggaca

SEQ ID NO: 46909 - DNA, 440 bp, Glycine max
  Clone ID: LIB3139-107-P1-N1-F4
caaaaaaacaaagaccaccttgttcggttgtttttgttgttatgggtgccacctctatggtccgaggaggagtcacgaggtttctaccccgaagggaatatttggggtgcgagaaattacaacttggagatgtggagtttgaatttctcgatgatggtgagatcatgtcgttggccaaaagtgaaggttctggcgatgagtttcatcaatccaatgaaatggaattggatgatgaagatgatggtgagagggttgatggtggcagcgttgaggagaatagaagcttttgggataatcaacaccagcttttgcagaccaacctatatagaacaacttcagttgagtcaaggataagaaatgtcaccaaagaagccgttcatgatatacaaaacgcggaaatagtgtgcagttgcagtagacagataatttccagatcctgt

SEQ ID NO: 46910 - DNA, 438 bp, Glycine max
  Clone ID: LIB3139-107-P1-N1-F5
cttctctctagctataaaaaatataccttttcagtttccactcatggatctaaagccttactcttgcaatcaatacaattaagtattattcaaagtcccaaccatgtcaccaacaaacacttttgcaattttggtcttcttctgctgtgccatttcctttaccttcgcttctgaccctgacacacttcaagacctttgtgtggcacttccctcttcaggtgtgaaggtgaatggatttgcttgcaaggctgagtcaaatgtaacagaagctgatttcttctttgctggtttagccaagcctggagctaccaacaacacattgggatctgtagttactgcagccaatgtggataaaattccaggactcaacacattgggagtgtcattctcaagaatagactacaaagctgggggacttaacccacctcacacacaccc

SEQ ID NO: 46911 - DNA, 397 bp, Glycine max
  Clone ID: LIB3139-107-P1-N1-F6
caaaactagtgcaactttgcaatttagaaagttagcagattgtgaggttctcaagagaaactgtaaggggatgtctaatgttttatgggtggctcctgaggacaaggcgagtttatggtcacaacttcattatgtttcgtgcaataatctggaaatgcaagaagcttatcttgtcaatctcgcaaatgtgttacgcgaattgtgtttgcacacaccacaggaagctctccacttgtgaaagaaagctctctctcgtattgaatggctgcaaaaagctgatgtgcctaccatatcacacattgtagagttccatctctatgcacaggatgatgaatgctcctcattcaaatgataatattgatctactgctgagcattgtttttttgggtttacaaca

SEQ ID NO: 46912 - DNA, 363 bp, Glycine max
  Clone ID: LIB3139-107-P1-N1-F7
gattcaggaaaaagttgtgttgaaattttcacaagaggaaggtgttacagcttggtcagctgagggtgcgtcccgcaacgactctgttggctgatgggtgcccatatttgtatgctatggtgcatgatagttcagtgtctacaataccaggtgattttgtcattggtgttaagttgacaaccataaacaatatgtgtgcatatgggctcaatcctggaatttcaggttctcgtcttttgtgcaccataccttagttcattttacagcaaactgtttggaatcaaatggcaacagggagagcaccattgaattttgattttagcaagcagagcttttgtcaattttttattgaccttctcggtg

SEQ ID NO: 46913 - DNA, 430 bp, Glycine max
  Clone ID: LIB3139-107-P1-N1-F8
gttaccacaaaatagggttatgtacttacataaacagcaaggaactgcactttttttgtttgtgcacgagcctgcatgacagattataaataaaaacactttttttgttttcttcttattagttatctgatcttacatgtattttctctatccaggaactgcacccctcacagctgttcaactcttgtgggtgaacatgataatggacacactgggagcacttgctcttgctactgaacctccaaatgatgatttaatgaaacgttcacctgttggaaggaagggaaatttcatcagcaatgtcatgtggaggaacatcttaagacaatcattgtatcagtttatggtgatatggtttcttcagtcaagaggaaaatcaaatctttttacttgagggccccaattcagatctagtcttaaacacgcttat

SEQ ID NO: 46914 - DNA, 411 bp, Glycine max
  Clone ID: LIB3139-107-P1-N1-F9
aaaattgcactttccaaaaacacagttggaggaaccattctgcggagtgatctattggcgaaaggttggtgacagagggcaattttagagcaagtgttgatttgcagcgcactcatcgtattaaaggaatgattaaaatggtggccacagttggtattcctgagaatacaggtatagcattggcctgtgctatgaatagttcttttagggggcgtgccagttctgatatttacaccatctgctctcaagactgtgaattatggaatcctgcttgcacaaaagcaatgactatgtcatttaatccaaacccgtgttctgatgcatggagtttggaattttttgaagcgtaccggatttcattgtgatatcatttgtgtcactggatggactgccactccaatgcaggatgtt

SEQ ID NO: 46915 - DNA, 306 bp, Glycine max
  Clone ID: LIB3139-107-P1-N1-G1
gaagagggaagaagaagaagaagaagaagaaaaagagaagaagtagtttggtgtgttaattgttcgagagagaaatggacgactacacgagggaaatgatggacctgaagacactggtcactcgcacttttgaaaagaaaaggcgtctttgcaagaacccgggccgacttaaaagcaggtgtgttcaaggccttcgaaaaggaaaatcttttgattgaaaaggaccaagccttacttcttgcattgttgggtagttgcaacaatcgagctaaccagtttaaccttcttcttccagggagacttttt

SEQ ID NO: 46916 - DNA, 385 bp, Glycine max
  Clone ID: LIB3139-107-P1-N1-G10
ctcgagccgaatctgctcgagaatgactatgtcatttaatgcagagccgtgttctgatgcatggaggttggaatttttgaagcgtaccggatttcattgtgatatcatttgtgtcactgggtggactgccaccccaatgcaggatgttcaggttacaattgattggtttatttcctctcaggaatgtgttcccaggacctattgtgttttaaatccacaaaatccttttgtgttaaataggtggatgggaaaactgactttcccccagggcacttcccgaagtgttaagagaatgcctctttttatagggggaggagctgtttcaatgaatgctttttttatgtatattccttatgcttgtcttttaatgttgatttatttttgg

SEQ ID NO: 46917 - DNA, 440 bp, Glycine max
  Clone ID: LIB3139-107-P1-N1-G2
aggactttaggttgggatttgggaattagggttattcgcgtggcgaagatgattgaggtggttttgaacgatcgattggggaagaaggtgcgcgtgaagtgcaacgacgatgataccatcggcgacctgaagaagcttgtggcggctcagactggcacaagagccgacaagatccgcatccagaagtggtacaccatctacaaggatcacatcactctcaaggattacgagatccatgacggcatgggtctcgaactctactacaactaaacacaacaaggtgtgttttatgcgtaatatactatgtgctgggaatgggataagcgctaaatgtaattctgacttgcgaaagttcccatgatttgaaataatgtacatctccaaatgatattgggtattatataccgttgacagcttaagttgctttgttatataaccta

SEQ ID NO: 46918 - DNA, 440 bp, Glycine max
  Clone ID: LIB3139-107-P1-N1-G3
gtgaagcctttggtgaagacagtgaaggggaagaaggtgtgtgacaaagggtgggagtgcaaaggtgggtctgcatattgctgcaatgagactatctccgactacttccagacataccagtttgagaacctcttcgcgaagcgcaattcgccggtggcacatgctgttggtttctgggactaccgttctttcatcaccgctgctgcactgtaccagcctcacggctttggcaccactgggggaaagaccagtggccagaaggaacttgctgctttctttggccatgttggcagcaagacctcttgtggttatggggtggctacagggggacccttagcctggggcttatgctacagcaaggaattgagtcctgataaattctactgcgatgactactataaattaacctacccttgcactcctggcgcagcatactatgg

SEQ ID NO: 46919 - DNA, 68 bp, Glycine max
  Clone ID: LIB3139-107-P1-N1-G4
tctcttgtaaaatcaaagatacggtttgctttcctttactttatttatatatttctgtttgcttgttc

SEQ ID NO: 46920 - DNA, 418 bp, Glycine max
  Clone ID: LIB3139-107-P1-N1-G5
aataatttgtgggatgttttatatctgggctgagttctaaaaaaagtgggaacaaccatgggtgtggggcagtgcaaacataccaaatgtctctaataactcgctggtcatgttatcatcatatcaatttttggaaacaaggaattgatagaattctccttaatcttcttattgaaaatattcaagaccaattgtctcagcctctcttttcattgtaaaaacaaatatccatttcaaaagagggattaaaagccaattatcatcttgttcttattagttatctgtggtacattcttgggtggcttactatatattgttgagaaaatatatacccttatactcattaaatcaaactctacatcaacttactaaatacatattcatgctttaaatttgcgtatacactttaaaaatgttt

SEQ ID NO: 46921 - DNA, 206 bp, Glycine max
  Clone ID: LIB3139-107-P1-N1-G8
ctcgatccgatctctttttttaagtttctaagattacttcgcgcctgcattaaatgtacagggggtggcttcatagcatttgtaaatttggctgatgacaccatcaattttgaggctttttcccacaagctggtgcagtttggagagattcatgaaaaagttgtgttgaaattttcacaagaggaattttttacagcttggtcaac

SEQ ID NO: 46922 - DNA, 407 bp, Glycine max
  Clone ID: LIB3139-107-P1-N1-G9
ctcgagccgaatcggctcgagaatgactatgtcatttaatccaagcccgtgttctgatgcatggaggttggaatttttgaagcgtaccggatttcattgtgatatcatttgtgtcactgggtggactgccaccccaatgcaggatgttcaggttacaattgattggtttatttcctctcaggaatgtgttcccaggacctattgtgttttaaatccacaaaatccttttgtgttaaataggtggatgggaaaactgactttcccccagggcactttcctaagtgttaagagaatgcctttttctatatggggaggagctgttgcaaagaatgcttttttcatgaatatgccaaatgctgttctttcaatgttgagatattttgttggtgatttcgtctttaagtttt

SEQ ID NO: 46923 - DNA, 407 bp, Glycine max
  Clone ID: LIB3139-107-P1-N1-H1
aaagggtccgcgtgcttgagctctctcgcagattgaagcaccgtggccctgactggagtgggctccatcaacatggtgactgctttttggcacatcaacggttagccatagttgatcctgcttctggggatcaacctctctttaacgaggacaaatccgtcattgttacggtaaatggagagatttacaaccatgaagagctcaggaaacagctgcctaatcacaacttccgaactggaagtgattgtgatgttattgcacacctgtacgaggaacatggagaagactttgtggacatgctggatggtatcttctcatttgttctactggacacccgtgacaacatgtttatagtggctcgggatgctattggggttaccttcttggtcattgtatgggggttagat

SEQ ID NO: 46924 - DNA, 368 bp, Glycine max
  Clone ID: LIB3139-107-P1-N1-H11
ctcgagccgtttttttttttttttttttttttttttttttggggggttttttttttgtttggtgtgttttttttttttttttttttttttttttttttaaaccaattttaaaaccggagcggcccccaactatagagccctttccccccggaattaatttctgaccggttcctttaggctaaccattttttcttttagaaaattcaattaaaacttggcataattaagaaaaatattttcacccgggaaaaaattttttccccttaaaattccaaacaaaaaacaatccggaaacaaaaaatttaaaacccggggtccctaatgggggaccttacctaaattaattgcgtgtgcctcacttccccttt

SEQ ID NO: 46925 - DNA, 403 bp, Glycine max
  Clone ID: LIB3139-107-P1-N1-H12
ctcaaacctctttgttctttcgattcattccatttcttccaaaagggccaaagacccagttcgcgtgtctcgtcactggagccgcagggcaaattggatatgctcttgtccctatgattgctaggggagtgatgctgggtcctgaccagcccgtgatcctccacatgcttgacattccttcagcagcagagtcgttgaatggggttaaaatggaattggtggatgctgcattccctcttcttaaaggtgttgttgctacaaccgatgtggttgaggcatgcactggggtcaatattgcagtgatggttggtggattccctataaaagaaggtatggagaggaaggatgtgatgactaagaacgtctccatttacaagtcccaggcttctgtccttgaaaagca

SEQ ID NO: 46926 - DNA, 313 bp, Glycine max
  unsure at all n locations
  Clone ID: LIB3139-107-P1-N1-H2
gtcttaacagatatataacctgtttgggtacaagctagaagagcttttcaaagcttttctgttgaaaatatagaactttttctatcaaagaagctctcaaaaactctcctctcatggctttgtacccatgtaggcacatagtatcttagtccagcattgccttatgctaaatttatgtttgacatctcgtataactcatctattcttattttactcaaataataacagagttaaaaaaattatttatcataaaaaaaaaaatnnaaaaaaaaaaaaaaaaaaaaaaaaaaaataaaaataattttaattattt

SEQ ID NO: 46927 - DNA, 436 bp, Glycine max
  Clone ID: LIB3139-107-P1-N1-H3
gagaaagtgaaagtgtctgagagtgtgtgtgtgacttatggagtccaattcagagttcgacgtgattatcatcggagctggcgtcatgggcagctccaccgcctaccacgccaccaaacgcggccttaaaacccttctcctggaacagttcgacttcctccaccactgtggctcctcccacggcgaatcccgcaccatccgcctcacctatccccaccactactactaccctttagtcatggactcttaccgcctctggcaagaggcgcaggcccaagtcggctaccagatctacttcaaggcccatcacatggacatggcccatcacaacgagcccgccatgcgcgccctcatcgactactgccgcaacctccaaatcctcttcaaactcctcggccgccaagagctcgccgacaaattctccggccgcatcgac

SEQ ID NO: 46928 - DNA, 412 bp, Glycine max
  Clone ID: LIB3139-107-P1-N1-H5
ccttccttcaccaaaccttagctagctccactcttcctcaatccggcattcgtcaatggctgcgacggcttccaaatttcttcaaactccctccaaacccaaactccgatcccaatccaatcccaaattctcgccggttgtaacccccgacactccacaaaccctatatccttgcagatccacgcgcgccaagaccctcctcttcgatgctaccaagcctccccacacaccgtgtcgaaatctcgctcacaactccgaagcggaggatacgacgatccatctattgtgtcgatcaggatgccggcgaatataaagccacaaccagcaaaatttcagattaaaataaagctccggtcgtcgatgcgtcaaagaagaagaagaatgggaagaactcaatggaaggttcctttgc

SEQ ID NO: 46929 - DNA, 243 bp, Glycine max
  Clone ID: LIB3139-107-P1-N1-H7
ggtgatcagaatatcattcagcaattgaagatcagaggcaagcatagactagcaatgatatggctttcttcccagcaaatttcatgctacaaacacctcaccaagatgaccatcaacctccaccttcactcaactcaattataacttcatgtgcacctcaagagtaccatggaggagcatcctttttaggcaagagatctatgtcattttcagggattgagcttggaaaaaaagctaatgctg

SEQ ID NO: 46930 - DNA, 347 bp, Glycine max
  Clone ID: LIB3139-107-P1-N1-H8
aaaagcttttgcttttttctgtatatggaaggcccttaaacggggtttctctctctctgcgtgggcgggactttctcacttttgcattttcttgtgaaaaaaaaaattctcagaaccaaaatcggttttcttctgtctctgatctctcaaagcttcaaattctccttgtttggtttgattgtgtgtttggagtatgatgtctccttctgcggtggttactgatgaggaggtgcggatcaacttgtcttcgaccgttgcgtccggttcttctcaattctaggaccgtttctctcagaatggggctggattgaaagaactaaattactttaggtttatctgattgctta

SEQ ID NO: 46931 - DNA, 327 bp, Glycine max
  Clone ID: LIB3139-107-P1-N1-H9
aaaaaaaaaaaatattattttaaaaaaaaaaaaaaaaaaataagaagagataaaaaaaaaaagaggggagaaaaaaaaaaaaaaaaaaaaaaaaaaataataaaaaaataaaaaaaaaaaaaaaaaaaaaaaaaaaaaaatattattaaaatataaataaattggggcttcccttttttttaatcttttccccctttaaataatatactgactcttttttttagtgatctatttttttttttatttaattattattaactttctggttaataatattatatcttttttcttttattattttttttttctttaaaattttttaaaatt

SEQ ID NO: 46932 - DNA, 258 bp, Glycine max
  Clone ID: LIB3139-109-P1-N1-A1
tgaaattttaataaaccgcgatcacaggttgccgcaccttaaaaccggaaacaaaagcaatcgttacttgatttcaagaatttctcaatttcttcctacttctttgtgtacgatttcttaagggaaagaaaatcactctctgtgctggtcacagacttcgtgaatcattttcttttccactcctagtttatttgctgaacactctcctatttgatataggacttcgtgtcagatttaaactttttctgtttctttctc

SEQ ID NO: 46933 - DNA, 345 bp, Glycine max
  Clone ID: LIB3139-109-P1-N1-A11
ccgagtttgcccactgcattcgtatcgagccagcctctcaagctagggttcttcaccgcgctgcaaccttcttctctctcccttcgtcccctccaattggaatgtgattgtgacttcacatgctggtagctgacattttgaaattgtaactgtggtgggagcaatattatattttttgcgacttcatggatatacagacttgtggctggccgatttgtctccttgctatagtaagtgctttgtattaattttcttttgttcgatttcattaattgtgtttctatcttttgtttatcttctctttatttttttgattttatttttttcattattgttctatttttt

SEQ ID NO: 46934 - DNA, 422 bp, Glycine max
  Clone ID: LIB3139-109-P1-N1-A2
ctattgaagctccagccttgtttttagatgagctgaaggagaagactgacaactttggttcaaaggcattaataggtgaaggatcgtatggaagggtgtattatgcaaccttaaacaatgggaaagcagtggctgtgaaaaagcttgatgtttcatctgaacccgaatcaaataatgagtttttgacccaggtttccatggtctcaagattgaaggatgacaattttgttgagttgcatggttactgtgttgaaagaaatcttcgtgtacttgcatatgagtttgctactatgggctctcttcatgacatattgcacggtagaaagggagttcaaggtgctcaacctgggccaactcttgattggatacagcgagttagaaatgcagttgatgcagcaaggggattggaatatttacatgag

SEQ ID NO: 46935 - DNA, 392 bp, Glycine max
  Clone ID: LIB3139-109-P1-N1-A3
tcctgctgttgacaagttgtattctactaaggttaataagtttgcaaaaattatgaaccttagacagagtgttgttggtgatcttaaacttcttactgatgggaagttgtatgagggtaagcatattcctgtatctaatattagtgcaggggaaaatcatgtagttcaaatacccctaatggcacaggaggaaattctgtcttctagtgcaagtgatttcagaactgcaatggtgagtaaaaatagcaagcctcaagctactgcaatgcatgtgggagctatagaaattatcattgatagtttcgcaagtcctgactgcaacatagttggtgcaatgcttttggttgatacttatcataccaatcctgaaaatgcagttcgtagtatttttg

SEQ ID NO: 46936 - DNA, 445 bp, Glycine max
  Clone ID: LIB3139-109-P1-N1-A4
tgagaatcagaattcagaaaaaaaagtgtacttgaactgggattcatctgattccttaacttgtctctctgctgattcataatctctttaagaggttttgccaacctgccacaaatagtattgcatgggttggtttactaagttgcttaagggatccaaccgtaaatcttcaggaggaagatatcatgggaaatatgaagatgacagaatatcagaaaatcatgattgttcagcggatgatttgatggatattgagaaagaagaaattgatcgggccatagcactctctctttcagaggcagatcagaaagggaaaaaagttattgaggacgactctgaatctgaagatgatgaactgtgtccacttagtgacgaggaagcttgatgtgttgaagttcagcaagatgaagatgaccatcatgctaaaattcaacaggatgaagac

SEQ ID NO: 46937 - DNA, 259 bp, Glycine max
  Clone ID: LIB3139-109-P1-N1-A5
tctaaactacagcttgtatgtttattatgcagacagtcttgtgagaatcataacaggaggcggggtgttaacattcgataaaacaggtttcaacatactgccacaattaggcccgccttgttcggattaccactctgtgaaaagtgtccatcccatgacttgtatgaatactgaatgatccaaatttacattatacagggggatgacatcttttttattgcaaagtgcatgcaatgaagcacatcgctccagctcaaat

SEQ ID NO: 46938 - DNA, 322 bp, Glycine max
  Clone ID: LIB3139-109-P1-N1-A7
gaaaaaaaagaagaaggaataaaaaaaaaagggggggaaaagaaaaaaaaaaaaatgaaagtaaaaaaaaaaaataaaaaaaaaaaaaaaaaataaaaaaaaataaaaataaaataaaataaaaaaaaaaaaaaaaaaaaaataagtataaaaaaaaaaaaaaaaaaataaattaaaaaaaaaaaataaaaaattaaaaaaaatataaagaaatagataaaaaaaaaaaaaaaaaaaaaaaaaagttaaaaataaaaataaaataaatataaataagaaaaaaaaaaaaaaaaaagaaataaatatggataaagggataatt

SEQ ID NO: 46939 - DNA, 330 bp, Glycine max
  Clone ID: LIB3139-109-P1-N1-A9
gcaggatttatgttattctgcatttcctctttacactaaggaagtgtttattgtgggaggcgggcgggatgggaaaagcaaaggatgatgactgaaatcctggcattggtggtttaacgcccttccacttatttgttttcaagtccctcaagagtttgtcttggtcctgtgctaatttgttaccactgtaatatcatatgaaagctacaatgaaatatcagtatttgcggagactgaactcattatacgaatacagttgttttggaagaatcgaacatttgttacagtcgccaccatactgtactaacactatattttgtgatttgcgtc

SEQ ID NO: 46940 - DNA, 387 bp, Glycine max
  Clone ID: LIB3139-109-P1-N1-B1
ggttaattgcaagggaaacaaaatggaacgccaactgtagcatacataggatggtggtgtagagaggtgaaacaagtacctgccaatgtaatagtggtagtgtttaggtacctctgatgatgctgacgataccactgagcaggttgtgatgcctgtatgtactgccagcgattgatatggagatctgggaagtaaaaaacaaaacttaatggaagattgattacatgttaagcatcatacctagtggtggggaaaatatgaatacagaagatgcatactcaaacgcttctatttcaactgatcacatgcattatgacagtcaatacttcgtgaagttctcagctctcgtacatctaaaaaatgaggactgagttgcacaaatgtcac

SEQ ID NO: 46941 - DNA, 427 bp, Glycine max
  Clone ID: LIB3139-109-P1-N1-B11
gtgattttctcaagagaaactttaagcagatgtctaatgttttatgggtggctcctgaggacaaggcgagtttatggtcacaacttcattatgtttcgtgcaataatctggaaatgcaagaagcttatcttgtcaatctcgtaaatgtgttacgagaattgtatttgcacagtccagaggaagctcgccaattgagaaggaaagctctctctcgtattgaatggctgcaaaaagctgatgtgcctaccatagcacagattgaagagttccattcgatgcacaggatgatgaatgctcctgattcaaatgataatattgatctactgttgagcattgatttgttgggtttacaaggagcaggtaaagcttttccaaacaagattgtttttgatgataagcttgtgttggctaacacacaagaattctt

SEQ ID NO: 46942 - DNA, 404 bp, Glycine max
  Clone ID: LIB3139-109-P1-N1-B12
gcagttaaaaggtgtgattttgcctcattggtacaagtctgtttggcaaacatcaacggtggagagcattttgatgcttgtaagtggacaaaatcggaaccacattcctgggaattgatcttcccaatagaggtatgtggtcctaataatggttttgaaatgtggagttcttagtgggcaaatcaaactttatggcatttgagtttccttattgacaatcccaaacagtctacagtttttgatattctcttgggaatttctcaagattttgaaattgctggtaatacttttatgccagctttttttgtttcacaggctactgccagatcttcttgaaatgcggaattctctgcatgatcctgaaattgtgttttctttcgcttgttcggttgttaatttaataa

SEQ ID NO: 46943 - DNA, 428 bp, Glycine max
  Clone ID: LIB3139-109-P1-N1-B2
gggagtttgattttgatctgttctggtctgaattgggtggtctcaacgagacgattattggttgcaggagaggcatcttgtgtggcgggtacctttttctttaattggtggttgtaaagagcgaggtgtggggtgtttctgtgacacgaaggatgacacttgtcatttgtcaatgtttgcctttaactaacggtgaatttcagtgtgatggccccctttaacactctttttcttcaagcctccattctgccaaagctgatgcttgaactgaactcgtttctaatttaccattcatattggacagacaaagctgattcacttaggagcctcgagagctatgtctacatcttctcgtgttcttcccactccattggaaaacaagtatatgaaacccccagattcttttcagctttcgccagtcagagatc

SEQ ID NO: 46944 - DNA, 256 bp, Glycine max
  Clone ID: LIB3139-109-P1-N1-B3
tcggataatttttgaaatgtctttgcaatgatctggctggcaatatctggtgggctccaaaatgcagtcatacaccaattacatactgagaaatattaaagcagagtacattgatatatgctgacaattcaagatgggtattggtgtgccaagtgaaatacaaacaaatgtggttcatgtgtgaagcaagaagacggattgcttattgtccatatgtgagccagtggcagctaaagtgctgagttcttgcttttct

SEQ ID NO: 46945 - DNA, 411 bp, Glycine max
  Clone ID: LIB3139-109-P1-N1-B4
cggagttccgtcctgagaggttcctaaagacaggggctgaaggggaagcagggcctcttgatcttaggggacaacattttcaacttctcccatttgggtctgggaggagaatgtgccctggagtcaatctggctacttcgggaatggcaacacttcttgcatctcttattcagtgcttcgacttgcaagtgctgggtccacaaggacagatattgaagggtggtgacgccaaagttagcatggaagagagagccggcctcactgttccaagggcacatagtcttgtctgtgttccacttgcaaggatcggcgttgcatctaaactcctttcttaattaagatcatcgtcatcatcatcatatgtaatatttactttttgtgtgttgataatcatcatttcaataaggtctc

SEQ ID NO: 46946 - DNA, 443 bp, Glycine max
  Clone ID: LIB3139-109-P1-N1-B6
gaaattctttagttgttactgtcaaagttttctgagaaaataaggagtagtattgagagaatggctggctcatcggaagagggacaagtcattagctgccacaccgttgaagaatggaacgatcaactccagaagggcaacgaatccaagaaactcattgttgtggattttactgcttcttggtgtggaccatgccgtttcattgcaccattcttggctgagctggctaagaagttcacaagtgtcatattcctaaaggtggatgtggacgaattaaaaagtgtttctcaagattgggctattgaggctatgcccacttttgtgtttgtgaaagaaggaacgcttctggacaaagtggtgggagcaaaaaaagatgagcttgcacagaaaatacagaaacatgtggctttagctagtgcttaatctagctcaccttcagaaac

SEQ ID NO: 46947 - DNA, 437 bp, Glycine max
  Clone ID: LIB3139-109-P1-N1-B7
agctgctgggctaaaagagggattccagcttatggatacaaacaggagaggcaagattaacgggggggaattacgagtagggttgcataaacttggtcatcaagttcccgaatcagatgtccaagctcttatggaagctggtgatgtagatggggatgggcacctagattatggagagtttgtagccatttctgttcatctaagaaagatgggaaatgatgagcatcttcgcaaagccttccaattttttgatcagaacaaaagtgagtatattgagattgaggagctgcgtagcgccttatctgatgatcttgacacaaacagtgaagaagttatcagtgcaattatgcatgatgtggacacagacaaggatggaaggataagttacgacgaatttgctacaatgatgaaggctggcacagattggagaaaagcat

SEQ ID NO: 46948 - DNA, 69 bp, Glycine max
  Clone ID: LIB3139-109-P1-N1-B8
aaaaaaaaaaaattaattttaaaaaaaaaaaaaaaaaaaaagaagggaaaataaaaaagggggggaggg

SEQ ID NO: 46949 - DNA, 437 bp, Glycine max
  Clone ID: LIB3139-109-P1-N1-C1
ccgacccggcaattaggagttacatggacaaggtgctaaaatccgacccggaattggcccaatttgtggacacaacaatgttccaaggacaattgggaaggaatcatcacaaggatttggcccaacacaaaatacttggacgtcatcgtaacgggtgccatggcccaatacattcccactcttaactactacagcggaggagggttgccacttgcatgcaccatgtacgcttcatcagagtgttactttggactcaaccttaatccgatgtgcaagccctctgaggtttcatacaccattatgccaaacatggcatatttcgaattccttccccacgatcctaagcctggctccaccagttcaaaactagtggagttggcggacgttgaagtggggaaggaatacgaactggtgatcacaacctatgcgggactcta

SEQ ID NO: 46950 - DNA, 439 bp, Glycine max
  unsure at all n locations
  Clone ID: LIB3139-109-P1-N1-C10
cagattggtgtttttttcatattgaaagctttacactttcaggctgaaccttcttctgtggcggttgccaactccatcatcatcctcnccctgtcatctccatatcccaatctctcagatcacccatcaccatctcccaacttttctcctttccctccaaaccatccttcaccttcaactttaactttaaattcaaccctttctcaaaaccccattacccaattcaagcttcttcttcatcaatatcatcaccaccaccaccaccaccatcaccaccaccatcaccttttcagtgtgcaaaatccaatcctttcattttttccatattcatctttcttatttttcccttttatcttcccaaacctcttatatacatcctccatttctttcatctacctttctttttcttttctatttatctcctcttttttaacccctt

SEQ ID NO: 46951 - DNA, 274 bp, Glycine max
  unsure at all n locations
  Clone ID: LIB3139-109-P1-N1-C11
gtaatttttaatgtacttatttcaatgcctctatnaatgtggatgaggaaattaaacagtgtttaggaatcaatatattacttttttatttctattcttttttatttattattacatttttttaaattacatattatctcattattttttttcttttttatttttattcatttactcaatatattattactattctttattcattattatttatatttttatttttcttcatattctttttttattattattactttaattatatcattttata

SEQ ID NO: 46952 - DNA, 429 bp, Glycine max
  Clone ID: LIB3139-109-P1-N1-C3
attttaatgcactgctgagttttcctagaccctagtgtttctttcagagtggaaacataacgactgggcattagcaagttgacgcattagaaagaaaataaaactaagttgtgttattatacttagaaaatgatgctttatttattttagaattaaattttcttatgttttcttcagttagtgctttgcttatcatagtttgttggcttacaggaaaacaatggtagtgtgtttgtataaaatttcttggggattcattcatttggatctgtcttggactaatagtaatattgattgttacagattctgtcaagctagctagctacctataattttggctttctgttcttagctgtgtttgtattggccaggttcagttctcatttcaacttacctaacttgaaaattgtcgtttatattggccttatt

SEQ ID NO: 46953 - DNA, 359 bp, Glycine max
  Clone ID: LIB3139-109-P1-N1-C4
gggtttacaaggagcaggtaaagcttttccaaacaagattgtttgtgatgataagcttgtgttggctaacacacaagaattctttgatggaaattttccagtggattcttggttaccaatttttgtgaattgtctctatcctgtaagtcaattaccttcagaagctgtcgttgtaaatgttacatgtggtagtgggcgttgtggtttacccaccactgcttggattagttctgcagttaacaattcgtccttatacatcaacaaaaggatttgcacagcacttgggaaaggggaggaaatgtttttcttactagaagtgatccttttccagtagctttattggctgttctttttggcgt

SEQ ID NO: 46954 - DNA, 353 bp, Glycine max
  unsure at all n locations
  Clone ID: LIB3139-109-P1-N1-C5
cttcttcctctatctctttggctattagcaaacactctcatatttggtggttctagttctcactacgcatgtcaacccacattgaaagcctgtgggtgttggccttagcctcaaaatgcattcaagagaacattgcatggtcactcttgatcatcatggtcactctctggctcaccatgacctttttctactggtctcaccctggtggtcctgcttggggcaaatactactancttaattactggaaaaaaaccacctcaaccaacacaaacatcaaccttaaaatgattatccctggtcctagaagctaccctttcattgggagtatgagtctcatgacattccttgcacac

SEQ ID NO: 46955 - DNA, 443 bp, Glycine max
  unsure at all n locations
  Clone ID: LIB3139-109-P1-N1-C6
aaagggattagatccttgaaccagatcaaatcatcaaaatctgtgtctatggggttgtgagaacggcaatcacattgttgttgctgtaaaaggggattccttagtctagatttgtttgcattgcagaagaaccagataccccattattggtcttatctatctatctgtctatattctatttatcttcttattggagntctcattgtgtctgatttcagtgatttgtgttgtttttggttaacacaagcaatggaagttgttgagaaggagaagaagtacataacctcagaggagctgaagggtcacaacaaggagggagatttatggatctcaattcaaggtaaggtgtacaatgtctcagaatgggtcaaggagcaccctggtggggatgtttcaatcttaaaccttgctggccaggatgtcactgatgcattcatagcata

SEQ ID NO: 46956 - DNA, 436 bp, Glycine max
  unsure at all n locations
  Clone ID: LIB3139-109-P1-N1-C7
ttaatcttcgtcaacgttacttttccacctcgtacgaggggttcgattgagagggaaaggggctggtggcagacaacacacagtcttactgggaaggctacaaagcgttttggtcagagaggttttcctttttgagcaactattcgaggttcatcaaccgtgataaacccatcccttcctggtcaagctctgatgtcgaggagttcattgcttctgatcctgttcatggacccgtcctgaaaagtgctagagaagcagtgcaatttggcctcacaggaagtgctttgggagcattatttactgcaggctatgcctggaaatattcaaagagtttacatggcgctggactgtcatttttagctggaggtatatttgggtggacttttgggcatgaaatcgcaaatcacacacnttaactttacagggtagacacatt

SEQ ID NO: 46957 - DNA, 426 bp, Glycine max
  Clone ID: LIB3139-109-P1-N1-C8
atgataacttaattagtgttcatgaatatgtcaagccttactttagtggttctaaattgaagggctttctagctggtcataatatcaccattactgatggtattgacaaaactagtgcaactttgcaatttagaaagttagcagattgtgattttctcaagagaaactttaagcagatgtctaatgttttgtgggtggctcctgaggacaaggcgagtttatggtcacaacttcattatgtttcgtgtaataatctggaaatgcaagaagcttatcttgtcaatctcgtaaatgtgttacgagaattgtatttgcacagtccagaggaagctcgccaattgagaaggaaagctctctctcgtattgaatggctgcaaaaagctgatgtgcctaccatagcacagattgaagagtttcattcgatgc

SEQ ID NO: 46958 - DNA, 434 bp, Glycine max
  unsure at all n locations
  Clone ID: LIB3139-109-P1-N1-C9
cgaagttgatgtttatttttctaaaagacatggacctgaggttgggggaatttatttgggggggctgganatggcacctgtgacctacatagattctagtgctgttcaggctttgaaagacttgtatcaggagtacaaattacgggacattcatattgcaatatccaatccaagtccagaagttctgcttaccttgtctagatccggtctggtggagttgataggcaaagaatggtactttgtgagagtacatgatgctgttcaagtttgcttgcaacatgttcaaagcttgaaagggggatctaacagttcacaagcaccattctcttcattagaagacaaaccaagtttgtttgcccgattatcaaaagagagaggggagaagctttcaattaccgacttggagtctggtaatggcaggccaccacttccca

SEQ ID NO: 46959 - DNA, 420 bp, Glycine max
  Clone ID: LIB3139-109-P1-N1-D1
ctcaaaccctcggcccaaatttccatcttacatagatccaccattcatgattcatacatggctggtgccggcattcacttcaaccttaatctccgtttcccctctgatccggcaccaattgcttccacatgtcactctccctctcgcctttctttttccctctcgcactcccctctcttcacaacaacaccaaaggcagataataccactaattctaaaaacagtgaattggatatttttaatttcccatttatttcatgcttcatttattattttaattatttttttaatattgggtttgtttgcttttctttgctttgctcccatttattacgttggattcgattctcacgcatgtttatttatataccctctttttaattcgtgtgtgtgttctggtgctttctttctccgctcaca

SEQ ID NO: 46960 - DNA, 178 bp, Glycine max
  Clone ID: LIB3139-109-P1-N1-D10
ctcgagccgcattttttcttttttcacttcctcctccctcgaacgctctttattgccctgggggggtcaccacctccaccccaacctccttctcctccctccggatccctcctagctccttccctgctttcccttttcccttcctcccaccaccaccttcgtcaaacccttcttcttc

SEQ ID NO: 46961 - DNA, 430 bp, Glycine max
  unsure at all n locations
  Clone ID: LIB3139-109-P1-N1-D11
aaagaataactacaaatcctcgctatataattgcaaagggtggtggtacgtcttcagatctggctggaaaagcccttggtgcaagatgtgcgaaaatagttggtcaagcacttgctggtattcccttgtggcaattaggccctgaaagtagacaccctggagttccttacattgtcttcccaggtaatgttggtaacagcacagcattggcagaagttgtaaagtcctggactagtccaatcagacttacatcaacaaaagaaattcttaataatgcanaaaagggtggatatgctgttggagcatttaatgtatataatttggaaggagttgaggctgttgtatctgcttcaaaggaagaacaaagtcctgctttattacagatccatccaggtgcctnggaacaaggaggaaattcccttggttgctt

SEQ ID NO: 46962 - DNA, 416 bp, Glycine max
  unsure at all n locations
  Clone ID: LIB3139-109-P1-N1-D12
gcagtttggagttatttaggaaaaagttgtgttgaaatttgcacaggaggaatttctgtacaggttggtcaactcangtgcgtcccgcaacgactctgttggctgatgggtgcccatatttgtatgctatggtgcatgatagttcagtgtctacaataccaggtgattttgtcattggtgttaagttgacaaccataaacaatatgtgtgcatatgggctcaatcctggtatttcaggttctcgtcttttgggcaccattcctcagtccatttcacagcaaactgtttggaatcaaatggcaacagtgagaacaccattgaattttgattctagcaagcagagcttttgtcaattttctattgaccttctcggtggaggaattttagtggacaaaactggagattggatcacactt

SEQ ID NO: 46963 - DNA, 438 bp, Glycine max
  Clone ID: LIB3139-109-P1-N1-D2
attcaaaaatatgccactcccatgatgcccctagatgaaaaaatggtttctaaggttgcacaggatgtggttgaggaatggttcgattgtgttgatgaggaggattcctttgaggaagtttctttaagtgcagcacttaatggtgttgagggtttggactatatggaaagaattcctcttgccacatctgagggatttcctcatgtgctttcacgcaaaaatggtgaaaaaggcaaaaggagatttgtctctggggatggtgaagagatgacactgattccgggaaccagtgttgaagaggcttacaacaagctaatagttgaacttgagaaaagtgttcctacattggttggcattgaatgtcccaaggatgagaaacttcctcgtcgcaaaatttttgacaaacctaagacgcgctgcttcactattctccctatg

SEQ ID NO: 46964 - DNA, 439 bp, Glycine max
  Clone ID: LIB3139-109-P1-N1-D3
cgctcttcttctcatcaagcacagagttacagactcaccgatctgccggttctctttcgtctggggggatgagctcgaaggagagacccactcttggtggcacgcggattaagacccgcaaacgaaatattgctgcgccgctggaccctgcagcattctcggatgcagtggtccagatttatttggataatgctggtgatctggaacttattgctaagagtattgaatcttcagaccttaacttttcaagatacggtgacaccttttttgaggttgctttcactgggggtcgtacacaacctggaactaccaagcctgatgagggggaccgccacccatactctataatagagtgtgagcctaagcgtgaagtcattttaccatctgtaatctacatacaaaagattttgcggcgaaggccatttctcatcaagaacct

SEQ ID NO: 46965 - DNA, 445 bp, Glycine max
  Clone ID: LIB3139-109-P1-N1-D4
cgcgtcttcgagtttcacagcgaagtcgtaggagggtttcaaaagatggagaacatgcagagcttgtggcaattgggcgatgaactccgtggacactcaaaagcatcggaggatcacaaatggttaatggttgcttcgaaattggcggaacagacaagattgaagggggagcgtgtgaacaaccttgatctttcaaagggccccattgaaacaaggtcaagggataaatttgggttccaggaagagaacaaatttgattctcttaacttaagcatgttgaacctggactctaaatttactgagaatgtgagcaaaagctcgcttcgaaatggtgtttatggtatgaatgcagtgtatcagaaaaacaatgcaaacttggtgagtaatgtgatcagtaacaagtacaatggtaatattcttcataacaaagagatcaacaacaaca

SEQ ID NO: 46966 - DNA, 386 bp, Glycine max
  unsure at all n locations
  Clone ID: LIB3139-109-P1-N1-D6
tcccaatagaggtatgttttcctaataatggttttgaaatgtggagttctgagtgggcaaatcaaggttcatggcatttgagtttccttattgacaatcccaaacagtctacagtttttgatattctcttgngaatctctcaagattttgaaattgctggtaatactcttatgccagctttttctgttccacaggctactgccagatcttctgaaaatgcggaatcctctgcatgatctggaattcgtgttttctttcgcttgttcgtttgtttaattcaataaaggaaattaggcatgaccctcttgttgagtatgctctgcctatctgaaaatttccacacctcttttaattgtcgtaatgatgtgtgaagtgtgtgttatttt

SEQ ID NO: 46967 - DNA, 435 bp, Glycine max
  Clone ID: LIB3139-109-P1-N1-D7
ctctatcccattttttttattaaaaaaaaaaaaaaaaaaaagatagttatttatataaaaaaagtgggtatgataaaaataataccacttttcttattattttttaaattccttctttaaaattaataaccatccccttctataaaacctgcctcccctcttttttttttcttttttccccccttttttttttccccccccttccttctatccttccctttttttttttttataaatctttttaaactttctctccatttttataattttttttccctttctaaaatttttttccttttaaattcccccccatattttctcctccaatttttaaatttttaacctttatctcctttttccttcctctttttctttttttcctgtccctttctttcccttttttttttttaaaaccccttctccccctcttttttt

SEQ ID NO: 46968 - DNA, 351 bp, Glycine max
  Clone ID: LIB3139-109-P1-N1-D8
gaaatgtggagttctgagtgggcaaatcaaacttcatggggttggagtttccttattggcaggcccaaacagtctacagtttttgatattctcttgggaatttctcaggattttgaaattgctggtaatactcttatgccagctttttctgttccacaggctactgccagatcttctgaaaatgcggaatcctctgcatgatctggaatttgtgttttctttcgcttgttcgtttgtttaattcaataaaggaaattaggcatgaccctcttgttgagtatgctctgcctatttgaaaatttccacacctcttttaattgtcgtaatgatgtgtgaagtgtgtgttatttt

SEQ ID NO: 46969 - DNA, 419 bp, Glycine max
  Clone ID: LIB3139-109-P1-N1-E1
ctcgagccgatctagctgaagttaaatcacaattggcttctgctcaaagatcaaacagcctggctgagacgcaactaaaatgtatgacagaatcatacaggtcaattgaagcacgcacaaaggagtttgaaactgagcttaatcatctgcgaatgaagacagaaactctggagaatgaacttgaagatgaaaagagggctcatgaagaagctttggctaagtacaaggagctagaagaacaactacaaaggaatgagagctcagctgctgataatgacattaagactaagcaggagagagacttggaagctgctgctgaaaagttagctgagtgtcaggaaaccatatttcttcttggcaagcagttaaaatcgatgcatcctcaaacagagccaatggggcctccttattcaaaggct

SEQ ID NO: 46970 - DNA, 68 bp, Glycine max
  Clone ID: LIB3139-109-P1-N1-E11
caaaaaatggttacaacttaaaaaaacaaaaaatagttgggaagagaaaaaaaaaggggggggggagg

SEQ ID NO: 46971 - DNA, 149 bp, Glycine max
  Clone ID: LIB3139-109-P1-N1-E12
gttgttttctttcttttcttacatattttttcctatgtgggttggccttccttactatgtgggcctatgtttaggagatggagagagaagtctaaatttgtggcgtgaaaaattttattgattggatttggaaatttgcacttattttg

SEQ ID NO: 46972 - DNA, 434 bp, Glycine max
  unsure at all n locations
  Clone ID: LIB3139-109-P1-N1-E2
gtttctatattacttgcaatagccactctactatatacattacaagttggttgaagcacactggggagatttacatttagtgacagatatatagtaacatcatcatgggtttgaagaacagtggcgttggtcatagagcatggagcctccttcgggcatcattgctgtgggcaagcaaaggtggcgtgttgaggcgcanggtggcgatggagctgcgtcttgtaccaaagtacttgaagcgactcggccacactgctcctccaagccacattcactactttgaacgcgagctctcgttcgacaagacccccatcttccatgtcaagatgtaccgtccaaccaccatgcgcttncacttgcctcacattccttgcataaacccacatgttgattttaatgatgatgatgatggcaatgttgagtatgatactggt

SEQ ID NO: 46973 - DNA, 436 bp, Glycine max
  Clone ID: LIB3139-109-P1-N1-E3
ggaaccctccatgcccatatcgtatccaataaagaccctcaaggagttggagtcacgctcctacttggagtcctttcattatccttttaacaaagcttcagttccaattgaaagtgggtattctgaacctttgccaaattgtagaagaatactagtgtgccatgatatggctggagggtacttagatgataaatgggtccagggagggactaatgctgaagcctatgccatatggcactggcatttgatagatgtgtttgtctacttctctcataatctcgtcactctccctcctccttcttggactaatacagctcatcgtcatggtgttaaggtgctggggacttttatcactgaaagggatgagggaacgactgtctgtaatgaactgctttcaacaaaggagtctgcccaaatgtatgcaaaacacttggca

SEQ ID NO: 46974 - DNA, 169 bp, Glycine max
  Clone ID: LIB3139-109-P1-N1-E4
gcggaatcctctgcatgatctggaattcgtgttttctttcgctggttcggtttgtttaattcaatagaggaaattaggcatgaccctcttgttgagtatgctctgcctatctgaaaatttccacacctcttttaattgtcgtaatgatgtgtgaagtgtgtgttatttt

SEQ ID NO: 46975 - DNA, 440 bp, Glycine max
  unsure at all n locations
  Clone ID: LIB3139-109-P1-N1-E5
ctcaataatcacttttatcatttcaaacaaagaaagttgttagtgcttagcattcctttggagatgggacgaanttcaatttttatttcttaccattagcgtgacatgaaaaaataaatttattaattccaatatatattggtggtataaagcacttccatatatgattggtcacaatttttttttacttagattccatcttcattgaaaaaagttaaaacacatgaaaaattaattatttcagttaaattaattcctttcactttttaaatatattctttatttgggtaaaataattccttcttgttatgtgtgagtttgaaattcttttaatttaatatatttgtaaataaattattttgacctaatatattgtaaatcaatccaaaaatagaatttactgtctaaagactcattattcaaccaaacgagagagttgt

SEQ ID NO: 46976 - DNA, 359 bp, Glycine max
  unsure at all n locations
  Clone ID: LIB3139-109-P1-N1-E7
aaaggttgttaaaccaaagtggctaaaaatgtgatttcactttcgtgataggcccagtgagcagatggttgcanaaaaggagcttcacttgggctctatctagatacatacatataaatgnctnattgaggtcactattcttgtggattaagacattaaatcttagttcaatgtatcatgaagggtccacaagaacacaacatagttacttttctcttcagcctttcttccttttctaccttctgcttttcctgaatttgtagataatgtgtgcaaatgttggataaaattcttttggtgaatgcaactgtctcggcacaggtgtatgtgttgtttcaatagaatttttctttgctgct

SEQ ID NO: 46977 - DNA, 438 bp, Glycine max
  Clone ID: LIB3139-109-P1-N1-E8
ctaaattgaaaagctttctagctagtcataacatcaccattactggtggtattgacaaaactggtgcgactttgcaatttagaaagttagcagattgtgattttctcaagagaaactttaagcagatgtctaatgttttgtgggtggctcctgaggacaaggcgagtttatggtcacaacttcattatgtttcgtgtaataatctggaaatgcaagaagcttatcttgtcaatctcgtaaatgtgttacgagaattgtatttgcacagtccagaggaagctcgccaattgagaaggaaagctctctctcgtattgaatggctgcaaaaagctgatgtgcctaccatagcacagattgaagagttccattcgatgcaaaggatgatgaatgctcctgattcaaatgataatattgatttactgttgagcattgatttgg

SEQ ID NO: 46978 - DNA, 201 bp, Glycine max
  Clone ID: LIB3139-109-P1-N1-E9
caaaaataagacattgtttggtttggttacttgctcgaatgtccgcgaatcgcttaagggggatttgattagttaaaccgcaacgcggaatctcttttctcgaactggctaactctcaggcaagtggttcggacgctgattccagcaacaagcggctggtgctcgcactgtatgactccctaaactccggctactcctacg

SEQ ID NO: 46979 - DNA, 442 bp, Glycine max
  Clone ID: LIB3139-109-P1-N1-F1
gttggtggtgggctggagcaatcggtgctgccaagaagaaattcgaggaagaggaaccgccgcgaagcttgcagagcgtgggcctggtgatcggcgtgacgggcatcgtgggcaacagcctcgccgagatcctccctctcgccgacacccccgccggtccatggaaggtctacggcgtcgcacgccgcccccgtccgccgtggaacgccgaccatcctgtcgagtacatccagtgcgacgtctccgatcccgccgacgccgaagccaaactctccgccctaaccgacgtcactcacgtcttcttcgtgtcgtggaccaaccgctccaccgaagcagaaaactgcgaagttaacggcgctatgttacagaacgtgcttcgcgccgttatccccaacgcccccaatctccggcacgtgtcactccagacaggcggcaagcacta

SEQ ID NO: 46980 - DNA, 343 bp, Glycine max
  Clone ID: LIB3139-109-P1-N1-F11
caacagtagattgtattttattaatacaaaattatccaacaagtaactagcatagaggtggtgctaggaaaaaaggctgaacaatgctcaagattatgatgtccgctaatgccatagtcaataactgtgattgtgcctaataggatcaagtgtgtttaacaaacagcaacacctcatatcactctgaagacccacattaagacaaacatgataaccacatagatcaggacaaatctgaccaatagaggtatgtcgtactcataatgcgagccaaatgggtctttataaactgtcacatcaaaatccatgctaataaacttctcatatactcgaccctatacat

SEQ ID NO: 46981 - DNA, 444 bp, Glycine max
  unsure at all n locations
  Clone ID: LIB3139-109-P1-N1-F3
gccaaacatcaccacgaagtctaaacgaaagcgcatagagagcgaaacgatgtcntacgacgatgtggagatcgaggacatggagtggaacgaggagttgcaggcgtacacgtacccgtgcccgtgcggggacctgttccagatcacgaaggaagaccttaagctcggcgaagagattgctcgatgccctagttgctctctctacatcaccgtcatctacaacctcgaagatttcctctccgattccgatcaaaatcgaccaaacaagggccttcaaccttccaagcagcaacccctcaccgttgcttgaatttcagatgtcctgacatgaagagcggagtaggttttgtcatggctttgatttatcataccatcacatatattgttttgcagataggaattcttggtatttttgatggagaaatggagaaatgaataatatga

SEQ ID NO: 46982 - DNA, 450 bp, Glycine max
  Clone ID: LIB3139-109-P1-N1-F4
cagtggtaaccatgacagttggttccttcttcatcaggacctccagggggctcaactcctgcaactgtctgcttctctgcactctcagtggtggtggtgtagtggcatactcagaatcacaatcaggagctgaacgtcctagtattgaagctaatgagcctgccaaaaagaaagtggtggttcttggaacaggatgggctgctaccagtttccttaaggatctggatgcttcattatatgatgttcaagttgtttcacctcgtaactactttgcatttactcccttattacccagtgtcacttgtgggacagttgaagcacggagcattgtagagccggtccgaaacatcattaaaaagagaaaaggagaagtgaatttttgggaggcagaatgtgtcaagattgattattcgaacaaaaaggttttctgtcggtccaatattgacaact

SEQ ID NO: 46983 - DNA, 446 bp, Glycine max
  Clone ID: LIB3139-109-P1-N1-F5
gctttacagagtggaatggtcggttttatggtcaaaccaaccctgacttgaatcaacggctggcgttgttcatgtctctgtggcaaatgtctgacccttgatgtaatccaagactttcatgatattgtttcttagaattttgtatttttttttataatttatttaattattttctccctacaaaatcttgatctctctgctgttgtggagtggtgttgtgttaatctcattcacacattcacagttatactctctctctctttgtcgcttggatcactgatctcatctcaattttcagatatgtcgacatctgataagccagaagtggtggaaaggggtagcaaggatgaaaaacacaaggaagatgatcaagaggaggggaagggtggattcattgagaaggtgaaggatttcattcatgacattggtgagaagattgaggaagc

SEQ ID NO: 46984 - DNA, 330 bp, Glycine max
  unsure at all n locations
  Clone ID: LIB3139-109-P1-N1-F6
catgcgccggcgaagctcgaattcgctcgaggctgcattaactgattttcttttttgctgaatactaacccagatgcgaatattgcaaaggagccgggaccttntcatttaagttcaaaaagccttctagaatgttacacacccattgtagttcctgtatactgttgaccttagtataaaagataaaatataggcaatagcaaattcatattgagccagttgtgtttattactcacaacatgctgagaagcacattgagatttttaccaagcaacgattttcaggtctttcaatatgcattgctaatactcagtattctttcttatacaa

SEQ ID NO: 46985 - DNA, 435 bp, Glycine max
  Clone ID: LIB3139-109-P1-N1-F7
ttgcattgtctctcaatgaggttgatggaagagaggattgcccggcctgagaagtattcaactgaggggaagccggttcctccagaagttgaagatcctaacctgtaccactatgccttgttctctgataatgttgttgccgcatctgttgtggtcaattcagcaacaaagaatgcaaaggagccgtggaagcatgtgtttcatgttgtgaccgataagatgaaccttggagcaatgcaagtgatgtttaagttgaaaaattatcatggtgcacacattgaggttaaggctgtggaggattacaagttcctgaattcatcttatgtgccagtcctaaaacaattggagtctgctaaccttcagagattttacttcgagaacaagcttgaaaatgctacaaaggacacaaataatatgaagttcaggaaccccaaa

SEQ ID NO: 46986 - DNA, 459 bp, Glycine max
  unsure at all n locations
  Clone ID: LIB3139-109-P1-N1-G1
tctcggctacaaagatggtatttttgagctcacgatttcacacccgaatgggccaaacatgnggtgctttcagagggctagctctttcaagcgggaaaggaccgccagatgacanaaatcactcaccatataccgagncggtcggaagncctctgaccctatcnttgggagcgccttataatatctcaaaattacanccgcccatattgagcctcacccccaacagaggggactttaactgatattttagtgaggaagccttcgtcgtcctcagtttcagctacagtcaatccgaaggttatactggagctcttctcaatataccatgattggcaggagaaaaaggcccaagagataagcataagacaggaggaaatagaaaacaaaatagaagttgcagatgctctagcgatcaaacttcttcagcgatataatcattcaacttctacaatgaagact

SEQ ID NO: 46987 - DNA, 426 bp, Glycine max
  Clone ID: LIB3139-109-P1-N1-G10
atccctctgcctaatgaacaatcaaggatggaaattcttaagatgcatgctgctggtatcgctaagcatggtgaaatagactatgaagctgttgtgaagcttgcagagggatttaatggggctgatcttcgaaatgtctgcacagaagctggaatggcagcaattcgtgcagagcgtgattatgtgatccatgaagattttatgaaggctgttaggaaactgaacgaggcaaagaaacttgaatccagtgcgcactacagtgctgattttggtaaagactagaatctattgcaaaattcttgcagagccatggatatctaggcagtgcatcttgagttggaaatacctcgagcaagttactcaattcgtagagctaagcgtgatgttccctttgggttatggcttgtgttttccgaattctaaaat

SEQ ID NO: 46988 - DNA, 425 bp, Glycine max
  Clone ID: LIB3139-109-P1-N1-G11
agtttcgcatgttctgttttttacatagttatttcaatgcgtttggttgatacttatgatggcaaggcttaaaatacatttcataaaatttttgttgcacctttcaaaggcttaaatcccattcattttgttacattttctaataccatttttcagattgaaccatacattaattcaaatttttatctttttattaccactaccaatgtttatttttttcaatgcaaagatctctcaatttttaaaaataatgtattatgtgcttcttttgtctttacatcaagttacactccaactccatttttataatctcgttttcaaaaatacactattttaattgtttagtttttttgaaatatttcttacatttctcattaacttaatcaccccctaaaagaataatttttataataaaaatttttctt

SEQ ID NO: 46989 - DNA, 409 bp, Glycine max
  Clone ID: LIB3139-109-P1-N1-G12
ctcaggaatgtgttcccaggacctattgtgttttaaatccacagaatccttttgtgttgaaggggtggatggggaaactgactttcccccagggcacttcccgaagtgttaaaagaatgcctctttctataggggggggagctggtgcaaagaatgctattctcataaatatgccaaatgctgttctttcaatgtggagatattttgttggagatctcgtctttgaagtttctaagatgacttctccctacattaaatgtacaatctctttcttcatagcatttggaaatttggctgatgacaccatcaattttgaggcttttccccacaagctggtgcagtttggagagattcaggaaaaagttgtattgaaattttcacaagaggaatttcttacagcttggtcaac

SEQ ID NO: 46990 - DNA, 443 bp, Glycine max
  Clone ID: LIB3139-109-P1-N1-G2
atcgctttttcagtttttttccgtcatcaaatctagggttcctgcagtggtagttgccgtcaccacggcgagcgccacctccagaatagttgccgccaatttctgattcgtgatggggaaaaatgagtttctcacacctaaagcaattgccaatcgaatcaaagcaaaaggattgcagaagcttcggtggtattgccagatgtgtcagaagcagtgccgagatgagaatgggtttaaatgccattgcatgagtgaagggcaccagcgtcaaatgcagatttttggacaaaacccacaccggatagttgagggctattccgaagagtttgagagtacttttctggagcacatgaagcgcagtcaccgattcagccgtgtggcagccactgtagtttataacgaatacataaatgacagacaccacattcatatgaactctactc

SEQ ID NO: 46991 - DNA, 430 bp, Glycine max
  Clone ID: LIB3139-109-P1-N1-G3
ctgccccagcctaaagctccatttttgtttttccaatccttcaaaaattgtgtttctttggggggggatggggatgataacttaattagtgttcatgaatatgtcaagccttactttagtggttctaaattgaaaagctttctagctggtcataatatcaccattactgatggtattgacaaaactagtgcaactttgcaatttagaaagttagcagattgtgattttctcaagagaaactttaagcagatgtctaatgttttatgggtggctcctgaggacaaggcgagtttatggtcacaacttcattatgtttcgtgcaataatctggaaatgcaagaagcttatcttgtcaatctcgtaaatgtgttacgagaattgtatttgcacagtccagaggaagctcgccaattgagaaagaaagctctct

SEQ ID NO: 46992 - DNA, 442 bp, Glycine max
  Clone ID: LIB3139-109-P1-N1-G4
actgattataaatacctgaggtaccaagtaattgatacgccagggattttggacaggccttttgaagatcgtaatattattgagatgtgcagtatcactgctctagcacatttgagagctgcaatcttgtttttcttggacgtctctggatcttgtggttacagtattgctcagcaggcagcgctgtttcacagcattaagtctttgtttatgaacaagccgttgattatagtctgcaacaagactgacttgcagccactggaggggatatcagaggaagacatgaagttggtcaatgagatgaaagctgaagccttgaagactctagttggtcaaggaggtgagcctacagacaataacagtgtattgttgaccatgagcactttgacagaagaaggggtaattgctgtaaaaaatgcagcatgtgagaggttattggatc

SEQ ID NO: 46993 - DNA, 452 bp, Glycine max
  Clone ID: LIB3139-109-P1-N1-G5
aattgcgccgcaccactttctgtcgtgtcttctcactgtcaatttgtgtgtcgttctttttaatctgtatgctattttgtgtctcaccgtcgtcgtggtgggcgcttcgctgtttcataacgatgagaactaagacgtgaaacaatggtggagggtagcgactaggtgctttcgcagtaaaaaattgtgttgtaaatcacaattcgttaatcgtgacctctcttgctcagctggaatctcgaaattgaactatgaaccttcatccgtcaatcgccgcaagcttctctgtggcattcgactattgttgatctctctttccattatgcagctgcctccaatgatttttggatgcaatcatcgtaatgtttttaggaaaatcagtgggactaattccttaccatgaaagataagctcaagtttcggagggtatgtagctaattttatttttattt

SEQ ID NO: 46994 - DNA, 382 bp, Glycine max
  Clone ID: LIB3139-109-P1-N1-G8
gcacaatttgttagtggtaaaaccttcaaatatgatataattggtgctggttcacattcttgagaagattttcctgaaaaggaagatcaggaaaaacccaaaaagattgatgccagattgagacaaagaatagatcctcaatacaatgaggttcaggctcagatggaaacaaatttgtttaaattgtctcttgatgatgttgaaactcctaaaggttccatgttggatcttaaaatttctcaatctaaaattgcacttcccaagaacacagttggaggaactattctgcgtagtgatctattggcaaattttttgacagaaggcaattttagagcaagtgttgatttgcagcgcactcatcgtattaaaagaatgattaaaa

SEQ ID NO: 46995 - DNA, 321 bp, Glycine max
  Clone ID: LIB3139-109-P1-N1-G9
gataattcccccctattttcatatcaggttgggaattcgcattgggtaaatgatataggggaagctgatttacacttaccacttgctatttgctaagtacatattttctttgcttgtttaagtttttggtctagcaggaaatacagctgacatggggatagaacaagtgatttaatgttgtctttgaaaaattaatcgatgttttcccttaagaattagcagttcattcatagattctgtaaaatttggggatgtttcttaaactctagcttcttaatgtgttttttaatcattgggctaccccatttatacaggtattgc

SEQ ID NO: 46996 - DNA, 363 bp, Glycine max
  unsure at all n locations
  Clone ID: LIB3139-109-P1-N1-H11
caagttttatttcctggacgtttccaggtacactttttcgtttgtttttttttataattttgttactgtgattactgtatttatgtcgagtgcaccaatggaacacatgatggcatttttttgcggccatgattctcatatgaataaaaattgtacgtcgtttttgacgtctcagtttcgcaaaanaaaaaaaaaaaaaaaaaaaaaaaaaaaaaaaaaaaaaaaaaaaaaaaaaaaaataatgttgtacataatatattaattttttttaaaacattttttaaattaggatgtgaattatataaatgataattaaatttatttattntggggggggcctccccttttttggtttttctcccc

SEQ ID NO: 46997 - DNA, 429 bp, Glycine max
  Clone ID: LIB3139-109-P1-N1-H12
ttttgtaaaccgcgatcacaggttgccgcaccttaaaaccggagacaaaagcaatcgttacttgtgctcaagaatctccaaactttcttctgttttctctgcactcggttcttcaggaaaagaaaatcactctctgtattgattacagacttcgtgaatcattttcttttcaactttcagttcacttgctgaacactctcctataaatatataggacttcgtgtcagatttgaacttttcctgtctctttctcggttttctttcttattctcatcttctttaaattttaaggctcgcattttgtttctttaaactttctgttggactcatttgaaatacaacatgaagttttatccaggacaaaatgtctctgaaattgtttaccattttcagagtaatgagacagctaataggcttgatgcttatttt

SEQ ID NO: 46998 - DNA, 442 bp, Glycine max
  Clone ID: LIB3139-109-P1-N1-H2
gtttgattgtgttgatgaggaggattcctttgaggaagtttctttaagtgcagcacttaatggtgttgagggtttggactatatggaaagaattcctcttgccacatctgagggttttcctcatgtgctttcacgcaaaaatggcgaaaaaggcaaaaggagatttgtctctggggatggtgaagagatgacattgattccaggaaccagtgttgaagaggcttacaacaagctaatagttgaacttgagaaaagtgttcctacattggttggcattgaatgtcccaaggatgagaaacttcctcgtcgcaaaatttttgacaaacctaagacgcgctgcttcactattctccctatggagtttaatcttgtggtccgtcaaaagtttttaaatattgtgaggttcattatgaagaaaagggacaagcttagttgtcaagtt

SEQ ID NO: 46999 - DNA, 310 bp, Glycine max
  Clone ID: LIB3139-109-P1-N1-H3
cgacggcagatacaaattttgttactaaacacgagaaaaatcttgctttgacagaagaggaaaagatggaagcgattagaaatagaggtattcctgctgatgtccttgcaaagcgagctcatgaatttgaaaaacatgttgctcatgaaagcctcaaggatcaaattcctgctgttgacaagttgtattctactaaggttaataagtttgcaaaaattatgaaccttacacaaagtgttgttggtgatcttaaacttcttactgttatgccttaattacattgcgtatcggtttcattgattttaatatt

SEQ ID NO: 47000 - DNA, 444 bp, Glycine max
  Clone ID: LIB3139-109-P1-N1-H4
aaccagtgcaactattgcatctaagacaagaactttttgtcgaactggtacaagtcctgaaggatcaaatttcacagaagacatcaaaggcgacccttcaaaccctgatccaattctctccttgggggaggaacaggatcagagctgtggaagcagctgctgttcctgttttgattgagcttcttctcgattgcaaggagagaaagccttgtgagatgatgctggtgttgttggagctgctatgccagtgtgctgagggaagagcagaacttttgagccatgcagcaggtcttgccattgtgtccaaaaagattctaagggtttcgactttggcgaatgatagagctgttaagattattctgtctctttcgaggttctctgcgactccacatgttgttcaagaaatgctgaaactcggtgtggtcgcgaaattgtgcttggtgc

SEQ ID NO: 47001 - DNA, 419 bp, Glycine max
  Clone ID: LIB3139-109-P1-N1-H5
agcatttggaaatttggctgatgacaccatcaattttgaggcttttccccacaagctggtgcagtttggagagattcaggaaaaagttgtgttgaaattttcacaagaggaatttcttacagcttggtcaactcaggtgcgtcccgcaacgactctgttggctgatgggtgcccatatttgtatgctatggtgcatgatagttcagtgtctacaataccaggtgattttgtcattggtgttaagttgacaaccataaacaatatgtgtgcatatgggctcaatcctggtatttcaggttctcgtcttttgggcaccattcctcagtccatttcacagcaaactgtttggaatcaaatggcaacagtgagaacaccattgaattttgattctagcaagcagagcttttgtcaattttcta

SEQ ID NO: 47002 - DNA, 200 bp, Glycine max
  Clone ID: LIB3139-110-P1-N1-A1
agggagggagccgtagcagcggaagctctagcttgggtagcgaatcacaatggcgagaggattaaagaagcatctgaagaggcttaatgccccaaagcattggatgcttgacaaactgggtggtgcatttgctcctaagccctcatctggaccacacaaatcgagggaatgcctgccactcatactcattttgcgaaacc

SEQ ID NO: 47003 - DNA, 453 bp, Glycine max
  Clone ID: LIB3139-110-P1-N1-A11
aatacacaaaccccgttcctccgttcacgcactacctcaggctgggcgttctcttttactaaaggagcgcaacaatctctagaaccctctcagccaaaaaaaacaatgcagacccaccagaaccctcccacactggattccgacccgcagctcccgcagatcaaaatccaccacccctcctccccgcgccatcaccacccctccttcgccgccacccccacccccaccgccggcgcacgccgtaaaatcggcgtggccgtcgacctctccgacgagagcgcctacgcggtccgctgggccgtgcagcactacatccgccccggggacgccgtgatcctgctccacgtcagccctaccaacgtcctcttcggcgccgactggggctcgatcgacctctccatcaacactgaccccaactccgacgaagacgccgtcagcgccgtcaacagtaac

SEQ ID NO: 47004 - DNA, 269 bp, Glycine max
  unsure at all n locations
  Clone ID: LIB3139-110-P1-N1-A2
ttaaaaaaaaaaaaaaaaaaaaggggaagttatttataaaaaaggggggggggaaaaaaaaaaaaatataataataaaaaaaaatataatttttttatnttnngggggtttggttttttatcaagttttttatctttgaattaaattttattattgtgaatagagggtgtataatttttccgtttcccccctttttttaattttttccccccttttttattttttcccttttctttttaaatttcaatttttttttttttttcaaattt

SEQ ID NO: 47005 - DNA, 454 bp, Glycine max
  Clone ID: LIB3139-110-P1-N1-A4
gttgagttgatttctgatcccaaattgagtttgagtttcagccatggtatctgtttctctgctcttattcctatctttctttgccttctttgcaccctctgaatctcacgacaaagtctcgttggaattgtactacgaaagcttatgcccctacagcgccaacttcatcgtgaatcacctcccaaaaatcttcaccccagatcttgccccaatcgttcacctcaaactcgttccttggggcaatgccaaactccgtgccaacgccacctttgactgccagcatgggccatatgagtgcttgctgaacacagttgaagcctgtgcaattcacatctggcctcaactcagcaaacattttcctttcatctactgtgttgaggatctggtgtttcagagtaagcgtgaggaatgggaatcttgttttgagaaactggatcttgattcggaacctatt

SEQ ID NO: 47006 - DNA, 228 bp, Glycine max
  Clone ID: LIB3139-110-P1-N1-A5
gtttagttgatttcaaattcttaaactattcagagcatcactcatagtggccgtttttctgtgcacgttgggatcattctttgctttcttcgcaccatctgcatcgtacgacatagtgtgatctgaatctttctacaaaggcttatccccctacattgccaagtatatcgcaaatcatatgcactaacttttcatcatatttcatgccccattcgttcacctgaaact

SEQ ID NO: 47007 - DNA, 464 bp, Glycine max
  unsure at all n locations
  Clone ID: LIB3139-110-P1-N1-A6
aaattcggctctagatcaaaaccataaagtttttttttctctgaaagatcccaacattggggggcttttaaatctcgctggcatcgacctacaatatttatctttcaaccaaaacaactcaaacagatggttgcaagacaatgtcagaaacttttggaatgtcacattcaactacattactgtgggaaatgaaatcaaacctttgcactcattttcacagtttgtagtgcctgcaatgcaaaacatccaaagagcaatttctaatgctgtccttggaaaccaaatcaaagtttccactgccattttagtctggtgcattgtcagaatcataccctccatcaaaaggctcatttacgtctgattatagaacatcatatcttgatggtgtcatcagatttttagtgaacaacaatgccccactattgtntaatgtgtacccttacttagcttacattgaaaaccct

SEQ ID NO: 47008 - DNA, 252 bp, Glycine max
  Clone ID: LIB3139-110-P1-N1-A7
tcggctcggccttacatacaggtgaaaattaagatgggagaccgggttcagcctgagaaagggccatattgactaaatgaagaactgcggagcattccttgggaagaaaattaatgatgctgggcactgccacttacttaatgatgctaagcaggcacaagatgctgggtattgtggctaagtgctgatataatgacctctgtgtgcatggatggtggcagaaggggcagaaaaattttgtttgcctggggg

SEQ ID NO: 47009 - DNA, 443 bp, Glycine max
  Clone ID: LIB3139-110-P1-N1-A8
atttgaaattttaataaaccgcgatcacaggttgccgcacgttaaaaccggaaacaaaagcgggcggtacttgatttcaagaatttctcaatttcttcctacttctttgtgtacgatttcttaagggaaagaaaatcactctctgtgctggtcacagacttcgtgaatcattttcttttccactcctagtttatttgctgaacactctcctatttgatataggacttcgtgtcagatttaaactttttctgtttctttctcagttctctgtttaatttcaagttcaagctggtgaaattttggattagtgctcccactctcctatctggtataggacttcgtgggtagacttttctacttctctcctttctttcactctcttcttctcactgatccgcattgccgttcaaagtggtcttatttgaaaaacacttgggcgttgg

SEQ ID NO: 47010 - DNA, 445 bp, Glycine max
  Clone ID: LIB3139-110-P1-N1-A9
ctcgagccgaatcggcttgtgaaagaataaaaaaatgatatgagggaacctcaaactcattggagtggagctgataatagcggagcacgcgaactgatgtgtattcgaatcctaggagctagtaatcgacgatatgcttatattggtgacattgttgttgctgtaatcaaacaagcagtaccaaatacgaacttagaaagatcagaagtgatcagagctgtaattgtacgtacttgtaaagaactcaaacgtagcaacggtataataattcagtatgatgataatgctgcagttgtcattgatcaagaaggaaatccaaaaggaactcgaatcttttgtgcaatcgcccgggaattgagacagttaaatttcactaaaatagtttcattagcacccgaggtattataagacgaaactgcgctatggatacattatttttttgtga

SEQ ID NO: 47011 - DNA, 451 bp, Glycine max
  unsure at all n locations
  Clone ID: LIB3139-110-P1-N1-B1
aggagctagacaggtaatatgtagagaaagatgggttgaagagaaggacattgtaaatttgccttatgtgaatgccattgcaaaggaagcaatgaggctgcaccctgtggcaccaatgttggtgccaagactagccagagaggattgccaagttggagggtatgacatccncaaagggacacaagtgcttgtgaatgtgtggactattgngagagacccttcaatttgggacaaccctacagagttccaaccagagaggtttcttactaaggagattgatgttaaaggacatgactatgagctattgccatttggtgctgggagaaagatgtgccctggctaccctcttggccttaaggtcattcaagcaagtttggccaatttgttgcatggatttaactggagactgcctgataatgtcaagaatgaggatttgaatatggatgagatt

SEQ ID NO: 47012 - DNA, 387 bp, Glycine max
  Clone ID: LIB3139-110-P1-N1-B10
ttgatttgttgggtttataaggagcaggcaaagcttttccaaacaagattgtttttgatgataagcttgtgttggctaacacacaagaattctttgatggaaattttccagtggattcttggttaccaatttttgtgaattgtctttatcctgtaagttaattaccttcagaagctgtcgttgtaaatgtcacatgtggtagtggacgtggtggttaacccaccactgtttgagttactcctataatgaacaataagtgctaattaaaaaacaaaaggattcggacatgaattgtgaaaggtcacaatatattatttactaattatacttgaatatttatatgaagctatactggataaacaaaaattgggttaagatttgaaaatt

SEQ ID NO: 47013 - DNA, 439 bp, Glycine max
  unsure at all n locations
  Clone ID: LIB3139-110-P1-N1-B11
gaggaaattctgtcttttagtgcaagagattacagaactgcaatggtgagtaaaaatagcaaacctcaagctactgcaatgcatgtgggagctatagaaattatcattgatagtatcgcaagtcccgattgcaacatagatggtgcaatgcttttggttgatacttatcataccaatcctgaaaatgcagttcgaagtatttttgtagcgcctttcagaggcggaaggcccattcgggaggttacattttcgaataccattgagcagattgaaccagacatgaattcaaggttacagcttttgaataccactaccaatggtgattccgttcaagggaaagatctcgcaatggttaaagttaatgtagcatgtgctgctgttggcttgacatcaagtnacactccaactccattgatggaatattggttgcaaaaagaca

SEQ ID NO: 47014 - DNA, 427 bp, Glycine max
  Clone ID: LIB3139-110-P1-N1-B12
agagaacacacacatacactgttcataaccatgatttgggttcgcggagactctctcggcactggcagcttcgccaccgtcaacatagccatacccacaaatacttccattcattttccttctcccaccgccgtcaaatcctccgatgttcactcctcgtctatgctgaaaaacgagaaggagatactcgattgccttggagcttccccttatgtcatcaaatgtttcggccatgatcacactgttgaaaacggagaagagtattagaacattttcctcgaatacgccgccggtggttctctcgccgatcaggtcaaaagacacggcgggaggcttccggagtcttacgttcggaggtgtacgaggtcgatcgtcgaaggtctaaaacatattcacgacaacggttatgttcactgcgatgtgaagc

SEQ ID NO: 47015 - DNA, 437 bp, Glycine max
  Clone ID: LIB3139-110-P1-N1-B2
atgcaacagtagttattgtagctgttggcaaggctgtgagagtagaacactgcgaacgagttcatgtaatcgtagccgcaaagcgtatttgtattgctaattgtcgtgaatgtgttttctttttgggagtgaaccagcaacctcttattcttggtgataaccataaactgcaggtggctccctataatacattttactcccaattggaagagcatatgaatgaagttggaattgtgcccacagttaaccgatgggatgagcctctagcattgggcatggttgatccccatgattcattatctcatccagcgggtgtctctgatgttcaagctgagtctgctacacgtgtggaccctgatcagttcactaattttgtgattccaaattggtttggagcagagtccacaggggctacaaaaggcaacccattcatgtta

SEQ ID NO: 47016 - DNA, 454 bp, Glycine max
  Clone ID: LIB3139-110-P1-N1-B4
ttctgtttgtggcagagatcacaagttacttcaatgtttggggctggggatctttgggcaaaagggtacactggtgccaaggtcaaaatggccatatttgacacaggaattcgagctgatcaccctcattttcgtaacatcaaggagcgcacaaattggacaaatgaagatacgttgaatgataatcttggacatgggacttttgttgcgggagttattgctggtgtagatgctgaatgccttggttttgcaccagatacagagatatatgcatttcgtgtgttcactgatgcacagcctattgcaggtgtcatatacatcatggttccttgatgccttcaactatgcaattgcaaccaatatggatgtgctaaatttgagcataggaggacctgactacttggatctcccatttgttgaaaagatatgggagataacagcaaataacataatt

SEQ ID NO: 47017 - DNA, 402 bp, Glycine max
  Clone ID: LIB3139-110-P1-N1-B5
cccttgtggttgagcattttatatgttaatgaaaaaagaagaaatgacagtgtaagttaaaacagggatcaataaagatgagcagaatatgaacatgttacgaacactaattcaacactttctccctcaatggtctagtattacagatcgagtatgttgtcaaagacaagataacagaatgactgttattgacatcaaacgcatagatggggtaggtgttggtgttgagatgcttattgcgttgaatatgttctagctgcttacatataaagaatacacgtcgttaatgatgaactatctatggcagttggaatataaataatggatggtaggtaaattgtagtattgggccagatatcaatctgctaactatgaatgtgagtattggaagacaatgtcttg

SEQ ID NO: 47018 - DNA, 451 bp, Glycine max
  Clone ID: LIB3139-110-P1-N1-B6
gggggaagagatccagcagcaatggtgtacgtcaaggctcagaaatcaaaagcctacttcaagagatatcaagtcaagttcaagagaagaagagagggaaaaaccgattaccgtgccaggattcggttgattaatcaggacaagaacaaatataacactccgaaataccgatttgtggttcgctttagcaacaaggacattgttgcacaaataatatctgctagcattgccggcgatttagttcttgctacagcatattcacatgagctgccacgatatggtcttgaagtaggacttacaaattatgcagcagcttattgcactggtctcctgttggcccgtagagtcctcaaaacacttgaaatggatgaggagtatgaaggaaatgttgaggctactggagaggattattcagtggaacctgccgagagcaggaggccattccgtgcac

SEQ ID NO: 47019 - DNA, 447 bp, Glycine max
  Clone ID: LIB3139-110-P1-N1-B7
tctgattgccttcaaatcacacactctcttcaatttctagggttttgctattgctttgcctccgttccccctttctcacaaaaacaacgccttttctcttctccttcgtatctattctttgcgtttggtttttggttgattgaaggcattcacagcgtaattcgttgctgcattttaatcgatttatctaaccaggactgaatgacctaatggagtctaaaggtgggaaaaagaagtctagtagtagtagtagtaaatcaattttttacgaagctcccctcggatacagcattgaagacgttagaccaaacggtggaatcaagaaattcagatctgctgcttactctaactgttctcgcaaaccatcctgatacacatccggattgatagttcgttgcatgcaaccatagttttattaggattttttcttctttgttttcaattagg

SEQ ID NO: 47020 - DNA, 213 bp, Glycine max
  Clone ID: LIB3139-110-P1-N1-B8
aaaaaccgaattttaattttatactagttgaaactaataggggggaggcatgggtgcaggggggggagaccattcaaacaaaaaaaaggaggtggtgatttacctcaagcgcaagacgactggaaagctttacggatacaacgaaatcaatcatagtgacaattacaagtgcaagtcaagggacctaacaaatcagtacaaaatgaagaaaaa

SEQ ID NO: 47021 - DNA, 445 bp, Glycine max
  Clone ID: LIB3139-110-P1-N1-B9
caagttagtgcgcttgcttgctagttaaaggtttagggtgttgagagagagagagagagacgaatctgaattgagctgagtagatatggtgagaaaacatggctggcaactacctgctcacacttttcaggttgttgcgatcactgtattctgcttattggtgattgctttctatgctttccttgctcccttcattggagggggtcatatatgggaatataccttcattgctatttactctcctgtggctctcattgtgttcattctttacgtcagatgcactgcaattaaccctgcagatccgggcattatatctaagtttgaccctagagtgggaaataagttcagttctgctcatgatttatcagggaagcatcatggttctgaacatgaacgcattgctgctagagagcaatattctccgtcatctgctgctttcaaaagg

SEQ ID NO: 47022 - DNA, 402 bp, Glycine max
  unsure at all n locations
  Clone ID: LIB3139-110-P1-N1-C1
atgaatacccatgggcaagaaaaatcttccaaagacagctctttggtctgcctccacgatacagagattcagtaagaacaataactccagggttgcccatttttctgtacaactactccactcaccaactccatggtatctttgaggctgcaagttttggaggatccaatattgatccaacggcttgngaggacaagaagtgccctggtgaatctcgtttccctgctcaggttcaagtgattactaggaaagtttgtgagccactagaggaagattcctttagaccaattcttcaccattatgatggccctaagttccgtcttgaactgagtgtgcctgaggcactgtctcttctggatatttttgcaaaccagaacagtttcgatgacattttcaaagcca

SEQ ID NO: 47023 - DNA, 368 bp, Glycine max
  Clone ID: LIB3139-110-P1-N1-C10
ccaaaacagttcttatgggattgaaagaatccccactcctcgtattcccatctccagctacgagggatccgacacttgtacgaggatcttgtcggcttgccagcgtggggacaatgagaggtgtcaggagttggttggaaagattaaggtttggggtagagagagtgagaggaacaagaggtgcatagttggtgctggtgctggtgctgttcttgcatatgcctttgattgtttctcaagtaactctattgataagcatgtggttgttttggaggaggttttggaggtgatgacatggatgatcccatttggggaagagggtgtttctatattgagttcaagagcttctttgaattcattggtttggt

SEQ ID NO: 47024 - DNA, 429 bp, Glycine max
  Clone ID: LIB3139-110-P1-N1-C11
gtgtgccagagttttctgagtttcataggagaaaaaaatgacagaagaacaaaccaaaacggctgagtcagaatcagtgacaccaccacctgctgctgctccttcacaggctcctccagctgctgaggctgaacatgttcctgaggctccaaaggatgtggctgaggagaaatctgtaattccagtgccttcttctgatgacaaacctgatgagtccaaggctcttgtcttagttgagaagactcaagaagttgccgaagtgaaaccaactgagggctctgtcagccgagatgcagtgcttgcaagagttgcaactgagaagagattgtcactaatcaaagcatgggaagaaagtgaaaaatcaaaagctgaaaacaaggctcacaaaaagctttcatccgtttctgcatgggaaaacagcaagaaagc

SEQ ID NO: 47025 - DNA, 450 bp, Glycine max
  Clone ID: LIB3139-110-P1-N1-C12
gttcttcttcttttgttgttctgtgtttgtgtttgttttttctcgcacctgaaaatgtcttgctgcggtggtaactgtggttgcggaagctcctgcaagtgcggcaacggctgcggaggctgcaagatgtacccagacttgagctacactgagtcaaccaccaccgagaccttggtcatgggagtggcacctgttaaggctcaatttgagggtgctgaaatgggtgtgcccgctgagaacgatggctgcaaatgtggaccaaactgctcctgcaacccctgcacttgcaagtgaggtgttgggagagcaagcttcaagcagagatagcccttaattaggaataatgataaactattaatgtgtagctaaaaacttatgtattatgtctgtgatggttttcgtgcactctggtgttttgtgttaaacaaacatccttagaataaagtggtc

SEQ ID NO: 47026 - DNA, 427 bp, Glycine max
  Clone ID: LIB3139-110-P1-N1-C2
cgatgaaagggcaacctggtgctttggcttgagattgttgattgctaatatggagactggacgagaaacatactttgtctaacactctttacttgagctcgacattatgtttataatgataaagaagattgatggacatctttgcttccttctgcttcttgtacccaaatccttttagtatttagagttgaaaaataatgcattcttagatttaatgagacgatgaaagggcaacctggtgcttttaaactcttgccttgacatgatcaagtgtcgtaccctttatggatccatgtaggcagccttaacttgcatttgcaagaggctgattccggagtcaaacttgtgacccttgatttcatactgaaacaaggctctcctaaatctgagattataaatactcaattttatgttagtttgatcttgg

SEQ ID NO: 47027 - DNA, 486 bp, Glycine max
  unsure at all n locations
  Clone ID: LIB3139-110-P1-N1-C3
tgcacgcgggggggaggtaagaattnggttcgagatcaataagggcaaaggtagaattgaagagacacacaaaaatattatttgctcaagtgaatggagccacgccttctgacaatattctttgtggttctttcattctcaccatttgttcagtccttggtgcgtcattacaagtttagtgtggtcttgaagaataccactaagctttgctccacaaaatcatttgtcacggtcaatggacaatgtccagggcctactctctatgcaagagaggatgatacggttattgtaaaggtcactaaccacgttaagtacaatattacaatccactggcatggaatcaaacagcttcgaactggttggtctgatgggccagcatatgttacacaatgtccgattcagccagggcagagctatgtctacaacttcaccatcaatggtcaaagaggcacacttctctggcatgcacacatcacgtggctaaga

SEQ ID NO: 47028 - DNA, 453 bp, Glycine max
  Clone ID: LIB3139-110-P1-N1-C4
ggctcgagattatttaataacagttgaaaccaatatattggactcggaaacgatgaagtgagcaacacaacacaaccagacccatcgttatcttatctccttctccatggcttccttacccagttttactccttttgtatttctattgcttgtcattggatgcaatgcaaggcctttgtatccacttcccagcaaaggtgatgatggaaataggaagcccctacaaacttttcgcccttataacattgctcatcgcggttcaaacggagagcttcctgaggaaactcatcctgcatacttgagagctattgaggagggtgcagacttcattgaaactgatatcttatcatccaaagatggtgttcttgtatgtttccatgatgttacccttgataatactactgacattgcaaatcgcacagagtttgctaatcgtaaaagaacatatgaagt

SEQ ID NO: 47029 - DNA, 457 bp, Glycine max
  Clone ID: LIB3139-110-P1-N1-C5
cctctgtggttgagcacagccaaactcaaagaagaaagaagaaaatccagcgaaagtaaaaccagcgtccgaaaaagatgagcagcatcggaacaggttacgatctctccgtcaccactttctcccccgatggccgtgttttccagatcgagtatgctgccaaagccgtcgataacagcgggactgttattgggatcaagtgcaaagatggggttgtgttgggcgttgagaagcttattccgtcgaaaatgatgcttccgggttccaatagaagaatacactccgttcatcgtcactctgggatggctgtagcaggattagcagctgatggcaggcaaattgttgctagggccaagtctgaagcaactaactatgacagtgtatatggcgaaccaattcctgttaaggaacttgctgaccgcgtggctagctatgtgcacctctgtacgctatattg

SEQ ID NO: 47030 - DNA, 455 bp, Glycine max
  Clone ID: LIB3139-110-P1-N1-C6
caatgggggaattggaagcgaggaagctcaagtatccaaacacgggaaccgaggcgattctcatggggattttggttgaaggaacaagtaatgctgcaaaattcttaagagctaatggaattactcttttgaaagcacgtgaagaaacagtagagctacttgggaaatctgatttgtttttcttcagccctgagcatcctcctttgactgaaccagcccagaaagcccttgattgggcaattgaggagaaattgaagtcagatcttggctactctaggttttgatgatggaaaagccaaagaactttctaaaaaaattgatggagatgtttgatttaagtttcaaaaggcaagcttaagaaatttcttgcagattgatggttgattaatacccgttgacctcttgggttgcaagttcctcttagggaaaattaactatactccctcaagattatt

SEQ ID NO: 47031 - DNA, 446 bp, Glycine max
  Clone ID: LIB3139-110-P1-N1-C7
attttgaggcttttccttacaagctggtgcagtttggagagattgaggaaaaagttgtattgaaagggtcacaagaggaatttcttacagcttggtcaactcaggtgcgtcctgcaacaactctgttggctgatgggtgtccatatttgtatgctatggtgcatgatagttcagtgtctacaataccaggtgattttgtcattggtgttaagttgacaaccataaacaatatgtgtgcatatgggctcaatcctggtatttcaggttctcgtcttttgggcaccattcctcagtctatttcacagcaaactgtttggaatcaaatggcaacagtgagaacaccattgaattttgattctagcaagcagagcttttgtcaattttctattgaccttctcggtggaggaattttagtggacaaaactggagattggatcacacttata

SEQ ID NO: 47032 - DNA, 446 bp, Glycine max
  Clone ID: LIB3139-110-P1-N1-C8
gttaaggatggtgttgaattgcaaaagcaaaaacatcctcctttgagttttgttagccatagcaatagaaacgggatggtcatcagaagaagaaagcagcatcatatcacgattccagcaatacctgaaaatcaacactgcccaacccaccccgcgttaccacgaagccgccgatttcctgatatcccaaggtaaagccctctccctggaatcccaaagcattgagtttgtggcaggcaagccacttgtccttctgaaatgggaaggctcaaaccctaacctcccctccatcctcctctattcccacaccgacgtcgtcccatcggagcactctaagtggacccaccaccccttcagcgcccacctcgactcctccggccgcatcttctcccgaggctctcaggacatgaagtgcgtcggcatgcagtacctcgaggccctccgac

SEQ ID NO: 47033 - DNA, 442 bp, Glycine max
  Clone ID: LIB3139-110-P1-N1-C9
cttcaggtagcttttttttttattattccaattcataaccgggaggatattattggtcagtgggcggggacttatattcaaataacaatactaaagtttgctcaatcactattcctcattctattgctataaagaacactcaccctaccttcaccaatcacctacacacttctttcattgagcctcatctccttatcctcactgatccaagaacagatcaccatcctattaaagaagctccttttgccaatattcccaccattgctttctctgacacttattctcctatcaggtatatggacataccaattcctgccaacaacaacacaaaacacagcattgcttgtcttttttgcctcacttcaactattgcattccatattacgcgtacaattctacctcacctaaaacgggatgatacggttcatttattcttttatac

SEQ ID NO: 47034 - DNA, 446 bp, Glycine max
  Clone ID: LIB3139-110-P1-N1-D1
aagtgtgcaatctccgatcccggtatcgcccttctttcaagggccagtctgcctagcttgcaagtgctttccttgtctggttgttctgatgtatcaaacaagagtgcgcctttcctgaccaaattgggccagaccttgctgggattgaatcttcaaaactgcaattcaattggcagcagcacaatggagttgctagtggagaagttgtggagatgtgatattctggcttaatcatgttagaaactagaaacaaataaaactggctaaatcagggaaggagatagaattgtacaggtcacattcagcatacattttggctgatatttctatcaagggtggattggtggcagtttggtgaattggtgttttccagggaactttggcttgttcctttatgacccatttttttcgcaagcatttcgaaatgcttgttccaacttaaaccc

SEQ ID NO: 47035 - DNA, 470 bp, Glycine max
  Clone ID: LIB3139-110-P1-N1-D12
aactcaaattctttctacaccataaaatttttttttcacaacaagaaataatcggggggcgtatatatacacgcccgccggcacttatacttctaaaactatctcatgaatttgaaaaacatatttctcatgaatcccttaacgatcaaattcctgctgttaacaaattgtattctactaaaattaataactttgcaaaaattatcaaccttatacaaaaccttgtttgtcgatcttaaacttcttacttattggaaattatatgatcataaacatattcctttatctaatattactgcaagggaaaatcatttacttcaaatacccttaatttcacagtaggaaattctctcttctactccaactcatttcaaaacttcaatgatcagttaatatagcaaaccttaatctacttctatccatgtgctatctatagaaataatcatttatactttcctcaagtcctcatt

SEQ ID NO: 47036 - DNA, 435 bp, Glycine max
  Clone ID: LIB3139-110-P1-N1-D2
ctccatttcgctgcattccctctgcgttctccaacgaggaaactcatgtcgcacactctcgcacgtgccactctcggtctcacacatccttctaacatcgaaacacccaagatctcttttggttctaaggatgttgatgtgacggaatggaaaggggacattctggcagtgggtgttacggagaaagatttggctagagatgcaaactcgaagtttgagaatgtgattttgagaaagatcgactcaaagttgggtggtttattagctgaagcctcttctgaagaggatttctctggcaaagttggtcagtcaactgttcttagaattacaggacttggatcaaagagggttggattgattggtcttggtcagtcaccttccactccttcaccttttaagggtcttggcgaggccgttgtggaggctgccaagtct

SEQ ID NO: 47037 - DNA, 452 bp, Glycine max
  Clone ID: LIB3139-110-P1-N1-D3
cttctccctacattaaatgtacagtctctttcttcatagcatttggaaatttggctgatgacaccatcaattttgaggcttttccccacaagctggtgcagtttggagagattcaggaaaaagttgtgttgaaattttcacaagaggaatttcttacagcttggtcaactcaggtgcgtcccgcaacgactctgttggctgatgggtgcccatatttgtatgctatggtgcatgatagttcagtgtctacaataccaggtgattttgtcattggtgttaagttgacaaccataaacaatatgtgtgcatatgggctcaatcctggtatttcaggttctcgtcttttgggcaccattcctcagtccatttcacagcaaactgtttggaatcaaatggcaacagtgagaacaccattgaattttgattctagcaagcagagcttttgtcaattt

SEQ ID NO: 47038 - DNA, 454 bp, Glycine max
  Clone ID: LIB3139-110-P1-N1-D5
gccaatgaagaaaaatctgaactctgtgaagccgaaaataaaccagatgttcaattttggtgacaatcttgagggctactacagccctatagatcaggtggaacagaaaccactggttaaccagtatgttaaccgtgccccgtttgctggaaatggagttcaagtctcacctgttactccatctgctgatgttactgcttacttcagctctgagcattcgagcagctcgtttgattattctgacctcggatggggtgaacaagtccccaagacacccgagatctcatccatgctttctgctgctcctttggacggtgaatctcagtttgtgcagggtgctgctgatcagaatcagaagaagaacaacctgctggatatggcatctgtgcaagatgattctgcaaaaactctttctgaggagcttgcagacattgaatcccagctgaagttcttt

SEQ ID NO: 47039 - DNA, 470 bp, Glycine max
  unsure at all n locations
  Clone ID: LIB3139-110-P1-N1-D6
gcaattcatctcgagtcgagctccaaaaagcttttcttttgtctatcctctcacctcaaaaatccgaatacattgtaccgcgggggggtaaatcatgcanctccactcctcatggttattatggaaatcctgcatatagtgtcggaatgtcttacccaggaagtccaatggcaaactctgttgtatccacttccccagttggatctgcaagtcctgttaggcacaatgaactgaatatgcgttttgcttatggaatgagcaatttggccggggtcatgggaccttggcatgcagatactgtgaacattgatgaaagttttgcttcttctctgttggaagagtttaaaaccaataaaacaaagcgttttgagctctctgaaattgcggttcatgttgttgaattcaccgcggatcaatatgggagtctatttattcaacagaagcttgaaacagctactacagaagaaaaa

SEQ ID NO: 47040 - DNA, 439 bp, Glycine max
  Clone ID: LIB3139-110-P1-N1-D7
gtgccaatgtggaaaggggtcaaggtttcttacacgatcattgcagcatgcttatttcccatgggcattggaggctattgggcctatggccaattgattcctgcaaatggaggaatgctcactgccctataccaattccactctcgcgatgtgtcaagattcgtgctagggttaacaagtttttttgtagtggtgaatggtttgtgctcgtttcaaatctatggcatgccagcattcgatgacatggaatcagggtacactacaaggatgaagaagccatgcccgtggtggctgcgtgcatttattagggtgttctttgggttcttgtgcttcttcataggagtggctgttccgtttttgtctcaaatggctggtttgattggaggagtggcgttgccagtgacattcgcgtacccatgtttcatgtggcttaagacaa

SEQ ID NO: 47041 - DNA, 436 bp, Glycine max
  Clone ID: LIB3139-110-P1-N1-D8
cagacagcacttactagtccaacagcgacggctgaacctctttggtctctctgtctaagaagaagaagaagaagaagaagaagaagaagaatcaaatatccttgagccagacatgtacaggaacgctgcttcacgtcttagggtcatcagtgcccgttcgtgcagcagcagcaggatacctgccagtgccagatttgcaagttccgttgccacacaacaatcctcttctggtttgggtggtttatttggatggctcactggagaccgatccagttctttaccatctctggatttcccgcttccgggcgttacacttcccccttcattgcctgattttgttgcgcccggaaaaactattattactacactcccaaatggactcaaagtggcctctgaaacatcaccgactcccactgcgtcggttggcttatatgta

SEQ ID NO: 47042 - DNA, 446 bp, Glycine max
  Clone ID: LIB3139-110-P1-N1-D9
tgcaattcaaggtatagatgctctcataatcctcacacgtgctgttccacagataaaacctggggttgatcctaccaaaggacaaagaccagagttctattttgatgatggtgcatatcctgagcaggttgactggattgggcagaaaaatcaaatagatgccgctaaggctgctggagtgaagcacattgtgttagtagggtctatgggtggaacagatcttaaccatcctttgaacagcttgggtaatgggaatatactggtttggaaaaggaaggctgagcaatatctggctgattccggcatcccatatacaattataagggctggtggcttgcaagacaaagatggaggtcttcgggaactacttgtagggaaggatgatgagcttcttcagactgaaaccagaaccataactagatctgatgttgcagaagtctgcattc

SEQ ID NO: 47043 - DNA, 455 bp, Glycine max
  Clone ID: LIB3139-110-P1-N1-E1
acaaccaccaccagattcttcgtttaggtcattcttctctctccctgcactcaacaatgtcattcttctctctttccataccctaaaaccgaaaagtgttccacttttctcctctcacacacattcccccaattccccctttcttccaccgttatgtcgggccggaaccgcggacaacccctttcttcgccgcacgcggcggggctgtcgccgccgctccacgatcagctatacggcgcgcgggcccaccaccaccatcatctagtgggccccgtccctccccatccccaccaccttctagaagacttccgcgactcgcagctaaggctgggcccgccgcgaggtgggcccatcccgctgcatccggcggcgatcatcgaggagcgcctggccgcccagcaccaggacatccagggcctgctgggcgacaaccagcgcctggccgccacccacgt

SEQ ID NO: 47044 - DNA, 222 bp, Glycine max
  Clone ID: LIB3139-110-P1-N1-E11
ttgtttcaaaatatcctctctctcaaaagaataaacaaggcggcgggatattgcacttccctcagacagaaactaccctctatctctctctttacaagccttacaatgagtaaaaaagagtgaataaaggaaagaaaggaccaccatttttggtttgagaaacataattagcaagagagttcaaaatggtgaatagagagtttaattgagtggtgttgatga

SEQ ID NO: 47045 - DNA, 454 bp, Glycine max
  unsure at all n locations
  Clone ID: LIB3139-110-P1-N1-E2
ctcgagccgctttctctctcatccagatcttgcaaaaaaaaaaaaacacaatggcagcgagcgctcccactccacgcgaagagttcgtgtacatggcgaagctggcggagcaggccgagcgctacgaggagatggtggagttcatggagaaggtctccgcctccgccgagagcgaggagctgaccgtggaggagcgcaacctcctctccgtcgcctacaagaacgtaatcggcgctcgccgcgcctcctggcgcatcatctcctccattgagcagaaggaggagagccgcggcaacgaggaccacgtcgccgtcatccgtgactaccgctccaagatcgaggccgagctctccaacatctgcgacggaatcctcaagctcctcgacacgcgcctngtnccctccgccgcctccggcgactccaaggtcttctacctcaagatgaagggagacta

SEQ ID NO: 47046 - DNA, 447 bp, Glycine max
  Clone ID: LIB3139-110-P1-N1-E3
gcttcacgcaatggttcggatgtggttctcgttgatacagctggtcgtatgcaggataatgaaccacttatgagagcactgtcaaaactcatctaccttaacaatccagatctagtcttatttgttggagaagcactggttggtaatgacgctgttgatcagctttcaaagttcaatcagaaattagctgaccttgcaacatcacctaatccaagattgattgatgggatcttgctcacgaaatttgacaccatagatgataaggtgggagctgcactttcaatggtttacatatctggagctcctgtcatgtttgtgggctggggacagtcttatactgacctcaagaagctcaatgtcaaatcaattgtgaagactctccttaaatgagggcacaaagtggtttattttcccttgcaatcctgtttacctgtcatgtttgtttct

SEQ ID NO: 47047 - DNA, 458 bp, Glycine max
  Clone ID: LIB3139-110-P1-N1-E4
gaaagggtttgtgcatggagatgtgaaacctgaaaactttttgcttggtcaacctggatcagctgaagataagaagttatatcttattgatcttggtctggcttctagatggaaggatgcatcatctggtctacatgttgattatgatcagagacctgatatattcaggggaacaataaggtatgctagtgtacatgcacatttaggtaggactggaagtcgaagggatgaccttgagtcactggcatacacactagtatttctcataaaagggagattaccttggcagggttatcagggtgacaataaaagttttcttgtttgtaagaagaaaatggccacttccccggagttgatgtgctgctttgttcctgctccatttaagcagtttcttgaagctgttactaatatgagatttgatgaggagcccaattatgccaagcttatatcactttttg

SEQ ID NO: 47048 - DNA, 458 bp, Glycine max
  Clone ID: LIB3139-110-P1-N1-E5
gtattgggtcacctccacaaagcttcagagttgtgtttgatactggaagctcgaacctgtgggtcccttctgccaaatgtgtcttgtctattgcttgctatttccattccaagtatagatcgaagctatctaacacctatacgaaaataggaacaccttgcaagatcccttatggccgtgggcacattcctggcttcatcagccaagataatataagagttggggacatcatcatcaaagatcaacaatttgctgagattacaaaggaaggaccgctggcgtttttagcaatgcattttgatgggatacttggacttggattccagaataagtcagtgggacaagtcacaccagtgtggtacaatatgatagaacaagggcacgtgagtcaaaagattttctccctttggctaaaccaagaccctgtggcaaaggtagggggtgagattgtctttggt

SEQ ID NO: 47049 - DNA, 463 bp, Glycine max
  unsure at all n locations
  Clone ID: LIB3139-110-P1-N1-E6
cctcattagtgcgatttttgtttctctnctctgcaactatgcctgacgctaaggtcttcttcgacatgaccatcggcggtcaacctgccggccgcatcgtgatggagctctacgccgacgtgactccgagcaccgccgagaacttccgcgcgctctgcaccggcgagaagggcgccgggcggagcggcaagcccctccactacaaaggctcgtccttccaccgcgtgatcccgaacttcatgtgccagggcggcgacttcaccgccggaaacggcaccggaggcgagtcgatctacggcgccaagttcgccgacgagaacttcgtgaagaagcacactggtcccggcatcctctccatggcgaacgccggtcccggaaccaacggatctcagttcttcatctgcacgacgaagacggagtggctcgacggaaagcacgtcgtgttcggacaggtcgtcgaggg

SEQ ID NO: 47050 - DNA, 450 bp, Glycine max
  Clone ID: LIB3139-110-P1-N1-E7
cagagcaaaccagtttgcaatatgttataatggacatgaccgctgttgctaacattgatacaagtggaataagcatgcttgaagagtgcaagaagactgttgacagaagagggttacaacttgctttggtgaatccaggaagcgaggtgatgaagaagctgaacaaatccaagttccttgatgaactggggcaaaaatggatctatctgacagttgaagaggctgttggtgcgtgcaacttcatgctccattcctacaaaccgaaccccatgaaggatgaatcagaaggttggaacaatgcctaataaaataaagcattgttaaccttaattacagtatgtgacgtgagagtttgagaatcatgctgcagaaagttttagagtgatagttgcatgagtactttaattcctcaagatactgagttggaggaaagtttccaacgtaggctgt

SEQ ID NO: 47051 - DNA, 447 bp, Glycine max
  Clone ID: LIB3139-110-P1-N1-E8
acttatcataccaatcctgaaaatgcagttcgtagtatttgtggtgcgcctttcagaggcgggggggccattcgggtggttacatttccgaataccattgtgcagattgaaccagacatgaattcaaggtttcagcttttgagtaccactaccaatggtgattttgttcaagggaaagatctcgcaatggttaaagttaatgtagcatgtgctgctgttggcttgacatcaagttacactccaactccattgttggaatctggtttgcaaaaagacagagggttaattgtggagtattttggaaggatgtcttacgttgctcataacgttaatcagccccaagagaaagatttgttagagggaaatttttcctttgatattaaatctcgctctagattggaaaaagtttcctctacaaaagcacaatttgttagtggaaaaaccttc

SEQ ID NO: 47052 - DNA, 450 bp, Glycine max
  Clone ID: LIB3139-110-P1-N1-E9
ctccattttagggttcactttgtatttgtaataccatttcctcgcgcggcactgcttcccgccgccgccgccgccgtcagcgtcagcaccaatggcagacgcatcttctctgccgacggatcaactcgccgccatcaccctcgacgaggttcccaaagctaatttctccgaccgcgtccccatccgatccatcatctcccgcaccgacggcggctcgggcctcgccggcaggaaggcgcgcgttggcggctgggtgaagacgggacgcaaagccgacaaggacgctttcgcgttcctggaaatcaacgacggaagctgcgccggcaacctccaggtcatcgtcgaagccgcgctgggcgaactcggccaactcgttcccaccggaacatgcgtcgtcgtcgacggccacctcaaacttcctcccgctggcaccagacagaagatcgaact

SEQ ID NO: 47053 - DNA, 448 bp, Glycine max
  Clone ID: LIB3139-110-P1-N1-F1
cagattactccaacccatgtatctgatgaagaggcaaaccttttcgccatgcaactagccagtgcctcagtactccctatggttctcaaatcagctcttgagcttgatctgttggaaatcatagccaaggctggccctggtgttcacctttccccctccgacattgcttctcggctcccaacacacaaccctgatgcacccgttatgttggaccgtatattgcgcctcttggcttgctacaatatcctctctttttctcttcgcactctccctcatggcaaggttgagaggctctatggtctcgcccctgttgctaagtacttggtcaggaacgaagatggtgtctccattgctgctctcaacctcatgaaccaggacaaaatcctcatggaaagctggtactatttgaaagatgcagtccttgaaaggggtattccatttaacaaag

SEQ ID NO: 47054 - DNA, 459 bp, Glycine max
  Clone ID: LIB3139-110-P1-N1-F10
ggatctaatcctattcccttgtgttgtgcctccaaaagtcacgtgcgacgacacgtcgtcacgtgtcgacaccgtgttgggcctttgtgtgtcgtttatgtataagaatgcgtgtgggtttgggtgttaaggtatcgttgggtgtgatcggtgtgagtctaatatttgcagtgctgaaaatgtcgcagttgttggacaaagccaaaaactatgttgcggagaaagtcacgaacatgcccaagcccgaggcgagtgtcaccgacgtggatttcaagcgcgtgagccgcgacagcgtcgagtacttggctaaggtctctgtttccaacccttattccactcccattcccatttgtgagatcaagtactccctcaaaagtgctggcaaggagatagcatcagggacaatacctgacccagggtcactgaaggcaagtgacacaacaatgctggatgtgccag

SEQ ID NO: 47055 - DNA, 461 bp, Glycine max
  Clone ID: LIB3139-110-P1-N1-F11
gacaattctcccagctttgttgccatcaatgtcagacctattgagtatgggcatgttttgctgatggcgcgcattttcgagtgtttgcctcaaaggattgaccgtgagagcttcctccttgcacttcacatggcagtggaagctgataatccatattttcgattgggttacaacagtttgggtgcttttgcaaccattaaccatcttcacttccaggcttattatttggctctgcccttcccaattgagaaggcccccactaagaaaattgcaagtttaaatggtggggtgaagatatctgaactgttgaagtatccagttagaggtctcgtctttgagggtggcgatacgctggaagatttatcaaatgttgtttcagatgcctgtatatgtcttcagaacaacaacatacctttcaatgttcttatctctgactgtggaaagcaagtctatctgttact

SEQ ID NO: 47056 - DNA, 460 bp, Glycine max
  Clone ID: LIB3139-110-P1-N1-F12
gcagccgccttgatgaattgtttcatgtgagggggattccgcaggttgcattacttgatgaagctggcaatgttgtcactgaagatggagttgatgttatacgcgaatacggtgttgaaggatacccgtttacatcagcaaggatccaagagttgagagatcaagaagaggaagctaggaggaaccagtccgtgagatctctcttggtctctccatctcgggacttcgtaatatcatctgatggaaagaaaacacttgtctctgagcttgagggcaagacagttggtctgtatttctgcgtgaagtcattcggatcatgcagtgactttaccccaaagcttgtggaggtttatgagaagctgaaggcccagggggagaactttgaggttgtgctgatacccctagatgatgatgaagagtcattcaaggaactattagaaagtgtgccttggttatcctt

SEQ ID NO: 47057 - DNA, 450 bp, Glycine max
  unsure at all n locations
  Clone ID: LIB3139-110-P1-N1-F2
gcaacttgaggtttttgagtctttgcctcttggcattgattgcatcaactcatgctcaacttcagcttggtttttatgctaacagttgcccaaaagcagagcaaattgttttgaaatttgttcatgaccatatccacaatgctccatcactagcagctgcattaataagaatgcactttcatgactgttttgtaaggggatgtgatgcatcagtccttctgaactcaacaaccaatcaggctgagaagaatgctcctccaaatctcacagtaagaggctttgacttcattgacagaataaagagccttgttgaagctgaatgccctggtgtggtctcttgtgctgatatcctcactttggctgccagagacactattgtagccacaggtggaccttttntgaaagttccaactggtcgaagggatggggcgtctctaacttgacggaagc

SEQ ID NO: 47058 - DNA, 452 bp, Glycine max
  Clone ID: LIB3139-110-P1-N1-F3
caggtatcgcggctcgttgattttgtttagatttgtttctcgtttgttcagatatcatcgatgttcgttccggatttgttaggttctgagatctgaaccgtttccgcgtgtttttgttacagatctggggggtttgattgcaattctcactctgctgctcggatttgttcgtttgaaatgtcgattttaccgaaaggcgattcggttcaaatcagggaggtttggaacgataacctcgaggaggagttcgcgttgatccgcgaaatcgtcgacgagtataactacgtggcgatggataccgagttccctggcgtggttctccgtccggtggggaatttcaagaacatcaacgactacaactaccaaaccttgaaggacaacgtggacatgttgaagctgatccaattaggtctcaccttctccgacgaaaacgggaaccttcccacctgcgg

SEQ ID NO: 47059 - DNA, 459 bp, Glycine max
  Clone ID: LIB3139-110-P1-N1-F4
gaggcattctcttaacacttttttaagtgccctgagggaggagctggtgcaaagaatgctattctcatgaatatgccaaatgctgttctttcaatgtggagatattttgttggagatctcgtctttgaagtttctaagatgacttctccctacattaaatgtacagtctctttcttcatagcatttggaaatttggctgatgacaccatcaattttgaggcttttccccacaagctggtgcagtttggagagattcaggaaaaagttgtgttgaaattttcacaagaggaatttcttacagcttggtcaactcaggtgcgtcccgcaacgactctgttggctgatgggtgcccatatttgtatgctatggtgcatgatagttcagtgtctacaataccaggtgattttgtcattggtgttaagttgacaaccataaacaatatgtgtgcatatgggctc

SEQ ID NO: 47060 - DNA, 456 bp, Glycine max
  Clone ID: LIB3139-110-P1-N1-F5
ctctttatccctttcttccacgcatccctcctccgaattcaattgcccggacattcaactctgcttgggcgaatctgcaacaattacacaaaatgaattgctaacaacacgcacacacactctccgtgttttttccccctctcttttttaagaagaacgcgctttctcgtatctcctcgtttgaagaagcgaaacggcatcgcattcgatgagtgatgcgaaggaaagaagtgggttttgcgtgtggccagatgcgagacaactttgcttaaggaaaggtcttctgtatggatttatgcgattattttcaataccattaaaaacattgcgcggagctagtcggtcgttgagagtggatcaattttgcagtgtagtgaatctatcttcctcattgcagatagaattggttccatgtcttagggacaattatgcatatctcttacacgatgtggatac

SEQ ID NO: 47061 - DNA, 458 bp, Glycine max
  Clone ID: LIB3139-110-P1-N1-F6
atcaattttgaggcttttccccacaagctggtgcagtttggagagattgaggaaaaagttgtattggaattttcacaagaggaatttcttacagcttggtcaactcaggtgcgtcctgcaacaactctgttggctgatgggtgtccatatttgtatgctatggtgcatgatagttcagtgtctacaataccaggtgattttgtcattggtgttaagttgacaaccataaacaatatgtgtgcatatgggcttaatcctggtatttcaggttctcgtcttttgggcaccattcctcagtccatttcacagcaaactgtttggaatcaaatggcaacagtgagaacaccattgaattttgattctagcaagcagagcttttgtcaattttctatcgaccttctcggtggaggaattttagtggacaaaactggagaatggatcacacttatacaaaattc

SEQ ID NO: 47062 - DNA, 446 bp, Glycine max
  Clone ID: LIB3139-110-P1-N1-F7
agaacacagttggaggaaccattctgcgtagtgatctattggcagattttttgacagagggcgagtgttagagcaagtgttgatttgcagcgcactcatcgtattagaggaatgattaaaatggtggccacagttggtattcctgagaatacaggtatatcattggcctgtgctatgaatagttcttttagggggcgcgccagttctgatatttacaccatctgctctcaagactgtgaattgtggaatcctgcttgcacaaaagcaatgactatgtcatttaatccaaacccgtgttctgatgcatggagtttggaatttctgaagcgtactggatttcattgcgatatcatttgtgtcactggatggactgccaccccaatgcaggatgttcaggttacaattgattggtttatttcctctcaggaatgtgttcccaggaccta

SEQ ID NO: 47063 - DNA, 448 bp, Glycine max
  Clone ID: LIB3139-110-P1-N1-F8
ccatgttggatcttaaaatttctcaatctaaaattgcacttgccaagaacacagttggaggaaccattctgcgtagtgatttattggcaaattttttgacagagggcaattttagagcaagtgttgatttgcagcgcactcatcgtattagaggaatgattaaaatggtggccacagttggtattcctgagaatacaggtatagcattggcctgtgctatgaatagttcttttagggggcgcgccagttctgatatttacaccatctgctctcaagactgtgaattgtggaatcctgcttgcacaaaagcaatgactatgtcatttaatccaaacccgtgttctgatgcatggagtttggaatttttgaagcgtaccggatttcattgtgatatcatttgtgtcactgggtggactgccaccccaatgcaggatgttcaggttacaat

SEQ ID NO: 47064 - DNA, 434 bp, Glycine max
  unsure at all n locations
  Clone ID: LIB3139-110-P1-N1-F9
cgccaattgagaaggaaagctctctctcgtattgaatggctgcaaaaagctgatgtgcctaccatagcacagattgaagagttccattcgatgcagaggatgatgaatgctcctgattcaaatgataatattgatctactgttgagcattgatttgttgggtttacaaggagcaggcaaagcttttccaaacaagattgtttttgatgataagcttgtgttggctaacacacaagaattctttgatggaaattttccagtggattcttggttaccaatttttgtgaattgtctttatcctgtaagtcaattaccttcagaagctgtcgttgtaaatgtcacatgtggtagtcggcgntgggtttacccaccactgcttgtattagtgctgcatgatacaatcgctcctgagatctgaaccaaaggagtcgcaca

SEQ ID NO: 47065 - DNA, 403 bp, Glycine max
  unsure at all n locations
  Clone ID: LIB3139-110-P1-N1-G1
agcaggatgtgtcgctgngagcgaacaagttcctcgagagacagccgattgggacggcggcgcagagccaagacgacggcaaggactaccaggagccggcgccggcgccactggttgacccgacggagtttacgtcatggtccttttacagagcagggatagcagagtttgtggccacttttctgtttctatacatcactgtcttaaccgtcatgggagtcgccggggctaagtctaagtgcagtaccgttgggattcaaggaatcgcttgggccttcggtggcatgatcttcgccctcgtttactgcaccgctggcatctcagggggacacataaaccccggggtgacatttgggctgtttttggcgnnagaagttgtcgtgcccaaggcgattttctacat

SEQ ID NO: 47066 - DNA, 462 bp, Glycine max
  Clone ID: LIB3139-110-P1-N1-G10
gttgtaattgaagagggaactagattaggtggcgagtgaagagaagatcggtgaaggagtgaggtagcaacagcactgccactgccactaccaatagcagaatgggaaccttgggcagagctttctacgccgtcggattttggatccgcgagaccggccaagccatcgatcgcctcggctctcgtctccaaggcaactacctctttcaagaacagctatctaggcatcgacctctgatgaatctgttcgacaaagctccctcggttcacagggatgcatttgtggcccccagtgcctccctcctcggcgatgtccacgttggcccagcttcctccatttggtatggatgcgttctcagaggtgatgttaacagcattactattggatctggaactaatatacaagacaattctcttgttcatgttgccaagtctaatttaagtggaaaagtcttgccaacta

SEQ ID NO: 47067 - DNA, 453 bp, Glycine max
  Clone ID: LIB3139-110-P1-N1-G11
aaaaaaaaaaaaaaaaaaaaaaaaaaaaaaaaaaaaaaaaaaaaaaaaaaaaaaaaaaaaaaaaaaaaaaaaaaaaaaaaaaaaaaaaaaaaaaaaaaaaaaaaaaaaaaaaaaaaaaaaaaaaaaataaaaaaaaaaaaaaaaaaaaaaaaaaaaaaaaaaaaaaaaaggggggggcccctctttggtcttttttcccccccgaattttttttgtaccctgacttcttgtgggcaccattttttttttaatggggttaattaaattgtttgggtaaattgggttatcctgttctttttgagaaaaattttttctgttaaaattttcaacaaaataaacttcctgaattttaaaggtataagcctggggggctcatgggggcggcctcattatattatttggttgggctatactcggctttttttttgctgaaaacctctcgggccctttttt

SEQ ID NO: 47068 - DNA, 462 bp, Glycine max
  Clone ID: LIB3139-110-P1-N1-G12
ctcgagccgctcaatctaaaattgcacttcccaagaacacagttggaggaaccattctgcgtagtgatctattggcaaattttttgacagagggcaattttagagcaagtgttgatttgcagcgcactcatcgtattaaaggaatgattaaaatggtggccacagttggtattcctgagaatacaggtatagcattggcctgtgctatgaatagttcttttagggggcgcgccagttctgatatttacaccatctgctctcaagactgtgaattatggaatcctgcttgcacaaaagcaatgactatgtcatttaatccaaacccgtgttctgatgcatggagtttggaatttctgaagcgtaccggatttcattgtgatatcatttgtgtcactggatggactgccaccccaatgcaggatgttcaggttacaattgattggtttatttcctctcaggaat

SEQ ID NO: 47069 - DNA, 407 bp, Glycine max
  unsure at all n locations
  Clone ID: LIB3139-110-P1-N1-G2
gaaagcacatagaagagaaagaaagaaaacanagaggagaaagagagtagttgaggaagatacacacaatttttgcagattgttgagaatgcctntcaagaagcctcatcacacctcagacaagaactacataacaggggacgacggaggcaagttcgagatacaacctagaggactcaacattgtgtggggaaatgattctcgatactggaaaattccagaacaaggtcctgcggagctgatccaagtttcatggttggaggtatccggcgtggtaaacttaccaggtgtcaagaaatatagggttgaattcgaagtgagagttaaagacgatgggttcggttggagtggcaacggaacgtgctatgtgatgngctatagaaattgggaaaacgngnngaaaatat

SEQ ID NO: 47070 - DNA, 454 bp, Glycine max
  Clone ID: LIB3139-110-P1-N1-G3
gcacaccccaattctctgccctcaactgcatcgatctctccaaccccgacatcaaccaatccgtcaacttactcaaagaggcatgtttggattccggttttttctacgttgtcaatcatggaataagccaggaattcatggacgaggtttttgcgcagagcaagaagttcttctctcttcctcacaacgagaagatgaagactctcatgaatgaacaacacaggggatacacccctgttcttgatgagttgcttgatcctgaaaaccaagtacatggagattacaaagaggggtattatattggagttgaaaaaggtgaagatgatccacaatcgaagaaacctttttatggaccgaataactggcccgcaccagatgttctgcccgggtggagggagaccatggaaaagttccatcaagagacattagaagtggggaaagcagttgcaaagat

SEQ ID NO: 47071 - DNA, 444 bp, Glycine max
  Clone ID: LIB3139-110-P1-N1-G4
gtcgccgtctccgtcggcgccaacatctccggcggccacgtcaaccccgccgtcaccttcggcgcgtgcgtcggcggcaacatcaccttcctccgcggcatcgtctacgtcatcgcccagctcctcggctccatcgtcgcctccctcctcctggccttcgtcaccgcctccactgttccagcattcggactctccgctggagttggagttggcaacgccttggtgttggagatcgtgatgaccttcggtctggtgtacacggtctacgcaactgccattgaccccaagaagggtaatttgggaattattgctcccatcgccattggtttcattgtcggcgctaacattttgttgggtggggccttctctggagcggccatgaaccccgctgtgacatttgggcctgctgtcgtgagctggacctggaccaaccactggatctac

SEQ ID NO: 47072 - DNA, 467 bp, Glycine max
  Clone ID: LIB3139-110-P1-N1-G5
aactaactatatctatccattaagggatattcaatgcaattagcgaatgagagaatgaagagccggtggttcgtgtggcttttggcggtactaggcatcatcggagccacactcttcatagtgagcttgatccaaacctcggagaacaacttcctatgttccataacaagaacgatgcagcagcagcagcagcagttcaccgatggccccacatcgatgcaactcaaagccatcctccactacgcgacctctcagattgtccctcaacaatctctttccgagattacaataaccttcgacgtgctccaaagcctccaccgccccgccaacttcctcgtgtttgggctgggccgcgattctctcatgtgggccagcctcaacccccacggcaccacgctgttcctcgaggaggaccctaaatggttcgggatcgtcaccaaggaggcgccctacctccgggcccacac

SEQ ID NO: 47073 - DNA, 468 bp, Glycine max
  Clone ID: LIB3139-110-P1-N1-G6
tgataacttaattagtgttcatgaatatgtcaagccttactttagtggttctaaattgaaaagctttctagctagtcataacatcaccattactgatggtattgacaaaactagtgcaactttgcaatttagaaagttagcagattgtgattttctcaagagaaactttaagcagatgtctaatgttttgtgggtggctcctgaggacaaggcgagtttatggtcacaacttcattatgtttcgtgtaataatctggaaatgcaagaagcttatcttgtcaacctcgtaaatgtgttacgagaattgtatttgcacagtccagaggaagctcgccaattgagaaggaaagctctctctcgtattgaatggctgcaaaaagctgatgtgcctaccatagcacagattgaagagttccattcgatgcagaggatgatgaatgctcctgattcaaatgataatattgattt

SEQ ID NO: 47074 - DNA, 447 bp, Glycine max
  Clone ID: LIB3139-110-P1-N1-G7
cgatcacttaattagtgttcatgaatatgtcaagccttacggtagtggttctaaatggaacggctgtctaactagtcataacatcaccattactgatggtattgacaaaactagtgcaactttgcaatttagaacgttagcagattgtgattttctcaagagaaactttaagcatatgtctaatgttttgtgggtggctcctgaggacaaggcgagcttatggtcacaacttcattatgtttcgtgtaataatctggaaatgcacgaagcttatcttgtcaacctcgtaaatgtgttacgagaattgtatttgcacagtccacaggaagctcgccaattgagaaggaaagctctttctcatatcgaatggctgcaaaacgctgatgtgcctaccatagcacaaattgaagagtttcattcgatgcagaggatgatcaatgctcctga

SEQ ID NO: 47075 - DNA, 450 bp, Glycine max
  Clone ID: LIB3139-110-P1-N1-G9
gttctaagtctggtgcttcgatgaagtgtgctggttgtcagggaactggtatgaagggttctgtaagacatcttggcccgtccatgattcagcagatgcagcatgcttgcaatgaatgcaagggtactggagaaaccatcaacgacagagatcgctgcccacagtgcaagggagaaaaggttgtgcacgagaaaaaagtccttgaagttattgcggaaaagggaatgcacaacgggcagaagattacattccctggcgaagctgatgaagcgccagacacaattactggggatattgtctttgtccttcagcacaaggaacatcccaaattcaaaagaaaggctgaagatctttttgtagagcacattttgtcccttactgaagccttatgtggcttccaatttgtgctgactcacttggatggccgtcagcttcttattaaatcaaatc

SEQ ID NO: 47076 - DNA, 463 bp, Glycine max
  Clone ID: LIB3139-110-P1-N1-H10
gaccgatttccttctttcattacttgattttgtccctgaaaagaggccaactgctgctcaatgcctgcagcatccttggttcagtgcaggtccccagactcttgagccctcattgactgctgtgaagcatgatgctattgaaggggaaatatctgaaaaaatgcagagggaaaaagctgagcaggaggctgtggaagttggcatggggaatatggccatagatggaaatccaaagccactcaaagagttccaatctatgaagccatcagaatagaagcatagtggcttatttgggttggggtataccacctgtttttgtttatatggcaatcatggatggtccttggagcgtgatattatatttaactgttatattaagcatagcatgcagcttaggtcatacatgaggttgtcatttgggaagccttttgtaaggaagctaattcacctattacagataatg

SEQ ID NO: 47077 - DNA, 272 bp, Glycine max
  Clone ID: LIB3139-110-P1-N1-H11
gtcatgattgcgatgtttgcgaatgcagcagtcaaaaggagtgagtgggtcttattggtgcaagtgtttttaacaaacaactacattgcatagtatttttatgcatgtaagtggacaaaatcagaaccacattcctgggaattgatcttatcaatagaggtatgtaactctaataattgcttagaaatgtggagtacttattggtcatatcaaactttatggaatttgagtttccttattgacaatgccaaactatctacagtttttgatat

SEQ ID NO: 47078 - DNA, 460 bp, Glycine max
  Clone ID: LIB3139-110-P1-N1-H12
gtatttgatattttttaggacattggaggatgtgatatccagaagacaggaaatccgcgaggccgtggagctaccccttacgcatcatgaactatacaaacaaattggtattgatcctcctcgtggtgttttactgtatggaccccctggcactggaaaaacaatgcttgccaaagctgttgcgaatcataccactgccgccttcatcagggttgtgggatctgagtttgtgcagaagtatcttggtgagggtccacgaatggttcgtgatgtatttcgtctcgctaaagagaatgcgcctgcaattatatttattgatgaggttgatgcaatagccacggctagatttgatgcccaaactggagctgatagagaagtacagcgtatccttatggaacttttgaatcagatggatggttttgaccaaacagttaatgttaaaggtattatggcaactaac

SEQ ID NO: 47079 - DNA, 456 bp, Glycine max
  Clone ID: LIB3139-110-P1-N1-H3
ctcgagccgaatcggctcgaggtccgcaaccagaattctttcgacagcaaccaggacaggcctactggtccgcataatgtctcctccccgtcgaaccgctggaacgacccgaacgccttcctgtcagtcccgaactcgcgctcgcgaggcaactcgctggactcgcagccggagagcggtcagccttcggtttcgggtacgacggagacatacgtcaacggctctcccacccaaggaaataagcagcagcttggccacgacgagattctgaatgacagggacgcattaaagccagatcctggcaccgaacacacttttgaagtagaggacaacaagttcgctttctcgcctggtcagctgtcaaaagctctataaccctaagagcttgggtgctttccatgcgctgggcgggctggacgggttggtgaaaggtcttaggacagatcgcaggagcgg

SEQ ID NO: 47080 - DNA, 466 bp, Glycine max
  Clone ID: LIB3139-110-P1-N1-H4
aaatttaatataaagcaaatcgtgtgcttgtgttgtgaaattatcattatttaacatgcatgattgtatttatttttggtttattacccagcatttcaacgttcaataaacaaatgtgtatctatcttgtgacctttttattaacaagatctttttttataccagcatttgaaccgggttcattatggaacggacttccatcaactaccatacgaaccaggaatgctagtttttaacaagatttggacaacccgctattttttttgtactttttagattaattattattattatggtagaggcagtttttctatccagatcagctgtccaaccagggaccctgtgaacgggttcccttgatttctgttccagatttgacaattatgttcttatctttttcattttaacaataacaactgaaacatttttatcttggaattggaagtataccatgctaattgtgcac

SEQ ID NO: 47081 - DNA, 378 bp, Glycine max
  unsure at all n locations
  Clone ID: LIB3139-110-P1-N1-H6
caagacttggtgttgaggtacaaggcggtcatcaatgatggcctgaaggtggatcttggccatgcacttggccttgaaaaggagagggctcataattattataatggaatgacgaaggagcaattcaagaagatgcaggaattcatagctggtcgaagttccaagaaacagtccaaattgtaggttctttattttcgccgatctctcgtgctgtaaatgtgtatatgtttgcttcccaaatttgaggttttacgaacactattccatacaaaatctgacaaccttggcttttaatagtgaattatataaatgatagcgnggnaaaaaaacttgacctatttcacaaccttaaaaaaaaaaaaataaaaaatagaaaaa

SEQ ID NO: 47082 - DNA, 448 bp, Glycine max
  Clone ID: LIB3139-110-P1-N1-H7
ctggttctttaagagttgggggtgaatttttggctaaacactatgaccaacggactatatactggccaacaccaacttggggcaatcacccgaaggttttcaacttagcaggcttgtctgtcaaaacataccgctactatgctccagcaacacgaggacttgactttcaaggacttctggaagaccttggttctgctccatctggatctattgttttgctacatgcatgcgcacataaccccactggtgtggatccaacccttgagcaatgggagcagattaggcagctaataagatcaaaagctttgttacctttctttgacagtgcttatcagggttttgctagtggaagtctagatgcagatgcccaacctgttcgtttgtttgttgctgatggaggcgaattgctggtagcacaaagctatgcaaagaatctgggtctttatgg

SEQ ID NO: 47083 - DNA, 448 bp, Glycine max
  Clone ID: LIB3139-110-P1-N1-H9
tttcgttattcgcccgacacattttttctccgatcccctattcctgtccattctccgttgtgtcgagttttgttactcaaaagggaaattgatttgatagatagacagatagatcgtttctatgggttaaagtgaaatccgaatccgaatctgaatctgaatctgatccaatcattttcatgttagggcgtgcgatctccaatcaagcgcggttgtgtttaggtttcattttgttgggcgtgtgagtcgtagggggtttcgaagagcatagaataatgccttcggtgcccgttgatctccgtctagttccttctttgaccgttttccatggtggatcctcttttcatcgtctgaaaaatcttgaaaaaagtgatcggcgtggtaatcttagttaacactaggtctttcgttttcttccaccttctctttcttttctcgctctcttttg

SEQ ID NO: 47084 - DNA, 458 bp, Glycine max
  Clone ID: LIB3139-111-P1-N1-A11
cttttctcatcttttagtaaaagggttatctcctagtttcatttttctcttgtttccagcatttttctaaggtgaccttggaactggtttaattcaaagacacttattccatttgacattagaggccgtgttcgaatacttcatcctccagttatgacttgtttcccattctcatttggtaagaaagtgcgctttgtggcaacacatgatccagatattgatgaagtactctcaggcattcaaaatgtaagaatctatacctacaaagaactaaaagttgcctctgacaatttcagtccggccaataaaattgggcagggtggatttggtcagtttataagggactgctaaaagatgggaaagtagctgccataaaagtactttcagcagaatcaagtcaaggtgtaaaggaatttatgacagagattaatgtaatctcagaaatagagcatgaaaat

SEQ ID NO: 47085 - DNA, 495 bp, Glycine max
  Clone ID: LIB3139-111-P1-N1-A2
aaaattttgtttctttgtgtgtgtatggtgatgataacttaattagtgttcatgaatatgtcaagccttactttagtggttctaaattgaaaagctttctagctagtcataatatcaccattactgatggtattgacaaaactagtgcaactttgcaatttagaaagttagcagattgtgattttctcaagagaaactttaagcagatgcctgatgttttgtgggtggctcctgaggacaaggcgagtttatggtcacaacttcattatgtttcgtgtaataatctggaaatgcaagaagcttatcttgtcaatctcgtaaatgtgttacgagaattgtatttgcacagtccaaaggaagctcgccaactgaagaagaaagctctctctcgtattgaatggctgcaaaaagcttgattgcctaccatatcacagattgaagagttccattccatgcagaggatgatgaatgctttattcaaatgataatattgat

SEQ ID NO: 47086 - DNA, 531 bp, Glycine max
  unsure at all n locations
  Clone ID: LIB3139-111-P1-N1-A3
atttgaaattttgataaaccgcgatcacaggttgccgcaccttaaaaccggaaacaaaagcaatcgttacttgatttcaagaatttctcaatttcttcctacttctttgtgtacgatttcttaagggaaagaaaatcactctctgtgctggccacagacttcgtgaatcattttcttttccactcttagtttatttgctgaacactctcctatttgatataggacttcgtgtcagatttaaacttcttctgtttccttctcagttctctgtttaatttcaagttcaagctggtgaaatcttggattagtgctcccactctcctatctggtataggacttcgtgggtagacttttctatttctctcctttctttcactctcttcttctcactgatccgcattgccgntcaaagtggtcgtatttgaaaaacacttgtgcgttggtgcaaatggttgcttcattcattttttttggagacaacaagctcactgagaaaacaatttttaccttgcagagatttggacatcttgg

SEQ ID NO: 47087 - DNA, 442 bp, Glycine max
  unsure at all n locations
  Clone ID: LIB3139-111-P1-N1-A5
gttggttttggtgaagacgatggcatagcgtatctctcagactcgcttggttntgcaaccatggaagacaacgacttctcagaaactgcaaagttcattagccagatcctcatggaagaaaacgttgaacttgaacagagcccattctacgactcactcactctgcaagttactgagaaatccttctacgacgctctcgccggtaacctacttctcagtccccaagctagcaacaccaatttttcagttgaaaattctcgtgagttgaacctcccttccccagattctctttctggttctgctcttcagtttaacccccacgcactctcttaaccaccacctttggttaatgttagtgaaggagtctctgatttggactcttctattgcaagactcttagcacataatattttcaaatgatgttgattctgtttcccacttt

SEQ ID NO: 47088 - DNA, 400 bp, Glycine max
  Clone ID: LIB3139-111-P1-N1-A9
gaactctctctctcatctataagtcaacatggctcatcatgaagattcaagtgcatggaattcgagtaaacctcaccctaagctcaatgaaagaattctgtcttctctgtcacggagaactgttgctgctcacccctggcacgacttaaagattgggccaggagctccagcagttttcaactgtgtggttgaaattggcaaaggaagtaaggttaagtatgagctggacaagacaagtggacttataaaggttgatcgtattctttactcatcagtagtctacccacacaactatggttttatcccaagaaccatttgtgaagacagtgatcctatggacgtgctggttctaatgcaggaacccgtgcttcctggttccttcctttgtgctcgtgctatt

SEQ ID NO: 47089 - DNA, 540 bp, Glycine max
  Clone ID: LIB3139-111-P1-N1-B1
gatggttagaaagttggttgtggtgaggcttgtgttggccatatctgtgttgagctctctccttgtgacaacctcggcacagacagcatgcaggggccaggccttcaccgaaaacaaggttttctcctcatgccgtgatcttcctcacctatcctcgtacctccactggaactttaaccagagcacagggaagttggacatagcattcagacacacaggaatctctggaacaaacaattgggttgcatgggctatcaatcccagcaacaacctcaattcagctatgacgggagcacaagcactggtggctatcataccatctagcggtgccccaaatgcatatacttcttccatccaaaatcccggaaccacactggcagagggagccatctcttatcatcactcaggattgacggctacccatcagaacactgatgtcaccatctatgctaccctcactctttccagtggtaccaccactttgggccacctttggaacgatgggtctgtgtcttctggtcccctgcaatgcatgctatg

SEQ ID NO: 47090 - DNA, 484 bp, Glycine max
  unsure at all n locations
  Clone ID: LIB3139-111-P1-N1-B10
agcggcttcacttctcagacggccgtgtttctcttctggacgagacaacttttcacanaagcttttggtgatttcggattctttcggttccgtacgaccttttagttcgggatgatcctcacttcgattggacttttggcccattgtgctggtgtttttgcggcgcaccatcggatcataccccaccagtcttgatgcatttcctttgttcattgccactttcagcggactcaacagttggtcaccgccgaaaaccaaacactacgccaagctgtacagaatggcagcaacccacagcgggcaccattgcccagtctccttacatactttttcatcaacatccgaatcacatgaacttcgtccgcctctaggccataacgactctcctatcgatcgactcagcgccggagtctgcgcagtccatatttttacccatcaacaagatgatctgagttgcatgcatcactacgtgctcgcatcagat

SEQ ID NO: 47091 - DNA, 501 bp, Glycine max
  Clone ID: LIB3139-111-P1-N1-B11
attttcaagctctcaacgccatctccagctgcttccttatcagaagcgcttcgccccagagattctcgcttcctctccttcaatccttcttccaacgctattaattacaaaattaacctctccgcttccctccgatccattcactccctccctcttaaaacctccttgcggatcaaatgctcccaaacagatgggaatggaagtcctgcaaagaggacagtgcttcatgatctttatgagaaagaagggcagagtccatggtatgataatctctgcagacctgttacagaccttcttcctcttatagcaagtggtgtcagaggcgtcactagcaaccctgcgatttttcagaaagctatctcatcatcgaatgcttacaatgatcagttcagggaacttgtgcaagcagggaaagacattgaaagtgcatattgcgaacttgtagtgaaggatatccaagatgcttgcatattatttggaccaatctatgatcaaacagat

SEQ ID NO: 47092 - DNA, 326 bp, Glycine max
  Clone ID: LIB3139-111-P1-N1-B12
cgacatgtttaaaaaaaacctattttctttgctgtctttaccctactatttcataggggagtttaacttttactgtatcaacttctccattcatctattcaaaatggttgcccttactccagcccttctcaccagtctgttcattctggggatggttcagagtgccatcgtcaacttcgtcacggaggccgattacttggccgttgtgcgaggcatctcggacaacggtgtccgacgaggtttaccacgacaagcgcgccacgggtaagcttcttaacctattcgatggcttgacaagccgtcatcaaggtctgtcaaaagctttc

SEQ ID NO: 47093 - DNA, 268 bp, Glycine max
  Clone ID: LIB3139-111-P1-N1-B2
gcaacaacatgcagtgattgaagaaattgtccagcatataaaaaatatcttgggttccaaattgtgagagctcttccatatgatggtctagtgaggatggaatctcattttgctaaattatcaatgctattatgtctgggaccagctaatgatgttcgagttgttggaattactgggatgtgttgattaggaaagtcaactcttggtcgtgcttatttatgaaagtgatttctcatcaatttaaattttcttctgttatatctgatga

SEQ ID NO: 47094 - DNA, 473 bp, Glycine max
  Clone ID: LIB3139-111-P1-N1-B3
gtttcgaaattcatttttttttttctaacatacttaaagagagagagagagagagagagagaggggagggttgcaaattccatgagagcagaagaggtgcctcttactcgtctcgtctttcaccgttacgagtgagttcgacccctcctcttgctcttccttctcttctcttctcttctcttctcatatcaaagcaataaccctagaacatggaagagagcttcgtttttcagtggagcgtcatcagatctctcttgtccatccttcagtggtgggcgttcaatgtcaccgtcatcatcgtcaacaagtggatcttccagaaattggatttcaagtttcccctattagtttcctgtgtccactttatctgttcatccattggagcttatgtggtaattaagttgctgaaacttaaaccactgataactgttgaccctgaagatcgctggagaagaatctttccaatgtcattt

SEQ ID NO: 47095 - DNA, 479 bp, Glycine max
  unsure at all n locations
  Clone ID: LIB3139-111-P1-N1-B7
aaaaaccccaaacgcataaaaaacacagagacagtgttcttagcgccgccgttgccctaccatcttcatattattctattgcctttctttcacgtttttctggtttttaagcccttccagtgccctatttacgcttatacccttctggttatgatagcttccattcggcgtcagccagagagccgaagctcttggcttccacacatactttcggtgccgtcgattgagatacaaagcctccaagccagccgagccaatccataaattccaactttacccctccctgcaaatattgttttcttttaacggttacttccaccatgcctaattcgaagaacaaccgtaacggacacggcgagcctcaccgncgcgagaatatgacaaagaaatcgtcgtccttctacggtcactcatcgccgccttccatgtccggcgaaccgatccggcggtcgaagacggtgccggatcttttgtcggag

SEQ ID NO: 47096 - DNA, 86 bp, Glycine max
  Clone ID: LIB3139-111-P1-N1-B8
ggtggatgaataagaaagaaaatagcatgagaaggaaggatgatcatccttccttctcttgctattttctttcttattcatccacc

SEQ ID NO: 47097 - DNA, 517 bp, Glycine max
  unsure at all n locations
  Clone ID: LIB3139-111-P1-N1-B9
aacttgagtgggagtattagtccatcactcactctttccaatagtcttgagaggctgaaccttagccacaatgttctttctggttccattcccacttcttttgtgaatatgaattcaataaaatttcttgatctttctgagaactcattctcaagaccaatgcctgagagtttttttgagagctgttcttcccttcatcacatttctctagctaggaacatgtttgatggaccagttcctggctcactgtctagatgttcctcattgaatagcattaatctttccaataatcatttctccggtaatgtggactttagtgggatttggtcattgaacaggcttacgactttggatctatctaacaatgccttatcagggtctttacctaatggaatttcatccgtacataactttaaagagatcttattacaaggtaaccagttttcaggtccattatccactgatantggattctgcctgcatctgaataggttcgatttcagtgataatcagttca

SEQ ID NO: 47098 - DNA, 450 bp, Glycine max
  Clone ID: LIB3139-111-P1-N1-C1
ctcaccaaagccttcctagaacgaaaaaaaaaaagatgagcaattttccctcaccaaagaagaagaagcaaacaatggccgatcaacttaccgatgaacagatctccgagttcaaggaagccttcagcttgttcgacaaggacggcgatggttgcatcacaaccaaggagcttggaactgttatgcgttcattggggcaaaacccaactgaggcagagctccaggacatgatcaatgaagtggatgctgatgggaatggtaccattgacttccctgagttcctaaatctcatggccaggaagatgaaggacactgattctgaggaggagctgaaagaggcattccgggttttcgacaaggaccagaatgggttcatctcttgtgctgagctccgccatgtgatgaccaacctcggggagaagctcaccgatgaagaggttgatgagatga

SEQ ID NO: 47099 - DNA, 405 bp, Glycine max
  unsure at all n locations
  Clone ID: LIB3139-111-P1-N1-C11
cagacttcgtgaatcattttcttttccactcctagattatttgctgaacactctcctgtgtgatatatgacttcgtgtcgagattaaacctttttctgttctttctcagttctctgtttaatatcaagttcaagctggtgaaattttggattagtgctcccactctcctatctggtttaggacttcgtgggtagacttttctacttctctcctttctttcactctcttcttctcactgattcgcattgtcgttcaaagtggtcttatttgaaaaacacttgggcgtttgtgcaaattgttgcctcgttaattttctctggagacaacatgctcactgagaatacaaattttacttgcagagatnttggacatcttgtttgtctattatcaatatcaactcaattt

SEQ ID NO: 47100 - DNA, 459 bp, Glycine max
  Clone ID: LIB3139-111-P1-N1-C12
cgctgttactgcagttgccgtccgctctcgcaccaaaaataccggaggggacggaactagtctcggcaagttcacacaggccatttcacgcacgtgcagcaagacacgctttaagatgttgtgcatgaaatcattactggacttcccgggatctcaaggagcatccgagaaggacctcgtccacatttccttcaacgtcacgctgcagcacttctccaaggcgctctactcttccgccaccatctcctacaccgccatggatccccgcgtccgcgccgcctaccacgactgcctcgagctcctcgacgactccgtcgacgcgctcgcccgctccctcaacacagtctccgtcggcgccgtcggctccgccaacgacgacgtgctgacgtggctcagcgctgcgctcaccaaccaggacacctgcgcggagggcttcgccgacgccgccgtcacagtcaa

SEQ ID NO: 47101 - DNA, 434 bp, Glycine max
  Clone ID: LIB3139-111-P1-N1-C2
atcctgcttgcacaaaagcaatgactatgtcatttaatccaaacccgtgttctgatgcatggagtttggaatttctgaagcgtactggatttcattgcgatatcatttgtgtcactggatggactgccaccccaatgcaggatgttcaggttacaattgattggtttatttcctctcaggaatgtgttcccaggacctattgtgttttaaatccacaaaatccttttgtgttaaataggtggatgggaaaattgactttcccccaaggcacttcccgaagtgttaagagaatgcctctttctatagggggaggagctggtgcaaagaatgctattctcatgaatatgccaaatgcttgtctttcaatgtggagatattttgttggagatctcgtctttgaagtttctaagatgacttctccctacattaaatgt

SEQ ID NO: 47102 - DNA, 118 bp, Glycine max
  Clone ID: LIB3139-111-P1-N1-C6
tttttatttttcctcaaaattggattcctttttcaatggccggaacccctccggttcctggtcctttttccttttcaagacccggctccctttttcctttttttttcctccggatttg

SEQ ID NO: 47103 - DNA, 153 bp, Glycine max
  Clone ID: LIB3139-111-P1-N1-C7
cactgttacttgagcaaccaatcgtatctgctccaacgatccctttcgggcgggcactagctacttctgggaggtggattccagctcacccacgggcccgttgtcaaggtgaatgtgctctgtgcttgaaatcattactggactattcgttat

SEQ ID NO: 47104 - DNA, 410 bp, Glycine max
  Clone ID: LIB3139-111-P1-N1-C8
gtgttttttgttctaggaaagcctcgttttatattattgtgtcacaataataatgtctcactccattaattcagagttcaagtttgatcccaaggaaccctccatgcccatatcgtatccaataaagaccctcaaggagttggagtcacgctcctactttgagtcctttcattatcctcttaacaaagcttcagttccaattgaaagtgggtattctgaacctttgccaaattgtagaagaatactagtgtgccatcgatatggctggagggtacttagatgataaatgtgtccagggagggactaatgctgaagcctatgccatatggcactggcaattgataaatgtgtttgtctactactctcataatttcgtctctctccctcctacttcttggactaatacagct

SEQ ID NO: 47105 - DNA, 491 bp, Glycine max
  Clone ID: LIB3139-111-P1-N1-C9
tgccgcgtcgtagctcggatcgggttagttgaaaagcagaaacatgctggttctctaagccaagagttcttgctacggcccacatagcaattacactagtttggtgggttcctaatgctgagtggctcattcaaggagggcatcgttgctttaataagcaattggtcgaacaatatgcaagcttcatctccaggaaggtggtttacatgctgatattaatggtgatggagttctagatcatgtgcaggctgtgggaggatatggagctgaacaaactgtggttggcgggtccatggaagtgctacgtccctcgtatgattattgaacgtgtgctgtaccagtactagaacttccctaaaatggatctatttgtcattatacccatttttacttattccagcgtggagtactatatagaagctacatgtctaggttcagatattcgcttttttaggggcagcaacacctattcttatttcttgaagtgacgg

SEQ ID NO: 47106 - DNA, 346 bp, Glycine max
  unsure at all n locations
  Clone ID: LIB3139-111-P1-N1-D10
ggttgtgatccttctgtgcttcttgatgataccccatatntcacgggcgaaaagaatgcttctcctaatcgcaattcagcttcggggatggaagtgattgataatataaaagaacaagttgaaaggcaatgtccatcaacagtttcttgcgctgatatctaatccttagcagttagggaagctattgatctggttggaggaccttcctggcctgttgcattaggccgaagagatgcaacataagccaatcggatggaagctaatcaacanattccttcaccgttcgagcctctagataacatcattgcaaagtttactttaaagggtgtcaacttgagagatgttg

SEQ ID NO: 47107 - DNA, 480 bp, Glycine max
  unsure at all n locations
  Clone ID: LIB3139-111-P1-N1-D11
aaagcaatgactatgtcatttaatccaaacccgtgttctgatgcatggagtttggaatttttgaagcgtaccggatttcattgtgatatcatttgtgtcactgggtggactgccaccccaatgcaggatgttcaggttacaattgattggtttatttcctctcaggaatgtgttcccaggacctattgtgttttaaatccacaaaatccttttgtgttaaataggtggatgggaaaactgactttcccccagggcactttccgaagtgttaagagaatgcctctttctatagggggaggagctggtgcaaagaatgctattctcatgaatatgccaaatgctgttctttcaatgtggagatattttgttggagatctcgtctttgaagtttctaagatgacttctccctacattaaatgtacagtttctttcttcatagcatctggaaatctggctgatgacaccatcatntttgaggct

SEQ ID NO: 47108 - DNA, 496 bp, Glycine max
  Clone ID: LIB3139-111-P1-N1-D12
caacaagtataaaaaaaacctattatcgaagcggtcttttccctcctctttcatattgtcctttaacttttcctttatcaacttttccattcatctattcaaaatggttgccattactccagcccttctcaccagcctgtccatcctggggatggttcagagtgccatcgccaactccgccacggaggccgattccttggccgttgtgcgaggcatctcggacacggtgtccgacgaggtttaccacgacaagcgtgccacgggtaagcttcctaagcctatccgcaaggctggacaagccgtcatcaaggtcggccaaaagcttccaagtcccgtcaagaagcaaatcaaggctgccgctggcggtgccgagaagaggtcgtcaaggcagcaatctctgcctcaagtgcaaagaacaagatcaagaagaagcttggaaagcgtgacctcgtagatctgggggtctccttcaacacgcgtgccaccggcaagcttt

SEQ ID NO: 47109 - DNA, 544 bp, Glycine max
  unsure at all n locations
  Clone ID: LIB3139-111-P1-N1-D2
attttcgcctccctttctttaccttagtggtatatttttatttttgtagccatttcttggtctctatatatcattctatgttttctatgaaagcagatatttgaaaatcgttgcagaaatcatgatcggcctgttggattaagaagcggcaagtgcatccaagcatgtcatcaaagcaactaggatgttgtgtgttactatatatttgattatatatatgatcattatatatatatggcatgagattcattttcttttttgattattatggataagtgaaatataattatttgatgttggcttggctcaatcaaattaaaatttttaaagattttgttaacttttttgatctgattgagccgtgccaatatcatattcatctcttataaatgttcaaactattaactatatatatatataagatatgctatatttgtctttaaattaatcataccaagtaaatttggtgctttgatgtatatatatatatatatatataantaatcataccagnnaaatttggtgcttggatatatatatatat

SEQ ID NO: 47110 - DNA, 492 bp, Glycine max
  Clone ID: LIB3139-111-P1-N1-D3
ttaccaagcaagttatgagcaagatggcagaaatgataaacagtctttgtggtggtgatgaaaaattgatgcgtgaaaggacgcacctgctgttggcttgttgttcaaggatggcaatttgtaagaaagatgtttggagagttgaatgtggaatcccttctggatttccgctcacagttatttgcaatagcatttttaatgagatgctcattagatatatctatgaaaaattactgcgccaggctaaagctccaagtatgtttttacaatccttcaaaaattttgtttctttgtgtgtgtatggtgatgataacttaattagtgttcatgaatatgtcaagccttactttagtggttctaaattgaaaagctttctagctggtcataatatcaccattactgatggtattgacaaaactagtgcaaacttttcattttataaagttagcaaattgtgtatttctcatgagaaactttaagcatttgtctaat

SEQ ID NO: 47111 - DNA, 514 bp, Glycine max
  unsure at all n locations
  Clone ID: LIB3139-111-P1-N1-D7
gcttggaagaaaggttgtttaatggtcaagattgtgatgtctgggaatgcagcagtcaaaaggagtgattgggcctcattggtacaagtgtttttaacaaacagcaacagtacagagcattttgatgcatgtanagtggacaataatcagaaccacattcctgggtattaatcttcccaatagaggtatgtggtcctaataatggttttgaaatgtggagttctgagtgggcaaatcaaacttcatggcatttgagtttccttattgacaatcccaaacagtctacagtttttgatattctcttgggaatctttcaagattttgaaattgctggtaatactctcatgccagctttttctgttccacaggctactgtcagatcttctgataatgcggaattctctgcatgatctggaattcgtgttttctttcgcttgttcgtttgtttaattcaataaaggaaattatgcttgaccctctagtgaggatgctctgcctatctgaaaaatttcac

SEQ ID NO: 47112 - DNA, 307 bp, Glycine max
  Clone ID: LIB3139-111-P1-N1-D8
agaaatctgaaaccctcagagtgaatgtgttgtaagaaacattctgaacaacaccaccccatccacgatcttctcatccttaaactgtgttgtgcggatctcagatgatgatgtcttccgggacatcctcgtactggtgctaccgttgcagtcgtttcgtccgtgtctggccccaccacaccgttgtctgtcccgactgcgacggcggcttcatcgaataaatcgaacacccgccacgcttcgtccaccttgacccccgacgccaccgtcatcgctttcccgttgtcgtcatgtacatgatcggaca

SEQ ID NO: 47113 - DNA, 453 bp, Glycine max
  Clone ID: LIB3139-111-P1-N1-E1
ctttgagcaatggtgaaggctgtggcagctcttggtttcagcgagggtgtcactggaactattttcttcactcaggagggaaatggtccaaccaccgtaactggatctcttgctggtcttaagcctggtcttcatggctaccatgttcatgccttgggggacactaccaatggttgcctgtcaactggagcgcatttcaatcctaataacaacgtgcactgggcccctgcggacgagaatcgtcatgctggtgatcctgggaatgataatgtcggtgaagataggacgtctgatctataatatttacttctggtctccactatttgatacgttaatgtcggcgatgatgagactgtctgatctattattctttcttctggttcatctaattggataagtgactgattccaactaagcttgtaaggacaacaagccacatatttattctgtatc

SEQ ID NO: 47114 - DNA, 424 bp, Glycine max
  Clone ID: LIB3139-111-P1-N1-E11
tgactcttttctctgctgcaagcctcccatcttcgtttgctacgccactctggacacgaccgtgacaactgtttgatccaagaacagacacaatgcccgccgacactgtaagaaagaccatcacctgtaaggcagctgttgcctgggaagacggtcaggacctgtccattgaggacatcgaggtcgccccgccaaaggctcacgaagtccgcattgagaattactacactggtgtttgccataccgatgcttacaccatgtccggaaaggaccccgaaggtgctttccccatcgtcttggggcacgagggtgctggtatcgtcgagtccggcggcgagggtgtcaccaattgtaagcctggtgaccacgttgttgctctttacactccttgatgccgcgagtgcaagttcttgaaatcccgaaa

SEQ ID NO: 47115 - DNA, 463 bp, Glycine max
  unsure at all n locations
  Clone ID: LIB3139-111-P1-N1-E2
ctgataaaaaatcagattgtatttgatctttcctcaaaatccccagatcagattctggcttctttcccttcttgctaggtttatgcttcttgtatattttgtagtaggatccttggcgatataacgagcttctgtagaaaaaaataaagtccacaattctttcaagagaattgatattcattggagtttgtggatataatagctgcataacagacttcagacagaacttcccctgatggaacctggatttttgttgtatcaataggcttgttctcatcatattctggtgttcggtaatttgagctatcaagaaggtcctggtctatgacaagttccttcgaaacattctcctgtaatggcttatcattcaacttcaaaggtacaggggacttcagaagttgatcagaagctctggtcagtggctttgattgctgatctttgccagaaactntaggggattctg

SEQ ID NO: 47116 - DNA, 299 bp, Glycine max
  Clone ID: LIB3139-111-P1-N1-E3
aggataggaaggactggaagagctggagccactgggctagcttacactttcttaggtgaccaggatgctaaatatgcttcagatctcatcaaagtcttggaaggtgcaaaccagaaggtacctccagaacttcgtgatatgtcatcacggagtggtggtgggatgggtagatccagacgatggggttctgggggacgaggtggacatggtgattctggatatggtggaaggaataatgactctggatatggtggccgaggtaatgatgctagatttggtggaagaggcagatattctta

SEQ ID NO: 47117 - DNA, 238 bp, Glycine max
  unsure at all n locations
  Clone ID: LIB3139-111-P1-N1-E4
gcgtcagcttgtgacccaagtgggggcatgaaggtggagggatattaacaataacatttagtaattatttttttcatagaataatttatgtaataagcataaaggtaattaatttatacattatttatttagtaattcaaaagnaaaaatattaataaaaaaaattattattatttaatgaaattttatttttttttataatgtattttttttatttgataaattattttttttattt

SEQ ID NO: 47118 - DNA, 487 bp, Glycine max
  Clone ID: LIB3139-111-P1-N1-E7
cgccacaagaagcgtagcactcgctttcccctgccatcaaagatagtaacaatagttactcactcactacacaccagaggcagagagacctctcgctcactctcaaaatcacttccaccactccgaacaaaaccactgttcctaaaattaaaaaccctaacctctctcaaaattttccattttcggagtttcttcttcagaaccgctttcatgcattttcgccaaactccttctcacaagatcgagctttggacacttgaagcatttcactaatatctgttacagattactgagattgttttgtttttcatttttggctgttttttttggcggaaataactcgtaataagcatgacaagcaccatgcaactaactattgtcaagggcacgatccctgtggctttaagtagaagagtgtgttggcagggtcaagcatccccgtggccgtcatggcgaattgggtttgtagctcccgttccccttgtga

SEQ ID NO: 47119 - DNA, 284 bp, Glycine max
  Clone ID: LIB3139-111-P1-N1-F10
gagaaactaaagtcagattatgatcaagttgtagcggacgatactgagcttacgagttgactctgttgaattaagcacacatgaatctactgggtggatcagctggattaacatgaggtattagtgtgccttacaatcaattgatgtatgaagtgcattatatttctatcttgcgtatcacgctcttgtcatatagtacaccactggcttatcatacgcataatttgcgatgtccacctgcatgatgttcccatgaggatgcccgaagcaatcttgagttgaat

SEQ ID NO: 47120 - DNA, 387 bp, Glycine max
  Clone ID: LIB3139-111-P1-N1-F11
ctcgagccgattcggctcgagctcgctttacccaggccaaactattagctgctcatgagtatgcagcctcagctggattgcctgttccaagaaatgttttgattccaagaactaagggttttgtttcagcagtaaaccatatgcgctcgtttgttcctgccatttatgatgtaactgtggcaattcccaagagttcacctgctcctacaatgctaagactcttcagagggaaatcttcattggtgcatgtgcatattaagcggcatgcgatgaatgatttgccagaagaagatgaagctgttgctcaatggtgtcgagatgtgtttgtggctaaggatgcattgttagacaaacatatatctgaggacacatttagtgatcaagagc

SEQ ID NO: 47121 - DNA, 417 bp, Glycine max
  unsure at all n locations
  Clone ID: LIB3139-111-P1-N1-F2
cgagtggagctccaaagtctacgtaaagtgctcctgtgttttactgatcatgaatggtcccttgtaagagttttccagatcctttgtgtatttgggtatagaatgtttccattttagtggaaactttgatgtacagtattttaatataaaaaagaacttagtgtagatgtaattgtgttttacttactttcttttttttattctatttttatttatttataaaacaaaatatttttttttttcacaacttattatttcttcacatttaaataataattattcgttattattctcttatatattaatttttctaccaaaaanaacttttcttttttgtgtattataattttatttttttttaaataatatttcatttttttttcgccaataatttataattttatttttatttttcca

SEQ ID NO: 47122 - DNA, 465 bp, Glycine max
  unsure at all n locations
  Clone ID: LIB3139-111-P1-N1-F5
gtgaggactcttctctgttctcttaagtccttcccattccaatggattctgcgttctccatcaacaccaccgcgcaagtggcgctcttcagagcgctccacggtcatctccaccgagctcctcaacgcgccttgctccgccgcaacctaaaatgcctcgttacttcctataacagcagcagcaactgctgccgcattccgtgctctttcggctccgtgccgtcgccgtcctcgcttcgatccttccgcggactgctcccgcgaacgccgcgctgcatttcgagctccgcggcttcctttgcttctcctgccggcggtggaaatggcggcgctggaaccggcgacggtgacggagggggcggttctggcggtgagtctggagatgctaatctcaaactggtaggagacgcgtctcangagctttccgcactttcgactgatgttatcaatctcgatgtttcgggaa

SEQ ID NO: 47123 - DNA, 522 bp, Glycine max
  Clone ID: LIB3139-111-P1-N1-F7
caaagattcagggtgggaatgggacttcaaatggcggagaccgttgttcgacaatgagatagatatggcagtatcatttctacaagaacttgaggggaacagaattcggtcccacagggctgaccagtgggtttgggtggcagattctagtggccaatatacggttaggagtgcctacaatgtgcttagagaggacttattacaggaggaccaggacggagagttcaaggagctatggaaggtgaaggttccatctaaagtaattgtgtttgcatggaggttactcaaagataggctaccaacaagagacaatttgaggagaaagcatgtggagctacaagattttatgtgccctttctgcagaacaatagaggagagtgcaggtcatttgttttttcactgcagcaaagtgtttcctatatggtgtgaaatgctgtcctgggtaaatctgggtggggtctttccacatcacccaagacttcattttcttcagcacatatatggagcattttgaggaataca

SEQ ID NO: 47124 - DNA, 428 bp, Glycine max
  Clone ID: LIB3139-111-P1-N1-F8
atccacacccaacattctcacaagtcacattttaacaccatcccattaattcttgcagaatattgcttagttttgttttatccgaattctgaaacagctcatgaatggcttcttcaagagttgctctgttgatatgcacggtcattttttttgcgattgcccctgtcggcgatcttcaccaatactttgatagtcacttattgcagatgggaccactaatatactcaacaagggatagcttgtcactctgtcactttacaaagactgtggctcggtgttccaatccaagaacgaatacttctttggcaaaaaagacaagcaaatataacttggctttgccaacttttctgtcaccttcacttcttactatgtaagcaaattattatattctaccttactacactttattcttagtcatcattgtgttt

SEQ ID NO: 47125 - DNA, 442 bp, Glycine max
  Clone ID: LIB3139-111-P1-N1-F9
caaacattgtttgttgtaggaagaggaatcttgagaaatggcaggggacagcaagagcaagattctgttcatcggagggactggttacatcggaaaattcatcgtggaagccagcgccaaagctggccacccaactttccttttggtgagggagtccactctctccaaccccgcaaaatcacccctcatcgacaatttcaaaggcctcggtgtcaatcttgttttaggagatctatacgatcaccaaagtttggtgagtgctataaagcaggtcgatgtggtaatttctactgtaggacacctgcagctagctgatcaagataagatcatttctgcagtttaagaagcaggaaatgttaagaagttctatccatctgagtttggaaatgatgtggaccggactcatgcagttgaaccagccaagtctgcatttgcaacaaaa

SEQ ID NO: 47126 - DNA, 338 bp, Glycine max
  unsure at all n locations
  Clone ID: LIB3139-111-P1-N1-G1
ctctctctgcaattctctcatctaatgagccggcactaactctaagtgaccctacatgtnnctctcttctctgcacaccaccacccttccggtgttggcgttcctccttctcagcaccgccatcagcgccgcaccgatcatcggtctagactcattccttacccaccaatcccgaatcgatcctcaggcctcgaacgactccttnnctctccttccttnctccaataaaacccccctcttccactctttcgactttctcaaatcctactatcctttttttccaatcttccttttcctccaacttcttggtgactttcccttcggcacccccttccttc

SEQ ID NO: 47127 - DNA, 397 bp, Glycine max
  Clone ID: LIB3139-111-P1-N1-G10
gttgtcatctatgtatgtgaagggccgtctctagttcccagtgatcctgccaggaaaaggtttggtgaggagttgatctcccatgttgatacattcaccaaagagctgtattctgcattgaaaggagatccaatacattaagccggtcctgcctttgattacttagagaatgctcttggtaaatttggtgatgggccattcttttctggtcaatacaactgggtgggtattgcttatgttccattttgtgaaagattccagctcgtctttgctgatgtggtcaagtcatgaataactgaaggaagacctatactttgcacatggcttgaggaagtgaacacagttagtgcttattcacagacaagagctgatcaaaggtaatcgttgttctttcaag

SEQ ID NO: 47128 - DNA, 387 bp, Glycine max
  Clone ID: LIB3139-111-P1-N1-G11
tccacttccttttttggtgtttatgatggtcatggaggtaaagtgggtgcacagtttggtgccaagtattttcaccagcaggtgctcaagaatgaagcatacatagctggagatataggaacctctcttaaggaatcatctttcagaatggacgacatgatgcgtggtcaacagggatggagggaattaacagcattgggtgataagataaacaagtttaatggtaagatagaagggttgatttggtctccaccaagcatacatagtaaggagcaagatgatacttgggcctatgaggagggccctcattcttattttgcttgaccaacttcaagaagcactgcatgtgttgcaattattagaaacaacatactttttgtagcaaat

SEQ ID NO: 47129 - DNA, 319 bp, Glycine max
  Clone ID: LIB3139-111-P1-N1-G12
ctcaccgattgctagattggaacttcgattctcagtcatctcttttaccaatctgtggggtgttgctctagcaggagagagccatgttcatgcatcgctacctgaggtatgatcattgggaagctgtatgctcaaacgctcccatactcactgcactgcgagagcttttaaagtctctccctgtaggagttgtaattgatgaacttcctatgttatcgttgatacacagggcccaaaaacattctattataaagaagacctctattcaggcatatcattgaaagaacaatttacctagctgtgcctatgcacaacctta

SEQ ID NO: 47130 - DNA, 260 bp, Glycine max
  Clone ID: LIB3139-111-P1-N1-G2
gatgagggtggctatgatagccctaaagctaatggacatagccgcagccccagccggagccctaaggatgatgacaggagccccattgatgaagatgatgacaaccaccgtcgctcacagtcaccttgaaaacagcactttctgataaaatgaggtcaggatgtgacccaatttgtatctgctttggttataaaatgcactccagcttaattatgtgacaattggttctgaaaacagttttatgtatcctatttttccaa

SEQ ID NO: 47131 - DNA, 473 bp, Glycine max
  unsure at all n locations
  Clone ID: LIB3139-111-P1-N1-G5
anaaatttgtttctttgtgtgtgtatggtgatgataacttaattagtgttcatgaatatgtcaagccttactttagtggttctaaattgaaaagctttctagctagtcataacatcaccattactgatggtattgacaaaactagtgcaactttgcaatttaaaaagttagcagattgtgattntctcaagagaaactttaagcagatgtctaatgttttgtgggtggctcctgaggacaaggcgagtttatggtcacaacttcattatgtttcgtgtaataatcttggaaatgcaagaagcttatcttgtcaacctcgtaaatgtgttacgagaattgtatttgcacagtccagaggaagctcgccaattgagaaggaaagctctctctcgtattgaatggctgcaaaaagctgatgtgcctaccatagcacagaatgaagagttccattcgatgcagaggatgatgaatgc

SEQ ID NO: 47132 - DNA, 521 bp, Glycine max
  Clone ID: LIB3139-111-P1-N1-G7
aattagaaagaaaattttactctgctagatctgatgaaaatcacgagaagaaagaaacaggtaatgtagagtccactgacaaatggacaagtggggatgaccctaatcagaaaactcgcaaagacaatggagaagatggaaaatgtgatacaagagacaatccaagtagttccagcactaatggaaaaccttctgctgtggaggaagaagaagtgattctcttcaggcctctagcgaggtataattctgcaccattgtacgcactttttccccctcatgagcagatgtcatcacccaaagacaaggatgataaagtcttgccttctgatgattgtctgcgccgtactacatctctgcctatgggacaaaatccatttcaaattgatccgtggggattccaaggtgacattaaaaattcaaggatgaacaaattgttccaactgctagaaccttctatgaaggaatcaaatgcacacacattttttgagggtacaatctctgctgggcatccctcactcaat

SEQ ID NO: 47133 - DNA, 420 bp, Glycine max
  unsure at all n locations
  Clone ID: LIB3139-111-P1-N1-G8
cggccaggaccaaacagcatccgcggcagcgacggtaaccctccaacaacaacacttncgctgcgaaaaatgtctctggtggcgaacgaggatttccagcacattctgcgtgtgctgaacaccaacgtggatgggaagcagaagataatgttcgcaatgacctccatcaagggtattggaaggagattcgccaacatcgcttgcaagaaggctgatgttgacatgaacaaaagggctggtgagttgactgctgctgagttggatagtgtgatgactgtggtggcgaaccctaggcagttcaagatcccagactggtttttgtacagaaagaaggattacaaggatggcaaatactctcaagttgtgtctaatgctcttgatatgaagctcanggatgatcttgagagactcaagaaaatc

SEQ ID NO: 47134 - DNA, 470 bp, Glycine max
  unsure at all n locations
  Clone ID: LIB3139-111-P1-N1-G9
cgagtatggaaagtttttacatgcttgtgttgttgcattgtccctgaatttgtacttgattctgggacgtcactcagtctgagtctgtttctgcaaatttcaaaaccctctctctcgttactcgccatcactagcgagtgctccttcttcctcttcgcgaaatttgnatgcgaagaaggaggtagggattcgcgctcctgctttctcagactgtctaattatcttttattctgcgaagtaactgatagattgtagatgggaggagatgattctggtttggagagtgacaatattgattggaacactagagatgagcttgaaattcagaactataactcgtcgtcttcatgtctaacccgttctaatggagatgctgatactggctcttgagaggcaagctcgtttgcagttttgggtaattacaacgtgcttgatcacttcctcagcatgggtatttctagagaaatggt

SEQ ID NO: 47135 - DNA, 452 bp, Glycine max
  unsure at all n locations
  Clone ID: LIB3139-111-P1-N1-H10
atgagatgaggccgatgcaactgccaccgtcttccgcttccggngccaaccctgcccctgcaaccaccaacaacaacaacaaggagcagcgtccccagcgccgccgcaaggacctcacgctgccgctgccgcagcgagacaccaacttggcggtgccgcttcctctgccgccatcgacggcgcctgctgcggcggcgagcggcggagcgagccagcaggcggcgcagcaggtgatccctttctcggagctggagagactgaaccgcatcgggagcgggagcggcgggacggtgtacaaggtggtccaccgcacgagcgggcgcgtgtacgcgttgaaagtgatatacggtcaccacgaggagtcggtgcggcggcagatccaccgggaaatccagatcctncgtgacgtggacgatgcgaacgtggtgaagtgtcacgagatgtacgatcag

SEQ ID NO: 47136 - DNA, 107 bp, Glycine max
  Clone ID: LIB3139-111-P1-N1-H11
ctcacaactcacaatccttcctccttttcctttactgtttcttacatacattcatgccaaaggaggtaagtgattgggtcttaagctgttaaaatagcaaggaaggt

SEQ ID NO: 47137 - DNA, 287 bp, Glycine max
  unsure at all n locations
  Clone ID: LIB3139-111-P1-N1-H2
cgcgctgctcactattctccctatggagtttaatctngtggtccgtcaaaagtttttaaattttgtgaggttcattatgaagaaaaggacacgcttagttgtcaagttggaatcaacccatactccatggaatggactggtttggccaatagattactgagtaagggcaatgatattctgtgttgcgattattgctagtttgatggtttgattaccaagcaagttatgagcaagatggcagaaatgataaacagtctttgtggtggtgatgaaaaaattgatgcgtg

SEQ ID NO: 47138 - DNA, 308 bp, Glycine max
  Clone ID: LIB3139-111-P1-N1-H5
aggaaactctcaagattttgaaattgctggtaatactcttatgccagctttttctgttccacaggctactgccagatcttctgaaaatgcggaatcctctgcatgatctggaattcgtgttttctttcgcttgttcgtttgtttaattcaataaaggaaattaggcatgaccctcttgttgagtatgctctgcctatctgaaaatttccacacctcttttaattgtcgtaatgatgtgtgaagtgtgtgttattttaaaaaaaaaaaaaaaaaaaaaaaaaaatttaaatataaaaaataattatatt

SEQ ID NO: 47139 - DNA, 493 bp, Glycine max
  Clone ID: LIB3139-111-P1-N1-H7
gcacttgagaagaccaaataccccgaatccgacatttactggaaaaaattggaagagagataccacttctcttgccaattcacagctgatctatttgccatgaaccacacagatttcattatcaccagtaccttccaggagattgctggaagcaaggacactgttggacagtatgagtctcacacagcctttacccttcctggactctaccgtgttgtgcacggcattgatgtctttgatccaaaattcaacattgtctcccctggagctgatcaaaccatttacttcccccccaccgaaactagccgtaggttgacctcctttcaccccgaaatcgaagaacttctttacagctctgtggagaatgaagaacacatatgcgtgctgaaggaccgcagcaagccgattatcttcaccatggcaaggttggaccgtgtgaagaacatcacaggactcgtggagtggtacggtaagaacgcgaagctgagggagt

SEQ ID NO: 47140 - DNA, 534 bp, Glycine max
  Clone ID: LIB3139-111-P1-N1-H8
caagtgaccgttgagtattacaatgacaatggtgccagggttcctattcgtgtacacaccgtgctaatctccacccaacacgacgagactgtcaccaatgacgaaattgctgctgacctcaaagagcatgtgatcaagcctgtgatcccagagaagtaccttgatgagaagaccattttccacttgaacccttcaggccgttttgtcattggtggccctcatggcgatgctggtctcaccggccgcaagatcattatcgatacttatggaggatggggtgctcatggtggtggtgctttctccgggaaggaccctaccaaggttgataggagtggtgcttacattgtgagacaggctgctaagagcattgtggcaagtggacttgccagaaggtgcattgtgcaagtgtcttatgccattggagtgcctgagcctttgtctgtgtttgttgacacctatggcactgggaagatccatgataagggagatctcaacattgtgaaggaaaactttgatttcaggccttgtatgatc

SEQ ID NO: 47141 - DNA, 197 bp, Glycine max
  unsure at all n locations
  Clone ID: LIB3139-111-P1-N1-H9
gtctctttcttcatagcatttggaaatttggctgatgacaccatcaattttgaggctttttcctgaatctctccaaactgcaccagcttgtggngaaaagcctnaaaattgatggngtgatcagccaaatttacaagtgctttgttgaaagtgaccacgttcatgatttggcgacttcgtactcgtgccttcgacgt

SEQ ID NO: 47142 - DNA, 439 bp, Glycine max
  Clone ID: LIB3139-112-P1-N1-A1
aagatttcctcagtataagccttagagatttctacatcgctggagaaagttatgcaggtcactatgttcctcagttgtctcaacttgttcaccggagaaataagggtctcgaatccacttataaatttcaagggttttatggttggaaatgcagtcattgatgatttccatgattatattggaacatttgagtactggtgggtcaatggtttgatttcagattccacatataagaagctgggaattgcctgtgacttttattcttctgagcatccaccagagaattgtgtggaagctctcgaacttgcaactttggagcagggaaacattgatccatatagcatttatacaccagcatgcaatgatatagcaacaatcaaacgccgcttgggggggcgctatccatggttgtgtcgagcatatgatccctgtactgaga

SEQ ID NO: 47143 - DNA, 355 bp, Glycine max
  Clone ID: LIB3139-112-P1-N1-A10
tgcatttgtgggatctgatgacatgcttttttcatggaagaggaagagtagtgattcttcgcctgttaaaagttctagggatgagaataatgctattgcggtaagatccagaaactcttctccaactacagtctcgaattatgggtatactgatggagagcttgtcaaactagaaaaggatgaaaaagttagcattgtaagggaagatgatctaggtgcatcactagaggatgaagaggcagctgctgtgcaagagcaggtaatgcaaataaaggctcatgaggaggatattgaaaccttcaatctaaagattgtgcacaggaaaaacagaactggctttgaggaggacaagaat

SEQ ID NO: 47144 - DNA, 517 bp, Glycine max
  Clone ID: LIB3139-112-P1-N1-A12
ctgaaactgtggaagaggcaataaggttaataggtttgtcaccagatacctatttctcaatccatactgatgatgaagatggcaaaccacgtagcggaagctccttgccacctacattcccaccctgtactctaagaacagcacttacacgatatgcagatgttttgagttcacccaaaaagtctgccttgcttgccttagctgctcatgcatctgatccatctgaagctgatcgactaagacatcttgcctcacctgctggaaaggatgaatattcagagtgggtgattgcctctcagagaagtctccttgaggtcatggctgaatttccatcagccaaacctccaattggtgtcttttttgcagcagttgctcctcgcctgcagcctagattttattcgatctcctcatctccaagaatggtgccaaacagaattcatgttacctgtgcattagtacatgagaaaatgcccaccggaaggattcacaaaggagtgtgtcaacatggatgaagaat

SEQ ID NO: 47145 - DNA, 151 bp, Glycine max
  Clone ID: LIB3139-112-P1-N1-A3
tctacagaggaagttattaagttccatcattgagggatgcagtatcgatgcagtgatgaacatatgcagacctaagcacagtgtcagtcactggtgctgttaatgaaagctacttcatcgagattagagttgcgtgagtgctgatattact

SEQ ID NO: 47146 - DNA, 470 bp, Glycine max
  Clone ID: LIB3139-112-P1-N1-A8
agcaacctctcaattgccagaagatgaacctcgtcgtgagacaataccttcgggtttaggtattcttgtgtccaatcgggaaagagggccgggaaatgatagtgtgcttcaagttgatgtggtcactatatcttccaacattttgtctggtagcagtgctgatgccaatgataatgatgccagaaggaatggtagaagattattttgggatgctttttcacgacgtagttctagaaggcttggtgattctcctaccattgtcttctctgctgggggtgctgatgattctggatctcaagatcgatggctagttgattttggtggtgatttgtcaaatgatgggggttgagggcttccggatatacgggtagtagaattcacagattgaatgaacgaagaatgcaacactcaagatctgagatcttgggaaggcttttcgggggctttgatgagattgggtcggggaatta

SEQ ID NO: 47147 - DNA, 390 bp, Glycine max
  Clone ID: LIB3139-112-P1-N1-B10
ctcgagccgctcgagccggaaaagtgttcctacattggttggcattgaatgtcccaaggatgagaaacttcctcgtcgcaaaatttttgacaaacctaagacgcgctgcttcactattctccctatggagtttaatcttgtggtccgtcaaaaggttttaaattttgtgaggttcattatgaagaaaagggacatgcttagttgtcaagttggaatcaacccatactccatggaatggactggtttggccaatagattactgagtaagggcaatgatattctgtgttgcgattatgctagttttgatggtttgattaccaagcaagttatgagcaagatggcagaaatgataaacagtctttgtggtggtgatgaaaaaattgatgcgtg

SEQ ID NO: 47148 - DNA, 366 bp, Glycine max
  Clone ID: LIB3139-112-P1-N1-B11
caggaactggcataaacccagctagtagttttggtgctgctataatacacaaccgagaccatgcttgagatgaccattggaaattctgcattggacctttcattggagctgcccttgctgctgtatatcaccagatagtgatccgagcaattgctttcaagacatggggttaaccaatcctgcatccatctctgtgtcagaactatctaactagtggaggtctgtttgtatgactgcccaatacatatggaatatctatttgctcaaaatccaacatgtgtgtaaatgatgaccttaaacactacctaactgatgtgaactcgatctgttgaataaatggcaacagtgagaacaccattgattttg

SEQ ID NO: 47149 - DNA, 393 bp, Glycine max
  unsure at all n locations
  Clone ID: LIB3139-112-P1-N1-B12
ctcgagccgctcgagccgattntgaggcttttccccacaagctggtgcagtttggagagattcaggaaaaagttgtattgaaattttcacaagaggaatttcttacagcttggtcaactcaggtgcgtcctgcaacaactctgttggctgatgggtgtccatatntgtatgcaatggtgcatgatagttcagtgtctacaataccaggtgattttgtcattggtgtcaagttgacaaccatanacaatatgtgtgcatatgggctcaatcctggtatttcaaggtcttggtctttggcaacaattcctcagtccatttcacagcanactgtttggaatcaaatggcaacagtgagaacaccattgaattttgattctagcaagcagagctttt

SEQ ID NO: 47150 - DNA, 310 bp, Glycine max
  unsure at all n locations
  Clone ID: LIB3139-112-P1-N1-B3
accaaatcagaaccacattcctgggaattggattttccaataaagggatgggggcctaataaaggttttgaaatggggaggtctgagtgggcaaatcaaacctcattgcatttgaagtttcttaatgccattcccaacagctccattttgatttctttgggaatttcagaattgaatggtgtatctttatccgcttttgtcaagctctgcgacttgaagcgatcttgtgacggatggttcttcctgtcgtgtatcnaagaatagtacttgtagatcttgcatgaattcactttatgcatgggaggggatt

SEQ ID NO: 47151 - DNA, 439 bp, Glycine max
  unsure at all n locations
  Clone ID: LIB3139-112-P1-N1-B7
tttctctctcttcttgcttctctctcttcttgctcctctctccttttcaattactctctctaccaaggagtgatggctgtgcaactgtgggaaaccctgaaggaggccatcgtggcctacaccggcttctctccttccaccttcttcacggtgctggcgcttctttttgccgcttactacgtcgtcacgggtctttttggttcctncgacgaccaccaccaccgtcaccgtcacgcccaggaggaggagatgccgcctctgcgccccccggttcagctcggcgagatcacggcggaggagctcaaggcctacgacggcaccgatcccgagaagccctngctcatggccatcaaggcccagatctatgatgtctcccagagcaggatgtnttatggacctggtggaccttatgccctanttgctggcaaggatgctagca

SEQ ID NO: 47152 - DNA, 430 bp, Glycine max
  Clone ID: LIB3139-112-P1-N1-B8
tctgaggcctgtgctgtgctctgaggggttatagtttgggaccctttgaaccctaatctccacccaaacccattttcccgggaaattgccttggaaaagaaagagcgaagaggaaaatgcagaatcacaggctgaagcagcagcagcagcagcaacaacaagctcttatgcagcaagctcttctccaacaacagtctctctaccaccctggcctccttgctcctcctcagattgaaccatatccaagtggaaatttgccttctggttttgatccaagtacttgccgcagtgtgtatgttgggaacatccatacacaggtaactgagccgcttttgcaagaagttttctcgggtactggcccaagtgaaggttgtaagcttatcagaaaggataagtcatcctatggattcattcattactttgatcgcag

SEQ ID NO: 47153 - DNA, 495 bp, Glycine max
  unsure at all n locations
  Clone ID: LIB3139-112-P1-N1-B9
tcttgctngatctcgtcggtgcaactacattttctggggctgaactatgtgcagactgttactcatgcacctgcccaaacttgttgcctatagtgaagaaaggagtggccaaagccattcagaaagaaccacgcatgggcgcttccttactccgattgcatttccatgactgctttgtaaacggttgtgatgcatctatactgttggatgatacaagcaacttcattgtggagcaaacagcagcagctaacaaccaatcagctagaggtgtcaacgtgattaatgatattaaggccagtgtggagaaagaatgccccagagtagtgtcatgtgctgataatcttgctttgtcagctagagaatctgtaagttaattaggaggaccttctgggaaggggggtggggggaaggatttactacacaagcagagtgatgctataatacatcctgggcttactagctaatggtctgtaacaatttgttataaggcttaat

SEQ ID NO: 47154 - DNA, 496 bp, Glycine max
  unsure at all n locations
  Clone ID: LIB3139-112-P1-N1-C10
ggaaatacaaaaatgaaggccagcaccaatgttaggcatattgttcttccttgtactagttctgccagggcccaacttatcccagatattattcgctgttatagcagtggaggccggacaattgtatttaccgagacaaaagaatgtgcttctcagcttgcagggatcttgaatggagcaaaagctctccatggtgacatacagcaatcaacacgtgaggttactctgtctggctttaggtctgggaaattcatgacattagttgccacaaatgtggcagctcgaggtcttgatatcaatgatgttcagttaattatccagtgtgaacccccacgagatgtagaagcctatatccatcgttctggacgcacaggaagagcaggtaatactgnngttgctgtcatgctttatgatccaaaaagatctaacatacctagaatagaaagagagttcggtgtaaaatttgaacacgtatcctgccctcagcccgatgata

SEQ ID NO: 47155 - DNA, 515 bp, Glycine max
  Clone ID: LIB3139-112-P1-N1-C11
taccaagcaagttatgagcaagatggtatttatgataaacagtctttgtggtggtgatgaaaaattgatgcgtgaaaggacgcacctgctgttggcttgttgttcaaggatggcaatttgtaagaaagatgtttggagagttgaatgtggaatcccttctggatttccgctcacagttatttgcaatagcatttttaatgagatgctcattagatatagctatgaaaaattactgggccaggctaaagcttcaagtatgtttttacaatccttcaaaaatttagtttcttttgtgtgtgtatggtgatgataacttaattagtgttcatgaatatgtcaagccttactttagtggttctaaaatgaaaagctgtctagcttgtcataatatcaccattactgatggtattgacaaaactagtgcaactttgcaatataaaaagttatcagattgtgattttctcaagagaaactttaatcagatgtctaatgtttatgggtggcttctgatgaca

SEQ ID NO: 47156 - DNA, 397 bp, Glycine max
  Clone ID: LIB3139-112-P1-N1-C12
ctcgaatccacacagttctactctacgctctaaaccctctctctctctctctctcgatctatcatggctttgcccaatcagcaaaccgtggattaccctagtttcaaactcgtcatcgtcggtgacggcggtacaggaaagacaacgttcgtgaaaaggcatcttaccggtgaattcgagaaaaaatacgaaccgaccattggagtggaggttcacccattggatttcttcacaaactggggaaaggatcgcttctactgttgggatactgctggacaagaaaaggtttggtggcctcagagatggatattatattcatgggcaatgtgcgaatataatggttgatggtactggccggcttacatacaaaaatgtccctacctggcaccgggatctt

SEQ ID NO: 47157 - DNA, 511 bp, Glycine max
  unsure at all n locations
  Clone ID: LIB3139-112-P1-N1-C8
cttgttttgtgggatctgagacctcttgtattgactgggaataaggtggagaaactctgtgatctctgtaacattactgttaacaagaacgctgtttttggtgatagcagtgccttggcccctggtggagtgcgaattggtgcccctgccatgacttctaggggtttggttgaaaaagactttgagcagattggtgagttccttcaccgtgctgtgactctcacactggagatccagaaggagcatggcaaacttctcaaggatttcaacaagggtctcgtcaacaacaaggctattgaagatctcaaagctgatgttgagaagttctctgccttgtttgacatgcctggcttcctggtatctgaaatgaagtacaaggattaggttcaaccataccactntctactaaattgtgtcactcaagttcgacacanagtgcaaaaatggagaaaaaggaaatatgtgtcttcctttcctgggagtgatagggtttatcgccattggtgtttaa

SEQ ID NO: 47158 - DNA, 265 bp, Glycine max
  Clone ID: LIB3139-112-P1-N1-D10
gagaatccgaggcgaagagaagagaaaaattaagatggaggggaaggagcaggatgtgtcgctgggagcgaacaagttcccggagagacagccgattgggacggcggcgcagagccaagacgacggcaaggactaccaggagccggcgccggcgccactggttgacccgacggagtttacgtcatggtccttttacagagcagggatagcagagtttgtggccacttttctgtttctatacatcactgtcttaaccgtcatggga

SEQ ID NO: 47159 - DNA, 501 bp, Glycine max
  Clone ID: LIB3139-112-P1-N1-D11
gcttatcttgtcaatctcgtaaatgtgttacgagaattgtatttgcacagtccagaggaagctcgccaattgagaaggaaagctctctctcgtattgaatggctgcaaaaagctgatgtgcctaccatagcacagattgaagagttccattcgatgcagaggatgatgaatgctcctgattcaaatgataatattgatctactgttgagcattgatttgttgggtttacaaggagcaggtaaagcttttccaaacaagattgtttttgatgataagcttgtgttggctaacacacaagaattctttgatggaaattttccagtggattcttggttaccaatttttgtgaattgtctctatcctgtaagtcaattaccttcagaagctgtcgttgtaaatgttacatgtggtagttggacggtgtggtacccaccactgcttggatagttctgcagttaacaatcgctcctcagacatcaacaaatggattcgcacagcact

SEQ ID NO: 47160 - DNA, 465 bp, Glycine max
  Clone ID: LIB3139-112-P1-N1-D12
aggcaatcacaaagcttctgaacaacaacattaccccatgtttgccacttaggggaacaatcacagcatctggtgatcttgttcctttgtcctacattgctggtttgctaactggtagaccaaactccaaggctgttggaccctctggtgagattctgaatgccaaagaagcctttgaattggccaacatcggtgctgagttctttgagttgcaacctaaggaaggccttgcccttgtgaatggcactgctgttggttctggcttggcctcaattgttctatttgaagccaacatcattgctgtcttgtctgaagttatttcagcaatttttgctgaagttatgcaaggaaagcctgaattcactgaccatttgactcataaactaaagcaccaccctggtcagattgaagctgctgctattatggaacacattttggaaggaagctcttacgtgaaagcttgtt

SEQ ID NO: 47161 - DNA, 461 bp, Glycine max
  Clone ID: LIB3139-112-P1-N1-D7
caaatggcaacagtgagaacaccattgatatttgattctagcaagcagagcttttggcaattgtctattgaccttctcggtggaggaattttagtggacaaaactggagattggatcacacttatacaaaattctccaattagtaacttgttgagagttgctgcttggaagaaaggttgtttaatggtcaagattgtgatgtctgggaatgcagcagtcaaaaggagtgattgtgcctcattgttacaagtgtttttaacaaacagcaacagtacagagcattttgatgcatgtaagtgtacaaaatcagaaccacattcttgggaattaatcttaccaatagaggtatgtggtcctaataatggattcgaaatgtggagttctgagtgggcaaattcaaacttcatggcattttgagtttttcttattgacaatcccaaacagactacaatttttgatat

SEQ ID NO: 47162 - DNA, 450 bp, Glycine max
  unsure at all n locations
  Clone ID: LIB3139-112-P1-N1-D8
attctctctgtgtatttccctacctctcccttcaagatgcagatcttcgtcaagaccctcaccggcaagaccatcacccttgaggtggaaagctctgacaccatcgacaacgtcaaggccaagatccaggacaaggaaggaatccccccggaccagcaacgtctcattttcgccggaaagcaacttgaggacggccgtacccttgctgactacaacattcagaaggagagtactcttcacctcgtcctccgtctccgtggtggcatgcagatcttcgttaagacactcaccggcaagaccataaccctagaggttgaaagctccgacaccatcgataacgtcaaggccaagatccaggacaaggagggtatccccccggaccagcaacgtctcatcttcgccggaaagcagctcgaggacggncgcaccctcgccgactacaacatccag

SEQ ID NO: 47163 - DNA, 503 bp, Glycine max
  Clone ID: LIB3139-112-P1-N1-D9
ctaaacgccgcactctcttttcttcctcagaaacacatcctaatggcagagcgcggaggtggcgatcgtggcggcgaccgtggcggtttcggacgtggattcggcgggcgaggacgcggaggtgacaggggccgaggccggcgccgaggcccccgccgcgaggaagaggagaagtgggtcccagtgaccaaactgtgccgcctggtgaaggagggaagaatccgaagccttgaacagatctacctccactcgctcccgatcaaggagcaccagatcatcgacacgctcgtgggtcccaccctcaaggacgaggtgatgaagatcacgccggtccagaagcagacccgggccgggcagaggacccggttcaaggccttcgtcgtcgtcggagacaacaacggccacgtctggctgtgcgtgaagtgcagcaaggaagtggcgacagctattcgtggcgcgattattctggcgaagctgtctgttatccccgtgaggagggggta

SEQ ID NO: 47164 - DNA, 512 bp, Glycine max
  Clone ID: LIB3139-112-P1-N1-E10
cagaagcgtgcttgcttcgttgcttggttggttcaattgtatcagtatatactcagaagccatgatattagttgatggcattccattttctacccattcatctcaccctcagggaaaggatattctacttgatttgttggaaaatcccattctggtatcagcctcaaactctttgaaggctaactcagagaggaagttctcagtatctgatgagtctagtccagagagatcaaaatgggtttatatattccagagagaatatgctaccgttgaccccgcccttgttgattttgttggcaccgatgaagcaacaacgtgtgttggccttgttattcggaaccaaaagaatggaatgacgtcagttgcccatatggattcaccaaaaattgtagaaatgggcctctcccaaatgttatcatcactcgtcgacaacagtttggagactgagtttgatgtgcatcttatttggggggttgagatgtctcacttgaacatgcaaatggtagcacagt

SEQ ID NO: 47165 - DNA, 515 bp, Glycine max
  Clone ID: LIB3139-112-P1-N1-E11
atgaaaaattgatgcgtgaaaggacgcacctgctgttggcttgttgttcaaggatggcaatttgtaagaaagatgtttggagagttgaatgtggaatcccttctggatttccgctcacagttatttgcaatagcatttttaatgagatgctcattagatatagctatgaaaaattactgcgccaggctaaagctccaagtatgtttttacaatccttcaaaaattttgtttctttgtgtgtgtatggtgatgataacttaattagtgttcatgaatatgtcaagccttactttagtggttctaaattgaaaagctttctagctggtcataatatcaccattactgatggtattgacaaaactagtgcaactttgcaatttagaaagttagcagattgtgattttctcaagagaaactttaagcagatgtctaatgttttatgggtggctcctgaggacaaggcgagtttatggtcacaacttcattatgtttcgtgcaataatctggaaatgcaa

SEQ ID NO: 47166 - DNA, 497 bp, Glycine max
  Clone ID: LIB3139-112-P1-N1-E12
atattcactcaccattttctcttttctcttcctctgagaacaaaaaaggggaagagacacaaaagaagaaagtgtgagtgagggaggcagaatctgaataataataataataataaatagctgcgtgttcaatgagagccacagaaaatcaataatgggagtagtttctgaaggaaacggcgacgttttaccatggctgaaatcgatgccggtggcgccggagtaccggccgagcgccgcggagtttcaagatcctataagttacatattcaagatcgagaaggaagcttccaagtacggaatctgcaaaatcatccctcccttcccaccttcttccaggaagaccgcaatcgccaacctcaaccgctcactcgcggagaccggctccacattcaccacgcgccagcagcagatcggcttctgcccccgcaggcccaggcccgtccagaggcccgtctggcagagcggtgatcgctacaccttcaccgagttcgagt

SEQ ID NO: 47167 - DNA, 315 bp, Glycine max
  Clone ID: LIB3139-112-P1-N1-E2
aaatataatttgatcattccttttaaaaccatatggttggatccctgttcaaattcatcttaattggtaattctagtcactttcatggcccattggaaaattattaccccaatttcaaatatctatgccggtcttggcttggttttctttaaaggtataatggcatattaccacatttcaaaaggtcagtcagtggttttgacagggtactttgcatactggtggtaatggtatgaacagggggctttcctggaaaagaatagatcggagaaatccgggataccatgctttctttttggtcactccactggggga

SEQ ID NO: 47168 - DNA, 523 bp, Glycine max
  Clone ID: LIB3139-112-P1-N1-E3
ccaccgtggaaggtggcgcgtgaggctgtttccggcgacctataccggcggcgctgagtggtgatcaaggaaatgggtcagaggctaagctgcgtgcaacagcagcacgaggagcatggtgtgctcttcccagcacttgcaagtggagaattggaggttgttgaggccatggtggaggaagaccccactgtgttggaacacaccactggctgtgaccgcctttctcctctgcatgtagctgctgccaatggtcggatcgaggttctttccatgttgttggataggtctttcaatgttgacgtattgaatcgccataaacagaccccgttgatgttggctgtgatgcatggaaagactggttgtgttgagaagcttattcatgccggagcaagtatattgatgtttgattctatacgtcggagaacttgcttgcactatgccgcttattatggaaatatagactgccttaaggtcattctttctgctgctcattccacacctgttgcagattctttggggattg

SEQ ID NO: 47169 - DNA, 281 bp, Glycine max
  Clone ID: LIB3139-112-P1-N1-E5
aagcccccaattgggaggcctcctgtttccaaacctccagttgaaaaccccccattttataggcctccaggtgggaagccaccagggtccaagcccccagttaagaaacccccatggtacaagcccccattggaaaaaccacacgggtccaagcccccagttgagaaaccaccagtgtacaggcccccagttgaaaaacccccatttccaggcccccagttgaaaaacccccagtgtacaagcccccagttgaaaaaccaccagtgttcaagcccccagtt

SEQ ID NO: 47170 - DNA, 327 bp, Glycine max
  Clone ID: LIB3139-112-P1-N1-E6
gcttgttagttcagtgtctacaataccaggggtttttgtcattggtgttaagttgacacccataaacattatgtgtgcatatgggctcaatcctggtatttaaggttctcgtcttttgggcaccattcctaagtccatttcacagcaaactgtttggacttcaaatggcaacaggtgagaacaccattgaattttggtttctagcaggcagagcttttgtcaattttctattgaccttctcggtggaggaattttagtggacaaaactggagattggatcacacttatacaaaattctccaattagtaacttgttgagagttgctgc

SEQ ID NO: 47171 - DNA, 503 bp, Glycine max
  Clone ID: LIB3139-112-P1-N1-E8
gcttatcttgtcaatctcgtaaatgtgttacgagaattgtatttgcacagtccagaggaagctcgccaattgagaaggaaagctctctctcgtattgaatggctgcaaaaagctgatgtgcctaccatagcacagattgaagagttccattcgatgcagaggatgatgaatgctcctgattcaaatgataatattgatctactgttgagcattgatttgttgggtttacaaggagcaggtaaagcttttccaaacaagattgtttttgatgataagcttgtgttggctaacacacaagaattctttgatggaaattttccagtggattcttggttaccaatttttgtgaattgtctttatcctgtaagtcaattaccttcagaagctgtcgttgtaaatgttacatgttgttgtggtgggctcctgtggtccccccactgcttggatagttctgagttaacatcgctctcatatatcaacaatagatcgcacagacttgggaa

SEQ ID NO: 47172 - DNA, 509 bp, Glycine max
  Clone ID: LIB3139-112-P1-N1-F1
ctcgcaatggttaaagttaatgtagtttgttctgctgttggcttgacatcaagttacactccaactccattgttggaatctggtttgcaaaaagacagagggttaattgtggagtattttggaaggatgtcttacgttgctcataatgttaatcagcctcaagagaaagatttgttggagggaaatttttcctttgatattaaatctcgctctagattggaaaaagtttcctctacaaaagcacaatttgttagtggaaaaaccttcatatatgatataattggtgctggttcacattcttcagaagaatttcctgaaaaggaagatcaagaaaaacccaaaaagattgatgccagattgagacatagaatagatcctcaatcaatgaggttcaagctcagatggaaacaaattgtttaaattgtctcttgatgatgttgaaacttctaaagggtccatgttggatcttaatatctctcaatctaaaattgcacttcccaagaacacag

SEQ ID NO: 47173 - DNA, 496 bp, Glycine max
  unsure at all n locations
  Clone ID: LIB3139-112-P1-N1-F10
caggctcagatggaaacaaatntgttttatttgtctcttgatgatgttgaaactcctaaaggttctatgttggatcttaaaatttctcaatctaaaattgcacttcccaagaacacagttggaggaaccattctgcgtagtgatctattggcaaattttttgacagagggcaattttagagcaagtgttgatttgcagcgcactcatcgtattaaaggaatgattaaaatggtggccacagttggtattcctgagaatacaggtatagcattggcctgtgctatgaatagttcttttagggggcgcgccagctctgatatttacaccatctgctctcaagactgtgaattatggaatcctgcttgcacaaaagcaatgactatgtcatttaatccaaacccgtgttctgatgcatggagtttggaattttgaagcgtaccggattcattgtgatatcattnggtcactggatggactgccaccccaatgcaggatg

SEQ ID NO: 47174 - DNA, 518 bp, Glycine max
  unsure at all n locations
  Clone ID: LIB3139-112-P1-N1-F11
gaaaaggaagatcaagaaaaacccaaaatgattgataccagattgagacaaagaatagatcctcaatacaatgaggttcaggctcagatggaaacaaatttgtttaaattgtctcttgatgatgttgaaactcctaaaggttctatgttggatcttaaaatttctcaatctaaaattgcacttcccaagaacacagttggaggaaccattctgcgtagtgatctattggcaaattttttgacagagggcaattttagagcaagtgttgatttgcagcgcactcatcgtattaaaggaatgattaaaatggtggccacagttggtattcctgagaatacaggtatagcattggcctgtgctatgaatagttcttttagggggcgcgccagttctgatatttacaccatctgctctcaagactgtgaattatggaatcctgcttgcacaaaagcaatgactatgtcatttaatccaaacccgtgttctgatgcatggagtntggaatttctgaagcgtac

SEQ ID NO: 47175 - DNA, 476 bp, Glycine max
  Clone ID: LIB3139-112-P1-N1-F12
ataagattgtagggaggaacattagccaacaccacacagctggcatgcattcccactcttcaagacaatcttcaacaatggaagaacaatcaataaataggaaatactttccttttaagcaaggttacccatttgtggcaactcttagagtgggatctgaaggaattcagatgacagttgatgggaagcacataacttcgtttgctttccgtgaaactttggagccatggctagtcagtgaaataaaaatctcaggggacctcaaattaatatccattcttgccagtggtttgcccacatcagaagattcagagcatattattgacctagaatcattgaaatcaagtcctatatctgcacagactccattggatctcttcattggtgttttctctactgctaacaattttaagcgtcggatggctgttagaagaacctggatgcagtacgattcagttcgatcaaatacaacagct

SEQ ID NO: 47176 - DNA, 84 bp, Glycine max
  Clone ID: LIB3139-112-P1-N1-F4
tttttccctttcaaccacccaaaatttttggttaattcatacctaatggcatttaatttgagacccaaaaaccttgaccggcca

SEQ ID NO: 47177 - DNA, 451 bp, Glycine max
  Clone ID: LIB3139-112-P1-N1-F6
attttgtgtggcgataatgctagtttggatggtttgattaccaagcaggttatgagcaggatggcagaaatgataaacagtctttgtggtggtgatgaaaaattgatgcgtgaaaggacacacctgctgttggcttgttgttcaaggatggcaatttgtaagaaagatgtttggagagttgaatgtggaatcccttctggatttccgctcacagttatttgtaatagcatttttaatgagatgctcattagatatagctatgaaaaattactgcgccaggctaaagctccaagtatgtttttacaatccttcaaaaattttgtttctttgtgtgtgtatggtgatgataacttaattagtgttcatgaatatgtcaagccttactttagtggttctaaattgaaaagctttctagctggtcataatatcaccattactgatggtattgaca

SEQ ID NO: 47178 - DNA, 283 bp, Glycine max
  unsure at all n locations
  Clone ID: LIB3139-112-P1-N1-F9
acccacacaacacaccacaaccttcttcttcttcttcttcaacttctggttcaaaacctcaacagtttgttgaattgcgcgttgaaatacgactcaatattctttcgcgagctctgttctcacttcaaaggttaggttcttcgacagtttctntgtttccactccgtcgctngctgagaaagcgtgagcgagagttgtagaattacgcaacgagtgtcgcggatgaaagatctgtggtgaggtctctggaaatgacaatcattggagggtgaacgatgaaagg

SEQ ID NO: 47179 - DNA, 496 bp, Glycine max
  Clone ID: LIB3139-112-P1-N1-G10
cgagaattgtatttgcacagtccagaggaagctcgccaattgagaaggaaagctctctctcgtattgaatggctgcaaaaagctgatgtgcctaccatagcacagattgaagagtttcattcgatgcagaggatgatgaatgctcctgattcaaatgataatattgatctactgttgagcattgatttgttgggtttacaaggagcaggtaaagcttttccaaacaagattgtttttgatgataagcttgtgttggctaacacacaagaattctttgatggaaattttccagtggattcttggttaccaatttttgtgaattgtctttatcctgtaagtcaattacctccagaagctgtcgttgtaaatgttacatgtggtagtggacgttgtggttacccaccactgcttggattagttctgcagataacaatcgctcctcagatattaacaaaaagaatcgcacagcacttgggaaagtaagaaaattgttttc

SEQ ID NO: 47180 - DNA, 491 bp, Glycine max
  Clone ID: LIB3139-112-P1-N1-G11
ctcgagccgaagcggctcgtgagtgcttattatttgtaatatatataagtcactcaagcttctaggatttgtgccagctacatgaaaatgggaagcaacttcaggtttttgagtctttgcctcttggcattgattgcatcaacccatgctcaacttcagcttggtttttatgccaagagttgcccaaacgctgagcaaatcgttttgaaatttgtccatgaccatatccacaatgctccatcactagcagctgcattgataagaatgcacttccatgactgttttgtaaggggatgtgatgcatcagtccttctgaactcaacaaccaatcaagctgaaaagaatgctcctccaaatctcacagtaagaggctttgacttcattgacagaataaagagccttgttgaggcagaatgccctggtgtggtctcttgtgctgatatccttactttgtctgccagagacactattgtagccacaggtggaccatt

SEQ ID NO: 47181 - DNA, 487 bp, Glycine max
  Clone ID: LIB3139-112-P1-N1-G12
agaggcattctcttaacacttcgggaggagctggtgcaaagaatgctattctcatgaatatgccaaatgctgttctttcaatgtggagatattttgttggagatctcgtctttgaagtttctaagatgacttctccctacattaaatgtacagtctctttcttcatagcatttggaaatttggctgatgacaccatcaattttgaggcttttccccacaagctggtgcagtttggagagattcaggaaaaagttgtgttgaaattttcacaagaggaatttcttacagcttggtcaactcaggtgcgtcccgcaacgactctgttggctgatgggtgcccatatttgtatgctatggtgcatgatagttcagtgtctacaataccaggtgattttgtcattggtgttaagttgacaaccataaacaatatgtgtgcatatgggctcaatcctggtatttcaggttctcgtcttttgggcaccattcc

SEQ ID NO: 47182 - DNA, 495 bp, Glycine max
  Clone ID: LIB3139-112-P1-N1-G5
cctcgtttaaccctctatcggggcagttgttgtttttgctgttgcaatggttttcacatggaggctcttgagatctccttctgggtctcaacggaggcaacagaaacggcaaggtccttcatctagtaatcctggagtcggtacaaattcaaattcaaatgcgtcggtggttccttcggatgcttgttcaccctcagatgattcaagggcgcaaaatgttgttgatgagttctttcagccagtcaagccaaccttggggcagatagttaggcagaagttgagtgaaggaagaaaggtaacttgtcgccttcttggagtgatccttgaggaaagtagtccagaggagctgcagaaacaagctactgtgaggtcctctgtgctagaagtactattggaagtaacaaaattttgtgatttatatctcatggaacgagttctggatgatgaaagcgagaaaagagttcttgtagcattggaagaagcaggggtattcac

SEQ ID NO: 47183 - DNA, 496 bp, Glycine max
  Clone ID: LIB3139-112-P1-N1-G6
ggacctcccaatggtttattctcttttcgactgccaggccgagtttttgaaccggaaagggcaccccgaattggcgttggaaatagcgaaaagaagtgtcatctcagccccaagcgagtttggcacctgggcaagattagcagagatctacgttagcctggaacagtgggatatggctctcttaacgctcaattcttgtcccatgtttacttaccaggacaaggacgcaccccgcatgccggagccgctccgtgttgccctccccgtgatgccggaaagcgtttgcgatgagattgatgacactgcgggtgtctcggatgcggacatggtgcatccaacgctgcgcaagctgcatgcggctggcttcaagggcacttttttgaaggcttacatgcttctgaccaagatcacaaagaagattggttgggatcagctgctcaggatacgaaagcaagttttcgtcatggaggaggaatacaggcatgaaaagaacatg

SEQ ID NO: 47184 - DNA, 490 bp, Glycine max
  unsure at all n locations
  Clone ID: LIB3139-112-P1-N1-G8
catattcagtccttgggtggtgaagttcatctaaattcgcgcattcaaaaaattgagctaaatgatgatggaacggtgaagagcttcttactaaataatgggaaagtgatggaaggggatgcttatgtgtttgcaactccagtggatattctgaagcttcttctaccagataactggaaagggattccatatttccagagattggataaattagttggcgtcccagtcataaatgttcacatatggcatcgcatttgcaggtttgacagaaaactgaagaacacatatgatcaccttctctttagcagaagtccncttctgagtgtatatgctgaccatgtcagtaaccttgcaaggaatattatagcccanaccagtcaatgttagagttggtttttgcaccagccgaagaatggatttcacgtagtgacgatgatattattcaagccacgatgactgagcttgccaaactctttcctgatgaaatttc

SEQ ID NO: 47185 - DNA, 509 bp, Glycine max
  unsure at all n locations
  Clone ID: LIB3139-112-P1-N1-G9
aacaacttcttctctcagacatggcatctcaaggtttgtgtccttcgataaaaaatattcttcttttggactctgaagggaagcgtgtggcagttaagtattactcagatgactggccaacaaacaatgcaaagttagcttttgagaagtttgtatttaccaagactgttaagacaaatgctcgtacagaagctgaggtaacactacttgagaacaatatcattatttacaaatttgtacaagacctgcattnttttgtcactggtggtgaagatgaaaatgagctcattctagcatcagttcttcaaggtttctttgatgcagtcactcttctgttgaggagcaatgttgacaaaagagaggcacttgagaactnggatctcattctcttgtgtcttgacgagattgttgatggagggatgatacttgaaacaaatggacctcttattgctgaaaaagtgacatttcatagcttgatgctgatcccccttgcagagcagacataactc

SEQ ID NO: 47186 - DNA, 465 bp, Glycine max
  Clone ID: LIB3139-112-P1-N1-H10
tgcagcacttaatggtgttgagggtttggtctatatggaaagaattcctcttgccacatctgagggttttcctcatgtgctttcacgcaaaaatggcgaaaaaggcaaaaggagatttgtctctggggatggtgaagagatgacattgattccaggaaccagtgttgaagaggcttacaacaagctaatagttgaacttgagaaaagtgttcctacattggttggcattgaatgtcccaaggatgagaaacttcctcgtcgcaaaatttttgacaaacctaagacgcgctgcttcactattctccctatggagtttaatcttgtggtccgtcaaaagtttttaaattttgtgaggttcattatgaagaaaagggacaagcttagttgtcaagttggaatcaacccatactccatggaatggactggtttggccaatagattactgagtaagggcaatgatattct

SEQ ID NO: 47187 - DNA, 355 bp, Glycine max
  Clone ID: LIB3139-112-P1-N1-H11
gttttagggcacacaccgcagggagactgtttctttcactctctgcaattcgcgagggctgacgaggactatgaagatattgacatggggtacgaagatgaaccgccagagcccgagattgaggaaggtgcataggaagatgtggagaacaaaaacgatgaaataactggagagcctattgacaccgaggataaggaagaggaacaaccagtgaagcggcctcgaaagacatcgaaatatatgactaagtatgagcgtgctagaataatgggcacccgtgctcttcaaatcagtatgaatgcacctgtcatgtgcaagttggagggggaaactgacccactcgaagatgctatga

SEQ ID NO: 47188 - DNA, 400 bp, Glycine max
  Clone ID: LIB3139-112-P1-N1-H12
ggctgatgacaccatcaattttgaggcttttccccacaagctggtgcagtttggagagattcaggaaaaagttgtgttgaaattttcacaagaggaatttcttacagcttggtcaactcaggtgcgtcccgcaacgactctgttggctgatgggtgcccatatttgtatgctatggtgcatgatagttcagtgtctacaataccaggtgattttgtcattggtgttaagttgacaaccataaacaatatgtgtgcatatgggctcaatcctggtatttcaggttctcgtcttttgggcaccattcctcagtccatttcacagcaaactgtttggaatcaaatggcaacagtgagaacaccattgtaatttgattctagcaagcagagcttttgtcaattt

SEQ ID NO: 47189 - DNA, 468 bp, Glycine max
  Clone ID: LIB3139-112-P1-N1-H4
cctagatgaagaaattctttctaaggttgcacatgatatggttgaggaatggtttgattgtgttgatgaggaggattcctttgaggaagtttctttaagtgcagcactcaatggtgttgagggtttggactatatggaaagaattcctcttgccacatctgagggttttcctcatgtgctttcacgtaaaaatggtgaaaaaggcaagaggagatttgtttctggggatggtgaagagatgacattgattccgggaaccagtgttgaagaggcttacaacaagctaatagttgaacttgagaaaagtgttcccacattggttggcattgaatgtcccaaggatgaaaaacttcctcgtcgcaaaatttttgacaaacctaagacgcgctgcttcactattctccctatggagtttaatcttgtggtccgtcagaagtttttaaatattgtgaggttcattatgaagaa

SEQ ID NO: 47190 - DNA, 512 bp, Glycine max
  Clone ID: LIB3139-112-P1-N1-H5
gtttgctccagccacaatggctcatttcaactcccttaattctcaagaatggaatgcccgcatagacagttttaatattccaaattcccctcaagttcagactctaagaaaccggtcagcggcaattgatggtgaaattgacagggttcttagtaacacattagattccacaagaaactcaaatgcatcaaaggaggagacaaatggtatgcctcctttaacaaaggaggaaataaatggcagtccttcaaaagatgatggaatagtagataaaccagtagaagcacatgtcttgcttactttagaagaaaaggactatacaagtgttagatggaaatatatactgtggaaatcctgcgtatacataatcacattaggaatgttgattgcaatgcttctaggtttgaatatgtcatggactgctatttcagctgcactagctttggtagttcttgatttcaaagatgctaggccaagcttagagaagtttcctattcactcttgatattctt

SEQ ID NO: 47191 - DNA, 274 bp, Glycine max
  Clone ID: LIB3139-112-P1-N1-H6
cggaggccttacgcaccgcataacggaaattccctctaacacacagattacatagacggcgagtgttgcttcaatgtcaacactcgcactcgattggaaagatgagcctgtcactagagcacaatacgatcagggaaaaaccttcattggtgatgtagatgccactctttgacactcaccatgagataatcgtgcaagagggggacccttaaaagaccatcagagtgcttccaggctgtgactatgagctcatcctccgcactgtcatgaacag

SEQ ID NO: 47192 - DNA, 485 bp, Glycine max
  unsure at all n locations
  Clone ID: LIB3139-112-P1-N1-H7
ctaattaacactaataacagcaaactaaatgtgaagtttgccagaaacaagatgggaaggaaccattntcagcagcaacactgtgctgatgggagcatgtggatggagagtcagggtcagcaacagagctatgccttccaagaagagtcttggagccctgataacaactatggccacaaccacaagcaattcccaagcatgcacatgaacatgaacaacaacaacaacaacaaaaggcttggtgcttttgctgcttgggactctgacttctcaatgcaaaaacatcatcatgggcatggcaacggcgtaagagaccatgcacatgaacatgaacaggcattggtggcaagttaggaggcatgtttcaagaaggcatgcacagtgaccaccatggtggcagaaagttcccttttggtggtcatcatcatggtaataataacgcctctcaacatcattttccaaaccatggtgggcaccatgagtat

SEQ ID NO: 47193 - DNA, 490 bp, Glycine max
  Clone ID: LIB3139-112-P1-N1-H8
aatagaaacctctcagcccctctccgatcatttggccaccgtaatcgacggcaaagccgttgcgcaaaccatccgatctgaaatcgccgacgaggtgcgccagctctctcaaaaatacggcaagggtccgggattagcggtggtgatatgtagggaacagataagattcacagagctatgcttgaatgaagagaaaggcatgcgctgaattgtgaatcaaatgctgcgatgtggaccttcccgaacaagtctgccaagctgaactaatcaaacaagttcaccagttgaatgctaaccgtgacgtacatggtatatcaggtcagatcccgctgcctaagcacaataaatgaagaggaaggtctgactgaaatcagcctttgagaaggatgtagatggttttcatcctctgaacattggcaagctggcaatgaaaggcagagacccactgttccttccctgcactctcaaggcatgtattgaactattacaa

SEQ ID NO: 47194 - DNA, 415 bp, Glycine max
  Clone ID: LIB3139-112-P1-N1-H9
cgccttcttcgtgttctacctcctctcgccataagcggcacatagatttgttggttacttggaggaagaagctgtgatttcatacactcagcatttgaatgccattgagagtggtaaagttgaaaatgtccctgcccctgccattgctattgactactggaggcttcccaaggatgcaactctcaaggatgttgtcactgtgattcgcgctgatgaggctcatcacagggatgttaaccactttgcttctgatattcatcatcaagggaaggaattaaaagaggctccagctcctattggttattaactgagtcattgttgtaaaatttttaacaaaacgatatctagcctttgctgtctcgagactttctagctatttttacacatctgttcaataaaattattttcagcgagc

SEQ ID NO: 47195 - DNA, 350 bp, Glycine max
  Clone ID: LIB3139-113-P1-N1-A1
caagaacactgttccaatacggaatctaaggcaaagcaaaccaaacatcttgaatcatgggttcaacaggtgagactcagattaccccaacccacgtatctgatgaagaagcaaaccttttcgccatgcaactagccagtgcttctgtccttccaatgatcctcaaatcagcacttgagcttgatctgttggaaatcatagccaaggctggccctggtgttcatctttcccccactgacatttcttctcagctcccaacacagaaccctgatgcacccgttatgttggaccgtatattgcgcctattggctagtacaatatcctctctttttctcccgcactctcctgat

SEQ ID NO: 47196 - DNA, 393 bp, Glycine max
  Clone ID: LIB3139-113-P1-N1-A10
gcctcagttggtattcctgagaatacaggtatagcattggcctgtgctatgaatagttcttttagggggcgcgccagttctgatatttacaccatctgctctcaagactgtgaattgtggaatcctgcttgcacaaaagcaatgactatgtcatttaatccaaacccgtgttctgatgcatggagtttggaatttttgaagcgtaccggatttcattgtgatatcatttgtgtcactgggtggactgccaccccaatgcaggatgttcaggttacaattgattggtttatttcctctcaggaatgtgttcccagaacctattgtgttttaaatccacaaaatccctttgtggttaataggtggatgggaaaactgacttcccccagggcactt

SEQ ID NO: 47197 - DNA, 263 bp, Glycine max
  Clone ID: LIB3139-113-P1-N1-A11
ggggagagaggagatagcacgggcgaatcccgtgatcaaaggcgagaagctacggaggatttaatctgcaccgttgatatgatgatcgaagcgattagggtgagttgatcaggaccgtccgtcgtgggccgttgatacgaacctatttcgagcgtgtgtaagaaaaaaaaaatctattagttatgacgacattgggaaggggtgaataagtcatatttttggaggctttgctttggtttttgttcaattaaaaatgggaaaat

SEQ ID NO: 47198 - DNA, 397 bp, Glycine max
  Clone ID: LIB3139-113-P1-N1-A12
cttggagtggataccattcccgtactcgttggccctgttacatacttgttgctctccaagcctgccaagggagtcgagaaatccttttctctcctctctctccttcccaaggttcttgctgtctacaaggaagttattgctgaccttaaggcagctggtgcttcatggattcaatttgatgagcctacccttgtcttggaccttgaatctcacaagttgcaagctttcactgacgcatatgcagaacttgcacctgctttgtctgatctgaatgttcttgttgagacctactttgctgacatccctgctgaggcgtacaagaccctcacatctctgaatggcgtcactgcatatgggtttgatttggtccgtggaacccatactcttgatttgatca

SEQ ID NO: 47199 - DNA, 406 bp, Glycine max
  Clone ID: LIB3139-113-P1-N1-A2
gggatttcatcaagaacatgattactggaacatcccaagctgactgtgctgttcttattattgattccaccactggtggttttgaagctggtatttccaaggatggacagactcgtgagcatgctctccttgcattcactcttggtgtgaggcagatgatttgctgctgcaacaagatggatgccactacacctaagtactccaaggcaaggtacgatgaaattgtcaaggaagtttcttcctacatgaagaaggtcggatacaaccctgacaaaattccttttgttcccatctctggttttgagggagataacatgattgagaggtctacaaaccttgactggtacaagggtccaacccttcttgaggcccttgatcagatcaatgagcccaagaggccatcgga

SEQ ID NO: 47200 - DNA, 401 bp, Glycine max
  Clone ID: LIB3139-113-P1-N1-A3
gctccatacccattgaacatggcaagtttagaggaaaagggaatgcactttgattcccagatcatgatgtgctcttcaaattttttggaaccttctcctgaagccaaaattagagatgacatggcttttagaaatagaagacatgttttgataacagttgagcttaaacctggagtggagtatgatgagagcgattttaccaaaaatcagcggtatttactcaaaacttggtttcatgatcattatgttgtagaccaaacttttgaatcttatgctgatcttttggcatattgcttcactaaatgggagagacatgtgaaggaacaagagtctcaaatatctggttgatgagtgtccttttgcatttgtgaactagtatgtaatattttattcacttaaat

SEQ ID NO: 47201 - DNA, 399 bp, Glycine max
  Clone ID: LIB3139-113-P1-N1-A4
cagttttggtgcgggttatggcaaattctacacacgttattccgatgtattttctttgcatgatttcccccccccccccagctgtgaaatttatttggtttgcaaatgtgtataattttacctcaattatgtcttaggattgactttttcaatttgttcacccctttttttctgggaggtggtagaccggagctgcatggtctttgtaccgttgtcttagattttcattttggtcgttgggagagttacataatttttgttttctggtcctgtatccagtcaacatacatctaggagagcatgttgtatctttcctattttattggcttattcatcatgtataaacattatgtgaaaattttgctactggatgccaaaatgacatgtaattttggatga

SEQ ID NO: 47202 - DNA, 409 bp, Glycine max
  Clone ID: LIB3139-113-P1-N1-A5
gttggttttggtgaagacgatggcatagcgtatctctcagactcgcttggttttgcaaccatggaagacaacgacttctcagaaactgcaaagttcattagccagatcctcatggaagaaaacgttgaacttgaacagagcccattctacgacttaatcaattttgaaggtaccggaaaattcttcttccaagcttttggcgggtaacctacttctcagtccccaagctagcaacaccaatttttcagttgaaaattctcgtgagttgaacctcccttccccagattctctttctgtttctgctcttcagtttaacccccacgcactctcttaaccaccacctttggttaatgttagtgaaggagtctctgatttggactcttctattgcaagactcttagcacataat

SEQ ID NO: 47203 - DNA, 399 bp, Glycine max
  Clone ID: LIB3139-113-P1-N1-A9
ctgccttttctgtcgttgcaagaatcctccaacctccctgcaaaataatcttctcacgcaattttttgagcaaaggttgaggcttgtgcttccccacgttattgttcttgtgatggggttgtcaaattggtgcgttgaagggtgattctgggatctgtcagaggaagaagcgtgtggatctcttcaacttctttggttttttttcctctgggtgtagttttttgctatggggtggagatacaaggcagggttgttcctcatacttactgtggttgtcatatgggtcacctctgctgaagtcacccaggatatttttatagattacaagcagccatttgcagtgacgtatcttggagcttctcttatggtagattacctcccagtagcattcatttagga

SEQ ID NO: 47204 - DNA, 406 bp, Glycine max
  Clone ID: LIB3139-113-P1-N1-B1
tccagagagaagaagaaacttaatcgatcatcacttcacttcactaatacatcatggcagacgagacccagaacaagtatgagagctctgaggttgaggtccaggatcgaggtgtttttgactttctcggtaagaaaaaggatgaagaagacaagcctcatcctcaggaggaggtcatcgccaccgagtttcaaaaagtcactgtctcagaccaaggagagaacaagcacagcctcttagaaaagcttcaccgatctgacagcagctctagctcttcaagtgaggaggaaggagaagatggagagaaaaggaagaagaagaagaaggaaaagaaagggctgaaagagaagatcgaggagaaaatagagggtgatcatcatcatcacaaggatgaggacacaagtgt

SEQ ID NO: 47205 - DNA, 381 bp, Glycine max
  Clone ID: LIB3139-113-P1-N1-B11
cactaacttacactcccattctctctctctctctctctctccgacctagcgagaccgagcgatccgaccctaatctcgcgatgctccgccgcgcaacctcctccctcctcaccggcgcctcccgccgccgcctctcctccgacgtgccggcgacccccgccgaggattccgccttcgcggaggcgtggaagaaagtgagccccaacatcgacccgccgaagacgccgctggcgtacatgaagcccctaccacccacttcctcggctcttccttgcaagctcacagtcaacttttgtcttgccctactcttctcaattggccgcaaaagaggttgatatggtcattgtaccaacaacaactgtgcagatgggtggtctccca

SEQ ID NO: 47206 - DNA, 399 bp, Glycine max
  Clone ID: LIB3139-113-P1-N1-B12
tcttgacatctcagattgtgtaagtctgtccagattaccagacgacattggtgagttgaagaagcttgagaagctctacttgaagggttgctcaaaactgagtgaatttccgtactctgtcgttaattttggaaatttagagcatgaaatatatgtgatctgtgacgaagaaatagctgccttgtgggaaaacttccccaccatgcccaagttgaagatagagatatctacaatggagattaacttgaattggcttccaggagttcattcctgaaacttgtttcctgaaattgatagtgacttagaatcatgttgaaattggacaatgatgttcatgtagatgtaatgaataaagtaggaagtttgtgttagtgatttttgagaaattacacatcaatt

SEQ ID NO: 47207 - DNA, 405 bp, Glycine max
  Clone ID: LIB3139-113-P1-N1-B2
gcactacacacgttatctctctctctctctctctctctccctctctccttccccaagatgtcgagcgccgatcccgagcaccgagaagaggaggaggcacccgccgtcggcgacgacgaggacaccggagcacacgtcgctcccatcgtcaagctcgaggaggttgctgtcaccaccggcgaggaggacgaagatgcaatcctagatctcaaatcgaagctttaccggttcgacaaggatgggaaccagtggaaggagcgaggcgcgggcaccgtgaagttcctgaagcataaggctacgggcaaggttaggcttctcatgaggcaatccaagacgctcaagatctgcgccaatcatctcattttgcctactatgagtgtgcaagagcacgctgggaacgagaaa

SEQ ID NO: 47208 - DNA, 402 bp, Glycine max
  Clone ID: LIB3139-113-P1-N1-B4
gtctttatcctgtaagtcaattaccttcagaagctgtcgttgtaaatgttacatgtggtagtggacgtggtggtttacccaccactgcttggattagttctgcagttaacaatcgctcctcagatatcaacaaaaggattcgcacagcacttgggaaaggtaagaaaattgtttttcttactagagttgatccttttccagtagctttactggctgttctttttggcgttaagaatgaaattctgagttctaacgccactaatcctatgctgacgcgacttcttgagaactgtaagagtctcaaatatctggttgatgagtgtccttttgcatttgtgaactagtatgtagtattttattcacttaaataaagcgcattactatgtgcaatgagtgtgttta

SEQ ID NO: 47209 - DNA, 394 bp, Glycine max
  Clone ID: LIB3139-113-P1-N1-B5
caagtgatttatctagtcaatgttggaggttgggttcatctatgacctgatgtgaattagtctgccacaaattttataagacgattgctagagcctagaagtttttttaggtctctttcgatttgtgatgtgaccccttggtcatctgctgtttttgttttcatactactatagcctttcactcatgtctttgttctcaacttatgatttgatggtgcgaaaatacttcagtgttactaggagtactgattttccaagagttgattaagcaataaaagggcagacggactgggggactggaggagtcaggagtgttgttacagtttatggttacatgagaaatactaggaacacactctttgtcactctgttttaaacacaccctcttttattt

SEQ ID NO: 47210 - DNA, 332 bp, Glycine max
  Clone ID: LIB3139-113-P1-N1-B7
ctaagctcccccgaggaatatgctacagcacttcagaaggggccatctggtggaggggtggcagctatcattgatgagcttccatatgttgagttatttctgtcaaatgaaactgattttggtattattggacagccattcgccagaagcagttggggatttgcttttcagagagagtctcctcttgcctatgacatgtctacagcaattttgaaactctctgagaatggagatctccgcaagatacatgagaagtggctctcgcaaatgggttgcgctgaagataggacaagcaactccaagcctgaccagcttgacttgattagctcttg

SEQ ID NO: 47211 - DNA, 297 bp, Glycine max
  Clone ID: LIB3139-113-P1-N1-B9
ccagagaattatcttcacagtggcttgtcctgtcaatagagggtggctttaacgagggctatgagtaagagcatatgcgagcagcaccataccagatatttataccaccagttctcatgacagtgaagtatggaatactggttgctcaaaaacaatgacgatgggatttaattcaaacccatgctctgatgcaaggagcttggaatattttaagcgtaccggatttcattgaaaaaaaaaaaaaaaaagcggtcggctgcgtacgagcttgctgaccggggaagtaataacagaccg

SEQ ID NO: 47212 - DNA, 398 bp, Glycine max
  Clone ID: LIB3139-113-P1-N1-C1
gattaaaatggtggccacagttggtattcctgagaatacaggtatagcattggcctgtgctatgaatagttcttttagggggcgcgccagttctgatatttacaccatctgctctcaagactgtgaattatggaatcctgcttgcacaaaagcaatgactatgtcatttaatccaaacccgtgttctgatgcatggagtttggaatttctgaagcgtaccggatttcattgtgatatcatttgtgtcactggatggactgccaccccaatgcaggatgttcaggttacaattgattggtttatttcctctcaagaatgtgttcccaggacctattgtgttttaaatccacaaaatccttttgtgttaaataggtggatgggaaaactgactttccctc

SEQ ID NO: 47213 - DNA, 216 bp, Glycine max
  Clone ID: LIB3139-113-P1-N1-C10
gctcaacttttgcttaaagctctagaaaccttggggaggtaagctgattgctttttgaagaacaacaatgctatccaatatgattgttaggacccattttgcagaattgtttaatgataactttcatgattaaaaattttattttttatggcacaattgtgacttcagtttatcatcaatcaaatagctggacactttggagaaatagccattatt

SEQ ID NO: 47214 - DNA, 348 bp, Glycine max
  Clone ID: LIB3139-113-P1-N1-C11
tgcaaaggtgcacaaggtgtttggagccagcaaggtgagcaagattctgattgaagtgccagaagagcatatagaggacacggtgaattctctggcttatgaagctgatgcaaggctgagagacccggtttatggatgcattggtgccatagctctgttgcaaaggaagatggtggagctttaacatgatctggcaattgcaaaggatcgtcttgcgcgttgtcacgctgctgctgttgctgctactactactatcccttctcctgatatcttgcatgccaatgttagcctttccccattccttgacttttggacttcttcataggagttcaaagatatacctttgcc

SEQ ID NO: 47215 - DNA, 249 bp, Glycine max
  Clone ID: LIB3139-113-P1-N1-C12
ctattttttaattttaactctcttcattgtaaggcttttctctaataccccatttttgggtgaaaaaagattggatattggccccagcagtgttgtctgtgatttgaagtatgtctttttttggtttgttgaggttgtggtaggagataggagagagggttggagggacttttcattgttcaagttttttatttgatgctgattaatttatttttttattttgctttattgtgttatttttccattttt

SEQ ID NO: 47216 - DNA, 404 bp, Glycine max
  Clone ID: LIB3139-113-P1-N1-C2
ggccaggcaagccccactcaaccaccacacctctcctcgttcacgctacccctttctgctcttcttctacctttcaagttttaaaagtataaagatggcagagacattcctatttacctcagagtcggtgaacgagggacaccctgacaagctctgcgaccaaatctccgatgctgtcctcgacgcttgcctcgagcaggacccagacagcaaagttgcctgcgaaacatgcaccaaaaccaacttggtcatggtcttcggagaaatcacgaccaaggccaacgttgactacgagaagatagtgcgtgacacctgcaggaacatcggcttcgtctcaaatgatgtgggactggatgccgacaactgcaaggtcctcgtcaacattgagcagcagagccctgata

SEQ ID NO: 47217 - DNA, 403 bp, Glycine max
  Clone ID: LIB3139-113-P1-N1-C3
gacgaacacagagacgtgtgttttggattctatttgtgccgaggtttgagatttagatgcaaataaatatataccctgtcttgtgccgtgtcccctttaagccaattgcaatcaaacaaagtttcggttattggtgttcatttttcttcctccatctttctctaaaacattaattgaactctccattccttaaattttaccaacgagctagttccgacacagacaaagcaatggcaaagactgagttagaggtgactgttgagagcaagaacaaagaactaaagcacctgggatttgtgaggattgctgctattcaaacttttgtgattgtgtcaaatctgtatgagtacgcaaagcagaattctgggcctttgagatccgctgttggaacggttgagaacac

SEQ ID NO: 47218 - DNA, 360 bp, Glycine max
  Clone ID: LIB3139-113-P1-N1-C4
gaggaatctgctgtggtttccaacgctcaagttgttcagcagcttcaccatgcgacgtcgttgggcgcgagtgcgaggagccagaatgcaggtagcgagaagaagcacggtcacggtcacggtcacaggcacaatctgagcgagtgcgcttcggatctgagcgagtcctgttccacaccgcacggttacaatagcaacaacacgctgctctacacgcacgtgatcgccttcacgctctacgagttggagaccataacgaagagcttccgcggcgactatattctcggtgagggaggcttcggcaccgtttacaaaggttacattgatgagaacgtcagagtcggactcaaatcgctccct

SEQ ID NO: 47219 - DNA, 406 bp, Glycine max
  Clone ID: LIB3139-113-P1-N1-C5
ccggtctccaccgacatctcttgtattctcttcacaatcccgtgatcccatttcgttccgttcacttcaatctcaatggccgataataagcaacccaatcacgaggaggcaagtcctcttctccaccagtcccaacccaaattcgaaccaccaacgccacctgagactcccgagtttcttctcggatggaccgctgatgggctcccgctgggccacggcagcgtcgtgggccagcccatgggccgcgccccttggaactcctccatctgcgcctgtctcggccaaaccgatcacttctgcagcagcgatctcgaagtttgtcttcttgggagtgtggctccttgcgtgctgtatggaagcaatgttgagagacttgaatctgctcctgggacatttgccaatcact

SEQ ID NO: 47220 - DNA, 377 bp, Glycine max
  Clone ID: LIB3139-113-P1-N1-C6
ctcgagccgctcgagccgaatcggcttgagccaacttctgttaaacttggcatattctccacctctcacttcaagtaataatcctaatttttttatttttcttcaaatctgtatactctctacactgacagaaacccttctgtttcttgttcttttttctttttcagaacctgctctcttttttcttttttttttcttctgattttcacagatccgatccaaactatagagaatgtcagaaacaccccaaaggaagaaagcgagccttcccccaaaacgaggtcagatcaaggctcaaatttttactagccttgtgaattcagtggccttcactatctcaaaaacaaggggattcgcttcgaaacgtgattggaaat

SEQ ID NO: 47221 - DNA, 390 bp, Glycine max
  Clone ID: LIB3139-113-P1-N1-C7
caggtgaagtgattgctcatgttgctgagggtcactctgaagatgttgatcgagcagtttcagctgcacgaaaagcatttgatcatggaccatggcctaagatgacagcttatgaacggcaaaggatcttgttgcgtgtggccgatctgatcgagaagcataatgatgagcttgcagcacttgagacttgggataatggaaagccttatgaacaagctgctaagattgaagttccaatgcttgttcgcctgattcgatactatgctggttgggcagataagattcatggtctaacagttccagctgatggaccttatcatgtgcaaacattgcacgaaccgattggtgttgccggtcagatcattccatggaacttccctcttcttatgt

SEQ ID NO: 47222 - DNA, 398 bp, Glycine max
  Clone ID: LIB3139-113-P1-N1-C8
cttgttttttctctcacctgaaaatgtcttgctgcggtggtaactgtggttgcggaagctcctgcaagtgcggcaacggctgcggaggctgcaagatgtacccagacttgagctacactgagtcaaccaccaccgagaccttggtcatgggagtggcacctgttaaggctcaatttgagggtgctgaaatgggtgtgcccgctgagaacgatggctgcaaatgtggaccaaactgctcctgcaacccctgcacttgcaagtgaggtgttgggagagcaagcttcaagcagagatagcccttaattaggaataatgataaactattaatgtgtagctaaaaacttatgtattatgtctgtgatggttttcgagcactctggtgttttgtggtaaacaaa

SEQ ID NO: 47223 - DNA, 407 bp, Glycine max
  Clone ID: LIB3139-113-P1-N1-D1
catatgtgtgctgaaagaccgcagcaagccaattatcttcaccatggcaaggttggatcgagtgaagaacatcacaggacttgtggagtggtacggtaagaacgcgaagctgagggagctggtgaaccttgtggttgttgctggagacaggaggaaggagtcaaaggacttggaagaaaaggccgagatgaagaagatgtacggcctgatcgagacctacaagttgaacggccaattcagatggatttcatcgcagatgaaccgtgtgaggaatggagagctctaccgcgtgatctgcgacaccaggggtgctttcgtgcagcctgctgtatacgaagcttttggtttgacagtggttgaggccatgacttgcggcttgccaacattcgccacatgcaatggtggtc

SEQ ID NO: 47224 - DNA, 392 bp, Glycine max
  Clone ID: LIB3139-113-P1-N1-D10
cttggattcgattccatcacttatagttctctcttctctttcttttcctttctttctccgccgaagatggcgccgcccacgccagcagttgaaggcgcccaggcgccgcaagggcggcagcaacagccgcaaggagggtttggcctcaccggaatcatacgcatggtcgttttctggtacttcgcttccaaattcttttcccccaaaaaacctaccgaaccttccgctctcatctccaatctctttcagaaagcacagcctctggatatgtggctttatctctccgagcacgagaagttcaatgactttggcagtgaaagttctcttgtatggcatgaaaccaatgttccatatgctgtttggggacctgagagtaccaagactcatacttt

SEQ ID NO: 47225 - DNA, 377 bp, Glycine max
  Clone ID: LIB3139-113-P1-N1-D11
tgctattctcatgaatatgccaaatgctgttctttcaatgtggagatattttgttggagatctcgtttttgaagtttctaagatgacttctccctacattaaatgtacagtctctttcttcatagcatttggaaatttggctgatgacaccatcaattttgaggcttttccccacaagctggtgcagtttggagaaattcaagaaaaggttgtattgaaattttcacaagaggaatttcttacagcttggtcaacttaagtgcgtcctgcatcaactctgttggctgatgggtgtccatttttgtttgctttggtgcatgatagttctatgtctacaattccaggtgattttttcattggttgttagttgtcatcca

SEQ ID NO: 47226 - DNA, 378 bp, Glycine max
  Clone ID: LIB3139-113-P1-N1-D2
ttgctctttctcctctgctcctccctttcccattcctcctttccctctcccctccgctcccccaatttcccccaaactttctccctccgccgcttcgccgccgcccctctcgctcgccctccgccgccgcctccgcccctggacgccatggcccagaaaatcggaaagtccacgcgccgccccggctcgtcctccaaggcccgcgtctacgccgatgtcaacgtcgttcgccccaaggaatattgggactacgagtccctcaacgtccagtggggggagcaagatgattatgaggtggtgaggaaggtgggtagggggaaatacagtgaggtgttcgaaggtggtcactgcacggacggggagaaaagtgtcattaag

SEQ ID NO: 47227 - DNA, 404 bp, Glycine max
  Clone ID: LIB3139-113-P1-N1-D3
ctcgagccgatcagaaccacattcctgggaattaatcttcccaatagaggtatgtggtcctaataatggttttgaaatgtggagttctgagtgggcaaatcaaacttcatggcatttgagtttccttattgacaatcccaaacagtctacagtttttgatattctcttgggaatctctcaagattttgaaattgctggtaatactcttatgccagctttttctgttccacaggctactgccagatcttctgaaaatgcggaatcctctgcatgatctggaattcgtgttttctttcgcttgttcgtttgtttaattcaataaaggaaattaggcatgaccctcttgttgagtatgctctgcctatctgaaaatttccacacctcttttaattgtcgtaatgatg

SEQ ID NO: 47228 - DNA, 394 bp, Glycine max
  Clone ID: LIB3139-113-P1-N1-D4
gaggagaattggtggggataggcgaaggaggtggcgactgagtagtgaatagggtttttgattgattgatagcaataattggtgttagcgaagcttgagaattgagatttatgggtcgcaatcgcagtcgcagtcgcagtgtgtcacgctctccttccaattcccgcagaagaaggtactctccatcccctgtttctcatcgccactcgagaactttcaggcgccgctctccttcccacaagcgccgtcgaaggcacagaacctctttctccccctctctttcacgcagccccactcccaaacccaagaaagatcaaaacaaaagggtaatttcattcttctctattggctttgctgaaggaagttccacttgttaaatatcatgaacactgac

SEQ ID NO: 47229 - DNA, 246 bp, Glycine max
  Clone ID: LIB3139-113-P1-N1-D5
gaggagaattggttgtgataggctaaggaagtggcgacggagtagtgaacatggttctcgattgattgattcctattatttgcgtttgcagaagcttgagaattgatatttattggtcgctacctcagaccgactctcagtgtgtcacgctctcctttcaattcctgcataataaagttctctccattctctagttattatctccactcgagaactttcaagcgccgctctccttctcacatactc

SEQ ID NO: 47230 - DNA, 377 bp, Glycine max
  Clone ID: LIB3139-113-P1-N1-D6
caacaatggaatatttgcaggacgctgggatccgcgtttctcgatcacacagaacaattcaattcatcagcgtgtctccacattttcgcgcgtgaaacctcatcgccattttccctcttcttcttcttcttcttcactgattggattaattgcacgtaaaggaggtttaaagcttcgcagcacgtgttgttgttgttgttcgtataattgttgttgttgtggcggcagtggtagtatttggaaattgaggattgagtggggtgtgtgaaaaatggctgccaggagtgatcaccaaacggttcctctttcggtgctcctgaggcgcgaattggcgaacgagaaaattgagaagcctgagattgctcatggtcaagcgt

SEQ ID NO: 47231 - DNA, 403 bp, Glycine max
  unsure at all n locations
  Clone ID: LIB3139-113-P1-N1-D7
actcgatcaactcaacacaaaccaaaactcaagctaaaattctcactctctctctcatctcgagatcatagtatcatattcaatatcatttcataccaaacacatggctttggaagctctcaactcaccaacaacaaccgctccatcttttccctttgacgacccaactattccatgggcgaaacgaaaacgttcaaagcgttctcgcgaccatccttctgaagaagagtacctcgccctctgcctcatcatgctcgctcgcggcggcaccaccaccgtcaacaaccgccacgttagccctccaccgtcacaggcacagccacagccgacaccagatccttccaccaagctcagttacaaatgctccgtttgcgacaagagcnttccctcttaccaagcgctc

SEQ ID NO: 47232 - DNA, 337 bp, Glycine max
  Clone ID: LIB3139-113-P1-N1-D8
ctttatccttttcgactccatactcaaaaccgggtcagactcatacaaaacatctacaacaatatacttggctataggcgctagctcggaagaaaggttagtaccaggtcatgatctgcctgtctgggaatgcacctttcataatgaacgattggtactcagcgacacataggtgttaaactgacagcagccctgccaaacattgtgatgcctgtttgatgacataaatcaaaccacatgcgtgggtatgtataccgccaatataggcatcgggtgcttataataccattgccatgcggagttcggagtgggcaaaacaaacgtcatggcctttgag

SEQ ID NO: 47233 - DNA, 388 bp, Glycine max
  Clone ID: LIB3139-113-P1-N1-D9
tgttggaagggtgccagaggtgcttctggacgttgtatatctcatggtgggggtaggaggtgtcagaaacctggttgccacaaaggagccgagggtcgtacagtgtactgcaaggcacatggaggtggcaggcgatgtgaattccttggttgctcaaagagtgcagaaggacgtacagatttctgtattgcccatggtggtggccggagatgcagtcatgaaggttgtaccctgtctgccagagggaaatttggattatgcatccggcatggtgggggcaagagatgccatagagaaaattgttccaagagtgctgaaggcctatcaagcctttgcatctcacatggtggagggcgtcgatgcctagttccttgttgttcaaaatggg

SEQ ID NO: 47234 - DNA, 386 bp, Glycine max
  Clone ID: LIB3139-113-P1-N1-E1
aattgtttaaacctaattctcatttcttcatcgttcgattcttctcctcctaaagatgcagatcttcgtgaaaactttgaccggtaagaccatcacccttgaggtggagtcctccgacaccatcgataacgtgaaagctaagattcaagacaaggaagggatcccacctgaccagcagagacttatctttgcgggtaaacagcttgaggatggtcgaacccttgccgactacaacatccaaaaggaatccactctccacctcgtgcttcgcctcaggggtggcatgcaaatctttgtcaagactttgactggcaagaccatcaccctcgaggtcgaatcctcggacaccattgataatgtcaaggccaagatccaggacaaggagg

SEQ ID NO: 47235 - DNA, 288 bp, Glycine max
  Clone ID: LIB3139-113-P1-N1-E10
gtcaagccttactttagtggttctaaattgaaaagctgtctagctggtcataatatcaccattactgatggtattgacaaaactagtgcaactttgcaatttagaaagttagcagattgtgattttctcaagagaaactttaagcaaaagtgttaaggtttatgggtgggttctgagagacaaagcgagagtatatggacacaacttcattatgtttcgtgcaataatctggaaatgcaagaagcttatcttgtcaacctcgtaaatgtgttacgagaattgtttttg

SEQ ID NO: 47236 - DNA, 395 bp, Glycine max
  Clone ID: LIB3139-113-P1-N1-E11
cagctacttcttaagtgagaacatgatgtgaggtgacgtaccacccttactccatgggacagacgaagaacatttatcagccctcatgattcacttgcacgaccacaagatgactgaggggaaggcctttcgggccaccgttggcctgtaagtacccagatctgctctctgctggaagctcatgcgaagaggagctctagaggtgcgagcctttgacctccgcctctcttctccatggtcgcgtgctctcaaggtcaagggagtcctttgcgtccaaagcgatgttgcccgcaaagaatacccggtaagggtcctacgcggttcccactgcgtattccaccttgcggacttgggaatgttaggcaaagagatgctccaatttggtcgcattgatg

SEQ ID NO: 47237 - DNA, 397 bp, Glycine max
  Clone ID: LIB3139-113-P1-N1-E12
aatttgcctcctccttgcttataaaataaaatatcctgagaactttttcttgttaaggggaaaccatgaatgtgcttctataaaccggatatatggattttatgatgagtgcaagagaagagtcaatgtaaggttatggaagacatttacagactgcttcaatttgcctgcctggggcagcccttgcggataaaagattttgtgtatgcatgggggactttctcccgacttaaataatttggaccaaattagaaatttacagcggcccacagatgttcctgatacacagttgctttgggatctgctttggtctgaccccgacaaagatgttcaaggttggggaatgaatgacagagggagtttatacacatttgggtgctgttaagggctcacaaat

SEQ ID NO: 47238 - DNA, 361 bp, Glycine max
  Clone ID: LIB3139-113-P1-N1-E2
tattgatctactgttgagcattgatttgttgggtttacaaggagcaggtaaagcttttccaaacaagattgtttttgatgataagcttgcgttggctaacacacaagaattctttgatggaaattttccagtggattcttggttaccaatttttgtgaattgtctttatcctgtaagtcaattaccttcagaagctgtcgttgtaaatgttacatgtggttgtggacgtggtggtttacccaccactgctttgtttagttctgcatttaactatcggtggtttgatattaactaatagattcgttcatcactagggctaggtctgtaaatttgtttttttacaagagatgtttctttttca

SEQ ID NO: 47239 - DNA, 388 bp, Glycine max
  Clone ID: LIB3139-113-P1-N1-E3
ctcgagccgattcggctcgagcagcactggagctgctaaggctgtaagaaaagttcttccagcactgaatggtaaattgactggcatgtccttccgagtccccactgtagatgtttcagttgttgacctcactgttaggctagagaagccagcaacctatgagcaaatcaaatctgctatcaaggaggaatcagagggcaaattgaagggtattttgggttacacagaagatgatgttgtgtctactgattttgttggtgataacaggtctagcatatttgacgccaaggccggaatttctttgaatgacaactttgtaaaacttgtttcctggtatgacaacgaatggggttacagttcccgtgtgattgatttgattgtccacatt

SEQ ID NO: 47240 - DNA, 366 bp, Glycine max
  Clone ID: LIB3139-113-P1-N1-E4
gtgaagttgagagcactgatcaaacaattgaggacacagatcggttttcattctcaacagctaccaactcaaccgtgtacctcttgtgctcagacattgatgaagatggaacctcgttgtccccacataaagacaaagctttgttttctccaaacacttgccaagcttccaatataggagcactgcagagccagcaggctaccgacaatgaagagcaccaccagagatgcttagaaggtagccctgttccaaactctcgaaacatttctgtgacgcacgcgacaatgaatcaggatgtttcgggaatggaagagagaatgagcagttgctgtgtctttgtaccgaagaaaatcacggaggattcgc

SEQ ID NO: 47241 - DNA, 348 bp, Glycine max
  Clone ID: LIB3139-113-P1-N1-E7
aaagcgcatgagaaaggtgttgttctcagatccatccatcagtggtgggcgatgttgttgttctcagatccagactgagggggtgaaggaaaatgaagtcgtcgaggcgtctgttgaggatcgggcttgagtcggcgtggtactcgtcgaacattggggtgctgctcctgaacaagtacctccttagcaactatggcttcaagtaccctatcttcctcaccatgtgtcacatgaccgcttgctccctcttcagctacgtcgccatcgcctggctcaagatggtccccatgcagaccattcgctcccgtcttcagttcctcaagatcgccggcctcagcctcatctttt

SEQ ID NO: 47242 - DNA, 389 bp, Glycine max
  Clone ID: LIB3139-113-P1-N1-E8
cgtgcacttactacactgggagttaacaccaaccccttggatgatggcactgatgccaataaaaaatcttaatcaactttgtgtggctttcaatctgccaactggaacaagtataagaatgatttccgtgattctggtggactagagaatcaatcggttcaagaattggagagttatgctgtttacaagggtgaagaaactacaaattctttcacacacagtttgaagatagctgagtacatattataggagggttcacagacacttatcacttttcatcaacagggcgaacaattttccatgagtcaccatgtagctgctgtcatcgatcatgatctaactcggggagatatactcttgggaagccttgtgggctcttttccaaactt

SEQ ID NO: 47243 - DNA, 384 bp, Glycine max
  Clone ID: LIB3139-113-P1-N1-F1
ttctctttgtcgcaaagagaagagatctgcctcctttttatcaaatctatctcttcttcaagaatagttgaaaatggggctgtctttcaccaagttgttcagccgactgtttgccaagaaagagatgcgtatactgatggtgggtctcgatgctgcgggtaagaccaccattctgtacaagctcaagcttggagagattgtcaccaccattcccaccattgggtttaatgtggaaactgtggaatataagaacatcagcttcactgtctgggatgttggaggtcaggacaagatccgtcctttgtggagacattacttccaaaatacacaaggacttatttttgtgggtgatagcaatgacagggaccgagttggtgaagctag

SEQ ID NO: 47244 - DNA, 381 bp, Glycine max
  Clone ID: LIB3139-113-P1-N1-F10
aacgaagttacgaaccaaccaatcaccctgtctttctgacccaaaaacatagtcccaaatcgaacaaaatcaatcaactaactcctccaacagttgttgttattatgcagacaacaagttccaacacctccggcgccacctcgatccgttccggcatggagctcttccaccgcgcgaaggcggtgcgcctccgcagccaccacgacaagtacctgctggccgacgaggacgaggagttcgtcacgcaagaccgctacggatcctcccgcaacgccaagaggacggtggagctcatcccggagttcgacaacatcatcagactcaagagctgttacagaaaatacttgacggcgtgcaaccagccgttacttgctcgcgtga

SEQ ID NO: 47245 - DNA, 381 bp, Glycine max
  Clone ID: LIB3139-113-P1-N1-F11
gagaagttttgtgcacaatccttgagaacagtaattggttttgccatcataaagctgggaaagaacattcaagtactttcaagttcctttgtcaataagcaagagcaatacactgtggaaggagtgcagaatcttggagacaaagcagtgatgtgtcatgggctaaatttcagaactgcagtattttactgccataaagtccgtgaaacaacagctttcatggttgcattggtggctggtgatggaaccaaaacttaagcactagctgtttgccactcagatacttctggaatgaattatcacatgctttatgaactcatgggaggtgatcctggaactaaccctgtttgccatttccttggaagcaaggcctttttatgg

SEQ ID NO: 47246 - DNA, 357 bp, Glycine max
  Clone ID: LIB3139-113-P1-N1-F12
attacactctttgcctcgcaccttcaacttaaccttttctactcataatcttaacaacttgctagaagaagataaagaaagagaaaaagtgtgtgtgtgtgagagagagcaatggctggctcgtgggcacgccgttctctgattgttctggctatcattttcttcggatgtttatttgcaatttccattgctaaggaggaagccacaaaattggggacggtcatcgggattgatcttggaacgacctattcatgtgttggtgtttacaagaacggccatgttgaaatcatagccaatgatcaaggtaaccgtatcaccccatcgtgtggtgctttcaccgacagtgagagactaatt

SEQ ID NO: 47247 - DNA, 396 bp, Glycine max
  Clone ID: LIB3139-113-P1-N1-F2
ttggaatcaacccatactccatggaatggactggtttggccaatagattactgagtaagggcaatgatattctgtgttgcgattatgctagttttgatggtttgattaccaagcaagttatgagcaagatggcagaaatgataaacagtctttgtggtggtgatgaaaaattgatgcgtgaaaggacgcacctgctgttggcttgttgttcaaggatggcaatttgtaagaaagatgtttggagagttgaatgtggaatcccttctggatttccgctcacagttatttgcaatagcatttttaatgagatgctcattagatatagctatgaaaaattactgcgccaggctaaagctccaagtatgtttttacaatccttcaaaaattttgtttctt

SEQ ID NO: 47248 - DNA, 407 bp, Glycine max
  Clone ID: LIB3139-113-P1-N1-F4
cagctatagttgcaagccaggccacaatatccgcaaccttttcaattattaagcaagccaatgctcatggctgtttcccgagaataaaagttgtacatacatcaaagaagttccttggccagatatatattccagatatcaattggatccttatgattctatgcattgctgttactgctgggtttaaaaatcaaagtcagattggaaatgcatatggtactgcagttgtgctagtcatgctggttacaacattgcttatgattttgatcatgatacttgtgtggcgctgccattggattctggtggtggtgttcaccggcttatcgttgattgtggaatgcacatacttctctgctgttctcttcaaagttgatcaaagtggatgggctcccctagcaattgctggg

SEQ ID NO: 47249 - DNA, 408 bp, Glycine max
  Clone ID: LIB3139-113-P1-N1-F5
gtgaggactcttctctgttctcttaagtccttcccattccaatggattctgcgttctccatcaacaccaccgcgcaagtggcgctcttcagagcgctccacggtcatctccaccgagctcctcaacgcgccttgctccgccgcaacctaaaatgcctcgttacttcctataacagcagcagcaactgctgccgcattccgtgctctttcggctccgtgccgtcgccgtcctcgcttcgatccttccgcggactgctcccgcgaacgccgcgctgcatttcgagctccgcggcttcctttgcttctcctgccggcggtggaaatggcggcgctggaaccggcgacggtgacggaggtggcggttctggcggtgagtctggagatgctaatctcaaactggtaggagacg

SEQ ID NO: 47250 - DNA, 386 bp, Glycine max
  Clone ID: LIB3139-113-P1-N1-F7
tacttttttgctttctttcttcttctgtttatcgcatcgcgtattggttggtcgaaaaacaaagagtgtgtgttgtgtggtttggtttggtttttcacttttcttcatctttttgcgagatgacacacacacagagagagatggctacgactaggattgaggcagagaagaagccgaagacgtagatcgtgtgcactctgggccccgcatcacggtcggtcccaatgatcgagaagcttctgcgagcaggcatgaacgtggcgcgcttcaacttctcccatgggtcccacgagtaccaccaggaaacccttgacatcctccgctccgtcattgataacaccgggttttcttgcgccgtcatgctcgacaccaatgggcctgtgatt

SEQ ID NO: 47251 - DNA, 403 bp, Glycine max
  unsure at all n locations
  Clone ID: LIB3139-113-P1-N1-G1
ggaatggactggtttggccaatagattactgagtaagggcaacgatattctgtgttgcgattatgctagttttgatggtttgattaccaagcaagttatgagcaagatggcagaaatgataaacagtctttgtggtggtgatgaaaaattgatgcgtgaaaggacacacctgctgttggcttgttgttcaaggatggcaatttgtaagaaagatgtttggagagttgaatgtggaatcccttctggatttccgctcacagttatttgcaatagcatttttaatgagatgctcattagatatagctatgaaaaattactgcgccaggctaaagctccaagtatgtttntacaaatcttcaaaaatttgtttctttgtgtgtgtatggtgatgataacttaatta

SEQ ID NO: 47252 - DNA, 340 bp, Glycine max
  Clone ID: LIB3139-113-P1-N1-G11
ccgccgccgaagaagctaaagttcccgccgtcgaaaagccggtggaggaggtgaaagcgcctaatcttgccatggagaagaaacctaaggctccgaaggaaaagaagccgaatcaggccaaaactgcttctcatcctccatatctccagatgattaaggacgctttgattgctctgaacgagaaaggaggatcgagtccatatgcgatagcgtagttcatggtggagaagcacaaggcggtgcttcctgcgaatttcaagaagatactaggtctgcatctgaagaaccaagctgtgagagggtaactcgtcaagatcaaggcttcgttcaagttatccta

SEQ ID NO: 47253 - DNA, 337 bp, Glycine max
  Clone ID: LIB3139-113-P1-N1-G12
tgtttatattttgttggagatctcgtctttgaaggttctaatatgactacttgctactttaaatgtacagtctatttcttcatagcatttggaaatttggctgatgacaccatctattttgaggcttttccccacaagctggtgcagtttggagtgtatcatgaaaaagttgtgttgaaatattcacaagaggaatttctttcatgatggtcaacttaagtgcgttccgctactactctgttggctgatgggtgcccaatattgtttgctatggtgtcatgatatatcaatgtctacattaccaggggattttgttatttgcttatatctttttttc

SEQ ID NO: 47254 - DNA, 402 bp, Glycine max
  Clone ID: LIB3139-113-P1-N1-G2
cttaattaggcagctgaataaagacatggagaagcttaagttgtacggaaggaaaaaaagttgccaagctgatgatgttgaggactacctgtctaaaatgcttgaacatgatatttatgatagacatccagacatgaactgcatgtgggatttaggttggaatgatgagacagttgcatttatcgagaaatatgatgttataagggatacagaaaagcatatccttagtcttcttctggatgagatcaccgtagatttttgcatgtgaagaagggggacacggagccaagtttaatttttcatgcatgtgtaatttataaaggtaaggatttgataactgcaagttttcatttagaaattcattctgttttttcggatcaatttagtgtggttcacaaaatc

SEQ ID NO: 47255 - DNA, 383 bp, Glycine max
  Clone ID: LIB3139-113-P1-N1-G4
cacatgcaacagcacaaaggtaacaaggagctttaaaaaacaaatgatgaagaaccgttatccgttgccggagagacggtggttcgtggctatggccgtcgtgggcttgatcgccacggcgatgttcctcaccaacgcgatccgaacctcggaaacctcgtacttgtgcccgggcgcgctcgggatccgaagcaaaacccgaaccgaattcagctacgacgcgtcaccgatccagctccgcgcgattctccactacgcgacctcgcgcgtggttccgcaacaatcggtgtcggagatcaagatcagtttggacgtgattaaatcactgggccggcccattaacttcctcgtcttcgggctgggccacgactcccttatgtggg

SEQ ID NO: 47256 - DNA, 399 bp, Glycine max
  Clone ID: LIB3139-113-P1-N1-G5
aaaattttgtttctttgtgtgtgtatggagatgataacttaattagtgttcatgaatatgtcaagccttactttagtggttctaaattgaaaagctttctagctagtcataacatcaccattactgatggtattgacaaaactagtgcaactttgcaatttagaaagttagcagattgtgattttctcaagagaaactttaagcagatgtctaatgttttgtgggtggctcctgaggacaaggcgagtttatggtcacaacttcattatgtttcgtgtaataatctggaaatgcaagaagcttatcttgtcaacctcgtaaatgtgttacgagaattgtatttgcacagtccagaggaagctcgccaattgagaaggaaagctctctctcgtattgaat

SEQ ID NO: 47257 - DNA, 402 bp, Glycine max
  Clone ID: LIB3139-113-P1-N1-G6
ctcgagccgaatcggctcgagctaggtggtctatctgatcttgtgaagtttgtgtttgtgtgaaaggtgtgaggcttattattcagaagagtttgtgtttgttcacataattgattgtggtgtggtgtgtgtcggtggcaatggaggcaagtttggtggagaggggtagagagagagctggacatgttaacaaggttggttatgttagaagggtcattgcaaagaagaagaaacagctttatcgaagggttaggagacctgagttgagtgtttcaaagacacttcaccaattatttgattcatgcagagaagctttcaaaggccctggcactgttccttcgccacaagatgttcagagattgactcacatacttgataacatgaagccagaagatgtggggc

SEQ ID NO: 47258 - DNA, 181 bp, Glycine max
  Clone ID: LIB3139-113-P1-N1-G7
tgcacgcgcacgcttgcttaatcttcggatccagctcaagtacttattttgactaattacatggtgatgcttgagttgttctttaagaaaaaaagactttcctttcttttgtttgccatgactaccaagcctaatattgcttcaacatgaccaccaatgataaacatgcattcatcgaact

SEQ ID NO: 47259 - DNA, 386 bp, Glycine max
  Clone ID: LIB3139-113-P1-N1-G8
gtctttctctctctgttcactttttctatcctcgaagcaagaaatggactctaacagcgtcgcttcttggccgaggatgccagaaaacatcaacggtttcggcctcaaacagaaccaatccgcagaggttcatgttttagccgttgatgacagcaccgttgatcgcaaagtcatcgaacacttgctcaaagtcttagcctgtaaagttactgctgtggatagtgggctgagagcactgcaattgcttggactattggacgagcagaaaataccctctgaaactaatggttttgtgggtctgaaggtagatctaatcatcacagactatttgctgcccggaatgaccggttatgaattactcaagagaatcaaggaatcatctactt

SEQ ID NO: 47260 - DNA, 341 bp, Glycine max
  Clone ID: LIB3139-113-P1-N1-G9
ttgagcttaaaccctagccgctcttctcttcattcttcactttggaaacaatcataatggcgttctgtaataaggttggaaatgtcttgaggcagggtgctgctcgcagcacacatgcccctgttgcgtccatgcttaattacatccgctgcatgtcttcaagcaagcttttcattggaggcctttcatattgagttgatgaccagtctcttaaggatgcattttctggctttggagatgtggatgatgcaaaagttataactgattgagacagcggaagatcaaggggtcatggatgtgtctacttctccaatgattagtctgctatttcggaaactctt

SEQ ID NO: 47261 - DNA, 349 bp, Glycine max
  unsure at all n locations
  Clone ID: LIB3139-113-P1-N1-H1
ccagagtggtgggtttaattgattgggatcatgcgtgttatttgatccctaaaaatcaaaaatagtgtcaaaaatttacaataagtggcacatccttcttcaaccaactgaactacgtctttaacattattcgtgttatatgttatgatgcatggtggaaaattaacgattaatgatattattctattctattctatggntagcgatgtggtagggctcaaggattcaactagtgtggtcattattagaagcttgtcaaggtttttttttcttttctttctgaatagaaacctgtcagggtagtgtctaattaatatcggaatttcgttctatatggaaaagtattggg

SEQ ID NO: 47262 - DNA, 177 bp, Glycine max
  Clone ID: LIB3139-113-P1-N1-H11
tatctctctttgtctctatatctgtatttctgaattttgggaatagaaaaaccctaagcatagctaagcggttaggatggggaacacggtgaatctgttgaaccagatcatggaatggaaattcacttctaaatctggtgaacgtttattgcgtaagtgcgagaaggaggagaaatc

SEQ ID NO: 47263 - DNA, 405 bp, Glycine max
  Clone ID: LIB3139-113-P1-N1-H2
attcatatgcttgtgttactgctgttgtccaagagagccttatggctattcacgtttggcctatgctttgtccttgatcttcctcgttctcttcacccttgcagcaatagttggatgtgttcttctttacactgctcaggggaagtttcatgggagcaccacaaacacgctgaaatccttggtgagtcaagctgacttcaccgccgaaaacctcaggaacgtgtcagattatcttgatgcagctcagaagatcggagtcgaagcggtttttttaccagccgatgttcagaagaacattgacgaagttcagatgaagattaattcttctgctgcagatctttccagccagactaaaaaaaattcagagacaatttaagatgtccttgatgcaatgagacgggatct

SEQ ID NO: 47264 - DNA, 181 bp, Glycine max
  Clone ID: LIB3139-113-P1-N1-H3
agagattcaagaaaaagttgtattgaaattttcacaagaggaatttcttacagctaggtcaactcatgtgcgtcctgcaacaactctgttagctgatgggtgtccatatttgtatgctatggtgcatgatagttcagtgtctacaataccaggtgattttgttattggtgttaagttgaca

SEQ ID NO: 47265 - DNA, 257 bp, Glycine max
  Clone ID: LIB3139-113-P1-N1-H5
aggaaactctcaagattttgaaattgctggtaatactcttatgccagctttttctgttccacaggctactgccagatcttctgaaaatgcggaatcctctgcatgatctggaattcgtgttttctttcgcttgttcgtttgtttaattcaataaaggaaattaggcatgaccctcttgttgagtatgctctgcctatctgaaaatttccacacctcttttaattgtcgtaatgatgtgtgaagagtgtgttattttt

SEQ ID NO: 47266 - DNA, 372 bp, Glycine max
  unsure at all n locations
  Clone ID: LIB3139-113-P1-N1-H6
cggctcgagccgcgtttccttgggtagtcgaaaggaagcagaatgggatccaaaattcttccaaaatgggcatcgaagccttgcgtaatgggaatcgacgaagctggaagaggccccgttttagggcctatggtctacggttgcttatactgctctcagtcctatctgaagaccctttccacgttgagttttgcagattctaagacactcaaggaagagaagagggaagaattgtttgaaactttaaaactcaatgattctattggatgggatgttgatgtcattgacccccgggaactctccgctaaaatgcttaagaagaataagattaacttgaatgaganttcacatagctctgccatgggcctcatt

SEQ ID NO: 47267 - DNA, 378 bp, Glycine max
  Clone ID: LIB3139-113-P1-N1-H7
tccaacgccagcagcattggaggatctcagaggctctttgcgttagcacagcaccttctccagtacaaggcaccgtctttccccgaagatattgtggaacaaagcattgaagagattggtggcaaggttgtttctcaggtgggatttcaagaatcagccatcccaattggccaaaaccctgagaaattcagacccaaaaaagctgctgttttgatctgcctattcgaaggggatgatggggatctaagggtcattctcaccaagcgctcttccaagctttctactcactcgggtgaaatggcattgcctggtgggaaaactgaggatggggataaggatgatggggatactgcaaaaagagaggcaaaggaagtaatt

SEQ ID NO: 47268 - DNA, 292 bp, Glycine max
  Clone ID: LIB3139-113-P1-N1-H8
gggtgaaaggactaacaatccagaatagccaacagatgcattttaccatatcacgatgcgattctgttagaattactagcgtgaaagtgtcagctcctggagacagcccaaacactgatggaattcatattagtgaatcaacaaatgtcataatccaagacagcaaaattggaacaggggatgattgcatatcaattgtcaatgctagctctaatatcaaaatgaagagaatttattggggacccagacatggaatcaaccttggaaggcttagggaaaacaacttaacaag

SEQ ID NO: 47269 - DNA, 398 bp, Glycine max
  Clone ID: LIB3139-113-P1-N1-H9
gcagacttaacaacagcacaaagcgggttactgtctgttcaagctaccatctctctctctctttcttagtgcctccttgccagaagttaaaatggcccaagaaactttcctattcacatctgaatcagtgaacgaggggcaccctgacaagctctgtgaccagatctccgatgctgtgctcgatgcatgcttggagcatgaccctgacagcaaggttgcctgtgaaacctgcaccaagaccaacatggtgatggttttcggagagatcacaaccaaggccaacgtggactatgagaagattgtgcgtgacacatgcaggaacattggttttgtctctgatgatgttggtcttgatgctgacaactgcaaggtcctcgtcaacattgatcaacagagtc

SEQ ID NO: 47270 - DNA, 438 bp, Glycine max
  Clone ID: LIB3139-114-P1-N1-A10
gcagacttaacaacagcacaaagcgggttactgtctgttcaagctaccatctctctctctctttcttagtgcctccttgccagaagttaaaatggcccaagaaactttcctattcacatctgaatcagtgaacgaggggcaccctgacaagctctgtgaccagatctccgatgctgtgctcgatgcatgcttggagcaggaccctgacagcaaggttgcctgtgaaacctgcaccaagaccaacatggtgatggttttcggagagatcacaaccaaggccaacgtggactatgagaagattgtgcgtgacacatgcaggaacattggttttgtctctgatgatgttggtcttgatgctgacaactgcaaggtcctcgtcaacattgagcaacagagtcctgatattgctcaaggtgtgcacggccacctcacaaagag

SEQ ID NO: 47271 - DNA, 511 bp, Glycine max
  Clone ID: LIB3139-114-P1-N1-A12
gagcgaggtagggttttcgttgtttctctgtctttgaattcagttcgcgacgatggggtccatccccgatccaggcgagttgagcgagttgactcagccgagcttcgacgagttccagcgccaaactttcctcatgaccagctgcaccctcctctggaaggagctctccgaccacttctcctccctcgagcaagacctcaaccacaaattcgaagtcctcaaacgcaagattcgcaccctcgacaacactacttccgactccctccgcctactcgatcgccgcgaaaccttccttgacgccacgcttcagatcgccctccgtacgcttgacacgctgccgaccgctgccttctccgccctcctcaccgacgccgacgacatcatcaacagcttccccgacggtgaggtcgacgacaccaccggtcttatcctcaaactaagtccttctgcctccgcatggacgcattcgggtttcttcgtcttcgtcagcgccaagaagaaggagcttgac

SEQ ID NO: 47272 - DNA, 259 bp, Glycine max
  Clone ID: LIB3139-114-P1-N1-A5
tagcaggggtgtggtatatagtaggggatataattactacacaaccctgcatagttggttagggtataatactactggggctttttaacttacttttaaaacttacatggcacacaaaagggcaccatttggtcaatgtaattaactggaatggttttttttaatgtaaactatggataaaaaggtaaatggccagggaaggcctgggccctgaacctgggggggtggggggtggacctggacctggtttgggcccggg

SEQ ID NO: 47273 - DNA, 173 bp, Glycine max
  unsure at all n locations
  Clone ID: LIB3139-114-P1-N1-A8
agcaacttcccaattcaggctattgatttgagatgcatatgagcgtgntaatgatgtgattagcaacccgaacaaatatgggtttcaaaactcagactcaccctgttgctcctttggaaatattcgaccggctcttacatgtatacctgcatcaaaaactgtgcaaagataga

SEQ ID NO: 47274 - DNA, 308 bp, Glycine max
  Clone ID: LIB3139-114-P1-N1-B10
gtgtcaaaggagatgattcaaacccattgtcttgctccagcacaagatattaagatattgagatgtggcccaccacctatgaacatggccatggctgcacaccttgtagcccatggatatgcttctgagatgcagtttcagttctgattctctttattgggggtgcttaacattgcatgcactttatggccttggccattgaaaaacatatagcaactatttgattcttttttatctggtcttgaattcgggaaacattggactaactgtgcatttagtttcacatggtttttaagagttgtggcctg

SEQ ID NO: 47275 - DNA, 363 bp, Glycine max
  Clone ID: LIB3139-114-P1-N1-B11
gcctaggtgaagacaatggacctccacaactctgtactgggtagcctgttagtagatggagattgggtcacagctgcactatgtctagatgaagggtgttgctgagctggaatcacggttttatactgtaatgatctgggacactgtcattttggagaggaatgccaaaagtaccagatattagtctcattagacttcttgagctggcttccaatgtcaagatcatgcataatcatgctctggctattagctgcagggtagcacactctatatttcgtcgatgtactctgtgacaacacatgttcatcatattgtgaatacttagaaagaggcaatagataagaaagtagagtcgatgcttac

SEQ ID NO: 47276 - DNA, 535 bp, Glycine max
  Clone ID: LIB3139-114-P1-N1-B12
caaagatggcacattcctcgatcgtcgtttctctgagccagaacttgtttaaaaggaacctcacctgtgtaaaaattcacgctcattctccttcttcttctttcggatctcgttctctttctcttccttccttctccttctctcagagaacaacacctctctctctcaccgcctccttctcctctcacaccgccatgggcgagacttccgctcccgccgtcgatgccggaatggacgccgtccagcgccgtctcatgttcgaagacgaatgcattttggtggacgagaatgaccgtgtggctggtcatgattccaaatacaattgtcacttgatggaaaagattgaagctgagaatttgctgcatagagctttcagtgtattcctgttcaactctaagtatgagttgcttcttcagcaacgatctgcaaccaaggtaacattccctcttgtgtggacaaacacctgttgcagccatccactgtaccgtgaatctgagcttattgatgagaatgcccttggagtaagaaatgcact

SEQ ID NO: 47277 - DNA, 132 bp, Glycine max
  Clone ID: LIB3139-114-P1-N1-B4
cgaggccttccgccgaatccgcgagggccccgccttgatccgcaccaagggcaaggccggaaccggcaccataatcgaggccgttcgccacgtccgttccgtaatgagcgacataagggttttccgaaccat

SEQ ID NO: 47278 - DNA, 333 bp, Glycine max
  Clone ID: LIB3139-114-P1-N1-B5
cctgaacatcctgcatggggggggcggtccttccattgccccaaaggatgggttattttcttgtaaggattgtgttccaagaacctatggggtttaaaatccacaaaatcttttggggtaaaataggggatgggggaaacggcttttccccaaggcaccttccggaagggtaaaaggatggcctttactattagggggggggcttgtgccaaaaattgtattcttaagaaatatgcaaaaggctgtcttttaatggggagaatatttggtggagaatctgtcttttgaggttttaaaatggcctctccctacataaaaggaccggcttttttt

SEQ ID NO: 47279 - DNA, 433 bp, Glycine max
  Clone ID: LIB3139-114-P1-N1-B7
ggtaaacgaggtatagagaaaccaccctttcagcttcctgatttcattgctgccactggaattgagaaaatcagacaggcttatattgagaaagaggatagtaagaagctgaaacaaaagcaaagggagcgcatgcaaccaaaaatggggaaaatggatatagattatcaggttcttcatgatgcattctttaaataccaaacaaagcctaaactgacctctcttggagacctgtatcatgaaggaaaagagtttgaggtgaagttgagggagatgaaacctggcatgttatcacatgaattgaaagaagctcttggtatgcctgaaggttctcctcctccttggcttattaatatgcagagatatggtcctccaccatcatatcctcatctgaaaatccctggactgaatgctcctatcccccctggagcta

SEQ ID NO: 47280 - DNA, 239 bp, Glycine max
  Clone ID: LIB3139-114-P1-N1-B9
tcttgataggtctcgtgggggcaactacttatattggcgctggactatgtgcggacgttgactcatgcacctgcccaaactggctgcctatagtaaagaaaggtgtggtcaatgccattcataaagaaccgcgcatggctgctttctttctacgattgcacttacatgactgttctgtaaacagttgtgatgcatctatactggttgatgaatcaagcatcttgattggggagcaaaca

SEQ ID NO: 47281 - DNA, 126 bp, Glycine max
  Clone ID: LIB3139-114-P1-N1-C10
cgagactattgcttcgacctctccctgatttatccaaaagcctaagataacatcatctacaacctcattcattactaccactcccaaacaagggatgctcccaccatcatcaacccggtccaacta

SEQ ID NO: 47282 - DNA, 460 bp, Glycine max
  Clone ID: LIB3139-114-P1-N1-C12
cttcttcccaaccactactactcactcactgcagatctcaattgcatcgctgtccatggctaccatcgttagcatcaaggcccgccagatcttcgacagtcgtggcaatccaactgtcgaggtggatttgacttgctccgatggtacttttgccagagctgctgttccaagtggtgcatccactgggatttatgaggcccttgaattgagagatggaggatctgactaccttggaaagggtgtatcaaaggctgttgacaatgtgaacaccgtcattggccctgctttgattggcaaggacccaactgagcagactgctattgacaacttaatggttcaacagcttgatggaactgttaacgaatggggttggtgcaagcaaaagctaggagcaaatgccatattggcagtgtctcttgcagtctgcaaagctggtgctagcgtcctgaaaattcctctt

SEQ ID NO: 47283 - DNA, 357 bp, Glycine max
  Clone ID: LIB3139-114-P1-N1-C5
caagactcttgcttcgacctctccctatttattccaaaagcctcagataacaacaactgcaacctcattcatcaccaccacttccaaacaagggatgcctccaccatcatcaaccctgtccaactaccctttcatcaaaaccacttttttcaccagcaccagcatggactgttccaacctcaacagcaaagcctaagccaagaccttggctgtctatgacccattacaggaaaaccagtggaacaaaaccctacttctataccattcacccagcaccataatatccctttagaagctttcaccaccaccccttctattatttccaacaccaacactggctccacccctttgcactct

SEQ ID NO: 47284 - DNA, 295 bp, Glycine max
  unsure at all n locations
  Clone ID: LIB3139-114-P1-N1-C7
ggagaagcattcgaggctggtgaagtgtctaagaagaagaaaaagaaatcaaaaaagaaggacatcgagtaaactatgatgtattgcagctttaactgccgaaatcgattttttcatcttatagttgtggacaatgttaaatttttatttgctttgaactttacctgttgctgcacttgtctagactttatgttgacttgtcatttggcatacaaattttgtcctagcaattttccgcttttnaaaaaaaaaaaaaaaaaaaaaaatattatatttcctcaaaaaaaaaaaaata

SEQ ID NO: 47285 - DNA, 499 bp, Glycine max
  unsure at all n locations
  Clone ID: LIB3139-114-P1-N1-C8
cctgcacctccatccgatgggactgcttacaattacagccaaccaccttcctctggttatagccaaccggggcagggctatgctcaggatggctatggtggatatcatgcgccacctcaatcagggtatggtcagccaccatcatatgatcagcagcaaggttatagctcagctgctagctatggtagcaacccagccccagagggccacactgccaattacggatcccaaggggattcaacccaagctccacctgcccagcctccaagtcaaggttatgggactggccaacaacctagcccaaatgctgccaactatgcaccacangctcaaccaggttatggggtgcccccaacctcccagccggctacttatggcagtcaacctccagcacagtctggttatggatctggctatggaccccctcagacccaaaagcctagtggcacacctnctgtgtatggacaatcccaatcacctaacacagcagggggatatg

SEQ ID NO: 47286 - DNA, 509 bp, Glycine max
  Clone ID: LIB3139-114-P1-N1-C9
gctgctgccacttttcgctgagttgcgtcttctctctaacaaaacaaacaaacaaaaaaaatgatttctgcgatttcgtgggtgcccaaaggggtttcgaagtcggaacttgtcgtggctgaacctcctcccgaagaggaaattcaagagataatagccaaccacgcaaccaaaagtggagacagtgacaatgaagacgctaacaacgatgacgttgtggcacaagcattaaccgtagcagacgcagttggcaaggcctccactggaacctgcgacgaaataacctcttgcgttgaaggaccttgacatggacctttatgatgacgaagatgaaggaattgaggtgttcagttctggaattggcgatctttattatcccagtaacgacatggatccctatatcaaagataaagacgatgatgattctgaagaactcgaagacatgatcattaacccaactgaatctgtcgttgttatgctgtactgaggatgaatcagttatctgaggt

SEQ ID NO: 47287 - DNA, 294 bp, Glycine max
  unsure at all n locations
  Clone ID: LIB3139-114-P1-N1-D1
gctctcagggctgcgttattggtatgagtaacctggagggaaaatggtaatatttcaaaacacactcccatctcttggtgtgggccgcttggaagtacgtggagatgattctcgtgtntacggggacagacaaagagcatggactgagactgcctgagatccattctttaacaaatggctgctgagtttccaagaccaaatctcacaaatgtgatgcatcagtgatagacactgcatagctcttagaacttgcaagatactgtggcagtgatactatcacttcatagcattacg

SEQ ID NO: 47288 - DNA, 495 bp, Glycine max
  unsure at all n locations
  Clone ID: LIB3139-114-P1-N1-D10
gatgaatgctcctgattcaaatgataatattgatttactgttgagcattgatttgttgggtttacaaggagcaggtaaagcttttccaaacaaaattgtttttgatgataagcttgtgttggctaacacacaagaattctttgatggaaattttccagtggattcttggttaccaatttttgtgaattgtctttatcctgtaagtcaattaccttcagaagctgtcgttgtaaatgttacatgtggtaagtggacgttgtgtttacccaccactgcttggattagttctgcagttaacaatcgctcctcagatatcaacaaaaggattcgcacagcacttgngaaaggtaagaaaattgtttttcttactagagttgatccttttccagtagctttactggctgttctttttggcgttaagaatgaaattctgagttctaacgccactaatcctatgctgacgcgacttcttgagaactgtaagagtctcaaata

SEQ ID NO: 47289 - DNA, 179 bp, Glycine max
  Clone ID: LIB3139-114-P1-N1-D12
cacaagtttatatagcgctacaattctctcaccatctcaactcgccatcaggattgaggacggattgcaaacatgctagatcaggttcgacacatctacactcatcgacatacgctgctgaacagctccatatactacttatcgcatctgatatacagagcattgactgagattactgc

SEQ ID NO: 47290 - DNA, 502 bp, Glycine max
  Clone ID: LIB3139-114-P1-N1-D2
ggaaatttggctgatgacaccatcaattttgaggcttttccccacaagctggtgcagtttggagagattcaggaaaaagttgtgttgaaattttcacaagaggaatttcttacagcttggtcaactcaggtgcgtcccgcaacgactctgttggctgatgggtgcccatatttgtatgctatggtgcatgatagttcagtgtctacaataccaggtgattttgtcattggtgttaagttgacaaccataaacaatatgtgtgcatatgggctcaatcctggtatttcaggttctcgtcttttgggcaccattcctcagtccatttcacagcaaactgtttggaatcaaatggcaacagtgagaacaccattgaattttgattctagcaagcagagcttttgtcaattttctattgaccttctcggtggaggaattttagtggacaaaactggagaatggatcacacttatacaaaattctccaattagtaacttgttgagag

SEQ ID NO: 47291 - DNA, 235 bp, Glycine max
  Clone ID: LIB3139-114-P1-N1-D7
cacaacttcataaagtgtaacaattatcacaccacagatctgcacaacattgttcaagacacattcaatcttgggcattagtccctggttttatcaaccaacacaatttcaccgtccaaaacacaaaacactactcatcacatcttattcacatcacattcactttcattactacatcatttttcacttcacaatcttgacaccacacacacacactcccacaacacaacacaat

SEQ ID NO: 47292 - DNA, 249 bp, Glycine max
  Clone ID: LIB3139-114-P1-N1-D9
atcttggaaggatgtcttacgctgctcatttcgctaatcagccccaacagaaagagtggtcggagggaaattcttcctttgatattaaatctcgctctaggctggaaaaagtttactatacaaaatcacaatttgatagtggaaaaaccttcagaaatgatataaatggtgctggaccacactcttcataagattgttctgaaaagcaagatcaagaaaaacccacaaagattgatgccagatggagac

SEQ ID NO: 47293 - DNA, 529 bp, Glycine max
  Clone ID: LIB3139-114-P1-N1-E10
gccttactttagtggttctaaattgaaaagctttctagctggtcataatatcaccattactgatggtattgacaaaactagtgcaactttgcaatttagaaagttagcagattgtgattttctcaagagaaactttaagcagatgtctaatgttttgtgggtggctcctgaagacaaggcgagtttatggtcacaacttcattatgtttcgtgcaataatctggaaatgcaagaagcttatcttgtcaatctcgtaaatgtgttacgagaattgtatttgcacagtccagaggaagctcgccaattgagaaggaaagctctctctcgtattgaatggctgcaaaaagctgatgtgcctaccatagcacagattgaagagttccattcgatgcagaagatgatgaatgctcctgattcaaatgataatattgatctactgttgagcattgattgttgggtttacaaggagcaggtaaagcttttccaaacaagattgtttttgatgataaagcttgtgtggctaacacac

SEQ ID NO: 47294 - DNA, 531 bp, Glycine max
  Clone ID: LIB3139-114-P1-N1-E11
caaatatgaatacaagtttattaaggagatagttgaatcggtgtcaaacaagtttaatcatgatcatttacatgtttcggatgtcctggttgggctagagtcaccagtgctagaagtaaagtcgcttctggatgttggacgtgatgatgtcgtccacatggtagggatccatggactcgccggagtgggtaaaacaacacttgctatcgcggtctataattctattgctggccattttgaagcttcttgctttcttgaaaatgtgaaaagaacttccaacacgataaatgggttagaaaaactccaaagcttccttctttctaaaaccgctggagaaattaagttaacaaattggagagaaggaattcccattataaagcgtaagctcaagcaaaaaaaggttcttcttattctagatgatgttgatgaagataaacagttacaagcacttattggcagccctgattggtttggtctttgcagtagaatcatcataaccactcgagacgaacatttgtagctctacacaat

SEQ ID NO: 47295 - DNA, 494 bp, Glycine max
  unsure at all n locations
  Clone ID: LIB3139-114-P1-N1-E12
atcacacataatataattccaaaatcactcctattgctatagcaatatgatgggtgacactgagatcaaaccatcagttgaagtagtcatatgtgcttccatgaacaataacaatagcgcaaacaaccacacccttccaaccgacatcaccaagtcatcacaatcacacttaccaatcttgaccaagctccatgctggttactttttcatatgcctttcctttggtgcacaagctttgctctggaagagtttgagtaaacacaacaaggactcacaaactctctggcatggattcaatttgatgccttccattgcgtttctactactttggtgtgtggcactgctcactgccactactttgtctntactttacgtgctcaagtgcatctttcacttggacatggtgaaggaggagttctcacatcatgttggagtgaactgcatgtatgctccttggatttcttggcttctcatgcttcaatcagcacccatca

SEQ ID NO: 47296 - DNA, 232 bp, Glycine max
  unsure at all n locations
  Clone ID: LIB3139-114-P1-N1-E2
ctaatccctctntcttcctcttcctcagtagtgcgattttcgattctcttctctgcaactatgcctaaccctaaggtcttcttcgacatgaccatcggcggtcaacctgccggccgcatcgtgatggagctctacgccgacgtgactccgagcaccgccgagaactttcgcgcgctctgcaccggcgagaaagggcgccggggcgggagcggcaaaggcccctccactacaa

SEQ ID NO: 47297 - DNA, 480 bp, Glycine max
  unsure at all n locations
  Clone ID: LIB3139-114-P1-N1-E4
agtggctgttgttgacatctctaaatccaggattgcagcatggaacagtgaccagctccctatctatgagccaggccttgatgatgtggtgaagcaatgtcgtggcaagaaccttttcttcagcactgatgttgagaaacatgtctatgaggccgacatagtgttcgtctccgtcaacaccccgacanaaactcgtggtcttggagccggaaaggctgcagatttgacttactgggagagtgcagcacgcatgattgctgatgtctccaagagtgacaagattgtggtggagaaatccactgtccctgtgaaaactgctgaggccatagagaagattttgactcacaaatggaagggaatcaagttccaaatcctttcaaaccctgaattccttgctgagggaactgcaatccaagatcttttcaacccggatcgagtcctaattgaggcagggagaccccagaagccaaaaagcaattc

SEQ ID NO: 47298 - DNA, 389 bp, Glycine max
  Clone ID: LIB3139-114-P1-N1-E8
tggcaacagtgagaacaccattgaattttgattctagcaagcagagcttttgtcaattttctattgaccttctcggtggaggaattttagtggacaaaactggagattggatcacacttatacaaaattctccaattagtaacttgttgagagttgctgcttggaagaaaggttgtttaatggtcaagattgtgatgtctgggaatgcagcagtcaaaaggagtgatggggcctcattggtacaagtgtttttaacaaacagctacagtacagagcattttgatgcatgtaagtggacaaaatcagaaccacattcctgggaattaatcttcccaatagaggtatgtggtcctaataatggttttgaactgtggagttctgagtgggca

SEQ ID NO: 47299 - DNA, 281 bp, Glycine max
  unsure at all n locations
  Clone ID: LIB3139-114-P1-N1-F1
aaaagaagcaaagaccaactggtgttaatttggcatgggatcttcaacccttttttgggaaggaggaggagcacttgtggtggaaaccaccaaagggggaggggatttggtggccaaggatgtaaattgagcttctgtgcaagtttccagacaactcttgctatgactttgactactctcagagcacaatctggtcccctttgcttncaagaccttacagtcctatggatttggatcttatcactccaaagaagcttttctatgacatgggtttgggagct

SEQ ID NO: 47300 - DNA, 501 bp, Glycine max
  unsure at all n locations
  Clone ID: LIB3139-114-P1-N1-F10
cgtcaagaacctccagcgcctcgtcgagatcgccgtcgcggccctcgaacaaacccccctcggtgacggccaggtccgccgcgccaagaaggcgctctccgccctcgtagccgccatgctgaacgacgacagcaacgccgccgccaagggaaccgaacgcacccgctccttcgggcgccgcgccggaaacaccaacaccactaaatacaagtcgctgtcgtggagcatggccaagaactggtccgcggcgaagcaaatccacgcgatgatgtcgaatctgacggcgccacgtggcgcggagtcctcgggattggcgcaacccatgtacatgatgagcaccgtgttggtgttcgtgatgtggactctggttgcggcggttccttgccaggaaaggaatgggctagggacccattttcctctgccgaggcaattgggctgggcccagcccatgatcggcctgcaggagaagatngcggaggagtggaagaagaaagagaagaa

SEQ ID NO: 47301 - DNA, 532 bp, Glycine max
  Clone ID: LIB3139-114-P1-N1-F11
ctcgcaatggttaaagttaatgtagcatgtgctgctgttggcttgacatcaagttacactccaactccattgttggaatctggtttgcaaaaagacagagggttaattgtggagtattttggaaggatgtcttacgttgctcataacgttaatcagccccaagagaaagatttgttggagggaaatttttcctttgatattaaatctcgctctagattggaaaaagtttcctctacaaaagcacaatttgttagtggaaaaaccttcaaatatgatataattggtgctggttcacattcttcagaagatttttctgaaaaggaagatcaagaaaaacccaaaaagattgatgccagattgagacagagaatagatcctcaatacaatgaggttcaggctcagatggaaacaaatttgtttaaattgtctcttgatgatgttgaaactcctaaaggttccatgttggatcttaaaatttctcaatctaaaatagcactttcaaaaacacagttggaggaaccattctgcgtag

SEQ ID NO: 47302 - DNA, 486 bp, Glycine max
  unsure at all n locations
  Clone ID: LIB3139-114-P1-N1-F12
tgtgtgtgtatggtgatgataacttaattagtgttcatgaatatgtcaagccttactttagtggttctaaattgaaaagctttctagctggtcataatatcaccattactgatggtattgacaaaactagtgcaactttgcaatttagaaagttagcagattgtgattttctcaagagaaactttaagcagatgtctaatgttttgtgggtggctcctgaggacaaggcgagtttatggtcacaacttcattatgtttcgtgtaataatctggaaatgcaagaagcttatcttgtcaatctcgtaaatgtgttacgagaattgtatttgcacagtccagaggaagctcgccaattgagaaggaaagctctctctcgtattgaatggctgcaaaaagctgatgtgcctaccatagcacagatngaagagtttcattcgatgcagaggatgatgaatgctcctgattcaaatgataatattgatctac

SEQ ID NO: 47303 - DNA, 220 bp, Glycine max
  Clone ID: LIB3139-114-P1-N1-F2
tatatctatccattaagggatattcaatgcaattagcgaatgagagaatgaagagccgggggtcgtgtggcttttgcgggactaggcatcatcggagccacactcttcatagtgagctggatccaaccctggagaacaactttctattgttcaatacaggaacgatgcagcagcagcagcagcaggtcaccagggcccacatcgagcactcaagcctctc

SEQ ID NO: 47304 - DNA, 199 bp, Glycine max
  Clone ID: LIB3139-114-P1-N1-F3
ataatggattgtccgggttattttggaggaaggctatatttaattaaatgatttggccttcccaaaggtaccatcgaattaagtcttcaaaatgagtatttagccaataaaaggatttaaatgttccatttaagctttactcgctggagtctttcacctggcagagattaaaggaatatttaatttcaggttttttatc

SEQ ID NO: 47305 - DNA, 395 bp, Glycine max
  Clone ID: LIB3139-114-P1-N1-F4
aatgtgttacgagaactgtatttgcacagtctcataggaagctcgccaattgagaaggaaagctctctctcgtattgaatggctgcaaaaagctgatgtgcctaccatagcacagattgaagagttccattcgatgcagaggatgatgaatgctcctgattcaaatgataatattgatctactgttgagcattgatttgttgggtttacaaggagcaggcaaagcttttccaaacaagattgtttttgatgataagcttgtgttggctaacacacaagaattctttgatggaaattttccagtggattcttggttaccaatttttgtgaattgtctttatcctgtaagtcaattaccttcagaagctgtcgttgtaaatgtcacatgtggtagtg

SEQ ID NO: 47306 - DNA, 222 bp, Glycine max
  Clone ID: LIB3139-114-P1-N1-F5
gtacaattctcttaaatgtgatgggatcaatcataaataccaaaaaaacaagattttgtgagtctatggtagagctaaatctttgaacatacatagaaacttagtagtttcagaaagaaacatttcagatcaaaatttaggatgttgcttaggctttggtttattaacatttggtaacagaattgtatttgggctgagtagtggattggaattactatttac

SEQ ID NO: 47307 - DNA, 486 bp, Glycine max
  Clone ID: LIB3139-114-P1-N1-F6
caaaattctccaattagtaacttgttgagagttgctgcttggaagaaaggctgtttaatggtcaagattgtgatgtctgggaatgcagcagtcaaaaggagtgattgggcctcattggtacaagtgtttttaacaaacagcaacagtacagagcattttgatgcatgtaagtggacaaaatcagaaccacattcctgggaattgatcttcccaatagaggtatgtggtcctaataatggttttgaaatgtggagttctgagtgggcaaatcaaacttcatggcatttgagtttccttattgacaatcccaaacagtctacagtttttgatattctcttgggaatctctcaagattttgaaattgctggtaatactcttatgccagctttttctgttccacaggctactgccagatcttctgaaaatgcggaatcctctgcatgacctggaattatgttttctttcgcttgttccgttcgttaattc

SEQ ID NO: 47308 - DNA, 444 bp, Glycine max
  unsure at all n locations
  Clone ID: LIB3139-114-P1-N1-F7
caatgacaatggtgccatggttccagttcgtgtccacactgtcctaatttccacccaacatgatgagactgtgagcaatgatcaaattgctgcggaccttaaagagcatgttatcaagcctgtcattcctgagaagtaccttgatgagaagaccatcttccaccttaacccttctggccgttttgtcattggtggccctcatggtgatgctggtctcactggaagaaagatcatcattgatacctatggtggctggggtgctcatggtggaggtgccttttcagggaaggaccctaccaaggttgacagaagtggtgcctatattgtaaggcaggctgcaaagagtgtcgtggcaaatggccttgctagaaggtgcattgtgcaagtttcctatgccattggtgtnccttgagccttgtcagtgtttgtggacacttatggaac

SEQ ID NO: 47309 - DNA, 382 bp, Glycine max
  Clone ID: LIB3139-114-P1-N1-F8
atttgtccctgtcagcaactagggtagggttccctccgccaaacccaaagaaagagtagaagaaacctacaaaactcatctctataaacaactccgtttgtcactccggcggctttagcaatcactccctccgttttgcgttttggattcatttatctgctgctttatcttaaaggccaagcgataaataacctctctctctctctctctctgggagattgagaatccgatccttcgtttccgaaattctcgcgagatggacgagaacctgctcgacgatattatccggaggctcgtcgcggcgaagaacggtagaacgacgaagcaagtgcagcttacggaggcaggaaattcgacaactctgtgtttccttcaaagagat

SEQ ID NO: 47310 - DNA, 355 bp, Glycine max
  Clone ID: LIB3139-114-P1-N1-G10
cacgcatacacggtatgaacaatttagtgtcactggccatgcagatttggatgagggggatcatttttaagcggatgaagttacatatcaaggcaccagccgcggctatacctggggatgcactactgctagattggtggaatatgagtcgcggatcgacactgggtgaattgatgagaatgatgtagcgacatcacacgttgatactagagcatatcagcctcacacgagagattattagttaccgaacacagcatttgatattacatctcggtctagatagtatatgaagtgcgctacaacatacatcattgctagatgtaaaaactcaacatatgatataaacactgctgat

SEQ ID NO: 47311 - DNA, 370 bp, Glycine max
  Clone ID: LIB3139-114-P1-N1-G12
catataagagttctcatattctcaatcttattacaagcttgtgcctgcttctttgttccctaggttcgtaccttacattgctgctattgacacaagggtgtgttgttttgtttttatcgttgagaagtaattaaggtacgtacaaatgggtaagaagcttgatgctctccttggtagaaccttcaaggtatcaaagttcaaggctattgttaaccttgccatctcacgcctagctgttctcaagaaccagcgccaggctcgccttagacatgcccgttctgatgtccttgaactcctccaacttggccaccaagaacgtgcttcacttcgagttgagcatgtgatcaaggatcagaacatgttggatgtg

SEQ ID NO: 47312 - DNA, 482 bp, Glycine max
  Clone ID: LIB3139-114-P1-N1-G6
ccctaatccaccccaacccaaccctattcgtctctctctcccttctctcatcgaccaccttcgccctctcttccctcatatggatgaccaggtcctcgagagagcgctccaggattggggcaccgccctaaatccggccataagaagcttcaacggccttggttgggaaccgctgatgataattctcaacctgctccacaacctgaccaccctaacctcgtcgtcgacacaggtgcgttggaagagaatggggatgcttctgcttctggggatcagaccgctgctgccaattttcctgccggtggagcagaatggattgacttatttgttagagagatgacgcgtgctactagagttgatgatgccaggtcccgtgctgctagattgctggaggttctagagaaatcaattactgcacatgcgagttctgggggacaacggctcttaaagggaaaatttatgctgaggagcatattgagctt

SEQ ID NO: 47313 - DNA, 389 bp, Glycine max
  unsure at all n locations
  Clone ID: LIB3139-114-P1-N1-G7
ggtgattgttgttcggtggtttgcaaggatggggaacacgttctgcttcttctgtggttgcgttgctcaatccagcgtcggcgtggtcgagcagtggggtcgcttccaccgcctcgcccaaccgggcttccactttttcaaccctctcgccggcgaatgcctctccggtatcctctccaccaggatctcctccctcgacgtccgcatcgaaaccaaaaccaaggacaatgtttntgtgcagttgctgtgttcgattcaataccgagtgattaaagaaaacgctgatgatgctttctatgagttgcaaaaccctcaggagcagatccaggcttatgtttttgatgtgactcgtgctattgttcctagaatgaacttggatgaactctttg

SEQ ID NO: 47314 - DNA, 411 bp, Glycine max
  Clone ID: LIB3139-114-P1-N1-G8
ctcgagccgaatcggctcgagggcaatttgtaagaaagatgtttggagagttgaatgtggaatcccttctggatttccgctcacagttatttgcaatagcatttttaatgagatgctcattagatatagctatgaaaaattactgcgccaggctaaagctccaagtatgtttttacaatccttcaaaaattttgtttctttgtgtgtgtatggtgatgataacttaattagtgttcatgaatatgtcaagccttattttagtggttctaaattgaaaagctttctagctggtcataatatcaccattactgatggtattgacaaaactagtgcaactttgcaatttagaaagttagcagattgtgattttctcaagagaaactttaagcagatgtccaatgttttgtgggt

SEQ ID NO: 47315 - DNA, 335 bp, Glycine max
  Clone ID: LIB3139-114-P1-N1-G9
cagattaaacttttttgtttctttctcagttctctgtttaatttcaagttcaagctggtgaaattttggattagtgctcccactctcctatctggtataggacttcgagggtagacttttctacttctctcctttctttcactctcttcttctcactgatccgcattgccgttcaaagtgctcttatttgaaaaacacttcagcgttggtgcaaatgtttgcttcgataattttctctggagacaacatgctcactgagaaaacaatttttacttgcagagatttggacatcttggttgtctattatacactaccaactcaatttagaaaacttc

SEQ ID NO: 47316 - DNA, 459 bp, Glycine max
  Clone ID: LIB3139-114-P1-N1-H10
aacgcttacccattatgaaaaaaatcctgtgaaagggcaaacaatattgtatgtgggggatctctcttatgcagatgattttccatatcatgacaacaccaagtgggatacctggggaagatttactgagagaattgcagcttatcagccttggatttggactgcaggaaatcatgaaattgattttgctccagaacttggtgaaaccagaccattcaagccttacacttgtcgttatcatttaccgtacacagcatcaaatagcacatctccgttgtggtactctataaagagagcttcaacatacatcattgttttatcttcttactcagcttttggtaaatacacgcctcaatacaaatggcttgtaaaggaactgcccaaggtgaacaggacagagacgccatggctgatagtcctaatgcatagtccaatgtataataggtatgtgaatcacta

SEQ ID NO: 47317 - DNA, 528 bp, Glycine max
  Clone ID: LIB3139-114-P1-N1-H11
ctcaccgattgctagaatggaatttcgatgctcagtcatctcttttaccattctcttctctcttgctcttgcaggagagagccatgtccatgcatcgctacctgaggaagattattgggaagctgtttggccaaacactcccattcccactgcactgcgagagcttctaaagcctctccctgcaggcgttgaaatcgatgaactccctaagcaaattgatgatacacagtacccaaaaacattcttctataaagaagaccttcatccaggcaaaacaatgaaagtacaattcaccaagcgtccctatgcacaaccttatggtgtatatacatggttaacggatattaaagacacctctaaagaaggatatagttttgaagagatatgcatcaagaaagaagcgtttgagggagaagagaagttttgtgcaaaatccttgggaacagtaattggttttgccatttcaaagctgggaaagaacattcaagtactttcaagttcctttgtcaataagcaagagcaatacac

SEQ ID NO: 47318 - DNA, 384 bp, Glycine max
  Clone ID: LIB3139-114-P1-N1-H12
gagaggttgatgaactgaaagaattgattatcatagtgaaagagtatgtcttgggtctgcagatggagctgaaaagaagggaaattaaggacaatccagcacgccagcaagagcttgcagcttatttcacccacagcaatcttcaaacacctcacttgaggctagctttgctgaatgccatgactgtctgctacaaggcaaagaaccttgccacagccgctaactttgccaggaggctacttgagaccaatcctactgttgaaaaccaagctaagacagcaaggcaagtgctggcagctgcagaaaagaatatgactgatgccttacaattgaactatgatttccgaaacccatttgtaatttgtggagcaacctatgtgccca

SEQ ID NO: 47319 - DNA, 176 bp, Glycine max
  Clone ID: LIB3139-114-P1-N1-H2
tggaaattcttgatccagaattcccaaaccaattttaagggacccacttattagggaaaggattggttgattaaaaattttttttgaccatttttttaattaacccatgtaatattggcttaacttcccttgggtaacattaaatgtacctggtcccttaaggcttaccaagggga

SEQ ID NO: 47320 - DNA, 489 bp, Glycine max
  unsure at all n locations
  Clone ID: LIB3139-114-P1-N1-H4
cccgtagttaaatctgcgagccattagttaaagaaaaaaaaaaccctaaaaagtttaagatgggttccaaaactcgctctttccttgctcttttcctcacgatcaacattctcttctttgcccttgcctctgcctgcgggacatgccctagccctaagccaaggcataataagcacaagcctgttaagccaagtccttcaggtggctcaggtggttcgggtggttcaggaggctctggtggttcaggtggctctggtggttcaggtggttctggtggttcaggtggctcgggtggttcaggtggctcaagtacctcttgccctcgtgacgcactcaaactaggagtgtgtgccaatgtgctaaacgggttgttgaacgtgactntaggtcaaccaccagttaccccttgttgctccctcctcaatggtcttgttgatcttgaagctgcagtgtgcctttgcactgnccttagggcaaacattttgggca

SEQ ID NO: 47321 - DNA, 486 bp, Glycine max
  unsure at all n locations
  Clone ID: LIB3139-114-P1-N1-H5
ctctcttcggtcagaaacatgaatttggaaacgcatccaggaacggcgtcgtattggtgctacagctgcacccgtttcgtgcacctctctgtccaaagcaccatcgcctgcccccactgtcaaagcggtttcgtcgaagagatccgcgccggcgccggagccgaagcctggccacgccattgactaagatctttctccgaagatcctcttttgctgcccagacagggcttacaccggcggatgagagaagctgcccacagccgctaatagtacaaccccgttgtggtactctgtggagagagctacaacatccacgacggcgaccactactgactcagcacgttcgagctcttctacgacgacggcgacggcaccggccttcgccctcttccttccaccatgtcggagttgctcctctgctctggctttgacagacttctcgaacagttngtgcagatcgagatgaacggatttcggcggccggag

SEQ ID NO: 47322 - DNA, 316 bp, Glycine max
  Clone ID: LIB3139-114-P1-N1-H6
caacgttgtgagtaggaagactcttgagactgtggatgatgacccttctacgaaagccttgcccaaaggggagaccatagttattggaaccaaagatgatgatgtctcagctgttaaaaagagtggatgctgttccacatagtttgtttgagagagatatacaaaagagtcttttggttatgcagtgtaacaggatgtttttgtgaactcattgttttattttgtttagttcttttttggttggtgatgtatacgattgattggcctcagctgccctttgtcgtgaacttctggtcataatacaggttttttattc

SEQ ID NO: 47323 - DNA, 305 bp, Glycine max
  Clone ID: LIB3139-114-P1-N1-H7
ccagtcactaaaaagggctacagacagattgcaacgccagattatgaccatgcaggtcagataactggcgtgagcgagggaggctgccctactacagcggattgaggaacaccttcgcatgatggttcagctgcctacggaaccgaaatgaacaatgctggtgaagctaagagagatgataaccaagaacctgacgagaaggacaactaatatgagggaaatgacatgggatcgggactgcaacaacagaaataagtccaagcgcaaacccacaggcagggctgtgtattataaaggatatggca

SEQ ID NO: 47324 - DNA, 389 bp, Glycine max
  Clone ID: LIB3139-114-P1-N1-H8
tagagctccttgttgtgaaaagatgggattgaagaagggtccttggaccccagaggaagatcaaatcctcatgtcatacatccaaaaacatggccatggaaattggcgtgccctcccaaagcttgcagggttattaaggtgtggcaagagctgcaggctaaggtggattaactatttaaggccagatatcaagagaggaaatttttcaagcgaagaagaggaaattatcattaagatgcatgagttgctggggaacaggtggtcagcaattgcagcaaaattaccaggaagagacctggagacttgaattgctagtagatggcattgaccaagaaatattgaactgggttaaggatggaaaatacattttcttgttctgaggggatgat

SEQ ID NO: 47325 - DNA, 525 bp, Glycine max
  Clone ID: LIB3139-114-P1-N1-H9
catacaggaagttagacggcggggtctgatagtagcaattgctggaattcctaaaaccatagacaatgacatcccggttattgacaaatcttttggttttgatactgcggttgaggaggctcaacgtgccattaatgcagctcatgttgaagctgaaagtattgagaatggcattggtgttgtaaagctaatgggacgttacagtggttttattgcaatgtatgccactcttgctagcagagatgtggactgttgcttgattccagagtcacccttctaccttgaaggaaagggtggactttttgaatttattgagaaaaggctgaaagaaaatggacatatggtcatagtcatagccgagggagcaggacaagatcttcttacagaaagcatgcaagccatggatcagaaggatgcttctggaaacaaattacttcaagatgttggtttatggatatctcacatgattaaggatcactttgcaaggaaggataaaatgcccatcaatcttaaaatatatagaga

SEQ ID NO: 47326 - DNA, 345 bp, Glycine max
  Clone ID: LIB3139-115-P1-N1-A11
acaaaaagatttttaatgcaagggatctcctcaacatactggaggatgctattagaagtggataccctatattaattattgctgaggatattgaacaagaagctttagcaactcttgtggtgaacaaacttagaggatcactgaaaattgcagcactcaaggcccctgggtttggagatcgcaagagccagtaccttgatgatattgccatcttgactggaggtactgtaatcagagaagaggctggccttactttggacaaatctgggaaagaggttttcggatattccttcatagtggttctcaccaaggatacaaccacaattgttggtgatggaagtaccc

SEQ ID NO: 47327 - DNA, 411 bp, Glycine max
  Clone ID: LIB3139-115-P1-N1-A12
ggggatcttaggattcattgtgagagaaagccacaaaagcctatggtggtatataggaggatgggggaactgactttgccccagggcacttcccaaagtgttaaaagaatgcctatttctatagggggaggagctggtgcaaagaatgctattctcatgaatatgccaaatgctgttctttcaatgaggagatatttcgtaggagatctcgtgtttgaagttgaataagatgacttctacctacattaaatgcacaccctctgtcttcatagcatttggaaattaggctgatgacaccatcaattttgaggcttttccccacaagctggtgcaatttggagagattcaggaaaaagttgtattgaaattttcacaagaggaatttcttacagcttggtcaactcaggtgcg

SEQ ID NO: 47328 - DNA, 362 bp, Glycine max
  unsure at all n locations
  Clone ID: LIB3139-115-P1-N1-A4
cgaatgcganaatctgcgctcttgatcagagcngagcncccggagaaacaaaggtatcggcgatccgttcgtgtgtgtaagtatttttatatggcagacaagagaatcgatggggttgtgggaatcttttctaaattggctttgcagcctctttatcaagcaggaaaaggaatcttctcccatcggacttcagaatgctgcgaagacctcacttgtaaatgacattgctgctggcgggaatagcgaggacatgattcctacagtgggattcaatatgaggaaggtaacaaaaggaaatgtcacacttaagctatgggatcttggagggcaacctagattccgcagcatgtgggaacgttatt

SEQ ID NO: 47329 - DNA, 345 bp, Glycine max
  Clone ID: LIB3139-115-P1-N1-B10
aaaaaaatttaactcctataaaaaaaaaaaaaaaaaaaaaaaaagggaaaaaaaaaaaaaaaaaaagggaccaaaaaaaaaaaaaaaaaaaaaaaaaggggcggcccccaacaagggagcccggcaacccggaaataaatcccggaccgggcccggcaggcgaaccaccttccccaaaagggagccgaaaaaaagctgggcgaaaccagggccaaagcgggccccggggggaaaaggtaacccgcccacaaatccacacaacaaacaacccggaagcaaaaaggggaaagcccggggggcccaaagagggagccaacccacaaaaaaggcggggcgcccaccgcc

SEQ ID NO: 47330 - DNA, 405 bp, Glycine max
  unsure at all n locations
  Clone ID: LIB3139-115-P1-N1-B11
gnagccctttcgctgctgtcatagnnccaaaaagagnaggaaaatgaggtttaagagggtagtgagggtaccggctataagcttgaagatggctgatattccaccagatgattattcttggagaaagtatggacagaaaccaattaaaggatcacctcatccaaggggttactacaagtgcagtagtgtgagagggtgtccagcgcgaaaacatgtggaacgagctttggatgatccagctatgctggtggtaacctacgagggagagcacaatcacactctctctgctgctgatgctactaatctcattctagaatcgtcttgaaagtcgtaaccaaatcatttttttttcgtgacaaggttttaattaagtagtagaagaaacgcataccattattaatcaac

SEQ ID NO: 47331 - DNA, 355 bp, Glycine max
  unsure at all n locations
  Clone ID: LIB3139-115-P1-N1-B12
aagggccacccaancgnnagacgaagaaacaaccaagaaaggcacacgacagggcgagggnaagnncggcgacagcaacccacncaccgaggganccaagaggaagagnancaccgaaagcgaagacggcacgaccagcccggcgccgancggcccgggnaaacgaacgcgaaaacacccnaancngggcgacgcgaagcccgangaagcggcccaagaaaccgngaanaccgnngcgcaaaccccgagaaaancggccccactcaaggtctccgaagatgggaaaaaatgtggcaggaaaactgaactttcaaagctagaagatgttgagcaggtggagataagaacacttgct

SEQ ID NO: 47332 - DNA, 311 bp, Glycine max
  unsure at all n locations
  Clone ID: LIB3139-115-P1-N1-B4
ctcgagccgcccttttaatgatttgttagagggaaacnncnccgtcgatattaaatctcgctctagatgggaaaaagtaacctctacaaaagcacaatttgttagtggaaaaaccttcaaatatgatataatgggggctggttcacattcttcaggagatcttcccgaaacggaagatcaagaaaaacccaaaaagattgataccacattgagacaaagaatagatcctcaatacactgcgcgccacgctaaaagggcaacaaatttgtttaaaccgtatgtagatgatgttgaaacccccaaagggtcta

SEQ ID NO: 47333 - DNA, 424 bp, Glycine max
  unsure at all n locations
  Clone ID: LIB3139-115-P1-N1-B6
gtgatnncancacatactctgctctagcagnacncaactatggaatccattgctttacaggtaacagtaagactcagcacgcaacagttaaatctaatccagggagagcgaatcacaaaccctcgttccatttccccttctcgaaggtttgtgactttcttcaagcaaagatcgcaattgcatttgtgggaatcggcgagaaaaatgcagggttggttctcggggcagagcagcgaggaggaggcgaagccggcgtcgtcgttgctcgccgattggaactcctacgcatccgcccaatcctctgaggactcctccgctttccccttcgatatcgaatccgccgttaggtctgccaacgacaccgtttccggcactttcagcgtggtttctaaaggtgtgagagatctacctggcaatttccagt

SEQ ID NO: 47334 - DNA, 407 bp, Glycine max
  unsure at all n locations
  Clone ID: LIB3139-115-P1-N1-C10
atcccttctgaanctggattgaataagaatcatcaatggagggagtgctgtccgcgaatgagcaacagaccatggtctcttctttcctggaggtcgctcagggccagaccgccgagactgcgcgccagttcctccaggccacaagttggaagcttgaggaggctcttcagctgtttctgatagggagtgaaggtggggccgtgccgttgccggtgccgccgcctccgttgttgcacactccgcctttggaaaatgtcgattcctggaccgatcaacagcctttgagtgaaccgaggaaggacgctgcggctgcaagtgaaagtattggcctcaatgatgcggaagaggtgcgccctcccttgtctgttattagggaaactctctacgacgacgcgttgcttgtttgg

SEQ ID NO: 47335 - DNA, 414 bp, Glycine max
  unsure at all n locations
  Clone ID: LIB3139-115-P1-N1-C11
agaatgtgttttctcatctaccaccgnctgatggtgaacctgccgctggagttggaaaggtgtttttggagtacgttgatattgacggtgctacaaaagcccgtgccggattaaatggccgaaaatttgatggaaatcaagtagtagctgttttctatccagagaacaaatttgctcagggagattatgaaggttaattatgtggtgtttggattctatcttgattagcaaggataatcttttgtattattatcataaacttgtaagctagagttgtggtcatagtacagaaactgttctatttagatgcgagtagtaagagagacatgatgacaatttgttaaaatagttttaccggtctacatggatctgtgtggtcccttgagatattctctatttgcttgagtgaggttt

SEQ ID NO: 47336 - DNA, 405 bp, Glycine max
  Clone ID: LIB3139-115-P1-N1-C12
cttatagatgacttctccctacattaaatgtacagtctctttcttcatagcatttggaaatttggctgatgacaccatcaattttgaggcttttccccacaagctggtgcagtttggagagattcaggaaaaagttgtgttgaaattttcacaagaggaatttcttacagcttggtcaactcaggtgcgtcccgcaacgactctgttggctgatgggtgcccatatttgtatgctatggtgcatgatagttcagtgtctacaataccaggtgattttgtcattggtgttaagttgacaaccataaacaatatgtgtgcatatgggctcaatcctggtatttcaggttctcgtcttttgggcaccattcctcagtccatttcacagcaaactgtttggaatcaaat

SEQ ID NO: 47337 - DNA, 422 bp, Glycine max
  unsure at all n locations
  Clone ID: LIB3139-115-P1-N1-C6
gcagcgcactcanctttatttatgaatgattaaaatggnggccacagttggtattcctgagaatacaggtatagcattggcctgtgctatgaatagttcttttagggggcgcgccagttctgatatttacaccatctgctctcaagactgtgaattatggaatcctgcttgcacaaaagcaatgactatgtcatttaatccaaacccgtgttctgatgcatggagtttggaatttctgaagcgtaccggatttcattgtgatatcatttgtgtcactggatggactgccaccccaatgcatgatgtttaagttacaattgattggtttatttcctctcaggaatgtgttcccaggacctattgtgttttaatatcacaaaaatccttttgtgttaaataggggggtgggaaaactgactttc

SEQ ID NO: 47338 - DNA, 399 bp, Glycine max
  Clone ID: LIB3139-115-P1-N1-D10
agtttagctactcttctatgggaaagattgccctagccaatgtcctcttggtccttctcttgaacttgagcactttgctcaatgttcttgcttgtccctattgcccttacccatctcccaagcctcctccaaaaaagcctcccattgtgaaaccaccagttcacaaacaaccaaaaccatgtccaccacccaagtcatctccaaaaccaccccatgtacacccaccctatgtcccaaaacctcctcactaccctaaaccaccagttcatccacatccaccccatgtcccaaaacctcaccctaagcctccactgcatccacatccaccttatgtcccaaaaccaccagttgttaaaccaccctatgtcccgaagccaccagttgtgaaccctccctatg

SEQ ID NO: 47339 - DNA, 418 bp, Glycine max
  Clone ID: LIB3139-115-P1-N1-D12
aaaaaaatttaaatctaaaaaaaaaaaaaaaaaaaaaaaaaaaaaaaaaaaaaaaaaaaaaaaaaaaaaacaaaaaaaaaaaaaaaaaaaaaaaaaaaaaaaaaaaaaaaaaaaaaaaaaaaaaaaaaaaaaaaaggggggggccccccccaggggggcccgcccccccggaaaaaaatccgggccgggccccggggggggccccagcttccccaaagggggggggaaaaaaggcggggggaaacaagggcaaaagggggccccgggggaaaaagggaacccgcccaaaatcccccacaaaaaccgggccggaggcaaaaagggaaaacccggggggcccaaaggggggggccaccccacaaaaagggggggggccccccggccccttccccagggggaaacccggggggcccgcctg

SEQ ID NO: 47340 - DNA, 424 bp, Glycine max
  Clone ID: LIB3139-115-P1-N1-D4
agagggcggtgtctttgtatctttcttttagggggcgcgccaggggtgatatttacaccatctgttctcacagaccgcgaattgtggaatcctgcttgcacaaaagcaatgactatgtcatttaacaccaaacccgtgatctgatgcatggagtgaggaatgtctgaagcgtactggatttgattgggatatcatttgggtgactggatggactgccaccccaatgcaggatgttcaggtcacaaccgatcggtttattgcctctgatgaatgtgtgcccaggacctattgtgttgtaaatgcacaaaatactcttgtgccaaataggtggaggggacaagcgactgtcccacagggcacttacgcgagtgtctagagaaggcctgtatctatagggggaggagctggggcacaaaatgctatt

SEQ ID NO: 47341 - DNA, 420 bp, Glycine max
  Clone ID: LIB3139-115-P1-N1-D5
gcttaggagagtattaacttatcttcttccgcttagtatggagaaccatttttgtgctgttgacgaccctcatagccatgctcatgccttttttcaacgatgtggttggaatacttggcgcttttgggttctggcccttaacagtttatttccctatcgacatgtatatttcgcaaaagaagattggacgatggactagtcggtggattggacttcaattacttagtgtcagttgcctcatcatttcattgttagctgcagttggttccatggcaggggttgttttggacctcaagacttataagccatttaaaactagttattaagtgagatttaaagaaggtcgtagaaatagaagtgtttaagcttgatgatattatagaaaactaatgataagttggtttgtgaaatttaagtata

SEQ ID NO: 47342 - DNA, 390 bp, Glycine max
  unsure at all n locations
  Clone ID: LIB3139-115-P1-N1-D6
agacaaggngaagacgggcaaggttggttcttttccttaacaccacaccataccatgtttagttttccaaccaaaaacgttgtctttgatttcttttctctttagctgcttcttttgtctctccaaactaacatccagattgctctgttactatcaaaaggccttctttcctcatttcggacgcacgctccccatccatgtctacttgtgtaaaatcccgagatgtttgtattgttggtgttgcacggacgccaataggtggtttacttggcaccctatcatctttttctgccacagagttaggctcaattgctattaagactgctctcaagagagcaaatgttgtcccatcactcgtgcaagatgagttttttgggaatgttcttagtg

SEQ ID NO: 47343 - DNA, 356 bp, Glycine max
  unsure at all n locations
  Clone ID: LIB3139-115-P1-N1-E10
tagaaagttgncctctttgacnnncncaagagaaactntaagcagatgtttaatgttttgtgggtggctcctgaggacaaggcgagtttatggtcacaacttcattatgtttcgtgtaataatctggaaatgcaagaagcttatcttgtcaatctcgtaaatgtgttacgagaattgtatttgcacagtccagaggaagctcgccaattgagaaggaaagctctctctcgtattgaatggctgcaaaaagctgatgtgcctaccatagcacagattgaagagtttcattcgatgcataggatgatgaaagctcctgattcaaatgataatattgatctactggcgagcattgattt

SEQ ID NO: 47344 - DNA, 401 bp, Glycine max
  unsure at all n locations
  Clone ID: LIB3139-115-P1-N1-E12
aaanagcctcgngtgcttgtagaagaaggacgcggcacgaggcgatgtggtcggagaagaaggtccacgacatgatggacgcggctcggaagagagcgcaacgacgcgccgtttacctagccaagaggcgcggcgatcctcagcaatctattcagctcgtcggctttcgaagccgaacctatcgcgacgacgctctctaccaagccacgcaggatcagcagggcctgataccttggaatgggaaacaagatgtattgattgacagatttgatgggcgtgctctccttgatttcattcgcgattctagccacaggcgcgtcccggaaaagtctgaagaagaagaagagttagaagagtttgttaattttgagcgttatcgggatttaataaagcatcgccgt

SEQ ID NO: 47345 - DNA, 345 bp, Glycine max
  Clone ID: LIB3139-115-P1-N1-F11
ggaacctttatcctgatctctccggctccatcccgcgcgtcaccgtcatttcctccggaaagggcggcgtgggcaagaccaccaccaccgccaacatcggcctctccctcgcccgcctgggcttctccgtggtcgccatcgacgccgacgtcggcctccgcaacctcgacctcctcctcggcctcgagaaccgcgtcaactacaccgtcatcgaggtcctcaacggcgactgccgcctcgaccaagccctcgtccgcgacaagcgctggtccaacttcgaactcctttgcatctccaaaccccgctccaagctccccctcggcttcggcggtaaagccctcacct

SEQ ID NO: 47346 - DNA, 110 bp, Glycine max
  unsure at all n locations
  Clone ID: LIB3139-115-P1-N1-F3
agaacacnaccaacccagccgccgggcacacggcacaccgagccacgcccacgaccaagacggccncaaaccnagcanaggccgnggaanccagaagggcgcacgaaaag

SEQ ID NO: 47347 - DNA, 328 bp, Glycine max
  unsure at all n locations
  Clone ID: LIB3139-115-P1-N1-F8
ggnncaacttggcgttactcagatcactccaacccatgtatctgatgaagattcaaaccttttcgcgatgcaactagccagtgcctcagtactccctatggttctcaaatcagctcttgagcttgatctgttggaaatcatagccaaggctggccctggtgttcacctttccccctccgacattgcttctcggctcccaacacacaaccctgatgcacccgttatgttggaccgtatattgcgcctcttggcttgctacaatatcctctctttttctcttcgcactcttcctcatggcaaggttgagaggctctatggtctcgcccct

SEQ ID NO: 47348 - DNA, 307 bp, Glycine max
  unsure at all n locations
  Clone ID: LIB3139-115-P1-N1-F9
ccgnggtctagccctgtttttggataggacacangngaagcaaactgcatttgtccggtcattatggcacatgggcttacaacttttccgcaaacatctttcattgtctccggaagtagaacacaaaactgttacaggtcttctacgaatgattgaaagtgaaagaaaaggtgaagcagtggatagaactcttctaaaccatcttttgaagatgtttactgctttgggaatttatgcagaaagctttgagaagccattccttgaatgcacatctgaattttatgctgctgaaggcgtgaaatacatg

SEQ ID NO: 47349 - DNA, 421 bp, Glycine max
  unsure at all n locations
  Clone ID: LIB3139-115-P1-N1-G1
ttttaanngcctttcggttcttatttaccatgnggncagangggagcatgcccctgtaggtgaatagttaattaaaatgagaggaacaatgtcaatgggaacttctcctcttgccgttgaagctagacaccgtttgcctgcatccattgaagatttatacaaacgaagacttccaagaaacaaagcaaaagatgcagagaagcctttccacttatctgtccaagataggagctcaagatgcaaattgtctttcttaaaacttatcctattgataaccatatgcggcatttttgtaaccctcctatactctccggaagtttacaataccaaccatttatcaagctctggcactcggtggatatggggtgggtcaaatccctcgtcatgtccaatgtagccactgactgggatgacatactgg

SEQ ID NO: 47350 - DNA, 351 bp, Glycine max
  unsure at all n locations
  Clone ID: LIB3139-115-P1-N1-G3
caaannggaccacggagaagaaggcattagaagcgcccaaaaggccaggaagcaaaccgactggaattgaaggaaaaatcaatgcaaggaacagtgatccaagtctgagaaaccggactgggccagttcagctgccatacactttgctccatcgttcaagtgaggaagggttgactttcaaaggaattcccaacagtatctctatctaattaaaaagagtttgtggtttccttatctatgttgtacttctgaataacatagactttatgcatgtctatgcgtaattattgcctgaacttctgcactattgtatttggatgctcctggttttcatataataaagtgtgttct

SEQ ID NO: 47351 - DNA, 400 bp, Glycine max
  unsure at all n locations
  Clone ID: LIB3139-115-P1-N1-G5
ctcgagccgantcttcttgtgattataacnnaannagngnncatgaatatgtcaagccttactttagcggttctaaattgaaaagctttctagctggtcataatatcaccattactgatggtattgacaaaactagtgcaactttgcaatttagaaagttagcagattgtgattttctcaagagaaactttaagcagatgtctaatgttttgtgggtggctcctgaggacaaggcgagtttatggtcacaacttcattatgtttcgtgtaataatctggaaatgcaagaagcttatcttgtcaatcttcgaaaagtgttacgagaattggatttgcaccgtccatatgaagctcgccaattgagaaagaaagccctttcttcgatgaatggctgcaaaag

SEQ ID NO: 47352 - DNA, 369 bp, Glycine max
  unsure at all n locations
  Clone ID: LIB3139-115-P1-N1-H1
cagggcgcaggttcatttttcatggacattcgtccaaacatcngacccataaagtgcgagtccaaattgttacatctgaaaagagttactggcatgtgtatgatcctgacaagtttcagatgtttgacaacagtgaaataggtctttattctaatcccacttnggaagatatcccacattcagcttgggaccttttttgctgggacagtgagaaaactttgccaaataatatttctgcagaattgctctcttgcaaattggatactgttactggccaatattatcctgagtgggctccaatttattgtcgagttcatcgtcaaccaattcacatcactgaaggaaattatgtcagaaagcaagatgtca

SEQ ID NO: 47353 - DNA, 416 bp, Glycine max
  Clone ID: LIB3139-115-P1-N1-H10
ctcgagctgatatctgctcgagcggctcgagctcgagccggtcaaaaacaactacttcttgcgaacaaactgcacgaaaccgtttggccaccctcgcagctcacttgcttccctccgacgccacctccgccgccgcgatcctccacccccaccggctctccggccccaccggagacttgccgccggcgaacctgaagggcacccttaccgtcgtcgacgagaggaccggcaagaagtaccagatcgaagtcaccccagatggcaccgtcagagcctctgacttcaagaagatatcatctgggaaaaatgacaagggactcaaactttatgatcctggctatttgaacactgctcctgtcatctcaaggatttcttacattgatggtgatgctggaatccttagatatagaggatat

SEQ ID NO: 47354 - DNA, 413 bp, Glycine max
  unsure at all n locations
  Clone ID: LIB3139-115-P1-N1-H11
gctagtgttgctcataatcaaatngagnnaccaactgcggaggagtttcaaccattgaactttgatatatattatgacccaagaagcgagctactggatggcaaattattctcccctgtacttgcacatattcaaccagaatttcattatcaagcaaacatcgaatcagatggtcgatatgggcttcaatatggtacaaatgagacaaacatgtcagactttttgaattcagttgttaactgggatcaagtaccctttgaggatcccaattgtcaacagcagagctaccccttgtttaatgttaaggataacatattaaacagcgacttagattctgaacttgccaatatgacatgtatgcaagctggttatgcagagggggcaattgacggaaggattcctttgttgataac

SEQ ID NO: 47355 - DNA, 231 bp, Glycine max
  unsure at all n locations
  Clone ID: LIB3139-115-P1-N1-H3
agannagnnnagcatcccnctctatctgncannnactncagaaataaatggggttgatatgatagtgattatcataaaaaaagttacatttctgtgattttggtgtccaccgaattcatttacctgtatgggcctattttttatggatatattatatacaatattattgtaagcatttgtaactttgttaatagaaacattaggatttagccacttttataataatatttg

SEQ ID NO: 47356 - DNA, 415 bp, Glycine max
  unsure at all n locations
  Clone ID: LIB3139-115-P1-N1-H4
atttctctctccattatgttttctactcacaatgagttntatgcacttatgctagtggtggtggttggctccatggtggcttcctgtggtgctaacttcaaccaagactttgatctaacatggggtgatcaccgtgctaagatattcaatggtggtcagcttctatctctttctctggacaaagtctctggctccggcttccaatccaagaaagagtacctatttgggaggatcgatatgcaactcaagctcgttgctggcaactctgccggcactgtcactgcttactacttgtcgtctcaagggccaactcatgatgagattgattntgaattcttgggaaacgtgagcggtgacccttacattctccacacaaacgtgtttaccaaaggccaagggaacagagagcaacagt

SEQ ID NO: 47357 - DNA, 353 bp, Glycine max
  unsure at all n locations
  Clone ID: LIB3139-115-P1-N1-H5
ggaaaagnagcagttggatatatttactagaccagcagcactccttgtgatattcatttggagaatgtcctatgcccttaaacatccaaacgaaccgcaagacgatgatgaggcacacacgccagggcctaagacgctcccaattattgcactcctgcacatgctgggaagactcacacattagcaccttcaagccctatgcctaatgtatggaccgatgatgcccatcaagttcggtcaagtacaaaccattgttgacccctcacctgaaactgctgagctattcctgaagacccacgacactgtctgtgctagcagggcataaactcaagcatcggaatacaatgcttatg

SEQ ID NO: 47358 - DNA, 427 bp, Glycine max
  unsure at all n locations
  Clone ID: LIB3139-115-P1-N1-H6
actcaagttcaccataagcattctcaacaagcactnctcttatttcctatcacaccctattacagattcacaagcgcagacacttcaaatggctctggaagctcttcaatcacccagaactgccactccatcgtttagtccctttgaagaaaccaacctcagttacttggagacaccgtggaccaaaggaaagcgttctaagcgtagccgcatggagcagcaactgcaacactcttcatgcaccgaggaagagtacctcgctctctgtctcatcatgctcgctcacggcggcgccggcggtgtccccgccgccaagcctgctgtctccgacaacaattccgcgccgctacccgccgtcaaactgagctacaaatgttcggtctgcaacaaagccttctcctcttaccaagcactcggtggacacaag

SEQ ID NO: 47359 - DNA, 416 bp, Glycine max
  Clone ID: LIB3139-115-P1-N1-H8
ggaaagctttagctaattgtagtgatagggcctcattggtacaagtgtttttaacaaacagcaacagtacagagcattttgatgcatgtaagtggacaaaatcagaaccacattcctgggaattgatcttcccaatagaggtatgtggtcctaataatggttttgaaatgtggagttctgagtgggcaaatcaaacttcatggcatttgagtttccttattgacaatcccaaacagtccacagtttttgatattctcttgggaatctctcaagattttgaaattgctggtaatactcttatgccagctttttctgttccacaggctactgccaggtcttctgaaaatgcggaattctctgcatgatctggaatttgtgttttctttcattcaataaaggaaattgggcatgaccct

SEQ ID NO: 47360 - DNA, 428 bp, Glycine max
  unsure at all n locations
  Clone ID: LIB3139-116-P1-N1-A1
tccttaggctggaaattcggttcgagctcaagccgaattttttttttttttgggtggcaanaagcctagtttggatggttggattaccaagcaggttatgagcaagatggcagaaatgataaacagtctttgtgggggtgatgaaaaattgatgcgtgaaaggacgcacctgctgttggcttgttgttcaaggatggcaatttgtaagaaagatgtttggagagttgaatgtggaatcccttctggatttccgctcacagttatttgcaatagcatttttaatgagatgctcattagatatagctatgaaaaaatactgcgccaggctaaagctcaagtatgtgttacatccttaaaaaatttgttcttgtgtgtgatgggagatacttaataggtatgatatgcagctacttagggtctaatgaaag

SEQ ID NO: 47361 - DNA, 141 bp, Glycine max
  Clone ID: LIB3139-116-P1-N1-A10
ctaagtatagtttcattatcagcgtgtagtttaagctagctttgctatggttacgttctttgagatgagagtcttgatgaacagtaccattctgatgtattgctttccttgaaagttaatgcatgcttcttatcttctgtc

SEQ ID NO: 47362 - DNA, 437 bp, Glycine max
  Clone ID: LIB3139-116-P1-N1-A11
gagagagatttcgtatacgaattccgtgttttcggagttattcggagtgtttgggttgcacgtagaccacctggttatgcttttattgactttgatgaccgcagagatgcacaggatgctatccgtgaattggatggcaagaatggttggagggttgagctttctcacaactctagaggtggaggtggtggtcgtggtggtcgctctggtggttctgatttgaaatgttacgagtgtggtgaacctggtcattttgctcgtgaatgtcgcatgcgtggtggttcaggaagacgccgtagccgtagtccacccagattccgtaggagcccaagttatgggcgaaggagttacagtcctcgtgggcggtcccctaagcgccgtagtttgtcacctcgtggacgtagctacagcaggtcaccttcttatcgtgggcgtga

SEQ ID NO: 47363 - DNA, 382 bp, Glycine max
  unsure at all n locations
  Clone ID: LIB3139-116-P1-N1-A12
ggagaggcnnataggatgttcgcgggtgcaggtggagcgctgggccatcccccaccggattcccccaccctcgattcctccgagcaggtctacatctcctccctcgcccttctcaaaatgctcaaacacggaagagctggggtacccatggaagtgatgggtctgatgttgggggagttcgtggatgagtacaccgttcgcgttgtggatgtgtttgcgatgcctcagagtgggaccggtgttagcgttgaagctgttgatcatgtttttcagactaatatgcttgatatgttgaagcaaactggaaggccggagatggttgtggggtggtatcactcgcatcctggatttgggcgttggctttctggagtggacattaata

SEQ ID NO: 47364 - DNA, 441 bp, Glycine max
  Clone ID: LIB3139-116-P1-N1-A6
gagagttcttctctaagttatgctgatccagcattggcttcagctgtattttctccaactcacaaatcagctgtcttcaatcaatttcagcaccagcaaagcatgttggcacccctgaatactaattttgcctctaaaaattttgagcatcctttattgcaggcctcgttgggaatgtctccgcgaaatgtcgaacctatttctccaatgggttctaggatttctatgctagctcagcgcgagaagcaacaatttcgcagcttaagcttccaagaactcggctccaactctgctgctgcctctgccgattcttggtcaaaatggggatcacctaatgttaaattggattggccagttggtgctggggaagttggtaagctaagaaggtcatcatcatttgagcttgggaacaatggtgaggagcctgatttatcttgggtg

SEQ ID NO: 47365 - DNA, 220 bp, Glycine max
  unsure at all n locations
  Clone ID: LIB3139-116-P1-N1-A7
gcaacaatttcgaatctaggtcgcggaggatcggcagggaacaagttccgcatgtcactgggtctgccggtggcggcgacngagaactgcgccgacaacaccggcgcgaagaatctctacatcatatcagtgaaggggatcaagggaaggctgaaccggttgccgtcagcttgcgtgggggacatgggtatggccaccgtcaagaagggaaagctgatct

SEQ ID NO: 47366 - DNA, 422 bp, Glycine max
  unsure at all n locations
  Clone ID: LIB3139-116-P1-N1-A8
aaacaatttatcatcntatacacgtaattncttttcctcttttcctcttatccaattctaatcacgatcagacattaaatgtaaacacttctctatcaaaaatttgaacttagttcgcctcacacttttgttttgtcaccttgtgagagactaattccctctaataaacgcaacgttgttcatcagtggcacatacatatacagcatcacaattctttgaagggtgaaaaagcttgatcaagaattgaagcatattgatcttcagccatggctacacccttggcctaccaagagcaccttgcggcggcacccgaatggctgaacaaaggtgacaacgcatggtagctaacagcagccaccctcgtcgtcttcaagcatgccggtctcggatctctacgcagatagtgagaaaatggcaggac

SEQ ID NO: 47367 - DNA, 270 bp, Glycine max
  unsure at all n locations
  Clone ID: LIB3139-116-P1-N1-A9
ggacattttaaattgatctatagccaancagcgnncgggcnctgtttcttttagacccacccttgctcttctcttcccttgcaacttcaactcaacaacccttcccttctcaaactcattcttgcctttctttttgctcatactgtgatatttattgctacttacttatgattcctatccaatcatccatggccgaggaaccccaaaaaccagcctccgatgaagaagtggcgcctgctcctgcggacacaccaccaactacccaatttg

SEQ ID NO: 47368 - DNA, 428 bp, Glycine max
  unsure at all n locations
  Clone ID: LIB3139-116-P1-N1-B10
cgagaattttanttgctcagtccagaggaagctcgccaattgagaaggaaagctctctctcgtattgaatggctgcaaaaagctgatgtgcctaccatagcacagattgaagagttccattcgatgcagaggatgatgaatgctcctgattcaaatgataatattgatttactgttgagcattgatttgttgggtttacaaggagcaggtaaagcttttccaaacaaaattgtttttgatgataagcttgtgttggctaacacacaagaattctttgatggaaattttccagtggattcttggttaccaatttttgtgaattgtctttatcctgtaagtcaattaccttcagaagctgtcgttgtaaatgttacatgtggtagtggacgtcgtggtttacccaccactgcttggattagttctgcagc

SEQ ID NO: 47369 - DNA, 438 bp, Glycine max
  unsure at all n locations
  Clone ID: LIB3139-116-P1-N1-B11
caaacacattcagtgnttagcagcagcagcaacaacaagagaagaagatggctctgcaactatgggagacattgaaggaggccatagttgcctacacggggctctccccgcccaccttcttcacccttctggccctgatcctagccctatactacgtcgtttctgggctcttcccctcttccgaccaccgccacaacaccgcctcgcgcgacttggagccccagatggagcctctgcgaccccccgttcagatcggcgaggtcaccgaggacgacctcaaggcctacgacggcaccgatcccgagaagcctctcctcatggccatcaagggccagatctatgatgtttcccagagcagaatgttttatggacctggtggaccctatgctctatttgctggcaaggatgctagcagagctttagcaaaaatgtcttttg

SEQ ID NO: 47370 - DNA, 441 bp, Glycine max
  unsure at all n locations
  Clone ID: LIB3139-116-P1-N1-B12
cttgctgttttnttgnttttggaagaaaggntgnttaatggtcaagattgttatgtctgggaatgcaccactcaaaaggagtgattgggcctcattggtacaagtgtttttaacaaacagcaacagtacagagcattttgatgcatgtaagtggacaaaatcagaaccacattcctgggaattaatcttcccaatagaggtatgtggtcctaataatggttttgaaatgtggagttctgagtgggcaaatcaaacttcatggcatttgagtttccttattgacaatcccaaacagtctacagtttttgatattctcttgggaatctctcaagattttgaaattgctggtaatactcttatgccagctttttctgttccacaggctactgccagatcttctgaaaatgcggaatcctctgcatgatctggaattcgtgtttt

SEQ ID NO: 47371 - DNA, 180 bp, Glycine max
  unsure at all n locations
  Clone ID: LIB3139-116-P1-N1-B5
cccagcggaagggtggggtggaacccggcncaagggnaaacaacagngggcgcaggcacaagggagcgggaccaccccaaacaggggattcggggcgacggtcggagactctccggcgggtcgcaaaacgccggagcagcacagaaggggaaaacgtaccaacccggggacccagggaaa

SEQ ID NO: 47372 - DNA, 437 bp, Glycine max
  unsure at all n locations
  Clone ID: LIB3139-116-P1-N1-B8
cagctanctacattcagtttatttcggataagacattctatcgttcgttccataaccctctcaagcttcacacgtgttccttttggacttgaaagggttagagtagatatccaaagaacaaaacttaagttaacatttgagctccagaggtcaccaacggaagaagagttagtagaaagaattgggatctcacttgaaagatatcatgaagtaatgaaggcatcaaaacccattttatcccttcattcaagacatataaccacgcaagaggagtatattaatgggattactgatgttgatggtgttaatggtgataataggaggcaacttgctgttctaagacttgctctcgatgatgtgcttgattccctgaagccaaaggagagcctagtgatcaggcagagatatggacttgatggcacgggtgacagaacatt

SEQ ID NO: 47373 - DNA, 432 bp, Glycine max
  unsure at all n locations
  Clone ID: LIB3139-116-P1-N1-B9
gccttttcacctttttctactaccacccactactcttaaggcatagttggtgaaaacaaagaaaaggatgatggtggtgccggtggcttctttctcaacagacacaaacaccatttgttccatttccattttcttctgattccttctctttctacccatctcatctcatttactatattttttttttggtccaccctcatattgaagactccgccttataggggcatctttatttctctttcattcttcttgtgtgtttgtgattattgccctgtcctctgacattgctcattcctttaattcccccacccatttcccacctttctctcactcttccttttcttctcgcaaacaaaactcatgggcgccgntcaagctcaatatcccttcaatgtacttttcctaaacagcaaaaccgggcaagaagcacat

SEQ ID NO: 47374 - DNA, 442 bp, Glycine max
  Clone ID: LIB3139-116-P1-N1-C10
gcaccaactgcattggctgcgacagtcactctccgacaacaacacttccgcggcgaaaaatgtctctggtggcgaacgaggatttccagcacattctgcgtgtgctgaacaccaacgtggatgggaagcagaagataatgttcgctatgacctccatcaagggtattggaaggagattcgccaacatcgcttgcaagaaggccgatgttgacatgaacaaaagggctggtgagttgagtgctgcagagttggatagtgtgatgactgtggtggcgaaccctaggcaattcaagatcccggattggtttttgaacaggaagaaggattacaaggatggaaagtactctcaggttgtgtctaatgctcttgatatgaagcttcaggatgacttagagagactaaagaagatcagaaaccaccgtggtttgaggcactactgggg

SEQ ID NO: 47375 - DNA, 428 bp, Glycine max
  Clone ID: LIB3139-116-P1-N1-C11
gcaaaatgttgatttgtctaccatagcacagattgaagagttccattcgatgcagaggatgatgaatgctcctgattcaaatgataatattgatcttctgttgagcattgatttgttgggtttacaaggagcaggtaaagcttttccgaacaagattgtttttgatgataagcttgtgttggctaacacacaagaattctttgatggaaattttccagtggattcttggttaccaatttttgtgaattgtctttatcctgtaagtcaattaccttcagaagctgtcgttgtaaatgttacatgtggtagtggacgtcgtggtttacccaccactgcttggattaattctgcaggtaacaatcgcttctcagatattaataaaaagattccaccgcacttgggaaaggtaagaaaattgtttttcttac

SEQ ID NO: 47376 - DNA, 435 bp, Glycine max
  Clone ID: LIB3139-116-P1-N1-C12
ttaagttttatatcttgttctctctgattggttggaaagattggacacgtttcatcaaaaggatggctacaatagaaggatcacaggttaacgttaccaaagaagtgatttcaactgtctttacaataactgcaaggacagcccttggcagcaagagcaggcaccatcagaagctaatatcggtggtaaccgaagccgcaaagatttctggaggttttgacttgggagatttgtacccttctgtgaaatttcttcagcacatgtctggcttgaagcctaagcttgagaagttgcatcaacaagctgaccagataatgcaaaacatcatcaatgagcatagagaggctaagtcaagtgccacaggagaccagggagaggaggaagttcttttagatgtgctcttgaagaaggagtttggcttaagtgatgaaagta

SEQ ID NO: 47377 - DNA, 436 bp, Glycine max
  Clone ID: LIB3139-116-P1-N1-C2
gaatattacatcgcttttggtatttagatcggcagcaggcgaatggggaaccgcccgagtctctgcgatgtggactatttcatattgcataccctagcgcaccagaaacatcaaagacagagttgagatcaatatacagtcagttatgtcaggatgatatgcctatggttagaaggtcggctgcatcaaatcttgggaaatttgctgcaactgttgaatatgctcatttgaaggctgatgtcatgtcaatttttgacgatcttactcaagatggtaattgaatacatatttcttgttctttgtagatggaaagtgtctgtcatttgtctgttacatatttacatgtgtgattgtgttgtagagtctcctgaatgtactttactcctttaatatgcaattgtaatcttggaacagatcaagattctgtcagattgtt

SEQ ID NO: 47378 - DNA, 392 bp, Glycine max
  unsure at all n locations
  Clone ID: LIB3139-116-P1-N1-C6
ggattatgcaggttgngtgggttcaacacccagcatcgangnncangagataaggtactacactcatacaccatgtaacaccaccatgggaaaaccatcaaatttaaacaccccatcaatcacaatttcctatcttgtgagaactcaagttgtcacgcgcactgtcacaaatgttgccgaggaggaaacctatgtgatcacagccagaatggaacctgctgttgccattgaagtcaaccctccagcaatgactatcaaagcgggcgcatcgcgtcagttttcggtgtcacttacagtgcgctcagtgacaagaaggtatagttttggagaggttttgatgaaagggagcagagggcacaaggtgaggatttctgttcttgccaatggacacc

SEQ ID NO: 47379 - DNA, 324 bp, Glycine max
  Clone ID: LIB3139-116-P1-N1-C7
gaatcggtatgggtggtgtaacaggaacgccgcgagatgcaaacgtgaaatcaaaggttgctggagacaccacgaacacccaggacggtgtgagcgtcaaggacaatgccaaggccatcataagaggggcacacagacgcacacaggagcaagactctgagcacttgcatatcaaacgtcaactcatcactgacaaaaactgctaaaggaagctcaagggggacgaccacttcaacgacgactaaacatgcagacggattcgcaccgttctgaagcacgaggagaaactactcatacgcgcaaccaaaggatatcgatacaaaa

SEQ ID NO: 47380 - DNA, 434 bp, Glycine max
  Clone ID: LIB3139-116-P1-N1-C8
tctgtgcataggatgatgaatgctcctgattcaaatgataatattgatctactgttgagcattgatttgttgggtttacaaggagcaggcaaagcttttccaaacaagattgtttttgatgataagcttgtgttggctaacacacaagaattctttgatggaaattttccagtggattcttggttaccaatttttgtgaattgtctttatcctgtaagtcaattaccttcagaagctgtcgttgtaaatgtcacatgtggtagtggaccgtgtggtttacccaccactgcttggattagttctgcagttaacaatcgctcctcagatatcaacaaaaggattcgcacagcacttgggaaaggtaagaaaattgtttttcttactagaattgatccttttccagtagctttactggctgttctttttggtgttaa

SEQ ID NO: 47381 - DNA, 435 bp, Glycine max
  unsure at all n locations
  Clone ID: LIB3139-116-P1-N1-C9
gctattgatacaatggtgtgtcgntncgnttttatcatcattgagaactaattaaggtacgtgtaaatgggtaagaagcttgatgctctccttggtagaaccttcaaggctgcaaagttcaaggctattgttaaccttgccatctcgcgccttgccgttctcaagaaccagcgccaggctcgccttagacaggcccgttctgatatccttgaactcctccaaattggtcaccttgaacgtgcttcgcttcgagttgagcatgtgatgaaggatcagaacatgttggatgtgtatgtcaggattgaaggatactgcaacctcttgattgagagggtccatctcatcgagcaagagagagaatgtcctgaggaactgaaggaggcagcatcgggattactctatgcagcttcaaggtgtggagattttcccgagatt

SEQ ID NO: 47382 - DNA, 417 bp, Glycine max
  unsure at all n locations
  Clone ID: LIB3139-116-P1-N1-D1
gcagcttccaatgtgangtgttttttacagcatatngnnnctcgcgaggccgatcctctggactcccaggtcgtcactgtaggaaaatttcagggaggtggtgctttcaatgttattccagactctgttgcaattggtggcaccttccgagctttttcaaaagaaagcttcatgcaactgagacagaggattgaacaggttatcactgggcaagctgcagtgcagagatgcaatgcaacggtcaactttcttgacgacgagaaacctttcttccctcctacagtaaacaatggtgacttgcatgagtactttaaaagtgttgctgggagtttgcttggcgtcaataatgttaaggacatgcaaccattgatgggatctgaggactttgcattctatcaagaggtttttccgggatac

SEQ ID NO: 47383 - DNA, 442 bp, Glycine max
  unsure at all n locations
  Clone ID: LIB3139-116-P1-N1-D10
agagnntttccntttattcaacaaaggaggacacagaaagcaacaatctttatcaatatactcatcttgttcacctcagctcactccttccttcatcttcctgcagctcttctgccaaaggtcccaaaagaaaagcatcattagaagtggtacacaaacatgggccatgctcccaactgaataatcatgatggcaaagcaaagtctaaaacaccacacagtgagattctgaaccaagacaaagaaagggttaagtacattaactcaaggatctcaaagaacttgggccaagatagtagtgtgagtgaattggactcagttacactaccagccaagtctggtagccttattgggtctgggaattactttgtggttgttggtcttggaacacccaagagggacttgtcactcatctttgacactggcagtgatctcacttggac

SEQ ID NO: 47384 - DNA, 443 bp, Glycine max
  Clone ID: LIB3139-116-P1-N1-D11
ctcgagcctaattggctcgaggctcctcgtcctgtcttgcattgaggccattgtaacagccacccttgcctcgcctttctctacctctgccaacgcaaatgctagagcgtacggcgggctggaagcggaggactgccagatccgctgccctctgagcacggagccgggccaggtggtcctcccggccctcacgcagtacaagaacgcatccggcgagtgggagaacacgatcgagtgctggcaggtcgacaccgtctcgacggagctgccgggcattgacaacgctttccgcctggactgggagggcggcttcgacgccgcgtaccagtacgtcttctacggccagtccttcatgccagcgcaccccgcgcccgagcccagtctcatcgtcatgagttccggaattggagatttgagggtcccttcccgccgatgcctgcgtg

SEQ ID NO: 47385 - DNA, 431 bp, Glycine max
  Clone ID: LIB3139-116-P1-N1-D12
cacaaatatttggtcctattttctccctctggttcggctcccgttttgtcgtcgtcgtttcgtcgccgctcgcggtgcaagaatgcttcaccaagaacgacatcgtcttggccaaccgccctcacttcctcaccggcaagtatatagggtacaacaacaccaccgtcgccgtttccccctacggcgaccactggcgcaacctccgccgcatcatggcgctcgaggttctctccacccaccggataaactccttcttggaaaatcggagggacgagatcatgaggctcgtgcaaaagcttgctcgggactcgcgcaatggcttcaccaaagtagaacttaaatccaggttttcggagatgacatttaacactataatgaggatggtgtcagggaagaggtactatggtgaagactgtgatgtgagtgatgta

SEQ ID NO: 47386 - DNA, 440 bp, Glycine max
  unsure at all n locations
  Clone ID: LIB3139-116-P1-N1-D2
tgatgacaacatnataatatttttaaataataatgcaagggctcttatggactactacaatccttctttcataaattatgaccaattgggtggtcgtagtaatagggaaaattcacctcaacttattccaaatttggtcatgcaaggtgatagctcttctttcattcgattagcaatggatgcaaccaaagccaagatggacagaaaatagctccttactggaagaactttcttggtagaacatatagtagtgacaatgaccatatattgatgttgatgtttttttttttatattactattatatatataacatgtatttattctatatatgggacgataagttggaagaaagacaaggcttccattattattattatatatatatgtgngtcgaggattacccatttgacgaccctggttgcaattgagaggagataac

SEQ ID NO: 47387 - DNA, 313 bp, Glycine max
  unsure at all n locations
  Clone ID: LIB3139-116-P1-N1-D3
acgccctgcgttcacgtacttctccactatggnnaggttaatcttggtgggtcccgctcaaaacgtnnttttaaattttcggggagcgttcaattatttgaagaacaaggggacaacgggcttagttgtcaacgttcggaattcaaacccatacctccatgcgaatcggactcggtttcggccccaatagattacctgagtaagcggcaatcgatatttctcgtgttcgcgaattattgctacgttttcgatgcgtttcgattacccacagcaacgtttattgagcaacgatcgcgcacgaaatggattaaac

SEQ ID NO: 47388 - DNA, 446 bp, Glycine max
  Clone ID: LIB3139-116-P1-N1-D4
gttggaaagggtgtaagatatatgtctcttataactatctccgaggataattgtatatctatgcatgattgggtacaagaaatggcctgggagattgttcgtcgcgaagaccctgaaagtcgtagttggttgtgggatccaaatgatgacatttatgaagcattggaaaatgacaagtgtactgaggccattagaagcatacgaattcacttgccaacatttaagaagcataagttatgccgtcacatatttgcaaagatgagaagactacagtttttggaaacttctggggaatatagatataatttcgattgcttcgatcaacatgatattcttgctgaaggacttcaatttttggcaactgaactaaaatttctttgttggtactattaccctctaaaattgttgccagagaatttttctccccagaaacttatatgaatatg

SEQ ID NO: 47389 - DNA, 201 bp, Glycine max
  Clone ID: LIB3139-116-P1-N1-D5
catcaaggaagaaaatccacagggataaggatgctgaaccaactgagtttgaagagtcagttggacaggcattgcatgatctggaaaataccaaccaggagcttaaaagtgatctgaaggatttatacataaactcagctgtgcaagttgatgtatatgggaaccgcacggatgttgtgattcatgtcccttacagattaa

SEQ ID NO: 47390 - DNA, 174 bp, Glycine max
  Clone ID: LIB3139-116-P1-N1-D7
gggggttgaaagaatagggaaaaaccaccccaacggactccaaaagcgggcaagcaaggcgaaagcgcatcaagcactcaaagagcaagggaagcaaccaaagccaagacggacagaaagaaacgccaaaccggaagaacggacatgggagaacaaataggagggacaacgacc

SEQ ID NO: 47391 - DNA, 309 bp, Glycine max
  unsure at all n locations
  Clone ID: LIB3139-116-P1-N1-D8
aggaggcgcgcggacggaagcncggaacgagggacgagaagagggttggggtgagaaggaaacaaacaagngcaaggaggggctacaagaagaggagggcccgaaccgacccaccgaaggggnggaaaaagnaaaagggaaaaaagaacncaacaaaaacacaanngggggaagcanggngagagcngancnancagcaaaaaagcagacggagggaacaaagacaagaaggagagaaaagcagcgcacacaggaagaacgaggaaggaagaacaaaggagggcagacaacgaccacacagagaagaca

SEQ ID NO: 47392 - DNA, 430 bp, Glycine max
  unsure at all n locations
  Clone ID: LIB3139-116-P1-N1-E1
ctcgagccgaatgtcgctttttgctgttggcttgntgttcaaggatggcattttgtaagaaagatgtttggagagttgaatgtggaatcccttctggatttccgctcacagttatttgcaatagcatttttaatgagatgctcattagatatagctatgaaaaattactgcgccaggctaaagctccaagtatgtttttacaatccttcaaaaattttgtttctttgtgtgtgtatggtgatgataacttaattagtgttcatgaatatgtcaagccttactttagtggttctaaattgaaaagctttctagctagtcataacatcaccattactgatggtattgacaaaactagtgcaactttgcaatttagaaagttagcagattgtgattttctcaagagaaactttaagcagatgtctaatgtttt

SEQ ID NO: 47393 - DNA, 246 bp, Glycine max
  unsure at all n locations
  Clone ID: LIB3139-116-P1-N1-E3
acgaagacngcaacgggcgcagtggaggaagcagaaaggcccccccccccacaggcggaaaccatagctgaggcagaaacaagcagccaaacagaggggagaggcgagacagcaagaaagcacctcccgagctaaaccggacaatgaccggcgcacgaagccgaagcagcaaaaaccacgcgcaagagcgcacccaaaaaacgcaagccggaagcacaacagaaacggcgcccaacgcccgaaaaa

SEQ ID NO: 47394 - DNA, 260 bp, Glycine max
  Clone ID: LIB3139-116-P1-N1-E5
gaaacccataatcggagttggcataacagcagcggctactcattcacgcgggttgcacgtgtacacgctacccgatctggattacgactatggcgcactggagccagccatcagcggcgacatcatgcagctgcaccaccagaagcaccaccagacttacatcaccaactacaacaaggccctcgagcagcttcaagacgccatcgccaagaaagattcctccgtcgtcgttaagctccagggcgccatcaagttcaacg

SEQ ID NO: 47395 - DNA, 206 bp, Glycine max
  unsure at all n locations
  Clone ID: LIB3139-116-P1-N1-E8
gcatggccgagcggttgatttttttanngacacggacncaaggggggactttaacagagaaggaggacccctcaccaccaaagaccaatcacaccaagactgacaatgacagccgtaggcaatagcgtgcccaacgaaacgcccataaggacacacctacgaaaaataactgccgccaggccaaagcaccaaagatgccacacaca

SEQ ID NO: 47396 - DNA, 428 bp, Glycine max
  unsure at all n locations
  Clone ID: LIB3139-116-P1-N1-F1
ccaggcctcaacagttctttctcatggccccttctggngttcagaaagaaagaatggagccagaggacatgtatgtgttatcacacagtgggtctgtcttgtctgctccatctcctaaaccttggccgcacaagcctcctaagtgtagtgattgtgatccacttttcaagaaggcatatgaaatgcgtgatgctgcggctgttttccacagtcacggaatagagtcttgtctcgtaacaatgatcaatccattatcaaaggagtttcgaatcactcacatggaaatgataaaaggaatcaaggggcatggctattatgatgaacttgttgtccccataattgagaatacggcctacgagtatcagctcacggaatcttttgctaaagctattgaagactacccaaaagcaacagcagtgcttgttcgc

SEQ ID NO: 47397 - DNA, 409 bp, Glycine max
  unsure at all n locations
  Clone ID: LIB3139-116-P1-N1-F11
cgcagacgtaccgttgtttgagggacgagacagaaagggccaggctgtattgagtaagagacaccaccacacaaaggcngcggttaggtaagggaataacaggagcggcaccctctcacagggcggacgcagccacaatatgctacggacccgccgcaaatagtctgattggcgcaaaccgactgagacagggacactcgaaaaacactgcatgagctcatcggattactccttcaagatcagacctttgtaacggatttgaccccaggaaacctcgtttgggaagaaactcgttctgggtatcaaaaaccatggatgaatccgcgagaacttctgctttcagagatggaaaaggcgatgaaaccatccaagtgggtgaacaagaagctatcatcgatgggtcaacccc

SEQ ID NO: 47398 - DNA, 421 bp, Glycine max
  unsure at all n locations
  Clone ID: LIB3139-116-P1-N1-F2
cacccgcacaacagtgntctatttagtgcaggggctcaatnatggagaaagcaatttaaagacagagcgttctgcttgaacatcttcaacccatttcttcaagttcaaatttttcctctcaaacccatcaatctacggatctctcagcttcattatgttttgctgggaattcttcgcatggtcaaacaggtggatcagatgatgacgtggtgattgtagctgcatatcgtactgccatctgcaaagcaaagcgtgggggctttaaggatacccttccagatgaccttcttgccacagttctgaaggctgtaatagagaaaacaaatgtggaccctgcggaagttggagatattgtcgtgggcacagtactggcacctggatcagatagaggaattgagtgcagaatggctgccttttatgc

SEQ ID NO: 47399 - DNA, 365 bp, Glycine max
  unsure at all n locations
  Clone ID: LIB3139-116-P1-N1-F3
gccaggcacgccttgnnatancattacaccncgacncgnncacgcgacccgttgctgctcttcttcgacctctcaagccggaaaagcataaagatggcagggacattcctatgtacctaagagtcggggaacgagggacaccctgacaagcgatgcgaccaaatctgcgatgctggactcgacgcttgcctcgagcaggacccagacagcaaagatgcctgcgaaacatgcaccaaaaccaacttggtcatggacttcggagaaatcacgaccaagggcaacgttgactacgagaagatagtgcgtgacacctgcaggaacatcggcgtcgaatcaaatgacgcgggactggatgccgacgactg

SEQ ID NO: 47400 - DNA, 61 bp, Glycine max
  unsure at all n locations
  Clone ID: LIB3139-116-P1-N1-F7
gaaaccganccancaagcaaggcnnagcaaaggggccaangaacanngcnngcacgccacc

SEQ ID NO: 47401 - DNA, 417 bp, Glycine max
  unsure at all n locations
  Clone ID: LIB3139-116-P1-N1-G10
gacggaaacaatggggatataatcgncncgcgangacggggaagctccattatagaacctgccggaccctcaacancancaagagacaatttaaactcctaaaggttctatgttggaccttaaaattcctcaatctaaaattgcactcaccaagaacacagttggaggaaccaatctgcgtagcgatctattggcaaactttttgacagagggcaattgtagagcaagtgatgattcgcagcgcactcatcgtattaaaggaatgattaaaatgggggccacagatgcaattcctgagaatacagagatagcattgccctgtgctatgaaaagctaatataaggggcgcgccagctttgatatttacaccatctgctctcaagactgggaattaaggaaatcctggctgcacaaaac

SEQ ID NO: 47402 - DNA, 367 bp, Glycine max
  unsure at all n locations
  Clone ID: LIB3139-116-P1-N1-G11
agcggcncgaggaaagccgagggattcaacggcccgaggggcagcacccncaacnaancaacggcncggagagccnccgcnnccaaggcnncgaagggggcgacaagnanncngggctttgtctccacgtcaagatcataaaacatcttttcaaacattgggacaatgaaagagtcaatagtagggtttgaacccaataaaaaagagggtaggtcccgtggtgcaagcaacaatggcaatcctggtaattcaatgaaacacgaggggtctttgattttgtctttgatgtattcaccgcgttcgtgaaagtagtaatagaagatgtcgagtatcgtagctggttgagtccacagcatcgctgttggga

SEQ ID NO: 47403 - DNA, 331 bp, Glycine max
  unsure at all n locations
  Clone ID: LIB3139-116-P1-N1-G12
ggnnctttgtcgatcattatgtgatatatgtgaaggaaattctagatttttgtggatttaatcccgaatacggcctacaagttctcgttgataaatcacttataaccatgcgtaggatagttgaaatgcatgacgttttgcgcaatttgggcaagtatattgttagagaaaaatcaccttggaatccatggaagtggagtaggttgtgggatttcaaagatctcaacatagtttcgttggataataaggcaacagaaaatgttgaggccatagttcatgaagaagactatgacattgaaaaagactctgacttagaagaagactctaactt

SEQ ID NO: 47404 - DNA, 114 bp, Glycine max
  unsure at all n locations
  Clone ID: LIB3139-116-P1-N1-G2
ctcgagccganntttttttttcttgnngagccgaggaaaaacaggcgaaatgagaaagaaaagaagaccaaccgccgggagaagaagnagnaccaanggacgacaaagcgaaga

SEQ ID NO: 47405 - DNA, 266 bp, Glycine max
  unsure at all n locations
  Clone ID: LIB3139-116-P1-N1-G3
ctgnnccaaaacggtattttaggttaagcaaaccaaacatctcgaatcatgggttcaacaggtgagactcagattaccccaacccacgtatctgatgaagaagcaaaccttttcgccatgcaactagccagtgcttctgtccttccaatgatcctcaaatcagcacttgagcttgatctgttggaaatcatagccaaggctggccctggtgttcatctttcccccactgacatttcttctcagctcccaacacagaaccctgatgc

SEQ ID NO: 47406 - DNA, 428 bp, Glycine max
  Clone ID: LIB3139-116-P1-N1-H1
gaaaaaaaaaaggtttatttatggatgatactgcagcagattattaagctcctgaccttaactttgatatggtggaccagtattaatgttgaatgtgcagttgcggggacacgcgacacacgtgtgataaactctggatgcagcacaatcaacgctttcaacccgggtagtttctttgggaatgtcaatgagacaatctcagagctgagaggagaaattaggaaccaaagcttgcactttggcacatcattgaaatccaaaggagatgtcaatacatatactatgtttcaatgcagaaactatctctccagaaatgactgtcttgcttgcatcaacactgcctccacccaaatccgggatatatgcaaaaaagccaacggcgcaagactcatctacaatgactgcttcctcaggtatgagagtgagag

SEQ ID NO: 47407 - DNA, 407 bp, Glycine max
  unsure at all n locations
  Clone ID: LIB3139-116-P1-N1-H10
anaccattcaattagttttcaccacacacgcganggcangagcatanatataacacgggggcacggcaaaacagacaacgccaggggccaggcgaacggagccgactacgggccctgcataccgccgacgaaaactgcctaccaccgtactgggcgcagaggatgcctcggctgctgctgcgggtgcctcttcagacgaatcaccaagctgatgctaaccgtgaacatcatcattggcatcggcgagatccttttgtggctcatagtccgacccaacgtggagaaatgccacgtgaccgaggccaccctgacgcagatgaactacacccccaacaacacgctgcactacgaccgcgccctgaacataacgtgaacgaaaccccaacaagaggctcggaatctactac

SEQ ID NO: 47408 - DNA, 400 bp, Glycine max
  unsure at all n locations
  Clone ID: LIB3139-116-P1-N1-H11
gcggcggcnaactacacattaatnctncgatggaaattttccagtggatttttggttaccaatttttcgtgaattgtctttatcctgtaagtcaattacctccagaagctgtcgttgtaaatgttatatgtggtagtggacgtggtggtttacccaccactgcttggattagttctgcagttaacaatcgctcctcagatatcaacaaaaagattcctacaccacttgggaaaggtaagaaaattgttgttcttactagagttgatccttttccaccagctttactggctgttctttttggcagtcaagaatgaaattctgagttctaacgccactaatcctatgctgacgcgacttcttgagaaccgaaagagtctcaaactatttggttgaccagcgt

SEQ ID NO: 47409 - DNA, 420 bp, Glycine max
  unsure at all n locations
  Clone ID: LIB3139-116-P1-N1-H2
tatgcacacatnagttttatggtctcaatcccggnatnncaggggctcgtcttttgggcaccattcctcagtccatttcacagcaaactgtttggaatcaaatggcaacagtgagaacaccattgaattttgattctagcaagcagagcttttgtcaattttctattgaccttctcggtggaggaattttagtggacaaaactggagattggatcacacttatacaaaattctccaattagtaacttgttgagagttgctgcttggaagaaaggttgtttaatggtcaagattgtgatgtctgggaatgcagcagtcaaaaggagtgattgggcctcattggtacaagtgtttttaacaaacagcaacagtacagagcattttgatgcatgtaagtggacaaaatcagaaccacattcct

SEQ ID NO: 47410 - DNA, 404 bp, Glycine max
  unsure at all n locations
  Clone ID: LIB3139-116-P1-N1-H3
aaaaaaaaaaaaattttnagtgagtttaaaaaaaaaaaacaaaccgcgggnnttttaaggggggcgggccctcccacncgcnggnnagagccatgtccatgcatcgctaataacttaattagtgttcatgaatatgtcaagcctcacttttaatggtccctaaaactgaaaagcgcttctaaaggctcataacagcacgagttgcagatcgatgaactccctaagcaaactgatgatacacagtacccaaaaacattcttctataaagaagaccttcatccaggcaaaacaatgaaagtacaattcaccaagcgtccctatgcacaaccttatggtgtatatacatggctaacggatattaaagacacctctaaagaaggatacttatctggacaatctcgtaa

SEQ ID NO: 47411 - DNA, 460 bp, Glycine max
  unsure at all n locations
  Clone ID: LIB3139-116-P1-N1-H4
gaaaccacnctngtgnngtactatgccgcacggggatnacatagaacgccacagatgagactatggctaccgtctcgatcacttcgagcgtaagcgcaagaaagaggcacgtcaagttcacaagcgctctgcaattgcccagaaggctctgggtattaagggcaaaatgattgccaagaaaaattatgctgaaaaggcgcagatgaagaagactttggctatgcatgaagaatcatcgtctaggcgcaagactgatgataatgttcaggatggagctgttcctgcatatcttcttgatcgtgataacacgaccagagcaaaggttcttagcaacaccattaagcaaaagaggaaggagaaggcagggaaatgggatgttcctctacctaaggtacgtnccgtggctgaagatgaaatgttcaaagtggtccgaactgggtaaagaaagaccaagcaatgg

SEQ ID NO: 47412 - DNA, 237 bp, Glycine max
  Clone ID: LIB3139-116-P1-N1-H5
catacacaaacacacggtacttcacaaacccacatacacacacataagcaaaaactctgacggcccggacgcaagggcttaaacacatcactacgtaactcaggagagtgcatatgaacggtggaaggatggaaccacctagtggacaacaccagcaaaagtctagccaggcatgggagaacatgttggcatggacaaaagcccaccaagagagaaaaccaacgccgcagccagaac

SEQ ID NO: 47413 - DNA, 438 bp, Glycine max
  unsure at all n locations
  Clone ID: LIB3139-116-P1-N1-H7
tnaacgaataacttggtttagacgacgacatagnagatggtaatatcaacttagctgatcaggaggctccaaatgatgttgataatggtaatgtactgcagcctttgcttgatgatgaaatcgacaacatcattaggggaattttggatgatgagcttgtccttgatcagcagcatgtgaatggttatcctgactttcctcaggttgttagtgaagaaacacaaagtactgttgtggatcagttctctgaggctgtgatgttccctgagccagtcagaatcacacagcctagcaaccaattttttgatgcacagcctagctttgacttcaatcagccagttacttctcatttgcatgtttctgaagcatctgaggtcacttctgcttccagcattaaagcaaaggagcttgattttaatgaggatggcttcttggaaa

SEQ ID NO: 47414 - DNA, 437 bp, Glycine max
  Clone ID: LIB3139-116-P1-N1-H8
gagacgctttttatagattgctatgaaaaattactgcgccaggctaaagcttcaagtatgtttttacaatccttcaaaaattttgtttctttgtgtgtgtatggtgatgataacttaattagtgttcatgaatatgtcaagccttactttagtggttctaaattgaaaagctttctagctggtcataatatcaccattactgatggtattgacaaaactagtgcaactttgcaatttagaaagttagcagattgtgattttctcaagagaaactttaagcagatgtctaatgttttgtgggtggctcctgaggacaaggcgagtttatggtcacaacttcattatgtttcgtgtaataatctggaaatgcaagaagcttatcttgtcaatctcgtaaatgtgttacgggaattgtatttgcacagtccagaggaagc

SEQ ID NO: 47415 - DNA, 442 bp, Glycine max
  Clone ID: LIB3139-116-P1-N1-H9
ctcgagctttcattgattgctagaatggaatttcgatgctcaggcatcttttttaccattctctggtctcttgctcttgcaggagagagccatgtccatgcatcgctacctgaggaagattattgggaagctgtttggccaaacactcccattcccactgcactgcgagagcttctaaagcctctccctgcaggtgttgaaatcgatgaactccctaagcaaattgatgatacacagtacccaaaaacattcttctataaagaagaccttcatccaggcaaaacaatgaaagtacaattcaccaagcgtccctatgcacaaccttatggtgtatatacatggttaacggatattaaagacacctctaaagaaggatatagttttgaagagatatgcatcaagaaagaagcgtttgagggagaagagaagttttgtgcaaaat

SEQ ID NO: 47416 - DNA, 106 bp, Glycine max
  unsure at all n locations
  Clone ID: LIB3139-117-P1-N1-A1
cgctcacagngaaactgccgccgtttatgtgttggatgtgacacacctatacacanaaaaccgccgttcacaagatgcacacggggcgaggcccatgcgattgtcg

SEQ ID NO: 47417 - DNA, 372 bp, Glycine max
  unsure at all n locations
  Clone ID: LIB3139-117-P1-N1-A11
cgcggaacgttgttgncttttaaannnngcgaggnacancaggaaggaaaatgtacaagctnagggggcaccccggaancaacccanactccanggaagggactggnncggccaanagannaccgagnaagggcaacganannccgcgncgcgaaaacgctagttttgatggtttgattaccaagcaagttatgagcaagatggcagaaatgataaacagtctttgtggtggtgatgaaaaattgatgcgtgaaaggacacacctgctgttggcttgttgttcaaggatggcaatttgtaagaaagatggttggagagttgaatgtggaatcctttctggatttccgctcacagttatttgcaatagcattt

SEQ ID NO: 47418 - DNA, 119 bp, Glycine max
  unsure at all n locations
  Clone ID: LIB3139-117-P1-N1-A12
cncaaaagtttgtttgcttgtgacagacacggagcnggacgagggggagttaccacnnngcatgacgccaancaaaaggaggagangagacgaaagcagcaacagcaanancgcgaggc

SEQ ID NO: 47419 - DNA, 220 bp, Glycine max
  Clone ID: LIB3139-117-P1-N1-A2
gaagggcaaaataatggccttgttatgaacttctacaaggaatcatgccctcaggctgaagacatcatcacagaacaagtcaagcttctctacaagcgccacaagaacactgctttctcctggctcaggaacatcttccatgactgtgctgttcagagttgtgatgcttcactgttgctggactccacaagaaggagcttgtctgagaaggaacaaatag

SEQ ID NO: 47420 - DNA, 310 bp, Glycine max
  Clone ID: LIB3139-117-P1-N1-A3
gcagtttggagagattcacgaaaaagttgtattgaaattttcacaagaggaatttcttacagcttggtcaactcaggtgcgtactacaacaactctgttggctgatgggtgtccatatttgtatgctatggtgcatgatagttcagtgtctacaataccaggtgattttgtaattggtgttaagttgacaaccataaacaatatgtgtgcatatgggctcaatcctggtatttcaggttctcgtcttttggcaccattcctagtctattcacagacacttgttgaataatgcacagtagacaccatgatt

SEQ ID NO: 47421 - DNA, 200 bp, Glycine max
  unsure at all n locations
  Clone ID: LIB3139-117-P1-N1-A4
agggaagaaccagcttttgtttcttttgatgacacgggnnncagnccgggcgactaatttatgtaatgcttccgccgagtttattcggctagaattgaagttgtgtttgcctttcatttcaggtgttattttagtgtattcatgttacattgcaactacttttaatttccatagacaatcaaagcttcaacgtttctgtc

SEQ ID NO: 47422 - DNA, 279 bp, Glycine max
  unsure at all n locations
  Clone ID: LIB3139-117-P1-N1-A5
acgcgcnggacgccaccgggcgggccaccaacaacaccgggggccgcacctaccagcaggcgacctacgacgtcaacacggggaagcccgcctacgacgtgtgggacgacatgctgggcacgctgtacgacctgcccggcgagggcgagacgtacgccttcgacatggcgctaacgaccgagatggtgctgaccgcagcccggggtacgagttcggcctgaggcgcgcgcccacgctgctgctgatcggngcgcgcgacaataccgctatcgggaagca

SEQ ID NO: 47423 - DNA, 232 bp, Glycine max
  unsure at all n locations
  Clone ID: LIB3139-117-P1-N1-A6
gatcganctactggngtgnnnttattcgnngggnnnacaaggagcagngaattcttttccaaacaagatcgtttttgatgataagcttgtgttggctaacacacaagaattctttgatggaaattttccagtggattcttggttaccaatttttgtgaattgtctttatcctgtaagtcaattaccttcagaagctgtcgttgtaaatgttacatgtggtagtggacgtggt

SEQ ID NO: 47424 - DNA, 106 bp, Glycine max
  unsure at all n locations
  Clone ID: LIB3139-117-P1-N1-A8
ggaaaacggctcgaggcgaaaattttnnttttntttcacacacnncacacaacaggacgagaattaatagaggagtggaaatgccctaccaagagcgcgntatttt

SEQ ID NO: 47425 - DNA, 73 bp, Glycine max
  unsure at all n locations
  Clone ID: LIB3139-117-P1-N1-B11
cgcccagcaggagagagccaagnccangcaacgcnacccgaggaagaccnaagggaagccggccggccaaaca

SEQ ID NO: 47426 - DNA, 311 bp, Glycine max
  Clone ID: LIB3139-117-P1-N1-B4
gttatgagcacgatggcacaaatgataaacagtctttgtggtggtgatgaaaaattgatgcgtgaaaggacacacctgctgttggcttgttgttcaaggatggcaatttgtaagaaagatgtttggagagttgaatgtggaatcccttctggatttccgctcacagttatttgtaatagcatttttaatgagatgctcattagatatagctatgaaaaattactgcgccaggctaaagctccaagtatgtttttacaatccttcaaaaattttgtttctttgtcgtgtgaatggtgatgataacttaaata

SEQ ID NO: 47427 - DNA, 300 bp, Glycine max
  unsure at all n locations
  Clone ID: LIB3139-117-P1-N1-B8
tttgcaaatttttgnnatagaacganacaactctacgccttgggcgtttgtttttctgaccaaacgggccttgcttagctctcacaagcaagcattatcaacaatgaagaaaattgtgttaaaggtggacttacatgatgacaggatcaagcgaaaagctatgaagacagcatctggcctttcgggggttcaatcagtttctgttgacattaatgacaagaaaatgaccttattgggggatgttgatccagtgagtgcagtgtcaaagctacgaaagcggtgcacactgaaatagtctca

SEQ ID NO: 47428 - DNA, 272 bp, Glycine max
  unsure at all n locations
  Clone ID: LIB3139-117-P1-N1-B9
gaacaagnttgngtgngtacgaccgnaaaaaacccaacaccaggagaatagtttttaggggggtgtggccctcaaatcaactgaaatgatgtacggaaaaaaattgaacaagatactacatacatgcacaagtgccctaagaacagctactacattcatgtacatgcaatattattgcgtcaaagacatgttcagcaattttatgttacatgaataaaaatgaacaacctttgctgcgggaggtcactctaacctaccctggggaaaggaat

SEQ ID NO: 47429 - DNA, 350 bp, Glycine max
  unsure at all n locations
  Clone ID: LIB3139-117-P1-N1-C1
ctaattaacactttttnttggnttttaaaggngaagnnngccagaaacaagatgggaaggaaccattttcagcagcaacactgngctgatgggagcatgtggatggagagtcagggtcagcaacagagctatgccttccaagaagagtcttggagccctgataacaactatggccacaaccacaagcaattcccaggcatgcacatgaacatgaacaacaacaacaacaacaaaaggcttggtgcttttgctgctgtggactctgacttctcaatgcanaaacatcatcatgggcatggcaacggcgtaggagccatgcacatgaacatgaacaggcatggtgggcaagt

SEQ ID NO: 47430 - DNA, 346 bp, Glycine max
  unsure at all n locations
  Clone ID: LIB3139-117-P1-N1-C11
acagangggattcctgacaatacaggtatagcattggcctgtgctatgaatagttcttttagggggcgtgccagttctgatatttacaccatctgctctcaagactgtgaattatggaatcctgcttgcacaaaagcgatgactatgtcatttaatccaaacccgtgttctgatgcatggagtttggaatttctgaagcgtactggatttcattgcgatatcatttgtgtcactggatggactgccaccccaatgcaagatgttcaggttacaattgattggtttatttcctctcacgaatgtgttcccaggacctattgggtttaaattcacaaaaaccttttgt

SEQ ID NO: 47431 - DNA, 395 bp, Glycine max
  Clone ID: LIB3139-117-P1-N1-C12
agcaagcagagctttgttttttttctatcgaccttctcggcggaggaattttagtggacaaaactggagattggatcacacttatacaaaattctccaattagtaacttgttgagagttgctgcttggaagaaaggctgtttaatggtcaagattgtgatgtctgggaatgcagcagtcaaaaggagtgattgggcctcattggtacaagtgtttttaacaaacagcaacagtacagagcattttgatgcatgtaagtggacaaaatcagaaccacattcctgggaattgatcttcccaatagaggtatgtggtcctaataatggttttgaaatgtggagttctgagtgggcaaatcaaacttcatggcatttgagtttcctattgacaatccca

SEQ ID NO: 47432 - DNA, 312 bp, Glycine max
  Clone ID: LIB3139-117-P1-N1-C3
acagcaaacgcgggtttatttaaatggcagcagtgagaacaccattgaattttgattctagcaagcagagcttttgtcaattttctattgaccttctcggtggaggaattttagtggacaaaactggagattggatcacacttatacaaaattctccaattagtaacttgttgagagttgctgcttggaagaaaggctgtttaatggtcaagattgtgatgtctgggaatgcagcagtcaaaaggagtgattgggcctcattggtacaagtgtttttaacaaacagcaacagtccagagcattttgatgcat

SEQ ID NO: 47433 - DNA, 315 bp, Glycine max
  unsure at all n locations
  Clone ID: LIB3139-117-P1-N1-C6
accgcacgnnnttttngttttttggagcganccgagaaaaactctgtatacatgttggtttaccaggacctccttacaggtgatgagcttctctctgactccttccgttacaaggaaattgagaatggaatgctgtgggaagttgaggggaagtgggttgttaaaggagcagttgatgtagacattggtgcaaacccttctgctgagggtggaggagaagatgagggagttgatgatgcagttcgataaggtcgttgacattgttggcacattcagacgtcaggagcaactccgcatttgatacgaatcagtttg

SEQ ID NO: 47434 - DNA, 271 bp, Glycine max
  Clone ID: LIB3139-117-P1-N1-C7
caactttggagggtccaacgttagcagattgtgattttctcaagagaaactttaagcagatgtctaatgttttgtgggtggctcctgaggacaaggcgagtttatggacacaacttcattatgtttcgcgtaataatctggaaatgcaagaagcttatcttgtcaacctcgtaaatgtgttacgagaattgtatttgcacagtccagaggaagctcgccaattgagaaggaaagctctttcttggattgaaaggctgcaaaaagctgatgt

SEQ ID NO: 47435 - DNA, 364 bp, Glycine max
  Clone ID: LIB3139-117-P1-N1-D1
gaaatagttgagtttcttttttttaacccagagccagagaatgttaagattctagaggaaaccattagtatgtgtgaagtgcctgcaataactggagaagaaagatattgtgcaacttcattagagtccatggtagattttgtcacttctaagcttgggaagaatgctcgagttatttctacagaagcagaaaaggaaagtaagtcccaaaaattctcggtgaaagatggagtgaagttgttagcagaagataaggtcattgtttgtcatcctatggattacccatatgttgtgtttatgtgtcatgagatatcaaatactactgcgcattttatgcccttggagggagaagatggaaccagag

SEQ ID NO: 47436 - DNA, 223 bp, Glycine max
  Clone ID: LIB3139-117-P1-N1-D11
accttcccatacataaccttggcactatcatcatggagatcaatggagagggtgcatccccacacagcataaattctatcaagttcaagggacctgagaaacagccttatagaacttgggaccactttcaacccccacaaaattggatgaacgatccaaatgcacctatgtactacaaaggagtgtaccactgtgtctaccaacataacccctatgcaccaac

SEQ ID NO: 47437 - DNA, 372 bp, Glycine max
  unsure at all n locations
  Clone ID: LIB3139-117-P1-N1-D3
cccaagactaaanngtgggtgatctctaaggggggacaagangaagaggctgatattcaagtcccttcagacttctttgctgctagntttctctatcagaaacaccacagcagaaaagaaaacccatcacacaaaacacacatacataattcacatggacaagttcaacatgccagagagttttaacgaccatctcctctggtttgattcatcactaaaatcagtatcagactcagcagagatgctctacacatataaaaaagtagctcatggcttctctacaaggctaactacgcaagaagcagagttgctctcaaagcaacctggtgttctctccgtcatcccggaagttagatatgaccttcacacaac

SEQ ID NO: 47438 - DNA, 368 bp, Glycine max
  unsure at all n locations
  Clone ID: LIB3139-117-P1-N1-D5
gccanactttagtggntctaaatngaaaagcttnctagctgggcataatattaccattactgatgggattgacaaaactagtgcaactttgcaatttagaaagttagcagattgtgattttctcaagagaaactttaagcagatgtctaatgttttgtgggtggctcctgaagacaaggcgagtttatggtcacaacttcattatgtttcgtgtaataatctggaaatgcaagaagcttatcttgtcaatctcgtaaatgtgttacgagaactgtatttgcacagtccagaggaagctcgccaattgagaaggaaagctctctctcgtattgaatggctgcaaaaagctgatgtgcctaccatagcac

SEQ ID NO: 47439 - DNA, 360 bp, Glycine max
  Clone ID: LIB3139-117-P1-N1-D7
gctctgtttttcttccttttttcaaggaacgttactaccatcccaaagattcaccgcctgctacggatgatcccgcgcaagacttggagactcaactgcgcaagattgcggacgggttactatcgggtcgctactccaagcctgacagtgatgtgatcgcgtcggaagatacccccgaagttcctcaccaaaagggccttgctcctgctatgctgaagcatcttatcggcagaggccacccggaattctctaccatgaggcagcaggactcgttcgaactgcttcttcaccttctcaagctcgtcactcgcacaccttatcctgcacctttcaaggaccctgtcgatgctttccggttcg

SEQ ID NO: 47440 - DNA, 361 bp, Glycine max
  unsure at all n locations
  Clone ID: LIB3139-117-P1-N1-D8
atctcagtgggctgngtttgcatcttctcagatttccctctcccatccaagttgacctttcattccacttcttcgaatcccaagtctcaggtctggtaaccttttgaggttgttgggtgcagaagggagcgatggctgcttcagaggagaatagtgcactgttcccaatattcattttgacaataatggccattcctatagtgccatatacaataacaaagttgtgccgttttgccagtaagaaatcaaagagcattcactgtcagtgctctgagtgctcgcggtccgggaagtaccataaatcgatattcaagaggatttcaaatgtctcaacctgtagtaacttgacattgttactact

SEQ ID NO: 47441 - DNA, 379 bp, Glycine max
  unsure at all n locations
  Clone ID: LIB3139-117-P1-N1-E1
caatagattactgattttgggcaatgatattctgtgttgcgattatgctagttttgatggtttgattaccaagcaagttatgagcaagatggcagaaatgataaacagtctttgtggtggtgatgaaaaattgatgcgtgaaaggacgcacctgctgttggcttgttgttcaaggatggcaatttgtaagaaagatgtttggagagttgaatgtggaatcccttctggatttccgctcacagttatttgcaatagcatttttaatgagatgctcattagatatagctatgaaaaattactgcgccaggctaaagctccaagtatgtttttacaatccttcaaaaattttgtttctttgtgtgtgtatggngatgataac

SEQ ID NO: 47442 - DNA, 189 bp, Glycine max
  unsure at all n locations
  Clone ID: LIB3139-117-P1-N1-E10
acaggggagacagngaaccgaaaagcttaccgtgaggacgatgcgcaactcgcacaaacaagacgggatcgcgtgcaacaagcagacaactacaagcaactcaaaaagggcgcgcatgaagcgagcaatacacggaacagaggcagacaagagagcgacgagacggccaaggacactgagcctagcgag

SEQ ID NO: 47443 - DNA, 386 bp, Glycine max
  unsure at all n locations
  Clone ID: LIB3139-117-P1-N1-E11
aaatatacgaatgatggtttcttagcacccggaggacaatcctggacagtgcaatggttgaaatttgacaactcctacttcaaggacatcaaagaaaaaagggatgaagatctattggtattgccaactgatgctgctctttttgaagacccatcctttaaggtatatgctgagaaatatgctgaagatcaggaagcattctttaaagattatgctgaagcccatgctaaacttagcaacctaggagccaaatttgatcctctagagggcattgtgatagatgattctccaaatgcanggggagagaagtttgtagcagccaagtactccactggaaagagtgagctgtctgactctatgaagcagaagatacgggctgaatatga

SEQ ID NO: 47444 - DNA, 441 bp, Glycine max
  unsure at all n locations
  Clone ID: LIB3139-117-P1-N1-E12
ggtgatgataacnnnttttgtgttcatgaatatgtcaagccttactttagtggttctaaattgaaaagctttctagctggtcataatatcaccattactgatggtattgacaaaactagtgcaactttgcaatttagaaagttagcagattgtgattttctcaagagaaactttaagcagatgtctaatgttttatgggtggctcctgaggacaaggcgagtttatggtcacaacttcattatgtttcgtgcaataatctggaaatgcaagaagcttatcttgtcaatctcgtaaatgtgttacgagaattgtatttgcacagtccagaggaagctcgccaattgagaaggaaagctctctctcgtattgaatggctgcaaaaagctgatgtgcctaccatagcacaaatggaagagttccattccatgcagaggatgatg

SEQ ID NO: 47445 - DNA, 292 bp, Glycine max
  unsure at all n locations
  Clone ID: LIB3139-117-P1-N1-E3
caaagcggaaggattatttgagtttgggnnaacacccgggcgctactgcatggatatcagatgtggagcatacaaaaacgggtggagctttgacatggagggcctccctgcagatctcatgcgcaggggaatggcggtaccagacccaacacaaccaaatggtgtaaagctcctaattgaagactacccttatgcaacggatggacttctgatctggtctgcaattgagaactggggccgcacctatgtgaaccactactaccgccatgcaagcctgatttggaatgacaaa

SEQ ID NO: 47446 - DNA, 405 bp, Glycine max
  unsure at all n locations
  Clone ID: LIB3139-117-P1-N1-E5
cctagattcangtttgtttgtcatttttgtcaacttgaccatttaattaaggaaaaaagatttcggcagtttaccaaattctctaattaatatttagttaaaattgtaaatttgatcttccagcttatctttagtaagcatgttgaccgccatgtgttattgaaagaattgaaaaatatccattaaagtactaagcaatttcattgaagtttcatccatcaagccactggaaactcaaaggaagaagccaagaagaactaactcggcgaaaaaaaacccaaataaaaaggagacagacatgagcgattatctcaaagagaaaggaggtcccaggttggttatcatgggagagaccaaacaacttgttacccttttgacacgatttcaagcggcaatgaaaatgat

SEQ ID NO: 47447 - DNA, 403 bp, Glycine max
  unsure at all n locations
  Clone ID: LIB3139-117-P1-N1-E6
ccggtttganataaatggcaacagtgagaacaccattgaattttgattctagcaagcagagcttttgtcaattttctattgaccttctcggtggaggaattttagtggacaaaactggagattggatcacacttatacaaaattctccaattagtaacttgttgagagttgctgcttggaagaaaggttgtttaatggtcaagattgtgatgtctgggaatgcagcagtcaaaaggagtgattgggcctcattggtacaagtgtttttaacaaacagcaacagtacagagcattttgatgcatgtaagtggacaaaatcagaaccacattcctgggaattaatcttcccaatagaggtatgtggtcctaataatggttttgaaatgtggagttctgagtgggc

SEQ ID NO: 47448 - DNA, 364 bp, Glycine max
  Clone ID: LIB3139-117-P1-N1-E7
agaaagcttttatttgcttccaaaagttgcatacttaaattgatttgcttctttactctcccatttgcttccgaacaagctttttatttatttatttatttgttacaatctcaagagcttaatataatgtttccattttttagtctttaatccattcttttcttcttcctttttgtggtgtttttgtgtatacatattccagatttaagtggtgggtcagctactatggcttcgtctctcttactggcggtggtggttgtgcttgatatggttgcttttgctctcgctgttgctgcaaagcaaagaaggaatactgcctcgttaaataaagacagtgcaggtagaaactactgtcaatatgact

SEQ ID NO: 47449 - DNA, 374 bp, Glycine max
  Clone ID: LIB3139-117-P1-N1-E8
gcaatactttttgttgttttgatttgcagcgcactcatcgtattagaggaatgattaaaatggtggccacagttggtattcctgagaatacaggtatatcattggcctgtgctatgaatagttcttttagggggcgcgccagttctgatatttacaccatctgctctcaagactgtgaattgtggaatcctgcttgcacaaaagcaatgactatgtcatttaatccaaacccgtgttctgatgcatggagtttggaatttctgaagcgtactggatttcattgcgatatcatttgtgtcactggatggactgccaccccaatgcaggatgttcaggttacaattgattggtttatttcctctcaggaatgtgtt

SEQ ID NO: 47450 - DNA, 367 bp, Glycine max
  unsure at all n locations
  Clone ID: LIB3139-117-P1-N1-E9
ctcacaaattttgtantattcctgagataagcaactttgccagtatgtggttcattcttctctttgtctccatttttaccacttcaattcttgagcttaggtggagtggggtcagtatagaagactggtggagaaatgaacagttctgggttatcggtgggacatctgcgcatctctttgctgtgttccaggggcttctaaaagtgcttgctgggatcgatacaaattttactgttacatcgaaggcatcggacgaggatggggactttgccgagctttatgtgtttaaatggacatcacttctcatccctcctacaacagtgcttattgtgaatttggttgggattgtggctggtgtatcctatgc

SEQ ID NO: 47451 - DNA, 364 bp, Glycine max
  Clone ID: LIB3139-117-P1-N1-F1
cagataccggattctgattactcggaagctcaacattcagctcctaagtcaccagctgtttcttcatccaaatctgaggataggggagatgccaatttagatacttcaccaaaggctactaatcatgagatgaaccaagcaatttctgagaaccccgattccaacaaaatgaagggcagaaaacctgtagaccgttcctcatgtggttccaacacaacctctagcagtgaagagactgagttactagagaaggatgagaaagaaaaggaagagcccaaaacacctgatgcgaacgttttaaataccgagcttagtaatcgtcgaagtagaagcattagcaaccttactgattcttggaaggagg

SEQ ID NO: 47452 - DNA, 369 bp, Glycine max
  unsure at all n locations
  Clone ID: LIB3139-117-P1-N1-F10
cgaacgaaagaaacgttcatgtgtctatctgngagctatggcggaggaggaggaagacgacgagagcttcggcgacttcacgttcgcgtcgtttccgagtcaaccgacctcaaacgacaccaatcccgtcgacgacgacgacgattggggcgacttcatgaaccattccaatcagatcaacggcaaacccttcgacgcgttcggggttcccacggatcccacgaacaaacacgtgaacgacaacaacggcgttgccgttcaggccgaggcggcgaaaaagcctaaaggagctatcccgctttcgatcttcggcgaggaggaagaagaagaggaagagcaacaggagaaacccgcttctgccaatgtttt

SEQ ID NO: 47453 - DNA, 367 bp, Glycine max
  unsure at all n locations
  Clone ID: LIB3139-117-P1-N1-F11
cggctcgaggtggngataaancgcgatctggaacagagtttagctgaaagaaaaagaatcgagttgaaatgggtttctttggtaccattttggggtttttgggatttggggttgggatttcgattggtctcgtggctggctactttctcttcatctacttccaacccaccaatgttgaggatcctgaaatcaagccattggcggagcaagagcaagagactctgcaacgaatgtttcccgagattcctctttggataaaaaatcccgattttgatcggcttgactggctgaacaaggttgtagaaatatatgtggtcgtatcttgacaaggcactttgtaagactgagaacaacattgcaaaacctt

SEQ ID NO: 47454 - DNA, 385 bp, Glycine max
  unsure at all n locations
  Clone ID: LIB3139-117-P1-N1-F12
cacagtttcggggtgnatgttatagtcgttcgagatggcccgtacgaagcaaactgctcgtaagtccacaggaggaaaggctcctaggaagcagcttgcaaccaaggctgcacgtaagtctgcaccaactactggtggtgtgaagaagccacatcgttaccgtcctggtaccgttgctcttcgtgagattaggaaataccagaagagtaccgagcttttgatcaggaagctccccttccagaggctggttcgtgaaattgctcaagacttcaagactgatctgcgtttccagagccacgccgtgcttgcattgcaagaagctgctgaggcataccttgttgggctctttgaggacactaacctgtgtgccattcacgctaagcgg

SEQ ID NO: 47455 - DNA, 354 bp, Glycine max
  unsure at all n locations
  Clone ID: LIB3139-117-P1-N1-F2
gaagattgaaatgtttttctactactttctggncttcttagtgaacttacctattttgatgagccaatacgatcacctttggcaccaggtgtcctcattgctggaattgtaccttcagagtcatcaatatttaaaagtgcattgcatcctttgcgcctttcttttagaacagcaaatggtggaacatgcaaaatcatatttaaaaagggtgacgatcttcggcaggaccagttggttgttcaaatggtatcactaatggatcgattgcttaagttggaaaatcttgatctgcacctaacaccatacaaggtgctagcaactggacaagatgaaggcatgttggaatttattcca

SEQ ID NO: 47456 - DNA, 114 bp, Glycine max
  Clone ID: LIB3139-117-P1-N1-F3
caacgatacaactttttttttcattcgcagaatcaaaatgagtggaagcactgattgacgcagcagcgggagctctcagacattaacaccaggtcgtgcagccggcgttacaaa

SEQ ID NO: 47457 - DNA, 369 bp, Glycine max
  unsure at all n locations
  Clone ID: LIB3139-117-P1-N1-F4
cggcacgtggngttttttttctctctcgaaacaganctggagtactgttgttgcacacaaagaaagaagaatatcatggggatactgcacgacgacgtagtgataatcagagagccagagaaagaaggtgaagcaaccgtcataaccgtcaattgccccgacaagaccggtctgggttgtgatttgtgtcgcatcattctcttcttcggccttagcattgtccgaggagacgtttccaccgacggaaaatggtgctacatagtattctgggtggtggggaagcaaaggacgaggtggagtttggtgaagaagacgctaattgaggcgtgccctacttgtttttcagcttctggaaatttctattaccgt

SEQ ID NO: 47458 - DNA, 402 bp, Glycine max
  Clone ID: LIB3139-117-P1-N1-F5
cacagcgttttagttttcgctgcgaagggataacacacatgaagatgtgtgtgaaggagcaggatgtggacgctttgagccaacaagttcgcgaagagacagtctattgggacggaagtacatagacaagacgacggcgaggactaccaatagccgacgccaccgccactggttgacccgacggagtttacgtcatggtccttttacagagcagggatagcagagtttgtggccacttttctgtttctatacatcactgtcttaaccgtcatgggagtcgccggggctaagtctaagtgcagtaccgttgggattcaaggaatcgcttgggccttcggtgcatgatcttcgccctcgttactgcaccgctgcatttaaggggcacataaacccgcggtgaca

SEQ ID NO: 47459 - DNA, 363 bp, Glycine max
  unsure at all n locations
  Clone ID: LIB3139-117-P1-N1-F7
gaacgaagttttcttatgtcgtctgttctggcccgcgggagcagacgacctgtcttcatcgccaaacaacctcaaaaacattcatcaacgttcactattaatccatccatcattaagtaagaaaataaggttcgatttttttatctttgttttgcttctgatccatcatggaggtgccgagttcctgggatgcccttcgcaaacaggcaagaaaacttgaagctcaattggatgagcagatgaattcttatcgtaaattggtttctaataatgtttctacaaaagctgacgctgcagagagtgatctagagtcttggattgagcgtttactaaaacaactccaacangtaaacacacagatgc

SEQ ID NO: 47460 - DNA, 369 bp, Glycine max
  Clone ID: LIB3139-117-P1-N1-F8
atcctatcggagtttagtaaatgaaagaaagaaaaccctagcttaccttttcaactttcaagatgcaaatctttgttaagacactcactggtaagacaatcacccttgaggtggagagttcagataccatagataatgtaaagtccaagattcaagacaaggaagggatcccaccagaccagcaacgtctcatttttgctggcaagcagcttgaggatggacgtacacttgctgattacaacattcaaaaggagtccactctacacttggtgctccgtctccgtggtggaatgcaaatctttgttaagaccttgaccggaaagacaatcacccttgaggtcgagagctctgacaccattgacaatgtta

SEQ ID NO: 47461 - DNA, 381 bp, Glycine max
  unsure at all n locations
  Clone ID: LIB3139-117-P1-N1-F9
cacgagccgtanttgntttaggagacaaagaggacgnanccaggcgacattttgcagatgagaccaactctttcagagaggcgacaatggagaatactgtagcaatcaaagccagcttaaggacatttgaaatggtgtcaggctttaaaatcaactttgcaaaaagcagctttggtgcaattggcatgccggaatcgtggaagcaaaacgagcaaattatttgaattgcagtttgctggccattcctttcgtatattcggggattcccattgtggcaaatccaaggagaagtcagttgtgggatccaatcatccataaatgccgagaggaaactaggaacatgggaaacagagacatatatcatttgggggggaaaattac

SEQ ID NO: 47462 - DNA, 400 bp, Glycine max
  Clone ID: LIB3139-117-P1-N1-G1
gtcactctctctctttctctctctcattcacacgaatcacactctccacagtgcgattcattcaccaatggatcgcaacggtgttctctctcttgcattcatctgcattgtagtcgccggcgtcggaggccagtctcccgccgcagcgccctcgaacactccggcaacccccgccgccgccactcccgcccaagcaccttccacaccgaattcaccagccccagttgcttctcccaaatcatctccaccagcttcgtctcctaagcccgcaaccgcaacccctgcttcgtcgccggcggcatctcctaccaccacccccgccgcgcctgctccagcgaccaagccacctgcagcctctcctcctccggcgccggttcccgtgagctctccccccgctccc

SEQ ID NO: 47463 - DNA, 354 bp, Glycine max
  unsure at all n locations
  Clone ID: LIB3139-117-P1-N1-G10
aatccttcaaaatttttgtttctttgtgtgngtatggcgatgataacttaattagtgttcatgaatatgtcaagccttactttagtggttctaaattgaaaagctttctagctggtcataatatcaccattactgatggtattgacaaaactagtgcaactttgcaatttagaaagttagcagattgtgattttctcaagagaaactttaagcagatgtctaatgttttgtgggtggctcctgaggataaggcgagtttatggtcacaacttcattatgtttcgtgtaataatctggaaatgcaagaagcttatcttgtcaatctcgtaaatgtgttacgagaatcgtatttgc

SEQ ID NO: 47464 - DNA, 389 bp, Glycine max
  unsure at all n locations
  Clone ID: LIB3139-117-P1-N1-G11
tgctaatatggaggntttggattgcactcaactgggtgtggctgagacccattaggatagagaggcgtctcaaggagcagggtatccaaggaaattcctaccgccctttgattggagacatcagagatatggttaagatgattaaggaagccaaatccaaacctatggatcctcactctaatgacattgcaccccgtgtgttgccttacgttgttcacaccatcgctaaatacggtaagagttcatttatgtggcttggtccaacaccaagggtattcatcttggatcctgacaaattcaaagaaatggctactaaggtctatgattttcaaaagcccgacactagtccacttttcaagcttctagcatcagggtttgcaaattatgat

SEQ ID NO: 47465 - DNA, 346 bp, Glycine max
  unsure at all n locations
  Clone ID: LIB3139-117-P1-N1-G2
gtgtgtgggtcggngtggatcgtcgtgctaccggtgaagcggcagggtgacctatccgtggaggttgcacgagtgagaatgcaggcatgagtagcgaatgaagggtgagaaacccttccgccggatgaccaagggttccagggccaggctaatccgccctgggtgagtcggggcctaaggcgaggccgagaggcgtagtcgatggataacgggttgatattcccgtacccgcaaaggagcgcccaagacgaaccccgttgtgctaaccacgtgaagcgccggcgaccttcgggtttatggtgtggagcctgggaacctggtgggtagtagtttagcgatggggtga

SEQ ID NO: 47466 - DNA, 353 bp, Glycine max
  Clone ID: LIB3139-117-P1-N1-G6
ctcgagctcgtttttctctagggaattcgcggtaaacaatgatgcggaaggtggctatgctgtttgatttgcttctttttttttttttaatttgcttgttgggtttggggtgtgcttgttgtagatttgtcagtggtacggaacaaggatccagagtggttcttcttctgtccgcaggaccggaagtatccaaacgggcacaggttgaaccgagctacgaatcatggctattggaaggcgacggggaaggatcgaaagattaagtctggctccaccttgattggaatgaagaaaactcttggtttctataccggtcgtgctcccaaggggaagaggaccaattgggttatgca

SEQ ID NO: 47467 - DNA, 414 bp, Glycine max
  unsure at all n locations
  Clone ID: LIB3139-117-P1-N1-G7
caaatgatggattggntctaagccaggtagcttgagatgtgtttggtagcgagacacaaagttatgttatgagagtgtgagtggctatataagctgtcgtcgcatgcttcgctcttaaacacaacaactcatcatcctatattctcttcttggatcatcttggttaagctgcagatcagaatagaataataataaataaagataagatggagactcatttggttttcttgcttggtttgatcttcactctagttgccggcgttggagcccaagcccaaggcccatccacctcttctgcgcctaccacaccccaagcatctccacctgccgtccagtcttctccgccacctgttcccttttcacctccaccctgttaggcgtcaccaccaggtttcacttcccctccatccccac

SEQ ID NO: 47468 - DNA, 420 bp, Glycine max
  unsure at all n locations
  Clone ID: LIB3139-117-P1-N1-G8
aagcagattanttgnnttttctctctcaaccataatagtcatgggtttgaaggaggattttgagcagtatgctgagaaagcaaagactttgccaccgactcaatcaaacgaagacttgcttatcctttatggattgtacaaacaggccaccgttggacctgtcaacaccagccgtcctggaatgttcaacatgagggacagagctaaatgggatgcatggaaggctgttgaagggaaatccaaggacgaagcaatgggtgattacatcattaaggtgaaacagctgctggaagcagctggcttgcctgcttgataacattgtcatgccttgctttctgattctgtgctagaagttcacaacagtttggaaataaacaattgcagtgtttgaagcctttatatcataatcatattaatttc

SEQ ID NO: 47469 - DNA, 357 bp, Glycine max
  unsure at all n locations
  Clone ID: LIB3139-117-P1-N1-G9
gacataagcgccttttatcttgcaatcgcgtntgaataaaaacaaaagaaattcctcttctgattctccctcgcgcgattcatttcattttctctttggaataacctgcagggttgcttccatttcaacatgtagagcgcgctctttgttgttttcatttctgacaagttctttttttttgttgcgttgcaaaatccttctcctcgaggcggcggcatggaaagcattgccgcgcagctgaagcgcggcatcttgcggcagttctcgtcggggtcgatgcggaggaacctatcgtggcggtgcacgcgccaggcctttgtggatccttgctggaacaacctgcgctttaatttcgcc

SEQ ID NO: 47470 - DNA, 375 bp, Glycine max
  Clone ID: LIB3139-117-P1-N1-H1
gcattttgatgcatttaattttacaaaatcagaaccacattcctgggaattaatcttcccaatagaggtatgtggtcctaataatggttttgaaatgtggagttctgagtgggcaaatcaaacttcatggcatttgagtttccttattgacaatcccaaacagtctacagtttttgatattctcttgggaatctctcaagattttgaaattgctggtaatactcttatgccagctttttctgttccacaggctactgccagatcttctgaaaatgcggaatcctctgcatgatctggaattcgtgttttctttcgcttgttcgtttgtttaattcaataaaggaaattaggcatgaccctcttgttgagtatgct

SEQ ID NO: 47471 - DNA, 388 bp, Glycine max
  Clone ID: LIB3139-117-P1-N1-H11
caaaacttgtgctttgttgcaatttagaaagttagcagattgtgattttctcaagagaaactttaagcagatgtctaatgttttgtgggtggctcctgaggacaaggcgagtttatggtcacaacttcattatgtttcgtgtaataatctggaaatgcaagaagcttatcttgtcaatctcgtaaatgtgttacgagaattgtatttgcacagtccagaggaagctcgccaattgagaaggaaagctctctctcgtattgaatggctgcaaaaagctgatgtgcctaccatagcacagattgaagagttccattcgatgcagaggatgatgaatgctcctgattcaaatgataatattgatttacttgtgagcattgatttgttgggt

SEQ ID NO: 47472 - DNA, 209 bp, Glycine max
  Clone ID: LIB3139-117-P1-N1-H3
cctcaaactaactttgttttttctttaagggatatgcaatgcaatgagcgtatgagagaatgaagagccggtggttcgcgtggcttttggcggaactaggcataatcggagccacactcttcatagtgagcttgatccaaacctcggagaacaacttgctatgttcgataacaagaacgatgcactatctgcaacatgaacccacctat

SEQ ID NO: 47473 - DNA, 358 bp, Glycine max
  Clone ID: LIB3139-117-P1-N1-H4
cacgagttgttcgttctgctttcttcacaaagagtaactcaggcttctaaatactttctcaaaaccattattattctctaatctttcgtttcttcaattaattaattggtttcttgctatggctgtggactctgcgatttcgtccccattgggtcccccggcctgtgagaaggacgcaaaggcgttgcggttcatcgaagaaatgactcgcaacgccgacgccgtccaggagagagtcctggaggagattctcacacgcaacgcccagacagagtaccttaaacgcttcgaactcgacggcgccgccgaccgccaagccttcaagtccaagattcccgtcataacctacgaagacgtc

SEQ ID NO: 47474 - DNA, 355 bp, Glycine max
  Clone ID: LIB3139-117-P1-N1-H5
caaaactcgtgctttgttttatcaatgcacgcagcagatcgcgattttctcaagagaaacaataagaccccccctatacctactggatctgctaatttgcctgaggcgagattatggtcacaacttgattatgctacgacccataatgtaacatctgctgaagcttatcttgacaatctcgcaaatgtgttacgagaatcgtattggtacatgacacatgactctcgccaattgagaaggaaagctctctctcgtattgaatggctgcaaaaagctgatgtgcctaccatagcacaaattgacacgcaacatttgatcttcacgatgatgaatgctcctgattcaaatgataata

SEQ ID NO: 47475 - DNA, 183 bp, Glycine max
  unsure at all n locations
  Clone ID: LIB3139-117-P1-N1-H7
cgaaggcatngttgnggttagccccggaccgagaggaggaggccgaccacattagaaagggagagctcgctccccacgccgaccaaccatcgggggagattctcaggaccgggtcagaaaaggagcagcacgccgctaaagctgcgaaggctggcccactgagtgaaaacccatcaagagcac

SEQ ID NO: 47476 - DNA, 310 bp, Glycine max
  unsure at all n locations
  Clone ID: LIB3139-117-P1-N1-H8
cgcccatntttccttttcgtaccagcagaggaaagagagaaaatttcagaacaaaaagaagcagaggaaaagagagatagagagagaagaaaagctgtgaagagaagagtctgaaatctgaatcataaataattggtttttgagatgaagaactgcgagttgtgcaagcttgcggctcggactttctgcgagtcggaccaggctagcttatgctgggactgcgacgccaaggttcatggagccaacttactcgtggaaagacacacgcgcacngctctntgccacgcgtgccagtcgcccacgccgtgga

SEQ ID NO: 47477 - DNA, 314 bp, Glycine max
  Clone ID: LIB3139-117-P1-N1-H9
cttaaaaatttcttttgtatatcaacctcaatggcatctcttggcgtgcgaccagttcttccccctccattaacttccatctccgacccacctcctcttttcgatggcaccaccaggttgtacatcagttattcttgcccctatgcacaacgtgtgtggatcgctaggaactacaaggggctacaagataagatcaatttggtccctattaaccttcaagacaggccagcttggtataaggagaaagtctaccctgaaaataacgtgccatccttggagcacaatggcaaggtgttgggaagaaagtcttgatt

SEQ ID NO: 47478 - DNA, 418 bp, Glycine max
  unsure at all n locations
  Clone ID: LIB3139-118-P1-N1-A10
cagaacaaaggctcttgcgtattttatagcanccaganagaatagcagatgccatctgtcttagttggttagggacacttcctttttacgtaacctgcagcgtcaaatatttcaacacacacaaattatttggttgcatgcctgattcgtactacagaaagagtactggactatttactttataaaaatggagtacttgacttggtgaagattgtgaagctagtagttccctgattcctctgcggcgccatatttcttgcgcaatttcataggagatgttcttctgccggtctcaacatgtattaggtgttgcctcatcaggcacttggtatatttgttgattgaaatgaactctactagtttgccatcttacccctcatatatatttttacaattcttttctttcgtgtgcctgata

SEQ ID NO: 47479 - DNA, 134 bp, Glycine max
  Clone ID: LIB3139-118-P1-N1-A11
caattcacaaaaactggcttcatcctgtaagtcaattaccttcagaagctgtcgttgtaaatgttacatgtggtagtggacgtggtggtttacccaccactgcttggattagttctgcagcttacttttctctt

SEQ ID NO: 47480 - DNA, 414 bp, Glycine max
  Clone ID: LIB3139-118-P1-N1-A12
ttcatttccagttcttcatgatgccaagagagctgatgctgctttgaagaatccgaagaaagagtgggatggagcaacacttagaaacaatgaatctctctgtaattctttattccctgtcagaggtccatcggttcctctggcacagtatgttcgctatgttgaccagtattgggacaaccttaatggtcttggacgtgctgatggaagtagactccgcctgctgacttatgacattgttctgatgttagctcggtttgcaacaggagcatcattcagtgcagatagccgaggtggaggacgggaaagtaattcccgattcctcccatttatgatccaaatggcacgccatctcctagatcaaggaaacccctcccagcgtcgaaccatggcaagggccgtatcagcatacat

SEQ ID NO: 47481 - DNA, 340 bp, Glycine max
  Clone ID: LIB3139-118-P1-N1-A2
cggctcgttctcgatccttatcggctcgaggctggagcggtccaacgccgcgaaccggaacatgcctgggtgtggaccgggttcgtcctcggaccggacccggacctccgtggtcaacgggctcaagaagaagctgaaggatgctatggagagttttaacgagattcgccagcttgtgtcctcggagtaccgcgagaccgtgcagcggcggtacttcaccgtcaccggcgagaatcccgatgacaagactctcgatcttttgatctccactggtgagagtgagactttccttcagaaggccattcaagagcaagggagggggtgaattctggacaccatc

SEQ ID NO: 47482 - DNA, 404 bp, Glycine max
  Clone ID: LIB3139-118-P1-N1-A3
aaaagttccttctttctccctttcagtctctcacttttttctgtgcttctctttctctttctcctttcaccctcttaaaataatagagtagggagaaaaaaaggtctcaaagatgagaccaaaagacgggtttttttataaaggtccctataagggagggtttctcatgcatgtgactagcagcaacaactgcaaggtgaccatgaccatggtcaaccctttgaggagaattgggaggtgtgaccaaaatgaatccattagtggctctgaaattggagctgacaattctcctgctggagcagcttcattctaatctggtgctatcctatctgagctttttacttctaccctttcttcatctaatttctaccacactttctttgttttcccctggagtcttcttg

SEQ ID NO: 47483 - DNA, 230 bp, Glycine max
  unsure at all n locations
  Clone ID: LIB3139-118-P1-N1-A4
caaaaaattttacttactcacaaggaggagggacgnncgacaaaaaatattgtgaattatggcgcgcgcctttctttcttcactggcccaaaaaaaaaaaaaaaaaaaaaaaaaaaaaaaaaaaacaaaaaaaaaaaaaaaataaaaaaaataaaaaaaaaaaataaaacaaaaagcaaaaaccaaaaaaaaaaggggggggccccccacaaggaagctcgcacacccgg

SEQ ID NO: 47484 - DNA, 144 bp, Glycine max
  Clone ID: LIB3139-118-P1-N1-A5
gtacccaatttgtattcgggtgggtcaactcaatgaaggttcaagggggtccctcttcattggtaattatgtaaaatttagtctgaattagttttctaagcaattcaaaccacacaaaaatggtgatgatgtgttttgggtttt

SEQ ID NO: 47485 - DNA, 293 bp, Glycine max
  Clone ID: LIB3139-118-P1-N1-A8
ccacacacctcagccttcacaccgtcaccatgggtaaggaaaagactcacatcaacgtcgtcgtcatcggccacgtcgactctggcaagtcgaccaccaccggtcaccttatctacaagtgcggtggtatcgacaagcgtaccatcgagaagttcgagaaggaagcccgtgtgctcggcaagggttccttcaagtacgcctgggtccttgacaagctcaaggctgagcgttagcgttgtatcaccatcgatatcgcccctttggaagttcgagaccccgaagtactattttac

SEQ ID NO: 47486 - DNA, 405 bp, Glycine max
  Clone ID: LIB3139-118-P1-N1-B1
aaaaaaccttaatatgtaagaaaaaactccaccaggtcctcctctcccggtacctggtaacccgcaccatgagcgacagcgacacccgccaaaacgacatcacaaagccactcgatttggaaaacctgagagtcgtctcggccgtggggcgcggcgccaagggcgtcgtgttcctcgcgagaaccggtgaccggtcgtcggaagaatgcgtggcgctaaaggtgataccgaaggcgctgattcttcagaaggcgaaactaataaacgacgtggagtacaccagggtgtcgtttgaagagcaggtgctacgtcgtttcgatcatctgcttctgcctaggttaagaggggttttcgaaactgagaaagtcgttggtttcggtattgattactgccacgggggcacgc

SEQ ID NO: 47487 - DNA, 401 bp, Glycine max
  unsure at all n locations
  Clone ID: LIB3139-118-P1-N1-B10
gtgaatcatacatctctgattgtataataganagcccacagaggatgcgattgtaatcttagaagaaggaggcacgcgtaaaccccaccgcattcacaatcaattatgatgataaatgagccaaggggtttgcctgaggatttggagcggttccgggtgatacataacttgacttgaacgtggttgagactaactggacaggaataatgcatcgcaatagactcaaaagatcaaatgatagcacccggattatcatcacagctattatgggaatggccttaggatttcatgtgggaatttcaatttcaaccgtgcatatgactaaaaatagctgactttcattaccctgagggaattcttttgatgaccctggttctgagttctgaaaaagacagattttc

SEQ ID NO: 47488 - DNA, 424 bp, Glycine max
  Clone ID: LIB3139-118-P1-N1-B11
ggaactcggagacttttgttttggccaatgcgcatggcccttccaccagcccatttacggcccacagagcccaccattggtagcgcccaacaacgacgtgggcctggatggaatggtcatcaacgtggccaccctattggccgggaccgttacaaacccttgggggaatggctacttccaaggacccaaagaggctcctctcgaagccgcttccgcttgcacagggctgtacggcaagggcgcttaccctggctacgctggggaactcttgctggaccccactaccgccgctagctacaatgctaacgccgtcaatcaccgcaaatatttgttgccggcactctttgaccctaccacttcagcttgttctactctgccgtaactctaaaactcgggtgcttagcttctatgttagggctacact

SEQ ID NO: 47489 - DNA, 229 bp, Glycine max
  unsure at all n locations
  Clone ID: LIB3139-118-P1-N1-B12
gggcaggacacccctcttgtcctttttattactctngccatttccatatgctggctactaatatatatatattacggccttacgcctctaaggcatcaatctgcagcatagtcatgagctagaacaagaacacgaaaaagaagttcatggatggcactagtggtgagaaaaatgccattgcaattcatgtggggtcagcggagattcattttcaacggtgtgatgatgt

SEQ ID NO: 47490 - DNA, 252 bp, Glycine max
  unsure at all n locations
  Clone ID: LIB3139-118-P1-N1-B5
ctcgagctgtatcgtccttaggtgctnnaaatccacaaaatccttttgtgttaaataggtggatgggaaaactgactttccctcagggcacttcccgaagtgttaagagaatgcctctttctatagggggaggagctggtgcaaagaatgctattctcatgaatatgccaaatgctgttctttcaatgtggagatattctgtcggagatctcgtcttagaagtttctaagacgacttcttcctacattaaat

SEQ ID NO: 47491 - DNA, 343 bp, Glycine max
  unsure at all n locations
  Clone ID: LIB3139-118-P1-N1-B7
ccatcancaagcttttaacgtcatcttcagctgctaccttatcagaagcgcttcgccccagagattctcgcttcctctccttcaatccttcttccaacgctattaattacaaaattaacctcttcgcttccctccgatccattcactccctccctcttaaaacctccttgcggatcaaatgctcccaaacagatgggaatggaagtcctgcaaagaggacagtgcttcatgatctttatgagaaagaagggcagagtccatggtatgataatctctgcagacctgttacagaccttcttcctcttatagcaagtggtgtcagaggcgtcactagcaaccctgc

SEQ ID NO: 47492 - DNA, 423 bp, Glycine max
  unsure at all n locations
  Clone ID: LIB3139-118-P1-N1-B9
gctgcttgattctctcatcctgttaatcagcatggntggattgacagagcctcaagctagggagaaagctgaaaaggagggttttgaagtaagtgttgccaaaacaagttttaaagctaacacaaaggccttagctgaaaacgaaggggagggtcttgccaagttgatatacaggcctgacactggagagatactgggagttcatatatttgggttgcatgctgctgatctcatccacgaggcatccaatgcaatagcattaggaacacgtattcaggatataaaatttgcagtacatgctcatccaactttgtctgaggtgcttgatgagctatttaagtcagcaaaggttaaagcagaagcttctgagccaataaaggaagcttgttgcagttaatcttccttaagtatcttgcttacaag

SEQ ID NO: 47493 - DNA, 418 bp, Glycine max
  unsure at all n locations
  Clone ID: LIB3139-118-P1-N1-C1
caataaacttttaatcntactgaactctccctctctccttcctcgttcctttcgcctctcactacaaatacacatctcatctcatccgtctctcacttttaatttttctctgcaatctgaaccttccggatttcgtttttctttgttccggtagccagccagccagccatggtgctcttcaatgtttcacgcgttgagaccactcccttcgatggacagaagcctggaacctctggtctccgcaagaaggtgaaagtattcgtgcaacctcattacctccataactttgttcagtcaacattcaatgcattaactgtggaaaaagttagaggtgcaacgctagttgtatctggtgatggtcgttatttttcaaaggaagctattcagattataactaanatgtcagcagcaaatggag

SEQ ID NO: 47494 - DNA, 422 bp, Glycine max
  Clone ID: LIB3139-118-P1-N1-C10
agaaaaacccaatatgattttttccagattgagacaaagaatagatcctcaatacaatgaggttcaggctcagatggaaacaaatttgtttaaattgtctcttgatgatgttgaaactcctaaaggttctatgttggatcttaaaatttctcaatctaaaattgcacttcccaagaacacagttggaggaaccattctgcgtagtgatctattggcaaattttttgacagagggcaattttagagcaagtgttgatttgcagcgcactcatcgtattaaaggaatgattaaaatggtggccacagttggtattcctgagaatacaggtatagcattggcctgtgctatgaatagttcttttagggggcgcgccagttctgatatttacaccatctgctctcaagactgtgaattatggaatc

SEQ ID NO: 47495 - DNA, 155 bp, Glycine max
  Clone ID: LIB3139-118-P1-N1-C11
caaaaaaaagacggcgccggccccccccaacaccgggcaaccgacaagccgaggacggacggaccgcgaccggcgaagaccaaaaacaggcgaacggcacacccaaggcccaccggcaaagccagcgcacacagcggacccaacagccgcaaacc

SEQ ID NO: 47496 - DNA, 425 bp, Glycine max
  unsure at all n locations
  Clone ID: LIB3139-118-P1-N1-C2
gcatnngtttttcctgcttatgacaccatcaattttgaggctttggcccatttgtctggtgcagtttggccagattcaggaaaaagttgtattgaaattttcacaagaggaatttcttacagcttggtcaactcaggtgcgtcctgcaacaactctgttggctgatgggtgtccatatttgtatgctatggtgcatgatagttcagtgtctacaataccaggtgattttgtcattggtgttaagttgacatccataaacaatatgtgtgcatatgggctcaatcctggtatttcaggtttttgtcttttgtgcaccattcctcagtctatttcacagctaactgtttggaatcaaatggtaacagtgtgaacaccattgaaattttgattcttgcaagcagagcttttgacatatttatattgac

SEQ ID NO: 47497 - DNA, 412 bp, Glycine max
  Clone ID: LIB3139-118-P1-N1-C3
atcttaattctgaatgcttcgtattctgtttgaatattgatatctattgggagtggagtagtattgagatcgagcgtaaaagaaaggcgatgtttttgtttgattggttttatgggattctggcatcgcttggattgtggcagaaggaggccaagatcttattcttaggtctcgataatgccggaaagaccaccttgcttcacatgctcaaagacgagagactagttcagcatcagcctacacagtatcccacatcagaggagttgagtattgggaggatcaagtttaaagcttttgatcttgggggtcaccagattgcacgaagagcctggaaagattactatgctaaggtagatccagtggtctacttggtagatgcatatgacaaggaacgttttgcaatatctataaa

SEQ ID NO: 47498 - DNA, 311 bp, Glycine max
  unsure at all n locations
  Clone ID: LIB3139-118-P1-N1-C4
cacacacttttgcgtgatctaattgnnccagagaaccaacaatcaggggatggcggacgatgacaaagcggttggggaaggtgagatgaaagagacgacgggtggtaccagtccttctgggagtggaaagaagaagaacaaaggtttcttgttgcgtatttggaacgggatatttaggttacacggcgatgattttgagaagagactccagtacatttctaaagaggaagctcaagtcatgactagaatgaacaggagattccgatcctggaggagaatttcccgcaatcttattgtattttctgtcatac

SEQ ID NO: 47499 - DNA, 418 bp, Glycine max
  unsure at all n locations
  Clone ID: LIB3139-118-P1-N1-C5
gcagagctgtganctagcgtattctctcgctctttctttcactgtcacagagtccacatccatgggcttcccagccaacggcgcctctgcggcccagcccctaaacttcctcatctacggccgcacgggctggattggcggcctcctcggctccctctgccgggcccagggcatctccttccattacggctcgggccgcctcgagaaccgggcctccctcgaaaccgacatagccctcctcaagccctcccacgtcttcaacgccgccggcgtcacgggccgccccaacgtcgactggtgcgagtcccacaaagtcgagaccatccgaaccaacgtcgtcggaaccctcactctcgccgacgtctgccgcgaccacggtcttattctcatcaactacgccacccgttgcattttcgag

SEQ ID NO: 47500 - DNA, 408 bp, Glycine max
  unsure at all n locations
  Clone ID: LIB3139-118-P1-N1-C6
tgtgaatcttagactctttccatgagaagggnaccttccattctgttcatttcccttgccgcccctcgcgccgccacctctttcgccgtccccaaccgccttcttcaggccgtgctctacggcagcgccaccgccgcctcccgttctcaccgccgccgcttctcctcgctcctaggtcccttcgccgccgcgtccctcggggtcgccggggctctgatctctcaggaagtcctcgccaaggagcccccgccgcccgaggctcttccgaacgacgttgttctctaccagttcgaggcttgccctttctgcaacaaagtcaatgcatttttgggactactacgatataccttacaaagttgtggtggtcaaccctttcagtaagaaagaaatcaaaatgggctgagtttt

SEQ ID NO: 47501 - DNA, 414 bp, Glycine max
  unsure at all n locations
  Clone ID: LIB3139-118-P1-N1-C7
caggaannngagttttttctgatggaanccaanaaagaacatgataccatgtcgttttcaatgcagtaagaatcacattcaactagcacatcaactatattttttatgtgttgagcttcttgagagcttgtgaatcacatgaactagactatcactaaacttacacgagttatggcacagaaaaaagcttctcatgtgcttgtatgcaaagagttaaagccacacctgctaatggtcttagtccaggtgggctatacctttttgtatttcatcactgaagcctccttcaatcatggtatgagcccttatgtgtatgtaacctatcgccatattgtggctgcggttgtgatgttcccttttgcatactttntggagagaaatggcagaccgaagctgacatttgctcttttcatg

SEQ ID NO: 47502 - DNA, 427 bp, Glycine max
  unsure at all n locations
  Clone ID: LIB3139-118-P1-N1-C8
ctagcaagcagagtctngtcatttttctattgaccttctcggtggaggaattttattggacaaaactggagattggatcacacttatacaaaattctccaattagtaacttgttgagagttgctgcttggaagaaaggttgtttaatggtcaagattgtgatgtctgggaatgcagcagtcaaaaggagtgattgggcctcattggtacaagtgtttttaacaaacagcaacagtacagagcattttgatgcatgtaagtggacaaaatcagaaccacattcctgggaattaatcttcccaatagaggtatgtggtcctaataatggttttgaaatgtggagttctgagtgggcaaatcaaactttatggcatttgagtttccttattgacaattccaaacagtctacagtttttgatattctcttg

SEQ ID NO: 47503 - DNA, 415 bp, Glycine max
  Clone ID: LIB3139-118-P1-N1-D10
caggttgccgcacctcaattctctgaaacaaaagcaatcgttacttgatttcaagaatttctcaatttcttcctacttctttgtgtacgatttcttaagggaaagaaaatcactctctgtgctggccacagacttcgtgaatcattttcttttccactcttagtttatttgctgaacactctcctatttgatataggacttcgtgtcagatttaaacttcttctgtttccttctcagttctctgtttaatttcaagttcaagctggtgaaatcttggattagtgctcccactctcctatctggtataggacttcgtgggtagacctttctatttctctcctttctttcactctcttcttctcactgatccgcattgccggtcaaagtggtcttatttgaaaaacacttgggcgtt

SEQ ID NO: 47504 - DNA, 314 bp, Glycine max
  unsure at all n locations
  Clone ID: LIB3139-118-P1-N1-D11
attgaagccangacttctatcgttagaggccaaaaganccctcnatgcncagctgctggtctcccccataatgaaatcctgcacagatatgccgtcaggctggcttagtcaagcgactagaaaagtctgataatcttctcgagggtggaggagaagaggacaattttgccattgtgtttgcagctatgggagttaacatggagactgcacagcttttcaaacgtgactttgaggaaaatggctcgatggagagagtgacccttttccttaatctggcaaatgatcctacgattgagcgcatcatcactcctcgt

SEQ ID NO: 47505 - DNA, 247 bp, Glycine max
  Clone ID: LIB3139-118-P1-N1-D4
gggcacttttcgatctttaagagaatgcctctttctatagggggaggagctggtgcaaagaatgctatcctcatgaatatgccaaatgctgttctttcaatgtggagatattttgttggagatctcgtctttgaagtttctaagatgacttctccctacattaaatgtacagtctctttcttcatagcatttggaaacttggctgatgacaccatcaattttgaggcttttccccacaagccggtgc

SEQ ID NO: 47506 - DNA, 308 bp, Glycine max
  unsure at all n locations
  Clone ID: LIB3139-118-P1-N1-D6
cggctcgagtcncgtgncttatcggctcgaggggttttggtgatgaataatctgaagcatgaattacatgagcatgagcttgtgttgacgcgccgcagggtgtattactgtgatgcttgcaatgaagagggacatatatggtcctactactgtggagattgtgactttgatctccatccaaaatgtgcattggaaaaggaggacaaagaaggaagcaatgatgatgccaaggaagaaaagtccaaagatgaatgggtttgtgatggagaagtctgcaaaaaagcttaaaagcttgattgttaagggtt

SEQ ID NO: 47507 - DNA, 410 bp, Glycine max
  Clone ID: LIB3139-118-P1-N1-D7
gcaaagttagcttctaatatagttccatagctgccttcttctggtggaactgcaacttcacttgataatgcaagaacttacaacacaaacttggttcggaatgtgaagcaaggaacaccaaaaaggcctggtagaccccttgaaacttatgtgtttgccatgtttgaagaaaatcagaagcagccagagtatgagaagttttgggggctcttccttccaaataaacagctcaaatactctattaatttgaattagttattagaagtatatatagtttataagaaataagggctatgatttcaagtgaagcttccataattgacctagaaaaggcagctatggagctttatctgaactgttggagtcaatatgtacccatttacgagcaaagttagctttaaataaagatt

SEQ ID NO: 47508 - DNA, 427 bp, Glycine max
  Clone ID: LIB3139-118-P1-N1-D8
gcagaaattgctcttcttttttccccaaaaaatgagtttcaccggaagcgggaagaagacccaccgcaaaaatttcaaaccacaaagacagcattaatattcttcctttcatttccagttcttcttcttaaaccccttattctccttctctcttgcactgtcttacaatttgaattttccaatggcaacttctgagaacaacagcagcgcgcgtccccaacgcgaagcgaagaagagggccgcagctgcaatatcccaaattcatggcaacgccgccaagaagaaacgcgtcgttttaggcgacgtcactaacgtttcctcaagcgacgtcgccgtttccgtttccaaaaaacccgttcagaaacataaaaatgttaaactcgagaaaccggccgcgccggttgccacgctggagaaggttgaggaa

SEQ ID NO: 47509 - DNA, 315 bp, Glycine max
  Clone ID: LIB3139-118-P1-N1-D9
gacaatctccaaactcgcgttagtttccagaaggccgagagcaaagaaaaatccaatcaatggggcacaagaacacaattttcttggcacttatagctaccttgattgcaaaggaagcctttgcagcacaacatgtagttggtggaagccaaggctgggatcaatccacagacttatagtcttggacttcaggccatacattcaatgttggagatatacttgttttcaagtacagttcttttcatagtgtggtttagctagtctactagagtgcctttcaagaattgtgtttttatcattcctgtgctaatcttg

SEQ ID NO: 47510 - DNA, 323 bp, Glycine max
  unsure at all n locations
  Clone ID: LIB3139-118-P1-N1-E11
cacgcgcacgcaagcccggaagccggcccgagcccgagccgaacttttggtgtccccccaacaaagacggcaacacgcgcgcagaaaccacccaacnaccccagcccacccacaccgaagaacggcgccccgcaaaagcccacagaaaacagcggaagacgcgaagacaagggcccgggggcccgcccagaaaaggagggccacaaaaaaaccggcgaaggacagaagaccggcgcacgcagacaggcacgccgggaagccgcagaccagcaaacaggaggacaacacccacgcccgggcgggacccaaaggcccacggccac

SEQ ID NO: 47511 - DNA, 406 bp, Glycine max
  Clone ID: LIB3139-118-P1-N1-E2
agaaagctttcggatcgtacagtactggtacatggcatcatatgcaaactgacatgaatagtaaaagcaacagcggcaatgctatgttaaggaatcagacagaaggaagttggctatcttctccgcattctagttgtccgtctcatttgtttcaggacgcaacagatgatagcaagagtgtctcagcctggcctgtttcaaagcctcactcatccagattgaacaatgatcacgtgcttgaccaagttgacaaggagagcaaagttgagactgctacaagttatcggttgtttggaatcgatcttattgatcattctaggaactcttccttagtagagaaggcattctcacaaggcaggaaatgcacccaaagtcactactgatggctgcaccattacctttgacc

SEQ ID NO: 47512 - DNA, 405 bp, Glycine max
  unsure at all n locations
  Clone ID: LIB3139-118-P1-N1-E7
gattgatagantgtgctgtctattagtcctgccaaggccgacgagttaactctaaagaaaaatatcttgtcgacatatgcggcttgactttttggtgcatcattaaccatctctcatggaagctcgtgatcaatcgcagctcctgatgattgtttgactttgatatcgaaaatgctgggagatattcaacgtggatacttgtagtgcttaatttgagtctgtactattgaccttatcttgcatggcgcttttggggttaaaaattccgaacttacgattcttctccccattgtagtctacctgagcggtttaaaattttgggagacgatagcttttgtctttataccatgtgtttcgttcgttatttgatggtagccggatatatatatatatatatatatatat

SEQ ID NO: 47513 - DNA, 134 bp, Glycine max
  unsure at all n locations
  Clone ID: LIB3139-118-P1-N1-F1
tataaaacatgccgctgcttaacggnagcgcaccagagggggcnaggttcagttttggggaagtccttccccgcccagcaaggcggtgatgaggaatcggttgagagtactgaggtaggttctgtttcgagcca

SEQ ID NO: 47514 - DNA, 400 bp, Glycine max
  unsure at all n locations
  Clone ID: LIB3139-118-P1-N1-F10
taagannagaatcttcgcttatctcgcgancacaggnngccgcaccttaaaaccggttacaaaagcaatcgttacttgttctcaagaatcttcaaactttcttctgttttctctgcactcggttctttaggaaaagaaaatcactctctgtattgattacagacttcgtgaatcattttcttttcaactttcagttcacttgctgaacactctcctataaatatataggacttcgtgtcagatttgaacttttcctgtctctttctcggttctctatcttatgctcatcttcttcaaactttaaggcatcggattttgtttcttctaaaactttctgatggaactactctgaaaatacaacatgtacgttctatccaggacaaaaatgtctcttgaaatt

SEQ ID NO: 47515 - DNA, 64 bp, Glycine max
  Clone ID: LIB3139-118-P1-N1-F11
aaaaaaaaaaaacctcgacctccgaaaaaaaaaaaaaaaaaacaaggggaagggcagaaacaaa

SEQ ID NO: 47516 - DNA, 171 bp, Glycine max
  unsure at all n locations
  Clone ID: LIB3139-118-P1-N1-F3
acnggnatttcggctcnttttcctangaaannaaancacgctctagattgtttttagtttgctccacacccgcacaatccggtagcggaaaaaccttcaaatatgatctaattggtgctggttcacattcttcacgagatttttctgcaatggacgatcacgaaaaaccca

SEQ ID NO: 47517 - DNA, 389 bp, Glycine max
  unsure at all n locations
  Clone ID: LIB3139-118-P1-N1-F4
gggagattttttttcatctagctggngcagnncggagagantcaggaaaaatttgtattgaaattttcacaagaggaatttcttacagcttggtcaactcaggtgcgtcctgcaacaactctgttggctgatgggcgtccatatttgtatgcaatggtgcatgatagttcagtgtctacaataccaggtgattttgtcattggtgtcaagttgacaaccataaacaatatgtgtgcatatgggctcaatcctggtatttcaggttctcgtctttcgggcaccattcctcagtccatttcacagcaaactgtttggaatcaaatggcaacagtgagaacaccattgaattttgattttagcatgcaaagcttttggcagttttctattga

SEQ ID NO: 47518 - DNA, 224 bp, Glycine max
  unsure at all n locations
  Clone ID: LIB3139-118-P1-N1-F5
ccaaacccncccnnccggaacgtattattttttgtgctgaccagacccgcctccacatgccaaaagcagcacatgctagctctattcctcctccttgcagacgcgatttcacaggtgatgtgtcgcaagctgcacgagacatcgatgcgagaaagacacgaacaatggatgaccgaatatcggaaaagtgtataaggatgctgcagagaacgacaaacgttttc

SEQ ID NO: 47519 - DNA, 410 bp, Glycine max
  Clone ID: LIB3139-118-P1-N1-F6
agcatttttgttgtacatatggcgggtagggtttcgacgtgcttcttcttcgtgtttgctctttctctccttcttccttttcagatctccgctgaggaatcatcggagaaagagttcgtactcacattggatcactctaactttcacgacactgtcagcaagcacgatttcatcgtcgtcgagttctacgctccatggtgtggccactgtaagaagcttgctcccgagtatgagaaagctgcttctatcttgagtagtcatgatcctccggttgttttggctaaaattgatgccaatgaggagaagaacaaagaccttgcatctcaatatgatgttaggggatacccaacaattaagattctgagaaatgggggaaagaatgttcaggaatacaaaagtccccgtgaagc

SEQ ID NO: 47520 - DNA, 429 bp, Glycine max
  Clone ID: LIB3139-118-P1-N1-F7
ctctccacacacatttatttttcccaaacaagtgaacaacactccctcctttgtcccattactagtacatacattcccctaaccaagttttaagtttttctcaacagaatggaagcaaccaacagaagctcttcctccacttcctcttcctctgattgctgctcttccgagtccaaccccaacaagcccgacagaatcaaaggcccatggagcgccgaagaggatcggatcctgaccggactcgtcgaacgatacggcccacgaaattggtccctcatcagccgctacattaagggaaggtccggcaagtcatgccggctccgatggtgcaatcagcttagccccgccgtggagcaccgccccttctcggcccaagaggacgacaccatcatcgcggcccatgcccagtatggtaacaggtgggccact

SEQ ID NO: 47521 - DNA, 428 bp, Glycine max
  Clone ID: LIB3139-118-P1-N1-F8
ctcaaacccatttctttgatatcttagttatctaattacctcaattaatcccttaattgcaagcatcatggctgaggagaaacaccaccaccacttccaccaccacaagggcgatgatgtgcctggcgaggttgattataagaaggaggagaagcaccacaagcatcttgagcaccttggggaacttggtgctgcggctgccggtgcttatgccttgcatgagaagcatgaggccaagaaagacccagagcatgctcacaggcacaaggtagaagaggagattgcggcagcagctactgttggtgctggtggttttgtcttgcatgaacaccatgagaaaaaggaagttaagaaagaagatgaggaagctcatggaaagaagcaccaccatctgtttggctgaacatgataaatattcatatataatt

SEQ ID NO: 47522 - DNA, 424 bp, Glycine max
  Clone ID: LIB3139-118-P1-N1-F9
cttggtgagagtcatctttattagagaaccacgcagaactgacgcaatgggaagcacaagtttgcttcatctattacttggtgttgttttggctctgctgagtgtgtctcttgtggaaggagaagatgcatacaaatactacacgtggactgtgacatatggcattctttctccactaggtagtcctcagcaggtggttcttatcgatggtcagtttcctgggcctcaactagacttggtaactaatgaaaatgttgttctcaaccttgtaaacaagttagatgagccatttcttcttacttggaatggcatcaaacaaaggaaaaactcatggcaagatggggtattgggaaccaattgccccattcctccaaactcaaattacacatacaagtttcaggtcaaggatcagattggaacctac

SEQ ID NO: 47523 - DNA, 391 bp, Glycine max
  Clone ID: LIB3139-118-P1-N1-G10
aattgaaatctgtctcctacttttctcactgcctacaaaaactaatttgatggaaactcccaaggaatggcaactggatctaccttgtgacaaaattcctagtgtcttgactacaactgatgagagattggtaggcacagaacatgagggatatgatccttttcttggtggaattcaaaaatatgccactcccatgatgcccctagatgaagaaattctttctaaggttgcacaagatatggttgaggaatggtttgattgtgttgatgaggaggattcctttgaggaagtttctttaagtgcagcacttaatggtgttgagggtttggactatatggaaagaatttctcttgccacatctgaaggttttcctcatgtgcttttacccaaa

SEQ ID NO: 47524 - DNA, 420 bp, Glycine max
  Clone ID: LIB3139-118-P1-N1-G11
agattctaaagatatttatctaatattctttagaataatcaaaaagaatattaaattcaaataaattttagatagaaaaaagacttaaaaaggaggatttgaaatgcgagatctaaaaacatatctttccgtggcaccagtagtaagtactctatggttcggggctttggcgggtctcttgatagagatcaatcgtttttttccagatgcattgatattcccttttttttcattctagttattgacacggaaaggggtgaagaagattatagatccaattaagtattaaatatatgtaattaatatgtaattaatctcctcttctttatttcgtcttttatttcttcttttttttacaattgtaatagaataagttaggaaagagaaagaataagggttaatttggcctaattgaaattc

SEQ ID NO: 47525 - DNA, 317 bp, Glycine max
  unsure at all n locations
  Clone ID: LIB3139-118-P1-N1-G2
ctccacatttttcgcctcaatgttcgaccccncccagatagtcgacggcttcgttttcgttaccggcggcgaccctccgcgcggcgagttccctggccccgaagatcggtcccctcggtctctcccccaagaagatcggagaagacatcgccaaagaaaccgccaaggactggaagggcctccgcgacaccgtcaagctcaccgttcagaatcgtcaggcgaaggtcacggaggtcccctccgccgacgtcctcgttatcaaggccctcaaggagcccgagcgcgactcgcagaagtcctcgaacatcatgcacaac

SEQ ID NO: 47526 - DNA, 417 bp, Glycine max
  Clone ID: LIB3139-118-P1-N1-G5
acacaacatataaatctttaaaaatgggagaaaaatccaggtccataggagggtgctgcggttggtttatcgcgtttatcattctggctctcgtcgtcggtgccattgtttttaccgttaagaagaaatttagtcactccggttccgataagcctgctccggttcccggtccccctggcgccgttgaccaaaaatattccactgcactcaaaactgcgacgcaattcttcgatattcagaaatctgggaagttagttgacaacaaaatatcttggagagggaattcggctcttaaggatgggagccaagcgaagttggatctaacaaaagggatgtacgatgctggggataacatgaagcttggttatcccatggcttttacggcgacggtgctgtcgtggtccattctggaatatg

SEQ ID NO: 47527 - DNA, 363 bp, Glycine max
  Clone ID: LIB3139-118-P1-N1-G7
aaaaaaaaaaaaatttcctttctttaaaaaaaaaaaaaaaaaaaaaggaaaaaaaaaaaaaaaaaaaagggaaaaaccaaaaaaaaaaaaaaaaaaaaaaaaaaaaaaaaaaaaaaaaaaaaaaaaaaaaaaaaaaaaaaaaaaaaagggggggcccccccacaggggcgccgcaccccccgaaaaaaaaaaccgccccccccccaaagggccacccacttccccaaaaagagagccaaaaaaaaccgggggaaaaaaaggacaaagcgggcccccggggaaaaaagggatccccacaaaaacacccaaaaaaaaccacccggaaaaataaaagggaaacccccggggccccccaaagggggg

SEQ ID NO: 47528 - DNA, 328 bp, Glycine max
  unsure at all n locations
  Clone ID: LIB3139-118-P1-N1-G9
cttcccctnagtactcgagtgagtatagagagagagagagagagagagagagagtgagttagagagagagagagccacacagagagagagagagagagaaacccttacgtgttactctcacttcacaaaagagtaaagaactaaacatggcagagacccttcgtatggttgttgctgctattgggaatgtcgcctcagtgtctctttatgctgcaccaacggttaccttcaaaagggtcataaggaagaaaagcactgaggagttttcatgcatgccttacatcattgccctgcttaacctgactctttttcaacttggtatggattc

SEQ ID NO: 47529 - DNA, 417 bp, Glycine max
  Clone ID: LIB3139-118-P1-N1-H1
gagaaagattgcctagtgaaatttttcctttgatattaaatctcgctctatattggaaaaagtttcctctacaaaagcacaatttgttagtggaaaaaccttcaaatatgatataattggtgctggttcacattcttcagaagattttcctgaaaaggaagatcaagaaaaacccaaaaagattgatgccagattgagacaaagaatagatcctcaatacaatgaggttcaggctcagatggaaacaaatttgtttaaattgtctcttgatgatgttgaaactcctaaaggttccatgttggatcttaaaatttctcaatctaaaattgcacttcccaagaacacagttggaggaaccattctgcgtagtgatctattggcaaattttttgacagaggtcatttttagagcaagtgt

SEQ ID NO: 47530 - DNA, 402 bp, Glycine max
  unsure at all n locations
  Clone ID: LIB3139-118-P1-N1-H10
gagaaccncgcaganctttganctctcctctcaagaagcanananncgggaaatttttgaccggcaagaccatcacccccgaggtggaatcctccgacaccattgacaacgtaaaagctaagattcaagacaaggaagggatcccacctgaccagcagagacttatctttgcgggtaaacaacttgaggatggtcgcacccttgccgattacaacatccaaaaggaatcaaccctccatctcgtgcttcgcctcaggggtggcatgcaaatctttgtcaagactttgaccgggaagaccatcacccctgaggtggaattctcggacaccattgataatgttaaggccaagaaccaagacaaagagggcatccctccaaatcagcagaggctggatttcgctg

SEQ ID NO: 47531 - DNA, 407 bp, Glycine max
  unsure at all n locations
  Clone ID: LIB3139-118-P1-N1-H11
agctgagnagagttttagactatggtggcgcgcaggnnncnggggggccacgacgactctgactttgatctacattaccacacagacgacggcttcgaagtctttcaattccagctttattccctcacttccgttccacctcatcaacaaaagattttcggagccgaacaagatactcctgtggtcaatgactctgatctcgtcgccatttctgacaaactacgactcgtctcggtcaacgactccgaacccgaaccaagcgctgccgatttgttgaaatccgatgaggaattgacccgactcttgcaggcagaggaggaagcgcttatgttgcagcagtatgtggcgagcgaaaatcctcgagaatttgatagtagagtacggcctcacgttagtcaagtccggat

SEQ ID NO: 47532 - DNA, 303 bp, Glycine max
  unsure at all n locations
  Clone ID: LIB3139-118-P1-N1-H2
ggaggagattttggtggtccgacaaaagnngntaaatnnngcgaggttcattttgaagaaaagggacacacttagttgtcaagttggaatcaacccatactccatggaatggactggtttggccaatagattactgagtaagggcaatgatattctgtgttgcgattatgctagttttgatggttcgattaccaagcaagttatgagcaagatggcagaaatgataaacagtctttgtggtggtgatgaaaaatttgatgcgtgaaaggacgcacctgctgttgacttgtcgttcaaggatgg

SEQ ID NO: 47533 - DNA, 387 bp, Glycine max
  unsure at all n locations
  Clone ID: LIB3139-118-P1-N1-H3
ggaccactttctcctccttggtcagngaggatgaaagnggccattggtgctgttagaggactttctttccttcataatgccaaatcacaagtcatataccgtgattttaaagcatccaatatcctactagacgcagagttcaatgctaagctctctgattttggcttagcaaaggctgggcctacgggtgatagaactcatgtttccactcaagtcatgggaactcaaggatatgcagcacctgaatatgttgcaacaggtcggctgacggctaaaagtgatgtatacagcttttggagttgtgtttgcttgaactattggcccggtagacgagccgttgacagatcaaaagccggtgtagagcatattctattcgaatgtgcaaat

SEQ ID NO: 47534 - DNA, 346 bp, Glycine max
  unsure at all n locations
  Clone ID: LIB3139-118-P1-N1-H5
gaccancctaaatttttttgngaacagngagngagngagggacttttaacctatgagttggccaacgccaacccacgagcagngataggaatattggggttgccttggacttttccaaaggaagcaaaatcgctctcaaatgggctattgacaatcttctccgcaacggtgacatactctacatcgtccacatcaagcctttcggaggaagtgaattccgaaattttctttagtccaccactggttcacctctgattccgttgtcggagtttcgtgagaaggaggtgatgcattactatgaggtggattctgattctgaggtgcttgactttgtttgacaccgttt

SEQ ID NO: 47535 - DNA, 412 bp, Glycine max
  unsure at all n locations
  Clone ID: LIB3139-118-P1-N1-H6
anncaggatatagctgtattgaaannnncacaagagganagncttacagcttgttcaactcaggtgcgtcctgcaacaactctgttggctgatgggtgtccatatttgtatgcaatggtgcatgatagttcagtgtctacaataccaggtgattttgtcattggtgtcaagttgacaaccataaacaatatgtgtgcatatgggctcaatcctggtatttcaggttctcgtcttttgggcaccattcctcagtccatttcacagcaaactgtttggaatcaaatggcaacagtgagaacaccattgaattttgattctagcaagcagagcttttgtcagttttctattgaccttctcggtggaggaatcttagtggacaaaactggagattggatccacttatacaaaattc

SEQ ID NO: 47536 - DNA, 437 bp, Glycine max
  unsure at all n locations
  Clone ID: LIB3139-118-P1-N1-H7
atgccgccacgtagctcgaancggctcgagcaaaacngngatttatctggattanncngacccacaanagcaagggaagcttattttagattctatcaaaccctgaattccttgcagagggaactgcaatcaaagatctctttaacccagaccgtgttcttattggaggcagggaaaccccagagggccaaaaagctattcaaacattgaaggatgtttatgctcaatgggtccccgaagaaagaatactgaccacaaatctttggtcggcagaactgtctaagcttgctgctaatgccttcttagcacaaaggatttcatctgtcaatgccatgtcagcactttgtgaggctactggggcaaacgttcaacaggtgtcctattctgttggtacagactcaaggattggacccatagttctcaatgccagcgttggt

SEQ ID NO: 47537 - DNA, 288 bp, Glycine max
  Clone ID: LIB3139-118-P1-N1-H8
ttttaggaggcaattagatcacagagacatggaggttgctatggaactggaagatgatcttttttttgctgatttgagcaaggaaattgctctactaattatggatgaagatgaagatcctcttgcttcttgtcctcctgactctcttcaagctttttctggggcaattcattctccttcacagattgctttcatgtatgagcatgctttgagaagagaaagcaaagggacaggtgtgtttattccttatgcaacacagtcaataaggaagcagaggaaaggaagggc

SEQ ID NO: 47538 - DNA, 226 bp, Glycine max
  Clone ID: LIB3139-119-P1-N1-A1
ctcgagccgttttcttctcgaggtacacccttttttgtgcacaggatttcccgcacctcttgtttttccccctctttctttgttctccttcggttgaatcaatgggtgcagaggttaagatctggaaccccgttgaagtcgcattgcaagctctccatgactattcttttcagatttattcctcgcattttaccattgaccccttcctcgagctttttttaatggc

SEQ ID NO: 47539 - DNA, 347 bp, Glycine max
  Clone ID: LIB3139-119-P1-N1-A10
atggattacaccctcgaacacgctacgactcgggggtggtgggttgcttctcccctcgaacaggcagcatccgcctctgacaagtacccattcgccgaacatccccagccatcagcctcgtccattgtccgttaccgccggcgttgcgcgcctgtgctcctggcttcctcgcctcgtgccagcgatgtcatgtactgcgacggcatccggctccgcatcaacgcaaggaagcagatggtcacggagttcacggaatccccttcgcactacagcttacaccgctttacccagggcgaccgcgaggcgtgcattcgcatgacgacccgaccggatgttcgacgcgaagc

SEQ ID NO: 47540 - DNA, 363 bp, Glycine max
  Clone ID: LIB3139-119-P1-N1-A7
acacaaacttaaagatatgggggtttgtgggttataagaggacaacttaaagccattgaaggaaaggccaaataggggacgaattgcgtacaactcttcattttagccttgcaactattgcatcagtttgtttatgctcatgtccgtttgtccatgtgtgtgatctagtactactttttccattgtactacccacttctctaactataccatttccttataactatgatattatactactttaaaagacctaatgactgattagctatggagctttctgaaagtgtttcctactatataaaattaaaatttcattttcctttttaaaaaaaaaaaaaaaagggctgtctgcgactattgagct

SEQ ID NO: 47541 - DNA, 239 bp, Glycine max
  Clone ID: LIB3139-119-P1-N1-A8
gcgtacataaactcataattcttctctaactctttaatttttcccaaacacacttatacatcgttcgggtttttaataatacagatctctccctcccctttactacttcacactttttcttacctgaactatattaattttatccatatttacacaccctattttttatttttctcattctctttcatatatcttattcgtataaacttatattctacctaacctatttttataattta

SEQ ID NO: 47542 - DNA, 387 bp, Glycine max
  unsure at all n locations
  Clone ID: LIB3139-119-P1-N1-A9
cttttacatgttgaaggaggagttctcacatcaggtntggggtgaacgatgcacttgaccacctaaagtaaagtttttctctttttcttcccatagcattctgactcatacccaaattatttattgtttgtctacgaaagcagtgaaaaaaaatgacagtggagcttatggggttccccaaaatggaggaacagaaggcaattcaagaagctgtctccgaaggccttaaggccatggtacacctcctccgtctcctatcctattaaccctgttacctgcacgctcaccacaccgactccaccttttccaacttcaaaaaactcattttcttacttagtcgtcgcaccgggcaatcccgtttccgttgtcaccttttccttttccttc

SEQ ID NO: 47543 - DNA, 399 bp, Glycine max
  Clone ID: LIB3139-119-P1-N1-B1
caatactacatttgctccgttggatcacactgttccgcgggcgagaaactggcaattaacgttaacagagcttcttctaccggtccttcccctgcacctcaacccagaggaagtggttctccaccaagggctagccctgtccccacacaagcaccacaagccagtagccccactcctccaccaaggtctgcaccagcacctgcttttggtccatcctctgaaccagctactttcattgttggagaaaccgctggctggattgttcctggcaacgcttccttttacacagcttgggcctctggcaaaaacttcagggttggagacgtccttgtgttcaactacgcatcaaatacacacaacgtaaaggaggttacaaaggccaacttcgatgcttgcagc

SEQ ID NO: 47544 - DNA, 347 bp, Glycine max
  Clone ID: LIB3139-119-P1-N1-B10
gtgtatacgatgtatggaaatccaagatcctttatggtgtaaaaacataagagatcttgaatttccatatgtcttacacctaaatatcatatattcaagtgtttaagatactaggaatttatggaatcttagtgaacacctcctttatctagggtaggaattatgggtagaggtagtagttgaaaaattcttgtattgtgaaagtagtataatatcgttaacaacccatctctaaaatgggtaattgggatggtgggaattaggatatatgtgataaatttatgtttatactactttttgatgtaccaaaaaaatatatataaaatggtcaagtttaatgttcatgt

SEQ ID NO: 47545 - DNA, 369 bp, Glycine max
  Clone ID: LIB3139-119-P1-N1-B11
attttgttttagttgtttgtcagaagcacactcgggttggttatgtttgatgtgggagctttgggctaagaagtgccgagatgaatcagaaacagttaattggataactgttcatacaaaaccatgtccaaagtgtcacaaaccagtggagaagaatggtggttgtaacttggttagctgtatctgtggccaagcattttgttggttgtgtggtggagctactggccgagagcatacttggtcaagtatagctggtcatagctgtggtcgatacaaagagcatgaaaagactgttgaacgtgcaaagagggatctatatcgttatatgcattatcataaccgatataaagttcacacagactcctttta

SEQ ID NO: 47546 - DNA, 389 bp, Glycine max
  Clone ID: LIB3139-119-P1-N1-B12
ggaaactcctataacccaatgcccggggcaatgcgggttgccattttaccaacccatttatgggccccagagcccacccttggttgctcccaacaacgatgtgggacttgacggaatggtcataaacctcgccagcctccttgccggaaccgccaccaaccccttcggaaacggctacttccagggtcccgcggaggctccgctcgaagccgcgtcggcgtgccctggggtttatgggaaaggggcttaccctggttatgctggggacttgctggttgactctaccactggtgctagctacaatgtaaagggggctaatgggaggaagtaccttgttcctgctctgtatgatccttctacgtcgtcttgctcaacgcccgtgtgatcag

SEQ ID NO: 47547 - DNA, 391 bp, Glycine max
  Clone ID: LIB3139-119-P1-N1-B2
tgaaattttaataaaccgcgatcacaggttgccgcaccgtaagaccggaaacaaaagcaatcgttacttgatttcaagaatttctcaatttcttcctacttctttgtgtacgatttcttaagggaaagaaaatcactctctgtgctggtcacagacttcgtgaatcattttcttttccactcctagtttatttgctgaacactctcctatttgatataggacttcgtgtcagatttaaactttttctgtttctttctcagttctctgtttaatttcaagttcaagctggtgaaattttggattagtgctcccactctcctatctggtataggacttcgtgggtagacttttctacttctctcctttctttcactctcttcttctcactgat

SEQ ID NO: 47548 - DNA, 352 bp, Glycine max
  Clone ID: LIB3139-119-P1-N1-B3
aacactctttgaaccaccgcaactaaaataacaaccccggtttggttctagccaaagcttccaagtttcgaattttctcatcttttcggaaaaagatcaacaccccagataaaaatagaagaaagccttttctgggttaatttggtaatttggtttttttcatgggtaacataggaagcagcggctccaacagccgctggagacacggcggaggcggtggcagcgggaggcggattcacccgccgcctccgtcggtgatgtcgccgccggaggtaacggcgaaccgattcttgtacccttcggccgtcacgccgtattacaactaccccgggttctaacccgcgtcgaccac

SEQ ID NO: 47549 - DNA, 389 bp, Glycine max
  Clone ID: LIB3139-119-P1-N1-B4
cggctcgaggagagttcaagtttcggcgtgtgtgttttgtggcgccgtcaacaacctttgcctccgccaaaacgccgtcgtttccttcagaaagaagaagcttctcagattggtctcaatgtcttccgttcctccttcccaacccttcgaaatcgccgttaaagcttccgtcaccacacccaacaggctcggcgactgccctttttgccaaagggtgttgctgacactggaggaaaaacatctaccttatgaccccaagttggtggatttgaccaacaagccagaatggttccttaaagtcaatcctgatggtaaagttcctgtcataaagtttgatgagaagtgggttcctgattcagatattattactcaaacattgggagagaagt

SEQ ID NO: 47550 - DNA, 396 bp, Glycine max
  Clone ID: LIB3139-119-P1-N1-B5
ccaaaacaagaagttgttcatcttagatcaccatgactgggtggttccttatttgaggaaaataaatgcaaataccacaaagacttatgctacaagaaccatatttttcttgaaagatgatggaactttgacaccattggccattgagttaagtaagccacatcctcagggtgaagaatatggtcctgttagcgaagtctacgtgcctgccagcgaaggagtggaagcttatatttggttactggcaaaggcttatgttgttgtgaatgatgcatgctaccatcaaatcattagccattggctaagcactcatgcaattgttgagccatttgtcatagcaacaaacaggcaactgagtgtggttcaccctatttacaaacttctgttttctcacta

SEQ ID NO: 47551 - DNA, 358 bp, Glycine max
  Clone ID: LIB3139-119-P1-N1-B6
agctcaatgagcttgatttggcgaataataggttaggtgggaggagttcctaaggagttaggggacctgcctgtgcttaattatcttgatctttcagggaatcagttctctggtgagattccaattgagctgcagaagttgaagcctgatttgttgaatttgtcgaacaatcagctttctggggtgattcctcctctttatgctaatgagaattatagaaagagttttcttgggaatcctggtttatgcaaggctctctctggattgtgtccaagcttgggtggtgagagtgagggtaagagcagaaagtatgcgtggattttccggttcatatttgtgcttgctgggattgtgttaa

SEQ ID NO: 47552 - DNA, 371 bp, Glycine max
  Clone ID: LIB3139-119-P1-N1-B8
aatagaaacctctcagcccctctccgatcaaattgccagcgtaatcgacggcaaagccgttgcgcaaaccatccgatctgaaatcgccgacgaggtgcgccagctctctcaaaaatacggcaaggttccgggattagcggtggtgatagtagggaacagaaaagattcacagagctatgttggaatgaagagaaaggcatgcgctgaattgggaatcaaatccttcgatgtggaccttcccgaacaagtctcccaagctgaactaatcaaacaagttcaccagttgaatgctaaccctgacgtacatggtatattggttcagctcccgttgcctaagcacataaatgaagaggaagttctgactgaaatca

SEQ ID NO: 47553 - DNA, 316 bp, Glycine max
  Clone ID: LIB3139-119-P1-N1-B9
ttcttctttttgcctcacaccatgaaacccctgcgttcgggtttgttatcgcgcttgagtcctcctcactccattacctccctctgcttctcatatccctctaccccaaagcaatttccgatttgaaggatacaattgtgaagggatttgggttcacggcggaagatgatgttacgattacggggttcgatccttgagacgccgaggtagggcattccgtggagtaccaattcgacctcgaaatcgatcacaaggttattccctttaagctccttgaagaccgtagacactggtaatacttccatctttccatttt

SEQ ID NO: 47554 - DNA, 387 bp, Glycine max
  Clone ID: LIB3139-119-P1-N1-C1
ggcgcagattcatagctcatggacattttttcaaaaatggtgactcagaaagtgcgagtccaaattgttacatctgaaaagagttactggcatgtatatgatcctgacaagtttcagatgtttgacaacagtgaaataggtctttattctaatcccactttggaagatatcccacattcagcttgggaccttttttgctgggacagtgagaaaactttgccaaataatttttctgcagaattgctctcttgcaaattggatactgttactggccaatattatcctgagtgggctccaattaattgtcgagttcatcgacaaccaattcacatcactgaaggaaattatgtcagaaagcaagatgtcagcattgaatatgatgcatgt

SEQ ID NO: 47555 - DNA, 100 bp, Glycine max
  Clone ID: LIB3139-119-P1-N1-C10
cacttacattcaacacatcaattatcaacaacaagcacgtttatattaaccaaaccattacataactaccaaattacaaaattaaaattcttttaacctt

SEQ ID NO: 47556 - DNA, 390 bp, Glycine max
  Clone ID: LIB3139-119-P1-N1-C12
tttcactttactgaacaacgacttcatcttcacggttcgttcaaatttccaacaagggttcaagggtattatgcttgctggattcattctcttgctgaaatgcagtctttctagaaagtttgttcaactgtccctttattggcgttagctatgctacctactggagcaaaagagacccaattacgtgagaacaacagccagaaggtccatcctcaaccaatggaagaggccatgaatcagaatccagaagcaatggaaaccctaatatctaaaggttttacaaatatctcttccttgaagtcagcttatatccagcttcaagctgctcatactccctacgaccctgataaaatccacactgctgataaacttgttattagtgagctgaaa

SEQ ID NO: 47557 - DNA, 186 bp, Glycine max
  Clone ID: LIB3139-119-P1-N1-C3
gaattttgattctagcaagcagagcttttgtcaattttggatggaccttctcggtggaggaattttactggacaaaactggagattggatcacacttatacaaaattctccaattagtaacttgttgagagttgctgcttggaagaaaggttgtttaatggtcaagattgtgatgtcagggaatgc

SEQ ID NO: 47558 - DNA, 352 bp, Glycine max
  Clone ID: LIB3139-119-P1-N1-C4
ctccgattggcccaaaggtaaaaccgtcgtgccaaagtggggtgatgaagtgaaattgattagttctggtaaaatcttggaaaacaataagactgttggtcaatgtaaagtaccatttggtgagactccagggggtgttataataatgcttgttgttgtacagccatctctagcaaaaactaaagctgataagaaggttgatgattcgccaaagaaggttgtctgttcttgttccatattgtgaagagagtttgtgagttggatatgcgtatcctcatgcatcaatcacttatgaactgtaaaaatcatttgtctgaacaatcccctatttcagcattcttgtgtaaagttc

SEQ ID NO: 47559 - DNA, 351 bp, Glycine max
  Clone ID: LIB3139-119-P1-N1-C6
tgcccttgtatcactggccctctttggtgcctttgtgaggcgagctgctattacaactgttgatgtgttgactccaaaggttttcattggtttgattgtgggtgcaatgcttccttactggttttctgctatgactatgaagagtgtgggaagtgctgctctgaagatggttgaagaagtacgcaggcaattcaacaccattccagggttgatggagggaactgctaagcctgactatgccacatgtgttaagatcttcactgatgctttcattaaagaaatgattccacctggtgctcttgtcatgcttacaccgcttgttgttggaatcctttttggtgttgaaacact

SEQ ID NO: 47560 - DNA, 322 bp, Glycine max
  unsure at all n locations
  Clone ID: LIB3139-119-P1-N1-C9
cacgctgcttcttcagctngagaaatggcacagggaacgtttctattcacatctgaatctctaaacgagggtcaccccgacaagctgtgcgaccagatctctgatgcagtgctcgatgcgtgccttgaacaggaccctgacagcaaggttgcctgtgagacatgcaccaagaccaacatggtcatggtctttggagagatcacaaccaaggccaacgtagactatgagaagattgtccgtgacacatgccgccaaattggattcatctttgatgaggtggggcttgatgcttacaaatgcatggtgttggtcaacattgagc

SEQ ID NO: 47561 - DNA, 369 bp, Glycine max
  Clone ID: LIB3139-119-P1-N1-D1
cacaggaggaaattctgtcttctagtgcaagtgatttcagaggtgcaatggtgagtaaaaatagcaagcctcaagctactgcaatgcatgtgggagctatagaaattatcattgatagtttcgcaagtcctgattgcaacatagttggtgcaatgcttttggttgatacttatcataccaatcctgaaaatgcagctcgtagtatttttgttgcgcctttcagaggcggaaggcccattcgggtggttacattttcgaataccattgcgcagattgaaccagacatgaattcaaggtttcagcttttgagtaccactaccaatggtgatgtcgtccaagggaaagatctcgcaatggttaaagctaatg

SEQ ID NO: 47562 - DNA, 385 bp, Glycine max
  Clone ID: LIB3139-119-P1-N1-D12
cacacaccttaaatagcaacacccttctctactcttcagggttcgctctctttctctacatagtttctttttcactctcccattcttcttttttaagcaacaacaacctcattcctcggatcctaagaaaatgggaaccagagtgtggtgttgtttcatgatgttcttcctctctctcaatgctcttgcaatagcattggaagatcacaacctcaaaacgacgtccagggatgacatcaagtgcaccccatgtggccaagttccctccccgccgccaccctctccgtcgccgccagcagctccaaccaccacctactgccctccgactccgtcgcctccaagctccggcggtggtggtgcttactattactctccgccgtcaccc

SEQ ID NO: 47563 - DNA, 395 bp, Glycine max
  Clone ID: LIB3139-119-P1-N1-D2
atacaggtatagcattggcctgtgctatgaatagttctgttagggggcgcgccagttctgatatttacaccatctgctctcaagactgtgaattatggaatcctgcttgcacaaaagcaatgactatgtcatttaatccaaacccgtgttctgatgcatggagtttggaatttctgaagcgtaccggatttcattgtgatatcatttgtgtcactggatggactgccaccccaatgcaggatgttcaggttacaattgattggtttatttcctctcaggaatgtgttcccaggacctattgtgttttaaatccacaaaatctctttgtgttaaataggtggatgggaaaactgactttccctcagggcacttcccgaagtgttaagagaatgcct

SEQ ID NO: 47564 - DNA, 390 bp, Glycine max
  Clone ID: LIB3139-119-P1-N1-D3
cgtgcgctgttcctctgtctgtcgtttttgttttcaccgaagccctagctccgcatcgcaaccatgtcgaccaagcaaggtggaaaagctaagcctttgaagaaacccaagtctgataagaaggattacgacgaggttgacatggctaacattcagaagaaaaaggaagaggagaaggcgctaaaggagttgaaagccaaggcgcaacagaagggaagctttggaggttctgggctcaagaaaagtggaaagaaataagggctctttatcatgattgtatacatccaatattgagccctgtagtttattaccatgataacttctgtcttattgtggccttctttattgctctaatgttagtactgaactgaggtatttcgtgatgtaagc

SEQ ID NO: 47565 - DNA, 350 bp, Glycine max
  Clone ID: LIB3139-119-P1-N1-D4
gcatctatgaaacagaagttacagattggccagtaccagtgaagatcatttctggaaccattcttgcaacaattttgggaacaaccttctggaaactcttttcctttcttagagatgctggtaatgggggggtttttgttggcaatgttgctttagcattcacaacttcaagtgtgcttgatgcccaaagttgaaagcccaacacatatgaaggtttccaatacagatattgcaatgtgccaataaagcgcatagcatgggttgaaggcctgatgtgtttcgatcaatctttagtttcaattatgtctaaatgcaaagccagcatgagaatgggaaacactgatgctcaa

SEQ ID NO: 47566 - DNA, 160 bp, Glycine max
  Clone ID: LIB3139-119-P1-N1-D5
gcactgatttatcaatcgacacagacaaaacagctcgaagttagtgtgatgttttaaagcgatgctttcaacaataaccccagcatacatttttgaacactacaaactgctaagagatgctggtaatgggggggttattgattcatttttttcttttttc

SEQ ID NO: 47567 - DNA, 381 bp, Glycine max
  Clone ID: LIB3139-119-P1-N1-D7
gggagttgaaagaaagaaaggaaggatgggagtggcaccgaaaattgctccttcgatgctctcttccgacttcgccaatttggcttccgaggctcagcgcatgctccacatggacatcatggatgggcattttgtccccaatttaactattggcgctccagttattgaaagtttgagaaagcacacaaagggatatttggattgtcaccttatggttacaaatcctcttgattatgttgagcccttggcaaaagctggtgcttctggttttacatttcatgtagagacatcaaaagataactgggaagaacttatccaaagaatcaagtcacatggcatgactcctggtgtagcattaaagcctgtgacccccattgaaga

SEQ ID NO: 47568 - DNA, 350 bp, Glycine max
  Clone ID: LIB3139-119-P1-N1-D8
aatcctccctagacccatcctattgcaaatccggggtcgcgtgtttaaacggtaacgtttaccactatagtcgattctctgtcaaaaaatcactctcacaagcccgcaagttcttaaacctagttgataaatacctccaacgtggttcttctctttccgccaccgcaatccgtgcacttcaagattgtcgcactcttggagaactcaacttcgattttctttctagttcctttcaaacagtgaacaagacaacgaggtttcttcctagttttcatgctgatgatatccaaaccttactcagcgccatcttaaccaaccagcaaacatgcttggacgggttcaaagacaca

SEQ ID NO: 47569 - DNA, 394 bp, Glycine max
  Clone ID: LIB3139-119-P1-N1-E1
ccaggagccggcgccggcgccgctggttgacccgacggagtttacgtcatggtcgttttacagagcagggatagcagagtttgtggccacttttctgtttctctacatcaccgtcttaaccgttatgggagtcgccggggctaagtctaagtgtagtaccgttgggattcaaggaatcgcttgggccttcggtggcatgatcttcgccctcgtttactgcaccgctggcatctcagggggacacataaacccggcggtgacatttgggctgtttttggcgaggaagttgtcgttgcccagggcgattttctacatcgtgatgcaatgcttgggtgctatttgtggcgctggcgtggtgaagggtttcgaggtgaaaacaaaataccgggcgttg

SEQ ID NO: 47570 - DNA, 350 bp, Glycine max
  Clone ID: LIB3139-119-P1-N1-E10
catattttgatggtgactactggcctggggctgcagaggatttgatttatcagcttcgtcaagaggaagatggaagaaaacaaaataagaaaggaacaactaagaagactataacaaaaagggctttgaaagcatctggtcagtcagatctttctggaaatgcctcaaaagaccttctcctaatgcacaaacttggtgaaaccatttgcccaatgaaggaagattttatcatggttcatttgcagcatgcatgcactcattgctgtattctaatggtgtctggcaaccgttgggtttgcaggcaatgcaagaattttcagatttgggccaggggttatgaaccagaacta

SEQ ID NO: 47571 - DNA, 389 bp, Glycine max
  Clone ID: LIB3139-119-P1-N1-E11
taactcatgggattaaatgcaatgatctgtatgcattggtgattggaagctatgtgatctggactgctgttgctggagttagatactcaattgagcaaataagaaaaaggagatcttcggttttgtttggccaattatggaagtggtgtggcattcttgtgaagagttctgcacttctgtctatatggatatttgttatcccagtgcttattgggcttctctttgagcttttggtcattgtgccaatgagagttccagtggatgaaagtccagtattcctcctttatcaagactgggcattaggccttatatttctcaagatatggactagattggttatgttggaccacatgatgccgctggtggatgaaagttggcgagtcaaattt

SEQ ID NO: 47572 - DNA, 388 bp, Glycine max
  Clone ID: LIB3139-119-P1-N1-E12
cctctcaggaatgtgttcccaggacctattgtggggtagatccacaaaatccttttgtgttaaataggtggatgggaaaactgactttccctcagggcacttcccgaagtgttaagagaatgcctctttctatagggggaggagctggtgcaaagaatgctattctcatgaatatgccaaatgctgttctttcaatgtggagatattttgttggagatctcgtctttgaagtttctaagatgacttctccctacattaaatgtacagtctctttcttcatagcatttggaaatttggctgatgacaccatcaattttgaggcttttccccacacgctggtgcagtttggagagattcaggaaaaagttgtgttgaaattttcacaaga

SEQ ID NO: 47573 - DNA, 368 bp, Glycine max
  Clone ID: LIB3139-119-P1-N1-E2
aaaaccaaaaaggttttgcaccaactattttggcagtgggagggcagaacttgcctgcaagtttaggcaccgatgaagagaaagacaagactagtaccgttccggaccgtgatcagtataacaaagctgattttccagaagaatatactgatgctaaattttttgtcatcaagtcttacagtgaggatgatatccataagagtattaagtataacgtgtgggccagtacccaaaatggcaacaagaagcttgatgctgcatatcatgaggcacagcataaacctggaggctgccctgtttttctttttttttcagttataccagtgggctatttgtggtgcttgctgaaatgattggtcctgttgatt

SEQ ID NO: 47574 - DNA, 145 bp, Glycine max
  Clone ID: LIB3139-119-P1-N1-E3
cacaaatcgttcttttagtggggctaggaactagtgtagatttatggaacgctataaacagccaaaagcctaagttatgtgactcgctgtcttatgatggagtgcgctttgttcagagtactacatgggtctcttgagcacccat

SEQ ID NO: 47575 - DNA, 388 bp, Glycine max
  Clone ID: LIB3139-119-P1-N1-E4
gttcctagtatccatgatctttaaagagaaagggatacggccgggcatgtacgccgatgacggaatatttatcacgaaaacctccgagaatccactcgtaaaaatagatgaagacgacgacatctatgaggccgggatatttttatcagaaaagttaaagaaagatgggcgcccaagttgtggaaaatgtgaaggaatattagacttcctaggactacaatgaagatacgggacagacgaagtactaatgaacggagtctgaaaacggagagaactcttaacggaaagagaaatctccaacatagtttgaaaaaactatgacccaaacgcccctcgcgactttaactgagacatcaaagagggaagctatatagtgaaaactcaagat

SEQ ID NO: 47576 - DNA, 382 bp, Glycine max
  Clone ID: LIB3139-119-P1-N1-E7
ataaaccgcgttcacaggttgccgcaccttaaaacggggagcaaacgcaatcgttacttgatttcaagaatttatcaatttcttcctacttctttgtgtacgatttcttacgggaaagaaaatcactctctgtgctggtcacagacttcgtgaatcattttcttttccactcctagattatttgctgaacactctgctatttgatataggacttcgagtcagatttaaactttttctggttctttctcagttctctgcttaatttcaagctcaagctggtgaaattttggattagtgctaccactctcctatctggtataggacttcgagggtagacttttctacttctctcctttcttttcactctcttcttctcactgat

SEQ ID NO: 47577 - DNA, 305 bp, Glycine max
  Clone ID: LIB3139-119-P1-N1-E8
ctcgagccgtatcggctcgaggggttttagcttcgagagttgcagtgcctgacaacctgggtcttcgaatgcgtgggaggaccatggtccggccagctccaccatccaacaaacgagaactatcgtgggtcggcgatgttggttttgttgttgatgcttggtggcatgatggatggtgggaaggcattgttgttcaaaaggactcggaatctaattgtcatgtttattacccaggggaaaaagtggtgtctgtatttggtcctggtaacttgagagagtctcaagattgggtggggaattgagtg

SEQ ID NO: 47578 - DNA, 317 bp, Glycine max
  Clone ID: LIB3139-119-P1-N1-F1
ttcagtgagtgatcggtgttcacttgatctcatcataagcgtgagcgtcaattgaagaagatgcccatcagaaacatcgccgtcggaaggcctgaagaggcgactcacccctacacgttgaaggcggctttggctgagttcatctcaaccttcatcttcgtgttcgccggctcatgctccggcatcgtctacaacaagctcaccgacagcggcgctgccacccctgccggcctcatctccgcctccatcgcccatgcattcgccctcttcgtcgccgtcttcgtcggcgccaacattttcggcggtcacgtcaaccc

SEQ ID NO: 47579 - DNA, 367 bp, Glycine max
  Clone ID: LIB3139-119-P1-N1-F10
gcaaagtttaaggaggagtacaagattgatgtatgccaggatgccagggcttgtctgaggttgagggctgcttgcgagaagctgaagaaggtgcttagtgctaatcccgaggcacctttgaacattgagtgcttaatggatgagaaggatgtcagaggctttatcaagcgcgatgagtttgagcaactgagtcttccaattttggaacgggtgaagggacctttggagaaggcacttgcagaggcaggtcttacagttgagaatgtacacatggttgaggtggttggttctggatctcgtgtgccagctataaacaaaattttgacagagttcttaaaaaggagcctaggccggcaatgaatgctag

SEQ ID NO: 47580 - DNA, 385 bp, Glycine max
  Clone ID: LIB3139-119-P1-N1-F11
acccattctaagaatcccataacaacaaggcttgtcacgtgggggcaaaaactgaagagaggagcgaagaccttatgtgggaaaaatgggtcgggttaccttccaatagggtcggatccgctttgtgacagggctccggcggtgccgaaggggcacttggcggtgtacgttggggaggaggacggcggtttccggcgcgtattgattccggtgatctactgtaaccaccctctgttcagcgatttgctgagggaagcggaaaaagagttcgggtttgaacaccccggtgggatcacgataccgtgccgacttaccgagtttgaacgggttaagacccgtatcgcgtccgggtcgggtcaacgcgggaggacccggagattgggtt

SEQ ID NO: 47581 - DNA, 149 bp, Glycine max
  Clone ID: LIB3139-119-P1-N1-F12
ctcgatcctattcagctcgagaaaaaaaaaacgcgaacgtataatttaaaaaaaacaaaaaacaccaaaaaccaaaatatacaaaaaacaatactatttataaattacaatatcaaaatatctcacctcatttattatcactcactcat

SEQ ID NO: 47582 - DNA, 334 bp, Glycine max
  Clone ID: LIB3139-119-P1-N1-F2
aggactaccatgactttcctccggcaccgttgatcgacggaggggagctcacaaagtggtccttgtacagagccgccatagctgagttcatagcaacactcctttttctttacatcaccgtgttgaccattattggctacaagagacagagtgacaccaaaatccccggtaacaccgaatgtgacggcgttggcattttgggcatcgcttgggccttcggtggcatgatcttcatccttgtttactgcactgccggaatctctgggggacacatcaaccctgcggtgacattcgggttgttccttggacgcaaggtgtctttggtgagggcgtt

SEQ ID NO: 47583 - DNA, 391 bp, Glycine max
  Clone ID: LIB3139-119-P1-N1-F3
tttttaatgttatgctcattagatatagctatgaaaaatgactgcgccaggctaaagctccaagtatgtttttacaatccttcaaaaattttgtttctttgtgtgtgtatggtgatgataacttaattagtgttcatgaatatgtcaagccttactttagtggttctaaattgaaaagctttctagctggtcataatatcaccattactgatggtattgacaaaactagtgcaactttgcaatttagaaagttagcagattgtgattttctcaagagaaactttaagcagatgtctaatgttttgtgggtggcttctgaagacaaggcgagtttatggtcacaacttcattatgttttgtgtaataatctggaatgcaggaagcttatttt

SEQ ID NO: 47584 - DNA, 211 bp, Glycine max
  Clone ID: LIB3139-119-P1-N1-F4
cggctcgagcggctcgaggtgtttataaaacgacaggaggagcgctggtctggtcggtgtggcactcaaacattgtttgttgtaggaagaggaatcttgagaaatggcaggggacagcaagagcaagattctgttcatcggagggactggttacatcggaaaattcatcgtggaagccagcgccaaaagctggccacccaacttttctttt

SEQ ID NO: 47585 - DNA, 171 bp, Glycine max
  Clone ID: LIB3139-119-P1-N1-F5
aaagacgaattgatgttttcctagtcattgaatggcaaagcacgtgtcttgtgacaagttggtttcttaattccataagttattcctcaattttgtattacttggatcaaaagcacggagatttatattatgcaaatttaatgtacaatctttattttaattttaatttta

SEQ ID NO: 47586 - DNA, 393 bp, Glycine max
  Clone ID: LIB3139-119-P1-N1-F6
ggcttattgagttttccatggatcatgattggtgtgcgggagggagaaaactgttgaacctactgcttgatggaactgtaaatacaggagatcatccttccttgtatctcgcgctttcagagatgggtctccttcacaaagctgtaaggagaaacagcaagcagttagtggagtgtcttttgagatatgttcctgagaatatttctgataaactaggacctgaagacaaggcactggttgatggcgagaatcagaccttcttgtttagacctgatgttgttggtcctgctggtttgacaccactccatatagcagcccgggaagatggttctgaggatggacttgatgctttgcctaatgatccttgcatggtgggaattgaagcatggaaaa

SEQ ID NO: 47587 - DNA, 374 bp, Glycine max
  Clone ID: LIB3139-119-P1-N1-F7
gaagagatgacattgattccaggaaccagtgttggagaggcttacaacaagctaatagttgaacttgagaaaagtgttcctacattggttggcattgaatgtcccaaggatgagaaacttcctcgtcgcaaaatttttgacaaacctaagacgcgctgcttcactattctccctatggagtttaatcttgtggtccgtcaaaagtttttaaattttgtgaggttcattatgaagaaaagggacaagcttagttgtcaagttggaatcaacccatactccatggaatggactggtttggccaatagattactgagtaagggcaatgatattctgtgttgcgattatgctagttttgatggtttgattaccaagca

SEQ ID NO: 47588 - DNA, 387 bp, Glycine max
  Clone ID: LIB3139-119-P1-N1-F9
atttgctcaatacaactcattctacatttctatcgggtgggtctccattaccaaatttttctgtacgtagtttctacctcctaggtcccaccttcgtttctctgaaaaatctcatctttttggggctcttttcacttgaatctccccagttatgattcctcaacttatggtacaaattgtctgaaaagtttggtactttattaaagtagttttgctcttccctcatacaaattccattgagcagaaagttaccaaatccaaaaaggtttctatttccgttattgatttagcaatggattcagcttgtgcaaccctgaatggccgccatctagccaaagttagtgagggaattggaagaaacagaacaagtggctttttgggtgagag

SEQ ID NO: 47589 - DNA, 394 bp, Glycine max
  Clone ID: LIB3139-119-P1-N1-G1
acccgatctccacaagtacgacctgtcttccatcagagggttgaagtccgggggagcccctctgggtaaggaactcgaagacactctcagagctaaattccccaacgccaaacttggccagggatacggaatgactgaggcagggcctgtgctaacaatgtctttagcttttgctaaagaaccgatagacgtgaaaccaggtgcatgtggaaccgttgtaagaaatgcagagatgaagattgtcgatcctgaaaccggtcattctttacccagaaaccaatccggtgaaatttgcataagaggcgaccagattatgaaaggttatctaaatgatggagaggctacagagagaaccatagacaaagatggttggttgcacacaggtgacatcggt

SEQ ID NO: 47590 - DNA, 315 bp, Glycine max
  Clone ID: LIB3139-119-P1-N1-G10
ggcactcacactactatcatgcgtgagctctcgggggggagaagtgcacaagatctggtcgcattcctgtcacacaagttgatggtaggaagcaattttgattcgtaagcatattgaatacctgttcaacgcatgatttaacacagtaaagtaaaggaatggggttgatttttcagatgttatggaccactgaaagggtaatacctgatccgcacagactattcgatcagctttcattcatagccaatcaatctgagttatctatgattgctactgctactgattgaaattctgatggccactttttgctattca

SEQ ID NO: 47591 - DNA, 260 bp, Glycine max
  Clone ID: LIB3139-119-P1-N1-G11
gccgaaacgtggatgatgcagaccaaccttatgagtggggcgtatttttcgctaactggctatgacgatttcgttgaagaccttagctcgtaagactatcaccttcactgcttaacgctttgataccagttacaacatactgtccaaaacgctagacagggtggctattcttacggatcaacagcgcataatgtttatccgtaacaggtgccagactgtataactatccgcgaatacaacatgcaaaaggagtgcacact

SEQ ID NO: 47592 - DNA, 222 bp, Glycine max
  Clone ID: LIB3139-119-P1-N1-G12
gggaaacattactctttgctcctgctaacgcggtggggggtgttgcatgctgacacaaaggtatttactggtcacgaacgttatactatggacctccaaagtaccataggcgggatagggcctgaccaaaacaagactgtaacaccaaatcctggaaaactttccacttgcacggttggattggatcctaaggtgaacctcttttcttgaaacaagggggcc

SEQ ID NO: 47593 - DNA, 205 bp, Glycine max
  Clone ID: LIB3139-119-P1-N1-G2
gtccaatcattttctgtgttccaatatttctaaatgcgatgggaggattaccaagcaagacattagcactaaaacataaatgattaacaggctcagattcatagatgatagacatattctcaaaaatgtcgactcatgaagttgcgatgtgcaaattagggacagtctgaaaaaaagtgactggacatcgtgtataggatcctaa

SEQ ID NO: 47594 - DNA, 223 bp, Glycine max
  Clone ID: LIB3139-119-P1-N1-G3
cgcgtcgctgctccgtaccagtttcactgcataaattttggagaaaactctgcaaacatgttggtttatcaggacctccttacaggtgatgagcttctctcggactccttccgttacaatgaaattgagaatggaatgctgtgggaagttgaggggaagtgggttgttaagggagcagttgatgttgacattggtgcaaacccttttgctgagggtggacaag

SEQ ID NO: 47595 - DNA, 395 bp, Glycine max
  Clone ID: LIB3139-119-P1-N1-G4
tttgtttctggggatggtgaagagatgacattgattcggggagccagtgttgaagaggcttacaacaagctaatagttgaacttgagaaaagtgttcccacattggttggcattgaatgtcccaaggatgaaaaacttcctcgtcgcaaaatttttgacaaacctaagacgcgctgcttcactattctccctatggagtttaatcttgtggtccgtcagaagtttttaaattttgtgaggttcattatgaagaaaagggacaagcttagttgtcaagttggaatcaacccatactccatggaatggactggtttggccaataggttactgagtaagggcaacgatattctgtgttgcgattatgctagttttgatggtttgattaccaagcaagt

SEQ ID NO: 47596 - DNA, 269 bp, Glycine max
  Clone ID: LIB3139-119-P1-N1-G5
cgcgtgcttgtcgtttgttctgagatcaccgcagtcacggttcgcggcctaactgacacccatcttgatagccttgtgggtcaagccttgtttggagatggtgcagccgctgtcattgttggatcagaccccttaccagttgaaaagcctttgtttcagcttgtctggactgcccagacaatcctttcagacagtgaaggggctattgatggacaccttcgcgaatgtggtctcactttccatctcctcaaggatgtttcctggactca

SEQ ID NO: 47597 - DNA, 276 bp, Glycine max
  Clone ID: LIB3139-119-P1-N1-G6
ctcgagccgaatcgtttcgagctttaagtgcagcactggggggggttgatgtgtttggactatatgcaaagaattcctcttgccacatctgagggttttcctcatgtgctttcacgcaaaaatggcgaaaaaggcaaaaggagatttgtctctgtggatggtgaagagatgacattgattccaggaaccagtgttgaagatggcttactacaagctaatattagaacttgagaaaagagttcctacattggttgcatttgaattttcccaaggttt

SEQ ID NO: 47598 - DNA, 389 bp, Glycine max
  unsure at all n locations
  Clone ID: LIB3139-119-P1-N1-G7
gaacaccattgaattttgattctagcaagcagagcttgggtcaattttctattgaccttctcggtggaggaattttagtggacaaaactggagattggatcacacttatacaaaattctccaattagtaacttgttgagagttgctgcttggaagaaaggctgtttaatggtcaagattgtgatgtctgggaatgcagcagtcaaaaggagtgattgggcctcattggtacaagtgtttttaacaaacagcaacagtacagagcattttgatgcatgtaagtggacaaaatcagaaccacattcctgggaattgatcttcccaatagaggtatgtggtcctaataatggttntaaatgtggagttctgagtgggcaaatcaaacttcat

SEQ ID NO: 47599 - DNA, 384 bp, Glycine max
  Clone ID: LIB3139-119-P1-N1-G8
gttcctgatgcactcaaggtgttgaggcttcagaggggggacaagtattgtgtgctgggcaggttgtcatctgaagttggatggagctactatgataccattagggagctggagaagaagagaaaggagaaggcagcggtggtttacgagagaaagaagcaactcaacaaattaagggtgaaagctgagaaggttgctgaagagaagctcggttcccaacttgatgttcttgctcctgttaagtattgagtagtttttgttagtgtttgaaattttttatgccacttataccaaattgaactacctttcaattttgcttgaggttgctttgttattggatcatagatttgatatctgatcatcttggaagctgttttttattta

SEQ ID NO: 47600 - DNA, 392 bp, Glycine max
  Clone ID: LIB3139-119-P1-N1-G9
agcactttcagagaggaagatgtttcaaactactggagcatttatggcccagtgcaagacgtgaggatcccataccagcagaagcgaatgtttggctttgttacctttgtttatccagagactgtgaagcttattctatccaaaggaaatcctcattttgtgtgtgatgctcgagtgcttgttaagccttacaaggagaagggcaaagtcccagacaagtacaggaagcagcagcagcaggtagatagaggagatttttcaccatgtggtactcctactggattggatgctagagaccaatttgatcttcaacttggtggcagaatgctctacaatactcaagacatgctgtggaggaagaagctggaggagcaagctgatttgcagcaagt

SEQ ID NO: 47601 - DNA, 387 bp, Glycine max
  Clone ID: LIB3139-119-P1-N1-H1
ctcgagccgggttgctggtgactactacaggatactgggggtggagcatgatgccacggatgaagagttgaagaaggcttataaaaagttggccatgaaatggcacccagataagaaccttgaagaccctcttaggaaagaagagtttgaggccaagtttaaacaagtttctgaggcctatgatgtgctaagtgaccccaagaagcgccagatctatgacttgtacggtcactatccccttaactctcaacgcttcaccaaggaatatggtggtgggaacatgaaggatgcaggggtggttgaaagcagcttgctttgtacccttgaagaactttacaacggttgcaaaaaagaagttgaaggtctcaaggattgttgctcctgatg

SEQ ID NO: 47602 - DNA, 305 bp, Glycine max
  Clone ID: LIB3139-119-P1-N1-H10
gtttccttattgacaatcccaaacagtctacaggttttggtattctcttgggaatctctcaagattttgaaattgctggtaatactcttatgccagctttttctgttccacaggctactgccagatcttctgaaaatgcggaatcctctgcatgatctggaattcgtgttttctttcgcttgttcgtttgtttaattcaataaaggaaattaggcatgaccctcttgttgagtatgctctgcctatctgaaaatttccacacctcttttaattgtcgtaatgatgtgtgaagtgtgtgttatttt

SEQ ID NO: 47603 - DNA, 390 bp, Glycine max
  Clone ID: LIB3139-119-P1-N1-H11
ggaacaggaaggacaaggactccaagttcagggggatggttgttgagagcagaatccaccgacttgctcactattacaagaagactaagaagctcccaccagtctggaagtacgaatcaacaactgctagcactctggtcgcttacagaatgtatcaactttcatggggtttgcttccttgcagtcaccggtgagccagcaattagccatatcatcttgatgtttatttgaaggctggataggctatgtggctaagttctgatcagaacctatggttagactgagaaagataatttaacttgttaagtcaatttatcaatgtggcgttctttttctcttagccggtggaggctgcccttttaagagatgactatggtttttggttttatt

SEQ ID NO: 47604 - DNA, 367 bp, Glycine max
  unsure at all n locations
  Clone ID: LIB3139-119-P1-N1-H12
caaaaaccctaggtagagagctcttcctccctttctcagagcaatggccgccgcagcacgccctctcgtcaccgtgcaggccctcgacggtgacatggcaaccgatgcctccgccaccgttcccatccctgacgtcatgaaggcctctatccgccccgacatcgtcaatttcgtacactcgaacatctccaagaacagccgccagccatacgccgtcagtcgtcgcgctggtcaccagacctccgccgaatcctggggtaccggccgagccgtctcccgtatcccccgtgttcccggcggcggaacccaccgcgccggccaaggagcctttggaaacatgtgccgngggggacgcatgtttggcccg

SEQ ID NO: 47605 - DNA, 354 bp, Glycine max
  Clone ID: LIB3139-119-P1-N1-H2
caaaaaaagttctcctttgaaacttctctgggctatgttgttttgaaagaagttacttcgcatcaagaatgggttcaggtgattggtttaagacaataattagcttaagaaaatcaaaacaaggtagatcaaagaaagcaaagggtatcttagctcaagagaaactaaatgcatcaaagtcaaacagctatccaggaaaagagtctggtggtttagcaaatggtactaaaagtgaaaaccttgtgtcagctggggtgtcagttgaaactattgctgcaaaaaggatccagactgcattccgagcttataaggctagaaaagctttacgtcgcattgaaggatttacaaaactga

SEQ ID NO: 47606 - DNA, 392 bp, Glycine max
  Clone ID: LIB3139-119-P1-N1-H3
gaaggtgttgagacttcagaaaggacacaagtactgcagtgctgggcaggttgtcatctgaagttggatggagctactatgataccatcagggagctagaaaagaagagaaaggaaaaggcacaattggtttatgagagaaagaagcagctcaacaaattaagggtgaaagccgagaaggttgctgaagacaagctcggttcccaacttgatattcttgctccagtcaagtactgagtagtctatgtttttaaatttttttatgcaacttatacccaattgaaactacctttcagttttgcttgttattggctatgaagtattgacaccgatacggacaccggacacggacacgttgacacctgtaatgtccaaaatatagaacgtaatatg

SEQ ID NO: 47607 - DNA, 384 bp, Glycine max
  Clone ID: LIB3139-119-P1-N1-H4
agaaggaagacgtttacaattgccgcagcaaatctccgggggggcatcaatctcaactcccatgtacctgttggcatgcaaatgatgcctacatcacaatcaagtagtccttttcctgcagttttcaaggcaaagcaggagaaatataattcaaaacttgctgagatgttccagaaagtggaagatcacgattcaggtgaccgaagatcatgcaacatgtccaattcaagtgtatgtgatggcagtcaaatgtctcccacatctgtaacttctgtaaccacagatcttgggttaggaatatgctcttctcctacctgcaataaattgaagaaacctgctgttcaatatacaatggagcctccaaaggaaatcccaagtcgattt

SEQ ID NO: 47608 - DNA, 286 bp, Glycine max
  Clone ID: LIB3139-119-P1-N1-H6
cttcccacattaaataccaactgtgtagtatagtactgcgtcaaggttaactatgttcttctttttttgttctcatctccacaccatgtcctaatctttctgcaccatcgttctccatttttggctttacaaaaccactgtgtctgattaagggttctttaatatttccaatatttcttgtagtgaaaaagttgttagctaaaagaagaccaagtttttggtgttgtagaaggaagagaagaattaacatgaaaattcagtgtgccgtgtgtgcgagagctccatc

SEQ ID NO: 47609 - DNA, 373 bp, Glycine max
  Clone ID: LIB3139-119-P1-N1-H7
tctacactcctctctctcactcactcacactctctgcggtgatagctgtaccacgtttttcttctccatctcagcctctgtcccaacaccattctcatggctgctctagctctagcactgcttcttctggctttcactggcacttcaagtgctacatggtgcgtttgcaaggatggaagcgacgcgatcctgcagaaaaccttggactatgcttgtggagctggtgctgactgtaatcctctccaccaaaacgggccttgtttccagcccaacaccgttagggcccactgtaactacgccgtgaacagctacttccaaaggaagggtcaagctcaagggtcctgcgactttgcgggaacagccattgttactg

SEQ ID NO: 47610 - DNA, 353 bp, Glycine max
  Clone ID: LIB3139-119-P1-N1-H8
catcaacaaatggattcgcacagcacttgggaagggtgggaaaattgtttttcttactagagttgatccttttccagtagctttattggctgttctttttggcgttaagaatgaaattctgagttctaacgccactaaccctatgctgacgcgacttcttgagaactgtaagagtctcaaatatctggttgatgagtgtccttttgcatttgtgaactagtatgtaatattttattcacttaaataaagcgcattactatgtgcaatgagtgtgtttaaatttcaaacaaaaaatacactataaacatttatttacaaaggtatggataaacgctcatatgttccttctaatt

SEQ ID NO: 47611 - DNA, 391 bp, Glycine max
  Clone ID: LIB3139-119-P1-N1-H9
ctccaatcagcggtgattttgtttatcataggaggatcggatgtactcgctcgtggatctcaactatattcacgatcatgatggcccttgaaaattctgaaaatatgcaaataaactgtgaggcatctttaaaatgcctccagggcaagggatttccttgcaattttcagagtaatgggagttctatggaaggctttacagagcttaaaaatgagcctggtactcatccttctggggatgttgctgagcctaactgtcacttaagcagtgagtttcttgagccttccaatgaatttcacaccaaacctacttatcaccaaaattacagcacctggacaccctgccattttaactctcacaaggtgcagcaatgccaaatgaatgcttttgg

SEQ ID NO: 47612 - DNA, 214 bp, Glycine max
  Clone ID: LIB3139-120-P1-N1-A10
attacagcattttaagactttgacatgagatattgtattcgaacatgtgcctatgggagcgtttatagggcacaattaccaagtggcaagattgttgccgtgaaaaaactccacggatttgtagcagaggtggcagcttttgatgagagttttataaatgaggttaaagttttgtcataaataaagcattttctttttgtgtagctccatgtat

SEQ ID NO: 47613 - DNA, 374 bp, Glycine max
  Clone ID: LIB3139-120-P1-N1-A12
tacatgagcaatgtttccttggtaagggacacacatgcgggggagtgggaaggatttcttcagcttgatgcgcagaggcgtcaacagcaggcagttcaacagatgccttctggttatcggggttttaaacagcagagctttcctgaatatgatggatccactgccaatcctcctccttatgctggttctaatctaccattggaatcgaggaacaggttcttagacaacatggaaacttatcctaataggcctcatgataattttggtgaatttcataggcgtggagatttcgcaaaagcttacaacaggatattaaaattctatatattaattgagtgggtccagattgatcgagtgggctgtttaatgcactg

SEQ ID NO: 47614 - DNA, 252 bp, Glycine max
  unsure at all n locations
  Clone ID: LIB3139-120-P1-N1-A2
ggactttagatttcgagcccatgaaacaattttgcgcacggttgaggcccaacaattattggtcgttcntgaaagggactgagggatggaccggggtggtgatggtggtttttttttttttagcttttctttttgtcttatccttttgttccttattgtactggttttttatttccttttaatttttttagtatgtttatcttgatttatttgctcttttttgtttcctctcctttcatatttttttgtctt

SEQ ID NO: 47615 - DNA, 308 bp, Glycine max
  Clone ID: LIB3139-120-P1-N1-A5
cccttcttcaacatgccaaacgacagcgttctgagtctgttgcttcttcgataccctgttcacatgccttctctctgctaattcccacgatgaccatattttcctaccgagtcaactccatgacgatgactcagtgagttgcactgctaccgacccaaaccttaactacaagccggtgatcggaatcctgacccaccccggcgacggtgccttttgttggttcagcaacgcctccttgggttttttacattactatcttctatttttttatcggggggggtggtgtttcttgatttatttcatttttt

SEQ ID NO: 47616 - DNA, 169 bp, Glycine max
  Clone ID: LIB3139-120-P1-N1-A9
cagttacaagtatgtgtgaattcaaattcccgtcattggggggggggattgtgagagaatgcccatggatggaaagattcgcggagggtggttcgtgtgcaccaaagttacaaaacatagttagtgctaatgaagaaggaaacgaggtagccaattggtattgggaagg

SEQ ID NO: 47617 - DNA, 398 bp, Glycine max
  Clone ID: LIB3139-120-P1-N1-B1
ctctctctctctctctctctcattcacacgaatcacacgctccacagtgcgattcattcaccaatggatcgcaacggtgttctctctcttgcattcatctgcattgtagtcgccggcgtcggaggccagtctcccgccgcagcgccctcgaacactccggcaacccccgccgccgccactcccgcccaagcaccttccacaccgaattcaccagccccagttgcttctcccaaatcatctccaccagcttcgtctcctaagcccgcaaccgcaacccctgcttcgtcgccggcggcatcttctaccaccacccccgccgcgcctgctccagcgaccaagccacctgcagcctcttctcctccggcgccgggtcccgtgagctcttcccccgctcccgg

SEQ ID NO: 47618 - DNA, 339 bp, Glycine max
  Clone ID: LIB3139-120-P1-N1-B11
tgccgctacatatggaaattttgaaaatttcatccagggggggagcactgcaactgattactcgtccaaggaaggatcaaacgataacatagatgttaacaatgtcaccatttccaaggaagaggaagcaaaaatcatagatcggacagggcaattaaaagtaggcaaaggtcctgccaagaataagaatgcaaagccaccaagccccagaggcagtcatgtaagttcagttaaaaagaacaaagatggaaaagatgaagaggtagcatttgctgctggaaatggtacttttgctttagacttttacccaagactgctaatttaaaaacagatctttgt

SEQ ID NO: 47619 - DNA, 395 bp, Glycine max
  Clone ID: LIB3139-120-P1-N1-B12
gtttcttggtactacaacgagtggggatacagctcacggcgcattgacctgcttgtattcgttgccaagaagtctttttaaggtggtgtactgcaaagttgcttgtctacacattatgtgcttgtctagttgcgatttagtgtcttgctcgtgcaaaaaatgagaggtctgaataaatcggtttctggaaccagtggatttaccttgttaggagcattagctctattttggactttgcctcttgtggaggatggatggagtttttgtatttggggggggggtgtttttacttattactatttttttttcctattttttttttatttatctttcatctttttatcgtaatcaagtttttatttttttttatattatatattcttatatcttttttt

SEQ ID NO: 47620 - DNA, 331 bp, Glycine max
  Clone ID: LIB3139-120-P1-N1-B2
caaacacagtttaagagagtgaataaatccagcatggcggtgttctctgcaacattctccactctcaaccatggcttcaaagcttttactcatcactgtcttcgtttttgatttgattgcttttggacttgccgtggctgctgagcagagaagaagcaccgctagtgttgtgacggacaatgaaaagaattataattactgtgtctataactctgatatagcaactggctatggtgttggagcatttttgtttctcttggttagtcaagtcctgataatggtggcaagtcgatgcttttgttgcgggaagcctttttactctggaggctta

SEQ ID NO: 47621 - DNA, 398 bp, Glycine max
  Clone ID: LIB3139-120-P1-N1-B3
aaaaaaatggggctgaaggtgctttgccttggatgcacagtcatgtgaaggtgcagtcagtgcaaaagaatttttatcatcaggcaataataatgaagaaatggtattaattactagccactttaattactagtgccatttcccctatttgttaaggagtcacaagggcaggctatcatttgcacatgattgacaaaacttgacaaatatgaaacattcaattgaataaattaaaattagagggattatttggtagctcctataatatgagggattggaagtatatgtgttgccaaatatcaactatcttaaaagctttagcttttagatagaggtccatcgatgttgttatatctctagcatttatctgtaattctctggttacaggctagctattt

SEQ ID NO: 47622 - DNA, 264 bp, Glycine max
  Clone ID: LIB3139-120-P1-N1-B4
cccatctcagcccttcaagggggcgccgctgattttttaacttgacatgaccattcagaccgtttttctcatcaagaccctcaccgttcttggcgccgaggtttgctggttctcttgttacatcttttccacttattactacttccacgtcttcatttttcgtttctgttccgtcttttttaacttgtggtagttgtgtaacatttttttcaatctattatggataatctctattccttattatgctcttcatgtttaattttt

SEQ ID NO: 47623 - DNA, 150 bp, Glycine max
  Clone ID: LIB3139-120-P1-N1-B6
ggaaaatatcttaggatttgaggtgctggagaagaagcgtgaagtgtatggtatgggggcgcttttaccgaaggcactaaaggaggaaactattggcttcagaatgtctttactttagcctggtttctttcaaaaaatagttcaaagtct

SEQ ID NO: 47624 - DNA, 93 bp, Glycine max
  Clone ID: LIB3139-120-P1-N1-B8
agaggccctccgacaagcctctaaggcttccattgcaggaggggtacaagattggtggtattggtactgtgccagtgggacgtgtagagactg

SEQ ID NO: 47625 - DNA, 227 bp, Glycine max
  Clone ID: LIB3139-120-P1-N1-B9
ccctttctctctctaaatccctttctctctctacctgagtcaggttccctgattttatcgttttctcgccacaccccagattccgccgcgtgagggtgagccctccgatgtgctgacgtcacgtcaccatgggccagtgctacggcaagaccaatctcgccccggaaaatgacgccaccgcggccaccaccaacaccgagaccaccgcggttgtcgtcggatcaggc

SEQ ID NO: 47626 - DNA, 383 bp, Glycine max
  Clone ID: LIB3139-120-P1-N1-C1
ctcggttaagtcaaggttggtctcttctggtctgggcgggtcttctacgcagacacataacataacacaacgcacctcttcttcttcttctttcccttcaaatttcaacttcttcatccattttgtgctccaaacagcacaaacactgcaatcacaccgtcttcgctttctactcatctaaaagatagaggttcatgggttgctttggcttctgcaaaggagatgatagtgttacagttgctgacagaggacctttcatgcaaagcacttctactgggaaccccagttatcatggaagacacacagcagttactgctccttggactataaatttttcaacctattgctgtccttttcatacagttgatgaattgaagtctttg

SEQ ID NO: 47627 - DNA, 330 bp, Glycine max
  Clone ID: LIB3139-120-P1-N1-C10
ctcgagctgtttgcacagtccagaggaagctcgtcgtcggaaaatgaaaagctctgtgtcgcatcgaatgcttgaaaaaggctgatgtgcttcccatagcacaaatggaaaagttccattcgtggcaaaggatgttgaatgctcctgattaaaatgataattttgatctactgttgagcattgattggttgggtttccaaggagcaggcaaagtttttccaatcaggtatgttttcgatgataacttgtgttggctaacacacaagaatgcgtggggggaaattttccagatggtttttttggataccaaattttgtgaatatgtctttt

SEQ ID NO: 47628 - DNA, 354 bp, Glycine max
  Clone ID: LIB3139-120-P1-N1-C2
ataccctattactccttattcattcaccaccctatgcaggatggctgaggagactccaaaccagacaaccacaccaccccctcctcaagagtcagtggtgcaagtggaggaagtggtggtaaccgatgttccacagcccgacaaaacaacaactacagttccagttgaaagagattcgcaacctcaaccttatgagccagagaagaagaagcccgttgaggaaaccgtcactctcgagactcacctctccaaacccaacaatgctgaccacaccaacaacatccctgaattcattgaagaaagcaccaaactttctgacctcccagaaaacgaaaacaaggctcttcaagagct

SEQ ID NO: 47629 - DNA, 404 bp, Glycine max
  Clone ID: LIB3139-120-P1-N1-C3
gttattgttttccaacagcttctccacctcccatggctgtacaagagttgcgcacaaccattcgagtgctacctccgcaagattgctatatttctactctgagaaacaatgtacgttcccgtgcttggggtgctgcaattggttgtagttataaagttgagcggtgctgcattgtaaagaaaggaggtggaactattgatcttgaaccttgccttacacatacctcaactgttgagcctacccttgcaccagtggctattgagcggacaattactactagggctgcagcttcgaatgcattgcggcagcaaagatttgtacgtgaagttacaatacagtacaacctctgcaatgaaccttggatcaaatatagtataagcattgttgctgacaagggtctaaaa

SEQ ID NO: 47630 - DNA, 182 bp, Glycine max
  Clone ID: LIB3139-120-P1-N1-C7
caatctgtgttatggatgatgaatgctcctgattcaaagatggtattgatctactgttgagcattgatttgttgggtttacaaggagcaggtaaagcttttccaaacaagattgtttttgatgataagcttgtgttggctaacacacaagaattttttgatggaaattttccagtgtatttc

SEQ ID NO: 47631 - DNA, 205 bp, Glycine max
  Clone ID: LIB3139-120-P1-N1-C8
ctcgagccgtttcttctcgaggaatcccttctggatttggcggcacagttatttgtaatagcatttttaatgagatgctcattagatatagctatgaaaaattactgcgccaggctaaagctccaagtatgtttttacaatccttcaaaaattttgtttctttgtgtgtgtatggtgatgataactgaattagtgtttatgaatt

SEQ ID NO: 47632 - DNA, 253 bp, Glycine max
  Clone ID: LIB3139-120-P1-N1-D1
gttattttttcccaacagcttctccacctcccgcggcggtttatttagttgcgcacgaccattctagtgctacctccgcaagattgctatatttttactctgagaaacaatgtacgttcccgcgcttggggtgctgcaattggttgtagttataaagttgagcggtgctgtattgttaagaaaggaggtggaactattgatcttgaaccttgccttacacatacctcaactgttgagcctaccctttgcacca

SEQ ID NO: 47633 - DNA, 363 bp, Glycine max
  Clone ID: LIB3139-120-P1-N1-D10
ggaacattttttcatgacctcaagcttaaaatttatcgcttctactaacaacggtgaaccattttaagcaaacaagtttttgatggttaaagcatattttatatggcctgctattatactagtcatcaaaaaacacatttatcaatatatgagaattttgtaatgtatatgtcactaaatatcttgatgcctattgtttactgattcttttatattattattatggtttttgttttcatagttaaatttttctttattatttttatattttatgtgggggggggtaatctttttatatattttttttataatctctttttaaaatattctcttattttatttattttgtttaattttttcctt

SEQ ID NO: 47634 - DNA, 362 bp, Glycine max
  Clone ID: LIB3139-120-P1-N1-D11
tgaacgtgaaatcggtgcctatgactcaatatttattagctttggacactacattctaccattcttggcagacaagtttttgtttgggatgacattgtttattgtgcttttgatatacaaatggagaaaaaggcatttgtcaatatatgaaaatattgaaaattatctggaacaaaataacttgatgcctattggatactcatacaaataaattaagaagatggctagaggtttcaaagacaaattgggtgaaggaggctatggctttgtattcaagggaaagttgcttagtgggccttttttggcaattaaaatgctacattaagtatatagtagctggtcaatactttattagttgtaat

SEQ ID NO: 47635 - DNA, 366 bp, Glycine max
  Clone ID: LIB3139-120-P1-N1-D12
aggatttctttgagaacttggatggcctatctatcgaggggatcaatgaaccggaaaggcagtggcactgtacagcttgtcgaggtggtcccggtgctattgattggtacagaggactgcagcctctgattactcatgccaaaacaaaggggtcaaaaagggtgaagatccatagggagtttgctgagcttttggaagaggaactgcgcaaaaggggctctgcagtaaattcacctggggaagtatttggtaagtggaaaggttttaaagatgaggggaaagatcatgaaattttttggctcttcgaggttgttatttacaattcattgcttgtacaggtttaaattatattagggtttttggtat

SEQ ID NO: 47636 - DNA, 397 bp, Glycine max
  Clone ID: LIB3139-120-P1-N1-D2
ctctgttctttctctctcaaaggaaagaaaaggaaagaaaagaaaagaaaaagaagagagtgtaggtaaacagaagcacacactacacagttaccaaaatcaggttcaaacgcacagatctgggagaagagaagaagaagaagaagaagatgggacaggatcagaaccagagatcgctgatctacgcgttcgtgtctcgcggcacggtgattctcgccgagtacactgaattcagtggcaacttcaacacaatcgcgttccagtgcctccagaagctccctgcctccaacaacaagttcacctacaactgtgacggccacaccttcaactacctcgtcgacaacggattcacttattgtgttgttgcggatgaatcgattgggagacaggtgcctgt

SEQ ID NO: 47637 - DNA, 374 bp, Glycine max
  Clone ID: LIB3139-120-P1-N1-D3
acaaaactggagattggatcacacttatacaaaattctccaattagtaacttgttgagagttgctgcttggaagaaaggctgtttaatggtcaagattgtgatgtctgggaatgcagcagtcaaaaggagtgattgggcctcattggtacaagtgtttttaacaaacagcaacagtacagagcattttgatgcatgtaagtggacaaaatcagaaccacattcctgggaattgatcttcccaatagaggtatgtggtcctaataatggttttgaaatgtggagttctgagtgggcaaatcaaacttcatggcatttgagtttccttattgacaatcccaaacagtccacagtttttgatattctcttgggaatc

SEQ ID NO: 47638 - DNA, 408 bp, Glycine max
  Clone ID: LIB3139-120-P1-N1-D5
aagatcaccaaagtacttgtgagtgtatacccaacacagactaggatcaacatggactactacacccgcgtttcagaagttgagagggaacctatcatggagtattccacaccacgaccaatgatgggcaactaccaccaccctaatgctcaccgtgtcctcaacgagaagattgtttatgaggaggatgtgattggaggatcccgccacaaccacatgcatcaccaccaccctgagactcatgagagagtcaaggtggtggagtatgaacaagttcctgagaggcgcgttgtctatgaagagaaagttgcttatgacaacgatcgttactactctccaaggtattgaaattggacaaatggaagaacacctataacgtgttatcatgtggctttttattaggcaggc

SEQ ID NO: 47639 - DNA, 326 bp, Glycine max
  Clone ID: LIB3139-120-P1-N1-D6
ctcgagccgttctagccgctcgagccgccatactccatggaatggactggtttggccaatagattactgagtaagggcaatgatattctgtgttgcgattatgctagttttgatggtttgattaccaagcaagttatgagcatgatggtagaaatgataaacagtctttgagggggtgatgaaaagatgaatcggaaaggactcacctgctgcaggcttgacgatcacggttggacttatgagagaatgaaggttgtggagtttgatcaagagcctgtgaggcgcgttgtctatgaagagatagttgtttatttacaactatcgtt

SEQ ID NO: 47640 - DNA, 319 bp, Glycine max
  Clone ID: LIB3139-120-P1-N1-D7
cgggtttcctatatttcacgggcattaatttcgttcgggcagggttgctgctattctctgtgtgtgttttgcacccacagcagcaggacctggaattcctgagatcaaagcttatcttaatggtgttgatactcccaacatgtttggtgccacaacattgattgacaagataattggaagcatcggagctgtctctggaggtctagatttgggaaaagaaggaccgttggtgcatataggaagctgcattgctttcttactaggccaggggggcgttggcaattacagtaccaaatggcacttggcttcgatattttta

SEQ ID NO: 47641 - DNA, 403 bp, Glycine max
  Clone ID: LIB3139-120-P1-N1-D8
gctagacttagctattcttacctcttggcatgaccattcaaatgtcttcttttctcttagcttctcttgctgttttctttttcttctcctccttggagaagagttttgcctttcaagcagcaagaaaggaggacacagaaagcaacaatcttcatcaatatactcatcttgttcacctcagctcactccttccttcatcttcttgcagctcttctaccaaaggtcccaaaacaaaagcatcattagaagtggtacacaaacatgggccatgctcccaactaaatgatcatgatggcaaagctaagtctacaacaccacacagtgacattctgaaccaagacaaagaaagggtgaagtacattaactcaaggctctctaagaacttgggccaagatagtagtgt

SEQ ID NO: 47642 - DNA, 254 bp, Glycine max
  Clone ID: LIB3139-120-P1-N1-D9
ggcgcaagaagcagtctgatgtcatgcgcttcttgcagcgggtgaggtgctgggagtataggcagcaaccttccattgttcgtttgacaaggtctacccgccctgacaaggctcgtcgcttgggcttcaaggctaagcagggctatgtgatttaccgtgttcgtgttaggaggggtggccaaaagagaccatgttccaaaggtttggcatattgtaagccacctttctagggattgaccttactaaaatttcag

SEQ ID NO: 47643 - DNA, 389 bp, Glycine max
  Clone ID: LIB3139-120-P1-N1-E1
ggaccacctggccaggaagcagttgcaaatgcagaaataagtgcagctatgttgacagcaagagctggtgctcgggatccatcagcaattccatcaatatgtcgcgtttcagctgcacttcactatcctgcgggcttggagggttcagatgctggtctagcatctgtgctggagtccctggagttctgtttgaaacttcgtggttctgaagctagtgtgttggaagatttattaagggctattaatcttgtctatattagacgggatcttgttcaaagtggtgaagccttgttgaatcatgccaaccttgttcaacaagaatatgaaaagacaacaaaattttgtttgagtaaggctgaagaacaagagaaaactatcatggaagaatg

SEQ ID NO: 47644 - DNA, 218 bp, Glycine max
  Clone ID: LIB3139-120-P1-N1-E12
aagaacctttctttgccgactcaattgccaccgacggggcggctgtggaaagctagcctacctctcatgcccctttgcctaatcggggtcatgcgcttcaaactggccattctcttgctaactgaaaaggacataggcgctctagcaatgattaccgttgaggaatctcgtgtattatttcttgtgatcccaagtttgtcatctgaacaacttgtacc

SEQ ID NO: 47645 - DNA, 378 bp, Glycine max
  Clone ID: LIB3139-120-P1-N1-E3
ggaatttcttacagcttggtcaacccaggtgcgtcctgcaacaactctgttggctgatgggtgtccatatttgtatgctatggtgcatgatagttcagtgtctacaataccaggtgattttgtcattggtgttaagttgacaaccataaacaatatgtgtgcatatgggctcaatcctggtatttcaggttctcgtcttttgggcaccattcctcagtccatttcacagcaaactgtttggaatcaaatggcaacagtgagaacaccattgaattttgattctagcaagcagagcttttgtcaattttctattgaccttctcggtggaggaattttagtggacaaaactggagattggatcacacttatacaaaattc

SEQ ID NO: 47646 - DNA, 402 bp, Glycine max
  Clone ID: LIB3139-120-P1-N1-E4
ggagatttttctgaaaaggaagatcaagaaaaacccaaggagattgataccagattgagacaaagaatagatcctcaatacaatgaggttcaggctcagatggaaacaaatttgtttaaattgtctcttgatgatgttgaaactcctaaaggttctatgttggatcttaaaatttctcaatctaaaattgcacttcccaagaacacagttggaggaaccattctgcgtagtgatctattggcaaattttttgacagagggcaattttagagcaagtgttgatttgcagcgcactcatcgtattaaaggaatgattaaaatggtggccacagttggtattcctgagaatacaggtatagcattggcctgtgctatgaatagttcttttagggtgcgcgccagt

SEQ ID NO: 47647 - DNA, 370 bp, Glycine max
  Clone ID: LIB3139-120-P1-N1-E5
ctttgagtgtgcaggttggagagaagtgtgaacagtgcggagaagacaagggagagtgcaagtaaaagatataggagttttcatatcccttgggagtggatgctggacacaggcctcattggtcagatgaagctgagttcattgaagttagcaagggaattcatgaaaagggtaaccaaagagttggaatctaatgaagtctcaaaagaagataacctcttggtacaaggagttaggttcgcattcagagtacaccaggtaggtagattacacatttgcactacctcagatattcacaaaaggaacattaatttaaatttgttcatgtcatgaaccaccaaaacattcagtttgcaggtggctttgattc

SEQ ID NO: 47648 - DNA, 387 bp, Glycine max
  Clone ID: LIB3139-120-P1-N1-E6
gaaaaaattagaaagtactgtgacatgacactcttatcatgtgcctatgctggaactggaaatgttctcaaggttcaaaatctgttgggtcattgttcacaacatcttgataaaggtgaaactcaccaaggtcctgctgtgcttggaattgctatggtagctatggctgaagaattgggacttgagatggcaattcgatcattagaacatcttctacaatatggagagcagaatattcgccgagcagttcctttggcccttggtctactctgtatatcaaatccaaaggtcaatgttatggatacgttaagcagacttagccatgatactgattcggaagtagctatggcggcagttatatccttgggtctaataggtgctggaacg

SEQ ID NO: 47649 - DNA, 400 bp, Glycine max
  Clone ID: LIB3139-120-P1-N1-E9
ggttaattgtggtttattttggaaggatgtcttacgtggcgcataacgttaatcagccccaagagaaagatttgttagagggaaatttttcctttgatattaaatctcgctctagattggaaaaagtttcctctacaaaagcacaatttgttagtggaaaaaccttcaaatatgatataattggtgctggttcacattcttcaggagattttcctgaaaaggaagatcaagaaaaacccaaaaagattgataccagattgagacaaagaatagatcctcaatacaatgaggttcaagctcagatggaaacaaatttgtttaaattgtcttttgatgatgttgaaactcctaacggttctatgttggatcttaaaatttctcaatctaaaattgcacttcc

SEQ ID NO: 47650 - DNA, 390 bp, Glycine max
  Clone ID: LIB3139-120-P1-N1-F1
gtgaacaaataagtagcattgtcagattacagctggagcgtgtgcaaaagagaattgcagatcgcaagatgaaaatccaagtgacggatgctgctgttcaacttcttggaagtttagggtatgaccccaactatggcgctaggccagtcaagcgagtgattcagcataatgtggagaatgaactcgccaagggtattctcagaggagagtttaaggaagaggatgcacttctaatagacactgaactcacagcatttaccaacggccaacttgcctagcgaaagcttgttgttaagaaacttgcaactgattcagaatctaccccttaagggaccttgtatcccttcccacaggccctatgaattctctttacttagctttatttatttc

SEQ ID NO: 47651 - DNA, 370 bp, Glycine max
  Clone ID: LIB3139-120-P1-N1-F10
tgtgccttcaattaaggaagttattgctaatgggataagtgtgaatgtgacgctgatattctctcttgcaagatatgaagctgtaatagatgcttacttggatggtcttgaggcatctgggttaaatgacctctctagagttacaagtgttgcctctttctttgtcagtagagtggacactctcattgacaaggcccttgagaaaattggcaccccagaggctcttaatctacgtgggaaggcagcagtagcccaagcagcattggcttaccagctctaccaaaggaaattttctggttcaaggtgggaagctctagttaaaaagggggtcatgaagcaaaggctccttttggcctcaaccagtgtaaag

SEQ ID NO: 47652 - DNA, 401 bp, Glycine max
  Clone ID: LIB3139-120-P1-N1-F2
tcaattttgaggcttttccccacaagctggtgcaggggggagagattcaggaaaaagttgtgttgaaattttcacaagaggaatttcttacagcttggtcaactcaggtgcgtcccgcaacgactctgttggctgatgggtgcccatatttgtatgctatggtgcatgatagttcagtgtctacaataccaggtgattttgtcattggtgttaagttgacaaccataaacaatatgtgtgcatatgggctcaatcctggtatttcaggttctcgtcttttgggcaccattcctcagtccattttacagcatactggctggaatcaaatggcatacagtgagaacaccattgaattttgattctagcaagcagagcttttgtcaattttccatcgaccttct

SEQ ID NO: 47653 - DNA, 396 bp, Glycine max
  Clone ID: LIB3139-120-P1-N1-F3
cggttttagtagaacgttcccatgttcccaaacctgctcaacaccaacccccgtcccctccaaagctcaaccgtgcggtcaccaccaacctcttgcgcgccgacaccgtcaccaccaaattctaagattacatggggttaatgatgatgcgcatcaaagcactcccttcccagaatcttgtttgattcgtgaagagagacagggagagggagagagaaccaaaacaaagaggggaaagtagatcgcgtgaacaaatgaagaagaatcaagcgttgatttttcatatttgcttctagattttcttgtttggttgggattaatttctaagttttgattttgggtttttaatcattcattttgagatttcattgtgggttgattggttgattgagatta

SEQ ID NO: 47654 - DNA, 387 bp, Glycine max
  unsure at all n locations
  Clone ID: LIB3139-120-P1-N1-F4
agcgtttcacattatcttcttttttatttctccaatgggacaagcaccgtccacgccggtttcttcgacggacctgagtcaccgggatattttcaccaccgacgaatccatcggccgcgactacaccgccgacatccccgacgagtgcctcgccggaatcttccagtttctaagctccgtcgaccggaaaacctgctccgccgtgtgtcggcggtggctgcgcgtggacggcgagaaccgccagcgcctctccctgaacgcgaaggcgagcctggttgacttcgttccgtcgctcttctcgcggtttgactcggtcacgaagctcggcctgcggtgcgaccgcaagtccacgagcggaaacgacgacgctttggtnctgatcttgct

SEQ ID NO: 47655 - DNA, 401 bp, Glycine max
  Clone ID: LIB3139-120-P1-N1-F6
ttcacattcttcataagattttcctgaaaaggaagatcaagaaaaacccaaaaagattgatgccagattgagacaaagaatagatcctcaatacaatgaggttcaggctcagatggaaacaaacttgtttaaattgtctcttgatgatgttgaaactcctaaaggttccatgttagatcttaaaatttctcaatctaaaattgcactttccaaaaacacagttggaggaaccattctgcgtagtgatctattggcaaattttttgacagagggcaattttagagcaagtgttgatttgcagcgcacgcatcgtattaaaggaatgattaaaatggtggccacagttggtttttcttgtgaatcaggtatagctttggcctgtgcttatgaatagttttttt

SEQ ID NO: 47656 - DNA, 334 bp, Glycine max
  unsure at all n locations
  Clone ID: LIB3139-120-P1-N1-F7
cggagggagggcattctggcgagccgtctctcttaatggatgaggcgaggcgacgaggctctaactctacggcgcccggcggacctanccttcttnncatcccctaccggcaccatnnactggcggttctctggaagaagctctgcatgacccggagcttctgagccgggaagactcctggagcatttcgtgagaatccgcgagagcgaggtggaggcgttcctcaagagaatgatggagatttcaggcaatggaaattacgaggtggtgatgaggaaggagcttataacgcacaactattaacatcattactaggatgattatgtgtaagatg

SEQ ID NO: 47657 - DNA, 145 bp, Glycine max
  Clone ID: LIB3139-120-P1-N1-G1
gctttcgtggtatacttatcataccaatcctgaaaggggagttcgtagtatttttggtgcccctttcataggcgcaaggtccattcacgtggttacattcttcactaccaccacccaaatcgaacacaacatgaatttaacgatt

SEQ ID NO: 47658 - DNA, 334 bp, Glycine max
  Clone ID: LIB3139-120-P1-N1-G12
ctcgatccttttcggctcgagcaattagtaactgggggggagttgctgcttggaagaaaggttgtttaatggtcaagattgtgatgtctgggaatgcagcagtcaaaaggagtgattgggcctcattggtacaagtgtttttaacaaacagcaacagtacagagcattttgatgcatgttagtggacaaaatcagaaccacattcctgggaattaatcttcccaatagaggtatgtggtcctaataatggttttgaaatgtggagttttgcgtgggcatactcaaacttcatggctatttgtagtttcttatttgacaaattcccaaaccagtc

SEQ ID NO: 47659 - DNA, 355 bp, Glycine max
  Clone ID: LIB3139-120-P1-N1-G2
gctttgcttcaccaccccccttgcttgcgtgggtagaaaggcaagaagcagggctgggaatgggaatgggaatgatgagcggagaagtatccgccgccggggaccaccaccgtcaagtgaaggcggagatagccaaccacccactctatgaacagcttctatctgcacacgtgtcatgcctccgcgtcgccacacctatcgatcagttgccgctcatcgacggacagttatcgcatttccaccatcttctccgctcttatgcctcacaccattcccattccctctcgccccatgaccgacaagaacttgacaactttatggcacaatatttgattgtgttatgttacgttcaaag

SEQ ID NO: 47660 - DNA, 398 bp, Glycine max
  Clone ID: LIB3139-120-P1-N1-G3
ctcgagccgattcggctcgagtgttgggacaggagggacccacaggacctaagctcaaaagaaattggcaaggtgatgaggtttgaaatggaagacttggagaatggtggcattattgacaccatgcaattaaaaaaggagactttaatttggttggtttgcactatctgttttgtatttttatagggttcacaacaaacatgtatttcttaataataactgacaaagttgtttcttgtttgtatttgcatgccagctttttcgggtgttcccacaacattaaaaagcatgtgatattgctcttcaaatagtaggtagatggaggacagaagaaaaacgaaaagatttttgtgtgcacttggcttataatgattttttttccaaagatttaatatttt

SEQ ID NO: 47661 - DNA, 361 bp, Glycine max
  Clone ID: LIB3139-120-P1-N1-G4
caaccataaacaatatgtgtgcatatgggctcaatcctggtatttcaggttctcgtcttttgggcaccattcctcagtccatttcacagcaaactgtttggaatcaaatggcaacagtgagaacaccattgaattttgattctagcaagcagagcttttgtcaattttctattgaccttctcggtggaggaattttagtggacaaaactggagattggatcacacttatacaaaattctccaattagtaacttgttgagagttgctgcttggaagaaaggctgtttaatggtcaagattgtgatgtctgggaatgcatcagtcaaaaggagtgattgggtcctattggttcatgtgttttt

SEQ ID NO: 47662 - DNA, 406 bp, Glycine max
  Clone ID: LIB3139-120-P1-N1-G5
ggactcaatttcataccttcgacgacctaccaatatcgggaggttgactcagtaatcaacgactgttaaccagtaacgacaatcaacatggcggtaccaggcgaacaacgccagatcaacaagggcgttccacccgccacggcttgcaaccctcccggcgcggacttcggtaccaacgttctcgagcccaggcaagctggggatctcgttgatccgtcagagaagcatatgcgcaatcagcacttgtcggcttcggatgagaagcctcacttgggcggagaataccccaaatacctgggattcagcggggatcgtttgatctgggcaattaccttttttgccacactcggattctccctcttcgggtatgaccaaggtttgatgagtggtatcattgctttcgatc

SEQ ID NO: 47663 - DNA, 200 bp, Glycine max
  Clone ID: LIB3139-120-P1-N1-G6
caaaaaatatgtccatggagacctcaagccaagtaacatagttcttggacacaacatggaaccccacatttctgactttggagttgggcgccttgcaaacattgccggagggtcttcgaccttgcaatttaaccgagtggttctggagctactacagggaaggctaacgagcttatccatttaagtcacatctattgtgt

SEQ ID NO: 47664 - DNA, 287 bp, Glycine max
  Clone ID: LIB3139-120-P1-N1-G8
accaatctcacccatttcaaaaaaaggccgttagtgttagtaggtcgtaaaatggccactcttgttctttaccaattctttctcaaactcttgctcctaatttcagtctttcagctttcctttgctgctaggagactcaaccagctggttcaggaccagtcacagttactccattaccacaacggtcctcttctatacggcaaaatcgccgtgaacctaatctggtatggtcacttcaaaccatcccaaaaggccattatcaccgaattcgttacgctcactgtcat

SEQ ID NO: 47665 - DNA, 391 bp, Glycine max
  Clone ID: LIB3139-120-P1-N1-G9
cgcaaatacttcgtgggtgtctctctatctgtctgcagagaagcagaaagaaataacccattcaaaaaaagaaagagcaatcaattccaatcacaatggcaaatcaactcaccgatgaacagatctctgagttcaaggaagccttcagtttgttcgataaggatggagatggttgcatcacaacaaaggagcttgggaccgttatgcgttcgttgggtcagaacccaacagaggctgagctccaagacatgatcaacgaagtagatgctgatggcaatggcaccattgacttccccgagttcttgaacctcatggccagaaagatgaaggacactgattctgaggaggagcttaaggaggcgttcagagtgtttgacaaggaccagaatgg

SEQ ID NO: 47666 - DNA, 398 bp, Glycine max
  Clone ID: LIB3139-120-P1-N1-H1
caattttgaggcttttccccacaagctggtgcagttgggagagattcaggaaaaagttgtattgaaattttcacaagaggaatttcttacagcttggtcaactcaggtgcgtcctgcaacaactctgttagctgatgggtgtccatatttgtatgctatggtgcatgatagttcagtgtctacaataccaggtgattttgttattggtgttaagttgacaaccataaacaatatgtgtgcatatgggctcaatcctggtatttcaggttctcgtcttttgggcaccattcctcagtccatttcacagcaaactgtttggaatcaaatggcaacagtgagaacaccattgaattttgattctagcaagcaaagcttttgtcaattttctattgaccttc

SEQ ID NO: 47667 - DNA, 327 bp, Glycine max
  Clone ID: LIB3139-120-P1-N1-H10
ggtattttatgttctggtcttaggggcaccatcggtagggccatttaaaaagaaactgtttgcattaaaatgggaacagtgagaacaccattgaattttgattctacgcgagcctagctggagacagaattacattgacctcttcggagaaggaatcttagtgggcaaaactggcagattggatctacacttattcaaaattctcctattagtaacttgtctagaggtgatgtttagaaataaaggctgatttatggtaaagattgggttgattggaagtgcatccattaaaaagattggtatgagtcttattggttcacgtttttt

SEQ ID NO: 47668 - DNA, 290 bp, Glycine max
  Clone ID: LIB3139-120-P1-N1-H11
caagggtgttgtagtatagttagagatatcactgctacaccaccctgcatagtttgttcagctataatactacttgagcttctttacctacttttcaaacctacattgcacacaaaatggcaacatcttggtcatgttatctacttgcattgcttctttttatgtcaactattgtatcagagagtagagtggcaaggaaggacttgggcctggaccttggtgggttgggggttggacttggactgggtttgggcctggggataggaggtggcagtggcttttctattttt

SEQ ID NO: 47669 - DNA, 410 bp, Glycine max
  Clone ID: LIB3139-120-P1-N1-H4
ccacctccaacttctctattgttctctccgtctccctagcctgctttttggtgctacttaccaaggcacactcgaccgataccgtttctttcaccttcaacaagttcaacccagtccaaccaaacattatgctccaaaaagatgctagtatttcatcctctggggtgttacaactcaccaaagttggcagcaacggcgtgcccacctcgggatctctcggtcgtgccctttacgctgtcccaatccagatttgggacagcgaaaccggcaaggtagccagctgggctacattctttaaattcaacattttcgcacccaacaaatcaaacttagctgacgggcttgccttctttttggcacccgtcgggtctcagccccaatctcgacgatgggttttttggtttttttac

SEQ ID NO: 47670 - DNA, 229 bp, Glycine max
  Clone ID: LIB3139-120-P1-N1-H5
agtgtctacattaccaggtgattttgtcattggtgttggtggggcaaccataaacaataggcgtgcatatgggctcaatcctggtatttcaggctctcgtcttttgggcaccattcctaagttcattttacagcaaactgtttggaattaaatggcaacagtgggaacaccatcttatttaggttttagcaagcagagcgattgtcaattttctattgaccctttcggt

SEQ ID NO: 47671 - DNA, 405 bp, Glycine max
  Clone ID: LIB3139-120-P1-N1-H8
catgattcttgcactcagaaatgtgtgatttctggaaacgcatgtgccattatactgtctattactagtgagctggctgcgaagatatgttttgattctctgcctgctgaatatgtgaataatggtcagcattctcttccaaaggcacatatggagaagatatcaaagttctgcatttaccttcttgacaaagttatgacagacgatgactttgcttgggaagatataatgagtctgaggttcttcattctttttagttcttaaatgtgagtgtcgcgtttacaacttatgtttttctattctccttttgtacttttagttcttttgttacatatccttttttttattttattgtttcttattttttttaatattattactacttcaatctctatcttttttgtc

SEQ ID NO: 47672 - DNA, 390 bp, Glycine max
  Clone ID: LIB3139-121-P1-N1-A1
attgaattgacaatgaggcctgctcttgctttgcttcctcttctatttgctttcttgttagctgccactacggaatcaagaaaagatccaggggaatattggaaaatgatcatgaaagatcaggaaatgccagaaggacttcaaggtcttgtttcatttcaatctgaaaataaccctaagactcaagagcagcttggtaaaggttccaaaaaccattgtgaagagtctctagttacaaatacacaagttaacagtgacttcgaacccataccaagtgttaccaaatatgatgatttggaattcaagtcaagcattatcaagaacgatgattttgaatcgagaccaagtgttactaagtatgatgattttgaactcaagtcaagcgttacc

SEQ ID NO: 47673 - DNA, 274 bp, Glycine max
  Clone ID: LIB3139-121-P1-N1-A11
cggctcgtggacgactacaccgacgacgaattgggcgagtttgatgacgatgatgacgacttcgacgacgagtttgatgatgatgaaatggacgaccttcctccgagtaaaatgaaaccaccgcccatgatgatggatgctcctcccaaggctgccaacaatggcggtggtggaggcaataacgggagaaaaggaggaggtcctgttcctgttcaagtgcatggaatccccggcaatggaggaggaaagaaaggtggtggtggtggtggtggaa

SEQ ID NO: 47674 - DNA, 139 bp, Glycine max
  Clone ID: LIB3139-121-P1-N1-A12
gtttctttgttacgaatatcccgtcgtttggagcggccggagtgatactctgtatacatgctccatctcctagacctacttacaggtgatgagcttctctctttcttcttacgtgacacggctaatgaggatggagtgt

SEQ ID NO: 47675 - DNA, 370 bp, Glycine max
  Clone ID: LIB3139-121-P1-N1-A3
ccgaaccctcgatcagggtgacgcgctcctatattcgctcctccaccgtcgctctctcgaacaaccacaacaccatcttcatcacatggcaaacgcagcatctggtatggcagtccatgatgactgcaagttgaggtttttggagctgaaggcaaaaaggacacaccgtttcatagtttttaagattgaggagcagcagaagcaggtcattgtggagaagcttggtgagcctgcccagggctatgaagatttcactgccagccttcctgctgacgagtgccgttatgctgtttatgattttgagtatctgactgaagggaatgtccctaaaagcagaatttttttcattgcgtggtcccctgacacatct

SEQ ID NO: 47676 - DNA, 326 bp, Glycine max
  Clone ID: LIB3139-121-P1-N1-A4
ctggaaacggatcctggtgggctttcaacggagtctgaggtaccataatattcttctttgcatcaacggaatggagaatcaagcattccgtaaagccggggaagtgctgatcttgaagttctgggccaccatgtacactggttggtggggggaattccaaaggcattgccattagtacttacttacataccattattcatatgggggcattctttttggacatattctttaggatggaaccatggaccctttttaaccactgctataagtctgatgaagctggcccacaccatttacggctatactttgttggcttgtgcttactc

SEQ ID NO: 47677 - DNA, 310 bp, Glycine max
  Clone ID: LIB3139-121-P1-N1-A5
gacaaaactgtgattggatcacacttatacaaaattctcaattagtaactgtgagagttgctgcttgaagaaaggctgttaatggttaagattggatgtctggaatgcactcaaaaggagtgattggcctattggtcaggtttaacacacacagtcaacatttgatgcatgtaaggcaaaatgacccattcggaatgacttcaatgaggttgtggtcctaataaggttgaatggggtctgagtgggcaaataaacttatgcttggtttctatgacatccaacgctacagtttgattctttggaattctag

SEQ ID NO: 47678 - DNA, 362 bp, Glycine max
  Clone ID: LIB3139-121-P1-N1-A7
cgaagcatcttcacacgatggtgttctacttcaaagcgggccctgaagccggcgatttcaccatcttcatgggcctcgacaagttcgagaacgaggaactcatcaaatacggttttcccgaagacatctggttccatgttgataaaatgtcttcagcccatgtctatgtcaggctgcacaaaggccagactctcgatgacctgagtgaggctttactggaagattgtgctcagcttgtcaaagcaaattcaattcaaggaaataaagtgaacaatgttgatgttgtttacactccctggtctaatttaaagaaaactgctttaatggatgttgggcaagttggttttcacaactcaaaaatg

SEQ ID NO: 47679 - DNA, 310 bp, Glycine max
  Clone ID: LIB3139-121-P1-N1-A8
ggggtcactttctttgattctgcagatttttatggagcgggtgccaatgaagttttggtcggaaaggctctcagggactttcctcgagatcaatttcagattgccacaaagtttgggattgtcaaaatggaaaatggtaatgtgatagtgaacggttcccctgaatatgttcggacctgttgcgagggtagcctccaacgccttggtgtcagctacattgatctctattattagtacagtgttgacacaactgtacccattgaagacaccatgggagagcttaaaaggctggtccaagagggaaaaatat

SEQ ID NO: 47680 - DNA, 384 bp, Glycine max
  Clone ID: LIB3139-121-P1-N1-A9
ctcgatcctttatcgactcgaggtcatttaatccgggcgcgtgttctgatgcatggagtttggaatttctgaagcgtaccggatttcattgtgatatcatttgtgtcactggatggactgccaccccaatgcaggatgttcaggttacaattgattggtttatttcctctcaggaatgtgttcccaggacctattgtgttttaaatccacaaaatccttttgtgttaaataggtggatgggaaaactgactttccctcatggcactttccgaagtgttaagagaatgcctctttctatttggggtggagctggtgcaaagaatgctattctcatgaatatgccaaatgctgttctttcaatgtggagatattttgttggagatc

SEQ ID NO: 47681 - DNA, 393 bp, Glycine max
  Clone ID: LIB3139-121-P1-N1-B2
aaattagttcattctctttgcgcagttccctacctctcctttcaagatgcagatcttcgtcaagaccctcaccggaaagaccatcacccttgaggtggaaagctctgacaccatcgacaacgtcaaggccaagatccaggacaaggaaggaattcccccggatcagcaacgtctcatcttcgccggaaagcagctcgaggacggccgtaccctcgccgactacaacatccagaaggagtcaacccttcaccttgtccttcgtctccgtggtggcatgcagatcttcgtcaagactctcactggcaaaaccataaccctagaggtcgaaagctctgacaccattgacaacgtcaaggccaagatccaggacaaggagggaatccccccagacca

SEQ ID NO: 47682 - DNA, 391 bp, Glycine max
  Clone ID: LIB3139-121-P1-N1-B3
agatttatcatatttagttgtgattgtcaaattataaaaatatttagaaatcaacacttagaaccatgtataaatggttttccattataggtgtaccgtgtggatctcaggcatgcggcatggtttagtgcagttccatgggctgtgatggctgtcacgggttactttgctggcttgtggtcggatatgatgatacaaagtggtacaagtgtcactttgactcgtaagattatgcagtccattggttttattggtcctggactctgcctcattggcttagcaacagcaaaaaacccctcaataggttctgcttggcttactttagcttttggcctgaaatccttcagtcactctggttttcttgtgaaccttcaggagattgcaccgcagt

SEQ ID NO: 47683 - DNA, 369 bp, Glycine max
  Clone ID: LIB3139-121-P1-N1-B4
gggaaactgactttcccccagggcacttcccgaagtgttaaaagaatgcctctttctataggaggaggagctggtgcaaagaatgctattctcatgaatatgccaaatgctgttctttcaatgtggagatattttgttggagatctcgtctttgaagtttctaagatgacttctccctacattaaatgtacagtctctttcttcatagcatttggaaatttggctgatgacaccatcaattttgaggcttttccccacaagttggtgcagtttggagagattcaggaaaaagttgtattgaaattttcacaagaggaatttcttacagcttggtcaactcaggtgcgttctacaacaactctgtttgct

SEQ ID NO: 47684 - DNA, 391 bp, Glycine max
  Clone ID: LIB3139-121-P1-N1-B5
caagttaatagcattccgcaaaatggctgccaccaccggagtctctgaagtcactctcccctcctcctccggccagcggaagatgccgctgatgggcctcggcaccgcgccggaagcaaccagcgcggttaccacaaaagatgctgttcttgaggccatcaagcagggctacaggcactttgatgctgcttctgcttatggtgtggaacagtctgtgggagaagccatagctgaagcacttaagcaaggactaattgcatccagagatcaactcttcatcactaccaaattgtgggtcactgataaccatgcccatactattcttcctgccctgcagaaatctctcaggacacttcaactagaatacatagatctctttctgatccactgg

SEQ ID NO: 47685 - DNA, 235 bp, Glycine max
  Clone ID: LIB3139-121-P1-N1-B6
gaaaaagcatattttatggcttcgacggcagcgtaccttgctcggcgcgcggcgcataaggagagggttcggatcctctaccgccgcgccctcaaagacactctcaactgggccgtacatcgccaccttttctacgacgacgcttcaaaccttcgcgaaaggttcgaggtgaacagacacgtgttagaccctgattccattgacaggctcataacggatgctgtagcttcctaca

SEQ ID NO: 47686 - DNA, 388 bp, Glycine max
  Clone ID: LIB3139-121-P1-N1-B7
ggatgagagtgggaggatgaggggcggtgaggagcgagcgacagggattcgaaagaagggaagcggagtgagacaatggctggtcctggacggcagaggagagacggaggtggtggaggccgggaagcacgccatcatgaggaggacgggactccccgcgcgtgacctgcgtatattggaccctctcttgtcatacccttctacccttctgggtcgtgagagggccatcgtcatcaacttggagcacatcaaggccatcatcaccgcccacgaggtcctcctcctcaactctcgcgacccctacgtcacccccttccttgaggagctccaggccaggatcctccgccaccaccaccagactctggccgatgccaaccccaaccctgac

SEQ ID NO: 47687 - DNA, 389 bp, Glycine max
  Clone ID: LIB3139-121-P1-N1-B8
gcgtacttggtacttgtaatatggacactattcaacctgctgatgttggccttaaagaagaaattgcagacgatgatcgagggcatggattttttggcgctaatgcacttagtagattagctcgatgggctcaaccaataacttatgtagacattcatgaatgtgatagttttacgatgtgtatattttgtttccctacttcttcagttattcctctccatgaccatcctgggatgactgtatttagcaaacttctctatggctctttacatgtgaaagcttatgactgggttgagcctccctgcatcatagaaagcaaagaaccaggatatgctcaagtaagactagcaaagttagcagttgataaggtcttgaatgcaccgtgtgat

SEQ ID NO: 47688 - DNA, 388 bp, Glycine max
  unsure at all n locations
  Clone ID: LIB3139-121-P1-N1-B9
cagttgttattcagcgaaagggtgagacaagaggggtgggctgttatcagacaattgtggtcaatgcgagagtcataccattacaatgcaagtaaatgaaggacacaacagaccttgctcagacccatttttacagtggagtaaatggcagttgcttgattctcttttacctactggtggatttgctcattcttttggcctcgaagcaacagttcagtcccacttagtgtctaattccaangnccntaagacatttgttatccatatattggagaatacaggaagcttactccttccttttgtgtactcagcttccatgttacccaatttggaaacttgtcataagcttgacaaatttttggatgctaccctatctaatgaagtgggt

SEQ ID NO: 47689 - DNA, 391 bp, Glycine max
  Clone ID: LIB3139-121-P1-N1-C1
aatttctgaagcgtactggatttcattgcgatatcatttgtgtcactggatggactgccaccccaatgcaggatgttcaggttacaattgattggtttatttcctctcaggaatgtgttcccaggacctattgtgttttaaatccacaaaatccttttgtgttaaataggtggatgggaaaattgactttcccccagggcacttcccgaagtgttaagagaatgcctctttctatagggggaggagctggtgcaaagaatgctattctcatgaatatgccaaatgctgttctttcaatgtggagatattttgttggagatctcgtctttgaagtttctaagatgacttctccctacattaaatgtacagtctctttcttcatagcatttgg

SEQ ID NO: 47690 - DNA, 350 bp, Glycine max
  Clone ID: LIB3139-121-P1-N1-C10
caaaaacaacacattctatatataaaaaaacacacaattccgataacattattcccagccatcgcaagctgcatttggggatggtaatgggacaacagaaaatcgccctcgcccctccctcttcgtccttccgcctccgcagccgcagcctcaactccctccgcctccgccgcatcttcgacatgttcgacaagaacggcgacggcaccatcaccgtcacggagatcagccaggcgctgagcctcctcggcctggacgccgacgtggcggagctggagtccatgacgaaactctacataagacccggcaacgagggactcacgtacgaggatttcatggcgctgcacgag

SEQ ID NO: 47691 - DNA, 388 bp, Glycine max
  Clone ID: LIB3139-121-P1-N1-C11
gttctgcttacttttttatttttattgagtcaatgggaggccgttttggttaatcaacttgatttaaaggctcgccaacacatgttcaaggtgcacctaggagatactccccataacttggctgaaagtgattttgaacatttggctcgcaagacagaggggttttcaggttcagatatatctgtctgtgaatcctgaggatatgtggatcctatgtggaccaaagtaacagagtgcagtacaaactacaattcatgatcttgcggcgaaaggacttgcttctaagatcctgccgcctcctatatcgagaacagattttgacaaagtacttgctagacaaagacccaccggtagcaagtctgaccttgatgttcatgagtgattcaca

SEQ ID NO: 47692 - DNA, 388 bp, Glycine max
  Clone ID: LIB3139-121-P1-N1-C12
agtttttcattttccaaaatgatgggctgctgtggttgctttggatttgtccaaaaaccaagaccgcgtcgggctaaacgtagcatcagtaatcttctctcccaggggctattattggatggagaaactgaaggtgaagagacatatagtggtgatgttactagtaactgcaccagtggagatgataatgaggtgcaagctgtacgcaaccgttcagaggatattttgaacttcagagctgagaatggcatggtttgcaggccgtttcctgttaaggagacttgcaaacttgatcgctcagaggatgaaaatgggaacaagatgataaatgaatatgttcgagagtataaaattggttgcggaagctatggcaaagtggctctttatc

SEQ ID NO: 47693 - DNA, 375 bp, Glycine max
  Clone ID: LIB3139-121-P1-N1-C2
cgatcacaggttgccgcaccttaaaaccggaaacaaaagcaatcgttacttgatttcaagaatttctcaatttcttcctacttctttgtgtacgatttcttaagggaaagaaaatcactctctgtgctggtcacagacttcgtgaatcattttcttttccactcctagtttatttgctgaacactctcctatttgatataggacttcgtgtcagatttaaactttttctgtttctttctcagatctctgtttaatttcaagttcaagctggtgaaattttggattagtgctcccactctcctatctggtataggacttcgtgggtagacttttctacttctctcctttctttcactctcttcttctcactgatcc

SEQ ID NO: 47694 - DNA, 392 bp, Glycine max
  Clone ID: LIB3139-121-P1-N1-C3
ctcggatcaagactgattcgcttgcttatacttccaaatctcgagccatatttgcatcttcttgagccagaaatgcaacctgagaagcaaaaaaatgaaatgaagaggcatgaagcttggcaagtttatggggctttgttgggtgcagcaggacaatgcgtgcatgaaaaggtcaaaatgtttagcaatttgttctctcctccaactcgggttacttcaagaggcagtggaaaagctgtgattgcgatgtcaggcaaacgaaaagccagcactgacaatctgatgcagcagcagcagcagctgcctccaatgaagaaacttgcaacggatggccctgggggtgtggtagcaatgaactccatgttagttgacatgcaaggttcaacaggtgg

SEQ ID NO: 47695 - DNA, 378 bp, Glycine max
  Clone ID: LIB3139-121-P1-N1-C4
ctttcttccgctactacgtctctcttccaatccaaacaccgaacgaaaggctaatgacgcctccctacaatcgccagaataacaaaccacatcgaaggaactcatcttaactcccccaacggctctcccatccttggcaacgcaaacaattcccttgaggttccctccaataactatatctcgctacactcttcagacgtgcgtaggaaaactaagatcgtgtgcacgataggtccttctacgagctcacgtgatatgatatggaacctggctcaagctggaatgaacgtggcgcgtttgaacatgtcgcatggggaccacgcctcgcacctccaaaccattgatttggtgaaagaatacaattctcagtttcaagat

SEQ ID NO: 47696 - DNA, 382 bp, Glycine max
  Clone ID: LIB3139-121-P1-N1-C6
gctgaatgctcgaactcttagagaatggatttcatcagcacttgggccctctgcagttgcaaagcatatggtggctgttagcacaaatctcacgcttgtggaaaagtttggtattgatcctaaaaatgcttttgcattttgggattgggtcggtggtcggtatagtgtttgcagtgctgttggaattttgccattatctctacaatacggtttctctgtgatagagaagttcttaaggggggcttcaagcattgatcaacatttctattcgcagccatttgaaagcaatatacctgtgcttctgggtttggtgagcatatggaatgttacatttcttggatattctgccagagccatcttaccttatagtcaagctctggag

SEQ ID NO: 47697 - DNA, 390 bp, Glycine max
  Clone ID: LIB3139-121-P1-N1-C7
tcttcttcttctttttcttctcctctctctctctgcgcggcgccatggctgaggataaggagatgtctacctctgtcatcaatgggaatgattccctaactggtcacatcatatctacaactattggaggcaaaaatggggaacccaaacagactattagctacatggcagaacgggttgtaggaactggatcatttggaatcgttttccaggcaaaatgcttggaaactggggaggcagtggcaattaaaaaggttttacaagacagaagatacaagaatcgtgaactgcagttaatgcgtgtgatggatcatccaaatgtgatctctttgaagcattgtttcttttcaactacaagtacagatgaactttttctcaatttggtgatgg

SEQ ID NO: 47698 - DNA, 219 bp, Glycine max
  Clone ID: LIB3139-121-P1-N1-D1
ggcttaagtcttaacctgtacagcatagtatctttgagctttcgccatggtcctcctccatagtgtgacacagctgtaatcgatctcaaatgtcactgtagtctatgtcaatgtgtttgtggttttactttaaagaaaaatccaatggggagtggtcatgttatgaattatgtaaaatactatacatcaagcacttgtgcaaatttaagttttaatctg

SEQ ID NO: 47699 - DNA, 64 bp, Glycine max
  Clone ID: LIB3139-121-P1-N1-D10
attgttttttatcaccaatggcgaattattcctgggggtgttattttttttgcgcttttcctgt

SEQ ID NO: 47700 - DNA, 392 bp, Glycine max
  Clone ID: LIB3139-121-P1-N1-D11
attaattgcaagaatggcacttcgttgcttggtgatgtgccctttctgttctcttcactcttggtcttgcgagagaaagccatgccagagacgaagatttttggcatgctgtttggccaaacactcccattccaagttcattgcgagatcttctaaagcctggccctgcaagttagttttgtgaattatcaactctagattcttgattatgggtttatatcttcctagaatgctcaaggttaccccataattggaatggaaaggttgaacgaagaaagagaataaaataaaaagaaaagaagaagaataactatatataaattaccttttattttaaacactccagcacctttttttatctatttatatcatatgatatcataaattctatt

SEQ ID NO: 47701 - DNA, 389 bp, Glycine max
  Clone ID: LIB3139-121-P1-N1-D12
ctttgtcgctaagagaagagatctgcctccttttgatggaatctatctcttcttcaagaatagttgaaaatggggctgtctttcaccaagttgttcagccgactgtttgccaagaaagagatgcgtatactgatggtgggtctcgatgctgcgggtaagaccaccattctgtacaagctcaagcttggagagattgtcaccaccattcccaccattgggtttaatgtggaaactgtggaatataagaacatcagcttcactgtctgggatgttggaggtcaggacaagatccgtcctttgtggagacattactttcaaaatacacaaggacttatttttgtggttgatagcaatgacagggaccgagttgttgaagcttgaaatgagtt

SEQ ID NO: 47702 - DNA, 391 bp, Glycine max
  Clone ID: LIB3139-121-P1-N1-D2
tgaaattttgataaaccgcgatcacaggttgccgcaccttaaaaccggaaacaaaagcaatcgttacttgatttcaagaatttctcaatttcttcctacttctttgtgtacgatttcttaagggaaagaaaatcactctctgtgctggccacagacttcgtgaatcattttcttttccactcttagtttatttgctgaacactctcctatttgatataggacttcgtgtcagatttaaacttcttctgtttccttctcagttctctgtttaatttcaagttcaagctggtgaaatcttggattagtgctcccactctcctatctggtataggacttcgtgggtagacttttctatttctctcctttctttcactctcttcttctcactgat

SEQ ID NO: 47703 - DNA, 356 bp, Glycine max
  Clone ID: LIB3139-121-P1-N1-D3
gtctcggaaatgcaaagaaacatggtattctgggatgagggaaaaatttgtacaaatgatgaagagcatctatgaaacagaagttacagattggccagtaccactgaaaatcatttctggaaccattcttgcaacaattttgggaacaaccttctggaaactcttttcctttcttagagatgctggtaatgggggagtttttgttggcaatgttgcttcagcattcacaacttcaagtgtgcttgaggcccaaagtagaaagcccaacagatatgaagtttcccagtacagatatcgcaatgtgccaataaagcgcaaagcatgggttgtaggccagatgtctttcgatcagtctg

SEQ ID NO: 47704 - DNA, 378 bp, Glycine max
  Clone ID: LIB3139-121-P1-N1-D4
atggcatgttcttctccccttttcatgtatttgatattttttaggacattggaggatgtgatatacagaaacaggaaatccgtgaggctgtggagctaccccttacacatcatgaactatacaaacaaattggtattgatcctccccgtggtgttttactgtatggaccccctggcactggcaaaacaatgcttgccaaagctgttgcgaatcataccactgctgctttcatcagggttgtgggatctgagtttgtgcagaagtatcttggtgagggtccacgaatggtccgtgatgtatttcgtcttgctaaagagaatgcccctgcaattatatttattgatgaggttgatgcaatagccactgctagatttgatg

SEQ ID NO: 47705 - DNA, 361 bp, Glycine max
  Clone ID: LIB3139-121-P1-N1-D5
ctcgagccgaatcggctcgagaagaacccttcttttgctccacgtttcttcactctcaaccgttcgactcgttcgatatcaaccgagttgactcagatctctaaggaagttgcagcactgaattctctttttttgcttgtgacgcagagcataattaattgacacattcatcacaccacagcaacacagccctgatttatctttttctgcctttgggtttcaaggcatataattcttcctctactgtattcatgaaatcttggtgctggctttcttttcctcattaactctgtaaagcagtgactttcttctgtagtcagttgggattgctctaggtctcataattcgccaaatttatttt

SEQ ID NO: 47706 - DNA, 397 bp, Glycine max
  Clone ID: LIB3139-121-P1-N1-D6
aaggaatttaatggcatcctcaacggcaaaaagcttggttcaacttaagtccatgaagataagaaaatgttacgaattagaggaaatagtaaccaataagggaaatgaagaagcagagcaaatagtgtttggcaaattgattactatagaacttgagtggctaataaagctgaaaagtttttgcagttacaagaagtgtgaattcaaattcccgtcattggaagtattgattgtgagagaatgcccatggatggaaagattcgcggagggtggcgcgagtgcaccaaagttacaaaacatagttagtgctaatgaagaaggaaaagaggaagccaaatggcagtgggaaggagacttgaatgccaccatacaaaaagggttcaacaagcttttggag

SEQ ID NO: 47707 - DNA, 387 bp, Glycine max
  Clone ID: LIB3139-121-P1-N1-D7
ctttccattcctttcttccttcgtcccattctcgaatgggcgtgtgcctcttgcaatcccccaaaggttttttgaagcagaagaatggacttctttactagagacataaatgaggattctatgcttagatgcccattcttgaggaacatcaatgagcctactaacttctcattctcttcacctttggctttaccaatgcctgttcgtggagctaaaggtccaatttttgaagatggtcccaattttgatttggcatttaggcttttccacgggagtgatggtgtagtacccttatctgacagatcttttcggccttcagagaagaaagtacaggcagaacctcccaaatcccaattcaatcctttagctgcaaaggcagctactatt

SEQ ID NO: 47708 - DNA, 386 bp, Glycine max
  Clone ID: LIB3139-121-P1-N1-D8
agttcatgtcttgtgaaattttggattagtgctcccgcggtcctatctggtataggacttcctgggtagacttttctacttctctcctttctttcactctcttcttctcactgatccgcattgccgttcaaagtggtcttattcgaaaaacacttgggcgttggtgcaaatgtttgcttcgttaattttctctggagacaacaggctcactgagaaaacaatttttacttgcagagatttggacatcttggttgtctattatacaatagcaactcaatttagaaaatttctaccgcattacattaggtggcatcttgctacctggttgaggtacttgttggtagactttttcactgctgataattaatataagcggaatttgagta

SEQ ID NO: 47709 - DNA, 266 bp, Glycine max
  Clone ID: LIB3139-121-P1-N1-D9
cgcgaactaagctctaatttcacttcttagctatctttttttttttatatggcactctactcgtcgcagctgttcctatctgattgcaggtcatccaaccatctaccgatctcaattctcaaccttaacctctcataatgtcttactcttatcttttcaaatacatcatcattgttgacaccgtatttgagtagactagactatcttcttcaatatacagacaagcgcattcattcctatccatttcttgaccatagttatttaat

SEQ ID NO: 47710 - DNA, 393 bp, Glycine max
  Clone ID: LIB3139-121-P1-N1-E1
ctcaaacagaatgggaagtgctggaagaactgattatggtgcatacacctatgagaatcttgagagagagccttactggccatcagagaagcttaagatttccatcaccggtgctgggggttttatcgcatcacacatagctcggcgcctcaagacagaggggcattacgttattgcttcggattggaagaaaaatgagcacatgactgagaacatgttctgtgatgaattccatcttgttgatctcagggtcatggataactgcctcaaggttacaaagggggttgatcatgttttcaatcttgctgcagacatgggtgggatgggttttattcagtctaaccactctgtcattatgtacaacaacacaatgattagcttcaacatgattgg

SEQ ID NO: 47711 - DNA, 297 bp, Glycine max
  Clone ID: LIB3139-121-P1-N1-E11
gttggtgttttttgtaatggaaccctttacataggaaggcttggggattcccgggctggtttgggaagagcagtcaaggcaactggcgaggttttagccatgcaattatcagcagagcacaatgcatcgatagagtctgtaagacaggagctgcatgcttcgcattctgatgacccaaatattgtggttttaaagcataatgtatggcgtgtgaagggtcttattcaagtttctagatctattggtgatgtatatttgaaaaaggccgagttcaatatagaaccactatattcttag

SEQ ID NO: 47712 - DNA, 393 bp, Glycine max
  Clone ID: LIB3139-121-P1-N1-E12
gattggtttttttcctctcaggaatgtgttcccagggcgcgtattgtgttttaaatccacaaaatccttttgtgttaaataggtggatgggaaaactgactttccctcagggcacttcccgaagtgttaagagaatgcctctttctatagggggaggagctggtgcaaagaatgctattctcatgaatatgccaaatgctgttctttcaatgtggagatattttgttggagatctcgtctttgaagtttctaagatgacttctccctacattaaatgtacagtctctttcttcatagcatttggaaatttggctgatgacaccatcaattttgaggcttttccccacaagctggtgcagtttggagagattcaagaaaaaggtgtgttgaaat

SEQ ID NO: 47713 - DNA, 392 bp, Glycine max
  Clone ID: LIB3139-121-P1-N1-E2
gttttgcatgtactaatttaggactgttactagttgatcgttggtacggtggatgaagtcatcattgatacacaatggagttatgataattatctctactgtactacgacatttgatccattgaaaattggtgtcaatttttgttcgtgctagaactaagttactcacaccgttccaaggtataagttagttctaaaaatggaacagaatgaggagaaggctaacttccatttttgggatgcaacatgtatcaaaatttttggcaaaacgatcgatcaatgtcgccaagagtagattgcaagtggcgatgagatcaaggttttccctccctattttgatgaattattgggaaagacttgggctgtcagattttagtaccatgcacgatgctc

SEQ ID NO: 47714 - DNA, 390 bp, Glycine max
  Clone ID: LIB3139-121-P1-N1-E3
ctcttgtgctggtgaaaatcatgtacatacatttcaggactatttagtaatagatgatggatttttgctctggtatgttgttttccttcctgtaccatctatttccatttacaatggtttgttcctatccttttagctgccccattaaattgggggctatcaagacttgttcttttttctcctacatttaatctttacaacaggaaatgctcctgaaaattttggcttcattgatgcacaagcattggtagctgttggatgtgtagaaaaataaatcaattgcaaggaatattcattttgagcatggtcagcaggtaatgatgttaggtttctcaatttgaaagtggttccctgaaataaaatgatagtgttgttggcttttattaataa

SEQ ID NO: 47715 - DNA, 395 bp, Glycine max
  Clone ID: LIB3139-121-P1-N1-E4
ctctaacaataaagtacaagaaattaagacggtgtcgaatctctcccatgatgttgatcatgtcgatacatctgaagcccgttatcctgttagagatgagatagttactgaaggtaatgtagaatctgcgaaagagaaaaatgatttggaattgtccttgaatccaaatggcttcatcacaggaaaggaccaaaatattgatatctcggaaattcctgatggtgcaggatgttctgaacgtttgaatcaggacataacagaagagaaccagccatcatctccaccgccatctcctcacttttctgtcactaagaaaattgaagagctagaaaatggtacagatgtatctgagcgaccgagtcctgtatctgttcttgatacatcattctcggatg

SEQ ID NO: 47716 - DNA, 374 bp, Glycine max
  Clone ID: LIB3139-121-P1-N1-E6
cacacgttctctgtgactgcctctgttccgccaagcgcaggattttcccaccgttcaggccaccggctgagttaggtttccggcgaggatgggtgctgctctgctgtcggagcttgcgacggagatagtcgtgccagtgtgcgccgtcatcgggatcgtgttctcgctggtgcagtggttcctcgtgtcgcgcgtcaagctcactcccgaccgcatcggaacgacttcttcgccttgcaacaacaaaaacggctacggcgacttcctcattgaagaggaagaaggcatcaacgaccacagcgtcgttgtgaaatgcgctgagattcataacgctatctcctaaggtgcatcatcctttcttttttctgaatatt

SEQ ID NO: 47717 - DNA, 389 bp, Glycine max
  Clone ID: LIB3139-121-P1-N1-E7
cacccccgttctaatcggatcccaaaccctaacagtgcaggtcaccactctctccgaccacaacctcaaactctccgaaaaccttaccaccgtcgaccaagccagagtcacccacccgaatgttgtgacccgacccgacggcgtcatccacggcatcgaccgcctcctcctcccccgttccgtcgaggacgacttcaaccgccgccgcagcctccgctccatctccgccgtcaaacccgaacctgccccggaggtcgacccgagaacccaccgtctcaaaaaaccccccccaccggcgaaacctggttctcttccagaacttccgatctacgacgcgatggctccgggacccttcctggccccggcgccggcgccggggccaggcggtc

SEQ ID NO: 47718 - DNA, 373 bp, Glycine max
  Clone ID: LIB3139-121-P1-N1-E8
aaggagactcttggaggcgcacgtttacaatgcgcaggggccgggctacaagcgcaacgacgtgcgcgtggaggtcgacgacgaccgggtgctctgcatcgtgtgcgggaagagcgtcgagaaggaggagcagaggggaggctggcaccgcgtcgagctctccagtggacagttcgttcagcgcctcactttgcctgagaattccatggtggatcatgttaaggcctatatggataacggggtgctcactatcacggttcctaaacaccacagaggggtcaataaccgtgttagaaacattaacatctcttctcgtccgtgagtgttgttgttgtgtgtctcatgaaatgaaagaattgaaacctagctaacc

SEQ ID NO: 47719 - DNA, 376 bp, Glycine max
  Clone ID: LIB3139-121-P1-N1-E9
ctaccgtttttttcgcctccgccgcagcacctcaggtgccccgtctccgaggaatcctcgccaccctcccgcaacacctactcctgggacgagcccttctcgccggcgtctacgaagctcctcctcatgtgcagctacagcgtccatatcttcccccgcccccactacaagttcctctgctacgtcgtctgcgacactctcattatcgtctcctaacgcgccatctcacttgcgtacctcttcactcgcctttagaaaacattcctgaatgtgaagaaccttaacgctcaattaccatactctctactaggtcctctaattccttatctttgttaccaccgactaggatccttataacatttatctattagtattt

SEQ ID NO: 47720 - DNA, 392 bp, Glycine max
  Clone ID: LIB3139-121-P1-N1-F11
ggaaggttgttatgatttggaaaaatgagttctgggagggtgaagccagaagaagaagccctagaaaaggagaatgtaggtgttcctgtccctgaaatttcagaaccaaaagagcagaaggctggaagtaactgcaagggaattgagcagattcctttgtctggggaaaatgaagaggatgtgctagttaatataactgggagtgggtccataatttctggtggcaaggcagtggaagatgcttctgaggatgtcactgatgccacgccttgcagttccagttcttttggtgatacagattctggcttagaggatgcctcagcctcggcgttcaccaatacggtagtggaatcgcctttgtgtgatggtgatcaaagtaagacttctctttg

SEQ ID NO: 47721 - DNA, 389 bp, Glycine max
  Clone ID: LIB3139-121-P1-N1-F2
attaaagctgtcttgcatgcctctggcttgactacggatcagttgttgatgaaatgcctttcctcagacaagatactggatccttccttgtttgatcaagtagagtacttctcgaacctgctttgccacgatcagaagctcctatttgactctatcaatgaagttctcatggagatttgtcagcattactttggggcctcaccttgggtttcatttgtaaatcctagcacgaggctaactccaagtatgaaaagggttactttaaaggtctgggaaggagtgtgctggcatatccttcccttgcccccaccgcgcactttagagcaaattgttaggaaagacatggcaagaagggggacatggatggaccttggacttgatgcggaaac

SEQ ID NO: 47722 - DNA, 390 bp, Glycine max
  Clone ID: LIB3139-121-P1-N1-F3
ggcgtagctgggatggccctccgcaacagtactactagagaagaggtggttgtgaagcttaagaagggagatgttataccagtacctattggaagtgtctcgtggtggttcaacgatggggactcagatcttgtcattgtttttcttggagaaacttcaaaggctcttattcctggcgaaattagttatttctttctaaccgggcttcaaggagttataggaggcttctctaatgagctcacaagcaaaatatatggtttggacaaagatggggtggaaaagctcacaaaaagccaaagtggggttgtgatcatcaaattagacaaaagccaatctttgcctaagccccaaatggaaataaccaaaaagctagtctataatatagatgtt

SEQ ID NO: 47723 - DNA, 360 bp, Glycine max
  Clone ID: LIB3139-121-P1-N1-F4
gtaaatgtcacatgtggtagtggacgtggtggtttacccaccactgcttggattagttctgcagttaacaatcgctcctcagatatcaacaaaaggattcgcacagcacttgggaaaggtaagaaaattgtttttcttactagagttgatccttttccagtagctttactggctgttctttttggtgttaagaatgaaattctgagttctaacgccactaatcctatgctgacgcgacttcttgaaaactgtaagagtctcaaatatctggttgatgagtgtccttttgcatttgtgaactagtatgtaatattttattcacttaaataaagcgcattactatgtgcaatgagtgtgttt

SEQ ID NO: 47724 - DNA, 354 bp, Glycine max
  Clone ID: LIB3139-121-P1-N1-F5
ccactattttctattttttcatgttcatgaagaaagcggggagcgttttctctggtcttaaactcacaactcctgctgtatatgatcgagattcatttacaaagttcctgtctgagcctgaaagtggaacgttaaaggctggtgacttgcttgtcaataatgaaggagttcgaattgtctctgagaatgaagtggaagctctattcctcgatcaggccacatgataaccagttatgtttggcagacattgatacatattatattgtttggaaaaggaaatggagggtttgttcatttggtgctacacatatggactttattagttttttcattgaaggatattcaaatgcctat

SEQ ID NO: 47725 - DNA, 342 bp, Glycine max
  Clone ID: LIB3139-121-P1-N1-F7
ggagtttcattactgagcagcacggtggcggcggtgggaggtacgtcgctttccccggcgtataaatggcggcgggatcggactctatctgcagaaacttggtggcgttggaaagcatcggcgacgtgccactgttctcggcgcggcgtctcaacaaggaaggcgatgaacctgtgatggtgcatgctgggatgctgaatctcttgtccacctttttcgaaccatttcaaaaacagatgttggcactcatgggaaattccaagaccaaatcaattgggctaactggccacttctttggaggagccacagtcctactatgtgctctttggcttcttttttacc

SEQ ID NO: 47726 - DNA, 380 bp, Glycine max
  unsure at all n locations
  Clone ID: LIB3139-121-P1-N1-F8
cattaagggttattcaatgcaattagcgaatgagagagtgaagagccggtggttcgtgtggcttttggcggtactaggcatcatcggagccacactcttcatagtgagcttgatccaaacctcggagaacaacttcctatgttccataacaagaacgatgcagcagcagcagcagcagttcaccgatggccccacatcgatgcaactcaaagccatcctccactacgcgacctctcagattgtcccttaacaatctctttccgagattacaataaccttcgacgtgctccaaagcctncaccgccccgccaacttcctcgtgtttgggctgggccgcgattctctcatgtgggccagcctcaacccccacggcaccacgc

SEQ ID NO: 47727 - DNA, 388 bp, Glycine max
  Clone ID: LIB3139-121-P1-N1-F9
gcaagctatggctattactacaccttccaattcggggaggctcctctccctttctctattgctcatctccctctccctcgctgagtcgcaatctttcatcggagtaaactacggccaggtcgccgacaaccttccggcgccggaggacacggccaacctcctcaaatccacaaccatcggaaaagtccgtctctacggtgccgatcccgccatcatcaaggccctcgccaattccggcatcggaatcgtcatcggcgccgccaacggcgacattccgagtctcgccgccgatcccaacgcggccactcagtgggtgaacgcgaacgtcttgccctactacccggcgagcaacatcactctcatcaccgtcggaaacgagattttgacc

SEQ ID NO: 47728 - DNA, 388 bp, Glycine max
  Clone ID: LIB3139-121-P1-N1-G1
attttgcagggagaattgccctgtgaactggagaaatggagtcctacatacaatatattggcattattgcgggtgcttgagggtttgaaccaacttgcatctcgtttgagggcccaagtggttactgatagctttgcagagggaaaaattttggatttagttgagctaagttttaccagtggtgctagggttcctacagaggaatttataagcagcaaacttactccaaaattagctaggcaaatacaagatgcccttgccttatgtagtgggagtcttccctcatggtgttaccagttatctaaagcgtgcccttttttgtttccttttgagacccggcgacagtatttttattcaactgcctttgggttatctcgtgcattgtatc

SEQ ID NO: 47729 - DNA, 395 bp, Glycine max
  Clone ID: LIB3139-121-P1-N1-G11
aacttgtttctccgggtgcctgatgggctcacaaggggtaaagatgtcatgacctcttttgtacgggatacaggtaagcagctagttatggatcctgaaaggttgagagatcctgtggattttgttcaacgtctcttggatttgaaggataaatatgacagggttattactatgtcatttaacaatgacaagacatttcagaatgccttgaattcctcttttgaatatttcatcaatttgaatgcccggtctccagagttcatttctttgtttgtggatgacaaacttcgcagagggttgaaaggggtcggcgaagaggatgtggagattctactagacaaagtcatgatgcttttcaagtacctacaaaagaaggatgtgtttgagaagtatta

SEQ ID NO: 47730 - DNA, 395 bp, Glycine max
  unsure at all n locations
  Clone ID: LIB3139-121-P1-N1-G12
aatttctaaggctcttggggttaaaatttatgcaaatgcttcaagaagacggattttgcaagcttttggttggcctgacctttcagataaactctgtacaaacggaaacaacacacttctccatgttctgccgatgtcatctttaagagttgagaccttaaaggattacttgaagacctacaaggagcaattcacagcaattttggcatttcgtcctacaggttggactttcagtgagaagataagcaacgatctggaactaattaaacctgtttctaaaggaaatattacgatatatggggttccctatagtgagcactccagcttctcagaactgcaagattttgttcaggttttgaggcctgacaagataattncaactgtgaatgttggaa

SEQ ID NO: 47731 - DNA, 388 bp, Glycine max
  Clone ID: LIB3139-121-P1-N1-G2
cttgagttcaaacactctcatcttcttattcttctgctttcactctctgactcaatcgttctaatccacaaaaaatgaccttaaattacaacattgccctcgccttctctgcggtgctcacgctgctcctctttcccctactgaccgtaggggagctcgtggaggagcagccactagtcctcaagtaccacaacggccagctcctgaagggccgcatcaccgtcaatctcatctggtacggcaccttcaccccgatccaacggtccataatcgtggacttcataaactcgttaagcagcgcgccaaacgcgcctctcccctcgaccgccacgtggtggaaaaccacggagaagtacaaggtgggaggaggatcccctgcgctcgtcgt

SEQ ID NO: 47732 - DNA, 391 bp, Glycine max
  Clone ID: LIB3139-121-P1-N1-G3
cccccctttgctctcaaaccttatcacctaatccttaggggccaaaccagaaaaccatgtctacctccgcagcttccctcgcactcccaaccctcactctccgaacccgacaacctctatgttctccccaatgcttctcctcgtccctctccctcacacccaacaacaaacccatttccatttctgctgtttttctcaaaccaacaactctgtcgtcgtctcgcttcgttccccacgtcgtggtgtcgtcggatttggggcaggaggaggacaccttcagtgacggagacggccccagcttctcccccgaccttaagctctttgtcgggaatcttccgttcaacgtcgacagcgcgcagctcgcggagctctttgagagtgccgggaatgt

SEQ ID NO: 47733 - DNA, 399 bp, Glycine max
  Clone ID: LIB3139-121-P1-N1-G4
cccaaaacaagcatggcagcaactgaaaaggggctttcaactgccttgaatcatggctatgggacaaaatccttcctttgcttcttcctcaaaattaccgtcttattacgtttgattggccttttgctggaactgtgaaggatcagaatctctatgaccctgtcaagtattcctctgtggaaggttttgctgatgacttgatcactctgctgaataaaatggacctcaaagctgtcacttttgttggtcactccatgtccggcatgattggttgcattgcttctgtcaaaagccctcaactcttcaagaccctcattctcgttggtgcttccccaagttatcatcttattcttttcttaaacttttacttattagtttgttttgttacccttgctttga

SEQ ID NO: 47734 - DNA, 378 bp, Glycine max
  Clone ID: LIB3139-121-P1-N1-G5
cccaaaacttttttgttttcaactgaaaaggggcttggcacgtggcttttatcatggatatgggacataatccttcctttgctccaccctcaatattaccgtcttattacgtgtgattggcctttggctggaactgtgaaggatcataatctctatgaccctgtcaagtattcctctgtggaaggctttgctgataactagatcactctgctgaataaaatggacctcaaagctgccacttttgatggtcatctatatgtccggcatgataggctgtatggttttttgttcaaaagctcttaacttttaaataccctcattctcgttgttgcttcctcaatttattattttattatttctctaaaatctttacttatt

SEQ ID NO: 47735 - DNA, 398 bp, Glycine max
  Clone ID: LIB3139-121-P1-N1-G6
cttgaatcttcgttatccttctttttttctccttgaactcgaatattcactatggcagatgaggtggttctgctagatttctggccaagtccatttgggatgagggtcaggattgcacttgctgaaaagggtatcaaatatgagtccaaagaagaggacttgcagaacaagagccctttgctcctcaaaatgaacccggttcacaagaaaatcccggttctcatccacaatggcaaacccatttgtgaatctctcgttgctgttcagtacattgaggaggtctggaatgacagaaatcccttgttgccttctgacccttaccagagagctcaggctagattctgggctgactttgttgacaataagatatttgatcttggaagaaagatttggacatc

SEQ ID NO: 47736 - DNA, 392 bp, Glycine max
  Clone ID: LIB3139-121-P1-N1-G7
gatgaaatagaggttggagaagtcgattgcggcatggagaaagcagtatgttccaaagttgatattcactcctatcctacctttaaggttttctatgatggtgaagaagtagccagataccaaggtacaagagatgttgaatcaatgaaaacctttgttttggaagaagctgaaaaggcagcagcaaaagcacttgaaagtaacaaagaattataacaacttttgaggtgcagtcattatctggattacaactagctctttactgtgggtggtgcacatcccagataagtaatcacctttgggttcaggctgagacattcattcttctctgttctgatcaacaatttgttgtttgacgtagcaattgtgagttaagaactaatttcgtacac

SEQ ID NO: 47737 - DNA, 390 bp, Glycine max
  Clone ID: LIB3139-121-P1-N1-G8
gaattttagtggacaaaactggagattggatcacacttatacaaaattctccaattagtaacttgttgagagttgctgcttggaagaaaggctgtttaatggttaagattgtgatgtctgggaatgcagcagtcaaaaggagtgattgggcctcattggtacaagtatttttaacaaacagcaacagtacagagcattttgatgcatgtaagtggacaaaatcggaaccacattcctgggaattgatcttcccaatagaggtatgtggtcccaataatggttttgaaatgtggagttctgagtgggcaaatcaaacttcatggcatttgagtttccttattgacaatcccaaacagtctacagtttttgatattctcttgggaatttctc

SEQ ID NO: 47738 - DNA, 389 bp, Glycine max
  Clone ID: LIB3139-121-P1-N1-G9
cgcacatatccccactggtgtggatccaacccttgagcaatgggagcagattaggcagctaataagatcaaaagctttgttacctttctttgacagtgcttatcagggttttgctagtggaagtctagatgcagatgcccaacctgttcgtttgtttgttgctgatggaggcgaattgctggtagcacaaagctatgcaaagaatctgggtctttatggggaacgtgttggcgccttaagcattgtctgcaagtcagctgatgttgcaagcagggttgagagccagctgaagctagtgattaggcccatgtactcaagtcctcccattcatggtgcatccattgtggctgccattctcaaggaccggaatttgttcaatgactggacta

SEQ ID NO: 47739 - DNA, 371 bp, Glycine max
  Clone ID: LIB3139-121-P1-N1-H10
tattcctctttcattctcactataaacacaaaaccgtggccatcctaattaaggtgaaaatgaaggcatcacccattgcttggttcactttggtggttgtgtttcttgtggctgaagttcaagtttcaatggcagtgacatgcagcccagtgcatcttgtgtgcatgtgtaagtgcaataacctcttcaacccctccatcaaacctatgcttgctcaagatcaaagaacagaaaccatgcctttgtcaatacctcatgatccccaatctcaagaaagttgttgactctccttttgccaggagagttggttagccttgtggaactccctttccaggtgcttagtgttattaaattagaagaggtttattttc

SEQ ID NO: 47740 - DNA, 361 bp, Glycine max
  Clone ID: LIB3139-121-P1-N1-H11
ctcgagccgtattcggctcgagggaagatatctggacggaatggccgtaacagaagcaaacctaaagaaggctggcttccacacatgggagcagttaattctcaaggatccacatcttatcactccaaatgcactttcatacaaatcagcaatgagagagaatctgttgaggcagggatacagaattgttggaatcattggagaccaatggagcgatctgcttggagaccacagaggcgaaagcaggacctttaagcttcctaatcccatgtactacattgagtagtaccttcacctctctcaacaatctagctagagtttgctcctatctatatgtaataaggtatgctgatatgcacta

SEQ ID NO: 47741 - DNA, 396 bp, Glycine max
  Clone ID: LIB3139-121-P1-N1-H12
gtaaatgtgttacgagaattgtatttgcacagtccagaggaagctcgccaattgagaaggaaagctctctctcgtattgaatggctgcaaaaagctgatgtgcctaccatagcacagattgaagagttccattcgatgcagaggatgatgaatgctcctgattcaaatgataatattgatctactgttgagcattgatttgttgggtttacaaggagcaggtaaagcttttccaaacaagattgtttttgatgataagcttgtgttggctaacacacaagaattctttgatggaaattttccagtggattcttggttaccaatttttgtgaattgtctttatcctgtaagtcaattaccttcaaaagctgtcgttgtaaatgttacatgtggtagt

SEQ ID NO: 47742 - DNA, 391 bp, Glycine max
  Clone ID: LIB3139-121-P1-N1-H2
tgatgtattgccttttcgtcactaattctaaagttacagaggctttagtgatgaatttttcaaaagttacatatgaaatatttcgtcactaaaatttattgaaaattaaatctggaaaattcatggttattttttttatgtgattttatagtttttaataaatttaaactaatcataaaaaatgtgttaaaatgagtgtaataaagaatatgttattgacacttgtggtatgtatactctactcgatccgatccagtgtatttttataggtaccaatttcttcttccactgttgttattgtacgtgtaccttgtgtacgaattggtcgttagatgtttctattttacgttttgctatagaaatgtgaagcagacaaaagagtctcagatat

SEQ ID NO: 47743 - DNA, 390 bp, Glycine max
  Clone ID: LIB3139-121-P1-N1-H3
ccgatgaagaaatataaagagaaagagaaagagaagtgcgtggctgtgacaagccctgtgagtggcgaagacagcgatgataagcaacgccctgcctttccctcggtcagattctcttcccgcaacgcttcttccaaatacgatttcgtcaaggtgaaggtgtggttgggtgataatgcggatcactactacgttctctccagatttttgctcagcagaatgctaacggtaaccaagattccaaaccacgtagctatcaaaattgctctcgaattgaagaagctgctcacagataacagccttctagatgtctctcaatctgacttggaagtcaacctatttaagcttatggagcggcggggatatggagaagagtacataaatcgttac

SEQ ID NO: 47744 - DNA, 379 bp, Glycine max
  Clone ID: LIB3139-121-P1-N1-H5
tgaaaaattgatgcgtgaaaggacacacctgctgttggcttgttgttcaaggatggcaatttgtaagaaagatgtttggagagttgaatgtggaatcccttctggatttccgctcacagttatttgtaatagcatttttaatgagatgctcattagatatagctatgaaaaattactgcgccaggctaaagctccaagtatgtttttacaatccttcaaaaattttgtttctttgtgtgtgtatggtgatgataacttaattagtgttcatgaatatgtcaagccttactttagtggttctaaattgaaaagctttctagctggtcataatatcaccattactgatggtattgacaaaactagtgcaactttgcaattt

SEQ ID NO: 47745 - DNA, 403 bp, Glycine max
  Clone ID: LIB3139-121-P1-N1-H6
ctcgagccgagatttaccaagtaatactagccaaaatatgtgggccaaatacatgtcccttttcctcctagtaatactagggatggcttttctggccactacttcccttgctgatcgtcgttttctttcggtggaagatggtcatgatcaccatcaccaccacccaccaaaaaaacactggcctccaaccacacaaaatgaaccttcaaacgtagaaaacaaggagaacactgaggtggaggatggtcatgatcatcaccatcactacccacctaaaaaacactggcctcctaccacacaaaatgaaccttcgaaagtagaaaacaaggatggtcactataagccttcccacaagaagcatcctccttcgggaaattaattaatctagtgaagctgctacgta

SEQ ID NO: 47746 - DNA, 366 bp, Glycine max
  Clone ID: LIB3139-121-P1-N1-H7
catttccatttccaactctgttcactctttctgcagtcaacacttctccgaatcattatgatatgatcactctctttcttgtgtatcccacttttattctgaggtcaacggtctttgaatcttccttactcaattgtgtgtgcaaccttatcaaatgggtcggaggaacaatgaaccaaactccattctttcacaccgtttgatcctcccattggtgtgtttcgcttcgtgcggtttggtctacgcgttcctctctgcggtgctcacaaacagcagaaacagagtttcagagtttcagaggttagttgaaagatggcgtgcgtctgagaatgatggaggggctgtaaaggattggaaatttggagc

SEQ ID NO: 47747 - DNA, 341 bp, Glycine max
  Clone ID: LIB3139-121-P1-N1-H9
gcttctaacgcactcttctaaacttaacacaatggggcggagcaaattgacgttagagatcttctcaaaattggagcagcaatggctctcgcactacgaagcatcaaccaaaacgcgcattctcagcattgacggcggaggaaccaccgccattgtcgccggcgcttccctcgtccacctcgaggaccagatccgcgcccaaacctccgatcctcacgcgcaaatcactgattactttgacatcatcgccggcaccggcattggcgccatcctcgccgtcatgatcaccgccgacgacggcttcggccgggctctgtacaccgtcagaaacgccgtcaact

SEQ ID NO: 47748 - DNA, 330 bp, Glycine max
  Clone ID: LIB3139-122-P1-N1-A1
gccccactcaaccaccacaccactctctctgctcttcttgtacctttcaagtttttaaagtattaagatggcagagacattcctatttacctcagagtcagtgaacgagggacaccctgacaagctctgcgaccaaatctccgatgctgtcctcgacgcttgccttgaacaggacccagacagcaaggttgcctgcgaaacatgcaccaagaccaacttggtcatggtcttcggagagatcaccaccaaggccaacgttgactacgagaagatcgtgcgtgacacctgcaggaacatcggcttcgtctcaaacgatgtgggacttgatgc

SEQ ID NO: 47749 - DNA, 339 bp, Glycine max
  Clone ID: LIB3139-122-P1-N1-A10
aacacacaagaattctttgatggaaattttccagtggattcttggttaccaatttttgtgaattgtctttatcctgtaagtcaattaccttcagaagctgtcgttgtaaatgtcacatgtggtagtggacgtggtggtttacccaccactgcttggattagttctgcagttaacaatcgctcctcagatatcaacaaaaggattcgcacagcacttgggaaaggtaagaaaattgtttgtcttactagagttgatccttttccagtagctttactggctgttctttttggtgttaagaatgaaaatttgagtacttacgctcactaatcctatgctgac

SEQ ID NO: 47750 - DNA, 406 bp, Glycine max
  Clone ID: LIB3139-122-P1-N1-A11
cttcaggtcaccatctagactgcaatcatggctgatggaccacagcatccatcagttgttcagaagctagctggacagtcttacctggtgtccaggcttagccccaactttaactctaggaattattctgcaactggttcttacgtcaatggcggaatgcactcgcctgggttggctgttgtgtcacctgtatctccagttactgtgcatgctccagcagagaaaggagtgagtggatttctagtggattttctgatgggtggagtatccgctgctgtatcgaagacagctgctgctccaattgaacgagtcaaattgcttatccaaaatcaggatgaaatggataaaaggtggtcggctatctgagccatacaagggaattggtgattgttttgctcgaacaatg

SEQ ID NO: 47751 - DNA, 412 bp, Glycine max
  Clone ID: LIB3139-122-P1-N1-A12
agagtacttacattgtacacgtggcgaaatcggagatgggcgagagcttcgagcaccacgctgtgtggtatgagtcgtcactgaagaccgtgtctgactcggcggagatgatttacacctacgacaacgccatccacggctacgcgacgagattaaccgctgaggaagcgcgtttgctccagcgccaaacggggattctggctgttttgccggagacgaggtacgagcttttcacgacgcgaacgcctttgtttctcggacttgacaagagcgccgacttgttccccgagtcgagttcgggaagtgacgtcatcgtcggagtcctcgacaccggcgtctggccggagagcaagagcttcgacgacaccggactcggacccgttccgagcacgtggaaaggcgcgtgcgagac

SEQ ID NO: 47752 - DNA, 380 bp, Glycine max
  Clone ID: LIB3139-122-P1-N1-A3
cttaattagtgttcatgaatatgtcaagccttactttagtggttctaaattgaaaagctttctagctggtcataatatcaccattactgatggtattgacaaaactagtgcaactttgcaatttagaaagttagcagattgtgattttctcaagagaaactttaagcagatgtctaatgttttgtgggtggctcctgaagacaaggcgagtttatggtcacaacttcattatgtttcgtgtaataatctggaaatgcaagaagcttatcttgtcaatctcgtaaatgtgttacgagaactgtatttgcacagtccagaagaagctcgccaattgagaaagaaagctctctctcgtattgaatgctgcaaaagctgatgtg

SEQ ID NO: 47753 - DNA, 421 bp, Glycine max
  Clone ID: LIB3139-122-P1-N1-A4
acatgaaaggaaacacaaaccagggaaaggaaatttcagtggccgggatcgatcataaggaggaagaaatacaaggttttgggacctcttctcttggcttataaaaagtccaaaacaggagccttcttggtgttttagaaaggaggaggcttgggggaaaagggtggagaaaaaagtggttaaagggacagcaacttattggatactggaggataagaagactattgctacaaggcaaagtaaaccaatggaggaaatatcttctagtgttgcagtaccttttacacttggtgttggaaatttgattcaaaaggagttcgcggtgacgactcacatggagataactgggctgaagctcatggcaaatacagcagcggctggtttaatgttaaatcctgcaatggagtgtttaaaggagaat

SEQ ID NO: 47754 - DNA, 411 bp, Glycine max
  Clone ID: LIB3139-122-P1-N1-A5
gaatggttgtaactttttgattcctaaattctctaaaattcgaaattctaatttcgttaggggaaagagattgtttgtgtgtgagtgagtatggctggaaaaggcgagggtcctgctatcggaatcgatttgggaacgacgtactcttgcgtcggcgtgtggcaacacgatcgtgttgaaatcatagccaacgatcagggtaacagaactaccccatcctacgtggctttcaccgacacagaacggttgatcggcgatgcggcgaagaaccaggtcgctatgaacccaaccaacaccgtttttgatgctaagcgtttgattggaaggcgtttttccgatgcatcagtacaaggtgacatgaaattgtggccgttcaaggtgattcctggccctgctgagaaacctatgatt

SEQ ID NO: 47755 - DNA, 119 bp, Glycine max
  Clone ID: LIB3139-122-P1-N1-A6
ctttaatctaattggtatagaatagtgttttagaaaggggggtggctagcattttgaataaatatgtgatccaagtccatgaataggcctgattgttatggggggtgtttcatcttttt

SEQ ID NO: 47756 - DNA, 357 bp, Glycine max
  Clone ID: LIB3139-122-P1-N1-A8
ggagcaaatgccatattggcagtgtctcttgcagtctgcaaagctggtgctagcgtcctgaaaattcctctttacaagcatattgctaatatcgcgggtaacaaaaagttggttttgcctgttcctgctttcaatgtcattaatggtggatcacatgctggaaacaaacttgctatgcaggagtttatggttcttcctgtgggagcttcctcgttcaaggaagccatgaagatgggtggagaagtgtatcacaatttgaagtctgtgattaagaaaaaatatggtcaagaagcaataaatgttggtgacgaaagtgggcttgcccctaacatccaagaaaaccaggaaggcttggaa

SEQ ID NO: 47757 - DNA, 367 bp, Glycine max
  Clone ID: LIB3139-122-P1-N1-A9
cactatttgacaaaggttcatcgcaaactttgcgacatggcaggggatcgaggttaatagttagagcagatgcagattactattctgtactcggggtgtcaagaaattccagtaaatctgaaattaagaatgcttatcggaagcttgcccggagttatcatcctgatgtgaacaaagaacctgatgcagaacagaaatttaaagaacttagtaatgcatatgaagtcttgtcagatgatgagaaacgatccatatatgacacatatggagaggctggacttaaaggttcaagaatgggcatgggggattttagcaatccttttgacctgtttgagacactggttgagggcatgggtggcatgggggg

SEQ ID NO: 47758 - DNA, 387 bp, Glycine max
  Clone ID: LIB3139-122-P1-N1-B1
ccaatatattacattctctatgaggatacacctacctcgaccggtaagatacaaatcttcgtcaagaccctcaccggcaagaccatcactttagaagtggaaaggtctgacaccatcgacaacgtgaaggtcaagatccatgacaaggaaagaatccccccggaccagcaacgtctcattttcgccggaaagcaacttgaggacggccgtacccttgctgactacaacattcagaaagagagtactcttcacctcgtcctacgtctccgaggtggcatgcagatcttcgttaagacactcaccggcaagaccataaccctagaagttgaaagctccgacaccatcgataacgtcaaggccaagatccaggacaaggagggtatcccc

SEQ ID NO: 47759 - DNA, 414 bp, Glycine max
  Clone ID: LIB3139-122-P1-N1-B11
gacagacagatcaatgggggaagcaaagggaaaggaagaggaagtgttagcctcagttcactcaaccgtgttcaaagaatcagaaagccttgatggaaagtgtgttaagattgagggctatgatttcaaccgcggcgtcaattatccgttgctactcagctccatggtcacaactgggtttcaagcttccaacctcggtgatgccatccaagtcgttaatcaaatgctagattggaggctagttgatgaacccgtagctgaggattgcagtgaccaagagagggatttggagtaccgaaaatctgtgacgtgtaaagtgtttctgggtttcacttctaatcttatttcttctgctgttagagatactgtgaggtttcttcttcagcatcgcatggttgatgtaagtgtacaact

SEQ ID NO: 47760 - DNA, 167 bp, Glycine max
  unsure at all n locations
  Clone ID: LIB3139-122-P1-N1-B6
agttatangctttattttttnnaacgagatgctcatttggtctgtttattaaaaatactgcgccaggctaaagctccaagtatgtttttacaatccttcaaaaattttgttttcttgtgtgtgattggcgattcttacttacatttgtgtttcttgtaatatttttt

SEQ ID NO: 47761 - DNA, 344 bp, Glycine max
  Clone ID: LIB3139-122-P1-N1-B7
agctatcatgtttgttgtagtatagttagagatgtcacgtctacactcaccctgcatagtttgttcagctataatactacttgagcttctttacctacttttcaaacctacattgcacacaaaatggcaacatcttggtcatgttatctacttgcattgcttctttttatgtcaactattgtatcagagagtagagtggcaaggaaggacttgggcctttaccttggtggtttgttggtttttaaataaatctctttttttttttttcttttcttcttattctttttttctatttattatttatcacttttttttaatttttttctaatttatatattcattat

SEQ ID NO: 47762 - DNA, 379 bp, Glycine max
  Clone ID: LIB3139-122-P1-N1-B8
gtgataaactggaccttgctgctgactgctacatgaatgcactcaacatcaagcatactcgagcacatcaggggttggcacgtgtatatcatcttaaaaatcaccgcaaagcagcatatgatgagatgacaaagctaatagaaaaggcacggggtaatgcatcagcttatgagaagcgttcagaatattgtgaccgtgacatggcaaagagtgatcttggtatggcatcacaattggatcctctaaggacttatccttacagatacagggcagcagttttaatggatgatcataaggaagttgaggcaatagaagagctttcaagagccattgattttaagccagatctgcaactattacatcttcgagcggcatttta

SEQ ID NO: 47763 - DNA, 415 bp, Glycine max
  Clone ID: LIB3139-122-P1-N1-B9
attttgttgtgttatctcgtctttgaagtttctaagatgacttctccctacattaaatgtacagtctctttcttcatagcatttggaaatttggctgatgacaccatcaattttgaggcttttccccacaagctggtgcagtttggagagattcaggaaaaagttgtattgaaattttcacaagaggaatttcttacagcttggtcaactcaggtgcgtcctgcaacaactctgttggctgatgggtgtccatatttgtatgctatggtgcatgatagttcagtgtctacaataccaggtgattttgtcattggtgttaagttgacaaccataaacaatatgtgtgcatatgggcttaatcctggtatttcaggttctcgtcttttgggcaccattccttagtccatttcacagc

SEQ ID NO: 47764 - DNA, 409 bp, Glycine max
  Clone ID: LIB3139-122-P1-N1-C10
ctcttttatttatggtacatggagcactgttgaggggagctgcatggttgtcagggatgtaaaagatgtttgtttccattcatacttctcggttatggatgacctgcgacaaaaaggacctccagatgcaaaatactatgagatcaggctactttatattcctggtgctttaatagcttcagttattggaatcattgtcgatgtgccagttatatcatttgttgccctatgcaagggtccatacatgctatttaaggggtggcatcgattgtttcatgaccttattggccgtgaaggccctttcctggagaccatatgtgtaccttttgcgggtcttgctatccttttgtggccattggctgttgctggggcaatttttgcatccatgttagcaagtttctttcttggt

SEQ ID NO: 47765 - DNA, 353 bp, Glycine max
  Clone ID: LIB3139-122-P1-N1-C12
cgccaattgagaaggaaagctctctctcgtattgaatggctgcaaaaagctgatgtgcctaccatagcacagattgaagagttccattcgatgcagaggatgatgaatgctcctgattcaaatgataatattgatctactgttgagcattgatttgttgggtttacaaggagcaggtaaagcttttccaaacaagattgtttttgatgataagcttgtgttggctaacacacaagaattctttgatggaaattttccagtggattcttggttaccaatttttgtgaattgtctttatcctgtaaggtaaattaccttcagaagctgtcgttgtaaatggtacatgtggtagtg

SEQ ID NO: 47766 - DNA, 391 bp, Glycine max
  Clone ID: LIB3139-122-P1-N1-C3
caacacttactccacgtcctccaaaccctcatctcccaatcttgcaaacccaaagccttcatcctagacttcttcaaccactccgctgctgatgtcacacgaaccctaaaaatccccacctactattacttccccaactccgcgagttgcgtcgctctcttcctttacaccccaaccatccactacaacaccaagaaaggcttttccagttacagcgacacgcttcgccgcatccccggtttgccgccactgtcgccggaggacatgcccacctccctcctcgaccgccggagcttcgagtccttcgccaacatgtcgattcaaatgagaaaaacagatggaataatcgttaacacgttcgagaagctggagaataaagctttcttcgcgt

SEQ ID NO: 47767 - DNA, 407 bp, Glycine max
  Clone ID: LIB3139-122-P1-N1-C4
attcttttcttcttcaattcatatcatatcaattagatgtgttttcagagtttgctagtgagataccatggacaactacaacagcaatgacttttggaaattcagtgaccagttgaggcttgaatctggtttggccaatctgtctctgaatgattattccatttggagcaacagctacagctccaagaggcctgatcagaggaggaactttgatgtcaagggcagtgatttcaacaacttatcaaagccttttgatgatgatttcaatgatggctgtgagatcaccaattccaatggaccccttttctttatgccttacaacatacaacacttacactcttgaagttggaggctttaacaagggaggaatttatttcaacactaacaccacttttttcttatattct

SEQ ID NO: 47768 - DNA, 410 bp, Glycine max
  Clone ID: LIB3139-122-P1-N1-C5
cgagccgtttaattgtggagatatttggttgaaaatgtggggtttgaagtttttaagatgactcttccttacattaaatgtccagcctttttcttcatagcattgggaaattgggctgatgacaccatcaattttgaggcttttccccacaagttggtgcagtttggagagattcaggaaaaagttgtatggaaattttcacaagaggaatttcttacagctgggtcaactcaggtgcgtcctacaacaactctgttggctgatgggtgtccatatttgtatgctatggtgcatgatagttcagtgtctacaataccaggtgattttgtaattggtggtaagttgacaaccataaacaatatgtgtgcatatgggctcaatcctggtatttcaggttctcgtcttttggg

SEQ ID NO: 47769 - DNA, 276 bp, Glycine max
  Clone ID: LIB3139-122-P1-N1-C7
cttcaggtcaccatctagactgcaatcatggctggtgggccacagcatccatcagttgttcagaagctagctggacagtcttacctggtgtccaggcttagccccaactttaactctaggaattattctgcaactggttcttacgtcaatggcggaatgcactcgcctgggttggctgttgtgtcacctgtatctccagttactgtgcatgctccagcagagaaaggagtgagtggatttctagtggattttctgatgggtggagtatccgctgct

SEQ ID NO: 47770 - DNA, 415 bp, Glycine max
  unsure at all n locations
  Clone ID: LIB3139-122-P1-N1-C8
gttacaccatctgagcaaaagaagcttgagattgaattgcggaacaaggctcttgaatccctcaaagcaaagaagggcatgaataactaaatgcatcacatccaagttttatgttgttttatgctttaaaaacttattgagaaatatcttagcttgtttaagaaacttggttttgcaaatgttatgtttatttattcatcggtaaatgtttgatgtcatctatctttaatgctggcagcggaaatggatagatgatgctttctgagtaaatctgttgagtacaactctatgcagacattgtcctatatttactgatgaattttatgtcaactctagatgacctggtgagaagaccatgtgcagaccctttattttgaacttcaattcangtgaagtttttcattcttttagcata

SEQ ID NO: 47771 - DNA, 376 bp, Glycine max
  Clone ID: LIB3139-122-P1-N1-C9
tccaattttcatcacaaacacacactgctacacgaaaggccgaagcaaaacaagtgaatcaagactctacttcgtgttccaatcagaggatatagatagagaattatgagtcgattgaacaaaaataaaagtatttgtagtgatggtagtgccagtaatgaatcttcttcaagtggaataacaggagaaagggatgatcatcttgatcatgaaattgcacagctcacaaaacttaggtcaagtcctcatgagcttttgggttgtgttgttcctggtaggatgaggttacctgtatctactgtgagaatgttggttggtagagaaggtaattattctggaagagggagattttcatcagcagatggatgccatgtgt

SEQ ID NO: 47772 - DNA, 235 bp, Glycine max
  Clone ID: LIB3139-122-P1-N1-D1
cggctcgagtaaaaatattgtcaataatggcaattgcttgtgcttttattgcaaccttttctttgatcctattatgtagattaaaggttcttttcaagacaagagccattggtaaataccctttagtattttcaagcactttcctttctttcagtgtgtgatattttcttttaggtaatttaatctcttgtactcaacgtggaaaaaaatatatataaatccatgcttttacttg

SEQ ID NO: 47773 - DNA, 412 bp, Glycine max
  Clone ID: LIB3139-122-P1-N1-D10
catcactacgcagatcgcagcaaaccagactaaactccgacgatgcctcccgtcgctcctcgatccggtgatgccatattcgccaacgtcgaacgcgtcaatgcggagctgtttactttgacgtatggcgcaattgtgcgtcaattgctcacggatctggaagaggctgaggaggttaacaagcagcttgatcaaatgggttacaatattggaatccgtttgattgatgagtttttagccaagtctaatgtctccagatgcaacgatttcagagagacgactgatgttattgcaaaggttggttttaaaatgttcctcggtgttactgcatctgtgaccaattgggatgctgatggaacatgttgtagtattgttttggaggataatcctttggtagattttgttgagcttc

SEQ ID NO: 47774 - DNA, 382 bp, Glycine max
  Clone ID: LIB3139-122-P1-N1-D11
aattattctttcttcgtcccttgattgaagtatgggtggggggtgttgaaattcaaagccatatccgtcattaaccaaatttgtgtttctccgattgcaagcaatggactccttcaattccttcttcgattcaacaaaccgatggaattacgatactctcaaaaacttccgtcaaatttctccggtcgttcagaatcacctcaagcaggtttattttactctgtgtttcgccgtggttgctgcggctgttggggcttaccttcatgtcctcttgaacattgggggttttcttactacagtggcatgcgtgggaagcagtgtttggttactctcgacaccttcttttgaagagaggaaaagagtgacttttttgattgccgca

SEQ ID NO: 47775 - DNA, 410 bp, Glycine max
  Clone ID: LIB3139-122-P1-N1-D12
caccaggccttgaccatgttccaacactcactgatctaaccattgatttccctgtggtgacagtgtgtaaccagccaacagtgtggaggctcaacaaggtagggtcagggttctggtttgtgagcaccagtggtgaccctaatgatatcactagcaagttcaagattgagaggcttgaaggggatcatgcttatgagatctacagcttcaagttctgccccagtgtgcctggtgcgctgtgtgctcctgtggggacttttgaagatgctgatggaaccaaagtcatggctgtgggggatgatattgagccttactatgtgaggtttcaaaaagtctccatctttggtcaagacaagaaacaaccttttagcattttgtaggttggtttgtgcctgtaataggtagatgcg

SEQ ID NO: 47776 - DNA, 102 bp, Glycine max
  Clone ID: LIB3139-122-P1-N1-D2
attcggttcaagctcaagccgaaaaaaaaaaaaaaaaaaaaaaaaaaaaggggggggaaaaaaaaaaagaaaagaaaaaaaaaaaaaaaaaaaattgggggg

SEQ ID NO: 47777 - DNA, 250 bp, Glycine max
  Clone ID: LIB3139-122-P1-N1-D4
ggaatcccttctggatttccgctcacagttatttgcaatggcagttttaatgagatgctcattagatatagctatgaaaaattactgcgccaggctaaagctccaagtatgtttttacaatccttcaaaaattttgtttctttgtgtgtgtatggtgatgataacttaattagtgttcatgaatatgtcaagccttactttagtggttctaaattgaaaagctttctagctgggcataaaattaccatta

SEQ ID NO: 47778 - DNA, 82 bp, Glycine max
  Clone ID: LIB3139-122-P1-N1-D7
ctctgcctatctgaaaatttccacacatcattacgacagttaaaagaggtgtggaaatgatgtgtgaagtgtgtgttatttt

SEQ ID NO: 47779 - DNA, 104 bp, Glycine max
  Clone ID: LIB3139-122-P1-N1-E1
tttgggttggggcaaaatgggaaccattggggggttttaccatggtacttctgattaaacaactaccaagggttctttatggctattccatagggacccaattg

SEQ ID NO: 47780 - DNA, 415 bp, Glycine max
  unsure at all n locations
  Clone ID: LIB3139-122-P1-N1-E10
cccaaatcatctggaaatactgatcagggtttaatgaagaaattgaaagagtttgatggacttgcaatgtcaataggaaatggccatgctgaaagtgcagagcctggaggtgaaaacaggctgtcagagagtgtggatactgagggttccagtgatggaagtgatggcaacacttcaggggctaatcaaacaagaaggaaaagaagccgtgagggaacaccaaccactgatggagaagggaaaactgagatgcaaggcagtccaatttccaaagagactgcagcttctaataagatgttggcagttgtcactgctggtgtngcaagaacaatagttggacctgtagtttcttcaggtatgaccaccacgctggagctgagaaatccttccagtgttcattctaaagcaagtgccc

SEQ ID NO: 47781 - DNA, 415 bp, Glycine max
  Clone ID: LIB3139-122-P1-N1-E11
gatgacttctccctacattaaatgtacagtctctttctgcatagcatttggaaatttggctgatgataccatcaattttgaggcttttccccacaagctggtgcagtttggagagattcaggaaaaagttgtattgaaattttcacaagaggaatttcttacagcttggtcaactcaggtgcgtcctgcaacaactctgttggctgatgggtgtccatatttgtatgcaatggtgcatgatagttcagtgtctacaataccaggtgattttgtcattggtgtcaagttgacaaccataaacaatatgtgtgcatatgggctcaatcctggtatttcaggttctcgtcttttgggcaccattcctcagtccatttcacagcaaactgtttggaatcaaatggcaacagtgagaaca

SEQ ID NO: 47782 - DNA, 415 bp, Glycine max
  Clone ID: LIB3139-122-P1-N1-E12
ctagggttatcatttctccatttccattttctctctcagttttcaagaatcgtaagctatgggaaagtcttacccaactgtgagtgctgattaccagaaggccgttgagaaggcgaagaagaagctcagaggcttcatcgctgagaagagatgcgctcctctaatgctccgtttggcatggcactctgctggaacctttgacaagggcacgaagaccggtggacccttcggaaccatcaagcaccctgccgaactggctcacagcgctaacaacggtcttgacatcgctgttaggcttttggagccactcaaggcggagttccctattttgagctacgccgatttctaccagttggctggcgttgttgccgttgaggtcacgggtggacctgaagttccattccaccctggaaga

SEQ ID NO: 47783 - DNA, 325 bp, Glycine max
  Clone ID: LIB3139-122-P1-N1-E3
tcaaacttcatggcatttgagtttccttattgacaatcccaaacagtctacagtttttgatattctcttgggaatctctcaagattttgaaattgctggtaatactcttatgccagctttttctgttccacaggctactgccagatcttctgaaaatgcggaatcctctgcatgatctggaattcgtgttttctttcgcttgttcgtttgtttaattcaataaaggaaattaggcatgaccctcttgttgagtatgctctgcctatctgaaaatttccacacctcttttaattgtcgtaatgatgtgtgaagtgtgtgttatttt

SEQ ID NO: 47784 - DNA, 252 bp, Glycine max
  Clone ID: LIB3139-122-P1-N1-E4
cttataactataatacgtcttcgtgcatacctacacaaagatatagataacgaggattctatctagagtgctgaattacgtgatgaaaacgccaaactcgaatccatgtctattggtgtataaactacagatgtgggacatgaaaatgctgaacatgcattccgcttggggcagaaagtgagacataaaaaatctgtctatagagctgtgatctgaagaacgtatacagactgcagtgaatagagcaaatgg

SEQ ID NO: 47785 - DNA, 405 bp, Glycine max
  Clone ID: LIB3139-122-P1-N1-E5
tctcaatacccttttgatttgtgaaaggaaagcaaacatgcttgatcaggtccaacaccctacaatcatggacaaggttgctggccagctccatctccgttctggtgtttctggtattaggagttatgaaggagcctactgccaccccacaatgtaccaaagaccctcttttgggaattactcgaatgctgcattgcagtatcctgtgatgccctcatgcaaagctactatggatttgtctgctgctgcaacaactgcctcccccgtctttgttgctgctccagcagagaaaggccattttcttatagactttctcatgggaggtgtttcaacagctgtctcaaaaactgctgctgctcccattgaacgtgttaagcttttgatccaaaaccaggatgagatgat

SEQ ID NO: 47786 - DNA, 381 bp, Glycine max
  Clone ID: LIB3139-122-P1-N1-E6
gaagctggaattggtcagcaaaatttttttaccgcatatgatcgcgggggggggatatgtctacttgggaccgctcaacgccacctgaggaagttgcttttgagggaagcacatgaacaagcaaagcataagtcaatggactgcttttaatgctattgccataagagttggttcagccaggaagacatatgaggggcttctttttaaattcttcaaaaaggcatttgaggattataggaaagatgcatgcatgggagcagatctggagtgcttaaatgcgttacaggctatggtaaaaaaggttacggcacatttgaatgcttctgatgcaaagattggataaatgttgctaaggtttctgatgcttttttatcttgatta

SEQ ID NO: 47787 - DNA, 380 bp, Glycine max
  Clone ID: LIB3139-122-P1-N1-E7
ctcgtctttgaagtttctaagatgacttctccctacattgaatgtacagtctctttcttcatagcatttggaaatttggctgatgacaccatcaattttgaggcttttccccacaagctggtgcagtttggagagattcaggaaaaagttgtgttgaaattttcacaagaggaatttcttacagcttggtcaactcaggtgcgtcccgcaacgactctgttggctgatgggtgcccatatttgtatgctatggtgcatgatagttcagtgtctacaataccaggtgattttgtcattggtgttaagttgacaaccataaacaatatgtgtgcatatgggctcaatcctgggatttcaagttcttcgtcttttgggcacca

SEQ ID NO: 47788 - DNA, 410 bp, Glycine max
  Clone ID: LIB3139-122-P1-N1-E8
atctaaatctagagcccccaaaaacgaaactacattgcactttcagatattttgttcgttactctctctctctctgcgacaccccaatttccaaaaacacaaacaagtggcctcattctgaactctgaaactcaaccttctttcttctcttctctctcgtgtttaactgttcagggcatcctagtttctctcagttagccaaaatggtagctgcaaatgagagggtcgtcgctgtgatcatggttggaggacccactaaaggtactagattccgaccattgtcattcaacgtacccaagccactttttccattagcaggacaaccccatggttcatcatccaatttctgcttgtaaaaagattcctaatttggctcagatttatctgcttggtttctacgaggaacgcga

SEQ ID NO: 47789 - DNA, 396 bp, Glycine max
  Clone ID: LIB3139-122-P1-N1-E9
ggaaggtgtaaggctaaggctactctacaaaaggattgggacgctcccaagtttctttctctgctcactcactcactcacaatacagtgcacaatggagcggaagatcattgattttgaccaaggctgggattatatgcagaaggggattaccaagctgaagagaattcttgaaggagcaccggaaactcctttcagttctgaggaatacatgatgctatacacaaccatttataatatgtgtactcagaagccaccgaatgacttttcacaacagctttatgacaaatacaaggatgcttttgatgaatacattaataccaccgttttgccatctctaaaagagaagcatgatgaattcatgctgagggagcttgtccaaagatggttaaatcat

SEQ ID NO: 47790 - DNA, 253 bp, Glycine max
  Clone ID: LIB3139-122-P1-N1-F10
taattctcgtgtgttttatggcagcagagctttcttctgatcttttgcttcccttgttcaagggaatacgagcagtcactgtagatttttagaagaaaactgattttagtagtgaagtgaaataatcaatgtactatcctgtgtggtttccccttctgtatttcatcacatgttggttgtagcttacagggaatataactttgtactctcacaagcttgttgctatcttaactgctacctgaacttttgtgtt

SEQ ID NO: 47791 - DNA, 358 bp, Glycine max; identical to SEQ ID NO: 37093
  Clone ID: LIB3139-122-P1-N1-F11

SEQ ID NO: 47792 - DNA, 415 bp, Glycine max
  Clone ID: LIB3139-122-P1-N1-F12
gtgatgataacttaattagtgttcatgaatatgtcaagccttactttagtggttctaaattgaaaagctttctagctagtcataacatcaccattactgatggtattgacaaaactagtgcaactttgcaatttagaaagttagcagattgtgattttctcaagagaaactttaagcagatgtctaatgttttgtgggtggctcctgaggacaaggcgagtttatggtcacaacttcattatgtttcgtgtaataatctggaaatgcaagaagcttatcttgtcaacctcgtaaatgtgttacgagaattgtatttgcacagtccagaggaagctcgccaattgagaaggaaagctctctctcgtattgaatggctgcaaaaagctgatgtgcctaccatagcacagattgaaga

SEQ ID NO: 47793 - DNA, 406 bp, Glycine max
  Clone ID: LIB3139-122-P1-N1-F3
tgataaacagtctttgtggtggtgatgaaaaattgatgcgtgaaaggacacacctgctgttggcttgttgttcaaggatggcaatttgtaagaaagatgtttggagagttgaatgtggaatcccttctggatttccgctcacagttatttgtaatagcatttttaatgagatgctcattagatatagctatgaaaaattactgcgccaggctaaagctccaagtatgtttttacaatccttcaaaaattttgtttctttgtgtgtgtatggtgatgataacttaattagtgttcatgaatatgtcaagccttactttagtggttctaaattgaaaagctttctagctggtcataatatcaccattactgatggtattgacaaaactagtgcaactttgcaatttag

SEQ ID NO: 47794 - DNA, 414 bp, Glycine max
  Clone ID: LIB3139-122-P1-N1-F7
gaaaaaatgggttcttcttcttctatgtggacggtgtgtgtgattttggcatcactggcctctgcagcactctgtgccaacccacgcaggccagtggatgtacaatttggccgaaactacgtgcccacatgggcctttgatcacatcaaatatttcaatggtggttctgacattcagcttcatcttgacaagtacactggtactggcttccagtccaaagggtcttacttgtttggtcacttcagcatgtacataaagatggttcctggagattctgctggcacagtcactgctttctatttatcttcccaaaacgcggagcatgatgagatagactttgagttcttggggaacagaacaggacaaccttacattctgcaaacaaatgtgttcaccggaggcaagggtgataga

SEQ ID NO: 47795 - DNA, 410 bp, Glycine max
  Clone ID: LIB3139-122-P1-N1-F8
aaagtttttaaattttgtgaggttcattatgaagaaaagggacaagcttagttgtcaagttggaatcaacccatactccatggaatggactggtttggccaatagattactgagtaagggcaatgatattctgtgttgcgattatgctagttttgatggtttgattaccaagcaagttatgagcaagatggcagaaatgataaacagtctttgtggtggtgatgaaaaattgatgcgtgaaaggacgcacctgctgttggcttgttgttcaaggatggcaatttgtaagaaagatgtttggagagttgaatgtggaatcccttctggatttccgctcacagttatttgcaatagcatttttaatgagatgctcattagatatagctatgaaaaattactgcgccaggcta

SEQ ID NO: 47796 - DNA, 413 bp, Glycine max
  unsure at all n locations
  Clone ID: LIB3139-122-P1-N1-F9
taacgttaatcagccccaagagaaagatttgttagagggaaatttttcctttgatattaaatctcgctctagattggaaaaagtttcctctacaaaagcacaatttgttagtggaaaaaccttcaaatatgatataattggtgctggttcacattcttcaggagattttcctgaaaaggaagatcaagaaaaacccaaaaagattgataccagattgagacaaagaatagatcctcaatacaatgaggttcaggctcagatggaaacaaatttgtttaaattgtctcttgatgatgttgaaactcctaaaggttctatgttggatcttaaaatttctcaatctaaaattgcacttgccaagaacacaagtggaggaaccattctgggtagtgatctattggcanaatttttga

SEQ ID NO: 47797 - DNA, 402 bp, Glycine max
  Clone ID: LIB3139-122-P1-N1-G10
gccttactttagtggttctaaattgaaaagctttctagctagtcataacatcaccattactgatggtattgacaaaactagtgcaactttgcaatttagaaagttagcagattgtgattttctcaagagaaactttaagcagatgtctaatgttttgtgggtggctcctgaggacaaggcgagtttatggacacaacttcattatgtttcgtgtgataatctggaaatgcaagaagcttatcttgtcaacctcgtgaatgtgttacgagaattgtatttgcacagtccatatgaagctcgccaattgagacggaacgctctctctcgtattgaatggctgcaaaaagctgatgtgcctaccatagcacagattgaagagttccattcgatgcacaggatgat

SEQ ID NO: 47798 - DNA, 457 bp, Glycine max
  Clone ID: LIB3139-122-P1-N1-G11
tcgggttctgagataaattggtgtgagacgaccgactgcggggaaatctcgcgggcgtgcgaccgacatcacctgtctctgtccacaatccttgcgatacccaccttccaatccgttctcgttcatgctcaatactcataaatctcaatggctcgataagtgagcaacacgaataaccgaggaggcaatgtcctcttctccaccagccccatccccaacccaaatccgaaccaccaacgccacctgagactcccgagtttctcctcggctggaccgctgatgggctccctctggcccacgccagcgtcgtgggccagcccatgggccgcgccccttggaactcctccatctgcgcctgtctcggccaaaacgatcacttctgcagcagcgatctcgaagtttgtcttcttgggagtgtggctccttgtgtgctgtatggaagcaatgttgagagact

SEQ ID NO: 47799 - DNA, 419 bp, Glycine max
  Clone ID: LIB3139-122-P1-N1-G12
gctaatgtgttcttcttcacttctccaaaacttggagctaaggatattattactcagcaaaaaatcatggaaactccaatcaagtatccgggcaatctcacccttagggtggttctcacttgcatcatggcagccagtggggggttgatttttggttatgaccatggagtttcaggtggagtgacctctatggattccttcctgaagcaattctttccgtctgtgtatgaaaaggagtctaacatgaagccttcttcaaacaagtactgcaaattcaacagtcagatactgacactgtttacatcttccctctatctaagtgctctagttgcgggtcttggggcatccagcataacaagaatgttgggtaggcgtgcaactatgattataggtggaatatgttttgttggaggtgcatt

SEQ ID NO: 47800 - DNA, 374 bp, Glycine max
  unsure at all n locations
  Clone ID: LIB3139-122-P1-N1-G4
gctaattcctagtgtatactactccacagtacacagcacccttttagtactagccaccattcaactttctctcttcccacactcccttcactttttacaccttcctttcttactctgctcatcttcttggccatcctaggtagttagtagtttttggaggatgaggttgttgtgtttgtgtttaacgttgttgctgtttctggctagtgtggcaatggcagaagaagattcagatcataataagcactccctaaaagccacgtcacacgcgcagatccagtgcacaatgtgttcctcttgtaacaacccttgcaaccaagttccatcttcgncaccaccttgaccaccaccaccatctccttccacaaacaact

SEQ ID NO: 47801 - DNA, 348 bp, Glycine max
  Clone ID: LIB3139-122-P1-N1-G6
ggctcccaagggtttaatctttttggctgggttatgcttctcagggctggcactgaatcggtgtcttgcggaggataatggacttggtattaacttctacaaggaatcatgccctcaggctgaagacatcatcaaagaacaaggtaagcttttctacaagcgccacaagaacactgctttcttctggctcaaaaacattttccatgactgtgctggtcagagttgggatgctttacttgtgctggactccacaagaaggagcttgtctgagaaggaaacagatagaagctttgggttgagaaaattcaggtacattgagaccatcaaagaagctttggaaagggaatg

SEQ ID NO: 47802 - DNA, 393 bp, Glycine max
  Clone ID: LIB3139-122-P1-N1-G7
tacatacattcccctaaccaagttttaagtttttgtcaacagaatggaagcaaccaacagaagctcttcctccacttcctcttcctctgattgctgctcttccgagtccaaccccaacaagcccgacagaatcaaaggcccatggagcgccgaagaggatcggatcctgaccggactcgtcgaacgatacggcccacgaaattggtccctcatcagccgctacattaagggaaggtccggcaagtcatgccggctccgatggtgcaatcagcttagccccgccgtggagcaccgccccttctcggcccaagaggacgacaccatcatcgcggcccatgcccagtatggtaacaggtgggccactatagcccgattgctaccgggccgaaccga

SEQ ID NO: 47803 - DNA, 397 bp, Glycine max
  Clone ID: LIB3139-122-P1-N1-G8
ctctattgagcacgagcactttgggactcacagggtcgggcttttcttctttctctttcccctcgaactcaaaaataaggtgcatggacgccggcggcttagattccgatggccgtgaattcaacaccgccgaggacatgtggagggaacaggcgggtgaccctagcaagaagacccagtggtatcgtgacggcgtctcctactgggagggtgttaaggcaaatatggatggggtattgggagggtttgcaaatgtgaactagcctgacataagttgcagtgaggaattattggacattctctattctgaactgtttttctcctgctgtttatgctagacccctatccactttgtttgtattgattgtatttttagcatttgccagatctaccaaaa

SEQ ID NO: 47804 - DNA, 408 bp, Glycine max
  Clone ID: LIB3139-122-P1-N1-G9
aaattttccagtggattcttggttaccaatttttgtgaattgtctctatcctgtaagtcaattaccttcagaagctgtcgttgtaaatgttacatgtggtagtggacgtggtggtttacccaccactgcttggattagttctgcagttaacaatcgctcctcagacatcaacaaaaggattcgcacagcacttgggaaaggtaagaaaattgtttttcttactagagttgatccttttccagtagctttattggctgttctttttggcgttaagaatgaaattctgagttctaacgccactaaccctatgctgacgccacttcttgagaactgtaagagtctcaaatatctggttgatgagtgtccttttgcatttgtgaacctagtatgtaatattttattcactta

SEQ ID NO: 47805 - DNA, 411 bp, Glycine max
  Clone ID: LIB3139-122-P1-N1-H1
attttgttggagatctcgtctttgaagtttctaagatgacttctccctacattaaatgtacagtctctttcttcatagcatttggaaatttggctgatgacaccatcaattttgaggcttttccccacaagctggtgcagtttggagagattcaagaaaaagttgtattgaaattttcacaagaggaatttcttacagcttggtcaactcaagtgcgtcctgcaacaactctgttggctgatgggtgtccatatttgtatgctatggtgcatgataggtcagtgtctacaataccaggtgattttgtcattggtgttaagttgacaaccataaacaatatgtgtgcatatgggcttaatcctggtatttcaagttctcgtcttttgggcaccattcctcagtccatttcac

SEQ ID NO: 47806 - DNA, 416 bp, Glycine max
  Clone ID: LIB3139-122-P1-N1-H10
ctgtgatcaaaccaaaagcatcatcaccaaatcccaaacgcatatcataacaacgggatcggaggctaatctattaggcgctgttctctcgtcttctacaaaattttctgttcgatctcaaccaaggttgttccttccaccgccatgagtttcatcttcggaaagcgaaaaacacccgcagagcttctgcgggaaaataagaggatgctggacaaatcaatcagagaaattgagcgcgagcggcaaggcttgcaaacgcaagagaagaaattgattgcggagataaagaaaagtgccaaacagggccagatgggagctgttagagttatggcaaaagatcttgttagaacaaggcatcaggttgagaaattttataagctaaaatctcagctccaaggtgtatcactcagaattca

SEQ ID NO: 47807 - DNA, 422 bp, Glycine max
  Clone ID: LIB3139-122-P1-N1-H11
ctccatgaaaatggctatcaaagttcaagagataacaaaggcactttgataccagatggggtttcagatttgctgagtgtgaaggcaaggattagagcggttgaaaaatcaatggtggaagaaatcaagaagcttgtgaaggaagacaatttaaccactaaagctaatccaggagctctgacaaaggcaacaaatgtggaagtttcaccttatgtggagaattgcaacagaaaagaagacaaggtacccaaggatgagagcacacatgatgtcaactcgtggagaacaaaaactgaaaatgggtcattgatgaaagatattccacttgatcacatctgagacaattcagcctccaaaagttgcaggagagaaaatagtggtactgatgatcagatgcttgaattatgggaaactgccgagca

SEQ ID NO: 47808 - DNA, 419 bp, Glycine max
  Clone ID: LIB3139-122-P1-N1-H12
cactgaagaaaatggtgtagtttcactttttgggatgcgggatgcagagggaaagccaatattattttcctcgtgcagagacaattcagttcacatgtatgaattgccatcattttcagagaggggacgtttatttgccaagaaagatgtggcattaattgagttaggtcctggtggcctcttcttcactggagatgagagtggtttgctgatggtgtggaaatggttggaggtacccaaggtggcatcctcttgacatgtgtttcctttcaacattggagttgtattatcccatctatttcctcttgaagcagatggtgataaggatgaatttatttgtctgagcagtaaattcactgtaaaaacaattgtatagaaattgacaattttatagaaataccaatttcattcttttatat

SEQ ID NO: 47809 - DNA, 424 bp, Glycine max
  Clone ID: LIB3139-122-P1-N1-H4
ctcgagccgattcggctcgagtgttcccaggacctattgtgttttaaatccacaaaatccttttgagttaaataggtggatgggaaaactgactttcccccatggcacttcccgaagtgttaagagaatgcctctttctatagggggaggagctggtgcaaagaatgctattctcatgaatatgccaaatgctgttctttcaatgtggagatattttgttggagatctcgtctttgaagtttctaagatgacttctccctacattaaatgtacagtctctttcttcatagcatttggaaatttggctgatgacaccatcaattttgaggcttttccccacaagctggtgcagtttggagagattcatgaaaaagttgtattgaaattttcacaagaagaatttcttacagcttggtcaactcag

SEQ ID NO: 47810 - DNA, 420 bp, Glycine max
  unsure at all n locations
  Clone ID: LIB3139-122-P1-N1-H5
gcaggaatatcaaattggtctcttgtcttcctcctcatctctacactactccacatagagcccagcctctcaagcccaagcccaagcccaagcccaagcccgttcataaaatcctcctgcagcagcacccagtacccagccctctgcgtctcatccctctccgtctacgcctncagcatccaacaggaccctcaccaactggttcagacagcactctccctctccctgaaccgcacccaagccaccaaaaccttcgtggctaactgcaacaaattcagaggcctgaaacccagagagcacgctgcactcaaggactgcgccgaggaaatcagcgacagcgttgaccgcctcagccggtcgctgaaagagctcaagctatgtaaggttaagggtgaggacttcacgtggcacattagcaac

SEQ ID NO: 47811 - DNA, 140 bp, Glycine max
  Clone ID: LIB3139-122-P1-N1-H6
cactaaagaaattggtgtaatagtacaagaggcgacgcgagaaggaaaagccaatattatattattcgtgcagagccaattcagttcacatgtatgaattgccatcattttaagagaggggacgtttatttgccaagaaa

SEQ ID NO: 47812 - DNA, 366 bp, Glycine max
  Clone ID: LIB3139-122-P1-N1-H8
cgtcgttgaaagacttgtgtgcaaggctttcccgaaccattctcaatggaagacccttcacactcaagtaccagcttcccaatgaagaccttgatagcctaatcactgttaccactgacgaagaccttgacaacatggtggaagagtatgatcgtataatggcaaaaggttcggcttcttcgcggctcaggttgttcttgttcttcaccaaacctgaggccacagtttcaatggggtcactccttgatgattccaagtcagagacatggtttgttgatgcacttaacaactctggcatgatatcaagagtggtgtcagattctgctgcaggggattcctttgttaaccttgatggtgttggtgttg

SEQ ID NO: 47813 - DNA, 392 bp, Glycine max
  Clone ID: LIB3139-122-P1-N1-H9
ggttatcagtttgattatgtatttgattggactatgctgaagtatcctcaaattggatccagttctagagcccgaccaagtgggaaaccagtcataaacccaggacaatcaggggagagaatagaacggccttcaggtgcagttgaggcatttgcaaggaggaatggctctggacttgttctacatagtgagctttctaggcataagtcttcagatgatgtgccatcttccaaagacgtgcaagctaattctgagaggcctcgcagctcttctcgtaatggcagttcttcaaaaaagcctgtcttgtctagcagccggccaagctcttctggtgagcctagtgaaagccgttctagccgactggtcttaagcagtggccgactatcaacaac

SEQ ID NO: 47814 - DNA, 95 bp, Glycine max
  Clone ID: LIB3139-021-F4-R1A
gggtcgacgactcatatgggcgccgccttgtggggttgtggtgtggttggtggtgggtgtggggaagaatagaccaagtgaggcttgcaatgagg

SEQ ID NO: 47815 - DNA, 360 bp, Glycine max
  Clone ID: LIB3139-105-E2-R1A
caataaaaaccccacccaaaaattaggcccaaacccggaattaaaaagggaatagatttctcgtttcacgggaacctcaaataaaggaaaactatgggggatccttgttagaaaacacctagttatttccaaatgttaaaggcctaaacctcacccatggtaatcccgaatcttacattaaagggcggccatctacttgcgaaaaaaagggcctgaaatcaaaaaccccggactagcagttccaatctcgggtttccccttgcgagggagcttcttgggcaaaaaattctggggaatgttaggcaaaagacaaccggtggcaatgggcaaagatcccagaagtttggttaacccccgggg

SEQ ID NO: 47816 - DNA, 492 bp, Glycine max
  unsure at all n locations
  Clone ID: LIB3139-021-F4-F1A
gcgcttcctcccaacgggaaaatcgccaaggacgccaaggaaaccgtgcaggaatgcgtctccgagttcatcagcttcgtcaccagcgacgangcgataagtgtcagagagagaagagggagaccatcaacggggacgatttgctttgggctatgacacttttaggtttcgaggagtatattgatccgctcaaggtttaactcggcgcttacagagagattgagggtgattcaaagggttcggccaagggtggagatgcatctgctaagagagatgtttatcagagtcctaatggccaggttgctcatcaaggttctttctcacaaggtgttaattatacgaattcttagccccaggctcaacatatgatagttccgatgcaaggccaagagtagatattgatcctctccttcagtgtttgacatgtgtgatctaaatgccagtggaacttttatgtcaatatgtgcccttggtatattgaatgcattttat

SEQ ID NO: 47817 - DNA, 492 bp, Glycine max
  Clone ID: LIB3139-072-F12-F1A
ctcgagccgctcgagccgctcgagccgctcgagttccgttaacgctctccaatacaaaataaccactcactgaatattcggtcgaagatgtccgccgccgaagaagctaaagttcccgccgtcgaaaagccggtggaggaggtgaaggcgccgaagcttgccaaggagaagaaacctaaggctccaagaaaagaagccgaaacaggccaaaactgcttctcatcctccatatctccagatgattaaggacgctttgattgctctgaacgagaaaggaggatcgagtccatatgcgatacgaagtacatggaggagaagcacaaggcggtgcttcctgcgaatttcaagaagatactaggtctgcaactgaagaaccaagctgcgagagggaaactcgtcaagatcaaggcttcgtacaagttagccgaagccgcgaagaaggtgaaggagagcaccgccaaagcgacgaaggaatcgcgtccgaaacgaaac

SEQ ID NO: 47818 - DNA, 493 bp, Glycine max
  Clone ID: LIB3139-105-E2-F1A
tctattctttgaaaccaaagttcaaactctgtcttccctgggttctatttcgaaatcaacgacgatgagttccacagaggcagcagccacagagaagaaaggtggaagagggaaaccggagacttcaaagtccgtttcccgttcctccaaagctgggcttcagtttcccgtcggccgtgtcgctcgctacctcaaggccggtcgctacgcccagcgcgttggctccggttcccctgtttatctctccgcggttctcgaatacctcgctgccgaggttcgtcattttcttcctttaattttcgatttgtcttttttgtgtattgtgaccttaatgtgttttggggctttaggttttggagcttgcggggaacgctgcgagggacaacaagaagacgaggatcgttccgaggcacattcaactggcggttaggaacgacgaggagttgagcaagctgatgggatctgtgaccattgccaacggtggtgttctgcc

SEQ ID NO: 47819 - DNA, 495 bp, Glycine max
  Clone ID: LIB3139-011-P1-N1-C4.F1
atagaagaatatgtggtggctgcaaccaagagataatgtatggaaattgtttgggctgcatggatacttattttcacccaaattgttttcgctgtcactcttgtggttaccccattacagagcgtgagttttccttgtcagggaagcatccatatcacaagtcatgttttaaagagttgaatcatccaaaatgtgaagtttgcttccaatttattcctataaatgctgctggtttgattgagtataggtgccaccccttttggtcccaaattattgtccatctcatgaatatgataatacagctcgctgctgtaggttgtgaaagattggagcctttgaacataaaatactatagactagaagatggacggagtttgtgtttagagtgcatggaatctgctataatggataccggtgattgccagcccctttaccattctatcagagattactatgaaggaatgcagatgaggatagatcaacaaatttccatgc

SEQ ID NO: 47820 - DNA, 613 bp, Glycine max
  Clone ID: LIB3139-011-P1-N1-C4.F2
atagaagaatatgtggtggctgcaaccaagagataatgtatggaaattgtttgggctgcatggatacttattttcacccaaattgttttcgctgtcactcttgtggttaccccattacagagcgtgagttttccttgtcagggaagcatccatatcacaagtcatgttttaaagagttgaatcatccaaaatgtgaagtttgcttccaatttattcctataaatgctgctggtttgattgagtataggtgccaccccttttggtcccaaattattgtccatctcatgaatatgataatacagctcgctgctgtagttgtgaaagattggagcctttgaacataaaatactatagactagaagatggacggagtttgtgtttagagtgcatggaatctgctataatggataccggtgattgccagcccctttaccattctatcagagattactatgaaggaatgcagatgagaatagatcaacaaattcccatgcttctagttgagagagaagcacttaatgaagctattgtaggggagaaaaatggttttcatcacttaccagaaacaagaggcttatgcctttcagaagagcagactgtcaccaggatacat

SEQ ID NO: 47821 - DNA, 232 bp, Glycine max
  Clone ID: LIB3139-013-P1-N1-A6.F1
cgccgggctctacattttagctggatttcactagggagtttcttcacttgtctatgtacatgtgcttcgttcttgtaatttttgggaactatgggattgccttagcagcgtatacgggagctttaagagacatttaagtgcttcaatgtccgtatagcatctataatgcgttatcgtacaatcactttaaatatgatcgatcgtgttccatttgcaaggcctcatgagctta

SEQ ID NO: 47822 - DNA, 573 bp, Glycine max
  Clone ID: LIB3139-013-P1-N1-A6.F2
cgcctggctctacaataggacctggctctaatcatggactagcttcactcgcctatggatatgcgcttctttcacagacatcccagcaaactgtgcggttccgcttgtacctaatacgggagcttgataagacatttaggaactccaaatgccgtgacacagattacattcagtatcttaaaatcactttaaatatgtaacgatcaggttgtccagcatgcgaacccctaccagagcttaactgcacgccgatgcaagcctaccattatcctgagcgtggaatgagtatgactgaccgcacaacaaactcatatgtggacaagttgaacatgtccatagcctccgatcatggctggagcggtagcacacttgccccacctacagagacttggttgtaccagcttaaaatgggacaactgtcgctgcatggcatgaaggatcacagtcatatgtccatcaacgaggaacatctgtgacaggcagaagaagcacagctcagactgaggctactgatagcctgagtcgacatcaaactacgactccgagcaggtgttgctgatgcttcaatatatg

SEQ ID NO: 47823 - DNA, 441 bp, Glycine max
  Clone ID: LIB3139-020-P1-N1-D12.F1
tctgcatccatcggaaaagcgcggccagcgagttcgggactcactctattgagtcctccggcaacgagttcgccgcgttctccggtggcacaaccgaaccttgtcgctcgccgttgcactgagctccgagaaggccgttgtcgcggcggagtccaatagctcgagaagatcgtggataccttcggccagcggacttctatttacagaggtgttactaggcaccgatggacaggaagatatgaagcgcatctatgggacaatagttgcagaagggagggtcaagccagaaaagggcgtcaagtttatttgggtggatatgataaggaagaaaaggccgcgagactttatgatttggcagctctaaagtactggggtcccactgctaccaccaacttccctgtttccaattatgcgagggagtggaggagatgaacatgtaac

SEQ ID NO: 47824 - DNA, 262 bp, Glycine max
  unsure at all n locations
  Clone ID: LIB3139-020-P1-N1-D12.F2
tctgcatccatcggaaaagcgcaggccagcgagttcgggactcactctattgagtcctccggcaacgagttcgccgcgttctccggtggcacaaccggaaccttgtcgctcgccgttgcactgagctccgagaaggctcgtnntgtcgcggncggnnnnaaaaaaannntttttttttttttcccccccccccccccccaaaaaaaaaaataaattttttttttaaaaaaaaaaancncccccttctttttttttttttttt

SEQ ID NO: 47825 - DNA, 305 bp, Glycine max
  Clone ID: LIB3139-024-P1-N1-B9.F1
aagttactcaccttcaccttcaccttcaactgccaactgcaaacatctaactactttcaggttcacttagccgagaatcagagactaatcactagagataccgagacctacttttcctcacatcaccaccaacatgcgttccagcaacggtacatcgagcagcagggcctccaacggtaacacagggcgccaccctgtttagcgtggactgaggcgtaggagtagtggtaaatgggggtctgaaatccgtgagctcaaaaaacctgacaggatttggggtagggacatttgccacccctgaaatg

SEQ ID NO: 47826 - DNA, 611 bp, Glycine max
  Clone ID: LIB3139-024-P1-N1-B9.F2
aagttactcaccttcaccttcaccttcaactgccaactgcaaacatctaactactttcaggttcacttagccgagaatcagagactaatcactagagataccgagacctacttttcctcacatcaccaccaacatgcgttccagcaacggtacatcaagcagcagggcctccaacggtaacacagggcgccaccctgtttaccgtggagtgaggcgtaggagtagtggtaaatgggtttctgaaatccgtgagcccaaaaaacctaacaggatttggttagggacatttgccacccctgaaatggctgctattgcctatgacgtggcagcgcttgctcttaagggtaaggatgctgagctcaacttccctaactcggcttcctccctccctatccctgcatcatctgcagctcacgacattcagatggctgcagcactagctgcaaccgctgtcggagcagcgaatgatgcactggaaggaagccaaggaggaaatgtttcggtttcattggcggaagagttttcagggggaaactttaatcactttgtggatgaggacttgatctttgacatgccgaatattcttgtcaatatggctgaaggaatgctac

SEQ ID NO: 47827 - DNA, 180 bp, Glycine max
  Clone ID: LIB3139-031-P1-N1-H3.F1
ctccaaggtttttccataactgcaatccctcatcggccaagtcgccatcgagtttttcacttctcaaatcaactctacgactatccaaaagtcgatgtggaatctgtatgcagagcgcgaggagtgggcaaggaaagcgattttgacagcggaatggactcgcacgtttcacttgccttg

SEQ ID NO: 47828 - DNA, 601 bp, Glycine max
  unsure at all n locations
  Clone ID: LIB3139-031-P1-N1-H3.F2
ctccaaggtttttccataactccaatccctcatcgcccaagtcgccatcgagtttttcacttctcaaatcaactctacgactatccaaaagtcgatgtggaatctgtatgcagagcgcgaggagtgggctaggaacagcaattttcacagcggaatgctctcacacgtttcacttcccttgcatagtgaagaagcacccgatcgtcacgtgccccgtgtgcaacactagctggaaggagcttccggtgctctccatcaacaacaacaacaacgacaagagcgacaagagaggcttcaaggtctacaacgacgacgagcctctcatgtctccaacttcactctctcgcttcaatcctattcccgagtcagaaaacgaagacgaagaacaagaacaagataacattaacacggagtttaagggctttcatgtcaatccacttcccaatttacattcaacgacggtgattaggaggaacctncagctatcgttgctgccggaggcggccattgtcgccgccaaccgaaacntacgagagtacgtcgtcgttttgaagctcaagccgccgcacgtgacgaaaacgtcgcgtcgtgcttcaattga

SEQ ID NO: 47829 - DNA, 156 bp, Glycine max
  Clone ID: LIB3139-031-P1-N1-H3.R1
gagaagagaaaagccgccccaaaggcccaacaaggccaagcaggaggggggggcccccaccccaccacaaacgcacccctccccaagaaccccgaaaggggcccgggcggcaagaaacacccccggccccgaggcccaaccaaaaaaacaaacccc

SEQ ID NO: 47830 - DNA, 261 bp, Glycine max
  Clone ID: LIB3139-031-P1-N1-H3.R2
gggggggaaaaacaggggcccccaagccccaaaaagggaaaacggggggggggggaaatttggccaaaaaaatggtttctttttttttaaaccccaaaagggggggggggggaagaaccccccccgggggcaggccccatttaaaaaaaaaaaccccaaaaaaaaatcccttttcctgggggcccaaaacctttttaaaaaaaaaaaacaaaaaaaaaggggggttttaaaaacccaggcagggcacaaccctgggaaaaa

SEQ ID NO: 47831 - DNA, 535 bp, Glycine max
  Clone ID: LIB3139-034-P1-N1-E11.F1
aaatatttatatgtacgtatatacatacatacacacagagacatggagaacaataatcatcatgccatggctgcaggtgctagtagtgattcaaacactagtgatcacaccaccccaatatcttcttcttgtgttaatgataacaacaacaataagttatacaaaggggtgagaaagcgaaagtgggggaaatgggtttctgaaatcaggcttcccaatagccgtgaacgaatatggctagggtcttatgactctcctgaaaaggcagcacgagccttcgatgctgcgctttactgtctacgtggccgccatgccaagttcaatttccccaacacaccttgcaacatggacactgctagcaatgctcctcctaaccaatctcttaccccacaagagattcaagaggttgctgctaagttcgcaaatcaggtggtcccgctactacaaaaacctcaagaacaagctgaacctcaacgtatgagtggatggtggtggcggtggtgctaattcgtcatcgtgtggatcaaagttgtta

SEQ ID NO: 47832 - DNA, 605 bp, Glycine max
  unsure at all n locations
  Clone ID: LIB3139-034-P1-N1-E11.F2
aaatatttatatgtacgtatatacatacatacacacagnnagacatggagaacaataatcatcatgccatggctgcaggtgctagtagtgattcaaacactagtgatcacaccaccccaatatcttcttcttgtgttaatgataacaacaacaataagttatacaaaggggtgagaaagcgaaagtgggggaaatgggtttctgaaatcaggcttcccaatagccgtgaacgaatatggctagggtcttatgactctcctgaaaaggcagcacgagccttcgatgctgccctttactgtctacgtggccgccatgccaagttcaatttccccaacacaccttgcaacatggacactgctaccaatgctcctcctaaccaatctcttaccccacaagagattcaagaggttgctgctaagttcgcaaatcaggtgtccccgctactacaaaaacctcaagaacaacctcaacctcaacgtantagtgatggtggtggcggtggtgctaattcttcatcgtttggatcaaagttgttatgtaaatcagacagcatagcagagagtagtactactagtactactactaattgtacncccaccaccact

SEQ ID NO: 47833 - DNA, 363 bp, Glycine max
  Clone ID: LIB3139-034-P1-N1-E11.R1
cacagatcaatatatatatacttaggtataaatatatacttgaaccagtatacataaaacaacctataaagtacaaatattttattgccaaggggaaacatatagtaagacaacatctatcgatcgatactatatagttggtagcctgtgctaatctatggaatagatagcactagaagaaccgaggtcactagctagccatatagctaggcatatacttaattatggtaaggaatatatgtatggtctgacatagcctgtgtcttggcttgtccgtgtgagtgttagatacttggaggcagcaccatagacgtagcgtgtgtgcagaaggtcaagggtgcgttgttatatattgaggctggg

SEQ ID NO: 47834 - DNA, 461 bp, Glycine max
  Clone ID: LIB3139-034-P1-N1-E11.R2
ccacagatcaatatatatatacttaggtataaatatatacttgaaccagtttacataaaacaacctataaagtacaaatattttattgccaaggggaaacatatagtaagacaacatttatcgatcgatactatatagttggtagcctgtgctaatctatggaatagatagcactagaaaaaccgaggtcactagctagccatatagctaggcatatacttaattatggaaaggaatatatatatggtctgacatagcctgggtcttgtcttgcccttgttattgttatatacttggagacaacaccttttccatttcatttatacaaaagatcaaggttgctttattatatatttaggctggggcaagtaattttaactagtagtcatcatattttagcaccacatgcagtagcgagtgatgatatgatgatcaaaagttccaattccaaaggaatgatt

SEQ ID NO: 47835 - DNA, 488 bp, Glycine max
  unsure at all n locations
  Clone ID: LIB3139-037-P1-N1-B3.F1
cgagcaccagttttcccatcattgcaattgccataataggaataatggccacagcattcttgcttgtgagctactacatctttgtgatcaagtgctgcctcaattggcatcgaattgatgttctgagacgtttctctccatctagaaggcgtgaagatccaccaccaacatactcaccagccacagatactcgtggactagatgaggcactgatccggttaatcccagtgactcaatacaaagcacaacaaggggatgatagagactttggagagagaagattctgcgaatggnctgtttgcttgaatgagtttcaagaagatgagaagctgagggttataccaaattgcagccatgtgtttcacattgattgcatagatgtttggcttcagagcaatgccaattcgcctctttgtagagcagcatttccttgacaagcagattccacattgatcagcgtctcaccctaaggccttcttcgtcttctt

SEQ ID NO: 47836 - DNA, 599 bp, Glycine max
  Clone ID: LIB3139-037-P1-N1-B3.F2
cgagcaccagttttcccatcattgcaattgccataataggaataatggccacagcattcttgcttgtgagctactacatctttgtgatcaagtgctgcctcaattggcatcgaattgatgttctgagacgtttctctccatctagaaggcgtgaagatccaccaccaacatactcaccagccacagatactcgtggactagatgaggcactgatccggttaatcccagtgactcaatacaaagcacaacaaggggatgatagagactttggagagagaagattctgcgaatgcgctgtttgcttgaatgagtttcaagaagatgagaagctgagggttataccaaattgcagccatgtgtttcacattgattgcatagatgtttggcttcagagcaatgccaattgccctctttgtagaacaagcatttccttgacaagcagattccacattgatcagcttctcaccctaaggccttcttcttcttcttaccctcatgatcaaaccccacctagggaaaacctcattggtggtgatgaagattttgttgtgattgaattgggtagtgatcatgatagaagccagaatttgcaagaaaga

SEQ ID NO: 47837 - DNA, 503 bp, Glycine max
  unsure at all n locations
  Clone ID: LIB3139-037-P1-N1-B3.R2
aagttaagaattaaatccatttgaatatttgtgtgttatacaatcctatgacctgttcatacatctaacatagtaacatctctatctcatcctcaccaaaagaataaaaagaaaaaaggtaaagacctaagaaccttgcaagttgcaaacataatggaaaggggggacgagggacaaaagagaaatttcaggggtccaaagaaacaggttgcacagaactcctggatctacttccatgtccaaaggaaaagaatgacctcttagctctactaccaattccactgcaaccttcaatggagttgacctcattgacttgccagttctgattcctcagagcttcttgaactgctaaatagaaccgtctatcccctgatgagtccatggagaaagaccttctgattggttgcactgagaaaaactggtcatctttggctctaatatcaatacactcatnccccatgcttgtcactntctgcagtttcattgctttcttcttctgcaca

SEQ ID NO: 47838 - DNA, 616 bp, Glycine max
  Clone ID: LIB3139-040-P1-N1-D1.F1
ggagcccgaagaggagcatgaaagcagatctggcagtgacaacatggatggtggttctggtgatgattttgatgctgccgacaacccaccgaggaaaaaacgctatcaccgacacactcctcagcaaattcaagagcttgaatcgctcttcaaggagtgtcctcacccggatgagaagcaaaggcttgaactcagcagaaggcttaatttggaaacgaggcaagtaaagttttggttccaaaatcgaagaacacaaatgaagacacaattggaacggcagagaactcgctgctaaggcaagagaatgacaagcttagagctgaaaacatgtctatgagggaagccatgagaaatcccatatgctcaaactgtggaggtcctgctatgatcggtgaaatttcactcgaagaacagcacctcagtattgagaatgctagattgaaagatgaactagaccgtgtttgtgcactcgctggcaagtttctgggtcgacccgtttcttctctaacaagctcaattgggccttcaatgccaaactcaagtttggagcttggtgttaggagcaatggttttggacaaggtttagcactgtgccttcaaaaatgctgatttttgg

SEQ ID NO: 47839 - DNA, 615 bp, Glycine max
  unsure at all n locations
  Clone ID: LIB3139-040-P1-N1-D1.F2
ggagccgggaagaggagcatgaaagcagatctggcagtgacaacatggatggtggttctggtgatgattttgatgctgccgacaacccaccgaggaaaaaacgctatcaccgacacactcctcagcaaattcaagagcttgaatcgctcttcaaggagtgtcctcacccggatgagaagcaaaggcttgaactcagcagaaggcttaatttggaaacgaggcaagtaaagttttggttccaaaatcgaagaacacaaatgaagacacaattggaacggcacgagaactcgctgctaaggcaagagaatgacaagcttagagctgaaaacatgtctatgagggaagccatgagaaatcccatatgctcaaactgtggaggtcctgctatgatcggtgaaatttcactcgaagaacagcacctcagaattgagaatgctagattgaaagatgaactagaccgtgtttgtgcactcgctggcaagtttctgggtcgacccgtttcttctctaacaagctcaattgggcctncaatgccaaactcaagtttggagcttggtgttgggagcaatggttntggacaagtttaagcactgtgccttcaacatgcctgatttg

SEQ ID NO: 47840 - DNA, 368 bp, Glycine max
  Clone ID: LIB3139-040-P1-N1-D1.R2
actgctgctactagtatagagcaaacaaaaggggtcgacccgagtcaatacccgaaccaccacccttgctttgtgttaaagatccaaacccgacccgaaaaagtctcggatcctcataaccatgcaaggacttttttcacccacgcgcggttcgtttttgactaaacacccccaccccttgggtccttcacacgcgccacctatccccacttttaagtacaaaatgtcacctaaattttcaaaaagaaaataataataataataataataataatagacagccccaaaaggtttcagctctcgcaatgaagagctgattttatcttttgcacggtgcaggaaatgaggttgttcaccgtttccaccga

SEQ ID NO: 47841 - DNA, 598 bp, Glycine max
  Clone ID: LIB3139-041-P1-N1-A5.F1
ttcaaatcctcctttctattaatctgaaacaagttattagtcatgaagatccagtgcgacgtgtgtacaaacagcaggcatcgttgttctgcaccgccgacgagccgccctatgcgacggctgcgaccaccgcgtccaccacgccaacaagctcgcctccaaacaccaacgcttctccctcagccacccctctgcaaaacattttcctctctgcgatgtttgccaggagagaagagcctttgtgttttgtcagcaagatagagcgattctgtgcaaagagtgtgacgtgcccgttcattctgccaacgacctcaccaagaaccataacaggtttcttctcactgggattaagttttctgccctcgattctccttcaacacctcctaagcctgcaggtggaaactccctaacaaatcaacaaccacaacaacaaactggtttcacaggtagcagcatatcagaatacttgataaacactatcccaggcatggagttcgagatttgctcgatcacattctcttccctttgcttgctccaagaatagtgatgacatgatgttgtcgatgtttggttgagggaaaatggtttcgttcttagc

SEQ ID NO: 47842 - DNA, 66 bp, Glycine max
  unsure at all n locations
  Clone ID: LIB3139-042-P1-N1-D8.R2
cggccgcccgcgggaccggcccgggacnaaggcccggggcggcgggcccacgggccggcggccgcc

SEQ ID NO: 47843 - DNA, 623 bp, Glycine max
  unsure at all n locations
  Clone ID: LIB3139-045-P1-N1-B6.F2
caacacccaattaccgtcttcgtcacagtcacacaaagaagcgtcatccgccgcttgaaactatcacacaggtgcaccgtttgcaacaaggcttttccttcttaccaagcactcggtggacacaaggccattttcttatggcctcgtcggaatccaacaccaccgcctccgccgtcgccgtctctgccacagccaacgacagcgtttccgcttcgaccgtcggcggcggaaggatgcacgagtgttccatctgtcacaagagtttccctaccggtcaggccctgggtggccacaagcgctgtcactacgacggcggaaacaaccacagtaacagcaacgccaacggcaacaacagcagcggcgtcactacctccgacggcggcgctgcctcctcctcctcccacgcgttccgtgggtttgacctgaaccttccggctccgctgacggagttctggtcgccggcggngtttgatttcggaaagaagaaggttggcgttgaacaagaggtggaaagcccgttgcctgtaaccgncaagaggccgcgtttgttttcgggtgaagataatgaagagggcgtagattgttcacagaatgtttattttaatttgattgaaaatgaattt

SEQ ID NO: 47844 - DNA, 80 bp, Glycine max
  Clone ID: LIB3139-059-P1-N1-A2.F1
ctagaattagtcctgctgttctattcatcatagaggatcttgatgacatgaatttcatctctggaatccaacaactgctt

SEQ ID NO: 47845 - DNA, 278 bp, Glycine max
  unsure at all n locations
  Clone ID: LIB3139-059-P1-N1-A2.F2
ctagaattagtcctgctgttctattcatcatagtggttcttgctgtcttgtttttcatctctggcctcctccacctgcttgttagatttctcataaagcacccttcttctgcatctgctcaatccaacaacatgacaccnanagnnnaactttnnnccacatctgnnatgctcnttnnncaaaggcagcttcagcagctcttccacctccatgactctggcttggatcaggctntcattgatgctcttnctgttttccagtacaaggagattgtgggg

SEQ ID NO: 47846 - DNA, 466 bp, Glycine max
  Clone ID: LIB3139-059-P1-N1-A2.R2
ggataaaaaaaaaacagatgcagggttttttatttcttcataaaggccaatcataatacatcaatagtatggggcccaatcagtcatcacaatgtcaaaattagccccccaaaattttttggaattgtaagacaagtaagggggggaagccagttttaatcaatggattgaaacgaattcaagtgaaataagaagtaaaaaaaataattaaaaaacatggggatggatacctttcatgccccttttgtatccctcatccttggaaaatctgtgtttaaaaaagatggcattggcatgccaatttgaccatccaaagaagtaggcaatttccccttctttggccacaaccagattttggacacagaaaaactgacacctttactgacactactaatcttttttccttccacatcccccactgaaagctcccatcatcaaggtccattcctttggtgagccttgggac

SEQ ID NO: 47847 - DNA, 631 bp, Glycine max
  unsure at all n locations
  Clone ID: LIB3139-062-P1-N1-C12.F2
atcaattctcccttcataataaacccactgatcgcttctctttcctcttctctctctcagtagaaagcctacaaccttcttttatctgcgtttcctctctctctctctcgatcagtgctagacaaggactggtaaccaaaaattccaagaagggtacattaattcatggcctttgaggagcactatgtttctcaggaattgaaaaccatccccagctccatgacagtgacagaaaatttggatgggtgttttgattgcaacatctgcttagattttgcacatgaaccagtggtcaccctttgtggccacctatactgctggccctgcatctacaagtggctccatgtccaaagtgcttctcttgcaccagatgagcacccacaatgccctgtttgcaaagatgacatatgccacaccacaatggttcctctctatggccgtggccagngcatagctcatagtgaccatgatggaaaggcatcatcctatagaggcagttgtataccaccaagaccacctgctntgggtgctcaatcgctcattgcaacatcatctcaaagtgttccatatcgcaacacttatcaaaatcagcatttataccaagaagaggatgcatcatcatcacaaatgc

SEQ ID NO: 47848 - DNA, 610 bp, Glycine max
  unsure at all n locations
  Clone ID: LIB3139-067-P1-N1-A6.F2
cttattaagggttcaatagatatgcttccctaccagtaaaaatcagatgactctcaaaggcttggtatcacttgtcatcaatttaattggcctagctgagggaacaaggaacaatgatgccccccctttaccttgttacatgctatctagccatatacaaaataacaagcaacaatcatctgaatcagcatcagcatccaattttaatgaggatagttggtgttgtgtgtgcttgtcaaggttaaaggccaaagatgaaatccgtgtccttccttgctcgcacaaattccataagatttgtgtaaataaatggcttaagggtcgccacaagacgtgtccactttgccgtttctcaatgggagccgaggagaagtctcatcgtgccgaaatgttcactgaagagatgttaatatggttttcttctttccatgtagctggtatgtaatgatctaagtttcaccagtgaatctatttgtagttttctacaagcagagccttgctttgctttcaaagtttgtttaaggcttgtgaatctgatttcgtgcaagctgaaacaaaatgntatggcttatcatgcctgctatatatgaatgaaaatgtcgatgttcat

SEQ ID NO: 47849 - DNA, 450 bp, Glycine max
  Clone ID: LIB3139-067-P1-N1-A6.R2
ccccttatgaacatcgacattttcattcatatatagcaggcatgataagccataacaatttgtttcagcttgcacgaaatcagattcacaagccttaaacaaaacttgaaagcaaagcaaggctctgcttgtagaaaactacaaatagattcactggggaaacttagatcattacataccagctacatggaaagaagaaaaccatattaacatctcttcagtgaacatttcggcacgatgagacttctcctcggctcccattgagaaacggcaaagtggacacgtcttgtggcgacccttaagccatttatttacacaaatcttatggaatttgtgcgagcaaggaaggacacggatttcatctttggcctttaaccttgacaagcacacacaacaccaactatcctcattaaaattggatgctgatgctgattcagatgattgttgctt

SEQ ID NO: 47850 - DNA, 599 bp, Glycine max
  Clone ID: LIB3139-069-P1-N1-G7.F2
cgaagttgagagtcatgcaaatggcaaagtgactggttctcaaggggctagttcccgctgttctgaagagaggagggaaggagtgaagaggagttctaatggagacgttgcacctggttcccgacaccggagaagtttctcattggacagctccataggaaatttccatattggagatgaatcgcctaagcttcctccttcacaaaaccgatttggtcaacactctcccagcagttcaatagatggtaagacatctgaaacaagcatggagtttggaaatggtgaattcagctcagaggagctaaagaaaataaaggagaacgataaacttgctgaaattgccatggccgatcctaagcgtgctaaaaggattttggctaatcgtctatcagctgctcgctcaaaagagaggaagatgcggtacatttctgaattagagctcaaagtacaaacacttcagacagagacaaccacattgtctactcagtttaccaaattacagatggataattcagagctgaaaagtgagaataatgagtacaaattgaggattcaagccttggaacagcagtcccaactaaaagatgctctgaatgaga

SEQ ID NO: 47851 - DNA, 423 bp, Glycine max
  Clone ID: LIB3139-069-P1-N1-G7.R1
atctcaaatcatcattagatttacaaataataactacaaatcttaggcaataaagttaacaattatacactattttgagtcttcatataatcatatccttgggcttgcacaagtcgaactacaaccttattagataggaattgcattcacagactccttttgcctcttgtatcttttgaacttttctttttgttaacgggtcctctcttagaatcgagtcttttttttttttacttgagcttgtttggtcatgcaatatcctattcagattcatatcacaaacattgagcatacatggtatcagagtgctaatcagtaggcagtagctttgccattgtggcactgggtactgagtctgtgtctgctcctgggaattgcgattgtccagttgaacagggctaagctggttagggtgctgcgggt

SEQ ID NO: 47852 - DNA, 469 bp, Glycine max
  Clone ID: LIB3139-069-P1-N1-G7.R2
atctcaaatcatcattagatttacaaataataactacaaatcttaggcaataaagttaacaattatacactattttgagtcttcatataatcatatccttgggcttgcacaagtcgaactacaaccttattagataggaattgcattcacagactccttttgcctcttgtatcttttgaacttttctttttgttaacgggtcctctcttaaaatcgagtcttttttttttttacttgagcttgtttggtcatgcaatatcctattcagattcatatcacaaacattgagcatacatggtatcagagtgctaatcagtaggcagtagctttgccattgtggcactgtgactgagtctgtgtctgctcctgggaatggctattgtccagttgaacatgtctaagctggttagggtgctgctggtgctgtaactggaacacttgttggctaatagcaagctgttgagccatg

SEQ ID NO: 47853 - DNA, 384 bp, Glycine max
  Clone ID: LIB3139-072-P1-N1-D11.F1
aaaaaaaaaaaaaaaaaaaaaaaaaaaaaaaaaaaaaaaaaaaaaaaaaaaaaaaaaaaaaaaaaaaaaaaaaaaaaaaaaaaaaaaaaaaaaaaaaaaaaaaaaaaaaaaaaaaaaaaaaaaaaaaaaaaaaaaaaaaaaaaaaataaaaaaaaaaaaaaaaaaaaaaaaaaaaaaacaaaaaaaataaaaaaacaaatataataaaaaaaaaaaaaaaaaaaaaaaaataaaataaaaaaaaaaaaaaaaaaaaaaaaaaaaaaaaaaataaaaaaaaaaaaaacaaaaaaaaaaaaaaaaaatacaaaaaaaaaaaaaataaaaaaaaaataaataaaaaataataaaaaaataaaaaaaattaaaaaaaaaaaaaaaaaa

SEQ ID NO: 47854 - DNA, 184 bp, Glycine max
  unsure at all n locations
  Clone ID: LIB3139-072-P1-N1-D11.F2
gaggaagttgcccttaaaggaagtacaatgaggaagccagaagcgtgtaataataatactaaaaacaatagcaacaagaagcttagaaaggggttgtggtcacctgaagaagatgacaagctcatgaactatcatgnctnaannnaccatggnnacaaggnngtgttggnagcgtatgtggcaa

SEQ ID NO: 47855 - DNA, 411 bp, Glycine max
  unsure at all n locations
  Clone ID: LIB3139-072-P1-N1-D11.R2
aactaatctgcaagactaaatactcgaataccaatggatacccaagaatttatatgtatatatatatatattggacttttatttgaggcctatacctgattgttaacttgtgaattcggtataagggtaaaaaataccagtatactattatacaaggctctatgtgaagaatatatcaccctgcagtgtgccaaataaggttcattgatcagtatgaaaaatcaagaaatggaaaggaggaaacatttttcatcaactcttcaaagtcccattctcctgtggcagtggctaactcttgctgaaacaaattctccaccccatgatgagccttattttcagctatgccaatattgttgcagttattaaggatactatttatgtcatcgncaaagaactgctgttagttgtttc

SEQ ID NO: 47856 - DNA, 272 bp, Glycine max
  Clone ID: LIB3139-073-P1-N1-F5.F1
ggtgcctgtagggagcctgccgtcgctgccgcgtgcgtggctcggggttcggctcgggagtcgttcttctgatttgtgccgtgtttcccctgtgctctcgtcttccttgggcgcgtcgtcgccggcttcggagggctctcgtggcgtgacgttttccgacgaggaggtgcggctggcggtggggccccgtggaggcgggctggtcgggggagttccgggggcgcggcgccggtgtgccggggtggtgggggggggctggggtgggtgggtgt

SEQ ID NO: 47857 - DNA, 620 bp, Glycine max
  unsure at all n locations
  Clone ID: LIB3139-073-P1-N1-F5.F2
aatcattcttctgatttgtaccatgtttcccctgagctctcatcttccttggacacatcctcgccggcttcggagggctctcgtggcgtggcattttccgacgaggaggtgcggctggcggtgaggcaccctgaagaagcgggcaggtcggaagaagttccgggagacgcgccacccggtgtaccggggggtgaggaggaggaactcggataagtgggtgtgtgaggtgagggagcccaacaagaagaccaggatttggctggggactttccccacgccggagatggcggctcgggcgcacgacgtggcggcaatggccctgaggggccggtatgcctgtctaaactttgctgactcggcctggcggttacctgttcccgccacggccgaggcaaaggatatacagaaggcagcagcagaagctgcccaggctttcagaccagatcaaaccttaaaaaatgctaatacaaggcangagtgtgtggaggcggtggcggtggcggtggcggagacatcaacggcgacggcacaaggggtgttttatatggagggaagagagcaggtgttggatatgcctgagttgcttaggatatggtgctcatgtccccacacattgctta

SEQ ID NO: 47858 - DNA, 403 bp, Glycine max
  Clone ID: LIB3139-073-P1-N1-F5.R2
aaccaaaactagatttttcttttatttaatttatacataaacttgaagggattcacttcatgatatacgtgatattgattacattgacaaaaaagggttcaaaagaaaattccttttggtccctcgcaatctttccacctataactagtatccgtactactaataaaaaaccagtacagacactgttcactccaaaaaactaacaacaaaaaccaaaccaaaacacattattaaattgagaaattccatagtgacacctcagcatcttgggcatccaagtcagcatcttcatactcataccctaagcaatgtgttggggacatgagcaccatattcctaagcaactcaggcatatccaacacctgctcttcttcctccatataaaacaccccttgtgccgtcg

SEQ ID NO: 47859 - DNA, 613 bp, Glycine max
  unsure at all n locations
  Clone ID: LIB3139-076-P1-N1-C2.F2
cttttcagtttaaagcttcagatcacaaccgatccaccattcaccactttctcttcacaagctcaagttactgacaggcaaatctaacaagaaaagtagtctctgaagtcgatccagtgccttgtgaatttggaattggtggtgaatttagatctaaaagccatagcaatgtcttttatcggtacccagcaaaagtgcaaggcttgtgagaaaacggtttatcccgttgatcagctttctgctgatggtactgcttatcacaaagcttgcttcagatgctctcactgcaaaggaacattaaagctgagtaactattcctcaatggaaggtgttctttactgtaagcctcactatgagcagctcttcaaggagagtggctccttcagcaagaacttccagtcacctgcaaagctagctgataagacaactcctgagctgacaaggtctcctagtaaagctgcgagcatgttttctggccacaagaaagtgtgccacatgtggcaaactgcttatccttagagaggtaacagtggaagggcaggcctatcacaaatcatgtntcaagtgttcacatgggtggatgtcccataacgccatcgaattatgcagccct

SEQ ID NO: 47860 - DNA, 207 bp, Glycine max
  Clone ID: LIB3139-076-P1-N1-C2.R2
ggaaaataacgctttaattagtctcgtttttcctaatggcccttttttggaataacccacccaacacaaccccgccaggcaggtgttggtaaaaacccccaaaaagatcaagggtccgggaaaacagcccaaaacaaaaaaaccccacaaacaaaccccgcccccccagggccggaaggtataaagaaaaagaaagggcaggggggg

SEQ ID NO: 47861 - DNA, 356 bp, Glycine max
  Clone ID: LIB3139-080-P1-N1-B10.F1
tcgagacacagatcatagtgatcattttttaatttctcagatttatccgacgtcgctgcagatccaccaaccgttatggctgccttcagcggtgatgaaacggcaccgtttttcggcttccttggcgccgagctgccctcgtcttctcctgtatgggagctgcctatggacagcgaagagtggcgtgggcgtggcttccatgggtgtaatgagacctgagctggtgatgaagtcgattgttcctgttgtcatggctggagttttgggcatttatggccttattattgctgttattatcagcaccggtattaatccaaaggccacatcctattacctctctgatggttatgcacatc

SEQ ID NO: 47862 - DNA, 612 bp, Glycine max
  Clone ID: LIB3139-080-P1-N1-B10.F2
tcgagacacagatcatagtgatcattttttaatttctcagatttatccgacgtcgctgcagatccaccaaccgttatggctgccttcagcggtgatgaaacggcaccgtttttcggcttccttggcgccgtagctgccctcgtcttctcctgtatgggagctgcctatggcacagcgaagagtggcgtgggcgtggcttccatgggtgtaatgagacctgagctggtgatgaagtcgattgttcctgttgtcatggctggagttttgggcatttatggccttattattgctgttattatcagtaccggtattaatccaaaggccaaatcctattacctctttgatggttatgcacatctctcttctggtcttgcctgtggcttggctggcctttctgctggcatggctattggtattgttggtgatgccggtgttagagccaatgcacaacaaccaaaactttttgttggaatgattctcatcctcatttttgctgaagcacttgccctttatggtctcattgttggtattatcctgtcttctcgtgctggccagtctagagccgactaagaaaggagttgtgctgcaaaatattctttgaccacccatctg

SEQ ID NO: 47863 - DNA, 494 bp, Glycine max
  unsure at all n locations
  Clone ID: LIB3139-089-P1-N1-G3.F1
cgctgganncntgtgnagctttgaacgcgccaaattacaatcaccatgtcctcttcctcttcctccttcttccccgcccatatcaccaccgaccaagaattctccctcatcgttgccgccctcaccaacgtcgtctccggctctacctccagctcctccgtccctgaattccgcttcccgcactcctccccgcctctttcttccgccagccttatgccgccacccccgcctagcatccacacgtgtcgcgagtgcaaatcgcaggatgcctgggatgcaactttttccccgaggaacaaaggaagaaatacagaggagttaggcagaggccttcgggaaagtgggccgccgagattcgcgatcgtcatcgttcggcccgggtctggctcggtacattcgaaaccgccgaggacgccggccgggcctatgacaagggctcgttcggattactcggccacgggcaagctcaatttcccttggtcgacgagtcgctc

SEQ ID NO: 47864 - DNA, 538 bp, Glycine max
  Clone ID: LIB3139-089-P1-N1-G3.R1
gaaatgaaacattaaaactcttgatttgtactatgcagcaacttcctcacgaaaaaaacctagcggaagaaagatattacagaaatacatgtagtgtaatgtattgcagtggagctagcaaatgctaatttaacaaatacgcttagccgagttgtacaattgttaaacgcacattaacaaaactaattatttggtttaattgaatatcaatttcaggaactgagagtgtacccagtggcagcagagtctgaagaatctccagtaaaatccatcatcatcatgaacggatgaaaatcagcttcgttgatcctgtcccagaattcgtgcgagtccattcccatgccttgattgagattatcctcgttgttaatctgctcttctgttgcagccatctccggctggagagtgagcgactcgtcgaccaaggggaaattgagcttggcccgtgggatccgtaactcgaacgaggccttgtcataggcccgggcggcgtcctcggcggttttcgatgttacgagccagaccggggcgaacgatg

SEQ ID NO: 47865 - DNA, 472 bp, Glycine max
  Clone ID: LIB3139-089-P1-N1-G3.R2
gaaatgaaacattaaaactcttgatttgtactatgcagcaacttcctcacgaaaaaaacctagcggaagaaagatattacagaaatacatgtagtgtaatgtattgcagtggagctagcaaatgctaatttaacaaatacgcttagccgagttgtacaattgttaaacgcacattaacaaaactaattatttggtttaattgaatatcaatttcaggaactgagagtgtacccagtggcagcagagtctgaagaatctccagtaaaatccatcatcatcatgaacggatgaaaatcagcttcgttgatcctgtcccagaattcgtgcgagtccattcccatgccttgattgagattatcctcgttgttaatctgctcttctgttgcagccatctccggctggagagtgagcgactcgtcgacaaggggaaattgagcttggcccgtgggccgcgtaactcgaacgaggcctt

SEQ ID NO: 47866 - DNA, 350 bp, Glycine max
  Clone ID: LIB3139-090-P1-N1-C11.F1
caaaaattgcgcaacagctgccaggcagaacagacaatgaaatcaagaactattggagaacaaggattcagaaacaagcaatatatgcgaaatttgaggatcacagaagagcaggatttgtagaatttgtcaagggtctacagatgacaagatgtcttcataaatcacaagaatcatctccttcggccatgtcaacccaagaccaagcaattcctttaccttttgatggtgttactgttgctcattagtcatcatttgggattgggacacaccaacaatgcaaatcacttgccatggagatgtcaatcatttgaatcaggatgagcagaactcagactctgaacaccaga

SEQ ID NO: 47867 - DNA, 432 bp, Glycine max
  unsure at all n locations
  Clone ID: LIB3139-094-P1-N1-C12.F1
ctcgagantgctaggcattctgctggttaataacaaaaaaaaaaagggagacataataacaaattatgcttatgatgattgatttaatgaaaaccctagttattatcagaaaaattagaagacacatattccctcacttccctcgcgatcacatccatcatcgctgcccatgcccggtagctaacaggtgggccacatagcccgattattaccgggacgaaccgataacgccgttaagaaccactggaactccacgctcaaggcagagccaagggtattaacgttaatgttaatgatgccgacaacgaagatgacccgttgaccgcattgactcttgctcctcccggtattgctaattgcactttgactgaagacgccgtactggagcactgggctctgcggagagtgctgcggaggggttttgggatatga

SEQ ID NO: 47868 - DNA, 377 bp, Glycine max
  Clone ID: LIB3139-094-P1-N1-C12.F2
ctcgagccgcttctggcttctgctgttaataacaaaaaaaaaaaggaagacataataacaacattatgtcttatgacgattcgattcaatggaaaccctcggtgtgaacaaggaaaactagatgccacatctttcctttgttccctgccgaccacatcgatacatgatgcccgcgccagtcaccggaacgagcgggcccccagaaccagaatgaggctggttccgtgcggagtgcgccgtgtcagaggcaaaaggaccaagatgcaatggggcccctgccagggtgctacagattccgtgatatgtgtcgcaataaatggcttaagggtgcgccaaagacacgctcacttctccgctgctgactaggcagccgagga

SEQ ID NO: 47869 - DNA, 253 bp, Glycine max
  Clone ID: LIB3139-094-P1-N1-C12.R2
ggtattaacagcagaagccagaagggttttaatttatttccctgatccgattccaaagtccagtaaggcaaaatcaaattgcagaataatttgcctaaaaaaaaaagggagacataataacaattttttgccttctgttggttgtttaaaaataacccctagctttatgggaagaagaaaaccaatgaacttccttgaatcggtcggtgtgccacaatgagacatatcctaggatcccattgaaaaaggcaaa

SEQ ID NO: 47870 - DNA, 549 bp, Glycine max
  Clone ID: LIB3139-099-P1-N1-E9.F1
ggaaaagacagaaagagcaacgtcagagagtttgccgtgggttctccttggtttgtggtttccggtattgttttgcactgcttcagatacagagagaagggaatccttcttctctctctctctctttctcttttcctgagtttgaacttggagtaactgagtctatatttttgttcatactagtgtggtcatcactggattttcttggtatatataaaaaaaaaacaaaatattgtctcttgggttggttccaaacaagtagaggaaactatcaattaagtttatagtattttgcttcacagatgtacagaactctctccacttttcattttttttattcccgcagattattttttctttgttggggtttaaagagtaaatattgttaagtagttaagttgtatatcaattttgcctctttggtctggtcttttctcactagtccagttgcagctttttgcgtgttctggtttaggggaggattgtgctcagatcgcagaagcgatccagacttgttacatacgaaaactcaggtctatgtctcatgac

SEQ ID NO: 47871 - DNA, 319 bp, Glycine max
  Clone ID: LIB3139-099-P1-N1-E9.R2
cacacttggggaagatggccattttttttcatatttcataaccaaaagcaaaattaaaaggggggctaaaataaatgtttttttttcccaatgaaataaagaaaaagaaaacccaattttgtttaagacatatggggctacccttgccaagggtttggggtttggttatgttgggaggagttgatccaccttcccataccagcaatgttggggatttcagggggggagagaggtctaagacccaaaaaatcttttgccagggcttaattattgtttcctttggcaccgtcatgggggggggttgttttcgtcatggcat

SEQ ID NO: 47872 - DNA, 531 bp, Glycine max
  Clone ID: LIB3139-100-P1-N1-C9.F1
gcagtgattcttcttcacttctacatcaacatcatcatcatcaacagcagcatcagcagcaccagcagcaacttcttcagtattggagtgacgcgttgaatctaagtccaagaggaatgttaacaagattgggaccagatggaaggccattgtttaggcttccaacacagcccataaacacaacaaaactctatagaggagtgaggcaacgcatgtgggggaaatgggtcgctgaaatccgtcttccacgaaacagaacgcgtctctggctaggcacatttgacacggccgaagacgccgccatggcctacgaccgagaagccttcaagctacgaggagagaatgctagactcaatttcccagaattgttcctcaacaaggacaaaagaggagaacaacaacaacaagaacaagaagcttcttcgccagttctttcagctattgcaaacaggcatgaaccttctagtgaacccgtgacgtcccatagaaggtctaatgggatgattcgggttacccacggtgagcgatgac

SEQ ID NO: 47873 - DNA, 608 bp, Glycine max
  unsure at all n locations
  Clone ID: LIB3139-100-P1-N1-C9.F2
gccagtgattcttcttcacttctacatcaacatcatcatcatcaacagcagcatcagcagcaccagcagcaacttcttcagtattggagtgacgcgttgaatctaagtccaagaggaatgttaacaagattgggaccagatggaaggccattgtttaggcttccaacacagcccataaacacaacaaaactctatagaggagtgaggcaacgccattgggggaaatgggtcgctgaaatccgtcttccacgaaacagaacgcgtctctggctaggcacatttgacacggccgaagacgccgccatggcctacgaccgagaagccttcaagctacgaggagagaatgctagactcaatttcccagaattgttcctcaacaaggacaaaaaagaagaacaacaacaacaagaacaagaagcttcttcgccagttctttcagctattgcaaagcagcatgaaccttctagtgaacaccgtgacgtccccatagaagagtctaatgagaatgattcgggtgacgccacggtgagcgatgaccaggttcatgctacntactgagagtccgaaggagtttctcaggaaatggtttgnnggagaaatgtctgcat

SEQ ID NO: 47874 - DNA, 454 bp, Glycine max
  Clone ID: LIB3139-100-P1-N1-C9.R1
actgtaaagtgctggatatgtaatataacaacaaaaaaaatgatacataacatgatagcgtacaaactacaaatgaagtaatatgattatatatatatatatatatgaaccatccttggagctgaaaaacatagctcataacggatggagcaaccgagaaggaaatcacaaaaccgtctccttcttccctggtcatgccaatctacctttacttactacattaaaatattaaaaaaaaacaaaagcaaaaatagtgtaaaatagtcaagtaaaagagaaaaaatgctgcaggccttgaaatacacggagccttagttcagcagaaggtttcagaaaagaagttaaaaaggaaatgagtataggagtagtagtacgcaaggttcacaggttgtgtggtgaaaatatcttcaaccagtgagtgagagtaagtaactaaggagccatcacagtgtcc

SEQ ID NO: 47875 - DNA, 412 bp, Glycine max
  Clone ID: LIB3139-100-P1-N1-H10.F1
aagaaaatttgaagaaactgaaagaggtgaataggaatcttcgtaaggagattaggtatacagatctttcttcacttcgatcgatctccttgagaatgggagattgtatgaacgatctaggcatagaagatctcaagctccttgaggaagaaatggacaaggctgccaaggttgttcgtgagtgtaagggatatcaagtgtgctaatatactggttgatgtaagtgggcaagtcaagcttgcagattttggggttggcaaaggcaacgaaatttaatgatgttaaatcaagcaaaggctctccatactggatggcccttgaggtttttgacttaaagaaccaaggtggttatgggctagcagttgatatatggagcttagggtgtacagttttggagatgttggcaaggcag

SEQ ID NO: 47876 - DNA, 614 bp, Glycine max
  unsure at all n locations
  Clone ID: LIB3139-100-P1-N1-H10.F2
aagaaaatttgaagaaactgaagnggtgaataggaatcttcgtaaggagattaggtatacagatctttcttcacttcgatcgatctccttgagaatgggagattgtatgaacgatctaggcatagaagatctcaagctccttgaggaagaaatggacaaggctgccaaggttgttcgtgagtgtaagggatatcaagtgtgctaatatactggttgatgtaagtgggcaagtcaagcttgcagattttgggttggcaaaggcaacgaaatttaatgatgttaaatcaagcaaaggctctccatactggatggcccttgaggtttttaacttaaagaaccaaggtggttatgggctagcagttgatatatggagcttagggtgtacagttttggagatgttgacaaggcagcctccttattctgagttggaaggagtgctgcctcctatagcacaaaagcacgtgattcaactcatactttctcacgaaagaaacttcagggctgatgagctaatggagttctacaaaatttgaaactctaagaaattcttgcatataattgaggattcccctgttttccctgttatatgacagtaagagggtatagccttctca

SEQ ID NO: 47877 - DNA, 555 bp, Glycine max
  Clone ID: LIB3139-100-P1-N1-H10.R2
aatgtaagatagagaaacttccatattgtagacagataaatcagggtatatgtttgagttaccatcagaaaaaataacttcaactggttcaatgacaaatttgttttcacaatattctgagaaggctattacctcttactgtcatataacagggaaaacaggggaatcctcaattatatgcaagaatttcttagagtttcaaattttgtagaactccattagctcatcagccctgaagtttctttcgtgagaaagtatgagttgaatcacgtgcttttgtgctataggaggcagcactccttccaactcagaataaggaggctgccttgtcaacatctccaaaactgtacaccctaagctccatatatcaactgctagcccataaccaccttggttctttaagttaaaaacctcaagggccatccagtatggagagcctttgcttgatttaacatcattaaatttcgttgcctttgccaacccaaaatctgcaagcttgacttgcccacttacatcaaccagtatattagcacacttgatatcccttacactcac

SEQ ID NO: 47878 - DNA, 445 bp, Glycine max
  Clone ID: LIB3139-106-P1-N1-D11.F1
tgggatttttagtccattgaattggatatatttatcctcatacatgatcttaggagacatttgtttttggtaaccactcgtcccaagcctaaataagttaaaacacagaagaaaatgcagaagcggagggcagggaggaagaagttccacgagacacgacacccggtgtacaagggagtgaggcagaggaacgtgaagtgtgtaagcgagctgcgacaacctaacaacaaaaacgcgcgggtgtggctcggaacattcgcgcaccccgacatggctgctatagcgtacgatgttgccgccttggctttcaagggcgacagtgcttccttaaacttcccgaacgccgccacctcgtttccgcgccttaactcgcggacgtgttccgttagggccattcagtttgtcgcgacgggcggcgggagaagcatttttcttgggtagagtc

SEQ ID NO: 47879 - DNA, 603 bp, Glycine max
  Clone ID: LIB3139-106-P1-N1-D11.F2
tgggatttttagtccattgaattggatatatttatcctcatacatgatcttaggagacatttgtttttggtaaccactcgtcccaagcctaaataagttaaaacacagaagaaaatgcagaagcggagggcagggaggaagaagttccacgagacacgacacccggtgtacaagggagtgaggcagaggaacgggaagtgggtaagcgagctgcgacaacctaacaacaaaaacgcgcgggtgtggctcggaacattcgcgcaccccgacatggctgctatagcgtacgatgttgccgccttggctttcaagggcgacagtgcttccttaaacttcccgaacgccgccacctcgtttccccgccttaactcgcggacgtgttccgttagggccattcagtttgcggcgacgcaggcggcggagaagcatttttcttgtgtagagtctcaacaactccaaagggagggatcaggctccggaagcttctctttggacgatgattcttcggagttttcgtcccaaggaaggttcttttgggatgaagaggaagtgtttaacatgccggagttgctgaactgcatggcggaagcgctgattatcaca

SEQ ID NO: 47880 - DNA, 361 bp, Glycine max
  Clone ID: LIB3139-119-P1-N1-A12.F1
agaaaagattagtgaggttgaaatgtcgcaacgatcggtgccggcgccgttcttgacgaaacgtatcagttggtggaggatcaggggacggaccaggtgatatcgtggggtgaaagtgggaacacttttgtggtgtggaagatgcggattttgcaaaggatttgcttccaaaatatttgaagcacaacaacttgtccagctttgttcgacagctcaatacctatggattccgaaaaattgtgccagacaaatgggaattcgcgaacgagcatttcaagcgaggggagaaggagcttctctccgagatcaaacggcgcaagaccgtgcctgaatcgtcggcaatcccccgggagccggaaag

SEQ ID NO: 47881 - DNA, 605 bp, Glycine max
  Clone ID: LIB3139-119-P1-N1-A12.F2
agaaaagatagtgaggttgaaatgtcgcaacgatcggtgccggcgccgttcttgacgaagacgtatcagttggtggaggatcaggggacggaccaggtgatatcgtggggtgaaagtgggaacacttttgtggtgtggaagcatgcggattttgcaaaggatttgcttccaaaatatttcaagcacaacaacttctccagctttgttcgacagctcaatacctatggattccgaaaaattgtgccagacaaatgggaattcgcgaacgagcatttcaagcgagggcagaaggagcttctctccgagatcaaacgccgcaagaccgtgcctcaatcgtcggcacatcccccggaggccggaaagtccggcggcgacggcaactctccgttgaactccggcagcgacgacgcgggctccacctcaacctcgtcctcgtcctccggttccaagaaccatggatcggtggaaacaaacacaacgccttctcaccagttatcgagcgagaacgagaaactgaagaaggataacgaaacgctgagttgcgagctggcacgtgcgaggaagcagtgcgatgagctcgtggctttcctcagggaccgtctgat

SEQ ID NO: 47882 - DNA, 352 bp, Glycine max
  Clone ID: LIB3139-119-P1-N1-A12.R2
gggactaaaaaacccggttaaattcccaaaacaatattaaaggggggttggccccccgcccattaaaaattacccacccccaacatgggaaaaaggaaaaggctagggctttgggtttttaccccaaaaaaataaaggctaaccctttttttttttaacaaaaaattacccaatccctttttaaatggcaaaaaaaataccgggggggggggggggcctaattcaggggcaaacccgggggcctttcataaggatattaacgggcccaaagaaaacaacgggctttgcctcttggggggggggccccccgaaccccatttggtcttgggggcctttttggggggggtttttt

SEQ ID NO: 47883 - DNA, 458 bp, Glycine max
  Clone ID: LIB3139-119-P1-N1-H6.F1
cttcccacattaaataccaactgtgtagtatagtactacttcaatgttaactatgttcttctttttttgttctcatctccacaccatgtcctaatctttctgcaccatcgttctccatttttggctttacaaaaccactgtgtctgattaagggttctttaatatttccaatatttcttgtagtgaaaaagttgttagctaaaagaagaccaagtttttggtgttgtagaaggaagagaagaattaacatgaaaattcagtgtgacgtgtgtgagagagctccagcaacagtgatttgttgcgcggatgaggctgctttgtgtgccaaatgtgacgttgaagttcatgctgcaaacaagcttgcaagcaagcaccaaagacttcttcttcaatgtctatcaagcaggctttccacatgtgacatttgccaagacaagccagcattcatattttgtgtt

SEQ ID NO: 47884 - DNA, 614 bp, Glycine max
  Clone ID: LIB3139-119-P1-N1-H6.F2
cttcccacattaaataccaactgtgtagtatagtactacttcaatgttaactatgttcttctttttttgttctcatctccacaccatgtcctaatctttctgcaccatcgttctccatttttggctttacaaaaccactgtgtctgattaagggttctttaatatgtccaatatttcttgtagtgaaaaagttgttagctaaaagaagaccaagtttttggtgttgtagaaggaagagaagaattaacatgaaaattcagtgtgacgtgtgtgagagagctccagcaacagtgatttgttgcgcggatgaggctgctttgtgtgccaaatgtgacgttgaagttcatgctgcaaacaagcttgcaagcaagcaccaaagacttcttcttcaatgtctatcaagcaagcttcccacatgtgacatttgccaagacaagccagcattcatattttgtgttgaagacagagcactcttctgtcaggattgtgatgaaccaattcattcagccggaagcctttccgcgaaccaccagcgcttccttgctactggtatccgagtggcctcgagttctaattgcaccaaagacaatgaaaaaagtcactcggagcctcct

SEQ ID NO: 47885 - DNA, 161 bp, Glycine max
  Clone ID: LIB3139-002-Q1-N1-A4
gagaattgggagagctactataactccggtttgtacatacaacttggaggttctgctggaccgtaccgcacccagttctctggttgaggttgtactttcacaacagtggcagatttgcaattcaattcaatttatttgtttacaagaaaaaaaaaaacaac

SEQ ID NO: 47886 - DNA, 345 bp, Glycine max
  Clone ID: LIB3139-003-P1-N1-A3
tgattacaacgatggattgctgaaagaggagggtttgcgtgaggctcagaagaagtgccgtttgatcaaattgccttccttgattgagtacattggttactgcctctgctgcgggagtcactttgctggtcctgtttatgaaatgaaggattatcttgattggactgaaggaaaagggatttggagcactgaagcaaaagggccattgccatcaccttatggggcaaccctccgggctcttctccaagctggtttttgcatggccatgtatttgaacctcgtgcctcattttcctctgtccaagtttactgatcctacctaccatgaatggtgtttcctgaaaaa

SEQ ID NO: 47887 - DNA, 352 bp, Glycine max
  Clone ID: LIB3139-003-P1-N1-C2
cggttcgggcctggatgtcctgacaccggacctaagaacctgaggggaaatcaatcacgacttggtgtcaagacttgctcaaagaagtcctactcatgtgggtacgagtcgttaagggaacgaaaagcactctgtgagctgagcacagacttgagggataagtgtaatggagcactcctaatctatttgctgaacactgtcctatttgaaataagacttgcagacagataacaactttccctgccaaattctcagggctgtatttaattgcaaggtcaggctgaccaatatttggattagtgctcccactcttctatctggtataagactgcgccgatagacttttctacct

SEQ ID NO: 47888 - DNA, 338 bp, Glycine max
  Clone ID: LIB3139-003-P1-N1-G2
gttttcttttaatacacacagagtcagactcaaacagtgattcaagacacagtgcagagaaaagcttatgctatcccccctaggcccaggaactaggaactaggaaaatgccccattcacaaaaaccctaataactaacctttttcagacccaccaaaccaatcactaccctcaattcccctctttacttattccctcccaaacatcaatctctttcgatttttcttctaaagctacttcctttcgcctttttttctcttctgggtacaccttcaccactttcttttttttccctctttggttcaaatcacgttctttcggtctgatctcaaacaccc

SEQ ID NO: 47889 - DNA, 338 bp, Glycine max
  Clone ID: LIB3139-003-P1-N1-H10
gcaattttcatttttctctctcccttagtcaaaggggttcatcgttcttcttcccaggttatttagaaaagcaaaatggtgaagatttgctgcattggtgctggatatgtggggggtcctactatggcagtcattgcacttaagtgcccatccattgaagtcgctgttgttgatatctctaaatcccgcattgcagcctggaacagcgaccagcttcctatctatgaacctggccttgatggtgttgtgaagcaatgccgtggcaagaacctcttcttcaacacttgatgttgaaaagcatgtctttgaggctgacatagtgtttgtctttgtcaaca

SEQ ID NO: 47890 - DNA, 337 bp, Glycine max
  Clone ID: LIB3139-003-P1-N1-H6
tagctaagtaattctcgatgcggcatagataacaccgtactctctaatatcccatactatgaaaaacatggatatgggggggaggaatttaatgaaaccttatatgatgaatgggttaacaagggcgacgcaccggcattgccagagactcttaaaaattacaacaagctgttgtctcttggcttcaagattgtattcttgtcaggaagatatcttgacaaaatggccgtaacagaagcaaacctaaagaaggctggcttccacacatgggagcagttaattctcaaggatccacatcttatcactccaaatgcactttcatacacttatgagaggc

SEQ ID NO: 47891 - DNA, 72 bp, Glycine max
  Clone ID: LIB3139-004-P1-N1-C1
gggaacattttctaatcacaataatattattgcttttgggaatataatattcatacagcaatctcttataat

SEQ ID NO: 47892 - DNA, 361 bp, Glycine max
  unsure at all n locations
  Clone ID: LIB3139-004-P1-N1-C6
gggatttccatggaagtctttaaagaagaagctcgagtggcacccggaccggccctagtggcgatggtgccatcccctggcatgggccacctaatcccaatgatcgagttcgcaaagcgagtggtgtgctaccataacctggcggtgagcttcgtgatccccactgacggcccaccttcaaaagcccaaaaggcagttctggaggcccttccggactcaatttcccacaccttcctccctccggtcaatctctccgacttcccgccggacaccaaaatcgaaaccctgatcttccacaccgtncttcgcttcctttctttccttcgtcaagcattccactccctctacgtcacaaacaccc

SEQ ID NO: 47893 - DNA, 351 bp, Glycine max
  Clone ID: LIB3139-004-P1-N1-D1
aaccaaacgcgtaaacgaaggcggcttctctctctggggtcagcttttctcctttgggtcgctttcgcttttcgtgtcgccggtaaggcaattcgatacctctgaaccctaatcagacgcagccaccgtttagggtttccatcctcctctcatactttgcctgattgctttcgtgtttcgtttctctcttttcatttcaatttttgatacggtccgctgttgattgtattatatcctggaaaaagtaaagaacattataattggtttttgtcgtgtggatttttgaatgattgattagggttgtgtgaatcattgaaaaaaaattgaatcctccgttctgatttttccgga

SEQ ID NO: 47894 - DNA, 269 bp, Glycine max
  Clone ID: LIB3139-004-P1-N1-D4
ttcaagcggttcgagatcaaaagttattttgcttgatagaaagatctcaaaagttatgttggagccagttgagtatgctagaattgaatttcctgacatcagtgtggtgaaggagaatcagcaaatggtatctgagtacttcaatttggcttctcaagatactaattctgctccttcaaagtgcaacattggagggtcactaccatttcttcaccttggtgcatctcctcaacttgatgattatgagatgactctgttgagctcaccag

SEQ ID NO: 47895 - DNA, 152 bp, Glycine max
  unsure at all n locations
  Clone ID: LIB3139-004-P1-N1-D7
aaacatacatgatctatctgtttcccctcccacagcattctctttgcagaggcagatcaacattttaaaaataatnttntcattcaccattaacatctcctttaacatcatcacttacaagaacctcacaatttttatttactantatattt

SEQ ID NO: 47896 - DNA, 73 bp, Glycine max
  Clone ID: LIB3139-004-P1-N1-D8
aaaaaattaaaaaaaaaaaaaaaaaaaaaaaaaggagaaaaaaaaaaaaaaaaggggagaaaaaaaaaaaaaa

SEQ ID NO: 47897 - DNA, 351 bp, Glycine max
  Clone ID: LIB3139-004-P1-N1-E1
caacctaattcgtaattgccgtcgcacggtgagaactcggaccaacaccagcacttgagagaagacagaatcaagcagaacttggagttggagagagagaattccgaccctaattgtaaaatggaggacgagacagagactatggtggagaagagggagataatcaacaacgtaatgtgtcttttgacagaccctgatggaactcctttgggtgctcctatgtacctacctcagaatgctggtcctcaacacctcatccagattgttaataagcttctaaacaatgaggagaaattgccgtattctttctatatatcagatgaggagctcctcgtgccacttgaaacatac

SEQ ID NO: 47898 - DNA, 197 bp, Glycine max
  unsure at all n locations
  Clone ID: LIB3139-004-P1-N1-E7
gttgggagtagcaaatggaattaaaattggagggggttttggaaattacatttgagctcanaattacggatcacattgatgagtgaaccaaaccaacaacatgtagaaagccttgttatgaaaagtttcaatgtaaaaatttgttcttgtacttatccaactcggagtttggtccaattataatcattttgaatgtc

SEQ ID NO: 47899 - DNA, 239 bp, Glycine max
  Clone ID: LIB3139-004-P1-N1-F2
gaaaattgtttttcttactagagttgatccttttcgaggagctttattggctgtggtgttttggcgttaagaatgaaattctgagttctaacgccactaaccctatgctgacgcgacttcttgagaactgtaagagtctcaaatatctggttgatgagtgtccttttgcatttgtgaactagtatgtaatattttattcacttaaataaagcgcattactatgtgcaatgagtgtgttt

SEQ ID NO: 47900 - DNA, 303 bp, Glycine max
  unsure at all n locations
  Clone ID: LIB3139-004-P1-N1-H11
ttcttttgcattaagcaaggtgatccaattgaagagcgttacaaggaatacatgnnnnggggtacagtaattgatcaacttgcctattgtataaatagttatagagaagctgcaatgtcaaatgatcccaagtttgatcacattgacatcaatgagaaacaaaaggtcttaaatgaatgtgtggaagctgtaatactttttatgttgcaaaaacagcatcaggactcggtcccaaaacatgccacccaaaaaaaannntcagctgacgtaagaaagaaagcttaagctgaggacaggttttgt

SEQ ID NO: 47901 - DNA, 256 bp, Glycine max
  Clone ID: LIB3139-004-P1-N1-H2
ggggacttgttttgtgttgaaatacattggtttatgggaagagagcaaggcaggaagtcagtgtttataaaacgacagtaggagcctggtctggtcggtgtggcactcaaacattgtttgttgtaggaagaggaatcttgagaaatggcaggggacagcaagagcaagattctgttcatcggagggactggttacatcggaaaattcatcgtggaagccagcgccaaagctggccacccaactttccttttggtga

SEQ ID NO: 47902 - DNA, 247 bp, Glycine max
  Clone ID: LIB3139-004-P1-N1-H6
tcaagattttgaaattgctggtaatactcttatgccagctttttctgttccacaggctactgccagatcttctgaaaatgcggaatcctctgcatgatctggaattcgtgttttctttcgcttgttcgtttgtttaattcaataaaggcaattaggcatgaccctgttgttgagtatgctctgcctatctgaaaatttccacacctcttttaattgtcgtaatgatgtgtgacgtgtgcgttatttt

SEQ ID NO: 47903 - DNA, 259 bp, Glycine max
  Clone ID: LIB3139-004-P1-N1-H9
gttcgtgctttccaagccagggttgcacctaactggctagctatgtcttcttaatacgggggttcccattctaaatcctatgctccatctgcgccagaacaacctccatattccaattataatcacacttcttcttctacatcaaattcatcgtcatccagttttccagcagggacgccccaggacgtgattcggagctttcagatggtggatagggaccgaagcggtttcatcgatgagcgtgagttgcaccaagctc

SEQ ID NO: 47904 - DNA, 375 bp, Glycine max
  Clone ID: LIB3139-005-P1-N1-A4
tcgcttcgggcctaaacaatttggtgcatatgggcttcaatcctggtattttcaggttctcgtcttttgggcaccattcctcagtccatttcacagcaaactgtttggaatcaaatggcaacagtgagaacaccattgaattttgattctagcaagcagagcttttgtcaattttctattgaccttctcggtggaggaattttagtggacaaaactggagattggatcacacttatacaaaattctccaattagtaacttgttgagagttgctgcttggaagaaaggttgtttaatggtcaagattgtgatgtctgggaatgcagcagtcaaaaggagtgattgggcctcattggtacaagtgtttttaacaaac

SEQ ID NO: 47905 - DNA, 368 bp, Glycine max
  Clone ID: LIB3139-005-P1-N1-A5
acttctaatgcaactatagtgaggcttaaaaaattggtgcataattaatcaaaatgtgggctatattccacaaagcttttgctcatccacctgaagagctcaacagccctgcatcttacaaaggttccaagaagcctaaggttcccgaggaaactctcaaagatttcctttcccaccatcctcacaacacttgctctatgagctttggtgatgctgctgttctagcttatgtccgtcctgatcaatctttctctcgtcatcaaaggctgttttgtgggatcgatgacatatattgtctcttcttggggagcttgaacaacttgtccctactcaacaagcaatatggattgtcaaagagtactgatgag

SEQ ID NO: 47906 - DNA, 154 bp, Glycine max
  Clone ID: LIB3139-005-P1-N1-B10
ggaggcttgagataccctacttgcagtctatcgtgcgatgcctaaattaggtggctggcataaaaaatgcaaagtgcgctgagacccttcacatccaggtgcagccaatgcaggaacccagaccggcgccatgcactaataggaggggtgaccg

SEQ ID NO: 47907 - DNA, 380 bp, Glycine max
  unsure at all n locations
  Clone ID: LIB3139-005-P1-N1-D1
tcgcttcgggattttgtcctgttgggaaaaatgttaaagtgattgctggcagattgttggatgtagtttccaattttgtgaggaaacttttgngattggatagtgcttttcttagagatgcagcgcttatcttctctcaagatgttgatggttggctgcgcaatatcagctggtgtcaggaacaattcctactgaaagcatacatgtctcaagatgatcttattgtcttgcgttccttagttgtcaaaggtgaaagaatgagagagcaaatgctggaaggagaggttaaagtgtctcctagtgtttgtaatcttattgtaaaaggttgtgaagaagcaagtaagttgatgagagaaagtgtgctacattgttcaaagact

SEQ ID NO: 47908 - DNA, 373 bp, Glycine max
  Clone ID: LIB3139-005-P1-N1-D2
cacattatcaccttctccttccccaggtcccgctcccgggtacatttacaaatcaccggcacctccagtttacatatatgctttcccaccttcacctatctacaagtaagttcgaattgcggaagcaccattcacgataaatcatgttctagtttttatcgaggaataaaggcaagctctatttggagtcaagtgaaacatctatcttcctgtccaagttctttgaataaaagtctgaatgtgtcatctctgcactacaatatttgtgattctgaccaagttggttctatttgtttgatggccatcttgcacgtcctgatcttattgtgttcaagtgacagacaaatcagaacagggaagagagatttgaaat

SEQ ID NO: 47909 - DNA, 309 bp, Glycine max
  unsure at all n locations
  Clone ID: LIB3139-005-P1-N1-E1
gttggggcaaaaccttgatttgggaaccccacccaggaccgggggggaattggtgcttacagcttgcacaccgttttcgtgcacctctctgtccaaagcaccatcgcctgcccccactgtcaaagcggtttcgtcgaagagatccgtgccggcgccgggaccgaagcctcgccacgccatcgactaagtcctttccccgatgatcctcttttgctccggcgacagggcttccgccgccgtaggagagaagcttncggcaaccgctccccgttcaaccccgttatcgtcctccgcggccccggcgacgac

SEQ ID NO: 47910 - DNA, 146 bp, Glycine max
  Clone ID: LIB3139-005-P1-N1-E10
gatgaatatgcagtgtgcttttttaagtcaaagcatggtcaaagcacactggatggtgacagcacacgtacgtagaaaggtgaagttaggatgcagtgtgctttgatgatgctttgacgaatatgcggtgtgcttttttaagtcca

SEQ ID NO: 47911 - DNA, 78 bp, Glycine max
  Clone ID: LIB3139-005-P1-N1-E2
tgcaacccctacgtaaagcttcgaaattcggcttcgagtttaaattgtcgaaataatgtgtgaagtgtgtgttattgt

SEQ ID NO: 47912 - DNA, 360 bp, Glycine max
  Clone ID: LIB3139-005-P1-N1-E5
gggagagaagctgcgcaccttttaatactagtgctgatggctgaaactgacatcgctcgccatttgcacaaagatcccaacaacacttgaaagttgaaacagaaaaacaccaatccctcatcggactgttccgttatcaattctcgtgtttaaggacacaatttgcttgatacattttcaagttttcatctccatgttttgattttgaagaataaggagtatgcaattgactactacagatatggttttactataagtggcctgtatatggttttgggtcttgcaagtgtaagcagtatggaggatattcaattggatatcagttgggacgatgctgtctgtcccatatgcttggatttt

SEQ ID NO: 47913 - DNA, 364 bp, Glycine max
  unsure at all n locations
  Clone ID: LIB3139-005-P1-N1-F2
ggcaaagactattgcttacactaataatactgtcctccgtgaagcactagagaaatggtctcaacctgtaatgtggaaactgcttccacgccatatggaaatcatacaagaaatagacaagagattcactgcaatgataaatacaacccgattggaccttgagagtgagctttcctccatgcgcatcttggatgataatccccagaagccagtagttcagatggcaaatttgtgtgtggtttcttctcatgcggngaatggtgttgctcagttacacagtgatatactaaagtcagaattatttgcaaattatgtttcaatatggccaacaaagttccaaaataaaaccaatgggattacacct

SEQ ID NO: 47914 - DNA, 357 bp, Glycine max
  Clone ID: LIB3139-005-P1-N1-F3
ggggactccgttctttaggtgttgctagacaggaagggcctgagaaaaacaaggatagggctggtgcaccatggcaatttgttggtctgctaccactttttgatcctccaaggcatgacagtgcggaaaccatcacaagagctctaaaccttggtgtgaatgttaagatgatcaccggtgatcagcttgccattgccaaagaaactggccgaaggcttgggatgggaacaaacatgtacccatcttcttcattgcttggtcaaagcaaggatgctgctgtttcagcagttccagttgatgaattgattgagaaggctgatggatttgctggagtatttcctgaacacaaatatgaaa

SEQ ID NO: 47915 - DNA, 319 bp, Glycine max
  Clone ID: LIB3139-005-P1-N1-G1
gggggcatttgagtttccttattgacaatcccaaacagtctacagtttttgatattctctttgggaatctctcaagaatttgaaaattgctgggaatactcttatgccagctttttctgttccacaggctactgccagatcttctgaaaatgcggaatcctctgcatgatctggaatttgtgttttctttcgcttgttcgtttgtttaattcaataaaggaaattaggcatgaccctcttgttgagtatgctctgcctatttgaaaatttccacacctcttttaattgtcgtaatgatgtgtgaagtgtgtgttatttt

SEQ ID NO: 47916 - DNA, 365 bp, Glycine max
  Clone ID: LIB3139-005-P1-N1-G5
tgagattgcagctgatcttaaagaacacgtgattaagcctgtgattcctgagaagtaccttgatgagaagaccattttccatttgaacccttctggcaggtttgtcattggagggccgcatggcgatgcctggtctcaccggccgcaagatcatcatcgacacctatggaggatggggtgcacatggtggtggtgccttctctgggaaggatcctaccaaggttgataggagtggtgcctacattgtgaggcaagctgcaaagagcattgttgcaaatggacttgctaggagggcaattgtgcaagtttcctatgccattggtgtgcctgagcccttgtctgtgtttgttgacacttatggcact

SEQ ID NO: 47917 - DNA, 124 bp, Glycine max
  Clone ID: LIB3139-005-P1-N1-G8
agagagattaatttgctaagaatattattgtctttaggtcgctaaaaatccttattgggtgacctggtttattgtaataaaggagtaccaagggattttttatacaacggatatcattcgtttt

SEQ ID NO: 47918 - DNA, 341 bp, Glycine max
  unsure at all n locations
  Clone ID: LIB3139-005-P1-N1-H10
tagagcaagtgttgatttgcagcgcactcatcgtgttggaggaatgattaaaatggtggccacaaatggtattcctgagaatacaagtatatcattggcctgtgctatgaatagttcttttagggggcgcgccagttctgatatttacaccatctgctctcaagactgtgaattgtggaatcctgcttgcacaaaagcaatgactatgtcatttaatccaaacccgtgttctgatgcatggagtttggaatttctgaagcgtactggatttcattgcgatatcatttgtgtcactggatggactgccaccccaatgcangatgttcaggttacaattgatt

SEQ ID NO: 47919 - DNA, 105 bp, Glycine max
  Clone ID: LIB3139-005-P1-N1-H12
attttttggctgctttcgtttgccaaggttctagcaagcttatgttgttaaggtgtacatgaagacactggtttagggaaaaactgtagagggcaaggctttgat

SEQ ID NO: 47920 - DNA, 368 bp, Glycine max
  Clone ID: LIB3139-005-P1-N1-H5
tagattcctcgttcgtcgttactctgagccagaacttgtggaggaggaacctcacctgtggggaattcacgctcattctccttcttcttctttcggatctcgttctctttctcttccttccttctccttctctcagagaacaacacctctctctctcaccgcctccttctcctctcacaccgccatgggcgagacttccgctcccgccgccgatgccggaatggacgccgtccagcgccgtctcatgttcgaagacgaatgcattttggtggacgagaatgaccgtgtggttggtcatgattccaaatacaattgtcacttgatggaaaagattgaagctgagaatttgctgcatagagctttcagtg

SEQ ID NO: 47921 - DNA, 359 bp, Glycine max
  Clone ID: LIB3139-005-P1-N1-H6
agaaaatcacagttaaaaaataaagacacagcttccacgcagatcagtttccgttgaggggttgagagatgctacaaccaatcaatagtcatcatcttcagaaaaaaaaaccacctttttttttctaaaaggaaaaaaaatttcgagctcaacgagctacccaaagcgattttgattcgcgggcttttcatttctgtataaatcttcaatcttcgaggaaaataacgctaccccatctgtttataatcatatggggcacaagtgaacgaaaaagaaactgtcgagaaaattgaggtttgaagcttgtaagttgtaacgtgtcctagaatattattatgtctttgcttcgacggagaaaa

SEQ ID NO: 47922 - DNA, 107 bp, Glycine max
  Clone ID: LIB3139-006-P1-N1-A1
tgggttgaggccatggattggcctggttgggccaataaatactgggtaagggccaccattttctggggtgggaatattctaagtttggagggttggttaccaaacca

SEQ ID NO: 47923 - DNA, 376 bp, Glycine max
  Clone ID: LIB3139-006-P1-N1-D6
attcgctcggagcaacctttcatcaaccaccacacttctcctggtgggcgctacccatttttggtgtgtgtgtaccttcaaagttttaaaagtataaagatggcacagacattcctatttacctcagagtcggtgaacgagggacaccctgacaagctctgcgaccaaatctccgatgctgtcctcgacgcttgcctcgagcaggacccagacagcaaagttgcctgcgaaacatgcaccaaaaccaacttggtcatggtcttcggagaaatcacgaccaaggccaacgttgactacgagaagatagtgcgtgacacctgcaggaacatcggcttcgtctcaaatgatgtgggactggatgccgacaactgcaagg

SEQ ID NO: 47924 - DNA, 276 bp, Glycine max
  Clone ID: LIB3139-006-P1-N1-E5
ggaaactttttttgcttgccaacccttctattaaggagggtattctgttcccacggcgggcccaaccagaacatgctttccatcaagttttaaatggcctagcacgtaaattgccacacgacagaagtgtattcttgaaaccaggggagaaggccttgaattggactgctggccctttgggggaccttaaacctttgaagcttaccatttaactcactctttagatgcaattataattctttacaaattcttttttattctggcgagtgggggtgt

SEQ ID NO: 47925 - DNA, 299 bp, Glycine max
  Clone ID: LIB3139-006-P1-N1-F12
aaaaaattcaaaacaatgtttctgggtttcggtttcatttcatcaagatgatctgtttatctttttttttttaattttaatttaaagtctttgtattttgtatgtaaagatgtaaaattatgattattaggtggtgcatgtgttgcgtcatgggccaatgttatcctctgcttttaagttggaagaggcccagctcacgtgtgatgtaccgctgtgattgtgtaatttgcaaaatcaaaaataacccccgaggcatatatgcctctttttattttattttaaaaaaaaaaaaaataaaa

SEQ ID NO: 47926 - DNA, 91 bp, Glycine max
  Clone ID: LIB3139-006-P1-N1-F6
gcttcatgctgtgatttacaagttaaaaagttttattgaagatgttgatatcagatatgtgactgcccaaaaaactatccaagattatgat

SEQ ID NO: 47927 - DNA, 315 bp, Glycine max
  Clone ID: LIB3139-006-P1-N1-G11
tggcatttgagtttccttattgacaatcccaaacagtctacagtttttgatattctcttgggaatctctcaagattttgaaattgctggtaatactcttatgccagctttttctgttccacaggctactgccagatcttctgaaaatgcggaatcctctgcatgatctggaattcgtgttttctttcgcttgttcgtttgtttaattcaataaaggaaattaggcatgaccctcttgttgagtatgctctgcctatctgaaaatttccacacctcttttaattgtcgtaatgatgtgtgaagtgtgtgttatttt

SEQ ID NO: 47928 - DNA, 370 bp, Glycine max
  Clone ID: LIB3139-006-P1-N1-G3
gtaagacttaatgttttatgtgagaattatctgacttattaaaaattaataaatagttaattaataattatgggtaaaatggtaaatgagatatgtgtataattgaaacagtttttagagataattataatttgaaggaaataatgatttttaagagattaatacttactaagtcgaaacaaaattttctttttgaaataagatataagagtattctttcaatcctagctgtcaccatcatgcaagataaagaataaaagagtcaagagagataaatcttgttttcttcctctctcaagaaaaccaaagcgcgataaagattatgtgaaagtttccttgtgaaaagaggtacatactcttcaattaattg

SEQ ID NO: 47929 - DNA, 370 bp, Glycine max
  Clone ID: LIB3139-006-P1-N1-G6
gaagcatagttggaagaggagcctgaacagttagtgcgaagattacggaagggaaaggcttgtgcaaggcctgaagatgaggagactgaaaccaacatccctcgcttgggtttgcttggagagagactcaaccgtccactctcaatagagtcaccttctcgagaagttgatactcgttctccaccagttgtgatcccgccatctcgagaagctaatacccgatctccacctgttgtgattccacctcctcggccgaaacagaatggggaggttcctcatccagtggaaattccacccccacctgcaaagcacattgagagggagaggttttttcaggaaaacaaggatggttctaatttgtctggccaca

SEQ ID NO: 47930 - DNA, 366 bp, Glycine max
  Clone ID: LIB3139-006-P1-N1-H4
ctccagcctacggcgtggaaagtttgacatatcacgcatattaccagatggctcgatgatggagattaccaaagtttatccattggatgcagtttttgacaatcccgatgatgtgcctgaagatataaaaacaaacaagcgctatgccggatcatctaaatggacggttcaggaagttgctgaatctgttaaggaagactttggcagtatagatatccttgtgcactcacttgccaatggaccagaggtgaccaaaccattgttggagacatctcggaatgggtatcttgctgcaatatctgcatctagttactcatatgtttctttactcaagcattttcttccaatcttgaacccaggtggatc

SEQ ID NO: 47931 - DNA, 346 bp, Glycine max
  unsure at all n locations
  Clone ID: LIB3139-007-P1-N1-A7
cagtaatctacctctctattttncctagncttagagttccttctccaatggcgtcttgcgcgtttccacctacttcttcctcttcagctgcagcagcagcagcagcgtcgagctctttcttctcgcgccttggatcttcatcggacgctaaagctccgcaaattggttcctttcggtttccggagaggcctcaagtttcgtctggtgttgttaatttaactcaaagacgctcctcggtgaggccactcaatgccgaaccgcaacggaatgattctgttgttcctcttgcagcaactatcgttgctcctgaggttgagaaggagaaagaagattttgagcaattagc

SEQ ID NO: 47932 - DNA, 341 bp, Glycine max
  Clone ID: LIB3139-007-P1-N1-C5
aattattcttctcgaaactgttttctaaactcggcctttttttttgttggggagattggagtttagcggggttatacatagccatttgtaaaaagaattgcaaacctgtacacttagtatatgcactttattggtcgcccattgcatgctttgttagactagcaacaatacttaccagtattacgttgggtttgttggagtaaacttcaatggtgatgattatactttttttatttgtagcaactgtaatacgaattttggggatttgcataaagatttgttttttcaatgttaggagcagaaaacccgtcgacctttttctttggagaaacaagaagata

SEQ ID NO: 47933 - DNA, 111 bp, Glycine max
  Clone ID: LIB3139-007-P1-N1-E11
aatttctgttagttttgtttgtggttttgcccgtgaatgttgtaatgctgttatgtggtccttgcatcgatgtatttttgctctaataggattttgcatcggtgttggttc

SEQ ID NO: 47934 - DNA, 338 bp, Glycine max
  Clone ID: LIB3139-007-P1-N1-E3
gaaattttcacaggaggaatttcttacagcttggggaactcaggtgcgtcctgcagcaactctgttggctgatgggtgtccatatttgtatgctatggtgcatgatagttcagtgtctacaataccaggtgattttgtcattggtgttaagttgacaaccataaacaatatgtgtgcatatgggcttaatcctggtatttcaggttctcgtcttttgggcaccattcctcagtccatttcacagcaaactgtttggaatcaaatggcaacagtgagaacaccattgaattttgattctagcaagcagagcttttgtcaattttctatcgaccttctcg

SEQ ID NO: 47935 - DNA, 357 bp, Glycine max
  Clone ID: LIB3139-007-P1-N1-H6
tgtcgcttcgagagcctatcctcctgttgggtaagagccgcttcgccggcgtcgacatgcgcatccgcgtcaagggtggcggccacacctcccagatctacgccatccgccagagcatcgccaaggcgctcgtcgcgttctaccagaagtatgtcgacgaacagagtaagaaggagatcaaggacattctcgtgaggtacgatcgcaccttgctcgttgcggatcccaggcgctgcgagcccaagaagtttggtgggcgtggcgcacgtgcgaggttccagaagtcttaccgttgaagaagaatggtggtggtgttttcgtgtttttggcttttggtttcggttcatgttttatgct

SEQ ID NO: 47936 - DNA, 362 bp, Glycine max
  Clone ID: LIB3139-008-P1-N1-A5
ggaaaacatgttgctcatgaaagcctcaaggatcaaattcctgctgttgacaagttgtattctactaaggttaataagtttgcaaaaattatgaaccttagacaaagtgttgttggtgatcttaaacttcttactgatgggaagttgtatgagggtaagcatattcctgtatctaatattagtgcaggggaaaatcatgtagttcaaatacccttaatggcacaggaggaaattctgtcttctagtgcaagtgatttcagaactgcaatggtgagtaaaaatagcaaacctcaagctactgcaatgcatgtgggagctatagaaattatcattgatagtttcgcaggtcctgattgcaacat

SEQ ID NO: 47937 - DNA, 363 bp, Glycine max
  Clone ID: LIB3139-008-P1-N1-A6
ggggcaagctgagctttggtcaattttctattgaccttctcggtggaggaattttagtggacaaaactggagattggatcacacttatacaaaattctccaattagtaacttgttgagagttgctgcttggaagaaaggttgtttaatggtcaagattgtgatgtctgggaatgcagcagtcaaaaggagtgattgggcctcattggtacaagtgtttttaacaaacagcaacagtacagagcattttgatgcatgtaagtggacaaaatcagaaccacattcctgggaattaatcttcccaatagaggtatgtggtcctaataatggttttgaaatgtggagttctgagtgggcaaatcaaa

SEQ ID NO: 47938 - DNA, 83 bp, Glycine max
  Clone ID: LIB3139-008-P1-N1-B9
catattttttcatatctattacatacatctggtagctttaaaaaacaaggggctcctaattaacatttttttcttcttttcaa

SEQ ID NO: 47939 - DNA, 356 bp, Glycine max
  Clone ID: LIB3139-008-P1-N1-F1
ggaaaatcctcgtaactatttgacattcttctgccttggtaatagggaggtgaagaaacaaggagagtacgagcctccagaaagaccagatcctgatacagattatatcagagctcaggaggcccggcgcttcatgatttatgttcatgccaagatgatgatagttgatgatgaatacataatcgttggatctgccaacataaaccagagatcaatggatggtgccagagattctgagattgccatgggtgcttatcaaccatttcatttggctgccaggcagcctgccaggggacagatccatggtttccgcatgtcgttgtggtatgagcaccttggcttgcttcatgactctt

SEQ ID NO: 47940 - DNA, 347 bp, Glycine max
  Clone ID: LIB3139-008-P1-N1-F3
gggaaccccccctccacgacctgtctcgggtgttcgcgtgcgtcttcctcccaccggcgaaccatcaaccaatcctcccctcaacaacaacaacaacaccggcgtcaccgttcctttcaacccacgagaagcagagaccacaaccatggccgaatactggaaatccacgcccaaatactggtgcaaattctgccagacctacgtgcgcgacaccaagttcgagcgccagcagcacgaagcgaccggcaagcatcaatcggcgatccagcgctcgctgcgcgacctgcaccgcacgcgcgagcgcgaggaccgcgagcggcagcgcgccaaggacgaggtcgcgcgcc

SEQ ID NO: 47941 - DNA, 362 bp, Glycine max
  Clone ID: LIB3139-008-P1-N1-F5
ttggggccttttatcacttatagtcacccggagctcacgggttgcccgcctttaacaccggaaacaaacgcactcgttactcgattctaagaatttctaaatttctccctacttctttgtgcacgatttcttaagggaaagaaaatcactctctgtgctggtcacagacttcgtgaatcatttccttttccactcctagttgatttgctgaacactctcctatttgatataggacttcgtgtcagatctaaactgtgtctggttctctctcagttctctggttaatttcaagttcaagctggtgaaattttggattagtgctcccactctcctatctggtataggacttcgtgggtagactt

SEQ ID NO: 47942 - DNA, 304 bp, Glycine max
  Clone ID: LIB3139-008-P1-N1-G3
gcaacgatggtgcagaggctcacttatcgcaagcgccatagctatgctaccaaatgcaaccagcaccgggttgttaagacccctggtgggaagttggtgtaccagaccactaagaagagagcaagtggacctaagtgccctgtcactggcaagaggatccaagggattccacacttaagacctgctgaatacaagaggtctagattgcctaggaaccgcaggaccgtaaaccgagcctatggaggtgttttatccgggggagctgttagagaaaggattattcgcgctttccttgttgaagagc

SEQ ID NO: 47943 - DNA, 365 bp, Glycine max
  Clone ID: LIB3139-008-P1-N1-G4
ggaaaattaatgcccctttcattttctctgcatctgtagtatctatcaccaatcaattccactcttcttcccatcaaacaacaaaaaatcaatctgggaaacaaaaacaaaatgccgtcattagaggaggaactcttcccatcaaccccaggaaagttcaagatcgagcggtcccaccacatgaaccgccaactctatcgctgtttcgcctccaccagcaccatgttcctgtgggccctcttcttaatcgccctcaccgcttgctatctcagcttccaaggcttcgtcgattccggcagccgctacctcaccgcctcctggggcgggatccagtgggagaagcaggtccgcaccttcgcccagat

SEQ ID NO: 47944 - DNA, 204 bp, Glycine max
  Clone ID: LIB3139-008-P1-N1-G7
aggaaattgattggataactgccacgggggctgtcatacagaaagtcagatcagacacttcaatgacaataaccgaggataacacaaaggtatgtggatttggagggtggtttgatgtacattttcggggaagaagtgaaggatccagctgaacaagggctggcgtcaactacagagctcagtgtcccggtatttaacacactg

SEQ ID NO: 47945 - DNA, 357 bp, Glycine max
  Clone ID: LIB3139-008-P1-N1-H2
gctttgcacaaaccctaacacctaaaagccagaagaagcgaaatcgtaatcgcaatctagcggatatgaaggtcgtcgctgcatacttgctcgcagtgttgggagggaatccatctccttctgccgatgatatcaaaaacatcctcggcgcagttggagctgaggctgagcatgagttgattgagttgctcttgaccgaagtcaagggcaaagacttcaatgagctacttgctagtggaagtgaaaagatttctgcagtggctggtggtggtgcagcggtttgcttcttcttcttcaccaatcagcggttctttgttgctgatactatacctttttttttactcttattaatttctt

SEQ ID NO: 47946 - DNA, 352 bp, Glycine max
  Clone ID: LIB3139-008-P1-N1-H9
tctagatcgcgagcggccgcccttttttttttttgtttttttttttttttggttttttttttttttttttttttttttttttttttttttttttttttttttttttttttttttttttttttttttttttttttttttttttttttgggccaaaaacttaaaaattttttttttttggaaaattctaattttaaaaaataaggttttttattggttttccccaacccaagttttttttctttttttttgggggccccttttttttaaaaatatggcccccataagcccaggcccaaagggttttattttgtaaaacatttttttattttttttgaaaaaaatgtgtttttta

SEQ ID NO: 47947 - DNA, 338 bp, Glycine max
  unsure at all n locations
  Clone ID: LIB3139-009-P1-N1-B5
gagctagcaagggtgttgtagtatagttagagatatgactactacaccaccctgcatagtttgttcagctataatactacttgagcttctttacctacttttcaaacctacattgcacacaaaatggcaacatcttggtcatgttatctacttgcattgcttctttntatgtcaactattgtatcagagagtagagtggcaaggaaggacttgggcctggaccttggtgggtttggggttggacttggactgggtttgggcctggggataggaggtggcattggctctggagctggagccggagcagggtctggttctggttctggttctggttctag

SEQ ID NO: 47948 - DNA, 364 bp, Glycine max
  Clone ID: LIB3139-009-P1-N1-B6
cctttctctctctgcgacctgtttcgtgttgtagctaggctcctcaaaaatgctggcacgcctcgccgcgagtcgcttcaacgagatccgtcagattttccgtcagccttctagggctttctcaaccgctctgaactaccaccttgacacaccggacaacaaccctaaacttccatgggaattcaccgaggccaatcaagcaaaggttaaggagattttgtctcactatccatccaactataagcaatctgctacaattcctcttttagatcttgcccagcagcagcatggaggttggctacctgtttctgcaatggatgcggtagctaagattgtagaggttcctcccatacgggtgtatgag

SEQ ID NO: 47949 - DNA, 100 bp, Glycine max
  Clone ID: LIB3139-009-P1-N1-C4
tcaggtctgcttcttttggaaaagattaacaataaaagggtggagcactttttatagcaaagatgtttgggatctttcacaaggggcaaaagataaaagg

SEQ ID NO: 47950 - DNA, 369 bp, Glycine max
  Clone ID: LIB3139-009-P1-N1-E5
ctaaatcatattctaagatacacctgttgtctatgtggcgcgcactaacattcttgctggggtaacaacacaaatctctgtaacacccgttatattggaccgtatatatcacctattgcattgctacaatatcctctctatatctctccgaactctccctaatgtcaaggttgacaggctctattgtctcacccccgttgccaagtactcggttaacaacgaaaatggtgcttccattgctgcgctcaacctcatgaaccaggacagaggcctcatgtaaagcttgtactatttgaaagatgcagtccttgaatgaggcattccatttaacaaggcttatgaatgacagccttttagtaccatgtaaca

SEQ ID NO: 47951 - DNA, 366 bp, Glycine max
  Clone ID: LIB3139-009-P1-N1-F1
ttggggaagagtgtgttgaagcaacaaaggaaatacatccagggcgaacaatatagatcaggctccaaaacagttaaccaacaagcttacttttatgccagagacctcgaagtccatcccaaggacacatttgtgttcagtatagatggcaccgtactctctaatattccatactacaaaaaacatggatatggggtggagaaatttaactcgaccttgtatgatgaatgggttaacaagggcaatgcaccggcactgcccgagactcttaagaattacaacaagctggtgtctcttggcttcaagattatattcttgtcaggaagaacactggacaaacaggccgtaacagaagcaaacttaaag

SEQ ID NO: 47952 - DNA, 370 bp, Glycine max
  Clone ID: LIB3139-009-P1-N1-F4
gggtgcggtatattaaaacgtgatgggctcatctttctattactttcttcctcattttacttctttaaaaaaatattctctatatctgatatccaatccattcacactattatcatttttctatatctcttcctcaattttattacctttttcattttcctatattttattcttatccattgtcaatctttttctatatctttcatttatattcttttcttttacttaattctttagggcgacgtcttttcactcatcttttattcttctatccaaaactaatttatatctatttctctacttttcttaatttcttaacatatcatttatttctactatacttatccatttattttaatttatttttatt

SEQ ID NO: 47953 - DNA, 368 bp, Glycine max
  Clone ID: LIB3139-009-P1-N1-F5
taaaatttgaaattttaataaaccgcgatcaaagggtgggcggaccttaaaaccggaaacaaaagcaatcgttacttgatttcaagaatttctcaatttcttcctacttctttgtgtacgatttcttaagggaaagaaaatcactctctgtgctggtcacagacttcgtgaatcattttcttttccactcctagtttatttgctgaacactctcctatttgatataggacttcgtgtcagatttaaactttttctgtttctttctcagttctctgtttaatttcaagttcaagctggtgaaattttggattagtgctcccactctcctatctggtataggacttcgtgggtagacttttctacttctc

SEQ ID NO: 47954 - DNA, 114 bp, Glycine max
  Clone ID: LIB3139-009-P1-N1-G3
aaaaaattaaaattaaaaaaaaaaaaaaaaaaaaaaagaaaggaaaaaaaaaaaaaaagaaaggaaaaaaaaaaaaaaaaaaaaaaaaaaaaaaaaaaaaaaaaaaaaaaaaaa

SEQ ID NO: 47955 - DNA, 340 bp, Glycine max
  Clone ID: LIB3139-009-P1-N1-H1
gggcaaaaatggttaaaaaggcaaaaggagatttgtctgtggggatggtgaaaagatgacactgattccggaaaccagagtagaagaggtttacatcaagctaatagatgaacttgagaaaagggtttctacattggttggcattgaatgtcccaaggatgagaaacttcctcggcgcaaaatttttgacaaacctaatactcgctgattcactattatacttatggagcataatcttgtggtccgacaaaagtttataaatgttgtgaggctcattatgaagaaaagggacaaacttagtttgtaagatggaatcaacccatactacatggaatggact

SEQ ID NO: 47956 - DNA, 365 bp, Glycine max
  Clone ID: LIB3139-009-P1-N1-H7
cttcatgctttacatacctcatgacacctaagcacacttagtggagaatcttggaattgatcttggattagtgggctgtaccataactaaaattcattaatcataattagtgaaattttggctccaaagtttggctccacaaattcaatttcaaattcaagtgaaatttgaattgaaattcaaatctccctccaattttgtgtgacacttaggctataaatagaggtcatgtgtgtgcattttttcaactttgatcatttgaatattaatcttcagatttcagagctctttgagagcacaaaatttcgtgctcttctcttcctctcccttcattcatctccttcttcctccaagctcttatccat

SEQ ID NO: 47957 - DNA, 188 bp, Glycine max
  Clone ID: LIB3139-010-P1-N1-A4
accagcatttggaatggagcaaagcactggaagggcagacatagttaatttggcgggactcactgccactccaacatgacctggtaatgcttctgttgcggtaggtcttgacataccagtataagagggaggttattttctaccgacttttttcttttacaaatttttttttttaatcaaatttcttc

SEQ ID NO: 47958 - DNA, 353 bp, Glycine max
  Clone ID: LIB3139-010-P1-N1-B11
gatcgcgagcggccgccctttttttttttttttgggtttttttttatagcaagaggaataatactaaaaaaagactcaataatcgtcatcactcaaacatcgatttagaaagaaagaaaagaaaagacaaaaaaaggagatagaaatagatccttcctagcacaagaaagaaaacaccaagtttatatccgagggattgattaaccgacttatctgcaagggtgaaatctcaatcgcgattcttcaagcgttcgagacgctggttcaagtggtcgatcctgacgacgaggttggtgacggagtataggagccagtagaagaggagtgcggcggctattaggagggcgttgcgt

SEQ ID NO: 47959 - DNA, 245 bp, Glycine max
  Clone ID: LIB3139-010-P1-N1-B5
gagatttttaacctttctctctctctctctttctcgagggcatctgcgacgcgtctggtgcactgcgagctgcgctcggcgaggcccgcggttcggccgagggaaccggccggtccggttcaggttacgatccccaaacccaaacccaaagcggcggaggcggaaggcgcgaacatctgtttgcagccgcggttgtgcactcttagatcctacatttaggatcgagccgcagcgcttatcaagac

SEQ ID NO: 47960 - DNA, 308 bp, Glycine max
  Clone ID: LIB3139-010-P1-N1-B7
aaaagtagtaactagttgagtccaagacagcattcccacgtaaaagatgttcctatgacttctgctaatgatttactactactactactattaatttatgcataattaatctattcaaatctcatgtatttggagacgcattagaacttgcgcaaaccgtgtggtatgcatcgtttatttctttttttgtccttctatttaacagcttctctgcacaaagcagaaactgcaggtctatatttgctagagtaaattgtataattatgttatgatgttcaaaaaaaaaaaaattttaaataaaaaaatat

SEQ ID NO: 47961 - DNA, 275 bp, Glycine max
  Clone ID: LIB3139-010-P1-N1-C11
cagaaaatcattctccgaagaaaggttcagataactggagtgcattctagcctgcaatccaactcttcccgattttctttgttgtttctatttccttgattgttcatgacagcctatttttttgtgtatagctagaagaaaagctggacggtaatatatggtgtggccaatgtatcagtttgaagagagctttttctatttttttggggtaatgttcggatgttgtgtgaaagatagatagataaaattaaatgtcttgatgcgtatttactact

SEQ ID NO: 47962 - DNA, 349 bp, Glycine max
  Clone ID: LIB3139-010-P1-N1-C3
gaaattttaataaaccgcgatcacaggttgccgcaccttaaaaccggaaacaaaagcaatcgttacttgatttaaggaatttctcaatttctttctacttttttggggtcgatttcttaagggaaaggaaattacttttttgggttggcacaaactttgggaattattttcttttccaattctaggttatttggtggacacttttctatttgatattggacttcgtgtcagaattaaaccttttctggttctttctcaagtctctggttaatttcaaggtcaagctggtgaaattttggattagtgcttccactcttctatatggtattggacttcgtgggtagacttt

SEQ ID NO: 47963 - DNA, 355 bp, Glycine max
  Clone ID: LIB3139-010-P1-N1-D4
ccgcgcgctctgcaccggcgagaagggcgccgggcggagcggcaagcccctccactacaaaggctcgtccttccaccgcgtgatcccgaacttcatgtgccagggcggcgacttcaccgccggaaacggcaccggaggcgagtcgatctacggcgccaagttcgccgacgagaacttcgtgaagaagcacactggtcccggcatcctctccatggcgaacgccggtcccggaaccaacggatctcagttcttcatctgcacgacgaagacggagtggctcgacggaaagcacgtcgtgttcggacaggtcgtcgaggggatggacgtcgtcaaggagatagagaaggtcggatcc

SEQ ID NO: 47964 - DNA, 279 bp, Glycine max
  Clone ID: LIB3139-010-P1-N1-E12
tcagcaactttttagtttcgttgccttccattggttttctctctcaatctgatcgtgaggacagctcatgcttccatacctccaaaagtttactgggaaaggatgcttccaaataccccaatgcccaaagcaatcatagactttctaaacctttatcaactttctctttggtattgtgctaaagaaacccaatctacagatcaaatattcctgtatgatgcttagaaaacccaatctacacatccaagtccttctatcttttattgtgattagaaaacc

SEQ ID NO: 47965 - DNA, 202 bp, Glycine max
  Clone ID: LIB3139-010-P1-N1-E3
ctcgagccgattcggctcgagacttgagagtggggtatacatgtgcaattgattttgtaatcatagttcattaataggtgttgtactttttcattttgtggtcatgagatttatggtttggttgtgtttatagcattcttggatatggatcatgtaccttgaactctagaattatctgaaaaaaaaaataaaaatataaaaa

SEQ ID NO: 47966 - DNA, 353 bp, Glycine max
  Clone ID: LIB3139-010-P1-N1-E4
gtcaagaaggagttgctcacattggtgaattgaaatctggtgtctatgttccactgcctacaaaaactaatttggtggaaactcccaaggaatggcaactggatctaccttgtgacaaaattcctagtgtcttaactacaactgatgagagattggtaggcacagaacatgagggatatgatccttttcttggtggaattcaaaaatatgctactcccatgatgcccctagatgaagaaattctttctaaggttgcacaagatatggttgaggaatggtttgattgtgttgatgaggaggattcctttgaggaagtttctttaagtgcagcacttaatggtgttgagggtttg

SEQ ID NO: 47967 - DNA, 170 bp, Glycine max
  Clone ID: LIB3139-010-P1-N1-E5
gttatttttgcgttttattcattggaaagagtgaaaggtggtgacaaggtggaaacaaacataacctaacaacaaaatcatgggtgggaattatttatggcttggcttacacatgtattcacttgtccccattatgaccaaaaatgtgttaggtttggtggaaaaataaa

SEQ ID NO: 47968 - DNA, 193 bp, Glycine max
  Clone ID: LIB3139-010-P1-N1-E9
agggtggttagtcaccgccaagcagagtttaacaggttgagaagagaacgtgaagagcgaatctctaggattttacagtccaggagacaggagagggaaaaaatgaggaagttgaagtattatctcaagttagaagaagagagacaacaaaaattgcgtgaggcggaggaagctcggaaacgtgaagatgctg

SEQ ID NO: 47969 - DNA, 335 bp, Glycine max
  Clone ID: LIB3139-010-P1-N1-F5
gttccagatcgccttccgaacgctcgacacgcgccgggccgttgccctctccgccctcctcaccgacgccgacgacatcatcaacagctcccccgacggtgaggtcgacgacaccaccggcctcatcctcaaactcaagtccttctgcctccgcatggacgcattcgggttcttcgccttcgtcagcgccaagaagaaggagctcgacggcctacgcgccgagatgcctgtggctctggcggagtgcgttgatccggcgaaattcgtgctggaggcgatctccgaggtgtttccggtcgacaagagaggggacaaggccggccacgacttgggct

SEQ ID NO: 47970 - DNA, 371 bp, Glycine max
  unsure at all n locations
  Clone ID: LIB3139-010-P1-N1-G3
gaaaaagtctttctagcctggtcataattatcanccattacgtggnatggtattgaccaaaacnttagtgcaactttgcaatnttagaaagggttagcagattgtgattnttctcaagagaaactttaagcagatgtctaatgttttatgggtggctcctgaggacaaggcgagtttatggtcacaacttcattatgtttcgtgcaataatctggaaatgcaagaagcttatcttgtcaatctcgtaaatgtgttacgagaattgtatttgcacagtccagaggaagctcgccaattgagaaggaaagctctctctcgtattgaatggctgcaaaaagctgatgtgcctaccatagcacagattgaagagt

SEQ ID NO: 47971 - DNA, 83 bp, Glycine max
  unsure at all n locations
  Clone ID: LIB3139-010-P1-N1-H2
aaaaaaaaaaaaaaaannaaaaaaaaaagagaaaaaaaaaaaagaaaaaaagaagaaaaaaataaaaaaaagtgggcggcgcg

SEQ ID NO: 47972 - DNA, 335 bp, Glycine max
  Clone ID: LIB3139-011-P1-N1-B7
gggtgaacaagtccccaagacccccgagatcgcatacttgctttctgctgctcctttggagggagctgctgatcaagctcagaagaccaacaactcgcaagatgtggtggctgcacaagatgattctgcaaaaaccctatccgaagagctctcacacattgaatcccacctgaagtactttgagaccccttctacacttgatgaagcctgtgctgatgctacattggcgtctatgctcggcggagacacaactcatgacgccgccggaaaccctatgaacctttggagcttcgacgacctgccttccatggcaggagtcttctgaacacccttta

SEQ ID NO: 47973 - DNA, 558 bp, Glycine max
  Clone ID: LIB3139-011-P1-N1-C4.R2
gaatacgaacttgtcatgcatttatttattttttggtcaaattagacttggacttcctcgtaggacccaaatatcagaagttgtccaagcttctgtctttactttgaattggtcctggtccatccacttgtagaaccaaagaaaatgaaaacaaagcacttctatccatacttattacactgggaaaaaaccagtccaatgaatatggtcaagtgttctacgcaaaccatatctattaacagcttcattagcagctctaaagccaccaccataagctggggaagaatcattggcaatctgattcttgaaaaattcacccaatttattttcaacatgagactttgcacccttctttgaggaggagtaggaagaggcagcacttgtggatgttgatggcatgttttgaaagctaggcattacttctgactcaagccacatatacgaaagaacctgacaaatgccttcctctacttcaggattaaggttgcgataaccattaaggcgtagccatgcatgcatcaactcatgggcaagtatagcacctgtgagtaacctgca

SEQ ID NO: 47974 - DNA, 334 bp, Glycine max
  Clone ID: LIB3139-011-P1-N1-E2
ggttcacatcgatgtgatcatgttggctcacaatccaggtgggaaagagagaacagagaaagagtttgaggctctggccaaaggctctggattccaaggtttccaagtcctgtgctgtgctttcaatacctacgtcatggaatttctcaaaaaggtttaagttctttggcgtggattcatatcaagttgcatttggattttgactttgagactctgcttggggtgctacttacgaatgttttcccggaaaaacgtaaatttcttctaatgctttatgaaaagaataacgaacaagttcaatgtataccgcctttataaaataataacaagtttc

SEQ ID NO: 47975 - DNA, 257 bp, Glycine max
  Clone ID: LIB3139-011-P1-N1-F11
caattagtggcaagtcctgctactaggctgtagtggaactgaaccttcttagtttgtcttgtaattttatccaaaaaaagggttgtaatgttaatgtctcttcactttctgccactcctcatttttttaaagatgatgaatattgtgatgatatttgacatgcatcttagtttacttgaaaagccattgtgtgatatggattctcctaagatatggatgtgaatgagtagaactaattattccttggtcttttagtg

SEQ ID NO: 47976 - DNA, 299 bp, Glycine max
  Clone ID: LIB3139-011-P1-N1-F6
ggcaaactcattttgagcttcaaaggtacaaatgcggaagggatttcttttatagctgcatgatcttatactatttcactaaaaggatagtaccagtataatttcaacaaataatgttcaaaattttttttgcaagtattagtttacgatatccaaatatccaatttcctcaccctttccacccaccccaatttacacacttaattctgtatggtgttacatacaacttgctcctatatttaaagaaataattttttaaacgttatgattattactcaagctgcactttacttttttaa

SEQ ID NO: 47977 - DNA, 363 bp, Glycine max
  Clone ID: LIB3139-011-P1-N1-H6
ggaggagataaggaaacacgcaggtgatgcaagaaccaagtcggtatcgatgccttacagagttcaaagaatagaggaatttgtcaagcaacttgaggcaggagacctgaaactccgagtccgagtacttgagtctgaaagagctgctcgaaaagcaacaatattacaaatggctaccatgtattcagtattggggggaaccctgctaaaccttggtgtcactttgagtagccaaggcaatcaagcttttgcaaatggatcattcattggtgcaggcattttaggggctctatttttaaggtctatgcaacgggtgaagaaacttgaccagtttgagaacatgatataattcgttcccaccaa

SEQ ID NO: 47978 - DNA, 385 bp, Glycine max
  unsure at all n locations
  Clone ID: LIB3139-012-P1-N1-B3
ggttcactctatttacaaancttctgtttncctcactacgcgtgagcaccatgaatattaagttcacttttgcccggaaaggccctggtcaatgcnnagatggtattatagagaaaacattcttgtggggtaggtactctatggaaatgtccgctgtcatttacaaggactgggttttcactgatcaagcattacctaatgatcttgtaaagagaggagttgctgttaaggacccatctgctccccatggagttcgtcttttgattgaggactatccttatgcttctgatgggctagagatatgggatgccatcaagtcctgggtgcaagaatatgtctcattctactacaagtcagatgaggaactccaccaagcttggagttc

SEQ ID NO: 47979 - DNA, 134 bp, Glycine max
  Clone ID: LIB3139-012-P1-N1-B7
aaaaaaaaaaaaaaaaaaaaaaaaaaaaaaaaaaaggaaaaaaaaaaaaaaaaaaaaaaaaaaaaaaaaaaaaaaaaaaaaaaaaaaaaaaaaaaaaaaaaaaaaaaaaaaaaaaaaaaaaaaaaaaaaagggg

SEQ ID NO: 47980 - DNA, 348 bp, Glycine max
  unsure at all n locations
  Clone ID: LIB3139-012-P1-N1-C2
gggttggggaattttataaacccggaaccccgggtggccgacctttaaacccggaaccaaaggcattggtacttggttttcaagaatttctcaatttcttcttctttttggggacaattcttaggggaaaaaaatcactctttggctggcacagacttcgtgatcatttcttttcactctagttattgctgaacacttctattgatatggacttcggtagatttaaactttctgttcttctcantctctgttaatttaagttaagctgggaaattttggatagtgccccacttcctatctggataggacttcgtgggagactttttacttctctcttttttcactctc

SEQ ID NO: 47981 - DNA, 363 bp, Glycine max
  unsure at all n locations
  Clone ID: LIB3139-012-P1-N1-C5
ctcgagccgaaattttctattgaccttctcgggggaggaattttagtggacaaaactggagattggatcacacttatacanaatttttcaattagtaacttgttgagagttgctgcttgaagaaaggcttgttaatgggtaagattgtgatgtctgggaatgcagcagtcaaaaagagtgattgggcctcattggtacaagtgtttttaacaaacagcaacagtacagagcattttgatgcatgtaaatggacaaaatcggaaccacattcctgggaattgatcttcccaatagaggtatgtggtcctaataatggttttgaaatgtggagttctgagtgggcaaatcaaacttcatggcatt

SEQ ID NO: 47982 - DNA, 367 bp, Glycine max
  unsure at all n locations
  Clone ID: LIB3139-012-P1-N1-C6
ggtctatatttccgttttaacttcttttttttaaccctccaactttgagttactccacccggaacaagcacccctcgggggttcttcttcccaaaggtacccacccgccgaatcttaacggaagggcccctacccttcggccggggacccttcacaaggaggatacccttccgcaggcgtatccagcaacagggtaccctncaccctacgcgccttctagtacgctcaagcctcgccgcaacaacaccagaattcatctggcccgggttgcttagaaagatggtttggctgctctctgctgctgttgcctgttggatgcctgcttctgagaaagaaaagagaggttgctttgcacaaattggatttg

SEQ ID NO: 47983 - DNA, 198 bp, Glycine max
  Clone ID: LIB3139-012-P1-N1-D3
ggccgctcgcgatctagactcgagccgctcgagccgaaaaaaaaaaaagaaaggaaaaaaaaaaaaaaaaaaaaaaaaaaaaaaaaaaaaaaaaaaaaaaaaaaaaaaaaaaaaaaaaaaaaaaaaaaaaaaaaaaaaaaaaaaaaaaaaaaaaaaaaaaaaaaaaaggggggggcccccccttagggagcttttcac

SEQ ID NO: 47984 - DNA, 328 bp, Glycine max
  Clone ID: LIB3139-012-P1-N1-E1
tcgagctcgagccgaatcggcttcgagcacatcaacattagtgttgtggacagggcacatggtatgacatttgttggtgggaggaatgaaagggagttgggatccattaggcctgcaattttgaaatagtaagtaccattatcttgtcatatttcttggttggtagcttctggaaggcctggcctttaagttctcgtggaatccaattaatttgacatattaaggcaattctatcatgtgtatataattatgatttttttttagctcccatagcaaaagatgtacttagattcattttttaatgaaaaaaactgcaattatttcttat

SEQ ID NO: 47985 - DNA, 247 bp, Glycine max
  Clone ID: LIB3139-012-P1-N1-F6
cacacctgaacttattacctctaggcattccttagtttcattgttactgatatgtcacctttggctttggttattttgttaagtcttatcttatttgcttgtaaatttatctcgtgtccagacttaaaacctatgaggtttagtttttcaattttgtaggctgttgtatctattggggttagtgtgttagtgaggtacttttttttaccaaaataaataaaagtacctcacttttatttattttggt

SEQ ID NO: 47986 - DNA, 230 bp, Glycine max
  Clone ID: LIB3139-012-P1-N1-H1
ttcgctcgggggggcttgggatgcccggtggtccttacttatttggcggtgatctggttggaggcttggagaaaaaacctgcttctgggacgtattaaaacctaatattttatctgggggcctgtggatctgggggtatctttggagggcttctttccggagatttcaatatttatgccaccccagctttcaatgccgaagaaaggaggtgggggacatattggccttgg

SEQ ID NO: 47987 - DNA, 200 bp, Glycine max
  Clone ID: LIB3139-012-P1-N1-H3
ccaggattttgccttcctcctttggcttcttaggccccaaatgtgcactttgggactgtgcaaagcctgcgcaaggggtggactggtgcccaaactatttgagtagcttttatgctggcctagcttttaatggaagggcaccccgcatgggccctgttttacgaactgggggcatttggttgaaaggaaaattacttttt

SEQ ID NO: 47988 - DNA, 112 bp, Glycine max
  Clone ID: LIB3139-013-P1-N1-A12
aaaaaaaaaaaaaaaaaaaaaaaaaaaaaaaagaagggaaaaaaaaaaaaaaaaaaaaaaaaaaaaaaaaaaaaaaaaaaaaaaaaaaaaaaaaaaaaaaaaaaaaaaaaaa

SEQ ID NO: 47989 - DNA, 366 bp, Glycine max
  Clone ID: LIB3139-013-P1-N1-A2
cgggtgttaagaagaatgcctctttctatagggggaggagctggtgcaaagaatgctattctcatgaatatgccaaatgctgttctttcaatgtggagatattttgttggagatctcgtctttgaagtttctaagatgacttctccctacattaaatgtacagtctctttcttcatagcatttggaaatttggctgatgacaccatcaattttgaggcttttccccacaagctggtgcagtttggagagattcaggaaaaagttgtattgaaattttcacaagaggaatttcttacagcttggtcaactcaggtgcgtcctgcaacaactctgttggctgatgggtgtccatatttgtatgctatg

SEQ ID NO: 47990 - DNA, 368 bp, Glycine max
  Clone ID: LIB3139-013-P1-N1-B5
ggtttgcctttaattaatggctgccacgagaccggggcgggggttgttacgaaggggtggcggaggaagtaggactattggggttgccacagaagttaatgcttcttcttcttctcagaaaatcatcgacaaggaatatgaacacagtgctcacaattaccatcctcttccgattgtatttgctcaagcaaagggaacctctgtttgggatccagagggaaacaaatatcttgattttctatcaggttactctgctgttaatcagggacactgccatcctaaaattctgaaagcattgcaagaacaggcagaaaggttgactgtgagctctcgagccttctacaatgatcgcttcccagactttgctg

SEQ ID NO: 47991 - DNA, 67 bp, Glycine max
  Clone ID: LIB3139-013-P1-N1-D11
aaaaaaaaaaaaaaaaaaaaaaaaaaaaaaaaaaaggaaaaaaaaaaaaaaaaaaaaaaaaaaaaaa

SEQ ID NO: 47992 - DNA, 323 bp, Glycine max
  unsure at all n locations
  Clone ID: LIB3139-013-P1-N1-D4
gttatttctttctagcaagtatcccattgcatgatgcgctggtggtttncatggtggtggggnnnntnnnagtntatgaaacaatttctttaacagtaaaggggaaaaaatgcgaccgttaagagaataacgtaattaatctataagtggttttaaggggaaaaacatgacacatatgatcaccaacctcctcttatgcaaagggaaaaaatgaccaaggtgacgattattaaataaataatatctaatagaacatcgtttaaaccgtttaagatgccgattacaaaatacaaaataaataggttggaaaagaacatggctat

SEQ ID NO: 47993 - DNA, 368 bp, Glycine max
  Clone ID: LIB3139-013-P1-N1-F4
gctcgggggccgcccttttttttttttttttttttttttttgggggggttcacaagaaaatgtaatttagagaagaaagaagaggtccaagaggggaaaaaaatcaaccaggcaaaagaatataaatgagcaaacactcaatttccagccactgcttcaatcaagatcttttacgatcctgtcataagtcagtggtaaggtatgtaccggtagtatacaacaatgctactttcagtactatgatgcatatatccagctctaccctgaaagcatgagtgacagaatataaaagtgaaaaaggcataatcgtttaacgaaattcctcaccaactcagtcggtgacagttcaaaagaacattttcctgaaa

SEQ ID NO: 47994 - DNA, 308 bp, Glycine max
  Clone ID: LIB3139-013-P1-N1-G11
ttccagcagacatgccttgactaacttgtggaaccggggagcagtgtatggtatccaggacgtactacaactcgtaagccgtgagtccgctgacagaatgaatgaagatgtgcaatgtgtgcaagctagtgccggctgagctcattaattactgttgacttaagatggaactatttatgcctgagcagttaactagaaaggagtggagccagctaaaggactcgaaaacggatattgtacaaattaatcatacagcattagaattctccgacagaaataaatcgacatggaaagatcgttcagattac

SEQ ID NO: 47995 - DNA, 90 bp, Glycine max
  Clone ID: LIB3139-013-P1-N1-G3
aaaaaaaaaaaaaaaaaaaaaaaaaaaaaaaaaaaaggaagggaaaaaaaaaaaaaaagaaaaaaaaaaaaaaaaaaaaaaaaaaaaaaa

SEQ ID NO: 47996 - DNA, 373 bp, Glycine max
  unsure at all n locations
  Clone ID: LIB3139-013-P1-N1-G5
tcgggggtaaatccggggctggtttctggaactttggcatgcgaatctccgtttgttttggcagaagcacaggttctccgcgtcagccatggccgatgacttcgacttcgcggataaagttcctccttcattcgatcgcgtgggaaatgtgatcaaggattctggatccaaagggttcaatccaggattaattgtcctcctggttgttggtgggttgttgttgacattcctcattggaaattatgtgctctacagttatgcacagaagaccctccctcctagaaaaaagaagcctgtttcaaagaagaagatgaaaaaggagagactgaagcaaggtgtctctgcacctggagagtagactntgtactcagtt

SEQ ID NO: 47997 - DNA, 387 bp, Glycine max
  Clone ID: LIB3139-014-P1-N1-A10
cgaaggttgggaattgggttgggggatgccatgaggttatccgtgcatatgctaaacgaacctgcacttatgaagaagctatgaaatttagttcgttggttaaggattgtaacctacagtatattgaggagcctgttcaggatgaagatgatattctcaagttttgcgaagaaagcggcttacctattgctttagatgaaaccatagataacattcaagaaaatcccatggaaaagctagccaagtttactcatccagcaatagctgctgttgttattaaaccaagtgttgttggtggatttgagaatgcagcattaattgcccaatgggctcaccagatggggaagatggctgttgtaagtgctgcatttgaaagcagtctgagtc

SEQ ID NO: 47998 - DNA, 371 bp, Glycine max
  Clone ID: LIB3139-014-P1-N1-A4
gtatgctgatatgcactattcaaataggagcattagctatgtttgttaatgtcactttatggtacgtggagtgtcttaggtgacttacccacagaacatagaacgagtgaagtacgtagagataaaattatagaacaagaatgaaggtagcacaggtactgcacatgaacggcggcgttggacacgcaagctatgcaaacaactcccttcttcagcaaaaggtgatttgtttgacaaagcccataagagaggaagccataacaagcctctattgcaacaccgtccccagaagcttggcggttgcagatttgggttgctcttctggaccaaacactttgcttgttgtgtctgaattcatcaaaattgtggag

SEQ ID NO: 47999 - DNA, 362 bp, Glycine max
  Clone ID: LIB3139-014-P1-N1-A5
cgccgaaatctaaggattattggtcctctatcgtgggatctgcctacatgcatgccaagtctgaaactgcaaatcggctgaggtcagatcctcattcctttcaacctggcggggcttattctgagccttggtggcgtggtattgggtacaatcccatggcccaaacaatggctggggcaaatgcgttcaattcctcgtctcttgaatgccctaatggtgattctgaatccaatgaagagggccagtctttgtccaatagcgggatgaatgaggaagatgatgatgccactaaggattcgaagcctgctgctcctaatgaaacaggaaattatgagcaagaacagcaagggatgcagcatact

SEQ ID NO: 48000 - DNA, 367 bp, Glycine max
  Clone ID: LIB3139-014-P1-N1-C1
cggttggggttcgctgatccatctcttgtatacatggcttctttctttaccgtgtcacttgcttgggaaatcaccactgcaatccggggtcatgccaccggttccaaaggggtcaacccttttggaacaacacctccattcatggtccaaaacctaactgatagaatgcatggaaccaagctgcatcaaggtgaagactggcatcacaacgagacagtcaagcactggacttataccatagatggtaaggttacaacatgtctggagagtattgaatccattgatgaacagagcaaaacaatcacctacaagctcttcaagtggtgacattgatcataattataaggaactttaagttcatctttca

SEQ ID NO: 48001 - DNA, 230 bp, Glycine max
  Clone ID: LIB3139-014-P1-N1-C11
acgaggggtttgccttgggccgcttgtgatgattcaggaactaataaaaacatggtgtaaggttctggaatctgcgcacagcggatggagatggacacacccaccacacagctgtgacgcatagccttcatgaggggataagacctatcatcttccagaaagaccctactattctctgtgagagcacaaataactctggcgctctgtctatagaaaaagatgcaatacat

SEQ ID NO: 48002 - DNA, 354 bp, Glycine max
  Clone ID: LIB3139-014-P1-N1-C7
tggggttcgcggatccatcttttgtaacacaacgctctcttgtctcgcaaccaaagcacttgatccagcgactactctactcaaaaaggatttgggacatcatgtgcagagattcgaaaagtaaactttcttccccaaccctcgtcgtcatggagaatagtaacattcagaagcagaatctggatggtctctacaactcggttttgcttgaattgtctgcatctgatgattatgaagctttcaaaagagaggtggaggaaaaaggcttagatgtgaacgaggcaggcttttggtacggtagaagaattgggtcaaagaagatgggatctgaaacgaggaccccagtgaagattg

SEQ ID NO: 48003 - DNA, 367 bp, Glycine max
  Clone ID: LIB3139-014-P1-N1-C8
gatcatttgcgttgaagatctgatccatgagatcatgactgttggacctcacttcaaggaggccaacaattttctgtggcctttgaagctcaaagctcccctgggtggtctggagaagaaaagaaatcattatgttgaaggaggtgatgctggcaacagggaggattacataaatgagcttattagaaggatgaattagttttttttccccataccgttagtgttaattttgacgctaaaacactctttgtttatgcttttattattttgaatgatgtatgtgctgattgagatattaattcgttgcttgccattcaatgaaatgttccttagctttttgagataagttaattaaatttgaatttga

SEQ ID NO: 48004 - DNA, 393 bp, Glycine max
  Clone ID: LIB3139-014-P1-N1-D2
cgtccttagcttcggattcgggttggggattcaagttaatttggtactccaataattttttctgttacttaagagaccttgctggaaaggttctttcttagcatggtaacaatgggtttgaaagcactttttgtttggtgcataatatggatggcgtttgcacagttgtcactaggaggaagagtgaggcattacaagtttgatgtggagtacatgatcagaaagccagattgcttggaacacgttgtgatgggaatcaacggtcagtttccaggcccaactattagggctgaagttggtgacatccttgacattgctctcaccaacaagcttttcaccgagggaactgttattcactggcatggaatcagacaggttggaactacttgggca

SEQ ID NO: 48005 - DNA, 367 bp, Glycine max
  Clone ID: LIB3139-014-P1-N1-D3
ggttgcacagtccagaggaagctcgccaattgagaaggaaagctctctctcgtattgaatggctgcaaaaagctgatgtgcctaccatagcacagattgaagagttccattcgatgcagaggatgatgaatgctcctgattcaaatgataatattgatctagtgttgagcattgatttgttgggtttacaaggagcaggcaaagcttttccaaacaagattgtttttgatgataagcttgtgttggctaacacacaagaattctttgatggaaattttccagtggattcttggttaccaatttttgtgaattgtctttatcctgtaagtcaattaccttcagaagctgtcgttgtaaatgtcacatg

SEQ ID NO: 48006 - DNA, 250 bp, Glycine max
  Clone ID: LIB3139-014-P1-N1-D4
gtcaaagatatcttctctatgcatcaaacgggtgcgattttctaattttgttcaacattctctcatataaagaagatagtgaggttaagatttgaaaaagattggaagacccttgtgcagttttaggtggaaagcggaagccagtgttgattttattttctctcaacttaaagaatgggttgtaattcaaaaatatatatttattaaaaaagaataatcgttgattctaattcagctacatttcactctt

SEQ ID NO: 48007 - DNA, 373 bp, Glycine max
  Clone ID: LIB3139-014-P1-N1-E1
tgggttgaggttcaacccgaatcggttggaggaatgattaaaatgggggccacagttggtattcctgagaatacaggtatagcattggcctgtgctatgaatagttcttttagggggcgcgccagttctgatatttacaccatctgctctcaagactgtgaattatggaatcctgcttgcacaaaagcaatgactatgtcatttaatccaaacccgtgttctgatgcatggagtttggaatttctgaagcgtaccggatttcattgtgatatcatttgtgtcactggatggactgccaccccaatgcaggatgttcaggttacaattgattggtttatttcctctcaggaatgtgttcccaggacctattgtg

SEQ ID NO: 48008 - DNA, 399 bp, Glycine max
  Clone ID: LIB3139-014-P1-N1-E2
cccccgtcctaagcctcggatttcggttcgggatttcccctccactccacattgggcacccttcatggtcatggcaaaactaaaacacccttcatcttttgtcacattggtggcacttcttctagcagtgtctcttttcgttgctccaacatcctcaacatccagaaaaactattctcaagcaccacccttacccaacaaaagggttccgagtcatgcttcgccacgttgattcgggtaaaaatttaaccaaactagagcgtgtccaacacgggatcaagcgtgggaagagtaggcttcagaggcttaatgcaatggtgttggcagcatcaacactagattctgaagatcaattagaagcccctattcatgcagggaatggagaatatttaatggagtt

SEQ ID NO: 48009 - DNA, 369 bp, Glycine max
  Clone ID: LIB3139-014-P1-N1-G2
tggggcgggttccttgaagggatttcccaacctggtgaaggtggttttgtcccaaaatctaatttgggttaaaaatttggttttggacaaaacctttcaaccggcatacattcaagcgatcagatctgctcaacactttatttatattgaaaaccaatacttcattggatcatctgatgcatgggcagcttataaagatgcaggggctgataatctcatcccaatggaattggcactgaaaattgctagtaaaattagagctaaggagagatttgctgtctacattgttttaccaatgtggccagaaggtgatcctaaaactggggctatgcaagaaatcctcttttggcagggccaaacgatgcaaat

SEQ ID NO: 48010 - DNA, 238 bp, Glycine max
  Clone ID: LIB3139-014-P1-N1-G3
tggggatattttggtggccttaattaaccaagtgaatttattctaatcctgaaggtgaggcaacaagcagaatcttgctctgttcaagtgctttgtcctgttaaatgtaatggaatgtggatggttttatctgtcaagaagcaacgatgtcttttcaacagtgttcaagaattggcagctcaattatgtaaaagtaatcttttgatctatacaactggaaagtgttttcttttatcat

SEQ ID NO: 48011 - DNA, 365 bp, Glycine max
  unsure at all n locations
  Clone ID: LIB3139-014-P1-N1-H12
cgctcgagcctaatcggctcgagactgactttccctcagggcacttcccgaagtggtaagagaatgcctctttatatagggggaggagctggtgcacagaatgctattctcatgaatatgccaaatgctgttctttcaatgtggagatattttgttggagatctcgtctgtgaagtatctaagatgacttctccctacattaaatgtacagactctttcttcatagcattaggaaatccggctgatgacaccatcaattgtgaggcttttccccacaagctggtgcagattggagagattcaggaaaaagttgtgttgaaattttcacangaggaatttcttacagcttggtcaactcaggtgcg

SEQ ID NO: 48012 - DNA, 373 bp, Glycine max
  Clone ID: LIB3139-014-P1-N1-H2
ttgggggcccatgccttcaattgaggttggtcctgttggaggtccttgccactggtcaggatcctgcccagaatgtggagagttctcactgcatcaccatgatggaagctatcaatgatggcaaggaccttcatgtttccgtgaccatgccctccattgaggttggtactgttggaggtggcacacaactcgcatctcagtcagcatgtcttaatttacttggtgtcaagggtgccaacaaagaatctccgggtgcaaattctaggctactggccaccattgtagccggttcagtcctcgccggggagctatcgctcatgtctgctattgcagctggacaacttgttaagagccacatgaaatacaacagatc

SEQ ID NO: 48013 - DNA, 369 bp, Glycine max
  Clone ID: LIB3139-014-P1-N1-H3
cgtcagccggcaaggtttagaagacagagaaaggcgaggccccatcagggaattcaagcgcggcttggacccattgggcacttaaaatcccttttccaaccttaattaattttctaaattaatttcatttaagtcctttaatatgcagaccctaaatcaaccgtgccccaaccctttcaactatctaacccgagcgcgacactcggctattcggttcgcgccgacccgattcaccgtcaaatgcggctacggctttgaatccgcgagtttctcgcagggagtcggcgcgagccgagccgattggcaaagctcgtgcgccatcttagccagtaaagtcgtgtcgcagagggaagattctcccgcccacgg

SEQ ID NO: 48014 - DNA, 366 bp, Glycine max
  Clone ID: LIB3139-014-P1-N1-H4
ggcaactggatctaccttgtgacaaaattcctagtgtcttgactacaactgatgagagattggtaggcacagaacatgagggatatgatccttttcttggtggaattcaaaaatatgccactcccatgatgcccctagatgaagaaattctttctaaggttgcacaagatatggttgaggaatggttcgattgtgttgatgaggaggattcctttgaggaagtttctttaagtgcagcacttaatggtgttgagggtttggactatatggaaagaattcctcttgccacatctgagggatttcctcatgtgctttcacgcaaaaatggtgaaaaaggcaaaaggagatttgtctctggggatggtg

SEQ ID NO: 48015 - DNA, 367 bp, Glycine max
  Clone ID: LIB3139-014-P1-N1-H5
gcactccatctcctagtctctattgtttttcccattccctttcttcacctaatcctgctcctatttccccactaatcacgcaggttttacctggcgtgggttggattgaaacatgtcaggtttgaactggttagtggaatttaatattttaaggtaaaccccatctctttgcggctatttgggggcttgtttccttggggagaaaggtcatccatgtcataggtggcatcccaggtttccaaattttttttaaagtttgattatttttaagaatatcttaagagattatgtctccaatcaggaaatgggttgttggaagatatgtatttcactcctttcatttgatcacatatttcatcctctgtaa

SEQ ID NO: 48016 - DNA, 366 bp, Glycine max
  Clone ID: LIB3139-014-P1-N1-H6
ctcgctcattatcggctcgagagggactttgttgcttggtgatgtccctttctgttctcttcactcttggtcttgcgagagaaagccatgccagagacgaagatttttggcatgctgtttggccaaacactcccattccaagttcattgcgagatcttctaaagcctggccctgcaagtgttgaaatcgatgatcaccctatgcaaattgaagaaacacagtacccgaaaaccttcttctataaagaagaccttcatccaggcaaaacaatgaaagtacaattcagcaagcctgcctttcaacaaccatggggtgttggtacatggttaaaggaaattaaagacactactaaagaaggatatagtt

SEQ ID NO: 48017 - DNA, 372 bp, Glycine max
  unsure at all n locations
  Clone ID: LIB3139-015-P1-N1-A3
gaggaaaactttaagtcagatgtcttaatggttttaatgggtgggctcggctgaggacaacaggcgagtttaatggtcacacacttcattatgntttcgtgcacataatctggaaatgcaagaagcttatcttgtcaatctcgtaaatgtgttacgagaattgtatttgcacagtccagaggaagctcgccaattgagaaggaaagctctctctcgtattgaatggctgcaaaaagctgatgtgcctaccatagcacagattgaagagttccattcgatgcagaggatgatgaatgctcctgattcaaatgataatattgatctactgttgagcattgatttgttgggtttacaaggagcaggtaaagcttt

SEQ ID NO: 48018 - DNA, 173 bp, Glycine max
  Clone ID: LIB3139-015-P1-N1-C11
ttaagaatgaaattctgagttctaatgccactaaccgtatgctgacgcgacttcttgagaactgtaagagtctcaaatatctggttgatgagtgtccttttgcatttgtgaactagtatgtaatattttattcacttaaataaagcgcattactatgtgcaatgagtgtgttt

SEQ ID NO: 48019 - DNA, 310 bp, Glycine max
  Clone ID: LIB3139-015-P1-N1-D6
gaggcactatagtaaaaaagggacattcattcatctagggctgcccttattgcttcccagcaaccactctccccaagaagatgctgaagctctcagaaaggcttttgaaggatggggaactgatgagaacactgtcatagtaattttgggtcatagaactgtgtatcagaggcagcaaatcagaagagtttatgaggaaatttaccaggaggatcttgtgaagcgcctagagtctgagatcaaaggagactttgagaaagccgtgtacccgtggatactggaacctgcaaaatcgtgaatgctggttttg

SEQ ID NO: 48020 - DNA, 303 bp, Glycine max
  unsure at all n locations
  Clone ID: LIB3139-015-P1-N1-E3
tcgganaaaaatattttattaaaaaaaaaataaaaataaagggatggtttaaatattaagatgaaaaaaaaaaaaaaaaaaaataaaaaaaaaaaaaaaaaaaataaaaaaaaaaaaaaaaaaaaaaaagggggcgcccccccattattaaatttctcacccccgaaataaatttcgacccggaccttgaaggcttcccaattttccttttatgaagtctatttaaaccttgccgaaataatggtaaaaactttttccttggtaaaaatttattcccttcaaaattccaaacaaaaaacaacc

SEQ ID NO: 48021 - DNA, 184 bp, Glycine max
  Clone ID: LIB3139-015-P1-N1-F6
tagcgatattatttttttcactggatggacttccaccccgatgcgttatttttcaattacgattgcactaattatttccttttaaaaattttctcctattacctatttttttttttaattcacacaatcactgtttaaatttaatgtaccatgtgcttctgttggcttgacatcaagttacact

SEQ ID NO: 48022 - DNA, 237 bp, Glycine max
  Clone ID: LIB3139-015-P1-N1-H6
ggttttgaattttgtaatttgtcaattaaagttgataatggaatgtgtcctgccattcctcttataagttacttgggcaagtaatactgtgtttccagtatagagtttcttatgtggtctatgttattgttactagttgcttagttttttaaatctgtgcattggtctactatcaataatgtattgttgtcttactgaactccatgtagaggaatggcaggacaattcaatctcgag

SEQ ID NO: 48023 - DNA, 330 bp, Glycine max
  Clone ID: LIB3139-016-P1-N1-A12
gtccaagtgattcaatcaaaccgttcatgcttaatcaagttgggaacaacaaaaaaaatcaaaacaatgtttctgggtttcggtttcatttcatcaagatgatctgtttatctttttttttttaattttaatttaaagtctttgtattttgtatgtaaagatgtaaaattatgattattaggtggtgcatgtgttgcgtcatgggccaatgttatcctctgcttttaagttggaagaggcccagctcacgtgtgatgtacggctgtgattgtgtaatttgcaaaatcaaaaataacccccgtgtccaaaaaaaaaaaaaaaaaaaattaa

SEQ ID NO: 48024 - DNA, 392 bp, Glycine max
  Clone ID: LIB3139-016-P1-N1-B1
ccctaacctcggattgcggttcgagttgagaagtctctaaaaggactgctccctacattaaatgtacagtctctttcttcatagcatttggaaatttggctgatgataccatcaattttgaggcttttccccacaagctggtgcagtttggagagattcaggaaaaagttgtattgaaattttcacaagaggaatttcttacagcttggtcaactcaggtgcgtcctgcaacaactctgttggctgatgggtgtccatatttgtatgcaatggtgcatgatagttcagtgtctacaataccaggtgattttgtcattggtgtcaagttgacaaccataaacaatatgtgtgcatatgggctcaatcctggtatttcaggttctcgtcttttg

SEQ ID NO: 48025 - DNA, 139 bp, Glycine max
  Clone ID: LIB3139-016-P1-N1-B3
aaataattcaagcacgatagccactccagccaaggggctaggctatgagaacaactatttggactacacaccaaccataacaactttcaactcaggaaacttctcatgaaaacaagctccaaatcgaataacgctattg

SEQ ID NO: 48026 - DNA, 381 bp, Glycine max
  Clone ID: LIB3139-016-P1-N1-B6
ttccggggcaatgctgggggcaagaaacctttttcttcagcactgatgtgggaaaagcatggtctttgaggctgacatagtgtttgtctctgtcaacaccccaaccaaaactcagggtcttggagctggcaaagcagcagatttgacatattgggagagtgcagctcgcatgattgctgatgtctcgaagtctgacaagatcgtggtggagaaatccacagtccctgtcaaaactgctgaagccatagagaagattctgacccacaatagcaagggaatcaaattccagattctatcaaaccctgaattccttgcagagggaactgcaatcaaagatctctttaacccagaccgtgttcttattggaggcagggaaacccc

SEQ ID NO: 48027 - DNA, 367 bp, Glycine max
  Clone ID: LIB3139-016-P1-N1-C4
agatgacttctccctacattaaatgtacagtctctttcttcatagcatttggaaatttggctgatgacaccatcaattttgaggcttttccccacaagctggtgcagtttggagagattcaggaaaaagttgtgttgaaattttcacaagaggaatttcttacagcttggtcaactcaggtgcgtcccgcaacgactctgttggctgatgggtgcccatatttgtatgctatggtgcatgatagttcagtgtctacaataccaggtgattttgtcattggtgttaagttgacaaccataaacaatatgtgtgcatatgggctcaatcctggtatttcaggttctcgtcttttgggcaccattcctca

SEQ ID NO: 48028 - DNA, 327 bp, Glycine max
  Clone ID: LIB3139-016-P1-N1-C5
ctccggttattggccggtgagacagggaaatcggtgtcggcgtagaaggaggaccggtactacacgacgcggtgttcggcggaagagaacggcacggtcaccggcggcgaaggcatcaacggcgaagaacgagccctagtttggcccaagctctacatcactatctcaagcaaggagaaagaggaagattttctggctatgaagggttgcaagcttccttattgacccaatatgagggcctgaatcattcaaagatactttcttttggggagttccgattcgtgtttaactgatatctgccaagagtgttttgacgtttgggctaaa

SEQ ID NO: 48029 - DNA, 377 bp, Glycine max
  Clone ID: LIB3139-016-P1-N1-D1
ttggggggacacatttcaacgtaaccaccaccgtgaaaggtggcccgtgaggctgtttccggcaacactataaccggcggcgctgagtggtgatcaaggaaatgggtcagaggctaagctgcgtgcaacagcagcacgaggagcatggtgtgctcttcccagcacttgcaagtggagaattggaggttgttgaggccatggtggaggaagaccccactgtgttggaacacaccactggctgtgaccgcctttctcctctgcatgtagctgctgccaatggtcggatcgaggttctttccatgttgttggataggtctttcaatgttgacgtattgaatcgccataaacagaccccggtgatgttggctgtgatgcat

SEQ ID NO: 48030 - DNA, 113 bp, Glycine max
  Clone ID: LIB3139-016-P1-N1-D12
tttccctcgttttacgattgttacaatgacaatagtttaatggttattatcagtcttgaacaaagaaatgctgattgtgaagtataataataatatatgaaattggcatgttc

SEQ ID NO: 48031 - DNA, 354 bp, Glycine max
  Clone ID: LIB3139-016-P1-N1-E3
ggaaaggtttagcacctccagatgtaaattcatatgaagaagctggaactcctgttattaacgagaaggatgacgaaaattgtgccactattgtcaatgatgaacaacacgtgatgcatattccaagcccatgctctatgtcatcatcacctgatatgatcttcatggagttctacaaagcctaagtgtatctatgcagacctatccatgcacttgacgggatacaatactcgattgaaaatctgtcaaaaatgatgaagagcgtggaatactcttatgccagccacttctgtacacaggctactgccagaacttcagaatatgcaagatactctgcatgatctgacaatattg

SEQ ID NO: 48032 - DNA, 209 bp, Glycine max
  Clone ID: LIB3139-016-P1-N1-E6
atttggctgatgacaccatcaattttgaggctttgtgccgacaagctggtgcagtttggagagattcatgaaaaagttgtattgaaattttcacaagaggaatttcttacagcttggtcaactcaggtgcgtcctgcaacaactctgttggctgatgggtgttcatatttgtatgctatggtgcatgatagttcagtttctacttatac

SEQ ID NO: 48033 - DNA, 205 bp, Glycine max
  Clone ID: LIB3139-016-P1-N1-F4
tcgagcggctcgagtgaaattctgagttctaacgccactaatccgatgctgacgcgacttcttgagaactgtaagagtctcaaatatctggttgatgagtgtccttttgcatttgtgaactagtatgtagtattttattcacttaaataaagcgcattactatgtgcaatgagtgtgtctaactttcatatagttaatcttttaa

SEQ ID NO: 48034 - DNA, 255 bp, Glycine max
  Clone ID: LIB3139-016-P1-N1-F5
cacaaatcggtttactgtctgttcaagctaccatgtgtgtctctctttcttagtgcctccttgccagaagttaaaatggcccaagaaactttcctattcacatctgaatcagtgaacgaggggcaccctgacaagctctgtgaccagatctccgatgctgtgctcgatgcatgcttggagcaggaccctgacagcaaggttgcctgtgaaacctgcaccaagaccaacatggtgatggttttcggagagatcaca

SEQ ID NO: 48035 - DNA, 172 bp, Glycine max
  Clone ID: LIB3139-016-P1-N1-F6
caaatttgtttaaattgtctcttgatgatgttgaagctcgtaaaggttctatgttggatcttaaaatttctcaatctaaaattgcacttcccaagaacacagttggaggaaccattctgcgtagtgatctattggcaaattttttgacagagggcaattttagagcatgtgt

SEQ ID NO: 48036 - DNA, 372 bp, Glycine max
  Clone ID: LIB3139-016-P1-N1-G4
ctcgagccgatgagattctaacaggaaggcgtgctgtgagtagaaaccgtccaataggggaaaaaaagcttatagagtgggttaaaaactaccctgctaacagtagcagattcagcaccatcattgaccctcgtctcaagaaccaatattctcttggtgcagctcggaaagtagccaagttggcagatagctgcttgaagaagaatcctgaagatagaccatccatgagtcagatagtggaaagcttgaagcaagcattgcaggattcagaaaccaaaaacgcttagcgcaatatgacttctaaatcggtcccaagtggtaaatagatgcagcttgagaatgatttttgtaattagtttgattcatcaccac

SEQ ID NO: 48037 - DNA, 323 bp, Glycine max
  Clone ID: LIB3139-016-P1-N1-G6
aatctgtaaatgcaagaagcttatcttgtcaatcggggtagatgtgttacgagaactgtatttgcacagtccagaggaagctcgccaattgagaaggaaagctctctctcgtattgaatggctgcaaaatgctgatgtgcctaccatagcacagattgaagagttccattcgatgcagaggatgatgaatgctcctgattcaaatgataatattgatctactgttgagcattgatttgttgggtttacaaggagcaggcagaggtttggcaaacaagaattgttttttattattagatcgtgttggcttactcacaataattt

SEQ ID NO: 48038 - DNA, 371 bp, Glycine max
  Clone ID: LIB3139-016-P1-N1-H1
ggatctttcttcttctcgtttttactttgacggtttctagagagagaaagtttgttatagagagagaaagcgcgctgctgcttcttctgctgctgcttcgacagtgagaagagagagagaagcgctcttctccgtaccgtttctagagagagaaactgatggccggagttaatccgaacggcgtcgccgattttccggcgactccaacgcacggcggacagttcattcagtacaacatattcggaaacctcttcgaggttacggcgaagtaccgtcctccgatcatgcctgtcggacgcggcgcgtatggaatcgtttgctcgctgttgaataccgagacgaatgagctggtggcggttaagaagatagcg

SEQ ID NO: 48039 - DNA, 110 bp, Glycine max
  Clone ID: LIB3139-016-P1-N1-H3
ggcaataaaggaaattgggcatgaccctcttgttgagtgtgctctgcctatttgaaaatttccacacctcttttaattgtcgtaatgacgtgtgaagtgtgtgttatttt

SEQ ID NO: 48040 - DNA, 140 bp, Glycine max
  Clone ID: LIB3139-016-P1-N1-H5
ggctcaacttaacttatattccaaaacgcatagccagggcatggctgtccctttgaaccactcttacgccacccacacccaacatcgtaggcacgactaccacgacgaacgacccaccgcttacccttcgccgcgaaact

SEQ ID NO: 48041 - DNA, 387 bp, Glycine max
  Clone ID: LIB3139-016-P1-N1-H6
atagctaaaattcggaattagaatagagtgtaatgttgtccatttgttggttttgaagtgtgggggtctgatggggaataccttacttcatggcatttgagttttcttattgacaattccaaacagtctacagtttttgatattctcttgggaatctctgaagactacgcaatcgctgacaatactcttatgccagctttttatgttccacaggctactgccagatcttctgaaaatgcggaatcctctgcatgatctggaattcgcgttttctttcgcttgtcactgcgttcctctattccttattgtctaggcatgaccctcttgttgagtatgctctgcctatctgaaaattttcacaccttttttaattgtccgaatgatgtg

SEQ ID NO: 48042 - DNA, 268 bp, Glycine max
  Clone ID: LIB3139-016-P1-N1-H7
gtcttccctcccgttgcccttctcctctcctgcgtgggcttactcctcaccctgtcacgcacccgcgatctccccaaccctttctcccaacccaaacctcactccgaacctaaaaccgtttcgttcacgatcgacaccatcgatcccgttccgctgacgctcctccgcttccgtccgatcaaccgtcacttccagcccggccgtccgttgccgttgtcgctccgcaccggccaccgccgttgccgccaccgccgctagatccggtacg

SEQ ID NO: 48043 - DNA, 362 bp, Glycine max
  Clone ID: LIB3139-016-P1-N1-H9
aagtgttttttccccaaatttccatcacactgggggctgttaattattgcacaatattcatcccacctttaatgttcccaacatgcccggtacactcacatcaagaaactcaactataaataatgtaccatctgtggttttttaacaacccactggaagcctttctagtggaagatttacatccaacaatctcccaattgcattgtctcatctatctcatttaagctcccattcacgaatcaccaatatattaattataagtgttgtagtggaacccttatttatactagcacataatgatttgtggttctttcctggttattcttttctaaatttcttcatatggtaacctaaaatcttta

SEQ ID NO: 48044 - DNA, 90 bp, Glycine max
  Clone ID: LIB3139-017-P1-N1-A1
gccaggaaccagttttgcaaatcagtccatttcctttgaaatgcactctcctgacccttgcgtgatgaagcagatagagaataaaaagag

SEQ ID NO: 48045 - DNA, 344 bp, Glycine max
  Clone ID: LIB3139-017-P1-N1-A5
tcgcttcaagatagatctaaattggacccagcacctaacgcatgagggcgattcttactgcagcgtcgtgactgatcttggattacctcgactgctgatgcaccttgcctgatgcgaacatgcatatgtcaaagaacctgcccttcggtgcatatttgagctagctagcaatacttaagatggcaaggatggctataaccaagacagtgagaagatgaagcaacttcttcaagaacgactcaactatatcagtagaatgacagtttatgacctacatgtaggcaggttagatagctatattctttacactgtaatgagctcttgagttaacccgccattcttat

SEQ ID NO: 48046 - DNA, 305 bp, Glycine max
  Clone ID: LIB3139-017-P1-N1-A7
cgctcgggtgtcagtgaaaggacaacctttagttataccggacaattacaacatttagttttcgttactgcacagtcaacctcaagatttctgaaggaaaatttgtttagcatgctagtgatcagaatccagagttttctgactataatatacattttttttacccacacgccagacctcattgaacgagtttctcgttgtattagcaatgatcgatgcagaaatagcccacagaacaaaattgctataaatgatgtctctctactttacctgtgttgggataattgagtactttttggcattta

SEQ ID NO: 48047 - DNA, 434 bp, Glycine max
  Clone ID: LIB3139-017-P1-N1-B1
ggcatttggataggattaaggaaaaagtggtattgaaggtgttacaagaggaatttctaccagctgggtcaactaaggtgcgtcctacaccacctttgtgggttgatgggtgtccatattggtttgcttttgggccatggatagttcagtggtctaacaataccagggtggaattttgtcaattgggggttaaagtttgacaaaccaataaacaaattatgtggtgcattatggggctcaaaatcctgggtattttcagggttctttcgtctttttgggtaccccattcctcaggtcttatttcacaaagcaaactgggtttggaatcaaatggcaaccagtgaagaacccaccattgaattttggattcttaagcaaagcagagcttttgtcaaatttttctattggaccttctcggtggagggaattttagt

SEQ ID NO: 48048 - DNA, 397 bp, Glycine max
  Clone ID: LIB3139-017-P1-N1-B2
tcggttgaggttggccaagtttttaaaggagtaaagctaggaggaaggggagcatgctgagaaatggatggaatataaaaacaagcaaggtggaaaggtgaagttccaatctatagtgatgccttttactgagtttgaccatgaggaaaagggagatgcgctatatgcaatggaacttgccctgtcgttggagaagctgacaaatgaaaagctgcttaacttgcacagtgttgcctcaaagaacaatgatgtgcaattggcagattttattgaaagcgagtttttgggtgaacaggtggaagccataaaaaaaatctctgaatacgttgctcaactcagaagagttggcaaaggacatggtgtgtggcactttgatcagatgctactccatgaggaa

SEQ ID NO: 48049 - DNA, 300 bp, Glycine max
  Clone ID: LIB3139-017-P1-N1-B5
gttcgaatttcgcttcggggggagggttttccatggtttccgtttgtggcttcctcgtggaattacagctgttggcatgtctacgccgagttccgggcagaagaatggatcaggaggttgttttcttagtggaaggaaattgagggtgaaaaaggagagagcagcaattggaggacgatcgatgggcactacagtgtgcgcagttgctgagcacaaaactgctttctggctataagacatacctccttctccatggcttgttggcacttttaccctggagacttcagcttttgactcctt

SEQ ID NO: 48050 - DNA, 402 bp, Glycine max
  unsure at all n locations
  Clone ID: LIB3139-017-P1-N1-C1
tgggttggggaaataatccaaattcgggggagctaattcaatcaaaaggcctcccaaatacaagctggggctgttgataggcatgggtttgggttgcaaccttcctttgctggtcgcacaaaggaacatnctaagcatcctccatcccttcaagaacaacaacacaccccacaccttgatagctacccgcataaacacataccacctcatcctgtacatggtgccggggaggaaccaacctccattccacgaaagaagggaccaagaaggcccccgaactgataagtgagtcaaaggtttccgattgtgcatgcgtcagatggtttaactttgactcgatctctaccaccacaacatcacgatatgttgttacaaccataatcgcaatttgaaaccttgggc

SEQ ID NO: 48051 - DNA, 325 bp, Glycine max
  Clone ID: LIB3139-017-P1-N1-D12
ctgaaataggactaggaaatactaacataattggagatatctctttacaagataagttagtgatttatgacaacgagaaacagcagattggatgggcctctgccaattgtgatagatcttccaattcataaataaatcaatgtaatttttttctttagctgagactgtagatagggatttctctcaaggaaatcttagcaaaccggtgccctgcaacttatgatgttatagattatcaatgagttgttaggcaaggagggttaggacttacgatgtaaaatggcttggatagtatatatgatttactatacatatttcatttact

SEQ ID NO: 48052 - DNA, 381 bp, Glycine max
  Clone ID: LIB3139-017-P1-N1-D2
tcgcttcaggaaaaaccccagttcaccccctagggttcagttggggttgagggttctctcatcacaatcggggttatcactggcacggcgtgaggctcatctcatcgttgagtataataatggattcggacactgaagaaacaaaacccaagcatcccaagaaggagaagaaaaagaagaacaagaagaaagaggttgaggttgtccaacctcaatctgaacagattgaggttgaggtcgaggttgtccgtgagcaccccaataaaacacctcctgttgttggttatttcccttccggatttgatccggtcaagaatcatggcggcggtccctccaattttcaagtttaccggcacaggagcatgcccaagaggctggagc

SEQ ID NO: 48053 - DNA, 389 bp, Glycine max
  Clone ID: LIB3139-017-P1-N1-D5
gcaaccgttacaaaggggttcaaccttttcgcaacacaggtccatcatgttcaaaacctaactgatagagtgcatggaaccaagctgcatcaaggtgaagactggcatcacaacgagacagtcaagcactggacttataccatagatggtaaggttacaacatgtctggagagtattgaatccattgatgaacagagcaaaacaatcacctacaagctcttcagtggtgacattgatcataattataagaactttaagttcatctttcaagccattgatgataatgatcatggcggtactattatcaaatggaccgttgaatacgagaggcttcgtgaggaggtgatcctccatatggccacattgaatacctgcacaaatgcactaaa

SEQ ID NO: 48054 - DNA, 242 bp, Glycine max
  Clone ID: LIB3139-017-P1-N1-D7
attttgaaattgctggtaatactcttatgccagcttgttctgttccacaggctactgccagatcttctgaaaatgcggaatcctctgcatgatctggaattcgtgttttctttcgcttgttcgtttgtttaattcaataaaggaaattaggcatgaccctcttgttgagtatgctctgcctatctgaaaatttccacacctcttttaattgtcgtaatgatgtgtgaagtgtgtgttatttt

SEQ ID NO: 48055 - DNA, 131 bp, Glycine max
  Clone ID: LIB3139-017-P1-N1-E2
tgggttgaggttaattaactcaagcacaacaagggaggtggttccaggggtttttagtttggaactaaagaagccaatgttggcatggcccttttatcttgaactggaccccaatcagatgcatgaacacc

SEQ ID NO: 48056 - DNA, 314 bp, Glycine max
  Clone ID: LIB3139-017-P1-N1-F1
tcgcttcaggcccaagttaaaggaattgtttaattaataaatgttgggggaggccttttaaattggagttaatgaagttccatattatggtttatctttcagtttctggaatagttctaaattggtcttttgtttcattttgttgtacattggaaaaattgcatgtgcagaagatcccctcacctttcaattttatctttcatacattaaaggttaatggaatatagcgatcctgtagaaactttgctgactgcaggggaaaatatagagttgcccactttcctgtctacaccatatacgcatttggttttatt

SEQ ID NO: 48057 - DNA, 392 bp, Glycine max
  unsure at all n locations
  Clone ID: LIB3139-017-P1-N1-F2
tcgagtaggagagaagcttccggcaaccgctccccgttcaacggcgttatcgtcctccgcgggcccggcgacgactccgccgccgccgaccacgacggcgtcagcacgttcgagctcttctacgacgacggcgacggcaccggcctncgccctcttcctcccaccatgtcggagttgctcctcggctctggctttgacagacttctcgaacagttcgcgcagatcgagatgaacggattcgggcggccggagaatccgccggcgtcaaaggcggcgatcgagtccatgccgacggtcgagatcggagaaacgcacgtggaaaccgaagcgcactgcgccgtgtgcaaagaaagcgtttgagctgcacgcggaggcgcgtgagttaccgtgca

SEQ ID NO: 48058 - DNA, 390 bp, Glycine max
  unsure at all n locations
  Clone ID: LIB3139-017-P1-N1-F3
ggttttaataaaccgcgatcacaggttgccgaaccttaaagccggaaacaaaagcaagcggttacttgatttcaagaatttctcaatttcttcctacttctttgtgtacgatttcttaagggaaagaaaatcactctctgtgctggtcacagacttcgtgaatcattttcttttccactcctagtttatttgctgaacactctcctatttgatataggacttcgtgtcagatttaaactttttctgtttctttctcagntctctgtttaatttcaagttcaagctggtgaaattttggattagtgctcccactctcctatctggtataggacttcgtgggtagacttttctacttctctcctttctttcactctcttcttctcactgatc

SEQ ID NO: 48059 - DNA, 192 bp, Glycine max
  Clone ID: LIB3139-017-P1-N1-F5
cttcgttaagacactcaccggcaagaccataaccctagagggtgaaagctccgacaccatcgataacgtcaaggccaagatccaggacaaggagggtatccccccggaccagcaacgtctcatcttcgccggaaagcagctcgaggacggccgcaccctcgccgactacaacattcagaaagaatcaaccct

SEQ ID NO: 48060 - DNA, 283 bp, Glycine max
  Clone ID: LIB3139-017-P1-N1-G1
tcggttcggggttaaacgtgcaaagagggttttaaaaacccagccccgggtccgggtggaattagaatcacttttagatggagttgattattctgagccactcacacgagctcgtttagaggaggagaacagtgatttgttccggaagaccatggggccagtgaagaaagctatggtagacgcatgattacagaagagtcagatcgctctgattgttcttgttggtggaagcacaaggatgccaaacgtacaacagcttttgaaggactactatgatggaaag

SEQ ID NO: 48061 - DNA, 327 bp, Glycine max
  Clone ID: LIB3139-017-P1-N1-G2
tcgcttcgggaaaaaattttttataataaaaaaaaaaacctaaaaaagcgggaatttcaaacaaaggcgtgttatacttaataaaaaaattaaaagagaatgccactcaaaaaaatcaaaaacgtgtttaaacatataccataaaaaaagccccccccccctttttgaaccttttccccccggaattttttctcacccctgtccttgaagcaaccccttttttcctttttaaaagcctttttaacctttcgcacaatcttgaaaatatttttttcctgctaaaaatttttttcccttcccattcccccccaaattccaacccggaat

SEQ ID NO: 48062 - DNA, 229 bp, Glycine max
  Clone ID: LIB3139-017-P1-N1-G3
cttcaggtaatgcaatttgttgttccttcttcgacaaaactgcggatttattgaaaaaggcgactctggactctgagtccaaagccattggagttgctgagcctgcgaagaagaatggacctgctttttccaatggggcagctaatgggagggccaagccattcaatccaaattcatgctttgttccaaatggatacccatctgcgtattattatggaggttatgattt

SEQ ID NO: 48063 - DNA, 392 bp, Glycine max
  Clone ID: LIB3139-017-P1-N1-G4
ggttccgtttccaggtttcggcccattcggtttttgtttcaaggaaggaaagctggttattctttatcaacaagtaaaatgtcaggtgaagagggtgtcattgcagttgagccagctgctgctgctgctgccatcccaggcgagccaatggatatcatgactgccttacaacttgtgctcagaaaatctctggcttatggtggtttgtcgcgtggccttcatgaaagtgcaaaagtgattgagaagcatgctgcacaactctgtgttcttgcagaagactgtgaccagcctgactatgttaaactggttaaggccctttgtgcagagcacaatgttagcctgctgacagttccgagtgcaaagacccttggagaatgggctggtttgtgcaa

SEQ ID NO: 48064 - DNA, 395 bp, Glycine max
  Clone ID: LIB3139-017-P1-N1-G5
tcgagggaaattccatggggtgaggttggtgctgattatgttggtgagtcaactggtgtattcactgacaaggacaaggctgctgctcacttgaagggtggtgccaagaaggttgtcatctctgccccaagcaaagatgcacccatgtttgttgttggtgttaacgagaaggagtacaagccagagcttgacattgtttccaatgctagctgcactaccaattgtcttgctcccctcgccaaggttatcaacgaccgatttggaattgtggagggtcttatgaccactgttcatgccatcacagctactcagaagactgttgatggtccatcaaacaaggactggaggggtggaagagctgcttccttcaatataattcccagcagcactggagc

SEQ ID NO: 48065 - DNA, 157 bp, Glycine max
  Clone ID: LIB3139-018-P1-N1-B2
gtggaattgctcgagagataactgtttatatgtatcaacaattaagagcgtgttggtataggatcatggctgtttgcaaataaatgttctaggatatttgtgaggtgagatggtgtatgtgtggcatatatgaattgatataatttgtttaatggct

SEQ ID NO: 48066 - DNA, 96 bp, Glycine max
  Clone ID: LIB3139-018-P1-N1-C5
aaacgatccaaactcttttttcatttgcagcatcagagtgagtggtagcaacgatggtcgccgcaccttgagctctaggttttccaaggaatatag

SEQ ID NO: 48067 - DNA, 331 bp, Glycine max
  Clone ID: LIB3139-018-P1-N1-E10
ttgcgagttgcagagagagcggggagtcaggaatcgtttatatatagcttcgtggctcgggggacgatggtgttagccgagtacaccgagttcactgggaacttccctgcaattgcagctcagtgcctccagaaactaccctcttccaataacaagttcacctacaattgcgaccaccacaccttcaattttctcgtcgaagacggttacgcttactgtgttgttgccatggaatctgttagcaaacgggtggggtattgctttccttgtacgtgtaaaagcggactttaagaaatgatatgttggtggtatggcattcacgcttgttgcc

SEQ ID NO: 48068 - DNA, 311 bp, Glycine max
  Clone ID: LIB3139-018-P1-N1-E6
ggcttcgaggtttgttgttgtaactcgttcttcttcttttggtggttctgtgtttgtgtttgttttttctctcacctgaaaatgtcttgctgcggtggtaactgtggttgcggaagctcctgcaagtgcggcaacggctgcggaggctgcaagatgtacccagacttgagctacactgagtcaaccaccaccgagaccttggtcatgggagtggcacctgttaaggctcaatttgagggtgctgaaatgggtgtgcccgctgagaacgatggctgcaaatgtggaccaaactgcttctgcaacccctgcac

SEQ ID NO: 48069 - DNA, 143 bp, Glycine max
  Clone ID: LIB3139-018-P1-N1-F5
ccttaatccctatgcatggatgaatagccactactggtgcgtcttcatgtcttgcgatgccattctttattggttcatgtgttcactttcatttatatatgtagatgtttgtgagcgtctgattctgttaaatatgccgggtt

SEQ ID NO: 48070 - DNA, 73 bp, Glycine max
  Clone ID: LIB3139-018-P1-N1-F6
gcgcatgtccatagactttttcatttttaaactgttacccaaatacattttttgcataataaacttctccctt

SEQ ID NO: 48071 - DNA, 243 bp, Glycine max
  Clone ID: LIB3139-018-P1-N1-G6
gattaaccagatatacttggtccttttgaaggttagagagggctacaatacaaacagggggcagctacttatgaagatgtgaagcttttgggtcttgcgggacgaccacttgtgtctaatgcacgcacctcccttattaatcaggcctatgataactcactgtctacaataccatgtgacttcgtgattgatgtttatttgacaaccataaacaatgagaatgcagatgcattcattcctgac

SEQ ID NO: 48072 - DNA, 368 bp, Glycine max
  Clone ID: LIB3139-018-P1-N1-H12
ttcgggtcgagattcattgctaactttcattataacttaatttgtgccaaaaatggtcaaatccttaatacttgcagtactgtttgcactttcacttcgcgttgacagtgacgtgtcaaaagagattcaactgagcaatggtcgtaaaatgccaattataggattggggacatgctgtggcattagttcgtctacgatgtaccgtatggttaaggacgccattgaaattgggtatcgacatattgacacagcatatatctatcacattgagatggaagtgggacaagcagttaatgagtttattactaatggcacacttaagagagaagatatttttatcactactaaagtatggaatactttccact

SEQ ID NO: 48073 - DNA, 164 bp, Glycine max
  Clone ID: LIB3139-018-P1-N1-H6
actagttctagatcgcgagcggccgcccctttttttttttttttggggggggatggggaagaaaacctaaataggggtcatgaatatgtcaagccttactttagtgggtctaaattgaaaagctttctagctgggcataatatcaccattactgatgggattga

SEQ ID NO: 48074 - DNA, 388 bp, Glycine max
  Clone ID: LIB3139-020-P1-N1-A2
ctagcaattcaattcggagtaaagatggtggatgcttatgagtcaaagaatcaagaactgatggcagagaatgctgatttaagagcattattgagatcaatgcaggtggatatgcgtgatttcttaaatgctcctaatggactaccaaagcaatctctcactggcaatgaaagagttgaaagtgatccttcacaatctccattggttgggaaaatggacgtatttgaccttccttttcacatggccagagatcaaatagaagaaagtcttcgtaacaaaatggcttctataaaggagcgcatggttcaattgcaagatgctcaaaaggaagcagaagttacttctgaggctactgagagggaacttgagcttgaagctcaacttgtcg

SEQ ID NO: 48075 - DNA, 362 bp, Glycine max
  Clone ID: LIB3139-020-P1-N1-B1
tttggagcgagcttaagtatttgtccccggataggcggttaagaataataatctgagacgaccaacctaagcctcttaccatgagtaagctacaaagtgatgcactgagagaggcaatttcccaggtggtgagtaattcaaaggagaaaaatcgtaaattcaccgagactattgagctgcaaattggattgaagaactatgatcctcagaaagataagcgtttcagtggttctgttaagcttccgcatattcctcgccctaagatgaaaatctgcatgctcggtgatgctcagcacgttgaaaggcggaaaaaattggctgactacatgatgtgaacactgagaactcataaaacaaaaact

SEQ ID NO: 48076 - DNA, 365 bp, Glycine max
  Clone ID: LIB3139-020-P1-N1-B2
cttcggggtttaatttttttttccttccttaatttcaattaactgtggtggaggtatataactataattctttttttttttaaacataaaaattgtttaaatcttttgccatgggaacccagattttgcggcctcaggactgtttcgtagaacgaatcatgtctcctcccgctgacttttcccggcggaggagttccggtaactactgtaattattattaccacagcaaccatgttgccacttccaggtcgtgccggaagccggttgcccgacccgataaaaagaaacgggttgttccggcttctggcatgccgctggtggcggagacctcggcggcggtgtttaggagaccgagcagtgatgat

SEQ ID NO: 48077 - DNA, 360 bp, Glycine max
  Clone ID: LIB3139-020-P1-N1-B5
ggggtgatgataacttaattagtgttcatgaatatgtcaagccttactttagtggttctaaattgaaaagctttctagctggtcataatatcaccattactgatggtattgacaaaactagtgcaactttgcaatttagaaagttagcagattgtgattttctcaagagaaactttaagcagatgtctaatgttttatgggtggctcctgaggacaaggcgagtttatggtcacaacttcattatgtttcgtgcaataatctggaaatgcaagaagcttatcttgtcaatctcgtaaatgtgttacgagaattgtatttgcacagtccagaggaagctcgccaattgagaaagaaagctc

SEQ ID NO: 48078 - DNA, 368 bp, Glycine max
  Clone ID: LIB3139-020-P1-N1-C2
gtggggtcacctcggtttgagcaatcaccttttgtgcagagcacaggtccttcctggaatggccaggttgcgcaacagcaacagcctctttcaccagtttatggtacagcaagtggtggatcatttccgccaccaccctgggaagcacaatctacagacaatgatagtccagtagcaggcagtcaatacccacaaccactgcaagtcactcaaatggttatgacgcgtttacaaagcggtgcacatcctcagggacctcaagcaatggggcatgaccaagctgttggaatgtatatgcagccaaatgctgtccatatgtcaaccatcaataaccatgttcaaagcaatcaattaggcttgtacccgca

SEQ ID NO: 48079 - DNA, 250 bp, Glycine max
  Clone ID: LIB3139-020-P1-N1-C3
tgagctgacctcgccgggatttctagaaacttaacaagtttgttgggtgctcctggacagcagtatggccaacttatttgttggataattgaaagcagaactatttgcattgtaatggtacagaattgatttgccgccaagagctgcattgaaagaagttttctatgaggtcaaagcgtggctccatccaatgagagtcttcgagcaagagagaatgctctgatcaagttatgatactgtggcatgatgt

SEQ ID NO: 48080 - DNA, 213 bp, Glycine max
  Clone ID: LIB3139-020-P1-N1-C6
ccagctttttctgttccacaggctactgccagatcttctgaaaatgcggaatcctctgcatgatctggaattcgtgttttctttcgcttgttcgtttgtttaattcaataaaggaaattaggcatgaccctcttgttgagtatgctctgcctatctgaaaatttccacacctcttttaattgtcgtaatgatgtgtgaagtgtgtgttatttt

SEQ ID NO: 48081 - DNA, 409 bp, Glycine max
  Clone ID: LIB3139-020-P1-N1-D12.R1
aggttaataatagaggaggggggtcagctaaactgtgccagagactatggcgtttgatttgttagcataaccaggaaattagaaaaagattttgattctagttttgattagatcaataagactgatgaggccaaataaagaactcagttgctgctgatgctggcagtgcagttagtgcggttgcattggcagaagtaacagcagacgctgctgcaccaggtgtggtagggtgaaaatgttggaaaaggttgtgaggataatatgctgttgttgaatcaaacggaattccacaagggattgaagcaattggctgatgaatggctgagaaattgatgctaccactcacgttaccacactgtggattctgctgctgactgctgctgttcacaggaggagctttctgctctga

SEQ ID NO: 48082 - DNA, 471 bp, Glycine max
  Clone ID: LIB3139-020-P1-N1-D12.R2
aggttaataatagaggaggggggtcagctaaactgtgccagagactatggcgtttgatttgttagcataaccaggaaattagaaaaagattttgattctagttttgattagatcaataagactgatgaggccaaataaagaactcagttgctgctgatgctggcagtgcagttagtgcggttgcattggcagaagtaacagcagacgctgctgcaccagcgttggtagggtgaaaatgttggaaaaggttgtgaggataatatgctgttgttgaatcaaacggaattccacaagggattgaagcaattggctgatgaatggctgagaaattgatgctaccactcacgttaccacactgtggattctgctgctgactgctgctgttcacaggaggagctttctgctctgattcaagggaaagcctcaagcgttttgctgccccacccactggaagagaactcttcattatag

SEQ ID NO: 48083 - DNA, 367 bp, Glycine max
  Clone ID: LIB3139-020-P1-N1-D3
gggcatttaacatattacaggccataacattgagaaaatacccagcaaagatgtcgctggccacttgggtttgctttgtaggagcacttcaaagctctattgttgcaatcttcgcagaacgccaccaccctcatgcttggtcccttggttgggatacacgactctttgctcctgcttacgcgggaatagttacatctggagttcagtattacatacaaggcatggtctcaaaaattatgggcccagttattgtgactgcttttaatcccctgcgtatgatcattgttacggccttggcctgcatcatcttatccgagcaactcttccttggaagtattattggagcagtagttgtggttcttgggct

SEQ ID NO: 48084 - DNA, 355 bp, Glycine max
  Clone ID: LIB3139-020-P1-N1-E1
ggctaaatggaaaggctttttacctggccataatatcaccattcctgatggtatggacaaaactagggcaactttgcaatttaaaaagttagcaaattgtggattttctcaagagaaactttaagcagatgtctaatgttttgggggtggctcctgaggacaaggcgagtttatggtcacaacttcattatgtttcgtgtaataatctggaaatgcaagaagcttatcttgtcaatctcgtaaatgtgttacgagaattgtattttgcacagtccagaggaagctcgccaattgagaaggaaagctctctctcgtattgaatggctgcaaaaagctgatgtgcctaccatagcac

SEQ ID NO: 48085 - DNA, 365 bp, Glycine max
  Clone ID: LIB3139-020-P1-N1-F1
ggcagaaaaaggcaaagatggtggcagagctccaagctgtgaagcacaacagtggcaagtcctacaatcagttagcggaggagactggactcaccaacgtctatgttgctcagcttctcaggagacaggctcagctcaatccccaaactgcccctctacttcgggcagcgctgcccgacctgccccaagaccttgtttctgagatgatgagaccccctttgaggtcttatgaccctaatctcatccaagaccccactgtctataggttgaatgaagctgttatgcattttggggagagcatcaaagaaataatcaatgaggagtttggtgatgggatcatgtcagcaatagatttctactgctcg

SEQ ID NO: 48086 - DNA, 367 bp, Glycine max
  Clone ID: LIB3139-020-P1-N1-F2
cgcgagcggccgccctttttttttttttttagattaaacttgtgtcatactcattcacattccttaatatgctcttacttccaacaaactatactaacaagatgtgtgttgctggaaaagccaatgaaattacaaaggtatacattatactatatatcaaaaacccaagtagctagaaacttgtctgaatttatcaaaaaagttacaccaccctctgcgaataataatcctaataatattctaaaatttagtagatgacacagccactatataagattctcttcaaaacatctaacctattaattttaactatacagatccagtgagtgcagtgtcaaagctacgaaagtggtgtcacactgaaata

SEQ ID NO: 48087 - DNA, 347 bp, Glycine max
  Clone ID: LIB3139-020-P1-N1-F4
ctcaatttgctttgtgctcactcatctatctattatagcgcaaacactcttcttcatattctccttcttcttcttgttcttgttctatctgagacgagcatcatggcctcgagagcagtgctattgccggctatgtgcgtgcttccggccatggttgaggccattcccccagcaaagaaccctttttgcgtgaagggtcgcgtctactgtgacccttgccgtgctggttttgagacctcagcaaccacctacattgccggagctgagattatgctgcaacgcaagagcagcgttagcaacgaggttgtgtacactatgcaggggcacactgactcaactggcgcata

SEQ ID NO: 48088 - DNA, 366 bp, Glycine max
  Clone ID: LIB3139-020-P1-N1-G1
ggggagattggttcacacttatccaaaattttccaattggtaacttgttgagagttgctgcttggaaaaaaggctgtttaatggttaagattgtgatgtctgggaatgcagcagtcaaaaggagtgattgggcctcattggtacaagtgtttttaacaaacagcaacagtacagagcattttgatgcatgtaagtggacaaaatcggaaccacattcctgggaattgatcttcccaatagaggtatgtggtcctaataatggttttgaaatgtggagttctgagtgggcaaatcaaacttcatggcatttgagtttccttattgacaatcccaaacagtctacagtttttgatattctcttgggaa

SEQ ID NO: 48089 - DNA, 368 bp, Glycine max
  Clone ID: LIB3139-020-P1-N1-G2
ggcaacgattttctgggttgcgattatgctagttttgatggtttgattaccaagcaagttatgagcaagatggcagaaatgataaacagtctttgtggtggtgatgaaaaattgatgcgtgaaaggacacacctgctgttggcttgttgttcaaggatggcaatttgtaagaaagatgtttggagagttgaatgtggaatcccttctggatttccgctcacagttatttgcaatagcatttttaatgagatgctcattagatatagctatgaaaaattactgcgccaggctaaagctccaagtatgtttttacaatctttcaaaaattttgtttctttgtgtgtgtatggggatgataacttaattag

SEQ ID NO: 48090 - DNA, 368 bp, Glycine max
  Clone ID: LIB3139-020-P1-N1-H1
ggcgaatccttcacacaaaaacacataacaaacttctccattattttctatcggcaaatgttagtttgttatgatgctagttttgttaacagagcgtggatcgaacccgcgacgtttttccctcttttcttttctccatttaattgaaaccgacggaagaaaaaaaaaatatactaatttttaattcattgacggtattgtatatttgttctcgttttcgctgcagaagaagaagaagagtgatggctgagtacgacctaactccgcggatggcgccgaatctcgacaggcaccttgtgttccctctcctggagttcctgcaggagcggcagctctacgacgacgaccacatcctgaaggcgaagatc

SEQ ID NO: 48091 - DNA, 363 bp, Glycine max
  Clone ID: LIB3139-020-P1-N1-H12
ctcgagccgattcggctcgaggaagaaacagaattgaattgaattgcgtttgcgccattgaaaatcggaagtaatggaattgcattgctccgtgaaaaaattggaaaacgagaaagcgtttgagtttctcggaggcgttcctcttctgcagaggcttccgagctcgtctctgaggaagatagctcaacttgtggatgtcaaacactgtgagccaggagagtatgttgttcgcgagggtgaacctggagatggcgtgtacttcatattggatggagaggctgaggttcttggatctgctagggccaatgatgaaaatcgaccagagttccaattgaaacaatatgactactttggttatggttt

SEQ ID NO: 48092 - DNA, 362 bp, Glycine max
  unsure at all n locations
  Clone ID: LIB3139-020-P1-N1-H3
gggaaattttgataaaccgggatcacaggttgccgcaccttaaaaccggaaacaaaagcaatcgttacttgatttcaagaatctctcaatttcttcctacttctttgtgtacgatttcttaagggaaagaaaatcactctctgtgctggccacagacttcgtggatcattttcttttccactcttagtttatttgctgaacactctcctatttgatataagacttcgtgtcacatttaaacttcttctgtctctttctcagntctctggttaatttcaagttcaagctggtgaaatcttggattagtgctcccactctcctatctggtataggacttcgtgggtagacttttctatttctct

SEQ ID NO: 48093 - DNA, 371 bp, Glycine max
  Clone ID: LIB3139-020-P1-N1-H6
tcgcaattcggttcgagagtttgttgtgagctataagctagtttatcgtggggagaatatgaagttgtttgttttcttcgttgctgcagaagttttggtagcatggccatgccatggcgcaggctaccaaaggttccctctccgaatgaaaactggctattgtgagcgttcttcggaggtaaaatgcgcaagttttaggcttgctgtggaagcacacaacatccgagcctttaaaaccattcctgaagagtgcgttgaaccaacaaaggactacattaatggcgaacaatttagatcagactctcaaacagttcaccaacacgctttcttttatgctagtgaacgccaagtgcatcccaactacatattta

SEQ ID NO: 48094 - DNA, 325 bp, Glycine max
  Clone ID: LIB3139-021-F4-F2A
gcgcttcctcccaacgggaaaatcgccaaggacgccaaggaaaccgtgcaggaatgcgtctccgagttcatcagcttcgtcaccagcgaagcgagcgataagtgtcagagagagaagaggaagaccatcaacggcgacgatttgctttgggctatgaccactttaggtttcgaggagtatattgatccgctcaaggtttacctcgccgcttacagagagattgagggtgattcaaagggttcggccaagggtggagatgcatctgctaagagagatgtttatcagagtcctaatggccaggttgctcatcaagggtctttctcac

SEQ ID NO: 48095 - DNA, 374 bp, Glycine max
  Clone ID: LIB3139-021-F4-R2A
ggaaagaatataccaatttatgcttccaatcaggtacataaaatcgttaccaggacgattgatggaatcagacaagcattgttccagaatttacaatataacttatgaataatgattcttttccaaagataaatgtaagtcttaataaataatatctggtcacaagaaccaacatccccgcatgtagtgtttacataacataaaatgcattcaatataccaagggcacatattgacataaaagttccactggcatttagatcacacatgtcaaacactgaaggagaggatcaatatctactcttggccttgcatcggaactatcatatgttgagcctggggctaagaattcgtataattaacaccttgtgagaa

SEQ ID NO: 48096 - DNA, 139 bp, Glycine max
  Clone ID: LIB3139-021-P1-N1-A9
aaaaaaaataaaaaaaaaaaaaaaaaaaaaaaaaaaaaaaaaaaaaaaaaaaaaaaaaaaaaaaaaaaaaaaaaaaaaaaaaaaaaaaaaaaaaaaaaaaaaaaaaaaaaaaaaaaaagggggggccgcccctttgggg

SEQ ID NO: 48097 - DNA, 191 bp, Glycine max
  Clone ID: LIB3139-021-P1-N1-B10
cctctgcatgatctggaatttgtgttttctttcgcttgttcgtttgtttaattcaataaaggaaattaggcatgaccctcttgttgagtatgctctgcctatttgaaaatttccacacctcttttaattgtcgtaatgatgtgtgaagtgtgtgttattttaaaaaaaaaaaatataaaaaaagaactaac

SEQ ID NO: 48098 - DNA, 384 bp, Glycine max
  Clone ID: LIB3139-021-P1-N1-B5
ttgaaaaaaatttatttaaaaaaaataaaaaaaaaaaaaaagaaaacataaaaaaaaaaatagtattaaaaaaacaaattcattttaaaatatatataaacaaaataaaaataaataaacaaaacaataaactaataataaaatattatataatattggggccccccccccttttttttctttttcccccccttttttttttcccccccgttcctttagggctccccctttttctttttttggggtctttttaacctttggctaaattttggccaaactttttccctttttaaattttttttcctctccaatttccccccctcttcttccccggaactttaatgtttaacccctgggccccctttttagtgcccctcccccctt

SEQ ID NO: 48099 - DNA, 374 bp, Glycine max
  Clone ID: LIB3139-021-P1-N1-E4
tttcgcgataccaaaacctcagcaatcaacaatgtcgtttttctcaaggggccgtcgcgacgacgacacggtggacgactacgacgagtacgaccccaccccttacggcggcggctacgacatcgccctcacctacgggcgccccatcccaccctccgatgagacctgctaccctctaggagcctcttcttctgatgacaacttcgattatgatcgccctcaatacacctctaacgctgaaccctctgcttatggtgatgaagccctagctactgagtatagcagctactctcgccctaagcccaggcctgctcctgcaggcttcaaccccgccgcagggtccgggtacggagggtccggatccgggtatggga

SEQ ID NO: 48100 - DNA, 371 bp, Glycine max
  unsure at all n locations
  Clone ID: LIB3139-021-P1-N1-E5
ggttccgaaccaggaactaaatatggctgacttgttggaatggtcaaagcaggataagaaacgaatgcttcatgtcgtctaccgggttggtgaccttgatcgcaccatcaaattttacacagaatgtttaggaatgaagcttttgaggcaaagagatatcccagaggagaaatatgctaatgctcttcttggatttggccctgaagaatcccattttgttgttgaattaacatataattatggggttacctcgtatgacatcggcgatggctttggacattttgcaattgcaactcangacatttataaattggttgagcacatcagggccaagggtggaaacatcacaagggaacctggtccagttcaag

SEQ ID NO: 48101 - DNA, 333 bp, Glycine max
  Clone ID: LIB3139-021-P1-N1-F1
tgacaatcccaaactgtagactgtttgggattgtcaataaggaaactcaaacagtctacagtttttgatattctcttgggaatctctcaagattttgaaattgctggtaatactcttatgccagctttttctgttccacaggctactgccagatcttctgaaaatgcggaatcctctgcatgatctggaattcgtgttttctttcgcttgttcgtttgtttaattcaataaaggaaattaggcatgaccctcttgttgagtatgctctgcctatctgaaaatttccacacctcttttaattgtcgtaatgatgtgtgaagtgtgtgttatttt

SEQ ID NO: 48102 - DNA, 381 bp, Glycine max
  unsure at all n locations
  Clone ID: LIB3139-021-P1-N1-H7
aattaattcccgggttttttttttcactaggnncnnaccatacattggtgatattgacacacgggtgtgagaggttgcgaatcccatcacgactatctatttccaggcgttttcctttggaagcaaccttgttcccttccttgttccaaccttgccggttaccttatacctggccttctttctcccttccatatgcgtcctgctcgttcatatgtaacacagtatgtttcttacttcacagtccgtgtttcacttcatgttgctctgtcttctcgttcacctcgttctatcttatctctgtgtcttatattgttaacaatttttcttgagttcatccttttttttttcctactctttctttttttgcttaataattttttt

SEQ ID NO: 48103 - DNA, 166 bp, Glycine max
  unsure at all n locations
  Clone ID: LIB3139-021-P1-N1-H8
tgtatgattgcttttctatttattgtggcatttttgngttgtaccctgaaattgaatttgctgctttattactaatacttattgcaaacacaacaacagggtacatcacaaaaatgccacatttaatatgtagtgcttaacttccaaactcaatttcttacttatt

SEQ ID NO: 48104 - DNA, 379 bp, Glycine max
  Clone ID: LIB3139-022-P1-N1-A3
gctgggaataatgctggagcccaacctcttatactatagccgaattgacctttttgggattacaaccggccgaacgcgacaacagcgccaatacaactttactttatacctaaacaccaaagtggaaacctacactacagttcaatcgaatctaccttgagctgtgctggatctcttcttcttcttcttctttcaccttaggctaccgagttaatggatccgagaggtgtactgatattagtggcggttctagttgcggaaattggctctgtcgccaacggaaatttagtgttcccggtggagcgtcggaaaaggagcctaagcgctgtcagagctcacgacgttcgccgcgcgggtcgaattctcttcgccgtggatc

SEQ ID NO: 48105 - DNA, 308 bp, Glycine max
  Clone ID: LIB3139-022-P1-N1-A8
aacctcaaaaactcaatattctcaacaacacactactttccttcttccaataatgacatcttcattctatgttcgctttcttgctcctccatcatcatgcttccccagctctcggaccaagacatggctctgcgccgccaccaccccaacggtggctccggcaactgcctactcggaggtggaggcttcaaggttggagcctagagtggaggatagagatggggtctgggattcgaaggaagagctcagcggaggcatcagccctgatgaaaaagtcaagctagacaaagaccccatgaaactcttta

SEQ ID NO: 48106 - DNA, 347 bp, Glycine max
  Clone ID: LIB3139-022-P1-N1-C1
ctccctttcaacaaccatggggtgttggtacatggttaaaggaaattaaagacactactaaagaaggatatagttttgaagagctatgcatcaagaaagaagccattgagggagaagagaagttttgtgcaaaatccttgggaacagtaattggttttgccatttcaaagctgggaaagaacattcaagtactttcaagttcctttgtcaataagcaagaccaatacactgtggaaggagtgcagaatcttggagacaaagcagtgatgtgtcataggctaaatttcagaactgcagtattttactgccatgaagtccgtgaaacaacagctttcatggttccattg

SEQ ID NO: 48107 - DNA, 95 bp, Glycine max
  Clone ID: LIB3139-022-P1-N1-C6
ctcaaaattttatttaattgttgctggctcaaattctaggggacatgttcctgaagaggacgatcccaacaaacgcgccacgtttgaaaccagtt

SEQ ID NO: 48108 - DNA, 355 bp, Glycine max
  Clone ID: LIB3139-022-P1-N1-D1
cgaccctacagagtgtttagtcttgacactgggagactgaacccagaaacctacaaattttttgacgctgttgagaagcattatggaattcatattgagtacatgttccctgatgcggttgaggttcaggcattagtaagaactaaggggctcttctcattttacgaggatgggcatcaagagtgctgtagagtaagaaaggtgaggcccttgaggagagcccttaagggtctcaaagcatggattactggacagagaaaagaccagtctcctggtactaggtctgaaatccctattgtccaggttgatcctgtttttgagggactggatggtggaattggcagcctggtgaagt

SEQ ID NO: 48109 - DNA, 257 bp, Glycine max
  Clone ID: LIB3139-022-P1-N1-D10
ctttcaaaaaccaatcaagcaagtggatagtggagactgtgttgatgagaatgagaattgccctaggtgggctaaagtaggtgaatgtgagaagaatccactttatatggttggtggtgaaggagtaaaaggaagctgtatgaagagttgcaatgtttgctcttcttagggcgtctattaccctttctttgctctgaaatgcatgtagagtcataatacgtcgtcaaatatattgtatataacattcatttttgttg

SEQ ID NO: 48110 - DNA, 340 bp, Glycine max
  Clone ID: LIB3139-022-P1-N1-D4
ttcttattctttctttttctccttctaattctttgttacccttcacctattacaagccactcacactaacacaaaaacatggaactaagcaccatgttttgcttgtgtgcttcgtttctcttcattggtctcttcagggcactcatcaaaccttattatgtctccaaacgccgtgacttgccactcccacctggctccatgggttggccttacataggagaaacctttcaaatgtattctcaagatccaaatgtcttctttgcctcaaaaataaaaaggtttggctctatgttcaagtcccacattctaggtcgtccctgcgtgatgatttccagccccg

SEQ ID NO: 48111 - DNA, 359 bp, Glycine max
  Clone ID: LIB3139-022-P1-N1-E1
ggggaatagttcttttagggggcgcgccagttctgatatttacaccatctgctctcaagactgtgaattatggaatcctgcttgcacaaaagcaatgactatgtcatttaatccaaacccgtgttctgatgcatggagtttggaatttctgaagcgtaccggatttcattgtgatatcatttgtgtcactggatggactgccaccccaatgcaggatgttcaggttacaattgattggtttatttcctctcaggaatgtgttcccaggacctattgtgttttaaatccacaaaatccttttgtgttaaataggtggatgggaaaactgactttccctcagggcacttcccgaagtgtta

SEQ ID NO: 48112 - DNA, 199 bp, Glycine max
  Clone ID: LIB3139-022-P1-N1-E8
ctcgagccgattaatgacttgctgtaaataagttactagccttcctcagtttgtttcaatttttatatttataaaaaaaaaaaaaaaaaaaaaaaaaaaaaaaaaaaaaaaaaaaaaaaaaaaaaaaaaaaaaaaaaaaaaaaaaaaaaaaaaaaaaaaaaaaaaaaaaaaaaaaaaaaaaaaaaaaaaaaaagggggg

SEQ ID NO: 48113 - DNA, 361 bp, Glycine max
  Clone ID: LIB3139-022-P1-N1-F1
cgccccccgcgagcagcgtgatttcgagattggaagatttggcgaaggcggtgaagttcgacgtgaagaagagcgagactaaggtgaggttgcagggtcaagaaaaagggcgaaaaggtaaactcgctattgctgcggacttgtacgccgtgacgccgtcgtttttggtggtggaggttaagaaggacaacggtgacaccttggagtataaccagttctgtagcaaggagcttcgtccagctcttaaagatatcgtgtggaggacttctcctgcagagaatcctacactcgcttgaagaacaaccaagactcccatgctaattgtcgttcctttgtagttgtttttgttaattcttgtttc

SEQ ID NO: 48114 - DNA, 359 bp, Glycine max
  Clone ID: LIB3139-022-P1-N1-G1
cgatattctgtgttgcgattatgctagttttgatggtttgattaccaagcaagttatgagcaagatggcagaaatgataaacagtctttgtggtggtgatgaaaaattgatgcgtgaaaggacacacctgctgttggcttgttgttcaaggatggcaatttgtaagaaagatgtttggagagttgaatgtggaatcccttctggatttccgctcacagttatttgtaatagcatttttaatgagatgctcattagatatagctatgaaaaattactgcgccaggctaaagctccaagtatgtttttacaatccttcaaaaattttgtttctttgtgtgtgtatggggatgataacttaa

SEQ ID NO: 48115 - DNA, 362 bp, Glycine max
  Clone ID: LIB3139-022-P1-N1-G2
gattgaaccaaacatgaattcaaggtttcagctttggagtaccactaccaatggtgattttgttaaagggaaagatctcgcaatggttaaagttaatgtagcatgtgctgctgttggcttgacatcaagttacactccaactccattgttggaatctggtttgcaaaaagacagagggttaattgtggagtattttgggaagatgtcttacgttgctcataacgttaatcagccccaagagaaagatttgttagagggaaatttttcctttgatattaaatctcgctctagattggaaaaagtttcctctacaaaagcacaatttgttagtggaaaaaccttcaaatatgatataattggtg

SEQ ID NO: 48116 - DNA, 318 bp, Glycine max
  unsure at all n locations
  Clone ID: LIB3139-022-P1-N1-H3
gctcgagggagttacaaggatcggaagagaggaaggaagtggtggaggagcgttctggggcatactggacgacgttggcgccaaacgtggaggattacagtgggagtttcgcgagatggattgcagcagggtcggngcaagtggttagggggattctgtgggctggggatgtgactgtggacaggttgaagtgggggaatgatttcttgaagaagaggttggagcctggttcacactcccaggttagtcctcaagcactggagagcatcaaaagggttaagaagttgaccaagatgtctgagaaggttgccactggtg

SEQ ID NO: 48117 - DNA, 351 bp, Glycine max
  Clone ID: LIB3139-022-P1-N1-H6
ggagcaagttatgagcaagatggcagaaatgataaacagtctttgtggtggtggatgaaaaattgatgcgtgaaaggacgcacctgctgttggcttgttgttcaaggatggcaatttgtaagaaagatgtttggagagttgaatgtggaatcccttctggatttccgctcacagttatttgcaatagcatttttaatgagatgctcattagatatagctatgaaaaattactgcgccaggctaaagctccaagtatgtttttacaatccttcaaaaattttgtttctttgtgtgtgtatgggggatgataaccttaattagtggttcatgaatatgtcaagcgcctacttt

SEQ ID NO: 48118 - DNA, 314 bp, Glycine max
  Clone ID: LIB3139-023-P1-N1-B7
agaagtaagaactaggaagagatgggagtggatttgagacaagtggtggcaggtgtcctcaccctcacaatgtttgtcatgcttggaaatatgatcaaaagagaccacttcgataattcacttcaagaaaagcttccaggaggatcggaagatgccaactttgagactgctacgtttgatgctactcatgtaagaaagaatatagggctttggaagggagatgtggatgacctaaaaccgtgttgggttaagccatcttctgatgatgtggagcagacccaaggatttgttacttttgcgttaaccaatggccc

SEQ ID NO: 48119 - DNA, 364 bp, Glycine max
  Clone ID: LIB3139-023-P1-N1-D1
tctgcatctaattcaatatacaacactgaaactttcaaagctcttttgagaacttgttattgcaatggctgacatagatcgctcctttgataataatgtttctgctgtttctactgagaaatcaagccaagtttcagatgttgaattttctgaagctgaggaaatccttattgccatggtgtataatctggttggggagaggtggtctttgattgctggaagaattcctggaagaactgcagaagagatagagaaatattggacttcaagattttcgactagccaatgatcggtggcagaaaacgaagcaaggaaatttttggtgcctacaagtcattacagtgactttgtggggatatgaaat

SEQ ID NO: 48120 - DNA, 183 bp, Glycine max
  Clone ID: LIB3139-023-P1-N1-G5
attttcagtttatttcttgcatgacagatgcattgaactgagaagattaaagaattgcaacgtatgtacaggggtgtgcaaaaatcagtactgaactggttccaaattggtttaaacggttcagtttgtaaaccaaatttgagagttggtttgacgaatcggtttaaacatttcatttaagtt

SEQ ID NO: 48121 - DNA, 270 bp, Glycine max
  Clone ID: LIB3139-023-P1-N1-H10
ggctcgaggttgtagatcgcgagcggccgggcgagttgatggtcacaacttcattatgagaggagcaataacacggaaatgtactacgtttatttaggtactttgaaaacagagtttcgagagttgtataggcacaatgcaaaggaagctcgccaatcgctaaggaaagctttatctagcattgtatggacggtaaaccgctgatgtgggttccataacacaaattgttaagttatatcatgcgcaaatggtgctgaatgctcatgattt

SEQ ID NO: 48122 - DNA, 91 bp, Glycine max
  Clone ID: LIB3139-023-P1-N1-H8
gtaatatcatatgatttggggttttgccaaatgatttctttcaaattctgagattgagattattggttgaatgaaaatttgagtccttatc

SEQ ID NO: 48123 - DNA, 94 bp, Glycine max
  Clone ID: LIB3139-024-P1-N1-A9
aaaaaaaaaaaaaaaaaaaaaaaaaaaaaaaaaagaggggaaaaaaaaaaaaaaaaaaaaaaaaaaaaaaaaaaaaaaaaaaaaaaaaaaaagg

SEQ ID NO: 48124 - DNA, 242 bp, Glycine max
  Clone ID: LIB3139-024-P1-N1-B9.R1
aatgaccaaaaaagattatttaattaacacattatataaacattacatacatatttgagtttgaggtgcaaagcagcaaacctcactatagctagaaggtaccactgtacactaggtggaaaaaaaacatatgggaagaaagatacactttccacacacacaccataccctttcctggtgtctaagcagagtctggatgtaagagttctcccataatttattattacagcttacgtagcttt

SEQ ID NO: 48125 - DNA, 452 bp, Glycine max
  unsure at all n locations
  Clone ID: LIB3139-024-P1-N1-B9.R2
aatgaccaaaaaagattatttaattaacacattatataaacattacatacatatttgagtttgaggtgcaacagcagcaaacctcactatagctagaaggtaccactgtacactaggtggaaaaaaaacatatggaaagaaagatacactttccacacacacaccataccctttcctggtgtctaagcaaagtctggatgtaagagttctcccataatttattattacagcttacttacctttccttcttaagatttttgcattagtaatataaaaagtcttttaattatcccatgggtagtaactagtaattagggaacccccagaggttaggatcttcatccatgtattcatagtcggtagcagcaaaattatcaaaacgaggagggctgagtagcattccttcagccatattgaccagaatattcngcatgtcaaagatcaagtcctca

SEQ ID NO: 48126 - DNA, 387 bp, Glycine max
  Clone ID: LIB3139-024-P1-N1-C11
tttagcgtggtgcctttggctcgagaacagactctcatgctcatgtaattatggagagcagaagggttcatatatgaattggaattatttgataccttattaggcctatcctgaagccaaaggaaatgagatcggaattcctcggtgaattccaattccacattttcaagaaataaggaggcaaaaatgttcatatatgaattggaattatttgctttcttattaggcctatcctgaagccaaaggaaatgagatcggaattcctcggggaattccaattccacattttcaagaaataaggcggcaaaaatgttcatatatgaattggaattatttgctttcttattaggcctatcctgaagccaaaggaaatgagatcggaattcc

SEQ ID NO: 48127 - DNA, 364 bp, Glycine max
  Clone ID: LIB3139-024-P1-N1-G3
ctcgtcttcaatcctttcgttattctcttattcatccttctcttctgaataatccagatctctttctgcccttttctccgtcacgcttttcgtgaccggatctgtatggatttgatccagatctacacgccgatggtggttttggccgggtctttcatagatctggtgcgtagaggctcagatctacggtaccgaggtgtgtgattcatgttcgtcttgcttttggaatctgtttcgtagaaagtcgtttggtcttgcatatggcatggctcttgaggtatttttttgcaggtacaacagagaatcgatgacaagaacgcagatccgacggtagatccagccgattccgcttgttcgatcgcta

SEQ ID NO: 48128 - DNA, 356 bp, Glycine max
  Clone ID: LIB3139-024-P1-N1-H3
ggaaaaaaatttaaaaaaaaaaaaaaaaaaaaaaaaaaagagggatttaaaaaaaaaatgagaacaaaaaaaaaaaaaaaaaaaactaacaaaaaaaaaaaaaaaaaaaaaaaaaacaaaaaaaaaaaaaaaaaaaaaaaaaagggcccccccccctttaaaaactttttcacccccaaaataaattccaacccggacccttaaggtttcccatttttccttaaaaaaaaccttttaaaactttgccaaaatattgccaataatttttccctttaaaaaatttttatcctttaaaaattccccacaaaaaacaacccgaaaattaaaaattaaaaccttgggtcccctaaaaaggg

SEQ ID NO: 48129 - DNA, 131 bp, Glycine max
  Clone ID: LIB3139-024-P1-N1-H8
aaaaaaataaaaaaaaaaaaaaaaaaaaaaaaaaggggaaaaataaaaaaaaaaaagaaaaaaaaaaaaaaaaaaaaaaaaaaaaaaaaaaaaaaaaaaaaaaaaaaaaaaaaaaaggggcgcccccccat

SEQ ID NO: 48130 - DNA, 378 bp, Glycine max
  Clone ID: LIB3139-025-P1-N1-B1
ggctataatctagaggcaatgaatccttctctcacttcgtgttcctcaaccttgtcgtcttcttcttcgtcctggttctccggaatcgttcgagccggtcgttccaacagtgtcaaaatgtccaataactccgccgttgcaccctccgccgacaccgtcggccccgtcgttcgcaaaaatcagttccgaggggttcttttcaagtacggtcccaatcctattcaggttgcatttaagactggtgattataagcggcaagtcatttttattggtggattgaccgatggttttcttgctacttcatacttggaacctctggcaattgctctggaccatgagaattggtcattagttcaattccttatgtcatcttcatac

SEQ ID NO: 48131 - DNA, 357 bp, Glycine max
  Clone ID: LIB3139-025-P1-N1-B6
gtccttattttgattccagtatcagcactaacatggacagtatggtacaatcacaaggtattgcaccaaggagaatacgattgggagttgttaggcgtccgcttggttcccaggatgggagttgtgcttgtgccccataagaccataattcatataccatcattactgcagctagaagattgctcattcaacttggatatctaacttatacatgtcactgcatgtgttctgagactattgtgtttctattttagcaagagataaatgtttgagtgtaagagaaccatgcttgcggttgtagttacaccgttaatgacatgcttacaactagctcacatgatttcactaaccaaatta

SEQ ID NO: 48132 - DNA, 362 bp, Glycine max
  unsure at all n locations
  Clone ID: LIB3139-025-P1-N1-C1
gcccaagcttttcgaagcatttttctttctcttcctgcggaggctatccgtgttacttgttcccaagtctccaacaagcaaagtacatggttgatttggaaatccaggtccccagcgcattcgacccgtttgccgaggcgagagaatcagatgcccccggngcaaaggagtatgtgcacatacgaattcagcagaggaatggaaagaagagtctgacaacagtgcaagggctgaagaaggagttcagctacgagaagatcctcaaggacctcaagaaggacttctgctgcaacgggactgtggtgcaagacaaggagcttggcaagattatccaactccaaggcgaccagcgcaagaacgta

SEQ ID NO: 48133 - DNA, 400 bp, Glycine max
  Clone ID: LIB3139-025-P1-N1-C2
cgaaggctcgaatttcgcttgaggttcaacccgttcgtaaaaaaaagtttgggggtttggggggtaaccttggtgtgcatacaaaatggaggagcaaaatggtaggggtaagttgagccaagggcttcgcaaagtgaagccttaccttgctatattgtcccttcaatttggctactcagggatgtatatcatcactatggtttccttcaagcatggaatgagtcattggatactctcagtgtatcgtcatgtagttgccgctattataatagtcccttttgcacttgtccttgaaagaaaaataagaccaaagatgactcttcccatcttcctgaggatagtggcacttggtttccttgagccagtgctagatcagaacttgtacaacatggggatgaat

SEQ ID NO: 48134 - DNA, 380 bp, Glycine max
  Clone ID: LIB3139-025-P1-N1-D1
tcagggaaaaaatttttttcctgctgatgttcttgcaaaggttgctcatgtataagaaaaacatgtccctcatgaaagcctcaaggatcaaattcctgctgttgacaagttgtattctactaaggttaataagtttgcaaaaattatgaaccttagacaaagtgttgttggtgatcttaaacttcttactgatgggaagttgtatgacggtaagcatattcctgtatctaatattagtgcacgggaaaatcatgtacttcaaatacccttaatggcacaggaggaaattctgtcttctagtgcaagtgatttcagaactgcaatggtgagtaaaaatagcaaacctcaagctactgcaatgcatgtgggagctatagaaa

SEQ ID NO: 48135 - DNA, 379 bp, Glycine max
  Clone ID: LIB3139-025-P1-N1-E1
tcagcccaagaccttattgggtttaaaatccacaaaatcctggggggttaaataggtggatgggaaaattgactttcccccagggcacttcccgaagtgttaaaagaatgcctctttctatagggggaggagctggtgcaaaaaatgctattctcatgaatatgccaaatgctgttctttcaatgtggagatattttgttggagatctcgtctttgaagtttctaagatgacttctccctacattaaatgtacagtctctttcttcatagcatttggaaatttggctgatgataccatcaattttgaggcttttccccacaagctggtgcagtttggagagattcaggaaaaagttgtattgaaattttcacaagagga

SEQ ID NO: 48136 - DNA, 261 bp, Glycine max
  Clone ID: LIB3139-025-P1-N1-E10
ctcttgggaatctctcaagattttgaaattgctggtgatactcttatgccagctttttctgttccacaggctactgccagatcttctgaaaatgcggaatcctctgcatgatctggaattcgtgttttctttcgcttgttcgtttgtttaattcaataaaggaaattaggcatgaccctcttgttgagtatgctctgcctatctgaaaatttccacacctcttttaattgtcgtaatgatgtgtgaagtgtgtgttatttt

SEQ ID NO: 48137 - DNA, 93 bp, Glycine max
  Clone ID: LIB3139-025-P1-N1-E12
ggcatgaccctcttgttgagtatgctctgcctatgtgaaaatttccacacctcttttaattgtcgtaatgatgtgtgaagtgtgtgttatttt

SEQ ID NO: 48138 - DNA, 370 bp, Glycine max
  Clone ID: LIB3139-025-P1-N1-F12
gtgatcttatcagctatggcggagaaacataaccttaagaatccagctgtgaagcggattctccaagagctcaaggagatgcaatcaaacccatccgatgactacctgagcctccctcttgaggttcttttcattgctttcctttcctctattattattcttaggcttttcattcttcaatttcactaactggtttcgtttagccacgggtaccttctcttattttgcttctgttgcaattaaaacgttgtattcctctttaactgttagcaattacgcctgttgtcttggatttctagctaatcgtgtttctttggagataaaaaaaataacatacaaaattgaagggtctattttttgagaaagaaaa

SEQ ID NO: 48139 - DNA, 377 bp, Glycine max
  Clone ID: LIB3139-025-P1-N1-F3
gggggcatccatatctggatggggtatactattcacgcggccgtactctccgtgtaagctgcttcaatagccgtaagctgagtccagtattcactggggggccaggtgtggatgaagtgccaccaatatgggttgatcgtactggtgttaaagctaatattacagagaatttcacacgtcagagtaaattcacatatggacttgtaatggaagagataacaacacgtgatgaaagtagtcatatctgtgcaaatggtcaaagagtattacctagtggaggaattagtgccgatggacctccaaccactctcagtggtactggcattgatcacatggcatttttacaggcaaatatcacacgtgataacacacgtttt

SEQ ID NO: 48140 - DNA, 372 bp, Glycine max
  Clone ID: LIB3139-025-P1-N1-F5
atctaatctgaaattgtgctctcaattgaagcaatggaaggaacagctgctccagtgccttatgtccaagaaattgcaaaggaggcattgaccatagtgcctgagcgttatgttcgaccagttcatgaacgtcctatattatctaactctacacctttacctgaaattcctgtcattgacttgagcaaattgttgtctcaagaccacaaggagcatgaactcgacaggcttcactatgcatgcaaagaatggggtttctttcagctaattaatcacggagtggactcttcattggtggaaaaaagtgaagagaggtgctcaaggattattcgatcttccaatggaagagaagaaaaagtttgggcagagaga

SEQ ID NO: 48141 - DNA, 386 bp, Glycine max
  Clone ID: LIB3139-025-P1-N1-G4
tgcttcgaggagaagcataaggagggtatgaatgattccaaaggaagagaaggagaaagtagtgttgttgttcggaagcgattcaaggagaagcagcaacaacaacaacaacaaccctttccttccacaagggccatcatcaaccaacaacaccgtcgctgtgcctccctccccaacaacactcaatacgaggaatctgaaacagatgtccaaagtgtctgatgttagcgtttcagaaggggatgacacatcttggatttcatggttttgcaatttgagaggaaatgaattcttttgcgaagtggatgatgatttcgtgcaagatgatttcaacctttgtggattaagtagtcaagtgccttactatgattatgcacttgatttga

SEQ ID NO: 48142 - DNA, 353 bp, Glycine max
  unsure at all n locations
  Clone ID: LIB3139-025-P1-N1-G5
ctcgagccgaatcggttcgagcggctcgagctcaggacttgcctccggcggcggcgccgggacccgatgccggggccgccggagccgtttcgagctcggtcgccatgattggagcttccgtactgttgtcaatgctcgccatcttcaagcactgagtataaatctgatggatccatcttgtgtgaagattattgattcgttctgcacactcagatctattgttgctgcttttataatacgttacgagtgatgattattaatttattattattatgattattatgagtttatctatgtntaatagagagagagagagagagatcttacagcatttatataatgaaccatttatt

SEQ ID NO: 48143 - DNA, 99 bp, Glycine max
  Clone ID: LIB3139-025-P1-N1-G8
tcaggaagctttattaaatgggttcttcttcttaatgcattgaagggaattagaaggggcttatttcccttcattcccaggttttgaaacttgaaaaag

SEQ ID NO: 48144 - DNA, 377 bp, Glycine max
  Clone ID: LIB3139-025-P1-N1-H1
ggttaaccaattggttaaccatgcccatcaataaagtcaggggagcttttaaatgggttgaaagctgaacttatagaatcatggtttgggatacccgttagtccaaactatgctaaagaactggtgtcaggtccagacaaaggagtggaattggacaacatcattcgcaaaattgatgatgatggtcgtttggttggaattgtgaatgggcatgatgttcaggagtggaatccaaccactgacaaatatatagctgtcaaatatgatgtttcaacagtattggaagcaaaggctcttctgaaagaagccctccaagcagaagttggattgccagtcgacagaaatattcctctcattggtttcattggtaggcttga

SEQ ID NO: 48145 - DNA, 382 bp, Glycine max
  Clone ID: LIB3139-025-P1-N1-H2
tcgagcctcggtgttgctttagggatggtatgaccagagcacccggtgttccgtttccctccgcccagcgcgccgcgcagttgaaattcttcttggaggatcctctcaacttcgattctcttgctgtcgttttcaataagtcaagcagatttgccaggttgcagaatattcagtgtgctattgcgggcaagaatttgtacatgagattccgatgcagcactggtgatgcaatggggatgaacatggtgtcaaaaggtgttcaaaatgtccttgattttcttcagagtgacttccctgacatggatgttattggaatttctggaaatttctgttcggacaagaaagctgcagccgtgaattggattgaagggcgtggcaagtt

SEQ ID NO: 48146 - DNA, 381 bp, Glycine max
  Clone ID: LIB3139-025-P1-N1-H3
tggggggatttagtggggcttgttcacaatttttaaaaaattgtgctgaaaagggagatcaagaaaaacccaaaaagattgatgccagattgagacaaagaatagatcctcaatacaatgaggttcaggctcagatggaaacaaatttgtttaaattgtctcttgatgatgttgaaactcctaaaggttccatgttggatcttaaaatttctcaatctaaaattgcacttcccaaaaacacagttggaggaaccattctgcgtagtgacctattggcaaattttttgacagagggcaattttagagcaagtgttgatttgcagcgcactcatcgtatcaaaggaatgattaaaatggtggccacagttggtattcctgaga

SEQ ID NO: 48147 - DNA, 277 bp, Glycine max
  Clone ID: LIB3139-026-P1-N1-A10
gttggatagagccactacatagcttacaagacaaactcttttttcatgtgcagtatcaaaatgatgtggtagcaactatggtagtggtagttggagctctaggaatttgagaggctgctagtgcacgatgtcgctacagctcggagtgattcatgaataatgttgtgttgtaagattgacaagaggaagttagctactgcgatggacaacgaaggtgcgtaccgcaccgactttgtgggatgatggaggcgcatattggtatgctattgagcatgat

SEQ ID NO: 48148 - DNA, 365 bp, Glycine max
  Clone ID: LIB3139-026-P1-N1-A2
ctaggttctagatcgcgagcggccgccctttttttttttttgtttttaaaaccataatccatagatattcttattgcatcatcatcatcatcaacaaaccgcattacaaaagaaagatacagccacctggataggcccatagtggttcccaaaacacacaagcaaacaaaacaaaaacaaaccaaacctgagaaaattaaagaaataagaaaccccaccaatagggtctcacatctctctaacctctagaacacaccaatactacgaaaatatatcaatgttccctgaaaccgttcgacccagtcaccgccacgtgcacaacctccttatttaattattattcacacgtgaccgcgttcttccct

SEQ ID NO: 48149 - DNA, 367 bp, Glycine max
  Clone ID: LIB3139-026-P1-N1-D1
gaaagcatgttgcctaatagagggaaagatcagaagtggacgtgattcctacaggggaaggaaaaagtacaaggacttaactcctgcatgacaagcagcttttgagtcatcataatatgctgaacctgctgcacgagcatcattgtaactattccgatctgaatcacatgatcctgatgatcattatagtccaagactccaaccaagaaaagtggaggatacgacatgatgatgtgagacctcaactggaagaaaaggcaatcctcagtgaaactcaaagggaagatgagttagaaaagtcagaagacattataagttgcaattcaactgatgaggcttttgagggggctactgccttggtagatgg

SEQ ID NO: 48150 - DNA, 367 bp, Glycine max
  Clone ID: LIB3139-026-P1-N1-D6
tcgagcggctcgagcggctcgagttcatttttaaacctagctccaggtccctccactcaccataacatggcatcagaagcaaatgctgccaacaccaacttctgtgtaaatgttagcaacaatggctacattagtgctaatgaccccttgaactggggtgcggcggcggaggctatggctgggagccacctcgacgaggtcaagcgcatgctagaggagtaccggaggcccgtcgtcaagctcggtggagagaccctgaccatctcgcaggtcgcggcgatcgcggcccacgaccagggggtgaaggtggagctggcggagtcctccacggccggcgttaaggccagcagcgactgggtgatggaga

SEQ ID NO: 48151 - DNA, 360 bp, Glycine max
  Clone ID: LIB3139-026-P1-N1-E1
ccgaagtgttaagagaatgcctttttctataggggggggagctggtgcaaaaaatgctattctcatgaatatgccaaatgctgttctttcaatgtggagatattttgttggagatctcgtcttgaaagttctaaaatgactttttcctacattaaaagtacagtctctttcttcatagcatttggaaatttggctgatgacaccatcaattttgaggcttttccccacaagctggtgcagtttggagagattcaggaaaaagttgtattgaaattttcacaagaagaatttcttacagcttggtcaactcaggtgcgtcctgcaacaactctgttggctgatgggtgtccatatttgtat

SEQ ID NO: 48152 - DNA, 361 bp, Glycine max
  Clone ID: LIB3139-026-P1-N1-E4
tcgagtctctggcggttcgatgaacccggcacgctcctttgggcctgcagttgttagtggtgacttccatgacaactggatctactgggttggacctcttattggtggtggtttggctggccttatctacggcaatgtcttcattcgctctgaccatgcacctctttccagtgaattttgatctgattcaagtcatggcctttgtaattcatgtttcttgataataaaaggaggaaaagcaggtcttgctttgctttcttttcctatctctcttgtgttactctctctacattctatgctttttttttcatctcttaatgtatttggtaagcgcgctactactgtctcatttggggagaat

SEQ ID NO: 48153 - DNA, 115 bp, Glycine max
  Clone ID: LIB3139-026-P1-N1-E7
ggcagtcaagtaatactgtatattctgttggggatggggtggatcatgcataactaaactatcaagtatccctgtatatacaagttgtctaaattgtgaaagttacatatacaag

SEQ ID NO: 48154 - DNA, 228 bp, Glycine max
  Clone ID: LIB3139-026-P1-N1-F12
ggtaatactcttatgccagctttttctgttccacaggctactgccagatcttctgaaaatgcggaatcctctgcatgatctggaattcgtgttttctttcgcttgttcgtttgtttaattcaataaaggaaattaggcatgaccctcttgttgagtatgctctgcctatctgaaaatttccacacctcttttaattgtcgtaatgatgtgtgaagtgtgtgttatttt

SEQ ID NO: 48155 - DNA, 324 bp, Glycine max
  Clone ID: LIB3139-026-P1-N1-G8
ctagttctagatcgcgagcggccgcccttttttttttttttttttttttttttttttttttttttttttttttttttttttttttttttttttttttttttttttgggtgtttagattttgtttttttttttttttccctctatttgttttttttttgacttcttttggatcttttttttttttaatttttctattttaatttttttctttttttttttcttttcttcttgtttttttatctttttttttttttgggtttttttttttttgtttccttttcctctttttaatttttttgtcttttattaccatttttctttttt

SEQ ID NO: 48156 - DNA, 189 bp, Glycine max
  unsure at all n locations
  Clone ID: LIB3139-026-P1-N1-G9
cggctcgagctagttctagatcgcgagcggcccgccgatgattctttttttttttttttattgntgttatctttgctcagaaatattaatggatatgaatttttgaattatgacantnaaaaaaaaaaaaaaaaaaaaaaaaaaaaaaaaaaaaaaaaaaaaaaaaaaaaaaagggaggacgacaaact

SEQ ID NO: 48157 - DNA, 363 bp, Glycine max
  Clone ID: LIB3139-026-P1-N1-H3
ggctcgagcccttttttttccaccatgcaccaagccattgcccacagaagcttcatccccataggagcacgtggcatgccacacgcaggaggaatcaaagaatccaatggcacctatccatccaaagctgccacaatggtatcggagaacgcggtggtaatcattggaaaacggggatgctgcatgtgccacgtggtaaaaaggttgttacaaggtctgggagtgaaccctcccgtgtacgaggtggacgaggaccacgaagccgccgttgctctccacctgtccccgcagggcgccgaaacggtgcagtttccggcggtgttcctggccggcaagttgttcggagggttggaaagagttatg

SEQ ID NO: 48158 - DNA, 89 bp, Glycine max
  unsure at all n locations
  Clone ID: LIB3139-027-P1-N1-A2
caaaaaaaaaaaaaaagaaaaaaaanaaaaaaaaaaaaaggagaaaaaaaaaaaagggaaagaaaaaggggcggccgccgacaagggag

SEQ ID NO: 48159 - DNA, 364 bp, Glycine max
  Clone ID: LIB3139-027-P1-N1-A5
cgagtattatggattctttgaggccattgctcaaaccccctacacctgaacctggtcgtccgagcatgccattactgacctgaatggttggaacgccaagttgcttttcgtgcacatatgacaggattctattggtctttgatgtctaacaagatttcactgctttagttgtccctagggtcaattgtatatttctttaattcaggtttaagaatattgattttcaacgcagagcaaggatactccacactccctctttgttgttccaaacaaatttgtttgattaggtgatcttgtaattttaccgagaaatgttttactttttcttctttcataattttgtatgtaaaaaaatattccgatt

SEQ ID NO: 48160 - DNA, 103 bp, Glycine max
  Clone ID: LIB3139-027-P1-N1-B11
aaaaaataaaaaaaaaaaaaaaaaaaaaaaaaaaaagaaaaaaaaaaaaaaaaaaaaaaaaaaaaaaaaaaaaaaaaaaaaaaaaaaaaaaaaaaaaaaaaaa

SEQ ID NO: 48161 - DNA, 126 bp, Glycine max
  Clone ID: LIB3139-027-P1-N1-B2
tgggggggaatggtttttacttgtgaacaggtggctggggctggttttggtccctggaggtgaaagcggtcccccccaatctttcttttttaattggccccggtttctattccgcaatggcccaaa

SEQ ID NO: 48162 - DNA, 214 bp, Glycine max
  Clone ID: LIB3139-027-P1-N1-B3
gtacgtacgtacgtttacgcatcttcatgttagggtagaaagaactaagacctgcacataaagtagttattaacatcttttctgtacattctctagcgtgacatgtggctttaggtgttagattaggaattgaagattgaagaacgaagaagtagggttagtagaatttgtaggactcagttctgtagttatacatatgatgataattcttgct

SEQ ID NO: 48163 - DNA, 358 bp, Glycine max
  Clone ID: LIB3139-027-P1-N1-E5
taataaaccgcgatcacaggttgccgcaccttaaaaccggaaacaaaagcaatcgttacttgatttcaagaatttctcaatttcttcctacttctttgtgtacgatttcttaagggaaagaaaatcactctctgtgctggtcacagacttcgtgaatcattttcttttccactcctagtttatttgctgaacactctcctatttgatataggacttcgtgtcagatttaaactttttctgtttctttctcagttctctgtttaatttcaagttcaagctggtgaaattttggattagtgctcccactctcctatctggtataggacttcgtgggtagacttttctacttctctccttt

SEQ ID NO: 48164 - DNA, 176 bp, Glycine max
  Clone ID: LIB3139-027-P1-N1-E8
ctggaattcgtgttttctttcgcttgttcgtttggggaattcaataaaggaaattaggcatgaccctcttgttgagtatgctctgcctatctgaaaatttccacacctcttttaattgtcgtaatgatgtgtgaagtgtgtgttattttcaaagatacaaaaaacccactgttgag

SEQ ID NO: 48165 - DNA, 364 bp, Glycine max
  Clone ID: LIB3139-027-P1-N1-H4
ctcgcgtcgagcgacacttgggcctttgtcgtgtaataatggggaacatggagattcttcggcctggcactgatcagtttcatcccagtagttgtgaatatgataatggggtggatgccattgaatgtccacaatactatgtggtgtggaatatgaacatgaacacccacatctatccggaattcgttgttagctttaaagtctcgtctgacgctgaaggtcatttttgtggaagtgagggtaagaatgtttctggggttaatacagcctgtgacggtcctcatggcttgttaaattcagaatcttctactgtagataatggaaaagctcctagtatggtttctagcaccccaaaagttccaaa

SEQ ID NO: 48166 - DNA, 360 bp, Glycine max
  Clone ID: LIB3139-028-P1-N1-A12
ttgggggctgtatacatagtgagcactgggtcacttcttatgaacaaaaccagttacaatctggcgatgccggcggctcatccgggacatccaccgacgggccggccaggattggctcagaacggggcggatgaaagtcgattagacggagggacgggcctcaaggggaacgtacggcagtatgatgaacacgggcacacaatagtacagggcgatgaggcaccagcgaagtggaggttgatgtgcgcttgagatgtaagggagcccagtgcttgactgccgaaaagggcttatgtgggcccactctgagtacgtttatcaccaacaaaaccgcttggcatacagagatggcggagacaa

SEQ ID NO: 48167 - DNA, 212 bp, Glycine max
  Clone ID: LIB3139-028-P1-N1-A7
ttaatttcggtgagagtgtctactgcgtatgttgtaatagtcaggcgggattttaaatgggtcaactttggaccttgtttgaacttgcaagcatgtggataaccaaggagtcctacgcttgcatggataattgtgcaattgaaaatttattatgatgttatgaagatttatggattcatggacaagggtcattttactgtgttgtagggggg

SEQ ID NO: 48168 - DNA, 271 bp, Glycine max
  Clone ID: LIB3139-028-P1-N1-A8
cttatcatccgccttcgctatcctcaaggctcagcggaagaaatgggctgcaactaccttcaagaggtcactggtgcaggtgctaggaaaaatgcagggaaatttgctgttctacacctccgatttgataaggatatggcagcccattcggcctgcgattttggtgcgcgaaaagttgaaaaactggcccttgcaccgtatagacagcagactcggcacgggagggaagttaactctcacttgcatgatttatagttctcgaggggagggg

SEQ ID NO: 48169 - DNA, 148 bp, Glycine max
  Clone ID: LIB3139-028-P1-N1-A9
cgttgtctcctttaaataaatggatagatataggacgcgcgtgttatttacgagggcggctccctatatcccctctattatctcaagggcttgctcaattttgccgattcacaatacatgtctgtactttcttattacccccccaaaa

SEQ ID NO: 48170 - DNA, 270 bp, Glycine max
  Clone ID: LIB3139-028-P1-N1-B3
tttccccacaagctggtgcagtttggagagattcacgaaaaagttgtattgaaattttcacaagaggaatttcttacagcttggtcaactcaggtgcgtcctgcaacaactctgttggctgatgggtgtccatatttgtatgcaatggtgcatgatagttcagtgtctacaataccaggtgattttgtcattggtgtcaagttgacaaccataaacaatatgtgtgcatatgggctcaatcctggtatttcaggttctcgtcttttggca

SEQ ID NO: 48171 - DNA, 323 bp, Glycine max
  Clone ID: LIB3139-028-P1-N1-B5
gttgaacaagaaacagcagtgcctggcgaaaaagagagggaaaacaatcatgaggctgcattctgtttccgattctctttgcatttacctttctgtcctcgcccgttctctctgcttcggatctggtcctcgccaaggttgaccgtcgcattgatctgacttcacagattgtgcgcatcactacttcactaaaggtgcagaatacgggatctgatgttgtgtctgagattttgctgtcctttcctgagaaccaggcaagtaacttggcatacttgaaggcaacacttggtgatgggaagggaaaatcaaaaccatcttctggt

SEQ ID NO: 48172 - DNA, 260 bp, Glycine max
  Clone ID: LIB3139-028-P1-N1-B7
cgaaaatatattaaaaaaaaaaaaaaaaaaaaaaacgcccgcctatttaaaacgccccgacataaaaaaaaaaaaaaaaaaaattaaaaccggggcctccccccccttccaaatctccctatccccaaaattaattcccccctcgtaacctccacgcttcccaactctccctaaattcttttctttaaaatttccccttaatcatccccatacccttcttcctctttataaatttttattctttaacaattccccacccc

SEQ ID NO: 48173 - DNA, 280 bp, Glycine max
  Clone ID: LIB3139-028-P1-N1-C12
tcgcttcgggcctcaaagtttgagaagcctcaaaccttaaaatggtggggaagttaatccctcccttcaatggatgtcttgctaggtgtggatgaataatttgcgtgttccatgactactactacttcattcataggtctaatgtcatctcatcaatacttaaactggtctgttttttccttttctccttttactcacaacatattttttggttatgcaatgctaccgccttgatgcgatggaaaatttattcaaaattttgtcccaatggattgctttt

SEQ ID NO: 48174 - DNA, 348 bp, Glycine max
  Clone ID: LIB3139-028-P1-N1-C2
ctcgagccgtgttagcgacacactccctaacacttctcgtacagcagagctatcaggcttccattcatacgattcaccaaagccagatagctctgctgtaagagaagtgttagcgacacactccctaacacacttcctattattattagtgaaaatttattggaaattacaaagtttgagtgaaactcattaaatagttaagacttaccaataaatttcagtcactaataagcgtgttaagtatgttgttaacatttttcttactgtattcatctgtgaagcctgcttctgtattcatctgtcaagcctgcctctgttgcttcaaaactcaaaaggcctgaattcaac

SEQ ID NO: 48175 - DNA, 105 bp, Glycine max
  Clone ID: LIB3139-028-P1-N1-C3
aaaaaaaaaataaaaaaaaaaaaaaaaaaaaaaaaaggggaaaaaataaaaaaaatgggcaaaaaaaaaaaaacaggcaaaaaaaaaaaaaaaaaaaaaaaaaaa

SEQ ID NO: 48176 - DNA, 356 bp, Glycine max
  Clone ID: LIB3139-028-P1-N1-D1
ggcgttttcataaacgcctttcttctccgtttccggtgcctcgttcgaattcgctttttgatctgcgaaaatgagagagtgcatctcgatccacattggtcaggctggtatccaggtcggaaatgcttgctgggagctctactgcctcgagcacggcatcgcgcccgatgggcaaatgccaagtgacaagacagttggcggtggtgatgatgctttcaatactttcttcagcgagactggtgctggaaagcacgtgccacgtgcagtgtttgtagatcttgagcccactgttattgatgaggtgagaaccggaacttaccgccagcttttccacccagagcagctcatcagcggca

SEQ ID NO: 48177 - DNA, 311 bp, Glycine max
  Clone ID: LIB3139-028-P1-N1-D3
tcggttgaggcggttggggttctttcccaataattttaaaaccttgggggtttttatttcctggtgtcctccggtggcaatggaggacctgtggaagcgcgcgaagaccttcgccgaagaggccgcgaagaaatcccaatccctcaccccttactccttccggatcgccgatctcgtctccgaaaccgccaagaaatcgaaggagctcgccgccgaagccttcaagaaggccgacatgctcaaatccgccgcgctccagcaggccgaccagatcaagtccttctccgacaccatcgccattcctccccaat

SEQ ID NO: 48178 - DNA, 348 bp, Glycine max
  Clone ID: LIB3139-028-P1-N1-E1
ccgcggcttcaaccttgtagttattctctttcttcttttttagctatccctctcttgaaaaatctagatctcgttcttccttgatctacgttacgcttttagtgaccggatctgtatggatctgaaccagatctacacgccgatggtggttttggcctggtctttcatagatctgatgcatggaggctcagatctactgtacagaggtgtgcgattcatgttcgtctctcttttggaatctgtttcgtagaaagtcgtttggtcttccatgtcgcatggctcttgaggtatttttttttgcagatactgtagataatcgatgagaagaacgcagatccagccgcttcc

SEQ ID NO: 48179 - DNA, 355 bp, Glycine max
  Clone ID: LIB3139-028-P1-N1-E3
ctcgagccgttcgagccgtgctggttcacattcttgagaagattttcctgaaaaggaagatcaagaaaaacccaaaaagattgatgccagattgagacaaagaatagatcctcaatacaatgaggttcaggctcagatggaaacaaatttgtttaaattgtctcttgatgatgttgaaactcctaaaggttccatgttggatcttaaaatttctcaatctaaaattgcacttcccaagaacacagttggaggaaccattctgcgtagtgatttattggcaaattttttgacagagggcaattttagagcaagtgttgatttgcagcgcactcatcgtattagaggaatgattaaa

SEQ ID NO: 48180 - DNA, 331 bp, Glycine max
  Clone ID: LIB3139-028-P1-N1-E4
cctcttttttccattttctctctctagataggtaaaaggggttactccgccgggggtaaggtttccgatcttaacggcggtaagggcggtcggcgttgccgttactgttcttctgctgacgtgggccgtccatttcagaggaggcctcgatctcatctgtgataacaaagatctcatctttgatgctcattcagagttcttggagacataccagtttgagaacctcttcgcgaagcgcaattcgccggtggcacatgcagtcggattctgggactaccgttctttcatcactgctgcagcactgtatcagcctcttggctttggcaccact

SEQ ID NO: 48181 - DNA, 217 bp, Glycine max
  Clone ID: LIB3139-028-P1-N1-E8
cttcatactcaactttattttaacctgcagatcgtgatgctccgcgggccttttctgaggaggaagatcaacaaaaacccaaaaagattgatgccagatccactatcctctccccttaagagcttttggcggttagacgctcctatctcaaccacttcaatcactccttgtaagaatatgttgcattttatacctctggccatctacgccagctttt

SEQ ID NO: 48182 - DNA, 355 bp, Glycine max
  Clone ID: LIB3139-028-P1-N1-F1
tagaaagttagcagattgtgattttctcaagagaaactttaagcagatgtctaatgttttgtgggtggctcctgaggacaaggcgagtttatggtcacaacttcattatgtttcgtgtaataatctggaaatgcaagaagcttatcttgtcaatctcgtaaatgtgttacgggaattgtatttgcacagtccagaggaagctcgccaattgagaaggaaagctctctctcgtattgaatggttgcaaaaagctgatgtgcctaccatagcacagattgaagagttccattcgatgcagaggatgatgaatgctcctgattcaaatgataatattgatctactgttgagcattgat

SEQ ID NO: 48183 - DNA, 57 bp, Glycine max
  Clone ID: LIB3139-028-P1-N1-F10
aaaattaagaagtgttcgtaacattaatcattatgtaagttattaatgtcttccatt

SEQ ID NO: 48184 - DNA, 323 bp, Glycine max
  Clone ID: LIB3139-028-P1-N1-G1
accaaaaaaggagagagattctaatttctaaaatctaaaccatcatgaagaacacaaacaccaacacgaaactgatcctcctccatccttatatccaaaaacaaggaagctccaatcgcttgtggcttctagcattggtatcaatcctcaccctcgcttttcttgttaccctcatttccacaagagaatccaccttcatcaccactgcaacttcttctgtgactccctcttcaaataatgctccagtttctggttttggaagtgctcctttgccagccacagtgatcaacactctcctacactatgcatcaaaatccaatgac

SEQ ID NO: 48185 - DNA, 357 bp, Glycine max
  Clone ID: LIB3139-028-P1-N1-G2
gacctcgtttaaaaagctagatctggtgatcagcgtaggttgagagggaatcgtcacagtagacaccaaagtttaacacaaaagtatatgcctcaaaccttcagagatatgattgggcagaatttagtggcacaagctctttccaatgcagttatgaaaaggaaagttgggttgttgtatgtgttttatggcccccatggcactggaaaaacttcctgtgctcgcatatttgccagagctctgaactgtaattcttcagaacacccaaaaccttgtggtttttgcaattattgcgtagcacatgatatgggcaagagtagaaatataagggaagttggtccagttagtaattttgac

SEQ ID NO: 48186 - DNA, 181 bp, Glycine max
  Clone ID: LIB3139-028-P1-N1-G3
gttgaggaccaaatcctttttaatttttccaagtcccatggcatttttaatacccacatcctaagcacaggttttctgctctaaagcacccatgtgcttgggggatattgatgggaaggaatggtcttttgtaaggtattgaggaggtttatttgggaagtaggaagggtaaaaatttggc

SEQ ID NO: 48187 - DNA, 359 bp, Glycine max
  Clone ID: LIB3139-028-P1-N1-G8
cttcaacaatccaaggtatataaagagagtccacccggttataacacacagaatatgaaagtattaaattccaactcttacaagcttttaccaatctttcacaactcttgttcaaggcgaaacagcttataggatgaagagcaaaatcttgaaggcactaccaaaagcagttgcagcagtcaccgtgacatttcaaaaccatccattcagcccaggcagggatcacaaatcaaagcctatcgtatctatgattccccatgaagctagaagaaaaacccacgatagaagcaataacggcattgatgaaatttattcccaagaacccacttcaccaaaaatctcctgcatgggacagatca

SEQ ID NO: 48188 - DNA, 355 bp, Glycine max
  Clone ID: LIB3139-028-P1-N1-H1
ctcgagccgtctaatcctcctctgtctctctctctccaccattgccatggatccttacaagctccggccatccagcgccttcaattctcccttctggactacaaattctggtgctcctgtttggaacaacaactcctctttaaccgttggagctagaggtccaattctgcttgaggattatcatcttgtggagaagcttgcaaactttgacagggaacgtatcccagaacgtgttgtccatgccaggggagctagtgcaaagggtttctttgaggtcacacatgacatttctcacctgacatgtgcagatttccttcgagcccctggagttcagacgcctgtaattgttcgtttc

SEQ ID NO: 48189 - DNA, 93 bp, Glycine max
  Clone ID: LIB3139-028-P1-N1-H3
ggcatgacctttttgttgagtatgctctgcctatctgaaaatttccacacctcttttaattgtcgaaatgatgtgtgaagtgtgtgttatttt

SEQ ID NO: 48190 - DNA, 354 bp, Glycine max
  Clone ID: LIB3139-029-P1-N1-A12
gtaaaatttcttaatctaaaattgcactttccaaaggcacagttggaggaaccattgtgcgtagtgatttattggcaaattttttgacagagggcaattttagagcaagtgttgatttgcagcgcactcatcgtattaaaggaatgattaaaatggtggccacagttggtattcctgagaatacggtatagcattggcctgtgctatgaatattcttttagggggcgtgccagttctgatatttacaccatctgctctcaagactgtgaattatggaatcctgcttgcacaaaagcgatgactatgtcatttaatccaaacccgtgttctgatgcatggagtttggaatttctg

SEQ ID NO: 48191 - DNA, 326 bp, Glycine max
  Clone ID: LIB3139-029-P1-N1-A2
caactggttgccttggataaaagatcatctcaagtgatacaactcagtcctcctgcttcagtctccctgagtcaagagttcttcttggagtcttttccaaagggatctgcaacttggccagaggagaagcttcctgtttcaagccccaaggctaaaacatcagtgatgcgtaaatccgagtacaagttcttgaatcttcttgcaagagtacctcctctgctatgcatggggtatggtcattgtcactgctggctgggatggtaggataaaatcattccacaattatgggctacctatactggcttgaaatgaagtgatttttccta

SEQ ID NO: 48192 - DNA, 357 bp, Glycine max
  Clone ID: LIB3139-029-P1-N1-A3
cgatttgtttctgatttggatcctctcttctctgctttgatctccgctacccttgttgttttctcaacagagagagagagagagaatctttcgaagttcgtttgcgtgtgttgtgtggtcagtcaccgatggcagcaccacctgcgagggcacgtgccgattacgattacctcatcaagcttcttcttttggcgatagcggtgtgggaaagagttgctgcttttgcgattttctgatggttccttcacaaccagttttatcaccaccattggcattgattttaagataagaaccattgaacttgatggcaaacgcattaagttacaaatctgggatacagctggtcaggagcgattt

SEQ ID NO: 48193 - DNA, 357 bp, Glycine max
  Clone ID: LIB3139-029-P1-N1-A4
ctcgagccggtaagaaagatgtttggagagttgaatgtggaatcccttctggatttccggtcacagttatttgcaatagcatttttaatgagatgctcattagatatagctatgaaaaattactgcgccaggctaaagctccaagtatgtttttacaatccttcaaaaattttgtttctttgtgtggtatggtgatgataacttaattagtgttatgaatatgtcaagccttactttagtggttctaaattgaaaagctttctagctagtcataacatcaccattactgatggtattgacaaaactagtgcaactttgcaatttagaaagttagcagattgtgattttctcaagaga

SEQ ID NO: 48194 - DNA, 355 bp, Glycine max
  Clone ID: LIB3139-029-P1-N1-B7
cttcttaatgatttgctgaatctaagaacatggcaacctgtcaagtatttgaatcaaatattggtgaaacgactctgtaaataaatttccctgtctgatgtgagacctatctagtcactatttcaatttgcttaattgaactttgaatagaataaacaaattggattgaaaattagggacatattactcataagtccggaaaatttcatcccattttatcgtgtgctcttccttgaatttgtagtcaagtgcaactatgaacttattgggattatgtgctatatttgtaaaatatcattagtatcatctatgttaagatgttggatgtagccatttactaagaagattttgtttt

SEQ ID NO: 48195 - DNA, 242 bp, Glycine max
  unsure at all n locations
  Clone ID: LIB3139-029-P1-N1-D10
aatttccgggtttattatctnactaagangacttctccctgcagggattgtacagtctcttggcgggataacatacataaatttgtcttatgataccatcaatttttaggcttttccccacaagctgttgcattttggagagatttagaaaaaagatgtattgaaatttttacaagaggaattttttacactttttcttctcattgttcttactgtaacactctgtttgttgatggttgtcc

SEQ ID NO: 48196 - DNA, 176 bp, Glycine max
  Clone ID: LIB3139-029-P1-N1-E10
ctgaaaatgcggaatcctctgcatgatctggaattcgtgtttcctttattgggtgaaacaaacgaacacacgaaaggaaacacggcatgaccctcttgtagagtatgctatgcctatctgaaaatctccacacctcatctaattgtcgtaatgatgagtgaagtgtgtgatatttt

SEQ ID NO: 48197 - DNA, 228 bp, Glycine max
  Clone ID: LIB3139-029-P1-N1-E5
ggaaaaaaaaaaataaaaaaaaaaaaaaaaaaaaaaaaaaaaaaaaaataaaaaataagaaaaaaaaaaaaaaaaaaaaaaaaaaaaaaaaaaaaaaaaaaaaaaaaaaaaaaaaaaaaaaaaaaaaaaaaaaaaaaaaaaaaaaaaaataaaaaaaaaaaaaaaaaaaaataaaaaaaaataaaaaaaaaaaaataaaaaattaatggggtgccctatttatatttt

SEQ ID NO: 48198 - DNA, 375 bp, Glycine max
  Clone ID: LIB3139-030-P1-N1-A2
cccaaatccacgcttcccttacaccgcgtttggatctccgttatacaaactcattaaaatgttgcgagagaaaaacaaaacagaaaaaaaattcagttaattattaaattttgttatggctttccacgaccatctccagcacgagatagcgttccagcgtttcacggaggagcaagagttgaacgagaatagagacatgcaacagaggctcccacctccgacatggctcaacaacgttaacgtcaacgcgcgtcaacagaatttcctcgacagcgagaagagcgtggatcggaaccgaagcgagagcaattgcgaatccgaggatttgagggaatacaaagcggacattctaggacaccctctctacgatcaact

SEQ ID NO: 48199 - DNA, 325 bp, Glycine max
  Clone ID: LIB3139-030-P1-N1-A4
ggaaaaaattttaaaaaaaaaaaaaaaaaaaaaaaaaaagaaaaaaaaaaaaaaaaaaggaggaaaaaaaaaaaaaaaaaaaaaaaaaaaaaaaaaaaaaaaaaaaaaaaaaaaaaaaaaaaaaaaaaaaaaaaaaaaaaaaaaaaaaaaaaaaaaaaaaaaaaaaaaaatggggccccccccccttttaggatctttcccccccgaaataaattttggccccttgcttcttggagtaacaaatttttttttaaaggggttttttaaaaattgggaaaaaaaagagaaatatttttaccctgggaaaaaattttttcccttaaaa

SEQ ID NO: 48200 - DNA, 350 bp, Glycine max
  Clone ID: LIB3139-030-P1-N1-B4
tgcaaattaaagaatttagtgatcttgactcttggaggtcccatttttctgtgcaactggatcatgtactaagggacaatgctgttttaaggtctgaggttgaaaaagtccgggaaaatcaagtgtctttggaaaacaaggttgtagttgtgttttctgtgtgtgttattttttcattgcttgctatttttcggctatctttggatatgattatgaacctctatagagtcctaagttttgatagaacaataacctccaggagattttggcaagggagctcttcctggtttttcctattattgagttgtagcattggtattttcacattaactttatgaaaatccattttt

SEQ ID NO: 48201 - DNA, 363 bp, Glycine max
  Clone ID: LIB3139-030-P1-N1-B7
aacaagaagacacccgaagaagaagaagaagaagaagaagggggggggggtgccatcccataggaagagagcaaagagaagagaaaagatgtttgagccgcagcagctatacactcgagcgaagaccgaggaattcgacctcgaatcaggggaaaccctctacccagggctgagcgtcggcgagaaccagctccgatggggcttcatccgcaaggtctacggcatcctctccgcccagatcgtcctcaccaccctcgtctctgtcaccaccgttttctatactccaatcaatgacctcctcaagggcaattccaccctcctcctcatcctcctcttccttcctttcatctttttgattcccct

SEQ ID NO: 48202 - DNA, 371 bp, Glycine max
  Clone ID: LIB3139-030-P1-N1-C2
ggaatctgggaaggttgatgacatgaaaacatctgatgttgtcagggttgatccaggactgaagtccaaaatcgcagattttccttcttccttagtgatggagcaagataaagctgctgcatcatatgatagcccactggctgctgcagaaccaaaatattgtttgaccggagagaattgtgaaaatgctaatgaggaaccaaatccttcagaagctgagatcggtaatgaaatgaatgcatctgatgtagctggggttaatacacagctttcatcaagtagcattattgtgccatcatcttccttgatgactgaggatgataatattgtggtgtcatctgacaatggtccacaatgcagtatgcaagtac

SEQ ID NO: 48203 - DNA, 367 bp, Glycine max
  unsure at all n locations
  Clone ID: LIB3139-030-P1-N1-C4
aagccgtttatcggttcggttcggctcaagctgggggacattctcgacgacgttggaatcggcgagcgcgtgagccgcacgctctcgctgaagcgtccctcggggaggccgcacgggaaggttgaggttagcgtgacaatcagggagcccagctaccgtgcgcagggtgggtacaacgcgccttcttacggcgtgagggattattcccctgcgccgcatgggtatggtgggtatgctacatatggtgccccaccacaacaggcgtgttattccgctccaccaagtgcgtatccttataatgcgccaccgcagtcttataatgcgccgnctcagagcggctacggttataatgcgctgccgcaaacgg

SEQ ID NO: 48204 - DNA, 362 bp, Glycine max
  Clone ID: LIB3139-030-P1-N1-C5
ctggttatttgaagagaaaatattctgagaatgagaactcaaatgtttgagcaggggaggtagaagatgccaaggacaagacttcgtgttcatcaaagtcacaaggaagtgggtacttattctcgctgtttattccttacctgtcttgtgcttacagcatttaattttttcttcctttcgccagagtgatcaaatgaatttaggccgtgtatcaggcagctgttcatcatttgtggtaattatctcgttgttgctggcattattttctccaattgttagttaggctagtttagttgtagtatgggttaatatctctagttacttttcattgtttctaaactagatgaatgttatttgaaggc

SEQ ID NO: 48205 - DNA, 347 bp, Glycine max
  Clone ID: LIB3139-030-P1-N1-C6
tttcggggtggaggatatggaggcgcgggagggcatggtgtaggtagcgacggaggagcagcggttggcggatacgggggaggcggtggtggaggaagtggaggtggtggtggtgctggtggtgttgtttggtgttgatatgtttcatgtgttgtgctatcagtatttaattttttttttcttttttttgtttttttttttgatatttttgtttttttttattttactttgtattttttttttttttgttattttttctttttttatatgttgatttatttttttggttgtaggttttttttttttttttttttgttttttttatttttttatattttgttttaatt

SEQ ID NO: 48206 - DNA, 360 bp, Glycine max
  Clone ID: LIB3139-030-P1-N1-D1
tcgtgaaaaatttttttataaaaaaaaaaaaaaaaaaaaaaaaagggaaaataaaaaaaatagggggggaaaaaaaaaaaaaaaaaaaaaataaataaaaacaataaaaaataaaaatataaaaaaaaaattttggggcgggccccaattatgggcttgccccccggaattttattttggcccggttctttagggtttccacttttttctttttgtgggctttttttgggttgggttgattactggacttagttgtttccttggaaaaatttgtttccggcacaatttccgctttacattcggcctggatgttttagggtttaagttgggggttctttttgggtgcgttaactgactttt

SEQ ID NO: 48207 - DNA, 367 bp, Glycine max
  Clone ID: LIB3139-030-P1-N1-D5
gctactttgtgacaatggtgagggttagtgtgttgaatgatgctcttaagagcatgtacaatgctgagaaacgggggaagcgccaggtcatgattaggccatcctcaaaagtgattataaaattccttttggtgatgcaaaagcatgggtacattggagagtttgagtacgttgatgatcacagagctggaaaaattgttgttgaattgaatggtagactgaacaaatgtggggttattagtccgcgttttgatgttggtgtcaaagagattgaaggttggactgctaggctgctcccctcaagacagtttgggtatattgtgttgactacctcagctggcatcatggatcatgaagaagctaggag

SEQ ID NO: 48208 - DNA, 172 bp, Glycine max
  Clone ID: LIB3139-030-P1-N1-D9
cttagcagaagctcactcttcggttagaaatttgttagttagttaaaaaagatgttagaattagtttcaaatataactaaccaaagcagtagcgtttctctttcctctgcaactctgcagtagatataaatacgtaataaatgcatcaataaagcatcatgcagttttaatc

SEQ ID NO: 48209 - DNA, 362 bp, Glycine max
  Clone ID: LIB3139-030-P1-N1-E1
ggttcgggggaatgtctttttctataggggggggggctgatccaaagaatgctctcatcatgaatatgcccaatgctgctctttcaatggggagatattttgtcggagatctcgtcgctgtagatgctaagcactactatacctacatctagcgcacaggctatgtgctcatagcataaggaaaattggctgatgacacgactagatgagaggctgttacgcacatgctggcgcagtttggagagattcatgaaataggcgtgtcgaaattatcacagagaggaatttcttacagtttggacaactcaagtgcgtaccgtagcgactctgatggctgatgggtgcccatatttgtatgctat

SEQ ID NO: 48210 - DNA, 380 bp, Glycine max
  Clone ID: LIB3139-030-P1-N1-E11
cgaaaaaataaaaaaaaaaaaaaaaaaaaaaaaaaaaggaaaaaaaaaaaaaaaaaagggaaaaaaaaaaaaaaaaaaaaaaaaaaaaaaaaaaaaaaaaaaaaaaaaaaaaaaaaaaaaaaaaaaaaaaaaaaaaaaaaaaaggggggggcccccccttagggggtttttccccccggaatttatttcgggcccggtccctgggggggtcccatttttccttttagggggggtttttaaagttgggggaaaaaagggcaaaagttttttcctggggaaaatttttttcccttaaaaattccacaaaaaaatcggccgggaggtataaaggtaaaacccggggggccctaaggggggggctacctcaaataaatgggggg

SEQ ID NO: 48211 - DNA, 368 bp, Glycine max
  Clone ID: LIB3139-030-P1-N1-E2
ggggaaaaagttgtattgaaattttcacaagaggaattgcttacagcttggtcaactcaggtgcgtcctgcaacaactctgttggctgatgggtgtccatatttgtatgctatggtgcatgatagttcagtgtctacaataccaggtgattttgtcattggtgttaagttgacaaccataaacaatatgtgtgcatatgggcttaatcctggtatttcaggttctcgtcttttgggcaccattcctcagtccatttcacagcaaactgtttggaatcaaatggcaacagtgagaacaccattgaattttgattctagcaagcagagcttttgtcaattttctatcgaccttctcggtggaggaatttt

SEQ ID NO: 48212 - DNA, 262 bp, Glycine max
  Clone ID: LIB3139-030-P1-N1-E9
tcgtggagaccgaatgtgcgaggcttgcttactctccagcgcctactcatatcacagatcatggataattcatagtactactatttcgtacaagtattcacgaaccattccattccaatttccattcagcagcaaccaaatcaccatcttcttttgcatcattagttttatagttagattaccctattccgtttcaccttactttcatgcttacgtgaccaccactcactctatttctaccgtagaccattgaatcgatcta

SEQ ID NO: 48213 - DNA, 360 bp, Glycine max
  Clone ID: LIB3139-030-P1-N1-F2
gtaaaaaatgcttgatcatgtggggattaaacaatacacgactgaatgaacggcttggggcaatatactaccgattgaggcaacataacatctgtgcaataattatactagtttaagtggatagattacctatcaggtacacagctagattgcaccaaagatagacagagtttgagatggggatgaagatttatgcctgacaggacgcacctgctgttggcttgttgttcaaggatggcaatttgtaagaaagatatttggagagttgaatgtggaataccttctggatatccgctcacaggtatgtgcaatagcatttttaatgagatgctcattagatatagctatgaaaaattactg

SEQ ID NO: 48214 - DNA, 351 bp, Glycine max
  Clone ID: LIB3139-030-P1-N1-F3
tagctcgagttgttttagccgctcgagccgttctaggcccgacttaaccaccacaccacggtctctgctattcttctacctttcaagtttttaaagtattaagatggcagagacattcctatttacctcagagtcagtgaacgagggacaccctgacaagctctgcgaccaaatcttcgatgctgtcctcgacgcttgccttgaacaggacccatacagcaaggttgcctgcgaaacatgcaccaagaccaacttggtcatggtctttggagagatcaccaccaaggccaaccttgactaccagatgatcgtgcgttacacctgcacgaacatttgcttcttcttaaacca

SEQ ID NO: 48215 - DNA, 365 bp, Glycine max
  Clone ID: LIB3139-030-P1-N1-G2
cgaaagataagaagtgaaagaaagcatcagccgcggcggtgttaggtaggcggagccatggcggcgcctgaatcccctctctgttacgtcggtgtcgccaggcaatccgctgcttttcgcctgatgaagcaaatggggtgggaagaaggagaaggtcttggaaaagagaagcaggggatcaaaggacacgttcgagttaaaaacaaacaggacactattggtattggccttgagaagccaaacaactgggccttcgacaccactcagtttgataatattcttaagagattgaaagttcaagcaccgcaatcccatgacatagaggaaaaagtggaaaccaaagctagtgttcctgttgataatga

SEQ ID NO: 48216 - DNA, 367 bp, Glycine max
  Clone ID: LIB3139-030-P1-N1-G3
ggcctggagcttttctttctctctttctttgctctcttttcttttaggtttccactctctctcacacacacactctgcaataatctctcttctcttcttcagtctctcaactactgcctaaccaaaccttccatttccgcaggcagtttcttaaatttggagtctgatgtctccgccactgctggttactgaagaagacgaaggacagagcaatgcctcgatggtagcatctgcatcttcaccctcctcggagtgtttcaccctaaatgaggctagattgaaagaacgcaattacctgggattgtcagattgctcttcggtggacagttctattgtcccgagtttgtctgatgagaaaaaggagaat

SEQ ID NO: 48217 - DNA, 305 bp, Glycine max
  Clone ID: LIB3139-030-P1-N1-G6
ttgaaggtagcgctcacaaatattgttagttagatgattctgacgcggcatatgaaattatattgactgatggaactcttcgggagagccatcaatggcattgatgtctattgtctatactatgccattacgtgagcttagggaacactcggccttgtagattctgctgagatcaggcttatacctgttaaggagtacatgtagataacctataaaccagtcgtaggcactttgcacgaacatgctcacgcatattgtgattctagtgctgcaacagatcgagacgcttgataatcaggagaatg

SEQ ID NO: 48218 - DNA, 368 bp, Glycine max
  Clone ID: LIB3139-030-P1-N1-H1
gggtctttgaagtttctaagatgacttctccctacattaaatgtacagtctctttcttcatagcatttggaaatttggctgatgacaccatcaattttgaggcttttccccacaagctggtgcagtttggagagattcaggaaaaagttgtgttgaaattttcacaagaggaatttcttacagcttggtcaactcaggtgcgtcccgcaacgactctgttggctgatgggtgcccatatttgtatgctatggtgcatgatagttcagtgtctacaataccaggtgattttgtcattggtgttaagttgacaaccataaacaatatgtgtgcatatgggctcaatcctggtatttcaggttctcgtctt

SEQ ID NO: 48219 - DNA, 125 bp, Glycine max
  Clone ID: LIB3139-030-P1-N1-H12
cggtatttgtcttactggatcgagacaaataccttctggatgcatatagacttacaggatagagacaattaccttcacacgctgtcgttgtaaatgttacatgtggaaggggacgcgggggtttt

SEQ ID NO: 48220 - DNA, 322 bp, Glycine max
  unsure at all n locations
  Clone ID: LIB3139-030-P1-N1-H2
ctctattttttttntaanaagacttctccctacatggggtatacagaatctttctggggagcatatggaaatttggctgattacaccatcaattttgaggcttttccccacaagctgatgcattttggagagataaactccaaatatgtttttacaatttctcaaaaaaaattttttttagcttggtcaactcatgtgcttccctaatcgaatctattgactgatggatgcccacatttgaatgctatggagcatgataatttattgtctacaatactcattcgatttttttattggtgtgacaaaactagtgcaacttttc

SEQ ID NO: 48221 - DNA, 364 bp, Glycine max
  Clone ID: LIB3139-030-P1-N1-H3
tctttttaaaagttaaaaaggccaaggtcctgaatctcacagagacagagagaatgagtacggtgggagaagggaaggtgagtagtaatggtcatggatgttgcaaatcagggccaggctatgcttccccactggaagccatttctggtcccagagagtctctcatttatgtaacctctgtctacacagggaccggaatagagaagccagactatttggcgacagtggatgtggatccaaactctccaacttattccaaagtcatccataggcttcctgttccttatttaggtgacgaattgcatcacacaggctggaattcatgcagctcttgccatggagacccctcagcagaccgacgatt

SEQ ID NO: 48222 - DNA, 113 bp, Glycine max
  Clone ID: LIB3139-031-P1-N1-A2
gtgttattttaaaaaaaaacacacactttacacgttattacgacaattaaaagaggtgtggagtgtgtgttattttaaaaaaaaaaaaaaaaaagggcgggcgccgcttatga

SEQ ID NO: 48223 - DNA, 173 bp, Glycine max
  Clone ID: LIB3139-031-P1-N1-B3
ggcttcctttttctttctttggttcctttccccagccaggtctttcttggaaaagaaaaagtctttgggtttgtgcagtagttgagttgaggaagtgatggaagcagtttacaggttgaaacctcttttggatgtggttagagttgggaacgctaccacttactgagattgcg

SEQ ID NO: 48224 - DNA, 256 bp, Glycine max
  unsure at all n locations
  Clone ID: LIB3139-031-P1-N1-D9
ngagttttgtggtaactggtcatcaaaatggggaaatcttgatgcatagaatttgggagggagggtctagtggagaggattatagttctgttttcatggagaatgttggtaagtttctgtcacctgaaaactgggaagatgggttgccggtgactctcttggaagttcattatgtaaggaggtttatgtccattttgtttgcctctttattcggtattatccttgttttttatattatattctttttttttctttt

SEQ ID NO: 48225 - DNA, 232 bp, Glycine max
  Clone ID: LIB3139-031-P1-N1-E5
tgtttttcttactagagttgatccttttccagtagctttactggctgttctttttggtgttaagaatgaaattctgagttctaacgccactaatcctatgctgacgcgacttcttgaaaactgtaagagtctcaaatatctggttgatgagtgtccttttgcatttgtgaactagtatgtaatattttattcacttaaataaagcgcattactatgtgcaatgagtgtgttt

SEQ ID NO: 48226 - DNA, 214 bp, Glycine max
  Clone ID: LIB3139-031-P1-N1-G2
taagaaatcaatccaagtaaggctgctgctgtgatgcatagtttgtatataatattttggagtatcaggacaagtttaattcaagataaagccctttactctgtatcaccttgtaacctgtcaattatattcccccatattgtaaagcagttgagctttctatcaatacaaggtttgaagaaaaccagctaaatacattatatgcttttgtttt

SEQ ID NO: 48227 - DNA, 310 bp, Glycine max
  Clone ID: LIB3139-031-P1-N1-H6
gtggaggtgctgagagcgaacttaggcaatctgtaagatgtgtagcgagaattgtatttgcacagtccagaggaagctcgccaattgagaaggaaagctctctctcgtattgaatggctgcaaaaagctgatgtgcctaccatagcacagattgaagagttccattcgatgcagaggatgatgaatgctcctgattcaaatgataatattgatctactgttgagcattgatttgttgggtttacaaggagcaggtaaagcttttccaaacaagattgtttttgatgataagcttgtgttggctaacacac

SEQ ID NO: 48228 - DNA, 373 bp, Glycine max
  Clone ID: LIB3139-032-P1-N1-A4
agtagaggtgttggcggcggcaacagcggtggtggcggcgaagagtggaaacaacaactggcagcattattgttgctgtatgtcagtggaatattattgcagtgggatttactacgctgagcttgctaaccctctccaatggccacagctcaagaaaaaacgacgccatgttgcgccacccaaaataacaacaaggtcgcactcgcagcacctccaacttcttcttcttctgcgccacaacaacaatcacaatcacaacaacggccctctgttgccaccttcatttccgccatcgattctcctcccaaaaccgcttctgccaaaggtatcactgtcatggtgagagctcaaaccagccaccctttggatccac

SEQ ID NO: 48229 - DNA, 367 bp, Glycine max
  Clone ID: LIB3139-032-P1-N1-A5
agttagggcacctccgtagggtttggttattagggtggtggctcacccgagtgcaggggagcctccctaagaaaaagcgaaaatgccggcgcacaagacattcagaatctagtagaatttggcgtagaagatgaggcagaacaggcccatcccctactggatccgcatgaggaccgacaacaccatcaggttcaacgcgaatcgccgtcactggcgtcgcaccaagcttggattctgaggtgcttgctttgccttgattcagcttatccaagtaatgagcgttttattttcttgagccaaaaacaaagctttggagtttgtaatattttgcattttattccaagagtatattgcgtaaagaatttat

SEQ ID NO: 48230 - DNA, 302 bp, Glycine max
  Clone ID: LIB3139-032-P1-N1-A7
aaggtttgttgtgagctatcacctagtttttcgggaggagaatatcaagttgttggttttctttgtagctgcaatatttttggtagcatggccatgccatggcgcatgcttcctaacgtttcctctccgcatgataactggctatggtgagcgttcttcggagggtaaaagcgcaagttttaggctcgctgtgttatcacacaacatccgagccctttataccattcctgaagatgtgcgtgggtcctactatggactacatttatggcgtacaatttagatcagactctaaaacaattacc

SEQ ID NO: 48231 - DNA, 341 bp, Glycine max
  Clone ID: LIB3139-032-P1-N1-B5
ttagcggttcgagggggggaacagtatctccaaattgaaaggtcctttcatacttaggacgcgtgacatgtcagccatgcaccatgacacaagttctgatctgaaagtagttggaaacaaattaaaggatatattagagatctctaacacatccctaaaaatgaggaagattgttgttgaactgtgtgacattgttgctactcgtggggctcggcttgctgctgctggtattttgggcatccttaagaaaataggaagagacacggttaaggttggggagaagcaaaagtcagtgatagctttggatgggggattggttgaacactacaccaaatttagag

SEQ ID NO: 48232 - DNA, 362 bp, Glycine max
  Clone ID: LIB3139-032-P1-N1-C4
gaagcattggaagctgctagaattgcatgcaacaaaggtatggcgaaatttgctggagaagatgctttccacttgagagtccgagtacatccattccatgttcttaggatcaacaaaatgctttcatgtgctggagctgataggcttcagactggaatgagaggtgcatttggaaagccacagggaacatgtgctagagtcgccattggtcaggttcttctttctgtccgctgcaaggacagcaacagtcatcatgcacaggaggctcttcgtcgtgctaagtttaagttccctggtcgtcagaagatcatagttagccggaaatggggtttcaccaagtttagccgtgctgattatctcaa

SEQ ID NO: 48233 - DNA, 302 bp, Glycine max
  Clone ID: LIB3139-032-P1-N1-D11
ctgcactacaatatttgtgattctgaccaagttgggtctatttgtttgatggccatcttgcacgtcctgatcttattgtgttcaagtgacagacaaatcagaacagggaagagagatttgaaatgtaaatgccaagtgaaagtgaaaagtacagtccagttttagtgatctctttaatttatttgttcatagattaatatgatggtgtatgattgcttttctatttattgaggcatttttgagttgtaccctgttgttgtgtttgcaataagtattagtaataaagcagcaaattcaatttc

SEQ ID NO: 48234 - DNA, 374 bp, Glycine max
  Clone ID: LIB3139-032-P1-N1-D5
caccggtttaaagaacagccaagaattcagagaaaaaaaaatgccaccttttgccggagccgaaccagttggattccctaagccagattccgacatagtttccattgacgttggtggccaactgttccaaaccacgaaacagacactaacctcggcgggtccgaaaaccttcttctccagaattgcggcggaatcttctggactccacacgcccttcctagacagagacccagatctgttctcgctccttctctctcttctcagaaccggtaaccttccctcaaaggccaaaactttcgatctccaagacctaactattgagtctaaattctacggcatcgaatccctcctcgtcaattccctctccaaccctt

SEQ ID NO: 48235 - DNA, 337 bp, Glycine max
  Clone ID: LIB3139-032-P1-N1-G3
tgggttcgagctcaaagcaacacaagaacactctcttgaacattcatggatccagtgagcgtgtggggtaacacgcccttggcgacggtggatcccgagatccatgacctcatcgagaaggagaagcaccgccaatgccgcggcatcgagctcatcgcctccgagaacttcacctccttcgcagtcatcgaggccctcggcagcgccctcaccaacaaatactccgagggcatgcccggcaaccgctactacggcggcaacgaattcatcgaccagatcgaaaacctgtgccggtcacgcgcccttcaggcctttcacctcgacgcccaatcctggg

SEQ ID NO: 48236 - DNA, 377 bp, Glycine max
  Clone ID: LIB3139-032-P1-N1-G9
tcgagctcactgcacaacaattcgtatgggtggcaacggcaagcacaggtggaaattgtccttccaccgttcctcatcccaaacctccaatcccgacccgaaccaagttcccaaggagttcacctgccccatttccggctcactaatgtccgaccctgtcgtcgtagcctcgggccaaaccttcgaacgcctcgccgttcaactctgcaaagacctcaacttctccccgaagctggacgacggcacccgacccgacttctccaccataatccccaacctcgccatcaaaacgacgatcctccactggtgcgacaattcccgcacccaacccccgctcccaccggattacgcctccctcgagcgccacgtcagagaag

SEQ ID NO: 48237 - DNA, 384 bp, Glycine max
  Clone ID: LIB3139-032-P1-N1-H1
gatcgagcccaccaagataacaccgctcaagacatagttttgggagctccgtggttcagatccaggcgcaggttgtgcgcgtacataagctgcgctgctcttcgcgaagtcgacacttcaaaaatcttgtcacagattttgcaacataatagtactactgatggaaaaaaactttatgtgccacgcgtggaggataagaatagtcacatgcgtatgcttcacatatcgcgaattgatgatctcattgcaaactcaatggacatactagagcctactccggttgatgctgatggaaatgcgcgtgaagatgttatgcaggcaaatgatccagttgatttgttccttttacctggactggcatttgacagatctggaagacgttta

SEQ ID NO: 48238 - DNA, 385 bp, Glycine max
  Clone ID: LIB3139-032-P1-N1-H2
ctaggatttcggctcgagatcaagtttaccaaaatatgctcccagcaaggagattgatgctaaattacgggatgaagccagaaggcaaagagctgttggaggtagggaacaaaaagttgcctcaagagttggacaggaaaaagggcatagagcaaatgttgcaacaaaagacaatgctgacccatgcttattggtgcagcaaggacgttattccagctcaaggaaccaaagtgaattatccaaccctcatagaggaacggtgtctggaattctggttttccctcacaaacagtcagaaaaagaaatggataataatttctctgggcatatctataagaggccttcacattccggcccattggttcctggttctgtctgggcaaaa

SEQ ID NO: 48239 - DNA, 369 bp, Glycine max
  Clone ID: LIB3139-032-P1-N1-H3
agtgcaaatcagcttaccatcttctataatgggagtgtttgtgtctatgatggaatccctgcagagaaagtgcatgaaataatgcttattgctgctgctgctgccaagtccactgaaatgaagaagattgggacccaaactaccctcatttcacctgttccgtcaaggccttcttctccacatggaatcactaacaatattggttcctcacagaagagttccatctgcaggctgcaagctgaattcccaatagcacgtaggcattcacttcaaaggtttcttgagaagcgtcgtgataggcttgggagcaagacaccttatccttcctcatcaactacaaaagtggctgacaacatagagaacaacttc

SEQ ID NO: 48240 - DNA, 361 bp, Glycine max
  Clone ID: LIB3139-033-P1-N1-A1
ctcgagccgataatattgatctactgttgagcattgatttgttgggtttacaaggagcaggtaaagcttttccaaacaagattgtttttgatgataagcttgtgttggctaacacacaagaattctttgatggaaattttccagtggattcttggttaccaatttttgtgaattgtctttatcctgtaagtcaattaccttcagaagctgtcgttgtaaatgttacatgtggtagtggacgttgtggtttacccaccactgcttggattagttctgcagttaacaatcgctcctcagatatcaacaaaaggattcgcacagcacttgggaaaggtaagaaaattgtttttattactctaat

SEQ ID NO: 48241 - DNA, 127 bp, Glycine max
  Clone ID: LIB3139-033-P1-N1-C12
ctcgagccgccctggccatgctttttttttctctgggaatgggacaacaatgtaaagataatatgcacatccacttccacattgcaaaaatatctttacattgtggaagtggatgtgcatattatct

SEQ ID NO: 48242 - DNA, 367 bp, Glycine max
  Clone ID: LIB3139-033-P1-N1-C7
tttttctctctcccttagtcaaagggattcatcgttcttcttcccaggttatttagaaaagcaaaatggtgaagatttgctgcattggtgctggatatgtggggggtcctactatggcagtcattgcacttaagtgcccatccattgaagtcgctgttgttgatatctctaaatcccgcattgcagcctggaacagcgaccagcttcctatctatgaacctggccttgatggtgttgtgaagcaatgccgtggcaagaacctcttcttcagcactgatgttgaaaagcatgtctttgaggctgacatagtgtttgtctctgtcaacaccccaaccaaaactcagggtcttggagctggcaaagcagc

SEQ ID NO: 48243 - DNA, 369 bp, Glycine max
  Clone ID: LIB3139-033-P1-N1-D11
gagcggccgctcgcgatctagaacctgattgcaacatagttggtgcaatgcttttggttgatacttatcataccaatcctgaaaatgcagttcgtagtatttttgttgcgcctttcagaggcggaaggcccattcgggtggttacatttccgaataccattgtgcagattgaaccagacatgaattcaaggtttcagcttttgagtaccactaccaatggtgattttgttcaagggaaagatctcgcaatggttaaagttaatgtagcatgtgctgctgttggcttgacatcaagttacactccaactccattgttggaatctggtttgcaaaaagacagagggttaattgtggagtattttggaagga

SEQ ID NO: 48244 - DNA, 256 bp, Glycine max
  Clone ID: LIB3139-033-P1-N1-E2
tttataaatttttattaaaccccaaaaaaaaaaaatacagagaaaaattttaaaaaaaaaagaaacccacaaaacaccccttcttcaaaaataaaccaccttcaaccacataacaaatatttcccccccccccctctaacttcccctccatcccctttaaatcataacaatattacataccccccccccccccttatacctttctcccccccttttttaattctccccccccttcccctcccttctccccctcttt

SEQ ID NO: 48245 - DNA, 360 bp, Glycine max
  Clone ID: LIB3139-033-P1-N1-E8
tagctcaaacattgtttgttgtaggaagaggaatcttgagaaatggcaggggacagcaagagcaagattctgttcatcggagggactggttacatcggaaaattcatcgtggaagccagcgccaaagctggccacccaactttccttttggtgagggagtccactctctccaaccccgcaaaatcacccctcatcgacaatttcaaaggcctcggtgtcaatcttgttttaggagatctatacgatcaccaaagtttggtgagtgctataaagcaggtcgatgtggtaatttctactgtaggacacctgcagctagctgatcaagataagatcatttctgcaattaaagaagcaggaaat

SEQ ID NO: 48246 - DNA, 307 bp, Glycine max
  Clone ID: LIB3139-033-P1-N1-F12
caaaacaagaggggtcttgttgaagagtttggttgagttcagtgcacgtacggctcgtacaactgcagaggtttgaacttcgaagagtcctggagtggttttgaatgttgaactatataagttacccgagggaaacagcttgttgaccaaggttcaaagaaactatagtccaagtatttctgacgtacttttatgatcgttagcaacagtgtaatctaatgttgaactatatatgttacaatataaagattagcttagcttctttaatcggattttgctcttaattgatctaggtggcaccattggc

SEQ ID NO: 48247 - DNA, 264 bp, Glycine max
  Clone ID: LIB3139-033-P1-N1-F3
agtattccggagcgagcttaaagtaaaacaccacattcccacgctcctgtttctcagtatttcatttcctctgtttcttcttacacctacctcctcagacaacacaaacttgatctacaaaggttgcgccgaccagaaactccaagcccaatactcccagaacctcaaaccgctgttggactccctagtctcggcgtcggcacagaagggtttcgccgcgactacccaaaacgcgctcaccggcgcgtaccaatgcatgggaga

SEQ ID NO: 48248 - DNA, 360 bp, Glycine max
  unsure at all n locations
  Clone ID: LIB3139-033-P1-N1-H4
cgaggagtctcctcaagctatgacaaagtcatcggttggagcattctatttaatgatcccaagacttgctttctttctgacattcacatattatggctgctacaggacgcatacctaatactcactacttacaactggatgacaacctggcgacaccagctgaaactgggaatctggtccagtctacagacattggaaaggtgcgtttgtacggaaccgacccggccataataaaagctctggcgaacacggggatcggaatcgtgatcggagcggcgaacggngacattccggggctagcctttgaccctaacttagcgaaaacgtgggtgaacaccaacgtcgtaccgtactaccctg

SEQ ID NO: 48249 - DNA, 363 bp, Glycine max
  Clone ID: LIB3139-033-P1-N1-H6
tgtctgcgaggtgtggcagagattcatgaaaaagttgtattgaaattttcacaagaggaatttcttacaggttggtcaactcaagtgcgtcctgcaacaactctgttggctgatgggtgtccatatttgtatgctatggtgcatgatagttcagtgtctacaataccaggtgattttgtcattggtgttaagttgacaaccataaacaatatgtgtgcatatgggctcaatcctggtatttcaggttctcgtcttttgggcaccattcctcagtccatttcacagcaaactgtttggaatcaaatggcaacagtgagaacaccattgaattttgattccagcaagcagagtttttgtcaattt

SEQ ID NO: 48250 - DNA, 103 bp, Glycine max
  Clone ID: LIB3139-033-P1-N1-H8
ttaatctccctctagacaatttttatatatacacatgtaatctaccaagggggctatccatgcctcttacggggattttatataacaattattccctgaaact

SEQ ID NO: 48251 - DNA, 146 bp, Glycine max
  Clone ID: LIB3139-034-P1-N1-A6
ggagaaataaatatttctatgcatttaagagccttacagagagaaagggcgatgaatgttgttacactgctattagtggaggcttcagaataatactgagtgattttttacaacaagatccagaacccacccacggccgggatcca

SEQ ID NO: 48252 - DNA, 299 bp, Glycine max
  Clone ID: LIB3139-034-P1-N1-B8
tgctagagcttgaacagagtggggtatagatctcgagctgaaaccataaagttgttgataattgacatgtagcatctgaagaaagaacatgattgaatgcaattgtggatgctatttcatcgaagagtttatctcgtataattaattttgacaatgagaagaaaccccattacaatcttttaccataatttcaggatactgtttaatcaccctattaaatatcgccaactagttcatcaaatattttatatgcaaaagggactacttagattgctgcacatgcagcacaatcaatacta

SEQ ID NO: 48253 - DNA, 357 bp, Glycine max
  Clone ID: LIB3139-034-P1-N1-C10
ttgggggacagtgatgctgcagtcaaacaccacacttcactttgattacgcttacccatacccgacatttgttactctaccagacataaaagtctaaggctacaagaaacatctctatgtacctgatgagacagaaactagttacactgctgcaggcatgtgcaccaagtctccgatggtgccatggacacttgcctccagcagtacccatacagcagatgctgctgctaaacatgcaccaaaacccactggagcatggacttaggaggaaccacgaccaaagtcaacggagaccacgagaagatagtgcgtgacaccagcaagaacatgcgcttggtgtgaaatagatgtgggact

SEQ ID NO: 48254 - DNA, 235 bp, Glycine max
  Clone ID: LIB3139-034-P1-N1-C5
ggtggctttaatgcccaaggacagaggaataaatccgttttagtttaaactcaacttttgagggctttttgattaaaaacacagattagtcttagctaacaggtatatgagaatgcttaaagtattaatggtctgtgggagggctgtggaacctgtgctcattgtcaccacaacagtcccatgttcatccacagattgtatttaggcatgtgtgggtggaagatgtaattgggtt

SEQ ID NO: 48255 - DNA, 121 bp, Glycine max
  Clone ID: LIB3139-034-P1-N1-D1
gacgtgtgtagtgtgtgtttttttttaaaataacagggaggttacactttattgcggcaattaaaagaggtgtgaagtgtgtgttattttaaaaaaaaaaaaaaataaatgggtggttgtt

SEQ ID NO: 48256 - DNA, 346 bp, Glycine max
  Clone ID: LIB3139-034-P1-N1-E9
cctttcttaagttttcagattctgaaaatcttagggttcgtgcccgaaactggaaacctgaatcgaaaattcaatacacatgagttcctcaactacagtgaggaagttgcaggtggtgtcccctgttcctgcggacatagacattgcaaactccgttgaacccgttcatatctcccagattgccaaagacctcaaccttagacccaatcactatgacctttacggtaaatacaaggctaaggatcaggtgtcggttcttgatgagcttcaaggatcagaagatgggtattatgttgtggtcggaggcattactccgacatctttcggtgaaggcaaatctactact

SEQ ID NO: 48257 - DNA, 309 bp, Glycine max
  Clone ID: LIB3139-034-P1-N1-G2
tcggggaattataataatgcttatttcatattagctgcctgtgacttcttatgcataatttactgttatagaaatggaagctatactgtgaattgtcatgtaaattgtcccttttcattacttgattggtaactcggtactgtatcaaataagaggccatttgattgcggggctttgtataattgacaatatctacttgtagaagtcagattcgcgacacattgtatgagaattaggtcattacattgaaatttctgcgatgattggaatatcaatggaagaccttatactttgctatgacatatattg

SEQ ID NO: 48258 - DNA, 295 bp, Glycine max
  Clone ID: LIB3139-034-P1-N1-H10
ctttcgataaatccatatttgtaagtcaatgtgattggtgagagatcatgaaaaccctcccgtttagcatttacttgtaattatttaatttacgtttttgtatcttctacatactaacaactcctagcttgattctgacagtagctactatgttagattgtaacaaattattaaatatgtagaagcaatagtgctctgtttatttgttaaaaaaaaagaaacaaaatgggcagatcatggaaggaacatatattccacaaatgactatatgtatggactagttgaaagatatagg

SEQ ID NO: 48259 - DNA, 93 bp, Glycine max
  Clone ID: LIB3139-035-P1-N1-A12
cgatgaactatatcagcgtcatgggtctcttgggtggttttaattgggctggcggacccacaaaccctattcattttttcaataaagcttcaa

SEQ ID NO: 48260 - DNA, 140 bp, Glycine max
  unsure at all n locations
  Clone ID: LIB3139-035-P1-N1-A8
ttgctttagatataatttatccccccacgnaagaacagcggggtagctgcattccgtaccagatctggccaaaacacnaccacatttaataagaccatgacagttcatgtaactggtctctaaacaaacacactgacctt

SEQ ID NO: 48261 - DNA, 358 bp, Glycine max
  Clone ID: LIB3139-035-P1-N1-B6
ggctcgagcatggtaccaactctccttgaggctcttgaccaaatcaatgagcccaagaggccctcagacaagccactcaggcttccattgcaggatgtctacaaaattggtggtattggtaccgtgccagtgggacgtgttgagactggtgtcgtgaagcccggtatggtggtgacttttggtcccactgggctgacaactgaggttaagtctgttgagatgcaccatgaggctctcacagaggctcttccaggtgacaatgttggctttaatgtgaagaatgttgcagtcaaggatctcaagcgtggtttttgtgcattcaacttcaaggatgaccctgccaaggaagctgccaact

SEQ ID NO: 48262 - DNA, 99 bp, Glycine max
  unsure at all n locations
  Clone ID: LIB3139-035-P1-N1-D11
ttctctagcgctacctcaaaagcacacaagcaggcaaaagcgggcgatttcttaatatgtaatacggcacaacaacctncagatctattcataattctt

SEQ ID NO: 48263 - DNA, 212 bp, Glycine max
  unsure at all n locations
  Clone ID: LIB3139-035-P1-N1-E11
ttagaattgaattttccggcaccncacnacaccacgggaggctttttttttttgaaaaccctaaccacaaaatcactttcatcaaatacagaaactttctatcaacacaaactttacttccacctctactactacactcaatatttattccgtaactcttaccaatcccaataacaaactctagtttaacttattatctatatcgtctgccc

SEQ ID NO: 48264 - DNA, 338 bp, Glycine max
  Clone ID: LIB3139-035-P1-N1-G4
gagaaaccctaggtaagaagaaaagatgccggctggtcatggtttgagatcccgcaccagagattccttctctcgtcctttcaggaagaagggaaccatcgccctcaccacatacctgagaacctaccacgtcggcgactatgttgacgtcaaggttaacggtgccgttcacaagggaatgccccacaaattctaccatggccgcaccggacgcgtctggaatgtcaccaaacgtgctgttggcgtcgaagtcaacaagcaagttggcaacagaattataaggaagaggattcatgtgcgggtagagcatgttatgccttcaaggtgcactgaggagt

SEQ ID NO: 48265 - DNA, 339 bp, Glycine max
  Clone ID: LIB3139-035-P1-N1-H10
ctttttgtttccatgtgcttcatgatggatcctacatgagggaaaaaaatatgctacgtacagtttactcaaagatttgatgggattgatcgtcatgatagatactcgaatcgcaatgttgtattctttgatatcaatatgaaaggtttagatggcatccaaggaccaatatatgtgggaactgggtgtgtcttcaggagacaggcattctatggatatgatgcccctacatcgaagaaagcaccaagaaagacatgtaactgttggcctaaatggtgctgctgtctgtgttgtggatctaagaagaaaaatatttaagcaaagtcaagtgtgaaaaat

SEQ ID NO: 48266 - DNA, 246 bp, Glycine max
  Clone ID: LIB3139-035-P1-N1-H6
gattagcctttgattctttccctcaacgctgtcgccgatctcgcccaccatgaatgcaacaccactcaactcggtcttccccctaccttgctcagaatgaaacgaacccagaatcaacaattccgtgaccttcagcacatacattctcagatcgaatggggacagagcggagcagctacactcgtcagagaccaagcaagctggggcgcatgttgcgcgttctcaggtactggtgctattgtaggc

SEQ ID NO: 48267 - DNA, 362 bp, Glycine max
  Clone ID: LIB3139-035-P1-N1-H9
gaattttattaaaccgcgatcacaggttgccggacgttaaaaccggaaacaaaagcaatcgttacttgatttcaagaatttctcaatttcttcctacttctttgtgtacgatttcttaagggaaagaaaatcactctctgtgctggtcacagacttcgtgaatcattttcttttccactcctagtttatttgctgaacactctcctatttgatataggacttcgtgtcagatttaaactttttctgtttctttctcagttctctggttaatttcaagttcaagctggtgaaattttggattagtgctcccactgtaatatcttgtcttagacttcgtgggaagacttttttacttctcttct

SEQ ID NO: 48268 - DNA, 418 bp, Glycine max
  Clone ID: LIB3139-036-P1-N1-A9
gtagagtcgtactcctcttgttacagacagagttttagggcagcttatttctttgagattaagtttcagtagtaatgggtaaggaaaaggttcacattaacatcgtggtcattggccatgtcgactctgggaagtcaaccaccaccggtcaccttatctacaagctcggaggtattgacaagcgtgtcatcgagagattcgagaaggaagctgctgagatgaataagaggtctttcaagtatgcctgggtgcttgacaagctcaaggctgagcgtgaaagaggaatcaccattgatattgctctgcggaagtttgagaccacaaagtactactgcacagtcattgatgcccctggacatagggatttcatcaagaacatgattactggaacatcccaagctgactgtgctgatcttat

SEQ ID NO: 48269 - DNA, 307 bp, Glycine max
  Clone ID: LIB3139-036-P1-N1-B1
cgggtcgagtttttattttttttaaccaagttgaagggcaataattaaatgtccaacattttttgggtggtgatgtttgaaattaagggttcccatttttagggaaatttttttttccgggggtttgagcaattccactggtaggggcaggacccattaaggtcaatccttttcaggtgccttcctctatatggtggctcaacgtcataggatctaaccctccctctgcttaaaaaacacctatctaaaaaataacataatctcttactcgctcaggttatttttatattaacacaaaaaactatat

SEQ ID NO: 48270 - DNA, 154 bp, Glycine max
  Clone ID: LIB3139-036-P1-N1-B3
gaaaggattgcgtcatgcactgccctgcactgacgcttcaacactacaacagactactgacgttaaaatgtttttgaaactccgtttatattgattgaaaaaggaatatgaatgttgtttgatacccaggaaacggatggctgattgatttcct

SEQ ID NO: 48271 - DNA, 422 bp, Glycine max
  unsure at all n locations
  Clone ID: LIB3139-036-P1-N1-B4
tcgagggttgaattgagtntgagtagagaagaggtcatagacacaacacaagacatgtctgttgtcgagtcaggtgaacacaacaacatcagaggagtaccaactcatggtggacgctatgttcagtacaatatctatggcaatctctttgaagtttccagaaagtatgtccctcctattcgtcctgtgggtagaggcgcttatggtattgtttgcgctgctgtaaatgcagagacaggtgaggaagttgccattaagaagattggcaatgcatttgataacagaatagatgccaaaaggaccttacgagaaattaaacttcttcggcacatggatcatgcaaatattatgtccattaaagatattatacgtcctccacagaaggaaaacttcaatgatgtgtaccttggttctgagttaat

SEQ ID NO: 48272 - DNA, 408 bp, Glycine max
  Clone ID: LIB3139-036-P1-N1-C5
ctgaggtgaggccttgtttgtttgaccctgaccctgaccctgacccgaggaacgacggagaaagaagagagattaaccggggaagggtttagggtttgggagtggaagaatcgaatcgaatcgaattgagaatgtctctgacgagcgtgacaatgtcggaggaagtgtggttaagctgcgtgactcatgcattgtccactgagaccgaagagattatgggccttcttctttggggacatcaagcattcgaaaaaacgggagtgtgactgcattgatatggggggcgtctcctcagactcggtctgatcggcgaaaggatcgagtggaaaccaaccctgaacagttggctgctgcttttgccttggctgatagaatgaccacatccactggaagaacaaccagagttat

SEQ ID NO: 48273 - DNA, 291 bp, Glycine max
  Clone ID: LIB3139-036-P1-N1-D12
ataagattgtatataatataaattatggtgcccaagatgcagatgcatggactaattaaacaacaacgttagtctgataggcagtgtccatagataaattgggtaccataagattgtatataaaataaattatggtgtgttgtgtatgttgtgcaagacctggaacttcacctttctacgtacgtgtgctgttaggatgcagtgtgctttgatgatgctttgatgaatatgcagtgtgcttttttaagtcttaaaaaacaataaaaaataaaaaaaaaaaaattaaaaaca

SEQ ID NO: 48274 - DNA, 403 bp, Glycine max
  Clone ID: LIB3139-036-P1-N1-D4
cacttccaatccaaatttttttcccccccggagtcccaagaccgggccggcttcttatcatcgtgggaggcccaattcaccaaaaaggccgccaagaaggaggccgtcaagctggagaagctccgccgacgccaggaaatcgccgccgctttctccgtcactgccaacctcttcgtcgactaggaggaccccttcggcgggaactacggcgacgttccttttttggagctgcagtccaagacgccgtctgaccgttggctagtggacgctcgttgaggcgctcggcgtcactctggagaacaattcgttgttgatcctatgtagggctgcatgctattctccccgttagaaagaatattgctttttttttcatcagagagaatggttttaccgttcaatgctt

SEQ ID NO: 48275 - DNA, 405 bp, Glycine max
  Clone ID: LIB3139-036-P1-N1-D5
ggattttgttgcagagttttttttgcatcctaacttccacctaacagttattgcactgctccaccgagctctcacatgctttgctttcagtccacagcttcactgcatcgtgcctctttttttcaattgttgtttattaagctttgatttgttgattcattcgtttagaatttgagttgaggctgaattggggttgtgcaattgtgtataaagttttttttttttatttgattaattcgctttgatgcttacaaattaaagttgctgttttgaaatatgatatttttgaatgaggaagtttggttttgattttattttaattggtggaatttggagaatgtggggagatttgagatttgtgattttcactatttacaatctttgagttgtgctctttgggtttta

SEQ ID NO: 48276 - DNA, 411 bp, Glycine max
  Clone ID: LIB3139-036-P1-N1-E5
ggaaaaaaaaaaaagaattttattaagggcggccgctcgcgatctagaacggttctaagtgtacccagaaaaagaggcagaagaaggaagaagaagaagattagagagtgagagagggataattggcgagttagggtgtcgaattgactcactgagtatttgcattgtatcgccggttttttttctttcgccggagaaaaccattgctccgatctcctctgctttttgtttccgataccatagccgtttgaaaggttcggtttttccggcgaggagtgtgggattttctggtgattccttggttgtgaattgagtttggcggaattctcgattttgaccctaaagcaaagggatttactcaaaagttttactggatttcgtgttttttttgttttcttttgattttttgca

SEQ ID NO: 48277 - DNA, 360 bp, Glycine max
  unsure at all n locations
  Clone ID: LIB3139-036-P1-N1-F1
ggctcgagccgttcgagcttttttagcggctcgagaaattatcattgatggtttcgcaggtcctgactgcaacatatttggtgcaatgcttttggttgatacttatcataccaatcctgaaaatgcagttcggagtatttttgttgcgcctttcagaggcggaaggcccattcgggtggttacatttccgaatcccattgtgcagattgaaccagacatgaattcaaggtttcagcttttgagtaccactaccaatggtgattttgttcaagggaaagatctcgcaatggttaaagttaatgtagcatgtgctgctgttggcttgacatcaaagtacactccaactncattgttggaatc

SEQ ID NO: 48278 - DNA, 407 bp, Glycine max
  unsure at all n locations
  Clone ID: LIB3139-036-P1-N1-F2
gggaccacgcatgaatattgatgatgggcgtgttgtagcacttattgctcngcacttggggggaaccattgacagtccaatgtccaggaacacaaactcgaagtttctggctatgtctctgcctggtgatggccttatccgctcatgggaggatcaaacaccggaccaatcaaccttggaaacccaggtgaattacaatgactgaacttgctgagaccgtgaaagagcttattaatccaggtgtggagatcaagatggtggagaacactcctgatgatccgcgacaaagaaaaccagacatcacaaaagcaaaggaattgttgggctgggagccaaaggtcaaagtgcgtgatggtcttcctcgtatggaagaggattttcgtctgaggcttgaagttggcaaaaag

SEQ ID NO: 48279 - DNA, 412 bp, Glycine max
  Clone ID: LIB3139-036-P1-N1-G5
cactctttgttcactctttcttttcttgcggctagggttttagcgcagctgcttctagatttaaggaagatgggtaaggaaaaggttcacatcagtattgtggtcattggccatgtcgactctgggaaatccactaccactggtcacctgatttacaagcttggaggcattgacaagcgtgttattgagaggtttgagaaggaagctgctgagatgaacaagaggtctttcaagtatgcctgggtgctggacaaacttaaggctgagcgtgaaagaggaatcaccattgatattgctttgtggaagtttgaaacaacaaagtattattgcacagttattgatgcgcctggacatagggatttcattaagaatatgattactgggacatcccaagctgactgtgctgttctta

SEQ ID NO: 48280 - DNA, 411 bp, Glycine max
  Clone ID: LIB3139-036-P1-N1-G6
cggttcgagaaactattttttaacgagggggagaaggaaacaaaacaacgaattaacgattgaggttgagttggtgcaaaatctgataatggcagaaacagaagacaaaacccttcaagcctcgcccatgaacgaaaccaagaagatgaagaagaataagaataagaagaagagcgacaaaaaaagacctcgggagattgctaccgaggagcgtccagaggaagaggagaatgagaataatacagatagcgatggagaatcctcgaagaagaagaagaagaagaaggtggaaggagaaagtgaagtgaaagagaaaaaggtgaagaacaatggtggctctggaattatgagcactgagtcatttgaatctctcggattgtctgaacctacttataaagccattatggatat

SEQ ID NO: 48281 - DNA, 150 bp, Glycine max
  Clone ID: LIB3139-036-P1-N1-G7
cttaattggttatatatccctccgtttaaaataagtgaatacacaaatactattacccactcataggttatatagtatgaataataaatcacgtgatttcggtgattgtattgatgaattaccatccaattaataaagtttagcttttat

SEQ ID NO: 48282 - DNA, 370 bp, Glycine max
  Clone ID: LIB3139-036-P1-N1-H2
ggtgaaccctgactgtgggctcaagacccgtaagtacactgaggtgaagccagccctcacaaacatggttgccgcagcaaaactcatccgcaacgaacttgccaagtgaatggtataagaaagtagaatcttccaagtcatttggttctgctttatattataatacaccaaagaaaaattttctctatattgggttgtttcaataactgtgtgtggaatatttaggtgtcttagcatgctctgtgagcaattgattcttcctcaacccctccccccttatttttccccactcctgttttccctaatgaatgttgtatctttgcggcttcgccgcaatccttattgatctggaattttaccagttttgtgc

SEQ ID NO: 48283 - DNA, 374 bp, Glycine max
  Clone ID: LIB3139-037-P1-N1-A4
ggattttgtgtggaatgggacattgtttgtctcggaaaagcaaagaaacatggtattctgggatgaaggaaaaatttgtacaaatgatgaagagcatctatgaaacagaagttacagattggccagtaccactgaaaatcatttctggaaccattcttgcaacaattttgggaacaaccttctggaaactcttttcctttcttagagatgctggtaatgggggagtttttgttggcaatgttgcttcagcattcacaacttcaagtgtgcttgaggcccaaagtagaaagcccaacagatatgaagtttcccaatacagatatcgcaatgtgccaataaagcgcagagcatgggttgaaggccagatgtctttc

SEQ ID NO: 48284 - DNA, 379 bp, Glycine max
  Clone ID: LIB3139-037-P1-N1-A5
gggcgttctgcttcggttcacaaggcaccagctgctccgttctgcttcggcttcagagtttgtgtaacattctccttccttcttccgatttcgaagatggctgaagcagaggatgccgtaagacgccgtaatgcggtcgccgagtatcggaagaaacttctccagcacaaggaattggaatccagagtccgatccgtcagggagaatttgcgagcttcaaagaaagagttcaataaaacagaagatgatttgaaatctcttcaaagtgttgggcagattattggcgaagttctcaggcctcttgacaatgaacgcctgattgttaaagcaagcagtggtcccaggtatgtggttggttgccgcagtaaagtggataagg

SEQ ID NO: 48285 - DNA, 216 bp, Glycine max
  Clone ID: LIB3139-037-P1-N1-A8
tgacaatcaagattttctgaaggagctggagtaaagagttctggcttttcatagtactaatgctattatatgaataagtgatcagctcgtgtttatcagtgaagtagtagtgttcagtatggtttctctgatgtgtttgcctgtttggttgagattctagacagtctacagtgatatccaacagtacttcaatatatttggtaaaagttggagaat

SEQ ID NO: 48286 - DNA, 379 bp, Glycine max
  Clone ID: LIB3139-037-P1-N1-B4
ggggaaatcgttcttatcatcacttctcaaatctcgaaccctctcgttcgtgccgatcactaggtcacacttcatcaatggcgggtagaggcaaaaccctaggatccagcgccgctaagaaggccacctcaaggagcagcaaagccggcctccaattccccgtcggtcgtatcgccaggttcctcaaggccggaaagtacgccgagcgcgtcggcgccggagcccccgtctacctcgccgccgttctcgaatatctcgctgctgaggttttggaattggctggaaacgctgcgagagataacaagaagactcgaattgttccacgccacatccaattggcggtgaggaacgacgaagagttgagcaagcttctaggaga

SEQ ID NO: 48287 - DNA, 450 bp, Glycine max
  unsure at all n locations
  Clone ID: LIB3139-037-P1-N1-C11
ggattctcttgtgnntagaagccanntgtcaaaggggtcncnntggtctcttancctctgaccattnnggcaagaaagggcctcgagatncctcctcttcaaggggactactcatncagtgacccnnagaagnnttcaccaaatcactactctnatctcacccnnactggagttgcttatttaacatctnctcagggacccannagaaaggtgantcnnnttttgtggctttgatgttaacccacccanngttgaagaaccaagaaccatcnnaccactganntatcaaattagaccacttaattctncaatcttctcacnaactatnncactgtcaatganngcctgctcctggtctcaagaaactatttttagcttcnnagagttcctgatcaaaaggtctggaaaggtggaagttcagtacttgcatgactatgctggaataagcac

SEQ ID NO: 48288 - DNA, 58 bp, Glycine max
  Clone ID: LIB3139-037-P1-N1-C3
tagcaagtggacctcaaagtatttgccattgattaagcagcacaattcttttttatat

SEQ ID NO: 48289 - DNA, 365 bp, Glycine max
  Clone ID: LIB3139-037-P1-N1-C6
ttggggaaaaattttaattttattaaatttggccaaatattattaaaaaaaaaaggccaattaaaattaaaaaaattttaaaaaaaaatttttatttaaaaaaaaaattggattttttaaaattaaataaaatggtaaaaataaaaattaaattaaataattcttttaccaaaaaaaaaaaaaaaaaaaaaaaagaagaaataaaaaaatagaaaaagaataaaagagaaaaaaatagggcattatgctttcagcgacttaggtgaaaaaaactaaaaagggggggccgccatttggtgggctcttccccccggaaataatttcgggacgggtccttgggggggtaccagttttccttttggggg

SEQ ID NO: 48290 - DNA, 134 bp, Glycine max
  Clone ID: LIB3139-037-P1-N1-D10
ctcgagccgcttttctatgcagaaattctagattttggttccattaatgtaatcttatgtagttacattactttagacgaacttagcattagcccagagttgtatatgcatatatccttttatttttgtccgac

SEQ ID NO: 48291 - DNA, 376 bp, Glycine max
  Clone ID: LIB3139-037-P1-N1-D5
gtggtttttaattgaaaagctttctagctggtcataatatcaccattactgatggtattgacaaaactagtgcaactttgcaatttagaaagttagcagattgtgattttctcaagagaaactttaagcagatgtctaatgttttatgggtggctcctgaggacaaggcgagtttatggtcacaacttcattatgtttcgtgcaataatctggaaatgcaagaagcttatcttgtcaatctcgtaaatgtgttacgagaattgtatttgcacagtccagaggaagctcgccaattgagaaggaaagctctctctcgtattgaatggctgcaaaaagctgatgtgcctaccatagcacagattgaagagttccattc

SEQ ID NO: 48292 - DNA, 355 bp, Glycine max
  Clone ID: LIB3139-037-P1-N1-D9
ctagttttttatcgcgagcggccgccctttctttttttttttttttttttttagagaataccaaattaatccatccaaacaagttcaaaacatacataacacataaaaatgtagaaatccggataccgccattcaagcatgaaaatatctcaattatacaatattctaaaggagattttttttggtggtaaaataataagtgctaaaagtctatccaacacgggagagacacatgaacgtgtctacttaaaaaactaccaattaatggtgaggatagagaaaatttcactcgagaattttcatgcacatattctaaggtagcgacttgattgcaacaacataatgtgcttggagc

SEQ ID NO: 48293 - DNA, 235 bp, Glycine max
  Clone ID: LIB3139-037-P1-N1-E1
gggaaaaattgatgcgtgaaaggacacacctgctgttggcttgttgttcaagaatggcaatttgtaagaaagatgtttggagaggtgaatgtggaatcccttctggattttcgctcacaggtatttgtaatagcatttttaatgagatgctcattagatatagctattaaaaattactgcgcccggcttaagctcccagaatgtttttaccaacctttaaaaaatttggttcttt

SEQ ID NO: 48294 - DNA, 276 bp, Glycine max
  Clone ID: LIB3139-037-P1-N1-E8
cttttcctgttaaaccaagcgcctgatcatgtggtggatgtatagagcaatggggtggaattactttagtattgtttataaatagtatcaagtcatgtaaatagaaatacacagtttcagtggttattttcacacttaggaacatatgtaatgaataataaaaattatggttcttcaaaaaaaaaataaaaaaaacaaaatatataaaaagaacataaaattaactaattgggtggcctactgacatatgagcttatttacctgggaattaatttc

SEQ ID NO: 48295 - DNA, 390 bp, Glycine max
  Clone ID: LIB3139-037-P1-N1-F11
cgcgaattacaccctcacctcaaacaaaccacttgcacatattctgagagaaagagtattgaatcctcatcctcttccttccattcctcaagaaccctaatcccaatcagccatgcagcaaggagactacacctccgctccatctccatattatcaattccctcatctccaaaaccccaatcccaatcccaatcccaatcccgatccacacccaaacaacccttacgcttctgcacctcccttcacccccaattacgctccctccgattacaccccttacccttcctaccctcaaaatcccgatccttctccacccactgctccttcctttcctccctcttcttccaaccctaatttaccccctcctttcaatcctcccttcgaatctaa

SEQ ID NO: 48296 - DNA, 380 bp, Glycine max
  Clone ID: LIB3139-037-P1-N1-F2
ggcttcgctttcaagcactctctccctcgctctagggtttccatgagcgtctccgctggatctcaggcttccgttcaccaggctttgttcgccgattacaaggcctccacttcattcctcttcccgggccagggtgctcaagctgttggaatggggaaagaagctcaaaatgtgcctgctgctgcggttttgttcaacaaggcaaatgacattttggggtttgatcttcttgatatatgcatcaatgggccaaaagaaaagttagattccaccgttattagccagcctgctatttatgtcacaagtcttgctgctatagagctacttcgtgcacgtgaaggaggtcagcagattattgactcagttgatgttacatgtgg

SEQ ID NO: 48297 - DNA, 388 bp, Glycine max
  Clone ID: LIB3139-037-P1-N1-F4
tgaaaaaaatttttttaaaaaaaaaaaaaaaaaaaaaaagaaaaaaaaaaaaaaaaaaaaaaaaaaaaaaaaaaaaaaaaaaaaaaaaaaaaaaaaaaaaaaaaaaaaaaaaaaaaaaaaaaaaaaaaaaaaaaggggggggcccccccttagggggtttgcacccccggaatttaattttggacggggccttggggggttcccatttttccttttgggggggtgttttaaagttgggggaaaaaagggcaaaaggtgtttccgggggaaaatggttttccgtttaaaattccaaaaaaaatacgacccggaggcttaaagtgaaaagccgggggggcccaagggggggcctaactccaattaattcggtgggcctaaatcccctttt

SEQ ID NO: 48298 - DNA, 343 bp, Glycine max
  Clone ID: LIB3139-038-P1-N1-A1
ggctcgagccgattcggctcgaggcgatatgtatctattgcagctgtgcagtggagttgatgaaagtgcagttggggcatgtgctcaacttgtgtttgcacctattgatgagtcatttgctgatgatgctctgttactgccatcttgttttcgtgtcattccgttggatcctaaatcagatggtccagctccaactaggacattagatttggcatcaacgatggaactaggttctggtaatgcccgtccagctggggaagcagacttgaatgggtacaaccttaggtcggtcctcactattgctttgcaatttacctttgagaaccatacacgggacaatgtg

SEQ ID NO: 48299 - DNA, 108 bp, Glycine max
  Clone ID: LIB3139-038-P1-N1-A2
caagagctatgacaggcacatcgcacgcgtgcgtagagaattcggttcgagaaaaaaaaaataaaatttttattttataaaaaaaaaaaaaaaaaagagaagagaaaa

SEQ ID NO: 48300 - DNA, 393 bp, Glycine max
  unsure at all n locations
  Clone ID: LIB3139-038-P1-N1-B3
cttcgggctctctcctgtatttgtcttgattccgatgcgaatggtaattgcagaaaccccaaccctcctttcctctccctcctcctagatcgagtcaggttgttttcgggtttctttctctttctttttttctttttctctgtcccaattttgtttctgcatttatcgttttctgacacaatgaaattgttttcttaatcaactttaccatcaattaccctttgaattttatgattgatttgggtttgttgcaaattctccatcttttttagtactatgattccagggttttctgctattttttgagcttgattagtggatatgtcattgatcggttggaggatttttgtgttgggggagaaattgggattgtatcaaatttcgntttttttt

SEQ ID NO: 48301 - DNA, 312 bp, Glycine max
  Clone ID: LIB3139-038-P1-N1-B6
ccaattcaactgtaactgaaagcagaagctatgttgtatcaaaggaggtgcgccaaaaacttgggggttctttctgagatgtggggtttcttagatattaaaaatggaaaaggaaatggtgtttgatcagattataggaatgggaattgaattgattgaggcattaagtacaaaacttatttgatctttttttgtggtaaggttagctcttttggaaagaatagaaatgtgtgtaattttcgagataaagcaatagtgtcttttttttctcctgtcaattttttttcctaaaaaaaaaaaaacataaataag

SEQ ID NO: 48302 - DNA, 52 bp, Glycine max
  Clone ID: LIB3139-038-P1-N1-C3
aaaaaaaattaaaaattatttttaaaaaaaaaaaaaaaaaaaaaggaagggg

SEQ ID NO: 48303 - DNA, 247 bp, Glycine max
  Clone ID: LIB3139-038-P1-N1-C4
aggcgacgcaccgacaccggacccatctccggcgacatttaacggacttcgggcgaatccccggtcccaacttttttccttcgaaaggaatcccgagtttgataatctgttcaggctccttctaatggaagactctggggttggtaaataatgccttcttttgagattggctgatgattcgtccatcgggggctccataggcaccatgggagtggattttaaaatccgtcctgtggaccaggatgga

SEQ ID NO: 48304 - DNA, 298 bp, Glycine max
  Clone ID: LIB3139-038-P1-N1-D2
cggctcgagtcccaaacagtctacagcttttgatattctcttgggaatctctcaagattttgaaattgctggtaatactcttatgccagctttttctgttccacaggctactgccagatcttctgaaaatgcggaatcctctgcatgatctggaattcgtgttttctttcgcttgttcgtttgtttaattcaataaaggaaattaggcatgaccctcttgttgagtatgctctgcctatctgaaaatttccacacctcttttaattgtcgtaatgatgtgtgaagtgtgtgttatttt

SEQ ID NO: 48305 - DNA, 328 bp, Glycine max
  Clone ID: LIB3139-038-P1-N1-D3
cttaacctgggcgggggctttgtcaggttaaaaaacttaaccaccttaaaacttttggttgagggggccggtgccaggttgaaaaaaccgttgccattgccgccaccaccgccacccccgatgcttccaacgcttccaccgcccccgggttccggcctaaaggttgccacctttggggggagggttttccatcttgggggcacctccgcaccaaagcccatgggtgctaaaatgttggccaaacaatttccaaccattccaattgttaacgattggcgtgccaggggggggcccagagccaggcacggttgaagggttaggctaaaaa

SEQ ID NO: 48306 - DNA, 432 bp, Glycine max
  Clone ID: LIB3139-038-P1-N1-D5
ttttgacaaacctaagacgcgctgcttcatttttttccctatggagtttaatcttgtggtccgtcaaaagtttttaaattttgtgaggttcattatgaaaaaaagggacaggcttagttgtcaagttggaatcaacccatactccatggaatggactggtttggccaatagattactgagtaagggcaatgatattctgtgttgcgattatgctagtttttgatggtttgattaccaagcaagttatgagcaagatggcagaaatgataaacagtctttgtggtggtgatgaaaaattgatgcgtgaaaggacgcacctgctgttggctttgtgttcaaggatggcaatttgtaagaaagatgtttggagaagtgaatgtggaatcccttctggatttccgctcacagttttttgcaatagcatttttaatg

SEQ ID NO: 48307 - DNA, 415 bp, Glycine max
  Clone ID: LIB3139-038-P1-N1-E4
gctctctctccatcttccccattatctcttctacctacttcttctgcttgggtgcaacttggcctctgctcaataacacagattctatatcctttgtgttgtgttgtgttgctcactctaaaaaagtaagagagagagagagaggggggacaacatcccaccatttgtggctgccctctattttagtccctagcctcaatcaatcatgccatcaggtgctaagaagaggaaagctgccaagaaaaagaaggaaaaggaaactgaaattaacaccaacccttcaacaaccaaccctcaagggaatgatgaggtgaagtcacagtctcaggacgagaaaggaagtgattgtgtgtttaaggtgtcaccagcacatggtgaacatgatcctgcattcaatgaagaggaggaggagagg

SEQ ID NO: 48308 - DNA, 171 bp, Glycine max
  Clone ID: LIB3139-038-P1-N1-F3
tagttcttagatcgcaagcggccaccctttttttttttttttaaaataccacacacttcacacataattacgacaattaaaagaggtgtggaaattttcagataggcagagcatactcaacaagagggtcatgcctaatttcctttattgaattaaacaaacgaacaagcg

SEQ ID NO: 48309 - DNA, 238 bp, Glycine max
  Clone ID: LIB3139-038-P1-N1-G12
gaaaattgtttttcttactagagttgatccttttccagtagctttattggctgttctttttggcgttaagaatgaaattctgagttctaacgccactaaccctatgctgacgcgacttcttgagaactgtaagagtctcaaatatctggttgatgagtgtccttttgcatttgtgaactagtatgtaatattttattcacttaaataaagcgcattactatgtgcaatgagtgtgttt

SEQ ID NO: 48310 - DNA, 349 bp, Glycine max
  Clone ID: LIB3139-038-P1-N1-H6
agacaagctgcagtatttacagacaaaagtattcggttattggggaaaaatcaatatacttttaatgtcgaatcgggattaactaggacagaaatcaagcattgggtcgaactcttctttgatgtcaaagtaatagctatgaatagtcatcgactcccggtaaagggtagaagagtacgacctattatgggacatacaatgcattacagacgtatgattattacgcttcaaccgggttattctattccacctcttagaaagaaaaaaacttaaatcaaaatacttaatagcatggcgatacatttatacaaaacttctaccccaagcacacgcaatggagccgtagaca

SEQ ID NO: 48311 - DNA, 364 bp, Glycine max
  Clone ID: LIB3139-039-P1-N1-B11
ggcttgttcatcagccaccctgctcaagtcggggcgggttctttacaagtctgggtgggtcaacggacaaacccttctccaaccttctgcatcagttgtgagatgcaaccccaccaccccatcaagcctcaccatcatagctggttcctatgctgatgagctcgttaagaccgcgaaaacagtggcttcaccagggaggggtattttggccatggatgagttcaatgctacctgtgggaagcgtttggcttcaattgggctagagaacactgaacctaaccgccaggcataccgaacccttcttgtgacagttccaggccttggtcagtccatttctggtgccattctctttgaggaaacactc

SEQ ID NO: 48312 - DNA, 321 bp, Glycine max
  Clone ID: LIB3139-039-P1-N1-C11
gttgttgttcccttgcttggaccattaattgcacccgtttttgttggcttttgagtgtgatgaggaatgaggatttgtagtactttgtagttgtttaattgaccctttgagagcattttaattaggacacaagcccttgtaagggtatgtaaccgatcaaatgagttgactcctttgtatatagagtggtaggtgaggaggccagagttattataatttactaagatgatgtgagagtgagactacatagaactttgaaacttggattgtgtatgatcacttgctagtattgaccaatgatgatgatgaccattatagttg

SEQ ID NO: 48313 - DNA, 369 bp, Glycine max
  unsure at all n locations
  Clone ID: LIB3139-039-P1-N1-C8
ccttcgttccggtgcgcatgcncaccgnccagggcggccatttttggatggagttcggcggcaaaaatctcnagttcaacgtaaccgtcgcgccaatcggcgtttcgcgccctacgaaacctactcttcggtatcagaatcccgccatagctgactacgtgtccagtaacatgtacgtagggttttccgcttcgaaaacgaactggatcgaggcgcatagagttcttgcatggagcttcagtgattcaggacctgcaagggagctcaacacaacgaatttaccagtttttgaactagaatcgtcttctttctcgctttctaacggtgcaatagcggtcattgtcatcggtacttttatttttgctctta

SEQ ID NO: 48314 - DNA, 307 bp, Glycine max
  Clone ID: LIB3139-039-P1-N1-D1
ggaagaaggtggaattaaagttgatcagctgttctttcatgacccagatggatatatgatagaaatatgcaactgccaaaatcttcctgtgcttccaatttcttcctgccctctaaagcagctcggaggagaagctacattcaagattaattgctttgcagaagaatctatgtctatgctgatgatggacaatttcgtgatggatatgttgaagatttcaatataattaaagctttttgtaaaaaaaaatatttgtaaaagcctttttgtccgacgagagaagaggggaaataaaaagtgtaagagt

SEQ ID NO: 48315 - DNA, 299 bp, Glycine max
  Clone ID: LIB3139-039-P1-N1-F5
tttggggttccttttatttttaaacaaaacccttataaagggcccggattaggtcccctttatggaccagtggtttaaaagaggatgctttggaggtggtcttaaagggttcacacaacgtgggaatcgccatggcgacaccacatggtttagttgcgccaaacataaaaaatgttcagtctttttccataagggagataaccaaagatctggcggggatacaacattgggttagagataacaagttaacttgtgaggaaatatatggtggcactatcactttgagcaacatgggagca

SEQ ID NO: 48316 - DNA, 391 bp, Glycine max
  Clone ID: LIB3139-039-P1-N1-G11
ctaatcttcttctatgggttggcttagtcggttcataactgccgtggcgttcttagccatcggagtgatattctcaccggagacactggggtcaaaatcaaccacactttccacctacctcaaactcgctcacctcctctgcttctccaccgccttcggcgccgctctgtgggtaacattcatcggcggcatcatcatgtttaaaaatctgccgcggcatcagtttgggaacctgcaaagcaagatgtttccggcgtatttctcgatggtgggtgtctgctgcgccgtatcggtggcttcctttggctaccttcacccgtggaaaacttcctccaccactgagagataccaacttgggtttttgctctcttcctttgcgttcaatcttacc

SEQ ID NO: 48317 - DNA, 383 bp, Glycine max
  Clone ID: LIB3139-039-P1-N1-G12
tcgagctctgagtatagacgtcgtcggtagctgaagcatggtataagctctccactttcctgaactagttttaacatacaatctttcaagtacacctccccagcttccatttaagaatggagatcactagaataggccaatggttaagtcttctgatatgtgtactactattactgcagacagaaggggttcctgtgggaatcacttttgttgaaaatgcagtggcaaaaggggctgtttgtttggatgggagtcctccagcttaccacttccacaagggatctggagcagggattaacaactggatagttcactttgagggaggaggatggtgcaacaacgttactacttgcctttcccgtagggacactcgattaggttca

SEQ ID NO: 48318 - DNA, 95 bp, Glycine max
  Clone ID: LIB3139-039-P1-N1-G3
acttgtttctttatttttcattctaaaacttgtactgagagacagaaccatcaattgtctgtgccttctcattgtgcaataaaattcttaccttg

SEQ ID NO: 48319 - DNA, 374 bp, Glycine max
  Clone ID: LIB3139-039-P1-N1-G4
gtggaattccttctggatttccgctcacagttatttggggtagcatttttaatgagatggtcattagatatagctatgaaaaattactgcgccaggctaaagctccaagtatgtttttacaatccttcaaaaattttgtttctttgtgtgtgtatggtgatgataacttaattagtgttcatgaatatgtcaagccttactttagtggttctaaattgaaaagctttctagctggtcataatatcaccattactgatggtattgacaaaactagtgcaactttgcaatttagaaagttagcagattgtgattttctcaagagaaactttaagcagatgtctaatgttttgtgggtggctcctgaggataaggcg

SEQ ID NO: 48320 - DNA, 287 bp, Glycine max
  Clone ID: LIB3139-039-P1-N1-H10
gtttacttataataatttgaaataacacttgtactgcgttcattttgagttgttaggcattcagctgcgacagaaacactgcgacagaccgacagactgtgtcactttctctcataatattcttgtatttattcatttttcgtgggcccacaccttttcgcacttctcgcgcacaaacgaccgaactttgacttcgaatgcgacttcaatcacttgccagtggactagtgaacaagatggacacgattaaacttggacactccggacaccatgccaatctgaatgat

SEQ ID NO: 48321 - DNA, 390 bp, Glycine max
  Clone ID: LIB3139-039-P1-N1-H12
atcatattatgaagttcacaggtttcctgcaagcggtgactcttgctttggtgttagccaccgtctctgcatcagatcctgatcctcttcaagacctctgtgtcgcagaccttgcttcagcggttaaagtgaatggattcacatgcaaagatgctgccaaggtaaatgcgagtgatttcttctcagacatactagccaaaccaggtgccacaaacaacacctatggctccctagtgactggagccaacgttcagaaaatcccaggactcaacacccttggcgtgtctttatcacgcattgactatgccccaggtggcatcaacccacctaacacgcacccacgcgccaccgaggtagtgtttgtgcttgaaggaacactagatgttgggt

SEQ ID NO: 48322 - DNA, 399 bp, Glycine max
  unsure at all n locations
  Clone ID: LIB3139-040-P1-N1-A2
gattcttgttgtttgtttttttttggaataggcaagcgcaagtgttggtaaagaactgacgctgtattcgtattggaggagctcttgttcccaccgagtccgaatcgctctcaacctcaaagggcttaaatacgaatacaagcccgtcaatctgctcaagggagaacaatctcgccctgagtttctccagctcaatcctgttggttgtgtccccgttctagtggatgaccacgttgttctctatgactctttcgccattattatgtatttggaagataagtatcctcacaatcctttgctccctcatgatatttacaagagagcaatcaatttccaggctgctagtgttgtttcctcaacaatacaacctcttcataacttgagtntactgaaccacat

SEQ ID NO: 48323 - DNA, 301 bp, Glycine max
  unsure at all n locations
  Clone ID: LIB3139-040-P1-N1-A6
cggttcgaggtggctgttgcggtggagcaaagggaagaagatgggttcgtgagtggggaggaagtggagaagagagtgagggaggtgatggagtcagaggagattagggagaggagtttgaagctgaaagagatggctttggctgcagttggggaatttggatcctctaaaacagcacttgcaaatttggttcaatcatggactactcatngtgaacatgcnnnttttatcattaaaaattgatagaccttttaaaaatataaaaggacataaaaagaaaaaattaaagggcggtcttttt

SEQ ID NO: 48324 - DNA, 176 bp, Glycine max
  Clone ID: LIB3139-040-P1-N1-B3
cattaaaaagcaatcgatatttgggtttaattttttttgcttcaaaatatttgtgtttgtacttttcttttctctattattcatgtggaaaacggtggacaattaattatatgcaaatgactttttttcttatccacaaaaagaaaataaaaatgaaaaatatgaaccccatcgag

SEQ ID NO: 48325 - DNA, 399 bp, Glycine max
  Clone ID: LIB3139-040-P1-N1-B4
tttcaatgtggagatattttgttggagatctcgtctttgaagttgctaagatgacttctccctacattaaatgtacagtctctttcttcatagcatttggaaatttggctgatgacaccatcaattttgaggcttttccccacaagctggtgcagtttggagagattcaggaaaaagttgtgttgaaattttcacaagaggaatttcttacagcttggtcaacttcaggtgcgtcccgcaacgactctgttggctgatgggtgcccatatttgtatgctatggtgcatgatagttcagtgtctacaataccaggtgattttgtcattggtgttaagttgacaaccataaacaatatgtgtgcatatgggctcaatcctggtatttcaggttctcgtctt

SEQ ID NO: 48326 - DNA, 396 bp, Glycine max
  Clone ID: LIB3139-040-P1-N1-C1
ccggaatcttctgcggttttcggggttttgcagaactcagcatgaaaggctccttgtttatccctacatgtctaatggcagtgtagcctctagattaaaagatcacattcacggtcggccagctttagattggacgaggcgaaagagaatagctttaggtacagcaagagggttggtttacttgcatgagcaatgtgaccctaaaattattcaccgcgatgtcaaagcagcaaacattttgctagatgaagactttgaagctgttgttggtgattttggtttagctaagcttctggatcatagagattcgcatgtgaccactgctgtgcgtggcactgtcggtcacattgctccagagtatctatccactggccaatcatcagaaaaaactgatgt

SEQ ID NO: 48327 - DNA, 391 bp, Glycine max
  unsure at all n locations
  Clone ID: LIB3139-040-P1-N1-C10
cgttttaatctaatttttttagaatagtgttttagaaagaagagtgtctagcattttgaataaatatgtgatccaagtccatgaataggcctgattgttatggggtggttggattcactatggagaagaggacgaaagtnnatnaaaaggattgacagtgatgctggcgatgcaggtagagcactggaagaacgcagagctgctctctacaatgagattcgaacctcagaaggagccaagcgtcaacagcaaagatattgtggaccagtggtggcactgtccttcaattttatggttgctgttgggattatcatggcaaacaaattggtgatgggtaaagttggcttcaacttcccaattttcctgacatttgtacactacatcactgtat

SEQ ID NO: 48328 - DNA, 395 bp, Glycine max
  Clone ID: LIB3139-040-P1-N1-C2
attggtaagaaagatgtttggagagttgaatgtggaatcccttctggatttccgctcacagttatttgcaatagcattttcaatgagatgctcattagatatagctatgaaaaattactgcgccaggcaaaagctccaagtatgtttctacaatccttcaaaaattttgtttctttgtgtgtgtatggtgatgataacttaattagtgttcatgaatatgttaagccttactttagtggttctaaattgaaaagctttctagctggtcataatatcaccattactgatggtattgacaaaactagtgcaactttgcaatttagaaagttagcagattgtgattttctcaagagaaactttaagcagatgtctaatgttttgtgggtggctcctga

SEQ ID NO: 48329 - DNA, 343 bp, Glycine max
  Clone ID: LIB3139-040-P1-N1-C3
tggagaaagaatgaaccatttgaattgaacactggttaaaaaaacttttacaaccaatcaaagaatttatcattatgaaaattacaaaagaaaagaaaaaaaggaaactccaaagagagccgaaaattggagtctggatcaatccacagggaaactaaatatctttaggctgtgttgcactctgaaggaaggccctgtggaaatctttgagtgtcagagcagtaattgtagatcatgtaattcttctgcacccacttgagcctctcctgatcagttgaatccaactcttctgagagccaaacattattgttagaagaggaagggttgtttgaaccgcaagatg

SEQ ID NO: 48330 - DNA, 295 bp, Glycine max
  Clone ID: LIB3139-040-P1-N1-C8
tttctgttccacaggtttctgccagatcttctgaaaaagctggcgtaagagtattaccagctttgtctgttccacaggctactgccagatcttctgaaaatgcggaatcctctgcatgatctggaattcgtgttttctttcgcttgttcgtttgtttaattcaataaaggaaattaggcatgaccctcttgttgagtatgctctgcctatctgaaaatttccacacctcttttaattgtcgtaatgatgtgtgaagtgtgtgttattttaaaaaaaaaaaaaaaaaaaaaaatag

SEQ ID NO: 48331 - DNA, 247 bp, Glycine max
  Clone ID: LIB3139-040-P1-N1-D10
gggccatcggcgttgttgacacagtggcagcaaccgtcaaagccggatggctgcagcagtatgatctaatagggaagattggagaaggcacctacggtctcgtcttcctcgctcgcatcaagtcttccaccaatcgcggaaaatccatcgccataaaaaaattcaagcaatccaaggatggcgatggtgtctctcccaccgccatacgtgaaatcatgttactcagggagataacgcacgagaatgt

SEQ ID NO: 48332 - DNA, 276 bp, Glycine max
  Clone ID: LIB3139-040-P1-N1-D5
gaaattttaataaacctgttttcacaggttgccgcaccttaaaaccggaaacaaaagcaatcgttacttgatttcaagaatttctcaatttcttcctacttctttgtgtacgatttcttaagggaaagaaaatcactctctgtgctggtcacagacttcgtgaatcattttcttttccactcctagtttatttgctgaacactctcctatttgatataagacttcgtgtcaaatttaaactttttctggttctttctcaggtctcttgttaatttc

SEQ ID NO: 48333 - DNA, 394 bp, Glycine max
  Clone ID: LIB3139-040-P1-N1-E11
ctttatccgctcttcttttttgaagaaagtaggatacaaccctgacaagattccttttgttcctatctctggttttgagggagacaacatgattgagaggtccacaaaccttgactggtacaagggtccaactctgcttgatgcacttgaccagattagtgagcccaagaggccctctgacaagcccctcaggcttccccttcaggatgtgtacaagattggaggtattggaactgtgccagtgggacgtgttgagaccggtgtcttgaagcctggaatggtggtgacttttgcaccaactggactgacaactgaagtcaagtctgtggagatgcaccatgaatctcttacagaggcacatcctggtgacaatgtgggattcaatgttaagaat

SEQ ID NO: 48334 - DNA, 248 bp, Glycine max
  Clone ID: LIB3139-040-P1-N1-E12
atttggctgatgactttatcaattttgaggcttttccccacaagctggtgcagtttggagagattcaggaaaaagttgtattgaaattttcacaagaggaatttcttacagcttggtcaactcaggtgcgtcctgcaacaactctgttggctgatgggtgtccatatttgtatgctatggtgcatgatagttcagtgtctacaataccaggtgattttgtcattggtgttaagttgccaaccataaac

SEQ ID NO: 48335 - DNA, 370 bp, Glycine max
  Clone ID: LIB3139-040-P1-N1-E2
aattatttttatatcttatttaagatgcgccgagggagaaccgccgccgccgttgccgccgttgtggatcccacgccggaccaggccaaggagacgacgcggttccgtggcgtgaggaagcggccgtgggggcgattcgcggcggagattcgagatccgtggaagaagcagcgcgtttggctggggaccttcgattccgccgaggatgccgcgcgggcctacgacaaggctgcccgatccttccgcgggcccaaggccaaaaccaatttccccccctttcccggcccggcagaggcggaccaccactcgcagattcctgtttaccaggcccatgggcttttcaacaaagtttgagcctgttgttcaggtg

SEQ ID NO: 48336 - DNA, 399 bp, Glycine max
  Clone ID: LIB3139-040-P1-N1-E6
tcggccacctttcttctccttttttcgacctcctctactgttcttcctcttcactgctcttcctcttcgattagggtttcattttttcaacccgatctatattgcgttgccgcagctattccttcctctcttcgattttttcacttctcgctcttacacgatcttaagcttcgaagtattacaagtttgcttcattgctatgtggtgccacttggcttatcaccggcaaccacctggttatcctgtgtaaaactccatggtaccagagggctagggagtcatgggctgctctcaggatgctaatttttataagggttctttgtgctgtcagctaattctatttttcatctggcttcctactttccaagatgtgacagcacgggaaatacatgctgacca

SEQ ID NO: 48337 - DNA, 410 bp, Glycine max
  unsure at all n locations
  Clone ID: LIB3139-040-P1-N1-F4
agttatgctcgagagatataggaatggaaatcttggctggggcaagaagagaacaacaacaacactgaaagcgatgtttcggtgaaggaagagatgatagccactctgcaggatagtaacccgctctgtgaatccgccattcctggatcggactcgaaggagttgagttacgagtgtttcaacaagagtgatgaggtgggagggggttctgngttccctgtggatttcaaagatgggtcttctgatagcgactcaagtgcgatcttgaacgaggagaacaacaaccacagccccaacaacaacgcggcgatttcgtcgtgtggggttctgcaaagtcacgggcttttgtcgtcgccttcttcttcgtcgatgaacaactgtttccagttccagaaacagtaccagacgac

SEQ ID NO: 48338 - DNA, 395 bp, Glycine max
  Clone ID: LIB3139-040-P1-N1-F6
cttcattgctcaagcattttttggggaaccattgacagtccaatgtccaggaacacaaactcgaagtttctgctatgtctctgacctggttgatggccttatccgtctcatgggaggatcaaacaccggaccaatcaaccttggaaacccaggtgaatttacaatgactgaacttgctgagaccgtgaaagagcttattaatccaggtgtggagatcaagatggtggagaacactcctgatgatccgcgacaaagaaaaccagacatcacaaaagcaaaggaattgttgggctgggagccaaaggtcaagttgcgtgatggtcttcctcgtatggaagaggattttcgtctgaggcttgaagttggcaaaaagaattaatttgttttcgctcttt

SEQ ID NO: 48339 - DNA, 356 bp, Glycine max
  Clone ID: LIB3139-040-P1-N1-F7
ccgttcgtgtccttttttgaagcccgcttcctcttaatactgtattattctttctgctcctgagaacctcaaacaccgaaaccaagcattacaattcccaatttcatagaaacaccagaatcaataaaaacacataacaacaaaagcagtgaaaaatggcgagctcggtggagaaggagagtggcgcgagcgaggaaactttctctttggagctgcctgctccaccaggttggaagaagcagttcatcccaaagaaagctggtaccccaaagaaaaatgagattgtgttcactgcaccaacaggagaggagatcaataacaggaaacagctggaaaaatatttgaaagcacaccct

SEQ ID NO: 48340 - DNA, 396 bp, Glycine max
  Clone ID: LIB3139-040-P1-N1-G1
aaagaatgctattctctttattatgccaaatgctgttctttcaatgtggagatattttgttggagatctcgtctttgaagtttctaagatgacttctccctacattaaatgtacagtctctttcttcatagcatttggaaatttggctgatgacaccatcaattttgaggcttttccccacaagctggtgcaatttggagagattcaggaaaaagttgtattgaaattttcacaagaggaatttcttacagcttggtcaactcaggtgcgtcctacaacaactctgttggctgatgggtgtccatatttgtatgctatggtgcatgatagttcagtgtctacaataccaggtgattttgtcattggtgttaagttgacaaccataaacaatatgtg

SEQ ID NO: 48341 - DNA, 394 bp, Glycine max
  unsure at all n locations
  Clone ID: LIB3139-040-P1-N1-G11
agctttttaaaaattgttgtcaacaaacgacaaccacgtatgggcgaatatttanaaggatgcaggagctcaacaaataccctacagaactattctggagacgaggagttatgctgcgtctatgttcctacaaatcatctttatattggtgatatatatcttgtcaacaccaatgatgtcattaggccaaacttatcaattcgtgaaggaattgagattgttgtttcgggaggtatgtcaatgccacagatcctatcaacgatcgattcacgcatcagactaggggaaataagtagaatcaacagaagctgagtgaagggctatattagtttttcatgttatagttccttggtatcttgtgaagccatcagaatgacaatgcaatcattggttt

SEQ ID NO: 48342 - DNA, 398 bp, Glycine max
  Clone ID: LIB3139-040-P1-N1-G4
ctttttcgccaagaaacttttgcaacaacatagcattacatggtttaacttttgcaaggtggcattgaattgaaccaacgtgtgtgtgtgtgtgcgatgtgtgagagtggggcagattctgttgagaattgagatccgtgtacgcacgcattattcaccgttattcttttcaaacgggcatattctgctctgttctgggaattcaatttcaaagaaacaaagaaaaaaaacccttcctttgcgttttattgtttctttcttttctctctctgttgccaccgtctctggtggtggcacttataagaacgcgagaaacggtgcgttttggttctgaattgctgtgactgtgatagatgatgggtagttgcccttgtttcgggttgtggagctggaagacc

SEQ ID NO: 48343 - DNA, 402 bp, Glycine max
  unsure at all n locations
  Clone ID: LIB3139-040-P1-N1-G6
gttcttccttctaacgtttttcctcctatnctatnctttctccacctgttctctcccctgtcttcttctgaattaccctccctcattgcgtgcaccccccaaaaaaataagaagatatacataaaaataaaacacaccctctacgtgtccacactctctgatcacaacacacccgcttaattaaatctctatatataaaccccttcaggcactccactatgacgggcaaagaaatttttcataagatgaaggaaaaagttttgggatcatctgatcccgattcaggtaaaggaaagagcaagatgaagaagcacataactcatggctttcacttggtaaagggaagatcaggtcatgccatggaagactatcttgttgctcaatttaagcaagttgacaaca

SEQ ID NO: 48344 - DNA, 363 bp, Glycine max
  Clone ID: LIB3139-040-P1-N1-H11
ggagaactttgcttttttcaaaaatccatctggtcaagttattgcacaggatctgttttcttctggggccataaaatctgcaactgatttcaagtgtacaaagaggtgctggcctttctgggcttgacttcatatttggataacacggctgtctatcataccaagaatgacaaattagagcttttgaagactggatctttaacatctgggggaaaatatgcttgctttcctgcttcatattgggcatcttctcatattcagaggcaattcaactgaatcagggaagatataagcaagaacaatccattactttgcattttgggaatgtatatggtgataccgtcaaagttgctaaatgctgac

SEQ ID NO: 48345 - DNA, 409 bp, Glycine max
  Clone ID: LIB3139-040-P1-N1-H3
tctcggggaaattatcggaaaatctctgacgcttatctggacaatctcgaaaatgtgttccgagaatggtattggcacagtccagaggaagctcgccaattgagaaggaaagctctctctcgtattgaatggctgcaaaaagctgatgtgcctaccatagcacagattgaagagttccattcgatgcagaggatgatgaatgctcctgattcaaatgataatattgatctactggttgagcattgatttgttgggtttacaaggagcaggtaaagcttttccaaacaagattgtttttgatgataagcttgtgttggctaacacacaagaattctttgatggaaattttccagtggattcttggttaccaatttttgtgaattgtctttatcctgtaagtcaattacct

SEQ ID NO: 48346 - DNA, 399 bp, Glycine max
  Clone ID: LIB3139-040-P1-N1-H5
gctggtgcttaatcggtttgttatagagagtagcatctgagtctggtggttagcgtaggggattgaaaatgagtatgtacggaagggatccgtggggagggccgttggagatccacgccacagactccgccaccgacgacgagcgcagccggaatctccaggagctggaccgaggcgctttagacgagacacaacagagctggctcttgggcgccggagaacagaaaaagaagaagaaaaggtacgtagatcttggctgcatcatcgtcagccgcaagctcttcatctggacactcggcactctcgccgtctgcgccttcctcgccggcttcatcaccctcattcgcaaaaccgtcccccgccaccaccacaagccaccctcttccgacaactacacca

SEQ ID NO: 48347 - DNA, 353 bp, Glycine max
  Clone ID: LIB3139-040-P1-N1-H7
ctgaatacagagttgctttacaaaacaaatgaatgccaacattgtgaggctgaggcagcttcgttctatttggagcttcagatttcatccattagtgaagaactgctgaaaggcaaggtcactgagcttactggagtttgcaagagacttgatgatgaaagtgcagggaaaggcttggtgattgaacaaatgatagaaagaatcggtttactggaaaaggaaattagaggactgaaggggcagctatctgcatacactccaacaattacttctttgaaagaggattttgcatctctagagcacacttactttcttttgaccaataaaacttttgccgtaggcaacatagaaca

SEQ ID NO: 48348 - DNA, 256 bp, Glycine max
  Clone ID: LIB3139-041-P1-N1-A8
aattgcagtggtctaaacacgccattggatcacacttgtgcaaacttctccaattagggactcgttgtgagatgctgcttgaaagaaaggttgtttaacggtcaacactgggatgtctgggaatgcatcaaccacaaggagtggttcggcctcactgggacatgtgtttttatacaaacagcaacagcacctcgcattttgatgcatgttagtggtcacaatcagaaccacattcctgggaattaacctctcccaa

SEQ ID NO: 48349 - DNA, 315 bp, Glycine max
  Clone ID: LIB3139-041-P1-N1-B1
ctcgggggaagcttattgagagagagagagagagagagagaggggagtattgcgcttataatatgggttttctgggattccatgcacaaagcggccactgggcagaaaaagttgggaagaaagaagttgacttggcgataggcaaaaacaccaagtttcataccagacaatcaggaggatccttgttcacggggccatgttaaactgggcattgggctggatactgctattctcacggggcgtgaacacactctccaagactggatcttatatgttcgttcaatgctctcaacacgagccgttgaacatataccc

SEQ ID NO: 48350 - DNA, 313 bp, Glycine max
  Clone ID: LIB3139-041-P1-N1-C12
ttctttagcgagggtagttctcaccgcagccataaactatgcggtgggcctttaactggtgttggcgctcccactctctctttcacaaccttcactttactctctctgacagctaaaattcaaagaggatttcaatcattattgtcacacgggaatgtcattataaatgctgttctacaacaggtgcgcatggtgaaccccctgttacatccaattgtctcttctctgtttgaatttgttacacctgctcgcatttaagagcatggttttgagagcaccacaatttcagacatcttgaatgataaatgcaaat

SEQ ID NO: 48351 - DNA, 64 bp, Glycine max
  Clone ID: LIB3139-041-P1-N1-D6
aaaaaaattttttaaaaaaaaaaaaaaaaaaaaaaaaggagggataaaaaaaaaaaaagggagg

SEQ ID NO: 48352 - DNA, 348 bp, Glycine max
  Clone ID: LIB3139-041-P1-N1-E1
ggggcagaatatttctctgaagtgttctcaaagcctctcagatctcttccttatgattcgcctgggcaaacatttgtgggttttgagaagcctgagggattgtcaattgctggaaaattttctaacgttctgaaatttattgttaaagaggttgacccaaccactggtgagacagaagatgatggcgttgaagatgaataccaactagaggatttagaggttgtcaccgcagactacatgttgaaagtgggagtgtctaatttcaggagtgcatgggaaagcattggccctgactgtgagcgagtggatgaatatggtcttggccccagggagagtttggctgaagct

SEQ ID NO: 48353 - DNA, 296 bp, Glycine max
  Clone ID: LIB3139-041-P1-N1-F10
ttagcggtttatgtttaccctccgaaccccttatccgggggggttcttaaacccgccggggagtcataaatccacaacacctgcttcctcaaagtcctcgaccaccgtaccttctcctccgacgcagccgtctcccccgttccctccttcttcgtcttcaccctcttatacctccttttgaccttactctccctcttttaccctcaacgcctacgacaagctcgccgcctatgacttctccatcgacacccccttctggacctcattctacatcatcttctccgaaacctactcct

SEQ ID NO: 48354 - DNA, 405 bp, Glycine max
  unsure at all n locations
  Clone ID: LIB3139-041-P1-N1-F3
tgtctcgagagggcaatttatatttctgtgtnntgcgattatgcttagtttgtgagnnggttttattaccccaagcaaggttattgagcnnaagatggcagaaatggattaaacnnagtctttgtgnnngtggtgatnngaaaaattganntgcgtgaaaggggacgcacnnnctgcttgttggctttgggttgttcaagggatggcnnaatttgtaaggaaagggatgtttggagaggttgannatgtggaatcnnccttctggatttctcgctcacnagtgtatttgcaatagcatttttaaatgagatgctcattagatatagctatgaaaaattactgcgccaggctaaagctccaagtatgtttttacaatccttcaaaaattttgtttctttgtgtgtg

SEQ ID NO: 48355 - DNA, 347 bp, Glycine max
  Clone ID: LIB3139-041-P1-N1-G1
aggctctgggtctggcaaaatcgtcccccaaccattgttatggtttggtccgttcttcttgcttcaatattctccttgctgtgggtgaggattgatcccttcacctctgactccaacaaattaaccaatggtcaatgtggcatcaactgttagttctcttgtatgattcattttgtgttgttattcccttttgcttggagatacacaaggttgctgtcgtgtatatagcaagaattttcagcctatcaaagttgtctggaggattgaacccctgaaatagatgggaatgtaccctctctgtttctattatttatctacatgttccttacaagaatagtcagtagtaa

SEQ ID NO: 48356 - DNA, 333 bp, Glycine max
  Clone ID: LIB3139-041-P1-N1-G8
gctcgaggtgggtgtatgtttgagaagtaagaagcatggctcagtatggttacgcataccgaagcgctcaaatatccacctacaacactagcaatgtgagaaacattgaaactggtgcaaagccatttgctccctacgtccccaaatttagtaacggtaatggttactcagacgggatcgttaccaagaaaaaaataattccagttgctagcaggccttattatgaggacgagagtgacaacgaccatgatgacgatgaagggaagcatccacatcaaacaagcccacgtaaatttgatgacttcctcaccaaggtgcacaatgaagctaacc

SEQ ID NO: 48357 - DNA, 138 bp, Glycine max
  Clone ID: LIB3139-041-P1-N1-H2
gaaagtgtgctctgaaactagttaattatataaaattgtggtgttgttgtctgaactatgataagaaagtgctacatgtcatggctacaaagtgtgttgcttgattaaaaaataaagtctgtttaagggggtctttgc

SEQ ID NO: 48358 - DNA, 101 bp, Glycine max
  Clone ID: LIB3139-042-P1-N1-B5
aaaaggggggggctcaaactccaggattataagctgatggcatgaaacaattaagactcgtttggattgctcatgcgtggttgaaatttgattgtctagtg

SEQ ID NO: 48359 - DNA, 68 bp, Glycine max
  Clone ID: LIB3139-042-P1-N1-D6
aaaaaatttttttaaaaaaaaaaaaaaaaaaaaaaagggaggaaataaaaaaaaaaaaagagaggaaa

SEQ ID NO: 48360 - DNA, 150 bp, Glycine max
  Clone ID: LIB3139-042-P1-N1-E8
aaaatattttaaaaacaaaaaaaaaaaaaaaaaaggggaaaaaaaaaaaaaaaaagaaagaaaaaaaaaaaaaaaaaaaaaaaaaaaaaaaaaaaaaaaaaaaaaaaaaaaaaaaaaaaaggggcggccccccccttggggcctctcccc

SEQ ID NO: 48361 - DNA, 248 bp, Glycine max
  Clone ID: LIB3139-042-P1-N1-F6
ctgcaccttctttttttataagaagatacactcaatgctggatattgtgttatggcttgcgaatgaataagaaaatgtgattgtagctctcctacaacaaatactaaaggatgttcaatatctgccactaggataaaaagataaaatgtagttcttttctttttacccagatagatgtcttgagggatggagcagtggaaacctgcagggcatcattttttcaaaaaatagaatgaaatataaaattc

SEQ ID NO: 48362 - DNA, 168 bp, Glycine max
  Clone ID: LIB3139-042-P1-N1-G10
tcggcattgttcattacactccgtggaggccgtgctgtcacgttgggggaaaagcccaacatgtgaatcatgaagaaaaacttgagcctaagtttacccgatccgcggttgcttctgaagaccaagcccttttctcgtgccacctgccagaggttttgggctttcaat

SEQ ID NO: 48363 - DNA, 229 bp, Glycine max
  Clone ID: LIB3139-042-P1-N1-H4
tgtgcaaccctcgttcaactctgcaactcataaagaaggcagggtgtgttattatgaagagacacgtgcatcggatttgtgatgacctaaccctgggttctgtggacgagtcgtgtctattgtgacaccgtgatctggtgctgctcacccatggcgcgactcaaagagcgggtctggagcatcagcagaatgtaactgtggggttgaaattggccagggcagtaagggc

SEQ ID NO: 48364 - DNA, 333 bp, Glycine max
  Clone ID: LIB3139-042-P1-N1-H6
tcgagtgcgattatccttttattcgcaccgaaaccagtgagccatggccgtccgaaagaacaagcgcatctccaaggggaagaagggtggcaagaagaaggcagctgatccctttgccaagaaggattggtatgacattaaggctccttctgcttgtcaagtgaaaaatgttggcaaaaccctcgtctctcgtactcagggtaccaagattgcttttgaaggactcaaacgtatagagtgtgaggggtcttcttgtctgctcttaaaggggatgaggatcatgcattcaagaagattaggttgagagctaaagatgtgcaagggaagaatgtt

SEQ ID NO: 48365 - DNA, 349 bp, Glycine max
  Clone ID: LIB3139-043-P1-N1-B5
ggggaagtattagatttcgtttattaataagcccatgtcgttttaatgcttggtgactgtgtgtggagtattgaccagctggaattaatcatcaatctccttttccttatttctattttttattttccaaaattggatctgctatggaatttgtgccttgtttctcaggtcagatagtggaatatttgttggaccatgaagcataaagatggaaaaccgattaatcagccaaataagaaccgggctgtgactttggcagtcactttaattgctctatgtggtttttctttctatctgggaggaatcttttgctctggaaaggatgggggttgtggttaataccattcag

SEQ ID NO: 48366 - DNA, 370 bp, Glycine max
  Clone ID: LIB3139-043-P1-N1-C2
cgcgggtggaggtccatttattgtttgccaaagagagctgcattcaagggtactgctcctatcaacttgtcagatcgtctcaaccaggttcttcgttgggcacttggttccattgagattttcttcagtcaccattgccctctgtggtatggcttcaaggaaaagaagctaaagtggcttgagagatttgcctatgcaaacacgactgtttatccattcacctccattcctctagttgcctattgtattcttccagcagtttgcttgcttactgacaaattcatcatgccaccgattagcacctttgctggtttgtactttgttgctctcttctcctcaatcattgcaactggtattcttgagttgaaat

SEQ ID NO: 48367 - DNA, 343 bp, Glycine max
  Clone ID: LIB3139-043-P1-N1-C5
gttgcaactttttttgttcgcagcagtttgcgacctgagagggttgttctgcacataattacagatagaaagacatactatcccatgcaggcttggttctccttgcaccctttgtcacctgccataattgaggtcaaggcattgcaccactttgattggtttacaaagggaaaagtgcctgtgctggaagcaatggaaaaggatcaaaatgttcgatcacagtttagagggggatcatcagctattgtagcaaatactactgagaagccaaaagtaattgctgcaaagctgcaagcacttagtcctaagtataactcagtaatgaatcacattcggatacatc

SEQ ID NO: 48368 - DNA, 275 bp, Glycine max
  unsure at all n locations
  Clone ID: LIB3139-043-P1-N1-C9
tgctttagcttncatgcagtcataacatcaccattactgatgggattgacaaaactggtgcagctttgcaatttagaaagttagcagattgtgattttctcaagagaaactctaatcagatgtctaatgttttgtggtttttttttttttgttattgttataaataacgacacaattaaaaatttactattatttcttatttttttttattttttctatcttttcttgaatccattttttcatttttttttttttttttctttttattttttttt

SEQ ID NO: 48369 - DNA, 360 bp, Glycine max
  Clone ID: LIB3139-043-P1-N1-D2
ggtctgtagcgaaaagtcagcgccttcttttgtctctctctctcaaaaaaaaaattccacacactgcagagtttgtctctctatggcggaagattgggatctacatgcggtggttagaggctgctccaccgttacatcatcctcagtgtcttcttcttcatctccttcttcctctggttttgcctcttcttacttccaccctgaagctgcagtttcttcttcttcttcttcctattctggcttcaacatcttcaagggtgaacaaggaataagccaagttttgtcgctctctgcgtacccctttgaggcaaggagctccattgaggaattgcatgagctttgcaaacctttcttctccaa

SEQ ID NO: 48370 - DNA, 353 bp, Glycine max
  Clone ID: LIB3139-043-P1-N1-D4
tgtgtgaagatttttcatcagttcacaaagatgaaccccacactgcaatttgcaaaacggagaataaacagtttttgccattcatctcccctccatctgtatcatctggatcattttctgcaagacatagtgactcacctccctccttctcaagcacaaaatctgaaggcaatgtggacttacaggatgtgttggctgctgcccatgctgctgctgaaactgctgaacgtgcagcagcggcagctcgcagcgcggccagccttgctcaactccgaattaatgagctgacaaagaagaaaagtagtgaacatgtgcctgacagcagtagctctgagaacccgttttatgctggt

SEQ ID NO: 48371 - DNA, 118 bp, Glycine max
  Clone ID: LIB3139-043-P1-N1-D7
tgagaactgtaagagtctcaaatatctggttgatgagtgtccttttgcatttgtgaactagtatgtaatattttattcacttaaataaagcgcattactatgtgcaatgagtgtgttt

SEQ ID NO: 48372 - DNA, 274 bp, Glycine max
  Clone ID: LIB3139-043-P1-N1-F6
tgaaaaaaattgttttttgagaaaaaaaaaaaataaacgggtggttttacgacgggagatgcgggattatggactaaacacaaaaaaaaatgggggttcgacagataatgaaatgatggacccggaaattaattagaggcatttctcttgaggttttccaaatttgcgtttatgaattcgaataacatgttggtgataaaatggtcaaagatcaaatttgtggtaaatgcaagttggattatacttacgctaataattctgcccgaattcttaa

SEQ ID NO: 48373 - DNA, 359 bp, Glycine max
  Clone ID: LIB3139-043-P1-N1-G6
tttgggtttggcattttttcatatttcaccacttgtcctactccacttggatgatttcctaacgtattgttttcacaaatccttgttcttcatcagctaatagtttgagtccaacgaattcagcaacactatagatatatgctatatcttcctttccctatacattttccttccaaagtatctctagttctctacaaatcaacgtggcacattttttagcctaagaaaagctttagctgcaactcaaattcaaagtgtaagcctttcttgtttttattagtttatcttcaccaatggaagagaactttaagtgtgaacaagttggtctcattgatgagctaatgcaagggaaggagcta

SEQ ID NO: 48374 - DNA, 359 bp, Glycine max
  Clone ID: LIB3139-044-P1-N1-A2
gagaaaactcctatttcgctcgcagtcacccaagaggcgaagccttaccattgctcgagatgggtgaagaagtgaaggccgtggttccagagtctgttttgaagaagcagaagagagaggaggaatgggcgttggccaagaagcaagacctcgaggctgcgaagaagaagagagccgagagccgcaaactcatctacaacagagctaagcagtacgctaaggagtacgatcaccaggagaaggaattgattcggttgaaacgcgaggccaagctgaaaggtggattctatgtcgatccagaagctaagctcttgtttattgttcgcattcgtggtattaatgccatggatcccaaatca

SEQ ID NO: 48375 - DNA, 383 bp, Glycine max
  Clone ID: LIB3139-044-P1-N1-A4
caaaaattattttggacacgacttcctattggtgctacaggtgcacgcgcttcgttcacatgcaagaacagaacgacgtcgtttgcccgcgctgccacggcggcttcgtcgaaaaggtcaccgccccccaatcgtcaaggcaaggctttcgccgccgacgccgcaacgccgggaaccactcggcgttcaacccggtgatcgtgctccgcggaccgggagaggacgaggagagcagctttgagttatactacgacggcttcgacggcgaggggctccgcccgctgccatccaccatgtcggagttcttgcttggatcgggattcgaccggttgctggagcaggtttcgcagatcgagatcaacggcctcgggagggctgagaat

SEQ ID NO: 48376 - DNA, 381 bp, Glycine max
  Clone ID: LIB3139-044-P1-N1-A5
cttgaaccattttggggctccagggaattctttaaatggatctttgtggttaatcttgtaacttcaaaatgtttattcatcactgctattgccttatactacattacaaggctggagacttacctttacatgccactttctggatttcatggagttgtatctggtttcttggttggcattaagcaaattataccagatcaagagcttcctttcattaagataaaaacaaagtggttgccatctatcactgtattgctttccattgctattagcttctggacactagaagctacagcatatcttccaaccattatatctggcacgtatataagctggatttatcttagatactggcagaggaaaccagaaactaaacataga

SEQ ID NO: 48377 - DNA, 379 bp, Glycine max
  Clone ID: LIB3139-044-P1-N1-A6
atggagtttgtattttctgaagcgtactggatttcatggggatatcatttgtgtcagtggatggactgccaccccaatgcaggatgttcagtttacaattgattggtttatttcctctcaggaatgtgttcccaggacctattgtgttttaaatccacaaaatccttttgtgttaaataggtggatggggaaactgactttcccccagggcacttcccgaagtgttaaaagaatgcctctttctataggaggaggagctggtgcaaagaatgctattctcatgaatatgccaaatgctgttctttcaatgtggagatattttgttggagatctcgtctttgaagtttctaagatgacttctccctacattaaatgtaca

SEQ ID NO: 48378 - DNA, 257 bp, Glycine max
  Clone ID: LIB3139-044-P1-N1-A9
ggcattgttttgtctcggtgtaatcaaataataagtgctgtaatgataagtctgtggttctgtatttgtttatttacccccactatgtggcattgatttgtctcggtgtaatcaaagttgctaaaagaacattttcaccatgaatttctatgttgaaagtgacttgataaaataatatttcaacagcttccatctgaaaaagctcaaaaaggaattgattttctatcaaaaactatatatatataaggggcggactg

SEQ ID NO: 48379 - DNA, 262 bp, Glycine max
  unsure at all n locations
  Clone ID: LIB3139-044-P1-N1-B11
taggtganttcagtgagcgaacggtgttcacttgatgtggtcataatcggcagcgtggagggaagaaaatgccgatcagaaacatcgccgtcggaaggcctgaagaggcgactcaccccgacacgttgaaggcggctttggctgagttcatctcaaccttcatcttcgtgttcgccggctcaggctccggcatcgcctacaacaagctcaccgacaacggcgctgccacccctgccggcctcatcttcgtctacatcgccca

SEQ ID NO: 48380 - DNA, 380 bp, Glycine max
  unsure at all n locations
  Clone ID: LIB3139-044-P1-N1-B3
tttgtcctttttaagctttaatcgttcaacatattctgaccatttaagtcatgggcctgctatcttgttttaggtctaccgncctgagaaaatgttccaaaggaagctctggcatgtcaagattcctgtatacgaacaattttcaacgaaacttgatttcgtctggtggcaatgaatcgtattatgggtattttaacaggagatcatacactttactttatatgggaactggaactgtgggtgggattacaagtgctagaatcagggtgccaaatgtaggatgtgaaggattcatgtgctcaagtcatctgtcaatcactcaaagaaattcaagattgatccattctactagcaagattgttccaaattctgaaattcag

SEQ ID NO: 48381 - DNA, 359 bp, Glycine max
  unsure at all n locations
  Clone ID: LIB3139-044-P1-N1-C10
tctagcgctgnttttgttgctgcaccaccgaacaacttggcgggtaaatcgcgtggcgtgggtgcaaggttttaaaagatggctgatgctgaggacattcaacctcttgttgttgataatggaactggaatggtcaaggctggttttgcaggtgatgatgctcctagggccgtgttccccagcattattgggagaccacgccatactggtgtaatggttgggatgggtcagaaggatgcttacgtgggtgatgtagcccaatcaaaaaggggtgtgcgtaccttgaaaaatcctatacagcattgcatattcagcaactgggacgatatggagaagatttggcattacacattttacaa

SEQ ID NO: 48382 - DNA, 382 bp, Glycine max
  Clone ID: LIB3139-044-P1-N1-C6
tttgagaggagatcaattgaaatttctctggttattcgacaaactgtggaagcttgtatactgacacatttattgcctcgttcccagatagatatttatgtccaagttctccaagcagatggaggaactagatctgcttgtataaatgctgcaactttggcccttgccgatgctgggattcctatgcgtgatcttgtaacttcctgtagtgctggataccttaatagcacccctctgcttgatttgaactatgtagaagacagtgctggaggtcctgatgtaactctaggaattcttccgaagctggataaagtgacacttcttcagatggattctaaactaccaattgacattttggaaaatgttatgcaactggcaattg

SEQ ID NO: 48383 - DNA, 108 bp, Glycine max
  Clone ID: LIB3139-044-P1-N1-C9
gcaatattataacaggaaaaagatgaaaaggaaaaggaaaagaaaaagagagtgccatatgtaatggtccttgcatggaaaacatgattgagttctattttttttttt

SEQ ID NO: 48384 - DNA, 369 bp, Glycine max
  unsure at all n locations
  Clone ID: LIB3139-044-P1-N1-D2
tctatcttccttcccaaacccaccgntttattctgtggggtgggttttgaccagggtgcgaataactcangccttcacctcgttctagggctttctttgactgctactgtaaaggaaaccactcaatccaccaagcctgatgatgatcatcatctttgtgttattaagccaacgccaacgaaaccttatccccccaatgaaccgtctctaacgttgggcctgtccggtgagagttaccacgtgaccaagcaagtgcttagaaataacgtttattgtgaggaccctcttgagttgtctcgacagacatcacctcacagcgttgtttcgtctttctcaactgggagggtcgttaagagggagagagatctt

SEQ ID NO: 48385 - DNA, 384 bp, Glycine max
  Clone ID: LIB3139-044-P1-N1-D4
taataatttttttttctcttcaatactactctaaacgtgatgcttttttttgaaaaacgcgtgggaaacgaaaataaccaaataagaagaaagaaacaatgaacgacttgttctcaggttccttctctcgcttccgcagcgaccagtcatccccggaccgccaccacgacatcgagatgggcgccgccgccggtggcccccgcggcggcgaggtgaacctcgacaagttcttcgaggacgtggaaggcgtgaatgaggaactaaaggaattagaaggcttagcgcagagtttaagaagcagccacgagcagagcaagacgctgcacaacgcgaaggcggtgagggacctgcggtcaggcatggacggcgacgtttcggcggcgc

SEQ ID NO: 48386 - DNA, 377 bp, Glycine max
  Clone ID: LIB3139-044-P1-N1-D5
ggattatgtttttgataactaaattagggttcatgagtatgtcaagccttactttagggggtctaaattgaaaagctttctagctggtcataatatcaccattactgatggtattgacaaaactagtgcaactttgcaatttagaaagttagcagattgtgattttctcaagagaaactttaagcagatgtctaatgttttatgggtggctcctgaggacaaggcgagtttatggtcacaacttcattatgtttcgtgcaataatctggaaatgcaagaagcttatcttgtcaatctcgtaaatgtgttacgagaattgtatttgcacagtccagaggaagctcgccaattgagaaggaaagctctctctcgtattg

SEQ ID NO: 48387 - DNA, 378 bp, Glycine max
  Clone ID: LIB3139-044-P1-N1-E2
gttctagaaagtcctgggggcttacggaaaggtaaaatgggttaggacttaccctccaaggatttgtcttccttgttgcagaagaaccgtgctttctaatcttgtaattttctgcgttgcttcgtggttaattcttcgtgttcttgtgatctttctgttggagtatttacaacactcctttgtaagtttaactaaagaggctaattaattttcaattggaccacagcagatggctgaggagggtcacagggttactctaaatgtttatgacttgagccaaggtcttgcacggcagctttcaatgtcctttttggggaaagctattgaaggcatatggcacacaagagttgttgtttatggtaatgagtattactttgg

SEQ ID NO: 48388 - DNA, 378 bp, Glycine max
  Clone ID: LIB3139-044-P1-N1-F3
gacaaggattgttaaaaccagtacattgtccagcgtgtcaacacataatgagatggaagagtgagaacacgctggacaaggaatgctaaaaccagtacattgttagatgaacatgcatctgaattgccaagtacttcttgtgagtctgtaatagttcgttacaacaatttacgccaagaagcaatcaaatatgttgaagaaggtgcaaaatcaatccaagtctatcatgttgccatgagagctctgcaagaagctgctaagaaggtttgcgccattaaaaatcatagttctggaacagcagagggagctacagtaaccaatggaagcaggggtgaattgcttgtagcagatgaagatgctccaagcaatcaatctgtg

SEQ ID NO: 48389 - DNA, 383 bp, Glycine max
  Clone ID: LIB3139-044-P1-N1-F5
ctctgcattacatttcgagattccaaccatcgatctgaatgttcaaccttaacctctaagaatgtcttacgcttatctcttcaaatacatcatcatcggtgacaccggagttggaaagtcttgtcttctacttcaattcacggacaagcgctttcagcccgtccatgacttgaccatcggtgttgaatttggtgccaggatgatcacaattgataacaagccaatcaagttgcaaatatgggatacggctggtcaagaatcattcagatctattacaaggtcttattacagaggggctgcaggtgcattgcttgtttatgatataaccaggagggagacatttaatcatttggctagctggttggaagatgcaagacagcatg

SEQ ID NO: 48390 - DNA, 166 bp, Glycine max
  Clone ID: LIB3139-044-P1-N1-G12
tgaaattttgagttctaacgccactaaccctatgctgacgcgacttcttgagaactgtaagagtctcaaatatctggttgatgagtgtccttttgcatttgtgaactagtatgtaatattttattcacttaaataaagcgcattactatgtgcaatgagtgtgttt

SEQ ID NO: 48391 - DNA, 377 bp, Glycine max
  Clone ID: LIB3139-044-P1-N1-H12
gcaatacaatcgtcgtagtcgcaaccataatcagaagaagcgcagcttcaagcgagtgacagccaccagccatgggtcgtatgcacagccgcggtaagggtatatcctcttctgctttgccctacaaaaggacacctcctagctggctcaagatctcttcgcaagatgtcgaagaaaatatctgcaagtttgcgaagaaaggtttgaccccgtctcagattggtgtcattctcagagattctcacggtattgctcaggtcaatagcgtcactggcagcaaaatccttcgcatactcaaagctcacggacttgcgcctgaaattccagaggacctgtaccatttgattaagaaggcagtttcaattaggaagcatctt

SEQ ID NO: 48392 - DNA, 382 bp, Glycine max
  unsure at all n locations
  Clone ID: LIB3139-044-P1-N1-H2
gtcagcgtgcttcctttggtatcggtaccttcaacttttggtgggcctacaccactcccatcattggtgccatcattgccgacgagtaccttggccgcttcaacaccatcttcatcgccattgccttctcgattctcggccacatcttcctcatcatctctgctctgccctccgttctcgccagcggtaaggctattgctcctttcatcctcggngtcattacccttggtttcggtactggtgcgtttaaggccaacatctctcctttgatcgccgagcaatacaagcagaccaagccccgtgtcatcaaggaccccaagactggcgagcgtgtcatctctgatcccaacatcaccatctcccgtatcttcttgtacttcta

SEQ ID NO: 48393 - DNA, 308 bp, Glycine max
  Clone ID: LIB3139-044-P1-N1-H5
cctaaaatttacaaggtaatccgaagccatccatcaactgttgagatctatgagaagaagcttttggaatcaggggagttgacacaagaagaaattgataggatacacaagaaggtcacatcaattctaaatgaagaatatttggctagcaaagaatacattccaaaaagaagagattggctttcagcgtattggcttggtttcaagtcacctgaacagctttcacgtatccgaaacactggtgtgaaaccagagatcttgaaaaatgttggaaaagcaatcacaaccatcccttgaaatttcacacc

SEQ ID NO: 48394 - DNA, 311 bp, Glycine max
  Clone ID: LIB3139-044-P1-N1-H6
cgggtcgagcaatcattgtttgttgaaggaagaggaatctggagaaatggcaggggacagcaagagcaagattctgttcatcggagggactggttacatcggaaaattcatcgtggaagccagcgccaaagctggccacccaacttttcttttggcgagggatgccactctctccaaccccgcaaaatcacccctcatcgacaatttcaaaggcctcggtgtcaatcttcgcttatgagatctatacgatcaccaaagtttggtgagtgctataaagcacgtcgatgtgcggatttctactgtgcgacacc

SEQ ID NO: 48395 - DNA, 353 bp, Glycine max
  Clone ID: LIB3139-045-P1-N1-A4
ggccgccctttttttttttttttttttttttttagggaaaagtgaaaaattgattttatccaacaaaccatgctaaaaagtactatttggaatggtacttgttgtaagagactgagggacaagtaaaataaaattaaaacatatgatattggatacacttgatcaaagttttgaaacatatttggcagctatctaacacaatcatactgcccttaagaaacaaataacaaactataatgtgactcttctagtacaaatttgaacataataaaattactagtttcaaagctctatatatcacttcaattataatatcacttcaatatgtacttcaccataccaggaagatggat

SEQ ID NO: 48396 - DNA, 340 bp, Glycine max
  Clone ID: LIB3139-045-P1-N1-A5
gggcgtttaatcatcagaattccaaggtggatttgctgaatcttttactccggcttcatgctgcatgagtaaaggccgttatgttatgctcatggtggatttttgtgcaactgggactaggggaattgatgatgtggtggtggtgagaatgatgtatggggagtagaactaccaggagggttgttggtgttgaagatgacaagggagctgaaagaggaatgccgagctccaattctgagttacccatttccaattcatgctatacagaggagagcacaattgattcttttcatgtttctgactttggaggcattgatcagtcatatcgaataggggatgc

SEQ ID NO: 48397 - DNA, 386 bp, Glycine max
  Clone ID: LIB3139-045-P1-N1-B6
cccttccgtaggttcggatttcggttcgggcaacacctatttcccgttttggtaacagtaacacaaggaagcgtaaccgccgttgaaactatcacacaggtgcaccgtttgcaacaaggcttttccttcttaccaagcactcggtggacacaaggccagccaccgcaaggcctcgtcggaatccaacaccaccgcctccgccgtcgccgtctctgccacagccaacgacagcgtttccgcttcgaccgtcggcggcggaaggatgcacgagtgttccatctgtcacaagagtttccctaccggtcaggccctgggtggccacaagcgctgtcactacgacggcggaaacaaccacagtaacagcaacgccaacggcaacaacagca

SEQ ID NO: 48398 - DNA, 360 bp, Glycine max
  Clone ID: LIB3139-045-P1-N1-C5
ttggggctcaaggtattggcctaagtttaagcatttaattccttgaccatcagggggctattcctcatttttgggcacttgtcatgtttcataaacaacctcaatgcaaagcacaccaatgccagcagtcacaaccatcatcacaaacaccaacacactcagaatccttccttgaacacaaggcttcacatggcgtttcttggcctacaagcatggaagcaagtgatctactcagacccaaataacttcacttccaactgggtaggtccttcagtttgcaactacacaggtgtgttctgtgctccctcacttgatgaccctaaagtgacagttgtggctggcattgaccttaacttcgca

SEQ ID NO: 48399 - DNA, 354 bp, Glycine max
  Clone ID: LIB3139-045-P1-N1-C6
attttgttaaaccgcgatcacaggttgccgcaccttaaaaccggaaacaaaagcaatcgttacttgatttcaagaatttctcaatttcttcctacttctttgtgtacgatttcttaagggaaagaaaatcactctctgtgctggccacagacttcgtgaatcattttcttttccactcttagtttatttgctgaacactctcctatttgatataggacttcgtgtcagatttaaacttcttctgtttccttctcagttctctgtttaatttcaagttcaagctggtgaaatcttggattagtgctcccactctcctatctggtataggacttcgtgggtagacttttctatttc

SEQ ID NO: 48400 - DNA, 100 bp, Glycine max
  Clone ID: LIB3139-045-P1-N1-D12
caaatatttggttgatgagtgtccttttgcatttgtgaactagtatgtagtattttattcacttaaataaagcgcattactatgtgcaatgagtgtgttt

SEQ ID NO: 48401 - DNA, 312 bp, Glycine max
  Clone ID: LIB3139-045-P1-N1-D3
atcgcgagtggccgcccttttttttttttttttttgtggtttttttggggaaggggttgttggcaggttacgtaaatactggctgaaaggagaaaaagctggaacttcagagattttagccatcctacctggatatcctgacaatgtgagagtcaatgaagatggtgatttttgggtagctcttcattctagaaggtatatgtatgcatactacaatggtatctacccaaagatgaggaaaataatactcaagcttcctataccaataaagattcattacctgcttcaaatcgggggtcgccaacacgcagc

SEQ ID NO: 48402 - DNA, 61 bp, Glycine max
  Clone ID: LIB3139-045-P1-N1-D5
atatttatcattccacaaaaaaaaaaaaaaaaaaggggggggtttcaaaaaaatttggtgc

SEQ ID NO: 48403 - DNA, 74 bp, Glycine max
  Clone ID: LIB3139-045-P1-N1-E7
aaaatatttaaaaaaaaaaaaaaaaaaaaaaaaaaaggaaaaaaaaaaaaaaaaaaaaaaaaaaaaaaaaaaaa

SEQ ID NO: 48404 - DNA, 347 bp, Glycine max
  Clone ID: LIB3139-045-P1-N1-F1
ggggtgtggagtttcagcagaaaaaaaagctgaagggaattctattggcagctacaagggaacagaggtttgatagagtaaccaagaatctgaaagtgacaagagtgatctctactttggtggaagagatgaaagcaataaatggtgactcgcaatgtacagaagtgatggtgcccatggcccacagtgagaggagtccagtcctgctgttcatggggggtggcatgggagctggaaagagcactgttcttaaagacattcttaaagaatcattttggtcaggagcagcttcaaatgctgtggtggttgaggcagatgctttcaaggagagtgacgtcatatataga

SEQ ID NO: 48405 - DNA, 354 bp, Glycine max
  Clone ID: LIB3139-045-P1-N1-F3
ctcaggaatgtgttcctaggacctattgtgttttaaatccacaaaatccttttgtgttaaataggtggatgggaaaactgactttcccccagggcacttcccgaagtgttaagagaatgcctctttctatagggggaggagctggtgcaaagaatgctattctcatgaatatgccaaatgctgttctttcaatgtggagatattttgttggagatctcgtctttgaagtttctaagatgacttctccctacattaaatgtacagtctctttcttcatagcatttggaaatttggctgatgacaccatcaattttgaggcttttccccacaagctggtgcagtttggagagattc

SEQ ID NO: 48406 - DNA, 360 bp, Glycine max
  Clone ID: LIB3139-045-P1-N1-F5
ctacacactttgcaatggcggttgttgctcaaacccctgacatcgccggcgagcggcagtccggccaagacgttcgcacccaaaacgttgtggcatgccaagccgttgccaacatcgtcaaaagctctttaggccccgttggcctcgacaagatgctcgtcgacgacattggcgacgtcaccatcaccaacgacggcgccacgattctcaagatgctggaagtggagcatcctgctgccaaggttttggttgaactcgccgagcttcaggatcgagaagtcggagacggcactacttctgtcgtcattgtagctgctgagcttctcaaaagggcaaatgaccttgtcaggaacaagattc

SEQ ID NO: 48407 - DNA, 405 bp, Glycine max
  unsure at all n locations
  Clone ID: LIB3139-045-P1-N1-F6
ggaaaaatattttgtaggcttacacctaagcgttgtttcgcagttcgttggaccttttaagtttttcgtaacgccatttcacgatatttcatacgagtcggagcggtgcacggggatatgtcgggagcgtctaccctactccagataatcgaagcccaataaacgcttattccttcgtgtctctcgccgcaaaacgatcgaaaatgttaaacgttacttaagaattcgctgtgctcagatnncgagaaacttggcaacgaacccctagtnntgtctgtgtgccctgttatgctctccaacacnnagcaaaaatgtctggaagccgatcctaaggttgccataaccatcccaaaacgctgcaaccttgctaatcgccctgttggttacaagtgtggaccttacact

SEQ ID NO: 48408 - DNA, 170 bp, Glycine max
  Clone ID: LIB3139-045-P1-N1-G1
ggctcgagcttttttattctcccaattccttaattttgaaacctagctccatttccctccactcaccataacatggcatcagaagcaaatgctgccaacaccaacttctgtgtaaatgttagcaacaatggctacattagtgctaatgaccccttgaactggggtgcggc

SEQ ID NO: 48409 - DNA, 354 bp, Glycine max
  Clone ID: LIB3139-045-P1-N1-H1
gggaaagaggagtagatgacaggctcagcagatccattggggatatcattcggtgagatgctcatcgactttgttcctgacacatctggtgtctccttggctgagtcttgtgccttcatcaaagcccctggaggtgcccctgccaatgttgcttgtgccatatccaaactgggcggcaatgctgccttcgtcggcaagatgggagatgatgagtttggaaggatgctagttgacattttgagaaaaaatggggtgaacacagatggtgtttgctttgatacggaggcaagaactgcattggcttttgtgacattgaggaaggatggagagagggagttcatgttctatagaaac

SEQ ID NO: 48410 - DNA, 165 bp, Glycine max
  Clone ID: LIB3139-045-P1-N1-H6
tttctcgagcatgataacgctcacagcatttatatagcgtgttaatgatatgctggtggggcgtcaacacaaaaaattactgcgccaggctagagctccaagcatgtttttgctattttttgttttgcttaagctctattttgtgtctctttgcacgtgaatgat

SEQ ID NO: 48411 - DNA, 102 bp, Glycine max
  Clone ID: LIB3139-046-P1-N1-A4
gagggaaaattggtcagaatcaagattttttgccaatgggaaagaatctgatagtggtgtttcctcaaacctaaatgtagctgctgaggctaccaatttagc

SEQ ID NO: 48412 - DNA, 348 bp, Glycine max
  Clone ID: LIB3139-046-P1-N1-B10
ttacaaaagtccttttccaaaattctgaatgtcaccaataataaaaaaaggaaataaacccagccgttaatgtttttcctcaataaggaaactccaccaacaaaattcaaacgcgcccctcactctcactccccatgccgacgcccgtggcagccgcgcgccaatgcctaactaccgacgccgcgcgcgccctcgacgaggccgtctccgtcgcccgccgccgcggccactcccaaaccacgtcgctccacgccgtcttcgaccttctttccctcccatactaacccctcctccgcgacgcctgctcccgcaccagaaactgcgcgtattccccacgccttcagttca

SEQ ID NO: 48413 - DNA, 209 bp, Glycine max
  Clone ID: LIB3139-046-P1-N1-B4
gctatttgtcaatctcgaaatggacagaatgtttcacagccagaggaagctcccaatgaaaggaaagctttctgatgaggctgcaaaaagcatgcctaccatagcacaatgaagagtcatcagcaagatgtaatgctcgacaaatgtatatgttactgtggctgattgtggtacagggcagtagtttcacaaaatgtttgatgtagctg

SEQ ID NO: 48414 - DNA, 353 bp, Glycine max
  Clone ID: LIB3139-046-P1-N1-B5
ctccctttgttgcggttgctccatcacctaatcacgttgcccacttcccctgtaaatcacgtttagttcgcacaaggttttaaaaaatggctgatgctgaggacattcaacctcttgttgttgataatggaactggaatggtcaaggcgggttttgcaggtgatgacgctcctagggccgtgttccccagtattattgggcgaccacgccataccggtgtaatggttgggatgggtcagaaggatgcttacgtgggtgatgaagctcaatcaaaaaggggtatactcaccttgaagtatcctatagagcatggcatagtcagcaactgggatgatatggagaagatttggcat

SEQ ID NO: 48415 - DNA, 351 bp, Glycine max
  Clone ID: LIB3139-046-P1-N1-B6
ctcgagtttattcggctcgagcttaattagtgttcatgaatatgtcaagccttattttagtggttctaaattgaaaagctttctagctggtcataatatcaccattactgatggtattgacaaaactagtgcaactttgcaatttagaaagttagcagattgtgattttctcaagagaaactttaagcagatgtccaatgttttgtgggtggctcctgaggacaaggcgagtttatggtcacaacttcattatgtttcgtgtaataatctggaaatgcaagaagcttatcttgtcaatctcgtaaatgtgttacgagaattgtatttgcacagtccagaggaagctcgcca

SEQ ID NO: 48416 - DNA, 352 bp, Glycine max
  Clone ID: LIB3139-046-P1-N1-C5
ccctccttcgtcgccgcctcacggatacggtgggtgaccctccgccgcagccgccgcagcgtccgccgtacgactcctatcagggttacttcgataacgggcatccaccgccgcctccgccgccgcactaccactaccagcacgtggatcaccatcaccaccatgaggagcctgggtgcttttcgttcctccgaggctgcatcgcagcgctttgctgttgttgtgtgctagaggagtgttgcttctgataatcacatcgtaaaagttgtttcttcagtttgctgcacttggttatggctctatagagaaatgtggctacaattctagataataagtgagaggtggtaagtct

SEQ ID NO: 48417 - DNA, 349 bp, Glycine max
  Clone ID: LIB3139-046-P1-N1-E10
ggggtttagaactgtcaaagatggtggtgttcggtggataatgcggtgacacaggttacgaaggacttcttggtggcctacacaaaagtgtcatactgaagggagtgggaagcagtgcaatcagtcaactccataataacagaagctaccctctttcagatgtcacgccattggacagccccaacatcgtcgaggcaactgaggggagtagcggtgctgatatccaggctttgatcgaaaaagtgggatatctcaatggatgaaaaaatttgaaagtcatttctagttatatgcctcttaatgtgtgtctgctatgaaacctacttctgagcaagcagatattctgaat

SEQ ID NO: 48418 - DNA, 344 bp, Glycine max
  Clone ID: LIB3139-046-P1-N1-E4
gttccggttttgacgtggaccacaatcactttctgcgcttcactcactcccttcgtgcggttttctttctttgtcgaactcgtgcgaaaatgcgtgagattcttcacatacagggagggcaatgcggaaaccagatcggagcgaagttctgggaggtggtgtgcgcggagcacgggatcgattccacggggaggtaccagggggacaacgagttgcaactcgagcgagtcaacgtctattacaatgaagcgagttgcggaaggttcgtgccgagggcggtgctcatggatctagagccagggaccatggacagcgtcagatctggtccctacggtcagattttc

SEQ ID NO: 48419 - DNA, 409 bp, Glycine max
  unsure at all n locations
  Clone ID: LIB3139-046-P1-N1-F2
tcgatggtgcacttcgtgtgattgaatgcgctttggggtacccggtgacggtgggacttctgtccgtcggctgaaaccggtggtgtgccctttccgtttgggcgacgagttgggacccgcgtgcagtcgtggtcgaaccgcgccagtctctttaaccagggaacctgtgtgaagcatcctggctgacggggaagtggaacccgccattgattgccaataccgaagctttcgagtacttaccatcttcgcgccttcttcaatgagaaccaaaagncccgtgcccaatatgccgaaccgcaacttgtgggcctcttccaagcctgatttcacttcccgtctaccgactccggaatcctccgcaacggacaggcagttacacctgcaagacctacacctacaagacctgcag

SEQ ID NO: 48420 - DNA, 356 bp, Glycine max
  Clone ID: LIB3139-046-P1-N1-F4
ttggagggtattttatcaagtctcactatctttcttggcctgctgtcggtgtttgtgacctcgaaatttttttcaccagtgtttagggttgaatactgattacccttcaagtattgttcagcttccgagaaaaaaatattggtgtggctagtcaaactagagacttggccatttacggtcgctattgagctcatattgctatacattctgatggtgttagctatgggcgggtagagctctcaagcgaagggctaagccgtgtggcacccactgataatgcattctcaagcctcaaagcaggaacatttaactccataaactcacaagaccaaatgcagctgatacaattccacact

SEQ ID NO: 48421 - DNA, 215 bp, Glycine max
  Clone ID: LIB3139-046-P1-N1-G3
ctggaatttgtgttttctttcgcttgttcgtttgtttaattcaataaaggaaattaggcatgaccctcttgttgagtatgctctgcctatttgaaaatttccacacctcttttaattgtcgtaatgatgtgtgaagtgtgtgttattttaaaaaaaaaacaataaaagaaactaaagaaagagaaaaaacaaaaaaaaaaaaaaaataataataa

SEQ ID NO: 48422 - DNA, 374 bp, Glycine max
  unsure at all n locations
  Clone ID: LIB3139-046-P1-N1-H6
tcgaggaattgaattataatatatgaaaactgannagaattggtgtagctttggacaattgatttntttaattagatgatttttaatatnttaatagtagaattattttaatgattttaataatataagaaaaataaaacattagtataaagatattgtaatttggatttaatttgattaaggaaacaataattaaaattaaagaaattagtaaagattgatgggttggagctaaattataactactcacttttagatctaatataagtcttgtttttataatttttctgaaatttgcagtattctcacaatttgtcagtgtgacgatttttaaattttcagaaatagtttttaattgtcataaactgcagatt

SEQ ID NO: 48423 - DNA, 147 bp, Glycine max
  Clone ID: LIB3139-046-P1-N1-H7
ttagaaacttatccacacgacatcgcaattactgtggtgtcctttctatagctgagggatctcaataatacaccgcaaacgatttttctttcccctctttttctattaccaattaatttatcatccaattattctttacatcataaa

SEQ ID NO: 48424 - DNA, 372 bp, Glycine max
  Clone ID: LIB3139-047-P1-N1-A10
ggctcgagcttgtttacatagggttggcagagaatccgtcaatggatggtaaaaactcatcatcactgaacttgaaggagacagagctgaggcttggcctccctggttgcgagtctccagagagaaaatcaggttctgcactctgtctttttggcaaagagttgcagaacaacaataacaatgtttgttctttgaaggctggggccaagaggggcttctctgatgccattgacacctcttctgtcactgagggatctcaaggagcttctgctttgttctctccaagaggtggcaatgttgggaagcctcttattggtttagacactcaaactaacaccaccatcaaagaggttggtgcagttcctcaatcag

SEQ ID NO: 48425 - DNA, 384 bp, Glycine max
  Clone ID: LIB3139-047-P1-N1-A5
ggctggcctctgccccttgaattctattgaggttacaaggctgcttaaaggtctaggtgctccaaaaaatgcaagaatttattgggctggaggacaaccactgggtggaaaggaggtcttacagccattaatcaatgaatttccacatctttacagtaaagaagatcttgctttgcatggagagctggaaccatttgcaaataaagcttctctaatggctgccattgattacatagtctctgagaagagtgatgttttcatgccatctcatggaggcaatatgggccatgcacttcagggtcaccgggcctacgcaggacacaagaaatatataaccccaaacaaaagacagatgctcccctattttctggattcttccctccc

SEQ ID NO: 48426 - DNA, 340 bp, Glycine max
  Clone ID: LIB3139-047-P1-N1-A8
cgtctcgaggttcaaggatgtgcaatttgtaagaaagatatttggagaggtgaatgtggaatcccttctggatttccgctcacaggtatttgcaatagcatttttaatgagatgctcattagatatagctatgaaaaattactgcgccaggctaaagctccaagtatgtttttacaatccttcaaaaattttgtttctttgtgtgtgtatggtgatgataacttaattagtgttcatgaatatgtcaagccttactttagtggttctaaattgaaaagctttctagctggtcataatatcaccattactgatggtattgacaaaactagtgcaacttttg

SEQ ID NO: 48427 - DNA, 149 bp, Glycine max
  Clone ID: LIB3139-047-P1-N1-C12
ctggaattcgtgttttctttcgcttgttcgtttgtttaattcaataaaggaaattaggcatgaccctcttgttgagtatgctctgcctatctgaaaatttccacacctcttttaattgtcgtaatgatgtgtgaagtgtgtgttatttt

SEQ ID NO: 48428 - DNA, 88 bp, Glycine max
  Clone ID: LIB3139-047-P1-N1-C6
aaaaaaattaaaaaaaaaaaaaaaaaaaaaaaaaaaagaaaaaaaaaaaaaaaaaaaaaaaaaaaaaaaaaaaaaaaaaaaaaaaaaa

SEQ ID NO: 48429 - DNA, 138 bp, Glycine max
  Clone ID: LIB3139-047-P1-N1-D12
gaaagtgtgctcggaaactagttaattatataaaattgtgttgttgttgtctgaactatgataagaaagtgctacatgtcatggctacaaagtgtgttgcttgattaaaaataaaagtctgtttaagtggttctttgc

SEQ ID NO: 48430 - DNA, 382 bp, Glycine max
  Clone ID: LIB3139-047-P1-N1-D9
gggtagaaacacatgcaagtgttaatggtgaatctggcctgcttgaaaggaaaaccgaaacattcacttcagaagccaccaacaattttgaaaatggagtatcagttaactatcaagagaaagaaacattggctggggaaagttcttttgctgtgaatagccaggaagggatttttgaaaatgggaagtcaacagaattatattccaaggagaacaatcttgggactgttgttacagaactgtcttctgcgtctaatggaggcataccggaaccaagtgtggaggtgaacaaacagcaatgcaatggagaaatggtttctgaccattgtgttgtgggggattaaggcttattgaattattaaaatggaagataagattcaag

SEQ ID NO: 48431 - DNA, 233 bp, Glycine max
  Clone ID: LIB3139-047-P1-N1-E7
gggattccgttttagataggccagttcaaacgcctcccggctctgtctttgtaaaggaacagattgataggtcctattcctcaaaaggttggttcctgggcagaggttgcttacatcgacatgtctgaaaatttcttgacagggacgattcctgcggatatgtgtcaaaagggagccatgtgggcgcttctcgtgcttcaaaacaagctattcggcgagatttcagccaccta

SEQ ID NO: 48432 - DNA, 346 bp, Glycine max
  unsure at all n locations
  Clone ID: LIB3139-047-P1-N1-E8
gcctagttcttgttcgcgagcggccgccttttttttgttggttttttttttttttttctttttttttttttttttttttttttttttttttttttttttttgtttnnaaaaaaaaaaacccgaaccttttttttccctgggattttttccccttgtttttttgtttaaaacccccccttttccccttaacctttgaccaaaaaaaaaaaaaaagggtttccccctttttctgggacaaatttattatttcctttaattanggggcccccccccccctttttgcccctcccccccgggattttttttcggcccggtccctccgggcgtcccctttttcctttttggg

SEQ ID NO: 48433 - DNA, 378 bp, Glycine max
  Clone ID: LIB3139-047-P1-N1-E9
gggacgacaccaacaacagcaacaaccattggtcgccgtctctctccgccgccctttaaaacgtcgacggctggggcggcccctacttcgccgtcaacaccgccgggaacatctccgttcgcccacatggttccgacacgctgtcgcaccaggagatcgatttgctgaagattgtgaagaaggcctccgatcccaaatctctcggtggtctcggccttcagctacccctcattgtccgcttcccggacgttctcaagaaccggttggactccctccaatcggctttcgattacgcaatccaatctggagggtacgagtctcattaccaaggagtttaccccgtgaaatgcaaccaggaccggttcgtggtggaggata

SEQ ID NO: 48434 - DNA, 106 bp, Glycine max
  Clone ID: LIB3139-047-P1-N1-F12
aaaaaatttatttaaataaaaaaaaaaaaaaaaaaagagccgaaaaaaacaaaataaaaaaaaataaaaaaaaaaaaaactaaaaaaaaaaaaaaaaaaaaatacg

SEQ ID NO: 48435 - DNA, 327 bp, Glycine max
  Clone ID: LIB3139-047-P1-N1-F2
gcggagggaaaagaggggagaagcaatttgaattatgtgacaaacccaatgaatatttattttgggattcttatcatcttacagaaagtgcttacaaaaaattcgcagatcttatgtggggcttcaccaacaactcttcaaatatagggccttacactattggagatctcttccaactcccatgacttgtttacttggctcattgtttttcttgcaacaaattaagtcaaaatgttgatcattataccttgattgtgttaacaaattgcatgtataaccgcttggtccagtaataattatttacgtaattgatggtacaatacaatt

SEQ ID NO: 48436 - DNA, 372 bp, Glycine max
  Clone ID: LIB3139-047-P1-N1-G1
cactgatctccattcccattccatggcttccactgaatcatcccctttcaagaaaattcagattcaaagggatgacactacatttgacgcatatgtggttggaaaagaggatgctcctggaattgttgtgattcaggagtggtggggtgtggattacgaaattaagaaccatgccgtgaagatttctcagcttggtagtgggtttaaagctcttattccagatttatacagaggaaaggttggtctggatgttgctgaagctcagcatttgatggatggtcttgattggcaaggtgctgtgaaggatattgctgcttcggttaactggcttaaagcaaatggctcaaagaaggctggtgtaactggattttg

SEQ ID NO: 48437 - DNA, 328 bp, Glycine max
  unsure at all n locations
  Clone ID: LIB3139-047-P1-N1-G11
ctcgaggaaagattcctttaacgatctgcgaccttcgcgtgttgcatgtncaaatcccactccaaaaaaggtcacaatctatcgaaggcaaacagagagcgaatcggaagaacaaaaacaagaagcagaagaaaaaatggggttgggtttgttagcttcgaaggccataagacccacctcaaggctcctcctcggttcccaaaaccctaccacttttctcctccgaaccatcgtctccaagcctgagcttcggaatcccgaagccagcgccgcacagccggagcagccgccggcgcccgatctcccgccgnggactccgttcgccggc

SEQ ID NO: 48438 - DNA, 393 bp, Glycine max
  Clone ID: LIB3139-047-P1-N1-H11
gctaattgtctcgagcaaaaccacaatttgtagtggaaaaaccttcaaatatgatataattggtgctggttcacattcttcacaagattttcctgaaaaggaagatcaagaaaaacccaaaaagattgatgccagattgagacaaagaatagatcctcaatacaatgaggttcaggctcagatggaaacaaatttgtttaaattgtctcttgatgatgttgaaactcctaaaggttccatgttggatcttaaaatttctcaatctaaaattgcacttcccaaaaacacagttggaggaaccattctgcgtagtgatttattggcaaattttttgacagaaggcaattttagagcaagtgttgatttgcagcgcactcatcgtattaaaagaat

SEQ ID NO: 48439 - DNA, 340 bp, Glycine max
  Clone ID: LIB3139-048-P1-N1-A1
ggctttagcttttctatttaatccctaaaatcgcattcttcttcgctcattcctctgcactgccatcatccccaacttcctcacaaggttacaaggactaaagagttgtgccaccatgtcggacgatgatagggaggagaaagagttggatctctcttctgccgaagttgtcaccaaatacaaaaccgctgctgagatcgttaacaaggccttgaagctagttatttcagaatgtaaaccaaaggcgaagattgtggatatttgtgagaaaggggattcatacattagagagcaaactggaaatgtgtacaagaatgtggagaggaagattgagagaggt

SEQ ID NO: 48440 - DNA, 310 bp, Glycine max
  Clone ID: LIB3139-048-P1-N1-A3
gtctcctcctttcgcctcttcaactttctctctctctccctagttgcatgttttcccatgttcaataataataataattctcactaatctcaaccttgttcagtattcaatttgattaatgacaccaagatccaagcacaaaataaaaacttgggagtgtgtgattattattccaaaatgaccccaccccacacttagtgttatgataacttggaaccttttgcacgcaagaataagctgtacacacgcaagaatagcgctattattatttcttcattttttggtggtgggggtcaaagaagtagcacct

SEQ ID NO: 48441 - DNA, 82 bp, Glycine max
  Clone ID: LIB3139-048-P1-N1-A4
cggttgaggcataactattaacataggtttggccgggatccaggttggcaactccgggggggaactatactgcctggaacat

SEQ ID NO: 48442 - DNA, 444 bp, Glycine max
  unsure at all n locations
  Clone ID: LIB3139-048-P1-N1-B1
aaatggaaaagctttctagctggtcataatatcaccattactgatgggattgacaaaactagtgcaactttgcaatttagaaagttagcagattgtgattttctcaagagaaactttaagcagatgtctaatgttttgtgggtggctcctgaggacaaggcgagtttatggtcacaacttcattatgtttcgtgtaataatctggaaatgcaagaagcttatcttgtcaatctcgtaaatgtgttacgagaattgtatttgcacagtccagaggaagctcgccaattgagaaggaaagctctctctcgtattgaatggctgcaaaaagctgatgtgcctaccatagcacagattgaagagttccattcgatgcaaaggatgatgaatgctcctgattcaaatgataatatngatctactgttgagcattgatttggtgggttta

SEQ ID NO: 48443 - DNA, 262 bp, Glycine max
  Clone ID: LIB3139-048-P1-N1-B12
cgttcagaccagagctgaacggctctgaggttggatgcggcaaccggcgccatggccttggtgatcttctggatattcctcacactcttcattcggtttctcaccacttgagtggaaatgaagcgcgcgccatgaggggattggtcttgagagatgagacaggaacggagggcgttgattggttgggtcaaacgccttacttagcgacgcatatcagcagacatcgctatcgctcaattgtgagcggactcaaggaaacaca

SEQ ID NO: 48444 - DNA, 406 bp, Glycine max
  Clone ID: LIB3139-048-P1-N1-B3
cggttcgggcaggttgttcaggttccaattgatgggtttatttcctctcaggaatgtgttcccaggacctattgtgttttaaatccacaaaatccttttgtgttaaataggtggatgggaaaactgactttcccccaaggcacttcccgaagtgttaagagaatgcctcttttatagggggaggagctggtgcaaagaatgctattctcatgaatatgccaaatgctgttctttcaatgtggagatattttgttggagatctcgtctttgaagtttctaagatgacttctccctacattaaatgtacagtctctttcttcatagcatttggaaatttggctgatgacaccatcaattttgaggcttttccccacaagctggtgcagtttggagagattcacgaaaa

SEQ ID NO: 48445 - DNA, 382 bp, Glycine max
  Clone ID: LIB3139-048-P1-N1-B4
gcgctaaggagcgcttcatcaagaacatctctggtcatatggagactgtgaccgacaaggagattatcaagcgccagattgctatcttcagggaggtgtctgaagacattgcttcacgcatggagaaggcgactggtgttcaagggtaccctggtatctccggtctccgattcaatggaacacacaacggcatggctaagtctaaggacaacaaggtcgcgaacggtatgactggcatcagcgcaaagtacgctgagaagaacaagaccaatggtgctcccaaagctggtacgcacaaggagctcattgaaagtcagtgagcatggtgcggagttgaaacaatttctgtataattagcgaacaaatcttaatgtatgatttc

SEQ ID NO: 48446 - DNA, 168 bp, Glycine max
  Clone ID: LIB3139-048-P1-N1-B5
gggtgcacctcattgagagaagagatgatacaactgcttaggattgcattgctatgcaccagtagaaacccaccggataggccttatatgagggatgttgtgttgatgctgcaagaggccaagccaaagaggaaattgctcgatcgtgttattgtgggtcgatgtgct

SEQ ID NO: 48447 - DNA, 425 bp, Glycine max
  unsure at all n locations
  Clone ID: LIB3139-048-P1-N1-B6
gttggactgggacagtagctgttgctttttccctggtctccagctacgtccgttcctcgatctcattcaccagacagaacagaatgggttgtcaaggtagcaaggagaaaaaatcaaagacagaatttactacttcctatggatcagcagccactggtagtggtggtggtactagttacaacactgttcagccttcgccgtcgtcaccaccacctactactactgctactactactaatcaggttcaaacatcagcagcacccaaaccacaatcaaaagcttctcctacagtgcagcagaaagcagacacgaggattctggggaaaccctgtgacgacataaaaanatactacagtttagggaaggaattgggaagggggcaattcgggataacgtatctgtgcacggataatgcgagcggtggg

SEQ ID NO: 48448 - DNA, 355 bp, Glycine max
  Clone ID: LIB3139-048-P1-N1-C1
ggttgagccacacaaaatttcattgggcttgtcaatggcaaaaaaacctgtgaaatactctctggttgacgcgtttactgagtcagtgttcaaaggaaaccctgcagcagtgtgtttcttagaagagaagaggacaaaagtgggtgcaaggagtagctgcagagttcaatctatctgtgacatgttacttaactcgcatcaccgagtcccatggaacaacctcttatcctcgttttgatctcagatggttcactcctgttagtgagattaacctttgtggacatgcgaccttagctgctgcgcacacaatattttcatctggtttggtggacaccgatgttgtcgaatttgtggc

SEQ ID NO: 48449 - DNA, 370 bp, Glycine max
  Clone ID: LIB3139-048-P1-N1-C3
ctcaggatttcatggctcagagttcccaaattctccccaagagataaaatgtctctaatcccaaacttcttcggtggccggagaaacaatgtgttcgatcctttctcactggacgtgtgggatcccttcaaggattttcctttccccaaatacgcttttcttcagcttccttccctgaattttctcgggaaaattcagcatttgtgagcacccgtgtggactggaaggagaccccagaggcgcacgtgttcaaggcagatattccaggactgaagaaggaggaagtgaaggtgcagattgaagacgataaggttcttcagataagcggagagaggaacgttgagaaggaagataagaacgacacgtggca

SEQ ID NO: 48450 - DNA, 476 bp, Glycine max
  unsure at all n locations
  Clone ID: LIB3139-048-P1-N1-C4
gaaggatcctttttggcgttattggatcgaaaatggatcagatattcagtaaggtcggatcctattggttcaaccagaaagcctccagccagctcaattccgttggtgatgacatcaattcgatgacaaacagtattgaagggggaaccaaatggttggtcaacaaaataaaaggcaaaatgcaaaaggcattgccagagttactaaaggagtacgatctaccaataggaatctttcctcgtgatgcaacaaactatgagttcaatgaagagacaggaaagctcgttgttttcattcctcaagtatgtgaagtatgctacaaggattcatcagtcttgcgtttcttcaccaccgtgaccggttatatggagaaaggaaagttagcagacatagaaggaatgaagaccaaagtgttgatctgggtgaatgtgacgacaatgntgttagagggatcgaagctctatgtgacagctggc

SEQ ID NO: 48451 - DNA, 394 bp, Glycine max
  Clone ID: LIB3139-048-P1-N1-C8
gaaaggattgtcacatgcacttccctttactaacgtttcaacactagatcagctggaagatgttaaaagggtgttgtcatagtgtatatattgatagaaaaaagaagaagaaggaagtataatagaaaggaaaagggagggaggggggaaataaataaagaaagatgcaagagttgatatacaaagttggtgagggtgactaaatcagattcttgagtgtgtgattgggtcttttggaaggcatgattcgttcattcattcagtgagcattacttgtttatgtaaagctttttagatttggcctgggactcaaaatcacacattattgcaaatatttttgtttttggtgaaattcattattggaagtattattgcaaatatttatcgtattctc

SEQ ID NO: 48452 - DNA, 399 bp, Glycine max
  Clone ID: LIB3139-048-P1-N1-D4
ggatacctcagttggaaatttggtgggaagggctgattcttacttgagtgaagtggcactcaagactatttcaggggctgtgtcaatcttacacatgtcggaacgcttccttccgattgcagagaaggcaaaactggtgagtagatgcatagatgctattgcattcatagcctccaaggagactcaattctgttcacctatgagaggtgacattattggtactgatggcatggcttctcaccaaaggccagtggttcattggtgggctgaggatctcacagttctcagaattgacatctttcaaagagttctgattgcaatgatggccagagggtttaaacagtttgctcttggccccatcattatgctctatgcacagaaatctctgcgaggtttggt

SEQ ID NO: 48453 - DNA, 457 bp, Glycine max
  unsure at all n locations
  Clone ID: LIB3139-048-P1-N1-D6
tttctctgcctctctctctttctcgcccccaccaaaatctcaaaggaggaagccaaagaccctcttttgctcttgtttgttcccacataccaacctgttcctattttggcatgaacatatcttacacagtgtgaacttgttaattagttggttatctatacacgtgaatttaaagaatggcatcaccctcagaactaagtctggattgcaagcctcaaagctattccttgctactcaaatcatttggagatcaaactgatcattcctacaagcttgaagaattcctcaatcgcttggaggaagaacgcctcaagattgatgctttcaagcgcgagcttnctctctgcatgcaacttctcaccaatgccatggaagcttcaaggcagcaacttcaggcctttaaagtaaaccatggagcaaagccagttctgggagaattcatacccatgaagcactt

SEQ ID NO: 48454 - DNA, 287 bp, Glycine max
  Clone ID: LIB3139-048-P1-N1-E12
gcatgaagcatgatcataattctctctcatttgttggttttctctgtgcctaaggtaggcaggaaaatatggtgatcttatatgaaaatgtgaaacttgtaactattcatgtgcatgaagcatgatcatacccaagcttttttttaggatgtgaaatcattgcatattgtacaaaactttgaatagaatgtagttgttcaatgggcaaattaaaagtgtgaaacttacattggaaaggtgtagattcatgttcacagttggtgagcaattgagcatattgcaatctc

SEQ ID NO: 48455 - DNA, 487 bp, Glycine max
  unsure at all n locations
  Clone ID: LIB3139-048-P1-N1-E6
caaacccgtgttctgatgcatggagtttggaatttttgaagcgtaccggatttcactgtgatatcatttgtgtcactggatggactgccaccccaatgcaggatgttcaggttacaattgattggtttatttcctctcaggaatgtgttcccaggacttattgtgttttaaatccacaaaatccttttgtgttaaataggtggatggggaaactgactttcccccagggcacttcccgaaatgttaagagaatgcctctttctatagggggaggagctggtgcaaagaatgctattctcatgaatatgccaaatgctgttctttcaatgtggagatattttgttggagatctcgtctttgaagtttctaagatgacttctccctacattaaatgtacagtctccttcttcatagcatttgggaaattggctgatgacaccatcaattttgaggcttttccccacaagctggtacagnttggagagat

SEQ ID NO: 48456 - DNA, 278 bp, Glycine max
  Clone ID: LIB3139-048-P1-N1-F2
ggctcttttctgcatgtttgttttttcaacgactcctccgcgaaagagtattattcaatattttggttgggttgaatcccggggttgaagcgttgcatacatcacggctattctaagagtgtctcgctccctcattatgtccgatctgacgacgagacggtgtgctaactgcgtaccctcgcgacggggcgtgggcttgctttgaagggtgcccttagactgctttctgtggggggtctttagtcttacttttatactttagctgcatgttaatagaa

SEQ ID NO: 48457 - DNA, 94 bp, Glycine max
  Clone ID: LIB3139-048-P1-N1-G12
tgatgagtgtccttttgcatttgtgaactagtatgtaatattttattcacttaaataaagcgcattactatgtgcaatgagtgtgttttaatat

SEQ ID NO: 48458 - DNA, 401 bp, Glycine max
  Clone ID: LIB3139-048-P1-N1-G3
gttggggttcttttcttaaccaggtcattggctgggaaaatcaccactgaaatcggggttcatgcaaccgctacaaagtggttcaacctcttcgcaacacaactccatcatgttcaaaacctaactgatagagtgcatggaaccaagctgcatcaaggtgaagactggcatcacaacgagacagtcaagcactggacttataccatagatggtaaggttacaacatgtctggagagtattgaatccattgatgaacagagcaaaacaatcacctacaagctcttcagtggtgacattgatcataattataagaactttaagttcatctttcaagccattgatgataatgatcatggcggtactattatcaaatggaccgttgaatacgagaggcttcgtga

SEQ ID NO: 48459 - DNA, 381 bp, Glycine max
  Clone ID: LIB3139-048-P1-N1-G4
gttctttcaatgtggagatatttggtgggagatctcgtctttgaaggggctaagatgacttctccctacattaaatgtacagtctctttcttcatagcatttggaaatttggctgatgacaccatcaattttgaggcttttccccacaagctggtgcaggttggagagattcacgaaaaagttgtattgaaattttcacacgaggaatttcttacagcttggtcaactgatgtgcgtcctgcaacaactctgttggctgatgggtgtccatatttgtatgctatggtgcatgatagttcagtgtctacaataccaggtgattctggcattggtgttaagttgacaaccataaacaatatgtgtgcatatcggcttaatcct

SEQ ID NO: 48460 - DNA, 413 bp, Glycine max
  unsure at all n locations
  Clone ID: LIB3139-048-P1-N1-G5
tgacactctcatttggtaactaacttaactggtttgttcaggtcgcgtgtggatgggggcatgctcttgctcgtactgcggatggcaagttgtttggatggaggctattcagcggacggtaggataggaaaaatggggaataatcacttccagacatctccgttggaatccgagtctccaaatatctcacagctctcgcggaccttgaagctgctgaaaagagagtcttgcaaggaatggagcaggagaataacatgccaatagtatgggagccccgcttggtcgaagaattacacggtgttcatgttctggacattgcgtgtggccttgatcactctctgattctttgccgcgatggtgtgctcttgagctgtgggagcaacgtgtatggccagttggngcgagctaaaaca

SEQ ID NO: 48461 - DNA, 479 bp, Glycine max
  Clone ID: LIB3139-048-P1-N1-H2
cgtagcttcgaattccggttcggggtctaattgtcgaacgccactggacgaccagtatcttctttgcaggatagcctcactaatgttggcgaaaaggttcaatcagagtttgagcttctcagcatggatatcgctgaacttgtgacaatggaggctggcatcaatgtaaagagctacattcagctgaaggtgcagaaattttaccacgtgctgcagttgtaacagtgatgggccatgttgatcatggcaaaacttctcttcttgatgccttgcgtcaaacttcagtggcagccaaggaggctggtggcataactcaacatataggtgcttttgtggtggtcatgccgtcaggagcatcaatcacatttcttgatactcctggtcatgctgcatttagtgcaatgcgggcaagaggtgcagcagttacagatatagaggtgcttgttgttgctgcagatgatggtgtgatgcctcaaaca

SEQ ID NO: 48462 - DNA, 450 bp, Glycine max
  Clone ID: LIB3139-048-P1-N1-H5
gcgaagtgcaatgatgcttgattgtacaattgcttctaggcttgacatggaaagaaggattggatcacagctagatgttgccactcttgatgacattttgataccatctttcaggcatgcaggtgataccttatttgatgttgacacagttcatagaattttggtaaacttctgtcagcaggatgatagtgaagaagaaccagaagatgcttctgtttttgaatccgacagccctatttcaccctctcaaactgcactagttaaagtgtcaaaactaatggacaactaccttgctgaaattgcccctgatgcaaatctaaaactttccaagtttatggtcattgcagaaaccctacccgcacatgcacgcacgattcatgatgggttatatcgagcaattgatatttacttaaaggctcatcaaggattgacaagattggacaagaagaa

SEQ ID NO: 48463 - DNA, 517 bp, Glycine max
  unsure at all n locations
  Clone ID: LIB3139-048-P1-N1-H8
cctnncgtttcataatctcatttgtatagtatnnttgaatcaaattttttcggtcggaggcgaagacttttggtgcgctggtgcgtacgttctccgacgggtagaacgacctagaaagcatgnngtgaagaatgtggtcgcatttcttataaaagggtttctccttggaagggacctgtctatttaacgggcaactaaccaaaagganaacctantcttctttttctaaagaaacccgtattctngcttcaanannatgtaaaagggaaaagggttcaaaaatagtggtaaccagtctggtagcgtcgttttgcgatgctcaacggcaaactggtattgaataattacctaagaacggcagattgcgacttaggcatcgatgtcaacaaatgcannacatgtctgtctctgactagcagaggatctggtgaaggtcattaacgagagagataaatgtcctcagtgcaaaggaaacaaaatttcccaggaaaagaaggtgctggaagtgcatgttgag

SEQ ID NO: 48464 - DNA, 349 bp, Glycine max
  Clone ID: LIB3139-049-P1-N1-B12
taggctttaataaactcaaagccatgaagtttggttgcccacttataactccagtttttgatattctcttgggaatctctcaagattttgaaattgctggtaatactcttatgccagctttttctgttccacaggctactgccagatcttctgaaaatgctgaatcctctgcatgatctggaattcgtgttttctttcgcttgttcgtttgtttaattcaataaaggaaattaggcatgaccctcttgtttagtatgctctgcctatctgaaaattttcacacctcttttaattttcttaatgatgtgtgaagtgtgttgttattttaaaaaaaaaaaaaaaatgtctt

SEQ ID NO: 48465 - DNA, 368 bp, Glycine max
  Clone ID: LIB3139-049-P1-N1-B6
aaaaaaaagtgtcctttatgtgttgttacccatccaaaaaagtggccggtcttgttgtttcttcccaatgctttctcaaactcttgcttgtagtttcagtctttcatgtttcctttgctgctaggaggttgaatgagctggttcaggaccagtctcagttgctacattaccacaatggtcctcttctatacggcaaaatcgccgtcaacctcatctggtttggtaacttcaaaccatcccaaaaggctatcatcaccgatttcgttacctcactgtcatccccagcgtctcagagcagccaaccctctgttgccacgtggtggaaaaccacggagaagtactaccacctgagtcccaggaaggcttct

SEQ ID NO: 48466 - DNA, 282 bp, Glycine max
  Clone ID: LIB3139-049-P1-N1-C12
tagctttttatatcacagaaaccggctcccccgcggtccgtaccctttaaaactattcctcctccacctacccagacatgtatcccatacccaattccaatgtcaacaatctttttttcaaatcatcaaccacttcgacttaaataactccacattcagccacactctcaattccatcatgtatcctaaccatttccaacaccaatccaaaccaattcaattcgacttctactctaccaatagagctttccttgaccttcttcatctttaagacagtcacct

SEQ ID NO: 48467 - DNA, 326 bp, Glycine max
  Clone ID: LIB3139-049-P1-N1-C3
gttctagttcgttagcggccgcccttttttttttttggggggaaaagttcatatatgctttaaatgtttttgcttcttagcagaagaccctctcacttacataagctaacaaaaatttgaaaacaggaagaaccaataaaactataaacaattaaacataagataaatttgaaaaagagaaaaaaaaatgaaaaaattctatatagtagtaggaaagtaatttctgtactgccaatttctatattgcttcatcactcgttattttatgtctttcccctttgccttgaactaaaatctataaattaatgagttttttctcttaaatt

SEQ ID NO: 48468 - DNA, 362 bp, Glycine max
  Clone ID: LIB3139-049-P1-N1-C6
cagctacctccctccaacagggcaaggttcttctctgcctcgacgacggcggtgtccatgccgagcaggagcctcagcttctcggtactaccgagaacgagctgggcatccgcaaatggatcgaggagcagggtcacactctcgtcaccacctcggacaaggagggccccaactccaagtttgagaaggagctcgaggatgctgaggtcatcattaccactcccttccaccccggctacctcaccaaggagcgcctggccaaggcgaagaacttgaagctttgcgtcactgccggtattggttccgatcacgttgatctcgacgctgccaacaagaccaacggtggtttgaccgtcgctgag

SEQ ID NO: 48469 - DNA, 209 bp, Glycine max
  Clone ID: LIB3139-049-P1-N1-C7
aggttttggctttttttttatgtaacatcctcaacaaatacgagacgtggcattctcattattgcgccccccacacaatgggggaaccattttgcaacacaactctatcatattaaaaacctaactcctacaaggcctgaaaccaaactatatcaaatttaaaactcgtgttacaacaagacaatctatcccccgacttataccataca

SEQ ID NO: 48470 - DNA, 106 bp, Glycine max
  unsure at all n locations
  Clone ID: LIB3139-049-P1-N1-C9
ggtgaatagactggtggtggaggtgaaggcggaggaggtgatggtggtggtggtgaaggtnnnannttaacactattgggggcccaaacttgccgcaaaattgggt

SEQ ID NO: 48471 - DNA, 355 bp, Glycine max
  Clone ID: LIB3139-049-P1-N1-D1
gggagagagaacccataacagctagttaatggccctcgctgtcacttcttcaatttccgcaccaacttcaccttccatcatcggaccaaacttcgcaaatggtcaataggatttcgggaggcccattgaggggccgtaattcaatttatctaaaaacgagcttggtaagcccgttaacgcccaacctccacgcaaggattccattgttcctctcgcagcaacaaccatcgttgcttctgcttctgagacgaaagaggaagattttgaacagatagccagtgatctcgacaatgcttcacctcttgaaatcatggatagagccctcgacaaattcggcaacgacatagctattgcc

SEQ ID NO: 48472 - DNA, 366 bp, Glycine max
  Clone ID: LIB3139-049-P1-N1-D2
gcacaaagtgtgttagctggtactggaacagctgcagtggcagtgaaatatgggggacctatggatgtggccaggcaagttctcaggtcagaagggggcgtaaaaggtcttttcaagggcttggttcccaccatggcacgtgaagtacctggaaatgctgcaatgtttggtgtatatgaagcattaaagagattacttgccggtggcactgatacctcaggactgggtagaggttctctgatgctttctggaggcttggctggagctgctttctggctcgcagtttacccaactgatgtcgttaagagtgtgattcaagtagatgattacaaaaacccgaagttctctggttcaattgatgctttc

SEQ ID NO: 48473 - DNA, 361 bp, Glycine max
  Clone ID: LIB3139-049-P1-N1-D5
gggaaatttttataaaccgcgatcacaggttgccgcaccttaaaaccggaaacaaaagcaatcgttacttgatttcaagaatttctcaatttcttcctacttctttgtgtacgatttcttaagggaaagaaaatcactctctgtgctggtcacagacttcgtgaatcattttcttttccactcctagtttatttgctgaacactctcctatttgatataggacttcgtgtcagatttaaactttttctgtttctttctcagttctctgtttaatttcaagttcaagctggtgaaattttggattagtgctcccactctcctatctggtataggacttcgtgggtagacttttctacttctc

SEQ ID NO: 48474 - DNA, 366 bp, Glycine max
  Clone ID: LIB3139-049-P1-N1-D6
cgcttctcttaaaagagcctttgctttttctttaggcctttccgaattaagtacttgtttcattttctctcgaagcaagaaaaatgttcatcgagagtttcaaggttgagagtcctaacgtgaagtacacagagactgagattcagtccgtgtacaactatgaaaccactgaacttgttcacgagaacaagaatggcacttatcagtgggttgtcaagcccaaaactgtcaaatatgaatttaaaaccaacacccatgtccctaaactaggggtaatgcttgtggggtggggtggaaacaatggctcaaccctcaccggtggtgttattgctaaccgagagggtatttcatgggcaacaaaggaca

SEQ ID NO: 48475 - DNA, 287 bp, Glycine max
  Clone ID: LIB3139-049-P1-N1-E1
atcatttgtgtaattggggggactgccaccccaatgcaggaggttcaggttccaatggatgggttaatttcctctcaggaatgtgttccaagaacctattgtgtttaaaatcaacaaaatctttttgtgttaaatggggggatggaaaaactgactttcccccagggcacttcccgaagtgtaaagagaatgcttttttctataggggggagggagctggtgcaaagaaatgctatttctcatgaaatatggccaaatgcttgttcttttcaaatgtgggaagatat

SEQ ID NO: 48476 - DNA, 362 bp, Glycine max
  Clone ID: LIB3139-049-P1-N1-E5
gaaatacttaaatggggtaatgtgtttgaaggactagaaaaggtgatagaaggtgttgaacaaagttgtgtgagtttccctatggaatcacacacaggtagtcaagaaacaacactagcatttgtaccagaactagaccataccatttcagagaaaaaaaacttatctgatgacaatgatgtagaaaccattccacaagagtccatactcaaaagaatcaactcacataaagaaatgaaatcatatcaactggggaagcagttgtcttgcaaatggacaaccggagcgggaccgcgcattggctgtgtgagggactacccttgtgagcttcagttccgagcattggagcaagttaatctgtc

SEQ ID NO: 48477 - DNA, 363 bp, Glycine max
  Clone ID: LIB3139-049-P1-N1-F12
ttagcattgttttatatgttaactctgatacaccgcgtgaagcttgcttattacttcaacattcctggaatctacagtgttgactcaatccaaacccttccttctgaaagtactcctgcatccatagccacctccgtagtgccaacttctctccatgatttcattgaggttgtttttcagaacaacgaaaatgccatgcaatcttggcatcttgacggttatgacttttgggtcgtgggttatggtttttggtcagtggacaccagccaaaagaaaaacctataatctatttgatgctcttaccaggcacactacacaggtatacccatatgcttggactacaatattggtgttcttggacaa

SEQ ID NO: 48478 - DNA, 364 bp, Glycine max
  Clone ID: LIB3139-049-P1-N1-F2
cccaagctttggtgactggaaccatctgatctcagctccaaggtctgtgtcacttgttgtttgaggttccctggtcaacttaactctgatctgcgaaagcttgcagtgaaccttattcccttccctcgcctccacttcttcatggttggatttgctcctttgacatctcgtggctctcagcaatacagggccttgagtgttccagagctgacacagcaaatgtgggattcaaagaacatgatgtgtgctgctgaccctcgacatggccgctacctcactgcctcagccatgtttagaggcaagatgagcaccaaggaagtcgacgaacagatgatcaatgtgcagaacaagaactcctcctact

SEQ ID NO: 48479 - DNA, 365 bp, Glycine max
  Clone ID: LIB3139-049-P1-N1-G1
gaagaaagagactgtccatttggaaatttggctgatgacaccatcaattttgaggcttttccccacaagctggtgcagtttggagagattcaggaaaaagttgtgttgaaattttcacaagaggaatttcttacagcttggtcaactcaggtgcgtcccgcaacgactctgttggctgatgggtgcccatatttgtatgctatggtgcatgatagttcagtgtctacaataccaggtgattttgtcattggtgttaagttgacaaccataaacaatatgtgtgcatatgggctcaatcctggtatttcaggttctcgtcttttgggcaccattcctcagtccatttcacagcaaactgtttggaa

SEQ ID NO: 48480 - DNA, 317 bp, Glycine max
  Clone ID: LIB3139-049-P1-N1-G2
gtaatagcacggcaatagaatcaccaaatttcaaaactctggctggcgtaaaacatgaaagagtaaggctataaacttaccaaaaaaagaaaacaccatgtatatgatcgatagcaaaactacttttattagtaaccatcacaatgctctctctctctctctctctctctctctatatatatatatatatatatatatatataatattccaaatttctttctaatcaatataatgttattttatttattaatgatttacaactattctattacaatatttaatattgattaaagatatttaaatatttattaatgat

SEQ ID NO: 48481 - DNA, 387 bp, Glycine max
  unsure at all n locations
  Clone ID: LIB3139-049-P1-N1-G6
cacacttcactccatttcatcaccgtggtggttggttacctgctggcgtctgtgttctcttttttcttttctgcttnntagttctctcttccccccctttctttttcttttttcttttcttcttctgagccttgtttaagccttttcttccattaacatattatcacaatgtgtggtattcttgctgttcttggttgttctgatgactctcgagccaaaagggtccgcgtgcttgagctctctcgcagattgaagcaccgtggccctgactggagtgggctccatcaacatggtgactgctttttggcacatcaacggttagccatagttgatcctgcttctggggatcaacctctctttaacgaggacaaatccgtcattgttacg

SEQ ID NO: 48482 - DNA, 367 bp, Glycine max
  Clone ID: LIB3139-049-P1-N1-H3
ctcaccattttaaactaaagggtgatccttaatcttcggctgccttatctgaaagtgaagagtcaggggtggctgatgttaaaccaaaagaaaagggtgggaaagcagaagagatagaccagaaatctggacaaaatgttcaaaaggtgtctaatatggtattgccaacaagaaagaataagcttgtttctggggaagaacatggagatggtgttcggaggcaagggaggacaggacgcaatcttgctgccacaaggtcaatgattccaatgacatctgagaagcttgggaatataggaactgcaaaacaacttagaagtgcaagactaggatctgataagaatgaaagcaaggcaggtcgtccacc

SEQ ID NO: 48483 - DNA, 343 bp, Glycine max
  Clone ID: LIB3139-050-P1-N1-B10
tagcaagcaaagcttttgtaattttctatcgaccttctcggtctgttgattttattggacaaaactggagattggatcacacttatacaaaattctccaattagtaacttgttgagagttgctgcttggaagaaaggctgtttaatggtcaagattgtgatgtctgggaatgcagcagtcaaaaggagtgattgggcctcattggtacaagtgtttttaacaaacagcaacagtacagagcattttgatgcatgtaagtggacaaaatcagaaccacattcctgggaattgatcttcccaatagaggtatgtggtcctaataatggttttgaaatgtggaagt

SEQ ID NO: 48484 - DNA, 524 bp, Glycine max
  Clone ID: LIB3139-050-P1-N1-B12
cacaaaatgagcgcctttttttagttccatccattttcacactggcaaaaccccaggggtttggaaaggtgagaaaacaaccacatgggaagctacttgtaaagtgttccagccagagtgggaacccatcttcttcgcaaaatgcggctcgtgttggtgttgttggagctagtggctacactggttctgaggttctgcgactcttggcaaatcatccacagtttgggattgcactgatgactgcggataggaaagctgggcagccaatctcttctgtgttcccacatttgagcacttgggacttgccagatttgatttcaataaaggatgcaaacttttctgatgtggatgctgtattctgttgtttgcctcatggaactactcacgaaattattaaaggcctaccaaagcacctgaagattgttgatctttctgcagattttcgtctaaaagatctttctgagtatgaagaatggtatggtcagccgcatagagcaccagatttacagaaagaagctatatac

SEQ ID NO: 48485 - DNA, 355 bp, Glycine max
  unsure at all n locations
  Clone ID: LIB3139-050-P1-N1-B8
ccaacattaaccaatnnttttaaaaaaaaaaaacaaaaaaaactcgtcgttttttaaaatccctgtgctctgctacaccacttgccaattcaaggctctcgacatggctactcatacgccaaaaaatatccacattactggagctgctgcattcatcatatttcatgttgcgaatcggcttaatccggaattatccccattacaaaattgtggatcttgacaagcttgattactgctcaaatctgaagaatctcattccttcaaaatcatcttctaactacaagttcgccaacgggcatattcgaagcgctggtctagtcaactaccttgtcatcactgagtcccattacacaat

SEQ ID NO: 48486 - DNA, 462 bp, Glycine max
  unsure at all n locations
  Clone ID: LIB3139-050-P1-N1-C9
cctatgaccggaaaactatgagtgatgaaagacgatggcacggagttaacttcgttggtgttttaccgattttgcggcgcttccnacncatggcggacagttcattcagtacaacatatttggaaacctcttcgaggttacgacgaagtaccgtcctccgatcatgcctatcggacgcggcgcgtacggaatcgtttgctcactgttgaataccgagacgaacgagctggtggctgtgaagaagatagcgaacgctttcgacaatcacatggacgctaagcgtacgcttcgtgagattaagcttcttatgcatttggatcatgaaaatgtaatctggttgagagatgttattcctccacccttgcgtagagagtttaatgatgtctacatagccactgaactcatggatactgatcttcaccatatcattcgcttcaatcaaatactgttagaggagcactg

SEQ ID NO: 48487 - DNA, 393 bp, Glycine max
  unsure at all n locations
  Clone ID: LIB3139-050-P1-N1-D4
gcttctcgctatctgcgcatattcgcctttttcccgccacacgcgctgacactggtgggccggatagtctcaccagaatccggtgccggaaacctctttccgtccgatgctccggcaattccacttccggctctgtgggttaggagttcgatccgaaggtgtgttcggaagaacgctactcggagtaagaattataaccgcaaaggatttgggtacaaggaagagaccctccaactcatgaatcgcgagtacaccagtgatatcattaagactttgaaggaaaatgggtatgagtatacatggngtactgtcacggtgaagcttgctgaagcctatggattcttgtggggagttgagagggcttgtcaaattgcttatgaggccagaaaacag

SEQ ID NO: 48488 - DNA, 397 bp, Glycine max
  unsure at all n locations
  Clone ID: LIB3139-050-P1-N1-E1
cgcacaccggcacaggtttttgcgacatacgaataccgggtggaggggcattctaccatcttttctcactgctgaaataaaatacaagcggaatctgagtaatattcatatttccggcttattttacgacggcagatacanattctggactaaacacgagaaaaatcttgctttgacagaagaggaaaagatggaagtgattagaaatagaggtattcctgctgatgttcttgcaaagcgagctcatgaatttgaaaaacatgttgctcatgaaagcctcaaggatcaaattcctgctgttgacaagttgtattctactaaggttaataagtttgcaaaaattatgaaccttagacaagtgttgttggtgatctaaaacttcttactgatggaaagt

SEQ ID NO: 48489 - DNA, 420 bp, Glycine max
  unsure at all n locations
  Clone ID: LIB3139-050-P1-N1-E12
cgggatggtataccatcttctaagggcacggtggggggccttgggggccttaaatctaaaatggcacttcccaagaccacagttgggggaaccattctgcgtagggatctattggcaaatttttggcagagggcaatttagagcaagtgttgatttgcagcgcactcatcgtattaaaggaatgattaaaatggtggccacagttggtattcctgagaatacaggtatagcattggcctgtgctatgaatagttcttttagggggcgcgccagttctgatatttacaccatctgctctcaagactgtgaantatggaatcctgcttgcacaaaagcaatgactatgtcatttaatccaaacccgtgttctgatgcatggaagttggaatttctgaagcgtaccggatttcattgtgatat

SEQ ID NO: 48490 - DNA, 171 bp, Glycine max
  Clone ID: LIB3139-050-P1-N1-F5
tcagctccaacctattaaaaccgtgattttaactatatattatcactcagtcgcctcttttattacttcaacctacacacaaacacacttcgatatgttgaaccaactaaaacaccacagcatccataatctttcgcctaaacactccatattcttttcacccaaacatac

SEQ ID NO: 48491 - DNA, 190 bp, Glycine max
  Clone ID: LIB3139-050-P1-N1-G1
ggccgcccttttttttttttttttttttgcccataagagaacatttttatgcttagtataataacaagcaagacaacaataaaatttgttactctagaacttgacgaagaaagtcatagacatttcatttgggaacaaaatgcagagaacaataactgactgaccctgtccttgtcctgcatcctgtgct

SEQ ID NO: 48492 - DNA, 343 bp, Glycine max
  unsure at all n locations
  Clone ID: LIB3139-050-P1-N1-G5
tcagggaaaaaataaaaaacatgtttattttggaaccgcagatagctactactgttcgtggacgttccactctccatgccacctctctctcacactcacaccaaacatgccacaaatgcatcatcatcatcctcgccgccacaatcttcatcattccaattccaaagccctctgcaagtgtcgattcgtcccgttttttcttcgagcgtggcctacgtcttcctcatcctcttcaccacctttttcttcatcggcttcgtcttcctctacttccgccagttcgcctccgacgcggncactttccgccgccgtcatccgccacgccgggaggaggaggaggacg

SEQ ID NO: 48493 - DNA, 471 bp, Glycine max
  unsure at all n locations
  Clone ID: LIB3139-050-P1-N1-G6
cggttcgtggagggaatcttatactgctacgactacttggggaaaatcaaagggtgcgatgtggggcgcggggtgtgggaggagctgaaggggttggagaatgctttgccgaggtttttgtgtggggccaccatggctgatttgggtgggaaactgtgcgtggtttgggagtgccaatgcaatgggaaggagatggagatttggtgcgcggagattggggtgaagaagaattcggatggggaattgtggggtcaacttggttggtttgggaaggttctttctgttcccaaaggctcttctattgtcaactgttcttctgtttccttgtgattgtgaccatgcatgcaagcattcttttgatttgcatttgaattgccgcacttnctgctcttgatgttgatgtaaactatgataataaataaacagactgtcaacagctaccctgagtgataatgttgttgtgatgaagtg

SEQ ID NO: 48494 - DNA, 489 bp, Glycine max
  Clone ID: LIB3139-050-P1-N1-H3
ggcctaagtagtgcgattttcgtttctcttctctgcaactatgcctaacgggaaggtcttcttcgacatgaccatcggcggtcaacctgccggccgcatcgtgatggagctctacgccgacgtgactccgagcaccgccgagaacttccgcgcgctctgcaccggcgagaagggcgccgggcggagcggcaagcccctccactacaaaggctcgtccttccaccgcgtgatcccgaacttcatgtgccagggcggcgacttcaccgccggaaacggcaccggaggcgagtcgatctacggcgccaagttcgccgacgagaacttcgtgaagaagcacactggtcccggcatcctctccatggcgaacgccggtcccggaaccaacggatctcagttcttcatctgcacgacgaagacggagtggctcgacggaaagcacgtcgtgttcggacaggtcgtcgaggggattgacgtcgtcaaggagataga

SEQ ID NO: 48495 - DNA, 404 bp, Glycine max
  Clone ID: LIB3139-050-P1-N1-H5
gaataatgctcgtgggttcacattcttcagaagttttttctgaaaaggaagatcaagaaaggccgggaatgattgatgccagattgagacaaagaatagatcctcaatacaatgaggttcaggctcagatggaaacaaatttgtttaaattgtctcttgatgatgttgaaactcctaaaggttccatgttggatctgaaaatgtctcaatataaaattgcacttcccaagaacacagttggaggaaccattctgcgtagtgatctattggtcaaatttttgacagagggcaattttagagcaagtgttgatttgcagcgcactcatcgtattagaggaatgattaaaatggtggccacagttggtattcctgagaatacaggtatatcattggcctgtgctatg

SEQ ID NO: 48496 - DNA, 400 bp, Glycine max
  Clone ID: LIB3139-051-P1-N1-A3
ttaatccctcgcctatatcttcagaaaattagatctgcttcagatctagggtttcccttttccaaatcacgagtccgttgagtttgattttgtggatgaaagcatagggatagggcttttgcaaacctctccaatgtttctcgaaattatatgaccatgcgtcgaattcgtatgctgcactccttctccgtcgtgttcctctactggttctacgttttctcatgaactccctctcaaatccgtaattaattagatcgatctccttccgtagttaatccttgtctctttttcaataattaattagatctgcgtctcctatttcctttttttgttttgttctgttatcaaaatcaaataaaaaatctccttctcggaaatggcgtcgtcaatccaacaacaa

SEQ ID NO: 48497 - DNA, 414 bp, Glycine max
  Clone ID: LIB3139-051-P1-N1-A5
attttccccttcaccctttccttttttgcgttcattctgttttcatagtgacgaacttctgaagaaatggcaaatcatcctttgacacactctcactctttccgcgagaggtttgatgaaactctcactggtcacaggaacgaaattttggcccttctgtcaaggcttgaagccaagggcaagggaatcctgcaacatcaccaagtggttgcagagtttgaagaaatccctgaggagagcagaaagaaactccaagatggtgtctttggagaagttttgagatccacacaggaagccatagtgctgccaccatttgtagctcttgctgttcgaccaaggcctggtgtatgggaatatctgcgtgtgaatgtgcacatgcttgttagtgatgagcttcgtcctgctgagtatctg

SEQ ID NO: 48498 - DNA, 396 bp, Glycine max
  Clone ID: LIB3139-051-P1-N1-B12
catctatctcgtttcttccaaattcgagtcttccttcggatacaagtctgttttaaaggtttagcttggcccctgcgatgaagatcgaggaattggacgatggagagtgtagtttggaccatgaagagaagtttgagaggcagattgtgagcgttgatgccaagagagcgttggttggagcaagtgctcggatcctgttctatcccacactcttgtataatgtgcttcgtaacaagattgaagctgagttcaggtggtgggatcaaattgacgagtttttgttactgggcgctgttccgttccccaaagacctttcctacttgaaagaagcttggtgtgggtggtgtgattactctcaacgagccctatgaaaccttggtgccatcgtcgtttgta

SEQ ID NO: 48499 - DNA, 104 bp, Glycine max
  unsure at all n locations
  Clone ID: LIB3139-051-P1-N1-B4
agagcttgacgnccatgcacgcgtccttagcctgggattccgcttcgggaaaaaaaaaaaaaaatttttttaaaaaaaaaaaaaaaaaaaaaaggaaggatttg

SEQ ID NO: 48500 - DNA, 391 bp, Glycine max
  unsure at all n locations
  Clone ID: LIB3139-051-P1-N1-B5
acaaaagaagtgcacttcctatatggcattaatctttctttcaagctgcgcatttcttcttccaagtcttgctttctttctcacattatttaaccttgcaagttccgaatcattcatcggcgtgaactacggacaagtcgctgacaacctgccgccgccgtcagcgacagcgaagctgctccagtcgacggccatcggaaaggtgcgtttgtacggaaccgacccggccataataaaagctctggcgaacacggagatcggaatcgcgatcggagcggcgaacggngacattccggggctagcctcgtaccctaacttcgcgaaaacgtgggtgaacaccaacgtcgtaccgtactaccctgccagcaacatcatgctcataaccgtcggc

SEQ ID NO: 48501 - DNA, 406 bp, Glycine max
  Clone ID: LIB3139-051-P1-N1-C2
aagctcatgcagggatggaaccatttgccatagcaaccaataggcatctgagtgtgctccaccctatttataaacttctttatcctcactaccgcgacaccataaatatcaatggacttgctaggcagtccctgattaatgcagatggcattatagagaaatcatttttgcccggaaagtactccattgagatgtcttcatccgtctacaagaattgggttttcactgaccaagcattaccagctgatctcgtcaagagaggattggcaattgaagatccctctgcaccccatggccttcgccttgtgatagaggactacccttatgctgttgatggacttgaaatatgggatgctattaagacatgggttcatgaatatgtctccttgtattacccaacagatgc

SEQ ID NO: 48502 - DNA, 157 bp, Glycine max
  Clone ID: LIB3139-051-P1-N1-C4
gttcgagagcaaattttgatgctactttttctggtggagtggcgagaaatggggtccagtgttgtgccctaccaaatggagacatagtggttccaggttctatacaagggtctctaagaaaatcaacaccaacattcaccctagttctagatcgcga

SEQ ID NO: 48503 - DNA, 421 bp, Glycine max
  unsure at all n locations
  Clone ID: LIB3139-051-P1-N1-C6
tagagaaggtgggaaaggcctgctttttatcctttcttgcaaaggaaggaacgcatttaggtaagggagattttatttccttccaaccttcaaccaaaacctgccttagggggaaccaccctttagaaaaaacacaatttttttttcaactctaattaaataataactccttaaaattcatctctattttagctcaacctatatctcagtctttccccggtccatcttgttcggtttctgttccatttcttttttattagcaccttaagaggacactagagaagaagatatccagaaatggaatgagggtgaaatttaagaggataacaaggaaatgactcagtgcagttaccctgaatacaaccatagcatcattgtggagaggcacaaagatagcttgatcaagacatgtnctacatgt

SEQ ID NO: 48504 - DNA, 91 bp, Glycine max
  Clone ID: LIB3139-051-P1-N1-C7
gtttttcgtcgatggatgtttcttttattgtaattcagtgagtgtagccaccggaattaatagaggttatatactattaaaatttgcgatc

SEQ ID NO: 48505 - DNA, 94 bp, Glycine max
  Clone ID: LIB3139-051-P1-N1-C8
aaaaaaaaaaattaatttaaaaaaaaaaaaaaaaaaaaaaaaaagagaaaaaaaaaaaaaaaaaaaaaaaaaaaaaaaaaaaaaaaaaaaaaaa

SEQ ID NO: 48506 - DNA, 405 bp, Glycine max
  Clone ID: LIB3139-051-P1-N1-D1
gacaaccataaacattttgtgtgcatatgggctcaatcctggtatttgaggttctcgtcttttgggcaccattcctcagtccatttcacagcaaactgtttggaatcaaatggcaacagtgagaacaccattgaattttgattctagcaagcagagcttttgtcaattttctattgaccttctcggtggaggaattttagtggacaaaactggagattggatcacacttatacaaaattctccaattagtaacttgttgagagttgctgcttggaagaaaggttgtttaatggtcaagattgtgatgtctgggaatgcagcagtcaaaaggagtgattgggcctcattggtacaagtgtttttaacaaacagcaacagtacagagcattttgatgcatgtaagtg

SEQ ID NO: 48507 - DNA, 246 bp, Glycine max
  Clone ID: LIB3139-051-P1-N1-D12
agatcagcgagcggttctttctttttttttttttttcatgtgaagggggctctaggaacgcaaaataaacaatcaaacattattacagattgtagcttgggtgccaaactatccaaacaaatacattattcctattcatattaaccttgccaagcaattcaaattattctgcggaccaaccacagtttgcattatttcaaaagcattaatggaagaacaatatgagaaggagaaggaggctgaggg

SEQ ID NO: 48508 - DNA, 407 bp, Glycine max
  Clone ID: LIB3139-051-P1-N1-E1
ggtcccagttttttttttttttttttcttctcgttagcttttgggctgtgtcgcttcccaaactaccctacgtttgggaactcgtccgactggctcacttaccgccacttgcaccccgggtcgtgcctgcttttcacagcaaacgcaccattcctcccatcgttccacaagaagctccgccagcccatcaacgattcgactcactctgcacgactccttgccgacaagcagcgcttcgttcgtgctcaccacgactcaagttcggttgtcgaaaagcctgttttttccccgcaacctcggaccatactccataccaccgcaaccagctccgaacgacgacgaaagaagaagcaagctcgaactggggcatcacgaagccgaccaccagctccgttcgagctgctttt

SEQ ID NO: 48509 - DNA, 422 bp, Glycine max
  Clone ID: LIB3139-051-P1-N1-F4
tcgcttcaagctaacccgtgcaaagcttttagagacgcacccttggggcgaagaccggcgaggtgttttaggcaatttaagaacaaaccataccccaagtaacggttttgccgtggtgttcctgatcccaagataaggatttacgatgttggtatgaagaagaagggtgttgatgagtttcctttctgtgtccatctggttagttgggagaaggaaaacgtttctagtgaggccctggaagctgctcgtattgcttgcaacaagtacatggccaaatttgctggaaaggatgctttccacttgagagtcagggtgcacccattccatgttcttaggatcaacaagatgctttcgtgtgctggagctgataggctccaaactggaatgagaggtgcttttggaaagccacagggtacttgtgc

SEQ ID NO: 48510 - DNA, 163 bp, Glycine max
  unsure at all n locations
  Clone ID: LIB3139-051-P1-N1-F6
ggtcggtgaacactgtctcatgtcagcttgtaaagacagggtagcggatgcagtatacagattaaaaagccgtctactcaaggagagtgaggtgaggcagttgacagataaagagcangctgtgctgcagttagaaaaacaatacccagctgatgttggtgtc

SEQ ID NO: 48511 - DNA, 120 bp, Glycine max
  Clone ID: LIB3139-051-P1-N1-G7
cggattttataattattaaattgtaccttaacttctattaatacataagttagcgtacaatttaataatagaagttaaggtaggtagtggtcgactcaaattatttttactaattttttt

SEQ ID NO: 48512 - DNA, 405 bp, Glycine max
  Clone ID: LIB3139-051-P1-N1-H10
gtttccactttgcttagtttcaatttactctcattatcacataggaattcctccgtgtttctgttttgataactcgcaaatattctacttaatagcccgacatctcgttccctgaatactgattttgagctttcccctgatttttttagggaaacaaattattgccccttccttttttccaatcatctccagtgaaaaaaaaaaaaaaaactatatctgaagtttattggggatcgggtattgggaaatgcctcgagacttgtcacgatcccgatcgcctccctataggcggaggcattcaccatctcctgtgggacacaggtttagcaggaggagcagaagagacagaagcagatctccttattcgtcctactcttacagcaggcgaaaaagtcgttctatttc

SEQ ID NO: 48513 - DNA, 360 bp, Glycine max
  Clone ID: LIB3139-052-P1-N1-A2
caggactgggcctgccttgctgtgatctacaccagaatattagagaatccaaatcaacaattagatcggtatttcagcagcttcaaagagttagctggaaatcgtcctttatcagagttacgaactgctgatgaagctgctgcagtggcaggagttgcttcagaggctactggccaagctactgagggagaagttcatcctgatggtgcagagcgttctcctaaatctgtaagtgctggcttaacagaagcagaagagttggagaagtatatcgccattagagaagagatgtataagaaagctaaagagttcgattctaagatcattggttttgaaacagctatcaagaggccctacttt

SEQ ID NO: 48514 - DNA, 344 bp, Glycine max
  Clone ID: LIB3139-052-P1-N1-B9
ggttggagataaaagaccatgtcggggaaggagtgcgagcaccacaaggggaagaagaggaagatcttccggcaagtgttctggtgcttagtggagttccttttcatcgtgctggtcacaattcttttgatatgggcaatccttagacccaccaaacccaccttcacgctccaagacgtcaccgtctacgccttcaacgccaccgtggcgaacttactcacttcgaattttcaggtcacgctcatctagcgtaacccgaacgaccgcatcggtgtttactatgatcgcctcgaaaccttcgtgacctaccggagccagcaggtcacgtaccgaaccgccatccc

SEQ ID NO: 48515 - DNA, 88 bp, Glycine max
  Clone ID: LIB3139-052-P1-N1-C4
aaaaaaaattataaaaaaaaaaaaaaaaaaaaaaaaagaaagaaaaaaaaaaaaaaaaaaaaaaaaaaaaaaaaaaaaaaaaaaaaaa

SEQ ID NO: 48516 - DNA, 255 bp, Glycine max
  Clone ID: LIB3139-052-P1-N1-C5
ggaaagaacataatgtagcccctgcatgggagaaatgcggcgggcttgtaaagaaacttctcgacaaacaccctcaaatttcggaccatgaggggggccgccaactaaaacattgtgtccaccacagtggtagtgccggaccgctccagaagacaatacacgatctccgcttcggaagctgaggctctatcaagagcattgagatactggaactgatccatgccaaagccgtgatgcctaaagcagacccttcca

SEQ ID NO: 48517 - DNA, 374 bp, Glycine max
  Clone ID: LIB3139-052-P1-N1-D5
ggggatcggtgtcaaacaagtttaatcatgatcatttacatgtttcggatgtcctggttgggctagagtcaccagtgctagaagtaaagtcgcttctggatgttggacgtgatgatgtcgtccacatggtagggatccatggactcgccggagtgggtaaaacaacacttgctatcgcggtctataattctattgctggccattttgaagcttcttgctttcttgaaaatgtgaaaagaacttccaacacgataaatgggttagaaaaactccaaagcttccttctttctaaaaccgctggagaaattaagttaacaaattggagagaaggaattcccattataaagcgtaagctcaagcaaaaaaaggttctt

SEQ ID NO: 48518 - DNA, 92 bp, Glycine max
  Clone ID: LIB3139-052-P1-N1-E12
aaaaaaaataaaaaaaaaaaaaaaaaaaaaaaaaaaagaaaaaaaaaaaaaaaaaaaaaaaaaaaaaaaaaaaaaaaaaaaaaaaaaaaaaa

SEQ ID NO: 48519 - DNA, 362 bp, Glycine max
  Clone ID: LIB3139-052-P1-N1-E2
cttcttcctctatcttttgggctattaccaaacactctcatatttggttgttcaagttctaactaccatgtcaacccacattgaaagcctgtgggtgttggccttagcctcaaaatgcattcaagagaacattgcatggtcactcttgatcatcatggtcactctctggctcaccatgaccttcttctactggtctcaccctggtggtcctgcttggggcaaatactactactttaattactggaaaaaaaccacctcaaccaacacaaacatcaaccttaaaatgattatccctggtcctagaggctaccctttcattgggagtatgagtctcatgacatccctcgcacaccaccgtattg

SEQ ID NO: 48520 - DNA, 285 bp, Glycine max
  Clone ID: LIB3139-052-P1-N1-F1
attaaaattatttaagatgaaaatcttatttaaagaaaggtggtttgtttggttggggtaagagataccctcaatcaacctccaacatcattattaacaatcaattccaaccaaccctattttttttttttaaatttacaaccctcattgaacccttttccaatccttttttttgtggcacccttaataacctttgcttccgtggcccgcaacaaattttaccggttccctcccaaaatttaaaggtttttaaaaaaccctgttaatgccaatcaaaacaataag

SEQ ID NO: 48521 - DNA, 391 bp, Glycine max
  Clone ID: LIB3139-052-P1-N1-F3
cttccttaggctgggaatcgggttgggggttggggatgggggatattggaagtgctgacctggtcaactaccttctcatcaccgggtccattgacacaataatgcactttgctgctcaaacccatgttgacaactcgtttggtaacagctttgagttcaccaagaacaacatatatggtactcatgtcctattagaagcctgcaaggtaactggccagatcaagaggttcatccatgtgagcactggtgaggtctatggagagacagatgaggatgctgttgttggaaaccacgaggcttctcagttactcccaacaaatccatactctgcaacaaaagctggggcagaaatgcttgtgatggcatatggaaggtcatatgggttacctgt

SEQ ID NO: 48522 - DNA, 369 bp, Glycine max
  Clone ID: LIB3139-052-P1-N1-F4
aattgctaagaagcttcagatcactaatacgacgacgcattacggaactaagggttgtgttgtgtcgtttcgttttcactctcacgttctcaaattttgtttgtgtatcgcaggaattaggatccgttatggggttctctgtaaccacgctaattttcgcagtgattggaattgtggcgtccctttgtaccagaatttgtttcaacagaggaccttccgctaatctatttcacctaactttggttcttactgcaacaacatgctgctggatgatgtgggcgattgtatatctagcacagatgaaaccgctcatagtacctatattgagtgagggtgaataactttctgtataaacagatgcaactctta

SEQ ID NO: 48523 - DNA, 366 bp, Glycine max
  Clone ID: LIB3139-052-P1-N1-G2
ggccgagaacaaaaaaaaaaaaaaaaaaaatccgcgattcgctcttctcttggaaaagtgaaaaccagaagtacgaacgaaagagaagagcgatttagaagtgagagaagatggggttgtcgttcacgaagctgttcagcaggttgtttgcgaagaaggaaatgaggattctgatggtaggtctcgatgctgctggtaagacaaccatcttgtacaagctcaagcttggagaaatcgtcaccactatccccaccatcggatttaatgttgagactgtggagtacaagaacatcagcttcactgtgtgggatgttggtggtcaggacaagatccgtccactgtggaggcattatttccagaacactc

SEQ ID NO: 48524 - DNA, 214 bp, Glycine max
  Clone ID: LIB3139-052-P1-N1-H2
ctccacatgctactgccagatcttctgaacatgcgggatcctatgcatgatctggaattcgtgatttctttcgctcgttcgtgtggccaattcaataaaggaacatgcgtaagaaaattcagcatgaccctgttgatgggtatgctcggcctatctagaaaatatccacacctcttttaattgtcgtaatgatgtgtgaagggtgtgttatttt

SEQ ID NO: 48525 - DNA, 183 bp, Glycine max
  Clone ID: LIB3139-053-P1-N1-A9
gatcctctttcatgccttgccacatttctattctgtggctgagttcacaagccttagccaaaccagctctactcccacattcgccggaggagattacactttgaatttcactgatgattctgggacagcgcacattaattcatgatggtccaagaccagggtgagcagtgctgttcattccac

SEQ ID NO: 48526 - DNA, 231 bp, Glycine max
  Clone ID: LIB3139-053-P1-N1-D3
ggtcgggtgtaacactccatgcacaggtagatatggcttaatggcggagtaaattgtggaagtcctgaagcagcctgtttgaatcaaatacctgtagagtggaaagtaattgaaaaaaaaatgtttacctagctataaaacagtgatgactacggtgggggaggaaccttagaggggagaaagggagattgaccgcacgcacttttgtgccaaagttgataggtcctatcg

SEQ ID NO: 48527 - DNA, 287 bp, Glycine max
  Clone ID: LIB3139-053-P1-N1-H10
gccggaagctgttccagcttaatcttgtattataatgtatatctcatgattgggagaaaccttaagctttatgtattctcctgctaagatacatactcctggcccaatttaataataataataataattaaaactctggggaggcacaggcacagatacattgcctctctctgtatgtatggcattagacagcctcttgcacttatggtgcaattgtgcatgccaactctctgtaatataatgaatgtggttgtgctaaggaggatttggtttgatcattttcgttc

SEQ ID NO: 48528 - DNA, 311 bp, Glycine max
  Clone ID: LIB3139-053-P1-N1-H11
ggcagaacattagggatatgatccttttcttggtggaattcaaaaatatgccactcccatgatgcccctagatgaagaaattctttctaaggttgcacaagatatgtttgaggaatggtttgattgtgttgatgaggaggattcctttgaggaagtttctttaagtgcagcacttaatggtgttgagggtttggactatatggaaagaattccttttgccacatctgagggttttccttatgttctttcacgcaaaaattgcgaaataggcaaaaggagatttgtctttggggatgggtgaatagattact

SEQ ID NO: 48529 - DNA, 313 bp, Glycine max
  Clone ID: LIB3139-054-P1-N1-A7
ggattgttataagatggataccccaatggaggaaatattgggcagaaaggttgaccaagagataacccttgtcctagagcatatttcaagtgctcttttgctcctagctgccctgtcaaaaagaaggtaaatatatataatcaaccaagtgctaactagtaactaggaaatggtttggtttggttactcacatgttagtagggaaatggatctcaagctaagtttggtttggttttggtttggttattcaggtgcaaagaagtgtggatgatcaatctgttctggttgctacttatgaaggggagcacaatca

SEQ ID NO: 48530 - DNA, 247 bp, Glycine max
  Clone ID: LIB3139-054-P1-N1-B4
tcgggtatgatctaataatgaggtaatggaaatgccgatcagaaacatgcgcgaaggcctgaagactaccgcacgtgagcgtggtgattattaaccttatttggtcgcggtagctcgatgctacaacagtacgcacgctgcccctgcgctattcgctctgccatctcgctttgcgcgctcgcgccacattcgcgcacgtaacccgcgcacttggcttgcgcgacatacttctcggatgttacgtatg

SEQ ID NO: 48531 - DNA, 374 bp, Glycine max
  unsure at all n locations
  Clone ID: LIB3139-054-P1-N1-D2
gcaggcaacacaccatggggttctgctcactgaaacgtgaggccaaaatcacaatccccaaagcaaaaacccaaatcccaaatgagattatgacaacaacacatgagcgcgtgcatccaatcccaaacctagctatgtctcccaccacttcctcctccaccgcccactggacctccgacgccatacacggcggatccctccgccgcgtcgacctcgactccggcaccaacggctgggcctctcctcccggcgaccttttcctcctccgctctttcaattacttcacaaaacgccaaaaatcccccgncggcgactacctncttttcccgccggcatggactggcttgaatcccaatccaagctcgagaacgtgc

SEQ ID NO: 48532 - DNA, 277 bp, Glycine max
  Clone ID: LIB3139-054-P1-N1-D6
attcggtcgagctcgagccgccagttgatttacaccatagttaagactggaatatggaatctgttgccaaaacagcttgtataatccaaaccctgttgacatgggtttgaatttgagcgtccgatcattggattattggcactggatggactgccccaagcagagtcagtcatgatggtatttcttcagaggtcccagactatggttaaatccaaacctttggtaatggggtgggaaaactgacttcctaggacttccgaggtaagagagcctttta

SEQ ID NO: 48533 - DNA, 318 bp, Glycine max
  Clone ID: LIB3139-054-P1-N1-E8
taggattttactcttaaaggcaccatgttggatcttgaaaggtctcaatctaaaattgcacttcccaaaaacacagttggaggaaccattctgcgtagtgatttattggcaaattttttgacagagggcaattttatagcaagtgttgatttgcagcgcactcatcgcattagaggaatgattaaaatggtggccacatgtgtttttcctgataatacaggtttagcatttgctcttgctatgaatagctcttttaggttgcgctccagtttttatatttacaccatctgcttttaagactgtgaattgtggaatttc

SEQ ID NO: 48534 - DNA, 188 bp, Glycine max
  Clone ID: LIB3139-054-P1-N1-F4
gaacacttctattgttagacttcggcagataaacttttgttttttagtcttgtaattcaagcagcgtgaaatggttggtccacttctattggttggactcgggtgacttctcttttctttttactttttttactgccgatgcgtcaaaggctattgaaacactggcgtgggcaagtgttgtatttttg

SEQ ID NO: 48535 - DNA, 174 bp, Glycine max
  Clone ID: LIB3139-054-P1-N1-F6
ctcgaggaaagacatctcccgctaactttgtcgggctatatcactacttttatttcttgcctatggcagcctacccaaggaggctatcatatctttattcccaaacctgtcagctgatctgggaaccattggagggtcccactgtgcagctgaccttctgcgttttcatgattg

SEQ ID NO: 48536 - DNA, 356 bp, Glycine max
  Clone ID: LIB3139-054-P1-N1-G5
taatacttttatttcacaaaatccatttgtttcaaataaagaatatgttaaaacttactttccctctattcacttcccgaagtgcttatagtattcctctttctattatttgataaatcttttccaaaaatgctttactcatgaatataccaaatgcttctctttcacattttatatatattttcttagtatatccttattttaatatttctaaatattacttacctcctactattaaatattacaatctcctttacttcatattctatttttaaattttcgcctatatatacacctatccaattttttgtaatctttttcttcttttcatatactcgcatctctatctttatcta

SEQ ID NO: 48537 - DNA, 157 bp, Glycine max
  Clone ID: LIB3139-055-P1-N1-A1
gtcttttttttttaaaattctttttgttgttgcaatagtgtgtatgattggaaatctttaaattcgggttttccaccccatcaattcaatttaaagatatgccttcttccattcaaaaaaaaaaataaaaaataaattaaaattaaaataaaataag

SEQ ID NO: 48538 - DNA, 359 bp, Glycine max
  unsure at all n locations
  Clone ID: LIB3139-055-P1-N1-A2
cccttgctctntggaatnagatcnnttttctttnnctttctcctgtgttgcgtgggatccatcnngttcattgcttanntcccttttnntctcttgatgccccttttacccctgttcanntctcatttcacttcanccatgtaacanntagtttgtattagtacctacccgaagcggggccgccgtggaaggggtcccnttttttcatccctttcatgccgcctgcaccggggcccggtcttctcttganngttttccctcctctnctttnntgctttctttgtgtttcttcttttctcttttgcatgtgcctgtcttcagcgcgttcaaccatcgcaatacancccatcctttcacgc

SEQ ID NO: 48539 - DNA, 143 bp, Glycine max
  Clone ID: LIB3139-055-P1-N1-A4
cctaactctgttattagatcactactaacacactacgggtcggggttattaacaaccatgcgctctcccatttactccagatgcactttaccatttcatctcattacactttacatgttacataattagtatagcactaccaa

SEQ ID NO: 48540 - DNA, 150 bp, Glycine max
  unsure at all n locations
  Clone ID: LIB3139-055-P1-N1-A6
tcgaggattcggttgttcactttgatnctcatcaataatcgtcaggcgtgaagtgtgaagaagatgcctgatcacgaaacaatcgccgttcggaaggctctgaagagggcgactcactcccgacacgtttgaagtgcggcttttgtgctg

SEQ ID NO: 48541 - DNA, 153 bp, Glycine max
  Clone ID: LIB3139-055-P1-N1-B2
catgtatgttactctgtggtgagcatggccatgggtgatgcttattttccaataacacctgtctataatgtacgtggcaacttataagagaccacattggcttttttttttacatgagaacgatgaggttttgttcaatttctttcaacaacc

SEQ ID NO: 48542 - DNA, 337 bp, Glycine max
  Clone ID: LIB3139-055-P1-N1-C5
ggaaaaaaatttatttattaaaaaaaaaaaaaaaaaagtgggaaggaataaaaaaaaaaaaaaaagtaaaaaaaaaaaaaaaaaataaaaaaaaaaaaaaaaaaaaaaaataaaaaaaaaaataaaaaaaaaaggggggggccccccacaatgaggcctttcacccccgaaaaaaaaatcggaccggtaccctaaggggtaccaatttttcctaaaagaagggtttattaaacctgggttaaaaaaagaaaaaagttttttctggggaaaaaagtatacctcttaaaaattcacaaaaaaaactagccgtaaaaaaaaaagataaaacccgggggcc

SEQ ID NO: 48543 - DNA, 333 bp, Glycine max
  Clone ID: LIB3139-055-P1-N1-E10
atttttagtctctgtgtttgcggctgaggatggcgaacgagtgaccttcttcgcttctcgcaaagtttaaggaattatgggtcaggaaaaggttcacattaacattgtcgtcataggacatgtatgctttcgcatgccaactaccactggtcactcgagctacaagcttggcggtcttgccacagttgtgtattgagaggaccatcgagcgagcttgcggcatgtacaagaggtcctataagcatgcctgggggctacacatgctgaaatgttagcgtgtaagaaggattgccaatgaaattggtctgacgtagcatgaaaccgccaacacct

SEQ ID NO: 48544 - DNA, 79 bp, Glycine max
  Clone ID: LIB3139-055-P1-N1-G12
aaataaatttaaaaaaaaaaaaaaaaaaaaaaaaaaaaagaaaaaaaaaaaaaaaaaaaaaaaaaaaaaaaaaaaaaaa

SEQ ID NO: 48545 - DNA, 435 bp, Glycine max
  unsure at all n locations
  Clone ID: LIB3139-055-P1-N1-G5
tcgagcccggctcgagtgaaagttagcgaaagagagagggagatggcgtgcgggnngtggggaatcaccaggaaaccaaaggtcgctgctaccgatttcntggatgggatttcaagcgagtgccatgtctcgcttgccgagaggcccaaggaccctgtgctcttctccgcgaagacttacctcgagtgcctccaccattccaaggagtttcaacgacgaaaccgaatttacaaggaggagcagcgcaaactaagggctgcttccaggaaaggccaggaggatggggttaatgaacatcatcattagcacctgaagttaattttcaatttaagcttctgaacaattatttttgataaaacgtttgtgatttgcttggatcggtattcctgcatgttctgtgagcccatattttatactttgatgttgcgggcttgt

SEQ ID NO: 48546 - DNA, 239 bp, Glycine max
  Clone ID: LIB3139-055-P1-N1-G7
aactactgctgtggccttatgaacagaacatcctgcaggctgcgaacgagcttatcgctatgtgtaagctaaagacaatcagttcagatcctgctgcctatatttgtatcgactatcatttcacagaagaagcatccattgcggttgctccactctccgttgtaatctctactgctcaaacttgggcgcgtcattgtgccataaaacttcatcagctcgattcaacctccacatatttg

SEQ ID NO: 48547 - DNA, 382 bp, Glycine max
  unsure at all n locations
  Clone ID: LIB3139-055-P1-N1-H3
ggaggcattgcctttttaatttaatccaaacccgtgttctgatgcatggagtttggaatttttgaagcgtaccggatttcatggggatatcatttgtgtcactgggtggactgccaccccaatgcaggatgttcaggttacaattgattggtttatttcctctcaggaatgtgttcccaggacctattgtgttttaaaatccacaaaatcctttttgtgttaaaataggtgngatggggaaaactgacttnttcccccaggggtaccttccccgattggttaaagagaaattgcctcttttcttatagggggggaggaagccctggtgcaaaagaatgggctattcttcatgaaaatatgccaaaatgcctgttcttttcaa

SEQ ID NO: 48548 - DNA, 322 bp, Glycine max
  Clone ID: LIB3139-056-P1-N1-A2
taggctcggaggaaatggtctttatattttcaactatttgagactgccacagggtttatcactgtgttagtagttgcatttatgatgcaagaaggaacctcaaattattttaaagggttgatgcttatactatgctatctaatagttgctgccagttttttcgtacatgttgaccctaaaagtggtgatgactaaatatttagtgtaggtgtggcagttgcaatgctgcttttttttaccactttttttaacaaaaaggtagttagctgggattttttaatagggttcaggatagtatttttgttatttatcaatttttttt

SEQ ID NO: 48549 - DNA, 399 bp, Glycine max
  Clone ID: LIB3139-056-P1-N1-A5
tccttaggctggaattccggttcaagccaaagcctttttaaaaagagcagctgtccacagagagggtggttgacttgcgtgggggcaatccatgcttgggttcaggacctcaggtggcaagccaagagacatatggaactttgggtgccatcgtgaaaagccaaactggcagtcggcaagttggttttctcacaaatcgtcatgttgcagtcgacctagattattcgaaccaaaagatgtttcatcgtcttccaccgactttggggcctggggtttatcttggtgcagtagaaagagcaacttcatttataacggatgagctttggtatggtatatttgctggaataaacccagagacttttgtgagagctgatggtgcattcattccttttgctgatg

SEQ ID NO: 48550 - DNA, 383 bp, Glycine max
  Clone ID: LIB3139-056-P1-N1-C1
gaaatggttctctgcagaagatgctttagagttcgctaagggcatatctaatcatgaattgtgcttcatagaaagagctgatcatgaatatacttatcatcaagatgagttgaccagcttagttttggaattcatcaagattcatattgacaaagacaaagatacatcgaagcaggcacgatttggaagagtacataaacctattcattcccggttgtagtttgtgcaaatatgtgtagatccagtatttcttttgaaaccatctttcttacaaataaagacacagccttcataaatagatcaccaagaaaagatggacgaacctcattccatttctaacattccaagtgcccacctgagagccgtttattagcatttgcaag

SEQ ID NO: 48551 - DNA, 299 bp, Glycine max
  Clone ID: LIB3139-056-P1-N1-C2
ccaaaccctcatcaacaacaacattcttcgaacaagggcagaattaccaaaagccccataaaacccattttttcctcgccctcgacgaagtcaaatgcgtagccaacatagcattacccatggtgctaaccgggttactactctattctcgctccgtaatctccatgctcttcctcggtcgcgtcggtgagctcgccttagctggtggctctctcgccattggattcgccaacatcacgggctattctattctctcgggcctcgccatgggcatggagcccatttgcggccaggctttc

SEQ ID NO: 48552 - DNA, 137 bp, Glycine max
  Clone ID: LIB3139-056-P1-N1-C4
cggctcgttgttctagccgctttgcgacgccgtgagaaagtaatgctttcaaaaaaagaagaacacatcggggtgggaggcacacgctcaaacgcagagtcagaatctccattctccaatcggagacatagcgagct

SEQ ID NO: 48553 - DNA, 469 bp, Glycine max
  unsure at all n locations
  Clone ID: LIB3139-056-P1-N1-E2
ctatccatttgttagaatatgtgccaaccgaattaaaagaggagcgatgtgtatagcgcttcgcgatggcacgatatagagaaagaatatgggaaggcaataggtttcccgcagttttaggtcttttcatataaaaaaaaatgtttaaaatttatttaatttnnttctatagaataaggatttgggttttctttagtccttttttttctccttgttttataagaaattttcgagtggtatttttaaaacaagtttggtaaaagcaacttcttgcggcttcttcttctgtcattggatccattgttacaatcttaccaaggcattgcctcctcttggtagttttttccaaaccctgccttggcgctttgcaagggggtttggttaaaacctaaatcaaataattatttaaaattaaatttaccattcttggcttttcttcatattatttcattattttcgtttttttggt

SEQ ID NO: 48554 - DNA, 345 bp, Glycine max
  Clone ID: LIB3139-056-P1-N1-E6
ctcgagctttttcggctcgagaaaggcctgaatgatgattgtgaacactttgagtgttttccacctggtcacttgtactctagcaaagaaagagggttccgcagatggtacaatcctccttggttctctgaggctattccatctgccccttatgatcctcttgttttaagacacgcctttgagcaggcagtcataaaaaggttgatgactgatgtgccttttggtgttctactctctggaggttaggactcttctttggttgcattccatcacttctcgttacttggccaacacaaaggctgctgagcagtggggatcaaagttacattcattctgtgtaggccc

SEQ ID NO: 48555 - DNA, 211 bp, Glycine max
  Clone ID: LIB3139-056-P1-N1-F10
ctctcctcctgtctctagaattctcagattaggaaggcgagttgattcattagggaggaccccgcttggcacctcccaccatgggccagctgccgtcgcaacagtaccagcagcctccgtcgcatcagcagcaaccctacgtcatgattccaccgcatgcccaggccccgcaggccatgtgggcccccttcgtccagccttcgccttagca

SEQ ID NO: 48556 - DNA, 216 bp, Glycine max
  unsure at all n locations
  Clone ID: LIB3139-056-P1-N1-F8
ttctcgctctctgtcacaggtgtagcggcgaaactaagatcttttaaagaatggcgagaacctaccccnttgttgctcttttcacagctcctcctctttaccttatctctcattcaatctaataatatcttttgagttttctttggattatttccctctattccttcctcttactttttcctttctttctttcttattctttcttttctctttctt

SEQ ID NO: 48557 - DNA, 377 bp, Glycine max
  Clone ID: LIB3139-056-P1-N1-G11
tgactggtttggccaataggttactgagtaagggcaacgatattctgtagttagcgattatgctagttttgatggtttgattaccaagcaagttatgagcaagatggcagaaatgataaacagtctttgtggtggtgatgaaaaattgatgcgtgaaaggacacacctgctgttggcttgttgttcaaggatggcaatttgtaagaaagatgtttggagagttgaatgtggaatcccttctggatttccgctcacagttatttgtaatagcatttttaatgagaagctcattagatatagctatgaaaaataactgtgccaggctaaagcttcaagtatgtttgtacaatcctttaaaaattttgtttctttgtgtg

SEQ ID NO: 48558 - DNA, 250 bp, Glycine max
  Clone ID: LIB3139-056-P1-N1-H10
agctaggaattatgctggtcgagaatcagtgtaagaaagataaaattctcaaaatgggagccagttcgatccccatccgagtcgccggaatccaaccgtgctccaccttcggccaccgcaggaccgatcccgatcgccggagagcctcctccaccagctggtggaccccgctgttcggctggtcctccgaaccggactacattgactcaaacaacagagcatcgagtcttcaacggaccaagcctgtacc

SEQ ID NO: 48559 - DNA, 64 bp, Glycine max
  Clone ID: LIB3139-056-P1-N1-H11
cggctttttaaaggaaggaaaaatggagttgtgggggggacttttttgttcggtggtttgggag

SEQ ID NO: 48560 - DNA, 225 bp, Glycine max
  Clone ID: LIB3139-056-P1-N1-H4
ccacaatatcatatctccaggctatctatcaagtaagaaagcgtgttaaaggaggagaatggctgatgatggaagcaggagggaattgatattcaggtcgaagcttccggatatctacatccccaaacatatgcccctccactcttactgcttcgagaatttgagagagtgtggttcacgcccctgcctgatcaatgcccccacgggagacgtctacagcttcca

SEQ ID NO: 48561 - DNA, 291 bp, Glycine max
  Clone ID: LIB3139-057-P1-N1-A2
tgggtcggcgaaagtaatgcgtctagtcactcgctttccagttaggttcggtcttaccctatttcacttgaaccttaattacgacagttgacaatctggttggtgaccttggcttaggagtaagtttatgttgaataacatcaattctctgcttgatcctttgctgatgcaatgctatactcgtgctggtaaaggagttgtcatattctgtcagaccaaatggtggaaagctgcaccgacaggatgaaaaatgattatttaacaagatctaaagcgtaagaagacttgtgc

SEQ ID NO: 48562 - DNA, 382 bp, Glycine max
  Clone ID: LIB3139-057-P1-N1-A4
gaaatttctgtcgatctctgcgttttcccctattttttctgaatcccacagaatggcatccaacaggggtcaaggtggaattcagcagttgttggctgctgaacaagaggcacaacggattgtgaatgctgcaaaaaatgaaaaattggctaggttgaaacaggccaaggaagaggctgaaaaggagattgctgaataccgagctcaactagaggctgagtttcaaaagaaagtgtcagacagtactggagattctggagctaatgtcaagcggcttgagcaagagaccgaagaaaaaatccatcacctgaaaacggaggctgcaagaatatcggatgatgttgtcgccatgctcctcaagtatgtgacaagtgtgaaaaat

SEQ ID NO: 48563 - DNA, 381 bp, Glycine max
  unsure at all n locations
  Clone ID: LIB3139-057-P1-N1-A5
cgagatgctactcaactgttcgcaacctaccgtattcaaatttgaggtcaaacacgttcaatcgtcgccctttgggattaattcccatatcgtttccacggcagcttcttctagcagataggaattaggttgaagtcaggacaaatatggccgatttggagaatttgcttttggaggctgcggggagaactggtacagctggtagaaatcgncattctcttccaccttcaaggagacgacatgatggcgcctattcagatggtgggagtgattctagggatgacgattcagatgacgaactcaattatgcaagcagaaagccctctggatcacaagttcctctgaagaaaagactagatccaacagaaagagatgatgatt

SEQ ID NO: 48564 - DNA, 376 bp, Glycine max
  Clone ID: LIB3139-057-P1-N1-A6
tcgagccggctcgagccggttcgaggctctctcttcgcttattgttgcagccttcctcgtaaaagataactcccggtcggcgtgcatagccgccgattgaggcaaaaaaaaaacacaaaacacactgtagctcatcacagccaaacgcggcgtcaacgatgacgagcttctgaaattccaacttcgcccttcttctctgtgtatattcttttttatttatttattattatttctattattttttcggtgaggttagctccatgcctagtcccaagagcagccgcagcggccagatcgagagtcaccggaggggaaggtcgtcgtccttccacggccagtgcgcgatgtctgtcggtcagctccaccgtccgaagac

SEQ ID NO: 48565 - DNA, 376 bp, Glycine max
  Clone ID: LIB3139-057-P1-N1-A7
tattacaccaactacttcctcatcaggtagtagggacacaaggatatgctgctccagagtatgtcgaaacaggtcatctcaaaattcagagtgacatatggagtttcggtgtggtactttatgagattctcacaggaaggcgtgctttgaatagaaaccgtccaataggggaaaaaaagcttatagagtgggttaaaaactaccctgctaacagtagcagattcagcaccatcattgaccctcgtctcaagaaccaatattctcttggtgcagctcggaaagtagccaagttggcagatagctgcttgaagaagaatcctgaagatagaccatccatgagtcagatagtggaaagcttgaagcaagcattgcagga

SEQ ID NO: 48566 - DNA, 403 bp, Glycine max
  unsure at all n locations
  Clone ID: LIB3139-057-P1-N1-C6
tcgagcttggcatatgtggattgccatgccccgtgttggcggcttccaagagcgtcaatttgggtcctacccagaggctgaccctcttggtattttattcctggnnatttggaggaaccacagcgtcttccaagggcttattngtggctgtctaaagcntgttgaaatgatgtctgacatctaaaccaatcacatcggaagaagggaggaaattaggacttattgatgctattgtgtcttctgaggagttactaaatgcatctaggttgtgggcacttgaaattggagagaggtgcaaaccttgggttcgttcacttcataagacggacaaaattggttctctgtctgaagcacgtgaggtgttgagaactgccaggcaacaagttaagaagactgttccaca

SEQ ID NO: 48567 - DNA, 330 bp, Glycine max
  Clone ID: LIB3139-057-P1-N1-D10
aaattctttctctcctctctcagttatcgcatggcctgatcgatcaactcttcttagtcctccctctcagaacacgctatgctgggtgatgtgtatgccctgtctctgttcccacacctcccacatcactgatatcatgcccaccggcttatgccgccacacgtctctaattacgacattgatcctgaaatcgtcatcaacctaccaccttaatagcctcgtccaatgagtgcgtacagacccatcccggtcggagataacacggcggtctgggtgagtcacgcttccaacatcactagctttcatagaaaccaacaacgcttttcccaa

SEQ ID NO: 48568 - DNA, 366 bp, Glycine max
  Clone ID: LIB3139-057-P1-N1-D2
cacagagatatagcagaaaaaaaccgcgccaggggagagcttcaagtatgaccgtacacaccatcaaaaacgtagattgagggggagcccgtggagccacattctctaaagaagctaatctttaagtttttgctgcgcgctcttgtttttttttctttcatttattgtctccttgtttctttttatgctctatgcaagtaaattcttattttttacaatgtgtgcttggttttttgttgtatcaaaatcactgcttattaacctgtctatcaagttagttctgttacacagtattcatggccttttaacacttttgttctttcaggttcattagatttcattgttttttattaaggttgtccctta

SEQ ID NO: 48569 - DNA, 299 bp, Glycine max
  Clone ID: LIB3139-057-P1-N1-D6
gtgaagccttgttttcttagtgtcctatgttgttatgtaagggtattaatcttcattatgtatggtctagtctaggtcttagtgtcttctcaggtggctgctactgcaatggagtttttggcaattgcagagccagtcttagttaattactagtattctgtgtataatctctctctaccttgggtcatagctggtttttttcttgcttgaccagggagaattagtccacttaatatgtttctcaagtgcatcgctgtaatctactacttttaattataaaaatattgatttattattgt

SEQ ID NO: 48570 - DNA, 390 bp, Glycine max
  Clone ID: LIB3139-057-P1-N1-H2
tgagtctcgaggcaacagcttaagtaaaccaataacaaacaaatcaaccgccaccgccttcaccagttttttcattcaaatcctcacaacacaacatgttcatgtctctcttcagccacttcgacatcgcgcatggacagaagtggagattttcctttccctccaccgagtcgaaaaccaccagaaaagattcgaatggatcatcacccgtaggacccaagcaaaacccgcccaggtttgcgccggagttggatggcttgcactgctttgaatccatcgtaccctgttagatggattcctttcgtctttgatcctaatcacatcataggcaattcgattcaatttatttgttctgtacgcgatagatcaagttgtgtttccctgtaactc

SEQ ID NO: 48571 - DNA, 341 bp, Glycine max
  Clone ID: LIB3139-057-P1-N1-H3
ggaaattcttttgcgatgactactacaaattaacctaccgtggtactcctggtgcagcatactatggccgtggtgccatcccactttactggaactacaactatggaaaagctggggaagccttgaaggtggatctgatgaaccatccagaatacatagaacaaaatgccaccttagccttccaggctgcactctggcagtgggatgaacccaccagagaagcacctaccatcaccccacgatgtctttgttgtcaactggaaacccacaaaaaatgacacattgtccaaaagggtgcctggatttggtgccacaataaacttgctctatggggaccaaac

SEQ ID NO: 48572 - DNA, 371 bp, Glycine max
  Clone ID: LIB3139-059-P1-N1-A2
tcgcgctacaagtgagtactgcttttctattcatcatagtggttcttgctggcttgtgtttcatctctggcctgctccacctgcttgttagatttctcataaagcacccttcttctgcatctgctcaatccaacaacagacaccaagaactttccacatctgatgctcttcaaaggcagcttcagcagctcttccacctccatgactctggcttggatcaggctttcattgatgctcttcctgttttccagtacaaggagattgtggggttgaaggagccttttgactgtgctgtttgcttgtgtgagttttctgaaaaggataagctcaggttgttgcctatgtgcagccatgcctttcacataagttgt

SEQ ID NO: 48573 - DNA, 392 bp, Glycine max
  Clone ID: LIB3139-059-P1-N1-A2.R1
tattttttttttttttttttttttttttttttttttttttttttttttttttttttttgttaaaagaaaaacagatgcagtgtttcttatatcttcataaagtacaatcataatacatcaatagtatgtggcaaatcagtcatcacaatgtcaaaattagcacaccaaaattttttggaattgtaagacaagtaaggaggggaagccatttttattcaatggattgaaacgatttctagtgatataagaagtaaaaaaatttattaaaaaacatttggatggatacctttcatgccccttctgtatccctcatccttggaaaatctgtgttttgaaaagttggcattggcatgcaattttgtccatccaaagaagtaggcattttccccttc

SEQ ID NO: 48574 - DNA, 403 bp, Glycine max
  Clone ID: LIB3139-059-P1-N1-A3
cttcgggattgattctcataattctttaaatgagacctttttctgctctttgaagaaagaagggtctttgcttgattttggagatgtctctgctctcagatctcatcaaccttaacctctccgataccaccgagaaggtgatcgcagagtacatatggatcggtggatcaggaatggacctgaggagcaaagcaaggactctcccaggaccagttagcgacccttcagagcttcccaagtggaactatgatggttccagcacaggtcaagctcctggtgaagacagtgaagtgattttatacccacaagccattttcagggatccattcaaaaggggtaacaatatcttggttatctgtgatgcctacactcctgcttgagaacctattcccactaacaagag

SEQ ID NO: 48575 - DNA, 148 bp, Glycine max
  Clone ID: LIB3139-059-P1-N1-A5
acaatccttattaccatacttgaagcttaagcctggcgcaggagtttttaatagctttatctagggagcatctaattaaatatagctatgaaaaattactgcgccgggctaaggctccatgtattgttttgaaggattgtaaaaaccc

SEQ ID NO: 48576 - DNA, 406 bp, Glycine max
  Clone ID: LIB3139-059-P1-N1-B5
ggctcgtgccgatttcggttcgagtttccatcttccactctttcacactcacctatggctccaatctcaaaactcattcctttcctattcttaacaacccttttagtttccctccaagttaatgccagagacagccaattcttcagcaaagtcacccctctcaacaacaacatcaaagagactgagactcccaaaaatgaaggccaagtaaacaagccagaacaacaaccaacattcattcctgaaactgaaaacagttatggcctatatggtcatgagactggtctgcaccctcccaccactacaacaactaatgctgcaccctacaccaccacttacaagccatacaaaactaccacagcttgagaggacactgccaagtactccaacaacaacaacttctaca

SEQ ID NO: 48577 - DNA, 109 bp, Glycine max
  unsure at all n locations
  Clone ID: LIB3139-059-P1-N1-B7
acaagttttatttaaatttttaaattaaaaaaaaaaaaaaaaaaacttaaacggtaaaaataaaaaaagggggctggggaaaaaaaaaaaaaaaaaaaanaaataatac

SEQ ID NO: 48578 - DNA, 376 bp, Glycine max
  Clone ID: LIB3139-059-P1-N1-B9
gctcgtctttgaagtttctaagatgactctcctacattaaatgtacagtcttttttcatagcatttggaaattggctgatgacaccatcaatttgggcttttccccacaagctggtgcagtttggagagattcaggaaaaagttggttgaaattttcacaagagaatttcttacgcttgtcaactaggtgcgcccgcacgactctgttggtgatggggcccatattgtatgctatgggcatgatagtcaggtctacaataccaggtgatttgtcatggtgttaagtgacaaccataaacaatatgtgtgcattgggctaatcctggatttaggttctcgcttttgggcaccattctagccatttacagaaactgtt

SEQ ID NO: 48579 - DNA, 393 bp, Glycine max
  Clone ID: LIB3139-059-P1-N1-C2
tatattgactttaagaacttatatgcatacgctgtcactcgtctcgccttaaatgttgctaattgttctctgtgtagagtctataggtaaagaaccatgctttaagcgttattaggcgctattatagcgtatcccttattcttttcaattaagtttaactcatttaccctaatccatctccctcagcgatatataggttaaagctattcgaggtgtcttgctactagcatgtatgttgtgtatcaatctaggaggaagagagaagataaagagggcccgccaggggtaaagggtattaggataaaggattttttacggtataggttcgcctcaaccgttaaaattctggtatagaaattaacatagcctattgctactatgctattatccttt

SEQ ID NO: 48580 - DNA, 393 bp, Glycine max
  Clone ID: LIB3139-059-P1-N1-C3
ggttaatccggaggtgttgatttttggggtggaacccactgatgcgaatgcaatggcattgtcactccatcatgatcagagagtgattttggatcaggttggaggatttgcagatggtgtagctgttaaagaggttggtgaagaaacttttcgcatatgcaaggagttgatagatggcgttgttcttgtaagccgtgattcaatttgtgcgtcaataaaagatatgttcgaggagaaaaggaacatattagaaccagcaggtgcacttgcactagctggagcttaggcatactgcaagcatcatggggtccaagggaaagatattgtagtaataaccagtggagcaaacatgaattttgataaacttcgggttgtaactgaactcgctaacgt

SEQ ID NO: 48581 - DNA, 411 bp, Glycine max
  Clone ID: LIB3139-059-P1-N1-C4
tcgagcggctcgagcagagaatcatgcttaaaaagtttacaagatgcccttgtcatgtctaaaaagctcatgtccacgtccgatgttgcaaacaatgctggaggaagttcacatgcaactccagtagccttgattatcgatggtaccagccttgtgcatattcttgacagtgaacttgaagaacagctatttcaacttgcaagtagatgttctgttgttctatgttgccgagttgctccgctgcaaaaggcagggattgttgcccttgtgaagaataggacatctgacttgacactagctattggagatggtgctaatgattgtctcaatgatccaaatggctgatgttggagttggcatcagtggacaagagggtcggcaagctgtaatggcatctgattttgcaatggg

SEQ ID NO: 48582 - DNA, 397 bp, Glycine max
  Clone ID: LIB3139-059-P1-N1-C5
gggagtttgttaaaaatttgttttaaaaagggtaactgcaaacaaagcaggcaaaacaaaagacgcagtgatggagaggatgaaaagggtgcttctgctgcttctggccttcactgttcttctcatgttgccagaagcttctgctacaaagtttactgttggaaacaaccagttttggaaccccaatattaactacactgagtgggctaaaggcaaacatttctaccttggtgactggctctattttgtgtacgataggaaccaagcgagcgtgttggaagtgaacaagacagattatgaaacatgtaactctgatcatccactcacaaattggactagggggagctggaagagacgtggttccattgaatgtaacaaaaacttactacattatcag

SEQ ID NO: 48583 - DNA, 228 bp, Glycine max
  Clone ID: LIB3139-059-P1-N1-C6
ggcggttcgagggcaaacttgtaattgtttttggccaactgtaaccttggctgccttgttctgttctatccctgctttgttcaattgttctgggatttaatcccactaaaacaggtcttttattcaaggttttgggctctcttctaagtttaatactttttcttaaaattctaattggtaagaatggtgaccactggccttcccactacctgccatagcatttcaatg

SEQ ID NO: 48584 - DNA, 371 bp, Glycine max
  Clone ID: LIB3139-059-P1-N1-D10
cttgaaagaagtatgaagaatcaggagccactattgtaacaggattggagatgtttatggggcaagcatatggacaatatgagaatttcaccggattaccagcaccaaaggagctcttcagaaaaattatggaaaactattgaagagtgatcggttatctttgcaacacaatcaaagaatctaatggcgaggtactttaaagtgtttaggatgtgaatgaggaggtatcctccccgttctacttccaatttttcaaagtcttgttaattgaaatcaacaaaatgattttgtatctcaattagagtgtatttggatagagaattttaactgaggagactaatttatcagagaatttaaattttttttaattt

SEQ ID NO: 48585 - DNA, 95 bp, Glycine max
  Clone ID: LIB3139-059-P1-N1-D11
ggcataatttgtaaatgaagcttattaagaggttgtttgtgatattgttgtaaatttgtaacttttaagttgtaaatttataattttgttgtgtt

SEQ ID NO: 48586 - DNA, 406 bp, Glycine max
  Clone ID: LIB3139-059-P1-N1-D3
ggcatggtgaggcgaattgaattagaaagagaatggagaagagggtagcagtattacaggaatggtttgaccgcgttgactcggagaaaagtggaagcataacagcggtgcagctaaagacagctcttgctgtgggcaacctggaatttccgctctcagtggttcagcaaatgatcaggatgtacgatttcgaccggaatggtactatgagctttcaagaatttgtttcactcaacaacttccttcttaaggttcaacatgcattttctgatctagagaggggtcgtggttttcttgtacctgatgatgtatttgaggctttggtaaaaattggtttcatgctggattctcctgctttttactctgactgtgagagcttcgatcaaagtgaaaatgggaggtttca

SEQ ID NO: 48587 - DNA, 331 bp, Glycine max
  Clone ID: LIB3139-059-P1-N1-D6
cccaccactgcttggattagttctgcagtggaggataaatcctggggcatgatcaaaagggttcggtcagcacttgcaaaaggtaagaaaattggttttcttactagagttgatccttttccagtagctttattggctgttctttttggcgttaagaatgaaattttgagttctaacgccactaaccctatgctgacgcgactttttgagaactgtaagagtctcaaatatctggttgatgagtgttcttttgcatttgtgaactagtattgaatattttattcacttaaataaagcgcattactatgtgcaatgagtgtgttttaatttt

SEQ ID NO: 48588 - DNA, 98 bp, Glycine max
  Clone ID: LIB3139-059-P1-N1-E12
cagaagggttggtggctgagaaatcataattaccctttcctcttttcctgttgaatacttgttttatatcatatatatacactagcctttttgttgtc

SEQ ID NO: 48589 - DNA, 413 bp, Glycine max
  unsure at all n locations
  Clone ID: LIB3139-059-P1-N1-E3
ggctgaggccaaggcgagtttatgttcacaacttcattatgtttcgggtagtgatctggaaatgcaggaagctgatcttgtcaacctcgaaaatgtgttacgagaattgtatttgcacagtccagaggaagctcgccaattgagaaggaaagctctctctcgtattgaatggctgcaaaaagctgatgtgcctaccatagcacagattgaagagttccattcgatgcagaggatgatgaatgctcctgattcaaatgataatattgatttactgttgagcattgatttgttgggtttacaaggagcaggtaaagcttttccaaacaaaattgttnttgatgataagcttgtgttggctaacacacaagaattctttgatggaaattttccagtggattcttggttaccaattt

SEQ ID NO: 48590 - DNA, 399 bp, Glycine max
  unsure at all n locations
  Clone ID: LIB3139-059-P1-N1-E6
ggctccatccagtctttaccaccgtacccaccattctctctctctcgctctctctctctctctctctctctccaaggtgttgataatctgaagcctatgcgatggaaatatcaaatgattcgggtactaagaaacctaaaaggctgacatctgttgtctggaatcactttgaaaggattagaaaggcagacatctgctatgctgtttgtgtgcattgtaacangaaacttagtggatcaagtaacagtggaactactcatctgagaaatcacttgatgcggtgtctgaaaagatcaaactntgatgtgtctcaactacttgcagcaaagagaaggaaaaaagataatacccttcagcctagcaaacataggttttgatgaacgtcagaggaaagaagaa

SEQ ID NO: 48591 - DNA, 399 bp, Glycine max
  Clone ID: LIB3139-059-P1-N1-F3
ggaaccaccacaaaaaccatggtttggctcagagccctgatcagcagatgaagcccttagctccattcatatcatcaacccagttcagcagacaagaagatcagtttcaagagagaacatccgaacagaaaatcattcgcataagaaagttcgtgctgtgctgcggttgtttcactgcccttgttgtgatactcgtggtcatactgatagtcttgagcttcaccgtttacaatgtcaaagaacccgaggtgaggatgaattcggttacccttctcagtggaacttttgcaaacggtggtgccactaacaacgttacacttgttgctgatatctttgtcaagaacacaaacgcttttaccctgaggtttggaagcaccagcaccattgtttactatgatg

SEQ ID NO: 48592 - DNA, 405 bp, Glycine max
  Clone ID: LIB3139-059-P1-N1-G11
atttatcaaaaccatataaaggtgccctcaaggataaggttaaaggaaagaaaatcatagcttagatatttagtacattcttgtagagtcaaatgaagaaagaacctgtccctgctgcctcattttttggtgttggagtccaactgcttaaaaatatgtcatgctacatgcttgcttcttaaagttaactcctttcttatcaaggggtagaaccatttccccccattttaaaaccttcatttttgtttcatagttttgatctatttattggatttcatatagatagaggtttctctaggggggggcttgttaagtctgttgctattatagagaattactgtggtgtacatcatgattttttgttttcatactcgtgtcaatatctgaattctttttaatatgttg

SEQ ID NO: 48593 - DNA, 369 bp, Glycine max
  Clone ID: LIB3139-059-P1-N1-G4
caacaacgcaacttttaagcggtacgcgccaggaagccaaacaggacctaaacgccgtgaagggactacaatccgctatgcagtacctcgtcgcacaggattccacctccagcaccctcgtgcgcgcgcagttcctcatgcaactcgccatgaagacgctccagaaagagttctaccagattctatcctccaacagagaacacctggatcccgaaactgtctccacgcgctcctccgttgaccaccgcagcagcgtctccgattacgacgacgaaatctcaatcaccgaggacgagttccgcgtttccgagaccgagcgcgtttccatgctcgccatggaggatttgaaagccatagctgagtgcatga

SEQ ID NO: 48594 - DNA, 409 bp, Glycine max
  unsure at all n locations
  Clone ID: LIB3139-059-P1-N1-H1
ggtggttttgaaatgtggtgttctgagtgggcaaatcaaacttcatggcatgggagtttccttattgacaatccgaaacagtctacagtttttgatattctcttgggaatctctcaagattttgaaattgctggtaatactcttatgccagctttttctgttccacaggctactgccagatcttctgaaaatgcggaatcctctgcatgatctggaattcgtgttttctttcgcttgttcgtttgtttaattcaataaaggaaattaggcatgaccctcttgttgagtatgctctgcctatctgaaaatttccacacctcttttaattgtcgtaatgatgtgtgaagtgtgtgttnttttnaaaaaaaaaaaaaaaaaaaaaaaaaaaaaaaanggggcggccgccgac

SEQ ID NO: 48595 - DNA, 404 bp, Glycine max
  unsure at all n locations
  Clone ID: LIB3139-059-P1-N1-H12
atatacgtggatgggaaaactgactttgcctcacggcacttcccgaagtgttaagagaatgcctctttctatagggggaggagctggtgcaaagaatgctattctcatgaatatgccaaatgctgttctttcaatgtggagatattttgttggagatctcgtctttgaagtttctaagatgacttctccctacattaaatgtacagtctctttcttcatagcatttggaaatttggctgatgacaccatcaattttgaggcttttccccacaagctggtgcagtttggagagattcangaaaaagttgtgttgaaattttcacaagaggaatttcttacagcttggtcaactcaagtgcgtcccgcaacgactctgttggctgatgggtgcccatatttgtatg

SEQ ID NO: 48596 - DNA, 414 bp, Glycine max
  Clone ID: LIB3139-059-P1-N1-H3
ggggaccaggaagaaaaaaccaacaaaaaagatctagtcctagaatccaacaggggcgacctcacctccaagaacacatagccatgtcaagaaacttgcttcttgttctttttgcagtagccaccttcctccatggctcagaagcacaaaccagacacgtggtaggtgatgccacgggctggatcatccctcccggcggcgccgccacctacaccacctgggcttccaacaaaacattcaccgtaggcgacactctcgtgtttaacttcaccaccggccaacacgacgtggccaaggtaacgaaatcagcctacgacgcgtgcaacggcgggaacgccgttttgaccctgacctccggtccagccaccgtaaccctgaacgaaacaagggaacaatactacatttgctcctttg

SEQ ID NO: 48597 - DNA, 347 bp, Glycine max
  Clone ID: LIB3139-059-P1-N1-H6
agggtgaggaaaacttaattagtgttcatgaatatgtcaagccttactttagtggttctaaattgaaaagctttctagctagtcataacatcaccattactgatggtattgacaaaactagtgcaactttgcaatttagaaagttagcagattgtgattttctcaagagaaactttaagcagatgtctaatgttttgtgggtggctcctgaggacaaggcgagtttatggtcacaacttcattatgtttcgtgtaataatctggaaatgcaagaagcttatcttgtcaacctcgtaaatgtgttacgagaattgtatttgcacaagccagaggaagctcgccaattg

SEQ ID NO: 48598 - DNA, 436 bp, Glycine max
  Clone ID: LIB3139-060-P1-N1-A2
ggctcagccctggactatgatcggtgccggagagggccaaccacaacatatgttaaacaaggaacaacctccaaaacataacatcctacgccaaacaaaactttgacctccttcagatctatacccttctctctctctctcttctattttcaaattctacatcatgggcacggaggttctacggccacaagattgtttcacccaacgcatcggtgttccaccgcctggcttttcccggcgaagaacctatggtacccaccacaacaacaaaaacaataacgttaacaattatttcaggggtaaccggaagccgacaacccgacccgaacaaagaaaacgggttgtggacaaaaggcccagtttagatgattcgaggttttcgagtttggagatggagaaagtcacgattcttcggaggggggaatcgctcgattcg

SEQ ID NO: 48599 - DNA, 463 bp, Glycine max
  Clone ID: LIB3139-060-P1-N1-A6
gctcaaagacatggaaggaagtttgctttgcttgggttgatgcagaggagtttcgtttggcccaaatttgtggactaaacattattattcaggtggatgacttggaagaagtcagtgaatattaccaaaacagaggttgcttcaatgagctcatatctctcatggagagtggtttagggttagaacgggcacatatgggcatctttactgagttaggagttctgtacgctagataccgccctgagaagcttatggagcatatcaaactattctcaacccgcctcaatattcctaaactcataagagcttgtgatgaacaacagcattggaaagaattgacctatttgtatatacaatatgatgagtttgataatgctgcaactaccatcatgaaccattcacctgaagcatgggatcacatgcaattcaaagatgttgttgtttaaagtgccaatgtggagtt

SEQ ID NO: 48600 - DNA, 419 bp, Glycine max
  Clone ID: LIB3139-060-P1-N1-A7
ggctcaaggctggaggaagatctgtgcagcagcggatggcaatgatcaagggtattacaatccaggaggcatttgctgctggaggaagatctgtgcagcatttcgagttcaaggtggccagacaaaaaagcctaaagttcgttgaaggaaacattttcaggttattggtcttagagatcctgagctaataatgatgttttggggtagttgagataggagagattgttgtaagaattgtgacattgattctcttaaactgcatatctcagggagaaaaaaaaatcccagtgtcatttgagaaggtgatgtttttaattttaagttttgaataagtattttcctatcattgatttgaaattgaatattgaatgttagctggcagatgctagaatatagacaccagcgcttttgctctttgt

SEQ ID NO: 48601 - DNA, 436 bp, Glycine max
  Clone ID: LIB3139-060-P1-N1-B4
cgtccttagccttcgaattccggttcgggcacactaatccaaaattttccaattagtaacttgttgaaagttgctgtttggaagaaaggctgtttaatggtcaaaattgtgatgtctgggaatgcagcagtcaaaaggagtgattgggcctcattggtccaagtgtttttaacaaacagcaccagtccagagcattttgatgcatgtaagtggacaaaatcagaaccacattcctgggaattgatcttcccaatagaggtatgtggtcctaataatggttttgaaatgtggagttctgagtgggcaaatcaaacttcatggcatttgagtttccttattgacaatcccaaacagtctacagtttttgatattctcttgggaatctctcaagattttgaaattgctggtaatactcttatgccagctttttctgttc

SEQ ID NO: 48602 - DNA, 406 bp, Glycine max
  Clone ID: LIB3139-060-P1-N1-C4
atgaataattcctcctggtcctgatcctaaatagggttagggttagggtttatgcaatcgaattcctgagacggtgcatttgtacgtaatcgatggcgaatcgcacggatcctgcagctaagagcataaggggcacgaaccctcagaacctggtggagaagattctccgatcgaagatataccagaacacctactggaaggagcaatgtttcgggttaacggcggagacgttggtggacaaggccatggagctcgaccacctaggcggcacctacggcggaaaccgcaaacccacgccgttcatgtgcctcgtcatgaagatgctccagattcagcccgagaaagaaatcgtcattgagttcataaaaaacgaggattacaagtaccgtaggattctcgggctttt

SEQ ID NO: 48603 - DNA, 390 bp, Glycine max
  Clone ID: LIB3139-060-P1-N1-D1
ctagttctagatcgcgatcctagtactagctcgagccgattcgggtcgagccacagtcggtattgctgagaatacaggtatatcattggcctgtgctatgaatagttcttttagggggcgcgccagttctgatatttacaccatctgctctcaagactgtgaattgtggaatcctgcttgcacaaaagcaatgactatgtcatttaatccaaacccgtgttctgatgcatggagtttggaatttctgaagcgtactggatttcattgcgatatcatttgtgtcactggatggactgccaccccaatgcaagatgttcaggttacaattgattggtttatttcctctcaggaatgtgttcccaggacctattgtgttttaaatccacaaaa

SEQ ID NO: 48604 - DNA, 443 bp, Glycine max
  unsure at all n locations
  Clone ID: LIB3139-060-P1-N1-D4
gtggtgatcgcatttggaattgcacaacaccaatgggcgaggttgttagttcagctcccgggaaagtgttaatgaccggtggttacctgattttggagcgacccaatgcaggacttgtcctcagcacaaacgctcgtttttacgccatcgtcaaaccaattcatcacgaaatcaaacctgattcctgggcatgggcatggacagatgtcagattaacctctcctcaactctccagagaagccctctacaaactcgctctcaaaaatctcaccatccaaaccgtttccccaagtgatacgagaaatccttttgtggaatatgcggtgcagtattccgtggctgctgcttacgcaacgtttgaccataataaaaaggagctgttgcacaaactacttttacatggtcttgacattacaattntgggtggcaatgatttttattcg

SEQ ID NO: 48605 - DNA, 368 bp, Glycine max
  Clone ID: LIB3139-060-P1-N1-D5
cttctcttctctcacaaattcgtcaatcaatctcccaccgagttcccaacatggctgaatcggtggagcttccgagtcgcttggcgattctcccctttcggaacaaggtcctattgcccggcgccataatcagaatccgctgcactttccccaccagtgtgaagttggtggaacaagagctttggcagcgagaagagaaggcgttgattggcatactgccggtgcgtgatgttgttgaaattaagccagtgggtcccactgtatctgaaggagctgattcaacaaatcaaaactcaaaagttcaaagcggtgcattggattctcgtaagcttgatacaaaaaagccgaacgatgttgttcattggcat

SEQ ID NO: 48606 - DNA, 422 bp, Glycine max
  unsure at all n locations
  Clone ID: LIB3139-060-P1-N1-E2
ggacgaaaataccttctttcagccttccttcaacaacccttttggccctttattcttcaaagtctcaaagcaaagctcgaagacctgagaagaacaaagggttgattaaattctgtgtggttgttgttggaggttgaaacacaagttgccaccccaagtgtgtgttaatcttaaatttcacaagcaagttgcttttttggagtattatattgtatgaccaaatatttttgtgttttaggactagatattttgcttctggtggcaatttttctcttctccttctggntctcatcctttgcgttcttctttgactctcatctgnctgaggatttttccatcttagttcctggaggcaccaggaacctgacccaataaacaaacccctttttttctttctaatttttctaaagtttcatttttta

SEQ ID NO: 48607 - DNA, 320 bp, Glycine max
  Clone ID: LIB3139-060-P1-N1-E4
cgacagtttttgaaggtaattgtcttacaggatagagacaattcacaaaaattggtaaccaagaatccactggaaaaggtaagaaaattgtttttcttactagagttgatccttttccagtagctttattggctgttctttttggcgttaagaatgaaattctgagttctaacgccactaaccctatgctgacgcgacttcttgagaactgtaagagtctcaaatatctggttgatgagtgtccttttgcatttgtgaactagtatgtaatattttattcacttaaataaagcgcattactatgtgcaatgagtgtgttt

SEQ ID NO: 48608 - DNA, 397 bp, Glycine max
  Clone ID: LIB3139-060-P1-N1-E5
ctgagtttccacattgcataccttaggtcttccgaattcgaagttaatttgcaggatgggttatgaaaaggctcagatcaacattgtggtggttggtcatgtggaccctgaggaggcaaccaccattaacgagctgaagaagcctgttgtggagaaagaagctccagggcatgccatatgagggcatgcacgcacggcctcggaggggaaccagaaaattatgttaacaaaataatctggaaccctaatgtatcagtgtcatcatcagtgtgtagtttaagctagctttgctatgcgtacgttctctgagatgagagtcttgatgaacagtgccattctgatgtattgctttccttgaaagttaatgcatgcttcttatcttctgtctatcaagaac

SEQ ID NO: 48609 - DNA, 394 bp, Glycine max
  Clone ID: LIB3139-060-P1-N1-F5
agactgtgaattatggaatcctgcttgcacaaaagcaatgactatgtcatttaatccaaacccgtgttctgatgcatggagtttggaatttctgaagcgtaccggatttcattgtgatatcatttgtgtcactggatggactgccactccaatgcaggatgttcaggttacaattgattggtttatttcctctcaggaatgtgttcccaggacatattgtgttttaaatccacaaaatccttttgtgttaaataggttgatggggaaactgactctgccccagggcacttcctgaagtgttaaaagaatgcctttttcaatagggggaggagctggtgcaaagcaagctattctcataaatatgccaaatgctgatctttcaatgtggagatat

SEQ ID NO: 48610 - DNA, 301 bp, Glycine max
  Clone ID: LIB3139-060-P1-N1-F7
ctcgagccgcaatcccaaacagtctacagtttttgatattctcttgggaatctctcaagattttgaaattgctggtaatactcttatgccagctttttctgttccacaggctactgccagatcttctgaaaatgcggaatcctctgcatgatctggaattcgtgttttctttcgcttgttcgtttgtttaattcaataaaggaaattaggcatgaccctcttgttgagtatgctctgcctatctgaaaatttccacacctcttttaattgtcgtaatgatgtgtgaagtgtgtgttatttt

SEQ ID NO: 48611 - DNA, 354 bp, Glycine max
  Clone ID: LIB3139-060-P1-N1-F9
ctcgagccgaatcggctcgagcacagaccatattgcaattggataaccaaacaaagggagatcaacttttcccttcttttttgtccaagagaaacctaaaggggtaatcttgacaaatagcatacaaacaggaatgtcaagtgtatatagaggaggtttcacagcctgagcagatagtattaagttcttttcattttcttattttttttatctttcaaatatgaggaaaagtcctcataagattgtattgatgcattcaactaattagttctgtatccataagaatgccgcaaggccaaaataaagtgaaacattggttctgggatgaaaaaaaaaaatataaataaaaataat

SEQ ID NO: 48612 - DNA, 411 bp, Glycine max
  unsure at all n locations
  Clone ID: LIB3139-060-P1-N1-G3
aaaatgttcatcatgatgaatgtggcaattatttgtgtttcgttattagcnngcctatnnnctgaagccccaaaggaacatggagatccgtgaatnntcctccggggcaattgccaaaattccacaatttgtcaatgaaaataagtgagcgcgacaaaatggttcaatttttatgaatgtcggaattatttggttttcttaattagggcctanntcctgaagccaaaaggggaaatgacgatcgcgaattccgtcggggnaattccgaattccacaattttcaacgaaataaaggaggcaacaaatcgttcaatatatgaattcggaattaatttgtttgtcttattagggcctatcctcgaagccaaaggaaatgaagatcggaattccctcgggggtaccgagctcgaa

SEQ ID NO: 48613 - DNA, 90 bp, Glycine max
  Clone ID: LIB3139-060-P1-N1-G5
cttttgagttgaaatgcatgatggactccaattttgaagaactgaagtctgaaaccttcaagagatggggtacacaagttttttttgtgc

SEQ ID NO: 48614 - DNA, 458 bp, Glycine max
  Clone ID: LIB3139-060-P1-N1-G6
ggagtacggtaacagtattagcattagtagcagcaccttagtaaacaactcccctgagtcctcccctcatttgttgctcgaaagcgacatgttttgggacgaacaagagttggcatcgctgttggagaaagaacaacacaacccactaagcacttgctgtctccaaagcaaccctgccttggagggtgctcgcatagaagccgtggagtggattctcaaagtaaacgcccactactccttctctgccctcaccgctgttcttgctgtcaactactttgaccgttttctcttcagcttccgctttcagaatgacattaagccatggatgactcggctcgctgccgtcgcttgcctctccctcgctgccaaagtggacgagacacacgttccctttcttattgaccttcaacaagtggaggggagtagatacttgttcgaagccaagacgattaaaaaga

SEQ ID NO: 48615 - DNA, 77 bp, Glycine max
  Clone ID: LIB3139-060-P1-N1-H10
atcataaagagatatgatttaagaacttgatcttgaattgcatggtgaagggggggtcgacggcttgcgtactatgt

SEQ ID NO: 48616 - DNA, 265 bp, Glycine max
  Clone ID: LIB3139-060-P1-N1-H12
ccatttgctttcatgtttatatagggcattgagagagttgaacatttcaatgtcctatctgaagatggaagccttttgacaatgcccccttgggtcaacccttggctgtttttggcaatgtcagtatcatttggtctgcactttttgatcttgtacgtgccattcttagcccaagtatttggtatcgtgcctctgagcttcaacgagtggctattggatttggttgttgcacttacggccatttttattgacgagattctgaaat

SEQ ID NO: 48617 - DNA, 101 bp, Glycine max
  Clone ID: LIB3139-060-P1-N1-H2
cggttgaggaaaattgtaaccaagcaattaactttttgggttcaatcaatatttaacatgaaaataattgcttacacacttgccaggtttccttataattt

SEQ ID NO: 48618 - DNA, 111 bp, Glycine max
  Clone ID: LIB3139-060-P1-N1-H4
cgattatagattcgcttttgaatgttaaacaatgttgctcggggcgacgatcatgttgatggacaattttgaatggatgcctaacgttgatgactgtccttctcaatttca

SEQ ID NO: 48619 - DNA, 337 bp, Glycine max
  Clone ID: LIB3139-061-P1-N1-A2
gcaaatttagtccattcattcacacagctggaaaatgggctggtgagccagatgacaaaggtattcaaacatccagtgatgccaaacactttgccatctctgcaaaaataccagaattcacaaacaagaacagaacattggtccttcagtattctgtaaaatttgagcaagagattgaatgtggtggagggtacatcaagcttctctctggatttgttaatcaaaagaagtttggtggggatacaccatatattttaatgtttggaccagatttatgtggcacggatacaaagaagctccatgtgatactctcctaccacggtcaaaattaccccat

SEQ ID NO: 48620 - DNA, 232 bp, Glycine max
  Clone ID: LIB3139-061-P1-N1-A9
agaatgctcttttttccttgaatgccttagcctttgtttcaatttttgtaatttttagcatttttttattgactttatttttctttttaggaattgggcattttacccattttttcctcgtttctttgttaagccaatttagccaagcacggaagcacagcaagatacttaaatgtacaatgaatcttttctccttgaatgaagaagaaaataaagaacaaaggttttgttt

SEQ ID NO: 48621 - DNA, 343 bp, Glycine max
  Clone ID: LIB3139-061-P1-N1-B12
tgcaaattgctagcatttgtcatggacaggggattctggctgctgctggaggggttaaaggccgcacgtgcaccgctttttctcctgttaaacccgtgctagttgctgctggtgctcattgggttgaacctgacactgaggcagcaacagtggtagatggtgatctcattactgcagctacttatgaggggcacccggagctcattcgccatttcgtgaaggcattaagaggaaaaataagtggttttgataagaaaatcctctttatttgtggggattacatggaagattatgaggtcaaggtttctttttagtcccttcaggctttaggatgccatgttga

SEQ ID NO: 48622 - DNA, 385 bp, Glycine max
  Clone ID: LIB3139-061-P1-N1-C5
aatcggtcgagcactgcacccttctctctcgcggtcgccgaatctttctccgcatccgcaacctccgccgtatgcgcctttgattcttcaaccgatggatcggccggcgaccggacctggcgtggacatgccgatcatgcacgatagcgaccgctacgatttcgttcgcgatatcggctccgggaatttcggcgtcgcaaggcttatgagggataagcagacgcaagagcttgttgctgttaagtatattgaacgcggagataagattgatgaaaatgttaaaagagaaatcattaatcacaggtctctaagacatcctaacattatcaggtttaaagaggtcattttaacacctactcatctggccattgtaatggaatatgca

SEQ ID NO: 48623 - DNA, 348 bp, Glycine max
  Clone ID: LIB3139-061-P1-N1-D1
ggaatatgctatacccatctatttttatatggttttgggtatgacacatcaacagatgactacttgctaattatgatcccgtttcattggaaaactgaaatccaggttttctcattcaaaactaattccaggaacagaaagatgattaaacttaatgttccataccagggtatcggctcgaaattcagtattggatcactcttgaatgagacacttcattggttggttttctctaaggataaatgggttgatgtgattattgcctttgatcttataaaaaggagtttatcagagattgctctgtttgatcatttaacaaagaaaaaatatgaaatgtttagtttaaga

SEQ ID NO: 48624 - DNA, 375 bp, Glycine max
  Clone ID: LIB3139-061-P1-N1-D12
taaagagcatgtacaccctccctactactaccactcaccaccaccaccatctccatctccaccacctccctattactataaatctcctccaccaccatccccctctcctcctcccccctactactaccattctccaccaccaccatctccatcaccaccacctccatactattacaaatcccctccacctccatctccatctccaccacctccttactactatcaaagtcctcctccaccatctcccactcctcatcctccctactactacaaatcccctccaccaccaacgtcgcatcctccaccttaccactatgtgagccctccaccaccttctccatctcctcctccaccataccattacacatcaccacc

SEQ ID NO: 48625 - DNA, 374 bp, Glycine max
  Clone ID: LIB3139-061-P1-N1-D7
ttaggtcgcttttgtttacatggttactcttcggggacacggcaacattgagcccaaccgcgcttacttggagtaccgcatggatgacttttctggctaccttcgtcgtagggttagaagctcgttcaagtgggaccgcatcagaagctgtcttagccaaaccaacatgtgtgctgagcttaaccagggttatcgaatggctcaggacttcttcaacgcgcgtctaacgcccatgcagtcagggtgctgcaagccaccaacgcaatgtgcgtacacgtttgtgaatccaacctattggattagtcccatcaacacagcagcggatatggattgcctgcaatggagcaacgaccaaacacaactttgctacaact

SEQ ID NO: 48626 - DNA, 377 bp, Glycine max
  Clone ID: LIB3139-061-P1-N1-E12
cttgctttgacagaagaggaaaagatggaagtgattagaaatagaggcattcctgctgatgttcttgcaaagcgagctcatgaatttgaaaaacatgttgctcatgaaagcctcaaggatcaaattcctgctgttgacaagttgtattctactaaggttaataagtttgcaaaaattatgaaccttagacaaagtgttgttggtgatcttaaacttcttactgatgggaagttgtatgagggtaagcatattcctgtatctaatattagtgcaggggaaaatcatgtagttcaaatacccttaatggcacaggaggaaattctgtcttctagtgcaagtgatttcagaactgcaatggtgagtaaaaatagcaaacc

SEQ ID NO: 48627 - DNA, 371 bp, Glycine max
  Clone ID: LIB3139-061-P1-N1-E2
ggcgagtccataaaaaatttaaaaaaaaatccgcgattcgctcttctctgggaaaagtgaaaaccagaagtacgaacgaaagagaagagcgatttagaagtgagagaagatggggttgtcgttcacgaagctgttcagcaggttgtttgcgaagaaggaaatgaggattctgatggtaggtctcgatgctgctggtaagacaaccatcttgtacaagctcaagcttggagaaatcgtcaccactatccccaccatcggatttaatgttgagactgtggagtacaagaacatcagcttcactgtgtgggatgttggtggtcaggacaggatcccgtcactgtggaggcattattttcagaacactcaggggc

SEQ ID NO: 48628 - DNA, 369 bp, Glycine max
  Clone ID: LIB3139-061-P1-N1-E7
cccaaacttatgctccgcaattgcaaattcagaggatgtcgatcttcgagtacaacggaagcgccgtggtggctatggtcggcaagaactgcttcgccattgccagcgaccgaaggctcggcgttcagctccaaactatagccacggattttcaacgcatttccaagattcacgacaagctcttcatcgctctctctggcctcgccaccgatgctcaaacattgtatcagcgtcttgttttccggcacaaactgtaccagctgcgtgaagagagggatatgaaaccagagacctttgccagtttagtctctgctctgctctatgagaaaaggtttggtccatatttttgccagcttgtaattgctggat

SEQ ID NO: 48629 - DNA, 308 bp, Glycine max
  unsure at all n locations
  Clone ID: LIB3139-061-P1-N1-F2
ggggcattactggtttcacactggcgactttcagtactcctattatcagtttcattgggaaattcagcttcactccaagaaaattttgtccaatgtctcaacttgaattcggacagaacattcccatttaacccactaatttacacaccaaaaagtccttcattcaccagtgtccttgactcctncgcaagaatcaaaggcttttgggccttcaacaccaaaccaaagtcatattacaccacccggatttcatggcagcagggtatctgctcagaactggatcactagaggtaagggggcatacttga

SEQ ID NO: 48630 - DNA, 375 bp, Glycine max
  Clone ID: LIB3139-061-P1-N1-G10
aatttcgggcgggtcgagaaaacttgtcagcttcaaagagggtttatgaagaaggaggttgtttcccgaacactatagaagtttgcagagtgagcaactgagcatatactgcatacgtaatggagttcccttcttcttcttcttattcatcctccatcttctccccgcgcccatcagacgacaccgttttctacgccatataccctgactcacccaccgcaaccaccaccgtgacgctccagtccctccacctcaaaatcctcgaaaccctatctcccttcacccaagactacatatggcagcaccagcccttcgctctctccgtttcaactccgccgaacccctcctgcccctgcccctgcttcttccaccttc

SEQ ID NO: 48631 - DNA, 386 bp, Glycine max
  Clone ID: LIB3139-061-P1-N1-G6
agcttcatataactatgctcatgaaagcttatgctttgttgaagtataacaatgcgaccaatttgattgtcaggactcatttggcagaattggtcaatgaagacttttatgatgaaaaatttaattttattggcacaattgggactccagcttttcatcgacaaattgctgcacacttggagaaaatgccattatggcaaaaagcaattttgtgtggaatgggacattgtttgtctcggaaaagcaaagaaacatggtattctgggatgaaggaaaaatttgtacaaatgatgaagagcatctatgaaacagaagttacagattggccagtaccactgaaaatcatttctggaaccattcttgcaacaattttgggaacaaccttc

SEQ ID NO: 48632 - DNA, 88 bp, Glycine max
  Clone ID: LIB3139-061-P1-N1-G8
atatatacttttttaaaaccaaacacaaaaccgcaaatttgatatatttacccgctccaccacctaaacaaatatcttacttaaaccc

SEQ ID NO: 48633 - DNA, 234 bp, Glycine max
  Clone ID: LIB3139-061-P1-N1-H1
gggctaacactcattaattgcaagaatggcacttcgtggctggggggggtccctttctgttctcttgactctgggtcttgcaagagaaagccatgccagaaacaaaaatttttggcatgctgttgggccaaacactcccattccaagttcattgcgagatcttttaaagcctggccctgcaagggttgaaatcgatgatcaccctatgcaaattgaagaaacacagtacccgaa

SEQ ID NO: 48634 - DNA, 370 bp, Glycine max
  Clone ID: LIB3139-061-P1-N1-H11
tagaaaaaagatagtgagtggtggccaatgggagcggagaggttttcccacgaccatgctcccttgattctgggtctccagccatccgccctggtcgacaacgttgccaccgtcgattggtccttgctccatcgcattcccggcgagcgcggtggctccatccctgtccaaattgaagaactggaatccatactgagagaggttaaatccaaatcccacgatgacatcaaaactctcgctggtggcagcgttgccaacacaattcgcggtctcagtcgcggttttggaatttccaccggaattattggagcttatggagatgaccaccaaggccagctttttctcaccaacatgaccttcaactctgtcg

SEQ ID NO: 48635 - DNA, 396 bp, Glycine max
  Clone ID: LIB3139-061-P1-N1-H6
ttgcaatagctctcgagatctctttagtgtgttacgggaattgtatttgcacaggccagaggaagctcgccaattgagaaggaaagctctctctcttattgaatggttgcaaaaagctgatgtgcctaccatagcacagattgaagagttccattcgatgcagaggatgatgaatgctcctgattcaaatgataatattgatctactgttgagcattgatttgttgggtttacaaggagcaggtaaagcttttccaaacaagattgtttttgatgataagcttgtgttggctaacacacaagaattctttgatggaaattttccagtggattcttggttaccaatttttgtgaattgtctttatcctgtaagtcaattacctttagaagcttgtcg

SEQ ID NO: 48636 - DNA, 55 bp, Glycine max
  Clone ID: LIB3139-061-P1-N1-H7
ttagcacaattttttttggtcactaccagctgaatgaaatggtaattcagtactg

SEQ ID NO: 48637 - DNA, 56 bp, Glycine max
  Clone ID: LIB3139-061-P1-N1-H8
tttttacaattttttttggtcactaccagctgagggaaatggtaatttagtactgg

SEQ ID NO: 48638 - DNA, 208 bp, Glycine max
  Clone ID: LIB3139-062-P1-N1-A1
ctccctttaaacaaccatggggtgttggtccatggttaaaggaaattaaggacactactaaagaaggatatagttttgaagagctatgcatcaagaaagaagccattgagggagaagagaagttttgtgcaaaatccttgggaacagtaattggttttgccatttcaaagctgggaaagaacattcaagtactttcaagttcctttgt

SEQ ID NO: 48639 - DNA, 427 bp, Glycine max
  unsure at all n locations
  Clone ID: LIB3139-062-P1-N1-A10
gctgtgcaaagcttgttttcttcattgaggctcatcctcctaaaaggcaggctgtataatgagcttaatctgcaggctgaatttgaggagtatgagaacgggagctatgcaaagcttgtttcctacattgaggctcatgctagcaaagcagttcaagctgtattgaagtcctttttggctaaaatttacaagcggcagaagtagagtcaacttaaggtgaggaccaaaattgttgaacatgcaatagaaactagagttgtgatttctatctagagcagtatcatgttccgtggcttggaatttttcaaaaattgattttcttcttgtcatttttttttaatttttgttttttagtgataagatcttgttgtattttatcttctaatctgtcttgggatacttgtttgactatntataatttcttctg

SEQ ID NO: 48640 - DNA, 461 bp, Glycine max
  Clone ID: LIB3139-062-P1-N1-A11
gctctctctctctctctccctccttattgctttctacctgtgacacccttctcaatgaccaacagcaacgacaacatcggcgtgacagatctaacttccgccctcaatgaagagaatcgcgccgacctagtcaatgctctcaagagcaagattcagagtctggctggggctcattctgatgttctggagactctatcccccaatgtcaggaagcgtgttgaatctcttagagagattcagggtaaacatgatgaaatagaggcagacttcttgaaggagaaagaagctcttgaagccaagtaccaaaaattgtatcagccattgtacacaaagcgctatgaaatcgtaaacggtgttattgaagtggaaggggcagcaaatgaaacaacagatgaatcagaagaggataaagagaaaggagtgccttctttttggctcaatgcaatgaaaaataatgacgt

SEQ ID NO: 48641 - DNA, 462 bp, Glycine max
  Clone ID: LIB3139-062-P1-N1-A12
gcttctaacgcactcttctaaacttaacacaatggagcttggcaaattgacgttagagatcttctcaaaattggagcagcaatggctctcgcactacgaagcatcaaccaaaacgcgcattctcagcattgacggcggaggaaccaccgccattgtcgccggcgcttccctcgtccacctggaggaccagatccgcgcccaaacctccgatcctcacgcgcaaatgactgattactttgacatcatcgccggcaccggcattggcgccatcctcgccgtcatgatcaccgtcgacgacggcttcggccggcctctgtacaccggcagagacgccgtcaacttcctcgccgaaaacaaccgcgaactctacaagccgaaacgcgccggcgtgttccgtcgacgccggagattctccgcgaggagcatggaaaacacgctaaagcgcgttttcaagagaaaaga

SEQ ID NO: 48642 - DNA, 167 bp, Glycine max
  Clone ID: LIB3139-062-P1-N1-A3
gcaattagtcagagcaatggctatagctatagctttagctttatgaggaaagaaatggtgggctttttttgcctcattttgttatttgtaatgaaactgttggttccgatgtaattaaataatgtcttcttgttgacaatgtaactacagattttatttcacttcac

SEQ ID NO: 48643 - DNA, 468 bp, Glycine max
  Clone ID: LIB3139-062-P1-N1-A6
ggaaagtcgaaggtactgtacggtggggctcttgtctccggccagccaggctatgatcgtcgatcctgaatccggccaatcgcttccggttaaccgcaccggggagctctggctcaggggtcccaccatcatgaaaggttatttcagtaacgaagaagcaaccacatcaacccttgattcaaaaggatggttaagaacaggggatatttgttacattgacaatgacggattcatatttattgtggatcggctaaaggagctcatcaaatacaagggatatcaggttcctgcagcagaactagaggccttgctactgactcatcctgctatattagatgccactgttatcccgtatacagataaggaagctgggcagcatgcaatggcatacgtggtgaggaaggctggaagtagcttatccgaaactcaagttatcgatcttgttgcaggacaggctagttgggtgtg

SEQ ID NO: 48644 - DNA, 160 bp, Glycine max
  unsure at all n locations
  Clone ID: LIB3139-062-P1-N1-A7
ggctntgttttatcattttttttttactttcctctcacgccctctgccacaagggannntccgtctcnncgcaattaaccgggagagtaaaaaaaccaagnntttaattacctnnattatggcnngccganngggatcaatannagacaagnncaacgct

SEQ ID NO: 48645 - DNA, 555 bp, Glycine max
  unsure at all n locations
  Clone ID: LIB3139-062-P1-N1-C12.R1
gaaaaatcgagctcaaatatattatagtaaatgatgaagaacaccagttcttttaccctacatacaattgctcaatctatctcattctcaagctaacacccgtgtttctttaaaattatacaacagggcaatagagaataataatccaatttcttgctcagaaaacgattagacacagaaggaaacaacaaaacagaaaaattgaaattctgttcaatgatttgtttgcttgcatctcttgccttctcaacctgggactattattactttcccccaggtgataagaatttgggtgggtgtataaattttccgagttcccaaagactctggtataaaacatctctccaaacatcccaaacacaaggtgggggcacctggtgccaaaatggtggcgcaagntcgatgttgtgatgatgatgcacctcttcttggtataatgctgattttgatagtgttgcgtatggacactttgaatgtgttgcatgagcgattagccccaaagcaggtggtcttggtgggatacaactgctctataggattatgccttttcatcat

SEQ ID NO: 48646 - DNA, 509 bp, Glycine max
  unsure at all n locations
  Clone ID: LIB3139-062-P1-N1-C12.R2
gaaaaatcgagctcaaatatattatagtaaatgatgaagaacaccagttcttttaccctacatacaattgctcaatctatctcattctcaagctaacacccgtgtttctttaaaattatacaacagggcaatagagaataataatccaatttcttgctcagaaaacgattagacacagaaggaaacaacaaaacagaaaaattgaaattctgttcaatgatttgtttgcttgcatctcttgccttctcaacctgggactattattactttcccccaggtgataagaatttgggtgggtgtataaattttccgagttcccaaagactctggtataaaacatctctccaaacatcccaaacacaaggtggngggaacncctggtgccaaaatggtggcaccagggttcagcatttgtgatgatgatgcatcctcttcttggtataaatgctgattttgataagtgttgcgatatggaacactttgagatgatgttgcaatgagcgattgag

SEQ ID NO: 48647 - DNA, 158 bp, Glycine max
  Clone ID: LIB3139-062-P1-N1-D1
aatttggtctagagatgcgtgtttttttgcgttttttcgtgggttaaataaaataagggaagttgggcttgccccttttgtggagtatgctctgcctatctgaaaatttccacacctcttttaattgtcgtaatgatgtgtgaagtgtgtgttttttt

SEQ ID NO: 48648 - DNA, 461 bp, Glycine max
  unsure at all n locations
  Clone ID: LIB3139-062-P1-N1-E1
ggtaaaattggaatttttattaaaccgcgaccacaggtggccgcaccttaaaaccggaaacaaaagcaatcgttcctggatttcaagaatttctcaatttcttcctacttcttggggtccgatttcttaagggaaagaaaatcactctctgtgctggtcacagacttcgggaatctttttcttttccactcctagtttatttgctgaacactctcctatttgatataggacttcgtgtcagatttaaactttttctgtttctttctcagttctctgtttaatttcaagttcaagctggtgaaattttggattagtgctcccactctcctatctggtataggacttcgtgggtagactnttctacttctctcctttctttcactctcttcttctcactgatccgcattgcccgttcaaagggtcttatttgaaaaacactttgggcgtggtgcaaatgtttg

SEQ ID NO: 48649 - DNA, 466 bp, Glycine max
  Clone ID: LIB3139-062-P1-N1-E4
gagcacctacgtcgtttcgcgtgagtaccagcttttcctttgggcaattctcggcttcagtgattcctatgataaagccattgaacatgtcttcagcaaccaagggtgataggaagactgcacttgatgtggcatcatggatgttcaatatagtcacatctgtgggaataatccttgtgaataaagccctcatggctacatatggtttcagctttgctacaacgttaactggtctgcattttgccacaacaaccttgctgacagtctttcttaagtggctgggatatgtccaaacctctcaccttcccttacctgatctcatcaaatttgtcttatttgcaaatttctctattgtcggcatgaacgtgagtttgatgtggaattttgtcggtttctatcagattgctaagctgagtatgattccagtatctcgttccctgaagttatcttggataatgtgcgatat

SEQ ID NO: 48650 - DNA, 456 bp, Glycine max
  Clone ID: LIB3139-062-P1-N1-F10
ggaaggcccattcgggtggttacatttccgaataccattgtgcagattgaaccagacatgaattcaaggtttcagcttttgagtaccactaccaatggtgattttgttcaagggaaagatctcgcaatggttaaagttaatgtagcatgtgctgctgttggcttgacatcaagttacactccaactccattgttggaatctggtttgcaaaaagacagagggttaattgtggagtattttggaacgatgtcttacgttgctcataacgttaatcagccccaagagaaagatttgttagagggaaatttttcctttgatattaaatctcgctctagattggaaaaagtttcctctacaaaagcacaatttgttagtggaaaaaccttcaaatatgatataattggtgctggttcacattctttaagagatttttctggaaaggaagatcaagaaaaa

SEQ ID NO: 48651 - DNA, 415 bp, Glycine max
  Clone ID: LIB3139-062-P1-N1-F7
cggctcgagcggctcgttctcgagccgctcgagactagttctagatcgcggtcgccctgatgcttctcgaagcccttcccctcgaaattcaaatggggatgaataagctatgttcatgaaaaattctggagacgccggactattgcacctgtagctgttttgctattgttggatcttttagtctatgtgaatgatcttatcggagtcattgaaggattttatgatctaagtgctgtttggtagggtcagactccctgatgttttgaatggttttatattttgacttgctatgtcgtctacttaggtgtttggtaactattagaccttgcagatgacagggtaatctctcacgttgagggattttgccattttatttttggtttactgcttccattatttgttttttcaaacctac

SEQ ID NO: 48652 - DNA, 411 bp, Glycine max
  Clone ID: LIB3139-062-P1-N1-G10
ctcgagcctgatcgggtcgagcattaatgtgtgtttgtcacgagacccatagtgctgccaaattatagtaactctctttctctatctgaagaagaagaagttctgaagaagcatgtgtggaggtgctatcatctcagacttcattggtgtgaagcgtggccgcaacctcgccgagcaggaactgtggtccgagcttgaccctttctctgacctgcttggcttcgataccaccaccaccaccaccaaccaaccaccccttccagacaaaaaagtggtgtcatcatgtgagaagaagaagaagaaaagtgtgagtgcagaaaagaagagtggtgggcgagctcggaagaacgtgtacagaggaatcaggcaaaggtcgtggagcaagtgggccgtggaaataacggacccaca

SEQ ID NO: 48653 - DNA, 433 bp, Glycine max
  Clone ID: LIB3139-062-P1-N1-G11
ctcatgtatgtgtcaaagtgtgaactcaaaacagacccttctctgtctatgagctaattttggagggatgtcactatctctagctccatgaactttgtctaacacacaacacaagaagaggaagaaggggaacaagaagatcgaagaagaagaagaagaaagttaagatatgttgcttggaaaacgtcctcgggcaccgattatgaaaagaactacaagcatgagtggtggtttggccgtggaaaccaaaacaagcaaggaggaagaagtactcatgtctgataacatgaaactacgggatccacatgttaacgttgttgccatgggaacaccaaatgatcaattcgtgcctaaccacaccaaaaatgtttatcaggccaacggttcatatgtatatggtgacccgttgatcggcatgggcgttaacatgagc

SEQ ID NO: 48654 - DNA, 425 bp, Glycine max
  unsure at all n locations
  Clone ID: LIB3139-062-P1-N1-H1
gggggaaccaaattcgttttgttttgtttaacgttccgttctgggagttgaaagaaagaaaggaaggatgggagtgacaccgaaaatggctccttcgatgctctcttccgacttcgccaatttggcttccgaggctcagcgcatcctccacttcggcgccgatgggctccacatggacatcatggatgggcattttgtccccaatttaactattggcgctccagttattgaaagtttgagaaagcacacaaagggatatttggattgtccccttatggttacaaatcctcttgattatgtntgagcccttggcaaaagctggtgcttctggttttacatttcatgtagagacatcaaaagataactgggaagaacttatccaaagaatcaagtcacatggcatgacttctgggtagcattaaagc

SEQ ID NO: 48655 - DNA, 100 bp, Glycine max
  Clone ID: LIB3139-062-P1-N1-H10
caaatatctggttgatgagtgtccttttgcatttgtgaactagtatgtaatattttattcacttaaataaagcgcattactatgtgcaatgagtgtgttt

SEQ ID NO: 48656 - DNA, 395 bp, Glycine max
  Clone ID: LIB3139-062-P1-N1-H3
catagttggtgttagtcttggtgtagtgtagctagggagggatatatatctgagtaagatggcatcagagcttgaattgcccccaggcttcagattccatccaacggacgaggagctggtgttgcactatctctgccgcaaatgcgcgtcgcagccaatcgccgttcccatcatcgccgaaatcgacctctacaaatacgacccctgggacttacccggattggctacttatggagagaaagagtggtacttcttttcaccacgggaccggaaatacccaaacggttcgaggccgaaccgggcggctggcaccggttactggaaggcaaccggggcggataagcccattggtcagcccaaaccggttgggattaaaaaagctttggtgttttacg

SEQ ID NO: 48657 - DNA, 361 bp, Glycine max
  Clone ID: LIB3139-063-P1-N1-B12
ctcgagccgctcgagttgaaaagaaatttggacagtcatctatttttgtgacttcaaccttgatggaagagggtggtgtgcctccttccgcaagtccagcaagccaacttaaagaagccattcatgtaatcagctgtggatatgaagataaaactgaatggggaatagagctaggttggatttacgggtctattacagaggatattctaacaggttttaagatgcattgccgtggttggaggtccatttattgcatgccaaagagagcagcattcaagggtactgctcccatcaacttgtcagataggcttaaccaggtgcttcgttgggcactaggctccatagagatcttcttcagtcg

SEQ ID NO: 48658 - DNA, 146 bp, Glycine max
  Clone ID: LIB3139-063-P1-N1-B6
ttaggaaaaaatataaaagccttttacttttttcctttagggtgatttgaatcttgattgggagaagcttcaaattggtgtgttttacccatcaatccaattttaagccgtgccttcttcaaaaaaaaaaaacaaaggttaaattg

SEQ ID NO: 48659 - DNA, 184 bp, Glycine max
  Clone ID: LIB3139-063-P1-N1-E2
gggatgggttaatattacacctcacttgattaaattaaccgggaaggccagccaactggaactaactcaattcccaattctttctttctttctatcaaacacaatgcgggcgtgttttctttctcctaattgtataaaatgggggacaagcaccagcagcaccaccaagacgacagcagggatt

SEQ ID NO: 48660 - DNA, 194 bp, Glycine max
  unsure at all n locations
  Clone ID: LIB3139-063-P1-N1-E4
cgttccctttttccttttctgtnctctcaccaaaaatcaaaaacgcccgtgttcttgtgtttggtgtggagagagaaaacaacagagaccnagagacagaggnnngtagtagnnntgagcttgaagcgacgtgggggnnngaagtagctgaagaatgggagtatgttgataagggaggttgaanaatgggtgga

SEQ ID NO: 48661 - DNA, 355 bp, Glycine max
  unsure at all n locations
  Clone ID: LIB3139-063-P1-N1-F11
gggatggactgccaccccaatgcagngatgttcaggttgcaattgattggtttattgctctaggaatgtgttcccaggacctattgtgttttaaatccacaaaatccttttgtgttaaataggtggatgggaaaattgactttcccccagggcacttcccgaagtgttaagagaatgcctctttctatagggggaggagctggtgcaaagaatgctattctcatgaatatgccaaatgctgttctttcaatgtggagatattttgttggagatctcgtctttgaagtttctaagatgacttctccctacattaaatgtacagtctctttcttcatagcatttggaaatttggctg

SEQ ID NO: 48662 - DNA, 212 bp, Glycine max
  Clone ID: LIB3139-063-P1-N1-F7
gtgaattcctaataaacactttgtgttgctgggagagatatcattgaaaaacagtgcaatatgttgagttggtagactgccttataggtttttcctctcgtaagggacgattgactattctgttttgttatcataatcatctagtataagcaacattttgttttccacgtctctttgttataattaagttaataatataatattgttaacat

SEQ ID NO: 48663 - DNA, 352 bp, Glycine max
  Clone ID: LIB3139-063-P1-N1-G8
cgttttctttctctcgctgggaaatataaatcgcgcggatatttttcagaatgggtgcggccaatatatgtgcactaactcttttgtgggtagatttcaatttaccatgcccagttcatctgaatactctcaattttccttccataaacctgcgaggtcttcggaagaaataaagcttcttttagacttgtagcctgcttagtcaatacatcaaggagaatgtttgttttcgatatctttaccccccgtatgacatcataatatctcccctgtgacatattgtcaaaattctactactctttaactctttttcttaccttctgaaaacaacttctaactcaaaaaattcctt

SEQ ID NO: 48664 - DNA, 311 bp, Glycine max
  Clone ID: LIB3139-063-P1-N1-H11
ggaataaaattaaaaaaaaaaaaaaaaaaaaaaagaaaaaaaaaaaaaaaaaaaaagaaaagagaaaaaaaaaaaaaaaaaaaaaaaaaaaaaaaaaaaaaacaaaaaaaaaaaaaaaaaaataaagaaaaaaaaaaagactataaaaaaaacaaaaaaaaaaggggggcgccccccccatgggggtgttgcgcccccgggctaatattcaaccccctcccccgcggggcccccaatttcccttttggggattgatttaaagattgtggctaaaatgggcaataccggtctcccggcaaaaaagttattct

SEQ ID NO: 48665 - DNA, 333 bp, Glycine max
  unsure at all n locations
  Clone ID: LIB3139-064-P1-N1-A2
gctagagacatgggttcggggttttcttccaacttgtttgagcaagatggcanaaatgataaacagtttttgtggtggtgatgaaagattgatgcgttaaaggacacacctgctgttggcttgttgttcaaggatggcaatttgtaagaaagatgtttggagagttgaatgtggaatcccttctggatttccgctcacagatatttgtaatagcatttttaatgagatgctcattagatatagctatgaaaaattactgcgccaggctaaagctccaagtatgtttttacaatccttcaaaaattttgtttctttgtgtgtgtatggtgatga

SEQ ID NO: 48666 - DNA, 369 bp, Glycine max
  unsure at all n locations
  Clone ID: LIB3139-064-P1-N1-A4
ttcaggttcatgcctaaaggattagggttgacccatttaactgggacaaaatctgccagggtggactcaagcgtatgcatgagaagtacacatggcaaatttactctgacaggctcttgacactcactggtgtgtatggcttctggaagcatgtgaccaatcttgaacgccgtgagagcaaacgttaccttgagatgttctatgctctcaagtaccgcaaattggctgagtctgtgccccttgctattgaagagtaaaatcatgtttgaagagaacatgaatggagaaaccggctnttggttcgttggagtcttatggagctttcataataaagccaatgaattttgattgtgatctgtttttggattt

SEQ ID NO: 48667 - DNA, 398 bp, Glycine max
  Clone ID: LIB3139-064-P1-N1-A5
ggctcattccgtttgggcttcaacactcaacaatcaacaatcaacaatcacaaatagaaactcactctttcgaaaaaaccagaatttgaatatgacgttagggtttgagggttatagttataccacaacacttggaaggaagagggtcgtgttattacacaatgaagcttcttctctcaactctaattcggcggtgaatccattgaagagaatgtgcagcggaaaattcacttttgactctgaaaggtctcgccttgaggcccttcctcttgatgttctgattagggtgttgtgtggtgtcgatcatgaagatttggagcaacttgttcgtgtctcaaaaactgttagagaagcggctgagattgctaggagaatgcattttgagtatagcactccaa

SEQ ID NO: 48668 - DNA, 339 bp, Glycine max
  Clone ID: LIB3139-064-P1-N1-A9
tttgattagccattatgtttgcacacgatatcatccttgatgttttggaaaaattctaagatggcggtgaggattctaaaatacttcaatgtgattggatcagacccagagggcagattgggtgaggctccaagacctgaacttcgtgaacatggccctaaggcttacccttgctccactgcaaataatgctgttacacactgtccctgcttacttaaataattattaccagacaccggatggaacatgcatacgagactacattgatgtaactgatttggttgatgctcacgtgaaggctcttgagaaggcacaacctgctaaagtagggatctacaa

SEQ ID NO: 48669 - DNA, 396 bp, Glycine max
  Clone ID: LIB3139-064-P1-N1-B1
gtgactcctctgttcagagtgatatcaaattgtggccttttaaggtcattgctggtgctgctgacaagccggtgatcgtggttaactacaagggtgaagagaagcaatttgctgcagaagaaatctcttctatggtgctcatcaagatgcgtgagattgctgaggcttaccttggctccacggtgaagaatgctgttgtcactgtccctgcttacttcaatgattctcagcgtcaagctaccaaggatgctggagtcattgctggtcttaatgtgatgcgaattatcaatgagcctactgcagctgccattgcttatggtcttgataagaaggccacaagtgttggtgagaagaatgtgttgatttttgacctttgtggtgggacatttgatgttt

SEQ ID NO: 48670 - DNA, 63 bp, Glycine max
  Clone ID: LIB3139-064-P1-N1-B4
gaggtctacaattttagattttcttttgggaatctctcaaaattttggaagtgctgctaatac

SEQ ID NO: 48671 - DNA, 362 bp, Glycine max
  Clone ID: LIB3139-064-P1-N1-B5
ggctctagccgtgctccttcagaagcgaagaagaagccacagagaaccaggctcctactctctctcacccacaagaaaaatggcatctcacatcgttggatacccccgcatgggtcccaagagagagctcaagttcgctctcgagtctttctgggatggcaagagcagcgccgaggatttgcagaaggtggctgctgatctcaggtcatccatctggaagcagatggctggtgctgggatcaagtacatccccagcaacactttctcgttctatgaccagctgctcgacgccaccgccacccttggtgccgtcccccccaggtacggctggaccggcggcgagattggattcgacacctact

SEQ ID NO: 48672 - DNA, 315 bp, Glycine max
  Clone ID: LIB3139-064-P1-N1-B7
tgccaaacctagttcatgcacttccaaagccccggtctcgaaacgaaccccaaagaaaattccaaggcagactaggaagaaggcaagcagcaataaataagctgaagatgcaagagtaaaaagtacgaaagactaaaaaataatagttgttgcacttggaattatgggaagagtcctaaggatactgttatatggtgctcttcaaccatgtttataagtagtgctattaatgtctgtaccacttgcttatgttattttctcgtcatgtaactccaagatgccttggcctaataaataaaagatacttattctatg

SEQ ID NO: 48673 - DNA, 377 bp, Glycine max
  Clone ID: LIB3139-064-P1-N1-C1
ggaaaccatttaatcattcacccaacaaaatggcgctgcttctgataattcccatctcactggtcaccctctggctcggttacaccctataccagcgattaagattcaagctccctccgggtccacggccctggccggtagtcggaaacctctacgacataaaacccgtccgcttccggtgcttcgcggagtgggcgcagtcttacggccccataatatcggtttggttcggttcgaccctaaacgtcatcgtttcgaactcggagctggcgaaggaggtgctgaaggagcacgatcagctgctggcggaccgccaccggagccggtcggcggcgaagatcagccgcgacgggaaggatctaatttgggccgattat

SEQ ID NO: 48674 - DNA, 294 bp, Glycine max
  Clone ID: LIB3139-064-P1-N1-E1
actagttctagatcgctagctttcgcccttttttttttttttttattggaaaaaaaaaaaaaagaagagggcaaaaaaaaaaaaaaaaaaaacaaaaaacataaaaaaaaaaaaaagttatgcaaataatttaataaacatacacaaccagaaaattaattacctcacctcacatgaagcttatccatcttttaccttaataaaattttttattttttgttgtaaataacaaaataatttcatcttgtccaaaatttgatcttttcattaatttcaaaaaaaattaccaacctt

SEQ ID NO: 48675 - DNA, 395 bp, Glycine max
  Clone ID: LIB3139-064-P1-N1-F4
cagacaactcaaccacaacgacgccatgatgtctatcttcagccacttggagatcgcgcaagcccagaattggaggttttccttgggcacggggcccgtaaaaggagttaattcaaagcccaaaatggaagccacttcttcctccgccgccagaaaagatccgaatccatcatcaaccgctggatccaaacaaaacccgccccgtttgaggcccaggtttgcgccggagttggatgggttacactgctttgaatccatcgtaccctgttagctccaatttcaattcacgactcataaaaatcataggcaattcaattcaatttatttttactgaatagtttaatcagtagttgagaaagctatgtactgtacggacgccagagatcaaattgtgc

SEQ ID NO: 48676 - DNA, 396 bp, Glycine max
  Clone ID: LIB3139-064-P1-N1-G1
ggcaacaaacatatcttttccttttctgcccctaaatggaaggatcaggatccggtgtggttacagtctacggcaacggcgccatcaccgagaccaagaagtcccccttctccgtcaaagtcggcctagcccagatgctccgcggcggcgtcatcatggacgtcgtcgacgccgagcaggcccgcatcgcggaggaggccggtgcctgcgcggtgatggccctggagcgtgtccccgccgacatccgggcccagggcggcgtggcccgcatgagcgatccgcagctcatcaaggatatcaagcgggccgtcaccatccccgtgatggccaaggcccgcatcggccacttcgtcgaagcccagatcctcgaagccatcggcatcgactacgtcgacg

SEQ ID NO: 48677 - DNA, 376 bp, Glycine max
  Clone ID: LIB3139-064-P1-N1-G11
ggaaagcttcccagcctccaagttctgaaactgtcatcgcggacaaatgatactcgttttgacctccactgtgccacgggagggttccttcagctccaagtgtttgagatgatagcaatcaaggtaaaaaattggagacttgacaaaggttcaatgccacgcattcgacgtttagacgttagaagctgcaaatccttgacggagcttccaaaagaactattgtctttgactagcttgcgggaagtgcatgtcttgtgggcatgtactgtattggtaaaaaggctcccaaacttggtggtgaacaatgggtgcaagctcgtggtctatcctcttttaacaaatgatgaattagattttctctaaatcaatgacttat

SEQ ID NO: 48678 - DNA, 275 bp, Glycine max
  unsure at all n locations
  Clone ID: LIB3139-064-P1-N1-G9
tcacataaccattttttttccccccacaccaaacccnnaaggccgcagaataaacaaaaaaggcccgccccacataatcttttcacacacccacccaaatactcctctttttttaccatcacccacatccttcaccctctttccaccctatattctctcacaaattcctccttctctcataccccccaaannnnnnaacataacaacacttcttcaatctatacatcactctccacaaccatacttatcctccataatacatctttaacaccaaa

SEQ ID NO: 48679 - DNA, 394 bp, Glycine max
  Clone ID: LIB3139-064-P1-N1-H1
ggtttttagggttaacaccgtgcagcgacacctccttcccgcagtggcgatggttctcaaaactgaactatgccgattcagtggtgccaagatctaccccggaaagggcatcagatttgttcgtggtgattctcaggttttcctgtttgccaactcaaaatgtaagcggtatttccacaaccgcctgaagccctcaaagctcacctggactgctatgtacagaaagcaacacaaaaaggacattgctcaagaagctgtgaagaagaggagacgcgctgccaaaaagccttactctaggtccattgttggtgccactctggaagttatccagaaaaagagagctgagaagccagaagttcgagatgcagctagggaagctgctcttcgtgaaatt

SEQ ID NO: 48680 - DNA, 385 bp, Glycine max
  unsure at all n locations
  Clone ID: LIB3139-064-P1-N1-H5
gcttgagcttcggctcgaggttgagatagccggcttggcctggcagggtcgtgcacattgcgggcttgatgatgccaaaaatacgggtggcctgttggcncttctcatgcaccggggttttaaattttccattaccaattccataatgtggcagacagctgatcgaccactgatgtggaaacagtcaccagaacaaccaatcgttttccctcattgcccctacaaagcaaaggatatcactacccccgttgttcagtatcaccctttctgcttctgtggggtgaaaagcagcaggggcatggtgaggaagccgggtcccaagcaagggagcctcttctttggatgtggaaattggactgcgactagaggtgctcgctgccattac

SEQ ID NO: 48681 - DNA, 374 bp, Glycine max
  unsure at all n locations
  Clone ID: LIB3139-064-P1-N1-H8
ggttcgagcttgggtaatctgatcgtgctgcatacatcacacaaggaaaggggatcattacttttcaacatttacaaacagataacaaagctacgatgattccacattcctgattccactcacaattcacagttcatagttcatagtccatattcatacaccgnttctttgttctcgctgcctagcatggcatcaacttctctcttcaacttcagactccctctgttcaacttcaacccactgcaccatcgacggataaagaggccaaaatctctgctctcctctcctcgcaacagtccacgcctcgtttcttccattaacgaccatttggcgctcacacgtgtcacatatccgcttctccaatctcactctgc

SEQ ID NO: 48682 - DNA, 353 bp, Glycine max
  Clone ID: LIB3139-065-P1-N1-A12
gaaatcgagcgcatgtcttaatcgaactgttccacccaaaaaccgtagagtcggcatacagtcatcaatatttcagtctcatggcttaatctatttcaccaagaatggtcacttgattttctgccaactctgccaatattgcagcaaacaagttaatagaaggagatagcagcaacagagaagaatcagtaatcatgaagagaagtagcagagcgggtgaaaagaaaacaggaggagccaaagttgcaagactcttgctagtgaatcaagcactagctactctagccttctttggagttggagtgagactggtcctgttcctaaccagagttcttggtcaagacaatgtgaat

SEQ ID NO: 48683 - DNA, 390 bp, Glycine max
  Clone ID: LIB3139-065-P1-N1-A4
ctgggaatgtagcagtttaatttagtgattgggcctcattggtagaaggggttttaacaaacagcaggagggcagagcattttgatgcatgtaagtggacaaaatcagaaccacattcctgggaattgatcttcccaatagaggtatgtggtcctaataatggttttgaaatgtggagttctgagtgggcaaatcaaacttcatggcatttgagtttccttattgacaatcccaaacagtctacagtttttgatattctcttgggaatctctcaagattttgaaattgctggtaatactcttatgccagctttttctgttccacaggctactgtcagatcttctgaaaatgcggaattctctgcatgatctggaatttatgttgtctttc

SEQ ID NO: 48684 - DNA, 399 bp, Glycine max
  Clone ID: LIB3139-065-P1-N1-A5
cagtttgctgtcggactttttgatggtggagttcatgtttttgaacccgttgaatctgaaggcaagtggggtgtgcctcccccgattgagaatgggtcagcaagcaatgtggcagctgcttcagttggaccttctccagatcaagctcaaagatgatccatgtcagccgaagacaagtttcttttacatacttggcttgctggccattttaagaactaaatttgtacttaagttaatgcagggcactctccaattcagttgatccagctaagttaaatccatcaatcgtacatgccaaaagtttggagcaacttctttggttgaagaccaaaatcacattgtaatttgccaatagatgtgaaaaattcttttaaagtttaatgctaagatgatgtacaa

SEQ ID NO: 48685 - DNA, 408 bp, Glycine max
  unsure at all n locations
  Clone ID: LIB3139-065-P1-N1-B1
gcggnnaaaattgacttttcctcccagtggcactttcnnccgaagtgttaagacgaatggcgctctttctattagggggacggagcgtggtgcccaaagaatgctattctcatgnaatatgccaaatgctgttctttcaatgtggagatattttgttggagatctcgtctttgaagtttctaagatgacttctccctacattaaatgtacagtctctttcttcatagcatttggaaatttggctgatgataccatcaattttgaggcttttccccacaagctggtgcagtttggagagattcaggaaaaagttgtattgaaattttcacaagaggaatttcttacagcttggtcaactcaggtgcgtcctgcaacaactctgttggctgatgggtgtccatatttgta

SEQ ID NO: 48686 - DNA, 401 bp, Glycine max
  Clone ID: LIB3139-065-P1-N1-B2
aaacattttgaacatggcttgccactattcttctctcacttgtcgctgggttcaatccaacaacaaccctggctctctctcacacaccctctcgcttccctcattctctcaccaaccgtgtcaaaccctccctcggtgtggtatctgtggccaaaagggtaagtggagtggtgccaaaggccaatttgaatgccttggaggccaattcgggtttccccatttcggctaagaagtccaacaacaaccccattgttgttattgacaactatgacagtttcacctataatctttgccagtatatgggggagttagggtttcactttgaggtctaccgcaatgatgagttgacagtggaggagttaagaaggaaaaatcccagaggagtgctgatatcacctggg

SEQ ID NO: 48687 - DNA, 314 bp, Glycine max
  Clone ID: LIB3139-065-P1-N1-B6
caattaaggcttaaagtgctacaggagagtttgagagaaacttcgaacggtattaatcgcggcacctcagagggaagatgtgttagcaatgggccttctcgacgtcaatccctaggtggagctgataacatctcaaaactaacatctaatgggtttttgaagagatcaccgtccactcaaattaggtcttctgtgtttttaagcacagttttgaagcatgctaatggcacatctaaatcatttgatggttgctcacggtcatttgataggattaattattttttaaggggggggcgggggggttactcattcaa

SEQ ID NO: 48688 - DNA, 395 bp, Glycine max
  Clone ID: LIB3139-065-P1-N1-C1
tcaggttacaattgattggtttatttcctctcaggaatgtgttcgcaggacctattgtgttttaaatccacaaaatccttttgtgttaaataggtggatgggaaaactgactttccctcagggcacttcccgaagtgttaagagaatgcctctttctatagggggaggagctggtgcaaagaatgctattctcatgaatatgccaaatgctgttctttcaatgtggagatattttgttggagatctcgtctttgaagtttctaagatgacttctccctacattaaatgtacagtctctttcttcatagcatttggaaatttggctgatgacaccatcaattttgaggcttttccccacaagctggtgcagtttggagagattcaggaaaaagttg

SEQ ID NO: 48689 - DNA, 399 bp, Glycine max
  Clone ID: LIB3139-065-P1-N1-C4
catgcatactaggcatcaagaagctgcattggggccagcaactcatgataagcaaaccaagaaggtttaccaagttaaaacacgacagccagatacaccagaatatgggaagcaatagtggttgttatggaatttatctgccttgtgtttgaggtgcctattcttttctctgcccgctcctcaaattgcagctatgctctctttgtggtcatccttgtcaagtaattgattgtagaggtgcatgaatttgattgcaattcgatactctaatgccattggcagatcaatgctgtttaaagttttctttgattctaatgtgaagtaaagatctcgcttcgcagtgtcttgaatagacatgataccacattgatagttggccagactttggaaaggtggtag

SEQ ID NO: 48690 - DNA, 262 bp, Glycine max
  Clone ID: LIB3139-065-P1-N1-C6
attcgttcgagcactttgggcaggattttagtgatcctgagactatatgcaggataacctgatggcgggatgttatggaagtcgattattggaattgcaaaggtctgggtccggatattgggcaggtctcttggttgcctgtaatgggctgaggcatgccgatgaagtggatgagataggtccgtggggggggcattaaaggactgagacgccaaaatggccagcaggacgttttacctacagcagactcacctatgggaga

SEQ ID NO: 48691 - DNA, 320 bp, Glycine max
  Clone ID: LIB3139-065-P1-N1-C7
ctagttctagatcgcgagcggccgcccttttttttttttgtgtggtttttttttttttttttttttttttttttttttttttttttttttttttttttttttttttttaccaaaaaaatttaaattttccttttttggggggggaagttttttttttcttggttcccccttttatgatctccttttccgttaaaaaacccctaaatttttctttttttcttcacaaattttctttttttttatgctcttttaaccggtttaaaataaattccaaatcttcttttaggggggaatggggatatatctcttttttttttttt

SEQ ID NO: 48692 - DNA, 394 bp, Glycine max
  Clone ID: LIB3139-065-P1-N1-D1
cactttgctaattttcgttttctgattttcccacataaataaagggctgccttcttcttctcttacactcttctggttcaccaatcaatcaatttccccactattagggtttttcatttgaaatgtggagagccaacaatggagccccttgaatccgaatcggttagctcctccgccaaggacccgctattgggtgaaccatctttctctgttcaccccctcgatcatgatcctcaaccctcagatctgaatcacgttaccccgggtgatgatgcacttggtgaggagcttcaggggaagttagatttgaaggatgagggtgaaagtgataataaaggttcgaacttggaagacgggggtgaaaaattgagcgaggataaaggttcgaacttga

SEQ ID NO: 48693 - DNA, 392 bp, Glycine max
  Clone ID: LIB3139-065-P1-N1-D5
gacggactgacggtggtgtttttcggtggtgacggcggcgccactctcgtcagcgacctaacattgtaaagcgataaatgacatggcgttcagagggaaagagatgttgaagaaagttctgaagacagtgggagagaacggtttgagtcgaagagaaaaggaatcgttggagagatgcttgcctcgaagcaagattgtgatgaaccgcgccaaacgcggtctcttcgccgggaaacacattcagtttgggaaccgtgtcagtgaagatggcggtaacaagtcaaggagaacttggaagcctaatgtccaggaaaagcggctatttagttttattttagattgtcatgttcgtgttaaaattaccacccatgccctacgatgcatagacaagg

SEQ ID NO: 48694 - DNA, 392 bp, Glycine max
  Clone ID: LIB3139-065-P1-N1-D6
caagccttttctttcttagcttttacactttcattctttgcttcagaaaattaactagctaggatggtcagtgttgaagagatccgtaatgcacaacgtgcagagggccctgccactgtcatggctattggcaccgcaactcctccaaactgtgtcgatcagagtacctatcctgactattatttccgcatcaccaacagcgagcacatgaccgagctcaaagaaaaattcaagcgcatgtgtgataagtcaatgattaagaagcgatacatgtacttaaatgaagaaatcctgaaagagaatccgagtgtttgtgcttacatggcaccttcgttggatgcaaggcaagacatggtggttgtcgaggtaccaaagttgggaaaagaggctgc

SEQ ID NO: 48695 - DNA, 394 bp, Glycine max
  Clone ID: LIB3139-065-P1-N1-E1
tgtcattggtgttaagttgactaccataaacaatatgtgtgcatatgggctcaatcctggtatttcaggttctcgtcttttgggcaccattcctcagtccatttcacagcaaactgtttggaatcaaatggcaacagtgagaacaccattgaattttgattctagcaagcagagcttttgtcaattttctattgaccttctcggtggaggaattttagtggacaaaactggagattggatcacacttatacaaaattctccaattagtaacttgttgagagttgctgcttggaagaaaggttgtttaatggtcaagattgtgatgtctgggaatgcagcagtcaaaaggagtgattgggcctcattggtacaagtgtttttaacaaacagcaac

SEQ ID NO: 48696 - DNA, 393 bp, Glycine max
  Clone ID: LIB3139-065-P1-N1-E2
gcgatgggtttgaacttcaatttagtggaacactttgctagccatgatagcgccatcgaggagacaatgcaaatccatgcagtgcagttgccaccacaccagaccacactccacaaactcaggcacagagtctccgaaatcttcttcccagatgaccctctccaccgtttcaagaaccaaactcgctttaaaaagttcctcctcgcacttcagtatctcttccccattttcgactgggccccaaactacaatcttacccttcttcgctctgacctcatctctggcctcaccattgccaggctcgccattcctcagggaatcagttatgccaagcttgccaacttgccacctattcttggattatattcgagttttgttcccccattgatatac

SEQ ID NO: 48697 - DNA, 395 bp, Glycine max
  Clone ID: LIB3139-065-P1-N1-E5
cacacctgctgttggcttgttgttcaagaatggcaatttgtaagaaagatgtttggagagttgaatgtggaatcccttctggatttccgctcacagttatttgtaatagcatttttaatgagatgctcattagatatagctatgaaaaattactgcgccaggctaaagctccaagtatgtttttacaatccttcaaaaattttgtttctttgtgtgtgtatggtgatgataacttaattagtgttcatgaatatgtcaagccttactttagtggttctaaattgaaaagctttctagctggtcataatatcaccattactgatggtattgacaaaactagtgcaactttgcaatttagaaagttagcagattgtgattttctcaagagaaacttt

SEQ ID NO: 48698 - DNA, 321 bp, Glycine max
  Clone ID: LIB3139-065-P1-N1-E6
ctagaatataaattcacgagagaaacacgaaaatctttcgattccggcgagaaaaaaacttggacggtgaaattggaaggttttccgggatcccaaggccgaatcttggttcaatttacgaaaagagaagagagaggaacaacaacacccgttgttgaatcttcaagctgaatcaaatcatatagagagagaaagagagagacccggataggaaaatagcgtttagagagagaaaggtgaagtgagttgtttaaagtttgggtcttggtgggtgaaagggaaagatgacggttgcggggctgcatatatactttgttactt

SEQ ID NO: 48699 - DNA, 152 bp, Glycine max
  unsure at all n locations
  Clone ID: LIB3139-065-P1-N1-F1
gggaaagttnttgaaaagcattacattttctgattttatgtttgggctggctggtttgaacaagttggttaggaatatgcacttaaagaatatgcaaccttgtatttgtacttgaatttattcataatgataagactttagtgttttgattt

SEQ ID NO: 48700 - DNA, 395 bp, Glycine max
  Clone ID: LIB3139-065-P1-N1-F4
aaacaatatgtgtgcatatgggctcaatcctggtatttcaggtggtcgggttttgggcaccattcctcagtccatttcacagcaaactgtttggaatcaaatggcaacagtgagaacaccattgaattttgattctagcaagcagagcttttgtcaattttctattgaccttctcggtggaggaattttagtggacaaaactggagattggatcacacttatacaaaattctccaattagtaacttgttgagagttgctgcttggaagaaaggttgtttaatggtcaagattgtgatgtctgggaatgcatcagtcaaaaggagtgattgggcctcattggtacaagtgtttttaacaaacagcaacagtacagagcattttgatgcatgtaagt

SEQ ID NO: 48701 - DNA, 140 bp, Glycine max
  Clone ID: LIB3139-065-P1-N1-F5
cgaaaactaggcggtttatattataacataccgattaaaacctgcgtcgctttttttatagctggcgcccgcactttaataataaatagcaacattaccaatacaatcatacacctacttcaatattactctaatatccc

SEQ ID NO: 48702 - DNA, 136 bp, Glycine max
  Clone ID: LIB3139-065-P1-N1-F6
tgccaccccaatgcatgttgtttaggttacaattgattggtttattccgtctcatgaatgtgttcccagcgcctattgtgttttaaatccacaaaatccttttgtgctaaataggttgaaagcaacaacttatttc

SEQ ID NO: 48703 - DNA, 394 bp, Glycine max
  Clone ID: LIB3139-065-P1-N1-G1
gcgcgagcaagcatcccaaaaccctagctcgcgttctgctttcgtcttgtacatcaggatggagtctcaggtgaagcacgcacttgttgtcaaagttatgggtcgtactggatccagaggacaagtaacccaggttagagtgaaatttttggatgatcagaaccgtcacatcatgaggaatgtgaaaggacctgtgcgagaaggagacattctcaccctactcgagtctgaaagggaagcaagaagattgcgctagatggtttcttttggcttgcctccaaattcgaacaaaacagtgtgattttgttgattttaatggtaggttggtgatgtcaaaggttttagcaccctatcttattgtctgtctttggtctatttttattcgaattatggc

SEQ ID NO: 48704 - DNA, 395 bp, Glycine max
  Clone ID: LIB3139-065-P1-N1-G2
tgtcattggtgttaagttgacaaccataaacaatatgtgtgcatatgggctcaatcctggtatttcaggttctcgtcttttgggcaccattcctcagtccatttcacagcaaactgtttggaatcaaatggcaacagtgagaacaccattgaattttgattctagcaagcagagcttttgtcaattttctattgaccttctcggtggaggaattttagtggacaaaactggagattggatcacacttatacaaaattctccaattagtaacttgttgagagttgctgcttggaagaaaggttgtttaatggtcaagattgtgatgtctgggaatgcagcagtcaaaaggagtgattgggcctcattggtacaagtgtttttaacaaacagcaaca

SEQ ID NO: 48705 - DNA, 396 bp, Glycine max
  Clone ID: LIB3139-065-P1-N1-H1
cttccacatggcgctcggatctacaacaaactcatggacttcattcggaatcagtacagggacagaggctatcaagaggtcatatctccaaatgtatttaacatggatctatgggtgcaatctggtcatgctgcaaattatagggaggatatgtttatcttagaggttgacaaacaagagtttgggttgaaaccaatgaattgcccagggcactgcctgatgtttaaacacagggttcgatcatatagagaacttcctcttcgctttgctgattttggggttttgcatcggaatgaggctagtggtgccctgagtggattaacacgtgttaggagatttcagcaggatgatgcacatattttctgcagggagtcccagataaaggatgaagtgagg

SEQ ID NO: 48706 - DNA, 400 bp, Glycine max
  Clone ID: LIB3139-065-P1-N1-H3
ttcgagcttacattgccactttaattccctggtttggttaacccacattggggagactatattatattggagcatatatcatgggtctgaagtttacacatggagtggtgatattaattgttataagtgcttcaatgttttcagtgagcatggccaacaaggattggtcctttggtttcaactacactgattggtggtctagatttgggaatcatcctcaaaacaaaacacagcaacaacccaggcaaattctcgtgggtggctcagagcattggcactacggtttcaactacaccgattgggccttcaagactgccccattttacctcaatgatactctagttttcaaatatgatgctccaaatgccaccagtttcccacacagtgtgtacatgttcaa

SEQ ID NO: 48707 - DNA, 132 bp, Glycine max
  unsure at all n locations
  Clone ID: LIB3139-066-P1-N1-A2
tgttcgagtttgttatatcgccttgtatcgctcgttccatggtggtggcttctaaagtggttgtgcggaataagnaagccactataaacggttttttaacggtgtgcacttttcaatcatttttcatgtttt

SEQ ID NO: 48708 - DNA, 321 bp, Glycine max
  Clone ID: LIB3139-066-P1-N1-A4
tggggattataacttaattagtgttcatgaatatgtcaagccttactttagtggttctaaattgaaaagctttctagctagtcataatatcaccattactgatggtattgacaaaactagtgcaactttgcaatttagaaagttagcagattgtgattttctcaagagaaactttaagcagatgtctaatgttttgtgggtggctcctgaggacaaggcgagtttatggtcacaacttcattatgtttcgtgtaataatctggaaatgcaagaagcttatcttgtcaatctcgtaaatgtgttacgagaattgtatttgca

SEQ ID NO: 48709 - DNA, 293 bp, Glycine max
  Clone ID: LIB3139-066-P1-N1-A5
ctgcgaattatttaatactgcttgcacaaaagcaatggctatgtcatttaatccagacgggtgttctgatgcatggagtttggaatttctgaagcgtaccggatttcattgtgatatcatttgtgtgactggatggactgtcaccccaatgcaggatgttcaggttacaattgattggtatatttgctatcaggaatgtgttcccaggacctattgcggtttaaacacacaaaatacttttgtgttaaataggtggatgggaacactgactgttccttagggcactttccgaa

SEQ ID NO: 48710 - DNA, 249 bp, Glycine max
  unsure at all n locations
  Clone ID: LIB3139-066-P1-N1-A7
tcggttctaggtttgatctgaaaacttctcaatctaaaattgcagcgtgccaagaacacagttggaggaaccattctgcgtagngatctattggcaaattttttgacagagggcaattttagagcaagtgttgatttgcagcgcactcatcgtattagaggaatgattaaaatggtggccacagttggtatttctgagaatacaggtatattattggcctgtgctatgaataagtttttttagggggcg

SEQ ID NO: 48711 - DNA, 191 bp, Glycine max
  Clone ID: LIB3139-066-P1-N1-B12
ttgacttacaacacagattaatgacccttgattgaagaaattttagatgtaataattattggcattgatgacaacgtagcaaatttctgccttatgttcgctattaaaaaataattgatgaaacagtttatctatttctttttgtacactgccttctctttggactctaaccctttgtttggttagagaag

SEQ ID NO: 48712 - DNA, 145 bp, Glycine max
  unsure at all n locations
  Clone ID: LIB3139-066-P1-N1-B2
tgccagtttcnatgatgccacagcagatgcttcctaggggacgtgtctatcgttatcctcctggtaggggtattcctgatgttcctatacctggggttgctggaggtatgttttctgttccatatgatgtgggtgggatgccgct

SEQ ID NO: 48713 - DNA, 337 bp, Glycine max
  unsure at all n locations
  Clone ID: LIB3139-066-P1-N1-C5
tcgagagaaagatctattctgaaggctcctttccgttatttccattcagcggattccatggttggcgacgagggcgtgcacggcaatggcggcggtggaccgttgcccgcccttgactttgacggaatacctccaacttggtgtgcgggacaatcaacacgcttccccgcttctggcaggggatcgcattttccacctttcctcgccatcctctacnggaatcgtcgcccgccgtcgctctcgttcaattagtgcgaatacaattgagagtgccggaatatggttggaccacgcagaaggtctttcactttctcaatttcattgtgaatggggttag

SEQ ID NO: 48714 - DNA, 356 bp, Glycine max
  Clone ID: LIB3139-066-P1-N1-D5
tctgcatttacatgttcaccaccacctccttgttcttcacatcatcctcatcatcttctggaatcagttgactcttcgttcctccctctattctttcggatggagcccatggacatcgttgggaaggccaaggaagacgcttctcttcctaaagcgacaatgacgaaaattattaaagagatgttgcccccggacgtgcgtgtcgccagagatgcacaggatttattgatcgagtgttgtgtcgagtttataaaccttgtctcgtcagagtccaatgaagtctgtaacaaagaagaaagaaggacgattgcaccggagcacgtgttaaaagctttaggggttcttggatttggcga

SEQ ID NO: 48715 - DNA, 153 bp, Glycine max
  Clone ID: LIB3139-066-P1-N1-E3
gggcacaaaggttttagagcttgatagtagaaatgtaaaagcactctatcggagggcacaggcatatcttcatcttgtggacttagatctagctgagaggatattaagaaagcccttggattgagccaacaacaggttgaagaggagtcaaaa

SEQ ID NO: 48716 - DNA, 384 bp, Glycine max
  Clone ID: LIB3139-066-P1-N1-F11
ctcgagccgaatcggctcgagattatgctagttttgatggtttgattaccaagcaagttatgagcaaaatggcagaaatgataaacagtctttgtggtggtgatgaaaaattgatgcgtgaaaggacacacctgctgttggcttgttgttcaaggatggcaatttgtaagaaagatgtttggagagttgaatgtggaatcccttctggatttccgctcacagttatttgcaatagcattttcaatgagatgctcattagatatagctatgaaaaattactgcgccaggcaaaagctccaagtatgtttctacaatccttcaaaaattttgtttctttgtgtgtgtatggtgatgataacttaattagggttcatgaatatgtta

SEQ ID NO: 48717 - DNA, 320 bp, Glycine max
  unsure at all n locations
  Clone ID: LIB3139-066-P1-N1-F3
agaactattaattcgtgaatgatgatcaactacctgaaattggtttgtaaattttcaattttatgtgcatatttggttatgttttggttaaaccctttcatcatttttgttttataattagaaagttcctctttaatatattgcttctaatactcttagatntctttactcctgtgacatttctgaatctaatggaagggtttgtgctctatcaaattattgctctaaaccttgtctatttgagctttatattgggggggtgaacatgagggttatatttgttggggatgggagattttattgagtaaatgtacttcttt

SEQ ID NO: 48718 - DNA, 301 bp, Glycine max
  Clone ID: LIB3139-066-P1-N1-F6
tgtggaggtgttgtttctcccgccactcagcacttcgctcccgctgtgcttcaccaaccatggcgcgaaatcgaagctaccgttccagatccctctcaaatcgacgtcaaacttttcaaccgctggagcttcgacgacgttgaggttactgatatgtctctggctgattacattggagtgtccccgtcaaagcatgctacatatgttcctcacactgctggtaggtactcagtgaagaggttcaggaaggcgcagtgccccattgttgagagactaaccaactatcttatgatgcacggaa

SEQ ID NO: 48719 - DNA, 260 bp, Glycine max
  Clone ID: LIB3139-066-P1-N1-F7
ggctgcttattatgttagtcaggtggatgcttcaacagctgatgttccagctaatagttatgacactaaggttggtgatgatagttctgggctccttttggaagctcaaagaaaggaggtaactatttgtcacactgaggaagccttggtgattaaaaatcatgaagatcatcatttacaaactgattcagaagaggttgtatcttgtatgaagagacagagtgtcttcaaaagttgtttggaattaaatgagtttactc

SEQ ID NO: 48720 - DNA, 276 bp, Glycine max
  Clone ID: LIB3139-066-P1-N1-G11
ctgttattgtttcgttcccgaaatctttgctctgctttttggagggttttgaaaacatttgaagaatttatttgggctcacttcacagcaataacacaatcccgccctcagcctctcttgttctcagcttcaattcgttttcaattcttgccgcatcgattcccaaccctaatcttctaccatgactgagtactgggtcagccagggcaacaaatggtgcgacttttgcaaaatttatatatcaaacaaccctggaagcatcaggaatcatgagct

SEQ ID NO: 48721 - DNA, 380 bp, Glycine max
  Clone ID: LIB3139-066-P1-N1-G12
tttctcgaggatttgatattttaataaaccgcgatcacaggttgccgcaccttaaaaccggaaacaaaagcaatcgttacttgatttcaagaatttctcaatttcttcctacttctttgtgtacgatttcttaagggaaagaaaatcactctctgtgctggtcacagacttcgtgaatcattttcttttccactcctagtttatttgctgaacactctcctatttgatataggacttcgtgtcagatttaaactttttctgtttctttctcagttctctgtttaatttcaagttcaagctggtgaaattttggattagtgctcccactctcctatcttgtataggacttcgtgggtagacctttctacttctcttctttc

SEQ ID NO: 48722 - DNA, 364 bp, Glycine max
  Clone ID: LIB3139-066-P1-N1-G3
gttgtttccttgttctctgaaactgatggctgattattcagcaggaactgaatcccaggaggtggtcgtaaatgtaaccaagaacacctccgaaacaatccaacgctcagactcccttgtctctgttcctttcttgcagaagttggtagctgaggcggtgggaacatatttcctgatatttgcagggtgtgcttcattggtggtgaacgagaactactacaacatgataacatttcctgggatagcaattgtttggggtctggttctgacggtgttggtttacactgtcggtcacatctctggtggccatttcaatcctgctgtcaccattgcttttgcctccaccagaagatttcccttgatc

SEQ ID NO: 48723 - DNA, 377 bp, Glycine max
  Clone ID: LIB3139-066-P1-N1-G6
ttgtatctcgtttttgaagcttctaagatgacttctccctacattaaatgtacagtctctttcttcatagcatttggaaatttggctgatgacaccatcaattttgaggcttttccccacaagctggtgcagtttggagagattcaggaaaaagttgtgttgaaattttcacaagaggaatttcttacagcttggtcaactcatgtgcgtcccgcaacgactctgttggctgatgggtgcccatatttgtatgctatggtgcatgatagttcagtgtctacaataccaggtgattttgtcattggtgttaagttgacaaccataaacaatatgtgtgcatatgggctcaatcctggtatttcaggtctcgcttttgg

SEQ ID NO: 48724 - DNA, 138 bp, Glycine max
  Clone ID: LIB3139-066-P1-N1-G7
tttgaggttgcattttgtgacgagaactgcttgaggatccggctatcactagcgctatagatgaagagactgagtttaatgccttggtggaggaagaagctgcgctccttgattcactcttgggtaaaagataacccc

SEQ ID NO: 48725 - DNA, 345 bp, Glycine max
  Clone ID: LIB3139-066-P1-N1-H11
tttctcgagggttaactagtcgttctgatcttcctaaaagttgagctggcttttcttcttttcctggagttgttgccaaccaaattattcctctcttcacttactactactttcttctttctttctccacctgaagtagttctccacaacttggaaggtgatcatctccaattttccatcatggctactgagacttctgcatctgatcatgcttctactactgatgagcattatgtgaagaaggaaaaggacgagtccattgcacaaaagatcgcttctttagcaaatgaagatgaagtcaaacatgacaatactccttcatctaagacagaagaagatgtggtg

SEQ ID NO: 48726 - DNA, 356 bp, Glycine max
  Clone ID: LIB3139-066-P1-N1-H12
cgatttcaagaaaggaggatggtcaccagaggaagacatgcttttatgtgaggctcaaaaaatatttggtaacaggtggacagaaatagcaaaggtggtttcaggcagaacggataacgctgtgaaaaaccgtttctgcacattgtgcaaaaagagagcaaaatatgaagccttagtaaaagagaacagcacttcatacatcaattcaaataacaaaaggatttttctccagcacgggtgtgatacaaatgtagcatcagaaactgcaattaagaagatgaggaggtcacatatccctgatgccgcagagaaaatcaactttgggagacagatcacataaacaaaatggggattca

SEQ ID NO: 48727 - DNA, 376 bp, Glycine max
  Clone ID: LIB3139-066-P1-N1-H2
tcgacgatgcataatctaatactcaaactaggctcttgcttgctagatcacgtatcactcgggaggaccaccctttgagtcttgtcaagaccagcatatggaatcagttcttccaggacacagagatcatagaccagattgaccgagatgtcaatcgtactcatccagatatacacttcttctctggtgattctctttttgcaaaatctaatcaagaggctttaaagaccatattaattgtttttgcaaagttgaactcgggtataagatattttcaagggatgaatgaagaattggctcctctcttctatgtggtcaaaaatgaccctgacgaggaaaatgaaacctttgctgaagcaaacacattcttttggtt

SEQ ID NO: 48728 - DNA, 222 bp, Glycine max
  unsure at all n locations
  Clone ID: LIB3139-066-P1-N1-H7
ctcgagcctttcgagcggctcgagcggctcgaggagtgggaaaagttgatgggatggcgttatctaacaagttgcatgcatttgttgaatatggatctgttgagctggctgagagagctgacgctgagccgaatgatgagggaaactggcggagttgccttcggattcccctgatgcttaaacacaggnctaaacctgctcaaggacggcgaaagaagggac

SEQ ID NO: 48729 - DNA, 273 bp, Glycine max
  Clone ID: LIB3139-066-P1-N1-H8
caaagagcatgaaaatgagatacgaggaactgttgggcttgtttttcaaccagcaggggaaggaggtggaggggctaagaaaattttagatgctggagtcttggaaaacatctctgccatattcggattgcatattgcacctacctatcctataggtgaagtggcctctaggtcgggtcccatatttgcaggaagcggcttctttgaagcaacaataaatggcaggggaggccatgctgctatccctcagcactctatagacccaatattggc

SEQ ID NO: 48730 - DNA, 353 bp, Glycine max
  Clone ID: LIB3139-066-P1-N1-H9
attccgggaaccagtgttgaagaggcttacaacaagctaatagttgaacttgagaaaagtgttcctacattggttggcattgaatgtcccaaggatgagaaacttcctcgtcgcaaaatttttgacaaacctaagacgcgctgcttcactattctccctatggagtttaatcttgtggttcgtcagaagtttttaaattttgtgaggttcattatgaagaaaagggacaagcttagttgtcaagttggaatcaacccatactccatggaatggactggtttggccaatagattactgggtaagggcaacgatattctgtgttgcgattatgctagttttgatggtttgattac

SEQ ID NO: 48731 - DNA, 277 bp, Glycine max
  unsure at all n locations
  Clone ID: LIB3139-067-P1-N1-A2
ttttgatattctcttgggaatctctcaagattttgaaattgctggtaatactcttatgccagctttttctgttccacaggctactgccagatcttctgaaaatgcggaatcctctgcatgatctggaattcgtgttttctttcctttattgaattaaacaaacgaacaagcgaaagaaaattaggcatgaccctcttgttgagtatgctctgcctatctgaaaatttccacacctcttttaattgtcgtaatgatgtgtgaagtgtgtgttnttttt

SEQ ID NO: 48732 - DNA, 194 bp, Glycine max
  Clone ID: LIB3139-067-P1-N1-A5
gcgaatctgatttaagtaacttagtttatcttcaagctgtagtcaaagaaacttttagattgtacgctccaggtcccctttaatcacctcgtgaattcgcagaggattgcactttaggtggctaccatgtcaaaaagggaactcgtctaattacaaatatttggaagattcacacggatcctaatgtttggtca

SEQ ID NO: 48733 - DNA, 75 bp, Glycine max
  Clone ID: LIB3139-067-P1-N1-A6.R1
tttgtttttgtttttttttttttttttttttttttttttttttttcttccttattgttttatctgtctatttcta

SEQ ID NO: 48734 - DNA, 81 bp, Glycine max
  Clone ID: LIB3139-067-P1-N1-B9
ttttaattgtcgtaatgatgtgtgaagtgtgtgttattttaaaagaggtgtggaaattttcagataggttctagatcgcga

SEQ ID NO: 48735 - DNA, 270 bp, Glycine max
  Clone ID: LIB3139-067-P1-N1-C5
ttggagtccgcacagcactggggaaaggtaggaaaatggtttttcttactagagtggatccttttccagtagcttaactggctgttctttttggtgttaagaatgaaattctgagttctaacgccactaatcctatgctgacgcgacttcttgaaaactgtaagagtctcaaatatctggttgatgaggtgtccttttgcatttgtgaactagtatgtatattttattcacttaaaataaagcgcattactatgtgcaatgagtgtgttt

SEQ ID NO: 48736 - DNA, 284 bp, Glycine max
  Clone ID: LIB3139-067-P1-N1-C6
ggtaaaaacaaaactaaatttattataaaaaaaaaaaaaaaaaaaactagagggggtcactatggcggtggctgggcgtgactgatcttcttgaccttaaaattgtcctgctccgttctcccgccactaaccccctgctgtctcggcttcttgattcctgtcagggtctcatatttctgtttgctgtgccctccttaagctccgtgtcctttcatgtaatccctcattctctgaaataaatttctttactatatgccgtggggtcctttatgtgtgaattattt

SEQ ID NO: 48737 - DNA, 428 bp, Glycine max
  Clone ID: LIB3139-067-P1-N1-E4
gtgagaacaccattgaattttgattctagcaagcagagcttttgtcaattttctatcgaccttctcggtggaggaattttagtggacaaaactggagattggatcacacttatacaaaattctccaattagtaacttgttgagagttgctgcttggaagaaaggctgtttaatggtcaagattgtgatgtctgggaatgcagcagtcaaaaggagtgattgggcctcattggtacaagtgtttttaacaaacagcaacagtacagagcattttgatgcatgtaagtggacaaaatcagaaccacattcctgggaattgatcttcccaatagaggtatgtggtcctaataatggttttgaaatgtggagttctgagtgggcaaatcaaacttcatggcatttgagtttccttattgacaatcccaaaca

SEQ ID NO: 48738 - DNA, 412 bp, Glycine max
  Clone ID: LIB3139-067-P1-N1-E5
ccacactggactcacttttttacaaccctttcaatattttattataccgaacaaaaattcttcactcactcttaattccttatggcatcatccgagaacgtagccagcattgagccatgtatgcttcgtccccctgtcaccgattcatggctcgcagagttcttcgctcgtgacgccgatgccttaaccaaggctcttcagaagtctctctccggtactgtcttgccggacgaggaaaactacttttctccctttctgcccaagtcagaccccgccgtcgccacccccaccgtctccagcctttccggctccgatcaggactcggcgccgcgccgccgcgcgccgtttccgccgtccgggaagatctccaagaggaagtcccgcgcctcgtagcgctcgcagacgacgttca

SEQ ID NO: 48739 - DNA, 395 bp, Glycine max
  Clone ID: LIB3139-067-P1-N1-E6
cgacagcttctgaaggtaattgacttacaggtggtagtggacgtggtggtttacccaccactgcttggattagttctgcagttaacaatcgctcctcagacatcaacaaaaggattcgcacagcacttgggaaaggtaagaaaattgtttttcttactagagttgatccttttccagtagctttattggctgttctttttggcgttaagaatgaaattctgagttctaacgccactaaccctatgctgactcgacttcttgagaactgtaagagtctcaaatatctggttgatgagtgtccttttgcatgtgtgaactagtatgtaatattttattcacttaaataaagcgcattactatgtgcaatgagtgtgtttaaatattaaaaaaaaata

SEQ ID NO: 48740 - DNA, 409 bp, Glycine max
  Clone ID: LIB3139-067-P1-N1-G5
ctggtcaactgtagggaaggccggaaaaccctcatcaagaatggtttggctaaaaggcttggataaggaaggatttgtgtggtacacaaactatgaaagtcgaaaggcacgtgaattatctgaaaatccacgtgcatcacttcttttttactgggatggtttaaaccggcaggtacgggtggaagggcctgttcagaaagtctctgatgaggaatcagaacagtatttccatagccgccctagaggtagtcagattggagcaatagtcagcaagcagagtactgtagtgccgggtaggcatgttctttatcaggagtacaaagagctggaagaaaaatactctgatggaagtttaatccctaaacctaagaactggggtggatataggctaacaccacaacttttcgag

SEQ ID NO: 48741 - DNA, 347 bp, Glycine max
  Clone ID: LIB3139-067-P1-N1-H12
taataatggttttgaaatgtggagttctgagtgggcaaatcaaacttcatggcatttgagtttccttattgacaatcccaaacagtccacagtttttgatattctcttgggaatctctcaagattttgaaattgctggtaatactcttatgccagctttttctgttccacaggctactgccaggtcttctgaaaatgcggaatcctctgcatgatctggaatttgtgttttctttcattcaataaaggaaattgggcatgaccctcttgttgagtatgctctgcctatttgaaaatttccacacctcttttaattgtcgtaatgatgtgtgaagtgtgtgttatttt

SEQ ID NO: 48742 - DNA, 376 bp, Glycine max
  Clone ID: LIB3139-067-P1-N1-H2
ttcaccacatttcatttacacaaatcatcaatggcctctcttgtatcctcaagtgttcttttacacctctttctcataatttccgcgctccatttgggcgcagcagcaagaattctgagtgaaaaggaccaacaacaacaattgcagttccaataccacaaaggccctcttctcagtggcaaaatctccgtcaatctcatctggtacggtaacttcaagccttcccagcgagccatcatctccgatttcatcacctccctttcatctcacaaatccacagcccaaccattcgtcgccacgtggtggaaaggtacccaaaaatactaccaactcataaagtcattaccaaaactcaccctcactctcggtacccaaa

SEQ ID NO: 48743 - DNA, 415 bp, Glycine max
  Clone ID: LIB3139-067-P1-N1-H6
tggagcaaagcccatcttttctgtctcaatgacctctcctttaattcttttttccttagttttttttctgaacaaaattcatcttgctgcagctatagcagcttcaacaagctgagtgaaacaaaacaaacaaacacttgtttgtaaaattgaataaagggaatattttcaacagattcttcccttttctttggctaccttcaatgtcaaacatcacaagttgtgatagtgggagcttctctacagagaataccagagaagatgcagcagttaaacaacagcaatctgagatgcttggtcagttccacagtccacattctcacacttcaactacaacaacaaataatagcaatggttccaacacaaattcacaaccacctgcacctgttaagaagaaaaggagcctaccaggaaa

SEQ ID NO: 48744 - DNA, 380 bp, Glycine max
  Clone ID: LIB3139-068-P1-N1-B3
ctaaccactttgcttcagctatggagtttcgttgccttccattggttttctctctcaatctgatcctgatgacagctcatgctgccatacctccagaagtttactgggaaaggatgcttccaaataccccaatgcccaaagcaatcatagactttctaaaccttgatcaacttcctctttggtatggtgctaaggaaacccaatctacagatcaaatattcctgtatgatgctaagaaaacccaatcaacagatcaagttcctcctatcttttatggtgataagaaaacccaatcaacagatgaagttcctcctatcttttatggtgctaagaaaactcaatcaatagatggagttcctcctatcttttatggtgctaag

SEQ ID NO: 48745 - DNA, 256 bp, Glycine max
  Clone ID: LIB3139-068-P1-N1-D2
gggaatttctcaggattttgaaattgctggtaatactcttatgccagctttttctgttccacaggctactgccagatcttctgaaaatgcggaatcctctgcatgatctggaatttgtgttttctttcgcttgttcgtttgtttaattcaataaaggaaattaggcatgaccctcttgttgagtatgctctgcctatttgaaaatttccacacctcttttaattgtcgtaatgatgtgtgaagtgtgtgttatttt

SEQ ID NO: 48746 - DNA, 108 bp, Glycine max
  Clone ID: LIB3139-068-P1-N1-F9
caataaaggaaattaggcatgaccctcttgttgagtatgctctgcctatctgaaaatttccacacctcttttaattgtcgtaatgatgtgtgaagtgtgtgttatttt

SEQ ID NO: 48747 - DNA, 322 bp, Glycine max
  Clone ID: LIB3139-068-P1-N1-G8
gttctagatcgcgagcggccgccctttttttttttttttttaaaataacacacactggacacgtcattacgacaattaaaagaggtgtggaaattttcaaataggcagagcatactcaacaagagggtcatgcccaatttcctttattgaattaaacgaacgaacaagcgaaagaaaacataaattccagatcatgcagaggattccgcattttcagaagatctggcagtagcctgtggaacagaaaaagctggcataagagtattaccagcaatttcaaaatcttgagagattcccaagagaatatcaaaaactgtaaact

SEQ ID NO: 48748 - DNA, 217 bp, Glycine max
  Clone ID: LIB3139-069-P1-N1-A2
cggtttaagctcacttaccctatgctgacgcgacttgttgagaactgtaagagtctcaaatatctggttgatgagtgtccttttgcatttgtgaactagtatgtaatattttattcacttaaataaagcgcattactatgtgcaatgagtgtgtttaaatatgaaaccgataaacaataaataacaattaattgaatatcaggatgaaaaaaataat

SEQ ID NO: 48749 - DNA, 74 bp, Glycine max
  Clone ID: LIB3139-069-P1-N1-B12
aaaaaaaaaaaaaaaaaaaaaaaaaaaaaaaaaagaaaaaaaaaaaaaaaaaaaagaaaaaaaaaaaaaaaaaa

SEQ ID NO: 48750 - DNA, 231 bp, Glycine max
  Clone ID: LIB3139-069-P1-N1-B4
ttatttttcttcgtagtgatctatcaccggagcggttgacagatggcaaggtgggagcaactctttccacctttttaatcattcctttaatactattagtgctctgcaaatcaacacttgttctaatatgtgttccactattggtattcattgaaacacatgtattgcattggcctttgctatgaatagttcttttatttggctcgctcaatcctgatatttactccattt

SEQ ID NO: 48751 - DNA, 359 bp, Glycine max
  Clone ID: LIB3139-069-P1-N1-B7
ccaagttttctttgaagaaggattaaggcctggcacaaaattggatgctcacttcaagaaaagagaaaatgtaaccccattgttgcctcgccaaattgcacaacatataccgttgtcatcagcaaagataaaagaaatagttgagatgctttttgtgaacccagagccagagaatgttaagattctagaggaaaccattagtatgtgtgaagtgcctgcaataactggagaagaaagatattgtgcaacttcattagagtccatggtagattttgtcacttctaagcttgggaagaatgctcgagttatttctacagaagcagaaaaggaaagtaagtcccaaaaattctcggtgaaag

SEQ ID NO: 48752 - DNA, 108 bp, Glycine max; identical to SEQ ID NO: 48746
  Clone ID: LIB3139-069-P1-N1-C12

SEQ ID NO: 48753 - DNA, 213 bp, Glycine max
  unsure at all n locations
  Clone ID: LIB3139-069-P1-N1-D5
atggacgacgccttctnctctacccctacttcttctgccccttccgatcccccctacgacgttcccctatacctggtgccccttcccgtgccaacctatttcactcggcggcttccccctacctgctgggcccccgatgaaacccttgccctcatagacgcctaccgggacaagtggtacttccttaggcgcggtaaccttaaagccacccac

SEQ ID NO: 48754 - DNA, 150 bp, Glycine max
  Clone ID: LIB3139-069-P1-N1-F4
gaaatggaactgaatagatcaaggtttgctgggacaactggacaagtgtgttttgattagataaaaagaacgtccaaaaataaaaattcattgtatatgtataatcgctttttaaaaaattatcagaagtcatttttatttttgcacatt

SEQ ID NO: 48755 - DNA, 359 bp, Glycine max
  Clone ID: LIB3139-069-P1-N1-H12
gtggaggcaaaacgagatgatgatcggtgcagatccaagtatggcaagtactggaaactatattgcgacaaggtaccttacagaatcattccaggaatatactgaagaatgattatcgaaaacggcttatctggagtcccccaacttaaaattaaaaaccaaggacgccatctgtagctttatattgtttggtgcctccttaagacacgtggtagattagactttcgctgagagctaattattgaattattgaaccggattttttaagctaatgtcgagacttgatttcggctccagctgtgttaatctctttatctatgacttgtgagaaaagtgcatggtttacgggctggtgttac

SEQ ID NO: 48756 - DNA, 358 bp, Glycine max
  Clone ID: LIB3139-069-P1-N1-H5
gttgcgctcgagacggatatgctaatggggtcttatcagttactcgagcactatgggactgggacatgaagttacctaagggtgctccctcacctttgattgcagagcctgagtttcggcaagtggttctaacagatgatgatgaattcctcatcattggatgcgacggcatctgggatgtgatgtcaagtcagcatgctgttagccttgttcggaaaggcctgaggcggcacgatgacccagagaaatgcgccagggacctggttatggaggcattacgtctcaacacattcgacaatctcactgtgatcattgtatgtttctcttcccttgaccacgcggagccagagccatcccc

SEQ ID NO: 48757 - DNA, 372 bp, Glycine max
  Clone ID: LIB3139-069-P1-N1-H6
gtgcaggcttaacgacatgacaaagcgggttactgcctgttcaagctaccatctctctctctctttcttagtgcctccttgccagaagttaaaatggcccaagaaactttcctattcacatctgaatcagtgaacgaggggcaccctgacaagctctgtgaccagatctccgatgctgtgctcgatgcatgctcggagcaagaccctgacagcaaggttgcctgtgaaacctgcaccaagaccaacatggtgatggttttcggagagatcacaaccaaggccaacgtggactatgagaagattgtgcgtgacacatgcaggaacattggttttgtctctgatgatgttggtcttgatgctgacaactgcaag

SEQ ID NO: 48758 - DNA, 347 bp, Glycine max
  unsure at all n locations
  Clone ID: LIB3139-070-P1-N1-A2
catgaaaggacaaatgcagaggcctttgcaagggggaagcaaaaactgactggaggctagcaactactgatacatgacctgaatgatgggaagcatttgaaactatgattccaaatctaaagtttgaggttcctcgagttgatgttaactgaagctggtttcgttcaatttgctcctatgacctctttctataaatgttagaccaatggccgggactgtttcatgtgtaataatcttgtttaaaatatggataataatgtgtattcaagttgctgtagtagtatttgcatgtttagtgtaaacaggactatgttacttggnnnaaaaaaaaaaaaaaaaaatttaaa

SEQ ID NO: 48759 - DNA, 345 bp, Glycine max
  Clone ID: LIB3139-070-P1-N1-B1
gaattcggttcgagcataaccattttcttttccaaacccctcaaactaactatatctatccattaagggatattcaatgcaattagcgaatgagagaatgaagagccggtggttcgtgtggcttttggcggtactaggcatcatcggagccacactcttcatagtgagcttgatccaaacctcggagaacaacttcctatgttccataacaagaacgatgcagcagcagcagcagcagttcaccgatggccccacatcgatgcaactcaaagacattctccactacgcgacctctcagattgtgcctcaacaatctctttccgagagtacaataacctttgacgt

SEQ ID NO: 48760 - DNA, 287 bp, Glycine max
  Clone ID: LIB3139-070-P1-N1-C10
ggttatgttgcctcaaactcaaaggatgaccctgcaaaggaggctgctaacttcacagcccaagtcatcatcatgaaccaccctggtcagattggaaatggctatgcccctgtcctcgactgccacacttctcacattgctgtcaagtttgctgaactcatgaccaagattgacaggcgatccggcaaagagcttgagaaggagcccaagtttttgaagaacggtgatgctggttttgttaagatgattgcaaccaaacccatggctgctgaaactttcttcgagta

SEQ ID NO: 48761 - DNA, 181 bp, Glycine max
  unsure at all n locations
  Clone ID: LIB3139-070-P1-N1-D1
taaaaattcatattctttgtagccttcaaaagtttatcagggtttcatatttccttgtactattctataatattctatgaaactgttttttatgttatttgcttgttgcaaatcttgcattgatgttcttggaaagaaagtaccttcttctcaaanaaaaaaaaagaaaaaaaaaaaatat

SEQ ID NO: 48762 - DNA, 145 bp, Glycine max
  Clone ID: LIB3139-070-P1-N1-D10
ttataaaataaataattttataaaaaaaaaaaaaaataaaaaaggaaaaaaaaaaaaaaaaaataagggaaaaaaaaaaaaatataaaaaaaaaaaaaaaaaaaaaaggggcggcccccgctttttgtgctcttccccccgtaat

SEQ ID NO: 48763 - DNA, 102 bp, Glycine max
  unsure at all n locations
  Clone ID: LIB3139-070-P1-N1-E12
tggacacgtcagaaagaggtgatgttcctgggtgaactggaggaagtgcacccccctattcttttgcttgtgtttggttttgncccccttcccctgtttttt

SEQ ID NO: 48764 - DNA, 371 bp, Glycine max
  Clone ID: LIB3139-070-P1-N1-E3
ttggagccaacctaaaccttaacctttcctaacttttttttcaaccagaactatgattaagctttttaaagtaaaggaaaaacagagagaactggcagaaaatgcgagtggcggaccacccgttaagaagcaaagtgccggcgagttgcgtcttcacaaagatataagcgagctgaatctaccaaaatcatgtaccatgcaattccccaatggcaaagatgacctgatgaactttgaagtttcaattcgacctgatgatggatattacttaggtggcacatttttgttttcctttcaagtgtctcccatctatccacatgaagcaccaaaggttaaatgcaagacaaaggtctatcattcaaatattgact

SEQ ID NO: 48765 - DNA, 369 bp, Glycine max
  Clone ID: LIB3139-070-P1-N1-E7
cctagttctagatcgcgagcggccgccctttttttttttttttttactacttaatcagtcattcatcctatataatatggagtaatatgagtatatgacgttgcaattttctagatgccacttatgacaaaaaacgcccaccacattctaccctgcacagttgtaaggggaacttgagaggaacttgcaactagtcaatggggcgttttacaaaggattcaaattcaactagcttttacaaacgcccaccaactagttttctttatattataggaaaaccactatagtcaggattagcaggcaaaggtagtttcttagtcagctcctcctgctttccttgtttctatgcttaggtattcttagttgact

SEQ ID NO: 48766 - DNA, 177 bp, Glycine max
  Clone ID: LIB3139-070-P1-N1-F4
ccttctctttctctctcttttttctcatacacaggtcgggacactcctttttcatgtttggggactctcttctgggctttcttcgggttaagccctataagaccgagattatttaaacatgggttggtttcgttgcgcaggccaatcaagccaaaaaacccacacccattaccttta

SEQ ID NO: 48767 - DNA, 200 bp, Glycine max
  Clone ID: LIB3139-070-P1-N1-G5
actagttctagatcgctagcggccgcccttttttttattttcgggtgcgtattgataggtcttgaggcacatacattggggtttcttatattattttttaatgcatgatcatcaggttgcaactttgttttttttcttcaatttagttttcactttctcatcttgtatatacactattctctattatcattatttttttt

SEQ ID NO: 48768 - DNA, 363 bp, Glycine max
  Clone ID: LIB3139-070-P1-N1-H3
atttccaccaaacccgtttgcgttgttgtttgcgaataaatggcaactaagaggagcgtgggaacgttgaaggagggtgatttgaaggggaagagggtattcgtgagggtcgatctgaacgtgcctttggatgacaaccttaacatcaccgatgacactagagtccgtgctgctgttcccaccatcaagtacttgactggttatggtgctaaagtgatcctttctagccatttgggacgtccaaaaggtgtaacacctaaatacagtttgaagcctcttgtgccaaggctgtctcaacttcttggaattgaggttacgatggccaatgactctattgtggagaagttgaaaagttggttacac

SEQ ID NO: 48769 - DNA, 379 bp, Glycine max
  Clone ID: LIB3139-070-P1-N1-H5
ggagatgagccaccgcggcaaagagtttctctccataatccaaaaggccgaatcggatctccgcgccctcctccagatccctccggaatactccgtcctcttcctccagggcggcgccacctcccagtttgccgccgtccccctcaacctctgctcctcccccgactccgccgtcgactacgtcgtcaccggctcctggagcgacaaggccgccaaggaggcgcagaagtactgcaagcccaccgtgatctggtctgggaaacccgaaaagtacacaaagatcccatcttttcacgatttggagcagaacaacaattctgggtatcttcatatctgtgccaatgagaccatccatggggtggagttcaaggactaccct

SEQ ID NO: 48770 - DNA, 262 bp, Glycine max
  Clone ID: LIB3139-071-P1-N1-A2
gtggatctaaattgaaaagctttctagctagtcataacatcaccattactgatggtattgacaaaactagtgcaactttgcaatttagaaagttagcagattgtgattttctcaagagaaactttaagcagatgtctaatgttttgtgggtggctcctgaggacaaggcgagtttatggtcacaacttcattatgtttcgtgtaataatctggaaatgcaagaagcttatcttgtcaacctcgtaaatgtgttacgagaatt

SEQ ID NO: 48771 - DNA, 388 bp, Glycine max
  Clone ID: LIB3139-071-P1-N1-A3
gcaagagggccgagttcggcaaggacctgcactggtactcgccgtggcctaacaacgtgcgctccatgctgtcgacgacgcgcgagagccactcgcgcgtgcgccgcatcttttcccatgccttctctgacaaggccctgcgcgaccaggagcccctcatccagcggtacatcgaccttctggtgcagcgcctgcgcgaaagggccgagcagggcgttgatgtggacgtcgtgcgctactacaacttcacgacgttcgacgtcattgcggacctgacgttcggcgagtcgttcgggtgcctggagagcgatgactaccatgcgctggtgcgcggcgcgttcgcgttgatccaggcgctgagcttcaagttggcgctgcgctactacaa

SEQ ID NO: 48772 - DNA, 293 bp, Glycine max
  Clone ID: LIB3139-071-P1-N1-B8
gaaatttctggcgatctctgcgttttcccctattttttctgaatcgcacagaatggcatccaacaggggtcaaggtggaattcagcagttgttggctgctgaacaagaggcacaacggattgtgaatgctgcaaaaaatgaaaaattggctaggttgaaacaggccaaggaagaggctgaaaaggagattgctgaataccgagctcaactagaggctgagtttcaaaagaaagtgtcagacagtactggagattctggagctaatgtcaagcggtttgagccagagaccgtag

SEQ ID NO: 48773 - DNA, 397 bp, Glycine max
  unsure at all n locations
  Clone ID: LIB3139-071-P1-N1-D5
gaattagttctgcagttaacaatccaagcagtgttgtntnnntggggttttgtatttatatatttagaggtggggtctaatttttttttactttatctcttccttcatgcagtgtttttattggcttcttttttttgttttttgcatttattttttatttctaaattcttttctttttattttttcgacttcttacgagctttggattttaaagttttttgtttgttcgtcattttataatttttgttctttctttttattatttttttcatttagtttttgtcgtctttcttctttttatatatatgatttttaattttgtttcttattcattattgtattgcgttttttttctttttttttttattttttctactttttgaatcttttttttttt

SEQ ID NO: 48774 - DNA, 216 bp, Glycine max
  unsure at all n locations
  Clone ID: LIB3139-071-P1-N1-E9
gccaaacacataaagagaggaataaatccagcattgtctgtcttgcaacattctccactctaaccatggcttcaaagcttttactcatcactgcttcgttttgatttgttgcttttggacttgccgngctgctggcagagaagaagcaccgctagtgttggacggacaatgaaaagaatatcattctggtctaaactctgtatagcaactggcttg

SEQ ID NO: 48775 - DNA, 386 bp, Glycine max
  Clone ID: LIB3139-071-P1-N1-F5
agctctctctctctcttttgatcatacgatttcgttttgcctaatctaaggaacaaattcaaacaaacagggtgactcctcattcattcattcctcttttctttttctctgtcaagtgctgtctatcactcgttgctgatttctttccaacaacgtcaatttcacatttccttgtcttgttgtgatcactctttagtatttagcatacctgcaaagttgaactctttttttttccttccttttgttttgagctctcagattactcagcaatcacaatctctgttgtatcaggttttttcgatttggctgtgaccccttatgaatcagtgttttgtttgttttgaattgaaaatgcaatgagaaaagcgcccctgaccaaatggaaa

SEQ ID NO: 48776 - DNA, 391 bp, Glycine max
  Clone ID: LIB3139-071-P1-N1-H1
cattgatagagatttcagaaaccaaatttcatttcttggtcatattcttatgaagccaaggatatatggtgatcttgtttgtttatggcctagcagccctgtgtgttccacttctttctactgtgtatctgttactctctagctcgttctgcaacctaattcaaaatggaagaaatgaagtaaaagcacataaatctagtgtaattataatcatattttcattttttcccttctgttttacttttatttaagaataaaatatgttttttttataccaatataggtctagttggtaaggaacaaattcatgttccaaaaaaaaaaaaattaaaaataaaactatatcattctataattgtaagattaatttaaaaaaaaaagggcggccgcc

SEQ ID NO: 48777 - DNA, 372 bp, Glycine max
  Clone ID: LIB3139-071-P1-N1-H12
aaaaatttatataaatttttaaaaaaataaattaaaagtttaaagaaagaaaataataaattaaatttgggaaaaaaaaaaataaaaaaaaaaaaaaaaaaaaaagggggcggcccccatttattgactttttcaacccggaatttaattccgaaccgttacttgaaggcttacaaattttccttttagtgagtttttttaaagtttggcgtaataatggaaatagttttttcttttttaaaatttttttccgttaaaaattcaaaaaaaaatacaacccgaaagtttaaattttaaaccttggggttcttaataaggaacttaactaaatttaattgcttggccttaattgcccgttttcaattgggaaaa

SEQ ID NO: 48778 - DNA, 434 bp, Glycine max
  Clone ID: LIB3139-072-F12-F2A
ctcgagccgctcgagccgctcgagccgctcgagttccgttaacgctctccaatacaaaataaccactcactgaatattcggtcgaagatgtccgccgccgaagaagctaaagttcccgccgtcgaaaagccggtggaggaggtgaaggcgccgaagcttgccaaggagaagaaacctaaggctccgaaggaaaagaagccgaaacaggccaaaactgcttctcatcctccatatctccagatgattaaggacgctttgattgctctgaacgagaaaggaggatcgagtccatatgcgatagcgaagtacatggaggagaagcacaaggcggtgcttcctgcgaatttcaagaagatactaggtctgcaactgaagaaccaagctgcgagagggaaactcgtcaagatcaaggcttcgtacaagttagccgaagc

SEQ ID NO: 48779 - DNA, 364 bp, Glycine max
  Clone ID: LIB3139-072-F12-R2A
ggaaaaaagaaaaattaatttccaattgatcattttttaaagggaaatttgaaaaaaattaaattttttacgaccctaaaccaaaaaattttttttaaatttgggcaaaagggttaaaacaccccttttaatttttacatattttataggccagggttttaactaaaaaagaaaaactttaaactttaggccgcagggacgggagttttacgggcctttttggggggaaaccaaagggacctgggttttttgggttttaaaggcctaaaaattttttttgtttttttgggcccaactttttttggggttttttaaacccctttttttttttttgaaaaaacggggggtggaatttttttttttt

SEQ ID NO: 48780 - DNA, 365 bp, Glycine max
  unsure at all n locations
  Clone ID: LIB3139-072-P1-N1-A2
ggctcaagctgggaagactggtggctgcaatgaaggcacgattttcctttccagtttttgcgagcaaccgaatctccccaaaatatcaggctcgtcaaaaaggacaaattgngatcactaatccaacacactactttttgccaaaatctcaaagtgctgcagattacaaggcagcaagtagagctctggacttcttctttggttggtattctgatccggttttctatggtgactaatccggagagtatgaaatcttcagtaggttctaggctcccaaaattcacaaaagctgaatctgaaggtctaaaaaattccatagattttcttggtgtgaattactacaccacttattatgcggaacatgc

SEQ ID NO: 48781 - DNA, 276 bp, Glycine max
  unsure at all n locations
  Clone ID: LIB3139-072-P1-N1-A8
gnggcnnnacagaagnccanacagagnggagaancccnccaagccgnggccaagcanncncnggcgncagggaggaccaggcncnncaggagnngggnnnggaaannnnggagaggnnggnccnnnggangcnaannngaagccacgaaannncacanggnngagaaaagcagancncnngnnngnggacaacccagnnggaaccgggnacagnnacgnggaggannccaancncnangccaaaacagacgaagaggcaaccacagacccgacaac

SEQ ID NO: 48782 - DNA, 334 bp, Glycine max
  Clone ID: LIB3139-072-P1-N1-B4
gccacaggcggtattcttgagaatacaggtatagcattggcctgtgctatgaatagttgttttagggggcgcgccagttctgatatttacaccatctgctctcaagactgtgaattatggaatcctgcttgcacaaaagcaatgactatgtcatttaatccaaacccgtgttctgatgcatggagtttggaatttctgaagcgtaccggatttcattgtgatatcatttgtgtcactggatggactgccaccccaatgcaggatgttcaggttacaattgattggtttatttcctctcaggaatgtgttcccatccacctatttaacaccgcga

SEQ ID NO: 48783 - DNA, 394 bp, Glycine max
  Clone ID: LIB3139-072-P1-N1-C1
ggctctttcttctcttacacacacaagccctacaacattttctttggtctctcattttctctatagctagatgggttctggtgctttacaacttcttctgatcttgggtcttctggctagctcatgcttagcacaagccccaggtgctgcacccacacaaccacccactacaaccccatcaccaccaccaccaagatcagcacctgcaccagcacccaccccgccagcaacaccaccaccagcaacaccaccaccagcagcagcaacttcttcaccagcaacatcaccaccagcaacaacaccaacgccaacaccaacagctgcacctacacctgcttcttctcctgcaacctcaccagtccctttcgctagttctccaccagcaccaggcaca

SEQ ID NO: 48784 - DNA, 370 bp, Glycine max
  unsure at all n locations
  Clone ID: LIB3139-072-P1-N1-E4
cganaattggagaccgttttttgactatctagaactgcaacccgatctaaaagcgctggttcgtggggctcatactttcaagtgtccaaaccttggtatcactagctggactaggcttccaatccatgatgctgactttggttggggaaggccaatattcatgggacctggtggaattgcatacgaggggctatctttcataattccaagctcaaccaatgatgggagcctatctgtggccatagctcttcagcctgaccatatgaagctgtttaaggatttcttgtatgacatttgaagaatcattgccttcaagccatatggaacgccacaatgtttctaggtggggtttctttcccctcgtaccttt

SEQ ID NO: 48785 - DNA, 189 bp, Glycine max
  Clone ID: LIB3139-072-P1-N1-G11
atcacttaaacttggaacctaaggctttgagggttgaatattggtattcgtatgtatggaccttactggagcgttcaatgaccttcttcaagaacaggatggcttatctgttattaagtatgcttttagtaagggtataacatttttggatactgcgtatttttatggagtcaacgcttatgaactttt

SEQ ID NO: 48786 - DNA, 346 bp, Glycine max
  unsure at all n locations
  Clone ID: LIB3139-072-P1-N1-G2
ggctcgagccgaatcggtttgaggggatgataacttaattagtgttcatgaatatgtcaagccttactttagtggttctaaattgaaaagctttctagctagtcataacatcaccattactgatggtattgacaaaactagtgcaactttgcaatttagaaagttagcagattgtgattttctcaagagaaactntaagcagatgtctaatgttttgtgggtggctcctgaggacaaggcgagtttatggtcacaacttcattatgtttcgtgtaataatctggaaatgcaagaagcttatcttgtcaacctcgtaaatgtgttacgagaattgtatttgcacagt

SEQ ID NO: 48787 - DNA, 425 bp, Glycine max
  unsure at all n locations
  Clone ID: LIB3139-072-P1-N1-G8
gaatatccttttgctgttaaatcaggtcggatggggagaaacgttgactttctccccaggtgcagcttcgccagaagttgtgtaagaggaatgctctctatttgtattgagggggaggggagctgcgtgccaaagcaatcgctnnattctcaaatgaagtatgcnncaaatgccctgttcttttcatatggtggagtatcatttttgttgcgagatcctctgtctttgaagttttctaatgatgacgttctctcctaccattataatgtcacacgtcttctttctctcattagcatcttggaaaatttggcttgatgacactcatcaatttttgaggcttttttcccacatgcttggtgcagttttggagatgttcaaggaaaaagttgtattgaaactttcacatgaggaattttttacagctt

SEQ ID NO: 48788 - DNA, 288 bp, Glycine max
  Clone ID: LIB3139-072-P1-N1-H2
ggagggttttgaaggttttttcaagaaaaacaaggtaaactatgtcaaaggttatggcaaattagtttaaccatctgaggtctctgtggccaccactgaaggtggaaatactgttgtgaaaggcaggcatattataaatgccactggctcggatgtaaaatctctgcctgggatcactattgatgaaagaaagttgtttcatcaacgggagctcttgctttgactgaaatccccaagagactcatagtcattggggcaggctacattgggctggaaatgggctcagta

SEQ ID NO: 48789 - DNA, 312 bp, Glycine max
  unsure at all n locations
  Clone ID: LIB3139-072-P1-N1-H3
ggggagaagcggaacctttaaaaacggcggagggaaaacgcgaaagaaancccggcgaccaagggggggagaaagaaggagngcaacagagcaaacaaggctgcgagaataggaaaggggcttgatgagtggccaaatgagtaccagaggcaggatggcacaaccgatgcgcattggatagaaagagatggtggcctcatgctgctgaatgctcagcttctacttaccaaggagagctttgagaattgcaagatgcaagggtgttgcatcgcacaagacgatgcaaatgcagcggggctgatagctgatgtg

SEQ ID NO: 48790 - DNA, 62 bp, Glycine max
  unsure at all n locations
  Clone ID: LIB3139-072-P1-N1-H8
acaancaaaagcaaagaagngaagagagagagaaagagancacncgagagacagagagaaaa

SEQ ID NO: 48791 - DNA, 304 bp, Glycine max
  unsure at all n locations
  Clone ID: LIB3139-072-P1-N1-H9
ccgggaaccagngnngaagaggcnnacaacaagcnaanagnngaacnngagaaaagggnnccnacaggggnnggcanngaagggcccaaggangagaaacnnccncgncgcaaaannnnggacaaaccnaagacgcgcngcnncacnanncncccnanggaggggaancngggggnccgncaaaaggggnnaaannnngngaggggcannangaagaaaagggacaaacnnagnngncaagggggaancaacccanacnccanggaaaggacgggnnnggccaanagannacggagnaagggca

SEQ ID NO: 48792 - DNA, 367 bp, Glycine max
  Clone ID: LIB3139-073-P1-N1-A12
gcttttcttgagaggccacatgcagtcaacgagggcgaccatttcttaatgatggctactaataacaataacagagcaccagctaccaaggcacaggttgttgtttggccttctataaggtcatttatgaagaattcatcgttcactacttcaaagaatgttgaataagtatatggaaaagtggggcctggcgcactgtttgtaaaggtcattatggatggtgcaccttacttaagaaaagtagacttgaagaattacaatgcgaatgccgacctatcttcttcgctggagaatatgttcaattgttttaccataggttcttgtggatcttatgtaaatctgggaggtgtggtgctgaatgaaacca

SEQ ID NO: 48793 - DNA, 273 bp, Glycine max
  Clone ID: LIB3139-073-P1-N1-A8
gttctagatcgcgagcggccgcccttttttttgtttggttttttttttttttttttttttttttttttttttttttttttttttgggattgaatttctataccaccttatgttttcacataccaacaagggttctttacatttccacatgccccataagatcaaacgggatacaacttggttttaaggggcccaaaaccttataacactagggcaactaaacctatgaaaattagatttccctaaaatacaaaccatgatgcaacagcgcaac

SEQ ID NO: 48794 - DNA, 357 bp, Glycine max
  unsure at all n locations
  Clone ID: LIB3139-073-P1-N1-B1
ctcgagccgaatcggctcgaggttctagatcgcgagcggccgcccttttttttttttttttttcggattatgaatttctcgttagttttttttttttatataagtagagaaagtagcagcctccgataagggaaaataacgagggaagggaagggaaagaaaagaaagtatgtgaatacataggcggtatgattgtctcaattttttgcgacatagaggaaccaccaccggtttcatcctgttgtttcttaaatcacgaaatggttatcgggtttttctttcgttttaattgattatgtactgcggngtaatgtttttggtttgcaaccataatttggttcaaagaaattaacacgg

SEQ ID NO: 48795 - DNA, 307 bp, Glycine max
  Clone ID: LIB3139-073-P1-N1-C3
ctcgagccgaatcggctcgagcaaacagtctacagtgtttgatattctcttgggaatctctcaagattttgaaattgctggtaatactcttatgccagctttttctgttccacaggctactgccagatcttctgaaaatgcggaatcctctgcatgatctggaattcgtgttttctttcgcttgttcgtttgtttaattcaataaaggaaattaggcatgaccctcttgttgagtatgctctgcctatctgaaaatttccacacctcttttaattgtcgtaatgatgtgtgaagtgtgtgttatttt

SEQ ID NO: 48796 - DNA, 201 bp, Glycine max
  Clone ID: LIB3139-073-P1-N1-C6
tctagatccgagcggccgcccttttttttttttatggggggatgcatctataaaagagtggtttattataactacacaaaatagactgctaccatccttaagtccaggacagatcttgatgtaattataaaattaaccttggtcgtttcaccaacatatataacatgataatatgaaaatgttgagataacattccacatt

SEQ ID NO: 48797 - DNA, 361 bp, Glycine max
  Clone ID: LIB3139-073-P1-N1-E5
ctcgagctttatttgcctcggggagcacaaaaaaaaacggggtccgatcttttttttgagggaaccacataactaacaaactagaataggagttagagattattgggagtgctgtaatttttgtttttgccattaacatttcatgccctattgtttaaggtattttttcagattttcttttttttttattattttgactcttttgttgtttatgctttctttgcatgatttaacatttgtttcttttattttttctatttgtttttatcggttgtgggtgggtttcttattttaaattttcttcattaatatattattttttcatttagatttatttagaattatttatttttttattttt

SEQ ID NO: 48798 - DNA, 308 bp, Glycine max
  Clone ID: LIB3139-073-P1-N1-F1
cactaatttagggacataagcataatattgagaaataatggagggttgtacttattgtgtgaagttgctatgccttgttgggtttgtggtgcttgtgagtactattgcaggggtggagagtgctggtgaatgtgggaaatctaccacctcagataatgaggcttataagcttgcaccatgtgcctcagcaacacaagatgagaatgctagttgttttcagagttgctgtgctcaggtgaagaaaattgggcggaacccaaactgcctatgtgcagttatgctctctaacacagccaaaatggctggtg

SEQ ID NO: 48799 - DNA, 372 bp, Glycine max
  Clone ID: LIB3139-073-P1-N1-F3
caaattcgtaaaactaaagtgttactaaggtgagagagagagaagaaaaaaaaaatggtgaacttcatgttgatgattactgcagagcttgagaacctcacgaatctgcaaccccaagatggctgcgacgaccccaacttctcctacctcttcaagttgaaatgcgggagatgcggagaactgagccagaaagaaacctgcgtcgtcttaaacgacaccgttcctctccccgttggcaagagcaccactcatctcattcaaaagtgcaaattttgtggcagggatggcactgtgaccatgattgaaggcaaaggtaaaccactcacccaggaaatcagtgaatcagggaagtacgccccattgatgttattt

SEQ ID NO: 48800 - DNA, 367 bp, Glycine max
  Clone ID: LIB3139-073-P1-N1-G2
tgctactctttcaagtttttggaagtatagaaaatggcacgagacagttcctatttaccttcagagtcaggtgaacgaggggacacttctgacaaggctcttgtgaccaaatctctgatgctgtcctcgacgcttgcctcgaacaggacccagacagcaaggttgcctgcgaaacatgcaccaaaaccaacttggtcatggtcttcggagaaatcacgaccaaggccaatgttgactacgagaagatagtgcgtgacacctgcaggaacatcggctttgtctcaaacgatgtgggactggatgccgacaactgcaaggtcctcgtcaacattgagcagcagagccctgatattgctcagggtgtaca

SEQ ID NO: 48801 - DNA, 368 bp, Glycine max
  Clone ID: LIB3139-073-P1-N1-G7
ctagttctagatcgcgagcggccgcccttttttttggtgttttttttatttttgggcggctgacaacttttgagaatttttcttactgtttagacgttcatgggacagaatggttttcttagttattctggttattgtctatgaagattatctattcctataaaaataaaaaaaaagggttgccgttgatttgttagatttgcaacccctccatttatttcagtcctatgctttgatgcgtaccatcttatcctatcaggagtaacgctagtgcttggggtcttacttgtcatatcttttgacattgtgaaaacatttttcctttacaaattcttttatttttattttacgttttctttcttttttta

SEQ ID NO: 48802 - DNA, 117 bp, Glycine max
  Clone ID: LIB3139-073-P1-N1-G8
gagaactgtaagagtctgaaatatctggttgatgagggtccttttgcatttgtgaactagtatgaaatattttattcacttaaataaagcgcattactatgtgcaatgagtgtgttt

SEQ ID NO: 48803 - DNA, 84 bp, Glycine max
  Clone ID: LIB3139-073-P1-N1-H3
gttgatttgtgcaaagacaagtattggggtttgaaggtgtactctatactataccaaaaagatggaggaatttcttgtttaatt

SEQ ID NO: 48804 - DNA, 389 bp, Glycine max
  unsure at all n locations
  Clone ID: LIB3139-073-P1-N1-H5
tcgaggttgggaattgatctttcccannatagagatatgtggtccctagtaagtggggttttgaaatnngtggagttgctcgagtgggccaaatcaaaccttcatggcattnntgagtttccttattgacanatcccaaaccagtctactagtttttgaccattctcttgggaatttctcaagattttgaaattgctggtaatactcttatgccagctttttctgttccacaggctactgccagatcttctgaaaatgcggaatcctctgcatgatctggaatttgtgttttctttcgtttgttcgtttgtttaattcaataaaggaaattaggcatgaccctcttgttgagtatgctctgcctatttgaaaatttccacacctctttt

SEQ ID NO: 48805 - DNA, 369 bp, Glycine max
  Clone ID: LIB3139-073-P1-N1-H6
ttcgagcttaatcttctcgagcggctcgagtgcaagcagcatgacttttggactgagacagaaagcgcattgaaaaaagcttacgttgaaacagatgagaaaatattggaacaagaacttgtgttggggcgaggagggtcaacagctgtgactgcaatacttattgatggtcagaagcttgtagtagcaaatgttggtgactcaagagctattatctgtgagaatggaaaggcaagacaactatcagtggatcatgaaccaagcaaggaaaaaaaatcgattgagaggcgtgggggttttgtatcaaacattccaggtagatagctttttgatgttgtcataacacagttttttataaacaacttattt

SEQ ID NO: 48806 - DNA, 371 bp, Glycine max
  Clone ID: LIB3139-074-P1-N1-A3
tgctgatgttcttgcaaagcgagctcatgaatttgaaaaacatgttgctcatgaaagcctcaaggatcaaattcctgctgttgacaagttgtattctactaaggttaataagtttgcaaaaattatgaaccttagacaaagtgttgttggtgatcttaaacttcttactgatgggaagttgtatgagggtaagcatattcctgtatctaatattagtgcaggggaaaatcatgtagttcaaatacccttaatggcacaggaggaaattctgtcttctagtgcaagtgatttcagaactgcaatggtgagtaaaaatagcaaacctcaagctactgcaatgcatgtgggagctatagaaattatcattgata

SEQ ID NO: 48807 - DNA, 249 bp, Glycine max
  Clone ID: LIB3139-074-P1-N1-A4
gggaaaggtaagaaaattgtttttcttactagagttgatccttttccagtagctttattggctgttctttttggcgttaagaatgaaattctgagttctaacgccactaaccctatgctgacgcgacttcttgagaactgtaagagtctcaaatatctggttgatgagtgtccttttgcatttgtgaactagtatgtaatattttattcacttaaataaagcgcattactatgtgcaatgagtgtgttt

SEQ ID NO: 48808 - DNA, 373 bp, Glycine max
  Clone ID: LIB3139-074-P1-N1-B4
gggaaaaagttgtattggaaattttcacaagagagaatttcttacagcttggtcaactcaggtgcgtcctacagcaactctgttggctgatgggtgtccatatttgtatgctatggtgcatgatagttcaatgtctacaataccaggtgattttgtcattggtgttaagttgacaaccataaacaatatgtgtgcatatgggctcaatcctggtatttcaggttctcgtcttttgggtaccattcctcagtctatttcacagcaaactgtttggaatcaaatggcaacagtgagaacaccattgaattttgattctagcaagcagagcttttgtcaattttctattgaccttctcggtggaggaattttagtg

SEQ ID NO: 48809 - DNA, 91 bp, Glycine max
  Clone ID: LIB3139-074-P1-N1-C7
cgcttttgcatttttttgttaaaaaaaaaaatcctcacaacagagattcttcttattcttcggggatctaccaaaacttcatatactcctt

SEQ ID NO: 48810 - DNA, 95 bp, Glycine max
  Clone ID: LIB3139-074-P1-N1-D3
atctggttgatgagtgtccttttgcatttgtgaactagtatgtaatattttattcacttaaataaagcgcattactatgtgcaatgagtgtgttt

SEQ ID NO: 48811 - DNA, 331 bp, Glycine max
  Clone ID: LIB3139-074-P1-N1-D6
tttccttgtccaagttatgttttttaaaaacaaaagacataaccccgaggcccttcctctctctctgtgtggtcatatagttcatacatctaaattacagtgcctatcttgtatctcactcgctccctctcctactcgcctgagcttatcctttatcttctccacctatcaccttcacctttctcccagtctgattccatatattgtgtgaacactgatttctatgatccacttagaggaactaatattgtttcacattcctacccttctgatcatgacaactttaatgaatcttctgttcattatcctacatattagtttatctctttca

SEQ ID NO: 48812 - DNA, 300 bp, Glycine max
  Clone ID: LIB3139-074-P1-N1-E3
cttattgacaatcccaaacagtctacagtttttgatattctcttgggaatctctcaagattttgaaattgctggtaatactcttatgccagctttttctgttccacaggctactgccagatcttctgaaaatgcggaatcctctgcatgatctggaattcgtgttttctttcgcttgttcgtttgtttaattcaataaaggaaattaggcatgaccctcttgttgagtatgctctgcctatctgaaaatttccacacctcttttaattgtcgtaatgatgtgtgaagtgtgtgttatttt

SEQ ID NO: 48813 - DNA, 207 bp, Glycine max
  Clone ID: LIB3139-074-P1-N1-E6
ctttttttttttttttttttttttttttttttttttggtgatttatcagagatcgaggcttgactaggagtagagtatagtttcccctgtattgatgcgcaaagatttcatgtgttcgtttcaagatcttatgaaattccgctatcggaaggctataatcattcgataacatcgggtttggtccataatgaattttatttgatattc

SEQ ID NO: 48814 - DNA, 329 bp, Glycine max
  Clone ID: LIB3139-074-P1-N1-F10
ctagatcgcgagcggccgcccttttttttttttttttttaaaatgaacacacacttcacacatcattacgacaattaaaagaggtgtggaaattttcaaatagacagagcatactcaacaagagggtcatgtctaatttcctttattgaattaaacaaacgaacaaacgaaagaaaacacaaattccagatcatgcagaggattccgcattttcagaagatctggcagtagcctgtggaacagaaaaagctggcataagagtattaccagcattttcaaaatcttgtgaaattcccaagaaaatatcaaaaactgtagactgtttggga

SEQ ID NO: 48815 - DNA, 87 bp, Glycine max
  Clone ID: LIB3139-074-P1-N1-F7
aaaaaaaaaaaatttttttaaaataaaaaaaaaaaaaaaaaagggggaaaaaaaaaaaaaaaaaggggaataaaaaaaaaaataaaa

SEQ ID NO: 48816 - DNA, 248 bp, Glycine max
  Clone ID: LIB3139-074-P1-N1-H10
cgagcctaagcattcagagtcggggcctgacgacccttgcatgtatatacttcacgccaagattgcctgggaagactctgtctatagatacagcactcataccgcgggaaagaagctttctgatgctcataccgagagatacaattcgtgccatctttgtgtggttgagcggtatcacagacgggagagcacggatcactagctctctcattcggccagagtggccggcagctgacatcccccttgat

SEQ ID NO: 48817 - DNA, 347 bp, Glycine max
  Clone ID: LIB3139-074-P1-N1-H4
cctttcgctcttttctttgcaaatgcttaattccaagatggttaggactctgtaggctgataaagacaacactcataccgttggaaagaaggatgctgctggccatgttgcttaatttagttcttgcttcctttgtcttcttgagttttatcagagacgggagtgcagggatcactagctctttcattcggtcagagtggccggcagttgacatcccccttgatcatgaagcatttgcagttccaaagggttattatgcacctcaacaagtgcacatcacgcaaggtgactatgatggaaaagcagtaatcatctcatgggtgaccacagaagagccagggcacagc

SEQ ID NO: 48818 - DNA, 167 bp, Glycine max
  unsure at all n locations
  Clone ID: LIB3139-075-P1-N1-A7
ttctcaaatccacgacactgattctganaagtctgaatagtattacttcgagtgaaaacgcnaaaccgagaatgagaatgagaaaactgattctcattctcatcatcttccggaggagtatactgaaactgagagggaagaagttcagcgtattgaatggggggttc

SEQ ID NO: 48819 - DNA, 366 bp, Glycine max
  Clone ID: LIB3139-075-P1-N1-A8
tgtgtggattcagaatatgcttatactctgcgggtgaagaaaaaaagtgacgatttataggtttggtgtggtcattttggagttggtaactgggaagccccctcttgatgcagagtatggggaaaaggatctagtaaaatgggttcactccacattggatcagaaaggacaggatgaggtgattgatcccactttggatattcaatatagggaagaaatctgcaaggtactaagcgtggggcttcattgcactaactcacttcctataacccgcccttcaatgcgtagtgtggtgaaaatgctgaaagaagtaactgaacttccaaagtcctttagtggaaaactctcttctccttattttcagga

SEQ ID NO: 48820 - DNA, 253 bp, Glycine max
  unsure at all n locations
  Clone ID: LIB3139-075-P1-N1-A9
ttaccaactttatggaaacacacaacanatgtggattacgtactattattggctttgaaggttttctaactcttactaaaagtctaagctcaactgcatttgatgttagtgaatatgaagattggaagagcattgatttagcatatcctatcttaagttatggtgaattgggtgacactgaataaatcgaatttcattattttctttcgtttattttccattttttatctgatctacttatcctttattattt

SEQ ID NO: 48821 - DNA, 373 bp, Glycine max
  unsure at all n locations
  Clone ID: LIB3139-075-P1-N1-B3
gggctcgagttccaacgcttgtagtagaggtaccagcagcggctccgtcgtcacataagcgtanaaggcacangcacangcacaggaggcatcaggcaccagctccagcaccaacaattgttcgcaaaagtcccccggcaccacctgattccacagcagaatcagacacaacaccagcaccatcaccaagtctgaatttgaatgctgcatcgtcaaaccaccagcaagggagaaatatatgggcaacagctgcacttgctattgctgttttgctagccgtcaccggctacagctgctagcaatctcatggtgaccatggattcactttaatgaattatttggtttgcaaaatatattatcattttatgtgtat

SEQ ID NO: 48822 - DNA, 291 bp, Glycine max
  unsure at all n locations
  Clone ID: LIB3139-075-P1-N1-B8
tttagcctcttaagcccaaaccaccacctagaccataagagcccaattaacgagataaggcaaaananccacataagccgaaagagccagagaagccgaaagagccagagaaaccgaaagagccaccgaagcctaaggaacctgaaaaaccaaaggaaccagagaagcccaaagagcctgagaagcccaaggagccagagaagcccaaatagcccgagaagcccaatgaacccgagaagcccaaagagcccgagaagcccaaacctgaatgcccttctccggtgcctattt

SEQ ID NO: 48823 - DNA, 241 bp, Glycine max
  Clone ID: LIB3139-075-P1-N1-B9
ttcaaatgttgattagtggaaaggaaagtgaggcatatagaggaatagatacgcttgaagcttctgttgaccattctaaggtctcttgtgaagttggtagcataaaagaacctaatccttcttatagtgaaggtaggatccatattgatcatgtaaatggtgacattcatgacattacacccgttaccttctcaacttcttaagaattttacaatattgcaacctttctttttttttattt

SEQ ID NO: 48824 - DNA, 363 bp, Glycine max
  unsure at all n locations
  Clone ID: LIB3139-075-P1-N1-C2
cttgtctttcttattttatccncgccaatagccgaaaaccggttctctttttgtggttcatttctctcttccagatgccacttgccgttcttcaccctcacgattttctcaggaaaaacccatctaaccagtaccagaccataatccctcactctcccaacatgaatcctaataagtctcatcggacttcccgaaaccgtaagaagcggcccgatccaagcccacaaggcgttgtcagcccatcccggctcacattatccccgaaaccccaagtcaaaaacaagccgcagcagcaactcgtcatgggtcaggtcaaaatactcaaacgcggccaacttttgacccaaacgacgccggatccac

SEQ ID NO: 48825 - DNA, 368 bp, Glycine max
  Clone ID: LIB3139-075-P1-N1-C5
aaaaaatttactctgtgcttctcatgatgatagtgtagctgaagctgcttctgctgcagcattggtgatttggacacaaaaaaagtttcaaacttttcagttctctgagcttctggtttatcaattttgaaggagttcaatactttaccctattagttggttccctgaaatttgtattggtattgctgtatcagaaattcttctgaacaatctctttaatcaaccatgtcattattggctaaactacgctgtgtcaccatagatgttactggtaccctaatggcttacaaaggggagctcggtgactattattgcatggcagccaaagctgcaggcaaaccttgcccagactacaaacgtatgcacga

SEQ ID NO: 48826 - DNA, 363 bp, Glycine max
  unsure at all n locations
  Clone ID: LIB3139-075-P1-N1-C9
tgtagagcttttgcaaagaatgctattctcgggaatatgccaaattctgtgggttcaatgcgganatattttgttggagatctcgtctttgaagtttctaagatgacttctccctacattaaatgtacagtctctttcttcatagcatttggaaatttggctgatgacaccatcaattttgaggcttttccccacaagctggtgcagtttggagagattcaagaaaaagttgtattgaaattttcacaagaggaatttcttacagcttggtcaactcaagtgcgtcctgcaacaactctgttggctgatgggtgtccatatttgtatgctatggtgcatgatagttcagtgtctacaatacca

SEQ ID NO: 48827 - DNA, 211 bp, Glycine max
  Clone ID: LIB3139-075-P1-N1-D1
aagggatgttctggtccgtgcaaagatcttttgtgtgtagacagttggtgctttgacgtggtggattgtcatgttgtccagatgagtgttgatggccacagctatgagctgaaagaactgaatcagcgcttacgagatgggaagaagattgctggtggggagcatggtttatgcgaggaagtgaaatgtcatgtaattgctggagaagcta

SEQ ID NO: 48828 - DNA, 369 bp, Glycine max
  Clone ID: LIB3139-075-P1-N1-D10
ttcttgtattctaagacttcctcgtcattgattattatgcgcattcaacgccgtcagcgtaatttgtgtattcccctttgaatgttgaaagaaacaaaaacccacagaacctgcgatttcaacacaattaggttttcccttcaatggccgctaattcccacagattgggttcttcctacggcggcgctgccccttaccgatcaagagatgggcttagcacccgtcccgttggtgcctcggaggagatccaattgcgaattgatcccctggacttggacgatgagatcaccggtcttcatcgccaagttagaaggttgaaacatgttgctgaggagataggaacagaagtgaagtatcagaaaacttttc

SEQ ID NO: 48829 - DNA, 378 bp, Glycine max
  Clone ID: LIB3139-075-P1-N1-D6
cggctcgttttttgttacctaaaccctagtctccatgcatcaagttgggaggttaaagagacgggaactttttcctgtccgccttgaccgagccagagcttcgtcttggccctcgattttgccctgtaaaactaatcccagtcacaacagaaataatcaatggcaccgaaacagaccaaggctgagaagaagatcgcttacgatgcgaagctgtgcgacctaatggaggagtacggccaaatcctcgttgtaaactccgacaacgtgggatcgaaccagctccagaacattcgcaagggtctccgcggcgactctgttgtcctcatggggaagaacaccatgatgaagcgctctgtcaggatgcacgctgagaaaacc

SEQ ID NO: 48830 - DNA, 340 bp, Glycine max
  Clone ID: LIB3139-075-P1-N1-D9
tagtccacaatttagataaaaaggcggctaagagatttaagaagaattagctaggttatgagccattcactcacataataatccttgacccatttcagatttcgtcttaacgcacataaattcaagttcaaaatctcacctttgttgattttggcgagaattttgataatgtgtaattcaagtagtggctagtgatgctaatttcaatttgagaagaagcaattgttcttctcataatgtagtcaatagctatagcatttattgagatctttgcagaattagcaaaattcgttttttttttctgatgctgatgttgattaaaacccttcttgcttttcat

SEQ ID NO: 48831 - DNA, 262 bp, Glycine max
  unsure at all n locations
  Clone ID: LIB3139-075-P1-N1-E1
ccgctcaagctaaacctctacagccttcatggccaanctcattacaggattcaaggccacttgtaacgaatttggctctnttttcaaagccatccttgcatacaccgtgttatccaaagaattcaagattcggagtttcacacgtgatgtgtccaaaccatcatcgcatgccctcgcgaatcaagaattgtattttgctgctgcctacttgatctccaatccattctcttaattactcttttaaattctcacacactttttt

SEQ ID NO: 48832 - DNA, 338 bp, Glycine max
  unsure at all n locations
  Clone ID: LIB3139-075-P1-N1-E2
aagctcgcctttgttggctttcgggtccacttcattgaaagagaccggagtgagcctgagcgatttgttgtanagttgcttcaacccggtggctatctcaaattaattgagctcggacttgaagattgtgtggacaaaattgatgctcagcaagtgtttggttatgcccttttcaaggatgggaaacatactcgtctctcttaccccttggagaagtttcactcggatgtctctggcagaagctttcacaatgggcgctttattcataggttgcgggagaaagcttccttacttgccaatgttcgattggagcaaggaacattcactttccttgtttg

SEQ ID NO: 48833 - DNA, 183 bp, Glycine max
  Clone ID: LIB3139-075-P1-N1-E3
aagaaaaaattttaaaatttttaaaaaaaaaaaaaaaaaagaaaaaagaaaaaatttaaaaaggattaagaattaaaaaaaaaaaaaggggcgccccccccctaataaactcttccccccggaatttaattccagaccggacccttaaggcttacaaattttccctataaaaagtcgttttaa

SEQ ID NO: 48834 - DNA, 377 bp, Glycine max
  Clone ID: LIB3139-075-P1-N1-E6
ttttaaagtcagctgcagctcctggccagccttcagggcaagtgttgcatggtgctgctggtgggatgtctccacaagttcaagcacgtactcaacaattaccagggtctactctggatattaagggtgagattagtcctgttttaaatcccagagctgctggtcctgaaggatcattgatgggaatgcctggatcaaatcaaggtagcaataatttgactttgaaagggtggcctctcacaggtttggagcaactgcgctctggtctactccagcaacaaaaacctttcatgcaggctccttaaccttttcatcaactccaaatgttgacaccacagcatcagcaacagcttatgctggcgcaacaaaatctggca

SEQ ID NO: 48835 - DNA, 291 bp, Glycine max
  unsure at all n locations
  Clone ID: LIB3139-075-P1-N1-F1
ggagaccttattgactttatagccaacttcaatctagacttttgtatgacctttttaagagcccaagtcccttccacctntccctcgccttccacacccctatcttcaccatcttccatccagtcttttcctccacctattccttcctcaccattcttcactcattctccaccaccagctttcactcccccaacaaccccactcatctttcctaccccttcctaccctccttcttaatcttcaccaccctcatcttctccccctacctctccttctccttcatcttcacca

SEQ ID NO: 48836 - DNA, 377 bp, Glycine max
  Clone ID: LIB3139-075-P1-N1-F10
cccaaatcttgaaagcctcgaagaagcccctgatgaagatctccgtctacaagggcccgaccactccctcctgcgtcttcacctccgccaaactattgggcaaagtttcaatacccctcgatctcaccttggccgagtcacgcccctgcaccttccacaacggttggctctccctttccaagaacaccaacccatcccagttacttcacctaacagtccgagccgagcctgacccgcgctttgtattccggttcgacggcgaaccggagtgcagcccgcaggttttccaaataaaaggcgacgtcaagcaaccggttttcacttgcaagttcagcttcagggacaaggacaaggctcacttcccttcgctcaacgcc

SEQ ID NO: 48837 - DNA, 371 bp, Glycine max
  Clone ID: LIB3139-075-P1-N1-F3
ttccgcctcaagaaggtttttaaaggtttagtcctgagtggccaaagaggacttaggggcttttgagtgtccttatggccattcccaaacagtctacagtttttgatattctcttgggaatctctcaagattttgaaattgctggtaatactcttatgccagctttttctgttccacaggctactgccagatcttctgaaaatccggaatcctctgcatgatctggaattcgagttttctttcgcttgttcgtttgtttaattcaataaaggaaattaggcatgaccctcttgttgagtatgctctgcctatctgaaaatttccacacctcttttaattgtcgtaatgatgtgtggagtgtgtgttatttt

SEQ ID NO: 48838 - DNA, 376 bp, Glycine max
  unsure at all n locations
  Clone ID: LIB3139-075-P1-N1-F5
aaaattcttcaatnagtaaccagnagagagttgctggttggaagaaaggttgtttaatggtcaagattgtnatgtctgggaatgcagcagtcaaaaggagtgattgggcctcattggtacaagtgtttttaacaaacagcaacagtacagagcattttgatgcatgtaagtggacaaaatcagaaccacattcctgggaattaatcttcccaatagaggtatgtggtcctaataatggttttgaaatgtggagttctgagtgggcaaatcaaacttcatggcatttgagtttccttattgacaatcccaaacagtctacaatttttgatattctctagggaatctctcaagattttgaaattgctggtaatactct

SEQ ID NO: 48839 - DNA, 325 bp, Glycine max
  unsure at all n locations
  Clone ID: LIB3139-075-P1-N1-G1
aagggtcctgtttcacatttttaaaaagattttcctgaaggggaagagcaagtttaaccggaaaagagtgttcccanattgagacaaagaatagatcctcaatacaatgaggttcaggctcagatggaaacaaatttgtttaaattgtctcttgatgatgttgaaactcctaaaggttccatgttggatcttaaaatttctcaatctaaaattgcacttcccaagaacacagttggaggaaccattctgcgtagtgatttattggcaaattttttgacagaaggcaattttagagcaagtgttgatttgcagcgcactcatcgta

SEQ ID NO: 48840 - DNA, 239 bp, Glycine max
  unsure at all n locations
  Clone ID: LIB3139-075-P1-N1-G10
tgtgtcaagttggaatcaacccatactccatggaatgtggtggtttggacaatagatgactgantaagggcaatgatattctgagttgcgattatgctagtttagatggtttgattaccaagcaagttctgagcaagatggcacaaatgataaacaggctttgtggtggcgatgaaaaattgatgcttgaaaggtcgcacctgctagtgtgctattgttcaaggatggctttttgttaa

SEQ ID NO: 48841 - DNA, 256 bp, Glycine max
  unsure at all n locations
  Clone ID: LIB3139-075-P1-N1-G11
tatgattntgttcggagcctcaancaaccgagactgcatgcagattatctagcggccaaggaacaacaanncncctaatctgccatggatatgagccatgaatcaagtgtgagcatgcaagcagcctaatggctgtaaattcgcaatgtatgataatcatgtagataacaattagttataccctcggatcatagcatgtgatgaaattgataacaggttattttgttgcacaatattgaaattttttttgcctttt

SEQ ID NO: 48842 - DNA, 281 bp, Glycine max
  unsure at all n locations
  Clone ID: LIB3139-075-P1-N1-H10
tgatttttgtcttatgtaatagagtgagtgtgctaaagacgttaggcatgtgtccttggttttggcctantaaaccgtggtggtgtcaaggtgaatgcatgtttcggaagttttgtttgatattttattgggaacttcaattattatctaagattattgcggtttataataattacactatttttttttaaatatttagggtggtccgtcactttttagcttgtttaactctgtattttattttatgccttatccctgcataactgtaccaagtttttccc

SEQ ID NO: 48843 - DNA, 299 bp, Glycine max
  Clone ID: LIB3139-075-P1-N1-H2
aaggcctttctttcaagcttccccccgaagtgttaagaggatgcctgtttctttagaaagaggagcgagtgcacagaatgctcttctaatcaatatgccaaatgctggtctctcaatgtggagatattctgttggaaatctcaaacttcgaagtctctaagatgacttcttcctacattacaaggacagtccctaacttcattgcttttggaaatttagctaatgccaccatcactctataggctcttacccaccaactggtgcagtttgtagagactcacataaaaaccaaatccaaa

SEQ ID NO: 48844 - DNA, 344 bp, Glycine max
  Clone ID: LIB3139-075-P1-N1-H3
cttcaaggggatttttggaatcttgctggcccaaaagcaatgagtttgtaggttaatccaaacgggtgttctgttccatggagtttggaatttctgaagcgtaccggatttcattgggatatcatttgtgtcactggatggactgccaccccaatgcaggatgttcaggttacaattgattggttaatttcccttcaagaatgtgttcccaggacctattgtgttttaaatccacaaaaatccttttgtgttaaataggggggtgggaaaactggcttttcctcaaggcactttccgaagtgttaagagaatgcctctttctatagggggaggaagctggtgca

SEQ ID NO: 48845 - DNA, 366 bp, Glycine max
  unsure at all n locations
  Clone ID: LIB3139-075-P1-N1-H9
agagttaaaaatttatgcgtgaaaggacacaccggctgtttgcttgtttttcaaggatggcaatttntaagaaagatgtttggagagttgaatgtggaatcccttctggatttccgctcacagttatttgtaatagcatttttaatgagatgctcattagatatagctatgaaaaattactgcgccaggctaaagctccaagtatgtttttacaatccttcaaaaattttgtttctttgtgtgtgtatggtgatgataacttaattagtgttcatgaatatttcaagccttactttaatggttctaaattgaaaagctttctagctggtcataatatcaccattactgatgggtttgacaaaactt

SEQ ID NO: 48846 - DNA, 270 bp, Glycine max
  Clone ID: LIB3139-076-P1-N1-A10
ctcttgccttattcggctcgaggatgatgaagaggagggaatttataatggcaggaggggaacacatagagatcatcaagatgatagaatggattacggcagaacaggaagagataaatatgacaggcatagagatagatatgagaggcgcaggagagatgaacatgaataagagcattggcgtggaacggagaatggggatagacatggcaataggaagggtttacatcacgtgtcttttgaacttgaattatatccagtttataaagg

SEQ ID NO: 48847 - DNA, 220 bp, Glycine max
  unsure at all n locations
  Clone ID: LIB3139-076-P1-N1-A12
ttagagctatactttcttccgcgnncngagctagcgaggatggaatggctattatctgcgatggcaaccaanaggagcagaaacccactcactcttcaccaccgcaaccccaatcctcttcctcttcctcttcctcttcgttcagtgctgcttttgaccggtcaaaccctatcgcttttctggagagagtcttccagttcgtctccgaacacagagactt

SEQ ID NO: 48848 - DNA, 383 bp, Glycine max
  Clone ID: LIB3139-076-P1-N1-A2
ttcgattcgagggaaggactaatttgtacatcgcttcttgaataaagaaggcgaatgtagtatacgtgcggactcaatagaagatccagaagcacaacttttgctcaaagcttcagaaactatgctcatgaaagcttatgcttttttgaagtacaacaatgcgaccaatttgattgtcaggacccatttggcagaattggtcaatgaagacttttatgatgaaaaattcaattttattggcacaattgggactccagcttttcatcgacaaattgctgcacatttggagaaaatgccattatggcaaaaagcaattttgtgtggaatgggacattgtttgtctcggagaagcaaagaaacatggtattctgggatgaaggaaa

SEQ ID NO: 48849 - DNA, 79 bp, Glycine max
  Clone ID: LIB3139-076-P1-N1-A3
aaaaaaatttatttaaaaaaaaaaaaaaaaaaaaaagaggaggaaaaaaaaaaaaaaaggaaaaaaaaaaaaaaaaaaa

SEQ ID NO: 48850 - DNA, 164 bp, Glycine max
  unsure at all n locations
  Clone ID: LIB3139-076-P1-N1-A4
ttgaaaaaattttatttacaaaaannaaaaaaaaaaaaaaagaaggatttaaaaattttttggatgaaaaaaaaaaaaaaatttattaacatctaacatctatttaacttaataatctttttattttattttcttcccattactcatttaaagtcccccccccc

SEQ ID NO: 48851 - DNA, 187 bp, Glycine max
  Clone ID: LIB3139-076-P1-N1-B4
gtgaaaacaatagtttaaagtggaaagaaatgtggtgagaaaaagcaaggattttgatcataaggaggcaaccgggctacatccggcaaaccatatagtggaaagcaaagcgcaaagcgctgggaaaatccccactttttgcatttgggtgaagggaaatcccacacctcttcttgacccccctccc

SEQ ID NO: 48852 - DNA, 145 bp, Glycine max
  Clone ID: LIB3139-076-P1-N1-D10
cagctttctgtaatttcgaccctaacaccaaactgggcggtgtacttaaaaaatggggggctacaaaaaacaacacaaaatctcccaactataacaaacttcctctctttaaaatattatacaaacctaacacacacttcttcac

SEQ ID NO: 48853 - DNA, 384 bp, Glycine max
  unsure at all n locations
  Clone ID: LIB3139-076-P1-N1-D2
ttggaggctgggttaattaaggtgcgtcccgaaccaactctgtgggctgatgggtgcccatatttgtatcctatggtgcatgatagttcagtgtctacaataccaggtgattttgtcattggtgttaagttgacaaccataaacaatatgtgtgcatatgggctcaatcctggtatttcaggttctcgtcttttgggcaccattcctcagtccatttcacagcaaactgtttggaatcaaatggcaacagtgagaacaccattngaatttgattctagcaagcagagcttttgtcaattttctattgaccttctcggtggaggaattttagtggacaaaactggagattggatcacacttatacaaaattcttcaattagtaac

SEQ ID NO: 48854 - DNA, 360 bp, Glycine max
  Clone ID: LIB3139-076-P1-N1-D5
gtcggactatgtctgcaggacccaagtatgaatatagatgggcagatggtgtacaaattaagaaacctattgaggtttctgctccaaaatatgtagaatacctaatggactggattgaagcacagcttgatgatgaatccatattcccacagaagcttggttcaccatttcctcccaactttaaggaagttgtgaagacaatattcaagcggttgttccgtgtatatgctcacatataccattctcactttcagaaaattgtgagcctcaaagaagaggcgcacttaaacacttgcttcaagcattttatactctttacctgtgagttcgggctgattgacaaaaaggagcttgcgcccc

SEQ ID NO: 48855 - DNA, 133 bp, Glycine max
  Clone ID: LIB3139-076-P1-N1-F10
ctttatttaattaaacaaacgaacaagcgaaagaaaattaggcatgaccctcttgttgagtatgctctgcctatctgaaaatttccacacctcttttaattgtcgtaatgatgtgtgaagtgtgtgttatttt

SEQ ID NO: 48856 - DNA, 141 bp, Glycine max
  Clone ID: LIB3139-077-P1-N1-A10
atttaaccaacttttttgtccaaaaaactactcacaaaggggggtgattttatatatttctagtggacaatacccaatattataaccacaaaacaaccattaaacaatattacttaaattatttacaaacttttaattata

SEQ ID NO: 48857 - DNA, 210 bp, Glycine max
  Clone ID: LIB3139-077-P1-N1-A11
ctcgagccgatttttttcgagctcaaattggttacatctggtactaactagagcttggatgcgtgataatgagcaggttgtgtttgtgtattaccgataaaactatgaataagagtggctaataattaaattgcaaaaaaaaaaaaaaaaaaaaaaaaaaaaaaaaaaaaaaaaaattaaattaaaataaaaaataaataaaaaaataaa

SEQ ID NO: 48858 - DNA, 400 bp, Glycine max
  unsure at all n locations
  Clone ID: LIB3139-077-P1-N1-A4
gaaagatttgttagagggaaatttttccttggatattaaatctggctctagattggaaaaagtttcctctacaaaagcacaatttgttagtggaaaaaccttcaaatatgatataattggtgctggttcacattcttcaggagattttcctgaaaaggaagatcaagaaaaacccaaaaagattgataccagattgagacanagaatagatcctcaatacaatgaggttcaggctcagatggaaacaaatttgtttaaattgtctcttgatgatgttgaaactcctaaaggttctatgttggatcttaaaatttctcaatctaaaattgcactttccaagaacacagttggaggaaccattctgcgtagtgatctattggcaaattttttgacagagggc

SEQ ID NO: 48859 - DNA, 411 bp, Glycine max
  Clone ID: LIB3139-077-P1-N1-B3
ggcgagaccgcgagcggccgtccttttgatttctacgttttatgcataatagagatcatttcataaataagtattcagcaagcaatttatggatacaaaaggcggctccgataaaatttaatgttattaagcaaacaaggggaaaaaagaaaaagagtagcagagtcggttttccacgagacgagaagagacacgcaactcgataagtatcacaaaagattacagaagaaaaggaacattctcttctcaactatatcctatttgttgctgttgctgaggtggttggtaaccaggataccccggataactgccatacatgttgggatcctgtccagcagcaggagcatacccataattttcataaccttgtgcagcatacccatagtatccaccaccagaaccagcaccact

SEQ ID NO: 48860 - DNA, 335 bp, Glycine max
  Clone ID: LIB3139-077-P1-N1-B8
gtggagagaccagtgattgcgtttcgattgacgacgacgaggaatcatgttttccgtcggttgcgggggggagccattcttctgacacgtgtgcagtcagaggattacgtgctccgatgagtctgaaccattctgcccgatgtgtatggaaagtttcgtggaacaatgcacccctaacaatcccaaccctaatgtcttccccgacagcgatgaatcttctgatcccgaactaccgtttcaccgattttcacttattgctctattgctctcatcactctataggtaccgatccgaacccgacgtgttcaacccgatggtctttctgcagaaccacc

SEQ ID NO: 48861 - DNA, 254 bp, Glycine max
  Clone ID: LIB3139-077-P1-N1-D8
ctcgagccgaatcggctcgagtgaattttgattctagcgagcagagcttttgtcaattttcgatggaccttctcggtggaggaattttagtggacaaaactggagattggatcacacttatacaaaattctccaattagtaacttgttgagagttgctgcttggaagaaaggttgtttaatggtcaagattgtgatgtctgggaatgcaccagtcaaaaggagtgattgggcctcattggtacaagtgttttta

SEQ ID NO: 48862 - DNA, 294 bp, Glycine max
  Clone ID: LIB3139-077-P1-N1-E4
gtttttgatattctcttgggaatctctcaagattttgaaattgctggtaatactcttatgccagctttttctgttccacaggctactgccagatcttctgaaaatgcggaatcctctgcatgatctggaattcgtgttttctttcgcttgttcgtttgtttaattcaataaaggaaattaggcatgaccctcttgttgagtatgctctgcctatctgaaaatttccacacctcttttaattgtcgtaatgatgtgtgaagtgtgtgttattttaaaaaaaaaaaaaataaaaat

SEQ ID NO: 48863 - DNA, 407 bp, Glycine max
  Clone ID: LIB3139-077-P1-N1-F1
ccaccaccaccataatttattgagttttaatttgcacattcctaaccttcagtactttcaccatcaccaacaacaagagaagaaggaggatctgaaggacattccaaaagggtgtttggccatcttggtagggcaaggggaggagcaacagaggtttgtgatccctgtgatgtacatgaaccacccattgttcatgcagttgctgaaaaaagctgaagaggaatacgggttcgaccagaaaggccccatcaccattccttgccacgtggagcacttccgctctgttcaaggcttgattgataaggacaaatccctccaccatggccatcaccaccatgcttggtgcttcaaagtttgattcatcagtcacactctagcaacatgaatttttaaattttaaaatcatg

SEQ ID NO: 48864 - DNA, 319 bp, Glycine max
  Clone ID: LIB3139-077-P1-N1-H1
gtaaatgggtcacaagaactgtatttgcacagcccaaaggaagctcgccatttgagaaggaacgcactctctcgtatggaatggctgcaaaaagctgatgtgcctaccatagcacagattgaagagttccattcgatgcagaggatgatgaatgctcctgattcaaatgataatattgatctactgttgagcattgatttgttgggtttacaaggagcaggcaaagtttttacaaacaagattgattttgatgataagctcgtgttggctcacacacaagaattctctgatggaaatttcacagcggattcttgcgtac

SEQ ID NO: 48865 - DNA, 335 bp, Glycine max
  Clone ID: LIB3139-078-P1-N1-A2
tgacgctctcaaccttatccaggtcggcctcaccctcaccgacggcgccggcaacctgcccgacctcgccggaaaccgctccatctgggaattcaacttccgtgacttcgacgtggcgcgtgacgcctacgctcccgactccatcgatcttctccgtcgtcagggcatcgatttcgcgcgtaacaccgccgacggcgtggattccacgtgcttcgcggagctgatgatgtcttcggggctcgtgtgcaacgacgccgtgagttgggtcacgttccacagcgcgtacgatttcggttacttggtgaagatcttgacgcgccgtaacctaccgacga

SEQ ID NO: 48866 - DNA, 302 bp, Glycine max
  Clone ID: LIB3139-078-P1-N1-A9
ttagcttgctatgagcaatggctaaagccttgttggcatcagtgcctttttacctgctccgagcaatcaatacaactgaggttgcttaatagcttgaaactctttcacctttttacccttaccctcactttaccacacaagcacctttttacccaccaacaagtgcttcttacctccatcatcaccaccaccactacccttcaatactaacaccttgcaccttttatatccacctttctactccttacccaccaccaattaccccttctaccccctgcccgcttcttaaaggtttcctactt

SEQ ID NO: 48867 - DNA, 135 bp, Glycine max
  Clone ID: LIB3139-078-P1-N1-B2
cttcgggaaaggctggattaaactgggcctcgaacaaggagggccccccaggcaaaaaacccgaatttcatagggaggcatcccttggtatttcaaaaggagcacgcttaaaaaagggggggaaaaaaaaaacac

SEQ ID NO: 48868 - DNA, 161 bp, Glycine max
  Clone ID: LIB3139-078-P1-N1-B9
ggatttttcactctttgcaatggaaaaatgaaattgataaagaggtaaaatgatgatgatgataacaataataacttctagttttctttcaaagttatgctatttttgttagatgatgtctataatggtttgataaataagatggaccgtagttatcaagg

SEQ ID NO: 48869 - DNA, 213 bp, Glycine max
  Clone ID: LIB3139-078-P1-N1-C1
cttcgggctgagtaagggcaatgatattctgtgttgcgattatgctagttttgatggtttgattaccaagcaagttatgagcaagatggcagaaatgataaacagtctttgtggtggtgatgaaaaattgatgcgtgaaaggacgcacctgctgttggcttgttgttcaaggatggcaatttgtaagaaagatgtttggagagttgaatgtgg

SEQ ID NO: 48870 - DNA, 355 bp, Glycine max
  Clone ID: LIB3139-078-P1-N1-C2
cttcgggctaacatttaattatttttaccaagctactacatttggaactgcctctttctacatggcattgaaaacaatcatggcttcttttcattccattacattttcaacaaaaactgtcctttatgtatttgtattggcctcttccatcgcagcctctgctggcaacttctaccaggattttgacgtaacttggggagatggtcgtgccaagatactcaacaacggcgatcttctcactctttcccttgacaaagcctctggctcggggtttcagtccaaaaacgagtatctctttggcaagattgatatgcaactcaagcttgtacccggaaattctgcaggcactgtcacc

SEQ ID NO: 48871 - DNA, 369 bp, Glycine max
  Clone ID: LIB3139-078-P1-N1-C6
ggtagaaagttagcagtttgggattttctcaagagaaactttaagcagatgtctaatgttttatgggtggctcctgaggacaaggcgagtttatggtcacaacttcattatgtttcgtgcaataatctggaaatgcaagaagcttatcttgtcaatctcgtaaatgtgttacgagaattgtatttgcacagtccagaaggaagctcgccaattgagaaggaaagctctctctcgtattgaatggctgcaaaaagctgatgtgcctaccatagcacagattgaagagttccattcgatgcaaaggatgatgaatgctcctgattcaaatgataatattgatctacttgtgagcattgatttgttgggttt

SEQ ID NO: 48872 - DNA, 381 bp, Glycine max
  unsure at all n locations
  Clone ID: LIB3139-078-P1-N1-D2
cttgagggaaagggattcctttaagaatgccactccaattgacagcaatgcttgtaaggatgtgacaaaggaaaaaacctttgatcttcaaccagtgtcacctttttcttctggtgtaggtttgccatatgcacctgaagggtggcctaatcctggtgatgtatggngctggaaagtggcaaaaaggatgaacaattctggatattttactgatagattccttactcttccaagatctcttgagaagtctcgtcgcaaggcagagtttcgaagcaaggctgatattagtagatatcttcaatcaaattatcctgacatgaaaattgaagcattctttgctttatttagctggcagattccctcaactcagcaaacccctac

SEQ ID NO: 48873 - DNA, 299 bp, Glycine max
  Clone ID: LIB3139-078-P1-N1-D3
atttgctttagcactgagcttaaccgagcttcacaggagatgggtcggtaaaaattggtgaaggtggccggttcggttagaactgggggaaagggcaccgtgagaagaaagaagaaggctgttcacaagacaacaaccacagatgacaaaaggcttcagagcaccctgaagagaataggggtgaatgccatcccggcttttgaggaggtcaatatctttaaggatgacgtatttatccagtttctaaatcccaaagtttcagcattcattgttgctaatacttgggttgtcagaggttt

SEQ ID NO: 48874 - DNA, 370 bp, Glycine max
  Clone ID: LIB3139-078-P1-N1-D4
ggcttcaaattttaatattccgggcaaaaaccaccaacagcaacatgaccaccaacaagaagaacaagattggcgttatgggtctcttcctttctaggaatttggcttgcaaattcatatacccttttcttttctccaagaaggtttccaaggatttgtttcccaagcagttggagaacatgatgtctctgatctctcctcgtactggcaggcatttgcagcgctatgacaatggctgtcgccaagttgtgggatgcattccttatagatacaagaacaatggtacacaggataaggaattggaggttcttgtgattagtgctcagaagggtcatggaatgcagttcccaaagggtggttgggaaactga

SEQ ID NO: 48875 - DNA, 118 bp, Glycine max
  Clone ID: LIB3139-078-P1-N1-E10
aaaaaaaataaaaaaaaaaaaaaaaaaaaaaaaaaaagaaaaaaaaaaaaaaaaaaaaggaaaaaaaaaaaaaaaaaaaaaaaaaaaaaaaaaaaaaggggcggcccccccctatggg

SEQ ID NO: 48876 - DNA, 333 bp, Glycine max
  unsure at all n locations
  Clone ID: LIB3139-078-P1-N1-E5
gactagttctagatcgcgaggccgccctttttttttttttttatacaataatatatatttttcgatacgtaacatgttattttccattcagaattacatttgatgcaacagagacgtttcccctgtactacaaaaactacgtggctaattacatccatgtagacgtgctttaaactcagaaagacacttttgtctttcctttttccatacatttttgttctctgttctaatctgaacaaaacattgaaaaaagggttctatatgctaccctagctgaactccattttntatggcagggtggggatgtacattattattctattcatttacacc

SEQ ID NO: 48877 - DNA, 129 bp, Glycine max
  Clone ID: LIB3139-078-P1-N1-E8
aaaaaattttaaaaaaaaaaaaaaaaaaaaaaaaaaaggaaaaaaaaaaaaaaaaaaagggaaaaaaaaaaaaaaaaaaaaaaaaaaaaaaaaaaaaaaaaaaaaaaaaaaaaaagggggggccccccc

SEQ ID NO: 48878 - DNA, 376 bp, Glycine max
  Clone ID: LIB3139-078-P1-N1-F6
tcgggctttcaccttcctccatactttcttcatctgggtttggcttgctataaaaatctagctaaaatttgtcgtttgctttcagcaagagctttagcttaattatcaccaggaatttatttggcagtcatggattattcatcatggatgattaacacttccttggatctcaacattaatccccacaggcttcatgaagaacttcccaaaaaggaggtggaaaacaactttttgtcattgaatttggaggtgaagaaatcttctgtaaaacaagagtctgctggtgccttggcggaggagctgaagcgggtgagtgcagaaaacaagaagttaaccgaaatgctcacagagatgtgtgagaattacaacactttgc

SEQ ID NO: 48879 - DNA, 366 bp, Glycine max
  unsure at all n locations
  Clone ID: LIB3139-078-P1-N1-F7
gaggggcttaatttcttgcaggtttggacctgggccttccttgcaacagtggctctggactaaaggagttaatgatggggactccctccattttgggtccaaagcaaaccaccctcgattttctcgggttggggatggctggctgggggcacccctggtggaggcttatcggcactcatcacctncattggtggtggtctggatgttactactgcggcggcatcctttgctagtggagaattccctggcaaagatattggaaggaggagcacttgatattttgggtgcaaggactatatttttcggngcgataagttctggttgtacagtgttatgtggtccttgcacattgtgaaagtgcagttc

SEQ ID NO: 48880 - DNA, 362 bp, Glycine max
  Clone ID: LIB3139-078-P1-N1-G1
gggggttttcctaatgtgctttcacgtaaaaatggtgaaaaaggcaagaggagatttgtttctggggatggtgaagagatgacattgattccgggaaccagtgttgaagaggcttacaacaagctaatagttgaacttgagaaaagtgttcccacattggttggcattgaatgtcccaaggatgaaaaacttcctcgtcgcaaaatttttgacaaacctaagacgcgctgcttcactattctccctatggagtttaatcttgtggtccgtcagaagtttttaaattttgtgaggttcattatgaagaaaagggacaagcttagttgtcaagttggaatcaacccatactccatggatggact

SEQ ID NO: 48881 - DNA, 219 bp, Glycine max
  Clone ID: LIB3139-078-P1-N1-G10
cttctgtactggaattggtaacttactatttgatattcaaattaaagttaaaggaacaatttcattatttatgtcggttgtaatattggcggcagttattgacactattgaaactttgttgggtcattgttggctgatgacattaagttgatccttattcatctataaacagttgtatttgaagtttacaaaaagaatactcttgagggttcttgaggg

SEQ ID NO: 48882 - DNA, 338 bp, Glycine max
  unsure at all n locations
  Clone ID: LIB3139-078-P1-N1-G6
cttaataagtggttcatgaatatgtcaagccttacttgagtgggtctaaattgaaaagctttctaggctggtcataatatcaccattactgatggtattgacanaactagtgcaactttgcaatttagaaagttagcagattgtgattttctcaagagaaactttaagcagatgtctaatgttttatgggtggctcctgaggacacggcgagtttatggtcacaacttcattatgtttcgtgcaataatctggaaatgcaagaagcttatcttgtcaatctcgtaaatgtgttacgagaattgtatttgcacagtccagaggaagctcgccaattgag

SEQ ID NO: 48883 - DNA, 315 bp, Glycine max
  Clone ID: LIB3139-079-P1-N1-A8
gaaaaattgatgcttgtttatgtacgcacctgctgttggcttgggggtcaatgatggcaatttgtgggaaagatttttgtagagctgaatgttgaatcccttctggatttccgcttcacagttatttgcaatagcatttttaatgagatgctcattagatatagctattaaaaattactgtgccaggctaaagctccatgtttgtttctacaatccttcataaaatttgtcttctatattttgttgttgttgattataactttatctttgttcatgctttttgtcatgcctattcttttattgctactctaattt

SEQ ID NO: 48884 - DNA, 403 bp, Glycine max
  Clone ID: LIB3139-079-P1-N1-B2
gcttgtaattagtttgttccatttcttgcttcttaatttcttgatcatgtcacttgctggtaaaatcagcattgaaattggggtgcatgcaagcgctgcaaagtggttcaacctctttgcaacgcaactccatcatgttcaaaaccttaccgaaagagtgcatgaaaccaagctacatcatggtgatgactggcatcacaacgaatcgatcaaacactggacttgtaccatagatggtaaggttacaacatatcacgagagtattgaatccgttgatgaactaacaaaacaatcacttacaagatcttcggtgaagatatcgatcaccagtataaggtctttaaggtcatctttcaagcaattcataaggatcatgggggtgcattcatcaaatggactattg

SEQ ID NO: 48885 - DNA, 296 bp, Glycine max
  Clone ID: LIB3139-079-P1-N1-B9
acttgccctcatgttattctaagtcatctcttccattaaattggctagctatggaacacccctgggaacctgtggtaacttctaccacggacgctgcagcagcaacaaggctctttctattgtgcagaaggcctgcattggatcaagcagttgtagtgttggagtatcaagtgagacattcggaaacccttgtagaggagtggcaaaaagtttagcagttgaagctacttgtgcgtagacagacatgtttcttcaataacacttcccaattttctgtataaaaaataaaaataaaa

SEQ ID NO: 48886 - DNA, 399 bp, Glycine max
  unsure at all n locations
  Clone ID: LIB3139-079-P1-N1-E1
cttctcctaaaacatctaatgggttcttcttctattacaacatccgccgcaaccatgaccatggctgcgatcgtgctcctgttcacggtctttgccgnttcctccgccctagacatgtcgataatctcgtacgacagcgcccacgcggacaaggccgccacgttgcgcaccgaggaggagctgatgtccatgtacgagcagtggctcgtgaagcacgggaaggtgtacaacgcgctcggcgagaaggagaagcgcttccagatcttcaaggacaacctgcgattcatcgacgaccacaactccgcggaggaccgaacctacaagctcggactgaaccggttcgctgatcttaccaacgaggaatacagggccaagtacttgggaaccaagatcgatccc

SEQ ID NO: 48887 - DNA, 379 bp, Glycine max
  Clone ID: LIB3139-079-P1-N1-E4
ggttcgagggaagatatcttgacaaaatggccgtaacagaagcaaacctaaagaaggctggctttcacacatgggagcagttaattctcaaggatccacatcttatcactccaaatgcactttcatacaaatcagcaatgagagagaatctgttgaggcagggatacagaattgttggaatcattggagaccaatggagcgatctgcttggagaccacagaggcgaaagcaggacctttaagcttcctaatcccatgtactacattgagtagtaccttcacctttcttaacaatctagctagagtttgctcctatttatatgtaataaggtttgctgatatgcactattttaaataggagcattagctatgtttgttaa

SEQ ID NO: 48888 - DNA, 387 bp, Glycine max
  Clone ID: LIB3139-079-P1-N1-F10
caagaaattaggttgtgctcttgctcacacatgcatgtgtataaatttatatgattaacaaatgtgatgaatccgtgagtggtataagtagatatttgattttgtcatgaaagaaaatttccaaattttgagatctgatgttcctctggtcatcttgcattcgaagacctggtcatatatttctggcacagaatgtcttggcatgtgtataaaatttagatttgtcaaattttaaaggaacttatgattagtttttttcacttagaagaagatcaaaaaaaaaaattaaataaataaaattttatggggcggccgccctttttttagcttttttactcagttattaattcctgtctctgtcctgtaggcgtactcatcttttttatt

SEQ ID NO: 48889 - DNA, 70 bp, Glycine max
  Clone ID: LIB3139-079-P1-N1-G10
aaaaaaaaaaaatttttttaaaaaaaaaaaaaaaaaaaaagggaaaaattaaaaaaaaaaaaggggggag

SEQ ID NO: 48890 - DNA, 126 bp, Glycine max
  Clone ID: LIB3139-079-P1-N1-G7
caaattgctaacttttttatttatagaccggcatggctacatggagaggaactatattaaaccactctgggggggcatcaaaaatctcttatcctaagatctatcctttaaaagtgatgcacttct

SEQ ID NO: 48891 - DNA, 166 bp, Glycine max
  Clone ID: LIB3139-079-P1-N1-H2
ccgaagacgaattcgttgtcatagagtgggaggagggagcaggaagaggctgagcgtgcaatagaaccttgccactccgcggacctgtcgggcctccgcgacctgactctcatgcgcgtccaccttggacctcagcgcctccgaacacctcgcgggctcgaccgag

SEQ ID NO: 48892 - DNA, 295 bp, Glycine max
  Clone ID: LIB3139-079-P1-N1-H3
cagagctttgtcaatttttattgaccttttcgtggaggaatttgagtggtcaaaactggagattggatcacacttatacaaaattcttcaattagtaacttgttgagagttgctgcttggaagaaaggttgtttaatggtcaagattgtgatgtctgggaatgcatcagtcaaaaagagtgattgggcctcattggtacaagtgttttaacaaacagtaactgctcatagcatttttgtgcatgtaagtggtcaaaattcagtaccacatttctgggaaataatctttccaatat

SEQ ID NO: 48893 - DNA, 402 bp, Glycine max
  Clone ID: LIB3139-080-P1-N1-A3
tgtttgaagtttttaagatgacttctccctacattaaatgtacaggctctttcttcatagcatttgggaatttggctgatgacaccatcaattttgaggcttttccccacaagctggtgcagtttggagagattcaggaaaaagttgtattgaaattttcacaagaggaatttcttacagcttggtcaactcaggtgcgtcctgcaacaactctgttggctgatgggtgtccatatttgtatgctatggtgcatggatgttcagtgtttacaataccaggtgattttgttatttggtgttaagttgacaaccattaaacaaaatttgtgccatattgtgcttcaatctcgggtatttcatgtttttaggctttttggggcccccattctcttgttttttttt

SEQ ID NO: 48894 - DNA, 304 bp, Glycine max
  Clone ID: LIB3139-080-P1-N1-B10.R1
gaaagacccatgaaatacactgcattgtagccaaatcattacatgcaccagtttcagcagcccaaaaaatacatataaaagtcggatgatatggcaaaatacgatcaataaagtataaaaaagaggaaccttaagaagctttattgagtaaacataagcctaattatgctaacaaacgccacaaatggcggattgaactttcgcaccattgctagatcctgaaaatgctgcctgaacatcgctaagctcggaacaactagtgattagctcgctcaccccctttacgaggaggttaaaacagatg

SEQ ID NO: 48895 - DNA, 566 bp, Glycine max
  Clone ID: LIB3139-080-P1-N1-B10.R2
gaaaagacccatgaaatacactgcattgctagccaaatcattacatgcaccagtttcagcagcccaaaaaatacatataaaagtcggatgatatggcaaaatacaatcaataaagtataaaaaagaggaagcttaagaagctttattaagtaaacataaacctaattatacaaacaaacaccacaaatggcgaattgaactttcacaccattgctaaatcctgaaaatgctgcctgaacatcgctaagctcggaacaactaataattacctccctcaccccctttaaaaggaggttaaaacagatgggtggtcaaagaatattttgcagcacaactcctttcttagtcggctctagactggccagcacgagaagacaggataataccaacaatgagaccataaagggcaagtgcttcagcaaaaatgaggatgagaatcattccaacaaaaagttttggttgttgtgcattggctctaacaccggcatcaccaacaataccaatagccatgccagcagaaaggccagccaagccacaggcaagaccagaagagagatgtgcataac

SEQ ID NO: 48896 - DNA, 462 bp, Glycine max
  unsure at all n locations
  Clone ID: LIB3139-080-P1-N1-B12
agggccaagtgtaggttatatctactctttcttcatcnnngtcgtcgcatatgggggagcgtgtgtatctcgtgtcgccagctgtggagggtatgcaggcttctgtgtcttcaatgtctccacaacgcactcactcgcatagggcctctgtcccgcttcccggagctctggatttctggagaggcgcaacggctaccttgaagggttgtcgtcacttgacgttcatccaacgatctctggctcgtggctgcgccttctcgctaagtgtcgcctntccgcccacccgttcctgctacaatgaagcatgaacgatgctcttcatcgcccgccgagggtctctacaccggccagttcatctactgcggcaagaaggccaccctcgttgtcggcaatgtgttgcctcttcgatccattcctgaaggagctgtcatctgcaacgtctagcaccatgtttgcgaccgc

SEQ ID NO: 48897 - DNA, 360 bp, Glycine max
  Clone ID: LIB3139-080-P1-N1-C9
aaaagcacaatttgtttttgttaaaaccttcaaatatgatataattggtgctggttcacattcttcagaagattttcctgaaaaggaagatcaagaaaaacccaaaaagattgatgccagattgagacagagaatagatcctcaatacaatgaggttcaggctcagatggaaacaaatttgtttaaattgtctcttgatgatgttgaaactcctaaaggttccatgttggatcttaaaatttctcaatctaaaattgcacttcccaaaaacacagttggaggaaccatcctgcgtagtgatctattggcaaattttttgacagagggcaattttagagcaagtgttgatttgcagcgcac

SEQ ID NO: 48898 - DNA, 417 bp, Glycine max
  unsure at all n locations
  Clone ID: LIB3139-080-P1-N1-D4
ccttctcttggactttcacatatgcaatgangcncaaaangaagttgtgtgtttcttcttcatttntctcagcgcgacaacanccacaaaacagttgataagtgatgccagaaggaaggggtagaaggagaagtaataatggctttgaaaaatgggaggcacaaatcctttcaaagacaaaattggtttctttcacaaagagaattgttccttccactctctatgctctgcttcccattgttctgctttgtacatacttcgaccttctcttcctcactccacattccaccaccaccacctaccacctttctctttctcctncttcacctcctccaccttcatcatctttttctttttctacagaaaagaacaaaacttaccaaaacccatgtgactactctaatggtgattgggtac

SEQ ID NO: 48899 - DNA, 232 bp, Glycine max
  Clone ID: LIB3139-080-P1-N1-D5
tgaaaaaaaaatataatttttatctaaaaaaaaaaaacaaagagaaagattaatgggcggacgggggcgggagtacaatataaaacctaaaataaataacttgcgcgggacctgcatgaattctaactttttcatccggaaagaatgtattagacctttgccttaatgattccacataattttcctatctggggtgaaatttattatctctgtcacaattcatgacaaaata

SEQ ID NO: 48900 - DNA, 403 bp, Glycine max
  Clone ID: LIB3139-080-P1-N1-E10
ctcgagccgtgattggtttatttcctttcaggaatgtgttcccaggacctattgtgttttaaatccacaaaatccttttgtgttaaataggtggatgggaaaattgactttcccccagggcacttcccgaagtgttaagagaatgcctctttctatagggggaggagctggtgcaaagaatgctattctcatgaatatgccaaatgctgttctttcaatgtggagatattttgttggagatctcgtctttgaagtttctaagatgacttctccctacattaaatgtacagtctctttcttcatagcatttggaaatttggctgatgataccatcaattttgaggctttttcccacaagctggtgcagtttggagagattcaaggaaaagttgtattgaaattt

SEQ ID NO: 48901 - DNA, 389 bp, Glycine max
  Clone ID: LIB3139-080-P1-N1-E9
ttggaggaacttttaatcaagttccgttccaacacaggggaaaatgagggagatccttcacgtgcagggagggcaatgcgggaaccagatcggttccaagttctgggaagtggtgtgcgacgagcacggcatagatccgacggggaagtacgtcggaaactcagatctgcaactcgagcgcgtgaacgtctactacaatgaagcctcgtgcgggcgcttcgtgccacgcgcggtgctgatggacctggagcccggaaccatggacagcgtgcggaccgggccgtacgggcagatctttcgccccgacaactttgtgttcgggcagtccggcgccggcaacaactgggctatggggtactacatcgagggcgccgagcttatttacttcg

SEQ ID NO: 48902 - DNA, 402 bp, Glycine max
  Clone ID: LIB3139-080-P1-N1-F1
gcatggccaataatttttcacctcccattgttgcttggttcaaagacacctcataaaacattgggtgacttggctgacaagtatggacccatattctcgatcaagattggtgccaaaaacgcagtggttgttagcaactgggaaatggctaaagaatgctacaccacaaacgacatcgccgtttcctccctccccgatcttatctccgctaacctcttgtgctacaaccgatccatgatagtcgtagcaccctacggtccctattggcgccaacttcgaaagattttaatgtctgagttcctatctccttcccgagtagagcaactacaccatgttcgcgtctctgaagttcaaagttccatcacggagctcttccgtgattggcgtagcaataagaatgtc

SEQ ID NO: 48903 - DNA, 355 bp, Glycine max
  Clone ID: LIB3139-080-P1-N1-F12
ggatagcactttgatctttcatcttcttcgtgataaccttaccctctggacctctgacatgcaggatgatggtgcagatgaaattaaagaagccgcacccaaaggtgacggggaacaaaattaaacataccatacttctaattagtgattgaacttcccttgtgtaatgttttcaaagggagaaggtgttgaatgctaatctcggtgttactgagattttgggcattcatgttcttcgttatgaattgtggatgtactgggctattttagtttggccttccattagtacgcgtttctgaactgcctattttcataatgacactgaaatttccattataatgctgtttagaatatt

SEQ ID NO: 48904 - DNA, 387 bp, Glycine max
  Clone ID: LIB3139-080-P1-N1-F8
ttcagagacgccgccgtcgctgtttgcgtttgtttcaggtgcacctaccaacgatggccaagggcatgcaaggagagcgcgtaaaactatacaagaggggtacactccttggatacagaaggcacaagtacacccaccacccaaacacatacctgatgcaaatcgatggagtgaacaccaaaaaagaagaaggatggtatactctcaagaaaatggcactatatatacaaggctaacgtgaaaaaggatggaagccattaccgctccatatgtgggcaaggttacgcctcacagcaacagcggtgttgtaacgtgcaaaattcaagtcaaaccttccacccagatcgatgggagctcgtgtaagagtattcatgtatccaagtaata

SEQ ID NO: 48905 - DNA, 409 bp, Glycine max
  Clone ID: LIB3139-080-P1-N1-F9
cccaactccgcgggttgcgtgtttcttttcctttacaccccaaccatccactacaacaccaagaaaggcttttccagttacagcgacacgcttcgccgcatccccggtttgccgccactgtcgccggaggacatgcccacctccctcctcgaccgccggagcttcgagtccttcgccaacatgtcgattcaaatgagaaaaacagatggaataatcgttaacacgttcgagaagcttgagaataaagctttcttcgcgttgaagaatgggatctgcatgtcattagaaacacataagtctcattcttcaacgccagaaacacgtaacccacgtgtcttttgcatgggcccacttgtttctaacggtggaggtgaacatgataatgatgatagtggttgcatgagttggc

SEQ ID NO: 48906 - DNA, 410 bp, Glycine max
  Clone ID: LIB3139-080-P1-N1-G7
ggcagattactccaacccttgtttttgttgaagaggcaaaccttttggccatgcaactagccagggcctcagtactccctatggttctcaaatcagctcttgagcttgatctgttggaaatcatagccaaggctggccctggtgttcacctttccccctccgacattgcttctcggctcccaacacacaaccctgatgcacccgttatgttggaccgtatattgcgcctcttggcttgctacaatatcctctctttttctcttcgcactctccctcatggcaaggttgagaggctctatggtctcgcccctgttgctaagtacttggtcaggaacgaagatggtgtctccattgctgctctcaacctcatgaaccaggacaaaatcctcatggaaagctggtactatttg

SEQ ID NO: 48907 - DNA, 399 bp, Glycine max
  unsure at all n locations
  Clone ID: LIB3139-080-P1-N1-G8
ggactggtgatccgtgtgtttcttaaagttataactcataagactcataaccatgactaatttttagttgcataataagtgataggtacagggattcatgtgaggatacactgttatacacaagtgatagtggaaaatgagacttagaagattgtaaaactgtatatagtttaggaatagtggtgtccaaatttgataattatgcagtagggtaagatgcaatcatagctatgtcacagagtccttcctcagattttacagctgctttacttcctgttctaaacaacctaacgttatttttatgagacttgaggttgcgtgcattgtgctctaattccgntcctgttttgtgttcttgggttggttggccaaggggaatctctctggtttttatcacac

SEQ ID NO: 48908 - DNA, 369 bp, Glycine max
  Clone ID: LIB3139-080-P1-N1-G9
gttttaaaagaaagattttttttaggaagagtgttacccctccaggaagatgggtatttttaggggggccatgcacaaaaggcgtgccactggtggcaagaagaaggcttggtgaaagaagagaaagtatgagcttgggcgtcaggccgcaaacaccaagttatcaagcaacaaaactatccggaggattcgtgttcgaggtggcaatgttaaatggagggcattgaggttggataccggcaattactcatggggtagtgaagcagttactcgcaagactcggattctagatgttgtttacaatgcctcaaacaatgagcttgtgcgaactcagaccctgttcaagaatgctattgttcaagttgatgc

SEQ ID NO: 48909 - DNA, 129 bp, Glycine max
  Clone ID: LIB3139-081-P1-N1-B5
ctgtaatgacctttgaaaataagtttggtttgtgttgaactctattgtcccattaatgttactactgtttgttatcaatttgtggagctgatatataattatcaactgtatgctggcatattgtgtttg

SEQ ID NO: 48910 - DNA, 168 bp, Glycine max
  Clone ID: LIB3139-081-P1-N1-C8
gcggaatcctctgcatgatctggaattcgtgttttctttcgcttgttcgtttgttgaattcaataaaggaaattaggcatgaccctcttgttgagtatgctctgcctatctgaaaatttccacacctcttttaattgtcgtaatgatgtgtgaagtgtgtgttatttt

SEQ ID NO: 48911 - DNA, 209 bp, Glycine max
  Clone ID: LIB3139-081-P1-N1-D4
cttttccagtagctttactggctgttctttttggcgttaagaatgaaattctgagttctaacgccactaaccctatgctgacgcgacttcttgagaactgtaagagtctcaaatatctggttgatgagtgtccttttgcatttgtgaactagtatgtaatattttattcacttaaataaagcgcattactatgtgcaatgagtgtgttt

SEQ ID NO: 48912 - DNA, 70 bp, Glycine max
  Clone ID: LIB3139-081-P1-N1-F1
gttatggattctttaaatgactgattatttgcttaaaggaacttaattctaaataatgtgcaaataaaaa

SEQ ID NO: 48913 - DNA, 332 bp, Glycine max
  Clone ID: LIB3139-081-P1-N1-G5
ccagttatgtctccactttcactccactccgagtccaagtgcagctccctcaactacactccccggcggtcatattatatcccacctcctgtagtatcttgatctaggaccccttacccgtgcgtctgctgatagttgactgactcgtgctgtttccatccgcgtttagatccgtgtgctgtctgataataggtgtgctttgctgtatgctactctttgcattggtagtggtgttggtggttcgatatattggtgccgtgttggcatgatgcacttgcacgcttggatagcaccctctcttttgttcttcatgctgcatgcaccttgtttgg

SEQ ID NO: 48914 - DNA, 366 bp, Glycine max
  unsure at all n locations
  Clone ID: LIB3139-081-P1-N1-H10
atttcaataattccattctctctgtgnatgggctgccggttccttcaagaggcgggtcttcaacaagaccctcaccggcaagaccatcacccttgaggtggaaagctctgacaccatcgacaacgtcaaggccaagatccaggacaaggaaggaatccccccggaccagcaacgtctcattttcgccggaaagcaacttgaggacggccgtacccttgctgactacaacattcagaaggagagtactcttcacctcgtcctccgtctccgtggtggcatgcatatcttcgttaagacactcaccggcaagaccataaccctagaggttgaaagctccgacaccatcgattacgtcaaggccaagat

SEQ ID NO: 48915 - DNA, 359 bp, Glycine max
  unsure at all n locations
  Clone ID: LIB3139-081-P1-N1-H7
caatatcttttcacaanatnngatnnnntcagggccgttcaaataacattttcagcaacataataaancccattccttttatacttttataacctgccttgatattaaaaatacctttcaatctctcacattatttaattttttatatataacacttacaacaatttcatatgattaatattattttcatattcatttctctttatatcattctatctcttacttccatgacattattttattttttccatttcttcctacataatcttaaacgtcccttatttaaatagttcttcactatcttaatatttatctcaaacatttttttaattcaataatttaatattttatacattaaa

SEQ ID NO: 48916 - DNA, 297 bp, Glycine max
  Clone ID: LIB3139-082-P1-N1-A1
cagggtgccgcaccttataaccggatacaaaagcaatcgttacttgatttcaagaatttctcaatttctctcctacttctttgtgtacgatttcttaagggaaagaaaatcactctctgtgctggtcacagacttcgtgaatcattttcttttccactcctagtttatttgctgaacactctcctatttgatataggacttttgggcaaaattaaaccttttccggttctttctcagatctctgtttaatttcaaggtcaaggcggtgaaattttggattagtgctcccactctcct

SEQ ID NO: 48917 - DNA, 386 bp, Glycine max
  Clone ID: LIB3139-082-P1-N1-A8
ctcgtgctttggtctaagagtttctttatttggggggtgtactataattcaaccataacatacccatgtgctcagttctcaagaagactattgttttctctgaaaaagccatagatgggtattaaggaaatactctttcgtgggagctctgaatattaacagagcatcatcggcagatggggtctgaaggtcctgcagcagctgtgacaggtcatgtaacaggtttcaagaaattccatggagtttctgagtatacaacggagacaattgtcaatactttgacggaatatttgaagaagaagggtttgtcaaaagagttagttattgggagctgcagcattcttgagactgctggtcaaggagcactgatttccctctacaagaca

SEQ ID NO: 48918 - DNA, 358 bp, Glycine max
  Clone ID: LIB3139-082-P1-N1-B6
attaggccatatgtggaaggccaaactattaacgtcatgccagatacgtgatgatatgtttatgattcatgaatatatcttagaatggttttggaatttgaattttctcttttgaggtgactattctaagcaattataaatgttatgttgatttgccaatgtggcttacctccagctgctaactagtactgagtcctgtatatatggccgtttcatgtatacaatcactcgttgaattgtaactttcagtaattatacaaatactaaggatttagtttttctaaaaaaaaaaaaaaaaaaaaaaaaaaaaaaaaaaattaaaaaaaaaataatttaaaattattaaaaaataaaatag

SEQ ID NO: 48919 - DNA, 283 bp, Glycine max
  Clone ID: LIB3139-082-P1-N1-D12
gtctctttcttctgctttaattgtaaagcttacacatttctggcttatcaatatcattaggaagtattaattctttggattctatctgcacctgcgaaagatagagtcaatgcatttgttgactgagcgggctaatatatagagctagaggataatgttttaagatctgaacagagtgtaattcttgcatctcccacctagcctatctacaattgtcaggaaagaggttttaatattgaatagaaatgatttccgttcaacaagttcctgatccataatttat

SEQ ID NO: 48920 - DNA, 312 bp, Glycine max
  Clone ID: LIB3139-082-P1-N1-D7
taatgattggaccgcattttgtggttccgacaccaccgcaacggagctatctgtgattgagagtgtgttcaagctgagagaagcacagcctagtgcaattgtggatgagatgaggaaatccctcattgatacctatgtctgaactgtggtagtaatagtgttttgttttgtgcaatatattgcactgctgattgttaagattttctaatttaagttttggtgatagtttgtcttttgtaatgtgggcatatatattcccatcgtgttgtactcttttttcgttaattgtgatatcatataatatcatgtgct

SEQ ID NO: 48921 - DNA, 58 bp, Glycine max
  Clone ID: LIB3139-082-P1-N1-E10
aaaaaaaaaaaaaaaattaaaaaaaaaaaaaaaaaaaaaaaaaaaaaaaaaaaaaaaa

SEQ ID NO: 48922 - DNA, 297 bp, Glycine max
  Clone ID: LIB3139-082-P1-N1-H9
tctctttaaaaaaatgtaatatggactttgctgtttacttatctagcggtatgaataagatggaatgtggaagtcgcagccgtttgtttgaatagaacgtaaagacgttattgagtttgttttcattttgaagttataattctaccacacatttagcttgcaattgattaccaaaaaataataaaaaacactaaataaaaaataaaaaaaaaaaaaaaaaaaaaaaaaaaaataaaaaatataaaaaaaaaaaaaaaaaaacataatgggggggccgcccctttttgggcttgtccc

SEQ ID NO: 48923 - DNA, 349 bp, Glycine max
  unsure at all n locations
  Clone ID: LIB3139-083-P1-N1-A11
gcagcaatagctatgcttttcacaccccacaagatatacatgctttggagttgcaaggtgttggtaccctgagaacataaataaatagatgtcttctgatgtttcattgcaggggcatgttcaaatgaaaactgtttttctttttgtgcatttctttgcttctaactcatgtaatcaggtaggtacaccaaggtgaagaataatagtctctgaatgctcatcattggcgtgtcgtaaaactgacgatgaaaatgcaggaaaataacagaaaagctagagatgctccaagaaagtaaattaaaaaaaaatgtttccgtcttanaaaaaaaaaaaaaaaaaaaaaaaaata

SEQ ID NO: 48924 - DNA, 199 bp, Glycine max
  unsure at all n locations
  Clone ID: LIB3139-083-P1-N1-A4
atggatttgttttttagaaaataaccataaggctttgggagcctttaattctatgcgtgtgctttctggtactggagactggagttgagatttgcatggtgtttggctgtaatttagtgaatttcttcattttgactntctttctaagaggatgctaccttgcattcttttatcagtttacatagataatatttatttc

SEQ ID NO: 48925 - DNA, 272 bp, Glycine max
  Clone ID: LIB3139-083-P1-N1-A5
cgctccgcaccagtttcaccgcacgaatatcttgttgtttggagcgatccgagaaaaactctgtaaacatgttggtttaccaggacctccttacaggtgatgagcttctctctgactccttccgttacaaggaaattgagaatggaatgctgtgggaagttgaggggaagtgggttgttaaaggagcagttgatgtagacattggtgcaaacccttctgctgagggtggaggagaagatgggggagctgctactactagtcttgtggatcct

SEQ ID NO: 48926 - DNA, 300 bp, Glycine max
  Clone ID: LIB3139-083-P1-N1-A6
gtctttgaagtttctaagatgacttctccctacattaaatgtacagtctctttcttcatagcatttggaaatttggctgatgataccatcaattttgaggcttttccccacaagctggtgcagtttggagagattcaggaaaaagttgcattgaaattgtcacaagaggaatttcttacagcttggtcaactcaggtgcgtcctgcaacaactctgttggctgatgggtgaccatatttggatgcaatggtgcatgatagttcagtgtctacaataccaattgcatttctgttccttggt

SEQ ID NO: 48927 - DNA, 292 bp, Glycine max
  Clone ID: LIB3139-083-P1-N1-A9
cgagaggattctttgtttttttaaagagctctgcaatccttgggggggacataaaaaaactaccaggagttaaatggaagggagcttgcaatgataataaaaaaaaacacttaagggaccgccctgttattgagatgaccgacctccgtataatatccgaccggatcctggatagagaaccagcctaggaatggagaggtcttgttttactatgggcaataaacggtcggacatattagattttagcatttatttaaatttgaatgtttggtggatcataagatgcgcgtgt

SEQ ID NO: 48928 - DNA, 414 bp, Glycine max
  Clone ID: LIB3139-083-P1-N1-B10
ggatttcattaagaatatgattactgggacatcccaagctgactgtgctgttcttatgattgattcgaccactggtggttttgaagctggtatttccaaggatggacagactcgtgaacatgctctgctttcattcacccttggtgtgaaacagatgatttgctgctgtaacaaaatggatgctactacacccaagtattccaaggccaggtatgatgaaattgtgaaggaagtctcttcctacttgaagaaagtaggatacaaccctgacaagattccttttgttcctatctctggttttgagggagacaacatgattgagaggtccacaaaccttgactggtacaagggtccaactctgcttgatgcacttgaccagattagtgagcccaagaggccctctgacaagcccct

SEQ ID NO: 48929 - DNA, 301 bp, Glycine max
  Clone ID: LIB3139-083-P1-N1-B11
tgtttgagggccttatttttttagtcggtcggtagtcgggggggggaccccataaatgctatatgattcctgacccattttttcttttggtgggggaaaatgattcgtgttattttgggatggctgtcttattgcattgtcagatgttcatattccctgctgtttgaattttgtgacactgccttcccaaagtatgttgcttgtttaataattttatttatttttattattcttgtaaaaagatcgtttactataagatatttataattatgaaaatatttttttatgaacacatacttta

SEQ ID NO: 48930 - DNA, 174 bp, Glycine max
  Clone ID: LIB3139-083-P1-N1-D4
gttaagaatgaaattctgagttctaacgccactaaccctatgctgacgcgacttcttgagaactgtaagagtctcaaatatctggttgatgagtgtccttttgcatttgtgaactagtatgtaatattttattcacttaaataaagcgcattactatgtgcaatgagcgtgttt

SEQ ID NO: 48931 - DNA, 403 bp, Glycine max
  Clone ID: LIB3139-083-P1-N1-F1
tatattacttctacaaggctaccacatttaaaactccctctttctacattaaatcaaaaacaatcagggcttctttacattccatcacattttcaccaaaaactggccctttaggaattggaatgggccttttcaatcggagcctttgttggcaacttctaccaggattttgacgtaacttggggagatggtcgtgccaagatactcaacaacggcgatcttctcactctttcccttgacaaagcctctggctcggggtttcagtccaaaaacgagtatctctttggcaagattgatatgcaactcaagcttgtacccggaaattctgcaggcactgtcaccgcctattatttgtcatcaaaaggatcaaattgggatgagattgactttgaattcttgggga

SEQ ID NO: 48932 - DNA, 402 bp, Glycine max
  Clone ID: LIB3139-083-P1-N1-G9
gatgaggcgaggagcagggtgcttgctcccatatatcggctcaaagatgtgattgttggtggcaaccgccgtggctccttgatcaggagaagctcctctggtgaaagttaaggtaaaggtgtttgagtgcacgtggctcctatccttatgttaaaattgaagatgatgacgaaaaattgtatgtcggagaggttgagaatgaaaagtgctacatttgtaaaatgcaggtttggtactaggattggttgacctttcccaattatgaatgccaatgttcaaacattttatgttgtggattttcttctttgtatcgattagcaatgtatagctcttgaagttattcaacatagtaagttatgtattatgattatgtgaaattgttggcagtttaaacacaaaaag

SEQ ID NO: 48933 - DNA, 384 bp, Glycine max
  Clone ID: LIB3139-083-P1-N1-H12
aagctgtaagaaattcctcttgtgcgtcctgcaacaactctgttggctgatgggtgtccatatttgtatgctatggtgcatgatagttcagtgtctacaataccaggtgattttgtcattggtgttaagttgacaaccataaacaatatgtgtgcatatgggcttaatcctggtatttcaggttctcgtcttttgggcaccattcctcagtccatttcacagcaaactgtttggaatcaaatggcaacagtgagaacaccattgaattttgattctagcaagcagagcttttgtcaattttctatcgaccttctcggtggaggaattttagtggacaaaactggagattggatcacacttatacaaaattctccaattagtaac

SEQ ID NO: 48934 - DNA, 108 bp, Glycine max
  Clone ID: LIB3139-084-P1-N1-A7
ttttttttttttttttttttttgagataaaaaatcaacttattggttattatttccttattgaatgtgtgttttgattagttttttttataaaaaaaatcatttcttg

SEQ ID NO: 48935 - DNA, 403 bp, Glycine max
  Clone ID: LIB3139-084-P1-N1-B6
gctcgagttatttaaggctctggctgaacggtgcaagaaacatgggatggatgtgaagtcaattacaatggttcagcttcctgctggttggcaacctggaattccagagggagcagctctttgggatgaagagtgggataaatttgaggatgaaggatttgctaatgatctcacttttgcatcttcaaaaccgaatcctgcatttattgatggagaacaaaatttatctgatgataattctgttcatggttcacctgtgaatgcaaatgggaagcaagaaaattctgctaatggtgattatacagttgaggatgaatcctatgcacacagtgaagatgacttggcaagaagcccccatagtctagctgggaggagtacgttggtagtccttctcgagactttt

SEQ ID NO: 48936 - DNA, 86 bp, Glycine max
  Clone ID: LIB3139-084-P1-N1-D4
tctttttgtgctgctcattgtgtgattttcttttctatttattgttctttttttttcttatttttatttttctttttttttccttt

SEQ ID NO: 48937 - DNA, 115 bp, Glycine max
  Clone ID: LIB3139-084-P1-N1-F8
aaactgtaagagtctcaaatatctggttgatgagtgtccttttgcatttgtgaactagtatgtaatattttattcacttaaataaagcgcattactatgtgcaatgagtgtgttt

SEQ ID NO: 48938 - DNA, 406 bp, Glycine max
  unsure at all n locations
  Clone ID: LIB3139-084-P1-N1-G3
cccatccttcgttccatatttagggccgnaattgcagttcccaggccgaaaaatgttccgtacttgttgtttcttcccaatgctttctcaaactcttgcttgtagtttcagtctttcatgtttcctttgctgctaggaggttgaatgagctggttcaggaccagtctcagttgctacattaccacaatggtcctcttctatacggcaaaatcgccgtcaacctcatctggtatggtaacttcaaaccatcccaaaaggctatcatcaccgatttcgttacctcactgtcatccccagcgtctcaaagcatccaaccctctgttgccacgtggtggaaaaccactgagaagtactaccacctgagtcccaggaaggcttctctctccctctctctcggcgatcaaat

SEQ ID NO: 48939 - DNA, 399 bp, Glycine max
  Clone ID: LIB3139-084-P1-N1-H12
ctcgagccgattcggttcgagcgagaattgtatttgcacagggcagaggaagctcgccaattgagaaggaaagctctctctcgtattgaatggctgcaaaaagctgatgtgcctaccatagcacagattgaagagttccattcgatgcagaggatgatgaatgctcctgattcaaatgataatattgatttactgttgagcattgatttgttgggtttacaaggagcaggtaaagcttttccaaacaaaattgtttttgatgataagcttgtgttggctaacacacaagaattctttgatggaaattttccagtggattcttggttaccaatttttgtgaattgtctttatcctgtaagtcaattaccttcagaagctgtcgttgtaaatgttacatgt

SEQ ID NO: 48940 - DNA, 63 bp, Glycine max
  Clone ID: LIB3139-084-P1-N1-H8
atgtattacatatgtattacagcacaacagcatagccactacattatgaagacaaaaaggaag

SEQ ID NO: 48941 - DNA, 295 bp, Glycine max
  Clone ID: LIB3139-085-P1-N1-A3
tgacaatcccaaacagtctacagtttttgatattctcttgggaatctctcaagattttgaaattgctggtaatactcttatgccagctttttctgttccacaggctactgccagatcttctgaaaatgcggaatcctctgcatgatctggaattcgtgttttctttcgcttgttcgtttgtttaattcaataaaggaaattaggcatgaccctcttgttgagtatgctctgcctatctgaaaatttccacacctcttttaattgtcgtaatgatgtgtgaagtgtgtgttatttt

SEQ ID NO: 48942 - DNA, 104 bp, Glycine max
  Clone ID: LIB3139-085-P1-N1-A9
aaaaaaaaaaaaattaaaaaaaaaaaataaaaaaaaaaaaaaaaggaaaaaaaaaaaaaaaataaaaaaaaaaaaaaaaaaaaaaaaaaaaaaaaaaaaaaaaa

SEQ ID NO: 48943 - DNA, 210 bp, Glycine max
  Clone ID: LIB3139-085-P1-N1-B1
tcgcttcggggggggtggtaacctaattaagggtccatgatatttccaggcctacctttaggggtccttttttgaaaagctttttagctggccttaaattacccattcctgggggttttgccaaaactggggcacctttgcattttaaaaagttggcaaattgggattttttcaaaagaaactttaaccaaatgtctaatgttttggggg

SEQ ID NO: 48944 - DNA, 399 bp, Glycine max
  Clone ID: LIB3139-085-P1-N1-B5
tcgagggaatcttccaggaatttgacttgaacatattggagctagctgaaattctcttagcaaaaatggactagaatatatgatgtatatcatattataaggatcatgcattgtgctatttggggttggttttcatgacaatcctagtggaagggaacttctatcagagctataatgtgttcatcggttaacttgctaccaagtctactctttaaaccagattactaaatactaataggagaggttatctagttgttccattgtacatgattagtttgattctggcactagttactcactcagatttccaactgcagttgctagcaattgaaattttggatttgttgtgtagtagacacatcttattacaaagggtcagcaacatctcagtaattgatt

SEQ ID NO: 48945 - DNA, 85 bp, Glycine max; identical to SEQ ID NO: 38869
  Clone ID: LIB3139-085-P1-N1-D12

SEQ ID NO: 48946 - DNA, 391 bp, Glycine max
  unsure at all n locations
  Clone ID: LIB3139-085-P1-N1-D4
ctagtcgcaagcggccgcccttttttttttctttcaattttgagagaagggaagagaagaggaagaagacgaagaagaatccaaaagcaatcccatctgtgtgtttgcacatcagaagggagggctatcaaactcaaaggattgctctgaatcggtttagtcttcttcgtttttcttcaaattcctcgtgacagatctaatctaatcaggcttttgggggtgtttcagacattgcatgcatatgggntgttgtgttggatgctataaaaggcctacactgagtgctactgtggatgtgccatcgaaagggttggcaacacacggtaacggggtgaggaaaccaagttcatcagaggatttttggaccactagcacgcatgatatggacaac

SEQ ID NO: 48947 - DNA, 92 bp, Glycine max
  Clone ID: LIB3139-085-P1-N1-E12
aaaaaaaaaaataaaataaaaaaaaaaaaaaaaaaaaaaaaaaaaaaaaaaaaaaaaaaaaaaaattaaaaaaaaaaaccaaaaaaaaaaaa

SEQ ID NO: 48948 - DNA, 402 bp, Glycine max
  Clone ID: LIB3139-085-P1-N1-E7
ctagttctagatcgcgagcggccgccctttttttttttttttatatttaaacacactcattgcacatagtaatgcgctttatttaagtgaataaaatattacatactagttcacaaatgcaaaaggacactcatcaaccagatatttgagactcttacagttctcaagaagtcgcgtcagcatagggttagtggcgttagaactcagaatttcattcttaacgccaaaaagaacagccaataaagctactggaaaaggatcaactctagtaagaaaaacaattttcttacctttcccaagtgctgtgcgagtccttttgttgatgtctgaggagcgattgttaactgcagaactaatccaagcagtggtgggtaaaccaccacgtccactaccacatgtaac

SEQ ID NO: 48949 - DNA, 62 bp, Glycine max
  Clone ID: LIB3139-085-P1-N1-G8
ggaatttgatggtttcttttgcacaagttattaatttgatcaaagtttttttcgatgttatc

SEQ ID NO: 48950 - DNA, 309 bp, Glycine max
  Clone ID: LIB3139-085-P4-N4-A3
tgacagtacccaaacagtctacagtttttgatattctcttgggaatctgtcaagattttgaaattgctggggtacgcttatgccagctttttctgttccacaggctactgccagatcttctgaaaatgcggaatcctctgcatgatctggaattcgtgttttctttcgcttgctcgtttgtttaattcaataaaggaaattaggcatgaccctcttgttgagtatgctctgcctatctgaaaatttccacacctcttttaattgccataatgatgtgcgaagtgtgtgtttttttaaacagggggccca

SEQ ID NO: 48951 - DNA, 316 bp, Glycine max
  Clone ID: LIB3139-085-P4-N4-A6
cttcaagcgagtctgcagggaaaatctgcttctagcccggccacaaactccaccagaggcttctacattggttcaacagggtgctacttacaaccctattagaaatgctcccatgcctaaaacttgaatgaatgcttacagagctgcaactgcaggcaaccctcaactagttcaagttcctacaagccaacatcagcagcaatatgtcacctactcacagattcaccatcctttttagtccatggcttccaattctgcttgccctgcgaattatgcttttgattatgcggatcctgctcatgctcaaatatactac

SEQ ID NO: 48952 - DNA, 155 bp, Glycine max
  Clone ID: LIB3139-085-P4-N4-A7
gtaaggctatatccaactggaattctaaacacgactgggattgactgagtgacttcgataattgccacagagtgtgtacaaactcctctgaccaacagaggatgccagcgggtggagggagatctgcccctgactgctcatgcgggatagacaca

SEQ ID NO: 48953 - DNA, 273 bp, Glycine max
  Clone ID: LIB3139-085-P4-N4-A8
ccagggtacgagcatccacactgctttccacacttacgctcatttcaagactatcgcatgattatgcaaacactgggggtacgatcatcccagctaatttataatggcaacaggctactgtcagatcttctcaaaacgcggaatcctctgcgtgatctggaatgcgtgttcccttccgctggttctatcgttcaatacaagaaaggaaattaggcatgaccctctcggggagtatgctctgcctatctgaaaatttccacacctcttttaatt

SEQ ID NO: 48954 - DNA, 478 bp, Glycine max
  Clone ID: LIB3139-085-P4-N4-B3
ctctctttctctctgcttgcggtgcttcacaagccaaatctaacttgggtctgttttctccgagctagggctactatcaatggccggaaaaggagatggtcctgctatcggaatcgatctcggcaccacctactcctgcgtcggagtgtggcagcacgaccgtgtcgaaatcatcgccaatgaccagggtaacagaaccacgccgtcttacgtcgctttcactgattccgagcgtttgatcggtgacgccgccaagaaccaggtcgccatgaaccccgtcaacaccgtcttcgatgctaagcgtttgattggaaggagattttctgatgcctccgttcagagtgacatgaagctatggccatttaaggtcatccctggtcctgctgacaaacctatgattgtggtcaactacaagggtgaggacaagcagttctccgctgaggaaatttcttccatggttctcatgaagatgcgtgag

SEQ ID NO: 48955 - DNA, 252 bp, Glycine max
  Clone ID: LIB3139-085-P4-N4-B6
gttcgccaactgaaaaggaaagctctctctcgtattgaatggctgcagagaagctgatgtgcctacgagtaggacagattgaaaagttccattcgatgcagaggatgatgaatgctcctgattcaaatgataatattgatctactgttgagcattgatttgttgtgtttacaaggagcaggtaaagctttttcaaacaagattgcttttgatgacaagcttgtgttggctaacacacaaaaaattcttttat

SEQ ID NO: 48956 - DNA, 195 bp, Glycine max
  Clone ID: LIB3139-085-P4-N4-C11
taaaggttctatgttggatctttaggagtttcaacatcatcaagagacaatttaaacaaatgtgtgggcatctgagcctgaacctcattgtattgaggatctattctttgtctcaatctggtatcaatctttttaaattggctcttgatgatgttgaaactcctaaaggttctatgatggaccttaaatagtgcc

SEQ ID NO: 48957 - DNA, 424 bp, Glycine max
  Clone ID: LIB3139-085-P4-N4-D1
ctcacacctcatcgtttctctctttagatctctgtttcttctttttctccaagcttcgtttcaccaccacggctgcattactttgtcgaaatggctccaccaattgagaccccaaacaaggtttccagctatcaacagtccccaaaccctcgtcttaacgagaggattctttcatccatttccaggagacacgttgctgcacacccgtggcacgatcttgagataggacccgaagctccaaagatcttcaactgtgtggtcgaaatagggaaaggaagcaaggtgaaatatgaacttgacaaaagaactggacttattatggttgatcgtatactttactcatcagttgtttatcctcacaactatgggtttattccacgtactatttgtgaagacggtgatcccatggatgtcttggttatta

SEQ ID NO: 48958 - DNA, 73 bp, Glycine max
  Clone ID: LIB3139-085-P4-N4-D12
aaaaaaaaaaaaaaaaaattaaaaaaaaaaaaaaaaaaaaaaagaggaggaaaaaaaaaaaaggggggggagg
